United States Patent Application Publication US 2007/0134655 A1 - sequence listing, part 3

SEQ ID NO: 75392 - RNA, 32 nt, Human
caaaucuuaccucuuuaggucacugaugguca

SEQ ID NO: 75393 - RNA, 32 nt, Human
caaaucuuccuuacugucucucuugucacaug

SEQ ID NO: 75394 - RNA, 32 nt, Human
caaaucuucuauggcucucuuuuuaauauaua

SEQ ID NO: 75395 - RNA, 32 nt, Human
caaaucuuucccuuauuucaaggcuuaguuca

SEQ ID NO: 75396 - RNA, 32 nt, Human
caaaugaaaacaauccagcacucugguuaaau

SEQ ID NO: 75397 - RNA, 32 nt, Human
caaaugaaaccugagaccagagacucauuuuc

SEQ ID NO: 75398 - RNA, 25 nt, Human
caaaugaaagcuauggaucuucuca

SEQ ID NO: 75399 - RNA, 32 nt, Human
caaaugaagguggggcggggcagugaggggug

SEQ ID NO: 75400 - RNA, 32 nt, Human
caaaugaaguggagauucaggagcagcaaugg

SEQ ID NO: 75401 - RNA, 32 nt, Human
caaaugaaugaacugcuuucugggcaaacagc

SEQ ID NO: 75402 - RNA, 32 nt, Human
caaaugaaugcagaauuuuagagucuugcuua

SEQ ID NO: 75403 - RNA, 32 nt, Human
caaaugacaacgugucuguccaggucuguccc

SEQ ID NO: 75404 - RNA, 32 nt, Human
caaaugacagaagugaucuugaauuauuuacu

SEQ ID NO: 75405 - RNA, 32 nt, Human
caaaugaccuuuggacagggaagggaggcagu

SEQ ID NO: 75406 - RNA, 32 nt, Human
caaaugacuauccugaacaggguggaggggug

SEQ ID NO: 75407 - RNA, 32 nt, Human
caaaugacuugucauuggcacuuucagucuuu

SEQ ID NO: 75408 - RNA, 32 nt, Human
caaaugagaauagaaggcaacaacauauagag

SEQ ID NO: 75409 - RNA, 32 nt, Human
caaaugagagaaagcaaagacccuaaggauga

SEQ ID NO: 75410 - RNA, 32 nt, Human
caaaugagagccugggcuuggugucgagggag

SEQ ID NO: 75411 - RNA, 32 nt, Human
caaaugagcaacaaaccaauacccauaaagac

SEQ ID NO: 75412 - RNA, 32 nt, Human
caaaugagcauucuaucuuuuggcuuucagag

SEQ ID NO: 75413 - RNA, 20 nt, Human
caaaugaggaaacugaggcu

SEQ ID NO: 75414 - RNA, 32 nt, Human
caaaugaggagagagaagaugagguuggacaa

SEQ ID NO: 75415 - RNA, 32 nt, Human
caaaugaggguuuggcaugcagcucgucaucu

SEQ ID NO: 75416 - RNA, 32 nt, Human
caaaugaggucagugugccucacuacagagcu

SEQ ID NO: 75417 - RNA, 32 nt, Human
caaaugagugccugaucaucaacucaggaaag

SEQ ID NO: 75418 - RNA, 32 nt, Human
caaaugauaguagucacauacacuacacacac

SEQ ID NO: 75419 - RNA, 32 nt, Human
caaaugaucagucucugucuccugggcccugc

SEQ ID NO: 75420 - RNA, 32 nt, Human
caaaugaucguucucacacucauauuagcuca

SEQ ID NO: 75421 - RNA, 19 nt, Human
caaaugaugccacuuccca

SEQ ID NO: 75422 - RNA, 32 nt, Human
caaaugaugguuccuaauacuucacauuagaa

SEQ ID NO: 75423 - RNA, 32 nt, Human
caaaugcaaaugcacacaaacccaugcauaca

SEQ ID NO: 75424 - RNA, 17 nt, Human
caaaugcaagcaucuuc

SEQ ID NO: 75425 - RNA, 32 nt, Human
caaaugcacacaaacccaugcauacacaagca

SEQ ID NO: 75426 - RNA, 32 nt, Human
caaaugcagaacuuggucuuuucauguuaaaa

SEQ ID NO: 75427 - RNA, 32 nt, Human
caaaugcaggcagaucugagaggggcuccagg

SEQ ID NO: 75428 - RNA, 32 nt, Human
caaaugcagggaggggaggcagauggagccca

SEQ ID NO: 75429 - RNA, 32 nt, Human
caaaugcaucauugcacuccagccugggugac

SEQ ID NO: 75430 - RNA, 32 nt, Human
caaaugcauuaccucacacgguugucauuuuu

SEQ ID NO: 75431 - RNA, 32 nt, Human
caaaugccaccuggugcugcgccccauccccg

SEQ ID NO: 75432 - RNA, 32 nt, Human
caaaugccacugccuggacugaaggccuuuca

SEQ ID NO: 75433 - RNA, 32 nt, Human
caaaugccaguucugccacugaagagcuggau

SEQ ID NO: 75434 - RNA, 32 nt, Human
caaaugcccaggaaauugacuuugcaguguca

SEQ ID NO: 75435 - RNA, 32 nt, Human
caaaugcccauguuggccuuuuacagcagugc

SEQ ID NO: 75436 - RNA, 32 nt, Human
caaaugccccugagagagcagcaguauacugg

SEQ ID NO: 75437 - RNA, 32 nt, Human
caaaugcccugagacgguucucuguucgauuu

SEQ ID NO: 75438 - RNA, 32 nt, Human
caaaugccugaggggcucaucgacgccuguga

SEQ ID NO: 75439 - RNA, 32 nt, Human
caaaugccuguaaucccagcacuuugggaggc

SEQ ID NO: 75440 - RNA, 32 nt, Human
caaaugccuguaaucccaguacuuugggaggc

SEQ ID NO: 75441 - RNA, 32 nt, Human
caaaugcuaguuccagcuaaaaacaaguacuu

SEQ ID NO: 75442 - RNA, 32 nt, Human
caaaugcuauguuugcaaaauguggcaucugu

SEQ ID NO: 75443 - RNA, 19 nt, Human
caaaugcucugugcucucu

SEQ ID NO: 75444 - RNA, 32 nt, Human
caaaugcugauggggaggcuggaagacggcag

SEQ ID NO: 75445 - RNA, 32 nt, Human
caaaugcuuagccaaucucuggagccgacaca

SEQ ID NO: 75446 - RNA, 32 nt, Human
caaaugcuuauuuugacuuacaacaagcuuac

SEQ ID NO: 75447 - RNA, 32 nt, Human
caaaugcuuccuggcccccaugcagcaacugc

SEQ ID NO: 75448 - RNA, 32 nt, Human
caaauggaagagagaaagugacacccagcccu

SEQ ID NO: 75449 - RNA, 32 nt, Human
caaauggaagugaaacaauaacaccucuauua

SEQ ID NO: 75450 - RNA, 32 nt, Human
caaauggacacacauaccuggccacgaaccca

SEQ ID NO: 75451 - RNA, 32 nt, Human
caaauggaccaauguccauuugcuuauuggag

SEQ ID NO: 75452 - RNA, 32 nt, Human
caaauggagcagaagaagucaaacaaagaaga

SEQ ID NO: 75453 - RNA, 32 nt, Human
caaauggaucagugacuacgcagacucugugc

SEQ ID NO: 75454 - RNA, 32 nt, Human
caaauggcaaggagcggucuugcuucaggcug

SEQ ID NO: 75455 - RNA, 32 nt, Human
caaauggcaagugggaggauuguuugagccca

SEQ ID NO: 75456 - RNA, 32 nt, Human
caaauggcagggagcugcugggggacugaccc

SEQ ID NO: 75457 - RNA, 32 nt, Human
caaauggcugagauggagguuuccuuuuggaa

SEQ ID NO: 75458 - RNA, 32 nt, Human
caaaugggagguguucuccuuuauauuguguu

SEQ ID NO: 75459 - RNA, 32 nt, Human
caaauggggauggugaucccugcccuuucuac

SEQ ID NO: 75460 - RNA, 32 nt, Human
caaauggggccagauccagccuggggucugga

SEQ ID NO: 75461 - RNA, 32 nt, Human
caaauggggcugggacuucucauuggccaacc

SEQ ID NO: 75462 - RNA, 32 nt, Human
caaauggggguuuauaaacaccuaccucgcag

SEQ ID NO: 75463 - RNA, 32 nt, Human
caaaugggguccaggucaccagccugacugca

SEQ ID NO: 75464 - RNA, 32 nt, Human
caaauggguggccuguguugaauggcuggccu

SEQ ID NO: 75465 - RNA, 32 nt, Human
caaaugguacuuuuccacaguguaccauuaaa

SEQ ID NO: 75466 - RNA, 32 nt, Human
caaaugguccuccugccucagccuucugaguc

SEQ ID NO: 75467 - RNA, 32 nt, Human
caaauggugaaugcucauccugccuggauuca

SEQ ID NO: 75468 - RNA, 32 nt, Human
caaauggugcacaaauuuuucuaggguuugua

SEQ ID NO: 75469 - RNA, 32 nt, Human
caaauggugggaccucaccuguucugaugggg

SEQ ID NO: 75470 - RNA, 31 nt, Human
caaaugguuaugucucccuucgagagaaaga

SEQ ID NO: 75471 - RNA, 32 nt, Human
caaaugguucauguggacacacaaaggcaaac

SEQ ID NO: 75472 - RNA, 32 nt, Human
caaaugguuguucaaaagauguauuaccauau

SEQ ID NO: 75473 - RNA, 32 nt, Human
caaauguacugaggcuggagccugugugaaca

SEQ ID NO: 75474 - RNA, 32 nt, Human
caaauguauaccuuugagaacagugccuucuc

SEQ ID NO: 75475 - RNA, 32 nt, Human
caaaugucaacagcaccgagguugagaacucu

SEQ ID NO: 75476 - RNA, 32 nt, Human
caaaugucaagaaggaugucagcugugaaugg

SEQ ID NO: 75477 - RNA, 32 nt, Human
caaaugucauuucccucuacugccucuuccug

SEQ ID NO: 75478 - RNA, 32 nt, Human
caaauguccaugucuaagaugaauauuuaacu

SEQ ID NO: 75479 - RNA, 32 nt, Human
caaauguccccaaagcaugucauuuuaguaau

SEQ ID NO: 75480 - RNA, 32 nt, Human
caaaugucccuaacuucauuuguuuucuaggc

SEQ ID NO: 75481 - RNA, 32 nt, Human
caaaugugaaacacuagggccaaucugagaug

SEQ ID NO: 75482 - RNA, 32 nt, Human
caaaugugaaguauuaauauuaucgcaguauu

SEQ ID NO: 75483 - RNA, 19 nt, Human
caaaugugaggggcugcuu

SEQ ID NO: 75484 - RNA, 32 nt, Human
caaaugugaguuuggaaagaaacuggacugga

SEQ ID NO: 75485 - RNA, 32 nt, Human
caaaugugaugcaugauccaggauauucuuuu

SEQ ID NO: 75486 - RNA, 30 nt, Human
caaaugugccucuccagacugcuccugcac

SEQ ID NO: 75487 - RNA, 32 nt, Human
caaauguguaccuguaaggaauuuguacuuuu

SEQ ID NO: 75488 - RNA, 28 nt, Human
caaauguguuuaaacacagaauggguug

SEQ ID NO: 75489 - RNA, 32 nt, Human
caaauguuaaaauaaaggaauaguuuauugcu

SEQ ID NO: 75490 - RNA, 32 nt, Human
caaauguucaggaagcacagggauggaaaccu

SEQ ID NO: 75491 - RNA, 28 nt, Human
caaauguuccagguauuuaagccacaug

SEQ ID NO: 75492 - RNA, 32 nt, Human
caaauguugggauuugaacccagguaguuggg

SEQ ID NO: 75493 - RNA, 32 nt, Human
caaauguuguuuuacuuccucacugucagccu

SEQ ID NO: 75494 - RNA, 32 nt, Human
caaauguuucaggcguacauacauaggcagaa

SEQ ID NO: 75495 - RNA, 32 nt, Human
caaauguuucugcaguagucucugugcuuuga

SEQ ID NO: 75496 - RNA, 32 nt, Human
caaauguuugcugacuccuacucugcgugacu

SEQ ID NO: 75497 - RNA, 32 nt, Human
caaauuaaaaccacaaugaggccaggcacagc

SEQ ID NO: 75498 - RNA, 32 nt, Human
caaauuaaaauguuaagcugcuggaagccuca

SEQ ID NO: 75499 - RNA, 32 nt, Human
caaauuaaacuggaaaaguauccagagucuca

SEQ ID NO: 75500 - RNA, 32 nt, Human
caaauuaaaggcagugaaacagaccuucaacc

SEQ ID NO: 75501 - RNA, 32 nt, Human
caaauuaaccucauacccagaaacccaucauc

SEQ ID NO: 75502 - RNA, 32 nt, Human
caaauuaacucauguaucauacuuuuaugucu

SEQ ID NO: 75503 - RNA, 32 nt, Human
caaauuacccauucucuuuuucuucagauuuu

SEQ ID NO: 75504 - RNA, 32 nt, Human
caaauuaccugacacagagcagacauucaaua

SEQ ID NO: 75505 - RNA, 32 nt, Human
caaauuacuggacugagguguccuccugccuc

SEQ ID NO: 75506 - RNA, 32 nt, Human
caaauuagaagugcuugagaugugacaugacc

SEQ ID NO: 75507 - RNA, 32 nt, Human
caaauuauaacugcaguuauuuuugcauggua

SEQ ID NO: 75508 - RNA, 32 nt, Human
caaauuauaggcagauuaccagguucuuauaa

SEQ ID NO: 75509 - RNA, 32 nt, Human
caaauuaugccuguuuuucuguaucuugcguu

SEQ ID NO: 75510 - RNA, 32 nt, Human
caaauuauuuuuccuuuuuccuuucuuucuug

SEQ ID NO: 75511 - RNA, 32 nt, Human
caaauucacagaagccuggagccuauauacca

SEQ ID NO: 75512 - RNA, 32 nt, Human
caaauucacagcuggugggccagacugguguu

SEQ ID NO: 75513 - RNA, 32 nt, Human
caaauucacccccauucuccacugcuuuucau

SEQ ID NO: 75514 - RNA, 32 nt, Human
caaauucagacucuugaggugaaaccaggaau

SEQ ID NO: 75515 - RNA, 32 nt, Human
caaauucccagcuccccacugagguguuguga

SEQ ID NO: 75516 - RNA, 32 nt, Human
caaauucccaggaguagaccagcaucucuggu

SEQ ID NO: 75517 - RNA, 32 nt, Human
caaauuccuaagccuccugggcacagagauca

SEQ ID NO: 75518 - RNA, 32 nt, Human
caaauuccugacuuacauuugcacuggcuucu

SEQ ID NO: 75519 - RNA, 32 nt, Human
caaauuccuggcucacugagcaucaaaagggg

SEQ ID NO: 75520 - RNA, 32 nt, Human
caaauucuccuugggccucaggcaaauaguuu

SEQ ID NO: 75521 - RNA, 32 nt, Human
caaauucugcagcugucugcugcucuaaagag

SEQ ID NO: 75522 - RNA, 32 nt, Human
caaauucugccacuccagcuccuggguuaggg

SEQ ID NO: 75523 - RNA, 32 nt, Human
caaauucuggcugcgggucucagaaccgagug

SEQ ID NO: 75524 - RNA, 32 nt, Human
caaauucugguuccuuucaccuauguaaccgc

SEQ ID NO: 75525 - RNA, 32 nt, Human
caaauucuuugaucuucucuuccaccucucug

SEQ ID NO: 75526 - RNA, 21 nt, Human
caaauugagaaaaagucacag

SEQ ID NO: 75527 - RNA, 32 nt, Human
caaauugagauuguugccacugugguuugcca

SEQ ID NO: 75528 - RNA, 32 nt, Human
caaauugagguggaggugggcgguucaguauc

SEQ ID NO: 75529 - RNA, 32 nt, Human
caaauugcagggaggggagggagcgagggcca

SEQ ID NO: 75530 - RNA, 32 nt, Human
caaauugccagucaccucuuugucucucucuu

SEQ ID NO: 75531 - RNA, 32 nt, Human
caaauugccauccugagggguucaacagggaa

SEQ ID NO: 75532 - RNA, 32 nt, Human
caaauugcccaagguuacacagcuggucagua

SEQ ID NO: 75533 - RNA, 32 nt, Human
caaauugcccuuuaacugcaccugaauccuuu

SEQ ID NO: 75534 - RNA, 23 nt, Human
caaauugccgggauuacaggcau

SEQ ID NO: 75535 - RNA, 23 nt, Human
caaauugcugggauuacaggcau

SEQ ID NO: 75536 - RNA, 23 nt, Human
caaauugcugggauuccaggcau

SEQ ID NO: 75537 - RNA, 24 nt, Human
caaauugcugggauuuacaggcau

SEQ ID NO: 75538 - RNA, 32 nt, Human
caaauuggaaaccauguugaagagcuccaguu

SEQ ID NO: 75539 - RNA, 32 nt, Human
caaauugggaaugacuuaaugucaauuuguuu

SEQ ID NO: 75540 - RNA, 32 nt, Human
caaauuguccccaagccuauauguauuaaaau

SEQ ID NO: 75541 - RNA, 32 nt, Human
caaauugucugucauucaaauuauaacugcag

SEQ ID NO: 75542 - RNA, 32 nt, Human
caaauugugaagaucaaauguguguuaagaaa

SEQ ID NO: 75543 - RNA, 32 nt, Human
caaauugugcuuaaaaggaagcuacuaauaag

SEQ ID NO: 75544 - RNA, 32 nt, Human
caaauuguuuuucucaugaaugacaucuacuu

SEQ ID NO: 75545 - RNA, 32 nt, Human
caaauuuaaagauaucuuucuccucuugauca

SEQ ID NO: 75546 - RNA, 32 nt, Human
caaauuuauaaauauuugcuuacaguuuuccu

SEQ ID NO: 75547 - RNA, 32 nt, Human
caaauuuauuggcauuuaauauuggacaucug

SEQ ID NO: 75548 - RNA, 23 nt, Human
caaauuucagaucguguuuccaa

SEQ ID NO: 75549 - RNA, 32 nt, Human
caaauuucauacaaucauauuucccaguacuu

SEQ ID NO: 75550 - RNA, 32 nt, Human
caaauuucauuucccauucuguugcuugccuu

SEQ ID NO: 75551 - RNA, 16 nt, Human
caaauuucugauguca

SEQ ID NO: 75552 - RNA, 32 nt, Human
caaauuucuguucuacaagcauguuguguggc

SEQ ID NO: 75553 - RNA, 32 nt, Human
caaauuugaauggauuaaauggcaccuguaua

SEQ ID NO: 75554 - RNA, 31 nt, Human
caaauuugacuucuuugcagaaaagggaggg

SEQ ID NO: 75555 - RNA, 32 nt, Human
caaauuugcaucccggagguugaaguuggagu

SEQ ID NO: 75556 - RNA, 32 nt, Human
caaauuugcgccacugcauucuagccugagug

SEQ ID NO: 75557 - RNA, 32 nt, Human
caaauuugcuugauuauaauagaacuguagaa

SEQ ID NO: 75558 - RNA, 32 nt, Human
caaauuuggaccugccaccagcuccagagcuu

SEQ ID NO: 75559 - RNA, 32 nt, Human
caaauuuggugucuggugaggguccucuuccu

SEQ ID NO: 75560 - RNA, 32 nt, Human
caaauuugguuaguccuuggaucagagccugu

SEQ ID NO: 75561 - RNA, 32 nt, Human
caaauuuguaaugguugucacaugucacaugc

SEQ ID NO: 75562 - RNA, 32 nt, Human
caaauuuuaaaacugugucuguuguagucuau

SEQ ID NO: 75563 - RNA, 32 nt, Human
caaauuuuauuacuuugccaaaauuagcaaaa

SEQ ID NO: 75564 - RNA, 32 nt, Human
caaauuuucuaugcaaacuugccuccugcugu

SEQ ID NO: 75565 - RNA, 18 nt, Human
caaauuuuguagauaaca

SEQ ID NO: 75566 - RNA, 32 nt, Human
caaauuuuugcuucuagaauuuccuugggguc

SEQ ID NO: 75567 - RNA, 32 nt, Human
caacaaaaagaguguuucaaagcugcucaaug

SEQ ID NO: 75568 - RNA, 32 nt, Human
caacaaaaaggaggcaugagauucaggaagca

SEQ ID NO: 75569 - RNA, 32 nt, Human
caacaaaacuccugugauaccaugaagucuuc

SEQ ID NO: 75570 - RNA, 32 nt, Human
caacaaaagcagguugagauggggaagaugac

SEQ ID NO: 75571 - RNA, 32 nt, Human
caacaaaauacuagguaagucacugcagaccg

SEQ ID NO: 75572 - RNA, 32 nt, Human
caacaaacaaaugagcaacaaaccaauaccca

SEQ ID NO: 75573 - RNA, 32 nt, Human
caacaaacagcuacagacucaguggcuuccac

SEQ ID NO: 75574 - RNA, 32 nt, Human
caacaaacagcuacagacucaguggcuuccau

SEQ ID NO: 75575 - RNA, 32 nt, Human
caacaaacagggaaguaaaggaagagacacau

SEQ ID NO: 75576 - RNA, 32 nt, Human
caacaaacccugaagaguacugaagauuuaga

SEQ ID NO: 75577 - RNA, 32 nt, Human
caacaaaggauuauguccgaguauuuauuuuc

SEQ ID NO: 75578 - RNA, 32 nt, Human
caacaaaggcaaaugcugucaagaaguaggcu

SEQ ID NO: 75579 - RNA, 32 nt, Human
caacaaaggcuugaugcaccaggccugacuuu

SEQ ID NO: 75580 - RNA, 32 nt, Human
caacaaagguggcagcaguugaaggaagagau

SEQ ID NO: 75581 - RNA, 32 nt, Human
caacaaauagagucaaaagaagagaggcacag

SEQ ID NO: 75582 - RNA, 32 nt, Human
caacaaauagccacagaacguaggugugacac

SEQ ID NO: 75583 - RNA, 32 nt, Human
caacaaauccaagguccaacagccuggauuau

SEQ ID NO: 75584 - RNA, 32 nt, Human
caacaaauggugagcuggaacaugcccugucu

SEQ ID NO: 75585 - RNA, 32 nt, Human
caacaaauguuuguugagugacugagugaccc

SEQ ID NO: 75586 - RNA, 32 nt, Human
caacaaauuguacagcugcacacagaacaccu

SEQ ID NO: 75587 - RNA, 32 nt, Human
caacaacaacaacaaaacaauguucuugguuu

SEQ ID NO: 75588 - RNA, 32 nt, Human
caacaacaacaacaacaaaacaauguucuugg

SEQ ID NO: 75589 - RNA, 32 nt, Human
caacaacacacacgcacacacgcacacacaca

SEQ ID NO: 75590 - RNA, 32 nt, Human
caacaacagcagaguuguuaagaaaaaugaag

SEQ ID NO: 75591 - RNA, 32 nt, Human
caacaacagccgacccuccccgccccaccccc

SEQ ID NO: 75592 - RNA, 32 nt, Human
caacaacaggcacacaccaccaugcucaacua

SEQ ID NO: 75593 - RNA, 32 nt, Human
caacaaccaccacuacaccacacaugcuuaua

SEQ ID NO: 75594 - RNA, 32 nt, Human
caacaacccaagagaaucaacaggcagggauu

SEQ ID NO: 75595 - RNA, 32 nt, Human
caacaaccccgcacgagugcacugugagaccu

SEQ ID NO: 75596 - RNA, 32 nt, Human
caacaaccccuaaacaauuuauacauugaagc

SEQ ID NO: 75597 - RNA, 32 nt, Human
caacaaccucuuuggacucagcuccugccucu

SEQ ID NO: 75598 - RNA, 32 nt, Human
caacaacuauuuuuauuucauuuuucaugcac

SEQ ID NO: 75599 - RNA, 23 nt, Human
caacaacugaguuugcugucuca

SEQ ID NO: 75600 - RNA, 32 nt, Human
caacaacugcacuuuagaauaccagcagugaa

SEQ ID NO: 75601 - RNA, 32 nt, Human
caacaacugcagccaggcugggcagagcacuc

SEQ ID NO: 75602 - RNA, 32 nt, Human
caacaacugcagcucccaccagccugccaggc

SEQ ID NO: 75603 - RNA, 19 nt, Human
caacaacuugaagaccuca

SEQ ID NO: 75604 - RNA, 32 nt, Human
caacaacuuguccauggaggaggaauuucuca

SEQ ID NO: 75605 - RNA, 21 nt, Human
caacaacuuuuuugcccuccc

SEQ ID NO: 75606 - RNA, 32 nt, Human
caacaagaaauaccaauaacacacacagaaca

SEQ ID NO: 75607 - RNA, 32 nt, Human
caacaagaagaagaagaagucaggucagcaga

SEQ ID NO: 75608 - RNA, 32 nt, Human
caacaagaauacugcuguugacacuccagugg

SEQ ID NO: 75609 - RNA, 32 nt, Human
caacaagacccccagccuacauuucucagcuc

SEQ ID NO: 75610 - RNA, 32 nt, Human
caacaagauccuuaaugcagagcuagaggacu

SEQ ID NO: 75611 - RNA, 32 nt, Human
caacaagcacaguucugaucacuucuccagag

SEQ ID NO: 75612 - RNA, 22 nt, Human
caacaagcauugcuucccaaag

SEQ ID NO: 75613 - RNA, 32 nt, Human
caacaagcauuguucuaggaaccagggauacg

SEQ ID NO: 75614 - RNA, 32 nt, Human
caacaagcccuugagcccccagaaggagaccg

SEQ ID NO: 75615 - RNA, 32 nt, Human
caacaagcugucccucagggacccucaccugc

SEQ ID NO: 75616 - RNA, 32 nt, Human
caacaagcuugcugaagaagcugcauguagau

SEQ ID NO: 75617 - RNA, 32 nt, Human
caacaaggaacucaaggaaaauuuguaccugc

SEQ ID NO: 75618 - RNA, 32 nt, Human
caacaaggagagagucuguuuuucuuccuaaa

SEQ ID NO: 75619 - RNA, 32 nt, Human
caacaaggaucucauguuuugugggucagaga

SEQ ID NO: 75620 - RNA, 32 nt, Human
caacaaggcugugccugagcccaaagccacac

SEQ ID NO: 75621 - RNA, 32 nt, Human
caacaagggaaacuuuauuguucccguggggc

SEQ ID NO: 75622 - RNA, 19 nt, Human
caacaagggacaagacagg

SEQ ID NO: 75623 - RNA, 32 nt, Human
caacaaguacugcaagaaggagcucaguuacg

SEQ ID NO: 75624 - RNA, 32 nt, Human
caacaagucuccgggcaacaguguggucaaaa

SEQ ID NO: 75625 - RNA, 32 nt, Human
caacaaguggcgucugaacacgggacuucgac

SEQ ID NO: 75626 - RNA, 32 nt, Human
caacaaguuccucaucuucaucugaggccacc

SEQ ID NO: 75627 - RNA, 32 nt, Human
caacaaguuggcucuugagaauggcaguaaac

SEQ ID NO: 75628 - RNA, 32 nt, Human
caacaauacagaaacaaugucuucuuacuggc

SEQ ID NO: 75629 - RNA, 32 nt, Human
caacaauacuaccucacuacuacaucugugau

SEQ ID NO: 75630 - RNA, 32 nt, Human
caacaauagcaccuugaaaaucugcccuaaaa

SEQ ID NO: 75631 - RNA, 32 nt, Human
caacaauaggguggggagcuaaggggcaacag

SEQ ID NO: 75632 - RNA, 22 nt, Human
caacaaucagucaucaugggug

SEQ ID NO: 75633 - RNA, 32 nt, Human
caacaauccuuccagccaccugccucaacugc

SEQ ID NO: 75634 - RNA, 32 nt, Human
caacaaucuagaccuggugaucauucgagagc

SEQ ID NO: 75635 - RNA, 32 nt, Human
caacaaucuucauuguaaguucuguccuacag

SEQ ID NO: 75636 - RNA, 32 nt, Human
caacaaugaguaagccaucacacagaagaggg

SEQ ID NO: 75637 - RNA, 32 nt, Human
caacaaugauguccagugugugcugcugagug

SEQ ID NO: 75638 - RNA, 32 nt, Human
caacaaugcacaaggcaugcaucauuauucuc

SEQ ID NO: 75639 - RNA, 32 nt, Human
caacaauggacaccuccagagccuccagggga

SEQ ID NO: 75640 - RNA, 30 nt, Human
caacaauggccgcuccacagagucgcccca

SEQ ID NO: 75641 - RNA, 30 nt, Human
caacaaugggaauggaaaagacucauauca

SEQ ID NO: 75642 - RNA, 32 nt, Human
caacaauguccauuacucccccaaaccuccug

SEQ ID NO: 75643 - RNA, 32 nt, Human
caacaauuuaacauccagauuuuuaucuuaug

SEQ ID NO: 75644 - RNA, 32 nt, Human
caacaauuugggaggccaaggcaagcaaauca

SEQ ID NO: 75645 - RNA, 32 nt, Human
caacaauuugggaggcugaggcaggcagauca

SEQ ID NO: 75646 - RNA, 32 nt, Human
caacacaaagacacaggaagaaugggcugcag

SEQ ID NO: 75647 - RNA, 32 nt, Human
caacacaaccagcagagugacacauacuaucu

SEQ ID NO: 75648 - RNA, 32 nt, Human
caacacaaccagcagagugcacauacuaucua

SEQ ID NO: 75649 - RNA, 32 nt, Human
caacacaacccauggagauguccccuucucac

SEQ ID NO: 75650 - RNA, 32 nt, Human
caacacacacagacaaacacagccacacgcgc

SEQ ID NO: 75651 - RNA, 32 nt, Human
caacacacagaauuucagggaagaguucuccc

SEQ ID NO: 75652 - RNA, 32 nt, Human
caacacaccagugcaacaaagacucagcugcc

SEQ ID NO: 75653 - RNA, 32 nt, Human
caacacacccgacuaauuuuuguauuuuuagu

SEQ ID NO: 75654 - RNA, 32 nt, Human
caacacacccggcuaauuuuuguauuuguaga

SEQ ID NO: 75655 - RNA, 32 nt, Human
caacacacccggcuaauuuuuguauuuuuagu

SEQ ID NO: 75656 - RNA, 32 nt, Human
caacacaccuugcccaugcacaaggaaugaau

SEQ ID NO: 75657 - RNA, 16 nt, Human
caacacacgguccaca

SEQ ID NO: 75658 - RNA, 32 nt, Human
caacacagaaaaguccucugaagucacugaau

SEQ ID NO: 75659 - RNA, 32 nt, Human
caacacagacacacauaucccuucaaaaacuu

SEQ ID NO: 75660 - RNA, 32 nt, Human
caacacagaugguagcugcacagcuugcauca

SEQ ID NO: 75661 - RNA, 32 nt, Human
caacacagccugggccccagcucgcgggaccc

SEQ ID NO: 75662 - RNA, 32 nt, Human
caacacagcugaugcuggagccaggauuaaaa

SEQ ID NO: 75663 - RNA, 24 nt, Human
caacacaggagauuucuauaguua

SEQ ID NO: 75664 - RNA, 18 nt, Human
caacacaggagcgugccu

SEQ ID NO: 75665 - RNA, 32 nt, Human
caacacaggaggaucacuugagacuggaguuu

SEQ ID NO: 75666 - RNA, 32 nt, Human
caacacaggccacauuaacaccuucugcuaug

SEQ ID NO: 75667 - RNA, 32 nt, Human
caacacaggcugggcgcgguggcucacaccua

SEQ ID NO: 75668 - RNA, 32 nt, Human
caacacagggcuggagguucuacaacaggaaa

SEQ ID NO: 75669 - RNA, 32 nt, Human
caacacaguaagcccugcucccuucccugcuc

SEQ ID NO: 75670 - RNA, 32 nt, Human
caacacaguuugaacguggugaaacagggugu

SEQ ID NO: 75671 - RNA, 32 nt, Human
caacacauaauccucuccaacuggauuauaaa

SEQ ID NO: 75672 - RNA, 32 nt, Human
caacacauauacaaucaucucccaccucccaa

SEQ ID NO: 75673 - RNA, 32 nt, Human
caacacauggaccacacuuuauauagcacugu

SEQ ID NO: 75674 - RNA, 32 nt, Human
caacacauucucauuccugucauuaucaguug

SEQ ID NO: 75675 - RNA, 32 nt, Human
caacacauuugguguucacacuucuucaguaa

SEQ ID NO: 75676 - RNA, 19 nt, Human
caacaccaaaugcuggagg

SEQ ID NO: 75677 - RNA, 22 nt, Human
caacaccaacaccuccucucca

SEQ ID NO: 75678 - RNA, 32 nt, Human
caacaccaaugccccaaccuucccccacagcu

SEQ ID NO: 75679 - RNA, 32 nt, Human
caacaccacccucacacacuggcuccagcugc

SEQ ID NO: 75680 - RNA, 32 nt, Human
caacaccaccgccaccaccucccacaucccug

SEQ ID NO: 75681 - RNA, 32 nt, Human
caacaccacugccaccaccccucuuuuuaucc

SEQ ID NO: 75682 - RNA, 22 nt, Human
caacaccagagaccaggaucca

SEQ ID NO: 75683 - RNA, 32 nt, Human
caacaccagcagcagcagcagccccggcggcg

SEQ ID NO: 75684 - RNA, 32 nt, Human
caacaccaggaucagcuuugagaaccgggagg

SEQ ID NO: 75685 - RNA, 21 nt, Human
caacaccaggaugagguccca

SEQ ID NO: 75686 - RNA, 32 nt, Human
caacaccaucugccugggaguccuccugggcc

SEQ ID NO: 75687 - RNA, 32 nt, Human
caacaccauggacugaacacccacugggcuaa

SEQ ID NO: 75688 - RNA, 32 nt, Human
caacaccauggacugaacaccugcugggcucc

SEQ ID NO: 75689 - RNA, 32 nt, Human
caacacccaacaacaggaagaaaucucaaaau

SEQ ID NO: 75690 - RNA, 31 nt, Human
caacacccaaugucugcuccauaccaggacc

SEQ ID NO: 75691 - RNA, 32 nt, Human
caacaccccaccccucugccaaccgggguaug

SEQ ID NO: 75692 - RNA, 32 nt, Human
caacaccccagcaagguacacagccauccagg

SEQ ID NO: 75693 - RNA, 32 nt, Human
caacaccccgggcuguuucacaagcaaguggu

SEQ ID NO: 75694 - RNA, 32 nt, Human
caacaccccugcccaugcgcgggaggcugcag

SEQ ID NO: 75695 - RNA, 32 nt, Human
caacaccccugcccggccccugagcugccucc

SEQ ID NO: 75696 - RNA, 32 nt, Human
caacaccccugggaacggacucgcgucuccgc

SEQ ID NO: 75697 - RNA, 32 nt, Human
caacacccuccaccuuccccuccaugccaaua

SEQ ID NO: 75698 - RNA, 32 nt, Human
caacacccuccccacccagucuccccgccccc

SEQ ID NO: 75699 - RNA, 32 nt, Human
caacacccucuuuuggcccagcuccugcccag

SEQ ID NO: 75700 - RNA, 32 nt, Human
caacacccugcacuccugcuugcgccggcagc

SEQ ID NO: 75701 - RNA, 32 nt, Human
caacacccugcuggccucuuguggagccagau

SEQ ID NO: 75702 - RNA, 32 nt, Human
caacaccgcucuccacauuguacagagcuuca

SEQ ID NO: 75703 - RNA, 32 nt, Human
caacaccucacagauuauaauagaaaaagaaa

SEQ ID NO: 75704 - RNA, 32 nt, Human
caacaccuggcuuauuuuuguauuuuuagcag

SEQ ID NO: 75705 - RNA, 32 nt, Human
caacaccugggugacagagcaagaccccaucu

SEQ ID NO: 75706 - RNA, 32 nt, Human
caacaccuguaaucccagcaccuugcgaggcc

SEQ ID NO: 75707 - RNA, 21 nt, Human
caacaccuucccuccaucccu

SEQ ID NO: 75708 - RNA, 32 nt, Human
caacaccuuccuccaccaccauccuuacccag

SEQ ID NO: 75709 - RNA, 32 nt, Human
caacaccuugauguuggaugugaacugugagg

SEQ ID NO: 75710 - RNA, 32 nt, Human
caacaccuugggaggccaaggcaggcagauca

SEQ ID NO: 75711 - RNA, 32 nt, Human
caacacgaucacagcgcccggagaccugcgga

SEQ ID NO: 75712 - RNA, 32 nt, Human
caacacgcccccucuccauuguuuccacacuc

SEQ ID NO: 75713 - RNA, 32 nt, Human
caacacgcccggcuaauuuuucguauuuuuag

SEQ ID NO: 75714 - RNA, 32 nt, Human
caacacggugaaacccugucacuacuaaaauu

SEQ ID NO: 75715 - RNA, 32 nt, Human
caacacgugggagaggaggcgagcccacgggg

SEQ ID NO: 75716 - RNA, 32 nt, Human
caacacguguuucugugugcagcagaggccgu

SEQ ID NO: 75717 - RNA, 32 nt, Human
caacacguuuuccucucugagucccagcuaug

SEQ ID NO: 75718 - RNA, 32 nt, Human
caacacuaagcccaauuuaaacuguuauuuua

SEQ ID NO: 75719 - RNA, 32 nt, Human
caacacuacacuccagccugggcgacagagca

SEQ ID NO: 75720 - RNA, 32 nt, Human
caacacuccaucuucaaaugcuuagcgauaca

SEQ ID NO: 75721 - RNA, 32 nt, Human
caacacuccccagccuugcuucugccuaaccc

SEQ ID NO: 75722 - RNA, 32 nt, Human
caacacucuccgcuucccccagcacacacaca

SEQ ID NO: 75723 - RNA, 32 nt, Human
caacacucugaucagcaugcaggcgaggggca

SEQ ID NO: 75724 - RNA, 32 nt, Human
caacacucugugggucucuggcauuucuacac

SEQ ID NO: 75725 - RNA, 32 nt, Human
caacacugaaaccuccagaacaaaggcuguca

SEQ ID NO: 75726 - RNA, 23 nt, Human
caacacugacccgaugcugggug

SEQ ID NO: 75727 - RNA, 32 nt, Human
caacacugagcagaucuguucuuugagcuaaa

SEQ ID NO: 75728 - RNA, 22 nt, Human
caacacugagcaggcacucggu

SEQ ID NO: 75729 - RNA, 32 nt, Human
caacacugagcugagcugaggggugccaugga

SEQ ID NO: 75730 - RNA, 32 nt, Human
caacacugcacuccagccugggcgacagagca

SEQ ID NO: 75731 - RNA, 32 nt, Human
caacacugcacuccagccugggcgacagagug

SEQ ID NO: 75732 - RNA, 24 nt, Human
caacacugcacuccagccugggug

SEQ ID NO: 75733 - RNA, 32 nt, Human
caacacugcacuccagccugggugacagaguc

SEQ ID NO: 75734 - RNA, 32 nt, Human
caacacugccacuccagccugggugacagagc

SEQ ID NO: 75735 - RNA, 32 nt, Human
caacacugcucaccacacuauaacuccggagg

SEQ ID NO: 75736 - RNA, 32 nt, Human
caacacugcucaccacaguauagcuccagagg

SEQ ID NO: 75737 - RNA, 32 nt, Human
caacacugcucuucaugaugcugucuaugaua

SEQ ID NO: 75738 - RNA, 32 nt, Human
caacacugcugcccccuuuccucccagacucu

SEQ ID NO: 75739 - RNA, 32 nt, Human
caacacuggcucuugccucacucugaggauca

SEQ ID NO: 75740 - RNA, 32 nt, Human
caacacuguacuccagccugggcaacagaggg

SEQ ID NO: 75741 - RNA, 32 nt, Human
caacacuuacaagcucuacacagucugugagu

SEQ ID NO: 75742 - RNA, 32 nt, Human
caacacuucacagccucauuccugccuuuucu

SEQ ID NO: 75743 - RNA, 32 nt, Human
caacacuuccacugcuauaaccaccaagccac

SEQ ID NO: 75744 - RNA, 32 nt, Human
caacacuuucacccaaauggcuuaauguaaua

SEQ ID NO: 75745 - RNA, 32 nt, Human
caacacuuuccucugccauggcuuggaugccc

SEQ ID NO: 75746 - RNA, 32 nt, Human
caacacuuugggaagccaagggaggaggauca

SEQ ID NO: 75747 - RNA, 32 nt, Human
caacacuuugggaggacaggacagaucacuug

SEQ ID NO: 75748 - RNA, 32 nt, Human
caacacuuugggaggccaaggcaggcagaucg

SEQ ID NO: 75749 - RNA, 32 nt, Human
caacacuuugggaggccaaggcagguagauca

SEQ ID NO: 75750 - RNA, 32 nt, Human
caacacuuugggaggccgaggcaggcagguca

SEQ ID NO: 75751 - RNA, 32 nt, Human
caacacuuugggaggccgaggcaggcggagca

SEQ ID NO: 75752 - RNA, 32 nt, Human
caacacuuugggaggccgaggcaggcggauca

SEQ ID NO: 75753 - RNA, 32 nt, Human
caacacuuugggaggccgaggcaggcggauua

SEQ ID NO: 75754 - RNA, 32 nt, Human
caacacuuugggaggccgaggcgagcagauca

SEQ ID NO: 75755 - RNA, 32 nt, Human
caacacuuugggaggccgaggcgggcggauca

SEQ ID NO: 75756 - RNA, 32 nt, Human
caacacuuugggaggccgaggugggcggauca

SEQ ID NO: 75757 - RNA, 32 nt, Human
caacacuuugggaggcugaagcaggcagauug

SEQ ID NO: 75758 - RNA, 32 nt, Human
caacacuuugggaggcugagacaggagcaucu

SEQ ID NO: 75759 - RNA, 32 nt, Human
caacacuuugggaggcugaggaaggggcauca

SEQ ID NO: 75760 - RNA, 32 nt, Human
caacacuuugggaggcugaggcaggcagauca

SEQ ID NO: 75761 - RNA, 32 nt, Human
caacacuuugggaggcugaggcgggcagauca

SEQ ID NO: 75762 - RNA, 32 nt, Human
caacacuuugggaggcugaggugggcagauca

SEQ ID NO: 75763 - RNA, 32 nt, Human
caacacuuugggagguggaggcagguggauca

SEQ ID NO: 75764 - RNA, 32 nt, Human
caacagaaaguguggaggagaaacucuuggcc

SEQ ID NO: 75765 - RNA, 32 nt, Human
caacagaaaguuaaggaaggaaauggaaaaac

SEQ ID NO: 75766 - RNA, 32 nt, Human
caacagaaaugcaugaguaugugcaccaacag

SEQ ID NO: 75767 - RNA, 32 nt, Human
caacagaaauuauauuuuaauuucucauguga

SEQ ID NO: 75768 - RNA, 32 nt, Human
caacagaaauuuguuucucacaguucuggagg

SEQ ID NO: 75769 - RNA, 32 nt, Human
caacagaacuucacagugacacuggaccaggu

SEQ ID NO: 75770 - RNA, 32 nt, Human
caacagaagcaguugagucgucaucacuuuuc

SEQ ID NO: 75771 - RNA, 18 nt, Human
caacagaagcggcggcgg

SEQ ID NO: 75772 - RNA, 32 nt, Human
caacagaauggguuuccugaaacggauuugca

SEQ ID NO: 75773 - RNA, 32 nt, Human
caacagacaccaccugucaaagcugccuuuca

SEQ ID NO: 75774 - RNA, 32 nt, Human
caacagacagaaguacuuuguagagauugacu

SEQ ID NO: 75775 - RNA, 32 nt, Human
caacagacauccuccacauugugcacacuggu

SEQ ID NO: 75776 - RNA, 32 nt, Human
caacagaccauuauuccucuugaaguuaguuu

SEQ ID NO: 75777 - RNA, 32 nt, Human
caacagacgcagcugcaccugggacagcagac

SEQ ID NO: 75778 - RNA, 32 nt, Human
caacagacgugagccauuuucccagccuguuu

SEQ ID NO: 75779 - RNA, 32 nt, Human
caacagacuggacuucucaacugccauucugg

SEQ ID NO: 75780 - RNA, 32 nt, Human
caacagagagggagaaaccccagugcagcugc

SEQ ID NO: 75781 - RNA, 32 nt, Human
caacagagaucaugagacugaaauuggucaga

SEQ ID NO: 75782 - RNA, 32 nt, Human
caacagagaugaaaguguggcuuuuuaguuuu

SEQ ID NO: 75783 - RNA, 32 nt, Human
caacagagcagcaggggcuggggucuucuccu

SEQ ID NO: 75784 - RNA, 32 nt, Human
caacagagcuccugcugcuucugggugaaccu

SEQ ID NO: 75785 - RNA, 32 nt, Human
caacagaggacugucuuauuccacucuucggc

SEQ ID NO: 75786 - RNA, 32 nt, Human
caacagaggagccacaaaauguucuuuguucu

SEQ ID NO: 75787 - RNA, 32 nt, Human
caacagaggcaauaaaagcugcagugaaauug

SEQ ID NO: 75788 - RNA, 32 nt, Human
caacagagucagugcuaaucuagccaaauuac

SEQ ID NO: 75789 - RNA, 32 nt, Human
caacagagucuaggcuggguucaugacaugau

SEQ ID NO: 75790 - RNA, 32 nt, Human
caacagaugaagacagaugcaccaacgaggcu

SEQ ID NO: 75791 - RNA, 32 nt, Human
caacagaugaagacagaugcaccaacgagggu

SEQ ID NO: 75792 - RNA, 32 nt, Human
caacagaugcagaaccugggaaugacaucacc

SEQ ID NO: 75793 - RNA, 32 nt, Human
caacagaugccauucuggauggcucccuagga

SEQ ID NO: 75794 - RNA, 32 nt, Human
caacagaugcuggcgagguugcgaagaaauag

SEQ ID NO: 75795 - RNA, 32 nt, Human
caacagaugggcugggcugggcuguggugggg

SEQ ID NO: 75796 - RNA, 32 nt, Human
caacagauuuccaucagcaggaugugggggcu

SEQ ID NO: 75797 - RNA, 32 nt, Human
caacagcaacauacagaagauauguucacuca

SEQ ID NO: 75798 - RNA, 31 nt, Human
caacagcacagcuaaauuuccaagucgcaua

SEQ ID NO: 75799 - RNA, 32 nt, Human
caacagcacauccaacuuuuauuuaggaagac

SEQ ID NO: 75800 - RNA, 32 nt, Human
caacagcacccucuccagaugcagccccaucu

SEQ ID NO: 75801 - RNA, 32 nt, Human
caacagcacccugaagaaccuggaccugacag

SEQ ID NO: 75802 - RNA, 32 nt, Human
caacagcacugcccucugaggcugccaugauu

SEQ ID NO: 75803 - RNA, 32 nt, Human
caacagcagcuauuuuggggagcagcuguggc

SEQ ID NO: 75804 - RNA, 32 nt, Human
caacagcagggguaguggaggaagugugggcc

SEQ ID NO: 75805 - RNA, 32 nt, Human
caacagcagugguguccaugggcucuggagac

SEQ ID NO: 75806 - RNA, 31 nt, Human
caacagcaguuucauggaaccucucuuagcu

SEQ ID NO: 75807 - RNA, 32 nt, Human
caacagcauauguaauaugggaauguuuugua

SEQ ID NO: 75808 - RNA, 32 nt, Human
caacagcaucuuagaagaaauguagccaaauu

SEQ ID NO: 75809 - RNA, 32 nt, Human
caacagccaccugggccuggccuccccacugg

SEQ ID NO: 75810 - RNA, 32 nt, Human
caacagccacuugcccgccacauucaaggucu

SEQ ID NO: 75811 - RNA, 20 nt, Human
caacagccaggagcuuccug

SEQ ID NO: 75812 - RNA, 32 nt, Human
caacagccagggcuggaguccaggccacuuuc

SEQ ID NO: 75813 - RNA, 32 nt, Human
caacagccaucaggaguguuucuugaaugccc

SEQ ID NO: 75814 - RNA, 32 nt, Human
caacagccaucuuuucagcaguugccaaccug

SEQ ID NO: 75815 - RNA, 32 nt, Human
caacagccauguccgccugccuggugaacgag

SEQ ID NO: 75816 - RNA, 32 nt, Human
caacagccccacugcaagccugggauauccag

SEQ ID NO: 75817 - RNA, 32 nt, Human
caacagccccagcugugacccccaggcuucca

SEQ ID NO: 75818 - RNA, 32 nt, Human
caacagccccugugcguguccuccuucccgca

SEQ ID NO: 75819 - RNA, 32 nt, Human
caacagcccugccucuguucccucccaguuag

SEQ ID NO: 75820 - RNA, 32 nt, Human
caacagcccuguccacugugagcucugguguu

SEQ ID NO: 75821 - RNA, 32 nt, Human
caacagccuccaccgccaacucaacaaacuuc

SEQ ID NO: 75822 - RNA, 32 nt, Human
caacagccucuauccucauuugucccuuccuc

SEQ ID NO: 75823 - RNA, 32 nt, Human
caacagccucuggaggugaggcgggagcaugc

SEQ ID NO: 75824 - RNA, 32 nt, Human
caacagccugacagaagguucagucuauggag

SEQ ID NO: 75825 - RNA, 32 nt, Human
caacagccuuucagacuauucuucauauguuu

SEQ ID NO: 75826 - RNA, 32 nt, Human
caacagcguuuauugagcaccugcucugugcc

SEQ ID NO: 75827 - RNA, 32 nt, Human
caacagcucagcucuucauccugggcugcaca

SEQ ID NO: 75828 - RNA, 32 nt, Human
caacagcucaucugugaccaacagggcaacug

SEQ ID NO: 75829 - RNA, 32 nt, Human
caacagcucggagcagucccagaagggagggc

SEQ ID NO: 75830 - RNA, 21 nt, Human
caacagcucggccgccccucc

SEQ ID NO: 75831 - RNA, 32 nt, Human
caacagcugauagaagagaacagagacgcaca

SEQ ID NO: 75832 - RNA, 32 nt, Human
caacagcugcaaaauacacauucuucuccuag

SEQ ID NO: 75833 - RNA, 32 nt, Human
caacagcugcaugggccagcuguuucggaucu

SEQ ID NO: 75834 - RNA, 32 nt, Human
caacagcugccuggacccacucaucugcugcu

SEQ ID NO: 75835 - RNA, 32 nt, Human
caacagcugcugcagcugagggagcugagcug

SEQ ID NO: 75836 - RNA, 32 nt, Human
caacagcugggcuggagaguuggugcuggcaa

SEQ ID NO: 75837 - RNA, 32 nt, Human
caacagcuguaacccuuuccugagggccccga

SEQ ID NO: 75838 - RNA, 32 nt, Human
caacagcuucuuugaggacccaguggguaugg

SEQ ID NO: 75839 - RNA, 32 nt, Human
caacaggaagugaaccuuaaggaagagagaau

SEQ ID NO: 75840 - RNA, 32 nt, Human
caacaggaagugagacggauccagaucugugu

SEQ ID NO: 75841 - RNA, 32 nt, Human
caacaggaaugaggaaagaagaaaacuggagu

SEQ ID NO: 75842 - RNA, 32 nt, Human
caacaggaauugaaaaugaaucagaacacuac

SEQ ID NO: 75843 - RNA, 32 nt, Human
caacaggagaaugggguuccugcuguggggcg

SEQ ID NO: 75844 - RNA, 32 nt, Human
caacaggagaggaggaagcccgggaggcaacg

SEQ ID NO: 75845 - RNA, 32 nt, Human
caacaggaggaaaugaaggcagagaaauauag

SEQ ID NO: 75846 - RNA, 32 nt, Human
caacaggaucacaagcuggagaugccuuuaag

SEQ ID NO: 75847 - RNA, 32 nt, Human
caacaggaucugucacccaccucucucuucuc

SEQ ID NO: 75848 - RNA, 32 nt, Human
caacaggaugagagugccugagcugugacggg

SEQ ID NO: 75849 - RNA, 32 nt, Human
caacaggauuugucugcagcagccucugguac

SEQ ID NO: 75850 - RNA, 32 nt, Human
caacaggcaaauucagggaggauagguuucag

SEQ ID NO: 75851 - RNA, 32 nt, Human
caacaggcacccacugacuccagccucaugga

SEQ ID NO: 75852 - RNA, 32 nt, Human
caacaggccugacccagggcacugccucccca

SEQ ID NO: 75853 - RNA, 32 nt, Human
caacaggcuggagggagagggaagcaagacca

SEQ ID NO: 75854 - RNA, 18 nt, Human
caacagggaaacucuuca

SEQ ID NO: 75855 - RNA, 19 nt, Human
caacagggaaggcucuguc

SEQ ID NO: 75856 - RNA, 32 nt, Human
caacagggacggaaggagagaacuuaccccuu

SEQ ID NO: 75857 - RNA, 32 nt, Human
caacagggagcuaggccauugguucucaaacu

SEQ ID NO: 75858 - RNA, 31 nt, Human
caacagggcaaaggaagcaaucagcuaugca

SEQ ID NO: 75859 - RNA, 22 nt, Human
caacagggccccugcccuccug

SEQ ID NO: 75860 - RNA, 32 nt, Human
caacagggcgggaaucagaccuacuccccuag

SEQ ID NO: 75861 - RNA, 16 nt, Human
caacaggggucuguca

SEQ ID NO: 75862 - RNA, 32 nt, Human
caacagggucaccaagcagacagggagcccgc

SEQ ID NO: 75863 - RNA, 21 nt, Human
caacagggucaguuuugugca

SEQ ID NO: 75864 - RNA, 32 nt, Human
caacaggguuagcauggccagcacagaucgcu

SEQ ID NO: 75865 - RNA, 32 nt, Human
caacagguauaugaaaaagugcucaacaucac

SEQ ID NO: 75866 - RNA, 32 nt, Human
caacaggucaccagccuuguucaaguuacagc

SEQ ID NO: 75867 - RNA, 32 nt, Human
caacaggugcaggacugccagggaucggagug

SEQ ID NO: 75868 - RNA, 32 nt, Human
caacagguggagaaggaaagggagcuagagcu

SEQ ID NO: 75869 - RNA, 32 nt, Human
caacagguggugagaaaaauuauguuuuuauu

SEQ ID NO: 75870 - RNA, 32 nt, Human
caacagguuuuacuggucaaaaugacugcuga

SEQ ID NO: 75871 - RNA, 32 nt, Human
caacaguacaggugcacucacagcaugauggc

SEQ ID NO: 75872 - RNA, 32 nt, Human
caacagucaccucacaaaccugaauggucuga

SEQ ID NO: 75873 - RNA, 32 nt, Human
caacaguccuacuccgauguuaucuuucugau

SEQ ID NO: 75874 - RNA, 32 nt, Human
caacagucugcuccucagccugagauguucuu

SEQ ID NO: 75875 - RNA, 32 nt, Human
caacagucuucugguggcaguaguggcaugga

SEQ ID NO: 75876 - RNA, 32 nt, Human
caacagugaccuuccgaaacagccuucugaau

SEQ ID NO: 75877 - RNA, 32 nt, Human
caacagugaccuucugaaacagccuucugaau

SEQ ID NO: 75878 - RNA, 22 nt, Human
caacagugccuugcauguaaca

SEQ ID NO: 75879 - RNA, 31 nt, Human
caacagugcuguuucugacacuucagacauc

SEQ ID NO: 75880 - RNA, 32 nt, Human
caacaguggaauccauguaaaacucucugugc

SEQ ID NO: 75881 - RNA, 32 nt, Human
caacaguggggcagugccuccccgccgcgcug

SEQ ID NO: 75882 - RNA, 32 nt, Human
caacaguuaguggccagcauccuccugcugca

SEQ ID NO: 75883 - RNA, 32 nt, Human
caacaguuaucagcacucagacaugcgaaugu

SEQ ID NO: 75884 - RNA, 32 nt, Human
caacaguuccauggagccaagagggugcaggu

SEQ ID NO: 75885 - RNA, 32 nt, Human
caacaguuuccuuuuuguuuuccuuuauaauu

SEQ ID NO: 75886 - RNA, 32 nt, Human
caacaguuuuccuaugcuuugaaacagaaaaa

SEQ ID NO: 75887 - RNA, 32 nt, Human
caacauaaauccuccccaguugcccagguugu

SEQ ID NO: 75888 - RNA, 32 nt, Human
caacauaaguggauuagaagcccagggaagaa

SEQ ID NO: 75889 - RNA, 18 nt, Human
caacauacaguugggccu

SEQ ID NO: 75890 - RNA, 32 nt, Human
caacauacuggcuucguauuuuauuuaucuuu

SEQ ID NO: 75891 - RNA, 32 nt, Human
caacauagaagagggaaggaaagagagaagga

SEQ ID NO: 75892 - RNA, 32 nt, Human
caacauagguggugagccuggaggaagacuug

SEQ ID NO: 75893 - RNA, 32 nt, Human
caacauaguggcugucauuccucaaauggcaa

SEQ ID NO: 75894 - RNA, 32 nt, Human
caacauaguggcuuugaucucugugaugacac

SEQ ID NO: 75895 - RNA, 32 nt, Human
caacauaucucagguugucuaaguguuuuuau

SEQ ID NO: 75896 - RNA, 24 nt, Human
caacauaugcacuuuuuacauuua

SEQ ID NO: 75897 - RNA, 31 nt, Human
caacauaugcacuuuuuacauuuagaaacac

SEQ ID NO: 75898 - RNA, 32 nt, Human
caacauauuauccaggcuggugucgaauuccu

SEQ ID NO: 75899 - RNA, 32 nt, Human
caacaucaaaacccaaguccaggaguugcuaa

SEQ ID NO: 75900 - RNA, 32 nt, Human
caacaucaagccuggggcagguggaagguggu

SEQ ID NO: 75901 - RNA, 32 nt, Human
caacaucaaggccaccacagugaccacuaagc

SEQ ID NO: 75902 - RNA, 32 nt, Human
caacaucacacagcaaccaagggcagagucag

SEQ ID NO: 75903 - RNA, 32 nt, Human
caacaucacaccauugcacuccagccugggca

SEQ ID NO: 75904 - RNA, 32 nt, Human
caacaucacacugggcugugagauagggauuc

SEQ ID NO: 75905 - RNA, 32 nt, Human
caacaucacaugcacgcaugcccuuucacaca

SEQ ID NO: 75906 - RNA, 32 nt, Human
caacaucagacggguaugcagaaggauguucu

SEQ ID NO: 75907 - RNA, 32 nt, Human
caacaucaucacacuggcagacauuguaaaag

SEQ ID NO: 75908 - RNA, 32 nt, Human
caacaucaucuaagggcucucacggagggccu

SEQ ID NO: 75909 - RNA, 32 nt, Human
caacaucaucuugggagagaggcacagaccug

SEQ ID NO: 75910 - RNA, 32 nt, Human
caacauccaaguccaaacccuuuuuagguuau

SEQ ID NO: 75911 - RNA, 32 nt, Human
caacauccacacaggcugguacagucagauca

SEQ ID NO: 75912 - RNA, 32 nt, Human
caacauccauuucagcacuguaaagaacaaag

SEQ ID NO: 75913 - RNA, 31 nt, Human
caacaucccagcuagaagccugcugaacuag

SEQ ID NO: 75914 - RNA, 32 nt, Human
caacaucccuuuguuuucacagaggagaacaa

SEQ ID NO: 75915 - RNA, 21 nt, Human
caacauccugccagccccaca

SEQ ID NO: 75916 - RNA, 32 nt, Human
caacauccuggcuuaguauugugugcaaaauc

SEQ ID NO: 75917 - RNA, 32 nt, Human
caacaucuauccagcagcccugaccuccugcu

SEQ ID NO: 75918 - RNA, 31 nt, Human
caacaucucaauaaaacuuugaaagcaaaaa

SEQ ID NO: 75919 - RNA, 32 nt, Human
caacaucucgcaagcgcugcuguaacgacuuc

SEQ ID NO: 75920 - RNA, 32 nt, Human
caacaucucuaucaucccaaaaaguucucuug

SEQ ID NO: 75921 - RNA, 32 nt, Human
caacaucucugaguuggauugaugaaaauugu

SEQ ID NO: 75922 - RNA, 32 nt, Human
caacaucugaaggguauguugcaugcauuaaa

SEQ ID NO: 75923 - RNA, 32 nt, Human
caacaucugaaggguauguugcaugcauuuuu

SEQ ID NO: 75924 - RNA, 32 nt, Human
caacaucugaaucaugccaugugcccagagga

SEQ ID NO: 75925 - RNA, 32 nt, Human
caacaucugccagcaacgcgagaggccaagac

SEQ ID NO: 75926 - RNA, 32 nt, Human
caacaucugguaccagcacuccgcggcggggc

SEQ ID NO: 75927 - RNA, 32 nt, Human
caacaucuguaacucuuacaugaguguccaga

SEQ ID NO: 75928 - RNA, 20 nt, Human
caacaucugugcugauccug

SEQ ID NO: 75929 - RNA, 32 nt, Human
caacaucuucuccgaguccugcagccagccuc

SEQ ID NO: 75930 - RNA, 24 nt, Human
caacaugaaaccccgucucuacua

SEQ ID NO: 75931 - RNA, 21 nt, Human
caacaugaaccuaggcuguga

SEQ ID NO: 75932 - RNA, 32 nt, Human
caacaugaucaagguguuaguucuccaccaca

SEQ ID NO: 75933 - RNA, 32 nt, Human
caacaugaucacuguccuugccuuccugguuc

SEQ ID NO: 75934 - RNA, 22 nt, Human
caacaugauguacuugcugcuc

SEQ ID NO: 75935 - RNA, 32 nt, Human
caacaugcccagcuaauuuuuguauuuuuagu

SEQ ID NO: 75936 - RNA, 32 nt, Human
caacaugccuggcuaauuuuuguacuuuuagu

SEQ ID NO: 75937 - RNA, 32 nt, Human
caacaugccuggcucauuuuuguauuuuuagu

SEQ ID NO: 75938 - RNA, 32 nt, Human
caacaugccuuguuaauguccucugcccugaa

SEQ ID NO: 75939 - RNA, 32 nt, Human
caacaugcuagaaaauccucacugcacuccag

SEQ ID NO: 75940 - RNA, 32 nt, Human
caacauggcaaaaacccaccucuacaaaaagu

SEQ ID NO: 75941 - RNA, 19 nt, Human
caacauggcaaaacccugu

SEQ ID NO: 75942 - RNA, 32 nt, Human
caacauggcaaaacccugucucuacaaaauac

SEQ ID NO: 75943 - RNA, 19 nt, Human
caacauggcgaaacccugu

SEQ ID NO: 75944 - RNA, 32 nt, Human
caacauggcucugccaaaggaagccugugauc

SEQ ID NO: 75945 - RNA, 29 nt, Human
caacaugggaaagaaacggacaaagggaa

SEQ ID NO: 75946 - RNA, 32 nt, Human
caacaugggaggcugaacaggagaaucgcuug

SEQ ID NO: 75947 - RNA, 29 nt, Human
caacaugggccaggaagaggagcugcuga

SEQ ID NO: 75948 - RNA, 19 nt, Human
caacaugguaaaacccugu

SEQ ID NO: 75949 - RNA, 19 nt, Human
caacauggugaaacccugu

SEQ ID NO: 75950 - RNA, 19 nt, Human
caacauggugaaaccuugu

SEQ ID NO: 75951 - RNA, 32 nt, Human
caacauggugaaaucuugucucuaguaaaaau

SEQ ID NO: 75952 - RNA, 32 nt, Human
caacauggugaaaugaaaccccaucucaacua

SEQ ID NO: 75953 - RNA, 18 nt, Human
caacauggugaaccuugu

SEQ ID NO: 75954 - RNA, 32 nt, Human
caacauggugagaccaauugacuguagggcuu

SEQ ID NO: 75955 - RNA, 32 nt, Human
caacauguaggaucccuucacugugucacaug

SEQ ID NO: 75956 - RNA, 32 nt, Human
caacaugucuggcaccugucauguccuccaca

SEQ ID NO: 75957 - RNA, 32 nt, Human
caacaugucuggcuaauuuuuguauuuuuagu

SEQ ID NO: 75958 - RNA, 32 nt, Human
caacaugugcgaaacugagacagcauuagaaa

SEQ ID NO: 75959 - RNA, 32 nt, Human
caacauguuuucuccagcucuauuccaccaug

SEQ ID NO: 75960 - RNA, 32 nt, Human
caacauguuuugcuguaccuugcaguguuccg

SEQ ID NO: 75961 - RNA, 32 nt, Human
caacauuaaccagcaucccaguucucaggaga

SEQ ID NO: 75962 - RNA, 32 nt, Human
caacauuaauccauuaaagcuaaccuauuuuu

SEQ ID NO: 75963 - RNA, 31 nt, Human
caacauuacaaaggaaggaggagggaagaga

SEQ ID NO: 75964 - RNA, 32 nt, Human
caacauuacaggaagagaggagagaaagguag

SEQ ID NO: 75965 - RNA, 28 nt, Human
caacauucaaauucugccucaucuggag

SEQ ID NO: 75966 - RNA, 32 nt, Human
caacauucacgugccucuugcuuucuuucuga

SEQ ID NO: 75967 - RNA, 32 nt, Human
caacauucagcaaaacggaaacaaauaaauac

SEQ ID NO: 75968 - RNA, 32 nt, Human
caacauuccccaguauccccagcuucugcugc

SEQ ID NO: 75969 - RNA, 32 nt, Human
caacauuccgggacagggagaucauguuucac

SEQ ID NO: 75970 - RNA, 32 nt, Human
caacauuccuugcuugugcccugggccaaaac

SEQ ID NO: 75971 - RNA, 24 nt, Human
caacauucuguguucacaugugug

SEQ ID NO: 75972 - RNA, 32 nt, Human
caacauugaacccaggaggcggagcuugcagu

SEQ ID NO: 75973 - RNA, 32 nt, Human
caacauugcacuucagccuggugacaugagca

SEQ ID NO: 75974 - RNA, 28 nt, Human
caacauuggccaaagcugccucccagug

SEQ ID NO: 75975 - RNA, 32 nt, Human
caacauuggcuugaugugaucaucaucucaua

SEQ ID NO: 75976 - RNA, 32 nt, Human
caacauugugcaaccacuaccaaaaagugugu

SEQ ID NO: 75977 - RNA, 32 nt, Human
caacauuucccccugcugcuggcccagcacaa

SEQ ID NO: 75978 - RNA, 32 nt, Human
caacauuucucuaguagccacugcuugcggga

SEQ ID NO: 75979 - RNA, 32 nt, Human
caacauuuggacucaagcaucaacaccaaauu

SEQ ID NO: 75980 - RNA, 32 nt, Human
caacauuuggggagagauaaugaggcaacuca

SEQ ID NO: 75981 - RNA, 32 nt, Human
caacauuuguguucuuucuacuuuugggcuau

SEQ ID NO: 75982 - RNA, 32 nt, Human
caacauuuucacccucuucccccacccccauc

SEQ ID NO: 75983 - RNA, 32 nt, Human
caacauuuucugagagcaacagaguauuugcc

SEQ ID NO: 75984 - RNA, 32 nt, Human
caacauuuugggaggccaaggugggaggauug

SEQ ID NO: 75985 - RNA, 32 nt, Human
caaccaaaaugaccucauuugaaaugcccagg

SEQ ID NO: 75986 - RNA, 32 nt, Human
caaccaaaccaagcccuguugugcucacuggu

SEQ ID NO: 75987 - RNA, 16 nt, Human
caaccaaaccaaucaa

SEQ ID NO: 75988 - RNA, 32 nt, Human
caaccaaagcaggguuggggaaucccgaaugg

SEQ ID NO: 75989 - RNA, 31 nt, Human
caaccaaaguaaaugcugcuuuuagaacugu

SEQ ID NO: 75990 - RNA, 32 nt, Human
caaccaaauaacuuuuucuucccugcugcucc

SEQ ID NO: 75991 - RNA, 32 nt, Human
caaccaaauuauauacauuguuacaguacaag

SEQ ID NO: 75992 - RNA, 32 nt, Human
caaccaacaaaugcacagaaagacagcuucuc

SEQ ID NO: 75993 - RNA, 32 nt, Human
caaccaacagcaauaaaagaugagccgauuuu

SEQ ID NO: 75994 - RNA, 32 nt, Human
caaccaacagcuacagacucaguggcuuccau

SEQ ID NO: 75995 - RNA, 32 nt, Human
caaccaacauggugaaaccccgucucuccuaa

SEQ ID NO: 75996 - RNA, 32 nt, Human
caaccaaccaacaaacaaacacagacaaagaa

SEQ ID NO: 75997 - RNA, 32 nt, Human
caaccaaccagcagcaagaaccuauugccuag

SEQ ID NO: 75998 - RNA, 32 nt, Human
caaccaaccagcugcugacaggggaccuggcc

SEQ ID NO: 75999 - RNA, 32 nt, Human
caaccaaccagcuggcccuuggucuccucucu

SEQ ID NO: 76000 - RNA, 32 nt, Human
caaccaaccccauuucacaggcuagaaaaaua

SEQ ID NO: 76001 - RNA, 32 nt, Human
caaccaacugccucucugaggaggagguggcc

SEQ ID NO: 76002 - RNA, 32 nt, Human
caaccaagaaaauccauucuauuuucuuaucu

SEQ ID NO: 76003 - RNA, 32 nt, Human
caaccaagaagagcagugaagccagauccugu

SEQ ID NO: 76004 - RNA, 21 nt, Human
caaccaagaggaccuguuuca

SEQ ID NO: 76005 - RNA, 32 nt, Human
caaccaaggccuuuccaggcaacagcagacau

SEQ ID NO: 76006 - RNA, 32 nt, Human
caaccaagguaguuuguaucauuuucaaaagu

SEQ ID NO: 76007 - RNA, 22 nt, Human
caaccaaguccuccccugcuuu

SEQ ID NO: 76008 - RNA, 20 nt, Human
caaccaauccucccaccuca

SEQ ID NO: 76009 - RNA, 32 nt, Human
caaccaaucuggguaaugcaaugugaacaagu

SEQ ID NO: 76010 - RNA, 32 nt, Human
caaccaaugccaaucauguucuggaagugaua

SEQ ID NO: 76011 - RNA, 32 nt, Human
caaccacaaggcaacuuccuggcuuuuuacaa

SEQ ID NO: 76012 - RNA, 32 nt, Human
caaccacacacugcaugcacacacauacacca

SEQ ID NO: 76013 - RNA, 32 nt, Human
caaccacacaucauccaucucuccagacucug

SEQ ID NO: 76014 - RNA, 21 nt, Human
caaccacacccugccguccag

SEQ ID NO: 76015 - RNA, 32 nt, Human
caaccacacucuuggaccacagugccauaaaa

SEQ ID NO: 76016 - RNA, 19 nt, Human
caaccacacuuaaauccag

SEQ ID NO: 76017 - RNA, 32 nt, Human
caaccacagcaacugucaccucacagcaggag

SEQ ID NO: 76018 - RNA, 32 nt, Human
caaccacagcagagacuagcagcggggccacc

SEQ ID NO: 76019 - RNA, 21 nt, Human
caaccacagcagaugcuuccu

SEQ ID NO: 76020 - RNA, 32 nt, Human
caaccacagccuguuucugcugaguuucuuau

SEQ ID NO: 76021 - RNA, 32 nt, Human
caaccacaggagcugccaguauccagcaguau

SEQ ID NO: 76022 - RNA, 32 nt, Human
caaccacagggccacagagcuggagcuggauc

SEQ ID NO: 76023 - RNA, 19 nt, Human
caaccacagucaccuugca

SEQ ID NO: 76024 - RNA, 32 nt, Human
caaccacagugccaccaagcucacaccugucc

SEQ ID NO: 76025 - RNA, 32 nt, Human
caaccaccaaucuaucuauuugcccacccauc

SEQ ID NO: 76026 - RNA, 32 nt, Human
caaccaccccgaggaccuucaggcugcaaacc

SEQ ID NO: 76027 - RNA, 32 nt, Human
caaccaccccucuuuccuccagguuggcaggg

SEQ ID NO: 76028 - RNA, 21 nt, Human
caaccacccucccuucccaaa

SEQ ID NO: 76029 - RNA, 32 nt, Human
caaccacccugggcccagaaacagaggccugc

SEQ ID NO: 76030 - RNA, 32 nt, Human
caaccaccuccaccuuucucucugaaucucuc

SEQ ID NO: 76031 - RNA, 32 nt, Human
caaccaccucugaauccccaccaggcgccuuc

SEQ ID NO: 76032 - RNA, 32 nt, Human
caaccaccuggccuccauucucuugggggagu

SEQ ID NO: 76033 - RNA, 32 nt, Human
caaccaccuugccggguguccucagccaccgu

SEQ ID NO: 76034 - RNA, 32 nt, Human
caaccacgaagcuagagagagagccagaggag

SEQ ID NO: 76035 - RNA, 32 nt, Human
caaccacgcccggcugauggugguggaggaac

SEQ ID NO: 76036 - RNA, 32 nt, Human
caaccacggcaugccuguacuggcacuuuggu

SEQ ID NO: 76037 - RNA, 32 nt, Human
caaccacguccaccuggugauccugagagcac

SEQ ID NO: 76038 - RNA, 32 nt, Human
caaccacuacuaaugucccuuccucuucugcc

SEQ ID NO: 76039 - RNA, 32 nt, Human
caaccacucugggcaccugccuggugauaucc

SEQ ID NO: 76040 - RNA, 32 nt, Human
caaccacugacagcccagaagaacaaagaacg

SEQ ID NO: 76041 - RNA, 32 nt, Human
caaccacugauuacuuuucaggaauuuaauua

SEQ ID NO: 76042 - RNA, 32 nt, Human
caaccacugcacuccacuaagcaacuggcaca

SEQ ID NO: 76043 - RNA, 32 nt, Human
caaccacugcagauuccuccccuggccagcac

SEQ ID NO: 76044 - RNA, 24 nt, Human
caaccacugccucccaggcucaag

SEQ ID NO: 76045 - RNA, 24 nt, Human
caaccacugccucccagguucaag

SEQ ID NO: 76046 - RNA, 25 nt, Human
caaccacugucuacccgggaugccu

SEQ ID NO: 76047 - RNA, 32 nt, Human
caaccagaaggagcugaguuuggcaacaaccc

SEQ ID NO: 76048 - RNA, 32 nt, Human
caaccagaaggccaagaagaagaaggagaggc

SEQ ID NO: 76049 - RNA, 32 nt, Human
caaccagaaguacacauuuacaauagauagau

SEQ ID NO: 76050 - RNA, 32 nt, Human
caaccagaauuagagccagacagggaaaguga

SEQ ID NO: 76051 - RNA, 32 nt, Human
caaccagagaagguauaagucucuuaaccagu

SEQ ID NO: 76052 - RNA, 32 nt, Human
caaccagagacacaacuuucuggcagacagac

SEQ ID NO: 76053 - RNA, 32 nt, Human
caaccagaggggagaggagagagccuggacag

SEQ ID NO: 76054 - RNA, 32 nt, Human
caaccagaucaaagcuagaaaauggauuccuu

SEQ ID NO: 76055 - RNA, 32 nt, Human
caaccagauuagcuauggcaaaggcugccaac

SEQ ID NO: 76056 - RNA, 32 nt, Human
caaccagcaccaugcccaugacacugggguac

SEQ ID NO: 76057 - RNA, 32 nt, Human
caaccagcaccaugcccaugauacugggguac

SEQ ID NO: 76058 - RNA, 32 nt, Human
caaccagcagcucuaggcgcugcucuugucua

SEQ ID NO: 76059 - RNA, 32 nt, Human
caaccagcaucucugucuaguuccaaauauuu

SEQ ID NO: 76060 - RNA, 18 nt, Human
caaccagccccucuccca

SEQ ID NO: 76061 - RNA, 17 nt, Human
caaccagcccuuccuug

SEQ ID NO: 76062 - RNA, 32 nt, Human
caaccagccugaccaacauggagaaaccccgu

SEQ ID NO: 76063 - RNA, 32 nt, Human
caaccagccuggggcugagauccugggcagaa

SEQ ID NO: 76064 - RNA, 32 nt, Human
caaccagcgcuccagauaccucagggaaccag

SEQ ID NO: 76065 - RNA, 32 nt, Human
caaccagcuacucaggaggcugggcaggagaa

SEQ ID NO: 76066 - RNA, 32 nt, Human
caaccagcucacuccucugggccucuccuccu

SEQ ID NO: 76067 - RNA, 32 nt, Human
caaccagcucacugcagccuugaccuccuggg

SEQ ID NO: 76068 - RNA, 32 nt, Human
caaccagcucuaccugacuccugcugcaacau

SEQ ID NO: 76069 - RNA, 32 nt, Human
caaccagcuggcccuuggucuccucucuuucc

SEQ ID NO: 76070 - RNA, 32 nt, Human
caaccaggaacauguugcuucucagguccuag

SEQ ID NO: 76071 - RNA, 32 nt, Human
caaccaggaagggaucaacccaggaagggaug

SEQ ID NO: 76072 - RNA, 32 nt, Human
caaccaggacagaaagcauggacaagggauga

SEQ ID NO: 76073 - RNA, 32 nt, Human
caaccaggacgcucuccaggaggcgggcacau

SEQ ID NO: 76074 - RNA, 32 nt, Human
caaccaggagcuuauuauaggaaaggcugaac

SEQ ID NO: 76075 - RNA, 32 nt, Human
caaccaggaugaggaugucaccaacugaauua

SEQ ID NO: 76076 - RNA, 32 nt, Human
caaccagggagauuucuccauuuuccucuugu

SEQ ID NO: 76077 - RNA, 32 nt, Human
caaccagggaggcagagguugcagugagccga

SEQ ID NO: 76078 - RNA, 32 nt, Human
caaccaggguuucuuuaguggccaucagcucc

SEQ ID NO: 76079 - RNA, 32 nt, Human
caaccaggucaucuccccguugccaagugggu

SEQ ID NO: 76080 - RNA, 32 nt, Human
caaccaggucguccagcuccugcugagccugu

SEQ ID NO: 76081 - RNA, 17 nt, Human
caaccaguacucuguca

SEQ ID NO: 76082 - RNA, 32 nt, Human
caaccaguaguccuuucuggauuuuuguuuuu

SEQ ID NO: 76083 - RNA, 32 nt, Human
caaccagucuucacuucaagagggccacacug

SEQ ID NO: 76084 - RNA, 32 nt, Human
caaccauacaccuuguacaccuaguggaugcu

SEQ ID NO: 76085 - RNA, 32 nt, Human
caaccauagccacaccacaggauuuccugaaa

SEQ ID NO: 76086 - RNA, 32 nt, Human
caaccauccccauuuggcuucuccuuaaaaca

SEQ ID NO: 76087 - RNA, 32 nt, Human
caaccauccugaccacagauccagaaagccca

SEQ ID NO: 76088 - RNA, 32 nt, Human
caaccauccuuguccuccuugguaccguauca

SEQ ID NO: 76089 - RNA, 32 nt, Human
caaccaucuccaccauccaucuccagaaugac

SEQ ID NO: 76090 - RNA, 32 nt, Human
caaccaugcaguuccuggugagggucagaagg

SEQ ID NO: 76091 - RNA, 32 nt, Human
caaccauggcucuucccagccuaggggaagcc

SEQ ID NO: 76092 - RNA, 32 nt, Human
caaccaugggguauguaguaugaccaacugca

SEQ ID NO: 76093 - RNA, 30 nt, Human
caaccauggugcccagcuuccucucccuga

SEQ ID NO: 76094 - RNA, 32 nt, Human
caaccaugguuccacacacagcucugcacccc

SEQ ID NO: 76095 - RNA, 32 nt, Human
caaccauguuaacuguauugacacauccucaa

SEQ ID NO: 76096 - RNA, 32 nt, Human
caaccauuaccaccauccaucuccauaacucu

SEQ ID NO: 76097 - RNA, 32 nt, Human
caaccauucacugcaaugccuauuccaaacuu

SEQ ID NO: 76098 - RNA, 32 nt, Human
caaccauuccucacgccaccgccacaucagag

SEQ ID NO: 76099 - RNA, 32 nt, Human
caaccauucuguaccccuuccccagccugggc

SEQ ID NO: 76100 - RNA, 32 nt, Human
caaccauugagacaagagucucgcucugucac

SEQ ID NO: 76101 - RNA, 32 nt, Human
caaccauuguguagcugggacuacaggcgucc

SEQ ID NO: 76102 - RNA, 32 nt, Human
caaccauuuagaggccuuggaaaaagaagagg

SEQ ID NO: 76103 - RNA, 32 nt, Human
caaccauuuguggucaugagagcugggguggg

SEQ ID NO: 76104 - RNA, 32 nt, Human
caacccaaagcccugcacagugccucacccac

SEQ ID NO: 76105 - RNA, 24 nt, Human
caacccaaaugucaccccccacca

SEQ ID NO: 76106 - RNA, 32 nt, Human
caacccaacuggaggguagguuagaagaaaaa

SEQ ID NO: 76107 - RNA, 20 nt, Human
caacccacaacaccucugcc

SEQ ID NO: 76108 - RNA, 32 nt, Human
caacccacuacccugaagucauccaccgugua

SEQ ID NO: 76109 - RNA, 32 nt, Human
caacccacugagcaccuugagaaggaaacagu

SEQ ID NO: 76110 - RNA, 32 nt, Human
caacccagaagagggcccuaaccagaaaguug

SEQ ID NO: 76111 - RNA, 32 nt, Human
caacccagacaauggcccaggucucucaacuu

SEQ ID NO: 76112 - RNA, 32 nt, Human
caacccagacacacagacccacagcuacaucc

SEQ ID NO: 76113 - RNA, 32 nt, Human
caacccagacagguccaggcauggacuccagg

SEQ ID NO: 76114 - RNA, 32 nt, Human
caacccagagagagcagcuucccuuggcucug

SEQ ID NO: 76115 - RNA, 32 nt, Human
caacccagaggacaggauucccuggaggccac

SEQ ID NO: 76116 - RNA, 32 nt, Human
caacccagaggacccauggcuagcagggaagg

SEQ ID NO: 76117 - RNA, 32 nt, Human
caacccagcaggagaaguggacaugagguugg

SEQ ID NO: 76118 - RNA, 32 nt, Human
caacccagcaugagcgccgccacccacucgcc

SEQ ID NO: 76119 - RNA, 32 nt, Human
caacccagccugggugacagagcgagacuuug

SEQ ID NO: 76120 - RNA, 22 nt, Human
caacccagccuuuccgugcugc

SEQ ID NO: 76121 - RNA, 20 nt, Human
caacccagcggacccuccca

SEQ ID NO: 76122 - RNA, 32 nt, Human
caacccaggaggcagacguugcagcgagccaa

SEQ ID NO: 76123 - RNA, 32 nt, Human
caacccaggaggcagaggcuacagugagcuga

SEQ ID NO: 76124 - RNA, 32 nt, Human
caacccagggaccugaaccccaaggagcccag

SEQ ID NO: 76125 - RNA, 32 nt, Human
caacccagguucuuuuccuuccuuccuuccuu

SEQ ID NO: 76126 - RNA, 20 nt, Human
caacccagugcccccuccca

SEQ ID NO: 76127 - RNA, 32 nt, Human
caacccagugccuggugccaacccggaccugc

SEQ ID NO: 76128 - RNA, 32 nt, Human
caacccaucccccacccagcucccggccgucc

SEQ ID NO: 76129 - RNA, 23 nt, Human
caacccaucucccuaaccccaca

SEQ ID NO: 76130 - RNA, 21 nt, Human
caacccaucuuccuaguguuu

SEQ ID NO: 76131 - RNA, 32 nt, Human
caaccccaagagucuucacaccaaucugcacc

SEQ ID NO: 76132 - RNA, 32 nt, Human
caaccccaccauaaccuccuacucagcacaca

SEQ ID NO: 76133 - RNA, 32 nt, Human
caaccccaccugccuccugaagugcugcugac

SEQ ID NO: 76134 - RNA, 32 nt, Human
caaccccacuccauggguuugucuccugguac

SEQ ID NO: 76135 - RNA, 32 nt, Human
caaccccacugaggccugcugcacaggucaau

SEQ ID NO: 76136 - RNA, 32 nt, Human
caaccccacugcacagcagaucaugcagcugc

SEQ ID NO: 76137 - RNA, 32 nt, Human
caaccccacugcacagcagauccagcagcugc

SEQ ID NO: 76138 - RNA, 32 nt, Human
caaccccagcagaaagacaccgcgggcggccc

SEQ ID NO: 76139 - RNA, 32 nt, Human
caaccccagcuaucuggaucugaaguggauau

SEQ ID NO: 76140 - RNA, 32 nt, Human
caaccccagcuccacuccagccuggcguccag

SEQ ID NO: 76141 - RNA, 32 nt, Human
caaccccagggugguuuucaggaguccgaggu

SEQ ID NO: 76142 - RNA, 32 nt, Human
caaccccaguuuaggggaagguagcacagggc

SEQ ID NO: 76143 - RNA, 32 nt, Human
caaccccaucucagagcucagaggguacaagc

SEQ ID NO: 76144 - RNA, 24 nt, Human
caacccccacaucccggguucaag

SEQ ID NO: 76145 - RNA, 24 nt, Human
caacccccaccucccagguucaag

SEQ ID NO: 76146 - RNA, 32 nt, Human
caacccccagcacccgggcucagggaccacag

SEQ ID NO: 76147 - RNA, 32 nt, Human
caacccccagcccaggaggagacuugacucgc

SEQ ID NO: 76148 - RNA, 24 nt, Human
caacccccaucucccagguucaag

SEQ ID NO: 76149 - RNA, 17 nt, Human
caaccccccaccuccca

SEQ ID NO: 76150 - RNA, 32 nt, Human
caacccccgacuucaucccaaaggacagccgc

SEQ ID NO: 76151 - RNA, 24 nt, Human
caacccccgccaccuagguucaag

SEQ ID NO: 76152 - RNA, 24 nt, Human
caacccccgccccccggguucaag

SEQ ID NO: 76153 - RNA, 24 nt, Human
caacccccgcuucccggguucaag

SEQ ID NO: 76154 - RNA, 24 nt, Human
caacccccgucucccggguucaag

SEQ ID NO: 76155 - RNA, 32 nt, Human
caacccccuacccgcuucgucucccuccgccg

SEQ ID NO: 76156 - RNA, 32 nt, Human
caacccccuccaggcucagaccuggggacacc

SEQ ID NO: 76157 - RNA, 32 nt, Human
caaccccgaucagcacagcagagaagucuccu

SEQ ID NO: 76158 - RNA, 23 nt, Human
caaccccgccucccagguucaag

SEQ ID NO: 76159 - RNA, 32 nt, Human
caaccccggcgccgcggcaaggacucggaggg

SEQ ID NO: 76160 - RNA, 32 nt, Human
caaccccucacaggagcuuacuggcaaacaug

SEQ ID NO: 76161 - RNA, 32 nt, Human
caaccccuccaaugcuguuaucccugccuggu

SEQ ID NO: 76162 - RNA, 32 nt, Human
caaccccuccacccucggucaccccaaccucu

SEQ ID NO: 76163 - RNA, 16 nt, Human
caaccccucccuccca

SEQ ID NO: 76164 - RNA, 32 nt, Human
caaccccucuacucuccaccucagcccccacc

SEQ ID NO: 76165 - RNA, 32 nt, Human
caaccccugcagcuccucugccuuugugcucu

SEQ ID NO: 76166 - RNA, 32 nt, Human
caaccccugcccacagaaccagcugauggccc

SEQ ID NO: 76167 - RNA, 32 nt, Human
caaccccuguuuuccccugccuuccuugcaga

SEQ ID NO: 76168 - RNA, 32 nt, Human
caaccccuucaaggacugagccucaagcugcc

SEQ ID NO: 76169 - RNA, 32 nt, Human
caaccccuucuccagaccgugucagccagaga

SEQ ID NO: 76170 - RNA, 32 nt, Human
caaccccuuucuccucauugccuguguaccuc

SEQ ID NO: 76171 - RNA, 22 nt, Human
caacccgccgcugcccccuccc

SEQ ID NO: 76172 - RNA, 22 nt, Human
caacccgcugccuucaugcugc

SEQ ID NO: 76173 - RNA, 32 nt, Human
caacccggccuucuggucaccuccugccugga

SEQ ID NO: 76174 - RNA, 32 nt, Human
caacccgggaggcggagcuugcagugagccga

SEQ ID NO: 76175 - RNA, 32 nt, Human
caacccgggaggcugagguugcagugagugga

SEQ ID NO: 76176 - RNA, 19 nt, Human
caacccuacagcugccaaa

SEQ ID NO: 76177 - RNA, 19 nt, Human
caacccuagccuucuccca

SEQ ID NO: 76178 - RNA, 18 nt, Human
caacccuagucagcaaga

SEQ ID NO: 76179 - RNA, 32 nt, Human
caacccuauaaaggagggagcucguggcgagg

SEQ ID NO: 76180 - RNA, 32 nt, Human
caacccucagccccaaggagccacugucacuu

SEQ ID NO: 76181 - RNA, 32 nt, Human
caacccucagccccaaggagccgcugucacuu

SEQ ID NO: 76182 - RNA, 32 nt, Human
caacccucaugaaguacaaccagcauaugcua

SEQ ID NO: 76183 - RNA, 32 nt, Human
caacccuccaguaacccagcaggacggggaag

SEQ ID NO: 76184 - RNA, 21 nt, Human
caacccucccccaagcuccca

SEQ ID NO: 76185 - RNA, 23 nt, Human
caacccuccccccacgcccccca

SEQ ID NO: 76186 - RNA, 32 nt, Human
caacccuccccuggcccucugauuuguucugu

SEQ ID NO: 76187 - RNA, 22 nt, Human
caacccuccucugcagcccaca

SEQ ID NO: 76188 - RNA, 32 nt, Human
caacccucucucuccagcuagacuuuucucuu

SEQ ID NO: 76189 - RNA, 32 nt, Human
caacccucucugcugcuguuuccauggcccag

SEQ ID NO: 76190 - RNA, 32 nt, Human
caacccucugcucccguuucucccucugguuc

SEQ ID NO: 76191 - RNA, 32 nt, Human
caacccugaacacucugcuccagccaaggugg

SEQ ID NO: 76192 - RNA, 23 nt, Human
caacccugaccuucccccuccca

SEQ ID NO: 76193 - RNA, 32 nt, Human
caacccugaccuuccuggaaguuguuuccuua

SEQ ID NO: 76194 - RNA, 32 nt, Human
caacccugagauuggcccaaucugccagaacc

SEQ ID NO: 76195 - RNA, 32 nt, Human
caacccugagcgagccuguccucuguggcagg

SEQ ID NO: 76196 - RNA, 32 nt, Human
caacccugaucucaaaccuccuucccucugcc

SEQ ID NO: 76197 - RNA, 32 nt, Human
caacccugcacccacccuccuccagggaucau

SEQ ID NO: 76198 - RNA, 32 nt, Human
caacccugcaggugcucacccugcugcugaac

SEQ ID NO: 76199 - RNA, 32 nt, Human
caacccugccgagacaccuugaucucagacuu

SEQ ID NO: 76200 - RNA, 22 nt, Human
caacccugccugccgcugcacc

SEQ ID NO: 76201 - RNA, 24 nt, Human
caacccugcggcaggcacugagug

SEQ ID NO: 76202 - RNA, 21 nt, Human
caacccugcuccagccccuca

SEQ ID NO: 76203 - RNA, 32 nt, Human
caacccugcuuucccugguagauauuugccag

SEQ ID NO: 76204 - RNA, 32 nt, Human
caacccuggacaguuggcucuaccucaguaac

SEQ ID NO: 76205 - RNA, 32 nt, Human
caacccuggcaauuauagcuacucccaucccu

SEQ ID NO: 76206 - RNA, 32 nt, Human
caacccugggcuggggaggaggagagaguccc

SEQ ID NO: 76207 - RNA, 32 nt, Human
caacccuguccucugcugggcccccagcaaac

SEQ ID NO: 76208 - RNA, 32 nt, Human
caacccugucugcugcuccggagcuccgagca

SEQ ID NO: 76209 - RNA, 32 nt, Human
caacccuguggaccacgacagggcagaaggag

SEQ ID NO: 76210 - RNA, 32 nt, Human
caacccugugggcuguaagcaagcucaggcua

SEQ ID NO: 76211 - RNA, 23 nt, Human
caacccuuauccccagguuuaag

SEQ ID NO: 76212 - RNA, 32 nt, Human
caacccuuccucuuuucucucaucucaccucu

SEQ ID NO: 76213 - RNA, 32 nt, Human
caacccuucucuguuggucugccuucugcuga

SEQ ID NO: 76214 - RNA, 21 nt, Human
caacccuugcccaaccccacg

SEQ ID NO: 76215 - RNA, 32 nt, Human
caacccuugccugccucccuccagucuugcag

SEQ ID NO: 76216 - RNA, 32 nt, Human
caacccuugucucccucuucucuccuuugcaa

SEQ ID NO: 76217 - RNA, 32 nt, Human
caaccgaaggcucggucuuaauucccccaccu

SEQ ID NO: 76218 - RNA, 32 nt, Human
caaccgaaguugaguaaguucccacacugcug

SEQ ID NO: 76219 - RNA, 32 nt, Human
caaccgacaggcccuggcugagggcagcugcg

SEQ ID NO: 76220 - RNA, 32 nt, Human
caaccgaccuuucggguuucacggugaagaag

SEQ ID NO: 76221 - RNA, 32 nt, Human
caaccgaggcggaccgcggagugugcgaacga

SEQ ID NO: 76222 - RNA, 32 nt, Human
caaccgagggcugagcaaugcagagagagagg

SEQ ID NO: 76223 - RNA, 32 nt, Human
caaccgauaaccaaagagaugcugcaguccag

SEQ ID NO: 76224 - RNA, 21 nt, Human
caaccgcacccugaccucccu

SEQ ID NO: 76225 - RNA, 32 nt, Human
caaccgcagucugcaagaggcugagcugagga

SEQ ID NO: 76226 - RNA, 32 nt, Human
caaccgccuccuggugacggacuacuugccug

SEQ ID NO: 76227 - RNA, 32 nt, Human
caaccggaccuccacccccaacuuccuccagc

SEQ ID NO: 76228 - RNA, 32 nt, Human
caaccggcaccggcgcuguccagaccgaggcc

SEQ ID NO: 76229 - RNA, 32 nt, Human
caaccggcagaagcugagagacagggaacagg

SEQ ID NO: 76230 - RNA, 32 nt, Human
caaccggcagaggaucuacucacuggagcagc

SEQ ID NO: 76231 - RNA, 32 nt, Human
caaccggccuuacugccugcuuucacugacca

SEQ ID NO: 76232 - RNA, 32 nt, Human
caaccggcugaccacacacaguccucacuccc

SEQ ID NO: 76233 - RNA, 20 nt, Human
caaccgggcuggagugcagu

SEQ ID NO: 76234 - RNA, 32 nt, Human
caaccgguucccuacccucugccauuaugaac

SEQ ID NO: 76235 - RNA, 32 nt, Human
caaccguacccaggcccugccuccccugccau

SEQ ID NO: 76236 - RNA, 32 nt, Human
caaccguccagcaaagccagcacagcagagau

SEQ ID NO: 76237 - RNA, 32 nt, Human
caaccguccugcuccccaccucccccaggaaa

SEQ ID NO: 76238 - RNA, 32 nt, Human
caaccgugcugggcaggggcccuucagcaacu

SEQ ID NO: 76239 - RNA, 32 nt, Human
caaccuaaacaguaucacacagcuaaugagga

SEQ ID NO: 76240 - RNA, 32 nt, Human
caaccuaacaccacucccucugcagguagcuc

SEQ ID NO: 76241 - RNA, 32 nt, Human
caaccuaccaagguagacagacauauagacaa

SEQ ID NO: 76242 - RNA, 32 nt, Human
caaccuaccccucucucuccagccucuuuaug

SEQ ID NO: 76243 - RNA, 23 nt, Human
caaccuagaacccaggccucaag

SEQ ID NO: 76244 - RNA, 32 nt, Human
caaccuagagaaucuccucuuacagggggaug

SEQ ID NO: 76245 - RNA, 32 nt, Human
caaccuaggaaaaaggagagcuuucuuacaug

SEQ ID NO: 76246 - RNA, 22 nt, Human
caaccuaggugacagagcaaga

SEQ ID NO: 76247 - RNA, 32 nt, Human
caaccuauccuuacucagagcugcgggcugag

SEQ ID NO: 76248 - RNA, 32 nt, Human
caaccuauuuauccucuccaugugucuucguu

SEQ ID NO: 76249 - RNA, 32 nt, Human
caaccuauuuguagcucgcacuuuaaaagaug

SEQ ID NO: 76250 - RNA, 24 nt, Human
caaccucaaacuccugggcucaag

SEQ ID NO: 76251 - RNA, 22 nt, Human
caaccucaaagaucaguuucaa

SEQ ID NO: 76252 - RNA, 32 nt, Human
caaccucacauccuacuagucuuccaagagga

SEQ ID NO: 76253 - RNA, 23 nt, Human
caaccucaccucccggguucaag

SEQ ID NO: 76254 - RNA, 24 nt, Human
caaccucagccucccagguucaag

SEQ ID NO: 76255 - RNA, 32 nt, Human
caaccucagccuggccuucaugacuucucuac

SEQ ID NO: 76256 - RNA, 32 nt, Human
caaccucagcucucuuccccagccuuuauccg

SEQ ID NO: 76257 - RNA, 32 nt, Human
caaccucaguucuucuuggagaaucuacgacc

SEQ ID NO: 76258 - RNA, 24 nt, Human
caaccuccaacucccagguucaag

SEQ ID NO: 76259 - RNA, 24 nt, Human
caaccuccaccccccagguucaag

SEQ ID NO: 76260 - RNA, 24 nt, Human
caaccuccaccucacagguucaag

SEQ ID NO: 76261 - RNA, 23 nt, Human
caaccuccaccuccagguucaag

SEQ ID NO: 76262 - RNA, 24 nt, Human
caaccuccaccucccaggaucaag

SEQ ID NO: 76263 - RNA, 24 nt, Human
caaccuccaccucccaggcucaag

SEQ ID NO: 76264 - RNA, 24 nt, Human
caaccuccaccucccagguccaag

SEQ ID NO: 76265 - RNA, 24 nt, Human
caaccuccaccucccaggugcaag

SEQ ID NO: 76266 - RNA, 22 nt, Human
caaccuccaccucccagguuca

SEQ ID NO: 76267 - RNA, 24 nt, Human
caaccuccaccucccagguucaag

SEQ ID NO: 76268 - RNA, 23 nt, Human
caaccuccaccucccagguucag

SEQ ID NO: 76269 - RNA, 24 nt, Human
caaccuccaccuccccggguucaa

SEQ ID NO: 76270 - RNA, 24 nt, Human
caaccuccaccucccgggcucaag

SEQ ID NO: 76271 - RNA, 22 nt, Human
caaccuccaccucccggguuca

SEQ ID NO: 76272 - RNA, 24 nt, Human
caaccuccaccucccggguucaag

SEQ ID NO: 76273 - RNA, 24 nt, Human
caaccuccaccucccugguucaag

SEQ ID NO: 76274 - RNA, 24 nt, Human
caaccuccaccuccuagguucaag

SEQ ID NO: 76275 - RNA, 21 nt, Human
caaccuccaccuccuggguuc

SEQ ID NO: 76276 - RNA, 22 nt, Human
caaccuccaccuccuggguuca

SEQ ID NO: 76277 - RNA, 21 nt, Human
caaccuccaccuccuggguuu

SEQ ID NO: 76278 - RNA, 22 nt, Human
caaccuccaccuccuggguuua

SEQ ID NO: 76279 - RNA, 24 nt, Human
caaccuccaccucgcagguucaag

SEQ ID NO: 76280 - RNA, 24 nt, Human
caaccuccaccucucagauucaag

SEQ ID NO: 76281 - RNA, 24 nt, Human
caaccuccaccucucagguucaag

SEQ ID NO: 76282 - RNA, 24 nt, Human
caaccuccaccuuccagguucaag

SEQ ID NO: 76283 - RNA, 32 nt, Human
caaccuccaccuugcgugucucagccuccuga

SEQ ID NO: 76284 - RNA, 21 nt, Human
caaccuccacuucccagguuc

SEQ ID NO: 76285 - RNA, 24 nt, Human
caaccuccacuucccagguucaag

SEQ ID NO: 76286 - RNA, 24 nt, Human
caaccuccacuuccuagguucaag

SEQ ID NO: 76287 - RNA, 24 nt, Human
caaccuccacuucucagguucaag

SEQ ID NO: 76288 - RNA, 32 nt, Human
caaccuccagaaagaguauggagagaaaaaga

SEQ ID NO: 76289 - RNA, 24 nt, Human
caaccuccaggucccagguuaaag

SEQ ID NO: 76290 - RNA, 21 nt, Human
caaccuccaguguugacucua

SEQ ID NO: 76291 - RNA, 24 nt, Human
caaccuccaucucccagguucaag

SEQ ID NO: 76292 - RNA, 32 nt, Human
caaccucccaggacuguguucuuucuggaguu

SEQ ID NO: 76293 - RNA, 32 nt, Human
caaccuccccuucaccuucuccuccaccugcu

SEQ ID NO: 76294 - RNA, 24 nt, Human
caaccucccucucccggguucaag

SEQ ID NO: 76295 - RNA, 32 nt, Human
caaccucccugggguccugccuguuuccuccc

SEQ ID NO: 76296 - RNA, 24 nt, Human
caaccuccgacucccagguucaag

SEQ ID NO: 76297 - RNA, 24 nt, Human
caaccuccgacucccugguucaag

SEQ ID NO: 76298 - RNA, 24 nt, Human
caaccuccgcaucccggguucaag

SEQ ID NO: 76299 - RNA, 24 nt, Human
caaccuccgcauccuagguucaag

SEQ ID NO: 76300 - RNA, 24 nt, Human
caaccuccgcccccaagguucaag

SEQ ID NO: 76301 - RNA, 23 nt, Human
caaccuccgccuccagguucaag

SEQ ID NO: 76302 - RNA, 22 nt, Human
caaccuccgccucccagguuca

SEQ ID NO: 76303 - RNA, 23 nt, Human
caaccuccgccucccagguucaa

SEQ ID NO: 76304 - RNA, 24 nt, Human
caaccuccgccucccagguucaag

SEQ ID NO: 76305 - RNA, 24 nt, Human
caaccuccgccucccagguucagg

SEQ ID NO: 76306 - RNA, 24 nt, Human
caaccuccgccucccaguuucaag

SEQ ID NO: 76307 - RNA, 24 nt, Human
caaccuccgccucccgggcccaag

SEQ ID NO: 76308 - RNA, 24 nt, Human
caaccuccgccucccggguucaag

SEQ ID NO: 76309 - RNA, 23 nt, Human
caaccuccgccucccgguucaag

SEQ ID NO: 76310 - RNA, 24 nt, Human
caaccuccgccucccugguucaag

SEQ ID NO: 76311 - RNA, 22 nt, Human
caaccuccgccuccugggucca

SEQ ID NO: 76312 - RNA, 22 nt, Human
caaccuccgccuccuggguuca

SEQ ID NO: 76313 - RNA, 24 nt, Human
caaccuccgccucucagguucaag

SEQ ID NO: 76314 - RNA, 24 nt, Human
caaccuccgccuuccagguucaag

SEQ ID NO: 76315 - RNA, 24 nt, Human
caaccuccgucucccagguucaag

SEQ ID NO: 76316 - RNA, 32 nt, Human
caaccuccuccacccccuuccccuacucuagg

SEQ ID NO: 76317 - RNA, 32 nt, Human
caaccuccuccacuucacucgggaccgccuga

SEQ ID NO: 76318 - RNA, 32 nt, Human
caaccuccuccaggaaccauguuuggagcuuc

SEQ ID NO: 76319 - RNA, 32 nt, Human
caaccuccuccaggaacgauguuuggagcuuc

SEQ ID NO: 76320 - RNA, 24 nt, Human
caaccuccuccucccagguucaag

SEQ ID NO: 76321 - RNA, 24 nt, Human
caaccuccuccucccggguucaag

SEQ ID NO: 76322 - RNA, 32 nt, Human
caaccuccuccucccugcccagccucuuucuc

SEQ ID NO: 76323 - RNA, 32 nt, Human
caaccuccugggcuuccuagaggacagccuug

SEQ ID NO: 76324 - RNA, 32 nt, Human
caaccuccuuaucugcuaacucuguuauucuu

SEQ ID NO: 76325 - RNA, 24 nt, Human
caaccuccuucucccagguucaag

SEQ ID NO: 76326 - RNA, 22 nt, Human
caaccucgaccuccuggguuca

SEQ ID NO: 76327 - RNA, 32 nt, Human
caaccucgacuucucagccuccugggguuccg

SEQ ID NO: 76328 - RNA, 32 nt, Human
caaccucgccuagcuuuuccucccuuugugaa

SEQ ID NO: 76329 - RNA, 23 nt, Human
caaccucgccucccugguucaag

SEQ ID NO: 76330 - RNA, 32 nt, Human
caaccucggaggcggagguugcagugagccaa

SEQ ID NO: 76331 - RNA, 23 nt, Human
caaccucgucucccggguucaag

SEQ ID NO: 76332 - RNA, 32 nt, Human
caaccucuaaccuccugaccucaugcuaauaa

SEQ ID NO: 76333 - RNA, 23 nt, Human
caaccucuaccucccagguucaa

SEQ ID NO: 76334 - RNA, 24 nt, Human
caaccucuaccucccagguucaag

SEQ ID NO: 76335 - RNA, 21 nt, Human
caaccucuccacgcgcacuca

SEQ ID NO: 76336 - RNA, 32 nt, Human
caaccucucuccagcccacucuuccaaaauaa

SEQ ID NO: 76337 - RNA, 24 nt, Human
caaccucucucucccggguucaag

SEQ ID NO: 76338 - RNA, 19 nt, Human
caaccucugacugcaauga

SEQ ID NO: 76339 - RNA, 24 nt, Human
caaccucugccacccggguucaag

SEQ ID NO: 76340 - RNA, 24 nt, Human
caaccucugccccccggguucaag

SEQ ID NO: 76341 - RNA, 24 nt, Human
caaccucugcccuccagguucaag

SEQ ID NO: 76342 - RNA, 23 nt, Human
caaccucugccuccagguucaag

SEQ ID NO: 76343 - RNA, 24 nt, Human
caaccucugccucccaggaucaag

SEQ ID NO: 76344 - RNA, 22 nt, Human
caaccucugccucccaggucaa

SEQ ID NO: 76345 - RNA, 22 nt, Human
caaccucugccucccagguuca

SEQ ID NO: 76346 - RNA, 24 nt, Human
caaccucugccucccagguucaag

SEQ ID NO: 76347 - RNA, 24 nt, Human
caaccucugccucccagguucagg

SEQ ID NO: 76348 - RNA, 24 nt, Human
caaccucugccucccagguuccag

SEQ ID NO: 76349 - RNA, 24 nt, Human
caaccucugccucccagguugaag

SEQ ID NO: 76350 - RNA, 24 nt, Human
caaccucugccucccagguuuaag

SEQ ID NO: 76351 - RNA, 24 nt, Human
caaccucugccucccggguccaag

SEQ ID NO: 76352 - RNA, 23 nt, Human
caaccucugccucccggguucaa

SEQ ID NO: 76353 - RNA, 24 nt, Human
caaccucugccucccggguucaag

SEQ ID NO: 76354 - RNA, 24 nt, Human
caaccucugccucccugguucaag

SEQ ID NO: 76355 - RNA, 22 nt, Human
caaccucugccuccuggguuca

SEQ ID NO: 76356 - RNA, 32 nt, Human
caaccucugcucccugccucgccucccgcgcg

SEQ ID NO: 76357 - RNA, 32 nt, Human
caaccucugcuguaucagagggggccuucgcc

SEQ ID NO: 76358 - RNA, 24 nt, Human
caaccucugcuucccagguucaag

SEQ ID NO: 76359 - RNA, 24 nt, Human
caaccucugcuucccagguuuaag

SEQ ID NO: 76360 - RNA, 23 nt, Human
caaccucugcuucccggguucaa

SEQ ID NO: 76361 - RNA, 24 nt, Human
caaccucugcuucccggguucaag

SEQ ID NO: 76362 - RNA, 24 nt, Human
caaccucugcuuccuagguucaag

SEQ ID NO: 76363 - RNA, 32 nt, Human
caaccucuggccccagcaccccaccaggacug

SEQ ID NO: 76364 - RNA, 32 nt, Human
caaccucugggcuggaguagaggacucuggug

SEQ ID NO: 76365 - RNA, 24 nt, Human
caaccucugucucccagguucagg

SEQ ID NO: 76366 - RNA, 24 nt, Human
caaccucugucucccggguucaag

SEQ ID NO: 76367 - RNA, 24 nt, Human
caaccucuuccucccagguucaag

SEQ ID NO: 76368 - RNA, 32 nt, Human
caaccucuucuccaagauucucaggcaaucaa

SEQ ID NO: 76369 - RNA, 25 nt, Human
caaccucuugccucccagguucaag

SEQ ID NO: 76370 - RNA, 32 nt, Human
caaccucuugggccuggaagucagacaaguac

SEQ ID NO: 76371 - RNA, 32 nt, Human
caaccucuuucugauagauuuccucuuucauu

SEQ ID NO: 76372 - RNA, 32 nt, Human
caaccucuuugagacguccuuucccuacucca

SEQ ID NO: 76373 - RNA, 32 nt, Human
caaccugaaccuuucccaccccaguucuucuu

SEQ ID NO: 76374 - RNA, 32 nt, Human
caaccugaauuaaagucuacacugccuuugug

SEQ ID NO: 76375 - RNA, 32 nt, Human
caaccugaauucugccucccuguuauaguccc

SEQ ID NO: 76376 - RNA, 32 nt, Human
caaccugaccaacauggagaaacccgucucua

SEQ ID NO: 76377 - RNA, 32 nt, Human
caaccugaccaacauggagaaacccugucucu

SEQ ID NO: 76378 - RNA, 32 nt, Human
caaccugacuaacauggugaaaccccaucucu

SEQ ID NO: 76379 - RNA, 32 nt, Human
caaccugacucaggccagugugucucugaaac

SEQ ID NO: 76380 - RNA, 32 nt, Human
caaccugagcaacauggcgaaaccccgucugu

SEQ ID NO: 76381 - RNA, 32 nt, Human
caaccugagcgagugggugugugugcaaagau

SEQ ID NO: 76382 - RNA, 32 nt, Human
caaccugauccuggcccuuucuucuucuccau

SEQ ID NO: 76383 - RNA, 32 nt, Human
caaccugaucucuucccucucucccagcacuu

SEQ ID NO: 76384 - RNA, 32 nt, Human
caaccugcacuccagccugggugacagagcga

SEQ ID NO: 76385 - RNA, 32 nt, Human
caaccugcacuuccuaggcagcuaccugacac

SEQ ID NO: 76386 - RNA, 32 nt, Human
caaccugccaacaccuacugacacucacucau

SEQ ID NO: 76387 - RNA, 32 nt, Human
caaccugcugcuggugacaucguucccuucug

SEQ ID NO: 76388 - RNA, 32 nt, Human
caaccugcuuagccagcagcaggcuugggccu

SEQ ID NO: 76389 - RNA, 32 nt, Human
caaccuggaagaggucccucaccagaucccaa

SEQ ID NO: 76390 - RNA, 32 nt, Human
caaccuggagggcuccuacaccugccagugcc

SEQ ID NO: 76391 - RNA, 32 nt, Human
caaccuggagguuucugaaccccuggccuguu

SEQ ID NO: 76392 - RNA, 32 nt, Human
caaccuggauggaguuggagaucauuauucua

SEQ ID NO: 76393 - RNA, 32 nt, Human
caaccuggccaacauacugaaaccccgucucu

SEQ ID NO: 76394 - RNA, 32 nt, Human
caaccuggccaacaugauaaaaccccaacucu

SEQ ID NO: 76395 - RNA, 32 nt, Human
caaccuggccaacaugguaaaacccuguuucu

SEQ ID NO: 76396 - RNA, 32 nt, Human
caaccuggccaacauggugaaacccugugccu

SEQ ID NO: 76397 - RNA, 32 nt, Human
caaccuggccaacauggugaaaccuugucucu

SEQ ID NO: 76398 - RNA, 32 nt, Human
caaccuggccaacauguugaaaccucgucugu

SEQ ID NO: 76399 - RNA, 32 nt, Human
caaccuggccaacguggggaaaccccaucucu

SEQ ID NO: 76400 - RNA, 32 nt, Human
caaccuggccugggugugcagggagggguucc

SEQ ID NO: 76401 - RNA, 18 nt, Human
caaccuggcucccuccca

SEQ ID NO: 76402 - RNA, 32 nt, Human
caaccugggagauggagguugcagugagccga

SEQ ID NO: 76403 - RNA, 32 nt, Human
caaccugggaggcagagguugcagugagccaa

SEQ ID NO: 76404 - RNA, 32 nt, Human
caaccugggaggcagagguugcagugagccga

SEQ ID NO: 76405 - RNA, 32 nt, Human
caaccugggaggcggagguugcagugagcuua

SEQ ID NO: 76406 - RNA, 32 nt, Human
caaccugggagguagagguugcagugagccga

SEQ ID NO: 76407 - RNA, 32 nt, Human
caaccugggagguugaggcugcagugagcugu

SEQ ID NO: 76408 - RNA, 32 nt, Human
caaccugggcaacagaacaagaacccaucuca

SEQ ID NO: 76409 - RNA, 21 nt, Human
caaccugggcaacagaguaag

SEQ ID NO: 76410 - RNA, 32 nt, Human
caaccugggcaacauggugaaaccccugucuc

SEQ ID NO: 76411 - RNA, 21 nt, Human
caaccugggcagcagagcaag

SEQ ID NO: 76412 - RNA, 21 nt, Human
caaccugggcgacagagcaag

SEQ ID NO: 76413 - RNA, 22 nt, Human
caaccugggcggcagagugaga

SEQ ID NO: 76414 - RNA, 22 nt, Human
caaccuggguaacagagugaga

SEQ ID NO: 76415 - RNA, 21 nt, Human
caaccuggguaacagggcaag

SEQ ID NO: 76416 - RNA, 22 nt, Human
caaccugggugacagaacaaga

SEQ ID NO: 76417 - RNA, 22 nt, Human
caaccugggugacagaccgaga

SEQ ID NO: 76418 - RNA, 22 nt, Human
caaccugggugacagagcaaga

SEQ ID NO: 76419 - RNA, 22 nt, Human
caaccugggugacagagcgaga

SEQ ID NO: 76420 - RNA, 22 nt, Human
caaccugggugacagagugaga

SEQ ID NO: 76421 - RNA, 21 nt, Human
caaccugggugacgagugaga

SEQ ID NO: 76422 - RNA, 22 nt, Human
caaccugggugagagagcgaga

SEQ ID NO: 76423 - RNA, 32 nt, Human
caaccuggucuacauggugaaaccccaucuca

SEQ ID NO: 76424 - RNA, 32 nt, Human
caaccuguaacacauuaaagcuguaauuagca

SEQ ID NO: 76425 - RNA, 32 nt, Human
caaccugucuucaguguaguacaaaggcagag

SEQ ID NO: 76426 - RNA, 32 nt, Human
caaccugugaaaagcugaacagguccaauucu

SEQ ID NO: 76427 - RNA, 32 nt, Human
caaccugugcucagaaggaccccacauuaggu

SEQ ID NO: 76428 - RNA, 32 nt, Human
caaccuguuacagugaggagaucacagugugu

SEQ ID NO: 76429 - RNA, 22 nt, Human
caaccuuauuccaugcugucuu

SEQ ID NO: 76430 - RNA, 23 nt, Human
caaccuucaccuccagguucaag

SEQ ID NO: 76431 - RNA, 24 nt, Human
caaccuucaccuccccgguucaag

SEQ ID NO: 76432 - RNA, 31 nt, Human
caaccuucaguguccaagcagaagaccagug

SEQ ID NO: 76433 - RNA, 32 nt, Human
caaccuucaucccuucuguggcaguuaggaga

SEQ ID NO: 76434 - RNA, 32 nt, Human
caaccuucaucugcacugggcccugugccccu

SEQ ID NO: 76435 - RNA, 32 nt, Human
caaccuuccauguaucuccauccuccccugcu

SEQ ID NO: 76436 - RNA, 32 nt, Human
caaccuucccaauuugugugucaagaaaaugu

SEQ ID NO: 76437 - RNA, 32 nt, Human
caaccuuccccuugaagaccuggaagacccag

SEQ ID NO: 76438 - RNA, 32 nt, Human
caaccuuccucgcccacccccuucccggagaa

SEQ ID NO: 76439 - RNA, 24 nt, Human
caaccuuccucucccagguucaag

SEQ ID NO: 76440 - RNA, 32 nt, Human
caaccuuccuucuuccucauuguggacuugga

SEQ ID NO: 76441 - RNA, 24 nt, Human
caaccuucgccucccagguucaag

SEQ ID NO: 76442 - RNA, 24 nt, Human
caaccuucgccucccggguucaag

SEQ ID NO: 76443 - RNA, 32 nt, Human
caaccuucucauucuccuauccagggauuuaa

SEQ ID NO: 76444 - RNA, 32 nt, Human
caaccuucucuccuugccacccaaaccaaaga

SEQ ID NO: 76445 - RNA, 32 nt, Human
caaccuucugaggaccaggaaauucaaauccc

SEQ ID NO: 76446 - RNA, 21 nt, Human
caaccuucuuuaggagcugcu

SEQ ID NO: 76447 - RNA, 24 nt, Human
caaccuugaacucccaggcucaag

SEQ ID NO: 76448 - RNA, 22 nt, Human
caaccuugaccucccaggcuca

SEQ ID NO: 76449 - RNA, 24 nt, Human
caaccuugaccucccaggcucagg

SEQ ID NO: 76450 - RNA, 24 nt, Human
caaccuugacgucccagguucaag

SEQ ID NO: 76451 - RNA, 24 nt, Human
caaccuuggccuccuagguucaag

SEQ ID NO: 76452 - RNA, 32 nt, Human
caaccuugggcaacauagcaagaccccauuuc

SEQ ID NO: 76453 - RNA, 32 nt, Human
caaccuuggggccagcaucucccacugccucc

SEQ ID NO: 76454 - RNA, 32 nt, Human
caaccuugugcuugacuguccuuucccucugc

SEQ ID NO: 76455 - RNA, 32 nt, Human
caaccuuguggucacaucagaggucaacagca

SEQ ID NO: 76456 - RNA, 32 nt, Human
caaccuuucauuuccuacuucauuccagcagg

SEQ ID NO: 76457 - RNA, 32 nt, Human
caaccuuucccagccccucuucagagggccug

SEQ ID NO: 76458 - RNA, 32 nt, Human
caaccuuucuaccuuaauaucuccccaaaaau

SEQ ID NO: 76459 - RNA, 32 nt, Human
caaccuuucucuucucacgggucugcaguguu

SEQ ID NO: 76460 - RNA, 32 nt, Human
caaccuuugcacuccacugugcaaugcuggcc

SEQ ID NO: 76461 - RNA, 21 nt, Human
caaccuuugccaguauucccu

SEQ ID NO: 76462 - RNA, 24 nt, Human
caaccuuugccucccagguuuaag

SEQ ID NO: 76463 - RNA, 24 nt, Human
caaccuuugccuccuagguucaag

SEQ ID NO: 76464 - RNA, 24 nt, Human
caaccuuugucucccgggcucaag

SEQ ID NO: 76465 - RNA, 32 nt, Human
caacgaagaaaaccuaucuucaguccccaccc

SEQ ID NO: 76466 - RNA, 32 nt, Human
caacgaauagcuccucuacccaagauucuaug

SEQ ID NO: 76467 - RNA, 32 nt, Human
caacgaaugcugcugaagaggagggaggccuc

SEQ ID NO: 76468 - RNA, 32 nt, Human
caacgaauggaaugugugcagauauguauguc

SEQ ID NO: 76469 - RNA, 24 nt, Human
caacgaccauccggcccuagccug

SEQ ID NO: 76470 - RNA, 32 nt, Human
caacgacccucagaugggguagaugccauugc

SEQ ID NO: 76471 - RNA, 32 nt, Human
caacgacgcccuuuuuccuuuuuauacuaaag

SEQ ID NO: 76472 - RNA, 32 nt, Human
caacgacugccucagaaaugggcagagagcau

SEQ ID NO: 76473 - RNA, 32 nt, Human
caacgagccaccacagccaccagucccagaac

SEQ ID NO: 76474 - RNA, 32 nt, Human
caacgaggccugggugccgugugagggccggg

SEQ ID NO: 76475 - RNA, 32 nt, Human
caacgaggguggaucacuugagcccaggaauu

SEQ ID NO: 76476 - RNA, 31 nt, Human
caacgauggguggaaauggcugugggagaag

SEQ ID NO: 76477 - RNA, 32 nt, Human
caacgcaaccgcuuccaccaccaugguguuug

SEQ ID NO: 76478 - RNA, 32 nt, Human
caacgcagcagacuccugggccugaugugcua

SEQ ID NO: 76479 - RNA, 32 nt, Human
caacgcaggaauaaauuccaagauacugaacu

SEQ ID NO: 76480 - RNA, 28 nt, Human
caacgcagugagagacccccaucucuac

SEQ ID NO: 76481 - RNA, 32 nt, Human
caacgcauaaagaaaaauggccgggccagguc

SEQ ID NO: 76482 - RNA, 27 nt, Human
caacgcaucacuggggcugggagcagg

SEQ ID NO: 76483 - RNA, 32 nt, Human
caacgccaaggagaugacccaucuuuugcagu

SEQ ID NO: 76484 - RNA, 32 nt, Human
caacgccauggguucaggcugauccaggagau

SEQ ID NO: 76485 - RNA, 32 nt, Human
caacgccccuccaaaccuccagccucccuguc

SEQ ID NO: 76486 - RNA, 22 nt, Human
caacgccugccucucaggcuca

SEQ ID NO: 76487 - RNA, 32 nt, Human
caacgccugcgaggagcucaggaccagucuuc

SEQ ID NO: 76488 - RNA, 32 nt, Human
caacgcgcuagagaggccgucucaccuccaaa

SEQ ID NO: 76489 - RNA, 32 nt, Human
caacgcgggcacaguggacuucagagaagcau

SEQ ID NO: 76490 - RNA, 32 nt, Human
caacgcggguggauugcuugagcccaggaguu

SEQ ID NO: 76491 - RNA, 32 nt, Human
caacgcggucugguuuuccagccugggagugg

SEQ ID NO: 76492 - RNA, 32 nt, Human
caacgcgucacuuugggcagcguauucccugg

SEQ ID NO: 76493 - RNA, 32 nt, Human
caacgcguuugcaaauauuccccugguagccu

SEQ ID NO: 76494 - RNA, 32 nt, Human
caacgcucagccaacggauucuuuucaagcug

SEQ ID NO: 76495 - RNA, 32 nt, Human
caacgcugaagugccugugaaacacagcccag

SEQ ID NO: 76496 - RNA, 32 nt, Human
caacgcugagccaccuugggaaccuagcugau

SEQ ID NO: 76497 - RNA, 32 nt, Human
caacgcuggugcuugauacacugugaagugaa

SEQ ID NO: 76498 - RNA, 32 nt, Human
caacgcugucggcagagcugacuugccuguac

SEQ ID NO: 76499 - RNA, 32 nt, Human
caacgcuuaccucucuccaacugcuucagcau

SEQ ID NO: 76500 - RNA, 22 nt, Human
caacggaaacuuuuagcuccac

SEQ ID NO: 76501 - RNA, 31 nt, Human
caacggaagagaccucccgcuggggccgggc

SEQ ID NO: 76502 - RNA, 32 nt, Human
caacggaagcaaccucccaacccagaggaggc

SEQ ID NO: 76503 - RNA, 32 nt, Human
caacggaccuaucgaugucuauuugugagaag

SEQ ID NO: 76504 - RNA, 32 nt, Human
caacggagagcgccugccccucccagaacaca

SEQ ID NO: 76505 - RNA, 32 nt, Human
caacggaugccaccagcucuccugcagagccu

SEQ ID NO: 76506 - RNA, 32 nt, Human
caacggaugccugugauucccugguauuuaua

SEQ ID NO: 76507 - RNA, 32 nt, Human
caacggcagagggagugagcaggggagaaaua

SEQ ID NO: 76508 - RNA, 32 nt, Human
caacggccaaguguucagcagugggauaucaa

SEQ ID NO: 76509 - RNA, 32 nt, Human
caacggccacaggacuccagcuccaagugggu

SEQ ID NO: 76510 - RNA, 32 nt, Human
caacggccugcaggacucggcccagcugggua

SEQ ID NO: 76511 - RNA, 32 nt, Human
caacggcuacauuccucccccagggccaaggg

SEQ ID NO: 76512 - RNA, 32 nt, Human
caacggcugacugccuggagcugguguuuuuc

SEQ ID NO: 76513 - RNA, 32 nt, Human
caacggcuggcaagacucaggguccucagugg

SEQ ID NO: 76514 - RNA, 32 nt, Human
caacgggcagaaagaaauccacacagcccggu

SEQ ID NO: 76515 - RNA, 32 nt, Human
caacgggcccuccuccccuccuugcaccggcc

SEQ ID NO: 76516 - RNA, 32 nt, Human
caacggggacaacuccagaaggucauuccaga

SEQ ID NO: 76517 - RNA, 32 nt, Human
caacggggacacaaggaggcagaggagcuaac

SEQ ID NO: 76518 - RNA, 32 nt, Human
caacgggggcggaucacuugaggucagaaguu

SEQ ID NO: 76519 - RNA, 32 nt, Human
caacgggugcccaugggacaccagccugcgag

SEQ ID NO: 76520 - RNA, 32 nt, Human
caacggguguagccacuggugcuuugaagccu

SEQ ID NO: 76521 - RNA, 32 nt, Human
caacggguuccugaggccccuccuggccaggc

SEQ ID NO: 76522 - RNA, 32 nt, Human
caacggucuggcagggcagcaggaggcuuucu

SEQ ID NO: 76523 - RNA, 32 nt, Human
caacgguggcuccggcgguggggaugggaccg

SEQ ID NO: 76524 - RNA, 20 nt, Human
caacguaagauguccuccuu

SEQ ID NO: 76525 - RNA, 32 nt, Human
caacguagcuacucaggaggcugaggugggag

SEQ ID NO: 76526 - RNA, 32 nt, Human
caacguaggaggaucacuugaguucaauacca

SEQ ID NO: 76527 - RNA, 32 nt, Human
caacguaggccuaaucacagcacuuugggagg

SEQ ID NO: 76528 - RNA, 32 nt, Human
caacguauuuuccuacauucucuaauaaaucu

SEQ ID NO: 76529 - RNA, 32 nt, Human
caacgucacugaagggcugaaggaagccaacg

SEQ ID NO: 76530 - RNA, 32 nt, Human
caacgucaggauucagagguaggcucuggagc

SEQ ID NO: 76531 - RNA, 24 nt, Human
caacguccgccucccagguucaag

SEQ ID NO: 76532 - RNA, 32 nt, Human
caacguccucaaggaugccguagccgucaaga

SEQ ID NO: 76533 - RNA, 32 nt, Human
caacgugagccgcgggaacacguccggcgugc

SEQ ID NO: 76534 - RNA, 32 nt, Human
caacgugagggaaggugggaaaugucuugagu

SEQ ID NO: 76535 - RNA, 21 nt, Human
caacgugcgccuccccucccg

SEQ ID NO: 76536 - RNA, 23 nt, Human
caacgugcugggauuacaggcau

SEQ ID NO: 76537 - RNA, 32 nt, Human
caacguggaaaugggcagaggcuggaagaauu

SEQ ID NO: 76538 - RNA, 32 nt, Human
caacguggacacacccgguuccucacaaagcc

SEQ ID NO: 76539 - RNA, 32 nt, Human
caacguggacuugccuccugguguguuuuaaa

SEQ ID NO: 76540 - RNA, 17 nt, Human
caacguggagcccuuga

SEQ ID NO: 76541 - RNA, 32 nt, Human
caacguggcugcugcccugcccaacacucggc

SEQ ID NO: 76542 - RNA, 32 nt, Human
caacguggggcccugacaccacguuaucaaac

SEQ ID NO: 76543 - RNA, 19 nt, Human
caacgugguaaaacccugu

SEQ ID NO: 76544 - RNA, 32 nt, Human
caacguguuagccaggauggucucagucucca

SEQ ID NO: 76545 - RNA, 32 nt, Human
caacguuccucuccaccugcauuauguacuac

SEQ ID NO: 76546 - RNA, 32 nt, Human
caacguuugccucccagccugacucccucggc

SEQ ID NO: 76547 - RNA, 32 nt, Human
caacguuuugcacugauaaacaugagaaucug

SEQ ID NO: 76548 - RNA, 32 nt, Human
caacuaaaaauacaaaaauuagccagguguga

SEQ ID NO: 76549 - RNA, 32 nt, Human
caacuaaaaauauaaaaauuagccaggcgugg

SEQ ID NO: 76550 - RNA, 32 nt, Human
caacuaaaauuuaaaagaagaggaagacucag

SEQ ID NO: 76551 - RNA, 32 nt, Human
caacuaaagagcccucugggccuguguugcug

SEQ ID NO: 76552 - RNA, 32 nt, Human
caacuaaauuuguuuaguacacauuaaagguc

SEQ ID NO: 76553 - RNA, 32 nt, Human
caacuaagccugcuggucagggcuggcuuuca

SEQ ID NO: 76554 - RNA, 32 nt, Human
caacuaauaauacaaaauuagccaggcguggu

SEQ ID NO: 76555 - RNA, 32 nt, Human
caacuaaucaaauaaaugaaugaaugaugaau

SEQ ID NO: 76556 - RNA, 32 nt, Human
caacuacaaaaaguaaggcagcugcagccacc

SEQ ID NO: 76557 - RNA, 32 nt, Human
caacuacaaccagcaaaaagaccagucaugca

SEQ ID NO: 76558 - RNA, 21 nt, Human
caacuacaacucaccggugcc

SEQ ID NO: 76559 - RNA, 21 nt, Human
caacuacaacuuugagauccc

SEQ ID NO: 76560 - RNA, 32 nt, Human
caacuacacaaagcaggcuugcccaguacauu

SEQ ID NO: 76561 - RNA, 30 nt, Human
caacuacagcuccaaucagaaacccugcgc

SEQ ID NO: 76562 - RNA, 32 nt, Human
caacuacccaggaggcugaggcaugagaaucg

SEQ ID NO: 76563 - RNA, 22 nt, Human
caacuaccccuucuucccagag

SEQ ID NO: 76564 - RNA, 32 nt, Human
caacuaccucaaaguuuuguuaucucugcuug

SEQ ID NO: 76565 - RNA, 32 nt, Human
caacuacuacaauuccgccuaggccacaaggc

SEQ ID NO: 76566 - RNA, 32 nt, Human
caacuacuaccuuggugccucaguuuacccau

SEQ ID NO: 76567 - RNA, 22 nt, Human
caacuacucaacucugcucugg

SEQ ID NO: 76568 - RNA, 32 nt, Human
caacuacucaggaggcugcgacaggaaaauug

SEQ ID NO: 76569 - RNA, 32 nt, Human
caacuacuccuggaugcauccuagagaagugc

SEQ ID NO: 76570 - RNA, 32 nt, Human
caacuacuuccgcuagcccaucauggcucagg

SEQ ID NO: 76571 - RNA, 32 nt, Human
caacuacuugggaggcugaggugggaggauug

SEQ ID NO: 76572 - RNA, 32 nt, Human
caacuagaccucuccugccucucccauggcuu

SEQ ID NO: 76573 - RNA, 32 nt, Human
caacuagaggcaguaaccugucauuccagagg

SEQ ID NO: 76574 - RNA, 32 nt, Human
caacuagcggccaugcaguuccucacugacaa

SEQ ID NO: 76575 - RNA, 32 nt, Human
caacuaggcuguagaagagaaauguucaccau

SEQ ID NO: 76576 - RNA, 32 nt, Human
caacuaggggaggagagagggucuccaguguu

SEQ ID NO: 76577 - RNA, 32 nt, Human
caacuauaagcacaaagaagagauaacuucca

SEQ ID NO: 76578 - RNA, 32 nt, Human
caacuauacacaaaccuugaacauuuuacaag

SEQ ID NO: 76579 - RNA, 32 nt, Human
caacuauacuucagaagaauuuuuacuugcaa

SEQ ID NO: 76580 - RNA, 32 nt, Human
caacuauaucuuccugugcauuccgauggaau

SEQ ID NO: 76581 - RNA, 19 nt, Human
caacuaucaucaccaccaa

SEQ ID NO: 76582 - RNA, 31 nt, Human
caacuauccgucucgaauaccagggcagggc

SEQ ID NO: 76583 - RNA, 32 nt, Human
caacuauggaaagaggcagaguuugcuugccc

SEQ ID NO: 76584 - RNA, 32 nt, Human
caacuauggaagggagcugagcuccaguauuu

SEQ ID NO: 76585 - RNA, 32 nt, Human
caacuauguuauaccuggacauuuuagauguu

SEQ ID NO: 76586 - RNA, 32 nt, Human
caacucaacaauauuaguugcauuccuuuaua

SEQ ID NO: 76587 - RNA, 32 nt, Human
caacucaacauggcagaaccauuuuugagaug

SEQ ID NO: 76588 - RNA, 32 nt, Human
caacucaacgcaugcagccacuguagaaaagu

SEQ ID NO: 76589 - RNA, 32 nt, Human
caacucacaacaggcuggauggguggguggua

SEQ ID NO: 76590 - RNA, 32 nt, Human
caacucacagaaggggacugacagugggcaac

SEQ ID NO: 76591 - RNA, 32 nt, Human
caacucacccagcuaauuuuguauuuuuagua

SEQ ID NO: 76592 - RNA, 32 nt, Human
caacucaccgcaaccuccgccucccggguuca

SEQ ID NO: 76593 - RNA, 32 nt, Human
caacucaccgcaaccuccuccucuuggguuca

SEQ ID NO: 76594 - RNA, 32 nt, Human
caacucacgccagggaccuggccaagacaccu

SEQ ID NO: 76595 - RNA, 29 nt, Human
caacucacuaccuggagagaacuuaguaa

SEQ ID NO: 76596 - RNA, 32 nt, Human
caacucacugauuuacuucuagcaauagcaug

SEQ ID NO: 76597 - RNA, 32 nt, Human
caacucacugcaaccccugcucucagguucaa

SEQ ID NO: 76598 - RNA, 32 nt, Human
caacucacugcaaccuccacccgccggguccc

SEQ ID NO: 76599 - RNA, 32 nt, Human
caacucacugcaaccuccgcucccgguuugag

SEQ ID NO: 76600 - RNA, 32 nt, Human
caacucacugcaaccucugcccuucagguuca

SEQ ID NO: 76601 - RNA, 32 nt, Human
caacucacugcaagcuccgccuccuggguuca

SEQ ID NO: 76602 - RNA, 32 nt, Human
caacucacugccugcuggaagcucugugggaa

SEQ ID NO: 76603 - RNA, 32 nt, Human
caacucacuugggguggggaaaggagguaaag

SEQ ID NO: 76604 - RNA, 32 nt, Human
caacucacuuucucccuguuugcuggcccaga

SEQ ID NO: 76605 - RNA, 32 nt, Human
caacucagcccuucaccugugcaccugugacu

SEQ ID NO: 76606 - RNA, 32 nt, Human
caacucagcgaaaaacucagaagguuugggua

SEQ ID NO: 76607 - RNA, 32 nt, Human
caacucagcugguuccacacccuggcaauugu

SEQ ID NO: 76608 - RNA, 32 nt, Human
caacucagcuguucuuucuagcucugaaauag

SEQ ID NO: 76609 - RNA, 32 nt, Human
caacucaggaggcugaggcaggagaaucacuu

SEQ ID NO: 76610 - RNA, 32 nt, Human
caacucaggaggcugaggcaggagaauggcuu

SEQ ID NO: 76611 - RNA, 32 nt, Human
caacucagggcuaaagucauccagugaaacuu

SEQ ID NO: 76612 - RNA, 32 nt, Human
caacucagggcuccagaccucagcuaaaaaga

SEQ ID NO: 76613 - RNA, 32 nt, Human
caacucagggguggagacugaggccucaggag

SEQ ID NO: 76614 - RNA, 32 nt, Human
caacucagucagauggcagacagguggagccc

SEQ ID NO: 76615 - RNA, 32 nt, Human
caacucauauccacguuaucuagcaaaaguca

SEQ ID NO: 76616 - RNA, 32 nt, Human
caacucaugggcucaacucauccuccuaucuu

SEQ ID NO: 76617 - RNA, 32 nt, Human
caacucauugauuucagagauagggaagcuga

SEQ ID NO: 76618 - RNA, 32 nt, Human
caacucauugcaaccuccaccugccggguccc

SEQ ID NO: 76619 - RNA, 32 nt, Human
caacucauuucuuauaucauauuguuaaauaa

SEQ ID NO: 76620 - RNA, 32 nt, Human
caacuccaaauacaucucucccuucuugaaau

SEQ ID NO: 76621 - RNA, 24 nt, Human
caacuccagaucucaggugaucua

SEQ ID NO: 76622 - RNA, 32 nt, Human
caacuccagggccuuuccagggccagacaggu

SEQ ID NO: 76623 - RNA, 32 nt, Human
caacuccaggguuaaagaaaggcagagauugg

SEQ ID NO: 76624 - RNA, 32 nt, Human
caacuccaggugcucagacugccuguggcagc

SEQ ID NO: 76625 - RNA, 32 nt, Human
caacuccagguuaugaaaacaguacuuggaaa

SEQ ID NO: 76626 - RNA, 32 nt, Human
caacuccaucauucacacuggaggauuagagg

SEQ ID NO: 76627 - RNA, 32 nt, Human
caacuccaucccucaccacaguugucuaggaa

SEQ ID NO: 76628 - RNA, 32 nt, Human
caacuccaugaccaggccaccaucuguacccu

SEQ ID NO: 76629 - RNA, 21 nt, Human
caacucccaggccacacacag

SEQ ID NO: 76630 - RNA, 32 nt, Human
caacucccaggccucagaugcaggggcccaga

SEQ ID NO: 76631 - RNA, 23 nt, Human
caacucccauucaugcccaccag

SEQ ID NO: 76632 - RNA, 19 nt, Human
caacucccccaggcucccu

SEQ ID NO: 76633 - RNA, 32 nt, Human
caacuccccugcccucuguuugcaggcacagg

SEQ ID NO: 76634 - RNA, 32 nt, Human
caacuccccuucuaguucccaaaggcgauguc

SEQ ID NO: 76635 - RNA, 32 nt, Human
caacucccuuaaggucuccaaaccagacggug

SEQ ID NO: 76636 - RNA, 32 nt, Human
caacucccuuccccaucucugcucaccaugug

SEQ ID NO: 76637 - RNA, 32 nt, Human
caacuccggagccagccgaccccacauggauu

SEQ ID NO: 76638 - RNA, 32 nt, Human
caacuccuaccuccuccucuugcuucgaucag

SEQ ID NO: 76639 - RNA, 23 nt, Human
caacuccuagccucaagugaucc

SEQ ID NO: 76640 - RNA, 32 nt, Human
caacuccuagugagacagcaggcggaaagauu

SEQ ID NO: 76641 - RNA, 32 nt, Human
caacuccuccuccuccuccuccucuccugcug

SEQ ID NO: 76642 - RNA, 24 nt, Human
caacuccugaccucagauggucca

SEQ ID NO: 76643 - RNA, 24 nt, Human
caacuccugaccucaggcgaucca

SEQ ID NO: 76644 - RNA, 23 nt, Human
caacuccugaccucaggcgaucu

SEQ ID NO: 76645 - RNA, 23 nt, Human
caacuccugaccucagguaaucc

SEQ ID NO: 76646 - RNA, 24 nt, Human
caacuccugaccucaggugaucca

SEQ ID NO: 76647 - RNA, 23 nt, Human
caacuccugaccucaggugaucu

SEQ ID NO: 76648 - RNA, 22 nt, Human
caacuccugacuucaugaucca

SEQ ID NO: 76649 - RNA, 24 nt, Human
caacuccugagcucaggugaucca

SEQ ID NO: 76650 - RNA, 32 nt, Human
caacuccugaggaaagugcuauucuugucucc

SEQ ID NO: 76651 - RNA, 32 nt, Human
caacuccugaugccucauuugagcaccuggau

SEQ ID NO: 76652 - RNA, 23 nt, Human
caacuccugcccucaagugaucc

SEQ ID NO: 76653 - RNA, 23 nt, Human
caacuccuggacucaagugaucc

SEQ ID NO: 76654 - RNA, 32 nt, Human
caacuccuggccucaaaugaucagcccgcuuc

SEQ ID NO: 76655 - RNA, 23 nt, Human
caacuccuggcucagggaaucca

SEQ ID NO: 76656 - RNA, 32 nt, Human
caacuccugggcucaauacucuugccucagcc

SEQ ID NO: 76657 - RNA, 32 nt, Human
caacuccuguaauccauguaacugcuuugagu

SEQ ID NO: 76658 - RNA, 32 nt, Human
caacucgaacugcuuucguccauguuucucac

SEQ ID NO: 76659 - RNA, 32 nt, Human
caacucgaagccaggagggggcuuccagguca

SEQ ID NO: 76660 - RNA, 32 nt, Human
caacucgacucucauuucuucccugcugguaa

SEQ ID NO: 76661 - RNA, 32 nt, Human
caacucgcuccaaguugugcagccgggaccgc

SEQ ID NO: 76662 - RNA, 32 nt, Human
caacucggaagaggaaagaaaggaagucagga

SEQ ID NO: 76663 - RNA, 32 nt, Human
caacucgggaggcugaggcaggagaauggcgu

SEQ ID NO: 76664 - RNA, 32 nt, Human
caacucgucacacccaagcugcuggccuccag

SEQ ID NO: 76665 - RNA, 32 nt, Human
caacucuaaagugcuaauaauaaucucaguua

SEQ ID NO: 76666 - RNA, 32 nt, Human
caacucuacuaaaaauacaaaaauuagggccg

SEQ ID NO: 76667 - RNA, 32 nt, Human
caacucuacuaaaaauauaaaaauuagugagg

SEQ ID NO: 76668 - RNA, 32 nt, Human
caacucuagaaaugcaaaauguuaacagguac

SEQ ID NO: 76669 - RNA, 32 nt, Human
caacucuagaauucaggauguuccuucuauug

SEQ ID NO: 76670 - RNA, 32 nt, Human
caacucuagugugccagcacaggccagacaua

SEQ ID NO: 76671 - RNA, 32 nt, Human
caacucucagaaacuccagcugcccgaaaacu

SEQ ID NO: 76672 - RNA, 32 nt, Human
caacucucaguauuuuggauuauucaagugua

SEQ ID NO: 76673 - RNA, 32 nt, Human
caacucucaguucugaaggaacaaugagaaac

SEQ ID NO: 76674 - RNA, 32 nt, Human
caacucuccagccgaagcugcaggggcaggag

SEQ ID NO: 76675 - RNA, 32 nt, Human
caacucuccuacccucuccucuuccuucuccu

SEQ ID NO: 76676 - RNA, 32 nt, Human
caacucuccugccucagccucccuaguagcug

SEQ ID NO: 76677 - RNA, 32 nt, Human
caacucucuccagcaauagcugcccagcuuug

SEQ ID NO: 76678 - RNA, 32 nt, Human
caacucucucuccccuccucccacucucuucc

SEQ ID NO: 76679 - RNA, 32 nt, Human
caacucucugcugccuuacaaguauuaaauau

SEQ ID NO: 76680 - RNA, 32 nt, Human
caacucugaaaaccuugaacacggccaaaauc

SEQ ID NO: 76681 - RNA, 32 nt, Human
caacucugcagggcuucucucccugccaccac

SEQ ID NO: 76682 - RNA, 32 nt, Human
caacucugcauggccgucuucuuuccccaaac

SEQ ID NO: 76683 - RNA, 32 nt, Human
caacucugccagcccccaccugccaggacguu

SEQ ID NO: 76684 - RNA, 32 nt, Human
caacucugcccacaccugcugcaacacuaaug

SEQ ID NO: 76685 - RNA, 32 nt, Human
caacucugccuugccagaacugaccagugugu

SEQ ID NO: 76686 - RNA, 32 nt, Human
caacucuggaguggcauaguaaaguggcaaag

SEQ ID NO: 76687 - RNA, 32 nt, Human
caacucuggcugcuaaagcggcugccaccugc

SEQ ID NO: 76688 - RNA, 32 nt, Human
caacucuguccccaggaaguugugugacccua

SEQ ID NO: 76689 - RNA, 32 nt, Human
caacucugugcucacagaaacaugcgcuguaa

SEQ ID NO: 76690 - RNA, 32 nt, Human
caacucuguguaccaagaaccccuagcaucag

SEQ ID NO: 76691 - RNA, 32 nt, Human
caacucuguucugaucagugggugggugaggu

SEQ ID NO: 76692 - RNA, 21 nt, Human
caacucuuagagggcacauca

SEQ ID NO: 76693 - RNA, 22 nt, Human
caacucuuauuucacaaacuca

SEQ ID NO: 76694 - RNA, 32 nt, Human
caacucuucagcccccucccccugcacaccug

SEQ ID NO: 76695 - RNA, 32 nt, Human
caacucuucugccucagcaucccaaguagcug

SEQ ID NO: 76696 - RNA, 23 nt, Human
caacucuuggccucaagugaucc

SEQ ID NO: 76697 - RNA, 32 nt, Human
caacucuuucuguucuuucuggcagcuaucuu

SEQ ID NO: 76698 - RNA, 32 nt, Human
caacucuuuucaucccucuccugggucugcgc

SEQ ID NO: 76699 - RNA, 32 nt, Human
caacugaaaaugugaaaguaaccauaucugac

SEQ ID NO: 76700 - RNA, 32 nt, Human
caacugaaagaguuccuucaagaaguuccucu

SEQ ID NO: 76701 - RNA, 32 nt, Human
caacugaaaggaugaaaucacugacuuggauc

SEQ ID NO: 76702 - RNA, 32 nt, Human
caacugaaaugaacucacguguccucacaacu

SEQ ID NO: 76703 - RNA, 32 nt, Human
caacugaacacaaucaguuuuaucacagguau

SEQ ID NO: 76704 - RNA, 21 nt, Human
caacugaaggcauggcggcgg

SEQ ID NO: 76705 - RNA, 32 nt, Human
caacugaaguucugaguuuuuauagggaauuu

SEQ ID NO: 76706 - RNA, 32 nt, Human
caacugaccugcgcuggagcugcucuuaucua

SEQ ID NO: 76707 - RNA, 32 nt, Human
caacugagcagccucuggagaggggccauuaa

SEQ ID NO: 76708 - RNA, 32 nt, Human
caacugagggaaaauuacaaaaacugggcaca

SEQ ID NO: 76709 - RNA, 32 nt, Human
caacugagguccacugaccagaaacaacacca

SEQ ID NO: 76710 - RNA, 32 nt, Human
caacugagucauuugcaagaugagcuaaaaau

SEQ ID NO: 76711 - RNA, 32 nt, Human
caacugauaccauuuucuguugcucagcgccc

SEQ ID NO: 76712 - RNA, 32 nt, Human
caacugauggggccuggagugcaggaggggca

SEQ ID NO: 76713 - RNA, 32 nt, Human
caacugauuuccaugagacaaugacagaaacc

SEQ ID NO: 76714 - RNA, 32 nt, Human
caacugcaacagcaacagcugccaggaccugg

SEQ ID NO: 76715 - RNA, 32 nt, Human
caacugcaacuauuuauuugcaaagaaugcua

SEQ ID NO: 76716 - RNA, 32 nt, Human
caacugcaaugccauccucgccauauaccaaa

SEQ ID NO: 76717 - RNA, 32 nt, Human
caacugcacagagcccugccccaguuucagga

SEQ ID NO: 76718 - RNA, 20 nt, Human
caacugcacagccaccaaca

SEQ ID NO: 76719 - RNA, 32 nt, Human
caacugcacuaggauuucuguaaggaguaauu

SEQ ID NO: 76720 - RNA, 30 nt, Human
caacugcagcucuccaucagcuccugucuc

SEQ ID NO: 76721 - RNA, 32 nt, Human
caacugcauacauagcuccuagcacagugccu

SEQ ID NO: 76722 - RNA, 32 nt, Human
caacugcauggagcugcacucuaggagaagga

SEQ ID NO: 76723 - RNA, 32 nt, Human
caacugcauuuaaaauguuauuagucaguaua

SEQ ID NO: 76724 - RNA, 32 nt, Human
caacugccaagugcuauauucaaagcaggaug

SEQ ID NO: 76725 - RNA, 32 nt, Human
caacugccaccaguccccagcugcagaccuuc

SEQ ID NO: 76726 - RNA, 32 nt, Human
caacugcccgcuggaccccagacucagucugu

SEQ ID NO: 76727 - RNA, 32 nt, Human
caacugcccugccugccucuagcucccagcau

SEQ ID NO: 76728 - RNA, 32 nt, Human
caacugccuuccugccucuccccuuccuccuc

SEQ ID NO: 76729 - RNA, 32 nt, Human
caacugcgagcugcuccacuucucagcucucc

SEQ ID NO: 76730 - RNA, 32 nt, Human
caacugcguuggacaccauaagccacagccuc

SEQ ID NO: 76731 - RNA, 32 nt, Human
caacugcuauugguucuuccacacagcgccug

SEQ ID NO: 76732 - RNA, 32 nt, Human
caacugcucacaugagucaaaauacagcucau

SEQ ID NO: 76733 - RNA, 32 nt, Human
caacugcucggccucuugggccaggcugugcc

SEQ ID NO: 76734 - RNA, 32 nt, Human
caacugcugagucugugggauuaaggggauua

SEQ ID NO: 76735 - RNA, 32 nt, Human
caacugcugcagcucucggcuuccgcccaaca

SEQ ID NO: 76736 - RNA, 32 nt, Human
caacugcugcuguggccuccagcuuggcuggu

SEQ ID NO: 76737 - RNA, 32 nt, Human
caacugcugcuuccacccccuucaccuugacu

SEQ ID NO: 76738 - RNA, 32 nt, Human
caacugcuggguuagcuuuccacagacauaaa

SEQ ID NO: 76739 - RNA, 32 nt, Human
caacugcuucaggaaugggccugagaucccau

SEQ ID NO: 76740 - RNA, 32 nt, Human
caacugcuucaucucugccaacacuaauuuuu

SEQ ID NO: 76741 - RNA, 22 nt, Human
caacugcuuccgucucagagua

SEQ ID NO: 76742 - RNA, 32 nt, Human
caacugcuugccaaauguugguuuacuaugcu

SEQ ID NO: 76743 - RNA, 32 nt, Human
caacugcuuguagauaucauuuuugcagugua

SEQ ID NO: 76744 - RNA, 32 nt, Human
caacugcuuugcaacaguugcugguauauuua

SEQ ID NO: 76745 - RNA, 32 nt, Human
caacuggaaauuccaggaaccaaaaagagcau

SEQ ID NO: 76746 - RNA, 32 nt, Human
caacuggaagcaaagaggguugcucaacgccc

SEQ ID NO: 76747 - RNA, 32 nt, Human
caacuggagccagcaaccagcuauccaucagc

SEQ ID NO: 76748 - RNA, 32 nt, Human
caacuggauucaucauuuuccacauacuuuac

SEQ ID NO: 76749 - RNA, 32 nt, Human
caacuggauugagagacugugaaggaacucgg

SEQ ID NO: 76750 - RNA, 32 nt, Human
caacuggcaaaagcuucuuuucugccuaucuu

SEQ ID NO: 76751 - RNA, 32 nt, Human
caacuggcaaagugcuuucaugcuuuggagau

SEQ ID NO: 76752 - RNA, 32 nt, Human
caacuggccagaccugcacacgccgagggccc

SEQ ID NO: 76753 - RNA, 21 nt, Human
caacuggccggcuuccuggcc

SEQ ID NO: 76754 - RNA, 32 nt, Human
caacuggccuccagggggcauuguuggaauau

SEQ ID NO: 76755 - RNA, 32 nt, Human
caacuggccucgacccucccagcucccuuaga

SEQ ID NO: 76756 - RNA, 32 nt, Human
caacuggcucuuccuccccucacuaagaagac

SEQ ID NO: 76757 - RNA, 32 nt, Human
caacuggcuucucaccagaacauccagugggc

SEQ ID NO: 76758 - RNA, 32 nt, Human
caacugggagggaguccuccgugccucacuua

SEQ ID NO: 76759 - RNA, 32 nt, Human
caacugggaugagauuguugauaacuuugaug

SEQ ID NO: 76760 - RNA, 32 nt, Human
caacugggauuuggggagcuguggagggugca

SEQ ID NO: 76761 - RNA, 32 nt, Human
caacugggcuuuaacaguuucaaucuaugaaa

SEQ ID NO: 76762 - RNA, 32 nt, Human
caacuggggaccccugcauggccacagcucag

SEQ ID NO: 76763 - RNA, 32 nt, Human
caacuggggaccugggcagcaagcuucacacc

SEQ ID NO: 76764 - RNA, 32 nt, Human
caacugggucuugggacacccuccaguaccug

SEQ ID NO: 76765 - RNA, 32 nt, Human
caacugggugacaagggugaggaugagaagug

SEQ ID NO: 76766 - RNA, 32 nt, Human
caacuggguuaauucuccagccacuuuuggug

SEQ ID NO: 76767 - RNA, 32 nt, Human
caacugguaauccagucaguaggcaacugcag

SEQ ID NO: 76768 - RNA, 32 nt, Human
caacuggucuccaccaguauuugucacuuuau

SEQ ID NO: 76769 - RNA, 32 nt, Human
caacugguucugccugucgccuugccacggag

SEQ ID NO: 76770 - RNA, 32 nt, Human
caacugguuuacuugucugucuucuauuaguu

SEQ ID NO: 76771 - RNA, 32 nt, Human
caacuguaaagauguaucaguuuuauuaaaau

SEQ ID NO: 76772 - RNA, 32 nt, Human
caacuguaaauacauggauauauuucugcugu

SEQ ID NO: 76773 - RNA, 32 nt, Human
caacuguaacugacaguggcugccuucucugg

SEQ ID NO: 76774 - RNA, 32 nt, Human
caacuguaugaggaggaggaggaggaggaugu

SEQ ID NO: 76775 - RNA, 32 nt, Human
caacugucaauccagauuugaccucauuugca

SEQ ID NO: 76776 - RNA, 21 nt, Human
caacugucagcucucagggug

SEQ ID NO: 76777 - RNA, 32 nt, Human
caacugucauuucuuuuuccuuaaaacauaug

SEQ ID NO: 76778 - RNA, 32 nt, Human
caacuguccuuucucaauuacacaaaugcugu

SEQ ID NO: 76779 - RNA, 32 nt, Human
caacugucuuaagucccuuccugcugcuguaa

SEQ ID NO: 76780 - RNA, 32 nt, Human
caacugugacuagggcugggggagagguuagg

SEQ ID NO: 76781 - RNA, 32 nt, Human
caacugugaggggagagcagcauggccagguc

SEQ ID NO: 76782 - RNA, 32 nt, Human
caacugugaucacuuuauuacucugaaugccu

SEQ ID NO: 76783 - RNA, 32 nt, Human
caacugugauuucccauguccaaaguggcucu

SEQ ID NO: 76784 - RNA, 32 nt, Human
caacugugcacuccucccuugguggcacccua

SEQ ID NO: 76785 - RNA, 32 nt, Human
caacugugccuggcccaaaaccagaccguuaa

SEQ ID NO: 76786 - RNA, 32 nt, Human
caacuguguaccugugcaauguuuacagaugg

SEQ ID NO: 76787 - RNA, 32 nt, Human
caacugugugugagcugcacuggccucacagc

SEQ ID NO: 76788 - RNA, 32 nt, Human
caacuguuaccuuuguuauaagggaacuacga

SEQ ID NO: 76789 - RNA, 31 nt, Human
caacuguucacugagcugcuguugaauaggg

SEQ ID NO: 76790 - RNA, 22 nt, Human
caacuguucugcggguuggaga

SEQ ID NO: 76791 - RNA, 32 nt, Human
caacuguucugguaugaucuaaaacaaguuua

SEQ ID NO: 76792 - RNA, 32 nt, Human
caacuguugaguugaucacauacauccaaaag

SEQ ID NO: 76793 - RNA, 32 nt, Human
caacuguuggaccugcacugccuuuccagcag

SEQ ID NO: 76794 - RNA, 32 nt, Human
caacuguuuaaucccuucugucuuucuguucu

SEQ ID NO: 76795 - RNA, 32 nt, Human
caacuguuuucagcaccuuuuauauguaagga

SEQ ID NO: 76796 - RNA, 32 nt, Human
caacuuaccaugucggugccguagacgggaga

SEQ ID NO: 76797 - RNA, 32 nt, Human
caacuuagagguggggagcagagaauucucuu

SEQ ID NO: 76798 - RNA, 31 nt, Human
caacuuagccacgucuggccuguguccuugg

SEQ ID NO: 76799 - RNA, 20 nt, Human
caacuuauccccaacaggug

SEQ ID NO: 76800 - RNA, 25 nt, Human
caacuuaucccccaccuccaucccu

SEQ ID NO: 76801 - RNA, 32 nt, Human
caacuucaaguuucagcaacuaccuacaaaag

SEQ ID NO: 76802 - RNA, 32 nt, Human
caacuucacuucucaacuuccugcuuuuuauu

SEQ ID NO: 76803 - RNA, 32 nt, Human
caacuucaggagaccugugagcacacauuagc

SEQ ID NO: 76804 - RNA, 32 nt, Human
caacuucaguccgggcuggaggccgugcacaa

SEQ ID NO: 76805 - RNA, 32 nt, Human
caacuucaguugaaaagagguggauucauguc

SEQ ID NO: 76806 - RNA, 32 nt, Human
caacuucaguugagagggugcaguccagacag

SEQ ID NO: 76807 - RNA, 32 nt, Human
caacuucaugcaguuagaaagacccggaggcc

SEQ ID NO: 76808 - RNA, 32 nt, Human
caacuucauuagcuccagucuguggcuccugg

SEQ ID NO: 76809 - RNA, 32 nt, Human
caacuucauuagcuucugugaugacucaagau

SEQ ID NO: 76810 - RNA, 32 nt, Human
caacuucauuagcuucuguggugacucaagau

SEQ ID NO: 76811 - RNA, 32 nt, Human
caacuucauugaauguaauuguccucaaauca

SEQ ID NO: 76812 - RNA, 32 nt, Human
caacuucauugaauguaauuguccucaaauua

SEQ ID NO: 76813 - RNA, 24 nt, Human
caacuuccaccucccagguucaag

SEQ ID NO: 76814 - RNA, 32 nt, Human
caacuucccacaucauuuuguaugcauaaccu

SEQ ID NO: 76815 - RNA, 32 nt, Human
caacuucccagcggcuuucucuuucugauggg

SEQ ID NO: 76816 - RNA, 24 nt, Human
caacuuccgcaucccagguucaag

SEQ ID NO: 76817 - RNA, 24 nt, Human
caacuuccgcuucccagguucaag

SEQ ID NO: 76818 - RNA, 32 nt, Human
caacuuccuccaccuuucccuuggauucaagu

SEQ ID NO: 76819 - RNA, 32 nt, Human
caacuuccucccuuacagagcauacaacagag

SEQ ID NO: 76820 - RNA, 32 nt, Human
caacuuccucucccacuagggcccugccuuca

SEQ ID NO: 76821 - RNA, 32 nt, Human
caacuuccugcugcucagcuacuuuguccaca

SEQ ID NO: 76822 - RNA, 32 nt, Human
caacuuccuuuccuuucaguucugccaaaugc

SEQ ID NO: 76823 - RNA, 32 nt, Human
caacuucggcugcacccagccccagccccauc

SEQ ID NO: 76824 - RNA, 32 nt, Human
caacuucuccauccuuucugccucucaacauc

SEQ ID NO: 76825 - RNA, 32 nt, Human
caacuucucccauccgagucaccugggccaga

SEQ ID NO: 76826 - RNA, 32 nt, Human
caacuucucgcaauuacuucgauaauucgcaa

SEQ ID NO: 76827 - RNA, 32 nt, Human
caacuucucuugauuugaccucagugcuuuga

SEQ ID NO: 76828 - RNA, 32 nt, Human
caacuucugccaccucucccugggcaauacug

SEQ ID NO: 76829 - RNA, 24 nt, Human
caacuucugccucccaggcucaag

SEQ ID NO: 76830 - RNA, 32 nt, Human
caacuucuggggguugggcaugguggcucgcg

SEQ ID NO: 76831 - RNA, 32 nt, Human
caacuucuucaauuccagaguuucugagaaca

SEQ ID NO: 76832 - RNA, 32 nt, Human
caacuugaagaaaggagcuguugaagauguga

SEQ ID NO: 76833 - RNA, 32 nt, Human
caacuugcaagguggagguuacagugagcuga

SEQ ID NO: 76834 - RNA, 32 nt, Human
caacuugcacuuagaauuucucuagcaguaaa

SEQ ID NO: 76835 - RNA, 32 nt, Human
caacuugcaggcgugcacacacaugcccacau

SEQ ID NO: 76836 - RNA, 32 nt, Human
caacuugccaaaacagauauacucgaaucaga

SEQ ID NO: 76837 - RNA, 32 nt, Human
caacuugccuggggcugucucugucccucggg

SEQ ID NO: 76838 - RNA, 32 nt, Human
caacuuggaagaggaaagaaaagaagucagga

SEQ ID NO: 76839 - RNA, 32 nt, Human
caacuuggagccaaguccccacagcuggauca

SEQ ID NO: 76840 - RNA, 32 nt, Human
caacuuggagugaagucuguggauaagaaggu

SEQ ID NO: 76841 - RNA, 32 nt, Human
caacuuggccaacauggugaaacccugugccu

SEQ ID NO: 76842 - RNA, 32 nt, Human
caacuuggccacugucuuugcagagcugggca

SEQ ID NO: 76843 - RNA, 32 nt, Human
caacuuggcugcaggaaucuuuaaaagaugcu

SEQ ID NO: 76844 - RNA, 32 nt, Human
caacuugggauuccuuuccuuuuuccugccua

SEQ ID NO: 76845 - RNA, 32 nt, Human
caacuuggggccccucuccuccccagcccuuc

SEQ ID NO: 76846 - RNA, 32 nt, Human
caacuuggggcgaaaaguuaaagcgaugccau

SEQ ID NO: 76847 - RNA, 32 nt, Human
caacuuggucucacacaacaaaccucauucga

SEQ ID NO: 76848 - RNA, 19 nt, Human
caacuuggugaaaccuugu

SEQ ID NO: 76849 - RNA, 32 nt, Human
caacuugguggggccuccuuuaaggaugagcc

SEQ ID NO: 76850 - RNA, 32 nt, Human
caacuugucugacuccagccauagugagauuu

SEQ ID NO: 76851 - RNA, 32 nt, Human
caacuugucuuaggcuccacagcugggaacaa

SEQ ID NO: 76852 - RNA, 32 nt, Human
caacuugugugucuuugggagcccugggucuu

SEQ ID NO: 76853 - RNA, 32 nt, Human
caacuuguucacaauucuucugauuucuuggg

SEQ ID NO: 76854 - RNA, 32 nt, Human
caacuuguugguguggaucuauuggcugaucu

SEQ ID NO: 76855 - RNA, 32 nt, Human
caacuuguuuccuccccucaaaguucugccua

SEQ ID NO: 76856 - RNA, 32 nt, Human
caacuuuacucauaucucaaauacaguacauu

SEQ ID NO: 76857 - RNA, 32 nt, Human
caacuuuacugagacaauguagaaagaaguuu

SEQ ID NO: 76858 - RNA, 32 nt, Human
caacuuuaugccacuaagucauagccucaguu

SEQ ID NO: 76859 - RNA, 32 nt, Human
caacuuucauucuuucuuugcacguucauaaa

SEQ ID NO: 76860 - RNA, 32 nt, Human
caacuuuccugccaccuucauccuugccuccc

SEQ ID NO: 76861 - RNA, 32 nt, Human
caacuuuccuuuccuggagcuucuuccuugua

SEQ ID NO: 76862 - RNA, 32 nt, Human
caacuuucuauccuccccuccugcccuguguc

SEQ ID NO: 76863 - RNA, 31 nt, Human
caacuuugacuucuuuugacaaaggacuuua

SEQ ID NO: 76864 - RNA, 32 nt, Human
caacuuugagccugaguggugaaaggaagcaa

SEQ ID NO: 76865 - RNA, 32 nt, Human
caacuuugccaguuuuagagccagucuuugca

SEQ ID NO: 76866 - RNA, 32 nt, Human
caacuuugguuguguguggaaaaggcuuuagc

SEQ ID NO: 76867 - RNA, 32 nt, Human
caacuuugugagagccaccuaagcugaagauu

SEQ ID NO: 76868 - RNA, 32 nt, Human
caacuuuguuuugcacaacacaugaucguaau

SEQ ID NO: 76869 - RNA, 32 nt, Human
caacuuuuaauuauucuccuguccugcaauau

SEQ ID NO: 76870 - RNA, 32 nt, Human
caacuuuucaaagcccaccaauccacauuuuc

SEQ ID NO: 76871 - RNA, 32 nt, Human
caacuuuucccagugguggagugaggacaggg

SEQ ID NO: 76872 - RNA, 32 nt, Human
caacuuuucuaagugagcuuagcaaugagaag

SEQ ID NO: 76873 - RNA, 32 nt, Human
caacuuuucucauguugaagccacugccuuca

SEQ ID NO: 76874 - RNA, 32 nt, Human
caacuuuugaaaacuucacacuuguuaccauu

SEQ ID NO: 76875 - RNA, 32 nt, Human
caacuuuugauagucaugagagaaucaaauaa

SEQ ID NO: 76876 - RNA, 32 nt, Human
caagaaaaauagauguggcaagagaaaaauac

SEQ ID NO: 76877 - RNA, 32 nt, Human
caagaaaacacacgcccugcccugccaccucc

SEQ ID NO: 76878 - RNA, 24 nt, Human
caagaaaacagaaauggcaugcuu

SEQ ID NO: 76879 - RNA, 23 nt, Human
caagaaaacaggugaaggcaugc

SEQ ID NO: 76880 - RNA, 32 nt, Human
caagaaaacauugucuaugaccccagaucaag

SEQ ID NO: 76881 - RNA, 32 nt, Human
caagaaaaccagcaacccagacuuccacuggc

SEQ ID NO: 76882 - RNA, 32 nt, Human
caagaaaagcaguuugcagcaagggcaugugg

SEQ ID NO: 76883 - RNA, 32 nt, Human
caagaaaagcaguuugcaggaaggucaugugg

SEQ ID NO: 76884 - RNA, 32 nt, Human
caagaaaaggaagcuccgucccuucccgcuca

SEQ ID NO: 76885 - RNA, 32 nt, Human
caagaaaccacaucugguucagaagaguguca

SEQ ID NO: 76886 - RNA, 32 nt, Human
caagaaaccuaaaagggaaacaaacucugaca

SEQ ID NO: 76887 - RNA, 32 nt, Human
caagaaacguggacuccagucuggccccuugu

SEQ ID NO: 76888 - RNA, 32 nt, Human
caagaaagaaaagauuguuaugcaagauuucu

SEQ ID NO: 76889 - RNA, 32 nt, Human
caagaaagaagucacugucacagaggcaagcg

SEQ ID NO: 76890 - RNA, 32 nt, Human
caagaaagaaguuaaaaaggagagguggaacc

SEQ ID NO: 76891 - RNA, 32 nt, Human
caagaaagagguuaaaggagaccuggaaaaug

SEQ ID NO: 76892 - RNA, 32 nt, Human
caagaaagaugguacugucacugcagggaaug

SEQ ID NO: 76893 - RNA, 32 nt, Human
caagaaagauucugaauggaagaguggaacaa

SEQ ID NO: 76894 - RNA, 32 nt, Human
caagaaagauuucaucucccaccccagccuca

SEQ ID NO: 76895 - RNA, 22 nt, Human
caagaaaggacccuucagcaag

SEQ ID NO: 76896 - RNA, 32 nt, Human
caagaaagggaguggaggugcagcgaaggacc

SEQ ID NO: 76897 - RNA, 32 nt, Human
caagaaaggggcacuugugauccagacaaugg

SEQ ID NO: 76898 - RNA, 32 nt, Human
caagaaagucagaccuguuucuuguaacuggg

SEQ ID NO: 76899 - RNA, 25 nt, Human
caagaaagugaaaccauccaugcua

SEQ ID NO: 76900 - RNA, 19 nt, Human
caagaaauccucaccagca

SEQ ID NO: 76901 - RNA, 32 nt, Human
caagaaaucugagccaaaacuugacauugugg

SEQ ID NO: 76902 - RNA, 32 nt, Human
caagaaaugaaaccaggaagguuuucagauca

SEQ ID NO: 76903 - RNA, 24 nt, Human
caagaaaugauaccccuucagcaa

SEQ ID NO: 76904 - RNA, 18 nt, Human
caagaaauggaaauucua

SEQ ID NO: 76905 - RNA, 19 nt, Human
caagaaaugggcagacguc

SEQ ID NO: 76906 - RNA, 21 nt, Human
caagaaauggggaaaggauuc

SEQ ID NO: 76907 - RNA, 32 nt, Human
caagaaauguaaugcaaaggacucauuuuaca

SEQ ID NO: 76908 - RNA, 20 nt, Human
caagaaauuagucagggcga

SEQ ID NO: 76909 - RNA, 32 nt, Human
caagaaauucuccuuuggcuuuguuuuucuga

SEQ ID NO: 76910 - RNA, 32 nt, Human
caagaaauuguauguucccacucuccacuucc

SEQ ID NO: 76911 - RNA, 32 nt, Human
caagaacaaagccacugacugagauggaguga

SEQ ID NO: 76912 - RNA, 32 nt, Human
caagaacaagauggugaaaguauaccugagaa

SEQ ID NO: 76913 - RNA, 30 nt, Human
caagaacaaucagagaaaaaugauaccacc

SEQ ID NO: 76914 - RNA, 32 nt, Human
caagaacaccccacagcaccaaccagcagggc

SEQ ID NO: 76915 - RNA, 32 nt, Human
caagaacacuuucugcccucccuuggaucucc

SEQ ID NO: 76916 - RNA, 32 nt, Human
caagaacagaauaacgaucacagggaaaggac

SEQ ID NO: 76917 - RNA, 32 nt, Human
caagaacagauguguuagggagaggggcuuca

SEQ ID NO: 76918 - RNA, 32 nt, Human
caagaaccaccacaccuggccuugggagcugc

SEQ ID NO: 76919 - RNA, 32 nt, Human
caagaaccagaacuuacaucacugccuccgag

SEQ ID NO: 76920 - RNA, 32 nt, Human
caagaacccaggcugaucccagacaugcagcu

SEQ ID NO: 76921 - RNA, 32 nt, Human
caagaacccaucucaaacaaacaaacaaacaa

SEQ ID NO: 76922 - RNA, 32 nt, Human
caagaaccugaacuccugcuggcugauggaag

SEQ ID NO: 76923 - RNA, 32 nt, Human
caagaaccuggccagguguugauuaccuuuua

SEQ ID NO: 76924 - RNA, 32 nt, Human
caagaaccugggaggcggagcuugcagugagc

SEQ ID NO: 76925 - RNA, 32 nt, Human
caagaaccugugccccuccuuccuaaccugag

SEQ ID NO: 76926 - RNA, 32 nt, Human
caagaacgugacguucgugauguccugcccgc

SEQ ID NO: 76927 - RNA, 32 nt, Human
caagaacuaggugaaucaggaauugauugcau

SEQ ID NO: 76928 - RNA, 32 nt, Human
caagaacuauacuugcaacucuuuuugaaucc

SEQ ID NO: 76929 - RNA, 19 nt, Human
caagaacucaacuggcaag

SEQ ID NO: 76930 - RNA, 32 nt, Human
caagaacuccagaaaucaggagacggagacau

SEQ ID NO: 76931 - RNA, 32 nt, Human
caagaacugcaacaggcucuccuggguccugc

SEQ ID NO: 76932 - RNA, 32 nt, Human
caagaacugcagcugcacaucgcccgcccgcc

SEQ ID NO: 76933 - RNA, 32 nt, Human
caagaacugcagcuucaaaucagugccaaugu

SEQ ID NO: 76934 - RNA, 32 nt, Human
caagaacugggcuggaauuagcagaaaguuag

SEQ ID NO: 76935 - RNA, 32 nt, Human
caagaagaaagccaagggcaaggccaagggca

SEQ ID NO: 76936 - RNA, 32 nt, Human
caagaagaaaggcaagccagcaagcaugguga

SEQ ID NO: 76937 - RNA, 32 nt, Human
caagaagaaauaccaauaacacacacagaaca

SEQ ID NO: 76938 - RNA, 32 nt, Human
caagaagaaauccaucaugucaccuuagacuu

SEQ ID NO: 76939 - RNA, 32 nt, Human
caagaagaagaagaagucaggucagcagaaaa

SEQ ID NO: 76940 - RNA, 32 nt, Human
caagaagaagcugccaagaagugacccuugcc

SEQ ID NO: 76941 - RNA, 32 nt, Human
caagaagaagcugccaagaagugcccuugccc

SEQ ID NO: 76942 - RNA, 32 nt, Human
caagaagaaggugaugaugacaagagagcguc

SEQ ID NO: 76943 - RNA, 32 nt, Human
caagaagaauccuuaccacuguuuccagagcc

SEQ ID NO: 76944 - RNA, 20 nt, Human
caagaagaccuugggaaaug

SEQ ID NO: 76945 - RNA, 31 nt, Human
caagaagagaaacugcccugaauguucaaua

SEQ ID NO: 76946 - RNA, 32 nt, Human
caagaagagacagcgugaugccucccacaguc

SEQ ID NO: 76947 - RNA, 32 nt, Human
caagaagagagaaucacuugagcucaggaguu

SEQ ID NO: 76948 - RNA, 32 nt, Human
caagaagaugcugaaaaauuaggauuuuccga

SEQ ID NO: 76949 - RNA, 24 nt, Human
caagaagaugggcagcagcuccau

SEQ ID NO: 76950 - RNA, 32 nt, Human
caagaagcaacaacucuguugaucagaaccug

SEQ ID NO: 76951 - RNA, 32 nt, Human
caagaagcaauacaguguaacaugucacuugu

SEQ ID NO: 76952 - RNA, 32 nt, Human
caagaagcagaggcuaguucacccacucuggg

SEQ ID NO: 76953 - RNA, 32 nt, Human
caagaagcagaggcucaggcuccaucccaagc

SEQ ID NO: 76954 - RNA, 32 nt, Human
caagaagcaggagugcuucagucaucccagca

SEQ ID NO: 76955 - RNA, 32 nt, Human
caagaagccaugcuguuaacaguuuaucucaa

SEQ ID NO: 76956 - RNA, 32 nt, Human
caagaagcggaaggcgccuccaccucccgcca

SEQ ID NO: 76957 - RNA, 20 nt, Human
caagaagcugagcuggcaga

SEQ ID NO: 76958 - RNA, 23 nt, Human
caagaagcugggauuacaggcau

SEQ ID NO: 76959 - RNA, 32 nt, Human
caagaagcugucacagaugauggaagaaaacc

SEQ ID NO: 76960 - RNA, 32 nt, Human
caagaagcuuuuccaggacagggucaugucuu

SEQ ID NO: 76961 - RNA, 32 nt, Human
caagaaggaaagcaccagaagugauuuggaag

SEQ ID NO: 76962 - RNA, 32 nt, Human
caagaaggaagcucuaaugugugcuuuguauc

SEQ ID NO: 76963 - RNA, 32 nt, Human
caagaaggaaggaggcagacugauggcgauuc

SEQ ID NO: 76964 - RNA, 32 nt, Human
caagaaggagaaccuacucuccacucuuugca

SEQ ID NO: 76965 - RNA, 32 nt, Human
caagaaggagagaagcgaaggaguggggacuu

SEQ ID NO: 76966 - RNA, 32 nt, Human
caagaaggagaggugaagguggcguguggugg

SEQ ID NO: 76967 - RNA, 32 nt, Human
caagaaggaggaagacaagaaguggacuggag

SEQ ID NO: 76968 - RNA, 32 nt, Human
caagaaggaggaggaggagagaaaggcggcuc

SEQ ID NO: 76969 - RNA, 32 nt, Human
caagaaggaggaggggacggggagcugagacc

SEQ ID NO: 76970 - RNA, 32 nt, Human
caagaaggaguuguguuugagguggggucugg

SEQ ID NO: 76971 - RNA, 32 nt, Human
caagaaggaucagcccuuucugugccagccuc

SEQ ID NO: 76972 - RNA, 22 nt, Human
caagaaggauguccaagggaug

SEQ ID NO: 76973 - RNA, 32 nt, Human
caagaaggcccaguugccacagauuauacaac

SEQ ID NO: 76974 - RNA, 32 nt, Human
caagaaggcuuaguagcucagucuuuaacaag

SEQ ID NO: 76975 - RNA, 20 nt, Human
caagaagggaccgggcgaug

SEQ ID NO: 76976 - RNA, 32 nt, Human
caagaagggagagagaguggaugccagggaca

SEQ ID NO: 76977 - RNA, 32 nt, Human
caagaaggggaaacugaggcccagggaggaga

SEQ ID NO: 76978 - RNA, 32 nt, Human
caagaaggggagggagcgggagagggaggaga

SEQ ID NO: 76979 - RNA, 32 nt, Human
caagaaggggcgcagacaggaguccugagaug

SEQ ID NO: 76980 - RNA, 32 nt, Human
caagaagguauuucaaaaaugggaaaugcuau

SEQ ID NO: 76981 - RNA, 32 nt, Human
caagaagguauuuucugcugaccugauagauc

SEQ ID NO: 76982 - RNA, 32 nt, Human
caagaaguaccugaggaguggaggagugagaa

SEQ ID NO: 76983 - RNA, 32 nt, Human
caagaaguagagcacagaagcaaagauuuuaa

SEQ ID NO: 76984 - RNA, 32 nt, Human
caagaagucccaugcuggacugcuccauugcu

SEQ ID NO: 76985 - RNA, 32 nt, Human
caagaaguccccagcagcacacacacauuucc

SEQ ID NO: 76986 - RNA, 32 nt, Human
caagaagugcaaggaucaguagccaggaccag

SEQ ID NO: 76987 - RNA, 32 nt, Human
caagaaguggccuggcugccucacugcuucaa

SEQ ID NO: 76988 - RNA, 32 nt, Human
caagaagugggugcccuugguagcagccuggg

SEQ ID NO: 76989 - RNA, 32 nt, Human
caagaaguuugcgcccucauagcagcgaccuu

SEQ ID NO: 76990 - RNA, 32 nt, Human
caagaauagcacaaauugaacuuuuacauucu

SEQ ID NO: 76991 - RNA, 32 nt, Human
caagaaucauuuucucaguucucuucuuucuu

SEQ ID NO: 76992 - RNA, 32 nt, Human
caagaaucggcucccagacaccugccacucgu

SEQ ID NO: 76993 - RNA, 32 nt, Human
caagaaucugcagcuaacuuauuuuccccuag

SEQ ID NO: 76994 - RNA, 32 nt, Human
caagaaucuugguuugccuuccagaaaacaaa

SEQ ID NO: 76995 - RNA, 32 nt, Human
caagaaucuuugguucaaggagcaccaguucc

SEQ ID NO: 76996 - RNA, 32 nt, Human
caagaaugagccaccgugccuggccuauuuua

SEQ ID NO: 76997 - RNA, 32 nt, Human
caagaaugcaccacugcaguccagccuaggca

SEQ ID NO: 76998 - RNA, 30 nt, Human
caagaaugcagguggggaaggaagagaagc

SEQ ID NO: 76999 - RNA, 32 nt, Human
caagaauggcaacuauugauugcauucaaacg

SEQ ID NO: 77000 - RNA, 32 nt, Human
caagaaugggacaauccuuccuuguaucaaaa

SEQ ID NO: 77001 - RNA, 32 nt, Human
caagaauggucuuucugaauugcacaugugag

SEQ ID NO: 77002 - RNA, 20 nt, Human
caagaaugugcagaagaaau

SEQ ID NO: 77003 - RNA, 32 nt, Human
caagaauguuuugcuagagcuaacagacauag

SEQ ID NO: 77004 - RNA, 32 nt, Human
caagaauucaugccauggauugggccaauguu

SEQ ID NO: 77005 - RNA, 32 nt, Human
caagaauugcagcccuuccucuuugggcuguu

SEQ ID NO: 77006 - RNA, 32 nt, Human
caagaauuggagcaugcaaagaaugggacuug

SEQ ID NO: 77007 - RNA, 18 nt, Human
caagaauugggguuugga

SEQ ID NO: 77008 - RNA, 32 nt, Human
caagaauuucuggaagaaaggcuguggaaggg

SEQ ID NO: 77009 - RNA, 21 nt, Human
caagaauuugggaaacacaga

SEQ ID NO: 77010 - RNA, 27 nt, Human
caagaauuuuaauuuauucaucuugcu

SEQ ID NO: 77011 - RNA, 32 nt, Human
caagacaaaacugaaacccucuuuccaggacc

SEQ ID NO: 77012 - RNA, 32 nt, Human
caagacaaacauguuagauaacaaaacacuuc

SEQ ID NO: 77013 - RNA, 32 nt, Human
caagacaaagccucccaccagacuuggagauu

SEQ ID NO: 77014 - RNA, 16 nt, Human
caagacaacuggcaag

SEQ ID NO: 77015 - RNA, 24 nt, Human
caagacaagccacuccgacaaggu

SEQ ID NO: 77016 - RNA, 32 nt, Human
caagacaaggucuugcuauguugcccaggcug

SEQ ID NO: 77017 - RNA, 32 nt, Human
caagacacaugagacauagauuagaaaacaug

SEQ ID NO: 77018 - RNA, 17 nt, Human
caagacacccuggcaaa

SEQ ID NO: 77019 - RNA, 22 nt, Human
caagacaccugugaucuggaaa

SEQ ID NO: 77020 - RNA, 32 nt, Human
caagacacggcccagacagggagcagguucug

SEQ ID NO: 77021 - RNA, 32 nt, Human
caagacagagucuugcucugucacccaggcua

SEQ ID NO: 77022 - RNA, 32 nt, Human
caagacagagucuugcucugucgcccaggcug

SEQ ID NO: 77023 - RNA, 32 nt, Human
caagacagagucuugcucuguugcccaagcug

SEQ ID NO: 77024 - RNA, 32 nt, Human
caagacagcaccacugcacuccagccugggug

SEQ ID NO: 77025 - RNA, 32 nt, Human
caagacagcaccauugcaccccagccugagca

SEQ ID NO: 77026 - RNA, 21 nt, Human
caagacagcagccugccugua

SEQ ID NO: 77027 - RNA, 19 nt, Human
caagacagcagcuccgagg

SEQ ID NO: 77028 - RNA, 32 nt, Human
caagacagcucugagcagcugugggcaaagag

SEQ ID NO: 77029 - RNA, 32 nt, Human
caagacaggaagggaaaagcaaauuucuaauu

SEQ ID NO: 77030 - RNA, 32 nt, Human
caagacaggaggaucacuucaggccaggaguu

SEQ ID NO: 77031 - RNA, 32 nt, Human
caagacaggaggaucacuugaggccaggaguc

SEQ ID NO: 77032 - RNA, 32 nt, Human
caagacaggaggaucacuuuaggcccagaguu

SEQ ID NO: 77033 - RNA, 32 nt, Human
caagacaggagguuugcguccugauggcuuug

SEQ ID NO: 77034 - RNA, 32 nt, Human
caagacaggaugcacagcugaauuggaggaga

SEQ ID NO: 77035 - RNA, 32 nt, Human
caagacaggccugccagagcagcagggguggg

SEQ ID NO: 77036 - RNA, 32 nt, Human
caagacagguagaucacuugagaucaggaguu

SEQ ID NO: 77037 - RNA, 32 nt, Human
caagacagguggaucucuugagcccaggaguu

SEQ ID NO: 77038 - RNA, 32 nt, Human
caagacagugagacagucuggaaagugauguc

SEQ ID NO: 77039 - RNA, 32 nt, Human
caagacagugccauugcacuccagccugcaca

SEQ ID NO: 77040 - RNA, 32 nt, Human
caagacaguggcacuaaaauguuuaauucauu

SEQ ID NO: 77041 - RNA, 32 nt, Human
caagacaguggcagggagagccugaacuuuau

SEQ ID NO: 77042 - RNA, 32 nt, Human
caagacagugucuugucuuucugugauuugua

SEQ ID NO: 77043 - RNA, 24 nt, Human
caagacauagcccugugacaaggu

SEQ ID NO: 77044 - RNA, 32 nt, Human
caagacaucagacacacccaacccaaaggcgu

SEQ ID NO: 77045 - RNA, 32 nt, Human
caagacaucucuggguucugcagcagcacgca

SEQ ID NO: 77046 - RNA, 32 nt, Human
caagacaugaaaagcugccauucuucuuaacc

SEQ ID NO: 77047 - RNA, 31 nt, Human
caagacaugagugaaagccaggaugaaguuc

SEQ ID NO: 77048 - RNA, 24 nt, Human
caagacaugauauugcugcuuuua

SEQ ID NO: 77049 - RNA, 32 nt, Human
caagacaugccccuugaggcucagccauaaga

SEQ ID NO: 77050 - RNA, 32 nt, Human
caagacauggggacuuugcagugagcaauggg

SEQ ID NO: 77051 - RNA, 32 nt, Human
caagacauuuauacauuaauugcugucaaaga

SEQ ID NO: 77052 - RNA, 32 nt, Human
caagaccaaacagauaucuaaacacuacaacc

SEQ ID NO: 77053 - RNA, 32 nt, Human
caagaccaaagaaggaaggaagguggacggug

SEQ ID NO: 77054 - RNA, 32 nt, Human
caagaccaacugaccuucuccuaggcagcucc

SEQ ID NO: 77055 - RNA, 32 nt, Human
caagaccaagcccagaaaaccccugcagagug

SEQ ID NO: 77056 - RNA, 32 nt, Human
caagaccaagcccagacaaccccugcagagug

SEQ ID NO: 77057 - RNA, 32 nt, Human
caagaccaagcccagacaacccuugcagagcg

SEQ ID NO: 77058 - RNA, 32 nt, Human
caagaccaagcccagauaacccuugcagagug

SEQ ID NO: 77059 - RNA, 32 nt, Human
caagaccaaugccccagagcagugcagccacc

SEQ ID NO: 77060 - RNA, 32 nt, Human
caagaccacagcucugugauccuuccggugga

SEQ ID NO: 77061 - RNA, 32 nt, Human
caagaccacggaugcuuugucucagcucggau

SEQ ID NO: 77062 - RNA, 32 nt, Human
caagaccagcagaagagugggcaaacaugaaa

SEQ ID NO: 77063 - RNA, 32 nt, Human
caagaccagccuagccaagauggugaaacccc

SEQ ID NO: 77064 - RNA, 32 nt, Human
caagaccagccuggacaacacagcagaccccg

SEQ ID NO: 77065 - RNA, 32 nt, Human
caagaccagccuggacagcuuagugagauccc

SEQ ID NO: 77066 - RNA, 32 nt, Human
caagaccagccuggccaaacauggugaaaccc

SEQ ID NO: 77067 - RNA, 22 nt, Human
caagaccagccuggccaacaug

SEQ ID NO: 77068 - RNA, 32 nt, Human
caagaccagccuggccaacauggugaacccca

SEQ ID NO: 77069 - RNA, 32 nt, Human
caagaccagccuggccaagauggugaaacccc

SEQ ID NO: 77070 - RNA, 32 nt, Human
caagaccagccuggccaagauggugaaauccc

SEQ ID NO: 77071 - RNA, 32 nt, Human
caagaccagccuggccaagauggugaaauccu

SEQ ID NO: 77072 - RNA, 22 nt, Human
caagaccagccuggccaaugug

SEQ ID NO: 77073 - RNA, 32 nt, Human
caagaccagccuggccacauggugcaaccccg

SEQ ID NO: 77074 - RNA, 32 nt, Human
caagaccagccuggccagcauagugaaacccu

SEQ ID NO: 77075 - RNA, 18 nt, Human
caagaccagccuggcgaa

SEQ ID NO: 77076 - RNA, 22 nt, Human
caagaccagccugggcaacaug

SEQ ID NO: 77077 - RNA, 32 nt, Human
caagaccagcuugggcaucacagcgagacccc

SEQ ID NO: 77078 - RNA, 32 nt, Human
caagaccaggguggggaucagguuuggccagg

SEQ ID NO: 77079 - RNA, 32 nt, Human
caagaccagucacucccucugccuucaggcuu

SEQ ID NO: 77080 - RNA, 32 nt, Human
caagaccaucagagagcaaaccacauguucug

SEQ ID NO: 77081 - RNA, 32 nt, Human
caagacccacccgccucagcccagcccaggca

SEQ ID NO: 77082 - RNA, 32 nt, Human
caagacccagaccaccccaggucuccuucgug

SEQ ID NO: 77083 - RNA, 32 nt, Human
caagacccaggacaaggaacagcaagcucagg

SEQ ID NO: 77084 - RNA, 32 nt, Human
caagacccaguucauucugccaaagggaaaag

SEQ ID NO: 77085 - RNA, 32 nt, Human
caagacccaucucuacaagaaauuuaaaaacu

SEQ ID NO: 77086 - RNA, 32 nt, Human
caagaccccaucucagcaaaacaauaaaaauu

SEQ ID NO: 77087 - RNA, 32 nt, Human
caagacccccaagaaacccugaugucuggcug

SEQ ID NO: 77088 - RNA, 32 nt, Human
caagaccccuaguggaugccugaaaccucaga

SEQ ID NO: 77089 - RNA, 32 nt, Human
caagaccccuggcaaacugggcacuuggccua

SEQ ID NO: 77090 - RNA, 32 nt, Human
caagacccucuacgaacauucuuugggccucc

SEQ ID NO: 77091 - RNA, 32 nt, Human
caagacccugcaggagucgagcuuugaggaca

SEQ ID NO: 77092 - RNA, 32 nt, Human
caagacccugucucuuuaaaaauaacaaaaau

SEQ ID NO: 77093 - RNA, 32 nt, Human
caagaccgcaccacugcacuccagccugggcg

SEQ ID NO: 77094 - RNA, 32 nt, Human
caagaccgccauuggcucagugcagugggaau

SEQ ID NO: 77095 - RNA, 19 nt, Human
caagaccggccacauccca

SEQ ID NO: 77096 - RNA, 32 nt, Human
caagaccucagcccaggcagaagcugcucuag

SEQ ID NO: 77097 - RNA, 32 nt, Human
caagaccucuucccucugggccuguucucuug

SEQ ID NO: 77098 - RNA, 32 nt, Human
caagaccugaagcccugggucugggugugaau

SEQ ID NO: 77099 - RNA, 32 nt, Human
caagaccugcagcugcugaaaaucagcuuugc

SEQ ID NO: 77100 - RNA, 32 nt, Human
caagacgcaggucagguugccgucgagcccgg

SEQ ID NO: 77101 - RNA, 32 nt, Human
caagacgccaggagaggcucaggccugggagu

SEQ ID NO: 77102 - RNA, 32 nt, Human
caagacgccauugcaccccagccugggcaaug

SEQ ID NO: 77103 - RNA, 32 nt, Human
caagacgcugcaacagcucagcgcggcuccca

SEQ ID NO: 77104 - RNA, 32 nt, Human
caagacggaguuucaccauguuggccaggcug

SEQ ID NO: 77105 - RNA, 32 nt, Human
caagacgggaugauugcuugagcucaggaguu

SEQ ID NO: 77106 - RNA, 32 nt, Human
caagacggguggaucacuugaggucaggaguu

SEQ ID NO: 77107 - RNA, 18 nt, Human
caagacuacagcugcagg

SEQ ID NO: 77108 - RNA, 32 nt, Human
caagacuacgccacugcacuccagccuggagg

SEQ ID NO: 77109 - RNA, 32 nt, Human
caagacuagccuggccaacauguuguaaaccc

SEQ ID NO: 77110 - RNA, 32 nt, Human
caagacuauagacugaacuguaauuuuuacca

SEQ ID NO: 77111 - RNA, 32 nt, Human
caagacuaucagaagaaauauuuaaauuucca

SEQ ID NO: 77112 - RNA, 32 nt, Human
caagacuaugccacugcacucccgccugggug

SEQ ID NO: 77113 - RNA, 32 nt, Human
caagacucacacacaggaccacagcagcauca

SEQ ID NO: 77114 - RNA, 32 nt, Human
caagacucaccucccuuccccucugcaggccg

SEQ ID NO: 77115 - RNA, 32 nt, Human
caagacucagucucaaaacaaaaacaaaaaca

SEQ ID NO: 77116 - RNA, 32 nt, Human
caagacucauacacacugccaguggggagcua

SEQ ID NO: 77117 - RNA, 32 nt, Human
caagacuccaucucaaaaacaaaaacaaaaca

SEQ ID NO: 77118 - RNA, 32 nt, Human
caagacuccaucucaaaaacaaacaaacaaaa

SEQ ID NO: 77119 - RNA, 32 nt, Human
caagacuccaucucaacaacaacaacaacaaa

SEQ ID NO: 77120 - RNA, 32 nt, Human
caagacuccaucucagaaaagaagcagaaagc

SEQ ID NO: 77121 - RNA, 28 nt, Human
caagacucccaugcugccucauuuguau

SEQ ID NO: 77122 - RNA, 32 nt, Human
caagacuccucacuugcccagaaagcuccuug

SEQ ID NO: 77123 - RNA, 32 nt, Human
caagacucugcucuccucgggcccuguggugc

SEQ ID NO: 77124 - RNA, 32 nt, Human
caagacucugucucaaaaacaaacaaacaaac

SEQ ID NO: 77125 - RNA, 32 nt, Human
caagacucugucucaaaaacaagcaaacagac

SEQ ID NO: 77126 - RNA, 32 nt, Human
caagacucugucucaaaacaaaacaaaacaaa

SEQ ID NO: 77127 - RNA, 32 nt, Human
caagacucugucucaaaacaaacacaaauaca

SEQ ID NO: 77128 - RNA, 32 nt, Human
caagacucugucucaaaacaaguuauauuucu

SEQ ID NO: 77129 - RNA, 32 nt, Human
caagacucuguggaguuuguucagugguacgg

SEQ ID NO: 77130 - RNA, 32 nt, Human
caagacucuuccucucgggagaucuuguaaua

SEQ ID NO: 77131 - RNA, 32 nt, Human
caagacucuuguugccuuucuuccaagccaug

SEQ ID NO: 77132 - RNA, 32 nt, Human
caagacugaaagucauuacugcccuuuuccug

SEQ ID NO: 77133 - RNA, 32 nt, Human
caagacugaacucagcacacuccugggaaucu

SEQ ID NO: 77134 - RNA, 32 nt, Human
caagacugaccacagguuucaugagaaggucc

SEQ ID NO: 77135 - RNA, 32 nt, Human
caagacugagucuagaugauuucuuggguacc

SEQ ID NO: 77136 - RNA, 32 nt, Human
caagacugauucuguuuggaacaguuuccuau

SEQ ID NO: 77137 - RNA, 32 nt, Human
caagacugcaccacugcacuccagccugggca

SEQ ID NO: 77138 - RNA, 32 nt, Human
caagacugcagaucagcaccucucugcccaga

SEQ ID NO: 77139 - RNA, 32 nt, Human
caagacugcgccacugcacuccagccugggca

SEQ ID NO: 77140 - RNA, 32 nt, Human
caagacugcgccaggugacaccagagcauuuc

SEQ ID NO: 77141 - RNA, 32 nt, Human
caagacugcgccaggugacaccagaguguuuc

SEQ ID NO: 77142 - RNA, 32 nt, Human
caagacugcgccauugcacuccagcccgggca

SEQ ID NO: 77143 - RNA, 23 nt, Human
caagacugcuuuuccacugcacu

SEQ ID NO: 77144 - RNA, 32 nt, Human
caagacuggacucagcacacuccugggaaucu

SEQ ID NO: 77145 - RNA, 32 nt, Human
caagacuggcccuucccaggcaggagaaagga

SEQ ID NO: 77146 - RNA, 32 nt, Human
caagacugggcuguaggggagcuggacuacuu

SEQ ID NO: 77147 - RNA, 32 nt, Human
caagacuggugccccuugcugaucugagcgcu

SEQ ID NO: 77148 - RNA, 32 nt, Human
caagacugugccacugcacuccagccugggug

SEQ ID NO: 77149 - RNA, 32 nt, Human
caagacuguucacaucaucucucuaacauugc

SEQ ID NO: 77150 - RNA, 32 nt, Human
caagacuguugaugccuuagccuugcacucca

SEQ ID NO: 77151 - RNA, 32 nt, Human
caagacuuagaggaacugacugggggaaacgu

SEQ ID NO: 77152 - RNA, 19 nt, Human
caagacuucugcuggcaag

SEQ ID NO: 77153 - RNA, 32 nt, Human
caagacuucuuuaauggauaguaucauuuacu

SEQ ID NO: 77154 - RNA, 32 nt, Human
caagacuugaggccauugaagcugcaggaagc

SEQ ID NO: 77155 - RNA, 32 nt, Human
caagacuugggacuucagugaugcacuugugc

SEQ ID NO: 77156 - RNA, 32 nt, Human
caagacuuguguuccucaacuuucuuggguuu

SEQ ID NO: 77157 - RNA, 32 nt, Human
caagagaaaaacaaacauaaauuuauuagcgg

SEQ ID NO: 77158 - RNA, 32 nt, Human
caagagaaaagccaucauauuacuugggaucu

SEQ ID NO: 77159 - RNA, 32 nt, Human
caagagaaaguuguaacucucuggucuucaua

SEQ ID NO: 77160 - RNA, 32 nt, Human
caagagaagauaaggaagacaagaucucaacc

SEQ ID NO: 77161 - RNA, 32 nt, Human
caagagaaggcagccaacaugaaggaaaaugu

SEQ ID NO: 77162 - RNA, 32 nt, Human
caagagaaggcuuuaagaaagacgguauuaau

SEQ ID NO: 77163 - RNA, 32 nt, Human
caagagaauaauugcauuuuaaacccauauua

SEQ ID NO: 77164 - RNA, 32 nt, Human
caagagaauaauugcauuuuaaacccauguua

SEQ ID NO: 77165 - RNA, 32 nt, Human
caagagaaugaccagugaccuugcuuccuucc

SEQ ID NO: 77166 - RNA, 32 nt, Human
caagagaauuguaaaauguuguggaaaaugau

SEQ ID NO: 77167 - RNA, 32 nt, Human
caagagacaagguuucuccuaucagggucggg

SEQ ID NO: 77168 - RNA, 32 nt, Human
caagagacacagcucaccuaccgucgacaggu

SEQ ID NO: 77169 - RNA, 32 nt, Human
caagagaccacucaaggacaaugggagccacu

SEQ ID NO: 77170 - RNA, 32 nt, Human
caagagaccagccuggccaguauggugaaacc

SEQ ID NO: 77171 - RNA, 32 nt, Human
caagagaccuuauccugauccugaagacgaga

SEQ ID NO: 77172 - RNA, 32 nt, Human
caagagacgugacagcugcugccaccaggccu

SEQ ID NO: 77173 - RNA, 32 nt, Human
caagagacugaaucacuuuucucauugauuaa

SEQ ID NO: 77174 - RNA, 32 nt, Human
caagagacugggagccacuucuccccagaaag

SEQ ID NO: 77175 - RNA, 32 nt, Human
caagagacuuaacuaugagggacguuauguga

SEQ ID NO: 77176 - RNA, 32 nt, Human
caagagagaaccacuaugaauguaaugaaugu

SEQ ID NO: 77177 - RNA, 32 nt, Human
caagagagaagaggaggagaagggagggggug

SEQ ID NO: 77178 - RNA, 32 nt, Human
caagagagacagagcgcacaauggagcaggaa

SEQ ID NO: 77179 - RNA, 32 nt, Human
caagagagacauugccuccaccucuccuugga

SEQ ID NO: 77180 - RNA, 22 nt, Human
caagagagcacgcauccuaaug

SEQ ID NO: 77181 - RNA, 32 nt, Human
caagagagcgcagccuuaguaggagaggaacg

SEQ ID NO: 77182 - RNA, 32 nt, Human
caagagaggaagcagagggaggcggaagcgug

SEQ ID NO: 77183 - RNA, 32 nt, Human
caagagagggaguaacaugucuucucauugcc

SEQ ID NO: 77184 - RNA, 32 nt, Human
caagagaguaaaccaggacugcugcccgcaca

SEQ ID NO: 77185 - RNA, 32 nt, Human
caagagaguucugcuggucagcccugcuccag

SEQ ID NO: 77186 - RNA, 32 nt, Human
caagagaucagccuggcaguuacauguguuuu

SEQ ID NO: 77187 - RNA, 24 nt, Human
caagagauccauccucccaccuca

SEQ ID NO: 77188 - RNA, 32 nt, Human
caagagaucuuucuuuccaaaacauuucugga

SEQ ID NO: 77189 - RNA, 32 nt, Human
caagagaugcacuccccucagccucccaaagu

SEQ ID NO: 77190 - RNA, 32 nt, Human
caagagauuugaaguguuggcuuuugcuaugu

SEQ ID NO: 77191 - RNA, 32 nt, Human
caagagauuuggagacaggagucaggccaggu

SEQ ID NO: 77192 - RNA, 32 nt, Human
caagagauuuggcaugacauguucuguauguu

SEQ ID NO: 77193 - RNA, 32 nt, Human
caagagcaaagucacagaaugaaagagauggu

SEQ ID NO: 77194 - RNA, 32 nt, Human
caagagcaaagugccauuguuugccuuuaauu

SEQ ID NO: 77195 - RNA, 19 nt, Human
caagagcaaauccugccug

SEQ ID NO: 77196 - RNA, 32 nt, Human
caagagcaaguggcugugacuuccauagcauc

SEQ ID NO: 77197 - RNA, 32 nt, Human
caagagcaccaggcagcucagucaccuuguca

SEQ ID NO: 77198 - RNA, 20 nt, Human
caagagcaccuaggauucaa

SEQ ID NO: 77199 - RNA, 32 nt, Human
caagagcacugagacacccugguccucccgga

SEQ ID NO: 77200 - RNA, 32 nt, Human
caagagcagccuguggcaucuuugccuugggc

SEQ ID NO: 77201 - RNA, 32 nt, Human
caagagcaggaagagguugcuggagcaagagg

SEQ ID NO: 77202 - RNA, 32 nt, Human
caagagcagggcugugugugggaggcugcagc

SEQ ID NO: 77203 - RNA, 32 nt, Human
caagagcagugcuucuccauuuguuuugcaga

SEQ ID NO: 77204 - RNA, 32 nt, Human
caagagcaguuugacaaaaaguuuaaaaauag

SEQ ID NO: 77205 - RNA, 32 nt, Human
caagagcaucuccuggguucuuccuguuagaa

SEQ ID NO: 77206 - RNA, 32 nt, Human
caagagcaugaagcacucuuggaguugugggu

SEQ ID NO: 77207 - RNA, 32 nt, Human
caagagccaagagggguggaaaggaagagagc

SEQ ID NO: 77208 - RNA, 32 nt, Human
caagagccacagggcggccucuccccaaccag

SEQ ID NO: 77209 - RNA, 32 nt, Human
caagagccacauuuccuggccucccaggcugc

SEQ ID NO: 77210 - RNA, 32 nt, Human
caagagccacugcacaacagccaaggaacuuu

SEQ ID NO: 77211 - RNA, 32 nt, Human
caagagccagguauagucucccuucccagaau

SEQ ID NO: 77212 - RNA, 32 nt, Human
caagagcccacugucaccuucuagaccacaug

SEQ ID NO: 77213 - RNA, 32 nt, Human
caagagcccugaccacagggugagacagcagg

SEQ ID NO: 77214 - RNA, 32 nt, Human
caagagccggagguggcccccuuguccugcag

SEQ ID NO: 77215 - RNA, 32 nt, Human
caagagccuaagccgccuccauggccccagga

SEQ ID NO: 77216 - RNA, 32 nt, Human
caagagccugccacccucccccuucaaugcac

SEQ ID NO: 77217 - RNA, 32 nt, Human
caagagccuugccuccccugccuccccuccuu

SEQ ID NO: 77218 - RNA, 32 nt, Human
caagagcgagcacagccucuccccagcagacc

SEQ ID NO: 77219 - RNA, 32 nt, Human
caagagcgcaccauugcacuccagccuugggc

SEQ ID NO: 77220 - RNA, 32 nt, Human
caagagcgcugucaggccuggugaagggugug

SEQ ID NO: 77221 - RNA, 32 nt, Human
caagagcgggcaggaacagcagcuggccugaa

SEQ ID NO: 77222 - RNA, 32 nt, Human
caagagcggggaggaggagaggucggaauguc

SEQ ID NO: 77223 - RNA, 32 nt, Human
caagagcgugcucagcagccagguguguguac

SEQ ID NO: 77224 - RNA, 32 nt, Human
caagagcuaccugggcagaagcuccaggcccu

SEQ ID NO: 77225 - RNA, 32 nt, Human
caagagcucaagguacaaaugagagauuugcu

SEQ ID NO: 77226 - RNA, 32 nt, Human
caagagcucacugucuccccugucuccacagu

SEQ ID NO: 77227 - RNA, 21 nt, Human
caagagcucagaggggagagg

SEQ ID NO: 77228 - RNA, 32 nt, Human
caagagcuccaguucccuggaaccugagucgg

SEQ ID NO: 77229 - RNA, 32 nt, Human
caagagcucucaaggcugggucugccaccacu

SEQ ID NO: 77230 - RNA, 18 nt, Human
caagagcucugauggaga

SEQ ID NO: 77231 - RNA, 32 nt, Human
caagagcucugggagguggaagcauggggugg

SEQ ID NO: 77232 - RNA, 20 nt, Human
caagagcuggagacuggagg

SEQ ID NO: 77233 - RNA, 32 nt, Human
caagagcuggaggugaacggaggcaguggaga

SEQ ID NO: 77234 - RNA, 32 nt, Human
caagagcugucaucuucaauucuauuaugcaa

SEQ ID NO: 77235 - RNA, 21 nt, Human
caagagcuucugggacagaga

SEQ ID NO: 77236 - RNA, 32 nt, Human
caagagcuugcugggcuucuacaugaaggugu

SEQ ID NO: 77237 - RNA, 32 nt, Human
caagagcuuggcauuuugcugcaugggugcug

SEQ ID NO: 77238 - RNA, 19 nt, Human
caagagcuugggcacugga

SEQ ID NO: 77239 - RNA, 19 nt, Human
caagagcuuggugguagga

SEQ ID NO: 77240 - RNA, 32 nt, Human
caagagcuugugacuggacuccagccugggca

SEQ ID NO: 77241 - RNA, 20 nt, Human
caagagcuuugugugggaga

SEQ ID NO: 77242 - RNA, 32 nt, Human
caagagcuuuuggaguaugaugaaccucaguu

SEQ ID NO: 77243 - RNA, 32 nt, Human
caagaggaaagagaaagaaagagguauuaccg

SEQ ID NO: 77244 - RNA, 32 nt, Human
caagaggaaaucuggauuuccaccuaccgcuu

SEQ ID NO: 77245 - RNA, 32 nt, Human
caagaggaagaagaagagggaggacucaggag

SEQ ID NO: 77246 - RNA, 32 nt, Human
caagaggaagaauugcuuuucucuuaccagua

SEQ ID NO: 77247 - RNA, 32 nt, Human
caagaggaagcugaagcccagggccuucaucc

SEQ ID NO: 77248 - RNA, 32 nt, Human
caagaggaauguguucagaagcugcugccuga

SEQ ID NO: 77249 - RNA, 32 nt, Human
caagaggaccacacuccagcccaggacaaaag

SEQ ID NO: 77250 - RNA, 32 nt, Human
caagaggaccacacuccagcccaggacaaaug

SEQ ID NO: 77251 - RNA, 20 nt, Human
caagaggacccaaggggaug

SEQ ID NO: 77252 - RNA, 32 nt, Human
caagaggagacauacaugcagccaacaaucau

SEQ ID NO: 77253 - RNA, 32 nt, Human
caagaggagcugguagagaugcuaacaacgcu

SEQ ID NO: 77254 - RNA, 32 nt, Human
caagaggagguggcggcggugguagugguggg

SEQ ID NO: 77255 - RNA, 32 nt, Human
caagaggauccaaacuuccugcaacauuuucu

SEQ ID NO: 77256 - RNA, 32 nt, Human
caagaggauggaggccucaagugugggaacuu

SEQ ID NO: 77257 - RNA, 32 nt, Human
caagaggcacccccuuccccagccucucgccu

SEQ ID NO: 77258 - RNA, 32 nt, Human
caagaggcaggagggggacugacacugauuuu

SEQ ID NO: 77259 - RNA, 32 nt, Human
caagaggcauagagggagaggaagcacacugc

SEQ ID NO: 77260 - RNA, 32 nt, Human
caagaggcauuugugcacacacacagggcucu

SEQ ID NO: 77261 - RNA, 32 nt, Human
caagaggccaggcauggacacaagcaccucuc

SEQ ID NO: 77262 - RNA, 32 nt, Human
caagaggcccaggcagccaccagcacagagaa

SEQ ID NO: 77263 - RNA, 22 nt, Human
caagaggccgagguugcaguga

SEQ ID NO: 77264 - RNA, 32 nt, Human
caagaggcucagaaauggagaucucggagcug

SEQ ID NO: 77265 - RNA, 32 nt, Human
caagaggcugaggcaggagaauuguuugaacc

SEQ ID NO: 77266 - RNA, 32 nt, Human
caagaggcugcacgugagcuccagaaaaugaa

SEQ ID NO: 77267 - RNA, 32 nt, Human
caagaggcugcugccacugaccugcuccauuc

SEQ ID NO: 77268 - RNA, 32 nt, Human
caagagggagagaggcuucagaaccaguccuc

SEQ ID NO: 77269 - RNA, 32 nt, Human
caagagggagggccgggccaggagaaucuccg

SEQ ID NO: 77270 - RNA, 32 nt, Human
caagagggagguggaggcaggcacugaauaag

SEQ ID NO: 77271 - RNA, 32 nt, Human
caagagggagguugagguggggcuagaguggc

SEQ ID NO: 77272 - RNA, 32 nt, Human
caagagggaguguggagcgagagaaaggccag

SEQ ID NO: 77273 - RNA, 32 nt, Human
caagagggccugauuuuauagaagccccuuga

SEQ ID NO: 77274 - RNA, 32 nt, Human
caagagggccugucccuguccccguccccagg

SEQ ID NO: 77275 - RNA, 32 nt, Human
caagagggcgcucucccucccugagacccuga

SEQ ID NO: 77276 - RNA, 32 nt, Human
caagagggcucugccaggggcccugccuccca

SEQ ID NO: 77277 - RNA, 32 nt, Human
caagaggggaccccuccacccccaguacccug

SEQ ID NO: 77278 - RNA, 32 nt, Human
caagagggucucucuguccuuugcugugguca

SEQ ID NO: 77279 - RNA, 32 nt, Human
caagaggucaaggcuucacaagacccugucuc

SEQ ID NO: 77280 - RNA, 32 nt, Human
caagaggucacgacuucccuccugccugcagc

SEQ ID NO: 77281 - RNA, 32 nt, Human
caagaggucccaagggagcaaaccugaaagcc

SEQ ID NO: 77282 - RNA, 32 nt, Human
caagagguccccaaggauugggagcaugggag

SEQ ID NO: 77283 - RNA, 32 nt, Human
caagaggucuguucuuuucacccugggucugu

SEQ ID NO: 77284 - RNA, 32 nt, Human
caagaggugaagaaggcaggagagagacacaa

SEQ ID NO: 77285 - RNA, 32 nt, Human
caagaggugaagcugcagccuggccagguucu

SEQ ID NO: 77286 - RNA, 32 nt, Human
caagaggugacaaggacauuuaccugguacaa

SEQ ID NO: 77287 - RNA, 32 nt, Human
caagaggugcggcagagagaggaaggcaggga

SEQ ID NO: 77288 - RNA, 20 nt, Human
caagaggugguagguuggag

SEQ ID NO: 77289 - RNA, 22 nt, Human
caagagguugaggcugcaguga

SEQ ID NO: 77290 - RNA, 32 nt, Human
caagagguugcaucucaguacacaguggugca

SEQ ID NO: 77291 - RNA, 32 nt, Human
caagagguuuacuguugaugcuuagggucguc

SEQ ID NO: 77292 - RNA, 32 nt, Human
caagaguaacucuucagcaccauggagagguc

SEQ ID NO: 77293 - RNA, 32 nt, Human
caagaguaugaggcuccugcucugauuuccuc

SEQ ID NO: 77294 - RNA, 32 nt, Human
caagagucaguguugcuguggauuugacgugu

SEQ ID NO: 77295 - RNA, 17 nt, Human
caagaguccagguucuc

SEQ ID NO: 77296 - RNA, 32 nt, Human
caagagucccgucagucacagcaacaggaggu

SEQ ID NO: 77297 - RNA, 32 nt, Human
caagagucucacucucacacccaggcuggagu

SEQ ID NO: 77298 - RNA, 32 nt, Human
caagagucucccaggcucacauuaaaccaggg

SEQ ID NO: 77299 - RNA, 32 nt, Human
caagagugaacaaaggcaacacauccacaugc

SEQ ID NO: 77300 - RNA, 32 nt, Human
caagagugaagcagaggagagcaagcguggug

SEQ ID NO: 77301 - RNA, 32 nt, Human
caagagugcaucucccccuagaguugccugcc

SEQ ID NO: 77302 - RNA, 32 nt, Human
caagaguggccccaccuggcccucucugaagg

SEQ ID NO: 77303 - RNA, 32 nt, Human
caagagugggccugcaacccacccacuugccu

SEQ ID NO: 77304 - RNA, 32 nt, Human
caagaguguccccagggcugggcugucccugu

SEQ ID NO: 77305 - RNA, 21 nt, Human
caagaguguggggguuggaga

SEQ ID NO: 77306 - RNA, 32 nt, Human
caagaguuaacucugccuucugggccaaauuc

SEQ ID NO: 77307 - RNA, 32 nt, Human
caagaguuacaugagcauguuguggauaaaug

SEQ ID NO: 77308 - RNA, 32 nt, Human
caagaguuccacagcaaaacaggugugcccag

SEQ ID NO: 77309 - RNA, 32 nt, Human
caagaguuccaguucccuggaaccugagucgg

SEQ ID NO: 77310 - RNA, 32 nt, Human
caagaguucucaccagccuuaguuuccuacac

SEQ ID NO: 77311 - RNA, 32 nt, Human
caagaguugcaggagacccaggaaagggaguu

SEQ ID NO: 77312 - RNA, 32 nt, Human
caagaguuuguaggucuggauucaccuaagau

SEQ ID NO: 77313 - RNA, 32 nt, Human
caagaguuuuggauuucuuucugccguguaua

SEQ ID NO: 77314 - RNA, 32 nt, Human
  misc_feature (6)..(6): n is a, c, g, or u
caaganacuuaauguugggcaugggaagggug

SEQ ID NO: 77315 - RNA, 32 nt, Human
caagauaacuagaauuagaagcagagccugaa

SEQ ID NO: 77316 - RNA, 32 nt, Human
caagauaaggaguuccucucuccagcaucugu

SEQ ID NO: 77317 - RNA, 32 nt, Human
caagauaaucagcuauaugaagaaucucagcu

SEQ ID NO: 77318 - RNA, 32 nt, Human
caagauaaugugccuuguuuccagccauauua

SEQ ID NO: 77319 - RNA, 32 nt, Human
caagauacucacugccucucugggugagcaca

SEQ ID NO: 77320 - RNA, 32 nt, Human
caagauacugagccucucaccucccagcccuc

SEQ ID NO: 77321 - RNA, 32 nt, Human
caagauagaauuaauuuaaagccuuaaacaaa

SEQ ID NO: 77322 - RNA, 32 nt, Human
caagauagcaccacugcacuccagccugggag

SEQ ID NO: 77323 - RNA, 32 nt, Human
caagauagcaccacugcacuccaggcugggug

SEQ ID NO: 77324 - RNA, 32 nt, Human
caagauagcaccacugcacuuuagccugggcg

SEQ ID NO: 77325 - RNA, 32 nt, Human
caagauagugaucucucugugaaaaugcuaaa

SEQ ID NO: 77326 - RNA, 32 nt, Human
caagauagugccacugcacuccagccugggca

SEQ ID NO: 77327 - RNA, 32 nt, Human
caagauagugccacugcacuucagccugggug

SEQ ID NO: 77328 - RNA, 32 nt, Human
caagauaugcacuuggccugagaaaugugcua

SEQ ID NO: 77329 - RNA, 32 nt, Human
caagauauggugaguauguaucggugagguag

SEQ ID NO: 77330 - RNA, 23 nt, Human
caagauauuuacucaugcauuua

SEQ ID NO: 77331 - RNA, 32 nt, Human
caagaucaaagugccagcagauucagugucau

SEQ ID NO: 77332 - RNA, 32 nt, Human
caagaucaaggugccagcaggucuaguguuug

SEQ ID NO: 77333 - RNA, 32 nt, Human
caagaucacaccacuccacuccagucuggaca

SEQ ID NO: 77334 - RNA, 32 nt, Human
caagaucacaccacugaccucuagccuggugg

SEQ ID NO: 77335 - RNA, 32 nt, Human
caagaucacaccacugcacuccaaccuggaca

SEQ ID NO: 77336 - RNA, 32 nt, Human
caagaucacaccacugcacuccagccuaggca

SEQ ID NO: 77337 - RNA, 32 nt, Human
caagaucacaccacugcacuccagccuggcaa

SEQ ID NO: 77338 - RNA, 32 nt, Human
caagaucacaccacugcacuccagccugggca

SEQ ID NO: 77339 - RNA, 32 nt, Human
caagaucacaccacugcacuccagccugggcg

SEQ ID NO: 77340 - RNA, 32 nt, Human
caagaucacaccacugcacuccagccugggug

SEQ ID NO: 77341 - RNA, 32 nt, Human
caagaucacaccacugcacuccagccuuggcg

SEQ ID NO: 77342 - RNA, 32 nt, Human
caagaucacaccacugcgcucuagccugggca

SEQ ID NO: 77343 - RNA, 32 nt, Human
caagaucacaccacuggcacuccagccugggc

SEQ ID NO: 77344 - RNA, 32 nt, Human
caagaucacaccacuguaccacagccugagca

SEQ ID NO: 77345 - RNA, 32 nt, Human
caagaucacaccagugcacuccagccugggcg

SEQ ID NO: 77346 - RNA, 32 nt, Human
caagaucacaccauugcacuccagccuagaua

SEQ ID NO: 77347 - RNA, 32 nt, Human
caagaucacaccauugcacuccagccuaggca

SEQ ID NO: 77348 - RNA, 32 nt, Human
caagaucacaccauugcacuccagccugagca

SEQ ID NO: 77349 - RNA, 32 nt, Human
caagaucacaccauugcacuccagccugggaa

SEQ ID NO: 77350 - RNA, 32 nt, Human
caagaucacaccauugcacuccagccugggca

SEQ ID NO: 77351 - RNA, 32 nt, Human
caagaucacaccauugcacuccagccugggcg

SEQ ID NO: 77352 - RNA, 32 nt, Human
caagaucacaccauugcacuucaaccugguca

SEQ ID NO: 77353 - RNA, 32 nt, Human
caagaucacacuacugcacuccagccugggca

SEQ ID NO: 77354 - RNA, 32 nt, Human
caagaucacacuauugcacuccagccugggcg

SEQ ID NO: 77355 - RNA, 21 nt, Human
caagaucacauagcugguaaa

SEQ ID NO: 77356 - RNA, 32 nt, Human
caagaucaccauuagcaaauggaaauuacauu

SEQ ID NO: 77357 - RNA, 32 nt, Human
caagaucacgacacugcacuccagccugggca

SEQ ID NO: 77358 - RNA, 32 nt, Human
caagaucacgccacuacacuccagccugggcg

SEQ ID NO: 77359 - RNA, 32 nt, Human
caagaucacgccacugcacuccagccucggug

SEQ ID NO: 77360 - RNA, 32 nt, Human
caagaucacgccacugcacuccagccuggaca

SEQ ID NO: 77361 - RNA, 32 nt, Human
caagaucacgccacugcacuccagccugggca

SEQ ID NO: 77362 - RNA, 32 nt, Human
caagaucacgccacugcacuccagccugggcc

SEQ ID NO: 77363 - RNA, 32 nt, Human
caagaucacgccacugcacuccagccugggcg

SEQ ID NO: 77364 - RNA, 32 nt, Human
caagaucacgccacugcacuccagccugggug

SEQ ID NO: 77365 - RNA, 32 nt, Human
caagaucacgccacugcacuccagccugguga

SEQ ID NO: 77366 - RNA, 32 nt, Human
caagaucacgccacugcacuccagcuggagug

SEQ ID NO: 77367 - RNA, 32 nt, Human
caagaucacgccacugcacucuagccugggca

SEQ ID NO: 77368 - RNA, 32 nt, Human
caagaucacgccacugcauuccagccugguga

SEQ ID NO: 77369 - RNA, 32 nt, Human
caagaucacgccauugcacuccagccuaggca

SEQ ID NO: 77370 - RNA, 32 nt, Human
caagaucacgccauugcacuccagccugggca

SEQ ID NO: 77371 - RNA, 32 nt, Human
caagaucacgccauugcacuccagccuggggg

SEQ ID NO: 77372 - RNA, 32 nt, Human
caagaucacgccauugcacuccagccugggug

SEQ ID NO: 77373 - RNA, 32 nt, Human
caagaucacggcacugcgcugcagccugggca

SEQ ID NO: 77374 - RNA, 32 nt, Human
caagaucacgucauugcacuccagccugguca

SEQ ID NO: 77375 - RNA, 32 nt, Human
caagaucacuccacugcacuccagccugggcg

SEQ ID NO: 77376 - RNA, 32 nt, Human
caagaucagagcaugugccuacaccuugugcc

SEQ ID NO: 77377 - RNA, 22 nt, Human
caagaucagccuggccaacaug

SEQ ID NO: 77378 - RNA, 32 nt, Human
caagaucaggaguucaagaccaggcugggcaa

SEQ ID NO: 77379 - RNA, 31 nt, Human
caagaucaguagagagaaagucaaagauuac

SEQ ID NO: 77380 - RNA, 32 nt, Human
caagaucagucugucugugaucagccugugug

SEQ ID NO: 77381 - RNA, 32 nt, Human
caagaucauaccacggcacuccagccugggug

SEQ ID NO: 77382 - RNA, 32 nt, Human
caagaucauaccacugcacugcagccugagug

SEQ ID NO: 77383 - RNA, 32 nt, Human
caagaucauaccauugcacuccagccugggca

SEQ ID NO: 77384 - RNA, 32 nt, Human
caagaucauacuacugcacuccagccugggcg

SEQ ID NO: 77385 - RNA, 32 nt, Human
caagaucauaucacugcacuccagccuggcug

SEQ ID NO: 77386 - RNA, 32 nt, Human
caagaucaugaggagaauauuugaaggaauau

SEQ ID NO: 77387 - RNA, 32 nt, Human
caagaucaugccacaucacuccaaccugggca

SEQ ID NO: 77388 - RNA, 32 nt, Human
caagaucaugccacaucacuccagccugggca

SEQ ID NO: 77389 - RNA, 32 nt, Human
caagaucaugccacuccacuccagucugggcg

SEQ ID NO: 77390 - RNA, 32 nt, Human
caagaucaugccacugaacuccagccugggug

SEQ ID NO: 77391 - RNA, 32 nt, Human
caagaucaugccacugcaccccagccugggca

SEQ ID NO: 77392 - RNA, 32 nt, Human
caagaucaugccacugcacuccagccugggca

SEQ ID NO: 77393 - RNA, 32 nt, Human
caagaucaugccacugcacuccagccugggcg

SEQ ID NO: 77394 - RNA, 32 nt, Human
caagaucaugccacugcacuccagccugggug

SEQ ID NO: 77395 - RNA, 32 nt, Human
caagaucaugccacugcacugcagcccgggcg

SEQ ID NO: 77396 - RNA, 32 nt, Human
caagaucaugccacuggacuccagccugggug

SEQ ID NO: 77397 - RNA, 32 nt, Human
caagaucaugccacuuuacuccagucugagca

SEQ ID NO: 77398 - RNA, 32 nt, Human
caagaucaugccauuauacuccagccugggug

SEQ ID NO: 77399 - RNA, 32 nt, Human
caagaucaugccauugcacagcagccugggug

SEQ ID NO: 77400 - RNA, 32 nt, Human
caagaucaugccauugcacuccagcccggguu

SEQ ID NO: 77401 - RNA, 32 nt, Human
caagaucaugccauugcacuccagccugggca

SEQ ID NO: 77402 - RNA, 32 nt, Human
caagaucaugccauugcacuccagccugggcg

SEQ ID NO: 77403 - RNA, 32 nt, Human
caagaucaugccauugcacuccagccugggug

SEQ ID NO: 77404 - RNA, 32 nt, Human
caagaucaugcguuuucucuuguucuuaacca

SEQ ID NO: 77405 - RNA, 32 nt, Human
caagaucaugcuacugcacuccagccugggug

SEQ ID NO: 77406 - RNA, 32 nt, Human
caagaucaugcuacugcacuccagcuuaggug

SEQ ID NO: 77407 - RNA, 32 nt, Human
caagaucaugucauugcacucuagucugggug

SEQ ID NO: 77408 - RNA, 32 nt, Human
caagauccaggcaauugugugcuguugguugu

SEQ ID NO: 77409 - RNA, 32 nt, Human
caagaucccagccaggaaggcuggggcccuac

SEQ ID NO: 77410 - RNA, 32 nt, Human
caagauccccaagggauauguaugcucauaaa

SEQ ID NO: 77411 - RNA, 32 nt, Human
caagauccccgccuccccuuaagcaccgcgag

SEQ ID NO: 77412 - RNA, 32 nt, Human
caagauccugccacugcacuccagccugggca

SEQ ID NO: 77413 - RNA, 32 nt, Human
caagauccugcuacccagagggugaaugggua

SEQ ID NO: 77414 - RNA, 32 nt, Human
caagauccuguaggaacaccuaccuuaagcac

SEQ ID NO: 77415 - RNA, 32 nt, Human
caagauccuugaagccccuccguucagcauuc

SEQ ID NO: 77416 - RNA, 32 nt, Human
caagaucgagccauugcacuccagccugggca

SEQ ID NO: 77417 - RNA, 32 nt, Human
caagaucgaguuggccgaggauggaugauugu

SEQ ID NO: 77418 - RNA, 32 nt, Human
caagaucgcaacauugcacuccaggcugggca

SEQ ID NO: 77419 - RNA, 32 nt, Human
caagaucgcaccacugcacucaagccugggcg

SEQ ID NO: 77420 - RNA, 32 nt, Human
caagaucgcaccacugcacuccaaccugggca

SEQ ID NO: 77421 - RNA, 32 nt, Human
caagaucgcaccacugcacuccagccuggaag

SEQ ID NO: 77422 - RNA, 32 nt, Human
caagaucgcaccacugcacuccagccugggag

SEQ ID NO: 77423 - RNA, 32 nt, Human
caagaucgcaccacugcacuccagccugggca

SEQ ID NO: 77424 - RNA, 32 nt, Human
caagaucgcaccacugcacuccagccugggcg

SEQ ID NO: 77425 - RNA, 32 nt, Human
caagaucgcaccacugcacuccagccugggug

SEQ ID NO: 77426 - RNA, 32 nt, Human
caagaucgcaccacugcacuccagccuggucg

SEQ ID NO: 77427 - RNA, 32 nt, Human
caagaucgcaccacugcauuccagccuaagca

SEQ ID NO: 77428 - RNA, 32 nt, Human
caagaucgcaccacugcucuccagccuggcga

SEQ ID NO: 77429 - RNA, 32 nt, Human
caagaucgcaccacuguacuccagccugggca

SEQ ID NO: 77430 - RNA, 32 nt, Human
caagaucgcaccacuugcacugcagccugaga

SEQ ID NO: 77431 - RNA, 32 nt, Human
caagaucgcaccauugcaaccccaccugggca

SEQ ID NO: 77432 - RNA, 32 nt, Human
caagaucgcaccauugcacaccaaccugggug

SEQ ID NO: 77433 - RNA, 32 nt, Human
caagaucgcaccauugcacccgagccuaggca

SEQ ID NO: 77434 - RNA, 32 nt, Human
caagaucgcaccauugcacuccagccuaggca

SEQ ID NO: 77435 - RNA, 32 nt, Human
caagaucgcaccauugcacuccagccuggaug

SEQ ID NO: 77436 - RNA, 32 nt, Human
caagaucgcaccauugcacuccagccugggca

SEQ ID NO: 77437 - RNA, 32 nt, Human
caagaucgcaccauugcacuccagccugugca

SEQ ID NO: 77438 - RNA, 32 nt, Human
caagaucgcaccauugcacuccagcugggaga

SEQ ID NO: 77439 - RNA, 32 nt, Human
caagaucgcaccauuguacuccagccugggca

SEQ ID NO: 77440 - RNA, 32 nt, Human
caagaucgcaccgcugcacuccagccugggug

SEQ ID NO: 77441 - RNA, 32 nt, Human
caagaucgcacuacugcacuccagccugggug

SEQ ID NO: 77442 - RNA, 32 nt, Human
caagaucgcccacugcacuccagguugggcua

SEQ ID NO: 77443 - RNA, 32 nt, Human
caagaucgccccacugcacuccagccuggcaa

SEQ ID NO: 77444 - RNA, 32 nt, Human
caagaucgccccacugcacuccagccugggcg

SEQ ID NO: 77445 - RNA, 32 nt, Human
caagaucgcccugcugcacuccagccugggca

SEQ ID NO: 77446 - RNA, 32 nt, Human
caagaucgcgccacugcacuccacccugggua

SEQ ID NO: 77447 - RNA, 32 nt, Human
caagaucgcgccacugcacuccagccucagca

SEQ ID NO: 77448 - RNA, 32 nt, Human
caagaucgcgccacugcacuccagccucggca

SEQ ID NO: 77449 - RNA, 32 nt, Human
caagaucgcgccacugcacuccagccuggcga

SEQ ID NO: 77450 - RNA, 32 nt, Human
caagaucgcgccacugcacuccagccugggca

SEQ ID NO: 77451 - RNA, 32 nt, Human
caagaucgcgccacugcacuccagccugggcg

SEQ ID NO: 77452 - RNA, 32 nt, Human
caagaucgcgccacugcacuccagccugggug

SEQ ID NO: 77453 - RNA, 32 nt, Human
caagaucgcgccacugcacuccagccugguga

SEQ ID NO: 77454 - RNA, 32 nt, Human
caagaucgcgccacugcacuccagucugggca

SEQ ID NO: 77455 - RNA, 32 nt, Human
caagaucgcgccacugcacuccggccugauga

SEQ ID NO: 77456 - RNA, 32 nt, Human
caagaucgcgccauugcacuccaaccuggacg

SEQ ID NO: 77457 - RNA, 32 nt, Human
caagaucgcgccauugcacuccagccuggaca

SEQ ID NO: 77458 - RNA, 32 nt, Human
caagaucgcgccauugcacuccagccugggca

SEQ ID NO: 77459 - RNA, 32 nt, Human
caagaucgcgccauugcacuccagccuggggg

SEQ ID NO: 77460 - RNA, 32 nt, Human
caagaucgcgccauugcacucuagccuaggug

SEQ ID NO: 77461 - RNA, 32 nt, Human
caagaucgcgccccugcacuccagccugggug

SEQ ID NO: 77462 - RNA, 32 nt, Human
caagaucgcgccguugcacuccagccugggca

SEQ ID NO: 77463 - RNA, 32 nt, Human
caagaucgcgcuacugcacuccagccugggcg

SEQ ID NO: 77464 - RNA, 32 nt, Human
caagaucgcgcuauugcacuccagccugggug

SEQ ID NO: 77465 - RNA, 32 nt, Human
caagaucgcggcauugcacuucagccugggcg

SEQ ID NO: 77466 - RNA, 32 nt, Human
caagaucgcggcgcugcacucuagccugggug

SEQ ID NO: 77467 - RNA, 32 nt, Human
caagaucgcuccauugcacuccagccugggug

SEQ ID NO: 77468 - RNA, 32 nt, Human
caagaucgggccacugcacuccagcuugggug

SEQ ID NO: 77469 - RNA, 32 nt, Human
caagaucgggccgcugcacuccagccuggggg

SEQ ID NO: 77470 - RNA, 32 nt, Human
caagaucguaccacugcacuccagccugggcg

SEQ ID NO: 77471 - RNA, 32 nt, Human
caagaucguaccacugcacuccagccugggug

SEQ ID NO: 77472 - RNA, 32 nt, Human
caagaucguaccacugcacuccagucugggcg

SEQ ID NO: 77473 - RNA, 32 nt, Human
caagaucguaccacugcacucuggccugggca

SEQ ID NO: 77474 - RNA, 32 nt, Human
caagaucgugacacugcacuccagccugggcg

SEQ ID NO: 77475 - RNA, 32 nt, Human
caagaucgugccaaugcacuccauccugggca

SEQ ID NO: 77476 - RNA, 32 nt, Human
caagaucgugccacuacacuccagccugggca

SEQ ID NO: 77477 - RNA, 32 nt, Human
caagaucgugccacuacacuccagccuggggg

SEQ ID NO: 77478 - RNA, 32 nt, Human
caagaucgugccacugcaccguagccugggug

SEQ ID NO: 77479 - RNA, 32 nt, Human
caagaucgugccacugcacuccagacuggggg

SEQ ID NO: 77480 - RNA, 32 nt, Human
caagaucgugccacugcacuccagccuggcga

SEQ ID NO: 77481 - RNA, 32 nt, Human
caagaucgugccacugcacuccagccugggag

SEQ ID NO: 77482 - RNA, 32 nt, Human
caagaucgugccacugcacuccagccugggcg

SEQ ID NO: 77483 - RNA, 32 nt, Human
caagaucgugccacugcacuccagccugggcu

SEQ ID NO: 77484 - RNA, 32 nt, Human
caagaucgugccacugcacuccagccugggga

SEQ ID NO: 77485 - RNA, 32 nt, Human
caagaucgugccacugcacuccagccugggug

SEQ ID NO: 77486 - RNA, 32 nt, Human
caagaucgugccacugcacuccagccugguug

SEQ ID NO: 77487 - RNA, 32 nt, Human
caagaucgugccacugcacuccagccuugaga

SEQ ID NO: 77488 - RNA, 32 nt, Human
caagaucgugccacugcacuccagccuuggug

SEQ ID NO: 77489 - RNA, 32 nt, Human
caagaucgugccacugcacuccagucugggug

SEQ ID NO: 77490 - RNA, 32 nt, Human
caagaucgugccacugcacucuagccugggcg

SEQ ID NO: 77491 - RNA, 32 nt, Human
caagaucgugccacugcacucuagccugggug

SEQ ID NO: 77492 - RNA, 32 nt, Human
caagaucgugccacugcacucuauccugggua

SEQ ID NO: 77493 - RNA, 32 nt, Human
caagaucgugccacugcacuucagccugggug

SEQ ID NO: 77494 - RNA, 32 nt, Human
caagaucgugccacugcauuccagccugggcg

SEQ ID NO: 77495 - RNA, 32 nt, Human
caagaucgugccagugcacuccagccugggug

SEQ ID NO: 77496 - RNA, 32 nt, Human
caagaucgugccauugcacuccagccuaggca

SEQ ID NO: 77497 - RNA, 32 nt, Human
caagaucgugccauugcacuccagccuggcga

SEQ ID NO: 77498 - RNA, 32 nt, Human
caagaucgugccauugcacuccagccugggca

SEQ ID NO: 77499 - RNA, 32 nt, Human
caagaucgugccauugcacuccagccugggug

SEQ ID NO: 77500 - RNA, 32 nt, Human
caagaucgugcuacugcacuccagccccagcu

SEQ ID NO: 77501 - RNA, 32 nt, Human
caagaucgugucacugcacuccagccugguga

SEQ ID NO: 77502 - RNA, 32 nt, Human
caagaucuacaucauggaggugaugacaucag

SEQ ID NO: 77503 - RNA, 32 nt, Human
caagaucuagaucccagacagaaacaacacau

SEQ ID NO: 77504 - RNA, 32 nt, Human
caagaucuaggaagaggaaggggagggaugug

SEQ ID NO: 77505 - RNA, 32 nt, Human
caagaucuccaccccagucaugcugauggggc

SEQ ID NO: 77506 - RNA, 32 nt, Human
caagaucucgccacugcacuccaggcugggcg

SEQ ID NO: 77507 - RNA, 32 nt, Human
caagaucugugcagccccgccuccaggccaca

SEQ ID NO: 77508 - RNA, 32 nt, Human
caagaugaaauacaaaaauuauguuuaagggu

SEQ ID NO: 77509 - RNA, 32 nt, Human
caagaugaaccaauaccucaaaaaccucaguc

SEQ ID NO: 77510 - RNA, 32 nt, Human
caagaugaagaagccaacacagaugaccuuac

SEQ ID NO: 77511 - RNA, 32 nt, Human
caagaugacacaacugcacuccagcuugggca

SEQ ID NO: 77512 - RNA, 32 nt, Human
caagaugagccucugcaauauucuggcaauuu

SEQ ID NO: 77513 - RNA, 32 nt, Human
caagaugauaaauggugagauuugaaugugau

SEQ ID NO: 77514 - RNA, 32 nt, Human
caagaugaugccacugcacuccagccugggcu

SEQ ID NO: 77515 - RNA, 32 nt, Human
caagaugaugccauugcacuccagccugggca

SEQ ID NO: 77516 - RNA, 32 nt, Human
caagaugauguucacuccaaauacacuacaga

SEQ ID NO: 77517 - RNA, 32 nt, Human
caagaugcaacaguauucuggcuuugccuuuc

SEQ ID NO: 77518 - RNA, 32 nt, Human
caagaugcaacaguuugucuucacauuggaag

SEQ ID NO: 77519 - RNA, 32 nt, Human
caagaugcaccacugcaccccagccugggcga

SEQ ID NO: 77520 - RNA, 32 nt, Human
caagaugcauaccucaugaauucaacuauuuu

SEQ ID NO: 77521 - RNA, 32 nt, Human
caagaugcauucucauaccugcccacagcucc

SEQ ID NO: 77522 - RNA, 32 nt, Human
caagaugccauuucugcaucucccagaaggga

SEQ ID NO: 77523 - RNA, 32 nt, Human
caagaugcccacacaacaggcuuauuuucugu

SEQ ID NO: 77524 - RNA, 29 nt, Human
caagaugccuagcagaacugcccgcuaug

SEQ ID NO: 77525 - RNA, 32 nt, Human
caagaugccucuucuggcaucugacaagcuga

SEQ ID NO: 77526 - RNA, 16 nt, Human
caagaugccuggcaaa

SEQ ID NO: 77527 - RNA, 32 nt, Human
caagaugccuggcaaaaccaccucccugugcc

SEQ ID NO: 77528 - RNA, 32 nt, Human
caagaugcggaagaggaugugggaccaggacc

SEQ ID NO: 77529 - RNA, 32 nt, Human
caagauggaacaagaagguggagccagacgua

SEQ ID NO: 77530 - RNA, 32 nt, Human
caagauggaacacauggugaaugcauacagca

SEQ ID NO: 77531 - RNA, 32 nt, Human
caagauggaaggcaggugaggaugucaggaug

SEQ ID NO: 77532 - RNA, 32 nt, Human
caagauggaggccacagacuggcuggcccaga

SEQ ID NO: 77533 - RNA, 32 nt, Human
caagauggaggcuguggagcagcauuucccgu

SEQ ID NO: 77534 - RNA, 32 nt, Human
caagauggagucucgcucugucacccaggcug

SEQ ID NO: 77535 - RNA, 32 nt, Human
caagauggagucuugcucugucgcccaggcug

SEQ ID NO: 77536 - RNA, 32 nt, Human
caagauggaguuuugcucugucacccaggcug

SEQ ID NO: 77537 - RNA, 32 nt, Human
caagauggaucacaccuguaaucccagcacuu

SEQ ID NO: 77538 - RNA, 32 nt, Human
caagauggcaaaagcuugcugagugguacagc

SEQ ID NO: 77539 - RNA, 25 nt, Human
caagauggcaagaccuuguuucugu

SEQ ID NO: 77540 - RNA, 32 nt, Human
caagauggcaccacuacauuucagccugggcg

SEQ ID NO: 77541 - RNA, 32 nt, Human
caagauggcaccacugcacuccagccuaggug

SEQ ID NO: 77542 - RNA, 32 nt, Human
caagauggcaccacugcacuccauccugggug

SEQ ID NO: 77543 - RNA, 32 nt, Human
caagauggcaccauugcacccuagccugggca

SEQ ID NO: 77544 - RNA, 29 nt, Human
caagauggcagaaguagagcagaagaaga

SEQ ID NO: 77545 - RNA, 32 nt, Human
caagauggccuguaaucccagcacuuugggag

SEQ ID NO: 77546 - RNA, 32 nt, Human
caagauggcgacaagagugaccucuggucguc

SEQ ID NO: 77547 - RNA, 32 nt, Human
caagauggcgacgggaacgggcaaacacaagc

SEQ ID NO: 77548 - RNA, 32 nt, Human
caagauggcgccacuacacuccagccugggca

SEQ ID NO: 77549 - RNA, 32 nt, Human
caauucuccugccucagccucccaaauagcug

SEQ ID NO: 77550 - RNA, 32 nt, Human
caauucuccugccucagccucccagauagcug

SEQ ID NO: 77551 - RNA, 32 nt, Human
caauucuccugccucagccucccagguggcug

SEQ ID NO: 77552 - RNA, 32 nt, Human
caauucuccugccucagccuccccaguagcug

SEQ ID NO: 77553 - RNA, 32 nt, Human
caauucuccugccucagccucccccgcagcua

SEQ ID NO: 77554 - RNA, 32 nt, Human
caauucuccugccucagccucccgaguagcug

SEQ ID NO: 77555 - RNA, 32 nt, Human
caauucuccugccucagccucccgauuagcug

SEQ ID NO: 77556 - RNA, 32 nt, Human
caauucuccugccucagccucccggguagcug

SEQ ID NO: 77557 - RNA, 32 nt, Human
caauucuccugccucagccucccuaguagcug

SEQ ID NO: 77558 - RNA, 32 nt, Human
caauucuccugccucagccuccuaaguagcug

SEQ ID NO: 77559 - RNA, 32 nt, Human
caauucuccugccucagccuccugaauagccg

SEQ ID NO: 77560 - RNA, 32 nt, Human
caauucuccugccucagccuccugagcagcug

SEQ ID NO: 77561 - RNA, 32 nt, Human
caauucuccugccucagccuccugaguagcug

SEQ ID NO: 77562 - RNA, 32 nt, Human
caauucuccugccucagccuucggaguggcug

SEQ ID NO: 77563 - RNA, 32 nt, Human
caauucuccugccucagcuccugaguagcugg

SEQ ID NO: 77564 - RNA, 32 nt, Human
caauucuccugccucagcucugaguagcuggg

SEQ ID NO: 77565 - RNA, 32 nt, Human
caauucuccugccucaggcuccugaguagcug

SEQ ID NO: 77566 - RNA, 32 nt, Human
caauucuccugccucaggcuccuggguggcug

SEQ ID NO: 77567 - RNA, 32 nt, Human
caauucuccugccucagucuccugaguagcug

SEQ ID NO: 77568 - RNA, 32 nt, Human
caauucuccugccuuugccuccagaagcacug

SEQ ID NO: 77569 - RNA, 32 nt, Human
caauucugagaaacaaaaacacacacgcagaa

SEQ ID NO: 77570 - RNA, 32 nt, Human
caauucuguaugcuuggcauugugguaagcac

SEQ ID NO: 77571 - RNA, 32 nt, Human
caauucuguccacuuuuaucaccuugugucua

SEQ ID NO: 77572 - RNA, 32 nt, Human
caauucugugaagaaagucaucgguagcuuga

SEQ ID NO: 77573 - RNA, 32 nt, Human
caauucuucauugagcuaguuuucucuaagcc

SEQ ID NO: 77574 - RNA, 32 nt, Human
caauucuucuuccaauguggcucagggaagcc

SEQ ID NO: 77575 - RNA, 32 nt, Human
caauucuugaagcaccagcucccugccccacc

SEQ ID NO: 77576 - RNA, 32 nt, Human
caauucuuuacauuccuugaauuuucauagau

SEQ ID NO: 77577 - RNA, 32 nt, Human
caauucuuuguugcuuaaucuagagcuaugca

SEQ ID NO: 77578 - RNA, 32 nt, Human
caauugaagaugugucuggagacacuguaccu

SEQ ID NO: 77579 - RNA, 32 nt, Human
caauugacugaauggaucucaccagauuuugu

SEQ ID NO: 77580 - RNA, 32 nt, Human
caauugacugcaaccucugcuucccaggcuca

SEQ ID NO: 77581 - RNA, 32 nt, Human
caauugagagaacugagaaaaauauucacgac

SEQ ID NO: 77582 - RNA, 32 nt, Human
caauugagaguuuucauuuugugucuuuuaaa

SEQ ID NO: 77583 - RNA, 32 nt, Human
caauugagauuugccuuucaaacccucagguu

SEQ ID NO: 77584 - RNA, 32 nt, Human
caauugagcaagaagacaggagcuggggacau

SEQ ID NO: 77585 - RNA, 32 nt, Human
caauugagcucauggacacagaguagaacgac

SEQ ID NO: 77586 - RNA, 32 nt, Human
caauugaugagaggagcagagaggaaggagaa

SEQ ID NO: 77587 - RNA, 32 nt, Human
caauugaugcauauuuguuuauccugaugaau

SEQ ID NO: 77588 - RNA, 32 nt, Human
caauugcaacuccggcuggagccccggaccug

SEQ ID NO: 77589 - RNA, 32 nt, Human
caauugcaagcucauuccucuaccucauacuu

SEQ ID NO: 77590 - RNA, 32 nt, Human
caauugcaccacugcacuccagccugggugac

SEQ ID NO: 77591 - RNA, 32 nt, Human
caauugcagaagcaggcagcggcagagaggga

SEQ ID NO: 77592 - RNA, 32 nt, Human
caauugcagcuuuauucagaaauauaaaagug

SEQ ID NO: 77593 - RNA, 32 nt, Human
caauugcaggaaagaaggccuugaguggagag

SEQ ID NO: 77594 - RNA, 32 nt, Human
caauugcaguggauuccucggggauagaccaa

SEQ ID NO: 77595 - RNA, 32 nt, Human
caauugcauuccacuggacacaauucauuugc

SEQ ID NO: 77596 - RNA, 32 nt, Human
caauugccaaaaacuagaagccacuugcacgg

SEQ ID NO: 77597 - RNA, 32 nt, Human
caauugccagcaaccucugcuuguccggaaaa

SEQ ID NO: 77598 - RNA, 32 nt, Human
caauugcuaucuuuugaaaggcaccaguaugu

SEQ ID NO: 77599 - RNA, 32 nt, Human
caauugcucccuuaagcaacagauucauauuu

SEQ ID NO: 77600 - RNA, 31 nt, Human
caauugcugcccaucuggccugugugcccau

SEQ ID NO: 77601 - RNA, 32 nt, Human
caauugcugcucccuuuacuuucucuaccugu

SEQ ID NO: 77602 - RNA, 32 nt, Human
caauugcuguacauacccuccuuuccuucuac

SEQ ID NO: 77603 - RNA, 32 nt, Human
caauuggacaaccucaguuccaaccaauucuu

SEQ ID NO: 77604 - RNA, 32 nt, Human
caauuggagaugccggggacccuucagcuauu

SEQ ID NO: 77605 - RNA, 32 nt, Human
caauuggagauggacucaagcaguucagcaua

SEQ ID NO: 77606 - RNA, 32 nt, Human
caauuggcuguugaugugccucagcugucacu

SEQ ID NO: 77607 - RNA, 32 nt, Human
caauugggagcuugguggaccaucucuugguu

SEQ ID NO: 77608 - RNA, 32 nt, Human
caauugggagggcggagggaggcaguguccuu

SEQ ID NO: 77609 - RNA, 32 nt, Human
caauuggggaaaauaguuacuucacuaguaau

SEQ ID NO: 77610 - RNA, 32 nt, Human
caauuggggcuguuaagucugaccauacauca

SEQ ID NO: 77611 - RNA, 32 nt, Human
caauuggguuuugaucucagcauccuggaaau

SEQ ID NO: 77612 - RNA, 32 nt, Human
caauugguuucaccucaugucucccucccuac

SEQ ID NO: 77613 - RNA, 32 nt, Human
caauuguaaaacugaggcacgagcaaagugaa

SEQ ID NO: 77614 - RNA, 32 nt, Human
caauuguaaagugaaauucaaggagaaggaau

SEQ ID NO: 77615 - RNA, 32 nt, Human
caauuguacuaaaaauacaaaauuagccgggc

SEQ ID NO: 77616 - RNA, 32 nt, Human
caauuguagaagugaggaccuugaguggagaa

SEQ ID NO: 77617 - RNA, 32 nt, Human
caauuguagggccggggauagaggguacuuga

SEQ ID NO: 77618 - RNA, 32 nt, Human
caauugucagucaggauaauucuguuugcuaa

SEQ ID NO: 77619 - RNA, 32 nt, Human
caauuguccugccuccucaacuuccugacuac

SEQ ID NO: 77620 - RNA, 32 nt, Human
caauugucugaacacuuggguucaguugaaau

SEQ ID NO: 77621 - RNA, 17 nt, Human
caauugucuggaguuua

SEQ ID NO: 77622 - RNA, 32 nt, Human
caauugugauuuuucuuuagccagaaugaaug

SEQ ID NO: 77623 - RNA, 32 nt, Human
caauugugggucccugaagcugaggggaugau

SEQ ID NO: 77624 - RNA, 32 nt, Human
caauugugugacacaggaagcccaaguguugg

SEQ ID NO: 77625 - RNA, 32 nt, Human
caauuguguuaacugcuggaagggacagaugc

SEQ ID NO: 77626 - RNA, 32 nt, Human
caauuguuacugaucaugaauguuaguuagaa

SEQ ID NO: 77627 - RNA, 32 nt, Human
caauuguucucuucucuguuagccuucccuaa

SEQ ID NO: 77628 - RNA, 32 nt, Human
caauuguuuugagagagauggcuggucaugcc

SEQ ID NO: 77629 - RNA, 32 nt, Human
caauuuaaaaggagacccacagagcuaauguu

SEQ ID NO: 77630 - RNA, 32 nt, Human
caauuuaaauagagacccacagagcuaauguu

SEQ ID NO: 77631 - RNA, 32 nt, Human
caauuuacaaagugccuggcggugggcccuga

SEQ ID NO: 77632 - RNA, 32 nt, Human
caauuuacaaaugaucuuugcaaauagugguc

SEQ ID NO: 77633 - RNA, 32 nt, Human
caauuuacaacagcaaccacacugccugucau

SEQ ID NO: 77634 - RNA, 32 nt, Human
caauuuaccugguacuaaacccgcaccccagu

SEQ ID NO: 77635 - RNA, 32 nt, Human
caauuuagacaggcagaccauggcagaguucu

SEQ ID NO: 77636 - RNA, 32 nt, Human
caauuuaggaggccaaggugggaagaucacuu

SEQ ID NO: 77637 - RNA, 32 nt, Human
caauuuaggcaggaaccacacacugcuaugac

SEQ ID NO: 77638 - RNA, 32 nt, Human
caauuuagugauuuuccuuuucugacauucaa

SEQ ID NO: 77639 - RNA, 32 nt, Human
caauuuaguggaagauaaugaggcucacugua

SEQ ID NO: 77640 - RNA, 32 nt, Human
caauuuauaagugucccauggggcagacacuc

SEQ ID NO: 77641 - RNA, 32 nt, Human
caauuuaugcuuuuaacuuauuuucuaccugg

SEQ ID NO: 77642 - RNA, 32 nt, Human
caauuuauugcagacguuccugggcugggaga

SEQ ID NO: 77643 - RNA, 32 nt, Human
caauuucaagguccucaccacuccuucauuug

SEQ ID NO: 77644 - RNA, 32 nt, Human
caauuucacuuugucugcuccucucugcaaug

SEQ ID NO: 77645 - RNA, 32 nt, Human
caauuucagcuccaccccaucaacaucugggg

SEQ ID NO: 77646 - RNA, 32 nt, Human
caauuucagcuguacauuucucauccaaguug

SEQ ID NO: 77647 - RNA, 32 nt, Human
caauuucaugaucuggggcaucaugucgguag

SEQ ID NO: 77648 - RNA, 32 nt, Human
caauuuccaaacgugucaccccggcgccgacg

SEQ ID NO: 77649 - RNA, 32 nt, Human
caauuuccauauuuccagccacuugaggacug

SEQ ID NO: 77650 - RNA, 32 nt, Human
caauuuccauuuuauuuacuuaccucauuaua

SEQ ID NO: 77651 - RNA, 32 nt, Human
caauuucccggagguugugaggcccuuugagg

SEQ ID NO: 77652 - RNA, 32 nt, Human
caauuucccugacuccucuaagccacucuucc

SEQ ID NO: 77653 - RNA, 32 nt, Human
caauuuccucaccuuuaaacuggggaucaugc

SEQ ID NO: 77654 - RNA, 32 nt, Human
caauuuccucuucuuuuuccucugaccucugu

SEQ ID NO: 77655 - RNA, 32 nt, Human
caauuucucaugucucuccugagauguuuuau

SEQ ID NO: 77656 - RNA, 32 nt, Human
caauuucuccaagcaauuuugccuccuguaug

SEQ ID NO: 77657 - RNA, 32 nt, Human
caauuucucccauuuggcaugacuguauguac

SEQ ID NO: 77658 - RNA, 32 nt, Human
caauuucugcuggcuggacugaacugaagauc

SEQ ID NO: 77659 - RNA, 32 nt, Human
caauuucuuacagccauuuaacuuucuguugg

SEQ ID NO: 77660 - RNA, 32 nt, Human
caauuucuuaggcuggagugcaguggcacgau

SEQ ID NO: 77661 - RNA, 32 nt, Human
caauuugaaggaggaggaaugaugggauuuca

SEQ ID NO: 77662 - RNA, 32 nt, Human
caauuugagacaggguuucgcuguguugcucc

SEQ ID NO: 77663 - RNA, 32 nt, Human
caauuugagacaggguuucucuguguugcucu

SEQ ID NO: 77664 - RNA, 32 nt, Human
caauuugagauggagacagugauuggguuuuu

SEQ ID NO: 77665 - RNA, 32 nt, Human
caauuugccccaccaccaccuccucgggcuuc

SEQ ID NO: 77666 - RNA, 32 nt, Human
caauuugcuagaagcuuaauguaggcaagcca

SEQ ID NO: 77667 - RNA, 32 nt, Human
caauuugcuuucuccuccucaaggguuaagaa

SEQ ID NO: 77668 - RNA, 32 nt, Human
caauuuggacuugccuuugucuugguuccugc

SEQ ID NO: 77669 - RNA, 32 nt, Human
caauuuggcuggucucgacuccuggcuggucu

SEQ ID NO: 77670 - RNA, 32 nt, Human
caauuuggcuucccuaacuuaacauugcauca

SEQ ID NO: 77671 - RNA, 32 nt, Human
caauuugggaggccaaggugggcagaucacuu

SEQ ID NO: 77672 - RNA, 32 nt, Human
caauuugggaggccgagguaaauggaugaccu

SEQ ID NO: 77673 - RNA, 32 nt, Human
caauuugggaggcugagaagggcagaucuucu

SEQ ID NO: 77674 - RNA, 32 nt, Human
caauuugggaggcugaggcgggaggaucacuu

SEQ ID NO: 77675 - RNA, 32 nt, Human
caauuugggaggcugaggugggcagaucacuu

SEQ ID NO: 77676 - RNA, 32 nt, Human
caauuugggaguccgaggcgggcggaucacuc

SEQ ID NO: 77677 - RNA, 32 nt, Human
caauuuggucucgggguagggggagacggggu

SEQ ID NO: 77678 - RNA, 32 nt, Human
caauuuguaagcucaauuucucugacagccaa

SEQ ID NO: 77679 - RNA, 32 nt, Human
caauuugucaaauuaugcagaagagacagagg

SEQ ID NO: 77680 - RNA, 32 nt, Human
caauuugugcucaugggaagcucuuuaagcac

SEQ ID NO: 77681 - RNA, 32 nt, Human
caauuugugggaacaggaggggagaggaaaca

SEQ ID NO: 77682 - RNA, 32 nt, Human
caauuuuauauguaugcuauuuguuguauuua

SEQ ID NO: 77683 - RNA, 32 nt, Human
caauuuuauuaaaaauccaaagauaagucuuu

SEQ ID NO: 77684 - RNA, 32 nt, Human
caauuuuauucuguaugagcaauaugauucaa

SEQ ID NO: 77685 - RNA, 32 nt, Human
caauuuuauuuucuucuuucucagaccucagu

SEQ ID NO: 77686 - RNA, 20 nt, Human
caauuuucauguguaaggua

SEQ ID NO: 77687 - RNA, 32 nt, Human
caauuuucauucuguuuucugacuuucaaguu

SEQ ID NO: 77688 - RNA, 32 nt, Human
caauuuuccagacucagccucugggaucucac

SEQ ID NO: 77689 - RNA, 32 nt, Human
caauuuucucaccucuguaaauuuuagucuca

SEQ ID NO: 77690 - RNA, 32 nt, Human
caauuuucuccaaaacaaaccccaccgggcaa

SEQ ID NO: 77691 - RNA, 32 nt, Human
caauuuucucuagcugccugaugucaacugcu

SEQ ID NO: 77692 - RNA, 32 nt, Human
caauuuucugcagccucuuuuugccugagcaa

SEQ ID NO: 77693 - RNA, 32 nt, Human
caauuuugaaacuugauauaaaaugaggaggg

SEQ ID NO: 77694 - RNA, 32 nt, Human
caauuuugcuggacuucaaccuggguagaaga

SEQ ID NO: 77695 - RNA, 32 nt, Human
caauuuuggcauuuugccuucugugauaauag

SEQ ID NO: 77696 - RNA, 32 nt, Human
caauuuugggaauaccugcuacugcaauucag

SEQ ID NO: 77697 - RNA, 31 nt, Human
caauuuugugagagaaagacuguacuccaua

SEQ ID NO: 77698 - RNA, 32 nt, Human
caauuuuuacauaggaggaaacggcucagaga

SEQ ID NO: 77699 - RNA, 32 nt, Human
caauuuuucuucuucuuccuucugucccuccu

SEQ ID NO: 77700 - RNA, 32 nt, Human
caauuuuugauugcuuugacuuuugguguguc

SEQ ID NO: 77701 - RNA, 32 nt, Human
caauuuuugugcauucccaacaugcucuaaug

SEQ ID NO: 77702 - RNA, 21 nt, Human
cacaaaaacuggguggcuugg

SEQ ID NO: 77703 - RNA, 32 nt, Human
cacaaaaagaagcaguuggacucgggaagcug

SEQ ID NO: 77704 - RNA, 23 nt, Human
cacaaaaagagaaggcuuuggua

SEQ ID NO: 77705 - RNA, 32 nt, Human
cacaaaaagauaagaaagauucaaagaauucc

SEQ ID NO: 77706 - RNA, 32 nt, Human
cacaaaaaggaaaguuugggaagggaugggag

SEQ ID NO: 77707 - RNA, 32 nt, Human
cacaaaaaggcagagagagaaggauuaaaugg

SEQ ID NO: 77708 - RNA, 32 nt, Human
cacaaaaaggccugggacagggucaguacaag

SEQ ID NO: 77709 - RNA, 32 nt, Human
cacaaaaagggccugcugacucccagaagacc

SEQ ID NO: 77710 - RNA, 32 nt, Human
cacaaaaauaaagacuagagcaaaauaaugca

SEQ ID NO: 77711 - RNA, 32 nt, Human
cacaaaaauguaccugagaacaauuagaaagu

SEQ ID NO: 77712 - RNA, 24 nt, Human
cacaaaaauuagccagauguggug

SEQ ID NO: 77713 - RNA, 24 nt, Human
cacaaaaauuagccaggcauggug

SEQ ID NO: 77714 - RNA, 24 nt, Human
cacaaaaauuagccaggcguggug

SEQ ID NO: 77715 - RNA, 24 nt, Human
cacaaaaauuagccagguauggug

SEQ ID NO: 77716 - RNA, 22 nt, Human
cacaaaaauuagccaggugugg

SEQ ID NO: 77717 - RNA, 24 nt, Human
cacaaaaauuagccggacguggug

SEQ ID NO: 77718 - RNA, 24 nt, Human
cacaaaaauuagccgggcggggug

SEQ ID NO: 77719 - RNA, 24 nt, Human
cacaaaaauuagccgggcguggug

SEQ ID NO: 77720 - RNA, 24 nt, Human
cacaaaaauuagcuaggcauggug

SEQ ID NO: 77721 - RNA, 24 nt, Human
cacaaaaauuagcugagcauggug

SEQ ID NO: 77722 - RNA, 24 nt, Human
cacaaaaauuagcugggcauggug

SEQ ID NO: 77723 - RNA, 24 nt, Human
cacaaaaauuagcuggguguggug

SEQ ID NO: 77724 - RNA, 24 nt, Human
cacaaaaauuagucaggcguggua

SEQ ID NO: 77725 - RNA, 32 nt, Human
cacaaaaccacuuuuuccuccugggccucugg

SEQ ID NO: 77726 - RNA, 32 nt, Human
cacaaaaccagagcggaaggagggacuuccca

SEQ ID NO: 77727 - RNA, 32 nt, Human
cacaaaaccauccuuguaccaccaugaauagu

SEQ ID NO: 77728 - RNA, 32 nt, Human
cacaaaacccucagugcuggagaagagucagu

SEQ ID NO: 77729 - RNA, 32 nt, Human
cacaaaaccgggaaaggaaggaaaggacagcg

SEQ ID NO: 77730 - RNA, 32 nt, Human
cacaaaacggucagcacccaaccugacucgca

SEQ ID NO: 77731 - RNA, 32 nt, Human
cacaaaacucaagauugggagcucuuugugau

SEQ ID NO: 77732 - RNA, 32 nt, Human
cacaaaacugauuuuaaaaucaaguuaaugug

SEQ ID NO: 77733 - RNA, 32 nt, Human
cacaaaacuuuugggaauuccucuuugcaccc

SEQ ID NO: 77734 - RNA, 32 nt, Human
cacaaaagaauauguugugagcaucuuuccau

SEQ ID NO: 77735 - RNA, 32 nt, Human
cacaaaagaccaccuuucuccccugagaggag

SEQ ID NO: 77736 - RNA, 32 nt, Human
cacaaaagcagagguuugggaauuccagaagg

SEQ ID NO: 77737 - RNA, 32 nt, Human
cacaaaagcccugcuugcuuuugcagcuggga

SEQ ID NO: 77738 - RNA, 32 nt, Human
cacaaaaggaauagaucuaugauugacccuga

SEQ ID NO: 77739 - RNA, 32 nt, Human
cacaaaagggccugauggugauaugacuccac

SEQ ID NO: 77740 - RNA, 32 nt, Human
cacaaaagugccacuaaaacagccuaaggaga

SEQ ID NO: 77741 - RNA, 32 nt, Human
cacaaaagugccacuaaaacagccucaggaga

SEQ ID NO: 77742 - RNA, 32 nt, Human
cacaaaauaaguaugcauaaauaaaugagugg

SEQ ID NO: 77743 - RNA, 32 nt, Human
cacaaaaucacugaggcugugacaggagggga

SEQ ID NO: 77744 - RNA, 32 nt, Human
cacaaaaucccugcccuuaacaagcucacauu

SEQ ID NO: 77745 - RNA, 32 nt, Human
cacaaaauguacaaauguaaacuugcucauuu

SEQ ID NO: 77746 - RNA, 23 nt, Human
cacaaaauuagcugggcguggua

SEQ ID NO: 77747 - RNA, 32 nt, Human
cacaaacaaaggcuuagaauuccacaugaaag

SEQ ID NO: 77748 - RNA, 32 nt, Human
cacaaacacagcccuggaaacauacaguggcg

SEQ ID NO: 77749 - RNA, 32 nt, Human
cacaaacacagggaaagagggcaaacuagaca

SEQ ID NO: 77750 - RNA, 32 nt, Human
cacaaacaccaaggaguggaggucagaguguc

SEQ ID NO: 77751 - RNA, 32 nt, Human
cacaaacagccccucuggacacagccccaugu

SEQ ID NO: 77752 - RNA, 32 nt, Human
cacaaacaggaccugcauccugucucacaaau

SEQ ID NO: 77753 - RNA, 32 nt, Human
cacaaacaggcagagagggacguguagggaga

SEQ ID NO: 77754 - RNA, 32 nt, Human
cacaaacagugaggcccccacccgagagaggg

SEQ ID NO: 77755 - RNA, 32 nt, Human
cacaaacaugcacacacacauaugcauaucuu

SEQ ID NO: 77756 - RNA, 21 nt, Human
cacaaacaugggugguaacaa

SEQ ID NO: 77757 - RNA, 32 nt, Human
cacaaaccaauacugucauugcuaaucugaac

SEQ ID NO: 77758 - RNA, 32 nt, Human
cacaaaccaggaugcggacgggggaagcgcca

SEQ ID NO: 77759 - RNA, 32 nt, Human
cacaaacccacccugugcccacccucccauca

SEQ ID NO: 77760 - RNA, 32 nt, Human
cacaaacccuggggacucugcuuggcuguccc

SEQ ID NO: 77761 - RNA, 32 nt, Human
cacaaacccuuuccuucaucaucacucccugc

SEQ ID NO: 77762 - RNA, 32 nt, Human
cacaaaccugcucugccacuuucaaccugcag

SEQ ID NO: 77763 - RNA, 32 nt, Human
cacaaaccuuaccccacccccaccuccgaguc

SEQ ID NO: 77764 - RNA, 32 nt, Human
cacaaacuaaccagcugggauuacagguauga

SEQ ID NO: 77765 - RNA, 32 nt, Human
cacaaacuacagccugcaggccaaagccagcc

SEQ ID NO: 77766 - RNA, 32 nt, Human
cacaaacuccuccaaaccccaaaccccaaacg

SEQ ID NO: 77767 - RNA, 22 nt, Human
cacaaacucuucccagguaguu

SEQ ID NO: 77768 - RNA, 32 nt, Human
cacaaacugggugauagggcggacuuaccugg

SEQ ID NO: 77769 - RNA, 32 nt, Human
cacaaacuuaaacaaaagccugggaacacaaa

SEQ ID NO: 77770 - RNA, 19 nt, Human
cacaaacuucaccuggaga

SEQ ID NO: 77771 - RNA, 32 nt, Human
cacaaacuugcagccuaaggcagaaucugaag

SEQ ID NO: 77772 - RNA, 32 nt, Human
cacaaagaaggaagaaaagaaggaguggagga

SEQ ID NO: 77773 - RNA, 32 nt, Human
cacaaagaaggaggaggaaaaggugagaaaga

SEQ ID NO: 77774 - RNA, 32 nt, Human
cacaaagacaaacuggcuugugagguguucuc

SEQ ID NO: 77775 - RNA, 21 nt, Human
cacaaagacacccucuccaga

SEQ ID NO: 77776 - RNA, 32 nt, Human
cacaaagacucagccaagaguucucuuuauuc

SEQ ID NO: 77777 - RNA, 32 nt, Human
cacaaagacugaagaucaaggaagagagugag

SEQ ID NO: 77778 - RNA, 32 nt, Human
cacaaagacugucaagugaagaaugguggaga

SEQ ID NO: 77779 - RNA, 32 nt, Human
cacaaagaugccuguuuccugucuucucgguu

SEQ ID NO: 77780 - RNA, 32 nt, Human
cacaaagauggauguaaugcacuuugggaggc

SEQ ID NO: 77781 - RNA, 32 nt, Human
cacaaagcaaacugagugaugaaggaagacuu

SEQ ID NO: 77782 - RNA, 32 nt, Human
cacaaagcaguuaauuaggcagccuggagaaa

SEQ ID NO: 77783 - RNA, 32 nt, Human
cacaaagccacuguagccagacugccucucua

SEQ ID NO: 77784 - RNA, 26 nt, Human
cacaaagccaggcacugccaagugga

SEQ ID NO: 77785 - RNA, 32 nt, Human
cacaaagcuacuggucagcugggcagcucagc

SEQ ID NO: 77786 - RNA, 32 nt, Human
cacaaagcuauuuuaaagaagaugcuauguug

SEQ ID NO: 77787 - RNA, 32 nt, Human
cacaaagcuccaugcugucauggaugcuguuu

SEQ ID NO: 77788 - RNA, 32 nt, Human
cacaaagcucuagcccacugaaccucugccgg

SEQ ID NO: 77789 - RNA, 32 nt, Human
cacaaaggagcaccuccaaauggccaagaagc

SEQ ID NO: 77790 - RNA, 21 nt, Human
cacaaaggagucgcccacugg

SEQ ID NO: 77791 - RNA, 22 nt, Human
cacaaaggcagcgcugcugggg

SEQ ID NO: 77792 - RNA, 32 nt, Human
cacaaaggccucgaaaagaggucuccagcaaa

SEQ ID NO: 77793 - RNA, 32 nt, Human
cacaaaggcuccugggacucugggcagaguca

SEQ ID NO: 77794 - RNA, 32 nt, Human
cacaaaggcucuucagcuccccucccugcuuc

SEQ ID NO: 77795 - RNA, 32 nt, Human
cacaaagggaacaaaugaagaacauaaaauga

SEQ ID NO: 77796 - RNA, 32 nt, Human
cacaaagggagaggagagaacagggcaagacg

SEQ ID NO: 77797 - RNA, 32 nt, Human
cacaaaggggcagaaggagggagccacgggcc

SEQ ID NO: 77798 - RNA, 32 nt, Human
cacaaagggguggucacccugcccucaccuug

SEQ ID NO: 77799 - RNA, 32 nt, Human
cacaaagguggaccugagaucacuggagccaa

SEQ ID NO: 77800 - RNA, 32 nt, Human
cacaaaggugggaggauguggggaagggggaa

SEQ ID NO: 77801 - RNA, 32 nt, Human
cacaaaguagacauauacacacacauauaugu

SEQ ID NO: 77802 - RNA, 32 nt, Human
cacaaaguagcagaaauaggaugauguuugug

SEQ ID NO: 77803 - RNA, 32 nt, Human
cacaaagucagcuccucucccaccacaggcuc

SEQ ID NO: 77804 - RNA, 32 nt, Human
cacaaagucucaagugacagcaaccagacaga

SEQ ID NO: 77805 - RNA, 32 nt, Human
cacaaagugaacggaucacuggggaaggcaga

SEQ ID NO: 77806 - RNA, 32 nt, Human
cacaaaguggagauagcaguagcaccaacucc

SEQ ID NO: 77807 - RNA, 32 nt, Human
cacaaaguucaauggacuugaaccacgcgucc

SEQ ID NO: 77808 - RNA, 32 nt, Human
cacaaaguugugugaagcagaagagaaaagcu

SEQ ID NO: 77809 - RNA, 28 nt, Human
cacaaaguuguguuucuuuuguguccuu

SEQ ID NO: 77810 - RNA, 32 nt, Human
cacaaauaguacaugugaaauuuccaagcauu

SEQ ID NO: 77811 - RNA, 32 nt, Human
cacaaauauacaugcacauacauacacagaau

SEQ ID NO: 77812 - RNA, 32 nt, Human
cacaaauauggugaaacccaauuucuuacauc

SEQ ID NO: 77813 - RNA, 32 nt, Human
cacaaaucaggccggacaggagagggaggggu

SEQ ID NO: 77814 - RNA, 32 nt, Human
cacaaaucauacccuugucugcuccaauucag

SEQ ID NO: 77815 - RNA, 32 nt, Human
cacaaauccuuuaaccguuucuccccaagagg

SEQ ID NO: 77816 - RNA, 32 nt, Human
cacaaauccuuuaacuguuucuccccaacagg

SEQ ID NO: 77817 - RNA, 32 nt, Human
cacaaaugcacacacaugcacacacacauuuc

SEQ ID NO: 77818 - RNA, 32 nt, Human
cacaaaugcaguauuaucauugacauaccucu

SEQ ID NO: 77819 - RNA, 32 nt, Human
cacaaaugcaucauugcacuccagccugggug

SEQ ID NO: 77820 - RNA, 32 nt, Human
cacaaaugcucuggacacagacagauccuggg

SEQ ID NO: 77821 - RNA, 32 nt, Human
cacaaaugcuuacaggguuuccucccgaguaa

SEQ ID NO: 77822 - RNA, 32 nt, Human
cacaaauguacagcuacauuagcaacaggaaa

SEQ ID NO: 77823 - RNA, 32 nt, Human
cacaaaugugccagaagguucuauaucucaag

SEQ ID NO: 77824 - RNA, 32 nt, Human
cacaaauguuccauacaagacaucauugagga

SEQ ID NO: 77825 - RNA, 32 nt, Human
cacaaauuggccugagcauaagaagaaaaagu

SEQ ID NO: 77826 - RNA, 32 nt, Human
cacaaauuuaacauugccagguucuagugauu

SEQ ID NO: 77827 - RNA, 22 nt, Human
cacaacaaacccuggguucuag

SEQ ID NO: 77828 - RNA, 32 nt, Human
cacaacaaagaacuccacuguggggaugaagc

SEQ ID NO: 77829 - RNA, 32 nt, Human
cacaacaaagagaggccucuuuuguggcuggu

SEQ ID NO: 77830 - RNA, 32 nt, Human
cacaacaacaacaacaaaaagcuuccccaacu

SEQ ID NO: 77831 - RNA, 32 nt, Human
cacaacaauuacccaaacccaagaggcggagg

SEQ ID NO: 77832 - RNA, 32 nt, Human
cacaacacacaccacaccugggacuguuuuua

SEQ ID NO: 77833 - RNA, 32 nt, Human
cacaacacacagauuugagcucagcccuggug

SEQ ID NO: 77834 - RNA, 32 nt, Human
cacaacacagcccaggugugggaacaguaggc

SEQ ID NO: 77835 - RNA, 32 nt, Human
cacaacaccuccuaccaaaaggaagagcaagu

SEQ ID NO: 77836 - RNA, 32 nt, Human
cacaacaccuggcuuauuuuuguauuuuuagc

SEQ ID NO: 77837 - RNA, 32 nt, Human
cacaacacugaaccucuggcuagaggacauau

SEQ ID NO: 77838 - RNA, 32 nt, Human
cacaacacugccuaguugugggcugccuuugu

SEQ ID NO: 77839 - RNA, 32 nt, Human
cacaacacuggguguuggagaaagggagagau

SEQ ID NO: 77840 - RNA, 32 nt, Human
cacaacacuuggcuaauuuguguauuuuuagu

SEQ ID NO: 77841 - RNA, 32 nt, Human
cacaacagaagaccucaccuccacucggagcg

SEQ ID NO: 77842 - RNA, 20 nt, Human
cacaacagauaauguggaga

SEQ ID NO: 77843 - RNA, 32 nt, Human
cacaacaggaacaggcccauuuggaucacgcu

SEQ ID NO: 77844 - RNA, 32 nt, Human
cacaacaggaauauacugaagaacuagagugu

SEQ ID NO: 77845 - RNA, 32 nt, Human
cacaacaggcuacgaagaaccuggugccucag

SEQ ID NO: 77846 - RNA, 32 nt, Human
cacaacagguggcagugguggugacugauagg

SEQ ID NO: 77847 - RNA, 32 nt, Human
cacaacaguccccagagugugauguuccccuu

SEQ ID NO: 77848 - RNA, 24 nt, Human
cacaacauaccagaaucucuggga

SEQ ID NO: 77849 - RNA, 32 nt, Human
cacaacaucagcucugugccaccucccaagag

SEQ ID NO: 77850 - RNA, 32 nt, Human
cacaacaucaucacagggacccugccuccuuc

SEQ ID NO: 77851 - RNA, 32 nt, Human
cacaacaugccaccucaugccccuauauccug

SEQ ID NO: 77852 - RNA, 32 nt, Human
cacaacauuacacacauauacacacagccuga

SEQ ID NO: 77853 - RNA, 32 nt, Human
cacaacauugcacuucagccuggugacaugag

SEQ ID NO: 77854 - RNA, 32 nt, Human
cacaaccaaggaggugguuggacagcuggagg

SEQ ID NO: 77855 - RNA, 32 nt, Human
cacaaccaaggcagacagcaugggugaccagc

SEQ ID NO: 77856 - RNA, 32 nt, Human
cacaaccacauuuguucauuauacaaaauuag

SEQ ID NO: 77857 - RNA, 32 nt, Human
cacaaccacucacugagaguugcccuucuuaa

SEQ ID NO: 77858 - RNA, 32 nt, Human
cacaaccagaugacccauuuuacccuauucac

SEQ ID NO: 77859 - RNA, 32 nt, Human
cacaaccagcagcuccugccauggacaggugg

SEQ ID NO: 77860 - RNA, 23 nt, Human
cacaaccagccaggcagguccac

SEQ ID NO: 77861 - RNA, 19 nt, Human
cacaaccagguaucugcuu

SEQ ID NO: 77862 - RNA, 25 nt, Human
cacaaccaggugugcacuguucacu

SEQ ID NO: 77863 - RNA, 32 nt, Human
cacaaccagugcacuccugccuuuucacucac

SEQ ID NO: 77864 - RNA, 32 nt, Human
cacaaccaucugccuggaagaccugggcuucu

SEQ ID NO: 77865 - RNA, 21 nt, Human
cacaaccaugacgcacugcuc

SEQ ID NO: 77866 - RNA, 32 nt, Human
cacaaccaugcauaaaugacccugccauccua

SEQ ID NO: 77867 - RNA, 32 nt, Human
cacaaccauuccagagaucuccuuggagccac

SEQ ID NO: 77868 - RNA, 32 nt, Human
cacaacccagaaguaaccaccuuuaaaaagca

SEQ ID NO: 77869 - RNA, 32 nt, Human
cacaaccccagcagguguauguugcugcaaaa

SEQ ID NO: 77870 - RNA, 32 nt, Human
cacaacccccagccaaucaggacuuuccagac

SEQ ID NO: 77871 - RNA, 32 nt, Human
cacaacccccuuccucuguggccuccuuuucc

SEQ ID NO: 77872 - RNA, 32 nt, Human
cacaaccccuaggccccucaggagcuuugcag

SEQ ID NO: 77873 - RNA, 32 nt, Human
cacaaccccuuuaugaaccaguuuucacccga

SEQ ID NO: 77874 - RNA, 32 nt, Human
cacaacccuccagaacugacguuggcaggaag

SEQ ID NO: 77875 - RNA, 32 nt, Human
cacaacccuccccuggcccucugauuuguucu

SEQ ID NO: 77876 - RNA, 32 nt, Human
cacaaccgcacacccauacacaacuacaaggg

SEQ ID NO: 77877 - RNA, 32 nt, Human
cacaaccguccagcaaagccagcacagcagag

SEQ ID NO: 77878 - RNA, 32 nt, Human
cacaaccuacagccaccgccgcccggccguuu

SEQ ID NO: 77879 - RNA, 24 nt, Human
cacaaccuaucaagaccucuggga

SEQ ID NO: 77880 - RNA, 32 nt, Human
cacaaccuccagccucccuuuucagagcacag

SEQ ID NO: 77881 - RNA, 32 nt, Human
cacaaccucugccuccccgguucaagugauuc

SEQ ID NO: 77882 - RNA, 32 nt, Human
cacaaccugaaagaccuagaacccagugucgg

SEQ ID NO: 77883 - RNA, 32 nt, Human
cacaaccugcaaaccaggagagagggacaggu

SEQ ID NO: 77884 - RNA, 32 nt, Human
cacaaccuugccacaccucuuggcauggggug

SEQ ID NO: 77885 - RNA, 26 nt, Human
cacaaccuuuuccucaccagucccau

SEQ ID NO: 77886 - RNA, 32 nt, Human
cacaacgaaucuccuucaaggaaccacacauu

SEQ ID NO: 77887 - RNA, 32 nt, Human
cacaacgcccagcuaauuuuuagguuuuucuu

SEQ ID NO: 77888 - RNA, 32 nt, Human
cacaacgcccggcuaauuguuguauuuuuagu

SEQ ID NO: 77889 - RNA, 32 nt, Human
cacaacgccuggcuaaguuuuuguauuuuuag

SEQ ID NO: 77890 - RNA, 32 nt, Human
cacaacgccuggcuaauuuuguauuuuuagua

SEQ ID NO: 77891 - RNA, 32 nt, Human
cacaacggcgcccgacccugcccgcgccucgc

SEQ ID NO: 77892 - RNA, 32 nt, Human
cacaacuacauguauguguggcauuuuuguua

SEQ ID NO: 77893 - RNA, 32 nt, Human
cacaacuaggagagaaagggcagcucccucuu

SEQ ID NO: 77894 - RNA, 32 nt, Human
cacaacuauacagcuauaggguaggaggcuuc

SEQ ID NO: 77895 - RNA, 32 nt, Human
cacaacucaccucguguggaugacuuugugua

SEQ ID NO: 77896 - RNA, 32 nt, Human
cacaacucacugcagccuggaccuccuagccu

SEQ ID NO: 77897 - RNA, 32 nt, Human
cacaacuccaggagagguuccugagcugaguc

SEQ ID NO: 77898 - RNA, 32 nt, Human
cacaacucccaaaccagggauuccuuuauacc

SEQ ID NO: 77899 - RNA, 32 nt, Human
cacaacuccuuggcuuaaacagcuccaccggu

SEQ ID NO: 77900 - RNA, 32 nt, Human
cacaacugaaccagaagagagugaagacuccc

SEQ ID NO: 77901 - RNA, 21 nt, Human
cacaacugacucucuuuuuca

SEQ ID NO: 77902 - RNA, 32 nt, Human
cacaacugagucaucucaaguacucuuuaagg

SEQ ID NO: 77903 - RNA, 32 nt, Human
cacaacugcacuccagccugggcaacagaaca

SEQ ID NO: 77904 - RNA, 32 nt, Human
cacaacugcacuccagcuugggcaacagggcg

SEQ ID NO: 77905 - RNA, 32 nt, Human
cacaacugccugguccgcgagaacaagaaugu

SEQ ID NO: 77906 - RNA, 31 nt, Human
cacaacugggagaaaccucagauucuacuug

SEQ ID NO: 77907 - RNA, 32 nt, Human
cacaacuguggucccagcuacaggggaggcug

SEQ ID NO: 77908 - RNA, 32 nt, Human
cacaacuugcgaguguagugacuuuaggacug

SEQ ID NO: 77909 - RNA, 32 nt, Human
cacaacuuuggacaccccaggcugccaccccu

SEQ ID NO: 77910 - RNA, 32 nt, Human
cacaagaaaccagcugaacaauuucagucauu

SEQ ID NO: 77911 - RNA, 32 nt, Human
cacaagaaaccaguuucuucaucugaaaccga

SEQ ID NO: 77912 - RNA, 32 nt, Human
cacaagaaauuagcugggcgugguggcgcgug

SEQ ID NO: 77913 - RNA, 32 nt, Human
cacaagaacacacacauauacacgaauagaca

SEQ ID NO: 77914 - RNA, 32 nt, Human
cacaagaacagcuuuggaaauggcuguugagc

SEQ ID NO: 77915 - RNA, 32 nt, Human
cacaagaagcagcugcagcugauggggagcuc

SEQ ID NO: 77916 - RNA, 32 nt, Human
cacaagaagcagcugccuggagagaguggcug

SEQ ID NO: 77917 - RNA, 32 nt, Human
cacaagacaagucagggcuaaauaugacagau

SEQ ID NO: 77918 - RNA, 32 nt, Human
cacaagacaucagagaacacacacagggaaaa

SEQ ID NO: 77919 - RNA, 32 nt, Human
cacaagacauucagcacaccaccuccuccugu

SEQ ID NO: 77920 - RNA, 32 nt, Human
cacaagaccacgacuaggggaagcccggaggg

SEQ ID NO: 77921 - RNA, 32 nt, Human
cacaagacccagcuaauuuuuguguuuuuagu

SEQ ID NO: 77922 - RNA, 32 nt, Human
cacaagacccuccccauaagcaggggaccagc

SEQ ID NO: 77923 - RNA, 32 nt, Human
cacaagacuaucauuuuuaaugaccaagagcc

SEQ ID NO: 77924 - RNA, 32 nt, Human
cacaagacucacuccugccccgccaccuccug

SEQ ID NO: 77925 - RNA, 32 nt, Human
cacaagacuguaucuccagcccaaugggaccc

SEQ ID NO: 77926 - RNA, 32 nt, Human
cacaagacuucagacaccagccacaaaugggg

SEQ ID NO: 77927 - RNA, 32 nt, Human
cacaagagagacugaggaaggccuggaggcag

SEQ ID NO: 77928 - RNA, 32 nt, Human
cacaagagagcaagaaaaugugucacaucuau

SEQ ID NO: 77929 - RNA, 32 nt, Human
cacaagagagguggcuuugaguggguuuccuu

SEQ ID NO: 77930 - RNA, 32 nt, Human
cacaagagccacugcacaacagccaaggaacu

SEQ ID NO: 77931 - RNA, 32 nt, Human
cacaagaucauggcuaaagacagagcaauuca

SEQ ID NO: 77932 - RNA, 32 nt, Human
cacaagcaaagcuuuggacaauggcacagcuc

SEQ ID NO: 77933 - RNA, 32 nt, Human
cacaagcaagaucucaggguagggaaaaacca

SEQ ID NO: 77934 - RNA, 32 nt, Human
cacaagcacagaggcccugcggcaggaacaug

SEQ ID NO: 77935 - RNA, 32 nt, Human
cacaagcacuugcacacauguggacuccuaac

SEQ ID NO: 77936 - RNA, 32 nt, Human
cacaagcagaaggaguuggagcacagguuguc

SEQ ID NO: 77937 - RNA, 32 nt, Human
cacaagcagacacacacauauauacauacgca

SEQ ID NO: 77938 - RNA, 32 nt, Human
cacaagcauaugcauacacacauauauacaug

SEQ ID NO: 77939 - RNA, 32 nt, Human
cacaagccagccagggcccaggaagauggggc

SEQ ID NO: 77940 - RNA, 21 nt, Human
cacaagcccuuugcugaggug

SEQ ID NO: 77941 - RNA, 32 nt, Human
cacaagccucaccuguaucuuccuggcucgga

SEQ ID NO: 77942 - RNA, 32 nt, Human
cacaagccuccucuccccagucugccccacuu

SEQ ID NO: 77943 - RNA, 32 nt, Human
cacaagccuccugggugacccugggcuagaau

SEQ ID NO: 77944 - RNA, 32 nt, Human
cacaagccucgaggugccuucuucagggccug

SEQ ID NO: 77945 - RNA, 32 nt, Human
cacaagccuguaaucucugcacuuugggaugc

SEQ ID NO: 77946 - RNA, 32 nt, Human
cacaagccuuucuugcugcugugcuucaagac

SEQ ID NO: 77947 - RNA, 22 nt, Human
cacaagcgccagcugcaggucc

SEQ ID NO: 77948 - RNA, 32 nt, Human
cacaagcuacccacgcccacaggcugacccag

SEQ ID NO: 77949 - RNA, 32 nt, Human
cacaagcucuaggaguucugaacggaaggcag

SEQ ID NO: 77950 - RNA, 32 nt, Human
cacaagcucugccuucccucccugguccucuu

SEQ ID NO: 77951 - RNA, 32 nt, Human
cacaagcugaaggucaaaaaugauuuaaaaca

SEQ ID NO: 77952 - RNA, 32 nt, Human
cacaagcugccucugacagcagccugugaggg

SEQ ID NO: 77953 - RNA, 32 nt, Human
cacaagcuuuuguucucucaguacuuguuacc

SEQ ID NO: 77954 - RNA, 32 nt, Human
cacaaggacagugugugcaauggcuuggacca

SEQ ID NO: 77955 - RNA, 32 nt, Human
cacaaggacgggucaggaaggaaggagaggcu

SEQ ID NO: 77956 - RNA, 32 nt, Human
cacaaggagcagaucuggugggcaggggccau

SEQ ID NO: 77957 - RNA, 32 nt, Human
cacaaggagccuccagccugcccuguggcaca

SEQ ID NO: 77958 - RNA, 32 nt, Human
cacaaggaggaacccugucccagugcuuccau

SEQ ID NO: 77959 - RNA, 32 nt, Human
cacaaggagguuaaguaacuugugcaagauca

SEQ ID NO: 77960 - RNA, 32 nt, Human
cacaaggagugucccuucuuccccagcagagc

SEQ ID NO: 77961 - RNA, 32 nt, Human
cacaaggauuuuaaauaacuugcucaauagua

SEQ ID NO: 77962 - RNA, 32 nt, Human
cacaaggccaggaguucgagaccagccuggcc

SEQ ID NO: 77963 - RNA, 31 nt, Human
cacaaggcucagaugaagaggugaauugaac

SEQ ID NO: 77964 - RNA, 32 nt, Human
cacaagggaacugacucaggaggcagagaaga

SEQ ID NO: 77965 - RNA, 32 nt, Human
cacaagggagcacucauugucuacacacccua

SEQ ID NO: 77966 - RNA, 23 nt, Human
cacaagggccacccugaggccca

SEQ ID NO: 77967 - RNA, 32 nt, Human
cacaagggcucacgccuguaaucucagcacuu

SEQ ID NO: 77968 - RNA, 32 nt, Human
cacaaggggaagaaugaacacagcuuuuuauu

SEQ ID NO: 77969 - RNA, 32 nt, Human
cacaaggggccagugaggacaacucuggugga

SEQ ID NO: 77970 - RNA, 32 nt, Human
cacaagggggccugagugcaguggcucacguc

SEQ ID NO: 77971 - RNA, 32 nt, Human
cacaagguaacacuuauuaugcaccuguuaac

SEQ ID NO: 77972 - RNA, 32 nt, Human
cacaaggucacauagcuuuuaagugacagggc

SEQ ID NO: 77973 - RNA, 32 nt, Human
cacaaggucaggaguugagaccagccuggcca

SEQ ID NO: 77974 - RNA, 32 nt, Human
cacaaggugcugcuuuucagauccacuaugca

SEQ ID NO: 77975 - RNA, 32 nt, Human
cacaaggugggggaggcccugggcaggauguu

SEQ ID NO: 77976 - RNA, 32 nt, Human
cacaaguacagacacuucacuuagccuagggg

SEQ ID NO: 77977 - RNA, 22 nt, Human
cacaaguacauacaugcacaug

SEQ ID NO: 77978 - RNA, 32 nt, Human
cacaaguacgaacuuagcaacacuauauugag

SEQ ID NO: 77979 - RNA, 22 nt, Human
cacaaguacucccagcacaaua

SEQ ID NO: 77980 - RNA, 32 nt, Human
cacaaguaugcugguaguagccucuuuaaaua

SEQ ID NO: 77981 - RNA, 32 nt, Human
cacaagucagaacuuccaccaagggcauuacu

SEQ ID NO: 77982 - RNA, 19 nt, Human
cacaagucagcagugcaga

SEQ ID NO: 77983 - RNA, 32 nt, Human
cacaagucaggagcuagagaccagccugguca

SEQ ID NO: 77984 - RNA, 32 nt, Human
cacaagucaggaguucgagaccagccugggca

SEQ ID NO: 77985 - RNA, 32 nt, Human
cacaagucaugcugaguuuugcagccucugug

SEQ ID NO: 77986 - RNA, 23 nt, Human
cacaagucucugauuucagaaga

SEQ ID NO: 77987 - RNA, 32 nt, Human
cacaagucuguaaucccagcacuuugggaggc

SEQ ID NO: 77988 - RNA, 32 nt, Human
cacaagucuuaugggcaccacagggaacaucc

SEQ ID NO: 77989 - RNA, 32 nt, Human
cacaagucuuuccuuaguaaccugggcgauag

SEQ ID NO: 77990 - RNA, 32 nt, Human
cacaagugaaguguuuuguucuuucuggaguc

SEQ ID NO: 77991 - RNA, 32 nt, Human
cacaagugauccucccaucucugccuugagua

SEQ ID NO: 77992 - RNA, 32 nt, Human
cacaagugauuggaguagaacaugucacugcu

SEQ ID NO: 77993 - RNA, 32 nt, Human
cacaagugcccaggcaaggugcuuggcagaac

SEQ ID NO: 77994 - RNA, 32 nt, Human
cacaagugcgcgggccuguccucccaggggcc

SEQ ID NO: 77995 - RNA, 21 nt, Human
cacaagugcucucccaaaaca

SEQ ID NO: 77996 - RNA, 32 nt, Human
cacaagugggccagggcuggagggagguggga

SEQ ID NO: 77997 - RNA, 32 nt, Human
cacaaguggggacucauugaauuccccugcuc

SEQ ID NO: 77998 - RNA, 31 nt, Human
cacaaguggguggugagaccauugaaagccu

SEQ ID NO: 77999 - RNA, 32 nt, Human
cacaaguggucuggacaugaggguacaguuuc

SEQ ID NO: 78000 - RNA, 32 nt, Human
cacaaguuaaugaaacugagaaggucugacug

SEQ ID NO: 78001 - RNA, 32 nt, Human
cacaaguuaaugauuauuaaaucuauaucaaa

SEQ ID NO: 78002 - RNA, 32 nt, Human
cacaaguuagggaggaagaggcaggcgaugag

SEQ ID NO: 78003 - RNA, 32 nt, Human
cacaaguuugauacaaaauguuuuuaucguac

SEQ ID NO: 78004 - RNA, 32 nt, Human
cacaaguuugccagccuccaccuucuaacccu

SEQ ID NO: 78005 - RNA, 32 nt, Human
cacaauaauucuccagcaacagauccaaugaa

SEQ ID NO: 78006 - RNA, 32 nt, Human
cacaauacagagucauuccuagugcagcccaa

SEQ ID NO: 78007 - RNA, 32 nt, Human
cacaauacaguacucaggcagugcaguacuca

SEQ ID NO: 78008 - RNA, 32 nt, Human
cacaauacauuggauuauuuuauaguaaggaa

SEQ ID NO: 78009 - RNA, 32 nt, Human
cacaauaccaccuuucuuuuguucccagacag

SEQ ID NO: 78010 - RNA, 32 nt, Human
cacaauaccugagacaaaggccagcagaaaca

SEQ ID NO: 78011 - RNA, 32 nt, Human
cacaauagacaggccaagaaacccggugcuuc

SEQ ID NO: 78012 - RNA, 22 nt, Human
cacaauagggacucuauggaaa

SEQ ID NO: 78013 - RNA, 32 nt, Human
cacaauauaacuuuacauucuuugccaauauu

SEQ ID NO: 78014 - RNA, 32 nt, Human
cacaauaucaccaggcuucuucugccucccuu

SEQ ID NO: 78015 - RNA, 32 nt, Human
cacaauaucuguauuuugaauggcuauggcgu

SEQ ID NO: 78016 - RNA, 32 nt, Human
cacaauaugccugacacacaaacugcuuaaua

SEQ ID NO: 78017 - RNA, 32 nt, Human
cacaauauuaaaggagcuacagaaggaaggga

SEQ ID NO: 78018 - RNA, 32 nt, Human
cacaauauuuggaauaccaaaagaugacucag

SEQ ID NO: 78019 - RNA, 32 nt, Human
cacaaucaaaggacuguauggaaaaugaguga

SEQ ID NO: 78020 - RNA, 32 nt, Human
cacaaucaacaucaaagugaagcuggauuucu

SEQ ID NO: 78021 - RNA, 32 nt, Human
cacaaucaaggcucacugcagccucaaccuuc

SEQ ID NO: 78022 - RNA, 32 nt, Human
cacaaucacaauauacaauauaagcuuuagaa

SEQ ID NO: 78023 - RNA, 32 nt, Human
cacaaucagcacaacuggagagaggcauuaaa

SEQ ID NO: 78024 - RNA, 32 nt, Human
cacaaucagcgcggaccgcagcgcggcccagc

SEQ ID NO: 78025 - RNA, 32 nt, Human
cacaaucagugcaguuugaggauacguagacc

SEQ ID NO: 78026 - RNA, 32 nt, Human
cacaaucauagcucacugcagcuuugaccucc

SEQ ID NO: 78027 - RNA, 32 nt, Human
cacaaucauauacagggaacccugccacugug

SEQ ID NO: 78028 - RNA, 32 nt, Human
cacaaucaucuucucccaagacugcucccuuu

SEQ ID NO: 78029 - RNA, 20 nt, Human
cacaauccccagcugaggag

SEQ ID NO: 78030 - RNA, 23 nt, Human
cacaaucccuccuacagggccug

SEQ ID NO: 78031 - RNA, 32 nt, Human
cacaauccuccuccuccucuccaggggccugg

SEQ ID NO: 78032 - RNA, 23 nt, Human
cacaaucgcugcaggacaggaag

SEQ ID NO: 78033 - RNA, 32 nt, Human
cacaaucguagacacggucacacuccaguauc

SEQ ID NO: 78034 - RNA, 32 nt, Human
cacaaucguuuuucuaugugugagagggauuu

SEQ ID NO: 78035 - RNA, 32 nt, Human
cacaaucucaacucacuacagccucgaacucc

SEQ ID NO: 78036 - RNA, 32 nt, Human
cacaaucucauggucuuucaggucccugguua

SEQ ID NO: 78037 - RNA, 32 nt, Human
cacaaucugcagccuccaccaggccuugagua

SEQ ID NO: 78038 - RNA, 32 nt, Human
cacaaugacacacacaucacacacacaucaca

SEQ ID NO: 78039 - RNA, 32 nt, Human
cacaaugacucacgccuguaaucccagcacuu

SEQ ID NO: 78040 - RNA, 32 nt, Human
cacaaugagcaucuuuguaaagaauugauuaa

SEQ ID NO: 78041 - RNA, 32 nt, Human
cacaaugagccgcuaaaugggagcucaauuga

SEQ ID NO: 78042 - RNA, 32 nt, Human
cacaaugaucaaguuggauuuagaugauguuc

SEQ ID NO: 78043 - RNA, 32 nt, Human
cacaaugauuucagaggagacucugcaaaauc

SEQ ID NO: 78044 - RNA, 32 nt, Human
cacaaugcaagaaccuaacuaacgugaugaua

SEQ ID NO: 78045 - RNA, 32 nt, Human
cacaaugcagugccuuucuucucuccagugca

SEQ ID NO: 78046 - RNA, 32 nt, Human
cacaaugccuggcaaauuuuccuauuuuugua

SEQ ID NO: 78047 - RNA, 22 nt, Human
cacaauggaauuaugcuggaag

SEQ ID NO: 78048 - RNA, 20 nt, Human
cacaauggacaauucugcuu

SEQ ID NO: 78049 - RNA, 29 nt, Human
cacaauggaccgggcguccgagcugcucu

SEQ ID NO: 78050 - RNA, 32 nt, Human
cacaauggagaaaaggccuuaggaguguggca

SEQ ID NO: 78051 - RNA, 32 nt, Human
cacaauggauucacuucuuuagggagacaagg

SEQ ID NO: 78052 - RNA, 32 nt, Human
cacaauggauuuauuuucucucucagucucca

SEQ ID NO: 78053 - RNA, 32 nt, Human
cacaauggcacaugccuguaauccuagcaggu

SEQ ID NO: 78054 - RNA, 32 nt, Human
cacaauggcaugucuuucuuuuucugccagaa

SEQ ID NO: 78055 - RNA, 32 nt, Human
cacaauggccugggaaguugaggucacuuuuu

SEQ ID NO: 78056 - RNA, 21 nt, Human
cacaauggcuaaauaucuguu

SEQ ID NO: 78057 - RNA, 32 nt, Human
cacaauggcuaacaccuguaaucccagcacuu

SEQ ID NO: 78058 - RNA, 32 nt, Human
cacaauggcucacaccuguaaugccagcccuu

SEQ ID NO: 78059 - RNA, 32 nt, Human
cacaauggcucaugccuauaaucccagcacuu

SEQ ID NO: 78060 - RNA, 23 nt, Human
cacaauggcucaugcuuguaauc

SEQ ID NO: 78061 - RNA, 32 nt, Human
cacaauggcucaugcuuguaaucccaacacuu

SEQ ID NO: 78062 - RNA, 32 nt, Human
cacaauggcucgugcuuguaaucccagcacuu

SEQ ID NO: 78063 - RNA, 21 nt, Human
cacaauggcuuuguuuugcuu

SEQ ID NO: 78064 - RNA, 32 nt, Human
cacaaugggaccugggcgggcguuacacagaa

SEQ ID NO: 78065 - RNA, 23 nt, Human
cacaaugggagguuugguggaag

SEQ ID NO: 78066 - RNA, 32 nt, Human
cacaaugggcaauucugacuucucccaucuag

SEQ ID NO: 78067 - RNA, 19 nt, Human
cacaauggggugccugcuu

SEQ ID NO: 78068 - RNA, 32 nt, Human
cacaauggguagcuggguggccuugcauucug

SEQ ID NO: 78069 - RNA, 32 nt, Human
cacaauggucaaguuggauuuagaugauguuc

SEQ ID NO: 78070 - RNA, 32 nt, Human
cacaauggucucagccuaggcccucaugauuu

SEQ ID NO: 78071 - RNA, 31 nt, Human
cacaauggugcuaccccuugcccaggcaagg

SEQ ID NO: 78072 - RNA, 32 nt, Human
cacaaugguuuuguuucuuuccuucugaucug

SEQ ID NO: 78073 - RNA, 32 nt, Human
cacaauguccccacccacaggguuagaaccuc

SEQ ID NO: 78074 - RNA, 32 nt, Human
cacaaugucccgugccccuuccucacucguuu

SEQ ID NO: 78075 - RNA, 32 nt, Human
cacaaugugaagcugugggugcaguggcgcca

SEQ ID NO: 78076 - RNA, 29 nt, Human
cacaauguuccaccaggugagaagaguga

SEQ ID NO: 78077 - RNA, 32 nt, Human
cacaauguucucucccagcagcccuggacagu

SEQ ID NO: 78078 - RNA, 32 nt, Human
cacaauguuggccaggcuggucucaaacuccu

SEQ ID NO: 78079 - RNA, 32 nt, Human
cacaauuaaagguacaaagcccagaggaagug

SEQ ID NO: 78080 - RNA, 32 nt, Human
cacaauuacucauguaacagucuuucauuaac

SEQ ID NO: 78081 - RNA, 32 nt, Human
cacaauuagaagaaaaguugaaauccagaaua

SEQ ID NO: 78082 - RNA, 32 nt, Human
cacaauucaguuucagcucuggauuacuucag

SEQ ID NO: 78083 - RNA, 32 nt, Human
cacaauucuaauucuacugacuauccuagaaa

SEQ ID NO: 78084 - RNA, 32 nt, Human
cacaauucucagggcucagcagugaugggaga

SEQ ID NO: 78085 - RNA, 32 nt, Human
cacaauugcaguccagccugggcagcaagagu

SEQ ID NO: 78086 - RNA, 32 nt, Human
cacaauuggaaagaaacagauuuucaaauaau

SEQ ID NO: 78087 - RNA, 22 nt, Human
cacaauugucacucacaacaca

SEQ ID NO: 78088 - RNA, 32 nt, Human
cacaauugugauuuucucaaaugcagacaauu

SEQ ID NO: 78089 - RNA, 32 nt, Human
cacaauuuauuuccuccucccgugccagcccu

SEQ ID NO: 78090 - RNA, 32 nt, Human
cacaauuucaaaaguggaaguuaccguggccu

SEQ ID NO: 78091 - RNA, 32 nt, Human
cacaauuucagggcaucugaauguuugaugug

SEQ ID NO: 78092 - RNA, 32 nt, Human
cacaauuucucagugauccucugcaucucugc

SEQ ID NO: 78093 - RNA, 32 nt, Human
cacaauuugagcaauucauuucacuuuaaagu

SEQ ID NO: 78094 - RNA, 32 nt, Human
cacacaaaaaccaaacacucugcccugggaaa

SEQ ID NO: 78095 - RNA, 32 nt, Human
cacacaaaacaaacaaacacaugggggagaga

SEQ ID NO: 78096 - RNA, 32 nt, Human
cacacaaaacauuuaacuaugguauuuaugga

SEQ ID NO: 78097 - RNA, 32 nt, Human
cacacaaaauuagcugggcaugguggccugug

SEQ ID NO: 78098 - RNA, 19 nt, Human
cacacaaacacagaaccac

SEQ ID NO: 78099 - RNA, 32 nt, Human
cacacaaacaugcacacacacauaugcauauc

SEQ ID NO: 78100 - RNA, 32 nt, Human
cacacaaacaugcacacacgcaugcacacaca

SEQ ID NO: 78101 - RNA, 32 nt, Human
cacacaaacaugcacacauacagaguugguug

SEQ ID NO: 78102 - RNA, 22 nt, Human
cacacaaacccagccuggggag

SEQ ID NO: 78103 - RNA, 22 nt, Human
cacacaaacucagagacacaga

SEQ ID NO: 78104 - RNA, 32 nt, Human
cacacaaacuuaaauuacuguuggcaaaacaa

SEQ ID NO: 78105 - RNA, 32 nt, Human
cacacaaaggcagaggcaucgcagaaggaugc

SEQ ID NO: 78106 - RNA, 32 nt, Human
cacacaaauauggugaaacccaauuucuuaca

SEQ ID NO: 78107 - RNA, 21 nt, Human
cacacaaaugggggcaaccac

SEQ ID NO: 78108 - RNA, 18 nt, Human
cacacaaauguuggcaaa

SEQ ID NO: 78109 - RNA, 32 nt, Human
cacacaaauuauugcaguuacauacagaauug

SEQ ID NO: 78110 - RNA, 32 nt, Human
cacacaacaaaauggaaacauacauguacaac

SEQ ID NO: 78111 - RNA, 32 nt, Human
cacacaacacaccacaccccacaccgcacugc

SEQ ID NO: 78112 - RNA, 32 nt, Human
cacacaacagauggacagagaggaagagcgcu

SEQ ID NO: 78113 - RNA, 32 nt, Human
cacacaacccagaaaggagcugauggggcaga

SEQ ID NO: 78114 - RNA, 32 nt, Human
cacacaaccccuguggacugcagccucgcucu

SEQ ID NO: 78115 - RNA, 32 nt, Human
cacacaacugcacuccagccugggcaacagaa

SEQ ID NO: 78116 - RNA, 32 nt, Human
cacacaacuguggaaaugaaacugcaauacaa

SEQ ID NO: 78117 - RNA, 32 nt, Human
cacacaacuucuguuuccuucucuuguguuau

SEQ ID NO: 78118 - RNA, 32 nt, Human
cacacaagacaucagagaacacacacagggaa

SEQ ID NO: 78119 - RNA, 32 nt, Human
cacacaagaugguauaggccugaacaguguag

SEQ ID NO: 78120 - RNA, 32 nt, Human
cacacaagcacuugcacauacauacaaacaca

SEQ ID NO: 78121 - RNA, 31 nt, Human
cacacaagccuuuucugcaggcaggaguuuc

SEQ ID NO: 78122 - RNA, 32 nt, Human
cacacaaggaggaggaagaggaaauggugacc

SEQ ID NO: 78123 - RNA, 32 nt, Human
cacacaaggccugggucugccuuggggcccag

SEQ ID NO: 78124 - RNA, 32 nt, Human
cacacaaggggcaggggugagggugggggugg

SEQ ID NO: 78125 - RNA, 24 nt, Human
cacacaauacaugcaugcacugua

SEQ ID NO: 78126 - RNA, 24 nt, Human
cacacaauacaugcaugcauugua

SEQ ID NO: 78127 - RNA, 32 nt, Human
cacacaauccgugaaaugaauccaucagcaag

SEQ ID NO: 78128 - RNA, 32 nt, Human
cacacaauccuucgcaacugugccagcacuuc

SEQ ID NO: 78129 - RNA, 17 nt, Human
cacacaaugccagugaa

SEQ ID NO: 78130 - RNA, 32 nt, Human
cacacaauugcaguccagccugggcagcaaga

SEQ ID NO: 78131 - RNA, 18 nt, Human
cacacacaaacacacaga

SEQ ID NO: 78132 - RNA, 32 nt, Human
cacacacaaaccugcucacgcagcugugaugc

SEQ ID NO: 78133 - RNA, 32 nt, Human
cacacacaaauacaaauugacaggucaaaauc

SEQ ID NO: 78134 - RNA, 32 nt, Human
cacacacaacacgcaagcacgccuuaaacaca

SEQ ID NO: 78135 - RNA, 32 nt, Human
cacacacaacaugcaagcacgccuuaaacaca

SEQ ID NO: 78136 - RNA, 32 nt, Human
cacacacaaccagggagugccacgccaguguc

SEQ ID NO: 78137 - RNA, 32 nt, Human
cacacacaagcauaugcauacacacauauaua

SEQ ID NO: 78138 - RNA, 32 nt, Human
cacacacaaguaagauggcuucagagagggag

SEQ ID NO: 78139 - RNA, 32 nt, Human
cacacacaaucacuccccagggacggcccgga

SEQ ID NO: 78140 - RNA, 23 nt, Human
cacacacacaaaaucugcaugua

SEQ ID NO: 78141 - RNA, 32 nt, Human
cacacacacaaaccccaacaacucuuuaggug

SEQ ID NO: 78142 - RNA, 32 nt, Human
cacacacacaacaauuaacagucuucaggcaa

SEQ ID NO: 78143 - RNA, 32 nt, Human
cacacacacaagcacacaugcacagagcuucu

SEQ ID NO: 78144 - RNA, 32 nt, Human
cacacacacagacacacauacacccaugaugu

SEQ ID NO: 78145 - RNA, 32 nt, Human
cacacacacagacucauccacacuucaaauug

SEQ ID NO: 78146 - RNA, 32 nt, Human
cacacacacagagauaugcacacacacggaug

SEQ ID NO: 78147 - RNA, 32 nt, Human
cacacacacagucuaucauacauguacauacu

SEQ ID NO: 78148 - RNA, 32 nt, Human
cacacacacauacacacacauaccauuuaugu

SEQ ID NO: 78149 - RNA, 32 nt, Human
cacacacacauacacacauaugcacaauuugu

SEQ ID NO: 78150 - RNA, 32 nt, Human
cacacacacauacauccugcuuucccucccca

SEQ ID NO: 78151 - RNA, 32 nt, Human
cacacacacaugcacaagucaugugcgaacag

SEQ ID NO: 78152 - RNA, 32 nt, Human
cacacacacaugcacacaaauggacuucucug

SEQ ID NO: 78153 - RNA, 32 nt, Human
cacacacacaugcacacauacacgugcacaca

SEQ ID NO: 78154 - RNA, 32 nt, Human
cacacacacaugcacacauaccgcacuucaua

SEQ ID NO: 78155 - RNA, 32 nt, Human
cacacacacaugcacacauauaugcacaggca

SEQ ID NO: 78156 - RNA, 32 nt, Human
cacacacacaugcaccgcacacauauccaugc

SEQ ID NO: 78157 - RNA, 32 nt, Human
cacacacacaugcagucauacacacucccuga

SEQ ID NO: 78158 - RNA, 32 nt, Human
cacacacacaugcauacacacauacgacacac

SEQ ID NO: 78159 - RNA, 32 nt, Human
cacacacacaugcaugcuacauauguguacgc

SEQ ID NO: 78160 - RNA, 32 nt, Human
cacacacacaugccacacagacacacaugcgc

SEQ ID NO: 78161 - RNA, 32 nt, Human
cacacacacaugcuagcccacugaugcaccca

SEQ ID NO: 78162 - RNA, 23 nt, Human
cacacacacauggcaugcaugua

SEQ ID NO: 78163 - RNA, 32 nt, Human
cacacacacauuaagaugaauguaauuauuau

SEQ ID NO: 78164 - RNA, 32 nt, Human
cacacacacccacaccccugauccuugccaac

SEQ ID NO: 78165 - RNA, 32 nt, Human
cacacacaccccuaccccacacugacugucua

SEQ ID NO: 78166 - RNA, 32 nt, Human
cacacacaccugccuaaagacagggauggcug

SEQ ID NO: 78167 - RNA, 32 nt, Human
cacacacacgcacacacauauguauauacaca

SEQ ID NO: 78168 - RNA, 32 nt, Human
cacacacacgcuuguucacacucagaacccag

SEQ ID NO: 78169 - RNA, 32 nt, Human
cacacacacgugcucacauacauguccgcaua

SEQ ID NO: 78170 - RNA, 25 nt, Human
cacacacacuaccuggaugcaugua

SEQ ID NO: 78171 - RNA, 32 nt, Human
cacacacacucaaacauguacacacacgugcc

SEQ ID NO: 78172 - RNA, 18 nt, Human
cacacacacucacacaga

SEQ ID NO: 78173 - RNA, 32 nt, Human
cacacacacucauccucacacccagcuauacc

SEQ ID NO: 78174 - RNA, 32 nt, Human
cacacacacuggcuccagcuguccucaggguc

SEQ ID NO: 78175 - RNA, 32 nt, Human
cacacacacuugggcccaugcacacacucaca

SEQ ID NO: 78176 - RNA, 32 nt, Human
cacacacacuugugcccaugcacacacucaca

SEQ ID NO: 78177 - RNA, 32 nt, Human
cacacacagaagccucuggggccugagguucu

SEQ ID NO: 78178 - RNA, 32 nt, Human
cacacacagacacacauacacccaugauguga

SEQ ID NO: 78179 - RNA, 32 nt, Human
cacacacagacaugccaguacaugcacacaca

SEQ ID NO: 78180 - RNA, 32 nt, Human
cacacacagagcacugcugcugugcuggggga

SEQ ID NO: 78181 - RNA, 32 nt, Human
cacacacagaugcacacacagauauacacaug

SEQ ID NO: 78182 - RNA, 32 nt, Human
cacacacagaugcacacacagaugcacacaca

SEQ ID NO: 78183 - RNA, 32 nt, Human
cacacacagcacagccaccauccucaacccuc

SEQ ID NO: 78184 - RNA, 32 nt, Human
cacacacagcagcuccaaccuggaggcuggac

SEQ ID NO: 78185 - RNA, 32 nt, Human
cacacacagccauacggucacagagcuuucaa

SEQ ID NO: 78186 - RNA, 32 nt, Human
cacacacagccccuauagcacugagcucacau

SEQ ID NO: 78187 - RNA, 32 nt, Human
cacacacagcuccuuucacuccugccugacug

SEQ ID NO: 78188 - RNA, 32 nt, Human
cacacacaggaagaguguguagaaguggaaau

SEQ ID NO: 78189 - RNA, 32 nt, Human
cacacacaggacccgcauccugggugaugaag

SEQ ID NO: 78190 - RNA, 32 nt, Human
cacacacaggcacagaugcacacacacgcaga

SEQ ID NO: 78191 - RNA, 32 nt, Human
cacacacaggcauccauacaccccagaagacu

SEQ ID NO: 78192 - RNA, 32 nt, Human
cacacacaggugcacacacacgaugccgaaca

SEQ ID NO: 78193 - RNA, 32 nt, Human
cacacacagugaucaccuuaauggagcaaaga

SEQ ID NO: 78194 - RNA, 24 nt, Human
cacacacauacacagaauccucag

SEQ ID NO: 78195 - RNA, 32 nt, Human
cacacacauaugcacacacaugugcaaacaua

SEQ ID NO: 78196 - RNA, 32 nt, Human
cacacacauauguacaugcacauagaugagau

SEQ ID NO: 78197 - RNA, 32 nt, Human
cacacacauauguauaucuauacacacaugug

SEQ ID NO: 78198 - RNA, 24 nt, Human
cacacacauauguguauauaugua

SEQ ID NO: 78199 - RNA, 32 nt, Human
cacacacaucacacccucaaacacccagcuca

SEQ ID NO: 78200 - RNA, 32 nt, Human
cacacacaucacuugcccaucuggcacuaaag

SEQ ID NO: 78201 - RNA, 32 nt, Human
cacacacaucuaagggccaggcugguuccgca

SEQ ID NO: 78202 - RNA, 32 nt, Human
cacacacaucuucccuuccaaagggcuuuuuc

SEQ ID NO: 78203 - RNA, 32 nt, Human
cacacacaugcacacacacauaugcacccaca

SEQ ID NO: 78204 - RNA, 32 nt, Human
cacacacaugcauacacacauacgacacacac

SEQ ID NO: 78205 - RNA, 32 nt, Human
cacacacaugcgcgcacacgugcucccugaag

SEQ ID NO: 78206 - RNA, 32 nt, Human
cacacaccacacacauacacacacgcauuauu

SEQ ID NO: 78207 - RNA, 32 nt, Human
cacacaccaccccugcagcccaagaagagucc

SEQ ID NO: 78208 - RNA, 32 nt, Human
cacacaccaguaaaauguacagugcaugcuuu

SEQ ID NO: 78209 - RNA, 32 nt, Human
cacacacccaagaauaaacuggacaaauggca

SEQ ID NO: 78210 - RNA, 32 nt, Human
cacacacccagcccugcccugggccaaguggc

SEQ ID NO: 78211 - RNA, 32 nt, Human
cacacacccagccugugaaaccuacagcccuc

SEQ ID NO: 78212 - RNA, 32 nt, Human
cacacacccaggcuggagagacacugcgcuca

SEQ ID NO: 78213 - RNA, 32 nt, Human
cacacacccaucugcucacucacccuggcaca

SEQ ID NO: 78214 - RNA, 32 nt, Human
cacacaccccuuccugucauccuuccuggccc

SEQ ID NO: 78215 - RNA, 32 nt, Human
cacacacccguaguuccagcuacuugggaggc

SEQ ID NO: 78216 - RNA, 32 nt, Human
cacacacccugcguuucucccucccaggcuag

SEQ ID NO: 78217 - RNA, 32 nt, Human
cacacaccgccagugucauaccaaagagcuga

SEQ ID NO: 78218 - RNA, 32 nt, Human
cacacaccgcucggugcugaauguuucgagga

SEQ ID NO: 78219 - RNA, 32 nt, Human
cacacaccuauaaucucagcacuuugggaggc

SEQ ID NO: 78220 - RNA, 32 nt, Human
cacacaccuggaacacacagugccccacaccu

SEQ ID NO: 78221 - RNA, 32 nt, Human
cacacaccuguaaucccagcuacucuggaggc

SEQ ID NO: 78222 - RNA, 32 nt, Human
cacacaccuguaaucccagcuauuugggaggc

SEQ ID NO: 78223 - RNA, 32 nt, Human
cacacaccuguaaucccaguuacuugggaggc

SEQ ID NO: 78224 - RNA, 32 nt, Human
cacacaccuuuucucugcugugaauggagauu

SEQ ID NO: 78225 - RNA, 32 nt, Human
cacacacgaauccacagcaauccaucagauau

SEQ ID NO: 78226 - RNA, 32 nt, Human
cacacacgacaaagucacagacauccugcacc

SEQ ID NO: 78227 - RNA, 32 nt, Human
cacacacgcacacacacauaucacaguuuugu

SEQ ID NO: 78228 - RNA, 32 nt, Human
cacacacgcacacacaugcacacacgcacacg

SEQ ID NO: 78229 - RNA, 32 nt, Human
cacacacgcacgugcacacacgcacgcacgcg

SEQ ID NO: 78230 - RNA, 32 nt, Human
cacacacgcacucuccccgcucaggggccugg

SEQ ID NO: 78231 - RNA, 32 nt, Human
cacacacgcaugcacagauaugcuguccggac

SEQ ID NO: 78232 - RNA, 32 nt, Human
cacacacgccgcgaccuacagcucuuucucag

SEQ ID NO: 78233 - RNA, 32 nt, Human
cacacacggaugcacacacagauggucacaca

SEQ ID NO: 78234 - RNA, 21 nt, Human
cacacacgugcccaucugcug

SEQ ID NO: 78235 - RNA, 32 nt, Human
cacacacgugugcacacacaaugcacacaacu

SEQ ID NO: 78236 - RNA, 32 nt, Human
cacacacuacaggggagcaugagggagguugg

SEQ ID NO: 78237 - RNA, 32 nt, Human
cacacacucacacacauccacacacaagcaua

SEQ ID NO: 78238 - RNA, 32 nt, Human
cacacacucacacucacacacacucacacaca

SEQ ID NO: 78239 - RNA, 32 nt, Human
cacacacucauuuugaggaccccagguucaaa

SEQ ID NO: 78240 - RNA, 32 nt, Human
cacacacuccccucagcugcccagccauuccc

SEQ ID NO: 78241 - RNA, 32 nt, Human
cacacacucucacacacauacauguauguuua

SEQ ID NO: 78242 - RNA, 32 nt, Human
cacacacucugccaugcacacaggaggagagc

SEQ ID NO: 78243 - RNA, 32 nt, Human
cacacacugcagccacacucaucagcuguggu

SEQ ID NO: 78244 - RNA, 32 nt, Human
cacacacugccgcuucaaucuccugggcucaa

SEQ ID NO: 78245 - RNA, 32 nt, Human
cacacacuggacugaccugcccugagcgggga

SEQ ID NO: 78246 - RNA, 32 nt, Human
cacacacugucacacucacacacucacauaca

SEQ ID NO: 78247 - RNA, 32 nt, Human
cacacacuguuccagcccaucugucucacccu

SEQ ID NO: 78248 - RNA, 32 nt, Human
cacacacuugaguccccuugggccacaaaggc

SEQ ID NO: 78249 - RNA, 32 nt, Human
cacacacuugggcccaugcacacacucacagg

SEQ ID NO: 78250 - RNA, 32 nt, Human
cacacacuuuguaucaugcaggccacacucag

SEQ ID NO: 78251 - RNA, 32 nt, Human
cacacagaaaacagcagccugcguacuuucaa

SEQ ID NO: 78252 - RNA, 32 nt, Human
cacacagaaagcauacaugcaaaaagaaauga

SEQ ID NO: 78253 - RNA, 32 nt, Human
cacacagaaagccaaagcgaucggugcuccca

SEQ ID NO: 78254 - RNA, 32 nt, Human
cacacagaaagccaggauugaagcggugcuca

SEQ ID NO: 78255 - RNA, 32 nt, Human
cacacagaagagacccugccacaggaggagug

SEQ ID NO: 78256 - RNA, 32 nt, Human
cacacagaagggagaccccgccuagcauagau

SEQ ID NO: 78257 - RNA, 32 nt, Human
cacacagaauacucugccucugcuucauguag

SEQ ID NO: 78258 - RNA, 21 nt, Human
cacacagacaacagcaggcag

SEQ ID NO: 78259 - RNA, 25 nt, Human
cacacagacacacaagcagacacac

SEQ ID NO: 78260 - RNA, 32 nt, Human
cacacagacacacauacacccaugaugugagc

SEQ ID NO: 78261 - RNA, 32 nt, Human
cacacagacagcccgcuuuguucuuucauuuc

SEQ ID NO: 78262 - RNA, 22 nt, Human
cacacagacccacugcagcucu

SEQ ID NO: 78263 - RNA, 23 nt, Human
cacacagaccuggaugccccaga

SEQ ID NO: 78264 - RNA, 32 nt, Human
cacacagacgcagagcaggacucucucugcug

SEQ ID NO: 78265 - RNA, 23 nt, Human
cacacagacucaccaacuuugca

SEQ ID NO: 78266 - RNA, 32 nt, Human
cacacagagaugcacacgugacucauaacaca

SEQ ID NO: 78267 - RNA, 32 nt, Human
cacacagagcccagccguggcaggcucagccg

SEQ ID NO: 78268 - RNA, 32 nt, Human
cacacagagccugagcuccugccuugccagcc

SEQ ID NO: 78269 - RNA, 32 nt, Human
cacacagaggccaggccuuagcgcggcucagc

SEQ ID NO: 78270 - RNA, 18 nt, Human
cacacagaggccugcaug

SEQ ID NO: 78271 - RNA, 32 nt, Human
cacacagauaugcacacacauggaugagcaca

SEQ ID NO: 78272 - RNA, 32 nt, Human
cacacagauucuggggacagagcuguuaccug

SEQ ID NO: 78273 - RNA, 32 nt, Human
cacacagcaaagaugaugaaacuuacaaccac

SEQ ID NO: 78274 - RNA, 32 nt, Human
cacacagcaacucagaugaaacucaaggaaau

SEQ ID NO: 78275 - RNA, 32 nt, Human
cacacagcaagaauccuaagaaacccggggug

SEQ ID NO: 78276 - RNA, 22 nt, Human
cacacagcaagaccccaucucu

SEQ ID NO: 78277 - RNA, 32 nt, Human
cacacagcacacacaagugcacagagcacacu

SEQ ID NO: 78278 - RNA, 32 nt, Human
cacacagcacagccaccauccucaacccucga

SEQ ID NO: 78279 - RNA, 32 nt, Human
cacacagcacucucuaaaucuuccuugugagg

SEQ ID NO: 78280 - RNA, 32 nt, Human
cacacagcaggaggggccugcccaggcccagu

SEQ ID NO: 78281 - RNA, 19 nt, Human
cacacagcagggcugagcu

SEQ ID NO: 78282 - RNA, 32 nt, Human
cacacagcauggcuuccagccugaagugacug

SEQ ID NO: 78283 - RNA, 24 nt, Human
cacacagcccagcaaaagccucuc

SEQ ID NO: 78284 - RNA, 22 nt, Human
cacacagcccagcaaacagcag

SEQ ID NO: 78285 - RNA, 32 nt, Human
cacacagcccccacaucacccaaccaaccagc

SEQ ID NO: 78286 - RNA, 32 nt, Human
cacacagcccccgcaucacccaaccaaccagc

SEQ ID NO: 78287 - RNA, 24 nt, Human
cacacagccccugcugcauucucu

SEQ ID NO: 78288 - RNA, 32 nt, Human
cacacagcccugcuuggccagcacugccugca

SEQ ID NO: 78289 - RNA, 32 nt, Human
cacacagcccugggacacugcccuggcccucc

SEQ ID NO: 78290 - RNA, 21 nt, Human
cacacagccuagcacagcagc

SEQ ID NO: 78291 - RNA, 23 nt, Human
cacacagccucaccuucaccucu

SEQ ID NO: 78292 - RNA, 32 nt, Human
cacacagccucaccuucaccucuuggguauuu

SEQ ID NO: 78293 - RNA, 32 nt, Human
cacacagccuccaauccucauccaccagugcc

SEQ ID NO: 78294 - RNA, 24 nt, Human
cacacagccucucugcccaccucu

SEQ ID NO: 78295 - RNA, 24 nt, Human
cacacagcgagcuuucccucugga

SEQ ID NO: 78296 - RNA, 21 nt, Human
cacacagcgggagaacgcagu

SEQ ID NO: 78297 - RNA, 32 nt, Human
cacacagcgucacucacucccacacacacccc

SEQ ID NO: 78298 - RNA, 32 nt, Human
cacacagcucacucgaccuugggaggccuccc

SEQ ID NO: 78299 - RNA, 32 nt, Human
cacacagcucacucguauguccugcacuggua

SEQ ID NO: 78300 - RNA, 32 nt, Human
cacacagcucacugcagccuugauuucccggg

SEQ ID NO: 78301 - RNA, 32 nt, Human
cacacagcugcuauauagaggaacagaaggug

SEQ ID NO: 78302 - RNA, 31 nt, Human
cacacagcugcucagcaccauuucauucugg

SEQ ID NO: 78303 - RNA, 23 nt, Human
cacacagcuuggaagugauucuu

SEQ ID NO: 78304 - RNA, 32 nt, Human
cacacaggacacaccuccucccucuucuccuc

SEQ ID NO: 78305 - RNA, 21 nt, Human
cacacaggacagcagaagauc

SEQ ID NO: 78306 - RNA, 32 nt, Human
cacacaggaccaggcugcgagaacagcaucau

SEQ ID NO: 78307 - RNA, 32 nt, Human
cacacaggacggcaggggcacugugaggcuuu

SEQ ID NO: 78308 - RNA, 32 nt, Human
cacacaggaggcugccagcagcauuuucccca

SEQ ID NO: 78309 - RNA, 32 nt, Human
cacacaggagugaggccaggggcuaggaguuc

SEQ ID NO: 78310 - RNA, 32 nt, Human
cacacaggagugggugacagaggagacugcag

SEQ ID NO: 78311 - RNA, 32 nt, Human
cacacaggcaaugauuuuaugacaacuugaug

SEQ ID NO: 78312 - RNA, 32 nt, Human
cacacaggcaggcuggagaggaguggcaagaa

SEQ ID NO: 78313 - RNA, 32 nt, Human
cacacaggcccagguguguaggccacagcagc

SEQ ID NO: 78314 - RNA, 32 nt, Human
cacacaggcguuccaccagcaggauguggagc

SEQ ID NO: 78315 - RNA, 32 nt, Human
cacacagggaaacuuagaguucagagaggggg

SEQ ID NO: 78316 - RNA, 32 nt, Human
cacacagggaaaggaagacagucucacagagg

SEQ ID NO: 78317 - RNA, 32 nt, Human
cacacagggaguaaguggcagagccaggaucu

SEQ ID NO: 78318 - RNA, 32 nt, Human
cacacaggguauuccucucccuucucugaugu

SEQ ID NO: 78319 - RNA, 32 nt, Human
cacacagggucugcaaggucuuugguucagcu

SEQ ID NO: 78320 - RNA, 32 nt, Human
cacacaggucaccuagaaauucgugucaccgc

SEQ ID NO: 78321 - RNA, 32 nt, Human
cacacagguuggaaaagaguuuaagaacagaa

SEQ ID NO: 78322 - RNA, 32 nt, Human
cacacaguaggcccgcaauaaaagcaacaccc

SEQ ID NO: 78323 - RNA, 20 nt, Human
cacacaguccaguuugcaug

SEQ ID NO: 78324 - RNA, 32 nt, Human
cacacagugaagggaaaagagucugugaaggu

SEQ ID NO: 78325 - RNA, 32 nt, Human
cacacagugcacguccacagugccauaccacg

SEQ ID NO: 78326 - RNA, 32 nt, Human
cacacagugccuccucugccaguuccuuuauu

SEQ ID NO: 78327 - RNA, 32 nt, Human
cacacagugccuguaaaucucauuuguauuuu

SEQ ID NO: 78328 - RNA, 32 nt, Human
cacacagugcuguacugcacacaccacagaau

SEQ ID NO: 78329 - RNA, 32 nt, Human
cacacagugggauacuaaguguuugcguugca

SEQ ID NO: 78330 - RNA, 32 nt, Human
cacacaguggggaagacacagggcuaagacug

SEQ ID NO: 78331 - RNA, 32 nt, Human
cacacagugggguugagggagcuaggcuguuu

SEQ ID NO: 78332 - RNA, 16 nt, Human
cacacaguggugggga

SEQ ID NO: 78333 - RNA, 32 nt, Human
cacacaguuaccugguucacagauagcugcuu

SEQ ID NO: 78334 - RNA, 32 nt, Human
cacacaguuguucaccaacagaccagaccucc

SEQ ID NO: 78335 - RNA, 32 nt, Human
cacacaguuuuguuuaugcauuuccuuaaaau

SEQ ID NO: 78336 - RNA, 24 nt, Human
cacacaguuuuuuguuuuguuuuu

SEQ ID NO: 78337 - RNA, 32 nt, Human
cacacauaaaaauugauuuaaguggaucauag

SEQ ID NO: 78338 - RNA, 32 nt, Human
cacacauaauagacacaucccuaacggcgugu

SEQ ID NO: 78339 - RNA, 32 nt, Human
cacacauaauuuaaagagagaaggcucuugau

SEQ ID NO: 78340 - RNA, 32 nt, Human
cacacauacaaaaccuuuaaauuuugggaucu

SEQ ID NO: 78341 - RNA, 18 nt, Human
cacacauacacacacaga

SEQ ID NO: 78342 - RNA, 19 nt, Human
cacacauacacacgucugu

SEQ ID NO: 78343 - RNA, 32 nt, Human
cacacauacacacugucaugcacucaacuaua

SEQ ID NO: 78344 - RNA, 32 nt, Human
cacacauacacucacacauacacaacccggca

SEQ ID NO: 78345 - RNA, 32 nt, Human
cacacauacaugcccacacauagugacaugcu

SEQ ID NO: 78346 - RNA, 18 nt, Human
cacacauacaugugcaca

SEQ ID NO: 78347 - RNA, 32 nt, Human
cacacauacccuacccucaccugaugauaauu

SEQ ID NO: 78348 - RNA, 32 nt, Human
cacacauaccuguaaucccagcuacuuuggug

SEQ ID NO: 78349 - RNA, 20 nt, Human
cacacauagaacacuugcug

SEQ ID NO: 78350 - RNA, 32 nt, Human
cacacauagguaaacuguuacaaauccagaau

SEQ ID NO: 78351 - RNA, 32 nt, Human
cacacauauaaacaucacacacacagacagac

SEQ ID NO: 78352 - RNA, 18 nt, Human
cacacauauacacacaga

SEQ ID NO: 78353 - RNA, 32 nt, Human
cacacauauauguacagacauguacucucaca

SEQ ID NO: 78354 - RNA, 32 nt, Human
cacacauauguauauacacauaucauuuuaag

SEQ ID NO: 78355 - RNA, 22 nt, Human
cacacauauugauggagucugc

SEQ ID NO: 78356 - RNA, 22 nt, Human
cacacauauuugcaguuuacug

SEQ ID NO: 78357 - RNA, 32 nt, Human
cacacaucacacucuggggacucaggaaccau

SEQ ID NO: 78358 - RNA, 32 nt, Human
cacacaucauucuggcuggagagugcaaugug

SEQ ID NO: 78359 - RNA, 32 nt, Human
cacacauccaucucaagaggaacauuuauacc

SEQ ID NO: 78360 - RNA, 32 nt, Human
cacacaucccucaucaaugguugacugcaaag

SEQ ID NO: 78361 - RNA, 19 nt, Human
cacacaucccuugauuccu

SEQ ID NO: 78362 - RNA, 32 nt, Human
cacacaucgucagcauaaggcaucuaaagauu

SEQ ID NO: 78363 - RNA, 32 nt, Human
cacacaucucccacccaccugagcgccaugug

SEQ ID NO: 78364 - RNA, 32 nt, Human
cacacaucuggccccaccugcucaguacuacu

SEQ ID NO: 78365 - RNA, 32 nt, Human
cacacaucuguaauccuagcuacuuggcaggc

SEQ ID NO: 78366 - RNA, 32 nt, Human
cacacaucuguauuccagccugggcaauagag

SEQ ID NO: 78367 - RNA, 21 nt, Human
cacacaucuucccaguucuca

SEQ ID NO: 78368 - RNA, 32 nt, Human
cacacaugcacacacacauaugcacccacaca

SEQ ID NO: 78369 - RNA, 32 nt, Human
cacacaugcacacccucucacguccuccagag

SEQ ID NO: 78370 - RNA, 32 nt, Human
cacacaugcacgcacacacacauauggggacc

SEQ ID NO: 78371 - RNA, 32 nt, Human
cacacaugcacgcacgcacacgcacacccagu

SEQ ID NO: 78372 - RNA, 32 nt, Human
cacacaugcacgcauaugucuucaagaugacc

SEQ ID NO: 78373 - RNA, 32 nt, Human
cacacaugcaggcacacacagccugugcacac

SEQ ID NO: 78374 - RNA, 32 nt, Human
cacacaugcauacacacauacgacacacaccu

SEQ ID NO: 78375 - RNA, 32 nt, Human
cacacaugcaugcacacaaacaucacugcagc

SEQ ID NO: 78376 - RNA, 32 nt, Human
cacacaugcaugcacacaaacguguacacaag

SEQ ID NO: 78377 - RNA, 32 nt, Human
cacacaugcaugcacacacaugcacacauaca

SEQ ID NO: 78378 - RNA, 32 nt, Human
cacacaugcaugcacacauacacaugcacaca

SEQ ID NO: 78379 - RNA, 32 nt, Human
cacacaugccauuccaugaagacagaggauca

SEQ ID NO: 78380 - RNA, 32 nt, Human
cacacaugcguauagacauacauacauguaca

SEQ ID NO: 78381 - RNA, 32 nt, Human
cacacaugcgugcacacauagacgcaugcacu

SEQ ID NO: 78382 - RNA, 32 nt, Human
cacacaugcucugggccgugcgaggcucagcu

SEQ ID NO: 78383 - RNA, 32 nt, Human
cacacaugcuguggagauugcagugugucuga

SEQ ID NO: 78384 - RNA, 32 nt, Human
cacacaugcuguggagcacacaugcuguggag

SEQ ID NO: 78385 - RNA, 32 nt, Human
cacacauggaaggugaugggggcaugggugga

SEQ ID NO: 78386 - RNA, 32 nt, Human
cacacauggccucauuggcucucagucccgag

SEQ ID NO: 78387 - RNA, 32 nt, Human
cacacauggcugaugucacauugaaaauguga

SEQ ID NO: 78388 - RNA, 32 nt, Human
cacacauggcuguucuggagagggccucugag

SEQ ID NO: 78389 - RNA, 32 nt, Human
cacacaugggaagagaagguacagaggcaagg

SEQ ID NO: 78390 - RNA, 32 nt, Human
cacacauggggugccuaccacagaccacccuu

SEQ ID NO: 78391 - RNA, 32 nt, Human
cacacaugguauccuucuuggccaacagaugg

SEQ ID NO: 78392 - RNA, 32 nt, Human
cacacauguaugcacacacacaugcaccgcac

SEQ ID NO: 78393 - RNA, 32 nt, Human
cacacauuagccucgcugcggcgcccagacuc

SEQ ID NO: 78394 - RNA, 32 nt, Human
cacacauuccccagccucucugcccaguaugc

SEQ ID NO: 78395 - RNA, 32 nt, Human
cacacauuccucacguagcuucugcucccagg

SEQ ID NO: 78396 - RNA, 32 nt, Human
cacacauuguuuccaggaccuccugagaagcc

SEQ ID NO: 78397 - RNA, 32 nt, Human
cacacauuuacacgguaacagcucuuauuaag

SEQ ID NO: 78398 - RNA, 32 nt, Human
cacacauuucuagaucuugcacugucgaaaag

SEQ ID NO: 78399 - RNA, 32 nt, Human
cacaccaaccaguguaggagaccucauggcuc

SEQ ID NO: 78400 - RNA, 32 nt, Human
cacaccaaccugggugacagagcaagauugca

SEQ ID NO: 78401 - RNA, 32 nt, Human
cacaccaacuccaggaaacucauucugggcca

SEQ ID NO: 78402 - RNA, 32 nt, Human
cacaccaagaacagcuuuugagucguauccuc

SEQ ID NO: 78403 - RNA, 32 nt, Human
cacaccaagccccuagcuggggcacagccugg

SEQ ID NO: 78404 - RNA, 32 nt, Human
cacaccaaucuugagguguugugccauucucu

SEQ ID NO: 78405 - RNA, 32 nt, Human
cacaccacagccgcugaaugaggcuuccaggc

SEQ ID NO: 78406 - RNA, 32 nt, Human
cacaccacagcugcgcacacagcugcuugcuc

SEQ ID NO: 78407 - RNA, 19 nt, Human
cacaccacaggccucgaag

SEQ ID NO: 78408 - RNA, 32 nt, Human
cacaccacaguacuccagccuaggugacagag

SEQ ID NO: 78409 - RNA, 32 nt, Human
cacaccaccacacuccagccugagcagcagag

SEQ ID NO: 78410 - RNA, 32 nt, Human
cacaccaccacuccagccugggcgagagcgag

SEQ ID NO: 78411 - RNA, 32 nt, Human
cacaccaccauccuguuugcagccgaaguguu

SEQ ID NO: 78412 - RNA, 32 nt, Human
cacaccacccaggccuccaccuccccagggag

SEQ ID NO: 78413 - RNA, 32 nt, Human
cacaccacccuccugccaaccccacaccccuc

SEQ ID NO: 78414 - RNA, 32 nt, Human
cacaccaccucacuccagccugggcaacauag

SEQ ID NO: 78415 - RNA, 32 nt, Human
cacaccacgguccugcugaccugcacugucca

SEQ ID NO: 78416 - RNA, 32 nt, Human
cacaccacuacacuccagccaaagcaacaaga

SEQ ID NO: 78417 - RNA, 32 nt, Human
cacaccacuacacuccagccuaggcaacagag

SEQ ID NO: 78418 - RNA, 32 nt, Human
cacaccacuacacuccagccuggacaacagaa

SEQ ID NO: 78419 - RNA, 32 nt, Human
cacaccacuacacuccagccugggcgacagag

SEQ ID NO: 78420 - RNA, 32 nt, Human
cacaccacuacacuccagccugggcgagacgg

SEQ ID NO: 78421 - RNA, 32 nt, Human
cacaccacuacucuccaaccugggugacagac

SEQ ID NO: 78422 - RNA, 32 nt, Human
cacaccacucaccacacauacauacacaugca

SEQ ID NO: 78423 - RNA, 32 nt, Human
cacaccacuccacuccagucuggacaacagag

SEQ ID NO: 78424 - RNA, 32 nt, Human
cacaccacugaccucuagccugguggcagagu

SEQ ID NO: 78425 - RNA, 32 nt, Human
cacaccacugauuggccuuuucuuucacguga

SEQ ID NO: 78426 - RNA, 32 nt, Human
cacaccacugcaauccagccucgguaacacag

SEQ ID NO: 78427 - RNA, 32 nt, Human
cacaccacugcaauccagccugggcgacaaag

SEQ ID NO: 78428 - RNA, 32 nt, Human
cacaccacugcaccccagccugggugacagcg

SEQ ID NO: 78429 - RNA, 32 nt, Human
cacaccacugcacuacagccucggcaauagag

SEQ ID NO: 78430 - RNA, 32 nt, Human
cacaccacugcacucagccugggugacagagc

SEQ ID NO: 78431 - RNA, 32 nt, Human
cacaccacugcacuccaaccuggacaacagag

SEQ ID NO: 78432 - RNA, 32 nt, Human
cacaccacugcacuccaaccugggaaacgcag

SEQ ID NO: 78433 - RNA, 20 nt, Human
cacaccacugcacuccagcc

SEQ ID NO: 78434 - RNA, 32 nt, Human
cacaccacugcacuccagccagggcaacagug

SEQ ID NO: 78435 - RNA, 32 nt, Human
cacaccacugcacuccagcccaggugacagag

SEQ ID NO: 78436 - RNA, 32 nt, Human
cacaccacugcacuccagccuaggcaacagag

SEQ ID NO: 78437 - RNA, 32 nt, Human
cacaccacugcacuccagccuggacaacagag

SEQ ID NO: 78438 - RNA, 32 nt, Human
cacaccacugcacuccagccuggacgacagag

SEQ ID NO: 78439 - RNA, 32 nt, Human
cacaccacugcacuccagccuggcaacagagc

SEQ ID NO: 78440 - RNA, 32 nt, Human
cacaccacugcacuccagccuggcgacagaga

SEQ ID NO: 78441 - RNA, 32 nt, Human
cacaccacugcacuccagccugggagagagag

SEQ ID NO: 78442 - RNA, 32 nt, Human
cacaccacugcacuccagccugggcaacaaag

SEQ ID NO: 78443 - RNA, 32 nt, Human
cacaccacugcacuccagccugggcaacaaga

SEQ ID NO: 78444 - RNA, 32 nt, Human
cacaccacugcacuccagccugggcaacagaa

SEQ ID NO: 78445 - RNA, 32 nt, Human
cacaccacugcacuccagccugggcaacagag

SEQ ID NO: 78446 - RNA, 32 nt, Human
cacaccacugcacuccagccugggcaacugag

SEQ ID NO: 78447 - RNA, 32 nt, Human
cacaccacugcacuccagccugggcaauagag

SEQ ID NO: 78448 - RNA, 32 nt, Human
cacaccacugcacuccagccugggcgacagaa

SEQ ID NO: 78449 - RNA, 32 nt, Human
cacaccacugcacuccagccugggcgacagag

SEQ ID NO: 78450 - RNA, 32 nt, Human
cacaccacugcacuccagccugggcgacagug

SEQ ID NO: 78451 - RNA, 32 nt, Human
cacaccacugcacuccagccugggcggcagag

SEQ ID NO: 78452 - RNA, 32 nt, Human
cacaccacugcacuccagccugggcuacagag

SEQ ID NO: 78453 - RNA, 32 nt, Human
cacaccacugcacuccagccugggggacagag

SEQ ID NO: 78454 - RNA, 32 nt, Human
cacaccacugcacuccagccuggggugauaga

SEQ ID NO: 78455 - RNA, 32 nt, Human
cacaccacugcacuccagccugggugacagag

SEQ ID NO: 78456 - RNA, 32 nt, Human
cacaccacugcacuccagccugggugacagau

SEQ ID NO: 78457 - RNA, 32 nt, Human
cacaccacugcacuccagccugggugacagca

SEQ ID NO: 78458 - RNA, 32 nt, Human
cacaccacugcacuccagccugggugauagag

SEQ ID NO: 78459 - RNA, 32 nt, Human
cacaccacugcacuccagccuggguggcagag

SEQ ID NO: 78460 - RNA, 32 nt, Human
cacaccacugcacuccagccugggugucagag

SEQ ID NO: 78461 - RNA, 32 nt, Human
cacaccacugcacuccagccuggucaacagag

SEQ ID NO: 78462 - RNA, 32 nt, Human
cacaccacugcacuccagccuggugacagagc

SEQ ID NO: 78463 - RNA, 32 nt, Human
cacaccacugcacuccagccugugcgacagag

SEQ ID NO: 78464 - RNA, 32 nt, Human
cacaccacugcacuccagccuuggcgacaaac

SEQ ID NO: 78465 - RNA, 32 nt, Human
cacaccacugcacuccagccuuggcgacagag

SEQ ID NO: 78466 - RNA, 32 nt, Human
cacaccacugcacuccagccuuggugacagag

SEQ ID NO: 78467 - RNA, 32 nt, Human
cacaccacugcacuccagcuugggggauagag

SEQ ID NO: 78468 - RNA, 32 nt, Human
cacaccacugcacuccagucugggcaacagug

SEQ ID NO: 78469 - RNA, 32 nt, Human
cacaccacugcacuccagucugggcaccagag

SEQ ID NO: 78470 - RNA, 32 nt, Human
cacaccacugcacuccagugugagcaacagaa

SEQ ID NO: 78471 - RNA, 32 nt, Human
cacaccacugcacuccauccagccugggugac

SEQ ID NO: 78472 - RNA, 32 nt, Human
cacaccacugcacuccauccugggcaacagag

SEQ ID NO: 78473 - RNA, 32 nt, Human
cacaccacugcacuccggccugggcgacagag

SEQ ID NO: 78474 - RNA, 32 nt, Human
cacaccacugcacuccugccugggcaauagag

SEQ ID NO: 78475 - RNA, 32 nt, Human
cacaccacugcacucuagccugggcaacagag

SEQ ID NO: 78476 - RNA, 32 nt, Human
cacaccacugcacucuagccugggugacagag

SEQ ID NO: 78477 - RNA, 32 nt, Human
cacaccacugcacucuggccugcaugcacucu

SEQ ID NO: 78478 - RNA, 32 nt, Human
cacaccacugcacuucagccuggaugacagag

SEQ ID NO: 78479 - RNA, 32 nt, Human
cacaccacugcacuucagccugggcaacagag

SEQ ID NO: 78480 - RNA, 32 nt, Human
cacaccacugcacuucauccuaggcaacagag

SEQ ID NO: 78481 - RNA, 32 nt, Human
cacaccacugcauuccagccugggcacuagag

SEQ ID NO: 78482 - RNA, 32 nt, Human
cacaccacugcauuccagccugggugacagag

SEQ ID NO: 78483 - RNA, 32 nt, Human
cacaccacugcauucccgccugggcagcagag

SEQ ID NO: 78484 - RNA, 32 nt, Human
cacaccacugcauucuggccugggugacagag

SEQ ID NO: 78485 - RNA, 32 nt, Human
cacaccacugccauuuccuccugggcaacaga

SEQ ID NO: 78486 - RNA, 32 nt, Human
cacaccacugcgcucuagccuggacaacaaga

SEQ ID NO: 78487 - RNA, 32 nt, Human
cacaccacugcgcucuagccugggcaacaaga

SEQ ID NO: 78488 - RNA, 32 nt, Human
cacaccacuggcacuccagccugggcaacaga

SEQ ID NO: 78489 - RNA, 32 nt, Human
cacaccacuguacuccagcccggcacuccagc

SEQ ID NO: 78490 - RNA, 32 nt, Human
cacaccacuguacuccagccugagugacaaag

SEQ ID NO: 78491 - RNA, 32 nt, Human
cacaccacuguacuccagccuggaugacagag

SEQ ID NO: 78492 - RNA, 32 nt, Human
cacaccacuguacuccagccugggcaacagag

SEQ ID NO: 78493 - RNA, 32 nt, Human
cacaccacuguacuccagccugggugacaaag

SEQ ID NO: 78494 - RNA, 32 nt, Human
cacaccacuguacuccagccuggugacagagc

SEQ ID NO: 78495 - RNA, 32 nt, Human
cacaccacuguauuccagccugggugacagag

SEQ ID NO: 78496 - RNA, 32 nt, Human
cacaccacuguauuccagccugggugacugag

SEQ ID NO: 78497 - RNA, 32 nt, Human
cacaccacugugcucuagccuggacaacaaga

SEQ ID NO: 78498 - RNA, 32 nt, Human
cacaccacugugcucuagccugggugacaaag

SEQ ID NO: 78499 - RNA, 32 nt, Human
cacaccacuugugagcugacccccaggaacag

SEQ ID NO: 78500 - RNA, 32 nt, Human
cacaccagaaauggacauuuucauaugcaaug

SEQ ID NO: 78501 - RNA, 32 nt, Human
cacaccagaagcacgaggcccuugagaacugu

SEQ ID NO: 78502 - RNA, 32 nt, Human
cacaccagagcgugggagacggugggccuugu

SEQ ID NO: 78503 - RNA, 32 nt, Human
cacaccagcaggucgccuccagccugaccagc

SEQ ID NO: 78504 - RNA, 27 nt, Human
cacaccagccaugcagccagcaggucc

SEQ ID NO: 78505 - RNA, 32 nt, Human
cacaccagcccagcccagcccagcucucgaua

SEQ ID NO: 78506 - RNA, 21 nt, Human
cacaccagccgcugcaggucc

SEQ ID NO: 78507 - RNA, 32 nt, Human
cacaccagccuccugggggauacgguggagaa

SEQ ID NO: 78508 - RNA, 32 nt, Human
cacaccagccuggacaacagagcgagacucug

SEQ ID NO: 78509 - RNA, 32 nt, Human
cacaccagccugggcaacacagcaagacaccg

SEQ ID NO: 78510 - RNA, 32 nt, Human
cacaccagccugggcaacacagcaagacucug

SEQ ID NO: 78511 - RNA, 31 nt, Human
cacaccagccugggugacagagcgagacucc

SEQ ID NO: 78512 - RNA, 32 nt, Human
cacaccagccugggugacagugugagacccag

SEQ ID NO: 78513 - RNA, 32 nt, Human
cacaccagcgaccaggccuggagcucacacuu

SEQ ID NO: 78514 - RNA, 32 nt, Human
cacaccagcucagccacagcagagccaaucac

SEQ ID NO: 78515 - RNA, 32 nt, Human
cacaccagggcuugcauagaaaagcuucgguu

SEQ ID NO: 78516 - RNA, 32 nt, Human
cacaccagucugggugacagagaaagacccug

SEQ ID NO: 78517 - RNA, 32 nt, Human
cacaccagugcacuccagccugggcgacagag

SEQ ID NO: 78518 - RNA, 32 nt, Human
cacaccaguguucaucagucuguccucugcac

SEQ ID NO: 78519 - RNA, 32 nt, Human
cacaccaguucugcagcagucgcuauuagaug

SEQ ID NO: 78520 - RNA, 32 nt, Human
cacaccauaaggagauuucuguuuuucuuuuu

SEQ ID NO: 78521 - RNA, 32 nt, Human
cacaccauaucaggugcugaagauucacgggu

SEQ ID NO: 78522 - RNA, 32 nt, Human
cacaccauccaccuggccgccuccauggaccc

SEQ ID NO: 78523 - RNA, 32 nt, Human
cacaccauccuggaugacagagcaagacucca

SEQ ID NO: 78524 - RNA, 32 nt, Human
cacaccaucgcacuccagccuaggcaacaaga

SEQ ID NO: 78525 - RNA, 32 nt, Human
cacaccaugccuggcccuuagaagugcucaau

SEQ ID NO: 78526 - RNA, 32 nt, Human
cacaccauggaauacuaugcagccauaaaaag

SEQ ID NO: 78527 - RNA, 32 nt, Human
cacaccauggaggcccaaagccccagaucaug

SEQ ID NO: 78528 - RNA, 32 nt, Human
cacaccauucccaggcugcagaugcagaaacu

SEQ ID NO: 78529 - RNA, 32 nt, Human
cacaccauugcacuccaaccugggcaacaaga

SEQ ID NO: 78530 - RNA, 32 nt, Human
cacaccauugcacuccaaccugggcgacaggg

SEQ ID NO: 78531 - RNA, 32 nt, Human
cacaccauugcacuccagccuaggcaacaaga

SEQ ID NO: 78532 - RNA, 32 nt, Human
cacaccauugcacuccagccuaggcaugguga

SEQ ID NO: 78533 - RNA, 32 nt, Human
cacaccauugcacuccagccugagcaacagag

SEQ ID NO: 78534 - RNA, 32 nt, Human
cacaccauugcacuccagccugggaaacaaga

SEQ ID NO: 78535 - RNA, 32 nt, Human
cacaccauugcacuccagccugggcaaaaaga

SEQ ID NO: 78536 - RNA, 32 nt, Human
cacaccauugcacuccagccugggcaacaaga

SEQ ID NO: 78537 - RNA, 32 nt, Human
cacaccauugcacuccagccugggcaacagag

SEQ ID NO: 78538 - RNA, 32 nt, Human
cacaccauugcacuccagccugggcgacaaga

SEQ ID NO: 78539 - RNA, 32 nt, Human
cacaccauugcacuccagccugggcgacagag

SEQ ID NO: 78540 - RNA, 32 nt, Human
cacaccauugcacuccagccugggcgacaggg

SEQ ID NO: 78541 - RNA, 32 nt, Human
cacaccauugcacuccagcuugggcaacaaua

SEQ ID NO: 78542 - RNA, 32 nt, Human
cacaccauugcacucuugucugggugacagag

SEQ ID NO: 78543 - RNA, 32 nt, Human
cacaccauugcacugcagccugggugaagaaa

SEQ ID NO: 78544 - RNA, 32 nt, Human
cacaccauugcacuucagccugggcgacacag

SEQ ID NO: 78545 - RNA, 32 nt, Human
cacaccauugcauuccaaccuggggaacagag

SEQ ID NO: 78546 - RNA, 32 nt, Human
cacaccauugcccuccagccugggugacagag

SEQ ID NO: 78547 - RNA, 32 nt, Human
cacaccauugcgcuucagccugggcaacaaga

SEQ ID NO: 78548 - RNA, 32 nt, Human
cacaccauugcuguccagccugggugacagag

SEQ ID NO: 78549 - RNA, 21 nt, Human
cacaccauuucuucccugcuc

SEQ ID NO: 78550 - RNA, 32 nt, Human
cacacccaacuugguuuugcuacauaauuauc

SEQ ID NO: 78551 - RNA, 32 nt, Human
cacacccaaggcugcuuuccagaaagcccgug

SEQ ID NO: 78552 - RNA, 32 nt, Human
cacacccaauccagcgcgguucuaccccacga

SEQ ID NO: 78553 - RNA, 19 nt, Human
cacacccacccacacacca

SEQ ID NO: 78554 - RNA, 22 nt, Human
cacacccacccagagcacgcca

SEQ ID NO: 78555 - RNA, 32 nt, Human
cacacccacccuccuggcucuuccuguuuuua

SEQ ID NO: 78556 - RNA, 32 nt, Human
cacacccaccgcaaccucauccccucagcacu

SEQ ID NO: 78557 - RNA, 32 nt, Human
cacacccacuggcuucuaagcccucuuuccag

SEQ ID NO: 78558 - RNA, 32 nt, Human
cacacccagaacugaggcuuggauaucuucuu

SEQ ID NO: 78559 - RNA, 32 nt, Human
cacacccagaagacgucaggugacuucagucc

SEQ ID NO: 78560 - RNA, 32 nt, Human
cacacccagaagucuuuggacccauuugguuu

SEQ ID NO: 78561 - RNA, 32 nt, Human
cacacccagcacggaggugugcagcccccgcu

SEQ ID NO: 78562 - RNA, 32 nt, Human
cacacccagcacuuugggaggccgaggcaggc

SEQ ID NO: 78563 - RNA, 32 nt, Human
cacacccagccaauuagggcugucuuacaaaa

SEQ ID NO: 78564 - RNA, 32 nt, Human
cacacccagccugcugcuucugacccugcaug

SEQ ID NO: 78565 - RNA, 32 nt, Human
cacacccagccuggaacccuagccagcucagc

SEQ ID NO: 78566 - RNA, 32 nt, Human
cacacccagccugucuugcucauucaugcagc

SEQ ID NO: 78567 - RNA, 32 nt, Human
cacaccccaagaaaacuacuguucaaauuuuu

SEQ ID NO: 78568 - RNA, 19 nt, Human
cacaccccacacaaccuca

SEQ ID NO: 78569 - RNA, 32 nt, Human
cacaccccacuccugcuaucaguuucuuauaa

SEQ ID NO: 78570 - RNA, 25 nt, Human
cacaccccagacacgggugggcaca

SEQ ID NO: 78571 - RNA, 32 nt, Human
cacaccccagaggcgaacuguggugaguguaa

SEQ ID NO: 78572 - RNA, 32 nt, Human
cacaccccagcaccuggcacuuaccacacucu

SEQ ID NO: 78573 - RNA, 32 nt, Human
cacaccccaggaaauguugaugacuaggaaag

SEQ ID NO: 78574 - RNA, 26 nt, Human
cacaccccagggugacagccugggag

SEQ ID NO: 78575 - RNA, 32 nt, Human
cacaccccauccagcucccagcaucuucaucu

SEQ ID NO: 78576 - RNA, 32 nt, Human
cacaccccauuuccuccucuuucccucucccc

SEQ ID NO: 78577 - RNA, 32 nt, Human
cacacccccacacccauugcagcuguggcgcc

SEQ ID NO: 78578 - RNA, 19 nt, Human
cacacccccacccagcccc

SEQ ID NO: 78579 - RNA, 21 nt, Human
cacacccccaggaugucagug

SEQ ID NO: 78580 - RNA, 20 nt, Human
cacaccccccgcccacccca

SEQ ID NO: 78581 - RNA, 22 nt, Human
cacacccccugccccaucccau

SEQ ID NO: 78582 - RNA, 32 nt, Human
cacacccccugccuuaucucugccugcacgcc

SEQ ID NO: 78583 - RNA, 32 nt, Human
cacacccccuuucagagggccacuggguuagg

SEQ ID NO: 78584 - RNA, 32 nt, Human
cacaccccgaaaaagacuaccugggaggugga

SEQ ID NO: 78585 - RNA, 22 nt, Human
cacaccccgagggccugaggag

SEQ ID NO: 78586 - RNA, 32 nt, Human
cacaccccgccuggccaagaugacugcuucag

SEQ ID NO: 78587 - RNA, 17 nt, Human
cacaccccgcgcgcuca

SEQ ID NO: 78588 - RNA, 20 nt, Human
cacaccccuccaaagcccca

SEQ ID NO: 78589 - RNA, 32 nt, Human
cacaccccuccccagucuucuucaagaccugg

SEQ ID NO: 78590 - RNA, 22 nt, Human
cacaccccuccccugccauccc

SEQ ID NO: 78591 - RNA, 32 nt, Human
cacaccccuccccugccaucccuccccggacu

SEQ ID NO: 78592 - RNA, 21 nt, Human
cacaccccuccccuucuccca

SEQ ID NO: 78593 - RNA, 20 nt, Human
cacaccccuccuccagacca

SEQ ID NO: 78594 - RNA, 21 nt, Human
cacaccccuccugcucccccc

SEQ ID NO: 78595 - RNA, 32 nt, Human
cacaccccuccuugcuggaaugugucuggccc

SEQ ID NO: 78596 - RNA, 32 nt, Human
cacaccccugcacuccagccugggugacagcu

SEQ ID NO: 78597 - RNA, 32 nt, Human
cacaccccugcagagccccagcugguucuuag

SEQ ID NO: 78598 - RNA, 22 nt, Human
cacaccccugcccccaccccau

SEQ ID NO: 78599 - RNA, 32 nt, Human
cacaccccugcucuuccuccugacccugcugc

SEQ ID NO: 78600 - RNA, 32 nt, Human
cacaccccuucccuuuccuguccuguccuuuc

SEQ ID NO: 78601 - RNA, 32 nt, Human
cacaccccuugaccacacagcauccacucucc

SEQ ID NO: 78602 - RNA, 19 nt, Human
cacacccgcaccgccccga

SEQ ID NO: 78603 - RNA, 32 nt, Human
cacacccggacuccgccgacuaggcaaccucc

SEQ ID NO: 78604 - RNA, 32 nt, Human
cacacccggcagacuucaagagucucagacug

SEQ ID NO: 78605 - RNA, 32 nt, Human
cacacccggcucccccugcuucucagccccgg

SEQ ID NO: 78606 - RNA, 24 nt, Human
cacacccuagauccagccucagga

SEQ ID NO: 78607 - RNA, 32 nt, Human
cacacccuagcuuccguguuccuugccuugug

SEQ ID NO: 78608 - RNA, 22 nt, Human
cacacccuauauagacacuucc

SEQ ID NO: 78609 - RNA, 32 nt, Human
cacacccucauuugacagggggagaaacagaa

SEQ ID NO: 78610 - RNA, 32 nt, Human
cacacccuccacacaccagccucugcaaccag

SEQ ID NO: 78611 - RNA, 32 nt, Human
cacacccuccacucaccucuagcucccuuucg

SEQ ID NO: 78612 - RNA, 20 nt, Human
cacacccugaauugaguggu

SEQ ID NO: 78613 - RNA, 32 nt, Human
cacacccugagucagacgccacaugccaacaa

SEQ ID NO: 78614 - RNA, 32 nt, Human
cacacccugccugccaucacccuugccccugc

SEQ ID NO: 78615 - RNA, 32 nt, Human
cacacccugccugcucaguccugggguccgag

SEQ ID NO: 78616 - RNA, 20 nt, Human
cacacccuggacaccugcac

SEQ ID NO: 78617 - RNA, 19 nt, Human
cacacccugggccuggccc

SEQ ID NO: 78618 - RNA, 32 nt, Human
cacacccugggugacaggccccugggaggccu

SEQ ID NO: 78619 - RNA, 32 nt, Human
cacacccuguaaucccagcacuuugggaggcu

SEQ ID NO: 78620 - RNA, 32 nt, Human
cacacccugucuagcugagguucauggaagag

SEQ ID NO: 78621 - RNA, 32 nt, Human
cacacccuuagaaggauggcucugguggccgg

SEQ ID NO: 78622 - RNA, 32 nt, Human
cacacccuuaucugcccaucugugcuacugua

SEQ ID NO: 78623 - RNA, 32 nt, Human
cacacccuucacccucuguguccugguccuuc

SEQ ID NO: 78624 - RNA, 32 nt, Human
cacacccuucacugcugggcuucuagggcauu

SEQ ID NO: 78625 - RNA, 32 nt, Human
cacacccuucaggcugcacccgggcaggccuc

SEQ ID NO: 78626 - RNA, 22 nt, Human
cacacccuucccaauugccaca

SEQ ID NO: 78627 - RNA, 32 nt, Human
cacacccuuccuccuuccccugcccacagagg

SEQ ID NO: 78628 - RNA, 32 nt, Human
cacaccgacaccaacaugaacggacagcucaa

SEQ ID NO: 78629 - RNA, 32 nt, Human
cacaccgaguagggcuauguagagaggaguca

SEQ ID NO: 78630 - RNA, 32 nt, Human
cacaccgauguacacacacagaugcacacaca

SEQ ID NO: 78631 - RNA, 32 nt, Human
cacaccgcugcacucaagccugggugacagug

SEQ ID NO: 78632 - RNA, 32 nt, Human
cacaccgcugcacucaagcuugggugacagag

SEQ ID NO: 78633 - RNA, 32 nt, Human
cacaccgcugcacuccagccugggcaacaaga

SEQ ID NO: 78634 - RNA, 32 nt, Human
cacaccggcccaggugccggagaugaaugagc

SEQ ID NO: 78635 - RNA, 32 nt, Human
cacaccggccccggcccccaggaagggagcac

SEQ ID NO: 78636 - RNA, 32 nt, Human
cacaccggccugggugacagcaugagaaccug

SEQ ID NO: 78637 - RNA, 32 nt, Human
cacaccguugcccaggcuggagggcagugacg

SEQ ID NO: 78638 - RNA, 32 nt, Human
cacaccuaaagucccagcuacuugggagguug

SEQ ID NO: 78639 - RNA, 32 nt, Human
cacaccuacacacccucugcauggcccugccu

SEQ ID NO: 78640 - RNA, 32 nt, Human
cacaccuacacucccgcguccaccucucccuc

SEQ ID NO: 78641 - RNA, 22 nt, Human
cacaccuacaguuccagcacuu

SEQ ID NO: 78642 - RNA, 21 nt, Human
cacaccuacauggaaauugaa

SEQ ID NO: 78643 - RNA, 32 nt, Human
cacaccuaccauuccuccucuccugaucccca

SEQ ID NO: 78644 - RNA, 32 nt, Human
cacaccuaccccuaccguccagccuggccucu

SEQ ID NO: 78645 - RNA, 32 nt, Human
cacaccuagauguguguuacuucaauuaaaau

SEQ ID NO: 78646 - RNA, 32 nt, Human
cacaccuauaaccccagcuaugcaagacaccg

SEQ ID NO: 78647 - RNA, 23 nt, Human
cacaccuauaaucucagcacuuu

SEQ ID NO: 78648 - RNA, 32 nt, Human
cacaccuauagucccagcauuuugggaaacca

SEQ ID NO: 78649 - RNA, 32 nt, Human
cacaccuauagucccagcuacuugggaggcug

SEQ ID NO: 78650 - RNA, 32 nt, Human
cacaccucacggcucauccucaagcuggaaga

SEQ ID NO: 78651 - RNA, 32 nt, Human
cacaccucacugcuugcuugggagaggccaga

SEQ ID NO: 78652 - RNA, 32 nt, Human
cacaccuccagccucacguucacuuaggcaca

SEQ ID NO: 78653 - RNA, 32 nt, Human
cacaccucccuagagggagggagggagggcag

SEQ ID NO: 78654 - RNA, 32 nt, Human
cacaccuccucccaggaagacugcccaggccu

SEQ ID NO: 78655 - RNA, 32 nt, Human
cacaccuccucucacuccccagccugggccca

SEQ ID NO: 78656 - RNA, 32 nt, Human
cacaccuccugccucuaccagcagggguugcc

SEQ ID NO: 78657 - RNA, 32 nt, Human
cacaccucgaccccucacccccuccucccggg

SEQ ID NO: 78658 - RNA, 32 nt, Human
cacaccucggcucugggguugauaccugagcc

SEQ ID NO: 78659 - RNA, 18 nt, Human
cacaccucuccacagggc

SEQ ID NO: 78660 - RNA, 32 nt, Human
cacaccucugucucccccagggcucgggaugu

SEQ ID NO: 78661 - RNA, 32 nt, Human
cacaccucuuugcuuuaccagugguguuugug

SEQ ID NO: 78662 - RNA, 32 nt, Human
cacaccugacugcacuccagccuggguggcaa

SEQ ID NO: 78663 - RNA, 22 nt, Human
cacaccugcaaucccaacacuu

SEQ ID NO: 78664 - RNA, 32 nt, Human
cacaccugcaaucccagcuacucgggaggcug

SEQ ID NO: 78665 - RNA, 32 nt, Human
cacaccugcacaccccugcacacaccugcaca

SEQ ID NO: 78666 - RNA, 32 nt, Human
cacaccugcagauucuaggaccuguguccuag

SEQ ID NO: 78667 - RNA, 32 nt, Human
cacaccugcauucccagcuacuugggaggcug

SEQ ID NO: 78668 - RNA, 32 nt, Human
cacaccugcauucccagcuacuugggagguug

SEQ ID NO: 78669 - RNA, 31 nt, Human
cacaccugccucucccgucgucucuucuggg

SEQ ID NO: 78670 - RNA, 32 nt, Human
cacaccugcucaucuuugccuguggggcgcuc

SEQ ID NO: 78671 - RNA, 32 nt, Human
cacaccugcuccugcaggcacacugggcuagg

SEQ ID NO: 78672 - RNA, 32 nt, Human
cacaccugcucucuccucucucccaggcaggc

SEQ ID NO: 78673 - RNA, 32 nt, Human
cacaccugcuggccugggggagcuccagccag

SEQ ID NO: 78674 - RNA, 32 nt, Human
cacaccuggaagggaggggcccagccugaacc

SEQ ID NO: 78675 - RNA, 31 nt, Human
cacaccuggacaaucucgugcuaccuacaua

SEQ ID NO: 78676 - RNA, 32 nt, Human
cacaccuggacugacccugcagguuguucaua

SEQ ID NO: 78677 - RNA, 32 nt, Human
cacaccuggcacaacauacuagaauucacacu

SEQ ID NO: 78678 - RNA, 32 nt, Human
cacaccuggcacaacauauuguaauucacacu

SEQ ID NO: 78679 - RNA, 32 nt, Human
cacaccugggcaacagagugaaaccugucccu

SEQ ID NO: 78680 - RNA, 32 nt, Human
cacaccuggucugccccuagauuucuccucaa

SEQ ID NO: 78681 - RNA, 32 nt, Human
cacaccuguaaacccagcacuuugggagacug

SEQ ID NO: 78682 - RNA, 32 nt, Human
cacaccuguaauaaucccagcacuuugggagg

SEQ ID NO: 78683 - RNA, 22 nt, Human
cacaccuguaaucccaacacuu

SEQ ID NO: 78684 - RNA, 22 nt, Human
cacaccuguaaucccagcacuu

SEQ ID NO: 78685 - RNA, 23 nt, Human
cacaccuguaaucccagcacuuu

SEQ ID NO: 78686 - RNA, 23 nt, Human
cacaccuguaaucccagcaguuu

SEQ ID NO: 78687 - RNA, 32 nt, Human
cacaccuguaaucccagcuaccggggaggcug

SEQ ID NO: 78688 - RNA, 32 nt, Human
cacaccuguaaucccagcuaccugggaggcug

SEQ ID NO: 78689 - RNA, 32 nt, Human
cacaccuguaaucccagcuacuagggaggaug

SEQ ID NO: 78690 - RNA, 32 nt, Human
cacaccuguaaucccagcuacucgggaggcgg

SEQ ID NO: 78691 - RNA, 32 nt, Human
cacaccuguaaucccagcuacucgggaggcug

SEQ ID NO: 78692 - RNA, 32 nt, Human
cacaccuguaaucccagcuacucugaagccug

SEQ ID NO: 78693 - RNA, 32 nt, Human
cacaccuguaaucccagcuacucuggaggcug

SEQ ID NO: 78694 - RNA, 32 nt, Human
cacaccuguaaucccagcuacuugagaggcag

SEQ ID NO: 78695 - RNA, 32 nt, Human
cacaccuguaaucccagcuacuugggagacug

SEQ ID NO: 78696 - RNA, 32 nt, Human
cacaccuguaaucccagcuacuugggaggccg

SEQ ID NO: 78697 - RNA, 32 nt, Human
cacaccuguaaucccagcuacuugggaggcug

SEQ ID NO: 78698 - RNA, 32 nt, Human
cacaccuguaaucccagcuauucaggagguug

SEQ ID NO: 78699 - RNA, 32 nt, Human
cacaccuguaaucccagcuauuugggaggcca

SEQ ID NO: 78700 - RNA, 32 nt, Human
cacaccuguaaucccagcucuuuggaggccga

SEQ ID NO: 78701 - RNA, 32 nt, Human
cacaccuguaaucccagcucuuugggaggccg

SEQ ID NO: 78702 - RNA, 32 nt, Human
cacaccuguaaucccagcuguuugggaggcug

SEQ ID NO: 78703 - RNA, 32 nt, Human
cacaccuguagucccagagcuuugggaggccg

SEQ ID NO: 78704 - RNA, 32 nt, Human
cacaccuguagucccagauacuugggaggcca

SEQ ID NO: 78705 - RNA, 32 nt, Human
cacaccuguagucccagcacuuuaggaggcug

SEQ ID NO: 78706 - RNA, 32 nt, Human
cacaccuguagucccagcuacaugggaggcug

SEQ ID NO: 78707 - RNA, 32 nt, Human
cacaccuguagucccagcuacucaggaggcug

SEQ ID NO: 78708 - RNA, 32 nt, Human
cacaccuguagucccagcuacucaggagguug

SEQ ID NO: 78709 - RNA, 32 nt, Human
cacaccuguagucccagcuacucagggggcug

SEQ ID NO: 78710 - RNA, 32 nt, Human
cacaccuguagucccagcuacuccggaggcug

SEQ ID NO: 78711 - RNA, 32 nt, Human
cacaccuguagucccagcuacucgggaagcua

SEQ ID NO: 78712 - RNA, 32 nt, Human
cacaccuguagucccagcuacucgggagccca

SEQ ID NO: 78713 - RNA, 32 nt, Human
cacaccuguagucccagcuacucgggaggcug

SEQ ID NO: 78714 - RNA, 32 nt, Human
cacaccuguagucccagcuacucuggaggcug

SEQ ID NO: 78715 - RNA, 32 nt, Human
cacaccuguagucccagcuacugggaaagcug

SEQ ID NO: 78716 - RNA, 32 nt, Human
cacaccuguagucccagcuacuggggaggcug

SEQ ID NO: 78717 - RNA, 32 nt, Human
cacaccuguagucccagcuacuuaggaggcug

SEQ ID NO: 78718 - RNA, 32 nt, Human
cacaccuguagucccagcuacuugagaggcug

SEQ ID NO: 78719 - RNA, 32 nt, Human
cacaccuguagucccagcuacuugggaggcug

SEQ ID NO: 78720 - RNA, 32 nt, Human
cacaccuguagucccagcugcucaggaggcua

SEQ ID NO: 78721 - RNA, 32 nt, Human
cacaccuguagucccagcugcucaggaggcug

SEQ ID NO: 78722 - RNA, 32 nt, Human
cacaccuguagucccagguacuugggaggcug

SEQ ID NO: 78723 - RNA, 32 nt, Human
cacaccuguauucccaacacuuuuggaggcug

SEQ ID NO: 78724 - RNA, 32 nt, Human
cacaccugugaucccagcuacuugggaggcug

SEQ ID NO: 78725 - RNA, 32 nt, Human
cacaccuguggucccagcuacuagggaggcug

SEQ ID NO: 78726 - RNA, 32 nt, Human
cacaccuguggucccagcuacucaggaggcug

SEQ ID NO: 78727 - RNA, 32 nt, Human
cacaccuguggucccagcuacucgggaggcug

SEQ ID NO: 78728 - RNA, 32 nt, Human
cacaccuguggucccagcucuuuggaaggccg

SEQ ID NO: 78729 - RNA, 32 nt, Human
cacaccuguggucccagcugcucgggaggcug

SEQ ID NO: 78730 - RNA, 32 nt, Human
cacaccuguguggagaccuccccugaagcaug

SEQ ID NO: 78731 - RNA, 32 nt, Human
cacaccugugugugucugaguacaugugcaca

SEQ ID NO: 78732 - RNA, 32 nt, Human
cacaccuguuaaucccagcacuucgggaggcc

SEQ ID NO: 78733 - RNA, 32 nt, Human
cacaccuguuaucgagggugugagaagcgccu

SEQ ID NO: 78734 - RNA, 32 nt, Human
cacaccuguucuugggugcauguggguuuucg

SEQ ID NO: 78735 - RNA, 32 nt, Human
cacaccuguugucccagcuauucaggaggcug

SEQ ID NO: 78736 - RNA, 23 nt, Human
cacaccuuaccuagcaugagaga

SEQ ID NO: 78737 - RNA, 32 nt, Human
cacaccuucucuaggcuuguucaccaaagccg

SEQ ID NO: 78738 - RNA, 32 nt, Human
cacaccuugccuggccacccuggaaaaacaag

SEQ ID NO: 78739 - RNA, 32 nt, Human
cacaccuuuuccaggaguucugaagcugacag

SEQ ID NO: 78740 - RNA, 32 nt, Human
cacaccuuuugaggaggacagaagggacugga

SEQ ID NO: 78741 - RNA, 32 nt, Human
cacacgacccuccuaguccauguaagagaaga

SEQ ID NO: 78742 - RNA, 32 nt, Human
cacacgacuagacugcagcuauccaaauuccu

SEQ ID NO: 78743 - RNA, 32 nt, Human
cacacgacugcauucuagccugggugacagag

SEQ ID NO: 78744 - RNA, 22 nt, Human
cacacgaguucauaauguggug

SEQ ID NO: 78745 - RNA, 32 nt, Human
cacacgaucucagggcuggugcugagcagccu

SEQ ID NO: 78746 - RNA, 32 nt, Human
cacacgcaacccagccucagcaucacagccgc

SEQ ID NO: 78747 - RNA, 22 nt, Human
cacacgcaagagcaaacaggag

SEQ ID NO: 78748 - RNA, 18 nt, Human
cacacgcacacacaauca

SEQ ID NO: 78749 - RNA, 32 nt, Human
cacacgcacacagugucuguguacauguacag

SEQ ID NO: 78750 - RNA, 32 nt, Human
cacacgcacaucugguguuuaugaagcagaua

SEQ ID NO: 78751 - RNA, 32 nt, Human
cacacgcacaugcaaaaauacacacaugcaca

SEQ ID NO: 78752 - RNA, 32 nt, Human
cacacgcacgugcacacacgcacgcacgcgug

SEQ ID NO: 78753 - RNA, 32 nt, Human
cacacgcagagugagagggacaugguggcagg

SEQ ID NO: 78754 - RNA, 32 nt, Human
cacacgcaggggcugacagcugugcuggugcu

SEQ ID NO: 78755 - RNA, 32 nt, Human
cacacgcagguggaggugguugugggugcagg

SEQ ID NO: 78756 - RNA, 32 nt, Human
cacacgcaucuguacacacaugcaugcucagc

SEQ ID NO: 78757 - RNA, 32 nt, Human
cacacgccaaugcacacacacagagauaugca

SEQ ID NO: 78758 - RNA, 32 nt, Human
cacacgccacugcacuccagccugggugacag

SEQ ID NO: 78759 - RNA, 32 nt, Human
cacacgccacugcccccgaggccagaguguaa

SEQ ID NO: 78760 - RNA, 19 nt, Human
cacacgccagccacagggg

SEQ ID NO: 78761 - RNA, 32 nt, Human
cacacgccuagacugagugugguuucgucgug

SEQ ID NO: 78762 - RNA, 32 nt, Human
cacacgccuauaauccuagcuacuagggcagc

SEQ ID NO: 78763 - RNA, 32 nt, Human
cacacgccugaagucccagcuacucaggaggc

SEQ ID NO: 78764 - RNA, 32 nt, Human
cacacgccuguaaucccagcacuuugggaggc

SEQ ID NO: 78765 - RNA, 32 nt, Human
cacacgccuguaaucccagcuacucuggaggc

SEQ ID NO: 78766 - RNA, 32 nt, Human
cacacgccuguaaucccagcuacuugggaggc

SEQ ID NO: 78767 - RNA, 32 nt, Human
cacacgccuguaaucccagcugcuugggaggc

SEQ ID NO: 78768 - RNA, 32 nt, Human
cacacgccuguaaucccagguacuuggaaggc

SEQ ID NO: 78769 - RNA, 32 nt, Human
cacacgccuguaaucccaguuacuugggaggc

SEQ ID NO: 78770 - RNA, 32 nt, Human
cacacgcgcuggaccuggaggcugaggaggag

SEQ ID NO: 78771 - RNA, 32 nt, Human
cacacgcguguguacacacggaccauguggua

SEQ ID NO: 78772 - RNA, 32 nt, Human
cacacgcuccgcuccgggccugggugccuaca

SEQ ID NO: 78773 - RNA, 32 nt, Human
cacacgcucgcagucugugggcccuccgggag

SEQ ID NO: 78774 - RNA, 32 nt, Human
cacacgcuuucugcaacccuaucccuugcauc

SEQ ID NO: 78775 - RNA, 32 nt, Human
cacacggaccuccaggagcagugagagguggc

SEQ ID NO: 78776 - RNA, 17 nt, Human
cacacggagaagcagug

SEQ ID NO: 78777 - RNA, 32 nt, Human
cacacggagaggagggaaaauaagcgaggcac

SEQ ID NO: 78778 - RNA, 32 nt, Human
cacacggagccauggggcgccauguugccacc

SEQ ID NO: 78779 - RNA, 32 nt, Human
cacacggaggcagagguggggaugagguaugu

SEQ ID NO: 78780 - RNA, 32 nt, Human
cacacggcacacacaagcggagcugagaagca

SEQ ID NO: 78781 - RNA, 32 nt, Human
cacacggccucaauccuugaaaagcuuacagu

SEQ ID NO: 78782 - RNA, 32 nt, Human
cacacggccucucgaguccacacccacucacc

SEQ ID NO: 78783 - RNA, 32 nt, Human
cacacggcuguaaucccagcacuuugggaggc

SEQ ID NO: 78784 - RNA, 32 nt, Human
cacacggcugucccucauggagaccucaugcc

SEQ ID NO: 78785 - RNA, 32 nt, Human
cacacgggaccaggcugggcgaagaacacuga

SEQ ID NO: 78786 - RNA, 32 nt, Human
cacacgggcuuuggagucagacuugcuggcua

SEQ ID NO: 78787 - RNA, 32 nt, Human
cacacggguuacugcuaggauguguucuuuuc

SEQ ID NO: 78788 - RNA, 18 nt, Human
cacacgguggagcugccu

SEQ ID NO: 78789 - RNA, 32 nt, Human
cacacgguggagcugccucuuccuuccccucc

SEQ ID NO: 78790 - RNA, 32 nt, Human
cacacguaaacacccacccaaccgcaagaaag

SEQ ID NO: 78791 - RNA, 32 nt, Human
cacacguccagcuucagccacauugaggccag

SEQ ID NO: 78792 - RNA, 32 nt, Human
cacacgucucccaccagaggcacgccauccaa

SEQ ID NO: 78793 - RNA, 32 nt, Human
cacacgugaagcaccaggcugggagaugaggu

SEQ ID NO: 78794 - RNA, 31 nt, Human
cacacgugacuucuuauuuccaagggaaaug

SEQ ID NO: 78795 - RNA, 32 nt, Human
cacacgugagauuuccuuuuaccaacagagaa

SEQ ID NO: 78796 - RNA, 32 nt, Human
cacacgugcacguacacacaugcaugcucgcu

SEQ ID NO: 78797 - RNA, 32 nt, Human
cacacgugcccagcaggaaaagcuucgucuuc

SEQ ID NO: 78798 - RNA, 32 nt, Human
cacacgugcccucccugccacccuccgucuag

SEQ ID NO: 78799 - RNA, 32 nt, Human
cacacgugcccuggccucuggagcucagcugc

SEQ ID NO: 78800 - RNA, 32 nt, Human
cacacgugccuguagcauuccagagcucacug

SEQ ID NO: 78801 - RNA, 32 nt, Human
cacacgugcuuccucucuugacaucaagggag

SEQ ID NO: 78802 - RNA, 32 nt, Human
cacacgugucuccuccuccucaucuuagcuuc

SEQ ID NO: 78803 - RNA, 32 nt, Human
cacacgugugcugcugaggugaggcaggucug

SEQ ID NO: 78804 - RNA, 32 nt, Human
cacacgugugugugcgcguguguauaaaacac

SEQ ID NO: 78805 - RNA, 32 nt, Human
cacacguguguucacagagcuacggccacaca

SEQ ID NO: 78806 - RNA, 24 nt, Human
cacacguuauaaucauuuaucaua

SEQ ID NO: 78807 - RNA, 32 nt, Human
cacacguuccuguucaaaaagcagaaacagau

SEQ ID NO: 78808 - RNA, 32 nt, Human
cacacguuggagcugguggcacuggacaguga

SEQ ID NO: 78809 - RNA, 32 nt, Human
cacacguuuaccuguguaaccugcacauccug

SEQ ID NO: 78810 - RNA, 32 nt, Human
  misc_feature (29)..(29): n is a, c, g, or u
cacacuaaaauuauauuuuaaaaguuuanugc

SEQ ID NO: 78811 - RNA, 18 nt, Human
cacacuaacagccacacc

SEQ ID NO: 78812 - RNA, 32 nt, Human
cacacuaaccugggugacagaaugagacccug

SEQ ID NO: 78813 - RNA, 32 nt, Human
cacacuaagcucuucucucucaggggcagugg

SEQ ID NO: 78814 - RNA, 32 nt, Human
cacacuacccaggagcccaguggugcaccugc

SEQ ID NO: 78815 - RNA, 32 nt, Human
cacacuacugaaagacccucugccucacucua

SEQ ID NO: 78816 - RNA, 32 nt, Human
cacacuacugcacuccagccugggcaacagaa

SEQ ID NO: 78817 - RNA, 32 nt, Human
cacacuacugcacuccagccugggcgacaaag

SEQ ID NO: 78818 - RNA, 32 nt, Human
cacacuacugcacuccugcaugggcgacugag

SEQ ID NO: 78819 - RNA, 32 nt, Human
cacacuacugcauuccagccugagcaacagag

SEQ ID NO: 78820 - RNA, 30 nt, Human
cacacuagccucuguguucccguuagggac

SEQ ID NO: 78821 - RNA, 32 nt, Human
cacacuagcucucugaguauuuccuugauugc

SEQ ID NO: 78822 - RNA, 32 nt, Human
cacacuagcuugggugacagaggaagacuguc

SEQ ID NO: 78823 - RNA, 32 nt, Human
cacacuauauuacagaaugauguaauaccugg

SEQ ID NO: 78824 - RNA, 32 nt, Human
cacacuaucguguacacagcagucuucagccc

SEQ ID NO: 78825 - RNA, 19 nt, Human
cacacuaugacuucugcuc

SEQ ID NO: 78826 - RNA, 32 nt, Human
cacacuauugcacuccagccugggcgacaggg

SEQ ID NO: 78827 - RNA, 32 nt, Human
cacacucaaaugcucacaggagcuagugacua

SEQ ID NO: 78828 - RNA, 32 nt, Human
cacacucaacucugauacuccagcccuguggc

SEQ ID NO: 78829 - RNA, 32 nt, Human
cacacucaagaauuugucagcacacaauuaau

SEQ ID NO: 78830 - RNA, 32 nt, Human
cacacucacaaccgcagaccucggugaggaau

SEQ ID NO: 78831 - RNA, 32 nt, Human
cacacucacaagagauauggcugugauuugga

SEQ ID NO: 78832 - RNA, 32 nt, Human
cacacucacacacacucauccccuugaaucuu

SEQ ID NO: 78833 - RNA, 32 nt, Human
cacacucacaugcucucacucaccacacugga

SEQ ID NO: 78834 - RNA, 32 nt, Human
cacacucacccccacucccacacacauacaca

SEQ ID NO: 78835 - RNA, 32 nt, Human
cacacucacuauuucaaaguguguuauaaaca

SEQ ID NO: 78836 - RNA, 32 nt, Human
cacacucagagcaugucuggcuuuccuggugg

SEQ ID NO: 78837 - RNA, 32 nt, Human
cacacucagcaaccacacggaucugacagaca

SEQ ID NO: 78838 - RNA, 21 nt, Human
cacacucagcccuugcacuga

SEQ ID NO: 78839 - RNA, 17 nt, Human
cacacucagcugggccc

SEQ ID NO: 78840 - RNA, 32 nt, Human
cacacucaggaagccuugucuaccuuucccua

SEQ ID NO: 78841 - RNA, 32 nt, Human
cacacucaguagguucugcccccacaucauuu

SEQ ID NO: 78842 - RNA, 32 nt, Human
cacacucauccccucacuugccgcgucgcccu

SEQ ID NO: 78843 - RNA, 32 nt, Human
cacacucaugaagaaagaacacaggaguagcu

SEQ ID NO: 78844 - RNA, 32 nt, Human
cacacucaugaccauacucaucuguugguggu

SEQ ID NO: 78845 - RNA, 32 nt, Human
cacacucaugcuuucacauacauacacucacu

SEQ ID NO: 78846 - RNA, 32 nt, Human
cacacuccaaaccaauaaaguuuuauauuuug

SEQ ID NO: 78847 - RNA, 32 nt, Human
cacacuccagagcgggugugaggggcgccgau

SEQ ID NO: 78848 - RNA, 19 nt, Human
cacacuccagccugagcag

SEQ ID NO: 78849 - RNA, 32 nt, Human
cacacuccagccugagcagcagagcgggaccu

SEQ ID NO: 78850 - RNA, 32 nt, Human
cacacuccagccuggguaacagagugagacuc

SEQ ID NO: 78851 - RNA, 32 nt, Human
cacacuccagccuggguaacagugagaccaug

SEQ ID NO: 78852 - RNA, 32 nt, Human
cacacuccagccugggugacagagugaaaccc

SEQ ID NO: 78853 - RNA, 32 nt, Human
cacacuccagccuggguggcaaagugagacuc

SEQ ID NO: 78854 - RNA, 32 nt, Human
cacacuccagcugggaucacauguggacuuuu

SEQ ID NO: 78855 - RNA, 32 nt, Human
cacacuccagugcuuuuaagcagguuuucccc

SEQ ID NO: 78856 - RNA, 32 nt, Human
cacacuccauuuucccaugucugacuucgugg

SEQ ID NO: 78857 - RNA, 32 nt, Human
cacacucccacacuccagccuggguaacagug

SEQ ID NO: 78858 - RNA, 32 nt, Human
cacacuccccauacccuucagugcaguguacc

SEQ ID NO: 78859 - RNA, 32 nt, Human
cacacuccccuccauccucugagcucccugca

SEQ ID NO: 78860 - RNA, 32 nt, Human
cacacuccccuccuggguuuccacacucagga

SEQ ID NO: 78861 - RNA, 32 nt, Human
cacacucccuggguccaggaguguagaauaug

SEQ ID NO: 78862 - RNA, 32 nt, Human
cacacuccggggcagaucuuuccucuugucug

SEQ ID NO: 78863 - RNA, 32 nt, Human
cacacuccuauaauccuagcacuuugggaggc

SEQ ID NO: 78864 - RNA, 32 nt, Human
cacacuccuaucucugcacuucugcccuccau

SEQ ID NO: 78865 - RNA, 32 nt, Human
cacacuccuccaccugucucaaacucuaaggu

SEQ ID NO: 78866 - RNA, 19 nt, Human
cacacuccucuggagucuu

SEQ ID NO: 78867 - RNA, 32 nt, Human
cacacuccugaccuucuagaugaguaacaaaa

SEQ ID NO: 78868 - RNA, 32 nt, Human
cacacuccugcuguuccagccucugcagguga

SEQ ID NO: 78869 - RNA, 32 nt, Human
cacacuccuguaaucccagcuacuggggaggc

SEQ ID NO: 78870 - RNA, 32 nt, Human
cacacuccuguaaucccagcuacuuaggaggc

SEQ ID NO: 78871 - RNA, 32 nt, Human
cacacuccuucauuugaccacauggccuauuu

SEQ ID NO: 78872 - RNA, 32 nt, Human
cacacucuaccuuuagugcaagcuauuuguuu

SEQ ID NO: 78873 - RNA, 32 nt, Human
cacacucuagggaauaauuccacuccagagau

SEQ ID NO: 78874 - RNA, 32 nt, Human
cacacucuccaggcuggagugcaguggcacaa

SEQ ID NO: 78875 - RNA, 32 nt, Human
cacacucuccuccaaaagagccuccaucugua

SEQ ID NO: 78876 - RNA, 32 nt, Human
cacacucuccugugaacacuggagucuugcaa

SEQ ID NO: 78877 - RNA, 32 nt, Human
cacacucucugcagcccagccuagucagggca

SEQ ID NO: 78878 - RNA, 32 nt, Human
cacacucucugccaugcacacaggaggagagc

SEQ ID NO: 78879 - RNA, 32 nt, Human
cacacucucugccugacugaccccugccaggg

SEQ ID NO: 78880 - RNA, 32 nt, Human
cacacucuggcaccacacacauugucuccagc

SEQ ID NO: 78881 - RNA, 32 nt, Human
cacacucuggguuggaaaauguuugccuguug

SEQ ID NO: 78882 - RNA, 32 nt, Human
cacacucugucacccaggccaaguucaauggu

SEQ ID NO: 78883 - RNA, 24 nt, Human
cacacucuguucuuuaguguccuu

SEQ ID NO: 78884 - RNA, 32 nt, Human
cacacugaagccagaagcugugggcugugggg

SEQ ID NO: 78885 - RNA, 32 nt, Human
cacacugaauacaggugucaccaccuccugag

SEQ ID NO: 78886 - RNA, 32 nt, Human
cacacugacagugcugagcagagcaagguugg

SEQ ID NO: 78887 - RNA, 32 nt, Human
cacacugaccacacccugcccucuucggugac

SEQ ID NO: 78888 - RNA, 26 nt, Human
cacacugaccucaggugauccacccg

SEQ ID NO: 78889 - RNA, 32 nt, Human
cacacugacuaggguaguggggugcauuuggu

SEQ ID NO: 78890 - RNA, 32 nt, Human
cacacugacuccauacauaaccuccuugaaaa

SEQ ID NO: 78891 - RNA, 32 nt, Human
cacacugacuccaucugagggguccuugaggc

SEQ ID NO: 78892 - RNA, 32 nt, Human
cacacugagauagaauugugauuucauaauaa

SEQ ID NO: 78893 - RNA, 32 nt, Human
cacacugagauucuguguucuccucugagcau

SEQ ID NO: 78894 - RNA, 32 nt, Human
cacacugagcauggucagggcauuggucagag

SEQ ID NO: 78895 - RNA, 32 nt, Human
cacacugagcuucuuucuccucccuuaguaca

SEQ ID NO: 78896 - RNA, 32 nt, Human
cacacugaggcagggaguuggcucucuuggug

SEQ ID NO: 78897 - RNA, 32 nt, Human
cacacugaugcacacggaccuggacacagaca

SEQ ID NO: 78898 - RNA, 32 nt, Human
cacacugauucaggccuugagagucaagccca

SEQ ID NO: 78899 - RNA, 21 nt, Human
cacacugcacuauuaauucca

SEQ ID NO: 78900 - RNA, 32 nt, Human
cacacugcagcugcccuguaaauguucagcuc

SEQ ID NO: 78901 - RNA, 32 nt, Human
cacacugcaugcuugggggugccaagggauuc

SEQ ID NO: 78902 - RNA, 32 nt, Human
cacacugccacacugcucacacuguccacagg

SEQ ID NO: 78903 - RNA, 32 nt, Human
cacacugccaggggagccucacugugaagucu

SEQ ID NO: 78904 - RNA, 32 nt, Human
cacacugccccgggcccuuugcacuggcuguu

SEQ ID NO: 78905 - RNA, 32 nt, Human
cacacugcccguguucaaggggcugcucggag

SEQ ID NO: 78906 - RNA, 32 nt, Human
cacacugcccuaggagagguuccccaugaggg

SEQ ID NO: 78907 - RNA, 32 nt, Human
cacacugccgcuccagccuuccuggcaggcac

SEQ ID NO: 78908 - RNA, 32 nt, Human
cacacugccgcuucaaucuccugggcucaaau

SEQ ID NO: 78909 - RNA, 32 nt, Human
cacacugccugggacaguguccugcauccaca

SEQ ID NO: 78910 - RNA, 32 nt, Human
cacacugcggccaggccagcugagucccucca

SEQ ID NO: 78911 - RNA, 32 nt, Human
cacacugcggugucugcagcuccuggaaggug

SEQ ID NO: 78912 - RNA, 32 nt, Human
cacacugcuagagcccagaccuggugaggaca

SEQ ID NO: 78913 - RNA, 32 nt, Human
cacacugcucucuuccuuccagaagcuugguu

SEQ ID NO: 78914 - RNA, 32 nt, Human
cacacugcugcacuccagccugugcaacagag

SEQ ID NO: 78915 - RNA, 19 nt, Human
cacacugcuuuguguuuuu

SEQ ID NO: 78916 - RNA, 20 nt, Human
cacacuggaacuggcaggaa

SEQ ID NO: 78917 - RNA, 32 nt, Human
cacacuggaagggggaccugcgcccccacauc

SEQ ID NO: 78918 - RNA, 32 nt, Human
cacacuggagagaagccauaugaguguaagga

SEQ ID NO: 78919 - RNA, 32 nt, Human
cacacuggagaucaugaugaacuuuuggcuga

SEQ ID NO: 78920 - RNA, 32 nt, Human
cacacuggagcuacuuggacaagaccagcaug

SEQ ID NO: 78921 - RNA, 28 nt, Human
cacacuggagcugcagagacuguauuca

SEQ ID NO: 78922 - RNA, 31 nt, Human
cacacuggaguccaccauaccaaagcacgaa

SEQ ID NO: 78923 - RNA, 32 nt, Human
cacacuggcacacacacauacacacauaugca

SEQ ID NO: 78924 - RNA, 32 nt, Human
cacacuggccuacagaccuggggacagagucu

SEQ ID NO: 78925 - RNA, 31 nt, Human
cacacuggccucucuaggccgagguccuuuc

SEQ ID NO: 78926 - RNA, 32 nt, Human
cacacuggccugcucaugcacacaccugcaag

SEQ ID NO: 78927 - RNA, 32 nt, Human
cacacuggccuuucuguuccuuggacaugccu

SEQ ID NO: 78928 - RNA, 21 nt, Human
cacacuggcuccagacacaca

SEQ ID NO: 78929 - RNA, 32 nt, Human
cacacugggacccugcaagaggccaacagauu

SEQ ID NO: 78930 - RNA, 32 nt, Human
cacacugggaggccgaggcagguggaucacuc

SEQ ID NO: 78931 - RNA, 32 nt, Human
cacacugggcagccagccugccggcaggacuu

SEQ ID NO: 78932 - RNA, 32 nt, Human
cacacugggugaagaauggaaggguuaugugg

SEQ ID NO: 78933 - RNA, 32 nt, Human
cacacuggucucaaacuccugaccucaggcga

SEQ ID NO: 78934 - RNA, 32 nt, Human
cacacuggucucaaacuccugaccucagguga

SEQ ID NO: 78935 - RNA, 32 nt, Human
cacacuguauuccagaugauagaggcuaacuc

SEQ ID NO: 78936 - RNA, 32 nt, Human
cacacuguauuccagaugauagaggcuuacuc

SEQ ID NO: 78937 - RNA, 32 nt, Human
cacacugucacccaggcuggagugcaguguug

SEQ ID NO: 78938 - RNA, 32 nt, Human
cacacugucauuuagcucauguuaacaccuga

SEQ ID NO: 78939 - RNA, 32 nt, Human
cacacugucgccaggcuggagugcaguggugc

SEQ ID NO: 78940 - RNA, 32 nt, Human
cacacugucgccucauagcugcaagagagagg

SEQ ID NO: 78941 - RNA, 32 nt, Human
cacacuguuaaaaguuguguuuugaaauuuua

SEQ ID NO: 78942 - RNA, 32 nt, Human
cacacuguucucugcugguucccgaagcugau

SEQ ID NO: 78943 - RNA, 32 nt, Human
cacacuguugcccaggcuggagugcaguggcg

SEQ ID NO: 78944 - RNA, 16 nt, Human
cacacuguugucacuu

SEQ ID NO: 78945 - RNA, 32 nt, Human
cacacuuaagcccucgugcacacacacaaauu

SEQ ID NO: 78946 - RNA, 24 nt, Human
cacacuuagugagaaggagccaca

SEQ ID NO: 78947 - RNA, 32 nt, Human
cacacuuaugggccaagcccagcuuaauggcu

SEQ ID NO: 78948 - RNA, 32 nt, Human
cacacuucacacaacaggcuuaucagaaaccu

SEQ ID NO: 78949 - RNA, 32 nt, Human
cacacuucauccuauagagucaaccaccacag

SEQ ID NO: 78950 - RNA, 32 nt, Human
cacacuuccaagcaaggcccaggcuggcccag

SEQ ID NO: 78951 - RNA, 19 nt, Human
cacacuuccagcuggcaua

SEQ ID NO: 78952 - RNA, 32 nt, Human
cacacuucgauuggcagcaucuccucauucuu

SEQ ID NO: 78953 - RNA, 32 nt, Human
cacacuucuccagcaacacuccaucagcuuuu

SEQ ID NO: 78954 - RNA, 32 nt, Human
cacacuucugagaucuuucagaugguuuugcc

SEQ ID NO: 78955 - RNA, 32 nt, Human
cacacuucugcucuaagagucucccucccuuu

SEQ ID NO: 78956 - RNA, 32 nt, Human
cacacuugaagccagcaugucucugaaucuca

SEQ ID NO: 78957 - RNA, 32 nt, Human
cacacuugcacaugcauacacaugcacucaca

SEQ ID NO: 78958 - RNA, 32 nt, Human
cacacuugcacaugccuacacacucacugaca

SEQ ID NO: 78959 - RNA, 32 nt, Human
cacacuugcuguccccauccauggcccgaggg

SEQ ID NO: 78960 - RNA, 32 nt, Human
cacacuuggcuacucuuccucgucucagcaga

SEQ ID NO: 78961 - RNA, 32 nt, Human
cacacuugggaucacaguugcgucauugugua

SEQ ID NO: 78962 - RNA, 32 nt, Human
cacacuugucugcaggacuuacagauccugca

SEQ ID NO: 78963 - RNA, 22 nt, Human
cacacuugugaguauguauuca

SEQ ID NO: 78964 - RNA, 32 nt, Human
cacacuuuccaaaaugagccuuaaaaauugua

SEQ ID NO: 78965 - RNA, 32 nt, Human
cacacuuuccacccucaccugcccccucauac

SEQ ID NO: 78966 - RNA, 32 nt, Human
cacacuuuccaggcugagcauuuccuuuugug

SEQ ID NO: 78967 - RNA, 32 nt, Human
cacacuuugggcugggauggcaguggggcaua

SEQ ID NO: 78968 - RNA, 32 nt, Human
cacacuuuucaggagaaaccugagcaugauuu

SEQ ID NO: 78969 - RNA, 32 nt, Human
cacacuuuucccuuccuggcccaagagagcau

SEQ ID NO: 78970 - RNA, 32 nt, Human
cacagaaaaauggcauuccucucugucucucc

SEQ ID NO: 78971 - RNA, 32 nt, Human
cacagaaaacagcaaauauccccagcccuuga

SEQ ID NO: 78972 - RNA, 32 nt, Human
cacagaaaacccacagccagagccccugggcc

SEQ ID NO: 78973 - RNA, 16 nt, Human
cacagaaaauugcaga

SEQ ID NO: 78974 - RNA, 32 nt, Human
cacagaaacgcaauaaacacacacaaaauagu

SEQ ID NO: 78975 - RNA, 32 nt, Human
cacagaaagagccugauguccaugauccaggu

SEQ ID NO: 78976 - RNA, 32 nt, Human
cacagaaagaggaggagcaagugggauguuua

SEQ ID NO: 78977 - RNA, 32 nt, Human
cacagaaagauaagguaaacaagauauacuua

SEQ ID NO: 78978 - RNA, 32 nt, Human
cacagaaagaugggggaaggaggauacaggcu

SEQ ID NO: 78979 - RNA, 32 nt, Human
cacagaaaggcugcucccuaaugacugugggc

SEQ ID NO: 78980 - RNA, 24 nt, Human
cacagaaagucugccugucugcau

SEQ ID NO: 78981 - RNA, 32 nt, Human
cacagaaaucugaaaaauggccauguugucuu

SEQ ID NO: 78982 - RNA, 32 nt, Human
cacagaacaauccugaaccaggccugucaccu

SEQ ID NO: 78983 - RNA, 32 nt, Human
cacagaacaugcaaaaggccugugcauucuag

SEQ ID NO: 78984 - RNA, 22 nt, Human
cacagaacauguuggcaugaca

SEQ ID NO: 78985 - RNA, 32 nt, Human
cacagaacauuuguuuacaauucugugugacu

SEQ ID NO: 78986 - RNA, 32 nt, Human
cacagaaccaaagaagcaaguuauggaggagc

SEQ ID NO: 78987 - RNA, 32 nt, Human
cacagaaccacuugcaggaagaacucuagaga

SEQ ID NO: 78988 - RNA, 32 nt, Human
cacagaaccagccacaccccacggccacgaag

SEQ ID NO: 78989 - RNA, 32 nt, Human
cacagaaccagcugauggccccagugccugaa

SEQ ID NO: 78990 - RNA, 32 nt, Human
cacagaacgacacccgguaauccacaggguca

SEQ ID NO: 78991 - RNA, 32 nt, Human
cacagaacuaaaacuacuacuuacaucuaaca

SEQ ID NO: 78992 - RNA, 32 nt, Human
cacagaacuccaccagcaacuccacccgaccc

SEQ ID NO: 78993 - RNA, 32 nt, Human
cacagaacugauuagaagagaucagaguuuug

SEQ ID NO: 78994 - RNA, 32 nt, Human
cacagaagaaagaccuguguccuagagaguag

SEQ ID NO: 78995 - RNA, 20 nt, Human
cacagaagaacucaugcagg

SEQ ID NO: 78996 - RNA, 32 nt, Human
cacagaagaauuggaccaggucacuguacgua

SEQ ID NO: 78997 - RNA, 32 nt, Human
cacagaagacaccuacucccaccagcggaguu

SEQ ID NO: 78998 - RNA, 20 nt, Human
cacagaagccaauguuugga

SEQ ID NO: 78999 - RNA, 23 nt, Human
cacagaagccacaaacaggcuca

SEQ ID NO: 79000 - RNA, 23 nt, Human
cacagaagccacagcccaguaag

SEQ ID NO: 79001 - RNA, 23 nt, Human
cacagaagccagaaggcagugga

SEQ ID NO: 79002 - RNA, 19 nt, Human
cacagaagccagccaagug

SEQ ID NO: 79003 - RNA, 32 nt, Human
cacagaagccugcuggaagacaggucucucuc

SEQ ID NO: 79004 - RNA, 19 nt, Human
cacagaagccuuuuacgga

SEQ ID NO: 79005 - RNA, 20 nt, Human
cacagaagcucucaauuuca

SEQ ID NO: 79006 - RNA, 32 nt, Human
cacagaagcucucaauuucagaugauagguga

SEQ ID NO: 79007 - RNA, 32 nt, Human
cacagaaggaggaggaggagguuuaggucaag

SEQ ID NO: 79008 - RNA, 32 nt, Human
cacagaaggauucugcaaauagccugcggaga

SEQ ID NO: 79009 - RNA, 24 nt, Human
cacagaaggggcaggccaggugga

SEQ ID NO: 79010 - RNA, 32 nt, Human
cacagaagguggagguugcagugagccaagcu

SEQ ID NO: 79011 - RNA, 32 nt, Human
cacagaagugggaaggagaggggugggccagg

SEQ ID NO: 79012 - RNA, 32 nt, Human
cacagaauaaacuuucuuuagaugcuguucuu

SEQ ID NO: 79013 - RNA, 32 nt, Human
cacagaauaacccugcauccaaauuccaggaa

SEQ ID NO: 79014 - RNA, 22 nt, Human
cacagaauacagugaaaugaca

SEQ ID NO: 79015 - RNA, 32 nt, Human
cacagaaucuaaagggguauuagccagccucg

SEQ ID NO: 79016 - RNA, 32 nt, Human
cacagaaucuugucccuugggaguuuuugugu

SEQ ID NO: 79017 - RNA, 22 nt, Human
cacagaaugucuacaagaauua

SEQ ID NO: 79018 - RNA, 32 nt, Human
cacagaauugugcaaccaucaccacaaucuuu

SEQ ID NO: 79019 - RNA, 32 nt, Human
cacagacaaaggacuuccccgcagggaacugu

SEQ ID NO: 79020 - RNA, 32 nt, Human
cacagacaacaguugcacagugccucaagccc

SEQ ID NO: 79021 - RNA, 32 nt, Human
cacagacaagaccucagagaucaaaggaagag

SEQ ID NO: 79022 - RNA, 32 nt, Human
cacagacaaggcuucagcucuaggaaccccac

SEQ ID NO: 79023 - RNA, 32 nt, Human
cacagacaaugaccacuacccugggugugaua

SEQ ID NO: 79024 - RNA, 32 nt, Human
cacagacacacagacacauacgcacacacgug

SEQ ID NO: 79025 - RNA, 32 nt, Human
cacagacacagcauagcaggaguccuccccau

SEQ ID NO: 79026 - RNA, 21 nt, Human
cacagacacaguuucuggaau

SEQ ID NO: 79027 - RNA, 32 nt, Human
cacagacaccuccugggcugggcagagugaca

SEQ ID NO: 79028 - RNA, 32 nt, Human
cacagacacgcaugcacacacgcagaggugca

SEQ ID NO: 79029 - RNA, 32 nt, Human
cacagacagaagacugugucaugggucauggc

SEQ ID NO: 79030 - RNA, 32 nt, Human
cacagacagcaaggaccugcagcugcuccgcc

SEQ ID NO: 79031 - RNA, 32 nt, Human
cacagacagccagcagggggcgucggagaacu

SEQ ID NO: 79032 - RNA, 32 nt, Human
cacagacaggagagagucaguggcaaauagac

SEQ ID NO: 79033 - RNA, 32 nt, Human
cacagacaggcagaggauuacaacacaaggca

SEQ ID NO: 79034 - RNA, 32 nt, Human
cacagacagggcugccugugaccugcugugac

SEQ ID NO: 79035 - RNA, 32 nt, Human
cacagacaguugagcuuuucagcugggaagcc

SEQ ID NO: 79036 - RNA, 32 nt, Human
cacagacauggugaggacccuggcugugcacc

SEQ ID NO: 79037 - RNA, 32 nt, Human
cacagaccacccuucaugcuggggcucuggag

SEQ ID NO: 79038 - RNA, 32 nt, Human
cacagaccagcauccccacuuaccaggccucc

SEQ ID NO: 79039 - RNA, 32 nt, Human
cacagaccagcccagcauucaggcugguagag

SEQ ID NO: 79040 - RNA, 32 nt, Human
cacagaccauaagaaacaacaaaugagccacu

SEQ ID NO: 79041 - RNA, 32 nt, Human
cacagaccaucuuugaauagcaaggcucuaga

SEQ ID NO: 79042 - RNA, 16 nt, Human
cacagacccauccggc

SEQ ID NO: 79043 - RNA, 32 nt, Human
cacagaccccacuuggagaggaauucugggaa

SEQ ID NO: 79044 - RNA, 32 nt, Human
cacagacccccagcagguagcauuccccagcc

SEQ ID NO: 79045 - RNA, 32 nt, Human
cacagaccccuccacauuaugccacacacggc

SEQ ID NO: 79046 - RNA, 32 nt, Human
cacagaccccuccagaggucucgcucgcaggc

SEQ ID NO: 79047 - RNA, 21 nt, Human
cacagaccccucuccccugca

SEQ ID NO: 79048 - RNA, 32 nt, Human
cacagacccgcuggaccagccugcugcggguc

SEQ ID NO: 79049 - RNA, 24 nt, Human
cacagacccucugcagccccuggc

SEQ ID NO: 79050 - RNA, 32 nt, Human
cacagacccuggcccccuccccaaguccaucc

SEQ ID NO: 79051 - RNA, 22 nt, Human
cacagacccuucccaauuccau

SEQ ID NO: 79052 - RNA, 21 nt, Human
cacagacgcagagacgggggg

SEQ ID NO: 79053 - RNA, 32 nt, Human
cacagacggcaucacagacagucacagcacug

SEQ ID NO: 79054 - RNA, 32 nt, Human
cacagacggcggcauccuccagcccuggucac

SEQ ID NO: 79055 - RNA, 32 nt, Human
cacagacgugagccacugcguccgguccaucu

SEQ ID NO: 79056 - RNA, 23 nt, Human
cacagacguggaucgcaagugga

SEQ ID NO: 79057 - RNA, 32 nt, Human
cacagacguuuggacagagcaggcuccuaagg

SEQ ID NO: 79058 - RNA, 32 nt, Human
cacagacuagccuaggucucucuauuucuuga

SEQ ID NO: 79059 - RNA, 16 nt, Human
cacagacuaggucuug

SEQ ID NO: 79060 - RNA, 21 nt, Human
cacagacucagcauuuccaca

SEQ ID NO: 79061 - RNA, 32 nt, Human
cacagacuccaaaggcguagaaguuugugcca

SEQ ID NO: 79062 - RNA, 32 nt, Human
cacagacuccacccuccuacaggugcuguuca

SEQ ID NO: 79063 - RNA, 32 nt, Human
cacagacucucagcccacacaaugccccagug

SEQ ID NO: 79064 - RNA, 32 nt, Human
cacagacugggaccuccaccacaucuggcaga

SEQ ID NO: 79065 - RNA, 32 nt, Human
cacagacuguccacugcagagaccauggacgg

SEQ ID NO: 79066 - RNA, 32 nt, Human
cacagacugucuguauucaauggcuaucuuca

SEQ ID NO: 79067 - RNA, 32 nt, Human
cacagacugugggccuucccaugugcuguugg

SEQ ID NO: 79068 - RNA, 32 nt, Human
cacagacuuguggagcugggcgucuggaucaa

SEQ ID NO: 79069 - RNA, 32 nt, Human
cacagacuuuacagcacaucagaaauucuacc

SEQ ID NO: 79070 - RNA, 32 nt, Human
cacagacuuucagccuccaugcucugagacaa

SEQ ID NO: 79071 - RNA, 32 nt, Human
cacagacuuuguguccugcacacugagcucca

SEQ ID NO: 79072 - RNA, 32 nt, Human
cacagacuuuuaggcuggcccagauauucccc

SEQ ID NO: 79073 - RNA, 32 nt, Human
cacagagaaaaaucacucccccuucucagagg

SEQ ID NO: 79074 - RNA, 32 nt, Human
cacagagaaaaaucacucgcccuucucagagg

SEQ ID NO: 79075 - RNA, 32 nt, Human
cacagagaaaguuggcuuugaugucucuuaaa

SEQ ID NO: 79076 - RNA, 32 nt, Human
cacagagaaggcuagguaugagagggacagaa

SEQ ID NO: 79077 - RNA, 32 nt, Human
cacagagaaguuuacaugaaguagaagaaauc

SEQ ID NO: 79078 - RNA, 32 nt, Human
cacagagagacacgggcucaaggaacccaaga

SEQ ID NO: 79079 - RNA, 32 nt, Human
cacagagagacgagcccaggaggcugacugag

SEQ ID NO: 79080 - RNA, 32 nt, Human
cacagagagguuaaguaacuuguccaauguug

SEQ ID NO: 79081 - RNA, 32 nt, Human
cacagagauaugcacacacacggaugcacaca

SEQ ID NO: 79082 - RNA, 32 nt, Human
cacagagauaugcacacaccgaugugcgcaca

SEQ ID NO: 79083 - RNA, 32 nt, Human
cacagagauggaaggagauuccuuacccacac

SEQ ID NO: 79084 - RNA, 32 nt, Human
cacagagaugugaacagacaauggaaagcacu

SEQ ID NO: 79085 - RNA, 32 nt, Human
cacagagcacacugcacacaugcacacacaca

SEQ ID NO: 79086 - RNA, 32 nt, Human
cacagagcagaaaggcaccuggaaugcggcug

SEQ ID NO: 79087 - RNA, 32 nt, Human
cacagagcagagaagcagagauguuccuugaa

SEQ ID NO: 79088 - RNA, 32 nt, Human
cacagagcagcaggccccagaggcuucucugc

SEQ ID NO: 79089 - RNA, 22 nt, Human
cacagagcaggcugggcacggu

SEQ ID NO: 79090 - RNA, 32 nt, Human
cacagagcagggguccugaggaaagccuggcu

SEQ ID NO: 79091 - RNA, 21 nt, Human
cacagagcaguagugcgcagg

SEQ ID NO: 79092 - RNA, 32 nt, Human
cacagagcaguggcagggcccagcuagcaggc

SEQ ID NO: 79093 - RNA, 22 nt, Human
cacagagcauggccuccagagg

SEQ ID NO: 79094 - RNA, 26 nt, Human
cacagagccagcuguguaccacagag

SEQ ID NO: 79095 - RNA, 20 nt, Human
cacagagcccgggccgcagg

SEQ ID NO: 79096 - RNA, 32 nt, Human
cacagagcccugaggggcugggcugggcuggg

SEQ ID NO: 79097 - RNA, 24 nt, Human
cacagagcccuguccagcuccuag

SEQ ID NO: 79098 - RNA, 32 nt, Human
cacagagccgcuguuccucuccugccuuuaga

SEQ ID NO: 79099 - RNA, 32 nt, Human
cacagagccuuucaauucagcuuggggugagc

SEQ ID NO: 79100 - RNA, 24 nt, Human
cacagagccuuuuucacaauucca

SEQ ID NO: 79101 - RNA, 20 nt, Human
cacagagcgcacgugcacau

SEQ ID NO: 79102 - RNA, 32 nt, Human
cacagagcuauggagaaggcuggagaugaaag

SEQ ID NO: 79103 - RNA, 32 nt, Human
cacagagcucagcugcucgcaggcugugaaau

SEQ ID NO: 79104 - RNA, 32 nt, Human
cacagagcuccuggcccuggccagaagcagga

SEQ ID NO: 79105 - RNA, 19 nt, Human
cacagagcucuaaugucca

SEQ ID NO: 79106 - RNA, 20 nt, Human
cacagagcucuccagcucca

SEQ ID NO: 79107 - RNA, 20 nt, Human
cacagagcugcagaguccug

SEQ ID NO: 79108 - RNA, 21 nt, Human
cacagagcugccacgccagcc

SEQ ID NO: 79109 - RNA, 32 nt, Human
cacagagcuggacaggcuuugaacuccuggau

SEQ ID NO: 79110 - RNA, 32 nt, Human
cacagagcuggcacuggugcugagccucugcu

SEQ ID NO: 79111 - RNA, 23 nt, Human
cacagagcugguuucagcauggu

SEQ ID NO: 79112 - RNA, 32 nt, Human
cacagagcuguaaaccaggauuugaaugggug

SEQ ID NO: 79113 - RNA, 32 nt, Human
cacagagcugugguccucaggcuccaacaggc

SEQ ID NO: 79114 - RNA, 32 nt, Human
cacagagcuguucugagggugcauggaggagc

SEQ ID NO: 79115 - RNA, 24 nt, Human
cacagagcuucaccaaaucacaga

SEQ ID NO: 79116 - RNA, 32 nt, Human
cacagagcuugauccagaagugcacagguaag

SEQ ID NO: 79117 - RNA, 32 nt, Human
cacagagcuuugaguaacuucuugguugugca

SEQ ID NO: 79118 - RNA, 32 nt, Human
cacagaggaaagagcaucaccgugggagaggc

SEQ ID NO: 79119 - RNA, 24 nt, Human
cacagaggagcugugaacccgcuc

SEQ ID NO: 79120 - RNA, 32 nt, Human
cacagaggccaggccagggcuggaaggacagg

SEQ ID NO: 79121 - RNA, 32 nt, Human
cacagaggccugguuugcucagucuucugaac

SEQ ID NO: 79122 - RNA, 32 nt, Human
cacagaggcuugggggugaaaggguggguggu

SEQ ID NO: 79123 - RNA, 32 nt, Human
cacagagggaaagggagagccaccugguacuu

SEQ ID NO: 79124 - RNA, 32 nt, Human
cacagagggcagcagggacaggacuggaaggg

SEQ ID NO: 79125 - RNA, 20 nt, Human
cacagagggcccaggccccu

SEQ ID NO: 79126 - RNA, 32 nt, Human
cacagagggcuccuggcgcugacagaugggac

SEQ ID NO: 79127 - RNA, 32 nt, Human
cacagagggggagggggagggggaguggcagu

SEQ ID NO: 79128 - RNA, 32 nt, Human
cacagagguaguauaugaugaagagaagauua

SEQ ID NO: 79129 - RNA, 22 nt, Human
cacagagguccagaccuuggca

SEQ ID NO: 79130 - RNA, 32 nt, Human
cacagaggucggcaggcagcacacagagggac

SEQ ID NO: 79131 - RNA, 32 nt, Human
cacagagguggaagauugaucuugccaagagu

SEQ ID NO: 79132 - RNA, 32 nt, Human
cacagaggugucuugccuccugacuagaccag

SEQ ID NO: 79133 - RNA, 22 nt, Human
cacagaguagauuuuggucccg

SEQ ID NO: 79134 - RNA, 32 nt, Human
cacagagucagcugaugaguucuguaccaaac

SEQ ID NO: 79135 - RNA, 32 nt, Human
cacagagucuacugaggcaaggagagggugau

SEQ ID NO: 79136 - RNA, 32 nt, Human
cacagagucugucacagacagggacggagcug

SEQ ID NO: 79137 - RNA, 32 nt, Human
cacagagucuugaagccagagcagcgccagga

SEQ ID NO: 79138 - RNA, 32 nt, Human
cacagaguguggaggcagggaggucgagucag

SEQ ID NO: 79139 - RNA, 32 nt, Human
cacagaguuaaaaccugucacucaaaggcccc

SEQ ID NO: 79140 - RNA, 21 nt, Human
cacagaguugcuaccagggag

SEQ ID NO: 79141 - RNA, 22 nt, Human
cacagaguuguccaguccccag

SEQ ID NO: 79142 - RNA, 32 nt, Human
cacagauaccugcuguucucagcuccagcuuc

SEQ ID NO: 79143 - RNA, 32 nt, Human
cacagauacuaacaacuuaaacuuacuacuuu

SEQ ID NO: 79144 - RNA, 19 nt, Human
cacagauacuacaauucca

SEQ ID NO: 79145 - RNA, 32 nt, Human
cacagauauaugcacacgugugcugcugaggu

SEQ ID NO: 79146 - RNA, 32 nt, Human
cacagauaugagggguuguuuggauuaggggu

SEQ ID NO: 79147 - RNA, 32 nt, Human
cacagauauuuuaggcccccaagagguagucu

SEQ ID NO: 79148 - RNA, 32 nt, Human
cacagaucaaggugaugccuaccucuuuggag

SEQ ID NO: 79149 - RNA, 32 nt, Human
cacagaucacaccuccauccccaaagagguag

SEQ ID NO: 79150 - RNA, 32 nt, Human
cacagaucagaagaaagaaagacaacuuuccu

SEQ ID NO: 79151 - RNA, 32 nt, Human
cacagauccagcuaggccugaccugugccuca

SEQ ID NO: 79152 - RNA, 24 nt, Human
cacagauccccauggucuucagca

SEQ ID NO: 79153 - RNA, 21 nt, Human
cacagauccccgccuguggca

SEQ ID NO: 79154 - RNA, 32 nt, Human
cacagauccuccucaacaugagggugucaggg

SEQ ID NO: 79155 - RNA, 32 nt, Human
cacagauccuugucuucagcaccuuccaagga

SEQ ID NO: 79156 - RNA, 32 nt, Human
cacagaucgguguuugaaaauuugccauuuca

SEQ ID NO: 79157 - RNA, 32 nt, Human
cacagaugaaacugagcugggacuggaaagga

SEQ ID NO: 79158 - RNA, 21 nt, Human
cacagaugaacuaagaaaguc

SEQ ID NO: 79159 - RNA, 32 nt, Human
cacagaugagcagaguggaugguucggugggu

SEQ ID NO: 79160 - RNA, 32 nt, Human
cacagaugagcagaguggggugauguugguug

SEQ ID NO: 79161 - RNA, 21 nt, Human
cacagaugagccagaagaggg

SEQ ID NO: 79162 - RNA, 22 nt, Human
cacagaugcagaaacugaggua

SEQ ID NO: 79163 - RNA, 32 nt, Human
cacagaugcagccacaguaaggcuccaucagg

SEQ ID NO: 79164 - RNA, 32 nt, Human
cacagaugcccaggcaccuccagaucauucac

SEQ ID NO: 79165 - RNA, 32 nt, Human
cacagaugccucucacaacauggcaguuucuu

SEQ ID NO: 79166 - RNA, 31 nt, Human
cacagaugcuggagcagguguaggaggaagc

SEQ ID NO: 79167 - RNA, 32 nt, Human
cacagaugggagaaggccaugccagccacguc

SEQ ID NO: 79168 - RNA, 31 nt, Human
cacagaugggcagucucagccauacucuguu

SEQ ID NO: 79169 - RNA, 32 nt, Human
cacagaugucgagacaucucccauggauuugu

SEQ ID NO: 79170 - RNA, 32 nt, Human
cacagauguggacacauauccggaaacugcag

SEQ ID NO: 79171 - RNA, 32 nt, Human
cacagauguggacacuggcucagagaaguggu

SEQ ID NO: 79172 - RNA, 32 nt, Human
cacagaugugucugggagagccuggcaaggca

SEQ ID NO: 79173 - RNA, 32 nt, Human
cacagauuagagacucucccccuugucaguca

SEQ ID NO: 79174 - RNA, 32 nt, Human
cacagauucagcucuucucuccuuacauuuua

SEQ ID NO: 79175 - RNA, 32 nt, Human
cacagauugaugcugaaauggacucuacuccu

SEQ ID NO: 79176 - RNA, 32 nt, Human
cacagauuucauuugagagaacucagcccccu

SEQ ID NO: 79177 - RNA, 32 nt, Human
cacagauuugcuggauggaagcugcgugugug

SEQ ID NO: 79178 - RNA, 19 nt, Human
cacagauuuggacaggaag

SEQ ID NO: 79179 - RNA, 32 nt, Human
cacagcaaaccuguaacauauucacuguaaau

SEQ ID NO: 79180 - RNA, 31 nt, Human
cacagcaacaacagcaagaccaugggggagu

SEQ ID NO: 79181 - RNA, 31 nt, Human
cacagcaacugucaccucacagcaggagaca

SEQ ID NO: 79182 - RNA, 32 nt, Human
cacagcaagaccugggacauggcagugacugu

SEQ ID NO: 79183 - RNA, 21 nt, Human
cacagcaagaugcccagggag

SEQ ID NO: 79184 - RNA, 18 nt, Human
cacagcaagggugggaga

SEQ ID NO: 79185 - RNA, 32 nt, Human
cacagcaagggugggagacagcugggcacaaa

SEQ ID NO: 79186 - RNA, 32 nt, Human
cacagcaaucaggacucacagcucuucaagga

SEQ ID NO: 79187 - RNA, 32 nt, Human
cacagcacacggucaacuccgcgggacacgag

SEQ ID NO: 79188 - RNA, 32 nt, Human
cacagcacagaugccaucauuucccuuucccc

SEQ ID NO: 79189 - RNA, 32 nt, Human
cacagcacagguugaagagaccagcucucccc

SEQ ID NO: 79190 - RNA, 32 nt, Human
cacagcaccaacagaaggaagagggugaggaa

SEQ ID NO: 79191 - RNA, 32 nt, Human
cacagcacccaccaccugccgccuucagacuc

SEQ ID NO: 79192 - RNA, 32 nt, Human
cacagcaccccuuuccuuccucuccucccacc

SEQ ID NO: 79193 - RNA, 31 nt, Human
cacagcacccuuucaagccaugcagacagua

SEQ ID NO: 79194 - RNA, 32 nt, Human
cacagcacgcggccuccugauccggaagcacg

SEQ ID NO: 79195 - RNA, 32 nt, Human
cacagcacuaacuggccuucuuuccagauugg

SEQ ID NO: 79196 - RNA, 21 nt, Human
cacagcacuccagccugggca

SEQ ID NO: 79197 - RNA, 32 nt, Human
cacagcacuccccucagacacccucagagagu

SEQ ID NO: 79198 - RNA, 32 nt, Human
cacagcacugaucacacugagauggaagacuc

SEQ ID NO: 79199 - RNA, 32 nt, Human
cacagcacugcacugcagccugggugacaaag

SEQ ID NO: 79200 - RNA, 32 nt, Human
cacagcacugcacugcugccugggcgacagcg

SEQ ID NO: 79201 - RNA, 32 nt, Human
cacagcacugccugcuuuuuguuuuuguugcu

SEQ ID NO: 79202 - RNA, 32 nt, Human
cacagcacuggugcucaccucuaccuccuguc

SEQ ID NO: 79203 - RNA, 32 nt, Human
cacagcagaagcugaagaggagauccaggcac

SEQ ID NO: 79204 - RNA, 32 nt, Human
cacagcagaauggcuccugucacugcauucca

SEQ ID NO: 79205 - RNA, 22 nt, Human
cacagcagaauuuauauaggaa

SEQ ID NO: 79206 - RNA, 22 nt, Human
cacagcagaauuuauauaggga

SEQ ID NO: 79207 - RNA, 32 nt, Human
cacagcagacagcagcaugacaaggaugcaau

SEQ ID NO: 79208 - RNA, 32 nt, Human
cacagcagaccagccccacugucagcagcacc

SEQ ID NO: 79209 - RNA, 32 nt, Human
cacagcagagaggggcgcaggagcugccgcgg

SEQ ID NO: 79210 - RNA, 21 nt, Human
cacagcagagcaggcuggaga

SEQ ID NO: 79211 - RNA, 26 nt, Human
cacagcagagcuggacgcuguggaaa

SEQ ID NO: 79212 - RNA, 25 nt, Human
cacagcagaggaaaggacagggaaa

SEQ ID NO: 79213 - RNA, 23 nt, Human
cacagcagaggggacgcgggggg

SEQ ID NO: 79214 - RNA, 27 nt, Human
cacagcagaggucaaaggcaguggaga

SEQ ID NO: 79215 - RNA, 22 nt, Human
cacagcagaguucaacuggaga

SEQ ID NO: 79216 - RNA, 32 nt, Human
cacagcagcacgggccccacugugcugcucuu

SEQ ID NO: 79217 - RNA, 32 nt, Human
cacagcagcagaugucccucacacacaugccc

SEQ ID NO: 79218 - RNA, 23 nt, Human
cacagcagcagguaugugugaaa

SEQ ID NO: 79219 - RNA, 32 nt, Human
cacagcagcccacaguccacagucuuuuuggg

SEQ ID NO: 79220 - RNA, 32 nt, Human
cacagcagcccugccugugaagcucuuguuuc

SEQ ID NO: 79221 - RNA, 32 nt, Human
cacagcagccucuguccagccugcagguggcc

SEQ ID NO: 79222 - RNA, 32 nt, Human
cacagcagccugggugacagagcgagacucuu

SEQ ID NO: 79223 - RNA, 32 nt, Human
cacagcagcggauagagcaggagagcaccacc

SEQ ID NO: 79224 - RNA, 32 nt, Human
cacagcagcguccggcgagaugaaggcgcucg

SEQ ID NO: 79225 - RNA, 32 nt, Human
cacagcagcucacagcuguaaucccagcacuu

SEQ ID NO: 79226 - RNA, 32 nt, Human
cacagcagcucaugccuguaauccuagcacuu

SEQ ID NO: 79227 - RNA, 32 nt, Human
cacagcagcuguuccuggcugugcccaccacc

SEQ ID NO: 79228 - RNA, 32 nt, Human
cacagcagcuuucguuccuccuucccuuuccc

SEQ ID NO: 79229 - RNA, 32 nt, Human
cacagcaggagaacgagaaggcugccugauca

SEQ ID NO: 79230 - RNA, 24 nt, Human
cacagcaggagacucgcaugggag

SEQ ID NO: 79231 - RNA, 32 nt, Human
cacagcaggcagcugcaggagcagugggagga

SEQ ID NO: 79232 - RNA, 32 nt, Human
cacagcaggccugucaguucucucuuaccuuc

SEQ ID NO: 79233 - RNA, 32 nt, Human
cacagcaggcuggaguugguguuagauugcuu

SEQ ID NO: 79234 - RNA, 24 nt, Human
cacagcagggcguuuacauagaaa

SEQ ID NO: 79235 - RNA, 32 nt, Human
cacagcaggggaggcguggguccuccaaugac

SEQ ID NO: 79236 - RNA, 32 nt, Human
cacagcaggugcuuaauaaacagaucuugugg

SEQ ID NO: 79237 - RNA, 32 nt, Human
cacagcagucggucccugucauuguccaccca

SEQ ID NO: 79238 - RNA, 32 nt, Human
cacagcagugaacaaacccccacuccguugua

SEQ ID NO: 79239 - RNA, 32 nt, Human
cacagcauaaaagauaccaaaauaucauaugg

SEQ ID NO: 79240 - RNA, 32 nt, Human
cacagcauaaacugaggguguggggucuggcu

SEQ ID NO: 79241 - RNA, 32 nt, Human
cacagcauagucugggacuggaaaagagaugu

SEQ ID NO: 79242 - RNA, 32 nt, Human
cacagcauaucaauaaacacacagggcuaggg

SEQ ID NO: 79243 - RNA, 32 nt, Human
cacagcauauuuagagaaaagacuuggagcuu

SEQ ID NO: 79244 - RNA, 32 nt, Human
cacagcaucacugaaucacagagccuuugcgu

SEQ ID NO: 79245 - RNA, 32 nt, Human
cacagcaucacuucuaccacuuucuguugguc

SEQ ID NO: 79246 - RNA, 32 nt, Human
cacagcaucagagaguucauucauggaguccc

SEQ ID NO: 79247 - RNA, 20 nt, Human
cacagcaucggaaaauucau

SEQ ID NO: 79248 - RNA, 32 nt, Human
cacagcaucugccccugcuauauguggggaaa

SEQ ID NO: 79249 - RNA, 31 nt, Human
cacagcauggagagaggagaccaaccuaaga

SEQ ID NO: 79250 - RNA, 32 nt, Human
cacagcauggcccuuggcucuuccugcacugc

SEQ ID NO: 79251 - RNA, 22 nt, Human
cacagcauggcucugccucaca

SEQ ID NO: 79252 - RNA, 32 nt, Human
cacagcaugggcagugccuucccugccugugg

SEQ ID NO: 79253 - RNA, 23 nt, Human
cacagcauggucugacgcucaca

SEQ ID NO: 79254 - RNA, 23 nt, Human
cacagcaugugggaaugcccuca

SEQ ID NO: 79255 - RNA, 32 nt, Human
cacagcauuaaccuuccagucugggucccacu

SEQ ID NO: 79256 - RNA, 32 nt, Human
cacagcauuuuaucaauaaauauugcuuuauu

SEQ ID NO: 79257 - RNA, 32 nt, Human
cacagcauuuucaaagcuugugagugaagcug

SEQ ID NO: 79258 - RNA, 32 nt, Human
cacagcauuuugaaagcgaagcagaagccgua

SEQ ID NO: 79259 - RNA, 32 nt, Human
cacagccaacagccaccagcagccaggagaca

SEQ ID NO: 79260 - RNA, 32 nt, Human
cacagccaacccugcugcucucugccuccuuu

SEQ ID NO: 79261 - RNA, 32 nt, Human
cacagccaagaggugggguuccaugaccugcc

SEQ ID NO: 79262 - RNA, 32 nt, Human
cacagccaaucacugagagguccacuaucugg

SEQ ID NO: 79263 - RNA, 32 nt, Human
cacagccacaaaccagucaccaaauucccagc

SEQ ID NO: 79264 - RNA, 32 nt, Human
cacagccacagaacuaaucauauuuuauaucu

SEQ ID NO: 79265 - RNA, 32 nt, Human
cacagccacccaggcagggagcaaguggccug

SEQ ID NO: 79266 - RNA, 32 nt, Human
cacagccacuccaaguccugcccugccacccu

SEQ ID NO: 79267 - RNA, 32 nt, Human
cacagccacucccaagcccacacccacagggg

SEQ ID NO: 79268 - RNA, 32 nt, Human
cacagccacugcacuugcccuugccacacuug

SEQ ID NO: 79269 - RNA, 32 nt, Human
cacagccacuggcugguccuauucauuuccau

SEQ ID NO: 79270 - RNA, 32 nt, Human
cacagccagaacugccuuuggcccuacggaug

SEQ ID NO: 79271 - RNA, 32 nt, Human
cacagccagacgcauccugccacccacacagc

SEQ ID NO: 79272 - RNA, 32 nt, Human
cacagccagagcagaguggaaggguuggggga

SEQ ID NO: 79273 - RNA, 32 nt, Human
cacagccagcagaaacagaguggugauaaugg

SEQ ID NO: 79274 - RNA, 32 nt, Human
cacagccagcaugaacugggcauuucugcagg

SEQ ID NO: 79275 - RNA, 32 nt, Human
cacagccagcccagagagaaacuaucuucucc

SEQ ID NO: 79276 - RNA, 32 nt, Human
cacagccagccugucguguccagccugacgcc

SEQ ID NO: 79277 - RNA, 20 nt, Human
cacagccaggagcaggugca

SEQ ID NO: 79278 - RNA, 32 nt, Human
cacagccaggaugucagcagggccugagccag

SEQ ID NO: 79279 - RNA, 32 nt, Human
cacagccaggcaggagaaguugcgguggccau

SEQ ID NO: 79280 - RNA, 32 nt, Human
cacagccaggguggggaggggagcagcagagg

SEQ ID NO: 79281 - RNA, 32 nt, Human
cacagccagucaagaucucugagcaacuuaga

SEQ ID NO: 79282 - RNA, 32 nt, Human
cacagccagucaccacccuccuggaccauacu

SEQ ID NO: 79283 - RNA, 32 nt, Human
cacagccagugggaacugccagaggaagaucu

SEQ ID NO: 79284 - RNA, 21 nt, Human
cacagccauacagcuguccac

SEQ ID NO: 79285 - RNA, 32 nt, Human
cacagccauacagcuguccacacugaagaaca

SEQ ID NO: 79286 - RNA, 32 nt, Human
cacagccaugaagagaccagugggguggugca

SEQ ID NO: 79287 - RNA, 32 nt, Human
cacagccaugagcggccucuaagagcugagag

SEQ ID NO: 79288 - RNA, 31 nt, Human
cacagccaugccugccccaugccuagcguug

SEQ ID NO: 79289 - RNA, 32 nt, Human
cacagccaugccugccccaugccuagcguugg

SEQ ID NO: 79290 - RNA, 32 nt, Human
cacagcccaaagauuagcuucauguccauuau

SEQ ID NO: 79291 - RNA, 32 nt, Human
cacagcccagcaaagagcagcacacagcugaa

SEQ ID NO: 79292 - RNA, 32 nt, Human
cacagcccagcacuccucugggcugcucucaa

SEQ ID NO: 79293 - RNA, 32 nt, Human
cacagcccagguuccaggugcgugaccugccc

SEQ ID NO: 79294 - RNA, 32 nt, Human
cacagcccauuuugccaagaugucuagaguag

SEQ ID NO: 79295 - RNA, 32 nt, Human
cacagccccaggacagcggggucugagugguu

SEQ ID NO: 79296 - RNA, 32 nt, Human
cacagccccaggagaggaauuuggggccuagg

SEQ ID NO: 79297 - RNA, 32 nt, Human
cacagccccaguuucuggaggcagauggguaa

SEQ ID NO: 79298 - RNA, 32 nt, Human
cacagcccccgggcucuacccugggcacagca

SEQ ID NO: 79299 - RNA, 32 nt, Human
cacagccccucagcaccaagcagaagguggcc

SEQ ID NO: 79300 - RNA, 32 nt, Human
cacagccccugccccugcugcggcgcggcgag

SEQ ID NO: 79301 - RNA, 32 nt, Human
cacagccccugccccugggauccagcacucaa

SEQ ID NO: 79302 - RNA, 32 nt, Human
cacagccccugccuuggcggccacuacacugu

SEQ ID NO: 79303 - RNA, 19 nt, Human
cacagccccugcugggccc

SEQ ID NO: 79304 - RNA, 32 nt, Human
cacagccccuggcaacuguuggucucauccug

SEQ ID NO: 79305 - RNA, 32 nt, Human
cacagccccuggcuuugugcccacuuaggcag

SEQ ID NO: 79306 - RNA, 21 nt, Human
cacagccccuggucagucugc

SEQ ID NO: 79307 - RNA, 32 nt, Human
cacagccccuugccccuccucuaagggguuuu

SEQ ID NO: 79308 - RNA, 32 nt, Human
cacagcccgagggucucacugugucauccaga

SEQ ID NO: 79309 - RNA, 32 nt, Human
cacagcccuaaauccaugauaaagcuacucuu

SEQ ID NO: 79310 - RNA, 32 nt, Human
cacagcccuaaguagcaggcagugccacugug

SEQ ID NO: 79311 - RNA, 32 nt, Human
cacagcccuauaucagugcucuggacccacau

SEQ ID NO: 79312 - RNA, 32 nt, Human
cacagcccucacugcucucuaucuccaggugg

SEQ ID NO: 79313 - RNA, 32 nt, Human
cacagcccucaguccccaccccaggagaggcg

SEQ ID NO: 79314 - RNA, 32 nt, Human
cacagcccuccagcuggggucagguggcagcc

SEQ ID NO: 79315 - RNA, 32 nt, Human
cacagcccuccaggagauaucaaaggagguca

SEQ ID NO: 79316 - RNA, 32 nt, Human
cacagcccuccaggcccgccucaggaaggaau

SEQ ID NO: 79317 - RNA, 32 nt, Human
cacagcccuccaguguacugaggguacuggcc

SEQ ID NO: 79318 - RNA, 32 nt, Human
cacagcccuccugcugccaggaccugcuugaa

SEQ ID NO: 79319 - RNA, 32 nt, Human
cacagcccucgcccuccgccccggcuuuucuc

SEQ ID NO: 79320 - RNA, 32 nt, Human
cacagcccugacuugaacucugggugacccug

SEQ ID NO: 79321 - RNA, 32 nt, Human
cacagcccugagugacagagaggaaggaggag

SEQ ID NO: 79322 - RNA, 32 nt, Human
cacagcccugcagugcccuagacuggcugaaa

SEQ ID NO: 79323 - RNA, 32 nt, Human
cacagcccugcccuugucucugaggcugaaga

SEQ ID NO: 79324 - RNA, 32 nt, Human
cacagcccuggccucugcucaacuagcagaua

SEQ ID NO: 79325 - RNA, 32 nt, Human
cacagccgagagaccugaucucuggauucagu

SEQ ID NO: 79326 - RNA, 32 nt, Human
cacagccgcagcuguaaggcacgcuggaaggc

SEQ ID NO: 79327 - RNA, 32 nt, Human
cacagccgccaggagaaaaacuuaggccuccc

SEQ ID NO: 79328 - RNA, 30 nt, Human
cacagccgccucuccaggcuuccuugcaca

SEQ ID NO: 79329 - RNA, 32 nt, Human
cacagccggccgacaccacaccagccggggag

SEQ ID NO: 79330 - RNA, 32 nt, Human
cacagccgggaguaccccauggacagcugugg

SEQ ID NO: 79331 - RNA, 32 nt, Human
cacagccggggcugcagaaaaaugguugugug

SEQ ID NO: 79332 - RNA, 32 nt, Human
cacagccuacuuccccuuccccggggcugaga

SEQ ID NO: 79333 - RNA, 32 nt, Human
cacagccucacaccugaacgcuguccucccgc

SEQ ID NO: 79334 - RNA, 32 nt, Human
cacagccucacaggaagugggggugaggagcc

SEQ ID NO: 79335 - RNA, 31 nt, Human
cacagccucaccauacccuguugagguguga

SEQ ID NO: 79336 - RNA, 21 nt, Human
cacagccucagcugccugcau

SEQ ID NO: 79337 - RNA, 32 nt, Human
cacagccucauggguagggucagcaaaccaga

SEQ ID NO: 79338 - RNA, 32 nt, Human
cacagccuccaagucaggugggguggaguccc

SEQ ID NO: 79339 - RNA, 32 nt, Human
cacagccuccaggacguggcacgguuccccuc

SEQ ID NO: 79340 - RNA, 32 nt, Human
cacagccucccaggagggagacgcuggggugc

SEQ ID NO: 79341 - RNA, 22 nt, Human
cacagccucccugagccugcau

SEQ ID NO: 79342 - RNA, 32 nt, Human
cacagccuccuccuugcuguguaguuuugggu

SEQ ID NO: 79343 - RNA, 32 nt, Human
cacagccucgcaaugagcugccacaacugcuc

SEQ ID NO: 79344 - RNA, 32 nt, Human
cacagccucguucaugaaaccccagauacccg

SEQ ID NO: 79345 - RNA, 32 nt, Human
cacagccucuacuguacuuuagaaccugagau

SEQ ID NO: 79346 - RNA, 32 nt, Human
cacagccucugaccccuccucacuggccaucc

SEQ ID NO: 79347 - RNA, 23 nt, Human
cacagccucugccgagccugcau

SEQ ID NO: 79348 - RNA, 32 nt, Human
cacagccucugccucccguugcucugugaccu

SEQ ID NO: 79349 - RNA, 32 nt, Human
cacagccucugcugggacagggaauagaggga

SEQ ID NO: 79350 - RNA, 32 nt, Human
cacagccugagacucaucucgcuucgaccccg

SEQ ID NO: 79351 - RNA, 21 nt, Human
cacagccugagccuggcccag

SEQ ID NO: 79352 - RNA, 32 nt, Human
cacagccugaggggaauguggaagggauguuu

SEQ ID NO: 79353 - RNA, 32 nt, Human
cacagccugcauaggugacaaggggccgcugc

SEQ ID NO: 79354 - RNA, 32 nt, Human
cacagccugcucccagugcugugucaugaccu

SEQ ID NO: 79355 - RNA, 32 nt, Human
cacagccugcuucuccccugggcugcuguggg

SEQ ID NO: 79356 - RNA, 32 nt, Human
cacagccuggacuauucccaggcacagcugug

SEQ ID NO: 79357 - RNA, 32 nt, Human
cacagccuggauuuuuauuucugccaugaaac

SEQ ID NO: 79358 - RNA, 32 nt, Human
cacagccuggcgccagggcucacagcugcccc

SEQ ID NO: 79359 - RNA, 19 nt, Human
cacagccugggacaggaag

SEQ ID NO: 79360 - RNA, 32 nt, Human
cacagccugggaccugcaucugugcuggggcc

SEQ ID NO: 79361 - RNA, 28 nt, Human
cacagccugggaggcgccucauccagaa

SEQ ID NO: 79362 - RNA, 32 nt, Human
cacagccuguggcugggaagggagacagaggc

SEQ ID NO: 79363 - RNA, 21 nt, Human
cacagccuuaaaagcccgcuc

SEQ ID NO: 79364 - RNA, 19 nt, Human
cacagccuuaaacucaaug

SEQ ID NO: 79365 - RNA, 24 nt, Human
cacagccuuaaucucucuuuacau

SEQ ID NO: 79366 - RNA, 32 nt, Human
cacagccuuccuccccagaggacccggccgac

SEQ ID NO: 79367 - RNA, 32 nt, Human
cacagccuuccuuggggacucugaaggugucc

SEQ ID NO: 79368 - RNA, 32 nt, Human
cacagccuucuggcugggacugacuuggccau

SEQ ID NO: 79369 - RNA, 21 nt, Human
cacagccuuggucacagcgug

SEQ ID NO: 79370 - RNA, 32 nt, Human
cacagcgacuugcguugacaaaggaggaggaa

SEQ ID NO: 79371 - RNA, 18 nt, Human
cacagcgacuuucccagc

SEQ ID NO: 79372 - RNA, 32 nt, Human
cacagcgaggagcagacccaggcagggccgcc

SEQ ID NO: 79373 - RNA, 32 nt, Human
cacagcgaugggcugaaggcugugcaucccgc

SEQ ID NO: 79374 - RNA, 32 nt, Human
cacagcgauguccucagauguccuggacagcc

SEQ ID NO: 79375 - RNA, 32 nt, Human
cacagcgccagccucagacuggagggcaaggg

SEQ ID NO: 79376 - RNA, 19 nt, Human
cacagcgccuggcccagug

SEQ ID NO: 79377 - RNA, 32 nt, Human
cacagcgcgggggaacgggaggcugcaggaug

SEQ ID NO: 79378 - RNA, 32 nt, Human
cacagcggaaaguagagagggggcuccuugga

SEQ ID NO: 79379 - RNA, 25 nt, Human
cacagcggcggggaagucacagcug

SEQ ID NO: 79380 - RNA, 32 nt, Human
cacagcggcucacgucuguaaucccagcacuu

SEQ ID NO: 79381 - RNA, 19 nt, Human
cacagcgggcuccacagcg

SEQ ID NO: 79382 - RNA, 32 nt, Human
cacagcguaaacaaagccauggggaaguucca

SEQ ID NO: 79383 - RNA, 32 nt, Human
cacagcguccacccuguccacccagcccugcc

SEQ ID NO: 79384 - RNA, 32 nt, Human
cacagcguccuccuccucccuggagaagaucu

SEQ ID NO: 79385 - RNA, 32 nt, Human
cacagcgucuucagaacuuucagagaaaccag

SEQ ID NO: 79386 - RNA, 32 nt, Human
cacagcguggcauccagcagagaguuagaaau

SEQ ID NO: 79387 - RNA, 32 nt, Human
cacagcguuaugugucugccacauuaacuaca

SEQ ID NO: 79388 - RNA, 17 nt, Human
cacagcuaacacaaggc

SEQ ID NO: 79389 - RNA, 32 nt, Human
cacagcuaaggggagucaucacagggcuucag

SEQ ID NO: 79390 - RNA, 32 nt, Human
cacagcuacagcugcagggacugcuggcgucc

SEQ ID NO: 79391 - RNA, 32 nt, Human
cacagcuacaggcuuucuacuuaacuucuggg

SEQ ID NO: 79392 - RNA, 23 nt, Human
cacagcuaccugaggcugcucug

SEQ ID NO: 79393 - RNA, 32 nt, Human
cacagcuacucagggagguugaggcagcagga

SEQ ID NO: 79394 - RNA, 23 nt, Human
cacagcuacuugguuuguguucu

SEQ ID NO: 79395 - RNA, 32 nt, Human
cacagcucacugcaaccucaaacuccugggcu

SEQ ID NO: 79396 - RNA, 32 nt, Human
cacagcucacugcaaccucaauccugggcuca

SEQ ID NO: 79397 - RNA, 32 nt, Human
cacagcucacugcaaccucuacucccaggcuc

SEQ ID NO: 79398 - RNA, 32 nt, Human
cacagcucacugcaaccuuacuccuaggcuca

SEQ ID NO: 79399 - RNA, 32 nt, Human
cacagcucacugcagcccugaacuccugggcu

SEQ ID NO: 79400 - RNA, 32 nt, Human
cacagcucacugcagccucaaacuccugggcu

SEQ ID NO: 79401 - RNA, 32 nt, Human
cacagcucacugcagccuccaccuccugggcu

SEQ ID NO: 79402 - RNA, 32 nt, Human
cacagcucacugcagccuccaucuccuaggcu

SEQ ID NO: 79403 - RNA, 32 nt, Human
cacagcucacugcagccucgaccucccgggcu

SEQ ID NO: 79404 - RNA, 32 nt, Human
cacagcucacugcagccucgaccuccugcgcu

SEQ ID NO: 79405 - RNA, 32 nt, Human
cacagcucacugcagccucgaccuccuggacu

SEQ ID NO: 79406 - RNA, 32 nt, Human
cacagcucacugcagccucgaccuccugggcu

SEQ ID NO: 79407 - RNA, 32 nt, Human
cacagcucacugcagccuggaccuccuggccu

SEQ ID NO: 79408 - RNA, 32 nt, Human
cacagcucacugcagccuugaccuccuggguu

SEQ ID NO: 79409 - RNA, 32 nt, Human
cacagcucacugcagccuugagcuccugggcu

SEQ ID NO: 79410 - RNA, 32 nt, Human
cacagcucacugcagguucagccuucugaguu

SEQ ID NO: 79411 - RNA, 32 nt, Human
cacagcucacugcagucucgaacuccuggacu

SEQ ID NO: 79412 - RNA, 32 nt, Human
cacagcucagccacugacuuggguaucaguuu

SEQ ID NO: 79413 - RNA, 32 nt, Human
cacagcucagcccacagccuggacaugccagc

SEQ ID NO: 79414 - RNA, 32 nt, Human
cacagcucagcccagcccuggcacagagaaga

SEQ ID NO: 79415 - RNA, 32 nt, Human
cacagcucagccgccuccucugccaccagcug

SEQ ID NO: 79416 - RNA, 32 nt, Human
cacagcucauggagggugagaucauguuaggg

SEQ ID NO: 79417 - RNA, 32 nt, Human
cacagcucauugggggaaaaucagaggcuuca

SEQ ID NO: 79418 - RNA, 32 nt, Human
cacagcuccaagcacgugucccgugccucccc

SEQ ID NO: 79419 - RNA, 32 nt, Human
cacagcuccacucaccuaagggcagucuucua

SEQ ID NO: 79420 - RNA, 32 nt, Human
cacagcuccagccuuaguuuuuggagucaagu

SEQ ID NO: 79421 - RNA, 32 nt, Human
cacagcucccuacuggggcugcagccuuuaga

SEQ ID NO: 79422 - RNA, 18 nt, Human
cacagcuccuccaugccu

SEQ ID NO: 79423 - RNA, 32 nt, Human
cacagcuccucccgugcauccacucggccugg

SEQ ID NO: 79424 - RNA, 32 nt, Human
cacagcuccuugcuuugauuucauccuugaua

SEQ ID NO: 79425 - RNA, 32 nt, Human
cacagcucugauucuacagaaggaggccggac

SEQ ID NO: 79426 - RNA, 32 nt, Human
cacagcucugcagccugggcucugcccugccu

SEQ ID NO: 79427 - RNA, 32 nt, Human
cacagcucugcagccuguuuccuacaaccaga

SEQ ID NO: 79428 - RNA, 32 nt, Human
cacagcucuguggccuucauguuccgaaaguu

SEQ ID NO: 79429 - RNA, 32 nt, Human
cacagcugaacacucagcagugugugaguggc

SEQ ID NO: 79430 - RNA, 32 nt, Human
cacagcugacugcagccucaaccuuccaggcu

SEQ ID NO: 79431 - RNA, 32 nt, Human
cacagcugagugccccagggagggcaggcugg

SEQ ID NO: 79432 - RNA, 32 nt, Human
cacagcugaugaaugcuuuucucuccuuaugu

SEQ ID NO: 79433 - RNA, 32 nt, Human
cacagcugcacuccagccugugcugagaccuc

SEQ ID NO: 79434 - RNA, 32 nt, Human
cacagcugcagccgcaggcccugcacuacgcg

SEQ ID NO: 79435 - RNA, 32 nt, Human
cacagcugcaggaagaagucaggguggaaucc

SEQ ID NO: 79436 - RNA, 20 nt, Human
cacagcugccccccuccccu

SEQ ID NO: 79437 - RNA, 32 nt, Human
cacagcugccccucagccgcugagauccagug

SEQ ID NO: 79438 - RNA, 23 nt, Human
cacagcugccgcagcaucucaca

SEQ ID NO: 79439 - RNA, 22 nt, Human
cacagcugccgugaccagggag

SEQ ID NO: 79440 - RNA, 18 nt, Human
cacagcugccugcugucc

SEQ ID NO: 79441 - RNA, 32 nt, Human
cacagcugccuggcuggggaggcugugcuguu

SEQ ID NO: 79442 - RNA, 32 nt, Human
cacagcugcuuugggcaguagcugaagccgaa

SEQ ID NO: 79443 - RNA, 32 nt, Human
cacagcuggaaccuggaguuccacacgccugu

SEQ ID NO: 79444 - RNA, 32 nt, Human
cacagcuggaagcagaggccuucguaggugau

SEQ ID NO: 79445 - RNA, 32 nt, Human
cacagcuggcccugagcccuugguuugucaau

SEQ ID NO: 79446 - RNA, 32 nt, Human
cacagcuggcugacacaggacaggggcaacug

SEQ ID NO: 79447 - RNA, 32 nt, Human
cacagcuggcugcagaugugcagugccaggac

SEQ ID NO: 79448 - RNA, 29 nt, Human
cacagcuggcugcugucggacaccuuugg

SEQ ID NO: 79449 - RNA, 32 nt, Human
cacagcugggaacugaggcucacaguugcacu

SEQ ID NO: 79450 - RNA, 32 nt, Human
cacagcugggaggugggcaguggaggauggcu

SEQ ID NO: 79451 - RNA, 32 nt, Human
cacagcugggcccugcuggcauuguuaaugag

SEQ ID NO: 79452 - RNA, 32 nt, Human
cacagcugguaaucuggacuuaaggauugcug

SEQ ID NO: 79453 - RNA, 21 nt, Human
cacagcuguaaucccagcacu

SEQ ID NO: 79454 - RNA, 32 nt, Human
cacagcuguaccacauggcccacgugaaaucu

SEQ ID NO: 79455 - RNA, 32 nt, Human
cacagcugugugacugggucagcaagugcacu

SEQ ID NO: 79456 - RNA, 32 nt, Human
cacagcuuaggacagaacugggcccagggcaa

SEQ ID NO: 79457 - RNA, 32 nt, Human
cacagcuuauuuccucauuuuuauaauguccc

SEQ ID NO: 79458 - RNA, 32 nt, Human
cacagcuucagacugaggaucuagggcuggga

SEQ ID NO: 79459 - RNA, 32 nt, Human
cacagcuuccacccuuucacacaauucauguc

SEQ ID NO: 79460 - RNA, 21 nt, Human
cacagcuucccgagucauuca

SEQ ID NO: 79461 - RNA, 18 nt, Human
cacagcuucccgggucau

SEQ ID NO: 79462 - RNA, 21 nt, Human
cacagcuucccgggucauuca

SEQ ID NO: 79463 - RNA, 23 nt, Human
cacagcuuccuucuuugguuaga

SEQ ID NO: 79464 - RNA, 32 nt, Human
cacagcuuccuuggcucuuuuugcccauaugc

SEQ ID NO: 79465 - RNA, 32 nt, Human
cacagcuucucuggagacccuagaaggcggca

SEQ ID NO: 79466 - RNA, 19 nt, Human
cacagcuugauuucagagc

SEQ ID NO: 79467 - RNA, 32 nt, Human
cacagcuugggacugcugaggggcaggcggcu

SEQ ID NO: 79468 - RNA, 32 nt, Human
cacagcuuggggcugaagacucccaggccauu

SEQ ID NO: 79469 - RNA, 24 nt, Human
cacagcuuuauguacccuguccac

SEQ ID NO: 79470 - RNA, 32 nt, Human
cacagcuuucccuacccugccacucccaugca

SEQ ID NO: 79471 - RNA, 32 nt, Human
cacagcuuugcaugcugagcugugccaggcag

SEQ ID NO: 79472 - RNA, 32 nt, Human
cacagcuuugcuuuucugccucuucucucaag

SEQ ID NO: 79473 - RNA, 32 nt, Human
cacagcuuuuggaugaccucagcuugaguuuc

SEQ ID NO: 79474 - RNA, 32 nt, Human
cacagcuuuugggcuucucuggccugaaugcc

SEQ ID NO: 79475 - RNA, 32 nt, Human
cacaggaaaauggugcaugaauuuguaaacug

SEQ ID NO: 79476 - RNA, 32 nt, Human
cacaggaacccccaggacccagucgcugcugu

SEQ ID NO: 79477 - RNA, 32 nt, Human
cacaggaacccccgccccaacuuuuggauugu

SEQ ID NO: 79478 - RNA, 32 nt, Human
cacaggaacucugagguuuucccacugcugcc

SEQ ID NO: 79479 - RNA, 32 nt, Human
cacaggaagaaagaagaagcgcugcagguugc

SEQ ID NO: 79480 - RNA, 32 nt, Human
cacaggaagacccuuaaaugaagaaccuccua

SEQ ID NO: 79481 - RNA, 32 nt, Human
cacaggaagcagcuagacuaggggaguccuug

SEQ ID NO: 79482 - RNA, 32 nt, Human
cacaggaagcgcagcugaaaacaaauggacgc

SEQ ID NO: 79483 - RNA, 32 nt, Human
cacaggaagcugcaccugacagaagcuccagg

SEQ ID NO: 79484 - RNA, 32 nt, Human
cacaggaaggaggggugaccacugggaagggu

SEQ ID NO: 79485 - RNA, 32 nt, Human
cacaggaagggaaggcagggaggagaggaagc

SEQ ID NO: 79486 - RNA, 32 nt, Human
cacaggaaguggaggagccagaggugccuuug

SEQ ID NO: 79487 - RNA, 32 nt, Human
cacaggaccacucaguggggccugugugggcg

SEQ ID NO: 79488 - RNA, 32 nt, Human
cacaggaccagcugggaggacugguugugcug

SEQ ID NO: 79489 - RNA, 32 nt, Human
cacaggaccgugccucacagggcccacucccu

SEQ ID NO: 79490 - RNA, 32 nt, Human
cacaggaccugggcuucgucuccaggggacaa

SEQ ID NO: 79491 - RNA, 32 nt, Human
cacaggacgaagaaggcuucaaaaagucccaa

SEQ ID NO: 79492 - RNA, 32 nt, Human
cacaggacugacccuucuucagagauaaugac

SEQ ID NO: 79493 - RNA, 32 nt, Human
cacaggacugggcuccuaacucucaggaaaca

SEQ ID NO: 79494 - RNA, 32 nt, Human
cacaggacuguacuugcagccccugccaugag

SEQ ID NO: 79495 - RNA, 32 nt, Human
cacaggagaaaugauugaaggaagugugagug

SEQ ID NO: 79496 - RNA, 32 nt, Human
cacaggagaccacccccgagcuugccucaggg

SEQ ID NO: 79497 - RNA, 32 nt, Human
cacaggagaccagcucagggcggaaggucagg

SEQ ID NO: 79498 - RNA, 32 nt, Human
cacaggagagaugagggugagaauggagugcc

SEQ ID NO: 79499 - RNA, 32 nt, Human
cacaggagagcaagaaaaugugucacaucuau

SEQ ID NO: 79500 - RNA, 32 nt, Human
cacaggagcagaaacauggaacaccagacgcu

SEQ ID NO: 79501 - RNA, 32 nt, Human
cacaggagcagaaacauggaacaccagacucu

SEQ ID NO: 79502 - RNA, 32 nt, Human
cacaggagccacugcacuccagccugggugac

SEQ ID NO: 79503 - RNA, 32 nt, Human
cacaggagcgcacagacucagagccagacagc

SEQ ID NO: 79504 - RNA, 32 nt, Human
cacaggagcugccccggagcugaggggacggu

SEQ ID NO: 79505 - RNA, 32 nt, Human
cacaggaggaggaggaggacaugggguuugau

SEQ ID NO: 79506 - RNA, 32 nt, Human
cacaggaggcagagguugcagugagccgagag

SEQ ID NO: 79507 - RNA, 32 nt, Human
cacaggaggcuaaggugggaggaucccuugag

SEQ ID NO: 79508 - RNA, 32 nt, Human
cacaggagggagagagaggcaguguacuugcc

SEQ ID NO: 79509 - RNA, 32 nt, Human
cacaggagucagaggcuggagugcaauggcgu

SEQ ID NO: 79510 - RNA, 32 nt, Human
cacaggagucuucagacccagagaaggacggu

SEQ ID NO: 79511 - RNA, 32 nt, Human
cacaggaguucaaggcuucagugagcuauggg

SEQ ID NO: 79512 - RNA, 32 nt, Human
cacaggaucagaaggcaagggauaggcagugg

SEQ ID NO: 79513 - RNA, 32 nt, Human
cacaggaucauggagacgaacuaaaccaucau

SEQ ID NO: 79514 - RNA, 32 nt, Human
cacaggaucccaagagggagaucaugagccuu

SEQ ID NO: 79515 - RNA, 32 nt, Human
cacaggauccugacacuggagggcagcugucu

SEQ ID NO: 79516 - RNA, 32 nt, Human
cacaggaucguguguguaggugguguugugug

SEQ ID NO: 79517 - RNA, 32 nt, Human
cacaggaugaggaagauuaaggauaaucaauu

SEQ ID NO: 79518 - RNA, 32 nt, Human
cacaggauggcugcuuggcaguagggagugga

SEQ ID NO: 79519 - RNA, 32 nt, Human
cacaggaugggggcgccaggagaggggccccu

SEQ ID NO: 79520 - RNA, 32 nt, Human
cacaggauguuuauuguaucaaaagccuuauu

SEQ ID NO: 79521 - RNA, 32 nt, Human
cacaggcacaaacucccccacccaggacggcu

SEQ ID NO: 79522 - RNA, 18 nt, Human
cacaggcacacacaugca

SEQ ID NO: 79523 - RNA, 32 nt, Human
cacaggcacacagcagagccguccacagaccc

SEQ ID NO: 79524 - RNA, 20 nt, Human
cacaggcacacaugcaugca

SEQ ID NO: 79525 - RNA, 32 nt, Human
cacaggcacaugcacaggcacggugcugucug

SEQ ID NO: 79526 - RNA, 32 nt, Human
cacaggcacccgggggaagaggccguaggaga

SEQ ID NO: 79527 - RNA, 32 nt, Human
cacaggcaccugccuuccuagauuucccuggc

SEQ ID NO: 79528 - RNA, 32 nt, Human
cacaggcacgugccaccaugccuggcuauuuu

SEQ ID NO: 79529 - RNA, 32 nt, Human
cacaggcacgugccaccauguugcccaggcug

SEQ ID NO: 79530 - RNA, 32 nt, Human
cacaggcacuaacauggcacacacauacacuc

SEQ ID NO: 79531 - RNA, 25 nt, Human
cacaggcagagcgaacacgcacgga

SEQ ID NO: 79532 - RNA, 32 nt, Human
cacaggcagaguggucagggcugaagucggag

SEQ ID NO: 79533 - RNA, 32 nt, Human
cacaggcagcacuucgaggcuucgugacgaag

SEQ ID NO: 79534 - RNA, 32 nt, Human
cacaggcagcaggagagaggagagggcagaac

SEQ ID NO: 79535 - RNA, 32 nt, Human
cacaggcagccuggagaagcugggcaggacaa

SEQ ID NO: 79536 - RNA, 32 nt, Human
cacaggcagcgcuuuguaaacugugaagccau

SEQ ID NO: 79537 - RNA, 32 nt, Human
cacaggcaggcaggcccggugcaagaguggac

SEQ ID NO: 79538 - RNA, 32 nt, Human
cacaggcaucagaucugcucaggaaaaugugc

SEQ ID NO: 79539 - RNA, 32 nt, Human
cacaggcaucugcugcugcuccuggcugccac

SEQ ID NO: 79540 - RNA, 32 nt, Human
cacaggcaugagccaccgaacccagccuuauu

SEQ ID NO: 79541 - RNA, 32 nt, Human
cacaggcaugagccacugugcccagccacgag

SEQ ID NO: 79542 - RNA, 32 nt, Human
cacaggcaugagccacugugcccagccuaguu

SEQ ID NO: 79543 - RNA, 32 nt, Human
cacaggcaugcaccaccaugccuggcuaauuu

SEQ ID NO: 79544 - RNA, 32 nt, Human
cacaggcaugcgccaccaugcccugcuauuuu

SEQ ID NO: 79545 - RNA, 32 nt, Human
cacaggcaugcugcagugaauuuaacugaucc

SEQ ID NO: 79546 - RNA, 32 nt, Human
cacaggcaugugccaccaugccuagcuaauuu

SEQ ID NO: 79547 - RNA, 32 nt, Human
cacaggccaaagcaucagcaccagaacgcaca

SEQ ID NO: 79548 - RNA, 32 nt, Human
cacaggccaagcugcaugcaacaccuaugcuu

SEQ ID NO: 79549 - RNA, 32 nt, Human
cacaggccacaggcccuccaccucaccuccag

SEQ ID NO: 79550 - RNA, 32 nt, Human
cacaggccagaguugggcucuagcuccuggug

SEQ ID NO: 79551 - RNA, 31 nt, Human
cacaggccagcgcucugacaugcagaaggug

SEQ ID NO: 79552 - RNA, 22 nt, Human
cacaggccaggacgccauggca

SEQ ID NO: 79553 - RNA, 32 nt, Human
cacaggccaggcuucggugcuaccucagaggg

SEQ ID NO: 79554 - RNA, 32 nt, Human
cacaggccagugcugaaccguagguggaguag

SEQ ID NO: 79555 - RNA, 32 nt, Human
cacaggccaugcuggggccagaaccccagccc

SEQ ID NO: 79556 - RNA, 20 nt, Human
cacaggccauuccccucucc

SEQ ID NO: 79557 - RNA, 32 nt, Human
cacaggcccacacacccucacugacauacacu

SEQ ID NO: 79558 - RNA, 32 nt, Human
cacaggcccagccucugugcugucuccuccuc

SEQ ID NO: 79559 - RNA, 32 nt, Human
cacaggcccccaggggcauaaugaccagcuag

SEQ ID NO: 79560 - RNA, 32 nt, Human
cacaggcccccgcggcagugcggccgagucga

SEQ ID NO: 79561 - RNA, 32 nt, Human
cacaggcccuccugccugccaagcagcaagug

SEQ ID NO: 79562 - RNA, 21 nt, Human
cacaggcccucugcagaggua

SEQ ID NO: 79563 - RNA, 32 nt, Human
cacaggcccuuagagcaucgccaggugcagag

SEQ ID NO: 79564 - RNA, 32 nt, Human
cacaggccgacucccucucucccucacuuaac

SEQ ID NO: 79565 - RNA, 32 nt, Human
cacaggccucacugcaauuugauaugccugcu

SEQ ID NO: 79566 - RNA, 32 nt, Human
cacaggccuccccuguaacacaacaggacuga

SEQ ID NO: 79567 - RNA, 30 nt, Human
cacaggccucugcuccugcuccugccugca

SEQ ID NO: 79568 - RNA, 32 nt, Human
cacaggccugagccacugugcccagccuuguu

SEQ ID NO: 79569 - RNA, 19 nt, Human
cacaggccugcagcccaug

SEQ ID NO: 79570 - RNA, 32 nt, Human
cacaggccuggcaccucccugccuuguguccu

SEQ ID NO: 79571 - RNA, 32 nt, Human
cacaggccuggccugggggcugugggacuggc

SEQ ID NO: 79572 - RNA, 19 nt, Human
cacaggccugggaacugag

SEQ ID NO: 79573 - RNA, 32 nt, Human
cacaggccuggguggguggguugggggaagug

SEQ ID NO: 79574 - RNA, 23 nt, Human
cacaggccugugaacaagccagg

SEQ ID NO: 79575 - RNA, 20 nt, Human
cacaggccuguggcaaaagg

SEQ ID NO: 79576 - RNA, 22 nt, Human
cacaggccuuguugggcugagg

SEQ ID NO: 79577 - RNA, 32 nt, Human
cacaggcgaggccuggccaaggugugggcgca

SEQ ID NO: 79578 - RNA, 19 nt, Human
cacaggcgccagggcaggg

SEQ ID NO: 79579 - RNA, 23 nt, Human
cacaggcgccccuccugaugcug

SEQ ID NO: 79580 - RNA, 32 nt, Human
cacaggcgggaguucaaaacgaaacugggcuc

SEQ ID NO: 79581 - RNA, 32 nt, Human
cacaggcggggacuaagcuggggacagggcag

SEQ ID NO: 79582 - RNA, 32 nt, Human
cacaggcgggggagagacgaaaaagaaaagga

SEQ ID NO: 79583 - RNA, 32 nt, Human
cacaggcgugagccaaugcgacccgccuggaa

SEQ ID NO: 79584 - RNA, 32 nt, Human
cacaggcgugagccaccacauccagccuaauu

SEQ ID NO: 79585 - RNA, 32 nt, Human
cacaggcgugagccaccacugcuggccaguuu

SEQ ID NO: 79586 - RNA, 32 nt, Human
cacaggcgugagccaccgcacccagccuuuua

SEQ ID NO: 79587 - RNA, 32 nt, Human
cacaggcgugagccaccgcauccggccucaug

SEQ ID NO: 79588 - RNA, 32 nt, Human
cacaggcgugagccaccgugcccggccucccc

SEQ ID NO: 79589 - RNA, 32 nt, Human
cacaggcgugagccacugcacccgaccccuac

SEQ ID NO: 79590 - RNA, 32 nt, Human
cacaggcgugagccacugcgcccagcccacug

SEQ ID NO: 79591 - RNA, 32 nt, Human
cacaggcgugagcuaccaagcccggcccuauc

SEQ ID NO: 79592 - RNA, 32 nt, Human
cacaggcgugagcuaucacaccuggccccaga

SEQ ID NO: 79593 - RNA, 32 nt, Human
cacaggcgugcaccaccaugcauagcuaauuu

SEQ ID NO: 79594 - RNA, 32 nt, Human
cacaggcgugcaccaccaugcccaccuaauuu

SEQ ID NO: 79595 - RNA, 32 nt, Human
cacaggcguucgagaccagccugggcaacaua

SEQ ID NO: 79596 - RNA, 23 nt, Human
cacaggcucgcagcuccgcggcg

SEQ ID NO: 79597 - RNA, 32 nt, Human
cacaggcugacacuaggagcugcucuccuugg

SEQ ID NO: 79598 - RNA, 32 nt, Human
cacaggcugagggacagagcaaagaccccuga

SEQ ID NO: 79599 - RNA, 32 nt, Human
cacaggcugaguccccaaaccugcacuagagg

SEQ ID NO: 79600 - RNA, 32 nt, Human
cacaggcugcggggccuagaaaagaaucucau

SEQ ID NO: 79601 - RNA, 32 nt, Human
cacaggcugggcagaggcacagggcagugcag

SEQ ID NO: 79602 - RNA, 32 nt, Human
cacaggcuggugaaccccggugggaacagagg

SEQ ID NO: 79603 - RNA, 32 nt, Human
cacaggcugucugcagucucaggcuuccuagc

SEQ ID NO: 79604 - RNA, 32 nt, Human
cacaggcuguuggacgcagccuggguggcaga

SEQ ID NO: 79605 - RNA, 32 nt, Human
cacaggcuuuucauguaugcaggaugacucaa

SEQ ID NO: 79606 - RNA, 19 nt, Human
cacagggaagcaacugccu

SEQ ID NO: 79607 - RNA, 32 nt, Human
cacagggacacagggcaagaccagccuugcuu

SEQ ID NO: 79608 - RNA, 26 nt, Human
cacagggaccacaaacauggaggcca

SEQ ID NO: 79609 - RNA, 32 nt, Human
cacagggacccaggcaggguuggguguuguga

SEQ ID NO: 79610 - RNA, 32 nt, Human
cacagggacccugcacucgacccugggggcuc

SEQ ID NO: 79611 - RNA, 32 nt, Human
cacagggaccguuucuccccuaggagcagcgg

SEQ ID NO: 79612 - RNA, 32 nt, Human
cacagggaccucugccccagaaagccugggua

SEQ ID NO: 79613 - RNA, 32 nt, Human
cacagggacgagaugacagugggagccccacg

SEQ ID NO: 79614 - RNA, 22 nt, Human
cacagggagaaaaacugaggua

SEQ ID NO: 79615 - RNA, 32 nt, Human
cacagggagacgggggccuggagccagcccug

SEQ ID NO: 79616 - RNA, 32 nt, Human
cacagggagagacuugaugucuggccuuuuaa

SEQ ID NO: 79617 - RNA, 32 nt, Human
cacagggagagggcaggaagggacaggagcgg

SEQ ID NO: 79618 - RNA, 32 nt, Human
cacagggagaggggcaacaggaggcugggaaa

SEQ ID NO: 79619 - RNA, 32 nt, Human
cacagggagcaugaaccugagaucagaagcau

SEQ ID NO: 79620 - RNA, 32 nt, Human
cacagggagcuccgucagcuucucccaagccc

SEQ ID NO: 79621 - RNA, 32 nt, Human
cacagggaggcagaggcuuggguaaacucauu

SEQ ID NO: 79622 - RNA, 32 nt, Human
cacagggagggaggggagauggaggcccggug

SEQ ID NO: 79623 - RNA, 32 nt, Human
cacagggaggggcggaugcugccaccacccag

SEQ ID NO: 79624 - RNA, 32 nt, Human
cacagggagguggguuggggugaggccacaug

SEQ ID NO: 79625 - RNA, 32 nt, Human
cacagggagucagagcccucugcuccggaauu

SEQ ID NO: 79626 - RNA, 32 nt, Human
cacagggauacuuggcuugggaaaacuaaaua

SEQ ID NO: 79627 - RNA, 32 nt, Human
cacagggauggaaaccucuuccuggacaugcu

SEQ ID NO: 79628 - RNA, 32 nt, Human
cacagggauguugcugaauuucaaucaccgau

SEQ ID NO: 79629 - RNA, 21 nt, Human
cacagggauuuaucaguucca

SEQ ID NO: 79630 - RNA, 32 nt, Human
cacagggauuuguccugggggcugagggcccu

SEQ ID NO: 79631 - RNA, 32 nt, Human
cacagggcaaaguacuaugcucugaguucauu

SEQ ID NO: 79632 - RNA, 32 nt, Human
cacagggcaccugcuggggcucagggauguua

SEQ ID NO: 79633 - RNA, 32 nt, Human
cacagggcacuagaucccuggaguucaggaac

SEQ ID NO: 79634 - RNA, 32 nt, Human
cacagggcagaggcauccauggcuggcgucug

SEQ ID NO: 79635 - RNA, 32 nt, Human
cacagggcagcuuguuaggaaugagaaucuca

SEQ ID NO: 79636 - RNA, 32 nt, Human
cacagggcaggcugaggacacagccacgugau

SEQ ID NO: 79637 - RNA, 32 nt, Human
cacagggcagugagcucugucuucccccaccu

SEQ ID NO: 79638 - RNA, 32 nt, Human
cacagggcauacccuucggugccuggauuccu

SEQ ID NO: 79639 - RNA, 32 nt, Human
cacagggcauuaagccagggccccagaucagg

SEQ ID NO: 79640 - RNA, 22 nt, Human
cacagggccacaccaacacaag

SEQ ID NO: 79641 - RNA, 32 nt, Human
cacagggccacagagcuggagcuggaucuacc

SEQ ID NO: 79642 - RNA, 32 nt, Human
cacagggccaccuucuugcccggcggcugccg

SEQ ID NO: 79643 - RNA, 32 nt, Human
cacagggccucaguuucccuaucugcaaaaug

SEQ ID NO: 79644 - RNA, 22 nt, Human
cacagggccuggccucagcccc

SEQ ID NO: 79645 - RNA, 18 nt, Human
cacagggcucacagggca

SEQ ID NO: 79646 - RNA, 32 nt, Human
cacagggcucugcggaccugcagccaucugug

SEQ ID NO: 79647 - RNA, 19 nt, Human
cacagggcugacccucccc

SEQ ID NO: 79648 - RNA, 24 nt, Human
cacagggcugaggccagccccuag

SEQ ID NO: 79649 - RNA, 23 nt, Human
cacagggcuggaccucacgcaga

SEQ ID NO: 79650 - RNA, 32 nt, Human
cacagggcuggagaagaggagugaggagccuc

SEQ ID NO: 79651 - RNA, 32 nt, Human
cacagggcuggcacagaggaggccuagacaua

SEQ ID NO: 79652 - RNA, 32 nt, Human
cacagggcuguagggacugaugaaaagagaau

SEQ ID NO: 79653 - RNA, 32 nt, Human
cacagggcuucaagacuacaaucccagcaugc

SEQ ID NO: 79654 - RNA, 32 nt, Human
cacagggcuucucugcgggcagccaggcaccu

SEQ ID NO: 79655 - RNA, 32 nt, Human
cacagggcuuucuagcaaggagugacuuucuu

SEQ ID NO: 79656 - RNA, 32 nt, Human
cacaggggaaggucaagucgagcaagguagaa

SEQ ID NO: 79657 - RNA, 32 nt, Human
cacaggggaggcaggggaagaggcaggagggu

SEQ ID NO: 79658 - RNA, 32 nt, Human
cacaggggagugaagcagggcuuggagcagau

SEQ ID NO: 79659 - RNA, 32 nt, Human
cacaggggcagugucacccuggaaaauacagu

SEQ ID NO: 79660 - RNA, 21 nt, Human
cacaggggccaacuagggcca

SEQ ID NO: 79661 - RNA, 21 nt, Human
cacaggggcccugcaaccuca

SEQ ID NO: 79662 - RNA, 21 nt, Human
cacaggggcccugguaggcuc

SEQ ID NO: 79663 - RNA, 20 nt, Human
cacaggggccucccaggcuc

SEQ ID NO: 79664 - RNA, 32 nt, Human
cacaggggccugaggagcucacucugggccua

SEQ ID NO: 79665 - RNA, 22 nt, Human
cacaggggccuggggcaggaag

SEQ ID NO: 79666 - RNA, 32 nt, Human
cacaggggccuggguacuggagggagggauac

SEQ ID NO: 79667 - RNA, 32 nt, Human
cacagggggaugaaggagauggagaggaagga

SEQ ID NO: 79668 - RNA, 18 nt, Human
cacagggggaugagggug

SEQ ID NO: 79669 - RNA, 17 nt, Human
cacagggggcggugggg

SEQ ID NO: 79670 - RNA, 32 nt, Human
cacagggguaaucaucucaagugguauuugua

SEQ ID NO: 79671 - RNA, 32 nt, Human
cacagggguacccaucacacaccagcguuuug

SEQ ID NO: 79672 - RNA, 32 nt, Human
cacaggggugagccaccgcgcccagcccucuc

SEQ ID NO: 79673 - RNA, 32 nt, Human
cacaggguaaggaagagagagugggaggcaga

SEQ ID NO: 79674 - RNA, 32 nt, Human
cacaggguacgcucauggagagagggcgcaga

SEQ ID NO: 79675 - RNA, 32 nt, Human
cacagggucagagaucugucagaggaaaaugg

SEQ ID NO: 79676 - RNA, 22 nt, Human
cacaggguccaagaguucauca

SEQ ID NO: 79677 - RNA, 32 nt, Human
cacagggucccggagagccaggggaaugcuuc

SEQ ID NO: 79678 - RNA, 32 nt, Human
cacagggucugcacucuaacccuaggcaucac

SEQ ID NO: 79679 - RNA, 32 nt, Human
cacagggucugcucuuucucugccagugacag

SEQ ID NO: 79680 - RNA, 32 nt, Human
cacagggugacaggcugggcuggagaaacaga

SEQ ID NO: 79681 - RNA, 32 nt, Human
cacagggugagacagcagggcccaggggagug

SEQ ID NO: 79682 - RNA, 32 nt, Human
cacagggugagagugagccaggaacagcaagg

SEQ ID NO: 79683 - RNA, 32 nt, Human
cacagggugagguaggggguggccacagggau

SEQ ID NO: 79684 - RNA, 32 nt, Human
cacaggguguguggaaagcgcugugggggaag

SEQ ID NO: 79685 - RNA, 32 nt, Human
cacaggguguucugaugcauaaucagagcuga

SEQ ID NO: 79686 - RNA, 32 nt, Human
cacaggguucaagcaauucuccugccucagcc

SEQ ID NO: 79687 - RNA, 32 nt, Human
cacaggguuccuucuccagcugagcuccaagu

SEQ ID NO: 79688 - RNA, 32 nt, Human
cacaggguuucacagucugaugagacugugcc

SEQ ID NO: 79689 - RNA, 32 nt, Human
cacagguacagcaacaggaaucucagagacag

SEQ ID NO: 79690 - RNA, 32 nt, Human
cacaggucacugcagcccugaccuccugggcu

SEQ ID NO: 79691 - RNA, 32 nt, Human
cacaggucccgggguguggaggcuccauccuu

SEQ ID NO: 79692 - RNA, 32 nt, Human
cacaggucucagacugacaggagacuggguca

SEQ ID NO: 79693 - RNA, 17 nt, Human
cacaggucuugcugcuc

SEQ ID NO: 79694 - RNA, 32 nt, Human
cacaggugcaugccaccaugccuggcuaacuu

SEQ ID NO: 79695 - RNA, 24 nt, Human
cacaggugccucacgccuguaauc

SEQ ID NO: 79696 - RNA, 32 nt, Human
cacaggugcgugucaccaugcuuggcuaauuu

SEQ ID NO: 79697 - RNA, 32 nt, Human
cacagguggaagcuccuucacuccagggaugc

SEQ ID NO: 79698 - RNA, 32 nt, Human
cacagguggagggcugcuuccaccccaggugc

SEQ ID NO: 79699 - RNA, 32 nt, Human
cacagguggcagcaggcagcagggaacauuuu

SEQ ID NO: 79700 - RNA, 32 nt, Human
cacagguggccuggguugcuugcacuuggggc

SEQ ID NO: 79701 - RNA, 32 nt, Human
cacagguggccuuggcuccaggccucugacag

SEQ ID NO: 79702 - RNA, 32 nt, Human
cacagguggcgccuugccauuccuggggacca

SEQ ID NO: 79703 - RNA, 32 nt, Human
cacagguggcuccugggcuugggcugcagguu

SEQ ID NO: 79704 - RNA, 32 nt, Human
cacagguggcuucaggccauucacaagagucc

SEQ ID NO: 79705 - RNA, 32 nt, Human
cacaggugggcucugacugccagaucgcaggg

SEQ ID NO: 79706 - RNA, 32 nt, Human
cacaggugugagccaccacaccuggcuaauuu

SEQ ID NO: 79707 - RNA, 32 nt, Human
cacaggugugcaccaccaugcccagcuaauua

SEQ ID NO: 79708 - RNA, 32 nt, Human
cacagguguucaaggccagccugggcaacaua

SEQ ID NO: 79709 - RNA, 21 nt, Human
cacagguguucuccagugcca

SEQ ID NO: 79710 - RNA, 32 nt, Human
cacagguguugaguggggcacaggguacuguc

SEQ ID NO: 79711 - RNA, 20 nt, Human
cacagguucuauuaauucca

SEQ ID NO: 79712 - RNA, 32 nt, Human
cacagguugcagcagagaaacuacucagguau

SEQ ID NO: 79713 - RNA, 32 nt, Human
cacagguugcagcccuggccuucugugaaucc

SEQ ID NO: 79714 - RNA, 19 nt, Human
cacagguugccaaauugcu

SEQ ID NO: 79715 - RNA, 32 nt, Human
cacagguuguacacugcacagcucuaggcuac

SEQ ID NO: 79716 - RNA, 32 nt, Human
cacagguuuaucucccaggcucuguaucuacu

SEQ ID NO: 79717 - RNA, 32 nt, Human
cacagguuugaggaugcuggggagagggggag

SEQ ID NO: 79718 - RNA, 22 nt, Human
cacagguuuuagcauugucuug

SEQ ID NO: 79719 - RNA, 32 nt, Human
cacaguaaucccagcacccaucucuacuaaaa

SEQ ID NO: 79720 - RNA, 32 nt, Human
cacaguaauuuguagagcugagauugaaauuc

SEQ ID NO: 79721 - RNA, 32 nt, Human
cacaguacugaaggccaaucugggcaaggagc

SEQ ID NO: 79722 - RNA, 32 nt, Human
cacaguacugggaaauggaagcacauggcacu

SEQ ID NO: 79723 - RNA, 32 nt, Human
cacaguagcugcacaguuuuaagauuaugcca

SEQ ID NO: 79724 - RNA, 32 nt, Human
cacaguagcuuauaccuguaauccuagcacuu

SEQ ID NO: 79725 - RNA, 32 nt, Human
cacaguaggaaggcuucuuucccauuuaggcu

SEQ ID NO: 79726 - RNA, 32 nt, Human
cacaguaggagauucuuuuucuucucuuuuga

SEQ ID NO: 79727 - RNA, 17 nt, Human
cacaguaggaggggcca

SEQ ID NO: 79728 - RNA, 32 nt, Human
cacaguauaaaauacuacagcacucuguguua

SEQ ID NO: 79729 - RNA, 21 nt, Human
cacaguaugcacucagcccca

SEQ ID NO: 79730 - RNA, 32 nt, Human
cacagucaacacagcaggcuccccggccccgg

SEQ ID NO: 79731 - RNA, 32 nt, Human
cacagucacacagcaggcaguggcaggcagua

SEQ ID NO: 79732 - RNA, 32 nt, Human
cacagucacacagcuaauauaugccagagccc

SEQ ID NO: 79733 - RNA, 32 nt, Human
cacagucacagucacacacacauauguauuac

SEQ ID NO: 79734 - RNA, 32 nt, Human
cacagucacaugccacauuugaucuccuaacc

SEQ ID NO: 79735 - RNA, 32 nt, Human
cacagucacaugcccauucacaccacacagag

SEQ ID NO: 79736 - RNA, 32 nt, Human
cacagucaccaccacgcuggcucugaucuuca

SEQ ID NO: 79737 - RNA, 32 nt, Human
cacagucacccacaggcccccaccucgauacu

SEQ ID NO: 79738 - RNA, 32 nt, Human
cacagucaccugcggcagaggugugcagaggc

SEQ ID NO: 79739 - RNA, 32 nt, Human
cacagucacgccacugcauucuauccugggca

SEQ ID NO: 79740 - RNA, 32 nt, Human
cacagucacucuuugugccucaguuuacccac

SEQ ID NO: 79741 - RNA, 32 nt, Human
cacagucacugcaggcuucagcaacuuaucuu

SEQ ID NO: 79742 - RNA, 32 nt, Human
cacagucacuucugccuguugcucugacacca

SEQ ID NO: 79743 - RNA, 32 nt, Human
cacagucagaacagcagccucuacacauguug

SEQ ID NO: 79744 - RNA, 31 nt, Human
cacagucagauucagcaccugccucagaucu

SEQ ID NO: 79745 - RNA, 32 nt, Human
cacagucagauucagcaccugccucagaucuc

SEQ ID NO: 79746 - RNA, 32 nt, Human
cacagucagcugcagaaguccugcugaccacc

SEQ ID NO: 79747 - RNA, 32 nt, Human
cacagucaggcccgggcccagcgcggccagug

SEQ ID NO: 79748 - RNA, 32 nt, Human
cacaguccacccacccucucucugaucucccc

SEQ ID NO: 79749 - RNA, 32 nt, Human
cacagucccagagggauugaagaguuuuaaaa

SEQ ID NO: 79750 - RNA, 32 nt, Human
cacagucccaggccuccuccacgccuggcucc

SEQ ID NO: 79751 - RNA, 32 nt, Human
cacagucccccagagcccuggcucagacaccu

SEQ ID NO: 79752 - RNA, 32 nt, Human
cacagucccucugggagagcucugccuagucu

SEQ ID NO: 79753 - RNA, 32 nt, Human
cacagucccuggcagagccagagccucuccgc

SEQ ID NO: 79754 - RNA, 32 nt, Human
cacaguccuaucuccucaccaggcccaggagc

SEQ ID NO: 79755 - RNA, 32 nt, Human
cacaguccuccaggaggguccuaaggauaacu

SEQ ID NO: 79756 - RNA, 32 nt, Human
cacaguccuccagguggguccuaaggaucuua

SEQ ID NO: 79757 - RNA, 32 nt, Human
cacaguccucugcugucuccccacuaggauca

SEQ ID NO: 79758 - RNA, 32 nt, Human
cacaguccugcugcugccgcuggggacaagcc

SEQ ID NO: 79759 - RNA, 32 nt, Human
cacaguccugggaaaugggagcauaugcuggg

SEQ ID NO: 79760 - RNA, 32 nt, Human
cacaguccuuaagccacacacauuguugcugc

SEQ ID NO: 79761 - RNA, 32 nt, Human
cacaguccuugcagccuuugauuucuccaguu

SEQ ID NO: 79762 - RNA, 32 nt, Human
cacagucgccaucuuggugacuuugaauuuau

SEQ ID NO: 79763 - RNA, 32 nt, Human
cacagucgcucacaccuguaaucucagcacuu

SEQ ID NO: 79764 - RNA, 32 nt, Human
cacagucguacucugucaccccggcuggagug

SEQ ID NO: 79765 - RNA, 32 nt, Human
cacagucuacaaaaccccacagcuccugagaa

SEQ ID NO: 79766 - RNA, 32 nt, Human
cacagucuacagcagagccacagccagcagua

SEQ ID NO: 79767 - RNA, 32 nt, Human
cacagucucagcucacugcagcuuugaccuug

SEQ ID NO: 79768 - RNA, 32 nt, Human
cacagucucccagaaaugauguuuugaguccc

SEQ ID NO: 79769 - RNA, 32 nt, Human
cacagucuccggccucuccagccucagccccc

SEQ ID NO: 79770 - RNA, 32 nt, Human
cacagucucugacuuugcagggcucacagauu

SEQ ID NO: 79771 - RNA, 32 nt, Human
cacagucugccggccaaagccauuccaacauc

SEQ ID NO: 79772 - RNA, 32 nt, Human
cacagucuggaaagauuucccaauggaggaag

SEQ ID NO: 79773 - RNA, 32 nt, Human
cacagucugggacccguggcggugcuggcaac

SEQ ID NO: 79774 - RNA, 32 nt, Human
cacagucugggcgacagagcaagacccucucu

SEQ ID NO: 79775 - RNA, 32 nt, Human
cacagucuguauacaaauaacaugcaugagga

SEQ ID NO: 79776 - RNA, 32 nt, Human
cacagucugugagugggaagagacuggagugu

SEQ ID NO: 79777 - RNA, 19 nt, Human
cacagucuguucagaggca

SEQ ID NO: 79778 - RNA, 32 nt, Human
cacagucuuguccugcucagagauuucuggcc

SEQ ID NO: 79779 - RNA, 32 nt, Human
cacagugaacaaauccagggagcugauaauug

SEQ ID NO: 79780 - RNA, 32 nt, Human
cacagugaacuccggcguggcugaggaaggag

SEQ ID NO: 79781 - RNA, 32 nt, Human
cacagugaaggagccagcacucagggcucucu

SEQ ID NO: 79782 - RNA, 32 nt, Human
cacagugacagugucauggggagcugggcggg

SEQ ID NO: 79783 - RNA, 32 nt, Human
cacagugaccacacccucacuggcucggcccu

SEQ ID NO: 79784 - RNA, 32 nt, Human
cacagugaccccaucacucgggaccacauggg

SEQ ID NO: 79785 - RNA, 32 nt, Human
cacagugacgugguaucugaugaagaccugau

SEQ ID NO: 79786 - RNA, 23 nt, Human
cacagugacucacaccuguaauc

SEQ ID NO: 79787 - RNA, 32 nt, Human
cacagugacucacaccuguaaucucagcacgu

SEQ ID NO: 79788 - RNA, 32 nt, Human
cacagugacucacaccuguaauuccagcacuu

SEQ ID NO: 79789 - RNA, 23 nt, Human
cacagugacucacgccuguaauc

SEQ ID NO: 79790 - RNA, 32 nt, Human
cacagugacucacgccuguaaucccagcacuu

SEQ ID NO: 79791 - RNA, 32 nt, Human
cacagugacucaugccuguaaucccagcacuu

SEQ ID NO: 79792 - RNA, 32 nt, Human
cacagugacuccacucugagucccagagccaa

SEQ ID NO: 79793 - RNA, 32 nt, Human
cacagugacuccauuuaggaugcugucguuuu

SEQ ID NO: 79794 - RNA, 32 nt, Human
cacagugagaaguaguuccuguccuuaaggaa

SEQ ID NO: 79795 - RNA, 31 nt, Human
cacagugagagacugccucugcuucauagga

SEQ ID NO: 79796 - RNA, 32 nt, Human
cacagugagggugggagcagcggaacagggaa

SEQ ID NO: 79797 - RNA, 32 nt, Human
cacagugauagagaauugcuguggagaguuau

SEQ ID NO: 79798 - RNA, 32 nt, Human
cacagugaucgaugauucaggugcagaggaag

SEQ ID NO: 79799 - RNA, 18 nt, Human
cacagugaugccuacuga

SEQ ID NO: 79800 - RNA, 32 nt, Human
cacagugaugugcucaguugcugugaaaagca

SEQ ID NO: 79801 - RNA, 32 nt, Human
cacagugcacaggucagggcucggagggagcc

SEQ ID NO: 79802 - RNA, 32 nt, Human
cacagugcacugcugcgcgcugggcagugcgg

SEQ ID NO: 79803 - RNA, 18 nt, Human
cacagugcagacacagaa

SEQ ID NO: 79804 - RNA, 28 nt, Human
cacagugcagaggcucagggagcagcag

SEQ ID NO: 79805 - RNA, 21 nt, Human
cacagugcagcagggcugacu

SEQ ID NO: 79806 - RNA, 28 nt, Human
cacagugcagccggcuguggagcagcag

SEQ ID NO: 79807 - RNA, 32 nt, Human
cacagugccggggaggggcgggcaggucacaa

SEQ ID NO: 79808 - RNA, 32 nt, Human
cacagugccuggcccauucuugaguuuugaua

SEQ ID NO: 79809 - RNA, 21 nt, Human
cacagugccugggacagggag

SEQ ID NO: 79810 - RNA, 32 nt, Human
cacagugccuguaaaucucauuuguauuuuca

SEQ ID NO: 79811 - RNA, 28 nt, Human
cacagugcgagaggcuugggaacagcag

SEQ ID NO: 79812 - RNA, 32 nt, Human
cacagugcuccaaaugcacaugaacaacagug

SEQ ID NO: 79813 - RNA, 32 nt, Human
cacagugcugcuaauaucccagcuccagccag

SEQ ID NO: 79814 - RNA, 19 nt, Human
cacagugcuggcugggccc

SEQ ID NO: 79815 - RNA, 32 nt, Human
cacagugcuggcugggccccaaugcaccgucc

SEQ ID NO: 79816 - RNA, 21 nt, Human
cacagugcugggauuacaggc

SEQ ID NO: 79817 - RNA, 23 nt, Human
cacagugcugggauuacaggcau

SEQ ID NO: 79818 - RNA, 32 nt, Human
cacagugcugggauuacaggcaugggccacca

SEQ ID NO: 79819 - RNA, 23 nt, Human
cacagugcugggauuacaggcgu

SEQ ID NO: 79820 - RNA, 23 nt, Human
cacagugcugggauuagaggcau

SEQ ID NO: 79821 - RNA, 32 nt, Human
cacaguggaccggcgcccuagccugggaaucc

SEQ ID NO: 79822 - RNA, 32 nt, Human
cacaguggaccuucugccuccucccagaugcc

SEQ ID NO: 79823 - RNA, 32 nt, Human
cacaguggagagagcacaggacugggagucca

SEQ ID NO: 79824 - RNA, 32 nt, Human
cacaguggagggguguaaggggcaguuuguuu

SEQ ID NO: 79825 - RNA, 32 nt, Human
cacaguggcacacaccuguagucccagcugcu

SEQ ID NO: 79826 - RNA, 32 nt, Human
cacaguggcacaugccuguaaucccagcuacu

SEQ ID NO: 79827 - RNA, 32 nt, Human
cacaguggccaucaguugccagagaacaugaa

SEQ ID NO: 79828 - RNA, 32 nt, Human
cacaguggcccacgccuguaaucccagcacuu

SEQ ID NO: 79829 - RNA, 32 nt, Human
cacaguggcccaugccuauaaucccagcacuu

SEQ ID NO: 79830 - RNA, 23 nt, Human
cacaguggcccaugccuguaauc

SEQ ID NO: 79831 - RNA, 32 nt, Human
cacaguggcccaugccuguaaucccagcacuu

SEQ ID NO: 79832 - RNA, 32 nt, Human
cacaguggcccucagcccuccaccuccggcgg

SEQ ID NO: 79833 - RNA, 32 nt, Human
cacaguggcgcaugccuguaaucccagaacuu

SEQ ID NO: 79834 - RNA, 32 nt, Human
cacaguggcucacacccauaaucccagcacuu

SEQ ID NO: 79835 - RNA, 32 nt, Human
cacaguggcucacaccuaaucccagcacuuug

SEQ ID NO: 79836 - RNA, 32 nt, Human
cacaguggcucacaccuacgaucacagcacuu

SEQ ID NO: 79837 - RNA, 32 nt, Human
cacaguggcucacaccuauaaucccagcacuc

SEQ ID NO: 79838 - RNA, 23 nt, Human
cacaguggcucacaccugcaauc

SEQ ID NO: 79839 - RNA, 32 nt, Human
cacaguggcucacaccugcgaucccaccacuu

SEQ ID NO: 79840 - RNA, 32 nt, Human
cacaguggcucacaccuguaacccuagcacuu

SEQ ID NO: 79841 - RNA, 23 nt, Human
cacaguggcucacaccuguaauc

SEQ ID NO: 79842 - RNA, 32 nt, Human
cacaguggcucacaccuguaaucacagcacuu

SEQ ID NO: 79843 - RNA, 32 nt, Human
cacaguggcucacaccuguaaucccaacacuc

SEQ ID NO: 79844 - RNA, 32 nt, Human
cacaguggcucacaccuguaaucccaauacuu

SEQ ID NO: 79845 - RNA, 32 nt, Human
cacaguggcucacaccuguaaucccagcacua

SEQ ID NO: 79846 - RNA, 32 nt, Human
cacaguggcucacaccuguaaucccagcacuu

SEQ ID NO: 79847 - RNA, 32 nt, Human
cacaguggcucacaccuguaaucccagcgcuu

SEQ ID NO: 79848 - RNA, 32 nt, Human
cacaguggcucacaccuguaaucccaggacuu

SEQ ID NO: 79849 - RNA, 32 nt, Human
cacaguggcucacaccuguaauccgacuguaa

SEQ ID NO: 79850 - RNA, 32 nt, Human
cacaguggcucacaccuguaauccuaacacuu

SEQ ID NO: 79851 - RNA, 32 nt, Human
cacaguggcucacaccuguaauccuagcacuu

SEQ ID NO: 79852 - RNA, 32 nt, Human
cacaguggcucacaccuguaauccuugcauuu

SEQ ID NO: 79853 - RNA, 32 nt, Human
cacaguggcucacaccuguaaucucagcaacc

SEQ ID NO: 79854 - RNA, 32 nt, Human
cacaguggcucacaccuguaaucucagcacuu

SEQ ID NO: 79855 - RNA, 32 nt, Human
cacaguggcucacaccuguaaucugagcauuc

SEQ ID NO: 79856 - RNA, 32 nt, Human
cacaguggcucacaccuguaauuccagcacuu

SEQ ID NO: 79857 - RNA, 32 nt, Human
cacaguggcucacaccuguggucccagcucuu

SEQ ID NO: 79858 - RNA, 32 nt, Human
cacaguggcucacaucuguaaucccagcacuu

SEQ ID NO: 79859 - RNA, 32 nt, Human
cacaguggcucacgccaguaaucccagcacuu

SEQ ID NO: 79860 - RNA, 32 nt, Human
cacaguggcucacgccuauaaucccagcacuu

SEQ ID NO: 79861 - RNA, 32 nt, Human
cacaguggcucacgccuguaauaccagcaccu

SEQ ID NO: 79862 - RNA, 23 nt, Human
cacaguggcucacgccuguaauc

SEQ ID NO: 79863 - RNA, 32 nt, Human
cacaguggcucacgccuguaaucacaacacuu

SEQ ID NO: 79864 - RNA, 32 nt, Human
cacaguggcucacgccuguaaucacagcacuu

SEQ ID NO: 79865 - RNA, 32 nt, Human
cacaguggcucacgccuguaaucccaaagugc

SEQ ID NO: 79866 - RNA, 32 nt, Human
cacaguggcucacgccuguaaucccaacaccu

SEQ ID NO: 79867 - RNA, 32 nt, Human
cacaguggcucacgccuguaaucccaacacuu

SEQ ID NO: 79868 - RNA, 32 nt, Human
cacaguggcucacgccuguaaucccaccacuu

SEQ ID NO: 79869 - RNA, 32 nt, Human
cacaguggcucacgccuguaaucccagcacuu

SEQ ID NO: 79870 - RNA, 32 nt, Human
cacaguggcucacgccuguaauccuagcaguu

SEQ ID NO: 79871 - RNA, 32 nt, Human
cacaguggcucacgccuguaaucucagcacau

SEQ ID NO: 79872 - RNA, 32 nt, Human
cacaguggcucacgccuguaaucucggcacuu

SEQ ID NO: 79873 - RNA, 32 nt, Human
cacaguggcucacgucuguaaucuuugggagc

SEQ ID NO: 79874 - RNA, 23 nt, Human
cacaguggcucauaccuguaauc

SEQ ID NO: 79875 - RNA, 32 nt, Human
cacaguggcucauaccuguaaucccagcaguu

SEQ ID NO: 79876 - RNA, 32 nt, Human
cacaguggcucauaccuguaaugccagcacuu

SEQ ID NO: 79877 - RNA, 32 nt, Human
cacaguggcucaucccuguaauuccagcacuu

SEQ ID NO: 79878 - RNA, 32 nt, Human
cacaguggcucaugccgauaaucccagcaauu

SEQ ID NO: 79879 - RNA, 32 nt, Human
cacaguggcucaugccuauaaucccagcacuu

SEQ ID NO: 79880 - RNA, 32 nt, Human
cacaguggcucaugccuguaaucccaacacuc

SEQ ID NO: 79881 - RNA, 32 nt, Human
cacaguggcucaugccuguaaucccagaacuu

SEQ ID NO: 79882 - RNA, 32 nt, Human
cacaguggcucaugccuguaaucccagaauuu

SEQ ID NO: 79883 - RNA, 32 nt, Human
cacaguggcucaugccuguaaucccagcacuu

SEQ ID NO: 79884 - RNA, 32 nt, Human
cacaguggcucaugccuguaaucccagcauuu

SEQ ID NO: 79885 - RNA, 32 nt, Human
cacaguggcucaugccuguaauccuaacacuu

SEQ ID NO: 79886 - RNA, 32 nt, Human
cacaguggcucaugccuguaauccuagcacuu

SEQ ID NO: 79887 - RNA, 32 nt, Human
cacaguggcucaugccuguaaucucaacacuu

SEQ ID NO: 79888 - RNA, 32 nt, Human
cacaguggcucaugucugcaaucccagcgauu

SEQ ID NO: 79889 - RNA, 32 nt, Human
cacaguggcucauguuuguaaucccagcacuu

SEQ ID NO: 79890 - RNA, 32 nt, Human
cacaguggcucccgccuguaaucccauuacuu

SEQ ID NO: 79891 - RNA, 32 nt, Human
cacaguggcucuugucuguaaucccagcgcuc

SEQ ID NO: 79892 - RNA, 23 nt, Human
cacaguggcuuacaccuguaauc

SEQ ID NO: 79893 - RNA, 32 nt, Human
cacaguggcuuacaccuguaaucccaaugcuu

SEQ ID NO: 79894 - RNA, 32 nt, Human
cacaguggcuuacgccuguaaucccagcacuu

SEQ ID NO: 79895 - RNA, 32 nt, Human
cacaguggcuuaugccuguaaucccagcacuu

SEQ ID NO: 79896 - RNA, 32 nt, Human
cacaguggcuuaugccuguaauugcagcacuu

SEQ ID NO: 79897 - RNA, 32 nt, Human
cacaguggcuugcaccuguaaucccagcacuu

SEQ ID NO: 79898 - RNA, 32 nt, Human
cacaguggcuugugccuguaaucccagaacuu

SEQ ID NO: 79899 - RNA, 22 nt, Human
cacagugggacucaggcccggg

SEQ ID NO: 79900 - RNA, 32 nt, Human
cacagugggagagguuucaccaccgcauucug

SEQ ID NO: 79901 - RNA, 32 nt, Human
cacagugggagccagacugaauauagcgacau

SEQ ID NO: 79902 - RNA, 32 nt, Human
cacagugggaggaucgcuugagcccagaaggc

SEQ ID NO: 79903 - RNA, 32 nt, Human
cacagugggaggauugcuugagcccgggaguu

SEQ ID NO: 79904 - RNA, 32 nt, Human
cacagugggagguggugguggguggcgguggc

SEQ ID NO: 79905 - RNA, 32 nt, Human
cacagugggcaugcuauccacccuccgccccu

SEQ ID NO: 79906 - RNA, 32 nt, Human
cacagugggcucuccaggcccaccucuuccuc

SEQ ID NO: 79907 - RNA, 32 nt, Human
cacagugggcucuccaggcccaccucuuucuc

SEQ ID NO: 79908 - RNA, 32 nt, Human
cacaguggggaaggugucaauggggaguguca

SEQ ID NO: 79909 - RNA, 32 nt, Human
cacagugggucacaccuguaaucccagcacgu

SEQ ID NO: 79910 - RNA, 32 nt, Human
cacagugggugaggagauggggacaggugaau

SEQ ID NO: 79911 - RNA, 32 nt, Human
cacagugggugucugaaaggacagaucacucc

SEQ ID NO: 79912 - RNA, 32 nt, Human
cacaguggguuagccuggagaaaaugagaggc

SEQ ID NO: 79913 - RNA, 32 nt, Human
cacagugguacaugccuguaaucccagcuacu

SEQ ID NO: 79914 - RNA, 32 nt, Human
cacaguggucaagggugcagcucugcagcaca

SEQ ID NO: 79915 - RNA, 32 nt, Human
cacaguggucccauuuauaucugcuucuagcu

SEQ ID NO: 79916 - RNA, 23 nt, Human
cacagugguucacaccuguaauc

SEQ ID NO: 79917 - RNA, 32 nt, Human
cacagugguucacaccuguaaucccagcacuu

SEQ ID NO: 79918 - RNA, 32 nt, Human
cacagugguucacauuuguaaucccagcacuu

SEQ ID NO: 79919 - RNA, 32 nt, Human
cacagugguucacgccuguaauccagcacugu

SEQ ID NO: 79920 - RNA, 32 nt, Human
cacagugguucacgccuguaaucccaauacuu

SEQ ID NO: 79921 - RNA, 32 nt, Human
cacagugguuuaugccuguaaucccagcacug

SEQ ID NO: 79922 - RNA, 32 nt, Human
cacagugucccaggacccugcggugcaguaga

SEQ ID NO: 79923 - RNA, 32 nt, Human
cacagugucucaugccucuaaucccagcacuu

SEQ ID NO: 79924 - RNA, 32 nt, Human
cacagugugaaacccgcacccuagccaggccc

SEQ ID NO: 79925 - RNA, 32 nt, Human
cacaguguggcacccacccaagguuuccaugc

SEQ ID NO: 79926 - RNA, 32 nt, Human
cacaguguucugacacauuugaguguccaaaa

SEQ ID NO: 79927 - RNA, 32 nt, Human
cacaguguugcccaggcuggucucaaacuccu

SEQ ID NO: 79928 - RNA, 20 nt, Human
cacaguguuugucuuccaca

SEQ ID NO: 79929 - RNA, 31 nt, Human
cacaguuaaaucaaauaccuuugaacaaguu

SEQ ID NO: 79930 - RNA, 31 nt, Human
cacaguuacuuauggagcaccaaagcauuug

SEQ ID NO: 79931 - RNA, 32 nt, Human
cacaguuaugccgcuagauacaugcuuuuuaa

SEQ ID NO: 79932 - RNA, 32 nt, Human
cacaguucagccaggacugaccacagggcucu

SEQ ID NO: 79933 - RNA, 32 nt, Human
cacaguuccugagaaugaacagguaauuucau

SEQ ID NO: 79934 - RNA, 32 nt, Human
cacaguuccugggaacaucacauuccucugcc

SEQ ID NO: 79935 - RNA, 32 nt, Human
cacaguucucacuuaacuggugcuaugugaaa

SEQ ID NO: 79936 - RNA, 32 nt, Human
cacaguucucacuuaacuggugcuaugugaag

SEQ ID NO: 79937 - RNA, 32 nt, Human
cacaguucuccaagcaucgugauagcaaugcu

SEQ ID NO: 79938 - RNA, 32 nt, Human
cacaguucugcaggauguacaggaagcauagu

SEQ ID NO: 79939 - RNA, 31 nt, Human
cacaguugcguggaaaggaaguggaguggac

SEQ ID NO: 79940 - RNA, 32 nt, Human
cacaguuggccaccaccaucucuagaugggaa

SEQ ID NO: 79941 - RNA, 32 nt, Human
cacaguugggggcuggcuucugagggauuccu

SEQ ID NO: 79942 - RNA, 32 nt, Human
cacaguuguauagguucuuccacagccuucuc

SEQ ID NO: 79943 - RNA, 32 nt, Human
cacaguugucccauugaauuauuugagcaaaa

SEQ ID NO: 79944 - RNA, 21 nt, Human
cacaguuguuaccacaagaca

SEQ ID NO: 79945 - RNA, 32 nt, Human
cacaguuuccacccucaccugcccccucauac

SEQ ID NO: 79946 - RNA, 32 nt, Human
cacaguuuccucaucccuucaccuguggaugg

SEQ ID NO: 79947 - RNA, 32 nt, Human
cacaguuugauuaucacauucacuuuauuaau

SEQ ID NO: 79948 - RNA, 32 nt, Human
cacaguuuguaacaagaaaacagucucuccca

SEQ ID NO: 79949 - RNA, 19 nt, Human
cacaguuuguagcaaggca

SEQ ID NO: 79950 - RNA, 32 nt, Human
cacauaaacaucucaaagggacagaggacaga

SEQ ID NO: 79951 - RNA, 32 nt, Human
cacauaaauaguuauaucaaugucagccuauu

SEQ ID NO: 79952 - RNA, 32 nt, Human
cacauaaaugucccccugagaaaccaauccca

SEQ ID NO: 79953 - RNA, 32 nt, Human
cacauaaccaguagcuacuauacuaaucuggu

SEQ ID NO: 79954 - RNA, 32 nt, Human
cacauaaccccuccugugcuugaguguccaug

SEQ ID NO: 79955 - RNA, 32 nt, Human
cacauaaccucugggugcuggaaauggaguau

SEQ ID NO: 79956 - RNA, 32 nt, Human
cacauaacucacaaucuuccugcacucaacuu

SEQ ID NO: 79957 - RNA, 32 nt, Human
cacauaacucgagacagggacagcgggaggcu

SEQ ID NO: 79958 - RNA, 32 nt, Human
cacauaacuugucacuuuaaucuuuuucacug

SEQ ID NO: 79959 - RNA, 32 nt, Human
cacauaagccuggcaagccaaggauguucccg

SEQ ID NO: 79960 - RNA, 32 nt, Human
cacauaaugaaagcagucucucacccggcuau

SEQ ID NO: 79961 - RNA, 32 nt, Human
cacauaaugaaugcuauugaaaagguuaacag

SEQ ID NO: 79962 - RNA, 32 nt, Human
cacauaauucaugcuggacaaaaauccuacaa

SEQ ID NO: 79963 - RNA, 32 nt, Human
cacauaauuuuuguacaucccaaaggaugaga

SEQ ID NO: 79964 - RNA, 32 nt, Human
cacauacaaaaauaugaacauggcugggcgcg

SEQ ID NO: 79965 - RNA, 32 nt, Human
cacauacacaacaacauagggaguuguaugac

SEQ ID NO: 79966 - RNA, 32 nt, Human
cacauacacacacaaacauacauguauguaua

SEQ ID NO: 79967 - RNA, 28 nt, Human
cacauacacacacgcauuaauuuuugua

SEQ ID NO: 79968 - RNA, 21 nt, Human
cacauacacacacgugcaugu

SEQ ID NO: 79969 - RNA, 22 nt, Human
cacauacacacacgugcaugua

SEQ ID NO: 79970 - RNA, 18 nt, Human
cacauacacacauaugca

SEQ ID NO: 79971 - RNA, 20 nt, Human
cacauacacacauaugucau

SEQ ID NO: 79972 - RNA, 20 nt, Human
cacauacacacaugcgugca

SEQ ID NO: 79973 - RNA, 20 nt, Human
cacauacacacgcaucugua

SEQ ID NO: 79974 - RNA, 32 nt, Human
cacauacacacgcaucuguacacacaugcaug

SEQ ID NO: 79975 - RNA, 32 nt, Human
cacauacacacucggucucacacucaccugug

SEQ ID NO: 79976 - RNA, 20 nt, Human
cacauacacacugucaugca

SEQ ID NO: 79977 - RNA, 32 nt, Human
cacauacacagcaauugcucgacugugucaau

SEQ ID NO: 79978 - RNA, 32 nt, Human
cacauacacaggcacacaugcaugcacacaua

SEQ ID NO: 79979 - RNA, 25 nt, Human
cacauacacauauauuaugcaugug

SEQ ID NO: 79980 - RNA, 32 nt, Human
cacauacacaugcacacacacaugcacacaua

SEQ ID NO: 79981 - RNA, 18 nt, Human
cacauacacaugcaugca

SEQ ID NO: 79982 - RNA, 32 nt, Human
cacauacacaugcaugcacacauacacaggca

SEQ ID NO: 79983 - RNA, 32 nt, Human
cacauacacaugcaugugcacacacaaaccuc

SEQ ID NO: 79984 - RNA, 18 nt, Human
cacauacacgcacaugca

SEQ ID NO: 79985 - RNA, 32 nt, Human
cacauacacgcgcauacauacauauacagaga

SEQ ID NO: 79986 - RNA, 32 nt, Human
cacauacacgugcacacauacacaggcacaca

SEQ ID NO: 79987 - RNA, 20 nt, Human
cacauacagaaagaagcagu

SEQ ID NO: 79988 - RNA, 32 nt, Human
cacauacagaagcaggguggaggggaagggug

SEQ ID NO: 79989 - RNA, 32 nt, Human
cacauacagaauacuuacuauguuccaagcaa

SEQ ID NO: 79990 - RNA, 26 nt, Human
cacauacagacacacacauauaugua

SEQ ID NO: 79991 - RNA, 32 nt, Human
cacauacagacacacacauauauguacagaca

SEQ ID NO: 79992 - RNA, 32 nt, Human
cacauacaggugaaacauuaagccacaaauaa

SEQ ID NO: 79993 - RNA, 32 nt, Human
cacauacauaaauauaccacauauacaccuga

SEQ ID NO: 79994 - RNA, 32 nt, Human
cacauacauacacacauacaaaaccuuuaaau

SEQ ID NO: 79995 - RNA, 32 nt, Human
cacauacauacacauacauacauacauacaua

SEQ ID NO: 79996 - RNA, 18 nt, Human
cacauacauacacaugca

SEQ ID NO: 79997 - RNA, 18 nt, Human
cacauacauacauaugca

SEQ ID NO: 79998 - RNA, 19 nt, Human
cacauacauacauauguau

SEQ ID NO: 79999 - RNA, 32 nt, Human
cacauacauaugcacacaggcacacauggcaa

SEQ ID NO: 80000 - RNA, 32 nt, Human
cacauacauaugcacgcacacacacaugcaca

SEQ ID NO: 80001 - RNA, 32 nt, Human
cacauacaugcccacacauagugacaugcuca

SEQ ID NO: 80002 - RNA, 32 nt, Human
cacauacauggccaaaugcaauacugaagaga

SEQ ID NO: 80003 - RNA, 32 nt, Human
cacauaccacaucuucucacuuauagauggua

SEQ ID NO: 80004 - RNA, 32 nt, Human
cacauaccacaucuucuuacuuauagauggga

SEQ ID NO: 80005 - RNA, 32 nt, Human
cacauaccagcuguuuuucagucuccugcuca

SEQ ID NO: 80006 - RNA, 32 nt, Human
cacauaccucauucuuccuggacucaggacaa

SEQ ID NO: 80007 - RNA, 32 nt, Human
cacauaccuguaaucccagcuacuuggaauug

SEQ ID NO: 80008 - RNA, 32 nt, Human
cacauaccuguaaucccagcuacuuugguggc

SEQ ID NO: 80009 - RNA, 32 nt, Human
cacauacguuugcguauauguuauuuuaaaca

SEQ ID NO: 80010 - RNA, 32 nt, Human
cacauacucauucaaagaaguccuaggaaaua

SEQ ID NO: 80011 - RNA, 32 nt, Human
cacauacucccauaguguccuagguccagccg

SEQ ID NO: 80012 - RNA, 32 nt, Human
cacauacuccugggccagaggcuauaaaaccc

SEQ ID NO: 80013 - RNA, 32 nt, Human
cacauacucgucaucgcaucacuugggagaau

SEQ ID NO: 80014 - RNA, 32 nt, Human
cacauacucucaaggccaguagacucacccca

SEQ ID NO: 80015 - RNA, 23 nt, Human
cacauacugaaugcauauaugua

SEQ ID NO: 80016 - RNA, 32 nt, Human
cacauacugacagaugguaucugccagucucu

SEQ ID NO: 80017 - RNA, 32 nt, Human
cacauacuuaccaagcaaaaagcccaugaaaa

SEQ ID NO: 80018 - RNA, 20 nt, Human
cacauacuugguuucuggga

SEQ ID NO: 80019 - RNA, 32 nt, Human
cacauagaagcuguccuugagcuguccuaugg

SEQ ID NO: 80020 - RNA, 32 nt, Human
cacauagagauuggcuuuugucacucagcaca

SEQ ID NO: 80021 - RNA, 31 nt, Human
cacauagaggagagagaaaauggcugaguua

SEQ ID NO: 80022 - RNA, 32 nt, Human
cacauagagggugagaggggagagcuggacaa

SEQ ID NO: 80023 - RNA, 24 nt, Human
cacauagaucugcuuuguguuuuu

SEQ ID NO: 80024 - RNA, 32 nt, Human
cacauagaugucccuuucuuggccaguuaucc

SEQ ID NO: 80025 - RNA, 32 nt, Human
cacauagcacagccaccauccucaacccucga

SEQ ID NO: 80026 - RNA, 31 nt, Human
cacauagcacuuuuuauagcuuguagacucu

SEQ ID NO: 80027 - RNA, 32 nt, Human
cacauagcagagcucacucaguucucacagua

SEQ ID NO: 80028 - RNA, 32 nt, Human
cacauagcagagggacccugggccaggcccac

SEQ ID NO: 80029 - RNA, 32 nt, Human
cacauagcucucaccuccucuggccuuuuugc

SEQ ID NO: 80030 - RNA, 32 nt, Human
cacauaggcaguagccuccuccugggcuccag

SEQ ID NO: 80031 - RNA, 32 nt, Human
cacauagggaaacugaggcucagggguguuaa

SEQ ID NO: 80032 - RNA, 32 nt, Human
cacauaggggucugaaguugaaagaauacgac

SEQ ID NO: 80033 - RNA, 32 nt, Human
cacauaggugcacacauugucugcccagagag

SEQ ID NO: 80034 - RNA, 32 nt, Human
cacauaguauauguacauauuucuggcauaua

SEQ ID NO: 80035 - RNA, 32 nt, Human
cacauagucauugucccuuacugccagaccca

SEQ ID NO: 80036 - RNA, 32 nt, Human
cacauagugcuuuuuccugaaaagcuggacug

SEQ ID NO: 80037 - RNA, 32 nt, Human
cacauaguguuaggaaaacauuccuguguuuu

SEQ ID NO: 80038 - RNA, 24 nt, Human
cacauaguuuuuauuuuugugucu

SEQ ID NO: 80039 - RNA, 32 nt, Human
cacauauauaguuucauuuaaucauuucaaag

SEQ ID NO: 80040 - RNA, 32 nt, Human
cacauauaugauacaaaugcuuucaggcugcu

SEQ ID NO: 80041 - RNA, 32 nt, Human
cacauaucauuugaucuuuucaugucagcgag

SEQ ID NO: 80042 - RNA, 32 nt, Human
cacauaucauuuuaagaagcugaggaucacua

SEQ ID NO: 80043 - RNA, 32 nt, Human
cacauaugcagggaguauugcacugagaucuu

SEQ ID NO: 80044 - RNA, 18 nt, Human
cacccuucacucauugaa

SEQ ID NO: 80045 - RNA, 32 nt, Human
cacccuucagcagcgaccuccacucccgccac

SEQ ID NO: 80046 - RNA, 32 nt, Human
cacccuucauucuucuaaccagcccugacauu

SEQ ID NO: 80047 - RNA, 32 nt, Human
cacccuuccagccuuccaggcuuugggggcca

SEQ ID NO: 80048 - RNA, 32 nt, Human
cacccuucccagagccagggagcccuuagccu

SEQ ID NO: 80049 - RNA, 18 nt, Human
cacccuucccagcucuca

SEQ ID NO: 80050 - RNA, 32 nt, Human
cacccuuccccacucccugguccccgggagca

SEQ ID NO: 80051 - RNA, 21 nt, Human
cacccuucccuccuucugcca

SEQ ID NO: 80052 - RNA, 32 nt, Human
cacccuucccuucuucccuccaccccaaagaa

SEQ ID NO: 80053 - RNA, 32 nt, Human
cacccuuccuaaguccgcuucuggucuccggg

SEQ ID NO: 80054 - RNA, 32 nt, Human
cacccuuccuccugcgacagagcccaagaaga

SEQ ID NO: 80055 - RNA, 32 nt, Human
cacccuuccugccucaugucucaaggcagcag

SEQ ID NO: 80056 - RNA, 32 nt, Human
cacccuuccugccuccugccccacucaggguu

SEQ ID NO: 80057 - RNA, 32 nt, Human
cacccuucggcccccaagcuucccaggggcuu

SEQ ID NO: 80058 - RNA, 32 nt, Human
cacccuucuccccuccuucuucuucuuuuaac

SEQ ID NO: 80059 - RNA, 32 nt, Human
cacccuugaagucaucucaagaacaaaagaca

SEQ ID NO: 80060 - RNA, 32 nt, Human
cacccuugagaauccuuccucuccuuggaacg

SEQ ID NO: 80061 - RNA, 32 nt, Human
cacccuugcacauuuuguuacugugaaggacu

SEQ ID NO: 80062 - RNA, 32 nt, Human
cacccuugcaucuucugcuacagacugcuuuu

SEQ ID NO: 80063 - RNA, 32 nt, Human
cacccuugccacugccccagggcaugucucua

SEQ ID NO: 80064 - RNA, 32 nt, Human
cacccuugccccaucccucccacacacaggac

SEQ ID NO: 80065 - RNA, 32 nt, Human
cacccuugcugcaggcuagggagcugcagucc

SEQ ID NO: 80066 - RNA, 32 nt, Human
cacccuugcuguucuucucaaucucuugcucu

SEQ ID NO: 80067 - RNA, 32 nt, Human
cacccuugggggagcaugaugggcaggugagg

SEQ ID NO: 80068 - RNA, 32 nt, Human
cacccuuuccaaugcaucuucuacccugcuac

SEQ ID NO: 80069 - RNA, 19 nt, Human
cacccuuuccccaucaugg

SEQ ID NO: 80070 - RNA, 32 nt, Human
cacccuuucugaaagcaaacagugcugcucuu

SEQ ID NO: 80071 - RNA, 32 nt, Human
cacccuuugccacccagccuacccccgggagc

SEQ ID NO: 80072 - RNA, 23 nt, Human
cacccuuugucucccccuaccca

SEQ ID NO: 80073 - RNA, 32 nt, Human
caccgaagcugcccucaccccuccaucagggc

SEQ ID NO: 80074 - RNA, 32 nt, Human
caccgaaggaagcaucccagacaccgggaaga

SEQ ID NO: 80075 - RNA, 21 nt, Human
caccgaaguucaggacuccuc

SEQ ID NO: 80076 - RNA, 32 nt, Human
caccgaauccuucugucuucauggccugcugu

SEQ ID NO: 80077 - RNA, 32 nt, Human
caccgaaucuguacuaaggaccuguguucagc

SEQ ID NO: 80078 - RNA, 32 nt, Human
caccgacaauuuagaaacagaaaaacugugug

SEQ ID NO: 80079 - RNA, 32 nt, Human
caccgacacaaacuggagaauggucuggcugc

SEQ ID NO: 80080 - RNA, 32 nt, Human
caccgacacaggcacauguacaugcacaggug

SEQ ID NO: 80081 - RNA, 32 nt, Human
caccgacacugagggcuccuagccgcagcaga

SEQ ID NO: 80082 - RNA, 32 nt, Human
caccgaccucaaccccaacaagacccugcugc

SEQ ID NO: 80083 - RNA, 32 nt, Human
caccgaccuccccugaucucccuccucccacc

SEQ ID NO: 80084 - RNA, 32 nt, Human
caccgaccugcccaggaaugcaucacauuguu

SEQ ID NO: 80085 - RNA, 32 nt, Human
caccgacgcccaggacccuggccugcagagac

SEQ ID NO: 80086 - RNA, 32 nt, Human
caccgacgcggagcgaccagcccagccagacc

SEQ ID NO: 80087 - RNA, 32 nt, Human
caccgacucaccacagcccuucccagaccugg

SEQ ID NO: 80088 - RNA, 26 nt, Human
caccgacuugcuguguggaccuggga

SEQ ID NO: 80089 - RNA, 17 nt, Human
caccgagaagaggcggc

SEQ ID NO: 80090 - RNA, 32 nt, Human
caccgagaaguuaaggaacuugcucaagguca

SEQ ID NO: 80091 - RNA, 32 nt, Human
caccgagaggcaggucaagaucugguuccaga

SEQ ID NO: 80092 - RNA, 24 nt, Human
caccgagagggcuggagugcagug

SEQ ID NO: 80093 - RNA, 32 nt, Human
caccgagaucagccgcaagauccggagugcca

SEQ ID NO: 80094 - RNA, 32 nt, Human
caccgagcagaacagaccagagcccaccacac

SEQ ID NO: 80095 - RNA, 32 nt, Human
caccgagccacuggccaugcacaugggcgggg

SEQ ID NO: 80096 - RNA, 32 nt, Human
caccgagcccggcaaaugcgcacgaccuacau

SEQ ID NO: 80097 - RNA, 32 nt, Human
caccgagcccuccagcccccuugucuuggaag

SEQ ID NO: 80098 - RNA, 32 nt, Human
caccgagcggcuccgucuucugcuccucagag

SEQ ID NO: 80099 - RNA, 32 nt, Human
caccgagcuccggggccccacacccgcuacgg

SEQ ID NO: 80100 - RNA, 32 nt, Human
caccgaggaauguuuucaggcacuuuuuauua

SEQ ID NO: 80101 - RNA, 32 nt, Human
caccgaggcaccccucaggccugguggccacu

SEQ ID NO: 80102 - RNA, 32 nt, Human
caccgagggaggccucacaaaccacaggacgc

SEQ ID NO: 80103 - RNA, 32 nt, Human
caccgagggagguggagcuucaggaugccugc

SEQ ID NO: 80104 - RNA, 32 nt, Human
caccgaggugugccacccagcaggugcuggag

SEQ ID NO: 80105 - RNA, 32 nt, Human
caccgaguuaaaucuggcucuguuauauuuuu

SEQ ID NO: 80106 - RNA, 22 nt, Human
caccgaucacaggcuggcccag

SEQ ID NO: 80107 - RNA, 32 nt, Human
caccgaugugcgcacacacagauaugcacaca

SEQ ID NO: 80108 - RNA, 32 nt, Human
caccgauuuauggugcugacaucaguggcucc

SEQ ID NO: 80109 - RNA, 21 nt, Human
caccgcaaccucauccccuca

SEQ ID NO: 80110 - RNA, 25 nt, Human
caccgcaaccuccaccuuccugguu

SEQ ID NO: 80111 - RNA, 24 nt, Human
caccgcaaccucugcuuccuggcu

SEQ ID NO: 80112 - RNA, 32 nt, Human
caccgcaccaggcugcaagauguuuaagaaug

SEQ ID NO: 80113 - RNA, 32 nt, Human
caccgcacccagccagggggaauguucuauaa

SEQ ID NO: 80114 - RNA, 32 nt, Human
caccgcaccuggccagaccgcuucacuuguaa

SEQ ID NO: 80115 - RNA, 32 nt, Human
caccgcaccuggcuaauuuuuguauuuuuagu

SEQ ID NO: 80116 - RNA, 32 nt, Human
caccgcacgaccucacugaguccucacaacaa

SEQ ID NO: 80117 - RNA, 21 nt, Human
caccgcacuccagccugggca

SEQ ID NO: 80118 - RNA, 32 nt, Human
caccgcacugucugccccaaugucuaacaaag

SEQ ID NO: 80119 - RNA, 32 nt, Human
caccgcagacaggaccaggggauuuccaugau

SEQ ID NO: 80120 - RNA, 20 nt, Human
caccgcagaccacuagccca

SEQ ID NO: 80121 - RNA, 20 nt, Human
caccgcagagaagcugagcc

SEQ ID NO: 80122 - RNA, 20 nt, Human
caccgcagcccccuguggcu

SEQ ID NO: 80123 - RNA, 32 nt, Human
caccgcagcuacuccccuuucuuccaaacuuu

SEQ ID NO: 80124 - RNA, 32 nt, Human
caccgcagcuagugggccuggcugggggugca

SEQ ID NO: 80125 - RNA, 32 nt, Human
caccgcagcucgcggaggaucuucccgagccu

SEQ ID NO: 80126 - RNA, 32 nt, Human
caccgcagcucucagacgggcacugaaccugg

SEQ ID NO: 80127 - RNA, 21 nt, Human
caccgcaggagagggcaccug

SEQ ID NO: 80128 - RNA, 31 nt, Human
caccgcaggcacuucugaguaccauuccaug

SEQ ID NO: 80129 - RNA, 32 nt, Human
caccgcaggcagcaguuugcauuuugaaaggu

SEQ ID NO: 80130 - RNA, 32 nt, Human
caccgcaggcagcaguuugcguuuugaaaggu

SEQ ID NO: 80131 - RNA, 32 nt, Human
caccgcagggaucaccugaaguagaggaucuc

SEQ ID NO: 80132 - RNA, 32 nt, Human
caccgcagucaauuuuccgggauugggauaga

SEQ ID NO: 80133 - RNA, 32 nt, Human
caccgcagucaccaccacccgaaaugccacgu

SEQ ID NO: 80134 - RNA, 32 nt, Human
caccgcaugaguugaaucaaaauuuucagauc

SEQ ID NO: 80135 - RNA, 32 nt, Human
caccgcauuccaccugcaucccccacaucacc

SEQ ID NO: 80136 - RNA, 22 nt, Human
caccgcauugaccuccuuggcu

SEQ ID NO: 80137 - RNA, 32 nt, Human
caccgccaacccccugccccaggagcgggccu

SEQ ID NO: 80138 - RNA, 32 nt, Human
caccgccacaaggaggcagggaagaaacccac

SEQ ID NO: 80139 - RNA, 32 nt, Human
caccgccacaugcagucaucaucauguuacuu

SEQ ID NO: 80140 - RNA, 32 nt, Human
caccgccaccgccaccaccgccaccaccacca

SEQ ID NO: 80141 - RNA, 32 nt, Human
caccgccaccgccgccgccaccaggaaggcgg

SEQ ID NO: 80142 - RNA, 32 nt, Human
caccgccaccugcaccugggccuuuuccccaa

SEQ ID NO: 80143 - RNA, 32 nt, Human
caccgccagcaaccugcggccccggagaaggc

SEQ ID NO: 80144 - RNA, 32 nt, Human
caccgccagcaaccugcgggccccggagaagc

SEQ ID NO: 80145 - RNA, 32 nt, Human
caccgccagcaaccuguacggccuggacagga

SEQ ID NO: 80146 - RNA, 18 nt, Human
caccgccagcaagcccag

SEQ ID NO: 80147 - RNA, 32 nt, Human
caccgccagcagcugcuccuccagccacaccc

SEQ ID NO: 80148 - RNA, 32 nt, Human
caccgccagugcugcagagaucaaagaaaucc

SEQ ID NO: 80149 - RNA, 32 nt, Human
caccgccauccuucaccucucccucagccuca

SEQ ID NO: 80150 - RNA, 32 nt, Human
caccgcccagaaccuggcgggugaggucuccu

SEQ ID NO: 80151 - RNA, 19 nt, Human
caccgccccgcccgccguu

SEQ ID NO: 80152 - RNA, 32 nt, Human
caccgccccugccugugcucugccucgggcca

SEQ ID NO: 80153 - RNA, 18 nt, Human
caccgcccugagggcggc

SEQ ID NO: 80154 - RNA, 32 nt, Human
caccgcccugcacccuccacccggccaggccc

SEQ ID NO: 80155 - RNA, 32 nt, Human
caccgcccugcucuuccuaaggggccaggaag

SEQ ID NO: 80156 - RNA, 32 nt, Human
caccgccgagggcuggagcucgccgcccccau

SEQ ID NO: 80157 - RNA, 32 nt, Human
caccgccgccgccgccgccacagccauggccg

SEQ ID NO: 80158 - RNA, 32 nt, Human
caccgccgggucccccggggcugcaguagcag

SEQ ID NO: 80159 - RNA, 32 nt, Human
caccgccuauccugagaacacagucagugagg

SEQ ID NO: 80160 - RNA, 32 nt, Human
caccgccucaacuuguucacauggcauaaaug

SEQ ID NO: 80161 - RNA, 21 nt, Human
caccgccucaccugugucucc

SEQ ID NO: 80162 - RNA, 32 nt, Human
caccgccuccagcuaauuuuuguauuuuuagu

SEQ ID NO: 80163 - RNA, 32 nt, Human
caccgccucccagcgccugccugcuggggcug

SEQ ID NO: 80164 - RNA, 32 nt, Human
caccgccucccaggacaccaaccaugcccuuu

SEQ ID NO: 80165 - RNA, 19 nt, Human
caccgccuccccugccacc

SEQ ID NO: 80166 - RNA, 32 nt, Human
caccgccuccugccucucuccucucuccccag

SEQ ID NO: 80167 - RNA, 21 nt, Human
caccgccuccuucccagcccc

SEQ ID NO: 80168 - RNA, 32 nt, Human
caccgccucucauccucaugaugucccauggu

SEQ ID NO: 80169 - RNA, 32 nt, Human
caccgccugcggcugccugggcuggggcucgc

SEQ ID NO: 80170 - RNA, 32 nt, Human
caccgccugcuguugcccuccucucucggugg

SEQ ID NO: 80171 - RNA, 32 nt, Human
caccgccuggcguucgcuuguggcaguuacua

SEQ ID NO: 80172 - RNA, 21 nt, Human
caccgccuuccucacuccaua

SEQ ID NO: 80173 - RNA, 32 nt, Human
caccgccuugcacauacagaggcuccaggcug

SEQ ID NO: 80174 - RNA, 32 nt, Human
caccgcgaccggcccugcuguugcuucugagg

SEQ ID NO: 80175 - RNA, 32 nt, Human
caccgcgagaugguccccgagcuccccgagag

SEQ ID NO: 80176 - RNA, 32 nt, Human
caccgcgcaagggccccugccucccgggagac

SEQ ID NO: 80177 - RNA, 32 nt, Human
caccgcgcccagagcggccucuccccacgccc

SEQ ID NO: 80178 - RNA, 32 nt, Human
caccgcgcccagcuaauucuuguauuuuuggu

SEQ ID NO: 80179 - RNA, 32 nt, Human
caccgcgcccagcuaauuuuuguauuuuuagu

SEQ ID NO: 80180 - RNA, 32 nt, Human
caccgcgccccagggguuggaggaccuugucu

SEQ ID NO: 80181 - RNA, 32 nt, Human
caccgcgccuauaauccuagcacuuugggagg

SEQ ID NO: 80182 - RNA, 32 nt, Human
caccgcgccuggccaaaaggcauuucauucuu

SEQ ID NO: 80183 - RNA, 32 nt, Human
caccgcgccuggcuaauuuuguauuuuuagua

SEQ ID NO: 80184 - RNA, 32 nt, Human
caccgcgccuggcuaauuuuuguauuuuuagu

SEQ ID NO: 80185 - RNA, 32 nt, Human
caccgcgccuggcuaauuuuuguauuuuugua

SEQ ID NO: 80186 - RNA, 32 nt, Human
caccgcgcucggccagagcucuggguuuuaau

SEQ ID NO: 80187 - RNA, 32 nt, Human
caccgcgcuuuccccuccucagccugggcugu

SEQ ID NO: 80188 - RNA, 32 nt, Human
caccgcggagccggggacagggggagcagggc

SEQ ID NO: 80189 - RNA, 22 nt, Human
caccgcggccagcaggcaccug

SEQ ID NO: 80190 - RNA, 32 nt, Human
caccgcggcccgggacgacagccugggcucag

SEQ ID NO: 80191 - RNA, 32 nt, Human
caccgcggcucgcugggcccaggcuggcucug

SEQ ID NO: 80192 - RNA, 20 nt, Human
caccgcggcuugggggauag

SEQ ID NO: 80193 - RNA, 32 nt, Human
caccgcgggaggccagggugcugacugucaag

SEQ ID NO: 80194 - RNA, 32 nt, Human
caccgcggugggauuccagcugucugauuaau

SEQ ID NO: 80195 - RNA, 32 nt, Human
caccgcgucugccucgugcucuucuugccccu

SEQ ID NO: 80196 - RNA, 21 nt, Human
caccgcguggacaggaacacc

SEQ ID NO: 80197 - RNA, 32 nt, Human
caccgcuacacuccagccugggugacagagug

SEQ ID NO: 80198 - RNA, 32 nt, Human
caccgcuaccaccaccaccaccgccaccacua

SEQ ID NO: 80199 - RNA, 32 nt, Human
caccgcuaccucccucuccccguugaugucca

SEQ ID NO: 80200 - RNA, 32 nt, Human
caccgcuaucucagccacuuucagccuuaugc

SEQ ID NO: 80201 - RNA, 32 nt, Human
caccgcucacugcaagcacugccucccuccgg

SEQ ID NO: 80202 - RNA, 32 nt, Human
caccgcucagccagggugaugggcuggacuga

SEQ ID NO: 80203 - RNA, 23 nt, Human
caccgcucgguccagagggccug

SEQ ID NO: 80204 - RNA, 32 nt, Human
caccgcugacucugagccuuuuuggagucuuu

SEQ ID NO: 80205 - RNA, 32 nt, Human
caccgcugagagcagcugcaguagcugagcag

SEQ ID NO: 80206 - RNA, 32 nt, Human
caccgcugagccuguuucccuuuggagcacuu

SEQ ID NO: 80207 - RNA, 32 nt, Human
caccgcugcacucaagccugggugacagugag

SEQ ID NO: 80208 - RNA, 32 nt, Human
caccgcugcacucaagcuugggugacagagca

SEQ ID NO: 80209 - RNA, 32 nt, Human
caccgcugcacuccaaccugggcaacagagug

SEQ ID NO: 80210 - RNA, 32 nt, Human
caccgcugcacuccagccuggcaacagagcaa

SEQ ID NO: 80211 - RNA, 24 nt, Human
caccgcugcacuccagccugggca

SEQ ID NO: 80212 - RNA, 32 nt, Human
caccgcugcacuccagccugggcaacaagagu

SEQ ID NO: 80213 - RNA, 32 nt, Human
caccgcugcacuccagccugggcaacagagug

SEQ ID NO: 80214 - RNA, 32 nt, Human
caccgcugcacuccagccugggcaagagaaug

SEQ ID NO: 80215 - RNA, 32 nt, Human
caccgcugcacuccagccugggugacagaaug

SEQ ID NO: 80216 - RNA, 32 nt, Human
caccgcugcacuccagccugggugacagagcg

SEQ ID NO: 80217 - RNA, 32 nt, Human
caccgcugcacucgcggccggcgaugcgggac

SEQ ID NO: 80218 - RNA, 32 nt, Human
caccgcugccaccaccaccgccaccaccgcug

SEQ ID NO: 80219 - RNA, 32 nt, Human
caccgcugcccuccagccugggcaacaagagc

SEQ ID NO: 80220 - RNA, 21 nt, Human
caccgcugccuuuugcugcug

SEQ ID NO: 80221 - RNA, 32 nt, Human
caccgcugcucaucuugucccuuuucaauucc

SEQ ID NO: 80222 - RNA, 32 nt, Human
caccgcuggccacuccaaaacgccgccaagug

SEQ ID NO: 80223 - RNA, 32 nt, Human
caccgcuguacuccagccugggcaacagaggg

SEQ ID NO: 80224 - RNA, 32 nt, Human
caccgcuguaggaauccagaugcaggccaagu

SEQ ID NO: 80225 - RNA, 32 nt, Human
caccgcugucggcaccaugggcagugagcaga

SEQ ID NO: 80226 - RNA, 32 nt, Human
caccgcuuccuggggaaccccuucccacacuu

SEQ ID NO: 80227 - RNA, 32 nt, Human
caccggacagcaccuggcugcucaggacgaau

SEQ ID NO: 80228 - RNA, 20 nt, Human
caccggaccagccuggccca

SEQ ID NO: 80229 - RNA, 32 nt, Human
caccggaccuucuguggaacucccgugucggu

SEQ ID NO: 80230 - RNA, 32 nt, Human
caccggacugcagcccaagucuggaccuggcu

SEQ ID NO: 80231 - RNA, 32 nt, Human
caccggagagugagcaggcggagacuccaagc

SEQ ID NO: 80232 - RNA, 32 nt, Human
caccggagcauccugcacugcagggccggucu

SEQ ID NO: 80233 - RNA, 32 nt, Human
caccggagccuagacacauaccugccaaucgc

SEQ ID NO: 80234 - RNA, 32 nt, Human
caccggagccucccccucagaugaucucucca

SEQ ID NO: 80235 - RNA, 32 nt, Human
caccggagccuugccaccaucccaggacuuug

SEQ ID NO: 80236 - RNA, 32 nt, Human
caccggaggagaaagcggucacgcuccgcagc

SEQ ID NO: 80237 - RNA, 32 nt, Human
caccggagggaggaugggaugggcagggaagc

SEQ ID NO: 80238 - RNA, 32 nt, Human
caccggaugccccacugggcccagggaugcac

SEQ ID NO: 80239 - RNA, 32 nt, Human
caccggcagcaccauguugcucauggucguca

SEQ ID NO: 80240 - RNA, 32 nt, Human
caccggcagcccggcgccccagccucuacccg

SEQ ID NO: 80241 - RNA, 32 nt, Human
caccggccacagcugcuccccgugccacucag

SEQ ID NO: 80242 - RNA, 32 nt, Human
caccggccacugcagcccuggugagggcgggu

SEQ ID NO: 80243 - RNA, 32 nt, Human
caccggccacuucucccccguccaucugacca

SEQ ID NO: 80244 - RNA, 22 nt, Human
caccggccccucccucuaccca

SEQ ID NO: 80245 - RNA, 32 nt, Human
caccggcgcggaggcaggaggagcagucucau

SEQ ID NO: 80246 - RNA, 32 nt, Human
caccggcgugccccaccaugucagacgcagcc

SEQ ID NO: 80247 - RNA, 32 nt, Human
caccggcucccaccuggcugggaacaugggag

SEQ ID NO: 80248 - RNA, 32 nt, Human
caccggcuccccaagcccuccccaccaagggg

SEQ ID NO: 80249 - RNA, 32 nt, Human
caccggcuccuuuugcuucuccuuccugcagg

SEQ ID NO: 80250 - RNA, 32 nt, Human
caccggcugagggagaaggugaagcagcagaa

SEQ ID NO: 80251 - RNA, 32 nt, Human
caccggcugccucaugguucucagccacagag

SEQ ID NO: 80252 - RNA, 32 nt, Human
caccggcugcgaggagcagggagcuccucaaa

SEQ ID NO: 80253 - RNA, 32 nt, Human
caccggcuugccuggugguuugcacauuucag

SEQ ID NO: 80254 - RNA, 32 nt, Human
caccgggaucgggcugagcaggagaacaucac

SEQ ID NO: 80255 - RNA, 32 nt, Human
caccgggcaacaacugccauccagccugucgc

SEQ ID NO: 80256 - RNA, 32 nt, Human
caccgggcacaguggcucacacauguuaauuc

SEQ ID NO: 80257 - RNA, 32 nt, Human
caccgggcaggcgccucacagagcacagacgu

SEQ ID NO: 80258 - RNA, 32 nt, Human
caccgggccaggcugcgggugugcaggcgucu

SEQ ID NO: 80259 - RNA, 32 nt, Human
caccgggccauggacuccuguacuggaggaag

SEQ ID NO: 80260 - RNA, 32 nt, Human
caccgggcccugaugauuuuuguauuuuuagu

SEQ ID NO: 80261 - RNA, 32 nt, Human
caccgggccgcucuccuaccucccucucuaug

SEQ ID NO: 80262 - RNA, 32 nt, Human
caccgggcgcccacccuguccuccuccugcgg

SEQ ID NO: 80263 - RNA, 32 nt, Human
caccggggcaggcaaagugcagauguaggagc

SEQ ID NO: 80264 - RNA, 32 nt, Human
caccgggggaggaggaggaggagaagguggag

SEQ ID NO: 80265 - RNA, 21 nt, Human
caccgggucaguccccugcca

SEQ ID NO: 80266 - RNA, 22 nt, Human
caccgguaaucccagcuacuca

SEQ ID NO: 80267 - RNA, 32 nt, Human
caccgguacugaccagcucccguugggccagg

SEQ ID NO: 80268 - RNA, 32 nt, Human
caccgguauggccuggcccugcccucccgaag

SEQ ID NO: 80269 - RNA, 32 nt, Human
caccggucucugcugaggcucccagccucagu

SEQ ID NO: 80270 - RNA, 32 nt, Human
caccggucugcaucucccagcagaaggcgcag

SEQ ID NO: 80271 - RNA, 32 nt, Human
caccggugcagccaggaccacccgcuagguua

SEQ ID NO: 80272 - RNA, 32 nt, Human
caccggugccuccucuggggaagggaaccagc

SEQ ID NO: 80273 - RNA, 32 nt, Human
caccggugguaucuaccccagaugccugccuc

SEQ ID NO: 80274 - RNA, 32 nt, Human
caccgguuaacuguggccugugcccaggaaga

SEQ ID NO: 80275 - RNA, 32 nt, Human
caccgguuuccugcaagaucccuuggccuggc

SEQ ID NO: 80276 - RNA, 32 nt, Human
caccguacagcccaguccacgaagggcgccac

SEQ ID NO: 80277 - RNA, 32 nt, Human
caccguacccagcuaauuuuuguauuuuuagu

SEQ ID NO: 80278 - RNA, 32 nt, Human
caccguaccuggcuaauuuuuguauuuuuagu

SEQ ID NO: 80279 - RNA, 32 nt, Human
caccguagagguggggacaggggcaggggcag

SEQ ID NO: 80280 - RNA, 32 nt, Human
caccguagccugggugauaagagugagacucu

SEQ ID NO: 80281 - RNA, 22 nt, Human
caccguaugcauggccaucucc

SEQ ID NO: 80282 - RNA, 20 nt, Human
caccgucacccacaggggcc

SEQ ID NO: 80283 - RNA, 32 nt, Human
caccgucaccugcugguuggauuccggaaacc

SEQ ID NO: 80284 - RNA, 32 nt, Human
caccgucacugugcaacucaucgccucugcca

SEQ ID NO: 80285 - RNA, 32 nt, Human
caccgucagcucaccaccuccacuuuucucuc

SEQ ID NO: 80286 - RNA, 32 nt, Human
caccguccaacauuccuuguuuguaaguguug

SEQ ID NO: 80287 - RNA, 32 nt, Human
caccguccagagaggccugagggagggauucc

SEQ ID NO: 80288 - RNA, 32 nt, Human
caccgucccacacauugcuguggccccaaccu

SEQ ID NO: 80289 - RNA, 32 nt, Human
caccgucccagcugaagagaggcaugggacug

SEQ ID NO: 80290 - RNA, 32 nt, Human
caccgucccccaggcuggagugccguggcgug

SEQ ID NO: 80291 - RNA, 32 nt, Human
caccgucuacagcagcagcccaggcucaacug

SEQ ID NO: 80292 - RNA, 32 nt, Human
caccgucuagccacaggagaacuaaucuucua

SEQ ID NO: 80293 - RNA, 21 nt, Human
caccgucugucucuuccuuca

SEQ ID NO: 80294 - RNA, 32 nt, Human
caccgucuuaguuuacacaucugccaaagggg

SEQ ID NO: 80295 - RNA, 24 nt, Human
caccgugacacuccagccugggca

SEQ ID NO: 80296 - RNA, 32 nt, Human
caccgugacacuccagccugggcaacagaaga

SEQ ID NO: 80297 - RNA, 24 nt, Human
caccgugaggccaagauccccuca

SEQ ID NO: 80298 - RNA, 32 nt, Human
caccgugaggcucuuuggggaggccgggccag

SEQ ID NO: 80299 - RNA, 31 nt, Human
caccgugcacuucucccuuuccuuaaagaac

SEQ ID NO: 80300 - RNA, 32 nt, Human
caccgugcagcuuuggccugggcacagacccu

SEQ ID NO: 80301 - RNA, 32 nt, Human
caccgugcccagcuaauuuuuguauuuuuagu

SEQ ID NO: 80302 - RNA, 32 nt, Human
caccgugcccagcuaauuuuuguauuuuuguu

SEQ ID NO: 80303 - RNA, 20 nt, Human
caccgugcccggcccauucu

SEQ ID NO: 80304 - RNA, 32 nt, Human
caccgugcccggccuccccugugucauuuuaa

SEQ ID NO: 80305 - RNA, 32 nt, Human
caccgugcccggcuaauguuuguauuuuuagu

SEQ ID NO: 80306 - RNA, 32 nt, Human
caccgugccgaaggagcucugccagugggccu

SEQ ID NO: 80307 - RNA, 32 nt, Human
caccgugccuggccucauuugaguauuuuuau

SEQ ID NO: 80308 - RNA, 32 nt, Human
caccgugccuggccuuuuauuguuuguuuuug

SEQ ID NO: 80309 - RNA, 32 nt, Human
caccgugccugggcccccuccugcuccgcucu

SEQ ID NO: 80310 - RNA, 32 nt, Human
caccgugccuucagaggcuucuuccugccucu

SEQ ID NO: 80311 - RNA, 31 nt, Human
caccgugcuagaggaacuguaaugcuucaga

SEQ ID NO: 80312 - RNA, 32 nt, Human
caccgugcuccugguggggcccgugccagggg

SEQ ID NO: 80313 - RNA, 19 nt, Human
caccguggaccacaggccu

SEQ ID NO: 80314 - RNA, 32 nt, Human
caccguggaggaggaaggcaagagggggugga

SEQ ID NO: 80315 - RNA, 30 nt, Human
caccguggaggccacaggagcagaaacaug

SEQ ID NO: 80316 - RNA, 32 nt, Human
caccguggauguugaagaaggggguuacucaa

SEQ ID NO: 80317 - RNA, 32 nt, Human
caccguggauguuuucagaaguggccaucgag

SEQ ID NO: 80318 - RNA, 32 nt, Human
caccguggcuaccauugucacucguaggggau

SEQ ID NO: 80319 - RNA, 32 nt, Human
caccguggcucacgccuguaaucccagcacuu

SEQ ID NO: 80320 - RNA, 32 nt, Human
caccguggcucacgucuguaaucccagcgcuu

SEQ ID NO: 80321 - RNA, 32 nt, Human
caccguggcucacuccuguaaucccagcacuu

SEQ ID NO: 80322 - RNA, 32 nt, Human
caccguggcuucccuucucccuccaggccaaa

SEQ ID NO: 80323 - RNA, 32 nt, Human
caccgugggaacagcaggcuugggagugcagc

SEQ ID NO: 80324 - RNA, 32 nt, Human
caccgugggagcaauguggcccagguggacuc

SEQ ID NO: 80325 - RNA, 22 nt, Human
caccgugggaggcagaggccug

SEQ ID NO: 80326 - RNA, 32 nt, Human
caccgugggaggcagaggccugggcugcagca

SEQ ID NO: 80327 - RNA, 19 nt, Human
caccgugggcucuggagcc

SEQ ID NO: 80328 - RNA, 21 nt, Human
caccgugggcuggggggccug

SEQ ID NO: 80329 - RNA, 32 nt, Human
caccgugucacacuagcauaggaggcugcacg

SEQ ID NO: 80330 - RNA, 32 nt, Human
caccgugucaguuuuucugccuuucccugcuc

SEQ ID NO: 80331 - RNA, 22 nt, Human
caccgugugagcacagggccug

SEQ ID NO: 80332 - RNA, 32 nt, Human
caccgugugagugcugggcuccagauggcgcc

SEQ ID NO: 80333 - RNA, 32 nt, Human
caccgugugcaggacuccgcgcugggcagggg

SEQ ID NO: 80334 - RNA, 32 nt, Human
caccguguuagccaggcuggucucgaucugac

SEQ ID NO: 80335 - RNA, 32 nt, Human
caccguguugcccaggcuggucgcgaacuccu

SEQ ID NO: 80336 - RNA, 32 nt, Human
caccguguuggccaggcuggucucaaaacucc

SEQ ID NO: 80337 - RNA, 32 nt, Human
caccguguuggccaggcuggucuccaacuccu

SEQ ID NO: 80338 - RNA, 32 nt, Human
caccguguuggccaggcuggucucgaacuccu

SEQ ID NO: 80339 - RNA, 32 nt, Human
caccguguuggccaggcuggucuggaacuccu

SEQ ID NO: 80340 - RNA, 32 nt, Human
caccguuaguuggcaaaggauccugcuugagc

SEQ ID NO: 80341 - RNA, 32 nt, Human
caccguuauagaaugguucauguauguggugu

SEQ ID NO: 80342 - RNA, 32 nt, Human
caccguuauugcaucccugcuguggcucaccu

SEQ ID NO: 80343 - RNA, 32 nt, Human
caccguuccucagugugagcaagauuuggguc

SEQ ID NO: 80344 - RNA, 32 nt, Human
caccguugcccaggcuggagggcagugacgug

SEQ ID NO: 80345 - RNA, 32 nt, Human
caccguuguacuccagccuggugauagaacga

SEQ ID NO: 80346 - RNA, 32 nt, Human
caccguuuacaugucgggaggcugagguggga

SEQ ID NO: 80347 - RNA, 32 nt, Human
caccguuuaccucccucgcccugccccgcacc

SEQ ID NO: 80348 - RNA, 32 nt, Human
caccguuuucaucagucacucacaugugcuca

SEQ ID NO: 80349 - RNA, 32 nt, Human
caccguuuugcccaggcuggucucaaacuccu

SEQ ID NO: 80350 - RNA, 32 nt, Human
caccuaaaccaccagugcccaaagucugugug

SEQ ID NO: 80351 - RNA, 21 nt, Human
caccuaacccugacuccuuca

SEQ ID NO: 80352 - RNA, 18 nt, Human
caccuaacuagagacagu

SEQ ID NO: 80353 - RNA, 32 nt, Human
caccuaacucccuccuccuucuccuuuuuccu

SEQ ID NO: 80354 - RNA, 20 nt, Human
caccuaagagacggcugcgg

SEQ ID NO: 80355 - RNA, 32 nt, Human
caccuaaggcaaaucccuggccacuuuagucu

SEQ ID NO: 80356 - RNA, 32 nt, Human
caccuaaggcuggaugggaaagugcagucuug

SEQ ID NO: 80357 - RNA, 32 nt, Human
caccuaaggggacuuccuuacaacaccuugaa

SEQ ID NO: 80358 - RNA, 32 nt, Human
caccuaauaaggccauuagcucuggcuccuuc

SEQ ID NO: 80359 - RNA, 32 nt, Human
caccuaaucuguccucaaggacagaaccaugu

SEQ ID NO: 80360 - RNA, 32 nt, Human
caccuacaauaauuccaaaagguuugcacauu

SEQ ID NO: 80361 - RNA, 32 nt, Human
caccuacacagcaugaauuauucauaagucau

SEQ ID NO: 80362 - RNA, 32 nt, Human
caccuacaccugccuggcugagaaugccuugg

SEQ ID NO: 80363 - RNA, 32 nt, Human
caccuacagauuuuggguagaucuucucuucc

SEQ ID NO: 80364 - RNA, 32 nt, Human
caccuacaguccugcauguaguuggugcucac

SEQ ID NO: 80365 - RNA, 32 nt, Human
caccuacauacguaaccaaauuuucaggcuug

SEQ ID NO: 80366 - RNA, 32 nt, Human
caccuacauaugcccccaacacacgcgcacgg

SEQ ID NO: 80367 - RNA, 32 nt, Human
caccuaccaccagggccagcuaauuuuuguau

SEQ ID NO: 80368 - RNA, 21 nt, Human
caccuaccacccaaguccuca

SEQ ID NO: 80369 - RNA, 32 nt, Human
caccuaccccacugagaccaccucucagggug

SEQ ID NO: 80370 - RNA, 32 nt, Human
caccuacccugccucagccucggacuucucag

SEQ ID NO: 80371 - RNA, 32 nt, Human
caccuacgcugaggugaccaaugucuccaacu

SEQ ID NO: 80372 - RNA, 21 nt, Human
caccuacuacuccugcugcug

SEQ ID NO: 80373 - RNA, 32 nt, Human
caccuacucccaggaacagcagagguggaggc

SEQ ID NO: 80374 - RNA, 32 nt, Human
caccuacucuucugugaacaguagugacuuuu

SEQ ID NO: 80375 - RNA, 32 nt, Human
caccuacugacacucgauuuaggccagaccag

SEQ ID NO: 80376 - RNA, 32 nt, Human
caccuacugcaugcugugucccugcauacagg

SEQ ID NO: 80377 - RNA, 32 nt, Human
caccuacugugugcacagcacuacugguaaaa

SEQ ID NO: 80378 - RNA, 32 nt, Human
caccuacuuacaugcauuacugcaugcacuuc

SEQ ID NO: 80379 - RNA, 19 nt, Human
caccuacuucagcagguca

SEQ ID NO: 80380 - RNA, 32 nt, Human
caccuacuugcucaggcaggugcucuggucuc

SEQ ID NO: 80381 - RNA, 32 nt, Human
caccuacuuucagcuucaaccccaggcccuca

SEQ ID NO: 80382 - RNA, 32 nt, Human
caccuagaacugcagaagggcuugugguuuca

SEQ ID NO: 80383 - RNA, 19 nt, Human
caccuagacugccugcuga

SEQ ID NO: 80384 - RNA, 32 nt, Human
caccuagagauggaaacaggcaaguaacugac

SEQ ID NO: 80385 - RNA, 32 nt, Human
caccuagagcugucugugccucucugggagaa

SEQ ID NO: 80386 - RNA, 32 nt, Human
caccuagaguuuggacuuccagcuuccagaac

SEQ ID NO: 80387 - RNA, 32 nt, Human
caccuagauuacagccaggaacauugguuaag

SEQ ID NO: 80388 - RNA, 32 nt, Human
caccuagcccuaucaagccaaagauuccccuu

SEQ ID NO: 80389 - RNA, 32 nt, Human
caccuagcucgccagagagucuauguauggga

SEQ ID NO: 80390 - RNA, 32 nt, Human
caccuaggaagugguagaauuagauuucagau

SEQ ID NO: 80391 - RNA, 32 nt, Human
caccuaggacuugcccaagaccacagccaggu

SEQ ID NO: 80392 - RNA, 32 nt, Human
caccuaggcuggaguugcagugguuugaucuc

SEQ ID NO: 80393 - RNA, 32 nt, Human
caccuaggucaagaguuucaaaccagacgggc

SEQ ID NO: 80394 - RNA, 20 nt, Human
caccuagguuuggcuuagca

SEQ ID NO: 80395 - RNA, 32 nt, Human
caccuaguagcuuguuagaaagguagaaucuu

SEQ ID NO: 80396 - RNA, 32 nt, Human
caccuagucuccuaauuccuguccugcauagc

SEQ ID NO: 80397 - RNA, 32 nt, Human
caccuaguguauggcucaugcccagccuucca

SEQ ID NO: 80398 - RNA, 32 nt, Human
caccuaguuauccccaaagccuauuucuucug

SEQ ID NO: 80399 - RNA, 22 nt, Human
caccuauaaacccagcuacuca

SEQ ID NO: 80400 - RNA, 22 nt, Human
caccuauaaucucagcuacuca

SEQ ID NO: 80401 - RNA, 32 nt, Human
caccuauacucaccugccuuuauuaaccagca

SEQ ID NO: 80402 - RNA, 32 nt, Human
caccuauauucccugguuaagaggucaggggu

SEQ ID NO: 80403 - RNA, 32 nt, Human
caccuaucacccaggcuggaguggaguggcac

SEQ ID NO: 80404 - RNA, 32 nt, Human
caccuauccagcuucuggcuccugggaaaagu

SEQ ID NO: 80405 - RNA, 32 nt, Human
caccuauccaggcauccucugggccucuagcc

SEQ ID NO: 80406 - RNA, 32 nt, Human
caccuauccuucugaagagcugaaggcuaauu

SEQ ID NO: 80407 - RNA, 32 nt, Human
caccuaucuacuccugagcuuccccaacagga

SEQ ID NO: 80408 - RNA, 32 nt, Human
caccuaucuggaccaggugaagauccgcuuug

SEQ ID NO: 80409 - RNA, 32 nt, Human
caccuaucuucugcagggcccugagauggggu

SEQ ID NO: 80410 - RNA, 19 nt, Human
caccuaugacaagagcagu

SEQ ID NO: 80411 - RNA, 32 nt, Human
caccuaugacaggacgugggaaagcauuuugu

SEQ ID NO: 80412 - RNA, 32 nt, Human
caccuaugcggcgagccucgggccaagaccuc

SEQ ID NO: 80413 - RNA, 32 nt, Human
caccuaugcugaggugaccaauguuuccaacu

SEQ ID NO: 80414 - RNA, 20 nt, Human
caccuauggugaccugaacc

SEQ ID NO: 80415 - RNA, 32 nt, Human
caccuaugugccagggccuggugccauguugg

SEQ ID NO: 80416 - RNA, 32 nt, Human
caccucaagcccuauucacaggcaccaggaaa

SEQ ID NO: 80417 - RNA, 31 nt, Human
caccucaaggaucauugcacagcagaaguga

SEQ ID NO: 80418 - RNA, 32 nt, Human
caccucaagucccuccuggaagggagccagag

SEQ ID NO: 80419 - RNA, 32 nt, Human
caccucaaucuacaccagagcccagggagucc

SEQ ID NO: 80420 - RNA, 32 nt, Human
caccucaauguagguacauuacacucuuguug

SEQ ID NO: 80421 - RNA, 32 nt, Human
caccucacaggaacuguucaguucccacccuc

SEQ ID NO: 80422 - RNA, 32 nt, Human
caccucacaggguuguugugaggauccaauga

SEQ ID NO: 80423 - RNA, 25 nt, Human
caccucacauauguccaguuaaaca

SEQ ID NO: 80424 - RNA, 20 nt, Human
caccucaccauguuuacaaa

SEQ ID NO: 80425 - RNA, 32 nt, Human
caccucacccagcuaauuuuuguauuuucagu

SEQ ID NO: 80426 - RNA, 32 nt, Human
caccucacccuuuuccaacuugcccagggaag

SEQ ID NO: 80427 - RNA, 21 nt, Human
caccucaccucccccaggaca

SEQ ID NO: 80428 - RNA, 32 nt, Human
caccucaccucuccuuccccauugugccgccu

SEQ ID NO: 80429 - RNA, 32 nt, Human
caccucaccugagaccuccacuccacaucugc

SEQ ID NO: 80430 - RNA, 32 nt, Human
caccucaccugucgcacccacugugaaaguug

SEQ ID NO: 80431 - RNA, 32 nt, Human
caccucaccugugcugccacuuccuagugcac

SEQ ID NO: 80432 - RNA, 32 nt, Human
caccucacgcuggagcuggagugcgagguucu

SEQ ID NO: 80433 - RNA, 32 nt, Human
caccucacugagccaccuccauuucuucaucu

SEQ ID NO: 80434 - RNA, 32 nt, Human
caccucacugcaaccuccaccuccuagguuca

SEQ ID NO: 80435 - RNA, 32 nt, Human
caccucacugcaaccuccgccuccuggguuca

SEQ ID NO: 80436 - RNA, 32 nt, Human
caccucacugcaaccucugccucccgggucca

SEQ ID NO: 80437 - RNA, 32 nt, Human
caccucacugcaagcucugccucccgggcuca

SEQ ID NO: 80438 - RNA, 32 nt, Human
caccucacugcacgcuagccugggcaacagau

SEQ ID NO: 80439 - RNA, 32 nt, Human
caccucacuuuucacagccucugagggcagca

SEQ ID NO: 80440 - RNA, 32 nt, Human
caccucagaagcuuccugcccagagagccagc

SEQ ID NO: 80441 - RNA, 32 nt, Human
caccucagaauuuccuucagugccucagagau

SEQ ID NO: 80442 - RNA, 32 nt, Human
caccucagacacaccauuucaccucccuugcc

SEQ ID NO: 80443 - RNA, 32 nt, Human
caccucagaguagauuguagccugccaaagga

SEQ ID NO: 80444 - RNA, 32 nt, Human
caccucagaguguggcuguaccacauucggug

SEQ ID NO: 80445 - RNA, 32 nt, Human
caccucagccuccagaguagcuggaaauacag

SEQ ID NO: 80446 - RNA, 32 nt, Human
caccucagccucccaaagugcugguauuacag

SEQ ID NO: 80447 - RNA, 32 nt, Human
caccucagccucccaaagugcuuggaugacag

SEQ ID NO: 80448 - RNA, 32 nt, Human
caccucagccucccaaguagcuuggacuauag

SEQ ID NO: 80449 - RNA, 32 nt, Human
caccucagccucccgaguaguggaucuaggau

SEQ ID NO: 80450 - RNA, 32 nt, Human
caccucagccucccgaguugaguaacugggac

SEQ ID NO: 80451 - RNA, 32 nt, Human
caccucagccuccgcuccccgcccucuucccg

SEQ ID NO: 80452 - RNA, 32 nt, Human
caccucagccuccucucucuccuuccuccaac

SEQ ID NO: 80453 - RNA, 32 nt, Human
caccucagccuccugaguagcugagaccacag

SEQ ID NO: 80454 - RNA, 32 nt, Human
caccucagccuccugaguagcugggaccauag

SEQ ID NO: 80455 - RNA, 32 nt, Human
caccucagccuccugaguagcugggacuagag

SEQ ID NO: 80456 - RNA, 32 nt, Human
caccucagccuccugaguagcugggauuacag

SEQ ID NO: 80457 - RNA, 32 nt, Human
caccucagccuccugaguagcugggauuauag

SEQ ID NO: 80458 - RNA, 32 nt, Human
caccucagccuccugaguaggugggauuacag

SEQ ID NO: 80459 - RNA, 32 nt, Human
caccucagccucucaaguagcugggacuacag

SEQ ID NO: 80460 - RNA, 32 nt, Human
caccucagccuuccaaagugcugguauuacag

SEQ ID NO: 80461 - RNA, 32 nt, Human
caccucagcgggccagcagcccagggaacccc

SEQ ID NO: 80462 - RNA, 32 nt, Human
caccucagcuuccugaguaggugggacuacag

SEQ ID NO: 80463 - RNA, 32 nt, Human
caccucaggaaaggagggugaccagguugucu

SEQ ID NO: 80464 - RNA, 32 nt, Human
caccucaggaagggauugaggguugugaauag

SEQ ID NO: 80465 - RNA, 32 nt, Human
caccucaggaagugcugggauuacaggcgugu

SEQ ID NO: 80466 - RNA, 32 nt, Human
caccucaggaggcugaggcaggagaaucgcuu

SEQ ID NO: 80467 - RNA, 32 nt, Human
caccucaggaucuuguuaaaaugcagauucug

SEQ ID NO: 80468 - RNA, 32 nt, Human
caccucaggccccagccccugccucuccauua

SEQ ID NO: 80469 - RNA, 32 nt, Human
caccucaggccgcugcucagaugccucugcug

SEQ ID NO: 80470 - RNA, 32 nt, Human
caccucaggcuaaauggcaaaaccccaaucuc

SEQ ID NO: 80471 - RNA, 32 nt, Human
caccucaguccagccaaaauguuuagaaacac

SEQ ID NO: 80472 - RNA, 32 nt, Human
caccucagucuccugaguagcuaggacuacag

SEQ ID NO: 80473 - RNA, 32 nt, Human
caccucagucuccugaguagcugagacuacag

SEQ ID NO: 80474 - RNA, 32 nt, Human
caccucagugcugggcaggggcaucagaaggu

SEQ ID NO: 80475 - RNA, 19 nt, Human
caccucagugggauaggaa

SEQ ID NO: 80476 - RNA, 26 nt, Human
caccucaucagggaagucuguacaga

SEQ ID NO: 80477 - RNA, 32 nt, Human
caccucaucaugagccucaacugccuacaucu

SEQ ID NO: 80478 - RNA, 32 nt, Human
caccucauccuccacccaccagagagauggga

SEQ ID NO: 80479 - RNA, 32 nt, Human
caccucauccuggcucagccuggugauggaga

SEQ ID NO: 80480 - RNA, 32 nt, Human
caccucaucucuagguugaauuuauccaaggu

SEQ ID NO: 80481 - RNA, 32 nt, Human
caccucaucuuccccuccuggcuggaggcugg

SEQ ID NO: 80482 - RNA, 32 nt, Human
caccucaugcaggugaagccacuguggaaaca

SEQ ID NO: 80483 - RNA, 32 nt, Human
caccucaugccaccgccaacccccugccccag

SEQ ID NO: 80484 - RNA, 21 nt, Human
caccucaugccuuccauuaaa

SEQ ID NO: 80485 - RNA, 32 nt, Human
caccucaugcuagccucaauaaaccagaauaa

SEQ ID NO: 80486 - RNA, 19 nt, Human
caccucauuaacuuacaaa

SEQ ID NO: 80487 - RNA, 32 nt, Human
caccucauuaagaugcugggcagcaguauaac

SEQ ID NO: 80488 - RNA, 32 nt, Human
caccucauugcaaccuccgccucccggguucg

SEQ ID NO: 80489 - RNA, 32 nt, Human
caccucauuuccauuucagucuggggacccca

SEQ ID NO: 80490 - RNA, 32 nt, Human
caccucauuuguggaaaagccucuuuguuauc

SEQ ID NO: 80491 - RNA, 18 nt, Human
caccucauuuuuuacaaa

SEQ ID NO: 80492 - RNA, 31 nt, Human
caccuccaaauaaauugauguugaaauucug

SEQ ID NO: 80493 - RNA, 32 nt, Human
caccuccaaguuuuaccuccugugucuuccuc

SEQ ID NO: 80494 - RNA, 32 nt, Human
caccuccacaaacaaaacucuucggaaauggu

SEQ ID NO: 80495 - RNA, 32 nt, Human
caccuccacaaccaccaccacaagugcacuug

SEQ ID NO: 80496 - RNA, 24 nt, Human
caccuccacacucccaaccacuga

SEQ ID NO: 80497 - RNA, 32 nt, Human
caccuccacagugggagccagccagacaucuc

SEQ ID NO: 80498 - RNA, 32 nt, Human
caccuccacaugcuccgccuccaggucccgcu

SEQ ID NO: 80499 - RNA, 32 nt, Human
caccuccaccaccaccaccaccaccaccacca

SEQ ID NO: 80500 - RNA, 32 nt, Human
caccuccaccgccaccuccaccuccggcaccc

SEQ ID NO: 80501 - RNA, 32 nt, Human
caccuccacuccuaggcuuuucugccuagagc

SEQ ID NO: 80502 - RNA, 32 nt, Human
caccuccacugcacaacucgggcgggggugug

SEQ ID NO: 80503 - RNA, 32 nt, Human
caccuccacuuccugguaaugucucuccgagg

SEQ ID NO: 80504 - RNA, 32 nt, Human
caccuccaggagaugcaaaaggaauuagaacu

SEQ ID NO: 80505 - RNA, 31 nt, Human
caccuccaggcagacccaucacuggaagugg

SEQ ID NO: 80506 - RNA, 32 nt, Human
caccuccaggcaggccaggcugccucggacuc

SEQ ID NO: 80507 - RNA, 32 nt, Human
caccuccaggcaggcucugugcaguacucacc

SEQ ID NO: 80508 - RNA, 32 nt, Human
caccuccagggacaaagaggagcugcuguggg

SEQ ID NO: 80509 - RNA, 32 nt, Human
caccuccagggagcacccugcccaccaagaag

SEQ ID NO: 80510 - RNA, 32 nt, Human
caccuccagguggacugcuuggcagugcuagg

SEQ ID NO: 80511 - RNA, 32 nt, Human
caccuccaucgagggccggucuccugcuucuu

SEQ ID NO: 80512 - RNA, 32 nt, Human
caccuccaucuucuuugcagccuggguggcua

SEQ ID NO: 80513 - RNA, 32 nt, Human
caccuccaugccacugccagagcuggccuagc

SEQ ID NO: 80514 - RNA, 21 nt, Human
caccuccauguggacuuagga

SEQ ID NO: 80515 - RNA, 32 nt, Human
caccuccauuagcucuuuaccuuuugaggagg

SEQ ID NO: 80516 - RNA, 32 nt, Human
caccuccauucucuaccucccaugcagcauga

SEQ ID NO: 80517 - RNA, 32 nt, Human
caccuccauugagcuuccgggacaugcguggc

SEQ ID NO: 80518 - RNA, 32 nt, Human
caccuccauuggagggcaggacucuugauugu

SEQ ID NO: 80519 - RNA, 32 nt, Human
caccucccaaaaugcugagauuacagguguga

SEQ ID NO: 80520 - RNA, 32 nt, Human
caccucccaaacugcugggauuacagguguga

SEQ ID NO: 80521 - RNA, 32 nt, Human
caccucccaaaguacugggauuacaggcauga

SEQ ID NO: 80522 - RNA, 32 nt, Human
caccucccaaagugcuaggauuacaggcguga

SEQ ID NO: 80523 - RNA, 32 nt, Human
caccucccaaagugcugggauuacaggcguga

SEQ ID NO: 80524 - RNA, 32 nt, Human
caccucccaaaguguugugauuacaggcguga

SEQ ID NO: 80525 - RNA, 32 nt, Human
caccucccaaggugcugggauuacaggcauaa

SEQ ID NO: 80526 - RNA, 32 nt, Human
caccucccaagguguugggauuacaggcguga

SEQ ID NO: 80527 - RNA, 32 nt, Human
caccucccaccaaccaaccacacccggugggg

SEQ ID NO: 80528 - RNA, 32 nt, Human
caccucccaccaaccagccacacccagugggg

SEQ ID NO: 80529 - RNA, 32 nt, Human
caccucccaccaaccagccacacccggugggg

SEQ ID NO: 80530 - RNA, 20 nt, Human
caccucccacccaccacaga

SEQ ID NO: 80531 - RNA, 32 nt, Human
caccucccaccucucugagggcugaggugaga

SEQ ID NO: 80532 - RNA, 32 nt, Human
caccucccaccucuugccaccugcugcugcua

SEQ ID NO: 80533 - RNA, 32 nt, Human
caccucccaccugcauugcucucccucgugcu

SEQ ID NO: 80534 - RNA, 32 nt, Human
caccucccacgguggucaccaugccaaugaag

SEQ ID NO: 80535 - RNA, 32 nt, Human
caccucccagaaccccacggggacuuguucac

SEQ ID NO: 80536 - RNA, 21 nt, Human
caccucccagggcacgguggg

SEQ ID NO: 80537 - RNA, 32 nt, Human
caccucccagggugcugggauuacagguguga

SEQ ID NO: 80538 - RNA, 32 nt, Human
caccucccauaguauucauuuggcuucgcugu

SEQ ID NO: 80539 - RNA, 32 nt, Human
caccuccccacacccauugagucauucacagg

SEQ ID NO: 80540 - RNA, 32 nt, Human
caccuccccaguugucugcuguguggacuggg

SEQ ID NO: 80541 - RNA, 32 nt, Human
caccuccccauccccuguucucccucuguugc

SEQ ID NO: 80542 - RNA, 32 nt, Human
caccucccccacugcugcccuccugucgagaa

SEQ ID NO: 80543 - RNA, 21 nt, Human
caccucccccaggacauuugg

SEQ ID NO: 80544 - RNA, 32 nt, Human
caccucccccaggagaccguugcagucggcca

SEQ ID NO: 80545 - RNA, 18 nt, Human
caccuccccccaccacag

SEQ ID NO: 80546 - RNA, 19 nt, Human
caccucccccugccacaga

SEQ ID NO: 80547 - RNA, 21 nt, Human
caccucccccugcugcugcug

SEQ ID NO: 80548 - RNA, 32 nt, Human
caccuccccgggcugugcagcccccucccagg

SEQ ID NO: 80549 - RNA, 32 nt, Human
caccuccccuccccacagccuuccucacccuu

SEQ ID NO: 80550 - RNA, 32 nt, Human
caccuccccugccacagacucucccucuucug

SEQ ID NO: 80551 - RNA, 32 nt, Human
caccuccccuggcucagucacacagcugugug

SEQ ID NO: 80552 - RNA, 32 nt, Human
caccuccccuguaucugcagcacuuugagcua

SEQ ID NO: 80553 - RNA, 23 nt, Human
caccucccgacaccugcucacca

SEQ ID NO: 80554 - RNA, 32 nt, Human
caccucccgcagugcugggauuacaggcauga

SEQ ID NO: 80555 - RNA, 18 nt, Human
caccucccgcuaggccca

SEQ ID NO: 80556 - RNA, 32 nt, Human
caccucccuccaggagaucccagggugcaaag

SEQ ID NO: 80557 - RNA, 32 nt, Human
caccucccuccccacaccucccuacuccccug

SEQ ID NO: 80558 - RNA, 32 nt, Human
caccucccuccccuagagcuauucuccuuugg

SEQ ID NO: 80559 - RNA, 32 nt, Human
caccucccucucuuccugauccuucccaccca

SEQ ID NO: 80560 - RNA, 32 nt, Human
caccucccugaaccaucccugaugucugucug

SEQ ID NO: 80561 - RNA, 32 nt, Human
caccucccugcaccccuccccucuauagagca

SEQ ID NO: 80562 - RNA, 32 nt, Human
caccucccugcacuuguagucuaaaaaguaaa

SEQ ID NO: 80563 - RNA, 32 nt, Human
caccucccugcucagugcuugggcuccacggg

SEQ ID NO: 80564 - RNA, 32 nt, Human
caccucccugcucuucugcacuccuggacaca

SEQ ID NO: 80565 - RNA, 32 nt, Human
caccucccugcugccccucccucucucucccu

SEQ ID NO: 80566 - RNA, 32 nt, Human
caccuccguccggaacaccaccuccaccgggc

SEQ ID NO: 80567 - RNA, 32 nt, Human
caccuccgucugagcaggaggagcacucaagg

SEQ ID NO: 80568 - RNA, 32 nt, Human
caccuccgugcacuuguguccgaggagcgagg

SEQ ID NO: 80569 - RNA, 32 nt, Human
caccuccuacagccuuaagucccaggcccaug

SEQ ID NO: 80570 - RNA, 32 nt, Human
caccuccucauuguauccucagggggcagaaa

SEQ ID NO: 80571 - RNA, 32 nt, Human
caccuccuccagcuccgccaucuugcgugagg

SEQ ID NO: 80572 - RNA, 32 nt, Human
caccuccuccaggaaguccucuggauugacuc

SEQ ID NO: 80573 - RNA, 32 nt, Human
caccuccuccaggacaacacucucucuguggg

SEQ ID NO: 80574 - RNA, 32 nt, Human
caccuccuccaucuccggcuccugggcuuggg

SEQ ID NO: 80575 - RNA, 32 nt, Human
caccuccucccaggcuccugggaagcaccuga

SEQ ID NO: 80576 - RNA, 32 nt, Human
caccuccuccccuccccacuugagaccugcug

SEQ ID NO: 80577 - RNA, 32 nt, Human
caccuccucccuaucccaggccuguguaaacg

SEQ ID NO: 80578 - RNA, 32 nt, Human
caccuccucccuucccuccuccuuccucaucc

SEQ ID NO: 80579 - RNA, 32 nt, Human
caccuccuccuccuucugcauuuccuaucuuc

SEQ ID NO: 80580 - RNA, 32 nt, Human
caccuccucuacuuuaacugugcucucaggug

SEQ ID NO: 80581 - RNA, 32 nt, Human
caccuccucucaggccuaucuuuugcuguguu

SEQ ID NO: 80582 - RNA, 32 nt, Human
caccuccucugauaugcugaggccaguguugg

SEQ ID NO: 80583 - RNA, 17 nt, Human
caccuccucuguucuga

SEQ ID NO: 80584 - RNA, 32 nt, Human
caccuccugacaccuccauauaccccagcuau

SEQ ID NO: 80585 - RNA, 32 nt, Human
caccuccugaguagcugggacuacaguugugc

SEQ ID NO: 80586 - RNA, 32 nt, Human
caccuccugaucucagguucugaggcggcugu

SEQ ID NO: 80587 - RNA, 20 nt, Human
caccuccugcaacgaccuca

SEQ ID NO: 80588 - RNA, 32 nt, Human
caccuccugcagcguccagccacggcuccagg

SEQ ID NO: 80589 - RNA, 24 nt, Human
caccuccugccaccacagggccug

SEQ ID NO: 80590 - RNA, 32 nt, Human
caccuccugccuggaaucuugccaucagcaac

SEQ ID NO: 80591 - RNA, 32 nt, Human
caccuccugcggcagaacagcacccgugaccc

SEQ ID NO: 80592 - RNA, 32 nt, Human
caccuccugcuguguggcccgguuccuaacag

SEQ ID NO: 80593 - RNA, 32 nt, Human
caccuccuggaacacaagccuaggugaggccc

SEQ ID NO: 80594 - RNA, 32 nt, Human
caccuccuggaggucaagaagagcagaguccc

SEQ ID NO: 80595 - RNA, 32 nt, Human
caccuccugggagcaggcacgucuuuuggcuc

SEQ ID NO: 80596 - RNA, 32 nt, Human
caccuccugggagcaggugggucucugggacg

SEQ ID NO: 80597 - RNA, 18 nt, Human
caccuccuguauaggaag

SEQ ID NO: 80598 - RNA, 32 nt, Human
caccuccuguuuggcccuggagaauguagucc

SEQ ID NO: 80599 - RNA, 18 nt, Human
caccuccuuaccuacugg

SEQ ID NO: 80600 - RNA, 32 nt, Human
caccuccuuagcaacacugauuuucuguaucg

SEQ ID NO: 80601 - RNA, 32 nt, Human
caccuccuuccagguucuggcuccuuccagcc

SEQ ID NO: 80602 - RNA, 32 nt, Human
caccuccuucgccacuccaccagccuggaccu

SEQ ID NO: 80603 - RNA, 21 nt, Human
caccuccuucggagccacaga

SEQ ID NO: 80604 - RNA, 32 nt, Human
caccuccuugcucuccccagccugccaagccc

SEQ ID NO: 80605 - RNA, 19 nt, Human
caccuccuuggaaccacag

SEQ ID NO: 80606 - RNA, 32 nt, Human
caccuccuuuaucccucuccccagaaucauga

SEQ ID NO: 80607 - RNA, 32 nt, Human
caccuccuuuucucccccuucucucccuuucu

SEQ ID NO: 80608 - RNA, 32 nt, Human
caccucgagacaccucccagaccccacauccc

SEQ ID NO: 80609 - RNA, 32 nt, Human
caccucgagcuaugcaaccucuguucuuguau

SEQ ID NO: 80610 - RNA, 32 nt, Human
caccucgauuucuucuuggugaguccauggga

SEQ ID NO: 80611 - RNA, 32 nt, Human
caccucgcacacagcuaaggucaaaguucaaa

SEQ ID NO: 80612 - RNA, 32 nt, Human
caccucgcggagugccaggauuacagguggcg

SEQ ID NO: 80613 - RNA, 32 nt, Human
caccucgcugggcuaauuuuugauuuguaauu

SEQ ID NO: 80614 - RNA, 23 nt, Human
caccucgcuggggcaggggcacc

SEQ ID NO: 80615 - RNA, 32 nt, Human
caccucgcuugcagcacagggcuucugugagg

SEQ ID NO: 80616 - RNA, 18 nt, Human
caccucggaucccacuga

SEQ ID NO: 80617 - RNA, 32 nt, Human
caccucggccucccaaagugcuguaauuacag

SEQ ID NO: 80618 - RNA, 32 nt, Human
caccucggccuggguacggaugcgacuuggau

SEQ ID NO: 80619 - RNA, 32 nt, Human
caccucggcugccucccccacuccacugugca

SEQ ID NO: 80620 - RNA, 32 nt, Human
caccucgggcacaucgcaugcacucagagcac

SEQ ID NO: 80621 - RNA, 32 nt, Human
caccucgucucccuggugccucugugcacagu

SEQ ID NO: 80622 - RNA, 22 nt, Human
caccucgugauccgcccgccuc

SEQ ID NO: 80623 - RNA, 32 nt, Human
caccucguuagaaaauuccucccagucagggg

SEQ ID NO: 80624 - RNA, 32 nt, Human
caccucuaacuccuccuccuccucucuucucc

SEQ ID NO: 80625 - RNA, 32 nt, Human
caccucuaaucaugugcuccucuccuucccaa

SEQ ID NO: 80626 - RNA, 32 nt, Human
caccucuacaaaaaguacaaaaauuagucggg

SEQ ID NO: 80627 - RNA, 32 nt, Human
caccucuacuaaaaauacaaaaauuagccagg

SEQ ID NO: 80628 - RNA, 32 nt, Human
caccucuacuaaaaauacaaaaauuggucggg

SEQ ID NO: 80629 - RNA, 32 nt, Human
caccucuacuccacguaccccaaaaagauaag

SEQ ID NO: 80630 - RNA, 32 nt, Human
caccucuagauagcaaauagcucucagauggu

SEQ ID NO: 80631 - RNA, 23 nt, Human
caccucuaggaggcagccccuag

SEQ ID NO: 80632 - RNA, 23 nt, Human
caccucuaggccccaaccacgga

SEQ ID NO: 80633 - RNA, 32 nt, Human
caccucuagugacccaggcuggcugagagccu

SEQ ID NO: 80634 - RNA, 25 nt, Human
caccucuauaccuugccugugccuu

SEQ ID NO: 80635 - RNA, 32 nt, Human
caccucuauccaccccauaaggucccuacagc

SEQ ID NO: 80636 - RNA, 32 nt, Human
caccucuauuaaaaauacaaaaauuagccggg

SEQ ID NO: 80637 - RNA, 32 nt, Human
caccucucaauaggaggaaguaaaggaaauuu

SEQ ID NO: 80638 - RNA, 32 nt, Human
caccucucacaucuuauagaucuauaagauca

SEQ ID NO: 80639 - RNA, 32 nt, Human
caccucucagccagugccagcugggugggucu

SEQ ID NO: 80640 - RNA, 32 nt, Human
caccucucagccuccagaucccuuccugccca

SEQ ID NO: 80641 - RNA, 32 nt, Human
caccucucaggagaagccagaggcccuggcca

SEQ ID NO: 80642 - RNA, 32 nt, Human
caccucuccacagggccagcuccuuagggaua

SEQ ID NO: 80643 - RNA, 32 nt, Human
caccucuccaggcucugcucugcagcacaccc

SEQ ID NO: 80644 - RNA, 32 nt, Human
caccucuccaggcucugcucuguagcacaccc

SEQ ID NO: 80645 - RNA, 28 nt, Human
caccucuccagugcugccugcagucagc

SEQ ID NO: 80646 - RNA, 32 nt, Human
caccucuccauccuggggccaggacucuuaug

SEQ ID NO: 80647 - RNA, 19 nt, Human
caccucuccccagcccagg

SEQ ID NO: 80648 - RNA, 32 nt, Human
caccucucccuccccucuccucuccuccccuu

SEQ ID NO: 80649 - RNA, 32 nt, Human
caccucucccuuucucccuugucucccuugag

SEQ ID NO: 80650 - RNA, 32 nt, Human
caccucuccggcugccccugccucccaucaca

SEQ ID NO: 80651 - RNA, 32 nt, Human
caccucuccuccccucuccucaguuuugccga

SEQ ID NO: 80652 - RNA, 32 nt, Human
caccucuccucuguccuugcugccucagaguc

SEQ ID NO: 80653 - RNA, 32 nt, Human
caccucuccuuuggagccaccuugucccuggc

SEQ ID NO: 80654 - RNA, 32 nt, Human
caccucucuccagcaaaggacaccugcagaga

SEQ ID NO: 80655 - RNA, 32 nt, Human
caccucucuccaggaucucugcugucucuugg

SEQ ID NO: 80656 - RNA, 32 nt, Human
caccucucugcagcuccuucuccaaucucaug

SEQ ID NO: 80657 - RNA, 32 nt, Human
caccucucugucuuuuuccuuccugagaaacg

SEQ ID NO: 80658 - RNA, 32 nt, Human
caccucucuuccaggccuuccuaaguuuuugu

SEQ ID NO: 80659 - RNA, 32 nt, Human
caccucucuuucuccccuuuuaagccaugggu

SEQ ID NO: 80660 - RNA, 28 nt, Human
caccucugaagugcugcuugaaucuggc

SEQ ID NO: 80661 - RNA, 32 nt, Human
caccucugagccacccaucaccgccaaagugu

SEQ ID NO: 80662 - RNA, 22 nt, Human
caccucugagggcagcccccag

SEQ ID NO: 80663 - RNA, 32 nt, Human
caccucugcaaccugccaccuccugcuggcag

SEQ ID NO: 80664 - RNA, 18 nt, Human
caccucugcaccugcuga

SEQ ID NO: 80665 - RNA, 32 nt, Human
caccucugccaggugccagcuguacugugcac

SEQ ID NO: 80666 - RNA, 18 nt, Human
caccucugcccucuccca

SEQ ID NO: 80667 - RNA, 31 nt, Human
caccucugcuacuuccugccugugucaccug

SEQ ID NO: 80668 - RNA, 32 nt, Human
caccucugcucaccuuacuguucaccucauca

SEQ ID NO: 80669 - RNA, 32 nt, Human
caccucugcuccacaccugaccaguggccagc

SEQ ID NO: 80670 - RNA, 20 nt, Human
caccucugcugcccuggaga

SEQ ID NO: 80671 - RNA, 32 nt, Human
caccucugcuuggagaggacaagugcagccug

SEQ ID NO: 80672 - RNA, 32 nt, Human
caccucuggccaggcaggcaccagcucgcaug

SEQ ID NO: 80673 - RNA, 29 nt, Human
caccucuggcugcugcaggccucccaaga

SEQ ID NO: 80674 - RNA, 32 nt, Human
caccucugggcauagugggcucuggcuggcag

SEQ ID NO: 80675 - RNA, 32 nt, Human
caccucuggucaggagggucacccuggccugc

SEQ ID NO: 80676 - RNA, 32 nt, Human
caccucugucagaaaaccuaaauuuaagucac

SEQ ID NO: 80677 - RNA, 32 nt, Human
caccucuguccgaagacuucggauggcucccu

SEQ ID NO: 80678 - RNA, 32 nt, Human
caccucuguccugcguuccggagcugcguucc

SEQ ID NO: 80679 - RNA, 32 nt, Human
caccucugugucguguucucucuuguccccca

SEQ ID NO: 80680 - RNA, 32 nt, Human
caccucuucaaccaccuccggcuuccaggacc

SEQ ID NO: 80681 - RNA, 32 nt, Human
caccucuucaagaagcagcacagucucaggca

SEQ ID NO: 80682 - RNA, 32 nt, Human
caccucuucagagaccacuucucaggcugccc

SEQ ID NO: 80683 - RNA, 32 nt, Human
caccucuucccaagccuguuucccauaucaca

SEQ ID NO: 80684 - RNA, 32 nt, Human
caccucuucccugaggcuucugaagguugcug

SEQ ID NO: 80685 - RNA, 32 nt, Human
caccucuucuuucugugacaaagugcaucauu

SEQ ID NO: 80686 - RNA, 32 nt, Human
caccucuugaaauccagauguucauauuagac

SEQ ID NO: 80687 - RNA, 22 nt, Human
caccucuugccaccugcugcug

SEQ ID NO: 80688 - RNA, 32 nt, Human
caccucuugccaggcugcagagcuaugcaguc

SEQ ID NO: 80689 - RNA, 32 nt, Human
caccucuugccucaccauggccuccucugacc

SEQ ID NO: 80690 - RNA, 32 nt, Human
caccucuugccucugcuuuccugaucauucgu

SEQ ID NO: 80691 - RNA, 32 nt, Human
caccucuugccucuguaccuggucuuuguguu

SEQ ID NO: 80692 - RNA, 32 nt, Human
caccucuuucucaccguggccuccuggggcaa

SEQ ID NO: 80693 - RNA, 32 nt, Human
caccucuuugacuaggucccaggauccccuug

SEQ ID NO: 80694 - RNA, 32 nt, Human
caccucuuugggccuggcugggugggaaugug

SEQ ID NO: 80695 - RNA, 23 nt, Human
caccugaaaagcuugucuacuga

SEQ ID NO: 80696 - RNA, 32 nt, Human
caccugaaaagcuugucuacugaagaauuacu

SEQ ID NO: 80697 - RNA, 32 nt, Human
caccugaaacacacacaaacacacacaugucg

SEQ ID NO: 80698 - RNA, 20 nt, Human
caccugaaaucccagcuacu

SEQ ID NO: 80699 - RNA, 32 nt, Human
caccugaaccaauuaugagcagucuccuuacu

SEQ ID NO: 80700 - RNA, 32 nt, Human
caccugaagaagagaagcuuccggcaacccug

SEQ ID NO: 80701 - RNA, 32 nt, Human
caccugaagccaccugccccuccuuugugccc

SEQ ID NO: 80702 - RNA, 20 nt, Human
caccugaagggguccacagc

SEQ ID NO: 80703 - RNA, 32 nt, Human
caccugaaguagaacuuaagagaggggccaag

SEQ ID NO: 80704 - RNA, 20 nt, Human
caccugaaucagggcugugg

SEQ ID NO: 80705 - RNA, 32 nt, Human
caccugacagcugaccaggugaagagaggaua

SEQ ID NO: 80706 - RNA, 32 nt, Human
caccugacccaagaaaagaaacauggauucuu

SEQ ID NO: 80707 - RNA, 24 nt, Human
caccugacccagcuggccucggcc

SEQ ID NO: 80708 - RNA, 18 nt, Human
caccugacccaggcuggg

SEQ ID NO: 80709 - RNA, 32 nt, Human
caccugaccccugccaaggcccugggguuuua

SEQ ID NO: 80710 - RNA, 32 nt, Human
caccugacuccucuccccucguuuuuccuuca

SEQ ID NO: 80711 - RNA, 32 nt, Human
caccugacugcacuccagccuggguggcaaag

SEQ ID NO: 80712 - RNA, 32 nt, Human
caccugagaacuuguuaaaaaugcagauucuu

SEQ ID NO: 80713 - RNA, 18 nt, Human
caccugagacccuacuga

SEQ ID NO: 80714 - RNA, 32 nt, Human
caccugagacucacccuuagcacagcacaacc

SEQ ID NO: 80715 - RNA, 32 nt, Human
caccugagaguaguauaguagugcaaaaugga

SEQ ID NO: 80716 - RNA, 32 nt, Human
caccugagaucagcagagccacccuagaucag

SEQ ID NO: 80717 - RNA, 32 nt, Human
caccugagaucaggaguucaagacaaggcuga

SEQ ID NO: 80718 - RNA, 32 nt, Human
caccugagcaggaccucugaaacccuggacca

SEQ ID NO: 80719 - RNA, 32 nt, Human
caccugagcccaagcucauugcuucuuccuga

SEQ ID NO: 80720 - RNA, 32 nt, Human
caccugagccugacagaggagaagcagcggcu

SEQ ID NO: 80721 - RNA, 32 nt, Human
caccugagccugggaggcugaggcgggagaau

SEQ ID NO: 80722 - RNA, 32 nt, Human
caccugagccugggcaauagaacaagacucug

SEQ ID NO: 80723 - RNA, 32 nt, Human
caccugagcugagcccagcccagacccagcug

SEQ ID NO: 80724 - RNA, 32 nt, Human
caccugaggaaggaacuagagagaguggcagg

SEQ ID NO: 80725 - RNA, 32 nt, Human
caccugaggagaaggccuggggaggccacagu

SEQ ID NO: 80726 - RNA, 32 nt, Human
caccugaggagagugagcagccuggaccacaa

SEQ ID NO: 80727 - RNA, 32 nt, Human
caccugaggaggaguccugggucugggcacau

SEQ ID NO: 80728 - RNA, 32 nt, Human
caccugaggcagugugggaguugaacgacccu

SEQ ID NO: 80729 - RNA, 32 nt, Human
caccugaggucaguucaagaccagccuggcca

SEQ ID NO: 80730 - RNA, 32 nt, Human
caccugaggucaguucgagaccagcuuggcca

SEQ ID NO: 80731 - RNA, 32 nt, Human
caccugaggucaguuugagaccagccugggca

SEQ ID NO: 80732 - RNA, 32 nt, Human
caccugaggugagacuucguccagcuucuguc

SEQ ID NO: 80733 - RNA, 32 nt, Human
caccugagguuagaaguuugagaccagccugg

SEQ ID NO: 80734 - RNA, 32 nt, Human
caccugagguuaggaguuugagaccagccugg

SEQ ID NO: 80735 - RNA, 32 nt, Human
caccugaguagcagggauuacaggugugugcc

SEQ ID NO: 80736 - RNA, 32 nt, Human
caccugaguagcugggaguacaggcauguggc

SEQ ID NO: 80737 - RNA, 32 nt, Human
caccugaguagcugggauuacacgcacaugcc

SEQ ID NO: 80738 - RNA, 32 nt, Human
caccugaguccaggaauuugagaccagcaugg

SEQ ID NO: 80739 - RNA, 32 nt, Human
caccugaguucaaauaccagcacugcaggacu

SEQ ID NO: 80740 - RNA, 32 nt, Human
caccugaucccauccaggcgcugagaggcaag

SEQ ID NO: 80741 - RNA, 20 nt, Human
caccugaugaucgccuacug

SEQ ID NO: 80742 - RNA, 32 nt, Human
caccugaugugguugaggagaagccaggucuu

SEQ ID NO: 80743 - RNA, 32 nt, Human
caccugauugagcacagugacucuggggacac

SEQ ID NO: 80744 - RNA, 32 nt, Human
caccugcaacaagcucugauacuccaggggau

SEQ ID NO: 80745 - RNA, 23 nt, Human
caccugcaacagcuucugcugcu

SEQ ID NO: 80746 - RNA, 32 nt, Human
caccugcaagaggaggcucaggugcugacuga

SEQ ID NO: 80747 - RNA, 22 nt, Human
caccugcaaucccagcuacuca

SEQ ID NO: 80748 - RNA, 18 nt, Human
caccugcacaaccugcac

SEQ ID NO: 80749 - RNA, 22 nt, Human
caccugcaccccuucugggcug

SEQ ID NO: 80750 - RNA, 32 nt, Human
caccugcacccuccaggcagaguuguuugacc

SEQ ID NO: 80751 - RNA, 32 nt, Human
caccugcacucccagcuacucgggaggcucag

SEQ ID NO: 80752 - RNA, 21 nt, Human
caccugcacuuacaggccuug

SEQ ID NO: 80753 - RNA, 32 nt, Human
caccugcacuuucccccuacucguccacuagu

SEQ ID NO: 80754 - RNA, 25 nt, Human
caccugcagaggugccugugucuca

SEQ ID NO: 80755 - RNA, 31 nt, Human
caccugcagauucuaggaccuguguccuaga

SEQ ID NO: 80756 - RNA, 22 nt, Human
caccugcagauuucuugcugcu

SEQ ID NO: 80757 - RNA, 32 nt, Human
caccugcagcagagguggagugggggccaugu

SEQ ID NO: 80758 - RNA, 32 nt, Human
caccugcagcuuccgcaccuccugguccgcgu

SEQ ID NO: 80759 - RNA, 32 nt, Human
caccugcagcuuugccuuuugcugacacagcu

SEQ ID NO: 80760 - RNA, 32 nt, Human
caccugcaggaaggccagagguucugguggag

SEQ ID NO: 80761 - RNA, 32 nt, Human
caccugcaggaccccacacucacugcacuggc

SEQ ID NO: 80762 - RNA, 21 nt, Human
caccugcaggacccuguccug

SEQ ID NO: 80763 - RNA, 32 nt, Human
caccugcaggccuacuuuccagaaguaacucu

SEQ ID NO: 80764 - RNA, 32 nt, Human
caccugcagggaggcccuucccaagguguggu

SEQ ID NO: 80765 - RNA, 24 nt, Human
caccugcauaguaacuguguuuug

SEQ ID NO: 80766 - RNA, 32 nt, Human
caccugcaucacagguggaagcuccuucacuc

SEQ ID NO: 80767 - RNA, 20 nt, Human
caccugcaucccuaagucuu

SEQ ID NO: 80768 - RNA, 32 nt, Human
caccugcaucuucugaucaccuggcccagaag

SEQ ID NO: 80769 - RNA, 32 nt, Human
caccugcaugggcugagucccugggcucagac

SEQ ID NO: 80770 - RNA, 22 nt, Human
caccugcauggugcacggccug

SEQ ID NO: 80771 - RNA, 32 nt, Human
caccugcauggugcacggccugugcugccuuc

SEQ ID NO: 80772 - RNA, 24 nt, Human
caccugcauucucugucacugcug

SEQ ID NO: 80773 - RNA, 32 nt, Human
caccugccaaagugcugagauuacaggcguga

SEQ ID NO: 80774 - RNA, 32 nt, Human
caccugccaaccugaccauacugcuuucaaaa

SEQ ID NO: 80775 - RNA, 32 nt, Human
caccugccaaggaucccagcaggcuggaugag

SEQ ID NO: 80776 - RNA, 32 nt, Human
caccugccacacacagugacugugcagaauga

SEQ ID NO: 80777 - RNA, 32 nt, Human
caccugccacuuugcccugcccucugccucca

SEQ ID NO: 80778 - RNA, 32 nt, Human
caccugccagccccaacacccgacgggggccg

SEQ ID NO: 80779 - RNA, 32 nt, Human
caccugccauccugucuuccugacccccacuc

SEQ ID NO: 80780 - RNA, 32 nt, Human
caccugccauucauuugcuaauuuuuguggcg

SEQ ID NO: 80781 - RNA, 32 nt, Human
caccugccauuuccucccugccucccacccuc

SEQ ID NO: 80782 - RNA, 32 nt, Human
caccugcccaaaaccaaacgcagcaucuuccc

SEQ ID NO: 80783 - RNA, 32 nt, Human
caccugcccacccugcacucccauucuguuuc

SEQ ID NO: 80784 - RNA, 23 nt, Human
caccugcccacgccgacuuggga

SEQ ID NO: 80785 - RNA, 18 nt, Human
caccugcccaugguguca

SEQ ID NO: 80786 - RNA, 32 nt, Human
caccugccccacugcuucuucgcuucucucuu

SEQ ID NO: 80787 - RNA, 22 nt, Human
caccugcccccagcccggggag

SEQ ID NO: 80788 - RNA, 19 nt, Human
caccugcccccaucugcac

SEQ ID NO: 80789 - RNA, 32 nt, Human
caccugccccucuguucucuccccucacaucc

SEQ ID NO: 80790 - RNA, 32 nt, Human
caccugcccggagacagagggagcagcugagg

SEQ ID NO: 80791 - RNA, 32 nt, Human
caccugcccuccugcccuccuucaccagccaa

SEQ ID NO: 80792 - RNA, 32 nt, Human
caccugcccuccuugcagcccagcacaccugc

SEQ ID NO: 80793 - RNA, 32 nt, Human
caccugcccuucugcugacacuccugccugcu

SEQ ID NO: 80794 - RNA, 21 nt, Human
caccugccgcaagaccaacaa

SEQ ID NO: 80795 - RNA, 18 nt, Human
caccugccggccaagaaa

SEQ ID NO: 80796 - RNA, 32 nt, Human
caccugccggcucugggcuggcugcuccuaac

SEQ ID NO: 80797 - RNA, 32 nt, Human
caccugccguccugucuuccugacccccgcuu

SEQ ID NO: 80798 - RNA, 31 nt, Human
caccugccgugcucugggccaggucgcuggg

SEQ ID NO: 80799 - RNA, 32 nt, Human
caccugccuccaggugcccagaacagcccauc

SEQ ID NO: 80800 - RNA, 32 nt, Human
caccugccuccccagaaugaacaucagaaaag

SEQ ID NO: 80801 - RNA, 32 nt, Human
caccugccugaguauaaauacucucucuaccu

SEQ ID NO: 80802 - RNA, 32 nt, Human
caccugccugcaggcgcugcucccagguuaug

SEQ ID NO: 80803 - RNA, 18 nt, Human
caccugccugcugggccc

SEQ ID NO: 80804 - RNA, 32 nt, Human
caccugccuggaacugccuggagcgccauggu

SEQ ID NO: 80805 - RNA, 32 nt, Human
caccugccuggaccaccacuuccccacaggcu

SEQ ID NO: 80806 - RNA, 32 nt, Human
caccugccugggaacuuuccccugccaggacu

SEQ ID NO: 80807 - RNA, 32 nt, Human
caccugccuguaaucccagcuacuugggaggc

SEQ ID NO: 80808 - RNA, 32 nt, Human
caccugccuguauaccccagacuugccucugg

SEQ ID NO: 80809 - RNA, 32 nt, Human
caccugccuuuuuggcugcugcaccugaacag

SEQ ID NO: 80810 - RNA, 21 nt, Human
caccugcgccuccaacugcug

SEQ ID NO: 80811 - RNA, 32 nt, Human
caccugcgccuccaacugcugcaccugcuccu

SEQ ID NO: 80812 - RNA, 32 nt, Human
caccugcggcuacaagucccuccuggggccug

SEQ ID NO: 80813 - RNA, 32 nt, Human
caccugcgugagcccuaggauccagguccucu

SEQ ID NO: 80814 - RNA, 20 nt, Human
caccugcguguccugugcuu

SEQ ID NO: 80815 - RNA, 32 nt, Human
caccugcuacuucccuucacagacacaggaga

SEQ ID NO: 80816 - RNA, 23 nt, Human
caccugcuagcaggaggcaccug

SEQ ID NO: 80817 - RNA, 19 nt, Human
caccugcucaccaauucca

SEQ ID NO: 80818 - RNA, 32 nt, Human
caccugcucaccccacugccuguucuucucuc

SEQ ID NO: 80819 - RNA, 32 nt, Human
caccugcucagcugcccgucucuggccugggc

SEQ ID NO: 80820 - RNA, 32 nt, Human
caccugcucaguaugaugcuucugagcuaaaa

SEQ ID NO: 80821 - RNA, 32 nt, Human
caccugcuccauccucuaggguuccacaggcc

SEQ ID NO: 80822 - RNA, 32 nt, Human
caccugcucccaggacaccagccaugcccuuu

SEQ ID NO: 80823 - RNA, 21 nt, Human
caccugcuccuccagcugcug

SEQ ID NO: 80824 - RNA, 32 nt, Human
caccugcuccuccagcugcugcaccugccucu

SEQ ID NO: 80825 - RNA, 32 nt, Human
caccugcuccuccuccucugacucggaaccug

SEQ ID NO: 80826 - RNA, 32 nt, Human
caccugcucggcugcaggagaauggcuacuca

SEQ ID NO: 80827 - RNA, 32 nt, Human
caccugcucuccaccuggacucaggccgggcu

SEQ ID NO: 80828 - RNA, 32 nt, Human
caccugcucuuucugaagagcuacaucaguaa

SEQ ID NO: 80829 - RNA, 32 nt, Human
caccugcugcagcucuccaccuagcugcagau

SEQ ID NO: 80830 - RNA, 32 nt, Human
caccugcugcaucaccaggcugggugaacgga

SEQ ID NO: 80831 - RNA, 32 nt, Human
caccugcugccuggauccccggccugccuggg

SEQ ID NO: 80832 - RNA, 26 nt, Human
caccugcugcggucaccaugguggcg

SEQ ID NO: 80833 - RNA, 32 nt, Human
caccugcugcucaacaggaaacauacaauuag

SEQ ID NO: 80834 - RNA, 32 nt, Human
caccugcugcucaugguacccagugauucuug

SEQ ID NO: 80835 - RNA, 32 nt, Human
caccugcugcucccuccuuccucgcucccagc

SEQ ID NO: 80836 - RNA, 21 nt, Human
caccugcugcugcugcugcug

SEQ ID NO: 80837 - RNA, 32 nt, Human
caccugcuggaccaccucgccuucuccaucga

SEQ ID NO: 80838 - RNA, 32 nt, Human
caccugcugggcuccaagcccugggccaggcu

SEQ ID NO: 80839 - RNA, 32 nt, Human
caccugcuggggaggcagagacccugcaaugg

SEQ ID NO: 80840 - RNA, 32 nt, Human
caccugcugggugacuuggccaggauccccca

SEQ ID NO: 80841 - RNA, 32 nt, Human
caccugcugugguguguguccucuccucuccg

SEQ ID NO: 80842 - RNA, 32 nt, Human
caccugcuuaaaggcccugcauccugccaggu

SEQ ID NO: 80843 - RNA, 32 nt, Human
caccugcuuacagauaacagccaaagauagaa

SEQ ID NO: 80844 - RNA, 32 nt, Human
caccugcuucccaguccugccugaacagcccu

SEQ ID NO: 80845 - RNA, 32 nt, Human
caccugcuuccugauguucaccaggaaccuag

SEQ ID NO: 80846 - RNA, 32 nt, Human
caccugcuucuagcucaccugggaaauaacag

SEQ ID NO: 80847 - RNA, 32 nt, Human
caccugcuucuagcuucacuuuugggccagau

SEQ ID NO: 80848 - RNA, 32 nt, Human
caccugcuuuucucagcuuggcccuuccccgg

SEQ ID NO: 80849 - RNA, 19 nt, Human
caccuggaaaagccacugg

SEQ ID NO: 80850 - RNA, 21 nt, Human
caccuggaaaccugugccuug

SEQ ID NO: 80851 - RNA, 20 nt, Human
caccuggaaccagcuccuga

SEQ ID NO: 80852 - RNA, 32 nt, Human
caccuggaacccgaccucccagccucgcagcc

SEQ ID NO: 80853 - RNA, 32 nt, Human
caccuggaagcuuguuggaaaugcugaucuca

SEQ ID NO: 80854 - RNA, 19 nt, Human
caccuggaaucccugcuga

SEQ ID NO: 80855 - RNA, 32 nt, Human
caccuggacaguagacagggacuucagagauu

SEQ ID NO: 80856 - RNA, 32 nt, Human
caccuggacaucuaugaccacugccagucgag

SEQ ID NO: 80857 - RNA, 18 nt, Human
caccuggaccaccucuga

SEQ ID NO: 80858 - RNA, 22 nt, Human
caccuggaccaccugaccccuc

SEQ ID NO: 80859 - RNA, 32 nt, Human
caccuggaccagcugcucagcugucugaagac

SEQ ID NO: 80860 - RNA, 18 nt, Human
caccuggaccaggcuugc

SEQ ID NO: 80861 - RNA, 32 nt, Human
caccuggacgcagagcccugccagcgcccucc

SEQ ID NO: 80862 - RNA, 20 nt, Human
caccuggacuauuuuucuga

SEQ ID NO: 80863 - RNA, 18 nt, Human
caccuggacugacccugc

SEQ ID NO: 80864 - RNA, 18 nt, Human
caccuggacugacuucug

SEQ ID NO: 80865 - RNA, 20 nt, Human
caccuggacuggcucaguga

SEQ ID NO: 80866 - RNA, 20 nt, Human
caccuggacuuuucacuaga

SEQ ID NO: 80867 - RNA, 20 nt, Human
caccuggagaaaccacauga

SEQ ID NO: 80868 - RNA, 32 nt, Human
caccuggagacccaccucccaccccagugcac

SEQ ID NO: 80869 - RNA, 32 nt, Human
caccuggagaucuuggugaaaugcagacucug

SEQ ID NO: 80870 - RNA, 19 nt, Human
caccuggagcagccucuga

SEQ ID NO: 80871 - RNA, 32 nt, Human
caccuggagccccacccaggagcuggccgcgg

SEQ ID NO: 80872 - RNA, 32 nt, Human
caccuggaggcuggacacaagugucaccacuu

SEQ ID NO: 80873 - RNA, 32 nt, Human
caccuggaggggcgaugaggcuccacgcccgg

SEQ ID NO: 80874 - RNA, 24 nt, Human
caccuggaggucagaaccuggccu

SEQ ID NO: 80875 - RNA, 32 nt, Human
caccuggauaacucaggaugggggcugcucac

SEQ ID NO: 80876 - RNA, 32 nt, Human
caccuggauugcauuagaaugagacucacuac

SEQ ID NO: 80877 - RNA, 32 nt, Human
caccuggcaacagcagugugggcugcagggcu

SEQ ID NO: 80878 - RNA, 32 nt, Human
caccuggcaacagucuccccucauccugauuc

SEQ ID NO: 80879 - RNA, 32 nt, Human
caccuggcaaccccagccccagccucagcccu

SEQ ID NO: 80880 - RNA, 32 nt, Human
caccuggcaacugcuuaccagccuggcuggcc

SEQ ID NO: 80881 - RNA, 24 nt, Human
caccuggcacacagcagggaccca

SEQ ID NO: 80882 - RNA, 23 nt, Human
caccuggcaccccccugcugcug

SEQ ID NO: 80883 - RNA, 32 nt, Human
caccuggcacugaggagaaugguagagaggag

SEQ ID NO: 80884 - RNA, 32 nt, Human
caccuggcacuggccuuggccacccacuucuc

SEQ ID NO: 80885 - RNA, 32 nt, Human
caccuggcagccaaucgcaggucuccacugga

SEQ ID NO: 80886 - RNA, 32 nt, Human
caccuggcagggcucacacuccugggcucuga

SEQ ID NO: 80887 - RNA, 21 nt, Human
caccuggcagggcucccucca

SEQ ID NO: 80888 - RNA, 22 nt, Human
caccuggccacaaaauucuuua

SEQ ID NO: 80889 - RNA, 21 nt, Human
caccuggccacagccgccucu

SEQ ID NO: 80890 - RNA, 24 nt, Human
caccuggccacagccuccacacca

SEQ ID NO: 80891 - RNA, 24 nt, Human
caccuggccacaggugcacccuuc

SEQ ID NO: 80892 - RNA, 28 nt, Human
caccuggccacugcugccuuauccauuc

SEQ ID NO: 80893 - RNA, 21 nt, Human
caccuggcccagccccuuuca

SEQ ID NO: 80894 - RNA, 32 nt, Human
caccuggcccaggaugcaggcugcucuagaga

SEQ ID NO: 80895 - RNA, 32 nt, Human
caccuggcccaucugguggcugugccauggga

SEQ ID NO: 80896 - RNA, 21 nt, Human
caccuggccccacgcccuuca

SEQ ID NO: 80897 - RNA, 20 nt, Human
caccuggccgccagucgccu

SEQ ID NO: 80898 - RNA, 32 nt, Human
caccuggccuccaggagucgcuguguugggag

SEQ ID NO: 80899 - RNA, 19 nt, Human
caccuggccucccucaggg

SEQ ID NO: 80900 - RNA, 19 nt, Human
caccuggccuccugggccu

SEQ ID NO: 80901 - RNA, 32 nt, Human
caccuggccugggaaaguacuugccucauguu

SEQ ID NO: 80902 - RNA, 32 nt, Human
caccuggccugggaagcaccgucugcccgggc

SEQ ID NO: 80903 - RNA, 32 nt, Human
caccuggcuacccuuucaguuuuaagccauaa

SEQ ID NO: 80904 - RNA, 32 nt, Human
caccuggcucaauccuccuccaccaccagggg

SEQ ID NO: 80905 - RNA, 32 nt, Human
caccuggcucagagagggacagaagaaggagu

SEQ ID NO: 80906 - RNA, 32 nt, Human
caccugggaacuuguuagaaaugcagauuccc

SEQ ID NO: 80907 - RNA, 32 nt, Human
caccugggaacuuguuggaaaugcagccucuc

SEQ ID NO: 80908 - RNA, 32 nt, Human
caccugggaagugcccuggucuuacuuggguc

SEQ ID NO: 80909 - RNA, 32 nt, Human
caccugggaauucgcuggaaaugcaggcucaa

SEQ ID NO: 80910 - RNA, 21 nt, Human
caccugggaccuguguugcug

SEQ ID NO: 80911 - RNA, 32 nt, Human
caccugggacugguauccccucccagggucca

SEQ ID NO: 80912 - RNA, 32 nt, Human
caccugggagauuguuaggaaugcagauucuc

SEQ ID NO: 80913 - RNA, 32 nt, Human
caccugggagcacggcgccuggcucuuaccag

SEQ ID NO: 80914 - RNA, 32 nt, Human
caccugggagcuauuuacaaauguccaugugg

SEQ ID NO: 80915 - RNA, 32 nt, Human
caccugggagcuuguuaggaaugcagagucua

SEQ ID NO: 80916 - RNA, 32 nt, Human
caccugggaggaacguuccccuuugcaaggca

SEQ ID NO: 80917 - RNA, 32 nt, Human
caccugggaggucugggaggccaguccaucca

SEQ ID NO: 80918 - RNA, 32 nt, Human
caccugggccagcaaagaggagggguccagag

SEQ ID NO: 80919 - RNA, 32 nt, Human
caccugggccaucuugguuuuugcaagaaaaa

SEQ ID NO: 80920 - RNA, 18 nt, Human
caccugggccccugcuga

SEQ ID NO: 80921 - RNA, 20 nt, Human
caccugggcccugcaagcag

SEQ ID NO: 80922 - RNA, 23 nt, Human
caccugggcccugcggccagcag

SEQ ID NO: 80923 - RNA, 22 nt, Human
caccugggcccuggugaggcag

SEQ ID NO: 80924 - RNA, 17 nt, Human
caccugggccgggcugu

SEQ ID NO: 80925 - RNA, 32 nt, Human
caccugggccucccccugccacuccccucccu

SEQ ID NO: 80926 - RNA, 19 nt, Human
caccugggccucuccucgg

SEQ ID NO: 80927 - RNA, 31 nt, Human
caccugggccucucuguguuugguuccaagc

SEQ ID NO: 80928 - RNA, 23 nt, Human
caccugggccuuuuccccaagca

SEQ ID NO: 80929 - RNA, 20 nt, Human
caccugggcuccccuccuga

SEQ ID NO: 80930 - RNA, 32 nt, Human
caccugggcuccugccaguuucaugugugccc

SEQ ID NO: 80931 - RNA, 21 nt, Human
caccugggcuggagugcagug

SEQ ID NO: 80932 - RNA, 32 nt, Human
caccuggggaaacccccuuggcguggcuuguu

SEQ ID NO: 80933 - RNA, 32 nt, Human
caccuggggaauggggucccggccgggaggcu

SEQ ID NO: 80934 - RNA, 20 nt, Human
caccuggggacuccccacug

SEQ ID NO: 80935 - RNA, 32 nt, Human
caccuggggccaaugguguugauugcagacug

SEQ ID NO: 80936 - RNA, 32 nt, Human
caccuggggccugcugguguugcugguggaua

SEQ ID NO: 80937 - RNA, 32 nt, Human
caccuggggcuccagggagcaggcugggaacu

SEQ ID NO: 80938 - RNA, 32 nt, Human
caccuggggcuggggaucccacucuucuugca

SEQ ID NO: 80939 - RNA, 32 nt, Human
caccugggggacccucaaccccaaaguggauu

SEQ ID NO: 80940 - RNA, 21 nt, Human
caccuggguaccugaccccca

SEQ ID NO: 80941 - RNA, 18 nt, Human
caccugggugucuaccgg

SEQ ID NO: 80942 - RNA, 32 nt, Human
caccuggguucucugccaggggagagaguuau

SEQ ID NO: 80943 - RNA, 20 nt, Human
caccuggguuggggcggcgg

SEQ ID NO: 80944 - RNA, 24 nt, Human
caccugguacuguuccagcaucuu

SEQ ID NO: 80945 - RNA, 32 nt, Human
caccuggucucuggcccugguucuuauuuucu

SEQ ID NO: 80946 - RNA, 21 nt, Human
caccuggugacaccuccuuca

SEQ ID NO: 80947 - RNA, 32 nt, Human
caccuggugagugaggcuucaagggagaugcu

SEQ ID NO: 80948 - RNA, 32 nt, Human
caccuggugcaccacacugucuucauguuggc

SEQ ID NO: 80949 - RNA, 32 nt, Human
caccugguggcugaggcauucuugggccacau

SEQ ID NO: 80950 - RNA, 32 nt, Human
caccuggugggauggggaguguuaauaucucu

SEQ ID NO: 80951 - RNA, 32 nt, Human
caccuggugggcauagccagagcuguucgaac

SEQ ID NO: 80952 - RNA, 20 nt, Human
caccuggugucuccauugga

SEQ ID NO: 80953 - RNA, 22 nt, Human
caccugguguugaaccugcuga

SEQ ID NO: 80954 - RNA, 32 nt, Human
caccugguuaccacagucuccaugggucuuuu

SEQ ID NO: 80955 - RNA, 32 nt, Human
caccugguuacgcuucaccucuuguuuccugc

SEQ ID NO: 80956 - RNA, 32 nt, Human
caccugguuaugccuccuuucaucucaaagcc

SEQ ID NO: 80957 - RNA, 32 nt, Human
caccuguaaccccaucuucucugaguacagac

SEQ ID NO: 80958 - RNA, 32 nt, Human
caccuguaauaaucccagcacuuugggaggcc

SEQ ID NO: 80959 - RNA, 32 nt, Human
caccuguaaucacugcacuccaaccuggcaac

SEQ ID NO: 80960 - RNA, 20 nt, Human
caccuguaaucccaacacuu

SEQ ID NO: 80961 - RNA, 32 nt, Human
caccuguaaucccagcacuuagggaagacaag

SEQ ID NO: 80962 - RNA, 20 nt, Human
caccuguaaucccagcuacu

SEQ ID NO: 80963 - RNA, 21 nt, Human
caccuguaaucccagcuacuc

SEQ ID NO: 80964 - RNA, 22 nt, Human
caccuguaaucccagcuacuca

SEQ ID NO: 80965 - RNA, 22 nt, Human
caccuguaaucccagcuauuca

SEQ ID NO: 80966 - RNA, 22 nt, Human
caccuguaaucccagguacuca

SEQ ID NO: 80967 - RNA, 32 nt, Human
caccuguaaucccagugcuuugggaggccaag

SEQ ID NO: 80968 - RNA, 22 nt, Human
caccuguaaucccaguuacuca

SEQ ID NO: 80969 - RNA, 32 nt, Human
caccuguaaucccggcuacucgggaggcugag

SEQ ID NO: 80970 - RNA, 22 nt, Human
caccuguaaucucagcuacuca

SEQ ID NO: 80971 - RNA, 32 nt, Human
caccuguacaaucguauuuucuuucugucauu

SEQ ID NO: 80972 - RNA, 32 nt, Human
caccuguaccagggagcuuacaagaagcauuu

SEQ ID NO: 80973 - RNA, 32 nt, Human
caccuguaggcagaggcugccgagacagaccc

SEQ ID NO: 80974 - RNA, 32 nt, Human
caccuguaguaaucccagcuacucaggagguu

SEQ ID NO: 80975 - RNA, 32 nt, Human
caccuguaguagucccagcuacaugggaagcu

SEQ ID NO: 80976 - RNA, 22 nt, Human
caccuguagucccagcuacuca

SEQ ID NO: 80977 - RNA, 21 nt, Human
caccuguagucccagcuacug

SEQ ID NO: 80978 - RNA, 32 nt, Human
caccuguagucccaggcugaggugggaggauc

SEQ ID NO: 80979 - RNA, 32 nt, Human
caccuguagucccggcuacucgggaggcugag

SEQ ID NO: 80980 - RNA, 21 nt, Human
caccuguaguccuagcuacug

SEQ ID NO: 80981 - RNA, 32 nt, Human
caccuguaguccuaucauucagagauaaccac

SEQ ID NO: 80982 - RNA, 32 nt, Human
caccuguauuaaaaauacaauaauuagccgug

SEQ ID NO: 80983 - RNA, 32 nt, Human
caccuguauucccaacacuuuuggaggcugag

SEQ ID NO: 80984 - RNA, 32 nt, Human
caccuguauugaaucagaaugccuucaacuga

SEQ ID NO: 80985 - RNA, 32 nt, Human
caccugucacagccacucccaagcccacaccc

SEQ ID NO: 80986 - RNA, 32 nt, Human
caccugucacauuccucccuggccaggccuca

SEQ ID NO: 80987 - RNA, 32 nt, Human
caccugucacccugagagccacugaccaguuu

SEQ ID NO: 80988 - RNA, 32 nt, Human
caccugucaggaguuugggaccagccuggcca

SEQ ID NO: 80989 - RNA, 22 nt, Human
caccugucaucccagcuaccca

SEQ ID NO: 80990 - RNA, 22 nt, Human
caccugucaucccagcuacuca

SEQ ID NO: 80991 - RNA, 32 nt, Human
caccuguccaggcuuccuuagguacaucuucu

SEQ ID NO: 80992 - RNA, 32 nt, Human
caccugucccuggaugaagagcugucaccucu

SEQ ID NO: 80993 - RNA, 32 nt, Human
caccuguccuauaagcaggcugccucaaggaa

SEQ ID NO: 80994 - RNA, 31 nt, Human
caccuguccugcagugggccuguguggguua

SEQ ID NO: 80995 - RNA, 32 nt, Human
caccuguccugugcuucucuuuccuuacuucu

SEQ ID NO: 80996 - RNA, 18 nt, Human
caccugucucccuggaga

SEQ ID NO: 80997 - RNA, 32 nt, Human
caccugucucuggcuucugccaccacuuccag

SEQ ID NO: 80998 - RNA, 32 nt, Human
caccugucuguccagccacccuuccacagacu

SEQ ID NO: 80999 - RNA, 32 nt, Human
caccugucuucuucacagucacuggcaacaca

SEQ ID NO: 81000 - RNA, 32 nt, Human
caccugugaauaacugcacuccagccugggca

SEQ ID NO: 81001 - RNA, 32 nt, Human
caccugugacagccucaggagguccugacaac

SEQ ID NO: 81002 - RNA, 32 nt, Human
caccugugacgccguggagcaggaucuucauu

SEQ ID NO: 81003 - RNA, 32 nt, Human
caccugugacuccccaccccacugccugcucu

SEQ ID NO: 81004 - RNA, 32 nt, Human
caccugugagcagcaagacugccgcacguggg

SEQ ID NO: 81005 - RNA, 32 nt, Human
caccugugagccaacagguuaauuaguccauu

SEQ ID NO: 81006 - RNA, 32 nt, Human
caccugugaguggcucccagcacuuugagagg

SEQ ID NO: 81007 - RNA, 32 nt, Human
caccugugcccucaccaccacacuacacagca

SEQ ID NO: 81008 - RNA, 32 nt, Human
caccugugccuguagucccagauacuugggag

SEQ ID NO: 81009 - RNA, 32 nt, Human
caccugugcuccugacagcuccaugcacuaag

SEQ ID NO: 81010 - RNA, 32 nt, Human
caccugugcugcacuccagcugacccaaguag

SEQ ID NO: 81011 - RNA, 22 nt, Human
caccuguggccccagcuucuca

SEQ ID NO: 81012 - RNA, 32 nt, Human
caccuguggcuguagcuuaagacaaggcaaua

SEQ ID NO: 81013 - RNA, 32 nt, Human
caccugugggcagagggacaggucagacaccc

SEQ ID NO: 81014 - RNA, 32 nt, Human
caccugugggccccagugagagacugaacuua

SEQ ID NO: 81015 - RNA, 31 nt, Human
caccugugggugggggagggagagggcaguu

SEQ ID NO: 81016 - RNA, 20 nt, Human
caccuguggucccagcuacu

SEQ ID NO: 81017 - RNA, 21 nt, Human
caccuguggucccagcuacuc

SEQ ID NO: 81018 - RNA, 22 nt, Human
caccuguggucccagcuacuca

SEQ ID NO: 81019 - RNA, 32 nt, Human
caccuguguaggucucaccugugccaggugua

SEQ ID NO: 81020 - RNA, 32 nt, Human
caccuguguccaccccuucuguucgccacacc

SEQ ID NO: 81021 - RNA, 32 nt, Human
caccuguuacuaagucaggaguguaguuggau

SEQ ID NO: 81022 - RNA, 32 nt, Human
caccuguuaucccaacacuuuuggaggccgag

SEQ ID NO: 81023 - RNA, 22 nt, Human
caccuguuauccuagcuacuca

SEQ ID NO: 81024 - RNA, 32 nt, Human
caccuguuaucucuguccccagccucuaucug

SEQ ID NO: 81025 - RNA, 32 nt, Human
caccuguucccauccuccacagucucccaucc

SEQ ID NO: 81026 - RNA, 32 nt, Human
caccuguucgugcagcagcacacacacccuac

SEQ ID NO: 81027 - RNA, 24 nt, Human
caccuguugcagaacugagccacu

SEQ ID NO: 81028 - RNA, 32 nt, Human
caccuguuggcuuucucuucugcagcaacagg

SEQ ID NO: 81029 - RNA, 22 nt, Human
caccuguugucccagcuauuca

SEQ ID NO: 81030 - RNA, 32 nt, Human
caccuguuuaacucuguauuuauuucccaaua

SEQ ID NO: 81031 - RNA, 22 nt, Human
caccuguuuccaaaccuugaca

SEQ ID NO: 81032 - RNA, 32 nt, Human
caccuuaaaagagagaccuguauuggagaaua

SEQ ID NO: 81033 - RNA, 32 nt, Human
caccuuaaacugguuucuauggugcuucaucg

SEQ ID NO: 81034 - RNA, 32 nt, Human
caccuuaacagucaccacugugcucaaccaga

SEQ ID NO: 81035 - RNA, 23 nt, Human
caccuuaauauuuacaagaauua

SEQ ID NO: 81036 - RNA, 32 nt, Human
caccuuacaugacagaagugauucagggauuc

SEQ ID NO: 81037 - RNA, 32 nt, Human
caccuuacgccugguccauguccgugucauag

SEQ ID NO: 81038 - RNA, 32 nt, Human
caccuuacucagcucaucacgcaggccaagca

SEQ ID NO: 81039 - RNA, 32 nt, Human
caccuuacugcaaccaccacuuccuggguuca

SEQ ID NO: 81040 - RNA, 32 nt, Human
caccuuacugguaaccugcuauuccucuggug

SEQ ID NO: 81041 - RNA, 32 nt, Human
caccuuacugguaaccugcuauucuucuggug

SEQ ID NO: 81042 - RNA, 32 nt, Human
caccuuagaugaugcauauggccuaugccuuc

SEQ ID NO: 81043 - RNA, 32 nt, Human
caccuuagccagcagcccugggccacacuggg

SEQ ID NO: 81044 - RNA, 31 nt, Human
caccuuaggcacuucagacauuucaucucac

SEQ ID NO: 81045 - RNA, 32 nt, Human
caccuuaugucagggaaaccuaaacugagguc

SEQ ID NO: 81046 - RNA, 32 nt, Human
caccuuauucccaggcuggagugcaaugucgu

SEQ ID NO: 81047 - RNA, 32 nt, Human
caccuuauuccuccucuccauccagccccuac

SEQ ID NO: 81048 - RNA, 32 nt, Human
caccuuauuuggaaauaaaaggugauucccuu

SEQ ID NO: 81049 - RNA, 19 nt, Human
caccuucacaagccacaga

SEQ ID NO: 81050 - RNA, 18 nt, Human
caccuucaccaacccaga

SEQ ID NO: 81051 - RNA, 32 nt, Human
caccuucaccuccaucgugcccucucucucgg

SEQ ID NO: 81052 - RNA, 32 nt, Human
caccuucaccugccuuggucauggcucugcua

SEQ ID NO: 81053 - RNA, 32 nt, Human
caccuucacugaggugaccaauguuuccaacu

SEQ ID NO: 81054 - RNA, 32 nt, Human
caccuucacugugucccacccuuccuagcuuu

SEQ ID NO: 81055 - RNA, 19 nt, Human
caccuucagagccuuggca

SEQ ID NO: 81056 - RNA, 32 nt, Human
caccuucagcuuccucuaccuuccugaauggc

SEQ ID NO: 81057 - RNA, 32 nt, Human
caccuucauccaggcugggcgagguggcucac

SEQ ID NO: 81058 - RNA, 32 nt, Human
caccuucauuuuccugacaagaucccaaaaug

SEQ ID NO: 81059 - RNA, 17 nt, Human
caccuuccagaccacag

SEQ ID NO: 81060 - RNA, 32 nt, Human
caccuuccagcaccgccuggccugugugcagg

SEQ ID NO: 81061 - RNA, 32 nt, Human
caccuuccagcagcagcugcggagaguuugcc

SEQ ID NO: 81062 - RNA, 32 nt, Human
caccuuccagcuguggaaagaaaagaagaaac

SEQ ID NO: 81063 - RNA, 22 nt, Human
caccuuccagguucaagugauu

SEQ ID NO: 81064 - RNA, 32 nt, Human
caccuuccaugugcacuugcccaugggagacu

SEQ ID NO: 81065 - RNA, 32 nt, Human
caccuucccaagacccaggaucauguacccga

SEQ ID NO: 81066 - RNA, 32 nt, Human
caccuucccaaugugccuccuggaccacgucc

SEQ ID NO: 81067 - RNA, 20 nt, Human
caccuucccagucccacagg

SEQ ID NO: 81068 - RNA, 32 nt, Human
caccuucccccacccauaccccuccugugugu

SEQ ID NO: 81069 - RNA, 19 nt, Human
caccuucccccagccacag

SEQ ID NO: 81070 - RNA, 20 nt, Human
caccuuccccccaccugaga

SEQ ID NO: 81071 - RNA, 32 nt, Human
caccuuccccuccauuccccacuucucucucc

SEQ ID NO: 81072 - RNA, 20 nt, Human
caccuucccggugacccaga

SEQ ID NO: 81073 - RNA, 32 nt, Human
caccuucccucaucuuucaucaaucauuguac

SEQ ID NO: 81074 - RNA, 20 nt, Human
caccuucccuccacuacaga

SEQ ID NO: 81075 - RNA, 32 nt, Human
caccuucccuccucaugccuucccugagcuuu

SEQ ID NO: 81076 - RNA, 18 nt, Human
caccuucccugacucaga

SEQ ID NO: 81077 - RNA, 21 nt, Human
caccuucccugaggacacuca

SEQ ID NO: 81078 - RNA, 18 nt, Human
caccuucccugcccaaga

SEQ ID NO: 81079 - RNA, 32 nt, Human
caccuucccugccucacagauaccaauagaga

SEQ ID NO: 81080 - RNA, 32 nt, Human
caccuucccugccuuggugcugccagcagcag

SEQ ID NO: 81081 - RNA, 32 nt, Human
caccuucccuuucaauaaacagcugggaugga

SEQ ID NO: 81082 - RNA, 18 nt, Human
caccuucccuuucccaga

SEQ ID NO: 81083 - RNA, 22 nt, Human
caccuuccgggcucaagcgauu

SEQ ID NO: 81084 - RNA, 32 nt, Human
caccuuccuaagugcauguacagggaagcucu

SEQ ID NO: 81085 - RNA, 32 nt, Human
caccuuccuagccauggacacggaggaggggg

SEQ ID NO: 81086 - RNA, 20 nt, Human
caccuuccuaggccuggaga

SEQ ID NO: 81087 - RNA, 32 nt, Human
caccuuccucaccccuccucugacccacccau

SEQ ID NO: 81088 - RNA, 32 nt, Human
caccuuccuccaccaccauccuuacccagccc

SEQ ID NO: 81089 - RNA, 32 nt, Human
caccuuccuccacccuccacccugggcugcua

SEQ ID NO: 81090 - RNA, 32 nt, Human
caccuuccuccacuacagcccugaccauagac

SEQ ID NO: 81091 - RNA, 32 nt, Human
caccuuccuccacuacgugcuaggcccuucgc

SEQ ID NO: 81092 - RNA, 32 nt, Human
caccuuccucccacagaaacaguggugguauc

SEQ ID NO: 81093 - RNA, 32 nt, Human
caccuuccuggugcccuucagccagguccaga

SEQ ID NO: 81094 - RNA, 32 nt, Human
caccuuccugguucccugaggguccucagggu

SEQ ID NO: 81095 - RNA, 32 nt, Human
caccuuccuuucuccccugcuggccauuguuc

SEQ ID NO: 81096 - RNA, 32 nt, Human
caccuucgaggaggccauggaaaccccaacac

SEQ ID NO: 81097 - RNA, 32 nt, Human
caccuucgcuucucucaccaggaacauucgcu

SEQ ID NO: 81098 - RNA, 19 nt, Human
caccuucuaguuguacaaa

SEQ ID NO: 81099 - RNA, 32 nt, Human
caccuucuccaaucccugccugcugggagagg

SEQ ID NO: 81100 - RNA, 32 nt, Human
caccuucuccccacccuaccucaccucuucuc

SEQ ID NO: 81101 - RNA, 32 nt, Human
caccuucuccugccucuccacacuccagguuc

SEQ ID NO: 81102 - RNA, 32 nt, Human
caccuucucugccuccagucccccagccccug

SEQ ID NO: 81103 - RNA, 20 nt, Human
caccuucucuucaucacaga

SEQ ID NO: 81104 - RNA, 32 nt, Human
caccuucugaaccuucuucaaacaguaguaca

SEQ ID NO: 81105 - RNA, 32 nt, Human
caccuucugcaaggagcucugcugggccaccu

SEQ ID NO: 81106 - RNA, 32 nt, Human
caccuucugcacugcucaucugggcagaggaa

SEQ ID NO: 81107 - RNA, 32 nt, Human
caccuucugccaccaucuccugccgggccuca

SEQ ID NO: 81108 - RNA, 32 nt, Human
caccuucugcuaacauccagaaucucauacca

SEQ ID NO: 81109 - RNA, 32 nt, Human
caccuucuggagccagcucaucagcucagagc

SEQ ID NO: 81110 - RNA, 32 nt, Human
caccuucuugacccucucuccaucauucagcu

SEQ ID NO: 81111 - RNA, 23 nt, Human
caccuucuugagaggcuccuuca

SEQ ID NO: 81112 - RNA, 32 nt, Human
caccuucuuggucacugcacuucauagcccgg

SEQ ID NO: 81113 - RNA, 32 nt, Human
caccuugaagaaacuaaagagggaagauaaag

SEQ ID NO: 81114 - RNA, 32 nt, Human
caccuugaaggggaaggagauggggaaggccc

SEQ ID NO: 81115 - RNA, 32 nt, Human
caccuugaccaaaaucagcuuuguaacuguuu

SEQ ID NO: 81116 - RNA, 32 nt, Human
caccuugaccaccaaaggaacuaccuauccag

SEQ ID NO: 81117 - RNA, 32 nt, Human
caccuugacuccaagcccagcaguaaguccaa

SEQ ID NO: 81118 - RNA, 22 nt, Human
caccuugacugcaggcuuggga

SEQ ID NO: 81119 - RNA, 32 nt, Human
caccuugaugacuuccuauccauucugucuuc

SEQ ID NO: 81120 - RNA, 32 nt, Human
caccuugauguuggaugugaacugugaggacg

SEQ ID NO: 81121 - RNA, 32 nt, Human
caccuugauuuucugugauaccaaaaucucag

SEQ ID NO: 81122 - RNA, 32 nt, Human
caccuugcaacacacagacacacgcacacaca

SEQ ID NO: 81123 - RNA, 32 nt, Human
caccuugcagcucuccccuucucuguauuccu

SEQ ID NO: 81124 - RNA, 32 nt, Human
caccuugcccagcuaauuuuuguauuuuuagu

SEQ ID NO: 81125 - RNA, 32 nt, Human
caccuugccuuuccuucuugugggcaucuggg

SEQ ID NO: 81126 - RNA, 32 nt, Human
caccuugcuaucucugcucuucaaccauuguu

SEQ ID NO: 81127 - RNA, 22 nt, Human
caccuugcuccuccuucugcug

SEQ ID NO: 81128 - RNA, 32 nt, Human
caccuugcucuaauaggugaugcaugagcaaa

SEQ ID NO: 81129 - RNA, 32 nt, Human
caccuugcugcuguaucuccuggccucugcuu

SEQ ID NO: 81130 - RNA, 32 nt, Human
caccuugcuuccuaucugccucuuucgugguu

SEQ ID NO: 81131 - RNA, 32 nt, Human
caccuuggacauccuccucccacccggcugca

SEQ ID NO: 81132 - RNA, 32 nt, Human
caccuuggccuuucugaacuauuuccuuuaca

SEQ ID NO: 81133 - RNA, 32 nt, Human
caccuuggcucaugccuguaauccuagcacuu

SEQ ID NO: 81134 - RNA, 32 nt, Human
caccuuggcucucaaaggcuuccaguuagaug

SEQ ID NO: 81135 - RNA, 32 nt, Human
caccuuggcugcagggagucgaaaggacuugg

SEQ ID NO: 81136 - RNA, 32 nt, Human
caccuugggaggccaaggugggaggaucacug

SEQ ID NO: 81137 - RNA, 32 nt, Human
caccuugggaggccacuguaggaggaucaauu

SEQ ID NO: 81138 - RNA, 32 nt, Human
caccuugggaggccgaggcgggcggaucacuu

SEQ ID NO: 81139 - RNA, 32 nt, Human
caccuugggaggcugaggcagguggaucaccu

SEQ ID NO: 81140 - RNA, 32 nt, Human
caccuugggaggcugaggcgggcagaucauga

SEQ ID NO: 81141 - RNA, 32 nt, Human
caccuugggaggcugaggugggaggaucauuu

SEQ ID NO: 81142 - RNA, 32 nt, Human
caccuugggcacugaaucacaugagccgucga

SEQ ID NO: 81143 - RNA, 32 nt, Human
caccuuggugcugugggggccccuugccucuu

SEQ ID NO: 81144 - RNA, 32 nt, Human
caccuuguacaucagagaguucacacagguua

SEQ ID NO: 81145 - RNA, 32 nt, Human
caccuugucaccaacaggaugaugucaccaac

SEQ ID NO: 81146 - RNA, 32 nt, Human
caccuugucacccaggcuagagugcaguggca

SEQ ID NO: 81147 - RNA, 32 nt, Human
caccuuguccuuggcccugcuggucccugucg

SEQ ID NO: 81148 - RNA, 32 nt, Human
caccuuguguguggagaugcauuccaagaaug

SEQ ID NO: 81149 - RNA, 32 nt, Human
caccuuguucccaggcugugccgucuucuccu

SEQ ID NO: 81150 - RNA, 32 nt, Human
caccuuguucucuucugcucuagacagauggc

SEQ ID NO: 81151 - RNA, 32 nt, Human
caccuuguugcccaggcuggucucaaacuccu

SEQ ID NO: 81152 - RNA, 32 nt, Human
caccuuguuggccaggcuggucucaaacuucu

SEQ ID NO: 81153 - RNA, 32 nt, Human
caccuuguuggccaggcuggucucgaacuccu

SEQ ID NO: 81154 - RNA, 32 nt, Human
caccuuuacuccucuccagaacagggaaaugu

SEQ ID NO: 81155 - RNA, 32 nt, Human
caccuuuagaaaaccagucacuucuuuucaua

SEQ ID NO: 81156 - RNA, 19 nt, Human
caccuuuagauaagaauua

SEQ ID NO: 81157 - RNA, 32 nt, Human
caccuuuaguacaguccuugcauccauucuau

SEQ ID NO: 81158 - RNA, 32 nt, Human
caccuuucacagccccagcccucagagcaacc

SEQ ID NO: 81159 - RNA, 17 nt, Human
caccuuucaccccacag

SEQ ID NO: 81160 - RNA, 32 nt, Human
caccuuucauaaguuguuaucuagucaaugua

SEQ ID NO: 81161 - RNA, 32 nt, Human
caccuuuccagggagguggaaggacccugugc

SEQ ID NO: 81162 - RNA, 32 nt, Human
caccuuucccaauaggaaaccccaacagguaa

SEQ ID NO: 81163 - RNA, 32 nt, Human
caccuuucccaccucucuccccaaagugaucc

SEQ ID NO: 81164 - RNA, 32 nt, Human
caccuuucccagcucucagcaguuguacugca

SEQ ID NO: 81165 - RNA, 32 nt, Human
caccuuucccaugccuccucuggagccuucgc

SEQ ID NO: 81166 - RNA, 18 nt, Human
caccuuucccccauaaga

SEQ ID NO: 81167 - RNA, 20 nt, Human
caccuuuccccugcugcgga

SEQ ID NO: 81168 - RNA, 23 nt, Human
caccuuuccugcacuccacggcg

SEQ ID NO: 81169 - RNA, 32 nt, Human
caccuuuccugcacuccacggcggcagugaca

SEQ ID NO: 81170 - RNA, 32 nt, Human
caccuuuccuggugaugccuuuggcuccuuga

SEQ ID NO: 81171 - RNA, 32 nt, Human
caccuuuccuuuccuuccugugggcccucuuu

SEQ ID NO: 81172 - RNA, 32 nt, Human
caccuuucgguuacuaagcucugccuucuuga

SEQ ID NO: 81173 - RNA, 32 nt, Human
caccuuucuccccuccccucuuuccucacccu

SEQ ID NO: 81174 - RNA, 21 nt, Human
caccuuucugcuuugccuuca

SEQ ID NO: 81175 - RNA, 32 nt, Human
caccuuucuggucaccaugcuggugaggaaug

SEQ ID NO: 81176 - RNA, 32 nt, Human
caccuuucuguaguucagggcuggcaggaggg

SEQ ID NO: 81177 - RNA, 18 nt, Human
caccuuugaaaccacaga

SEQ ID NO: 81178 - RNA, 32 nt, Human
caccuuugauccuuuccugugugugucccuac

SEQ ID NO: 81179 - RNA, 18 nt, Human
caccuuugaucuuugaca

SEQ ID NO: 81180 - RNA, 32 nt, Human
caccuuugcccuuuuugaugccccuucugccu

SEQ ID NO: 81181 - RNA, 32 nt, Human
caccuuugcuuucucuacccuccugggcuggg

SEQ ID NO: 81182 - RNA, 32 nt, Human
caccuuuggagaggaauccuucccuccccugg

SEQ ID NO: 81183 - RNA, 32 nt, Human
caccuuuggcuaggagggaggggugacagcca

SEQ ID NO: 81184 - RNA, 32 nt, Human
caccuuugggcugcccuggcccccacucuccc

SEQ ID NO: 81185 - RNA, 24 nt, Human
caccuuuguacuccagccugggca

SEQ ID NO: 81186 - RNA, 32 nt, Human
caccuuuguacuccagccugggcaacgagcaa

SEQ ID NO: 81187 - RNA, 32 nt, Human
caccuuugugcaaaugcgaaccacaucucacc

SEQ ID NO: 81188 - RNA, 32 nt, Human
caccuuuguuucucccccauguucugucccuu

SEQ ID NO: 81189 - RNA, 32 nt, Human
caccuuuguuuuucauaccaguaccugaagua

SEQ ID NO: 81190 - RNA, 32 nt, Human
caccuuuuacucccaacgucuggcagagcuga

SEQ ID NO: 81191 - RNA, 18 nt, Human
caccuuuuauaccagaga

SEQ ID NO: 81192 - RNA, 20 nt, Human
caccuuuucaaucagaauua

SEQ ID NO: 81193 - RNA, 18 nt, Human
caccuuuucagccauaga

SEQ ID NO: 81194 - RNA, 32 nt, Human
caccuuuuccagauacaaacuugccuuauuuu

SEQ ID NO: 81195 - RNA, 20 nt, Human
caccuuuuccccaaagaaga

SEQ ID NO: 81196 - RNA, 21 nt, Human
caccuuuuccccaggagcaga

SEQ ID NO: 81197 - RNA, 23 nt, Human
caccuuuuccccccugacccaga

SEQ ID NO: 81198 - RNA, 32 nt, Human
caccuuuucccuuucauguucuuggaccuuuu

SEQ ID NO: 81199 - RNA, 20 nt, Human
caccuuuuccuucagcacag

SEQ ID NO: 81200 - RNA, 32 nt, Human
caccuuuucugggcaaggaacagccccuuuaa

SEQ ID NO: 81201 - RNA, 18 nt, Human
caccuuuucuugcauaga

SEQ ID NO: 81202 - RNA, 32 nt, Human
caccuuuugagcaacugagucaucucaagucc

SEQ ID NO: 81203 - RNA, 32 nt, Human
caccuuuugauagugacaggaggcagacaaau

SEQ ID NO: 81204 - RNA, 32 nt, Human
caccuuuugccacccccuccccaccagaggcc

SEQ ID NO: 81205 - RNA, 32 nt, Human
caccuuuugccuggucauccuguuagaguaca

SEQ ID NO: 81206 - RNA, 18 nt, Human
caccuuuugcuccacgga

SEQ ID NO: 81207 - RNA, 23 nt, Human
caccuuuuuagaaaaaagaauua

SEQ ID NO: 81208 - RNA, 21 nt, Human
caccuuuuucaacaagauuua

SEQ ID NO: 81209 - RNA, 32 nt, Human
cacgaaacccacuuauagagcagguucauaua

SEQ ID NO: 81210 - RNA, 32 nt, Human
cacgaaacugggccuuuccugcugagaggaag

SEQ ID NO: 81211 - RNA, 32 nt, Human
cacgaaagaccuacucuuucagaagcuugaag

SEQ ID NO: 81212 - RNA, 32 nt, Human
cacgaaaguucagaaaggggaagaaacuggcu

SEQ ID NO: 81213 - RNA, 22 nt, Human
cacgaaaugcuuaaaagcuaac

SEQ ID NO: 81214 - RNA, 32 nt, Human
cacgaacagcagagaggggcagcaggaugaau

SEQ ID NO: 81215 - RNA, 22 nt, Human
cacgaacccaccugcugagaga

SEQ ID NO: 81216 - RNA, 32 nt, Human
cacgaacuaaaaauaaaagugcacuaggggac

SEQ ID NO: 81217 - RNA, 32 nt, Human
cacgaacugcuaagcaaccccaccuccuaaac

SEQ ID NO: 81218 - RNA, 32 nt, Human
cacgaacuggaaggggguucacggucaaacug

SEQ ID NO: 81219 - RNA, 32 nt, Human
cacgaagaaagccagaagugaguaccugcaga

SEQ ID NO: 81220 - RNA, 32 nt, Human
cacgaagaaggaaguccucuucccgccuggag

SEQ ID NO: 81221 - RNA, 32 nt, Human
cacgaagcucugagaacauguuuguuucgaau

SEQ ID NO: 81222 - RNA, 32 nt, Human
cacgaagcuguggaucauaguucccagcguga

SEQ ID NO: 81223 - RNA, 32 nt, Human
cacgaaggagcagaaggagggagccacgggcc

SEQ ID NO: 81224 - RNA, 20 nt, Human
cacgaaggcccagggcgcca

SEQ ID NO: 81225 - RNA, 32 nt, Human
cacgaaggggcagaaggagggagccacgugcc

SEQ ID NO: 81226 - RNA, 32 nt, Human
cacgaagugaggagaagguggagaagagagaa

SEQ ID NO: 81227 - RNA, 32 nt, Human
cacgaaucacugcacccagccuauggaacauc

SEQ ID NO: 81228 - RNA, 32 nt, Human
cacgacacccagcuaauuuuuguauuuuuagu

SEQ ID NO: 81229 - RNA, 32 nt, Human
cacgacacccaucaccaccaccaccacgguga

SEQ ID NO: 81230 - RNA, 32 nt, Human
cacgacacccggccaauuuuuguauuuuuggu

SEQ ID NO: 81231 - RNA, 32 nt, Human
cacgacacugcacuccagccugggcaacggag

SEQ ID NO: 81232 - RNA, 32 nt, Human
cacgacagcagaccaacuccacccuaagaaag

SEQ ID NO: 81233 - RNA, 32 nt, Human
cacgacagccuggugcacagccgagaaaacaa

SEQ ID NO: 81234 - RNA, 32 nt, Human
cacgacagugcaugcacuccagccugggcaac

SEQ ID NO: 81235 - RNA, 32 nt, Human
cacgaccaccaccaccaccaccacucaccacc

SEQ ID NO: 81236 - RNA, 32 nt, Human
cacgaccacggaggaauccuugcuucagggac

SEQ ID NO: 81237 - RNA, 32 nt, Human
cacgacccagccuggccacacacuguggugcc

SEQ ID NO: 81238 - RNA, 32 nt, Human
cacgaccgcaaugcaaggaggggaagaaaguc

SEQ ID NO: 81239 - RNA, 32 nt, Human
cacgacgcccagcugauuuuuguguuuuuagu

SEQ ID NO: 81240 - RNA, 32 nt, Human
cacgacgcccuggaauuccugcucugguugcu

SEQ ID NO: 81241 - RNA, 32 nt, Human
cacgacgguccccauuccacccccucuuucuu

SEQ ID NO: 81242 - RNA, 32 nt, Human
cacgacuccagccaccacccacugacguuauu

SEQ ID NO: 81243 - RNA, 32 nt, Human
cacgacuccaggagucaaccccuggaucucgg

SEQ ID NO: 81244 - RNA, 32 nt, Human
cacgacugagaugucaucaguguugaauggca

SEQ ID NO: 81245 - RNA, 24 nt, Human
cacgacugcacuccagccugggca

SEQ ID NO: 81246 - RNA, 32 nt, Human
cacgacugcacuccagccugggcaauggagug

SEQ ID NO: 81247 - RNA, 32 nt, Human
cacgacugcauccuucaucugccaggcccugg

SEQ ID NO: 81248 - RNA, 32 nt, Human
cacgacugcauucuagccugggugacagagcg

SEQ ID NO: 81249 - RNA, 32 nt, Human
cacgacuuccuuggagccugggccuuugcggg

SEQ ID NO: 81250 - RNA, 21 nt, Human
cacgagaacagcauggaggua

SEQ ID NO: 81251 - RNA, 32 nt, Human
cacgagaacagcugucaccuagugcggaacaa

SEQ ID NO: 81252 - RNA, 32 nt, Human
cacgagaagacaggaggaagaaagggagagag

SEQ ID NO: 81253 - RNA, 32 nt, Human
cacgagaagagagaaggggacagaacagcgag

SEQ ID NO: 81254 - RNA, 32 nt, Human
cacgagaauacucuugagaauauuguucuugg

SEQ ID NO: 81255 - RNA, 32 nt, Human
cacgagaaugucccugagacccagaagggccu

SEQ ID NO: 81256 - RNA, 22 nt, Human
cacgagacaagcacgccagcca

SEQ ID NO: 81257 - RNA, 32 nt, Human
cacgagaccaggaguucaagaccagccugacc

SEQ ID NO: 81258 - RNA, 32 nt, Human
cacgagaccgaggagaaacugcagacaaaugg

SEQ ID NO: 81259 - RNA, 22 nt, Human
cacgagacuagucccaauucca

SEQ ID NO: 81260 - RNA, 31 nt, Human
cacgagagagacgaggucacuggaggauaaa

SEQ ID NO: 81261 - RNA, 32 nt, Human
cacgagagagacgaggucacuggaggauaaac

SEQ ID NO: 81262 - RNA, 32 nt, Human
cacgagaugcgcugcugaauucauggugggaa

SEQ ID NO: 81263 - RNA, 32 nt, Human
cacgagcaaagucgguggucacaagggagcag

SEQ ID NO: 81264 - RNA, 32 nt, Human
cacgagcaccugugaauccacagcagaacagc

SEQ ID NO: 81265 - RNA, 32 nt, Human
cacgagcacugagcgccuccugagagccagcc

SEQ ID NO: 81266 - RNA, 32 nt, Human
cacgagcagacacccuuggagcucugaguucc

SEQ ID NO: 81267 - RNA, 32 nt, Human
cacgagcaggcagagcacgaaggcgaacaccg

SEQ ID NO: 81268 - RNA, 32 nt, Human
cacgagcgcgugccaccauggagucugaccac

SEQ ID NO: 81269 - RNA, 32 nt, Human
cacgagcugggcagacagcaggaucugagcac

SEQ ID NO: 81270 - RNA, 32 nt, Human
cacgagcugugucuuccuucucuccgccgcga

SEQ ID NO: 81271 - RNA, 32 nt, Human
cacgagcuuacauaagugguuaggcaagcugg

SEQ ID NO: 81272 - RNA, 23 nt, Human
cacgaggaagaagugccuuucgc

SEQ ID NO: 81273 - RNA, 18 nt, Human
cacgaggaccaucggggg

SEQ ID NO: 81274 - RNA, 32 nt, Human
cacgaggagaucaagaccauccuggcuaacac

SEQ ID NO: 81275 - RNA, 19 nt, Human
cacgaggaggcgcccuccg

SEQ ID NO: 81276 - RNA, 24 nt, Human
cacgaggagggagcuacccuucgc

SEQ ID NO: 81277 - RNA, 32 nt, Human
cacgaggcacuuucucaaccccacagaugcuc

SEQ ID NO: 81278 - RNA, 32 nt, Human
cacgaggccaagaguuugaggguggguucggg

SEQ ID NO: 81279 - RNA, 32 nt, Human
cacgaggccaggaguucgagaccaucuuggcu

SEQ ID NO: 81280 - RNA, 32 nt, Human
cacgaggcccugagcauuuagcacuuggucga

SEQ ID NO: 81281 - RNA, 32 nt, Human
cacgaggcgcugcggcuccaccugccaguggg

SEQ ID NO: 81282 - RNA, 32 nt, Human
cacgaggcucaccauggugggccccgcgccgc

SEQ ID NO: 81283 - RNA, 16 nt, Human
cacgaggcucacugca

SEQ ID NO: 81284 - RNA, 32 nt, Human
cacgaggcucgccgcggacucaagauggcggc

SEQ ID NO: 81285 - RNA, 32 nt, Human
cacgaggcugggaccggaguggggagcgcggc

SEQ ID NO: 81286 - RNA, 32 nt, Human
cacgaggcuggucccuggcccaacaugauacu

SEQ ID NO: 81287 - RNA, 32 nt, Human
cacgagggaaagaagcuucaguuucucgcaug

SEQ ID NO: 81288 - RNA, 32 nt, Human
cacgagggcaucagggacgcagugaguguugc

SEQ ID NO: 81289 - RNA, 18 nt, Human
cacgagggccacccgcgc

SEQ ID NO: 81290 - RNA, 32 nt, Human
cacgagggcgugugucaguggcugugugcagg

SEQ ID NO: 81291 - RNA, 32 nt, Human
cacgaggggaggaggaggaggaggagaggagc

SEQ ID NO: 81292 - RNA, 32 nt, Human
cacgaggggaggcacggugcggagagcgucgc

SEQ ID NO: 81293 - RNA, 32 nt, Human
cacgaggggcagacagaggcgccagugcccuc

SEQ ID NO: 81294 - RNA, 32 nt, Human
cacgaggggcgcuggggcccugggcagcgcgg

SEQ ID NO: 81295 - RNA, 32 nt, Human
cacgaggggcggcggcagcuguggaagcucag

SEQ ID NO: 81296 - RNA, 22 nt, Human
cacgaggggcugcccccuccgc

SEQ ID NO: 81297 - RNA, 32 nt, Human
cacgaggggcuuguugggauccguugagugau

SEQ ID NO: 81298 - RNA, 32 nt, Human
cacgagggggcuuggagcaggauucagaaggg

SEQ ID NO: 81299 - RNA, 32 nt, Human
cacgaggugcgcccuccacccgcugggcuagg

SEQ ID NO: 81300 - RNA, 32 nt, Human
cacgagguucgagagcgcgcagaguccagacu

SEQ ID NO: 81301 - RNA, 24 nt, Human
cacgagucacagcacacacuggcg

SEQ ID NO: 81302 - RNA, 32 nt, Human
cacgagugagaaggaguuugccuagcaaagau

SEQ ID NO: 81303 - RNA, 32 nt, Human
cacgagugcuccagcugcagggccagggggug

SEQ ID NO: 81304 - RNA, 32 nt, Human
cacgagugucuccccagugcagacucaaguua

SEQ ID NO: 81305 - RNA, 32 nt, Human
cacgaguuuuagagaagaacauacuuuuuggc

SEQ ID NO: 81306 - RNA, 32 nt, Human
cacgauacgcacagcacaccacugucccuuca

SEQ ID NO: 81307 - RNA, 32 nt, Human
cacgauagcucacgccuauaaucccagcauuu

SEQ ID NO: 81308 - RNA, 32 nt, Human
cacgauaggaauagcuuuuauuuuugauagac

SEQ ID NO: 81309 - RNA, 32 nt, Human
cacgaucaaggcagggaaagauaggcaggagu

SEQ ID NO: 81310 - RNA, 32 nt, Human
cacgaucacaccacaguacuccagccuaggug

SEQ ID NO: 81311 - RNA, 32 nt, Human
cacgauccugcacuccagccugggcaacagag

SEQ ID NO: 81312 - RNA, 32 nt, Human
cacgauccuggaguaguuccuaccucaaaugu

SEQ ID NO: 81313 - RNA, 32 nt, Human
cacgaucguaccacuacacuccagccugggca

SEQ ID NO: 81314 - RNA, 32 nt, Human
cacgaucucggcucacugcauccucugccucc

SEQ ID NO: 81315 - RNA, 32 nt, Human
cacgaucugcaaacuccgccuccuggguucaa

SEQ ID NO: 81316 - RNA, 32 nt, Human
cacgaugacgccucuggaccucggugaugccu

SEQ ID NO: 81317 - RNA, 31 nt, Human
cacgaugcaauuucugggccugaaugucaug

SEQ ID NO: 81318 - RNA, 32 nt, Human
cacgauggacuggccagcuuugcccgcccgcc

SEQ ID NO: 81319 - RNA, 32 nt, Human
cacgauggagagagagcagggccagggucgga

SEQ ID NO: 81320 - RNA, 32 nt, Human
cacgauggaggcccaauaaaaacacuggacac

SEQ ID NO: 81321 - RNA, 32 nt, Human
cacgauggcucaaaccuguaaucccagcacuu

SEQ ID NO: 81322 - RNA, 32 nt, Human
cacgauggcucacaccuguaaucccagcacuu

SEQ ID NO: 81323 - RNA, 32 nt, Human
cacgauggcucacgccuguaaucccagacuuu

SEQ ID NO: 81324 - RNA, 32 nt, Human
cacgauggcucacgucuguaaucccagcacuu

SEQ ID NO: 81325 - RNA, 32 nt, Human
cacgaugggcugaggccaggggagacaucaca

SEQ ID NO: 81326 - RNA, 32 nt, Human
cacgauguucauccaggccaaagcaggguguc

SEQ ID NO: 81327 - RNA, 32 nt, Human
cacgauuaaauggcaaaaggacuuauaaaagg

SEQ ID NO: 81328 - RNA, 31 nt, Human
cacgauucaauaaauauuggaugaaauuaac

SEQ ID NO: 81329 - RNA, 32 nt, Human
cacgauucagcccggugguguuagcccccugg

SEQ ID NO: 81330 - RNA, 32 nt, Human
cacgauugcaaagccuccucucccagagaccc

SEQ ID NO: 81331 - RNA, 32 nt, Human
cacgauugcaccacuucaucccagccugggag

SEQ ID NO: 81332 - RNA, 32 nt, Human
cacgauugccauggccauagggccacagugcc

SEQ ID NO: 81333 - RNA, 32 nt, Human
cacgauuggggugggagaugagcaaaccugcu

SEQ ID NO: 81334 - RNA, 32 nt, Human
cacgauuucaggaucgcuuccuugugagccgc

SEQ ID NO: 81335 - RNA, 32 nt, Human
cacgcaaagucccccuugcccaggcucccuga

SEQ ID NO: 81336 - RNA, 32 nt, Human
cacgcaacucacaccuccuuuucuucuagcuu

SEQ ID NO: 81337 - RNA, 32 nt, Human
cacgcaaggaaagaaccaggagggagagugca

SEQ ID NO: 81338 - RNA, 32 nt, Human
cacgcaauagccaucaaggagaauuucuauua

SEQ ID NO: 81339 - RNA, 32 nt, Human
cacgcacaaacacacaugcccacacaaugcuc

SEQ ID NO: 81340 - RNA, 32 nt, Human
cacgcacacacaugcacacacgcacacgcaug

SEQ ID NO: 81341 - RNA, 32 nt, Human
cacgcacacacgcacacaaacaugcacacacg

SEQ ID NO: 81342 - RNA, 32 nt, Human
cacgcacacagccugguuuuguccucaugcac

SEQ ID NO: 81343 - RNA, 32 nt, Human
cacgcacacaucuccucgucugggugugcgca

SEQ ID NO: 81344 - RNA, 32 nt, Human
cacgcacacaugcacacacacgcaugugcgcg

SEQ ID NO: 81345 - RNA, 32 nt, Human
cacgcacacaugcacgcacacacacauauggg

SEQ ID NO: 81346 - RNA, 32 nt, Human
cacgcacacccaccccacagugcccggcucgg

SEQ ID NO: 81347 - RNA, 32 nt, Human
cacgcacaggagguucagcugugugccuguga

SEQ ID NO: 81348 - RNA, 32 nt, Human
cacgcaccccacugcuuccagagccuccacgc

SEQ ID NO: 81349 - RNA, 23 nt, Human
cacgcaccccagaccccaggugg

SEQ ID NO: 81350 - RNA, 32 nt, Human
cacgcaccccgcuuugcacaccacagagugcc

SEQ ID NO: 81351 - RNA, 32 nt, Human
cacgcacccguaguuccagcuacuugggaggc

SEQ ID NO: 81352 - RNA, 32 nt, Human
cacgcaccgacacacaugcacgcacgcacccc

SEQ ID NO: 81353 - RNA, 32 nt, Human
cacgcaccucaaggagcacaugcagacacacc

SEQ ID NO: 81354 - RNA, 32 nt, Human
cacgcaccugcucuccaccuggacucaggccg

SEQ ID NO: 81355 - RNA, 32 nt, Human
cacgcaccuguaaucccagcugcucuggaggc

SEQ ID NO: 81356 - RNA, 32 nt, Human
cacgcaccuuguaggcuccugcccucacccca

SEQ ID NO: 81357 - RNA, 32 nt, Human
cacgcacuggcacuaaauccacacugcccauc

SEQ ID NO: 81358 - RNA, 32 nt, Human
cacgcacuguggagguggagugcagcauuuga

SEQ ID NO: 81359 - RNA, 32 nt, Human
cacgcagaagccaccagaaucuugccugcccu

SEQ ID NO: 81360 - RNA, 21 nt, Human
cacgcagacagcuggaagggu

SEQ ID NO: 81361 - RNA, 32 nt, Human
cacgcagacaucuucagccgcugccaggccug

SEQ ID NO: 81362 - RNA, 32 nt, Human
cacgcagagaacauucuggcugagggagaggu

SEQ ID NO: 81363 - RNA, 32 nt, Human
cacgcagagccccaggcgcggagcugaggccg

SEQ ID NO: 81364 - RNA, 24 nt, Human
cacgcagaguucuagaaggagguu

SEQ ID NO: 81365 - RNA, 32 nt, Human
cacgcagauccugucugcgcucagcuuccugc

SEQ ID NO: 81366 - RNA, 32 nt, Human
cacgcagcagagggacaugggccauuccauga

SEQ ID NO: 81367 - RNA, 19 nt, Human
cacgcagcaguauuggggg

SEQ ID NO: 81368 - RNA, 32 nt, Human
cacgcagcaguauugggggugguucgggggag

SEQ ID NO: 81369 - RNA, 32 nt, Human
cacgcagcauguccccucaggucuccagucag

SEQ ID NO: 81370 - RNA, 32 nt, Human
cacgcagcauuuuccugccguucucucaggga

SEQ ID NO: 81371 - RNA, 32 nt, Human
cacgcagccccggcuccugccugcgccucucc

SEQ ID NO: 81372 - RNA, 32 nt, Human
cacgcagccuuauaaagcagguuuugguuucu

SEQ ID NO: 81373 - RNA, 24 nt, Human
cacgcagcuaauuuuuguauuuuu

SEQ ID NO: 81374 - RNA, 32 nt, Human
cacgcagcucaggccugccccaguggccacaa

SEQ ID NO: 81375 - RNA, 32 nt, Human
cacgcagcuccagcccaucuugcugaccuaau

SEQ ID NO: 81376 - RNA, 32 nt, Human
cacgcagcugccgcgccauguccugcuuggcc

SEQ ID NO: 81377 - RNA, 32 nt, Human
cacgcagcuguucccccacauggacagaugga

SEQ ID NO: 81378 - RNA, 32 nt, Human
cacgcaggaaaugucagaggcagcagucuggu

SEQ ID NO: 81379 - RNA, 32 nt, Human
cacgcaggacagauaccgcuccacacucugcu

SEQ ID NO: 81380 - RNA, 32 nt, Human
cacgcaggcacucacauucacacacauacaca

SEQ ID NO: 81381 - RNA, 32 nt, Human
cacgcaggggagggagucagugucggaaccug

SEQ ID NO: 81382 - RNA, 18 nt, Human
cacgcagucccuggucac

SEQ ID NO: 81383 - RNA, 32 nt, Human
cacgcauacacacaugaacacaugcacaugug

SEQ ID NO: 81384 - RNA, 32 nt, Human
cacgcauagauccacgaggcaccaaggccugg

SEQ ID NO: 81385 - RNA, 31 nt, Human
cacgcaucaauaaauaauuuugaaggccuca

SEQ ID NO: 81386 - RNA, 32 nt, Human
cacgcaugcacacacgcacacaugcacacaca

SEQ ID NO: 81387 - RNA, 24 nt, Human
cacgcaugcacgugcacacaugua

SEQ ID NO: 81388 - RNA, 32 nt, Human
cacgcaugccuuucugguuguuccucugaagc

SEQ ID NO: 81389 - RNA, 32 nt, Human
cacgccaaugcacacacacagagauaugcaca

SEQ ID NO: 81390 - RNA, 32 nt, Human
cacgccacacacaaccucuccacaugccucag

SEQ ID NO: 81391 - RNA, 32 nt, Human
cacgccacagcacuccagccugggcgacagag

SEQ ID NO: 81392 - RNA, 32 nt, Human
cacgccacuacacuccaaccugggugacagag

SEQ ID NO: 81393 - RNA, 32 nt, Human
cacgccacuacacuccagccugggcaacagag

SEQ ID NO: 81394 - RNA, 32 nt, Human
cacgccacuacacuccagccugggcgacagag

SEQ ID NO: 81395 - RNA, 20 nt, Human
cacgccacucuacuccagcc

SEQ ID NO: 81396 - RNA, 32 nt, Human
cacgccacugaacuccagccugggagacagca

SEQ ID NO: 81397 - RNA, 32 nt, Human
cacgccacugaacuccagccugggugacagag

SEQ ID NO: 81398 - RNA, 18 nt, Human
cacgccacugaccagcua

SEQ ID NO: 81399 - RNA, 32 nt, Human
cacgccacugcaacuccagcuugggugacaga

SEQ ID NO: 81400 - RNA, 32 nt, Human
cacgccacugcaccccagccugggugacagag

SEQ ID NO: 81401 - RNA, 32 nt, Human
cacgccacugcacuacagccuggacgacagag

SEQ ID NO: 81402 - RNA, 32 nt, Human
cacgccacugcacuauagccuaggugacagag

SEQ ID NO: 81403 - RNA, 32 nt, Human
cacgccacugcacucaagccugggcgacagag

SEQ ID NO: 81404 - RNA, 32 nt, Human
cacgccacugcacuccaaccugggugacagag

SEQ ID NO: 81405 - RNA, 32 nt, Human
cacgccacugcacuccaacuugggcaacagac

SEQ ID NO: 81406 - RNA, 32 nt, Human
cacgccacugcacuccaccugggcaacaagaa

SEQ ID NO: 81407 - RNA, 32 nt, Human
cacgccacugcacuccagcacccugggcgaca

SEQ ID NO: 81408 - RNA, 20 nt, Human
cacgccacugcacuccagcc

SEQ ID NO: 81409 - RNA, 32 nt, Human
cacgccacugcacuccagcccgggcgacaguu

SEQ ID NO: 81410 - RNA, 32 nt, Human
cacgccacugcacuccagcccgggcggcagag

SEQ ID NO: 81411 - RNA, 32 nt, Human
cacgccacugcacuccagcccggggacagagc

SEQ ID NO: 81412 - RNA, 32 nt, Human
cacgccacugcacuccagcccgggugacagag

SEQ ID NO: 81413 - RNA, 32 nt, Human
cacgccacugcacuccagccuaggcgacagag

SEQ ID NO: 81414 - RNA, 32 nt, Human
cacgccacugcacuccagccucggugacagag

SEQ ID NO: 81415 - RNA, 32 nt, Human
cacgccacugcacuccagccugagugacagag

SEQ ID NO: 81416 - RNA, 32 nt, Human
cacgccacugcacuccagccugcggacagacc

SEQ ID NO: 81417 - RNA, 32 nt, Human
cacgccacugcacuccagccuggacaacagag

SEQ ID NO: 81418 - RNA, 32 nt, Human
cacgccacugcacuccagccuggaugacagag

SEQ ID NO: 81419 - RNA, 32 nt, Human
cacgccacugcacuccagccuggcgacagagc

SEQ ID NO: 81420 - RNA, 32 nt, Human
cacgccacugcacuccagccugggagacagag

SEQ ID NO: 81421 - RNA, 32 nt, Human
cacgccacugcacuccagccugggcaacaaga

SEQ ID NO: 81422 - RNA, 32 nt, Human
cacgccacugcacuccagccugggcaacagag

SEQ ID NO: 81423 - RNA, 32 nt, Human
cacgccacugcacuccagccugggcaacagug

SEQ ID NO: 81424 - RNA, 32 nt, Human
cacgccacugcacuccagccugggcaacggau

SEQ ID NO: 81425 - RNA, 32 nt, Human
cacgccacugcacuccagccugggccacagaa

SEQ ID NO: 81426 - RNA, 32 nt, Human
cacgccacugcacuccagccugggcgacagaa

SEQ ID NO: 81427 - RNA, 32 nt, Human
cacgccacugcacuccagccugggcgacagag

SEQ ID NO: 81428 - RNA, 32 nt, Human
cacgccacugcacuccagccugggcgacagug

SEQ ID NO: 81429 - RNA, 32 nt, Human
cacgccacugcacuccagccugggcgauggag

SEQ ID NO: 81430 - RNA, 32 nt, Human
cacgccacugcacuccagccugggcugcaggg

SEQ ID NO: 81431 - RNA, 32 nt, Human
cacgccacugcacuccagccuggguaacaaga

SEQ ID NO: 81432 - RNA, 32 nt, Human
cacgccacugcacuccagccuggguaacagag

SEQ ID NO: 81433 - RNA, 32 nt, Human
cacgccacugcacuccagccugggugacagaa

SEQ ID NO: 81434 - RNA, 32 nt, Human
cacgccacugcacuccagccugggugacagag

SEQ ID NO: 81435 - RNA, 32 nt, Human
cacgccacugcacuccagccugggugacagug

SEQ ID NO: 81436 - RNA, 32 nt, Human
cacgccacugcacuccagccuggucaacagag

SEQ ID NO: 81437 - RNA, 32 nt, Human
cacgccacugcacuccagccuggugacagagc

SEQ ID NO: 81438 - RNA, 32 nt, Human
cacgccacugcacuccagccuggugacagcgu

SEQ ID NO: 81439 - RNA, 32 nt, Human
cacgccacugcacuccagccuguugacaaagc

SEQ ID NO: 81440 - RNA, 32 nt, Human
cacgccacugcacuccagcgugggcaacagag

SEQ ID NO: 81441 - RNA, 32 nt, Human
cacgccacugcacuccagcuggagugacagag

SEQ ID NO: 81442 - RNA, 32 nt, Human
cacgccacugcacuccagcuugggugacaaag

SEQ ID NO: 81443 - RNA, 32 nt, Human
cacgccacugcacuccagucugggugacagag

SEQ ID NO: 81444 - RNA, 32 nt, Human
cacgccacugcacuccauccagccugggugac

SEQ ID NO: 81445 - RNA, 32 nt, Human
cacgccacugcacucuagccuaggcgacagag

SEQ ID NO: 81446 - RNA, 32 nt, Human
cacgccacugcacucuagccugggauacagag

SEQ ID NO: 81447 - RNA, 32 nt, Human
cacgccacugcacucuagccugggcaacaaga

SEQ ID NO: 81448 - RNA, 32 nt, Human
cacgccacugcacucuagccugggcaauaaga

SEQ ID NO: 81449 - RNA, 32 nt, Human
cacgccacugcacuugagccugggcgacacag

SEQ ID NO: 81450 - RNA, 32 nt, Human
cacgccacugcauuacagccuggugcagagca

SEQ ID NO: 81451 - RNA, 32 nt, Human
cacgccacugcauuccagacugggcgacagag

SEQ ID NO: 81452 - RNA, 32 nt, Human
cacgccacugcauuccagccugggcgacagag

SEQ ID NO: 81453 - RNA, 32 nt, Human
cacgccacugcauuccagccuggugacagagc

SEQ ID NO: 81454 - RNA, 32 nt, Human
cacgccacugcauuccagccugugcgacagaa

SEQ ID NO: 81455 - RNA, 32 nt, Human
cacgccacugcauucuauccugggcaacagau

SEQ ID NO: 81456 - RNA, 32 nt, Human
cacgccacugcccuccagccuggggagacaga

SEQ ID NO: 81457 - RNA, 32 nt, Human
cacgccacugcgcuacagccugggcgacacag

SEQ ID NO: 81458 - RNA, 32 nt, Human
cacgccacugcgcuccagccugggcgaaagag

SEQ ID NO: 81459 - RNA, 32 nt, Human
cacgccacuguacuccagccuggaugacacag

SEQ ID NO: 81460 - RNA, 32 nt, Human
cacgccacuguacuccagccugggagacacag

SEQ ID NO: 81461 - RNA, 32 nt, Human
cacgccacuguacuucagccucagugacaaag

SEQ ID NO: 81462 - RNA, 32 nt, Human
cacgccacuguacuucuagccuggguuacaga

SEQ ID NO: 81463 - RNA, 32 nt, Human
cacgccacugugcuccagccugggcaacaaag

SEQ ID NO: 81464 - RNA, 32 nt, Human
cacgccagauccucugucccaccccaggccuu

SEQ ID NO: 81465 - RNA, 32 nt, Human
cacgccagccaugccccuccccaggacuccca

SEQ ID NO: 81466 - RNA, 32 nt, Human
cacgccagccugggcaacagagcaagacucug

SEQ ID NO: 81467 - RNA, 32 nt, Human
cacgccagccugggcgacagagcgagacuccg

SEQ ID NO: 81468 - RNA, 32 nt, Human
cacgccagccugggugaaagagugagacccug

SEQ ID NO: 81469 - RNA, 32 nt, Human
cacgccagugcacuccagccugagagacagag

SEQ ID NO: 81470 - RNA, 32 nt, Human
cacgccagugcuguuucccggccuccagacac

SEQ ID NO: 81471 - RNA, 32 nt, Human
cacgccauagcaauugcacuccggccugggca

SEQ ID NO: 81472 - RNA, 32 nt, Human
cacgccaucacacugcagccuaggugacagag

SEQ ID NO: 81473 - RNA, 32 nt, Human
cacgccauccucggagccccagccuuucaccc

SEQ ID NO: 81474 - RNA, 32 nt, Human
cacgccaucuccauccccaucuugaguccugg

SEQ ID NO: 81475 - RNA, 32 nt, Human
cacgccauuacacuccagccuggcugacagug

SEQ ID NO: 81476 - RNA, 32 nt, Human
cacgccauuacacuccagccugggcaacagag

SEQ ID NO: 81477 - RNA, 20 nt, Human
cacgccauucuuccaccuca

SEQ ID NO: 81478 - RNA, 32 nt, Human
cacgccauugcacuacagccugggugacagag

SEQ ID NO: 81479 - RNA, 32 nt, Human
cacgccauugcacucaagccugggcaauaaga

SEQ ID NO: 81480 - RNA, 32 nt, Human
cacgccauugcacuccaaccugggugacaaga

SEQ ID NO: 81481 - RNA, 32 nt, Human
cacgccauugcacuccagccuaggcaacgaga

SEQ ID NO: 81482 - RNA, 32 nt, Human
cacgccauugcacuccagccuaggcgacagag

SEQ ID NO: 81483 - RNA, 32 nt, Human
cacgccauugcacuccagccugggcaacaaga

SEQ ID NO: 81484 - RNA, 32 nt, Human
cacgccauugcacuccagccugggcaacaagc

SEQ ID NO: 81485 - RNA, 32 nt, Human
cacgccauugcacuccagccugggcaacagag

SEQ ID NO: 81486 - RNA, 32 nt, Human
cacgccauugcacuccagccugggcaacagug

SEQ ID NO: 81487 - RNA, 32 nt, Human
cacgccauugcacuccagccugggcaacgaga

SEQ ID NO: 81488 - RNA, 32 nt, Human
cacgccauugcacuccagccugggcaauaaga

SEQ ID NO: 81489 - RNA, 32 nt, Human
cacgccauugcacuccagccugggcgacagag

SEQ ID NO: 81490 - RNA, 32 nt, Human
cacgccauugcacuccagccugggggacagag

SEQ ID NO: 81491 - RNA, 32 nt, Human
cacgccauugcacuccagccugggugacaaga

SEQ ID NO: 81492 - RNA, 32 nt, Human
cacgccauugcacuccagccugggugacacag

SEQ ID NO: 81493 - RNA, 32 nt, Human
cacgccauugcacuccagccugggugacagaa

SEQ ID NO: 81494 - RNA, 32 nt, Human
cacgccauugcacuccagccugggugacagag

SEQ ID NO: 81495 - RNA, 32 nt, Human
cacgccauugcacuccagccugugcgacaaga

SEQ ID NO: 81496 - RNA, 32 nt, Human
cacgccauugcacuccagcuugggcaauaaga

SEQ ID NO: 81497 - RNA, 32 nt, Human
cacgccauugcacuccagucugagcaacaaga

SEQ ID NO: 81498 - RNA, 32 nt, Human
cacgccauugcacuccagucugguugacagag

SEQ ID NO: 81499 - RNA, 32 nt, Human
cacgccauuguacuccagccuggcaacagagc

SEQ ID NO: 81500 - RNA, 32 nt, Human
cacgccauuguacuccagccugggcaacaaga

SEQ ID NO: 81501 - RNA, 32 nt, Human
cacgccauuguacuccagccugggcgacagag

SEQ ID NO: 81502 - RNA, 32 nt, Human
cacgcccaagcccugcagagggaaggacugag

SEQ ID NO: 81503 - RNA, 32 nt, Human
cacgcccacacagcaccucugccaggccuagg

SEQ ID NO: 81504 - RNA, 18 nt, Human
cacgcccacccccuccca

SEQ ID NO: 81505 - RNA, 32 nt, Human
cacgcccacccugaacuccagcuggcccgcaa

SEQ ID NO: 81506 - RNA, 32 nt, Human
cacgcccacgcuaggcccugagcccaccucua

SEQ ID NO: 81507 - RNA, 32 nt, Human
cacgcccagcacagccuugggggaaguguaca

SEQ ID NO: 81508 - RNA, 32 nt, Human
cacgcccagccugccuugagaaaaagaagcca

SEQ ID NO: 81509 - RNA, 32 nt, Human
cacgcccagccuguggccagcacuuuagaugc

SEQ ID NO: 81510 - RNA, 32 nt, Human
cacgcccaucuucugccucauaguggucacuc

SEQ ID NO: 81511 - RNA, 32 nt, Human
cacgccccaggggaccagccaggccuggaaug

SEQ ID NO: 81512 - RNA, 32 nt, Human
cacgcccccuaccggcccauguuucuauuugc

SEQ ID NO: 81513 - RNA, 32 nt, Human
cacgcccccucccgucucuccgucucgacccc

SEQ ID NO: 81514 - RNA, 32 nt, Human
cacgcccccugauucuggaacucccccaacuu

SEQ ID NO: 81515 - RNA, 20 nt, Human
cacgccccgccccccucgcu

SEQ ID NO: 81516 - RNA, 32 nt, Human
cacgccccuaacccuaacggggaucccagucc

SEQ ID NO: 81517 - RNA, 24 nt, Human
cacgccccuccuucccagucccau

SEQ ID NO: 81518 - RNA, 32 nt, Human
cacgccccuuucuccccaugccccauccagca

SEQ ID NO: 81519 - RNA, 32 nt, Human
cacgcccgacucucuccaucagaaggguuuau

SEQ ID NO: 81520 - RNA, 32 nt, Human
cacgcccggcccagcccugccggccgcauugg

SEQ ID NO: 81521 - RNA, 32 nt, Human
cacgcccuagggcuuccagccuccucuucagu

SEQ ID NO: 81522 - RNA, 18 nt, Human
cacgcccuccaguccuca

SEQ ID NO: 81523 - RNA, 32 nt, Human
cacgcccucccuggcccccgccugggccuccu

SEQ ID NO: 81524 - RNA, 32 nt, Human
cacgcccuccuccucgcugccugcagcuccaa

SEQ ID NO: 81525 - RNA, 32 nt, Human
cacgcccugcacuccgggaccgucccugcgcg

SEQ ID NO: 81526 - RNA, 32 nt, Human
cacgcccugcacuguggagaagugaccugguc

SEQ ID NO: 81527 - RNA, 32 nt, Human
cacgcccugccugcccucccugcccagcugua

SEQ ID NO: 81528 - RNA, 32 nt, Human
cacgcccugccugguccgccauguuccaaaga

SEQ ID NO: 81529 - RNA, 32 nt, Human
cacgcccugcggagaggaaaugacaggcacgc

SEQ ID NO: 81530 - RNA, 32 nt, Human
cacgcccuggaccagccgcccagaucauggcg

SEQ ID NO: 81531 - RNA, 32 nt, Human
cacgcccugggcagguaggcgggagcuucccu

SEQ ID NO: 81532 - RNA, 32 nt, Human
cacgccgauauaagccauagccccaggcccgc

SEQ ID NO: 81533 - RNA, 32 nt, Human
cacgccgcagagccauggagaucggcaccgag

SEQ ID NO: 81534 - RNA, 32 nt, Human
cacgccgcuagugcucccaccccgcccuccug

SEQ ID NO: 81535 - RNA, 32 nt, Human
cacgccgcugcacuccagccugagcacagagc

SEQ ID NO: 81536 - RNA, 32 nt, Human
cacgccgcugcacuccagcuugaaugacagag

SEQ ID NO: 81537 - RNA, 32 nt, Human
cacgccggcaaggaaagcgcagcucugagccc

SEQ ID NO: 81538 - RNA, 32 nt, Human
cacgccggcccgcgcgugccucugccuacaag

SEQ ID NO: 81539 - RNA, 32 nt, Human
cacgccgggacaccauguucuccaucaagcua

SEQ ID NO: 81540 - RNA, 32 nt, Human
cacgccggggccuccaccgccugggccugagc

SEQ ID NO: 81541 - RNA, 32 nt, Human
cacgccgguauucagugccuggcgcggugcua

SEQ ID NO: 81542 - RNA, 32 nt, Human
cacgccguugcacuccagccugggcaacaaga

SEQ ID NO: 81543 - RNA, 32 nt, Human
cacgccuaccugagcagccucugacugcccuu

SEQ ID NO: 81544 - RNA, 32 nt, Human
cacgccuaucuucucucucugcuccuccuucc

SEQ ID NO: 81545 - RNA, 32 nt, Human
cacgccucagaggggcccucagccucuccuga

SEQ ID NO: 81546 - RNA, 32 nt, Human
cacgccucagugucuccucaggcacaggaagu

SEQ ID NO: 81547 - RNA, 32 nt, Human
cacgccucauuaggggcaucaaagacucaagu

SEQ ID NO: 81548 - RNA, 32 nt, Human
cacgccuccuguucuuucuuaaagcuguuagg

SEQ ID NO: 81549 - RNA, 23 nt, Human
cacgccucuaaucccagcacuuu

SEQ ID NO: 81550 - RNA, 32 nt, Human
cacgccucucccaggaccugcagcacaguggu

SEQ ID NO: 81551 - RNA, 32 nt, Human
cacgccucucccugcacucccuccuggagcuc

SEQ ID NO: 81552 - RNA, 32 nt, Human
cacgccucugcacuccagccugggcaacaaga

SEQ ID NO: 81553 - RNA, 32 nt, Human
cacgccucuggucccagcugcucgggaggccg

SEQ ID NO: 81554 - RNA, 32 nt, Human
cacgccugcaaacgcugccugcccguaaacac

SEQ ID NO: 81555 - RNA, 32 nt, Human
cacgccugcaaacgcugccugccgguaaacac

SEQ ID NO: 81556 - RNA, 32 nt, Human
cacgccugccucgauuguccagccucugccag

SEQ ID NO: 81557 - RNA, 32 nt, Human
cacgccugcuuuguggggcagggccaugcggc

SEQ ID NO: 81558 - RNA, 32 nt, Human
cacgccuggccuugauuuccuucuuaagcaga

SEQ ID NO: 81559 - RNA, 32 nt, Human
cacgccuggcuuuccuuggauacccacuguca

SEQ ID NO: 81560 - RNA, 17 nt, Human
cacgccugggacagaag

SEQ ID NO: 81561 - RNA, 32 nt, Human
cacgccugggcaacauggugaaacccugucuc

SEQ ID NO: 81562 - RNA, 32 nt, Human
cacgccuguaaacccagcuacucgggagguug

SEQ ID NO: 81563 - RNA, 32 nt, Human
cacgccuguaaucccaacacuuuucgaggccu

SEQ ID NO: 81564 - RNA, 22 nt, Human
cacgccuguaaucccagcacuu

SEQ ID NO: 81565 - RNA, 23 nt, Human
cacgccuguaaucccagcacuuu

SEQ ID NO: 81566 - RNA, 22 nt, Human
cacgccuguaaucccagcuacu

SEQ ID NO: 81567 - RNA, 32 nt, Human
cacgccuguaaucccagcuacucgggaagcug

SEQ ID NO: 81568 - RNA, 32 nt, Human
cacgccuguaaucccagcuacucgggaggcua

SEQ ID NO: 81569 - RNA, 32 nt, Human
cacgccuguaaucccagcuacucgggaggcug

SEQ ID NO: 81570 - RNA, 32 nt, Human
cacgccuguaaucccagcuacucuggaggcug

SEQ ID NO: 81571 - RNA, 23 nt, Human
cacgccuguaaucccagcuacuu

SEQ ID NO: 81572 - RNA, 32 nt, Human
cacgccuguaaucccagcuacuuggaaggcug

SEQ ID NO: 81573 - RNA, 32 nt, Human
cacgccuguaaucccagcuacuugggaggcug

SEQ ID NO: 81574 - RNA, 32 nt, Human
cacgccuguaaucccagcuccuugggaggcug

SEQ ID NO: 81575 - RNA, 32 nt, Human
cacgccuguaaucccagcucuuugggaggccg

SEQ ID NO: 81576 - RNA, 32 nt, Human
cacgccuguaaucccagcucuuugggaggcug

SEQ ID NO: 81577 - RNA, 32 nt, Human
cacgccuguaaucccagcucuuuguggggccg

SEQ ID NO: 81578 - RNA, 32 nt, Human
cacgccuguaaucccagcugcuugggaggcug

SEQ ID NO: 81579 - RNA, 32 nt, Human
cacgccuguaaucccagcuucuugggaggcug

SEQ ID NO: 81580 - RNA, 32 nt, Human
cacgccuguagucccaacacuuugggaggccg

SEQ ID NO: 81581 - RNA, 32 nt, Human
cacgccuguagucccagagcuuugggaggcug

SEQ ID NO: 81582 - RNA, 32 nt, Human
cacgccuguagucccagcacuuugagaggccg

SEQ ID NO: 81583 - RNA, 32 nt, Human
cacgccuguagucccagcacuuugggagcccg

SEQ ID NO: 81584 - RNA, 32 nt, Human
cacgccuguagucccagcacuuugggaggcag

SEQ ID NO: 81585 - RNA, 32 nt, Human
cacgccuguagucccagcacuuugggaggccg

SEQ ID NO: 81586 - RNA, 32 nt, Human
cacgccuguagucccagcauuuugggaggcug

SEQ ID NO: 81587 - RNA, 32 nt, Human
cacgccuguagucccagcuacccgggaggcug

SEQ ID NO: 81588 - RNA, 32 nt, Human
cacgccuguagucccagcuaccuaggaggcug

SEQ ID NO: 81589 - RNA, 32 nt, Human
cacgccuguagucccagcuacucaggaggcua

SEQ ID NO: 81590 - RNA, 32 nt, Human
cacgccuguagucccagcuacucaggaggcug

SEQ ID NO: 81591 - RNA, 32 nt, Human
cacgccuguagucccagcuacucgggagccug

SEQ ID NO: 81592 - RNA, 32 nt, Human
cacgccuguagucccagcuacucgggaggcug

SEQ ID NO: 81593 - RNA, 32 nt, Human
cacgccuguagucccagcuacuggggaggcug

SEQ ID NO: 81594 - RNA, 32 nt, Human
cacgccuguagucccagcuacuugggaggcug

SEQ ID NO: 81595 - RNA, 32 nt, Human
cacgccuguagucccagcuccucgggaggcag

SEQ ID NO: 81596 - RNA, 32 nt, Human
cacgccuguagucccagguacuugcgaggcua

SEQ ID NO: 81597 - RNA, 32 nt, Human
cacgccuguagucccagguacuugggagccug

SEQ ID NO: 81598 - RNA, 32 nt, Human
cacgccuguagucccagguucuugggaagcug

SEQ ID NO: 81599 - RNA, 32 nt, Human
cacgccuguagucccaguuacuugggaggcug

SEQ ID NO: 81600 - RNA, 32 nt, Human
cacgccuguaguuccagcuacucaggaggcug

SEQ ID NO: 81601 - RNA, 32 nt, Human
cacgccuguauucccagcuacuugggaggcug

SEQ ID NO: 81602 - RNA, 32 nt, Human
cacgccugugcuuacacacaugcacacacaaa

SEQ ID NO: 81603 - RNA, 32 nt, Human
cacgccuguggucccagcacuuugggaggccg

SEQ ID NO: 81604 - RNA, 32 nt, Human
cacgccuguggucccagcuacacaggaggcua

SEQ ID NO: 81605 - RNA, 32 nt, Human
cacgccuguggucccagcuacucgggaggcuu

SEQ ID NO: 81606 - RNA, 32 nt, Human
cacgccuguggucccagcuauucaggaggcug

SEQ ID NO: 81607 - RNA, 32 nt, Human
cacgccuguggucccagcugcuggggaggcug

SEQ ID NO: 81608 - RNA, 32 nt, Human
cacgccuuguaaucccagcacuuugggaggcc

SEQ ID NO: 81609 - RNA, 32 nt, Human
cacgccuuuaaucccagcuacucgggaggcug

SEQ ID NO: 81610 - RNA, 32 nt, Human
cacgcgaggcgcccgggaggugccaccacagg

SEQ ID NO: 81611 - RNA, 32 nt, Human
cacgcgcaggcccugaccucacugccugccuc

SEQ ID NO: 81612 - RNA, 32 nt, Human
cacgcgccagccaggcugugggcagggcgggg

SEQ ID NO: 81613 - RNA, 32 nt, Human
cacgcgcccagccuagacuagcauuuuugagu

SEQ ID NO: 81614 - RNA, 32 nt, Human
cacgcgccgcgccgcgaggcuugggggaggug

SEQ ID NO: 81615 - RNA, 32 nt, Human
cacgcgccuguaaucccagcuacuugggaggc

SEQ ID NO: 81616 - RNA, 32 nt, Human
cacgcggagaggaggagaggcugagggaggga

SEQ ID NO: 81617 - RNA, 32 nt, Human
cacgcggaugccgccucaagggucuucagggg

SEQ ID NO: 81618 - RNA, 32 nt, Human
cacgcggcagguuccaggugcccuggcuggag

SEQ ID NO: 81619 - RNA, 32 nt, Human
cacgcggccaggcagagaaggugcccggagcu

SEQ ID NO: 81620 - RNA, 21 nt, Human
cacgcggccucgggccucccu

SEQ ID NO: 81621 - RNA, 32 nt, Human
cacgcggcgugguccccagagcuaggccggag

SEQ ID NO: 81622 - RNA, 32 nt, Human
cacgcgggacccucugccacccucucugccac

SEQ ID NO: 81623 - RNA, 32 nt, Human
cacgcggggaagcacaucagagucgccggcug

SEQ ID NO: 81624 - RNA, 32 nt, Human
cacgcggggcaggccggggcugugagggggca

SEQ ID NO: 81625 - RNA, 32 nt, Human
cacgcggggcccgggagccaugguccgcuucg

SEQ ID NO: 81626 - RNA, 32 nt, Human
cacgcguccgcgagaaggaggacucgcaagcc

SEQ ID NO: 81627 - RNA, 32 nt, Human
cacgcguccgggggugcugggccuggcgggca

SEQ ID NO: 81628 - RNA, 32 nt, Human
cacgcgugagccacugugcccagccgaucuga

SEQ ID NO: 81629 - RNA, 32 nt, Human
cacgcuaacuagcugaccacagacuccacagu

SEQ ID NO: 81630 - RNA, 32 nt, Human
cacgcuacugcgcuccagccugagugauagag

SEQ ID NO: 81631 - RNA, 32 nt, Human
cacgcuagccugggcaacagauugagacuugu

SEQ ID NO: 81632 - RNA, 32 nt, Human
cacgcuagccugggugacacaggaagacucca

SEQ ID NO: 81633 - RNA, 32 nt, Human
cacgcuauggcgcacacacacagugcacgucc

SEQ ID NO: 81634 - RNA, 32 nt, Human
cacgcucaaacuguaugccugcuccagccugg

SEQ ID NO: 81635 - RNA, 32 nt, Human
cacgcucacccagucaccuccccacaucgcac

SEQ ID NO: 81636 - RNA, 32 nt, Human
cacgcucacucugcuuccuuguggguggccuu

SEQ ID NO: 81637 - RNA, 32 nt, Human
cacgcuccacgcacacacaccccagcccuguc

SEQ ID NO: 81638 - RNA, 32 nt, Human
cacgcuccagcccuucaucagccugggcaguc

SEQ ID NO: 81639 - RNA, 32 nt, Human
cacgcuccagccugacccuccagcauaccuau

SEQ ID NO: 81640 - RNA, 32 nt, Human
cacgcucccuggaagcuggaagacugugcaga

SEQ ID NO: 81641 - RNA, 32 nt, Human
cacgcucccuggggcucuuaguucagcugcug

SEQ ID NO: 81642 - RNA, 32 nt, Human
cacgcuccgcagccucaggucuuggcucucac

SEQ ID NO: 81643 - RNA, 21 nt, Human
cacgcucgacgcugcugcagg

SEQ ID NO: 81644 - RNA, 32 nt, Human
cacgcucucacugcugccuccugcuggccgcu

SEQ ID NO: 81645 - RNA, 32 nt, Human
cacgcucuccuccaccgaccaggugaccuuuu

SEQ ID NO: 81646 - RNA, 32 nt, Human
cacgcucucuccccacaucgucuucccaucug

SEQ ID NO: 81647 - RNA, 32 nt, Human
cacgcucucucuucucucccaggcucuggcuc

SEQ ID NO: 81648 - RNA, 32 nt, Human
cacgcucucugcucucuccauucccauuuuug

SEQ ID NO: 81649 - RNA, 32 nt, Human
cacgcucuggcgcgggaggcgccccuucgccu

SEQ ID NO: 81650 - RNA, 32 nt, Human
cacgcugacacacccacauucaccaaacccac

SEQ ID NO: 81651 - RNA, 32 nt, Human
cacgcugagagggacacgcagugacgagcggc

SEQ ID NO: 81652 - RNA, 32 nt, Human
cacgcugaguccuagacacagagccaggccgg

SEQ ID NO: 81653 - RNA, 32 nt, Human
cacgcugccuuccgcuccuccuggucuuuccc

SEQ ID NO: 81654 - RNA, 32 nt, Human
cacgcugcgcuagcacaaacacaaaguaggau

SEQ ID NO: 81655 - RNA, 32 nt, Human
cacgcugcggguaccggggcuugggggcgcuc

SEQ ID NO: 81656 - RNA, 32 nt, Human
cacgcugcuaauggcaucaucaccucuggcuc

SEQ ID NO: 81657 - RNA, 32 nt, Human
cacgcugcugccaguccuuguggaaguggggc

SEQ ID NO: 81658 - RNA, 32 nt, Human
cacgcugcuggcagagaugguuugagaacaca

SEQ ID NO: 81659 - RNA, 32 nt, Human
cacgcuggagccaacagaguuaagaggaagau

SEQ ID NO: 81660 - RNA, 32 nt, Human
cacgcuggagccagggaacacaggagagggga

SEQ ID NO: 81661 - RNA, 21 nt, Human
cacgcuggagugaccggcccu

SEQ ID NO: 81662 - RNA, 22 nt, Human
cacgcuggagugaccggcccuc

SEQ ID NO: 81663 - RNA, 32 nt, Human
cacgcuggccuccauggagacuccaggcagcc

SEQ ID NO: 81664 - RNA, 32 nt, Human
cacgcugggaggacacgggcugggcugagcag

SEQ ID NO: 81665 - RNA, 32 nt, Human
cacgcugggccgcggcugcccggcagcaacug

SEQ ID NO: 81666 - RNA, 32 nt, Human
cacgcugggcuguuuauuagguacaguaauaa

SEQ ID NO: 81667 - RNA, 32 nt, Human
cacgcugggcuucaaagacgagagaagaaaca

SEQ ID NO: 81668 - RNA, 32 nt, Human
cacgcuggucucaaacuccuggacucauggga

SEQ ID NO: 81669 - RNA, 32 nt, Human
cacgcuggucugggauaguugggcagggagac

SEQ ID NO: 81670 - RNA, 32 nt, Human
cacgcuggugcugggagcgccugccuucucuu

SEQ ID NO: 81671 - RNA, 32 nt, Human
cacgcuguagacauucccucuccuggucucug

SEQ ID NO: 81672 - RNA, 32 nt, Human
cacgcugucaccaggcuggagugcaguggcgc

SEQ ID NO: 81673 - RNA, 32 nt, Human
cacgcugugcagcagcagugaagccugaagca

SEQ ID NO: 81674 - RNA, 25 nt, Human
cacgcuuaccucaaccauccuggcu

SEQ ID NO: 81675 - RNA, 32 nt, Human
cacgcuuguagucccaguuacuugggaggcug

SEQ ID NO: 81676 - RNA, 32 nt, Human
cacgcuuucaugaauucugucauuucaaagac

SEQ ID NO: 81677 - RNA, 32 nt, Human
cacgcuuuugugauggagugcuguuuuguuau

SEQ ID NO: 81678 - RNA, 22 nt, Human
cacggaaaggaaucuaauucca

SEQ ID NO: 81679 - RNA, 32 nt, Human
cacggaacaugcugcaauucaggagucuggcu

SEQ ID NO: 81680 - RNA, 32 nt, Human
cacggaacucggcugcggcuccauggucugag

SEQ ID NO: 81681 - RNA, 19 nt, Human
cacggaacuugcaguucca

SEQ ID NO: 81682 - RNA, 32 nt, Human
cacggaagacaagagaguagccucuccaguuu

SEQ ID NO: 81683 - RNA, 32 nt, Human
cacggaagccuaucaacggaugccugugauuc

SEQ ID NO: 81684 - RNA, 32 nt, Human
cacggaagcucagcagacucggcagggcaagc

SEQ ID NO: 81685 - RNA, 32 nt, Human
cacggaaggaagggcacugugaagcagugagg

SEQ ID NO: 81686 - RNA, 32 nt, Human
cacggaaggucggccugggauguggccuggga

SEQ ID NO: 81687 - RNA, 32 nt, Human
cacggaauauagaagacauggcauuuuacuca

SEQ ID NO: 81688 - RNA, 32 nt, Human
cacggacauucuuccuccuucugguaccaucu

SEQ ID NO: 81689 - RNA, 32 nt, Human
cacggaccaggucacguauuguguacacccac

SEQ ID NO: 81690 - RNA, 32 nt, Human
cacggaccaucuuuagcaguuuccucagugau

SEQ ID NO: 81691 - RNA, 21 nt, Human
cacggacccagcgcgcggggg

SEQ ID NO: 81692 - RNA, 32 nt, Human
cacggaccugggacuuggaggauagcaaagaa

SEQ ID NO: 81693 - RNA, 32 nt, Human
cacggacgacaccaguucggugaccuccucug

SEQ ID NO: 81694 - RNA, 32 nt, Human
cacggacuacaauucuaucccucccagaggga

SEQ ID NO: 81695 - RNA, 32 nt, Human
cacggacucucuccaccugcacggugcuggag

SEQ ID NO: 81696 - RNA, 32 nt, Human
cacggacugcguuccgcagcuccugggugggg

SEQ ID NO: 81697 - RNA, 32 nt, Human
cacggacuucugcugcugccaccugcgccagc

SEQ ID NO: 81698 - RNA, 32 nt, Human
cacggagaggaagggaaggaaggagagggagg

SEQ ID NO: 81699 - RNA, 32 nt, Human
cacggagauccuaagcuggcugucuugugugc

SEQ ID NO: 81700 - RNA, 32 nt, Human
cacggagcaccugcacgcugugcucgacaccg

SEQ ID NO: 81701 - RNA, 32 nt, Human
cacggagcagaggucaucuguccccagcuugg

SEQ ID NO: 81702 - RNA, 32 nt, Human
cacggagcagaugagagagggucggggcuugc

SEQ ID NO: 81703 - RNA, 32 nt, Human
cacggagcccaagagguggggugucguggcuc

SEQ ID NO: 81704 - RNA, 20 nt, Human
cacggagccccgcgacccgc

SEQ ID NO: 81705 - RNA, 23 nt, Human
cacggagccggcagcggcgcggg

SEQ ID NO: 81706 - RNA, 18 nt, Human
cacggagccgucagucca

SEQ ID NO: 81707 - RNA, 32 nt, Human
cacggagccuggagggaugccacccagcaaca

SEQ ID NO: 81708 - RNA, 32 nt, Human
cacggagcgggccuguaggagcuguccaggcc

SEQ ID NO: 81709 - RNA, 32 nt, Human
cacggagcucacugcagacucgccauccccgu

SEQ ID NO: 81710 - RNA, 18 nt, Human
cacggagcuccagcuucu

SEQ ID NO: 81711 - RNA, 17 nt, Human
cacggagcucccagucc

SEQ ID NO: 81712 - RNA, 19 nt, Human
cacggagcucugccauucc

SEQ ID NO: 81713 - RNA, 20 nt, Human
cacggagcucuucaccacca

SEQ ID NO: 81714 - RNA, 32 nt, Human
cacggagcuuccugccucugcuccgacacccg

SEQ ID NO: 81715 - RNA, 32 nt, Human
cacggaggaaccugcagaauuuggauucugag

SEQ ID NO: 81716 - RNA, 32 nt, Human
cacggaggacggcgugggcagccugggccugg

SEQ ID NO: 81717 - RNA, 32 nt, Human
cacggaggaggugucauaggagcucagccuca

SEQ ID NO: 81718 - RNA, 32 nt, Human
cacggaggccaugcuccagaacauggaggcug

SEQ ID NO: 81719 - RNA, 32 nt, Human
cacggaggcucacgccuguaaucccagcacuu

SEQ ID NO: 81720 - RNA, 32 nt, Human
cacggaggcucaugccuguaaucccagcacuu

SEQ ID NO: 81721 - RNA, 32 nt, Human
cacggaggcucgugcauguaauccuagcacuu

SEQ ID NO: 81722 - RNA, 32 nt, Human
cacggagguaggaaggggcagacguagacuug

SEQ ID NO: 81723 - RNA, 32 nt, Human
cacggaguccaggccugguccugcugcucauu

SEQ ID NO: 81724 - RNA, 32 nt, Human
cacggagugaagaugggaggagcuguuagcaa

SEQ ID NO: 81725 - RNA, 32 nt, Human
cacggaguggccaguggcaugugaccucggag

SEQ ID NO: 81726 - RNA, 32 nt, Human
cacggaguuccagggaaaaggaacuugugaaa

SEQ ID NO: 81727 - RNA, 32 nt, Human
cacggaguugacugucuggugggggaggcugg

SEQ ID NO: 81728 - RNA, 25 nt, Human
cacggaucgugcugcucccuggcca

SEQ ID NO: 81729 - RNA, 32 nt, Human
cacggaucuaaguuauucuccccagccagagc

SEQ ID NO: 81730 - RNA, 32 nt, Human
cacggaugagcacaacccuggagcugcacagc

SEQ ID NO: 81731 - RNA, 21 nt, Human
cacggauucuugacagagaga

SEQ ID NO: 81732 - RNA, 32 nt, Human
cacggcaacagaagcaggagugucacuggccg

SEQ ID NO: 81733 - RNA, 20 nt, Human
cacggcacacaccuccagcc

SEQ ID NO: 81734 - RNA, 32 nt, Human
cacggcaccagccugggaugccagucccgccu

SEQ ID NO: 81735 - RNA, 21 nt, Human
cacggcacuccagccugggca

SEQ ID NO: 81736 - RNA, 32 nt, Human
cacggcacugcgcugcagccugggcaacacag

SEQ ID NO: 81737 - RNA, 32 nt, Human
cacggcacuggcagagacgcagaagggaaagu

SEQ ID NO: 81738 - RNA, 32 nt, Human
cacggcagcagcucagagcccaaccuggcacu

SEQ ID NO: 81739 - RNA, 32 nt, Human
cacggcagccuccugucuucuaggagcuauca

SEQ ID NO: 81740 - RNA, 32 nt, Human
cacggcagccuucccgaaacauaguauggauu

SEQ ID NO: 81741 - RNA, 32 nt, Human
cacggcaggaggaucacuuuaguucaggaguu

SEQ ID NO: 81742 - RNA, 22 nt, Human
cacggcagugcgugcggcugug

SEQ ID NO: 81743 - RNA, 32 nt, Human
cacggcauccacccucuccagccagccccgcc

SEQ ID NO: 81744 - RNA, 32 nt, Human
cacggcaugccuguacuggcacuuugguuuuu

SEQ ID NO: 81745 - RNA, 31 nt, Human
cacggcauggggcgagcggacacuccacgac

SEQ ID NO: 81746 - RNA, 32 nt, Human
cacggcauucaaaggucacagaacugccacua

SEQ ID NO: 81747 - RNA, 32 nt, Human
cacggccaagggccacgggaacuuggagaggg

SEQ ID NO: 81748 - RNA, 21 nt, Human
cacggccacaggggcgcacgg

SEQ ID NO: 81749 - RNA, 32 nt, Human
cacggccaccaccguccucaucaugucgucuu

SEQ ID NO: 81750 - RNA, 32 nt, Human
cacggccaggcagagaagggcaacucccaaga

SEQ ID NO: 81751 - RNA, 32 nt, Human
cacggccaggguggugucgggagcaggccuca

SEQ ID NO: 81752 - RNA, 32 nt, Human
cacggccaucccugcaagcacacacaccagga

SEQ ID NO: 81753 - RNA, 32 nt, Human
cacggccaucccuuugcucccagccuggcucc

SEQ ID NO: 81754 - RNA, 32 nt, Human
cacggccaugguuggcucuagaugcugcuggc

SEQ ID NO: 81755 - RNA, 32 nt, Human
cacggccauugcaagggcucagccuggcaggc

SEQ ID NO: 81756 - RNA, 32 nt, Human
cacggcccaccacccugccgcugcugauccca

SEQ ID NO: 81757 - RNA, 32 nt, Human
cacggcccaccggcggccagccccagagacca

SEQ ID NO: 81758 - RNA, 32 nt, Human
cacggcccagggccccgaagaucaauaacugc

SEQ ID NO: 81759 - RNA, 32 nt, Human
cacggccccacuguccacacacugccucccca

SEQ ID NO: 81760 - RNA, 32 nt, Human
cacggccccucgggccccggccugccgcccgg

SEQ ID NO: 81761 - RNA, 32 nt, Human
cacggccccugcccucuggucugccgugcauc

SEQ ID NO: 81762 - RNA, 32 nt, Human
cacggcccugcucuguucccugggacaccccc

SEQ ID NO: 81763 - RNA, 32 nt, Human
cacggcccugcugggugaccucaggccuaguc

SEQ ID NO: 81764 - RNA, 22 nt, Human
cacggcccuucacuacagcgug

SEQ ID NO: 81765 - RNA, 19 nt, Human
cacggccgaggcgguggga

SEQ ID NO: 81766 - RNA, 23 nt, Human
cacggccgcgaccgccccgcggg

SEQ ID NO: 81767 - RNA, 22 nt, Human
cacggccuaggaggugcacggg

SEQ ID NO: 81768 - RNA, 32 nt, Human
cacggccuccacaauagccacacccacaccug

SEQ ID NO: 81769 - RNA, 32 nt, Human
cacggccuccccuccgcccugcggucccgccg

SEQ ID NO: 81770 - RNA, 32 nt, Human
cacggccugagcagggugaggagcagcugcca

SEQ ID NO: 81771 - RNA, 32 nt, Human
cacggccugccugucgcauguuugugucugcc

SEQ ID NO: 81772 - RNA, 32 nt, Human
cacggccuggccuggcuucacacacauagccg

SEQ ID NO: 81773 - RNA, 32 nt, Human
cacggccuuguuuucagugauucaugugcccg

SEQ ID NO: 81774 - RNA, 32 nt, Human
cacggcgacacacagccucaguggugcaagau

SEQ ID NO: 81775 - RNA, 32 nt, Human
cacggcgacucacgccuguaaucccagcacau

SEQ ID NO: 81776 - RNA, 19 nt, Human
cacggcgcccaccgcagug

SEQ ID NO: 81777 - RNA, 32 nt, Human
cacggcgcccgugacagagcgagcuuaacgga

SEQ ID NO: 81778 - RNA, 19 nt, Human
cacggcgccuagcacagug

SEQ ID NO: 81779 - RNA, 32 nt, Human
cacggcggcucacgccuguaaucccagcacuu

SEQ ID NO: 81780 - RNA, 32 nt, Human
cacggcgggcagcagcggcggcggcggcggcu

SEQ ID NO: 81781 - RNA, 32 nt, Human
cacggcgguggaggggacauaggaggcggcca

SEQ ID NO: 81782 - RNA, 32 nt, Human
cacggcgguggucuugcgggaggcgugggcug

SEQ ID NO: 81783 - RNA, 32 nt, Human
cacggcucacugcaaccuccaccuccugaguu

SEQ ID NO: 81784 - RNA, 32 nt, Human
cacggcucacugcagccucaaacuccuaggcu

SEQ ID NO: 81785 - RNA, 32 nt, Human
cacggcucacugcagccucaaccuccuggacu

SEQ ID NO: 81786 - RNA, 32 nt, Human
cacggcucacugcagccucaaccuccugggcu

SEQ ID NO: 81787 - RNA, 32 nt, Human
cacggcucacugcagccucagcguccugggcu

SEQ ID NO: 81788 - RNA, 32 nt, Human
cacggcucacugcagccucgaccuccccagcu

SEQ ID NO: 81789 - RNA, 32 nt, Human
cacggcucacugcagccucuaccuccccaggc

SEQ ID NO: 81790 - RNA, 32 nt, Human
cacggcucacugcagcuucaaacuccugggcu

SEQ ID NO: 81791 - RNA, 32 nt, Human
cacggcucacugcagucucugccucccagaug

SEQ ID NO: 81792 - RNA, 32 nt, Human
cacggcucacugcaguuucaaguuccugggcu

SEQ ID NO: 81793 - RNA, 32 nt, Human
cacggcucacugcauccucaaccuccuggguu

SEQ ID NO: 81794 - RNA, 32 nt, Human
cacggcucccuuccucaccccagcccucccca

SEQ ID NO: 81795 - RNA, 32 nt, Human
cacggcucgcagcugccaccagagcugccccc

SEQ ID NO: 81796 - RNA, 32 nt, Human
cacggcucucauugcucgggguugguuggguu

SEQ ID NO: 81797 - RNA, 22 nt, Human
cacggcugccccgugugcagga

SEQ ID NO: 81798 - RNA, 32 nt, Human
cacggcugcgcgccugcacuuccccucggugc

SEQ ID NO: 81799 - RNA, 21 nt, Human
cacggcugcuacgugugcggg

SEQ ID NO: 81800 - RNA, 32 nt, Human
cacggcugcugacuucucagggcugcaagcag

SEQ ID NO: 81801 - RNA, 32 nt, Human
cacggcuggagaguucagcugugugugcauag

SEQ ID NO: 81802 - RNA, 32 nt, Human
cacggcuggaggugggauccacacagcucaga

SEQ ID NO: 81803 - RNA, 32 nt, Human
cacggcugucauuuuucaccuggucauucugu

SEQ ID NO: 81804 - RNA, 25 nt, Human
cacggcuguccggacgugccauggg

SEQ ID NO: 81805 - RNA, 32 nt, Human
cacggcuucccucuuggcucauuccaagcuug

SEQ ID NO: 81806 - RNA, 32 nt, Human
cacggcuucucaugcuauuucuaccucacuuu

SEQ ID NO: 81807 - RNA, 31 nt, Human
cacgggaaacucaaggagguggugaauuuuu

SEQ ID NO: 81808 - RNA, 32 nt, Human
cacgggacaaaaacucaagaagaaauaagagc

SEQ ID NO: 81809 - RNA, 32 nt, Human
cacgggacaucuugccuuugagugugcagagu

SEQ ID NO: 81810 - RNA, 32 nt, Human
cacgggacccucaggcgggcaggaugaacgac

SEQ ID NO: 81811 - RNA, 32 nt, Human
cacgggaccguggcuuccuuccucaccuggcu

SEQ ID NO: 81812 - RNA, 32 nt, Human
cacgggacgccaugggcacugcagggacaguc

SEQ ID NO: 81813 - RNA, 32 nt, Human
cacgggacucaauccgcgccucggccgucggg

SEQ ID NO: 81814 - RNA, 32 nt, Human
cacgggacucagaagugcgccgccaugcugcc

SEQ ID NO: 81815 - RNA, 32 nt, Human
cacgggagaggagaagagggagacccgccgcc

SEQ ID NO: 81816 - RNA, 32 nt, Human
cacgggagccaggaugggacuggucguguuug

SEQ ID NO: 81817 - RNA, 32 nt, Human
cacgggaggagaaucaagagugagccauggag

SEQ ID NO: 81818 - RNA, 32 nt, Human
cacgggaggcagagguugcagugagcagagau

SEQ ID NO: 81819 - RNA, 32 nt, Human
cacgggaucaccugccuuuuuggcugcugcac

SEQ ID NO: 81820 - RNA, 32 nt, Human
cacgggaucccugaagugacucagccaggcag

SEQ ID NO: 81821 - RNA, 32 nt, Human
cacgggcacagcugcugugccaggacugugac

SEQ ID NO: 81822 - RNA, 32 nt, Human
cacgggcacagggagagggacaacugcagcag

SEQ ID NO: 81823 - RNA, 32 nt, Human
cacgggcacagguguguggaggccguggucgg

SEQ ID NO: 81824 - RNA, 32 nt, Human
cacgggcaccgaagcugggacagcaggcuuag

SEQ ID NO: 81825 - RNA, 32 nt, Human
cacgggcacugacccacagccuccgggccagg

SEQ ID NO: 81826 - RNA, 32 nt, Human
cacgggcagccuggacauggcccugccugaaa

SEQ ID NO: 81827 - RNA, 32 nt, Human
cacgggcaggguggggagccgagugaccccuc

SEQ ID NO: 81828 - RNA, 32 nt, Human
cacgggcaugaggagggugauaaugacaaggg

SEQ ID NO: 81829 - RNA, 32 nt, Human
cacgggccagauggccagcugucgagagcagc

SEQ ID NO: 81830 - RNA, 32 nt, Human
cacgggccagccaggccagcacagaggcacca

SEQ ID NO: 81831 - RNA, 32 nt, Human
cacgggcccccuggcccaggcgcugccaacca

SEQ ID NO: 81832 - RNA, 32 nt, Human
cacgggcccggguugggucaccagacggggcu

SEQ ID NO: 81833 - RNA, 32 nt, Human
cacgggcccugggccucaagggcaccaucuga

SEQ ID NO: 81834 - RNA, 32 nt, Human
cacgggccggagagcugggagcacaggucccg

SEQ ID NO: 81835 - RNA, 32 nt, Human
cacgggcgcccaggacccuggccugcagagac

SEQ ID NO: 81836 - RNA, 21 nt, Human
cacgggcggcggcggcgugga

SEQ ID NO: 81837 - RNA, 32 nt, Human
cacgggcucugaggugcaugcagagaggagga

SEQ ID NO: 81838 - RNA, 32 nt, Human
cacgggcugcaaccggagccucggaccggcca

SEQ ID NO: 81839 - RNA, 32 nt, Human
cacgggcuggggcucagcuccuuggagagggc

SEQ ID NO: 81840 - RNA, 32 nt, Human
cacgggcuugggggaaagaugguggggaccaa

SEQ ID NO: 81841 - RNA, 32 nt, Human
cacggggaauggagaccaaaaagggaaaagaa

SEQ ID NO: 81842 - RNA, 32 nt, Human
cacggggaggagaaggaggaguggacccagcc

SEQ ID NO: 81843 - RNA, 32 nt, Human
cacggggaggcggaggcagcggcggcggcggc

SEQ ID NO: 81844 - RNA, 32 nt, Human
cacggggcaaagcugcugggccaguggcacuc

SEQ ID NO: 81845 - RNA, 17 nt, Human
cacggggcaccaaucca

SEQ ID NO: 81846 - RNA, 32 nt, Human
cacggggcacuggccugggcagguggcgggaa

SEQ ID NO: 81847 - RNA, 32 nt, Human
cacggggcaggcaccuggauguugagagugga

SEQ ID NO: 81848 - RNA, 32 nt, Human
cacggggccauccagauucaguggcggugccc

SEQ ID NO: 81849 - RNA, 32 nt, Human
cacggggccuguucgccaugcccagccagugc

SEQ ID NO: 81850 - RNA, 32 nt, Human
cacggggcggggugcuuagggugcaggaggcg

SEQ ID NO: 81851 - RNA, 32 nt, Human
cacgggggcaugcugagccacuggaguuccag

SEQ ID NO: 81852 - RNA, 32 nt, Human
cacgggggcccaggauggaggcgucuacaccu

SEQ ID NO: 81853 - RNA, 32 nt, Human
cacgggggcugcaguggauucacugugucagg

SEQ ID NO: 81854 - RNA, 32 nt, Human
cacgggggugcuggaagagaucgggaauaaua

SEQ ID NO: 81855 - RNA, 32 nt, Human
cacggggguggcuuuugcaaagaugaccggca

SEQ ID NO: 81856 - RNA, 21 nt, Human
cacgggguacaacagcagcca

SEQ ID NO: 81857 - RNA, 32 nt, Human
cacggggugaagccuauugccugagaucuugc

SEQ ID NO: 81858 - RNA, 32 nt, Human
cacggguaccuggaacuucagcucaaacauuu

SEQ ID NO: 81859 - RNA, 32 nt, Human
cacgggucggccgcaauccagccugggcggag

SEQ ID NO: 81860 - RNA, 32 nt, Human
cacgggucuaaugcagcccagaacagcuuuga

SEQ ID NO: 81861 - RNA, 32 nt, Human
cacgggucugaagugauguccaggcaaaaauu

SEQ ID NO: 81862 - RNA, 32 nt, Human
cacgggugcaggaauucacacagaaaagugga

SEQ ID NO: 81863 - RNA, 32 nt, Human
cacggguggcagcagauggcccagcccaggga

SEQ ID NO: 81864 - RNA, 32 nt, Human
cacggguggcaggggcaggauuugaacccagg

SEQ ID NO: 81865 - RNA, 32 nt, Human
cacgggugucgaggcaggaaggauuguuucug

SEQ ID NO: 81866 - RNA, 32 nt, Human
cacgggugugagccaccgcgcccagcuagcuc

SEQ ID NO: 81867 - RNA, 32 nt, Human
cacgguaaaauuauguugguuugaaaggagga

SEQ ID NO: 81868 - RNA, 32 nt, Human
cacgguaauguuggacucggugacacacagca

SEQ ID NO: 81869 - RNA, 32 nt, Human
cacgguaccucacaccuguaaucccagcacuu

SEQ ID NO: 81870 - RNA, 32 nt, Human
cacgguacugagaagccgaggucugggugcuc

SEQ ID NO: 81871 - RNA, 23 nt, Human
cacgguagcucacaccuguaauc

SEQ ID NO: 81872 - RNA, 32 nt, Human
cacgguagcucacaccuguaaucccagcacuu

SEQ ID NO: 81873 - RNA, 32 nt, Human
cacgguagcucacccuuguaaucccagcacuu

SEQ ID NO: 81874 - RNA, 32 nt, Human
cacgguagcucacgccuguaaucccaacacuu

SEQ ID NO: 81875 - RNA, 32 nt, Human
cacgguagcucgcuccuguaaucccagcacuu

SEQ ID NO: 81876 - RNA, 32 nt, Human
cacgguaucucaugccuauaaucccagcacuu

SEQ ID NO: 81877 - RNA, 31 nt, Human
cacgguaugaccccaggggcucugcugaugc

SEQ ID NO: 81878 - RNA, 32 nt, Human
cacggucaacuccgcgggacacgaggacacgg

SEQ ID NO: 81879 - RNA, 32 nt, Human
cacggucaagagaucaagaccauccuggccaa

SEQ ID NO: 81880 - RNA, 32 nt, Human
cacggucacaucugccccagugccuuuguccu

SEQ ID NO: 81881 - RNA, 21 nt, Human
cacggucacuuggcugaagga

SEQ ID NO: 81882 - RNA, 32 nt, Human
cacgguccaauccagccuucuucccccagggu

SEQ ID NO: 81883 - RNA, 32 nt, Human
cacggucccaccauguuacccagccuggucuc

SEQ ID NO: 81884 - RNA, 32 nt, Human
cacgguccucaccuggagcuguggccuggcug

SEQ ID NO: 81885 - RNA, 32 nt, Human
cacggucgcagggccgagggaggaccuguggg

SEQ ID NO: 81886 - RNA, 32 nt, Human
cacggucuagagccaugaaauaggcgaugcuc

SEQ ID NO: 81887 - RNA, 32 nt, Human
cacggucucugagauccugaaugcugggggau

SEQ ID NO: 81888 - RNA, 32 nt, Human
cacggucuuccaggaacggugcuccugcuucu

SEQ ID NO: 81889 - RNA, 32 nt, Human
cacggugaaagcaggagcaaggguugggggag

SEQ ID NO: 81890 - RNA, 32 nt, Human
cacggugacccaugcugcccagccuggaggua

SEQ ID NO: 81891 - RNA, 31 nt, Human
cacggugaccucuccgcuugccaaaauaacc

SEQ ID NO: 81892 - RNA, 32 nt, Human
cacggugacucacacuuguaaucccagcacuu

SEQ ID NO: 81893 - RNA, 32 nt, Human
cacggugacucacgccuguaaucccagcacuu

SEQ ID NO: 81894 - RNA, 32 nt, Human
cacggugaggaggcagagaguggugcaggcug

SEQ ID NO: 81895 - RNA, 32 nt, Human
cacggugaugcauaccuauaaucccagcacuu

SEQ ID NO: 81896 - RNA, 32 nt, Human
cacggugcaaagugaaugcugcugucuuggag

SEQ ID NO: 81897 - RNA, 32 nt, Human
cacggugcaggcauagcugccugcugcucugg

SEQ ID NO: 81898 - RNA, 32 nt, Human
cacggugccagccucugaucuggguccuugcu

SEQ ID NO: 81899 - RNA, 32 nt, Human
cacggugcccccgugaccuucacaguuggaug

SEQ ID NO: 81900 - RNA, 32 nt, Human
cacggugccucaugccuguaaucccagcacuu

SEQ ID NO: 81901 - RNA, 32 nt, Human
cacggugccucaugccuguaauccuagcaccu

SEQ ID NO: 81902 - RNA, 32 nt, Human
cacggugcucugcugcccccuccugggcacgu

SEQ ID NO: 81903 - RNA, 32 nt, Human
cacgguggaucaugccuguaaucccagcacuu

SEQ ID NO: 81904 - RNA, 22 nt, Human
cacgguggcagcuguguaugga

SEQ ID NO: 81905 - RNA, 32 nt, Human
cacgguggccacccccugagccucugcuggug

SEQ ID NO: 81906 - RNA, 32 nt, Human
cacgguggcccaugccuguaaucccagcacuu

SEQ ID NO: 81907 - RNA, 30 nt, Human
cacgguggccucuccaggcucagcuccugc

SEQ ID NO: 81908 - RNA, 32 nt, Human
cacgguggccucuccaggcucagcuccugccc

SEQ ID NO: 81909 - RNA, 32 nt, Human
cacgguggcgggcaccuguaaucccagcuacu

SEQ ID NO: 81910 - RNA, 32 nt, Human
cacgguggcgggcaccuguaguuccagcugcu

SEQ ID NO: 81911 - RNA, 32 nt, Human
cacgguggcuaacgccuguaaucccagcacuu

SEQ ID NO: 81912 - RNA, 32 nt, Human
cacgguggcucaagccuguaaucccagcacuu

SEQ ID NO: 81913 - RNA, 23 nt, Human
cacgguggcucacaccuauaauc

SEQ ID NO: 81914 - RNA, 32 nt, Human
cacgguggcucacaccuauaaucccagcacua

SEQ ID NO: 81915 - RNA, 32 nt, Human
cacgguggcucacaccuauaaucccagcacuu

SEQ ID NO: 81916 - RNA, 32 nt, Human
cacgguggcucacaccugcaaucccagcacuu

SEQ ID NO: 81917 - RNA, 21 nt, Human
cacgguggcucacaccuguaa

SEQ ID NO: 81918 - RNA, 32 nt, Human
cacgguggcucacaccuguaaccccagcacug

SEQ ID NO: 81919 - RNA, 23 nt, Human
cacgguggcucacaccuguaauc

SEQ ID NO: 81920 - RNA, 32 nt, Human
cacgguggcucacaccuguaaucccagcacuu

SEQ ID NO: 81921 - RNA, 32 nt, Human
cacgguggcucacaccuguaaucccagcccuu

SEQ ID NO: 81922 - RNA, 32 nt, Human
cacgguggcucacaccuguaaucccagcuguu

SEQ ID NO: 81923 - RNA, 32 nt, Human
cacgguggcucacaccuguaaucccaguacuu

SEQ ID NO: 81924 - RNA, 32 nt, Human
cacgguggcucacaccugugaucccaacacuc

SEQ ID NO: 81925 - RNA, 32 nt, Human
cacgguggcucacaccuguggugucagcuacu

SEQ ID NO: 81926 - RNA, 32 nt, Human
cacgguggcucacaccuguuaucccaacacuu

SEQ ID NO: 81927 - RNA, 32 nt, Human
cacgguggcucacacuuguaaucccagcauuu

SEQ ID NO: 81928 - RNA, 32 nt, Human
cacgguggcucacacuuguaauccuaguacuu

SEQ ID NO: 81929 - RNA, 23 nt, Human
cacgguggcucacagcuauaauc

SEQ ID NO: 81930 - RNA, 32 nt, Human
cacgguggcucacgccgguaaucccagcacuu

SEQ ID NO: 81931 - RNA, 32 nt, Human
cacgguggcucacgccuauaaucccagcacuu

SEQ ID NO: 81932 - RNA, 23 nt, Human
cacgguggcucacgccuguaauc

SEQ ID NO: 81933 - RNA, 32 nt, Human
cacgguggcucacgccuguaaucccaacacuu

SEQ ID NO: 81934 - RNA, 32 nt, Human
cacgguggcucacgccuguaaucccaccacuu

SEQ ID NO: 81935 - RNA, 32 nt, Human
cacgguggcucacgccuguaaucccagaacuu

SEQ ID NO: 81936 - RNA, 32 nt, Human
cacgguggcucacgccuguaaucccagcacac

SEQ ID NO: 81937 - RNA, 32 nt, Human
cacgguggcucacgccuguaaucccagcacug

SEQ ID NO: 81938 - RNA, 32 nt, Human
cacgguggcucacgccuguaaucccagcacuu

SEQ ID NO: 81939 - RNA, 32 nt, Human
cacgguggcucacgccuguaaucccagcaguu

SEQ ID NO: 81940 - RNA, 32 nt, Human
cacgguggcucacgccuguaaucccagcucuu

SEQ ID NO: 81941 - RNA, 32 nt, Human
cacgguggcucacgccuguaaucccagggugc

SEQ ID NO: 81942 - RNA, 32 nt, Human
cacgguggcucacgccuguaaucccaguacuu

SEQ ID NO: 81943 - RNA, 32 nt, Human
cacgguggcucacgccuguaaucccaguauuu

SEQ ID NO: 81944 - RNA, 32 nt, Human
cacgguggcucacgccuguaauccuagcaccu

SEQ ID NO: 81945 - RNA, 32 nt, Human
cacgguggcucacgccuguaauccuagcacuu

SEQ ID NO: 81946 - RNA, 32 nt, Human
cacgguggcucacgccuguaaucucaacacuu

SEQ ID NO: 81947 - RNA, 32 nt, Human
cacgguggcucacgccuguaauuccagcacuu

SEQ ID NO: 81948 - RNA, 32 nt, Human
cacgguggcucacgcuuguaaucccaacacuu

SEQ ID NO: 81949 - RNA, 32 nt, Human
cacgguggcucacgcuuguaaucccagcacuu

SEQ ID NO: 81950 - RNA, 32 nt, Human
cacgguggcucacgucuguaaucccagcaauu

SEQ ID NO: 81951 - RNA, 32 nt, Human
cacgguggcucacuccuguaaucccagcacuu

SEQ ID NO: 81952 - RNA, 32 nt, Human
cacgguggcucacuccuguaaucucaacaauu

SEQ ID NO: 81953 - RNA, 32 nt, Human
cacgguggcucacuccuguaauuccagcacuu

SEQ ID NO: 81954 - RNA, 32 nt, Human
cacgguggcucaggccuguaaucccagcacuu

SEQ ID NO: 81955 - RNA, 23 nt, Human
cacgguggcucauaccuguaauc

SEQ ID NO: 81956 - RNA, 32 nt, Human
cacgguggcucauaccuguaaucccagcacuu

SEQ ID NO: 81957 - RNA, 32 nt, Human
cacgguggcucaugccuauaaucccagcacuu

SEQ ID NO: 81958 - RNA, 32 nt, Human
cacgguggcucaugccucuaaucccagcacuu

SEQ ID NO: 81959 - RNA, 32 nt, Human
cacgguggcucaugccuguaaucccaacacuu

SEQ ID NO: 81960 - RNA, 32 nt, Human
cacgguggcucaugccuguaaucccagcacuu

SEQ ID NO: 81961 - RNA, 32 nt, Human
cacgguggcucaugccuguaaucccagcuacg

SEQ ID NO: 81962 - RNA, 32 nt, Human
cacgguggcucaugccuguaaucucagcacuu

SEQ ID NO: 81963 - RNA, 32 nt, Human
cacgguggcugacaccuguaaucccagcacuu

SEQ ID NO: 81964 - RNA, 32 nt, Human
cacgguggcugcaggucugagacaaggcugcu

SEQ ID NO: 81965 - RNA, 21 nt, Human
cacgguggcuuacaccuguaa

SEQ ID NO: 81966 - RNA, 32 nt, Human
cacgguggcuuacaccuguaacccuggcauuu

SEQ ID NO: 81967 - RNA, 32 nt, Human
cacgguggcuuacaccuguaaucccagcacuu

SEQ ID NO: 81968 - RNA, 23 nt, Human
cacgguggcuuacaucuguaauc

SEQ ID NO: 81969 - RNA, 32 nt, Human
cacgguggcuuacgccuguaaucccagcacuu

SEQ ID NO: 81970 - RNA, 32 nt, Human
cacggugggcacugcccagcaccgcaugccac

SEQ ID NO: 81971 - RNA, 32 nt, Human
cacggugggggaaucccuugagcccaggaguu

SEQ ID NO: 81972 - RNA, 32 nt, Human
cacggugguacacgccuguaaucccagcuacu

SEQ ID NO: 81973 - RNA, 23 nt, Human
cacgguggucagcgugcagcggg

SEQ ID NO: 81974 - RNA, 32 nt, Human
cacgguggugcaugaguguccaucaucugacu

SEQ ID NO: 81975 - RNA, 32 nt, Human
cacgguggugcaugccuguaaucccagcuacu

SEQ ID NO: 81976 - RNA, 32 nt, Human
cacgguggugcgcaccuguaaucccagcuacu

SEQ ID NO: 81977 - RNA, 32 nt, Human
cacgguggugggcgccuguaauuccagcuacu

SEQ ID NO: 81978 - RNA, 32 nt, Human
cacgguggugugggccuguaaucgcagcuacu

SEQ ID NO: 81979 - RNA, 32 nt, Human
cacggugguucacaccuguaaucccggcauuu

SEQ ID NO: 81980 - RNA, 32 nt, Human
cacggugguucacgccuguaaugccagcacuu

SEQ ID NO: 81981 - RNA, 32 nt, Human
cacggugguucaugccuguaaucccagcacuu

SEQ ID NO: 81982 - RNA, 32 nt, Human
cacgguguagggaagccagaaagaaaagacgg

SEQ ID NO: 81983 - RNA, 32 nt, Human
cacgguguguguggauugucagccuccagcua

SEQ ID NO: 81984 - RNA, 19 nt, Human
cacgguucagacaauggua

SEQ ID NO: 81985 - RNA, 32 nt, Human
cacgguucccacccucccucaccaguuuggac

SEQ ID NO: 81986 - RNA, 32 nt, Human
cacgguuccuuucugcuuuucugaaugcauca

SEQ ID NO: 81987 - RNA, 32 nt, Human
cacgguucugcaggcuuuacaggaagcauagc

SEQ ID NO: 81988 - RNA, 32 nt, Human
cacgguuguuuccaagcgccuccugggggaga

SEQ ID NO: 81989 - RNA, 32 nt, Human
cacgguuuccccaggcaggaugugccaggaga

SEQ ID NO: 81990 - RNA, 32 nt, Human
cacgguuuugcaggcuguacaggaagcauggu

SEQ ID NO: 81991 - RNA, 32 nt, Human
cacguaaacgcccgugcugggcccugugaagc

SEQ ID NO: 81992 - RNA, 32 nt, Human
cacguaaccugacuucucugugccucaauguc

SEQ ID NO: 81993 - RNA, 32 nt, Human
cacguaacugcaaugcagccuguacaggagga

SEQ ID NO: 81994 - RNA, 32 nt, Human
cacguaaugaaacuuggauuugcucagugucu

SEQ ID NO: 81995 - RNA, 32 nt, Human
cacguacaaacuaggcaagacagggucagugc

SEQ ID NO: 81996 - RNA, 32 nt, Human
cacguacacaugcacauguacgcaccacaaac

SEQ ID NO: 81997 - RNA, 32 nt, Human
cacguacacccacuccagggaucugccagcac

SEQ ID NO: 81998 - RNA, 32 nt, Human
cacguacaugugcacacacugucuacauacaa

SEQ ID NO: 81999 - RNA, 32 nt, Human
cacguaccauuuugcugaaagacagagcaccu

SEQ ID NO: 82000 - RNA, 32 nt, Human
cacguacccugcacuccgggaggaggccccaa

SEQ ID NO: 82001 - RNA, 32 nt, Human
cacguaccuggcugacagagugcagauggugu

SEQ ID NO: 82002 - RNA, 32 nt, Human
cacguacggccgccucuuccagaagcucugcu

SEQ ID NO: 82003 - RNA, 25 nt, Human
cacguacuuccccucccauucccau

SEQ ID NO: 82004 - RNA, 32 nt, Human
cacguacuugcaagaacucuugcucacaucag

SEQ ID NO: 82005 - RNA, 32 nt, Human
cacguagacuggcuucagaauucaugucuuua

SEQ ID NO: 82006 - RNA, 32 nt, Human
cacguagcaugggggcaagaggcgugggaugg

SEQ ID NO: 82007 - RNA, 32 nt, Human
cacguaggagcagaacgcucaugaaagugcuu

SEQ ID NO: 82008 - RNA, 32 nt, Human
cacguagguaccuugcaggguccuaggaggga

SEQ ID NO: 82009 - RNA, 32 nt, Human
cacguauaccccauuuccuuccagucagccca

SEQ ID NO: 82010 - RNA, 32 nt, Human
cacguauccugaggggcuugggccauacgggg

SEQ ID NO: 82011 - RNA, 32 nt, Human
cacguauguaugugugcacacuuguaugcaug

SEQ ID NO: 82012 - RNA, 32 nt, Human
cacgucaaacccugccuuuccuuuacuuuuac

SEQ ID NO: 82013 - RNA, 32 nt, Human
cacgucacacacacaugccaguguggagagcg

SEQ ID NO: 82014 - RNA, 32 nt, Human
cacgucacauaagaugauugcuaaaauauugu

SEQ ID NO: 82015 - RNA, 32 nt, Human
cacgucacugcacuccagcuugggcaacagag

SEQ ID NO: 82016 - RNA, 32 nt, Human
cacgucacugcacuccggccugggugacagag

SEQ ID NO: 82017 - RNA, 32 nt, Human
cacgucacugcacucuagccugggcaacagag

SEQ ID NO: 82018 - RNA, 32 nt, Human
cacgucacugcauuucagccugagcgacagag

SEQ ID NO: 82019 - RNA, 32 nt, Human
cacgucacuguacuccagccugggugacagag

SEQ ID NO: 82020 - RNA, 32 nt, Human
cacgucacuuguguuuauuuguucuguaaaug

SEQ ID NO: 82021 - RNA, 32 nt, Human
cacgucacuuuaccucucugugccucaguuuu

SEQ ID NO: 82022 - RNA, 32 nt, Human
cacgucagaagagguuggggcaaaacaaaaca

SEQ ID NO: 82023 - RNA, 32 nt, Human
cacgucauguugccuucucuuuucuuugugug

SEQ ID NO: 82024 - RNA, 32 nt, Human
cacgucauugcacuccagccuggucaacaaga

SEQ ID NO: 82025 - RNA, 32 nt, Human
cacgucauugcucuccagccugggcaacagag

SEQ ID NO: 82026 - RNA, 21 nt, Human
cacguccacccugggccucca

SEQ ID NO: 82027 - RNA, 32 nt, Human
cacguccacugagguccacagcucgcagaaga

SEQ ID NO: 82028 - RNA, 32 nt, Human
cacgucccaaccccucuccugugugucuguga

SEQ ID NO: 82029 - RNA, 32 nt, Human
cacgucccaucuuuuuggcucuuccccaaagc

SEQ ID NO: 82030 - RNA, 32 nt, Human
cacguccccugccaccucuagcucggagcggc

SEQ ID NO: 82031 - RNA, 18 nt, Human
cacgucccggcugggccc

SEQ ID NO: 82032 - RNA, 32 nt, Human
cacgucccuccccaggguguuccucccuguga

SEQ ID NO: 82033 - RNA, 32 nt, Human
cacgucccuugcaaagucuccgcaggugcugu

SEQ ID NO: 82034 - RNA, 32 nt, Human
cacguccgcagcuguggcuggguagcugcagc

SEQ ID NO: 82035 - RNA, 32 nt, Human
cacguccgucaucacaccucagggcagcgaga

SEQ ID NO: 82036 - RNA, 32 nt, Human
cacguccucaaagacuguaguauuccagauga

SEQ ID NO: 82037 - RNA, 32 nt, Human
cacguccuccggugcaugcacaaccacccagc

SEQ ID NO: 82038 - RNA, 18 nt, Human
cacguccugagacagaag

SEQ ID NO: 82039 - RNA, 32 nt, Human
cacguccugagccacugaccacggccagucuc

SEQ ID NO: 82040 - RNA, 32 nt, Human
cacguccugcugucagccuugucaucuugucu

SEQ ID NO: 82041 - RNA, 32 nt, Human
cacguccuggcccccaggcugaggugcaccca

SEQ ID NO: 82042 - RNA, 32 nt, Human
cacgucgugcugcugcuggaagccaacagccu

SEQ ID NO: 82043 - RNA, 32 nt, Human
cacgucuaugugcaugugcacacacacucaaa

SEQ ID NO: 82044 - RNA, 32 nt, Human
cacgucucacugcagccucaaccuccuggguu

SEQ ID NO: 82045 - RNA, 32 nt, Human
cacgucucagccacaguucuccacucgccucg

SEQ ID NO: 82046 - RNA, 32 nt, Human
cacgucucuagucucagcuacucaggaggcug

SEQ ID NO: 82047 - RNA, 32 nt, Human
cacgucucuccucucuguucccuuccccauuc

SEQ ID NO: 82048 - RNA, 31 nt, Human
cacgucucugucucugggccuuuguuccccu

SEQ ID NO: 82049 - RNA, 32 nt, Human
cacgucugagccucaucuccucccucucugca

SEQ ID NO: 82050 - RNA, 32 nt, Human
cacgucugaggcggcuguggccgcgucggugu

SEQ ID NO: 82051 - RNA, 32 nt, Human
cacgucugcuccaagguggcuugaaugaggca

SEQ ID NO: 82052 - RNA, 32 nt, Human
cacgucugcucuucagugaagaagcugguuua

SEQ ID NO: 82053 - RNA, 32 nt, Human
cacgucuguaaucuuugggagcacuuugggag

SEQ ID NO: 82054 - RNA, 32 nt, Human
cacgucuguagucccagcuacucaggaggcug

SEQ ID NO: 82055 - RNA, 32 nt, Human
cacgucugugaacccucagacggacauugacg

SEQ ID NO: 82056 - RNA, 21 nt, Human
cacgucugugggucucuuucg

SEQ ID NO: 82057 - RNA, 32 nt, Human
cacgucuuauuucucaccucguuccccaucaa

SEQ ID NO: 82058 - RNA, 32 nt, Human
cacgucuuccccacccuucucuccuuuccuca

SEQ ID NO: 82059 - RNA, 32 nt, Human
cacgugaaaaacauaggauacaaaacuuuaaa

SEQ ID NO: 82060 - RNA, 32 nt, Human
cacgugaaaaugugcaagaagaucgcccagcu

SEQ ID NO: 82061 - RNA, 32 nt, Human
cacgugaaaccagcaugugcuaguuacaaaag

SEQ ID NO: 82062 - RNA, 19 nt, Human
cacgugaagcucgcggucc

SEQ ID NO: 82063 - RNA, 32 nt, Human
cacgugaagcucgcgguccucccagggagcug

SEQ ID NO: 82064 - RNA, 32 nt, Human
cacgugaagucagcccacaccagccaaacccu

SEQ ID NO: 82065 - RNA, 20 nt, Human
cacgugacuccucaauucca

SEQ ID NO: 82066 - RNA, 32 nt, Human
cacgugacugggugcugaggggaguuaaagcc

SEQ ID NO: 82067 - RNA, 32 nt, Human
cacgugagagcugagcauugguggaggaggcc

SEQ ID NO: 82068 - RNA, 32 nt, Human
cacgugagagugagcucaaguggcagcagagg

SEQ ID NO: 82069 - RNA, 32 nt, Human
cacgugagcacuggcucccacggagggugcgc

SEQ ID NO: 82070 - RNA, 32 nt, Human
cacgugaggcuccgcaucagcagccaggggcg

SEQ ID NO: 82071 - RNA, 32 nt, Human
cacgugagggcagagagaaauguuaaaggagc

SEQ ID NO: 82072 - RNA, 23 nt, Human
cacgugaugcgcgagcagcucug

SEQ ID NO: 82073 - RNA, 31 nt, Human
cacgugaugggagaguuuuguaggagcugug

SEQ ID NO: 82074 - RNA, 32 nt, Human
cacgugccaccauguugcccaggcuggucuug

SEQ ID NO: 82075 - RNA, 16 nt, Human
cacgugcccagaguca

SEQ ID NO: 82076 - RNA, 32 nt, Human
cacgugcccaugggaugcuuccagguccccuu

SEQ ID NO: 82077 - RNA, 32 nt, Human
cacgugcccugugcugauucucugccuaggaa

SEQ ID NO: 82078 - RNA, 32 nt, Human
cacgugccuguaaucccaguuacuugggaggc

SEQ ID NO: 82079 - RNA, 32 nt, Human
cacgugccuguagucccagcuguccuggaggc

SEQ ID NO: 82080 - RNA, 32 nt, Human
cacgugcgcuggcguagccaggagcucugcuc

SEQ ID NO: 82081 - RNA, 32 nt, Human
cacgugcgcugggcacuucccugcugccugua

SEQ ID NO: 82082 - RNA, 32 nt, Human
cacgugcggaggccccucacugugcugucaaa

SEQ ID NO: 82083 - RNA, 32 nt, Human
cacgugcguguuuucugacugacaugaaaucg

SEQ ID NO: 82084 - RNA, 32 nt, Human
cacgugcucuugucccagcugccgagccucuu

SEQ ID NO: 82085 - RNA, 32 nt, Human
cacgugcuggaggaagcggaaaagagccaccc

SEQ ID NO: 82086 - RNA, 32 nt, Human
cacgugcugugagcuuccugggagcccagguu

SEQ ID NO: 82087 - RNA, 32 nt, Human
cacgugcuguuugcaaaccugccuguaccuga

SEQ ID NO: 82088 - RNA, 32 nt, Human
cacguggaagcggggugggucucacuugcgug

SEQ ID NO: 82089 - RNA, 32 nt, Human
cacguggacagagagaaagccagccucucggg

SEQ ID NO: 82090 - RNA, 32 nt, Human
cacguggacgcugguggauguccgcaggcccu

SEQ ID NO: 82091 - RNA, 32 nt, Human
cacguggacuucuucaggacuccagaggaggc

SEQ ID NO: 82092 - RNA, 32 nt, Human
cacguggcagaugaagaaggggaccaacaaca

SEQ ID NO: 82093 - RNA, 32 nt, Human
cacguggcagccgccugcaggagccgcaguuc

SEQ ID NO: 82094 - RNA, 32 nt, Human
cacguggccacaccucucgggauggccguggg

SEQ ID NO: 82095 - RNA, 22 nt, Human
cacguggccagcagcaccgggc

SEQ ID NO: 82096 - RNA, 32 nt, Human
cacguggcccuugcuucauccagcacagcucu

SEQ ID NO: 82097 - RNA, 32 nt, Human
cacguggcgcucuucagguucugccucuggga

SEQ ID NO: 82098 - RNA, 32 nt, Human
cacguggcgugccaugaguggggaagagcaac

SEQ ID NO: 82099 - RNA, 32 nt, Human
cacguggcuccugccacagauggucuuugugg

SEQ ID NO: 82100 - RNA, 21 nt, Human
cacguggcuccugugcucuag

SEQ ID NO: 82101 - RNA, 32 nt, Human
cacguggcuuccagauuugcaucugugcugca

SEQ ID NO: 82102 - RNA, 32 nt, Human
cacgugggacccugggcucuguacaggagaga

SEQ ID NO: 82103 - RNA, 32 nt, Human
cacgugggcccuugaggaccuggacuggguua

SEQ ID NO: 82104 - RNA, 32 nt, Human
cacgugggcucugccaugaccucugagaccug

SEQ ID NO: 82105 - RNA, 32 nt, Human
cacguggggagacagcccuucccacuggcucc

SEQ ID NO: 82106 - RNA, 32 nt, Human
cacguggggccagacagggacgcguuccgcau

SEQ ID NO: 82107 - RNA, 32 nt, Human
cacgugggggaaggcagugcucacuacuuaga

SEQ ID NO: 82108 - RNA, 32 nt, Human
cacgugggggagcugcggaagcgcggcgcugc

SEQ ID NO: 82109 - RNA, 32 nt, Human
cacguggggugcaggggccagguggagcccuc

SEQ ID NO: 82110 - RNA, 32 nt, Human
cacgugguagaugcccaccuccuccaugccuc

SEQ ID NO: 82111 - RNA, 32 nt, Human
cacgugguagccacuggcagccuugacugaaa

SEQ ID NO: 82112 - RNA, 32 nt, Human
cacguggucccauguugcaacagccccaacau

SEQ ID NO: 82113 - RNA, 32 nt, Human
cacguggucuguccuucaaggccuccuccgau

SEQ ID NO: 82114 - RNA, 32 nt, Human
cacgugguggcauccugacaggcacagugaga

SEQ ID NO: 82115 - RNA, 22 nt, Human
cacguguaaucccagcuacuca

SEQ ID NO: 82116 - RNA, 32 nt, Human
cacguguacuggcaccucagaagaccaaauca

SEQ ID NO: 82117 - RNA, 32 nt, Human
cacguguagcuuucuguuucucaaaucugaga

SEQ ID NO: 82118 - RNA, 32 nt, Human
cacgugucucagacugcauguaccauuugcau

SEQ ID NO: 82119 - RNA, 32 nt, Human
cacgugucuccuccuccucaucuuagcuucca

SEQ ID NO: 82120 - RNA, 32 nt, Human
cacgugucuguaaucccagcuacucuggagac

SEQ ID NO: 82121 - RNA, 32 nt, Human
cacgugugaacugcugcgcuacacaucagugu

SEQ ID NO: 82122 - RNA, 18 nt, Human
cacgugugagcugcuccu

SEQ ID NO: 82123 - RNA, 32 nt, Human
cacgugugagcugggccaggagcccugcccac

SEQ ID NO: 82124 - RNA, 32 nt, Human
cacgugugcagacuguggcugcagagaccuug

SEQ ID NO: 82125 - RNA, 32 nt, Human
cacguguggccuccgcuggcucugccugcucc

SEQ ID NO: 82126 - RNA, 19 nt, Human
cacgugugggccucgguca

SEQ ID NO: 82127 - RNA, 32 nt, Human
cacgugugucugcagugucugugcuaucuccc

SEQ ID NO: 82128 - RNA, 32 nt, Human
cacguguguucaggccucccuggaccagcagc

SEQ ID NO: 82129 - RNA, 32 nt, Human
cacguuaaaccugagcgccuuuaccuuuagau

SEQ ID NO: 82130 - RNA, 20 nt, Human
cacguuacgagcugcugcuc

SEQ ID NO: 82131 - RNA, 32 nt, Human
cacguuagcaucugcagagaucaaucuggagg

SEQ ID NO: 82132 - RNA, 32 nt, Human
cacguuagccccgggcucugauagagagguag

SEQ ID NO: 82133 - RNA, 32 nt, Human
cacguucagcccauguggauguuuugaagcuu

SEQ ID NO: 82134 - RNA, 32 nt, Human
cacguucauggacugaaggacucaauauuuua

SEQ ID NO: 82135 - RNA, 32 nt, Human
cacguucccuuuccuccucucccuccugugga

SEQ ID NO: 82136 - RNA, 32 nt, Human
cacguucgggcggggcgauugcagggaacggg

SEQ ID NO: 82137 - RNA, 32 nt, Human
cacguucuccacugcucacucccugcuguuca

SEQ ID NO: 82138 - RNA, 32 nt, Human
cacguucugcagcugcacagaagcauggcagc

SEQ ID NO: 82139 - RNA, 32 nt, Human
cacguugacauuuaaagacagaggggacuguc

SEQ ID NO: 82140 - RNA, 32 nt, Human
cacguugggaggccaaggcgggcagauuacau

SEQ ID NO: 82141 - RNA, 32 nt, Human
cacguugggaggccgaggcagguggaucacuu

SEQ ID NO: 82142 - RNA, 32 nt, Human
cacguugggaggcugaggcgggcggaucgguu

SEQ ID NO: 82143 - RNA, 32 nt, Human
cacguugucugccugggcucagcguggaccug

SEQ ID NO: 82144 - RNA, 21 nt, Human
cacguuuaaucccagcacuuu

SEQ ID NO: 82145 - RNA, 32 nt, Human
cacguuuauuccugccugcuccggccaggacu

SEQ ID NO: 82146 - RNA, 32 nt, Human
cacguuucaguagugaggcugugagugugagc

SEQ ID NO: 82147 - RNA, 32 nt, Human
cacguuugcauagacuacacacaugucaugcg

SEQ ID NO: 82148 - RNA, 32 nt, Human
cacguuugcgucuggggaggaauaaaaagaca

SEQ ID NO: 82149 - RNA, 32 nt, Human
cacguuuggugcuucucagauuucugaggaaa

SEQ ID NO: 82150 - RNA, 32 nt, Human
cacguuugugagcucccagccggcaggccugg

SEQ ID NO: 82151 - RNA, 32 nt, Human
cacguuuuauagagcaaagacagagcaguuac

SEQ ID NO: 82152 - RNA, 32 nt, Human
cacguuuucuggcuucugcuucauccugcucc

SEQ ID NO: 82153 - RNA, 32 nt, Human
cacguuuugccucaugaacacuggcugcaagu

SEQ ID NO: 82154 - RNA, 32 nt, Human
cacguuuugccucuccaaaaagagcuuccuuu

SEQ ID NO: 82155 - RNA, 32 nt, Human
cacuaaaagaagccacagaacaggaagcgguc

SEQ ID NO: 82156 - RNA, 32 nt, Human
cacuaaaagaggagaugguggagacggaggcu

SEQ ID NO: 82157 - RNA, 32 nt, Human
cacuaaacaaaauuagaaacaugugaaaucca

SEQ ID NO: 82158 - RNA, 16 nt, Human
cacuaaaccaagguca

SEQ ID NO: 82159 - RNA, 32 nt, Human
cacuaaaccacacucaccccagccucauugug

SEQ ID NO: 82160 - RNA, 32 nt, Human
cacuaaagaugccaggauauuggggcugaggg

SEQ ID NO: 82161 - RNA, 32 nt, Human
cacuaaaggaagcaucacagcaacuggcugga

SEQ ID NO: 82162 - RNA, 32 nt, Human
cacuaaaguagccgaauccacucucaugucuu

SEQ ID NO: 82163 - RNA, 32 nt, Human
cacuaaaguuauuaaaccaaacuccuguccaa

SEQ ID NO: 82164 - RNA, 32 nt, Human
cacuaaauagauuaaacagagcaggcuuguuu

SEQ ID NO: 82165 - RNA, 32 nt, Human
cacuaaaugcugauuauuuagagccauuagag

SEQ ID NO: 82166 - RNA, 24 nt, Human
cacuaacaacacugaggagcacaa

SEQ ID NO: 82167 - RNA, 32 nt, Human
cacuaacacaugcacacacaaagugcauaggc

SEQ ID NO: 82168 - RNA, 32 nt, Human
cacuaacacgucuccucucugggaaacguccc

SEQ ID NO: 82169 - RNA, 31 nt, Human
cacuaacaguuucagauguuacuuuaaagca

SEQ ID NO: 82170 - RNA, 32 nt, Human
cacuaacauggugaaacccccaucuacacuaa

SEQ ID NO: 82171 - RNA, 32 nt, Human
cacuaaccccucagugcugugauccuugcgga

SEQ ID NO: 82172 - RNA, 22 nt, Human
cacuaaccccugcccccacucu

SEQ ID NO: 82173 - RNA, 32 nt, Human
cacuaagagaaacaugccuacccaugaaggcg

SEQ ID NO: 82174 - RNA, 32 nt, Human
cacuaagauuccagagccaccuuggugacaua

SEQ ID NO: 82175 - RNA, 32 nt, Human
cacuaagcagaggaccuuggguucccaauaca

SEQ ID NO: 82176 - RNA, 32 nt, Human
cacuaagcagaggaggggccgcugccacccac

SEQ ID NO: 82177 - RNA, 32 nt, Human
cacuaagcaugcaguggacauagaagagaagg

SEQ ID NO: 82178 - RNA, 32 nt, Human
cacuaagcucagcuaauuuuuguauuuuuagu

SEQ ID NO: 82179 - RNA, 32 nt, Human
cacuaagcuccagcaagcagguucuggucucu

SEQ ID NO: 82180 - RNA, 32 nt, Human
cacuaagcucuucucucucaggggcaguggga

SEQ ID NO: 82181 - RNA, 32 nt, Human
cacuaagcuggccaccccacccccgacaugga

SEQ ID NO: 82182 - RNA, 32 nt, Human
cacuaaggagacugaggcgggaggauuacuug

SEQ ID NO: 82183 - RNA, 32 nt, Human
cacuaaggagagagggucaggagccagaguug

SEQ ID NO: 82184 - RNA, 32 nt, Human
cacuaaggagcuaugagugucacaucauaauc

SEQ ID NO: 82185 - RNA, 32 nt, Human
cacuaaggaggguguaaaggccaaggucagca

SEQ ID NO: 82186 - RNA, 32 nt, Human
cacuaagggcugugccugagaaugguagcauu

SEQ ID NO: 82187 - RNA, 32 nt, Human
cacuaagucucccugggcuuggggaguggcac

SEQ ID NO: 82188 - RNA, 32 nt, Human
cacuaaguguucugcuguguuucaggaucagg

SEQ ID NO: 82189 - RNA, 32 nt, Human
cacuaaucaaucccagcauuguuuccaaugag

SEQ ID NO: 82190 - RNA, 32 nt, Human
cacuaaucccaucaugggggcccauccucaug

SEQ ID NO: 82191 - RNA, 32 nt, Human
cacuaauccuuaaaaguuagucugguuauuuu

SEQ ID NO: 82192 - RNA, 32 nt, Human
cacuaaucucugcuuggucucuuccucuuugg

SEQ ID NO: 82193 - RNA, 32 nt, Human
cacuaaugauuucauguacacaguauucacuu

SEQ ID NO: 82194 - RNA, 32 nt, Human
cacuaauucugcaucugggcaggaugacuuua

SEQ ID NO: 82195 - RNA, 32 nt, Human
cacuaauucugucaguaggggcaugguauaag

SEQ ID NO: 82196 - RNA, 32 nt, Human
cacuaauugaccaauuuugucuugucuuuacu

SEQ ID NO: 82197 - RNA, 32 nt, Human
cacuaauugcugcaauggaugaaauugggugu

SEQ ID NO: 82198 - RNA, 32 nt, Human
cacuaauuuaaucccaacuacuacuccauuuu

SEQ ID NO: 82199 - RNA, 32 nt, Human
cacuaauuuacuaggcuaccuacuuucaugag

SEQ ID NO: 82200 - RNA, 32 nt, Human
cacuaauuuucaaaauuaaauaguuuaagcuc

SEQ ID NO: 82201 - RNA, 32 nt, Human
cacuaauuuucuuuguccaaaacauuuacucu

SEQ ID NO: 82202 - RNA, 32 nt, Human
cacuaauuuugcaugaguaaguuuacaaauau

SEQ ID NO: 82203 - RNA, 22 nt, Human
cacuacaaccucgaccuccugg

SEQ ID NO: 82204 - RNA, 32 nt, Human
cacuacaaccucgaccuccuggguucaagcga

SEQ ID NO: 82205 - RNA, 23 nt, Human
cacuacaccagcaacuccuggcu

SEQ ID NO: 82206 - RNA, 32 nt, Human
cacuacaccagcugccagaaacccuguucuag

SEQ ID NO: 82207 - RNA, 32 nt, Human
cacuacaccugacagagacauccucuacugaa

SEQ ID NO: 82208 - RNA, 32 nt, Human
cacuacaccuggcuaaguuuuuauauuuuagu

SEQ ID NO: 82209 - RNA, 32 nt, Human
cacuacaccuggcuaauuuuuguauuuuuagu

SEQ ID NO: 82210 - RNA, 32 nt, Human
cacuacacuccaggcugggugacagauuaagc

SEQ ID NO: 82211 - RNA, 32 nt, Human
cacuacacugaucuuaacuaccugaaacugag

SEQ ID NO: 82212 - RNA, 32 nt, Human
cacuacagaccagcaauacuucagagcccagu

SEQ ID NO: 82213 - RNA, 32 nt, Human
cacuacagaccucagccccaguuuucuccucc

SEQ ID NO: 82214 - RNA, 19 nt, Human
cacuacagcagccccagga

SEQ ID NO: 82215 - RNA, 32 nt, Human
cacuacagccucaccucccaccccugucacua

SEQ ID NO: 82216 - RNA, 23 nt, Human
cacuacagccucgaacuccuggu

SEQ ID NO: 82217 - RNA, 32 nt, Human
cacuacagccucggcaauagagcgagacucug

SEQ ID NO: 82218 - RNA, 31 nt, Human
cacuacagccucucugagucugccguccugg

SEQ ID NO: 82219 - RNA, 32 nt, Human
cacuacagccuggacgacagagcaagacucug

SEQ ID NO: 82220 - RNA, 32 nt, Human
cacuacagccuggaugacaagcaagacccucc

SEQ ID NO: 82221 - RNA, 32 nt, Human
cacuacagccugggcaacaagagcgaaacucc

SEQ ID NO: 82222 - RNA, 32 nt, Human
cacuacagccugggcgacaaagugggacuguc

SEQ ID NO: 82223 - RNA, 32 nt, Human
cacuacagccugggcgacagaacgagacccug

SEQ ID NO: 82224 - RNA, 32 nt, Human
cacuacagccugggugacagagcaagacuccg

SEQ ID NO: 82225 - RNA, 32 nt, Human
cacuacagccugggugcaaaaucagcaagaaa

SEQ ID NO: 82226 - RNA, 32 nt, Human
cacuacagccuggucaacagagcaagacucug

SEQ ID NO: 82227 - RNA, 32 nt, Human
cacuacagccuguaauacugcucucuuucaaa

SEQ ID NO: 82228 - RNA, 32 nt, Human
cacuacagcuugggugacagcgcgagacaccg

SEQ ID NO: 82229 - RNA, 21 nt, Human
cacuacaggccagggcugcgg

SEQ ID NO: 82230 - RNA, 32 nt, Human
cacuacaggccucacagaaacagagaucccau

SEQ ID NO: 82231 - RNA, 32 nt, Human
cacuacagggaagugcaucacaugucagcaua

SEQ ID NO: 82232 - RNA, 32 nt, Human
cacuacagugauauugacugcaucuuuaagaa

SEQ ID NO: 82233 - RNA, 32 nt, Human
cacuacagugcacacaaggauugagaagaguu

SEQ ID NO: 82234 - RNA, 22 nt, Human
cacuacaguugacauccuggcu

SEQ ID NO: 82235 - RNA, 22 nt, Human
cacuacauaggccuccaaggca

SEQ ID NO: 82236 - RNA, 23 nt, Human
cacuacauauucugaagaaccaa

SEQ ID NO: 82237 - RNA, 32 nt, Human
cacuacauggcagaggcugaggcgguguguga

SEQ ID NO: 82238 - RNA, 32 nt, Human
cacuacaugucgaaagaguuauuugaguucuc

SEQ ID NO: 82239 - RNA, 32 nt, Human
cacuaccaaaccuggcuaauuucuugaacucc

SEQ ID NO: 82240 - RNA, 32 nt, Human
cacuaccagcagcaaccaggacgucuguucuu

SEQ ID NO: 82241 - RNA, 32 nt, Human
cacuacccagauggcagggaggccgagagccc

SEQ ID NO: 82242 - RNA, 32 nt, Human
cacuacccucgaggaggaggcagcggcagccg

SEQ ID NO: 82243 - RNA, 20 nt, Human
cacuaccugcaccagagcca

SEQ ID NO: 82244 - RNA, 32 nt, Human
cacuaccuguucugcaggcggguccuggccuc

SEQ ID NO: 82245 - RNA, 32 nt, Human
cacuaccuuccaaagugcugggauuacaggcg

SEQ ID NO: 82246 - RNA, 32 nt, Human
cacuacgcccagcuaauuugugguauuuuuag

SEQ ID NO: 82247 - RNA, 32 nt, Human
cacuacgccuggcuaauuuuuguauuuuuagu

SEQ ID NO: 82248 - RNA, 32 nt, Human
cacuacgccuggcugauuuuuguaguuuuagu

SEQ ID NO: 82249 - RNA, 32 nt, Human
cacuacggaccgugccuucuccaccuuccccu

SEQ ID NO: 82250 - RNA, 32 nt, Human
cacuacggccucaccucccaccccugucacua

SEQ ID NO: 82251 - RNA, 32 nt, Human
cacuacggcuggcuaauuuuuguauuuuuagu

SEQ ID NO: 82252 - RNA, 32 nt, Human
cacuacggggcuuccuggcugcagaguugggg

SEQ ID NO: 82253 - RNA, 32 nt, Human
cacuacguuagccaggcuggucucaaacuccu

SEQ ID NO: 82254 - RNA, 32 nt, Human
cacuacuaaaaauacaaaaauuagaugggcgu

SEQ ID NO: 82255 - RNA, 32 nt, Human
cacuacuaaacauacaaaaauuagcugggcau

SEQ ID NO: 82256 - RNA, 32 nt, Human
cacuacuaaacauacaaaauuagccgggcaug

SEQ ID NO: 82257 - RNA, 32 nt, Human
cacuacuacacuccagccuggugacagaguga

SEQ ID NO: 82258 - RNA, 32 nt, Human
cacuacuaguaacuggcagcuccagggugagg

SEQ ID NO: 82259 - RNA, 24 nt, Human
cacuacucacccucucugcugcug

SEQ ID NO: 82260 - RNA, 32 nt, Human
cacuacucauagcagcuccugaggcagguaaa

SEQ ID NO: 82261 - RNA, 32 nt, Human
cacuacucucuuccuccacuucauuuuuccuu

SEQ ID NO: 82262 - RNA, 32 nt, Human
cacuacugcacuccagacuggugacggagcga

SEQ ID NO: 82263 - RNA, 24 nt, Human
cacuacugcacuccagccugggca

SEQ ID NO: 82264 - RNA, 32 nt, Human
cacuacugcacuccagccugggcaacagaaca

SEQ ID NO: 82265 - RNA, 32 nt, Human
cacuacugcacuccagccugggcgacaaagca

SEQ ID NO: 82266 - RNA, 32 nt, Human
cacuacugcacuccagccugggugacagagua

SEQ ID NO: 82267 - RNA, 32 nt, Human
cacuacugcacuccagccugggugacagagug

SEQ ID NO: 82268 - RNA, 32 nt, Human
cacuacugcauuccagccugagcaacagagca

SEQ ID NO: 82269 - RNA, 32 nt, Human
cacuacugcauuccagccugggugacagagug

SEQ ID NO: 82270 - RNA, 32 nt, Human
cacuacugcauuccagccugggugacauauca

SEQ ID NO: 82271 - RNA, 32 nt, Human
cacuacugcauuccagccuggguggacagaac

SEQ ID NO: 82272 - RNA, 32 nt, Human
cacuacuguacucuagccugggcagcagagug

SEQ ID NO: 82273 - RNA, 32 nt, Human
cacuacuucuuguucuuaugaaugacucuaga

SEQ ID NO: 82274 - RNA, 32 nt, Human
cacuacuuugggaggcugaggcuggagaaucg

SEQ ID NO: 82275 - RNA, 32 nt, Human
cacuacuuugggaggcugaggcuggagaauug

SEQ ID NO: 82276 - RNA, 32 nt, Human
cacuagaaaacacacuuccugcaccaacacca

SEQ ID NO: 82277 - RNA, 32 nt, Human
cacuagaagcacugagagaugcggcccccucg

SEQ ID NO: 82278 - RNA, 32 nt, Human
cacuagaaggcugaguuugacauguugauauu

SEQ ID NO: 82279 - RNA, 32 nt, Human
cacuagaagggaggauugucucaggcgagucu

SEQ ID NO: 82280 - RNA, 32 nt, Human
cacuagaauacaucagcuucaaacauucacaa

SEQ ID NO: 82281 - RNA, 32 nt, Human
cacuagaaucccaggaggagcuugaaauccug

SEQ ID NO: 82282 - RNA, 32 nt, Human
cacuagacuuguagcaggccugggcugcaggc

SEQ ID NO: 82283 - RNA, 32 nt, Human
cacuagagagggagggggaagagcagaaguua

SEQ ID NO: 82284 - RNA, 32 nt, Human
cacuagagccugggcaacagaccaagacucca

SEQ ID NO: 82285 - RNA, 32 nt, Human
cacuagaggaagcaucauagcaacuggcugga

SEQ ID NO: 82286 - RNA, 32 nt, Human
cacuagauucagccacugcaagcccugggccu

SEQ ID NO: 82287 - RNA, 32 nt, Human
cacuagauugaauggucacagaaucggaggac

SEQ ID NO: 82288 - RNA, 32 nt, Human
cacuagcaaguucuacccuccuggucugacac

SEQ ID NO: 82289 - RNA, 32 nt, Human
cacuagcacuuacaggaggcccaggugggaag

SEQ ID NO: 82290 - RNA, 32 nt, Human
cacuagcauaauauuuguggcauauccgugua

SEQ ID NO: 82291 - RNA, 32 nt, Human
cacuagcaucuucucuaccuucaagaaccagg

SEQ ID NO: 82292 - RNA, 32 nt, Human
cacuagccagaagagaggagugggacaguccu

SEQ ID NO: 82293 - RNA, 32 nt, Human
cacuagcccucacucaguuucugccucacaaa

SEQ ID NO: 82294 - RNA, 32 nt, Human
cacuagccucuagccacacagguuccauccca

SEQ ID NO: 82295 - RNA, 32 nt, Human
cacuagccugugaucccagcacuuugggaggc

SEQ ID NO: 82296 - RNA, 32 nt, Human
cacuagccuucugucccucccgcagaagacug

SEQ ID NO: 82297 - RNA, 32 nt, Human
cacuagcguggccgcgagccucggugagccgg

SEQ ID NO: 82298 - RNA, 32 nt, Human
cacuagcuccacggccccagacaccuucccug

SEQ ID NO: 82299 - RNA, 32 nt, Human
cacuagcucgacacagucugcaguccaggcgu

SEQ ID NO: 82300 - RNA, 32 nt, Human
cacuagcucgagacccggccugugcugcccug

SEQ ID NO: 82301 - RNA, 32 nt, Human
cacuagcucucauuauucagcucuuuucagcu

SEQ ID NO: 82302 - RNA, 32 nt, Human
cacuagcugggagccugggggcuccucuaagg

SEQ ID NO: 82303 - RNA, 32 nt, Human
cacuagcuggggaggucuuggaacccuccgag

SEQ ID NO: 82304 - RNA, 32 nt, Human
cacuagcuucuccaaauccucccauggcaaag

SEQ ID NO: 82305 - RNA, 22 nt, Human
cacuagcuuguuacagcugccu

SEQ ID NO: 82306 - RNA, 32 nt, Human
cacuaggacucugaggcucuuucugggccaag

SEQ ID NO: 82307 - RNA, 32 nt, Human
cacuaggaggcagagguugcagugagcaguua

SEQ ID NO: 82308 - RNA, 32 nt, Human
cacuaggagggcugagugaacacgcaagcuac

SEQ ID NO: 82309 - RNA, 32 nt, Human
cacuaggauauuuacuguggcuugauuuguag

SEQ ID NO: 82310 - RNA, 32 nt, Human
cacuaggauauuucuacccaugcaacggaaga

SEQ ID NO: 82311 - RNA, 32 nt, Human
cacuaggcaccgagauuacaguggaagaucag

SEQ ID NO: 82312 - RNA, 32 nt, Human
cacuaggcccaggaguaugaggcccugcugaa

SEQ ID NO: 82313 - RNA, 24 nt, Human
cacuaggcccccacccugcugcug

SEQ ID NO: 82314 - RNA, 32 nt, Human
cacuaggcuugggguggggaggucccguguuc

SEQ ID NO: 82315 - RNA, 32 nt, Human
cacuagggccugggguuaauugcucaaagggc

SEQ ID NO: 82316 - RNA, 32 nt, Human
cacuaggggcuggcccacuaggagggcuggcc

SEQ ID NO: 82317 - RNA, 32 nt, Human
cacuagggggugauggagaggaagggggccac

SEQ ID NO: 82318 - RNA, 32 nt, Human
cacuagguugcccaggcuggugucgaauuccu

SEQ ID NO: 82319 - RNA, 32 nt, Human
cacuagguuuacaaucucaguguccuuacaag

SEQ ID NO: 82320 - RNA, 32 nt, Human
cacuaguaaggaguucauuuuaugaagauauu

SEQ ID NO: 82321 - RNA, 32 nt, Human
cacuagucaggcuaguggagagaugaccaggu

SEQ ID NO: 82322 - RNA, 32 nt, Human
cacuagucuggcagccuccaccucuugacccu

SEQ ID NO: 82323 - RNA, 32 nt, Human
cacuagucuugaggcccagccuaggaugguag

SEQ ID NO: 82324 - RNA, 21 nt, Human
cacuagugcucuccagaaucu

SEQ ID NO: 82325 - RNA, 32 nt, Human
cacuagugcuguucugaccauucucuguguug

SEQ ID NO: 82326 - RNA, 32 nt, Human
cacuagugugccuugcaaauuguauuugucuu

SEQ ID NO: 82327 - RNA, 32 nt, Human
cacuaguugggguuugguggccauguuuucua

SEQ ID NO: 82328 - RNA, 24 nt, Human
cacuauaaccucgaacuccuggcu

SEQ ID NO: 82329 - RNA, 32 nt, Human
cacuauaauaaaagccagucugggaugcuaaa

SEQ ID NO: 82330 - RNA, 32 nt, Human
cacuauacccggcuaauuuuuguauuuuuagu

SEQ ID NO: 82331 - RNA, 20 nt, Human
cacuauacuccagccuggca

SEQ ID NO: 82332 - RNA, 21 nt, Human
cacuauacuccagccugggca

SEQ ID NO: 82333 - RNA, 20 nt, Human
cacuauagaagaugagccac

SEQ ID NO: 82334 - RNA, 32 nt, Human
cacuauagccuaggugacagagugagacucug

SEQ ID NO: 82335 - RNA, 32 nt, Human
cacuauaggcuucuuugauuuucuuucagaag

SEQ ID NO: 82336 - RNA, 19 nt, Human
cacuauauuccugccacca

SEQ ID NO: 82337 - RNA, 32 nt, Human
cacuaucacauaugaauucucauuagagggca

SEQ ID NO: 82338 - RNA, 32 nt, Human
cacuaucacauccugaauaucacucacagaau

SEQ ID NO: 82339 - RNA, 32 nt, Human
cacuaucacccaggcuagagggcaguggcaca

SEQ ID NO: 82340 - RNA, 32 nt, Human
cacuaucacccaggcuggagugcaguggcaua

SEQ ID NO: 82341 - RNA, 32 nt, Human
cacuaucacugcaaccuccgccuccuggguuc

SEQ ID NO: 82342 - RNA, 32 nt, Human
cacuaucaggcaggucacauuggugcagaucc

SEQ ID NO: 82343 - RNA, 32 nt, Human
cacuaucauggagacugagagcgagcagaacu

SEQ ID NO: 82344 - RNA, 32 nt, Human
cacuaucauuuucauuuggaauggguauuuuu

SEQ ID NO: 82345 - RNA, 32 nt, Human
cacuauccacuuccaucagucacgcagacccu

SEQ ID NO: 82346 - RNA, 32 nt, Human
cacuauccggcugaggucucccagagacaggc

SEQ ID NO: 82347 - RNA, 32 nt, Human
cacuauccucuucacauguaacuucugcagac

SEQ ID NO: 82348 - RNA, 32 nt, Human
cacuauccugggcaaauguuuuacccuguccu

SEQ ID NO: 82349 - RNA, 32 nt, Human
cacuaucgauacuguuucugugccuuauguuu

SEQ ID NO: 82350 - RNA, 32 nt, Human
cacuaucuacacauuuauuccccaaauacuua

SEQ ID NO: 82351 - RNA, 32 nt, Human
cacuaucucacccucccacuccuguuuuuaaa

SEQ ID NO: 82352 - RNA, 32 nt, Human
cacuaucugacuuccauuguguuuuauugcuu

SEQ ID NO: 82353 - RNA, 32 nt, Human
cacuaucuugauuguacucuccagaaaauuuu

SEQ ID NO: 82354 - RNA, 32 nt, Human
cacuaugaagcucaagcuaccaaaaagaaagu

SEQ ID NO: 82355 - RNA, 32 nt, Human
cacuaugcaauugagugcccaccagaagacac

SEQ ID NO: 82356 - RNA, 32 nt, Human
cacuaugcaugucucacucacccuccacagca

SEQ ID NO: 82357 - RNA, 32 nt, Human
cacuaugcauuuugaaacuuguucauccugga

SEQ ID NO: 82358 - RNA, 32 nt, Human
cacuaugccaagcuaauuuuuguauuuuuagu

SEQ ID NO: 82359 - RNA, 32 nt, Human
cacuaugcccagcuaauuuuguauuuuuagua

SEQ ID NO: 82360 - RNA, 32 nt, Human
cacuaugcccagcuaauuuuuguauuuucugu

SEQ ID NO: 82361 - RNA, 32 nt, Human
cacuaugcccucaaccugggagcaucuggcag

SEQ ID NO: 82362 - RNA, 32 nt, Human
cacuaugccgagcaagaaaaguggaucucagg

SEQ ID NO: 82363 - RNA, 32 nt, Human
cacuaugccuggcuaauuuuguauuuuuagua

SEQ ID NO: 82364 - RNA, 32 nt, Human
cacuaugccuggcuaauuuuuguauuuuuauu

SEQ ID NO: 82365 - RNA, 32 nt, Human
cacuaugccuggcuaauuuuuguguuuuuagu

SEQ ID NO: 82366 - RNA, 16 nt, Human
cacuaugcuaaaguca

SEQ ID NO: 82367 - RNA, 32 nt, Human
cacuauggagucugccucauguuucucaauca

SEQ ID NO: 82368 - RNA, 32 nt, Human
cacuauggcaugcuucccuccuggugggcccu

SEQ ID NO: 82369 - RNA, 32 nt, Human
cacuauggcucacaccuauaaucccagcacuu

SEQ ID NO: 82370 - RNA, 32 nt, Human
cacuaugggaaaggaaauuuaauuagcacugg

SEQ ID NO: 82371 - RNA, 32 nt, Human
cacuaugggaggccgcugcugcguggagcacu

SEQ ID NO: 82372 - RNA, 32 nt, Human
cacuaugggaggcugaggugagaggaucacuu

SEQ ID NO: 82373 - RNA, 32 nt, Human
cacuaugggaggcugaggugggcagaucuccu

SEQ ID NO: 82374 - RNA, 32 nt, Human
cacuauggugugaggcgcguguucgggcucuu

SEQ ID NO: 82375 - RNA, 32 nt, Human
cacuaugucacccuggcuggagugcaguagug

SEQ ID NO: 82376 - RNA, 32 nt, Human
cacuauguccugcuggauccuuccugcagugg

SEQ ID NO: 82377 - RNA, 32 nt, Human
cacuaugucuggcuaauuuuuguauguuuuuc

SEQ ID NO: 82378 - RNA, 32 nt, Human
cacuauguggcccaggcuggucucaaacuucu

SEQ ID NO: 82379 - RNA, 32 nt, Human
cacuauguggcccaggcuggucucgaacuccu

SEQ ID NO: 82380 - RNA, 32 nt, Human
cacuauguugcccaggcuagucucaaacuccu

SEQ ID NO: 82381 - RNA, 32 nt, Human
cacuauguugcccaggcuggagugcaguggug

SEQ ID NO: 82382 - RNA, 32 nt, Human
cacuauguugcccaggcuggccucaaacuccg

SEQ ID NO: 82383 - RNA, 32 nt, Human
cacuauguugcccaggcuggccucaagcaauc

SEQ ID NO: 82384 - RNA, 32 nt, Human
cacuauguugcccaggcuggucucaaacucca

SEQ ID NO: 82385 - RNA, 32 nt, Human
cacuauguugcccaggcuggucucaaacuccu

SEQ ID NO: 82386 - RNA, 32 nt, Human
cacuauguugcccaggcuggucucaaacucuu

SEQ ID NO: 82387 - RNA, 32 nt, Human
cacuauguugcccaggcuggucucaaguuccu

SEQ ID NO: 82388 - RNA, 32 nt, Human
cacuauguugcccaggcuggucuccaacucau

SEQ ID NO: 82389 - RNA, 32 nt, Human
cacuauguugcccaggcuggucuccaacuccu

SEQ ID NO: 82390 - RNA, 32 nt, Human
cacuauguugcccaggcuggucucgaacuccc

SEQ ID NO: 82391 - RNA, 32 nt, Human
cacuauguugcccaggcuggucucgaacuucg

SEQ ID NO: 82392 - RNA, 32 nt, Human
cacuauguugcccaggcuggucucgaacuucu

SEQ ID NO: 82393 - RNA, 32 nt, Human
cacuauguuggccaggcuggucucaaacuccu

SEQ ID NO: 82394 - RNA, 32 nt, Human
cacuauguuggccaggcuggucuccaacuccu

SEQ ID NO: 82395 - RNA, 32 nt, Human
cacuauguuggccaggcuggucucgaacaccu

SEQ ID NO: 82396 - RNA, 32 nt, Human
cacuauguuggccaggcuggucucgaacuccu

SEQ ID NO: 82397 - RNA, 32 nt, Human
cacuauguuggccaggcuggucuggaacgccu

SEQ ID NO: 82398 - RNA, 32 nt, Human
cacuauguuggccaggcugguuuucaacuccu

SEQ ID NO: 82399 - RNA, 32 nt, Human
cacuauguuggccagguuggucucaagcuccu

SEQ ID NO: 82400 - RNA, 32 nt, Human
cacuauuaaagcaguacuggggaauuuuguac

SEQ ID NO: 82401 - RNA, 32 nt, Human
cacuauucaguuaucuauugagaaauuauuuu

SEQ ID NO: 82402 - RNA, 32 nt, Human
cacuauucauuuggguuuuauuaaagagauag

SEQ ID NO: 82403 - RNA, 32 nt, Human
cacuauucccgacccaaagggugacuuuucau

SEQ ID NO: 82404 - RNA, 32 nt, Human
cacuauuccuaggaggaaaaagaaaugcauuc

SEQ ID NO: 82405 - RNA, 32 nt, Human
cacuauucugaugaaaaggcugguuuuguugu

SEQ ID NO: 82406 - RNA, 32 nt, Human
cacuauugaugcuggggcauuuacaggcagaa

SEQ ID NO: 82407 - RNA, 32 nt, Human
cacuauugauggacauuuggguuguuucccau

SEQ ID NO: 82408 - RNA, 24 nt, Human
cacuauugcacuccagccugggca

SEQ ID NO: 82409 - RNA, 32 nt, Human
cacuauugcacuccagccugggcaacaggagu

SEQ ID NO: 82410 - RNA, 32 nt, Human
cacuauugcacuccagccugggcgacagggca

SEQ ID NO: 82411 - RNA, 32 nt, Human
cacuauugccuuggcccugacagcuguuacca

SEQ ID NO: 82412 - RNA, 32 nt, Human
cacuauuucgcuuccugcauuagcaaauuuua

SEQ ID NO: 82413 - RNA, 32 nt, Human
cacuauuugcccagaagcuuggggcagagguc

SEQ ID NO: 82414 - RNA, 32 nt, Human
cacuauuuugcccaggcuggagugcgauggug

SEQ ID NO: 82415 - RNA, 32 nt, Human
cacuauuuugcccaggcuggucucaaacuccc

SEQ ID NO: 82416 - RNA, 32 nt, Human
cacucaaaaagaaggcugggugcaguggcucu

SEQ ID NO: 82417 - RNA, 32 nt, Human
cacucaaaacaugcauugggcuagcagaauau

SEQ ID NO: 82418 - RNA, 32 nt, Human
cacucaaaaccagcagugcugcuaucagauaa

SEQ ID NO: 82419 - RNA, 32 nt, Human
cacucaaaauggcuaacuugaauggaggaagu

SEQ ID NO: 82420 - RNA, 32 nt, Human
cacucaaacaccuuacaaagugcugaguaggu

SEQ ID NO: 82421 - RNA, 32 nt, Human
cacucaaaugccucugucucagcgguuguaga

SEQ ID NO: 82422 - RNA, 32 nt, Human
cacucaacagccaccguggauguggccugggc

SEQ ID NO: 82423 - RNA, 32 nt, Human
cacucaacccccaccuggaaggggcaaagaaa

SEQ ID NO: 82424 - RNA, 21 nt, Human
cacucaacucauggacuccuc

SEQ ID NO: 82425 - RNA, 32 nt, Human
cacucaacuccaagcacaucaaauaaagagcu

SEQ ID NO: 82426 - RNA, 32 nt, Human
cacucaagauacuugccagucucuccagugug

SEQ ID NO: 82427 - RNA, 32 nt, Human
cacucaagccugggcaacagagugagacccca

SEQ ID NO: 82428 - RNA, 32 nt, Human
cacucaagccugggcaauguagcaagauccug

SEQ ID NO: 82429 - RNA, 32 nt, Human
cacucaagccugggcgacagagcaaggcuuca

SEQ ID NO: 82430 - RNA, 32 nt, Human
cacucaagccugggcgacagagcgagacuccg

SEQ ID NO: 82431 - RNA, 32 nt, Human
cacucaagccugggcgacagagggagauuccg

SEQ ID NO: 82432 - RNA, 32 nt, Human
cacucaagccugggugacagagcaagacucca

SEQ ID NO: 82433 - RNA, 32 nt, Human
cacucaagccugggugacagagcgaaacuccg

SEQ ID NO: 82434 - RNA, 32 nt, Human
cacucaagccugggugacagugagacucuguc

SEQ ID NO: 82435 - RNA, 32 nt, Human
cacucaagccugggugacgagugaaacugucu

SEQ ID NO: 82436 - RNA, 32 nt, Human
cacucaagcuuggaugacagagcaagacuccg

SEQ ID NO: 82437 - RNA, 32 nt, Human
cacucaagcuugggugacagagcaagaccccg

SEQ ID NO: 82438 - RNA, 32 nt, Human
cacucaaggcauugacagcuuagcugugaggg

SEQ ID NO: 82439 - RNA, 32 nt, Human
cacucaaguuuggccaagggacuccacagcac

SEQ ID NO: 82440 - RNA, 28 nt, Human
cacucaauaauugcuuguuaaaggaagg

SEQ ID NO: 82441 - RNA, 32 nt, Human
cacucaauacaaaaaggccccucucuacaucu

SEQ ID NO: 82442 - RNA, 32 nt, Human
cacucaauacgcuggaguccacgugggccugg

SEQ ID NO: 82443 - RNA, 32 nt, Human
cacucacacaaguaacaccacagcagaccucg

SEQ ID NO: 82444 - RNA, 32 nt, Human
cacucacacacacucacacacacucauccccu

SEQ ID NO: 82445 - RNA, 32 nt, Human
cacucacacagaauuuuauuuuacauaguuuu

SEQ ID NO: 82446 - RNA, 32 nt, Human
cacucacacaguuuaggauuucagcuauggcu

SEQ ID NO: 82447 - RNA, 32 nt, Human
cacucacacaugcauacacacagacauacaca

SEQ ID NO: 82448 - RNA, 32 nt, Human
cacucacaccucuuugcuuuaccagugguguu

SEQ ID NO: 82449 - RNA, 32 nt, Human
cacucacacucaugugcugaaggacucacagc

SEQ ID NO: 82450 - RNA, 32 nt, Human
cacucacacugaggccuuggggacugaggccc

SEQ ID NO: 82451 - RNA, 32 nt, Human
cacucacacugcgguucacacccgcaggcgcu

SEQ ID NO: 82452 - RNA, 32 nt, Human
cacucacagcagagguggaaagcuggagacug

SEQ ID NO: 82453 - RNA, 32 nt, Human
cacucacauucacacacauacacacucauuga

SEQ ID NO: 82454 - RNA, 32 nt, Human
cacucaccaaacccucucaucugccggccuga

SEQ ID NO: 82455 - RNA, 32 nt, Human
cacucaccacaaccuccgccuccuggguucaa

SEQ ID NO: 82456 - RNA, 32 nt, Human
cacucaccaguucugcugccucaggucaggcc

SEQ ID NO: 82457 - RNA, 32 nt, Human
cacucaccauuuuaacacuggaagccacuuga

SEQ ID NO: 82458 - RNA, 32 nt, Human
cacucacccacugcuguccugucucauuccca

SEQ ID NO: 82459 - RNA, 32 nt, Human
cacucacccaggagcuggcugggccaggaccg

SEQ ID NO: 82460 - RNA, 32 nt, Human
cacucacccaucaauccucccacgcucccggu

SEQ ID NO: 82461 - RNA, 32 nt, Human
cacucacccuuucuuauugucuugcccugcau

SEQ ID NO: 82462 - RNA, 32 nt, Human
cacucaccggccgccuccggccgaguaccccc

SEQ ID NO: 82463 - RNA, 32 nt, Human
cacucaccucauucccauuguuuggaucaugc

SEQ ID NO: 82464 - RNA, 32 nt, Human
cacucaccuccaccuucacaggccauuugcac

SEQ ID NO: 82465 - RNA, 32 nt, Human
cacucaccugcucuuccugggcuggcugucuc

SEQ ID NO: 82466 - RNA, 32 nt, Human
cacucacgaggacccucagcugcuggaggcca

SEQ ID NO: 82467 - RNA, 32 nt, Human
cacucacggcagcgaugcacagggccacuuaa

SEQ ID NO: 82468 - RNA, 32 nt, Human
cacucacuacugcucuugcccuggacuauuca

SEQ ID NO: 82469 - RNA, 32 nt, Human
cacucacuccacccugccucugcaucccuuaa

SEQ ID NO: 82470 - RNA, 20 nt, Human
cacucacuccagccugggca

SEQ ID NO: 82471 - RNA, 32 nt, Human
cacucacucucccccuccucuucuggucuggc

SEQ ID NO: 82472 - RNA, 32 nt, Human
cacucacucuggucaugauaaauguucgucac

SEQ ID NO: 82473 - RNA, 32 nt, Human
cacucacugaacaccagcugcaguagagccga

SEQ ID NO: 82474 - RNA, 32 nt, Human
cacucacugcaacuggaucuucagccuccugu

SEQ ID NO: 82475 - RNA, 32 nt, Human
cacucacugcaacuuccgccuccuggggucaa

SEQ ID NO: 82476 - RNA, 32 nt, Human
cacucacugcagccuccgccucugggguucaa

SEQ ID NO: 82477 - RNA, 32 nt, Human
cacucacugcaggcuccgccucccggguuccc

SEQ ID NO: 82478 - RNA, 32 nt, Human
cacucacugccaaggucuucagcuucacuccu

SEQ ID NO: 82479 - RNA, 32 nt, Human
cacucacugcccucccucccuccugggcucca

SEQ ID NO: 82480 - RNA, 32 nt, Human
cacucacuuuuucagagacucaacagucucgu

SEQ ID NO: 82481 - RNA, 32 nt, Human
cacucagaaccucucuggaauuugugccugau

SEQ ID NO: 82482 - RNA, 32 nt, Human
cacucagacuccugcguagcugggaccacagg

SEQ ID NO: 82483 - RNA, 32 nt, Human
cacucagagacaccugcacuagaaauugcauu

SEQ ID NO: 82484 - RNA, 32 nt, Human
cacucagagacaugcagagauuggguuuuugg

SEQ ID NO: 82485 - RNA, 32 nt, Human
cacucagagcaagaugaguugcugcuauucuu

SEQ ID NO: 82486 - RNA, 32 nt, Human
cacucagagcagcuccaagacagaggcucugu

SEQ ID NO: 82487 - RNA, 32 nt, Human
cacucagaggcagagacugaguuaagucauag

SEQ ID NO: 82488 - RNA, 32 nt, Human
cacucagaucuagauccugcuuucauuucugg

SEQ ID NO: 82489 - RNA, 32 nt, Human
cacucagcacccccuucucugcccauucccca

SEQ ID NO: 82490 - RNA, 32 nt, Human
cacucagcacccuccccucagcagccuccacg

SEQ ID NO: 82491 - RNA, 32 nt, Human
cacucagcagaggcaauguuauuuauguacau

SEQ ID NO: 82492 - RNA, 32 nt, Human
cacucagcagccagagccucagagccagcagg

SEQ ID NO: 82493 - RNA, 32 nt, Human
cacucagcaggggccucgcagagaugcgugca

SEQ ID NO: 82494 - RNA, 32 nt, Human
cacucagcaucaccccuuccuggguggcaugu

SEQ ID NO: 82495 - RNA, 32 nt, Human
cacucagcauucucaguuuacucuucaguuug

SEQ ID NO: 82496 - RNA, 32 nt, Human
cacucagccaacugcucgcucacucaccuccc

SEQ ID NO: 82497 - RNA, 32 nt, Human
cacucagccacccugaguugcuuuucagcuga

SEQ ID NO: 82498 - RNA, 32 nt, Human
cacucagccauuucccccuccucagauggggc

SEQ ID NO: 82499 - RNA, 32 nt, Human
cacucagcccagggauagccaguguugggaga

SEQ ID NO: 82500 - RNA, 32 nt, Human
cacucagcccuugcacugaccugccuucugau

SEQ ID NO: 82501 - RNA, 32 nt, Human
cacucagcccuuuaaaccuuucccuggccuuu

SEQ ID NO: 82502 - RNA, 32 nt, Human
cacucagccggggcccucccaccuccaacgcc

SEQ ID NO: 82503 - RNA, 32 nt, Human
cacucagcuggauuccagaagcucagguggug

SEQ ID NO: 82504 - RNA, 32 nt, Human
cacucaggaacacccucccugccugugcaaag

SEQ ID NO: 82505 - RNA, 32 nt, Human
cacucaggaaccacuggcuccuccagugcaca

SEQ ID NO: 82506 - RNA, 32 nt, Human
cacucaggaggcugaggcagggaggauccauu

SEQ ID NO: 82507 - RNA, 32 nt, Human
cacucaggaguucucaucugacaagucaguug

SEQ ID NO: 82508 - RNA, 19 nt, Human
cacucaggauguccugcuc

SEQ ID NO: 82509 - RNA, 32 nt, Human
cacucaggccagugcaccccugggcagagccc

SEQ ID NO: 82510 - RNA, 32 nt, Human
cacucaggcggcagcauucccucccagccacu

SEQ ID NO: 82511 - RNA, 32 nt, Human
cacucaggcuaguuuguacuaguagaguuuug

SEQ ID NO: 82512 - RNA, 19 nt, Human
cacucaggcugcagugcag

SEQ ID NO: 82513 - RNA, 21 nt, Human
cacucaggcugcagugcagug

SEQ ID NO: 82514 - RNA, 21 nt, Human
cacucaggcuggaauguagug

SEQ ID NO: 82515 - RNA, 21 nt, Human
cacucaggcuggagugcagug

SEQ ID NO: 82516 - RNA, 32 nt, Human
cacucaggggcuggggcuucucucgcaccccc

SEQ ID NO: 82517 - RNA, 32 nt, Human
cacucagggucugaggcagcuaguagccggag

SEQ ID NO: 82518 - RNA, 32 nt, Human
cacucagggugggauuagggugaggcaaguga

SEQ ID NO: 82519 - RNA, 18 nt, Human
cacucaguaugugaggua

SEQ ID NO: 82520 - RNA, 32 nt, Human
cacucaguccuggccuugcucugaggguaaaa

SEQ ID NO: 82521 - RNA, 32 nt, Human
cacucagucgcccaggcuggagugcaguggca

SEQ ID NO: 82522 - RNA, 32 nt, Human
cacucagugaccucagucaccaaccuccucug

SEQ ID NO: 82523 - RNA, 22 nt, Human
cacucagugaggccgcccggca

SEQ ID NO: 82524 - RNA, 32 nt, Human
cacucagugcccggaguggcccagugagaagg

SEQ ID NO: 82525 - RNA, 32 nt, Human
cacucaguggguggagaggaagcauaugugga

SEQ ID NO: 82526 - RNA, 32 nt, Human
cacucaguguguguuucucuuccccuucuuag

SEQ ID NO: 82527 - RNA, 32 nt, Human
cacucaguugcccaggcuggauugcgguggcg

SEQ ID NO: 82528 - RNA, 32 nt, Human
cacucauacuccuugucagcaguccccaaccu

SEQ ID NO: 82529 - RNA, 32 nt, Human
cacucauacuucaucucauucucccuucugcc

SEQ ID NO: 82530 - RNA, 32 nt, Human
cacucauagggugcucugaggucaauaaagca

SEQ ID NO: 82531 - RNA, 32 nt, Human
cacucaucaaaccacaucuugaugcuaaguaa

SEQ ID NO: 82532 - RNA, 32 nt, Human
cacucaucaaucccagcccuaguguagcugau

SEQ ID NO: 82533 - RNA, 23 nt, Human
cacucaucaccucaucaccgagg

SEQ ID NO: 82534 - RNA, 32 nt, Human
cacucauccguccaggaggugggucucauggu

SEQ ID NO: 82535 - RNA, 32 nt, Human
cacucauccgugcaagcucuccagaagggaug

SEQ ID NO: 82536 - RNA, 32 nt, Human
cacucauccuccaccccucugccugcuucucc

SEQ ID NO: 82537 - RNA, 32 nt, Human
cacucaucuccuccucccacauuucuggagcu

SEQ ID NO: 82538 - RNA, 21 nt, Human
cacucaucuuuuuguguuuuu

SEQ ID NO: 82539 - RNA, 32 nt, Human
cacucaugaccauacucaucuguugguggugg

SEQ ID NO: 82540 - RNA, 32 nt, Human
cacucaugccuguaaacccagggcuuuagaag

SEQ ID NO: 82541 - RNA, 32 nt, Human
cacucauggacucacacauacacucacaugca

SEQ ID NO: 82542 - RNA, 32 nt, Human
cacucauggccuuccuauguuugggaaagcau

SEQ ID NO: 82543 - RNA, 32 nt, Human
cacucaugucaccgccauccuccugggcuucc

SEQ ID NO: 82544 - RNA, 32 nt, Human
cacucaugucuccuccacaugcgguccacaca

SEQ ID NO: 82545 - RNA, 31 nt, Human
cacucauuaaagugcaucacagccagagccu

SEQ ID NO: 82546 - RNA, 32 nt, Human
cacucauuccaaaauucaguauuuaauguaau

SEQ ID NO: 82547 - RNA, 17 nt, Human
cacucauucuccugcuc

SEQ ID NO: 82548 - RNA, 32 nt, Human
cacucauuucagacugauccagauuugccgcc

SEQ ID NO: 82549 - RNA, 32 nt, Human
cacuucuuccuggaucaucucuccccaucacu

SEQ ID NO: 82550 - RNA, 32 nt, Human
cacuucuuccuuggggagaccgucccacagcu

SEQ ID NO: 82551 - RNA, 32 nt, Human
cacuucuuccuuucucuuucucucuucccuca

SEQ ID NO: 82552 - RNA, 17 nt, Human
cacuucuucgacaggaa

SEQ ID NO: 82553 - RNA, 32 nt, Human
cacuucuucucagaaaagaggccagcucugca

SEQ ID NO: 82554 - RNA, 32 nt, Human
cacuucuucuccccucccccaccgcaucuggc

SEQ ID NO: 82555 - RNA, 32 nt, Human
cacuucuucucuucuguccccaccuccucuug

SEQ ID NO: 82556 - RNA, 32 nt, Human
cacuucuugcccaggcuggaguacaauggugc

SEQ ID NO: 82557 - RNA, 32 nt, Human
cacuucuugucaucuucucauccucugcgcca

SEQ ID NO: 82558 - RNA, 32 nt, Human
cacuucuuucaaagucugccagugauggucac

SEQ ID NO: 82559 - RNA, 32 nt, Human
cacuucuuucuaucacccucuucagucaccuc

SEQ ID NO: 82560 - RNA, 32 nt, Human
cacuucuuugguccucaucuuuacuuaaaaag

SEQ ID NO: 82561 - RNA, 32 nt, Human
cacuucuuuguugcuuucuuuucuauugaguc

SEQ ID NO: 82562 - RNA, 32 nt, Human
cacuucuuuucauaagcacugacagggcccag

SEQ ID NO: 82563 - RNA, 32 nt, Human
cacuugaacagccucaucaauauugccgucau

SEQ ID NO: 82564 - RNA, 32 nt, Human
cacuugaaccauggacaagacucucucaagau

SEQ ID NO: 82565 - RNA, 32 nt, Human
cacuugaacccagaagacagguugcagugagc

SEQ ID NO: 82566 - RNA, 32 nt, Human
cacuugaacccaggaauucaggcugcaguaag

SEQ ID NO: 82567 - RNA, 32 nt, Human
cacuugaacccaggagguguugcagugaacca

SEQ ID NO: 82568 - RNA, 32 nt, Human
cacuugaacccaggagguugaggcugcaguga

SEQ ID NO: 82569 - RNA, 32 nt, Human
cacuugaaggaagaagucuaagagugaaguag

SEQ ID NO: 82570 - RNA, 31 nt, Human
cacuugaauccuccagggccuguguccucac

SEQ ID NO: 82571 - RNA, 32 nt, Human
cacuugacacagaagcuggugggcacacaggg

SEQ ID NO: 82572 - RNA, 17 nt, Human
cacuugacauuauugga

SEQ ID NO: 82573 - RNA, 19 nt, Human
cacuugacauuccuuguca

SEQ ID NO: 82574 - RNA, 32 nt, Human
cacuugacccaggagguggaggucgcagugag

SEQ ID NO: 82575 - RNA, 32 nt, Human
cacuugaccgggagacagagguugcagugagc

SEQ ID NO: 82576 - RNA, 32 nt, Human
cacuugaccuuaaaagucucuucuggucuuug

SEQ ID NO: 82577 - RNA, 19 nt, Human
cacuugacggcacaggaag

SEQ ID NO: 82578 - RNA, 32 nt, Human
cacuugacuagagacaugcuuguguuuuggaa

SEQ ID NO: 82579 - RNA, 20 nt, Human
cacuugacuucaccagguga

SEQ ID NO: 82580 - RNA, 21 nt, Human
cacuugagaaccuccucagca

SEQ ID NO: 82581 - RNA, 32 nt, Human
cacuugagagaagauggaggagauguucauuc

SEQ ID NO: 82582 - RNA, 32 nt, Human
cacuugagauacccucuccuugcugaaguuuu

SEQ ID NO: 82583 - RNA, 32 nt, Human
cacuugagcccaauucaaagcugcagugagcu

SEQ ID NO: 82584 - RNA, 32 nt, Human
cacuugagcccaggagguugaggcugcaguga

SEQ ID NO: 82585 - RNA, 32 nt, Human
cacuugagccccggagguugagacugcagugc

SEQ ID NO: 82586 - RNA, 32 nt, Human
cacuugagcccgggagguugaggcugcagugg

SEQ ID NO: 82587 - RNA, 32 nt, Human
cacuugagccuaggagguuaaggcuauaguga

SEQ ID NO: 82588 - RNA, 32 nt, Human
cacuugagccuggaaaagguugcagugagcug

SEQ ID NO: 82589 - RNA, 32 nt, Human
cacuugagccugggagguugugguugcaguga

SEQ ID NO: 82590 - RNA, 32 nt, Human
cacuugagccugggcagcagagugagaccugu

SEQ ID NO: 82591 - RNA, 32 nt, Human
cacuugagccugggcgacacagcgagacucca

SEQ ID NO: 82592 - RNA, 32 nt, Human
cacuugaggagcagagguggcagcagaggauu

SEQ ID NO: 82593 - RNA, 32 nt, Human
cacuugaggcuuagcuuugcucugccaacuuc

SEQ ID NO: 82594 - RNA, 32 nt, Human
cacuugagguuaggaguuugagaccagccugg

SEQ ID NO: 82595 - RNA, 32 nt, Human
cacuugagguuaggaguuugagaucagcccgg

SEQ ID NO: 82596 - RNA, 32 nt, Human
cacuugaguucacuugaguuuacauuugaaau

SEQ ID NO: 82597 - RNA, 32 nt, Human
cacuugauauagaaacauacuuugcugucaaa

SEQ ID NO: 82598 - RNA, 32 nt, Human
cacuugaucacccaggcuagagugcaguggcg

SEQ ID NO: 82599 - RNA, 32 nt, Human
cacuugaugacccccaaccaaguggcucccac

SEQ ID NO: 82600 - RNA, 32 nt, Human
cacuugaugagagaugagagugucacauuaau

SEQ ID NO: 82601 - RNA, 32 nt, Human
cacuugauuaggagagagacagcaguguuuga

SEQ ID NO: 82602 - RNA, 32 nt, Human
cacuugauuguagguaagaauccauacugaag

SEQ ID NO: 82603 - RNA, 32 nt, Human
cacuugcacaugcauacacaugcacucacaug

SEQ ID NO: 82604 - RNA, 32 nt, Human
cacuugcaggcagaaugggaggaggacaugga

SEQ ID NO: 82605 - RNA, 31 nt, Human
cacuugcaguuuccuguucuccucauugccu

SEQ ID NO: 82606 - RNA, 32 nt, Human
cacuugcauccaacuccuggggcugggaccgu

SEQ ID NO: 82607 - RNA, 32 nt, Human
cacuugccaccugagucacauuuucagaagcc

SEQ ID NO: 82608 - RNA, 32 nt, Human
cacuugccaucuuucucuauaucuccaguaau

SEQ ID NO: 82609 - RNA, 32 nt, Human
cacuugcccagaggcccagcugcuagaggccc

SEQ ID NO: 82610 - RNA, 32 nt, Human
cacuugccccaaauugucuuugaagucgugug

SEQ ID NO: 82611 - RNA, 32 nt, Human
cacuugcccucaugugacacugggugacaguc

SEQ ID NO: 82612 - RNA, 32 nt, Human
cacuugcccuuucauaugucucuugucacuau

SEQ ID NO: 82613 - RNA, 32 nt, Human
cacuugccuaaucuccagcccagggccauugu

SEQ ID NO: 82614 - RNA, 32 nt, Human
cacuugccuaccaggcagcugugugacugagc

SEQ ID NO: 82615 - RNA, 32 nt, Human
cacuugccuaugcuuguucucccaggcagugg

SEQ ID NO: 82616 - RNA, 32 nt, Human
cacuugccucaaggcuuuauauuuggcugcuu

SEQ ID NO: 82617 - RNA, 18 nt, Human
cacuugccuccacaccuu

SEQ ID NO: 82618 - RNA, 32 nt, Human
cacuugccugcucugccccuuggagcugcauu

SEQ ID NO: 82619 - RNA, 32 nt, Human
cacuugccuuucucauucucuccugagcccac

SEQ ID NO: 82620 - RNA, 32 nt, Human
cacuugcggacucucccuuccuuccuucucag

SEQ ID NO: 82621 - RNA, 20 nt, Human
cacuugcucccgucuacuua

SEQ ID NO: 82622 - RNA, 32 nt, Human
cacuugcuccuaccagcuucugaaggcuccaa

SEQ ID NO: 82623 - RNA, 32 nt, Human
cacuugcuccucccucuacccucggcacccug

SEQ ID NO: 82624 - RNA, 32 nt, Human
cacuugcucucuuuacccuaguuucuuccucu

SEQ ID NO: 82625 - RNA, 32 nt, Human
cacuugcugagguguggcugaggcagaaucau

SEQ ID NO: 82626 - RNA, 32 nt, Human
cacuugcugccaccaccucuuccuggggcauc

SEQ ID NO: 82627 - RNA, 32 nt, Human
cacuugcugccagcaguuugugaauggugucu

SEQ ID NO: 82628 - RNA, 32 nt, Human
cacuugcuguagacuccugggugcuggaggag

SEQ ID NO: 82629 - RNA, 23 nt, Human
cacuugcuguucaggaccacuaa

SEQ ID NO: 82630 - RNA, 32 nt, Human
cacuugcuucuucaguucuuugcucagcuagg

SEQ ID NO: 82631 - RNA, 32 nt, Human
cacuugcuuggauuaggcaaggcuccacucau

SEQ ID NO: 82632 - RNA, 22 nt, Human
cacuuggaaauaaaccauugga

SEQ ID NO: 82633 - RNA, 32 nt, Human
cacuuggaaugagaaucagaggauggaaauag

SEQ ID NO: 82634 - RNA, 32 nt, Human
cacuuggacugaauagugacacucgguaagga

SEQ ID NO: 82635 - RNA, 32 nt, Human
cacuuggagcagugggaggaaaucuggguuug

SEQ ID NO: 82636 - RNA, 32 nt, Human
cacuuggagcagugucuguuguuccaggugua

SEQ ID NO: 82637 - RNA, 32 nt, Human
cacuuggaggaaaguugcagguggguugggca

SEQ ID NO: 82638 - RNA, 32 nt, Human
cacuuggaguaacaggcuuauuccacuuucca

SEQ ID NO: 82639 - RNA, 32 nt, Human
cacuuggauacugauuugaacaauguagaagu

SEQ ID NO: 82640 - RNA, 32 nt, Human
cacuuggcacauuauaacuaaaggaauccccu

SEQ ID NO: 82641 - RNA, 32 nt, Human
cacuuggcagaaacgugaugugucccacaaac

SEQ ID NO: 82642 - RNA, 32 nt, Human
cacuuggcaggcaggaggugcggucuccagag

SEQ ID NO: 82643 - RNA, 20 nt, Human
cacuuggcaugaagccucca

SEQ ID NO: 82644 - RNA, 32 nt, Human
cacuuggccacuugggguaaagccagugccag

SEQ ID NO: 82645 - RNA, 19 nt, Human
cacuuggccaucugcugaa

SEQ ID NO: 82646 - RNA, 32 nt, Human
cacuuggcccaggauguugaaagggugcaaau

SEQ ID NO: 82647 - RNA, 19 nt, Human
cacuuggccucaugcugga

SEQ ID NO: 82648 - RNA, 17 nt, Human
cacuuggccucccugag

SEQ ID NO: 82649 - RNA, 17 nt, Human
cacuuggccuccuugag

SEQ ID NO: 82650 - RNA, 18 nt, Human
cacuuggccuugcugcug

SEQ ID NO: 82651 - RNA, 18 nt, Human
cacuuggccuuucccugc

SEQ ID NO: 82652 - RNA, 19 nt, Human
cacuuggcgcccccuccca

SEQ ID NO: 82653 - RNA, 32 nt, Human
cacuuggcuaauucuucuccuccuucacauca

SEQ ID NO: 82654 - RNA, 18 nt, Human
cacuuggcuacaacugag

SEQ ID NO: 82655 - RNA, 32 nt, Human
cacuuggcuagaguucagagacaggaagugau

SEQ ID NO: 82656 - RNA, 32 nt, Human
cacuuggcucacugcagccucaacuucuuguc

SEQ ID NO: 82657 - RNA, 17 nt, Human
cacuuggcuccugugag

SEQ ID NO: 82658 - RNA, 18 nt, Human
cacuuggcuccuuaggaa

SEQ ID NO: 82659 - RNA, 19 nt, Human
cacuuggcucucucaugag

SEQ ID NO: 82660 - RNA, 32 nt, Human
cacuuggcucugaaccuacagucucaaagauu

SEQ ID NO: 82661 - RNA, 19 nt, Human
cacuuggcuggacaggaag

SEQ ID NO: 82662 - RNA, 32 nt, Human
cacuuggcugucaggcuuucugugcauguacu

SEQ ID NO: 82663 - RNA, 19 nt, Human
cacuuggcugugcuaugaa

SEQ ID NO: 82664 - RNA, 18 nt, Human
cacuuggcuucgccugga

SEQ ID NO: 82665 - RNA, 18 nt, Human
cacuuggcuugcagugag

SEQ ID NO: 82666 - RNA, 20 nt, Human
cacuuggcuuucaucaugaa

SEQ ID NO: 82667 - RNA, 20 nt, Human
cacuuggcuuuccuccugag

SEQ ID NO: 82668 - RNA, 18 nt, Human
cacuugggaaaugaagua

SEQ ID NO: 82669 - RNA, 32 nt, Human
cacuugggagcccugggggccucugcccuuuu

SEQ ID NO: 82670 - RNA, 32 nt, Human
cacuugggagcuuguuagaaaggcagcuucuc

SEQ ID NO: 82671 - RNA, 32 nt, Human
cacuugggaggcugaggcaggagaaucgcuug

SEQ ID NO: 82672 - RNA, 32 nt, Human
cacuugggaggcugaggcaggagaauugcuug

SEQ ID NO: 82673 - RNA, 32 nt, Human
cacuugggcccuccucugggagccgcacccac

SEQ ID NO: 82674 - RNA, 32 nt, Human
cacuugggcgcucugcccucccuggccucacg

SEQ ID NO: 82675 - RNA, 32 nt, Human
cacuuggggaagcugaggugggcagaucaguu

SEQ ID NO: 82676 - RNA, 32 nt, Human
cacuuggggagaacuaguuaggaggauggccu

SEQ ID NO: 82677 - RNA, 32 nt, Human
cacuuggggaggacaaugugggguggaucacg

SEQ ID NO: 82678 - RNA, 32 nt, Human
cacuuggggaggccaaggugggcagauugcuu

SEQ ID NO: 82679 - RNA, 32 nt, Human
cacuuggggaggccgaggcgggcagaucacga

SEQ ID NO: 82680 - RNA, 32 nt, Human
cacuuggggaggccgaggcggguggaucagga

SEQ ID NO: 82681 - RNA, 32 nt, Human
cacuuggggaggcugaggcgggcagaucacaa

SEQ ID NO: 82682 - RNA, 32 nt, Human
cacuuggggaggcugaggcgggcagaucacuu

SEQ ID NO: 82683 - RNA, 32 nt, Human
cacuugggguagaaaggcuuccccuacccugg

SEQ ID NO: 82684 - RNA, 32 nt, Human
cacuugguaacaggcauccuugccaagccucc

SEQ ID NO: 82685 - RNA, 32 nt, Human
cacuuggucaaggaggggucuaggagcucugu

SEQ ID NO: 82686 - RNA, 17 nt, Human
cacuuggucccuuugaa

SEQ ID NO: 82687 - RNA, 32 nt, Human
cacuuggucucuuaucuucagugagaagguga

SEQ ID NO: 82688 - RNA, 32 nt, Human
cacuuggugaugucuacuggguggaugguugu

SEQ ID NO: 82689 - RNA, 32 nt, Human
cacuuggugccugggguaguucuguucugugg

SEQ ID NO: 82690 - RNA, 32 nt, Human
cacuuggugcuccugcccacaccagccacuuu

SEQ ID NO: 82691 - RNA, 19 nt, Human
cacuuggugggaccaugaa

SEQ ID NO: 82692 - RNA, 32 nt, Human
cacuuggugggcuugggguugguucugggugg

SEQ ID NO: 82693 - RNA, 28 nt, Human
cacuugguguuucuaccacccccugcca

SEQ ID NO: 82694 - RNA, 32 nt, Human
cacuugguuccauccacugccucccagcaccu

SEQ ID NO: 82695 - RNA, 32 nt, Human
cacuugguuugucaucaggaacugagcagguc

SEQ ID NO: 82696 - RNA, 32 nt, Human
cacuuguaaagauuacuccaacccaguuuuua

SEQ ID NO: 82697 - RNA, 32 nt, Human
cacuuguaauccuagcacuuggaaaggcugag

SEQ ID NO: 82698 - RNA, 32 nt, Human
cacuuguauaaauacauggauauuuuuaugua

SEQ ID NO: 82699 - RNA, 32 nt, Human
cacuuguaucaacuuuacugccuuugucggca

SEQ ID NO: 82700 - RNA, 19 nt, Human
cacuugucaaaucauugaa

SEQ ID NO: 82701 - RNA, 32 nt, Human
cacuugucacccaggcuggagugcaauggugu

SEQ ID NO: 82702 - RNA, 32 nt, Human
cacuugucacccaggcuggagugcaguggcuc

SEQ ID NO: 82703 - RNA, 31 nt, Human
cacuugucacuuuucuucugugcugggaaaa

SEQ ID NO: 82704 - RNA, 20 nt, Human
cacuugucagggcacagggg

SEQ ID NO: 82705 - RNA, 32 nt, Human
cacuugucauuguuaccagcagucuccaaacu

SEQ ID NO: 82706 - RNA, 32 nt, Human
cacuugucccacgucaccauuucaucucauug

SEQ ID NO: 82707 - RNA, 32 nt, Human
cacuugucccucuccagcaagaggcuagcacu

SEQ ID NO: 82708 - RNA, 32 nt, Human
cacuugucucaugucugugaaacugguacaac

SEQ ID NO: 82709 - RNA, 32 nt, Human
cacuugucucugagagagacagaaguuagaaa

SEQ ID NO: 82710 - RNA, 32 nt, Human
cacuugucugugucugggaagggauggccaag

SEQ ID NO: 82711 - RNA, 32 nt, Human
cacuugucuuccuuaauuuugcccuaaaagca

SEQ ID NO: 82712 - RNA, 32 nt, Human
cacuugucuucuagaggucagaauuccauaau

SEQ ID NO: 82713 - RNA, 32 nt, Human
cacuugugaauuccuugaaccugggcauugca

SEQ ID NO: 82714 - RNA, 32 nt, Human
cacuugugaccagcuugcugaccgccaguccc

SEQ ID NO: 82715 - RNA, 32 nt, Human
cacuugugagcugacccccaggaacagcuugg

SEQ ID NO: 82716 - RNA, 32 nt, Human
cacuugugaguguguguggauuggcagggggu

SEQ ID NO: 82717 - RNA, 22 nt, Human
cacuuguggagcgccagcucug

SEQ ID NO: 82718 - RNA, 32 nt, Human
cacuuguggccaaauuauacuugacuguuaug

SEQ ID NO: 82719 - RNA, 32 nt, Human
cacuuguggguacucauuuucugccaguggga

SEQ ID NO: 82720 - RNA, 32 nt, Human
cacuuguugacugcuacauuuccccagccugg

SEQ ID NO: 82721 - RNA, 32 nt, Human
cacuuguugcccaggcuggagugcaaugguac

SEQ ID NO: 82722 - RNA, 32 nt, Human
cacuuguuucuccugcaccccagccugucacg

SEQ ID NO: 82723 - RNA, 32 nt, Human
cacuuguuugauaccuuuuucaugacagucuc

SEQ ID NO: 82724 - RNA, 32 nt, Human
cacuuguuuggcacucagcccagggccuggau

SEQ ID NO: 82725 - RNA, 32 nt, Human
cacuuguuuuaacuauuuauuuugccauguuu

SEQ ID NO: 82726 - RNA, 32 nt, Human
cacuuguuuuugauuuuacaggcucauaggcg

SEQ ID NO: 82727 - RNA, 32 nt, Human
cacuuuaaaacacacacauacacacacaaaac

SEQ ID NO: 82728 - RNA, 32 nt, Human
cacuuuaaaccugaacucuuuuaucgguaauu

SEQ ID NO: 82729 - RNA, 32 nt, Human
cacuuuaagaggccgaggcgggcagaucaccu

SEQ ID NO: 82730 - RNA, 32 nt, Human
cacuuuaauuuccugaaauaaauuuaaggaaa

SEQ ID NO: 82731 - RNA, 32 nt, Human
cacuuuacguuugaauuucugagcuaaagagu

SEQ ID NO: 82732 - RNA, 32 nt, Human
cacuuuacucuucauuugucaccaucuuuucc

SEQ ID NO: 82733 - RNA, 32 nt, Human
cacuuuagccugggcaacagaucaagacccug

SEQ ID NO: 82734 - RNA, 32 nt, Human
cacuuuagccugggcgacaagagcaagacucc

SEQ ID NO: 82735 - RNA, 32 nt, Human
cacuuuagccugggcgaccgagacuccgucuc

SEQ ID NO: 82736 - RNA, 32 nt, Human
cacuuuagccugggugaaaaagugagacccua

SEQ ID NO: 82737 - RNA, 32 nt, Human
cacuuuagccugggugacagagcgagacucug

SEQ ID NO: 82738 - RNA, 32 nt, Human
cacuuuaggaaacuagaaaaagaagagcaaau

SEQ ID NO: 82739 - RNA, 32 nt, Human
cacuuuaggaagggagagacgucguccuguuu

SEQ ID NO: 82740 - RNA, 32 nt, Human
cacuuuaggagaccaaggcgggcagaucacuu

SEQ ID NO: 82741 - RNA, 32 nt, Human
cacuuuaggaggccaaggagggcagaucaccu

SEQ ID NO: 82742 - RNA, 32 nt, Human
cacuuuaggaggccgaggcggguggaucauga

SEQ ID NO: 82743 - RNA, 32 nt, Human
cacuuuaggaggucaaggcaggaagaucccug

SEQ ID NO: 82744 - RNA, 32 nt, Human
cacuuuaggaggucaaggugggcagaucauga

SEQ ID NO: 82745 - RNA, 32 nt, Human
cacuuuaggaguccaaggcgggcggaucacuu

SEQ ID NO: 82746 - RNA, 19 nt, Human
cacuuuagguaucauugaa

SEQ ID NO: 82747 - RNA, 32 nt, Human
cacuuuagucugggugacagagcaagacccug

SEQ ID NO: 82748 - RNA, 32 nt, Human
cacuuuaucccaauuucuugauacuuuuccuu

SEQ ID NO: 82749 - RNA, 32 nt, Human
cacuuuauccuucacaaacauuucccccaaua

SEQ ID NO: 82750 - RNA, 32 nt, Human
cacuuucacagaccuaaucuuuguuugcaaac

SEQ ID NO: 82751 - RNA, 32 nt, Human
cacuuucacccagaaccaaugcgguguuucuu

SEQ ID NO: 82752 - RNA, 32 nt, Human
cacuuucaccuuuacugauuuccagaggaaag

SEQ ID NO: 82753 - RNA, 32 nt, Human
cacuuucacuuguucauuaucauuccaauuuu

SEQ ID NO: 82754 - RNA, 32 nt, Human
cacuuucagaggcuggggugggcagauugcuu

SEQ ID NO: 82755 - RNA, 32 nt, Human
cacuuucagccuucaaacuguguugaaugaaa

SEQ ID NO: 82756 - RNA, 32 nt, Human
cacuuucaggaagucaaccaagacugaggaug

SEQ ID NO: 82757 - RNA, 32 nt, Human
cacuuucauuguauuucauugaaagugcuuaa

SEQ ID NO: 82758 - RNA, 32 nt, Human
cacuuuccagauugaaggauuaaucaccagaa

SEQ ID NO: 82759 - RNA, 32 nt, Human
cacuuuccagcaccugaaagcuggggccucag

SEQ ID NO: 82760 - RNA, 32 nt, Human
cacuuuccaggugucagcaggugugaucaggg

SEQ ID NO: 82761 - RNA, 32 nt, Human
cacuuuccaucauggccugaacccuggaggaa

SEQ ID NO: 82762 - RNA, 32 nt, Human
cacuuuccauuuucucuuucaccucauuuugc

SEQ ID NO: 82763 - RNA, 32 nt, Human
cacuuucccuuagccccucugcuggguagaga

SEQ ID NO: 82764 - RNA, 32 nt, Human
cacuuuccuauauaccacaccucccuguccac

SEQ ID NO: 82765 - RNA, 32 nt, Human
cacuuuccuccaccucccacccugacccccuu

SEQ ID NO: 82766 - RNA, 32 nt, Human
cacuuuccuccacuuagcaccauaggcaaggg

SEQ ID NO: 82767 - RNA, 32 nt, Human
cacuuuccugaucauggcacacugccuacgcu

SEQ ID NO: 82768 - RNA, 32 nt, Human
cacuuuccugggucuugugcugugccuuuccu

SEQ ID NO: 82769 - RNA, 32 nt, Human
cacuuuccuucaugaacaucccccucccaaca

SEQ ID NO: 82770 - RNA, 32 nt, Human
cacuuuccuuuucccuccaccaugaagauggg

SEQ ID NO: 82771 - RNA, 32 nt, Human
cacuuucggaagcugaggugggcagauagcuu

SEQ ID NO: 82772 - RNA, 32 nt, Human
cacuuucggccuuccuucuucuccccuuccgc

SEQ ID NO: 82773 - RNA, 32 nt, Human
cacuuucuaacaucaaaugacucucaucauca

SEQ ID NO: 82774 - RNA, 32 nt, Human
cacuuucuagauauuucccccuugcuggagaa

SEQ ID NO: 82775 - RNA, 32 nt, Human
cacuuucuaguugcuuucauccuccuuuuguu

SEQ ID NO: 82776 - RNA, 32 nt, Human
cacuuucuccaauacuuguauuuuaugcuaca

SEQ ID NO: 82777 - RNA, 32 nt, Human
cacuuucuccaccuccugcagccucccuguug

SEQ ID NO: 82778 - RNA, 32 nt, Human
cacuuucucccaggcugagggcggguguucug

SEQ ID NO: 82779 - RNA, 32 nt, Human
cacuuucucccuguuugcuggcccagacaggc

SEQ ID NO: 82780 - RNA, 32 nt, Human
cacuuucuccugccuuccuuguggcugucagc

SEQ ID NO: 82781 - RNA, 32 nt, Human
cacuuucugacuccagccuugccagccugacu

SEQ ID NO: 82782 - RNA, 32 nt, Human
cacuuucugacugcaacuucugucccuuguuu

SEQ ID NO: 82783 - RNA, 32 nt, Human
cacuuucugcauuccaaacagcauccuaccug

SEQ ID NO: 82784 - RNA, 32 nt, Human
cacuuucuggucagacaccuuuagguugcucu

SEQ ID NO: 82785 - RNA, 32 nt, Human
cacuuucuuauuuucugacacaauaagauauu

SEQ ID NO: 82786 - RNA, 32 nt, Human
cacuuucuucaucucugcuccaagcagcagcg

SEQ ID NO: 82787 - RNA, 32 nt, Human
cacuuucuuuccuauuccccuugccugaaucu

SEQ ID NO: 82788 - RNA, 32 nt, Human
cacuuucuuuuguguuuacaucaugccagggg

SEQ ID NO: 82789 - RNA, 32 nt, Human
cacuuugaaaugcagaaauacaggcauaauac

SEQ ID NO: 82790 - RNA, 32 nt, Human
cacuuugacacccaggcuggagugcaguggug

SEQ ID NO: 82791 - RNA, 32 nt, Human
cacuuugacuucugacagcucuaccucaagcc

SEQ ID NO: 82792 - RNA, 32 nt, Human
cacuuugagacuuuggcaacuccugggccaca

SEQ ID NO: 82793 - RNA, 32 nt, Human
cacuuugagagaccgaggcgggcggaucacga

SEQ ID NO: 82794 - RNA, 32 nt, Human
cacuuugagaggcagaggcaggaggaucagga

SEQ ID NO: 82795 - RNA, 32 nt, Human
cacuuugagaggccaaggugggaggaucacuu

SEQ ID NO: 82796 - RNA, 32 nt, Human
cacuuugagaggccaaggugggcagaucacau

SEQ ID NO: 82797 - RNA, 32 nt, Human
cacuuugagaggccgaggcgggugggucaccu

SEQ ID NO: 82798 - RNA, 32 nt, Human
cacuuugagaggccgaggugggcagaucgccu

SEQ ID NO: 82799 - RNA, 32 nt, Human
cacuuugagaggcugaggcgggaggaucgcuu

SEQ ID NO: 82800 - RNA, 32 nt, Human
cacuuugagaggcugaggcgggcggaucaccu

SEQ ID NO: 82801 - RNA, 32 nt, Human
cacuuugagaggcugaggcgggcggaucacga

SEQ ID NO: 82802 - RNA, 32 nt, Human
cacuuugagaggcugaggcggguggaucaccu

SEQ ID NO: 82803 - RNA, 32 nt, Human
cacuuugagaggcugaggcggguggauggcuu

SEQ ID NO: 82804 - RNA, 32 nt, Human
cacuuugagaucugggcaccugcuggaaccug

SEQ ID NO: 82805 - RNA, 32 nt, Human
cacuuugagccuuuggaaguuaagguuuccuc

SEQ ID NO: 82806 - RNA, 32 nt, Human
cacuuugaggcugaggccauggcaggacagcu

SEQ ID NO: 82807 - RNA, 32 nt, Human
cacuuugcaaaagccucugcccuuccaucucg

SEQ ID NO: 82808 - RNA, 32 nt, Human
cacuuugcaaaccugcaccuugcacuuuuggg

SEQ ID NO: 82809 - RNA, 32 nt, Human
cacuuugcaauaaauaguccaguguuuccuuc

SEQ ID NO: 82810 - RNA, 32 nt, Human
cacuuugcauuauccauggucucuuaccagcg

SEQ ID NO: 82811 - RNA, 32 nt, Human
cacuuugccacagaggccucaggcuucuccaa

SEQ ID NO: 82812 - RNA, 32 nt, Human
cacuuugccaucauguggccucuggacacugu

SEQ ID NO: 82813 - RNA, 32 nt, Human
cacuuugccccuuccugccccaaaaggcuuuc

SEQ ID NO: 82814 - RNA, 32 nt, Human
cacuuugcccugcccucugccuccagggcucc

SEQ ID NO: 82815 - RNA, 24 nt, Human
cacuuugccgcaggccgccuggca

SEQ ID NO: 82816 - RNA, 32 nt, Human
cacuuugcgaggccaaggugggaggauugcuu

SEQ ID NO: 82817 - RNA, 32 nt, Human
cacuuugcgaggccgaggugggcagaucacuu

SEQ ID NO: 82818 - RNA, 32 nt, Human
cacuuugcucaaccuaaaugaauucaagguag

SEQ ID NO: 82819 - RNA, 32 nt, Human
cacuuugcucagcacgucuucccaggccuccc

SEQ ID NO: 82820 - RNA, 32 nt, Human
cacuuugcucccaggcuggaaugcaguggcua

SEQ ID NO: 82821 - RNA, 32 nt, Human
cacuuugcuuagcuauaaagugccaucagugg

SEQ ID NO: 82822 - RNA, 32 nt, Human
cacuuugcuucccaggcuggagugcaguggug

SEQ ID NO: 82823 - RNA, 32 nt, Human
cacuuugcuuuaauuucucugagcugcaagaa

SEQ ID NO: 82824 - RNA, 32 nt, Human
cacuuuggaagaccaaggcgggcagauugccu

SEQ ID NO: 82825 - RNA, 32 nt, Human
cacuuuggaaggccaaggcgggcggaucacga

SEQ ID NO: 82826 - RNA, 32 nt, Human
cacuuuggaaggccaaggugggaggaucgcuu

SEQ ID NO: 82827 - RNA, 32 nt, Human
cacuuuggaaggccgaggcgggcagaucacua

SEQ ID NO: 82828 - RNA, 32 nt, Human
cacuuuggaaggccgaggcgggcggaucauuu

SEQ ID NO: 82829 - RNA, 32 nt, Human
cacuuuggaaggccgaggcgggugggucaccu

SEQ ID NO: 82830 - RNA, 32 nt, Human
cacuuuggaaggccgaggugggcagaucaucu

SEQ ID NO: 82831 - RNA, 32 nt, Human
cacuuuggaaggcugaggcgggaggaucagua

SEQ ID NO: 82832 - RNA, 32 nt, Human
cacuuuggaaggcugaggcgggcagaucaucu

SEQ ID NO: 82833 - RNA, 32 nt, Human
cacuuuggaaggcugaggcgggcggaucaccu

SEQ ID NO: 82834 - RNA, 32 nt, Human
cacuuuggaaggcugaggcgggcggaucauga

SEQ ID NO: 82835 - RNA, 32 nt, Human
cacuuuggaaggcugaggcggguggaucacaa

SEQ ID NO: 82836 - RNA, 32 nt, Human
cacuuuggacugcugcuucucuuagcuccucu

SEQ ID NO: 82837 - RNA, 32 nt, Human
cacuuuggagccacugaagagccgacugugcc

SEQ ID NO: 82838 - RNA, 32 nt, Human
cacuuuggauucagguucuccacagcagucuu

SEQ ID NO: 82839 - RNA, 31 nt, Human
cacuuuggcacgauguuagccaacagcuccu

SEQ ID NO: 82840 - RNA, 32 nt, Human
cacuuuggcaggccgaggcggguggaucacuu

SEQ ID NO: 82841 - RNA, 32 nt, Human
cacuuugggaacaugucaaagcacacauugag

SEQ ID NO: 82842 - RNA, 32 nt, Human
cacuuugggaagcagagguggcaggaucauuc

SEQ ID NO: 82843 - RNA, 32 nt, Human
cacuuugggaagccaaggcgggcagaucauuu

SEQ ID NO: 82844 - RNA, 32 nt, Human
cacuuugggaagccaaggugggcagaucacga

SEQ ID NO: 82845 - RNA, 32 nt, Human
cacuuugggaagccgaggcgggcagaucaccu

SEQ ID NO: 82846 - RNA, 32 nt, Human
cacuuugggaagccgaggcgggcugaucgcuu

SEQ ID NO: 82847 - RNA, 32 nt, Human
cacuuugggaagccgaggcggguggaucacga

SEQ ID NO: 82848 - RNA, 32 nt, Human
cacuuugggaagccgaggugggcagaucacga

SEQ ID NO: 82849 - RNA, 32 nt, Human
cacuuugggaagccgaggugggcagaucauaa

SEQ ID NO: 82850 - RNA, 32 nt, Human
cacuuugggaagccgggguaggaggaucacca

SEQ ID NO: 82851 - RNA, 31 nt, Human
cacuuugggaagcugagauggguggaucacc

SEQ ID NO: 82852 - RNA, 32 nt, Human
cacuuugggaagcugaggugggcagauagcuu

SEQ ID NO: 82853 - RNA, 32 nt, Human
cacuuugggaagucaaggcagguggaucccuu

SEQ ID NO: 82854 - RNA, 32 nt, Human
cacuuugggagaccaaggcgggcggaucacuu

SEQ ID NO: 82855 - RNA, 32 nt, Human
cacuuugggagaccaaggugggaggaucacuu

SEQ ID NO: 82856 - RNA, 32 nt, Human
cacuuugggagaccaaggugggcagaucaccu

SEQ ID NO: 82857 - RNA, 32 nt, Human
cacuuugggagaccaaggugggcagaucacuu

SEQ ID NO: 82858 - RNA, 32 nt, Human
cacuuugggagaccgaggcgggcagauugccu

SEQ ID NO: 82859 - RNA, 32 nt, Human
cacuuugggagacugaagugggcagaucauuu

SEQ ID NO: 82860 - RNA, 32 nt, Human
cacuuugggagacugaggcgggcggaucauga

SEQ ID NO: 82861 - RNA, 32 nt, Human
cacuuugggagacugaggcggguggaucaccu

SEQ ID NO: 82862 - RNA, 32 nt, Human
cacuuugggagacugaggugggcagaucacuu

SEQ ID NO: 82863 - RNA, 32 nt, Human
cacuuugggagccccaggugggcagaucacga

SEQ ID NO: 82864 - RNA, 32 nt, Human
cacuuugggagcccgaggcgggcggaucacaa

SEQ ID NO: 82865 - RNA, 32 nt, Human
cacuuugggagcccgaggcggguggaucagcu

SEQ ID NO: 82866 - RNA, 32 nt, Human
cacuuugggagcccgaggugggcagaucacua

SEQ ID NO: 82867 - RNA, 32 nt, Human
cacuuugggaggacaagguggguggaucacuu

SEQ ID NO: 82868 - RNA, 32 nt, Human
cacuuugggaggacgaaacauguggaucaccu

SEQ ID NO: 82869 - RNA, 32 nt, Human
cacuuugggaggacgaagcgaguggaucacug

SEQ ID NO: 82870 - RNA, 32 nt, Human
cacuuugggaggacgaggcaggcggaucauga

SEQ ID NO: 82871 - RNA, 32 nt, Human
cacuuugggaggacgaggcauguggaucaccu

SEQ ID NO: 82872 - RNA, 32 nt, Human
cacuuugggaggaggccgagcugggcggaucg

SEQ ID NO: 82873 - RNA, 32 nt, Human
cacuuugggaggauagcuugaggccaagagau

SEQ ID NO: 82874 - RNA, 32 nt, Human
cacuuugggaggaucccuugagcccagguguu

SEQ ID NO: 82875 - RNA, 32 nt, Human
cacuuugggaggaugaggcggguggaucacau

SEQ ID NO: 82876 - RNA, 32 nt, Human
cacuuugggaggcaaaggcagguggaucaccu

SEQ ID NO: 82877 - RNA, 32 nt, Human
cacuuugggaggcaaaggcgggaggaucacuu

SEQ ID NO: 82878 - RNA, 32 nt, Human
cacuuugggaggcaaaggcgggcagaucaccu

SEQ ID NO: 82879 - RNA, 32 nt, Human
cacuuugggaggcaaaggcgggcggaucaccu

SEQ ID NO: 82880 - RNA, 32 nt, Human
cacuuugggaggcagagacagguggaucacga

SEQ ID NO: 82881 - RNA, 32 nt, Human
cacuuugggaggcagaggccgguggguugcuu

SEQ ID NO: 82882 - RNA, 32 nt, Human
cacuuugggaggcagaggcgggaggauugcuu

SEQ ID NO: 82883 - RNA, 32 nt, Human
cacuuugggaggcagaggcgggcagaucacuu

SEQ ID NO: 82884 - RNA, 32 nt, Human
cacuuugggaggcagaggcgggcggaucacuu

SEQ ID NO: 82885 - RNA, 32 nt, Human
cacuuugggaggcagaggugggaggauugcuu

SEQ ID NO: 82886 - RNA, 32 nt, Human
cacuuugggaggcagaggugggcagaucacuc

SEQ ID NO: 82887 - RNA, 32 nt, Human
cacuuugggaggccaagacgggcagaucacga

SEQ ID NO: 82888 - RNA, 31 nt, Human
cacuuugggaggccaagaugggaggagugcu

SEQ ID NO: 82889 - RNA, 31 nt, Human
cacuuugggaggccaagaugggaggaucgcu

SEQ ID NO: 82890 - RNA, 32 nt, Human
cacuuugggaggccaagaugggcagauugcuu

SEQ ID NO: 82891 - RNA, 31 nt, Human
cacuuugggaggccaagaugggcggaucacc

SEQ ID NO: 82892 - RNA, 31 nt, Human
cacuuugggaggccaagaugggcggaucacg

SEQ ID NO: 82893 - RNA, 31 nt, Human
cacuuugggaggccaagaugggcggaucaug

SEQ ID NO: 82894 - RNA, 31 nt, Human
cacuuugggaggccaagaugggcggauugcu

SEQ ID NO: 82895 - RNA, 31 nt, Human
cacuuugggaggccaagauggguggaucacc

SEQ ID NO: 82896 - RNA, 32 nt, Human
cacuuugggaggccaagcuugguggaucgcuu

SEQ ID NO: 82897 - RNA, 32 nt, Human
cacuuugggaggccaaggaaggaggacugcuu

SEQ ID NO: 82898 - RNA, 32 nt, Human
cacuuugggaggccaaggagggcagaucacuu

SEQ ID NO: 82899 - RNA, 32 nt, Human
cacuuugggaggccaaggagguaggaucgcuu

SEQ ID NO: 82900 - RNA, 32 nt, Human
cacuuugggaggccaaggcaggaggacugcuu

SEQ ID NO: 82901 - RNA, 32 nt, Human
cacuuugggaggccaaggcgggcagaccauga

SEQ ID NO: 82902 - RNA, 32 nt, Human
cacuuugggaggccaaggcgggcagaucaccu

SEQ ID NO: 82903 - RNA, 32 nt, Human
cacuuugggaggccaaggcgggcagaucacga

SEQ ID NO: 82904 - RNA, 32 nt, Human
cacuuugggaggccaaggcgggcagaucacuu

SEQ ID NO: 82905 - RNA, 27 nt, Human
cacuuugggaggccaaggcgggcggau

SEQ ID NO: 82906 - RNA, 32 nt, Human
cacuuugggaggccaaggcgggcggauaaccu

SEQ ID NO: 82907 - RNA, 32 nt, Human
cacuuugggaggccaaggcgggcggaucacaa

SEQ ID NO: 82908 - RNA, 32 nt, Human
cacuuugggaggccaaggcgggcggaucaccu

SEQ ID NO: 82909 - RNA, 32 nt, Human
cacuuugggaggccaaggcgggcggaucacga

SEQ ID NO: 82910 - RNA, 32 nt, Human
cacuuugggaggccaaggcgggcggaucacuu

SEQ ID NO: 82911 - RNA, 32 nt, Human
cacuuugggaggccaaggcgggcggaucauga

SEQ ID NO: 82912 - RNA, 32 nt, Human
cacuuugggaggccaaggcgggcggauuacuu

SEQ ID NO: 82913 - RNA, 32 nt, Human
cacuuugggaggccaaggcgggcggauugccu

SEQ ID NO: 82914 - RNA, 32 nt, Human
cacuuugggaggccaagguaggaggauggcuu

SEQ ID NO: 82915 - RNA, 32 nt, Human
cacuuugggaggccaagguaggaggauugcuu

SEQ ID NO: 82916 - RNA, 32 nt, Human
cacuuugggaggccaagguagguggauaccug

SEQ ID NO: 82917 - RNA, 32 nt, Human
cacuuugggaggccaaggugaguggaucaccu

SEQ ID NO: 82918 - RNA, 32 nt, Human
cacuuugggaggccaaggugggaagauugccu

SEQ ID NO: 82919 - RNA, 32 nt, Human
cacuuugggaggccaaggugggaggaccaccu

SEQ ID NO: 82920 - RNA, 32 nt, Human
cacuuugggaggccaaggugggaggaucaauu

SEQ ID NO: 82921 - RNA, 32 nt, Human
cacuuugggaggccaaggugggaggaucaccu

SEQ ID NO: 82922 - RNA, 32 nt, Human
cacuuugggaggccaaggugggaggaucacug

SEQ ID NO: 82923 - RNA, 32 nt, Human
cacuuugggaggccaaggugggaggaucacuu

SEQ ID NO: 82924 - RNA, 32 nt, Human
cacuuugggaggccaaggugggaggaucaguu

SEQ ID NO: 82925 - RNA, 32 nt, Human
cacuuugggaggccaaggugggaggaucguuu

SEQ ID NO: 82926 - RNA, 32 nt, Human
cacuuugggaggccaaggugggaggauuacuu

SEQ ID NO: 82927 - RNA, 32 nt, Human
cacuuugggaggccaaggugggaggauugcuu

SEQ ID NO: 82928 - RNA, 32 nt, Human
cacuuugggaggccaaggugggcagaucacga

SEQ ID NO: 82929 - RNA, 32 nt, Human
cacuuugggaggccaaggugggcagaucacug

SEQ ID NO: 82930 - RNA, 32 nt, Human
cacuuugggaggccaaggugggcagaucacuu

SEQ ID NO: 82931 - RNA, 32 nt, Human
cacuuugggaggccaaggugggcagaucagga

SEQ ID NO: 82932 - RNA, 32 nt, Human
cacuuugggaggccaaggugggcagaucauga

SEQ ID NO: 82933 - RNA, 32 nt, Human
cacuuugggaggccaaggugggcagaucgccu

SEQ ID NO: 82934 - RNA, 32 nt, Human
cacuuugggaggccaaggugggcagaucucaa

SEQ ID NO: 82935 - RNA, 31 nt, Human
cacuuugggaggccaaggugggugaaucacc

SEQ ID NO: 82936 - RNA, 32 nt, Human
cacuuugggaggccagggugggcagaucauga

SEQ ID NO: 82937 - RNA, 29 nt, Human
cacuuugggaggcccaggcgggcggauca

SEQ ID NO: 82938 - RNA, 32 nt, Human
cacuuugggaggcccaggcgggcggaucacaa

SEQ ID NO: 82939 - RNA, 32 nt, Human
cacuuugggaggcccaggcgggcggaucacga

SEQ ID NO: 82940 - RNA, 32 nt, Human
cacuuugggaggcccaggucaggggaucauua

SEQ ID NO: 82941 - RNA, 32 nt, Human
cacuuugggaggcccagguggggcgaucaccu

SEQ ID NO: 82942 - RNA, 32 nt, Human
cacuuugggaggccgaagugggcagaucacuu

SEQ ID NO: 82943 - RNA, 32 nt, Human
cacuuugggaggccgagacgggcagaucacga

SEQ ID NO: 82944 - RNA, 31 nt, Human
cacuuugggaggccgagaugggugaaucaug

SEQ ID NO: 82945 - RNA, 32 nt, Human
cacuuugggaggccgagaugggugaaucauga

SEQ ID NO: 82946 - RNA, 31 nt, Human
cacuuugggaggccgagauggguggaucacc

SEQ ID NO: 82947 - RNA, 31 nt, Human
cacuuugggaggccgagauggguggaucaug

SEQ ID NO: 82948 - RNA, 32 nt, Human
cacuuugggaggccgagauggguggaucauga

SEQ ID NO: 82949 - RNA, 32 nt, Human
cacuuugggaggccgaggagggcagagaucac

SEQ ID NO: 82950 - RNA, 32 nt, Human
cacuuugggaggccgaggagggcagaucacuu

SEQ ID NO: 82951 - RNA, 32 nt, Human
cacuuugggaggccgaggagggcagaucaucu

SEQ ID NO: 82952 - RNA, 32 nt, Human
cacuuugggaggccgaggagggugaaucauga

SEQ ID NO: 82953 - RNA, 32 nt, Human
cacuuugggaggccgaggcaggagaaucgcuu

SEQ ID NO: 82954 - RNA, 32 nt, Human
cacuuugggaggccgaggcaggaggaucacuu

SEQ ID NO: 82955 - RNA, 32 nt, Human
cacuuugggaggccgaggcaggaggaucgcuu

SEQ ID NO: 82956 - RNA, 32 nt, Human
cacuuugggaggccgaggcaggcugaucacga

SEQ ID NO: 82957 - RNA, 32 nt, Human
cacuuugggaggccgaggcagguggaucaaga

SEQ ID NO: 82958 - RNA, 32 nt, Human
cacuuugggaggccgaggcagguggaucacaa

SEQ ID NO: 82959 - RNA, 32 nt, Human
cacuuugggaggccgaggcagguggaucaccu

SEQ ID NO: 82960 - RNA, 32 nt, Human
cacuuugggaggccgaggcagguggaucacga

SEQ ID NO: 82961 - RNA, 32 nt, Human
cacuuugggaggccgaggcagguggaucacgu

SEQ ID NO: 82962 - RNA, 32 nt, Human
cacuuugggaggccgaggcagguggaucacuc

SEQ ID NO: 82963 - RNA, 32 nt, Human
cacuuugggaggccgaggcagguggaucacug

SEQ ID NO: 82964 - RNA, 32 nt, Human
cacuuugggaggccgaggcagguggaucacuu

SEQ ID NO: 82965 - RNA, 32 nt, Human
cacuuugggaggccgaggcagguggaucauag

SEQ ID NO: 82966 - RNA, 32 nt, Human
cacuuugggaggccgaggcagguggaucauga

SEQ ID NO: 82967 - RNA, 32 nt, Human
cacuuugggaggccgaggcagguggaucauuu

SEQ ID NO: 82968 - RNA, 32 nt, Human
cacuuugggaggccgaggcagguggaucgcuu

SEQ ID NO: 82969 - RNA, 32 nt, Human
cacuuugggaggccgaggcagguggaugacaa

SEQ ID NO: 82970 - RNA, 32 nt, Human
cacuuugggaggccgaggcagguggauugccu

SEQ ID NO: 82971 - RNA, 32 nt, Human
cacuuugggaggccgaggcaggugguucaucu

SEQ ID NO: 82972 - RNA, 32 nt, Human
cacuuugggaggccgaggcaguuggauuacuu

SEQ ID NO: 82973 - RNA, 32 nt, Human
cacuuugggaggccgaggccaguggaucaccu

SEQ ID NO: 82974 - RNA, 32 nt, Human
cacuuugggaggccgaggccggugauucacaa

SEQ ID NO: 82975 - RNA, 32 nt, Human
cacuuugggaggccgaggccgguggaucacuu

SEQ ID NO: 82976 - RNA, 32 nt, Human
cacuuugggaggccgaggcgaguggaucacga

SEQ ID NO: 82977 - RNA, 32 nt, Human
cacuuugggaggccgaggcgaguggauuuccu

SEQ ID NO: 82978 - RNA, 32 nt, Human
cacuuugggaggccgaggcggaaggaaggcuu

SEQ ID NO: 82979 - RNA, 32 nt, Human
cacuuugggaggccgaggcggacagaucacga

SEQ ID NO: 82980 - RNA, 32 nt, Human
cacuuugggaggccgaggcggacggaucacga

SEQ ID NO: 82981 - RNA, 32 nt, Human
cacuuugggaggccgaggcggccagaucacgg

SEQ ID NO: 82982 - RNA, 32 nt, Human
cacuuugggaggccgaggcggcugaaucacuu

SEQ ID NO: 82983 - RNA, 32 nt, Human
cacuuugggaggccgaggcgggaggaucaccu

SEQ ID NO: 82984 - RNA, 32 nt, Human
cacuuugggaggccgaggcgggaggaucacuu

SEQ ID NO: 82985 - RNA, 32 nt, Human
cacuuugggaggccgaggcgggcagaucacaa

SEQ ID NO: 82986 - RNA, 32 nt, Human
cacuuugggaggccgaggcgggcagaucaccu

SEQ ID NO: 82987 - RNA, 32 nt, Human
cacuuugggaggccgaggcgggcagaucacga

SEQ ID NO: 82988 - RNA, 32 nt, Human
cacuuugggaggccgaggcgggcagaucacuu

SEQ ID NO: 82989 - RNA, 32 nt, Human
cacuuugggaggccgaggcgggcagaucauga

SEQ ID NO: 82990 - RNA, 32 nt, Human
cacuuugggaggccgaggcgggcagaugaccu

SEQ ID NO: 82991 - RNA, 32 nt, Human
cacuuugggaggccgaggcgggccgaucacga

SEQ ID NO: 82992 - RNA, 32 nt, Human
cacuuugggaggccgaggcgggcggaucaacu

SEQ ID NO: 82993 - RNA, 32 nt, Human
cacuuugggaggccgaggcgggcggaucaaua

SEQ ID NO: 82994 - RNA, 32 nt, Human
cacuuugggaggccgaggcgggcggaucacaa

SEQ ID NO: 82995 - RNA, 32 nt, Human
cacuuugggaggccgaggcgggcggaucacac

SEQ ID NO: 82996 - RNA, 32 nt, Human
cacuuugggaggccgaggcgggcggaucaccg

SEQ ID NO: 82997 - RNA, 32 nt, Human
cacuuugggaggccgaggcgggcggaucaccu

SEQ ID NO: 82998 - RNA, 32 nt, Human
cacuuugggaggccgaggcgggcggaucacga

SEQ ID NO: 82999 - RNA, 32 nt, Human
cacuuugggaggccgaggcgggcggaucacua

SEQ ID NO: 83000 - RNA, 32 nt, Human
cacuuugggaggccgaggcgggcggaucacuu

SEQ ID NO: 83001 - RNA, 32 nt, Human
cacuuugggaggccgaggcgggcggaucagac

SEQ ID NO: 83002 - RNA, 32 nt, Human
cacuuugggaggccgaggcgggcggaucauga

SEQ ID NO: 83003 - RNA, 32 nt, Human
cacuuugggaggccgaggcgggcggaucgcuu

SEQ ID NO: 83004 - RNA, 32 nt, Human
cacuuugggaggccgaggcgggcggaucucga

SEQ ID NO: 83005 - RNA, 32 nt, Human
cacuuugggaggccgaggcgggcggaugaccu

SEQ ID NO: 83006 - RNA, 32 nt, Human
cacuuugggaggccgaggcgggcggaugaguu

SEQ ID NO: 83007 - RNA, 32 nt, Human
cacuuugggaggccgaggcgggcggcucacga

SEQ ID NO: 83008 - RNA, 32 nt, Human
cacuuugggaggccgaggcgggcgggucacga

SEQ ID NO: 83009 - RNA, 32 nt, Human
cacuuugggaggccgaggcggggagaucaccu

SEQ ID NO: 83010 - RNA, 32 nt, Human
cacuuugggaggccgaggcgggugaaucauga

SEQ ID NO: 83011 - RNA, 32 nt, Human
cacuuugggaggccgaggcgggugaucacuug

SEQ ID NO: 83012 - RNA, 32 nt, Human
cacuuugggaggccgaggcggguggaccaccu

SEQ ID NO: 83013 - RNA, 32 nt, Human
cacuuugggaggccgaggcggguggaucacaa

SEQ ID NO: 83014 - RNA, 32 nt, Human
cacuuugggaggccgaggcggguggaucaccu

SEQ ID NO: 83015 - RNA, 32 nt, Human
cacuuugggaggccgaggcggguggaucacga

SEQ ID NO: 83016 - RNA, 32 nt, Human
cacuuugggaggccgaggcggguggaucacuu

SEQ ID NO: 83017 - RNA, 32 nt, Human
cacuuugggaggccgaggcggguggaucagaa

SEQ ID NO: 83018 - RNA, 32 nt, Human
cacuuugggaggccgaggcggguggaucauga

SEQ ID NO: 83019 - RNA, 32 nt, Human
cacuuugggaggccgaggcggguggaucaugu

SEQ ID NO: 83020 - RNA, 32 nt, Human
cacuuugggaggccgaggcggguggaucauuu

SEQ ID NO: 83021 - RNA, 32 nt, Human
cacuuugggaggccgaggcggguggguuacuu

SEQ ID NO: 83022 - RNA, 32 nt, Human
cacuuugggaggccgaggcggucggaucacga

SEQ ID NO: 83023 - RNA, 32 nt, Human
cacuuugggaggccgaggcugggggauugcuu

SEQ ID NO: 83024 - RNA, 32 nt, Human
cacuuugggaggccgaggggaguggaucaccu

SEQ ID NO: 83025 - RNA, 32 nt, Human
cacuuugggaggccgaggggaguggaucacuu

SEQ ID NO: 83026 - RNA, 32 nt, Human
cacuuugggaggccgaggucaggaguuggaga

SEQ ID NO: 83027 - RNA, 32 nt, Human
cacuuugggaggccgaggugaaaggaucacuu

SEQ ID NO: 83028 - RNA, 32 nt, Human
cacuuugggaggccgaggugaguggaucaccu

SEQ ID NO: 83029 - RNA, 32 nt, Human
cacuuugggaggccgaggugcauggaucacuu

SEQ ID NO: 83030 - RNA, 32 nt, Human
cacuuugggaggccgagguggauggaucacga

SEQ ID NO: 83031 - RNA, 32 nt, Human
cacuuugggaggccgaggugggaggaucacuu

SEQ ID NO: 83032 - RNA, 32 nt, Human
cacuuugggaggccgaggugggaggaucgcuu

SEQ ID NO: 83033 - RNA, 32 nt, Human
cacuuugggaggccgaggugggaggauugcuu

SEQ ID NO: 83034 - RNA, 32 nt, Human
cacuuugggaggccgaggugggcagaucacaa

SEQ ID NO: 83035 - RNA, 32 nt, Human
cacuuugggaggccgaggugggcagaucaccg

SEQ ID NO: 83036 - RNA, 32 nt, Human
cacuuugggaggccgaggugggcagaucaccu

SEQ ID NO: 83037 - RNA, 32 nt, Human
cacuuugggaggccgaggugggcagaucacga

SEQ ID NO: 83038 - RNA, 32 nt, Human
cacuuugggaggccgaggugggcagaucacuu

SEQ ID NO: 83039 - RNA, 32 nt, Human
cacuuugggaggccgaggugggcagaucagcu

SEQ ID NO: 83040 - RNA, 32 nt, Human
cacuuugggaggccgaggugggcagaucagga

SEQ ID NO: 83041 - RNA, 32 nt, Human
cacuuugggaggccgaggugggcagaucauga

SEQ ID NO: 83042 - RNA, 32 nt, Human
cacuuugggaggccgaggugggcagaucaugg

SEQ ID NO: 83043 - RNA, 32 nt, Human
cacuuugggaggccgaggugggcugaucacga

SEQ ID NO: 83044 - RNA, 31 nt, Human
cacuuugggaggccgaggugggugaaucacc

SEQ ID NO: 83045 - RNA, 32 nt, Human
cacuuugggaggccgaggugggugaaucacca

SEQ ID NO: 83046 - RNA, 32 nt, Human
cacuuugggaggccgagguggguggauggauc

SEQ ID NO: 83047 - RNA, 32 nt, Human
cacuuugggaggccgagguuggaggaucacuu

SEQ ID NO: 83048 - RNA, 32 nt, Human
cacuuugggaggccgaguugggggcgaucacc

SEQ ID NO: 83049 - RNA, 32 nt, Human
cacuuugggaggccgaugugggcagaucacaa

SEQ ID NO: 83050 - RNA, 32 nt, Human
cacuuugggaggccgugaugggcagaucacuu

SEQ ID NO: 83051 - RNA, 32 nt, Human
cacuuugggaggccuaggcgggcagaucaccu

SEQ ID NO: 83052 - RNA, 32 nt, Human
cacuuugggaggccuaggcgggcggaucacga

SEQ ID NO: 83053 - RNA, 32 nt, Human
cacuuugggaggccuaggugggcagaucauga

SEQ ID NO: 83054 - RNA, 32 nt, Human
cacuuugggaggcggaggcaggaggaucucuu

SEQ ID NO: 83055 - RNA, 32 nt, Human
cacuuugggaggcggaggcggguggauccauu

SEQ ID NO: 83056 - RNA, 32 nt, Human
cacuuugggaggcggaggugagcagaucaccu

SEQ ID NO: 83057 - RNA, 32 nt, Human
cacuuugggaggcuaaggugggcagaucacuu

SEQ ID NO: 83058 - RNA, 31 nt, Human
cacuuugggaggcuacgauggguggaucacc

SEQ ID NO: 83059 - RNA, 32 nt, Human
cacuuugggaggcuacggugggcagaucaucu

SEQ ID NO: 83060 - RNA, 32 nt, Human
cacuuugggaggcugaagggggcagauuagcu

SEQ ID NO: 83061 - RNA, 32 nt, Human
cacuuugggaggcugaaguaggaggaucgucu

SEQ ID NO: 83062 - RNA, 32 nt, Human
cacuuugggaggcugaagugggcagaucacga

SEQ ID NO: 83063 - RNA, 32 nt, Human
cacuuugggaggcugaagugggcagauuacuu

SEQ ID NO: 83064 - RNA, 32 nt, Human
cacuuugggaggcugacgugggcagaucauga

SEQ ID NO: 83065 - RNA, 32 nt, Human
cacuuugggaggcugagacgggcagaucaccu

SEQ ID NO: 83066 - RNA, 32 nt, Human
cacuuugggaggcugagaugggcagaucacuu

SEQ ID NO: 83067 - RNA, 31 nt, Human
cacuuugggaggcugagauggguggauugcu

SEQ ID NO: 83068 - RNA, 32 nt, Human
cacuuugggaggcugagauggguggauugcuu

SEQ ID NO: 83069 - RNA, 32 nt, Human
cacuuugggaggcugaggaggaaggauagcuu

SEQ ID NO: 83070 - RNA, 32 nt, Human
cacuuugggaggcugaggagggcagaucacuu

SEQ ID NO: 83071 - RNA, 32 nt, Human
cacuuugggaggcugaggcaaguggaucacuu

SEQ ID NO: 83072 - RNA, 32 nt, Human
cacuuugggaggcugaggcaggaagcacacug

SEQ ID NO: 83073 - RNA, 32 nt, Human
cacuuugggaggcugaggcaggagaaucacuu

SEQ ID NO: 83074 - RNA, 32 nt, Human
cacuuugggaggcugaggcaggaggacuguuu

SEQ ID NO: 83075 - RNA, 32 nt, Human
cacuuugggaggcugaggcaggaggaggauaa

SEQ ID NO: 83076 - RNA, 32 nt, Human
cacuuugggaggcugaggcaggaggauagcuu

SEQ ID NO: 83077 - RNA, 32 nt, Human
cacuuugggaggcugaggcaggaggaucacuu

SEQ ID NO: 83078 - RNA, 32 nt, Human
cacuuugggaggcugaggcaggaggauuguuu

SEQ ID NO: 83079 - RNA, 32 nt, Human
cacuuugggaggcugaggcaggcugaucacuu

SEQ ID NO: 83080 - RNA, 32 nt, Human
cacuuugggaggcugaggcaggugaaucacuu

SEQ ID NO: 83081 - RNA, 32 nt, Human
cacuuugggaggcugaggcagguggaucacaa

SEQ ID NO: 83082 - RNA, 32 nt, Human
cacuuugggaggcugaggcagguggaucaccu

SEQ ID NO: 83083 - RNA, 32 nt, Human
cacuuugggaggcugaggcagguggaucacga

SEQ ID NO: 83084 - RNA, 32 nt, Human
cacuuugggaggcugaggcagguggaucacug

SEQ ID NO: 83085 - RNA, 32 nt, Human
cacuuugggaggcugaggcagguggaucacuu

SEQ ID NO: 83086 - RNA, 32 nt, Human
cacuuugggaggcugaggcagguggaucgccu

SEQ ID NO: 83087 - RNA, 32 nt, Human
cacuuugggaggcugaggcagguggauugccu

SEQ ID NO: 83088 - RNA, 32 nt, Human
cacuuugggaggcugaggcagguggauugcgu

SEQ ID NO: 83089 - RNA, 32 nt, Human
cacuuugggaggcugaggcagguggauugcuu

SEQ ID NO: 83090 - RNA, 32 nt, Human
cacuuugggaggcugaggcagguggcucacuu

SEQ ID NO: 83091 - RNA, 32 nt, Human
cacuuugggaggcugaggcaggugguucacug

SEQ ID NO: 83092 - RNA, 32 nt, Human
cacuuugggaggcugaggcaguugagaccagg

SEQ ID NO: 83093 - RNA, 32 nt, Human
cacuuugggaggcugaggccgguggaucaccu

SEQ ID NO: 83094 - RNA, 32 nt, Human
cacuuugggaggcugaggcgaguggaucacaa

SEQ ID NO: 83095 - RNA, 32 nt, Human
cacuuugggaggcugaggcgcguggaucaccu

SEQ ID NO: 83096 - RNA, 32 nt, Human
cacuuugggaggcugaggcggccggaucacaa

SEQ ID NO: 83097 - RNA, 32 nt, Human
cacuuugggaggcugaggcgggaggaucaauu

SEQ ID NO: 83098 - RNA, 32 nt, Human
cacuuugggaggcugaggcgggaggaucacaa

SEQ ID NO: 83099 - RNA, 32 nt, Human
cacuuugggaggcugaggcgggcagaucaacu

SEQ ID NO: 83100 - RNA, 32 nt, Human
cacuuugggaggcugaggcgggcagaucacaa

SEQ ID NO: 83101 - RNA, 32 nt, Human
cacuuugggaggcugaggcgggcagaucaccu

SEQ ID NO: 83102 - RNA, 32 nt, Human
cacuuugggaggcugaggcgggcagaucacga

SEQ ID NO: 83103 - RNA, 32 nt, Human
cacuuugggaggcugaggcgggcagaucauuc

SEQ ID NO: 83104 - RNA, 32 nt, Human
cacuuugggaggcugaggcgggcagaucgcga

SEQ ID NO: 83105 - RNA, 32 nt, Human
cacuuugggaggcugaggcgggcagauugcuu

SEQ ID NO: 83106 - RNA, 32 nt, Human
cacuuugggaggcugaggcgggcggaacaccu

SEQ ID NO: 83107 - RNA, 32 nt, Human
cacuuugggaggcugaggcgggcggauagcuu

SEQ ID NO: 83108 - RNA, 32 nt, Human
cacuuugggaggcugaggcgggcggaucacaa

SEQ ID NO: 83109 - RNA, 32 nt, Human
cacuuugggaggcugaggcgggcggaucaccu

SEQ ID NO: 83110 - RNA, 32 nt, Human
cacuuugggaggcugaggcgggcggaucacga

SEQ ID NO: 83111 - RNA, 32 nt, Human
cacuuugggaggcugaggcgggcggaucacua

SEQ ID NO: 83112 - RNA, 32 nt, Human
cacuuugggaggcugaggcgggcggaucauga

SEQ ID NO: 83113 - RNA, 32 nt, Human
cacuuugggaggcugaggcggggagaucacaa

SEQ ID NO: 83114 - RNA, 32 nt, Human
cacuuugggaggcugaggcggguagaucacaa

SEQ ID NO: 83115 - RNA, 32 nt, Human
cacuuugggaggcugaggcgggugaaucacga

SEQ ID NO: 83116 - RNA, 32 nt, Human
cacuuugggaggcugaggcgggugaaucauga

SEQ ID NO: 83117 - RNA, 32 nt, Human
cacuuugggaggcugaggcggguggaucaaga

SEQ ID NO: 83118 - RNA, 32 nt, Human
cacuuugggaggcugaggcggguggaucacaa

SEQ ID NO: 83119 - RNA, 32 nt, Human
cacuuugggaggcugaggcggguggaucaccu

SEQ ID NO: 83120 - RNA, 32 nt, Human
cacuuugggaggcugaggcggguggaucacga

SEQ ID NO: 83121 - RNA, 32 nt, Human
cacuuugggaggcugaggcggguggaucacua

SEQ ID NO: 83122 - RNA, 32 nt, Human
cacuuugggaggcugaggcggguggaucacuu

SEQ ID NO: 83123 - RNA, 32 nt, Human
cacuuugggaggcugaggcggguggaucaucu

SEQ ID NO: 83124 - RNA, 32 nt, Human
cacuuugggaggcugaggcggguggaucauga

SEQ ID NO: 83125 - RNA, 32 nt, Human
cacuuugggaggcugaggcggguggaucugcu

SEQ ID NO: 83126 - RNA, 32 nt, Human
cacuuugggaggcugaggcggguggauugcuu

SEQ ID NO: 83127 - RNA, 32 nt, Human
cacuuugggaggcugaggcgggugggucaccu

SEQ ID NO: 83128 - RNA, 32 nt, Human
cacuuugggaggcugaggcggguugaucaccu

SEQ ID NO: 83129 - RNA, 32 nt, Human
cacuuugggaggcugaggcuggaggacugcug

SEQ ID NO: 83130 - RNA, 32 nt, Human
cacuuugggaggcugaggcugggggaucaccu

SEQ ID NO: 83131 - RNA, 32 nt, Human
cacuuugggaggcugagguaggaggacugcuu

SEQ ID NO: 83132 - RNA, 32 nt, Human
cacuuugggaggcugagguaggaggaucacgu

SEQ ID NO: 83133 - RNA, 32 nt, Human
cacuuugggaggcugagguaggaggaucgcuu

SEQ ID NO: 83134 - RNA, 32 nt, Human
cacuuugggaggcugagguaggaggauugauu

SEQ ID NO: 83135 - RNA, 32 nt, Human
cacuuugggaggcugagguagguggaucauga

SEQ ID NO: 83136 - RNA, 32 nt, Human
cacuuugggaggcugaggucaggaguuugaga

SEQ ID NO: 83137 - RNA, 32 nt, Human
cacuuugggaggcugaggugagaggaucgcuu

SEQ ID NO: 83138 - RNA, 32 nt, Human
cacuuugggaggcugaggugaguggauuacaa

SEQ ID NO: 83139 - RNA, 32 nt, Human
cacuuugggaggcugagguggaaggaucgcuu

SEQ ID NO: 83140 - RNA, 32 nt, Human
cacuuugggaggcugaggugggaggaucgcuu

SEQ ID NO: 83141 - RNA, 32 nt, Human
cacuuugggaggcugaggugggcagaucaacu

SEQ ID NO: 83142 - RNA, 32 nt, Human
cacuuugggaggcugaggugggcagaucacaa

SEQ ID NO: 83143 - RNA, 32 nt, Human
cacuuugggaggcugaggugggcagaucaccu

SEQ ID NO: 83144 - RNA, 32 nt, Human
cacuuugggaggcugaggugggcagaucacga

SEQ ID NO: 83145 - RNA, 32 nt, Human
cacuuugggaggcugaggugggcagaucacuu

SEQ ID NO: 83146 - RNA, 32 nt, Human
cacuuugggaggcugaggugggcagaucauuu

SEQ ID NO: 83147 - RNA, 32 nt, Human
cacuuugggaggcugaggugggcagaucgcuu

SEQ ID NO: 83148 - RNA, 32 nt, Human
cacuuugggaggcugaggugggcugacugcuu

SEQ ID NO: 83149 - RNA, 32 nt, Human
cacuuugggaggcugaguugcuugagccugag

SEQ ID NO: 83150 - RNA, 31 nt, Human
cacuuugggaggucaagaugggaggauugcu

SEQ ID NO: 83151 - RNA, 32 nt, Human
cacuuugggaggucgaggcgggcagaucacuu

SEQ ID NO: 83152 - RNA, 32 nt, Human
cacuuugggaggucgaggcgggcagaucuccu

SEQ ID NO: 83153 - RNA, 32 nt, Human
cacuuugggaggucgaggugggcagaucaccu

SEQ ID NO: 83154 - RNA, 32 nt, Human
cacuuugggaggugcaggcaggcagauggcuu

SEQ ID NO: 83155 - RNA, 32 nt, Human
cacuuugggagguggaggcagguggaucacga

SEQ ID NO: 83156 - RNA, 32 nt, Human
cacuuugggagguggaggcggguggaucacaa

SEQ ID NO: 83157 - RNA, 32 nt, Human
cacuuugggagguugaggcgggcagauuaccu

SEQ ID NO: 83158 - RNA, 32 nt, Human
cacuuugggagguugaggugggcagaucgccu

SEQ ID NO: 83159 - RNA, 32 nt, Human
cacuuugggaugccauggcgggcagaucaccu

SEQ ID NO: 83160 - RNA, 32 nt, Human
cacuuugggaugcugaggcgggcggaucacuu

SEQ ID NO: 83161 - RNA, 32 nt, Human
cacuuugggauuccgaggcggguggaucacau

SEQ ID NO: 83162 - RNA, 32 nt, Human
cacuuuggggagcccaggcgggcagauugcuu

SEQ ID NO: 83163 - RNA, 32 nt, Human
cacuuuggggagcugaggcgggcggaucacga

SEQ ID NO: 83164 - RNA, 32 nt, Human
cacuuugggucugaggagccccuggcagaguc

SEQ ID NO: 83165 - RNA, 32 nt, Human
cacuuuggguggccaaggcgggcagaugacuu

SEQ ID NO: 83166 - RNA, 32 nt, Human
cacuuuggguggucaaggcaggaagauaccuc

SEQ ID NO: 83167 - RNA, 32 nt, Human
cacuuugguagaccgaagugggcagaucaccu

SEQ ID NO: 83168 - RNA, 32 nt, Human
cacuuugguaggcaaaggugggaggaucauuu

SEQ ID NO: 83169 - RNA, 32 nt, Human
cacuuugguaggccaagauggcuggaucaccu

SEQ ID NO: 83170 - RNA, 32 nt, Human
cacuuugguugggugaagcgggcagaucacuu

SEQ ID NO: 83171 - RNA, 32 nt, Human
cacuuuguaacccaggcuggaaugcaauggca

SEQ ID NO: 83172 - RNA, 32 nt, Human
cacuuuguaucuggaaaaucacuuuggggucc

SEQ ID NO: 83173 - RNA, 32 nt, Human
cacuuugucacccaggcuagagugcaguggca

SEQ ID NO: 83174 - RNA, 32 nt, Human
cacuuugucacccaggcuagagugcaguggug

SEQ ID NO: 83175 - RNA, 32 nt, Human
cacuuugucacccaggcuggaaugcaguggca

SEQ ID NO: 83176 - RNA, 32 nt, Human
cacuuugucacccaggcuggagugcaauggcg

SEQ ID NO: 83177 - RNA, 32 nt, Human
cacuuugucacccaggcuggagugcaguggca

SEQ ID NO: 83178 - RNA, 32 nt, Human
cacuuugucccccaggcuggagugcaguggua

SEQ ID NO: 83179 - RNA, 32 nt, Human
cacuuugucgcccaggccggagugcaguggug

SEQ ID NO: 83180 - RNA, 32 nt, Human
cacuuugucgcccaggcuggaguacaguggug

SEQ ID NO: 83181 - RNA, 32 nt, Human
cacuuugucgcccaggcuggagugcaguggca

SEQ ID NO: 83182 - RNA, 32 nt, Human
cacuuugucgcccaggcuggagugcaguggug

SEQ ID NO: 83183 - RNA, 32 nt, Human
cacuuugucgcccgggcaggagugcaguggcu

SEQ ID NO: 83184 - RNA, 32 nt, Human
cacuuugugaggcugaggugggcagaucacga

SEQ ID NO: 83185 - RNA, 32 nt, Human
cacuuugugagugcuuguucagugaguaagca

SEQ ID NO: 83186 - RNA, 32 nt, Human
cacuuugugccccuaucugcccaugaaaacag

SEQ ID NO: 83187 - RNA, 32 nt, Human
cacuuugugcccuagacuggagugcaauggcg

SEQ ID NO: 83188 - RNA, 32 nt, Human
cacuuuguggugugacuccggugccuccuggu

SEQ ID NO: 83189 - RNA, 32 nt, Human
cacuuuguuacccaggcuggagugcaguggca

SEQ ID NO: 83190 - RNA, 32 nt, Human
cacuuuguugcccaggcuagucucaaacuccu

SEQ ID NO: 83191 - RNA, 32 nt, Human
cacuuuguugcccaggcuggagcgcagugggg

SEQ ID NO: 83192 - RNA, 32 nt, Human
cacuuuguugcccaggcuggagugcagugguc

SEQ ID NO: 83193 - RNA, 32 nt, Human
cacuuuguugcccaggcuggagugcgguggcg

SEQ ID NO: 83194 - RNA, 32 nt, Human
cacuuuguuucaggcuggucugugccccguga

SEQ ID NO: 83195 - RNA, 32 nt, Human
cacuuuguuucuucaccuugauuugcacuuua

SEQ ID NO: 83196 - RNA, 32 nt, Human
cacuuuuaaacaguaaccaaaucuaaauuuaa

SEQ ID NO: 83197 - RNA, 32 nt, Human
cacuuuuaauacugcaacugcucccuuuugcc

SEQ ID NO: 83198 - RNA, 32 nt, Human
cacuuuuagaaacuguaucaucaaagauuuuc

SEQ ID NO: 83199 - RNA, 32 nt, Human
cacuuuuagaacuaugguacuacuuuuguuaa

SEQ ID NO: 83200 - RNA, 32 nt, Human
cacuuuuagaggcugaggcaggagaauugguu

SEQ ID NO: 83201 - RNA, 32 nt, Human
cacuuuuagcucuuugcaucuuccuucagugu

SEQ ID NO: 83202 - RNA, 32 nt, Human
cacuuuuauauacucuucuaguuucuauggcu

SEQ ID NO: 83203 - RNA, 32 nt, Human
cacuuuuauuuggggguguggacagcugcuuu

SEQ ID NO: 83204 - RNA, 32 nt, Human
cacuuuucauauucuuaaaauaaucuucacuu

SEQ ID NO: 83205 - RNA, 32 nt, Human
cacuuuucauuugcuccugugauacuaacaac

SEQ ID NO: 83206 - RNA, 32 nt, Human
cacuuuuccacuuuugauaagauguaaauauu

SEQ ID NO: 83207 - RNA, 31 nt, Human
cacuuuuccagagugaaauguaggagggagc

SEQ ID NO: 83208 - RNA, 32 nt, Human
cacuuuuccuuuucuauuccauaguacuaguu

SEQ ID NO: 83209 - RNA, 32 nt, Human
cacuuuucguggggcucucuggaggacuuuuc

SEQ ID NO: 83210 - RNA, 32 nt, Human
cacuuuucucucugacuuuguacaugucaccu

SEQ ID NO: 83211 - RNA, 32 nt, Human
cacuuuucuggcgcuggagugugcagggcgua

SEQ ID NO: 83212 - RNA, 32 nt, Human
cacuuuucuuguuccauucaaacaucugaaaa

SEQ ID NO: 83213 - RNA, 32 nt, Human
cacuuuucuuugccuuuccugagaguuuuauu

SEQ ID NO: 83214 - RNA, 32 nt, Human
cacuuuucuuuuucucaaccuucacauccagu

SEQ ID NO: 83215 - RNA, 32 nt, Human
cacuuuugagaccagcuggcuuuguagucacu

SEQ ID NO: 83216 - RNA, 32 nt, Human
cacuuuugcccaggcuggagugcaguggcgug

SEQ ID NO: 83217 - RNA, 32 nt, Human
cacuuuugcugguuccagucaaaucaauggca

SEQ ID NO: 83218 - RNA, 32 nt, Human
cacuuuugcuguucuugugaauguuagaucuu

SEQ ID NO: 83219 - RNA, 32 nt, Human
cacuuuuggaaauguaucgcagagaaguaacc

SEQ ID NO: 83220 - RNA, 32 nt, Human
cacuuuuggaggccaaggugggcagauccccu

SEQ ID NO: 83221 - RNA, 32 nt, Human
cacuuuuggaggcccaggcgggcggaucaccu

SEQ ID NO: 83222 - RNA, 31 nt, Human
cacuuuuggaggccgagauggguggaucauc

SEQ ID NO: 83223 - RNA, 32 nt, Human
cacuuuuggaggcugaggcgggcagaucacuu

SEQ ID NO: 83224 - RNA, 32 nt, Human
cacuuuuggaggcugaggcggguggauugcuu

SEQ ID NO: 83225 - RNA, 32 nt, Human
cacuuuugggggccgaggcggguggaucaccu

SEQ ID NO: 83226 - RNA, 32 nt, Human
cacuuuuuaaguuugaagagccauuuugguaa

SEQ ID NO: 83227 - RNA, 32 nt, Human
cacuuuuuacauauauguacauaguauuguuu

SEQ ID NO: 83228 - RNA, 32 nt, Human
cacuuuuuacauuuagaaacacugugauuaga

SEQ ID NO: 83229 - RNA, 32 nt, Human
cacuuuuuacucuguguuaccauuuugacugg

SEQ ID NO: 83230 - RNA, 32 nt, Human
cacuuuuuacuuucugcuaucucccaucuccc

SEQ ID NO: 83231 - RNA, 32 nt, Human
cacuuuuucacugcaugcuuacaauucccaaa

SEQ ID NO: 83232 - RNA, 32 nt, Human
cacuuuuugaaggacaaguauaugugggucua

SEQ ID NO: 83233 - RNA, 32 nt, Human
cacuuuuuggugggccagaaaagcagggacaa

SEQ ID NO: 83234 - RNA, 32 nt, Human
cacuuuuuguuaauguugcugccucauugacc

SEQ ID NO: 83235 - RNA, 20 nt, Human
cacuuuuuugaggcaggaag

SEQ ID NO: 83236 - RNA, 32 nt, Human
cagaaaaacauacaagacuccuucagccaaca

SEQ ID NO: 83237 - RNA, 32 nt, Human
cagaaaaagaguuuuucucuuguucagccugc

SEQ ID NO: 83238 - RNA, 32 nt, Human
cagaaaaagaugaguuguaacacugaucugcu

SEQ ID NO: 83239 - RNA, 23 nt, Human
cagaaaaauaauaaagcaaagaa

SEQ ID NO: 83240 - RNA, 22 nt, Human
cagaaaaauccugccuaaggca

SEQ ID NO: 83241 - RNA, 32 nt, Human
cagaaaaauggcagccgccgcuccggacucac

SEQ ID NO: 83242 - RNA, 19 nt, Human
cagaaaaauuaagugaaga

SEQ ID NO: 83243 - RNA, 32 nt, Human
cagaaaacaacagcucaagccccagggguggc

SEQ ID NO: 83244 - RNA, 32 nt, Human
cagaaaacacaaaugcaaagucaaguggaggg

SEQ ID NO: 83245 - RNA, 32 nt, Human
cagaaaacagacuuguaaaaagcuuagaucau

SEQ ID NO: 83246 - RNA, 20 nt, Human
cagaaaacagcuucacuccu

SEQ ID NO: 83247 - RNA, 32 nt, Human
cagaaaacaggaggcugccacucuccaucuuu

SEQ ID NO: 83248 - RNA, 23 nt, Human
cagaaaacauagccaccauuuug

SEQ ID NO: 83249 - RNA, 32 nt, Human
cagaaaacccugugagauggccagucuucaua

SEQ ID NO: 83250 - RNA, 32 nt, Human
cagaaaacccugugccagggacaggaaagaua

SEQ ID NO: 83251 - RNA, 32 nt, Human
cagaaaacccuucaaaaguucagucuagucug

SEQ ID NO: 83252 - RNA, 32 nt, Human
cagaaaaccuauauccuaugauacaacucuaa

SEQ ID NO: 83253 - RNA, 32 nt, Human
cagaaaaccuuccagucucugagcucuaagga

SEQ ID NO: 83254 - RNA, 32 nt, Human
cagaaaacuacccuuguuuuucaugucuuuca

SEQ ID NO: 83255 - RNA, 32 nt, Human
cagaaaacuauacuuuggucugcuucuacagu

SEQ ID NO: 83256 - RNA, 32 nt, Human
cagaaaacugggugguagcgugucugaaccaa

SEQ ID NO: 83257 - RNA, 32 nt, Human
cagaaaagaagaggcagaaauccaagcagaac

SEQ ID NO: 83258 - RNA, 32 nt, Human
cagaaaagaagugcuacagcucugugccuguc

SEQ ID NO: 83259 - RNA, 32 nt, Human
cagaaaagaauguuucaggccauguucagggg

SEQ ID NO: 83260 - RNA, 32 nt, Human
cagaaaagaggaagaggagaauggauguuggg

SEQ ID NO: 83261 - RNA, 32 nt, Human
cagaaaagaggaugcuuuucugcuuaccaugg

SEQ ID NO: 83262 - RNA, 32 nt, Human
cagaaaagagugggacagggacaagcauaucu

SEQ ID NO: 83263 - RNA, 32 nt, Human
cagaaaagcuacaacauggaaaacaggccucc

SEQ ID NO: 83264 - RNA, 32 nt, Human
cagaaaaggagagguugacagucauccacaag

SEQ ID NO: 83265 - RNA, 32 nt, Human
cagaaaaggcuucucuugauacaucaagcauu

SEQ ID NO: 83266 - RNA, 32 nt, Human
cagaaaaggugucacacggcugccuguaccuu

SEQ ID NO: 83267 - RNA, 32 nt, Human
cagaaaaguggaccuugggggcugguucugcu

SEQ ID NO: 83268 - RNA, 23 nt, Human
cagaaaagugggcagugguggca

SEQ ID NO: 83269 - RNA, 32 nt, Human
cagaaaaguugugucucccuuagaugagaucu

SEQ ID NO: 83270 - RNA, 21 nt, Human
cagaaaauaauaggcucauag

SEQ ID NO: 83271 - RNA, 24 nt, Human
cagaaaauaccuuagcuucacuca

SEQ ID NO: 83272 - RNA, 32 nt, Human
cagaaaauagacguauaaaugugcacaugcgu

SEQ ID NO: 83273 - RNA, 32 nt, Human
cagaaaaucaaggcaaagagggugggugaacc

SEQ ID NO: 83274 - RNA, 31 nt, Human
cagaaaaugaacacauugcaggucugcagac

SEQ ID NO: 83275 - RNA, 32 nt, Human
cagaaaaugaacacccuugugauagaauuacc

SEQ ID NO: 83276 - RNA, 32 nt, Human
cagaaaauguuuagaguguuuuaguuuucauu

SEQ ID NO: 83277 - RNA, 23 nt, Human
cagaaaauguuucuuuucuuuca

SEQ ID NO: 83278 - RNA, 32 nt, Human
cagaaaauuaaaaggcaaaacaauggacaucu

SEQ ID NO: 83279 - RNA, 22 nt, Human
cagaaaauuaaaauauacucca

SEQ ID NO: 83280 - RNA, 26 nt, Human
cagaaaauuagacagguaugguggca

SEQ ID NO: 83281 - RNA, 32 nt, Human
cagaaaauugaagaguacuggaaaugguaacu

SEQ ID NO: 83282 - RNA, 32 nt, Human
cagaaaauugcaaccuccaccagaccacaagg

SEQ ID NO: 83283 - RNA, 32 nt, Human
cagaaacaagggacagugaaacacccagagac

SEQ ID NO: 83284 - RNA, 32 nt, Human
cagaaacacaaacccguguggacuccgggagg

SEQ ID NO: 83285 - RNA, 32 nt, Human
cagaaacacaaccacucaccaguccuaguuuu

SEQ ID NO: 83286 - RNA, 20 nt, Human
cagaaacacaaucucaggga

SEQ ID NO: 83287 - RNA, 32 nt, Human
cagaaacacagccggugcgcgcagggcggcag

SEQ ID NO: 83288 - RNA, 32 nt, Human
cagaaacacccaggccgagcaggaugagcagg

SEQ ID NO: 83289 - RNA, 18 nt, Human
cagaaacacucccaggga

SEQ ID NO: 83290 - RNA, 32 nt, Human
cagaaacacuucagaagcaaugggggcagaga

SEQ ID NO: 83291 - RNA, 32 nt, Human
cagaaacagauggaaaaaggagccaucagcac

SEQ ID NO: 83292 - RNA, 32 nt, Human
cagaaacagcuuggccagcuuugugaaccuuu

SEQ ID NO: 83293 - RNA, 32 nt, Human
cagaaacaggagcacagaccucugcuguagcu

SEQ ID NO: 83294 - RNA, 32 nt, Human
cagaaacagggagccaguuacagaucuauccc

SEQ ID NO: 83295 - RNA, 21 nt, Human
cagaaacaguugauugacaca

SEQ ID NO: 83296 - RNA, 32 nt, Human
cagaaacaucccucagccccacaggcacgauc

SEQ ID NO: 83297 - RNA, 32 nt, Human
cagaaaccaaaucagucuucuauaaucugggg

SEQ ID NO: 83298 - RNA, 20 nt, Human
cagaaaccaaggcuaaggga

SEQ ID NO: 83299 - RNA, 28 nt, Human
cagaaaccaagugcucuagccucagccc

SEQ ID NO: 83300 - RNA, 32 nt, Human
cagaaaccaagugcucuagccucagcccuaaa

SEQ ID NO: 83301 - RNA, 32 nt, Human
cagaaaccacacacacuguugcuggaucuuga

SEQ ID NO: 83302 - RNA, 32 nt, Human
cagaaaccaccagguccggcacuuggagcccc

SEQ ID NO: 83303 - RNA, 32 nt, Human
cagaaaccaccugcguccacacccucacugca

SEQ ID NO: 83304 - RNA, 23 nt, Human
cagaaaccacuaccccucagggg

SEQ ID NO: 83305 - RNA, 32 nt, Human
cagaaaccagaagaacaaucaagacugcaaug

SEQ ID NO: 83306 - RNA, 26 nt, Human
cagaaaccaggggcagcgaugaggga

SEQ ID NO: 83307 - RNA, 32 nt, Human
cagaaaccaggugccuucagaggcucucugau

SEQ ID NO: 83308 - RNA, 32 nt, Human
cagaaaccauuguguguuuccucuuugaagca

SEQ ID NO: 83309 - RNA, 32 nt, Human
cagaaaccauuuucaccuucugucuccuccau

SEQ ID NO: 83310 - RNA, 20 nt, Human
cagaaacccacgucucugag

SEQ ID NO: 83311 - RNA, 21 nt, Human
cagaaacccacuuuguucuca

SEQ ID NO: 83312 - RNA, 21 nt, Human
cagaaacccaggguuugggga

SEQ ID NO: 83313 - RNA, 23 nt, Human
cagaaacccauggaccauguggg

SEQ ID NO: 83314 - RNA, 21 nt, Human
cagaaacccgggggccaaggg

SEQ ID NO: 83315 - RNA, 19 nt, Human
cagaaacccucacuuaggg

SEQ ID NO: 83316 - RNA, 32 nt, Human
cagaaacccucccaaauccucagacuguggag

SEQ ID NO: 83317 - RNA, 32 nt, Human
cagaaaccgaaagcucuauauaaaugcucaga

SEQ ID NO: 83318 - RNA, 32 nt, Human
cagaaaccgggcuugguuguugcagugggaag

SEQ ID NO: 83319 - RNA, 32 nt, Human
cagaaaccucauacuucucgggucagggaagg

SEQ ID NO: 83320 - RNA, 32 nt, Human
cagaaaccuggccacauuagaaagggguggug

SEQ ID NO: 83321 - RNA, 21 nt, Human
cagaaaccuggucucccuagg

SEQ ID NO: 83322 - RNA, 25 nt, Human
cagaaaccuugagcagauccaggga

SEQ ID NO: 83323 - RNA, 32 nt, Human
cagaaacggaccaagaaaaugagcgagagcaa

SEQ ID NO: 83324 - RNA, 32 nt, Human
cagaaacuagcccagaacucacucaguucuuc

SEQ ID NO: 83325 - RNA, 25 nt, Human
cagaaacuaugagcugugucaccug

SEQ ID NO: 83326 - RNA, 20 nt, Human
cagaaacuauugccuuggga

SEQ ID NO: 83327 - RNA, 21 nt, Human
cagaaacucaaagcuuggggg

SEQ ID NO: 83328 - RNA, 24 nt, Human
cagaaacucaagcaggcccaggga

SEQ ID NO: 83329 - RNA, 20 nt, Human
cagaaacucagcacugggga

SEQ ID NO: 83330 - RNA, 21 nt, Human
cagaaacuccauuccucgggg

SEQ ID NO: 83331 - RNA, 32 nt, Human
cagaaacugaagaugguacaguucuacaucug

SEQ ID NO: 83332 - RNA, 32 nt, Human
cagaaacugaaugacugcucagggagguguca

SEQ ID NO: 83333 - RNA, 20 nt, Human
cagaaacugaugccaagggg

SEQ ID NO: 83334 - RNA, 32 nt, Human
cagaaacugcucccuuugaacucucuuggcug

SEQ ID NO: 83335 - RNA, 32 nt, Human
cagaaacugguagguuucaucaggugguuaaa

SEQ ID NO: 83336 - RNA, 32 nt, Human
cagaaacuucaagcucucuaaauaaaaugaag

SEQ ID NO: 83337 - RNA, 32 nt, Human
cagaaacuugacucuaaaaugaucauugugga

SEQ ID NO: 83338 - RNA, 21 nt, Human
cagaaacuuggucucccuggg

SEQ ID NO: 83339 - RNA, 32 nt, Human
cagaaagaaagcaacuggauuuacagauuuau

SEQ ID NO: 83340 - RNA, 32 nt, Human
cagaaagaaauacuugguacuucuuucgcuga

SEQ ID NO: 83341 - RNA, 32 nt, Human
cagaaagaaauaguacaacugugugaaaugug

SEQ ID NO: 83342 - RNA, 32 nt, Human
cagaaagaacaagagugcuagagcuuuugugc

SEQ ID NO: 83343 - RNA, 32 nt, Human
cagaaagaacagccucugucaccccgccgcca

SEQ ID NO: 83344 - RNA, 32 nt, Human
cagaaagaagcccaugguaacccagguguauu

SEQ ID NO: 83345 - RNA, 32 nt, Human
cagaaagaaguuagucaguagcaguaggagga

SEQ ID NO: 83346 - RNA, 32 nt, Human
cagaaagacaacagguacaaagcccuaaggau

SEQ ID NO: 83347 - RNA, 32 nt, Human
cagaaagacaaggggagcauuggacaacacag

SEQ ID NO: 83348 - RNA, 32 nt, Human
cagaaagacaguacacaagaugagucaaguca

SEQ ID NO: 83349 - RNA, 32 nt, Human
cagaaagacccccauucuuccuuuggggguau

SEQ ID NO: 83350 - RNA, 32 nt, Human
cagaaagacccugaaggcaggcugcaaaugac

SEQ ID NO: 83351 - RNA, 32 nt, Human
cagaaagagaagguggucaaccuuaacaacau

SEQ ID NO: 83352 - RNA, 32 nt, Human
cagaaagagagagaggagagaaaccgcauuca

SEQ ID NO: 83353 - RNA, 24 nt, Human
cagaaagagccagauggaccugag

SEQ ID NO: 83354 - RNA, 32 nt, Human
cagaaagaguauggagagaaaaagaggcacac

SEQ ID NO: 83355 - RNA, 21 nt, Human
cagaaagaguccuuaccuugg

SEQ ID NO: 83356 - RNA, 32 nt, Human
cagaaagauggaaaggcacccaugcagcucac

SEQ ID NO: 83357 - RNA, 32 nt, Human
cagaaagauuccaggacagagaugacagaggc

SEQ ID NO: 83358 - RNA, 19 nt, Human
cagaaagauugcuugagcc

SEQ ID NO: 83359 - RNA, 32 nt, Human
cagaaagcagaugucacguuuguuaaagagaa

SEQ ID NO: 83360 - RNA, 32 nt, Human
cagaaagcagcauuuuuaaauguccguguuaa

SEQ ID NO: 83361 - RNA, 22 nt, Human
cagaaagcagccacaggcccug

SEQ ID NO: 83362 - RNA, 32 nt, Human
cagaaagcaguccuaucuucaguggcuacagg

SEQ ID NO: 83363 - RNA, 22 nt, Human
cagaaagcagugacaaaagggg

SEQ ID NO: 83364 - RNA, 32 nt, Human
cagaaagcaguggagguggggguugcuguuga

SEQ ID NO: 83365 - RNA, 32 nt, Human
cagaaagccagccugccuuuuagcacuuggau

SEQ ID NO: 83366 - RNA, 32 nt, Human
cagaaagccagggaacccacagagucaccaac

SEQ ID NO: 83367 - RNA, 32 nt, Human
cagaaagcccaggguccacugaagggacccug

SEQ ID NO: 83368 - RNA, 32 nt, Human
cagaaagcccaguguuuuugcaaagaaugaaa

SEQ ID NO: 83369 - RNA, 32 nt, Human
cagaaagccccaggcacagcucagggaggagg

SEQ ID NO: 83370 - RNA, 32 nt, Human
cagaaagccuccaggacagccugugggagcug

SEQ ID NO: 83371 - RNA, 32 nt, Human
cagaaagccugaggcgugcccagagcacaaga

SEQ ID NO: 83372 - RNA, 22 nt, Human
cagaaagcuccaggaaucggga

SEQ ID NO: 83373 - RNA, 32 nt, Human
cagaaagcugaggagugugggcuggcagagag

SEQ ID NO: 83374 - RNA, 32 nt, Human
cagaaagcugcaggaggcuccagauuuaaauc

SEQ ID NO: 83375 - RNA, 25 nt, Human
cagaaagcugggaggcaaccucgag

SEQ ID NO: 83376 - RNA, 32 nt, Human
cagaaaggaaucgagaacaacauaucaaguca

SEQ ID NO: 83377 - RNA, 32 nt, Human
cagaaaggacucugcuccacugccaaaaauuu

SEQ ID NO: 83378 - RNA, 32 nt, Human
cagaaaggacugucccagccucgggagcaaga

SEQ ID NO: 83379 - RNA, 32 nt, Human
cagaaaggagcuucaaauggcugugauaagga

SEQ ID NO: 83380 - RNA, 32 nt, Human
cagaaaggaggcagcacacagagaaagaugca

SEQ ID NO: 83381 - RNA, 32 nt, Human
cagaaaggagguuuaggauugcagagaagaug

SEQ ID NO: 83382 - RNA, 32 nt, Human
cagaaaggauccccuuucuccaguuugugcug

SEQ ID NO: 83383 - RNA, 32 nt, Human
cagaaaggauguagggagagacugccugugca

SEQ ID NO: 83384 - RNA, 32 nt, Human
cagaaaggccguagcaguuugacgauaggugg

SEQ ID NO: 83385 - RNA, 32 nt, Human
cagaaaggcugggagcagcccagacccuccug

SEQ ID NO: 83386 - RNA, 22 nt, Human
cagaaaggcuugggugaccagg

SEQ ID NO: 83387 - RNA, 32 nt, Human
cagaaagggaaacugagguccaaggaauagga

SEQ ID NO: 83388 - RNA, 32 nt, Human
cagaaagggaagcacaggguaaggagaccugg

SEQ ID NO: 83389 - RNA, 32 nt, Human
cagaaagggaagcagaacugagggcugggaua

SEQ ID NO: 83390 - RNA, 32 nt, Human
cagaaagggcccucugcuguggucugaacccc

SEQ ID NO: 83391 - RNA, 32 nt, Human
cagaaaggggcuggguaccucuucugguugcu

SEQ ID NO: 83392 - RNA, 32 nt, Human
cagaaaggugugaccauggaggcugguggccu

SEQ ID NO: 83393 - RNA, 32 nt, Human
cagaaaguaaacuagccuugcugagagauucu

SEQ ID NO: 83394 - RNA, 32 nt, Human
cagaaaguagaaagguggcugcugggggcuag

SEQ ID NO: 83395 - RNA, 32 nt, Human
cagaaaguaggaggguguccagugagucacuc

SEQ ID NO: 83396 - RNA, 32 nt, Human
cagaaaguaggcaggggaggagaggguaaggg

SEQ ID NO: 83397 - RNA, 32 nt, Human
cagaaagucaacaagcaaaaugccuugagugu

SEQ ID NO: 83398 - RNA, 32 nt, Human
cagaaagucauucaagacugaguuuauagaaa

SEQ ID NO: 83399 - RNA, 23 nt, Human
cagaaaguccagacucaagagua

SEQ ID NO: 83400 - RNA, 32 nt, Human
cagaaagucuaugagaaugaaaaggccagggg

SEQ ID NO: 83401 - RNA, 32 nt, Human
cagaaagugcugagccaagagcuccuagcugc

SEQ ID NO: 83402 - RNA, 21 nt, Human
cagaaaguguggcagaggcac

SEQ ID NO: 83403 - RNA, 32 nt, Human
cagaaaguuaacaucaauacacuugaucauuu

SEQ ID NO: 83404 - RNA, 32 nt, Human
cagaaaguucauguuugguaaauucuguuacu

SEQ ID NO: 83405 - RNA, 32 nt, Human
cagaaaguugaggaagaaagaacucaaguaca

SEQ ID NO: 83406 - RNA, 32 nt, Human
cagaaaguuggcuauuauaaagaugaaaauuc

SEQ ID NO: 83407 - RNA, 32 nt, Human
cagaaaguuucuggaucccaggcucaucucca

SEQ ID NO: 83408 - RNA, 19 nt, Human
cagaaauaaaauuuuugca

SEQ ID NO: 83409 - RNA, 32 nt, Human
cagaaauaaagaaaggaaggaaggacggaagg

SEQ ID NO: 83410 - RNA, 32 nt, Human
cagaaauaaccagcuggauuuaggccagcuca

SEQ ID NO: 83411 - RNA, 32 nt, Human
cagaaauaagaccuguggcugaaggaagccuu

SEQ ID NO: 83412 - RNA, 28 nt, Human
cagaaauagaaaccuaguuuuuaaggug

SEQ ID NO: 83413 - RNA, 32 nt, Human
cagaaauaggagaguggaugauagaugcaaaa

SEQ ID NO: 83414 - RNA, 32 nt, Human
cagaaaucaacugacaaauggcagauucauag

SEQ ID NO: 83415 - RNA, 22 nt, Human
cagaaaucaagaaccucugccu

SEQ ID NO: 83416 - RNA, 32 nt, Human
cagaaaucaagaaccucugccuccgagacagg

SEQ ID NO: 83417 - RNA, 23 nt, Human
cagaaaucccagcgcaccugggg

SEQ ID NO: 83418 - RNA, 32 nt, Human
cagaaauccuggaauuagaggguuuaauauug

SEQ ID NO: 83419 - RNA, 32 nt, Human
cagaaauccuugauuucucagguuagcgacgg

SEQ ID NO: 83420 - RNA, 32 nt, Human
cagaaaucuauuucuauucucuggaagagcuu

SEQ ID NO: 83421 - RNA, 26 nt, Human
cagaaaucugacucuuuacccaggga

SEQ ID NO: 83422 - RNA, 23 nt, Human
cagaaaugaaccugacccagggg

SEQ ID NO: 83423 - RNA, 32 nt, Human
cagaaaugaaguauaugguucauuagcuuaaa

SEQ ID NO: 83424 - RNA, 32 nt, Human
cagaaaugaaugaacugugaaagcuccuguuu

SEQ ID NO: 83425 - RNA, 32 nt, Human
cagaaaugacccaacucucucacuuuucccuc

SEQ ID NO: 83426 - RNA, 32 nt, Human
cagaaaugacccuuccuccaccacaccccucc

SEQ ID NO: 83427 - RNA, 32 nt, Human
cagaaaugcaaagaucaaacugugcaaauauu

SEQ ID NO: 83428 - RNA, 32 nt, Human
cagaaaugcccccauucucccagucucugucg

SEQ ID NO: 83429 - RNA, 21 nt, Human
cagaaaugcucucuccaggga

SEQ ID NO: 83430 - RNA, 31 nt, Human
cagaaaugcuuuauuucuccugugucaguag

SEQ ID NO: 83431 - RNA, 32 nt, Human
cagaaauggauggauucuggaaauauuuugaa

SEQ ID NO: 83432 - RNA, 32 nt, Human
cagaaaugggccgugagcucucacaggcucag

SEQ ID NO: 83433 - RNA, 32 nt, Human
cagaaauguauuggcucagagcucuggaggcu

SEQ ID NO: 83434 - RNA, 32 nt, Human
cagaaaugucuggagcaauggaagaaccacug

SEQ ID NO: 83435 - RNA, 32 nt, Human
cagaaauuaaagaaauuucugaauaaauuugc

SEQ ID NO: 83436 - RNA, 18 nt, Human
cagaaauuaagugcauug

SEQ ID NO: 83437 - RNA, 32 nt, Human
cagaaauuagccaggcgugguggugcacaccu

SEQ ID NO: 83438 - RNA, 32 nt, Human
cagaaauugagcuucagaagauugaggauagc

SEQ ID NO: 83439 - RNA, 32 nt, Human
cagaaauugagguccccgcugccuucugagga

SEQ ID NO: 83440 - RNA, 20 nt, Human
cagaaauuucauccagagga

SEQ ID NO: 83441 - RNA, 32 nt, Human
cagaaauuucuacaaccuacugggguaaaauc

SEQ ID NO: 83442 - RNA, 24 nt, Human
cagaacaaaacauacgagcuggua

SEQ ID NO: 83443 - RNA, 32 nt, Human
cagaacaacagggugaaaccccaucucuaaua

SEQ ID NO: 83444 - RNA, 32 nt, Human
cagaacaaccagcuggaucaguucucacagga

SEQ ID NO: 83445 - RNA, 32 nt, Human
cagaacaacuccauguuacacugaguucaugc

SEQ ID NO: 83446 - RNA, 32 nt, Human
cagaacaaggucugcguggagccccagcagcu

SEQ ID NO: 83447 - RNA, 32 nt, Human
cagaacacagcaauuccucaggcuaagcugcc

SEQ ID NO: 83448 - RNA, 32 nt, Human
cagaacacaggcagucuccacuauugauacca

SEQ ID NO: 83449 - RNA, 20 nt, Human
cagaacacagguuccaggag

SEQ ID NO: 83450 - RNA, 32 nt, Human
cagaacaccagagaccucaaauuacuuuacaa

SEQ ID NO: 83451 - RNA, 23 nt, Human
cagaacaccauuccuuccaggag

SEQ ID NO: 83452 - RNA, 32 nt, Human
cagaacacguagacaggcuguaauauucaaac

SEQ ID NO: 83453 - RNA, 32 nt, Human
cagaacacugcacuccaauuuccucgggcagc

SEQ ID NO: 83454 - RNA, 32 nt, Human
cagaacacugccacccacccaguuuuauaauc

SEQ ID NO: 83455 - RNA, 32 nt, Human
cagaacagaagugccugggacgcccagauccu

SEQ ID NO: 83456 - RNA, 32 nt, Human
cagaacagacugcgcugcgagccccgggcuuc

SEQ ID NO: 83457 - RNA, 32 nt, Human
cagaacagcguccucagacuuaaccuucugca

SEQ ID NO: 83458 - RNA, 32 nt, Human
cagaacaggaggugguagagggcauggauauc

SEQ ID NO: 83459 - RNA, 32 nt, Human
cagaacagggaagccagcaggggaagaaaaag

SEQ ID NO: 83460 - RNA, 32 nt, Human
cagaacaggggcacccuccaaacacugggcuc

SEQ ID NO: 83461 - RNA, 32 nt, Human
cagaacagguucuccaaggauccccucgagac

SEQ ID NO: 83462 - RNA, 32 nt, Human
cagaacaguccucccuguaagagccuaaccau

SEQ ID NO: 83463 - RNA, 31 nt, Human
cagaacagugagaguggggaaaagaccgagg

SEQ ID NO: 83464 - RNA, 32 nt, Human
cagaacagugccugugacaccggaggggauug

SEQ ID NO: 83465 - RNA, 32 nt, Human
cagaacagugcuuguggagggccugacugucc

SEQ ID NO: 83466 - RNA, 32 nt, Human
cagaacaguuccaagaauugaagagagcuaag

SEQ ID NO: 83467 - RNA, 32 nt, Human
cagaacauagccacccuuuuucaucagugacc

SEQ ID NO: 83468 - RNA, 32 nt, Human
cagaacauauguugcaagacccucccaugggg

SEQ ID NO: 83469 - RNA, 32 nt, Human
cagaacaugaauucagguaaccuggugucugu

SEQ ID NO: 83470 - RNA, 32 nt, Human
cagaacaugcagcagaaaagcugugaaggaag

SEQ ID NO: 83471 - RNA, 32 nt, Human
cagaacauucugaccucugucuugcucugcuc

SEQ ID NO: 83472 - RNA, 32 nt, Human
cagaaccaaaacugauacagugaaacaauuaa

SEQ ID NO: 83473 - RNA, 32 nt, Human
cagaaccaauaacauaaguauucaaaguuaug

SEQ ID NO: 83474 - RNA, 32 nt, Human
cagaaccacagcaagaaaccugacaauauugu

SEQ ID NO: 83475 - RNA, 32 nt, Human
cagaaccacagcaagaaaccugacaauauuuu

SEQ ID NO: 83476 - RNA, 32 nt, Human
cagaaccacagcaagaaaucugacaauauuuu

SEQ ID NO: 83477 - RNA, 32 nt, Human
cagaaccacauccugaggagucucagcuuauc

SEQ ID NO: 83478 - RNA, 32 nt, Human
cagaaccacccacuccugaagugggucagcaa

SEQ ID NO: 83479 - RNA, 20 nt, Human
cagaaccacuccuccaggag

SEQ ID NO: 83480 - RNA, 32 nt, Human
cagaaccagcaacaggcuuuuauuaaacauac

SEQ ID NO: 83481 - RNA, 32 nt, Human
cagaaccagccugucaggaugcgccugaucuc

SEQ ID NO: 83482 - RNA, 32 nt, Human
cagaaccaguaucugucauggaacugaacauu

SEQ ID NO: 83483 - RNA, 32 nt, Human
cagaaccagugucugaaccacccuggaaauuc

SEQ ID NO: 83484 - RNA, 32 nt, Human
cagaaccaugaguggccagagaggaggagaag

SEQ ID NO: 83485 - RNA, 32 nt, Human
cagaaccauggugggagagaacagacuuggcg

SEQ ID NO: 83486 - RNA, 32 nt, Human
cagaaccaugucccaagacaacugguuaguga

SEQ ID NO: 83487 - RNA, 32 nt, Human
cagaaccauuuggccuuaauuccaaugugaga

SEQ ID NO: 83488 - RNA, 15 nt, Human
cagaacccaccugca

SEQ ID NO: 83489 - RNA, 32 nt, Human
cagaacccagcaaucugugcuuucuuucacaa

SEQ ID NO: 83490 - RNA, 32 nt, Human
cagaacccagcccagaucggaggacaaguucc

SEQ ID NO: 83491 - RNA, 32 nt, Human
cagaacccaggaggcagagcuugcagugagcc

SEQ ID NO: 83492 - RNA, 21 nt, Human
cagaacccagggauccaggag

SEQ ID NO: 83493 - RNA, 32 nt, Human
cagaacccccuuccucugcuccuccaugaaug

SEQ ID NO: 83494 - RNA, 20 nt, Human
cagaaccccgcucugaggaa

SEQ ID NO: 83495 - RNA, 19 nt, Human
cagaacccgacccuccgca

SEQ ID NO: 83496 - RNA, 32 nt, Human
cagaacccgcagaguccucccugcugcugugu

SEQ ID NO: 83497 - RNA, 32 nt, Human
cagaacccgcaggcuccugaagacuggccacg

SEQ ID NO: 83498 - RNA, 32 nt, Human
cagaacccucaucuggccaccugcugcuuuuu

SEQ ID NO: 83499 - RNA, 32 nt, Human
cagaacccuccaccccuacccccaacccucag

SEQ ID NO: 83500 - RNA, 32 nt, Human
cagaacccucgggcaccuggagagauguuuug

SEQ ID NO: 83501 - RNA, 20 nt, Human
cagaacccugggugggcagg

SEQ ID NO: 83502 - RNA, 32 nt, Human
cagaaccgcuacugcugcuucggucucuccuu

SEQ ID NO: 83503 - RNA, 31 nt, Human
cagaaccgcuuacucccuuguuaagggggcu

SEQ ID NO: 83504 - RNA, 32 nt, Human
cagaaccggucccagccugggcuccucugcau

SEQ ID NO: 83505 - RNA, 32 nt, Human
cagaaccucacugcguccuccuccuccaaaac

SEQ ID NO: 83506 - RNA, 32 nt, Human
cagaaccuccacccucccccacaccaaagaca

SEQ ID NO: 83507 - RNA, 32 nt, Human
cagaaccuccacccucugacaccauggucaac

SEQ ID NO: 83508 - RNA, 32 nt, Human
cagaaccuccacccucugacaccauggucagc

SEQ ID NO: 83509 - RNA, 32 nt, Human
cagaaccucccaccuuccccaguucaccaugu

SEQ ID NO: 83510 - RNA, 32 nt, Human
cagaaccucccaggagacccugggaucggaag

SEQ ID NO: 83511 - RNA, 32 nt, Human
cagaaccugaaacagauggcagaaggaaugga

SEQ ID NO: 83512 - RNA, 32 nt, Human
cagaaccugccugguaugaccucuccaccuua

SEQ ID NO: 83513 - RNA, 32 nt, Human
cagaaccugccugugucccagcuuggaggccu

SEQ ID NO: 83514 - RNA, 32 nt, Human
cagaaccugcuggugcaagcugggcagguccu

SEQ ID NO: 83515 - RNA, 32 nt, Human
cagaaccuggacccuaaagaacagugacugca

SEQ ID NO: 83516 - RNA, 32 nt, Human
cagaaccugggaacauguaggguggggaguau

SEQ ID NO: 83517 - RNA, 32 nt, Human
cagaaccugguggcuccugccugcuccuucac

SEQ ID NO: 83518 - RNA, 32 nt, Human
cagaaccuuaaacauguggauauuuuugccaa

SEQ ID NO: 83519 - RNA, 32 nt, Human
cagaaccuucgacugacccccuugucuuuaug

SEQ ID NO: 83520 - RNA, 32 nt, Human
cagaaccuucuaaaauagagaaugguacgaca

SEQ ID NO: 83521 - RNA, 32 nt, Human
cagaaccuucuccgccacucuuccugcaauca

SEQ ID NO: 83522 - RNA, 32 nt, Human
cagaaccuuuccccugcuaucucccuuccugc

SEQ ID NO: 83523 - RNA, 21 nt, Human
cagaaccuuugauucugcaca

SEQ ID NO: 83524 - RNA, 32 nt, Human
cagaaccuuugguguuucaggugguauuauag

SEQ ID NO: 83525 - RNA, 32 nt, Human
cagaacgagacccuguacucugucuuaaaggc

SEQ ID NO: 83526 - RNA, 32 nt, Human
cagaacgcacacuggcugucacuaggaagcgc

SEQ ID NO: 83527 - RNA, 32 nt, Human
cagaacgccuucuguucuuccacaacacaggg

SEQ ID NO: 83528 - RNA, 32 nt, Human
cagaacgcggccagggcagaaagcggcggcag

SEQ ID NO: 83529 - RNA, 32 nt, Human
cagaacgcucaggacaucccggccuggguuua

SEQ ID NO: 83530 - RNA, 21 nt, Human
cagaacgggcagcccaucgug

SEQ ID NO: 83531 - RNA, 32 nt, Human
cagaacgguuuuuggaucuggcauugaaaugc

SEQ ID NO: 83532 - RNA, 32 nt, Human
cagaacgugggaugcuggaggcaugccugcag

SEQ ID NO: 83533 - RNA, 32 nt, Human
cagaacguggugaguacagcucagcucagcac

SEQ ID NO: 83534 - RNA, 32 nt, Human
cagaacuaaacuuuuauuuauauguugugggg

SEQ ID NO: 83535 - RNA, 32 nt, Human
cagaacuaagacauugugaagcacuuguuagu

SEQ ID NO: 83536 - RNA, 32 nt, Human
cagaacuacaaagaugagaaauuaccagaagc

SEQ ID NO: 83537 - RNA, 32 nt, Human
cagaacuacuaaaaauaaagaaaucagccaug

SEQ ID NO: 83538 - RNA, 32 nt, Human
cagaacuauaugcacaaacuauaacuuggaug

SEQ ID NO: 83539 - RNA, 32 nt, Human
cagaacuaugaggguccucucuggcacuagcc

SEQ ID NO: 83540 - RNA, 19 nt, Human
cagaacucaaaauauucca

SEQ ID NO: 83541 - RNA, 18 nt, Human
cagaacucaaacaggcuc

SEQ ID NO: 83542 - RNA, 22 nt, Human
cagaacucaaagccaagcucca

SEQ ID NO: 83543 - RNA, 18 nt, Human
cagaacucaagaaagcca

SEQ ID NO: 83544 - RNA, 19 nt, Human
cagaacucaagcccaucca

SEQ ID NO: 83545 - RNA, 32 nt, Human
cagaacucaaguagggcagaagguggaaggcu

SEQ ID NO: 83546 - RNA, 18 nt, Human
cagaacucagcgugcucc

SEQ ID NO: 83547 - RNA, 20 nt, Human
cagaacucaggcugccucca

SEQ ID NO: 83548 - RNA, 22 nt, Human
cagaacuccaggccucaggaaa

SEQ ID NO: 83549 - RNA, 32 nt, Human
cagaacucccaaucguccaccuccagcucuuc

SEQ ID NO: 83550 - RNA, 32 nt, Human
cagaacucccaggucacaugcacguaugucca

SEQ ID NO: 83551 - RNA, 22 nt, Human
cagaacucucccugcuggacuc

SEQ ID NO: 83552 - RNA, 32 nt, Human
cagaacucugaacaacaauaagucucucugag

SEQ ID NO: 83553 - RNA, 32 nt, Human
cagaacucuguggcuggcagccacuauucuca

SEQ ID NO: 83554 - RNA, 32 nt, Human
cagaacucugugguuuaugagaacaagaaguu

SEQ ID NO: 83555 - RNA, 32 nt, Human
cagaacucuucucuccccaucaugggccacag

SEQ ID NO: 83556 - RNA, 32 nt, Human
cagaacugaagggaauauugaggcucaaugaa

SEQ ID NO: 83557 - RNA, 32 nt, Human
cagaacugagccacaggcugcucuggccagga

SEQ ID NO: 83558 - RNA, 32 nt, Human
cagaacugauucuccagcccugguagcauuug

SEQ ID NO: 83559 - RNA, 21 nt, Human
cagaacugcacucuucaggaa

SEQ ID NO: 83560 - RNA, 17 nt, Human
cagaacugcagaccucu

SEQ ID NO: 83561 - RNA, 32 nt, Human
cagaacugcaguugucuugucuucucggagug

SEQ ID NO: 83562 - RNA, 32 nt, Human
cagaacugcccagguguuaacagggcugucug

SEQ ID NO: 83563 - RNA, 17 nt, Human
cagaacugcgcacgcuc

SEQ ID NO: 83564 - RNA, 20 nt, Human
cagaacugcuguggcugcca

SEQ ID NO: 83565 - RNA, 20 nt, Human
cagaacuggucccugccuca

SEQ ID NO: 83566 - RNA, 32 nt, Human
cagaacuguguggccccugccugugccagcca

SEQ ID NO: 83567 - RNA, 32 nt, Human
cagaacuguuaauaaaaguuaaaggaauuuaa

SEQ ID NO: 83568 - RNA, 32 nt, Human
cagaacuuagcaauuuccgccuggugaugcgc

SEQ ID NO: 83569 - RNA, 32 nt, Human
cagaacuuagggucagggucucagggaacccu

SEQ ID NO: 83570 - RNA, 32 nt, Human
cagaacuuccagccccaggagacuauuagucc

SEQ ID NO: 83571 - RNA, 32 nt, Human
cagaacuuccauucuuuagucauuccaggugg

SEQ ID NO: 83572 - RNA, 32 nt, Human
cagaacuucuccccaccugacccagggcugug

SEQ ID NO: 83573 - RNA, 19 nt, Human
cagaacuugauccuccgca

SEQ ID NO: 83574 - RNA, 32 nt, Human
cagaacuugccugaaacccaguagguguucaa

SEQ ID NO: 83575 - RNA, 32 nt, Human
cagaacuugugucacagggcugcaggacuacc

SEQ ID NO: 83576 - RNA, 32 nt, Human
cagaacuuguguuuuucucaucuuuaaaauac

SEQ ID NO: 83577 - RNA, 32 nt, Human
cagaacuuugggaggccgagacgggcagauca

SEQ ID NO: 83578 - RNA, 32 nt, Human
cagaacuuugggaggccgaggugggaggagcg

SEQ ID NO: 83579 - RNA, 32 nt, Human
cagaacuuugugcccauugaccuagacgagug

SEQ ID NO: 83580 - RNA, 32 nt, Human
cagaagaaaauccaaggcuuuagccaggagcg

SEQ ID NO: 83581 - RNA, 32 nt, Human
cagaagaaacaaaaugguaauuacagaauuag

SEQ ID NO: 83582 - RNA, 32 nt, Human
cagaagaaacaaacuccagacgcaccaccuua

SEQ ID NO: 83583 - RNA, 27 nt, Human
cagaagaaauauaucucuaucucucua

SEQ ID NO: 83584 - RNA, 32 nt, Human
cagaagaacuaucaacuuguggcugggcacgg

SEQ ID NO: 83585 - RNA, 32 nt, Human
cagaagaagaagcagugacggggacacaaauu

SEQ ID NO: 83586 - RNA, 31 nt, Human
cagaagaagagaccugcaacugugagagucc

SEQ ID NO: 83587 - RNA, 32 nt, Human
cagaagaagcuggagugcauagugcggacccu

SEQ ID NO: 83588 - RNA, 22 nt, Human
cagaagaaggcagcagguggca

SEQ ID NO: 83589 - RNA, 32 nt, Human
cagaagaaucccuccuccucacccuaacuucu

SEQ ID NO: 83590 - RNA, 31 nt, Human
cagaagaaugagagagaggaagacugcuggc

SEQ ID NO: 83591 - RNA, 32 nt, Human
cagaagaauggcuugaaccuggaacgcggagg

SEQ ID NO: 83592 - RNA, 32 nt, Human
cagaagacaaaaauggcaucacagacuccuga

SEQ ID NO: 83593 - RNA, 32 nt, Human
cagaagacaaccacuucucuccuuuuagaaag

SEQ ID NO: 83594 - RNA, 32 nt, Human
cagaagacaacgcgagucacaugugaacugua

SEQ ID NO: 83595 - RNA, 32 nt, Human
cagaagacaauuagcagucucugccucccuug

SEQ ID NO: 83596 - RNA, 32 nt, Human
cagaagacacccuucaacccugggaugaccac

SEQ ID NO: 83597 - RNA, 32 nt, Human
cagaagacacuccuggccaucuguggauuugu

SEQ ID NO: 83598 - RNA, 32 nt, Human
cagaagacacuggccuggggaugagacucggg

SEQ ID NO: 83599 - RNA, 32 nt, Human
cagaagacagaagggaaaggaaaagcucaaug

SEQ ID NO: 83600 - RNA, 23 nt, Human
cagaagacagcugcugggucagg

SEQ ID NO: 83601 - RNA, 32 nt, Human
cagaagacagugacagauguguuugcaaggcu

SEQ ID NO: 83602 - RNA, 32 nt, Human
cagaagacaugaucauuagccauaagaaacuc

SEQ ID NO: 83603 - RNA, 32 nt, Human
cagaagaccagaaagcaccuaccucccuaagc

SEQ ID NO: 83604 - RNA, 32 nt, Human
cagaagaccagcccaggccagcugcuguuucu

SEQ ID NO: 83605 - RNA, 24 nt, Human
cagaagaccugggcuuuugucgaa

SEQ ID NO: 83606 - RNA, 21 nt, Human
cagaagacuacaaaaaugaag

SEQ ID NO: 83607 - RNA, 32 nt, Human
cagaagacuggcagaugggaggagggaagaag

SEQ ID NO: 83608 - RNA, 32 nt, Human
cagaagagaaggaggagggggcagcuggcuau

SEQ ID NO: 83609 - RNA, 19 nt, Human
cagaagagacaugcagcag

SEQ ID NO: 83610 - RNA, 32 nt, Human
cagaagagacuagagaccuuaggccaggagau

SEQ ID NO: 83611 - RNA, 32 nt, Human
cagaagagacuauauuggaauauuuacagcuu

SEQ ID NO: 83612 - RNA, 32 nt, Human
cagaagagaggacugugugccuuuaacgagag

SEQ ID NO: 83613 - RNA, 22 nt, Human
cagaagagaggccgggcugcug

SEQ ID NO: 83614 - RNA, 21 nt, Human
cagaagagaggcugccgggac

SEQ ID NO: 83615 - RNA, 32 nt, Human
cagaagagaugauggcaaugcaccuugcaggu

SEQ ID NO: 83616 - RNA, 32 nt, Human
cagaagagccaacugacuuuuccuucaaucuc

SEQ ID NO: 83617 - RNA, 32 nt, Human
cagaagagcccaacuccuucucauagcugacc

SEQ ID NO: 83618 - RNA, 22 nt, Human
cagaagagccucuguccagccc

SEQ ID NO: 83619 - RNA, 24 nt, Human
cagaagagcggaccagggcugcug

SEQ ID NO: 83620 - RNA, 22 nt, Human
cagaagagcucacuggaucaga

SEQ ID NO: 83621 - RNA, 32 nt, Human
cagaagagcugcaguugcuggagcugggcuga

SEQ ID NO: 83622 - RNA, 32 nt, Human
cagaagaggaaaaucacuguuuuugucaagga

SEQ ID NO: 83623 - RNA, 32 nt, Human
cagaagaggaagagaacuucguguggccugca

SEQ ID NO: 83624 - RNA, 32 nt, Human
cagaagaggaagagaugagggaaggccuggcu

SEQ ID NO: 83625 - RNA, 32 nt, Human
cagaagaggaaggcagggaucccacuacgagc

SEQ ID NO: 83626 - RNA, 32 nt, Human
cagaagaggagucugaggauaacuaaacuuca

SEQ ID NO: 83627 - RNA, 32 nt, Human
cagaagaggagugggagccagcucagagaagg

SEQ ID NO: 83628 - RNA, 21 nt, Human
cagaagaggcaguggcugcug

SEQ ID NO: 83629 - RNA, 32 nt, Human
cagaagaggccaugugucucagagcuguuaag

SEQ ID NO: 83630 - RNA, 32 nt, Human
cagaagaggccuuucccaucuggagagaagcu

SEQ ID NO: 83631 - RNA, 32 nt, Human
cagaagagggaagcccgagggagcuggcauug

SEQ ID NO: 83632 - RNA, 32 nt, Human
cagaagagggaggcuuccugacugacacaggc

SEQ ID NO: 83633 - RNA, 31 nt, Human
cagaagaggguggaagaugaaaugaaagcua

SEQ ID NO: 83634 - RNA, 32 nt, Human
cagaagagucgaugaucaccaagcaggaaagg

SEQ ID NO: 83635 - RNA, 29 nt, Human
cagaagagucuaauugugccuggauuucu

SEQ ID NO: 83636 - RNA, 32 nt, Human
cagaagaguuugggccucacacaaaggcugug

SEQ ID NO: 83637 - RNA, 21 nt, Human
cagaagauaagaguucacuga

SEQ ID NO: 83638 - RNA, 32 nt, Human
cagaagauacaaaaauuggcugggcguugugg

SEQ ID NO: 83639 - RNA, 22 nt, Human
cagaagauaguaggaucacaga

SEQ ID NO: 83640 - RNA, 32 nt, Human
cagaagaucaugcagucaucagucccacggag

SEQ ID NO: 83641 - RNA, 19 nt, Human
cagaagaucgcgggccagg

SEQ ID NO: 83642 - RNA, 32 nt, Human
cagaagaucugaagacauuuaagacccaaucc

SEQ ID NO: 83643 - RNA, 32 nt, Human
cagaagauggaagaaugggcucaccugaugcu

SEQ ID NO: 83644 - RNA, 32 nt, Human
cagaagauggcagacuacucaaacaaacucua

SEQ ID NO: 83645 - RNA, 32 nt, Human
cagaagauggccagguccaucccgcugccccu

SEQ ID NO: 83646 - RNA, 32 nt, Human
cagaagcaaccuuuuucccucuucccagaaaa

SEQ ID NO: 83647 - RNA, 20 nt, Human
cagaagcaagugcucaggga

SEQ ID NO: 83648 - RNA, 32 nt, Human
cagaagcaaucagaaggaaacuuccucagacu

SEQ ID NO: 83649 - RNA, 32 nt, Human
cagaagcacaagugccuucagagggcaguuga

SEQ ID NO: 83650 - RNA, 32 nt, Human
cagaagcacaugcaccuacccauacacccccu

SEQ ID NO: 83651 - RNA, 21 nt, Human
cagaagcaccagcggcugcug

SEQ ID NO: 83652 - RNA, 32 nt, Human
cagaagcacccuguccccuccuccccaggccu

SEQ ID NO: 83653 - RNA, 27 nt, Human
cagaagcaccuaugaaucuguccccca

SEQ ID NO: 83654 - RNA, 32 nt, Human
cagaagcaccuuggcauagagcacccaggcau

SEQ ID NO: 83655 - RNA, 19 nt, Human
cagaagcacggcgcccagg

SEQ ID NO: 83656 - RNA, 32 nt, Human
cagaagcacuagaccaggacgaccuccagcgc

SEQ ID NO: 83657 - RNA, 32 nt, Human
cagaagcacucauagcucuuuuaggcagaaga

SEQ ID NO: 83658 - RNA, 32 nt, Human
cagaagcagaacuugaagguuaaaccacuagc

SEQ ID NO: 83659 - RNA, 32 nt, Human
cagaagcagacaccuccagugaacuagcaaag

SEQ ID NO: 83660 - RNA, 32 nt, Human
cagaagcagagcugugguuuugaagauuuucc

SEQ ID NO: 83661 - RNA, 32 nt, Human
cagaagcagagcuuuguuuuggagguucuguc

SEQ ID NO: 83662 - RNA, 22 nt, Human
cagaagcagagguagaaucagg

SEQ ID NO: 83663 - RNA, 32 nt, Human
cagaagcagcauccuccacuuguucagggcuu

SEQ ID NO: 83664 - RNA, 32 nt, Human
cagaagcagcauggacaagaaggcuggggcug

SEQ ID NO: 83665 - RNA, 21 nt, Human
cagaagcagccgggggcgcug

SEQ ID NO: 83666 - RNA, 21 nt, Human
cagaagcagcuguggucccug

SEQ ID NO: 83667 - RNA, 32 nt, Human
cagaagcaggguggaggggaagggugggucuc

SEQ ID NO: 83668 - RNA, 32 nt, Human
cagaagcaguaugaccuuuacccugugacccg

SEQ ID NO: 83669 - RNA, 32 nt, Human
cagaagcaguggcagaagcaguagaagaccag

SEQ ID NO: 83670 - RNA, 23 nt, Human
cagaagcagugugagcagggcug

SEQ ID NO: 83671 - RNA, 32 nt, Human
cagaagcauacuuaauguuaaagagauacugc

SEQ ID NO: 83672 - RNA, 32 nt, Human
cagaagcauagcguguaccgaaaaugaagacu

SEQ ID NO: 83673 - RNA, 32 nt, Human
cagaagcaucacugcagugaaagucucugcuu

SEQ ID NO: 83674 - RNA, 32 nt, Human
cagaagcaugcgcuggugucuccuccugaucu

SEQ ID NO: 83675 - RNA, 22 nt, Human
cagaagcauucaggcacugcca

SEQ ID NO: 83676 - RNA, 32 nt, Human
cagaagccaacgaggggacuguuucucuucca

SEQ ID NO: 83677 - RNA, 32 nt, Human
cagaagccagagccaugggccaggagguccug

SEQ ID NO: 83678 - RNA, 32 nt, Human
cagaagccagaggcggguuugguaguggcuaa

SEQ ID NO: 83679 - RNA, 21 nt, Human
cagaagccagagggccaggga

SEQ ID NO: 83680 - RNA, 32 nt, Human
cagaagccaugacuccccaacucugccuguau

SEQ ID NO: 83681 - RNA, 22 nt, Human
cagaagccauucagcucaggga

SEQ ID NO: 83682 - RNA, 20 nt, Human
cagaagcccagaccugggga

SEQ ID NO: 83683 - RNA, 32 nt, Human
cagaagcccagagggggccugggaccuggcag

SEQ ID NO: 83684 - RNA, 22 nt, Human
cagaagcccaggcggcccgggg

SEQ ID NO: 83685 - RNA, 23 nt, Human
cagaagcccaggcgggcccgggg

SEQ ID NO: 83686 - RNA, 20 nt, Human
cagaagcccaggggcucagg

SEQ ID NO: 83687 - RNA, 23 nt, Human
cagaagcccaucuuaguuagggg

SEQ ID NO: 83688 - RNA, 19 nt, Human
cagaagcccaugggcaggg

SEQ ID NO: 83689 - RNA, 32 nt, Human
cagaagccccagcacugugcagaugcucuugg

SEQ ID NO: 83690 - RNA, 18 nt, Human
cagaagccccaggccucc

SEQ ID NO: 83691 - RNA, 32 nt, Human
cagaagcccccacaugggggcucuaggaaugc

SEQ ID NO: 83692 - RNA, 21 nt, Human
cagaagccccugcccacggga

SEQ ID NO: 83693 - RNA, 20 nt, Human
cagaagccccugcccaguga

SEQ ID NO: 83694 - RNA, 20 nt, Human
cagaagcccggggccaggga

SEQ ID NO: 83695 - RNA, 20 nt, Human
cagaagcccguuuccuuccc

SEQ ID NO: 83696 - RNA, 22 nt, Human
cagaagcccuaggucccagagg

SEQ ID NO: 83697 - RNA, 32 nt, Human
cagaagcccucgggaggcucggucacaaucuc

SEQ ID NO: 83698 - RNA, 20 nt, Human
cagaagcccugaccuaagga

SEQ ID NO: 83699 - RNA, 26 nt, Human
cagaagcccugauguguccucaggga

SEQ ID NO: 83700 - RNA, 32 nt, Human
cagaagcccugcacguggccagcuggggagau

SEQ ID NO: 83701 - RNA, 32 nt, Human
cagaagcccugcugucugucugugcccaagcc

SEQ ID NO: 83702 - RNA, 32 nt, Human
cagaagcccuggcugcgcaucgaugccagaca

SEQ ID NO: 83703 - RNA, 32 nt, Human
cagaagcccuucuccccgcugggcugacagac

SEQ ID NO: 83704 - RNA, 21 nt, Human
cagaagccgcaguuucagggg

SEQ ID NO: 83705 - RNA, 24 nt, Human
cagaagccgcgaggcccucaggga

SEQ ID NO: 83706 - RNA, 32 nt, Human
cagaagccgcuuccucuccacugaagagcuau

SEQ ID NO: 83707 - RNA, 31 nt, Human
cagaagccguuucucaucaugccaagccaac

SEQ ID NO: 83708 - RNA, 32 nt, Human
cagaagccucacugggcugcuaugucucugua

SEQ ID NO: 83709 - RNA, 21 nt, Human
cagaagccugcgaccuuggga

SEQ ID NO: 83710 - RNA, 26 nt, Human
cagaagccugcggacccgcccaggga

SEQ ID NO: 83711 - RNA, 19 nt, Human
cagaagccugggcuuaggg

SEQ ID NO: 83712 - RNA, 32 nt, Human
cagaagccugggugccuggcuggcugagggca

SEQ ID NO: 83713 - RNA, 23 nt, Human
cagaagccuggucugugccuagg

SEQ ID NO: 83714 - RNA, 32 nt, Human
cagaagccuggugcccuggcgacacuggaccu

SEQ ID NO: 83715 - RNA, 32 nt, Human
cagaagccuuuacccauccugagacucaguuc

SEQ ID NO: 83716 - RNA, 31 nt, Human
cagaagcggcagccaccgaggagggagcagu

SEQ ID NO: 83717 - RNA, 24 nt, Human
cagaagcggcguuugcggccgcug

SEQ ID NO: 83718 - RNA, 22 nt, Human
cagaagcggcuaguggcggcug

SEQ ID NO: 83719 - RNA, 21 nt, Human
cagaagcggcugccagcucug

SEQ ID NO: 83720 - RNA, 19 nt, Human
cagaagcggcuuugcugcu

SEQ ID NO: 83721 - RNA, 32 nt, Human
cagaagcggggugggagggugugcaugcuagu

SEQ ID NO: 83722 - RNA, 21 nt, Human
cagaagcguccugugacucug

SEQ ID NO: 83723 - RNA, 32 nt, Human
cagaagcguggaggaaagauuaugaaaggaac

SEQ ID NO: 83724 - RNA, 23 nt, Human
cagaagcgugguccugcggcugc

SEQ ID NO: 83725 - RNA, 24 nt, Human
cagaagcucacucuuuuccaggga

SEQ ID NO: 83726 - RNA, 32 nt, Human
cagaagcucacugcuuuggcccccuuacucuu

SEQ ID NO: 83727 - RNA, 24 nt, Human
cagaagcuccagcauuugcccagg

SEQ ID NO: 83728 - RNA, 32 nt, Human
cagaagcucccagggaauaaugguggcgaguu

SEQ ID NO: 83729 - RNA, 32 nt, Human
cagaagcuccccaggcucuagugcaggaggag

SEQ ID NO: 83730 - RNA, 18 nt, Human
cagaagcuccuucaggaa

SEQ ID NO: 83731 - RNA, 32 nt, Human
cagaagcuccuugguuuaaccagcacagagaa

SEQ ID NO: 83732 - RNA, 20 nt, Human
cagaagcucggcgcgaggga

SEQ ID NO: 83733 - RNA, 32 nt, Human
cagaagcucugcccuucuguauccuauguaug

SEQ ID NO: 83734 - RNA, 22 nt, Human
cagaagcugaagacaacaccug

SEQ ID NO: 83735 - RNA, 20 nt, Human
cagaagcugagcaccagggg

SEQ ID NO: 83736 - RNA, 32 nt, Human
cagaagcugcauuuugccaagaucccagggaa

SEQ ID NO: 83737 - RNA, 24 nt, Human
cagaagcugccuguugccugugga

SEQ ID NO: 83738 - RNA, 26 nt, Human
cagaagcugcuaggcugaggcugcug

SEQ ID NO: 83739 - RNA, 32 nt, Human
cagaagcugcucuaggaguuccuggccaguca

SEQ ID NO: 83740 - RNA, 32 nt, Human
cagaagcuggacugcaguccacggcaccacuc

SEQ ID NO: 83741 - RNA, 27 nt, Human
cagaagcuggacuuccgccugcagcag

SEQ ID NO: 83742 - RNA, 32 nt, Human
cagaagcugggaaggaccaagccucagcaccc

SEQ ID NO: 83743 - RNA, 32 nt, Human
cagaagcugggccuuccgccucccuuggaugg

SEQ ID NO: 83744 - RNA, 32 nt, Human
cagaagcuggggaggugagagugcagaaagga

SEQ ID NO: 83745 - RNA, 32 nt, Human
cagaagcuggggaggugagagugcuagaaagg

SEQ ID NO: 83746 - RNA, 21 nt, Human
cagaagcuggggcccagcgga

SEQ ID NO: 83747 - RNA, 32 nt, Human
cagaagcugugugcucaauggaagaggaugac

SEQ ID NO: 83748 - RNA, 32 nt, Human
cagaagcuguuuugcucagagcuggauuagga

SEQ ID NO: 83749 - RNA, 32 nt, Human
cagaagcuucaaaaucugaaucuuuuugagca

SEQ ID NO: 83750 - RNA, 32 nt, Human
cagaagcuuccucugggcucagacucaggcug

SEQ ID NO: 83751 - RNA, 22 nt, Human
cagaagcuucgaggcccagcga

SEQ ID NO: 83752 - RNA, 32 nt, Human
cagaagcuuggacagcaagugggagucagcag

SEQ ID NO: 83753 - RNA, 32 nt, Human
cagaagcuuuagagguaugaggcugcagaacc

SEQ ID NO: 83754 - RNA, 32 nt, Human
cagaagcuuuuugacagaaacucucucccagu

SEQ ID NO: 83755 - RNA, 20 nt, Human
cagaaggaacccuccagucc

SEQ ID NO: 83756 - RNA, 32 nt, Human
cagaaggaacucagaggagucaaguggucaaa

SEQ ID NO: 83757 - RNA, 32 nt, Human
cagaaggaagcaacaaagacagcaacugaaca

SEQ ID NO: 83758 - RNA, 32 nt, Human
cagaaggaagguuuagaaagaaaagaacacuu

SEQ ID NO: 83759 - RNA, 23 nt, Human
cagaaggaaucuauucucagcag

SEQ ID NO: 83760 - RNA, 18 nt, Human
cagaaggaaucugugcag

SEQ ID NO: 83761 - RNA, 32 nt, Human
cagaaggaaugcugggggcagucaugucccag

SEQ ID NO: 83762 - RNA, 18 nt, Human
cagaaggaauggguccag

SEQ ID NO: 83763 - RNA, 32 nt, Human
cagaaggacagacggacccaggagggagggca

SEQ ID NO: 83764 - RNA, 32 nt, Human
cagaaggacaggcuguguuuggguauauguac

SEQ ID NO: 83765 - RNA, 31 nt, Human
cagaaggaccuacuggagcagauguggccga

SEQ ID NO: 83766 - RNA, 32 nt, Human
cagaaggacggcaggaguguccuggcugugaa

SEQ ID NO: 83767 - RNA, 32 nt, Human
cagaaggagauggagagcaagagacugcggcu

SEQ ID NO: 83768 - RNA, 21 nt, Human
cagaaggagcaauggcaccug

SEQ ID NO: 83769 - RNA, 32 nt, Human
cagaaggagcacccaccucccucccucuguga

SEQ ID NO: 83770 - RNA, 21 nt, Human
cagaaggagccagggcugcug

SEQ ID NO: 83771 - RNA, 32 nt, Human
cagaaggagccugaggcugagguggaggcugg

SEQ ID NO: 83772 - RNA, 32 nt, Human
cagaaggagcuacaaaaccuacccucaaugag

SEQ ID NO: 83773 - RNA, 21 nt, Human
cagaaggagcuuuugaaaagg

SEQ ID NO: 83774 - RNA, 32 nt, Human
cagaaggaggauugaauuaaagggaaaguguc

SEQ ID NO: 83775 - RNA, 32 nt, Human
cagaaggagucagaggaggaguuagaggagga

SEQ ID NO: 83776 - RNA, 32 nt, Human
cagaaggaugucucagaugaggauguggcucg

SEQ ID NO: 83777 - RNA, 19 nt, Human
cagaaggauugcuggagcc

SEQ ID NO: 83778 - RNA, 19 nt, Human
cagaaggauugcuugagcc

SEQ ID NO: 83779 - RNA, 21 nt, Human
cagaaggauugcuuggaccca

SEQ ID NO: 83780 - RNA, 21 nt, Human
cagaaggauugcuuggagguc

SEQ ID NO: 83781 - RNA, 32 nt, Human
cagaaggcaaaaagacauuaccaugaguaaua

SEQ ID NO: 83782 - RNA, 32 nt, Human
cagaaggcaaagccccagacagcaaauaggga

SEQ ID NO: 83783 - RNA, 32 nt, Human
cagaaggcaaaguuuccauguggccuugagca

SEQ ID NO: 83784 - RNA, 32 nt, Human
cagaaggcaagcaccaggcucacagcuggaac

SEQ ID NO: 83785 - RNA, 32 nt, Human
cagaaggcacaggagcugggccugguggagcu

SEQ ID NO: 83786 - RNA, 18 nt, Human
cagaaggcacccuaggca

SEQ ID NO: 83787 - RNA, 32 nt, Human
cagaaggcacccuggccaugcacaggcaucgc

SEQ ID NO: 83788 - RNA, 32 nt, Human
cagaaggcacugacugaagacaggauggauca

SEQ ID NO: 83789 - RNA, 22 nt, Human
cagaaggcagagguugcagugg

SEQ ID NO: 83790 - RNA, 32 nt, Human
cagaaggcagggucugcuugggcaguugagag

SEQ ID NO: 83791 - RNA, 32 nt, Human
cagaaggcaggugagagaauucuuaggggcug

SEQ ID NO: 83792 - RNA, 32 nt, Human
cagaaggcagugugauuguaacaaaaacaaug

SEQ ID NO: 83793 - RNA, 32 nt, Human
cagaaggcaucauuuauaagacaguauggcag

SEQ ID NO: 83794 - RNA, 32 nt, Human
cagaaggcaucuucucacugugcugcaaaucu

SEQ ID NO: 83795 - RNA, 32 nt, Human
cagaaggccaagcaggacauggccugcaugcu

SEQ ID NO: 83796 - RNA, 32 nt, Human
cagaaggccaaggcccgauguggugugcagag

SEQ ID NO: 83797 - RNA, 32 nt, Human
cagaaggcccauuccucccaccacggggccac

SEQ ID NO: 83798 - RNA, 21 nt, Human
cagaaggccccggccugagga

SEQ ID NO: 83799 - RNA, 20 nt, Human
cagaaggccguggggagugg

SEQ ID NO: 83800 - RNA, 27 nt, Human
cagaaggcgaagaagaaagaaagggga

SEQ ID NO: 83801 - RNA, 32 nt, Human
cagaaggcgcggaccuggaggaggcgccccag

SEQ ID NO: 83802 - RNA, 22 nt, Human
cagaaggcggaggcugcaguga

SEQ ID NO: 83803 - RNA, 32 nt, Human
cagaaggcuacaaccuaguucuggacucggac

SEQ ID NO: 83804 - RNA, 32 nt, Human
cagaaggcucugagacauagcagcaguauccu

SEQ ID NO: 83805 - RNA, 32 nt, Human
cagaaggcuugcuccaaugccacugagcccug

SEQ ID NO: 83806 - RNA, 32 nt, Human
cagaagggaaacugaggcucggcaagcauagg

SEQ ID NO: 83807 - RNA, 32 nt, Human
cagaagggaagguagccagugccugagaagac

SEQ ID NO: 83808 - RNA, 32 nt, Human
cagaagggagagaggcagcaagucagaaaguu

SEQ ID NO: 83809 - RNA, 32 nt, Human
cagaagggagagagggagggcgcaaggggagg

SEQ ID NO: 83810 - RNA, 32 nt, Human
cagaagggagagaguccuuacucccuuccaau

SEQ ID NO: 83811 - RNA, 32 nt, Human
cagaagggaggggaggaaagagacugagggcc

SEQ ID NO: 83812 - RNA, 32 nt, Human
cagaagggaucucuuuagcuuauguguggauu

SEQ ID NO: 83813 - RNA, 24 nt, Human
cagaagggccuggagagaggggga

SEQ ID NO: 83814 - RNA, 32 nt, Human
cagaagggccuggagagagggggaacgggcag

SEQ ID NO: 83815 - RNA, 32 nt, Human
cagaaggggaaagggaauauugcaaaagggag

SEQ ID NO: 83816 - RNA, 32 nt, Human
cagaaggggagaagaaugacccaaguggaagg

SEQ ID NO: 83817 - RNA, 32 nt, Human
cagaaggggcaggccagguggaaaggagccag

SEQ ID NO: 83818 - RNA, 22 nt, Human
cagaaggggcauggccaccucc

SEQ ID NO: 83819 - RNA, 22 nt, Human
cagaaggggcccacugagccca

SEQ ID NO: 83820 - RNA, 32 nt, Human
cagaagggggcagacggugacuucugaagcug

SEQ ID NO: 83821 - RNA, 25 nt, Human
cagaaggggucugagcagagacauu

SEQ ID NO: 83822 - RNA, 21 nt, Human
cagaagggguucugggccuag

SEQ ID NO: 83823 - RNA, 32 nt, Human
cagaaggguaagagagggcaagagugagcaag

SEQ ID NO: 83824 - RNA, 32 nt, Human
cagaaggguuccaucuuguggucagcggggug

SEQ ID NO: 83825 - RNA, 32 nt, Human
cagaagguaggaaaauccuagcuuuccauuug

SEQ ID NO: 83826 - RNA, 32 nt, Human
cagaagguauauuauugugaauucugggaugg

SEQ ID NO: 83827 - RNA, 32 nt, Human
cagaaggucaccagagagcuuucagcugaggg

SEQ ID NO: 83828 - RNA, 32 nt, Human
cagaaggucaggaauuuuuggagaccuuucuc

SEQ ID NO: 83829 - RNA, 32 nt, Human
cagaaggugaagacaucuagaaacauuacacc

SEQ ID NO: 83830 - RNA, 32 nt, Human
cagaaggugagcuguuguuuuucuaaaccucu

SEQ ID NO: 83831 - RNA, 32 nt, Human
cagaagguggagguggcagugagccgagauca

SEQ ID NO: 83832 - RNA, 22 nt, Human
cagaagguggagguugcaguga

SEQ ID NO: 83833 - RNA, 32 nt, Human
cagaaggugggccgcuuccuguggaagaggga

SEQ ID NO: 83834 - RNA, 24 nt, Human
cagaaggugggcggcaggaucaga

SEQ ID NO: 83835 - RNA, 19 nt, Human
cagaagguuccugcagcag

SEQ ID NO: 83836 - RNA, 32 nt, Human
cagaagguuuggagugacagcuccuuucuucu

SEQ ID NO: 83837 - RNA, 32 nt, Human
cagaaguaaauacauuugacccuugagcaaca

SEQ ID NO: 83838 - RNA, 21 nt, Human
cagaaguaacacaggcaccug

SEQ ID NO: 83839 - RNA, 32 nt, Human
cagaaguaacacaggcaccuggagaauacaca

SEQ ID NO: 83840 - RNA, 32 nt, Human
cagaaguaagcaagguuuccugccgggagaaa

SEQ ID NO: 83841 - RNA, 32 nt, Human
cagaaguaccuuugcacuccugguuuucagug

SEQ ID NO: 83842 - RNA, 20 nt, Human
cagaaguacuuccccaggga

SEQ ID NO: 83843 - RNA, 32 nt, Human
cagaaguagcuucaggacagaagauugcugua

SEQ ID NO: 83844 - RNA, 32 nt, Human
cagaaguaguaggaagugagcuguucagaggc

SEQ ID NO: 83845 - RNA, 31 nt, Human
cagaaguagugagucaguguggaagagaggu

SEQ ID NO: 83846 - RNA, 32 nt, Human
cagaaguauauugagucagugccggcugcguu

SEQ ID NO: 83847 - RNA, 32 nt, Human
cagaagucaaauaccagccauaucaguagagc

SEQ ID NO: 83848 - RNA, 32 nt, Human
cagaagucaaugauuguugaagcagaaugguu

SEQ ID NO: 83849 - RNA, 23 nt, Human
cagaagucacgagggccucugcc

SEQ ID NO: 83850 - RNA, 32 nt, Human
cagaagucagcagcagaaacgacaaggcacuu

SEQ ID NO: 83851 - RNA, 32 nt, Human
cagaagucagccgcaauccaggcacaggacga

SEQ ID NO: 83852 - RNA, 32 nt, Human
cagaagucaguggcugcucaccagagaggggc

SEQ ID NO: 83853 - RNA, 32 nt, Human
cagaagucauuuucagccuuaauucucaucau

SEQ ID NO: 83854 - RNA, 32 nt, Human
cagaaguccaagaauacagcuguagggucauu

SEQ ID NO: 83855 - RNA, 32 nt, Human
cagaaguccauuggaauauuaagcccaggagu

SEQ ID NO: 83856 - RNA, 32 nt, Human
cagaaguccucgggguuccuucucacaacucu

SEQ ID NO: 83857 - RNA, 32 nt, Human
cagaaguccugucacuugccccugcuguuagg

SEQ ID NO: 83858 - RNA, 20 nt, Human
cagaagucuaggcccaggga

SEQ ID NO: 83859 - RNA, 20 nt, Human
cagaagucucagaggcaccu

SEQ ID NO: 83860 - RNA, 32 nt, Human
cagaagucuccuccuccaugaucacuuuggaa

SEQ ID NO: 83861 - RNA, 23 nt, Human
cagaagugaacuaugggcugcug

SEQ ID NO: 83862 - RNA, 25 nt, Human
cagaagugaagagaaaagaggagga

SEQ ID NO: 83863 - RNA, 32 nt, Human
cagaagugaauuaguuuccaccagggaccccu

SEQ ID NO: 83864 - RNA, 32 nt, Human
cagaagugagagaacugaagauuccuggugcu

SEQ ID NO: 83865 - RNA, 32 nt, Human
cagaagugagccacuguaccuggccuuuugga

SEQ ID NO: 83866 - RNA, 32 nt, Human
cagaagugagccacuguguccugccuaaaaug

SEQ ID NO: 83867 - RNA, 32 nt, Human
cagaagugaggcagcugccucccucccaaccu

SEQ ID NO: 83868 - RNA, 32 nt, Human
cagaagugcaccaccacacccgguuaauuuuu

SEQ ID NO: 83869 - RNA, 32 nt, Human
cagaagugcagaacugcagucacugcacguuu

SEQ ID NO: 83870 - RNA, 21 nt, Human
cagaagugcauggcccaucgu

SEQ ID NO: 83871 - RNA, 20 nt, Human
cagaagugccagccugggga

SEQ ID NO: 83872 - RNA, 32 nt, Human
cagaagugcuggcuaggaggucucagccucgg

SEQ ID NO: 83873 - RNA, 20 nt, Human
cagaaguggagaggaccaga

SEQ ID NO: 83874 - RNA, 21 nt, Human
cagaaguggagcugcagcugc

SEQ ID NO: 83875 - RNA, 32 nt, Human
cagaaguggaucaccugcugguggaaaugugg

SEQ ID NO: 83876 - RNA, 21 nt, Human
cagaaguggcacaaaaccccu

SEQ ID NO: 83877 - RNA, 29 nt, Human
cagaaguggcugcuagaucucucuccuuu

SEQ ID NO: 83878 - RNA, 32 nt, Human
cagaagugggggaaaauuuuuagaagaaaagc

SEQ ID NO: 83879 - RNA, 32 nt, Human
cagaagugguggaaauuggcagcugggguacu

SEQ ID NO: 83880 - RNA, 32 nt, Human
cagaaguucaggaauuuuuggacaccuuucuc

SEQ ID NO: 83881 - RNA, 32 nt, Human
cagaaguuccacugcacuccagccuggguuac

SEQ ID NO: 83882 - RNA, 32 nt, Human
cagaaguuccaggacugguuuuccaguacauc

SEQ ID NO: 83883 - RNA, 32 nt, Human
cagaaguugccuggcuuggcacucucugcggu

SEQ ID NO: 83884 - RNA, 32 nt, Human
cagaaguuguguuguuguuuugcuguuuaucu

SEQ ID NO: 83885 - RNA, 32 nt, Human
cagaaguuuccuguagcccuugagugacuuug

SEQ ID NO: 83886 - RNA, 32 nt, Human
cagaaguuucucagcucccaaggcucugagca

SEQ ID NO: 83887 - RNA, 32 nt, Human
cagaaguuugagaccagccuaggcaacauugc

SEQ ID NO: 83888 - RNA, 32 nt, Human
cagaaguuuuaucacccacuuuauggacggaa

SEQ ID NO: 83889 - RNA, 21 nt, Human
cagaauaaaggaagaagggga

SEQ ID NO: 83890 - RNA, 19 nt, Human
cagaauaaauacuuuuaua

SEQ ID NO: 83891 - RNA, 19 nt, Human
cagaauaacuuuccaggaa

SEQ ID NO: 83892 - RNA, 32 nt, Human
cagaauaagaguacugacuaagcugccugaaa

SEQ ID NO: 83893 - RNA, 32 nt, Human
cagaauaagucuaaaggcagagccccagccuc

SEQ ID NO: 83894 - RNA, 32 nt, Human
cagaauacagcagauggcccuucugaacaugu

SEQ ID NO: 83895 - RNA, 32 nt, Human
cagaauagcagucccuggauggcagucugccu

SEQ ID NO: 83896 - RNA, 32 nt, Human
cagaauagcuaggaguaggaguagcugggacu

SEQ ID NO: 83897 - RNA, 18 nt, Human
cagaauagcugggcccag

SEQ ID NO: 83898 - RNA, 32 nt, Human
cagaauaggaacagguguuugcucuccuaaga

SEQ ID NO: 83899 - RNA, 32 nt, Human
cagaauaggaagagaggaagaacuuacaaaga

SEQ ID NO: 83900 - RNA, 32 nt, Human
cagaauagggagaaggaggagaggggaggcug

SEQ ID NO: 83901 - RNA, 32 nt, Human
cagaauagggcuggggcagcucccagagaaug

SEQ ID NO: 83902 - RNA, 21 nt, Human
cagaauaguaccuuacauuug

SEQ ID NO: 83903 - RNA, 32 nt, Human
cagaauauacagaaagcaacaaacuucguaaa

SEQ ID NO: 83904 - RNA, 32 nt, Human
cagaauaucuuuccaaggauguuugcauagug

SEQ ID NO: 83905 - RNA, 32 nt, Human
cagaauaugcuuguuggagauccuucaggcag

SEQ ID NO: 83906 - RNA, 32 nt, Human
cagaauaugucuucugugucaugguggcauuu

SEQ ID NO: 83907 - RNA, 21 nt, Human
cagaaucaaaacucucugccu

SEQ ID NO: 83908 - RNA, 32 nt, Human
cagaaucaagugagcccaggaguucagggcca

SEQ ID NO: 83909 - RNA, 32 nt, Human
cagaaucaaugugagacaacacuacugggugu

SEQ ID NO: 83910 - RNA, 19 nt, Human
cagaaucaggagaaagaug

SEQ ID NO: 83911 - RNA, 23 nt, Human
cagaaucagguucauccagagga

SEQ ID NO: 83912 - RNA, 32 nt, Human
cagaaucagugccuagccugugcccagcaaau

SEQ ID NO: 83913 - RNA, 21 nt, Human
cagaaucauacucuccaggaa

SEQ ID NO: 83914 - RNA, 32 nt, Human
cagaaucaucaccagagacaccugccggcuga

SEQ ID NO: 83915 - RNA, 32 nt, Human
cagaaucaucaucugcaucuggagauuuccac

SEQ ID NO: 83916 - RNA, 32 nt, Human
cagaaucaucaucugugaugaugguguccuuu

SEQ ID NO: 83917 - RNA, 32 nt, Human
cagaaucaugcuguucucuuugcugacacugu

SEQ ID NO: 83918 - RNA, 32 nt, Human
cagaaucauggagaaaaugggcggggguggug

SEQ ID NO: 83919 - RNA, 32 nt, Human
cagaaucauggugggaggcaaaagacacuucu

SEQ ID NO: 83920 - RNA, 23 nt, Human
cagaaucauuauaaaucccagua

SEQ ID NO: 83921 - RNA, 23 nt, Human
cagaauccaagaucugccaggaa

SEQ ID NO: 83922 - RNA, 32 nt, Human
cagaauccaggguucaccuaagcugcacaguu

SEQ ID NO: 83923 - RNA, 32 nt, Human
cagaauccauggcuggaagagguaguaaggcc

SEQ ID NO: 83924 - RNA, 22 nt, Human
cagaaucccagaauucuaggaa

SEQ ID NO: 83925 - RNA, 21 nt, Human
cagaaucccuauacaauguga

SEQ ID NO: 83926 - RNA, 32 nt, Human
cagaaucccuggaagagaaggaaggcagggug

SEQ ID NO: 83927 - RNA, 24 nt, Human
cagaaucccuuguaucuccuuucu

SEQ ID NO: 83928 - RNA, 19 nt, Human
cagaauccggcuccaggaa

SEQ ID NO: 83929 - RNA, 32 nt, Human
cagaauccucucucccccucccaagcugggga

SEQ ID NO: 83930 - RNA, 32 nt, Human
cagaauccuuuuccucuuuuccuuccuccucu

SEQ ID NO: 83931 - RNA, 32 nt, Human
cagaaucgaacucugcacuucucucuccuuua

SEQ ID NO: 83932 - RNA, 24 nt, Human
cagaaucgauuauuccucagguga

SEQ ID NO: 83933 - RNA, 32 nt, Human
cagaaucgcccaggccaggcuguggcagauga

SEQ ID NO: 83934 - RNA, 32 nt, Human
cagaaucuaaaucaaguauuuugaaggaagca

SEQ ID NO: 83935 - RNA, 17 nt, Human
cagaaucuaagcaggaa

SEQ ID NO: 83936 - RNA, 18 nt, Human
cagaaucuacccaaagga

SEQ ID NO: 83937 - RNA, 21 nt, Human
cagaaucuauauccucaggaa

SEQ ID NO: 83938 - RNA, 32 nt, Human
cagaaucucaaggagcugcuggccgucagggc

SEQ ID NO: 83939 - RNA, 32 nt, Human
cagaaucucacuccagccugggcaacagaaug

SEQ ID NO: 83940 - RNA, 32 nt, Human
cagaaucucagggcuuauccuagaagguggug

SEQ ID NO: 83941 - RNA, 32 nt, Human
cagaaucuccagaacaaggaggagguggugau

SEQ ID NO: 83942 - RNA, 19 nt, Human
cagaaucuccaucccugaa

SEQ ID NO: 83943 - RNA, 32 nt, Human
cagaaucuccaucccugaaauuucucauuagu

SEQ ID NO: 83944 - RNA, 19 nt, Human
cagaaucuccuucuuuccu

SEQ ID NO: 83945 - RNA, 19 nt, Human
cagaaucucugcccaggag

SEQ ID NO: 83946 - RNA, 19 nt, Human
cagaaucugaacccaggaa

SEQ ID NO: 83947 - RNA, 32 nt, Human
cagaaucugcauuuuaacaagauccccaggug

SEQ ID NO: 83948 - RNA, 32 nt, Human
cagaaucugcauuuuaacaagaugccugggug

SEQ ID NO: 83949 - RNA, 32 nt, Human
cagaaucugcccuuccccaaccuugguuucuc

SEQ ID NO: 83950 - RNA, 32 nt, Human
cagaaucugccgccccuccaucuucuaccucu

SEQ ID NO: 83951 - RNA, 32 nt, Human
cagaaucugccuggcgggcgcuggagccugcg

SEQ ID NO: 83952 - RNA, 32 nt, Human
cagaaucugcuaccugaggcuccagggccuug

SEQ ID NO: 83953 - RNA, 32 nt, Human
cagaaucuggaacugggcuucugugauucaaa

SEQ ID NO: 83954 - RNA, 32 nt, Human
cagaaucugucacccaggcuggagugcagugg

SEQ ID NO: 83955 - RNA, 18 nt, Human
cagaaucuucacuccagg

SEQ ID NO: 83956 - RNA, 21 nt, Human
cagaaucuucuugcucaggaa

SEQ ID NO: 83957 - RNA, 19 nt, Human
cagaaucuugacccaggga

SEQ ID NO: 83958 - RNA, 32 nt, Human
cagaaucuuugcuggucccuuuaaugcugauu

SEQ ID NO: 83959 - RNA, 32 nt, Human
cagaaugaaaccucuuuuccauccagaagcac

SEQ ID NO: 83960 - RNA, 31 nt, Human
cagaaugaacguuucgccugccaaagauaug

SEQ ID NO: 83961 - RNA, 32 nt, Human
cagaaugaagaaagucagggggacugcaaagg

SEQ ID NO: 83962 - RNA, 32 nt, Human
cagaaugacagagagagaaaaugauucucugc

SEQ ID NO: 83963 - RNA, 32 nt, Human
cagaaugagacacaggaggagccacagccugc

SEQ ID NO: 83964 - RNA, 32 nt, Human
cagaaugagcagagccagcagaacugauggag

SEQ ID NO: 83965 - RNA, 32 nt, Human
cagaaugagcagcugcuacucagccccaaccu

SEQ ID NO: 83966 - RNA, 32 nt, Human
cagaaugagggggacaauuccacccacucgag

SEQ ID NO: 83967 - RNA, 17 nt, Human
cagaaugagugucauug

SEQ ID NO: 83968 - RNA, 32 nt, Human
cagaaugaugagugagacucaggaggcacgac

SEQ ID NO: 83969 - RNA, 18 nt, Human
cagaaugaugccuccaua

SEQ ID NO: 83970 - RNA, 32 nt, Human
cagaaugauuuguuuuauucauugacuuuucc

SEQ ID NO: 83971 - RNA, 32 nt, Human
cagaaugcaaaauaaaacuugcagugaaugaa

SEQ ID NO: 83972 - RNA, 32 nt, Human
cagaaugcaaggccgaaggccauucggagcug

SEQ ID NO: 83973 - RNA, 32 nt, Human
cagaaugcaguggugugcaccuguaauccccg

SEQ ID NO: 83974 - RNA, 32 nt, Human
cagaaugccaccaaugccccaggacaggccca

SEQ ID NO: 83975 - RNA, 29 nt, Human
cagaaugcccgugccagccuccuggcccc

SEQ ID NO: 83976 - RNA, 32 nt, Human
cagaaugccggaggggcgcagagcagauccag

SEQ ID NO: 83977 - RNA, 17 nt, Human
cagaaugccucccagga

SEQ ID NO: 83978 - RNA, 18 nt, Human
cagaaugcggcugcggcu

SEQ ID NO: 83979 - RNA, 32 nt, Human
cagaaugcucacugcaccacguucaagccuga

SEQ ID NO: 83980 - RNA, 32 nt, Human
cagaaugcuccugagugguguaggugggggug

SEQ ID NO: 83981 - RNA, 32 nt, Human
cagaaugcugcaacuucucuucucucuggacu

SEQ ID NO: 83982 - RNA, 32 nt, Human
cagaaugcuggguuuauagaugugagccagca

SEQ ID NO: 83983 - RNA, 18 nt, Human
cagaaugcuucacggcug

SEQ ID NO: 83984 - RNA, 32 nt, Human
cagaauggaaacagugggccuggaucaaaguu

SEQ ID NO: 83985 - RNA, 32 nt, Human
cagaauggaaagccagagggaaccugagaauc

SEQ ID NO: 83986 - RNA, 32 nt, Human
cagaauggaagcccugaagucaacacuccaug

SEQ ID NO: 83987 - RNA, 32 nt, Human
cagaauggaccugcccuuucugcuccagacuu

SEQ ID NO: 83988 - RNA, 32 nt, Human
cagaauggaggaggcagguuuagggucuggca

SEQ ID NO: 83989 - RNA, 32 nt, Human
cagaauggcaucaucaaaggcacacaguccaa

SEQ ID NO: 83990 - RNA, 20 nt, Human
cagaauggcauucugucccu

SEQ ID NO: 83991 - RNA, 32 nt, Human
cagaauggcgugaacccaggaggcggagguug

SEQ ID NO: 83992 - RNA, 29 nt, Human
cagaauggcuuccuuuggguggaagagga

SEQ ID NO: 83993 - RNA, 32 nt, Human
cagaaugggaaagacagagguuacagaggagc

SEQ ID NO: 83994 - RNA, 32 nt, Human
cagaaugggaggaggacauggagcugauggag

SEQ ID NO: 83995 - RNA, 32 nt, Human
cagaaugggccagggagguugagugacugaag

SEQ ID NO: 83996 - RNA, 32 nt, Human
cagaauggggguccaccaugagcaacagauuu

SEQ ID NO: 83997 - RNA, 32 nt, Human
cagaaugggugcaguuugaggggccugugugg

SEQ ID NO: 83998 - RNA, 32 nt, Human
cagaaugguagaaaccaggcugugcauaaaaa

SEQ ID NO: 83999 - RNA, 32 nt, Human
cagaauguaacaccccuccccaagcccuuccc

SEQ ID NO: 84000 - RNA, 19 nt, Human
cagaauguccgugccauug

SEQ ID NO: 84001 - RNA, 32 nt, Human
cagaauguccugagacagagaucgugaaagaa

SEQ ID NO: 84002 - RNA, 32 nt, Human
cagaaugucugcuuugggugcgguuuuguacu

SEQ ID NO: 84003 - RNA, 32 nt, Human
cagaaugugaagauguuuaauguuacaguguu

SEQ ID NO: 84004 - RNA, 32 nt, Human
cagaauguucucaaacauguggccucacagga

SEQ ID NO: 84005 - RNA, 32 nt, Human
cagaauguugacuguuaguuuguauagcuuuu

SEQ ID NO: 84006 - RNA, 32 nt, Human
cagaauguuuuuaaaacuuuuugccguguaug

SEQ ID NO: 84007 - RNA, 32 nt, Human
cagaauuaaagacaccagaaguagcagagaag

SEQ ID NO: 84008 - RNA, 32 nt, Human
cagaauuaacagaccucuucuccucaugguac

SEQ ID NO: 84009 - RNA, 32 nt, Human
cagaauuaauugaccauggugauacguuguaa

SEQ ID NO: 84010 - RNA, 19 nt, Human
cagaauuagcuuugcuuca

SEQ ID NO: 84011 - RNA, 32 nt, Human
cagaauuagggaaugcugguuuugaagagcaa

SEQ ID NO: 84012 - RNA, 32 nt, Human
cagaauuaggguaauggaagauggaaagaaga

SEQ ID NO: 84013 - RNA, 32 nt, Human
cagaauuauacuuuaaccccucccagauaugg

SEQ ID NO: 84014 - RNA, 32 nt, Human
cagaauucaaaaccaggcugaguccagcagua

SEQ ID NO: 84015 - RNA, 32 nt, Human
cagaauucaaguuucacaaaucccaaugcugu

SEQ ID NO: 84016 - RNA, 32 nt, Human
cagaauucagcacuacuuaauaguuuauaaau

SEQ ID NO: 84017 - RNA, 22 nt, Human
cagaauuccauggucucaauga

SEQ ID NO: 84018 - RNA, 32 nt, Human
cagaauucccgcaucugcaccugcacucccaa

SEQ ID NO: 84019 - RNA, 32 nt, Human
cagaauuccuucaggauccuucuugcugccag

SEQ ID NO: 84020 - RNA, 32 nt, Human
cagaauucuucaccuucucuuccccuuuccau

SEQ ID NO: 84021 - RNA, 32 nt, Human
cagaauugaggaaaugcaaagugaagaauucu

SEQ ID NO: 84022 - RNA, 32 nt, Human
cagaauugcaagggaggaaggcugggguuaga

SEQ ID NO: 84023 - RNA, 32 nt, Human
cagaauugcuugaacccaggaggcagaggguu

SEQ ID NO: 84024 - RNA, 32 nt, Human
cagaauugcuugaacccagggggcagagguug

SEQ ID NO: 84025 - RNA, 32 nt, Human
cagaauugcuugaacccgggaggcagagauag

SEQ ID NO: 84026 - RNA, 32 nt, Human
cagaauugggcugggaccucucuccccaacug

SEQ ID NO: 84027 - RNA, 32 nt, Human
cagaauuggguauuuaaaguaaauugaggaca

SEQ ID NO: 84028 - RNA, 20 nt, Human
cagaauugucacgucucccu

SEQ ID NO: 84029 - RNA, 32 nt, Human
cagaauuuaggaggcccagugaaaugcaaaug

SEQ ID NO: 84030 - RNA, 32 nt, Human
cagaauuuauauaggaaugugauguuagagaa

SEQ ID NO: 84031 - RNA, 32 nt, Human
cagaauuucuucuuccagggaaacaguuuuug

SEQ ID NO: 84032 - RNA, 19 nt, Human
cagaauuugacacacucca

SEQ ID NO: 84033 - RNA, 32 nt, Human
cagaauuuuccacgaagugcucugagaggugg

SEQ ID NO: 84034 - RNA, 24 nt, Human
cagaauuuuccugggccacugggg

SEQ ID NO: 84035 - RNA, 18 nt, Human
cagaauuuuuaccaggaa

SEQ ID NO: 84036 - RNA, 32 nt, Human
cagacaaaaacuauaacauauuagcugcccua

SEQ ID NO: 84037 - RNA, 22 nt, Human
cagacaaaagguggcacagaca

SEQ ID NO: 84038 - RNA, 32 nt, Human
cagacaaacacuccuauggaaauuuaaaggag

SEQ ID NO: 84039 - RNA, 32 nt, Human
cagacaaagaugaggauccggaccgcuugaaa

SEQ ID NO: 84040 - RNA, 32 nt, Human
cagacaaagcauaccagaucucaccagagagu

SEQ ID NO: 84041 - RNA, 32 nt, Human
cagacaaagucccgugcccuguuuccaaugcc

SEQ ID NO: 84042 - RNA, 24 nt, Human
cagacaaaucgcuccaccaacuaa

SEQ ID NO: 84043 - RNA, 32 nt, Human
cagacaacaugcuggaguacaagucuuggcug

SEQ ID NO: 84044 - RNA, 32 nt, Human
cagacaaccaaaacauauucaaagcagcagcc

SEQ ID NO: 84045 - RNA, 32 nt, Human
cagacaaccacgaccaacuagucccagauaac

SEQ ID NO: 84046 - RNA, 32 nt, Human
cagacaaccaggguccaucaguagagggaacc

SEQ ID NO: 84047 - RNA, 32 nt, Human
cagacaacuccacagcccagagcccaaacuca

SEQ ID NO: 84048 - RNA, 32 nt, Human
cagacaacuucuguuucuucucuuggugaaau

SEQ ID NO: 84049 - RNA, 32 nt, Human
cagacaagaugaacguagaacaugagagauau

SEQ ID NO: 84050 - RNA, 32 nt, Human
cagacaagcacacccaucacauuaauacaaac

SEQ ID NO: 84051 - RNA, 32 nt, Human
cagacaagccaaaaacagagacagggaagaac

SEQ ID NO: 84052 - RNA, 32 nt, Human
cagacaagggaaugccugugggaaggcugcac

SEQ ID NO: 84053 - RNA, 32 nt, Human
cagacaaguuuccaagaguggaacaugguguc

SEQ ID NO: 84054 - RNA, 32 nt, Human
cagacaauacacacccacucgcacaagcuucc

SEQ ID NO: 84055 - RNA, 32 nt, Human
cagacaauggcccaggucucucaacuucauca

SEQ ID NO: 84056 - RNA, 32 nt, Human
cagacaauguuguguuuggauuuguaacuguu

SEQ ID NO: 84057 - RNA, 32 nt, Human
cagacacaacuggccacuggguggugcacaag

SEQ ID NO: 84058 - RNA, 32 nt, Human
cagacacaacuucuuccugcugcuccagucgu

SEQ ID NO: 84059 - RNA, 32 nt, Human
cagacacaagcgcgcacacaggcuccgcacac

SEQ ID NO: 84060 - RNA, 32 nt, Human
cagacacaaugguucaugcccaaaaggaacag

SEQ ID NO: 84061 - RNA, 32 nt, Human
cagacacacaaaccccagcucauccaguccug

SEQ ID NO: 84062 - RNA, 32 nt, Human
cagacacacggguggacaggaggcagagcucg

SEQ ID NO: 84063 - RNA, 32 nt, Human
cagacacagaacauaucaucacugcagauagu

SEQ ID NO: 84064 - RNA, 19 nt, Human
cagacacagcaaguuccuu

SEQ ID NO: 84065 - RNA, 32 nt, Human
cagacacaggugccucacgccuguaaucccag

SEQ ID NO: 84066 - RNA, 32 nt, Human
cagacacauacgcacacacgugcacacaugua

SEQ ID NO: 84067 - RNA, 32 nt, Human
cagacacauagaugcucaccagccuggcuuag

SEQ ID NO: 84068 - RNA, 32 nt, Human
cagacacauuggugcaugcacacacaccccac

SEQ ID NO: 84069 - RNA, 32 nt, Human
cagacaccaaggugaagagcuacugaaucuug

SEQ ID NO: 84070 - RNA, 32 nt, Human
cagacaccaccaaguucucugccugcaaaacc

SEQ ID NO: 84071 - RNA, 32 nt, Human
cagacaccaggauaaacuccugauggggaaga

SEQ ID NO: 84072 - RNA, 32 nt, Human
cagacaccaggccaggcuugagagacagaacu

SEQ ID NO: 84073 - RNA, 32 nt, Human
cagacacccacugccugucucacuucugucag

SEQ ID NO: 84074 - RNA, 32 nt, Human
cagacacccacuugaugccacagccaugccau

SEQ ID NO: 84075 - RNA, 32 nt, Human
cagacacccccaccccugccuccuccagaccc

SEQ ID NO: 84076 - RNA, 32 nt, Human
cagacaccccuucacguguauccccacacaaa

SEQ ID NO: 84077 - RNA, 32 nt, Human
cagacacccugagauggacccuuguccagggg

SEQ ID NO: 84078 - RNA, 27 nt, Human
cagacaccuaaccccagggcacugcca

SEQ ID NO: 84079 - RNA, 32 nt, Human
cagacaccuauuacagagccaggaugaaaugu

SEQ ID NO: 84080 - RNA, 32 nt, Human
cagacaccucucuucagggaagaugagucuga

SEQ ID NO: 84081 - RNA, 32 nt, Human
cagacacgcagggagaaggcagccgugugaag

SEQ ID NO: 84082 - RNA, 32 nt, Human
cagacacgcaugcacacacgcagaggugcaga

SEQ ID NO: 84083 - RNA, 32 nt, Human
cagacacguggguuucaucacucugaggggcc

SEQ ID NO: 84084 - RNA, 19 nt, Human
cagacacuaaguuauagua

SEQ ID NO: 84085 - RNA, 32 nt, Human
cagacacuaugcugccucccauggcccugccc

SEQ ID NO: 84086 - RNA, 19 nt, Human
cagacacucagcccucccc

SEQ ID NO: 84087 - RNA, 31 nt, Human
cagacacucaguaaauagcuguugaaugaau

SEQ ID NO: 84088 - RNA, 19 nt, Human
cagacacucccuucuccca

SEQ ID NO: 84089 - RNA, 32 nt, Human
cagacacucucuuucagccucuuuugcaggua

SEQ ID NO: 84090 - RNA, 32 nt, Human
cagacacucuuguuuagcaccauggagagcuc

SEQ ID NO: 84091 - RNA, 32 nt, Human
cagacacugagccuggugccccggcugcauug

SEQ ID NO: 84092 - RNA, 32 nt, Human
cagacacugcaacagaugccuccuagaaaaug

SEQ ID NO: 84093 - RNA, 32 nt, Human
cagacacugccgggccucccucccgggggcac

SEQ ID NO: 84094 - RNA, 32 nt, Human
cagacacugccucuggucagcccugucuuggc

SEQ ID NO: 84095 - RNA, 31 nt, Human
cagacacuggguucugugacagcagagcaug

SEQ ID NO: 84096 - RNA, 32 nt, Human
cagacacugguucugaggaacuguuguuucgg

SEQ ID NO: 84097 - RNA, 32 nt, Human
cagacacuuuggaaguuuguguucuguuuguu

SEQ ID NO: 84098 - RNA, 32 nt, Human
cagacacuuuguccuagcaucuuucuggaauc

SEQ ID NO: 84099 - RNA, 32 nt, Human
cagacagaacugcugccuuagccugacaaccg

SEQ ID NO: 84100 - RNA, 32 nt, Human
cagacagaagcagaggaaagccaagaacagcc

SEQ ID NO: 84101 - RNA, 32 nt, Human
cagacagacagaggggcggaugcagccuaccu

SEQ ID NO: 84102 - RNA, 32 nt, Human
cagacagaccuguaggcccaggccugugcuag

SEQ ID NO: 84103 - RNA, 32 nt, Human
cagacagacucaugugagagggcucaucaguc

SEQ ID NO: 84104 - RNA, 32 nt, Human
cagacagagaaagaaagagaggagcaagugac

SEQ ID NO: 84105 - RNA, 22 nt, Human
cagacagagagacaggcagaca

SEQ ID NO: 84106 - RNA, 32 nt, Human
cagacagagagggagcggcugcaagagguaau

SEQ ID NO: 84107 - RNA, 32 nt, Human
cagacagagcagcuacccucagcucuagcuga

SEQ ID NO: 84108 - RNA, 32 nt, Human
cagacagagcccaggcaugggagcacucuggg

SEQ ID NO: 84109 - RNA, 32 nt, Human
cagacagagucgggucuugcucucucacccag

SEQ ID NO: 84110 - RNA, 32 nt, Human
cagacagauacauacacauacaccccauccuc

SEQ ID NO: 84111 - RNA, 32 nt, Human
cagacagauccaggauaggaugggcagcccag

SEQ ID NO: 84112 - RNA, 32 nt, Human
cagacagauggaccaccaaccuggacagacag

SEQ ID NO: 84113 - RNA, 32 nt, Human
cagacagauguugggaggauacagaggagaug

SEQ ID NO: 84114 - RNA, 32 nt, Human
cagacagauuucagucauuagaugauguuuuu

SEQ ID NO: 84115 - RNA, 32 nt, Human
cagacagauuuuguuucccucuguaaaguugg

SEQ ID NO: 84116 - RNA, 32 nt, Human
cagacagcacagaacuccagccccgcuacuua

SEQ ID NO: 84117 - RNA, 32 nt, Human
cagacagcacccagagugagcuggaguggguc

SEQ ID NO: 84118 - RNA, 32 nt, Human
cagacagcagcaccuccucuucuagcagccag

SEQ ID NO: 84119 - RNA, 32 nt, Human
cagacagcaguggcaucaacuugucaggcuuu

SEQ ID NO: 84120 - RNA, 32 nt, Human
cagacagcaugcugcuagaccucgagaggacc

SEQ ID NO: 84121 - RNA, 32 nt, Human
cagacagccaagccccuuccacaucuacaggg

SEQ ID NO: 84122 - RNA, 32 nt, Human
cagacagccacuucuggugguugccagccacc

SEQ ID NO: 84123 - RNA, 32 nt, Human
cagacagcccccugccccgcaggccugccuuc

SEQ ID NO: 84124 - RNA, 32 nt, Human
cagacagcccuccacuccagcucugagacccu

SEQ ID NO: 84125 - RNA, 32 nt, Human
cagacagccugagacuguucucacggaaacac

SEQ ID NO: 84126 - RNA, 32 nt, Human
cagacagccugggcugguaaaaguagguccuu

SEQ ID NO: 84127 - RNA, 32 nt, Human
cagacagcgaagacuguuguguuuguaaaagc

SEQ ID NO: 84128 - RNA, 18 nt, Human
cagacagcugaccagaca

SEQ ID NO: 84129 - RNA, 32 nt, Human
cagacagcuugaggccccuccugcugccuggc

SEQ ID NO: 84130 - RNA, 22 nt, Human
cagacagcuugcccgcacacuc

SEQ ID NO: 84131 - RNA, 20 nt, Human
cagacaggcagggcucugcc

SEQ ID NO: 84132 - RNA, 32 nt, Human
cagacaggccaugcucucgugguagcaaggug

SEQ ID NO: 84133 - RNA, 21 nt, Human
cagacagggaaggcacagaca

SEQ ID NO: 84134 - RNA, 19 nt, Human
cagacagggaagguggcug

SEQ ID NO: 84135 - RNA, 22 nt, Human
cagacagggagucacacagaca

SEQ ID NO: 84136 - RNA, 32 nt, Human
cagacagggccuuccaucuagagcccagcacc

SEQ ID NO: 84137 - RNA, 32 nt, Human
cagacaggggccacagccugcccaggcagccc

SEQ ID NO: 84138 - RNA, 31 nt, Human
cagacaggggcgcugcugcagaugcuccagg

SEQ ID NO: 84139 - RNA, 32 nt, Human
cagacaggguggccaggcagaggugcuccuca

SEQ ID NO: 84140 - RNA, 32 nt, Human
cagacaggguuuugaggccacccugauuauug

SEQ ID NO: 84141 - RNA, 32 nt, Human
cagacagucaagcagaacccacagccuuauua

SEQ ID NO: 84142 - RNA, 32 nt, Human
cagacagucccaaagugccaugagagaagcuc

SEQ ID NO: 84143 - RNA, 32 nt, Human
cagacaguggacugaaacuaugccauaggcuc

SEQ ID NO: 84144 - RNA, 32 nt, Human
cagacagugguagaacaacccagggcuuggaa

SEQ ID NO: 84145 - RNA, 32 nt, Human
cagacaguugcuuucauucuuccucaaaguau

SEQ ID NO: 84146 - RNA, 32 nt, Human
cagacaguugcuuugauucuuccucaaacuac

SEQ ID NO: 84147 - RNA, 32 nt, Human
cagacauaaggaggccagaggcugcaaggagc

SEQ ID NO: 84148 - RNA, 32 nt, Human
cagacauaccugcagcuuuggcucuuugguau

SEQ ID NO: 84149 - RNA, 32 nt, Human
cagacauauagaacagcgcauucuucuguaga

SEQ ID NO: 84150 - RNA, 21 nt, Human
cagacaucacccuuugccuua

SEQ ID NO: 84151 - RNA, 32 nt, Human
cagacaucagcaggucugugugccucagcccu

SEQ ID NO: 84152 - RNA, 23 nt, Human
cagacaucagccuccuucuuuca

SEQ ID NO: 84153 - RNA, 21 nt, Human
cagacaucaggggccgaugaa

SEQ ID NO: 84154 - RNA, 32 nt, Human
cagacaucauucucuggacuacuuuggcacua

SEQ ID NO: 84155 - RNA, 32 nt, Human
cagacauccaggaagaugcagccagcagacaa

SEQ ID NO: 84156 - RNA, 32 nt, Human
cagacaucccaucuuccuuucucccucaccca

SEQ ID NO: 84157 - RNA, 32 nt, Human
cagacaucuccucaccccagugccugucugga

SEQ ID NO: 84158 - RNA, 32 nt, Human
cagacaucuguaauguuuuugcacuggugaca

SEQ ID NO: 84159 - RNA, 32 nt, Human
cagacaucuuucuccagcuucagacuuguaga

SEQ ID NO: 84160 - RNA, 32 nt, Human
cagacaugaagcugcacacauacacccgucug

SEQ ID NO: 84161 - RNA, 32 nt, Human
cagacaugacucugacagcuucccaggaaccu

SEQ ID NO: 84162 - RNA, 32 nt, Human
cagacaugagccaccacgcuuggccgggauag

SEQ ID NO: 84163 - RNA, 32 nt, Human
cagacaugagccaccaugcccggccaagaauu

SEQ ID NO: 84164 - RNA, 32 nt, Human
cagacaugagccacuacgccuggccagguuuc

SEQ ID NO: 84165 - RNA, 32 nt, Human
cagacaugagccacugcaccuggccugaaaca

SEQ ID NO: 84166 - RNA, 32 nt, Human
cagacaugcaccaccacaccuggcuaauuuuu

SEQ ID NO: 84167 - RNA, 32 nt, Human
cagacaugcaccaccacaccugguuaauuuuu

SEQ ID NO: 84168 - RNA, 32 nt, Human
cagacaugccccucccccgcagacacacccca

SEQ ID NO: 84169 - RNA, 30 nt, Human
cagacaugcuggggcccugcaugcugcugc

SEQ ID NO: 84170 - RNA, 32 nt, Human
cagacauggcuauagggaaaaguuugccuugu

SEQ ID NO: 84171 - RNA, 21 nt, Human
cagacauggcuguccccugua

SEQ ID NO: 84172 - RNA, 32 nt, Human
cagacaugggagggagaugacaugaagaccca

SEQ ID NO: 84173 - RNA, 32 nt, Human
cagacaugggcuaggucauaugugguuucuau

SEQ ID NO: 84174 - RNA, 32 nt, Human
cagacauggucccauuugcaggaaaagugcag

SEQ ID NO: 84175 - RNA, 22 nt, Human
cagacaugguggcaugcaccug

SEQ ID NO: 84176 - RNA, 24 nt, Human
cagacaugguggcucacaccugua

SEQ ID NO: 84177 - RNA, 32 nt, Human
cagacauguggacucuggggagguacuggggg

SEQ ID NO: 84178 - RNA, 32 nt, Human
cagacaugugggcuccccgaagcccagccaga

SEQ ID NO: 84179 - RNA, 32 nt, Human
cagacauuaggggaucaguuguauuuauugua

SEQ ID NO: 84180 - RNA, 32 nt, Human
cagacauugcaacuggcccugccugugggucc

SEQ ID NO: 84181 - RNA, 32 nt, Human
cagacauugccccucaugagucaaguggcuau

SEQ ID NO: 84182 - RNA, 32 nt, Human
cagacauugcugucuggugcuccucucucagu

SEQ ID NO: 84183 - RNA, 32 nt, Human
cagacauuggagguggcagugaaggauacagu

SEQ ID NO: 84184 - RNA, 32 nt, Human
cagacauugguguuucugcugugucccuugug

SEQ ID NO: 84185 - RNA, 32 nt, Human
cagacauuucccaaaggaagacauauacaugg

SEQ ID NO: 84186 - RNA, 32 nt, Human
cagaccaaacauauuuaauaagcacaauaaau

SEQ ID NO: 84187 - RNA, 21 nt, Human
cagaccaaacauugucuggcu

SEQ ID NO: 84188 - RNA, 25 nt, Human
cagaccaacauuuuucucuuccuca

SEQ ID NO: 84189 - RNA, 24 nt, Human
cagaccaacguuacucagggcucc

SEQ ID NO: 84190 - RNA, 32 nt, Human
cagaccaacuaggcuacaucugugaugagcag

SEQ ID NO: 84191 - RNA, 22 nt, Human
cagaccaagagccucaacauuu

SEQ ID NO: 84192 - RNA, 32 nt, Human
cagaccaagccuugcccucaggacggcugccc

SEQ ID NO: 84193 - RNA, 32 nt, Human
cagaccaaguauacaugcauugaagugucuac

SEQ ID NO: 84194 - RNA, 32 nt, Human
cagaccaauauggugaaaccccaucucuacua

SEQ ID NO: 84195 - RNA, 32 nt, Human
cagaccaauuaaauccaggucucuagggguga

SEQ ID NO: 84196 - RNA, 32 nt, Human
cagaccacaauccauuuccuucugcuagccuc

SEQ ID NO: 84197 - RNA, 20 nt, Human
cagaccacaccaccucuacc

SEQ ID NO: 84198 - RNA, 22 nt, Human
cagaccacacccauacccaagc

SEQ ID NO: 84199 - RNA, 32 nt, Human
cagaccacauagcacacaugugcacugaccac

SEQ ID NO: 84200 - RNA, 22 nt, Human
cagaccacaucgacgccugccu

SEQ ID NO: 84201 - RNA, 32 nt, Human
cagaccacauucuauaaucuuugaacaugcug

SEQ ID NO: 84202 - RNA, 32 nt, Human
cagaccaccaccauccauagccuggaugacug

SEQ ID NO: 84203 - RNA, 32 nt, Human
cagaccaccauggugaaggcuucuuuccccac

SEQ ID NO: 84204 - RNA, 27 nt, Human
cagaccacggagcacagggccucugcu

SEQ ID NO: 84205 - RNA, 32 nt, Human
cagaccacgucacuacauuucuaugcaagggg

SEQ ID NO: 84206 - RNA, 32 nt, Human
cagaccacugcccuccagccugggcaauagag

SEQ ID NO: 84207 - RNA, 32 nt, Human
cagaccagaaaugacucacaccaccuuauagc

SEQ ID NO: 84208 - RNA, 32 nt, Human
cagaccagaaauuacccacccaaccaggcuca

SEQ ID NO: 84209 - RNA, 32 nt, Human
cagaccagaccagaccagagggaucggaggcu

SEQ ID NO: 84210 - RNA, 32 nt, Human
cagaccagaccagagggaucggaggcucaggc

SEQ ID NO: 84211 - RNA, 32 nt, Human
cagaccagacuacccaccuagguagggcacac

SEQ ID NO: 84212 - RNA, 21 nt, Human
cagaccagagcugucugaacu

SEQ ID NO: 84213 - RNA, 32 nt, Human
cagaccagcagcuucaucauugucaugugagg

SEQ ID NO: 84214 - RNA, 22 nt, Human
cagaccagccaggccgccugcc

SEQ ID NO: 84215 - RNA, 32 nt, Human
cagaccagccuaccccaaaaagcugcgucuuu

SEQ ID NO: 84216 - RNA, 21 nt, Human
cagaccagccuggccaacaug

SEQ ID NO: 84217 - RNA, 32 nt, Human
cagaccagccuggccaccuuagugagaucccu

SEQ ID NO: 84218 - RNA, 32 nt, Human
cagaccagccugggcaacacagcgggaccccg

SEQ ID NO: 84219 - RNA, 32 nt, Human
cagaccagccugggcaacauagccagaccucg

SEQ ID NO: 84220 - RNA, 32 nt, Human
cagaccagccugggcaacauagugagacucuu

SEQ ID NO: 84221 - RNA, 32 nt, Human
cagaccagccugggcaacauagugagauccug

SEQ ID NO: 84222 - RNA, 32 nt, Human
cagaccagccugggcaacaugcgagaccccug

SEQ ID NO: 84223 - RNA, 32 nt, Human
cagaccagccugggcaauacagcgagaaccca

SEQ ID NO: 84224 - RNA, 32 nt, Human
cagaccagccugggcaauguagcaagacgcug

SEQ ID NO: 84225 - RNA, 32 nt, Human
cagaccagccugggcagcaucgugagaccccc

SEQ ID NO: 84226 - RNA, 32 nt, Human
cagaccagccuggguaacauagugagaccuug

SEQ ID NO: 84227 - RNA, 32 nt, Human
cagaccagccuggguaauguagcgagacccug

SEQ ID NO: 84228 - RNA, 32 nt, Human
cagaccagcugccgcccugcccgaugcuuccc

SEQ ID NO: 84229 - RNA, 32 nt, Human
cagaccaggcauugcccagccugggaaucuuu

SEQ ID NO: 84230 - RNA, 32 nt, Human
cagaccaggccuuccccuagccccacaaguug

SEQ ID NO: 84231 - RNA, 32 nt, Human
cagaccagggcaggggacaggucucaaguccu

SEQ ID NO: 84232 - RNA, 32 nt, Human
cagaccagguuuuccuggucucagaccuauga

SEQ ID NO: 84233 - RNA, 32 nt, Human
cagaccaucccucugcuguuucacucuuugau

SEQ ID NO: 84234 - RNA, 21 nt, Human
cagaccaucugugcucugccc

SEQ ID NO: 84235 - RNA, 16 nt, Human
cagaccaucuuccaca

SEQ ID NO: 84236 - RNA, 32 nt, Human
cagaccaucuuccuccuuccaagucaucaaag

SEQ ID NO: 84237 - RNA, 32 nt, Human
cagaccaugauguuugucucagagguuaaaac

SEQ ID NO: 84238 - RNA, 32 nt, Human
cagaccaugcugaugaccucaaguagcacuga

SEQ ID NO: 84239 - RNA, 31 nt, Human
cagaccauggcagaguucucccagaaacggg

SEQ ID NO: 84240 - RNA, 32 nt, Human
cagaccaugggagcugucugggauguugaucc

SEQ ID NO: 84241 - RNA, 32 nt, Human
cagaccauuuggacugcacagagcagcugccg

SEQ ID NO: 84242 - RNA, 32 nt, Human
cagacccaagcccacgucaggagaggagcgug

SEQ ID NO: 84243 - RNA, 21 nt, Human
cagacccaagccccccacugc

SEQ ID NO: 84244 - RNA, 32 nt, Human
cagacccaagugauccucccaccucagccucc

SEQ ID NO: 84245 - RNA, 32 nt, Human
cagacccaaucacuguggccagggugguggaa

SEQ ID NO: 84246 - RNA, 32 nt, Human
cagacccaaucagaaucacagaaaaauccugc

SEQ ID NO: 84247 - RNA, 32 nt, Human
cagacccacagcucagcccagcccuggcacag

SEQ ID NO: 84248 - RNA, 20 nt, Human
cagacccaccagacaccaca

SEQ ID NO: 84249 - RNA, 32 nt, Human
cagacccaccagacaccacacagcagacaaua

SEQ ID NO: 84250 - RNA, 32 nt, Human
cagacccaccuggccccagagccucaugccag

SEQ ID NO: 84251 - RNA, 32 nt, Human
cagacccacucuguaacuuucagcuagauuca

SEQ ID NO: 84252 - RNA, 32 nt, Human
cagacccagaggcagcugguugggguuugucg

SEQ ID NO: 84253 - RNA, 32 nt, Human
cagacccagccuugcacuccaaggcugcgcac

SEQ ID NO: 84254 - RNA, 21 nt, Human
cagacccagcugcggcugcug

SEQ ID NO: 84255 - RNA, 32 nt, Human
cagacccagcugguucuggaguucuaggacau

SEQ ID NO: 84256 - RNA, 32 nt, Human
cagacccaggaaaauuuccauaguaccuuaau

SEQ ID NO: 84257 - RNA, 32 nt, Human
cagacccaggauggcugcaggccagguuuggg

SEQ ID NO: 84258 - RNA, 32 nt, Human
cagacccaggcacacguguccucagccaaggu

SEQ ID NO: 84259 - RNA, 32 nt, Human
cagacccaucucucccuuacccaucuugcuuc

SEQ ID NO: 84260 - RNA, 32 nt, Human
cagacccaugacaacagagagcaucuagccau

SEQ ID NO: 84261 - RNA, 32 nt, Human
cagacccaugcaggaagagccaggcagggugg

SEQ ID NO: 84262 - RNA, 24 nt, Human
cagacccauucucaaagaccacca

SEQ ID NO: 84263 - RNA, 32 nt, Human
cagaccccaaccacgacacccaucaccaccac

SEQ ID NO: 84264 - RNA, 32 nt, Human
cagaccccaaccacgguacucaucaccaccac

SEQ ID NO: 84265 - RNA, 21 nt, Human
cagaccccaagccauugagca

SEQ ID NO: 84266 - RNA, 32 nt, Human
cagaccccacaacuucaggagcucuuucccgg

SEQ ID NO: 84267 - RNA, 32 nt, Human
cagaccccagagcuuggcuuuugaaacacaac

SEQ ID NO: 84268 - RNA, 32 nt, Human
cagaccccagcaccgagugcucauaagcaucu

SEQ ID NO: 84269 - RNA, 32 nt, Human
cagaccccaugucuauuaacauuucaguccua

SEQ ID NO: 84270 - RNA, 32 nt, Human
cagacccccaccccuuccccacugccugccca

SEQ ID NO: 84271 - RNA, 19 nt, Human
cagacccccagcugggccc

SEQ ID NO: 84272 - RNA, 32 nt, Human
cagacccccaggaaacggaggcucggauugug

SEQ ID NO: 84273 - RNA, 32 nt, Human
cagacccccugccauccucugcugcuacccac

SEQ ID NO: 84274 - RNA, 18 nt, Human
cagaccccgauccuccac

SEQ ID NO: 84275 - RNA, 32 nt, Human
cagaccccucacugcgguaucugcccaguggc

SEQ ID NO: 84276 - RNA, 32 nt, Human
cagaccccuccagaggcccgccaggugggcau

SEQ ID NO: 84277 - RNA, 32 nt, Human
cagaccccucccguuaggcuucaccuccaaca

SEQ ID NO: 84278 - RNA, 24 nt, Human
cagaccccuccuucccagucccau

SEQ ID NO: 84279 - RNA, 32 nt, Human
cagaccccucuaccuccuccaggcugggagac

SEQ ID NO: 84280 - RNA, 32 nt, Human
cagaccccucuauucugcuccaggacagcagg

SEQ ID NO: 84281 - RNA, 19 nt, Human
cagaccccugacucgggga

SEQ ID NO: 84282 - RNA, 32 nt, Human
cagaccccugcaggggacacucacccuucuga

SEQ ID NO: 84283 - RNA, 32 nt, Human
cagaccccuuggcuuuuccuuggcagagagga

SEQ ID NO: 84284 - RNA, 32 nt, Human
cagacccgcugguagacggguuuuaggagcag

SEQ ID NO: 84285 - RNA, 23 nt, Human
cagacccggaguuuccucuuuca

SEQ ID NO: 84286 - RNA, 32 nt, Human
cagacccuaugauguguccacucuggaggcuc

SEQ ID NO: 84287 - RNA, 32 nt, Human
cagacccucacaccagcaccccuccucaccac

SEQ ID NO: 84288 - RNA, 32 nt, Human
cagacccucaccgaccaccuguccugggacca

SEQ ID NO: 84289 - RNA, 32 nt, Human
cagacccuccaggggcccugaggucuguuccu

SEQ ID NO: 84290 - RNA, 32 nt, Human
cagacccuccccugcugccccugcugccccug

SEQ ID NO: 84291 - RNA, 32 nt, Human
cagacccuccuggagcuguccaaaggaaagcc

SEQ ID NO: 84292 - RNA, 32 nt, Human
cagacccucugagauguggcucaggccugagc

SEQ ID NO: 84293 - RNA, 19 nt, Human
cagacccugaccgugggga

SEQ ID NO: 84294 - RNA, 32 nt, Human
cagacccugcagcuggugaaagccagccccug

SEQ ID NO: 84295 - RNA, 32 nt, Human
cagacccugccaucccucccacccccgaccaa

SEQ ID NO: 84296 - RNA, 32 nt, Human
cagacccugccuggcaggccugagcacaacag

SEQ ID NO: 84297 - RNA, 22 nt, Human
cagacccugcugcaugggaagg

SEQ ID NO: 84298 - RNA, 32 nt, Human
cagacccuggcacgccccagcacacgaguucc

SEQ ID NO: 84299 - RNA, 32 nt, Human
cagacccuggcagaaggggcacggggcagggu

SEQ ID NO: 84300 - RNA, 32 nt, Human
cagacccugggagcauuacaguggaaaccaau

SEQ ID NO: 84301 - RNA, 32 nt, Human
cagacccuggugucccuggaccucaccgggcc

SEQ ID NO: 84302 - RNA, 32 nt, Human
cagacccuguauuuccauucgcacuuggcgcu

SEQ ID NO: 84303 - RNA, 24 nt, Human
cagacccugugauccgcccgccuc

SEQ ID NO: 84304 - RNA, 32 nt, Human
cagacccuucacaagcaaaaucagccagcacu

SEQ ID NO: 84305 - RNA, 19 nt, Human
cagacccuucccaauucca

SEQ ID NO: 84306 - RNA, 28 nt, Human
cagaccgaaggugcugccuucauccucc

SEQ ID NO: 84307 - RNA, 24 nt, Human
cagaccgagacgaacacucugccu

SEQ ID NO: 84308 - RNA, 32 nt, Human
cagaccgagagcugcccuugccuaccuucgau

SEQ ID NO: 84309 - RNA, 32 nt, Human
cagaccgagggugggaguugaggacuuugauc

SEQ ID NO: 84310 - RNA, 31 nt, Human
cagaccgguuugcagcaccugccgcaacagc

SEQ ID NO: 84311 - RNA, 22 nt, Human
cagaccgucggagggcuccgcc

SEQ ID NO: 84312 - RNA, 32 nt, Human
cagaccgucuuccuccaaccccucuauguagu

SEQ ID NO: 84313 - RNA, 32 nt, Human
cagaccuaagcucagacccugccuuguccugg

SEQ ID NO: 84314 - RNA, 32 nt, Human
cagaccuacacucgcucuuucucuccgguaca

SEQ ID NO: 84315 - RNA, 32 nt, Human
cagaccuacagcugaggguccugucuguuaga

SEQ ID NO: 84316 - RNA, 32 nt, Human
cagaccuacccaggccacuggagugagucuag

SEQ ID NO: 84317 - RNA, 19 nt, Human
cagaccucacaccuggggg

SEQ ID NO: 84318 - RNA, 32 nt, Human
cagaccucacagucccucagguucuacuggga

SEQ ID NO: 84319 - RNA, 32 nt, Human
cagaccucacuggccuggcuggaccaguacug

SEQ ID NO: 84320 - RNA, 32 nt, Human
cagaccucagcagcuguaaggccaguccaggg

SEQ ID NO: 84321 - RNA, 32 nt, Human
cagaccucagccagggccacagaggucccaac

SEQ ID NO: 84322 - RNA, 32 nt, Human
cagaccucaggugauccgcccaccucggccuc

SEQ ID NO: 84323 - RNA, 32 nt, Human
cagaccucaugccaccugcuguagccacuggg

SEQ ID NO: 84324 - RNA, 32 nt, Human
cagaccucaugcccucuuccuccucuuuccug

SEQ ID NO: 84325 - RNA, 32 nt, Human
cagaccuccaaucugggcucugaccccauaau

SEQ ID NO: 84326 - RNA, 32 nt, Human
cagaccuccaggagagaccaggcccaggaugc

SEQ ID NO: 84327 - RNA, 32 nt, Human
cagaccucccccacuuuccccaucucaucaca

SEQ ID NO: 84328 - RNA, 32 nt, Human
cagaccucgcagguggucaucaugcccaggga

SEQ ID NO: 84329 - RNA, 32 nt, Human
cagaccucuagaguguccuagauuuuguggca

SEQ ID NO: 84330 - RNA, 32 nt, Human
cagaccucucagggaugguauuggcucauuua

SEQ ID NO: 84331 - RNA, 32 nt, Human
cagaccucuccaucucggcucuuccaggcguc

SEQ ID NO: 84332 - RNA, 32 nt, Human
cagaccucugggagguagggaguucccuggca

SEQ ID NO: 84333 - RNA, 32 nt, Human
cagaccucuguuccugagcagagaagcagaaa

SEQ ID NO: 84334 - RNA, 32 nt, Human
cagaccucuuugcuuuaccagugguguuugug

SEQ ID NO: 84335 - RNA, 21 nt, Human
cagaccugagaccacugcuca

SEQ ID NO: 84336 - RNA, 21 nt, Human
cagaccugagaugaagauuca

SEQ ID NO: 84337 - RNA, 32 nt, Human
cagaccugagccaccacaccugggcaacagag

SEQ ID NO: 84338 - RNA, 32 nt, Human
cagaccugagcuggcuuggacccauuugagga

SEQ ID NO: 84339 - RNA, 15 nt, Human
cagaccugaguucca

SEQ ID NO: 84340 - RNA, 31 nt, Human
cagaccugcaacagaaguggcauucaguccc

SEQ ID NO: 84341 - RNA, 18 nt, Human
cagaccugcaccaccacg

SEQ ID NO: 84342 - RNA, 26 nt, Human
cagaccugcucucaaggacucugccu

SEQ ID NO: 84343 - RNA, 32 nt, Human
cagaccuggagguuugggggauggcagaagua

SEQ ID NO: 84344 - RNA, 20 nt, Human
cagaccuggaguccucuuca

SEQ ID NO: 84345 - RNA, 32 nt, Human
cagaccuggcaaguggacagugcaguguggag

SEQ ID NO: 84346 - RNA, 32 nt, Human
cagaccuggcagagccugguguggggucugag

SEQ ID NO: 84347 - RNA, 24 nt, Human
cagaccuggccucucuucauuuca

SEQ ID NO: 84348 - RNA, 32 nt, Human
cagaccuggcuccucggcagagcugccucccg

SEQ ID NO: 84349 - RNA, 32 nt, Human
cagaccuggguugcucagaggcugcaggaccc

SEQ ID NO: 84350 - RNA, 22 nt, Human
cagaccuguccccagacaguga

SEQ ID NO: 84351 - RNA, 22 nt, Human
cagaccuguucuccagagcuca

SEQ ID NO: 84352 - RNA, 32 nt, Human
cagaccuguuuccuuuuugucucaucaacgcc

SEQ ID NO: 84353 - RNA, 32 nt, Human
cagaccuuaggaggaggaaggcgagggcgggg

SEQ ID NO: 84354 - RNA, 18 nt, Human
cagaccuucauuucccca

SEQ ID NO: 84355 - RNA, 32 nt, Human
cagaccuuccuaggaguaaaagacugauguga

SEQ ID NO: 84356 - RNA, 32 nt, Human
cagaccuuccuaggcuuugcaaugcugggaua

SEQ ID NO: 84357 - RNA, 24 nt, Human
cagaccuucucccugaacuuaaga

SEQ ID NO: 84358 - RNA, 32 nt, Human
cagaccuucugccucuggcucugccuacucau

SEQ ID NO: 84359 - RNA, 32 nt, Human
cagaccuuguccacaccuuccugggcaacccc

SEQ ID NO: 84360 - RNA, 32 nt, Human
cagaccuuguuucucuugccacguuguuuuuc

SEQ ID NO: 84361 - RNA, 19 nt, Human
cagaccuuucaucuuucac

SEQ ID NO: 84362 - RNA, 32 nt, Human
cagaccuuuccucuucuggugcccgagggaaa

SEQ ID NO: 84363 - RNA, 32 nt, Human
cagacgacccccgcagcauuucccucggaccc

SEQ ID NO: 84364 - RNA, 32 nt, Human
cagacgaggcagagacaaaacacugagaaaga

SEQ ID NO: 84365 - RNA, 32 nt, Human
cagacgaucugguucagacucuaccucaucac

SEQ ID NO: 84366 - RNA, 32 nt, Human
cagacgauguggaguugggugccugagcucaa

SEQ ID NO: 84367 - RNA, 21 nt, Human
cagacgcacaaggccucugcu

SEQ ID NO: 84368 - RNA, 32 nt, Human
cagacgcagcugcaccugggacagcagacaca

SEQ ID NO: 84369 - RNA, 32 nt, Human
cagacgcagugcugagcacacagcuaccggac

SEQ ID NO: 84370 - RNA, 18 nt, Human
cagacgcauggaugcacc

SEQ ID NO: 84371 - RNA, 18 nt, Human
cagacgcccaccaccacg

SEQ ID NO: 84372 - RNA, 21 nt, Human
cagacgcccaccugugccuca

SEQ ID NO: 84373 - RNA, 32 nt, Human
cagacgcccacuggccccagaucucauccugc

SEQ ID NO: 84374 - RNA, 32 nt, Human
cagacgccucuccggaaucucccgggccucug

SEQ ID NO: 84375 - RNA, 32 nt, Human
cagacgccuguaaucccagcuacuugggaggc

SEQ ID NO: 84376 - RNA, 22 nt, Human
cagacgccuuuuugccugcuca

SEQ ID NO: 84377 - RNA, 32 nt, Human
cagacgcgcugcagccuccagcccgcggcaag

SEQ ID NO: 84378 - RNA, 18 nt, Human
cagacgcggucgcgccca

SEQ ID NO: 84379 - RNA, 32 nt, Human
cagacgcucagccugugcaacccgaagcugcu

SEQ ID NO: 84380 - RNA, 32 nt, Human
cagacgcucgccgacaaccuggccggcggcac

SEQ ID NO: 84381 - RNA, 32 nt, Human
cagacgcugcgggagcacugcugggcuggagg

SEQ ID NO: 84382 - RNA, 32 nt, Human
cagacgcuggagcuccagccuccuggcggccc

SEQ ID NO: 84383 - RNA, 32 nt, Human
cagacgcugguucugaggaacuguuguuucgg

SEQ ID NO: 84384 - RNA, 32 nt, Human
cagacgcuucauguaaauaaaaacuaaaaaua

SEQ ID NO: 84385 - RNA, 32 nt, Human
cagacggaggaggacuuagugaucuuguccaa

SEQ ID NO: 84386 - RNA, 32 nt, Human
cagacggaguuucgcucuuguugcccaggcug

SEQ ID NO: 84387 - RNA, 20 nt, Human
cagacggcccagggcucuau

SEQ ID NO: 84388 - RNA, 32 nt, Human
cagacggccggcagaggaagggagagaggcgg

SEQ ID NO: 84389 - RNA, 23 nt, Human
cagacggcggcauccuccagccc

SEQ ID NO: 84390 - RNA, 32 nt, Human
cagacggcuguggggucagggaaggagcaugg

SEQ ID NO: 84391 - RNA, 32 nt, Human
cagacgggccaacauggugaaaccccaucucu

SEQ ID NO: 84392 - RNA, 20 nt, Human
cagacgggcuucucccaccc

SEQ ID NO: 84393 - RNA, 32 nt, Human
cagacggggcuggagugugaggguccugcagc

SEQ ID NO: 84394 - RNA, 31 nt, Human
cagacggggucucagggaccuguguccuucc

SEQ ID NO: 84395 - RNA, 32 nt, Human
cagacgucaaggucauugggaaagcaccaaca

SEQ ID NO: 84396 - RNA, 21 nt, Human
cagacgucauccuuuggcuca

SEQ ID NO: 84397 - RNA, 32 nt, Human
cagacgucuguaaucccagcuauucaggaggc

SEQ ID NO: 84398 - RNA, 32 nt, Human
cagacgugagccaccacccccggccacuuguu

SEQ ID NO: 84399 - RNA, 32 nt, Human
cagacgugagccaccacgcccugccaauaaaa

SEQ ID NO: 84400 - RNA, 32 nt, Human
cagacgugagccaccaugcccagccaaguuuu

SEQ ID NO: 84401 - RNA, 32 nt, Human
cagacgugagccaccgugcccggccaauccug

SEQ ID NO: 84402 - RNA, 32 nt, Human
cagacgugagccaccgugcccggccaguucua

SEQ ID NO: 84403 - RNA, 32 nt, Human
cagacgugagccaccgugccuggccuggaauu

SEQ ID NO: 84404 - RNA, 32 nt, Human
cagacgugagccacugcguccgguccaucuga

SEQ ID NO: 84405 - RNA, 32 nt, Human
cagacgugagccacugcguccugccuaaaaug

SEQ ID NO: 84406 - RNA, 32 nt, Human
cagacgugagccacugugccuggccaagauag

SEQ ID NO: 84407 - RNA, 32 nt, Human
cagacgugagccacuguguccugccuaaaaug

SEQ ID NO: 84408 - RNA, 32 nt, Human
cagacgugcaccaccacgccaggcuaauuuuu

SEQ ID NO: 84409 - RNA, 32 nt, Human
cagacgugcagugccauaaggugccccagucc

SEQ ID NO: 84410 - RNA, 32 nt, Human
cagacgugcuccugcugaccuucugcggcucc

SEQ ID NO: 84411 - RNA, 32 nt, Human
cagacguggggaggguggaggggugacagugg

SEQ ID NO: 84412 - RNA, 25 nt, Human
cagacgugguaccagacaccagagc

SEQ ID NO: 84413 - RNA, 24 nt, Human
cagacgugguagcucacaccugua

SEQ ID NO: 84414 - RNA, 32 nt, Human
cagacguucccaggagguccugguuaugcagg

SEQ ID NO: 84415 - RNA, 32 nt, Human
cagacguucucccauccaccaugucugagcuu

SEQ ID NO: 84416 - RNA, 32 nt, Human
cagacguuugccugagugaacaaaucuaagug

SEQ ID NO: 84417 - RNA, 32 nt, Human
cagacuaaaggucuggccaaugucuugcccca

SEQ ID NO: 84418 - RNA, 32 nt, Human
cagacuaaggaagaagucugaggcagacggug

SEQ ID NO: 84419 - RNA, 32 nt, Human
cagacuacugccagacugagaaacccagaagc

SEQ ID NO: 84420 - RNA, 32 nt, Human
cagacuacuucuuccccagauagcuggcuggg

SEQ ID NO: 84421 - RNA, 32 nt, Human
cagacuagccugggcaacauagagagacccua

SEQ ID NO: 84422 - RNA, 32 nt, Human
cagacuagucucaaacuccugaccucaaguga

SEQ ID NO: 84423 - RNA, 32 nt, Human
cagacuaguuaaaucccacaaagugaauaucu

SEQ ID NO: 84424 - RNA, 32 nt, Human
cagacuaugcuguucagccacaugugggcacg

SEQ ID NO: 84425 - RNA, 32 nt, Human
cagacuauugaauguagcuguaguuuauucau

SEQ ID NO: 84426 - RNA, 32 nt, Human
cagacucaacacugggacucugaguuccugag

SEQ ID NO: 84427 - RNA, 32 nt, Human
cagacucaagccauccucccaccucaaccucc

SEQ ID NO: 84428 - RNA, 32 nt, Human
cagacucaagccucuagacucuuggaugaaac

SEQ ID NO: 84429 - RNA, 24 nt, Human
cagacucaagugauccucccaccu

SEQ ID NO: 84430 - RNA, 25 nt, Human
cagacucaauaccagacacuacagc

SEQ ID NO: 84431 - RNA, 31 nt, Human
cagacucacagcuugauacccuaacaaagca

SEQ ID NO: 84432 - RNA, 32 nt, Human
cagacucacauccugaccuugcacaaacagcc

SEQ ID NO: 84433 - RNA, 32 nt, Human
cagacucacaugcacaucaaaugcacaaccau

SEQ ID NO: 84434 - RNA, 18 nt, Human
cagacucaccccaucugc

SEQ ID NO: 84435 - RNA, 19 nt, Human
cagacucacuccccucugc

SEQ ID NO: 84436 - RNA, 21 nt, Human
cagacucagacccuccugccu

SEQ ID NO: 84437 - RNA, 32 nt, Human
cagacucagcaggguaaccacaugggcaagca

SEQ ID NO: 84438 - RNA, 32 nt, Human
cagacucagcuaccacguucacugccuuccuc

SEQ ID NO: 84439 - RNA, 32 nt, Human
cagacucaggggcuccaccaaugccaucccaa

SEQ ID NO: 84440 - RNA, 32 nt, Human
cagacucagucuccaaagaaggcaacacaaau

SEQ ID NO: 84441 - RNA, 22 nt, Human
cagacucaucccacucucuccc

SEQ ID NO: 84442 - RNA, 32 nt, Human
cagacucaucgccucccacacgccugggcugu

SEQ ID NO: 84443 - RNA, 32 nt, Human
cagacuccaaagcauugggauuacaggcauca

SEQ ID NO: 84444 - RNA, 18 nt, Human
cagacuccacaguggggg

SEQ ID NO: 84445 - RNA, 32 nt, Human
cagacuccaccaacuucuaguccuggggccug

SEQ ID NO: 84446 - RNA, 32 nt, Human
cagacuccacucaucaugcuguguggcacaaa

SEQ ID NO: 84447 - RNA, 20 nt, Human
cagacuccagcccaggccgg

SEQ ID NO: 84448 - RNA, 32 nt, Human
cagacuccagugggccugguuucugcagaaug

SEQ ID NO: 84449 - RNA, 22 nt, Human
cagacuccaucccccaccccca

SEQ ID NO: 84450 - RNA, 32 nt, Human
cagacuccaugcuuuuuaaagacagagauaau

SEQ ID NO: 84451 - RNA, 32 nt, Human
cagacuccauguaaucuagucuuuggccaccu

SEQ ID NO: 84452 - RNA, 21 nt, Human
cagacucccagagaaccagca

SEQ ID NO: 84453 - RNA, 32 nt, Human
cagacucccagagagaaaauaaccucgccaag

SEQ ID NO: 84454 - RNA, 32 nt, Human
cagacucccagaggaggcagggguaggaaagc

SEQ ID NO: 84455 - RNA, 32 nt, Human
cagacucccccgagaccugccagccccggcau

SEQ ID NO: 84456 - RNA, 32 nt, Human
cagacuccucaccaagaugggcuaugaguuug

SEQ ID NO: 84457 - RNA, 32 nt, Human
cagacuccugcaaauccaacccauaucaggcu

SEQ ID NO: 84458 - RNA, 23 nt, Human
cagacuccuggaagaggggggca

SEQ ID NO: 84459 - RNA, 32 nt, Human
cagacuccuguagacccagccucuaucuccug

SEQ ID NO: 84460 - RNA, 32 nt, Human
cagacuccuuuccacuccagcccccuuuccac

SEQ ID NO: 84461 - RNA, 32 nt, Human
cagacucgagcagucucuggaacacgcugcgg

SEQ ID NO: 84462 - RNA, 32 nt, Human
cagacucgccaacauggugaaaccguaucucu

SEQ ID NO: 84463 - RNA, 32 nt, Human
cagacucggcagaggcggcgggcagaaccgcg

SEQ ID NO: 84464 - RNA, 32 nt, Human
cagacucggccuguucccagacucggccuuca

SEQ ID NO: 84465 - RNA, 32 nt, Human
cagacucuaggguuuuccaaugugacuaauga

SEQ ID NO: 84466 - RNA, 19 nt, Human
cagacucucagacugagga

SEQ ID NO: 84467 - RNA, 32 nt, Human
cagacucuccaucuccauuauuuuagccuuga

SEQ ID NO: 84468 - RNA, 32 nt, Human
cagacucucccaaauaaauccccacacgaaca

SEQ ID NO: 84469 - RNA, 31 nt, Human
cagacucucccagcuggcaccaaagccuucc

SEQ ID NO: 84470 - RNA, 32 nt, Human
cagacucuccuaggacagcucuccccgggugc

SEQ ID NO: 84471 - RNA, 32 nt, Human
cagacucucuucuagggcuucccaccaucagc

SEQ ID NO: 84472 - RNA, 32 nt, Human
cagacucugccuccugguuuccuuucucauuu

SEQ ID NO: 84473 - RNA, 32 nt, Human
cagacucuggcccuucagcugcagaaugccga

SEQ ID NO: 84474 - RNA, 32 nt, Human
cagacucugucuccaaaacaaaacaaacaaac

SEQ ID NO: 84475 - RNA, 32 nt, Human
cagacucuguuacagaaacagagggcuguuuc

SEQ ID NO: 84476 - RNA, 32 nt, Human
cagacucuuccuagccuuucuaaaccaaaguu

SEQ ID NO: 84477 - RNA, 32 nt, Human
cagacucuugcagcccauaaagaucaagucau

SEQ ID NO: 84478 - RNA, 32 nt, Human
cagacugaaagccaggacaucugaguaccuau

SEQ ID NO: 84479 - RNA, 32 nt, Human
cagacugaacaauacagcacuuugccaaaaau

SEQ ID NO: 84480 - RNA, 32 nt, Human
cagacugaacucagagguagacaggucaccuu

SEQ ID NO: 84481 - RNA, 32 nt, Human
cagacugaagacagaggucguuugauuucaaa

SEQ ID NO: 84482 - RNA, 32 nt, Human
cagacugaagaucauaaaccaguuuuaucaga

SEQ ID NO: 84483 - RNA, 32 nt, Human
cagacugaagugcaguggcacaaucauagcuc

SEQ ID NO: 84484 - RNA, 32 nt, Human
cagacugaccaacauggagaaaccccaucucu

SEQ ID NO: 84485 - RNA, 32 nt, Human
cagacugaccuugaugagcugugcacaaagug

SEQ ID NO: 84486 - RNA, 32 nt, Human
cagacugacuccauccccugacuuucccuuug

SEQ ID NO: 84487 - RNA, 32 nt, Human
cagacugagagggaggugccggagccagggac

SEQ ID NO: 84488 - RNA, 32 nt, Human
cagacugagcuuccugccugccuguaccccgc

SEQ ID NO: 84489 - RNA, 32 nt, Human
cagacugaggcucuggggugaggucccuaucc

SEQ ID NO: 84490 - RNA, 32 nt, Human
cagacugaguuacugccugucuuaucaggaug

SEQ ID NO: 84491 - RNA, 32 nt, Human
cagacugauaccaccuccaccgcugagcagug

SEQ ID NO: 84492 - RNA, 24 nt, Human
cagacugauaguuucuuucuuuca

SEQ ID NO: 84493 - RNA, 20 nt, Human
cagacugaucaucuuccaca

SEQ ID NO: 84494 - RNA, 32 nt, Human
cagacugcaaaguguaguuguuugagcaaaca

SEQ ID NO: 84495 - RNA, 32 nt, Human
cagacugcaagaggaggcgaggcggagccagc

SEQ ID NO: 84496 - RNA, 32 nt, Human
cagacugcaggcccauuuggugacacaggaca

SEQ ID NO: 84497 - RNA, 32 nt, Human
cagacugcagugagcugaccuggcagggcaga

SEQ ID NO: 84498 - RNA, 32 nt, Human
cagacugcaguucccuccccacccucuaccca

SEQ ID NO: 84499 - RNA, 24 nt, Human
cagacugcauaaagggugguggca

SEQ ID NO: 84500 - RNA, 21 nt, Human
cagacugccaaagaagccuug

SEQ ID NO: 84501 - RNA, 32 nt, Human
cagacugccagcccugacgggacagagccagg

SEQ ID NO: 84502 - RNA, 32 nt, Human
cagacugccagccugugccagucugaccugga

SEQ ID NO: 84503 - RNA, 32 nt, Human
cagacugccaggcuccaggaauaaguagcucu

SEQ ID NO: 84504 - RNA, 32 nt, Human
cagacugcccguggcccugcugucgggcccca

SEQ ID NO: 84505 - RNA, 32 nt, Human
cagacugccugggagcccugagacucccugac

SEQ ID NO: 84506 - RNA, 32 nt, Human
cagacugcgaccuucacgucucagccucaggg

SEQ ID NO: 84507 - RNA, 31 nt, Human
cagacugcgugagagaaaacagcugugauuu

SEQ ID NO: 84508 - RNA, 32 nt, Human
cagacugcuagagagagauggcaagaaggaag

SEQ ID NO: 84509 - RNA, 32 nt, Human
cagacugcugguagcgugcaugcagcuuugcc

SEQ ID NO: 84510 - RNA, 19 nt, Human
cagacugcuggucuccaca

SEQ ID NO: 84511 - RNA, 32 nt, Human
cagacugcugugcuuaguaagcaagugagaag

SEQ ID NO: 84512 - RNA, 32 nt, Human
cagacuggacugcaguggcacaaucauagcuc

SEQ ID NO: 84513 - RNA, 21 nt, Human
cagacuggagugcaguggugu

SEQ ID NO: 84514 - RNA, 32 nt, Human
cagacuggauuugcucugagaggggcacuggg

SEQ ID NO: 84515 - RNA, 32 nt, Human
cagacuggccaacauggagaaaccccaucucu

SEQ ID NO: 84516 - RNA, 32 nt, Human
cagacuggccaacauggagaaaccccgucucu

SEQ ID NO: 84517 - RNA, 32 nt, Human
cagacuggcuagcauaguaaaaccccaucucu

SEQ ID NO: 84518 - RNA, 32 nt, Human
cagacuggcugcagggacagaagacaccaagg

SEQ ID NO: 84519 - RNA, 21 nt, Human
cagacugggaaauacugagca

SEQ ID NO: 84520 - RNA, 32 nt, Human
cagacugggcgccggcccugccuccauuucag

SEQ ID NO: 84521 - RNA, 32 nt, Human
cagacugggggacuccgggaagaggcuuucuu

SEQ ID NO: 84522 - RNA, 32 nt, Human
cagacuggucucaaacaccugggcucaaauga

SEQ ID NO: 84523 - RNA, 32 nt, Human
cagacuggucucaaacuccuaaccuugugauc

SEQ ID NO: 84524 - RNA, 32 nt, Human
cagacuggucucaaacuccugaccucagauga

SEQ ID NO: 84525 - RNA, 32 nt, Human
cagacuggucucaaacuccugaccucaggcga

SEQ ID NO: 84526 - RNA, 32 nt, Human
cagacuggucucaaacuccuggccucaagcaa

SEQ ID NO: 84527 - RNA, 32 nt, Human
cagacuggucucaaacuccuggccucgaguca

SEQ ID NO: 84528 - RNA, 32 nt, Human
cagacuggucucaaacuccugggcucaagcga

SEQ ID NO: 84529 - RNA, 32 nt, Human
cagacuggucucaaacuccugggcugaaacaa

SEQ ID NO: 84530 - RNA, 32 nt, Human
cagacuggucucaaacuccuggguucaagaga

SEQ ID NO: 84531 - RNA, 32 nt, Human
cagacuggucucaaacuuaccggcucaagcaa

SEQ ID NO: 84532 - RNA, 32 nt, Human
cagacuggucucaaacuucugaccucaaguga

SEQ ID NO: 84533 - RNA, 32 nt, Human
cagacuggugugaacccgggagguggagcuug

SEQ ID NO: 84534 - RNA, 32 nt, Human
cagacugguuccuguggcugggaugacugcau

SEQ ID NO: 84535 - RNA, 32 nt, Human
cagacuguaaagccucaugagggcaggggccc

SEQ ID NO: 84536 - RNA, 32 nt, Human
cagacuguacuccuauguuuaagauaauuuuu

SEQ ID NO: 84537 - RNA, 32 nt, Human
cagacuguauacccuucucuucucuuaucuuc

SEQ ID NO: 84538 - RNA, 25 nt, Human
cagacugucaagaagaggaaaggga

SEQ ID NO: 84539 - RNA, 32 nt, Human
cagacuguccaggacaucuuaucugcagccau

SEQ ID NO: 84540 - RNA, 32 nt, Human
cagacuguccccacgccgggaaccaagcagga

SEQ ID NO: 84541 - RNA, 32 nt, Human
cagacugucugggcccaauccccagcuuugua

SEQ ID NO: 84542 - RNA, 32 nt, Human
cagacugugagcuccaugagggcagggaccgu

SEQ ID NO: 84543 - RNA, 32 nt, Human
cagacugugagcuccuugagggcagggacugu

SEQ ID NO: 84544 - RNA, 22 nt, Human
cagacugugcauguugggaagg

SEQ ID NO: 84545 - RNA, 32 nt, Human
cagacuguggcuagaacggugggaucagagca

SEQ ID NO: 84546 - RNA, 32 nt, Human
cagacuguggcuccuuccuccuuccugugauu

SEQ ID NO: 84547 - RNA, 32 nt, Human
cagacuguggugaggaggagacgcucacuuuc

SEQ ID NO: 84548 - RNA, 32 nt, Human
cagacugugugugacuuucguccauuugacuu

SEQ ID NO: 84549 - RNA, 32 nt, Human
cagacuguuucucaguuauuuccagagaccca

SEQ ID NO: 84550 - RNA, 32 nt, Human
cagacuuaacacuuguuguauguaugucaagc

SEQ ID NO: 84551 - RNA, 20 nt, Human
cagacuuagaaccugagguc

SEQ ID NO: 84552 - RNA, 32 nt, Human
cagacuucaagaccauccuggacuguggccac

SEQ ID NO: 84553 - RNA, 32 nt, Human
cagacuucagccccuggcagucugcccaccug

SEQ ID NO: 84554 - RNA, 32 nt, Human
cagacuucagccuccagaacugcgcggugaug

SEQ ID NO: 84555 - RNA, 32 nt, Human
cagacuucaugucucugcucaucagcacuguc

SEQ ID NO: 84556 - RNA, 32 nt, Human
cagacuucauuucuuucugcaucuucccccaa

SEQ ID NO: 84557 - RNA, 32 nt, Human
cagacuuccacagaagcuagacugaccaggcg

SEQ ID NO: 84558 - RNA, 32 nt, Human
cagacuuccucuccagugguuacccuccacug

SEQ ID NO: 84559 - RNA, 29 nt, Human
cagacuucgcccacccaucccuccccucg

SEQ ID NO: 84560 - RNA, 32 nt, Human
cagacuucuccaggaacccagaaacgggaugg

SEQ ID NO: 84561 - RNA, 19 nt, Human
cagacuucugaccuccaca

SEQ ID NO: 84562 - RNA, 32 nt, Human
cagacuugagccacagugcccagccucacuuc

SEQ ID NO: 84563 - RNA, 32 nt, Human
cagacuugaggaaccccucucccuuccauaau

SEQ ID NO: 84564 - RNA, 32 nt, Human
cagacuugcaugauuaaccaguuguuacacuu

SEQ ID NO: 84565 - RNA, 32 nt, Human
cagacuugccagaggggucucuccccauagcc

SEQ ID NO: 84566 - RNA, 32 nt, Human
cagacuugcccagauuuguguauuguacuuau

SEQ ID NO: 84567 - RNA, 32 nt, Human
cagacuugcccagcagcaugaguagugaagug

SEQ ID NO: 84568 - RNA, 32 nt, Human
cagacuugggguccuuaagguggcaaguccuu

SEQ ID NO: 84569 - RNA, 18 nt, Human
cagacuugguccuuuuca

SEQ ID NO: 84570 - RNA, 32 nt, Human
cagacuuggugcccugcaucccagcugcucca

SEQ ID NO: 84571 - RNA, 32 nt, Human
cagacuuggugccugagcgcagcuccagggaa

SEQ ID NO: 84572 - RNA, 32 nt, Human
cagacuuguucauagguguggggccugauugg

SEQ ID NO: 84573 - RNA, 32 nt, Human
cagacuuuaguccccucccaggaaaggaaucu

SEQ ID NO: 84574 - RNA, 32 nt, Human
cagacuuuccaaagcucagcugcuuuauaaug

SEQ ID NO: 84575 - RNA, 32 nt, Human
cagacuuuccguuuccaacgagaagagguucc

SEQ ID NO: 84576 - RNA, 32 nt, Human
cagacuuucuacaccuguuucaccucaggcug

SEQ ID NO: 84577 - RNA, 32 nt, Human
cagacuuucucauagaauguucuugaaaggug

SEQ ID NO: 84578 - RNA, 32 nt, Human
cagacuuucuccccaccccuccccgaccccca

SEQ ID NO: 84579 - RNA, 32 nt, Human
cagacuuuuaagcauuaaacauaaauaacuuc

SEQ ID NO: 84580 - RNA, 32 nt, Human
cagacuuuuaagcuuaaaaccuaaaugucaua

SEQ ID NO: 84581 - RNA, 32 nt, Human
cagacuuuuagcaggacuuuguguacaguuaa

SEQ ID NO: 84582 - RNA, 32 nt, Human
cagacuuuucccagaaggccucuccuuuucag

SEQ ID NO: 84583 - RNA, 32 nt, Human
cagacuuuuggggaacuggguacugaugaacc

SEQ ID NO: 84584 - RNA, 32 nt, Human
cagagaaaaucaggaucaauaucugcuuuggg

SEQ ID NO: 84585 - RNA, 32 nt, Human
cagagaaacagcccugguguuccagcaggagc

SEQ ID NO: 84586 - RNA, 22 nt, Human
cagagaaaccucagcuucauca

SEQ ID NO: 84587 - RNA, 32 nt, Human
cagagaaaccugagucuagccaugaggggcuu

SEQ ID NO: 84588 - RNA, 32 nt, Human
cagagaaacucacuccaagagcaagaagccaa

SEQ ID NO: 84589 - RNA, 22 nt, Human
cagagaaagaugaagaggagga

SEQ ID NO: 84590 - RNA, 32 nt, Human
cagagaaaggaagugaaaagauuuacaauuau

SEQ ID NO: 84591 - RNA, 32 nt, Human
cagagaaaggcagagggagaggggacccaguu

SEQ ID NO: 84592 - RNA, 32 nt, Human
cagagaaaggggccguggucagcugggaucuu

SEQ ID NO: 84593 - RNA, 32 nt, Human
cagagaaaggggcuguggucagcugggaucuu

SEQ ID NO: 84594 - RNA, 21 nt, Human
cagagaaauuguccucaggga

SEQ ID NO: 84595 - RNA, 32 nt, Human
cagagaaauuuccuuguucccuaggcugacug

SEQ ID NO: 84596 - RNA, 32 nt, Human
cagagaacaaggacagaggccaggcacugagg

SEQ ID NO: 84597 - RNA, 32 nt, Human
cagagaacacaaacgcuucaggagaaauucaa

SEQ ID NO: 84598 - RNA, 32 nt, Human
cagagaacacaaauguacacucccagguguca

SEQ ID NO: 84599 - RNA, 32 nt, Human
cagagaacacagaagccagcaagcagcaggga

SEQ ID NO: 84600 - RNA, 32 nt, Human
cagagaacacccucuaggggcuuuggggacau

SEQ ID NO: 84601 - RNA, 32 nt, Human
cagagaacacuggcuucacagaggacuuugug

SEQ ID NO: 84602 - RNA, 32 nt, Human
cagagaacagucugcaaaaucacugcaccuug

SEQ ID NO: 84603 - RNA, 32 nt, Human
cagagaacaugagcuucuaccuccagaugugc

SEQ ID NO: 84604 - RNA, 32 nt, Human
cagagaaccagccuggcuccuggcgcgcaccu

SEQ ID NO: 84605 - RNA, 32 nt, Human
cagagaaccuguucagauacaggccaguuucu

SEQ ID NO: 84606 - RNA, 32 nt, Human
cagagaaccuucuccccaccucugaguuauuc

SEQ ID NO: 84607 - RNA, 32 nt, Human
cagagaacgcagccacaccacaccugcacuuc

SEQ ID NO: 84608 - RNA, 19 nt, Human
cagagaacugaacugugga

SEQ ID NO: 84609 - RNA, 32 nt, Human
cagagaacuggacucgaggauccagagaggua

SEQ ID NO: 84610 - RNA, 32 nt, Human
cagagaacuguggggaacgcugugcuguuugu

SEQ ID NO: 84611 - RNA, 32 nt, Human
cagagaagaaagggaaaggaguccaugggguu

SEQ ID NO: 84612 - RNA, 32 nt, Human
cagagaagaaaugcagucugcacuuuuuaugu

SEQ ID NO: 84613 - RNA, 32 nt, Human
cagagaagacaacaugcugagaccagaggcuu

SEQ ID NO: 84614 - RNA, 21 nt, Human
cagagaagacagaagguggca

SEQ ID NO: 84615 - RNA, 23 nt, Human
cagagaagagaugaagaggggga

SEQ ID NO: 84616 - RNA, 32 nt, Human
cagagaagagccaugaaaagauacaagcaucu

SEQ ID NO: 84617 - RNA, 32 nt, Human
cagagaagagucauguugaaaacgaaacgcag

SEQ ID NO: 84618 - RNA, 32 nt, Human
cagagaagaguccagaaagaagaauggaagga

SEQ ID NO: 84619 - RNA, 32 nt, Human
cagagaagauauauuuaugauauuucugcaga

SEQ ID NO: 84620 - RNA, 32 nt, Human
cagagaagcaggaggaggauggagagaaugug

SEQ ID NO: 84621 - RNA, 24 nt, Human
cagagaagccaugcguuccagccu

SEQ ID NO: 84622 - RNA, 23 nt, Human
cagagaagccccauccuaagcca

SEQ ID NO: 84623 - RNA, 32 nt, Human
cagagaagccuaaagugauucaauacccagga

SEQ ID NO: 84624 - RNA, 32 nt, Human
cagagaagccuccaccugaggauggggaggac

SEQ ID NO: 84625 - RNA, 22 nt, Human
cagagaagcuauaguuccagcc

SEQ ID NO: 84626 - RNA, 32 nt, Human
cagagaagcugcagguuugcagccagcggagg

SEQ ID NO: 84627 - RNA, 32 nt, Human
cagagaaggaagcagagacuggagggaugccc

SEQ ID NO: 84628 - RNA, 32 nt, Human
cagagaaggagagaggcagagagggagagagg

SEQ ID NO: 84629 - RNA, 32 nt, Human
cagagaaggagagcccauaaggggacucuuuu

SEQ ID NO: 84630 - RNA, 32 nt, Human
cagagaaggagccggggaccagcuugaagacu

SEQ ID NO: 84631 - RNA, 32 nt, Human
cagagaaggcagaaagcaagagaaaggaaugc

SEQ ID NO: 84632 - RNA, 22 nt, Human
cagagaaggcaggaccaugaca

SEQ ID NO: 84633 - RNA, 32 nt, Human
cagagaaggggccagcucccuccuggggaccc

SEQ ID NO: 84634 - RNA, 18 nt, Human
cagagaaggguccagcuc

SEQ ID NO: 84635 - RNA, 32 nt, Human
cagagaaggucaccauguaccacacaccaaag

SEQ ID NO: 84636 - RNA, 32 nt, Human
cagagaaguaaugggucaauaaucuugaccuu

SEQ ID NO: 84637 - RNA, 32 nt, Human
cagagaagucauggcuucuccguccaaaggca

SEQ ID NO: 84638 - RNA, 32 nt, Human
cagagaagugcagcugcugugccuguguccgg

SEQ ID NO: 84639 - RNA, 18 nt, Human
cagagaaguuccccaccc

SEQ ID NO: 84640 - RNA, 19 nt, Human
cagagaauauuuccagccc

SEQ ID NO: 84641 - RNA, 32 nt, Human
cagagaaucugaauacugggucacguugcagu

SEQ ID NO: 84642 - RNA, 32 nt, Human
cagagaaucuguccuucaaggccaaagcucug

SEQ ID NO: 84643 - RNA, 32 nt, Human
cagagaauggcugagcaggacagugggagacc

SEQ ID NO: 84644 - RNA, 20 nt, Human
cagagaauggcugggucagg

SEQ ID NO: 84645 - RNA, 32 nt, Human
cagagaauggggcugugaaggucugggagaua

SEQ ID NO: 84646 - RNA, 32 nt, Human
cagagaauucauacuggagaaaagccauauaa

SEQ ID NO: 84647 - RNA, 32 nt, Human
cagagaauucccguguacccuucaccaagcuu

SEQ ID NO: 84648 - RNA, 32 nt, Human
cagagacaagcaacagugaguccuccucacag

SEQ ID NO: 84649 - RNA, 32 nt, Human
cagagacacaagccuucggcgccuuaaggaug

SEQ ID NO: 84650 - RNA, 32 nt, Human
cagagacacaccuggcccucagggggcugagc

SEQ ID NO: 84651 - RNA, 32 nt, Human
cagagacacccacuuagaaaguuaacuguuug

SEQ ID NO: 84652 - RNA, 22 nt, Human
cagagacacccuccuugccuca

SEQ ID NO: 84653 - RNA, 32 nt, Human
cagagacaccugccggcugacaaggacagcuu

SEQ ID NO: 84654 - RNA, 32 nt, Human
cagagacagaaagaguuaagcugcugacccga

SEQ ID NO: 84655 - RNA, 32 nt, Human
cagagacagaacugguccaucauguuugaguc

SEQ ID NO: 84656 - RNA, 32 nt, Human
cagagacagaagcagauaaugcaagugucauc

SEQ ID NO: 84657 - RNA, 32 nt, Human
cagagacagcaacucccucccguaacucaggc

SEQ ID NO: 84658 - RNA, 32 nt, Human
cagagacagcuuccagcaccuucuucaguguu

SEQ ID NO: 84659 - RNA, 23 nt, Human
cagagacaggaagucuucaggga

SEQ ID NO: 84660 - RNA, 32 nt, Human
cagagacaggaggcggcggcagcagcggcggc

SEQ ID NO: 84661 - RNA, 32 nt, Human
cagagacaggcaggaguagacacccggacacc

SEQ ID NO: 84662 - RNA, 32 nt, Human
cagagacaugcaacaacaacacacacgcacac

SEQ ID NO: 84663 - RNA, 32 nt, Human
cagagacaugccagaacauacaaggacaugcu

SEQ ID NO: 84664 - RNA, 22 nt, Human
cagagaccaagagggagagagg

SEQ ID NO: 84665 - RNA, 24 nt, Human
cagagaccaagagguguggaagga

SEQ ID NO: 84666 - RNA, 32 nt, Human
cagagaccaagcuagauccuuuuucucaccuu

SEQ ID NO: 84667 - RNA, 32 nt, Human
cagagaccaagugcccacuuagccgugaaaaa

SEQ ID NO: 84668 - RNA, 32 nt, Human
cagagaccacugcacuccagccugggcaacag

SEQ ID NO: 84669 - RNA, 32 nt, Human
cagagaccagacgugccugggcccugugcuga

SEQ ID NO: 84670 - RNA, 32 nt, Human
cagagaccagagggacugggcggcuuguccca

SEQ ID NO: 84671 - RNA, 32 nt, Human
cagagaccaggaucgccccaggcagggaaaaa

SEQ ID NO: 84672 - RNA, 32 nt, Human
cagagaccagggaaguggcagcagcauggggc

SEQ ID NO: 84673 - RNA, 32 nt, Human
cagagaccauccuggccaacacggugaaaccc

SEQ ID NO: 84674 - RNA, 23 nt, Human
cagagacccaacgcccccagagg

SEQ ID NO: 84675 - RNA, 21 nt, Human
cagagacccaccgagcggcgg

SEQ ID NO: 84676 - RNA, 32 nt, Human
cagagacccacugucguuccccgugugucccc

SEQ ID NO: 84677 - RNA, 32 nt, Human
cagagacccagaggcuggaaguagaaggucca

SEQ ID NO: 84678 - RNA, 21 nt, Human
cagagacccagaucucaugga

SEQ ID NO: 84679 - RNA, 20 nt, Human
cagagacccaggaguuggga

SEQ ID NO: 84680 - RNA, 32 nt, Human
cagagacccagugcccucaacaguaagacuuu

SEQ ID NO: 84681 - RNA, 23 nt, Human
cagagaccccaagaccuuaggga

SEQ ID NO: 84682 - RNA, 32 nt, Human
cagagaccccagcaccuggcccaggaugcagg

SEQ ID NO: 84683 - RNA, 32 nt, Human
cagagaccccagcagaggaggacaguggcucu

SEQ ID NO: 84684 - RNA, 20 nt, Human
cagagaccccagccugggga

SEQ ID NO: 84685 - RNA, 26 nt, Human
cagagaccccccacuguguccaggga

SEQ ID NO: 84686 - RNA, 22 nt, Human
cagagacccccgacugcaggga

SEQ ID NO: 84687 - RNA, 21 nt, Human
cagagacccgcacgggcacgg

SEQ ID NO: 84688 - RNA, 19 nt, Human
cagagacccgcagccggga

SEQ ID NO: 84689 - RNA, 23 nt, Human
cagagacccugaaagaggaggga

SEQ ID NO: 84690 - RNA, 32 nt, Human
cagagacccugccucuguuugaccccgcacug

SEQ ID NO: 84691 - RNA, 32 nt, Human
cagagacccuggaaguggagguggcugugugc

SEQ ID NO: 84692 - RNA, 32 nt, Human
cagagacccuucagugcuguguguuuuuccuu

SEQ ID NO: 84693 - RNA, 21 nt, Human
cagagaccucacucccgggga

SEQ ID NO: 84694 - RNA, 23 nt, Human
cagagaccucaucagccuuggga

SEQ ID NO: 84695 - RNA, 32 nt, Human
cagagaccuccagguggcuccggucggaggug

SEQ ID NO: 84696 - RNA, 32 nt, Human
cagagaccucugcccuccucacccucagggac

SEQ ID NO: 84697 - RNA, 20 nt, Human
cagagaccugugcccagaga

SEQ ID NO: 84698 - RNA, 32 nt, Human
cagagaccuucucuuucaacugaagcccucug

SEQ ID NO: 84699 - RNA, 32 nt, Human
cagagaccuugugauauucacacacauucagg

SEQ ID NO: 84700 - RNA, 26 nt, Human
cagagacgagcugaggacgaggggga

SEQ ID NO: 84701 - RNA, 22 nt, Human
cagagacgccagaggugcagcu

SEQ ID NO: 84702 - RNA, 22 nt, Human
cagagacgggcacacccaggga

SEQ ID NO: 84703 - RNA, 32 nt, Human
cagagacguggagagacacagagagacuugga

SEQ ID NO: 84704 - RNA, 22 nt, Human
cagagacucagggagagggaga

SEQ ID NO: 84705 - RNA, 23 nt, Human
cagagacucauccagccggagga

SEQ ID NO: 84706 - RNA, 22 nt, Human
cagagacuccagaggccaggga

SEQ ID NO: 84707 - RNA, 32 nt, Human
cagagacuccagaggccagggaaggagaucaa

SEQ ID NO: 84708 - RNA, 32 nt, Human
cagagacuccugggggaagggugaguuuacag

SEQ ID NO: 84709 - RNA, 21 nt, Human
cagagacucuucugucaggga

SEQ ID NO: 84710 - RNA, 32 nt, Human
cagagacugaaugacaugcaacaggugaaggu

SEQ ID NO: 84711 - RNA, 32 nt, Human
cagagacugccagcauccccuccagggaaggg

SEQ ID NO: 84712 - RNA, 32 nt, Human
cagagacugccuggucgccagcgcucaccaug

SEQ ID NO: 84713 - RNA, 32 nt, Human
cagagacuggaggugacccuugcccuuuucca

SEQ ID NO: 84714 - RNA, 20 nt, Human
cagagacuggcagccaggga

SEQ ID NO: 84715 - RNA, 32 nt, Human
cagagacuuuaaucacugcugaagaugccccu

SEQ ID NO: 84716 - RNA, 32 nt, Human
cagagagaaaaauaacagugaaugugcuccug

SEQ ID NO: 84717 - RNA, 32 nt, Human
cagagagaaagagagagaaagaguaugugguc

SEQ ID NO: 84718 - RNA, 32 nt, Human
cagagagaaggagaaagagggagggagagaga

SEQ ID NO: 84719 - RNA, 32 nt, Human
cagagagaaguggccagagaggcccaggggac

SEQ ID NO: 84720 - RNA, 32 nt, Human
cagagagaagugugcauguacacacaccacac

SEQ ID NO: 84721 - RNA, 32 nt, Human
cagagagaauaaccuccaucuccuggguccca

SEQ ID NO: 84722 - RNA, 32 nt, Human
cagagagacaagagagcuuguucuccaaucuc

SEQ ID NO: 84723 - RNA, 32 nt, Human
cagagagacagagccugaguaauugaaucaug

SEQ ID NO: 84724 - RNA, 32 nt, Human
cagagagacagggagagucagccuccacauuc

SEQ ID NO: 84725 - RNA, 32 nt, Human
cagagagaccacgccgauugcugagaggaacu

SEQ ID NO: 84726 - RNA, 32 nt, Human
cagagagacgcaucuguuuaccugccacccac

SEQ ID NO: 84727 - RNA, 32 nt, Human
cagagagacuaggacaguuacugcagagcucc

SEQ ID NO: 84728 - RNA, 22 nt, Human
cagagagagaggaagauggaga

SEQ ID NO: 84729 - RNA, 24 nt, Human
cagagagagcacuggagcuggagg

SEQ ID NO: 84730 - RNA, 32 nt, Human
cagagagagcagagacagguggaccaacagac

SEQ ID NO: 84731 - RNA, 32 nt, Human
cagagagagcaucugcuuuggacccaacaccu

SEQ ID NO: 84732 - RNA, 32 nt, Human
cagagagaggcguccugggugaaggaagguac

SEQ ID NO: 84733 - RNA, 32 nt, Human
cagagagaggcuucccucccagccucaguuua

SEQ ID NO: 84734 - RNA, 32 nt, Human
cagagagagggagggagaagagagauaguggg

SEQ ID NO: 84735 - RNA, 32 nt, Human
cagagagaguuguuuuaauaacuuaucuauaa

SEQ ID NO: 84736 - RNA, 32 nt, Human
cagagagauaaagcuguugcccaaugagccuu

SEQ ID NO: 84737 - RNA, 32 nt, Human
cagagagauccagagcccuacacuccacgacc

SEQ ID NO: 84738 - RNA, 22 nt, Human
cagagagaugcugaaagagggg

SEQ ID NO: 84739 - RNA, 32 nt, Human
cagagagaugcugaguuaggccugucaggucu

SEQ ID NO: 84740 - RNA, 32 nt, Human
cagagagauguucuuguuucugguguugucac

SEQ ID NO: 84741 - RNA, 32 nt, Human
cagagagcacgggagcuucuccaccucgccug

SEQ ID NO: 84742 - RNA, 32 nt, Human
cagagagcagaaagcagcccucaccagacgcu

SEQ ID NO: 84743 - RNA, 32 nt, Human
cagagagcagaagaaaagcagaagcgaagcuc

SEQ ID NO: 84744 - RNA, 32 nt, Human
cagagagcagagggggucaugcagugaguggg

SEQ ID NO: 84745 - RNA, 32 nt, Human
cagagagcagagguucuucaguccacgcaacg

SEQ ID NO: 84746 - RNA, 20 nt, Human
cagagagcagcggcugggca

SEQ ID NO: 84747 - RNA, 32 nt, Human
cagagagcagggauaugucaccaggacuccug

SEQ ID NO: 84748 - RNA, 21 nt, Human
cagagagcauuugagaagagg

SEQ ID NO: 84749 - RNA, 32 nt, Human
cagagagccacacccauccacaccgccaccac

SEQ ID NO: 84750 - RNA, 32 nt, Human
cagagagccaccaugaccucucagccucucag

SEQ ID NO: 84751 - RNA, 32 nt, Human
cagagagccauaacucuucuucaauacaguau

SEQ ID NO: 84752 - RNA, 24 nt, Human
cagagagccccaagcaaaaguggg

SEQ ID NO: 84753 - RNA, 32 nt, Human
cagagagccugaugcucucugauagcugugcc

SEQ ID NO: 84754 - RNA, 19 nt, Human
cagagagccugggagagcc

SEQ ID NO: 84755 - RNA, 23 nt, Human
cagagagccuugcugagaagggg

SEQ ID NO: 84756 - RNA, 20 nt, Human
cagagagcgcccuccaggga

SEQ ID NO: 84757 - RNA, 19 nt, Human
cagagagcuccuccagccu

SEQ ID NO: 84758 - RNA, 32 nt, Human
cagagagcucucacgcccuuuccaccauguga

SEQ ID NO: 84759 - RNA, 32 nt, Human
cagagagcucugcgacgcugcagccgcaggga

SEQ ID NO: 84760 - RNA, 21 nt, Human
cagagagcugaagaaaggggg

SEQ ID NO: 84761 - RNA, 22 nt, Human
cagagagcugaagaaaggggga

SEQ ID NO: 84762 - RNA, 32 nt, Human
cagagagcugaagugaaggcuugaggggaugc

SEQ ID NO: 84763 - RNA, 25 nt, Human
cagagagcuguauaaaaucauacca

SEQ ID NO: 84764 - RNA, 22 nt, Human
cagagagcuuagaggaaaaagg

SEQ ID NO: 84765 - RNA, 32 nt, Human
cagagagcuugaugcuuucugccuucugucuc

SEQ ID NO: 84766 - RNA, 32 nt, Human
cagagaggaaggagguggagcagcuggggcug

SEQ ID NO: 84767 - RNA, 32 nt, Human
cagagaggaagugcaggucuaaccaaggaaac

SEQ ID NO: 84768 - RNA, 32 nt, Human
cagagaggacgaucagugagaucuggccucgu

SEQ ID NO: 84769 - RNA, 32 nt, Human
cagagaggagagauuugcuggggcaaaaggcc

SEQ ID NO: 84770 - RNA, 32 nt, Human
cagagaggagguggcuaugucuucuuaagccu

SEQ ID NO: 84771 - RNA, 30 nt, Human
cagagaggaugccacagggaaaguaugaaa

SEQ ID NO: 84772 - RNA, 32 nt, Human
cagagaggcaggcagcccagcccaggggaccc

SEQ ID NO: 84773 - RNA, 32 nt, Human
cagagaggcauuccuuucuccuccucucaucc

SEQ ID NO: 84774 - RNA, 19 nt, Human
cagagaggcccaggggaca

SEQ ID NO: 84775 - RNA, 32 nt, Human
cagagaggcccgcagaggucugaggaggggcu

SEQ ID NO: 84776 - RNA, 32 nt, Human
cagagaggccugauacaagcaaguuuguuuac

SEQ ID NO: 84777 - RNA, 32 nt, Human
cagagagggaaaaacggagagugaaggagcga

SEQ ID NO: 84778 - RNA, 32 nt, Human
cagagagggaagagauucagccagcacacucc

SEQ ID NO: 84779 - RNA, 32 nt, Human
cagagagggaagggaaagccugaggccggcau

SEQ ID NO: 84780 - RNA, 32 nt, Human
cagagagggagacaggcaggcaggcagguggu

SEQ ID NO: 84781 - RNA, 32 nt, Human
cagagagggagagaggcagagagggagagagg

SEQ ID NO: 84782 - RNA, 32 nt, Human
cagagagggagagagggagagugacagcagcg

SEQ ID NO: 84783 - RNA, 32 nt, Human
cagagagggagauuugaagaugcugcacuucu

SEQ ID NO: 84784 - RNA, 32 nt, Human
cagagagggcccuccccucugcccuggacuuu

SEQ ID NO: 84785 - RNA, 19 nt, Human
cagagagggcccugagaga

SEQ ID NO: 84786 - RNA, 22 nt, Human
cagagagggcuccuguggcugc

SEQ ID NO: 84787 - RNA, 32 nt, Human
cagagaggggccugguguaucacuggaggaaa

SEQ ID NO: 84788 - RNA, 32 nt, Human
cagagaggggcugcucuccagaaagcuaaaau

SEQ ID NO: 84789 - RNA, 32 nt, Human
cagagagggguuuugcaaccagccucuggcug

SEQ ID NO: 84790 - RNA, 32 nt, Human
cagagaggguaacaggaggagucggggauaaa

SEQ ID NO: 84791 - RNA, 32 nt, Human
cagagaggguggugaccucugccugaagucac

SEQ ID NO: 84792 - RNA, 32 nt, Human
cagagaggucaugguuguacccaagggaagug

SEQ ID NO: 84793 - RNA, 32 nt, Human
cagagaguccuugugcucagugcacuggcuga

SEQ ID NO: 84794 - RNA, 32 nt, Human
cagagagugcacaaacuacccagcacagcccc

SEQ ID NO: 84795 - RNA, 32 nt, Human
cagagagugguucauccauacucucauucccu

SEQ ID NO: 84796 - RNA, 32 nt, Human
cagagaguucucucaauuuguaaguuauuuuu

SEQ ID NO: 84797 - RNA, 32 nt, Human
cagagauaacaaguguugaacugaccuugcca

SEQ ID NO: 84798 - RNA, 26 nt, Human
cagagauaagucauggagaggacauu

SEQ ID NO: 84799 - RNA, 32 nt, Human
cagagauagagcugaggaguccuguguucccc

SEQ ID NO: 84800 - RNA, 32 nt, Human
cagagauagagugcagggcauggcauuggagg

SEQ ID NO: 84801 - RNA, 32 nt, Human
cagagauaugugaccuuccagacagagaauuc

SEQ ID NO: 84802 - RNA, 32 nt, Human
cagagaucaagcaucuggcaucagggaucuuc

SEQ ID NO: 84803 - RNA, 32 nt, Human
cagagaucacaaaacuaacagcucuuucugca

SEQ ID NO: 84804 - RNA, 32 nt, Human
cagagaucacauuucaacuagauucuuaggaa

SEQ ID NO: 84805 - RNA, 32 nt, Human
cagagaucacuugaggccaggagcuggugugc

SEQ ID NO: 84806 - RNA, 32 nt, Human
cagagaucaggugggcagaggcuggcagugcu

SEQ ID NO: 84807 - RNA, 23 nt, Human
cagagauccaacauguuguggga

SEQ ID NO: 84808 - RNA, 32 nt, Human
cagagauccacaugacaggcccaaugugccuc

SEQ ID NO: 84809 - RNA, 23 nt, Human
cagagauccauugccaucaguga

SEQ ID NO: 84810 - RNA, 24 nt, Human
cagagauccccagagccccagggg

SEQ ID NO: 84811 - RNA, 32 nt, Human
cagagauccccuagguccuggcccaggccugc

SEQ ID NO: 84812 - RNA, 32 nt, Human
cagagaucgcuguggggucugugugaccauca

SEQ ID NO: 84813 - RNA, 32 nt, Human
cagagaucuccaguccacaccugugugcuccg

SEQ ID NO: 84814 - RNA, 32 nt, Human
cagagaucuugcucauacaaugaaucacgcaa

SEQ ID NO: 84815 - RNA, 32 nt, Human
cagagaugacagcagaguccucgagcaccugg

SEQ ID NO: 84816 - RNA, 32 nt, Human
cagagaugcauuccagagaugcacuccgcucu

SEQ ID NO: 84817 - RNA, 32 nt, Human
cagagaugccccaggguggagggggugggaau

SEQ ID NO: 84818 - RNA, 32 nt, Human
cagagaugcccugaggauggugguuaaggaaa

SEQ ID NO: 84819 - RNA, 30 nt, Human
cagagaugccugcccacagccuggugauga

SEQ ID NO: 84820 - RNA, 32 nt, Human
cagagaugccuguaauggugagacuuuggauc

SEQ ID NO: 84821 - RNA, 32 nt, Human
cagagaugcuggggucgagaccccagggagaa

SEQ ID NO: 84822 - RNA, 20 nt, Human
cagagauggacagaggcacc

SEQ ID NO: 84823 - RNA, 32 nt, Human
cagagauggacgaugcucauccagccacaccc

SEQ ID NO: 84824 - RNA, 32 nt, Human
cagagauggacuguggccaggcuuccacauuc

SEQ ID NO: 84825 - RNA, 30 nt, Human
cagagauggagcaacuacuaggaauaaaac

SEQ ID NO: 84826 - RNA, 32 nt, Human
cagagauggaguuucaccacguuggccaagcu

SEQ ID NO: 84827 - RNA, 32 nt, Human
cagagauggaguuucaccauauugcccaggcu

SEQ ID NO: 84828 - RNA, 30 nt, Human
cagagaugggcagugagaaggagcagaguc

SEQ ID NO: 84829 - RNA, 32 nt, Human
cagagauggggaacaggauggagcagcuggaa

SEQ ID NO: 84830 - RNA, 17 nt, Human
cagagauggguccccaa

SEQ ID NO: 84831 - RNA, 30 nt, Human
cagagauggguggaggggcuggggaaaggc

SEQ ID NO: 84832 - RNA, 32 nt, Human
cagagauggugaggcaggacucacagggcccc

SEQ ID NO: 84833 - RNA, 32 nt, Human
cagagauggugggcgucuuugggaucuggccu

SEQ ID NO: 84834 - RNA, 32 nt, Human
cagagauguaacaagcucauaggguaucaaua

SEQ ID NO: 84835 - RNA, 32 nt, Human
cagagaugucucacagcacauauguacuuuac

SEQ ID NO: 84836 - RNA, 32 nt, Human
cagagaugugaugcaggaaaccuucacgaacc

SEQ ID NO: 84837 - RNA, 32 nt, Human
cagagaugugaugcaggaaaccuucaggaacc

SEQ ID NO: 84838 - RNA, 32 nt, Human
cagagaugugcuuuggagauuuggaaagcagg

SEQ ID NO: 84839 - RNA, 32 nt, Human
cagagauguuccuccccucaucugcccggguu

SEQ ID NO: 84840 - RNA, 32 nt, Human
cagagauguuucagaauacaaaauuaguauau

SEQ ID NO: 84841 - RNA, 22 nt, Human
cagagauuaaacauuguccuuu

SEQ ID NO: 84842 - RNA, 32 nt, Human
cagagauucauggaucaggcagcuccaaacua

SEQ ID NO: 84843 - RNA, 32 nt, Human
cagagauucauggaucaggcagcuccaaacug

SEQ ID NO: 84844 - RNA, 32 nt, Human
cagagauucccugagugucuguccucacccaa

SEQ ID NO: 84845 - RNA, 32 nt, Human
cagagauucuagaugaagacagcugcccuuuu

SEQ ID NO: 84846 - RNA, 32 nt, Human
cagagauuggaacaguuuggaggacuuagaau

SEQ ID NO: 84847 - RNA, 32 nt, Human
cagagauuucaaaucauugaacacugaaguau

SEQ ID NO: 84848 - RNA, 32 nt, Human
cagagauuucaucauggucucccaggcccuca

SEQ ID NO: 84849 - RNA, 32 nt, Human
cagagauuugcugccaggaaucaauuuugagg

SEQ ID NO: 84850 - RNA, 32 nt, Human
cagagauuuggauucccuuggcggccguggag

SEQ ID NO: 84851 - RNA, 32 nt, Human
cagagauuugguuaagcucacacagcuaacaa

SEQ ID NO: 84852 - RNA, 32 nt, Human
cagagcaaaaggggaagggaagaggcagucag

SEQ ID NO: 84853 - RNA, 21 nt, Human
cagagcaaagaagauggggga

SEQ ID NO: 84854 - RNA, 32 nt, Human
cagagcaaauaagggaccuggccuaguucaca

SEQ ID NO: 84855 - RNA, 32 nt, Human
cagagcaaccccuggaccccagccucaaaucc

SEQ ID NO: 84856 - RNA, 32 nt, Human
cagagcaagaccacagcuggugaacaguccag

SEQ ID NO: 84857 - RNA, 20 nt, Human
cagagcaagaccgugucuca

SEQ ID NO: 84858 - RNA, 32 nt, Human
cagagcaagcuucucccacuucuugaaaggcu

SEQ ID NO: 84859 - RNA, 32 nt, Human
cagagcaaggcccucagggagggucauccucc

SEQ ID NO: 84860 - RNA, 32 nt, Human
cagagcaagggccugucucagcaaaacaaaac

SEQ ID NO: 84861 - RNA, 32 nt, Human
cagagcaagguuggguucgcuccucuggcaga

SEQ ID NO: 84862 - RNA, 22 nt, Human
cagagcaaguaugaaggugaug

SEQ ID NO: 84863 - RNA, 32 nt, Human
cagagcaagugauccuggagcugcagccugcc

SEQ ID NO: 84864 - RNA, 24 nt, Human
cagagcacaaccacagugaccgga

SEQ ID NO: 84865 - RNA, 32 nt, Human
cagagcacacgcaacccagccucagcaucaca

SEQ ID NO: 84866 - RNA, 32 nt, Human
cagagcacagccgagccgagcggcccgggcgg

SEQ ID NO: 84867 - RNA, 32 nt, Human
cagagcacaggcaguugugugccuugggccca

SEQ ID NO: 84868 - RNA, 32 nt, Human
cagagcacaucagcuaugugccccagcucuca

SEQ ID NO: 84869 - RNA, 32 nt, Human
cagagcaccagagacgucagcaucucaagggc

SEQ ID NO: 84870 - RNA, 32 nt, Human
cagagcaccauccugggucagaaggucucaug

SEQ ID NO: 84871 - RNA, 21 nt, Human
cagagcaccuggcgugggcca

SEQ ID NO: 84872 - RNA, 24 nt, Human
cagagcacgguggccacccccuga

SEQ ID NO: 84873 - RNA, 32 nt, Human
cagagcacuaagcugcugggaacccaucugug

SEQ ID NO: 84874 - RNA, 32 nt, Human
cagagcacuacagccuuuuauugaguggggca

SEQ ID NO: 84875 - RNA, 32 nt, Human
cagagcacucauuccuucccacccccaguccu

SEQ ID NO: 84876 - RNA, 32 nt, Human
cagagcacugcgauguucaggggugagucagg

SEQ ID NO: 84877 - RNA, 32 nt, Human
cagagcacugggugagagggagaagaccuugg

SEQ ID NO: 84878 - RNA, 32 nt, Human
cagagcacuuguuaacuuaguccuccugcaua

SEQ ID NO: 84879 - RNA, 32 nt, Human
cagagcagacacaaggcucugccugcaccagg

SEQ ID NO: 84880 - RNA, 32 nt, Human
cagagcagacacugcgaugacaacggacgaca

SEQ ID NO: 84881 - RNA, 22 nt, Human
cagagcagacugcucuguccuu

SEQ ID NO: 84882 - RNA, 32 nt, Human
cagagcagagaggcccagggaggggccaggug

SEQ ID NO: 84883 - RNA, 32 nt, Human
cagagcagagcugauggagaaggaaggcucca

SEQ ID NO: 84884 - RNA, 32 nt, Human
cagagcagagcugauggcaugagugagggcug

SEQ ID NO: 84885 - RNA, 32 nt, Human
cagagcagaggccaggguggccagcaguggcu

SEQ ID NO: 84886 - RNA, 32 nt, Human
cagagcagaggcugaggcacggggagccagcc

SEQ ID NO: 84887 - RNA, 32 nt, Human
cagagcagauucaagaaagaagaucaggaagg

SEQ ID NO: 84888 - RNA, 20 nt, Human
cagagcagcagcuacgggca

SEQ ID NO: 84889 - RNA, 24 nt, Human
cagagcagccaggaccaccccuga

SEQ ID NO: 84890 - RNA, 32 nt, Human
cagagcagccaguguccgggaggcagaagaug

SEQ ID NO: 84891 - RNA, 21 nt, Human
cagagcagcccccacccggga

SEQ ID NO: 84892 - RNA, 32 nt, Human
cagagcagcccgagggccagccugagccccug

SEQ ID NO: 84893 - RNA, 21 nt, Human
cagagcagccggaguuugcug

SEQ ID NO: 84894 - RNA, 32 nt, Human
cagagcagccugcggccuccaagccuuccugg

SEQ ID NO: 84895 - RNA, 32 nt, Human
cagagcagccuggccaccauagugagaucccu

SEQ ID NO: 84896 - RNA, 21 nt, Human
cagagcagccugggcaacaug

SEQ ID NO: 84897 - RNA, 32 nt, Human
cagagcagccugggcaacgcagugagagaccc

SEQ ID NO: 84898 - RNA, 21 nt, Human
cagagcagcggagcugccccg

SEQ ID NO: 84899 - RNA, 32 nt, Human
cagagcagcugcaggccuugggagaggaccca

SEQ ID NO: 84900 - RNA, 32 nt, Human
cagagcaggaagcacaccugugccauuucugg

SEQ ID NO: 84901 - RNA, 32 nt, Human
cagagcaggacuggaaauguccuggccgcgcc

SEQ ID NO: 84902 - RNA, 32 nt, Human
cagagcaggagaagacacgagagcagaaagaa

SEQ ID NO: 84903 - RNA, 32 nt, Human
cagagcaggaggcagagcccgcgggaagcucg

SEQ ID NO: 84904 - RNA, 32 nt, Human
cagagcaggccaguguacccagagccauggca

SEQ ID NO: 84905 - RNA, 32 nt, Human
cagagcaggccuggcccccagcugugagggcc

SEQ ID NO: 84906 - RNA, 32 nt, Human
cagagcaggcucggcgcuuccaccccagugca

SEQ ID NO: 84907 - RNA, 32 nt, Human
cagagcaggcuucaucugcucugccauccagc

SEQ ID NO: 84908 - RNA, 32 nt, Human
cagagcaggcuuugugagagaggaccuccaug

SEQ ID NO: 84909 - RNA, 32 nt, Human
cagagcaggggaucagaggagacugaagcaga

SEQ ID NO: 84910 - RNA, 32 nt, Human
cagagcagggggaggcagcccagaucccugcu

SEQ ID NO: 84911 - RNA, 32 nt, Human
cagagcagggggcugagccagguuggagccua

SEQ ID NO: 84912 - RNA, 32 nt, Human
cagagcaggguggagagggcggugggaggcgu

SEQ ID NO: 84913 - RNA, 32 nt, Human
cagagcagguauagacuccugaaagacaauau

SEQ ID NO: 84914 - RNA, 32 nt, Human
cagagcagguggggaaaaagaggagaagaaaa

SEQ ID NO: 84915 - RNA, 32 nt, Human
cagagcagucggugacaggacagagcagucgg

SEQ ID NO: 84916 - RNA, 32 nt, Human
cagagcagugcacuccagucugcagguacugc

SEQ ID NO: 84917 - RNA, 32 nt, Human
cagagcagugcuagucgggcuuggggguggcu

SEQ ID NO: 84918 - RNA, 32 nt, Human
cagagcaguggugacguggccugggaggaggu

SEQ ID NO: 84919 - RNA, 21 nt, Human
cagagcaguuugcuuugaaaa

SEQ ID NO: 84920 - RNA, 32 nt, Human
cagagcauacacaccacgucuacuucucagcg

SEQ ID NO: 84921 - RNA, 32 nt, Human
cagagcauagaugaaaauggcaaguucccugg

SEQ ID NO: 84922 - RNA, 22 nt, Human
cagagcauccagagccucuguc

SEQ ID NO: 84923 - RNA, 32 nt, Human
cagagcaucuacugggacuacaggugcacugu

SEQ ID NO: 84924 - RNA, 32 nt, Human
cagagcaucuccaggagggggaaagggucacc

SEQ ID NO: 84925 - RNA, 24 nt, Human
cagagcaucucgaggcaacuguua

SEQ ID NO: 84926 - RNA, 32 nt, Human
cagagcaugacaaagaugacgcucaaaaguaa

SEQ ID NO: 84927 - RNA, 32 nt, Human
cagagcaugccgaacccaggagucugucucac

SEQ ID NO: 84928 - RNA, 32 nt, Human
cagagcauggaaagggggucagcucuggucug

SEQ ID NO: 84929 - RNA, 32 nt, Human
cagagcauggaaaucacuuucauuuccggauu

SEQ ID NO: 84930 - RNA, 32 nt, Human
cagagcaugggcugggccugggcacaggagga

SEQ ID NO: 84931 - RNA, 32 nt, Human
cagagcauggggcagagccaggacuagagcuc

SEQ ID NO: 84932 - RNA, 32 nt, Human
cagagcaugggggcgggggcucuggaguggug

SEQ ID NO: 84933 - RNA, 32 nt, Human
cagagcaugguggcaggcgccuguaaucccag

SEQ ID NO: 84934 - RNA, 22 nt, Human
cagagcauugcuacggcugcug

SEQ ID NO: 84935 - RNA, 32 nt, Human
cagagcauuuucugccuguuuggaagguuuga

SEQ ID NO: 84936 - RNA, 32 nt, Human
cagagccaaacagacaagcaaccaaaauaaaa

SEQ ID NO: 84937 - RNA, 32 nt, Human
cagagccaaacagagcuggccugaaccuccag

SEQ ID NO: 84938 - RNA, 18 nt, Human
cagagccaacaggaugaa

SEQ ID NO: 84939 - RNA, 32 nt, Human
cagagccaaccaggacacuaauacagcucaga

SEQ ID NO: 84940 - RNA, 22 nt, Human
cagagccaagaccagaacccag

SEQ ID NO: 84941 - RNA, 32 nt, Human
cagagccaaggagcugcuucucucuucuccca

SEQ ID NO: 84942 - RNA, 32 nt, Human
cagagccaaucacagacccaccacacagccca

SEQ ID NO: 84943 - RNA, 32 nt, Human
cagagccaaugcccgccccaucgugucauggc

SEQ ID NO: 84944 - RNA, 32 nt, Human
cagagccacaagcaaaguuugcacugggccca

SEQ ID NO: 84945 - RNA, 32 nt, Human
cagagccacagcugggagaccugcacuguccc

SEQ ID NO: 84946 - RNA, 32 nt, Human
cagagccacccaaugaacagugcaaugugaag

SEQ ID NO: 84947 - RNA, 21 nt, Human
cagagccacguguggcugcug

SEQ ID NO: 84948 - RNA, 32 nt, Human
cagagccacguuugaacccagaagaacaccag

SEQ ID NO: 84949 - RNA, 32 nt, Human
cagagccacugcagaggaccagacugggaaaa

SEQ ID NO: 84950 - RNA, 32 nt, Human
cagagccacugcaguccccgcucggaggaugu

SEQ ID NO: 84951 - RNA, 32 nt, Human
cagagccacugcauucaucccauauccuucug

SEQ ID NO: 84952 - RNA, 32 nt, Human
cagagccacuuuuaggcauaaggaaggcagcc

SEQ ID NO: 84953 - RNA, 32 nt, Human
cagagccagaacuagagacgggcacccaggcu

SEQ ID NO: 84954 - RNA, 32 nt, Human
cagagccagaacugagcccagugagagcgcac

SEQ ID NO: 84955 - RNA, 32 nt, Human
cagagccagaagccagagggccagggauauga

SEQ ID NO: 84956 - RNA, 32 nt, Human
cagagccagacagcaggcuccuggucccaguc

SEQ ID NO: 84957 - RNA, 32 nt, Human
cagagccagagagaaagaggaagagacugagu

SEQ ID NO: 84958 - RNA, 32 nt, Human
cagagccagcagcugccaugcccuccugcucc

SEQ ID NO: 84959 - RNA, 23 nt, Human
cagagccagccagauuugagaag

SEQ ID NO: 84960 - RNA, 20 nt, Human
cagagccagccaucuggaag

SEQ ID NO: 84961 - RNA, 20 nt, Human
cagagccagccggcuaugaa

SEQ ID NO: 84962 - RNA, 32 nt, Human
cagagccagccgggauuccagugagaugggug

SEQ ID NO: 84963 - RNA, 32 nt, Human
cagagccagcugacgcccucccugccucccag

SEQ ID NO: 84964 - RNA, 32 nt, Human
cagagccaggagagguugggugacacccacug

SEQ ID NO: 84965 - RNA, 32 nt, Human
cagagccaggagcccacccaagagagaucagg

SEQ ID NO: 84966 - RNA, 32 nt, Human
cagagccaggaggcaguggggcugugggcuca

SEQ ID NO: 84967 - RNA, 32 nt, Human
cagagccagggaagccgaaggggaagaggcgg

SEQ ID NO: 84968 - RNA, 32 nt, Human
cagagccagggcugugaugccaggaaguggaa

SEQ ID NO: 84969 - RNA, 32 nt, Human
cagagccauaugcaagcacaugaagccgaggg

SEQ ID NO: 84970 - RNA, 32 nt, Human
cagagccauaugcaagcacaugagccgagcgu

SEQ ID NO: 84971 - RNA, 24 nt, Human
cagagccauauuucucuucuuuca

SEQ ID NO: 84972 - RNA, 32 nt, Human
cagagccaugaagaagaaguuaguggugcugg

SEQ ID NO: 84973 - RNA, 32 nt, Human
cagagccaugccacaucuguauauagaugggg

SEQ ID NO: 84974 - RNA, 32 nt, Human
cagagcccaagaaaucacuggugaugagaugg

SEQ ID NO: 84975 - RNA, 32 nt, Human
cagagcccaagaggcaggggaaaggcggcaau

SEQ ID NO: 84976 - RNA, 32 nt, Human
cagagcccaagcagcacucaggagaggggaga

SEQ ID NO: 84977 - RNA, 32 nt, Human
cagagcccaagucaggaggucaagugugcaug

SEQ ID NO: 84978 - RNA, 20 nt, Human
cagagcccacagcuuccaag

SEQ ID NO: 84979 - RNA, 32 nt, Human
cagagcccacccgucuguccucggugacggcc

SEQ ID NO: 84980 - RNA, 32 nt, Human
cagagcccacccucccaagcucaggggcaucc

SEQ ID NO: 84981 - RNA, 32 nt, Human
cagagcccagaacucacgccgggggaggccga

SEQ ID NO: 84982 - RNA, 32 nt, Human
cagagcccagggcaauggugucuguccagccc

SEQ ID NO: 84983 - RNA, 32 nt, Human
cagagcccaguuaauucuccgcaccucgguug

SEQ ID NO: 84984 - RNA, 32 nt, Human
cagagccccacauuauuaugugaauaacaaug

SEQ ID NO: 84985 - RNA, 32 nt, Human
cagagccccaggacugggccagagcacuuagg

SEQ ID NO: 84986 - RNA, 21 nt, Human
cagagcccccaagccucugcc

SEQ ID NO: 84987 - RNA, 32 nt, Human
cagagcccccacccucucucccucaccccucu

SEQ ID NO: 84988 - RNA, 32 nt, Human
cagagcccccaccuucaagucucuccagugug

SEQ ID NO: 84989 - RNA, 32 nt, Human
cagagcccccuccccagcccucaggcccuccc

SEQ ID NO: 84990 - RNA, 22 nt, Human
cagagcccccuccccugcagag

SEQ ID NO: 84991 - RNA, 32 nt, Human
cagagcccccuugagccccucugccuaugucc

SEQ ID NO: 84992 - RNA, 32 nt, Human
cagagccccgcuguccuugccccuggugguuc

SEQ ID NO: 84993 - RNA, 32 nt, Human
cagagccccuccacagucggccucaugacugu

SEQ ID NO: 84994 - RNA, 32 nt, Human
cagagccccuccccaucuuccucucucuaaaa

SEQ ID NO: 84995 - RNA, 32 nt, Human
cagagccccucggaggacaaugcgcccggcgc

SEQ ID NO: 84996 - RNA, 32 nt, Human
cagagccccuggcagauggaggcuccacccug

SEQ ID NO: 84997 - RNA, 32 nt, Human
cagagccccuucccgggccucucccccaaggc

SEQ ID NO: 84998 - RNA, 32 nt, Human
cagagcccuccaggagcguggggugggggcca

SEQ ID NO: 84999 - RNA, 25 nt, Human
cagagcccuccguggugcccgggga

SEQ ID NO: 85000 - RNA, 32 nt, Human
cagagcccuccugcucacacagcugcugagac

SEQ ID NO: 85001 - RNA, 32 nt, Human
cagagcccugcaaccagcaguccagggagaag

SEQ ID NO: 85002 - RNA, 22 nt, Human
cagagcccugcucccuccgggu

SEQ ID NO: 85003 - RNA, 32 nt, Human
cagagcccugcucuuugccuggaugguucacc

SEQ ID NO: 85004 - RNA, 32 nt, Human
cagagcccuuggaguguugguggagaucagag

SEQ ID NO: 85005 - RNA, 32 nt, Human
cagagccgagccgacagagagcagggaaccgg

SEQ ID NO: 85006 - RNA, 32 nt, Human
cagagccgagccgacccuucucucccgggcug

SEQ ID NO: 85007 - RNA, 32 nt, Human
cagagccgaguggcgcacgcugggcaguggcc

SEQ ID NO: 85008 - RNA, 32 nt, Human
cagagccgcaggacggagacugggggcagccc

SEQ ID NO: 85009 - RNA, 32 nt, Human
cagagccgcaucccuuccccagccccuguguu

SEQ ID NO: 85010 - RNA, 32 nt, Human
cagagccgcgaggagcaggcugugcugcuugu

SEQ ID NO: 85011 - RNA, 32 nt, Human
cagagccgcuccccucuccucgccccgccacc

SEQ ID NO: 85012 - RNA, 32 nt, Human
cagagccgcuguuccucuccugccuuuagaga

SEQ ID NO: 85013 - RNA, 32 nt, Human
cagagccggaguuggggagacuguggcugaaa

SEQ ID NO: 85014 - RNA, 32 nt, Human
cagagccgggagcuggagguucugcgggagca

SEQ ID NO: 85015 - RNA, 32 nt, Human
cagagccguggccaggagaaccccuugccacc

SEQ ID NO: 85016 - RNA, 17 nt, Human
cagagccucagcacugu

SEQ ID NO: 85017 - RNA, 32 nt, Human
cagagccucaggaguaaaugaaguuacuaggg

SEQ ID NO: 85018 - RNA, 32 nt, Human
cagagccucaugaaugggauuaaugcccuuau

SEQ ID NO: 85019 - RNA, 32 nt, Human
cagagccucccucccugggcuccuugccagcu

SEQ ID NO: 85020 - RNA, 20 nt, Human
cagagccuccucccagggca

SEQ ID NO: 85021 - RNA, 32 nt, Human
cagagccucuacuucugucucaaaauggcucc

SEQ ID NO: 85022 - RNA, 32 nt, Human
cagagccucuccucaaagaugcuacaaaacuu

SEQ ID NO: 85023 - RNA, 32 nt, Human
cagagccucucuggaagagaaaggaagagcca

SEQ ID NO: 85024 - RNA, 32 nt, Human
cagagccucugccucuuccucugucuccugug

SEQ ID NO: 85025 - RNA, 32 nt, Human
cagagccucugcuggaaggggcagcaggagga

SEQ ID NO: 85026 - RNA, 32 nt, Human
cagagccucuggaaggaguauggcccugccua

SEQ ID NO: 85027 - RNA, 32 nt, Human
cagagccucuuaccuccagaucuuucagggua

SEQ ID NO: 85028 - RNA, 32 nt, Human
cagagccucuugggggcaaaaacaacugcuca

SEQ ID NO: 85029 - RNA, 32 nt, Human
cagagccugagcugcugcugugguguggccca

SEQ ID NO: 85030 - RNA, 32 nt, Human
cagagccugcaagcuagaacuugugggcagcc

SEQ ID NO: 85031 - RNA, 32 nt, Human
cagagccugcauucccgacaccuggugcccua

SEQ ID NO: 85032 - RNA, 32 nt, Human
cagagccugcggcuguggcaaggccuguuucu

SEQ ID NO: 85033 - RNA, 32 nt, Human
cagagccugcuccccgcccucucugcucgcug

SEQ ID NO: 85034 - RNA, 32 nt, Human
cagagccuggagcugagcucuuggugacuggu

SEQ ID NO: 85035 - RNA, 32 nt, Human
cagagccuggcaacagccuggccugcagaaga

SEQ ID NO: 85036 - RNA, 32 nt, Human
cagagccugggacaagcuaggucuccauaacu

SEQ ID NO: 85037 - RNA, 32 nt, Human
cagagccugggagcugcaggaacugucugaga

SEQ ID NO: 85038 - RNA, 32 nt, Human
cagagccugggcagguccuuguauucuggcaa

SEQ ID NO: 85039 - RNA, 32 nt, Human
cagagccugggcgacagagcgagacuccaucu

SEQ ID NO: 85040 - RNA, 32 nt, Human
cagagccuggggaggccaggguagaggcugac

SEQ ID NO: 85041 - RNA, 32 nt, Human
cagagccuggggccuccagccugggacugcug

SEQ ID NO: 85042 - RNA, 32 nt, Human
cagagccugguuugcggaggggagaggcagac

SEQ ID NO: 85043 - RNA, 32 nt, Human
cagagccuguccucacaguggagggguguaag

SEQ ID NO: 85044 - RNA, 32 nt, Human
cagagccuguuuguuucucucuaccugauuuc

SEQ ID NO: 85045 - RNA, 32 nt, Human
cagagccuucuaggagcucaagggcuguuuga

SEQ ID NO: 85046 - RNA, 32 nt, Human
cagagccuucucaucucucccuucgcccaguu

SEQ ID NO: 85047 - RNA, 32 nt, Human
cagagcgacagagcaguugagaggacacuccc

SEQ ID NO: 85048 - RNA, 20 nt, Human
cagagcgagacuuugucuca

SEQ ID NO: 85049 - RNA, 32 nt, Human
cagagcgagagggaagugcagggagccuggcc

SEQ ID NO: 85050 - RNA, 32 nt, Human
cagagcgagcagcguggagcucagugacagca

SEQ ID NO: 85051 - RNA, 32 nt, Human
cagagcgagcuuccccuccucccugcucuccc

SEQ ID NO: 85052 - RNA, 32 nt, Human
cagagcgaggcggggcagugaggacuccgcga

SEQ ID NO: 85053 - RNA, 32 nt, Human
cagagcgccugggacagcuuguccgccaggcu

SEQ ID NO: 85054 - RNA, 32 nt, Human
cagagcgcuagugcccuuggguccuugcgggu

SEQ ID NO: 85055 - RNA, 32 nt, Human
cagagcgcugggauucagcaggagugccagga

SEQ ID NO: 85056 - RNA, 24 nt, Human
cagagcggaggcggaggcgggcgc

SEQ ID NO: 85057 - RNA, 32 nt, Human
cagagcggaucugccacuggcccaggucugga

SEQ ID NO: 85058 - RNA, 32 nt, Human
cagagcggccugggugccuggcggacagaacu

SEQ ID NO: 85059 - RNA, 32 nt, Human
cagagcggcuccgcgagcuucucuccacuuuc

SEQ ID NO: 85060 - RNA, 32 nt, Human
cagagcgggggugggaggggaaugccacagug

SEQ ID NO: 85061 - RNA, 32 nt, Human
cagagcgguuuggcuuuuuaaauuacuguuau

SEQ ID NO: 85062 - RNA, 32 nt, Human
cagagcguaccguggcccagacugauccucga

SEQ ID NO: 85063 - RNA, 32 nt, Human
cagagcgugccgcuacacuccagccugaugac

SEQ ID NO: 85064 - RNA, 25 nt, Human
cagagcgugucccagacaucacagc

SEQ ID NO: 85065 - RNA, 19 nt, Human
cagagcuaaacuccuuccu

SEQ ID NO: 85066 - RNA, 24 nt, Human
cagagcuaaggguuucccugagga

SEQ ID NO: 85067 - RNA, 19 nt, Human
cagagcuaauguacaugcu

SEQ ID NO: 85068 - RNA, 32 nt, Human
cagccagaguucccugaagugggaagucagag

SEQ ID NO: 85069 - RNA, 32 nt, Human
cagccagaucacuuguaugcacaaagcugcug

SEQ ID NO: 85070 - RNA, 32 nt, Human
cagccagauggacuccagccugccuggcaggc

SEQ ID NO: 85071 - RNA, 32 nt, Human
cagccagaugggcugaaaguggaacucaaggg

SEQ ID NO: 85072 - RNA, 32 nt, Human
cagccagaugucuucccacaaaggaucugugg

SEQ ID NO: 85073 - RNA, 32 nt, Human
cagccagauuccauccugaggaagcaaaugaa

SEQ ID NO: 85074 - RNA, 32 nt, Human
cagccagauuccauccuggggaagcaaaugaa

SEQ ID NO: 85075 - RNA, 32 nt, Human
cagccagcacccugggcucucagggacugagg

SEQ ID NO: 85076 - RNA, 32 nt, Human
cagccagcaccucugccuucucagggacaaga

SEQ ID NO: 85077 - RNA, 31 nt, Human
cagccagcacucaagggggagagaagcacau

SEQ ID NO: 85078 - RNA, 32 nt, Human
cagccagcacucacucugcugugugaccugag

SEQ ID NO: 85079 - RNA, 32 nt, Human
cagccagcagagccacguuccuuaugagcacc

SEQ ID NO: 85080 - RNA, 16 nt, Human
cagccagcagcagugg

SEQ ID NO: 85081 - RNA, 32 nt, Human
cagccagcagcgcucaggcuguguggcugccg

SEQ ID NO: 85082 - RNA, 22 nt, Human
cagccagcagcucccacuggug

SEQ ID NO: 85083 - RNA, 17 nt, Human
cagccagcaggcagcca

SEQ ID NO: 85084 - RNA, 32 nt, Human
cagccagcaggcugggggagcagugagggcag

SEQ ID NO: 85085 - RNA, 32 nt, Human
cagccagcagggccaggugacagugaagcuca

SEQ ID NO: 85086 - RNA, 23 nt, Human
cagccagcaucccagacuccaca

SEQ ID NO: 85087 - RNA, 18 nt, Human
cagccagcauccugagcc

SEQ ID NO: 85088 - RNA, 32 nt, Human
cagccagcaucugggagcccggcgagagcggu

SEQ ID NO: 85089 - RNA, 32 nt, Human
cagccagccaaggugguuccugcuucacccac

SEQ ID NO: 85090 - RNA, 32 nt, Human
cagccagccacagguacagagcacaggacccc

SEQ ID NO: 85091 - RNA, 21 nt, Human
cagccagccacucuaccagug

SEQ ID NO: 85092 - RNA, 19 nt, Human
cagccagccagccaacugg

SEQ ID NO: 85093 - RNA, 32 nt, Human
cagccagccagcccauccacuucuuccacucc

SEQ ID NO: 85094 - RNA, 32 nt, Human
cagccagccagcgaagucaccugcucucugcc

SEQ ID NO: 85095 - RNA, 22 nt, Human
cagccagccagcuccgugggug

SEQ ID NO: 85096 - RNA, 20 nt, Human
cagccagccagcuguccugg

SEQ ID NO: 85097 - RNA, 32 nt, Human
cagccagccagggcccaggcagcuuugacugc

SEQ ID NO: 85098 - RNA, 32 nt, Human
cagccagccagggcccugcccagcuucaauuu

SEQ ID NO: 85099 - RNA, 32 nt, Human
cagccagcccaauuucagaagcgcugucucag

SEQ ID NO: 85100 - RNA, 32 nt, Human
cagccagccccaagaucucaggagcuuuaggg

SEQ ID NO: 85101 - RNA, 17 nt, Human
cagccagcccccgccca

SEQ ID NO: 85102 - RNA, 32 nt, Human
cagccagcccgguacagccugugugacuucuc

SEQ ID NO: 85103 - RNA, 32 nt, Human
cagccagcccucaaaacacaaaggaacaaaga

SEQ ID NO: 85104 - RNA, 32 nt, Human
cagccagcccugaaggauggcugccauauugg

SEQ ID NO: 85105 - RNA, 32 nt, Human
cagccagccgagugauuggcgagcccacgagu

SEQ ID NO: 85106 - RNA, 26 nt, Human
cagccagccggcaaaggaaggaggug

SEQ ID NO: 85107 - RNA, 32 nt, Human
cagccagccggcgguccagccuggugccucug

SEQ ID NO: 85108 - RNA, 16 nt, Human
cagccagccgugggcc

SEQ ID NO: 85109 - RNA, 32 nt, Human
cagccagccuccagaaugggacagaagaacca

SEQ ID NO: 85110 - RNA, 32 nt, Human
cagccagccugagcucuccugcaagacagagc

SEQ ID NO: 85111 - RNA, 32 nt, Human
cagccagccugccugccugccugccugcccgc

SEQ ID NO: 85112 - RNA, 32 nt, Human
cagccagcgccucaguagagaccuaagggcgc

SEQ ID NO: 85113 - RNA, 18 nt, Human
cagccagcgcggggccac

SEQ ID NO: 85114 - RNA, 18 nt, Human
cagccagcgcuuccaggc

SEQ ID NO: 85115 - RNA, 22 nt, Human
cagccagcgcuuccaggcccac

SEQ ID NO: 85116 - RNA, 32 nt, Human
cagccagcgugcgggaacgggcaggcagccuc

SEQ ID NO: 85117 - RNA, 21 nt, Human
cagccagcuagcccauaacug

SEQ ID NO: 85118 - RNA, 17 nt, Human
cagccagcucccaggcc

SEQ ID NO: 85119 - RNA, 32 nt, Human
cagccagcuccgaaagcagaagaaggaggcgg

SEQ ID NO: 85120 - RNA, 32 nt, Human
cagccagcucuuaccuccuccugguugcuuuu

SEQ ID NO: 85121 - RNA, 24 nt, Human
cagccagcugcaagccccacagug

SEQ ID NO: 85122 - RNA, 32 nt, Human
cagccagcugcacucugcugcgggcacgggca

SEQ ID NO: 85123 - RNA, 17 nt, Human
cagccagcugcagggcc

SEQ ID NO: 85124 - RNA, 20 nt, Human
cagccagcugcccccuucca

SEQ ID NO: 85125 - RNA, 32 nt, Human
cagccagcuguugccaugucaucugcuguggc

SEQ ID NO: 85126 - RNA, 18 nt, Human
cagccagcuucagggguc

SEQ ID NO: 85127 - RNA, 23 nt, Human
cagccagcuugccagggccacug

SEQ ID NO: 85128 - RNA, 22 nt, Human
cagccagcuugggaaggggaug

SEQ ID NO: 85129 - RNA, 18 nt, Human
cagccaggacacuauaga

SEQ ID NO: 85130 - RNA, 32 nt, Human
cagccaggacaggcaggagcaguggaauagcu

SEQ ID NO: 85131 - RNA, 22 nt, Human
cagccaggacauuaggaccacu

SEQ ID NO: 85132 - RNA, 32 nt, Human
cagccaggacccuugauucagaccauggaccc

SEQ ID NO: 85133 - RNA, 22 nt, Human
cagccaggacgcccggggccac

SEQ ID NO: 85134 - RNA, 32 nt, Human
cagccaggacgcccggggccaccagcucagcu

SEQ ID NO: 85135 - RNA, 32 nt, Human
cagccaggagagaccuuuucugccuggagaga

SEQ ID NO: 85136 - RNA, 32 nt, Human
cagccaggagaggccguuccugccuggagaga

SEQ ID NO: 85137 - RNA, 32 nt, Human
cagccaggagagucacuggcugccuuuggugg

SEQ ID NO: 85138 - RNA, 32 nt, Human
cagccaggagccgcuguugccucccagccccu

SEQ ID NO: 85139 - RNA, 22 nt, Human
cagccaggagcucuccauggcc

SEQ ID NO: 85140 - RNA, 32 nt, Human
cagccaggagcugggagccacaggaagcaaaa

SEQ ID NO: 85141 - RNA, 19 nt, Human
cagccaggagggcaggggg

SEQ ID NO: 85142 - RNA, 32 nt, Human
cagccaggaguccccguuggaaaagaacaaug

SEQ ID NO: 85143 - RNA, 22 nt, Human
cagccaggaugacagagcaaga

SEQ ID NO: 85144 - RNA, 32 nt, Human
cagccaggcagagugggagagcacaggccccu

SEQ ID NO: 85145 - RNA, 21 nt, Human
cagccaggcagcggagcccua

SEQ ID NO: 85146 - RNA, 32 nt, Human
cagccaggccaacauggugaaaacuccucucu

SEQ ID NO: 85147 - RNA, 32 nt, Human
cagccaggccaacauggugaaaccccgucucu

SEQ ID NO: 85148 - RNA, 32 nt, Human
cagccaggccaacauggugaaacccugucucu

SEQ ID NO: 85149 - RNA, 32 nt, Human
cagccaggccaacauggugaaacuucaucucu

SEQ ID NO: 85150 - RNA, 32 nt, Human
cagccaggccaacuuggcaaaaccccaucucu

SEQ ID NO: 85151 - RNA, 21 nt, Human
cagccaggccacggagagcag

SEQ ID NO: 85152 - RNA, 32 nt, Human
cagccaggcccacauggagcccucccagccac

SEQ ID NO: 85153 - RNA, 32 nt, Human
cagccaggcccaccaccucucacagucagugc

SEQ ID NO: 85154 - RNA, 23 nt, Human
cagccaggcccagccacccagga

SEQ ID NO: 85155 - RNA, 32 nt, Human
cagccaggcccuggagggugauccugccagca

SEQ ID NO: 85156 - RNA, 32 nt, Human
cagccaggccggagacaaguugcagucccggg

SEQ ID NO: 85157 - RNA, 32 nt, Human
cagccaggccugauuuggccaaaucaucaugc

SEQ ID NO: 85158 - RNA, 32 nt, Human
cagccaggccuggcucucagcagcucugcagg

SEQ ID NO: 85159 - RNA, 32 nt, Human
cagccaggccugggcagugaccucuuucucuu

SEQ ID NO: 85160 - RNA, 32 nt, Human
cagccaggccuuuccugcaagcugcugugcuu

SEQ ID NO: 85161 - RNA, 32 nt, Human
cagccaggcucugugcugacccuccuguugcg

SEQ ID NO: 85162 - RNA, 32 nt, Human
cagccaggcugauggccagggccgcagugccc

SEQ ID NO: 85163 - RNA, 19 nt, Human
cagccaggcuggagucagu

SEQ ID NO: 85164 - RNA, 20 nt, Human
cagccaggcuggagucagug

SEQ ID NO: 85165 - RNA, 20 nt, Human
cagccaggcuggagugcagu

SEQ ID NO: 85166 - RNA, 32 nt, Human
cagccaggcuggcuucccguggucucagcgcc

SEQ ID NO: 85167 - RNA, 32 nt, Human
cagccaggcuguucccacagacgcccaccacc

SEQ ID NO: 85168 - RNA, 17 nt, Human
cagccaggcuucuguca

SEQ ID NO: 85169 - RNA, 32 nt, Human
cagccagggaaugccaaggacugcugggagcc

SEQ ID NO: 85170 - RNA, 32 nt, Human
cagccagggagagaguaccauggauggcauca

SEQ ID NO: 85171 - RNA, 32 nt, Human
cagccagggagaggacucagauuuccuggagg

SEQ ID NO: 85172 - RNA, 32 nt, Human
cagccagggagcugucccucugugaagggugg

SEQ ID NO: 85173 - RNA, 32 nt, Human
cagccagggaggcagcagaggcuggaacccag

SEQ ID NO: 85174 - RNA, 32 nt, Human
cagccagggaggggcagcugcagugaccaggc

SEQ ID NO: 85175 - RNA, 22 nt, Human
cagccagggcaacagagugaga

SEQ ID NO: 85176 - RNA, 32 nt, Human
cagccagggcaacauggugaaaccccaucucu

SEQ ID NO: 85177 - RNA, 32 nt, Human
cagccagggcaacauggugagaccucaucucu

SEQ ID NO: 85178 - RNA, 31 nt, Human
cagccagggcacuucccuuuccuccuccuug

SEQ ID NO: 85179 - RNA, 32 nt, Human
cagccagggcagcuccaggugaggcgggacag

SEQ ID NO: 85180 - RNA, 32 nt, Human
cagccagggccugcuugguggaccggccaagg

SEQ ID NO: 85181 - RNA, 32 nt, Human
cagccagggcucuuacuugcugcagcaucggc

SEQ ID NO: 85182 - RNA, 32 nt, Human
cagccagggcuggaccucaacccugaggaguc

SEQ ID NO: 85183 - RNA, 32 nt, Human
cagccagggcuggcugcuccagcucuugcuuc

SEQ ID NO: 85184 - RNA, 32 nt, Human
cagccaggggcuguggggagacagugugggag

SEQ ID NO: 85185 - RNA, 32 nt, Human
cagccagggggagcugggaugcagugggagag

SEQ ID NO: 85186 - RNA, 32 nt, Human
cagccagggggccagucccugaggcagguccc

SEQ ID NO: 85187 - RNA, 32 nt, Human
cagccaggggguauuuccaucuugcuggggcu

SEQ ID NO: 85188 - RNA, 32 nt, Human
cagccaggggugaaccccaggggaagcuggga

SEQ ID NO: 85189 - RNA, 22 nt, Human
cagccagggugacagagugaga

SEQ ID NO: 85190 - RNA, 32 nt, Human
cagccagguacccgcgcaaggcaccugcuggc

SEQ ID NO: 85191 - RNA, 32 nt, Human
cagccagguacccgcgcaaggcacuugcuggc

SEQ ID NO: 85192 - RNA, 23 nt, Human
cagccaggucgccugcuccgccc

SEQ ID NO: 85193 - RNA, 16 nt, Human
cagccaggucuucaca

SEQ ID NO: 85194 - RNA, 32 nt, Human
cagccaggugcaaaaugccgugucauugggag

SEQ ID NO: 85195 - RNA, 32 nt, Human
cagccaggugcuggucuugggccaguucuccc

SEQ ID NO: 85196 - RNA, 32 nt, Human
cagccaggugugguggcucaggccuguaaucc

SEQ ID NO: 85197 - RNA, 22 nt, Human
cagccaguagcucagagagaug

SEQ ID NO: 85198 - RNA, 32 nt, Human
cagccagucaccacccuccuggaccauacuca

SEQ ID NO: 85199 - RNA, 18 nt, Human
cagccagucaggggucac

SEQ ID NO: 85200 - RNA, 31 nt, Human
cagccaguccagagagaauagagccugccca

SEQ ID NO: 85201 - RNA, 32 nt, Human
cagccagucccaggagcccaguaauggagagc

SEQ ID NO: 85202 - RNA, 32 nt, Human
cagccagucccuacagcauacagggucuccuu

SEQ ID NO: 85203 - RNA, 22 nt, Human
cagccagucccugcagcuccac

SEQ ID NO: 85204 - RNA, 16 nt, Human
cagccaguccuccaca

SEQ ID NO: 85205 - RNA, 18 nt, Human
cagccagucugugaaaug

SEQ ID NO: 85206 - RNA, 19 nt, Human
cagccagugacagaggaga

SEQ ID NO: 85207 - RNA, 32 nt, Human
cagccagugcaaaggcccagagacaggaauaa

SEQ ID NO: 85208 - RNA, 32 nt, Human
cagccagugcacccaaacccugaggagcucug

SEQ ID NO: 85209 - RNA, 32 nt, Human
cagccagugcaggaguugguguaauauuaagg

SEQ ID NO: 85210 - RNA, 32 nt, Human
cagccagugccuuuggaguacugaggcgcgca

SEQ ID NO: 85211 - RNA, 19 nt, Human
cagccaguggcacaggaga

SEQ ID NO: 85212 - RNA, 23 nt, Human
cagccaguggcuucuucaugaug

SEQ ID NO: 85213 - RNA, 23 nt, Human
cagccaguggcuucuugaugaug

SEQ ID NO: 85214 - RNA, 19 nt, Human
cagccagugguccuuucca

SEQ ID NO: 85215 - RNA, 32 nt, Human
cagccaguguccaagcaaaauggagcugggga

SEQ ID NO: 85216 - RNA, 17 nt, Human
cagccaguguccuggcc

SEQ ID NO: 85217 - RNA, 32 nt, Human
cagccagugugccuaguguaaggagaaaggcc

SEQ ID NO: 85218 - RNA, 23 nt, Human
cagccaguuauuugggaaggaga

SEQ ID NO: 85219 - RNA, 32 nt, Human
cagccaguucugaauguugguggaggguguag

SEQ ID NO: 85220 - RNA, 23 nt, Human
cagccaguugcuguggaaggaga

SEQ ID NO: 85221 - RNA, 32 nt, Human
cagccauauucccaugugauuucccacuggau

SEQ ID NO: 85222 - RNA, 32 nt, Human
cagccauauugucaccucagcacuguggacac

SEQ ID NO: 85223 - RNA, 32 nt, Human
cagccaucaagaacccacacagacggcaggga

SEQ ID NO: 85224 - RNA, 32 nt, Human
cagccaucacaaacucacagaccagcacaucc

SEQ ID NO: 85225 - RNA, 32 nt, Human
cagccaucaccaccauccaucuccagaacuuu

SEQ ID NO: 85226 - RNA, 32 nt, Human
cagccaucacucacugccaccugggccaucaa

SEQ ID NO: 85227 - RNA, 32 nt, Human
cagccaucacugcuggcagccugggcaaaccg

SEQ ID NO: 85228 - RNA, 32 nt, Human
cagccaucagcaacugugucccauuaccugug

SEQ ID NO: 85229 - RNA, 32 nt, Human
cagccaucagcaccagccaaguuuuaacucag

SEQ ID NO: 85230 - RNA, 32 nt, Human
cagccaucagccaggguuggccuaggguggca

SEQ ID NO: 85231 - RNA, 32 nt, Human
cagccauccacacaaaggagguuauucauaaa

SEQ ID NO: 85232 - RNA, 32 nt, Human
cagccauccacacaucuggccccaccugcuca

SEQ ID NO: 85233 - RNA, 32 nt, Human
cagccauccagccugucucuacugggccccac

SEQ ID NO: 85234 - RNA, 32 nt, Human
cagccauccauagcccugggaauuccaccugc

SEQ ID NO: 85235 - RNA, 32 nt, Human
cagccaucccacaccagcuccuaggcacugag

SEQ ID NO: 85236 - RNA, 32 nt, Human
cagccaucccccucguccagccgccgggccaa

SEQ ID NO: 85237 - RNA, 30 nt, Human
cagccaucccucuccaugcccugugugcuc

SEQ ID NO: 85238 - RNA, 22 nt, Human
cagccaucccuuauagcuccac

SEQ ID NO: 85239 - RNA, 32 nt, Human
cagccauccuacccucucccugccuggcacau

SEQ ID NO: 85240 - RNA, 22 nt, Human
cagccauccuccuccuauggcc

SEQ ID NO: 85241 - RNA, 32 nt, Human
cagccauccugggccugcugagcucugauuca

SEQ ID NO: 85242 - RNA, 32 nt, Human
cagccaucgcgggcugcaucaucccccagcca

SEQ ID NO: 85243 - RNA, 32 nt, Human
cagccaucggccuguugacaaggcacuggcag

SEQ ID NO: 85244 - RNA, 32 nt, Human
cagccaucuacccuugauuaucuagaaagacu

SEQ ID NO: 85245 - RNA, 32 nt, Human
cagccaucugcugagccucugcucugugccgg

SEQ ID NO: 85246 - RNA, 32 nt, Human
cagccaucugcuuuaccagucucauuuccugc

SEQ ID NO: 85247 - RNA, 32 nt, Human
cagccaucugugccaaggagagaggcuaucac

SEQ ID NO: 85248 - RNA, 32 nt, Human
cagccaucuugcaaccucaccucacagcaugg

SEQ ID NO: 85249 - RNA, 32 nt, Human
cagccaugaacauguugagugagcaugcugga

SEQ ID NO: 85250 - RNA, 32 nt, Human
cagccaugaacggauggaugugaugccugcua

SEQ ID NO: 85251 - RNA, 32 nt, Human
cagccaugaccugaagaaggaggucgaccuuc

SEQ ID NO: 85252 - RNA, 32 nt, Human
cagccaugacugacggccccuugugcaagcuc

SEQ ID NO: 85253 - RNA, 32 nt, Human
cagccaugagccaccaugcccggccaaacuuc

SEQ ID NO: 85254 - RNA, 30 nt, Human
cagccaugagccugguggccugugagugcc

SEQ ID NO: 85255 - RNA, 30 nt, Human
cagccaugagggaaggacaggagauggggc

SEQ ID NO: 85256 - RNA, 18 nt, Human
cagccaugaucuuuagca

SEQ ID NO: 85257 - RNA, 32 nt, Human
cagccaugcaccaccacaccuggcuaauuuuu

SEQ ID NO: 85258 - RNA, 20 nt, Human
cagccaugccuccccuccca

SEQ ID NO: 85259 - RNA, 32 nt, Human
cagccaugcuagucuccugcugugcauagauc

SEQ ID NO: 85260 - RNA, 20 nt, Human
cagccaugcuggggccgcua

SEQ ID NO: 85261 - RNA, 30 nt, Human
cagccauggacacaccccugcccagaccuc

SEQ ID NO: 85262 - RNA, 19 nt, Human
cagccauggagucuuccac

SEQ ID NO: 85263 - RNA, 32 nt, Human
cagccauggaugcagugucuggaguuggaccc

SEQ ID NO: 85264 - RNA, 32 nt, Human
cagccauggcugagccccaucuguagacaggc

SEQ ID NO: 85265 - RNA, 32 nt, Human
cagccauggcuggagcagcugggacacagggc

SEQ ID NO: 85266 - RNA, 32 nt, Human
cagccauggguggucagaugguggggugggcc

SEQ ID NO: 85267 - RNA, 32 nt, Human
cagccaugucgugccccgaugaagagcaauuc

SEQ ID NO: 85268 - RNA, 32 nt, Human
cagccaugugaagauucgaaacuucgaguucu

SEQ ID NO: 85269 - RNA, 32 nt, Human
cagccauuaaagagggugaggaagggaaaagg

SEQ ID NO: 85270 - RNA, 32 nt, Human
cagccauuaaagaugaccuacagugcugugua

SEQ ID NO: 85271 - RNA, 32 nt, Human
cagccauucacacccauccacucaccucccau

SEQ ID NO: 85272 - RNA, 18 nt, Human
cagccauuccaauccagu

SEQ ID NO: 85273 - RNA, 16 nt, Human
cagccauuccguggcc

SEQ ID NO: 85274 - RNA, 32 nt, Human
cagccauuccugaaggaagacagugguagcca

SEQ ID NO: 85275 - RNA, 32 nt, Human
cagccauugacauuucuuucugcuuccacuau

SEQ ID NO: 85276 - RNA, 32 nt, Human
cagccauugaguagcugggaugacaggcacau

SEQ ID NO: 85277 - RNA, 32 nt, Human
cagccauugcacuccagccugggcaacagagc

SEQ ID NO: 85278 - RNA, 32 nt, Human
cagccauuuagauauaacauccuucacuuaaa

SEQ ID NO: 85279 - RNA, 32 nt, Human
cagccauuucguucucccuuccuugcugacaa

SEQ ID NO: 85280 - RNA, 32 nt, Human
cagccauuuggugugucucagcaaaucccgcu

SEQ ID NO: 85281 - RNA, 32 nt, Human
cagcccaaaccccgcugcuaccugccaagcug

SEQ ID NO: 85282 - RNA, 32 nt, Human
cagcccaaaccugggaaggccagccuuguaca

SEQ ID NO: 85283 - RNA, 32 nt, Human
cagcccaaacugcacagccccaaccagguucc

SEQ ID NO: 85284 - RNA, 32 nt, Human
cagcccaaacuguauacauuacaaucauuaaa

SEQ ID NO: 85285 - RNA, 21 nt, Human
cagcccaaagcuccucugccc

SEQ ID NO: 85286 - RNA, 21 nt, Human
cagcccaacaggaggccgggg

SEQ ID NO: 85287 - RNA, 32 nt, Human
cagcccaacccucuccccaggugaaccuugcu

SEQ ID NO: 85288 - RNA, 32 nt, Human
cagcccaaccucugggaacaggcagcuccuau

SEQ ID NO: 85289 - RNA, 16 nt, Human
cagcccaaccuuccca

SEQ ID NO: 85290 - RNA, 22 nt, Human
cagcccaagagacucuucuaca

SEQ ID NO: 85291 - RNA, 16 nt, Human
cagcccaagcccccuc

SEQ ID NO: 85292 - RNA, 16 nt, Human
cagcccaagccccucc

SEQ ID NO: 85293 - RNA, 32 nt, Human
cagcccaagcgagcgcagcagcgcggcggcag

SEQ ID NO: 85294 - RNA, 32 nt, Human
cagcccaagcuccggugauuaccagguaauuc

SEQ ID NO: 85295 - RNA, 32 nt, Human
cagcccaaggcagagcuggcagggacccugcc

SEQ ID NO: 85296 - RNA, 32 nt, Human
cagcccaaggguggagagggggccaagggcuc

SEQ ID NO: 85297 - RNA, 32 nt, Human
cagcccaagucccaccaccgagcccacuacga

SEQ ID NO: 85298 - RNA, 22 nt, Human
cagcccaagucugcagcaccag

SEQ ID NO: 85299 - RNA, 20 nt, Human
cagcccaaucucuccuucag

SEQ ID NO: 85300 - RNA, 22 nt, Human
cagcccaaucuucuggguccag

SEQ ID NO: 85301 - RNA, 20 nt, Human
cagcccaauugccaucaaga

SEQ ID NO: 85302 - RNA, 32 nt, Human
cagcccacaacaaccuagacauguggggugcu

SEQ ID NO: 85303 - RNA, 32 nt, Human
cagcccacaaggacuccagccugcuggcuggu

SEQ ID NO: 85304 - RNA, 32 nt, Human
cagcccacacccuucccagagccagggagccc

SEQ ID NO: 85305 - RNA, 32 nt, Human
cagcccacaccuggcccuguucacggcuguuc

SEQ ID NO: 85306 - RNA, 32 nt, Human
cagcccacacuggcuugauggaucacccccag

SEQ ID NO: 85307 - RNA, 32 nt, Human
cagcccacagcagucucaaccucucgggcuca

SEQ ID NO: 85308 - RNA, 32 nt, Human
cagcccacagggcuugaagugaaggaacagag

SEQ ID NO: 85309 - RNA, 21 nt, Human
cagcccaccagcccucugccc

SEQ ID NO: 85310 - RNA, 32 nt, Human
cagcccacccaccuccccugccacagacucuc

SEQ ID NO: 85311 - RNA, 32 nt, Human
cagcccacccauguucagcuucagugaucaca

SEQ ID NO: 85312 - RNA, 32 nt, Human
cagcccacccuccaugucccacguugggaugg

SEQ ID NO: 85313 - RNA, 32 nt, Human
cagcccacccucuguguucaugaaccugggcu

SEQ ID NO: 85314 - RNA, 32 nt, Human
cagcccaccuagcgucuucuggcucuaggggu

SEQ ID NO: 85315 - RNA, 17 nt, Human
cagcccaccucccuccc

SEQ ID NO: 85316 - RNA, 32 nt, Human
cagcccaccugaacuccagccaugccauuuua

SEQ ID NO: 85317 - RNA, 32 nt, Human
cagcccaccugaacuccagccaugccauuuug

SEQ ID NO: 85318 - RNA, 19 nt, Human
cagcccaccugcccucccc

SEQ ID NO: 85319 - RNA, 32 nt, Human
cagcccaccuggcuggaggugugcuggcucuc

SEQ ID NO: 85320 - RNA, 24 nt, Human
cagcccacgcacuuccggccucgg

SEQ ID NO: 85321 - RNA, 23 nt, Human
cagcccacgggcccggcccggcc

SEQ ID NO: 85322 - RNA, 24 nt, Human
cagcccacggucuggaggccgagg

SEQ ID NO: 85323 - RNA, 19 nt, Human
cagcccacguucaggcuua

SEQ ID NO: 85324 - RNA, 21 nt, Human
cagcccacuacucugaaccag

SEQ ID NO: 85325 - RNA, 32 nt, Human
cagcccacugcacucuccacucugccagaaag

SEQ ID NO: 85326 - RNA, 32 nt, Human
cagcccacugcccaccaccagcccaaagaacc

SEQ ID NO: 85327 - RNA, 32 nt, Human
cagcccacugccuccugccugggguggccugg

SEQ ID NO: 85328 - RNA, 21 nt, Human
cagcccacuggaccagaacug

SEQ ID NO: 85329 - RNA, 19 nt, Human
cagcccacuggucccgggc

SEQ ID NO: 85330 - RNA, 23 nt, Human
cagcccagaaaccuuuggccaca

SEQ ID NO: 85331 - RNA, 27 nt, Human
cagcccagaaacucuaccucauccaca

SEQ ID NO: 85332 - RNA, 32 nt, Human
cagcccagaauagcuuugaauguggccccaac

SEQ ID NO: 85333 - RNA, 22 nt, Human
cagcccagacaacagagugaga

SEQ ID NO: 85334 - RNA, 19 nt, Human
cagcccagacccuccccca

SEQ ID NO: 85335 - RNA, 32 nt, Human
cagcccagacccuucuccuuagaaguggaagu

SEQ ID NO: 85336 - RNA, 32 nt, Human
cagcccagagcuugcaaccuagccucacccaa

SEQ ID NO: 85337 - RNA, 32 nt, Human
cagcccagagucagggucuaacucagaaagaa

SEQ ID NO: 85338 - RNA, 32 nt, Human
cagcccagcaccacagccuuuccccagccagg

SEQ ID NO: 85339 - RNA, 32 nt, Human
cagcccagcacuaugccggggacuguggcaac

SEQ ID NO: 85340 - RNA, 18 nt, Human
cagcccagcagucccucc

SEQ ID NO: 85341 - RNA, 32 nt, Human
cagcccagcaguguggagacccugccacagcc

SEQ ID NO: 85342 - RNA, 32 nt, Human
cagcccagccaacauggcaaaaccccaucucu

SEQ ID NO: 85343 - RNA, 32 nt, Human
cagcccagccagugguuccagguccagcccug

SEQ ID NO: 85344 - RNA, 17 nt, Human
cagcccagcccacuccc

SEQ ID NO: 85345 - RNA, 17 nt, Human
cagcccagcccagccca

SEQ ID NO: 85346 - RNA, 32 nt, Human
cagcccagcccaggcagcgggguggugguugu

SEQ ID NO: 85347 - RNA, 17 nt, Human
cagcccagcccaucuca

SEQ ID NO: 85348 - RNA, 17 nt, Human
cagcccagccccaccca

SEQ ID NO: 85349 - RNA, 20 nt, Human
cagcccagccccgcccuccc

SEQ ID NO: 85350 - RNA, 32 nt, Human
cagcccagccccggacagcuccaggauccgug

SEQ ID NO: 85351 - RNA, 22 nt, Human
cagcccagccccgguuccuccc

SEQ ID NO: 85352 - RNA, 32 nt, Human
cagcccagccccucccccagagcccaggcucu

SEQ ID NO: 85353 - RNA, 19 nt, Human
cagcccagccccugcuccc

SEQ ID NO: 85354 - RNA, 22 nt, Human
cagcccagcccuacucccuccc

SEQ ID NO: 85355 - RNA, 19 nt, Human
cagcccagcccugccuccc

SEQ ID NO: 85356 - RNA, 32 nt, Human
cagcccagccuccagccuggccuuuccuccuu

SEQ ID NO: 85357 - RNA, 18 nt, Human
cagcccagccugcccccu

SEQ ID NO: 85358 - RNA, 32 nt, Human
cagcccagccugggcgacagagcgagacucug

SEQ ID NO: 85359 - RNA, 22 nt, Human
cagcccagccuguucucuccca

SEQ ID NO: 85360 - RNA, 20 nt, Human
cagcccagcucaugccuccc

SEQ ID NO: 85361 - RNA, 18 nt, Human
cagcccagcuccagcucc

SEQ ID NO: 85362 - RNA, 32 nt, Human
cagcccagcucccuggggguugggggcugugu

SEQ ID NO: 85363 - RNA, 19 nt, Human
cagcccagcucuccccucc

SEQ ID NO: 85364 - RNA, 32 nt, Human
cagcccagcucuccccuccacacuguuggcuc

SEQ ID NO: 85365 - RNA, 32 nt, Human
cagcccagcugcagguguggguguaagggugg

SEQ ID NO: 85366 - RNA, 32 nt, Human
cagcccagcugcaugcuaccacuuugguuuga

SEQ ID NO: 85367 - RNA, 20 nt, Human
cagcccagcugcucugccca

SEQ ID NO: 85368 - RNA, 20 nt, Human
cagcccagcuggccuggccc

SEQ ID NO: 85369 - RNA, 18 nt, Human
cagcccagcuguuccccu

SEQ ID NO: 85370 - RNA, 32 nt, Human
cagcccaggaaccaggcuuugcugggugcugc

SEQ ID NO: 85371 - RNA, 32 nt, Human
cagcccaggaauuggcagaggaaguagguguc

SEQ ID NO: 85372 - RNA, 32 nt, Human
cagcccaggacuaggggcaggacucuugccug

SEQ ID NO: 85373 - RNA, 32 nt, Human
cagcccaggacuucgaggcugcaaugagcuau

SEQ ID NO: 85374 - RNA, 32 nt, Human
cagcccaggagaacuaagagcuuccuaaauua

SEQ ID NO: 85375 - RNA, 32 nt, Human
cagcccaggagaagggucagggagggaagggg

SEQ ID NO: 85376 - RNA, 32 nt, Human
cagcccaggagguggagguugcagugagcgga

SEQ ID NO: 85377 - RNA, 32 nt, Human
cagcccaggagguuguggauacagugaguuau

SEQ ID NO: 85378 - RNA, 32 nt, Human
cagcccaggaguucaagaccagccugggcaac

SEQ ID NO: 85379 - RNA, 32 nt, Human
cagcccaggaguucgagaccagccugggcaac

SEQ ID NO: 85380 - RNA, 32 nt, Human
cagcccaggaguuuaaggcugcagugagcuau

SEQ ID NO: 85381 - RNA, 32 nt, Human
cagcccaggaguuugaggcugcaaugagccau

SEQ ID NO: 85382 - RNA, 32 nt, Human
cagcccaggaugccuuugaauguggcccaaca

SEQ ID NO: 85383 - RNA, 22 nt, Human
cagcccaggcaacagagugaga

SEQ ID NO: 85384 - RNA, 32 nt, Human
cagcccaggcaacauggugaaaccccaucucu

SEQ ID NO: 85385 - RNA, 17 nt, Human
cagcccaggcacccucc

SEQ ID NO: 85386 - RNA, 21 nt, Human
cagcccaggcaccuccuccca

SEQ ID NO: 85387 - RNA, 32 nt, Human
cagcccaggcagcgggguggugguugugggag

SEQ ID NO: 85388 - RNA, 24 nt, Human
cagcccaggccccucaaagccuga

SEQ ID NO: 85389 - RNA, 16 nt, Human
cagcccaggccuccca

SEQ ID NO: 85390 - RNA, 32 nt, Human
cagcccaggccucuggcagcagcucuuugccc

SEQ ID NO: 85391 - RNA, 17 nt, Human
cagcccagggcccuccc

SEQ ID NO: 85392 - RNA, 32 nt, Human
cagcccaggggacccguuccucuugaaccagu

SEQ ID NO: 85393 - RNA, 32 nt, Human
cagcccaggggcccugacucgucacacuuccc

SEQ ID NO: 85394 - RNA, 32 nt, Human
cagcccagggugacagagccaaauggggcugc

SEQ ID NO: 85395 - RNA, 20 nt, Human
cagcccaggguggacuuaga

SEQ ID NO: 85396 - RNA, 22 nt, Human
cagcccagguaacagagugaga

SEQ ID NO: 85397 - RNA, 22 nt, Human
cagcccaggugacagagcgaga

SEQ ID NO: 85398 - RNA, 22 nt, Human
cagcccaggugacagagggaga

SEQ ID NO: 85399 - RNA, 22 nt, Human
cagcccaggugacagagugaga

SEQ ID NO: 85400 - RNA, 32 nt, Human
cagcccagucagggguguggccgccgccaccg

SEQ ID NO: 85401 - RNA, 25 nt, Human
cagcccaguccaacccggcccagcc

SEQ ID NO: 85402 - RNA, 32 nt, Human
cagcccaguccaggaccuggcuggaugcuucc

SEQ ID NO: 85403 - RNA, 19 nt, Human
cagcccaguccugaggaug

SEQ ID NO: 85404 - RNA, 32 nt, Human
cagcccagucucuucugguuuaaucauuaugu

SEQ ID NO: 85405 - RNA, 32 nt, Human
cagcccauagguuagucauuguccuaaccaau

SEQ ID NO: 85406 - RNA, 32 nt, Human
cagcccaucuccuguauuacugccgaguggac

SEQ ID NO: 85407 - RNA, 32 nt, Human
cagcccaucugcauggcucaagaguucgugaa

SEQ ID NO: 85408 - RNA, 23 nt, Human
cagcccaugagcccuccccuggu

SEQ ID NO: 85409 - RNA, 19 nt, Human
cagcccaugcaccccuccc

SEQ ID NO: 85410 - RNA, 32 nt, Human
cagcccaugccaccuguuuucaugcuaucuca

SEQ ID NO: 85411 - RNA, 32 nt, Human
cagcccaugucaggggaacagccuggaacaga

SEQ ID NO: 85412 - RNA, 22 nt, Human
cagcccauuaaguucccuggua

SEQ ID NO: 85413 - RNA, 32 nt, Human
cagcccauuaggauguguaaagagaugggauu

SEQ ID NO: 85414 - RNA, 32 nt, Human
cagcccauucugcuguugauagcaggaaacca

SEQ ID NO: 85415 - RNA, 32 nt, Human
cagcccauuugauggagggagcagggacauag

SEQ ID NO: 85416 - RNA, 32 nt, Human
cagcccauuugggcagagaggcugugguuugg

SEQ ID NO: 85417 - RNA, 32 nt, Human
cagccccaaacuggaaagaagaugcuaauuaa

SEQ ID NO: 85418 - RNA, 32 nt, Human
cagccccaaagaaugaguuaacuccuacuaac

SEQ ID NO: 85419 - RNA, 20 nt, Human
cagccccaaaucuccugccu

SEQ ID NO: 85420 - RNA, 32 nt, Human
cagccccaaaugcccuggauuauaugauuuuu

SEQ ID NO: 85421 - RNA, 20 nt, Human
cagccccaacacccuuccca

SEQ ID NO: 85422 - RNA, 32 nt, Human
cagccccaacauuucacuccagccuggcccca

SEQ ID NO: 85423 - RNA, 24 nt, Human
cagccccaaccccaaccccagccg

SEQ ID NO: 85424 - RNA, 23 nt, Human
cagccccaacccccucccugcca

SEQ ID NO: 85425 - RNA, 32 nt, Human
cagccccaagaugccuacagcccccaggcccc

SEQ ID NO: 85426 - RNA, 21 nt, Human
cagccccaagcugggccgagg

SEQ ID NO: 85427 - RNA, 32 nt, Human
cagccccaaggcugccuuccagagcugcacuu

SEQ ID NO: 85428 - RNA, 32 nt, Human
cagccccaaguggccgcaggcagauggauaug

SEQ ID NO: 85429 - RNA, 32 nt, Human
cagccccaauccagagaagcgcuguugcccgc

SEQ ID NO: 85430 - RNA, 21 nt, Human
cagccccaaugauucuuaaca

SEQ ID NO: 85431 - RNA, 21 nt, Human
cagccccaauuucuggcccag

SEQ ID NO: 85432 - RNA, 32 nt, Human
cagccccacaugcaugcacacgcaugcacaca

SEQ ID NO: 85433 - RNA, 21 nt, Human
cagccccacccaggagcaggg

SEQ ID NO: 85434 - RNA, 32 nt, Human
cagccccacccagucugugcucucagccgcug

SEQ ID NO: 85435 - RNA, 32 nt, Human
cagccccacccccagguuuuugcccauccucc

SEQ ID NO: 85436 - RNA, 24 nt, Human
cagccccacccuugggcugagagg

SEQ ID NO: 85437 - RNA, 32 nt, Human
cagccccaccucucugcugcuuugcugauucc

SEQ ID NO: 85438 - RNA, 32 nt, Human
cagccccaccugccaaagucccagguuuacaa

SEQ ID NO: 85439 - RNA, 20 nt, Human
cagccccaccuggacagagg

SEQ ID NO: 85440 - RNA, 32 nt, Human
cagccccacuacuuccuucccugccucccagc

SEQ ID NO: 85441 - RNA, 24 nt, Human
cagccccacucccucaggguccag

SEQ ID NO: 85442 - RNA, 23 nt, Human
cagccccacucugccuccugcuc

SEQ ID NO: 85443 - RNA, 32 nt, Human
cagccccacugcaagccugggauauccagagg

SEQ ID NO: 85444 - RNA, 32 nt, Human
cagccccacugcaggccccaccauggcgccgu

SEQ ID NO: 85445 - RNA, 32 nt, Human
cagccccacugcugguccaaguguguggaggg

SEQ ID NO: 85446 - RNA, 32 nt, Human
cagccccacugucucuaaccacuccugggcua

SEQ ID NO: 85447 - RNA, 22 nt, Human
cagccccacugugucuuccgca

SEQ ID NO: 85448 - RNA, 32 nt, Human
cagccccagaagcagagggcagucaaggucaa

SEQ ID NO: 85449 - RNA, 32 nt, Human
cagccccagacgcccaccugugccucagggca

SEQ ID NO: 85450 - RNA, 32 nt, Human
cagccccagacuccaaagcauccccaagaggu

SEQ ID NO: 85451 - RNA, 32 nt, Human
cagccccagagggaguggcgagcccagcugcc

SEQ ID NO: 85452 - RNA, 32 nt, Human
cagccccagaguagcuggaauuacaggcacac

SEQ ID NO: 85453 - RNA, 32 nt, Human
cagccccagagucacggggcugagggggcggg

SEQ ID NO: 85454 - RNA, 21 nt, Human
cagccccagaguucuuccaca

SEQ ID NO: 85455 - RNA, 32 nt, Human
cagccccagauucacagguggcugaggaggga

SEQ ID NO: 85456 - RNA, 32 nt, Human
cagccccagcagagacuggagagccagaggcc

SEQ ID NO: 85457 - RNA, 32 nt, Human
cagccccagccaaagacuuuucucccaauucu

SEQ ID NO: 85458 - RNA, 24 nt, Human
cagccccagccagaucccgcguca

SEQ ID NO: 85459 - RNA, 24 nt, Human
cagccccagcccagaucuacuuca

SEQ ID NO: 85460 - RNA, 23 nt, Human
cagccccagcccagauggcacuc

SEQ ID NO: 85461 - RNA, 22 nt, Human
cagccccagcccagcccagcug

SEQ ID NO: 85462 - RNA, 32 nt, Human
cagccccagcccagcccagcugcucugcccag

SEQ ID NO: 85463 - RNA, 21 nt, Human
cagccccagcccagcccgccg

SEQ ID NO: 85464 - RNA, 21 nt, Human
cagccccagcccaggcagccc

SEQ ID NO: 85465 - RNA, 24 nt, Human
cagccccagcccaggugggccgcc

SEQ ID NO: 85466 - RNA, 21 nt, Human
cagccccagccccacccaccg

SEQ ID NO: 85467 - RNA, 23 nt, Human
cagccccagccccagccccgccg

SEQ ID NO: 85468 - RNA, 32 nt, Human
cagccccagccccagguguggaccucaugcug

SEQ ID NO: 85469 - RNA, 21 nt, Human
cagccccagcccccguccguc

SEQ ID NO: 85470 - RNA, 24 nt, Human
cagccccagccccgccgggccccg

SEQ ID NO: 85471 - RNA, 20 nt, Human
cagccccagccccgcugccc

SEQ ID NO: 85472 - RNA, 23 nt, Human
cagccccagccccggccacagcc

SEQ ID NO: 85473 - RNA, 19 nt, Human
cagccccagccccggcccc

SEQ ID NO: 85474 - RNA, 18 nt, Human
cagccccagcccggcccc

SEQ ID NO: 85475 - RNA, 22 nt, Human
cagccccagcccggccccagcc

SEQ ID NO: 85476 - RNA, 32 nt, Human
cagccccagcccugacaggcccugcgugugcc

SEQ ID NO: 85477 - RNA, 32 nt, Human
cagccccagccgcgggagcgagcgcgcccgcc

SEQ ID NO: 85478 - RNA, 32 nt, Human
cagccccagccuggcccgcugcaaugccuagg

SEQ ID NO: 85479 - RNA, 32 nt, Human
cagccccagccuggccuuccuggugcccacuc

SEQ ID NO: 85480 - RNA, 32 nt, Human
cagccccagcuacucgggaggcugagauggga

SEQ ID NO: 85481 - RNA, 32 nt, Human
cagccccagcuccagcccugaggacagcucug

SEQ ID NO: 85482 - RNA, 32 nt, Human
cagccccagcugggugacagagugagacacug

SEQ ID NO: 85483 - RNA, 20 nt, Human
cagccccagcuucucugccc

SEQ ID NO: 85484 - RNA, 23 nt, Human
cagccccaggacucugagugcag

SEQ ID NO: 85485 - RNA, 32 nt, Human
cagccccaggagaaggggcuuugugaccagaa

SEQ ID NO: 85486 - RNA, 32 nt, Human
cagccccaggagaguccugagaugauuuugcc

SEQ ID NO: 85487 - RNA, 32 nt, Human
cagccccaggcacccagcuggccggcagcuga

SEQ ID NO: 85488 - RNA, 21 nt, Human
cagccccaggcagcccuguca

SEQ ID NO: 85489 - RNA, 32 nt, Human
cagccccagggagggcagggagagcaaggggc

SEQ ID NO: 85490 - RNA, 32 nt, Human
cagccccagggaguggaccagcaaagaccgca

SEQ ID NO: 85491 - RNA, 32 nt, Human
cagccccagggcccugaccugcgcaccuagcu

SEQ ID NO: 85492 - RNA, 32 nt, Human
cagccccaggggcagaagagacccaaccacuu

SEQ ID NO: 85493 - RNA, 32 nt, Human
cagccccaguacacucuucucuggaccagauc

SEQ ID NO: 85494 - RNA, 32 nt, Human
cagccccaguaggaggagagcaggcagagcuu

SEQ ID NO: 85495 - RNA, 20 nt, Human
cagccccagucagaaccucu

SEQ ID NO: 85496 - RNA, 19 nt, Human
cagccccagugcuggggcg

SEQ ID NO: 85497 - RNA, 32 nt, Human
cagccccagugcuuggcgaugcauuuacagau

SEQ ID NO: 85498 - RNA, 32 nt, Human
cagccccaguucuuuuaucccugggcccaacc

SEQ ID NO: 85499 - RNA, 32 nt, Human
cagccccauaaaggagaaucuacgcugguccu

SEQ ID NO: 85500 - RNA, 32 nt, Human
cagccccauagcagcuaugaucccgcugcugc

SEQ ID NO: 85501 - RNA, 32 nt, Human
cagccccaucaccagcuucuugcucagggaga

SEQ ID NO: 85502 - RNA, 20 nt, Human
cagccccauccccucuccca

SEQ ID NO: 85503 - RNA, 23 nt, Human
cagccccaucuccuccuccuccc

SEQ ID NO: 85504 - RNA, 32 nt, Human
cagccccaugcagucaccucagcucugccuga

SEQ ID NO: 85505 - RNA, 32 nt, Human
cagccccauugccuuuucccuucaggcucugu

SEQ ID NO: 85506 - RNA, 21 nt, Human
cagcccccaaggaaccggccg

SEQ ID NO: 85507 - RNA, 32 nt, Human
cagcccccaaguguccagccuggcacuuccca

SEQ ID NO: 85508 - RNA, 32 nt, Human
cagcccccacaccacaguucccugccaccucc

SEQ ID NO: 85509 - RNA, 32 nt, Human
cagcccccaccaggggaaggaaggagggcaca

SEQ ID NO: 85510 - RNA, 32 nt, Human
cagcccccacuccuguuccuugugcacccacu

SEQ ID NO: 85511 - RNA, 20 nt, Human
cagcccccagaccugccccu

SEQ ID NO: 85512 - RNA, 32 nt, Human
cagcccccagagguuggggugggguggcugaa

SEQ ID NO: 85513 - RNA, 32 nt, Human
cagcccccagccccacaaacuuccugcagccu

SEQ ID NO: 85514 - RNA, 32 nt, Human
cagcccccagcccggccagcagucccuucuga

SEQ ID NO: 85515 - RNA, 32 nt, Human
cagcccccagccgcccagacacauggccccag

SEQ ID NO: 85516 - RNA, 20 nt, Human
cagcccccaggauccuccca

SEQ ID NO: 85517 - RNA, 32 nt, Human
cagcccccaggcagugccuuaccuguggugcc

SEQ ID NO: 85518 - RNA, 21 nt, Human
cagcccccaggcccucuccca

SEQ ID NO: 85519 - RNA, 32 nt, Human
cagcccccaggcccucucccaccuacagagac

SEQ ID NO: 85520 - RNA, 22 nt, Human
cagcccccagguccuccugacc

SEQ ID NO: 85521 - RNA, 21 nt, Human
cagcccccaguuccuccccca

SEQ ID NO: 85522 - RNA, 32 nt, Human
cagcccccaguucugcucaaggacagagaaaa

SEQ ID NO: 85523 - RNA, 25 nt, Human
cagccccccaacacuucuccugccc

SEQ ID NO: 85524 - RNA, 20 nt, Human
cagccccccaacccccgacc

SEQ ID NO: 85525 - RNA, 24 nt, Human
cagccccccagccccacagccuga

SEQ ID NO: 85526 - RNA, 22 nt, Human
cagccccccagcucgcccgacc

SEQ ID NO: 85527 - RNA, 23 nt, Human
cagccccccagcuucgcccaccg

SEQ ID NO: 85528 - RNA, 22 nt, Human
cagccccccucccccagacuaa

SEQ ID NO: 85529 - RNA, 23 nt, Human
cagccccccucucuggcccaccc

SEQ ID NO: 85530 - RNA, 17 nt, Human
cagccccccugcugcug

SEQ ID NO: 85531 - RNA, 21 nt, Human
cagccccccuuaccuucacuc

SEQ ID NO: 85532 - RNA, 26 nt, Human
cagccccccuucagcccagcccagcc

SEQ ID NO: 85533 - RNA, 32 nt, Human
cagcccccgagagggguuuggaaccuuagcac

SEQ ID NO: 85534 - RNA, 19 nt, Human
cagcccccgcccgagcuca

SEQ ID NO: 85535 - RNA, 20 nt, Human
cagcccccgccggccccgcc

SEQ ID NO: 85536 - RNA, 24 nt, Human
cagcccccgcuagaggcccggucg

SEQ ID NO: 85537 - RNA, 25 nt, Human
cagcccccgcuccugccccacccca

SEQ ID NO: 85538 - RNA, 20 nt, Human
cagcccccgcucgcggcugg

SEQ ID NO: 85539 - RNA, 18 nt, Human
cagcccccgcugaguuca

SEQ ID NO: 85540 - RNA, 32 nt, Human
cagcccccgcugugucggauacacacucgaau

SEQ ID NO: 85541 - RNA, 32 nt, Human
cagcccccuaaccugccucuggccccaguucg

SEQ ID NO: 85542 - RNA, 32 nt, Human
cagcccccucaauccauuggcugaggccgcug

SEQ ID NO: 85543 - RNA, 32 nt, Human
cagcccccucccccaucucagucccucugccc

SEQ ID NO: 85544 - RNA, 32 nt, Human
cagcccccuccccucugcucaacaccuccgcg

SEQ ID NO: 85545 - RNA, 32 nt, Human
cagcccccuccccuuaggcuccgucccugacc

SEQ ID NO: 85546 - RNA, 18 nt, Human
cagcccccucuccuccca

SEQ ID NO: 85547 - RNA, 23 nt, Human
cagcccccugaaccaaccagccg

SEQ ID NO: 85548 - RNA, 26 nt, Human
cagcccccugaagacucuggucccag

SEQ ID NO: 85549 - RNA, 32 nt, Human
cagcccccugacucccugugggccccuccagg

SEQ ID NO: 85550 - RNA, 21 nt, Human
cagcccccugccuagcuccac

SEQ ID NO: 85551 - RNA, 32 nt, Human
cagcccccugucuccccucagcagucugagug

SEQ ID NO: 85552 - RNA, 32 nt, Human
cagcccccuucccacacucuucauguguuaac

SEQ ID NO: 85553 - RNA, 32 nt, Human
cagcccccuucccucccucccagguaccacca

SEQ ID NO: 85554 - RNA, 32 nt, Human
cagcccccuucccucccucccagguaccauga

SEQ ID NO: 85555 - RNA, 20 nt, Human
cagccccgaagguccugccu

SEQ ID NO: 85556 - RNA, 32 nt, Human
cagccccgagcuagcuggggacaagggcugcc

SEQ ID NO: 85557 - RNA, 23 nt, Human
cagccccgagcuguggcuggcca

SEQ ID NO: 85558 - RNA, 32 nt, Human
cagccccgaggaggaggaggaggaggaggaag

SEQ ID NO: 85559 - RNA, 21 nt, Human
cagccccgaugauucuuaaca

SEQ ID NO: 85560 - RNA, 32 nt, Human
cagccccgaugcugcugacgcuggccgggggc

SEQ ID NO: 85561 - RNA, 24 nt, Human
cagccccgcagcccggcccgggcg

SEQ ID NO: 85562 - RNA, 25 nt, Human
cagccccgcagcuggugcucugccc

SEQ ID NO: 85563 - RNA, 20 nt, Human
cagccccgcauccucccgca

SEQ ID NO: 85564 - RNA, 32 nt, Human
cagccccgccccugccgaucuacuggaccgca

SEQ ID NO: 85565 - RNA, 22 nt, Human
cagccccgcgccuacccggccg

SEQ ID NO: 85566 - RNA, 22 nt, Human
cagccccgcgcgcgcccggccg

SEQ ID NO: 85567 - RNA, 32 nt, Human
cagccccgcgcggaccagacacaaagccgauc

SEQ ID NO: 85568 - RNA, 24 nt, Human
cagccccgcguacuguggauccag

SEQ ID NO: 85569 - RNA, 32 nt, Human
cagccccggagaggguccugaccugggggcuu

SEQ ID NO: 85570 - RNA, 22 nt, Human
cagccccggagccauuccuccc

SEQ ID NO: 85571 - RNA, 25 nt, Human
cagccccggagccgccuccugcacc

SEQ ID NO: 85572 - RNA, 32 nt, Human
cagccccggaggugaaugccaugccaugauuc

SEQ ID NO: 85573 - RNA, 22 nt, Human
cagccccggaguucagccuccc

SEQ ID NO: 85574 - RNA, 24 nt, Human
cagccccggcaacucuggcuccag

SEQ ID NO: 85575 - RNA, 32 nt, Human
cagccccggccccagccauggaagagcucacg

SEQ ID NO: 85576 - RNA, 21 nt, Human
cagccccggccucugugccca

SEQ ID NO: 85577 - RNA, 32 nt, Human
cagccccggcgccggcggcgggaccgcggacc

SEQ ID NO: 85578 - RNA, 32 nt, Human
cagccccggcugcacucuagccgccugggugu

SEQ ID NO: 85579 - RNA, 32 nt, Human
cagccccgggccucugcgggccuaggcuucug

SEQ ID NO: 85580 - RNA, 23 nt, Human
cagccccggguccccgcgcccac

SEQ ID NO: 85581 - RNA, 27 nt, Human
cagccccggugagcccccauccugccc

SEQ ID NO: 85582 - RNA, 23 nt, Human
cagccccguaccacagccugccc

SEQ ID NO: 85583 - RNA, 32 nt, Human
cagccccguagcacaggcggagugcagcggag

SEQ ID NO: 85584 - RNA, 32 nt, Human
cagccccgugucccccuccaaacauccagucc

SEQ ID NO: 85585 - RNA, 32 nt, Human
cagccccuacagccacaaccuccuuuacaguu

SEQ ID NO: 85586 - RNA, 32 nt, Human
cagccccuacccugcugugcucccuauuucaa

SEQ ID NO: 85587 - RNA, 18 nt, Human
cagccccuaccuaccccu

SEQ ID NO: 85588 - RNA, 22 nt, Human
cagccccucacaguggccucaa

SEQ ID NO: 85589 - RNA, 23 nt, Human
cagccccucagcccucccagccc

SEQ ID NO: 85590 - RNA, 32 nt, Human
cagccccuccaaaggucugaugucuccacuuu

SEQ ID NO: 85591 - RNA, 32 nt, Human
cagccccuccacacaucucccuaagucagagu

SEQ ID NO: 85592 - RNA, 32 nt, Human
cagccccuccaccccagccugccugcugccuc

SEQ ID NO: 85593 - RNA, 32 nt, Human
cagccccuccaccccucccuucauccuguuau

SEQ ID NO: 85594 - RNA, 32 nt, Human
cagccccuccaccccuucuucaugcacagcug

SEQ ID NO: 85595 - RNA, 32 nt, Human
cagccccuccaccgcaccguccugggccggug

SEQ ID NO: 85596 - RNA, 32 nt, Human
cagccccucccaucacaggcucagggaccugg

SEQ ID NO: 85597 - RNA, 16 nt, Human
cagccccuccccuccc

SEQ ID NO: 85598 - RNA, 32 nt, Human
cagccccuccccuccccauaccaaagugcuga

SEQ ID NO: 85599 - RNA, 17 nt, Human
cagccccuccuccacuc

SEQ ID NO: 85600 - RNA, 32 nt, Human
cagccccuccucuuguuucuucauucauucaa

SEQ ID NO: 85601 - RNA, 26 nt, Human
cagccccuccugccccagcccacccg

SEQ ID NO: 85602 - RNA, 32 nt, Human
cagccccuccuucauccccugccuccuucacc

SEQ ID NO: 85603 - RNA, 32 nt, Human
cagccccucgcucucccggugaccugcuggag

SEQ ID NO: 85604 - RNA, 20 nt, Human
cagccccucggaccuucaca

SEQ ID NO: 85605 - RNA, 21 nt, Human
cagccccucggccgcccacuu

SEQ ID NO: 85606 - RNA, 32 nt, Human
cagccccucuacuccugacuucugggcaacag

SEQ ID NO: 85607 - RNA, 32 nt, Human
cagccccucugcucuguacccuuuuuccuuuu

SEQ ID NO: 85608 - RNA, 24 nt, Human
cagccccucuggucgcuccugccc

SEQ ID NO: 85609 - RNA, 32 nt, Human
cagccccucuguaggaaugagaccaagccaca

SEQ ID NO: 85610 - RNA, 21 nt, Human
cagccccugaaacaucuuggg

SEQ ID NO: 85611 - RNA, 22 nt, Human
cagccccugaagguccugggga

SEQ ID NO: 85612 - RNA, 32 nt, Human
cagccccugaucucccugguggugaccccuca

SEQ ID NO: 85613 - RNA, 32 nt, Human
cagccccugaugcccaggcugggugcaggcuc

SEQ ID NO: 85614 - RNA, 32 nt, Human
cagccccugcaacccaggcugcugcuuaauuu

SEQ ID NO: 85615 - RNA, 32 nt, Human
cagccccugcagcacugggcagacaugcuggc

SEQ ID NO: 85616 - RNA, 32 nt, Human
cagccccugccaccccagagggcggccacgac

SEQ ID NO: 85617 - RNA, 32 nt, Human
cagccccugcccgcuggacuccaggcccggcc

SEQ ID NO: 85618 - RNA, 32 nt, Human
cagccccugccucuggggcucugugguguagg

SEQ ID NO: 85619 - RNA, 32 nt, Human
cagccccugccugugugucugguguugagggg

SEQ ID NO: 85620 - RNA, 24 nt, Human
cagccccugcgcccggcccgaacg

SEQ ID NO: 85621 - RNA, 23 nt, Human
cagccccugcucagccccuccca

SEQ ID NO: 85622 - RNA, 20 nt, Human
cagccccugcuccuccuccc

SEQ ID NO: 85623 - RNA, 21 nt, Human
cagccccugcuccuccuccca

SEQ ID NO: 85624 - RNA, 31 nt, Human
cagccccugcugccccagccugugucuguuc

SEQ ID NO: 85625 - RNA, 23 nt, Human
cagccccugcuuggccccuccca

SEQ ID NO: 85626 - RNA, 18 nt, Human
cagccccuggccacaccu

SEQ ID NO: 85627 - RNA, 32 nt, Human
cagccccuggccuugcccucuuccuuuaggca

SEQ ID NO: 85628 - RNA, 19 nt, Human
cagccccugggagcaccca

SEQ ID NO: 85629 - RNA, 32 nt, Human
cagccccugggcaggcaucggagcuuccagcc

SEQ ID NO: 85630 - RNA, 32 nt, Human
cagccccuggggagggaggagaggacccagga

SEQ ID NO: 85631 - RNA, 32 nt, Human
cagccccuguacuggauuacagcauauucuca

SEQ ID NO: 85632 - RNA, 23 nt, Human
cagccccuguccccagcccgucc

SEQ ID NO: 85633 - RNA, 32 nt, Human
cagccccugugcguguccuccuucccgcagcc

SEQ ID NO: 85634 - RNA, 32 nt, Human
cagccccuguucugcugagugcggcugaaagc

SEQ ID NO: 85635 - RNA, 32 nt, Human
cagccccuuagcccaggaaccugccuuaaguu

SEQ ID NO: 85636 - RNA, 32 nt, Human
cagccccuuagguuugggaagggacgagccug

SEQ ID NO: 85637 - RNA, 17 nt, Human
cagccccuuccaccccu

SEQ ID NO: 85638 - RNA, 32 nt, Human
cagccccuuccaggcggggaaccugcuuccug

SEQ ID NO: 85639 - RNA, 32 nt, Human
cagccccuuccccucauguuacaccucuugcu

SEQ ID NO: 85640 - RNA, 21 nt, Human
cagccccuuccuccuccuccc

SEQ ID NO: 85641 - RNA, 24 nt, Human
cagccccuuccugcuccucugccc

SEQ ID NO: 85642 - RNA, 23 nt, Human
cagccccuucucccaggguccag

SEQ ID NO: 85643 - RNA, 32 nt, Human
cagccccuugacuccagccucgaccgccagcc

SEQ ID NO: 85644 - RNA, 32 nt, Human
cagccccuuggcccucuccugucugcccuagg

SEQ ID NO: 85645 - RNA, 22 nt, Human
cagccccuuucacacucugucc

SEQ ID NO: 85646 - RNA, 24 nt, Human
cagcccgacucccuccuccuuccc

SEQ ID NO: 85647 - RNA, 32 nt, Human
cagcccgagccgcgguagccgcagcgggaugg

SEQ ID NO: 85648 - RNA, 22 nt, Human
cagcccgagccggucccagccg

SEQ ID NO: 85649 - RNA, 32 nt, Human
cagcccgaggaaccacggguucuggagcuagg

SEQ ID NO: 85650 - RNA, 19 nt, Human
cagcccgaggaggcacuca

SEQ ID NO: 85651 - RNA, 32 nt, Human
cagcccgaguggaggcccaguaugucuagucc

SEQ ID NO: 85652 - RNA, 32 nt, Human
cagcccgaguugcugggaugacaggcacacgc

SEQ ID NO: 85653 - RNA, 32 nt, Human
cagcccgauacuugagccuccucuuuaaaagg

SEQ ID NO: 85654 - RNA, 19 nt, Human
cagcccgauccuccccugg

SEQ ID NO: 85655 - RNA, 32 nt, Human
cagcccgcaagaugcuugccccgcuaguggca

SEQ ID NO: 85656 - RNA, 19 nt, Human
cagcccgcagcccccuccc

SEQ ID NO: 85657 - RNA, 32 nt, Human
cagcccgcagccgccagccucccccggccgug

SEQ ID NO: 85658 - RNA, 32 nt, Human
cagcccgccaaaagcugggauccaaaccagcu

SEQ ID NO: 85659 - RNA, 23 nt, Human
cagcccgcccuucccuacuggug

SEQ ID NO: 85660 - RNA, 20 nt, Human
cagcccgcgaccuccuccca

SEQ ID NO: 85661 - RNA, 32 nt, Human
cagcccgcgccagacagcccacggauccguuc

SEQ ID NO: 85662 - RNA, 32 nt, Human
cagcccgcgggccugucgggcccagccgaggu

SEQ ID NO: 85663 - RNA, 22 nt, Human
cagcccgcuccagcccggcccg

SEQ ID NO: 85664 - RNA, 32 nt, Human
cagcccgcugaggaggcggggaccgagcuaca

SEQ ID NO: 85665 - RNA, 32 nt, Human
cagcccgcugccgcucggcccucggcaccgcu

SEQ ID NO: 85666 - RNA, 32 nt, Human
cagcccggaaccugggaugagaaacgacaggu

SEQ ID NO: 85667 - RNA, 32 nt, Human
cagcccggacaacauggcgaaaccucaucucu

SEQ ID NO: 85668 - RNA, 32 nt, Human
cagcccggacccgggggcuggcccagggcccu

SEQ ID NO: 85669 - RNA, 32 nt, Human
cagcccggaccgcagcacuccaguuccgcccc

SEQ ID NO: 85670 - RNA, 32 nt, Human
cagcccggagagaacagagggaaggagccgcg

SEQ ID NO: 85671 - RNA, 32 nt, Human
cagcccggagcugggugcuggggaaggcgggg

SEQ ID NO: 85672 - RNA, 32 nt, Human
cagcccggaggaggaggaggaggaggaggagg

SEQ ID NO: 85673 - RNA, 32 nt, Human
cagcccggaguccccguucacacugaggaacg

SEQ ID NO: 85674 - RNA, 32 nt, Human
cagcccggaugggccggcagggccgggaguaa

SEQ ID NO: 85675 - RNA, 32 nt, Human
cagcccggcacacccacgcgcaccgccgugua

SEQ ID NO: 85676 - RNA, 32 nt, Human
cagcccggcagugucuucucagugucuucacc

SEQ ID NO: 85677 - RNA, 32 nt, Human
cagcccggccaacauggugaaaccccaucucu

SEQ ID NO: 85678 - RNA, 26 nt, Human
cagcccggcccagcccggcccggccg

SEQ ID NO: 85679 - RNA, 32 nt, Human
cagcccggcccaggcagcaaugggguuccugc

SEQ ID NO: 85680 - RNA, 32 nt, Human
cagcccggccuacauggugaaaccccgucucu

SEQ ID NO: 85681 - RNA, 32 nt, Human
cagcccgggaggcaggcuccaggccucagcag

SEQ ID NO: 85682 - RNA, 32 nt, Human
cagcccgggaggucaggagcgcggcgggcgag

SEQ ID NO: 85683 - RNA, 32 nt, Human
cagcccgggagguggagguugcagugagccaa

SEQ ID NO: 85684 - RNA, 32 nt, Human
cagcccgggagguggaugaaugugggagaaaa

SEQ ID NO: 85685 - RNA, 23 nt, Human
cagcccgggcaacaagagcgaga

SEQ ID NO: 85686 - RNA, 32 nt, Human
cagcccgggcaacauggugaaaccccgucucu

SEQ ID NO: 85687 - RNA, 19 nt, Human
cagcccgggccggggccac

SEQ ID NO: 85688 - RNA, 21 nt, Human
cagcccgggcgacagagcaag

SEQ ID NO: 85689 - RNA, 21 nt, Human
cagcccgggcgacagagcgag

SEQ ID NO: 85690 - RNA, 22 nt, Human
cagcccgggcgacagagugaga

SEQ ID NO: 85691 - RNA, 32 nt, Human
cagcccggggacagagcaagacacugucucaa

SEQ ID NO: 85692 - RNA, 32 nt, Human
cagcccggggagaaccucuagcacaggcgggc

SEQ ID NO: 85693 - RNA, 32 nt, Human
cagcccggggaggaacugggugacuggaggcc

SEQ ID NO: 85694 - RNA, 18 nt, Human
cagcccgggggugggagg

SEQ ID NO: 85695 - RNA, 23 nt, Human
cagcccggggucuggagccggug

SEQ ID NO: 85696 - RNA, 32 nt, Human
cagcccgggucaucuguaccucugccuccuuu

SEQ ID NO: 85697 - RNA, 22 nt, Human
cagcccgggugacagagcaaga

SEQ ID NO: 85698 - RNA, 22 nt, Human
cagcccgggugacagagcgaga

SEQ ID NO: 85699 - RNA, 20 nt, Human
cagcccgggugacagaguga

SEQ ID NO: 85700 - RNA, 19 nt, Human
cagcccggugccuggggcg

SEQ ID NO: 85701 - RNA, 32 nt, Human
cagcccggugcgccccuccaccuccugcucgg

SEQ ID NO: 85702 - RNA, 21 nt, Human
cagcccguccuccuccaaccc

SEQ ID NO: 85703 - RNA, 32 nt, Human
cagcccguccuccucuaccucucuccucuccg

SEQ ID NO: 85704 - RNA, 32 nt, Human
cagcccgucuuauggacucugccuugcuuugc

SEQ ID NO: 85705 - RNA, 32 nt, Human
cagcccgugcagcugcucuacuccaggaaugg

SEQ ID NO: 85706 - RNA, 21 nt, Human
cagcccgugcgccucuccaca

SEQ ID NO: 85707 - RNA, 32 nt, Human
cagcccguggaggaggaaggaggaucacugug

SEQ ID NO: 85708 - RNA, 18 nt, Human
cagcccguggcccuccca

SEQ ID NO: 85709 - RNA, 32 nt, Human
cagcccgugggcugcccccugccuccccaccc

SEQ ID NO: 85710 - RNA, 32 nt, Human
cagcccguuuuggggugcuuucuugagccccc

SEQ ID NO: 85711 - RNA, 32 nt, Human
cagcccuaaagcccccagcccuagagagggga

SEQ ID NO: 85712 - RNA, 32 nt, Human
cagcccuaccaucagcugaaugcagcuaagug

SEQ ID NO: 85713 - RNA, 32 nt, Human
cagcccuacccugaauuccucagugcgccgac

SEQ ID NO: 85714 - RNA, 22 nt, Human
cagcccuaccugcgcucugccc

SEQ ID NO: 85715 - RNA, 21 nt, Human
cagcccuacuucuugcacuga

SEQ ID NO: 85716 - RNA, 32 nt, Human
cagcccuagggcacugugccacccucauuccu

SEQ ID NO: 85717 - RNA, 32 nt, Human
cagcccuaucccaggcucuccccaaccccagg

SEQ ID NO: 85718 - RNA, 32 nt, Human
cagcccuauuuuacgucauucuaaauucagcc

SEQ ID NO: 85719 - RNA, 26 nt, Human
cagcccucacaggggaggccgagggg

SEQ ID NO: 85720 - RNA, 20 nt, Human
cagcccucaccuuccugccc

SEQ ID NO: 85721 - RNA, 32 nt, Human
cagcccucacuccuccgcuccuggugacgcca

SEQ ID NO: 85722 - RNA, 32 nt, Human
cagcccucagaacuuuaguaacagcacaacaa

SEQ ID NO: 85723 - RNA, 32 nt, Human
cagcccucagagagacagcagaaagggaggga

SEQ ID NO: 85724 - RNA, 32 nt, Human
cagcccucaguguggcuuugugauugcugccc

SEQ ID NO: 85725 - RNA, 32 nt, Human
cagcccucauuucuuauaauacccugauccca

SEQ ID NO: 85726 - RNA, 32 nt, Human
cagcccuccaaggagccaguggucucagaccu

SEQ ID NO: 85727 - RNA, 32 nt, Human
cagcccuccacuccagauggauauccagugau

SEQ ID NO: 85728 - RNA, 32 nt, Human
cagcccuccacuucugguauaauuguguagcc

SEQ ID NO: 85729 - RNA, 32 nt, Human
cagcccuccaucuaaacugcccccucugcccu

SEQ ID NO: 85730 - RNA, 32 nt, Human
cagcccuccaugguccugucuguccuucugaa

SEQ ID NO: 85731 - RNA, 32 nt, Human
cagcccucccaaccucccuuccagggggcuua

SEQ ID NO: 85732 - RNA, 19 nt, Human
cagcccucccagagugcua

SEQ ID NO: 85733 - RNA, 18 nt, Human
cagcccuccccagcugcc

SEQ ID NO: 85734 - RNA, 32 nt, Human
cagcccuccccagcugcccaggaagagcccca

SEQ ID NO: 85735 - RNA, 17 nt, Human
cagcccucccccaccca

SEQ ID NO: 85736 - RNA, 17 nt, Human
cagcccuccccuuccca

SEQ ID NO: 85737 - RNA, 32 nt, Human
cagcccucccucccaguauuucaucaaggaca

SEQ ID NO: 85738 - RNA, 32 nt, Human
cagcccucccuguccuccucggaucaccgaga

SEQ ID NO: 85739 - RNA, 32 nt, Human
cagcccuccucuuccuccuccuccuccuccug

SEQ ID NO: 85740 - RNA, 22 nt, Human
cagcccuccuugacccugaaag

SEQ ID NO: 85741 - RNA, 32 nt, Human
cagcccucgcgcccucuccuucuugugccuug

SEQ ID NO: 85742 - RNA, 32 nt, Human
cagcccucggaugcauaagcaaggucagcucc

SEQ ID NO: 85743 - RNA, 32 nt, Human
cagcccucuaacucaugugauuucccaugcau

SEQ ID NO: 85744 - RNA, 19 nt, Human
cagcccucucacccuggua

SEQ ID NO: 85745 - RNA, 32 nt, Human
cagcccucuccacgccaucugccugcaccagu

SEQ ID NO: 85746 - RNA, 32 nt, Human
cagcccucuccuccuguuccuccuguagcauc

SEQ ID NO: 85747 - RNA, 32 nt, Human
cagcccucucgcuucuaacacagggcaccugc

SEQ ID NO: 85748 - RNA, 20 nt, Human
cagcccucugccccugccca

SEQ ID NO: 85749 - RNA, 22 nt, Human
cagcccucugcuccucccggcc

SEQ ID NO: 85750 - RNA, 32 nt, Human
cagcccucugguucacauucagcuccagugca

SEQ ID NO: 85751 - RNA, 32 nt, Human
cagcccucuugccaggcaugcauaugugagau

SEQ ID NO: 85752 - RNA, 32 nt, Human
cagcccucuuucuucagcccucccuuuacucc

SEQ ID NO: 85753 - RNA, 32 nt, Human
cagcccugaacccacaaccagcagaggcagug

SEQ ID NO: 85754 - RNA, 32 nt, Human
cagcccugacaccugcccuuugucccccaggc

SEQ ID NO: 85755 - RNA, 32 nt, Human
cagcccugacaguguugggggaugugaaugag

SEQ ID NO: 85756 - RNA, 32 nt, Human
cagcccugacucugggccuccucaaacucagu

SEQ ID NO: 85757 - RNA, 32 nt, Human
cagcccugacuucauccucccuucucugucca

SEQ ID NO: 85758 - RNA, 17 nt, Human
cagcccugacuuucaua

SEQ ID NO: 85759 - RNA, 20 nt, Human
cagcccugagcccaugagau

SEQ ID NO: 85760 - RNA, 32 nt, Human
cagcccugaggaagaugguugcagaggaagga

SEQ ID NO: 85761 - RNA, 21 nt, Human
cagcccugaggcaggaaacua

SEQ ID NO: 85762 - RNA, 32 nt, Human
cagcccugagggcugaguucugcacccaguca

SEQ ID NO: 85763 - RNA, 32 nt, Human
cagcccugauggaaagcucccgccugaaagag

SEQ ID NO: 85764 - RNA, 18 nt, Human
cagcccugauguuuucuc

SEQ ID NO: 85765 - RNA, 24 nt, Human
cagcccugcaacuugacccaggua

SEQ ID NO: 85766 - RNA, 32 nt, Human
cagcccugcaccugccugccacuuccccaccg

SEQ ID NO: 85767 - RNA, 32 nt, Human
cagcccugcacuccacgcuggccaagaaggcc

SEQ ID NO: 85768 - RNA, 32 nt, Human
cagcccugcaggugccugggcacugauggaau

SEQ ID NO: 85769 - RNA, 32 nt, Human
cagcccugcauccuccgugcccuagaccugcu

SEQ ID NO: 85770 - RNA, 32 nt, Human
cagcccugccaacuuccaucgugggcucagcu

SEQ ID NO: 85771 - RNA, 32 nt, Human
cagcccugccacccucugcugucaucagcuga

SEQ ID NO: 85772 - RNA, 32 nt, Human
cagcccugccagcccagcccaggcuggcccag

SEQ ID NO: 85773 - RNA, 21 nt, Human
cagcccugcccagcccugccc

SEQ ID NO: 85774 - RNA, 32 nt, Human
cagcccugcccagccggcuuugcucacccacu

SEQ ID NO: 85775 - RNA, 22 nt, Human
cagcccugccccacccuccaca

SEQ ID NO: 85776 - RNA, 32 nt, Human
cagcccugccccacccuccacaggcaggugac

SEQ ID NO: 85777 - RNA, 20 nt, Human
cagcccugccucaugggaug

SEQ ID NO: 85778 - RNA, 16 nt, Human
cagcccugccuccaca

SEQ ID NO: 85779 - RNA, 32 nt, Human
cagcccugccuccagcccucaccucucucacc

SEQ ID NO: 85780 - RNA, 32 nt, Human
cagcccugccuccagggcuccugggcugccag

SEQ ID NO: 85781 - RNA, 32 nt, Human
cagcccugccuucugcccucugcccugcaugg

SEQ ID NO: 85782 - RNA, 32 nt, Human
cagcccugcucaccuuucuuaccucucuggcc

SEQ ID NO: 85783 - RNA, 32 nt, Human
cagcccugcuccagacaccuugggcauggagg

SEQ ID NO: 85784 - RNA, 19 nt, Human
cagcccugcuccucccgcc

SEQ ID NO: 85785 - RNA, 20 nt, Human
cagcccugcuccuccugccu

SEQ ID NO: 85786 - RNA, 32 nt, Human
cagcccugcuccugauggccauggaaggaaca

SEQ ID NO: 85787 - RNA, 17 nt, Human
cagcccugcuucccgca

SEQ ID NO: 85788 - RNA, 32 nt, Human
cagcccuggaaagaaaagcaaaaagaaaaggc

SEQ ID NO: 85789 - RNA, 32 nt, Human
cagcccuggaagguggaaaaagaaaaguugac

SEQ ID NO: 85790 - RNA, 18 nt, Human
cagcccuggacuuccaga

SEQ ID NO: 85791 - RNA, 32 nt, Human
cagcccuggagaggaggaagggacugacuacg

SEQ ID NO: 85792 - RNA, 32 nt, Human
cagcccuggagaggagggcagggcugcgggga

SEQ ID NO: 85793 - RNA, 32 nt, Human
cagcccuggauaugccuccacuguggagggaa

SEQ ID NO: 85794 - RNA, 18 nt, Human
cagcccuggauucuccca

SEQ ID NO: 85795 - RNA, 18 nt, Human
cagcccuggcccuuccca

SEQ ID NO: 85796 - RNA, 32 nt, Human
cagcccuggccuggccgccagccgccaggagg

SEQ ID NO: 85797 - RNA, 32 nt, Human
cagcccuggccuuggugaccuggcucugcugc

SEQ ID NO: 85798 - RNA, 22 nt, Human
cagcccuggcgacagagugaga

SEQ ID NO: 85799 - RNA, 19 nt, Human
cagcccuggcguccuccac

SEQ ID NO: 85800 - RNA, 32 nt, Human
cagcccuggcucuuccaugcucugccccuuuc

SEQ ID NO: 85801 - RNA, 29 nt, Human
cagcccuggcugcugcucgccccacccuc

SEQ ID NO: 85802 - RNA, 32 nt, Human
cagcccugggcaaaggggaccagcaaguuguc

SEQ ID NO: 85803 - RNA, 32 nt, Human
cagcccugggcaacauagugagaccccugucu

SEQ ID NO: 85804 - RNA, 32 nt, Human
cagcccuggggugcaggagucccucuggaagg

SEQ ID NO: 85805 - RNA, 18 nt, Human
cagcccuggguccuccca

SEQ ID NO: 85806 - RNA, 19 nt, Human
cagcccuggguccucccac

SEQ ID NO: 85807 - RNA, 32 nt, Human
cagcccuggguccucccacccucucuccuccc

SEQ ID NO: 85808 - RNA, 19 nt, Human
cagcccuggguucuccuca

SEQ ID NO: 85809 - RNA, 32 nt, Human
cagcccugguauggcgggugacccucacgucu

SEQ ID NO: 85810 - RNA, 21 nt, Human
cagcccuggugacagaggaga

SEQ ID NO: 85811 - RNA, 31 nt, Human
cagcccuguaccucugggccuggucucgugu

SEQ ID NO: 85812 - RNA, 32 nt, Human
cagcccuguccaccccaaccugugggccucua

SEQ ID NO: 85813 - RNA, 32 nt, Human
cagcccuguccucucgacuuccuuccuuagcu

SEQ ID NO: 85814 - RNA, 32 nt, Human
cagcccugugagacgccgggugcucugguaau

SEQ ID NO: 85815 - RNA, 32 nt, Human
cagcccugugcccccugcccacugaccuguga

SEQ ID NO: 85816 - RNA, 22 nt, Human
cagcccugugcuccucccuccc

SEQ ID NO: 85817 - RNA, 32 nt, Human
cagcccuguucucaacaacagggaggucaugg

SEQ ID NO: 85818 - RNA, 32 nt, Human
cagcccuguugggaagaaaggaagaaaacagg

SEQ ID NO: 85819 - RNA, 32 nt, Human
cagcccuuaaaucccuucccugugggaaguca

SEQ ID NO: 85820 - RNA, 32 nt, Human
cagcccuuaauuagggcuucagugacuuagaa

SEQ ID NO: 85821 - RNA, 21 nt, Human
cagcccuuacaguuucacuca

SEQ ID NO: 85822 - RNA, 18 nt, Human
cagcccuucccaccccca

SEQ ID NO: 85823 - RNA, 18 nt, Human
cagcccuucccagcacuu

SEQ ID NO: 85824 - RNA, 19 nt, Human
cagcccuucccagggcuca

SEQ ID NO: 85825 - RNA, 18 nt, Human
cagcccuucccagucuca

SEQ ID NO: 85826 - RNA, 19 nt, Human
cagcccuucccagucucau

SEQ ID NO: 85827 - RNA, 17 nt, Human
cagcccuucccccuccc

SEQ ID NO: 85828 - RNA, 24 nt, Human
cagcccuucccggagcuacagggg

SEQ ID NO: 85829 - RNA, 21 nt, Human
cagcccuucccgugcucuccc

SEQ ID NO: 85830 - RNA, 32 nt, Human
cagcccuucccuggccccgccggauguauaaa

SEQ ID NO: 85831 - RNA, 32 nt, Human
cagcccuucccuguguggcugcacugaggugg

SEQ ID NO: 85832 - RNA, 32 nt, Human
cagcccuuccuccgugcgcccugccgggcggc

SEQ ID NO: 85833 - RNA, 18 nt, Human
cagcccuuccucucacuc

SEQ ID NO: 85834 - RNA, 32 nt, Human
cagcccuuccuugccacuggucucaaagcugg

SEQ ID NO: 85835 - RNA, 32 nt, Human
cagcccuuccuugggcgucucccccagagugc

SEQ ID NO: 85836 - RNA, 21 nt, Human
cagcccuucgagcccccuccc

SEQ ID NO: 85837 - RNA, 32 nt, Human
cagcccuucucccucccucccuuccucccucu

SEQ ID NO: 85838 - RNA, 32 nt, Human
cagcccuucuccugugugccugccuccugccg

SEQ ID NO: 85839 - RNA, 32 nt, Human
cagcccuucucuucccuuugggcucuugccaa

SEQ ID NO: 85840 - RNA, 32 nt, Human
cagcccuucugaacuccugggcucaagccauc

SEQ ID NO: 85841 - RNA, 19 nt, Human
cagcccuucuguggccuca

SEQ ID NO: 85842 - RNA, 32 nt, Human
cagcccuugaggcagaggugccgagugacugc

SEQ ID NO: 85843 - RNA, 32 nt, Human
cagcccuugcagccucccuucuccuggcaccc

SEQ ID NO: 85844 - RNA, 32 nt, Human
cagcccuugcuuguugggauuccugacccagg

SEQ ID NO: 85845 - RNA, 32 nt, Human
cagcccuuggcuggaggcgugaccucaacccc

SEQ ID NO: 85846 - RNA, 32 nt, Human
cagcccuugggaacagugagagguugaagguc

SEQ ID NO: 85847 - RNA, 32 nt, Human
cagcccuuggugguggccagggagaggcgccc

SEQ ID NO: 85848 - RNA, 32 nt, Human
cagcccuugugacuccaaccagccucacaaga

SEQ ID NO: 85849 - RNA, 19 nt, Human
cagcccuugugcuuuuaua

SEQ ID NO: 85850 - RNA, 32 nt, Human
cagcccuuguguucccgugccccacacuuucc

SEQ ID NO: 85851 - RNA, 32 nt, Human
cagcccuuguucugccagcuggagccaagaag

SEQ ID NO: 85852 - RNA, 32 nt, Human
cagcccuuuagaguuccugaaggaggcagguu

SEQ ID NO: 85853 - RNA, 18 nt, Human
cagcccuuuauccucaca

SEQ ID NO: 85854 - RNA, 19 nt, Human
cagcccuuuauccucacac

SEQ ID NO: 85855 - RNA, 32 nt, Human
cagcccuuuauuccucuccauuuucacuccuu

SEQ ID NO: 85856 - RNA, 26 nt, Human
cagcccuuuccuaacccaacccaacc

SEQ ID NO: 85857 - RNA, 25 nt, Human
cagcccuuuccucugcccccaccca

SEQ ID NO: 85858 - RNA, 32 nt, Human
cagcccuuugcagcacugcucucaaggccagu

SEQ ID NO: 85859 - RNA, 32 nt, Human
cagcccuuuggcagaggcugaggagggagaug

SEQ ID NO: 85860 - RNA, 23 nt, Human
cagcccuuugggaggccgaaugg

SEQ ID NO: 85861 - RNA, 21 nt, Human
cagcccuuugggaggccgagg

SEQ ID NO: 85862 - RNA, 32 nt, Human
cagcccuuugggaggccgaggcgggcggauca

SEQ ID NO: 85863 - RNA, 32 nt, Human
cagcccuuugggaggccgaggugggcagauca

SEQ ID NO: 85864 - RNA, 32 nt, Human
cagcccuuugggaggcugaggcgggcagauca

SEQ ID NO: 85865 - RNA, 23 nt, Human
cagcccuuuuucccauccugccc

SEQ ID NO: 85866 - RNA, 32 nt, Human
cagccgaaaagcuuuugaggggcugacuucaa

SEQ ID NO: 85867 - RNA, 22 nt, Human
cagccgaaagagcaagugggug

SEQ ID NO: 85868 - RNA, 32 nt, Human
cagccgaagcacuccaucccagauuuguuguc

SEQ ID NO: 85869 - RNA, 32 nt, Human
cagccgacccaccaacagcugcaccugcgccu

SEQ ID NO: 85870 - RNA, 32 nt, Human
cagccgaccuguggccucuugcucugaagcca

SEQ ID NO: 85871 - RNA, 32 nt, Human
cagccgacgcgcagauagcagagccauccuug

SEQ ID NO: 85872 - RNA, 32 nt, Human
cagccgagaagauuccuugagaaucaagcauu

SEQ ID NO: 85873 - RNA, 32 nt, Human
cagccgagcagccuggcaacggcgguggcgcc

SEQ ID NO: 85874 - RNA, 24 nt, Human
cagccgagccccaggagcccguca

SEQ ID NO: 85875 - RNA, 32 nt, Human
cagccgagcggagcccaggagagcagagagcg

SEQ ID NO: 85876 - RNA, 32 nt, Human
cagccgaggaggcgcggcggagaggggacugc

SEQ ID NO: 85877 - RNA, 32 nt, Human
cagccgagggcugccugaauuucugacucaca

SEQ ID NO: 85878 - RNA, 32 nt, Human
cagccgaggugggagcacgggcaggcucaggc

SEQ ID NO: 85879 - RNA, 32 nt, Human
cagccgagucacuacugccugccugccugccu

SEQ ID NO: 85880 - RNA, 19 nt, Human
cagccgagugaccuccaua

SEQ ID NO: 85881 - RNA, 32 nt, Human
cagccgaugccccagcccugcacgccacccac

SEQ ID NO: 85882 - RNA, 32 nt, Human
cagccgauggacuuggcuucaagcucagauuu

SEQ ID NO: 85883 - RNA, 18 nt, Human
cagccgcacaauggggug

SEQ ID NO: 85884 - RNA, 20 nt, Human
cagccgcacagcaggaggug

SEQ ID NO: 85885 - RNA, 32 nt, Human
cagccgcacccaggccccaaugcuugugugug

SEQ ID NO: 85886 - RNA, 32 nt, Human
cagccgcaccgccuauuccagccuuuggagau

SEQ ID NO: 85887 - RNA, 32 nt, Human
cagccgcaccuugcuggaugcuucuccaguag

SEQ ID NO: 85888 - RNA, 32 nt, Human
cagccgcaucccucccgcagcgacggcggccc

SEQ ID NO: 85889 - RNA, 19 nt, Human
cagccgcaucugugaggug

SEQ ID NO: 85890 - RNA, 32 nt, Human
cagccgccaaccuaacaccacucccucugcag

SEQ ID NO: 85891 - RNA, 22 nt, Human
cagccgcccacccccaccccca

SEQ ID NO: 85892 - RNA, 32 nt, Human
cagccgccccucuccuccugggcugcagagcc

SEQ ID NO: 85893 - RNA, 32 nt, Human
cagccgccccugcuuuugccuuccuagaccuu

SEQ ID NO: 85894 - RNA, 32 nt, Human
cagccgcccgccucaggcucucucugccagcc

SEQ ID NO: 85895 - RNA, 23 nt, Human
cagccgccgucaauguucacaga

SEQ ID NO: 85896 - RNA, 32 nt, Human
cagccgccuccaccaugccgccaaaguucgac

SEQ ID NO: 85897 - RNA, 32 nt, Human
cagccgccuccacccgccccacaccacaaucg

SEQ ID NO: 85898 - RNA, 32 nt, Human
cagccgccucccccacgcucuucaccacguuc

SEQ ID NO: 85899 - RNA, 31 nt, Human
cagccgcgacuucuccuuuugccuuaggccu

SEQ ID NO: 85900 - RNA, 19 nt, Human
cagccgcgagguccuucac

SEQ ID NO: 85901 - RNA, 32 nt, Human
cagccgcgagguggacggggcgguggggccug

SEQ ID NO: 85902 - RNA, 32 nt, Human
cagccgcgccgccccaagucagccuggacaca

SEQ ID NO: 85903 - RNA, 32 nt, Human
cagccgcggagcccgcguuccacccucugugc

SEQ ID NO: 85904 - RNA, 32 nt, Human
cagccgcggccgaagccggagcaggggccgga

SEQ ID NO: 85905 - RNA, 23 nt, Human
cagccgcggcugcucggccacug

SEQ ID NO: 85906 - RNA, 32 nt, Human
cagccgcgugcucgggacuaugggaugccaga

SEQ ID NO: 85907 - RNA, 18 nt, Human
cagccgcuaggccaggga

SEQ ID NO: 85908 - RNA, 32 nt, Human
cagccgcucacuccuccagggcauuuuuagga

SEQ ID NO: 85909 - RNA, 32 nt, Human
cagccgcucugacugcuccggcugcccgcccg

SEQ ID NO: 85910 - RNA, 32 nt, Human
cagccgcugagcugugguggccuagaugcccg

SEQ ID NO: 85911 - RNA, 21 nt, Human
cagccgcugcagcagcggaga

SEQ ID NO: 85912 - RNA, 32 nt, Human
cagccgcugcccaggggaguggcuguggggag

SEQ ID NO: 85913 - RNA, 32 nt, Human
cagccgcugcucccuuucucccucucuuccuc

SEQ ID NO: 85914 - RNA, 18 nt, Human
cagccgcuggacuguaga

SEQ ID NO: 85915 - RNA, 32 nt, Human
cagccgcugggagcgcgaggccauguaacccg

SEQ ID NO: 85916 - RNA, 32 nt, Human
cagccgcuggugucucuucacacagaggcaca

SEQ ID NO: 85917 - RNA, 24 nt, Human
cagccgcugugggcagggggugug

SEQ ID NO: 85918 - RNA, 22 nt, Human
cagccggacccauggccugccc

SEQ ID NO: 85919 - RNA, 32 nt, Human
cagccggagauggaguggaaacuggagcgcac

SEQ ID NO: 85920 - RNA, 32 nt, Human
cagccggagcagucccggagcagaagcagcag

SEQ ID NO: 85921 - RNA, 17 nt, Human
cagccggagccuccaca

SEQ ID NO: 85922 - RNA, 17 nt, Human
cagccggagccuccgca

SEQ ID NO: 85923 - RNA, 32 nt, Human
cagccggagcugggacuguucagucacuggga

SEQ ID NO: 85924 - RNA, 32 nt, Human
cagccggcacgguggagaacgggagcuuaacu

SEQ ID NO: 85925 - RNA, 32 nt, Human
cagccggcaggcggagugaggaggaagcggag

SEQ ID NO: 85926 - RNA, 32 nt, Human
cagccggcccaggauaggcagcagcaggccua

SEQ ID NO: 85927 - RNA, 21 nt, Human
cagccggcgccgucucugccc

SEQ ID NO: 85928 - RNA, 32 nt, Human
cagccggcugcguuccucucuccauccguccg

SEQ ID NO: 85929 - RNA, 32 nt, Human
cagccgggacagcaaguggaggggacggcuca

SEQ ID NO: 85930 - RNA, 22 nt, Human
cagccgggauuccagugagaug

SEQ ID NO: 85931 - RNA, 32 nt, Human
cagccgggccaacacugagaaacccugccucu

SEQ ID NO: 85932 - RNA, 32 nt, Human
cagccgggccaacauggugaaaccccaucucu

SEQ ID NO: 85933 - RNA, 32 nt, Human
cagccgggccagcauggugaaaccccgucucu

SEQ ID NO: 85934 - RNA, 32 nt, Human
cagccgggccccugccuugugccucagcucuc

SEQ ID NO: 85935 - RNA, 32 nt, Human
cagccgggcuucuuagaggaggucaguugucc

SEQ ID NO: 85936 - RNA, 32 nt, Human
cagccggggaaaaggggagggugcagggagag

SEQ ID NO: 85937 - RNA, 22 nt, Human
cagccggggccuuggcagguga

SEQ ID NO: 85938 - RNA, 32 nt, Human
cagccggggcugggaucggggccuccucuguc

SEQ ID NO: 85939 - RNA, 18 nt, Human
cagccgggggccguggcc

SEQ ID NO: 85940 - RNA, 32 nt, Human
cagccgggguccacucucagggcacaggugga

SEQ ID NO: 85941 - RNA, 21 nt, Human
cagccggggugacagaagaga

SEQ ID NO: 85942 - RNA, 22 nt, Human
cagccggggugacagagugaga

SEQ ID NO: 85943 - RNA, 32 nt, Human
cagccggggugagugccccgggcgaggccggc

SEQ ID NO: 85944 - RNA, 32 nt, Human
cagccgggucacugcagcugccuggaccugcu

SEQ ID NO: 85945 - RNA, 32 nt, Human
cagccggguguuguggaccccaaaggggugac

SEQ ID NO: 85946 - RNA, 32 nt, Human
cagccggguuggaagugucucuccacagucac

SEQ ID NO: 85947 - RNA, 32 nt, Human
cagccgguccuggggucccacccuggugcccu

SEQ ID NO: 85948 - RNA, 32 nt, Human
cagccggugguuuugcuucuccuuuguguucc

SEQ ID NO: 85949 - RNA, 32 nt, Human
cagccggugugaggacacgauaugcugggguu

SEQ ID NO: 85950 - RNA, 32 nt, Human
cagccguauuaaaagaaaggacacugugagca

SEQ ID NO: 85951 - RNA, 32 nt, Human
cagccguccggaccccagagcaguacuaccag

SEQ ID NO: 85952 - RNA, 32 nt, Human
cagccguccucaccagagauggaccagggagg

SEQ ID NO: 85953 - RNA, 32 nt, Human
cagccgucuccacagcucuuacccagguaggc

SEQ ID NO: 85954 - RNA, 32 nt, Human
cagccgugacugcccguggcucugcugccgcc

SEQ ID NO: 85955 - RNA, 32 nt, Human
cagccgugagccaccacgcccagccugcuuuc

SEQ ID NO: 85956 - RNA, 32 nt, Human
cagccgugagccugguagccgugaccuugacu

SEQ ID NO: 85957 - RNA, 32 nt, Human
cagccgugaggaacucuucaggcuccagaagc

SEQ ID NO: 85958 - RNA, 18 nt, Human
cagccgugaucacaggug

SEQ ID NO: 85959 - RNA, 32 nt, Human
cagccgugcaccacuacauccagcuguauaug

SEQ ID NO: 85960 - RNA, 16 nt, Human
cagccgugccgcgaug

SEQ ID NO: 85961 - RNA, 32 nt, Human
cagccguggcaccacacaccucccagcucugc

SEQ ID NO: 85962 - RNA, 18 nt, Human
cagccguggcaggaaaug

SEQ ID NO: 85963 - RNA, 25 nt, Human
cagccguggccagaggcucgagggg

SEQ ID NO: 85964 - RNA, 32 nt, Human
cagccgugggcaaugacuuugcugcaaucuua

SEQ ID NO: 85965 - RNA, 32 nt, Human
cagccgugggugggggcccugaggugaagagu

SEQ ID NO: 85966 - RNA, 17 nt, Human
cagccgugguggaggug

SEQ ID NO: 85967 - RNA, 16 nt, Human
cagccgugguuaggug

SEQ ID NO: 85968 - RNA, 21 nt, Human
cagccguuucucccuacggug

SEQ ID NO: 85969 - RNA, 32 nt, Human
cagccuaaaaagcuguaacauacacauaaugg

SEQ ID NO: 85970 - RNA, 32 nt, Human
cagccuaaccaacauggagaaacccugucucu

SEQ ID NO: 85971 - RNA, 32 nt, Human
cagccuaaccaacauggugaaaccccgucucu

SEQ ID NO: 85972 - RNA, 32 nt, Human
cagccuaacccuccuucucuucuucuccucuc

SEQ ID NO: 85973 - RNA, 32 nt, Human
cagccuaagaagaaggccagagagggaaaagg

SEQ ID NO: 85974 - RNA, 21 nt, Human
cagccuaagcaacagagcaag

SEQ ID NO: 85975 - RNA, 21 nt, Human
cagccuaagcaauagagcgag

SEQ ID NO: 85976 - RNA, 26 nt, Human
cagccuaagggagugggaaggaaaug

SEQ ID NO: 85977 - RNA, 32 nt, Human
cagccuaagggagugggaaggaaauggggugu

SEQ ID NO: 85978 - RNA, 22 nt, Human
cagccuacacccagccccgagu

SEQ ID NO: 85979 - RNA, 32 nt, Human
cagccuacacguauuuguuaauaucuaacaua

SEQ ID NO: 85980 - RNA, 32 nt, Human
cagccuacacugcacccuggcuggcaggggug

SEQ ID NO: 85981 - RNA, 32 nt, Human
cagccuacagaaugcucucuggcucccggcuu

SEQ ID NO: 85982 - RNA, 32 nt, Human
cagccuacagcaguguggucucuuacauggcc

SEQ ID NO: 85983 - RNA, 32 nt, Human
cagccuacagccgccugcaucuguauccagcg

SEQ ID NO: 85984 - RNA, 25 nt, Human
cagccuacaucuuucucccaugcug

SEQ ID NO: 85985 - RNA, 32 nt, Human
cagccuaccagcucggagugcaguuccugguu

SEQ ID NO: 85986 - RNA, 32 nt, Human
cagccuacccaacauggugaaaccccaucucu

SEQ ID NO: 85987 - RNA, 32 nt, Human
cagccuacccacccuccccaucuuugcugagc

SEQ ID NO: 85988 - RNA, 24 nt, Human
cagccuaccccuccugcgcugccc

SEQ ID NO: 85989 - RNA, 20 nt, Human
cagccuacccguaaacugcc

SEQ ID NO: 85990 - RNA, 21 nt, Human
cagccuaccgcuggcccugcc

SEQ ID NO: 85991 - RNA, 24 nt, Human
cagccuaccugguguccccuaccc

SEQ ID NO: 85992 - RNA, 32 nt, Human
cagccuacuccaccuguuacuacuucuuuuug

SEQ ID NO: 85993 - RNA, 24 nt, Human
cagccuacuggaccucccgagcug

SEQ ID NO: 85994 - RNA, 32 nt, Human
cagccuacuuuccaagcggagccaugucuggu

SEQ ID NO: 85995 - RNA, 22 nt, Human
cagccuagacaacagagcaaga

SEQ ID NO: 85996 - RNA, 22 nt, Human
cagccuagacaacagggcaagg

SEQ ID NO: 85997 - RNA, 16 nt, Human
cagccuagaccuccca

SEQ ID NO: 85998 - RNA, 22 nt, Human
cagccuagaugacagaaugaga

SEQ ID NO: 85999 - RNA, 32 nt, Human
cagccuagcacaggcuggcaguugguacugaa

SEQ ID NO: 86000 - RNA, 26 nt, Human
cagccuagcaugcaaccaguggugug

SEQ ID NO: 86001 - RNA, 32 nt, Human
cagccuagccaacaugcugaaacuccaucucu

SEQ ID NO: 86002 - RNA, 22 nt, Human
cagccuagccaacauggugaaa

SEQ ID NO: 86003 - RNA, 32 nt, Human
cagccuagccaacauggugaaaucccaucucu

SEQ ID NO: 86004 - RNA, 32 nt, Human
cagccuagccaacauggugaacuaccaucucu

SEQ ID NO: 86005 - RNA, 32 nt, Human
cagccuagccaagauggugaaaccccaucucu

SEQ ID NO: 86006 - RNA, 20 nt, Human
cagccuagcgacagagcaag

SEQ ID NO: 86007 - RNA, 21 nt, Human
cagccuagcgacagagcaaga

SEQ ID NO: 86008 - RNA, 32 nt, Human
cagccuagcuaacauggcaaaaccccauugcu

SEQ ID NO: 86009 - RNA, 32 nt, Human
cagccuaggacguugaggcugcagugagcugu

SEQ ID NO: 86010 - RNA, 32 nt, Human
cagccuaggagggucagauuccuguauuaauu

SEQ ID NO: 86011 - RNA, 21 nt, Human
cagccuaggcaacagagcaag

SEQ ID NO: 86012 - RNA, 22 nt, Human
cagccuaggcaacagagcaaga

SEQ ID NO: 86013 - RNA, 21 nt, Human
cagccuaggcaacagagcgag

SEQ ID NO: 86014 - RNA, 22 nt, Human
cagccuaggcaacagagcgaga

SEQ ID NO: 86015 - RNA, 22 nt, Human
cagccuaggcaacagagggaga

SEQ ID NO: 86016 - RNA, 22 nt, Human
cagccuaggcaacagagugaga

SEQ ID NO: 86017 - RNA, 22 nt, Human
cagccuaggcaacauagugaga

SEQ ID NO: 86018 - RNA, 32 nt, Human
cagccuaggcaacauggagaaaccccgucucu

SEQ ID NO: 86019 - RNA, 32 nt, Human
cagccuaggcaacauggcaaaaccccaucucg

SEQ ID NO: 86020 - RNA, 32 nt, Human
cagccuaggcaacauggcgaaacccugucucu

SEQ ID NO: 86021 - RNA, 32 nt, Human
cagccuaggcaacauggugaaacccuaucuuu

SEQ ID NO: 86022 - RNA, 19 nt, Human
cagccuaggcauggugaga

SEQ ID NO: 86023 - RNA, 32 nt, Human
cagccuaggccagauggugaaaccccaucucu

SEQ ID NO: 86024 - RNA, 22 nt, Human
cagccuaggcgacagagcaaga

SEQ ID NO: 86025 - RNA, 21 nt, Human
cagccuaggcgacagagcgag

SEQ ID NO: 86026 - RNA, 22 nt, Human
cagccuaggcgacagagcgaga

SEQ ID NO: 86027 - RNA, 22 nt, Human
cagccuaggcgacagagugaga

SEQ ID NO: 86028 - RNA, 22 nt, Human
cagccuaggcgacggggcaaga

SEQ ID NO: 86029 - RNA, 21 nt, Human
cagccuaggcuguggccacua

SEQ ID NO: 86030 - RNA, 22 nt, Human
cagccuaggguggggaagugag

SEQ ID NO: 86031 - RNA, 22 nt, Human
cagccuagguaacauagugaga

SEQ ID NO: 86032 - RNA, 22 nt, Human
cagccuaggugacagaaugaga

SEQ ID NO: 86033 - RNA, 22 nt, Human
cagccuaggugacagagcaaga

SEQ ID NO: 86034 - RNA, 22 nt, Human
cagccuaggugacagagcgaga

SEQ ID NO: 86035 - RNA, 22 nt, Human
cagccuaggugacagagugaga

SEQ ID NO: 86036 - RNA, 22 nt, Human
cagccuaggugacagggcaaga

SEQ ID NO: 86037 - RNA, 22 nt, Human
cagccuaggugacauagugaga

SEQ ID NO: 86038 - RNA, 22 nt, Human
cagccuaggugauagagcaaga

SEQ ID NO: 86039 - RNA, 21 nt, Human
cagccuagugggaaggaggug

SEQ ID NO: 86040 - RNA, 32 nt, Human
cagccuauacauguuauuuacaucauuucuca

SEQ ID NO: 86041 - RNA, 20 nt, Human
cagccuauagcucccgaagc

SEQ ID NO: 86042 - RNA, 32 nt, Human
cagccuauaguagaguccccugaccccaagcc

SEQ ID NO: 86043 - RNA, 26 nt, Human
cagccuauauuuuaggcagaaaauua

SEQ ID NO: 86044 - RNA, 21 nt, Human
cagccuaucucccccaagcug

SEQ ID NO: 86045 - RNA, 32 nt, Human
cagccuauuaacugugucuuagcaauguugua

SEQ ID NO: 86046 - RNA, 32 nt, Human
cagccuauuccaaugacugaaacccuucuugg

SEQ ID NO: 86047 - RNA, 21 nt, Human
cagccuauugucuuucuccgc

SEQ ID NO: 86048 - RNA, 20 nt, Human
cagccucaaccucccaggcu

SEQ ID NO: 86049 - RNA, 20 nt, Human
cagccucaaccucccuggcu

SEQ ID NO: 86050 - RNA, 22 nt, Human
cagccucaaccuuccaggcuga

SEQ ID NO: 86051 - RNA, 18 nt, Human
cagccucaacuucucagg

SEQ ID NO: 86052 - RNA, 32 nt, Human
cagccucaaucccggcugcugcauuuaggugg

SEQ ID NO: 86053 - RNA, 32 nt, Human
cagccucaauuuaaaaauaaagagcauaauug

SEQ ID NO: 86054 - RNA, 31 nt, Human
cagccucacagcuuacaucacagcuuaaugu

SEQ ID NO: 86055 - RNA, 32 nt, Human
cagccucacaggaagugggggugaggagccug

SEQ ID NO: 86056 - RNA, 32 nt, Human
cagccucaccaaaguguugggauuacuggugu

SEQ ID NO: 86057 - RNA, 32 nt, Human
cagccucaccaacauggagaaaucccaucucu

SEQ ID NO: 86058 - RNA, 24 nt, Human
cagccucaccaccaggccaggagg

SEQ ID NO: 86059 - RNA, 24 nt, Human
cagccucaccaccaucccagagcu

SEQ ID NO: 86060 - RNA, 23 nt, Human
cagccucaccccucccaccccca

SEQ ID NO: 86061 - RNA, 17 nt, Human
cagccucaccugcacca

SEQ ID NO: 86062 - RNA, 22 nt, Human
cagccucaccuggggugggagg

SEQ ID NO: 86063 - RNA, 32 nt, Human
cagccucaccuugcuguccucugacacugcca

SEQ ID NO: 86064 - RNA, 32 nt, Human
cagccucacgucuuauuucucaccucguuccc

SEQ ID NO: 86065 - RNA, 32 nt, Human
cagccucacuccccaucccaaccagagauggc

SEQ ID NO: 86066 - RNA, 32 nt, Human
cagccucacugcaucuuucucuucccaugcaa

SEQ ID NO: 86067 - RNA, 32 nt, Human
cagccucagagacaucagcccuuggggguccu

SEQ ID NO: 86068 - RNA, 22 nt, Human
cagccucagagccuacccagga

SEQ ID NO: 86069 - RNA, 22 nt, Human
cagccucagagggccaaugggg

SEQ ID NO: 86070 - RNA, 19 nt, Human
cagccucagauggaggcag

SEQ ID NO: 86071 - RNA, 22 nt, Human
cagccucagcaauagagugaga

SEQ ID NO: 86072 - RNA, 19 nt, Human
cagccucagcccccugcuu

SEQ ID NO: 86073 - RNA, 20 nt, Human
cagccucagccucccaaagu

SEQ ID NO: 86074 - RNA, 23 nt, Human
cagccucagccucccaaguagcu

SEQ ID NO: 86075 - RNA, 23 nt, Human
cagccucagccucccagugugcu

SEQ ID NO: 86076 - RNA, 19 nt, Human
cagccucagccucccuagu

SEQ ID NO: 86077 - RNA, 18 nt, Human
cagccucaggacuaugga

SEQ ID NO: 86078 - RNA, 18 nt, Human
cagccucaggaucuucca

SEQ ID NO: 86079 - RNA, 32 nt, Human
cagccucaggcagaccggaugggaaccaggau

SEQ ID NO: 86080 - RNA, 32 nt, Human
cagccucaggcagccugucagggcaguggugu

SEQ ID NO: 86081 - RNA, 18 nt, Human
cagccucagggccuggcu

SEQ ID NO: 86082 - RNA, 32 nt, Human
cagccucauaagggcuggagugcuguggugcc

SEQ ID NO: 86083 - RNA, 32 nt, Human
cagccucauagcugccuucugcggccagcgac

SEQ ID NO: 86084 - RNA, 32 nt, Human
cagccucaucacagacaugaaacucacugccg

SEQ ID NO: 86085 - RNA, 32 nt, Human
cagccucaucauuucccaucuggaccugguac

SEQ ID NO: 86086 - RNA, 32 nt, Human
cagccucauccagacagcaaagcaaggaggga

SEQ ID NO: 86087 - RNA, 32 nt, Human
cagccucaucccuccagguacaaacaagaaca

SEQ ID NO: 86088 - RNA, 32 nt, Human
cagccucauccuccccaggaccccuguccagg

SEQ ID NO: 86089 - RNA, 19 nt, Human
cagccucaugauccuuuua

SEQ ID NO: 86090 - RNA, 18 nt, Human
cagccucauuccuucaca

SEQ ID NO: 86091 - RNA, 32 nt, Human
cagccuccaacuagcugggauuacaggcacaa

SEQ ID NO: 86092 - RNA, 22 nt, Human
cagccuccaacuccugggcuca

SEQ ID NO: 86093 - RNA, 22 nt, Human
cagccuccaacucuugggcuca

SEQ ID NO: 86094 - RNA, 32 nt, Human
cagccuccaaguagcugggacuacaggcgcgu

SEQ ID NO: 86095 - RNA, 32 nt, Human
cagccuccaaguagcugggacuauaggcacgc

SEQ ID NO: 86096 - RNA, 32 nt, Human
cagccuccaaguaucugggauugcaggugcac

SEQ ID NO: 86097 - RNA, 32 nt, Human
cagccuccaagucaccuggccugggaaaguac

SEQ ID NO: 86098 - RNA, 32 nt, Human
cagccuccacccccacuccagccucagcgggg

SEQ ID NO: 86099 - RNA, 22 nt, Human
cagccuccaccucccaguuuca

SEQ ID NO: 86100 - RNA, 22 nt, Human
cagccuccaccuccuggauuca

SEQ ID NO: 86101 - RNA, 21 nt, Human
cagccuccaccuucagguuca

SEQ ID NO: 86102 - RNA, 24 nt, Human
cagccuccacugggcagaaaacua

SEQ ID NO: 86103 - RNA, 32 nt, Human
cagccuccagaguacugggauuacaagagccc

SEQ ID NO: 86104 - RNA, 32 nt, Human
cagccuccagaguacugguauuacaggauuuc

SEQ ID NO: 86105 - RNA, 32 nt, Human
cagccuccagaucccuuccugcccaucccuuc

SEQ ID NO: 86106 - RNA, 32 nt, Human
cagccuccagccucucccuccagcacaaccug

SEQ ID NO: 86107 - RNA, 32 nt, Human
cagccuccaucucccggggcucaggugauuuu

SEQ ID NO: 86108 - RNA, 20 nt, Human
cagccuccaugccagaaaac

SEQ ID NO: 86109 - RNA, 32 nt, Human
cagccuccaugcugggucuggagggccccugc

SEQ ID NO: 86110 - RNA, 32 nt, Human
cagccuccaugggggauucaguccccagagca

SEQ ID NO: 86111 - RNA, 32 nt, Human
cagccuccauguccagaccuagucagccucuc

SEQ ID NO: 86112 - RNA, 32 nt, Human
cagccucccaaaagcugggauuacaggcguga

SEQ ID NO: 86113 - RNA, 26 nt, Human
cagccucccaaaaggacagagaacua

SEQ ID NO: 86114 - RNA, 32 nt, Human
cagccucccaaagugcuggauuacaggcguga

SEQ ID NO: 86115 - RNA, 32 nt, Human
cagccucccaaauuugcugggauuccaggguu

SEQ ID NO: 86116 - RNA, 32 nt, Human
cagccucccaagaagcuagaaccacauguaca

SEQ ID NO: 86117 - RNA, 32 nt, Human
cagccucccaagcaacugggauucauccuuuc

SEQ ID NO: 86118 - RNA, 32 nt, Human
cagccucccaaggugcuggauuacaggcauga

SEQ ID NO: 86119 - RNA, 32 nt, Human
cagccucccaaguacugggauuacagcuucca

SEQ ID NO: 86120 - RNA, 32 nt, Human
cagccucccaaguacugggauuacaggugccc

SEQ ID NO: 86121 - RNA, 32 nt, Human
cagccucccaaguagcuggauuacaggugcau

SEQ ID NO: 86122 - RNA, 32 nt, Human
cagccucccaagugcugggauuacaggcguga

SEQ ID NO: 86123 - RNA, 21 nt, Human
cagccucccacaggaucggga

SEQ ID NO: 86124 - RNA, 32 nt, Human
cagccucccaccuucagcccggcugugaacgu

SEQ ID NO: 86125 - RNA, 32 nt, Human
cagccucccagaagcucucuucugcuucaaaa

SEQ ID NO: 86126 - RNA, 23 nt, Human
cagccucccagaguagaaaacua

SEQ ID NO: 86127 - RNA, 32 nt, Human
cagccucccaggcuggauggcauggacuguuu

SEQ ID NO: 86128 - RNA, 32 nt, Human
cagccucccaggugcugggauuauaggcguga

SEQ ID NO: 86129 - RNA, 32 nt, Human
cagccucccaguagcugggauuagaggcaugu

SEQ ID NO: 86130 - RNA, 18 nt, Human
cagccuccccaccaccac

SEQ ID NO: 86131 - RNA, 32 nt, Human
cagccuccccaccaccaccagcauaugucaag

SEQ ID NO: 86132 - RNA, 32 nt, Human
cagccuccccagcucuccucugccagccaccc

SEQ ID NO: 86133 - RNA, 32 nt, Human
cagccuccccuccaggcagccucaccagcagc

SEQ ID NO: 86134 - RNA, 32 nt, Human
cagccuccccucccccagggccccacccagug

SEQ ID NO: 86135 - RNA, 32 nt, Human
cagccucccgaguagcugggauuacgggcgcc

SEQ ID NO: 86136 - RNA, 32 nt, Human
cagccucccggaccgcccugagcugcugcgcc

SEQ ID NO: 86137 - RNA, 32 nt, Human
cagccucccggcgcccccuccgggcccagcuc

SEQ ID NO: 86138 - RNA, 32 nt, Human
cagccucccuccccucuccacccuucagugcu

SEQ ID NO: 86139 - RNA, 32 nt, Human
cagccucccucggacacauggcugcuuggccu

SEQ ID NO: 86140 - RNA, 32 nt, Human
cagccucccucucccaccucugucugcccgcu

SEQ ID NO: 86141 - RNA, 21 nt, Human
cagccucccugacccuccaca

SEQ ID NO: 86142 - RNA, 21 nt, Human
cagccucccugguccucccca

SEQ ID NO: 86143 - RNA, 32 nt, Human
cagccucccuuccaugccccaggaucacucuc

SEQ ID NO: 86144 - RNA, 32 nt, Human
cagccuccgaaagcauccuuugcucucuuucc

SEQ ID NO: 86145 - RNA, 32 nt, Human
cagccuccgacagcccucccaccaagcaagag

SEQ ID NO: 86146 - RNA, 32 nt, Human
cagccuccgaccuccugaccucugcccuggcc

SEQ ID NO: 86147 - RNA, 32 nt, Human
cagccuccgaguagcugggaccacaggggccc

SEQ ID NO: 86148 - RNA, 32 nt, Human
cagccuccgaguagcugggacuacaggugcac

SEQ ID NO: 86149 - RNA, 32 nt, Human
cagccuccgagucgcugggauugcagauaagg

SEQ ID NO: 86150 - RNA, 22 nt, Human
cagccuccgccuccugggcuca

SEQ ID NO: 86151 - RNA, 22 nt, Human
cagccuccgcggacugggguca

SEQ ID NO: 86152 - RNA, 32 nt, Human
cagccuccggagaacugggauuacaggcaugc

SEQ ID NO: 86153 - RNA, 32 nt, Human
cagccuccuaaaugcugggauuacaggcguga

SEQ ID NO: 86154 - RNA, 32 nt, Human
cagccuccuaagggcugggauuacaggaauga

SEQ ID NO: 86155 - RNA, 32 nt, Human
cagccuccuaagugcugggauuacagacguga

SEQ ID NO: 86156 - RNA, 20 nt, Human
cagccuccuacucugggucc

SEQ ID NO: 86157 - RNA, 21 nt, Human
cagccuccuagcauaaaacua

SEQ ID NO: 86158 - RNA, 32 nt, Human
cagccuccuaucucuguauggccugguguuuc

SEQ ID NO: 86159 - RNA, 32 nt, Human
cagccuccuccaccauucccuucaucauucau

SEQ ID NO: 86160 - RNA, 32 nt, Human
cagccuccuccagggcccaggugggcggcuuc

SEQ ID NO: 86161 - RNA, 32 nt, Human
cagccuccuccagggcugcccaaggcaggguu

SEQ ID NO: 86162 - RNA, 19 nt, Human
cagccuccucccgggcuca

SEQ ID NO: 86163 - RNA, 23 nt, Human
cagccuccucccgggcucaggau

SEQ ID NO: 86164 - RNA, 32 nt, Human
cagccuccuccugggccagcucuugugcuaca

SEQ ID NO: 86165 - RNA, 18 nt, Human
cagccuccucucuccgca

SEQ ID NO: 86166 - RNA, 32 nt, Human
cagccuccucugaggcuccccugcugccuccc

SEQ ID NO: 86167 - RNA, 32 nt, Human
cagccuccugaaggcucagcacggugaggccu

SEQ ID NO: 86168 - RNA, 32 nt, Human
cagccuccugagagcugggacuacaggcgccu

SEQ ID NO: 86169 - RNA, 32 nt, Human
cagccuccugaguagcuggauuacaggcaugu

SEQ ID NO: 86170 - RNA, 32 nt, Human
cagccuccugaguagcuggauuacagggccug

SEQ ID NO: 86171 - RNA, 32 nt, Human
cagccuccugaguggggauuacaggccacagc

SEQ ID NO: 86172 - RNA, 22 nt, Human
cagccuccugccuuccuuuaua

SEQ ID NO: 86173 - RNA, 32 nt, Human
cagccuccugccuugcacuugcagccugaagc

SEQ ID NO: 86174 - RNA, 32 nt, Human
cagccuccugcuagagugacuuguacaugagc

SEQ ID NO: 86175 - RNA, 31 nt, Human
cagccuccuggauaauaugccaacacccuuc

SEQ ID NO: 86176 - RNA, 32 nt, Human
cagccuccugggaauccagucuacccucagac

SEQ ID NO: 86177 - RNA, 32 nt, Human
cagccuccugggggauacgguggagaagaucg

SEQ ID NO: 86178 - RNA, 21 nt, Human
cagccuccuggggggaccagg

SEQ ID NO: 86179 - RNA, 32 nt, Human
cagccuccugguagcugagacuacaggugcuc

SEQ ID NO: 86180 - RNA, 32 nt, Human
cagccuccugguagcugggacuacagcuuccu

SEQ ID NO: 86181 - RNA, 32 nt, Human
cagccuccugguagcuggggcuacagaacucu

SEQ ID NO: 86182 - RNA, 32 nt, Human
cagccuccuguaaucccagcuacuugggaggc

SEQ ID NO: 86183 - RNA, 32 nt, Human
cagccuccuguacucauuacuacuuuuagcau

SEQ ID NO: 86184 - RNA, 32 nt, Human
cagccuccuuaguagugggauuacaggugccc

SEQ ID NO: 86185 - RNA, 32 nt, Human
cagccuccuuagucuccucauccugcuucaca

SEQ ID NO: 86186 - RNA, 19 nt, Human
cagccuccuucaccaccaa

SEQ ID NO: 86187 - RNA, 32 nt, Human
cagccuccuugcagacuggugcucuguguucu

SEQ ID NO: 86188 - RNA, 32 nt, Human
cagccuccuugcugcccucugcucugugugcc

SEQ ID NO: 86189 - RNA, 18 nt, Human
cagccuccuugugggcuc

SEQ ID NO: 86190 - RNA, 32 nt, Human
cagccucgaacuccuggucucuugcgguccuc

SEQ ID NO: 86191 - RNA, 16 nt, Human
cagccucgaccuccca

SEQ ID NO: 86192 - RNA, 18 nt, Human
cagccucgaccuggucac

SEQ ID NO: 86193 - RNA, 21 nt, Human
cagccucgaggacacuagggg

SEQ ID NO: 86194 - RNA, 18 nt, Human
cagccucgaucuucccca

SEQ ID NO: 86195 - RNA, 32 nt, Human
cagccucgcaugccagagccuggggcauccca

SEQ ID NO: 86196 - RNA, 32 nt, Human
cagccucgccaacauggcgaaaccccaucucu

SEQ ID NO: 86197 - RNA, 32 nt, Human
cagccucgccaacauggugaaaccccaucucu

SEQ ID NO: 86198 - RNA, 17 nt, Human
cagccucgcccccuccc

SEQ ID NO: 86199 - RNA, 32 nt, Human
cagccucggacccagcccggagcgcagggcgg

SEQ ID NO: 86200 - RNA, 32 nt, Human
cagccucggacccccauccguauccagcagcg

SEQ ID NO: 86201 - RNA, 20 nt, Human
cagccucggagaccuucaca

SEQ ID NO: 86202 - RNA, 32 nt, Human
cagccucggagugguccagcugcccggccugu

SEQ ID NO: 86203 - RNA, 21 nt, Human
cagccucggccucccgaggug

SEQ ID NO: 86204 - RNA, 32 nt, Human
cagccucggcugagcagaugcacagaggggau

SEQ ID NO: 86205 - RNA, 32 nt, Human
cagccucgggcagcaacuccccaacccgcagu

SEQ ID NO: 86206 - RNA, 18 nt, Human
cagccucgguccuucuca

SEQ ID NO: 86207 - RNA, 22 nt, Human
cagccucggugacagagcaaga

SEQ ID NO: 86208 - RNA, 32 nt, Human
cagccucguuggagagcagcaggugcugugcg

SEQ ID NO: 86209 - RNA, 32 nt, Human
cagccucguuuccuccacccuacuuugauuuc

SEQ ID NO: 86210 - RNA, 20 nt, Human
cagccucuaauaccuucaca

SEQ ID NO: 86211 - RNA, 32 nt, Human
cagccucuacccucagcauccuggccacaagu

SEQ ID NO: 86212 - RNA, 32 nt, Human
cagccucuacuuguaagucagcuaaaggaaug

SEQ ID NO: 86213 - RNA, 32 nt, Human
cagccucuagagcagacuacagcuggggugca

SEQ ID NO: 86214 - RNA, 32 nt, Human
cagccucuagcuucaggcugggcacgguggcu

SEQ ID NO: 86215 - RNA, 32 nt, Human
cagccucuaggccaguucagcagccacaacau

SEQ ID NO: 86216 - RNA, 32 nt, Human
cagccucucaccccaggguccaugucccaggc

SEQ ID NO: 86217 - RNA, 26 nt, Human
cagccucucacucucaguuccacuca

SEQ ID NO: 86218 - RNA, 32 nt, Human
cagccucuccaaugccucagccacagagucac

SEQ ID NO: 86219 - RNA, 32 nt, Human
cagccucuccaccgucacuguccgcugcuggc

SEQ ID NO: 86220 - RNA, 32 nt, Human
cagccucuccaccuucugagccugcgcccaca

SEQ ID NO: 86221 - RNA, 32 nt, Human
cagccucucccccagucccugucuccgaggcc

SEQ ID NO: 86222 - RNA, 32 nt, Human
cagccucuccccugccugcccuggugacauca

SEQ ID NO: 86223 - RNA, 32 nt, Human
cagccucucgagugcugagauuacacacguga

SEQ ID NO: 86224 - RNA, 32 nt, Human
cagccucucgggagucaagggauccgccuuca

SEQ ID NO: 86225 - RNA, 21 nt, Human
cagccucucucuccuuccaua

SEQ ID NO: 86226 - RNA, 32 nt, Human
cagccucucucuucugucucagaagcucugug

SEQ ID NO: 86227 - RNA, 20 nt, Human
cagccucucucuuuucuaca

SEQ ID NO: 86228 - RNA, 32 nt, Human
cagccucucuggcaaggcuuucuugagccccg

SEQ ID NO: 86229 - RNA, 32 nt, Human
cagccucucugugcacuugcugucugcggagc

SEQ ID NO: 86230 - RNA, 22 nt, Human
cagccucucuuucuccuccaca

SEQ ID NO: 86231 - RNA, 32 nt, Human
cagccucugaaagacccaugcucucuuuggau

SEQ ID NO: 86232 - RNA, 32 nt, Human
cagccucugaaaucauagcucuccaguggcuu

SEQ ID NO: 86233 - RNA, 18 nt, Human
cagccucugacucaccac

SEQ ID NO: 86234 - RNA, 32 nt, Human
cagccucugagcuggcucacacgugccauccc

SEQ ID NO: 86235 - RNA, 32 nt, Human
cagccucugaguagcugggacuacaagugcau

SEQ ID NO: 86236 - RNA, 32 nt, Human
cagccucugaguagcugggauuacaggcacac

SEQ ID NO: 86237 - RNA, 32 nt, Human
cagccucugauuauugagcuuccucuuaaaaa

SEQ ID NO: 86238 - RNA, 32 nt, Human
cagccucugcagcccaaggcucaggccggggc

SEQ ID NO: 86239 - RNA, 20 nt, Human
cagccucugcagcugcacuu

SEQ ID NO: 86240 - RNA, 32 nt, Human
cagccucugcaggcccugcucuugccucccag

SEQ ID NO: 86241 - RNA, 32 nt, Human
cagccucugcaggcccugcucuugccucuuag

SEQ ID NO: 86242 - RNA, 32 nt, Human
cagccucugcagggccugcucuugccucccag

SEQ ID NO: 86243 - RNA, 32 nt, Human
cagccucugccacccuccaccuccucggucag

SEQ ID NO: 86244 - RNA, 32 nt, Human
cagccucugccggcuccccuaggcaaccccuu

SEQ ID NO: 86245 - RNA, 22 nt, Human
cagccucugccucccagguuca

SEQ ID NO: 86246 - RNA, 32 nt, Human
cagccucugccugcucugccgccgaggcccgg

SEQ ID NO: 86247 - RNA, 32 nt, Human
cagccucugccuggaaccuggcucgugcugug

SEQ ID NO: 86248 - RNA, 19 nt, Human
cagccucugccuuuccaca

SEQ ID NO: 86249 - RNA, 32 nt, Human
cagccucugcucauggcacugggccuccaguu

SEQ ID NO: 86250 - RNA, 32 nt, Human
cagccucugcugcaggugaggguugggggcag

SEQ ID NO: 86251 - RNA, 19 nt, Human
cagccucugcugccucugg

SEQ ID NO: 86252 - RNA, 30 nt, Human
cagccucugcugcuccugcuccuggguuug

SEQ ID NO: 86253 - RNA, 32 nt, Human
cagccucugcugcuccugcuccuggguuugaa

SEQ ID NO: 86254 - RNA, 32 nt, Human
cagccucuggaaggaaaggcagcgcugacuuc

SEQ ID NO: 86255 - RNA, 20 nt, Human
cagccucuggauucucuuca

SEQ ID NO: 86256 - RNA, 32 nt, Human
cagccucuggggcacccagcuccugggcuuug

SEQ ID NO: 86257 - RNA, 32 nt, Human
cagccucuggggccuuggcacacacacauucg

SEQ ID NO: 86258 - RNA, 32 nt, Human
cagccucuggucagaggauguggccaccugac

SEQ ID NO: 86259 - RNA, 25 nt, Human
cagccucugucauaaugcucugccc

SEQ ID NO: 86260 - RNA, 32 nt, Human
cagccucuguccccuccaccucugaggagcgu

SEQ ID NO: 86261 - RNA, 32 nt, Human
cagccucugugacuccguuaucugcagguauu

SEQ ID NO: 86262 - RNA, 32 nt, Human
cagccucuguuagcugggugggugucaucagc

SEQ ID NO: 86263 - RNA, 32 nt, Human
cagccucuucagacugugcaucuuuucagcag

SEQ ID NO: 86264 - RNA, 16 nt, Human
cagccucuucuccaca

SEQ ID NO: 86265 - RNA, 21 nt, Human
cagccucuucuggcagaaagc

SEQ ID NO: 86266 - RNA, 32 nt, Human
cagccucuucuggguucacugcaguccaaccg

SEQ ID NO: 86267 - RNA, 32 nt, Human
cagccucuucuuuguggagccucucagugugg

SEQ ID NO: 86268 - RNA, 20 nt, Human
cagccucuugauucuuugua

SEQ ID NO: 86269 - RNA, 32 nt, Human
cagccucuuggcuucuaauuuguuuaucuuuu

SEQ ID NO: 86270 - RNA, 20 nt, Human
cagccucuugguccccccac

SEQ ID NO: 86271 - RNA, 32 nt, Human
cagccucuuuacaaccuccuggauccacagcc

SEQ ID NO: 86272 - RNA, 32 nt, Human
cagccucuuuaccaccuccccacuuacacugc

SEQ ID NO: 86273 - RNA, 32 nt, Human
cagccucuuuagcugggauuacaggcacccac

SEQ ID NO: 86274 - RNA, 32 nt, Human
cagccucuuuguuugaaagcaguggauaggca

SEQ ID NO: 86275 - RNA, 32 nt, Human
cagccucuuuugccccucuucuugccuuucac

SEQ ID NO: 86276 - RNA, 23 nt, Human
cagccugaaauuaccuuuauuca

SEQ ID NO: 86277 - RNA, 32 nt, Human
cagccugaacaacauggugaaacccugucugu

SEQ ID NO: 86278 - RNA, 17 nt, Human
cagccugaaccuccgca

SEQ ID NO: 86279 - RNA, 32 nt, Human
cagccugaagaaaagaggccacugugacuaca

SEQ ID NO: 86280 - RNA, 32 nt, Human
cagccugaagagaccagugagcucacugugac

SEQ ID NO: 86281 - RNA, 32 nt, Human
cagccugaagagcgagacucugucucaauaau

SEQ ID NO: 86282 - RNA, 32 nt, Human
cagccugaaggaugagaugggcaaccucagga

SEQ ID NO: 86283 - RNA, 23 nt, Human
cagccugaagucgugaucugccc

SEQ ID NO: 86284 - RNA, 32 nt, Human
cagccugaauacugugcccucuugcuuugggg

SEQ ID NO: 86285 - RNA, 32 nt, Human
cagccugacaaacauggagaaaccccaucucu

SEQ ID NO: 86286 - RNA, 32 nt, Human
cagccugacauggugaaaccccaucucuacga

SEQ ID NO: 86287 - RNA, 32 nt, Human
cagccugaccaaaauggagaaaccccaucucu

SEQ ID NO: 86288 - RNA, 32 nt, Human
cagccugaccaaaauggugaaaccccgucucu

SEQ ID NO: 86289 - RNA, 32 nt, Human
cagccugaccaacacggagaaaccccgucucu

SEQ ID NO: 86290 - RNA, 32 nt, Human
cagccugaccaacacggagaaacccuaucucu

SEQ ID NO: 86291 - RNA, 32 nt, Human
cagccugaccaacacggugaaaccccgucucu

SEQ ID NO: 86292 - RNA, 32 nt, Human
cagccugaccaacacugagaaaccccaucucu

SEQ ID NO: 86293 - RNA, 32 nt, Human
cagccugaccaacauagagaaaccucgucucu

SEQ ID NO: 86294 - RNA, 32 nt, Human
cagccugaccaacauagugaaaccccaucucu

SEQ ID NO: 86295 - RNA, 32 nt, Human
cagccugaccaacauagugaaacccccgucuc

SEQ ID NO: 86296 - RNA, 32 nt, Human
cagccugaccaacauaguuucaccccaucucu

SEQ ID NO: 86297 - RNA, 32 nt, Human
cagccugaccaacaugaagaaaccccaucucu

SEQ ID NO: 86298 - RNA, 32 nt, Human
cagccugaccaacaugaagaaacccugucugu

SEQ ID NO: 86299 - RNA, 32 nt, Human
cagccugaccaacaugacaaaaccccgucucu

SEQ ID NO: 86300 - RNA, 32 nt, Human
cagccugaccaacaugacgaaaccccgucucu

SEQ ID NO: 86301 - RNA, 32 nt, Human
cagccugaccaacaugaugaaacccccgucuc

SEQ ID NO: 86302 - RNA, 32 nt, Human
cagccugaccaacaugaugaaaccccguugcu

SEQ ID NO: 86303 - RNA, 32 nt, Human
cagccugaccaacaugaugaaaugccaucucc

SEQ ID NO: 86304 - RNA, 32 nt, Human
cagccugaccaacauggaaaaaccccgucucu

SEQ ID NO: 86305 - RNA, 32 nt, Human
cagccugaccaacauggacaaaccccgucucu

SEQ ID NO: 86306 - RNA, 32 nt, Human
cagccugaccaacauggagaaacccaaucucu

SEQ ID NO: 86307 - RNA, 32 nt, Human
cagccugaccaacauggagaaacccagucucu

SEQ ID NO: 86308 - RNA, 32 nt, Human
cagccugaccaacauggagaaaccccaauugu

SEQ ID NO: 86309 - RNA, 32 nt, Human
cagccugaccaacauggagaaaccccaucucc

SEQ ID NO: 86310 - RNA, 32 nt, Human
cagccugaccaacauggagaaaccccaucucu

SEQ ID NO: 86311 - RNA, 32 nt, Human
cagccugaccaacauggagaaaccccaucugu

SEQ ID NO: 86312 - RNA, 32 nt, Human
cagccugaccaacauggagaaaccccauuucu

SEQ ID NO: 86313 - RNA, 32 nt, Human
cagccugaccaacauggagaaacccccaucuc

SEQ ID NO: 86314 - RNA, 32 nt, Human
cagccugaccaacauggagaaaccccgucccu

SEQ ID NO: 86315 - RNA, 32 nt, Human
cagccugaccaacauggagaaaccccgucucu

SEQ ID NO: 86316 - RNA, 32 nt, Human
cagccugaccaacauggagaaaccccgugucu

SEQ ID NO: 86317 - RNA, 32 nt, Human
cagccugaccaacauggagaaaccccugucuc

SEQ ID NO: 86318 - RNA, 32 nt, Human
cagccugaccaacauggagaaacccuacuaaa

SEQ ID NO: 86319 - RNA, 32 nt, Human
cagccugaccaacauggagaaacccuaucucu

SEQ ID NO: 86320 - RNA, 32 nt, Human
cagccugaccaacauggagaaacccugccucu

SEQ ID NO: 86321 - RNA, 32 nt, Human
cagccugaccaacauggagaaacccugucuca

SEQ ID NO: 86322 - RNA, 32 nt, Human
cagccugaccaacauggagaaacccugucucc

SEQ ID NO: 86323 - RNA, 32 nt, Human
cagccugaccaacauggagaaacccugucucu

SEQ ID NO: 86324 - RNA, 32 nt, Human
cagccugaccaacauggagaaaccucgucucu

SEQ ID NO: 86325 - RNA, 32 nt, Human
cagccugaccaacauggagaaacgccaucucu

SEQ ID NO: 86326 - RNA, 32 nt, Human
cagccugaccaacauggagaaacuccaucucu

SEQ ID NO: 86327 - RNA, 32 nt, Human
cagccugaccaacauggagaaacuccgucucu

SEQ ID NO: 86328 - RNA, 32 nt, Human
cagccugaccaacauggagaaaugccaucucu

SEQ ID NO: 86329 - RNA, 32 nt, Human
cagccugaccaacauggagaagccccgucucu

SEQ ID NO: 86330 - RNA, 32 nt, Human
cagccugaccaacauggagauauccugucucu

SEQ ID NO: 86331 - RNA, 32 nt, Human
cagccugaccaacauggauaaaucccaucucu

SEQ ID NO: 86332 - RNA, 32 nt, Human
cagccugaccaacauggauuaacccugucucu

SEQ ID NO: 86333 - RNA, 32 nt, Human
cagccugaccaacauggcaaaaccccgucugu

SEQ ID NO: 86334 - RNA, 32 nt, Human
cagccugaccaacauggcaaaacccugucucu

SEQ ID NO: 86335 - RNA, 32 nt, Human
cagccugaccaacauggcgaaaccccaucucu

SEQ ID NO: 86336 - RNA, 32 nt, Human
cagccugaccaacauggcgaaaccccauuucu

SEQ ID NO: 86337 - RNA, 32 nt, Human
cagccugaccaacauggcgaaaccccgucucu

SEQ ID NO: 86338 - RNA, 32 nt, Human
cagccugaccaacauggggauaccccgucucu

SEQ ID NO: 86339 - RNA, 32 nt, Human
cagccugaccaacaugguaaaaccacaucucu

SEQ ID NO: 86340 - RNA, 32 nt, Human
cagccugaccaacauggugaaaaccccaucuc

SEQ ID NO: 86341 - RNA, 32 nt, Human
cagccugaccaacauggugaaacaccaucucu

SEQ ID NO: 86342 - RNA, 32 nt, Human
cagccugaccaacauggugaaacacugucucu

SEQ ID NO: 86343 - RNA, 32 nt, Human
cagccugaccaacauggugaaaccccaucucu

SEQ ID NO: 86344 - RNA, 32 nt, Human
cagccugaccaacauggugaaaccccaucugu

SEQ ID NO: 86345 - RNA, 32 nt, Human
cagccugaccaacauggugaaaccccauuucu

SEQ ID NO: 86346 - RNA, 32 nt, Human
cagccugaccaacauggugaaaccccgucucu

SEQ ID NO: 86347 - RNA, 32 nt, Human
cagccugaccaacauggugaaaccccgucuuu

SEQ ID NO: 86348 - RNA, 32 nt, Human
cagccugaccaacauggugaaaccccgugucu

SEQ ID NO: 86349 - RNA, 32 nt, Human
cagccugaccaacauggugaaaccccguuucu

SEQ ID NO: 86350 - RNA, 32 nt, Human
cagccugaccaacauggugaaaccccuucucu

SEQ ID NO: 86351 - RNA, 32 nt, Human
cagccugaccaacauggugaaacccuacuaaa

SEQ ID NO: 86352 - RNA, 32 nt, Human
cagccugaccaacauggugaaacccugucucu

SEQ ID NO: 86353 - RNA, 32 nt, Human
cagccugaccaacauggugaaacccuguuucu

SEQ ID NO: 86354 - RNA, 32 nt, Human
cagccugaccaacauggugaaaccucaacucu

SEQ ID NO: 86355 - RNA, 32 nt, Human
cagccugaccaacauggugaaaccucaucucu

SEQ ID NO: 86356 - RNA, 32 nt, Human
cagccugaccaacauggugaaaccucgucucu

SEQ ID NO: 86357 - RNA, 32 nt, Human
cagccugaccaacauggugaaacgccaucucu

SEQ ID NO: 86358 - RNA, 32 nt, Human
cagccugaccaacauggugaaacuccaucucu

SEQ ID NO: 86359 - RNA, 32 nt, Human
cagccugaccaacauggugaaagcccguuucu

SEQ ID NO: 86360 - RNA, 32 nt, Human
cagccugaccaacauggugaaauauacaaaaa

SEQ ID NO: 86361 - RNA, 32 nt, Human
cagccugaccaacauggugaaauccagucucu

SEQ ID NO: 86362 - RNA, 32 nt, Human
cagccugaccaacauggugaaaucccgucucu

SEQ ID NO: 86363 - RNA, 32 nt, Human
cagccugaccaacauggugaaauccugucucu

SEQ ID NO: 86364 - RNA, 32 nt, Human
cagccugaccaacauggugaaaugaaacccca

SEQ ID NO: 86365 - RNA, 32 nt, Human
cagccugaccaacauggugagacccugucucu

SEQ ID NO: 86366 - RNA, 32 nt, Human
cagccugaccaacaugucgaaaucccgucucu

SEQ ID NO: 86367 - RNA, 32 nt, Human
cagccugaccaaccuggagaaaccccgucucu

SEQ ID NO: 86368 - RNA, 32 nt, Human
cagccugaccaacguggagaaacacuaucucu

SEQ ID NO: 86369 - RNA, 32 nt, Human
cagccugaccaacguggagaaaccccaucucu

SEQ ID NO: 86370 - RNA, 32 nt, Human
cagccugaccaacguggagaaaccccgucucu

SEQ ID NO: 86371 - RNA, 32 nt, Human
cagccugaccaacguggagaaaccucgucucu

SEQ ID NO: 86372 - RNA, 32 nt, Human
cagccugaccaacguggagaaacuccgucucc

SEQ ID NO: 86373 - RNA, 32 nt, Human
cagccugaccaacguggagaaaugccaucucu

SEQ ID NO: 86374 - RNA, 32 nt, Human
cagccugaccaacguggcgaaaccucgucucu

SEQ ID NO: 86375 - RNA, 32 nt, Human
cagccugaccaacguggugaaaccccaucucu

SEQ ID NO: 86376 - RNA, 32 nt, Human
cagccugaccaacguggugaaaccccgucucu

SEQ ID NO: 86377 - RNA, 32 nt, Human
cagccugaccaacguggugaaacccugucucu

SEQ ID NO: 86378 - RNA, 32 nt, Human
cagccugaccaacguggugaaacuccgucucu

SEQ ID NO: 86379 - RNA, 32 nt, Human
cagccugaccaagguggugaaaccccaucucu

SEQ ID NO: 86380 - RNA, 32 nt, Human
cagccugaccaauaugaugaaaccccgucucu

SEQ ID NO: 86381 - RNA, 32 nt, Human
cagccugaccaauauggagaaaucucgccuuu

SEQ ID NO: 86382 - RNA, 32 nt, Human
cagccugaccaauauggugaaaccccaucucu

SEQ ID NO: 86383 - RNA, 32 nt, Human
cagccugaccaauauggugaaaccccgucucu

SEQ ID NO: 86384 - RNA, 32 nt, Human
cagccugaccaauauggugaaaccccuucucu

SEQ ID NO: 86385 - RNA, 32 nt, Human
cagccugaccaccauggagaaaccccgucucu

SEQ ID NO: 86386 - RNA, 32 nt, Human
cagccugaccagcguggagaaacucugucucu

SEQ ID NO: 86387 - RNA, 32 nt, Human
cagccugacccacauggagaaacgccaucucu

SEQ ID NO: 86388 - RNA, 32 nt, Human
cagccugaccgacauggagaaaccccaucucu

SEQ ID NO: 86389 - RNA, 32 nt, Human
cagccugaccgacauggagaaaccucgucucu

SEQ ID NO: 86390 - RNA, 32 nt, Human
cagccugacgaacauggugaaaccccaccugu

SEQ ID NO: 86391 - RNA, 20 nt, Human
cagccugacgacaaagcgag

SEQ ID NO: 86392 - RNA, 32 nt, Human
cagccugacuaacacagugaaaccccgacucu

SEQ ID NO: 86393 - RNA, 32 nt, Human
cagccugacuaacauggagaaacccugucucu

SEQ ID NO: 86394 - RNA, 32 nt, Human
cagccugacuccugccuguagcuccugugucc

SEQ ID NO: 86395 - RNA, 17 nt, Human
cagccugacucuccaca

SEQ ID NO: 86396 - RNA, 32 nt, Human
cagccugacucuucccuuccccucucucauuc

SEQ ID NO: 86397 - RNA, 31 nt, Human
cagccugacugucucccuuucucuaccagac

SEQ ID NO: 86398 - RNA, 32 nt, Human
cagccugagaaccucaaggaggaccuggucua

SEQ ID NO: 86399 - RNA, 21 nt, Human
cagccugagcaacaaaagcaa

SEQ ID NO: 86400 - RNA, 21 nt, Human
cagccugagcaacaaagcaag

SEQ ID NO: 86401 - RNA, 21 nt, Human
cagccugagcaacaagagcga

SEQ ID NO: 86402 - RNA, 20 nt, Human
cagccugagcaacagagcaa

SEQ ID NO: 86403 - RNA, 21 nt, Human
cagccugagcaacagagcaag

SEQ ID NO: 86404 - RNA, 21 nt, Human
cagccugagcaacagagccgg

SEQ ID NO: 86405 - RNA, 21 nt, Human
cagccugagcaacagagcgag

SEQ ID NO: 86406 - RNA, 20 nt, Human
cagccugagcaacagaguga

SEQ ID NO: 86407 - RNA, 21 nt, Human
cagccugagcaacagagugag

SEQ ID NO: 86408 - RNA, 22 nt, Human
cagccugagcaacagagugaga

SEQ ID NO: 86409 - RNA, 20 nt, Human
cagccugagcaacauagcaa

SEQ ID NO: 86410 - RNA, 32 nt, Human
cagccugagcaacauaucaaaaccccaucucu

SEQ ID NO: 86411 - RNA, 32 nt, Human
cagccugagcaacauggcgaaaccccgucucu

SEQ ID NO: 86412 - RNA, 32 nt, Human
cagccugagcaacauggcgaaaccucauaucu

SEQ ID NO: 86413 - RNA, 32 nt, Human
cagccugagcaacaugguaaaaccccaucucu

SEQ ID NO: 86414 - RNA, 32 nt, Human
cagccugagcaacauggugaaacccugucucu

SEQ ID NO: 86415 - RNA, 19 nt, Human
cagccugagcaauggcagg

SEQ ID NO: 86416 - RNA, 32 nt, Human
cagccugagcaauguggugaaaccccaucucu

SEQ ID NO: 86417 - RNA, 32 nt, Human
cagccugagcaugagaggaagaggucagccuc

SEQ ID NO: 86418 - RNA, 32 nt, Human
cagccugagccagucccagcugugcuuggagu

SEQ ID NO: 86419 - RNA, 32 nt, Human
cagccugagccccagcccacaugccacucagg

SEQ ID NO: 86420 - RNA, 19 nt, Human
cagccugagccucuucgca

SEQ ID NO: 86421 - RNA, 32 nt, Human
cagccugagccuggcccagccucggcugccag

SEQ ID NO: 86422 - RNA, 21 nt, Human
cagccugagcgacagagcaag

SEQ ID NO: 86423 - RNA, 21 nt, Human
cagccugagcgacagaguaag

SEQ ID NO: 86424 - RNA, 22 nt, Human
cagccugagcgacagagugaga

SEQ ID NO: 86425 - RNA, 21 nt, Human
cagccugagcggcugugcuca

SEQ ID NO: 86426 - RNA, 21 nt, Human
cagccugagcuacagagcaag

SEQ ID NO: 86427 - RNA, 32 nt, Human
cagccugagcuugcugcccuccaguagagaca

SEQ ID NO: 86428 - RNA, 19 nt, Human
cagccugaggaggccgggg

SEQ ID NO: 86429 - RNA, 20 nt, Human
cagccugaggucuccuucgc

SEQ ID NO: 86430 - RNA, 32 nt, Human
cagccugagguguguccugggcuccucagagc

SEQ ID NO: 86431 - RNA, 32 nt, Human
cagccugaguagcugggacuacaggugugugc

SEQ ID NO: 86432 - RNA, 32 nt, Human
cagccugaguagcugggaugggacuacagaug

SEQ ID NO: 86433 - RNA, 22 nt, Human
cagccugagugacagaacaagg

SEQ ID NO: 86434 - RNA, 22 nt, Human
cagccugagugacagaaugaga

SEQ ID NO: 86435 - RNA, 21 nt, Human
cagccugagugacagagcgag

SEQ ID NO: 86436 - RNA, 22 nt, Human
cagccugagugacagagcgaga

SEQ ID NO: 86437 - RNA, 22 nt, Human
cagccugagugacagagugaga

SEQ ID NO: 86438 - RNA, 22 nt, Human
cagccugagugauagagugaga

SEQ ID NO: 86439 - RNA, 32 nt, Human
cagccugagugcaaccugacucucugcaucug

SEQ ID NO: 86440 - RNA, 32 nt, Human
cagccugauaagaggagacuugagagcuugcu

SEQ ID NO: 86441 - RNA, 32 nt, Human
cagccugaucaacauggugaaaccccgucucu

SEQ ID NO: 86442 - RNA, 32 nt, Human
cagccugaucaacauggugaaaccccgucuuu

SEQ ID NO: 86443 - RNA, 32 nt, Human
cagccugaucggcauggugaaaccccguuucu

SEQ ID NO: 86444 - RNA, 32 nt, Human
cagccugaucugcaccugcuccagggagagag

SEQ ID NO: 86445 - RNA, 32 nt, Human
cagccugaugaacauggagaaaccccgucucu

SEQ ID NO: 86446 - RNA, 20 nt, Human
cagccugaugacagagcaag

SEQ ID NO: 86447 - RNA, 32 nt, Human
cagccugcacacaccugccugcagagcaggaa

SEQ ID NO: 86448 - RNA, 32 nt, Human
cagccugcacaguagagugaggcugccucucc

SEQ ID NO: 86449 - RNA, 32 nt, Human
cagccugcacccucuucucuucuggcuucccu

SEQ ID NO: 86450 - RNA, 32 nt, Human
cagccugcagagccacagucagccugcccaca

SEQ ID NO: 86451 - RNA, 32 nt, Human
cagccugcagaggauacagcuuuccauguggc

SEQ ID NO: 86452 - RNA, 32 nt, Human
cagccugcagcacaccccacagccaaguagag

SEQ ID NO: 86453 - RNA, 32 nt, Human
cagccugcagcagaggagggcacggcagcaga

SEQ ID NO: 86454 - RNA, 32 nt, Human
cagccugcaggcuggggacccugggugcaggu

SEQ ID NO: 86455 - RNA, 32 nt, Human
cagccugcaguaccucuaccuccaggagaaca

SEQ ID NO: 86456 - RNA, 32 nt, Human
cagccugcagugagcggugacgccgccuggcu

SEQ ID NO: 86457 - RNA, 24 nt, Human
cagccugcauagccucuguccuca

SEQ ID NO: 86458 - RNA, 32 nt, Human
cagccugcaucccuucgccugcagccuacuuu

SEQ ID NO: 86459 - RNA, 32 nt, Human
cagccugccaaguagcuggauuacaggcacgu

SEQ ID NO: 86460 - RNA, 32 nt, Human
cagccugccacuucuggcauuuccuguaaguc

SEQ ID NO: 86461 - RNA, 32 nt, Human
cagccugccagacccucuuacagacaagguua

SEQ ID NO: 86462 - RNA, 32 nt, Human
cagccugccagcucuggcuggucagagacaag

SEQ ID NO: 86463 - RNA, 17 nt, Human
cagccugccaggccagg

SEQ ID NO: 86464 - RNA, 32 nt, Human
cagccugccagucugucauugucagggaccag

SEQ ID NO: 86465 - RNA, 32 nt, Human
cagccugcccaacauggugaaaccccaucugg

SEQ ID NO: 86466 - RNA, 32 nt, Human
cagccugcccaacauggugaaacccugucucu

SEQ ID NO: 86467 - RNA, 32 nt, Human
cagccugcccaacauggugaaaccucgucucu

SEQ ID NO: 86468 - RNA, 32 nt, Human
cagccugcccacuacauccagccuguggcuuu

SEQ ID NO: 86469 - RNA, 32 nt, Human
cagccugccccaauucccccagccccugcucc

SEQ ID NO: 86470 - RNA, 32 nt, Human
cagccugccccugagccuucugcuccaaggaa

SEQ ID NO: 86471 - RNA, 23 nt, Human
cagccugcccgcgccucccgccc

SEQ ID NO: 86472 - RNA, 22 nt, Human
cagccugcccucaagccaagga

SEQ ID NO: 86473 - RNA, 32 nt, Human
cagccugcccuucacaauuccccuugugcaca

SEQ ID NO: 86474 - RNA, 19 nt, Human
cagccugcccuucauccuc

SEQ ID NO: 86475 - RNA, 32 nt, Human
cagccugcccuugccagugccugggccgcugg

SEQ ID NO: 86476 - RNA, 32 nt, Human
cagccugcccuuggggagaugagggagcccug

SEQ ID NO: 86477 - RNA, 25 nt, Human
cagccugccgcccagcaugcaggug

SEQ ID NO: 86478 - RNA, 32 nt, Human
cagccugccgcccagcaugcagguggccucgc

SEQ ID NO: 86479 - RNA, 32 nt, Human
cagccugccgcugccagcaaccucccacugcu

SEQ ID NO: 86480 - RNA, 19 nt, Human
cagccugccggccaggcga

SEQ ID NO: 86481 - RNA, 19 nt, Human
cagccugccucaccaggga

SEQ ID NO: 86482 - RNA, 21 nt, Human
cagccugccucccuccugccc

SEQ ID NO: 86483 - RNA, 24 nt, Human
cagccugccuccuggccucaggau

SEQ ID NO: 86484 - RNA, 32 nt, Human
cagccugccugaggcuucucuccuggggcagg

SEQ ID NO: 86485 - RNA, 32 nt, Human
cagccugccugccugccugccugcccgcccag

SEQ ID NO: 86486 - RNA, 18 nt, Human
cagccugccuggcaggcu

SEQ ID NO: 86487 - RNA, 20 nt, Human
cagccugccugggccagccu

SEQ ID NO: 86488 - RNA, 21 nt, Human
cagccugccuguucccccgca

SEQ ID NO: 86489 - RNA, 21 nt, Human
cagccugcgcaacagagcgag

SEQ ID NO: 86490 - RNA, 21 nt, Human
cagccugcgcgcgccgcgccc

SEQ ID NO: 86491 - RNA, 32 nt, Human
cagccugcggaggcggggacuugggugucggc

SEQ ID NO: 86492 - RNA, 17 nt, Human
cagccugcggccagggg

SEQ ID NO: 86493 - RNA, 22 nt, Human
cagccugcgggacagagugaga

SEQ ID NO: 86494 - RNA, 32 nt, Human
cagccugcuaggggcugaauucugacucagcc

SEQ ID NO: 86495 - RNA, 32 nt, Human
cagccugcucagaauuuguuagcaauaauuaa

SEQ ID NO: 86496 - RNA, 21 nt, Human
cagccugcucccccauccaca

SEQ ID NO: 86497 - RNA, 32 nt, Human
cagccugcugugcccacacacacccacuaagg

SEQ ID NO: 86498 - RNA, 32 nt, Human
cagccugcuguuaacaacacaggccaguauug

SEQ ID NO: 86499 - RNA, 32 nt, Human
cagccugcuucuuccccucugcggcuuucacu

SEQ ID NO: 86500 - RNA, 32 nt, Human
cagccugcuugugugggcucuggccuggccug

SEQ ID NO: 86501 - RNA, 22 nt, Human
cagccuggaaaacggagugaga

SEQ ID NO: 86502 - RNA, 32 nt, Human
cagccuggaaagcagaaaacucucaugauuuc

SEQ ID NO: 86503 - RNA, 24 nt, Human
cagccuggaagaccgugccugccc

SEQ ID NO: 86504 - RNA, 32 nt, Human
cagccuggaagccacagccauggcaggccccc

SEQ ID NO: 86505 - RNA, 32 nt, Human
cagccuggaagccacaggcauccggccuugcc

SEQ ID NO: 86506 - RNA, 32 nt, Human
cagccuggaaggagagggugagugggggaugg

SEQ ID NO: 86507 - RNA, 32 nt, Human
cagccuggaaucgggaggaggggccggcaccc

SEQ ID NO: 86508 - RNA, 22 nt, Human
cagccuggacaacaagagcaag

SEQ ID NO: 86509 - RNA, 21 nt, Human
cagccuggacaacagagcaag

SEQ ID NO: 86510 - RNA, 21 nt, Human
cagccuggacaacagagcgag

SEQ ID NO: 86511 - RNA, 22 nt, Human
cagccuggacaacagagcgaga

SEQ ID NO: 86512 - RNA, 21 nt, Human
cagccuggacaacagagcuag

SEQ ID NO: 86513 - RNA, 22 nt, Human
cagccuggacaacagagggaga

SEQ ID NO: 86514 - RNA, 22 nt, Human
cagccuggacaacagagugaga

SEQ ID NO: 86515 - RNA, 22 nt, Human
cagccuggacaacagaguggga

SEQ ID NO: 86516 - RNA, 32 nt, Human
cagccuggacaacauggugaaaccccaucucu

SEQ ID NO: 86517 - RNA, 32 nt, Human
cagccuggacaacauggugaaaccccgucucu

SEQ ID NO: 86518 - RNA, 32 nt, Human
cagccuggacaacauggugaaaccccuucucu

SEQ ID NO: 86519 - RNA, 32 nt, Human
cagccuggacaacauggugaaacccuaucucu

SEQ ID NO: 86520 - RNA, 22 nt, Human
cagccuggacaacggagugaga

SEQ ID NO: 86521 - RNA, 32 nt, Human
cagccuggacaaucuggcgaaaccccauuucc

SEQ ID NO: 86522 - RNA, 32 nt, Human
cagccuggacagcccucuaaacucccuuacag

SEQ ID NO: 86523 - RNA, 32 nt, Human
cagccuggaccugccaagcugccugugcacug

SEQ ID NO: 86524 - RNA, 32 nt, Human
cagccuggaccuggcccggguuguggagggga

SEQ ID NO: 86525 - RNA, 21 nt, Human
cagccuggacgacagagcaag

SEQ ID NO: 86526 - RNA, 22 nt, Human
cagccuggacgacagagcaaga

SEQ ID NO: 86527 - RNA, 22 nt, Human
cagccuggacgacagagugaga

SEQ ID NO: 86528 - RNA, 22 nt, Human
cagccuggacgacugagugaga

SEQ ID NO: 86529 - RNA, 32 nt, Human
cagccuggacggccauggcaggaagcuuuuag

SEQ ID NO: 86530 - RNA, 32 nt, Human
cagccuggagaugucagcgcucuggggccuac

SEQ ID NO: 86531 - RNA, 23 nt, Human
cagccuggagcccuggcccagcc

SEQ ID NO: 86532 - RNA, 22 nt, Human
cagccuggaggccagagugaga

SEQ ID NO: 86533 - RNA, 32 nt, Human
cagccuggaguuuccggcugugccugcagcug

SEQ ID NO: 86534 - RNA, 21 nt, Human
cagccuggauaacagagcgag

SEQ ID NO: 86535 - RNA, 22 nt, Human
cagccuggauaacagagcgaga

SEQ ID NO: 86536 - RNA, 22 nt, Human
cagccuggauaauagagugaga

SEQ ID NO: 86537 - RNA, 22 nt, Human
cagccuggauccugcuuucaca

SEQ ID NO: 86538 - RNA, 23 nt, Human
cagccuggaugaaaucaucccca

SEQ ID NO: 86539 - RNA, 21 nt, Human
cagccuggaugacaagcaaga

SEQ ID NO: 86540 - RNA, 22 nt, Human
cagccuggaugacagagcgaga

SEQ ID NO: 86541 - RNA, 20 nt, Human
cagccuggaugacagaguga

SEQ ID NO: 86542 - RNA, 22 nt, Human
cagccuggaugacagagugaga

SEQ ID NO: 86543 - RNA, 32 nt, Human
cagccuggauggacaggagagguuucucuuuu

SEQ ID NO: 86544 - RNA, 22 nt, Human
cagccuggauggccaucccaca

SEQ ID NO: 86545 - RNA, 32 nt, Human
cagccuggcaaacauggcgaaaccccaucuua

SEQ ID NO: 86546 - RNA, 32 nt, Human
cagccuggcaaacauggugaaaccccgucugu

SEQ ID NO: 86547 - RNA, 20 nt, Human
cagccuggcaacagagcaag

SEQ ID NO: 86548 - RNA, 21 nt, Human
cagccuggcaacagagcaagg

SEQ ID NO: 86549 - RNA, 20 nt, Human
cagccuggcaacagagcgag

SEQ ID NO: 86550 - RNA, 21 nt, Human
cagccuggcaacagagcgaga

SEQ ID NO: 86551 - RNA, 21 nt, Human
cagccuggcaacagagugaga

SEQ ID NO: 86552 - RNA, 23 nt, Human
cagccuggcacaggcuacagggg

SEQ ID NO: 86553 - RNA, 20 nt, Human
cagccuggcaccaggagcag

SEQ ID NO: 86554 - RNA, 32 nt, Human
cagccuggcagccucuggacagagaggaagga

SEQ ID NO: 86555 - RNA, 32 nt, Human
cagccuggcaggagugggaagcaacacgcagg

SEQ ID NO: 86556 - RNA, 18 nt, Human
cagccuggcagguggccu

SEQ ID NO: 86557 - RNA, 32 nt, Human
cagccuggccaacaaggugaaaccccaucucu

SEQ ID NO: 86558 - RNA, 32 nt, Human
cagccuggccaacaaggugaaaccccgucucu

SEQ ID NO: 86559 - RNA, 32 nt, Human
cagccuggccaacacagugaaaccccaucucu

SEQ ID NO: 86560 - RNA, 32 nt, Human
cagccuggccaacacgaugaaaccccgucucu

SEQ ID NO: 86561 - RNA, 19 nt, Human
cagccuggccaacacggug

SEQ ID NO: 86562 - RNA, 22 nt, Human
cagccuggccaacacggugaaa

SEQ ID NO: 86563 - RNA, 32 nt, Human
cagccuggccaacacggugaaaccccaucucu

SEQ ID NO: 86564 - RNA, 32 nt, Human
cagccuggccaacacggugaaaccccgacucu

SEQ ID NO: 86565 - RNA, 32 nt, Human
cagccuggccaacacggugaaaccccgccucu

SEQ ID NO: 86566 - RNA, 32 nt, Human
cagccuggccaacacggugaaaccccgucacu

SEQ ID NO: 86567 - RNA, 32 nt, Human
cagccuggccaacacggugaaaccccgucucu

SEQ ID NO: 86568 - RNA, 32 nt, Human
cagccuggccaacagggugaaaccccgucucu

SEQ ID NO: 86569 - RNA, 32 nt, Human
cagccuggccaacauaaugaaaccccaucucu

SEQ ID NO: 86570 - RNA, 32 nt, Human
cagccuggccaacauagcaaaaccccaucucu

SEQ ID NO: 86571 - RNA, 32 nt, Human
cagccuggccaacauagugaaaccccaucucu

SEQ ID NO: 86572 - RNA, 32 nt, Human
cagccuggccaacauagugaaacccccucucu

SEQ ID NO: 86573 - RNA, 32 nt, Human
cagccuggccaacauagugaaaccccgccucu

SEQ ID NO: 86574 - RNA, 32 nt, Human
cagccuggccaacauagugaaaccccgucucu

SEQ ID NO: 86575 - RNA, 32 nt, Human
cagccuggccaacauagugaaaccccgugucu

SEQ ID NO: 86576 - RNA, 32 nt, Human
cagccuggccaacauagugaaaccccuucucu

SEQ ID NO: 86577 - RNA, 32 nt, Human
cagccuggccaacaugacaaaaccccgucucu

SEQ ID NO: 86578 - RNA, 32 nt, Human
cagccuggccaacaugacgaaaccccaucucu

SEQ ID NO: 86579 - RNA, 32 nt, Human
cagccuggccaacaugacgaaacccggucucu

SEQ ID NO: 86580 - RNA, 22 nt, Human
cagccuggccaacaugaugaaa

SEQ ID NO: 86581 - RNA, 32 nt, Human
cagccuggccaacaugaugaaaccccaucucc

SEQ ID NO: 86582 - RNA, 32 nt, Human
cagccuggccaacaugaugaaaccccaucucu

SEQ ID NO: 86583 - RNA, 32 nt, Human
cagccuggccaacaugaugaaaccccgucucu

SEQ ID NO: 86584 - RNA, 32 nt, Human
cagccuggccaacaugaugaaaccccguuucu

SEQ ID NO: 86585 - RNA, 32 nt, Human
cagccuggccaacaugaugaaacccugucucu

SEQ ID NO: 86586 - RNA, 32 nt, Human
cagccuggccaacaugaugaaacccuguucuc

SEQ ID NO: 86587 - RNA, 32 nt, Human
cagccuggccaacaugaugaaacccuugucuc

SEQ ID NO: 86588 - RNA, 32 nt, Human
cagccuggccaacaugaugaaaccuuaucucu

SEQ ID NO: 86589 - RNA, 32 nt, Human
cagccuggccaacaugaugagaccuccgucuc

SEQ ID NO: 86590 - RNA, 32 nt, Human
cagccuggccaacaugcaaaaccccgucucca

SEQ ID NO: 86591 - RNA, 32 nt, Human
cagccuggccaacaugccgaaacccugucugu

SEQ ID NO: 86592 - RNA, 32 nt, Human
cagccuggccaacaugcugaaacccugucugu

SEQ ID NO: 86593 - RNA, 32 nt, Human
cagccuggccaacaugcugaaaccucgucucu

SEQ ID NO: 86594 - RNA, 32 nt, Human
cagccuggccaacauggaaaaacccugucucu

SEQ ID NO: 86595 - RNA, 32 nt, Human
cagccuggccaacauggagaaaccccaucucu

SEQ ID NO: 86596 - RNA, 32 nt, Human
cagccuggccaacauggagaaaccccaucuuu

SEQ ID NO: 86597 - RNA, 32 nt, Human
cagccuggccaacauggagaaaccccgucucu

SEQ ID NO: 86598 - RNA, 32 nt, Human
cagccuggccaacauggagaaaccccgugacu

SEQ ID NO: 86599 - RNA, 32 nt, Human
cagccuggccaacauggagaaaccccuaaaaa

SEQ ID NO: 86600 - RNA, 32 nt, Human
cagccuggccaacauggagaaacccugucuca

SEQ ID NO: 86601 - RNA, 32 nt, Human
cagccuggccaacauggcaaaaccacaucucu

SEQ ID NO: 86602 - RNA, 32 nt, Human
cagccuggccaacauggcaaaaccccaucacu

SEQ ID NO: 86603 - RNA, 32 nt, Human
cagccuggccaacauggcaaaaccccaucucu

SEQ ID NO: 86604 - RNA, 32 nt, Human
cagccuggccaacauggcaaaaccccaucugu

SEQ ID NO: 86605 - RNA, 32 nt, Human
cagccuggccaacauggcaaaaccccaucuuu

SEQ ID NO: 86606 - RNA, 32 nt, Human
cagccuggccaacauggcaaaacccccgucuc

SEQ ID NO: 86607 - RNA, 32 nt, Human
cagccuggccaacauggcaaaaccccgucucu

SEQ ID NO: 86608 - RNA, 32 nt, Human
cagccuggccaacauggcaaaaccccgucugu

SEQ ID NO: 86609 - RNA, 32 nt, Human
cagccuggccaacauggcaaaaccccuuauuu

SEQ ID NO: 86610 - RNA, 32 nt, Human
cagccuggccaacauggcaaaaccccuucucu

SEQ ID NO: 86611 - RNA, 32 nt, Human
cagccuggccaacauggcaaaacccgucucua

SEQ ID NO: 86612 - RNA, 32 nt, Human
cagccuggccaacauggcaaaacccuaucucu

SEQ ID NO: 86613 - RNA, 32 nt, Human
cagccuggccaacauggcaaaacccugccucu

SEQ ID NO: 86614 - RNA, 32 nt, Human
cagccuggccaacauggcaaaacccuguaucu

SEQ ID NO: 86615 - RNA, 32 nt, Human
cagccuggccaacauggcaaaacccugucgcu

SEQ ID NO: 86616 - RNA, 32 nt, Human
cagccuggccaacauggcaaaacccugucuac

SEQ ID NO: 86617 - RNA, 32 nt, Human
cagccuggccaacauggcaaaacccugucucu

SEQ ID NO: 86618 - RNA, 32 nt, Human
cagccuggccaacauggcaaaaccucaucucu

SEQ ID NO: 86619 - RNA, 32 nt, Human
cagccuggccaacauggcaaaaucccaucucu

SEQ ID NO: 86620 - RNA, 32 nt, Human
cagccuggccaacauggcaaaaucccgucucu

SEQ ID NO: 86621 - RNA, 32 nt, Human
cagccuggccaacauggcaagaccccaucucu

SEQ ID NO: 86622 - RNA, 32 nt, Human
cagccuggccaacauggcagaaaccccaucuc

SEQ ID NO: 86623 - RNA, 32 nt, Human
cagccuggccaacauggcgaaaacccaucucu

SEQ ID NO: 86624 - RNA, 32 nt, Human
cagccuggccaacauggcgaaacaccugucuc

SEQ ID NO: 86625 - RNA, 32 nt, Human
cagccuggccaacauggcgaaaccccaucucu

SEQ ID NO: 86626 - RNA, 32 nt, Human
cagccuggccaacauggcgaaaccccauuucu

SEQ ID NO: 86627 - RNA, 32 nt, Human
cagccuggccaacauggcgaaaccccgucucu

SEQ ID NO: 86628 - RNA, 32 nt, Human
cagccuggccaacauggcgaaaccccucucua

SEQ ID NO: 86629 - RNA, 32 nt, Human
cagccuggccaacauggcgaaaccccuucucu

SEQ ID NO: 86630 - RNA, 32 nt, Human
cagccuggccaacauggcgaaacccuaucucu

SEQ ID NO: 86631 - RNA, 32 nt, Human
cagccuggccaacauggcgaaacccugucucu

SEQ ID NO: 86632 - RNA, 32 nt, Human
cagccuggccaacauggcgaaacccugucugu

SEQ ID NO: 86633 - RNA, 32 nt, Human
cagccuggccaacauggcgaaaccucaucucu

SEQ ID NO: 86634 - RNA, 32 nt, Human
cagccuggccaacauggcgaaaccucgccucu

SEQ ID NO: 86635 - RNA, 32 nt, Human
cagccuggccaacauggcgaaaccucuucucu

SEQ ID NO: 86636 - RNA, 32 nt, Human
cagccuggccaacauggcgaaacuccgucacu

SEQ ID NO: 86637 - RNA, 32 nt, Human
cagccuggccaacauggcgaaaucccgucuuu

SEQ ID NO: 86638 - RNA, 32 nt, Human
cagccuggccaacauggcgaaauuccaucucu

SEQ ID NO: 86639 - RNA, 32 nt, Human
cagccuggccaacauggcgagaccccaucucu

SEQ ID NO: 86640 - RNA, 32 nt, Human
cagccuggccaacauggcggaaccccaucucc

SEQ ID NO: 86641 - RNA, 32 nt, Human
cagccuggccaacauggcggaacccugucucu

SEQ ID NO: 86642 - RNA, 32 nt, Human
cagccuggccaacauggggaaaccccaucucu

SEQ ID NO: 86643 - RNA, 32 nt, Human
cagccuggccaacauggggaaaccccgucucu

SEQ ID NO: 86644 - RNA, 32 nt, Human
cagccuggccaacauggggaaacccugucuuu

SEQ ID NO: 86645 - RNA, 32 nt, Human
cagccuggccaacauggggaaaucccaucucu

SEQ ID NO: 86646 - RNA, 32 nt, Human
cagccuggccaacaugguaaaaccccaucucu

SEQ ID NO: 86647 - RNA, 32 nt, Human
cagccuggccaacaugguaaaaccccauuucu

SEQ ID NO: 86648 - RNA, 32 nt, Human
cagccuggccaacaugguaaaaccccgucucu

SEQ ID NO: 86649 - RNA, 32 nt, Human
cagccuggccaacaugguaaaacccugucucu

SEQ ID NO: 86650 - RNA, 32 nt, Human
cagccuggccaacaugguaaaacuccauuucu

SEQ ID NO: 86651 - RNA, 32 nt, Human
cagccuggccaacaugguaaaaucccgucucu

SEQ ID NO: 86652 - RNA, 22 nt, Human
cagccuggccaacauggugaaa

SEQ ID NO: 86653 - RNA, 32 nt, Human
cagccuggccaacauggugaaaacccaucucu

SEQ ID NO: 86654 - RNA, 23 nt, Human
cagccuggccaacauggugaaac

SEQ ID NO: 86655 - RNA, 32 nt, Human
cagccuggccaacauggugaaacaccgucucc

SEQ ID NO: 86656 - RNA, 32 nt, Human
cagccuggccaacauggugaaacccagucucu

SEQ ID NO: 86657 - RNA, 32 nt, Human
cagccuggccaacauggugaaacccagucuuu

SEQ ID NO: 86658 - RNA, 32 nt, Human
cagccuggccaacauggugaaaccccaccucu

SEQ ID NO: 86659 - RNA, 32 nt, Human
cagccuggccaacauggugaaaccccauaucc

SEQ ID NO: 86660 - RNA, 32 nt, Human
cagccuggccaacauggugaaaccccauccuu

SEQ ID NO: 86661 - RNA, 32 nt, Human
cagccuggccaacauggugaaaccccaucgcu

SEQ ID NO: 86662 - RNA, 32 nt, Human
cagccuggccaacauggugaaaccccaucucc

SEQ ID NO: 86663 - RNA, 32 nt, Human
cagccuggccaacauggugaaaccccaucucu

SEQ ID NO: 86664 - RNA, 32 nt, Human
cagccuggccaacauggugaaaccccaucugu

SEQ ID NO: 86665 - RNA, 32 nt, Human
cagccuggccaacauggugaaaccccaucuuu

SEQ ID NO: 86666 - RNA, 32 nt, Human
cagccuggccaacauggugaaaccccauuucu

SEQ ID NO: 86667 - RNA, 32 nt, Human
cagccuggccaacauggugaaacccccaucuc

SEQ ID NO: 86668 - RNA, 32 nt, Human
cagccuggccaacauggugaaacccccucucu

SEQ ID NO: 86669 - RNA, 32 nt, Human
cagccuggccaacauggugaaaccccgucacu

SEQ ID NO: 86670 - RNA, 32 nt, Human
cagccuggccaacauggugaaaccccgucuau

SEQ ID NO: 86671 - RNA, 32 nt, Human
cagccuggccaacauggugaaaccccgucucc

SEQ ID NO: 86672 - RNA, 32 nt, Human
cagccuggccaacauggugaaaccccgucucu

SEQ ID NO: 86673 - RNA, 32 nt, Human
cagccuggccaacauggugaaaccccguuucu

SEQ ID NO: 86674 - RNA, 32 nt, Human
cagccuggccaacauggugaaaccccuucucu

SEQ ID NO: 86675 - RNA, 32 nt, Human
cagccuggccaacauggugaaacccgcugucu

SEQ ID NO: 86676 - RNA, 32 nt, Human
cagccuggccaacauggugaaacccggucucu

SEQ ID NO: 86677 - RNA, 32 nt, Human
cagccuggccaacauggugaaacccgucucua

SEQ ID NO: 86678 - RNA, 32 nt, Human
cagccuggccaacauggugaaacccuaucucc

SEQ ID NO: 86679 - RNA, 32 nt, Human
cagccuggccaacauggugaaacccuaucucu

SEQ ID NO: 86680 - RNA, 32 nt, Human
cagccuggccaacauggugaaacccucaucuc

SEQ ID NO: 86681 - RNA, 32 nt, Human
cagccuggccaacauggugaaacccugaaaua

SEQ ID NO: 86682 - RNA, 32 nt, Human
cagccuggccaacauggugaaacccuggcucu

SEQ ID NO: 86683 - RNA, 32 nt, Human
cagccuggccaacauggugaaacccuguaucu

SEQ ID NO: 86684 - RNA, 32 nt, Human
cagccuggccaacauggugaaacccugucgac

SEQ ID NO: 86685 - RNA, 32 nt, Human
cagccuggccaacauggugaaacccugucuac

SEQ ID NO: 86686 - RNA, 32 nt, Human
cagccuggccaacauggugaaacccugucucu

SEQ ID NO: 86687 - RNA, 32 nt, Human
cagccuggccaacauggugaaacccugucugc

SEQ ID NO: 86688 - RNA, 32 nt, Human
cagccuggccaacauggugaaacccugucugu

SEQ ID NO: 86689 - RNA, 32 nt, Human
cagccuggccaacauggugaaacccugucuuu

SEQ ID NO: 86690 - RNA, 32 nt, Human
cagccuggccaacauggugaaacccugugucu

SEQ ID NO: 86691 - RNA, 32 nt, Human
cagccuggccaacauggugaaacccuguugcu

SEQ ID NO: 86692 - RNA, 32 nt, Human
cagccuggccaacauggugaaacccuguuucu

SEQ ID NO: 86693 - RNA, 32 nt, Human
cagccuggccaacauggugaaacccuucucua

SEQ ID NO: 86694 - RNA, 32 nt, Human
cagccuggccaacauggugaaacccuuucucu

SEQ ID NO: 86695 - RNA, 32 nt, Human
cagccuggccaacauggugaaaccgcaucucu

SEQ ID NO: 86696 - RNA, 32 nt, Human
cagccuggccaacauggugaaaccucaucucu

SEQ ID NO: 86697 - RNA, 32 nt, Human
cagccuggccaacauggugaaaccucauuucu

SEQ ID NO: 86698 - RNA, 32 nt, Human
cagccuggccaacauggugaaaccuccgucuc

SEQ ID NO: 86699 - RNA, 32 nt, Human
cagccuggccaacauggugaaaccucgucucu

SEQ ID NO: 86700 - RNA, 32 nt, Human
cagccuggccaacauggugaaaccucgucugu

SEQ ID NO: 86701 - RNA, 32 nt, Human
cagccuggccaacauggugaaaccucgucuuu

SEQ ID NO: 86702 - RNA, 32 nt, Human
cagccuggccaacauggugaaaccuggccucu

SEQ ID NO: 86703 - RNA, 32 nt, Human
cagccuggccaacauggugaaaccuugucucu

SEQ ID NO: 86704 - RNA, 32 nt, Human
cagccuggccaacauggugaaacgccaucucu

SEQ ID NO: 86705 - RNA, 32 nt, Human
cagccuggccaacauggugaaacuccaucucu

SEQ ID NO: 86706 - RNA, 32 nt, Human
cagccuggccaacauggugaaacuccgucucu

SEQ ID NO: 86707 - RNA, 32 nt, Human
cagccuggccaacauggugaaacugcaucucu

SEQ ID NO: 86708 - RNA, 32 nt, Human
cagccuggccaacauggugaaaucccaucucu

SEQ ID NO: 86709 - RNA, 32 nt, Human
cagccuggccaacauggugaaauccccucucu

SEQ ID NO: 86710 - RNA, 32 nt, Human
cagccuggccaacauggugaaaucccgucucu

SEQ ID NO: 86711 - RNA, 32 nt, Human
cagccuggccaacauggugaaauccugucucu

SEQ ID NO: 86712 - RNA, 32 nt, Human
cagccuggccaacauggugaaaucucaucugu

SEQ ID NO: 86713 - RNA, 32 nt, Human
cagccuggccaacauggugaaauucugucucu

SEQ ID NO: 86714 - RNA, 32 nt, Human
cagccuggccaacauggugaaccccaucucua

SEQ ID NO: 86715 - RNA, 32 nt, Human
cagccuggccaacauggugaacccucagcucu

SEQ ID NO: 86716 - RNA, 32 nt, Human
cagccuggccaacauggugaagcccugucucu

SEQ ID NO: 86717 - RNA, 32 nt, Human
cagccuggccaacauggugaagcuccgucucu

SEQ ID NO: 86718 - RNA, 32 nt, Human
cagccuggccaacauggugaauccccgucucu

SEQ ID NO: 86719 - RNA, 32 nt, Human
cagccuggccaacauggugaauuaucucuacu

SEQ ID NO: 86720 - RNA, 32 nt, Human
cagccuggccaacauggugagacaccgucucu

SEQ ID NO: 86721 - RNA, 32 nt, Human
cagccuggccaacauggugagaccccaucucu

SEQ ID NO: 86722 - RNA, 32 nt, Human
cagccuggccaacauggugagacccugucucu

SEQ ID NO: 86723 - RNA, 32 nt, Human
cagccuggccaacaugguggaacccaaucucu

SEQ ID NO: 86724 - RNA, 32 nt, Human
cagccuggccaacaugguggaacccagucucu

SEQ ID NO: 86725 - RNA, 32 nt, Human
cagccuggccaacaugguggaacccuaucucu

SEQ ID NO: 86726 - RNA, 32 nt, Human
cagccuggccaacaugguguaaccucaucucu

SEQ ID NO: 86727 - RNA, 32 nt, Human
cagccuggccaacauggugugagaccccgucu

SEQ ID NO: 86728 - RNA, 32 nt, Human
cagccuggccaacaugguuaaaccccgucucu

SEQ ID NO: 86729 - RNA, 32 nt, Human
cagccuggccaacaugucagaacuacuaaaaa

SEQ ID NO: 86730 - RNA, 32 nt, Human
cagccuggccaacaugucgaacuccaccucua

SEQ ID NO: 86731 - RNA, 32 nt, Human
cagccuggccaacaugucgaagugccaucucu

SEQ ID NO: 86732 - RNA, 32 nt, Human
cagccuggccaacaugugaaaccccgucucca

SEQ ID NO: 86733 - RNA, 32 nt, Human
cagccuggccaacauugugaaaccccaucucu

SEQ ID NO: 86734 - RNA, 32 nt, Human
cagccuggccaacguagugaaaccccgucucu

SEQ ID NO: 86735 - RNA, 22 nt, Human
cagccuggccaacgugaugaaa

SEQ ID NO: 86736 - RNA, 32 nt, Human
cagccuggccaacgugaugaaaccccaucugu

SEQ ID NO: 86737 - RNA, 32 nt, Human
cagccuggccaacguggagaaacccugucccu

SEQ ID NO: 86738 - RNA, 32 nt, Human
cagccuggccaacguggcaaaaccccaucucu

SEQ ID NO: 86739 - RNA, 32 nt, Human
cagccuggccaacguggugaaaccccaucucu

SEQ ID NO: 86740 - RNA, 32 nt, Human
cagccuggccaacguggugaaaccccaucuuc

SEQ ID NO: 86741 - RNA, 32 nt, Human
cagccuggccaacguggugaaacccccucucu

SEQ ID NO: 86742 - RNA, 32 nt, Human
cagccuggccaacguggugaaaccccgucucc

SEQ ID NO: 86743 - RNA, 32 nt, Human
cagccuggccaacguggugaaaccccguguac

SEQ ID NO: 86744 - RNA, 21 nt, Human
cagccuggccaacugccugaa

SEQ ID NO: 86745 - RNA, 32 nt, Human
cagccuggccaacugccugaaaccccaucucu

SEQ ID NO: 86746 - RNA, 32 nt, Human
cagccuggccaacuugaugaaaccccaucucu

SEQ ID NO: 86747 - RNA, 32 nt, Human
cagccuggccaacuuggagaaaccccagcucu

SEQ ID NO: 86748 - RNA, 32 nt, Human
cagccuggccaacuuggugaaaccccaucucu

SEQ ID NO: 86749 - RNA, 32 nt, Human
cagccuggccaacuuggugaaaccccgucuuu

SEQ ID NO: 86750 - RNA, 22 nt, Human
cagccuggccaagauggugaaa

SEQ ID NO: 86751 - RNA, 32 nt, Human
cagccuggccaagauggugaaaccccaucucu

SEQ ID NO: 86752 - RNA, 32 nt, Human
cagccuggccaagauggugaaaccccgucucc

SEQ ID NO: 86753 - RNA, 32 nt, Human
cagccuggccaagauggugaaaccccgucucu

SEQ ID NO: 86754 - RNA, 32 nt, Human
cagccuggccaaggcggcaaaaccccaucucu

SEQ ID NO: 86755 - RNA, 32 nt, Human
cagccuggccaauaugaugaaaccccaucucu

SEQ ID NO: 86756 - RNA, 32 nt, Human
cagccuggccaauauggcaaaaccccaucucu

SEQ ID NO: 86757 - RNA, 32 nt, Human
cagccuggccaauauggcgaaaccccaucucu

SEQ ID NO: 86758 - RNA, 32 nt, Human
cagccuggccaauauggugaaaccccaucucu

SEQ ID NO: 86759 - RNA, 32 nt, Human
cagccuggccaauauggugaaaccccaugucu

SEQ ID NO: 86760 - RNA, 32 nt, Human
cagccuggccaauauggugaaaccccgacucu

SEQ ID NO: 86761 - RNA, 32 nt, Human
cagccuggccaauauggugaaaccccgucucu

SEQ ID NO: 86762 - RNA, 32 nt, Human
cagccuggccaaugugaugaaaccccgucucu

SEQ ID NO: 86763 - RNA, 32 nt, Human
cagccuggccaauguggugaaaccccaccucu

SEQ ID NO: 86764 - RNA, 32 nt, Human
cagccuggccaauguggugaaaccccaucucu

SEQ ID NO: 86765 - RNA, 20 nt, Human
cagccuggccacagagcgag

SEQ ID NO: 86766 - RNA, 21 nt, Human
cagccuggccacagagcgaga

SEQ ID NO: 86767 - RNA, 32 nt, Human
cagccuggccacugccuagcuggaaugggagg

SEQ ID NO: 86768 - RNA, 17 nt, Human
cagccuggccagacaag

SEQ ID NO: 86769 - RNA, 32 nt, Human
cagccuggccagcaaggugaaaccccaucucu

SEQ ID NO: 86770 - RNA, 32 nt, Human
cagccuggccagcacggugaaaccccgucucu

SEQ ID NO: 86771 - RNA, 32 nt, Human
cagccuggccagcauagugaaaccccaucucu

SEQ ID NO: 86772 - RNA, 32 nt, Human
cagccuggccagcauggugaaaccccaucucu

SEQ ID NO: 86773 - RNA, 32 nt, Human
cagccuggccagcauggugaaaccccgucucu

SEQ ID NO: 86774 - RNA, 32 nt, Human
cagccuggccagcugcucagaccagcuugcag

SEQ ID NO: 86775 - RNA, 32 nt, Human
cagccuggccagguucuccacauggugaauga

SEQ ID NO: 86776 - RNA, 32 nt, Human
cagccuggccaucauggugaaaccccaucucu

SEQ ID NO: 86777 - RNA, 32 nt, Human
cagccuggccauuauggugaaaccccgucucu

SEQ ID NO: 86778 - RNA, 22 nt, Human
cagccuggcccacagagugaga

SEQ ID NO: 86779 - RNA, 32 nt, Human
cagccuggcccacauggugaaaccccaucuuu

SEQ ID NO: 86780 - RNA, 32 nt, Human
cagccuggcccagggugaaggaagaggcacgu

SEQ ID NO: 86781 - RNA, 32 nt, Human
cagccuggccgacauggcgaaacccccuaaaa

SEQ ID NO: 86782 - RNA, 32 nt, Human
cagccuggccgggguggugaaaccccaucucu

SEQ ID NO: 86783 - RNA, 32 nt, Human
cagccuggccucuugggaauucucccacaggg

SEQ ID NO: 86784 - RNA, 32 nt, Human
cagccuggccuggucugugccugcccagcaug

SEQ ID NO: 86785 - RNA, 32 nt, Human
cagccuggccuuuccuccuuccccucugaacc

SEQ ID NO: 86786 - RNA, 20 nt, Human
cagccuggcgacaaagcgag

SEQ ID NO: 86787 - RNA, 22 nt, Human
cagccuggcgacaagagcgaga

SEQ ID NO: 86788 - RNA, 22 nt, Human
cagccuggcgacaagagugaga

SEQ ID NO: 86789 - RNA, 21 nt, Human
cagccuggcgacacagugaga

SEQ ID NO: 86790 - RNA, 21 nt, Human
cagccuggcgacagagagaga

SEQ ID NO: 86791 - RNA, 20 nt, Human
cagccuggcgacagagcaag

SEQ ID NO: 86792 - RNA, 21 nt, Human
cagccuggcgacagagcaaga

SEQ ID NO: 86793 - RNA, 20 nt, Human
cagccuggcgacagagcgag

SEQ ID NO: 86794 - RNA, 21 nt, Human
cagccuggcgacagagcgaga

SEQ ID NO: 86795 - RNA, 20 nt, Human
cagccuggcgacagagcuag

SEQ ID NO: 86796 - RNA, 21 nt, Human
cagccuggcgacagagcuaga

SEQ ID NO: 86797 - RNA, 21 nt, Human
cagccuggcgacagagggaga

SEQ ID NO: 86798 - RNA, 21 nt, Human
cagccuggcgacagagugaga

SEQ ID NO: 86799 - RNA, 21 nt, Human
cagccuggcgacugagcgaga

SEQ ID NO: 86800 - RNA, 32 nt, Human
cagccuggcgggugggagaugcggcggccacc

SEQ ID NO: 86801 - RNA, 22 nt, Human
cagccuggcuaacacggugaaa

SEQ ID NO: 86802 - RNA, 32 nt, Human
cagccuggcuaacacggugaaaccccgucucu

SEQ ID NO: 86803 - RNA, 32 nt, Human
cagccuggcuaacacggugaaaccccgucuuu

SEQ ID NO: 86804 - RNA, 32 nt, Human
cagccuggcuaacauggcaaaaccccaucucu

SEQ ID NO: 86805 - RNA, 32 nt, Human
cagccuggcuaacauggcgaaaccccgucucu

SEQ ID NO: 86806 - RNA, 32 nt, Human
cagccuggcuaacauggugaaaccccaucucu

SEQ ID NO: 86807 - RNA, 32 nt, Human
cagccuggcuaauauggugaaaccccgucucu

SEQ ID NO: 86808 - RNA, 21 nt, Human
cagccuggcuacagagugaga

SEQ ID NO: 86809 - RNA, 32 nt, Human
cagccuggcucccuucccuggagcggcagggc

SEQ ID NO: 86810 - RNA, 21 nt, Human
cagccuggcugacagagcaag

SEQ ID NO: 86811 - RNA, 22 nt, Human
cagccuggcugacagagcaaga

SEQ ID NO: 86812 - RNA, 31 nt, Human
cagccuggcugacagagcaagacucagucuc

SEQ ID NO: 86813 - RNA, 21 nt, Human
cagccuggcugacagagcgag

SEQ ID NO: 86814 - RNA, 22 nt, Human
cagccuggcugacagagcgaga

SEQ ID NO: 86815 - RNA, 20 nt, Human
cagccuggcugguccuccca

SEQ ID NO: 86816 - RNA, 32 nt, Human
cagccuggcuuacauggugaaaccccaucucu

SEQ ID NO: 86817 - RNA, 22 nt, Human
cagccuggcuuccucugguuca

SEQ ID NO: 86818 - RNA, 32 nt, Human
cagccugggaaacauggcaaacucccaccauu

SEQ ID NO: 86819 - RNA, 22 nt, Human
cagccugggaagcagagugaga

SEQ ID NO: 86820 - RNA, 32 nt, Human
cagccugggaagcaucuuuucgcucagcaagu

SEQ ID NO: 86821 - RNA, 22 nt, Human
cagccugggagacacagcgaga

SEQ ID NO: 86822 - RNA, 21 nt, Human
cagccugggagacagagcaag

SEQ ID NO: 86823 - RNA, 22 nt, Human
cagccugggagacagagcaaga

SEQ ID NO: 86824 - RNA, 21 nt, Human
cagccugggagacagagcgag

SEQ ID NO: 86825 - RNA, 22 nt, Human
cagccugggagacagagcgaga

SEQ ID NO: 86826 - RNA, 22 nt, Human
cagccugggagacagagugaga

SEQ ID NO: 86827 - RNA, 22 nt, Human
cagccugggagacagaguuaga

SEQ ID NO: 86828 - RNA, 21 nt, Human
cagccugggagauagagcaag

SEQ ID NO: 86829 - RNA, 22 nt, Human
cagccugggagauagagcaaga

SEQ ID NO: 86830 - RNA, 32 nt, Human
cagccugggaggcccagguguagcgguccgag

SEQ ID NO: 86831 - RNA, 32 nt, Human
cagccugggagggagaaggaguuggagcucaa

SEQ ID NO: 86832 - RNA, 32 nt, Human
cagccugggaggucaaggcugcagugagcugu

SEQ ID NO: 86833 - RNA, 32 nt, Human
cagccugggagucccggaggccaggcugcaca

SEQ ID NO: 86834 - RNA, 32 nt, Human
cagccugggauccggugauggucugggcagag

SEQ ID NO: 86835 - RNA, 20 nt, Human
cagccugggcaaaagagcaa

SEQ ID NO: 86836 - RNA, 21 nt, Human
cagccugggcaacaaagcaag

SEQ ID NO: 86837 - RNA, 22 nt, Human
cagccugggcaacaaagugaga

SEQ ID NO: 86838 - RNA, 32 nt, Human
cagccugggcaacaagaaugaaacuccgucuc

SEQ ID NO: 86839 - RNA, 22 nt, Human
cagccugggcaacaagagcaag

SEQ ID NO: 86840 - RNA, 21 nt, Human
cagccugggcaacaagagcga

SEQ ID NO: 86841 - RNA, 23 nt, Human
cagccugggcaacaagagcgaaa

SEQ ID NO: 86842 - RNA, 23 nt, Human
cagccugggcaacaagagugaga

SEQ ID NO: 86843 - RNA, 32 nt, Human
cagccugggcaacacaagacccugucucuaca

SEQ ID NO: 86844 - RNA, 21 nt, Human
cagccugggcaacacagcaag

SEQ ID NO: 86845 - RNA, 22 nt, Human
cagccugggcaacacagugaga

SEQ ID NO: 86846 - RNA, 32 nt, Human
cagccugggcaacacggugaaaccccaucucu

SEQ ID NO: 86847 - RNA, 20 nt, Human
cagccugggcaacagaacaa

SEQ ID NO: 86848 - RNA, 21 nt, Human
cagccugggcaacagaacaag

SEQ ID NO: 86849 - RNA, 32 nt, Human
cagccugggcaacagaacaagaacccaucuca

SEQ ID NO: 86850 - RNA, 32 nt, Human
cagccugggcaacagaacaagacucaucucua

SEQ ID NO: 86851 - RNA, 32 nt, Human
cagccugggcaacagaacaagauucugucuca

SEQ ID NO: 86852 - RNA, 32 nt, Human
cagccugggcaacagaacaggacucggucuaa

SEQ ID NO: 86853 - RNA, 21 nt, Human
cagccugggcaacagaacgag

SEQ ID NO: 86854 - RNA, 21 nt, Human
cagccugggcaacagaagaag

SEQ ID NO: 86855 - RNA, 22 nt, Human
cagccugggcaacagaaugaga

SEQ ID NO: 86856 - RNA, 26 nt, Human
cagccugggcaacagacagagugaga

SEQ ID NO: 86857 - RNA, 22 nt, Human
cagccugggcaacagagagaga

SEQ ID NO: 86858 - RNA, 20 nt, Human
cagccugggcaacagagcaa

SEQ ID NO: 86859 - RNA, 21 nt, Human
cagccugggcaacagagcaag

SEQ ID NO: 86860 - RNA, 22 nt, Human
cagccugggcaacagagcaaga

SEQ ID NO: 86861 - RNA, 22 nt, Human
cagccugggcaacagagcaagg

SEQ ID NO: 86862 - RNA, 21 nt, Human
cagccugggcaacagagccag

SEQ ID NO: 86863 - RNA, 22 nt, Human
cagccugggcaacagagccagg

SEQ ID NO: 86864 - RNA, 21 nt, Human
cagccugggcaacagagcgag

SEQ ID NO: 86865 - RNA, 22 nt, Human
cagccugggcaacagagcgaga

SEQ ID NO: 86866 - RNA, 22 nt, Human
cagccugggcaacagagcgagg

SEQ ID NO: 86867 - RNA, 21 nt, Human
cagccugggcaacagagcuag

SEQ ID NO: 86868 - RNA, 22 nt, Human
cagccugggcaacagagggaga

SEQ ID NO: 86869 - RNA, 18 nt, Human
cagccugggcaacagagu

SEQ ID NO: 86870 - RNA, 20 nt, Human
cagccugggcaacagaguaa

SEQ ID NO: 86871 - RNA, 21 nt, Human
cagccugggcaacagaguaag

SEQ ID NO: 86872 - RNA, 22 nt, Human
cagccugggcaacagaguaaga

SEQ ID NO: 86873 - RNA, 21 nt, Human
cagccugggcaacagagugag

SEQ ID NO: 86874 - RNA, 22 nt, Human
cagccugggcaacagagugaga

SEQ ID NO: 86875 - RNA, 22 nt, Human
cagccugggcaacagagugagg

SEQ ID NO: 86876 - RNA, 22 nt, Human
cagccugggcaacagaguggga

SEQ ID NO: 86877 - RNA, 22 nt, Human
cagccugggcaacagcgugaga

SEQ ID NO: 86878 - RNA, 21 nt, Human
cagccugggcaacagggcaag

SEQ ID NO: 86879 - RNA, 18 nt, Human
cagccugggcaacagggu

SEQ ID NO: 86880 - RNA, 21 nt, Human
cagccugggcaacaggugaga

SEQ ID NO: 86881 - RNA, 32 nt, Human
cagccugggcaacagugacacucuuaucucca

SEQ ID NO: 86882 - RNA, 20 nt, Human
cagccugggcaacagugaga

SEQ ID NO: 86883 - RNA, 22 nt, Human
cagccugggcaacagugugaga

SEQ ID NO: 86884 - RNA, 20 nt, Human
cagccugggcaacauagcaa

SEQ ID NO: 86885 - RNA, 21 nt, Human
cagccugggcaacauagcaag

SEQ ID NO: 86886 - RNA, 22 nt, Human
cagccugggcaacauagugaga

SEQ ID NO: 86887 - RNA, 32 nt, Human
cagccugggcaacauggagaaaccccguuucu

SEQ ID NO: 86888 - RNA, 32 nt, Human
cagccugggcaacauggagagaccccuguucu

SEQ ID NO: 86889 - RNA, 32 nt, Human
cagccugggcaacauggagagaccccuucucu

SEQ ID NO: 86890 - RNA, 32 nt, Human
cagccugggcaacauggcaaaaccccaucucu

SEQ ID NO: 86891 - RNA, 32 nt, Human
cagccugggcaacauggcaaaaccccauuucu

SEQ ID NO: 86892 - RNA, 32 nt, Human
cagccugggcaacauggcaagaccccaucuau

SEQ ID NO: 86893 - RNA, 32 nt, Human
cagccugggcaacauggcgaaaacccaucucu

SEQ ID NO: 86894 - RNA, 32 nt, Human
cagccugggcaacauggcgaaaccccauuucu

SEQ ID NO: 86895 - RNA, 32 nt, Human
cagccugggcaacauggcgagaccccaucucu

SEQ ID NO: 86896 - RNA, 32 nt, Human
cagccugggcaacauggggaaacuccaucucu

SEQ ID NO: 86897 - RNA, 22 nt, Human
cagccugggcaacauggugaaa

SEQ ID NO: 86898 - RNA, 32 nt, Human
cagccugggcaacauggugaaaccccaucucu

SEQ ID NO: 86899 - RNA, 32 nt, Human
cagccugggcaacauggugaaaccccgucccc

SEQ ID NO: 86900 - RNA, 32 nt, Human
cagccugggcaacauggugaaaccccgucucu

SEQ ID NO: 86901 - RNA, 32 nt, Human
cagccugggcaacauggugaaacccuaucucc

SEQ ID NO: 86902 - RNA, 32 nt, Human
cagccugggcaacauggugaaaccucaucucu

SEQ ID NO: 86903 - RNA, 32 nt, Human
cagccugggcaacauggugaaaucccaugucu

SEQ ID NO: 86904 - RNA, 32 nt, Human
cagccugggcaacauggugaagccccaucucu

SEQ ID NO: 86905 - RNA, 32 nt, Human
cagccugggcaacauggugaagccucauaucu

SEQ ID NO: 86906 - RNA, 32 nt, Human
cagccugggcaacauggugagaccccaucucu

SEQ ID NO: 86907 - RNA, 32 nt, Human
cagccugggcaacauggugagaccccgucucu

SEQ ID NO: 86908 - RNA, 19 nt, Human
cagccugggcaacgagcaa

SEQ ID NO: 86909 - RNA, 20 nt, Human
cagccugggcaacgagcaag

SEQ ID NO: 86910 - RNA, 21 nt, Human
cagccugggcaacggagcaag

SEQ ID NO: 86911 - RNA, 18 nt, Human
cagccugggcaacggagu

SEQ ID NO: 86912 - RNA, 22 nt, Human
cagccugggcaacggagugaga

SEQ ID NO: 86913 - RNA, 32 nt, Human
cagccugggcaacgugacgaaaccccaucucu

SEQ ID NO: 86914 - RNA, 32 nt, Human
cagccugggcaacguggugaaaccccaucucu

SEQ ID NO: 86915 - RNA, 20 nt, Human
cagccugggcaacugagcaa

SEQ ID NO: 86916 - RNA, 21 nt, Human
cagccugggcaacugagcaag

SEQ ID NO: 86917 - RNA, 32 nt, Human
cagccugggcaagauggugaaaccccaucucu

SEQ ID NO: 86918 - RNA, 21 nt, Human
cagccugggcaauagagcaag

SEQ ID NO: 86919 - RNA, 18 nt, Human
cagccugggcaauagagu

SEQ ID NO: 86920 - RNA, 22 nt, Human
cagccugggcaauagaguaaga

SEQ ID NO: 86921 - RNA, 22 nt, Human
cagccugggcaauagagugaga

SEQ ID NO: 86922 - RNA, 32 nt, Human
cagccugggcaauauagugaaaccccaucucu

SEQ ID NO: 86923 - RNA, 32 nt, Human
cagccugggcaaugugauaaaaccccaucucu

SEQ ID NO: 86924 - RNA, 21 nt, Human
cagccugggcaccacagcaag

SEQ ID NO: 86925 - RNA, 24 nt, Human
cagccugggcaccacagcaagacu

SEQ ID NO: 86926 - RNA, 21 nt, Human
cagccugggcaccagagcgag

SEQ ID NO: 86927 - RNA, 22 nt, Human
cagccugggcaccagagcgaga

SEQ ID NO: 86928 - RNA, 32 nt, Human
cagccugggcaccaucuucucauucaucucca

SEQ ID NO: 86929 - RNA, 22 nt, Human
cagccugggcacuagagugaga

SEQ ID NO: 86930 - RNA, 20 nt, Human
cagccugggcagcagagcaa

SEQ ID NO: 86931 - RNA, 21 nt, Human
cagccugggcagcagagcaag

SEQ ID NO: 86932 - RNA, 21 nt, Human
cagccugggcagcagagcgag

SEQ ID NO: 86933 - RNA, 22 nt, Human
cagccugggcagcagagcgaga

SEQ ID NO: 86934 - RNA, 21 nt, Human
cagccugggcagcagaggaag

SEQ ID NO: 86935 - RNA, 22 nt, Human
cagccugggcagcagagugaga

SEQ ID NO: 86936 - RNA, 32 nt, Human
cagccugggcagcagcaagaacuauuuauuaa

SEQ ID NO: 86937 - RNA, 32 nt, Human
cagccugggcagcauagugugagacccugucu

SEQ ID NO: 86938 - RNA, 22 nt, Human
cagccugggccacagaaugaga

SEQ ID NO: 86939 - RNA, 22 nt, Human
cagccugggccacagagugaga

SEQ ID NO: 86940 - RNA, 21 nt, Human
cagccugggccacagugcaag

SEQ ID NO: 86941 - RNA, 21 nt, Human
cagccugggccacauagcaag

SEQ ID NO: 86942 - RNA, 21 nt, Human
cagccugggccccagcccaca

SEQ ID NO: 86943 - RNA, 21 nt, Human
cagccugggcgacaaagcaag

SEQ ID NO: 86944 - RNA, 21 nt, Human
cagccugggcgacaaagcgag

SEQ ID NO: 86945 - RNA, 22 nt, Human
cagccugggcgacaaagcgaga

SEQ ID NO: 86946 - RNA, 22 nt, Human
cagccugggcgacaaagugaga

SEQ ID NO: 86947 - RNA, 22 nt, Human
cagccugggcgacaaaguggga

SEQ ID NO: 86948 - RNA, 22 nt, Human
cagccugggcgacaagagcaag

SEQ ID NO: 86949 - RNA, 21 nt, Human
cagccugggcgacacagcaag

SEQ ID NO: 86950 - RNA, 22 nt, Human
cagccugggcgacacagcgaga

SEQ ID NO: 86951 - RNA, 21 nt, Human
cagccugggcgacagaacaag

SEQ ID NO: 86952 - RNA, 21 nt, Human
cagccugggcgacagaacgag

SEQ ID NO: 86953 - RNA, 22 nt, Human
cagccugggcgacagaacgaga

SEQ ID NO: 86954 - RNA, 32 nt, Human
cagccugggcgacagaacgagaccccaucuca

SEQ ID NO: 86955 - RNA, 22 nt, Human
cagccugggcgacagaaugaga

SEQ ID NO: 86956 - RNA, 22 nt, Human
cagccugggcgacagaccgaga

SEQ ID NO: 86957 - RNA, 22 nt, Human
cagccugggcgacagagagaga

SEQ ID NO: 86958 - RNA, 20 nt, Human
cagccugggcgacagagcaa

SEQ ID NO: 86959 - RNA, 21 nt, Human
cagccugggcgacagagcaag

SEQ ID NO: 86960 - RNA, 22 nt, Human
cagccugggcgacagagcaaga

SEQ ID NO: 86961 - RNA, 22 nt, Human
cagccugggcgacagagcaagg

SEQ ID NO: 86962 - RNA, 21 nt, Human
cagccugggcgacagagcagg

SEQ ID NO: 86963 - RNA, 22 nt, Human
cagccugggcgacagagcagga

SEQ ID NO: 86964 - RNA, 21 nt, Human
cagccugggcgacagagccag

SEQ ID NO: 86965 - RNA, 22 nt, Human
cagccugggcgacagagccaga

SEQ ID NO: 86966 - RNA, 20 nt, Human
cagccugggcgacagagcga

SEQ ID NO: 86967 - RNA, 21 nt, Human
cagccugggcgacagagcgag

SEQ ID NO: 86968 - RNA, 22 nt, Human
cagccugggcgacagagcgaga

SEQ ID NO: 86969 - RNA, 21 nt, Human
cagccugggcgacagagcuag

SEQ ID NO: 86970 - RNA, 22 nt, Human
cagccugggcgacagagcuaga

SEQ ID NO: 86971 - RNA, 22 nt, Human
cagccugggcgacagagggaga

SEQ ID NO: 86972 - RNA, 18 nt, Human
cagccugggcgacagagu

SEQ ID NO: 86973 - RNA, 21 nt, Human
cagccugggcgacagaguaag

SEQ ID NO: 86974 - RNA, 22 nt, Human
cagccugggcgacagaguaaga

SEQ ID NO: 86975 - RNA, 22 nt, Human
cagccugggcgacagagugaga

SEQ ID NO: 86976 - RNA, 22 nt, Human
cagccugggcgacagagugagg

SEQ ID NO: 86977 - RNA, 19 nt, Human
cagccugggcgacagcaag

SEQ ID NO: 86978 - RNA, 21 nt, Human
cagccugggcgacagggcaag

SEQ ID NO: 86979 - RNA, 22 nt, Human
cagccugggcgacagggcaaga

SEQ ID NO: 86980 - RNA, 22 nt, Human
cagccugggcgacagggugaga

SEQ ID NO: 86981 - RNA, 21 nt, Human
cagccugggcgacagugcaag

SEQ ID NO: 86982 - RNA, 19 nt, Human
cagccugggcgacgagcaa

SEQ ID NO: 86983 - RNA, 22 nt, Human
cagccugggcgacggagcgaga

SEQ ID NO: 86984 - RNA, 22 nt, Human
cagccugggcgacggagugaga

SEQ ID NO: 86985 - RNA, 22 nt, Human
cagccugggcgauagagcaaga

SEQ ID NO: 86986 - RNA, 22 nt, Human
cagccugggcgauagagugaga

SEQ ID NO: 86987 - RNA, 19 nt, Human
cagccugggcgaugagcaa

SEQ ID NO: 86988 - RNA, 20 nt, Human
cagccugggcggcagagcaa

SEQ ID NO: 86989 - RNA, 21 nt, Human
cagccugggcggcagagcaag

SEQ ID NO: 86990 - RNA, 22 nt, Human
cagccugggcggcagagcaaga

SEQ ID NO: 86991 - RNA, 22 nt, Human
cagccugggcggcagagugaga

SEQ ID NO: 86992 - RNA, 22 nt, Human
cagccugggcgucagagugaga

SEQ ID NO: 86993 - RNA, 32 nt, Human
cagccugggcuacagagagcaagacucugucu

SEQ ID NO: 86994 - RNA, 21 nt, Human
cagccugggcuacagagcaag

SEQ ID NO: 86995 - RNA, 21 nt, Human
cagccugggcuacagagcgag

SEQ ID NO: 86996 - RNA, 22 nt, Human
cagccugggcuacagagcgaga

SEQ ID NO: 86997 - RNA, 22 nt, Human
cagccugggcuacagagugaga

SEQ ID NO: 86998 - RNA, 32 nt, Human
cagccugggcucugcccugccucagccgccuc

SEQ ID NO: 86999 - RNA, 32 nt, Human
cagccugggcucugggagacuugccuguguga

SEQ ID NO: 87000 - RNA, 32 nt, Human
cagccugggcuggggcuacaggucugucacua

SEQ ID NO: 87001 - RNA, 21 nt, Human
cagccuggggaacagagcaag

SEQ ID NO: 87002 - RNA, 22 nt, Human
cagccuggggaacagagcaaga

SEQ ID NO: 87003 - RNA, 20 nt, Human
cagccuggggacagagcaag

SEQ ID NO: 87004 - RNA, 21 nt, Human
cagccuggggacagagcaaga

SEQ ID NO: 87005 - RNA, 22 nt, Human
cagccuggggagacagagcgag

SEQ ID NO: 87006 - RNA, 32 nt, Human
cagccuggggcauuuaguguuuucccugguga

SEQ ID NO: 87007 - RNA, 32 nt, Human
cagccuggggccuggcagggaggucaggcccu

SEQ ID NO: 87008 - RNA, 23 nt, Human
cagccuggggcugacagagcaag

SEQ ID NO: 87009 - RNA, 24 nt, Human
cagccuggggcugacagagcaaga

SEQ ID NO: 87010 - RNA, 32 nt, Human
cagccuggggcugacagagcaagacacugucu

SEQ ID NO: 87011 - RNA, 32 nt, Human
cagccugggggaaggagcuuaauugcugagac

SEQ ID NO: 87012 - RNA, 23 nt, Human
cagccugggggacaagagugaga

SEQ ID NO: 87013 - RNA, 22 nt, Human
cagccugggggacagaaagaga

SEQ ID NO: 87014 - RNA, 21 nt, Human
cagccugggggacagagcaag

SEQ ID NO: 87015 - RNA, 22 nt, Human
cagccugggggacagagcaaga

SEQ ID NO: 87016 - RNA, 22 nt, Human
cagccugggggacagagcaagg

SEQ ID NO: 87017 - RNA, 21 nt, Human
cagccugggggacagagcgag

SEQ ID NO: 87018 - RNA, 22 nt, Human
cagccugggggacagagcgaga

SEQ ID NO: 87019 - RNA, 31 nt, Human
cagccugggggacagagcuacacuccauccc

SEQ ID NO: 87020 - RNA, 22 nt, Human
cagccugggggacagagugaga

SEQ ID NO: 87021 - RNA, 22 nt, Human
cagccuggggugacagagcaag

SEQ ID NO: 87022 - RNA, 22 nt, Human
cagccuggguaaaagagugaga

SEQ ID NO: 87023 - RNA, 22 nt, Human
cagccuggguaacaaagugaga

SEQ ID NO: 87024 - RNA, 21 nt, Human
cagccuggguaacagagcaag

SEQ ID NO: 87025 - RNA, 22 nt, Human
cagccuggguaacagagcaaga

SEQ ID NO: 87026 - RNA, 21 nt, Human
cagccuggguaacagagcgag

SEQ ID NO: 87027 - RNA, 22 nt, Human
cagccuggguaacagagcgaga

SEQ ID NO: 87028 - RNA, 21 nt, Human
cagccuggguaacagagcuag

SEQ ID NO: 87029 - RNA, 22 nt, Human
cagccuggguaacagagcuaga

SEQ ID NO: 87030 - RNA, 22 nt, Human
cagccuggguaacagagugaga

SEQ ID NO: 87031 - RNA, 32 nt, Human
cagccuggguaauauggcaaaaccccaucucu

SEQ ID NO: 87032 - RNA, 22 nt, Human
cagccugggugacaaagcaaga

SEQ ID NO: 87033 - RNA, 21 nt, Human
cagccugggugacaaaggaga

SEQ ID NO: 87034 - RNA, 22 nt, Human
cagccugggugacaaaguaaga

SEQ ID NO: 87035 - RNA, 22 nt, Human
cagccugggugacaaagucaga

SEQ ID NO: 87036 - RNA, 22 nt, Human
cagccugggugacaaagugaga

SEQ ID NO: 87037 - RNA, 22 nt, Human
cagccugggugacaagagcaag

SEQ ID NO: 87038 - RNA, 23 nt, Human
cagccugggugacaagagugaga

SEQ ID NO: 87039 - RNA, 22 nt, Human
cagccugggugacacagcgaga

SEQ ID NO: 87040 - RNA, 22 nt, Human
cagccugggugacacagugaga

SEQ ID NO: 87041 - RNA, 32 nt, Human
cagccugggugacacuccagccugggugacaa

SEQ ID NO: 87042 - RNA, 22 nt, Human
cagccugggugacagaacaaga

SEQ ID NO: 87043 - RNA, 32 nt, Human
cagccugggugacagaacaagacucugucuca

SEQ ID NO: 87044 - RNA, 32 nt, Human
cagccugggugacagaacaagacugucucaaa

SEQ ID NO: 87045 - RNA, 22 nt, Human
cagccugggugacagaacgaga

SEQ ID NO: 87046 - RNA, 32 nt, Human
cagccugggugacagaacgagacuccaccuca

SEQ ID NO: 87047 - RNA, 22 nt, Human
cagccugggugacagaauaaga

SEQ ID NO: 87048 - RNA, 20 nt, Human
cagccugggugacagaauga

SEQ ID NO: 87049 - RNA, 22 nt, Human
cagccugggugacagaaugaga

SEQ ID NO: 87050 - RNA, 22 nt, Human
cagccugggugacagaccgaga

SEQ ID NO: 87051 - RNA, 22 nt, Human
cagccugggugacagacuaaga

SEQ ID NO: 87052 - RNA, 22 nt, Human
cagccugggugacagagagaga

SEQ ID NO: 87053 - RNA, 21 nt, Human
cagccugggugacagagcaag

SEQ ID NO: 87054 - RNA, 22 nt, Human
cagccugggugacagagcaaga

SEQ ID NO: 87055 - RNA, 22 nt, Human
cagccugggugacagagcaagg

SEQ ID NO: 87056 - RNA, 32 nt, Human
cagccugggugacagagcaaggcucccaucuc

SEQ ID NO: 87057 - RNA, 21 nt, Human
cagccugggugacagagcagg

SEQ ID NO: 87058 - RNA, 22 nt, Human
cagccugggugacagagcagga

SEQ ID NO: 87059 - RNA, 22 nt, Human
cagccugggugacagagccaga

SEQ ID NO: 87060 - RNA, 21 nt, Human
cagccugggugacagagcgag

SEQ ID NO: 87061 - RNA, 22 nt, Human
cagccugggugacagagcgaga

SEQ ID NO: 87062 - RNA, 22 nt, Human
cagccugggugacagagcgagg

SEQ ID NO: 87063 - RNA, 22 nt, Human
cagccugggugacagagcguga

SEQ ID NO: 87064 - RNA, 22 nt, Human
cagccugggugacagagcuaga

SEQ ID NO: 87065 - RNA, 20 nt, Human
cagccugggugacagaggga

SEQ ID NO: 87066 - RNA, 22 nt, Human
cagccugggugacagagggaga

SEQ ID NO: 87067 - RNA, 21 nt, Human
cagccugggugacagaguaag

SEQ ID NO: 87068 - RNA, 22 nt, Human
cagccugggugacagaguaaga

SEQ ID NO: 87069 - RNA, 22 nt, Human
cagccugggugacagagucaga

SEQ ID NO: 87070 - RNA, 20 nt, Human
cagccugggugacagaguga

SEQ ID NO: 87071 - RNA, 21 nt, Human
cagccugggugacagagugag

SEQ ID NO: 87072 - RNA, 22 nt, Human
cagccugggugacagagugaga

SEQ ID NO: 87073 - RNA, 22 nt, Human
cagccugggugacagagugagg

SEQ ID NO: 87074 - RNA, 22 nt, Human
cagccugggugacagaguggga

SEQ ID NO: 87075 - RNA, 22 nt, Human
cagccugggugacagauugaga

SEQ ID NO: 87076 - RNA, 22 nt, Human
cagccugggugacagcacgaga

SEQ ID NO: 87077 - RNA, 22 nt, Human
cagccugggugacagcgcgaga

SEQ ID NO: 87078 - RNA, 22 nt, Human
cagccugggugacagcguaaga

SEQ ID NO: 87079 - RNA, 21 nt, Human
cagccugggugacagggcaag

SEQ ID NO: 87080 - RNA, 22 nt, Human
cagccugggugacagggcaaga

SEQ ID NO: 87081 - RNA, 22 nt, Human
cagccugggugacagggcgaga

SEQ ID NO: 87082 - RNA, 20 nt, Human
cagccugggugacaggguga

SEQ ID NO: 87083 - RNA, 22 nt, Human
cagccugggugacagggugaga

SEQ ID NO: 87084 - RNA, 20 nt, Human
cagccugggugacaguguga

SEQ ID NO: 87085 - RNA, 22 nt, Human
cagccugggugacauagcaaga

SEQ ID NO: 87086 - RNA, 22 nt, Human
cagccugggugaccaaacgaga

SEQ ID NO: 87087 - RNA, 22 nt, Human
cagccugggugaccgagugaga

SEQ ID NO: 87088 - RNA, 19 nt, Human
cagccugggugacgaguga

SEQ ID NO: 87089 - RNA, 22 nt, Human
cagccugggugacggagugaga

SEQ ID NO: 87090 - RNA, 22 nt, Human
cagccugggugacugagcaaga

SEQ ID NO: 87091 - RNA, 22 nt, Human
cagccugggugacugagcgaga

SEQ ID NO: 87092 - RNA, 32 nt, Human
cagccugggugagaagagcgaaacuccgucuc

SEQ ID NO: 87093 - RNA, 22 nt, Human
cagccugggugagagagugaga

SEQ ID NO: 87094 - RNA, 32 nt, Human
cagccugggugaggagagcgagacucuuucug

SEQ ID NO: 87095 - RNA, 22 nt, Human
cagccugggugauagagcaaga

SEQ ID NO: 87096 - RNA, 22 nt, Human
cagccugggugauagagugaga

SEQ ID NO: 87097 - RNA, 32 nt, Human
cagccugggugauccuggagaguuucccaggg

SEQ ID NO: 87098 - RNA, 22 nt, Human
cagccuggguggcagagcgaga

SEQ ID NO: 87099 - RNA, 22 nt, Human
cagccuggguggcagagugaga

SEQ ID NO: 87100 - RNA, 22 nt, Human
cagccugggugucagagcgaga

SEQ ID NO: 87101 - RNA, 21 nt, Human
cagccuggguuacagagcgag

SEQ ID NO: 87102 - RNA, 22 nt, Human
cagccuggguuacagagcgaga

SEQ ID NO: 87103 - RNA, 19 nt, Human
cagccuggguucuuccaca

SEQ ID NO: 87104 - RNA, 32 nt, Human
cagccugguagaauugggaagcugggggaagg

SEQ ID NO: 87105 - RNA, 32 nt, Human
cagccugguaucagggaaauugagacuuauuu

SEQ ID NO: 87106 - RNA, 21 nt, Human
cagccuggucaacaaagcaag

SEQ ID NO: 87107 - RNA, 21 nt, Human
cagccuggucaacagagcaag

SEQ ID NO: 87108 - RNA, 22 nt, Human
cagccuggucaacagagugaga

SEQ ID NO: 87109 - RNA, 22 nt, Human
cagccuggucaacauagugaaa

SEQ ID NO: 87110 - RNA, 32 nt, Human
cagccuggucaacauggcaaaagcccaucucu

SEQ ID NO: 87111 - RNA, 32 nt, Human
cagccuggucaacauggcgaaaccccaucucu

SEQ ID NO: 87112 - RNA, 32 nt, Human
cagccuggucaacaugguaaaaccccauuucu

SEQ ID NO: 87113 - RNA, 22 nt, Human
cagccuggucaacauggugaaa

SEQ ID NO: 87114 - RNA, 32 nt, Human
cagccuggucaacauggugaaaccccaucucc

SEQ ID NO: 87115 - RNA, 32 nt, Human
cagccuggucaacauggugaaaccccaucucu

SEQ ID NO: 87116 - RNA, 32 nt, Human
cagccuggucaacauggugaaacccccuaucu

SEQ ID NO: 87117 - RNA, 32 nt, Human
cagccuggucaacauggugaaaccccgucucu

SEQ ID NO: 87118 - RNA, 32 nt, Human
cagccuggucaacauggugaaaccccuucucu

SEQ ID NO: 87119 - RNA, 32 nt, Human
cagccuggucaagauggugaaaccccaucucu

SEQ ID NO: 87120 - RNA, 32 nt, Human
cagccuggucaauauggugaaaccccaucucu

SEQ ID NO: 87121 - RNA, 32 nt, Human
cagccugguccacauggcaaaaccccaucugu

SEQ ID NO: 87122 - RNA, 22 nt, Human
cagccuggucgacagagugaga

SEQ ID NO: 87123 - RNA, 32 nt, Human
cagccuggucucaaacuccccagcuaaagcag

SEQ ID NO: 87124 - RNA, 32 nt, Human
cagccuggucucaaacuccugaccucaaguga

SEQ ID NO: 87125 - RNA, 32 nt, Human
cagccuggucucaaacuccuguccucaaguga

SEQ ID NO: 87126 - RNA, 32 nt, Human
cagccuggucucaaauuccuggccucaagcaa

SEQ ID NO: 87127 - RNA, 20 nt, Human
cagccuggugacagagcaag

SEQ ID NO: 87128 - RNA, 21 nt, Human
cagccuggugacagagcaaga

SEQ ID NO: 87129 - RNA, 20 nt, Human
cagccuggugacagagcgag

SEQ ID NO: 87130 - RNA, 21 nt, Human
cagccuggugacagagcgaga

SEQ ID NO: 87131 - RNA, 21 nt, Human
cagccuggugacagagugaga

SEQ ID NO: 87132 - RNA, 32 nt, Human
cagccuggugacagagugagacuccaucucaa

SEQ ID NO: 87133 - RNA, 32 nt, Human
cagccuggugacagagugagacuccgucucaa

SEQ ID NO: 87134 - RNA, 32 nt, Human
cagccuggugacagagugagacucuguuucaa

SEQ ID NO: 87135 - RNA, 21 nt, Human
cagccuggugacagcgugaga

SEQ ID NO: 87136 - RNA, 21 nt, Human
cagccuggugauagaacgaga

SEQ ID NO: 87137 - RNA, 21 nt, Human
cagccuggugcccagugcuca

SEQ ID NO: 87138 - RNA, 32 nt, Human
cagccuggugugcugaggguaguuggauuuca

SEQ ID NO: 87139 - RNA, 20 nt, Human
cagccugguuacagagcgag

SEQ ID NO: 87140 - RNA, 21 nt, Human
cagccugguuacagagcgaga

SEQ ID NO: 87141 - RNA, 32 nt, Human
cagccugguuagguggauaccugcccugacau

SEQ ID NO: 87142 - RNA, 21 nt, Human
cagccugguugacagagcaag

SEQ ID NO: 87143 - RNA, 22 nt, Human
cagccugguugacagagcaaga

SEQ ID NO: 87144 - RNA, 22 nt, Human
cagccugguugacagagugaga

SEQ ID NO: 87145 - RNA, 20 nt, Human
cagccuguaaguucuccaca

SEQ ID NO: 87146 - RNA, 16 nt, Human
cagccuguacuggaug

SEQ ID NO: 87147 - RNA, 32 nt, Human
cagccuguaggaaaccaaagaugggaaguggc

SEQ ID NO: 87148 - RNA, 32 nt, Human
cagccuguccaacauggugaaacccccaucuc

SEQ ID NO: 87149 - RNA, 32 nt, Human
cagccuguccaacguggugaaaccccgucugu

SEQ ID NO: 87150 - RNA, 32 nt, Human
cagccuguccacuaacuugucuuugagaacaa

SEQ ID NO: 87151 - RNA, 32 nt, Human
cagccuguccgcagccuggugccgugaaaauc

SEQ ID NO: 87152 - RNA, 18 nt, Human
cagccuguccugggccca

SEQ ID NO: 87153 - RNA, 32 nt, Human
cagccuguccuguugcccacugagcuucaggc

SEQ ID NO: 87154 - RNA, 32 nt, Human
cagccuguccuuuccccagcuccuauaccucu

SEQ ID NO: 87155 - RNA, 21 nt, Human
cagccugucgcggcccggccg

SEQ ID NO: 87156 - RNA, 32 nt, Human
cagccugucugcucucuccuugcucaacaagg

SEQ ID NO: 87157 - RNA, 19 nt, Human
cagccugugaaucuccaca

SEQ ID NO: 87158 - RNA, 21 nt, Human
cagccugugcaacagagccag

SEQ ID NO: 87159 - RNA, 22 nt, Human
cagccugugcaacagagcgagg

SEQ ID NO: 87160 - RNA, 32 nt, Human
cagccugugcuccccucagaagcucugcucuu

SEQ ID NO: 87161 - RNA, 32 nt, Human
cagccugugcuggcugcaauacuguggugcuu

SEQ ID NO: 87162 - RNA, 18 nt, Human
cagccuguggccuccaca

SEQ ID NO: 87163 - RNA, 32 nt, Human
cagccuguguaguccagcugugcucaaaugga

SEQ ID NO: 87164 - RNA, 22 nt, Human
cagccugugugacagaaugaga

SEQ ID NO: 87165 - RNA, 21 nt, Human
cagccugugugacagagcaag

SEQ ID NO: 87166 - RNA, 22 nt, Human
cagccugugugacagagcaaga

SEQ ID NO: 87167 - RNA, 32 nt, Human
cagccugugugggucaugaggcuggggcccag

SEQ ID NO: 87168 - RNA, 32 nt, Human
cagccuguucaacauggcgaaaccccauucua

SEQ ID NO: 87169 - RNA, 32 nt, Human
cagccuguuccugcacuccacccugcuggccc

SEQ ID NO: 87170 - RNA, 32 nt, Human
cagccuguugcuggcccucgcuuugcgcaaca

SEQ ID NO: 87171 - RNA, 32 nt, Human
cagccuguuugggaagcagcagucucuccuuc

SEQ ID NO: 87172 - RNA, 19 nt, Human
cagccuuaaauccuuuaca

SEQ ID NO: 87173 - RNA, 18 nt, Human
cagccuuaauaccugcca

SEQ ID NO: 87174 - RNA, 17 nt, Human
cagccuuaaucuacaua

SEQ ID NO: 87175 - RNA, 21 nt, Human
cagccuuaaucucucuuuaca

SEQ ID NO: 87176 - RNA, 22 nt, Human
cagccuuaccaacaugaugaaa

SEQ ID NO: 87177 - RNA, 32 nt, Human
cagccuuaccaacauggagaaaccccaucucu

SEQ ID NO: 87178 - RNA, 32 nt, Human
cagccuuagggaacccagaaaguaguggggag

SEQ ID NO: 87179 - RNA, 32 nt, Human
cagccuuaucacuucccucccuuuagaaacuc

SEQ ID NO: 87180 - RNA, 32 nt, Human
cagccuuaucuaggaagugucuugccagguca

SEQ ID NO: 87181 - RNA, 32 nt, Human
cagccuucaagcauuccauuacgccccaucuc

SEQ ID NO: 87182 - RNA, 32 nt, Human
cagccuucacuuuucugaguucuugaagcauu

SEQ ID NO: 87183 - RNA, 23 nt, Human
cagccuucagaccaaggccacua

SEQ ID NO: 87184 - RNA, 32 nt, Human
cagccuucagcagcagcucacacccuaccuuc

SEQ ID NO: 87185 - RNA, 32 nt, Human
cagccuucagccaggaaaauucuacagcuuuc

SEQ ID NO: 87186 - RNA, 32 nt, Human
cagccuucaguuagagcucacaucuuugucuc

SEQ ID NO: 87187 - RNA, 21 nt, Human
cagccuucaguucccuuccac

SEQ ID NO: 87188 - RNA, 32 nt, Human
cagccuucaugccuuccccacccuccagcucc

SEQ ID NO: 87189 - RNA, 23 nt, Human
cagccuucauuaggaggccgagg

SEQ ID NO: 87190 - RNA, 32 nt, Human
cagccuuccaaaagugcugggauuacaggcgu

SEQ ID NO: 87191 - RNA, 21 nt, Human
cagccuuccaggggaacacuc

SEQ ID NO: 87192 - RNA, 32 nt, Human
cagccuuccauggcagugcaaagggaaccuuc

SEQ ID NO: 87193 - RNA, 32 nt, Human
cagccuucccaacauggugaaaccccaucucu

SEQ ID NO: 87194 - RNA, 32 nt, Human
cagccuucccacauaaaaccccuugagauggc

SEQ ID NO: 87195 - RNA, 32 nt, Human
cagccuucccaccccauaccucccucccgauc

SEQ ID NO: 87196 - RNA, 32 nt, Human
cagccuucccaggucuccugauuucaaguaca

SEQ ID NO: 87197 - RNA, 23 nt, Human
cagccuucccccgggcuccacca

SEQ ID NO: 87198 - RNA, 17 nt, Human
cagccuucccccuccca

SEQ ID NO: 87199 - RNA, 17 nt, Human
cagccuuccccucuaca

SEQ ID NO: 87200 - RNA, 32 nt, Human
cagccuuccuccccaucucccauucuccaucc

SEQ ID NO: 87201 - RNA, 32 nt, Human
cagccuuccuccgccuccgccucucucuccuc

SEQ ID NO: 87202 - RNA, 25 nt, Human
cagccuuccugaccuccuccugccc

SEQ ID NO: 87203 - RNA, 32 nt, Human
cagccuuccugccucagcuccccugcugucuc

SEQ ID NO: 87204 - RNA, 20 nt, Human
cagccuuccugccuucacuc

SEQ ID NO: 87205 - RNA, 30 nt, Human
cagccuuccuggcagugagaaagacagaca

SEQ ID NO: 87206 - RNA, 32 nt, Human
cagccuuccugucaacagcgacaggaaaucuc

SEQ ID NO: 87207 - RNA, 32 nt, Human
cagccuuccuucccucuccuugucucauguug

SEQ ID NO: 87208 - RNA, 32 nt, Human
cagccuuccuuguaucucuccagacucggaca

SEQ ID NO: 87209 - RNA, 32 nt, Human
cagccuucuccaccaugagccucagacuugau

SEQ ID NO: 87210 - RNA, 32 nt, Human
cagccuucuccacugucucauuuccuuuuccc

SEQ ID NO: 87211 - RNA, 32 nt, Human
cagccuucuccaggacaaccugcuggaacgca

SEQ ID NO: 87212 - RNA, 32 nt, Human
cagccuucuccccaaccaggauguuggccugg

SEQ ID NO: 87213 - RNA, 32 nt, Human
cagccuucuccccagugagaacaguuucucug

SEQ ID NO: 87214 - RNA, 32 nt, Human
cagccuucucugcagucccuucugcccugccg

SEQ ID NO: 87215 - RNA, 32 nt, Human
cagccuucugcugcagcagaggcucacccagc

SEQ ID NO: 87216 - RNA, 32 nt, Human
cagccuucuggcacugcaggccuagguuggag

SEQ ID NO: 87217 - RNA, 32 nt, Human
cagccuucugguguguucuaagagcaggcucc

SEQ ID NO: 87218 - RNA, 32 nt, Human
cagccuucuucugaccagcuuccucuucugau

SEQ ID NO: 87219 - RNA, 32 nt, Human
cagccuucuugcugcuaucaacucccaagaga

SEQ ID NO: 87220 - RNA, 21 nt, Human
cagccuucuuuuucuuccaua

SEQ ID NO: 87221 - RNA, 32 nt, Human
cagccuugaaggcagcagggugcccaggugaa

SEQ ID NO: 87222 - RNA, 32 nt, Human
cagccuugacaacauggugaaaccccaucucu

SEQ ID NO: 87223 - RNA, 20 nt, Human
cagccuugaccauucuccac

SEQ ID NO: 87224 - RNA, 18 nt, Human
cagccuugacccccgaca

SEQ ID NO: 87225 - RNA, 16 nt, Human
cagccuugaccuccca

SEQ ID NO: 87226 - RNA, 19 nt, Human
cagccuugaccucccggcu

SEQ ID NO: 87227 - RNA, 32 nt, Human
cagccuugaccuuccagccugccaaguagcug

SEQ ID NO: 87228 - RNA, 17 nt, Human
cagccuugaccuuccca

SEQ ID NO: 87229 - RNA, 16 nt, Human
cagccuugacugcaca

SEQ ID NO: 87230 - RNA, 18 nt, Human
cagccuugagaacuccac

SEQ ID NO: 87231 - RNA, 19 nt, Human
cagccuugagaugcuucac

SEQ ID NO: 87232 - RNA, 19 nt, Human
cagccuugagccccuccac

SEQ ID NO: 87233 - RNA, 17 nt, Human
cagccuugagccgccca

SEQ ID NO: 87234 - RNA, 32 nt, Human
cagccuugagguuggcccuccucaaggucagc

SEQ ID NO: 87235 - RNA, 17 nt, Human
cagccuugaguugcaua

SEQ ID NO: 87236 - RNA, 16 nt, Human
cagccuugaucgcaca

SEQ ID NO: 87237 - RNA, 18 nt, Human
cagccuugaucugucugc

SEQ ID NO: 87238 - RNA, 16 nt, Human
cagccuugaugccaua

SEQ ID NO: 87239 - RNA, 21 nt, Human
cagccuugauggcugucggca

SEQ ID NO: 87240 - RNA, 17 nt, Human
cagccuugauuaccaua

SEQ ID NO: 87241 - RNA, 15 nt, Human
cagccuugauuuaca

SEQ ID NO: 87242 - RNA, 18 nt, Human
cagccuugcacuuccaca

SEQ ID NO: 87243 - RNA, 19 nt, Human
cagccuugcccauucucua

SEQ ID NO: 87244 - RNA, 18 nt, Human
cagccuugccccucccca

SEQ ID NO: 87245 - RNA, 20 nt, Human
cagccuugccccuccugcuc

SEQ ID NO: 87246 - RNA, 16 nt, Human
cagccuugccgccaca

SEQ ID NO: 87247 - RNA, 21 nt, Human
cagccuugccuccuccugucc

SEQ ID NO: 87248 - RNA, 18 nt, Human
cagccuugcgcuguccca

SEQ ID NO: 87249 - RNA, 18 nt, Human
cagccuugcguuuccaca

SEQ ID NO: 87250 - RNA, 16 nt, Human
cagccuugcugccaca

SEQ ID NO: 87251 - RNA, 18 nt, Human
cagccuuggaacuaccac

SEQ ID NO: 87252 - RNA, 18 nt, Human
cagccuuggaacuccuca

SEQ ID NO: 87253 - RNA, 32 nt, Human
cagccuuggaacuccucaagaaccugaagauu

SEQ ID NO: 87254 - RNA, 32 nt, Human
cagccuuggagacacccaggaggaaggccgug

SEQ ID NO: 87255 - RNA, 32 nt, Human
cagccuuggcaacacagugugagacccugucu

SEQ ID NO: 87256 - RNA, 22 nt, Human
cagccuuggcaacagagugaga

SEQ ID NO: 87257 - RNA, 32 nt, Human
cagccuuggcaacauggugaaaccccaucucc

SEQ ID NO: 87258 - RNA, 18 nt, Human
cagccuuggcaccuccca

SEQ ID NO: 87259 - RNA, 20 nt, Human
cagccuuggcccugcugcug

SEQ ID NO: 87260 - RNA, 21 nt, Human
cagccuuggcgacagagcgag

SEQ ID NO: 87261 - RNA, 32 nt, Human
cagccuuggcuccugguauaggccgcuuuccu

SEQ ID NO: 87262 - RNA, 32 nt, Human
cagccuuggcuuuuccucuccugggugcucug

SEQ ID NO: 87263 - RNA, 32 nt, Human
cagccuugggcccuuccaggagucauggucug

SEQ ID NO: 87264 - RNA, 32 nt, Human
cagccuuggggauggacuugcccacaccucca

SEQ ID NO: 87265 - RNA, 21 nt, Human
cagccuugggguccccgccca

SEQ ID NO: 87266 - RNA, 18 nt, Human
cagccuugggguuuccca

SEQ ID NO: 87267 - RNA, 27 nt, Human
cagccuuggucucaagaggccgagagg

SEQ ID NO: 87268 - RNA, 22 nt, Human
cagccuuggugacagagugaga

SEQ ID NO: 87269 - RNA, 16 nt, Human
cagccuuggugaggug

SEQ ID NO: 87270 - RNA, 32 nt, Human
cagccuugguuuccugcugagcuccaguauuu

SEQ ID NO: 87271 - RNA, 18 nt, Human
cagccuuguauuggccac

SEQ ID NO: 87272 - RNA, 16 nt, Human
cagccuuguccacaca

SEQ ID NO: 87273 - RNA, 19 nt, Human
cagccuugugcuuacccca

SEQ ID NO: 87274 - RNA, 32 nt, Human
cagccuuguggcuagaguacagugggguagac

SEQ ID NO: 87275 - RNA, 19 nt, Human
cagccuuguguuuucugua

SEQ ID NO: 87276 - RNA, 32 nt, Human
cagccuuguguuuucuguaaccccuguuugug

SEQ ID NO: 87277 - RNA, 18 nt, Human
cagccuuguuccucagca

SEQ ID NO: 87278 - RNA, 32 nt, Human
cagccuuguuuguacuguaugccuucagcauu

SEQ ID NO: 87279 - RNA, 32 nt, Human
cagccuuuaccaugcgcugagugagaagcuga

SEQ ID NO: 87280 - RNA, 32 nt, Human
cagccuuuacucauucacauacaccaucacac

SEQ ID NO: 87281 - RNA, 20 nt, Human
cagccuuuacuccucugccc

SEQ ID NO: 87282 - RNA, 32 nt, Human
cagccuuuauccugauaccaagccagcucugc

SEQ ID NO: 87283 - RNA, 32 nt, Human
cagccuuucaagcagaggacagaaggguccuu

SEQ ID NO: 87284 - RNA, 21 nt, Human
cagccuuuccacccucaucca

SEQ ID NO: 87285 - RNA, 15 nt, Human
cagccuuuccaggcc

SEQ ID NO: 87286 - RNA, 32 nt, Human
cagccuuuccaggguuaaccacugugguggug

SEQ ID NO: 87287 - RNA, 32 nt, Human
cagccuuuccagugccagcccaucaaaagcaa

SEQ ID NO: 87288 - RNA, 22 nt, Human
cagccuuucccaugcucugccc

SEQ ID NO: 87289 - RNA, 32 nt, Human
cagccuuuccccagccaggagagaccaccuaa

SEQ ID NO: 87290 - RNA, 32 nt, Human
cagccuuuccccaggcaggaguugggguuggg

SEQ ID NO: 87291 - RNA, 32 nt, Human
cagccuuucgggaggcugagacaggagaaucg

SEQ ID NO: 87292 - RNA, 18 nt, Human
cagccuuucggucuucua

SEQ ID NO: 87293 - RNA, 32 nt, Human
cagccuuucuccaggugggagugcaguggcau

SEQ ID NO: 87294 - RNA, 32 nt, Human
cagccuuucucccauuucaguaagcaucauca

SEQ ID NO: 87295 - RNA, 20 nt, Human
cagccuuucucugcagccau

SEQ ID NO: 87296 - RNA, 21 nt, Human
cagccuuugaggauuuucuau

SEQ ID NO: 87297 - RNA, 18 nt, Human
cagccuuugauuucucca

SEQ ID NO: 87298 - RNA, 32 nt, Human
cagccuuugccaucggaacugccuuauuaaag

SEQ ID NO: 87299 - RNA, 32 nt, Human
cagccuuuggccacagcaccaccagcugcugu

SEQ ID NO: 87300 - RNA, 32 nt, Human
cagccuuuguuguggaacaugacuucaucaug

SEQ ID NO: 87301 - RNA, 32 nt, Human
cagccuuuuacccucuugccuccugccuccgc

SEQ ID NO: 87302 - RNA, 32 nt, Human
cagccuuuuugaaggggacacagucuaggagg

SEQ ID NO: 87303 - RNA, 32 nt, Human
cagcgaaauggaggggugugugucuaaccuaa

SEQ ID NO: 87304 - RNA, 32 nt, Human
cagcgaacacacacagguguccugccguugga

SEQ ID NO: 87305 - RNA, 32 nt, Human
cagcgaagagagagagcuguaggccagcugcc

SEQ ID NO: 87306 - RNA, 32 nt, Human
cagcgaagcaggcaggaaaggcucaagugauc

SEQ ID NO: 87307 - RNA, 32 nt, Human
cagcgaagcuguugguugaaucauaaugccuu

SEQ ID NO: 87308 - RNA, 32 nt, Human
cagcgaagcuguugguugaaucauaauuaaug

SEQ ID NO: 87309 - RNA, 32 nt, Human
cagcgaagucaccugcucucugccacucuguc

SEQ ID NO: 87310 - RNA, 32 nt, Human
cagcgacaacagcaccagagccaggcagucac

SEQ ID NO: 87311 - RNA, 32 nt, Human
cagcgacaaucaguggauggugcugucuaugc

SEQ ID NO: 87312 - RNA, 20 nt, Human
cagcgacagaccuaucugaa

SEQ ID NO: 87313 - RNA, 32 nt, Human
cagcgaccccuuccccagcccgacaggugagc

SEQ ID NO: 87314 - RNA, 32 nt, Human
cagcgaccucaaguguccugaaagcuuacauu

SEQ ID NO: 87315 - RNA, 21 nt, Human
cagcgaccucccuuccagccc

SEQ ID NO: 87316 - RNA, 32 nt, Human
cagcgacggggccggggugauggugcaggugc

SEQ ID NO: 87317 - RNA, 32 nt, Human
cagcgacuuccuggaaccucaaacaauguggg

SEQ ID NO: 87318 - RNA, 32 nt, Human
cagcgacuugggaggcugagguggagaauugc

SEQ ID NO: 87319 - RNA, 32 nt, Human
cagcgacuugggaggcugaggugggaggauug

SEQ ID NO: 87320 - RNA, 23 nt, Human
cagcgagaacaucccagcuccac

SEQ ID NO: 87321 - RNA, 32 nt, Human
cagcgagacuccgucucaaaaagaaaaaguuu

SEQ ID NO: 87322 - RNA, 32 nt, Human
cagcgagaggcagagaaagaagagacaggagg

SEQ ID NO: 87323 - RNA, 32 nt, Human
cagcgagaggcagaggcggcggcggcggggag

SEQ ID NO: 87324 - RNA, 32 nt, Human
cagcgagauccagggacagagucucagccucg

SEQ ID NO: 87325 - RNA, 32 nt, Human
cagcgagccaccacagccaccagucccagaac

SEQ ID NO: 87326 - RNA, 32 nt, Human
cagcgagccagcccuguauuucuagcccagca

SEQ ID NO: 87327 - RNA, 32 nt, Human
cagcgagcccagagggauuuugccgcugcuuc

SEQ ID NO: 87328 - RNA, 32 nt, Human
cagcgagccccugguggcagugggagcugccu

SEQ ID NO: 87329 - RNA, 32 nt, Human
cagcgagcccgggaguuggugccgcaagaccu

SEQ ID NO: 87330 - RNA, 17 nt, Human
cagcgagccgugagaug

SEQ ID NO: 87331 - RNA, 32 nt, Human
cagcgagccugccccuuuucuucaagggacug

SEQ ID NO: 87332 - RNA, 32 nt, Human
cagcgagcggcccugaugcaggccaucaaguu

SEQ ID NO: 87333 - RNA, 32 nt, Human
cagcgaggagugaagcugagccuggccucaca

SEQ ID NO: 87334 - RNA, 32 nt, Human
cagcgaggaguucuuccgggaggacgacggug

SEQ ID NO: 87335 - RNA, 32 nt, Human
cagcgaggccaccacaucucaggaugaggcuc

SEQ ID NO: 87336 - RNA, 32 nt, Human
cagcgaggcgaagagggaaggaagguggauuu

SEQ ID NO: 87337 - RNA, 32 nt, Human
cagcgaggcgaggcugccucugggugaguggc

SEQ ID NO: 87338 - RNA, 20 nt, Human
cagcgaggcugggcuggcca

SEQ ID NO: 87339 - RNA, 32 nt, Human
cagcgaggcuuccucuggggaagacagugagc

SEQ ID NO: 87340 - RNA, 32 nt, Human
cagcgagggacacugaguggcccuucauguac

SEQ ID NO: 87341 - RNA, 32 nt, Human
cagcgagggcaaccuccagauccaucacgugg

SEQ ID NO: 87342 - RNA, 32 nt, Human
cagcgagggccacuacacuccagccuggguga

SEQ ID NO: 87343 - RNA, 22 nt, Human
cagcgagguucuccaggaccuu

SEQ ID NO: 87344 - RNA, 32 nt, Human
cagcgagugcagauugcucccccgcggccgca

SEQ ID NO: 87345 - RNA, 32 nt, Human
cagcgaucggagccucacggggaaacaaggga

SEQ ID NO: 87346 - RNA, 32 nt, Human
cagcgaugauggcugcugucauucaagcccau

SEQ ID NO: 87347 - RNA, 32 nt, Human
cagcgaugcucccagcccaagagcccaugggu

SEQ ID NO: 87348 - RNA, 32 nt, Human
cagcgauggugacuugaccuugccaagaccug

SEQ ID NO: 87349 - RNA, 30 nt, Human
cagcgaugucuccaccaccgcugcugcaac

SEQ ID NO: 87350 - RNA, 32 nt, Human
cagcgauucuccugccucccugccucagccug

SEQ ID NO: 87351 - RNA, 32 nt, Human
cagcgcaacauggcaggagcuggaggagggaa

SEQ ID NO: 87352 - RNA, 32 nt, Human
cagcgcaaggguuucugguuugccaagaagaa

SEQ ID NO: 87353 - RNA, 32 nt, Human
cagcgcacagccguugcaccaggguacugcag

SEQ ID NO: 87354 - RNA, 32 nt, Human
cagcgcacagccugggcagcucagccugucag

SEQ ID NO: 87355 - RNA, 32 nt, Human
cagcgcacagucaggaagggcguggaccaggg

SEQ ID NO: 87356 - RNA, 32 nt, Human
cagcgcacugcaaccuggaccuccugggcuca

SEQ ID NO: 87357 - RNA, 32 nt, Human
cagcgcagaggacuguucuauauacauacaau

SEQ ID NO: 87358 - RNA, 32 nt, Human
cagcgcagaggcuuuggaggcugcagugucuc

SEQ ID NO: 87359 - RNA, 24 nt, Human
cagcgcagcauuuauuuuaugaua

SEQ ID NO: 87360 - RNA, 32 nt, Human
cagcgcaggcugccacccaccugggcgaccuc

SEQ ID NO: 87361 - RNA, 32 nt, Human
cagcgcagggggaacccagggagcgcgauggg

SEQ ID NO: 87362 - RNA, 32 nt, Human
cagcgcaggucugaggagcugagaagggaggc

SEQ ID NO: 87363 - RNA, 32 nt, Human
cagcgcaguucccagcugucucccugcuccuc

SEQ ID NO: 87364 - RNA, 32 nt, Human
cagcgccaacagcaacgcggaccacgaaggau

SEQ ID NO: 87365 - RNA, 32 nt, Human
cagcgccaccucuugucagugcucggcuguaa

SEQ ID NO: 87366 - RNA, 23 nt, Human
cagcgccagccucuucgcuccgu

SEQ ID NO: 87367 - RNA, 32 nt, Human
cagcgccaggagggggagcugggcaugggcac

SEQ ID NO: 87368 - RNA, 32 nt, Human
cagcgccaggagguggaccccagagugugagu

SEQ ID NO: 87369 - RNA, 32 nt, Human
cagcgccauggagccgggggaggugaaggacc

SEQ ID NO: 87370 - RNA, 32 nt, Human
cagcgcccacacccuucuagcaccuccugaca

SEQ ID NO: 87371 - RNA, 32 nt, Human
cagcgcccacagauuccagagugcuuacagaa

SEQ ID NO: 87372 - RNA, 32 nt, Human
cagcgcccagccuggccccaagcauggaaacg

SEQ ID NO: 87373 - RNA, 32 nt, Human
cagcgcccccagaacauacacugugaacucaa

SEQ ID NO: 87374 - RNA, 32 nt, Human
cagcgccccucacuugcucuggcuucagaagu

SEQ ID NO: 87375 - RNA, 32 nt, Human
cagcgccccuccugcccgccccuagacggccu

SEQ ID NO: 87376 - RNA, 22 nt, Human
cagcgccccuggacgggccggg

SEQ ID NO: 87377 - RNA, 32 nt, Human
cagcgccccuggccuguggacgcccugccugc

SEQ ID NO: 87378 - RNA, 32 nt, Human
cagcgcccggccaaucuggagcuguuucuguu

SEQ ID NO: 87379 - RNA, 32 nt, Human
cagcgcccggcugggacagucucuccauaccc

SEQ ID NO: 87380 - RNA, 32 nt, Human
cagcgcccuccagaguuaccuggggaggaccg

SEQ ID NO: 87381 - RNA, 32 nt, Human
cagcgcccuccucugcuguugcagcugcaagg

SEQ ID NO: 87382 - RNA, 32 nt, Human
cagcgcccuggaccaugcaguucggcggccgc

SEQ ID NO: 87383 - RNA, 19 nt, Human
cagcgccgacguccugccc

SEQ ID NO: 87384 - RNA, 32 nt, Human
cagcgccgagcccagcccugaagucguuucgg

SEQ ID NO: 87385 - RNA, 19 nt, Human
cagcgccgcccuccugcuc

SEQ ID NO: 87386 - RNA, 19 nt, Human
cagcgccgccgacacccac

SEQ ID NO: 87387 - RNA, 20 nt, Human
cagcgccgccgccugccccg

SEQ ID NO: 87388 - RNA, 20 nt, Human
cagcgccgccuccccgcccg

SEQ ID NO: 87389 - RNA, 32 nt, Human
cagcgccgcggcgacgaacccagggagaaaag

SEQ ID NO: 87390 - RNA, 20 nt, Human
cagcgccgcugcagcuggcc

SEQ ID NO: 87391 - RNA, 32 nt, Human
cagcgccggucgggagcgcagcgcggcgcagc

SEQ ID NO: 87392 - RNA, 21 nt, Human
cagcgccuaggcgaccuggag

SEQ ID NO: 87393 - RNA, 32 nt, Human
cagcgccuccccucaccgacuuuggccuuuuu

SEQ ID NO: 87394 - RNA, 32 nt, Human
cagcgccuccugacucagcccaggaccggcuu

SEQ ID NO: 87395 - RNA, 32 nt, Human
cagcgccugccuccucccuccugggucuuccc

SEQ ID NO: 87396 - RNA, 32 nt, Human
cagcgccugccugcuggggcugccugcaugcc

SEQ ID NO: 87397 - RNA, 32 nt, Human
cagcgccugugcagaccucccugcaggccgca

SEQ ID NO: 87398 - RNA, 32 nt, Human
cagcgcgagggcccugggcaaggcccgacaga

SEQ ID NO: 87399 - RNA, 32 nt, Human
cagcgcgcagagacugcagccucccaaucgug

SEQ ID NO: 87400 - RNA, 32 nt, Human
cagcgcggagggagcagagggaguccauggag

SEQ ID NO: 87401 - RNA, 32 nt, Human
cagcgcgggaggcggcgaagggcgcaggagca

SEQ ID NO: 87402 - RNA, 32 nt, Human
cagcgcgguucacacugagacccagcccucuc

SEQ ID NO: 87403 - RNA, 23 nt, Human
cagcgcguuugcacuuugugaua

SEQ ID NO: 87404 - RNA, 32 nt, Human
cagcgcucauuuccagcugagccacgccugcc

SEQ ID NO: 87405 - RNA, 32 nt, Human
cagcgcuccagccuggucgacagagugagacu

SEQ ID NO: 87406 - RNA, 22 nt, Human
cagcgcuccucccccugcuccg

SEQ ID NO: 87407 - RNA, 32 nt, Human
cagcgcucgcagcuguccggggcuucucuggc

SEQ ID NO: 87408 - RNA, 32 nt, Human
cagcgcucgcuccuccguuucuucccaccggc

SEQ ID NO: 87409 - RNA, 32 nt, Human
cagcgcucuuggaggccugcaaaggaagagca

SEQ ID NO: 87410 - RNA, 18 nt, Human
cagcgcugacguuuucuc

SEQ ID NO: 87411 - RNA, 32 nt, Human
cagcgcugagauuuuucuugcagauccaucag

SEQ ID NO: 87412 - RNA, 32 nt, Human
cagcgcugccguguggcccauggaugccccag

SEQ ID NO: 87413 - RNA, 32 nt, Human
cagcgcugccugggcauuguuggugcucaggu

SEQ ID NO: 87414 - RNA, 32 nt, Human
cagcgcugcugguagccaggggaggggucugc

SEQ ID NO: 87415 - RNA, 32 nt, Human
cagcgcugcuguggcuaacaccacuguguaug

SEQ ID NO: 87416 - RNA, 32 nt, Human
cagcgcuguaacugcaggauggggaagcagaa

SEQ ID NO: 87417 - RNA, 32 nt, Human
cagcgcuugguggagcuccggcacuguccaca

SEQ ID NO: 87418 - RNA, 32 nt, Human
cagcgcuuugggaggcagaggcagguggauca

SEQ ID NO: 87419 - RNA, 32 nt, Human
cagcgcuuugggaggccgaggcaggcagauca

SEQ ID NO: 87420 - RNA, 32 nt, Human
cagcgcuuugggaggccgaggcaggcggacca

SEQ ID NO: 87421 - RNA, 32 nt, Human
cagcgcuuugggaggccgaggcgggcggaucg

SEQ ID NO: 87422 - RNA, 32 nt, Human
cagcgcuuugggaggccgaggugggcagauca

SEQ ID NO: 87423 - RNA, 32 nt, Human
cagcgcuuugggaggccgaggugggcggauca

SEQ ID NO: 87424 - RNA, 32 nt, Human
cagcgcuuugggaggcuaaggcaggcagauca

SEQ ID NO: 87425 - RNA, 32 nt, Human
cagcgcuuugggaggcugagguggacagaucg

SEQ ID NO: 87426 - RNA, 32 nt, Human
cagcggaaagggacgugagcugagcgcggggg

SEQ ID NO: 87427 - RNA, 32 nt, Human
cagcggaacgaacagcugucugccuuguugug

SEQ ID NO: 87428 - RNA, 32 nt, Human
cagcggaaucccccgucuaccucucuccuugg

SEQ ID NO: 87429 - RNA, 32 nt, Human
cagcggaccaggcagacgggcugaaguggggu

SEQ ID NO: 87430 - RNA, 32 nt, Human
cagcggacucgauaaucugccugcugauguuc

SEQ ID NO: 87431 - RNA, 32 nt, Human
cagcggagaagacugagguccaaaaaggaaaa

SEQ ID NO: 87432 - RNA, 32 nt, Human
cagcggagacuuauguaggagggaccuucccu

SEQ ID NO: 87433 - RNA, 32 nt, Human
cagcggagauccgagagcagggggauggggca

SEQ ID NO: 87434 - RNA, 32 nt, Human
cagcggagccccgggaguguccaagacagccu

SEQ ID NO: 87435 - RNA, 32 nt, Human
cagcggaggagaaggaggaggaggcgaaccca

SEQ ID NO: 87436 - RNA, 32 nt, Human
cagcggaggagucgugucgugccugagagcgc

SEQ ID NO: 87437 - RNA, 32 nt, Human
cagcggaggccaagggaggggagcagccuagu

SEQ ID NO: 87438 - RNA, 22 nt, Human
cagcggagucaacauucacaga

SEQ ID NO: 87439 - RNA, 18 nt, Human
cagcggagucuucagaua

SEQ ID NO: 87440 - RNA, 22 nt, Human
cagcggaucaucugaggucagg

SEQ ID NO: 87441 - RNA, 32 nt, Human
cagcggaucccuccccgccuccauccucguuc

SEQ ID NO: 87442 - RNA, 32 nt, Human
cagcggauccuccugaguaugguugaaaaugg

SEQ ID NO: 87443 - RNA, 32 nt, Human
cagcggauccugggugcaggggaggggcggga

SEQ ID NO: 87444 - RNA, 32 nt, Human
cagcggcaacggcagagacagcaacgugcccg

SEQ ID NO: 87445 - RNA, 32 nt, Human
cagcggcaccauggcuuuccucuggcuccucu

SEQ ID NO: 87446 - RNA, 17 nt, Human
cagcggcagcgcagggg

SEQ ID NO: 87447 - RNA, 18 nt, Human
cagcggcagcuccacuca

SEQ ID NO: 87448 - RNA, 32 nt, Human
cagcggcagggggagcgccuggaacaugcagc

SEQ ID NO: 87449 - RNA, 32 nt, Human
cagcggcagggugucccaggagcccugauccg

SEQ ID NO: 87450 - RNA, 32 nt, Human
cagcggcaugaucacaccucacugcagccuca

SEQ ID NO: 87451 - RNA, 26 nt, Human
cagcggccaauacuaugauuugcugc

SEQ ID NO: 87452 - RNA, 20 nt, Human
cagcggccacauggugcugg

SEQ ID NO: 87453 - RNA, 32 nt, Human
cagcggcccaacuggccggcagccuggugagc

SEQ ID NO: 87454 - RNA, 32 nt, Human
cagcggcccagcacuugugcgcauagaagcua

SEQ ID NO: 87455 - RNA, 32 nt, Human
cagcggccccggcuccagcccagccagcacuc

SEQ ID NO: 87456 - RNA, 32 nt, Human
cagcggccccucccacacacacccacacacuc

SEQ ID NO: 87457 - RNA, 32 nt, Human
cagcggccccuggaggaggaggcggaggagga

SEQ ID NO: 87458 - RNA, 32 nt, Human
cagcggccgcagucuucaccucuccacacuca

SEQ ID NO: 87459 - RNA, 20 nt, Human
cagcggccgggcgggccggg

SEQ ID NO: 87460 - RNA, 32 nt, Human
cagcggccguggagguggcguuggggacuguu

SEQ ID NO: 87461 - RNA, 32 nt, Human
cagcggccucgggacugggacuagggaggggg

SEQ ID NO: 87462 - RNA, 32 nt, Human
cagcggccuggcagagguuucagcgcugagga

SEQ ID NO: 87463 - RNA, 18 nt, Human
cagcggcgacagagcaag

SEQ ID NO: 87464 - RNA, 32 nt, Human
cagcggcgaggaggaggaagaggaggcggagg

SEQ ID NO: 87465 - RNA, 32 nt, Human
cagcggcgcagcgcuccagccaugucgcgcgg

SEQ ID NO: 87466 - RNA, 32 nt, Human
cagcggcgcuggggccagaggggccaggcggg

SEQ ID NO: 87467 - RNA, 21 nt, Human
cagcggcggcagcagcaccag

SEQ ID NO: 87468 - RNA, 32 nt, Human
cagcggcggcagcagcagcggcagcgacccca

SEQ ID NO: 87469 - RNA, 32 nt, Human
cagcggcggccgcggcagcgauagcggcacua

SEQ ID NO: 87470 - RNA, 32 nt, Human
cagcggcggccgcggcgcgugcgucugugccu

SEQ ID NO: 87471 - RNA, 32 nt, Human
cagcggcggcuggagccuccugauuggguuuc

SEQ ID NO: 87472 - RNA, 32 nt, Human
cagcggcgggcaggugccacgaccucuggacg

SEQ ID NO: 87473 - RNA, 32 nt, Human
cagcggcgggccugaggcgaaggagcggccgg

SEQ ID NO: 87474 - RNA, 20 nt, Human
cagcggcggggugggccagg

SEQ ID NO: 87475 - RNA, 32 nt, Human
cagcggcgguggcagccgaggugcaggaugca

SEQ ID NO: 87476 - RNA, 32 nt, Human
cagcggcgucugcagcucgcuucaagauggcc

SEQ ID NO: 87477 - RNA, 23 nt, Human
cagcggcucaaauguucauccca

SEQ ID NO: 87478 - RNA, 19 nt, Human
cagcggcucaacucaccuu

SEQ ID NO: 87479 - RNA, 32 nt, Human
cagcggcucacccgugugcacacucacgugcc

SEQ ID NO: 87480 - RNA, 24 nt, Human
cagcggcucacgccuguaauccca

SEQ ID NO: 87481 - RNA, 24 nt, Human
cagcggcucaugccuguaaccuca

SEQ ID NO: 87482 - RNA, 24 nt, Human
cagcggcucaugccuguaagccca

SEQ ID NO: 87483 - RNA, 24 nt, Human
cagcggcucaugccuguaauccca

SEQ ID NO: 87484 - RNA, 32 nt, Human
cagcggcuccccuccgcuucucaucccaaccu

SEQ ID NO: 87485 - RNA, 24 nt, Human
cagcggcucccgcucauuccccca

SEQ ID NO: 87486 - RNA, 21 nt, Human
cagcggcucgcaucccccuca

SEQ ID NO: 87487 - RNA, 24 nt, Human
cagcggcucucgccuguaauccca

SEQ ID NO: 87488 - RNA, 19 nt, Human
cagcggcugagcaagggcu

SEQ ID NO: 87489 - RNA, 32 nt, Human
cagcggcugcaggacuucaccaagggacccug

SEQ ID NO: 87490 - RNA, 32 nt, Human
cagcggcuguuacacuguucuuugccacugug

SEQ ID NO: 87491 - RNA, 32 nt, Human
cagcggcuucuccagcaccccuagagagggca

SEQ ID NO: 87492 - RNA, 32 nt, Human
cagcggcuuucucuuucugaugggagguguua

SEQ ID NO: 87493 - RNA, 32 nt, Human
cagcgggaaggcugcugggaacagguggcaga

SEQ ID NO: 87494 - RNA, 32 nt, Human
cagcgggaccaacauggugaaaccccgucucu

SEQ ID NO: 87495 - RNA, 32 nt, Human
cagcgggaccauuauuacuggugcaaaaugag

SEQ ID NO: 87496 - RNA, 32 nt, Human
cagcgggacucuucucauccuuccucauuugc

SEQ ID NO: 87497 - RNA, 32 nt, Human
cagcgggagcagagcaccaccauggccuccau

SEQ ID NO: 87498 - RNA, 32 nt, Human
cagcgggauaaaagggugaauuuggagcugac

SEQ ID NO: 87499 - RNA, 32 nt, Human
cagcgggauggcaucuccgacacucccguggg

SEQ ID NO: 87500 - RNA, 32 nt, Human
cagcgggauuccgacuggcaagauggugccca

SEQ ID NO: 87501 - RNA, 32 nt, Human
cagcgggcaggcaugggguguuugggcggcaa

SEQ ID NO: 87502 - RNA, 19 nt, Human
cagcgggcgccuccuccca

SEQ ID NO: 87503 - RNA, 20 nt, Human
cagcgggcgggcgggccggg

SEQ ID NO: 87504 - RNA, 32 nt, Human
cagcgggcgugaguugggggaggacggguugc

SEQ ID NO: 87505 - RNA, 32 nt, Human
cagcgggcugagcaggcggcagaggaaaagaa

SEQ ID NO: 87506 - RNA, 32 nt, Human
cagcgggcugggauggagcacagccaugaacc

SEQ ID NO: 87507 - RNA, 32 nt, Human
cagcgggcuuguagguguccggcuuugcuggc

SEQ ID NO: 87508 - RNA, 32 nt, Human
cagcggggaaacugaggcucgggguggagcgc

SEQ ID NO: 87509 - RNA, 32 nt, Human
cagcggggacaguggggacagcagggacagcg

SEQ ID NO: 87510 - RNA, 32 nt, Human
cagcggggagcacgggugcugccuuccgugcg

SEQ ID NO: 87511 - RNA, 32 nt, Human
cagcggggccuggcgguggaagcgccuccagu

SEQ ID NO: 87512 - RNA, 32 nt, Human
cagcggggcgaggcggcugggcccugcgcguc

SEQ ID NO: 87513 - RNA, 32 nt, Human
cagcggggcuccugccucccggccuggucccc

SEQ ID NO: 87514 - RNA, 32 nt, Human
cagcggggcugcagcuaacgggguacagguag

SEQ ID NO: 87515 - RNA, 27 nt, Human
cagcgggggauuugagcuuacaggauu

SEQ ID NO: 87516 - RNA, 32 nt, Human
cagcgggggccagacuccugccggccucagag

SEQ ID NO: 87517 - RNA, 32 nt, Human
cagcgggggcugauggaagugcagugggggcu

SEQ ID NO: 87518 - RNA, 31 nt, Human
cagcggggguguugagaaaaagcuggaugca

SEQ ID NO: 87519 - RNA, 32 nt, Human
cagcggggugugccccuccugcugacgagggu

SEQ ID NO: 87520 - RNA, 32 nt, Human
cagcgggucugaguccagccucgggagccccu

SEQ ID NO: 87521 - RNA, 32 nt, Human
cagcgggugcgugcgcucuuagagaaacuuuc

SEQ ID NO: 87522 - RNA, 25 nt, Human
cagcgguagcggcucgcucgccuca

SEQ ID NO: 87523 - RNA, 32 nt, Human
cagcgguagcucagcaguuccagauggcaguu

SEQ ID NO: 87524 - RNA, 32 nt, Human
cagcggucugugguagagaacucucuuccuuc

SEQ ID NO: 87525 - RNA, 32 nt, Human
cagcgguucaaauccggcaucuggucgcugag

SEQ ID NO: 87526 - RNA, 32 nt, Human
cagcgguucagcccuggcuggggcugcagggg

SEQ ID NO: 87527 - RNA, 32 nt, Human
cagcgguuccauccuacacuuggauucaguaa

SEQ ID NO: 87528 - RNA, 23 nt, Human
cagcgguuccgccuguaauccca

SEQ ID NO: 87529 - RNA, 32 nt, Human
cagcgguuccugucaagggggcagcaggucca

SEQ ID NO: 87530 - RNA, 32 nt, Human
cagcgguugaagccugauggccuggcucugug

SEQ ID NO: 87531 - RNA, 32 nt, Human
cagcguaacuacccuaaaagcauaucacuagc

SEQ ID NO: 87532 - RNA, 32 nt, Human
cagcguagagcuccaccuccccuuuccccagu

SEQ ID NO: 87533 - RNA, 23 nt, Human
cagcguaggccaacagagugaga

SEQ ID NO: 87534 - RNA, 32 nt, Human
cagcguauccaagaggauggacuuagugaugg

SEQ ID NO: 87535 - RNA, 17 nt, Human
cagcgucauaugagaug

SEQ ID NO: 87536 - RNA, 32 nt, Human
cagcguccacaccuaagaacagcagcuccacc

SEQ ID NO: 87537 - RNA, 32 nt, Human
cagcguccagugcccugccaguagcuccuaga

SEQ ID NO: 87538 - RNA, 32 nt, Human
cagcguccauucgccagguuacccaggagaac

SEQ ID NO: 87539 - RNA, 18 nt, Human
cagcguccccuccuuccc

SEQ ID NO: 87540 - RNA, 32 nt, Human
cagcgucggucaggacugucucgaggccacac

SEQ ID NO: 87541 - RNA, 32 nt, Human
cagcgucuccggaaguggaggcgggagcggca

SEQ ID NO: 87542 - RNA, 32 nt, Human
cagcgucucggaacugcugguccucauuccuu

SEQ ID NO: 87543 - RNA, 31 nt, Human
cagcgucucggucacagaguuggagaaauag

SEQ ID NO: 87544 - RNA, 32 nt, Human
cagcgucugacgggaagccugaucuggaaccu

SEQ ID NO: 87545 - RNA, 32 nt, Human
cagcgucugaggagaaggaggaaagguuucag

SEQ ID NO: 87546 - RNA, 32 nt, Human
cagcgucugccggaacccguucccagggcagg

SEQ ID NO: 87547 - RNA, 32 nt, Human
cagcgucuugcacuaccagcaggcucucacca

SEQ ID NO: 87548 - RNA, 32 nt, Human
cagcgugaagcuggugaagaccugccaggagg

SEQ ID NO: 87549 - RNA, 19 nt, Human
cagcgugacaggagugaga

SEQ ID NO: 87550 - RNA, 32 nt, Human
cagcgugaccaacguggagaaacccccgucuc

SEQ ID NO: 87551 - RNA, 32 nt, Human
cagcgugaccuugucugccucuccaauuauau

SEQ ID NO: 87552 - RNA, 32 nt, Human
cagcgugagcggaaugaaugcugaauaaauaa

SEQ ID NO: 87553 - RNA, 32 nt, Human
cagcgugaggagcgaucucagcaggccuauaa

SEQ ID NO: 87554 - RNA, 32 nt, Human
cagcgugcagugagcuggccugccuggaccuu

SEQ ID NO: 87555 - RNA, 32 nt, Human
cagcgugcaugcugggggugacagagugcuga

SEQ ID NO: 87556 - RNA, 32 nt, Human
cagcgugccggaccccucccuuccauccuccu

SEQ ID NO: 87557 - RNA, 32 nt, Human
cagcgugcugacuggccuagggccccugcccc

SEQ ID NO: 87558 - RNA, 32 nt, Human
cagcgugcuggaaucagauauuggacaaggag

SEQ ID NO: 87559 - RNA, 23 nt, Human
cagcgugcugggauuauaggcau

SEQ ID NO: 87560 - RNA, 32 nt, Human
cagcgugcuguggaaguggaagugccugaagu

SEQ ID NO: 87561 - RNA, 32 nt, Human
cagcguggaggaaggcgcgccgccccgagcug

SEQ ID NO: 87562 - RNA, 32 nt, Human
cagcguggccugauugucccaggaccugaagg

SEQ ID NO: 87563 - RNA, 32 nt, Human
cagcguggcuaacacggugaaaccccgucucu

SEQ ID NO: 87564 - RNA, 22 nt, Human
cagcgugggcaacagagugaga

SEQ ID NO: 87565 - RNA, 21 nt, Human
cagcgugggcgacagagcaag

SEQ ID NO: 87566 - RNA, 32 nt, Human
cagcguggggaagggcccuggagaagcccuca

SEQ ID NO: 87567 - RNA, 32 nt, Human
cagcgugggguggaggagaaguggaguuugga

SEQ ID NO: 87568 - RNA, 22 nt, Human
cagcgugggucaggccuccaca

SEQ ID NO: 87569 - RNA, 22 nt, Human
cagcgugggugacagagugaga

SEQ ID NO: 87570 - RNA, 32 nt, Human
cagcguggguucuuggaagagguggaguuugg

SEQ ID NO: 87571 - RNA, 32 nt, Human
cagcguggucaacaugguguaaccccaucucu

SEQ ID NO: 87572 - RNA, 32 nt, Human
cagcgugucuacaacgucucccagaagcucua

SEQ ID NO: 87573 - RNA, 32 nt, Human
cagcgugugggcuggcucaaugcugaauaaag

SEQ ID NO: 87574 - RNA, 23 nt, Human
cagcguuauucauaauagccuaa

SEQ ID NO: 87575 - RNA, 32 nt, Human
cagcguucaagacacaucauuuauacacaggc

SEQ ID NO: 87576 - RNA, 23 nt, Human
cagcguucagcacacuccugggc

SEQ ID NO: 87577 - RNA, 32 nt, Human
cagcguucccugccuccugcaggaugacuuag

SEQ ID NO: 87578 - RNA, 32 nt, Human
cagcguucgaggaccagagggagcucggccac

SEQ ID NO: 87579 - RNA, 32 nt, Human
cagcguugguacccugcaucacugccaugguu

SEQ ID NO: 87580 - RNA, 32 nt, Human
cagcguuucuaggacagaggggccucccaguc

SEQ ID NO: 87581 - RNA, 32 nt, Human
cagcuaaaaagguguuucugaagagaaaccuc

SEQ ID NO: 87582 - RNA, 32 nt, Human
cagcuaaaccugugucggucagugcaggaauu

SEQ ID NO: 87583 - RNA, 32 nt, Human
cagcuaaacgagccuggaauaaacaugcaguu

SEQ ID NO: 87584 - RNA, 32 nt, Human
cagcuaaagccugucagagaaaguggagcugg

SEQ ID NO: 87585 - RNA, 32 nt, Human
cagcuaaaggaggcugagguugcagugagcug

SEQ ID NO: 87586 - RNA, 20 nt, Human
cagcuaaagguggacuauag

SEQ ID NO: 87587 - RNA, 24 nt, Human
cagcuaaauaguuugaauuauaga

SEQ ID NO: 87588 - RNA, 32 nt, Human
cagcuaagaaaagauuuuaagucaaguugaau

SEQ ID NO: 87589 - RNA, 32 nt, Human
cagcuaagcuccacaaagccuaggugaguggg

SEQ ID NO: 87590 - RNA, 31 nt, Human
cagcuaaggagaccuggacucuggguguggg

SEQ ID NO: 87591 - RNA, 32 nt, Human
cagcuaagggaggacgccugcccacgccuggg

SEQ ID NO: 87592 - RNA, 32 nt, Human
cagcuaagucauacauucauuuugacuccuuu

SEQ ID NO: 87593 - RNA, 31 nt, Human
cagcuaaguucuaagcccuggagguuauauu

SEQ ID NO: 87594 - RNA, 32 nt, Human
cagcuaauacccagagcacccagaucagacuc

SEQ ID NO: 87595 - RNA, 32 nt, Human
cagcuaaucaucagcaccacacgaugaaccaa

SEQ ID NO: 87596 - RNA, 32 nt, Human
cagcuaaucaugucaaguucacugccugucag

SEQ ID NO: 87597 - RNA, 32 nt, Human
cagcuaauuucugcuccccugagauucguccu

SEQ ID NO: 87598 - RNA, 32 nt, Human
cagcuaauuugaugaaugucucugugcgcauu

SEQ ID NO: 87599 - RNA, 32 nt, Human
cagcuacaaaggaaagacaacuggggaaagaa

SEQ ID NO: 87600 - RNA, 32 nt, Human
cagcuacaacaacagcugagaucacuuaauaa

SEQ ID NO: 87601 - RNA, 19 nt, Human
cagcuacacccugccuggc

SEQ ID NO: 87602 - RNA, 32 nt, Human
cagcuacacucagaccaacagauggccagccc

SEQ ID NO: 87603 - RNA, 32 nt, Human
cagcuacacucggaguaaaaacaaaugaagca

SEQ ID NO: 87604 - RNA, 32 nt, Human
cagcuacagacccagaggauaagccacugggc

SEQ ID NO: 87605 - RNA, 32 nt, Human
cagcuacagguguggcuacauccagguccuaa

SEQ ID NO: 87606 - RNA, 24 nt, Human
cagcuacccacuuguugccaccag

SEQ ID NO: 87607 - RNA, 32 nt, Human
cagcuacccaggaaggcugaggcggcagaauc

SEQ ID NO: 87608 - RNA, 32 nt, Human
cagcuacccaggaggcugagacaggagaaucg

SEQ ID NO: 87609 - RNA, 32 nt, Human
cagcuacccaggaggcugaggcaagagaauca

SEQ ID NO: 87610 - RNA, 32 nt, Human
cagcuacccaggaggcugaggcaggagaaucg

SEQ ID NO: 87611 - RNA, 32 nt, Human
cagcuacccaggaggcugaggcaggagaauug

SEQ ID NO: 87612 - RNA, 32 nt, Human
cagcuacccaggaggcugaggugggaggauca

SEQ ID NO: 87613 - RNA, 32 nt, Human
cagcuacccgggaggcaguggcugcagugagc

SEQ ID NO: 87614 - RNA, 32 nt, Human
cagcuacccgggaggcugaggcaggagaauca

SEQ ID NO: 87615 - RNA, 32 nt, Human
cagcuacccgggaggcugaggcaggagaaucg

SEQ ID NO: 87616 - RNA, 32 nt, Human
cagcuacccgggaggcugaggcaggagaaugg

SEQ ID NO: 87617 - RNA, 32 nt, Human
cagcuacccgggaggcugaggcaggagaauug

SEQ ID NO: 87618 - RNA, 32 nt, Human
cagcuacccuccuaugagaguccgaaggauac

SEQ ID NO: 87619 - RNA, 32 nt, Human
cagcuacccuggaaugguggcguguccugcug

SEQ ID NO: 87620 - RNA, 32 nt, Human
cagcuaccuccucugcagaucaagagugugcc

SEQ ID NO: 87621 - RNA, 32 nt, Human
cagcuaccucggaggcagggcgcgcaggcggg

SEQ ID NO: 87622 - RNA, 32 nt, Human
cagcuaccugggaggcugaggugggagaauug

SEQ ID NO: 87623 - RNA, 16 nt, Human
cagcuacgaugggaug

SEQ ID NO: 87624 - RNA, 32 nt, Human
cagcuacgugggaggcugaggcagcagacugg

SEQ ID NO: 87625 - RNA, 32 nt, Human
cagcuacgugggaggcugaggugggagaauug

SEQ ID NO: 87626 - RNA, 32 nt, Human
cagcuacucaacaggcugagguugggaggauc

SEQ ID NO: 87627 - RNA, 32 nt, Human
cagcuacucagaucugcacuccugucucuugg

SEQ ID NO: 87628 - RNA, 32 nt, Human
cagcuacucaggaggcagagaaucacuugaac

SEQ ID NO: 87629 - RNA, 32 nt, Human
cagcuacucaggaggcugagacaggagaauca

SEQ ID NO: 87630 - RNA, 32 nt, Human
cagcuacucaggaggcugagacaggagaaucg

SEQ ID NO: 87631 - RNA, 32 nt, Human
cagcuacucaggaggcugagacaggagagucg

SEQ ID NO: 87632 - RNA, 32 nt, Human
cagcuacucaggaggcugagacaggaggauug

SEQ ID NO: 87633 - RNA, 32 nt, Human
cagcuacucaggaggcugagacagggggaucc

SEQ ID NO: 87634 - RNA, 32 nt, Human
cagcuacucaggagguugagacaggagaaucg

SEQ ID NO: 87635 - RNA, 32 nt, Human
cagcuacucaggcugaggcaggagaaucgcuu

SEQ ID NO: 87636 - RNA, 32 nt, Human
cagcuacucaggcuggggugggaggauggcuu

SEQ ID NO: 87637 - RNA, 32 nt, Human
cagcuacucccagcuauucaggaggcugaggc

SEQ ID NO: 87638 - RNA, 32 nt, Human
cagcuacucccagcuuucccauguauguuguu

SEQ ID NO: 87639 - RNA, 21 nt, Human
cagcuacuccggaggccgagg

SEQ ID NO: 87640 - RNA, 22 nt, Human
cagcuacuccggaggcugaggg

SEQ ID NO: 87641 - RNA, 32 nt, Human
cagcuacuccuggcuggggguggggccuuggg

SEQ ID NO: 87642 - RNA, 32 nt, Human
cagcuacucggaggcaggagaauugcuugaac

SEQ ID NO: 87643 - RNA, 32 nt, Human
cagcuacucgggaggcugagacaggaaaauag

SEQ ID NO: 87644 - RNA, 32 nt, Human
cagcuacucgggaggcugagacaggagaauca

SEQ ID NO: 87645 - RNA, 32 nt, Human
cagcuacucgggaggcugagacaggagaaucg

SEQ ID NO: 87646 - RNA, 32 nt, Human
cagcuacucgggaggcugagacaggagaaucu

SEQ ID NO: 87647 - RNA, 32 nt, Human
cagcuacucgggaggcugagacaggagaauug

SEQ ID NO: 87648 - RNA, 32 nt, Human
cagcuacucgggaggcugagacaggagauuug

SEQ ID NO: 87649 - RNA, 32 nt, Human
cagcuacucgggaggugaggcaggagaauggc

SEQ ID NO: 87650 - RNA, 32 nt, Human
cagcuacucgggagguggagguugcagugagc

SEQ ID NO: 87651 - RNA, 32 nt, Human
cagcuacucgggagguugaggcaggagaauca

SEQ ID NO: 87652 - RNA, 32 nt, Human
cagcuacucgggagguugaggcaggagaaucg

SEQ ID NO: 87653 - RNA, 32 nt, Human
cagcuacucgggagguugaggcaggagaaugg

SEQ ID NO: 87654 - RNA, 32 nt, Human
cagcuacucgggagguugaggcaggagaauug

SEQ ID NO: 87655 - RNA, 32 nt, Human
cagcuacucgggagguuuaggcaggagaaucg

SEQ ID NO: 87656 - RNA, 32 nt, Human
cagcuacucgggcagcugagacaggagaauca

SEQ ID NO: 87657 - RNA, 32 nt, Human
cagcuacucuggaggcugagacaggagaaucg

SEQ ID NO: 87658 - RNA, 32 nt, Human
cagcuacugcaagcuggccuccuaggggcugu

SEQ ID NO: 87659 - RNA, 31 nt, Human
cagcuacuggagaucucagccacaacugggc

SEQ ID NO: 87660 - RNA, 32 nt, Human
cagcuacuucucaccugcuccagcgcagugca

SEQ ID NO: 87661 - RNA, 32 nt, Human
cagcuacuuggaaggcugagacaggagaaucg

SEQ ID NO: 87662 - RNA, 32 nt, Human
cagcuacuuggaaggcugagacaggagaaugg

SEQ ID NO: 87663 - RNA, 32 nt, Human
cagcuacuuggagggcagaggugggaggaugg

SEQ ID NO: 87664 - RNA, 32 nt, Human
cagcuacuuggcuggcugagacaggagaagaa

SEQ ID NO: 87665 - RNA, 32 nt, Human
cagcuacuugggaagcagaggcuggaggauca

SEQ ID NO: 87666 - RNA, 32 nt, Human
cagcuacuugggaagcugagacaggagaauug

SEQ ID NO: 87667 - RNA, 32 nt, Human
cagcuacuugggaggcagagaaucacuugaac

SEQ ID NO: 87668 - RNA, 32 nt, Human
cagcuacuugggaggcagaggugggaagaugg

SEQ ID NO: 87669 - RNA, 32 nt, Human
cagcuacuugggaggcagcggcuggagaauug

SEQ ID NO: 87670 - RNA, 32 nt, Human
cagcuacuugggaggcuaagacaggagaauca

SEQ ID NO: 87671 - RNA, 32 nt, Human
cagcuacuugggaggcuaaggcaggagcaucg

SEQ ID NO: 87672 - RNA, 32 nt, Human
cagcuacuugggaggcugagacaggacaaucg

SEQ ID NO: 87673 - RNA, 32 nt, Human
cagcuacuugggaggcugagacaggagaauca

SEQ ID NO: 87674 - RNA, 32 nt, Human
cagcuacuugggaggcugagacaggagaaucc

SEQ ID NO: 87675 - RNA, 32 nt, Human
cagcuacuugggaggcugagacaggagaaucg

SEQ ID NO: 87676 - RNA, 32 nt, Human
cagcuacuugggaggcugagacaggagaauug

SEQ ID NO: 87677 - RNA, 32 nt, Human
cagcuacuugggaggcugagacaggagacuug

SEQ ID NO: 87678 - RNA, 32 nt, Human
cagcuacuugggaggcugagacaggcgaauug

SEQ ID NO: 87679 - RNA, 32 nt, Human
cagcuacuugggaggcugagaugggagaauca

SEQ ID NO: 87680 - RNA, 32 nt, Human
cagcuacuugggaggcugagaugggaggagca

SEQ ID NO: 87681 - RNA, 32 nt, Human
cagcuacuugggaggcugagaugugagaauca

SEQ ID NO: 87682 - RNA, 32 nt, Human
cagcuacuugggaggcugagcccuggaggucg

SEQ ID NO: 87683 - RNA, 32 nt, Human
cagcuacuugggaggcugaggcaagugaauca

SEQ ID NO: 87684 - RNA, 32 nt, Human
cagcuacuugggaggcugaggcagaauugcuu

SEQ ID NO: 87685 - RNA, 32 nt, Human
cagcuacuugggaggcugaggcagagcugcuu

SEQ ID NO: 87686 - RNA, 32 nt, Human
cagcuacuugggaggcugaggcagcagaagca

SEQ ID NO: 87687 - RNA, 32 nt, Human
cagcuacuugggaggcugaggcagcauugcuu

SEQ ID NO: 87688 - RNA, 32 nt, Human
cagcuacuugggaggcugaggcauggagaauc

SEQ ID NO: 87689 - RNA, 32 nt, Human
cagcuacuugggaggcugaggcggcaggauca

SEQ ID NO: 87690 - RNA, 32 nt, Human
cagcuacuugggaggcugaggcuggagaaucg

SEQ ID NO: 87691 - RNA, 32 nt, Human
cagcuacuugggaggcugagggcaggagaaug

SEQ ID NO: 87692 - RNA, 32 nt, Human
cagcuacuugggaggcugagggcaggagaauu

SEQ ID NO: 87693 - RNA, 32 nt, Human
cagcuacuugggaggcugaggucagaggaugg

SEQ ID NO: 87694 - RNA, 32 nt, Human
cagcuacuugggaggcugaggugggaaaauga

SEQ ID NO: 87695 - RNA, 32 nt, Human
cagcuacuugggaggcugaggugggagaauug

SEQ ID NO: 87696 - RNA, 32 nt, Human
cagcuacuugggaggcugaggugggagccugg

SEQ ID NO: 87697 - RNA, 32 nt, Human
caggcacuugcaagggaggacauuccaggcaa

SEQ ID NO: 87698 - RNA, 32 nt, Human
caggcacuugccucucuccuguccuggagccc

SEQ ID NO: 87699 - RNA, 32 nt, Human
caggcacuuuggaaggugcuaagugacugccc

SEQ ID NO: 87700 - RNA, 32 nt, Human
caggcagaaagagagacaaagacagaaauaga

SEQ ID NO: 87701 - RNA, 32 nt, Human
caggcagaaagagcuccaggcucuugugucgc

SEQ ID NO: 87702 - RNA, 32 nt, Human
caggcagaacuccgcuccccugcuccaaacug

SEQ ID NO: 87703 - RNA, 32 nt, Human
caggcagaagaaaaggcagcugugguguguga

SEQ ID NO: 87704 - RNA, 32 nt, Human
caggcagacaagauuauggaagagaaauguau

SEQ ID NO: 87705 - RNA, 32 nt, Human
caggcagacacagagcacaaugcugggguucu

SEQ ID NO: 87706 - RNA, 21 nt, Human
caggcagaccacgaggucagg

SEQ ID NO: 87707 - RNA, 32 nt, Human
caggcagacccugucccuucacacuacagugg

SEQ ID NO: 87708 - RNA, 32 nt, Human
caggcagacucuucccaccuucucccacugaa

SEQ ID NO: 87709 - RNA, 32 nt, Human
caggcagagaaaaccugcauccucugggcuug

SEQ ID NO: 87710 - RNA, 32 nt, Human
caggcagagagggacguguagggagaguucuu

SEQ ID NO: 87711 - RNA, 32 nt, Human
caggcagagcugcuccccucugcacggaccau

SEQ ID NO: 87712 - RNA, 32 nt, Human
caggcagaggaaaugaagcacuggugcaggag

SEQ ID NO: 87713 - RNA, 32 nt, Human
caggcagaggaagggcuacacaggugucacug

SEQ ID NO: 87714 - RNA, 32 nt, Human
caggcagagggugggggaccuggcgggagccc

SEQ ID NO: 87715 - RNA, 32 nt, Human
caggcagagguggucagggagaaggugggacu

SEQ ID NO: 87716 - RNA, 19 nt, Human
caggcagagguugcaguga

SEQ ID NO: 87717 - RNA, 20 nt, Human
caggcagagguugcagugag

SEQ ID NO: 87718 - RNA, 32 nt, Human
caggcagaguaguugaucucacacaacgggug

SEQ ID NO: 87719 - RNA, 32 nt, Human
caggcagaguccgccgaggccuggggugggag

SEQ ID NO: 87720 - RNA, 32 nt, Human
caggcagauauguagcaguguucuccacugga

SEQ ID NO: 87721 - RNA, 21 nt, Human
caggcagaucacaaggucagg

SEQ ID NO: 87722 - RNA, 23 nt, Human
caggcagaucaccugagcucagg

SEQ ID NO: 87723 - RNA, 21 nt, Human
caggcagaucacgaggucagg

SEQ ID NO: 87724 - RNA, 20 nt, Human
caggcagaucacugauccag

SEQ ID NO: 87725 - RNA, 23 nt, Human
caggcagaucacuugaggucagg

SEQ ID NO: 87726 - RNA, 32 nt, Human
caggcagaucacuuuaggucaggaguucaacg

SEQ ID NO: 87727 - RNA, 32 nt, Human
caggcagaucagacugucagcacuccaggaug

SEQ ID NO: 87728 - RNA, 32 nt, Human
caggcagaucucaaacuccugaccucgugaug

SEQ ID NO: 87729 - RNA, 32 nt, Human
caggcagaucucaaacuucugaccucgugaug

SEQ ID NO: 87730 - RNA, 32 nt, Human
caggcagauucauggagaccagucccaguagc

SEQ ID NO: 87731 - RNA, 19 nt, Human
caggcagauugcaggcagg

SEQ ID NO: 87732 - RNA, 23 nt, Human
caggcagauugcccgagcucagg

SEQ ID NO: 87733 - RNA, 23 nt, Human
caggcagauugcuugagcccagg

SEQ ID NO: 87734 - RNA, 21 nt, Human
caggcagauugcuugaggcca

SEQ ID NO: 87735 - RNA, 32 nt, Human
caggcagcacagaacagcuugcugcuccuccu

SEQ ID NO: 87736 - RNA, 32 nt, Human
caggcagcacaucacagcgggaggagcugucc

SEQ ID NO: 87737 - RNA, 32 nt, Human
caggcagcaccaaagguuuuugucuugggaag

SEQ ID NO: 87738 - RNA, 19 nt, Human
caggcagcaccagggcucc

SEQ ID NO: 87739 - RNA, 21 nt, Human
caggcagcacuuuuggccagg

SEQ ID NO: 87740 - RNA, 32 nt, Human
caggcagcaggcagcaggcgggcgcgcugugg

SEQ ID NO: 87741 - RNA, 32 nt, Human
caggcagcagggccuuccugaccaacagccag

SEQ ID NO: 87742 - RNA, 32 nt, Human
caggcagcaguuagcccgccgcccgccugugu

SEQ ID NO: 87743 - RNA, 32 nt, Human
caggcagccacagcaggcugccuuaccccaga

SEQ ID NO: 87744 - RNA, 32 nt, Human
caggcagccaggggcuguggggagacagugug

SEQ ID NO: 87745 - RNA, 32 nt, Human
caggcagccaugagcuccagccaccccgagcc

SEQ ID NO: 87746 - RNA, 32 nt, Human
caggcagccccgacgguuuccacagcgagcgc

SEQ ID NO: 87747 - RNA, 32 nt, Human
caggcagcccugggcuaaacaaaagcuugaac

SEQ ID NO: 87748 - RNA, 32 nt, Human
caggcagccgacccccuuccucuucacgcucu

SEQ ID NO: 87749 - RNA, 20 nt, Human
caggcagccuccaccugugc

SEQ ID NO: 87750 - RNA, 32 nt, Human
caggcagccuccucgggcacacggugaaggcg

SEQ ID NO: 87751 - RNA, 32 nt, Human
caggcagccugagauugcuucuagagaucuuu

SEQ ID NO: 87752 - RNA, 32 nt, Human
caggcagccugcugggccacacuguccuguug

SEQ ID NO: 87753 - RNA, 32 nt, Human
caggcagccuguccuccuccuccaggcagccu

SEQ ID NO: 87754 - RNA, 32 nt, Human
caggcagcguaugaacucuggagaggggcugc

SEQ ID NO: 87755 - RNA, 32 nt, Human
caggcagcucaagcugaauaaauagcugcaga

SEQ ID NO: 87756 - RNA, 32 nt, Human
caggcagcuccagcuguuaccugagauacuga

SEQ ID NO: 87757 - RNA, 32 nt, Human
caggcagcucgaggcccccgaccaacacuugc

SEQ ID NO: 87758 - RNA, 32 nt, Human
caggcagcucgggcuccugguggaggagggaa

SEQ ID NO: 87759 - RNA, 32 nt, Human
caggcagcuguguggacccagggacagacauu

SEQ ID NO: 87760 - RNA, 32 nt, Human
caggcagcuugauccugauuugguugaggccc

SEQ ID NO: 87761 - RNA, 32 nt, Human
caggcagcuuugccuucucuccccugucauuu

SEQ ID NO: 87762 - RNA, 32 nt, Human
caggcaggaagcggguuuguuuuggaaagggc

SEQ ID NO: 87763 - RNA, 32 nt, Human
caggcaggaaggacccaggauuugaacccagc

SEQ ID NO: 87764 - RNA, 32 nt, Human
caggcaggaagggaggaggagagccaggugag

SEQ ID NO: 87765 - RNA, 32 nt, Human
caggcaggaaggggaggggcagugagguuggc

SEQ ID NO: 87766 - RNA, 32 nt, Human
caggcaggaagugcccagcccgagaggcuggg

SEQ ID NO: 87767 - RNA, 32 nt, Human
caggcaggaaugcagcagagaggacucgccau

SEQ ID NO: 87768 - RNA, 32 nt, Human
caggcaggaaugcgguugggaggcaggucggg

SEQ ID NO: 87769 - RNA, 32 nt, Human
caggcaggacaaggagaaagcagggcagaaug

SEQ ID NO: 87770 - RNA, 32 nt, Human
caggcaggacagccaugagguggggcugcagc

SEQ ID NO: 87771 - RNA, 32 nt, Human
caggcaggagagggaaaggcagcagcggcggc

SEQ ID NO: 87772 - RNA, 32 nt, Human
caggcaggagccaagcacagcaggagcuuccg

SEQ ID NO: 87773 - RNA, 32 nt, Human
caggcaggaggaacucuacaaccugaguuugc

SEQ ID NO: 87774 - RNA, 32 nt, Human
caggcaggaggaucacuugagcuuaggaguuu

SEQ ID NO: 87775 - RNA, 32 nt, Human
caggcaggaguuucagacccuauccugagaau

SEQ ID NO: 87776 - RNA, 19 nt, Human
caggcaggaugcuccuuga

SEQ ID NO: 87777 - RNA, 32 nt, Human
caggcaggauggggcuuuccccaaagcaauug

SEQ ID NO: 87778 - RNA, 32 nt, Human
caggcaggaugucuguuuucugccuguauuuc

SEQ ID NO: 87779 - RNA, 18 nt, Human
caggcaggauuccuccuu

SEQ ID NO: 87780 - RNA, 32 nt, Human
caggcaggccuuggaccuugaugcauugugug

SEQ ID NO: 87781 - RNA, 19 nt, Human
caggcaggcgccccgggca

SEQ ID NO: 87782 - RNA, 32 nt, Human
caggcaggcgccuaccaccacaccugacuaau

SEQ ID NO: 87783 - RNA, 32 nt, Human
caggcaggcgggcgcgggagaccccgccgggg

SEQ ID NO: 87784 - RNA, 32 nt, Human
caggcagggaaacugggggcucgcccuucucc

SEQ ID NO: 87785 - RNA, 32 nt, Human
caggcagggacacgucuggugccagaacacgc

SEQ ID NO: 87786 - RNA, 24 nt, Human
caggcagggaccuccugggcccag

SEQ ID NO: 87787 - RNA, 32 nt, Human
caggcagggagagacaaagauccaggaaagga

SEQ ID NO: 87788 - RNA, 28 nt, Human
caggcagggagcugcugugaguccagcu

SEQ ID NO: 87789 - RNA, 32 nt, Human
caggcagggaggaugggggcagcucucuucuc

SEQ ID NO: 87790 - RNA, 32 nt, Human
caggcagggauacaaggcagucuggaaagaag

SEQ ID NO: 87791 - RNA, 32 nt, Human
caggcagggcccugcuuuucuaggaauugacu

SEQ ID NO: 87792 - RNA, 32 nt, Human
caggcagggcccuucaggucagcccggagcag

SEQ ID NO: 87793 - RNA, 15 nt, Human
caggcagggcugggg

SEQ ID NO: 87794 - RNA, 32 nt, Human
caggcaggggcugagccacauggccaucugcu

SEQ ID NO: 87795 - RNA, 19 nt, Human
caggcaggggcuguggggu

SEQ ID NO: 87796 - RNA, 32 nt, Human
caggcagggggagggcaagugagggaacauga

SEQ ID NO: 87797 - RNA, 32 nt, Human
caggcagggugcaggccauugcaggccgucca

SEQ ID NO: 87798 - RNA, 32 nt, Human
caggcagguaacaccugucauccuggcugguc

SEQ ID NO: 87799 - RNA, 30 nt, Human
caggcagguccccacagggcacgguccucu

SEQ ID NO: 87800 - RNA, 32 nt, Human
caggcaggucucaaaguccugaccucagguga

SEQ ID NO: 87801 - RNA, 32 nt, Human
caggcaggucuuguccugguccuggccacaug

SEQ ID NO: 87802 - RNA, 19 nt, Human
caggcaggugaccuggagg

SEQ ID NO: 87803 - RNA, 18 nt, Human
caggcaggugccaggagc

SEQ ID NO: 87804 - RNA, 32 nt, Human
caggcaggugccaggagccaggaugcaaggau

SEQ ID NO: 87805 - RNA, 32 nt, Human
caggcagguggugagagccagagaugggagca

SEQ ID NO: 87806 - RNA, 21 nt, Human
caggcaguacagcagcugcau

SEQ ID NO: 87807 - RNA, 17 nt, Human
caggcaguccaccugca

SEQ ID NO: 87808 - RNA, 32 nt, Human
caggcaguccuccauccagucuugacuuuggc

SEQ ID NO: 87809 - RNA, 32 nt, Human
caggcagucucgaacuccugaccucaggugau

SEQ ID NO: 87810 - RNA, 20 nt, Human
caggcagugcagagcggaga

SEQ ID NO: 87811 - RNA, 22 nt, Human
caggcagugcgacgaggucagg

SEQ ID NO: 87812 - RNA, 32 nt, Human
caggcagugcggagcuggccgugggcugccua

SEQ ID NO: 87813 - RNA, 20 nt, Human
caggcagugggugggucagg

SEQ ID NO: 87814 - RNA, 32 nt, Human
caggcaguuaacugagaauuggagaggacagg

SEQ ID NO: 87815 - RNA, 32 nt, Human
caggcaguucacagguguuguugcagaggucu

SEQ ID NO: 87816 - RNA, 32 nt, Human
caggcaguugguccuugauuuuucccuuagcu

SEQ ID NO: 87817 - RNA, 32 nt, Human
caggcauaagccacugcgccuggccuugaugu

SEQ ID NO: 87818 - RNA, 32 nt, Human
caggcauaagccacugugccuggccuuaaagu

SEQ ID NO: 87819 - RNA, 32 nt, Human
caggcauaccccgagaugaagagggguuuggg

SEQ ID NO: 87820 - RNA, 32 nt, Human
caggcauaggagaucaaggaagcaucuuuuua

SEQ ID NO: 87821 - RNA, 32 nt, Human
caggcauagggaggcaggagggaaggaagcuu

SEQ ID NO: 87822 - RNA, 32 nt, Human
caggcaucaccugaauaucuuaccuccccuca

SEQ ID NO: 87823 - RNA, 32 nt, Human
caggcaucagccaccacacccagccaacuuaa

SEQ ID NO: 87824 - RNA, 32 nt, Human
caggcaucagccaccgugaccggcucagacug

SEQ ID NO: 87825 - RNA, 32 nt, Human
caggcaucaggacagucaggagaggggccgag

SEQ ID NO: 87826 - RNA, 32 nt, Human
caggcaucauggcucacaccuguaaucccagc

SEQ ID NO: 87827 - RNA, 32 nt, Human
caggcauccccgagcagcaccaugcuugguga

SEQ ID NO: 87828 - RNA, 32 nt, Human
caggcauccugccucacugcccccaggccauu

SEQ ID NO: 87829 - RNA, 32 nt, Human
caggcaucggaggugggcgggguugcagugac

SEQ ID NO: 87830 - RNA, 23 nt, Human
caggcaucucgcucaccccugua

SEQ ID NO: 87831 - RNA, 32 nt, Human
caggcaucugaggauaaaucacugugaaacag

SEQ ID NO: 87832 - RNA, 32 nt, Human
caggcaucugcacuccuccgagcccgguggag

SEQ ID NO: 87833 - RNA, 32 nt, Human
caggcaucuuugccugcccugccuugcuuggc

SEQ ID NO: 87834 - RNA, 32 nt, Human
caggcaugaaccacagcgcccggccaaucugg

SEQ ID NO: 87835 - RNA, 32 nt, Human
caggcaugagccacagugcccggccaaguauu

SEQ ID NO: 87836 - RNA, 32 nt, Human
caggcaugagccaccaaacccagcccagaagu

SEQ ID NO: 87837 - RNA, 32 nt, Human
caggcaugagccaccacaaccgucccacuauu

SEQ ID NO: 87838 - RNA, 32 nt, Human
caggcaugagccaccacaacuggccugaaauu

SEQ ID NO: 87839 - RNA, 32 nt, Human
caggcaugagccaccacacccacacaagacua

SEQ ID NO: 87840 - RNA, 32 nt, Human
caggcaugagccaccacacccagccccuuucc

SEQ ID NO: 87841 - RNA, 32 nt, Human
caggcaugagccaccacacccagcccggacag

SEQ ID NO: 87842 - RNA, 32 nt, Human
caggcaugagccaccacacccagccuucagcu

SEQ ID NO: 87843 - RNA, 32 nt, Human
caggcaugagccaccacacccagccuuuauug

SEQ ID NO: 87844 - RNA, 32 nt, Human
caggcaugagccaccacacccggccaaucagu

SEQ ID NO: 87845 - RNA, 32 nt, Human
caggcaugagccaccacaccuggauugccaua

SEQ ID NO: 87846 - RNA, 32 nt, Human
caggcaugagccaccacaccuggccccauuuu

SEQ ID NO: 87847 - RNA, 32 nt, Human
caggcaugagccaccacaccuugccacaaaug

SEQ ID NO: 87848 - RNA, 32 nt, Human
caggcaugagccaccacaucuggccuaggacc

SEQ ID NO: 87849 - RNA, 32 nt, Human
caggcaugagccaccacgcccagccaaaauau

SEQ ID NO: 87850 - RNA, 32 nt, Human
caggcaugagccaccacgcccagccauugagu

SEQ ID NO: 87851 - RNA, 32 nt, Human
caggcaugagccaccacgcccagccuguuuuu

SEQ ID NO: 87852 - RNA, 32 nt, Human
caggcaugagccaccacgcccggaccaugaug

SEQ ID NO: 87853 - RNA, 30 nt, Human
caggcaugagccaccacgcccggccaaauu

SEQ ID NO: 87854 - RNA, 32 nt, Human
caggcaugagccaccacgcccggcuagacuuu

SEQ ID NO: 87855 - RNA, 32 nt, Human
caggcaugagccaccacgccuggccaagcuuu

SEQ ID NO: 87856 - RNA, 32 nt, Human
caggcaugagccaccacgccuggccaaggcgg

SEQ ID NO: 87857 - RNA, 32 nt, Human
caggcaugagccaccacgccuggccaguuucu

SEQ ID NO: 87858 - RNA, 32 nt, Human
caggcaugagccaccacgccuggccgagagac

SEQ ID NO: 87859 - RNA, 32 nt, Human
caggcaugagccaccacgccuggccuccucuu

SEQ ID NO: 87860 - RNA, 32 nt, Human
caggcaugagccaccacgccuggcuggaauuc

SEQ ID NO: 87861 - RNA, 32 nt, Human
caggcaugagccaccacgccuggucuaugaac

SEQ ID NO: 87862 - RNA, 32 nt, Human
caggcaugagccaccacgccuguccgguuauu

SEQ ID NO: 87863 - RNA, 32 nt, Human
caggcaugagccaccacggccagcccacaaug

SEQ ID NO: 87864 - RNA, 32 nt, Human
caggcaugagccaccacggcccgccaaaaggc

SEQ ID NO: 87865 - RNA, 32 nt, Human
caggcaugagccaccacuccuggccaggaguu

SEQ ID NO: 87866 - RNA, 32 nt, Human
caggcaugagccaccacuccuggccccagaaa

SEQ ID NO: 87867 - RNA, 32 nt, Human
caggcaugagccaccaucuucagccagaugau

SEQ ID NO: 87868 - RNA, 32 nt, Human
caggcaugagccaccaugccagacuucccauu

SEQ ID NO: 87869 - RNA, 32 nt, Human
caggcaugagccaccaugcccaacccaagaau

SEQ ID NO: 87870 - RNA, 32 nt, Human
caggcaugagccaccaugcccagccaaagauc

SEQ ID NO: 87871 - RNA, 32 nt, Human
caggcaugagccaccaugcccagccaauguaa

SEQ ID NO: 87872 - RNA, 32 nt, Human
caggcaugagccaccaugcccagcccacugug

SEQ ID NO: 87873 - RNA, 32 nt, Human
caggcaugagccaccaugcccagcccucaaau

SEQ ID NO: 87874 - RNA, 32 nt, Human
caggcaugagccaccaugcccagccuccuucu

SEQ ID NO: 87875 - RNA, 32 nt, Human
caggcaugagccaccaugcccagcugacaaga

SEQ ID NO: 87876 - RNA, 32 nt, Human
caggcaugagccaccaugcccagcugcuccuu

SEQ ID NO: 87877 - RNA, 32 nt, Human
caggcaugagccaccaugcccagucgauaucu

SEQ ID NO: 87878 - RNA, 32 nt, Human
caggcaugagccaccaugccuagccagcaagc

SEQ ID NO: 87879 - RNA, 32 nt, Human
caggcaugagccaccaugccuagcccagaaau

SEQ ID NO: 87880 - RNA, 32 nt, Human
caggcaugagccaccaugccuggcaacauaac

SEQ ID NO: 87881 - RNA, 32 nt, Human
caggcaugagccaccaugccuggccaacucac

SEQ ID NO: 87882 - RNA, 32 nt, Human
caggcaugagccaccaugccuggccagaauaa

SEQ ID NO: 87883 - RNA, 32 nt, Human
caggcaugagccaccaugccuggccaggacau

SEQ ID NO: 87884 - RNA, 32 nt, Human
caggcaugagccaccaugccuggccaugauuc

SEQ ID NO: 87885 - RNA, 32 nt, Human
caggcaugagccaccaugccuggcccaguguu

SEQ ID NO: 87886 - RNA, 32 nt, Human
caggcaugagccaccaugccuggccccacaua

SEQ ID NO: 87887 - RNA, 32 nt, Human
caggcaugagccaccaugccuggccucugugg

SEQ ID NO: 87888 - RNA, 32 nt, Human
caggcaugagccaccaugccuggcucaaaucc

SEQ ID NO: 87889 - RNA, 32 nt, Human
caggcaugagccaccaugucuugccaguuuug

SEQ ID NO: 87890 - RNA, 32 nt, Human
caggcaugagccaccccgccuggccaguuagu

SEQ ID NO: 87891 - RNA, 32 nt, Human
caggcaugagccaccgcacccagccugcauuc

SEQ ID NO: 87892 - RNA, 32 nt, Human
caggcaugagccaccgcacccagccugguuau

SEQ ID NO: 87893 - RNA, 32 nt, Human
caggcaugagccaccgcaccuggcccuucuaa

SEQ ID NO: 87894 - RNA, 32 nt, Human
caggcaugagccaccgcaccuggccuucccug

SEQ ID NO: 87895 - RNA, 32 nt, Human
caggcaugagccaccgcaccuggucugaucaa

SEQ ID NO: 87896 - RNA, 32 nt, Human
caggcaugagccaccgcacucggccaggagcu

SEQ ID NO: 87897 - RNA, 32 nt, Human
caggcaugagccaccgcgccaggccaaggcgg

SEQ ID NO: 87898 - RNA, 32 nt, Human
caggcaugagccaccgcgcccagccaaggaaa

SEQ ID NO: 87899 - RNA, 32 nt, Human
caggcaugagccaccgcgcccagccagaaagc

SEQ ID NO: 87900 - RNA, 32 nt, Human
caggcaugagccaccgcgcccggccacgugua

SEQ ID NO: 87901 - RNA, 32 nt, Human
caggcaugagccaccgcgcccggccagauucu

SEQ ID NO: 87902 - RNA, 32 nt, Human
caggcaugagccaccgcgccugaccacauugc

SEQ ID NO: 87903 - RNA, 32 nt, Human
caggcaugagccaccgcgccuggccaaugccu

SEQ ID NO: 87904 - RNA, 32 nt, Human
caggcaugagccaccgcgccuggccccuucuu

SEQ ID NO: 87905 - RNA, 32 nt, Human
caggcaugagccaccgcgccuggccgcuuucg

SEQ ID NO: 87906 - RNA, 32 nt, Human
caggcaugagccaccgcgccuggccuaguucc

SEQ ID NO: 87907 - RNA, 32 nt, Human
caggcaugagccaccgcgccuggccucugcuu

SEQ ID NO: 87908 - RNA, 32 nt, Human
caggcaugagccaccgcgcuuggccagacugc

SEQ ID NO: 87909 - RNA, 32 nt, Human
caggcaugagccaccgcuccuggccggguuug

SEQ ID NO: 87910 - RNA, 32 nt, Human
caggcaugagccaccgugccaggccaacagag

SEQ ID NO: 87911 - RNA, 32 nt, Human
caggcaugagccaccgugcccagccaaauguu

SEQ ID NO: 87912 - RNA, 32 nt, Human
caggcaugagccaccgugcccagccaagaaca

SEQ ID NO: 87913 - RNA, 32 nt, Human
caggcaugagccaccgugcccagccaggcauu

SEQ ID NO: 87914 - RNA, 32 nt, Human
caggcaugagccaccgugcccagcccaaaacu

SEQ ID NO: 87915 - RNA, 32 nt, Human
caggcaugagccaccgugcccagccuacugag

SEQ ID NO: 87916 - RNA, 32 nt, Human
caggcaugagccaccgugcccagccuaucaug

SEQ ID NO: 87917 - RNA, 32 nt, Human
caggcaugagccaccgugcccagccucaaaaa

SEQ ID NO: 87918 - RNA, 32 nt, Human
caggcaugagccaccgugcccggccgguccug

SEQ ID NO: 87919 - RNA, 32 nt, Human
caggcaugagccaccgugccuggccaacauuu

SEQ ID NO: 87920 - RNA, 32 nt, Human
caggcaugagccaccgugccuggcccucuccu

SEQ ID NO: 87921 - RNA, 32 nt, Human
caggcaugagccaccgugccuggccucauuug

SEQ ID NO: 87922 - RNA, 32 nt, Human
caggcaugagccaccgugccuggcuuugcugu

SEQ ID NO: 87923 - RNA, 32 nt, Human
caggcaugagccaccgugccuguccuagaacc

SEQ ID NO: 87924 - RNA, 32 nt, Human
caggcaugagccaccguggccggccaagauuu

SEQ ID NO: 87925 - RNA, 32 nt, Human
caggcaugagccaccucacuuggcccaauuuu

SEQ ID NO: 87926 - RNA, 32 nt, Human
caggcaugagccaccucgccuagcccaccgag

SEQ ID NO: 87927 - RNA, 32 nt, Human
caggcaugagccaccucgccuggccagaugcu

SEQ ID NO: 87928 - RNA, 32 nt, Human
caggcaugagccaccugcccagccauguuugg

SEQ ID NO: 87929 - RNA, 32 nt, Human
caggcaugagccacgacgcccagccacaaguu

SEQ ID NO: 87930 - RNA, 32 nt, Human
caggcaugagccacuacacccagccgauuuuu

SEQ ID NO: 87931 - RNA, 32 nt, Human
caggcaugagccacuacgccuggccaaguauu

SEQ ID NO: 87932 - RNA, 32 nt, Human
caggcaugagccacugcacccagacuagaauu

SEQ ID NO: 87933 - RNA, 32 nt, Human
caggcaugagccacugcacccagccaagugau

SEQ ID NO: 87934 - RNA, 32 nt, Human
caggcaugagccacugcacccagccgauagga

SEQ ID NO: 87935 - RNA, 32 nt, Human
caggcaugagccacugcacccagccucuuaac

SEQ ID NO: 87936 - RNA, 32 nt, Human
caggcaugagccacugcacccagccuuggcgg

SEQ ID NO: 87937 - RNA, 32 nt, Human
caggcaugagccacugcacccggccaagucuu

SEQ ID NO: 87938 - RNA, 32 nt, Human
caggcaugagccacugcacccggccuuucuca

SEQ ID NO: 87939 - RNA, 32 nt, Human
caggcaugagccacugcacccggcgcauguuu

SEQ ID NO: 87940 - RNA, 32 nt, Human
caggcaugagccacugcacccggcuugaauca

SEQ ID NO: 87941 - RNA, 32 nt, Human
caggcaugagccacugcaccugaccugcugaa

SEQ ID NO: 87942 - RNA, 32 nt, Human
caggcaugagccacugcaccuggcccacuuua

SEQ ID NO: 87943 - RNA, 32 nt, Human
caggcaugagccacugcaccuggcccuuuuau

SEQ ID NO: 87944 - RNA, 32 nt, Human
caggcaugagccacugcaccuggccgguuauu

SEQ ID NO: 87945 - RNA, 32 nt, Human
caggcaugagccacugcaccuggccuacguau

SEQ ID NO: 87946 - RNA, 32 nt, Human
caggcaugagccacugcaccuggccuaggacu

SEQ ID NO: 87947 - RNA, 32 nt, Human
caggcaugagccacugcacucaaccuuaagac

SEQ ID NO: 87948 - RNA, 32 nt, Human
caggcaugagccacugcauccggccuguuaag

SEQ ID NO: 87949 - RNA, 32 nt, Human
caggcaugagccacugcgccagccuaaagugu

SEQ ID NO: 87950 - RNA, 32 nt, Human
caggcaugagccacugcgcccggccaagaaag

SEQ ID NO: 87951 - RNA, 32 nt, Human
caggcaugagccacugcgcccggccaauuuuu

SEQ ID NO: 87952 - RNA, 32 nt, Human
caggcaugagccacugcgcccggccauggacc

SEQ ID NO: 87953 - RNA, 32 nt, Human
caggcaugagccacugcgccuggccagcaaau

SEQ ID NO: 87954 - RNA, 32 nt, Human
caggcaugagccacugcgccuggccggacaau

SEQ ID NO: 87955 - RNA, 32 nt, Human
caggcaugagccacugcgccuggccuaaucca

SEQ ID NO: 87956 - RNA, 32 nt, Human
caggcaugagccacugcgccuggccucaaauu

SEQ ID NO: 87957 - RNA, 32 nt, Human
caggcaugagccacugcgccuggccucagaau

SEQ ID NO: 87958 - RNA, 32 nt, Human
caggcaugagccacugcuccugaccaauucac

SEQ ID NO: 87959 - RNA, 32 nt, Human
caggcaugagccacugggcgcggccagauaag

SEQ ID NO: 87960 - RNA, 32 nt, Human
caggcaugagccacuguacccagccaaaauug

SEQ ID NO: 87961 - RNA, 32 nt, Human
caggcaugagccacuguaccuggcgaaaaaca

SEQ ID NO: 87962 - RNA, 32 nt, Human
caggcaugagccacugugcccagccacgagcu

SEQ ID NO: 87963 - RNA, 32 nt, Human
caggcaugagccacugugcccagccagagguu

SEQ ID NO: 87964 - RNA, 32 nt, Human
caggcaugagccacugugcccagcccaggcuc

SEQ ID NO: 87965 - RNA, 32 nt, Human
caggcaugagccacugugcccagcccuuuugc

SEQ ID NO: 87966 - RNA, 32 nt, Human
caggcaugagccacugugcccagccuaguuuc

SEQ ID NO: 87967 - RNA, 32 nt, Human
caggcaugagccacugugcccagccuguucua

SEQ ID NO: 87968 - RNA, 32 nt, Human
caggcaugagccacugugcccagucaggaugu

SEQ ID NO: 87969 - RNA, 30 nt, Human
caggcaugagccacugugcccggccacuuu

SEQ ID NO: 87970 - RNA, 32 nt, Human
caggcaugagccacugugcccggccaguuguu

SEQ ID NO: 87971 - RNA, 32 nt, Human
caggcaugagccacugugccuggccaacauaa

SEQ ID NO: 87972 - RNA, 32 nt, Human
caggcaugagccacugugccuggccagaaauu

SEQ ID NO: 87973 - RNA, 32 nt, Human
caggcaugagccacugugccuggccccuuccu

SEQ ID NO: 87974 - RNA, 32 nt, Human
caggcaugagccacugugccuggccugagggc

SEQ ID NO: 87975 - RNA, 32 nt, Human
caggcaugagccacugugccuggcuauucuau

SEQ ID NO: 87976 - RNA, 32 nt, Human
caggcaugagccacugugccuguccaagaaaa

SEQ ID NO: 87977 - RNA, 32 nt, Human
caggcaugagccacugugcucagccuucaugu

SEQ ID NO: 87978 - RNA, 32 nt, Human
caggcaugagccacugugcuuggccuguuauu

SEQ ID NO: 87979 - RNA, 32 nt, Human
caggcaugagccacuguguucaguuggccaua

SEQ ID NO: 87980 - RNA, 32 nt, Human
caggcaugagccacuucgccuagccaagccug

SEQ ID NO: 87981 - RNA, 32 nt, Human
caggcaugagccauugcacccagccuuaagcu

SEQ ID NO: 87982 - RNA, 32 nt, Human
caggcaugaucuuccccaucaggcugggcucu

SEQ ID NO: 87983 - RNA, 32 nt, Human
caggcaugcaccaccacaccaggcuaauuuug

SEQ ID NO: 87984 - RNA, 32 nt, Human
caggcaugcaccaccacacccggcuaauuuuu

SEQ ID NO: 87985 - RNA, 32 nt, Human
caggcaugcaccaccacaccuggcuaauuuuu

SEQ ID NO: 87986 - RNA, 32 nt, Human
caggcaugcaccaccacaccuggcuaguuuuu

SEQ ID NO: 87987 - RNA, 32 nt, Human
caggcaugcaccaccacauccggcuaauguuu

SEQ ID NO: 87988 - RNA, 32 nt, Human
caggcaugcaccaccacgccaggcuaauuuuu

SEQ ID NO: 87989 - RNA, 32 nt, Human
caggcaugcaccaccacgcccggcuaauuuug

SEQ ID NO: 87990 - RNA, 32 nt, Human
caggcaugcaccaccacgcccggcuaauuuuu

SEQ ID NO: 87991 - RNA, 32 nt, Human
caggcaugcaccaccacgccuggcuaauuuuu

SEQ ID NO: 87992 - RNA, 32 nt, Human
caggcaugcaccaccacgucuggcuaauuuug

SEQ ID NO: 87993 - RNA, 32 nt, Human
caggcaugcaccaccacuccuggcuaauuuuu

SEQ ID NO: 87994 - RNA, 32 nt, Human
caggcaugcaccaccaugcccggcuaauuuug

SEQ ID NO: 87995 - RNA, 32 nt, Human
caggcaugcaccaccaugcccggcuaauuuuu

SEQ ID NO: 87996 - RNA, 32 nt, Human
caggcaugcaccaccaugccuggcuaauuuaa

SEQ ID NO: 87997 - RNA, 32 nt, Human
caggcaugcaccaccaugccuggcuaauuuuc

SEQ ID NO: 87998 - RNA, 32 nt, Human
caggcaugcaccaccaugccuggcuaauuuug

SEQ ID NO: 87999 - RNA, 32 nt, Human
caggcaugcaccaccaugccuggcuaauuuuu

SEQ ID NO: 88000 - RNA, 32 nt, Human
caggcaugcaccaccaugccuggcuacuuuuu

SEQ ID NO: 88001 - RNA, 32 nt, Human
caggcaugcaugcacauacgcagauguacagu

SEQ ID NO: 88002 - RNA, 32 nt, Human
caggcaugccuaggcggugugggggcuugaaa

SEQ ID NO: 88003 - RNA, 32 nt, Human
caggcaugccuggguccugccucugccuggca

SEQ ID NO: 88004 - RNA, 32 nt, Human
caggcaugcgccaccaggcccggcuaauuuuu

SEQ ID NO: 88005 - RNA, 21 nt, Human
caggcaugcugccacuugugc

SEQ ID NO: 88006 - RNA, 30 nt, Human
caggcauggccagaugggccugcucugggc

SEQ ID NO: 88007 - RNA, 21 nt, Human
caggcauggcuggugccugaa

SEQ ID NO: 88008 - RNA, 32 nt, Human
caggcaugggaggcggcuugugcuuugccuuc

SEQ ID NO: 88009 - RNA, 32 nt, Human
caggcaugggguccccuggguggacgaggccg

SEQ ID NO: 88010 - RNA, 32 nt, Human
caggcauggucuggugcguucucccuguggcc

SEQ ID NO: 88011 - RNA, 29 nt, Human
caggcaugguggugggugccuggaguccc

SEQ ID NO: 88012 - RNA, 32 nt, Human
caggcauguccuaggcucugggugcaguagug

SEQ ID NO: 88013 - RNA, 32 nt, Human
caggcaugugccaccaggccuggcuaauuuuu

SEQ ID NO: 88014 - RNA, 32 nt, Human
caggcauguggugagaggaugagggggaggga

SEQ ID NO: 88015 - RNA, 32 nt, Human
caggcauguuuggagaugagagaggcuucgag

SEQ ID NO: 88016 - RNA, 29 nt, Human
caggcauguuugugugugccugugguccc

SEQ ID NO: 88017 - RNA, 32 nt, Human
caggcauuaaagggaaagagggcucugcuuga

SEQ ID NO: 88018 - RNA, 32 nt, Human
caggcauuagauucucauaaggagugugcaau

SEQ ID NO: 88019 - RNA, 32 nt, Human
caggcauuagauucucauaaggaguucacagc

SEQ ID NO: 88020 - RNA, 32 nt, Human
caggcauuagcaaaggagagaccuucuguauu

SEQ ID NO: 88021 - RNA, 32 nt, Human
caggcauucuuagcugagacaccaagaggugg

SEQ ID NO: 88022 - RNA, 32 nt, Human
caggcauugacccccucuaccuggcuuuuccu

SEQ ID NO: 88023 - RNA, 32 nt, Human
caggcauugugguuugugccuccuaguguugg

SEQ ID NO: 88024 - RNA, 32 nt, Human
caggcauuguuuguucuugucuuggauuuaug

SEQ ID NO: 88025 - RNA, 32 nt, Human
caggcauuuaacuguugacuccuuugugagcu

SEQ ID NO: 88026 - RNA, 32 nt, Human
caggcauuucaaggaagaaguacugaaaugau

SEQ ID NO: 88027 - RNA, 32 nt, Human
caggcauuuguauucauguauucaguuagcca

SEQ ID NO: 88028 - RNA, 23 nt, Human
caggccaaaagcccagggcucca

SEQ ID NO: 88029 - RNA, 25 nt, Human
caggccaaagggcugccccuaagcu

SEQ ID NO: 88030 - RNA, 32 nt, Human
caggccaaaggggaccuggaagggaggugggc

SEQ ID NO: 88031 - RNA, 32 nt, Human
caggccaaauuucugccugccugccagcagcc

SEQ ID NO: 88032 - RNA, 32 nt, Human
caggccaacauggugaaaacuccucucuacua

SEQ ID NO: 88033 - RNA, 32 nt, Human
caggccaacauggugaaaccccgucucuacua

SEQ ID NO: 88034 - RNA, 32 nt, Human
caggccaacauggugaaacccugucucuacua

SEQ ID NO: 88035 - RNA, 32 nt, Human
caggccaacauggugaaacuucaucucuacua

SEQ ID NO: 88036 - RNA, 32 nt, Human
caggccaaccuugccgggcuguuucccgaggc

SEQ ID NO: 88037 - RNA, 32 nt, Human
caggccaacugccccgcgucuucagcuguuuc

SEQ ID NO: 88038 - RNA, 23 nt, Human
caggccaacuuggcaaaacccca

SEQ ID NO: 88039 - RNA, 32 nt, Human
caggccaagagccgaaggcgggggaggaagau

SEQ ID NO: 88040 - RNA, 32 nt, Human
caggccaaggaaguggcugacaaggacugaaa

SEQ ID NO: 88041 - RNA, 32 nt, Human
caggccaaggagaguccuuccucuccccuuuu

SEQ ID NO: 88042 - RNA, 21 nt, Human
caggccaaguaggggucuagc

SEQ ID NO: 88043 - RNA, 24 nt, Human
caggccaauaaagaugugugagcu

SEQ ID NO: 88044 - RNA, 32 nt, Human
caggccacacacacugcaucacugaccaccca

SEQ ID NO: 88045 - RNA, 32 nt, Human
caggccacacagauucuccucaagagagcccu

SEQ ID NO: 88046 - RNA, 32 nt, Human
caggccacacugcugccaccucucacacgccc

SEQ ID NO: 88047 - RNA, 21 nt, Human
caggccacagccagggcucca

SEQ ID NO: 88048 - RNA, 23 nt, Human
caggccacagccagggguccggc

SEQ ID NO: 88049 - RNA, 32 nt, Human
caggccacaggacauagccaccugaagagcca

SEQ ID NO: 88050 - RNA, 21 nt, Human
caggccacaggcccuccaccu

SEQ ID NO: 88051 - RNA, 32 nt, Human
caggccacaucugccccaagagcaugagcucg

SEQ ID NO: 88052 - RNA, 32 nt, Human
caggccaccaaagauggguggacuggaggcag

SEQ ID NO: 88053 - RNA, 28 nt, Human
caggccaccagugcugccucaggguguc

SEQ ID NO: 88054 - RNA, 32 nt, Human
caggccacccuccacgaggugugacuaacuau

SEQ ID NO: 88055 - RNA, 17 nt, Human
caggccacccucuccca

SEQ ID NO: 88056 - RNA, 32 nt, Human
caggccaccgaggccgccgccgucuagcgccc

SEQ ID NO: 88057 - RNA, 32 nt, Human
caggccacgaaucugccugccucccaggcagc

SEQ ID NO: 88058 - RNA, 32 nt, Human
caggccacgaaucugccugccucccaggcagg

SEQ ID NO: 88059 - RNA, 32 nt, Human
caggccacugcacuccagccugaacaacaaag

SEQ ID NO: 88060 - RNA, 32 nt, Human
caggccacugcacuccagccugggcaacagag

SEQ ID NO: 88061 - RNA, 32 nt, Human
caggccacugcacuccagccuggguaacagac

SEQ ID NO: 88062 - RNA, 23 nt, Human
caggccacugcgcagcccuggug

SEQ ID NO: 88063 - RNA, 32 nt, Human
caggccagaacugccuucuucauuuccaccca

SEQ ID NO: 88064 - RNA, 32 nt, Human
caggccagaagcaaaccaaauuuaccagguuu

SEQ ID NO: 88065 - RNA, 32 nt, Human
caggccagagagagagggcagauggacucugc

SEQ ID NO: 88066 - RNA, 32 nt, Human
caggccagaggcagcuuccagccugggggcug

SEQ ID NO: 88067 - RNA, 32 nt, Human
caggccagagguuuccaaucagccuugccugc

SEQ ID NO: 88068 - RNA, 32 nt, Human
caggccagagucccagcuguccuggacucugc

SEQ ID NO: 88069 - RNA, 21 nt, Human
caggccagagugcaguggugu

SEQ ID NO: 88070 - RNA, 22 nt, Human
caggccagcagcggguucagcu

SEQ ID NO: 88071 - RNA, 32 nt, Human
caggccagcauccccagcagguucugggaggc

SEQ ID NO: 88072 - RNA, 32 nt, Human
caggccagccagaugggacugccuugucugga

SEQ ID NO: 88073 - RNA, 32 nt, Human
caggccagcccaaacuacccugcaucccaacc

SEQ ID NO: 88074 - RNA, 22 nt, Human
caggccagcccucuugggaagg

SEQ ID NO: 88075 - RNA, 32 nt, Human
caggccagccugcagugacagugagacauggc

SEQ ID NO: 88076 - RNA, 32 nt, Human
caggccagccugggacuggccagagcugggcc

SEQ ID NO: 88077 - RNA, 32 nt, Human
caggccagccuuggugggagguuucuaggauu

SEQ ID NO: 88078 - RNA, 32 nt, Human
caggccagcuccucugcccacaugucauacaa

SEQ ID NO: 88079 - RNA, 32 nt, Human
caggccaggacaucugcugacaagggcagugu

SEQ ID NO: 88080 - RNA, 32 nt, Human
caggccaggagccaggaguggggaagggaggg

SEQ ID NO: 88081 - RNA, 32 nt, Human
caggccaggcagcccggaggcuggguggggcc

SEQ ID NO: 88082 - RNA, 18 nt, Human
caggccaggccugggcca

SEQ ID NO: 88083 - RNA, 32 nt, Human
caggccaggcuggcuacccuguguacaaguau

SEQ ID NO: 88084 - RNA, 32 nt, Human
caggccagggagaggcgcaggagccuuugcag

SEQ ID NO: 88085 - RNA, 32 nt, Human
caggccaggggcacucgugauccagaggccgc

SEQ ID NO: 88086 - RNA, 32 nt, Human
caggccagucucaaacuccugaccucagguga

SEQ ID NO: 88087 - RNA, 32 nt, Human
caggccagucucaaacuccuggccucauguga

SEQ ID NO: 88088 - RNA, 32 nt, Human
caggccagucucaacccucccccaggugggca

SEQ ID NO: 88089 - RNA, 32 nt, Human
caggccauaccaggguaucccuugucccuuca

SEQ ID NO: 88090 - RNA, 32 nt, Human
caggccaucaccacagcugcagccaaccccau

SEQ ID NO: 88091 - RNA, 32 nt, Human
caggccaucccaccaccucuaccugcucaugc

SEQ ID NO: 88092 - RNA, 32 nt, Human
caggccaucccucuguugccaucagcuugauu

SEQ ID NO: 88093 - RNA, 32 nt, Human
caggccauccuagaccagccagcuccagcuga

SEQ ID NO: 88094 - RNA, 32 nt, Human
caggccauccuuccugcuguucuagguacugg

SEQ ID NO: 88095 - RNA, 32 nt, Human
caggccauccuucugcccuucagccuccucca

SEQ ID NO: 88096 - RNA, 24 nt, Human
caggccaugaggacccacugggca

SEQ ID NO: 88097 - RNA, 32 nt, Human
caggccaugcaccggggcucagccugaguucc

SEQ ID NO: 88098 - RNA, 21 nt, Human
caggccaugcagcagucacgc

SEQ ID NO: 88099 - RNA, 32 nt, Human
caggccaugccaccggcuucucugauucucca

SEQ ID NO: 88100 - RNA, 21 nt, Human
caggccaugggccacacagca

SEQ ID NO: 88101 - RNA, 32 nt, Human
caggccaugggcgggagcagagacaccgcgga

SEQ ID NO: 88102 - RNA, 32 nt, Human
caggccauguguuugcuucugggaacaauuua

SEQ ID NO: 88103 - RNA, 32 nt, Human
caggccauuagugccauccaggcgcugcgcuc

SEQ ID NO: 88104 - RNA, 32 nt, Human
caggccauuaucagugccucaucugugcagaa

SEQ ID NO: 88105 - RNA, 23 nt, Human
caggccauuauguuuuucauggc

SEQ ID NO: 88106 - RNA, 32 nt, Human
caggccauuccauugcccuccuggugcugggu

SEQ ID NO: 88107 - RNA, 32 nt, Human
caggccauugcacuccagccugggcaauaggg

SEQ ID NO: 88108 - RNA, 32 nt, Human
caggccauugcacuucagccugggugacagag

SEQ ID NO: 88109 - RNA, 21 nt, Human
caggcccaaaggcacugaggg

SEQ ID NO: 88110 - RNA, 22 nt, Human
caggcccaaaugaggucuugcu

SEQ ID NO: 88111 - RNA, 20 nt, Human
caggcccaacccccacccca

SEQ ID NO: 88112 - RNA, 21 nt, Human
caggcccaacccugugcuggu

SEQ ID NO: 88113 - RNA, 21 nt, Human
caggcccaacucuguccggua

SEQ ID NO: 88114 - RNA, 32 nt, Human
caggcccaagagauuuggagacaggagucagg

SEQ ID NO: 88115 - RNA, 32 nt, Human
caggcccaagagccuguacucuaagaaagaaa

SEQ ID NO: 88116 - RNA, 32 nt, Human
caggcccaagcagagaaacuggaccuugaagc

SEQ ID NO: 88117 - RNA, 32 nt, Human
caggcccaagcgcagccaggugaccuccccgc

SEQ ID NO: 88118 - RNA, 32 nt, Human
caggcccaaggcugcgggcgccaaguucgcuc

SEQ ID NO: 88119 - RNA, 32 nt, Human
caggcccaaugugccucauugagaacacuaau

SEQ ID NO: 88120 - RNA, 21 nt, Human
caggcccaccagccacacagg

SEQ ID NO: 88121 - RNA, 18 nt, Human
caggcccaccccugagga

SEQ ID NO: 88122 - RNA, 22 nt, Human
caggcccacccugcagcucagg

SEQ ID NO: 88123 - RNA, 32 nt, Human
caggcccaccgagguaucccagaggugacaga

SEQ ID NO: 88124 - RNA, 32 nt, Human
caggcccaccucuuccucuuggcugggucuac

SEQ ID NO: 88125 - RNA, 28 nt, Human
caggcccacgaugcugccucucccgugg

SEQ ID NO: 88126 - RNA, 32 nt, Human
caggcccacuccucaugcagcagugugcuggg

SEQ ID NO: 88127 - RNA, 32 nt, Human
caggcccacuguagcugggaagaugcggugcc

SEQ ID NO: 88128 - RNA, 31 nt, Human
caggcccagagagugugucucaggagaauuc

SEQ ID NO: 88129 - RNA, 32 nt, Human
caggcccagcacccaguuccuccucacauggc

SEQ ID NO: 88130 - RNA, 32 nt, Human
caggcccagcacugccccagacucgcuggcac

SEQ ID NO: 88131 - RNA, 32 nt, Human
caggcccagcacuguggcuggacugccgcgcc

SEQ ID NO: 88132 - RNA, 32 nt, Human
caggcccagcucccauggcccccacacccccu

SEQ ID NO: 88133 - RNA, 21 nt, Human
caggcccagcuccuccugccu

SEQ ID NO: 88134 - RNA, 17 nt, Human
caggcccagcuccugcc

SEQ ID NO: 88135 - RNA, 32 nt, Human
caggcccagcugaccaccuccugcugcagcuc

SEQ ID NO: 88136 - RNA, 32 nt, Human
caggcccagcugggaccauaauuuguacagaa

SEQ ID NO: 88137 - RNA, 23 nt, Human
caggcccagcuucucuccugccu

SEQ ID NO: 88138 - RNA, 32 nt, Human
caggcccaggauccucagaggaagauggagag

SEQ ID NO: 88139 - RNA, 32 nt, Human
caggcccaggcagagcugacgggaggccccag

SEQ ID NO: 88140 - RNA, 18 nt, Human
caggcccaggccaggcca

SEQ ID NO: 88141 - RNA, 32 nt, Human
caggcccagggacugcagccugagcuccccga

SEQ ID NO: 88142 - RNA, 32 nt, Human
caggcccaucggugcuccucagagguaggugc

SEQ ID NO: 88143 - RNA, 32 nt, Human
caggcccaugggaggcuggaguuggggcagag

SEQ ID NO: 88144 - RNA, 32 nt, Human
caggcccauugcaccccucugccuccucucga

SEQ ID NO: 88145 - RNA, 21 nt, Human
caggccccacaggagcuggcu

SEQ ID NO: 88146 - RNA, 20 nt, Human
caggccccaccgaguccagc

SEQ ID NO: 88147 - RNA, 32 nt, Human
caggccccaccuagggcugcaggcagucuggc

SEQ ID NO: 88148 - RNA, 21 nt, Human
caggccccagcaagguucacu

SEQ ID NO: 88149 - RNA, 32 nt, Human
caggccccagcgucuucuccccagccccgucc

SEQ ID NO: 88150 - RNA, 32 nt, Human
caggccccagggaaaccagggaaaagaaaaag

SEQ ID NO: 88151 - RNA, 21 nt, Human
caggccccagugaagucugcu

SEQ ID NO: 88152 - RNA, 22 nt, Human
caggccccagugagguuccguu

SEQ ID NO: 88153 - RNA, 32 nt, Human
caggccccaucuggauguccaugccaggagag

SEQ ID NO: 88154 - RNA, 21 nt, Human
caggccccaugaagucugacu

SEQ ID NO: 88155 - RNA, 32 nt, Human
caggccccaugccucuccucccucucuggcag

SEQ ID NO: 88156 - RNA, 32 nt, Human
caggcccccaccccuucucccccuucagccac

SEQ ID NO: 88157 - RNA, 32 nt, Human
caggcccccaccgcccagcacccggccccuac

SEQ ID NO: 88158 - RNA, 32 nt, Human
caggcccccacucuucucaaucuuugagaccc

SEQ ID NO: 88159 - RNA, 18 nt, Human
caggcccccagauggaga

SEQ ID NO: 88160 - RNA, 32 nt, Human
caggcccccagguccacuuaggaaaagggggu

SEQ ID NO: 88161 - RNA, 20 nt, Human
caggcccccguccuaucagu

SEQ ID NO: 88162 - RNA, 32 nt, Human
caggcccccucucuccccaucucuggucucaa

SEQ ID NO: 88163 - RNA, 32 nt, Human
caggcccccugccccuuccccacaaacugggu

SEQ ID NO: 88164 - RNA, 32 nt, Human
caggcccccugcccugcccaccucaggccccc

SEQ ID NO: 88165 - RNA, 32 nt, Human
caggcccccuggcgaggcuucaccucacugug

SEQ ID NO: 88166 - RNA, 32 nt, Human
caggccccgaggacccagacccaguggggagg

SEQ ID NO: 88167 - RNA, 32 nt, Human
caggccccgccacacgcucacacacaaaccug

SEQ ID NO: 88168 - RNA, 32 nt, Human
caggccccgccuggcccaggcccgcagccugu

SEQ ID NO: 88169 - RNA, 32 nt, Human
caggccccgcgcuccucacuccugccucucca

SEQ ID NO: 88170 - RNA, 32 nt, Human
caggccccgggaccgcacugacaggaaaccuu

SEQ ID NO: 88171 - RNA, 32 nt, Human
caggccccggggaccccagcacgugggucuaa

SEQ ID NO: 88172 - RNA, 32 nt, Human
caggccccguccaccgccuccacgccgcaccu

SEQ ID NO: 88173 - RNA, 32 nt, Human
caggccccuacaauugggcuccagaaacuacc

SEQ ID NO: 88174 - RNA, 32 nt, Human
caggccccuccagcugccugggcugggugucu

SEQ ID NO: 88175 - RNA, 32 nt, Human
caggccccuccaggcccaccagcccgguuccc

SEQ ID NO: 88176 - RNA, 32 nt, Human
caggccccuccugacuccaucucccugcacca

SEQ ID NO: 88177 - RNA, 32 nt, Human
caggccccuccuguccuccugcucugagcccc

SEQ ID NO: 88178 - RNA, 32 nt, Human
caggccccucugcuccugucugugucuugcgu

SEQ ID NO: 88179 - RNA, 22 nt, Human
caggccccucugugccuacuua

SEQ ID NO: 88180 - RNA, 32 nt, Human
caggccccugcccuccccuuccucccauccuu

SEQ ID NO: 88181 - RNA, 32 nt, Human
caggccccugcucggcucuccacagggcuagg

SEQ ID NO: 88182 - RNA, 18 nt, Human
caggccccugcuguacag

SEQ ID NO: 88183 - RNA, 32 nt, Human
caggccccuggaacacacucaggcuucccuga

SEQ ID NO: 88184 - RNA, 32 nt, Human
caggccccuggaacacacucaggcuuccguga

SEQ ID NO: 88185 - RNA, 21 nt, Human
caggccccuguaaucccagcu

SEQ ID NO: 88186 - RNA, 32 nt, Human
caggccccuguaaucccagcuaauugggaggc

SEQ ID NO: 88187 - RNA, 21 nt, Human
caggccccugugaucccaguu

SEQ ID NO: 88188 - RNA, 32 nt, Human
caggccccuguguucagccucaggccuauagc

SEQ ID NO: 88189 - RNA, 22 nt, Human
caggccccuucccaaucuccau

SEQ ID NO: 88190 - RNA, 21 nt, Human
caggccccuugcagaccggcu

SEQ ID NO: 88191 - RNA, 32 nt, Human
caggccccuuucucacccucugccucacuccc

SEQ ID NO: 88192 - RNA, 32 nt, Human
caggcccgcacccaguugucagccucugacuc

SEQ ID NO: 88193 - RNA, 32 nt, Human
caggcccggaaagacacguaggggaaaccauc

SEQ ID NO: 88194 - RNA, 32 nt, Human
caggcccgggccuguuggcaagcuucgaucuc

SEQ ID NO: 88195 - RNA, 32 nt, Human
caggcccgucucccggcccguggcagucgggg

SEQ ID NO: 88196 - RNA, 32 nt, Human
caggcccgucuccuccccuugggggcuucucc

SEQ ID NO: 88197 - RNA, 32 nt, Human
caggcccguguccagucauaccuagagauuug

SEQ ID NO: 88198 - RNA, 21 nt, Human
caggcccuaaacaagucugcu

SEQ ID NO: 88199 - RNA, 32 nt, Human
caggcccuaugggcuguccagcucuuugcaca

SEQ ID NO: 88200 - RNA, 20 nt, Human
caggcccucacccaguucag

SEQ ID NO: 88201 - RNA, 23 nt, Human
caggcccucagugaaguuuggcu

SEQ ID NO: 88202 - RNA, 32 nt, Human
caggcccuccacucuccuguagauccuguugu

SEQ ID NO: 88203 - RNA, 32 nt, Human
caggcccuccacugugacucuccuacuggugc

SEQ ID NO: 88204 - RNA, 32 nt, Human
caggcccuccagcugcuggccacagaggcucc

SEQ ID NO: 88205 - RNA, 22 nt, Human
caggcccucccacagcuugugc

SEQ ID NO: 88206 - RNA, 32 nt, Human
caggcccuccccucccaugcaggccgaugaca

SEQ ID NO: 88207 - RNA, 19 nt, Human
caggcccucccgcaucuca

SEQ ID NO: 88208 - RNA, 32 nt, Human
caggcccucccggguccugaccagccucugau

SEQ ID NO: 88209 - RNA, 32 nt, Human
caggcccucccggguccugaccagccucuggu

SEQ ID NO: 88210 - RNA, 31 nt, Human
caggcccuccucucugggccccuggugugua

SEQ ID NO: 88211 - RNA, 32 nt, Human
caggcccucggaggagcuucgcggugccagcc

SEQ ID NO: 88212 - RNA, 32 nt, Human
caggcccucucuauuugagacugugcccgccg

SEQ ID NO: 88213 - RNA, 32 nt, Human
caggcccugaagaugaggcagccagaggugag

SEQ ID NO: 88214 - RNA, 32 nt, Human
caggcccugaagccgguccugcucugagcuga

SEQ ID NO: 88215 - RNA, 32 nt, Human
caggcccugaaggauggggagguuuuggacag

SEQ ID NO: 88216 - RNA, 32 nt, Human
caggcccugaauuccgcguucaucuuauccug

SEQ ID NO: 88217 - RNA, 32 nt, Human
caggcccugacucccaugacugcccagcucug

SEQ ID NO: 88218 - RNA, 22 nt, Human
caggcccugagaggucucagcu

SEQ ID NO: 88219 - RNA, 20 nt, Human
caggcccugaggugggccgg

SEQ ID NO: 88220 - RNA, 32 nt, Human
caggcccugcagauguggaagccagacccaca

SEQ ID NO: 88221 - RNA, 32 nt, Human
caggcccugcagccacaguguucuguuggaga

SEQ ID NO: 88222 - RNA, 19 nt, Human
caggcccugcccccuccca

SEQ ID NO: 88223 - RNA, 22 nt, Human
caggcccugcccucugggaagg

SEQ ID NO: 88224 - RNA, 32 nt, Human
caggcccugccugccacccuaggcagggaaag

SEQ ID NO: 88225 - RNA, 32 nt, Human
caggcccugcucccccuaccuccuugccaggg

SEQ ID NO: 88226 - RNA, 32 nt, Human
caggcccuggagagcgcccuggagcugcaaaa

SEQ ID NO: 88227 - RNA, 32 nt, Human
caggcccuggagcuccuucaccaggaggcucc

SEQ ID NO: 88228 - RNA, 32 nt, Human
caggcccugggacugcuucuccagccaggcug

SEQ ID NO: 88229 - RNA, 32 nt, Human
caggcccugggagggaguuuagaaagacaguc

SEQ ID NO: 88230 - RNA, 32 nt, Human
caggcccugggcuaggggcagagcaggccccg

SEQ ID NO: 88231 - RNA, 32 nt, Human
caggcccugggcuggccccugaggcagccuca

SEQ ID NO: 88232 - RNA, 32 nt, Human
caggcccuggggacccgggugggguauuuucc

SEQ ID NO: 88233 - RNA, 32 nt, Human
caggcccugguggaaaggcugggagccgcaca

SEQ ID NO: 88234 - RNA, 32 nt, Human
caggcccugugcaggagugcgauccgggcugg

SEQ ID NO: 88235 - RNA, 32 nt, Human
caggcccugugccuggacuuuggggcuggcag

SEQ ID NO: 88236 - RNA, 32 nt, Human
caggcccugugugccagaggccaggucucucc

SEQ ID NO: 88237 - RNA, 32 nt, Human
caggcccuguucucccuggggucccccguuua

SEQ ID NO: 88238 - RNA, 32 nt, Human
caggcccuguuuguuugcacauaauaaucuug

SEQ ID NO: 88239 - RNA, 32 nt, Human
caggcccuucacuucuauucuggauuuuauuc

SEQ ID NO: 88240 - RNA, 32 nt, Human
caggcccuucccucuccgccugccucauuccc

SEQ ID NO: 88241 - RNA, 21 nt, Human
caggcccuugaagccacguca

SEQ ID NO: 88242 - RNA, 23 nt, Human
caggcccuugguggggucugucu

SEQ ID NO: 88243 - RNA, 24 nt, Human
caggcccuugucaagcacucugcu

SEQ ID NO: 88244 - RNA, 32 nt, Human
caggcccuuugugcagugaacagcccuggcug

SEQ ID NO: 88245 - RNA, 24 nt, Human
caggccgacugcagcaguccagcu

SEQ ID NO: 88246 - RNA, 32 nt, Human
caggccgagauuagggcaggagagugggcaag

SEQ ID NO: 88247 - RNA, 32 nt, Human
caggccgcauguggcuucauuauacugagcca

SEQ ID NO: 88248 - RNA, 32 nt, Human
caggccgccagccucggagugggcgcgggaca

SEQ ID NO: 88249 - RNA, 32 nt, Human
caggccgccgccugccccacgggccuaccuag

SEQ ID NO: 88250 - RNA, 18 nt, Human
caggccgcgcgggcggca

SEQ ID NO: 88251 - RNA, 32 nt, Human
caggccgcggagacccgggagccacccgccgg

SEQ ID NO: 88252 - RNA, 32 nt, Human
caggccgcggaggaggaggagguggaguugcu

SEQ ID NO: 88253 - RNA, 32 nt, Human
caggccgcgguggcugaugccuguaaucccag

SEQ ID NO: 88254 - RNA, 32 nt, Human
caggccgcuggcggagggcucagggggagcgc

SEQ ID NO: 88255 - RNA, 20 nt, Human
caggccggcagcccuugcca

SEQ ID NO: 88256 - RNA, 25 nt, Human
caggccggccccgcggggcggucgc

SEQ ID NO: 88257 - RNA, 32 nt, Human
caggccggcccuccagccugcugcugcauggg

SEQ ID NO: 88258 - RNA, 32 nt, Human
caggccggcucccaguggggcaggccucgcug

SEQ ID NO: 88259 - RNA, 32 nt, Human
caggccgggagguagaggcaggcugauggggg

SEQ ID NO: 88260 - RNA, 32 nt, Human
caggccgggcagcagugggcagugcuggaggc

SEQ ID NO: 88261 - RNA, 32 nt, Human
caggccgggccugcugucaccucgcugggcuc

SEQ ID NO: 88262 - RNA, 19 nt, Human
caggccgggcugcaucucu

SEQ ID NO: 88263 - RNA, 32 nt, Human
caggccgggcuugggcccugcacagauauuuc

SEQ ID NO: 88264 - RNA, 22 nt, Human
caggccgggguggcggcagcuu

SEQ ID NO: 88265 - RNA, 32 nt, Human
caggccggguucccacgcagaggggaggcugc

SEQ ID NO: 88266 - RNA, 32 nt, Human
caggccggucucaaacuccugaccucagguga

SEQ ID NO: 88267 - RNA, 32 nt, Human
caggccgugauccacccuccccaaguccacca

SEQ ID NO: 88268 - RNA, 20 nt, Human
caggccgugugguugggaag

SEQ ID NO: 88269 - RNA, 32 nt, Human
caggccguguucucgauagcuuuccggaagaa

SEQ ID NO: 88270 - RNA, 32 nt, Human
caggccuaccaucugcuacacaggcaccaggc

SEQ ID NO: 88271 - RNA, 32 nt, Human
caggccuacuucugaagagacagccuuuuauc

SEQ ID NO: 88272 - RNA, 32 nt, Human
caggccuagaccaccucgacccaaacccacac

SEQ ID NO: 88273 - RNA, 18 nt, Human
caggccuagcucauguca

SEQ ID NO: 88274 - RNA, 32 nt, Human
caggccuagcuccaaccaagagugugcuccag

SEQ ID NO: 88275 - RNA, 32 nt, Human
caggccuaguucccuuggaggcuguggcaagu

SEQ ID NO: 88276 - RNA, 32 nt, Human
caggccucaaaccuccaccaccugccagcugg

SEQ ID NO: 88277 - RNA, 32 nt, Human
caggccucaagaaccaccuccagguggggagg

SEQ ID NO: 88278 - RNA, 32 nt, Human
caggccucacacacaaugugucugagagauuc

SEQ ID NO: 88279 - RNA, 32 nt, Human
caggccucacugcaauuugauaugccugcuga

SEQ ID NO: 88280 - RNA, 24 nt, Human
caggccucagaaaggaagccaguu

SEQ ID NO: 88281 - RNA, 32 nt, Human
caggccucagcaggugcggagccgucacugca

SEQ ID NO: 88282 - RNA, 21 nt, Human
caggccucagccaccaugccc

SEQ ID NO: 88283 - RNA, 32 nt, Human
caggccucagcccgacuguccaacuuuggccc

SEQ ID NO: 88284 - RNA, 32 nt, Human
caggccucaucugccccacccugggccacugc

SEQ ID NO: 88285 - RNA, 32 nt, Human
caggccucauuuccuuccucugccaccauccc

SEQ ID NO: 88286 - RNA, 32 nt, Human
caggccuccaccuccagcccagguggcugacc

SEQ ID NO: 88287 - RNA, 21 nt, Human
caggccuccagcucgguccag

SEQ ID NO: 88288 - RNA, 32 nt, Human
caggccuccaucugggccacccccucuccccu

SEQ ID NO: 88289 - RNA, 32 nt, Human
caggccucccaaagugcugggauuaaaggugu

SEQ ID NO: 88290 - RNA, 32 nt, Human
caggccucccaggauggcgagcuccaguaaga

SEQ ID NO: 88291 - RNA, 32 nt, Human
caggccuccccaugggcucuggaggggcucaa

SEQ ID NO: 88292 - RNA, 19 nt, Human
caggccuccccgguggcca

SEQ ID NO: 88293 - RNA, 21 nt, Human
caggccuccccgguggccaga

SEQ ID NO: 88294 - RNA, 19 nt, Human
caggccucccgcaggcagg

SEQ ID NO: 88295 - RNA, 32 nt, Human
caggccucccuccuccccuccuacucccuuuu

SEQ ID NO: 88296 - RNA, 24 nt, Human
caggccucccuggacugggccagg

SEQ ID NO: 88297 - RNA, 20 nt, Human
caggccuccgucuucccagc

SEQ ID NO: 88298 - RNA, 23 nt, Human
caggccuccucauggugaugcca

SEQ ID NO: 88299 - RNA, 32 nt, Human
caggccuccucuuccucuaagacccuccccgc

SEQ ID NO: 88300 - RNA, 32 nt, Human
caggccuccugucaccagcugugugacuuugc

SEQ ID NO: 88301 - RNA, 23 nt, Human
caggccucgcagguuacuaggca

SEQ ID NO: 88302 - RNA, 32 nt, Human
caggccucggcuguggggccagggacaccaug

SEQ ID NO: 88303 - RNA, 27 nt, Human
caggccucgggccccagaggucccgcu

SEQ ID NO: 88304 - RNA, 21 nt, Human
caggccucuacuaggucugcu

SEQ ID NO: 88305 - RNA, 32 nt, Human
caggccucuauugacagcaucagucuggcucc

SEQ ID NO: 88306 - RNA, 21 nt, Human
caggccucuccaaggagacag

SEQ ID NO: 88307 - RNA, 32 nt, Human
caggccucuccucuuucccuggugucuucauu

SEQ ID NO: 88308 - RNA, 18 nt, Human
caggccucucugccugaa

SEQ ID NO: 88309 - RNA, 23 nt, Human
caggccucugagagggucuuguu

SEQ ID NO: 88310 - RNA, 23 nt, Human
caggccucugccagccucuggcu

SEQ ID NO: 88311 - RNA, 24 nt, Human
caggccucugccaguguccccagc

SEQ ID NO: 88312 - RNA, 24 nt, Human
caggccucugccggcggcuccagu

SEQ ID NO: 88313 - RNA, 32 nt, Human
caggccucugccugcugcccccucucuccucg

SEQ ID NO: 88314 - RNA, 32 nt, Human
caggccucuggccagccccgcccacugccagg

SEQ ID NO: 88315 - RNA, 21 nt, Human
caggccucuguauucccagcu

SEQ ID NO: 88316 - RNA, 19 nt, Human
caggccucuucgccugcca

SEQ ID NO: 88317 - RNA, 16 nt, Human
caggccucuugggcag

SEQ ID NO: 88318 - RNA, 20 nt, Human
caggccugaagccuagguca

SEQ ID NO: 88319 - RNA, 32 nt, Human
caggccugacaccucucccaagaugaagaggc

SEQ ID NO: 88320 - RNA, 22 nt, Human
caggccugaccacagauuccca

SEQ ID NO: 88321 - RNA, 32 nt, Human
caggccugacugcuguagcuguguaacuuccc

SEQ ID NO: 88322 - RNA, 32 nt, Human
caggccugagccaccaugcccagcugaauuug

SEQ ID NO: 88323 - RNA, 32 nt, Human
caggccugagccaccgcguccggccuccauaa

SEQ ID NO: 88324 - RNA, 32 nt, Human
caggccugagccaccguaucuggcccaaaaca

SEQ ID NO: 88325 - RNA, 32 nt, Human
caggccugagccaccgugcccagccaaaauaa

SEQ ID NO: 88326 - RNA, 32 nt, Human
caggccugagccaccgugccuggccccuaauc

SEQ ID NO: 88327 - RNA, 32 nt, Human
caggccugagccaccgugccuggccuuuuauu

SEQ ID NO: 88328 - RNA, 32 nt, Human
caggccugagccacugcgcccagccaauacca

SEQ ID NO: 88329 - RNA, 32 nt, Human
caggccugagccacugcgcccagccaggauuu

SEQ ID NO: 88330 - RNA, 32 nt, Human
caggccugagccacugugcccagccuuguuug

SEQ ID NO: 88331 - RNA, 18 nt, Human
caggccugaggaccaugu

SEQ ID NO: 88332 - RNA, 32 nt, Human
caggccugaggagaggcccucuggccgccuca

SEQ ID NO: 88333 - RNA, 21 nt, Human
caggccugaugugcccacuca

SEQ ID NO: 88334 - RNA, 17 nt, Human
caggccugcaccauguc

SEQ ID NO: 88335 - RNA, 32 nt, Human
caggccugcaucaggggcuaggcucuggcugg

SEQ ID NO: 88336 - RNA, 20 nt, Human
caggccugccaccuacugca

SEQ ID NO: 88337 - RNA, 32 nt, Human
caggccugcccagcaugugguuuuccaagucc

SEQ ID NO: 88338 - RNA, 32 nt, Human
caggccugcccaggaugugguuuuccaagucc

SEQ ID NO: 88339 - RNA, 32 nt, Human
caggccugcgacuccggccuuguccgcgcccg

SEQ ID NO: 88340 - RNA, 32 nt, Human
caggccugcucugggaagucggcuccaugcuc

SEQ ID NO: 88341 - RNA, 32 nt, Human
caggccugcuggcugcauccccuggucucugc

SEQ ID NO: 88342 - RNA, 20 nt, Human
caggccugcuuaccuccuca

SEQ ID NO: 88343 - RNA, 32 nt, Human
caggccugcuuugugugugucuucccacuuua

SEQ ID NO: 88344 - RNA, 19 nt, Human
caggccuggaaccgucuca

SEQ ID NO: 88345 - RNA, 19 nt, Human
caggccuggaauucuacca

SEQ ID NO: 88346 - RNA, 20 nt, Human
caggccuggacuccaucuca

SEQ ID NO: 88347 - RNA, 23 nt, Human
caggccuggagcuagggccuuca

SEQ ID NO: 88348 - RNA, 23 nt, Human
caggccuggagcuugccucuuca

SEQ ID NO: 88349 - RNA, 21 nt, Human
caggccuggaguaugagcuca

SEQ ID NO: 88350 - RNA, 32 nt, Human
caggccuggauaauauccagccucccacaaga

SEQ ID NO: 88351 - RNA, 22 nt, Human
caggccuggaugaucuagcuca

SEQ ID NO: 88352 - RNA, 32 nt, Human
caggccuggcaccucccugccuuguguccuga

SEQ ID NO: 88353 - RNA, 32 nt, Human
caggccuggcacgucaaagaggcuccagaaau

SEQ ID NO: 88354 - RNA, 26 nt, Human
caggccuggcagccacgcagcggcug

SEQ ID NO: 88355 - RNA, 22 nt, Human
caggccuggccgugcccgcuca

SEQ ID NO: 88356 - RNA, 32 nt, Human
caggccuggccuggccuggaaccuggaugccu

SEQ ID NO: 88357 - RNA, 24 nt, Human
caggccuggcuaagaaguccagcu

SEQ ID NO: 88358 - RNA, 32 nt, Human
caggccuggcugcguucucugccugugguccu

SEQ ID NO: 88359 - RNA, 22 nt, Human
caggccugggacccagagccaa

SEQ ID NO: 88360 - RNA, 32 nt, Human
caggccugggcaacauagaugugagcaccuau

SEQ ID NO: 88361 - RNA, 32 nt, Human
caggccugggcaauauggcgagaccucaucuc

SEQ ID NO: 88362 - RNA, 32 nt, Human
caggccugggcuggggcaguuggagguauggg

SEQ ID NO: 88363 - RNA, 32 nt, Human
caggccugggggcagccucuccccagccuccc

SEQ ID NO: 88364 - RNA, 20 nt, Human
caggccuggguccugcccuc

SEQ ID NO: 88365 - RNA, 23 nt, Human
caggccuggucauugccuccuca

SEQ ID NO: 88366 - RNA, 20 nt, Human
caggccugguccaccucuca

SEQ ID NO: 88367 - RNA, 21 nt, Human
caggccuggugcagcccacuc

SEQ ID NO: 88368 - RNA, 32 nt, Human
caggccuguaaucccagcuacuagggaggcgg

SEQ ID NO: 88369 - RNA, 32 nt, Human
caggccuguaaucccagcuacucgggaggcua

SEQ ID NO: 88370 - RNA, 32 nt, Human
caggccuguaaucccagcucuggaagcugaag

SEQ ID NO: 88371 - RNA, 32 nt, Human
caggccuguagucccagcuacuugggaggcug

SEQ ID NO: 88372 - RNA, 32 nt, Human
caggccuguccugcaggggauggucuugggca

SEQ ID NO: 88373 - RNA, 32 nt, Human
caggccugucugcagggccagagcggggcaga

SEQ ID NO: 88374 - RNA, 32 nt, Human
caggccugugccacuggugccagccuggaugc

SEQ ID NO: 88375 - RNA, 32 nt, Human
caggccuguggcuagcagcacuggggacagga

SEQ ID NO: 88376 - RNA, 23 nt, Human
caggccugugggaggcccucgug

SEQ ID NO: 88377 - RNA, 32 nt, Human
caggccugugugguggcucacaccugugaucc

SEQ ID NO: 88378 - RNA, 22 nt, Human
caggccuuaaucacccccauuc

SEQ ID NO: 88379 - RNA, 21 nt, Human
caggccuuagaggccaugcca

SEQ ID NO: 88380 - RNA, 32 nt, Human
caggccuucccaguagcugggauuacaggcac

SEQ ID NO: 88381 - RNA, 32 nt, Human
caggccuuccucccucucccaucagcagcccu

SEQ ID NO: 88382 - RNA, 32 nt, Human
caggccuuccuuagaaucagagaaggaagcgu

SEQ ID NO: 88383 - RNA, 32 nt, Human
caggccuucucccccuccccaguguccucucc

SEQ ID NO: 88384 - RNA, 18 nt, Human
caggccuucugacuguca

SEQ ID NO: 88385 - RNA, 18 nt, Human
caggccuucuuuauguca

SEQ ID NO: 88386 - RNA, 32 nt, Human
caggccuugagguggaaucccaguggcaacuc

SEQ ID NO: 88387 - RNA, 32 nt, Human
caggccuuggagaucgagcugcagucccagcu

SEQ ID NO: 88388 - RNA, 32 nt, Human
caggccuuggauucucauaagaagcacgcaac

SEQ ID NO: 88389 - RNA, 32 nt, Human
caggccuugggcaguggguuggggguagaagu

SEQ ID NO: 88390 - RNA, 18 nt, Human
caggccuuggucagguca

SEQ ID NO: 88391 - RNA, 19 nt, Human
caggccuuuaacuuccuca

SEQ ID NO: 88392 - RNA, 21 nt, Human
caggccuuucccaacaugcca

SEQ ID NO: 88393 - RNA, 21 nt, Human
caggccuuugagcucuuguca

SEQ ID NO: 88394 - RNA, 18 nt, Human
caggccuuugcuagugca

SEQ ID NO: 88395 - RNA, 19 nt, Human
caggccuuuggagcucuca

SEQ ID NO: 88396 - RNA, 20 nt, Human
caggccuuuguaaguuguca

SEQ ID NO: 88397 - RNA, 18 nt, Human
caggccuuuuggacuuca

SEQ ID NO: 88398 - RNA, 32 nt, Human
caggcgaagggcaggaggagcugcuuggcaga

SEQ ID NO: 88399 - RNA, 32 nt, Human
caggcgaccacugcucugcgggcggguggucu

SEQ ID NO: 88400 - RNA, 32 nt, Human
caggcgaccucaggacccugugauuggcgccu

SEQ ID NO: 88401 - RNA, 32 nt, Human
caggcgacuggaggcaggacuccugggucccu

SEQ ID NO: 88402 - RNA, 32 nt, Human
caggcgagcauguugugguaauucuggaacac

SEQ ID NO: 88403 - RNA, 20 nt, Human
caggcgagcccuccccagca

SEQ ID NO: 88404 - RNA, 32 nt, Human
caggcgagcugacauucugcagccuggacggc

SEQ ID NO: 88405 - RNA, 32 nt, Human
caggcgaggaagcuuaaguugaaggaauguua

SEQ ID NO: 88406 - RNA, 32 nt, Human
caggcgaggagcugugggcgcagggccugccg

SEQ ID NO: 88407 - RNA, 32 nt, Human
caggcgaggccgcggcgggagggccacgcccc

SEQ ID NO: 88408 - RNA, 32 nt, Human
caggcgaggggaugcccugcagcauccagccg

SEQ ID NO: 88409 - RNA, 32 nt, Human
caggcgauacuuccuguugccgggacgcuaua

SEQ ID NO: 88410 - RNA, 32 nt, Human
caggcgaugugcaaguguaugcacgugugcac

SEQ ID NO: 88411 - RNA, 18 nt, Human
caggcgauucuccugccu

SEQ ID NO: 88412 - RNA, 32 nt, Human
caggcgcaagccacuacaccugcccucuucau

SEQ ID NO: 88413 - RNA, 32 nt, Human
caggcgcacaccaccacacacagcuaauuuuu

SEQ ID NO: 88414 - RNA, 18 nt, Human
caggcgcacaucaccacg

SEQ ID NO: 88415 - RNA, 32 nt, Human
caggcgccaagugcuacgacagaggugugaau

SEQ ID NO: 88416 - RNA, 32 nt, Human
caggcgccagccaccaugccuggcuaauuuuu

SEQ ID NO: 88417 - RNA, 32 nt, Human
caggcgccaucuguaaagucuccucuggaaau

SEQ ID NO: 88418 - RNA, 16 nt, Human
caggcgccccaccacg

SEQ ID NO: 88419 - RNA, 32 nt, Human
caggcgcccgccaccaugccccggcuauuuuu

SEQ ID NO: 88420 - RNA, 32 nt, Human
caggcgcccgccaccugggauuacgggcgccc

SEQ ID NO: 88421 - RNA, 32 nt, Human
caggcgcccggcugcuccucacuugcucugag

SEQ ID NO: 88422 - RNA, 32 nt, Human
caggcgcccugggccacgugagcccagcggag

SEQ ID NO: 88423 - RNA, 32 nt, Human
caggcgccgaccgccucaugacccagcgcugc

SEQ ID NO: 88424 - RNA, 32 nt, Human
caggcgccggcagagggugaacgaguucaccu

SEQ ID NO: 88425 - RNA, 32 nt, Human
caggcgccggggagaagagacauggagccggc

SEQ ID NO: 88426 - RNA, 15 nt, Human
caggcgccggggcca

SEQ ID NO: 88427 - RNA, 24 nt, Human
caggcgccguagcucaccccugua

SEQ ID NO: 88428 - RNA, 32 nt, Human
caggcgccgugcgaaccgagcccagccagccg

SEQ ID NO: 88429 - RNA, 16 nt, Human
caggcgccuccugcca

SEQ ID NO: 88430 - RNA, 32 nt, Human
caggcgccuguaauccagcuacucgggaggcu

SEQ ID NO: 88431 - RNA, 32 nt, Human
caggcgccuguaaucccagcuacucaggaggc

SEQ ID NO: 88432 - RNA, 32 nt, Human
caggcgccuguaaucccagcuacucgggaggc

SEQ ID NO: 88433 - RNA, 32 nt, Human
caggcgccuguaaucccagcuacuggggaggc

SEQ ID NO: 88434 - RNA, 32 nt, Human
caggcgccuguaaucccagcuacuuggaaggc

SEQ ID NO: 88435 - RNA, 32 nt, Human
caggcgccuguaaucccagcuacuugggaggc

SEQ ID NO: 88436 - RNA, 32 nt, Human
caggcgccuguaaucccagcuauuugggaggc

SEQ ID NO: 88437 - RNA, 32 nt, Human
caggcgccuguagaaucccagcugcucgggag

SEQ ID NO: 88438 - RNA, 32 nt, Human
caggcgccuguagucccagcacuuugggaggc

SEQ ID NO: 88439 - RNA, 32 nt, Human
caggcgccuguaucccagcuacuugggaggca

SEQ ID NO: 88440 - RNA, 32 nt, Human
caggcgcgagccaccaugcccggccagugucc

SEQ ID NO: 88441 - RNA, 24 nt, Human
caggcgcgguggcucaccccugua

SEQ ID NO: 88442 - RNA, 32 nt, Human
caggcgcgguggcucuugccuguagucccggc

SEQ ID NO: 88443 - RNA, 32 nt, Human
caggcgcgguggcuucuguaaucccaggacuu

SEQ ID NO: 88444 - RNA, 22 nt, Human
caggcgcgugggcagggccagg

SEQ ID NO: 88445 - RNA, 32 nt, Human
caggcgcucaccgcggaggucucccugcugga

SEQ ID NO: 88446 - RNA, 32 nt, Human
caggcgcucaggaagggugagguggagcccug

SEQ ID NO: 88447 - RNA, 32 nt, Human
caggcgcucgcaggcaugcagcccgggagcag

SEQ ID NO: 88448 - RNA, 32 nt, Human
caggcgcucggaacccagcagcggcgcuccuc

SEQ ID NO: 88449 - RNA, 32 nt, Human
caggcgcucucagcucucuccccgguacguga

SEQ ID NO: 88450 - RNA, 32 nt, Human
caggcgcuuguaaucccagcuacuugggaggc

SEQ ID NO: 88451 - RNA, 32 nt, Human
caggcggacaggcgggcuuugcaaugaucccc

SEQ ID NO: 88452 - RNA, 32 nt, Human
caggcggagaggagcuugcagcauugagcgga

SEQ ID NO: 88453 - RNA, 32 nt, Human
caggcggagcugcuaagagccugcugacauga

SEQ ID NO: 88454 - RNA, 20 nt, Human
caggcggaggcggggccagg

SEQ ID NO: 88455 - RNA, 32 nt, Human
caggcggaggcugagggcgccgcuggccggcc

SEQ ID NO: 88456 - RNA, 20 nt, Human
caggcggagguugcagugag

SEQ ID NO: 88457 - RNA, 23 nt, Human
caggcggaucaccugaggucggg

SEQ ID NO: 88458 - RNA, 21 nt, Human
caggcggaucacgaggccagg

SEQ ID NO: 88459 - RNA, 19 nt, Human
caggcggaucacgagguca

SEQ ID NO: 88460 - RNA, 21 nt, Human
caggcggaucccgaggucagg

SEQ ID NO: 88461 - RNA, 32 nt, Human
caggcggcaaagcucuccauguaucacucacc

SEQ ID NO: 88462 - RNA, 32 nt, Human
caggcggcaccacugccgucauuucagcuucu

SEQ ID NO: 88463 - RNA, 32 nt, Human
caggcggccagaggccugggaacaucauccug

SEQ ID NO: 88464 - RNA, 20 nt, Human
caggcggcgcgcuccagccc

SEQ ID NO: 88465 - RNA, 32 nt, Human
caggcggcgcgggggcgcgcugggcgggggag

SEQ ID NO: 88466 - RNA, 32 nt, Human
caggcggcucccccacugcccugggccugccc

SEQ ID NO: 88467 - RNA, 22 nt, Human
caggcggcucucucccugagcu

SEQ ID NO: 88468 - RNA, 32 nt, Human
caggcggcugcccuccccuugcuguccucugg

SEQ ID NO: 88469 - RNA, 32 nt, Human
caggcgggagccaccaugauggccaacuuuug

SEQ ID NO: 88470 - RNA, 32 nt, Human
caggcgggagccaccaugccuggccagaacaa

SEQ ID NO: 88471 - RNA, 32 nt, Human
caggcgggaggaccccgcgcggcuggauggcg

SEQ ID NO: 88472 - RNA, 32 nt, Human
caggcgggauguguuggccacagggagaggcg

SEQ ID NO: 88473 - RNA, 32 nt, Human
caggcgggcagugggugaggggaccaggaggu

SEQ ID NO: 88474 - RNA, 32 nt, Human
caggcggggaggacggcgaggagguccgcuga

SEQ ID NO: 88475 - RNA, 32 nt, Human
caggcggggcugggcugcagaccucuggggac

SEQ ID NO: 88476 - RNA, 32 nt, Human
caggcggggucaaggccaggcagcggggcgcg

SEQ ID NO: 88477 - RNA, 32 nt, Human
caggcggguguucaccacugccuuuucuuccu

SEQ ID NO: 88478 - RNA, 32 nt, Human
caggcgguccccauccccaccagcucguuuuu

SEQ ID NO: 88479 - RNA, 32 nt, Human
caggcggugcggcauccuccuccugggauucc

SEQ ID NO: 88480 - RNA, 32 nt, Human
caggcgguggcagagggcucugggcugacauc

SEQ ID NO: 88481 - RNA, 17 nt, Human
caggcgguggggcggcu

SEQ ID NO: 88482 - RNA, 32 nt, Human
caggcguagcuggucccagggccccggggguc

SEQ ID NO: 88483 - RNA, 32 nt, Human
caggcguagggccagggcucuggcagguggcc

SEQ ID NO: 88484 - RNA, 20 nt, Human
caggcguaguugccuacuca

SEQ ID NO: 88485 - RNA, 32 nt, Human
caggcgucagccaccgugaccggcucagacug

SEQ ID NO: 88486 - RNA, 32 nt, Human
caggcgucauggcucacaccuguaaucccagc

SEQ ID NO: 88487 - RNA, 32 nt, Human
caggcgucgccaaggcaggacagccguguggu

SEQ ID NO: 88488 - RNA, 32 nt, Human
caggcgucugcugaaagauuuggaacagaaga

SEQ ID NO: 88489 - RNA, 32 nt, Human
caggcgucuguaaucccagcugcuugggaggc

SEQ ID NO: 88490 - RNA, 32 nt, Human
caggcgugaaccacugcacccagccuaucuuu

SEQ ID NO: 88491 - RNA, 32 nt, Human
caggcgugaaccacugcacccagccugcugau

SEQ ID NO: 88492 - RNA, 32 nt, Human
caggcgugagcaccccacccagcucauuaccc

SEQ ID NO: 88493 - RNA, 32 nt, Human
caggcgugagccaacacaccggaccuucauuu

SEQ ID NO: 88494 - RNA, 32 nt, Human
caggcgugagccacagugccuggccucuuccc

SEQ ID NO: 88495 - RNA, 32 nt, Human
caggcgugagccacagugccuggccugauuca

SEQ ID NO: 88496 - RNA, 32 nt, Human
caggcgugagccaccacaccaggcccgagaaa

SEQ ID NO: 88497 - RNA, 32 nt, Human
caggcgugagccaccacacccagccaaauuuu

SEQ ID NO: 88498 - RNA, 32 nt, Human
caggcgugagccaccacacccagccagugaac

SEQ ID NO: 88499 - RNA, 32 nt, Human
caggcgugagccaccacacccagccaguuuuc

SEQ ID NO: 88500 - RNA, 32 nt, Human
caggcgugagccaccacacccagcccuuucac

SEQ ID NO: 88501 - RNA, 32 nt, Human
caggcgugagccaccacacccagcucagggag

SEQ ID NO: 88502 - RNA, 32 nt, Human
caggcgugagccaccacacccggccaaaacug

SEQ ID NO: 88503 - RNA, 32 nt, Human
caggcgugagccaccacacccucccgagaucu

SEQ ID NO: 88504 - RNA, 32 nt, Human
caggcgugagccaccacaccuagcuggaagag

SEQ ID NO: 88505 - RNA, 32 nt, Human
caggcgugagccaccacaccuggccagcucag

SEQ ID NO: 88506 - RNA, 32 nt, Human
caggcgugagccaccacaccuggcccuaaauc

SEQ ID NO: 88507 - RNA, 32 nt, Human
caggcgugagccaccacaccuggccuguuuuu

SEQ ID NO: 88508 - RNA, 32 nt, Human
caggcgugagccaccacaccuggcuacccuuu

SEQ ID NO: 88509 - RNA, 32 nt, Human
caggcgugagccaccacacuuggccagacugu

SEQ ID NO: 88510 - RNA, 32 nt, Human
caggcgugagccaccacauccagccagugauc

SEQ ID NO: 88511 - RNA, 32 nt, Human
caggcgugagccaccacauccagccuaauuua

SEQ ID NO: 88512 - RNA, 32 nt, Human
caggcgugagccaccacauccggccagugcac

SEQ ID NO: 88513 - RNA, 32 nt, Human
caggcgugagccaccaccacacccagcccugg

SEQ ID NO: 88514 - RNA, 32 nt, Human
caggcgugagccaccacgcccagccguacauu

SEQ ID NO: 88515 - RNA, 32 nt, Human
caggcgugagccaccacgcccagccuauaccc

SEQ ID NO: 88516 - RNA, 32 nt, Human
caggcgugagccaccacgcccggccacuagcc

SEQ ID NO: 88517 - RNA, 32 nt, Human
caggcgugagccaccacgcccggccagcaaau

SEQ ID NO: 88518 - RNA, 32 nt, Human
caggcgugagccaccacgcccggccuggccuu

SEQ ID NO: 88519 - RNA, 32 nt, Human
caggcgugagccaccacgcccggucaccuuug

SEQ ID NO: 88520 - RNA, 32 nt, Human
caggcgugagccaccacgccuggccaauuaug

SEQ ID NO: 88521 - RNA, 32 nt, Human
caggcgugagccaccacgccuggccgaaaaac

SEQ ID NO: 88522 - RNA, 32 nt, Human
caggcgugagccaccacgccuggccucacuca

SEQ ID NO: 88523 - RNA, 32 nt, Human
caggcgugagccaccacgccuggcuggauccu

SEQ ID NO: 88524 - RNA, 32 nt, Human
caggcgugagccaccacguccaacugccuuau

SEQ ID NO: 88525 - RNA, 32 nt, Human
caggcgugagccaccacgucuggccuucuugu

SEQ ID NO: 88526 - RNA, 32 nt, Human
caggcgugagccaccacucccggcuaaguuag

SEQ ID NO: 88527 - RNA, 32 nt, Human
caggcgugagccaccacuccuggccuaugcca

SEQ ID NO: 88528 - RNA, 32 nt, Human
caggcgugagccaccacugcuggccaguuuuu

SEQ ID NO: 88529 - RNA, 32 nt, Human
caggcgugagccaccagccaggccaagcuauu

SEQ ID NO: 88530 - RNA, 32 nt, Human
caggcgugagccaccaggcccagccucgaguc

SEQ ID NO: 88531 - RNA, 32 nt, Human
caggcgugagccaccaggcccugccugguuuu

SEQ ID NO: 88532 - RNA, 32 nt, Human
caggcgugagccaccaggccuggcuccuuuuc

SEQ ID NO: 88533 - RNA, 32 nt, Human
caggcgugagccaccauacccggcccacucuu

SEQ ID NO: 88534 - RNA, 32 nt, Human
caggcgugagccaccauaccuggcgcaugcau

SEQ ID NO: 88535 - RNA, 32 nt, Human
caggcgugagccaccaugaccagcccuccauu

SEQ ID NO: 88536 - RNA, 32 nt, Human
caggcgugagccaccaugcccagccuaauaaa

SEQ ID NO: 88537 - RNA, 32 nt, Human
caggcgugagccaccaugcccagccuacucua

SEQ ID NO: 88538 - RNA, 32 nt, Human
caggcgugagccaccaugccccgccccagaug

SEQ ID NO: 88539 - RNA, 32 nt, Human
caggcgugagccaccaugcccggccagcuucu

SEQ ID NO: 88540 - RNA, 32 nt, Human
caggcgugagccaccaugcccggccaugguug

SEQ ID NO: 88541 - RNA, 32 nt, Human
caggcgugagccaccaugcccggcccaaauau

SEQ ID NO: 88542 - RNA, 32 nt, Human
caggcgugagccaccaugcccggccucuuucu

SEQ ID NO: 88543 - RNA, 32 nt, Human
caggcgugagccaccaugcccggcuaauuuuu

SEQ ID NO: 88544 - RNA, 32 nt, Human
caggcgugagccaccaugccuagcaacauaac

SEQ ID NO: 88545 - RNA, 32 nt, Human
caggcgugagccaccaugccugcccagcaaua

SEQ ID NO: 88546 - RNA, 32 nt, Human
caggcgugagccaccaugccuggcaacauaac

SEQ ID NO: 88547 - RNA, 32 nt, Human
caggcgugagccaccaugccuggccaaaacac

SEQ ID NO: 88548 - RNA, 32 nt, Human
caggcgugagccaccaugccuggccacaucua

SEQ ID NO: 88549 - RNA, 32 nt, Human
caggcgugagccaccaugccuggccagaaauc

SEQ ID NO: 88550 - RNA, 32 nt, Human
caggcgugagccaccaugccuggccagaagcu

SEQ ID NO: 88551 - RNA, 32 nt, Human
caggcgugagccaccaugccuggccaucagaa

SEQ ID NO: 88552 - RNA, 32 nt, Human
caggcgugagccaccaugccuggccuucauua

SEQ ID NO: 88553 - RNA, 32 nt, Human
caggcgugagccaccauguccagccaaaguug

SEQ ID NO: 88554 - RNA, 32 nt, Human
caggcgugagccaccauguccggcuuguguug

SEQ ID NO: 88555 - RNA, 32 nt, Human
caggcgugagccacccggccuggccuagaaug

SEQ ID NO: 88556 - RNA, 32 nt, Human
caggcgugagccaccgagccuggccgguuaac

SEQ ID NO: 88557 - RNA, 32 nt, Human
caggcgugagccaccgcacccagccaggggga

SEQ ID NO: 88558 - RNA, 32 nt, Human
caggcgugagccaccgcacccagcccaucuag

SEQ ID NO: 88559 - RNA, 32 nt, Human
caggcgugagccaccgcacccagcccguauuu

SEQ ID NO: 88560 - RNA, 32 nt, Human
caggcgugagccaccgcacccagccuuuuacc

SEQ ID NO: 88561 - RNA, 32 nt, Human
caggcgugagccaccgcacccggucagcuauu

SEQ ID NO: 88562 - RNA, 32 nt, Human
caggcgugagccaccgcaccuggccauuaugc

SEQ ID NO: 88563 - RNA, 32 nt, Human
caggcgugagccaccgcaccuggcccccuucc

SEQ ID NO: 88564 - RNA, 32 nt, Human
caggcgugagccaccgcaccuggccuaccugg

SEQ ID NO: 88565 - RNA, 32 nt, Human
caggcgugagccaccgcaucuggccacaauaa

SEQ ID NO: 88566 - RNA, 32 nt, Human
caggcgugagccaccgcgccaagccaaggucu

SEQ ID NO: 88567 - RNA, 32 nt, Human
caggcgugagccaccgcgcccagccaaaaaca

SEQ ID NO: 88568 - RNA, 32 nt, Human
caggcgugagccaccgcgcccagccaaaccuu

SEQ ID NO: 88569 - RNA, 32 nt, Human
caggcgugagccaccgcgcccagccagaacau

SEQ ID NO: 88570 - RNA, 32 nt, Human
caggcgugagccaccgcgcccagccggaauuu

SEQ ID NO: 88571 - RNA, 32 nt, Human
caggcgugagccaccgcgcccagccugauuuu

SEQ ID NO: 88572 - RNA, 32 nt, Human
caggcgugagccaccgcgcccggccaacguca

SEQ ID NO: 88573 - RNA, 32 nt, Human
caggcgugagccaccgcgcccggccaagcauc

SEQ ID NO: 88574 - RNA, 32 nt, Human
caggcgugagccaccgcgcccggccaauuuuu

SEQ ID NO: 88575 - RNA, 32 nt, Human
caggcgugagccaccgcgcccggccagguugu

SEQ ID NO: 88576 - RNA, 32 nt, Human
caggcgugagccaccgcgcccggccaguauug

SEQ ID NO: 88577 - RNA, 32 nt, Human
caggcgugagccaccgcgcccggccaguucaa

SEQ ID NO: 88578 - RNA, 32 nt, Human
caggcgugagccaccgcgcccggccauagggc

SEQ ID NO: 88579 - RNA, 32 nt, Human
caggcgugagccaccgcgcccggccaugauuc

SEQ ID NO: 88580 - RNA, 32 nt, Human
caggcgugagccaccgcgcccggccgaaucuu

SEQ ID NO: 88581 - RNA, 32 nt, Human
caggcgugagccaccgcgcccggccggcuugg

SEQ ID NO: 88582 - RNA, 32 nt, Human
caggcgugagccaccgcgccuggccaaaacaa

SEQ ID NO: 88583 - RNA, 32 nt, Human
caggcgugagccaccgcgccuggccaaaaugc

SEQ ID NO: 88584 - RNA, 32 nt, Human
caggcgugagccaccgcgccuggccaagauag

SEQ ID NO: 88585 - RNA, 32 nt, Human
caggcgugagccaccgcgccuggccacaucuc

SEQ ID NO: 88586 - RNA, 32 nt, Human
caggcgugagccaccgcgccuggccaggcugc

SEQ ID NO: 88587 - RNA, 32 nt, Human
caggcgugagccaccgcgccuggccagggacu

SEQ ID NO: 88588 - RNA, 32 nt, Human
caggcgugagccaccgcgccuggccgauggua

SEQ ID NO: 88589 - RNA, 32 nt, Human
caggcgugagccaccgcgccuggccgaugugg

SEQ ID NO: 88590 - RNA, 32 nt, Human
caggcgugagccaccgcgccuggccuaaaaug

SEQ ID NO: 88591 - RNA, 32 nt, Human
caggcgugagccaccgcgccuggccucagcca

SEQ ID NO: 88592 - RNA, 32 nt, Human
caggcgugagccaccgcgccuggccuucaguu

SEQ ID NO: 88593 - RNA, 32 nt, Human
caggcgugagccaccgcguccagccacauuug

SEQ ID NO: 88594 - RNA, 32 nt, Human
caggcgugagccaccgcguccggccucuuuuu

SEQ ID NO: 88595 - RNA, 32 nt, Human
caggcgugagccaccgcguccggcucaggacc

SEQ ID NO: 88596 - RNA, 32 nt, Human
caggcgugagccaccgcgucuggccucagcca

SEQ ID NO: 88597 - RNA, 32 nt, Human
caggcgugagccaccgcuccuggccuauucuu

SEQ ID NO: 88598 - RNA, 32 nt, Human
caggcgugagccaccgcuccuggccugacaga

SEQ ID NO: 88599 - RNA, 32 nt, Human
caggcgugagccaccguacccagccugguccc

SEQ ID NO: 88600 - RNA, 32 nt, Human
caggcgugagccaccgugcccaaccaugaaau

SEQ ID NO: 88601 - RNA, 32 nt, Human
caggcgugagccaccgugcccagccuccuuuu

SEQ ID NO: 88602 - RNA, 32 nt, Human
caggcgugagccaccgugcccagccuucuguu

SEQ ID NO: 88603 - RNA, 32 nt, Human
caggcgugagccaccgugcccagccuuucucc

SEQ ID NO: 88604 - RNA, 32 nt, Human
caggcgugagccaccgugcccauccaacuuaa

SEQ ID NO: 88605 - RNA, 32 nt, Human
caggcgugagccaccgugcccggcccaaacua

SEQ ID NO: 88606 - RNA, 32 nt, Human
caggcgugagccaccgugcccggcccaaaggg

SEQ ID NO: 88607 - RNA, 32 nt, Human
caggcgugagccaccgugcccggcccaacuau

SEQ ID NO: 88608 - RNA, 32 nt, Human
caggcgugagccaccgugcccggcccaggacu

SEQ ID NO: 88609 - RNA, 32 nt, Human
caggcgugagccaccgugcccggcccuaaaau

SEQ ID NO: 88610 - RNA, 32 nt, Human
caggcgugagccaccgugcccggcccuuuucc

SEQ ID NO: 88611 - RNA, 32 nt, Human
caggcgugagccaccgugcccggccuaaauaa

SEQ ID NO: 88612 - RNA, 32 nt, Human
caggcgugagccaccgugcccggccuacaaau

SEQ ID NO: 88613 - RNA, 32 nt, Human
caggcgugagccaccgugcccggccuccccug

SEQ ID NO: 88614 - RNA, 32 nt, Human
caggcgugagccaccgugcccggccucuccca

SEQ ID NO: 88615 - RNA, 32 nt, Human
caggcgugagccaccgugcccggccugauguu

SEQ ID NO: 88616 - RNA, 32 nt, Human
caggcgugagccaccgugcccggccugauucu

SEQ ID NO: 88617 - RNA, 32 nt, Human
caggcgugagccaccgugcccggccugugcuu

SEQ ID NO: 88618 - RNA, 32 nt, Human
caggcgugagccaccgugccugccccagaaug

SEQ ID NO: 88619 - RNA, 32 nt, Human
caggcgugagccaccgugccuggccaagaggc

SEQ ID NO: 88620 - RNA, 32 nt, Human
caggcgugagccaccgugccuggccacgccca

SEQ ID NO: 88621 - RNA, 32 nt, Human
caggcgugagccaccgugccuggccagaaacu

SEQ ID NO: 88622 - RNA, 32 nt, Human
caggcgugagccaccgugccuggccaggcccc

SEQ ID NO: 88623 - RNA, 32 nt, Human
caggcgugagccaccgugccuggcccugguuu

SEQ ID NO: 88624 - RNA, 32 nt, Human
caggcgugagccaccgugccuggccgauguca

SEQ ID NO: 88625 - RNA, 32 nt, Human
caggcgugagccaccgugccuggccgugauuu

SEQ ID NO: 88626 - RNA, 32 nt, Human
caggcgugagccaccgugccuggccuaaauaa

SEQ ID NO: 88627 - RNA, 32 nt, Human
caggcgugagccaccgugccuggcugagaaga

SEQ ID NO: 88628 - RNA, 32 nt, Human
caggcgugagccaccgugccuggcuguaguug

SEQ ID NO: 88629 - RNA, 32 nt, Human
caggcgugagccaccgugcucagccuaaauac

SEQ ID NO: 88630 - RNA, 32 nt, Human
caggcgugagccaccgugcugggccaaaaauc

SEQ ID NO: 88631 - RNA, 32 nt, Human
caggcgugagccaccucacccagccggcuaau

SEQ ID NO: 88632 - RNA, 32 nt, Human
caggcgugagccaccucaccuggccuuuucuu

SEQ ID NO: 88633 - RNA, 32 nt, Human
caggcgugagccaccucgcccggccaauccac

SEQ ID NO: 88634 - RNA, 32 nt, Human
caggcgugagccaccuugcccagcccacauca

SEQ ID NO: 88635 - RNA, 32 nt, Human
caggcgugagccaccuugccuagcccacauca

SEQ ID NO: 88636 - RNA, 32 nt, Human
caggcgugagccacggcacgcagccagcaagu

SEQ ID NO: 88637 - RNA, 32 nt, Human
caggcgugagccacggcgcccagccugugcuu

SEQ ID NO: 88638 - RNA, 32 nt, Human
caggcgugagccacuacacccagccaaucagu

SEQ ID NO: 88639 - RNA, 32 nt, Human
caggcgugagccacugagccagccagcauuag

SEQ ID NO: 88640 - RNA, 32 nt, Human
caggcgugagccacugcacccagccaaaaauu

SEQ ID NO: 88641 - RNA, 32 nt, Human
caggcgugagccacugcacccagccgagugag

SEQ ID NO: 88642 - RNA, 32 nt, Human
caggcgugagccacugcacccagccuagaauc

SEQ ID NO: 88643 - RNA, 32 nt, Human
caggcgugagccacugcacccagccuauucua

SEQ ID NO: 88644 - RNA, 32 nt, Human
caggcgugagccacugcacccagccucauguu

SEQ ID NO: 88645 - RNA, 32 nt, Human
caggcgugagccacugcacccagccucuuuuu

SEQ ID NO: 88646 - RNA, 32 nt, Human
caggcgugagccacugcacccagccugggaga

SEQ ID NO: 88647 - RNA, 32 nt, Human
caggcgugagccacugcacccggccuaauuuc

SEQ ID NO: 88648 - RNA, 32 nt, Human
caggcgugagccacugcacccggcucaccacu

SEQ ID NO: 88649 - RNA, 32 nt, Human
caggcgugagccacugcaccuggcccucgacu

SEQ ID NO: 88650 - RNA, 32 nt, Human
caggcgugagccacugcaccuggccucuguug

SEQ ID NO: 88651 - RNA, 32 nt, Human
caggcgugagccacugcaccuggccugacauu

SEQ ID NO: 88652 - RNA, 32 nt, Human
caggcgugagccacugcaccuggccuuauaaa

SEQ ID NO: 88653 - RNA, 32 nt, Human
caggcgugagccacugcagugggccaauuuuu

SEQ ID NO: 88654 - RNA, 32 nt, Human
caggcgugagccacugcccagcuauacuguau

SEQ ID NO: 88655 - RNA, 32 nt, Human
caggcgugagccacugcgcccagccaacacua

SEQ ID NO: 88656 - RNA, 32 nt, Human
caggcgugagccacugcgcccagccugaauuu

SEQ ID NO: 88657 - RNA, 32 nt, Human
caggcgugagccacugcgcccagccuguuccu

SEQ ID NO: 88658 - RNA, 32 nt, Human
caggcgugagccacugcgcccagccuuguauu

SEQ ID NO: 88659 - RNA, 32 nt, Human
caggcgugagccacugcgcccagcuaccuguc

SEQ ID NO: 88660 - RNA, 32 nt, Human
caggcgugagccacugcgcccggccaauaauu

SEQ ID NO: 88661 - RNA, 32 nt, Human
caggcgugagccacugcgcccggccaauuuua

SEQ ID NO: 88662 - RNA, 32 nt, Human
caggcgugagccacugcgcccggccacauuca

SEQ ID NO: 88663 - RNA, 32 nt, Human
caggcgugagccacugcgcccggccagcccug

SEQ ID NO: 88664 - RNA, 32 nt, Human
caggcgugagccacugcgcccugccuguuugu

SEQ ID NO: 88665 - RNA, 32 nt, Human
caggcgugagccacugcgccuggccaagaaug

SEQ ID NO: 88666 - RNA, 32 nt, Human
caggcgugagccacugcgccuggccagaccau

SEQ ID NO: 88667 - RNA, 32 nt, Human
caggcgugagccacugcgccuggccaucaggu

SEQ ID NO: 88668 - RNA, 32 nt, Human
caggcgugagccacugcgccuggccuaguuug

SEQ ID NO: 88669 - RNA, 32 nt, Human
caggcgugagccacugcggccagcacauuucc

SEQ ID NO: 88670 - RNA, 32 nt, Human
caggcgugagccacugcguccagccagaaucu

SEQ ID NO: 88671 - RNA, 32 nt, Human
caggcgugagccacugcucguggccaaaaguu

SEQ ID NO: 88672 - RNA, 32 nt, Human
caggcgugagccacugugcccagccaaaagag

SEQ ID NO: 88673 - RNA, 32 nt, Human
caggcgugagccacugugcccagccaccaaau

SEQ ID NO: 88674 - RNA, 32 nt, Human
caggcgugagccacugugcccagccgaugagc

SEQ ID NO: 88675 - RNA, 32 nt, Human
caggcgugagccacugugcccagccggaacag

SEQ ID NO: 88676 - RNA, 32 nt, Human
caggcgugagccacugugcccagccuaagcca

SEQ ID NO: 88677 - RNA, 32 nt, Human
caggcgugagccacugugcccggccaagaauu

SEQ ID NO: 88678 - RNA, 32 nt, Human
caggcgugagccacugugccuagccauucccu

SEQ ID NO: 88679 - RNA, 32 nt, Human
caggcgugagccacugugccucgccuaauuuu

SEQ ID NO: 88680 - RNA, 32 nt, Human
caggcgugagccacugugccugccccaaucuu

SEQ ID NO: 88681 - RNA, 32 nt, Human
caggcgugagccacugugccuggccgacaauu

SEQ ID NO: 88682 - RNA, 32 nt, Human
caggcgugagccacugugccuggccuaucuga

SEQ ID NO: 88683 - RNA, 32 nt, Human
caggcgugagccacugugccuggccuguagug

SEQ ID NO: 88684 - RNA, 32 nt, Human
caggcgugagccacugugccuggccuuaugua

SEQ ID NO: 88685 - RNA, 32 nt, Human
caggcgugagccacugugccuggcugaguuuu

SEQ ID NO: 88686 - RNA, 32 nt, Human
caggcgugagccacugugccuggcugguuauu

SEQ ID NO: 88687 - RNA, 32 nt, Human
caggcgugagccacugugccuggcuuccaucc

SEQ ID NO: 88688 - RNA, 32 nt, Human
caggcgugagccacuguggccaaccuaauuuu

SEQ ID NO: 88689 - RNA, 32 nt, Human
caggcgugagccagcacgcccagcuaauuuuu

SEQ ID NO: 88690 - RNA, 32 nt, Human
caggcgugagccagcgcgugccuggccaaaaa

SEQ ID NO: 88691 - RNA, 32 nt, Human
caggcgugagccaucgugcccagcuagacguc

SEQ ID NO: 88692 - RNA, 32 nt, Human
caggcgugagccauugcgccugggcagguauu

SEQ ID NO: 88693 - RNA, 32 nt, Human
caggcgugagggugugacggccgcgcauucgc

SEQ ID NO: 88694 - RNA, 32 nt, Human
caggcgugcaccaccacaccuggcuaacuuuu

SEQ ID NO: 88695 - RNA, 32 nt, Human
caggcgugcaccaccacgcccggcuaauguuu

SEQ ID NO: 88696 - RNA, 32 nt, Human
caggcgugcaccaccacgcccggcugguauug

SEQ ID NO: 88697 - RNA, 32 nt, Human
caggcgugcaccaccacgccugguuaauuguu

SEQ ID NO: 88698 - RNA, 32 nt, Human
caggcgugcaccaccaugccuggcuaaguuuu

SEQ ID NO: 88699 - RNA, 32 nt, Human
caggcgugcaccacugaguccagccuauauuc

SEQ ID NO: 88700 - RNA, 32 nt, Human
caggcgugcaccacugcgccuagcuccaguac

SEQ ID NO: 88701 - RNA, 32 nt, Human
caggcgugcaccacugugcccggcuaauuugu

SEQ ID NO: 88702 - RNA, 32 nt, Human
caggcgugcgccacugcacccggcccgugaag

SEQ ID NO: 88703 - RNA, 21 nt, Human
caggcgugcucgcagcggcug

SEQ ID NO: 88704 - RNA, 32 nt, Human
caggcgugggaagcggcgagauccucgggcug

SEQ ID NO: 88705 - RNA, 31 nt, Human
caggcguggguggccuagaagaugaggggag

SEQ ID NO: 88706 - RNA, 24 nt, Human
caggcgugguagcucacgccugua

SEQ ID NO: 88707 - RNA, 32 nt, Human
caggcgugugagccaccacgcccggccaugaa

SEQ ID NO: 88708 - RNA, 32 nt, Human
caggcgugugccaccaguccuggcuaauuuuu

SEQ ID NO: 88709 - RNA, 32 nt, Human
caggcguuaccuccuuuucuccaucucagcau

SEQ ID NO: 88710 - RNA, 32 nt, Human
caggcguucgagacuggcaugggaaacauggc

SEQ ID NO: 88711 - RNA, 32 nt, Human
caggcguucucuagauccuuuccucuguuucc

SEQ ID NO: 88712 - RNA, 32 nt, Human
caggcguuuugcugaaaacgugucggagggcu

SEQ ID NO: 88713 - RNA, 32 nt, Human
caggcuacagcacuccagccugggcaacaaga

SEQ ID NO: 88714 - RNA, 32 nt, Human
caggcuacaguauuggucccauggacaagaag

SEQ ID NO: 88715 - RNA, 32 nt, Human
caggcuaccagaggaagccuuugguccuaacg

SEQ ID NO: 88716 - RNA, 32 nt, Human
caggcuaccauggucuacaagacucucuucgc

SEQ ID NO: 88717 - RNA, 32 nt, Human
caggcuaccugucagcagucucacugcgaggc

SEQ ID NO: 88718 - RNA, 32 nt, Human
caggcuaccuuaaaacguuccuagucacuucu

SEQ ID NO: 88719 - RNA, 21 nt, Human
caggcuacgccguggcuggcc

SEQ ID NO: 88720 - RNA, 32 nt, Human
caggcuacucucaaacuccugaccucagguga

SEQ ID NO: 88721 - RNA, 32 nt, Human
caggcuacugcuuuacaaaaccagaacugauc

SEQ ID NO: 88722 - RNA, 18 nt, Human
caggcuagagugcagugg

SEQ ID NO: 88723 - RNA, 19 nt, Human
caggcuagagugcaguggc

SEQ ID NO: 88724 - RNA, 32 nt, Human
caggcuaggacaucugccaccaagagagggcu

SEQ ID NO: 88725 - RNA, 32 nt, Human
caggcuaggacgcucugagcugugcauguaca

SEQ ID NO: 88726 - RNA, 32 nt, Human
caggcuagucacgaacuccuaaccucagguga

SEQ ID NO: 88727 - RNA, 32 nt, Human
caggcuagucucaaaccccugaccuuaggugg

SEQ ID NO: 88728 - RNA, 32 nt, Human
caggcuagucucaaacucccgaccuuagguga

SEQ ID NO: 88729 - RNA, 32 nt, Human
caggcuagucucaaacuccugaccucagguga

SEQ ID NO: 88730 - RNA, 32 nt, Human
caggcuagucucaaacuccugaccucaggugc

SEQ ID NO: 88731 - RNA, 32 nt, Human
caggcuagucucaaacuccugggcucaagcaa

SEQ ID NO: 88732 - RNA, 32 nt, Human
caggcuagucucaaacuccugggcucaaguga

SEQ ID NO: 88733 - RNA, 32 nt, Human
caggcuaguugaggauucaguacuucaguuga

SEQ ID NO: 88734 - RNA, 32 nt, Human
caggcuaugccauggcagcugcagaggcccag

SEQ ID NO: 88735 - RNA, 32 nt, Human
caggcuauuguuggccagcccuggguggaggu

SEQ ID NO: 88736 - RNA, 24 nt, Human
caggcucaaacaauucuccugccu

SEQ ID NO: 88737 - RNA, 24 nt, Human
caggcucaaaucauccuccugccu

SEQ ID NO: 88738 - RNA, 32 nt, Human
caggcucaacaucacauggaagcugccaaugc

SEQ ID NO: 88739 - RNA, 32 nt, Human
caggcucaaccugcacuuccuaggcagcuacc

SEQ ID NO: 88740 - RNA, 32 nt, Human
caggcucaacucugguucugacugccugagac

SEQ ID NO: 88741 - RNA, 32 nt, Human
caggcucaagaaauccucccaccucagccucc

SEQ ID NO: 88742 - RNA, 24 nt, Human
caggcucaagcaauucuccuaccu

SEQ ID NO: 88743 - RNA, 24 nt, Human
caggcucaagcaauucuccugccu

SEQ ID NO: 88744 - RNA, 24 nt, Human
caggcucaagcaguucuccugccu

SEQ ID NO: 88745 - RNA, 24 nt, Human
caggcucaagcgacccucccaccu

SEQ ID NO: 88746 - RNA, 24 nt, Human
caggcucaagcgauccucccaccu

SEQ ID NO: 88747 - RNA, 32 nt, Human
caggcucaagcgauccucccaccucagcuccc

SEQ ID NO: 88748 - RNA, 24 nt, Human
caggcucaagcgauccucccagcu

SEQ ID NO: 88749 - RNA, 24 nt, Human
caggcucaagcgauccucccgccu

SEQ ID NO: 88750 - RNA, 24 nt, Human
caggcucaagcgauccuccugccu

SEQ ID NO: 88751 - RNA, 24 nt, Human
caggcucaagcgauccuucugccu

SEQ ID NO: 88752 - RNA, 24 nt, Human
caggcucaagcgauucucccaccu

SEQ ID NO: 88753 - RNA, 32 nt, Human
caggcucaagcgauucucccaccucagccauc

SEQ ID NO: 88754 - RNA, 24 nt, Human
caggcucaagcgauucucucacuu

SEQ ID NO: 88755 - RNA, 24 nt, Human
caggcucaagcgguccuucuaccu

SEQ ID NO: 88756 - RNA, 32 nt, Human
caggcucaagcuguccucccaccucagccucc

SEQ ID NO: 88757 - RNA, 32 nt, Human
caggcucaagugauccucccaccccagccucc

SEQ ID NO: 88758 - RNA, 24 nt, Human
caggcucaagugauccucccaccu

SEQ ID NO: 88759 - RNA, 32 nt, Human
caggcucaagugauccucccaccucagccccc

SEQ ID NO: 88760 - RNA, 32 nt, Human
caggcucaagugauccucccaccucagccucc

SEQ ID NO: 88761 - RNA, 32 nt, Human
caggcucaagugauccucccaccucagccucu

SEQ ID NO: 88762 - RNA, 32 nt, Human
caggcucaagugauccucccaccucagucucc

SEQ ID NO: 88763 - RNA, 32 nt, Human
caggcucaagugauccucccacuucagcuucc

SEQ ID NO: 88764 - RNA, 24 nt, Human
caggcucaagugauccucuuaccu

SEQ ID NO: 88765 - RNA, 24 nt, Human
caggcucaagugauucuccugccu

SEQ ID NO: 88766 - RNA, 31 nt, Human
caggcucacagcuggaacccuggugucuccu

SEQ ID NO: 88767 - RNA, 32 nt, Human
caggcucacaugcacaggaaugcuacaugaug

SEQ ID NO: 88768 - RNA, 32 nt, Human
caggcucacaugcaccaggaacugcauguguc

SEQ ID NO: 88769 - RNA, 32 nt, Human
caggcucaccauggugccgcaugccaucuugg

SEQ ID NO: 88770 - RNA, 32 nt, Human
caggcucacccaggcuggggucugagugucac

SEQ ID NO: 88771 - RNA, 32 nt, Human
caggcucaccuguggauggagagccguggggu

SEQ ID NO: 88772 - RNA, 32 nt, Human
caggcucaccuuaaaaucagcccuugauccca

SEQ ID NO: 88773 - RNA, 19 nt, Human
caggcucacugcagccuca

SEQ ID NO: 88774 - RNA, 19 nt, Human
caggcucagaagccaggga

SEQ ID NO: 88775 - RNA, 32 nt, Human
caggcucagagcagaccccgcccggcgaggag

SEQ ID NO: 88776 - RNA, 32 nt, Human
caggcucagaggcugaagcaggaggaaggaag

SEQ ID NO: 88777 - RNA, 32 nt, Human
caggcucagauuaaaagacagacggcaacacu

SEQ ID NO: 88778 - RNA, 32 nt, Human
caggcucagcaacccaggccucccgcaggcag

SEQ ID NO: 88779 - RNA, 32 nt, Human
caggcucagcagcgugcuguggaaguggaagu

SEQ ID NO: 88780 - RNA, 32 nt, Human
caggcucagcccaccccuccaccucucucucg

SEQ ID NO: 88781 - RNA, 32 nt, Human
caggcucagccccagcccucagcccagucaau

SEQ ID NO: 88782 - RNA, 32 nt, Human
caggcucagcugcugggucaccaggagaaugg

SEQ ID NO: 88783 - RNA, 32 nt, Human
caggcucaggaacugccagggagggaagauga

SEQ ID NO: 88784 - RNA, 32 nt, Human
caggcucaggcagaauugaguacggugcgucu

SEQ ID NO: 88785 - RNA, 24 nt, Human
caggcucaggugauccucccaccu

SEQ ID NO: 88786 - RNA, 32 nt, Human
caggcucaggugauccucccaccucagccucc

SEQ ID NO: 88787 - RNA, 24 nt, Human
caggcucagguggccuccuggccu

SEQ ID NO: 88788 - RNA, 32 nt, Human
caggcucagguguacagguuauucuggguuaa

SEQ ID NO: 88789 - RNA, 32 nt, Human
caggcucaguggcucaugccuauauuccagca

SEQ ID NO: 88790 - RNA, 32 nt, Human
caggcucaugccacugcgcccagcuaauuuuu

SEQ ID NO: 88791 - RNA, 32 nt, Human
caggcucaugguugggagcugagggaaggcug

SEQ ID NO: 88792 - RNA, 32 nt, Human
caggcucaugucuuuacaccuucacucagcca

SEQ ID NO: 88793 - RNA, 32 nt, Human
caggcucaugugauccucccaccucagccucc

SEQ ID NO: 88794 - RNA, 32 nt, Human
caggcuccaccucaguuuaucaacauuauaag

SEQ ID NO: 88795 - RNA, 23 nt, Human
caggcuccacuccugggcuccau

SEQ ID NO: 88796 - RNA, 32 nt, Human
caggcuccagaagaaagacagcagcucauggc

SEQ ID NO: 88797 - RNA, 32 nt, Human
caggcuccagggccacggcggagucaugguuc

SEQ ID NO: 88798 - RNA, 32 nt, Human
caggcuccaggucuuacuaugcagccugaagu

SEQ ID NO: 88799 - RNA, 22 nt, Human
caggcuccauucagguccugcu

SEQ ID NO: 88800 - RNA, 32 nt, Human
caggcuccauuucucugccuucccauuggaaa

SEQ ID NO: 88801 - RNA, 32 nt, Human
caggcucccaaagugugggauuauagugugag

SEQ ID NO: 88802 - RNA, 19 nt, Human
caggcucccaccacucuca

SEQ ID NO: 88803 - RNA, 32 nt, Human
caggcucccagauugauccagacuguguguga

SEQ ID NO: 88804 - RNA, 23 nt, Human
caggcucccccaucugcccagca

SEQ ID NO: 88805 - RNA, 20 nt, Human
caggcucccccggcccgggc

SEQ ID NO: 88806 - RNA, 23 nt, Human
caggcucccccuuccccaaggca

SEQ ID NO: 88807 - RNA, 32 nt, Human
caggcuccccuccucggcuuccuuccucucug

SEQ ID NO: 88808 - RNA, 21 nt, Human
caggcucccgccagcgucgcu

SEQ ID NO: 88809 - RNA, 23 nt, Human
caggcucccuacacaguccugcu

SEQ ID NO: 88810 - RNA, 32 nt, Human
caggcucccucaggaccccauccuuuccugcc

SEQ ID NO: 88811 - RNA, 23 nt, Human
caggcucccugaacaguccuguu

SEQ ID NO: 88812 - RNA, 32 nt, Human
caggcucccugagaagccggcaucugcccaac

SEQ ID NO: 88813 - RNA, 24 nt, Human
caggcucccugccccacccauuca

SEQ ID NO: 88814 - RNA, 22 nt, Human
caggcucccuggcuggccgguu

SEQ ID NO: 88815 - RNA, 18 nt, Human
caggcucccuguguccug

SEQ ID NO: 88816 - RNA, 19 nt, Human
caggcucccuuccugggga

SEQ ID NO: 88817 - RNA, 32 nt, Human
caggcucccuuucucuucuuccccagguccuu

SEQ ID NO: 88818 - RNA, 32 nt, Human
caggcuccggacgcagagguggcaguggcacc

SEQ ID NO: 88819 - RNA, 31 nt, Human
caggcuccuaaauaaaccagcaacucccucg

SEQ ID NO: 88820 - RNA, 32 nt, Human
caggcuccuccaggccucugguuuagcggagc

SEQ ID NO: 88821 - RNA, 32 nt, Human
caggcuccuccgagcaccucaugcauguccca

SEQ ID NO: 88822 - RNA, 32 nt, Human
caggcuccuccucuccccuugcggccuuucua

SEQ ID NO: 88823 - RNA, 23 nt, Human
caggcuccucggaacguccggcu

SEQ ID NO: 88824 - RNA, 32 nt, Human
caggcuccucuccucaaaucaagcccuggaca

SEQ ID NO: 88825 - RNA, 23 nt, Human
caggcuccugagaugucuagacu

SEQ ID NO: 88826 - RNA, 32 nt, Human
caggcuccugaggaccccucaggcccuggcac

SEQ ID NO: 88827 - RNA, 32 nt, Human
caggcuccugaggaggauugagggugaaaguc

SEQ ID NO: 88828 - RNA, 20 nt, Human
caggcuccugauuccucuuc

SEQ ID NO: 88829 - RNA, 21 nt, Human
caggcuccugcagucccagcu

SEQ ID NO: 88830 - RNA, 20 nt, Human
caggcuccugcugcaccgcu

SEQ ID NO: 88831 - RNA, 21 nt, Human
caggcuccuucucuucuccca

SEQ ID NO: 88832 - RNA, 17 nt, Human
caggcucgauccuccca

SEQ ID NO: 88833 - RNA, 32 nt, Human
caggcucgcugccucuccuccccaacugcagg

SEQ ID NO: 88834 - RNA, 32 nt, Human
caggcucgucucaaacuccugaccucagguga

SEQ ID NO: 88835 - RNA, 22 nt, Human
caggcucgugauccuccugccu

SEQ ID NO: 88836 - RNA, 22 nt, Human
caggcucuaagucauuuucucc

SEQ ID NO: 88837 - RNA, 32 nt, Human
caggcucuaggaucgauuccagaaggagccuu

SEQ ID NO: 88838 - RNA, 32 nt, Human
caggcucuccagaaaacuacuacaauggccaa

SEQ ID NO: 88839 - RNA, 32 nt, Human
caggcucuccgacccagcuaccgggaaugggg

SEQ ID NO: 88840 - RNA, 22 nt, Human
caggcucucgggguagcuagcu

SEQ ID NO: 88841 - RNA, 21 nt, Human
caggcucugagccacugagca

SEQ ID NO: 88842 - RNA, 32 nt, Human
caggcucugaguguccaguggcagccagaaca

SEQ ID NO: 88843 - RNA, 32 nt, Human
caggcucugaugcugagaggcuugccuccggg

SEQ ID NO: 88844 - RNA, 32 nt, Human
caggcucugcccaccaaggugcccucuccccg

SEQ ID NO: 88845 - RNA, 21 nt, Human
caggcucugccucacguccuc

SEQ ID NO: 88846 - RNA, 32 nt, Human
caggcucugcuacguccugccugugaagaauc

SEQ ID NO: 88847 - RNA, 32 nt, Human
caggcucugcuucacuguccagccuuggaacu

SEQ ID NO: 88848 - RNA, 32 nt, Human
caggcucugggcaguagccacagagacuuuag

SEQ ID NO: 88849 - RNA, 32 nt, Human
caggcucugggcucagguuggcacaucucacu

SEQ ID NO: 88850 - RNA, 23 nt, Human
caggcucugggucagguucugcu

SEQ ID NO: 88851 - RNA, 24 nt, Human
caggcucugugcuccuuccagccc

SEQ ID NO: 88852 - RNA, 32 nt, Human
caggcucugugcugaugaacagccuggcugag

SEQ ID NO: 88853 - RNA, 32 nt, Human
caggcucuguggcccaggcugagagcagcagg

SEQ ID NO: 88854 - RNA, 22 nt, Human
caggcucuuacagccacaggca

SEQ ID NO: 88855 - RNA, 23 nt, Human
caggcucuuccaaggggccagcu

SEQ ID NO: 88856 - RNA, 32 nt, Human
caggcucuucucuccggcuccagccugugauu

SEQ ID NO: 88857 - RNA, 22 nt, Human
caggcucuucuggucaccaggc

SEQ ID NO: 88858 - RNA, 23 nt, Human
caggcucuucuggucaccaggcu

SEQ ID NO: 88859 - RNA, 19 nt, Human
caggcucuucuuccagccu

SEQ ID NO: 88860 - RNA, 32 nt, Human
caggcucuucuuuccgcugaaucuuccuuccc

SEQ ID NO: 88861 - RNA, 32 nt, Human
caggcucuugcacuuccuuuguuuucuuucug

SEQ ID NO: 88862 - RNA, 19 nt, Human
caggcucuuucuccagccc

SEQ ID NO: 88863 - RNA, 32 nt, Human
caggcucuuugagggcagggauugugucuggu

SEQ ID NO: 88864 - RNA, 32 nt, Human
caggcugaagaaggugggaggggagggcggaa

SEQ ID NO: 88865 - RNA, 32 nt, Human
caggcugaagacagagaugauauguuagcuug

SEQ ID NO: 88866 - RNA, 32 nt, Human
caggcugaagagguccagcaggcagcagacgg

SEQ ID NO: 88867 - RNA, 32 nt, Human
caggcugaagcgauccucccaccucaaccucc

SEQ ID NO: 88868 - RNA, 32 nt, Human
caggcugaagucugucaugaaaccacuuauuu

SEQ ID NO: 88869 - RNA, 32 nt, Human
caggcugaagugaagggcaugugcacagaaac

SEQ ID NO: 88870 - RNA, 32 nt, Human
caggcugaagugcaguagugcaaucucagcuc

SEQ ID NO: 88871 - RNA, 32 nt, Human
caggcugacagggagggcaaagagugaaaagg

SEQ ID NO: 88872 - RNA, 20 nt, Human
caggcugacauggcuggcca

SEQ ID NO: 88873 - RNA, 32 nt, Human
caggcugaccaggaucaccaggaagcuccaga

SEQ ID NO: 88874 - RNA, 32 nt, Human
caggcugacccgaagcccugcagagccccauc

SEQ ID NO: 88875 - RNA, 32 nt, Human
caggcugaccuggccucccguggaccacucgc

SEQ ID NO: 88876 - RNA, 18 nt, Human
caggcugacguugccuga

SEQ ID NO: 88877 - RNA, 32 nt, Human
caggcugacuccaggcccuguaacaccgggaa

SEQ ID NO: 88878 - RNA, 32 nt, Human
caggcugacuucugucucugcaaagaggaccu

SEQ ID NO: 88879 - RNA, 32 nt, Human
caggcugagagaauugggcagggagagggcgg

SEQ ID NO: 88880 - RNA, 32 nt, Human
caggcugagauggaaaacaagcccuuuauuga

SEQ ID NO: 88881 - RNA, 32 nt, Human
caggcugagaugggaggauggcuugagcccag

SEQ ID NO: 88882 - RNA, 32 nt, Human
caggcugagcaaacauccaccuucccugucuu

SEQ ID NO: 88883 - RNA, 32 nt, Human
caggcugagccccgggaggagagaucaaagcu

SEQ ID NO: 88884 - RNA, 32 nt, Human
caggcugagccccuccuggaugccugcagacu

SEQ ID NO: 88885 - RNA, 32 nt, Human
caggcugagccgcgggccggcggggccgagcu

SEQ ID NO: 88886 - RNA, 32 nt, Human
caggcugaggcugagggucucaagggccagag

SEQ ID NO: 88887 - RNA, 32 nt, Human
caggcugaggcugcugguggccauguuccuac

SEQ ID NO: 88888 - RNA, 32 nt, Human
caggcugaggcuguggaggggacaagcacgcc

SEQ ID NO: 88889 - RNA, 32 nt, Human
caggcugaggggguucagaaccagccuggcca

SEQ ID NO: 88890 - RNA, 32 nt, Human
caggcugaggucuccgagcggcucgccauggc

SEQ ID NO: 88891 - RNA, 32 nt, Human
caggcugagguggggaaggagggacuuggcug

SEQ ID NO: 88892 - RNA, 32 nt, Human
caggcugaguccccaaaccugcacuagaggca

SEQ ID NO: 88893 - RNA, 32 nt, Human
caggcugauccagggacuuagagcuuguuacc

SEQ ID NO: 88894 - RNA, 32 nt, Human
caggcugaucucaaacaucugaccucaggaag

SEQ ID NO: 88895 - RNA, 32 nt, Human
caggcugaucucaaacuccuaggcuuaaguga

SEQ ID NO: 88896 - RNA, 32 nt, Human
caggcugaucucaaacuccugaccucaaguga

SEQ ID NO: 88897 - RNA, 32 nt, Human
caggcugaucucaaacuccugaccucaugauc

SEQ ID NO: 88898 - RNA, 32 nt, Human
caggcugaucucaaacuccuggacucaagcga

SEQ ID NO: 88899 - RNA, 32 nt, Human
caggcugaucucaaacuccuggccucaaguga

SEQ ID NO: 88900 - RNA, 32 nt, Human
caggcugaucucaaacuccuggcuucaaguga

SEQ ID NO: 88901 - RNA, 32 nt, Human
caggcugaucucaaacuucugaccucagguga

SEQ ID NO: 88902 - RNA, 32 nt, Human
caggcugaucucgaacuccuaaccucaaguga

SEQ ID NO: 88903 - RNA, 32 nt, Human
caggcugaucucguaucucaggaaccucaggc

SEQ ID NO: 88904 - RNA, 32 nt, Human
caggcugcaagaacagugcuggggugaguacc

SEQ ID NO: 88905 - RNA, 32 nt, Human
caggcugcaaugagccaagaucacgccacuga

SEQ ID NO: 88906 - RNA, 19 nt, Human
caggcugcacaaguggaag

SEQ ID NO: 88907 - RNA, 32 nt, Human
caggcugcacacacagagcgugucggagugca

SEQ ID NO: 88908 - RNA, 32 nt, Human
caggcugcacacauucuuauuaggauuccacc

SEQ ID NO: 88909 - RNA, 32 nt, Human
caggcugcacaucucaguauauguagggaccc

SEQ ID NO: 88910 - RNA, 32 nt, Human
caggcugcacgcggcggacugggcaggccggg

SEQ ID NO: 88911 - RNA, 23 nt, Human
caggcugcagaauggcaggaagg

SEQ ID NO: 88912 - RNA, 32 nt, Human
caggcugcagcccucuuggggcuccaggauuu

SEQ ID NO: 88913 - RNA, 32 nt, Human
caggcugcagcgcgcuaugaucgcgccugcga

SEQ ID NO: 88914 - RNA, 32 nt, Human
caggcugcagcguuucaggaaugaaaagccug

SEQ ID NO: 88915 - RNA, 32 nt, Human
caggcugcagcucgggugucuguggcuucuaa

SEQ ID NO: 88916 - RNA, 32 nt, Human
caggcugcaggaaaucugccuccaggagggga

SEQ ID NO: 88917 - RNA, 32 nt, Human
caggcugcagugagcucugaugguaccacugc

SEQ ID NO: 88918 - RNA, 32 nt, Human
caggcugcagugagcugugacugcaccacugc

SEQ ID NO: 88919 - RNA, 32 nt, Human
caggcugcagugagcugugaucauaccacugc

SEQ ID NO: 88920 - RNA, 32 nt, Human
caggcugcagugcaguggcaugaucauggcuc

SEQ ID NO: 88921 - RNA, 22 nt, Human
caggcugcaucucuuugaaagg

SEQ ID NO: 88922 - RNA, 32 nt, Human
caggcugccaagguccuguacagcagagaccc

SEQ ID NO: 88923 - RNA, 32 nt, Human
caggcugccagacagcugcccuggcguugccg

SEQ ID NO: 88924 - RNA, 32 nt, Human
caggcugccaggcuggaguggaguggcaugau

SEQ ID NO: 88925 - RNA, 32 nt, Human
caggcugccaggcuggcguacaguggcgcaau

SEQ ID NO: 88926 - RNA, 21 nt, Human
caggcugccauagcacaagug

SEQ ID NO: 88927 - RNA, 22 nt, Human
caggcugcccacuccucauuca

SEQ ID NO: 88928 - RNA, 32 nt, Human
caggcugcccccaggguuucugcacugguccc

SEQ ID NO: 88929 - RNA, 32 nt, Human
caggcugccccucgccccagcauccaaguccu

SEQ ID NO: 88930 - RNA, 32 nt, Human
caggcugccccucuccuuccccggcucgcagg

SEQ ID NO: 88931 - RNA, 20 nt, Human
caggcugcccucccuuggug

SEQ ID NO: 88932 - RNA, 23 nt, Human
caggcugcccugaugcuaggaag

SEQ ID NO: 88933 - RNA, 21 nt, Human
caggcugccgccgcugggagg

SEQ ID NO: 88934 - RNA, 32 nt, Human
caggcugccgcggggcaggggugcagugggug

SEQ ID NO: 88935 - RNA, 32 nt, Human
caggcugccucuucugccccggagcuggggug

SEQ ID NO: 88936 - RNA, 32 nt, Human
caggcugccugcuaacaucacacccagcaagu

SEQ ID NO: 88937 - RNA, 32 nt, Human
caggcugccugcuaugugaugccugagcacaa

SEQ ID NO: 88938 - RNA, 32 nt, Human
caggcugccuggucacugccccucucucagug

SEQ ID NO: 88939 - RNA, 32 nt, Human
caggcugccuuugagaagagcuuggcuauugu

SEQ ID NO: 88940 - RNA, 32 nt, Human
caggcugcgugccuccgucugccugugugcug

SEQ ID NO: 88941 - RNA, 32 nt, Human
caggcugcucacugcgggcccuaugacccuuu

SEQ ID NO: 88942 - RNA, 32 nt, Human
caggcugcucagacuccuggguggcuuccaga

SEQ ID NO: 88943 - RNA, 32 nt, Human
caggcugcucaggaugcaagauauugucaaga

SEQ ID NO: 88944 - RNA, 32 nt, Human
caggcugcucucaaaccccugaccucaaauga

SEQ ID NO: 88945 - RNA, 32 nt, Human
caggcugcucucaaacuccugaccucagguga

SEQ ID NO: 88946 - RNA, 32 nt, Human
caggcugcucucagacuccugaucucagguga

SEQ ID NO: 88947 - RNA, 22 nt, Human
caggcugcucuuuguuagaagg

SEQ ID NO: 88948 - RNA, 32 nt, Human
caggcugcugagccuguuccuuggcugggguc

SEQ ID NO: 88949 - RNA, 22 nt, Human
caggcugcugcuuuguggaaag

SEQ ID NO: 88950 - RNA, 32 nt, Human
caggcugcugucuccuccccagaaagaguccu

SEQ ID NO: 88951 - RNA, 22 nt, Human
caggcugcugugaguaggaagg

SEQ ID NO: 88952 - RNA, 32 nt, Human
caggcuggaaagugccuuuucugagaggauaa

SEQ ID NO: 88953 - RNA, 32 nt, Human
caggcuggaaccugggcugccccagaacacag

SEQ ID NO: 88954 - RNA, 32 nt, Human
caggcuggaagaaggcccucaccagaacccaa

SEQ ID NO: 88955 - RNA, 32 nt, Human
caggcuggaaugcagugcaguggcacaaucuc

SEQ ID NO: 88956 - RNA, 32 nt, Human
caggcuggaaugcaguggcacaaucauagcuc

SEQ ID NO: 88957 - RNA, 32 nt, Human
caggcuggaaugcaguggugugaacugggcuc

SEQ ID NO: 88958 - RNA, 31 nt, Human
caggcuggacaaugcccguugacuuggggca

SEQ ID NO: 88959 - RNA, 32 nt, Human
caggcuggaccccggcuccacacccacaucca

SEQ ID NO: 88960 - RNA, 32 nt, Human
caggcuggagaaaagaagcugccaccaugguu

SEQ ID NO: 88961 - RNA, 32 nt, Human
caggcuggagcagcagcugcauccugcauuuc

SEQ ID NO: 88962 - RNA, 32 nt, Human
caggcuggagcaguggcacgaucucgccucac

SEQ ID NO: 88963 - RNA, 32 nt, Human
caggcuggaguacaguggcacaaucauggcuc

SEQ ID NO: 88964 - RNA, 32 nt, Human
caggcuggaguacaguggcaugaucauagcuc

SEQ ID NO: 88965 - RNA, 32 nt, Human
caggcuggaguacaguggcaugaucauggcuc

SEQ ID NO: 88966 - RNA, 32 nt, Human
caggcuggaguauaguggcacaaacauggcuc

SEQ ID NO: 88967 - RNA, 32 nt, Human
caggcuggaguauaguggcaugaucauagauc

SEQ ID NO: 88968 - RNA, 32 nt, Human
caggcuggagugcaauagcgcgaucuuggcuc

SEQ ID NO: 88969 - RNA, 30 nt, Human
caggcuggagugcaaugggcacaauuauag

SEQ ID NO: 88970 - RNA, 32 nt, Human
caggcuggagugcaauggugcaaugaucucgg

SEQ ID NO: 88971 - RNA, 32 nt, Human
caggcuggagugcaguagugcaaucagggcuc

SEQ ID NO: 88972 - RNA, 18 nt, Human
caggcuggagugcagugg

SEQ ID NO: 88973 - RNA, 32 nt, Human
caggcuggagugcaguggcacaaucauggcuc

SEQ ID NO: 88974 - RNA, 20 nt, Human
caggcuggagugcaguggug

SEQ ID NO: 88975 - RNA, 21 nt, Human
caggcuggagugcaguggugu

SEQ ID NO: 88976 - RNA, 18 nt, Human
caggcuggagugcggugg

SEQ ID NO: 88977 - RNA, 32 nt, Human
caggcuggagugcgguggugugaucuuggcuc

SEQ ID NO: 88978 - RNA, 32 nt, Human
caggcuggagugguacaauggcgugucucggc

SEQ ID NO: 88979 - RNA, 23 nt, Human
caggcuggaguuucaggcacugc

SEQ ID NO: 88980 - RNA, 32 nt, Human
caggcuggauagagucccuuccuuugguccug

SEQ ID NO: 88981 - RNA, 32 nt, Human
caggcuggcaggcaucucggcuugcaggaggc

SEQ ID NO: 88982 - RNA, 32 nt, Human
caggcuggcaucucccccacccugugccccuu

SEQ ID NO: 88983 - RNA, 32 nt, Human
caggcuggccaacacggugaaaccccgucucu

SEQ ID NO: 88984 - RNA, 32 nt, Human
caggcuggccaacauggcaaaaccccaugucu

SEQ ID NO: 88985 - RNA, 32 nt, Human
caggcuggccaacaugguaaaacccugucucu

SEQ ID NO: 88986 - RNA, 32 nt, Human
caggcuggccaacauggugaaaccccaucucu

SEQ ID NO: 88987 - RNA, 32 nt, Human
caggcuggccagcauggugaaaccccgucugu

SEQ ID NO: 88988 - RNA, 32 nt, Human
caggcuggccgacauggugaaaccccaucucu

SEQ ID NO: 88989 - RNA, 32 nt, Human
caggcuggccucaaacuccggagcucaagcag

SEQ ID NO: 88990 - RNA, 32 nt, Human
caggcuggccucaaacuccugaccucagguga

SEQ ID NO: 88991 - RNA, 32 nt, Human
caggcuggccucaaacuccugggcucaagcaa

SEQ ID NO: 88992 - RNA, 32 nt, Human
caggcuggccucaaacuccugggcucaaguga

SEQ ID NO: 88993 - RNA, 32 nt, Human
caggcuggccugacauggaaggugaaacaagc

SEQ ID NO: 88994 - RNA, 32 nt, Human
caggcuggcugcuggcucuaccagguucugug

SEQ ID NO: 88995 - RNA, 32 nt, Human
caggcuggcuguagcgacucuggcucucucug

SEQ ID NO: 88996 - RNA, 32 nt, Human
caggcuggcugucucccaagccuguguuucuc

SEQ ID NO: 88997 - RNA, 32 nt, Human
caggcugggaaagauuccagcugaggagagcc

SEQ ID NO: 88998 - RNA, 32 nt, Human
caggcugggaacaccaggcuuggauguggugc

SEQ ID NO: 88999 - RNA, 30 nt, Human
caggcugggaggcagagggcacaaaccuua

SEQ ID NO: 89000 - RNA, 32 nt, Human
caggcugggaucauaggugugagccaccucac

SEQ ID NO: 89001 - RNA, 32 nt, Human
caggcugggauuacaggcgugagccacugcac

SEQ ID NO: 89002 - RNA, 22 nt, Human
caggcugggcaacagagugaga

SEQ ID NO: 89003 - RNA, 32 nt, Human
caggcugggcaacauggugaaaccccagcucu

SEQ ID NO: 89004 - RNA, 22 nt, Human
caggcugggcaacggagugaga

SEQ ID NO: 89005 - RNA, 22 nt, Human
caggcugggcgacagagugaga

SEQ ID NO: 89006 - RNA, 18 nt, Human
caggcugggcgggacaga

SEQ ID NO: 89007 - RNA, 32 nt, Human
caggcugggcuugguggucaggaacaggggca

SEQ ID NO: 89008 - RNA, 32 nt, Human
caggcuggggcaccuuugccuccugaggcgca

SEQ ID NO: 89009 - RNA, 32 nt, Human
caggcuggggcagugggcaugggcaggggcug

SEQ ID NO: 89010 - RNA, 32 nt, Human
caggcugggggccucaggagaggucacagccc

SEQ ID NO: 89011 - RNA, 32 nt, Human
caggcuggggucagccuacaguuguguugcuu

SEQ ID NO: 89012 - RNA, 32 nt, Human
caggcuggguguccucacaggagugagggcua

SEQ ID NO: 89013 - RNA, 32 nt, Human
caggcugguaggcagacaggcagagagaaggu

SEQ ID NO: 89014 - RNA, 32 nt, Human
caggcugguaucgaccuccugaccucaaguga

SEQ ID NO: 89015 - RNA, 32 nt, Human
caggcuggucaacauggcgaaaccccaucucu

SEQ ID NO: 89016 - RNA, 32 nt, Human
caggcuggucccuccucucgugccccagcggc

SEQ ID NO: 89017 - RNA, 32 nt, Human
caggcuggucucaaaacuccugaccucaagug

SEQ ID NO: 89018 - RNA, 32 nt, Human
caggcuggucucaaaacuccugaccucaggug

SEQ ID NO: 89019 - RNA, 32 nt, Human
caggcuggucucaaaacuccugagcucaagug

SEQ ID NO: 89020 - RNA, 32 nt, Human
caggcuggucucaaaauccugaccucaaguca

SEQ ID NO: 89021 - RNA, 32 nt, Human
caggcuggucucaaacaccugaccucagguga

SEQ ID NO: 89022 - RNA, 32 nt, Human
caggcuggucucaaacaccugaccugaaguga

SEQ ID NO: 89023 - RNA, 32 nt, Human
caggcuggucucaaacaccugaccuugugauc

SEQ ID NO: 89024 - RNA, 32 nt, Human
caggcuggucucaaacccccagccucaacuga

SEQ ID NO: 89025 - RNA, 32 nt, Human
caggcuggucucaaaccccggaccucagguga

SEQ ID NO: 89026 - RNA, 32 nt, Human
caggcuggucucaaaccccugaccucaggcaa

SEQ ID NO: 89027 - RNA, 32 nt, Human
caggcuggucucaaacgccagaccucagguga

SEQ ID NO: 89028 - RNA, 32 nt, Human
caggcuggucucaaacuccagagcucaagaga

SEQ ID NO: 89029 - RNA, 32 nt, Human
caggcuggucucaaacuccagggcucaagcag

SEQ ID NO: 89030 - RNA, 32 nt, Human
caggcuggucucaaacucccaaccucaaguga

SEQ ID NO: 89031 - RNA, 32 nt, Human
caggcuggucucaaacucccaaccucagguga

SEQ ID NO: 89032 - RNA, 32 nt, Human
caggcuggucucaaacucccagacucaaguca

SEQ ID NO: 89033 - RNA, 32 nt, Human
caggcuggucucaaacucccagccucaagcga

SEQ ID NO: 89034 - RNA, 32 nt, Human
caggcuggucucaaacucccgaccucaaguag

SEQ ID NO: 89035 - RNA, 32 nt, Human
caggcuggucucaaacucccgaccucaaguga

SEQ ID NO: 89036 - RNA, 32 nt, Human
caggcuggucucaaacucccgaccucagguga

SEQ ID NO: 89037 - RNA, 32 nt, Human
caggcuggucucaaacucccgacuucagguga

SEQ ID NO: 89038 - RNA, 32 nt, Human
caggcuggucucaaacuccuaaccucaaguga

SEQ ID NO: 89039 - RNA, 32 nt, Human
caggcuggucucaaacuccuaaccucgugauc

SEQ ID NO: 89040 - RNA, 32 nt, Human
caggcuggucucaaacuccuaaccuuaaguga

SEQ ID NO: 89041 - RNA, 32 nt, Human
caggcuggucucaaacuccuaaccuugugauu

SEQ ID NO: 89042 - RNA, 32 nt, Human
caggcuggucucaaacuccuagccucaagugu

SEQ ID NO: 89043 - RNA, 32 nt, Human
caggcuggucucaaacuccuagguucacuuug

SEQ ID NO: 89044 - RNA, 32 nt, Human
caggcuggucucaaacuccucgguucaagcaa

SEQ ID NO: 89045 - RNA, 32 nt, Human
caggcuggucucaaacuccugaacucaaguga

SEQ ID NO: 89046 - RNA, 32 nt, Human
caggcuggucucaaacuccugaccuagugauc

SEQ ID NO: 89047 - RNA, 32 nt, Human
caggcuggucucaaacuccugaccucaaauga

SEQ ID NO: 89048 - RNA, 32 nt, Human
caggcuggucucaaacuccugaccucaagcaa

SEQ ID NO: 89049 - RNA, 32 nt, Human
caggcuggucucaaacuccugaccucaagcga

SEQ ID NO: 89050 - RNA, 32 nt, Human
caggcuggucucaaacuccugaccucaaguaa

SEQ ID NO: 89051 - RNA, 32 nt, Human
caggcuggucucaaacuccugaccucaaguga

SEQ ID NO: 89052 - RNA, 32 nt, Human
caggcuggucucaaacuccugaccucagauga

SEQ ID NO: 89053 - RNA, 32 nt, Human
caggcuggucucaaacuccugaccucaggcaa

SEQ ID NO: 89054 - RNA, 32 nt, Human
caggcuggucucaaacuccugaccucagggga

SEQ ID NO: 89055 - RNA, 32 nt, Human
caggcuggucucaaacuccugaccucagguaa

SEQ ID NO: 89056 - RNA, 32 nt, Human
caggcuggucucaaacuccugaccucagguac

SEQ ID NO: 89057 - RNA, 32 nt, Human
caggcuggucucaaacuccugaccucagguga

SEQ ID NO: 89058 - RNA, 32 nt, Human
caggcuggucucaaacuccugaccucaggugu

SEQ ID NO: 89059 - RNA, 32 nt, Human
caggcuggucucaaacuccugaccucaugauc

SEQ ID NO: 89060 - RNA, 32 nt, Human
caggcuggucucaaacuccugaccucguaauc

SEQ ID NO: 89061 - RNA, 32 nt, Human
caggcuggucucaaacuccugaccucgugaua

SEQ ID NO: 89062 - RNA, 32 nt, Human
caggcuggucucaaacuccugaccucgugauc

SEQ ID NO: 89063 - RNA, 32 nt, Human
caggcuggucucaaacuccugaccuuaaguga

SEQ ID NO: 89064 - RNA, 32 nt, Human
caggcuggucucaaacuccugaccuugugauc

SEQ ID NO: 89065 - RNA, 32 nt, Human
caggcuggucucaaacuccugaccuugugguc

SEQ ID NO: 89066 - RNA, 32 nt, Human
caggcuggucucaaacuccugacucgaaguga

SEQ ID NO: 89067 - RNA, 32 nt, Human
caggcuggucucaaacuccugacuucaaauga

SEQ ID NO: 89068 - RNA, 32 nt, Human
caggcuggucucaaacuccugacuucaaguga

SEQ ID NO: 89069 - RNA, 32 nt, Human
caggcuggucucaaacuccugacuucagguga

SEQ ID NO: 89070 - RNA, 32 nt, Human
caggcuggucucaaacuccugacuucgugauc

SEQ ID NO: 89071 - RNA, 32 nt, Human
caggcuggucucaaacuccugagcucaagcaa

SEQ ID NO: 89072 - RNA, 32 nt, Human
caggcuggucucaaacuccugagcucaagcca

SEQ ID NO: 89073 - RNA, 32 nt, Human
caggcuggucucaaacuccugagcucaagcga

SEQ ID NO: 89074 - RNA, 32 nt, Human
caggcuggucucaaacuccugagcucaggcaa

SEQ ID NO: 89075 - RNA, 32 nt, Human
caggcuggucucaaacuccugagcucaggcag

SEQ ID NO: 89076 - RNA, 32 nt, Human
caggcuggucucaaacuccugagcucaggcca

SEQ ID NO: 89077 - RNA, 32 nt, Human
caggcuggucucaaacuccugaucucaagaga

SEQ ID NO: 89078 - RNA, 32 nt, Human
caggcuggucucaaacuccugcccucagguga

SEQ ID NO: 89079 - RNA, 32 nt, Human
caggcuggucucaaacuccuggacccaagcca

SEQ ID NO: 89080 - RNA, 32 nt, Human
caggcuggucucaaacuccuggacucaagcaa

SEQ ID NO: 89081 - RNA, 32 nt, Human
caggcuggucucaaacuccuggccucaagcaa

SEQ ID NO: 89082 - RNA, 32 nt, Human
caggcuggucucaaacuccuggccucaaguga

SEQ ID NO: 89083 - RNA, 32 nt, Human
caggcuggucucaaacuccuggccucagguga

SEQ ID NO: 89084 - RNA, 32 nt, Human
caggcuggucucaaacuccuggccugaaguga

SEQ ID NO: 89085 - RNA, 32 nt, Human
caggcuggucucaaacuccuggcuucaagcaa

SEQ ID NO: 89086 - RNA, 32 nt, Human
caggcuggucucaaacuccuggcuucaaguga

SEQ ID NO: 89087 - RNA, 32 nt, Human
caggcuggucucaaacuccugggcucaagcaa

SEQ ID NO: 89088 - RNA, 32 nt, Human
caggcuggucucaaacuccugggcucaagcga

SEQ ID NO: 89089 - RNA, 32 nt, Human
caggcuggucucaaacuccugggcucaaguga

SEQ ID NO: 89090 - RNA, 32 nt, Human
caggcuggucucaaacuccugggcucaggcga

SEQ ID NO: 89091 - RNA, 32 nt, Human
caggcuggucucaaacuccuggguucaagccu

SEQ ID NO: 89092 - RNA, 32 nt, Human
caggcuggucucaaacuccuggucacaaguaa

SEQ ID NO: 89093 - RNA, 32 nt, Human
caggcuggucucaaacuccugguuucaaguga

SEQ ID NO: 89094 - RNA, 32 nt, Human
caggcuggucucaaacucgugugcccaagcaa

SEQ ID NO: 89095 - RNA, 32 nt, Human
caggcuggucucaaacucuaacgucaagugau

SEQ ID NO: 89096 - RNA, 32 nt, Human
caggcuggucucaaacucucggccucagccuc

SEQ ID NO: 89097 - RNA, 32 nt, Human
caggcuggucucaaacucucgggcucaagcag

SEQ ID NO: 89098 - RNA, 32 nt, Human
caggcuggucucaaacucuugaccucagguga

SEQ ID NO: 89099 - RNA, 32 nt, Human
caggcuggucucaaacucuugaccugaaguca

SEQ ID NO: 89100 - RNA, 32 nt, Human
caggcuggucucaaacucuugacuucaaguga

SEQ ID NO: 89101 - RNA, 32 nt, Human
caggcuggucucaaacucuugacuucagauga

SEQ ID NO: 89102 - RNA, 32 nt, Human
caggcuggucucaaacucuugacuucagguaa

SEQ ID NO: 89103 - RNA, 32 nt, Human
caggcuggucucaaacucuugagcucaagccc

SEQ ID NO: 89104 - RNA, 32 nt, Human
caggcuggucucaaacucuugagcuuaagugu

SEQ ID NO: 89105 - RNA, 32 nt, Human
caggcuggucucaaacugcuaacaucaaguga

SEQ ID NO: 89106 - RNA, 32 nt, Human
caggcuggucucaaacugcugaccucaaguga

SEQ ID NO: 89107 - RNA, 32 nt, Human
caggcuggucucaaacugcugacuucagguga

SEQ ID NO: 89108 - RNA, 32 nt, Human
caggcuggucucaaacuucucacuucagguga

SEQ ID NO: 89109 - RNA, 32 nt, Human
caggcuggucucaaacuucugaccucaaauga

SEQ ID NO: 89110 - RNA, 32 nt, Human
caggcuggucucaaacuucugaccucaaguga

SEQ ID NO: 89111 - RNA, 32 nt, Human
caggcuggucucaaacuucugaccucagguga

SEQ ID NO: 89112 - RNA, 32 nt, Human
caggcuggucucaaacuucugaccucgugauc

SEQ ID NO: 89113 - RNA, 32 nt, Human
caggcuggucucaaacuucugaccuugugauc

SEQ ID NO: 89114 - RNA, 32 nt, Human
caggcuggucucaaacuucuggacucaaguga

SEQ ID NO: 89115 - RNA, 32 nt, Human
caggcuggucucaaacuucuggccuuaaguga

SEQ ID NO: 89116 - RNA, 32 nt, Human
caggcuggucucaaacuucuggcuucaugcaa

SEQ ID NO: 89117 - RNA, 32 nt, Human
caggcuggucucaaacuucugggcucaagcaa

SEQ ID NO: 89118 - RNA, 32 nt, Human
caggcuggucucaaacuugugagcucaagaaa

SEQ ID NO: 89119 - RNA, 32 nt, Human
caggcuggucucaaauuccugaccccagguga

SEQ ID NO: 89120 - RNA, 32 nt, Human
caggcuggucucaaauuccugaccucagguga

SEQ ID NO: 89121 - RNA, 32 nt, Human
caggcuggucucaaauuccugaccuuaaguga

SEQ ID NO: 89122 - RNA, 32 nt, Human
caggcuggucucaaauuccugggcccaaacaa

SEQ ID NO: 89123 - RNA, 32 nt, Human
caggcuggucucaaauucuugaucucaaguga

SEQ ID NO: 89124 - RNA, 32 nt, Human
caggcuggucucaaauuucugggcucagguga

SEQ ID NO: 89125 - RNA, 32 nt, Human
caggcuggucucaaauuuguggccucaagcaa

SEQ ID NO: 89126 - RNA, 32 nt, Human
caggcuggucucaaccuccugaccucaaguga

SEQ ID NO: 89127 - RNA, 32 nt, Human
caggcuggucucaaccuccugggcucaagcaa

SEQ ID NO: 89128 - RNA, 32 nt, Human
caggcuggucucaaccucuggaccucagguga

SEQ ID NO: 89129 - RNA, 32 nt, Human
caggcuggucucaacuccugaccucaggugau

SEQ ID NO: 89130 - RNA, 32 nt, Human
caggcuggucucaacuccugagcucaggcaau

SEQ ID NO: 89131 - RNA, 32 nt, Human
caggcuggucucaacuccugggcucaagcgau

SEQ ID NO: 89132 - RNA, 32 nt, Human
caggcuggucucaagcgccuggguucaaggga

SEQ ID NO: 89133 - RNA, 32 nt, Human
caggcuggucucaagcuccuuuccucaagcaa

SEQ ID NO: 89134 - RNA, 32 nt, Human
caggcuggucucacacuccugaccucagguga

SEQ ID NO: 89135 - RNA, 32 nt, Human
caggcuggucucacacuccuggccucaaguga

SEQ ID NO: 89136 - RNA, 32 nt, Human
caggcuggucucaggcuccugggcucagaugg

SEQ ID NO: 89137 - RNA, 32 nt, Human
caggcuggucuccaucaccugaucucagguga

SEQ ID NO: 89138 - RNA, 32 nt, Human
caggcuggucucgaacuccuaaccucagguga

SEQ ID NO: 89139 - RNA, 32 nt, Human
caggcuggucucgaacuccuaaccucggguga

SEQ ID NO: 89140 - RNA, 32 nt, Human
caggcuggucucgaacuccugaucucaugauc

SEQ ID NO: 89141 - RNA, 32 nt, Human
caggcuggucucgaacuccuguccucagguaa

SEQ ID NO: 89142 - RNA, 32 nt, Human
caggcuggucugagagagaacuccugaccucg

SEQ ID NO: 89143 - RNA, 32 nt, Human
caggcuggucuggaacuccuaaccucagguua

SEQ ID NO: 89144 - RNA, 32 nt, Human
caggcuggucuggaacuccugagcucaaguga

SEQ ID NO: 89145 - RNA, 32 nt, Human
caggcuggucuugaacuccuaaccucggguga

SEQ ID NO: 89146 - RNA, 32 nt, Human
caggcuggucuugacuccugaccucaugaccu

SEQ ID NO: 89147 - RNA, 32 nt, Human
caggcuggucuuuaauuccugggcucgagaga

SEQ ID NO: 89148 - RNA, 32 nt, Human
caggcugguggaguuccgaugacaacuuggac

SEQ ID NO: 89149 - RNA, 23 nt, Human
caggcugguguucugucugggcu

SEQ ID NO: 89150 - RNA, 32 nt, Human
caggcugguuggacaguggccuuaucauggga

SEQ ID NO: 89151 - RNA, 32 nt, Human
caggcugguuucaaccuccuggccucaaguga

SEQ ID NO: 89152 - RNA, 32 nt, Human
caggcugguuucgaacuccuaaccuccaguga

SEQ ID NO: 89153 - RNA, 32 nt, Human
caggcuguaggggaggagagccuggccggggg

SEQ ID NO: 89154 - RNA, 32 nt, Human
caggcuguccacccucuucuaucucuccuucc

SEQ ID NO: 89155 - RNA, 32 nt, Human
caggcuguccagaucaauuggcaccauccaag

SEQ ID NO: 89156 - RNA, 32 nt, Human
caggcugucucaaacuccuggccucaaguggu

SEQ ID NO: 89157 - RNA, 32 nt, Human
caggcugucucgaacuccuaacaucaggcgau

SEQ ID NO: 89158 - RNA, 21 nt, Human
caggcugugacucuucucuca

SEQ ID NO: 89159 - RNA, 32 nt, Human
caggcugugagcuccuugggggcaggcccuca

SEQ ID NO: 89160 - RNA, 32 nt, Human
caggcugugccacccgucccuccgacagcucc

SEQ ID NO: 89161 - RNA, 32 nt, Human
caggcuguggagaggaggcgggcggggccggu

SEQ ID NO: 89162 - RNA, 32 nt, Human
caggcuguggccuucucuccugaccagcagca

SEQ ID NO: 89163 - RNA, 32 nt, Human
caggcugugggaggcagcggagcaggcgauga

SEQ ID NO: 89164 - RNA, 32 nt, Human
caggcugugggcaccaggcagagugggagccu

SEQ ID NO: 89165 - RNA, 19 nt, Human
caggcuguggugggccagg

SEQ ID NO: 89166 - RNA, 32 nt, Human
caggcugugguugugagucugagcuugugagc

SEQ ID NO: 89167 - RNA, 32 nt, Human
caggcuguguagcacuucccacccucaggcau

SEQ ID NO: 89168 - RNA, 21 nt, Human
caggcugugugaccuugggaa

SEQ ID NO: 89169 - RNA, 32 nt, Human
caggcuguucucaaacuccuaagcucaaguga

SEQ ID NO: 89170 - RNA, 32 nt, Human
caggcuguucucaaacuccuggccucaggcga

SEQ ID NO: 89171 - RNA, 32 nt, Human
caggcuguucugagguccccguggggugagcc

SEQ ID NO: 89172 - RNA, 32 nt, Human
caggcuguucugcacugaaaagguucuucauc

SEQ ID NO: 89173 - RNA, 19 nt, Human
caggcuguucuguuggaag

SEQ ID NO: 89174 - RNA, 32 nt, Human
caggcuguuggcccaacuccucuuuucugugu

SEQ ID NO: 89175 - RNA, 32 nt, Human
caggcuguuguagaagcuccugggacaagccg

SEQ ID NO: 89176 - RNA, 32 nt, Human
caggcuguuuagcauggagaugacucucagaa

SEQ ID NO: 89177 - RNA, 22 nt, Human
caggcuguuucagccaggaagg

SEQ ID NO: 89178 - RNA, 32 nt, Human
caggcuguuuuauucccgccuccugaggccuu

SEQ ID NO: 89179 - RNA, 24 nt, Human
caggcuuaaacgauucucccaccu

SEQ ID NO: 89180 - RNA, 32 nt, Human
caggcuuaaacgauucucccaccucagccucu

SEQ ID NO: 89181 - RNA, 32 nt, Human
caggcuuaaaguacauuuuguuugauuugcag

SEQ ID NO: 89182 - RNA, 32 nt, Human
caggcuuaaccagcagccuucucaggggccug

SEQ ID NO: 89183 - RNA, 32 nt, Human
caggcuuacuacagccuccaccuucagguuca

SEQ ID NO: 89184 - RNA, 32 nt, Human
caggcuuaggcucucuuucggccucccacucg

SEQ ID NO: 89185 - RNA, 21 nt, Human
caggcuucaacuuaacauuua

SEQ ID NO: 89186 - RNA, 32 nt, Human
caggcuucacucuucgaaccuggaccacaguc

SEQ ID NO: 89187 - RNA, 32 nt, Human
caggcuucaggacacaugcacacgcauguaca

SEQ ID NO: 89188 - RNA, 32 nt, Human
caggcuucaguacaaacugguaacaccaaugu

SEQ ID NO: 89189 - RNA, 32 nt, Human
caggcuucaguuauauaauguaagcacaacua

SEQ ID NO: 89190 - RNA, 32 nt, Human
caggcuucauuucaaacaccguggcaccuccg

SEQ ID NO: 89191 - RNA, 23 nt, Human
caggcuuccaacuuuugcugccu

SEQ ID NO: 89192 - RNA, 26 nt, Human
caggcuuccacugcauccuggccagg

SEQ ID NO: 89193 - RNA, 32 nt, Human
caggcuuccagccuguuucagagaccacuagc

SEQ ID NO: 89194 - RNA, 32 nt, Human
caggcuuccccacaugguggucucaggauaac

SEQ ID NO: 89195 - RNA, 23 nt, Human
caggcuucccccacuuccccuca

SEQ ID NO: 89196 - RNA, 32 nt, Human
caggcuucccuccuaucuucugguuguuccuu

SEQ ID NO: 89197 - RNA, 32 nt, Human
caggcuuccuucuuccuuucccuuugguuaau

SEQ ID NO: 89198 - RNA, 23 nt, Human
caggcuucgccauguuggccagg

SEQ ID NO: 89199 - RNA, 32 nt, Human
caggcuucucagacuauaaguugcuaugaucu

SEQ ID NO: 89200 - RNA, 23 nt, Human
caggcuucuccuccucccgagga

SEQ ID NO: 89201 - RNA, 21 nt, Human
caggcuucucucccugccaca

SEQ ID NO: 89202 - RNA, 22 nt, Human
caggcuucugccacccccggcu

SEQ ID NO: 89203 - RNA, 22 nt, Human
caggcuucugcccucugcagcu

SEQ ID NO: 89204 - RNA, 32 nt, Human
caggcuucugcccucugcagcugggaccccuc

SEQ ID NO: 89205 - RNA, 32 nt, Human
caggcuucuggaugaagaaccuguuuucaaau

SEQ ID NO: 89206 - RNA, 32 nt, Human
caggcuucuguaaucccagcuacuugggaggc

SEQ ID NO: 89207 - RNA, 32 nt, Human
caggcuugaaagcaucaagauuccacucaauu

SEQ ID NO: 89208 - RNA, 32 nt, Human
caggcuugacccacugcgcccagccugcaucu

SEQ ID NO: 89209 - RNA, 32 nt, Human
caggcuugagccaccacgcccaguccaacauc

SEQ ID NO: 89210 - RNA, 32 nt, Human
caggcuugagccaccgcacccggccgagaaua

SEQ ID NO: 89211 - RNA, 32 nt, Human
caggcuugagccaccgcaccuggccuucccca

SEQ ID NO: 89212 - RNA, 32 nt, Human
caggcuugagccaccgcgcccggcuauauuuu

SEQ ID NO: 89213 - RNA, 32 nt, Human
caggcuugagccaccgugccaggccuguuuug

SEQ ID NO: 89214 - RNA, 32 nt, Human
caggcuugagccaccgugccuggccucaaacu

SEQ ID NO: 89215 - RNA, 32 nt, Human
caggcuugagccaccgugccuggccucaagcg

SEQ ID NO: 89216 - RNA, 32 nt, Human
caggcuugagccaccgugccuggucuguuuuu

SEQ ID NO: 89217 - RNA, 32 nt, Human
caggcuugagccacugcaccuagccucuauuu

SEQ ID NO: 89218 - RNA, 32 nt, Human
caggcuugagccacugcgccuggccuggucua

SEQ ID NO: 89219 - RNA, 32 nt, Human
caggcuugagccacugcuccuggccaacaucc

SEQ ID NO: 89220 - RNA, 32 nt, Human
caggcuugagccacugugccuggcuucaggcu

SEQ ID NO: 89221 - RNA, 32 nt, Human
caggcuugcaaucccagcuacuugggacgcug

SEQ ID NO: 89222 - RNA, 32 nt, Human
caggcuugcaccaccacacccggcuaauuuuu

SEQ ID NO: 89223 - RNA, 32 nt, Human
caggcuugccacgcucuccacccgauccuucc

SEQ ID NO: 89224 - RNA, 32 nt, Human
caggcuugcccaggaaaggggcugugcugucg

SEQ ID NO: 89225 - RNA, 32 nt, Human
caggcuugcccugcacaaaccacaacagaagu

SEQ ID NO: 89226 - RNA, 32 nt, Human
caggcuuggagacugacacugcaguaccuacg

SEQ ID NO: 89227 - RNA, 19 nt, Human
caggcuuggagugcagugg

SEQ ID NO: 89228 - RNA, 32 nt, Human
caggcuugggggaugggcucuucgccaugggg

SEQ ID NO: 89229 - RNA, 32 nt, Human
caggcuugggguccccgggagagcagagcuug

SEQ ID NO: 89230 - RNA, 32 nt, Human
caggcuugggucuggagguuugcuguggaagu

SEQ ID NO: 89231 - RNA, 32 nt, Human
caggcuugucucaaacuccuaaccucaacuga

SEQ ID NO: 89232 - RNA, 32 nt, Human
caggcuugucucaaacuccugaccucaaauca

SEQ ID NO: 89233 - RNA, 32 nt, Human
caggcuugucucaaacuccuggccuuaaguga

SEQ ID NO: 89234 - RNA, 32 nt, Human
caggcuugugugugugagaagggcggcagagg

SEQ ID NO: 89235 - RNA, 23 nt, Human
caggcuuucaagaagugccaguu

SEQ ID NO: 89236 - RNA, 32 nt, Human
caggcuuucacuucuguacugcacuguggcuu

SEQ ID NO: 89237 - RNA, 32 nt, Human
caggcuuuccagcagugagccuggggaaaucu

SEQ ID NO: 89238 - RNA, 19 nt, Human
caggcuuucccacuuccca

SEQ ID NO: 89239 - RNA, 32 nt, Human
caggcuuuccugggcaucaggggccugcaggg

SEQ ID NO: 89240 - RNA, 32 nt, Human
caggcuuuccuguagcccauguucgaccacau

SEQ ID NO: 89241 - RNA, 23 nt, Human
caggcuuuccugugguuggucag

SEQ ID NO: 89242 - RNA, 24 nt, Human
caggcuuucgcuguguuggccagg

SEQ ID NO: 89243 - RNA, 32 nt, Human
caggcuuucuguacccagagaggcggcagcag

SEQ ID NO: 89244 - RNA, 22 nt, Human
caggcuuucuguuccauccagg

SEQ ID NO: 89245 - RNA, 26 nt, Human
caggcuuucuucagucccuuggucag

SEQ ID NO: 89246 - RNA, 32 nt, Human
caggcuuucuuucaacagcagaugcuagcuca

SEQ ID NO: 89247 - RNA, 21 nt, Human
caggcuuucuuucccccauuc

SEQ ID NO: 89248 - RNA, 32 nt, Human
caggcuuugcaaacccagccucccagugcuca

SEQ ID NO: 89249 - RNA, 32 nt, Human
caggcuuugcauccuugggaacucagcaaacg

SEQ ID NO: 89250 - RNA, 20 nt, Human
caggcuuugcugaggcccug

SEQ ID NO: 89251 - RNA, 32 nt, Human
caggcuuuggagaaggucucucucccucggca

SEQ ID NO: 89252 - RNA, 32 nt, Human
caggcuuugguaucguaucgccucuguguccu

SEQ ID NO: 89253 - RNA, 24 nt, Human
caggcuuugucugcucccaauuca

SEQ ID NO: 89254 - RNA, 18 nt, Human
caggcuuuuguugcugaa

SEQ ID NO: 89255 - RNA, 32 nt, Human
cagggaaaagaaugccugggggucuguaauag

SEQ ID NO: 89256 - RNA, 32 nt, Human
cagggaaacggcgcuccagccaaggcacgggg

SEQ ID NO: 89257 - RNA, 31 nt, Human
cagggaaagagacccgguaauuggaggguga

SEQ ID NO: 89258 - RNA, 32 nt, Human
cagggaaagagaggagacugucccagagaccu

SEQ ID NO: 89259 - RNA, 32 nt, Human
cagggaaagccgagcggcccacggccaggucg

SEQ ID NO: 89260 - RNA, 32 nt, Human
cagggaaaggaaugccugggagugggggugca

SEQ ID NO: 89261 - RNA, 32 nt, Human
cagggaaauacagcuacagaggaaggagaggu

SEQ ID NO: 89262 - RNA, 32 nt, Human
cagggaaaugggccucuuccacugugaucucc

SEQ ID NO: 89263 - RNA, 20 nt, Human
cagggaaaugucuucagccc

SEQ ID NO: 89264 - RNA, 32 nt, Human
cagggaacaagaagacagaggcaggaggauga

SEQ ID NO: 89265 - RNA, 32 nt, Human
cagggaacacagguuguuccugcuuaacuggc

SEQ ID NO: 89266 - RNA, 32 nt, Human
cagggaacacccacuucucucucgcucucuuu

SEQ ID NO: 89267 - RNA, 32 nt, Human
cagggaacagcggggcaaacagugaguggggu

SEQ ID NO: 89268 - RNA, 32 nt, Human
cagggaaccaacacaaauaagcugacaacuug

SEQ ID NO: 89269 - RNA, 32 nt, Human
cagggaaccccaaacugguguugcuuuggggu

SEQ ID NO: 89270 - RNA, 32 nt, Human
cagggaaccguguuaagacccagcaccccuau

SEQ ID NO: 89271 - RNA, 19 nt, Human
cagggaacucgggcacagg

SEQ ID NO: 89272 - RNA, 32 nt, Human
cagggaagaaaacggcccugucuccauggcca

SEQ ID NO: 89273 - RNA, 32 nt, Human
cagggaagaacaguguauauucucuguagaug

SEQ ID NO: 89274 - RNA, 32 nt, Human
cagggaagaacccagagggagagcgggaauuc

SEQ ID NO: 89275 - RNA, 21 nt, Human
cagggaagaacuagucugaca

SEQ ID NO: 89276 - RNA, 23 nt, Human
cagggaagaauauggaaccuuca

SEQ ID NO: 89277 - RNA, 18 nt, Human
cagggaagaaucccaccc

SEQ ID NO: 89278 - RNA, 21 nt, Human
cagggaagaaucucacuugac

SEQ ID NO: 89279 - RNA, 32 nt, Human
cagggaagacaagaaggaaagauuuuguuguu

SEQ ID NO: 89280 - RNA, 32 nt, Human
cagggaagacucacagcagagcaggagggggc

SEQ ID NO: 89281 - RNA, 32 nt, Human
cagggaagagcaggcagagccuuggagugcug

SEQ ID NO: 89282 - RNA, 32 nt, Human
cagggaagaggcacuguagcagcugcugcugu

SEQ ID NO: 89283 - RNA, 32 nt, Human
cagggaagaggugggauuaaaguugaaacuug

SEQ ID NO: 89284 - RNA, 32 nt, Human
cagggaagagucaggugucagggcaggaauuc

SEQ ID NO: 89285 - RNA, 32 nt, Human
cagggaagaugggaggcgaggagaagccgauu

SEQ ID NO: 89286 - RNA, 32 nt, Human
cagggaagcacacccaaagaauuuucaaagga

SEQ ID NO: 89287 - RNA, 21 nt, Human
cagggaagcacugcccagccc

SEQ ID NO: 89288 - RNA, 32 nt, Human
cagggaagcagaggagcagcagggucagggug

SEQ ID NO: 89289 - RNA, 17 nt, Human
cagggaagcagcagccu

SEQ ID NO: 89290 - RNA, 21 nt, Human
cagggaagcaggggccaaccu

SEQ ID NO: 89291 - RNA, 31 nt, Human
cagggaagcaugucucucaugccaagaacca

SEQ ID NO: 89292 - RNA, 24 nt, Human
cagggaagccaggaaacucugaca

SEQ ID NO: 89293 - RNA, 20 nt, Human
cagggaagccccacaugucc

SEQ ID NO: 89294 - RNA, 17 nt, Human
cagggaagccccagccc

SEQ ID NO: 89295 - RNA, 20 nt, Human
cagggaagcccccucagccc

SEQ ID NO: 89296 - RNA, 19 nt, Human
cagggaagccccuccugcc

SEQ ID NO: 89297 - RNA, 21 nt, Human
cagggaagccgccaccggccc

SEQ ID NO: 89298 - RNA, 17 nt, Human
cagggaagccucccagc

SEQ ID NO: 89299 - RNA, 17 nt, Human
cagggaagccuccuccc

SEQ ID NO: 89300 - RNA, 18 nt, Human
cagggaagccugcauccc

SEQ ID NO: 89301 - RNA, 19 nt, Human
cagggaagccuggacaccc

SEQ ID NO: 89302 - RNA, 19 nt, Human
cagggaagccuguggaccc

SEQ ID NO: 89303 - RNA, 32 nt, Human
cagggaagcggacugagugcugggauccaagg

SEQ ID NO: 89304 - RNA, 18 nt, Human
cagggaagcgugcagccc

SEQ ID NO: 89305 - RNA, 32 nt, Human
cagggaagcuacagggcagacagcaugaggaa

SEQ ID NO: 89306 - RNA, 21 nt, Human
cagggaagcucaucaaagccc

SEQ ID NO: 89307 - RNA, 16 nt, Human
cagggaagcuccagcu

SEQ ID NO: 89308 - RNA, 21 nt, Human
cagggaagcuccuccucagcu

SEQ ID NO: 89309 - RNA, 21 nt, Human
cagggaagcuccugauuuccc

SEQ ID NO: 89310 - RNA, 21 nt, Human
cagggaagcucuuagaauccc

SEQ ID NO: 89311 - RNA, 19 nt, Human
cagggaagcucuuuaggcc

SEQ ID NO: 89312 - RNA, 32 nt, Human
cagggaagcuggccgaggguccuggcuccuga

SEQ ID NO: 89313 - RNA, 18 nt, Human
cagggaagcugggagucc

SEQ ID NO: 89314 - RNA, 18 nt, Human
cagggaagcuucaugccc

SEQ ID NO: 89315 - RNA, 20 nt, Human
cagggaagcuuccucggucu

SEQ ID NO: 89316 - RNA, 18 nt, Human
cagggaagcuuggggcuc

SEQ ID NO: 89317 - RNA, 21 nt, Human
cagggaaggaaggaaccugac

SEQ ID NO: 89318 - RNA, 32 nt, Human
cagggaaggagaaaacagagaacugacaccuu

SEQ ID NO: 89319 - RNA, 32 nt, Human
cagggaaggaggcagcuaggcuguagauggaa

SEQ ID NO: 89320 - RNA, 32 nt, Human
cagggaaggccugcucugccccacuggggugu

SEQ ID NO: 89321 - RNA, 32 nt, Human
cagggaagggaccagagggaucaaagaccagc

SEQ ID NO: 89322 - RNA, 21 nt, Human
cagggaagggacccuccaccc

SEQ ID NO: 89323 - RNA, 18 nt, Human
cagggaagggccaagccc

SEQ ID NO: 89324 - RNA, 22 nt, Human
cagggaagggcuuugccugaca

SEQ ID NO: 89325 - RNA, 32 nt, Human
cagggaagggcuuugccugacaacacccagcu

SEQ ID NO: 89326 - RNA, 32 nt, Human
cagggaaggggaagcaggaugcggagggccaa

SEQ ID NO: 89327 - RNA, 32 nt, Human
cagggaaggguccagacaggagauuuggauau

SEQ ID NO: 89328 - RNA, 32 nt, Human
cagggaagguagguuucucuggcugacugagu

SEQ ID NO: 89329 - RNA, 32 nt, Human
cagggaagguggaggaaggaagccaggaaggg

SEQ ID NO: 89330 - RNA, 32 nt, Human
cagggaagguuagcgccagcagggcugcacgc

SEQ ID NO: 89331 - RNA, 19 nt, Human
cagggaaguaguccaggcc

SEQ ID NO: 89332 - RNA, 32 nt, Human
cagggaagucauauccguggaccauuuguagg

SEQ ID NO: 89333 - RNA, 18 nt, Human
cagggaaguccccaggcc

SEQ ID NO: 89334 - RNA, 20 nt, Human
cagggaaguccuuccagccu

SEQ ID NO: 89335 - RNA, 32 nt, Human
cagggaagugaagugacuugcccagggucacu

SEQ ID NO: 89336 - RNA, 23 nt, Human
cagggaaguggagccuccagccc

SEQ ID NO: 89337 - RNA, 32 nt, Human
cagggaaguuuaaaaggggaaaauaauguguu

SEQ ID NO: 89338 - RNA, 32 nt, Human
cagggaauccccaagguuagccugcuuagggg

SEQ ID NO: 89339 - RNA, 18 nt, Human
cagggaaucccuucugca

SEQ ID NO: 89340 - RNA, 32 nt, Human
cagggaaucggaacccucagacccacagccgc

SEQ ID NO: 89341 - RNA, 32 nt, Human
cagggaaugaagcugguugaguguggggcagg

SEQ ID NO: 89342 - RNA, 32 nt, Human
cagggaauggcuuugccugacaacacccagcu

SEQ ID NO: 89343 - RNA, 32 nt, Human
cagggaaugucugaggcugggccugacccugc

SEQ ID NO: 89344 - RNA, 32 nt, Human
cagggaauuagucaaggggagcuguagugauc

SEQ ID NO: 89345 - RNA, 32 nt, Human
cagggaauuaugggagaagugggggcagccca

SEQ ID NO: 89346 - RNA, 32 nt, Human
cagggacacacacuugugcacaugugugcaca

SEQ ID NO: 89347 - RNA, 32 nt, Human
cagggacacaccauuacaccuggcuaauuguu

SEQ ID NO: 89348 - RNA, 32 nt, Human
cagggacacacgcagacacacgcacacucgcg

SEQ ID NO: 89349 - RNA, 32 nt, Human
cagggacacacgugagccacagggcuagaagc

SEQ ID NO: 89350 - RNA, 32 nt, Human
cagggacacaguacucggccacaccauggggc

SEQ ID NO: 89351 - RNA, 32 nt, Human
cagggacaccacucggcuccauggggagguuu

SEQ ID NO: 89352 - RNA, 32 nt, Human
cagggacaccacugcccaagcuggagaccacg

SEQ ID NO: 89353 - RNA, 32 nt, Human
cagggacacccacacagguggccaucacagcc

SEQ ID NO: 89354 - RNA, 32 nt, Human
cagggacaccccaucauuucacccucacauuc

SEQ ID NO: 89355 - RNA, 32 nt, Human
cagggacacuacuucaggaguccuccacagcg

SEQ ID NO: 89356 - RNA, 32 nt, Human
cagggacacuccgucagcccacccuggagcaa

SEQ ID NO: 89357 - RNA, 32 nt, Human
cagggacagagcugcgggcugagguuccuccg

SEQ ID NO: 89358 - RNA, 32 nt, Human
cagggacagcagagaagaaacuagccagcugu

SEQ ID NO: 89359 - RNA, 32 nt, Human
cagggacagcagagccaaaggcagagggggcc

SEQ ID NO: 89360 - RNA, 19 nt, Human
cagggacagccacauccug

SEQ ID NO: 89361 - RNA, 32 nt, Human
cagggacagcggcaucuucagccaauccagug

SEQ ID NO: 89362 - RNA, 32 nt, Human
cagggacaggcagacaugcagccagggcucca

SEQ ID NO: 89363 - RNA, 23 nt, Human
cagggacagggcaucauggggga

SEQ ID NO: 89364 - RNA, 32 nt, Human
cagggacagguguugcugugcacccagaaucu

SEQ ID NO: 89365 - RNA, 32 nt, Human
cagggacagugaucuggaaggaaggggcuuga

SEQ ID NO: 89366 - RNA, 32 nt, Human
cagggacaucaucucuuccaucuuuggguccu

SEQ ID NO: 89367 - RNA, 32 nt, Human
cagggaccaaaaacaaaagcagcucggagucu

SEQ ID NO: 89368 - RNA, 32 nt, Human
cagggaccacuucucccucuggcucccaucuu

SEQ ID NO: 89369 - RNA, 32 nt, Human
cagggaccagaggauccuaucuucucagcacc

SEQ ID NO: 89370 - RNA, 21 nt, Human
cagggaccagcuccccggggg

SEQ ID NO: 89371 - RNA, 32 nt, Human
cagggaccagcuuggggaaggaaaggagguuu

SEQ ID NO: 89372 - RNA, 32 nt, Human
cagggaccaguccaccaccaucuccuccacgu

SEQ ID NO: 89373 - RNA, 25 nt, Human
cagggacccaaucuggucacaggga

SEQ ID NO: 89374 - RNA, 28 nt, Human
cagggacccacugcugccucuuccagga

SEQ ID NO: 89375 - RNA, 32 nt, Human
cagggacccacugcugccucuuccaggagccc

SEQ ID NO: 89376 - RNA, 18 nt, Human
cagggacccagcaugcca

SEQ ID NO: 89377 - RNA, 32 nt, Human
cagggacccaggcaggaugauggcgcagcucu

SEQ ID NO: 89378 - RNA, 18 nt, Human
cagggacccaggcccaca

SEQ ID NO: 89379 - RNA, 24 nt, Human
cagggaccccaagguguccaggga

SEQ ID NO: 89380 - RNA, 32 nt, Human
cagggacccccaccccucccagccucacugcg

SEQ ID NO: 89381 - RNA, 32 nt, Human
cagggacccccaggaccaggaugugucucagc

SEQ ID NO: 89382 - RNA, 21 nt, Human
cagggaccccccacccagggg

SEQ ID NO: 89383 - RNA, 32 nt, Human
cagggaccccugccuuccccaggccaucugcu

SEQ ID NO: 89384 - RNA, 32 nt, Human
cagggacccgaggccaccccagccuggugugg

SEQ ID NO: 89385 - RNA, 21 nt, Human
cagggacccgcacccaguggg

SEQ ID NO: 89386 - RNA, 32 nt, Human
cagggacccgcccagcucuggccggcaaccgc

SEQ ID NO: 89387 - RNA, 32 nt, Human
cagggacccuccagaaacacaguguuucaaga

SEQ ID NO: 89388 - RNA, 32 nt, Human
cagggacccuccuacacuacagaggggccagg

SEQ ID NO: 89389 - RNA, 32 nt, Human
cagggacccugcacucgacccugggggcuccu

SEQ ID NO: 89390 - RNA, 20 nt, Human
cagggacccugucccagcga

SEQ ID NO: 89391 - RNA, 21 nt, Human
cagggaccgacagacuugaca

SEQ ID NO: 89392 - RNA, 32 nt, Human
cagggaccggauauuucuuauuucucauuugg

SEQ ID NO: 89393 - RNA, 32 nt, Human
cagggaccuaaaggggaaagaguccuggaucc

SEQ ID NO: 89394 - RNA, 23 nt, Human
cagggaccuaccccucccaggga

SEQ ID NO: 89395 - RNA, 32 nt, Human
cagggaccucaaggagcuaugaacauagaaac

SEQ ID NO: 89396 - RNA, 32 nt, Human
cagggaccucuucucccagaggauccuggagc

SEQ ID NO: 89397 - RNA, 32 nt, Human
cagggaccugucucccuuuacuucuuaccucc

SEQ ID NO: 89398 - RNA, 32 nt, Human
cagggaccuuucucuccucccaugcugaguuu

SEQ ID NO: 89399 - RNA, 22 nt, Human
cagggaccuuuuuggucaugga

SEQ ID NO: 89400 - RNA, 32 nt, Human
cagggacgacacagcagguggccggccaggga

SEQ ID NO: 89401 - RNA, 22 nt, Human
cagggacgacacucuccaggga

SEQ ID NO: 89402 - RNA, 32 nt, Human
cagggacgccaaagagagguugcagucagaac

SEQ ID NO: 89403 - RNA, 32 nt, Human
cagggacgccuccaccuuucagccugcccucg

SEQ ID NO: 89404 - RNA, 32 nt, Human
cagggacggagaggcaggugagagggaggugg

SEQ ID NO: 89405 - RNA, 32 nt, Human
cagggacggagggggagaaugggaggagacaa

SEQ ID NO: 89406 - RNA, 32 nt, Human
cagggacuacugcacccgcuucugccuuguuu

SEQ ID NO: 89407 - RNA, 21 nt, Human
cagggacuccgagccaaggga

SEQ ID NO: 89408 - RNA, 32 nt, Human
cagggacuccuggggauccugcuugcuguuug

SEQ ID NO: 89409 - RNA, 19 nt, Human
cagggacugacuccagccc

SEQ ID NO: 89410 - RNA, 32 nt, Human
cagggacugcagcugagcgcaacugccccauc

SEQ ID NO: 89411 - RNA, 32 nt, Human
cagggacugcagcugcaccagcaggugccauc

SEQ ID NO: 89412 - RNA, 32 nt, Human
cagggacugcagggaagagggaagcacgcaca

SEQ ID NO: 89413 - RNA, 32 nt, Human
cagggacugcccaggucuuuagggaaggggac

SEQ ID NO: 89414 - RNA, 32 nt, Human
cagggacugccuccucccggaauuccuaagau

SEQ ID NO: 89415 - RNA, 32 nt, Human
cagggacuggcccccaacucaccccgugcugg

SEQ ID NO: 89416 - RNA, 32 nt, Human
cagggacuggucacagggagggcucagaggag

SEQ ID NO: 89417 - RNA, 32 nt, Human
cagggacuuagaaacuugccugagauggugga

SEQ ID NO: 89418 - RNA, 32 nt, Human
cagggacuuccucgggcucccuaaggaccugc

SEQ ID NO: 89419 - RNA, 32 nt, Human
cagggacuugggggccccuggagcucaggggu

SEQ ID NO: 89420 - RNA, 32 nt, Human
cagggacuuuggagguggggcucugcagcugu

SEQ ID NO: 89421 - RNA, 32 nt, Human
cagggagaaaaacugagguacacagagguacc

SEQ ID NO: 89422 - RNA, 32 nt, Human
cagggagaagaaagauuccuccaccccaccac

SEQ ID NO: 89423 - RNA, 32 nt, Human
cagggagaagcaaggaggaugggcuuuggacu

SEQ ID NO: 89424 - RNA, 32 nt, Human
cagggagaagcacaaucaggaacagugagugc

SEQ ID NO: 89425 - RNA, 32 nt, Human
cagggagaagcagcaccacucucagcucuuuu

SEQ ID NO: 89426 - RNA, 32 nt, Human
cagggagaagggggugcaggaggcagagggug

SEQ ID NO: 89427 - RNA, 32 nt, Human
cagggagaaugagaggccaccuuacuggcagg

SEQ ID NO: 89428 - RNA, 32 nt, Human
cagggagacagacagagguugcagugagccga

SEQ ID NO: 89429 - RNA, 32 nt, Human
cagggagacaggccuccagauaacugcgggcg

SEQ ID NO: 89430 - RNA, 32 nt, Human
cagggagacccauuuccucucuggccucuuca

SEQ ID NO: 89431 - RNA, 32 nt, Human
cagggagaccucccucccgaucuucugugaau

SEQ ID NO: 89432 - RNA, 32 nt, Human
cagggagacgcacccucacaccgcccaugcau

SEQ ID NO: 89433 - RNA, 19 nt, Human
cagggagacggugggccgg

SEQ ID NO: 89434 - RNA, 32 nt, Human
cagggagacugcuuuccagacaccuccggccc

SEQ ID NO: 89435 - RNA, 32 nt, Human
cagggagagaagcagaaaggcacuucgccacu

SEQ ID NO: 89436 - RNA, 32 nt, Human
cagggagagagaacuggccaggguauaaaaag

SEQ ID NO: 89437 - RNA, 32 nt, Human
cagggagagcacagucuggcugugcugccaaa

SEQ ID NO: 89438 - RNA, 32 nt, Human
cagggagagcccugcauuuccucuacgcccag

SEQ ID NO: 89439 - RNA, 32 nt, Human
cagggagagccugaacuuuaugaggggagagg

SEQ ID NO: 89440 - RNA, 32 nt, Human
cagggagagccuucccaugacccccaugaaga

SEQ ID NO: 89441 - RNA, 32 nt, Human
cagggagagggggugggguggggugagagugu

SEQ ID NO: 89442 - RNA, 32 nt, Human
cagggagaguguggggacaggacagccugucu

SEQ ID NO: 89443 - RNA, 32 nt, Human
cagggagaugccugaccaacagguguguuggc

SEQ ID NO: 89444 - RNA, 32 nt, Human
cagggagauggaaaagaagagcccugcuuccc

SEQ ID NO: 89445 - RNA, 32 nt, Human
cagggagauggacccagagcugagagggagac

SEQ ID NO: 89446 - RNA, 32 nt, Human
cagggagcaccugucuggauuguuuuuaaacc

SEQ ID NO: 89447 - RNA, 32 nt, Human
cagggagcacugcugcuccaugcuccauucuc

SEQ ID NO: 89448 - RNA, 32 nt, Human
cagggagcagacccucugccucaugggguagg

SEQ ID NO: 89449 - RNA, 32 nt, Human
cagggagcagagggcuucucguucaugcaccc

SEQ ID NO: 89450 - RNA, 32 nt, Human
cagggagcagcagcaccuccagacuggaaaaa

SEQ ID NO: 89451 - RNA, 32 nt, Human
cagggagcaggcagagcugcagucagagacau

SEQ ID NO: 89452 - RNA, 32 nt, Human
cagggagcagggcaggggcugaaaggggcacu

SEQ ID NO: 89453 - RNA, 32 nt, Human
cagggagccaagaaugcaccacugcaguccag

SEQ ID NO: 89454 - RNA, 32 nt, Human
cagggagccacugcauccagcacauggggugc

SEQ ID NO: 89455 - RNA, 32 nt, Human
cagggagccagcuccuuccacccgacuguacu

SEQ ID NO: 89456 - RNA, 32 nt, Human
cagggagccaggacacagaggggcagagcaag

SEQ ID NO: 89457 - RNA, 21 nt, Human
cagggagcccaaacacccagc

SEQ ID NO: 89458 - RNA, 17 nt, Human
cagggagcccccagccc

SEQ ID NO: 89459 - RNA, 18 nt, Human
cagggagcccuccaggaa

SEQ ID NO: 89460 - RNA, 19 nt, Human
cagggagcccugacuccca

SEQ ID NO: 89461 - RNA, 22 nt, Human
cagggagccucuuccucaaccc

SEQ ID NO: 89462 - RNA, 32 nt, Human
cagggagccuggaauggcuuagauggucccuu

SEQ ID NO: 89463 - RNA, 32 nt, Human
cagggagcggaagaagucucgauccaggagua

SEQ ID NO: 89464 - RNA, 32 nt, Human
cagggagcggagauuccucauaggugagucca

SEQ ID NO: 89465 - RNA, 32 nt, Human
cagggagcgugggugaagcccuggagaaggga

SEQ ID NO: 89466 - RNA, 32 nt, Human
cagggagcuacugagaaaucaccugaagacaa

SEQ ID NO: 89467 - RNA, 32 nt, Human
cagggagcuagcaggacacuaggaccagucug

SEQ ID NO: 89468 - RNA, 32 nt, Human
cagggagcucacagcaacacccccuaccacca

SEQ ID NO: 89469 - RNA, 32 nt, Human
cagggagcucauucccuccacuggaugggcaa

SEQ ID NO: 89470 - RNA, 32 nt, Human
cagggagcuccaccuucucuggucuucagucc

SEQ ID NO: 89471 - RNA, 32 nt, Human
cagggagcuccaggagaccucaggacggcccc

SEQ ID NO: 89472 - RNA, 32 nt, Human
cagggagcugcccggcuggccuaggcaggcag

SEQ ID NO: 89473 - RNA, 32 nt, Human
cagggagcugccgagggacacgagccucagug

SEQ ID NO: 89474 - RNA, 32 nt, Human
cagggagcugcuggaugagaaagggccugaag

SEQ ID NO: 89475 - RNA, 32 nt, Human
cagggagcuggcacaguaugugaaaacaguaa

SEQ ID NO: 89476 - RNA, 32 nt, Human
cagggagcuggcuggucuguggugcaugugug

SEQ ID NO: 89477 - RNA, 32 nt, Human
cagggagcugguuccccucugcgacucgcccc

SEQ ID NO: 89478 - RNA, 32 nt, Human
cagggagcuguggucagugggggucagccagg

SEQ ID NO: 89479 - RNA, 32 nt, Human
cagggagcuucucagagaagugagcagagacu

SEQ ID NO: 89480 - RNA, 32 nt, Human
cagggaggaagaggcagcaggagcuguuggcc

SEQ ID NO: 89481 - RNA, 32 nt, Human
cagggaggacacgugaccugcacaggaucaca

SEQ ID NO: 89482 - RNA, 32 nt, Human
cagggaggagaaacaaacucagagaugggccc

SEQ ID NO: 89483 - RNA, 31 nt, Human
cagggaggagcugccuguucacugggaucag

SEQ ID NO: 89484 - RNA, 32 nt, Human
cagggaggagcugccuguucacugggaucagc

SEQ ID NO: 89485 - RNA, 32 nt, Human
cagggaggaggaagaggaaggugagaaugagu

SEQ ID NO: 89486 - RNA, 32 nt, Human
cagggaggaggaagaggagaggaggaagcaaa

SEQ ID NO: 89487 - RNA, 21 nt, Human
cagggaggagucggccucccg

SEQ ID NO: 89488 - RNA, 19 nt, Human
cagggaggauccgcagccc

SEQ ID NO: 89489 - RNA, 23 nt, Human
cagggaggcccagguggaccugg

SEQ ID NO: 89490 - RNA, 32 nt, Human
cagggaggcccuggacuggagccccucaccuc

SEQ ID NO: 89491 - RNA, 20 nt, Human
cagggaggcccuucccaccc

SEQ ID NO: 89492 - RNA, 32 nt, Human
cagggaggccucucaugucucagccuugaacc

SEQ ID NO: 89493 - RNA, 32 nt, Human
cagggaggccugauccugugacagcuggcugc

SEQ ID NO: 89494 - RNA, 23 nt, Human
cagggaggcggagguugcaguga

SEQ ID NO: 89495 - RNA, 23 nt, Human
cagggaggcuccugggcuaaggg

SEQ ID NO: 89496 - RNA, 32 nt, Human
cagggaggcugagugucccaggccuguugcca

SEQ ID NO: 89497 - RNA, 32 nt, Human
cagggaggcugcagagcaucguggagaccacu

SEQ ID NO: 89498 - RNA, 32 nt, Human
cagggaggcugcagagucagagucgcgggcug

SEQ ID NO: 89499 - RNA, 32 nt, Human
cagggagggaaagaugauggccaggggaaaga

SEQ ID NO: 89500 - RNA, 32 nt, Human
cagggagggaaaggaggagggagagagaugga

SEQ ID NO: 89501 - RNA, 32 nt, Human
cagggagggaacgcuggcuggggacgaucaca

SEQ ID NO: 89502 - RNA, 32 nt, Human
cagggagggaauggccuugugagagacuccag

SEQ ID NO: 89503 - RNA, 32 nt, Human
cagggagggaggacgagggagggccagcucag

SEQ ID NO: 89504 - RNA, 32 nt, Human
cagggagggaggaucuccagaggucaggaguu

SEQ ID NO: 89505 - RNA, 19 nt, Human
cagggagggaguccagccc

SEQ ID NO: 89506 - RNA, 32 nt, Human
cagggagggcaggcugggugagggacaggagg

SEQ ID NO: 89507 - RNA, 32 nt, Human
cagggagggccagaugccucucaggagccuug

SEQ ID NO: 89508 - RNA, 32 nt, Human
cagggagggccugggccccaguuguauuuauu

SEQ ID NO: 89509 - RNA, 32 nt, Human
cagggagggccuggucugaucucauuuuagag

SEQ ID NO: 89510 - RNA, 32 nt, Human
cagggagggcucagaggagccugacucgagug

SEQ ID NO: 89511 - RNA, 20 nt, Human
cagggagggcugcccagccc

SEQ ID NO: 89512 - RNA, 32 nt, Human
cagggaggggaggauugugaggugagggguua

SEQ ID NO: 89513 - RNA, 32 nt, Human
cagggaggggcaggugugaaguugcugagggc

SEQ ID NO: 89514 - RNA, 32 nt, Human
cagggaggggccugggccuggccagaccagag

SEQ ID NO: 89515 - RNA, 32 nt, Human
cagggaggggcggcgggggcgcacugaacauu

SEQ ID NO: 89516 - RNA, 20 nt, Human
cagggaggguccuccagcuc

SEQ ID NO: 89517 - RNA, 32 nt, Human
cagggaggguucccagcagcaggaguuagggg

SEQ ID NO: 89518 - RNA, 32 nt, Human
cagggagguaucuaauuuggucagucacaaau

SEQ ID NO: 89519 - RNA, 32 nt, Human
cagggaggucuagaccccaagagcagagaggc

SEQ ID NO: 89520 - RNA, 32 nt, Human
cagggaggugcagaaggcugaaguggcaaagu

SEQ ID NO: 89521 - RNA, 32 nt, Human
cagggagguggcaggaaaggcuuggaacagcu

SEQ ID NO: 89522 - RNA, 32 nt, Human
cagggagguguacccguaccccagcccccugc

SEQ ID NO: 89523 - RNA, 32 nt, Human
cagggaguccagggugccuggaagagguggcc

SEQ ID NO: 89524 - RNA, 32 nt, Human
cagggagucccaggacccagggagaguguggg

SEQ ID NO: 89525 - RNA, 32 nt, Human
cagggagucgcccaggcuggagagcgguggcg

SEQ ID NO: 89526 - RNA, 32 nt, Human
cagggagugaagccuuuguccccaagcaacag

SEQ ID NO: 89527 - RNA, 32 nt, Human
cagggagugacacucaaggggaccugccccag

SEQ ID NO: 89528 - RNA, 32 nt, Human
cagggagugcagccuggacaauggcaggccuu

SEQ ID NO: 89529 - RNA, 32 nt, Human
cagggagugcuggggagaaugagggguuccca

SEQ ID NO: 89530 - RNA, 32 nt, Human
cagggagugggcccugaguccacacugucccu

SEQ ID NO: 89531 - RNA, 32 nt, Human
cagggaguucuaagacgccagcucuuugagau

SEQ ID NO: 89532 - RNA, 32 nt, Human
cagggaguuggcucucuugguggagaugacuu

SEQ ID NO: 89533 - RNA, 32 nt, Human
cagggaguuuggagaacugguuucugucuaau

SEQ ID NO: 89534 - RNA, 31 nt, Human
cagggauaaagagcuuccucacuggauggga

SEQ ID NO: 89535 - RNA, 31 nt, Human
cagggauaccaaaauccucagaugcucaagu

SEQ ID NO: 89536 - RNA, 32 nt, Human
cagggauaccugaggcaggaggugcagcgugu

SEQ ID NO: 89537 - RNA, 32 nt, Human
cagggauagagagggagccagacggacagcca

SEQ ID NO: 89538 - RNA, 32 nt, Human
cagggaucaagaggucugcugugugaccuucu

SEQ ID NO: 89539 - RNA, 32 nt, Human
cagggaucacagaaaugcggaugcaaaacaac

SEQ ID NO: 89540 - RNA, 32 nt, Human
cagggaucacugcaaccucugccuccuggguu

SEQ ID NO: 89541 - RNA, 32 nt, Human
cagggaucaggagccuccagcagggaaccuuc

SEQ ID NO: 89542 - RNA, 32 nt, Human
cagggaucagugucauuuagggaugugacuau

SEQ ID NO: 89543 - RNA, 32 nt, Human
cagggauccaacauaacucagacauagcccag

SEQ ID NO: 89544 - RNA, 32 nt, Human
cagggauccccggcuuugccccggggcugggg

SEQ ID NO: 89545 - RNA, 32 nt, Human
cagggauccuaggugaaggggguggguaugaa

SEQ ID NO: 89546 - RNA, 32 nt, Human
cagggauccuccugccucuccucugccccugu

SEQ ID NO: 89547 - RNA, 32 nt, Human
cagggaucuccaggaggagccagaagcuggga

SEQ ID NO: 89548 - RNA, 32 nt, Human
cagggaucucuucucuccccuucaccauuacu

SEQ ID NO: 89549 - RNA, 32 nt, Human
cagggaucugccuggccagcagugagccugag

SEQ ID NO: 89550 - RNA, 32 nt, Human
cagggaucuuuuucugccccugcuccagucga

SEQ ID NO: 89551 - RNA, 32 nt, Human
cagggaugagaaacauacucucccuggcgucc

SEQ ID NO: 89552 - RNA, 32 nt, Human
cagggaugagccaccaugccuggcuggguauu

SEQ ID NO: 89553 - RNA, 32 nt, Human
cagggaugagggagguccucagugagugcacc

SEQ ID NO: 89554 - RNA, 32 nt, Human
cagggaugccuugccuuuucaggauuugagac

SEQ ID NO: 89555 - RNA, 32 nt, Human
cagggaugcucggcccuggcucugugccaggc

SEQ ID NO: 89556 - RNA, 30 nt, Human
cagggaugcugcacuccaugagccggcugu

SEQ ID NO: 89557 - RNA, 32 nt, Human
cagggaugcugcugggaguccauggcacaggc

SEQ ID NO: 89558 - RNA, 32 nt, Human
cagggaugcuuuccagccugcagcaacagaac

SEQ ID NO: 89559 - RNA, 19 nt, Human
cagggauggcccccagccc

SEQ ID NO: 89560 - RNA, 32 nt, Human
cagggauggcugcuuccugauacacgugaaca

SEQ ID NO: 89561 - RNA, 20 nt, Human
cagggaugggccuuccagcc

SEQ ID NO: 89562 - RNA, 32 nt, Human
cagggaugggcuuguaccugacagcacccacc

SEQ ID NO: 89563 - RNA, 32 nt, Human
cagggauggggacugccaggggcaguuggcaa

SEQ ID NO: 89564 - RNA, 31 nt, Human
cagggauggggagccucaugggugaaagagg

SEQ ID NO: 89565 - RNA, 32 nt, Human
cagggaugguagcuauuuuucugccaugagac

SEQ ID NO: 89566 - RNA, 32 nt, Human
cagggaugguguuaucuuuguugcccagugua

SEQ ID NO: 89567 - RNA, 32 nt, Human
cagggauguaccuggugagcugcugacccgca

SEQ ID NO: 89568 - RNA, 18 nt, Human
cagggaugucagagccag

SEQ ID NO: 89569 - RNA, 32 nt, Human
cagggauguggacaggguaagggcagcaagca

SEQ ID NO: 89570 - RNA, 18 nt, Human
cagggauguggcuauaga

SEQ ID NO: 89571 - RNA, 32 nt, Human
cagggauucauuacuuggaaaaugacagguca

SEQ ID NO: 89572 - RNA, 32 nt, Human
cagggauucccaggaagcagaacucuccagaa

SEQ ID NO: 89573 - RNA, 21 nt, Human
cagggauugguuucaggaccc

SEQ ID NO: 89574 - RNA, 32 nt, Human
cagggauuugagaucagccuaggcaacauggc

SEQ ID NO: 89575 - RNA, 32 nt, Human
cagggauuuucucauuagcacaggguuccaag

SEQ ID NO: 89576 - RNA, 32 nt, Human
cagggcaacauggugaaaccccaucucuacua

SEQ ID NO: 89577 - RNA, 32 nt, Human
cagggcaacauggugagaccucaucucuacaa

SEQ ID NO: 89578 - RNA, 32 nt, Human
cagggcaagacguuugguuucauuugucacca

SEQ ID NO: 89579 - RNA, 32 nt, Human
cagggcacagaagcaucugcaggaagagcagc

SEQ ID NO: 89580 - RNA, 32 nt, Human
cagggcacagcagagcaggcuggagaagcgag

SEQ ID NO: 89581 - RNA, 32 nt, Human
cagggcacagcccugacacagguguggcuacu

SEQ ID NO: 89582 - RNA, 32 nt, Human
cagggcacaguggcucauaccuguaaucccag

SEQ ID NO: 89583 - RNA, 19 nt, Human
cagggcacauugacagaaa

SEQ ID NO: 89584 - RNA, 32 nt, Human
cagggcaccaggcccacccaacugaaggcaug

SEQ ID NO: 89585 - RNA, 32 nt, Human
cagggcacccacugguucccaggcuggaacca

SEQ ID NO: 89586 - RNA, 19 nt, Human
cagggcacccaugaugaaa

SEQ ID NO: 89587 - RNA, 32 nt, Human
cagggcaccccagcugcccugguacugagguu

SEQ ID NO: 89588 - RNA, 32 nt, Human
cagggcacccccuucagagcuagggacgaaca

SEQ ID NO: 89589 - RNA, 21 nt, Human
cagggcaccgagcgcgugaaa

SEQ ID NO: 89590 - RNA, 32 nt, Human
cagggcaccguccucggcccugggcgagggaa

SEQ ID NO: 89591 - RNA, 20 nt, Human
cagggcacucuuuaaugaag

SEQ ID NO: 89592 - RNA, 32 nt, Human
cagggcacugaagaaguauagucccaguuauu

SEQ ID NO: 89593 - RNA, 32 nt, Human
cagggcacugacaggggcagcucugucacugu

SEQ ID NO: 89594 - RNA, 22 nt, Human
cagggcacugaggguaggucug

SEQ ID NO: 89595 - RNA, 32 nt, Human
cagggcacugcacuggaacacuggguguuccu

SEQ ID NO: 89596 - RNA, 32 nt, Human
cagggcacugcucuccuccuugcaccggugaa

SEQ ID NO: 89597 - RNA, 20 nt, Human
cagggcacuggucacagaaa

SEQ ID NO: 89598 - RNA, 20 nt, Human
cagggcacuguacccagaaa

SEQ ID NO: 89599 - RNA, 32 nt, Human
cagggcacugugccugagcucugacagugugg

SEQ ID NO: 89600 - RNA, 21 nt, Human
cagggcacuucaacucagaaa

SEQ ID NO: 89601 - RNA, 32 nt, Human
cagggcacuucuauuuguuuuuguggaaagac

SEQ ID NO: 89602 - RNA, 32 nt, Human
cagggcacuuguauuccagccucgcugcauuu

SEQ ID NO: 89603 - RNA, 32 nt, Human
cagggcagacagugccuggcacugaggggugc

SEQ ID NO: 89604 - RNA, 32 nt, Human
cagggcagacggacugaggugggagcucuguu

SEQ ID NO: 89605 - RNA, 32 nt, Human
cagggcagagcugccuuuuaauuuuuauucuc

SEQ ID NO: 89606 - RNA, 23 nt, Human
cagggcagaggggccaggucugc

SEQ ID NO: 89607 - RNA, 32 nt, Human
cagggcagcaugaaggagagcccugcguucug

SEQ ID NO: 89608 - RNA, 32 nt, Human
cagggcagcaugcagccagcugcucugcagcc

SEQ ID NO: 89609 - RNA, 32 nt, Human
cagggcagccuccaccuugcucuucuuucuga

SEQ ID NO: 89610 - RNA, 32 nt, Human
cagggcagccuccuccaaaucccuccuggagg

SEQ ID NO: 89611 - RNA, 32 nt, Human
cagggcagccuccucgacuccugaagaaaagg

SEQ ID NO: 89612 - RNA, 32 nt, Human
cagggcagccuccuggccaguuucucugcuca

SEQ ID NO: 89613 - RNA, 32 nt, Human
cagggcagccuggacaacaugaccugcauccu

SEQ ID NO: 89614 - RNA, 32 nt, Human
cagggcagccugguuacagagugagacuccgu

SEQ ID NO: 89615 - RNA, 32 nt, Human
cagggcagcgagcacagcuguucuccgacaug

SEQ ID NO: 89616 - RNA, 31 nt, Human
cagggcagcguucagcacacuccugggcaug

SEQ ID NO: 89617 - RNA, 32 nt, Human
cagggcagcucccuacagcuugggccaucugc

SEQ ID NO: 89618 - RNA, 30 nt, Human
cagggcagcugccaaucagaaaugcaaauu

SEQ ID NO: 89619 - RNA, 32 nt, Human
cagggcaggaaaccccucccaccuuuacacau

SEQ ID NO: 89620 - RNA, 32 nt, Human
cagggcaggaaggggaaacacagcugaugaac

SEQ ID NO: 89621 - RNA, 32 nt, Human
cagggcaggaaggggaggauccacuucugugc

SEQ ID NO: 89622 - RNA, 32 nt, Human
cagggcaggacacagauaagcccagggccgag

SEQ ID NO: 89623 - RNA, 32 nt, Human
cagggcaggacacagaugagcccagggccgag

SEQ ID NO: 89624 - RNA, 32 nt, Human
cagggcaggagagaauauaauugugaaggagu

SEQ ID NO: 89625 - RNA, 32 nt, Human
cagggcaggcagggguuggagugggcauagga

SEQ ID NO: 89626 - RNA, 32 nt, Human
cagggcagggaaagugcuuaguauuagcguga

SEQ ID NO: 89627 - RNA, 32 nt, Human
cagggcagggaggcuuccagccuguguucccc

SEQ ID NO: 89628 - RNA, 32 nt, Human
cagggcagggaugggacagaagaguuugggga

SEQ ID NO: 89629 - RNA, 32 nt, Human
cagggcagggccaccccacucuaccuccuuag

SEQ ID NO: 89630 - RNA, 32 nt, Human
cagggcaggggucugugucuccaccccaaggg

SEQ ID NO: 89631 - RNA, 32 nt, Human
cagggcaggugaggagcaggcuccacagacuc

SEQ ID NO: 89632 - RNA, 32 nt, Human
cagggcagguuugcuugaccucugccucaguu

SEQ ID NO: 89633 - RNA, 32 nt, Human
cagggcaguccuucuggcacugcuccagaauu

SEQ ID NO: 89634 - RNA, 19 nt, Human
cagggcagugaaaaugaaa

SEQ ID NO: 89635 - RNA, 32 nt, Human
cagggcaguuggaucacuugaggccaggaguu

SEQ ID NO: 89636 - RNA, 18 nt, Human
cagggcauccuccagcuc

SEQ ID NO: 89637 - RNA, 32 nt, Human
cagggcaugauggcucaugccuguaaugccag

SEQ ID NO: 89638 - RNA, 32 nt, Human
cagggcaugguggacaguaaugcugaguucug

SEQ ID NO: 89639 - RNA, 32 nt, Human
cagggcaugguggcgcaugccuguaaucccag

SEQ ID NO: 89640 - RNA, 32 nt, Human
cagggcaugugaguagagaaggacccagguca

SEQ ID NO: 89641 - RNA, 32 nt, Human
cagggcauguugcucccuucuguccucagcaa

SEQ ID NO: 89642 - RNA, 21 nt, Human
cagggcauuguccuccagccc

SEQ ID NO: 89643 - RNA, 24 nt, Human
cagggccaaaggaggcuuccugga

SEQ ID NO: 89644 - RNA, 32 nt, Human
cagggccaacagcagcccccgggccagguguc

SEQ ID NO: 89645 - RNA, 32 nt, Human
cagggccaaccuccucacugugcuucaagguu

SEQ ID NO: 89646 - RNA, 32 nt, Human
cagggccaacuccagggauuccuuccacgaca

SEQ ID NO: 89647 - RNA, 32 nt, Human
cagggccaaucaccagugaccagcuagacugu

SEQ ID NO: 89648 - RNA, 32 nt, Human
cagggccagaagcagagacggcggcuggggau

SEQ ID NO: 89649 - RNA, 32 nt, Human
cagggccagaaguagcuuugcacuuuucuaaa

SEQ ID NO: 89650 - RNA, 31 nt, Human
cagggccagagagccggagagaggagccccc

SEQ ID NO: 89651 - RNA, 32 nt, Human
cagggccagaggggacagaggcuggcggcaga

SEQ ID NO: 89652 - RNA, 32 nt, Human
cagggccagauggagccaaaggucagcucucu

SEQ ID NO: 89653 - RNA, 32 nt, Human
cagggccagcugagcagcacaggccaggaggc

SEQ ID NO: 89654 - RNA, 32 nt, Human
cagggccagcuugccauauuccaggcacacgu

SEQ ID NO: 89655 - RNA, 32 nt, Human
cagggccaggcagacuggggcagugacuggaa

SEQ ID NO: 89656 - RNA, 32 nt, Human
cagggccaggcagagagagaugcuggggacca

SEQ ID NO: 89657 - RNA, 17 nt, Human
cagggccaggccagaga

SEQ ID NO: 89658 - RNA, 32 nt, Human
cagggccaggcuaaggguggcucaguuccauc

SEQ ID NO: 89659 - RNA, 21 nt, Human
cagggccaggcuggcaggggc

SEQ ID NO: 89660 - RNA, 23 nt, Human
cagggccagggaaagcccuggga

SEQ ID NO: 89661 - RNA, 32 nt, Human
cagggccagggcagacaaaauaagagugagcu

SEQ ID NO: 89662 - RNA, 24 nt, Human
cagggccagggcugcagccugagg

SEQ ID NO: 89663 - RNA, 23 nt, Human
cagggccaggggcuucugugaga

SEQ ID NO: 89664 - RNA, 32 nt, Human
cagggccagggucccagccaggagagugcagc

SEQ ID NO: 89665 - RNA, 32 nt, Human
cagggccaggugagcuauggugcugcaccuac

SEQ ID NO: 89666 - RNA, 32 nt, Human
cagggccagguguggaggugugccccaaguga

SEQ ID NO: 89667 - RNA, 32 nt, Human
cagggccagugacuugcugggcuucguguuca

SEQ ID NO: 89668 - RNA, 32 nt, Human
cagggccauccagcuucccacccuccacugac

SEQ ID NO: 89669 - RNA, 32 nt, Human
cagggccaugggagauacaauuccaaguucuc

SEQ ID NO: 89670 - RNA, 19 nt, Human
cagggccauucuccuuccu

SEQ ID NO: 89671 - RNA, 32 nt, Human
cagggcccaagaaaucacuggugaugagaucg

SEQ ID NO: 89672 - RNA, 25 nt, Human
cagggcccaagcgauccuccugccu

SEQ ID NO: 89673 - RNA, 32 nt, Human
cagggcccacucugccaaccagucucaagcac

SEQ ID NO: 89674 - RNA, 32 nt, Human
cagggcccagagaguggguggagaagcucugc

SEQ ID NO: 89675 - RNA, 32 nt, Human
cagggcccaugucccacaaggcugcuuggccu

SEQ ID NO: 89676 - RNA, 32 nt, Human
cagggccccaccucucccagcugauggugagc

SEQ ID NO: 89677 - RNA, 32 nt, Human
cagggccccagccugauggggcugcccucagu

SEQ ID NO: 89678 - RNA, 19 nt, Human
cagggcccccuacuucuuc

SEQ ID NO: 89679 - RNA, 32 nt, Human
cagggcccccucucuguuggagcugaauacuc

SEQ ID NO: 89680 - RNA, 32 nt, Human
cagggccccgggcuuguuucuccucuuguuuu

SEQ ID NO: 89681 - RNA, 32 nt, Human
cagggccccgugggaagaccuaugcuuucaag

SEQ ID NO: 89682 - RNA, 32 nt, Human
cagggccccucgggcuuggcgggagcgacgac

SEQ ID NO: 89683 - RNA, 18 nt, Human
cagggccccugcccuccu

SEQ ID NO: 89684 - RNA, 32 nt, Human
cagggccccugccucugcuacggcagcccccg

SEQ ID NO: 89685 - RNA, 32 nt, Human
cagggcccggugcaguguccagccugguaucu

SEQ ID NO: 89686 - RNA, 32 nt, Human
cagggcccucaacuuccauccugcgggaggcc

SEQ ID NO: 89687 - RNA, 18 nt, Human
cagggcccucuucagccc

SEQ ID NO: 89688 - RNA, 19 nt, Human
cagggcccucuuccaacuc

SEQ ID NO: 89689 - RNA, 32 nt, Human
cagggcccuggagcugcuggggccaagccaag

SEQ ID NO: 89690 - RNA, 32 nt, Human
cagggcccuggccacguggagcaacacugacu

SEQ ID NO: 89691 - RNA, 32 nt, Human
cagggcccuguccucacuaucagucaguucag

SEQ ID NO: 89692 - RNA, 32 nt, Human
cagggcccuguuugggaccacucucucagucc

SEQ ID NO: 89693 - RNA, 22 nt, Human
cagggccgcagcugcccuggga

SEQ ID NO: 89694 - RNA, 32 nt, Human
cagggccgcuugcccagccuugaggaaggggg

SEQ ID NO: 89695 - RNA, 32 nt, Human
cagggccggagcugugggggaggccugcggag

SEQ ID NO: 89696 - RNA, 32 nt, Human
cagggccggcucccaaaaaccccaugugugua

SEQ ID NO: 89697 - RNA, 22 nt, Human
cagggccgggagcccuuuggga

SEQ ID NO: 89698 - RNA, 32 nt, Human
cagggccgggcagggggacagcagggaccggg

SEQ ID NO: 89699 - RNA, 32 nt, Human
cagggccgggccugggcucgguucccagguuu

SEQ ID NO: 89700 - RNA, 32 nt, Human
cagggccgggcggagccagagccagacgcgcc

SEQ ID NO: 89701 - RNA, 22 nt, Human
cagggccguggacccucugaga

SEQ ID NO: 89702 - RNA, 32 nt, Human
cagggccgugucauuuaagcauggccccaugg

SEQ ID NO: 89703 - RNA, 32 nt, Human
cagggccguuucuggcacugggaggcuggcag

SEQ ID NO: 89704 - RNA, 20 nt, Human
cagggccuaggccucuccuc

SEQ ID NO: 89705 - RNA, 22 nt, Human
cagggccucacaaggcagugua

SEQ ID NO: 89706 - RNA, 32 nt, Human
cagggccucaccucucugcccuucccugcccg

SEQ ID NO: 89707 - RNA, 18 nt, Human
cagggccucacucuguca

SEQ ID NO: 89708 - RNA, 32 nt, Human
cagggccucagggcacccuccccaccuagccc

SEQ ID NO: 89709 - RNA, 32 nt, Human
cagggccuccaggccugggucuggaguuaggu

SEQ ID NO: 89710 - RNA, 23 nt, Human
cagggccuccucccucccugcgu

SEQ ID NO: 89711 - RNA, 18 nt, Human
cagggccuccugcaacuc

SEQ ID NO: 89712 - RNA, 20 nt, Human
cagggccuccuuccagggca

SEQ ID NO: 89713 - RNA, 21 nt, Human
cagggccucgcccuccagccc

SEQ ID NO: 89714 - RNA, 19 nt, Human
cagggccucgcuuccccug

SEQ ID NO: 89715 - RNA, 19 nt, Human
cagggccucuaccauccuc

SEQ ID NO: 89716 - RNA, 32 nt, Human
cagggccucuagggcaguggggaggggguggc

SEQ ID NO: 89717 - RNA, 32 nt, Human
cagggccucucauguggcagccacauguggcg

SEQ ID NO: 89718 - RNA, 32 nt, Human
cagggccucuccaccccaaccccacagcccgc

SEQ ID NO: 89719 - RNA, 32 nt, Human
cagggccucugcuccucguggcugccaggggc

SEQ ID NO: 89720 - RNA, 22 nt, Human
cagggccucugcucuccuggga

SEQ ID NO: 89721 - RNA, 21 nt, Human
cagggccugaauuuucugcuc

SEQ ID NO: 89722 - RNA, 32 nt, Human
cagggccugacugaggcccacgcaggaaccga

SEQ ID NO: 89723 - RNA, 32 nt, Human
cagggccugagaugcugaccugccagugccga

SEQ ID NO: 89724 - RNA, 32 nt, Human
cagggccugagccuggccagccuacaaugggg

SEQ ID NO: 89725 - RNA, 32 nt, Human
cagggccugauugggcugggcuagugucuguc

SEQ ID NO: 89726 - RNA, 32 nt, Human
cagggccugcagcagugccccugccagccccg

SEQ ID NO: 89727 - RNA, 19 nt, Human
cagggccugccccaguggg

SEQ ID NO: 89728 - RNA, 22 nt, Human
cagggccugccccccugcaggu

SEQ ID NO: 89729 - RNA, 22 nt, Human
cagggccugcccuggauccugg

SEQ ID NO: 89730 - RNA, 21 nt, Human
cagggccugccuagcuugcgu

SEQ ID NO: 89731 - RNA, 19 nt, Human
cagggccugccuccucugg

SEQ ID NO: 89732 - RNA, 32 nt, Human
cagggccugccuggcaccucagguacugggcu

SEQ ID NO: 89733 - RNA, 32 nt, Human
cagggccugccuugcacguugcagccucucug

SEQ ID NO: 89734 - RNA, 32 nt, Human
cagggccugcuguguguccccugucauguccc

SEQ ID NO: 89735 - RNA, 32 nt, Human
cagggccugcuuccugaaucuccugggugugu

SEQ ID NO: 89736 - RNA, 32 nt, Human
cagggccuggacuccccaccccaggcuaccag

SEQ ID NO: 89737 - RNA, 32 nt, Human
cagggccuggacugcacucacagaggcaagug

SEQ ID NO: 89738 - RNA, 32 nt, Human
cagggccuggaguggagguucaggaccaaggg

SEQ ID NO: 89739 - RNA, 21 nt, Human
cagggccuggccucccagggu

SEQ ID NO: 89740 - RNA, 32 nt, Human
cagggccuggcugccuuggcucugaagugagu

SEQ ID NO: 89741 - RNA, 32 nt, Human
cagggccuggcugggccagcuucccucauggg

SEQ ID NO: 89742 - RNA, 32 nt, Human
cagggccugggccucauggcuuuugcuuuccc

SEQ ID NO: 89743 - RNA, 32 nt, Human
cagggccuggggaugcuggacgugggagaggg

SEQ ID NO: 89744 - RNA, 32 nt, Human
cagggccugggugaacucccuggaccuuuccu

SEQ ID NO: 89745 - RNA, 21 nt, Human
cagggccuggucuccccaggg

SEQ ID NO: 89746 - RNA, 32 nt, Human
cagggccuguaaucccagcauuuugggaggcc

SEQ ID NO: 89747 - RNA, 32 nt, Human
cagggccuguaggaaaacacagcaaacuagaa

SEQ ID NO: 89748 - RNA, 22 nt, Human
cagggccugucguuuccagggu

SEQ ID NO: 89749 - RNA, 24 nt, Human
cagggccugucucccuucuugggu

SEQ ID NO: 89750 - RNA, 21 nt, Human
cagggccugucucugacuagg

SEQ ID NO: 89751 - RNA, 21 nt, Human
cagggccugucuuuugccugg

SEQ ID NO: 89752 - RNA, 21 nt, Human
cagggccuguggcugccuggg

SEQ ID NO: 89753 - RNA, 32 nt, Human
cagggccugugguggagccagcagaaccacag

SEQ ID NO: 89754 - RNA, 18 nt, Human
cagggccuuaggacucuc

SEQ ID NO: 89755 - RNA, 22 nt, Human
cagggccuugaaaccucugggu

SEQ ID NO: 89756 - RNA, 32 nt, Human
cagggccuuuaggggcugcaggacggaauggc

SEQ ID NO: 89757 - RNA, 32 nt, Human
cagggccuuucguggcuggaaguggccaguuu

SEQ ID NO: 89758 - RNA, 32 nt, Human
cagggccuuuuccuccucugcgucuuccaucu

SEQ ID NO: 89759 - RNA, 32 nt, Human
cagggcgaacagcauccaucccugcuguuugc

SEQ ID NO: 89760 - RNA, 32 nt, Human
cagggcgagccgcggccccgcguggcgccucg

SEQ ID NO: 89761 - RNA, 32 nt, Human
cagggcgcagagccgggaggcaggccgcagaa

SEQ ID NO: 89762 - RNA, 22 nt, Human
cagggcgcagcucccccuggga

SEQ ID NO: 89763 - RNA, 32 nt, Human
cagggcgcaguggcucaccccuguaaucucag

SEQ ID NO: 89764 - RNA, 32 nt, Human
cagggcgcaguggcucacgccuguaaucccag

SEQ ID NO: 89765 - RNA, 32 nt, Human
cagggcgcccacccugcggcccugccaguggu

SEQ ID NO: 89766 - RNA, 19 nt, Human
cagggcgcccuuucagccc

SEQ ID NO: 89767 - RNA, 32 nt, Human
cagggcgccuggcugccaucuuuuccuccaga

SEQ ID NO: 89768 - RNA, 32 nt, Human
cagggcgcgguggcucacgccuguaaucccag

SEQ ID NO: 89769 - RNA, 32 nt, Human
cagggcggaaggggaagccaggaaggcaggag

SEQ ID NO: 89770 - RNA, 32 nt, Human
cagggcggcaggggugacagugggguccagga

SEQ ID NO: 89771 - RNA, 32 nt, Human
cagggcggccucuccccaaccagcccagcuuc

SEQ ID NO: 89772 - RNA, 32 nt, Human
cagggcggccucucccccaccccucagcccgg

SEQ ID NO: 89773 - RNA, 32 nt, Human
cagggcggcuguggagguguucgggaagcuga

SEQ ID NO: 89774 - RNA, 32 nt, Human
cagggcgggaggauugcuugggcucaagaguu

SEQ ID NO: 89775 - RNA, 32 nt, Human
cagggcgggaggcaggcuguguccucgguggg

SEQ ID NO: 89776 - RNA, 32 nt, Human
cagggcgggaggcgauggaggcugcccgcgcc

SEQ ID NO: 89777 - RNA, 32 nt, Human
cagggcgggaggcggcggcgcgugggggcggg

SEQ ID NO: 89778 - RNA, 32 nt, Human
cagggcgggccaguugggcaauggagcugcug

SEQ ID NO: 89779 - RNA, 32 nt, Human
cagggcggggcuccccaaaggagcaaagaaug

SEQ ID NO: 89780 - RNA, 18 nt, Human
cagggcguccuccagcuc

SEQ ID NO: 89781 - RNA, 19 nt, Human
cagggcguccuuggccuca

SEQ ID NO: 89782 - RNA, 32 nt, Human
cagggcgugaggaggaggaggaagggcaugag

SEQ ID NO: 89783 - RNA, 32 nt, Human
cagggcguggugagguaaggugagugccguag

SEQ ID NO: 89784 - RNA, 32 nt, Human
cagggcgugguggcucauaccuguaaucucag

SEQ ID NO: 89785 - RNA, 32 nt, Human
cagggcgugguggcucaugccuguaaucccag

SEQ ID NO: 89786 - RNA, 32 nt, Human
cagggcuaaugccaccaucuccccucaaaauu

SEQ ID NO: 89787 - RNA, 23 nt, Human
cagggcuacccucuguccagccc

SEQ ID NO: 89788 - RNA, 32 nt, Human
cagggcuacuaaagacuucaggauagaauucu

SEQ ID NO: 89789 - RNA, 32 nt, Human
cagggcuagagccgugagugucagccugggau

SEQ ID NO: 89790 - RNA, 32 nt, Human
cagggcuaggaggcaggggcugcaggcucagc

SEQ ID NO: 89791 - RNA, 25 nt, Human
cagggcuagggcuggaggggccagg

SEQ ID NO: 89792 - RNA, 32 nt, Human
cagggcucaaaugauccucccaucucggccuc

SEQ ID NO: 89793 - RNA, 32 nt, Human
cagggcucaagcaguccucccaccucagccuc

SEQ ID NO: 89794 - RNA, 24 nt, Human
cagggcucaaggauccuccugccu

SEQ ID NO: 89795 - RNA, 32 nt, Human
cagggcucaagggauccucccaccucagccuc

SEQ ID NO: 89796 - RNA, 23 nt, Human
cagggcucacaccuguaauccca

SEQ ID NO: 89797 - RNA, 22 nt, Human
cagggcucaccaggcacuggca

SEQ ID NO: 89798 - RNA, 32 nt, Human
cagggcucacugcagccucgaccuccugggcu

SEQ ID NO: 89799 - RNA, 32 nt, Human
cagggcucacugcagcuuugacuucccaggcu

SEQ ID NO: 89800 - RNA, 32 nt, Human
cagggcucagagggcuaggcacggagggaagg

SEQ ID NO: 89801 - RNA, 32 nt, Human
cagggcucagcaggcgcacguugguuucuugg

SEQ ID NO: 89802 - RNA, 32 nt, Human
cagggcucagcccagggcauccaggaacaggc

SEQ ID NO: 89803 - RNA, 32 nt, Human
cagggcucaggcucugagagcuucuugcugua

SEQ ID NO: 89804 - RNA, 32 nt, Human
cagggcucagggggcguuaggaagggaugguc

SEQ ID NO: 89805 - RNA, 32 nt, Human
cagggcucaggugauccucccaccucagccac

SEQ ID NO: 89806 - RNA, 32 nt, Human
cagggcucaguggcccaggaagugugcugggc

SEQ ID NO: 89807 - RNA, 32 nt, Human
cagggcuccagccgcaggcucggcgcagggcg

SEQ ID NO: 89808 - RNA, 32 nt, Human
cagggcuccaggagccucauccagccucagag

SEQ ID NO: 89809 - RNA, 32 nt, Human
cagggcuccaucuccgccucaggggcuucucc

SEQ ID NO: 89810 - RNA, 32 nt, Human
cagggcucccuccagccgagaccuuuugauuc

SEQ ID NO: 89811 - RNA, 19 nt, Human
cagggcucccucccuggug

SEQ ID NO: 89812 - RNA, 32 nt, Human
cagggcucccugggggcugguggaggggcccu

SEQ ID NO: 89813 - RNA, 32 nt, Human
cagggcuccucccuccuaccucaggccugauc

SEQ ID NO: 89814 - RNA, 32 nt, Human
cagggcuccuguagcucagggggcaggccuga

SEQ ID NO: 89815 - RNA, 32 nt, Human
cagggcucuacagggcagcagagcagagcaaa

SEQ ID NO: 89816 - RNA, 32 nt, Human
cagggcucuccauccaggauccagaagcauug

SEQ ID NO: 89817 - RNA, 32 nt, Human
cagggcucugcagcaccucaccugagaccucc

SEQ ID NO: 89818 - RNA, 32 nt, Human
cagggcucugccaugcccaucuugccuaccaa

SEQ ID NO: 89819 - RNA, 32 nt, Human
cagggcucugccccagaggccucucucuccgu

SEQ ID NO: 89820 - RNA, 32 nt, Human
cagggcucugcgcaccgcugggguucggggcc

SEQ ID NO: 89821 - RNA, 32 nt, Human
cagggcucugggcuaggaaggcagcggcgagg

SEQ ID NO: 89822 - RNA, 32 nt, Human
cagggcucuguauucugcaacagccuguuugg

SEQ ID NO: 89823 - RNA, 18 nt, Human
cagggcugaaaccauguc

SEQ ID NO: 89824 - RNA, 32 nt, Human
cagggcugacccaccagccucucacggaggcg

SEQ ID NO: 89825 - RNA, 19 nt, Human
cagggcugacucccucuca

SEQ ID NO: 89826 - RNA, 32 nt, Human
cagggcugacucccucucagguggaaggcagg

SEQ ID NO: 89827 - RNA, 32 nt, Human
cagggcugacucugcugccccaaccuuucaag

SEQ ID NO: 89828 - RNA, 32 nt, Human
cagggcugacugaacugucacugugagauauu

SEQ ID NO: 89829 - RNA, 22 nt, Human
cagggcugagaaagaaaguguc

SEQ ID NO: 89830 - RNA, 22 nt, Human
cagggcugagcauccuccugcc

SEQ ID NO: 89831 - RNA, 22 nt, Human
cagggcugaggagccuccggga

SEQ ID NO: 89832 - RNA, 32 nt, Human
cagggcugaggaugaggagaacccuggggacc

SEQ ID NO: 89833 - RNA, 22 nt, Human
cagggcugaggcaagucuggga

SEQ ID NO: 89834 - RNA, 32 nt, Human
cagggcugaggcaggagaauugcuugaacccg

SEQ ID NO: 89835 - RNA, 18 nt, Human
cagggcugagggcccugg

SEQ ID NO: 89836 - RNA, 19 nt, Human
cagggcugaggggaggcag

SEQ ID NO: 89837 - RNA, 22 nt, Human
cagggcugaggggaggcaggga

SEQ ID NO: 89838 - RNA, 32 nt, Human
cagggcugagucuauccaagaggcuuuguuua

SEQ ID NO: 89839 - RNA, 21 nt, Human
cagggcugagugcaccuggga

SEQ ID NO: 89840 - RNA, 32 nt, Human
cagggcugagugggcugggaucucguguccuc

SEQ ID NO: 89841 - RNA, 22 nt, Human
cagggcugauauucaccuggga

SEQ ID NO: 89842 - RNA, 32 nt, Human
cagggcugcaccugccaggaccuaauguucuu

SEQ ID NO: 89843 - RNA, 32 nt, Human
cagggcugcaccugccauccccggcucugcca

SEQ ID NO: 89844 - RNA, 32 nt, Human
cagggcugcaggcgggcggagguuccaggaga

SEQ ID NO: 89845 - RNA, 18 nt, Human
cagggcugccagagguuc

SEQ ID NO: 89846 - RNA, 22 nt, Human
cagggcugccaggaguucaguu

SEQ ID NO: 89847 - RNA, 32 nt, Human
cagggcugccaggccuggccccucucugggaa

SEQ ID NO: 89848 - RNA, 22 nt, Human
cagggcugccucccuccagccc

SEQ ID NO: 89849 - RNA, 32 nt, Human
cagggcugccuguagucccagcuacucagaag

SEQ ID NO: 89850 - RNA, 23 nt, Human
cagggcugcgcgcccaggucugc

SEQ ID NO: 89851 - RNA, 19 nt, Human
cagggcugcgguaggccag

SEQ ID NO: 89852 - RNA, 21 nt, Human
cagggcugcugaggggccagg

SEQ ID NO: 89853 - RNA, 32 nt, Human
cagggcugcuggaggccugcuccuggggcccg

SEQ ID NO: 89854 - RNA, 32 nt, Human
cagggcugcuuugcugugaugaugauugcauu

SEQ ID NO: 89855 - RNA, 23 nt, Human
cagggcuggaagcuggacugaga

SEQ ID NO: 89856 - RNA, 23 nt, Human
cagggcuggacugacccuaugga

SEQ ID NO: 89857 - RNA, 22 nt, Human
cagggcuggagacuuccucugg

SEQ ID NO: 89858 - RNA, 24 nt, Human
cagggcuggagaugcuucccaagg

SEQ ID NO: 89859 - RNA, 22 nt, Human
cagggcuggagcaccucugaga

SEQ ID NO: 89860 - RNA, 22 nt, Human
cagggcuggagcugggcuggga

SEQ ID NO: 89861 - RNA, 19 nt, Human
cagggcuggaggccuggga

SEQ ID NO: 89862 - RNA, 24 nt, Human
cagggcuggagggagaucuugaga

SEQ ID NO: 89863 - RNA, 32 nt, Human
cagggcuggagugcaguggcaugaucucagcu

SEQ ID NO: 89864 - RNA, 24 nt, Human
cagggcuggauccaccccugcgga

SEQ ID NO: 89865 - RNA, 23 nt, Human
cagggcuggcucuguccccuggg

SEQ ID NO: 89866 - RNA, 29 nt, Human
cagggcuggcugcagcaacucccugacac

SEQ ID NO: 89867 - RNA, 22 nt, Human
cagggcuggcugcugggcugcu

SEQ ID NO: 89868 - RNA, 20 nt, Human
cagggcugggacccccagga

SEQ ID NO: 89869 - RNA, 32 nt, Human
cagggcugggagacuaggaugucggacacgug

SEQ ID NO: 89870 - RNA, 24 nt, Human
cagggcugggccugccccccgggg

SEQ ID NO: 89871 - RNA, 22 nt, Human
cagggcuggggaggagcgggga

SEQ ID NO: 89872 - RNA, 21 nt, Human
cagggcugggggagagccggg

SEQ ID NO: 89873 - RNA, 32 nt, Human
cagggcugggugcagccagcuguccugcagcu

SEQ ID NO: 89874 - RNA, 23 nt, Human
cagggcuggugggcggggccagg

SEQ ID NO: 89875 - RNA, 32 nt, Human
cagggcugguuugguuaugagacgaucucgcu

SEQ ID NO: 89876 - RNA, 32 nt, Human
cagggcuguagcagagaggcuaguccaucuag

SEQ ID NO: 89877 - RNA, 32 nt, Human
cagggcugucccacagaaauagugugagccac

SEQ ID NO: 89878 - RNA, 32 nt, Human
cagggcugucucccccuccaucuggagcuccc

SEQ ID NO: 89879 - RNA, 32 nt, Human
cagggcugugacucuggcugagcccaggaaag

SEQ ID NO: 89880 - RNA, 32 nt, Human
cagggcuguggagacacgucucuccucucugu

SEQ ID NO: 89881 - RNA, 32 nt, Human
cagggcuguggagcagccucucuccuuggacc

SEQ ID NO: 89882 - RNA, 22 nt, Human
cagggcugugucuccccucaga

SEQ ID NO: 89883 - RNA, 32 nt, Human
cagggcuucagggcuggaauuccagugcugca

SEQ ID NO: 89884 - RNA, 32 nt, Human
cagggcuucaucccugugaaggcacagggccu

SEQ ID NO: 89885 - RNA, 32 nt, Human
cagggcuucccaagcucuuuccacagccacau

SEQ ID NO: 89886 - RNA, 32 nt, Human
cagggcuucccaaugcccuuuuccucccugcc

SEQ ID NO: 89887 - RNA, 21 nt, Human
cagggcuucccucuccagccc

SEQ ID NO: 89888 - RNA, 32 nt, Human
cagggcuucugagaugcaaagguuuggccuca

SEQ ID NO: 89889 - RNA, 32 nt, Human
cagggcuucugcugcaucugcagccaugucgg

SEQ ID NO: 89890 - RNA, 32 nt, Human
cagggcuucuggauccucgguuucugggcuac

SEQ ID NO: 89891 - RNA, 22 nt, Human
cagggcuucuucucgcagguca

SEQ ID NO: 89892 - RNA, 32 nt, Human
cagggcuuggauguaaggauuauaccaagagu

SEQ ID NO: 89893 - RNA, 32 nt, Human
cagggcuuggccuggcuccugagccagcgggg

SEQ ID NO: 89894 - RNA, 32 nt, Human
cagggcuugguggugguagcauuugggucuga

SEQ ID NO: 89895 - RNA, 20 nt, Human
cagggcuugucuccuccugg

SEQ ID NO: 89896 - RNA, 32 nt, Human
cagggcuuucucucccuccaccccuugcagcc

SEQ ID NO: 89897 - RNA, 32 nt, Human
cagggcuuuggauccaggucugggacgagccc

SEQ ID NO: 89898 - RNA, 19 nt, Human
cagggcuuuuccugagucc

SEQ ID NO: 89899 - RNA, 32 nt, Human
cagggcuuuugggcacugccuccuugggaagu

SEQ ID NO: 89900 - RNA, 23 nt, Human
caggggaaaacugguggaccugg

SEQ ID NO: 89901 - RNA, 32 nt, Human
caggggaaaacugguggaccuggacuuagcuc

SEQ ID NO: 89902 - RNA, 32 nt, Human
caggggaaagagagcccucaaaggccucuuuc

SEQ ID NO: 89903 - RNA, 32 nt, Human
caggggaaaguggucugcacaugcccuguuga

SEQ ID NO: 89904 - RNA, 32 nt, Human
caggggaacacaaaagcuaugucuauucccca

SEQ ID NO: 89905 - RNA, 32 nt, Human
caggggaacccccagcuaacuggucucucaga

SEQ ID NO: 89906 - RNA, 18 nt, Human
caggggaacuugggccag

SEQ ID NO: 89907 - RNA, 32 nt, Human
caggggaagagaacccaucagggacguuuguc

SEQ ID NO: 89908 - RNA, 32 nt, Human
caggggaaggcccugaggcggaggcugugcuc

SEQ ID NO: 89909 - RNA, 32 nt, Human
caggggaagggugggugguugcaggggaaguu

SEQ ID NO: 89910 - RNA, 32 nt, Human
caggggaauggaucccaagggcccagauaacg

SEQ ID NO: 89911 - RNA, 20 nt, Human
caggggaauugcuugaacca

SEQ ID NO: 89912 - RNA, 23 nt, Human
caggggaauuggugauuacagua

SEQ ID NO: 89913 - RNA, 22 nt, Human
caggggacaaaauggaccgagg

SEQ ID NO: 89914 - RNA, 19 nt, Human
caggggacagaagcuuuuu

SEQ ID NO: 89915 - RNA, 32 nt, Human
caggggacagaaugugcauggaguggagcaug

SEQ ID NO: 89916 - RNA, 32 nt, Human
caggggacagcaucugcagcaguugcugaggc

SEQ ID NO: 89917 - RNA, 21 nt, Human
caggggacagccagggacagg

SEQ ID NO: 89918 - RNA, 18 nt, Human
caggggacagggcucucu

SEQ ID NO: 89919 - RNA, 20 nt, Human
caggggacaugaugagccag

SEQ ID NO: 89920 - RNA, 22 nt, Human
caggggaccaagccaagcuagg

SEQ ID NO: 89921 - RNA, 21 nt, Human
caggggaccagccaggccugg

SEQ ID NO: 89922 - RNA, 21 nt, Human
caggggaccagguggaccagg

SEQ ID NO: 89923 - RNA, 20 nt, Human
caggggaccaucgugguucu

SEQ ID NO: 89924 - RNA, 32 nt, Human
caggggacccagccagggggugggcucuagag

SEQ ID NO: 89925 - RNA, 19 nt, Human
caggggacccauggcgagg

SEQ ID NO: 89926 - RNA, 22 nt, Human
caggggaccccauggggacagg

SEQ ID NO: 89927 - RNA, 22 nt, Human
caggggacccggaggagccugg

SEQ ID NO: 89928 - RNA, 32 nt, Human
caggggacccggaggcucccacccucaccucu

SEQ ID NO: 89929 - RNA, 20 nt, Human
caggggaccucagacccagg

SEQ ID NO: 89930 - RNA, 20 nt, Human
caggggaccugaguucuagg

SEQ ID NO: 89931 - RNA, 18 nt, Human
caggggaccuggaccagg

SEQ ID NO: 89932 - RNA, 21 nt, Human
caggggaccuggagagccggg

SEQ ID NO: 89933 - RNA, 21 nt, Human
caggggaccuggagcugccag

SEQ ID NO: 89934 - RNA, 18 nt, Human
caggggacggagggcgag

SEQ ID NO: 89935 - RNA, 32 nt, Human
caggggacugucugccagccucccaggcccau

SEQ ID NO: 89936 - RNA, 19 nt, Human
caggggacuugcaagcagg

SEQ ID NO: 89937 - RNA, 32 nt, Human
caggggagaagcaaacccccaggauugaaggc

SEQ ID NO: 89938 - RNA, 32 nt, Human
caggggagagagugagcgugagcuuggcauag

SEQ ID NO: 89939 - RNA, 32 nt, Human
caggggagagggaagcagccgugcugucaaca

SEQ ID NO: 89940 - RNA, 32 nt, Human
caggggagagugaaggccugcaggagggcagg

SEQ ID NO: 89941 - RNA, 32 nt, Human
caggggagaguguuccuuuuguucuuaacuag

SEQ ID NO: 89942 - RNA, 32 nt, Human
caggggagauggagguugcagugagcugagau

SEQ ID NO: 89943 - RNA, 32 nt, Human
caggggagcagaaggagaagaaaacugccugu

SEQ ID NO: 89944 - RNA, 18 nt, Human
caggggagcaggcuucuu

SEQ ID NO: 89945 - RNA, 17 nt, Human
caggggagcccccaccc

SEQ ID NO: 89946 - RNA, 32 nt, Human
caggggagccggcuggagugagcuggcuggaa

SEQ ID NO: 89947 - RNA, 17 nt, Human
caggggagcucccagcc

SEQ ID NO: 89948 - RNA, 32 nt, Human
caggggaggaaagacuggugggaagugagcag

SEQ ID NO: 89949 - RNA, 32 nt, Human
caggggaggaagagggauggggcugcaagcca

SEQ ID NO: 89950 - RNA, 32 nt, Human
caggggaggaagccgcagcccaaggaggucgu

SEQ ID NO: 89951 - RNA, 32 nt, Human
caggggaggaugggugccagagggugggagug

SEQ ID NO: 89952 - RNA, 32 nt, Human
caggggaggccuggguuucaggaacagguaac

SEQ ID NO: 89953 - RNA, 32 nt, Human
caggggagggccagggcucugaggagugggcg

SEQ ID NO: 89954 - RNA, 20 nt, Human
caggggaggucugggcaagg

SEQ ID NO: 89955 - RNA, 32 nt, Human
caggggaggugcgcagugaacugucaaggacu

SEQ ID NO: 89956 - RNA, 32 nt, Human
caggggaggugggguuugugucuuccaacuuc

SEQ ID NO: 89957 - RNA, 32 nt, Human
caggggagucggaagagcuuggaagagcuggg

SEQ ID NO: 89958 - RNA, 18 nt, Human
caggggagugugggucag

SEQ ID NO: 89959 - RNA, 20 nt, Human
caggggaucaaccugagaaa

SEQ ID NO: 89960 - RNA, 32 nt, Human
caggggaucacaccagccuaaccaacaugaug

SEQ ID NO: 89961 - RNA, 20 nt, Human
caggggaucacccugagaaa

SEQ ID NO: 89962 - RNA, 20 nt, Human
caggggaugaguggaccugg

SEQ ID NO: 89963 - RNA, 32 nt, Human
caggggaugaguggagguuaaggcugaggaaa

SEQ ID NO: 89964 - RNA, 32 nt, Human
caggggaugccaccucugcugcuccagucguc

SEQ ID NO: 89965 - RNA, 21 nt, Human
caggggauggucuugggcagg

SEQ ID NO: 89966 - RNA, 32 nt, Human
caggggcaaauguuuacuuguaauuuucuucc

SEQ ID NO: 89967 - RNA, 32 nt, Human
caggggcacaaucaccacacacugccgcuuca

SEQ ID NO: 89968 - RNA, 21 nt, Human
caggggcacaaucucagcuca

SEQ ID NO: 89969 - RNA, 32 nt, Human
caggggcacagaccucucccacccacaagaac

SEQ ID NO: 89970 - RNA, 32 nt, Human
caggggcacaggcuccagcaggcugccugucu

SEQ ID NO: 89971 - RNA, 32 nt, Human
caggggcaccuugucacugccgucugugcacu

SEQ ID NO: 89972 - RNA, 23 nt, Human
caggggcagcagccgacaggggg

SEQ ID NO: 89973 - RNA, 32 nt, Human
caggggcagcagggggcagggugcagggucca

SEQ ID NO: 89974 - RNA, 32 nt, Human
caggggcagccaggacccuugauucagaccau

SEQ ID NO: 89975 - RNA, 19 nt, Human
caggggcagccuccagucc

SEQ ID NO: 89976 - RNA, 32 nt, Human
caggggcaggagaggcugggcuggguggcaca

SEQ ID NO: 89977 - RNA, 32 nt, Human
caggggcaggaggcagucacugaccccgagac

SEQ ID NO: 89978 - RNA, 32 nt, Human
caggggcagggacaguggccaggcggcccgag

SEQ ID NO: 89979 - RNA, 32 nt, Human
caggggcagggcaagcuugaccucucacuguu

SEQ ID NO: 89980 - RNA, 32 nt, Human
caggggcaggggagagacucucuccccaccac

SEQ ID NO: 89981 - RNA, 32 nt, Human
caggggcaggggguggagguuggggucaccgg

SEQ ID NO: 89982 - RNA, 32 nt, Human
caggggcagggugggauggggaagaccaggag

SEQ ID NO: 89983 - RNA, 32 nt, Human
caggggcagucaaauuagcaccuacuggcucu

SEQ ID NO: 89984 - RNA, 32 nt, Human
caggggcauagaguggucagucugaaagggag

SEQ ID NO: 89985 - RNA, 32 nt, Human
caggggccacgcggaggcucacgaggaggccg

SEQ ID NO: 89986 - RNA, 22 nt, Human
caggggccacuuuucgagaccg

SEQ ID NO: 89987 - RNA, 32 nt, Human
caggggccagaacaguggcagggggcccgggg

SEQ ID NO: 89988 - RNA, 22 nt, Human
caggggccagcagugggccggg

SEQ ID NO: 89989 - RNA, 23 nt, Human
caggggccagccagugucugacc

SEQ ID NO: 89990 - RNA, 19 nt, Human
caggggccaggccaggcca

SEQ ID NO: 89991 - RNA, 22 nt, Human
caggggccauguuugcaaacug

SEQ ID NO: 89992 - RNA, 32 nt, Human
caggggcccaacuuccccuggagcucagaggu

SEQ ID NO: 89993 - RNA, 25 nt, Human
caggggcccacccucugcccaggga

SEQ ID NO: 89994 - RNA, 32 nt, Human
caggggcccagaugacaaccucuccuucgcuc

SEQ ID NO: 89995 - RNA, 21 nt, Human
caggggcccaggcagcacaga

SEQ ID NO: 89996 - RNA, 32 nt, Human
caggggcccaggccaagguggggugcaggagg

SEQ ID NO: 89997 - RNA, 32 nt, Human
caggggcccauggacucuucagucuggagggu

SEQ ID NO: 89998 - RNA, 24 nt, Human
caggggcccauucagucccaggga

SEQ ID NO: 89999 - RNA, 24 nt, Human
caggggccccccugugcccaggga

SEQ ID NO: 90000 - RNA, 24 nt, Human
caggggccccgccugacucaggga

SEQ ID NO: 90001 - RNA, 32 nt, Human
caggggcccggccaagaaggaggcccgccugu

SEQ ID NO: 90002 - RNA, 32 nt, Human
caggggcccggcccuggccggcagcggcaaag

SEQ ID NO: 90003 - RNA, 32 nt, Human
caggggcccgggcuggagaggaaggggcacca

SEQ ID NO: 90004 - RNA, 32 nt, Human
caggggcccugccucuuccugagcucaggaua

SEQ ID NO: 90005 - RNA, 32 nt, Human
caggggcccuggaaggguguggccaacaccaa

SEQ ID NO: 90006 - RNA, 22 nt, Human
caggggccgcacgccugggccc

SEQ ID NO: 90007 - RNA, 32 nt, Human
caggggccgcagggacgacacucuccagggag

SEQ ID NO: 90008 - RNA, 32 nt, Human
caggggccgccgggaucaucccgcccagucga

SEQ ID NO: 90009 - RNA, 32 nt, Human
caggggccgcgccgacugggaacucgccaggg

SEQ ID NO: 90010 - RNA, 32 nt, Human
caggggccgucagaggauguccacagaggcag

SEQ ID NO: 90011 - RNA, 32 nt, Human
caggggccuauugugcugucuuccugugacca

SEQ ID NO: 90012 - RNA, 32 nt, Human
caggggccuccaggacccggaggagaggcagg

SEQ ID NO: 90013 - RNA, 24 nt, Human
caggggccucgcuucccccagggg

SEQ ID NO: 90014 - RNA, 32 nt, Human
caggggccucuccuaagacugggcucugugug

SEQ ID NO: 90015 - RNA, 32 nt, Human
caggggccucuccugguaauccucugagccca

SEQ ID NO: 90016 - RNA, 32 nt, Human
caggggccugaccugggcacugugccagggca

SEQ ID NO: 90017 - RNA, 20 nt, Human
caggggccuggaggggccag

SEQ ID NO: 90018 - RNA, 32 nt, Human
caggggccugggagaugccaggaggaugagag

SEQ ID NO: 90019 - RNA, 32 nt, Human
caggggccuggggacccucucccuggcugccu

SEQ ID NO: 90020 - RNA, 20 nt, Human
caggggccugucaagccagg

SEQ ID NO: 90021 - RNA, 32 nt, Human
caggggccuuucucaccaccucccugcuccua

SEQ ID NO: 90022 - RNA, 20 nt, Human
caggggcgaggcggcugggg

SEQ ID NO: 90023 - RNA, 20 nt, Human
caggggcgaggcuagagggg

SEQ ID NO: 90024 - RNA, 22 nt, Human
caggggcgagugaggcagcagc

SEQ ID NO: 90025 - RNA, 32 nt, Human
caggggcgauggugccuggucucugaguaaga

SEQ ID NO: 90026 - RNA, 21 nt, Human
caggggcgcaaucucggcuca

SEQ ID NO: 90027 - RNA, 22 nt, Human
caggggcgcccggagcaggcgc

SEQ ID NO: 90028 - RNA, 21 nt, Human
caggggcgccgcgcagcccgc

SEQ ID NO: 90029 - RNA, 32 nt, Human
caggggcgcuggcugcacucaagacccucgag

SEQ ID NO: 90030 - RNA, 32 nt, Human
caggggcggaggcggaggcagagguggaggcg

SEQ ID NO: 90031 - RNA, 24 nt, Human
caggggcggcugcagaggcagugc

SEQ ID NO: 90032 - RNA, 32 nt, Human
caggggcggcugccucacucccuaccugagcc

SEQ ID NO: 90033 - RNA, 25 nt, Human
caggggcgggaccuggggcggggga

SEQ ID NO: 90034 - RNA, 22 nt, Human
caggggcgggacuggagagggg

SEQ ID NO: 90035 - RNA, 23 nt, Human
caggggcgggcggaggccgccgc

SEQ ID NO: 90036 - RNA, 25 nt, Human
caggggcgggcggggguacgaggga

SEQ ID NO: 90037 - RNA, 21 nt, Human
caggggcggggcagggccagg

SEQ ID NO: 90038 - RNA, 22 nt, Human
caggggcggggcagggccaggg

SEQ ID NO: 90039 - RNA, 20 nt, Human
caggggcggggcucgggggg

SEQ ID NO: 90040 - RNA, 24 nt, Human
caggggcggggcuugugggagggg

SEQ ID NO: 90041 - RNA, 32 nt, Human
caggggcggguggaucaccugaggucaggagu

SEQ ID NO: 90042 - RNA, 32 nt, Human
caggggcuagcagcagaggcuucaccgcauca

SEQ ID NO: 90043 - RNA, 21 nt, Human
caggggcuagcaugggcuagg

SEQ ID NO: 90044 - RNA, 19 nt, Human
caggggcucaagggccagg

SEQ ID NO: 90045 - RNA, 31 nt, Human
caggggcucaauaaaugcuuguugaacuuga

SEQ ID NO: 90046 - RNA, 32 nt, Human
caggggcucaggacagggaggaguugaggcca

SEQ ID NO: 90047 - RNA, 32 nt, Human
caggggcucaggagagaagggagcagcuggca

SEQ ID NO: 90048 - RNA, 32 nt, Human
caggggcuccaugcugggucugaggccccugc

SEQ ID NO: 90049 - RNA, 32 nt, Human
caggggcuccccacucaguccccagucaucua

SEQ ID NO: 90050 - RNA, 32 nt, Human
caggggcucccucccuccuucucuccuuccuu

SEQ ID NO: 90051 - RNA, 22 nt, Human
caggggcuccuagugggccagg

SEQ ID NO: 90052 - RNA, 24 nt, Human
caggggcucucagaaucccgcuua

SEQ ID NO: 90053 - RNA, 32 nt, Human
caggggcucugacgggcuuaccccugucccug

SEQ ID NO: 90054 - RNA, 32 nt, Human
caggggcucugccagccucggccucucccucc

SEQ ID NO: 90055 - RNA, 32 nt, Human
caggggcucuggagagaaacaauaaagagauu

SEQ ID NO: 90056 - RNA, 24 nt, Human
caggggcucuugggguucggcuca

SEQ ID NO: 90057 - RNA, 20 nt, Human
caggggcugaauggaccagg

SEQ ID NO: 90058 - RNA, 32 nt, Human
caggggcugacggaucggggagaggcugggug

SEQ ID NO: 90059 - RNA, 32 nt, Human
caggggcugaggaggaggagcagggggugcug

SEQ ID NO: 90060 - RNA, 19 nt, Human
caggggcugagggcacuga

SEQ ID NO: 90061 - RNA, 32 nt, Human
caggggcugauagggcaaaauaaaaugacaau

SEQ ID NO: 90062 - RNA, 32 nt, Human
caggggcugcaggagauaagagaaacgggcug

SEQ ID NO: 90063 - RNA, 32 nt, Human
caggggcugcaggauggaaccagcaagcugcu

SEQ ID NO: 90064 - RNA, 21 nt, Human
caggggcugccacacuccuga

SEQ ID NO: 90065 - RNA, 32 nt, Human
caggggcugccaugaagaucucugacauggug

SEQ ID NO: 90066 - RNA, 32 nt, Human
caggggcugccccggaaucagcuccccggggc

SEQ ID NO: 90067 - RNA, 32 nt, Human
caggggcugccuccugccuuuucuuuuguaaa

SEQ ID NO: 90068 - RNA, 32 nt, Human
caggggcugccucugaccccuccugugguggu

SEQ ID NO: 90069 - RNA, 32 nt, Human
caggggcugccugggccucuggugcacaugau

SEQ ID NO: 90070 - RNA, 22 nt, Human
caggggcugcugcuccacuuca

SEQ ID NO: 90071 - RNA, 32 nt, Human
caggggcuggaaggugcuccaggcucaaugcu

SEQ ID NO: 90072 - RNA, 20 nt, Human
caggggcuggaguuuggaga

SEQ ID NO: 90073 - RNA, 32 nt, Human
caggggcugggcagaggggaggaggaagcaca

SEQ ID NO: 90074 - RNA, 32 nt, Human
caggggcugggcagcugccagugacccaagcc

SEQ ID NO: 90075 - RNA, 20 nt, Human
caggggcugggcaggagaug

SEQ ID NO: 90076 - RNA, 32 nt, Human
caggggcugggcagggaugccaggugggccca

SEQ ID NO: 90077 - RNA, 17 nt, Human
caggggcuggggcuucu

SEQ ID NO: 90078 - RNA, 26 nt, Human
caggggcugugagguggcagcggcug

SEQ ID NO: 90079 - RNA, 22 nt, Human
caggggcugugcaggcagccca

SEQ ID NO: 90080 - RNA, 22 nt, Human
caggggcugugucuccucacuu

SEQ ID NO: 90081 - RNA, 23 nt, Human
caggggcuuccaaauuuagcuua

SEQ ID NO: 90082 - RNA, 32 nt, Human
caggggcuucccucagcuucccagagugcaca

SEQ ID NO: 90083 - RNA, 24 nt, Human
caggggcuuugucaguuuuguuca

SEQ ID NO: 90084 - RNA, 32 nt, Human
cagggggaaaacugcauuuucucuuccaaaaa

SEQ ID NO: 90085 - RNA, 32 nt, Human
cagggggaagaaaaggaaaagggagcgcagga

SEQ ID NO: 90086 - RNA, 32 nt, Human
cagggggacacaggggacaaggaggagcuauu

SEQ ID NO: 90087 - RNA, 32 nt, Human
cagggggacaguggacagggacucagaaaugu

SEQ ID NO: 90088 - RNA, 22 nt, Human
cagggggacaugcaaaaacaau

SEQ ID NO: 90089 - RNA, 20 nt, Human
cagggggacggcucgcgaua

SEQ ID NO: 90090 - RNA, 32 nt, Human
cagggggagagggagggaaggaaggugcggcu

SEQ ID NO: 90091 - RNA, 32 nt, Human
cagggggagcgaggaggaagggaaccgcggcc

SEQ ID NO: 90092 - RNA, 32 nt, Human
cagggggagcucuuccuggaccaagggaggag

SEQ ID NO: 90093 - RNA, 32 nt, Human
cagggggaggcagagauggcacagcaagagac

SEQ ID NO: 90094 - RNA, 32 nt, Human
cagggggagggggagagagcaaggagaucggu

SEQ ID NO: 90095 - RNA, 32 nt, Human
cagggggaugaaccgcgagggagcucccggga

SEQ ID NO: 90096 - RNA, 20 nt, Human
cagggggaugugucccagua

SEQ ID NO: 90097 - RNA, 32 nt, Human
cagggggcaacugccuugaucggccugccaug

SEQ ID NO: 90098 - RNA, 19 nt, Human
cagggggcaaggggccagg

SEQ ID NO: 90099 - RNA, 32 nt, Human
cagggggcaauucccugucauuuucagugacc

SEQ ID NO: 90100 - RNA, 32 nt, Human
cagggggcagaggucaggagaaucaucucaga

SEQ ID NO: 90101 - RNA, 19 nt, Human
cagggggcaggcaggcagg

SEQ ID NO: 90102 - RNA, 32 nt, Human
cagggggcagggaagcagugcuggguggaggc

SEQ ID NO: 90103 - RNA, 32 nt, Human
cagggggcagggaugcuuuccagccugcagca

SEQ ID NO: 90104 - RNA, 32 nt, Human
cagggggcagggggcagagagcagagaggagc

SEQ ID NO: 90105 - RNA, 20 nt, Human
cagggggcagguggacccgg

SEQ ID NO: 90106 - RNA, 32 nt, Human
cagggggcagugaggugccccugccuggagca

SEQ ID NO: 90107 - RNA, 22 nt, Human
cagggggcauuuguccccucca

SEQ ID NO: 90108 - RNA, 32 nt, Human
cagggggccauggagaagcugcagcgacuuua

SEQ ID NO: 90109 - RNA, 32 nt, Human
cagggggccauggugaccugagacaaguggac

SEQ ID NO: 90110 - RNA, 20 nt, Human
cagggggcccaaggagcagu

SEQ ID NO: 90111 - RNA, 32 nt, Human
cagggggccccaggcucgccugacugaagaca

SEQ ID NO: 90112 - RNA, 26 nt, Human
cagggggccgaggacaccaggucugu

SEQ ID NO: 90113 - RNA, 32 nt, Human
cagggggccgcggaccugaacggagguugcgg

SEQ ID NO: 90114 - RNA, 20 nt, Human
cagggggccggagggccagg

SEQ ID NO: 90115 - RNA, 32 nt, Human
cagggggccgggacagggagguugggaggggg

SEQ ID NO: 90116 - RNA, 22 nt, Human
cagggggccugagcgggacagg

SEQ ID NO: 90117 - RNA, 21 nt, Human
cagggggccugugucacagug

SEQ ID NO: 90118 - RNA, 22 nt, Human
cagggggcgccaaggagccagg

SEQ ID NO: 90119 - RNA, 32 nt, Human
cagggggcugagcucugaggggugggugcuca

SEQ ID NO: 90120 - RNA, 32 nt, Human
cagggggcugaggcacacagagaggccaacuu

SEQ ID NO: 90121 - RNA, 22 nt, Human
cagggggcugagggcaagcagg

SEQ ID NO: 90122 - RNA, 32 nt, Human
cagggggcugggaggcacagaugcaggcucag

SEQ ID NO: 90123 - RNA, 32 nt, Human
cagggggcugucacuccgugaccucaguauua

SEQ ID NO: 90124 - RNA, 19 nt, Human
cagggggcuguggggccag

SEQ ID NO: 90125 - RNA, 32 nt, Human
caggggguacagcuguuauacuuuaugaaccu

SEQ ID NO: 90126 - RNA, 32 nt, Human
caggggguagaacggcccugugcuuaagacac

SEQ ID NO: 90127 - RNA, 23 nt, Human
caggggguccagggcggaccugg

SEQ ID NO: 90128 - RNA, 20 nt, Human
caggggguccaggugggcca

SEQ ID NO: 90129 - RNA, 32 nt, Human
cagggggucugggagcuuggauggaauaaauu

SEQ ID NO: 90130 - RNA, 20 nt, Human
cagggggugagggggccagg

SEQ ID NO: 90131 - RNA, 32 nt, Human
cagggggugaugguuacagcccagacuuuacc

SEQ ID NO: 90132 - RNA, 32 nt, Human
cagggggugcagaugaugccugggcagaugug

SEQ ID NO: 90133 - RNA, 32 nt, Human
cagggggugcgcgucgggggaggcagaagcca

SEQ ID NO: 90134 - RNA, 22 nt, Human
caggggguggagguugcaguga

SEQ ID NO: 90135 - RNA, 32 nt, Human
caggggguggggaagagagacgucagcgggac

SEQ ID NO: 90136 - RNA, 18 nt, Human
caggggguggugggccag

SEQ ID NO: 90137 - RNA, 19 nt, Human
caggggguggugugccagg

SEQ ID NO: 90138 - RNA, 32 nt, Human
caggggguucacaauucucagcuucaucugag

SEQ ID NO: 90139 - RNA, 32 nt, Human
cagggguagaggcugggggcuccaccccagcc

SEQ ID NO: 90140 - RNA, 32 nt, Human
cagggguagagggagaagccuagagcagcgcu

SEQ ID NO: 90141 - RNA, 32 nt, Human
cagggguagcgagguugcaggagcuggcuggc

SEQ ID NO: 90142 - RNA, 32 nt, Human
cagggguaggcaggcacagagugcugucugcu

SEQ ID NO: 90143 - RNA, 32 nt, Human
caggggucaaaaccagacuaacaguuuuagaa

SEQ ID NO: 90144 - RNA, 32 nt, Human
caggggucaaagcauuugcucaccacaacuga

SEQ ID NO: 90145 - RNA, 23 nt, Human
caggggucacaccuguaauccca

SEQ ID NO: 90146 - RNA, 32 nt, Human
caggggucagccaccugccuuugagucaucaa

SEQ ID NO: 90147 - RNA, 32 nt, Human
caggggucaggugaggcuugagcuugaggagu

SEQ ID NO: 90148 - RNA, 32 nt, Human
caggggucaguguagcuucugagcuaccuuua

SEQ ID NO: 90149 - RNA, 21 nt, Human
cagggguccagggugcaguga

SEQ ID NO: 90150 - RNA, 32 nt, Human
cagggguccaggguguggguccugggcuguca

SEQ ID NO: 90151 - RNA, 32 nt, Human
cagggguccaggugccccagagucuggugcug

SEQ ID NO: 90152 - RNA, 32 nt, Human
cagggguccaugaugccgagcugcaaucguuc

SEQ ID NO: 90153 - RNA, 32 nt, Human
caggggucuagugcccugcauuccuuugaggc

SEQ ID NO: 90154 - RNA, 32 nt, Human
caggggucucacuauguugcccaaacuggccu

SEQ ID NO: 90155 - RNA, 32 nt, Human
caggggucugagacagcagccacugggguuga

SEQ ID NO: 90156 - RNA, 32 nt, Human
caggggucuggcaugagacaggucaguuuccc

SEQ ID NO: 90157 - RNA, 32 nt, Human
caggggucugggcuccagccauggagggugga

SEQ ID NO: 90158 - RNA, 32 nt, Human
caggggucugugugucccaguugcaugcacgu

SEQ ID NO: 90159 - RNA, 32 nt, Human
caggggugaacuguagcuugaugcaguaaucu

SEQ ID NO: 90160 - RNA, 32 nt, Human
caggggugagccaccacgcccagccccagcuu

SEQ ID NO: 90161 - RNA, 32 nt, Human
caggggugagccaccgugccuugcuauuaaug

SEQ ID NO: 90162 - RNA, 32 nt, Human
caggggugagccacugcgcccagccuaaaaua

SEQ ID NO: 90163 - RNA, 32 nt, Human
caggggugagccacugugcccggccauaauuu

SEQ ID NO: 90164 - RNA, 32 nt, Human
caggggugaggagggagcaggagaacggguaa

SEQ ID NO: 90165 - RNA, 32 nt, Human
caggggugaggagggagcaggagggcaggagu

SEQ ID NO: 90166 - RNA, 32 nt, Human
caggggugccaagagaggcauuccagaaggac

SEQ ID NO: 90167 - RNA, 32 nt, Human
caggggugcuaugacaugcaagugagaagcug

SEQ ID NO: 90168 - RNA, 19 nt, Human
cagggguggagugggccgg

SEQ ID NO: 90169 - RNA, 32 nt, Human
cagggguggccugaagccugggggccaggcug

SEQ ID NO: 90170 - RNA, 18 nt, Human
caggggugggagagccag

SEQ ID NO: 90171 - RNA, 23 nt, Human
caggggugggagcuguugccgaa

SEQ ID NO: 90172 - RNA, 21 nt, Human
caggggugggagggcggccgc

SEQ ID NO: 90173 - RNA, 32 nt, Human
caggggugggccgacaggauggggacccaggc

SEQ ID NO: 90174 - RNA, 19 nt, Human
cagggguggggacccagag

SEQ ID NO: 90175 - RNA, 32 nt, Human
cagggguggggcugagacugggcugacaucua

SEQ ID NO: 90176 - RNA, 32 nt, Human
cagggguggggcugggcugacucuggccggau

SEQ ID NO: 90177 - RNA, 32 nt, Human
cagggguggggugggaagccagcuggggaaau

SEQ ID NO: 90178 - RNA, 32 nt, Human
cagggguggguggagccugacccuggagggca

SEQ ID NO: 90179 - RNA, 31 nt, Human
cagggguggguggguggagggcacggaaggg

SEQ ID NO: 90180 - RNA, 32 nt, Human
cagggguguaauucagaaggaggcagacuggg

SEQ ID NO: 90181 - RNA, 21 nt, Human
caggggugugggcggaggcgg

SEQ ID NO: 90182 - RNA, 32 nt, Human
caggggugugggcuuggagggugaagaggaug

SEQ ID NO: 90183 - RNA, 32 nt, Human
cagggguguugagcgaugaugcucugauaugg

SEQ ID NO: 90184 - RNA, 18 nt, Human
cagggguucaucucccua

SEQ ID NO: 90185 - RNA, 21 nt, Human
cagggguucuagaccagcuua

SEQ ID NO: 90186 - RNA, 32 nt, Human
cagggguucucagcuguacccucugccgaugg

SEQ ID NO: 90187 - RNA, 32 nt, Human
cagggguuggauuggagggagagaacagaguu

SEQ ID NO: 90188 - RNA, 23 nt, Human
cagggguuggggacagggccagg

SEQ ID NO: 90189 - RNA, 32 nt, Human
cagggguuggguggggguugcaggacuccacu

SEQ ID NO: 90190 - RNA, 32 nt, Human
cagggguuuacccaaagaaaggguauuuuuga

SEQ ID NO: 90191 - RNA, 32 nt, Human
cagggguuucuagccccagaucuagccggguu

SEQ ID NO: 90192 - RNA, 32 nt, Human
cagggguuucugccuuugcuucucuugucauu

SEQ ID NO: 90193 - RNA, 32 nt, Human
cagggguuugcuuacagugaugccaugaagac

SEQ ID NO: 90194 - RNA, 32 nt, Human
cagggguuuucgccaugaaccuugccaugggu

SEQ ID NO: 90195 - RNA, 32 nt, Human
caggguaaggaagagagagugggaggcagagu

SEQ ID NO: 90196 - RNA, 32 nt, Human
caggguacagccucguucucaccaucugcuuc

SEQ ID NO: 90197 - RNA, 17 nt, Human
caggguaccaugugaug

SEQ ID NO: 90198 - RNA, 20 nt, Human
caggguacccacagaucugc

SEQ ID NO: 90199 - RNA, 32 nt, Human
caggguacccgccugagcuccugcugcggagg

SEQ ID NO: 90200 - RNA, 19 nt, Human
caggguacgcucauggaga

SEQ ID NO: 90201 - RNA, 32 nt, Human
caggguacuaggauuacuaguacucugaugga

SEQ ID NO: 90202 - RNA, 32 nt, Human
caggguagaagaggcugagggacacacagagg

SEQ ID NO: 90203 - RNA, 32 nt, Human
caggguagagaugccuacagggugguugcuug

SEQ ID NO: 90204 - RNA, 32 nt, Human
caggguagagggcuggccccuccucucaucuu

SEQ ID NO: 90205 - RNA, 32 nt, Human
caggguagauaaccuguacuucaaguuaaagu

SEQ ID NO: 90206 - RNA, 32 nt, Human
caggguagcugugugcagucacugcagcuugc

SEQ ID NO: 90207 - RNA, 32 nt, Human
caggguagguucucgggacugaaggaaggcca

SEQ ID NO: 90208 - RNA, 31 nt, Human
caggguaguagaccugucagauuggagguca

SEQ ID NO: 90209 - RNA, 21 nt, Human
caggguagugaggcaaggguu

SEQ ID NO: 90210 - RNA, 24 nt, Human
caggguauaacacaggcccuggug

SEQ ID NO: 90211 - RNA, 32 nt, Human
caggguaucacuggacaggccauggcuccacg

SEQ ID NO: 90212 - RNA, 32 nt, Human
caggguauuaaauuaugaaucagcugaaccug

SEQ ID NO: 90213 - RNA, 32 nt, Human
caggguauuaggaaggacaggaaaaguaggag

SEQ ID NO: 90214 - RNA, 32 nt, Human
cagggucaacagcaacucgaaggccaagcccg

SEQ ID NO: 90215 - RNA, 32 nt, Human
cagggucagcaguucaagaccagccuggccag

SEQ ID NO: 90216 - RNA, 20 nt, Human
cagggucagccuuccagcuc

SEQ ID NO: 90217 - RNA, 32 nt, Human
cagggucaggcucuuaccuccaccuccagggc

SEQ ID NO: 90218 - RNA, 32 nt, Human
cagggucagggaggaggaacgguggggguggg

SEQ ID NO: 90219 - RNA, 32 nt, Human
cagggucagggugagagagagcugggccaggg

SEQ ID NO: 90220 - RNA, 32 nt, Human
cagggucagucagcuaauguuacuguugauuc

SEQ ID NO: 90221 - RNA, 32 nt, Human
cagggucagugucacagccacaacuucagaaa

SEQ ID NO: 90222 - RNA, 32 nt, Human
cagggucaucacccucuagcaucagugccugc

SEQ ID NO: 90223 - RNA, 32 nt, Human
cagggucaucugcacuugaugacugcuccccg

SEQ ID NO: 90224 - RNA, 32 nt, Human
caggguccaaccacucuccagcagggagaccu

SEQ ID NO: 90225 - RNA, 32 nt, Human
caggguccaagaggaauggguguucuguggcc

SEQ ID NO: 90226 - RNA, 32 nt, Human
caggguccagcagcaaccuguaucagaagaac

SEQ ID NO: 90227 - RNA, 32 nt, Human
caggguccagugucauuugaggauguggcugu

SEQ ID NO: 90228 - RNA, 32 nt, Human
cagggucccaccguccucgccagccugcgucc

SEQ ID NO: 90229 - RNA, 32 nt, Human
cagggucccagccaggagagugcagcugagca

SEQ ID NO: 90230 - RNA, 32 nt, Human
cagggucccagccuggccaccagccucccuuu

SEQ ID NO: 90231 - RNA, 21 nt, Human
cagggucccagucacugggca

SEQ ID NO: 90232 - RNA, 32 nt, Human
cagggucccagugcccucuggacacuaugcca

SEQ ID NO: 90233 - RNA, 32 nt, Human
cagggucccuccuuccugucaugcucccucca

SEQ ID NO: 90234 - RNA, 25 nt, Human
cagggucccucugaguggggccagg

SEQ ID NO: 90235 - RNA, 32 nt, Human
cagggucccuuucugucugucuccuugcucug

SEQ ID NO: 90236 - RNA, 32 nt, Human
caggguccgccauggagccagagcagaugcug

SEQ ID NO: 90237 - RNA, 32 nt, Human
caggguccuagugggaaggacaaggaccuggu

SEQ ID NO: 90238 - RNA, 32 nt, Human
caggguccuccacccucccccugaccacauac

SEQ ID NO: 90239 - RNA, 32 nt, Human
caggguccuccuggauucuugcagcuuccggu

SEQ ID NO: 90240 - RNA, 32 nt, Human
caggguccucuucugccccgagcauccgacuc

SEQ ID NO: 90241 - RNA, 32 nt, Human
caggguccugcagcuuguccuuucuggcugga

SEQ ID NO: 90242 - RNA, 32 nt, Human
caggguccuuccuaaugcaggcugcuuucucu

SEQ ID NO: 90243 - RNA, 31 nt, Human
caggguccuuucaaggagguugaaugagaca

SEQ ID NO: 90244 - RNA, 32 nt, Human
cagugguuacccacgaggcaguacuuauuauc

SEQ ID NO: 90245 - RNA, 32 nt, Human
cagugguuacccacgaggcaguacuuuuuauc

SEQ ID NO: 90246 - RNA, 32 nt, Human
cagugguuacccacgaggcaguagugaguauc

SEQ ID NO: 90247 - RNA, 32 nt, Human
cagugguuagguugcauuucuaccccauccag

SEQ ID NO: 90248 - RNA, 21 nt, Human
cagugguucacaccuguaauc

SEQ ID NO: 90249 - RNA, 24 nt, Human
cagugguucacaccuguaauccca

SEQ ID NO: 90250 - RNA, 21 nt, Human
cagugguucacgccuguaauc

SEQ ID NO: 90251 - RNA, 22 nt, Human
cagugguucacgccuguaaucc

SEQ ID NO: 90252 - RNA, 24 nt, Human
cagugguucauaccuauaguccca

SEQ ID NO: 90253 - RNA, 24 nt, Human
cagugguucaugccaguaauccca

SEQ ID NO: 90254 - RNA, 24 nt, Human
cagugguucaugccuauaaucuca

SEQ ID NO: 90255 - RNA, 21 nt, Human
cagugguucaugccuguaauc

SEQ ID NO: 90256 - RNA, 22 nt, Human
cagugguucaugccuguaaucc

SEQ ID NO: 90257 - RNA, 24 nt, Human
cagugguucaugccuguaauccca

SEQ ID NO: 90258 - RNA, 23 nt, Human
cagugguucaugcuguaauccca

SEQ ID NO: 90259 - RNA, 24 nt, Human
cagugguucaugucuguaauccca

SEQ ID NO: 90260 - RNA, 32 nt, Human
cagugguuccccucaccuucugcagaagucuc

SEQ ID NO: 90261 - RNA, 32 nt, Human
cagugguuccucccucuccugaauccuuuucu

SEQ ID NO: 90262 - RNA, 32 nt, Human
cagugguucucccaaauaggagaccuggggcc

SEQ ID NO: 90263 - RNA, 32 nt, Human
cagugguuggaagaacagaaccccuaggaacc

SEQ ID NO: 90264 - RNA, 32 nt, Human
cagugguugucucacuucaucucuuauagauu

SEQ ID NO: 90265 - RNA, 21 nt, Human
cagugguuuauagcuguaauc

SEQ ID NO: 90266 - RNA, 24 nt, Human
cagugguuuauagcuguaauccca

SEQ ID NO: 90267 - RNA, 21 nt, Human
cagugguuuaugccuguaauc

SEQ ID NO: 90268 - RNA, 24 nt, Human
cagugguuuaugccuguaauccca

SEQ ID NO: 90269 - RNA, 32 nt, Human
caguguacaaaaccaguuuucugcaacauuca

SEQ ID NO: 90270 - RNA, 32 nt, Human
caguguacacgugcuuuuauuauauccauuuu

SEQ ID NO: 90271 - RNA, 32 nt, Human
caguguacgagcaacugucagcauuuuucugc

SEQ ID NO: 90272 - RNA, 32 nt, Human
caguguacguucucaccucuuaugcuuaguug

SEQ ID NO: 90273 - RNA, 32 nt, Human
caguguacucacuggucuccaucuuuaauaug

SEQ ID NO: 90274 - RNA, 32 nt, Human
caguguacuccuacuccagugcacccaggguu

SEQ ID NO: 90275 - RNA, 32 nt, Human
caguguacugaggguacuggccuagccaugug

SEQ ID NO: 90276 - RNA, 32 nt, Human
caguguagacaccucugucugccccacugucc

SEQ ID NO: 90277 - RNA, 32 nt, Human
caguguagaguggccagcagugaacagguuga

SEQ ID NO: 90278 - RNA, 32 nt, Human
caguguagcaauaaaaaucacaugucaguuca

SEQ ID NO: 90279 - RNA, 32 nt, Human
caguguagcuguuuuugguuucugagcuuaaa

SEQ ID NO: 90280 - RNA, 32 nt, Human
caguguaggaagcacagccagauccuauagga

SEQ ID NO: 90281 - RNA, 22 nt, Human
caguguaggcaacagagugaga

SEQ ID NO: 90282 - RNA, 32 nt, Human
caguguaguuccuggacacacagggaaauucu

SEQ ID NO: 90283 - RNA, 32 nt, Human
caguguauccaggguguuccaggugagcuggg

SEQ ID NO: 90284 - RNA, 32 nt, Human
caguguaugcaguaauuagaacaaagaagaaa

SEQ ID NO: 90285 - RNA, 32 nt, Human
caguguauguucuccugcucccuggacaaauc

SEQ ID NO: 90286 - RNA, 32 nt, Human
cagugucaacugccaugugcucugcuucaagg

SEQ ID NO: 90287 - RNA, 24 nt, Human
cagugucacaugccuguaaaccca

SEQ ID NO: 90288 - RNA, 32 nt, Human
cagugucacccagggugagugcaaaauaaaga

SEQ ID NO: 90289 - RNA, 32 nt, Human
cagugucaccucaguggaccagccugggggaa

SEQ ID NO: 90290 - RNA, 32 nt, Human
cagugucagcaacgcccuguccucagugccag

SEQ ID NO: 90291 - RNA, 32 nt, Human
cagugucagcaugacucucccacuuggaaaga

SEQ ID NO: 90292 - RNA, 32 nt, Human
cagugucaggccaccagcuuggacaggcagcu

SEQ ID NO: 90293 - RNA, 32 nt, Human
cagugucagguguggcugcugugggggcaggu

SEQ ID NO: 90294 - RNA, 32 nt, Human
cagugucaucacucagcuuacugggcugaggc

SEQ ID NO: 90295 - RNA, 32 nt, Human
cagugucauccagcccagaaaccaagaaggau

SEQ ID NO: 90296 - RNA, 32 nt, Human
cagugucaugcugucuuggggcagggugaaag

SEQ ID NO: 90297 - RNA, 32 nt, Human
caguguccaaaggcccccagaaugacacuuuu

SEQ ID NO: 90298 - RNA, 32 nt, Human
caguguccaccaacugaccaugaaauagagua

SEQ ID NO: 90299 - RNA, 27 nt, Human
caguguccacuugccagaauuucagcu

SEQ ID NO: 90300 - RNA, 32 nt, Human
caguguccagaagaagaccaaggacagaacag

SEQ ID NO: 90301 - RNA, 32 nt, Human
caguguccagccugguaucuggcaucccagua

SEQ ID NO: 90302 - RNA, 16 nt, Human
caguguccaggagaug

SEQ ID NO: 90303 - RNA, 32 nt, Human
caguguccagggaagcagaggcagcagcacag

SEQ ID NO: 90304 - RNA, 32 nt, Human
caguguccaguauaaugcagaauugcagagug

SEQ ID NO: 90305 - RNA, 32 nt, Human
cagugucccauucuaggauugucugaaggcca

SEQ ID NO: 90306 - RNA, 32 nt, Human
caguguccccuccaaacuucacacuucccugc

SEQ ID NO: 90307 - RNA, 32 nt, Human
caguguccccuccccuccaucucucuucccca

SEQ ID NO: 90308 - RNA, 32 nt, Human
cagugucccugccuggccaccaaagugccaac

SEQ ID NO: 90309 - RNA, 32 nt, Human
caguguccuaaguuccuuaacaaugcuuacca

SEQ ID NO: 90310 - RNA, 32 nt, Human
caguguccuagugcccaucgucuguuuccccg

SEQ ID NO: 90311 - RNA, 32 nt, Human
caguguccuccuccuucuccggccagacccag

SEQ ID NO: 90312 - RNA, 32 nt, Human
caguguccugagaagguggagcuagaguaugg

SEQ ID NO: 90313 - RNA, 32 nt, Human
caguguccuggaccccgcaggccuccgcucuc

SEQ ID NO: 90314 - RNA, 32 nt, Human
caguguccugugccagccuucaugcccagccc

SEQ ID NO: 90315 - RNA, 32 nt, Human
caguguccuuccuuucccagcagcagugcccu

SEQ ID NO: 90316 - RNA, 19 nt, Human
cagugucgcgccuguaauc

SEQ ID NO: 90317 - RNA, 22 nt, Human
cagugucgcgccuguaauccca

SEQ ID NO: 90318 - RNA, 32 nt, Human
cagugucuaagugcuucucuuguguccuguag

SEQ ID NO: 90319 - RNA, 32 nt, Human
cagugucuaggggugaguuucugugauuccca

SEQ ID NO: 90320 - RNA, 32 nt, Human
cagugucucaaggaaagguggaccuaggaacu

SEQ ID NO: 90321 - RNA, 21 nt, Human
cagugucucaugccucuaauc

SEQ ID NO: 90322 - RNA, 24 nt, Human
cagugucucaugccucuaauccca

SEQ ID NO: 90323 - RNA, 24 nt, Human
cagugucucaugccuguaauccca

SEQ ID NO: 90324 - RNA, 32 nt, Human
cagugucugcaggcguucagugcugcggagcc

SEQ ID NO: 90325 - RNA, 32 nt, Human
cagugucugcauucccaggagacccaggguga

SEQ ID NO: 90326 - RNA, 32 nt, Human
cagugucugcgucuaagagagcacuuuguugc

SEQ ID NO: 90327 - RNA, 32 nt, Human
cagugucugcuguauaucucucauuuuuccuc

SEQ ID NO: 90328 - RNA, 32 nt, Human
cagugucuggaucccagcaucuucuccacuuc

SEQ ID NO: 90329 - RNA, 32 nt, Human
cagugucugggagcaucuggcuuccucucccu

SEQ ID NO: 90330 - RNA, 32 nt, Human
cagugucuggguuuuucuugugguguaaagcu

SEQ ID NO: 90331 - RNA, 32 nt, Human
cagugucuguggggagcccaggaagcugcuca

SEQ ID NO: 90332 - RNA, 32 nt, Human
cagugucuguucucuggacauuucuuuucacc

SEQ ID NO: 90333 - RNA, 32 nt, Human
cagugucuuaccagccucucgcaccaugugau

SEQ ID NO: 90334 - RNA, 32 nt, Human
cagugucuucuaugaugagauggaugcccugu

SEQ ID NO: 90335 - RNA, 32 nt, Human
cagugucuugguguucacaaggccccagcaca

SEQ ID NO: 90336 - RNA, 32 nt, Human
cagugucuuucaaaugacuuucaucaaaugac

SEQ ID NO: 90337 - RNA, 24 nt, Human
cagugucuuucaccuguaauccca

SEQ ID NO: 90338 - RNA, 32 nt, Human
cagugugaacaacguggccaagcuucgacaau

SEQ ID NO: 90339 - RNA, 32 nt, Human
cagugugaacaagagaaaaacaggaauagaag

SEQ ID NO: 90340 - RNA, 17 nt, Human
cagugugacaugaggug

SEQ ID NO: 90341 - RNA, 32 nt, Human
cagugugaccucacccucuccagucaccccuc

SEQ ID NO: 90342 - RNA, 32 nt, Human
cagugugagccacucccuucuggcagaggccg

SEQ ID NO: 90343 - RNA, 32 nt, Human
cagugugaugcaggugacuacucugaaaguau

SEQ ID NO: 90344 - RNA, 32 nt, Human
cagugugauggaaacauucuccuuggcuuuac

SEQ ID NO: 90345 - RNA, 32 nt, Human
cagugugcaauggcugcacacagcagcuuccu

SEQ ID NO: 90346 - RNA, 32 nt, Human
cagugugcauucucuccagcugcaaacuuucu

SEQ ID NO: 90347 - RNA, 32 nt, Human
cagugugccaagaccucuccagcuucucauuc

SEQ ID NO: 90348 - RNA, 32 nt, Human
cagugugcccacuucuaagcagucuuugcuga

SEQ ID NO: 90349 - RNA, 32 nt, Human
cagugugcccaggauugaagguguaaauggga

SEQ ID NO: 90350 - RNA, 20 nt, Human
cagugugccccgugguguca

SEQ ID NO: 90351 - RNA, 32 nt, Human
cagugugccgggaaaagggaacgugguacuca

SEQ ID NO: 90352 - RNA, 32 nt, Human
cagugugccugggacagggcuuaccaccugcc

SEQ ID NO: 90353 - RNA, 32 nt, Human
cagugugcggacagaggagaccacucugcucc

SEQ ID NO: 90354 - RNA, 32 nt, Human
cagugugcuaucuccccacgacuaggucacua

SEQ ID NO: 90355 - RNA, 32 nt, Human
cagugugcugccuacaccuccaccuccuuccc

SEQ ID NO: 90356 - RNA, 23 nt, Human
cagugugcugggauuacaggcau

SEQ ID NO: 90357 - RNA, 23 nt, Human
cagugugcugggcuagccuguga

SEQ ID NO: 90358 - RNA, 32 nt, Human
cagugugcuguugcccuacacugccuuagaaa

SEQ ID NO: 90359 - RNA, 32 nt, Human
caguguggaagaacguguagaccccagaauga

SEQ ID NO: 90360 - RNA, 32 nt, Human
caguguggacggcgggagucuccucgcucccc

SEQ ID NO: 90361 - RNA, 31 nt, Human
caguguggcacaaucucagcucacugcaacc

SEQ ID NO: 90362 - RNA, 32 nt, Human
caguguggcacccacccaagguuuccaugcag

SEQ ID NO: 90363 - RNA, 32 nt, Human
caguguggccaacauggugaaaccccgucucu

SEQ ID NO: 90364 - RNA, 32 nt, Human
caguguggccaccacaccgcccugagcccucc

SEQ ID NO: 90365 - RNA, 32 nt, Human
caguguggccaugccagcuaguuggaccucac

SEQ ID NO: 90366 - RNA, 23 nt, Human
caguguggcccuggacgggacau

SEQ ID NO: 90367 - RNA, 32 nt, Human
caguguggccugccagacugagcccaggggug

SEQ ID NO: 90368 - RNA, 32 nt, Human
caguguggcugcaggcgguggugcagccuucc

SEQ ID NO: 90369 - RNA, 32 nt, Human
caguguggcuugggccuggugcugggaaccug

SEQ ID NO: 90370 - RNA, 32 nt, Human
cagugugggaccccugcugccaccucuccugg

SEQ ID NO: 90371 - RNA, 32 nt, Human
cagugugggccugaagcaggauuucccaaucu

SEQ ID NO: 90372 - RNA, 32 nt, Human
cagugugggccugggcucucuugggcuuuauc

SEQ ID NO: 90373 - RNA, 32 nt, Human
caguguggggaaaaggaagagagaucagauug

SEQ ID NO: 90374 - RNA, 32 nt, Human
cagugugggugcaggcgcaggugcaggcacag

SEQ ID NO: 90375 - RNA, 32 nt, Human
caguguggucucaaacuccugaccucaugauu

SEQ ID NO: 90376 - RNA, 32 nt, Human
cagugugguggaaucaguuuaaucagaaaaag

SEQ ID NO: 90377 - RNA, 32 nt, Human
cagugugguggcccugugucuccucaccucug

SEQ ID NO: 90378 - RNA, 18 nt, Human
cagugugguuacacagug

SEQ ID NO: 90379 - RNA, 32 nt, Human
cagugugguucacgccggggagcccagguuua

SEQ ID NO: 90380 - RNA, 19 nt, Human
cagugugguuugggaaaga

SEQ ID NO: 90381 - RNA, 20 nt, Human
caguguguaaagguguucaa

SEQ ID NO: 90382 - RNA, 32 nt, Human
caguguguaagaacaucuuuuugucuagguuu

SEQ ID NO: 90383 - RNA, 32 nt, Human
caguguguagcaaaguugaucucuccauguca

SEQ ID NO: 90384 - RNA, 32 nt, Human
caguguguaguuuguuucuguuguucacuugg

SEQ ID NO: 90385 - RNA, 32 nt, Human
caguguguccaccucagucacccuccagugug

SEQ ID NO: 90386 - RNA, 32 nt, Human
cagugugucccaaugacuuuccuuuacccucc

SEQ ID NO: 90387 - RNA, 16 nt, Human
caguguguccuccaca

SEQ ID NO: 90388 - RNA, 32 nt, Human
cagugugugagaggaggaggagagggagaauu

SEQ ID NO: 90389 - RNA, 32 nt, Human
cagugugugugagagaaagguagacagaaaag

SEQ ID NO: 90390 - RNA, 32 nt, Human
cagugugugugccgaagaaggcucccuggggc

SEQ ID NO: 90391 - RNA, 32 nt, Human
caguguguuucccuccugaucauaaagaugaa

SEQ ID NO: 90392 - RNA, 32 nt, Human
caguguguuugagcuggagugcugcgggcagc

SEQ ID NO: 90393 - RNA, 32 nt, Human
caguguuaacacagcagugauugucagcugcc

SEQ ID NO: 90394 - RNA, 32 nt, Human
caguguuacauuuggagagaagugugaaaucu

SEQ ID NO: 90395 - RNA, 32 nt, Human
caguguuaccccucaucaaccagcccagcagc

SEQ ID NO: 90396 - RNA, 32 nt, Human
caguguucaaaaccccagccaaugaccagcag

SEQ ID NO: 90397 - RNA, 32 nt, Human
caguguucaagaggauuaugggggaaagagau

SEQ ID NO: 90398 - RNA, 32 nt, Human
caguguuccccuuuagagagggugugugcugu

SEQ ID NO: 90399 - RNA, 23 nt, Human
caguguuccuagugugggccagg

SEQ ID NO: 90400 - RNA, 26 nt, Human
caguguuccuuauugacaguguucaa

SEQ ID NO: 90401 - RNA, 32 nt, Human
caguguucuacccaaaugcaaacgccucuccc

SEQ ID NO: 90402 - RNA, 32 nt, Human
caguguucucacccucuaggcccugugccugg

SEQ ID NO: 90403 - RNA, 32 nt, Human
caguguucuccucuggggccugauccaccucu

SEQ ID NO: 90404 - RNA, 18 nt, Human
caguguugccuccuccca

SEQ ID NO: 90405 - RNA, 32 nt, Human
caguguugcuaccagcaagaaugaagguugug

SEQ ID NO: 90406 - RNA, 32 nt, Human
caguguugcugcaaagugugugaccccagggu

SEQ ID NO: 90407 - RNA, 32 nt, Human
caguguuggaaccugcuuagaaccagguguga

SEQ ID NO: 90408 - RNA, 32 nt, Human
caguguuggagaugccauuuucaccuuuuuaa

SEQ ID NO: 90409 - RNA, 32 nt, Human
caguguuggugcuaaugaggccagggugcagg

SEQ ID NO: 90410 - RNA, 32 nt, Human
caguguuguaguuucugauacuuuaugucuuu

SEQ ID NO: 90411 - RNA, 32 nt, Human
caguguugugaguuggaagcuggggagcucgg

SEQ ID NO: 90412 - RNA, 32 nt, Human
caguguuguguccuccacucaggcuggggcuc

SEQ ID NO: 90413 - RNA, 32 nt, Human
caguguuuacuguaguguaucuuguacagaua

SEQ ID NO: 90414 - RNA, 32 nt, Human
caguguuuaugaaauugggaggaaggagaccc

SEQ ID NO: 90415 - RNA, 18 nt, Human
caguguuuccacggcugg

SEQ ID NO: 90416 - RNA, 32 nt, Human
caguguuucccuccccacuacuccuucuccuu

SEQ ID NO: 90417 - RNA, 32 nt, Human
caguguuucccugagucuuggcccaggagcug

SEQ ID NO: 90418 - RNA, 32 nt, Human
caguguuuccgucugcucaccugccacagagc

SEQ ID NO: 90419 - RNA, 32 nt, Human
caguguuugccucugugcuuccacuguggcuc

SEQ ID NO: 90420 - RNA, 32 nt, Human
caguguuugcugcccuugcugggggcggguag

SEQ ID NO: 90421 - RNA, 32 nt, Human
caguguuugcuucaggacuccaccuccucuac

SEQ ID NO: 90422 - RNA, 18 nt, Human
caguguuugucuuccaca

SEQ ID NO: 90423 - RNA, 32 nt, Human
caguguuugugucccuggguaguugagauuag

SEQ ID NO: 90424 - RNA, 21 nt, Human
caguguuuuaacuguguucaa

SEQ ID NO: 90425 - RNA, 32 nt, Human
caguguuuuagagauggcuuucccagugugug

SEQ ID NO: 90426 - RNA, 32 nt, Human
caguguuuuauaggagagauugggagaaauca

SEQ ID NO: 90427 - RNA, 22 nt, Human
caguguuuucuuuuuccagccc

SEQ ID NO: 90428 - RNA, 32 nt, Human
caguguuuugacuaugugaaccauauccaacu

SEQ ID NO: 90429 - RNA, 32 nt, Human
caguguuuuucagcagacggcugaugggacag

SEQ ID NO: 90430 - RNA, 24 nt, Human
caguguuuuucauauauguguuca

SEQ ID NO: 90431 - RNA, 32 nt, Human
caguuaaacaagcuuaggcuucucccaacuua

SEQ ID NO: 90432 - RNA, 32 nt, Human
caguuaacacaguuacaaagcuguaauggugu

SEQ ID NO: 90433 - RNA, 32 nt, Human
caguuaacucuaauucuuggcuguagcaucuu

SEQ ID NO: 90434 - RNA, 31 nt, Human
caguuaagaaugucucugccaagucgacaaa

SEQ ID NO: 90435 - RNA, 32 nt, Human
caguuaagagcagaugcaugcauuuugauaag

SEQ ID NO: 90436 - RNA, 32 nt, Human
caguuaagcagccgccacauccccgcuggcug

SEQ ID NO: 90437 - RNA, 21 nt, Human
caguuaagcugccugcagcag

SEQ ID NO: 90438 - RNA, 32 nt, Human
caguuaaggaugacacuucauucuguccccug

SEQ ID NO: 90439 - RNA, 32 nt, Human
caguuaaggccccauccaucugagcucugaau

SEQ ID NO: 90440 - RNA, 32 nt, Human
caguuaaggccucauccaucugagcucugaau

SEQ ID NO: 90441 - RNA, 32 nt, Human
caguuaaguguguuuagaagugaucagcuuga

SEQ ID NO: 90442 - RNA, 32 nt, Human
caguuaaguugggguuucuguuauuugcaacc

SEQ ID NO: 90443 - RNA, 32 nt, Human
caguuaauaacaguguaccacuauuggcucau

SEQ ID NO: 90444 - RNA, 32 nt, Human
caguuaaucucugaaaugcacaaaaccuagcu

SEQ ID NO: 90445 - RNA, 32 nt, Human
caguuaaugggguagaggagggcaugggaggg

SEQ ID NO: 90446 - RNA, 32 nt, Human
caguuaauuugcuagaguggcucacagaacuc

SEQ ID NO: 90447 - RNA, 32 nt, Human
caguuacaaccuagagagauuuugagccucau

SEQ ID NO: 90448 - RNA, 32 nt, Human
caguuacaagggcagagaagguaccagugcag

SEQ ID NO: 90449 - RNA, 32 nt, Human
caguuacaauuucgcugaaggcugaggcagga

SEQ ID NO: 90450 - RNA, 32 nt, Human
caguuacacauucgccuuuucuaggauugcau

SEQ ID NO: 90451 - RNA, 32 nt, Human
caguuacagaagcaggauuucuaggauuucua

SEQ ID NO: 90452 - RNA, 32 nt, Human
caguuacagagcagcgucuucuguguuuccuu

SEQ ID NO: 90453 - RNA, 32 nt, Human
caguuacaguguccuaagauacugcuaucauu

SEQ ID NO: 90454 - RNA, 32 nt, Human
caguuacauggcagaagagggagggagggagg

SEQ ID NO: 90455 - RNA, 32 nt, Human
caguuacccaacaaggacuguuucaaccucau

SEQ ID NO: 90456 - RNA, 32 nt, Human
caguuacccccaguaaccaacuccaggggcug

SEQ ID NO: 90457 - RNA, 32 nt, Human
caguuacccuugcagggggccagggagucaag

SEQ ID NO: 90458 - RNA, 32 nt, Human
caguuaccuaaccuauuucacaugggcguuuu

SEQ ID NO: 90459 - RNA, 32 nt, Human
caguuacucaguagcugaggcaggagaaucgc

SEQ ID NO: 90460 - RNA, 20 nt, Human
caguuacucaugucauugua

SEQ ID NO: 90461 - RNA, 31 nt, Human
caguuacucuuccggaagguuggagaagauu

SEQ ID NO: 90462 - RNA, 21 nt, Human
caguuacuggaggccgaaugg

SEQ ID NO: 90463 - RNA, 32 nt, Human
caguuacuggcaagagggagaaaggacgcugc

SEQ ID NO: 90464 - RNA, 32 nt, Human
caguuacuggcagaggaagaggaugaugauuu

SEQ ID NO: 90465 - RNA, 32 nt, Human
caguuacuuaccugcauguguuguacaauacc

SEQ ID NO: 90466 - RNA, 32 nt, Human
caguuacuugggaggcugagacaggauugcuu

SEQ ID NO: 90467 - RNA, 32 nt, Human
caguuagaaagaaaugcauucuagaaauaaca

SEQ ID NO: 90468 - RNA, 32 nt, Human
caguuagaggagaaaaaggaauggagcagagc

SEQ ID NO: 90469 - RNA, 32 nt, Human
caguuagccacugcaggcccucggugggacag

SEQ ID NO: 90470 - RNA, 32 nt, Human
caguuagccagcccacuccaacucucggaacc

SEQ ID NO: 90471 - RNA, 32 nt, Human
caguuagccaguuaguccccaggccuguggca

SEQ ID NO: 90472 - RNA, 32 nt, Human
caguuagcccggccaaggacacugaugggucc

SEQ ID NO: 90473 - RNA, 32 nt, Human
caguuagcuuuugcuguguaacaaaccauccc

SEQ ID NO: 90474 - RNA, 32 nt, Human
caguuaggcaguccugauguaucuguacauag

SEQ ID NO: 90475 - RNA, 32 nt, Human
caguuagucccuucucucuuccuugcuuucuc

SEQ ID NO: 90476 - RNA, 32 nt, Human
caguuaguuugauuacccugugcaaaaccuug

SEQ ID NO: 90477 - RNA, 32 nt, Human
caguuauaaagugaaucucagauagaaauuaa

SEQ ID NO: 90478 - RNA, 32 nt, Human
caguuauaagaaaggucagcauuggaaauuuc

SEQ ID NO: 90479 - RNA, 32 nt, Human
caguuauacacagaaacaaacacacacgcacg

SEQ ID NO: 90480 - RNA, 32 nt, Human
caguuaucaaaauugacuccagaagagagaaa

SEQ ID NO: 90481 - RNA, 32 nt, Human
caguuaucaaaauugacuccagaagagagaac

SEQ ID NO: 90482 - RNA, 32 nt, Human
caguuaucacagacuucacuggccuuaaugag

SEQ ID NO: 90483 - RNA, 32 nt, Human
caguuaucagggaaagagguugaugugaacuc

SEQ ID NO: 90484 - RNA, 32 nt, Human
caguuaucagguaaccaacaagaaaugcaagc

SEQ ID NO: 90485 - RNA, 32 nt, Human
caguuaugaaaugccaagaaauucuuuggcuu

SEQ ID NO: 90486 - RNA, 32 nt, Human
caguuaugaaguuuccccacaugugaagacag

SEQ ID NO: 90487 - RNA, 32 nt, Human
caguuaugauggugugggaugggagugcauag

SEQ ID NO: 90488 - RNA, 32 nt, Human
caguuaugcccaguucuucccgcuguggggac

SEQ ID NO: 90489 - RNA, 16 nt, Human
caguuauggagugcua

SEQ ID NO: 90490 - RNA, 32 nt, Human
caguuaugucccauuuuuaugaugccaaaagc

SEQ ID NO: 90491 - RNA, 32 nt, Human
caguuauuauauuuacaaaugggaaacaaaag

SEQ ID NO: 90492 - RNA, 32 nt, Human
caguucaaacgguuuuguuaaauaugaaacag

SEQ ID NO: 90493 - RNA, 32 nt, Human
caguucacaaaugaugcagagacagaguuaau

SEQ ID NO: 90494 - RNA, 32 nt, Human
caguucacagaauuaucugacuggcgaaguaa

SEQ ID NO: 90495 - RNA, 32 nt, Human
caguucacagagaauuuggggcucucuucaug

SEQ ID NO: 90496 - RNA, 32 nt, Human
caguucacaguuagacccacccccucugaaua

SEQ ID NO: 90497 - RNA, 32 nt, Human
caguucacccaauggacaaacucuuuuugauu

SEQ ID NO: 90498 - RNA, 32 nt, Human
caguucaccccucaccuccagccuggaggaga

SEQ ID NO: 90499 - RNA, 32 nt, Human
caguucacugcaaccuccacccugcagguuca

SEQ ID NO: 90500 - RNA, 32 nt, Human
caguucacugcaaccuccaccucccagguuca

SEQ ID NO: 90501 - RNA, 32 nt, Human
caguucacugcaaccuccacuuccuagguuca

SEQ ID NO: 90502 - RNA, 32 nt, Human
caguucacugcaaccucugccucccacguuca

SEQ ID NO: 90503 - RNA, 32 nt, Human
caguucacugcaaccucugccucccggguuca

SEQ ID NO: 90504 - RNA, 32 nt, Human
caguucacugcaaccucugccuccuaaguuca

SEQ ID NO: 90505 - RNA, 32 nt, Human
caguucacugcaaccucugccuccuggguuca

SEQ ID NO: 90506 - RNA, 32 nt, Human
caguucacugcaacuucugccucccgaguuca

SEQ ID NO: 90507 - RNA, 32 nt, Human
caguucacugcagccucgaccucccaggcuca

SEQ ID NO: 90508 - RNA, 32 nt, Human
caguucacugcagucucugccuccuugguuca

SEQ ID NO: 90509 - RNA, 32 nt, Human
caguucacugcugcuuucccuccugggcucaa

SEQ ID NO: 90510 - RNA, 32 nt, Human
caguucagaauccauugacucucugacuuacc

SEQ ID NO: 90511 - RNA, 32 nt, Human
caguucagagcugcccucuccugggcauggcc

SEQ ID NO: 90512 - RNA, 32 nt, Human
caguucagccuggaugaugagagugagacucc

SEQ ID NO: 90513 - RNA, 32 nt, Human
caguucaggaugggccacagggcgucaagcag

SEQ ID NO: 90514 - RNA, 32 nt, Human
caguucaggccuguugcuuaacuggggucacc

SEQ ID NO: 90515 - RNA, 32 nt, Human
caguucaggguucuuggauuugcucaagucca

SEQ ID NO: 90516 - RNA, 32 nt, Human
caguucagucuuuucaaaaugagggagaaaca

SEQ ID NO: 90517 - RNA, 32 nt, Human
caguucauccucagacauuguggagagcucaa

SEQ ID NO: 90518 - RNA, 32 nt, Human
caguucaugcaaccuccgccuccuggguucaa

SEQ ID NO: 90519 - RNA, 32 nt, Human
caguucaugccugugguuuuguguuuguuguu

SEQ ID NO: 90520 - RNA, 32 nt, Human
caguucauguuguacgugauggagauuugucu

SEQ ID NO: 90521 - RNA, 32 nt, Human
caguucauucauccuucucuccuuuccgcuca

SEQ ID NO: 90522 - RNA, 32 nt, Human
caguucauucccccaucuugcugccaagguac

SEQ ID NO: 90523 - RNA, 32 nt, Human
caguuccaacacaacaugaaggcaacaacaag

SEQ ID NO: 90524 - RNA, 32 nt, Human
caguuccaacuugugauuccugauagaacaga

SEQ ID NO: 90525 - RNA, 32 nt, Human
caguuccaauaacuaaccaacagguuauuaga

SEQ ID NO: 90526 - RNA, 32 nt, Human
caguuccaccccucagcuugaggaccaaugac

SEQ ID NO: 90527 - RNA, 32 nt, Human
caguuccaccugcugguagggguagguuggcu

SEQ ID NO: 90528 - RNA, 32 nt, Human
caguuccagaccacccuccaugcuccaccccc

SEQ ID NO: 90529 - RNA, 20 nt, Human
caguuccagagaccuggggg

SEQ ID NO: 90530 - RNA, 32 nt, Human
caguuccagccaaaggcuccucacaggcgcug

SEQ ID NO: 90531 - RNA, 32 nt, Human
caguuccagccuccucccuggucucaccagcu

SEQ ID NO: 90532 - RNA, 32 nt, Human
caguuccaggauucuuuguggccucuuccaca

SEQ ID NO: 90533 - RNA, 32 nt, Human
caguuccaggccagccagaaacuccugugucc

SEQ ID NO: 90534 - RNA, 32 nt, Human
caguuccaucuaggagggugccucuaggcccc

SEQ ID NO: 90535 - RNA, 32 nt, Human
caguuccauggacagguucuguuuucacuuuu

SEQ ID NO: 90536 - RNA, 32 nt, Human
caguuccauugugucaccacuaccucagcucc

SEQ ID NO: 90537 - RNA, 32 nt, Human
caguucccaaguguccaacaagaaggccuggu

SEQ ID NO: 90538 - RNA, 32 nt, Human
caguucccaggcugcaguugagggucuguccu

SEQ ID NO: 90539 - RNA, 32 nt, Human
caguucccagggacuguuuucaccucugcugu

SEQ ID NO: 90540 - RNA, 32 nt, Human
caguucccauuuuacagaugaaaacaagagga

SEQ ID NO: 90541 - RNA, 32 nt, Human
caguuccccaaagccuccuagagccucuggua

SEQ ID NO: 90542 - RNA, 32 nt, Human
caguucccccuccaagaagcaaguaccgaaac

SEQ ID NO: 90543 - RNA, 32 nt, Human
caguuccccugccucuugccccggcuaguuuc

SEQ ID NO: 90544 - RNA, 32 nt, Human
caguucccucauugcucuuuggacuaggcuga

SEQ ID NO: 90545 - RNA, 32 nt, Human
caguucccucgaggccaguguucagcaggauc

SEQ ID NO: 90546 - RNA, 22 nt, Human
caguucccugcacccagcaccu

SEQ ID NO: 90547 - RNA, 32 nt, Human
caguucccugcagccaaucaggcugaaaaugc

SEQ ID NO: 90548 - RNA, 32 nt, Human
caguucccugcugcaaccagcucuccgugaau

SEQ ID NO: 90549 - RNA, 18 nt, Human
caguucccuggggucccu

SEQ ID NO: 90550 - RNA, 32 nt, Human
caguucccuucccugcuguucuauuuccuuug

SEQ ID NO: 90551 - RNA, 32 nt, Human
caguucccuucucaggggcacacacauccaag

SEQ ID NO: 90552 - RNA, 32 nt, Human
caguucccuugacuucccuuuugagagcacac

SEQ ID NO: 90553 - RNA, 32 nt, Human
caguucccuugaucuuuucuucuugggggcug

SEQ ID NO: 90554 - RNA, 32 nt, Human
caguuccgaugccccuuccuggacaccguccc

SEQ ID NO: 90555 - RNA, 32 nt, Human
caguuccuacagcccuaggacccaagccaccc

SEQ ID NO: 90556 - RNA, 32 nt, Human
caguuccucaccccucucccugcuuucuuugu

SEQ ID NO: 90557 - RNA, 22 nt, Human
caguuccuccugacaccaggcu

SEQ ID NO: 90558 - RNA, 32 nt, Human
caguuccucgccucggugccaucagggaggag

SEQ ID NO: 90559 - RNA, 32 nt, Human
caguuccucuacugauucccuccaggcauaaa

SEQ ID NO: 90560 - RNA, 32 nt, Human
caguuccugcagccuggugcucugcccugcac

SEQ ID NO: 90561 - RNA, 32 nt, Human
caguuccugccuguugccucuugugagcucgg

SEQ ID NO: 90562 - RNA, 19 nt, Human
caguuccuggggcaagaag

SEQ ID NO: 90563 - RNA, 32 nt, Human
caguuccugugugaguucugucuucacagacu

SEQ ID NO: 90564 - RNA, 32 nt, Human
caguuccuucauuccuucuuccagaacaucug

SEQ ID NO: 90565 - RNA, 32 nt, Human
caguuccuucccacucagugcccacguuucag

SEQ ID NO: 90566 - RNA, 32 nt, Human
caguuccuuccucccuucaagagucagcuuag

SEQ ID NO: 90567 - RNA, 32 nt, Human
caguuccuucucuccauccuucgaccuucaca

SEQ ID NO: 90568 - RNA, 32 nt, Human
caguuccuuggguguggagcacuccccauuuc

SEQ ID NO: 90569 - RNA, 32 nt, Human
caguuccuuugcauguuucgggagagguuugu

SEQ ID NO: 90570 - RNA, 21 nt, Human
caguucgcacggccacagggg

SEQ ID NO: 90571 - RNA, 32 nt, Human
caguucgccguacuuccaucugcugggugccu

SEQ ID NO: 90572 - RNA, 32 nt, Human
caguucggcggccgcggcugggcccugcagga

SEQ ID NO: 90573 - RNA, 32 nt, Human
caguucgggaggcagaguuagguggaucaauu

SEQ ID NO: 90574 - RNA, 32 nt, Human
caguucuaacugcccuuccucccaggcccugg

SEQ ID NO: 90575 - RNA, 18 nt, Human
caguucuacagagugaga

SEQ ID NO: 90576 - RNA, 32 nt, Human
caguucucacauauggaaaggauacacacuuu

SEQ ID NO: 90577 - RNA, 32 nt, Human
caguucuccacugucucuucuggaccaggaau

SEQ ID NO: 90578 - RNA, 32 nt, Human
caguucucccucuauugcccaggcuggagugc

SEQ ID NO: 90579 - RNA, 32 nt, Human
caguucuccuccacaucucccaucccagaauc

SEQ ID NO: 90580 - RNA, 19 nt, Human
caguucuccuccccuagug

SEQ ID NO: 90581 - RNA, 32 nt, Human
caguucuccugccucaaccuccugaguagcug

SEQ ID NO: 90582 - RNA, 32 nt, Human
caguucuccugccucagccuccaaguagcugg

SEQ ID NO: 90583 - RNA, 32 nt, Human
caguucuccugccucagccucccaaauagcug

SEQ ID NO: 90584 - RNA, 32 nt, Human
caguucuccugccucagccucccgaguagcug

SEQ ID NO: 90585 - RNA, 32 nt, Human
caguucuccugccucagccuccugaguagcug

SEQ ID NO: 90586 - RNA, 32 nt, Human
caguucuccugccucagucuccugaguggcug

SEQ ID NO: 90587 - RNA, 32 nt, Human
caguucuccugggcuccagccuccugcaagga

SEQ ID NO: 90588 - RNA, 32 nt, Human
caguucucggccccggcuuucuuccaagaguu

SEQ ID NO: 90589 - RNA, 32 nt, Human
caguucucuaggggagaggccuggcauugcac

SEQ ID NO: 90590 - RNA, 32 nt, Human
caguucucuccucucggaagcugcagccauga

SEQ ID NO: 90591 - RNA, 32 nt, Human
caguucucuccugcaacccccacugcucagcc

SEQ ID NO: 90592 - RNA, 32 nt, Human
caguucucuugccucagccuccuggguagcug

SEQ ID NO: 90593 - RNA, 32 nt, Human
caguucugaaggagggugaggcggugggggau

SEQ ID NO: 90594 - RNA, 32 nt, Human
caguucugagccacagaugaggaaacucacau

SEQ ID NO: 90595 - RNA, 32 nt, Human
caguucugagccuccucgccucccggcucucc

SEQ ID NO: 90596 - RNA, 32 nt, Human
caguucugcauacauccaaccuuccguccuac

SEQ ID NO: 90597 - RNA, 17 nt, Human
caguucugcauggcugg

SEQ ID NO: 90598 - RNA, 18 nt, Human
caguucugccacccagga

SEQ ID NO: 90599 - RNA, 32 nt, Human
caguucugcgccuuggggccagccaguacuca

SEQ ID NO: 90600 - RNA, 32 nt, Human
caguucugcucauaaaccccuaccuggaguug

SEQ ID NO: 90601 - RNA, 32 nt, Human
caguucugcucucugcagcaacauaaguacaa

SEQ ID NO: 90602 - RNA, 32 nt, Human
caguucugcugcuguggcuucagcuuuggaag

SEQ ID NO: 90603 - RNA, 32 nt, Human
caguucuggaaccugggaaauccaaaggcaug

SEQ ID NO: 90604 - RNA, 32 nt, Human
caguucuggaggucaagagucugaaaugggcc

SEQ ID NO: 90605 - RNA, 30 nt, Human
caguucuggcccuuucagcuccuguuucag

SEQ ID NO: 90606 - RNA, 32 nt, Human
caguucugggagacaagaguugggccagguug

SEQ ID NO: 90607 - RNA, 32 nt, Human
caguucugggauuuggcccugggaagcagccc

SEQ ID NO: 90608 - RNA, 32 nt, Human
caguucuggggucccaaccuggguggaagguc

SEQ ID NO: 90609 - RNA, 32 nt, Human
caguucuguaggaacuaacgaacucccaagag

SEQ ID NO: 90610 - RNA, 32 nt, Human
caguucugucaucacugugaucuuuaaaaacc

SEQ ID NO: 90611 - RNA, 32 nt, Human
caguucuuaaccacugaauuucuaagacuguu

SEQ ID NO: 90612 - RNA, 22 nt, Human
caguucuuagcaaaugcaguua

SEQ ID NO: 90613 - RNA, 32 nt, Human
caguucuuaguguggcuguuuaaaguagaaaa

SEQ ID NO: 90614 - RNA, 32 nt, Human
caguucuuaucuuucaucuguuuccuagguaa

SEQ ID NO: 90615 - RNA, 32 nt, Human
caguucuucaauauauguucucuaauacuggc

SEQ ID NO: 90616 - RNA, 32 nt, Human
caguucuuccagcacagcgcuugagcucugcu

SEQ ID NO: 90617 - RNA, 32 nt, Human
caguucuuccuaucagcuucagugacccaggg

SEQ ID NO: 90618 - RNA, 32 nt, Human
caguucuucugucuccucuguuuggaagucca

SEQ ID NO: 90619 - RNA, 18 nt, Human
caguucuugcccuccaca

SEQ ID NO: 90620 - RNA, 32 nt, Human
caguucuuggcugccguccuguggcagcuuaa

SEQ ID NO: 90621 - RNA, 32 nt, Human
caguucuugguagguucugcugggcagaacau

SEQ ID NO: 90622 - RNA, 18 nt, Human
caguucuuuagggauaga

SEQ ID NO: 90623 - RNA, 32 nt, Human
caguucuuuucucugcugaaagaugucuugag

SEQ ID NO: 90624 - RNA, 32 nt, Human
caguucuuuuugaaaugaaaggugcuuuguuu

SEQ ID NO: 90625 - RNA, 32 nt, Human
caguugaacacagccaguuauucuuccauuau

SEQ ID NO: 90626 - RNA, 32 nt, Human
caguugaaccauuccacauucccaccagcaau

SEQ ID NO: 90627 - RNA, 32 nt, Human
caguugaagagauggggguagagaagacuuug

SEQ ID NO: 90628 - RNA, 32 nt, Human
caguugaaguggcuucuaaucccuggaucaua

SEQ ID NO: 90629 - RNA, 32 nt, Human
caguugaaugguuggagauugcuggcgaugug

SEQ ID NO: 90630 - RNA, 32 nt, Human
caguugacaagaaaauuuuauuauuuacagga

SEQ ID NO: 90631 - RNA, 18 nt, Human
caguugacagccuacaga

SEQ ID NO: 90632 - RNA, 32 nt, Human
caguugaccuucacagcaccugccccucacac

SEQ ID NO: 90633 - RNA, 32 nt, Human
caguugacuaaccaccaccaauggucaagaua

SEQ ID NO: 90634 - RNA, 32 nt, Human
caguugacucacuacagccucugccucccagg

SEQ ID NO: 90635 - RNA, 32 nt, Human
caguugacugguuuuguguccuguuugaacuu

SEQ ID NO: 90636 - RNA, 21 nt, Human
caguugacuugauuuugcaca

SEQ ID NO: 90637 - RNA, 32 nt, Human
caguugagaaacacuaagguuauggugaauaa

SEQ ID NO: 90638 - RNA, 32 nt, Human
caguugagagugagcgggguacaguaaggcag

SEQ ID NO: 90639 - RNA, 20 nt, Human
caguugagcugcgcuggcca

SEQ ID NO: 90640 - RNA, 32 nt, Human
caguugagcugcgcuggccagagaugccugcc

SEQ ID NO: 90641 - RNA, 32 nt, Human
caguugaggcaguagcuguguccucugagggu

SEQ ID NO: 90642 - RNA, 32 nt, Human
caguugauauuaucuuuacaaaugacuugacc

SEQ ID NO: 90643 - RNA, 32 nt, Human
caguugaugugguccuggauccagacaccgcu

SEQ ID NO: 90644 - RNA, 32 nt, Human
caguugauuuccccagguacauucauggugug

SEQ ID NO: 90645 - RNA, 32 nt, Human
caguugcacacguguacguaucagugggaagu

SEQ ID NO: 90646 - RNA, 32 nt, Human
caguugcacagugccucaagccccagaguggc

SEQ ID NO: 90647 - RNA, 32 nt, Human
caguugcaccaguuaacuguccuggccucagu

SEQ ID NO: 90648 - RNA, 32 nt, Human
caguugcagguguugggaggaagaugaaaucg

SEQ ID NO: 90649 - RNA, 24 nt, Human
caguugccaacaccuguaauccca

SEQ ID NO: 90650 - RNA, 32 nt, Human
caguugccaaccuguccuccacugcagccuca

SEQ ID NO: 90651 - RNA, 22 nt, Human
caguugccaaucuaaaagcaca

SEQ ID NO: 90652 - RNA, 32 nt, Human
caguugccacacauuccccaagcacaaaaggu

SEQ ID NO: 90653 - RNA, 32 nt, Human
caguugccagcccugcagcccccuuccccagg

SEQ ID NO: 90654 - RNA, 32 nt, Human
caguugccaugggguuuccuuccagauucgag

SEQ ID NO: 90655 - RNA, 32 nt, Human
caguugccauuuuucucucuaacugggcacca

SEQ ID NO: 90656 - RNA, 32 nt, Human
caguugcccaggcuggauugcgguggcgcugu

SEQ ID NO: 90657 - RNA, 32 nt, Human
caguugcccuggcaaacagaccuggcuggaag

SEQ ID NO: 90658 - RNA, 32 nt, Human
caguugccuacaguauucagugcaguaacaug

SEQ ID NO: 90659 - RNA, 32 nt, Human
caguugccuagacaacaggcccagggucagag

SEQ ID NO: 90660 - RNA, 32 nt, Human
caguugccuccagggccucuccuuggaagguc

SEQ ID NO: 90661 - RNA, 32 nt, Human
caguugccuguaauccuagcuacucaggaggc

SEQ ID NO: 90662 - RNA, 32 nt, Human
caguugccuuagggacagagacaaaggaaaug

SEQ ID NO: 90663 - RNA, 32 nt, Human
caguugccuuguuucugaucuuccugcaacua

SEQ ID NO: 90664 - RNA, 32 nt, Human
caguugccuuuuccucucacagaaggaagauu

SEQ ID NO: 90665 - RNA, 32 nt, Human
caguugccuuuuccuuucuuuagcuccuguuu

SEQ ID NO: 90666 - RNA, 24 nt, Human
caguugcucacaccgguaauccca

SEQ ID NO: 90667 - RNA, 21 nt, Human
caguugcucacgccuguaauc

SEQ ID NO: 90668 - RNA, 24 nt, Human
caguugcucacgccuguaauccca

SEQ ID NO: 90669 - RNA, 16 nt, Human
caguugcuccuucaca

SEQ ID NO: 90670 - RNA, 32 nt, Human
caguugcuccuucacauguucccacucucugu

SEQ ID NO: 90671 - RNA, 18 nt, Human
caguugcugggacggaag

SEQ ID NO: 90672 - RNA, 32 nt, Human
caguugcugucacaaaggagugagugaaacuc

SEQ ID NO: 90673 - RNA, 32 nt, Human
caguugcugucagucuugaccucugccuuugu

SEQ ID NO: 90674 - RNA, 32 nt, Human
caguugcuguguuucugccggaucagaugagc

SEQ ID NO: 90675 - RNA, 32 nt, Human
caguugcuuagguaugaauagggacuugcagu

SEQ ID NO: 90676 - RNA, 32 nt, Human
caguugcuucuaauuuuucuacaguuugcaca

SEQ ID NO: 90677 - RNA, 32 nt, Human
caguugcuucucagcucagcugugccaggauc

SEQ ID NO: 90678 - RNA, 32 nt, Human
caguugcuugcucuugugccuccugggcaagg

SEQ ID NO: 90679 - RNA, 32 nt, Human
caguuggaaaccagcuaauaguuucuuaaucu

SEQ ID NO: 90680 - RNA, 32 nt, Human
caguuggaaagcaggaggaaugcugacugguu

SEQ ID NO: 90681 - RNA, 32 nt, Human
caguuggaaaugcagaagggcacuugaguuuc

SEQ ID NO: 90682 - RNA, 32 nt, Human
caguuggaaccaggaacucugcugucagguug

SEQ ID NO: 90683 - RNA, 20 nt, Human
caguuggaaccuaugagaug

SEQ ID NO: 90684 - RNA, 32 nt, Human
caguuggagaaaauggaauugucuagccaaaa

SEQ ID NO: 90685 - RNA, 32 nt, Human
caguuggagagauuuuaaaaaugcaggaugag

SEQ ID NO: 90686 - RNA, 32 nt, Human
caguuggagagggggcuccaccagcuccacau

SEQ ID NO: 90687 - RNA, 32 nt, Human
caguuggaggcugcagugagcuaugauugugc

SEQ ID NO: 90688 - RNA, 32 nt, Human
caguuggagggaacuccaagucccacagugcc

SEQ ID NO: 90689 - RNA, 32 nt, Human
caguuggaggggcauggcuuccaauuuagaga

SEQ ID NO: 90690 - RNA, 32 nt, Human
caguuggauguucuugccucugacaguagcuu

SEQ ID NO: 90691 - RNA, 32 nt, Human
caguuggccauggcugaggaauuugugacccu

SEQ ID NO: 90692 - RNA, 32 nt, Human
caguuggccgacccgugucacucccuggcugu

SEQ ID NO: 90693 - RNA, 32 nt, Human
caguuggccucccugguucugcagagggccag

SEQ ID NO: 90694 - RNA, 32 nt, Human
caguugggaagauacaggcgugcgaggggcac

SEQ ID NO: 90695 - RNA, 25 nt, Human
caguugggcccagaacccucugggg

SEQ ID NO: 90696 - RNA, 32 nt, Human
caguugggcugaaucuccuuccucccacuggc

SEQ ID NO: 90697 - RNA, 32 nt, Human
caguuggggaacaccagaggcuacacaguagc

SEQ ID NO: 90698 - RNA, 32 nt, Human
caguugggguucacccuucaucccucacauuu

SEQ ID NO: 90699 - RNA, 32 nt, Human
caguugggucaccacuuaagucaacacaggcc

SEQ ID NO: 90700 - RNA, 32 nt, Human
caguugguuggcaaccccuuccucacucaccc

SEQ ID NO: 90701 - RNA, 32 nt, Human
caguuguaauagugccaagcaggccugauucu

SEQ ID NO: 90702 - RNA, 32 nt, Human
caguuguagcuugccagcucccaacacccuuc

SEQ ID NO: 90703 - RNA, 32 nt, Human
caguuguagucaugagugauccuucauauuuu

SEQ ID NO: 90704 - RNA, 32 nt, Human
caguugucaccaacagucuuucugcaaagggc

SEQ ID NO: 90705 - RNA, 32 nt, Human
caguugucacucacuccucucucccucccaag

SEQ ID NO: 90706 - RNA, 17 nt, Human
caguugucaggagucug

SEQ ID NO: 90707 - RNA, 32 nt, Human
caguugucauugccaugacaaggccucuaucu

SEQ ID NO: 90708 - RNA, 32 nt, Human
caguuguccuaucacaguuauauuagaaauaa

SEQ ID NO: 90709 - RNA, 32 nt, Human
caguuguccugaucuucucuugcagugucccu

SEQ ID NO: 90710 - RNA, 32 nt, Human
caguugugagccaagauuguaaccagagagca

SEQ ID NO: 90711 - RNA, 32 nt, Human
caguugugcauugggauggguggagaaagacg

SEQ ID NO: 90712 - RNA, 23 nt, Human
caguuguggaauucaguuuuuca

SEQ ID NO: 90713 - RNA, 18 nt, Human
caguuguggaccaugaga

SEQ ID NO: 90714 - RNA, 32 nt, Human
caguuguggccauuccagaggacucuuuaguc

SEQ ID NO: 90715 - RNA, 32 nt, Human
caguugugugcaaaggcaaggcuugcuuuucc

SEQ ID NO: 90716 - RNA, 32 nt, Human
caguuguguucugugagcuagcacuuuuuccu

SEQ ID NO: 90717 - RNA, 32 nt, Human
caguuguuccagggagcuucuaccuggaaaag

SEQ ID NO: 90718 - RNA, 32 nt, Human
caguuguuucaccguaaccucugccuccugac

SEQ ID NO: 90719 - RNA, 32 nt, Human
caguuguuuuugaaauuuaacuuuuguuugua

SEQ ID NO: 90720 - RNA, 32 nt, Human
caguuguuuuuguguggaaucuugucuuuccg

SEQ ID NO: 90721 - RNA, 19 nt, Human
caguuuaaagaccucuaua

SEQ ID NO: 90722 - RNA, 32 nt, Human
caguuuaagggugggagucuggagccagacag

SEQ ID NO: 90723 - RNA, 21 nt, Human
caguuuaagguauauggcugg

SEQ ID NO: 90724 - RNA, 31 nt, Human
caguuuacauuucugauacaugcagauagca

SEQ ID NO: 90725 - RNA, 32 nt, Human
caguuuacccuggcuuuccuuuaagcagaggg

SEQ ID NO: 90726 - RNA, 32 nt, Human
caguuuacugauuucucaaaagcugcaccuaa

SEQ ID NO: 90727 - RNA, 32 nt, Human
caguuuacuugguuucccuugugcagccuggg

SEQ ID NO: 90728 - RNA, 32 nt, Human
caguuuacuugucugccuuccuuuccaagacc

SEQ ID NO: 90729 - RNA, 32 nt, Human
caguuuagaacugcaggagcucccugcugccu

SEQ ID NO: 90730 - RNA, 32 nt, Human
caguuuagagucaggacagaaaagcuuccaua

SEQ ID NO: 90731 - RNA, 32 nt, Human
caguuuagcaggcugguguuaaggcuguagga

SEQ ID NO: 90732 - RNA, 21 nt, Human
caguuuagcuccugacuccca

SEQ ID NO: 90733 - RNA, 32 nt, Human
caguuuagggggaaugcccccgacccuugaug

SEQ ID NO: 90734 - RNA, 31 nt, Human
caguuuaguauaauuccucucacuuacugaa

SEQ ID NO: 90735 - RNA, 32 nt, Human
caguuuaguucagaauggaaacgaacguucug

SEQ ID NO: 90736 - RNA, 24 nt, Human
caguuuauacagcagacugaagaa

SEQ ID NO: 90737 - RNA, 32 nt, Human
caguuuaugagcugccccggcuugucuggaca

SEQ ID NO: 90738 - RNA, 32 nt, Human
caguuuaugcaacuucugccuccccagguuca

SEQ ID NO: 90739 - RNA, 32 nt, Human
caguuuauugauuucaaauugucugguacuau

SEQ ID NO: 90740 - RNA, 32 nt, Human
caguuucaaccucccagauuccagucauccuc

SEQ ID NO: 90741 - RNA, 32 nt, Human
caguuucaagaagauauacucagagaacacau

SEQ ID NO: 90742 - RNA, 24 nt, Human
caguuucaagcgauucuccugccu

SEQ ID NO: 90743 - RNA, 31 nt, Human
caguuucacagcuaccugcagaggcagagcg

SEQ ID NO: 90744 - RNA, 32 nt, Human
caguuucacaguagcugggaugcauggaugac

SEQ ID NO: 90745 - RNA, 32 nt, Human
caguuucaccucuuugcucccugaguucacuc

SEQ ID NO: 90746 - RNA, 32 nt, Human
caguuucacuaucuccaaagcauuugcaucau

SEQ ID NO: 90747 - RNA, 32 nt, Human
caguuucagauugaaugucugucuugcaggca

SEQ ID NO: 90748 - RNA, 32 nt, Human
caguuucagauuuacucugaaauguggagcau

SEQ ID NO: 90749 - RNA, 32 nt, Human
caguuucauccccuuucucuccuuccauggau

SEQ ID NO: 90750 - RNA, 32 nt, Human
caguuucaugcuguggaaagagggugaaaagg

SEQ ID NO: 90751 - RNA, 32 nt, Human
caguuucauucacuaccauuguuuccaaauua

SEQ ID NO: 90752 - RNA, 32 nt, Human
caguuucauuucugucuugcuggucuauuagu

SEQ ID NO: 90753 - RNA, 32 nt, Human
caguuuccacugcaguggcuggagagugaccu

SEQ ID NO: 90754 - RNA, 32 nt, Human
caguuuccagagagccagagagugagagagag

SEQ ID NO: 90755 - RNA, 32 nt, Human
caguuuccaggcagagagaagcagcucugggc

SEQ ID NO: 90756 - RNA, 22 nt, Human
caguuuccaguuucccuugcca

SEQ ID NO: 90757 - RNA, 17 nt, Human
caguuucccauggcugg

SEQ ID NO: 90758 - RNA, 32 nt, Human
caguuucccaugugcuuacaggccaguaagcu

SEQ ID NO: 90759 - RNA, 21 nt, Human
caguuuccccauuuuggccag

SEQ ID NO: 90760 - RNA, 32 nt, Human
caguuucccgagagauaugaccugaaacauga

SEQ ID NO: 90761 - RNA, 32 nt, Human
caguuucccuccugccacgaaagcucgagacu

SEQ ID NO: 90762 - RNA, 32 nt, Human
caguuucccuuuucucucugacuuguccuagg

SEQ ID NO: 90763 - RNA, 32 nt, Human
caguuuccuccaacuccugguucagccauugc

SEQ ID NO: 90764 - RNA, 17 nt, Human
caguuuccuccuccaca

SEQ ID NO: 90765 - RNA, 21 nt, Human
caguuucgacuccucucugca

SEQ ID NO: 90766 - RNA, 32 nt, Human
caguuucgugugccaccaugccuggcuaauuu

SEQ ID NO: 90767 - RNA, 32 nt, Human
caguuucuagcacaaaauaggcaccuaaucaa

SEQ ID NO: 90768 - RNA, 32 nt, Human
caguuucuauggugaaauggcagaagguaaca

SEQ ID NO: 90769 - RNA, 32 nt, Human
caguuucucaacagaugguuucaguggcucag

SEQ ID NO: 90770 - RNA, 32 nt, Human
caguuucucaccaaagugcaagccgcugaccu

SEQ ID NO: 90771 - RNA, 32 nt, Human
caguuucucauggccuguuuauguccaaauuu

SEQ ID NO: 90772 - RNA, 32 nt, Human
caguuucuccugcacuguuuucaccuuuggcc

SEQ ID NO: 90773 - RNA, 32 nt, Human
caguuucucugccuucuuccaggaucaggggu

SEQ ID NO: 90774 - RNA, 32 nt, Human
caguuucugaaauguaagcauuacaugacuau

SEQ ID NO: 90775 - RNA, 32 nt, Human
caguuucugagugacccaggaacagaucagaa

SEQ ID NO: 90776 - RNA, 32 nt, Human
caguuucugccaccccacucuccaggccaguu

SEQ ID NO: 90777 - RNA, 32 nt, Human
caguuucugccucuggaagccuaaaacugcuu

SEQ ID NO: 90778 - RNA, 32 nt, Human
caguuucugcucccuuccaucucucucccaua

SEQ ID NO: 90779 - RNA, 32 nt, Human
caguuucuggaaaaaguugaugcuaaugaggc

SEQ ID NO: 90780 - RNA, 18 nt, Human
caguuucuggacaggaag

SEQ ID NO: 90781 - RNA, 32 nt, Human
caguuucugggaagcaauugaaacacuauuaa

SEQ ID NO: 90782 - RNA, 32 nt, Human
caguuucuggggagcuuccaagagcacccacc

SEQ ID NO: 90783 - RNA, 32 nt, Human
caguuucuucauacuucugucacuuuuuccau

SEQ ID NO: 90784 - RNA, 32 nt, Human
caguuucuucuuuuaauucaucauugacacag

SEQ ID NO: 90785 - RNA, 32 nt, Human
caguuucuugaagcacuccuguccucaucccu

SEQ ID NO: 90786 - RNA, 32 nt, Human
caguuucuuggguaauggaaaacauuaccuag

SEQ ID NO: 90787 - RNA, 32 nt, Human
caguuucuuguccugggcccucaggucagccu

SEQ ID NO: 90788 - RNA, 32 nt, Human
caguuugaaaccauuucacucagguaaaaugc

SEQ ID NO: 90789 - RNA, 32 nt, Human
caguuugaacuuggcgggccagaugugggcgg

SEQ ID NO: 90790 - RNA, 18 nt, Human
caguuugacauccuccac

SEQ ID NO: 90791 - RNA, 32 nt, Human
caguuugacccccggaggcugcagugaggacg

SEQ ID NO: 90792 - RNA, 22 nt, Human
caguuugagaaaagcaucugca

SEQ ID NO: 90793 - RNA, 21 nt, Human
caguuugagcaacagaucaag

SEQ ID NO: 90794 - RNA, 32 nt, Human
caguuugagcugggaucucugaaugcaagggu

SEQ ID NO: 90795 - RNA, 32 nt, Human
caguuugaggccagagaggugaguggaccuga

SEQ ID NO: 90796 - RNA, 21 nt, Human
caguuugaggcuccccuggga

SEQ ID NO: 90797 - RNA, 32 nt, Human
caguuugauucuguaaugagcacagcaccuaa

SEQ ID NO: 90798 - RNA, 32 nt, Human
caguuugcaaccccaaaccacauuagaagucu

SEQ ID NO: 90799 - RNA, 32 nt, Human
caguuugcaagugccaucugcacuguggggga

SEQ ID NO: 90800 - RNA, 32 nt, Human
caguuugcacauagaaaaagcaucugagccac

SEQ ID NO: 90801 - RNA, 32 nt, Human
caguuugcaccccaggcaaagcagagagcaga

SEQ ID NO: 90802 - RNA, 32 nt, Human
caguuugcagaguaggggucugucuuuuaaac

SEQ ID NO: 90803 - RNA, 32 nt, Human
caguuugcaggaaggucauguggugugcaccu

SEQ ID NO: 90804 - RNA, 32 nt, Human
caguuugcagugagcugagaucacgccacugc

SEQ ID NO: 90805 - RNA, 32 nt, Human
caguuugcaugggcugaguuauaccagcuaga

SEQ ID NO: 90806 - RNA, 32 nt, Human
caguuugcccaggaacugggggaucauauaug

SEQ ID NO: 90807 - RNA, 32 nt, Human
caguuugcccccaucccucccagugcuggcuc

SEQ ID NO: 90808 - RNA, 32 nt, Human
caguuugcguaugugugguugcucugggaagc

SEQ ID NO: 90809 - RNA, 32 nt, Human
caguuugcucaccucuuggggcauuuuguaau

SEQ ID NO: 90810 - RNA, 32 nt, Human
caguuugcuccccuccugaugcccucugguaa

SEQ ID NO: 90811 - RNA, 20 nt, Human
caguuuggaaacuccggcgg

SEQ ID NO: 90812 - RNA, 32 nt, Human
caguuuggaagaccgaggcggguggaucacuu

SEQ ID NO: 90813 - RNA, 32 nt, Human
caguuuggacaaggagcuucaaaacucggcca

SEQ ID NO: 90814 - RNA, 32 nt, Human
caguuuggacaggguggcuggauuguauaucu

SEQ ID NO: 90815 - RNA, 22 nt, Human
caguuuggacuacagagugaga

SEQ ID NO: 90816 - RNA, 32 nt, Human
caguuuggagacagaaaaagacaaaaggucca

SEQ ID NO: 90817 - RNA, 32 nt, Human
caguuuggauccuacaagcaagcugaauggag

SEQ ID NO: 90818 - RNA, 19 nt, Human
caguuuggaucuggccugg

SEQ ID NO: 90819 - RNA, 18 nt, Human
caguuuggcaaacgcuua

SEQ ID NO: 90820 - RNA, 21 nt, Human
caguuuggcaacagagugaga

SEQ ID NO: 90821 - RNA, 18 nt, Human
caguuuggcagcuauaga

SEQ ID NO: 90822 - RNA, 32 nt, Human
caguuuggcaucugcaguacaccaagcacaug

SEQ ID NO: 90823 - RNA, 17 nt, Human
caguuuggccaggggug

SEQ ID NO: 90824 - RNA, 18 nt, Human
caguuuggcccagccugg

SEQ ID NO: 90825 - RNA, 32 nt, Human
caguuuggcggggacggggcuuggggguuuuc

SEQ ID NO: 90826 - RNA, 19 nt, Human
caguuuggcuuccggaagg

SEQ ID NO: 90827 - RNA, 16 nt, Human
caguuuggcuucucug

SEQ ID NO: 90828 - RNA, 18 nt, Human
caguuuggcuucuguuug

SEQ ID NO: 90829 - RNA, 19 nt, Human
caguuuggcuuugggauug

SEQ ID NO: 90830 - RNA, 32 nt, Human
caguuugggaaggugauggguauuaguggggg

SEQ ID NO: 90831 - RNA, 32 nt, Human
caguuugggaggccgaggcagguggaucaccu

SEQ ID NO: 90832 - RNA, 32 nt, Human
caguuugggaggcugaggcaggaggaucgcuu

SEQ ID NO: 90833 - RNA, 32 nt, Human
caguuugggaggcugaggcgggcggaucacca

SEQ ID NO: 90834 - RNA, 32 nt, Human
caguuugggaggcugaggcuaguggaucaugu

SEQ ID NO: 90835 - RNA, 32 nt, Human
caguuugggaggcugaguugggcagaucaccu

SEQ ID NO: 90836 - RNA, 32 nt, Human
caguuugggaucccaugagagagggguccuug

SEQ ID NO: 90837 - RNA, 16 nt, Human
caguuugggaugguug

SEQ ID NO: 90838 - RNA, 32 nt, Human
caguuugggcaacagaaugaggcuccaucuca

SEQ ID NO: 90839 - RNA, 32 nt, Human
caguuugggcucuccccuugccaccggcucug

SEQ ID NO: 90840 - RNA, 32 nt, Human
caguuugggggaucaaggcugagccauucuug

SEQ ID NO: 90841 - RNA, 18 nt, Human
caguuugggggcggccgg

SEQ ID NO: 90842 - RNA, 18 nt, Human
caguuuggguggggcugg

SEQ ID NO: 90843 - RNA, 32 nt, Human
caguuuggguggggcuggaggagcaggggugc

SEQ ID NO: 90844 - RNA, 18 nt, Human
caguuugguauaacgugg

SEQ ID NO: 90845 - RNA, 32 nt, Human
caguuuggucucagugacugaaaacucaaccc

SEQ ID NO: 90846 - RNA, 19 nt, Human
caguuugguggauuggugg

SEQ ID NO: 90847 - RNA, 20 nt, Human
caguuugguguguccuccgc

SEQ ID NO: 90848 - RNA, 32 nt, Human
caguuugguuacaggacuucugugcauuguaa

SEQ ID NO: 90849 - RNA, 32 nt, Human
caguuuguacaguaugaccuauaugugaccau

SEQ ID NO: 90850 - RNA, 32 nt, Human
caguuuguauacugacagguccuuccagucuc

SEQ ID NO: 90851 - RNA, 32 nt, Human
caguuuguauccaccugcuuucagaggaggaa

SEQ ID NO: 90852 - RNA, 32 nt, Human
caguuuguauuuuuauaaguaucuagaccaaa

SEQ ID NO: 90853 - RNA, 32 nt, Human
caguuugucacccaggcuggagugcaguggca

SEQ ID NO: 90854 - RNA, 32 nt, Human
caguuugucacccaggcuggagugcuguggug

SEQ ID NO: 90855 - RNA, 32 nt, Human
caguuuguccaauuaaagcuucagagguaaca

SEQ ID NO: 90856 - RNA, 18 nt, Human
caguuugugcaugaggug

SEQ ID NO: 90857 - RNA, 32 nt, Human
caguuugugcggcagauugcucugccaagaua

SEQ ID NO: 90858 - RNA, 32 nt, Human
caguuugugcuauuucauaucuguacuccagg

SEQ ID NO: 90859 - RNA, 32 nt, Human
caguuuguggaagucccaggcaaucacugugu

SEQ ID NO: 90860 - RNA, 32 nt, Human
caguuuguucucucagaacccagaaucuuuga

SEQ ID NO: 90861 - RNA, 32 nt, Human
caguuuguuggacauuuuacagcuucaccagg

SEQ ID NO: 90862 - RNA, 32 nt, Human
caguuuguuuuuaccucugccuccugguuuuc

SEQ ID NO: 90863 - RNA, 32 nt, Human
caguuuuaagcagguauagugcaggcuuguua

SEQ ID NO: 90864 - RNA, 21 nt, Human
caguuuuaauugaagcaugau

SEQ ID NO: 90865 - RNA, 32 nt, Human
caguuuuaccaaaagaaaaauuugaaaauuuc

SEQ ID NO: 90866 - RNA, 32 nt, Human
caguuuuaccucuucucucucaguucuacacu

SEQ ID NO: 90867 - RNA, 32 nt, Human
caguuuuacucaucacuucuucaugacaccaa

SEQ ID NO: 90868 - RNA, 32 nt, Human
caguuuuacugauguucugggugggggacaga

SEQ ID NO: 90869 - RNA, 32 nt, Human
caguuuuagaauaaggaggaggagggagaaga

SEQ ID NO: 90870 - RNA, 32 nt, Human
caguuuuagcuuauuuuucccucuuuuguuca

SEQ ID NO: 90871 - RNA, 32 nt, Human
caguuuuagucacugugaaauauuucacauuc

SEQ ID NO: 90872 - RNA, 20 nt, Human
caguuuuagugauucuccau

SEQ ID NO: 90873 - RNA, 18 nt, Human
caguuuuaguucuuuaua

SEQ ID NO: 90874 - RNA, 32 nt, Human
caguuuuaucugcuucaaaaugccauugauca

SEQ ID NO: 90875 - RNA, 32 nt, Human
caguuuucaaauuauaaucucauuucaauuua

SEQ ID NO: 90876 - RNA, 32 nt, Human
caguuuucacacugugcacacucuggaaaugu

SEQ ID NO: 90877 - RNA, 32 nt, Human
caguuuucacagugacuaccauuuccacccaa

SEQ ID NO: 90878 - RNA, 32 nt, Human
caguuuucagauuuuguaucaugccauccauc

SEQ ID NO: 90879 - RNA, 32 nt, Human
caguuuucaggcuaauacagaaaaagaugaac

SEQ ID NO: 90880 - RNA, 32 nt, Human
caguuuucauuugguucauuaauucuauaagg

SEQ ID NO: 90881 - RNA, 32 nt, Human
caguuuucuaguccuauaaauuuggggcuauc

SEQ ID NO: 90882 - RNA, 32 nt, Human
caguuuucucaaaucaacaaacagccuucucc

SEQ ID NO: 90883 - RNA, 32 nt, Human
caguuuucuccuaacacgugccaagcccagga

SEQ ID NO: 90884 - RNA, 32 nt, Human
caguuuucuccuccucacuaggcuguguuuuu

SEQ ID NO: 90885 - RNA, 32 nt, Human
caguuuucuccuccucacuagucuguggcuuu

SEQ ID NO: 90886 - RNA, 32 nt, Human
caguuuucuccucugcuucuuugccucccuca

SEQ ID NO: 90887 - RNA, 16 nt, Human
caguuuucucuccaca

SEQ ID NO: 90888 - RNA, 32 nt, Human
caguuuucuggcuuacuguguuacuugccuag

SEQ ID NO: 90889 - RNA, 32 nt, Human
caguuuucuguccaccccuccuguuccucugc

SEQ ID NO: 90890 - RNA, 32 nt, Human
caguuuucuuaccuuugccugcccugccuuuc

SEQ ID NO: 90891 - RNA, 32 nt, Human
caguuuugacagaauaauucuuggucuucccc

SEQ ID NO: 90892 - RNA, 18 nt, Human
caguuuugaccaaucgca

SEQ ID NO: 90893 - RNA, 17 nt, Human
caguuuugaccucuuca

SEQ ID NO: 90894 - RNA, 32 nt, Human
caguuuugagcagaggugaggcagaauccacu

SEQ ID NO: 90895 - RNA, 32 nt, Human
caguuuugagccuugccucaggccuggugagu

SEQ ID NO: 90896 - RNA, 19 nt, Human
caguuuugaguuuucuaca

SEQ ID NO: 90897 - RNA, 32 nt, Human
caguuuugcccagaugugcuagaauggggcug

SEQ ID NO: 90898 - RNA, 32 nt, Human
caguuuuggugaagcaggagaugcaccccaca

SEQ ID NO: 90899 - RNA, 32 nt, Human
caguuuugucucucauccauacacugggguuu

SEQ ID NO: 90900 - RNA, 32 nt, Human
caguuuugugguugaggggccuggagaaaauc

SEQ ID NO: 90901 - RNA, 32 nt, Human
caguuuugugugugugcguguguguaaaugug

SEQ ID NO: 90902 - RNA, 32 nt, Human
caguuuuguucacgccaagcagccuugguuag

SEQ ID NO: 90903 - RNA, 32 nt, Human
caguuuuguugacuuaaaaauaugagauacau

SEQ ID NO: 90904 - RNA, 21 nt, Human
caguuuuguuuccuuuuuaca

SEQ ID NO: 90905 - RNA, 22 nt, Human
caguuuuuaacuuaagccugau

SEQ ID NO: 90906 - RNA, 18 nt, Human
caguuuuuagccuuuaca

SEQ ID NO: 90907 - RNA, 32 nt, Human
caguuuuucagcaacuaaggugccucauguuc

SEQ ID NO: 90908 - RNA, 32 nt, Human
caguuuuucaucugcacugccaugucugagug

SEQ ID NO: 90909 - RNA, 32 nt, Human
caguuuuuccaaagucaagagucuuaaccuug

SEQ ID NO: 90910 - RNA, 32 nt, Human
caguuuuuccacggaugggugacaggggaugg

SEQ ID NO: 90911 - RNA, 32 nt, Human
caguuuuugacuuuuccaugugagaauaaggc

SEQ ID NO: 90912 - RNA, 32 nt, Human
caguuuuugauagcacaucuacaugcaucugc

SEQ ID NO: 90913 - RNA, 25 nt, Human
caguuuuuuaaacaaaugaguggaa

SEQ ID NO: 90914 - RNA, 20 nt, Human
caguuuuuuaaagcaacugu

SEQ ID NO: 90915 - RNA, 32 nt, Human
cauaaaaaccccacagugacacacacaaaaga

SEQ ID NO: 90916 - RNA, 32 nt, Human
cauaaaaagauaccuggucugccuuguacaag

SEQ ID NO: 90917 - RNA, 32 nt, Human
cauaaaaaggcagagcuggccaggcacagugg

SEQ ID NO: 90918 - RNA, 32 nt, Human
cauaaaaauuuucugagguuguccucauugau

SEQ ID NO: 90919 - RNA, 32 nt, Human
cauaaaacacuaacuuuuaaaaggaauaaacg

SEQ ID NO: 90920 - RNA, 32 nt, Human
cauaaaacagcauuugcguuuauugagagaga

SEQ ID NO: 90921 - RNA, 32 nt, Human
cauaaaacauaguguaucuaugcaguuuauau

SEQ ID NO: 90922 - RNA, 32 nt, Human
cauaaaacuucugauuucucuucagcuuugaa

SEQ ID NO: 90923 - RNA, 24 nt, Human
cauaaaagaaaauaaaaugacaua

SEQ ID NO: 90924 - RNA, 32 nt, Human
cauaaaagaagaggcgaguagggcacaacagg

SEQ ID NO: 90925 - RNA, 32 nt, Human
cauaaaagacaacuuggcuucugaggauggug

SEQ ID NO: 90926 - RNA, 32 nt, Human
cauaaaagacccagacucagcugcagugagga

SEQ ID NO: 90927 - RNA, 32 nt, Human
cauaaaagauggaaagaaaacacacaccgaag

SEQ ID NO: 90928 - RNA, 32 nt, Human
cauaaaaggcaaagaggagcuggcaugguggu

SEQ ID NO: 90929 - RNA, 32 nt, Human
cauaaaagugcucuccugccugggcagcaaca

SEQ ID NO: 90930 - RNA, 32 nt, Human
cauaaaaguugaaugaaagaagccaggccgaa

SEQ ID NO: 90931 - RNA, 22 nt, Human
cauaaaauaaaaguacauuuua

SEQ ID NO: 90932 - RNA, 32 nt, Human
cauaaaauaacccagacauacucucauauuuc

SEQ ID NO: 90933 - RNA, 32 nt, Human
cauaaaauacaaaaauuagcugggcguggugg

SEQ ID NO: 90934 - RNA, 32 nt, Human
cauaaaaucaccucgggucacauagcgagagu

SEQ ID NO: 90935 - RNA, 24 nt, Human
cauaaaaucuucgcucacucugca

SEQ ID NO: 90936 - RNA, 32 nt, Human
cauaaaaugcucauaguuugggagaggaaaga

SEQ ID NO: 90937 - RNA, 32 nt, Human
cauaaaauuaaagccuguggcauuuuuaaagu

SEQ ID NO: 90938 - RNA, 32 nt, Human
cauaaaauugugugugcacguucauguacaca

SEQ ID NO: 90939 - RNA, 22 nt, Human
cauaaaauuucccauuucugca

SEQ ID NO: 90940 - RNA, 32 nt, Human
cauaaaauuugcaugacuccucacuccuuucu

SEQ ID NO: 90941 - RNA, 32 nt, Human
cauaaacaagaguuccaguucccuggaaccug

SEQ ID NO: 90942 - RNA, 32 nt, Human
cauaaacacauacauugccaauuuuccagggc

SEQ ID NO: 90943 - RNA, 32 nt, Human
cauaaacacuucagaggcucagaguauguuuc

SEQ ID NO: 90944 - RNA, 32 nt, Human
cauaaacaggaguuugaaagaaguugauuuca

SEQ ID NO: 90945 - RNA, 32 nt, Human
cauaaacaggucagaagaaugauggaauguuu

SEQ ID NO: 90946 - RNA, 32 nt, Human
cauaaacauaaaggaggaugucccuggucugu

SEQ ID NO: 90947 - RNA, 32 nt, Human
cauaaacaucacauggcauguuuugucauugu

SEQ ID NO: 90948 - RNA, 32 nt, Human
cauaaacauccagaaaauggagcaggaaaaca

SEQ ID NO: 90949 - RNA, 32 nt, Human
cauaaacauucucuguugaggauguccaguca

SEQ ID NO: 90950 - RNA, 32 nt, Human
cauaaacauuuggugaccuuuuaccaaguggu

SEQ ID NO: 90951 - RNA, 32 nt, Human
cauaaaccaccucccaaaggcugucauuucau

SEQ ID NO: 90952 - RNA, 32 nt, Human
cauaaaccauauaucaaguuauuugaaaaaua

SEQ ID NO: 90953 - RNA, 32 nt, Human
cauaaacccgggagguggagcuugcagugagc

SEQ ID NO: 90954 - RNA, 32 nt, Human
cauaaacgagcugaauuugauauucacaggag

SEQ ID NO: 90955 - RNA, 32 nt, Human
cauaaacgauaucaagcuuacacuucauaugg

SEQ ID NO: 90956 - RNA, 32 nt, Human
cauaaacguacucaaaacacacgaagcauaau

SEQ ID NO: 90957 - RNA, 32 nt, Human
cauaaacuccaccccucuuccaccccauaacc

SEQ ID NO: 90958 - RNA, 32 nt, Human
cauaaacugcucaaggauuaguuuuccaggac

SEQ ID NO: 90959 - RNA, 32 nt, Human
cauaaacuguuauuccauugcuuucauccucc

SEQ ID NO: 90960 - RNA, 24 nt, Human
cauaaacuguuuacuguugaaaca

SEQ ID NO: 90961 - RNA, 32 nt, Human
cauaaagaaaauggucucccacagauucacag

SEQ ID NO: 90962 - RNA, 32 nt, Human
cauaaagaagaagacauacaugcugucucagg

SEQ ID NO: 90963 - RNA, 32 nt, Human
cauaaagauacagugccuacucugugaaauac

SEQ ID NO: 90964 - RNA, 32 nt, Human
cauaaagcaaacaacauaaagcacaauaaaaa

SEQ ID NO: 90965 - RNA, 32 nt, Human
cauaaagccuuaaaaagacacacacuaagaaa

SEQ ID NO: 90966 - RNA, 32 nt, Human
cauaaagcgcuaggcccuagaacuccagaaac

SEQ ID NO: 90967 - RNA, 20 nt, Human
cauaaaggaaacuaagugcc

SEQ ID NO: 90968 - RNA, 32 nt, Human
cauaaaggaagacauuagauccagccauugug

SEQ ID NO: 90969 - RNA, 32 nt, Human
cauaaaggagaagauuugggagagggagagga

SEQ ID NO: 90970 - RNA, 32 nt, Human
cauaaaggcaaauccugaggaacucacugaug

SEQ ID NO: 90971 - RNA, 32 nt, Human
cauaaaggcauguacaacacaaaucaugcuuc

SEQ ID NO: 90972 - RNA, 32 nt, Human
cauaaaggggcagagucuucuuucagacccaa

SEQ ID NO: 90973 - RNA, 24 nt, Human
cauaaaguccucaguggcuuugaa

SEQ ID NO: 90974 - RNA, 32 nt, Human
cauaaagugcuauacagauauaggggauuaau

SEQ ID NO: 90975 - RNA, 32 nt, Human
cauaaagugcuugcaauuucucuccacaauug

SEQ ID NO: 90976 - RNA, 32 nt, Human
cauaaaguuagaauugagcuaauagaguggua

SEQ ID NO: 90977 - RNA, 32 nt, Human
cauaaauauguucuuuacugagggagcuuaga

SEQ ID NO: 90978 - RNA, 32 nt, Human
cauaaaucaaagcucaucaguucccauaaaug

SEQ ID NO: 90979 - RNA, 32 nt, Human
cauaaaucuuugugaccuguuguuaggcaaug

SEQ ID NO: 90980 - RNA, 32 nt, Human
cauaaaugaaagucucauaaaauaucauaaag

SEQ ID NO: 90981 - RNA, 32 nt, Human
cauaaaugaauuagaacugauuuuaauaaaaa

SEQ ID NO: 90982 - RNA, 32 nt, Human
cauaaaugucuggagccaaccuuggcaguuau

SEQ ID NO: 90983 - RNA, 32 nt, Human
cauaaauuaaucagccccagagugcuuuaaaa

SEQ ID NO: 90984 - RNA, 32 nt, Human
cauaaauuaaucagccccagagugucuuuaaa

SEQ ID NO: 90985 - RNA, 32 nt, Human
cauaaauuacaaaucagagcugaguggggagg

SEQ ID NO: 90986 - RNA, 32 nt, Human
cauaaauuagccaggcgugguggugcaugccu

SEQ ID NO: 90987 - RNA, 32 nt, Human
cauaaauuuacguucucagcaacuguuauuuc

SEQ ID NO: 90988 - RNA, 32 nt, Human
cauaaauuuagugucaaaacaugggagauggc

SEQ ID NO: 90989 - RNA, 32 nt, Human
cauaacaaauaccgagagcacugcaaguggag

SEQ ID NO: 90990 - RNA, 32 nt, Human
cauaacaacuuugauauugaugaaguucagcu

SEQ ID NO: 90991 - RNA, 32 nt, Human
cauaacacaugaauauccuacucuucaugggc

SEQ ID NO: 90992 - RNA, 32 nt, Human
cauaacacggcuuccugugcucucccuccaga

SEQ ID NO: 90993 - RNA, 32 nt, Human
cauaacacugcacuccaggcuggacaacacag

SEQ ID NO: 90994 - RNA, 23 nt, Human
cauaacagagcccaugcuggaag

SEQ ID NO: 90995 - RNA, 32 nt, Human
cauaacagccucccaagguguuuaacauggag

SEQ ID NO: 90996 - RNA, 32 nt, Human
cauaacagccuccugaugccugggcuuggcug

SEQ ID NO: 90997 - RNA, 32 nt, Human
cauaacaggaagguaucauuggcucugaauua

SEQ ID NO: 90998 - RNA, 32 nt, Human
cauaacagugacugauguugguuguaaugguu

SEQ ID NO: 90999 - RNA, 32 nt, Human
cauaacagugguuacccacgaggcagaccuua

SEQ ID NO: 91000 - RNA, 21 nt, Human
cauaacaguguugcuuggaaa

SEQ ID NO: 91001 - RNA, 32 nt, Human
cauaacaugauuacagucaacucuccauuauc

SEQ ID NO: 91002 - RNA, 31 nt, Human
cauaacauuggagaaagcugggugaagacug

SEQ ID NO: 91003 - RNA, 32 nt, Human
cauaaccacaccauugcauuccaaccugggga

SEQ ID NO: 91004 - RNA, 32 nt, Human
cauaaccacagcaagacugacauccacuuagg

SEQ ID NO: 91005 - RNA, 32 nt, Human
cauaaccacaugcacacacacucacgcaugag

SEQ ID NO: 91006 - RNA, 32 nt, Human
cauaaccagcacuccagaaaucucucugccau

SEQ ID NO: 91007 - RNA, 32 nt, Human
cauaaccaggccucagauacccaagggugcua

SEQ ID NO: 91008 - RNA, 32 nt, Human
cauaaccaggguggugagggcacuaaucuugu

SEQ ID NO: 91009 - RNA, 20 nt, Human
cauaaccaugagcacuacuc

SEQ ID NO: 91010 - RNA, 32 nt, Human
cauaaccccuacuguagaacuaaaugcacugu

SEQ ID NO: 91011 - RNA, 32 nt, Human
cauaacccuggugucaucccagaguccacugu

SEQ ID NO: 91012 - RNA, 32 nt, Human
cauaaccuacauccuucucugauuucuucagc

SEQ ID NO: 91013 - RNA, 32 nt, Human
cauaaccuccagaugcaucauggaugcugaac

SEQ ID NO: 91014 - RNA, 32 nt, Human
cauaaccuguaaaucacagguguccaaacuuu

SEQ ID NO: 91015 - RNA, 32 nt, Human
cauaaccuucucuucccuugaugaccugggau

SEQ ID NO: 91016 - RNA, 32 nt, Human
cauaacgcacacacacgccacccagccucuug

SEQ ID NO: 91017 - RNA, 32 nt, Human
cauaacgguuaagaaagcacuuaaacagaagc

SEQ ID NO: 91018 - RNA, 32 nt, Human
cauaacuaaaacccacagcccaaccaaaccuu

SEQ ID NO: 91019 - RNA, 32 nt, Human
cauaacuacaccugacaccaggcucugcugga

SEQ ID NO: 91020 - RNA, 32 nt, Human
cauaacuaggacuuuaucagaaacucaaagcu

SEQ ID NO: 91021 - RNA, 32 nt, Human
cauaacuagguugaguuuucuccucugcuaag

SEQ ID NO: 91022 - RNA, 32 nt, Human
cauaacuauaaucccagcuacuugggaggcug

SEQ ID NO: 91023 - RNA, 32 nt, Human
cauaacucacugcagccucaaacuucuggccu

SEQ ID NO: 91024 - RNA, 32 nt, Human
cauaacucagcccuuugggcggccucugggcu

SEQ ID NO: 91025 - RNA, 32 nt, Human
cauaacucguggacuacaaagcacaaaggacc

SEQ ID NO: 91026 - RNA, 32 nt, Human
cauaacugcauaugaacacauaugccauauac

SEQ ID NO: 91027 - RNA, 32 nt, Human
cauaacugccagcugcucuccccgagugcuca

SEQ ID NO: 91028 - RNA, 32 nt, Human
cauaacuuacuuccuuuuugucugagcaaugu

SEQ ID NO: 91029 - RNA, 32 nt, Human
cauaacuuauaugugaauaaaauacauauaag

SEQ ID NO: 91030 - RNA, 32 nt, Human
cauaagaaucuuggaaauugauaaaaacaucc

SEQ ID NO: 91031 - RNA, 32 nt, Human
cauaagaauucccauugcccagccucagugca

SEQ ID NO: 91032 - RNA, 32 nt, Human
cauaagacaagaaauauucuuguccaagugac

SEQ ID NO: 91033 - RNA, 32 nt, Human
cauaagaccaggaugucucugaaauggauguc

SEQ ID NO: 91034 - RNA, 32 nt, Human
cauaagacuaucuccccgccaccuauaguuag

SEQ ID NO: 91035 - RNA, 32 nt, Human
cauaagagagagaccgaauucuguggcucagc

SEQ ID NO: 91036 - RNA, 25 nt, Human
cauaagauacugauagcauugaguc

SEQ ID NO: 91037 - RNA, 31 nt, Human
cauaagaugcuucccacucuagcuuccauac

SEQ ID NO: 91038 - RNA, 24 nt, Human
cauaagauuucagggugucuucca

SEQ ID NO: 91039 - RNA, 32 nt, Human
cauaagcaaauacccaacaucacaaagaugau

SEQ ID NO: 91040 - RNA, 32 nt, Human
cauaagcagaagaucaaaaugcuaaaacauga

SEQ ID NO: 91041 - RNA, 21 nt, Human
cauaagcaguagacucccaca

SEQ ID NO: 91042 - RNA, 32 nt, Human
cauaagcaugcaauaaauguuagccagcuuag

SEQ ID NO: 91043 - RNA, 32 nt, Human
cauaagcaugccacuauacuccagccugggca

SEQ ID NO: 91044 - RNA, 22 nt, Human
cauaagcauggucuuccaguug

SEQ ID NO: 91045 - RNA, 32 nt, Human
cauaagccaacaaccgcugacuccaggauugc

SEQ ID NO: 91046 - RNA, 32 nt, Human
cauaagccaacaagagaaaccaucucugacca

SEQ ID NO: 91047 - RNA, 32 nt, Human
cauaagccacugcacccagcugaaaguuggua

SEQ ID NO: 91048 - RNA, 32 nt, Human
cauaagccacugcgccuggccuugauguguga

SEQ ID NO: 91049 - RNA, 32 nt, Human
cauaagcccuggggcuuuccugguggccccac

SEQ ID NO: 91050 - RNA, 32 nt, Human
cauaagccuaaacucuccuucacugcaaugcc

SEQ ID NO: 91051 - RNA, 32 nt, Human
cauaagccucugcaguguccucuuguuaaugg

SEQ ID NO: 91052 - RNA, 32 nt, Human
cauaagcucugccccugcacacccucauguca

SEQ ID NO: 91053 - RNA, 32 nt, Human
cauaagcucuguucccuguccugcuugggucc

SEQ ID NO: 91054 - RNA, 32 nt, Human
cauaagcugggucucaggcugggcucagcaaa

SEQ ID NO: 91055 - RNA, 22 nt, Human
cauaaggaagcuggggcaguga

SEQ ID NO: 91056 - RNA, 32 nt, Human
cauaaggaaggcaaugauaaagagauaguaau

SEQ ID NO: 91057 - RNA, 21 nt, Human
cauaaggaaggcagccaugug

SEQ ID NO: 91058 - RNA, 32 nt, Human
cauaaggacaggccacaccacagcagagacca

SEQ ID NO: 91059 - RNA, 32 nt, Human
cauaaggcaagagcaagaggauccucaggauu

SEQ ID NO: 91060 - RNA, 32 nt, Human
cauaaggcacugcuccccuuccaucucuagca

SEQ ID NO: 91061 - RNA, 32 nt, Human
cauaaggccuccauucuguccgcucagauucu

SEQ ID NO: 91062 - RNA, 32 nt, Human
cauaaggcuaagcuaggggugaacagaaggcc

SEQ ID NO: 91063 - RNA, 32 nt, Human
cauaaggcugucuuggaucccaacaggcaccc

SEQ ID NO: 91064 - RNA, 32 nt, Human
cauaaggcuuuuccucccuucucugguuucaa

SEQ ID NO: 91065 - RNA, 32 nt, Human
cauaagggaacaaacagcaaccauaacaaaaa

SEQ ID NO: 91066 - RNA, 32 nt, Human
cauaagggcagcagagguggaguagggaggag

SEQ ID NO: 91067 - RNA, 32 nt, Human
cauaaggggugagucagacaggucugauuugg

SEQ ID NO: 91068 - RNA, 32 nt, Human
cauaagguaccugaggccagggaucuuguguc

SEQ ID NO: 91069 - RNA, 32 nt, Human
cauaaggucauguagcuccugggaagcccgca

SEQ ID NO: 91070 - RNA, 32 nt, Human
cauaagguucucaaaggucucagaccuacaaa

SEQ ID NO: 91071 - RNA, 23 nt, Human
cauaagguucucuugucugaguc

SEQ ID NO: 91072 - RNA, 32 nt, Human
cauaaguacucagaacucuuaagaugcagaug

SEQ ID NO: 91073 - RNA, 32 nt, Human
cauaagucccuucccuuccuuacuccucacuc

SEQ ID NO: 91074 - RNA, 32 nt, Human
cauaagucucagauaagaagugauggugauaa

SEQ ID NO: 91075 - RNA, 32 nt, Human
cauaagucuuccuauaucaaaauaacaaugug

SEQ ID NO: 91076 - RNA, 24 nt, Human
cauaagugaaaauaaaaugucaua

SEQ ID NO: 91077 - RNA, 32 nt, Human
cauaaguggaggugagguacaggcuaagcugc

SEQ ID NO: 91078 - RNA, 32 nt, Human
cauaaguguaaauaugcaaauguauguauaca

SEQ ID NO: 91079 - RNA, 32 nt, Human
cauaaguucagccucauacuuuuugcauugau

SEQ ID NO: 91080 - RNA, 32 nt, Human
cauaaguucugcauagcaucuaaugucaaaau

SEQ ID NO: 91081 - RNA, 32 nt, Human
cauaauaagccuugauaucuaguagacuaauc

SEQ ID NO: 91082 - RNA, 32 nt, Human
cauaauaauguuuuaaagacuuaguugucagu

SEQ ID NO: 91083 - RNA, 32 nt, Human
cauaauacauggcuaucaucaaaaguguauag

SEQ ID NO: 91084 - RNA, 22 nt, Human
cauaauagaaaacucauggaaa

SEQ ID NO: 91085 - RNA, 32 nt, Human
cauaauagaguuguuuuucaacucuauguuug

SEQ ID NO: 91086 - RNA, 25 nt, Human
cauaauagccugagugcuuggguua

SEQ ID NO: 91087 - RNA, 32 nt, Human
cauaauaggcccacauaauuuccucuuucuua

SEQ ID NO: 91088 - RNA, 32 nt, Human
cauaauaucaaauuacuccagugauugagaac

SEQ ID NO: 91089 - RNA, 32 nt, Human
cauaauaucaguaccuuguucuggucacuguu

SEQ ID NO: 91090 - RNA, 32 nt, Human
cauaauaucuucauguaagaaccaucuguuuc

SEQ ID NO: 91091 - RNA, 32 nt, Human
cauaaucaaccaggagcuuauuauaggaaagg

SEQ ID NO: 91092 - RNA, 32 nt, Human
cauaaucagcagagucauuuuucacaaaacga

SEQ ID NO: 91093 - RNA, 32 nt, Human
cauaaucaugccacugcauucuagcuuugaug

SEQ ID NO: 91094 - RNA, 32 nt, Human
cauaaucaugccacuguacuccagccugggug

SEQ ID NO: 91095 - RNA, 32 nt, Human
cauaaucucaugaagaaauaaugagguauuua

SEQ ID NO: 91096 - RNA, 32 nt, Human
cauaaucucaugggacuucagugggaguuaca

SEQ ID NO: 91097 - RNA, 32 nt, Human
cauaaucucggcucacugcaagcccugccucc

SEQ ID NO: 91098 - RNA, 32 nt, Human
cauaaucuucuuuccuguuaguccaguuugau

SEQ ID NO: 91099 - RNA, 32 nt, Human
cauaaucuuuacccuucuccccaaacaaaaua

SEQ ID NO: 91100 - RNA, 24 nt, Human
cauaaugaaaccccaucucuacua

SEQ ID NO: 91101 - RNA, 24 nt, Human
cauaaugaaacccugucucuacua

SEQ ID NO: 91102 - RNA, 32 nt, Human
cauaaugaagccugcaugugcccagcuucaau

SEQ ID NO: 91103 - RNA, 32 nt, Human
cauaaugacagaaauacugagaagguucugug

SEQ ID NO: 91104 - RNA, 32 nt, Human
cauaaugacuacugauaaggcaucagaaugga

SEQ ID NO: 91105 - RNA, 32 nt, Human
cauaaugacuguuuaaggauguuucacaaaau

SEQ ID NO: 91106 - RNA, 32 nt, Human
cauaaugacuuucuuuuuccuuaaguauaaaa

SEQ ID NO: 91107 - RNA, 24 nt, Human
cauaaugagaccccaucucuacua

SEQ ID NO: 91108 - RNA, 21 nt, Human
cauaaugagaccucaugucua

SEQ ID NO: 91109 - RNA, 21 nt, Human
cauaaugagaccuguccucua

SEQ ID NO: 91110 - RNA, 32 nt, Human
cauaaugagguccugaauauuuaauaucauca

SEQ ID NO: 91111 - RNA, 32 nt, Human
cauaaugaguauuggguguucaagaggagggg

SEQ ID NO: 91112 - RNA, 32 nt, Human
cauaaugcaguaauauugauaacugaagauac

SEQ ID NO: 91113 - RNA, 32 nt, Human
cauaaugccuuugagauucuucugcuuguauc

SEQ ID NO: 91114 - RNA, 32 nt, Human
cauaauggaacaaauggcaaugugaguagguu

SEQ ID NO: 91115 - RNA, 24 nt, Human
cauaauggcacacaccuguagucc

SEQ ID NO: 91116 - RNA, 32 nt, Human
cauaauggcacacaccuguagucccagcuacu

SEQ ID NO: 91117 - RNA, 32 nt, Human
cauaauggggcugugagcucagccgaaagccc

SEQ ID NO: 91118 - RNA, 32 nt, Human
cauaaugggggcggaggcgggagugagaggag

SEQ ID NO: 91119 - RNA, 32 nt, Human
cauaauggucuuucacuugucauucuacuuuc

SEQ ID NO: 91120 - RNA, 32 nt, Human
cauaauggugcagaauaaaacacacacaucug

SEQ ID NO: 91121 - RNA, 24 nt, Human
cauaauggugcaugccuguagucc

SEQ ID NO: 91122 - RNA, 32 nt, Human
cauaauggugugcaccuguagucccagcuguu

SEQ ID NO: 91123 - RNA, 32 nt, Human
cauaauguaauucaaugaaaacuguuggagaa

SEQ ID NO: 91124 - RNA, 32 nt, Human
cauaaugucaguaacauacauauuccaguggu

SEQ ID NO: 91125 - RNA, 32 nt, Human
cauaaugucuuucugcauuaguuccuugcacg

SEQ ID NO: 91126 - RNA, 32 nt, Human
cauaaugugcuuaaccacugccuuuuaaaacu

SEQ ID NO: 91127 - RNA, 32 nt, Human
cauaauguguuaaagcccucuguggcugccac

SEQ ID NO: 91128 - RNA, 32 nt, Human
cauaauguuccccaggcuggucuccaacuccu

SEQ ID NO: 91129 - RNA, 32 nt, Human
cauaauuaaaaugucucuacuaaaaauacaaa

SEQ ID NO: 91130 - RNA, 32 nt, Human
cauaauuauuaacauuuacuucugguauggaa

SEQ ID NO: 91131 - RNA, 32 nt, Human
cauaauuauugagcaaaagauaccagaaacac

SEQ ID NO: 91132 - RNA, 32 nt, Human
cauaauuccuucagccugccuccucuuuaauc

SEQ ID NO: 91133 - RNA, 32 nt, Human
cauaauugacccugaacguaggaggaggaaaa

SEQ ID NO: 91134 - RNA, 32 nt, Human
cauaauugagugugucuuuguucaugcacuaa

SEQ ID NO: 91135 - RNA, 32 nt, Human
cauaauuggaacacuguguuuucacacagaga

SEQ ID NO: 91136 - RNA, 32 nt, Human
cauaauuguaaguuuucugaggccuccucaga

SEQ ID NO: 91137 - RNA, 32 nt, Human
cauaauugugccacugcacugcagccugggcg

SEQ ID NO: 91138 - RNA, 32 nt, Human
cauaauuguggacaauuggaggcauuuauuuu

SEQ ID NO: 91139 - RNA, 32 nt, Human
cauaauuguuauuaaagagaaaacacgcccac

SEQ ID NO: 91140 - RNA, 32 nt, Human
cauaauuuaguaggggacaagaagucuguucu

SEQ ID NO: 91141 - RNA, 32 nt, Human
cauaauuuaucuguucuccaguccaguugaag

SEQ ID NO: 91142 - RNA, 32 nt, Human
cauaauuucagaaaucagccaggugugauggc

SEQ ID NO: 91143 - RNA, 32 nt, Human
cauaauuuccagggggugauuuuguuuuuaga

SEQ ID NO: 91144 - RNA, 32 nt, Human
cauaauuucuacaggcacuugggaaacuaacu

SEQ ID NO: 91145 - RNA, 32 nt, Human
cauaauuucugagccucgguuuccccaucuaa

SEQ ID NO: 91146 - RNA, 32 nt, Human
cauaauuuuugguuuaggccauucuuuauaac

SEQ ID NO: 91147 - RNA, 32 nt, Human
cauacaaaauuagccgggcaugguggcaaaug

SEQ ID NO: 91148 - RNA, 32 nt, Human
cauacaaaauuagcugggcacaguggcacaug

SEQ ID NO: 91149 - RNA, 32 nt, Human
cauacaaaauuagcugggcaugguggcaaaug

SEQ ID NO: 91150 - RNA, 32 nt, Human
cauacaaaccagcagagugcugagggacgaua

SEQ ID NO: 91151 - RNA, 32 nt, Human
cauacaaagacagggcuugcuccucugcaaaa

SEQ ID NO: 91152 - RNA, 32 nt, Human
cauacaaagauaaauaagaugcccuugaugau

SEQ ID NO: 91153 - RNA, 32 nt, Human
cauacaacucagggaugccagguggcuuaccc

SEQ ID NO: 91154 - RNA, 32 nt, Human
cauacaagagguuucuuucauugucaaauuaa

SEQ ID NO: 91155 - RNA, 32 nt, Human
cauacaagccccgcuacagacaacagaauugg

SEQ ID NO: 91156 - RNA, 32 nt, Human
cauacaaggaaaguuaaguaaaugucuuuaca

SEQ ID NO: 91157 - RNA, 32 nt, Human
cauacaaguuugccccauucucuggcuugggg

SEQ ID NO: 91158 - RNA, 32 nt, Human
cauacacaaaugcacacacaugcacacacaca

SEQ ID NO: 91159 - RNA, 32 nt, Human
cauacacacacaaacacauacacacaacacua

SEQ ID NO: 91160 - RNA, 32 nt, Human
cauacacacaugcacacccucucacguccucc

SEQ ID NO: 91161 - RNA, 32 nt, Human
cauacacacaugcaccuacacaaacauuuaca

SEQ ID NO: 91162 - RNA, 32 nt, Human
cauacacacaugcacgcacgcacacgcacacc

SEQ ID NO: 91163 - RNA, 32 nt, Human
cauacacaccaacacacauaugcacacucaca

SEQ ID NO: 91164 - RNA, 32 nt, Human
cauacacacucauugacauacauucauucaca

SEQ ID NO: 91165 - RNA, 32 nt, Human
cauacacaggcugcgggcacucucuagggugg

SEQ ID NO: 91166 - RNA, 32 nt, Human
cauacacagugaauugaaaccauugugcaaaa

SEQ ID NO: 91167 - RNA, 32 nt, Human
cauacacagugacuugauguucuuggaggauc

SEQ ID NO: 91168 - RNA, 32 nt, Human
cauacacauaugcagacacaugccagggcccc

SEQ ID NO: 91169 - RNA, 32 nt, Human
cauacacauauguauauacaggcugacuugau

SEQ ID NO: 91170 - RNA, 32 nt, Human
cauacacaugcacacacacaugcacacauaua

SEQ ID NO: 91171 - RNA, 32 nt, Human
cauacacaugcaugcacacauacacaggcaua

SEQ ID NO: 91172 - RNA, 32 nt, Human
cauacacaugugcacacacacgcacucucccc

SEQ ID NO: 91173 - RNA, 32 nt, Human
cauacaccaccaggaaaugccgaggucaccac

SEQ ID NO: 91174 - RNA, 32 nt, Human
cauacaccaccagguccuuuauguguuguucu

SEQ ID NO: 91175 - RNA, 32 nt, Human
cauacaccagaacuucuauccugcaucacuua

SEQ ID NO: 91176 - RNA, 32 nt, Human
cauacacgcaaauacacuccaguuuuuguuuu

SEQ ID NO: 91177 - RNA, 32 nt, Human
cauacacgcacaugcacacauacacaugcaug

SEQ ID NO: 91178 - RNA, 23 nt, Human
cauacacgucggccaugcagcag

SEQ ID NO: 91179 - RNA, 32 nt, Human
cauacacuauuuuaacacuuuuaaucugagaa

SEQ ID NO: 91180 - RNA, 32 nt, Human
cauacacucuagaccaaaauaaggcaucauaa

SEQ ID NO: 91181 - RNA, 17 nt, Human
cauacacugugaacuca

SEQ ID NO: 91182 - RNA, 32 nt, Human
cauacacugugaacucaaucuccagggcucca

SEQ ID NO: 91183 - RNA, 32 nt, Human
cauacagaauugcugacaggagcaggagacgc

SEQ ID NO: 91184 - RNA, 32 nt, Human
cauacagacucacauacagacacacacauaua

SEQ ID NO: 91185 - RNA, 31 nt, Human
cauacagauucuggucuacauuuagaaccuu

SEQ ID NO: 91186 - RNA, 32 nt, Human
cauacagcaaacaaaaaugcacaaagccugcu

SEQ ID NO: 91187 - RNA, 32 nt, Human
cauacagcagaggcauugaacacacaccacca

SEQ ID NO: 91188 - RNA, 32 nt, Human
cauacaggacaguccagcuggaugugauaaag

SEQ ID NO: 91189 - RNA, 32 nt, Human
cauacaggagccucgguuuuucagcaaaacgc

SEQ ID NO: 91190 - RNA, 32 nt, Human
cauacaggaguccuccuuucugagcuccagcc

SEQ ID NO: 91191 - RNA, 32 nt, Human
cauacaggccaauuccagggugcagugcagca

SEQ ID NO: 91192 - RNA, 32 nt, Human
cauacaggccaggaaagccaaaugaagucauu

SEQ ID NO: 91193 - RNA, 32 nt, Human
cauacagggucuccuuagcagcuguauucugg

SEQ ID NO: 91194 - RNA, 32 nt, Human
cauacagggucuccuuggcagcuguauucugg

SEQ ID NO: 91195 - RNA, 32 nt, Human
cauacaggugccagacacuguuugugcuuuug

SEQ ID NO: 91196 - RNA, 32 nt, Human
cauacaggugcugaagggaggacuuguugaag

SEQ ID NO: 91197 - RNA, 32 nt, Human
cauacagucccagcuacucaggaggcugaagc

SEQ ID NO: 91198 - RNA, 32 nt, Human
cauacauacacacauacauacauaugcacaca

SEQ ID NO: 91199 - RNA, 32 nt, Human
cauacauacacauacacacaugcacauauguc

SEQ ID NO: 91200 - RNA, 32 nt, Human
cauacauacauacauauguauacauuuccagu

SEQ ID NO: 91201 - RNA, 32 nt, Human
cauacauauauacacacauauguauauaaaau

SEQ ID NO: 91202 - RNA, 32 nt, Human
cauacaucaagccagagagcggggcuuaggga

SEQ ID NO: 91203 - RNA, 31 nt, Human
cauacaucacucaaguuugagaaccacugca

SEQ ID NO: 91204 - RNA, 21 nt, Human
cauacaucccagagcuugccc

SEQ ID NO: 91205 - RNA, 32 nt, Human
cauacaucccugcacuguguguuuucauuuuu

SEQ ID NO: 91206 - RNA, 32 nt, Human
cauacauccuaaaagcaccacagcagaggagg

SEQ ID NO: 91207 - RNA, 32 nt, Human
cauacaucggauaugugaaaagcacaacaaaa

SEQ ID NO: 91208 - RNA, 32 nt, Human
cauacaugcaugcacacauacauacauaugua

SEQ ID NO: 91209 - RNA, 32 nt, Human
cauacaugcaugcacacauacauaugcacgca

SEQ ID NO: 91210 - RNA, 32 nt, Human
cauacaugugcucggggcugggcgcgguggcu

SEQ ID NO: 91211 - RNA, 32 nt, Human
cauacauucauuuugacuccuuucaaugucac

SEQ ID NO: 91212 - RNA, 32 nt, Human
cauacauucugcaacaaccagggacuucacag

SEQ ID NO: 91213 - RNA, 32 nt, Human
cauacauuguccacaggugagaagauuaaauc

SEQ ID NO: 91214 - RNA, 31 nt, Human
cauacauuuaacuaggggguuggagggggcu

SEQ ID NO: 91215 - RNA, 32 nt, Human
cauacauuuuucucuucucuucuccugacguc

SEQ ID NO: 91216 - RNA, 32 nt, Human
cauacauuuuugaaaugaaaugugcuuaggaa

SEQ ID NO: 91217 - RNA, 32 nt, Human
cauaccaaaaucagggucacauguggguuucc

SEQ ID NO: 91218 - RNA, 32 nt, Human
cauaccaacaugcuccagccugagugagagag

SEQ ID NO: 91219 - RNA, 32 nt, Human
cauaccacacacauuaucauuguuaaacuuug

SEQ ID NO: 91220 - RNA, 32 nt, Human
cauaccacccccagucaaaagagugggagaaa

SEQ ID NO: 91221 - RNA, 32 nt, Human
cauaccaccgcacuccagccugagcaacagag

SEQ ID NO: 91222 - RNA, 32 nt, Human
cauaccacggcacuccagccugggugacagug

SEQ ID NO: 91223 - RNA, 32 nt, Human
cauaccacugcacuccagccuggcgacagagc

SEQ ID NO: 91224 - RNA, 32 nt, Human
cauaccacugcacuccagccugggcgacagag

SEQ ID NO: 91225 - RNA, 32 nt, Human
cauaccacugcacuccagccugggugacagag

SEQ ID NO: 91226 - RNA, 32 nt, Human
cauaccacugcacuccagucugggcaacagag

SEQ ID NO: 91227 - RNA, 32 nt, Human
cauaccacugcacugcagccugagugacacag

SEQ ID NO: 91228 - RNA, 32 nt, Human
cauaccacugcacuuaacuuggcaacagagca

SEQ ID NO: 91229 - RNA, 32 nt, Human
cauaccacugcauuccagccugggugacagag

SEQ ID NO: 91230 - RNA, 32 nt, Human
cauaccacuguacugcagucugggccacacag

SEQ ID NO: 91231 - RNA, 32 nt, Human
cauaccacuucauuccagccugggugacagag

SEQ ID NO: 91232 - RNA, 32 nt, Human
cauaccagagaaucauaaaaacaaaaaccuca

SEQ ID NO: 91233 - RNA, 32 nt, Human
cauaccagccuaggugacagaaugagacccug

SEQ ID NO: 91234 - RNA, 32 nt, Human
cauaccaggaaugaccaagggcaauuuggagg

SEQ ID NO: 91235 - RNA, 32 nt, Human
cauaccagggaugcucucuaacguaaucaagg

SEQ ID NO: 91236 - RNA, 32 nt, Human
cauaccagugaagggaaggggcucccauggac

SEQ ID NO: 91237 - RNA, 32 nt, Human
cauaccagugcacuccaggcgggugacagagc

SEQ ID NO: 91238 - RNA, 32 nt, Human
cauaccagugcauuccagccuggguacacagc

SEQ ID NO: 91239 - RNA, 32 nt, Human
cauaccauaagcauuuaaaaacauaugaaaua

SEQ ID NO: 91240 - RNA, 32 nt, Human
cauaccauuacgagugccucagccuggaaaag

SEQ ID NO: 91241 - RNA, 32 nt, Human
cauaccauucccauuuucucagccucuucucu

SEQ ID NO: 91242 - RNA, 32 nt, Human
cauaccauugcacuccagccuaggcaacaaga

SEQ ID NO: 91243 - RNA, 32 nt, Human
cauaccauugcacuccagccugggcaacaaga

SEQ ID NO: 91244 - RNA, 32 nt, Human
cauacccaaagugcaaucucacggccagguuc

SEQ ID NO: 91245 - RNA, 32 nt, Human
cauacccaccucugcccuccucaccuuccagu

SEQ ID NO: 91246 - RNA, 20 nt, Human
cauacccagcagccugcaga

SEQ ID NO: 91247 - RNA, 32 nt, Human
cauaccccacccagguuccugccugugauucc

SEQ ID NO: 91248 - RNA, 32 nt, Human
cauaccccaggcuuuaggaggcugaggugggg

SEQ ID NO: 91249 - RNA, 32 nt, Human
cauaccccaucuuaacucucuccagugagaac

SEQ ID NO: 91250 - RNA, 32 nt, Human
cauacccccgccccgagacuguuuccagugcc

SEQ ID NO: 91251 - RNA, 32 nt, Human
cauaccccucaccaucauuaccaccaucacca

SEQ ID NO: 91252 - RNA, 32 nt, Human
cauaccccuccagacaggaagcauggguuugc

SEQ ID NO: 91253 - RNA, 32 nt, Human
cauacccucagagucugggccuaucaucuucu

SEQ ID NO: 91254 - RNA, 32 nt, Human
cauacccucccucuccacaaccccugucacau

SEQ ID NO: 91255 - RNA, 32 nt, Human
cauacccugcagcucucagcuggcugcaguaa

SEQ ID NO: 91256 - RNA, 32 nt, Human
cauacccuggacacaucuaugggagcuuuuua

SEQ ID NO: 91257 - RNA, 32 nt, Human
cauacccuggggaccgggggagggcuggugcu

SEQ ID NO: 91258 - RNA, 32 nt, Human
cauaccguguacccuagguaugguggcuacac

SEQ ID NO: 91259 - RNA, 32 nt, Human
cauaccuauguacacacacaagauugcauuau

SEQ ID NO: 91260 - RNA, 32 nt, Human
cauaccucacugcagccucuugggcuuaugug

SEQ ID NO: 91261 - RNA, 32 nt, Human
cauaccucacugcagcuucaacuuccugggcu

SEQ ID NO: 91262 - RNA, 32 nt, Human
cauaccucacugcggccucaaacuccugggcu

SEQ ID NO: 91263 - RNA, 32 nt, Human
cauaccucccggggcuugcacacaccuucuuc

SEQ ID NO: 91264 - RNA, 32 nt, Human
cauaccucuagucauagcauaccauuuaucgg

SEQ ID NO: 91265 - RNA, 24 nt, Human
cauaccugggccagagugcagcgg

SEQ ID NO: 91266 - RNA, 31 nt, Human
cauaccugggugaugagaugaucugugcagc

SEQ ID NO: 91267 - RNA, 32 nt, Human
cauaccuguaaaucccagcacuuugggaggcc

SEQ ID NO: 91268 - RNA, 32 nt, Human
cauaccuguaaucccagcuacucgggaaccug

SEQ ID NO: 91269 - RNA, 32 nt, Human
cauaccuguaaucccagcuacucgggaggcug

SEQ ID NO: 91270 - RNA, 32 nt, Human
cauaccuguaaucccagcuacuuggaauugga

SEQ ID NO: 91271 - RNA, 32 nt, Human
cauaccuguaaucccagcuacuugggaggcug

SEQ ID NO: 91272 - RNA, 32 nt, Human
cauaccuguaaucucugcuauuugggagacug

SEQ ID NO: 91273 - RNA, 32 nt, Human
cauaccuguagucccagcuacgugagaggcug

SEQ ID NO: 91274 - RNA, 32 nt, Human
cauaccuguagucccagcuacucaggaggcug

SEQ ID NO: 91275 - RNA, 32 nt, Human
cauaccuguagucccagcuacucuggaggcug

SEQ ID NO: 91276 - RNA, 32 nt, Human
cauaccuguagucccagcuacuugggaggcua

SEQ ID NO: 91277 - RNA, 32 nt, Human
cauaccuguagucccagcuacuugggaggcug

SEQ ID NO: 91278 - RNA, 32 nt, Human
cauaccuguagucccagcuauucaggagcugu

SEQ ID NO: 91279 - RNA, 32 nt, Human
cauaccugucugcuucagcaacugcuuugcaa

SEQ ID NO: 91280 - RNA, 32 nt, Human
cauaccuguggcuccagaagcucuugggacca

SEQ ID NO: 91281 - RNA, 32 nt, Human
cauaccuguggucucagcuauucaggaggcca

SEQ ID NO: 91282 - RNA, 32 nt, Human
cauaccuucucccaggccucugccccaagagc

SEQ ID NO: 91283 - RNA, 32 nt, Human
cauaccuugcccauucccucugaauauuaggu

SEQ ID NO: 91284 - RNA, 32 nt, Human
cauacgacugaucuugauuuuuggaaaugaau

SEQ ID NO: 91285 - RNA, 23 nt, Human
cauacgcccgggccccaaggccc

SEQ ID NO: 91286 - RNA, 32 nt, Human
cauacgccucaaccuuuacacgcacggucacu

SEQ ID NO: 91287 - RNA, 32 nt, Human
cauacgccuguaauccuagcuacuugggaggc

SEQ ID NO: 91288 - RNA, 32 nt, Human
cauacgccuuucaucccuccuucuagggccua

SEQ ID NO: 91289 - RNA, 32 nt, Human
cauacggggagccaggguuugcaaugagucua

SEQ ID NO: 91290 - RNA, 32 nt, Human
cauacguccccuucauuuagguacauugugau

SEQ ID NO: 91291 - RNA, 32 nt, Human
cauacgucuuccagccucuccaggucaagcuc

SEQ ID NO: 91292 - RNA, 32 nt, Human
cauacgugcacacacacauacauauucauaca

SEQ ID NO: 91293 - RNA, 32 nt, Human
cauacgugcuggaaaugcugugaucugcccug

SEQ ID NO: 91294 - RNA, 32 nt, Human
cauacguguaccacaaagagugugagaaagaa

SEQ ID NO: 91295 - RNA, 32 nt, Human
cauacguuuuugucccccuaagguuccagauu

SEQ ID NO: 91296 - RNA, 32 nt, Human
cauacuacacagaucacucugggcucacuugc

SEQ ID NO: 91297 - RNA, 32 nt, Human
cauacuacugcacuccagccugggcgacaaga

SEQ ID NO: 91298 - RNA, 32 nt, Human
cauacuagaagggcauuggccauucuauugug

SEQ ID NO: 91299 - RNA, 31 nt, Human
cauacuaugacaaucuuauugucaacacuau

SEQ ID NO: 91300 - RNA, 32 nt, Human
cauacuauguguuugcaguaguguucaagugu

SEQ ID NO: 91301 - RNA, 32 nt, Human
cauacucaaguugcacggucagccugguggaa

SEQ ID NO: 91302 - RNA, 32 nt, Human
cauacucacucacucuccaccagccugggaaa

SEQ ID NO: 91303 - RNA, 32 nt, Human
cauacucacuccugacagcuuuccugcacugc

SEQ ID NO: 91304 - RNA, 32 nt, Human
cauacucaggagccuucuucaccagcuccuug

SEQ ID NO: 91305 - RNA, 32 nt, Human
cauacucaguggccuccagacaaacuccagac

SEQ ID NO: 91306 - RNA, 32 nt, Human
cauacucaucuccauguucugugaauuagcaa

SEQ ID NO: 91307 - RNA, 32 nt, Human
cauacuccaacuugguucugcaaagaauaccc

SEQ ID NO: 91308 - RNA, 32 nt, Human
cauacucccacauacuuacccacauguacaca

SEQ ID NO: 91309 - RNA, 32 nt, Human
cauacuccuaucuccuccucuuggcucucaau

SEQ ID NO: 91310 - RNA, 32 nt, Human
cauacuccucaaacuccuccuccucagccgug

SEQ ID NO: 91311 - RNA, 17 nt, Human
cauacuccuugaaccua

SEQ ID NO: 91312 - RNA, 20 nt, Human
cauacuccuuuuaagcagug

SEQ ID NO: 91313 - RNA, 22 nt, Human
cauacucuaucuuuccccacaa

SEQ ID NO: 91314 - RNA, 32 nt, Human
cauacucuccaaugcccaaaaauagcaaggug

SEQ ID NO: 91315 - RNA, 32 nt, Human
cauacucucucgcccaggcuggagugcagugg

SEQ ID NO: 91316 - RNA, 31 nt, Human
cauacucugacaaucuuauugucaacacuau

SEQ ID NO: 91317 - RNA, 32 nt, Human
cauacucugcucccuacuggcugucuuggggg

SEQ ID NO: 91318 - RNA, 32 nt, Human
cauacucuggcugccucuuugccuuccuaggg

SEQ ID NO: 91319 - RNA, 32 nt, Human
cauacucuuuuaaaucaaggaggcuguaguag

SEQ ID NO: 91320 - RNA, 32 nt, Human
cauacugaagacaaacuuguuucaaugauagu

SEQ ID NO: 91321 - RNA, 32 nt, Human
cauacugaagcuccagccagggggaugggucc

SEQ ID NO: 91322 - RNA, 32 nt, Human
cauacugacacugucagcucuccuggguggca

SEQ ID NO: 91323 - RNA, 32 nt, Human
cauacugacuucagugggacucggugagccgg

SEQ ID NO: 91324 - RNA, 32 nt, Human
cauacugauaaucagcuuuauuuuacaaaaga

SEQ ID NO: 91325 - RNA, 32 nt, Human
cauacugaucuuuagccaucagauugaucuuc

SEQ ID NO: 91326 - RNA, 32 nt, Human
cauacugaugccacugugcugcaucuuaauau

SEQ ID NO: 91327 - RNA, 26 nt, Human
cauacugauggcagggcuggccaggg

SEQ ID NO: 91328 - RNA, 32 nt, Human
cauacugcuaagucagcuacuuugccaagaaa

SEQ ID NO: 91329 - RNA, 32 nt, Human
cauacugcuuacgucuuagccauuccguccug

SEQ ID NO: 91330 - RNA, 32 nt, Human
cauacuggagacagccaagagcugaguauaua

SEQ ID NO: 91331 - RNA, 18 nt, Human
cauacuggagagaaaccu

SEQ ID NO: 91332 - RNA, 17 nt, Human
cauacuggagagagccu

SEQ ID NO: 91333 - RNA, 32 nt, Human
cauacuggcagauccuuguagggaaggagaga

SEQ ID NO: 91334 - RNA, 32 nt, Human
cauacuggccucuuuugggcccucucuuacac

SEQ ID NO: 91335 - RNA, 32 nt, Human
cauacuggcuaacacggugaaaccccgucucu

SEQ ID NO: 91336 - RNA, 32 nt, Human
cauacuuacauguguguauauguagauguaug

SEQ ID NO: 91337 - RNA, 32 nt, Human
cauacuuagauccuaacgugccagugagaccu

SEQ ID NO: 91338 - RNA, 32 nt, Human
cauacuuaucucucugugcuguggaagcaaca

SEQ ID NO: 91339 - RNA, 32 nt, Human
cauacuucaccuagagaagacaguauuggcaa

SEQ ID NO: 91340 - RNA, 32 nt, Human
cauacuucauuucuuuccuccucucuugcugu

SEQ ID NO: 91341 - RNA, 32 nt, Human
cauacuugaagucccagcuguuugggaggcug

SEQ ID NO: 91342 - RNA, 32 nt, Human
cauacuugacuagccuggacuccagucgacug

SEQ ID NO: 91343 - RNA, 20 nt, Human
cauacuugccuacugggccc

SEQ ID NO: 91344 - RNA, 24 nt, Human
cauacuugcucuuuuugucuucuu

SEQ ID NO: 91345 - RNA, 32 nt, Human
cauacuugcuguucuuucaggguuugcaauua

SEQ ID NO: 91346 - RNA, 32 nt, Human
cauacuugggcuguaguuuggagacaaaauau

SEQ ID NO: 91347 - RNA, 32 nt, Human
cauacuuggggugagagggagcugaggauguc

SEQ ID NO: 91348 - RNA, 32 nt, Human
cauacuuguaaucccagcuauugggaaggaug

SEQ ID NO: 91349 - RNA, 32 nt, Human
cauacuuguggauguaccuuucaaauauguuu

SEQ ID NO: 91350 - RNA, 32 nt, Human
cauacuuuaaaauguucagguagcagugagca

SEQ ID NO: 91351 - RNA, 32 nt, Human
cauacuuucccucauccaugcugugcuguguu

SEQ ID NO: 91352 - RNA, 32 nt, Human
cauagaaaccuacugacaaaaugaguauuuua

SEQ ID NO: 91353 - RNA, 32 nt, Human
cauagaaagacaugggcuaucagggaggaaga

SEQ ID NO: 91354 - RNA, 32 nt, Human
cauagaacaucuaggcagucuugacagucaac

SEQ ID NO: 91355 - RNA, 32 nt, Human
cauagaacgaguucuguaucccucaggccuga

SEQ ID NO: 91356 - RNA, 32 nt, Human
cauagaagaacagucugcauuugugauacacc

SEQ ID NO: 91357 - RNA, 32 nt, Human
cauagaagagcaucgacugugucacuuaaaau

SEQ ID NO: 91358 - RNA, 32 nt, Human
cauagaagaggcagugcgcugaagggacaggu

SEQ ID NO: 91359 - RNA, 32 nt, Human
cauagaagccauuggggaguucaguggaaguu

SEQ ID NO: 91360 - RNA, 32 nt, Human
cauagaaggaagcaaugccacggcuccagggu

SEQ ID NO: 91361 - RNA, 32 nt, Human
cauagaaggagagaauagaauggugguuauca

SEQ ID NO: 91362 - RNA, 32 nt, Human
cauagaaucugccuccuuugaccuuguucaau

SEQ ID NO: 91363 - RNA, 32 nt, Human
cauagaauucuagcuuucuuccuccuuucucu

SEQ ID NO: 91364 - RNA, 32 nt, Human
cauagaauuuuagguggggaagaggcauuuug

SEQ ID NO: 91365 - RNA, 32 nt, Human
cauagacaaccaggacacucuacacucuauuc

SEQ ID NO: 91366 - RNA, 32 nt, Human
cauagacacacacauauacagcucucucuugu

SEQ ID NO: 91367 - RNA, 32 nt, Human
cauagacaccucccaaaggucuucccaucagu

SEQ ID NO: 91368 - RNA, 32 nt, Human
cauagacagaugggcagaugcacccagagccc

SEQ ID NO: 91369 - RNA, 32 nt, Human
cauagaccccuaggcugcugugcggugggacu

SEQ ID NO: 91370 - RNA, 32 nt, Human
cauagacccugcccauauuuugcuagauugug

SEQ ID NO: 91371 - RNA, 32 nt, Human
cauagacucauggaacugaagggaccuuagca

SEQ ID NO: 91372 - RNA, 32 nt, Human
cauagacugaaccaaucuuuuugacuuuuugc

SEQ ID NO: 91373 - RNA, 32 nt, Human
cauagacuuagcaagucuugccuuaucuaugg

SEQ ID NO: 91374 - RNA, 32 nt, Human
cauagacuugacuuccuuaaaccgagaguuuu

SEQ ID NO: 91375 - RNA, 24 nt, Human
cauagagaaacacaauuagccacu

SEQ ID NO: 91376 - RNA, 32 nt, Human
cauagagaacaccaccaccauggccaggugga

SEQ ID NO: 91377 - RNA, 32 nt, Human
cauagagaagaguaagaauguagaccagcuua

SEQ ID NO: 91378 - RNA, 32 nt, Human
cauagagacuggguuucaccauguagaccagg

SEQ ID NO: 91379 - RNA, 32 nt, Human
cauagagauaugcacacacagaugcacacaca

SEQ ID NO: 91380 - RNA, 32 nt, Human
cauagagcacacaagaaccccaauauuaaugc

SEQ ID NO: 91381 - RNA, 32 nt, Human
cauagagcauacaauagcgccuacuucacgga

SEQ ID NO: 91382 - RNA, 32 nt, Human
cauagagccugcaaauggauccuccugugaga

SEQ ID NO: 91383 - RNA, 32 nt, Human
cauagagcuuucuccgcagcauccugccugcg

SEQ ID NO: 91384 - RNA, 23 nt, Human
cauagaggguaccauucugcgcu

SEQ ID NO: 91385 - RNA, 21 nt, Human
cauagagggucccagccuacu

SEQ ID NO: 91386 - RNA, 32 nt, Human
cauagaggucagaacuguuaauaaaaguuaaa

SEQ ID NO: 91387 - RNA, 32 nt, Human
cauagagucauuugcuuugauagucaucugac

SEQ ID NO: 91388 - RNA, 32 nt, Human
cauagaguccguggcuuacagugagaacuuau

SEQ ID NO: 91389 - RNA, 32 nt, Human
cauagaguccucucaaugggaaccugauugau

SEQ ID NO: 91390 - RNA, 23 nt, Human
cauagagugaaauauucaacuua

SEQ ID NO: 91391 - RNA, 32 nt, Human
cauagaguuagcaaccaugcuucucauucccu

SEQ ID NO: 91392 - RNA, 32 nt, Human
cauagauacaucuugcucugacuccagcugag

SEQ ID NO: 91393 - RNA, 32 nt, Human
cauagaucacugcagccucaaacuccugggcu

SEQ ID NO: 91394 - RNA, 32 nt, Human
cauagaucauaguccaauccccuagacccaaa

SEQ ID NO: 91395 - RNA, 32 nt, Human
cauagaucccauagugugcaucauguuccuua

SEQ ID NO: 91396 - RNA, 32 nt, Human
cauagauccucccuuauuuaacaucagaaaaa

SEQ ID NO: 91397 - RNA, 32 nt, Human
cauagaugagacaacgaaguucucucugucac

SEQ ID NO: 91398 - RNA, 32 nt, Human
cauagaugcagccuugcagccucuccagaugu

SEQ ID NO: 91399 - RNA, 32 nt, Human
cauagaugcccuuugaaaaccaucuaccuggu

SEQ ID NO: 91400 - RNA, 32 nt, Human
cauagaugcuagugaggcugcagagaaaagca

SEQ ID NO: 91401 - RNA, 32 nt, Human
cauagauggaaagacugcccuuuuccauuugc

SEQ ID NO: 91402 - RNA, 32 nt, Human
cauagaugucccuuucuuggccaguuaucccu

SEQ ID NO: 91403 - RNA, 32 nt, Human
cauagauucaacaaugccuaagaaugccucuu

SEQ ID NO: 91404 - RNA, 32 nt, Human
cauagauuuccucuuugagaacaucaaccuga

SEQ ID NO: 91405 - RNA, 32 nt, Human
cauagcaaaauggacuuugcagaugugauuaa

SEQ ID NO: 91406 - RNA, 32 nt, Human
cauagcaagguucacuccagccgugcuuucug

SEQ ID NO: 91407 - RNA, 32 nt, Human
cauagcaauugcacuccggccugggcaacaag

SEQ ID NO: 91408 - RNA, 32 nt, Human
cauagcacacugcuugaggcccugccaggcac

SEQ ID NO: 91409 - RNA, 32 nt, Human
cauagcaccaaaggaauccuccuguccccucu

SEQ ID NO: 91410 - RNA, 32 nt, Human
cauagcacuccagccuuagccugggcgacaga

SEQ ID NO: 91411 - RNA, 32 nt, Human
cauagcacuccccuccgcucccuucuuaggca

SEQ ID NO: 91412 - RNA, 32 nt, Human
cauagcacugccucuuuccaggggccucuggg

SEQ ID NO: 91413 - RNA, 32 nt, Human
cauagcacuggccauggucaggguuguuggaa

SEQ ID NO: 91414 - RNA, 32 nt, Human
cauagcaggaaaagccggagcccagggaggga

SEQ ID NO: 91415 - RNA, 31 nt, Human
cauagcaggaacuucuuucagcccuuuaggc

SEQ ID NO: 91416 - RNA, 32 nt, Human
cauagcagguaagaacauggaggcagagccag

SEQ ID NO: 91417 - RNA, 32 nt, Human
cauagcaguaaagguguuccuuccuggcagcg

SEQ ID NO: 91418 - RNA, 32 nt, Human
cauagcagugccuggcccagcggggacaacau

SEQ ID NO: 91419 - RNA, 32 nt, Human
cauagcaguggauuccaugaaaggagucauuu

SEQ ID NO: 91420 - RNA, 32 nt, Human
cauagcaguucagugccuuuguugguaguuuu

SEQ ID NO: 91421 - RNA, 32 nt, Human
cauagcaguuccucccacagggugggacacca

SEQ ID NO: 91422 - RNA, 32 nt, Human
cauagcaguucuguagcucaugagucuggcac

SEQ ID NO: 91423 - RNA, 32 nt, Human
cauagcaucccccucuauuuccaaugcuccuc

SEQ ID NO: 91424 - RNA, 32 nt, Human
cauagccacaguuugcaaaaagugcagcuauu

SEQ ID NO: 91425 - RNA, 32 nt, Human
cauagccaccuaggggaggaggccgugugaag

SEQ ID NO: 91426 - RNA, 32 nt, Human
cauagccagcaggccacuuuucacuaacagaa

SEQ ID NO: 91427 - RNA, 32 nt, Human
cauagccagcccacccaccuccccugccacag

SEQ ID NO: 91428 - RNA, 17 nt, Human
cauagccagcuccucua

SEQ ID NO: 91429 - RNA, 32 nt, Human
cauagcccaaccaugugagaagaaggagaagg

SEQ ID NO: 91430 - RNA, 32 nt, Human
cauagcccagguuccagguguccugggcagcc

SEQ ID NO: 91431 - RNA, 32 nt, Human
cauagccccagagauggcuggggacacagaag

SEQ ID NO: 91432 - RNA, 32 nt, Human
cauagcccccaucuauggacaggcugggacag

SEQ ID NO: 91433 - RNA, 32 nt, Human
cauagcccccuucuacuacuuucccucucgcc

SEQ ID NO: 91434 - RNA, 32 nt, Human
cauagccccuuguggcugccaggcagcacacc

SEQ ID NO: 91435 - RNA, 19 nt, Human
cauagcccugcugcugcca

SEQ ID NO: 91436 - RNA, 32 nt, Human
cauagcccugguacaugguacacacaccccca

SEQ ID NO: 91437 - RNA, 32 nt, Human
cauagccgaucuugccuucagaaugcucagaa

SEQ ID NO: 91438 - RNA, 23 nt, Human
cauagccgguagaaaaauuugaa

SEQ ID NO: 91439 - RNA, 15 nt, Human
cauagccuccugguc

SEQ ID NO: 91440 - RNA, 32 nt, Human
cauagccucuacuuuucagccaguuugcauuu

SEQ ID NO: 91441 - RNA, 32 nt, Human
cauagccugcagccucaucauuucccaucugg

SEQ ID NO: 91442 - RNA, 32 nt, Human
cauagccugccugucugcaugguccgccuaga

SEQ ID NO: 91443 - RNA, 32 nt, Human
cauagccugcugugaugagcuuccaggucgcu

SEQ ID NO: 91444 - RNA, 32 nt, Human
cauagccuguauaaauaccagauuagaacaua

SEQ ID NO: 91445 - RNA, 32 nt, Human
cauagccuugaggaggcuucucagccaccaaa

SEQ ID NO: 91446 - RNA, 32 nt, Human
cauagcgcugcacucagucggacugaacguag

SEQ ID NO: 91447 - RNA, 17 nt, Human
cauagcgggcgcugcca

SEQ ID NO: 91448 - RNA, 32 nt, Human
cauagcggugguggggcagggagccaguuucc

SEQ ID NO: 91449 - RNA, 32 nt, Human
cauagcuacuauaugcauaaacaacaguaccu

SEQ ID NO: 91450 - RNA, 32 nt, Human
cauagcucacugcaaccucaaacuccugggcu

SEQ ID NO: 91451 - RNA, 32 nt, Human
cauagcucacugcacccucaaccuccuggguu

SEQ ID NO: 91452 - RNA, 32 nt, Human
cauagcucacugcagacuccaacuccuggccu

SEQ ID NO: 91453 - RNA, 32 nt, Human
cauagcucacugcagcaucaaauuccuaggcu

SEQ ID NO: 91454 - RNA, 32 nt, Human
cauagcucacugcagccucaaacuccuggauu

SEQ ID NO: 91455 - RNA, 32 nt, Human
cauagcucacugcagccucaaacuccugggcu

SEQ ID NO: 91456 - RNA, 32 nt, Human
cauagcucacugcagccucaaacucuuuggcu

SEQ ID NO: 91457 - RNA, 32 nt, Human
cauagcucacugcagccucauacuccugggcu

SEQ ID NO: 91458 - RNA, 32 nt, Human
cauagcucacugcagccuccaacuccuggguu

SEQ ID NO: 91459 - RNA, 32 nt, Human
cauagcucacugcagccucgaacuccugggcu

SEQ ID NO: 91460 - RNA, 32 nt, Human
cauagcucacugcagccucgaacucuugggcu

SEQ ID NO: 91461 - RNA, 32 nt, Human
cauagcucacugcagccuggaacuccugggcu

SEQ ID NO: 91462 - RNA, 32 nt, Human
cauagcucacugcagccuggaacuccuuggcu

SEQ ID NO: 91463 - RNA, 32 nt, Human
cauagcucacugcagccuucaacuucugggcu

SEQ ID NO: 91464 - RNA, 32 nt, Human
cauagcucacugcagccuugaacuccuggacu

SEQ ID NO: 91465 - RNA, 32 nt, Human
cauagcucacugcagccuugaacuccugggau

SEQ ID NO: 91466 - RNA, 32 nt, Human
cauagcucacugcagccuugaauuccuaggcu

SEQ ID NO: 91467 - RNA, 32 nt, Human
cauagcucacugcagccuugagcuccuaggcu

SEQ ID NO: 91468 - RNA, 32 nt, Human
cauagcucacugcagccuugagcuccugggcu

SEQ ID NO: 91469 - RNA, 32 nt, Human
cauagcucacugcagcuucaaacucuugggcu

SEQ ID NO: 91470 - RNA, 32 nt, Human
cauagcucacugcagcuuugaccucccagacc

SEQ ID NO: 91471 - RNA, 32 nt, Human
cauagcucacugcagcuuugacuuccugggcu

SEQ ID NO: 91472 - RNA, 32 nt, Human
cauagcucacugcauccuccaguuccuggguu

SEQ ID NO: 91473 - RNA, 32 nt, Human
cauagcucaguuaugcuauguucaugaauaga

SEQ ID NO: 91474 - RNA, 32 nt, Human
cauagcuccucgggggagucagugccaggcug

SEQ ID NO: 91475 - RNA, 32 nt, Human
cauagcuccugcccccaggccuaggcaugcug

SEQ ID NO: 91476 - RNA, 32 nt, Human
cauagcuccuuagagauauaaccuauugucug

SEQ ID NO: 91477 - RNA, 17 nt, Human
cauagcucucgcugcca

SEQ ID NO: 91478 - RNA, 32 nt, Human
cauagcucugcggagguggaaguuggggagcu

SEQ ID NO: 91479 - RNA, 32 nt, Human
cauagcugacugcagccucaaccuucugggcu

SEQ ID NO: 91480 - RNA, 32 nt, Human
cauagcugauucaguaaccaguuucaugcugu

SEQ ID NO: 91481 - RNA, 32 nt, Human
cauagcugccugcacucugucucuccaaguac

SEQ ID NO: 91482 - RNA, 32 nt, Human
cauagcugccuuucuuaccauuuugguuugaa

SEQ ID NO: 91483 - RNA, 32 nt, Human
cauagcugugugaccuuggacagguggcucag

SEQ ID NO: 91484 - RNA, 32 nt, Human
cauagcuuaacaaggcacaggaagggaaggga

SEQ ID NO: 91485 - RNA, 32 nt, Human
cauagcuuccucaaauuccugggcucgaaugg

SEQ ID NO: 91486 - RNA, 32 nt, Human
cauaggaaaaggggaagagaggcugaguguca

SEQ ID NO: 91487 - RNA, 32 nt, Human
cauaggaaacagcagacacagggagagggcag

SEQ ID NO: 91488 - RNA, 32 nt, Human
cauaggaagacacacauaugcacacaaaacuc

SEQ ID NO: 91489 - RNA, 22 nt, Human
cauaggaagccagugacagaga

SEQ ID NO: 91490 - RNA, 19 nt, Human
cauaggacaggaaggaaug

SEQ ID NO: 91491 - RNA, 32 nt, Human
cauaggaccucaaaauacaaaauuagcagggc

SEQ ID NO: 91492 - RNA, 32 nt, Human
cauaggagaaacccugaauagaaacaaaacuu

SEQ ID NO: 91493 - RNA, 32 nt, Human
cauaggagagcugggggcaggagaauggggug

SEQ ID NO: 91494 - RNA, 32 nt, Human
cauaggaggcuucuguugacgucuccaacaga

SEQ ID NO: 91495 - RNA, 32 nt, Human
cauaggaguggccucaaggccacccagugcug

SEQ ID NO: 91496 - RNA, 32 nt, Human
cauaggagugucuuguacuaucuuuguaacuu

SEQ ID NO: 91497 - RNA, 32 nt, Human
cauaggcacaggcugugugaggguggacguga

SEQ ID NO: 91498 - RNA, 32 nt, Human
cauaggcagagagagaacuggguguuggagac

SEQ ID NO: 91499 - RNA, 32 nt, Human
cauaggcagcaaacuaagcugcagugauguug

SEQ ID NO: 91500 - RNA, 32 nt, Human
cauaggcagcacaggcaucaagauguccaacc

SEQ ID NO: 91501 - RNA, 32 nt, Human
cauaggcagugcuuuggccaggaggaucccuu

SEQ ID NO: 91502 - RNA, 32 nt, Human
cauaggcaguggcugcucaaagcccuccagca

SEQ ID NO: 91503 - RNA, 21 nt, Human
cauaggccacgugugccccac

SEQ ID NO: 91504 - RNA, 32 nt, Human
cauaggccagggccaacaaaguggagaggugg

SEQ ID NO: 91505 - RNA, 32 nt, Human
cauaggccucaggagucaucccagaagcagug

SEQ ID NO: 91506 - RNA, 32 nt, Human
cauaggccuccaggagcccucagugagaggga

SEQ ID NO: 91507 - RNA, 32 nt, Human
cauaggccuguaaucguagcgcuuugagaggc

SEQ ID NO: 91508 - RNA, 32 nt, Human
cauaggcgcccaggaucaaggucuccggcaca

SEQ ID NO: 91509 - RNA, 32 nt, Human
cauaggcgccuguaaucccagcuacucaggag

SEQ ID NO: 91510 - RNA, 32 nt, Human
cauaggcggcugagcaucggaguggaguucgu

SEQ ID NO: 91511 - RNA, 32 nt, Human
cauaggcucacagaaaaagaaaaagaaaauaa

SEQ ID NO: 91512 - RNA, 32 nt, Human
cauaggcugcaacccagcagagggcagcuaga

SEQ ID NO: 91513 - RNA, 32 nt, Human
cauagggaacaguaccuggccauggcgcagaa

SEQ ID NO: 91514 - RNA, 32 nt, Human
cauagggacguaucugcuaugaaaauccacaa

SEQ ID NO: 91515 - RNA, 32 nt, Human
cauagggagaagcucccucuccccuucaucuu

SEQ ID NO: 91516 - RNA, 32 nt, Human
cauagggaugaaaggaaccaagcguuucugug

SEQ ID NO: 91517 - RNA, 32 nt, Human
cauagggcagccgccucuggcccaggaggagg

SEQ ID NO: 91518 - RNA, 32 nt, Human
cauagggcccaggaaaaugcagaugcugacga

SEQ ID NO: 91519 - RNA, 32 nt, Human
cauagggcccccagacaccacacacaugcgcg

SEQ ID NO: 91520 - RNA, 32 nt, Human
cauagggcuucccagggaaggaagaagaggga

SEQ ID NO: 91521 - RNA, 32 nt, Human
cauaggguggagaagaggagguucagaguggu

SEQ ID NO: 91522 - RNA, 32 nt, Human
cauagggugugcaaggguggacagcaggcguu

SEQ ID NO: 91523 - RNA, 32 nt, Human
cauaggguuuggaagaaagagagaaggauucu

SEQ ID NO: 91524 - RNA, 32 nt, Human
cauaggugcaaaauccaucagagccauuguuu

SEQ ID NO: 91525 - RNA, 32 nt, Human
cauagguggccuaggaguagcagacaauucug

SEQ ID NO: 91526 - RNA, 32 nt, Human
cauagguggcugagcaucggaguggaguucgu

SEQ ID NO: 91527 - RNA, 32 nt, Human
cauaggugggaugucaagacccaucggaagug

SEQ ID NO: 91528 - RNA, 32 nt, Human
cauaggugugagccaccucacccggccuccaa

SEQ ID NO: 91529 - RNA, 32 nt, Human
cauaguaaggggaggaaagggaagcaccucca

SEQ ID NO: 91530 - RNA, 32 nt, Human
cauaguaagugcuuucuuucuuuuuaagcuac

SEQ ID NO: 91531 - RNA, 32 nt, Human
cauaguacacacacaacacgcuaucagcuugg

SEQ ID NO: 91532 - RNA, 32 nt, Human
cauaguacaguggauggaaggugcccgcacac

SEQ ID NO: 91533 - RNA, 21 nt, Human
cauaguaccucacaucacagu

SEQ ID NO: 91534 - RNA, 24 nt, Human
cauaguagcucaugccuguaaucc

SEQ ID NO: 91535 - RNA, 32 nt, Human
cauaguauaguccugaauauguacuuuuaaca

SEQ ID NO: 91536 - RNA, 32 nt, Human
cauaguaucauccugaauaguuugaaugcucu

SEQ ID NO: 91537 - RNA, 32 nt, Human
cauagucaaucagaaaaacaaugaucauucug

SEQ ID NO: 91538 - RNA, 32 nt, Human
cauaguccuuuuaucuccuuguggccuaugaa

SEQ ID NO: 91539 - RNA, 32 nt, Human
cauagucucuccccuucuuucccuuccacuuc

SEQ ID NO: 91540 - RNA, 32 nt, Human
cauagucugccgcuucccauucccaggguaga

SEQ ID NO: 91541 - RNA, 32 nt, Human
cauagucugcucccugucuucugucagccuca

SEQ ID NO: 91542 - RNA, 32 nt, Human
cauagucuucucucagcuuccacugccgucuc

SEQ ID NO: 91543 - RNA, 19 nt, Human
cauagucuuuaccucugga

SEQ ID NO: 91544 - RNA, 21 nt, Human
cauagugaaaccccaucucca

SEQ ID NO: 91545 - RNA, 22 nt, Human
cauagugaaaccccaucucuac

SEQ ID NO: 91546 - RNA, 24 nt, Human
cauagugaaaccccaucucuacua

SEQ ID NO: 91547 - RNA, 24 nt, Human
cauagugaaaccccaucucuacug

SEQ ID NO: 91548 - RNA, 25 nt, Human
cauagugaaacccccgucucuacua

SEQ ID NO: 91549 - RNA, 24 nt, Human
cauagugaaacccccucucuacua

SEQ ID NO: 91550 - RNA, 24 nt, Human
cauagugaaaccccgccucuacua

SEQ ID NO: 91551 - RNA, 24 nt, Human
cauagugaaaccccgucucuacua

SEQ ID NO: 91552 - RNA, 24 nt, Human
cauagugaaaccccgugucuacua

SEQ ID NO: 91553 - RNA, 24 nt, Human
cauagugaaaccccuucucuacua

SEQ ID NO: 91554 - RNA, 21 nt, Human
cauagugaaacccugucucua

SEQ ID NO: 91555 - RNA, 22 nt, Human
cauagugaaacccugucucuac

SEQ ID NO: 91556 - RNA, 24 nt, Human
cauagugaaacccugucucuacua

SEQ ID NO: 91557 - RNA, 24 nt, Human
cauagugaaacccugucuucacua

SEQ ID NO: 91558 - RNA, 20 nt, Human
cauagugaaaccgucuccac

SEQ ID NO: 91559 - RNA, 32 nt, Human
cauagugaaaguacauauacaauuguugcuaa

SEQ ID NO: 91560 - RNA, 24 nt, Human
cauagugaaaucccaucucuacua

SEQ ID NO: 91561 - RNA, 32 nt, Human
cauagugaacagcaucagggaagcuauauugg

SEQ ID NO: 91562 - RNA, 32 nt, Human
cauagugaagccuucuggaggagaaggugacg

SEQ ID NO: 91563 - RNA, 32 nt, Human
cauagugacagggggcuagggaagaacgggaa

SEQ ID NO: 91564 - RNA, 32 nt, Human
cauagugaccaacauagugaaaccccaucucu

SEQ ID NO: 91565 - RNA, 24 nt, Human
cauagugacugaugccuguaaucc

SEQ ID NO: 91566 - RNA, 32 nt, Human
cauagugaugaagaaagggaucagagucugac

SEQ ID NO: 91567 - RNA, 32 nt, Human
cauagugauggccacugguauagucaucgcuc

SEQ ID NO: 91568 - RNA, 32 nt, Human
cauagugcgccugcgaccacacggccggggcg

SEQ ID NO: 91569 - RNA, 32 nt, Human
cauagugcuuugugaagucuuuuacuugugga

SEQ ID NO: 91570 - RNA, 32 nt, Human
cauaguggaagaggagagcaugaagcaaagaa

SEQ ID NO: 91571 - RNA, 32 nt, Human
cauaguggagagacucaaggaggucaaguuga

SEQ ID NO: 91572 - RNA, 32 nt, Human
cauaguggauugagccaaggcugugcuguucc

SEQ ID NO: 91573 - RNA, 24 nt, Human
cauaguggcacacgccuguagucc

SEQ ID NO: 91574 - RNA, 32 nt, Human
cauaguggcacaugccuguaaucccagcuacu

SEQ ID NO: 91575 - RNA, 32 nt, Human
cauaguggcaggcaccuguaaucccagcuacu

SEQ ID NO: 91576 - RNA, 32 nt, Human
cauaguggcaggcaggagagagcaugugcagg

SEQ ID NO: 91577 - RNA, 32 nt, Human
cauaguggcggguaccuauaaucccagcuacu

SEQ ID NO: 91578 - RNA, 23 nt, Human
cauaguggcucacgccuguaauc

SEQ ID NO: 91579 - RNA, 32 nt, Human
cauaguggcucacuccuguaaucccagcacuu

SEQ ID NO: 91580 - RNA, 32 nt, Human
cauaguggcucaugccuguaaucccagcacuu

SEQ ID NO: 91581 - RNA, 24 nt, Human
cauaguggcucuugccuguaaucc

SEQ ID NO: 91582 - RNA, 32 nt, Human
cauaguggcucuugccuguaaucccagcacuu

SEQ ID NO: 91583 - RNA, 24 nt, Human
cauaguggcuuaugccuguaaucc

SEQ ID NO: 91584 - RNA, 32 nt, Human
cauaguggcuuaugccuguaaucccgguacuu

SEQ ID NO: 91585 - RNA, 32 nt, Human
cauagugggcagcccuggaggaacaaggggcu

SEQ ID NO: 91586 - RNA, 32 nt, Human
cauagugggcaguggugugugguuuugaaugg

SEQ ID NO: 91587 - RNA, 32 nt, Human
cauagugggucccaacccccucccucugcugg

SEQ ID NO: 91588 - RNA, 32 nt, Human
cauaguggguuaucccuguaauuccagggcuu

SEQ ID NO: 91589 - RNA, 32 nt, Human
cauagugguaauuggagguuacuguuaugaau

SEQ ID NO: 91590 - RNA, 32 nt, Human
cauaguggugcaugccaguaaucccagcuacu

SEQ ID NO: 91591 - RNA, 24 nt, Human
cauaguggugcaugccuguaaucc

SEQ ID NO: 91592 - RNA, 32 nt, Human
cauaguggugcaugccuguaaucccagcugcu

SEQ ID NO: 91593 - RNA, 24 nt, Human
cauaguggugcaugccuguagucc

SEQ ID NO: 91594 - RNA, 32 nt, Human
cauagugguggucaccuguaguccuagcuacu

SEQ ID NO: 91595 - RNA, 24 nt, Human
cauagugguguauaccuguagucc

SEQ ID NO: 91596 - RNA, 24 nt, Human
cauagugguucaugccuguaaucc

SEQ ID NO: 91597 - RNA, 32 nt, Human
cauagugguucaugccuguaaucccagcacuu

SEQ ID NO: 91598 - RNA, 32 nt, Human
cauagugguuggcaccuguagucccagcuacu

SEQ ID NO: 91599 - RNA, 32 nt, Human
cauaguguauggcaccagcagaucugccugug

SEQ ID NO: 91600 - RNA, 32 nt, Human
cauaguguauuuccucguauccuuucucccuu

SEQ ID NO: 91601 - RNA, 31 nt, Human
cauagugucacagaagacaaagacugcaaag

SEQ ID NO: 91602 - RNA, 32 nt, Human
cauagugucugcugcugccucccuggggacca

SEQ ID NO: 91603 - RNA, 32 nt, Human
cauagugucuucaugucgcguauaguugagcg

SEQ ID NO: 91604 - RNA, 32 nt, Human
cauagugucuuuccucuauuguggaccuaaag

SEQ ID NO: 91605 - RNA, 32 nt, Human
cauaguguuuugauuuggguggcagaugacuu

SEQ ID NO: 91606 - RNA, 31 nt, Human
cauaguuaaguucagcacuugucucauuuua

SEQ ID NO: 91607 - RNA, 32 nt, Human
cauaguuauugccgucauucuguggcuuguca

SEQ ID NO: 91608 - RNA, 32 nt, Human
cauaguucccagcgugaggaaaaugaagaaag

SEQ ID NO: 91609 - RNA, 32 nt, Human
cauaguucccaugagcaugagagaagaagcaa

SEQ ID NO: 91610 - RNA, 19 nt, Human
cauaguucuuccuuuucua

SEQ ID NO: 91611 - RNA, 32 nt, Human
cauaguugagcaguagcugguagaauuaggca

SEQ ID NO: 91612 - RNA, 32 nt, Human
cauaguugauaaaggaagaacauguaaggcaa

SEQ ID NO: 91613 - RNA, 32 nt, Human
cauaguuggaaauguaaucaucccaaagauca

SEQ ID NO: 91614 - RNA, 32 nt, Human
cauaguugugggcaccuguaaucccagcuacc

SEQ ID NO: 91615 - RNA, 31 nt, Human
cauaguuuaacuauucaccuguugaacaaca

SEQ ID NO: 91616 - RNA, 32 nt, Human
cauaguuuauaaacauucuauacaacagacuu

SEQ ID NO: 91617 - RNA, 32 nt, Human
cauaguuucuguccuaggaauauugucuuauc

SEQ ID NO: 91618 - RNA, 32 nt, Human
cauaguuuuaacugcaacugcuuuggcuacca

SEQ ID NO: 91619 - RNA, 32 nt, Human
cauaguuuuauaucugugugguguuuuguacc

SEQ ID NO: 91620 - RNA, 32 nt, Human
cauauaaauaagccuggaaaaccaacuacaac

SEQ ID NO: 91621 - RNA, 32 nt, Human
cauauaaccugacuccucaaaaacuuaauuag

SEQ ID NO: 91622 - RNA, 32 nt, Human
cauauaaguaauacuuuuuacuuucauguaca

SEQ ID NO: 91623 - RNA, 32 nt, Human
cauauaaugacuccagaagaaaaagaaagcuu

SEQ ID NO: 91624 - RNA, 31 nt, Human
cauauaaugugaaccaucacagugggagaca

SEQ ID NO: 91625 - RNA, 32 nt, Human
cauauaauguuuauauuaaaaaggacauuugu

SEQ ID NO: 91626 - RNA, 32 nt, Human
cauauaauuauacacacacauauguacauaua

SEQ ID NO: 91627 - RNA, 32 nt, Human
cauauaauugagaccaaaucugagaugaucaa

SEQ ID NO: 91628 - RNA, 32 nt, Human
cauauacaagggagcccuucacuguugauaca

SEQ ID NO: 91629 - RNA, 32 nt, Human
cauauacaaggucagggguggggaagaguauu

SEQ ID NO: 91630 - RNA, 22 nt, Human
cauauacacacaugcauacaug

SEQ ID NO: 91631 - RNA, 22 nt, Human
cauauacacugggugugaaaca

SEQ ID NO: 91632 - RNA, 32 nt, Human
cauauacauggcaucugccacagcagaaugga

SEQ ID NO: 91633 - RNA, 32 nt, Human
cauauaccuauguaacaaaacuacacauucug

SEQ ID NO: 91634 - RNA, 32 nt, Human
cauauaccuguaauccuagcuauucaaggggc

SEQ ID NO: 91635 - RNA, 32 nt, Human
cauauacuaaaaagcacuaacaagcacaaaug

SEQ ID NO: 91636 - RNA, 32 nt, Human
cauauacuauuuagucucagguucaaggcuac

SEQ ID NO: 91637 - RNA, 32 nt, Human
cauauacuuguaggaaguuguguuggugggcu

SEQ ID NO: 91638 - RNA, 32 nt, Human
cauauacuuucucugcaggguagguaagauag

SEQ ID NO: 91639 - RNA, 32 nt, Human
cauauagaaaaauguauagaugcuuggacaga

SEQ ID NO: 91640 - RNA, 32 nt, Human
cauauagaaaauucacuucuucuuucaagucc

SEQ ID NO: 91641 - RNA, 31 nt, Human
cauauagacaccaaggaggcggaggcgcucc

SEQ ID NO: 91642 - RNA, 32 nt, Human
cauauagacaggcuucugauagauugcaacug

SEQ ID NO: 91643 - RNA, 32 nt, Human
cauauagacaggcuucugauaguuugcaacug

SEQ ID NO: 91644 - RNA, 32 nt, Human
cauauagagacagaaccuggaccucaccaggg

SEQ ID NO: 91645 - RNA, 32 nt, Human
cauauagaugagacacaguacacacacuguga

SEQ ID NO: 91646 - RNA, 32 nt, Human
cauauagcacagaaguccuccacacugccugg

SEQ ID NO: 91647 - RNA, 32 nt, Human
cauauaggacaggacgcuagguuguuuaucuu

SEQ ID NO: 91648 - RNA, 32 nt, Human
cauauaggauuuugugcguaugugagugugcu

SEQ ID NO: 91649 - RNA, 32 nt, Human
cauauagguaugacacuuuauacuuguauagu

SEQ ID NO: 91650 - RNA, 32 nt, Human
cauauagucagugaaguaaauauuuuaaagga

SEQ ID NO: 91651 - RNA, 32 nt, Human
cauauagucccagcuacucaggaggcugaggc

SEQ ID NO: 91652 - RNA, 21 nt, Human
cauauauauacauacaugcau

SEQ ID NO: 91653 - RNA, 32 nt, Human
cauauaucaggaauuauauccaggaugcaaua

SEQ ID NO: 91654 - RNA, 32 nt, Human
cauauaugcuuaugacuaaacccuccacuccu

SEQ ID NO: 91655 - RNA, 32 nt, Human
cauauauguauccacacacauccuugugcaca

SEQ ID NO: 91656 - RNA, 32 nt, Human
cauauauguauguacauguacauguuuuugaa

SEQ ID NO: 91657 - RNA, 32 nt, Human
cauauauguauguauacacauauacacaugua

SEQ ID NO: 91658 - RNA, 32 nt, Human
cauauauuacuaaguugccucucccaguuuac

SEQ ID NO: 91659 - RNA, 31 nt, Human
cauauauucaauaaaaaccaauuugaagaca

SEQ ID NO: 91660 - RNA, 32 nt, Human
cauauauucuugauaaccucuccaacuuuaug

SEQ ID NO: 91661 - RNA, 32 nt, Human
cauaucaacaaauuggaacagcagagcaaggu

SEQ ID NO: 91662 - RNA, 32 nt, Human
cauaucaacauguaugaacuuaaaauauggag

SEQ ID NO: 91663 - RNA, 32 nt, Human
cauaucaaugcugaugaaccaagugcaaagcc

SEQ ID NO: 91664 - RNA, 32 nt, Human
cauaucacaagcauaggaagcuucugguucag

SEQ ID NO: 91665 - RNA, 32 nt, Human
cauaucacugcacuccagccuggcugacagag

SEQ ID NO: 91666 - RNA, 32 nt, Human
cauaucacugccuucucugggcuucagugucc

SEQ ID NO: 91667 - RNA, 32 nt, Human
cauaucagaugcucaaggcuggcagcuacccc

SEQ ID NO: 91668 - RNA, 32 nt, Human
cauaucagauuuacagucuuugucuuaucaag

SEQ ID NO: 91669 - RNA, 32 nt, Human
cauaucagcccucugcucucugaggcagccgc

SEQ ID NO: 91670 - RNA, 31 nt, Human
cauaucagccggagaggaaagacugcacugg

SEQ ID NO: 91671 - RNA, 32 nt, Human
cauaucaggaagagacugagccucucacaaag

SEQ ID NO: 91672 - RNA, 32 nt, Human
cauaucaggaagggcuuugggauagcaccuau

SEQ ID NO: 91673 - RNA, 32 nt, Human
cauaucaguccuuuguggguaguagguagcaa

SEQ ID NO: 91674 - RNA, 32 nt, Human
cauaucagugcugugucagcguucccagaaga

SEQ ID NO: 91675 - RNA, 32 nt, Human
cauaucaguuauaucugugaucaggaauggug

SEQ ID NO: 91676 - RNA, 32 nt, Human
cauaucaugaacccaggacaggcacagugggg

SEQ ID NO: 91677 - RNA, 32 nt, Human
cauaucaugcauucagguuauuuucuaauuuu

SEQ ID NO: 91678 - RNA, 32 nt, Human
cauaucauguacaguuuuauuuuauaacguga

SEQ ID NO: 91679 - RNA, 32 nt, Human
cauauccacccauugacucugccuucaucaag

SEQ ID NO: 91680 - RNA, 32 nt, Human
cauauccaucaucccucaaagugucacaaugc

SEQ ID NO: 91681 - RNA, 32 nt, Human
cauauccaugaucuugaguccauuugggggau

SEQ ID NO: 91682 - RNA, 32 nt, Human
cauauccaugccagaggcucuuguggggagau

SEQ ID NO: 91683 - RNA, 32 nt, Human
cauauccauuaaaaauauuuaaaaauuagcca

SEQ ID NO: 91684 - RNA, 32 nt, Human
cauaucccaccaaccuccagugucagggucca

SEQ ID NO: 91685 - RNA, 32 nt, Human
cauaucccagcccugcgagucuguucuagcca

SEQ ID NO: 91686 - RNA, 32 nt, Human
cauaucccauuuccagcugcaaauuacugcag

SEQ ID NO: 91687 - RNA, 32 nt, Human
cauauccccaccccuucccacggcguguccca

SEQ ID NO: 91688 - RNA, 32 nt, Human
cauaucccuccugugcuccaagguucugaaga

SEQ ID NO: 91689 - RNA, 32 nt, Human
cauaucccuuucucucuuguccaauggggcuu

SEQ ID NO: 91690 - RNA, 32 nt, Human
cauauccguacuuccaugagguguuuucugug

SEQ ID NO: 91691 - RNA, 32 nt, Human
cauauccucacucaggaacugaaaguucugug

SEQ ID NO: 91692 - RNA, 32 nt, Human
cauauccugcagcugcugcagcagggccaccu

SEQ ID NO: 91693 - RNA, 32 nt, Human
cauauccuggaggugaagguaccaccucaugg

SEQ ID NO: 91694 - RNA, 32 nt, Human
cauauccuguauguuuacuauguugccagaga

SEQ ID NO: 91695 - RNA, 32 nt, Human
cauauccuguucaaguuaaucaacaucaaaca

SEQ ID NO: 91696 - RNA, 32 nt, Human
cauaucggucaccaggcacccagggccaugcc

SEQ ID NO: 91697 - RNA, 32 nt, Human
cauaucuauuaggccuuucccugcugguaacu

SEQ ID NO: 91698 - RNA, 32 nt, Human
cauaucucaaauacaguacauuuacauuacug

SEQ ID NO: 91699 - RNA, 32 nt, Human
cauaucucacaccaggggaacaauuagcuaca

SEQ ID NO: 91700 - RNA, 27 nt, Human
cauaucucagucggcuuugcauuccca

SEQ ID NO: 91701 - RNA, 32 nt, Human
cauaucuccacuucucucuagcuguaucuaac

SEQ ID NO: 91702 - RNA, 22 nt, Human
cauaucucuccugucucuucca

SEQ ID NO: 91703 - RNA, 32 nt, Human
cauaucugaaaccauuuuagaagggagaaguc

SEQ ID NO: 91704 - RNA, 32 nt, Human
cauaucugaagauaaaaacauaccucaagcuu

SEQ ID NO: 91705 - RNA, 32 nt, Human
cauaucugcagucccagcacagugggacaaaa

SEQ ID NO: 91706 - RNA, 32 nt, Human
cauaucugccaaucuaaaugcaucuccauuuu

SEQ ID NO: 91707 - RNA, 21 nt, Human
cauaucugcgugcacuuccca

SEQ ID NO: 91708 - RNA, 32 nt, Human
cauaucuggaguggacagcccagguccagagc

SEQ ID NO: 91709 - RNA, 32 nt, Human
cauaucugggagaagcaggcggcuccgcgcuc

SEQ ID NO: 91710 - RNA, 31 nt, Human
cauaucugggagggaagaugggugcugggag

SEQ ID NO: 91711 - RNA, 31 nt, Human
cauaucuggguggagaaugggugaaaaguac

SEQ ID NO: 91712 - RNA, 32 nt, Human
cauaucuguagucccagcuaugugggaggcua

SEQ ID NO: 91713 - RNA, 22 nt, Human
cauaucuuaaucgacauuccca

SEQ ID NO: 91714 - RNA, 21 nt, Human
cauaucuuacuucucuuccca

SEQ ID NO: 91715 - RNA, 32 nt, Human
cauaucuuauguagcugaccucagucucucug

SEQ ID NO: 91716 - RNA, 32 nt, Human
cauaucuugcccuauuuuaauucugcuauaga

SEQ ID NO: 91717 - RNA, 32 nt, Human
cauaucuuugaguucccuugaacucugaucuc

SEQ ID NO: 91718 - RNA, 32 nt, Human
cauaugaaaauggcacaucauauacauguaaa

SEQ ID NO: 91719 - RNA, 32 nt, Human
cauaugaaagaaaguuuaugaagaacuggcuc

SEQ ID NO: 91720 - RNA, 32 nt, Human
cauaugaaagaguggauuuucagagacuuuaa

SEQ ID NO: 91721 - RNA, 32 nt, Human
cauaugaaccucaguucugaaauucauuacau

SEQ ID NO: 91722 - RNA, 32 nt, Human
cauaugaagaucauccaggaguacaacucgaa

SEQ ID NO: 91723 - RNA, 32 nt, Human
cauaugaaggagcaggaggagaggaagaaacu

SEQ ID NO: 91724 - RNA, 32 nt, Human
cauaugaauauagacaaaaagccauugagaua

SEQ ID NO: 91725 - RNA, 32 nt, Human
cauaugaauucgaggggacacaauucgacccg

SEQ ID NO: 91726 - RNA, 32 nt, Human
cauaugacauugugaguuugcuuucuuauaga

SEQ ID NO: 91727 - RNA, 32 nt, Human
cauaugaccucaugcaucuccaccugcuccca

SEQ ID NO: 91728 - RNA, 32 nt, Human
cauaugagacaggcacuggcugaagacaggca

SEQ ID NO: 91729 - RNA, 32 nt, Human
cauaugagauuauuaccaaugacaccguuaau

SEQ ID NO: 91730 - RNA, 32 nt, Human
cauaugaguacuaauacgugccaagccaugua

SEQ ID NO: 91731 - RNA, 32 nt, Human
cauaugagugauaugugaucaugauucauuuu

SEQ ID NO: 91732 - RNA, 32 nt, Human
cauaugauaucagccaagaguuuuccuguggu

SEQ ID NO: 91733 - RNA, 32 nt, Human
cauaugaucugucuguggcaaaaguuuaauca

SEQ ID NO: 91734 - RNA, 32 nt, Human
cauaugauggcaugucaggaauacuguuguaa

SEQ ID NO: 91735 - RNA, 32 nt, Human
cauaugcacaugcacacacauaccacuugaga

SEQ ID NO: 91736 - RNA, 32 nt, Human
cauaugcacgcacacacacaugcacacauaca

SEQ ID NO: 91737 - RNA, 32 nt, Human
cauaugcacgcacuuuucuuguugacaaagca

SEQ ID NO: 91738 - RNA, 32 nt, Human
cauaugcagacuucuggucuacugaggagcau

SEQ ID NO: 91739 - RNA, 32 nt, Human
cauaugcagauacuuauugcauuucuuuuauu

SEQ ID NO: 91740 - RNA, 32 nt, Human
cauaugcauaaaucaggauaccaucucauuaa

SEQ ID NO: 91741 - RNA, 32 nt, Human
cauaugcauaaauuauuaaaauuuucagaagu

SEQ ID NO: 91742 - RNA, 32 nt, Human
cauaugccagaggagacacagagccagaaaug

SEQ ID NO: 91743 - RNA, 32 nt, Human
cauaugcccacuguguaguaacaggccaaugc

SEQ ID NO: 91744 - RNA, 32 nt, Human
cauaugcccaggauuuugaagagccugguauc

SEQ ID NO: 91745 - RNA, 21 nt, Human
cauaugcccccaucaagcaga

SEQ ID NO: 91746 - RNA, 32 nt, Human
cauaugcccucagaaaagugacagugguccca

SEQ ID NO: 91747 - RNA, 32 nt, Human
cauaugccuauauucuagcuacucaggaggcu

SEQ ID NO: 91748 - RNA, 32 nt, Human
cauaugccugaccccuugcucccuucaaugcu

SEQ ID NO: 91749 - RNA, 32 nt, Human
cauaugcuauguuagaaguccaggcagagaca

SEQ ID NO: 91750 - RNA, 28 nt, Human
cauaugcucuuccugaaucuugccacug

SEQ ID NO: 91751 - RNA, 32 nt, Human
cauaugcugaggaccucagccauguggccgcu

SEQ ID NO: 91752 - RNA, 32 nt, Human
cauaugcugaggaccucagccauguggccucu

SEQ ID NO: 91753 - RNA, 32 nt, Human
cauaugcugcugcugcugcagccaccagagca

SEQ ID NO: 91754 - RNA, 32 nt, Human
cauaugcugcuugagauucaugggacuuccgg

SEQ ID NO: 91755 - RNA, 32 nt, Human
cauauggaaagcaaaccuguuuucccauuugu

SEQ ID NO: 91756 - RNA, 32 nt, Human
cauauggaauugugaaggaaaauaaauagguu

SEQ ID NO: 91757 - RNA, 32 nt, Human
cauauggacaaggacaggggaaagcacccccu

SEQ ID NO: 91758 - RNA, 32 nt, Human
cauauggaggcaugugaggguuuuguaagugc

SEQ ID NO: 91759 - RNA, 32 nt, Human
cauauggagggggugacccaccaucucagaac

SEQ ID NO: 91760 - RNA, 21 nt, Human
cauauggccaaguaucuacuu

SEQ ID NO: 91761 - RNA, 32 nt, Human
cauauggccauguguuuguccucugcuucucc

SEQ ID NO: 91762 - RNA, 32 nt, Human
cauaugggagagacucagugagccagcaaagg

SEQ ID NO: 91763 - RNA, 32 nt, Human
cauaugggcaggacuccagccuaugcagagcc

SEQ ID NO: 91764 - RNA, 18 nt, Human
cauauguacauaaauugc

SEQ ID NO: 91765 - RNA, 32 nt, Human
cauauguaccuacauacauacauaaauacaaa

SEQ ID NO: 91766 - RNA, 32 nt, Human
cauauguagauacaaaaggauauucuuaaaau

SEQ ID NO: 91767 - RNA, 32 nt, Human
cauauguagguaccagcucaaccccacgcaag

SEQ ID NO: 91768 - RNA, 32 nt, Human
cauauguauacacacacauaauuugaaaacug

SEQ ID NO: 91769 - RNA, 32 nt, Human
cauauguaugcaaggacacauauguacguaau

SEQ ID NO: 91770 - RNA, 32 nt, Human
cauaugucccugugcuccuuuuaaccaaauaa

SEQ ID NO: 91771 - RNA, 32 nt, Human
cauauguccuaccaaaugaaacccuguuucca

SEQ ID NO: 91772 - RNA, 32 nt, Human
cauaugucuguugagccuggacauuaaguauu

SEQ ID NO: 91773 - RNA, 32 nt, Human
cauaugugaacaauuaacaaauuggauuucaa

SEQ ID NO: 91774 - RNA, 32 nt, Human
cauaugugaguguguguggcuguaaccugcac

SEQ ID NO: 91775 - RNA, 32 nt, Human
cauaugugcaguauuuauauuggaucauacug

SEQ ID NO: 91776 - RNA, 32 nt, Human
cauaugugccuuucuguuagcucucuuugacu

SEQ ID NO: 91777 - RNA, 32 nt, Human
cauauguggcagagggucuauccaggccucgc

SEQ ID NO: 91778 - RNA, 32 nt, Human
cauauguggcagcagaggcagugagaguuuca

SEQ ID NO: 91779 - RNA, 32 nt, Human
cauaugugggugguggaggaaccggugcucag

SEQ ID NO: 91780 - RNA, 32 nt, Human
cauauguguaaauauauguacaaaaauuacug

SEQ ID NO: 91781 - RNA, 32 nt, Human
cauauguguauguaugcguauguauguaugua

SEQ ID NO: 91782 - RNA, 32 nt, Human
cauaugugugcuuucucuuuccuuuuaggaau

SEQ ID NO: 91783 - RNA, 32 nt, Human
cauauguguguauguguauuuauauguaugua

SEQ ID NO: 91784 - RNA, 32 nt, Human
cauauguugaucccaaacaugcaaugacaucc

SEQ ID NO: 91785 - RNA, 31 nt, Human
cauauguuuguucaauuacauuuagaguugg

SEQ ID NO: 91786 - RNA, 32 nt, Human
cauauuaaaccaugcagaauuggaguaacuuc

SEQ ID NO: 91787 - RNA, 32 nt, Human
cauauuaacaaaucugaaaauaugucaaauua

SEQ ID NO: 91788 - RNA, 32 nt, Human
cauauuacaagaaaacuacaggguccacacgg

SEQ ID NO: 91789 - RNA, 32 nt, Human
cauauuacaaguuugaaaauucagggcuggug

SEQ ID NO: 91790 - RNA, 32 nt, Human
cauauuacacauauguaaaaauuguuguuuua

SEQ ID NO: 91791 - RNA, 32 nt, Human
cauauuacuacuucuguuccauggugugcagg

SEQ ID NO: 91792 - RNA, 32 nt, Human
cauauuacuuuccauaauagcugugcuaauuu

SEQ ID NO: 91793 - RNA, 24 nt, Human
cauauuagauuacuaagucauuug

SEQ ID NO: 91794 - RNA, 32 nt, Human
cauauuauaggcagaacacaauggcuaaauau

SEQ ID NO: 91795 - RNA, 32 nt, Human
cauauuaugaucauacauauuuugaagaacag

SEQ ID NO: 91796 - RNA, 32 nt, Human
cauauuauugauuugugcauuuggugcaaaau

SEQ ID NO: 91797 - RNA, 32 nt, Human
cauauucaggcaggugugcauuugugcaugcc

SEQ ID NO: 91798 - RNA, 32 nt, Human
cauauucauaaauauacugucaaucuaucagc

SEQ ID NO: 91799 - RNA, 32 nt, Human
cauauucaucuuuaccaucacugucacuguaa

SEQ ID NO: 91800 - RNA, 32 nt, Human
cauauuccaaagugauaacagcacuuaaguuc

SEQ ID NO: 91801 - RNA, 32 nt, Human
cauauuccugccuuucuuccaucagcucucug

SEQ ID NO: 91802 - RNA, 32 nt, Human
cauauuccuuccagaugccucagugcuacacc

SEQ ID NO: 91803 - RNA, 31 nt, Human
cauauucggagggaauuucagaugcuuuacc

SEQ ID NO: 91804 - RNA, 32 nt, Human
cauauucucaccagcacaucugaaugaggcuu

SEQ ID NO: 91805 - RNA, 32 nt, Human
cauauucucaguccuccucuggucuacaaagc

SEQ ID NO: 91806 - RNA, 32 nt, Human
cauauucucucccuuuccccucccaguuaccu

SEQ ID NO: 91807 - RNA, 32 nt, Human
cauauucuuguauucaaagaaaacaggaaaaa

SEQ ID NO: 91808 - RNA, 32 nt, Human
cauauugcagaacagcucugagagcaacaguu

SEQ ID NO: 91809 - RNA, 32 nt, Human
cauauugcaugcugcucagaccccaagucaga

SEQ ID NO: 91810 - RNA, 32 nt, Human
cauauugccaacuggaaagucaaaauuuucua

SEQ ID NO: 91811 - RNA, 32 nt, Human
cauauugccaccaagacuuuccaggcucuucg

SEQ ID NO: 91812 - RNA, 32 nt, Human
cauauugcuggcccagcuccugaggcucuuug

SEQ ID NO: 91813 - RNA, 32 nt, Human
cauauuggauucagaaaagaaaaagaaugaug

SEQ ID NO: 91814 - RNA, 32 nt, Human
cauauuggcacaucugcuguccauuggggguu

SEQ ID NO: 91815 - RNA, 32 nt, Human
cauauugggcugggguaagcacuagacccaag

SEQ ID NO: 91816 - RNA, 32 nt, Human
cauauuggguacaguguacacugcuccaguga

SEQ ID NO: 91817 - RNA, 32 nt, Human
cauauugguauagagagcagaagaguagcuag

SEQ ID NO: 91818 - RNA, 32 nt, Human
cauauuguaggaugccuuucuauuucaauugg

SEQ ID NO: 91819 - RNA, 32 nt, Human
cauauuguauacuaucuuuaacugguuuuuca

SEQ ID NO: 91820 - RNA, 32 nt, Human
cauauuuaaugagccagaacaaggaaacacag

SEQ ID NO: 91821 - RNA, 32 nt, Human
cauauuuauguguuucuugcugggugagcacu

SEQ ID NO: 91822 - RNA, 32 nt, Human
cauauuucagcaguuugccacugugacugucu

SEQ ID NO: 91823 - RNA, 32 nt, Human
cauauuuccuguucauguccauuacagguaaa

SEQ ID NO: 91824 - RNA, 32 nt, Human
cauauuucuaaugaggaagauuaaugaaagaa

SEQ ID NO: 91825 - RNA, 32 nt, Human
cauauuucucagaaagauugccgggaagauga

SEQ ID NO: 91826 - RNA, 32 nt, Human
cauauuucucccaguuuggcacugugacacag

SEQ ID NO: 91827 - RNA, 32 nt, Human
cauauuucucugccucuauucuucuauacugc

SEQ ID NO: 91828 - RNA, 32 nt, Human
cauauuucugagagaaauguaugguucuuucu

SEQ ID NO: 91829 - RNA, 32 nt, Human
cauauuugaaguauucccuguauuuccauuau

SEQ ID NO: 91830 - RNA, 32 nt, Human
cauauuugaccagcauguuuuaaaagcucuug

SEQ ID NO: 91831 - RNA, 32 nt, Human
cauauuugagugugugcaugugugcaugacuu

SEQ ID NO: 91832 - RNA, 32 nt, Human
cauauuugcccguggaucacugaagauuccug

SEQ ID NO: 91833 - RNA, 32 nt, Human
cauauuugugcuccuucacgggagggcaggga

SEQ ID NO: 91834 - RNA, 32 nt, Human
cauauuuuacucucuucuccaggaugacaugg

SEQ ID NO: 91835 - RNA, 32 nt, Human
cauauuuucauuguuuuagagggagacagagu

SEQ ID NO: 91836 - RNA, 32 nt, Human
cauauuuucucaugaccauugccagugaccaa

SEQ ID NO: 91837 - RNA, 32 nt, Human
cauauuuucucccugcuguucccaccaugccc

SEQ ID NO: 91838 - RNA, 32 nt, Human
cauauuuucugcaaaugggagcauggauaaug

SEQ ID NO: 91839 - RNA, 32 nt, Human
cauauuuucuggacuuaaauguuauuacaaau

SEQ ID NO: 91840 - RNA, 32 nt, Human
cauauuuuguaaaaauaccaaaauuagcggug

SEQ ID NO: 91841 - RNA, 32 nt, Human
cauauuuuguaacuuccaugugaggguuuuca

SEQ ID NO: 91842 - RNA, 32 nt, Human
cauauuuuguauccuaaaaugaauguaugaua

SEQ ID NO: 91843 - RNA, 32 nt, Human
cauauuuugugguggugacauuacaggaggug

SEQ ID NO: 91844 - RNA, 32 nt, Human
cauauuuuugggaggcagagaggggcaggcuu

SEQ ID NO: 91845 - RNA, 32 nt, Human
cauauuuuuguuguuuccaggaauuuauuuga

SEQ ID NO: 91846 - RNA, 32 nt, Human
caucaaaacagugcuucagccaaauuccauau

SEQ ID NO: 91847 - RNA, 32 nt, Human
caucaaaaccuacauauuagccuuuggcuuua

SEQ ID NO: 91848 - RNA, 32 nt, Human
caucaaaagacuguuucucggugugaaucaag

SEQ ID NO: 91849 - RNA, 32 nt, Human
caucaaaaugauuuaucuucacuuuaccuauu

SEQ ID NO: 91850 - RNA, 32 nt, Human
caucaaaauggugaugaaccuggcaaaacgac

SEQ ID NO: 91851 - RNA, 32 nt, Human
caucaaacaaaggcauuggauuuggauccguc

SEQ ID NO: 91852 - RNA, 32 nt, Human
caucaaacauguugggacaaugcccauaggaa

SEQ ID NO: 91853 - RNA, 32 nt, Human
caucaaaccaaaucaacguugcugcuaauaca

SEQ ID NO: 91854 - RNA, 32 nt, Human
caucaaacccagaucugcacuugguaaugacu

SEQ ID NO: 91855 - RNA, 32 nt, Human
caucaaagaaaaugcugucaccugccauuguu

SEQ ID NO: 91856 - RNA, 32 nt, Human
caucaaagaagcuuuugaguaccaccuguuaa

SEQ ID NO: 91857 - RNA, 32 nt, Human
caucaaagauucacuccaaaaaguaauaccaa

SEQ ID NO: 91858 - RNA, 32 nt, Human
caucaaagcccucccugucugucugucucucu

SEQ ID NO: 91859 - RNA, 18 nt, Human
caucaaagccuugucaag

SEQ ID NO: 91860 - RNA, 32 nt, Human
caucaaaggaacauuugcuucacugggugaua

SEQ ID NO: 91861 - RNA, 32 nt, Human
caucaaaggagauucgggcuguggaaggcucc

SEQ ID NO: 91862 - RNA, 32 nt, Human
caucaaaggagggauuauguggcugcuaaagc

SEQ ID NO: 91863 - RNA, 31 nt, Human
caucaaagugagaggaaaggaaaagcaucug

SEQ ID NO: 91864 - RNA, 32 nt, Human
caucaaaugagacuauuugaggggacuauuug

SEQ ID NO: 91865 - RNA, 32 nt, Human
caucaaaugcuacuguucagcaggugccugac

SEQ ID NO: 91866 - RNA, 32 nt, Human
caucaaauguacaaaguugaguaucucuuuac

SEQ ID NO: 91867 - RNA, 32 nt, Human
caucaaauguacugagaauagacuagcauuug

SEQ ID NO: 91868 - RNA, 32 nt, Human
caucaaaugugcugugguucugggugauuuau

SEQ ID NO: 91869 - RNA, 32 nt, Human
caucaaauuguugccuuuuaccaaaaugcaaa

SEQ ID NO: 91870 - RNA, 32 nt, Human
caucaacaaacaacauggcacuuaguguuuuu

SEQ ID NO: 91871 - RNA, 32 nt, Human
caucaacaaauauuguuaugugcaaaaguauu

SEQ ID NO: 91872 - RNA, 32 nt, Human
caucaacaagccccauuaaaaagaaaaagaaa

SEQ ID NO: 91873 - RNA, 32 nt, Human
caucaacacagcauggaauuuccagggagguc

SEQ ID NO: 91874 - RNA, 32 nt, Human
caucaacacaggcgaagauggucuccaagcgc

SEQ ID NO: 91875 - RNA, 32 nt, Human
caucaacacggugggaggcagcgggggcuuca

SEQ ID NO: 91876 - RNA, 32 nt, Human
caucaacacuugcuauuaucugucuuuuugcu

SEQ ID NO: 91877 - RNA, 32 nt, Human
caucaacagacugggagggauuacgugggguc

SEQ ID NO: 91878 - RNA, 32 nt, Human
caucaacaggaaagcuugggaaagacaauacu

SEQ ID NO: 91879 - RNA, 32 nt, Human
caucaacauagugagaccccaucucuauuaaa

SEQ ID NO: 91880 - RNA, 32 nt, Human
caucaacaugcuuuuauuccagcacugugguu

SEQ ID NO: 91881 - RNA, 32 nt, Human
caucaacauggaaacuuggcuccucacguagg

SEQ ID NO: 91882 - RNA, 32 nt, Human
caucaacauuccugccccagauggcuuuguga

SEQ ID NO: 91883 - RNA, 31 nt, Human
caucaaccgggagaggaaaaagaaaacuggg

SEQ ID NO: 91884 - RNA, 32 nt, Human
caucaaccugggaggcggagguugcagugagc

SEQ ID NO: 91885 - RNA, 32 nt, Human
caucaacugccucugcuggacgcugcccagag

SEQ ID NO: 91886 - RNA, 32 nt, Human
caucaacuuuuacaagaaaaucucugucucuu

SEQ ID NO: 91887 - RNA, 32 nt, Human
caucaagaacaaggagggcauggaugcuaagu

SEQ ID NO: 91888 - RNA, 25 nt, Human
caucaagaacacaguccccauguug

SEQ ID NO: 91889 - RNA, 32 nt, Human
caucaagaaccaccaucacuucucacaccauu

SEQ ID NO: 91890 - RNA, 32 nt, Human
caucaagaagccccagccaggaggggccaggc

SEQ ID NO: 91891 - RNA, 32 nt, Human
caucaagaccuccaaguacaauauucucaccu

SEQ ID NO: 91892 - RNA, 32 nt, Human
caucaagacuggacuugaacuccugggcucaa

SEQ ID NO: 91893 - RNA, 32 nt, Human
caucaagagcaccagcccugggccagggaaga

SEQ ID NO: 91894 - RNA, 19 nt, Human
caucaagagcuuggagagu

SEQ ID NO: 91895 - RNA, 32 nt, Human
caucaagcaauauuuccacuucaacuuccacu

SEQ ID NO: 91896 - RNA, 31 nt, Human
caucaagcacuuguaccaaagcaugaggaag

SEQ ID NO: 91897 - RNA, 32 nt, Human
caucaagcagccugccccagcccugccagcca

SEQ ID NO: 91898 - RNA, 32 nt, Human
caucaagccagccugaccaacauggugaaacc

SEQ ID NO: 91899 - RNA, 32 nt, Human
caucaagcccuagaagcuggguuucuuuaaau

SEQ ID NO: 91900 - RNA, 17 nt, Human
caucaagccuuguuaaa

SEQ ID NO: 91901 - RNA, 32 nt, Human
caucaagcugauuuuauuggucaugagaacaa

SEQ ID NO: 91902 - RNA, 32 nt, Human
caucaaggaauaaacuguccucgccaugagag

SEQ ID NO: 91903 - RNA, 32 nt, Human
caucaaggaccuugccucucuggaaucuguca

SEQ ID NO: 91904 - RNA, 32 nt, Human
caucaaggaguccagagcaggagccaggccag

SEQ ID NO: 91905 - RNA, 32 nt, Human
caucaaggcuacucgggggauagcacuuuaca

SEQ ID NO: 91906 - RNA, 32 nt, Human
caucaaggcucacugcagccuggaccuccugg

SEQ ID NO: 91907 - RNA, 32 nt, Human
caucaaggugcugaagcuguacgccugggagc

SEQ ID NO: 91908 - RNA, 32 nt, Human
caucaaguacagaaccugccugguaugaccuc

SEQ ID NO: 91909 - RNA, 32 nt, Human
caucaagucaacaguuaucagcacucagacau

SEQ ID NO: 91910 - RNA, 32 nt, Human
caucaagucccucacagccauuucuguuccca

SEQ ID NO: 91911 - RNA, 32 nt, Human
caucaagucccuggggcagagauuugugaggg

SEQ ID NO: 91912 - RNA, 32 nt, Human
caucaagugaucuuccugccuccgcuucccaa

SEQ ID NO: 91913 - RNA, 32 nt, Human
caucaagugcagucgggaccucccaggacaag

SEQ ID NO: 91914 - RNA, 32 nt, Human
caucaaguggugagucaggccagggccuucca

SEQ ID NO: 91915 - RNA, 32 nt, Human
caucaaguuucuccgaauuucuguauaauaca

SEQ ID NO: 91916 - RNA, 32 nt, Human
caucaauaacauccuuccccagcacauccagc

SEQ ID NO: 91917 - RNA, 32 nt, Human
caucaauaugcuggugacauaugauggcaugu

SEQ ID NO: 91918 - RNA, 32 nt, Human
caucaauauuuuuauuuuaggagguguacuug

SEQ ID NO: 91919 - RNA, 32 nt, Human
caucaaucagaaguccuccuccccagcacauu

SEQ ID NO: 91920 - RNA, 32 nt, Human
caucaaucccccaguacaaugagacgguccuc

SEQ ID NO: 91921 - RNA, 19 nt, Human
caucaauccccuugucgaa

SEQ ID NO: 91922 - RNA, 32 nt, Human
caucaaucuagagaaagagaaggacgacccaa

SEQ ID NO: 91923 - RNA, 32 nt, Human
caucaaucuguucaucauaagacagaguaaga

SEQ ID NO: 91924 - RNA, 32 nt, Human
caucaaucuuuaaaccaauugcugcuacuuau

SEQ ID NO: 91925 - RNA, 32 nt, Human
caucaaugacucaugguguugaguggcaugcu

SEQ ID NO: 91926 - RNA, 24 nt, Human
caucaaugcuuguuuuuccuggug

SEQ ID NO: 91927 - RNA, 32 nt, Human
caucaaugucuguccuguggccaugucccuca

SEQ ID NO: 91928 - RNA, 21 nt, Human
caucaauuugaugaaauugau

SEQ ID NO: 91929 - RNA, 32 nt, Human
caucacaaaccugguaccuguugcuucccaga

SEQ ID NO: 91930 - RNA, 32 nt, Human
caucacaaacugugguguucugaccaccugug

SEQ ID NO: 91931 - RNA, 32 nt, Human
caucacaaaguagacauauacacacacauaua

SEQ ID NO: 91932 - RNA, 32 nt, Human
caucacaaugggucugaucugcauuucacuuc

SEQ ID NO: 91933 - RNA, 32 nt, Human
caucacacaccagccaagguuuacggagcccc

SEQ ID NO: 91934 - RNA, 32 nt, Human
caucacacagcaaaggagggaguggaagagag

SEQ ID NO: 91935 - RNA, 32 nt, Human
caucacaccagcuggcccucuuugcuuccuuu

SEQ ID NO: 91936 - RNA, 32 nt, Human
caucacaccaguacacuccaggcuaggucaca

SEQ ID NO: 91937 - RNA, 32 nt, Human
caucacaccauugcacuccagccugggcaaca

SEQ ID NO: 91938 - RNA, 32 nt, Human
caucacacccggcuaauuuuuguauuuuuagu

SEQ ID NO: 91939 - RNA, 32 nt, Human
caucacaccuggcuaauuuuuguauuuuuagu

SEQ ID NO: 91940 - RNA, 32 nt, Human
caucacaccuguaaucccagcacuuugggagg

SEQ ID NO: 91941 - RNA, 32 nt, Human
caucacacucuccauguuaguaauggcagagc

SEQ ID NO: 91942 - RNA, 32 nt, Human
caucacacuggcagacauuguaaaagacccug

SEQ ID NO: 91943 - RNA, 32 nt, Human
caucacagacacauagaugcucaccagccugg

SEQ ID NO: 91944 - RNA, 22 nt, Human
caucacagagcccuucuuggua

SEQ ID NO: 91945 - RNA, 32 nt, Human
caucacagaguguacacacaugguauacaccc

SEQ ID NO: 91946 - RNA, 32 nt, Human
caucacagccaagaggugggguuccaugaccu

SEQ ID NO: 91947 - RNA, 32 nt, Human
caucacagccaagcauugccacuuaccaugag

SEQ ID NO: 91948 - RNA, 32 nt, Human
caucacagccaggguggccucugggugucaga

SEQ ID NO: 91949 - RNA, 32 nt, Human
caucacagcgccagggcagcugugccugggac

SEQ ID NO: 91950 - RNA, 32 nt, Human
caucacagcucucugugaccucacuccuuuga

SEQ ID NO: 91951 - RNA, 22 nt, Human
caucacagcugcgugccugggg

SEQ ID NO: 91952 - RNA, 32 nt, Human
caucacagcuggcuaauuuuuguauuuuuagu

SEQ ID NO: 91953 - RNA, 32 nt, Human
caucacaggaacagagacugaaucugccucag

SEQ ID NO: 91954 - RNA, 32 nt, Human
caucacaggcuagagaggugagcuuggaaaag

SEQ ID NO: 91955 - RNA, 19 nt, Human
caucacaggcuggccgagg

SEQ ID NO: 91956 - RNA, 32 nt, Human
caucacaguacgcuuagggucuugucacucgg

SEQ ID NO: 91957 - RNA, 18 nt, Human
caucacagugacaaugaa

SEQ ID NO: 91958 - RNA, 32 nt, Human
caucacaguggaccuucugccuccucccagau

SEQ ID NO: 91959 - RNA, 32 nt, Human
caucacaguguugcugucaucaggcaaaagug

SEQ ID NO: 91960 - RNA, 32 nt, Human
caucacaucauccugagguuccagaacucaug

SEQ ID NO: 91961 - RNA, 32 nt, Human
caucacaucccucuccucuccuccucugugcu

SEQ ID NO: 91962 - RNA, 32 nt, Human
caucacauccuccguguccucaucuguuauuc

SEQ ID NO: 91963 - RNA, 32 nt, Human
caucacauccugcaguaucuccagaagcagca

SEQ ID NO: 91964 - RNA, 32 nt, Human
caucacaucuggcuaguuuuuguauuuuuagu

SEQ ID NO: 91965 - RNA, 32 nt, Human
caucacaugaagccuauugggguuaaguuugu

SEQ ID NO: 91966 - RNA, 23 nt, Human
caucacaugccaaaaacggggga

SEQ ID NO: 91967 - RNA, 32 nt, Human
caucacaugugcauccacuucuuuucauccau

SEQ ID NO: 91968 - RNA, 32 nt, Human
caucacauuuguaaaugucuuuucaaaaggau

SEQ ID NO: 91969 - RNA, 32 nt, Human
caucaccaacuugauuuucuuccauagcaaaa

SEQ ID NO: 91970 - RNA, 32 nt, Human
caucaccaaugucugucaugcugagcaagagg

SEQ ID NO: 91971 - RNA, 32 nt, Human
caucaccacaguuuaauaccacagcuuuuuac

SEQ ID NO: 91972 - RNA, 32 nt, Human
caucaccacaugcacuguggccauucagcauc

SEQ ID NO: 91973 - RNA, 32 nt, Human
caucaccaccaccaccaccaccaccaucacca

SEQ ID NO: 91974 - RNA, 32 nt, Human
caucaccaccaccaccaccaucaccaccacca

SEQ ID NO: 91975 - RNA, 32 nt, Human
caucaccaccaucaccaccaccaucaccacca

SEQ ID NO: 91976 - RNA, 32 nt, Human
caucaccaccauccaucuccagaacuuuuuca

SEQ ID NO: 91977 - RNA, 32 nt, Human
caucaccacucgggggcaccgggccgcccacc

SEQ ID NO: 91978 - RNA, 32 nt, Human
caucaccacugcaguuccaucccaagucacag

SEQ ID NO: 91979 - RNA, 32 nt, Human
caucaccagcucccagauuuuggaccaguuga

SEQ ID NO: 91980 - RNA, 32 nt, Human
caucaccaggaauugccuucucucauggugaa

SEQ ID NO: 91981 - RNA, 32 nt, Human
caucaccaggacugccugggccuguguucauu

SEQ ID NO: 91982 - RNA, 32 nt, Human
caucaccagguaaugaucagagaggcaauaga

SEQ ID NO: 91983 - RNA, 32 nt, Human
caucaccaucaccaccaccaccaccaucacca

SEQ ID NO: 91984 - RNA, 32 nt, Human
caucaccaucaccaccaccaccaucaucauca

SEQ ID NO: 91985 - RNA, 32 nt, Human
caucaccaucaucaucacugucauugucauua

SEQ ID NO: 91986 - RNA, 32 nt, Human
caucaccauccagcccagcacccuggacuuca

SEQ ID NO: 91987 - RNA, 32 nt, Human
caucaccaugccacaucccugcucccuacuuc

SEQ ID NO: 91988 - RNA, 32 nt, Human
caucaccaugccccagccccagccuggcccgc

SEQ ID NO: 91989 - RNA, 31 nt, Human
caucaccauugcuagaauacuggcaugauuc

SEQ ID NO: 91990 - RNA, 28 nt, Human
caucacccaagugccugaugccucaggu

SEQ ID NO: 91991 - RNA, 32 nt, Human
caucacccaccagggugcacagucucuccugc

SEQ ID NO: 91992 - RNA, 32 nt, Human
caucacccagauauuucccacaguucggccug

SEQ ID NO: 91993 - RNA, 32 nt, Human
caucaccccuggcuauuuuuguauuuuuagua

SEQ ID NO: 91994 - RNA, 23 nt, Human
caucacccucauuccuccggaga

SEQ ID NO: 91995 - RNA, 32 nt, Human
caucacccucauuccuccggagaaagccgggu

SEQ ID NO: 91996 - RNA, 32 nt, Human
caucacccuccccuccccuccccuccccuccc

SEQ ID NO: 91997 - RNA, 32 nt, Human
caucaccgacacugagcaguggaaaggggcua

SEQ ID NO: 91998 - RNA, 32 nt, Human
caucaccgagauccucccugaauucagcccac

SEQ ID NO: 91999 - RNA, 23 nt, Human
caucaccgucaccgucaucauca

SEQ ID NO: 92000 - RNA, 32 nt, Human
caucaccuaucacagcuggcugccuucgugcu

SEQ ID NO: 92001 - RNA, 18 nt, Human
caucaccuauuccugcga

SEQ ID NO: 92002 - RNA, 32 nt, Human
caucaccuccaggaacaccgcucaggccugac

SEQ ID NO: 92003 - RNA, 32 nt, Human
caucaccucuacugucuccucccugggcuaag

SEQ ID NO: 92004 - RNA, 32 nt, Human
caucaccugcaacuuaaaugaacaagcuuaca

SEQ ID NO: 92005 - RNA, 19 nt, Human
caucaccugccccaugcaa

SEQ ID NO: 92006 - RNA, 23 nt, Human
caucaccugcucugcucuuacaa

SEQ ID NO: 92007 - RNA, 32 nt, Human
caucaccuuccuccucugcucugggugguaag

SEQ ID NO: 92008 - RNA, 32 nt, Human
caucaccuuccugaauucuuuaaauaugaaau

SEQ ID NO: 92009 - RNA, 32 nt, Human
caucaccuuggcugcaacugcugagugcuggu

SEQ ID NO: 92010 - RNA, 32 nt, Human
caucaccuuuucccuuucauguucuuggaccu

SEQ ID NO: 92011 - RNA, 32 nt, Human
caucacgaccucaaacuggcuccuaaucucca

SEQ ID NO: 92012 - RNA, 32 nt, Human
caucacgacugauccccaccuccucaggguca

SEQ ID NO: 92013 - RNA, 32 nt, Human
caucacgagccacuuccacuccuggguggccu

SEQ ID NO: 92014 - RNA, 32 nt, Human
caucacgaucaaagcagcaggugcuguggucu

SEQ ID NO: 92015 - RNA, 32 nt, Human
caucacgccaagcuaauuuuuguauuuuugua

SEQ ID NO: 92016 - RNA, 32 nt, Human
caucacgcccagcuaauuuuuguauuuuuagu

SEQ ID NO: 92017 - RNA, 32 nt, Human
caucacgcccagcuaauuuuuguauuuuuggu

SEQ ID NO: 92018 - RNA, 32 nt, Human
caucacgcccggcuaauuuuguuuucguauuu

SEQ ID NO: 92019 - RNA, 32 nt, Human
caucacgcccggcuaauuuuuguauuuucagu

SEQ ID NO: 92020 - RNA, 32 nt, Human
caucacgccuggcuaauuuuuguauuuuuagu

SEQ ID NO: 92021 - RNA, 32 nt, Human
caucacgccugugcaguggcccccacagaaag

SEQ ID NO: 92022 - RNA, 32 nt, Human
caucacggcacucugggacaggcacggaggac

SEQ ID NO: 92023 - RNA, 32 nt, Human
caucacggugcuccagccggcccugcagcagu

SEQ ID NO: 92024 - RNA, 32 nt, Human
caucacguaugucgcagcagcauuucaccccu

SEQ ID NO: 92025 - RNA, 32 nt, Human
caucacuacaucuuuucuuccggaucuucauc

SEQ ID NO: 92026 - RNA, 32 nt, Human
caucacuacgaaugucuuacauugaagcacag

SEQ ID NO: 92027 - RNA, 32 nt, Human
caucacuacuaaacauacaaaauuagccgggc

SEQ ID NO: 92028 - RNA, 32 nt, Human
caucacuacuggcugugcggcccccgcugcuu

SEQ ID NO: 92029 - RNA, 32 nt, Human
caucacuacuguuucuaaccagauaucucgaa

SEQ ID NO: 92030 - RNA, 32 nt, Human
caucacucaauacuggugcucuugucacaggu

SEQ ID NO: 92031 - RNA, 32 nt, Human
caucacuccagccugggcaacagaacaagaac

SEQ ID NO: 92032 - RNA, 32 nt, Human
caucacucccccugccaagacaaaggguccag

SEQ ID NO: 92033 - RNA, 32 nt, Human
caucacuccccucccuugcuggccagcauccc

SEQ ID NO: 92034 - RNA, 32 nt, Human
caucacuccccuccucucccuuccuguguggc

SEQ ID NO: 92035 - RNA, 32 nt, Human
caucacucuccucaguguugaugucaacaugc

SEQ ID NO: 92036 - RNA, 32 nt, Human
caucacucuggccucugccuucaucucaugcc

SEQ ID NO: 92037 - RNA, 32 nt, Human
caucacucuguacaaagcuaaaauguggagcu

SEQ ID NO: 92038 - RNA, 32 nt, Human
caucacucuuuucuccacauacagugcagaga

SEQ ID NO: 92039 - RNA, 32 nt, Human
caucacugacucaaguggcuguucugauuccc

SEQ ID NO: 92040 - RNA, 32 nt, Human
caucacugaggcaccugguuacgcuucaccuc

SEQ ID NO: 92041 - RNA, 32 nt, Human
caucacugagucagcacucaccuggccugggg

SEQ ID NO: 92042 - RNA, 24 nt, Human
caucacugcacuccaaccugggca

SEQ ID NO: 92043 - RNA, 32 nt, Human
caucacugcacuccaaccugggcaacagagua

SEQ ID NO: 92044 - RNA, 24 nt, Human
caucacugcacuccagccugggca

SEQ ID NO: 92045 - RNA, 32 nt, Human
caucacugcacuccagccugggcagcagagug

SEQ ID NO: 92046 - RNA, 32 nt, Human
caucacugcacuccagccugggcgauggagca

SEQ ID NO: 92047 - RNA, 32 nt, Human
caucacugcacuccagccugggugacagagcg

SEQ ID NO: 92048 - RNA, 32 nt, Human
caucacugcacuccagcuugggugacagagca

SEQ ID NO: 92049 - RNA, 32 nt, Human
caucacugcacuccauccugggugacagagag

SEQ ID NO: 92050 - RNA, 32 nt, Human
caucacugcaguccagccuggaugacagagug

SEQ ID NO: 92051 - RNA, 32 nt, Human
caucacugcaguccagccugggugacagagca

SEQ ID NO: 92052 - RNA, 20 nt, Human
caucacuggaacuuguuaaa

SEQ ID NO: 92053 - RNA, 32 nt, Human
caucacugggcuuggauuugcauuacauugac

SEQ ID NO: 92054 - RNA, 32 nt, Human
caucacuguggcuggcaggcaucggacagccu

SEQ ID NO: 92055 - RNA, 32 nt, Human
caucacuucccaugccccaucucgacucccau

SEQ ID NO: 92056 - RNA, 21 nt, Human
caucacuuccuccuugucaaa

SEQ ID NO: 92057 - RNA, 32 nt, Human
caucacuucuuugccaaaugcauuuccaaaca

SEQ ID NO: 92058 - RNA, 32 nt, Human
caucacuuugggaggccgaggcgggcggaucg

SEQ ID NO: 92059 - RNA, 32 nt, Human
caucacuuugggaggcugaggugggagguuug

SEQ ID NO: 92060 - RNA, 32 nt, Human
caucagaaaaauucuauugucuucccaaucuc

SEQ ID NO: 92061 - RNA, 32 nt, Human
caucagaaaccagcaacugauucagugugauu

SEQ ID NO: 92062 - RNA, 32 nt, Human
caucagaaaugucuuccuuaaguggaaaaguc

SEQ ID NO: 92063 - RNA, 32 nt, Human
caucagaacagccugcccugggcaccaggugg

SEQ ID NO: 92064 - RNA, 21 nt, Human
caucagaacccugccugccca

SEQ ID NO: 92065 - RNA, 32 nt, Human
caucagaaccgccaccaugacggugggcaaga

SEQ ID NO: 92066 - RNA, 32 nt, Human
caucagaacgcaucccucaucuggacuccagc

SEQ ID NO: 92067 - RNA, 32 nt, Human
caucagaacgccaugguuuugaggcagcuagu

SEQ ID NO: 92068 - RNA, 32 nt, Human
caucagaacuuugccauuugucuacagaagac

SEQ ID NO: 92069 - RNA, 32 nt, Human
caucagaagagccccgugucucccacaaauag

SEQ ID NO: 92070 - RNA, 32 nt, Human
caucagaagagggaggaggagcccaggcgucu

SEQ ID NO: 92071 - RNA, 32 nt, Human
caucagaauugccuggagugugcacugaaacu

SEQ ID NO: 92072 - RNA, 22 nt, Human
caucagacacagcccccaagau

SEQ ID NO: 92073 - RNA, 32 nt, Human
caucagacaccagaggacacacacagugcugu

SEQ ID NO: 92074 - RNA, 32 nt, Human
caucagacaguuucaagacacacccagucacu

SEQ ID NO: 92075 - RNA, 32 nt, Human
caucagacauguccguggugggcacagugccu

SEQ ID NO: 92076 - RNA, 32 nt, Human
caucagaccuaguguucucacacugaccaccc

SEQ ID NO: 92077 - RNA, 32 nt, Human
caucagagagguggcaguggagguuuguuauc

SEQ ID NO: 92078 - RNA, 32 nt, Human
caucagagagguuuauuucacacuuacaggca

SEQ ID NO: 92079 - RNA, 32 nt, Human
caucagagauuucauacuuaauaaaagcauua

SEQ ID NO: 92080 - RNA, 20 nt, Human
caucagagcaaccacaguga

SEQ ID NO: 92081 - RNA, 32 nt, Human
caucagagcugaacuucuuaagaaaagcacag

SEQ ID NO: 92082 - RNA, 32 nt, Human
caucagagcuggugccuucgggccagaaagac

SEQ ID NO: 92083 - RNA, 32 nt, Human
caucagaggaccccagaaaacuacccaaauga

SEQ ID NO: 92084 - RNA, 32 nt, Human
caucagaggcuagaagagaggcaaggaaaaau

SEQ ID NO: 92085 - RNA, 32 nt, Human
caucagaggcugggcuuggcagaggggagggg

SEQ ID NO: 92086 - RNA, 32 nt, Human
caucagaggugccaccaccaaagcacucuucc

SEQ ID NO: 92087 - RNA, 32 nt, Human
caucagaggugcuguuccgugguucugcauua

SEQ ID NO: 92088 - RNA, 32 nt, Human
caucagauugagugaaaaguugucagauucug

SEQ ID NO: 92089 - RNA, 32 nt, Human
caucagauugcccagaaguauggucuuaagag

SEQ ID NO: 92090 - RNA, 32 nt, Human
caucagcaaccaugacugaugacugggcccua

SEQ ID NO: 92091 - RNA, 23 nt, Human
caucagcaccacgugccaaggag

SEQ ID NO: 92092 - RNA, 32 nt, Human
caucagcaccuuucugagagcugcaguaugac

SEQ ID NO: 92093 - RNA, 32 nt, Human
caucagcagacguucccgugcaccacugugug

SEQ ID NO: 92094 - RNA, 32 nt, Human
caucagcagagcccagaugagcacgggccgcg

SEQ ID NO: 92095 - RNA, 32 nt, Human
caucagcagcaaucaucaaccaaccaaccaau

SEQ ID NO: 92096 - RNA, 32 nt, Human
caucagcagcccuguaacaagugccuugugag

SEQ ID NO: 92097 - RNA, 32 nt, Human
caucagcagccucaccagcugugagccugcua

SEQ ID NO: 92098 - RNA, 32 nt, Human
caucagcaggacaaaccaacagguacuccgca

SEQ ID NO: 92099 - RNA, 32 nt, Human
caucagcaucaucuuucacauguucauuauca

SEQ ID NO: 92100 - RNA, 32 nt, Human
caucagccacuuacuggcgcaguggcucaugc

SEQ ID NO: 92101 - RNA, 32 nt, Human
caucagccagaacaugagagggagaacuaacu

SEQ ID NO: 92102 - RNA, 32 nt, Human
caucagccauaccuaagaccugcaccuaagug

SEQ ID NO: 92103 - RNA, 32 nt, Human
caucagccccuaguucuugagagagaagggca

SEQ ID NO: 92104 - RNA, 32 nt, Human
caucagcccucaauuugugauccggaauuuug

SEQ ID NO: 92105 - RNA, 32 nt, Human
caucagcccugaguaguaacugguuagcuucu

SEQ ID NO: 92106 - RNA, 32 nt, Human
caucagccuccugccagcaguucuugaagcuu

SEQ ID NO: 92107 - RNA, 32 nt, Human
caucagccugucuuagccugagcugcuuugaa

SEQ ID NO: 92108 - RNA, 32 nt, Human
caucagcgucgacuugccuuucccgggguugu

SEQ ID NO: 92109 - RNA, 19 nt, Human
caucagcuaacucuacaga

SEQ ID NO: 92110 - RNA, 32 nt, Human
caucagcuacagccaauuugucagucacguga

SEQ ID NO: 92111 - RNA, 32 nt, Human
caucagcucaacugcacuugccucgcagaggc

SEQ ID NO: 92112 - RNA, 32 nt, Human
caucagcuccacuguugccaaacuuugucgca

SEQ ID NO: 92113 - RNA, 32 nt, Human
caucagcucuaaagcugaccugugguuccguc

SEQ ID NO: 92114 - RNA, 32 nt, Human
caucagcucuuuaagcaucucucuccaaggaa

SEQ ID NO: 92115 - RNA, 32 nt, Human
caucagcugacuaauagaccucagccucaaaa

SEQ ID NO: 92116 - RNA, 32 nt, Human
caucagcugcagcucccagcaugcuacugcca

SEQ ID NO: 92117 - RNA, 32 nt, Human
caucagcugcagcucugcaccaggccgguccc

SEQ ID NO: 92118 - RNA, 32 nt, Human
caucagcugggaggaaaggcagaguugggaaa

SEQ ID NO: 92119 - RNA, 32 nt, Human
caucagcuggguugugggaucucagacaucua

SEQ ID NO: 92120 - RNA, 32 nt, Human
caucagcugugaccaacagagcuggagcccuc

SEQ ID NO: 92121 - RNA, 32 nt, Human
caucagcuucacuuucuugcaguguuguugca

SEQ ID NO: 92122 - RNA, 32 nt, Human
caucaggaaaggagaaaggcagagggagagcg

SEQ ID NO: 92123 - RNA, 17 nt, Human
caucaggaauugucaaa

SEQ ID NO: 92124 - RNA, 32 nt, Human
caucaggacagcuucaccuccuugaggauuaa

SEQ ID NO: 92125 - RNA, 32 nt, Human
caucaggacuggacgguucccgcuggacuaua

SEQ ID NO: 92126 - RNA, 21 nt, Human
caucaggagaaaggcuggguc

SEQ ID NO: 92127 - RNA, 32 nt, Human
caucaggagugaccuccagaagcuccgggacc

SEQ ID NO: 92128 - RNA, 32 nt, Human
caucaggcaagacagacugaaugcaggagugg

SEQ ID NO: 92129 - RNA, 32 nt, Human
caucaggcccuuccagcuccccaggcucccug

SEQ ID NO: 92130 - RNA, 32 nt, Human
caucaggccucaagugggcaugggggcaggga

SEQ ID NO: 92131 - RNA, 32 nt, Human
caucaggccugggacacugcucuccuuccccg

SEQ ID NO: 92132 - RNA, 32 nt, Human
caucaggcgcagggccccagacagcuucccag

SEQ ID NO: 92133 - RNA, 32 nt, Human
caucaggcgggguggaggugcgcgcugagccc

SEQ ID NO: 92134 - RNA, 32 nt, Human
caucaggcuggggcagaggcauagcuauuguc

SEQ ID NO: 92135 - RNA, 32 nt, Human
caucagggaaagcagguguaucagggcuagga

SEQ ID NO: 92136 - RNA, 32 nt, Human
caucagggagccaggacacagaggggcagagc

SEQ ID NO: 92137 - RNA, 32 nt, Human
caucagggagugacaauccagcaagaaauccc

SEQ ID NO: 92138 - RNA, 32 nt, Human
caucagggccuggagacccagcaaggaguugc

SEQ ID NO: 92139 - RNA, 32 nt, Human
caucagggcuuguagggcacuaauagggacaa

SEQ ID NO: 92140 - RNA, 32 nt, Human
caucagggggaagggaggcugagccacgagag

SEQ ID NO: 92141 - RNA, 32 nt, Human
caucagggguagcgagguugcaggagcuggcu

SEQ ID NO: 92142 - RNA, 32 nt, Human
caucaggguaggcuaucuucucugccuucaau

SEQ ID NO: 92143 - RNA, 32 nt, Human
caucaggguccccagccucugggcuccuguuu

SEQ ID NO: 92144 - RNA, 32 nt, Human
caucaggguggggagagcacucucagcaggga

SEQ ID NO: 92145 - RNA, 32 nt, Human
caucagguaccuccucccuuucaucucagcaa

SEQ ID NO: 92146 - RNA, 32 nt, Human
caucaggucaggguugccacaaaagccuccau

SEQ ID NO: 92147 - RNA, 32 nt, Human
caucaggucauugcaguuuuaguucuguguaa

SEQ ID NO: 92148 - RNA, 32 nt, Human
caucagguccuagacgugggagaaggagccua

SEQ ID NO: 92149 - RNA, 32 nt, Human
caucaggugauggauaggagcaacccuguaaa

SEQ ID NO: 92150 - RNA, 32 nt, Human
caucagguuguuagaugcuggcaucucugcag

SEQ ID NO: 92151 - RNA, 32 nt, Human
caucaguaaagaccccaucugccuuguccaug

SEQ ID NO: 92152 - RNA, 23 nt, Human
caucaguaauacgauacagugaa

SEQ ID NO: 92153 - RNA, 32 nt, Human
caucaguaccaucacaguugcuguaaugacag

SEQ ID NO: 92154 - RNA, 32 nt, Human
caucaguacuaccaccaccaccaacaacauca

SEQ ID NO: 92155 - RNA, 32 nt, Human
caucaguaguccuccagccugggcagcugucc

SEQ ID NO: 92156 - RNA, 32 nt, Human
caucaguauguuaaaacuggggagugauuugu

SEQ ID NO: 92157 - RNA, 32 nt, Human
caucagucaagugugcccagugcuuucucuca

SEQ ID NO: 92158 - RNA, 18 nt, Human
caucagucacagucuucc

SEQ ID NO: 92159 - RNA, 32 nt, Human
caucagucaccaccaauuccuuauuaaguuaa

SEQ ID NO: 92160 - RNA, 23 nt, Human
caucagucacgcagacccugcug

SEQ ID NO: 92161 - RNA, 32 nt, Human
caucagucacgcaggaggacugacuugacaga

SEQ ID NO: 92162 - RNA, 22 nt, Human
caucagucaucucuuuauggug

SEQ ID NO: 92163 - RNA, 21 nt, Human
caucagucauguagcuagcug

SEQ ID NO: 92164 - RNA, 32 nt, Human
caucaguccacuccagccugagcaacagagcg

SEQ ID NO: 92165 - RNA, 21 nt, Human
caucagucccccucuguccug

SEQ ID NO: 92166 - RNA, 24 nt, Human
caucaguccugcauuucuuuggug

SEQ ID NO: 92167 - RNA, 32 nt, Human
caucagucugaauccaggucgugggggcuguc

SEQ ID NO: 92168 - RNA, 32 nt, Human
caucagugaagagaugcaagacuuucaacuga

SEQ ID NO: 92169 - RNA, 32 nt, Human
caucagugauggacauuuggguuguuuccucu

SEQ ID NO: 92170 - RNA, 32 nt, Human
caucaguggcaguuuggggagguggaggaggg

SEQ ID NO: 92171 - RNA, 32 nt, Human
caucagugucaaggaagaacuggauggcugag

SEQ ID NO: 92172 - RNA, 29 nt, Human
caucagugucuguggguaguuggaaucuu

SEQ ID NO: 92173 - RNA, 32 nt, Human
caucaguguuaacucccuacagauuacacucu

SEQ ID NO: 92174 - RNA, 32 nt, Human
caucaguuaccaacuaaaucagggcauggugu

SEQ ID NO: 92175 - RNA, 22 nt, Human
caucaguuacugguuucaguug

SEQ ID NO: 92176 - RNA, 32 nt, Human
caucaguucaccuuuaaagacacacauuccuu

SEQ ID NO: 92177 - RNA, 23 nt, Human
caucaguucacugcugcauguug

SEQ ID NO: 92178 - RNA, 22 nt, Human
caucaguucacuguuguuggag

SEQ ID NO: 92179 - RNA, 32 nt, Human
caucaguugcuuuuacucaguguuuucaaaua

SEQ ID NO: 92180 - RNA, 32 nt, Human
caucaguuuucuuuaaaaaccuacaaauggga

SEQ ID NO: 92181 - RNA, 32 nt, Human
caucaguuuuuauugcagcacuguccauauuc

SEQ ID NO: 92182 - RNA, 32 nt, Human
caucauaaauguggugcugcuauucgacaaac

SEQ ID NO: 92183 - RNA, 32 nt, Human
caucauaagucgugcugccggccagguuacuu

SEQ ID NO: 92184 - RNA, 20 nt, Human
caucauaaugguagauccac

SEQ ID NO: 92185 - RNA, 32 nt, Human
caucauaauguauucaccacuggagcuucacu

SEQ ID NO: 92186 - RNA, 32 nt, Human
caucauaccaggggccagaggcgauggcuugc

SEQ ID NO: 92187 - RNA, 32 nt, Human
caucauacccggcuaguuuuuguauuuuuagu

SEQ ID NO: 92188 - RNA, 32 nt, Human
caucauacucacugcagccuugaccgccuggg

SEQ ID NO: 92189 - RNA, 21 nt, Human
caucauacucaggaagaagau

SEQ ID NO: 92190 - RNA, 32 nt, Human
caucauacuguugucauauguugagccugugg

SEQ ID NO: 92191 - RNA, 32 nt, Human
caucauagacuucauacgggagagaaaccuua

SEQ ID NO: 92192 - RNA, 32 nt, Human
caucauagacuucauacugcagagaaaccaua

SEQ ID NO: 92193 - RNA, 32 nt, Human
caucauagacuucauaguggagagaaacccua

SEQ ID NO: 92194 - RNA, 32 nt, Human
caucauagacuucauaguggagagaaaccuua

SEQ ID NO: 92195 - RNA, 32 nt, Human
caucauagacuucauaguggagagaaaccuug

SEQ ID NO: 92196 - RNA, 32 nt, Human
caucauagaucauuuuuccauaugacacuggu

SEQ ID NO: 92197 - RNA, 32 nt, Human
caucauaggagaaaagaagauagcuccacuga

SEQ ID NO: 92198 - RNA, 18 nt, Human
caucaucacacacagaga

SEQ ID NO: 92199 - RNA, 32 nt, Human
caucaucacaccacuccgcugccugggguuuu

SEQ ID NO: 92200 - RNA, 22 nt, Human
caucaucaccaucucuuucuca

SEQ ID NO: 92201 - RNA, 32 nt, Human
caucaucacugaacccagaagagaggguggug

SEQ ID NO: 92202 - RNA, 32 nt, Human
caucaucagaguauccuacacaaaguugucuc

SEQ ID NO: 92203 - RNA, 32 nt, Human
caucaucagcaacuccaaaccccagccacuuc

SEQ ID NO: 92204 - RNA, 32 nt, Human
caucaucaggcagauacagagcacugcagcaa

SEQ ID NO: 92205 - RNA, 32 nt, Human
caucaucaggcuauuaaauaaaauuuauagga

SEQ ID NO: 92206 - RNA, 20 nt, Human
caucaucaguacuccuuguu

SEQ ID NO: 92207 - RNA, 32 nt, Human
caucaucagugacaccaccaggaccaccguca

SEQ ID NO: 92208 - RNA, 23 nt, Human
caucaucaucaccaccaucauca

SEQ ID NO: 92209 - RNA, 23 nt, Human
caucaucaucaucaucauccuca

SEQ ID NO: 92210 - RNA, 32 nt, Human
caucaucaucaucucugcuacagucauguuuc

SEQ ID NO: 92211 - RNA, 32 nt, Human
caucaucauccagagccuaaggacugacaggc

SEQ ID NO: 92212 - RNA, 32 nt, Human
caucaucaucccagcuggagucauggagccuc

SEQ ID NO: 92213 - RNA, 32 nt, Human
caucaucauggagacccaaaaggaugaagcug

SEQ ID NO: 92214 - RNA, 19 nt, Human
caucauccaucucuccaga

SEQ ID NO: 92215 - RNA, 32 nt, Human
caucauccccaccaccaccaccaccaccauca

SEQ ID NO: 92216 - RNA, 32 nt, Human
caucaucccuuucccuuggugcccuccuuuuu

SEQ ID NO: 92217 - RNA, 25 nt, Human
caucauccucccuuccucaucauca

SEQ ID NO: 92218 - RNA, 32 nt, Human
caucauccuugcagguggggguugcuguguaa

SEQ ID NO: 92219 - RNA, 32 nt, Human
caucaucggugacugguuaucacaccaucgcu

SEQ ID NO: 92220 - RNA, 32 nt, Human
caucaucucacaguggucucucuuuucacuaa

SEQ ID NO: 92221 - RNA, 32 nt, Human
caucaucucccaggauccaugagguccagugu

SEQ ID NO: 92222 - RNA, 32 nt, Human
caucaucucccuucucuuucucgcauaacucc

SEQ ID NO: 92223 - RNA, 32 nt, Human
caucaucucugaaggaguuacagggaaguggu

SEQ ID NO: 92224 - RNA, 32 nt, Human
caucaucugggaugugaggagccccucugccu

SEQ ID NO: 92225 - RNA, 32 nt, Human
caucaucugggaugugaggagcgccucugucu

SEQ ID NO: 92226 - RNA, 21 nt, Human
caucaucuguaaaaccaucua

SEQ ID NO: 92227 - RNA, 23 nt, Human
caucaucuuaaguucuucaugcu

SEQ ID NO: 92228 - RNA, 32 nt, Human
caucaucuuccuaggcagucucuuccccaaag

SEQ ID NO: 92229 - RNA, 32 nt, Human
caucaucuucuuuccucuuucuucccacauuu

SEQ ID NO: 92230 - RNA, 32 nt, Human
caucaucuuuggugggucuuuucuuugcuucu

SEQ ID NO: 92231 - RNA, 32 nt, Human
caucaucuuugucaccuccacccccauaaaac

SEQ ID NO: 92232 - RNA, 32 nt, Human
caucaugaagagcggcuggagugacugcccua

SEQ ID NO: 92233 - RNA, 32 nt, Human
caucaugauaagaggaaugaacgugucugcaa

SEQ ID NO: 92234 - RNA, 32 nt, Human
caucaugaucaggcacagaguccagauacacu

SEQ ID NO: 92235 - RNA, 29 nt, Human
caucaugaugcagggaaacacaugucaca

SEQ ID NO: 92236 - RNA, 32 nt, Human
caucaugauguuaucauaucuuauucccuuuu

SEQ ID NO: 92237 - RNA, 32 nt, Human
caucaugcagcucaacuuucuguuggauucca

SEQ ID NO: 92238 - RNA, 32 nt, Human
caucaugcaucacucucccuucugccuccuuc

SEQ ID NO: 92239 - RNA, 32 nt, Human
caucaugccacugcacuccagccuggggcuga

SEQ ID NO: 92240 - RNA, 32 nt, Human
caucaugccacugcacuuccagccugggugac

SEQ ID NO: 92241 - RNA, 20 nt, Human
caucaugccagcuuugucaa

SEQ ID NO: 92242 - RNA, 19 nt, Human
caucaugcccaccagggug

SEQ ID NO: 92243 - RNA, 32 nt, Human
caucaugcccagcuaauuuuuguauuuuagua

SEQ ID NO: 92244 - RNA, 32 nt, Human
caucaugcccagcuaauuuuuguauuuuggua

SEQ ID NO: 92245 - RNA, 32 nt, Human
caucaugcccagcugauuuuuguauuuuuagu

SEQ ID NO: 92246 - RNA, 32 nt, Human
caucaugcccggcuaauuuuuguauuuuuagu

SEQ ID NO: 92247 - RNA, 32 nt, Human
caucaugcccggcuacuuuuuguauuuuuagu

SEQ ID NO: 92248 - RNA, 32 nt, Human
caucaugccugacuaauuuuguauuuuuagua

SEQ ID NO: 92249 - RNA, 32 nt, Human
caucaugccugacuaauuuuuguauuuuuagu

SEQ ID NO: 92250 - RNA, 32 nt, Human
caucaugccuggcuaauuuuuguauuuuuagu

SEQ ID NO: 92251 - RNA, 19 nt, Human
caucaugccuugaguguuc

SEQ ID NO: 92252 - RNA, 23 nt, Human
caucaugcgcagggcccgggacg

SEQ ID NO: 92253 - RNA, 32 nt, Human
caucaugcucuaacuucaguauaccaauaaaa

SEQ ID NO: 92254 - RNA, 32 nt, Human
caucaugcucugagcccauuccuugaaaacua

SEQ ID NO: 92255 - RNA, 32 nt, Human
caucaugcuuggcuaauuuuuguauuuuuagu

SEQ ID NO: 92256 - RNA, 32 nt, Human
caucaugcuuuuccagcucaucacaccccgcc

SEQ ID NO: 92257 - RNA, 32 nt, Human
caucaugcuuuuccucucacacucuugaagag

SEQ ID NO: 92258 - RNA, 18 nt, Human
caucauggauugcucaga

SEQ ID NO: 92259 - RNA, 32 nt, Human
caucauggcacacaccuguagucccagcuacu

SEQ ID NO: 92260 - RNA, 29 nt, Human
caucauggccaugaagaucauggagaaga

SEQ ID NO: 92261 - RNA, 32 nt, Human
caucauggcccagggaggcgggugaaagcucc

SEQ ID NO: 92262 - RNA, 17 nt, Human
caucauggcccaguuaa

SEQ ID NO: 92263 - RNA, 32 nt, Human
caucauggcucacaccuguaaucccagcacuu

SEQ ID NO: 92264 - RNA, 32 nt, Human
caucaugggagacauccagauggcacaccaga

SEQ ID NO: 92265 - RNA, 29 nt, Human
caucaugggcaguggcaaagaagauuaca

SEQ ID NO: 92266 - RNA, 32 nt, Human
caucauggggaccaggauagaaggcuucuucc

SEQ ID NO: 92267 - RNA, 21 nt, Human
caucauggguguuuuugucaa

SEQ ID NO: 92268 - RNA, 21 nt, Human
caucauggucaucuaucauca

SEQ ID NO: 92269 - RNA, 18 nt, Human
caucaugguccccccaaa

SEQ ID NO: 92270 - RNA, 18 nt, Human
caucauggugcucuuaaa

SEQ ID NO: 92271 - RNA, 32 nt, Human
caucauggugucaggaaggcugagauguauug

SEQ ID NO: 92272 - RNA, 15 nt, Human
caucaugguuuucaa

SEQ ID NO: 92273 - RNA, 32 nt, Human
caucauguauuuuaaaugccaccuacauaaau

SEQ ID NO: 92274 - RNA, 19 nt, Human
caucaugucugccagggug

SEQ ID NO: 92275 - RNA, 32 nt, Human
caucaugucuuugucagugccauguccacagu

SEQ ID NO: 92276 - RNA, 32 nt, Human
caucauguggccucuggacacuguggucaguc

SEQ ID NO: 92277 - RNA, 32 nt, Human
caucauguugcccaggcuggucucaaauuccu

SEQ ID NO: 92278 - RNA, 32 nt, Human
caucauguuggccaggcuggucucaaacuccu

SEQ ID NO: 92279 - RNA, 32 nt, Human
caucauguuggccaggcuggucucgaacuccu

SEQ ID NO: 92280 - RNA, 32 nt, Human
caucauguuggccaggcuggucuggaacuccu

SEQ ID NO: 92281 - RNA, 32 nt, Human
caucauguuguccaggcuggugucaaacuccu

SEQ ID NO: 92282 - RNA, 32 nt, Human
caucauguuucccaggcuggucucaaacuccu

SEQ ID NO: 92283 - RNA, 32 nt, Human
caucauuaacauccuucuuuucuauugcuugg

SEQ ID NO: 92284 - RNA, 32 nt, Human
caucauuaacuuuucuccagaaguacugcagg

SEQ ID NO: 92285 - RNA, 32 nt, Human
caucauuacuaaaaacacaaaaauuagccagg

SEQ ID NO: 92286 - RNA, 32 nt, Human
caucauuaucaauuuccacaugaaaaaggugg

SEQ ID NO: 92287 - RNA, 32 nt, Human
caucauucaucuuucucacugcagggccuugc

SEQ ID NO: 92288 - RNA, 32 nt, Human
caucauuccagccugggcaacaagagugaaac

SEQ ID NO: 92289 - RNA, 32 nt, Human
caucauuccuucacucuucucuuuuucccgcc

SEQ ID NO: 92290 - RNA, 32 nt, Human
caucauuccuuuguuguugauaaugggcuuug

SEQ ID NO: 92291 - RNA, 32 nt, Human
caucauucucacuucuaaagccaucaacagag

SEQ ID NO: 92292 - RNA, 32 nt, Human
caucauucuccucugcugacaaccucugccgc

SEQ ID NO: 92293 - RNA, 32 nt, Human
caucauugcaccugcaggcuuagguccucacu

SEQ ID NO: 92294 - RNA, 32 nt, Human
caucauugcacuccagccugggcaacaagagc

SEQ ID NO: 92295 - RNA, 32 nt, Human
caucauugcacuccagccugggcaacagagac

SEQ ID NO: 92296 - RNA, 32 nt, Human
caucauugcacuccagccugggugacagagug

SEQ ID NO: 92297 - RNA, 32 nt, Human
caucauugcacucuagccugggccacagggcg

SEQ ID NO: 92298 - RNA, 32 nt, Human
caucauugcaucuauuuuccauauagucauca

SEQ ID NO: 92299 - RNA, 32 nt, Human
caucauuggaauacaggaaguagcccugcacc

SEQ ID NO: 92300 - RNA, 32 nt, Human
caucauuuauuuuccauugucugucuucgguc

SEQ ID NO: 92301 - RNA, 32 nt, Human
caucauuucacaauccacauuccccagcuugg

SEQ ID NO: 92302 - RNA, 32 nt, Human
caucauuucacucuggucugagugguggccug

SEQ ID NO: 92303 - RNA, 32 nt, Human
caucauuucacuugucaggagugugugugagu

SEQ ID NO: 92304 - RNA, 32 nt, Human
caucauuucagcuucuggccacugggaggcgc

SEQ ID NO: 92305 - RNA, 32 nt, Human
caucauuucaguuccguaggucaguguugcgg

SEQ ID NO: 92306 - RNA, 32 nt, Human
caucauuucuauggccuagccuaggcaguuuc

SEQ ID NO: 92307 - RNA, 32 nt, Human
caucauuucuuaaggcugccuuccucucugag

SEQ ID NO: 92308 - RNA, 32 nt, Human
caucauuugacaguguucucucauuucuuaaa

SEQ ID NO: 92309 - RNA, 32 nt, Human
caucauuuuccuucaagaaugacagggucagc

SEQ ID NO: 92310 - RNA, 32 nt, Human
caucauuuugagcucaaagaauucugagacuu

SEQ ID NO: 92311 - RNA, 32 nt, Human
caucauuuuggagaacaacauggauuucacag

SEQ ID NO: 92312 - RNA, 32 nt, Human
cauccaaaaccuucccagaauccaucagcaag

SEQ ID NO: 92313 - RNA, 32 nt, Human
cauccaaaaguggaccuugggagcaguggggg

SEQ ID NO: 92314 - RNA, 24 nt, Human
cauccaaauagcugggaccacagg

SEQ ID NO: 92315 - RNA, 32 nt, Human
cauccaacagaaucaugagacagacuuugccu

SEQ ID NO: 92316 - RNA, 32 nt, Human
cauccaacauggugaagccccgucucuacuaa

SEQ ID NO: 92317 - RNA, 32 nt, Human
cauccaacuugcaaauaaaaacucagugaugc

SEQ ID NO: 92318 - RNA, 32 nt, Human
cauccaagaagaggagaaaacacugacaaaga

SEQ ID NO: 92319 - RNA, 32 nt, Human
cauccaagacaggcaauaaugagcagaguuua

SEQ ID NO: 92320 - RNA, 19 nt, Human
cauccaagcacaccuggau

SEQ ID NO: 92321 - RNA, 32 nt, Human
cauccaagcuacucaagagacugaggcaggag

SEQ ID NO: 92322 - RNA, 18 nt, Human
cauccaaggaccccugcc

SEQ ID NO: 92323 - RNA, 32 nt, Human
cauccaaggagagugugggcagcuggagccag

SEQ ID NO: 92324 - RNA, 32 nt, Human
cauccaagggagcuggaauugaguaccuaaau

SEQ ID NO: 92325 - RNA, 22 nt, Human
cauccaaggggccuggaaguua

SEQ ID NO: 92326 - RNA, 32 nt, Human
cauccaaguggcauuccuaguaaguuggguag

SEQ ID NO: 92327 - RNA, 32 nt, Human
cauccaaguuguggauggcaggcaggagcaug

SEQ ID NO: 92328 - RNA, 24 nt, Human
cauccaauagggggcuuugagggg

SEQ ID NO: 92329 - RNA, 19 nt, Human
cauccaaugacucugaggg

SEQ ID NO: 92330 - RNA, 32 nt, Human
cauccaauucagacuucuuuuggugcuuguga

SEQ ID NO: 92331 - RNA, 32 nt, Human
cauccacacaaacccacggcucccaguugaca

SEQ ID NO: 92332 - RNA, 32 nt, Human
cauccacacacacaggcacccacccacaccag

SEQ ID NO: 92333 - RNA, 32 nt, Human
cauccacaccaagaggguguugugaugaggug

SEQ ID NO: 92334 - RNA, 32 nt, Human
cauccacaccacucuucgccacccggcuggga

SEQ ID NO: 92335 - RNA, 21 nt, Human
cauccacacccugcguccaca

SEQ ID NO: 92336 - RNA, 32 nt, Human
cauccacaccgccaccaccaagcagccgcuga

SEQ ID NO: 92337 - RNA, 32 nt, Human
cauccacagcaaaagaaaccucuuaaggucaa

SEQ ID NO: 92338 - RNA, 22 nt, Human
cauccacagcacugugcaugca

SEQ ID NO: 92339 - RNA, 22 nt, Human
cauccacagcccacccaucaca

SEQ ID NO: 92340 - RNA, 32 nt, Human
cauccacagccuucccugucaccggcuccucu

SEQ ID NO: 92341 - RNA, 19 nt, Human
cauccacagcuggugcuca

SEQ ID NO: 92342 - RNA, 32 nt, Human
cauccacaucaggacaucccagcuggaguuca

SEQ ID NO: 92343 - RNA, 32 nt, Human
cauccacaucugcucggcaaagaaggaaggca

SEQ ID NO: 92344 - RNA, 17 nt, Human
cauccacauuccacccu

SEQ ID NO: 92345 - RNA, 32 nt, Human
cauccacauuuaagucaccaggccucguuguu

SEQ ID NO: 92346 - RNA, 22 nt, Human
cauccaccaaugaacugaaagg

SEQ ID NO: 92347 - RNA, 18 nt, Human
cauccaccaccagugcug

SEQ ID NO: 92348 - RNA, 32 nt, Human
cauccacccaugaagccaaagccaucaucucu

SEQ ID NO: 92349 - RNA, 32 nt, Human
cauccaccccuucucuucauccuucccuauuc

SEQ ID NO: 92350 - RNA, 32 nt, Human
cauccaccuccaccucccaaggugcugggauu

SEQ ID NO: 92351 - RNA, 32 nt, Human
cauccaccucuuccauaccuuuacaggccucu

SEQ ID NO: 92352 - RNA, 32 nt, Human
cauccaccugcuuaugcauuuaucucuuuugu

SEQ ID NO: 92353 - RNA, 30 nt, Human
cauccacggugacuugcaggucauggagag

SEQ ID NO: 92354 - RNA, 22 nt, Human
cauccacucagggcagccagug

SEQ ID NO: 92355 - RNA, 32 nt, Human
cauccacucaggucuuccucuggaccugcaua

SEQ ID NO: 92356 - RNA, 32 nt, Human
cauccacuccaaagcagagaauuucugaaaaa

SEQ ID NO: 92357 - RNA, 32 nt, Human
cauccacuccaggacagcugagcgucuggaug

SEQ ID NO: 92358 - RNA, 19 nt, Human
cauccacuccugcagucca

SEQ ID NO: 92359 - RNA, 32 nt, Human
cauccacucucccuuguccucccgggggugua

SEQ ID NO: 92360 - RNA, 24 nt, Human
cauccacugaacaaauccauggca

SEQ ID NO: 92361 - RNA, 32 nt, Human
cauccacugaguaccuaccaugugccaaauac

SEQ ID NO: 92362 - RNA, 32 nt, Human
cauccacugcagcucugggcuccauuucccuu

SEQ ID NO: 92363 - RNA, 32 nt, Human
cauccacuggccacccucacucccaggucccc

SEQ ID NO: 92364 - RNA, 32 nt, Human
cauccacuuauuccaaggcuaagaauaggagu

SEQ ID NO: 92365 - RNA, 32 nt, Human
cauccacuucucucuccuucucccucugucaa

SEQ ID NO: 92366 - RNA, 32 nt, Human
cauccacuuggagugcugcggggaagaaauca

SEQ ID NO: 92367 - RNA, 32 nt, Human
cauccacuuuuaucucuuuccaaucacuuguu

SEQ ID NO: 92368 - RNA, 32 nt, Human
cauccagaaacaugacaacgugagcauccugu

SEQ ID NO: 92369 - RNA, 32 nt, Human
cauccagaaagccaugaaagagggacgcuaca

SEQ ID NO: 92370 - RNA, 32 nt, Human
cauccagaaagcuucccugcaaucuugggguu

SEQ ID NO: 92371 - RNA, 32 nt, Human
cauccagaaagugcccagaagaaacuuccugc

SEQ ID NO: 92372 - RNA, 31 nt, Human
cauccagacagcaaagcaaggagggagcgug

SEQ ID NO: 92373 - RNA, 32 nt, Human
cauccagacagcccagggugacuuugaugcca

SEQ ID NO: 92374 - RNA, 17 nt, Human
cauccagacccccugcc

SEQ ID NO: 92375 - RNA, 16 nt, Human
cauccagaccccugcc

SEQ ID NO: 92376 - RNA, 32 nt, Human
cauccagacuguucccuucgcauccugcagaa

SEQ ID NO: 92377 - RNA, 32 nt, Human
cauccagagagggcauggaggcuccauacaac

SEQ ID NO: 92378 - RNA, 32 nt, Human
cauccagagcagccaguguccgggaggcagaa

SEQ ID NO: 92379 - RNA, 32 nt, Human
cauccagagccagcgagcaggagcgcugcguc

SEQ ID NO: 92380 - RNA, 32 nt, Human
cauccagagccucuguccugcccacgcuagcc

SEQ ID NO: 92381 - RNA, 32 nt, Human
cauccagagcugcaucauuccuuggggcaaaa

SEQ ID NO: 92382 - RNA, 20 nt, Human
cauccagagcuggagugcag

SEQ ID NO: 92383 - RNA, 32 nt, Human
cauccagagcuggagugcagcggcacagucau

SEQ ID NO: 92384 - RNA, 32 nt, Human
cauccagauuacuucuucagugccucaggagu

SEQ ID NO: 92385 - RNA, 32 nt, Human
cauccagcacuugccuccgccauggucacucg

SEQ ID NO: 92386 - RNA, 32 nt, Human
cauccagcagcaaacugucguggugccggcac

SEQ ID NO: 92387 - RNA, 32 nt, Human
cauccagccucgcgguucagagcccagcucug

SEQ ID NO: 92388 - RNA, 32 nt, Human
cauccagccucugucuguuacuccugacccac

SEQ ID NO: 92389 - RNA, 32 nt, Human
cauccagcugaucuaggucacaccuggcucuu

SEQ ID NO: 92390 - RNA, 32 nt, Human
cauccagcuggggccaguggaggucaagccug

SEQ ID NO: 92391 - RNA, 32 nt, Human
cauccagcugucacacugacaaaaagaaaaga

SEQ ID NO: 92392 - RNA, 32 nt, Human
cauccagcuucaaccaaugccuggaccugucc

SEQ ID NO: 92393 - RNA, 32 nt, Human
cauccagcuucccacccuccacugacugccau

SEQ ID NO: 92394 - RNA, 32 nt, Human
cauccagcuuggugucaagugggcuguugcug

SEQ ID NO: 92395 - RNA, 32 nt, Human
cauccaggagaaaaaggcaggagcagcaagug

SEQ ID NO: 92396 - RNA, 32 nt, Human
cauccaggagauagaaguugcagugagcugag

SEQ ID NO: 92397 - RNA, 21 nt, Human
cauccaggcuggagugcggug

SEQ ID NO: 92398 - RNA, 32 nt, Human
cauccagggacaguuucgucucccugucaaug

SEQ ID NO: 92399 - RNA, 32 nt, Human
cauccagggccugcacagcuuagagaggcuca

SEQ ID NO: 92400 - RNA, 32 nt, Human
cauccagguaccacaggacagccuggggcagg

SEQ ID NO: 92401 - RNA, 32 nt, Human
cauccaggucaacaccaguagugguaagucgu

SEQ ID NO: 92402 - RNA, 32 nt, Human
cauccaguaugggggaaugauaccucacgucu

SEQ ID NO: 92403 - RNA, 32 nt, Human
cauccaguuaccaccuccugccucagaggcca

SEQ ID NO: 92404 - RNA, 32 nt, Human
cauccaguuagaagccucgguuuggaacagug

SEQ ID NO: 92405 - RNA, 32 nt, Human
cauccaguugcagaaaaacaagcuuaacacgc

SEQ ID NO: 92406 - RNA, 32 nt, Human
cauccauaacauccuuccacagcucccuuccc

SEQ ID NO: 92407 - RNA, 32 nt, Human
cauccauacaaaccaacacagcaucaucuaaa

SEQ ID NO: 92408 - RNA, 22 nt, Human
cauccauacauccaccugccuc

SEQ ID NO: 92409 - RNA, 22 nt, Human
cauccauaccucugccucccca

SEQ ID NO: 92410 - RNA, 32 nt, Human
cauccauaugugugaggaguuaagucuguuuc

SEQ ID NO: 92411 - RNA, 32 nt, Human
cauccaucauaaccaccccagccugggaagga

SEQ ID NO: 92412 - RNA, 32 nt, Human
cauccauccaacaaucauagaauuguucugag

SEQ ID NO: 92413 - RNA, 19 nt, Human
cauccauccuccuaccuca

SEQ ID NO: 92414 - RNA, 32 nt, Human
cauccauccuuuccuagcuccauccuuccguc

SEQ ID NO: 92415 - RNA, 32 nt, Human
cauccaucuacccaacugucaccaucuuugca

SEQ ID NO: 92416 - RNA, 32 nt, Human
cauccaucucuccagacucugccuccuacgag

SEQ ID NO: 92417 - RNA, 32 nt, Human
cauccaucuuucuccacuucccccaggucuug

SEQ ID NO: 92418 - RNA, 20 nt, Human
cauccaugaaauuggcugaa

SEQ ID NO: 92419 - RNA, 20 nt, Human
cauccaugaagagcugaagg

SEQ ID NO: 92420 - RNA, 22 nt, Human
cauccaugauccuccugccuca

SEQ ID NO: 92421 - RNA, 32 nt, Human
cauccaugcacacaccaggaugcagcugccaa

SEQ ID NO: 92422 - RNA, 32 nt, Human
cauccaugcauucuauucccaguaucaggggu

SEQ ID NO: 92423 - RNA, 32 nt, Human
cauccaugcugcuagaauccaaaaagaaucac

SEQ ID NO: 92424 - RNA, 32 nt, Human
cauccaugguggagagcucugaagggguugug

SEQ ID NO: 92425 - RNA, 32 nt, Human
cauccaugucccucguguuggacacuagagcu

SEQ ID NO: 92426 - RNA, 32 nt, Human
cauccauguggaggacagucugagggagccac

SEQ ID NO: 92427 - RNA, 32 nt, Human
cauccauuagccucaugguuuugcuucaaguc

SEQ ID NO: 92428 - RNA, 32 nt, Human
cauccauucacuguucagcuguacugugauuu

SEQ ID NO: 92429 - RNA, 32 nt, Human
cauccauugagcaucucucaugugccagcugc

SEQ ID NO: 92430 - RNA, 32 nt, Human
cauccauugaucugccuaucccuucuuuuuac

SEQ ID NO: 92431 - RNA, 32 nt, Human
cauccauuggcuucucuucucuccuuagaaau

SEQ ID NO: 92432 - RNA, 32 nt, Human
cauccauuuuccagacgucuacucaugucuga

SEQ ID NO: 92433 - RNA, 20 nt, Human
caucccaaaacccacagcac

SEQ ID NO: 92434 - RNA, 19 nt, Human
caucccaaaagaagcacca

SEQ ID NO: 92435 - RNA, 17 nt, Human
caucccaaacggcauca

SEQ ID NO: 92436 - RNA, 32 nt, Human
caucccaaagugcugggauuacagcaucccag

SEQ ID NO: 92437 - RNA, 32 nt, Human
caucccaaagugcugggauuacaggcaugagc

SEQ ID NO: 92438 - RNA, 32 nt, Human
caucccaaaguguugggauuauaggcacgagc

SEQ ID NO: 92439 - RNA, 19 nt, Human
caucccaaauaccaccacc

SEQ ID NO: 92440 - RNA, 32 nt, Human
caucccaaauaccaccaccaaccaccuucuuc

SEQ ID NO: 92441 - RNA, 24 nt, Human
caucccaaauucaaucaguccaua

SEQ ID NO: 92442 - RNA, 17 nt, Human
caucccaaccaggcacc

SEQ ID NO: 92443 - RNA, 17 nt, Human
caucccaaccccauugc

SEQ ID NO: 92444 - RNA, 32 nt, Human
caucccaacccccacacuccccauccuccaac

SEQ ID NO: 92445 - RNA, 20 nt, Human
caucccaaccccugcaccac

SEQ ID NO: 92446 - RNA, 19 nt, Human
caucccaaccgggcaucac

SEQ ID NO: 92447 - RNA, 16 nt, Human
caucccaacgggcacc

SEQ ID NO: 92448 - RNA, 32 nt, Human
caucccaagaugucuuuucugccuuucuuuug

SEQ ID NO: 92449 - RNA, 32 nt, Human
caucccaagcaaggagccccagucucccgagc

SEQ ID NO: 92450 - RNA, 30 nt, Human
caucccaagccccucaugcuccugccuucc

SEQ ID NO: 92451 - RNA, 25 nt, Human
caucccaaguagcugggauuacagg

SEQ ID NO: 92452 - RNA, 32 nt, Human
caucccaaguagcugggauuacaggcacccac

SEQ ID NO: 92453 - RNA, 17 nt, Human
caucccaccacagugaa

SEQ ID NO: 92454 - RNA, 32 nt, Human
caucccaccagccucuccaaggguggugacca

SEQ ID NO: 92455 - RNA, 32 nt, Human
caucccaccagccugcaccacaggcuccccug

SEQ ID NO: 92456 - RNA, 32 nt, Human
caucccacccaccucugucccuccaagggcag

SEQ ID NO: 92457 - RNA, 32 nt, Human
caucccacccagacgguguccucuucuugucg

SEQ ID NO: 92458 - RNA, 32 nt, Human
caucccacccccagguuuccugcaguuguugu

SEQ ID NO: 92459 - RNA, 18 nt, Human
caucccacccuccuccca

SEQ ID NO: 92460 - RNA, 22 nt, Human
caucccacucccagggugucac

SEQ ID NO: 92461 - RNA, 32 nt, Human
caucccacucgcuacccuguccgauggggaaa

SEQ ID NO: 92462 - RNA, 32 nt, Human
caucccacugggugugaaggaaggaaaugacc

SEQ ID NO: 92463 - RNA, 32 nt, Human
caucccacugguuaagaugagagaggcuagag

SEQ ID NO: 92464 - RNA, 23 nt, Human
caucccacuuccaccagcaccau

SEQ ID NO: 92465 - RNA, 32 nt, Human
caucccacuuccaccagcaccauagaagaaua

SEQ ID NO: 92466 - RNA, 32 nt, Human
caucccacuugccugucccaaguuuuguucca

SEQ ID NO: 92467 - RNA, 32 nt, Human
caucccagaaucuggauguggcccaggcagaa

SEQ ID NO: 92468 - RNA, 21 nt, Human
caucccagacgccacaccugc

SEQ ID NO: 92469 - RNA, 32 nt, Human
caucccagagaagggaaauccucuugcucgug

SEQ ID NO: 92470 - RNA, 32 nt, Human
caucccagagagagcugggcccauccucagcc

SEQ ID NO: 92471 - RNA, 19 nt, Human
caucccagagccuggggag

SEQ ID NO: 92472 - RNA, 32 nt, Human
caucccagaugauuaccucugccccuuccagu

SEQ ID NO: 92473 - RNA, 32 nt, Human
caucccagcauugcaauggagaaaaaugggaa

SEQ ID NO: 92474 - RNA, 18 nt, Human
caucccagccagagcacc

SEQ ID NO: 92475 - RNA, 32 nt, Human
caucccagccucguguugagguuccagacuua

SEQ ID NO: 92476 - RNA, 32 nt, Human
caucccagccugaccaauguccacagccaggg

SEQ ID NO: 92477 - RNA, 17 nt, Human
caucccagccugaggug

SEQ ID NO: 92478 - RNA, 32 nt, Human
caucccagccugggagacagagugagacccug

SEQ ID NO: 92479 - RNA, 32 nt, Human
caucccagccugggggccaguggggaacugag

SEQ ID NO: 92480 - RNA, 32 nt, Human
caucccagccugugguuacagugcagacaggc

SEQ ID NO: 92481 - RNA, 32 nt, Human
caucccagcuacucagguaguugaggcacaac

SEQ ID NO: 92482 - RNA, 32 nt, Human
caucccagcuacuccagaggcugagaugggag

SEQ ID NO: 92483 - RNA, 32 nt, Human
caucccagcuacuccaggggcugaggugacag

SEQ ID NO: 92484 - RNA, 32 nt, Human
caucccagcuacucgggaggcugaggcaggag

SEQ ID NO: 92485 - RNA, 32 nt, Human
caucccagcuacucgggaggcugaggugggag

SEQ ID NO: 92486 - RNA, 32 nt, Human
caucccagcuacucgguaggcugaggcaggaa

SEQ ID NO: 92487 - RNA, 32 nt, Human
caucccagcuacuugagaggcugaagcagaag

SEQ ID NO: 92488 - RNA, 32 nt, Human
caucccagcuacuugggaggcugaggcaggag

SEQ ID NO: 92489 - RNA, 19 nt, Human
caucccagcucugcauggc

SEQ ID NO: 92490 - RNA, 32 nt, Human
caucccaggagggagagaggagcugccgagua

SEQ ID NO: 92491 - RNA, 20 nt, Human
caucccaggcagagcaccac

SEQ ID NO: 92492 - RNA, 20 nt, Human
caucccaggcugagcaccgc

SEQ ID NO: 92493 - RNA, 18 nt, Human
caucccagggagcuccac

SEQ ID NO: 92494 - RNA, 19 nt, Human
caucccagggccuggagag

SEQ ID NO: 92495 - RNA, 21 nt, Human
caucccagguguugggcgggg

SEQ ID NO: 92496 - RNA, 32 nt, Human
caucccaguaggggcggccgggcagaggcgcc

SEQ ID NO: 92497 - RNA, 32 nt, Human
caucccaguaguuucuccucugagacacaugg

SEQ ID NO: 92498 - RNA, 32 nt, Human
caucccagucaugguacccuguggaggaaugc

SEQ ID NO: 92499 - RNA, 32 nt, Human
caucccaguggaggggaaaggggauaaguguu

SEQ ID NO: 92500 - RNA, 32 nt, Human
caucccaguggaggggaaaggggauguuucaa

SEQ ID NO: 92501 - RNA, 20 nt, Human
caucccaguguccagcacca

SEQ ID NO: 92502 - RNA, 32 nt, Human
caucccaguuccucuucaaagccaaacagaca

SEQ ID NO: 92503 - RNA, 32 nt, Human
caucccaguugguuuucucauggacaucucuu

SEQ ID NO: 92504 - RNA, 32 nt, Human
caucccauccagcuaauuuuuguauuuuuaau

SEQ ID NO: 92505 - RNA, 23 nt, Human
caucccaucuaaaaacucuucaa

SEQ ID NO: 92506 - RNA, 32 nt, Human
caucccaucuggcggacuccucuuccucucuc

SEQ ID NO: 92507 - RNA, 32 nt, Human
caucccaucugugcugcuggguccccaggcgc

SEQ ID NO: 92508 - RNA, 32 nt, Human
caucccaugaaacccaggcuguagagaggauu

SEQ ID NO: 92509 - RNA, 32 nt, Human
caucccauggccagggcgggccacugugcucc

SEQ ID NO: 92510 - RNA, 31 nt, Human
caucccauggcccaucaccugccugcagcca

SEQ ID NO: 92511 - RNA, 22 nt, Human
caucccaugguaaaauauucaa

SEQ ID NO: 92512 - RNA, 32 nt, Human
caucccaugguggcaggugcagcgguggggag

SEQ ID NO: 92513 - RNA, 32 nt, Human
caucccaugugggauggagcagaacugcauua

SEQ ID NO: 92514 - RNA, 32 nt, Human
cauccccaaaaccaaacacacuccugcucaaa

SEQ ID NO: 92515 - RNA, 32 nt, Human
cauccccaagccccagagagugacagagcccc

SEQ ID NO: 92516 - RNA, 22 nt, Human
cauccccacaaacauuuugaaa

SEQ ID NO: 92517 - RNA, 32 nt, Human
cauccccacaaaccagguaaugccaguuugcc

SEQ ID NO: 92518 - RNA, 32 nt, Human
cauccccacaccauugccugcuccucccaugg

SEQ ID NO: 92519 - RNA, 21 nt, Human
cauccccaccaccaccaccac

SEQ ID NO: 92520 - RNA, 32 nt, Human
cauccccaccaccaccaccaccaccaucagca

SEQ ID NO: 92521 - RNA, 32 nt, Human
cauccccaccccuucugccagacugccuuuga

SEQ ID NO: 92522 - RNA, 32 nt, Human
cauccccaccucagugccugcggggcccugag

SEQ ID NO: 92523 - RNA, 25 nt, Human
cauccccagacccaccagacaccac

SEQ ID NO: 92524 - RNA, 32 nt, Human
cauccccagcagauggggguggcaagggggag

SEQ ID NO: 92525 - RNA, 32 nt, Human
cauccccaggagacucaggcaguggccuggag

SEQ ID NO: 92526 - RNA, 32 nt, Human
cauccccaggccuugcuggggugcagggguau

SEQ ID NO: 92527 - RNA, 25 nt, Human
cauccccaguacugccgggaagugu

SEQ ID NO: 92528 - RNA, 32 nt, Human
cauccccagucgcuuccaguuggagcagcugc

SEQ ID NO: 92529 - RNA, 32 nt, Human
caucccccaacccucccugggcgugggggugu

SEQ ID NO: 92530 - RNA, 25 nt, Human
caucccccaagucacuacagcaucu

SEQ ID NO: 92531 - RNA, 32 nt, Human
caucccccaagugaugggaacaagggcccgcc

SEQ ID NO: 92532 - RNA, 28 nt, Human
caucccccaagugccucaccaguccccc

SEQ ID NO: 92533 - RNA, 32 nt, Human
caucccccaagugccucaccagucccccagac

SEQ ID NO: 92534 - RNA, 24 nt, Human
caucccccacagggucccugauaa

SEQ ID NO: 92535 - RNA, 18 nt, Human
caucccccaccugcccca

SEQ ID NO: 92536 - RNA, 32 nt, Human
caucccccagaagagcgcaagcacagaagcca

SEQ ID NO: 92537 - RNA, 32 nt, Human
caucccccagcugcucccaucuugcuggaauu

SEQ ID NO: 92538 - RNA, 32 nt, Human
caucccccaguagaggccacugugcuguguau

SEQ ID NO: 92539 - RNA, 32 nt, Human
caucccccuccccgcccuggcauccacccucu

SEQ ID NO: 92540 - RNA, 32 nt, Human
caucccccugcaccgacgcgccggagacaucc

SEQ ID NO: 92541 - RNA, 32 nt, Human
caucccccugccugcugccucagucugcaacc

SEQ ID NO: 92542 - RNA, 32 nt, Human
cauccccgcagugugcacuaaggggcccggcc

SEQ ID NO: 92543 - RNA, 30 nt, Human
cauccccgccucucccugcccugugauauc

SEQ ID NO: 92544 - RNA, 32 nt, Human
cauccccuccccuccgcaccacugaccucuug

SEQ ID NO: 92545 - RNA, 32 nt, Human
cauccccucccgccucuggcguagcaggagca

SEQ ID NO: 92546 - RNA, 20 nt, Human
cauccccuccugugggagug

SEQ ID NO: 92547 - RNA, 31 nt, Human
cauccccuccuucucacuugccaaagagauu

SEQ ID NO: 92548 - RNA, 32 nt, Human
cauccccugaaugacaagucacaaggguauca

SEQ ID NO: 92549 - RNA, 18 nt, Human
cauccccugagcacacua

SEQ ID NO: 92550 - RNA, 32 nt, Human
cauccccugaguguccauggccucugugcucc

SEQ ID NO: 92551 - RNA, 19 nt, Human
cauccccugcccccuccca

SEQ ID NO: 92552 - RNA, 32 nt, Human
cauccccugccuccuucaccagccuggcuuuu

SEQ ID NO: 92553 - RNA, 32 nt, Human
cauccccugccugccaccugccccucggcugc

SEQ ID NO: 92554 - RNA, 32 nt, Human
cauccccuggcccuuguuuucucccaugugga

SEQ ID NO: 92555 - RNA, 32 nt, Human
cauccccuguccagaucccucacaucaggguc

SEQ ID NO: 92556 - RNA, 32 nt, Human
cauccccuucaguucacaaaagcugacauuuu

SEQ ID NO: 92557 - RNA, 21 nt, Human
cauccccuugaauaucccagg

SEQ ID NO: 92558 - RNA, 32 nt, Human
cauccccuuggcccauugugugcaguaagccu

SEQ ID NO: 92559 - RNA, 25 nt, Human
caucccgaguagcugggacuacagg

SEQ ID NO: 92560 - RNA, 32 nt, Human
caucccgaguagcugggacuacaggugcacgc

SEQ ID NO: 92561 - RNA, 32 nt, Human
caucccgcagaugagaccaaagccacauuaug

SEQ ID NO: 92562 - RNA, 32 nt, Human
caucccgcagggugccugggcggagaugucuu

SEQ ID NO: 92563 - RNA, 22 nt, Human
caucccgccgccgccgccgccg

SEQ ID NO: 92564 - RNA, 32 nt, Human
caucccgcggaggagcgcgcagccccggggag

SEQ ID NO: 92565 - RNA, 32 nt, Human
caucccggcaagggaggaagggacgcccgagc

SEQ ID NO: 92566 - RNA, 32 nt, Human
caucccggcuaacacggugaaaccccgucucu

SEQ ID NO: 92567 - RNA, 32 nt, Human
caucccgggacgcucccuucucccacccagga

SEQ ID NO: 92568 - RNA, 32 nt, Human
caucccgguacuggcuggagucuguguucgag

SEQ ID NO: 92569 - RNA, 32 nt, Human
caucccgguggagagcgcgcccauguucuccg

SEQ ID NO: 92570 - RNA, 32 nt, Human
caucccguguucuccuuuuccucucucccgga

SEQ ID NO: 92571 - RNA, 18 nt, Human
caucccuaccacccagga

SEQ ID NO: 92572 - RNA, 32 nt, Human
caucccuacuaaggauacaaaaauuggccggg

SEQ ID NO: 92573 - RNA, 32 nt, Human
caucccuacugccaguuauuggcuccucucuu

SEQ ID NO: 92574 - RNA, 25 nt, Human
caucccucagcuacccuggaucuuu

SEQ ID NO: 92575 - RNA, 32 nt, Human
caucccucauuuccucccucucauucuucuuu

SEQ ID NO: 92576 - RNA, 32 nt, Human
caucccuccagccugggaucucacugcucugc

SEQ ID NO: 92577 - RNA, 18 nt, Human
caucccucccagcaccac

SEQ ID NO: 92578 - RNA, 23 nt, Human
caucccuccccgggccuggggcg

SEQ ID NO: 92579 - RNA, 32 nt, Human
caucccucccuuccucuucucuccuucccucc

SEQ ID NO: 92580 - RNA, 32 nt, Human
caucccuccucucccaccuccuggcacuucca

SEQ ID NO: 92581 - RNA, 32 nt, Human
caucccuccucugcucuccaucauaacugcua

SEQ ID NO: 92582 - RNA, 32 nt, Human
caucccuccugccucagccuccccaguagcug

SEQ ID NO: 92583 - RNA, 32 nt, Human
caucccucgcccccagccugaggugaucuuuc

SEQ ID NO: 92584 - RNA, 32 nt, Human
caucccucuccucuccuccucugugcuccugu

SEQ ID NO: 92585 - RNA, 32 nt, Human
caucccucugcagccugucaucccugucugug

SEQ ID NO: 92586 - RNA, 32 nt, Human
caucccugaaguuuucagcuaaacuugguuuc

SEQ ID NO: 92587 - RNA, 18 nt, Human
caucccugacccuucaca

SEQ ID NO: 92588 - RNA, 32 nt, Human
caucccugaggcuggacuccagaucugcaccg

SEQ ID NO: 92589 - RNA, 32 nt, Human
caucccugcaccuccggggugucuccgcucgc

SEQ ID NO: 92590 - RNA, 32 nt, Human
caucccugcagccccuuccucuuccuacaccc

SEQ ID NO: 92591 - RNA, 32 nt, Human
caucccugcagcugaacccagcacuuuuuaug

SEQ ID NO: 92592 - RNA, 32 nt, Human
caucccugcccugccuccagccuugguggcuc

SEQ ID NO: 92593 - RNA, 32 nt, Human
caucccugcuccagcccauucugagacucagu

SEQ ID NO: 92594 - RNA, 32 nt, Human
caucccugcugcacucagugguuggcggaaac

SEQ ID NO: 92595 - RNA, 32 nt, Human
caucccuggcccuguagcacagacacauacaa

SEQ ID NO: 92596 - RNA, 32 nt, Human
caucccugggaggagagaguagugacacucag

SEQ ID NO: 92597 - RNA, 32 nt, Human
caucccugggcuguugggaggaacagaugaga

SEQ ID NO: 92598 - RNA, 32 nt, Human
caucccuggggagggggcuggggugcagaaaa

SEQ ID NO: 92599 - RNA, 19 nt, Human
caucccuggggcagacgug

SEQ ID NO: 92600 - RNA, 32 nt, Human
caucccuggguuuaugaugcagcaggugcuuu

SEQ ID NO: 92601 - RNA, 22 nt, Human
caucccugguccuuugaagguu

SEQ ID NO: 92602 - RNA, 32 nt, Human
caucccuggucucccgccuccugggcaagcuc

SEQ ID NO: 92603 - RNA, 23 nt, Human
caucccuguagggaucccagagc

SEQ ID NO: 92604 - RNA, 32 nt, Human
caucccugugagaagcaggaggggaauucuca

SEQ ID NO: 92605 - RNA, 32 nt, Human
caucccugugcauggugaucaccaucuauuau

SEQ ID NO: 92606 - RNA, 32 nt, Human
caucccuguggccauggagcuccugggugagc

SEQ ID NO: 92607 - RNA, 32 nt, Human
caucccugugggcagcccugcccccgcuccug

SEQ ID NO: 92608 - RNA, 32 nt, Human
caucccuguggggagugcagggccagaugggg

SEQ ID NO: 92609 - RNA, 32 nt, Human
caucccuguuggcaguaaaucuucccacaggc

SEQ ID NO: 92610 - RNA, 32 nt, Human
caucccuuaagccuccagaagggacauagccc

SEQ ID NO: 92611 - RNA, 32 nt, Human
caucccuucacuucugcauuccuguaacuuuu

SEQ ID NO: 92612 - RNA, 32 nt, Human
caucccuucucccaccuccuccccucucccuc

SEQ ID NO: 92613 - RNA, 32 nt, Human
caucccuucucccauaccuugcucuacacauc

SEQ ID NO: 92614 - RNA, 32 nt, Human
caucccuugauaccugcuggguauugguucca

SEQ ID NO: 92615 - RNA, 32 nt, Human
caucccuugccaggagcucagggcugagcuag

SEQ ID NO: 92616 - RNA, 32 nt, Human
caucccuugguauacuccagggauugguuuca

SEQ ID NO: 92617 - RNA, 32 nt, Human
caucccuugguauccauggggaauugguucca

SEQ ID NO: 92618 - RNA, 32 nt, Human
caucccuuguaacccgguaugggcgccccugc

SEQ ID NO: 92619 - RNA, 32 nt, Human
caucccuuguaaggugaguucagucuacguug

SEQ ID NO: 92620 - RNA, 32 nt, Human
caucccuugucuggccccaggcugccaucacu

SEQ ID NO: 92621 - RNA, 32 nt, Human
caucccuuuaaaucugugccuuuuucuucuug

SEQ ID NO: 92622 - RNA, 32 nt, Human
caucccuuuaguacaaauuaagcuauuaaaaa

SEQ ID NO: 92623 - RNA, 32 nt, Human
caucccuuuccuuacuacuugccugcacuucu

SEQ ID NO: 92624 - RNA, 32 nt, Human
caucccuuugcuuguggcaggagauggcuuaa

SEQ ID NO: 92625 - RNA, 32 nt, Human
caucccuuugcuuguggcgggagauggcuuaa

SEQ ID NO: 92626 - RNA, 32 nt, Human
caucccuuuuugagcgugacuuguuuuggccc

SEQ ID NO: 92627 - RNA, 32 nt, Human
cauccgaaaccagcaucugcaccuaaacccau

SEQ ID NO: 92628 - RNA, 18 nt, Human
cauccgaacagauccuca

SEQ ID NO: 92629 - RNA, 32 nt, Human
cauccgagggcaccugugaccugcacucacaa

SEQ ID NO: 92630 - RNA, 32 nt, Human
cauccgauguccugcacucggccuggauccuc

SEQ ID NO: 92631 - RNA, 32 nt, Human
cauccgcacagaaucgaccuuugcaugcaaug

SEQ ID NO: 92632 - RNA, 32 nt, Human
cauccgcaggagggucccuugcagugacagca

SEQ ID NO: 92633 - RNA, 32 nt, Human
cauccgcauccagcaucagauggcuuugcauc

SEQ ID NO: 92634 - RNA, 32 nt, Human
cauccgccaagcuucgguucucagccucagau

SEQ ID NO: 92635 - RNA, 32 nt, Human
cauccgccacgugaagagacagaaggaggaug

SEQ ID NO: 92636 - RNA, 32 nt, Human
cauccgccagugccuugccagugugcacgguc

SEQ ID NO: 92637 - RNA, 32 nt, Human
cauccgccauguccuucagugccaccauucuc

SEQ ID NO: 92638 - RNA, 32 nt, Human
cauccgccccuccugcuccaucacugcugagc

SEQ ID NO: 92639 - RNA, 32 nt, Human
cauccgcccuacuucccaucccacacaaaccc

SEQ ID NO: 92640 - RNA, 32 nt, Human
cauccgccucagccucccaacaugcugggauu

SEQ ID NO: 92641 - RNA, 23 nt, Human
cauccgccucugccgcugccuca

SEQ ID NO: 92642 - RNA, 32 nt, Human
cauccgccucugccgcugccucaggcuaccca

SEQ ID NO: 92643 - RNA, 32 nt, Human
cauccgccuucccauccacacugccuuuagug

SEQ ID NO: 92644 - RNA, 32 nt, Human
cauccgcucccuccccagcaggcacagacauc

SEQ ID NO: 92645 - RNA, 32 nt, Human
cauccgcugcagcuggccacacugagggcccu

SEQ ID NO: 92646 - RNA, 32 nt, Human
cauccgcuugaaugcuguguacacacucaccg

SEQ ID NO: 92647 - RNA, 31 nt, Human
cauccggaggcagggaccaugccaggaggag

SEQ ID NO: 92648 - RNA, 32 nt, Human
cauccggcacugaagcccugguguuccugguc

SEQ ID NO: 92649 - RNA, 32 nt, Human
cauccggcagcuuucacuuugacuaugagguu

SEQ ID NO: 92650 - RNA, 32 nt, Human
cauccggccugugcugggcauggguggugaca

SEQ ID NO: 92651 - RNA, 32 nt, Human
cauccggggaggacuugcggggcagaggaggg

SEQ ID NO: 92652 - RNA, 32 nt, Human
cauccggucaccagaagugaaaaggcugccuc

SEQ ID NO: 92653 - RNA, 22 nt, Human
cauccgguuaacugucucuuuc

SEQ ID NO: 92654 - RNA, 32 nt, Human
cauccgguuccucuucuucccaggugugccaa

SEQ ID NO: 92655 - RNA, 32 nt, Human
cauccguacccgggccacagagcugcugaccc

SEQ ID NO: 92656 - RNA, 32 nt, Human
cauccguaccuugccuagccucucccucuccc

SEQ ID NO: 92657 - RNA, 32 nt, Human
cauccgucacugcacucaugccucccucuguu

SEQ ID NO: 92658 - RNA, 32 nt, Human
cauccguccuccaggaucuggggagaaagagc

SEQ ID NO: 92659 - RNA, 32 nt, Human
cauccgucuccucugcagcaucuuuccucccc

SEQ ID NO: 92660 - RNA, 32 nt, Human
cauccgucuccucugcggcaucuuuccucccc

SEQ ID NO: 92661 - RNA, 32 nt, Human
cauccgugagccacacaaaguuccccacccca

SEQ ID NO: 92662 - RNA, 32 nt, Human
cauccgugaugcucaguguucaaaaccacagc

SEQ ID NO: 92663 - RNA, 32 nt, Human
cauccguggcagguacgccacagcagacacaa

SEQ ID NO: 92664 - RNA, 32 nt, Human
cauccgugucaacccagccauggggaagauca

SEQ ID NO: 92665 - RNA, 32 nt, Human
cauccgugucaagaagccugaccuaacacguu

SEQ ID NO: 92666 - RNA, 32 nt, Human
cauccgugugccggcccugcagugccugccca

SEQ ID NO: 92667 - RNA, 32 nt, Human
cauccguucucccagucccaaggguccacgau

SEQ ID NO: 92668 - RNA, 32 nt, Human
cauccuaaagugcugggauuacaggcgugagc

SEQ ID NO: 92669 - RNA, 32 nt, Human
cauccuaagaucuuugcagauuaucuguggaa

SEQ ID NO: 92670 - RNA, 32 nt, Human
cauccuaauucaguaaguucucaggcuuccaa

SEQ ID NO: 92671 - RNA, 32 nt, Human
cauccuaccccagaugcuaaagugauucaagg

SEQ ID NO: 92672 - RNA, 32 nt, Human
cauccuacuaaauagcccauguucuucauuug

SEQ ID NO: 92673 - RNA, 32 nt, Human
cauccuacugggaacgacacaccagcuccugg

SEQ ID NO: 92674 - RNA, 32 nt, Human
cauccuagacacccucccuguuguucacagag

SEQ ID NO: 92675 - RNA, 32 nt, Human
cauccuagacaggcccuuauaaucuugcuuca

SEQ ID NO: 92676 - RNA, 32 nt, Human
cauccuagccaacaucgugaaaccccaucucu

SEQ ID NO: 92677 - RNA, 32 nt, Human
cauccuagccaacauggugaaaacccaucugu

SEQ ID NO: 92678 - RNA, 32 nt, Human
cauccuagccaacauggugaaaccccaucugu

SEQ ID NO: 92679 - RNA, 32 nt, Human
cauccuagccaccccucccugccuugugccug

SEQ ID NO: 92680 - RNA, 22 nt, Human
cauccuaggcaacagagugaga

SEQ ID NO: 92681 - RNA, 32 nt, Human
cauccuagucugggcgacagagccagacucca

SEQ ID NO: 92682 - RNA, 32 nt, Human
cauccuauaauguguacuugcuuuguuuuguu

SEQ ID NO: 92683 - RNA, 32 nt, Human
cauccuaugaacugaaagagcagccgccgccg

SEQ ID NO: 92684 - RNA, 32 nt, Human
cauccuauuuucuccucuccaagucucagauu

SEQ ID NO: 92685 - RNA, 20 nt, Human
cauccucaaaaggcacgggg

SEQ ID NO: 92686 - RNA, 32 nt, Human
cauccucaacacuaguauuaagugagaguucc

SEQ ID NO: 92687 - RNA, 32 nt, Human
cauccucaaccugcuguccuccagaaagcacc

SEQ ID NO: 92688 - RNA, 32 nt, Human
cauccucaacuuccuguaccucuggaagucuu

SEQ ID NO: 92689 - RNA, 32 nt, Human
cauccucaagaaaacucacugccuuuaccuac

SEQ ID NO: 92690 - RNA, 32 nt, Human
cauccucacacacucagccucugccucaggug

SEQ ID NO: 92691 - RNA, 31 nt, Human
cauccucacagcugcagggccaggugcaugg

SEQ ID NO: 92692 - RNA, 18 nt, Human
cauccucacccagcaccc

SEQ ID NO: 92693 - RNA, 32 nt, Human
cauccucacuguggaguaaugagggggaggag

SEQ ID NO: 92694 - RNA, 32 nt, Human
cauccucagccccucugccaccaccuuaaaua

SEQ ID NO: 92695 - RNA, 32 nt, Human
cauccucagcuccccuccuugcuuccucgagu

SEQ ID NO: 92696 - RNA, 31 nt, Human
cauccucagcuguccauccaggcccagaagg

SEQ ID NO: 92697 - RNA, 18 nt, Human
cauccucaguuguuggag

SEQ ID NO: 92698 - RNA, 32 nt, Human
cauccucauacccacccccacccaagggccug

SEQ ID NO: 92699 - RNA, 32 nt, Human
cauccucauccuggcacuccuccaggguguca

SEQ ID NO: 92700 - RNA, 32 nt, Human
cauccuccacaguggcugccuccucauuuggc

SEQ ID NO: 92701 - RNA, 32 nt, Human
cauccucccaccucagcuuuccaaguagcuga

SEQ ID NO: 92702 - RNA, 32 nt, Human
cauccucccauggcuuccccugcccucacucc

SEQ ID NO: 92703 - RNA, 19 nt, Human
cauccuccccaaccaccga

SEQ ID NO: 92704 - RNA, 32 nt, Human
cauccuccccuccggguuuucacacugggcga

SEQ ID NO: 92705 - RNA, 32 nt, Human
cauccucccgcgcccagccccugcugcucugg

SEQ ID NO: 92706 - RNA, 32 nt, Human
cauccucccugcucacagagggcacugugguc

SEQ ID NO: 92707 - RNA, 32 nt, Human
cauccuccgcagccacaccccaggcgcauuga

SEQ ID NO: 92708 - RNA, 16 nt, Human
cauccuccgccacuaa

SEQ ID NO: 92709 - RNA, 32 nt, Human
cauccuccguccacuugagcucugccucuucc

SEQ ID NO: 92710 - RNA, 32 nt, Human
cauccuccucccacccggcugcagaggccaga

SEQ ID NO: 92711 - RNA, 32 nt, Human
cauccuccucucccccaccauucgauuugauc

SEQ ID NO: 92712 - RNA, 23 nt, Human
cauccuccucugucauacuggag

SEQ ID NO: 92713 - RNA, 32 nt, Human
cauccuccugcccccaccccaggcugggcugu

SEQ ID NO: 92714 - RNA, 32 nt, Human
cauccuccuuguuggucuacucaggcccagcc

SEQ ID NO: 92715 - RNA, 32 nt, Human
cauccucgccaacagggugaaaccccaccucu

SEQ ID NO: 92716 - RNA, 21 nt, Human
cauccucggcaucagcaccac

SEQ ID NO: 92717 - RNA, 32 nt, Human
cauccucguuguugcugucaucauguucacug

SEQ ID NO: 92718 - RNA, 32 nt, Human
cauccucuaagcuugaagaagggagacgaaaa

SEQ ID NO: 92719 - RNA, 32 nt, Human
cauccucuaccagcagagaagagaguggccca

SEQ ID NO: 92720 - RNA, 32 nt, Human
cauccucuaggguuccacaggccccugaccgc

SEQ ID NO: 92721 - RNA, 32 nt, Human
cauccucucacggccagcaucuugucccccac

SEQ ID NO: 92722 - RNA, 32 nt, Human
cauccucuccaaaguuggagcuucuauugcca

SEQ ID NO: 92723 - RNA, 32 nt, Human
cauccucuccacccucugggccucagugucuu

SEQ ID NO: 92724 - RNA, 32 nt, Human
cauccucuccacccugcauuccaaaugcugcu

SEQ ID NO: 92725 - RNA, 32 nt, Human
cauccucuccccuccuuccuccccugggucac

SEQ ID NO: 92726 - RNA, 32 nt, Human
cauccucucucugugcccuccugcaauggcag

SEQ ID NO: 92727 - RNA, 32 nt, Human
cauccucucuggggaugguggguggggguguc

SEQ ID NO: 92728 - RNA, 32 nt, Human
cauccucugaaccccaaucccccagccccacu

SEQ ID NO: 92729 - RNA, 32 nt, Human
cauccucugacugcuucccccucucucugucu

SEQ ID NO: 92730 - RNA, 32 nt, Human
cauccucugaugacccauccugggugagugga

SEQ ID NO: 92731 - RNA, 32 nt, Human
cauccucugcacuguugaaucacuggacuuac

SEQ ID NO: 92732 - RNA, 32 nt, Human
cauccucugcugcagcugggagagcugaguuc

SEQ ID NO: 92733 - RNA, 32 nt, Human
cauccucugcuggcucuccuguggucaucuug

SEQ ID NO: 92734 - RNA, 32 nt, Human
cauccucugcuuguggcaaaugaugcauaaau

SEQ ID NO: 92735 - RNA, 32 nt, Human
cauccucugucucuggggcucaucuuacuagu

SEQ ID NO: 92736 - RNA, 32 nt, Human
cauccucuucacccugcccugccugcaguuga

SEQ ID NO: 92737 - RNA, 32 nt, Human
cauccucuucauuccucucagccaaaaagacc

SEQ ID NO: 92738 - RNA, 32 nt, Human
cauccucuugguuggcccccuugucaguccca

SEQ ID NO: 92739 - RNA, 32 nt, Human
cauccugaagucagcccaggcgcccugagcau

SEQ ID NO: 92740 - RNA, 32 nt, Human
cauccugaccuucaucucugggcuuguuccgg

SEQ ID NO: 92741 - RNA, 32 nt, Human
cauccugacuccgucauuuaauaaagaaggaa

SEQ ID NO: 92742 - RNA, 32 nt, Human
cauccugacuccuugaaauuuaccuuuuguua

SEQ ID NO: 92743 - RNA, 32 nt, Human
cauccugagaagaaauaaugauggaaacaugu

SEQ ID NO: 92744 - RNA, 32 nt, Human
cauccugagacaccucagggcugcauucagcu

SEQ ID NO: 92745 - RNA, 32 nt, Human
cauccugagcucugucuccugccccuccugcu

SEQ ID NO: 92746 - RNA, 32 nt, Human
cauccugaguaacauggugaaaccccaucucu

SEQ ID NO: 92747 - RNA, 32 nt, Human
cauccugauucuggacuuuucauuauaauucu

SEQ ID NO: 92748 - RNA, 32 nt, Human
cauggccugcaaccccagggucaagggugaag

SEQ ID NO: 92749 - RNA, 32 nt, Human
cauggccugccugccuuuuggcuuuguuucaa

SEQ ID NO: 92750 - RNA, 32 nt, Human
cauggccugucacuacagccuagggauuuuaa

SEQ ID NO: 92751 - RNA, 32 nt, Human
cauggccuguccccacauccagcacuugccuc

SEQ ID NO: 92752 - RNA, 32 nt, Human
cauggccugugcagugaggggaccuggguccu

SEQ ID NO: 92753 - RNA, 20 nt, Human
cauggccuuggaaauggggc

SEQ ID NO: 92754 - RNA, 24 nt, Human
cauggcgaaaacccaucucuacua

SEQ ID NO: 92755 - RNA, 25 nt, Human
cauggcgaaacaccugucucuacua

SEQ ID NO: 92756 - RNA, 24 nt, Human
cauggcgaaaccaugccucuacua

SEQ ID NO: 92757 - RNA, 24 nt, Human
cauggcgaaaccaugucucuacua

SEQ ID NO: 92758 - RNA, 24 nt, Human
cauggcgaaacccagucucuacua

SEQ ID NO: 92759 - RNA, 22 nt, Human
cauggcgaaaccccaucucuac

SEQ ID NO: 92760 - RNA, 23 nt, Human
cauggcgaaaccccaucucuacu

SEQ ID NO: 92761 - RNA, 24 nt, Human
cauggcgaaaccccaucucuacua

SEQ ID NO: 92762 - RNA, 24 nt, Human
cauggcgaaaccccaucucuacug

SEQ ID NO: 92763 - RNA, 28 nt, Human
cauggcgaaaccccaucucucucuacua

SEQ ID NO: 92764 - RNA, 24 nt, Human
cauggcgaaaccccaucucugcua

SEQ ID NO: 92765 - RNA, 24 nt, Human
cauggcgaaaccccauuucuacua

SEQ ID NO: 92766 - RNA, 24 nt, Human
cauggcgaaaccccgucucuacua

SEQ ID NO: 92767 - RNA, 23 nt, Human
cauggcgaaaccccucucuacua

SEQ ID NO: 92768 - RNA, 24 nt, Human
cauggcgaaacccuaccucuacua

SEQ ID NO: 92769 - RNA, 22 nt, Human
cauggcgaaacccuaucucuac

SEQ ID NO: 92770 - RNA, 24 nt, Human
cauggcgaaacccuaucucuacua

SEQ ID NO: 92771 - RNA, 24 nt, Human
cauggcgaaacccuaucucuccua

SEQ ID NO: 92772 - RNA, 21 nt, Human
cauggcgaaacccugucucua

SEQ ID NO: 92773 - RNA, 24 nt, Human
cauggcgaaacccugucucuacua

SEQ ID NO: 92774 - RNA, 24 nt, Human
cauggcgaaaccucaucucuacua

SEQ ID NO: 92775 - RNA, 24 nt, Human
cauggcgaaaccucgccucuacua

SEQ ID NO: 92776 - RNA, 24 nt, Human
cauggcgaaaccucgucucuacua

SEQ ID NO: 92777 - RNA, 24 nt, Human
cauggcgaaaccucuucucuacua

SEQ ID NO: 92778 - RNA, 24 nt, Human
cauggcgagaccccaucucuacua

SEQ ID NO: 92779 - RNA, 32 nt, Human
cauggcgauaauucaugcugaagaggaacucu

SEQ ID NO: 92780 - RNA, 32 nt, Human
cauggcgcaacaacuggggagguggagguagg

SEQ ID NO: 92781 - RNA, 32 nt, Human
cauggcgccacggccacuuccugcugcccugg

SEQ ID NO: 92782 - RNA, 32 nt, Human
cauggcgcggcgcugacuggccuggcccggcc

SEQ ID NO: 92783 - RNA, 32 nt, Human
cauggcgcuucucagggcauucagcagcagcg

SEQ ID NO: 92784 - RNA, 26 nt, Human
cauggcggaggcggcggcugcagcgg

SEQ ID NO: 92785 - RNA, 32 nt, Human
cauggcggcacacaucuguaauccuagcuacu

SEQ ID NO: 92786 - RNA, 32 nt, Human
cauggcggcgcaugccugcaaucccagcuacu

SEQ ID NO: 92787 - RNA, 32 nt, Human
cauggcggcggaacggcgcuguggaaguaugc

SEQ ID NO: 92788 - RNA, 32 nt, Human
cauggcggcgugugucuguaaucccagcuacu

SEQ ID NO: 92789 - RNA, 32 nt, Human
cauggcggcucacgccuguaaucccagaacuu

SEQ ID NO: 92790 - RNA, 32 nt, Human
cauggcggcuggcaccuauaaucccaguuacu

SEQ ID NO: 92791 - RNA, 32 nt, Human
cauggcgggaccccaaggacacuuggcacagg

SEQ ID NO: 92792 - RNA, 32 nt, Human
cauggcgggucaacccuguaauuccagcacuu

SEQ ID NO: 92793 - RNA, 32 nt, Human
cauggcgguucaugccuguaaucccaguacuu

SEQ ID NO: 92794 - RNA, 32 nt, Human
cauggcguggaggaggagggaggccgggcggu

SEQ ID NO: 92795 - RNA, 32 nt, Human
cauggcgugggccuggaaggaggagagaggca

SEQ ID NO: 92796 - RNA, 32 nt, Human
cauggcguucgccgggcuggagcgaguacauu

SEQ ID NO: 92797 - RNA, 32 nt, Human
cauggcguucucugucucacuguaaacuagug

SEQ ID NO: 92798 - RNA, 32 nt, Human
cauggcuacauugccaaaccucugacugccac

SEQ ID NO: 92799 - RNA, 32 nt, Human
cauggcuaggcccagaaacacaggguccaacc

SEQ ID NO: 92800 - RNA, 32 nt, Human
cauggcuauuuccuaguuguaaaguucugcau

SEQ ID NO: 92801 - RNA, 32 nt, Human
cauggcucaccgcauugaccuccuuggcucaa

SEQ ID NO: 92802 - RNA, 32 nt, Human
cauggcucacugcaaccuccaccuccuggguu

SEQ ID NO: 92803 - RNA, 32 nt, Human
cauggcucacugcaaccucugccucccgguuu

SEQ ID NO: 92804 - RNA, 32 nt, Human
cauggcucacugcagccccaaccuucagggcu

SEQ ID NO: 92805 - RNA, 32 nt, Human
cauggcucacugcagccucaaccugcugggcu

SEQ ID NO: 92806 - RNA, 32 nt, Human
cauggcucacugcagccuccaccucccaggcu

SEQ ID NO: 92807 - RNA, 32 nt, Human
cauggcucacugcagccuccaccuccuugacu

SEQ ID NO: 92808 - RNA, 32 nt, Human
cauggcucacugcagccucgaacuccugggcu

SEQ ID NO: 92809 - RNA, 32 nt, Human
cauggcucacugcagccucgaccucccaggcu

SEQ ID NO: 92810 - RNA, 32 nt, Human
cauggcucacugcagccucgaccuccugggcu

SEQ ID NO: 92811 - RNA, 32 nt, Human
cauggcucacugcagccucgagcuccugagcu

SEQ ID NO: 92812 - RNA, 32 nt, Human
cauggcucacugcagccuggagcuccugggca

SEQ ID NO: 92813 - RNA, 32 nt, Human
cauggcucacugcagccuugaacuccugagcu

SEQ ID NO: 92814 - RNA, 32 nt, Human
cauggcucacugcagccuugaacuccuggccu

SEQ ID NO: 92815 - RNA, 32 nt, Human
cauggcucacugcagucucugccucccaggcu

SEQ ID NO: 92816 - RNA, 32 nt, Human
cauggcucacuguaaccucugccucccaggcu

SEQ ID NO: 92817 - RNA, 32 nt, Human
cauggcucauggcgggcacaugcggcugccag

SEQ ID NO: 92818 - RNA, 32 nt, Human
cauggcucauucaccuggaauaaugccuuuua

SEQ ID NO: 92819 - RNA, 32 nt, Human
cauggcuccgccucucugagccucugucucug

SEQ ID NO: 92820 - RNA, 32 nt, Human
cauggcuccucuucugcucuuuccaucuuuuu

SEQ ID NO: 92821 - RNA, 19 nt, Human
cauggcucucucuguucua

SEQ ID NO: 92822 - RNA, 32 nt, Human
cauggcucugcaggcuuuacaggaagcauggu

SEQ ID NO: 92823 - RNA, 32 nt, Human
cauggcucugguaauauguaggaagcuuuaua

SEQ ID NO: 92824 - RNA, 18 nt, Human
cauggcugacgccugcca

SEQ ID NO: 92825 - RNA, 32 nt, Human
cauggcugagacugaggggagccuuuuacagc

SEQ ID NO: 92826 - RNA, 32 nt, Human
cauggcugauccuggugacugaacuucugggc

SEQ ID NO: 92827 - RNA, 32 nt, Human
cauggcugauucugaaugaugaugguucgccg

SEQ ID NO: 92828 - RNA, 32 nt, Human
cauggcugcacucuagccugggugacagugug

SEQ ID NO: 92829 - RNA, 16 nt, Human
cauggcugcacugcua

SEQ ID NO: 92830 - RNA, 22 nt, Human
cauggcugcagacacguuuggg

SEQ ID NO: 92831 - RNA, 21 nt, Human
cauggcugcagcaggaaugga

SEQ ID NO: 92832 - RNA, 25 nt, Human
cauggcugcagucuggcugcagggg

SEQ ID NO: 92833 - RNA, 31 nt, Human
cauggcugccucugaaggcagugucuauuuu

SEQ ID NO: 92834 - RNA, 32 nt, Human
cauggcugccuguaaucccagcacuuugggag

SEQ ID NO: 92835 - RNA, 21 nt, Human
cauggcugcgugaccgcggga

SEQ ID NO: 92836 - RNA, 32 nt, Human
cauggcugcuaaaaucaucuuucccaagcauu

SEQ ID NO: 92837 - RNA, 32 nt, Human
cauggcugcucccuucacacuggguaacagug

SEQ ID NO: 92838 - RNA, 24 nt, Human
cauggcugcugacgugggcauggg

SEQ ID NO: 92839 - RNA, 32 nt, Human
cauggcugcugacgugggcauggguggauuua

SEQ ID NO: 92840 - RNA, 32 nt, Human
cauggcugcuuugcugcuuccuucuccaaagu

SEQ ID NO: 92841 - RNA, 32 nt, Human
cauggcuggacuccagccaggaggacacacgg

SEQ ID NO: 92842 - RNA, 32 nt, Human
cauggcuggagaggcaggcauaggcagggaac

SEQ ID NO: 92843 - RNA, 32 nt, Human
cauggcuggagcagcugggacacagggcacca

SEQ ID NO: 92844 - RNA, 32 nt, Human
cauggcugggcgugcuagagguugcagcauga

SEQ ID NO: 92845 - RNA, 32 nt, Human
cauggcugggguggggguggggagaccugguu

SEQ ID NO: 92846 - RNA, 24 nt, Human
cauggcugguguuaaauggagcua

SEQ ID NO: 92847 - RNA, 32 nt, Human
cauggcuguaggacugagguucccaaguccuu

SEQ ID NO: 92848 - RNA, 16 nt, Human
cauggcugucacugcc

SEQ ID NO: 92849 - RNA, 32 nt, Human
cauggcugucugcagugugccucucacggaua

SEQ ID NO: 92850 - RNA, 32 nt, Human
cauggcuguggaccccucgucaucaggugcau

SEQ ID NO: 92851 - RNA, 32 nt, Human
cauggcugugggaguugagcaaacccugggug

SEQ ID NO: 92852 - RNA, 32 nt, Human
cauggcuguguguguccaugucugcaagcagu

SEQ ID NO: 92853 - RNA, 16 nt, Human
cauggcuguuacugcc

SEQ ID NO: 92854 - RNA, 23 nt, Human
cauggcuguugcuccccccuuug

SEQ ID NO: 92855 - RNA, 32 nt, Human
cauggcuguuucauagcccucuguaccacauc

SEQ ID NO: 92856 - RNA, 26 nt, Human
cauggcuuccagaggacgagaucaua

SEQ ID NO: 92857 - RNA, 32 nt, Human
cauggcuuccagccugaagugacuguaaaaug

SEQ ID NO: 92858 - RNA, 32 nt, Human
cauggcuucugaaagcaggaugaauuuucugc

SEQ ID NO: 92859 - RNA, 32 nt, Human
cauggcuugaaaccucugccugauguggcucc

SEQ ID NO: 92860 - RNA, 32 nt, Human
cauggcuugcaggagcaagagccagacaggac

SEQ ID NO: 92861 - RNA, 32 nt, Human
cauggcuuucaucagaaguuacacagaccaca

SEQ ID NO: 92862 - RNA, 18 nt, Human
cauggcuuuggcuggcca

SEQ ID NO: 92863 - RNA, 22 nt, Human
caugggaaaaccccaucucuac

SEQ ID NO: 92864 - RNA, 20 nt, Human
caugggaaacauaaagcaga

SEQ ID NO: 92865 - RNA, 19 nt, Human
caugggaaagcaaagcaga

SEQ ID NO: 92866 - RNA, 32 nt, Human
caugggaacaaauacugugcagauguuuguaa

SEQ ID NO: 92867 - RNA, 19 nt, Human
caugggaagacacagaaga

SEQ ID NO: 92868 - RNA, 20 nt, Human
caugggaagaucugcagcag

SEQ ID NO: 92869 - RNA, 32 nt, Human
caugggaagcaacuuaagugccaucuguggga

SEQ ID NO: 92870 - RNA, 32 nt, Human
caugggaagcaggauggcagagcugugccaau

SEQ ID NO: 92871 - RNA, 22 nt, Human
caugggaagccauguguaacag

SEQ ID NO: 92872 - RNA, 32 nt, Human
caugggaagccuggcuuggucucaggucaggg

SEQ ID NO: 92873 - RNA, 22 nt, Human
caugggaagcugaggcaggaga

SEQ ID NO: 92874 - RNA, 22 nt, Human
caugggaaggugggaaagcaga

SEQ ID NO: 92875 - RNA, 32 nt, Human
caugggaaguaaauaaagugacaacuucugga

SEQ ID NO: 92876 - RNA, 20 nt, Human
caugggaaucccagcacucc

SEQ ID NO: 92877 - RNA, 32 nt, Human
caugggaaugcacaccugaguagggaggcugg

SEQ ID NO: 92878 - RNA, 32 nt, Human
caugggaauucugggagauacaauucaaguug

SEQ ID NO: 92879 - RNA, 32 nt, Human
caugggaauugugggaguuacaauucaagaug

SEQ ID NO: 92880 - RNA, 25 nt, Human
caugggacaggaaaccucccaggca

SEQ ID NO: 92881 - RNA, 21 nt, Human
caugggaccaauugagaguca

SEQ ID NO: 92882 - RNA, 32 nt, Human
caugggacccacgucagagguguuuacucagc

SEQ ID NO: 92883 - RNA, 32 nt, Human
caugggaccuuggagaaaacugaacuguuaca

SEQ ID NO: 92884 - RNA, 32 nt, Human
caugggacugacaccauguucaagcagaccaa

SEQ ID NO: 92885 - RNA, 32 nt, Human
caugggacugcacuccagccugggugacagag

SEQ ID NO: 92886 - RNA, 32 nt, Human
caugggacuuacucucuccucuccuuugagag

SEQ ID NO: 92887 - RNA, 32 nt, Human
caugggacuuugagaagagggaggacagaggc

SEQ ID NO: 92888 - RNA, 32 nt, Human
caugggagaagagggguauaggacaaggggug

SEQ ID NO: 92889 - RNA, 32 nt, Human
caugggagagaagggaggaggugggcacaggu

SEQ ID NO: 92890 - RNA, 32 nt, Human
caugggagaggaaacguguaggacccgcugag

SEQ ID NO: 92891 - RNA, 20 nt, Human
caugggagagggacagcaga

SEQ ID NO: 92892 - RNA, 19 nt, Human
caugggagagggcaggaca

SEQ ID NO: 92893 - RNA, 32 nt, Human
caugggagaggggaggugucacacaacuugga

SEQ ID NO: 92894 - RNA, 32 nt, Human
caugggagauaggcgguucggagccaguucug

SEQ ID NO: 92895 - RNA, 20 nt, Human
caugggagccuuccuuccua

SEQ ID NO: 92896 - RNA, 32 nt, Human
caugggaggaggaggaagaagaggaggaggag

SEQ ID NO: 92897 - RNA, 32 nt, Human
caugggaggcagagguugcagugagccaagau

SEQ ID NO: 92898 - RNA, 32 nt, Human
caugggaggccuggccugaucuggccucugcc

SEQ ID NO: 92899 - RNA, 32 nt, Human
caugggaggcggagguugcagugagccgagau

SEQ ID NO: 92900 - RNA, 32 nt, Human
caugggaggcguagcuugcagugagcugagau

SEQ ID NO: 92901 - RNA, 32 nt, Human
caugggaggcuaaggugggaggaucacuugag

SEQ ID NO: 92902 - RNA, 26 nt, Human
caugggaggcugaacaggagaaucgc

SEQ ID NO: 92903 - RNA, 32 nt, Human
caugggaggcugaacaggagaaucgcuugaac

SEQ ID NO: 92904 - RNA, 32 nt, Human
caugggaggcugagcaggaggauggcucgaag

SEQ ID NO: 92905 - RNA, 21 nt, Human
caugggaggcugcacagaaga

SEQ ID NO: 92906 - RNA, 32 nt, Human
caugggaggggcugcacaguggcccgagguca

SEQ ID NO: 92907 - RNA, 19 nt, Human
caugggagggggacacaga

SEQ ID NO: 92908 - RNA, 32 nt, Human
caugggagggugagcaggagcaaggcugugcu

SEQ ID NO: 92909 - RNA, 26 nt, Human
caugggaggugagcucuucucuggcc

SEQ ID NO: 92910 - RNA, 32 nt, Human
caugggaggugggcccagaaaggggcuuccca

SEQ ID NO: 92911 - RNA, 21 nt, Human
caugggagugggaccagcaga

SEQ ID NO: 92912 - RNA, 32 nt, Human
caugggaucccaaagcugcugagggauagagc

SEQ ID NO: 92913 - RNA, 32 nt, Human
caugggaugcacugcacaauguucuuuccucu

SEQ ID NO: 92914 - RNA, 32 nt, Human
caugggauggccaccugggcugagggaugaag

SEQ ID NO: 92915 - RNA, 32 nt, Human
caugggauggccuuccugauguggcucuccaa

SEQ ID NO: 92916 - RNA, 32 nt, Human
caugggaugguacagcggccugggcaggggcg

SEQ ID NO: 92917 - RNA, 32 nt, Human
caugggauuauuuucuuuaaaaugacuaugga

SEQ ID NO: 92918 - RNA, 32 nt, Human
caugggauucaagagggacagccccagcuuug

SEQ ID NO: 92919 - RNA, 32 nt, Human
caugggcaagaagcacaagaagcacaagucgg

SEQ ID NO: 92920 - RNA, 32 nt, Human
caugggcaaggcagucucucucccagguauuc

SEQ ID NO: 92921 - RNA, 32 nt, Human
caugggcaauucccuuucucucugucacugcu

SEQ ID NO: 92922 - RNA, 18 nt, Human
caugggcaccugcugucu

SEQ ID NO: 92923 - RNA, 32 nt, Human
caugggcagccagcuggacuaggagugggaag

SEQ ID NO: 92924 - RNA, 21 nt, Human
caugggcagggccacagcaga

SEQ ID NO: 92925 - RNA, 32 nt, Human
caugggcaggguggguggagggacugaugcga

SEQ ID NO: 92926 - RNA, 32 nt, Human
caugggcaugaugucagccaaggaacucgcgg

SEQ ID NO: 92927 - RNA, 32 nt, Human
caugggcauggugaccccaguuuugcccgucu

SEQ ID NO: 92928 - RNA, 32 nt, Human
caugggccaagaccaggaaggaagggccaccu

SEQ ID NO: 92929 - RNA, 32 nt, Human
caugggccaccugcucugugcccgcuccugaa

SEQ ID NO: 92930 - RNA, 32 nt, Human
caugggccauuuguagcccaaccuucucuucc

SEQ ID NO: 92931 - RNA, 32 nt, Human
caugggcccacacaucugcuuuggcuuugccg

SEQ ID NO: 92932 - RNA, 32 nt, Human
caugggcccaggcugagugugagugagcaugu

SEQ ID NO: 92933 - RNA, 23 nt, Human
caugggcccggggccugacccca

SEQ ID NO: 92934 - RNA, 32 nt, Human
caugggcccugaggccccuccugccuggcccu

SEQ ID NO: 92935 - RNA, 32 nt, Human
caugggcccuucaccaccugcccaggaucuca

SEQ ID NO: 92936 - RNA, 32 nt, Human
caugggccucaaagcagggggcuuggaaauag

SEQ ID NO: 92937 - RNA, 32 nt, Human
caugggccucgaggggacugcuuucauagaga

SEQ ID NO: 92938 - RNA, 18 nt, Human
caugggccuggaugcaga

SEQ ID NO: 92939 - RNA, 32 nt, Human
caugggccugggaaggagggugcuguggaggg

SEQ ID NO: 92940 - RNA, 32 nt, Human
caugggcgcccagcaggcccugggcagagaga

SEQ ID NO: 92941 - RNA, 32 nt, Human
caugggcguucaggaacuugcccaggucaggc

SEQ ID NO: 92942 - RNA, 32 nt, Human
caugggcguuuucuuugugcauugauuugcau

SEQ ID NO: 92943 - RNA, 32 nt, Human
caugggcucagcaacauggacuuccacucacc

SEQ ID NO: 92944 - RNA, 32 nt, Human
caugggcucccaggggcuccaggcaugcacag

SEQ ID NO: 92945 - RNA, 32 nt, Human
caugggcucuaagcugcucuucugucugucug

SEQ ID NO: 92946 - RNA, 32 nt, Human
caugggcucugagccaaagaaggaggcauggu

SEQ ID NO: 92947 - RNA, 32 nt, Human
caugggcugagaagcuggaccggcaccaaagg

SEQ ID NO: 92948 - RNA, 32 nt, Human
caugggcugcugcugucacucccucuccacuu

SEQ ID NO: 92949 - RNA, 32 nt, Human
caugggcugcuggaugcagggcucccagggcu

SEQ ID NO: 92950 - RNA, 18 nt, Human
caugggcugggugcagug

SEQ ID NO: 92951 - RNA, 32 nt, Human
caugggcugugcuccccucuuccuacugucag

SEQ ID NO: 92952 - RNA, 32 nt, Human
caugggcuguguccuaaggcccauuugagaag

SEQ ID NO: 92953 - RNA, 32 nt, Human
cauggggaagauggagcaaaccuagcccccaa

SEQ ID NO: 92954 - RNA, 32 nt, Human
cauggggaaggccauguugcagcugcugauca

SEQ ID NO: 92955 - RNA, 32 nt, Human
cauggggaagggaggaaggaagggaugggagg

SEQ ID NO: 92956 - RNA, 32 nt, Human
cauggggaagggauauauaagauggaagcuuc

SEQ ID NO: 92957 - RNA, 32 nt, Human
cauggggaaugcaccuuacgaggcagagcagg

SEQ ID NO: 92958 - RNA, 22 nt, Human
cauggggacaaaaggaaaccuc

SEQ ID NO: 92959 - RNA, 20 nt, Human
cauggggaccaucggugcca

SEQ ID NO: 92960 - RNA, 32 nt, Human
cauggggacugagggagggauggggaagugua

SEQ ID NO: 92961 - RNA, 32 nt, Human
cauggggagaacugagggguagguggggaggg

SEQ ID NO: 92962 - RNA, 32 nt, Human
cauggggagcaagugugcucuccuggggcgcc

SEQ ID NO: 92963 - RNA, 32 nt, Human
cauggggagcagaggcuucuccccagcucugu

SEQ ID NO: 92964 - RNA, 32 nt, Human
cauggggagcucccccucagaucugacccuuu

SEQ ID NO: 92965 - RNA, 32 nt, Human
cauggggagcuuccauaucucauggcuccuug

SEQ ID NO: 92966 - RNA, 32 nt, Human
cauggggaggacuucacucagcagcaaagaga

SEQ ID NO: 92967 - RNA, 32 nt, Human
cauggggaggaggcugaaguggggcugaggac

SEQ ID NO: 92968 - RNA, 32 nt, Human
cauggggaggauugggggaggagaagcagugc

SEQ ID NO: 92969 - RNA, 21 nt, Human
cauggggaggcagagagucac

SEQ ID NO: 92970 - RNA, 32 nt, Human
cauggggaggcaggaguaggacugcagcagag

SEQ ID NO: 92971 - RNA, 32 nt, Human
cauggggagggaaggcuggggugcagggcucc

SEQ ID NO: 92972 - RNA, 32 nt, Human
cauggggagggagaguucggagccaaauuaaa

SEQ ID NO: 92973 - RNA, 32 nt, Human
cauggggaggggccauggcuuggcauguccaa

SEQ ID NO: 92974 - RNA, 32 nt, Human
cauggggagugugaggacauggagggugggag

SEQ ID NO: 92975 - RNA, 20 nt, Human
cauggggaugacagagcaga

SEQ ID NO: 92976 - RNA, 32 nt, Human
cauggggauggacccuuccugccugcaccccg

SEQ ID NO: 92977 - RNA, 32 nt, Human
cauggggcagaaacaguggcuccugggagcag

SEQ ID NO: 92978 - RNA, 32 nt, Human
cauggggcauuuucacaaagcagcccucuuuc

SEQ ID NO: 92979 - RNA, 32 nt, Human
cauggggcccaggaguuggggaaacacaauaa

SEQ ID NO: 92980 - RNA, 25 nt, Human
cauggggcccuccugggcacugggu

SEQ ID NO: 92981 - RNA, 32 nt, Human
cauggggcucagaggcuguaagaacugggauc

SEQ ID NO: 92982 - RNA, 32 nt, Human
cauggggcucaggacagagggagcuagcagcu

SEQ ID NO: 92983 - RNA, 32 nt, Human
cauggggcugugcagcuggagccaaaaaggca

SEQ ID NO: 92984 - RNA, 32 nt, Human
caugggggaaacugaggcacaggaggcaagcu

SEQ ID NO: 92985 - RNA, 32 nt, Human
caugggggaggcacagaaugcuggagagaugc

SEQ ID NO: 92986 - RNA, 32 nt, Human
caugggggagggguguguuaaagggaaggaag

SEQ ID NO: 92987 - RNA, 32 nt, Human
caugggggcacacaccgguaaucccagcuacu

SEQ ID NO: 92988 - RNA, 32 nt, Human
caugggggccaaccccuggccugcugcugugc

SEQ ID NO: 92989 - RNA, 32 nt, Human
caugggggcgcgcaccuguaguuccagcuacu

SEQ ID NO: 92990 - RNA, 32 nt, Human
caugggggcucacaccuguaaucccagcacuu

SEQ ID NO: 92991 - RNA, 32 nt, Human
caugggggcucugccaagacccucaucucugg

SEQ ID NO: 92992 - RNA, 32 nt, Human
caugggggcugaggcagaacccaggagcucca

SEQ ID NO: 92993 - RNA, 16 nt, Human
caugggggucgcugcc

SEQ ID NO: 92994 - RNA, 32 nt, Human
caugggggugauuaccccaugcugcuguucuc

SEQ ID NO: 92995 - RNA, 25 nt, Human
caugggguaugccgggcacugggca

SEQ ID NO: 92996 - RNA, 32 nt, Human
caugggguccccacugugggcagcccugcauu

SEQ ID NO: 92997 - RNA, 32 nt, Human
cauggggucccccuuggggccccacaccccgu

SEQ ID NO: 92998 - RNA, 32 nt, Human
cauggggucugggagcagaggcagguggcaag

SEQ ID NO: 92999 - RNA, 32 nt, Human
cauggggugaagccaccaugggcuggggguga

SEQ ID NO: 93000 - RNA, 32 nt, Human
cauggggugguggaggcagccuucagugagca

SEQ ID NO: 93001 - RNA, 32 nt, Human
cauggguaaggcauggaagaacucuugaaugu

SEQ ID NO: 93002 - RNA, 32 nt, Human
cauggguagaugauuugugcagaucugaauuu

SEQ ID NO: 93003 - RNA, 32 nt, Human
cauggguaggaugagaucuuuggcagaaaggu

SEQ ID NO: 93004 - RNA, 32 nt, Human
caugggucagcucuuucugccaccuccgccuu

SEQ ID NO: 93005 - RNA, 32 nt, Human
caugggucagggugugucugugcugcccccuc

SEQ ID NO: 93006 - RNA, 32 nt, Human
caugggucccacugccuguccagccuggcucc

SEQ ID NO: 93007 - RNA, 19 nt, Human
caugggucccuccauccuu

SEQ ID NO: 93008 - RNA, 17 nt, Human
caugggucccugaucua

SEQ ID NO: 93009 - RNA, 32 nt, Human
caugggucuucaggcucuguuuucacuuugga

SEQ ID NO: 93010 - RNA, 32 nt, Human
caugggugaccagcaacuguacaagaccaacc

SEQ ID NO: 93011 - RNA, 31 nt, Human
caugggugacuucugacuuucuaaggaaaug

SEQ ID NO: 93012 - RNA, 32 nt, Human
caugggugcaaucuuuagccccagggagguca

SEQ ID NO: 93013 - RNA, 18 nt, Human
caugggugcugcacccca

SEQ ID NO: 93014 - RNA, 32 nt, Human
caugggugcugguggcagggaucuaucuaaug

SEQ ID NO: 93015 - RNA, 31 nt, Human
cauggguggguggggagucagucaugucacu

SEQ ID NO: 93016 - RNA, 32 nt, Human
caugggugguacauugaggaguauuuacauuu

SEQ ID NO: 93017 - RNA, 32 nt, Human
cauggguuaccuuugcaccagcuucaguguua

SEQ ID NO: 93018 - RNA, 32 nt, Human
cauggguucccugcaagaccacuggaaccaac

SEQ ID NO: 93019 - RNA, 32 nt, Human
cauggguugaaugcugaaaacaugcacagcca

SEQ ID NO: 93020 - RNA, 32 nt, Human
cauggguugaguguggccaccugcaggaugug

SEQ ID NO: 93021 - RNA, 21 nt, Human
cauggguuucagcacagcaga

SEQ ID NO: 93022 - RNA, 32 nt, Human
cauggguuucagugcugagugaaaaucuauac

SEQ ID NO: 93023 - RNA, 32 nt, Human
cauggguuucuagaagacaaguuuucaacugc

SEQ ID NO: 93024 - RNA, 22 nt, Human
caugguaaaaccccaucucuac

SEQ ID NO: 93025 - RNA, 24 nt, Human
caugguaaaaccccaucucuacua

SEQ ID NO: 93026 - RNA, 24 nt, Human
caugguaaaaccccauuucuacua

SEQ ID NO: 93027 - RNA, 24 nt, Human
caugguaaaaccccauuucugcua

SEQ ID NO: 93028 - RNA, 24 nt, Human
caugguaaaaccccgucucuacua

SEQ ID NO: 93029 - RNA, 21 nt, Human
caugguaaaacccugucucua

SEQ ID NO: 93030 - RNA, 24 nt, Human
caugguaaaacccugucucuacua

SEQ ID NO: 93031 - RNA, 24 nt, Human
caugguaaaacgccgucucuacua

SEQ ID NO: 93032 - RNA, 24 nt, Human
caugguaaaacucugucucuacua

SEQ ID NO: 93033 - RNA, 32 nt, Human
caugguaaccuacuguuugccagccuguaaaa

SEQ ID NO: 93034 - RNA, 32 nt, Human
caugguaacucacaccuguaaaccuaacacuu

SEQ ID NO: 93035 - RNA, 23 nt, Human
caugguaacucacgccuguaauc

SEQ ID NO: 93036 - RNA, 32 nt, Human
caugguaacuugugccuguaauuccagcugcu

SEQ ID NO: 93037 - RNA, 32 nt, Human
caugguaauuauuggaaaguauucaaauaaau

SEQ ID NO: 93038 - RNA, 32 nt, Human
caugguacauacugcauuugcaucaaacuagc

SEQ ID NO: 93039 - RNA, 32 nt, Human
caugguagaaguggagagagucccggacaugc

SEQ ID NO: 93040 - RNA, 24 nt, Human
caugguagacagagguugcaguga

SEQ ID NO: 93041 - RNA, 24 nt, Human
caugguagcacacaccuguagucc

SEQ ID NO: 93042 - RNA, 32 nt, Human
caugguagcacacaccuguagucccagauacu

SEQ ID NO: 93043 - RNA, 32 nt, Human
caugguagcaggagccuguaaucccagcuguu

SEQ ID NO: 93044 - RNA, 32 nt, Human
caugguagcaggcaccuguaaccccagcuacu

SEQ ID NO: 93045 - RNA, 32 nt, Human
caugguagcaggcgcuuguaaucccagcuacu

SEQ ID NO: 93046 - RNA, 32 nt, Human
caugguagcaggugccuguaaucccagcuacu

SEQ ID NO: 93047 - RNA, 30 nt, Human
caugguagccucuucugguuuugcucuugc

SEQ ID NO: 93048 - RNA, 32 nt, Human
caugguagcgcacaccuguaauuccagcuacu

SEQ ID NO: 93049 - RNA, 32 nt, Human
caugguagcucaagccuauaaucccagcaugu

SEQ ID NO: 93050 - RNA, 32 nt, Human
caugguagcucacacuuguaaucccgacacuu

SEQ ID NO: 93051 - RNA, 23 nt, Human
caugguagcucacgccuguaauc

SEQ ID NO: 93052 - RNA, 32 nt, Human
caugguagcucacgccuguaaucccagcacuu

SEQ ID NO: 93053 - RNA, 32 nt, Human
caugguagcucacgccuguaauccuagcaauu

SEQ ID NO: 93054 - RNA, 24 nt, Human
caugguagcucaugccuguaaccc

SEQ ID NO: 93055 - RNA, 24 nt, Human
caugguagcucaugccuguaaucc

SEQ ID NO: 93056 - RNA, 32 nt, Human
caugguagcucaugucuguaaucccagcacuu

SEQ ID NO: 93057 - RNA, 32 nt, Human
caugguagcucucgccuguaaucccagcacuu

SEQ ID NO: 93058 - RNA, 32 nt, Human
caugguagcugccgccuguaaucccagcuucu

SEQ ID NO: 93059 - RNA, 32 nt, Human
caugguagcuuacgccuguaaucccagcacuu

SEQ ID NO: 93060 - RNA, 24 nt, Human
caugguaguccaugccuguagucc

SEQ ID NO: 93061 - RNA, 32 nt, Human
caugguagugcacgccuguaaucccagcuacu

SEQ ID NO: 93062 - RNA, 32 nt, Human
caugguagugcaugccucuaaucccagcuacu

SEQ ID NO: 93063 - RNA, 24 nt, Human
caugguagugcaugccuguagucc

SEQ ID NO: 93064 - RNA, 32 nt, Human
caugguagugggugccuguaaucccagcuacu

SEQ ID NO: 93065 - RNA, 24 nt, Human
caugguaguucacaccuguagucc

SEQ ID NO: 93066 - RNA, 32 nt, Human
caugguauugaccaguagccuauuuaucaaag

SEQ ID NO: 93067 - RNA, 32 nt, Human
caugguauuuuugaaggagcuaaugaaacacu

SEQ ID NO: 93068 - RNA, 32 nt, Human
cauggucaagccuguaguauuaaaaugauuuu

SEQ ID NO: 93069 - RNA, 32 nt, Human
cauggucacagccaagaggagccugagaagac

SEQ ID NO: 93070 - RNA, 31 nt, Human
cauggucacagcugcugccccagcucuggaa

SEQ ID NO: 93071 - RNA, 32 nt, Human
cauggucacagcugcugccccagcucuggaac

SEQ ID NO: 93072 - RNA, 32 nt, Human
cauggucagagcaguggagacuggagcccugu

SEQ ID NO: 93073 - RNA, 32 nt, Human
cauggucagcagcagagagagcaacgggaagg

SEQ ID NO: 93074 - RNA, 32 nt, Human
cauggucagccaagcuuacccuucacacugag

SEQ ID NO: 93075 - RNA, 31 nt, Human
cauggucagccugucugacauccagguugug

SEQ ID NO: 93076 - RNA, 32 nt, Human
cauggucauaggcgccuguaaucccagcuacu

SEQ ID NO: 93077 - RNA, 32 nt, Human
cauggucaugauuauaaacaucagccccuuuu

SEQ ID NO: 93078 - RNA, 22 nt, Human
caugguccacacugcuggggga

SEQ ID NO: 93079 - RNA, 32 nt, Human
caugguccacagugguucaauaucucaugcag

SEQ ID NO: 93080 - RNA, 32 nt, Human
caugguccaugugacugcuguccuuugaauug

SEQ ID NO: 93081 - RNA, 32 nt, Human
caugguccucaggcauggacaggcuggcauuc

SEQ ID NO: 93082 - RNA, 32 nt, Human
caugguccuccacccuuccugccauucugccc

SEQ ID NO: 93083 - RNA, 32 nt, Human
caugguccugccccagcaucuugcuggguugg

SEQ ID NO: 93084 - RNA, 32 nt, Human
caugguccuuggugaagaccugcaccccugga

SEQ ID NO: 93085 - RNA, 24 nt, Human
cauggucgcucaugccuguggucc

SEQ ID NO: 93086 - RNA, 32 nt, Human
cauggucggagggaucucgccccgggagaaaa

SEQ ID NO: 93087 - RNA, 32 nt, Human
cauggucgugcaugcuuguaaucccagcuacu

SEQ ID NO: 93088 - RNA, 32 nt, Human
cauggucuaggguagugcuggugaggagauaa

SEQ ID NO: 93089 - RNA, 32 nt, Human
cauggucucagggaacagccugcuucccacca

SEQ ID NO: 93090 - RNA, 32 nt, Human
cauggucuccaccacucaccaucacccugcug

SEQ ID NO: 93091 - RNA, 32 nt, Human
cauggucuccuugccugcuccaaggcacagga

SEQ ID NO: 93092 - RNA, 32 nt, Human
cauggucugaaaggauuccugcucuggugaga

SEQ ID NO: 93093 - RNA, 32 nt, Human
cauggucugccuggaccuagccaggcucacug

SEQ ID NO: 93094 - RNA, 32 nt, Human
cauggucugcuagguugcaggcuguaguuuac

SEQ ID NO: 93095 - RNA, 32 nt, Human
cauggucuugcuucaguguugauggcuacuga

SEQ ID NO: 93096 - RNA, 32 nt, Human
cauggucuuucucugcaguccccagccaauac

SEQ ID NO: 93097 - RNA, 25 nt, Human
cauggugaaaaccccaucucuacua

SEQ ID NO: 93098 - RNA, 24 nt, Human
cauggugaaaaccuaucucuacua

SEQ ID NO: 93099 - RNA, 24 nt, Human
cauggugaaacaccaucucuacua

SEQ ID NO: 93100 - RNA, 24 nt, Human
cauggugaaacaccgucuccacua

SEQ ID NO: 93101 - RNA, 24 nt, Human
cauggugaaacaccgucucuacua

SEQ ID NO: 93102 - RNA, 24 nt, Human
cauggugaaacacuaucucuacua

SEQ ID NO: 93103 - RNA, 24 nt, Human
cauggugaaacacugucucuacua

SEQ ID NO: 93104 - RNA, 21 nt, Human
cauggugaaacccagucucua

SEQ ID NO: 93105 - RNA, 23 nt, Human
cauggugaaacccaucucuacua

SEQ ID NO: 93106 - RNA, 23 nt, Human
cauggugaaacccaugucuacua

SEQ ID NO: 93107 - RNA, 20 nt, Human
cauggugaaaccccaccucu

SEQ ID NO: 93108 - RNA, 22 nt, Human
cauggugaaaccccaccucuac

SEQ ID NO: 93109 - RNA, 24 nt, Human
cauggugaaaccccaccucuacua

SEQ ID NO: 93110 - RNA, 24 nt, Human
cauggugaaaccccauauccauua

SEQ ID NO: 93111 - RNA, 24 nt, Human
cauggugaaaccccaucgcuacua

SEQ ID NO: 93112 - RNA, 24 nt, Human
cauggugaaaccccaucucaacua

SEQ ID NO: 93113 - RNA, 22 nt, Human
cauggugaaaccccaucuccac

SEQ ID NO: 93114 - RNA, 24 nt, Human
cauggugaaaccccaucuccacua

SEQ ID NO: 93115 - RNA, 20 nt, Human
cauggugaaaccccaucucu

SEQ ID NO: 93116 - RNA, 22 nt, Human
cauggugaaaccccaucucuac

SEQ ID NO: 93117 - RNA, 23 nt, Human
cauggugaaaccccaucucuacu

SEQ ID NO: 93118 - RNA, 24 nt, Human
cauggugaaaccccaucucuacua

SEQ ID NO: 93119 - RNA, 24 nt, Human
cauggugaaaccccaucucuagua

SEQ ID NO: 93120 - RNA, 22 nt, Human
cauggugaaaccccaucucuau

SEQ ID NO: 93121 - RNA, 24 nt, Human
cauggugaaaccccaucucugcua

SEQ ID NO: 93122 - RNA, 24 nt, Human
cauggugaaaccccaucucuggua

SEQ ID NO: 93123 - RNA, 24 nt, Human
cauggugaaaccccaucucuucua

SEQ ID NO: 93124 - RNA, 24 nt, Human
cauggugaaaccccaucuguacua

SEQ ID NO: 93125 - RNA, 24 nt, Human
cauggugaaaccccaucuuuacug

SEQ ID NO: 93126 - RNA, 24 nt, Human
cauggugaaaccccaugucuacua

SEQ ID NO: 93127 - RNA, 23 nt, Human
cauggugaaaccccauuucuacu

SEQ ID NO: 93128 - RNA, 24 nt, Human
cauggugaaaccccauuucuacua

SEQ ID NO: 93129 - RNA, 25 nt, Human
cauggugaaacccccaucucuacua

SEQ ID NO: 93130 - RNA, 32 nt, Human
cauggugaaacccccaucucuccugggcaugu

SEQ ID NO: 93131 - RNA, 22 nt, Human
cauggugaaaccccccucucua

SEQ ID NO: 93132 - RNA, 22 nt, Human
cauggugaaacccccgucucua

SEQ ID NO: 93133 - RNA, 25 nt, Human
cauggugaaacccccgucucuacua

SEQ ID NO: 93134 - RNA, 24 nt, Human
cauggugaaacccccuaucuacua

SEQ ID NO: 93135 - RNA, 21 nt, Human
cauggugaaaccccgccucua

SEQ ID NO: 93136 - RNA, 21 nt, Human
cauggugaaaccccgucacua

SEQ ID NO: 93137 - RNA, 24 nt, Human
cauggugaaaccccgucuccacua

SEQ ID NO: 93138 - RNA, 24 nt, Human
cauggugaaaccccgucuccauua

SEQ ID NO: 93139 - RNA, 21 nt, Human
cauggugaaaccccgucucua

SEQ ID NO: 93140 - RNA, 22 nt, Human
cauggugaaaccccgucucuac

SEQ ID NO: 93141 - RNA, 24 nt, Human
cauggugaaaccccgucucuacua

SEQ ID NO: 93142 - RNA, 22 nt, Human
cauggugaaaccccguuucuac

SEQ ID NO: 93143 - RNA, 24 nt, Human
cauggugaaaccccguuucuacua

SEQ ID NO: 93144 - RNA, 21 nt, Human
cauggugaaaccccuucucua

SEQ ID NO: 93145 - RNA, 24 nt, Human
cauggugaaaccccuucucuacua

SEQ ID NO: 93146 - RNA, 24 nt, Human
cauggugaaacccgcugucuacua

SEQ ID NO: 93147 - RNA, 24 nt, Human
cauggugaaacccggucucuacua

SEQ ID NO: 93148 - RNA, 21 nt, Human
cauggugaaacccgucucuac

SEQ ID NO: 93149 - RNA, 23 nt, Human
cauggugaaacccgucucuacua

SEQ ID NO: 93150 - RNA, 21 nt, Human
cauggugaaacccuaucuccg

SEQ ID NO: 93151 - RNA, 24 nt, Human
cauggugaaacccuaucucuacua

SEQ ID NO: 93152 - RNA, 24 nt, Human
cauggugaaacccuggcucuacua

SEQ ID NO: 93153 - RNA, 21 nt, Human
cauggugaaacccuguaucua

SEQ ID NO: 93154 - RNA, 24 nt, Human
cauggugaaacccuguaucuacua

SEQ ID NO: 93155 - RNA, 24 nt, Human
cauggugaaacccugucccuacua

SEQ ID NO: 93156 - RNA, 22 nt, Human
cauggugaaacccugucuacua

SEQ ID NO: 93157 - RNA, 21 nt, Human
cauggugaaacccugucucua

SEQ ID NO: 93158 - RNA, 22 nt, Human
cauggugaaacccugucucuac

SEQ ID NO: 93159 - RNA, 24 nt, Human
cauggugaaacccugucucuacua

SEQ ID NO: 93160 - RNA, 24 nt, Human
cauggugaaacccugugccuacua

SEQ ID NO: 93161 - RNA, 24 nt, Human
cauggugaaacccuguugcuacua

SEQ ID NO: 93162 - RNA, 24 nt, Human
cauggugaaacccuguuucuacua

SEQ ID NO: 93163 - RNA, 24 nt, Human
cauggugaaaccucaacucuacua

SEQ ID NO: 93164 - RNA, 23 nt, Human
cauggugaaaccucaucccucua

SEQ ID NO: 93165 - RNA, 23 nt, Human
cauggugaaaccucaucuccacu

SEQ ID NO: 93166 - RNA, 24 nt, Human
cauggugaaaccucaucuccgcua

SEQ ID NO: 93167 - RNA, 24 nt, Human
cauggugaaaccucaucucuacua

SEQ ID NO: 93168 - RNA, 24 nt, Human
cauggugaaaccucgccucuacua

SEQ ID NO: 93169 - RNA, 24 nt, Human
cauggugaaaccucgucucuacua

SEQ ID NO: 93170 - RNA, 24 nt, Human
cauggugaaaccucgugucuacua

SEQ ID NO: 93171 - RNA, 23 nt, Human
cauggugaaaccugucucuacua

SEQ ID NO: 93172 - RNA, 22 nt, Human
cauggugaaaccuugucucuac

SEQ ID NO: 93173 - RNA, 24 nt, Human
cauggugaaaccuugucucuacua

SEQ ID NO: 93174 - RNA, 24 nt, Human
cauggugaaacgccaucccuacua

SEQ ID NO: 93175 - RNA, 24 nt, Human
cauggugaaacgccaucucuacua

SEQ ID NO: 93176 - RNA, 24 nt, Human
cauggugaaacgcuaucucuacua

SEQ ID NO: 93177 - RNA, 24 nt, Human
cauggugaaacuaugucucuacua

SEQ ID NO: 93178 - RNA, 24 nt, Human
cauggugaaacuccaucccuacua

SEQ ID NO: 93179 - RNA, 24 nt, Human
cauggugaaacuccaucucuacua

SEQ ID NO: 93180 - RNA, 24 nt, Human
cauggugaaacuccgucucuacua

SEQ ID NO: 93181 - RNA, 24 nt, Human
cauggugaaacuccuuccccacua

SEQ ID NO: 93182 - RNA, 24 nt, Human
cauggugaaacucugucucuacua

SEQ ID NO: 93183 - RNA, 24 nt, Human
cauggugaaacuucaucucuacua

SEQ ID NO: 93184 - RNA, 22 nt, Human
cauggugaaauccuaucucuac

SEQ ID NO: 93185 - RNA, 24 nt, Human
cauggugaaauccugucuccacua

SEQ ID NO: 93186 - RNA, 24 nt, Human
cauggugaaauucugucucuacua

SEQ ID NO: 93187 - RNA, 23 nt, Human
cauggugacacacaccuguaauc

SEQ ID NO: 93188 - RNA, 24 nt, Human
cauggugacacaugccuguagucc

SEQ ID NO: 93189 - RNA, 32 nt, Human
cauggugacagaauaccuauuguuaagcagac

SEQ ID NO: 93190 - RNA, 32 nt, Human
cauggugacaggcaccuauaaucccagcuaca

SEQ ID NO: 93191 - RNA, 32 nt, Human
cauggugaccaacucucagaaacuccagcugc

SEQ ID NO: 93192 - RNA, 32 nt, Human
cauggugaccaccaggggcaagcacagcccgg

SEQ ID NO: 93193 - RNA, 23 nt, Human
cauggugacccacaccuguaauc

SEQ ID NO: 93194 - RNA, 32 nt, Human
cauggugacccacaccuguaaucccagcacuu

SEQ ID NO: 93195 - RNA, 32 nt, Human
cauggugacgcaugccuguaaucccagcuacu

SEQ ID NO: 93196 - RNA, 32 nt, Human
cauggugacgggcaccuguagucccagcuacu

SEQ ID NO: 93197 - RNA, 23 nt, Human
cauggugacucacaucuguaauc

SEQ ID NO: 93198 - RNA, 32 nt, Human
cauggugacucacaucuguaaucccagcacuu

SEQ ID NO: 93199 - RNA, 32 nt, Human
cauggugacucacgccuguaaucccccagcaa

SEQ ID NO: 93200 - RNA, 32 nt, Human
cauggugacucaggccuguaaucccagcacuu

SEQ ID NO: 93201 - RNA, 32 nt, Human
cauggugacucauaccuguaaucccaacaauu

SEQ ID NO: 93202 - RNA, 32 nt, Human
cauggugacucaugccuauaaucccagcacuu

SEQ ID NO: 93203 - RNA, 24 nt, Human
cauggugacucaugccuguaaucc

SEQ ID NO: 93204 - RNA, 32 nt, Human
cauggugacugaggacagagacccagagugac

SEQ ID NO: 93205 - RNA, 32 nt, Human
cauggugacuugugccugaaaucccagcuauc

SEQ ID NO: 93206 - RNA, 23 nt, Human
cauggugagacccaucucuacua

SEQ ID NO: 93207 - RNA, 24 nt, Human
cauggugagaccccaucucuacua

SEQ ID NO: 93208 - RNA, 18 nt, Human
cauggugagagcacagca

SEQ ID NO: 93209 - RNA, 32 nt, Human
cauggugagguuucaucugauugagaaggggg

SEQ ID NO: 93210 - RNA, 32 nt, Human
cauggugagucacaccuauagucccagcauuu

SEQ ID NO: 93211 - RNA, 32 nt, Human
cauggugagucacaccuauagucucagcauuu

SEQ ID NO: 93212 - RNA, 32 nt, Human
cauggugagugcucugugccuccugcucaccu

SEQ ID NO: 93213 - RNA, 32 nt, Human
cauggugaguuggcuuccagagcuguggguag

SEQ ID NO: 93214 - RNA, 32 nt, Human
cauggugauagccugaagagcuuuccucacua

SEQ ID NO: 93215 - RNA, 32 nt, Human
cauggugaugcacaccuguaaucccagcuacu

SEQ ID NO: 93216 - RNA, 32 nt, Human
cauggugaugcacaccuguaaucccagcuauu

SEQ ID NO: 93217 - RNA, 24 nt, Human
cauggugaugcaugccuguaaucc

SEQ ID NO: 93218 - RNA, 32 nt, Human
cauggugaugcaugccuguaaucccagcuacu

SEQ ID NO: 93219 - RNA, 32 nt, Human
cauggugcaguaguguggaguggaugaguguu

SEQ ID NO: 93220 - RNA, 32 nt, Human
cauggugcaugagugaucucagccuagcgaug

SEQ ID NO: 93221 - RNA, 32 nt, Human
cauggugccgcauaacuauaaucccagcuacu

SEQ ID NO: 93222 - RNA, 32 nt, Human
cauggugccgugcgccuguaaucccagcuacc

SEQ ID NO: 93223 - RNA, 32 nt, Human
cauggugcgucacaccuauaaucccagcacuu

SEQ ID NO: 93224 - RNA, 32 nt, Human
cauggugcuagugcccucucucugggcccagg

SEQ ID NO: 93225 - RNA, 31 nt, Human
cauggugcuuuucaggggccuguguguacac

SEQ ID NO: 93226 - RNA, 32 nt, Human
caugguggaacacaccugcaaucccagcuacu

SEQ ID NO: 93227 - RNA, 24 nt, Human
caugguggaaccccaucucuacua

SEQ ID NO: 93228 - RNA, 25 nt, Human
caugguggaacccccaucucuacua

SEQ ID NO: 93229 - RNA, 24 nt, Human
caugguggaacccuaucucuacua

SEQ ID NO: 93230 - RNA, 32 nt, Human
caugguggacuuuuguuucugaucuuguuuuc

SEQ ID NO: 93231 - RNA, 32 nt, Human
caugguggagaagggaucagauagcuccucag

SEQ ID NO: 93232 - RNA, 32 nt, Human
caugguggcaaacgccuguaaucccaacuacu

SEQ ID NO: 93233 - RNA, 32 nt, Human
caugguggcaaaugccuguaauaccagcuacu

SEQ ID NO: 93234 - RNA, 32 nt, Human
caugguggcaagagccuguaaucucagcuacu

SEQ ID NO: 93235 - RNA, 32 nt, Human
caugguggcaagcaccuguagucccaguuacu

SEQ ID NO: 93236 - RNA, 32 nt, Human
caugguggcacacaccugcauucccagcuacu

SEQ ID NO: 93237 - RNA, 23 nt, Human
caugguggcacacaccuguaauc

SEQ ID NO: 93238 - RNA, 24 nt, Human
caugguggcacacaccuguaaucc

SEQ ID NO: 93239 - RNA, 32 nt, Human
caugguggcacacaccuguaaucccagcuacu

SEQ ID NO: 93240 - RNA, 32 nt, Human
caugguggcacacaccuguaaucguagcugag

SEQ ID NO: 93241 - RNA, 24 nt, Human
caugguggcacacaccuguagucc

SEQ ID NO: 93242 - RNA, 32 nt, Human
caugguggcacacaccuguagucccagcuacu

SEQ ID NO: 93243 - RNA, 32 nt, Human
caugguggcacacaccuguagucccaggcuga

SEQ ID NO: 93244 - RNA, 32 nt, Human
caugguggcacacaccuguagucccaguuacu

SEQ ID NO: 93245 - RNA, 32 nt, Human
caugguggcacacaccuguggucccagcuacu

SEQ ID NO: 93246 - RNA, 24 nt, Human
caugguggcacacgccugcagucc

SEQ ID NO: 93247 - RNA, 24 nt, Human
caugguggcacacgccuguaaucc

SEQ ID NO: 93248 - RNA, 32 nt, Human
caugguggcacacgccuguaaucccagcuaca

SEQ ID NO: 93249 - RNA, 32 nt, Human
caugguggcacacgccuguaaucccagcuacu

SEQ ID NO: 93250 - RNA, 32 nt, Human
caugguggcacacgccuguaaucccagguacu

SEQ ID NO: 93251 - RNA, 32 nt, Human
caugguggcacacgccuguaaucucagcuacu

SEQ ID NO: 93252 - RNA, 24 nt, Human
caugguggcacacgccuguagucc

SEQ ID NO: 93253 - RNA, 32 nt, Human
caugguggcacauaccuguaaucccagcuacu

SEQ ID NO: 93254 - RNA, 24 nt, Human
caugguggcacaugccuauagucc

SEQ ID NO: 93255 - RNA, 24 nt, Human
caugguggcacaugccuguaaucc

SEQ ID NO: 93256 - RNA, 32 nt, Human
caugguggcacaugccuguaaucccagcuacg

SEQ ID NO: 93257 - RNA, 32 nt, Human
caugguggcacaugccuguaaucccagcuacu

SEQ ID NO: 93258 - RNA, 32 nt, Human
caugguggcacaugccuguaaucccgguauuu

SEQ ID NO: 93259 - RNA, 32 nt, Human
caugguggcacaugccuguaauccuagcuacu

SEQ ID NO: 93260 - RNA, 32 nt, Human
caugguggcacaugccuguaaucucagcuacu

SEQ ID NO: 93261 - RNA, 24 nt, Human
caugguggcacaugccuguagucc

SEQ ID NO: 93262 - RNA, 32 nt, Human
caugguggcacaugcuuguaaucccagcuacu

SEQ ID NO: 93263 - RNA, 32 nt, Human
caugguggcacaugucuguaaucccagcuacu

SEQ ID NO: 93264 - RNA, 32 nt, Human
caugguggcacaugucuguaauccuagcacuu

SEQ ID NO: 93265 - RNA, 32 nt, Human
caugguggcaccugccuauaaucccagcuauu

SEQ ID NO: 93266 - RNA, 32 nt, Human
caugguggcaccugccuguaaucccagcuacu

SEQ ID NO: 93267 - RNA, 32 nt, Human
caugguggcacgcgccuguaauaccagcuacu

SEQ ID NO: 93268 - RNA, 32 nt, Human
caugguggcacgcgccuguaaucccagcuacu

SEQ ID NO: 93269 - RNA, 23 nt, Human
caugguggcacgcucuguaaucc

SEQ ID NO: 93270 - RNA, 32 nt, Human
caugguggcacgugccuguaaucccagcuacu

SEQ ID NO: 93271 - RNA, 32 nt, Human
caugguggcacgugccuguaaucucagcuacu

SEQ ID NO: 93272 - RNA, 32 nt, Human
caugguggcagacaccuguagucccagcuacu

SEQ ID NO: 93273 - RNA, 32 nt, Human
caugguggcaggcaccuguaaucccagcuacu

SEQ ID NO: 93274 - RNA, 32 nt, Human
caugguggcaggcaccuguaaucccagguacu

SEQ ID NO: 93275 - RNA, 32 nt, Human
caugguggcaggcaccuguaaucccaguuacu

SEQ ID NO: 93276 - RNA, 32 nt, Human
caugguggcaggcaccuguagucccagccagu

SEQ ID NO: 93277 - RNA, 32 nt, Human
caugguggcaggcaccuguagucccagcuacu

SEQ ID NO: 93278 - RNA, 32 nt, Human
caugguggcaggcgccguggcagggauccugg

SEQ ID NO: 93279 - RNA, 32 nt, Human
caugguggcaggcgccuauaaucccagcuacu

SEQ ID NO: 93280 - RNA, 32 nt, Human
caugguggcaggcgccuguaaucccagcuaaa

SEQ ID NO: 93281 - RNA, 32 nt, Human
caugguggcaggcgccuguaaucccagcuacu

SEQ ID NO: 93282 - RNA, 32 nt, Human
caugguggcaggcgccuguaaucccagcuauu

SEQ ID NO: 93283 - RNA, 32 nt, Human
caugguggcaggugccuguaaucccagcuacu

SEQ ID NO: 93284 - RNA, 32 nt, Human
caugguggcaggugcuuguaaucccagcuacu

SEQ ID NO: 93285 - RNA, 32 nt, Human
caugguggcagucaccuguaaucccagcuacu

SEQ ID NO: 93286 - RNA, 32 nt, Human
caugguggcaguugccuguaauccuagcuacu

SEQ ID NO: 93287 - RNA, 32 nt, Human
caugguggcauaaaugagaaauugccuguagc

SEQ ID NO: 93288 - RNA, 24 nt, Human
caugguggcauacaccuguagucc

SEQ ID NO: 93289 - RNA, 32 nt, Human
caugguggcauacaccuguagucccagcuacu

SEQ ID NO: 93290 - RNA, 24 nt, Human
caugguggcauauaccuguaaccc

SEQ ID NO: 93291 - RNA, 24 nt, Human
caugguggcauaugccuguagucc

SEQ ID NO: 93292 - RNA, 32 nt, Human
caugguggcaugcaccugcaaucccagcuacu

SEQ ID NO: 93293 - RNA, 32 nt, Human
caugguggcaugcaccuguaaacccagcuacu

SEQ ID NO: 93294 - RNA, 32 nt, Human
caugguggcaugcaccuguaaucccaacuacu

SEQ ID NO: 93295 - RNA, 32 nt, Human
caugguggcaugcaccuguagucccagcuacu

SEQ ID NO: 93296 - RNA, 32 nt, Human
caugguggcaugcaccuguaguccgagguacu

SEQ ID NO: 93297 - RNA, 32 nt, Human
caugguggcaugcgccuguaaucccagcuacc

SEQ ID NO: 93298 - RNA, 32 nt, Human
caugguggcaugcgccuguaaucccagcuacu

SEQ ID NO: 93299 - RNA, 32 nt, Human
caugguggcaugugccugcaaucccagcuacu

SEQ ID NO: 93300 - RNA, 32 nt, Human
caugguggcaugugccuguaaucccagcuacu

SEQ ID NO: 93301 - RNA, 32 nt, Human
caugguggcaugugccuguaaucccaguuacu

SEQ ID NO: 93302 - RNA, 32 nt, Human
caugguggcauucgucuguaaucccagcuacu

SEQ ID NO: 93303 - RNA, 32 nt, Human
caugguggccagcaccuguaaucccagcuacu

SEQ ID NO: 93304 - RNA, 24 nt, Human
caugguggcccacaccuguggucc

SEQ ID NO: 93305 - RNA, 32 nt, Human
caugguggcccacaccuguggucccagcuacu

SEQ ID NO: 93306 - RNA, 23 nt, Human
caugguggcccacgccuguaauc

SEQ ID NO: 93307 - RNA, 24 nt, Human
caugguggcccacgccuguaaucc

SEQ ID NO: 93308 - RNA, 32 nt, Human
caugguggcccacgccuguaaucccagcuacu

SEQ ID NO: 93309 - RNA, 32 nt, Human
caugguggcccaggucuucaggcugcaacagg

SEQ ID NO: 93310 - RNA, 32 nt, Human
caugguggcccaugccuguaaucccagcacuu

SEQ ID NO: 93311 - RNA, 23 nt, Human
caugguggcccaugccuguagcc

SEQ ID NO: 93312 - RNA, 18 nt, Human
caugguggcccuguucug

SEQ ID NO: 93313 - RNA, 32 nt, Human
caugguggccggcgccuguaaucccagcuacu

SEQ ID NO: 93314 - RNA, 24 nt, Human
caugguggccugcaccuguagucc

SEQ ID NO: 93315 - RNA, 24 nt, Human
caugguggccugugccuauagucc

SEQ ID NO: 93316 - RNA, 32 nt, Human
caugguggcgaaugacuguaaucccagcuacu

SEQ ID NO: 93317 - RNA, 19 nt, Human
caugguggcgagcacagca

SEQ ID NO: 93318 - RNA, 32 nt, Human
caugguggcgagcaccuguaaucccagcuucu

SEQ ID NO: 93319 - RNA, 32 nt, Human
caugguggcgagcaccuguagucccagcuacu

SEQ ID NO: 93320 - RNA, 32 nt, Human
caugguggcgcaagccuguaaucccagcuacu

SEQ ID NO: 93321 - RNA, 23 nt, Human
caugguggcgcacaccuauaauc

SEQ ID NO: 93322 - RNA, 23 nt, Human
caugguggcgcacaccuguaauc

SEQ ID NO: 93323 - RNA, 24 nt, Human
caugguggcgcacaccuguaaucc

SEQ ID NO: 93324 - RNA, 32 nt, Human
caugguggcgcacaccuguaauccuagcuacu

SEQ ID NO: 93325 - RNA, 32 nt, Human
caugguggcgcacaccuguaaucucagcuacu

SEQ ID NO: 93326 - RNA, 24 nt, Human
caugguggcgcacaccuguagucc

SEQ ID NO: 93327 - RNA, 32 nt, Human
caugguggcgcacaccuguagucccagcuacu

SEQ ID NO: 93328 - RNA, 32 nt, Human
caugguggcgcacgccuguaaugccagcuacu

SEQ ID NO: 93329 - RNA, 24 nt, Human
caugguggcgcacgccuguagucc

SEQ ID NO: 93330 - RNA, 24 nt, Human
caugguggcgcauaccuguaaucc

SEQ ID NO: 93331 - RNA, 32 nt, Human
caugguggcgcauaccuguaaucccagcuacu

SEQ ID NO: 93332 - RNA, 24 nt, Human
caugguggcgcauaccuguagucc

SEQ ID NO: 93333 - RNA, 24 nt, Human
caugguggcgcaugccuguaaucc

SEQ ID NO: 93334 - RNA, 32 nt, Human
caugguggcgcaugccuguaaucccagcuacu

SEQ ID NO: 93335 - RNA, 32 nt, Human
caugguggcgcaugccuguaaucccagcuauu

SEQ ID NO: 93336 - RNA, 32 nt, Human
caugguggcgcaugccuguaauccuagcuauu

SEQ ID NO: 93337 - RNA, 32 nt, Human
caugguggcgcaugccuguaaucucagcuacu

SEQ ID NO: 93338 - RNA, 32 nt, Human
caugguggcgcgcaccuguaaucccagcuacu

SEQ ID NO: 93339 - RNA, 32 nt, Human
caugguggcgcgugccuguaaucccagcuacu

SEQ ID NO: 93340 - RNA, 32 nt, Human
caugguggcgcucaccuguaaucccggcuacu

SEQ ID NO: 93341 - RNA, 32 nt, Human
caugguggcggacaucuguaaucccagcuacu

SEQ ID NO: 93342 - RNA, 32 nt, Human
caugguggcgggcaccuguaaucccagcuacu

SEQ ID NO: 93343 - RNA, 32 nt, Human
caugguggcgggcaccuguagucacgguuacu

SEQ ID NO: 93344 - RNA, 32 nt, Human
caugguggcgggcaccuguagucccagccacc

SEQ ID NO: 93345 - RNA, 32 nt, Human
caugguggcgggcaccuguagucccagcuacu

SEQ ID NO: 93346 - RNA, 32 nt, Human
caugguggcgggcaccuguauucccagcuacu

SEQ ID NO: 93347 - RNA, 32 nt, Human
caugguggcgggcgccuaaaaucccagcuacu

SEQ ID NO: 93348 - RNA, 32 nt, Human
caugguggcgggcgccuguaaucccagcuacu

SEQ ID NO: 93349 - RNA, 32 nt, Human
caugguggcgggcgcugguaaucccagcuacu

SEQ ID NO: 93350 - RNA, 32 nt, Human
caugguggcgggugccuguaaucccagcuacu

SEQ ID NO: 93351 - RNA, 24 nt, Human
caugguggcguacgccuguagucc

SEQ ID NO: 93352 - RNA, 24 nt, Human
caugguggcguaugccuguaaucc

SEQ ID NO: 93353 - RNA, 32 nt, Human
caugguggcguaugccuguaaucccagcuacu

SEQ ID NO: 93354 - RNA, 32 nt, Human
caugguggcgugcaccuguaaucccagcuacu

SEQ ID NO: 93355 - RNA, 32 nt, Human
caugguggcgugcaccuguagucccagcuucu

SEQ ID NO: 93356 - RNA, 32 nt, Human
caugguggcgugugccuguaaucucagcuacu

SEQ ID NO: 93357 - RNA, 32 nt, Human
caugguggcuaccaagcaggccaugagcccug

SEQ ID NO: 93358 - RNA, 24 nt, Human
caugguggcucaagccuauaaucc

SEQ ID NO: 93359 - RNA, 24 nt, Human
caugguggcucaagccuguaaucc

SEQ ID NO: 93360 - RNA, 32 nt, Human
caugguggcucaagccuguaaucccagcacuu

SEQ ID NO: 93361 - RNA, 32 nt, Human
caugguggcucacaccaguaaucccaacccuu

SEQ ID NO: 93362 - RNA, 32 nt, Human
caugguggcucacaccuauaaccccagcacuu

SEQ ID NO: 93363 - RNA, 23 nt, Human
caugguggcucacaccuauaauc

SEQ ID NO: 93364 - RNA, 32 nt, Human
caugguggcucacaccuauaaucccaacacuu

SEQ ID NO: 93365 - RNA, 32 nt, Human
caugguggcucacaccuauaaucccagcacuu

SEQ ID NO: 93366 - RNA, 32 nt, Human
caugguggcucacaccuauaauuuuagagcuu

SEQ ID NO: 93367 - RNA, 32 nt, Human
caugguggcucacaccucuaauccuagugaga

SEQ ID NO: 93368 - RNA, 32 nt, Human
caugguggcucacaccugagaucccagcacuu

SEQ ID NO: 93369 - RNA, 32 nt, Human
caugguggcucacaccuguaacccccagcacu

SEQ ID NO: 93370 - RNA, 23 nt, Human
caugguggcucacaccuguaauc

SEQ ID NO: 93371 - RNA, 32 nt, Human
caugguggcucacaccuguaaucacugcacuc

SEQ ID NO: 93372 - RNA, 24 nt, Human
caugguggcucacaccuguaaucc

SEQ ID NO: 93373 - RNA, 32 nt, Human
caugguggcucacaccuguaaucccaacacuu

SEQ ID NO: 93374 - RNA, 32 nt, Human
caugguggcucacaccuguaaucccaacccuu

SEQ ID NO: 93375 - RNA, 32 nt, Human
caugguggcucacaccuguaaucccaauacug

SEQ ID NO: 93376 - RNA, 32 nt, Human
caugguggcucacaccuguaaucccagcacuu

SEQ ID NO: 93377 - RNA, 32 nt, Human
caugguggcucacaccuguaaucccagcauuu

SEQ ID NO: 93378 - RNA, 32 nt, Human
caugguggcucacaccuguaaucccaguacuu

SEQ ID NO: 93379 - RNA, 32 nt, Human
caugguggcucacaccuguaauccuagcacgu

SEQ ID NO: 93380 - RNA, 32 nt, Human
caugguggcucacaccuguaaucucagcacuc

SEQ ID NO: 93381 - RNA, 32 nt, Human
caugguggcucacaccuguaauuccagcacuu

SEQ ID NO: 93382 - RNA, 32 nt, Human
caugguggcucacaccuguaauucuagcacuu

SEQ ID NO: 93383 - RNA, 32 nt, Human
caugguggcucacaccuguaauuucagcaccu

SEQ ID NO: 93384 - RNA, 23 nt, Human
caugguggcucacaccugugauc

SEQ ID NO: 93385 - RNA, 32 nt, Human
caugguggcucacaccugugaucucagcaccu

SEQ ID NO: 93386 - RNA, 32 nt, Human
caugguggcucacaccugugcucccagcacuu

SEQ ID NO: 93387 - RNA, 32 nt, Human
caugguggcucacaccuguggucucagccucc

SEQ ID NO: 93388 - RNA, 23 nt, Human
caugguggcucacacguguaauc

SEQ ID NO: 93389 - RNA, 32 nt, Human
caugguggcucacacguguaaucccaacacuu

SEQ ID NO: 93390 - RNA, 23 nt, Human
caugguggcucacacuuauaauc

SEQ ID NO: 93391 - RNA, 32 nt, Human
caugguggcucacacuuauaaucccagcacuu

SEQ ID NO: 93392 - RNA, 32 nt, Human
caugguggcucacaucuguaaucccagcacuu

SEQ ID NO: 93393 - RNA, 20 nt, Human
caugguggcucaccccugua

SEQ ID NO: 93394 - RNA, 21 nt, Human
caugguggcucaccccuguaa

SEQ ID NO: 93395 - RNA, 24 nt, Human
caugguggcucaccccuguaaccc

SEQ ID NO: 93396 - RNA, 23 nt, Human
caugguggcucacgcccguaauc

SEQ ID NO: 93397 - RNA, 24 nt, Human
caugguggcucacgcccguaaucc

SEQ ID NO: 93398 - RNA, 32 nt, Human
caugguggcucacgcccguaaucccagggcuu

SEQ ID NO: 93399 - RNA, 32 nt, Human
caugguggcucacgccuauaaucccagcacuu

SEQ ID NO: 93400 - RNA, 24 nt, Human
caugguggcucacgccugaaaucc

SEQ ID NO: 93401 - RNA, 32 nt, Human
caugguggcucacgccugaaaucccagcacuu

SEQ ID NO: 93402 - RNA, 21 nt, Human
caugguggcucacgccuguaa

SEQ ID NO: 93403 - RNA, 24 nt, Human
caugguggcucacgccuguaaccc

SEQ ID NO: 93404 - RNA, 23 nt, Human
caugguggcucacgccuguaauc

SEQ ID NO: 93405 - RNA, 32 nt, Human
caugguggcucacgccuguaaucacagcacuu

SEQ ID NO: 93406 - RNA, 24 nt, Human
caugguggcucacgccuguaaucc

SEQ ID NO: 93407 - RNA, 32 nt, Human
caugguggcucacgccuguaaucccaacacuu

SEQ ID NO: 93408 - RNA, 32 nt, Human
caugguggcucacgccuguaaucccagaacua

SEQ ID NO: 93409 - RNA, 32 nt, Human
caugguggcucacgccuguaaucccagcacug

SEQ ID NO: 93410 - RNA, 32 nt, Human
caugguggcucacgccuguaaucccagcacuu

SEQ ID NO: 93411 - RNA, 32 nt, Human
caugguggcucacgccuguaaucccagcuacu

SEQ ID NO: 93412 - RNA, 32 nt, Human
caugguggcucacgccuguaaucccaguacuu

SEQ ID NO: 93413 - RNA, 32 nt, Human
caugguggcucacgccuguaaucccuuagcua

SEQ ID NO: 93414 - RNA, 32 nt, Human
caugguggcucacgccuguaauccuagcacuu

SEQ ID NO: 93415 - RNA, 32 nt, Human
caugguggcucacgccuguaauccuagcauuu

SEQ ID NO: 93416 - RNA, 32 nt, Human
caugguggcucacgccuguaauccuagcccuu

SEQ ID NO: 93417 - RNA, 32 nt, Human
caugguggcucacgccuguaauccuggcacuu

SEQ ID NO: 93418 - RNA, 24 nt, Human
caugguggcucacgccuguaaucu

SEQ ID NO: 93419 - RNA, 32 nt, Human
caugguggcucacgccuguaaucucagcacuu

SEQ ID NO: 93420 - RNA, 32 nt, Human
caugguggcucacgccuguaauuccagugcuu

SEQ ID NO: 93421 - RNA, 24 nt, Human
caugguggcucacgccuguagucc

SEQ ID NO: 93422 - RNA, 24 nt, Human
caugguggcucacgccugugaucc

SEQ ID NO: 93423 - RNA, 24 nt, Human
caugguggcucacgccuguggucc

SEQ ID NO: 93424 - RNA, 24 nt, Human
caugguggcucacgcuuguaaucc

SEQ ID NO: 93425 - RNA, 32 nt, Human
caugguggcucacgcuuguaaucccagcacuu

SEQ ID NO: 93426 - RNA, 32 nt, Human
caugguggcucacgcuuguaaucccagcuacu

SEQ ID NO: 93427 - RNA, 32 nt, Human
caugguggcucacggcuguaaucccagcacuu

SEQ ID NO: 93428 - RNA, 32 nt, Human
caugguggcucacgucuguaaucccaggacuu

SEQ ID NO: 93429 - RNA, 24 nt, Human
caugguggcucacuccuguagucc

SEQ ID NO: 93430 - RNA, 24 nt, Human
caugguggcucaggccuguaaucc

SEQ ID NO: 93431 - RNA, 32 nt, Human
caugguggcucaggccuguaaucccagcauuu

SEQ ID NO: 93432 - RNA, 32 nt, Human
caugguggcucaggccuguaaucccagcuacu

SEQ ID NO: 93433 - RNA, 24 nt, Human
caugguggcucauaccuguaaucc

SEQ ID NO: 93434 - RNA, 32 nt, Human
caugguggcucauaccuguaaucccagcaauu

SEQ ID NO: 93435 - RNA, 32 nt, Human
caugguggcucauaccuguaaucccagcacuu

SEQ ID NO: 93436 - RNA, 32 nt, Human
caugguggcucauaccuguaauccuagcacuc

SEQ ID NO: 93437 - RNA, 24 nt, Human
caugguggcucauaccuguacucc

SEQ ID NO: 93438 - RNA, 24 nt, Human
caugguggcucaugccuauaaucc

SEQ ID NO: 93439 - RNA, 32 nt, Human
caugguggcucaugccuauaaucccagcacuu

SEQ ID NO: 93440 - RNA, 32 nt, Human
caugguggcucaugccuauaaucccagugcuu

SEQ ID NO: 93441 - RNA, 24 nt, Human
caugguggcucaugccuauauucc

SEQ ID NO: 93442 - RNA, 24 nt, Human
caugguggcucaugccuauuaucc

SEQ ID NO: 93443 - RNA, 24 nt, Human
caugguggcucaugccuccaaucc

SEQ ID NO: 93444 - RNA, 24 nt, Human
caugguggcucaugccuguaaacc

SEQ ID NO: 93445 - RNA, 24 nt, Human
caugguggcucaugccuguaaucc

SEQ ID NO: 93446 - RNA, 32 nt, Human
caugguggcucaugccuguaaucccaacacuu

SEQ ID NO: 93447 - RNA, 32 nt, Human
caugguggcucaugccuguaaucccaccacuu

SEQ ID NO: 93448 - RNA, 32 nt, Human
caugguggcucaugccuguaaucccagcacau

SEQ ID NO: 93449 - RNA, 32 nt, Human
caugguggcucaugccuguaaucccagcacuc

SEQ ID NO: 93450 - RNA, 32 nt, Human
caugguggcucaugccuguaaucccagcacuu

SEQ ID NO: 93451 - RNA, 32 nt, Human
caugguggcucaugccuguaaucccagcauuu

SEQ ID NO: 93452 - RNA, 32 nt, Human
caugguggcucaugccuguaaucccaguacuu

SEQ ID NO: 93453 - RNA, 32 nt, Human
caugguggcucaugccuguaauccuagcacuu

SEQ ID NO: 93454 - RNA, 32 nt, Human
caugguggcucaugccuguaauccuagcaggu

SEQ ID NO: 93455 - RNA, 24 nt, Human
caugguggcucaugccuguaaucu

SEQ ID NO: 93456 - RNA, 32 nt, Human
caugguggcucaugccuguaaucucagcacuu

SEQ ID NO: 93457 - RNA, 32 nt, Human
caugguggcucaugccuguaauuccagcacuu

SEQ ID NO: 93458 - RNA, 32 nt, Human
caugguggcucaugccuguaauuccggcacuu

SEQ ID NO: 93459 - RNA, 24 nt, Human
caugguggcucaugccuguagucc

SEQ ID NO: 93460 - RNA, 24 nt, Human
caugguggcucaugccugugaucc

SEQ ID NO: 93461 - RNA, 24 nt, Human
caugguggcucaugccuguggucc

SEQ ID NO: 93462 - RNA, 24 nt, Human
caugguggcucaugcuuguaaucc

SEQ ID NO: 93463 - RNA, 32 nt, Human
caugguggcucauguuuguaauccuagcacuu

SEQ ID NO: 93464 - RNA, 24 nt, Human
caugguggcucccgccuguaaucc

SEQ ID NO: 93465 - RNA, 32 nt, Human
caugguggcucccgccuguaaucccaguacuu

SEQ ID NO: 93466 - RNA, 24 nt, Human
caugguggcucgugccuguaaucc

SEQ ID NO: 93467 - RNA, 24 nt, Human
caugguggcugacgccuguaaucc

SEQ ID NO: 93468 - RNA, 32 nt, Human
caugguggcugacgccuguaaucccagcacuu

SEQ ID NO: 93469 - RNA, 32 nt, Human
caugguggcuggugucuguaaucccagcugug

SEQ ID NO: 93470 - RNA, 23 nt, Human
caugguggcuuacaccuguaauc

SEQ ID NO: 93471 - RNA, 24 nt, Human
caugguggcuuacaccuguaaucc

SEQ ID NO: 93472 - RNA, 24 nt, Human
caugguggcuuacaucuguaaucc

SEQ ID NO: 93473 - RNA, 32 nt, Human
caugguggcuuacaucuguaaucccagcacuu

SEQ ID NO: 93474 - RNA, 24 nt, Human
caugguggcuuacgccuguaaucc

SEQ ID NO: 93475 - RNA, 32 nt, Human
caugguggcuuacgccuguaaucccagcacuu

SEQ ID NO: 93476 - RNA, 32 nt, Human
caugguggcuuacgccuguaaucccaggacuu

SEQ ID NO: 93477 - RNA, 32 nt, Human
caugguggcuuacgccuguaauccuagcacuu

SEQ ID NO: 93478 - RNA, 24 nt, Human
caugguggcuuaugccuguaaucc

SEQ ID NO: 93479 - RNA, 32 nt, Human
caugguggcuuaugccuguaaucccagcacuu

SEQ ID NO: 93480 - RNA, 24 nt, Human
caugguggcuugcaccuguaaucc

SEQ ID NO: 93481 - RNA, 32 nt, Human
caugguggcuugcaccuguaaucccagcacuu

SEQ ID NO: 93482 - RNA, 32 nt, Human
cauggugggaggauggguugagcacaggaguc

SEQ ID NO: 93483 - RNA, 32 nt, Human
cauggugggaggcaccuguaaucccagcuacu

SEQ ID NO: 93484 - RNA, 32 nt, Human
cauggugggcacugaggcacagaggaggccaa

SEQ ID NO: 93485 - RNA, 32 nt, Human
cauggugggcuugugguggcugcuccaugagg

SEQ ID NO: 93486 - RNA, 32 nt, Human
caugguggguugugccuguaaucccagcuacu

SEQ ID NO: 93487 - RNA, 24 nt, Human
cauggugguacacaccuguaaucc

SEQ ID NO: 93488 - RNA, 24 nt, Human
cauggugguacacaccuguagucc

SEQ ID NO: 93489 - RNA, 24 nt, Human
cauggugguacacgccuguagucc

SEQ ID NO: 93490 - RNA, 32 nt, Human
cauggugguagaugccuguaauuccagcuacu

SEQ ID NO: 93491 - RNA, 32 nt, Human
cauggugguaggugccuguaaucccagcuacu

SEQ ID NO: 93492 - RNA, 32 nt, Human
cauggugguccacaccugcagucccaguuacc

SEQ ID NO: 93493 - RNA, 32 nt, Human
caugguggugagcaccuguaaucccagcuacu

SEQ ID NO: 93494 - RNA, 32 nt, Human
caugguggugagccccuguaaucccagcuacu

SEQ ID NO: 93495 - RNA, 32 nt, Human
caugguggugagugccuguaaucccagcuacu

SEQ ID NO: 93496 - RNA, 32 nt, Human
caugguggugagugccuguaaucucaguuacu

SEQ ID NO: 93497 - RNA, 21 nt, Human
caugguggugauguccaaaag

SEQ ID NO: 93498 - RNA, 32 nt, Human
caugguggugcacaccugcauucccagcuacu

SEQ ID NO: 93499 - RNA, 24 nt, Human
caugguggugcacaccuguaaucc

SEQ ID NO: 93500 - RNA, 32 nt, Human
caugguggugcacaccuguaaucccaguuacu

SEQ ID NO: 93501 - RNA, 32 nt, Human
caugguggugcacaccuguacucccagcuacu

SEQ ID NO: 93502 - RNA, 24 nt, Human
caugguggugcacaccuguagucc

SEQ ID NO: 93503 - RNA, 32 nt, Human
caugguggugcacaccuguaguccuagcuucu

SEQ ID NO: 93504 - RNA, 32 nt, Human
caugguggugcacaccuguugucccagcuauu

SEQ ID NO: 93505 - RNA, 24 nt, Human
caugguggugcacgccuauagucc

SEQ ID NO: 93506 - RNA, 24 nt, Human
caugguggugcacgccuguagucc

SEQ ID NO: 93507 - RNA, 24 nt, Human
caugguggugcauaccuguagucc

SEQ ID NO: 93508 - RNA, 32 nt, Human
caugguggugcaugccuauaaucccagcuacu

SEQ ID NO: 93509 - RNA, 32 nt, Human
caugguggugcaugccugcaaucccagcuacu

SEQ ID NO: 93510 - RNA, 24 nt, Human
caugguggugcaugccuguaaucc

SEQ ID NO: 93511 - RNA, 32 nt, Human
caugguggugcaugccuguaaucccagcuacu

SEQ ID NO: 93512 - RNA, 32 nt, Human
caugguggugcaugccuguaaucccagcuauu

SEQ ID NO: 93513 - RNA, 32 nt, Human
caugguggugcaugccuguaaucccagcugcu

SEQ ID NO: 93514 - RNA, 32 nt, Human
caugguggugcaugccuguaaucucagcuacu

SEQ ID NO: 93515 - RNA, 32 nt, Human
caugguggugcaugccuguaaucucagcugcu

SEQ ID NO: 93516 - RNA, 32 nt, Human
caugguggugcaugccuguaauuccagcggcu

SEQ ID NO: 93517 - RNA, 24 nt, Human
caugguggugcaugccuguagucc

SEQ ID NO: 93518 - RNA, 32 nt, Human
caugguggugcgagccuguaauuccagcuacu

SEQ ID NO: 93519 - RNA, 32 nt, Human
caugguggugcgcguguguaaucccagcuacu

SEQ ID NO: 93520 - RNA, 32 nt, Human
caugguggugcgugccuguaaucccagcuacu

SEQ ID NO: 93521 - RNA, 32 nt, Human
caugguggugcucgccuguaaucccagcuacu

SEQ ID NO: 93522 - RNA, 32 nt, Human
cauggugguggacaccuguaaucccagcuacu

SEQ ID NO: 93523 - RNA, 32 nt, Human
cauggugguggacgccuguaaucccagcuacu

SEQ ID NO: 93524 - RNA, 32 nt, Human
cauggugguggaugccuauaaucccagcuacu

SEQ ID NO: 93525 - RNA, 32 nt, Human
caugguggugggcaccuguaaucccagcuacu

SEQ ID NO: 93526 - RNA, 32 nt, Human
caugguggugggcgccuauaaucccagcuauu

SEQ ID NO: 93527 - RNA, 32 nt, Human
caugguggugggcgccuguaaucccagcuacu

SEQ ID NO: 93528 - RNA, 32 nt, Human
caugguggugggcgccuguaaucccaguuacu

SEQ ID NO: 93529 - RNA, 32 nt, Human
caugguggugggcgccuguaauuccagcuacu

SEQ ID NO: 93530 - RNA, 32 nt, Human
cauggugguggguaccuauaaucccagcuacu

SEQ ID NO: 93531 - RNA, 32 nt, Human
cauggugguggguaccuguaaucccagcuacu

SEQ ID NO: 93532 - RNA, 32 nt, Human
cauggugguggguaccuguaaucccaguuacu

SEQ ID NO: 93533 - RNA, 32 nt, Human
caugguggugggugccuguaaucccagcuacu

SEQ ID NO: 93534 - RNA, 32 nt, Human
caugguggugggugccuguaaucccagcuucu

SEQ ID NO: 93535 - RNA, 24 nt, Human
cauggugguguacgccuguaaucc

SEQ ID NO: 93536 - RNA, 32 nt, Human
cauggugguguacgccuguaaucccagugacu

SEQ ID NO: 93537 - RNA, 24 nt, Human
cauggugguguaugccuguagucc

SEQ ID NO: 93538 - RNA, 32 nt, Human
caugguggugucuggccugaccccagaagaau

SEQ ID NO: 93539 - RNA, 32 nt, Human
caugguggugugagucuguggucccagcuauc

SEQ ID NO: 93540 - RNA, 32 nt, Human
caugguggugugcaccuguaaucccagcuacu

SEQ ID NO: 93541 - RNA, 32 nt, Human
caugguggugugcaccuguagucccagcuacu

SEQ ID NO: 93542 - RNA, 32 nt, Human
caugguggugugcaccuguagucccaguuagg

SEQ ID NO: 93543 - RNA, 32 nt, Human
caugguggugugcgcaccuguagucccagcua

SEQ ID NO: 93544 - RNA, 32 nt, Human
caugguggugugcgccuguaaucccagcuacu

SEQ ID NO: 93545 - RNA, 32 nt, Human
caugguggugugugccuguaaucccagcuacu

SEQ ID NO: 93546 - RNA, 32 nt, Human
caugguggugugugccuguaaucccggcuacu

SEQ ID NO: 93547 - RNA, 32 nt, Human
caugguggugugugccuguaaugccagcuacu

SEQ ID NO: 93548 - RNA, 32 nt, Human
cauggugguucacaccucuaaucccugcacuu

SEQ ID NO: 93549 - RNA, 32 nt, Human
cauggugguucacaccuguaaucccggcacuu

SEQ ID NO: 93550 - RNA, 32 nt, Human
cauggugguucacaccuguaauccuagcaguu

SEQ ID NO: 93551 - RNA, 24 nt, Human
cauggugguucaugccuguaaucc

SEQ ID NO: 93552 - RNA, 32 nt, Human
cauggugguucaugccuguaaucccagcacuu

SEQ ID NO: 93553 - RNA, 24 nt, Human
cauggugguuuacaccuauaaucc

SEQ ID NO: 93554 - RNA, 32 nt, Human
cauggugguuuacgccuauaaucccagcauuu

SEQ ID NO: 93555 - RNA, 24 nt, Human
caugguguaaccccaucucuacua

SEQ ID NO: 93556 - RNA, 32 nt, Human
caugguguauaugugccacauugucuuuaucc

SEQ ID NO: 93557 - RNA, 32 nt, Human
caugguguauaugugccacauuuucuuuaucc

SEQ ID NO: 93558 - RNA, 32 nt, Human
cauggugucgcugugugccuguaucauuuggc

SEQ ID NO: 93559 - RNA, 32 nt, Human
cauggugucucacacguuuaaucccagcacuu

SEQ ID NO: 93560 - RNA, 32 nt, Human
cauggugugcuggcuuaaaauguaauuaaucu

SEQ ID NO: 93561 - RNA, 32 nt, Human
cauggugugugauggcacggcccacacugggu

SEQ ID NO: 93562 - RNA, 32 nt, Human
caugguguuaauucuccuccaggcagauaucu

SEQ ID NO: 93563 - RNA, 32 nt, Human
caugguguuagaaaucauagcugcggagaagc

SEQ ID NO: 93564 - RNA, 32 nt, Human
caugguuacauacuaauugcugcagcucugug

SEQ ID NO: 93565 - RNA, 32 nt, Human
caugguucacugcaaucucgacuuccaguuuc

SEQ ID NO: 93566 - RNA, 26 nt, Human
caugguucacugcagccucagccucc

SEQ ID NO: 93567 - RNA, 32 nt, Human
caugguucacugcagucuugaccucccaggcu

SEQ ID NO: 93568 - RNA, 32 nt, Human
caugguucacugcagucuugaccuuuugggcu

SEQ ID NO: 93569 - RNA, 32 nt, Human
caugguucauaacauugcaugccauuauuagc

SEQ ID NO: 93570 - RNA, 32 nt, Human
caugguucccacccuccacguuauuuucccuu

SEQ ID NO: 93571 - RNA, 32 nt, Human
caugguuccccaggcuguacaggaagcaugac

SEQ ID NO: 93572 - RNA, 32 nt, Human
caugguuccuccaggcccucuucagucaugac

SEQ ID NO: 93573 - RNA, 32 nt, Human
caugguuccuuucuuaaagaaaucuuccaugu

SEQ ID NO: 93574 - RNA, 32 nt, Human
caugguucugcaggcuguacaggaagcauaau

SEQ ID NO: 93575 - RNA, 32 nt, Human
caugguucuuagaagccaccccuuccccaggc

SEQ ID NO: 93576 - RNA, 25 nt, Human
caugguugaaaccccaucucuacua

SEQ ID NO: 93577 - RNA, 32 nt, Human
caugguugaaucugaaacccuccuucuguggc

SEQ ID NO: 93578 - RNA, 32 nt, Human
caugguugcaccacuacacuguagccugggug

SEQ ID NO: 93579 - RNA, 32 nt, Human
caugguugcaccacugcucuccaggcuugagu

SEQ ID NO: 93580 - RNA, 17 nt, Human
caugguugcagcugcca

SEQ ID NO: 93581 - RNA, 32 nt, Human
caugguugcucacaccuguaucccagcacuuu

SEQ ID NO: 93582 - RNA, 32 nt, Human
caugguuggucugcuucccucacucgggcucc

SEQ ID NO: 93583 - RNA, 32 nt, Human
caugguuguaaaacauaauaaaaccucccacg

SEQ ID NO: 93584 - RNA, 32 nt, Human
caugguuguaaguuuccugaggccucccaguc

SEQ ID NO: 93585 - RNA, 23 nt, Human
caugguuguagcaagugugagga

SEQ ID NO: 93586 - RNA, 32 nt, Human
caugguuguccacccuggggguuuuuccucug

SEQ ID NO: 93587 - RNA, 23 nt, Human
caugguuuccagugcagcgcgga

SEQ ID NO: 93588 - RNA, 32 nt, Human
caugguuugcauccugcacaggcacaagcagc

SEQ ID NO: 93589 - RNA, 32 nt, Human
caugguuuuauugcuuguuucucuccaggaua

SEQ ID NO: 93590 - RNA, 32 nt, Human
caugguuuuuccugccaaaccagaggcaccuu

SEQ ID NO: 93591 - RNA, 32 nt, Human
cauguaaaaauaugugcacauauggauguaug

SEQ ID NO: 93592 - RNA, 32 nt, Human
cauguaaaacuaauguaucaaaauuagcauau

SEQ ID NO: 93593 - RNA, 32 nt, Human
cauguaaacaaagacaugggauuuucugacgu

SEQ ID NO: 93594 - RNA, 32 nt, Human
cauguaaacuauugaaacuauuguaauccauu

SEQ ID NO: 93595 - RNA, 32 nt, Human
cauguaaagcacaaaguauguuucaguuuaaa

SEQ ID NO: 93596 - RNA, 32 nt, Human
cauguaaaguuuccuuucauccugccuagcca

SEQ ID NO: 93597 - RNA, 29 nt, Human
cauguaaauaaauacauucuuggaggagc

SEQ ID NO: 93598 - RNA, 32 nt, Human
cauguaaauuucccagaaguuguugagcucaa

SEQ ID NO: 93599 - RNA, 32 nt, Human
cauguaacaaaccugcacaugugggcugggcg

SEQ ID NO: 93600 - RNA, 32 nt, Human
cauguaacaaaccugugcauguaccccuugaa

SEQ ID NO: 93601 - RNA, 32 nt, Human
cauguaacaaauucaggccaaagagaggcaau

SEQ ID NO: 93602 - RNA, 32 nt, Human
cauguaacagaacagacccaggacagggaaaa

SEQ ID NO: 93603 - RNA, 32 nt, Human
cauguaaccauggugaaggccacugggggauu

SEQ ID NO: 93604 - RNA, 32 nt, Human
cauguaacuaaccugcacauugugcacaugua

SEQ ID NO: 93605 - RNA, 19 nt, Human
cauguaacucugcuucgaa

SEQ ID NO: 93606 - RNA, 32 nt, Human
cauguaagaagugccuuucaucuccugccaug

SEQ ID NO: 93607 - RNA, 32 nt, Human
cauguaagaagugccuuucgccuucagccaug

SEQ ID NO: 93608 - RNA, 32 nt, Human
cauguaagagugagacuggauggagagacugg

SEQ ID NO: 93609 - RNA, 32 nt, Human
cauguaagagugagggagggaaggaaggaacu

SEQ ID NO: 93610 - RNA, 32 nt, Human
cauguaaguacauacacacaugcgccugcagc

SEQ ID NO: 93611 - RNA, 32 nt, Human
cauguaaucacugggcugggugcaguggcuca

SEQ ID NO: 93612 - RNA, 32 nt, Human
cauguaaucccaccuacucagaagacugaggc

SEQ ID NO: 93613 - RNA, 32 nt, Human
cauguaaucccagcuacucgggaggcugaggc

SEQ ID NO: 93614 - RNA, 32 nt, Human
cauguaaucccagcuacuugggaggcugaggu

SEQ ID NO: 93615 - RNA, 32 nt, Human
cauguaaucucccaacaccccaugaagcaagg

SEQ ID NO: 93616 - RNA, 32 nt, Human
cauguaauguauuauauggggucugggcucca

SEQ ID NO: 93617 - RNA, 32 nt, Human
cauguaauucagguaccacguauuccagggag

SEQ ID NO: 93618 - RNA, 32 nt, Human
cauguaauucuuccucuauaaagaauagguau

SEQ ID NO: 93619 - RNA, 32 nt, Human
cauguacaaagaagacagggcaugaagguguc

SEQ ID NO: 93620 - RNA, 32 nt, Human
cauguacaacagcauccaacauaucugucuug

SEQ ID NO: 93621 - RNA, 32 nt, Human
cauguacagaacuuugucuacagcacaaauua

SEQ ID NO: 93622 - RNA, 32 nt, Human
cauguacagagguuuuucugugguuguaaaug

SEQ ID NO: 93623 - RNA, 32 nt, Human
cauguaccaagaagaaggaggaggaggcaccu

SEQ ID NO: 93624 - RNA, 32 nt, Human
cauguaccacagguuccugaauaauuccugca

SEQ ID NO: 93625 - RNA, 32 nt, Human
cauguaccauguuuuuauuauuucuauuuuua

SEQ ID NO: 93626 - RNA, 32 nt, Human
cauguacccuggggcacccucuuguacuucac

SEQ ID NO: 93627 - RNA, 32 nt, Human
cauguaccugcucuucuguuugcacacccagc

SEQ ID NO: 93628 - RNA, 32 nt, Human
cauguaccuucauuugcuuagcuauuugagua

SEQ ID NO: 93629 - RNA, 32 nt, Human
cauguacgcaccacaaacacaugcgcaggcuc

SEQ ID NO: 93630 - RNA, 32 nt, Human
cauguacuacugcacuugagcaugaaugggua

SEQ ID NO: 93631 - RNA, 32 nt, Human
cauguacuccagccucccuugagacaacauuu

SEQ ID NO: 93632 - RNA, 32 nt, Human
cauguacuguauauuaccuggugauaguugcu

SEQ ID NO: 93633 - RNA, 32 nt, Human
cauguacuugacuucuugacgcauggcugacc

SEQ ID NO: 93634 - RNA, 32 nt, Human
cauguagaagagggagaaggagaggcucugaa

SEQ ID NO: 93635 - RNA, 32 nt, Human
cauguagacacaaacauauacacagacgugua

SEQ ID NO: 93636 - RNA, 19 nt, Human
cauguagauagcacaagua

SEQ ID NO: 93637 - RNA, 32 nt, Human
cauguagaucaauuugaugaaagcacuaggua

SEQ ID NO: 93638 - RNA, 32 nt, Human
cauguagaugagcgcaguccugggcuuucggu

SEQ ID NO: 93639 - RNA, 32 nt, Human
cauguagauguggaggaggggaagggaagacc

SEQ ID NO: 93640 - RNA, 20 nt, Human
cauguagccccuugcugcca

SEQ ID NO: 93641 - RNA, 32 nt, Human
cauguagcccuaucgaggagaugauguagggg

SEQ ID NO: 93642 - RNA, 32 nt, Human
cauguagcccucucauuugauugacaguauuu

SEQ ID NO: 93643 - RNA, 32 nt, Human
cauguagccgcugagaccugcuguuucugcug

SEQ ID NO: 93644 - RNA, 32 nt, Human
cauguagcugugcagcucugcagaucuaaaau

SEQ ID NO: 93645 - RNA, 32 nt, Human
cauguaggaaagaagacacaggcugagccccg

SEQ ID NO: 93646 - RNA, 32 nt, Human
cauguaggacucaagugacuaccagucccugu

SEQ ID NO: 93647 - RNA, 32 nt, Human
cauguaggcugugcgcugcauaacuccaggga

SEQ ID NO: 93648 - RNA, 32 nt, Human
cauguagggcaggccuucuauaagugcgggca

SEQ ID NO: 93649 - RNA, 32 nt, Human
cauguagggucuucaugucuuuucucugacuu

SEQ ID NO: 93650 - RNA, 32 nt, Human
cauguaggugugugugcaugcauacauaugcc

SEQ ID NO: 93651 - RNA, 32 nt, Human
cauguagucccaccuacucaggaggcugagga

SEQ ID NO: 93652 - RNA, 32 nt, Human
cauguagucccagcuacucgggaggcugaggc

SEQ ID NO: 93653 - RNA, 32 nt, Human
cauguaguccuagcuacucggaaggcugaggc

SEQ ID NO: 93654 - RNA, 32 nt, Human
cauguaguuaacuccauugauuuuccuaucuu

SEQ ID NO: 93655 - RNA, 32 nt, Human
cauguaguuccagcuacucaggaggcugaggc

SEQ ID NO: 93656 - RNA, 32 nt, Human
cauguaguugaauuucaguccuuacggguaaa

SEQ ID NO: 93657 - RNA, 32 nt, Human
cauguauaaugugccccaaaugcagcuucauu

SEQ ID NO: 93658 - RNA, 32 nt, Human
cauguauacauuuugaaaauauacaaaacaac

SEQ ID NO: 93659 - RNA, 32 nt, Human
cauguauaugugcacacacauguauauguaua

SEQ ID NO: 93660 - RNA, 32 nt, Human
cauguauauuuccacauuuuugugcuuggaua

SEQ ID NO: 93661 - RNA, 32 nt, Human
cauguaucaccacuucugugauuucaucaauc

SEQ ID NO: 93662 - RNA, 32 nt, Human
cauguaucuaugcauuuucuggacccguucaa

SEQ ID NO: 93663 - RNA, 32 nt, Human
cauguaucugcgcagcucugguacccucugug

SEQ ID NO: 93664 - RNA, 32 nt, Human
cauguaucuguaagaucagccuuucccaaggu

SEQ ID NO: 93665 - RNA, 32 nt, Human
cauguaugcaugcacaaacauguguguacaug

SEQ ID NO: 93666 - RNA, 19 nt, Human
cauguaugcucaucgggga

SEQ ID NO: 93667 - RNA, 32 nt, Human
cauguaugggcaggaggaaaggugggaggggg

SEQ ID NO: 93668 - RNA, 30 nt, Human
cauguauggggugggacugcagaaggacca

SEQ ID NO: 93669 - RNA, 32 nt, Human
cauguauuaccugaauuuuggcugugucuccc

SEQ ID NO: 93670 - RNA, 32 nt, Human
cauguauuauuucauuauguaaaauguuuuag

SEQ ID NO: 93671 - RNA, 23 nt, Human
cauguauuuaaaucauugcuaua

SEQ ID NO: 93672 - RNA, 32 nt, Human
cauguauuuucaacuugucuucccugguauau

SEQ ID NO: 93673 - RNA, 18 nt, Human
caugucaaguagcaggug

SEQ ID NO: 93674 - RNA, 32 nt, Human
caugucaaguccagccccagacugacuuucug

SEQ ID NO: 93675 - RNA, 32 nt, Human
caugucacaaauuuaguaaguuacauguguua

SEQ ID NO: 93676 - RNA, 32 nt, Human
caugucacaagaggagcacaggcagggguguu

SEQ ID NO: 93677 - RNA, 32 nt, Human
caugucaccacugcccucacagucgaggccuu

SEQ ID NO: 93678 - RNA, 32 nt, Human
caugucacccacccagccuuuuacaccuggga

SEQ ID NO: 93679 - RNA, 32 nt, Human
caugucaccgcuucugaaacaugugaauauua

SEQ ID NO: 93680 - RNA, 32 nt, Human
caugucaccucacuccaaaugccaggcuuuuc

SEQ ID NO: 93681 - RNA, 32 nt, Human
caugucacgauuccgucgcauccucugccauu

SEQ ID NO: 93682 - RNA, 32 nt, Human
caugucacggcaaccuccgccucccagguuca

SEQ ID NO: 93683 - RNA, 32 nt, Human
caugucacugauugcauuccagccugggugac

SEQ ID NO: 93684 - RNA, 32 nt, Human
caugucacugcacuccagccugggugacagag

SEQ ID NO: 93685 - RNA, 32 nt, Human
caugucacugcacucuagcuugggagacagag

SEQ ID NO: 93686 - RNA, 32 nt, Human
caugucacuguacuccagccugggcaacagag

SEQ ID NO: 93687 - RNA, 32 nt, Human
caugucacuguguacagcuggccacacacagg

SEQ ID NO: 93688 - RNA, 32 nt, Human
caugucagaggaccccagggugguuagaggaa

SEQ ID NO: 93689 - RNA, 32 nt, Human
caugucagagguggggcucagcaggaaguggg

SEQ ID NO: 93690 - RNA, 32 nt, Human
caugucagcagaguggcgccugccugugcugg

SEQ ID NO: 93691 - RNA, 32 nt, Human
caugucagccuccugaguagcuggaaccacag

SEQ ID NO: 93692 - RNA, 32 nt, Human
caugucaggaggacuccucugcacaacaucac

SEQ ID NO: 93693 - RNA, 19 nt, Human
caugucagucccuguucug

SEQ ID NO: 93694 - RNA, 32 nt, Human
caugucagugaaaaauaauuacccacaaaugc

SEQ ID NO: 93695 - RNA, 32 nt, Human
caugucaguguguguauucuguauguaaauau

SEQ ID NO: 93696 - RNA, 19 nt, Human
caugucaguuugucacuca

SEQ ID NO: 93697 - RNA, 32 nt, Human
caugucaucgacagcacagaagggcuguccug

SEQ ID NO: 93698 - RNA, 32 nt, Human
caugucauggaugccugugccaccccaggcaa

SEQ ID NO: 93699 - RNA, 31 nt, Human
caugucauggccgccuccauggcccggggag

SEQ ID NO: 93700 - RNA, 32 nt, Human
caugucauugcacucuagucugggugacaaga

SEQ ID NO: 93701 - RNA, 26 nt, Human
cauguccacauccccagugcuugcgg

SEQ ID NO: 93702 - RNA, 32 nt, Human
cauguccacuggccugccagcauccgccagug

SEQ ID NO: 93703 - RNA, 32 nt, Human
cauguccagcauaggcaggauugcucgguggu

SEQ ID NO: 93704 - RNA, 32 nt, Human
cauguccagggggaugauggagagcuguccaa

SEQ ID NO: 93705 - RNA, 32 nt, Human
cauguccaucuagaaccugggaaugugacuuu

SEQ ID NO: 93706 - RNA, 32 nt, Human
cauguccaucuucuauuaccagcacuuacaag

SEQ ID NO: 93707 - RNA, 32 nt, Human
cauguccaugaggaaauggggagaagaauaua

SEQ ID NO: 93708 - RNA, 32 nt, Human
caugucccacucuuggauuagcaggggugggu

SEQ ID NO: 93709 - RNA, 32 nt, Human
caugucccagaacuuagccuuuaccugugaag

SEQ ID NO: 93710 - RNA, 32 nt, Human
caugucccaucacguguacuggcuccucugug

SEQ ID NO: 93711 - RNA, 32 nt, Human
caugucccaucuucagcaucccucccaccaac

SEQ ID NO: 93712 - RNA, 32 nt, Human
cauguccccaggaauggaaguggacccuaguu

SEQ ID NO: 93713 - RNA, 32 nt, Human
cauguccccgccggcccugccccugcccucug

SEQ ID NO: 93714 - RNA, 32 nt, Human
cauguccccuccacuuccacugccaaacagcu

SEQ ID NO: 93715 - RNA, 19 nt, Human
cauguccccuuccuguucu

SEQ ID NO: 93716 - RNA, 32 nt, Human
cauguccccuuccuguucuuccuuccuagaag

SEQ ID NO: 93717 - RNA, 32 nt, Human
caugucccuccaggccucagccaccugcccgc

SEQ ID NO: 93718 - RNA, 32 nt, Human
caugucccuccagggggaccccacagccuggc

SEQ ID NO: 93719 - RNA, 32 nt, Human
caugucccuccuggauggcuucuuccagcaca

SEQ ID NO: 93720 - RNA, 32 nt, Human
caugucccugcaaaggacgugaucucauuucu

SEQ ID NO: 93721 - RNA, 32 nt, Human
caugucccugcacucuguuuugcaagaugcca

SEQ ID NO: 93722 - RNA, 32 nt, Human
caugucccuguuccucuuccccuggccagggc

SEQ ID NO: 93723 - RNA, 32 nt, Human
caugucccuuccccucucuggcccucaguuuc

SEQ ID NO: 93724 - RNA, 32 nt, Human
caugucccuuucuccucuccccucaaccucuu

SEQ ID NO: 93725 - RNA, 32 nt, Human
cauguccuaaagcacuggcugaaggaagccaa

SEQ ID NO: 93726 - RNA, 32 nt, Human
cauguccuaagcugaggcaggcggcaggcgug

SEQ ID NO: 93727 - RNA, 32 nt, Human
cauguccuauugaucagugacacugccagagg

SEQ ID NO: 93728 - RNA, 32 nt, Human
cauguccucccucgagaaacagugccgccggu

SEQ ID NO: 93729 - RNA, 32 nt, Human
cauguccucuacuugccuccggccuugaaauc

SEQ ID NO: 93730 - RNA, 32 nt, Human
cauguccucugccuucucccucuucucuugcc

SEQ ID NO: 93731 - RNA, 32 nt, Human
cauguccucuuuuaugaaacauggggauucuc

SEQ ID NO: 93732 - RNA, 21 nt, Human
cauguccugagggccuugcag

SEQ ID NO: 93733 - RNA, 32 nt, Human
cauguccugcagcugccccacuucuccuuuac

SEQ ID NO: 93734 - RNA, 32 nt, Human
cauguccuggaggugacugcagguuguuggau

SEQ ID NO: 93735 - RNA, 32 nt, Human
cauguccugggugacaugggaugugacuuucg

SEQ ID NO: 93736 - RNA, 32 nt, Human
cauguccuguaauacuucaccuccaggaacug

SEQ ID NO: 93737 - RNA, 32 nt, Human
cauguccuucaaugcccaccucaaaagguacc

SEQ ID NO: 93738 - RNA, 32 nt, Human
caugucgacccaggcucccuugugacuggagg

SEQ ID NO: 93739 - RNA, 26 nt, Human
caugucgcccucuggucgccuguguc

SEQ ID NO: 93740 - RNA, 26 nt, Human
caugucggaggccuccucugaggacc

SEQ ID NO: 93741 - RNA, 32 nt, Human
caugucgggaggcugaggugggaggaucgcuu

SEQ ID NO: 93742 - RNA, 32 nt, Human
caugucuacagcuguuugugggauguuggaaa

SEQ ID NO: 93743 - RNA, 32 nt, Human
caugucuacaucauaccuguggcuccagaagc

SEQ ID NO: 93744 - RNA, 32 nt, Human
caugucuacuaaaaauacaaaaauuaacuggg

SEQ ID NO: 93745 - RNA, 32 nt, Human
caugucuacuaaaaauacaaaaauuagcuggg

SEQ ID NO: 93746 - RNA, 32 nt, Human
caugucuacuaaaaauacaaaauuagcugggc

SEQ ID NO: 93747 - RNA, 19 nt, Human
caugucuacucugcugcca

SEQ ID NO: 93748 - RNA, 32 nt, Human
caugucuaucugucugucugucggucuguguc

SEQ ID NO: 93749 - RNA, 32 nt, Human
caugucuaugaagaagacccucgggaagcagu

SEQ ID NO: 93750 - RNA, 32 nt, Human
caugucuaugaucccagcuacuggagaggcug

SEQ ID NO: 93751 - RNA, 32 nt, Human
caugucucaaacuccugaccucaggcgaucca

SEQ ID NO: 93752 - RNA, 32 nt, Human
caugucucaccacuggcagcugggcagaagcc

SEQ ID NO: 93753 - RNA, 32 nt, Human
caugucucagccagggcuuccuuccucggcuc

SEQ ID NO: 93754 - RNA, 32 nt, Human
caugucucauucuccucaaauauuccauuugc

SEQ ID NO: 93755 - RNA, 32 nt, Human
caugucuccagccacaauauccuugcaggaca

SEQ ID NO: 93756 - RNA, 32 nt, Human
caugucuccuucuggcugccuggaaggcacau

SEQ ID NO: 93757 - RNA, 32 nt, Human
caugucuccuuucaaggucuucugggcccuga

SEQ ID NO: 93758 - RNA, 20 nt, Human
caugucucggcucacuguag

SEQ ID NO: 93759 - RNA, 24 nt, Human
caugucucuacuaaaaauacaaaa

SEQ ID NO: 93760 - RNA, 32 nt, Human
caugucucucagaauucuucagguggaaaaac

SEQ ID NO: 93761 - RNA, 32 nt, Human
caugucucucugagaaauguguuggcccaauu

SEQ ID NO: 93762 - RNA, 32 nt, Human
caugucucugcaaaugauaugaucucauuccu

SEQ ID NO: 93763 - RNA, 32 nt, Human
caugucucuugggccucuuccucucucaagau

SEQ ID NO: 93764 - RNA, 32 nt, Human
caugucugaagcuauuauauccuugaacuuuu

SEQ ID NO: 93765 - RNA, 32 nt, Human
caugucugcaaacccagcuacucgggaggcug

SEQ ID NO: 93766 - RNA, 32 nt, Human
caugucugcagccccagcuacucgggaggcug

SEQ ID NO: 93767 - RNA, 32 nt, Human
caugucugcauccccuuuccaaggcugcuucc

SEQ ID NO: 93768 - RNA, 32 nt, Human
caugucugcauggcagaagcgucucccuuggc

SEQ ID NO: 93769 - RNA, 32 nt, Human
caugucugcccagggggacugcgaguuccugg

SEQ ID NO: 93770 - RNA, 32 nt, Human
caugucugccuggagugcugugcuguguuuaa

SEQ ID NO: 93771 - RNA, 32 nt, Human
caugucugccuucacacgcugccuuauggcuu

SEQ ID NO: 93772 - RNA, 32 nt, Human
caugucugcugaugcuaucauagcucccaaca

SEQ ID NO: 93773 - RNA, 32 nt, Human
caugucuggugucugucaugccaaccuagaca

SEQ ID NO: 93774 - RNA, 22 nt, Human
caugucuguaaucccagcacuu

SEQ ID NO: 93775 - RNA, 32 nt, Human
caugucuguaaucccagcuacucgggaggcug

SEQ ID NO: 93776 - RNA, 32 nt, Human
caugucuguaaucccagcuacuggggaagcug

SEQ ID NO: 93777 - RNA, 32 nt, Human
caugucuguaaucccagcuacuggggaggcug

SEQ ID NO: 93778 - RNA, 32 nt, Human
caugucuguagucccagcuacuugggcacacg

SEQ ID NO: 93779 - RNA, 32 nt, Human
caugucuguccucagagcaggggccagaugau

SEQ ID NO: 93780 - RNA, 32 nt, Human
caugucugugaaccuggggcucuugggcagca

SEQ ID NO: 93781 - RNA, 32 nt, Human
caugucugugagcugcggaggcugcggccccc

SEQ ID NO: 93782 - RNA, 21 nt, Human
caugucuguuacucacuuuca

SEQ ID NO: 93783 - RNA, 32 nt, Human
caugucuuacauggguugcuguauuuagaauu

SEQ ID NO: 93784 - RNA, 32 nt, Human
caugucuucaagugagggaccuggagauguuc

SEQ ID NO: 93785 - RNA, 32 nt, Human
caugucuucacauuuauugucauucuaacuug

SEQ ID NO: 93786 - RNA, 32 nt, Human
caugucuuccaaaauaccagcuguuacuuauc

SEQ ID NO: 93787 - RNA, 32 nt, Human
caugucuuccuugggccaaggucucauggggg

SEQ ID NO: 93788 - RNA, 32 nt, Human
caugucuucuggcuccagcucagcuuccuaga

SEQ ID NO: 93789 - RNA, 32 nt, Human
caugucuugccgcccuuccuccauguguuugu

SEQ ID NO: 93790 - RNA, 32 nt, Human
caugucuuguucagaagacacaggggagcagg

SEQ ID NO: 93791 - RNA, 32 nt, Human
caugucuuucuccaaagccauccagaggguug

SEQ ID NO: 93792 - RNA, 32 nt, Human
caugucuuugcuguuagucaagcacaggauuu

SEQ ID NO: 93793 - RNA, 32 nt, Human
caugucuuuuaugcuauaaucauuccaaauuu

SEQ ID NO: 93794 - RNA, 32 nt, Human
caugugaaaagggugacugcuccauacaaaua

SEQ ID NO: 93795 - RNA, 32 nt, Human
caugugaaagagugauagggagagggagcgag

SEQ ID NO: 93796 - RNA, 32 nt, Human
caugugaaaugagugauaguggaagucaagug

SEQ ID NO: 93797 - RNA, 32 nt, Human
caugugaacccagcaggcuuggaaccagcuca

SEQ ID NO: 93798 - RNA, 32 nt, Human
caugugaagagggagaagcaugaaaaagcagc

SEQ ID NO: 93799 - RNA, 32 nt, Human
caugugaaggagcagaggcuggcgcuggcccu

SEQ ID NO: 93800 - RNA, 32 nt, Human
caugugaaggaggcagggguugggacaagugc

SEQ ID NO: 93801 - RNA, 32 nt, Human
caugugaauaagaagccaggaaaggaaagaug

SEQ ID NO: 93802 - RNA, 32 nt, Human
caugugaauggcuuccuaacuaaaaauacaug

SEQ ID NO: 93803 - RNA, 32 nt, Human
caugugaauuuccugauucucaggugacuaaa

SEQ ID NO: 93804 - RNA, 32 nt, Human
caugugacacucaggcuggaguggugguaagg

SEQ ID NO: 93805 - RNA, 32 nt, Human
caugugacccugagcaagucucucuccuuccc

SEQ ID NO: 93806 - RNA, 32 nt, Human
caugugaccuucaggccuucugcucuaaacug

SEQ ID NO: 93807 - RNA, 32 nt, Human
caugugacgaggacacagcagugagcagcugc

SEQ ID NO: 93808 - RNA, 32 nt, Human
caugugacugaacuuuagacagugagauauaa

SEQ ID NO: 93809 - RNA, 32 nt, Human
caugugacuggcauuuuaacagaccuuccaga

SEQ ID NO: 93810 - RNA, 32 nt, Human
caugugagacaacugcacuccagugugggcgu

SEQ ID NO: 93811 - RNA, 17 nt, Human
caugugagcugcugcca

SEQ ID NO: 93812 - RNA, 32 nt, Human
caugugaggagcccauggaaugugccuggcuu

SEQ ID NO: 93813 - RNA, 32 nt, Human
caugugaggaugugucagaaaugcagaaccuc

SEQ ID NO: 93814 - RNA, 32 nt, Human
caugugauacauuuaagccacuggaaaaaccc

SEQ ID NO: 93815 - RNA, 32 nt, Human
caugugaucccucccuccuucugaccucuuag

SEQ ID NO: 93816 - RNA, 32 nt, Human
caugugaugcagagaccagagagugaaggccc

SEQ ID NO: 93817 - RNA, 32 nt, Human
caugugauguggugcgugugaaucugugggcg

SEQ ID NO: 93818 - RNA, 32 nt, Human
caugugauuacaucaucuuucugacaucauug

SEQ ID NO: 93819 - RNA, 32 nt, Human
caugugauucacugccuuccucucucuaccag

SEQ ID NO: 93820 - RNA, 32 nt, Human
caugugauuggcuuuucuacccauagagggcc

SEQ ID NO: 93821 - RNA, 32 nt, Human
caugugauuucugcuuucuucuuuagcaagau

SEQ ID NO: 93822 - RNA, 32 nt, Human
caugugcacaugcacacacaugcaugcacaca

SEQ ID NO: 93823 - RNA, 32 nt, Human
caugugcacaugcacgugugugcacguacaca

SEQ ID NO: 93824 - RNA, 32 nt, Human
caugugcacaugcuuccagccccaccuuccaa

SEQ ID NO: 93825 - RNA, 32 nt, Human
caugugcacccuucucccuccagccugggcua

SEQ ID NO: 93826 - RNA, 32 nt, Human
caugugcagcacucuucccaauugccagggac

SEQ ID NO: 93827 - RNA, 32 nt, Human
caugugcagcuuugcauauacacacaugcaua

SEQ ID NO: 93828 - RNA, 32 nt, Human
caugugcagggugggcuggugaaggccccucu

SEQ ID NO: 93829 - RNA, 32 nt, Human
caugugcagguaaacucgugacaaggggguuu

SEQ ID NO: 93830 - RNA, 31 nt, Human
caugugcaggugagaaguugggugaaaggac

SEQ ID NO: 93831 - RNA, 32 nt, Human
caugugcauaaccacaugcacacacacucacg

SEQ ID NO: 93832 - RNA, 32 nt, Human
caugugccaggaguuugaggcugcagugcacu

SEQ ID NO: 93833 - RNA, 32 nt, Human
caugugccauucuauacugucauuccaaauuc

SEQ ID NO: 93834 - RNA, 32 nt, Human
caugugccauuuuguccucagagggcgcuuac

SEQ ID NO: 93835 - RNA, 32 nt, Human
caugugcccccuacccuccaccccacugccca

SEQ ID NO: 93836 - RNA, 32 nt, Human
caugugccccucugcccucuaguucuccaagu

SEQ ID NO: 93837 - RNA, 32 nt, Human
caugugccuauaucccagcuacugggagguug

SEQ ID NO: 93838 - RNA, 32 nt, Human
caugugccuauguauaccuauguaacauggug

SEQ ID NO: 93839 - RNA, 32 nt, Human
caugugccucaaauuccugccuuuccucaaga

SEQ ID NO: 93840 - RNA, 32 nt, Human
caugugccucaggacuagagugagcaaucaua

SEQ ID NO: 93841 - RNA, 32 nt, Human
caugugccugcagggagcaggcgcugugguua

SEQ ID NO: 93842 - RNA, 32 nt, Human
caugugccuguaaucccagcuauuuggcaggc

SEQ ID NO: 93843 - RNA, 32 nt, Human
caugugccugugggguggggaggcguaggggu

SEQ ID NO: 93844 - RNA, 32 nt, Human
caugugcgaaacugagacagcauuagaaaggc

SEQ ID NO: 93845 - RNA, 32 nt, Human
caugugcgcaugcucagagcccugcugcccac

SEQ ID NO: 93846 - RNA, 32 nt, Human
caugugcggcugaacugagaaggcaggccucc

SEQ ID NO: 93847 - RNA, 32 nt, Human
caugugcguggaaguguuccugucucaauagc

SEQ ID NO: 93848 - RNA, 32 nt, Human
caugugcucccagaaacauucuuuuugucugc

SEQ ID NO: 93849 - RNA, 32 nt, Human
caugugcuggagcuacacgacuggaugugcac

SEQ ID NO: 93850 - RNA, 32 nt, Human
caugugcuguaagucccuaggugcaagcuuuu

SEQ ID NO: 93851 - RNA, 32 nt, Human
caugugcuguagcuucuugagaaucaggcaca

SEQ ID NO: 93852 - RNA, 32 nt, Human
caugugcugugugugugcaugugugcaugacg

SEQ ID NO: 93853 - RNA, 32 nt, Human
caugugcuguucugcugccccacucagcuccu

SEQ ID NO: 93854 - RNA, 32 nt, Human
caugugcuucuucugaauacugaaugugacug

SEQ ID NO: 93855 - RNA, 32 nt, Human
caugugcuuguaaucccagcuacucuggaggc

SEQ ID NO: 93856 - RNA, 32 nt, Human
caugugcuuuuuaauuucugcuugaauguuug

SEQ ID NO: 93857 - RNA, 32 nt, Human
cauguggaagaaaagagccuuggagaaguuuu

SEQ ID NO: 93858 - RNA, 32 nt, Human
cauguggaagaaggaaaaagacaaaaaggaag

SEQ ID NO: 93859 - RNA, 32 nt, Human
cauguggacacacugcugugacugccucuugu

SEQ ID NO: 93860 - RNA, 32 nt, Human
cauguggacagacauagcccaaggaggcacca

SEQ ID NO: 93861 - RNA, 32 nt, Human
cauguggaccaugggaagucagucucuugcgu

SEQ ID NO: 93862 - RNA, 32 nt, Human
cauguggacccacccuuccucuauaaguacca

SEQ ID NO: 93863 - RNA, 32 nt, Human
cauguggacccuuuauugucuaacugauaaga

SEQ ID NO: 93864 - RNA, 32 nt, Human
cauguggacgugccuccuuccucuucaccuug

SEQ ID NO: 93865 - RNA, 32 nt, Human
cauguggagccacgaacauccuuucccugcag

SEQ ID NO: 93866 - RNA, 32 nt, Human
cauguggaggggccagaggcuugccagacccc

SEQ ID NO: 93867 - RNA, 32 nt, Human
cauguggagggucucucugaagaggcuaucau

SEQ ID NO: 93868 - RNA, 32 nt, Human
cauguggaggugggaaaggugacagaguagca

SEQ ID NO: 93869 - RNA, 32 nt, Human
cauguggaugcacacgggugugcggugaagau

SEQ ID NO: 93870 - RNA, 32 nt, Human
cauguggcagaggcccaggcucccacucagac

SEQ ID NO: 93871 - RNA, 32 nt, Human
cauguggcagcuccuguggaaguuuccaguuc

SEQ ID NO: 93872 - RNA, 32 nt, Human
cauguggcagcuuugcauagggagaggauagc

SEQ ID NO: 93873 - RNA, 32 nt, Human
cauguggcaggcaguggggccucuucaucagc

SEQ ID NO: 93874 - RNA, 32 nt, Human
cauguggcaucauguagaaccugcuuugacau

SEQ ID NO: 93875 - RNA, 32 nt, Human
cauguggcaugccuguguauguguguaacaga

SEQ ID NO: 93876 - RNA, 32 nt, Human
cauguggcauugccuccaguucuggccacacu

SEQ ID NO: 93877 - RNA, 32 nt, Human
cauguggccaagggcuccagggccagggugug

SEQ ID NO: 93878 - RNA, 32 nt, Human
cauguggccgaaggggacaagggagguugcug

SEQ ID NO: 93879 - RNA, 32 nt, Human
cauguggcucagugccuuccucucucuaccag

SEQ ID NO: 93880 - RNA, 32 nt, Human
cauguggcugcaauuggagcuggaugaucuaa

SEQ ID NO: 93881 - RNA, 16 nt, Human
cauguggcugcugcca

SEQ ID NO: 93882 - RNA, 32 nt, Human
cauguggcuggauuugaugagcaaagagguga

SEQ ID NO: 93883 - RNA, 32 nt, Human
caugugggaagugggcaugaccagaggcagag

SEQ ID NO: 93884 - RNA, 32 nt, Human
caugugggcuuggaagacaugucacucauggg

SEQ ID NO: 93885 - RNA, 32 nt, Human
cauguggggaagcacacccggaagccaccgau

SEQ ID NO: 93886 - RNA, 32 nt, Human
caugugggucaguggcuccugauguucugucu

SEQ ID NO: 93887 - RNA, 32 nt, Human
cauguggguggacagugguggagagucacugg

SEQ ID NO: 93888 - RNA, 32 nt, Human
cauguggguuuuguuucuuuccuuccuuccuu

SEQ ID NO: 93889 - RNA, 32 nt, Human
caugugguacagaggcaagagcagagccugag

SEQ ID NO: 93890 - RNA, 32 nt, Human
caugugguaggcaggguugggggacggcagga

SEQ ID NO: 93891 - RNA, 32 nt, Human
cauguggucccagcuacucuggaagcugaggu

SEQ ID NO: 93892 - RNA, 32 nt, Human
cauguggucugacagaauuggcuucaaagaag

SEQ ID NO: 93893 - RNA, 32 nt, Human
caugugguuuucuccuuccuggccuuggcugg

SEQ ID NO: 93894 - RNA, 21 nt, Human
cauguguaaucccagcauuuu

SEQ ID NO: 93895 - RNA, 32 nt, Human
cauguguaccuacagagcagccagguggaggu

SEQ ID NO: 93896 - RNA, 29 nt, Human
cauguguagcugcuauguccccuggggcg

SEQ ID NO: 93897 - RNA, 32 nt, Human
cauguguagugaaacaaaauguaacaccuugg

SEQ ID NO: 93898 - RNA, 32 nt, Human
cauguguaugcaucugcaggaaacauagccug

SEQ ID NO: 93899 - RNA, 20 nt, Human
cauguguccugugguuauag

SEQ ID NO: 93900 - RNA, 32 nt, Human
caugugucuccaagacagcuuaugaauaucua

SEQ ID NO: 93901 - RNA, 31 nt, Human
caugugucuggcgggggauggguggacugua

SEQ ID NO: 93902 - RNA, 29 nt, Human
caugugucuguguguguggaacuuuugua

SEQ ID NO: 93903 - RNA, 32 nt, Human
caugugugagccaccgccccuggccucuguag

SEQ ID NO: 93904 - RNA, 32 nt, Human
caugugugagccgcccuacucccuucaccugg

SEQ ID NO: 93905 - RNA, 24 nt, Human
caugugugaggcgcugcagugcau

SEQ ID NO: 93906 - RNA, 32 nt, Human
caugugugcacauacacacaugcaccuacaca

SEQ ID NO: 93907 - RNA, 32 nt, Human
caugugugcaguauuauaaguuaucauggaac

SEQ ID NO: 93908 - RNA, 32 nt, Human
caugugugcagucugagcuuaggcacacacag

SEQ ID NO: 93909 - RNA, 32 nt, Human
caugugugccuguaguccaagcuacuugaagg

SEQ ID NO: 93910 - RNA, 32 nt, Human
cauguguggacgagaugcagaagauuacaauu

SEQ ID NO: 93911 - RNA, 32 nt, Human
caugugugggggcagagguuaugugggaaauc

SEQ ID NO: 93912 - RNA, 29 nt, Human
caugugugggugugugugggcacaggugu

SEQ ID NO: 93913 - RNA, 32 nt, Human
cauguguguauguauacauguauauacauaua

SEQ ID NO: 93914 - RNA, 29 nt, Human
caugugugucuguaugucucuguggggag

SEQ ID NO: 93915 - RNA, 32 nt, Human
caugugugugcaugaguccaucucugcgcgug

SEQ ID NO: 93916 - RNA, 29 nt, Human
caugugugugccugugugcccgggucugu

SEQ ID NO: 93917 - RNA, 32 nt, Human
caugugugugguuccugcgaguugcugaugac

SEQ ID NO: 93918 - RNA, 32 nt, Human
cauguguguguauguauguguauguguuccau

SEQ ID NO: 93919 - RNA, 18 nt, Human
cauguguucaucaucuua

SEQ ID NO: 93920 - RNA, 32 nt, Human
cauguguuuugguggucuuggcugcugauggg

SEQ ID NO: 93921 - RNA, 32 nt, Human
cauguguuuuuguugaaaugauccuaccagug

SEQ ID NO: 93922 - RNA, 32 nt, Human
cauguuaaaaguaaggaugaccaaaugcaaau

SEQ ID NO: 93923 - RNA, 32 nt, Human
cauguuaaagaaugaugguuagcagaagcugu

SEQ ID NO: 93924 - RNA, 32 nt, Human
cauguuaacaccuugcuacuaccaaggcauaa

SEQ ID NO: 93925 - RNA, 32 nt, Human
cauguuaacucuccucccagguaaacaguuca

SEQ ID NO: 93926 - RNA, 32 nt, Human
cauguuaaggugagauuuugguggggacacag

SEQ ID NO: 93927 - RNA, 32 nt, Human
cauguuaauagaggaucagagcagaguuggga

SEQ ID NO: 93928 - RNA, 32 nt, Human
cauguuacaguugcucacgccuguaaucccag

SEQ ID NO: 93929 - RNA, 32 nt, Human
cauguuacaugguuaccacaagccacaauaaa

SEQ ID NO: 93930 - RNA, 32 nt, Human
cauguuacccagacuuguguucucuugcgucc

SEQ ID NO: 93931 - RNA, 32 nt, Human
cauguuacgcuggugguuaaggccagggccuc

SEQ ID NO: 93932 - RNA, 32 nt, Human
cauguuacuuuccguagcucaauauggcuguu

SEQ ID NO: 93933 - RNA, 32 nt, Human
cauguuaggacuagaagaaaaugcacaauuug

SEQ ID NO: 93934 - RNA, 32 nt, Human
cauguuaggcucacacaugcaucagcacugca

SEQ ID NO: 93935 - RNA, 32 nt, Human
cauguuagucaggcuggucuccaccucaggug

SEQ ID NO: 93936 - RNA, 32 nt, Human
cauguuagucguggcuggucuccaacuccuga

SEQ ID NO: 93937 - RNA, 32 nt, Human
cauguuagucuuauuuaaaacuuucucagcaa

SEQ ID NO: 93938 - RNA, 32 nt, Human
cauguuauauagguggaaagggucagacuacu

SEQ ID NO: 93939 - RNA, 32 nt, Human
cauguucaacuugcuuuuccacuccugaggaa

SEQ ID NO: 93940 - RNA, 24 nt, Human
cauguucaagcgauucuccugccu

SEQ ID NO: 93941 - RNA, 32 nt, Human
cauguucacucaggaaccacuggcuccuccag

SEQ ID NO: 93942 - RNA, 32 nt, Human
cauguucagccgagacaagugaacgggaaggu

SEQ ID NO: 93943 - RNA, 20 nt, Human
cauguucaucugcugucuug

SEQ ID NO: 93944 - RNA, 32 nt, Human
cauguucaugacacugcacuccagccugggug

SEQ ID NO: 93945 - RNA, 32 nt, Human
cauguuccaguauauuucucuuacagagugaa

SEQ ID NO: 93946 - RNA, 32 nt, Human
cauguucccaggagggaggccggaggcccaug

SEQ ID NO: 93947 - RNA, 17 nt, Human
cauguuccccuguuuua

SEQ ID NO: 93948 - RNA, 32 nt, Human
cauguucccuagcugaggaugacagagggaug

SEQ ID NO: 93949 - RNA, 17 nt, Human
cauguuccuccuuucua

SEQ ID NO: 93950 - RNA, 19 nt, Human
cauguuccucuuccuguuc

SEQ ID NO: 93951 - RNA, 32 nt, Human
cauguuccucuuccuguuccuguugacauguc

SEQ ID NO: 93952 - RNA, 32 nt, Human
cauguuccugggacaguguccacaaauaccgu

SEQ ID NO: 93953 - RNA, 32 nt, Human
cauguuccugggucccagaaacagacaucugu

SEQ ID NO: 93954 - RNA, 32 nt, Human
cauguucuccaucgucuccccguuccaccuug

SEQ ID NO: 93955 - RNA, 32 nt, Human
cauguucucugccuccccuucauguucuguga

SEQ ID NO: 93956 - RNA, 32 nt, Human
cauguucucugcucccacaccuaagccaagac

SEQ ID NO: 93957 - RNA, 32 nt, Human
cauguucucugucugcuccugccuccuccagg

SEQ ID NO: 93958 - RNA, 32 nt, Human
cauguucuggugguuugauuguuuacaggaua

SEQ ID NO: 93959 - RNA, 32 nt, Human
cauguucuuauauuuauuauuuugccauguuu

SEQ ID NO: 93960 - RNA, 32 nt, Human
cauguucuucuggagcaggaguuacaaauugg

SEQ ID NO: 93961 - RNA, 32 nt, Human
cauguucuuuaccaucugugcaguuauugcuc

SEQ ID NO: 93962 - RNA, 32 nt, Human
cauguugaaauguuuaacauuuuaagauugga

SEQ ID NO: 93963 - RNA, 32 nt, Human
cauguugaacaucuugggagcugcugauaaug

SEQ ID NO: 93964 - RNA, 32 nt, Human
cauguugaagucagaauggccuguauucacua

SEQ ID NO: 93965 - RNA, 32 nt, Human
cauguugacagccuugcacuuccacaggcuac

SEQ ID NO: 93966 - RNA, 32 nt, Human
cauguugacaucuucugacuguccccugcuug

SEQ ID NO: 93967 - RNA, 26 nt, Human
cauguugaccgagcuggagaaagccu

SEQ ID NO: 93968 - RNA, 32 nt, Human
cauguugaccuuguuuagucacauuaacgcac

SEQ ID NO: 93969 - RNA, 32 nt, Human
cauguugagaggcugaggugggcagaucauuu

SEQ ID NO: 93970 - RNA, 32 nt, Human
cauguugcagacuuaagccauuuuugauauag

SEQ ID NO: 93971 - RNA, 23 nt, Human
cauguugcagcagcuauuuugcc

SEQ ID NO: 93972 - RNA, 32 nt, Human
cauguugcagccagggccagugggaggggguc

SEQ ID NO: 93973 - RNA, 32 nt, Human
cauguugcagugagcugagauugcaccacuac

SEQ ID NO: 93974 - RNA, 32 nt, Human
cauguugccaacgugcuucuggggccccuguc

SEQ ID NO: 93975 - RNA, 23 nt, Human
cauguugccauaauguguaugga

SEQ ID NO: 93976 - RNA, 32 nt, Human
cauguugccuugcccaagccaaagaggaaggu

SEQ ID NO: 93977 - RNA, 32 nt, Human
cauguugcgucuuguugagggagggagagcag

SEQ ID NO: 93978 - RNA, 32 nt, Human
cauguugcuacaccauccugucuucucagcau

SEQ ID NO: 93979 - RNA, 32 nt, Human
cauguugcugcaaaagacauuaucucauuuuu

SEQ ID NO: 93980 - RNA, 32 nt, Human
cauguugcuguacugaauacucuaagcaauua

SEQ ID NO: 93981 - RNA, 32 nt, Human
cauguuggcacaugccuguaaucucagcuacu

SEQ ID NO: 93982 - RNA, 32 nt, Human
cauguuggcaugcaccuguaaucccagcuacu

SEQ ID NO: 93983 - RNA, 32 nt, Human
cauguuggccagacuggucuugaacucuugac

SEQ ID NO: 93984 - RNA, 32 nt, Human
cauguuggccagacuggucuugaacucuuggc

SEQ ID NO: 93985 - RNA, 32 nt, Human
cauguuggcucacaccuguauucccaguacuu

SEQ ID NO: 93986 - RNA, 32 nt, Human
cauguuggcucacaccugugagcacaguacug

SEQ ID NO: 93987 - RNA, 32 nt, Human
cauguuggcucccgccuguaaucccagcacuu

SEQ ID NO: 93988 - RNA, 32 nt, Human
cauguuggcugugcucucaggcuggcaccaug

SEQ ID NO: 93989 - RNA, 32 nt, Human
cauguugggaaagagauggauguuggggagga

SEQ ID NO: 93990 - RNA, 32 nt, Human
cauguugggaacaggcugucuaccccguacag

SEQ ID NO: 93991 - RNA, 32 nt, Human
cauguugggaaguacagucucugcccauuacc

SEQ ID NO: 93992 - RNA, 32 nt, Human
cauguugggcauaagggaugaaaacuuggccg

SEQ ID NO: 93993 - RNA, 32 nt, Human
cauguuggucucaaacuccugaccucagguaa

SEQ ID NO: 93994 - RNA, 32 nt, Human
cauguuggucucagcugccaucucaaugguuu

SEQ ID NO: 93995 - RNA, 32 nt, Human
cauguuggugcacgcuuguaaucccagcuacu

SEQ ID NO: 93996 - RNA, 32 nt, Human
cauguuggugugcaccuguaaucccagcuacu

SEQ ID NO: 93997 - RNA, 32 nt, Human
cauguuguccuuucuggcuucccugauggugu

SEQ ID NO: 93998 - RNA, 32 nt, Human
cauguugucgggcaccuguagucccagcuacu

SEQ ID NO: 93999 - RNA, 32 nt, Human
cauguugucuggcugaggagcuacuagaaaag

SEQ ID NO: 94000 - RNA, 32 nt, Human
cauguugugauuucuuccacuguccaucaagg

SEQ ID NO: 94001 - RNA, 32 nt, Human
cauguuuaaaaagaaggaauuuggacaaaggc

SEQ ID NO: 94002 - RNA, 32 nt, Human
cauguuuaaguauguugauugcuuucuaauua

SEQ ID NO: 94003 - RNA, 32 nt, Human
cauguuuagaaaucaagguucaggagaaucuu

SEQ ID NO: 94004 - RNA, 32 nt, Human
cauguuuaggagggagccgagccuucucccgg

SEQ ID NO: 94005 - RNA, 32 nt, Human
cauguuuauccugaauuuuuacuuaauaauuu

SEQ ID NO: 94006 - RNA, 32 nt, Human
cauguuuauuaugauacuuucucuccaaagga

SEQ ID NO: 94007 - RNA, 32 nt, Human
cauguuuauuucaaaaacauucacaaauauag

SEQ ID NO: 94008 - RNA, 32 nt, Human
cauguuucaggucauaggggccuugggcucag

SEQ ID NO: 94009 - RNA, 32 nt, Human
cauguuuccuuccuucaacuguguucucccug

SEQ ID NO: 94010 - RNA, 18 nt, Human
cauguuucucugcugcca

SEQ ID NO: 94011 - RNA, 32 nt, Human
cauguuucugcgcuccuagccugggugacaga

SEQ ID NO: 94012 - RNA, 32 nt, Human
cauguuugaccaggacugagucuggaaucucc

SEQ ID NO: 94013 - RNA, 32 nt, Human
cauguuugcagcauugcacuccagccugggug

SEQ ID NO: 94014 - RNA, 32 nt, Human
cauguuugcgucuguuuccucccucucuggcc

SEQ ID NO: 94015 - RNA, 32 nt, Human
cauguuuggaaagagaauaaauauaugaagag

SEQ ID NO: 94016 - RNA, 32 nt, Human
cauguuuggaaaugcaauaucuuggggagacg

SEQ ID NO: 94017 - RNA, 32 nt, Human
cauguuuggugcaugguuuuugaggagggcuu

SEQ ID NO: 94018 - RNA, 32 nt, Human
cauguuuguaaaucccagcacuuugggaaggc

SEQ ID NO: 94019 - RNA, 32 nt, Human
cauguuugugugugcgugcauauguguaugug

SEQ ID NO: 94020 - RNA, 32 nt, Human
cauguuuguuucacagauguaaaguucucagu

SEQ ID NO: 94021 - RNA, 32 nt, Human
cauguuuuaacuuauuguugcugaaaacucua

SEQ ID NO: 94022 - RNA, 32 nt, Human
cauguuuuaagcugcaaugcaguagucacggg

SEQ ID NO: 94023 - RNA, 32 nt, Human
cauguuuuccugcugacucucuccccacuauu

SEQ ID NO: 94024 - RNA, 32 nt, Human
cauguuuuccuugaauuuugcaaagaaagaaa

SEQ ID NO: 94025 - RNA, 32 nt, Human
cauguuuugaagcagcagguccaggucacuuu

SEQ ID NO: 94026 - RNA, 32 nt, Human
cauguuuugagccuuguuccagaaagcugagg

SEQ ID NO: 94027 - RNA, 32 nt, Human
cauguuuuggcaguguacucuguccauuccca

SEQ ID NO: 94028 - RNA, 22 nt, Human
cauguuuuuauguuuguacaaa

SEQ ID NO: 94029 - RNA, 32 nt, Human
cauguuuuucauuuucugcauugacugcauuu

SEQ ID NO: 94030 - RNA, 32 nt, Human
cauguuuuucuucucccucagucuggcccuuc

SEQ ID NO: 94031 - RNA, 32 nt, Human
cauguuuuuguaucgggaggugccaucggcac

SEQ ID NO: 94032 - RNA, 21 nt, Human
cauuaaaaauuccaaaggcau

SEQ ID NO: 94033 - RNA, 32 nt, Human
cauuaaaagaacugauucaugaagacguuuuc

SEQ ID NO: 94034 - RNA, 32 nt, Human
cauuaaaagaagaaugaaugcauuuuaaguuu

SEQ ID NO: 94035 - RNA, 32 nt, Human
cauuaaaauaccagagauaauggagauauuuu

SEQ ID NO: 94036 - RNA, 32 nt, Human
cauuaaacaacaacucuccauucucuuauccc

SEQ ID NO: 94037 - RNA, 32 nt, Human
cauuaaacauggucuugcugcaucaacuccag

SEQ ID NO: 94038 - RNA, 32 nt, Human
cauuaaacccugaucaggauguuagucagugg

SEQ ID NO: 94039 - RNA, 32 nt, Human
cauuaaagacaaauguuuuuauacaaaugaau

SEQ ID NO: 94040 - RNA, 32 nt, Human
cauuaaagagggugaggaagggaaaaggaaua

SEQ ID NO: 94041 - RNA, 32 nt, Human
cauuaaagcgugcucuuacagagcagaaguca

SEQ ID NO: 94042 - RNA, 32 nt, Human
cauuaaaggagcaucagagaagaggcagccau

SEQ ID NO: 94043 - RNA, 32 nt, Human
cauuaaaguugaggguuuuacauugcuguauu

SEQ ID NO: 94044 - RNA, 32 nt, Human
cauuaaaucaaauuuuguaaacaguggcagga

SEQ ID NO: 94045 - RNA, 32 nt, Human
cauuaaaucagcugcccgcggaaaacaugucc

SEQ ID NO: 94046 - RNA, 32 nt, Human
cauuaacaaccaguacuccuucgugugagcca

SEQ ID NO: 94047 - RNA, 32 nt, Human
cauuaacaauugcucagccacaauucucggau

SEQ ID NO: 94048 - RNA, 32 nt, Human
cauuaacagauggaaaaacugaggcuuagaga

SEQ ID NO: 94049 - RNA, 32 nt, Human
cauuaacaugcugucucuaaggguggccccuc

SEQ ID NO: 94050 - RNA, 32 nt, Human
cauuaaccaauacuggaacugguaucuagcua

SEQ ID NO: 94051 - RNA, 28 nt, Human
cauuaacccugugcugccacaucuggcu

SEQ ID NO: 94052 - RNA, 32 nt, Human
cauuaaccugcucuccuuugucaccugggcug

SEQ ID NO: 94053 - RNA, 32 nt, Human
cauuaaccuuccccaucucccugccagccccu

SEQ ID NO: 94054 - RNA, 32 nt, Human
cauuaacugagcuccaagggugugugggcaga

SEQ ID NO: 94055 - RNA, 32 nt, Human
cauuaacuggauuuuaaaaucauuucaaagca

SEQ ID NO: 94056 - RNA, 32 nt, Human
cauuaacuugagugaccugugugagagacaga

SEQ ID NO: 94057 - RNA, 32 nt, Human
cauuaacuugcaaucuggacaggaaguugacg

SEQ ID NO: 94058 - RNA, 32 nt, Human
cauuaagaaagcugcgguggucugagcaacau

SEQ ID NO: 94059 - RNA, 32 nt, Human
cauuaagauacagaauaccuggauucugguuu

SEQ ID NO: 94060 - RNA, 32 nt, Human
cauuaagcagaggcuggcacggcuacagcugu

SEQ ID NO: 94061 - RNA, 32 nt, Human
cauuaagcauuuuaaaaugcuuagccuuuauc

SEQ ID NO: 94062 - RNA, 32 nt, Human
cauuaagcguagguuaggagguuuccgggagg

SEQ ID NO: 94063 - RNA, 32 nt, Human
cauuaaggaacugucuucaucaucauacaugu

SEQ ID NO: 94064 - RNA, 32 nt, Human
cauuaaggaaugaacucuuucaaggagaggaa

SEQ ID NO: 94065 - RNA, 32 nt, Human
cauuaagguaggucagcgucauuugucucugu

SEQ ID NO: 94066 - RNA, 32 nt, Human
cauuaagguggacacuuccagacuggagcacc

SEQ ID NO: 94067 - RNA, 32 nt, Human
cauuaagucaucugacauuaaaucauuuagcc

SEQ ID NO: 94068 - RNA, 29 nt, Human
cauuaaguccuguguguguuugggcaggc

SEQ ID NO: 94069 - RNA, 32 nt, Human
cauuaagugcaucuguguauccugguuuaaaa

SEQ ID NO: 94070 - RNA, 32 nt, Human
cauuaaguuccaauucuacacccacagccaga

SEQ ID NO: 94071 - RNA, 32 nt, Human
cauuaaguucucuaugaaugccuuggauuuag

SEQ ID NO: 94072 - RNA, 32 nt, Human
cauuaauccugcauuacuuagaucccauauga

SEQ ID NO: 94073 - RNA, 32 nt, Human
cauuaaucugggcacuuugauuacaggcaaug

SEQ ID NO: 94074 - RNA, 32 nt, Human
cauuaaucugugacuccaccucuugcaucaaa

SEQ ID NO: 94075 - RNA, 32 nt, Human
cauuaaugagauguuauuacuguuuugggccu

SEQ ID NO: 94076 - RNA, 32 nt, Human
cauuaaugcagcaacauaauacucacuuuagg

SEQ ID NO: 94077 - RNA, 32 nt, Human
cauuaaugcauuuuucccucaucaagcauaua

SEQ ID NO: 94078 - RNA, 32 nt, Human
cauuaauggagcuuucugguucuuggacuuuu

SEQ ID NO: 94079 - RNA, 32 nt, Human
cauuaauggucauaccccuucuguaccuggca

SEQ ID NO: 94080 - RNA, 32 nt, Human
cauuaauuuagauacaaaccugguugaugacc

SEQ ID NO: 94081 - RNA, 32 nt, Human
cauuaauuuguaaaguaccuugaguguaauuu

SEQ ID NO: 94082 - RNA, 32 nt, Human
cauuaauuuuugaagguaauuuaguuuugugg

SEQ ID NO: 94083 - RNA, 32 nt, Human
cauuacaaaggccaccaucacaggaucggauu

SEQ ID NO: 94084 - RNA, 32 nt, Human
cauuacaaaucucugaggccauuaggggaaaa

SEQ ID NO: 94085 - RNA, 32 nt, Human
cauuacaagucaccuggaacagacucaaagaa

SEQ ID NO: 94086 - RNA, 32 nt, Human
cauuacacagucuuuuugaccucuuuugaagg

SEQ ID NO: 94087 - RNA, 32 nt, Human
cauuacaccaugguuuuuagacauuucugauu

SEQ ID NO: 94088 - RNA, 32 nt, Human
cauuacaccuggcuaauuguuguauuuuagua

SEQ ID NO: 94089 - RNA, 21 nt, Human
cauuacacuccagccugggca

SEQ ID NO: 94090 - RNA, 32 nt, Human
cauuacagagcagacagcucuaugauguuuac

SEQ ID NO: 94091 - RNA, 32 nt, Human
cauuacagagcuugugaaaagugcagaaaccu

SEQ ID NO: 94092 - RNA, 32 nt, Human
cauuacagcccgaagaacaagagggugaaacu

SEQ ID NO: 94093 - RNA, 32 nt, Human
cauuacagccuggugcagagcaagacucuguc

SEQ ID NO: 94094 - RNA, 32 nt, Human
cauuacaggcuggaauguaauuguggugaaag

SEQ ID NO: 94095 - RNA, 32 nt, Human
cauuacaugagcuucuccuguucuuccacuuu

SEQ ID NO: 94096 - RNA, 32 nt, Human
cauuacauggcuucaucuaccuccaggcuucu

SEQ ID NO: 94097 - RNA, 32 nt, Human
cauuacauguuacugaguaggcagcuagaaaa

SEQ ID NO: 94098 - RNA, 32 nt, Human
cauuaccaaaacacagacaaaccaaagguaac

SEQ ID NO: 94099 - RNA, 32 nt, Human
cauuaccaagggcagggggccccuuugcugac

SEQ ID NO: 94100 - RNA, 32 nt, Human
cauuaccaaguagagucaggaugaacuaugug

SEQ ID NO: 94101 - RNA, 32 nt, Human
cauuaccaauuucugucaacuaccaugagaug

SEQ ID NO: 94102 - RNA, 32 nt, Human
cauuaccacagcugccuuuguguguuuguguc

SEQ ID NO: 94103 - RNA, 32 nt, Human
cauuaccaccaccacgugaccuggucuuacga

SEQ ID NO: 94104 - RNA, 32 nt, Human
cauuaccaccauccaucuccauaacucuguuc

SEQ ID NO: 94105 - RNA, 18 nt, Human
cauuaccagaaacguuaa

SEQ ID NO: 94106 - RNA, 32 nt, Human
cauuacccaaaccauauugcacuuuuaguucc

SEQ ID NO: 94107 - RNA, 32 nt, Human
cauuacccucaccucucccuaguucauaaaua

SEQ ID NO: 94108 - RNA, 32 nt, Human
cauuaccucuucugcaggcucugccaugcacg

SEQ ID NO: 94109 - RNA, 28 nt, Human
cauuaccugaaggacgccucaucauuuc

SEQ ID NO: 94110 - RNA, 32 nt, Human
cauuaccuggaggcgcucuaggcccuugucuu

SEQ ID NO: 94111 - RNA, 32 nt, Human
cauuaccuugaaccacacagaccugguucccu

SEQ ID NO: 94112 - RNA, 32 nt, Human
cauuaccuuuuuagcuauuuuuaauagucuuc

SEQ ID NO: 94113 - RNA, 32 nt, Human
cauuacgagugccucagccuggaaaagcuaac

SEQ ID NO: 94114 - RNA, 32 nt, Human
cauuacggccuugccuagcuggcagggacagc

SEQ ID NO: 94115 - RNA, 32 nt, Human
cauuacguaucuguguguuacugcuguguuau

SEQ ID NO: 94116 - RNA, 32 nt, Human
cauuacguguuacuguaguuuauuggaaucug

SEQ ID NO: 94117 - RNA, 32 nt, Human
cauuacuacuaaaauaauacugaaguuggaua

SEQ ID NO: 94118 - RNA, 32 nt, Human
cauuacucaaauacccaaaucccauuccaagu

SEQ ID NO: 94119 - RNA, 32 nt, Human
cauuacucaaauuaaucguucugcacuucagc

SEQ ID NO: 94120 - RNA, 32 nt, Human
cauuacucauuugaguuugcaucauugaauuu

SEQ ID NO: 94121 - RNA, 32 nt, Human
cauuacugcccagguaaggagugcuagaauca

SEQ ID NO: 94122 - RNA, 32 nt, Human
cauuacuggaaccgggauaugaaguggagcca

SEQ ID NO: 94123 - RNA, 32 nt, Human
cauuacugggagguggagguggaaaacgugau

SEQ ID NO: 94124 - RNA, 32 nt, Human
cauuacugggagugcuaucuacucacaagugu

SEQ ID NO: 94125 - RNA, 18 nt, Human
cauuacuggggugaagga

SEQ ID NO: 94126 - RNA, 32 nt, Human
cauuacuguagaguuacaacaagaggguaaag

SEQ ID NO: 94127 - RNA, 32 nt, Human
cauuacuguaugucuucugccuccacacuugc

SEQ ID NO: 94128 - RNA, 32 nt, Human
cauuacugucuuccguggauguuucaguuaca

SEQ ID NO: 94129 - RNA, 32 nt, Human
cauuacuguguugucucugugccagauguggc

SEQ ID NO: 94130 - RNA, 32 nt, Human
cauuacuuaaaauguugguacuagccauuaac

SEQ ID NO: 94131 - RNA, 32 nt, Human
cauuacuuagugggggccagcugugaucggcc

SEQ ID NO: 94132 - RNA, 32 nt, Human
cauuacuuccacugcuaacaacaggacugccu

SEQ ID NO: 94133 - RNA, 32 nt, Human
cauuacuucuaagacaucaucagucugcaacu

SEQ ID NO: 94134 - RNA, 32 nt, Human
cauuacuugguauaacguuuuucauuuccuuu

SEQ ID NO: 94135 - RNA, 32 nt, Human
cauuacuuuagcauuuuagcauguuugggguc

SEQ ID NO: 94136 - RNA, 32 nt, Human
cauuacuuuuccuucccacucucuccaacauc

SEQ ID NO: 94137 - RNA, 32 nt, Human
cauuagaaaccagucuccucccaauugucugg

SEQ ID NO: 94138 - RNA, 32 nt, Human
cauuagaaagcagcagauuuccagcgagaaaa

SEQ ID NO: 94139 - RNA, 20 nt, Human
cauuagaaaucuguggggca

SEQ ID NO: 94140 - RNA, 32 nt, Human
cauuagaaauuugcaccucaucaugccccaga

SEQ ID NO: 94141 - RNA, 21 nt, Human
cauuagaagauaagauggcau

SEQ ID NO: 94142 - RNA, 32 nt, Human
cauuagaagauaagauggcauaaugaaagaua

SEQ ID NO: 94143 - RNA, 32 nt, Human
cauuagaagccuggccuccugaugcugugcuc

SEQ ID NO: 94144 - RNA, 32 nt, Human
cauuagaaguuccugagggcuggagaacacug

SEQ ID NO: 94145 - RNA, 32 nt, Human
cauuagacaccugcuccuccaagccuggucuu

SEQ ID NO: 94146 - RNA, 32 nt, Human
cauuagacccucaacccaaaggagcaggagau

SEQ ID NO: 94147 - RNA, 19 nt, Human
cauuagacuucuuguucua

SEQ ID NO: 94148 - RNA, 32 nt, Human
cauuagagaccagacagaaggaaggugggauu

SEQ ID NO: 94149 - RNA, 32 nt, Human
cauuagagaugggguuucaccacguuggccag

SEQ ID NO: 94150 - RNA, 32 nt, Human
cauuagaggaagaaaaccagcgcaaggaaucc

SEQ ID NO: 94151 - RNA, 32 nt, Human
cauuagaggugcaaucuacauugggcaucugg

SEQ ID NO: 94152 - RNA, 32 nt, Human
cauuagauccugcuggguguucucaguccuug

SEQ ID NO: 94153 - RNA, 32 nt, Human
cauuagauucuaguuuucuccuuuagaauacc

SEQ ID NO: 94154 - RNA, 32 nt, Human
cauuagcacauacuguccauuagcauaucugg

SEQ ID NO: 94155 - RNA, 22 nt, Human
cauuagcagggaagaauuugga

SEQ ID NO: 94156 - RNA, 32 nt, Human
cauuagcaucaggaaagccugaaaugccuuaa

SEQ ID NO: 94157 - RNA, 31 nt, Human
cauuagcauuagcagcaccuaaguccucauu

SEQ ID NO: 94158 - RNA, 32 nt, Human
cauuagccaccaugccuggccuggagaucagu

SEQ ID NO: 94159 - RNA, 32 nt, Human
cauuagccaccugugccuguccccgccuuggc

SEQ ID NO: 94160 - RNA, 32 nt, Human
cauuagccacucaauuuccaguaccauccugg

SEQ ID NO: 94161 - RNA, 32 nt, Human
cauuagcuagagagcaaaccccagaaagccua

SEQ ID NO: 94162 - RNA, 32 nt, Human
cauuagcucacugcagucuccaccuccugagc

SEQ ID NO: 94163 - RNA, 32 nt, Human
cauuagcucauaggagaaugaacauuuggcaa

SEQ ID NO: 94164 - RNA, 32 nt, Human
cauuagcugaguguagagaagugcaucuuaug

SEQ ID NO: 94165 - RNA, 32 nt, Human
cauuagcugcagaaaaacccccagacagagcc

SEQ ID NO: 94166 - RNA, 32 nt, Human
cauuagcuuauaguccuggggaucagaauucc

SEQ ID NO: 94167 - RNA, 32 nt, Human
cauuaggaaaucuagagaucuaaaggguugaa

SEQ ID NO: 94168 - RNA, 31 nt, Human
cauuaggagagaccugucguuaaggauuugu

SEQ ID NO: 94169 - RNA, 32 nt, Human
cauuaggauugcaugaguccaggaguucgaga

SEQ ID NO: 94170 - RNA, 32 nt, Human
cauuaggauuugccccuuuggaauucugcacu

SEQ ID NO: 94171 - RNA, 32 nt, Human
cauuaggcaacuuccaaacacaaauucauaca

SEQ ID NO: 94172 - RNA, 31 nt, Human
cauuaggcacuuuucuguuuauuuaagaguc

SEQ ID NO: 94173 - RNA, 32 nt, Human
cauuaggcuguaguucuaauauugaguucaac

SEQ ID NO: 94174 - RNA, 32 nt, Human
cauuagggccaccuccauggccccagacagac

SEQ ID NO: 94175 - RNA, 32 nt, Human
cauuaguaaacccaauaagccaaguugaaggu

SEQ ID NO: 94176 - RNA, 32 nt, Human
cauuaguaauguucaacuuuucacaaagauga

SEQ ID NO: 94177 - RNA, 32 nt, Human
cauuaguacaagccccucccaacacccuuaau

SEQ ID NO: 94178 - RNA, 32 nt, Human
cauuaguauuuuaaggagcacugugagagaaa

SEQ ID NO: 94179 - RNA, 32 nt, Human
cauuagugaugacucugaaagcauugaagaaa

SEQ ID NO: 94180 - RNA, 32 nt, Human
cauuagugccuuggacaguugaggaccacucc

SEQ ID NO: 94181 - RNA, 32 nt, Human
cauuagugguguucugugagccucccacccac

SEQ ID NO: 94182 - RNA, 32 nt, Human
cauuaguugucucuccccagcuagauuguaag

SEQ ID NO: 94183 - RNA, 32 nt, Human
cauuaguuuagaucaacucaaggaguauuuau

SEQ ID NO: 94184 - RNA, 32 nt, Human
cauuaguuuuaggguagggaagggauacuaau

SEQ ID NO: 94185 - RNA, 32 nt, Human
cauuaguuuuaguucugucuguuuucauucau

SEQ ID NO: 94186 - RNA, 32 nt, Human
cauuauacagaacccacaggagcuaguuaccu

SEQ ID NO: 94187 - RNA, 32 nt, Human
cauuauaccugaaacuauaggaaagguuaauu

SEQ ID NO: 94188 - RNA, 32 nt, Human
cauuauagcagacauaaguaacaggaaaaugg

SEQ ID NO: 94189 - RNA, 32 nt, Human
cauuauauuaacaucacaauugucaucuauau

SEQ ID NO: 94190 - RNA, 32 nt, Human
cauuaucaaugaaauuacugucaaaagaucuu

SEQ ID NO: 94191 - RNA, 32 nt, Human
cauuaucagccuguuugggaugucugagauca

SEQ ID NO: 94192 - RNA, 32 nt, Human
cauuaucagugaauuuucaguggguaggaugu

SEQ ID NO: 94193 - RNA, 32 nt, Human
cauuaucaucugcaguuacuguuuacaagacu

SEQ ID NO: 94194 - RNA, 32 nt, Human
cauuauccugaauuccccuugccaccccaccc

SEQ ID NO: 94195 - RNA, 32 nt, Human
cauuauccuuucucccuccuguauccucaguu

SEQ ID NO: 94196 - RNA, 32 nt, Human
cauuaucuaccaugacugucucucagccucac

SEQ ID NO: 94197 - RNA, 32 nt, Human
cauuaucuaucuucuucucccuucccucgccc

SEQ ID NO: 94198 - RNA, 32 nt, Human
cauuaucucauucuuuuuccacagagugagcg

SEQ ID NO: 94199 - RNA, 32 nt, Human
cauuaucucuauucuuaaaauuaaacauguug

SEQ ID NO: 94200 - RNA, 32 nt, Human
cauuaucugccauacauucauuacauuauaag

SEQ ID NO: 94201 - RNA, 32 nt, Human
cauuaucugcuccuugucuacuucucuacucu

SEQ ID NO: 94202 - RNA, 32 nt, Human
cauuaugaaauuaguauuuucucugacaucuc

SEQ ID NO: 94203 - RNA, 32 nt, Human
cauuaugaagaauguugucagaaguagggagu

SEQ ID NO: 94204 - RNA, 32 nt, Human
cauuaugacugugguguacagcucccaagugc

SEQ ID NO: 94205 - RNA, 32 nt, Human
cauuaugccuggcuaauuuuuguauuuuuagu

SEQ ID NO: 94206 - RNA, 32 nt, Human
cauuaugccuuacaaacuuacacagugcuuug

SEQ ID NO: 94207 - RNA, 32 nt, Human
cauuauggagagccccgcgacucucauggcau

SEQ ID NO: 94208 - RNA, 32 nt, Human
cauuauggcaggcaccuguaaucccagcuacc

SEQ ID NO: 94209 - RNA, 32 nt, Human
cauuaugggaaaccaaggugggcagauugccu

SEQ ID NO: 94210 - RNA, 32 nt, Human
cauuaugggagaccaaggugggcagauugccu

SEQ ID NO: 94211 - RNA, 32 nt, Human
cauuaugggaggcugaggcgggcagaucauga

SEQ ID NO: 94212 - RNA, 32 nt, Human
cauuauguaauauuccucucagucucugguca

SEQ ID NO: 94213 - RNA, 32 nt, Human
cauuaugugagcccuuauuugagagcuucaug

SEQ ID NO: 94214 - RNA, 32 nt, Human
cauuauguggauguuuacaauggugggaaauu

SEQ ID NO: 94215 - RNA, 32 nt, Human
cauuauguucacugcacucugauuuucuguag

SEQ ID NO: 94216 - RNA, 32 nt, Human
cauuauguuggccaggcuggucuccaacuccu

SEQ ID NO: 94217 - RNA, 32 nt, Human
cauuauguuggccaggcuggucucgaacuccu

SEQ ID NO: 94218 - RNA, 23 nt, Human
cauuauguuugaauuuccugaua

SEQ ID NO: 94219 - RNA, 32 nt, Human
cauuauuaaagaguucaggcaaguuuguggaa

SEQ ID NO: 94220 - RNA, 32 nt, Human
cauuauuacagcaaugaaagaaagaaugaaga

SEQ ID NO: 94221 - RNA, 31 nt, Human
cauuauuauacuucuuauguuuggaccugcu

SEQ ID NO: 94222 - RNA, 31 nt, Human
cauuauuauagcuagaauauaaaaguuuuau

SEQ ID NO: 94223 - RNA, 32 nt, Human
cauuauuaugaaacauuauggcuguuuaugua

SEQ ID NO: 94224 - RNA, 32 nt, Human
cauuauuauuagcucaucucuuaaguagaaag

SEQ ID NO: 94225 - RNA, 24 nt, Human
cauuauucauguuucuuuaugcug

SEQ ID NO: 94226 - RNA, 32 nt, Human
cauuauuccagaagaaagauggaaauucugaa

SEQ ID NO: 94227 - RNA, 32 nt, Human
cauuauuccuacucccuucauccugcacauac

SEQ ID NO: 94228 - RNA, 32 nt, Human
cauuauucuugguuaaggaaugaaucaacgaa

SEQ ID NO: 94229 - RNA, 21 nt, Human
cauuauucuuugauuccagcu

SEQ ID NO: 94230 - RNA, 32 nt, Human
cauuauugaaggaaaggggaugaggacaacug

SEQ ID NO: 94231 - RNA, 32 nt, Human
cauuauugauucacccuuccccuuccuccccu

SEQ ID NO: 94232 - RNA, 18 nt, Human
cauuauugguacaaggaa

SEQ ID NO: 94233 - RNA, 23 nt, Human
cauuauuuaaacagaaaaagaug

SEQ ID NO: 94234 - RNA, 32 nt, Human
cauuauuuagauacuuucuuccuucacucacc

SEQ ID NO: 94235 - RNA, 32 nt, Human
cauuauuucuaaugcuacaagaaugcuguaaa

SEQ ID NO: 94236 - RNA, 32 nt, Human
cauuauuucucuacuuuuccuuccagcaaacc

SEQ ID NO: 94237 - RNA, 32 nt, Human
cauuauuugaaguuuggagaagaaagggauuu

SEQ ID NO: 94238 - RNA, 32 nt, Human
cauuauuugagacuguccugugccugauuauu

SEQ ID NO: 94239 - RNA, 32 nt, Human
cauuauuuguuucauagagaugugauggguga

SEQ ID NO: 94240 - RNA, 32 nt, Human
cauuauuuuaucugcauguuccauaaagcagc

SEQ ID NO: 94241 - RNA, 32 nt, Human
cauuauuuuccucaucagcagaauuuauaaca

SEQ ID NO: 94242 - RNA, 32 nt, Human
cauuauuuuguauuauauuuuaauaguuuauu

SEQ ID NO: 94243 - RNA, 32 nt, Human
cauuauuuuuauauacauuugcaccugcaccu

SEQ ID NO: 94244 - RNA, 32 nt, Human
cauucaaaaaccugguuccuguccucaaaaua

SEQ ID NO: 94245 - RNA, 32 nt, Human
cauucaaaauuucaaacucuuuugccagugac

SEQ ID NO: 94246 - RNA, 32 nt, Human
cauucaaacaggucgagcugugcucgggugcu

SEQ ID NO: 94247 - RNA, 32 nt, Human
cauucaaagagcaaaucguggucuuuggcaga

SEQ ID NO: 94248 - RNA, 32 nt, Human
cauucaacaagagcacuacauucuuuuagcua

SEQ ID NO: 94249 - RNA, 32 nt, Human
cauucaaccacuucuguguguauguacauauu

SEQ ID NO: 94250 - RNA, 32 nt, Human
cauucaacugcaauucugcaggagaguguaau

SEQ ID NO: 94251 - RNA, 32 nt, Human
cauucaacuuguuuuaaaauuaugacucaaga

SEQ ID NO: 94252 - RNA, 32 nt, Human
cauucaagaggaagauggaaggggcuguuuag

SEQ ID NO: 94253 - RNA, 32 nt, Human
cauucaaggagaguugagauacagugaaauga

SEQ ID NO: 94254 - RNA, 32 nt, Human
cauucaaggauccaggaugccaaaaauaugug

SEQ ID NO: 94255 - RNA, 32 nt, Human
cauucaagucagaguuggaagggucauacagg

SEQ ID NO: 94256 - RNA, 32 nt, Human
cauucaagucuagaugacagagcaagacccug

SEQ ID NO: 94257 - RNA, 32 nt, Human
cauucaauaagaauuucuggccaggcguggug

SEQ ID NO: 94258 - RNA, 22 nt, Human
cauucaaucaaggcaaacuuuu

SEQ ID NO: 94259 - RNA, 32 nt, Human
cauucacacacacauauguacaugcacauaga

SEQ ID NO: 94260 - RNA, 32 nt, Human
cauucacacagcaggacucuucucacaugauu

SEQ ID NO: 94261 - RNA, 32 nt, Human
cauucacacaugcauacacacugacauucaca

SEQ ID NO: 94262 - RNA, 32 nt, Human
cauucacacaugcgugcacacauagacgcaug

SEQ ID NO: 94263 - RNA, 32 nt, Human
cauucacacccccauuccuccuggcuccuuau

SEQ ID NO: 94264 - RNA, 32 nt, Human
cauucacacuccuuaagauuuggucagaauuu

SEQ ID NO: 94265 - RNA, 32 nt, Human
cauucacaggcauucuguuccacagcaggcca

SEQ ID NO: 94266 - RNA, 32 nt, Human
cauucacauacuaacccuucuucaagaugggg

SEQ ID NO: 94267 - RNA, 22 nt, Human
cauucacaucugcaugauuaca

SEQ ID NO: 94268 - RNA, 32 nt, Human
cauucaccaccuggucccagacgugcuucagu

SEQ ID NO: 94269 - RNA, 32 nt, Human
cauucaccaggcuccacugcacuggcucauuc

SEQ ID NO: 94270 - RNA, 25 nt, Human
cauucaccaucucuacaccuaaaug

SEQ ID NO: 94271 - RNA, 32 nt, Human
cauucacccacuggccuuucccaccucugcuc

SEQ ID NO: 94272 - RNA, 20 nt, Human
cauucacccagugacuucuu

SEQ ID NO: 94273 - RNA, 24 nt, Human
cauucaccuauugaaagacuucuu

SEQ ID NO: 94274 - RNA, 32 nt, Human
cauucaccucccugccuccucuccuuucuacc

SEQ ID NO: 94275 - RNA, 20 nt, Human
cauucaccugccccaacucu

SEQ ID NO: 94276 - RNA, 32 nt, Human
cauucaccuguauuugugaguguguagucaau

SEQ ID NO: 94277 - RNA, 32 nt, Human
cauucacgcacaccuauucauucacuuccugc

SEQ ID NO: 94278 - RNA, 32 nt, Human
cauucacugagugccuacucuuugccaauccc

SEQ ID NO: 94279 - RNA, 32 nt, Human
cauucacuuccagagaggaccuaucccaaaug

SEQ ID NO: 94280 - RNA, 32 nt, Human
cauucacuuuuagaaucuuguauuuaaguaag

SEQ ID NO: 94281 - RNA, 32 nt, Human
cauucagaaaggagucugaaaggguggccaca

SEQ ID NO: 94282 - RNA, 32 nt, Human
cauucagaacaagacuggaugcuucuguugag

SEQ ID NO: 94283 - RNA, 32 nt, Human
cauucagaaccugaacauccaugugaaaacug

SEQ ID NO: 94284 - RNA, 32 nt, Human
cauucagaaggggaaaauugaaaacaacaaaa

SEQ ID NO: 94285 - RNA, 32 nt, Human
cauucagacucugccaccuauuagcuuucuug

SEQ ID NO: 94286 - RNA, 32 nt, Human
cauucagacugaaacaauacagcuccaugcuc

SEQ ID NO: 94287 - RNA, 32 nt, Human
cauucagagaggagggagaggaggaagaggaa

SEQ ID NO: 94288 - RNA, 32 nt, Human
cauucagaggaaaauauucaaaagccauucag

SEQ ID NO: 94289 - RNA, 32 nt, Human
cauucagauaaauggcaguacuuuaggacaca

SEQ ID NO: 94290 - RNA, 32 nt, Human
cauucagauacuuggucauuuacuuaccaaau

SEQ ID NO: 94291 - RNA, 32 nt, Human
cauucagcaaacaugauuagggaccgaggcug

SEQ ID NO: 94292 - RNA, 32 nt, Human
cauucagcacacaaugucgucuccauuuuaca

SEQ ID NO: 94293 - RNA, 32 nt, Human
cauucagcacacugugaaaauguauuugugca

SEQ ID NO: 94294 - RNA, 32 nt, Human
cauucagcccuagaagcaugaauugcuucaaa

SEQ ID NO: 94295 - RNA, 32 nt, Human
cauucagccuagucaacaacaaacaaagaaaa

SEQ ID NO: 94296 - RNA, 32 nt, Human
cauucagcuuguggauuguaaguggcugacgg

SEQ ID NO: 94297 - RNA, 21 nt, Human
cauucaggagcuccgcguagc

SEQ ID NO: 94298 - RNA, 32 nt, Human
cauucaggaugaggugaaacaggcuggcccug

SEQ ID NO: 94299 - RNA, 32 nt, Human
cauucagggccugggucuccagcucuguaacc

SEQ ID NO: 94300 - RNA, 32 nt, Human
cauucagggcugggggacacgggcacucacug

SEQ ID NO: 94301 - RNA, 32 nt, Human
cauucaggguucccuggcaggggaagcugaga

SEQ ID NO: 94302 - RNA, 32 nt, Human
cauucagguggaggucccgagugggcggggca

SEQ ID NO: 94303 - RNA, 32 nt, Human
cauucaguaaaaucacccuuuuuagugucuag

SEQ ID NO: 94304 - RNA, 32 nt, Human
cauucaguaccugacagagaacaucugggcgu

SEQ ID NO: 94305 - RNA, 32 nt, Human
cauucaguccauaacaccaagcugcggauccu

SEQ ID NO: 94306 - RNA, 32 nt, Human
cauucagucucucugccucugccugccuccug

SEQ ID NO: 94307 - RNA, 32 nt, Human
cauucaguguaugcuggcacugugcauccccu

SEQ ID NO: 94308 - RNA, 31 nt, Human
cauucaguguuuccugggccucugcucagag

SEQ ID NO: 94309 - RNA, 32 nt, Human
cauucaguuagccagccucuuuucuaacacuc

SEQ ID NO: 94310 - RNA, 32 nt, Human
cauucaguuuccuuccaacccuucccaccuuu

SEQ ID NO: 94311 - RNA, 32 nt, Human
cauucauaauaaggccugucagacaagggaga

SEQ ID NO: 94312 - RNA, 32 nt, Human
cauucauaccucuccaaagaccagcuuuuccc

SEQ ID NO: 94313 - RNA, 32 nt, Human
cauucauacuggagagaaauguuacaagugua

SEQ ID NO: 94314 - RNA, 32 nt, Human
cauucauagaggggacacugaaugguucagug

SEQ ID NO: 94315 - RNA, 32 nt, Human
cauucauauaaagguugaaaacaacaaauuga

SEQ ID NO: 94316 - RNA, 32 nt, Human
cauucauaucuacucaccuaacagcaacacug

SEQ ID NO: 94317 - RNA, 32 nt, Human
cauucauaucuacucaccuaauagcaacacug

SEQ ID NO: 94318 - RNA, 32 nt, Human
cauucauauguacaacaaacuacuuucuucuu

SEQ ID NO: 94319 - RNA, 32 nt, Human
cauucauauuccugccuuucuuccaucagcuc

SEQ ID NO: 94320 - RNA, 32 nt, Human
cauucaucacauaugugaugagcacauacaga

SEQ ID NO: 94321 - RNA, 32 nt, Human
cauucaucaguuacuuguauucuuuguaugaa

SEQ ID NO: 94322 - RNA, 21 nt, Human
cauucaucauuaaauauccua

SEQ ID NO: 94323 - RNA, 31 nt, Human
cauucaucuaucaaggaguuuugggauacuu

SEQ ID NO: 94324 - RNA, 32 nt, Human
cauucaugacuaaucaggagcagcgggcucac

SEQ ID NO: 94325 - RNA, 32 nt, Human
cauucaugcuacugccaaccuggggagccagg

SEQ ID NO: 94326 - RNA, 32 nt, Human
cauucauguucacucacuguacacucaucucu

SEQ ID NO: 94327 - RNA, 32 nt, Human
cauucauucacuucucccauguuuucaucugu

SEQ ID NO: 94328 - RNA, 32 nt, Human
cauucauucauucccucacuccugccuuucuc

SEQ ID NO: 94329 - RNA, 32 nt, Human
cauucauucguguuaagccaagauccuggauc

SEQ ID NO: 94330 - RNA, 32 nt, Human
cauucauugaauacuuacuaugugucaggcac

SEQ ID NO: 94331 - RNA, 32 nt, Human
cauucauugcccccacaauccuagccuacccg

SEQ ID NO: 94332 - RNA, 32 nt, Human
cauucauuuggauaaguugugauuugacgacu

SEQ ID NO: 94333 - RNA, 32 nt, Human
cauuccaaaacguucaagaccgucagcacuga

SEQ ID NO: 94334 - RNA, 32 nt, Human
cauuccaaaaugucaugggauaaauaugaaau

SEQ ID NO: 94335 - RNA, 32 nt, Human
cauuccaaaccugaguccucccaccaaugcag

SEQ ID NO: 94336 - RNA, 32 nt, Human
cauuccaaagagagaauaaaacuccugaucca

SEQ ID NO: 94337 - RNA, 32 nt, Human
cauuccaaagugcugggauuacaggugugagc

SEQ ID NO: 94338 - RNA, 32 nt, Human
cauuccaaauccagcacugcuguuuaccuugc

SEQ ID NO: 94339 - RNA, 32 nt, Human
cauuccaaccaaagcauugcugacagcuuccu

SEQ ID NO: 94340 - RNA, 23 nt, Human
cauuccaacuaucucauuuccaa

SEQ ID NO: 94341 - RNA, 32 nt, Human
cauuccaacugcugccccucugucugccuggc

SEQ ID NO: 94342 - RNA, 32 nt, Human
cauuccaacuuaggcuacagaaugagacucug

SEQ ID NO: 94343 - RNA, 28 nt, Human
cauuccaagaaugaagccucaucuugcu

SEQ ID NO: 94344 - RNA, 32 nt, Human
cauuccaaggaggugcaggagaacagcucugu

SEQ ID NO: 94345 - RNA, 32 nt, Human
cauuccacauccggaggagaagaaggaaauga

SEQ ID NO: 94346 - RNA, 32 nt, Human
cauuccacaugugcccuggccacauuugcagc

SEQ ID NO: 94347 - RNA, 32 nt, Human
cauuccaccagcuggcccggccacgucucgaa

SEQ ID NO: 94348 - RNA, 32 nt, Human
cauuccacuauacaauucaguacugauuauuc

SEQ ID NO: 94349 - RNA, 21 nt, Human
cauuccacuccagccugggca

SEQ ID NO: 94350 - RNA, 32 nt, Human
cauuccacugacuaacuuugguguuuuguuuc

SEQ ID NO: 94351 - RNA, 32 nt, Human
cauuccacugcauuucagccugggggauacag

SEQ ID NO: 94352 - RNA, 32 nt, Human
cauuccagacacugcaugugucagccucauga

SEQ ID NO: 94353 - RNA, 32 nt, Human
cauuccagacugggcgacagagcaagacucug

SEQ ID NO: 94354 - RNA, 32 nt, Human
cauuccagacuuuguaccuuaaaguuagagca

SEQ ID NO: 94355 - RNA, 32 nt, Human
cauuccagagaaggaggaaaugcauucucaga

SEQ ID NO: 94356 - RNA, 32 nt, Human
cauuccagagcagaagaaggggguuccucccc

SEQ ID NO: 94357 - RNA, 32 nt, Human
cauuccagagcccucuuguggccaggccuucc

SEQ ID NO: 94358 - RNA, 32 nt, Human
cauuccagaggcuucucagaguucaacauaug

SEQ ID NO: 94359 - RNA, 18 nt, Human
cauuccagaugugugaga

SEQ ID NO: 94360 - RNA, 32 nt, Human
cauuccagccaagugugcuguaaacuguauau

SEQ ID NO: 94361 - RNA, 32 nt, Human
cauuccagccaggaugacagagcaagacugca

SEQ ID NO: 94362 - RNA, 18 nt, Human
cauuccagccaggcccag

SEQ ID NO: 94363 - RNA, 32 nt, Human
cauuccagccagggugacagagugagaccaug

SEQ ID NO: 94364 - RNA, 32 nt, Human
cauuccagccuaagcaauagagcgagacuccc

SEQ ID NO: 94365 - RNA, 32 nt, Human
cauuccagccuggacgacagagcgagacuccg

SEQ ID NO: 94366 - RNA, 32 nt, Human
cauuccagccuggauaauagagugagacccua

SEQ ID NO: 94367 - RNA, 32 nt, Human
cauuccagccuggaugauggagcgagacucug

SEQ ID NO: 94368 - RNA, 32 nt, Human
cauuccagccuggcgacagagcaagacuccau

SEQ ID NO: 94369 - RNA, 32 nt, Human
cauuccagccuggcgacagagugagacuccau

SEQ ID NO: 94370 - RNA, 32 nt, Human
cauuccagccugggagacggagcaagacucca

SEQ ID NO: 94371 - RNA, 32 nt, Human
cauuccagccugggcaacaagagcgaaacucc

SEQ ID NO: 94372 - RNA, 32 nt, Human
cauuccagccugggcaacaagagcgaaacucu

SEQ ID NO: 94373 - RNA, 32 nt, Human
cauuccagccugggcaacacgagcgaaacucc

SEQ ID NO: 94374 - RNA, 32 nt, Human
cauuccagccugggcaacagagcaagacccug

SEQ ID NO: 94375 - RNA, 32 nt, Human
cauuccagccugggcaacagagcaagaccucg

SEQ ID NO: 94376 - RNA, 32 nt, Human
cauuccagccugggcaacagagcaagacuguc

SEQ ID NO: 94377 - RNA, 32 nt, Human
cauuccagccugggcaacagagcgagacucca

SEQ ID NO: 94378 - RNA, 32 nt, Human
cauuccagccugggcaacagagugaggcugug

SEQ ID NO: 94379 - RNA, 32 nt, Human
cauuccagccugggcaacagcgugagacuuca

SEQ ID NO: 94380 - RNA, 32 nt, Human
cauuccagccugggcacuagagugagacucug

SEQ ID NO: 94381 - RNA, 32 nt, Human
cauuccagccugggcgaaagagaaagaccgug

SEQ ID NO: 94382 - RNA, 32 nt, Human
cauuccagccugggcgacagagcaagacucca

SEQ ID NO: 94383 - RNA, 32 nt, Human
cauuccagccugggcgacagagcaagacucug

SEQ ID NO: 94384 - RNA, 32 nt, Human
cauuccagccugggcgacagagugagacccag

SEQ ID NO: 94385 - RNA, 32 nt, Human
cauuccagccugggcgauggagugagaccuca

SEQ ID NO: 94386 - RNA, 32 nt, Human
cauuccagccuggguacacagcgagacccugu

SEQ ID NO: 94387 - RNA, 32 nt, Human
cauuccagccugggugacagaaugaaacucca

SEQ ID NO: 94388 - RNA, 32 nt, Human
cauuccagccugggugacagaaugaaauccug

SEQ ID NO: 94389 - RNA, 32 nt, Human
cauuccagccugggugacagagcaagacucug

SEQ ID NO: 94390 - RNA, 32 nt, Human
cauuccagccugggugacagagccagacuccg

SEQ ID NO: 94391 - RNA, 32 nt, Human
cauuccagccugggugacagagcgagaccaug

SEQ ID NO: 94392 - RNA, 32 nt, Human
cauuccagccugggugacagagcgagacccug

SEQ ID NO: 94393 - RNA, 32 nt, Human
cauuccagccugggugacagagcgagacucca

SEQ ID NO: 94394 - RNA, 32 nt, Human
cauuccagccugggugacagagcgagacuccg

SEQ ID NO: 94395 - RNA, 32 nt, Human
cauuccagccugggugacagagcgagacuguc

SEQ ID NO: 94396 - RNA, 32 nt, Human
cauuccagccugggugacagagcuagacucug

SEQ ID NO: 94397 - RNA, 32 nt, Human
cauuccagccugggugacagagugagacccug

SEQ ID NO: 94398 - RNA, 32 nt, Human
cauuccagccugggugacagagugagacucca

SEQ ID NO: 94399 - RNA, 32 nt, Human
cauuccagccugggugacagagugagauccug

SEQ ID NO: 94400 - RNA, 32 nt, Human
cauuccagccugggugacauaucaagaccugu

SEQ ID NO: 94401 - RNA, 32 nt, Human
cauuccagccugggugacugagcgagacucug

SEQ ID NO: 94402 - RNA, 32 nt, Human
cauuccagccuggugacagagcgagacucagu

SEQ ID NO: 94403 - RNA, 32 nt, Human
cauuccagccugguugacagagugagacuccg

SEQ ID NO: 94404 - RNA, 32 nt, Human
cauuccagccuuggcgacagagcgagacucca

SEQ ID NO: 94405 - RNA, 32 nt, Human
cauuccagccuuggugacagagcaagacccug

SEQ ID NO: 94406 - RNA, 31 nt, Human
cauuccagcggagacuuauguaggagggacc

SEQ ID NO: 94407 - RNA, 32 nt, Human
cauuccagcuucccugucucuuccugccugug

SEQ ID NO: 94408 - RNA, 32 nt, Human
cauuccagcuugggcgacagagcgagacccag

SEQ ID NO: 94409 - RNA, 32 nt, Human
cauuccaggagacuuguagcucagccacacac

SEQ ID NO: 94410 - RNA, 32 nt, Human
cauuccaggaguggccugugccucccaccucu

SEQ ID NO: 94411 - RNA, 32 nt, Human
cauuccaggcagagaaggagcagaggcucucc

SEQ ID NO: 94412 - RNA, 32 nt, Human
cauuccaggugggugcuggcagcucugaaggu

SEQ ID NO: 94413 - RNA, 32 nt, Human
cauuccaguagaaaacucucucugcaaguccu

SEQ ID NO: 94414 - RNA, 32 nt, Human
cauuccagucagagaaggaaacaggggaucgg

SEQ ID NO: 94415 - RNA, 32 nt, Human
cauuccagucucagucaucaugcggccuccuc

SEQ ID NO: 94416 - RNA, 32 nt, Human
cauuccagugguggaggcgcuguggauggcug

SEQ ID NO: 94417 - RNA, 32 nt, Human
cauuccaguucauaaguauuuguauaugucuu

SEQ ID NO: 94418 - RNA, 32 nt, Human
cauuccauaaugacugaaucaaggaggaaaau

SEQ ID NO: 94419 - RNA, 32 nt, Human
cauuccauacaaaaucucacgacuggcaaaag

SEQ ID NO: 94420 - RNA, 32 nt, Human
cauuccaucccaagcuucucccuuacccacac

SEQ ID NO: 94421 - RNA, 32 nt, Human
cauuccauccccaguccagccugggcaacccc

SEQ ID NO: 94422 - RNA, 32 nt, Human
cauuccaugccagcaccucugcagccugcugg

SEQ ID NO: 94423 - RNA, 32 nt, Human
cauuccauggagaaagcuguguuccaaugaau

SEQ ID NO: 94424 - RNA, 32 nt, Human
cauuccauguacaucuguacgcaugucagagu

SEQ ID NO: 94425 - RNA, 32 nt, Human
cauuccauuacacuccagccugggcaccagga

SEQ ID NO: 94426 - RNA, 32 nt, Human
cauucccaacaacauccucugccacacacaac

SEQ ID NO: 94427 - RNA, 32 nt, Human
cauucccaacaguguaaaagcauucauguuuc

SEQ ID NO: 94428 - RNA, 31 nt, Human
cauucccaacuagacauuaccaaagugaccu

SEQ ID NO: 94429 - RNA, 32 nt, Human
cauucccaaugccauccccaaccacaaccaca

SEQ ID NO: 94430 - RNA, 32 nt, Human
cauucccacagcuuugauuuuauuugcauuua

SEQ ID NO: 94431 - RNA, 32 nt, Human
cauucccacauacauucacuauuuucacacac

SEQ ID NO: 94432 - RNA, 23 nt, Human
cauucccaccucccucuagggca

SEQ ID NO: 94433 - RNA, 32 nt, Human
cauucccacgucuucuugcugcagccugcccc

SEQ ID NO: 94434 - RNA, 32 nt, Human
cauucccacugaggaugaggcccuggggaccc

SEQ ID NO: 94435 - RNA, 32 nt, Human
cauucccacugaggcccgcgcucccugggagg

SEQ ID NO: 94436 - RNA, 32 nt, Human
cauucccacugcacuuggugcugcuuuggcug

SEQ ID NO: 94437 - RNA, 32 nt, Human
cauucccacuucaccuuccuccauucagucug

SEQ ID NO: 94438 - RNA, 32 nt, Human
cauucccagcuacuugggaggcugaggcagga

SEQ ID NO: 94439 - RNA, 32 nt, Human
cauucccaggagacccagggugauuaaaauuu

SEQ ID NO: 94440 - RNA, 32 nt, Human
cauucccaggagggggagcuuggagcgaguca

SEQ ID NO: 94441 - RNA, 32 nt, Human
cauucccagucaugaaauguagaagacuggaa

SEQ ID NO: 94442 - RNA, 32 nt, Human
cauucccaucacggugcuccagccggcccugc

SEQ ID NO: 94443 - RNA, 32 nt, Human
cauucccauccuccccugauaggccccuccuc

SEQ ID NO: 94444 - RNA, 32 nt, Human
cauucccauccuuccugguacugcagucaacc

SEQ ID NO: 94445 - RNA, 32 nt, Human
cauucccaugcauccugauccuuaagauuaug

SEQ ID NO: 94446 - RNA, 24 nt, Human
cauucccauuaauguccucauuca

SEQ ID NO: 94447 - RNA, 32 nt, Human
cauucccauuggccaaacccaaagagaaguca

SEQ ID NO: 94448 - RNA, 22 nt, Human
cauuccccacuuuugcuaugcu

SEQ ID NO: 94449 - RNA, 32 nt, Human
cauuccccaugagucccccacacccaccccau

SEQ ID NO: 94450 - RNA, 32 nt, Human
cauucccccacugccucacagccucagucacc

SEQ ID NO: 94451 - RNA, 32 nt, Human
cauucccccuaaaaacagagugaccuggaagu

SEQ ID NO: 94452 - RNA, 32 nt, Human
cauucccccuggcacugcgggggccuggccag

SEQ ID NO: 94453 - RNA, 32 nt, Human
cauuccccgagcacuccagccuggcagucagc

SEQ ID NO: 94454 - RNA, 32 nt, Human
cauuccccgucucugguuccuccccuccuccu

SEQ ID NO: 94455 - RNA, 32 nt, Human
cauuccccugaauauuuuugcauucauauuuu

SEQ ID NO: 94456 - RNA, 32 nt, Human
cauuccccugcucccccugucccuuccccauc

SEQ ID NO: 94457 - RNA, 32 nt, Human
cauucccgccugggcagcagagcgagacuccg

SEQ ID NO: 94458 - RNA, 32 nt, Human
cauucccgggguggcgggguuagaugagcggc

SEQ ID NO: 94459 - RNA, 32 nt, Human
cauucccuacuucauccuugcugagcuaaauu

SEQ ID NO: 94460 - RNA, 32 nt, Human
cauucccucagugcuucucuucugaccugcau

SEQ ID NO: 94461 - RNA, 32 nt, Human
cauucccuccacccacuugccugucaccccag

SEQ ID NO: 94462 - RNA, 32 nt, Human
cauucccuccauacagcuucugugcuuauaua

SEQ ID NO: 94463 - RNA, 32 nt, Human
cauucccucccagccuuugaggccgggugcag

SEQ ID NO: 94464 - RNA, 17 nt, Human
cauucccuccccuccca

SEQ ID NO: 94465 - RNA, 32 nt, Human
cauucccuccuuuuguucuuccuuccugccuu

SEQ ID NO: 94466 - RNA, 32 nt, Human
cauucccucuauaaggcguuacuacauuuaug

SEQ ID NO: 94467 - RNA, 32 nt, Human
cauucccucuccccucucuauccaaccccauu

SEQ ID NO: 94468 - RNA, 32 nt, Human
cauucccugagucaccaggaauguuaaaguca

SEQ ID NO: 94469 - RNA, 21 nt, Human
cauucccugcacaugaacaug

SEQ ID NO: 94470 - RNA, 17 nt, Human
cauucccugcagaguca

SEQ ID NO: 94471 - RNA, 32 nt, Human
cauucccugcugcaccuggucugcaggggugc

SEQ ID NO: 94472 - RNA, 32 nt, Human
cauucccugcuggucaugcagugucuguauau

SEQ ID NO: 94473 - RNA, 32 nt, Human
cauucccugcuuguaucaaaacaucucaugua

SEQ ID NO: 94474 - RNA, 32 nt, Human
cauucccuggagggugacuggggaagaauugc

SEQ ID NO: 94475 - RNA, 32 nt, Human
cauucccuggaguuugggggaaggggaaucau

SEQ ID NO: 94476 - RNA, 21 nt, Human
cauucccuggccucugccaua

SEQ ID NO: 94477 - RNA, 19 nt, Human
cauucccugugcaacauca

SEQ ID NO: 94478 - RNA, 20 nt, Human
cauucccugugcuugaguca

SEQ ID NO: 94479 - RNA, 21 nt, Human
cauucccuuccacagcucaua

SEQ ID NO: 94480 - RNA, 21 nt, Human
cauucccuugacaauguuaua

SEQ ID NO: 94481 - RNA, 32 nt, Human
cauucccuugauaucaguccccuucacugcag

SEQ ID NO: 94482 - RNA, 19 nt, Human
cauucccuuggaaugcaua

SEQ ID NO: 94483 - RNA, 32 nt, Human
cauucccuugggcccaggcuuaugaccugcac

SEQ ID NO: 94484 - RNA, 21 nt, Human
cauucccuugugugacucaua

SEQ ID NO: 94485 - RNA, 32 nt, Human
cauucccuuugccuucucugaguguuuaggga

SEQ ID NO: 94486 - RNA, 32 nt, Human
cauucccuuuucuccccacuccuccagaaggc

SEQ ID NO: 94487 - RNA, 32 nt, Human
cauuccgaaaucaagaaacucauguucuuaac

SEQ ID NO: 94488 - RNA, 32 nt, Human
cauuccgacuucagaaaaucgaagcagcuggc

SEQ ID NO: 94489 - RNA, 32 nt, Human
cauuccgccccagcuacugagggaggggacag

SEQ ID NO: 94490 - RNA, 32 nt, Human
cauuccgcccccgccucaacgcccagcacagu

SEQ ID NO: 94491 - RNA, 32 nt, Human
cauuccgccugucucccuaacccuccauugcc

SEQ ID NO: 94492 - RNA, 32 nt, Human
cauuccggcccaccucccucuggccggacaga

SEQ ID NO: 94493 - RNA, 32 nt, Human
cauuccggccugggcgacagagcgagacucug

SEQ ID NO: 94494 - RNA, 32 nt, Human
cauuccguuuccacuccagccuguuguguugu

SEQ ID NO: 94495 - RNA, 32 nt, Human
cauuccuaccggagcaucccagaccugcucca

SEQ ID NO: 94496 - RNA, 20 nt, Human
cauuccuaccuagugucaua

SEQ ID NO: 94497 - RNA, 32 nt, Human
cauuccuaccuagugucauaaaagcaaaauac

SEQ ID NO: 94498 - RNA, 32 nt, Human
cauuccuauguaaaugcccuccauaaaaaccc

SEQ ID NO: 94499 - RNA, 32 nt, Human
cauuccuauuucagaagauuguuaaagcaaaa

SEQ ID NO: 94500 - RNA, 32 nt, Human
cauuccuccagcccuagacucccaagccccag

SEQ ID NO: 94501 - RNA, 32 nt, Human
cauuccuccagccuccccuccccuggggacgc

SEQ ID NO: 94502 - RNA, 32 nt, Human
cauuccuccauuugguuaaaauacucagugca

SEQ ID NO: 94503 - RNA, 32 nt, Human
cauuccucccaagguggcaaaaauuagcuaua

SEQ ID NO: 94504 - RNA, 32 nt, Human
cauuccucccacagaucuugccccuuaccaca

SEQ ID NO: 94505 - RNA, 32 nt, Human
cauuccucccauucaagauucccacuccccag

SEQ ID NO: 94506 - RNA, 22 nt, Human
cauuccuccccuccaagaggua

SEQ ID NO: 94507 - RNA, 16 nt, Human
cauuccuccccuccca

SEQ ID NO: 94508 - RNA, 32 nt, Human
cauuccuccuaaggagcuggugucuucaucca

SEQ ID NO: 94509 - RNA, 31 nt, Human
cauuccuccuccccugggccucucucccuuu

SEQ ID NO: 94510 - RNA, 32 nt, Human
cauuccuccuggcaacagccagagccugggcg

SEQ ID NO: 94511 - RNA, 32 nt, Human
cauuccuccuggguuuuaguggcauugccuuc

SEQ ID NO: 94512 - RNA, 32 nt, Human
cauuccucguuucucacacuuaggaccccucc

SEQ ID NO: 94513 - RNA, 32 nt, Human
cauuccucuagccucugcuggagugcagugag

SEQ ID NO: 94514 - RNA, 32 nt, Human
cauuccucuccucuucacuagccucucugaag

SEQ ID NO: 94515 - RNA, 32 nt, Human
cauuccucucucuguguaucugugccagaugu

SEQ ID NO: 94516 - RNA, 32 nt, Human
cauuccucucugcuucucagcagcuguccuac

SEQ ID NO: 94517 - RNA, 32 nt, Human
cauuccucugauagaacaaagcgaaaugcagg

SEQ ID NO: 94518 - RNA, 32 nt, Human
cauuccucugcaggcaacuaggagaaccuaac

SEQ ID NO: 94519 - RNA, 32 nt, Human
cauuccucugcucuccucuauucuccaugucg

SEQ ID NO: 94520 - RNA, 32 nt, Human
cauuccugaagggugauaugaaaguuaacccc

SEQ ID NO: 94521 - RNA, 32 nt, Human
cauuccugaggggcccagaaauggcggcguug

SEQ ID NO: 94522 - RNA, 32 nt, Human
cauuccugccgcugccgucccugcugccucau

SEQ ID NO: 94523 - RNA, 18 nt, Human
cauuccugcgcauggugc

SEQ ID NO: 94524 - RNA, 32 nt, Human
cauuccugcuucucaagggacacaguggccug

SEQ ID NO: 94525 - RNA, 32 nt, Human
cauuccugcuucucuggggacacagugggccc

SEQ ID NO: 94526 - RNA, 32 nt, Human
cauuccuggacacccucaccacccaacaguga

SEQ ID NO: 94527 - RNA, 19 nt, Human
cauuccuggacuccuccca

SEQ ID NO: 94528 - RNA, 32 nt, Human
cauuccuggagugcugcugaggagcgagggcc

SEQ ID NO: 94529 - RNA, 19 nt, Human
cauuccuggcuacggggag

SEQ ID NO: 94530 - RNA, 32 nt, Human
cauuccuguaaucccagcuacucgggaggcug

SEQ ID NO: 94531 - RNA, 32 nt, Human
cauuccuguaaucccagcucuuugggaggcug

SEQ ID NO: 94532 - RNA, 32 nt, Human
cauuccuguauucacccguccagaccuuguuc

SEQ ID NO: 94533 - RNA, 32 nt, Human
cauuccugucugggugaagaggagacguguua

SEQ ID NO: 94534 - RNA, 32 nt, Human
cauuccuguuuuguugaagcagccacuggucc

SEQ ID NO: 94535 - RNA, 22 nt, Human
cauuccuguuuuucuuggcagg

SEQ ID NO: 94536 - RNA, 32 nt, Human
cauuccuuauuccacuuggauuuccuauagca

SEQ ID NO: 94537 - RNA, 32 nt, Human
cauuccuucacucauccauccuacguauauuu

SEQ ID NO: 94538 - RNA, 32 nt, Human
cauuccuucauuccucaccuuuauccuguuau

SEQ ID NO: 94539 - RNA, 32 nt, Human
cauuccuuccugaacauauucugcaccucguc

SEQ ID NO: 94540 - RNA, 32 nt, Human
cauuccuuccuucucccaucuggauuccuaag

SEQ ID NO: 94541 - RNA, 32 nt, Human
cauuccuuccuuucuuucccgacuucuuuaau

SEQ ID NO: 94542 - RNA, 32 nt, Human
cauuccuucuggaguuuguuuuugaaacuccu

SEQ ID NO: 94543 - RNA, 32 nt, Human
cauuccuucuguccuuggaggccagaggggac

SEQ ID NO: 94544 - RNA, 32 nt, Human
cauuccuuggaguuauacuaacuaauaaugaa

SEQ ID NO: 94545 - RNA, 32 nt, Human
cauuccuuggcugucagugcugcccagauuca

SEQ ID NO: 94546 - RNA, 32 nt, Human
cauuccuuggcuuguagaugcaucaccccagu

SEQ ID NO: 94547 - RNA, 21 nt, Human
cauuccuuuacacaugaucua

SEQ ID NO: 94548 - RNA, 32 nt, Human
cauuccuuucccagcuccagccuggagggaag

SEQ ID NO: 94549 - RNA, 20 nt, Human
cauuccuuuccucccuuccc

SEQ ID NO: 94550 - RNA, 32 nt, Human
cauuccuuuccucccuucccccuggcagguag

SEQ ID NO: 94551 - RNA, 32 nt, Human
cauuccuuuguggagccuacaucuucauaagc

SEQ ID NO: 94552 - RNA, 32 nt, Human
cauuccuuuguuguugauaaugggcuuuguua

SEQ ID NO: 94553 - RNA, 32 nt, Human
cauucgaagaaacccuugcugcuuuagucccg

SEQ ID NO: 94554 - RNA, 32 nt, Human
cauucgacaauacaucuugacuguuucuucaa

SEQ ID NO: 94555 - RNA, 32 nt, Human
cauucgaucaacauacucagaaauaucacccc

SEQ ID NO: 94556 - RNA, 32 nt, Human
cauucgccagugccacuguuggaagcugcuug

SEQ ID NO: 94557 - RNA, 19 nt, Human
cauucgcugcagacccugg

SEQ ID NO: 94558 - RNA, 21 nt, Human
cauucgcuuucaaacaugauc

SEQ ID NO: 94559 - RNA, 32 nt, Human
cauucggagcagugugggugggggcgcucugg

SEQ ID NO: 94560 - RNA, 32 nt, Human
cauucggaggcugguguccagggucucagcgc

SEQ ID NO: 94561 - RNA, 19 nt, Human
cauucggcauacucacuca

SEQ ID NO: 94562 - RNA, 32 nt, Human
cauucggggagaaagaagagaccccgcacuug

SEQ ID NO: 94563 - RNA, 32 nt, Human
cauucgucauuuccucaucugcacagucagcu

SEQ ID NO: 94564 - RNA, 31 nt, Human
cauucgugacuucuccacccaaggacacucc

SEQ ID NO: 94565 - RNA, 32 nt, Human
cauucuaaaggaggguuugugauugucaccau

SEQ ID NO: 94566 - RNA, 32 nt, Human
cauucuaaccuucacagacagacuggaggcug

SEQ ID NO: 94567 - RNA, 32 nt, Human
cauucuaacucauauguucccaauuaccaagg

SEQ ID NO: 94568 - RNA, 32 nt, Human
cauucuaagcuuaaccuccuggucucauggca

SEQ ID NO: 94569 - RNA, 31 nt, Human
cauucuacuugcuuauuacauuuaaacccuu

SEQ ID NO: 94570 - RNA, 32 nt, Human
cauucuagaaauaacaaaaauccugauaaagc

SEQ ID NO: 94571 - RNA, 32 nt, Human
cauucuagaccagccaauuggugggacagcgu

SEQ ID NO: 94572 - RNA, 32 nt, Human
cauucuagaccagcucaaagauuccaugaguu

SEQ ID NO: 94573 - RNA, 32 nt, Human
cauucuagauuacuuuucuuacucugaaacau

SEQ ID NO: 94574 - RNA, 18 nt, Human
cauucuagcagugucaua

SEQ ID NO: 94575 - RNA, 32 nt, Human
cauucuagccuggaugacagagcaagacucug

SEQ ID NO: 94576 - RNA, 32 nt, Human
cauucuagccugggcaacagaguaagacuccg

SEQ ID NO: 94577 - RNA, 32 nt, Human
cauucuagccugggcaacagagugagauccug

SEQ ID NO: 94578 - RNA, 32 nt, Human
cauucuagccugggcgauagagugagacuccg

SEQ ID NO: 94579 - RNA, 32 nt, Human
cauucuagccugggugacagagcgagacucug

SEQ ID NO: 94580 - RNA, 32 nt, Human
cauucuagccugggugacagugagacugucuc

SEQ ID NO: 94581 - RNA, 21 nt, Human
cauucuagcuuccucaccuca

SEQ ID NO: 94582 - RNA, 32 nt, Human
cauucuaggcaauccacccacccaugagggga

SEQ ID NO: 94583 - RNA, 32 nt, Human
cauucuaggcuggauucuacugaaguagaggc

SEQ ID NO: 94584 - RNA, 31 nt, Human
cauucuaggugagcuuacacauuccuuccaa

SEQ ID NO: 94585 - RNA, 31 nt, Human
cauucuaguuuauauuuucauuuaaaauccu

SEQ ID NO: 94586 - RNA, 32 nt, Human
cauucuauagugacaucaucccagacugccuu

SEQ ID NO: 94587 - RNA, 32 nt, Human
cauucuaucacccaggcuggaguggaguggua

SEQ ID NO: 94588 - RNA, 32 nt, Human
cauucuaucgcccaggcuggagugcaauggca

SEQ ID NO: 94589 - RNA, 32 nt, Human
cauucuaugaccaccgcccccaaccagcugcc

SEQ ID NO: 94590 - RNA, 32 nt, Human
cauucuauguagccaugucacugugaauaacg

SEQ ID NO: 94591 - RNA, 32 nt, Human
cauucuauucucauuccuuucucuccaaugag

SEQ ID NO: 94592 - RNA, 32 nt, Human
cauucucacagcccugcuggaccaaggcaucu

SEQ ID NO: 94593 - RNA, 32 nt, Human
cauucucaccuaucuucucucuugcuccaucu

SEQ ID NO: 94594 - RNA, 32 nt, Human
cauucucacgugaaauauaaaaagcaagucuu

SEQ ID NO: 94595 - RNA, 32 nt, Human
cauucucagaacaaagacagcaaccaaugagc

SEQ ID NO: 94596 - RNA, 32 nt, Human
cauucucagauuugcuuaguugugcauuugua

SEQ ID NO: 94597 - RNA, 32 nt, Human
cauucucaggccacugcauuuagccugggcga

SEQ ID NO: 94598 - RNA, 32 nt, Human
cauucucauagguccaguuuaagaucucauuc

SEQ ID NO: 94599 - RNA, 32 nt, Human
cauucucaucgauacuuccuggacauauuuug

SEQ ID NO: 94600 - RNA, 23 nt, Human
cauucucaugucagacugaaagg

SEQ ID NO: 94601 - RNA, 32 nt, Human
cauucuccaaauugcuaaucucuauccagucu

SEQ ID NO: 94602 - RNA, 32 nt, Human
cauucuccagucccucagucccuucccgcgcg

SEQ ID NO: 94603 - RNA, 32 nt, Human
cauucucccacaggauggugaggcugggagga

SEQ ID NO: 94604 - RNA, 32 nt, Human
cauucucccccucuuugggcagugccauggau

SEQ ID NO: 94605 - RNA, 32 nt, Human
cauucuccccucuccuaggagcucuuuugucu

SEQ ID NO: 94606 - RNA, 32 nt, Human
cauucucccugagaugaugucuucaguaauga

SEQ ID NO: 94607 - RNA, 32 nt, Human
cauucuccgagaugcugaggcagaaguacuuu

SEQ ID NO: 94608 - RNA, 21 nt, Human
cauucuccuaguccucaccca

SEQ ID NO: 94609 - RNA, 32 nt, Human
cauucuccuccuccucccuccucacucccuag

SEQ ID NO: 94610 - RNA, 32 nt, Human
cauucuccugcaguuggauauuuagguuguuu

SEQ ID NO: 94611 - RNA, 32 nt, Human
cauucuccugccucagccuccccagcagcugg

SEQ ID NO: 94612 - RNA, 32 nt, Human
cauucuccugccucagcuacucaggaggcuga

SEQ ID NO: 94613 - RNA, 32 nt, Human
cauucuccugccucagcuucccgaguagcugg

SEQ ID NO: 94614 - RNA, 32 nt, Human
cauucuccugccucagcuuccugaguagcugg

SEQ ID NO: 94615 - RNA, 32 nt, Human
cauucuccuugccucuuagcauguuugauuua

SEQ ID NO: 94616 - RNA, 32 nt, Human
cauucucgcccucccuuuuccucucuccuccu

SEQ ID NO: 94617 - RNA, 32 nt, Human
cauucucuagaucuauugucuccuuuacguau

SEQ ID NO: 94618 - RNA, 32 nt, Human
cauucucucacauuccacaugauauagagggc

SEQ ID NO: 94619 - RNA, 32 nt, Human
cauucucuccaacucuucaucucccugaucuu

SEQ ID NO: 94620 - RNA, 32 nt, Human
cauucucuccaucccuuccaucccaggcaauc

SEQ ID NO: 94621 - RNA, 32 nt, Human
cauucucucccaugacacccagaaggggcaga

SEQ ID NO: 94622 - RNA, 32 nt, Human
cauucucuccccaccacucucuucucguggcc

SEQ ID NO: 94623 - RNA, 17 nt, Human
cauucucucuccuccca

SEQ ID NO: 94624 - RNA, 32 nt, Human
cauucucucuccuuuuccaucuggaccaccca

SEQ ID NO: 94625 - RNA, 32 nt, Human
cauucucugaagaguggguuucacaagugaaa

SEQ ID NO: 94626 - RNA, 32 nt, Human
cauucucugcccacuuugccuuccaggaaaug

SEQ ID NO: 94627 - RNA, 32 nt, Human
cauucucugccucugccucauauucuuguuag

SEQ ID NO: 94628 - RNA, 32 nt, Human
cauucucuguaaccugugcggugugguuccug

SEQ ID NO: 94629 - RNA, 23 nt, Human
cauucucuucaaucucucacuca

SEQ ID NO: 94630 - RNA, 32 nt, Human
cauucucuuccacagcccugaggucuuacgaa

SEQ ID NO: 94631 - RNA, 32 nt, Human
cauucucuugagagacaggggagaagaaaauu

SEQ ID NO: 94632 - RNA, 32 nt, Human
cauucucuuuggccacaauggcagccucagcu

SEQ ID NO: 94633 - RNA, 23 nt, Human
cauucugaauaaagucuucuaca

SEQ ID NO: 94634 - RNA, 32 nt, Human
cauucugacagcugagcaggaggcagagguga

SEQ ID NO: 94635 - RNA, 32 nt, Human
cauucugagaguugccccacccuaccugccuu

SEQ ID NO: 94636 - RNA, 32 nt, Human
cauucugaguagauuuaagagaacaaaagaca

SEQ ID NO: 94637 - RNA, 32 nt, Human
cauucugauaaaugugucauuaggcaauugca

SEQ ID NO: 94638 - RNA, 32 nt, Human
cauucugauauuucuccucaauucuaggcaug

SEQ ID NO: 94639 - RNA, 32 nt, Human
cauucugauuucucucaccaaagacuggaaaa

SEQ ID NO: 94640 - RNA, 32 nt, Human
cauucugcaacaaccagggacuucacaggagc

SEQ ID NO: 94641 - RNA, 32 nt, Human
cauucugcacacagucucugcaugaacucagg

SEQ ID NO: 94642 - RNA, 32 nt, Human
cauucugcaguuggugccagaacucuggaucc

SEQ ID NO: 94643 - RNA, 32 nt, Human
cauucugcauucccauuuuucucuccacgugu

SEQ ID NO: 94644 - RNA, 32 nt, Human
cauucugcccccgcccuuccuccccuuauuug

SEQ ID NO: 94645 - RNA, 32 nt, Human
cauucugcccuccugggccccucucucccuga

SEQ ID NO: 94646 - RNA, 32 nt, Human
cauucugccgugagccacugcgcccggccucc

SEQ ID NO: 94647 - RNA, 32 nt, Human
cauucugccuccauucugaccauuucaggggu

SEQ ID NO: 94648 - RNA, 21 nt, Human
cauucugccucuacauuucuu

SEQ ID NO: 94649 - RNA, 32 nt, Human
cauucugcugguggcuuccugcgucuuucugc

SEQ ID NO: 94650 - RNA, 32 nt, Human
cauucuggaggugggagugggagagcugccug

SEQ ID NO: 94651 - RNA, 32 nt, Human
cauucuggccaacauagugaaaccccaucucu

SEQ ID NO: 94652 - RNA, 32 nt, Human
cauucuggccaacauagugaaaccccgucucu

SEQ ID NO: 94653 - RNA, 32 nt, Human
cauucuggccaacauggugaaaccccuucucu

SEQ ID NO: 94654 - RNA, 32 nt, Human
cauucuggccaacauggugaaacccuguuucu

SEQ ID NO: 94655 - RNA, 32 nt, Human
cauucuggccugggugacagaguuagacugug

SEQ ID NO: 94656 - RNA, 32 nt, Human
cauucugggaggccgaggcgggcagaucacuu

SEQ ID NO: 94657 - RNA, 32 nt, Human
cauucugggaugcagcagcuacugcccacaga

SEQ ID NO: 94658 - RNA, 32 nt, Human
cauucugggcuuugcuguaucuaucuagugcc

SEQ ID NO: 94659 - RNA, 32 nt, Human
cauucuggggcagauguuugggccgggaacaa

SEQ ID NO: 94660 - RNA, 32 nt, Human
cauucugggguuucuugaaucuuguccaaaaa

SEQ ID NO: 94661 - RNA, 32 nt, Human
cauucuggugcuguccucacucgccccuggcc

SEQ ID NO: 94662 - RNA, 32 nt, Human
cauucuguaccccuuccccagccugggccuug

SEQ ID NO: 94663 - RNA, 32 nt, Human
cauucugucacccagacuggagugcagugcca

SEQ ID NO: 94664 - RNA, 32 nt, Human
cauucugucacccaggccggagugcaguggug

SEQ ID NO: 94665 - RNA, 32 nt, Human
cauucugucacccaggcuagagcgcaguggca

SEQ ID NO: 94666 - RNA, 32 nt, Human
cauucugucacccaggcuagaguacaguggga

SEQ ID NO: 94667 - RNA, 32 nt, Human
cauucugucacccaggcuggaguccaaugggg

SEQ ID NO: 94668 - RNA, 32 nt, Human
cauucugucacccaggcuggagugcaaaggug

SEQ ID NO: 94669 - RNA, 32 nt, Human
cauucugucacccaggcuggagugcaguggcg

SEQ ID NO: 94670 - RNA, 32 nt, Human
cauucugucacccaggcuggagugcaguggug

SEQ ID NO: 94671 - RNA, 32 nt, Human
cauucugucacccgggcuggagugcaguggcg

SEQ ID NO: 94672 - RNA, 32 nt, Human
cauucugucacucaggcuggagugcaguggcg

SEQ ID NO: 94673 - RNA, 18 nt, Human
cauucuguccccuuccca

SEQ ID NO: 94674 - RNA, 32 nt, Human
cauucugucgcccaggcuggaguguagugacg

SEQ ID NO: 94675 - RNA, 32 nt, Human
cauucugucgcccuggcuggagugcaauggug

SEQ ID NO: 94676 - RNA, 32 nt, Human
cauucugucucugcuuggcuuccccuccaccc

SEQ ID NO: 94677 - RNA, 32 nt, Human
cauucugucuucaugaggucucacagucgacg

SEQ ID NO: 94678 - RNA, 32 nt, Human
cauucugugagauuugacagauggugacaaua

SEQ ID NO: 94679 - RNA, 32 nt, Human
cauucuguggucucugaaugugccuucccccu

SEQ ID NO: 94680 - RNA, 32 nt, Human
cauucugugguguuucgugcugucuuaaauaa

SEQ ID NO: 94681 - RNA, 32 nt, Human
cauucuguugcccaaguuggagugcaguggca

SEQ ID NO: 94682 - RNA, 32 nt, Human
cauucuguugcccaggcuggagugcaauggca

SEQ ID NO: 94683 - RNA, 32 nt, Human
cauucuguugcccaggcuggagugcaguggcg

SEQ ID NO: 94684 - RNA, 32 nt, Human
cauucuguugcccaggcuggagugcaguggug

SEQ ID NO: 94685 - RNA, 32 nt, Human
cauucuguugcccaugcuggagugcaguggcg

SEQ ID NO: 94686 - RNA, 32 nt, Human
cauucuguugccuaggcuggagugcaguggcg

SEQ ID NO: 94687 - RNA, 32 nt, Human
cauucuuaacauuugggcugugcaaaaacagc

SEQ ID NO: 94688 - RNA, 32 nt, Human
cauucuuagaacuuacacaucuagaacagcuu

SEQ ID NO: 94689 - RNA, 32 nt, Human
cauucuuaggguuuuuccaucccugggguuug

SEQ ID NO: 94690 - RNA, 31 nt, Human
cauucuuagucauaggagguuggcaggacgg

SEQ ID NO: 94691 - RNA, 23 nt, Human
cauucuucacauguuugcuguua

SEQ ID NO: 94692 - RNA, 32 nt, Human
cauucuucacugagugcugcugacuucaacgu

SEQ ID NO: 94693 - RNA, 32 nt, Human
cauucuuccaccucauugaauugcaugcugua

SEQ ID NO: 94694 - RNA, 32 nt, Human
cauucuucccuuuggagaccagucuaggggug

SEQ ID NO: 94695 - RNA, 32 nt, Human
cauucuuccuaacagcugggguugugaggaau

SEQ ID NO: 94696 - RNA, 32 nt, Human
cauucuucuaaccagcccugacauucucauga

SEQ ID NO: 94697 - RNA, 32 nt, Human
cauucuucuacaggaauggaaaaagaguuggg

SEQ ID NO: 94698 - RNA, 32 nt, Human
cauucuucugcucuccugacuuagagaaaugg

SEQ ID NO: 94699 - RNA, 32 nt, Human
cauucuucuggcuuucucucugucgaggacuu

SEQ ID NO: 94700 - RNA, 32 nt, Human
cauucuucuucacgucaauacacuucauauua

SEQ ID NO: 94701 - RNA, 32 nt, Human
cauucuucuuuaccuggucuccuuccuucguc

SEQ ID NO: 94702 - RNA, 32 nt, Human
cauucuugaagucagggagaccaagaacccac

SEQ ID NO: 94703 - RNA, 32 nt, Human
cauucuugagcuccagccuggcuaucucuuuc

SEQ ID NO: 94704 - RNA, 32 nt, Human
cauucuugaggugacaaaauuauugaaaugaa

SEQ ID NO: 94705 - RNA, 32 nt, Human
cauucuugcaaagaaauaccugagacugggua

SEQ ID NO: 94706 - RNA, 18 nt, Human
cauucuugcagcuuggac

SEQ ID NO: 94707 - RNA, 31 nt, Human
cauucuugccucucccuuugucacaguguug

SEQ ID NO: 94708 - RNA, 32 nt, Human
cauucuugcucccauuccugaagcuacagauu

SEQ ID NO: 94709 - RNA, 19 nt, Human
cauucuugcugucaucuca

SEQ ID NO: 94710 - RNA, 21 nt, Human
cauucuugcuucccugacuca

SEQ ID NO: 94711 - RNA, 22 nt, Human
cauucuuggaauaaauucacuc

SEQ ID NO: 94712 - RNA, 32 nt, Human
cauucuuggacaacuuucucuguucuaguuca

SEQ ID NO: 94713 - RNA, 19 nt, Human
cauucuuggauuuaacuua

SEQ ID NO: 94714 - RNA, 32 nt, Human
cauucuuggcauugcaaccuccauuucuagcu

SEQ ID NO: 94715 - RNA, 32 nt, Human
cauucuuguaaucuucuaugguguuuuguggc

SEQ ID NO: 94716 - RNA, 21 nt, Human
cauucuuguguugucccacca

SEQ ID NO: 94717 - RNA, 32 nt, Human
cauucuuguuucaucccugcuucuggacuugg

SEQ ID NO: 94718 - RNA, 21 nt, Human
cauucuuguuuuuucaucuca

SEQ ID NO: 94719 - RNA, 32 nt, Human
cauucuuucccaccauccuuuuugacuguuga

SEQ ID NO: 94720 - RNA, 32 nt, Human
cauucuuuguaccugaggaacauagauucucu

SEQ ID NO: 94721 - RNA, 21 nt, Human
cauucuuuuaguaaugucaua

SEQ ID NO: 94722 - RNA, 32 nt, Human
cauucuuuucucuuggaaagguaggaggcugc

SEQ ID NO: 94723 - RNA, 32 nt, Human
cauucuuuugaaaauauccaugaaagccuauu

SEQ ID NO: 94724 - RNA, 32 nt, Human
cauucuuuugcccaggcuggagugcaguggca

SEQ ID NO: 94725 - RNA, 20 nt, Human
cauucuuuugugauauguua

SEQ ID NO: 94726 - RNA, 32 nt, Human
cauugaaaaccagauuccuccuccaggcaaau

SEQ ID NO: 94727 - RNA, 32 nt, Human
cauugaaaacucaagagcuucgagagccagug

SEQ ID NO: 94728 - RNA, 32 nt, Human
cauugaacaguuacagaucugggacagucccu

SEQ ID NO: 94729 - RNA, 32 nt, Human
cauugaacccaggaggcggagcuugcagugag

SEQ ID NO: 94730 - RNA, 32 nt, Human
cauugaaccucuuggguucaagugauucuugu

SEQ ID NO: 94731 - RNA, 32 nt, Human
cauugaacuagugcuggaauaagaacuaauag

SEQ ID NO: 94732 - RNA, 32 nt, Human
cauugaacuuagagugcuggcucugcuauaug

SEQ ID NO: 94733 - RNA, 32 nt, Human
cauugaagacuaccuaugauagaggcaauguu

SEQ ID NO: 94734 - RNA, 32 nt, Human
cauugaagauucacuuacaaaggaauguuuca

SEQ ID NO: 94735 - RNA, 32 nt, Human
cauugaaggggaccagccgcugaagggauucu

SEQ ID NO: 94736 - RNA, 31 nt, Human
cauugaaguuuaguaguaaaagacugguuaa

SEQ ID NO: 94737 - RNA, 32 nt, Human
cauugaauauauagugguagcagguguacaaa

SEQ ID NO: 94738 - RNA, 32 nt, Human
cauugaaugauggcuaagguguuccaaguauu

SEQ ID NO: 94739 - RNA, 27 nt, Human
cauugaaugugaauggcccucagaaaa

SEQ ID NO: 94740 - RNA, 32 nt, Human
cauugaauuaccacuccugauacagggcuuua

SEQ ID NO: 94741 - RNA, 32 nt, Human
cauugacaaucagccaugucauccaggccucu

SEQ ID NO: 94742 - RNA, 32 nt, Human
cauugacaauggcuccagcacaugcaaagcug

SEQ ID NO: 94743 - RNA, 32 nt, Human
cauugacacauggacucugccugggcauguua

SEQ ID NO: 94744 - RNA, 32 nt, Human
cauugacagaggcuguauguuuggaaagagaa

SEQ ID NO: 94745 - RNA, 32 nt, Human
cauugacagauggagaaacugaggcccaggcc

SEQ ID NO: 94746 - RNA, 32 nt, Human
cauugacagccauguguguggggccuggaagu

SEQ ID NO: 94747 - RNA, 32 nt, Human
cauugacaguguucuaucaccaaugcaaauaa

SEQ ID NO: 94748 - RNA, 32 nt, Human
cauugacauguccugugcuaaauaugaauuca

SEQ ID NO: 94749 - RNA, 32 nt, Human
cauugaccaggaugaucacauggaaggcggcg

SEQ ID NO: 94750 - RNA, 32 nt, Human
cauugaccauggggcuccaucuaggcucugaa

SEQ ID NO: 94751 - RNA, 32 nt, Human
cauugacggagggaggaggaggaggaagaggu

SEQ ID NO: 94752 - RNA, 32 nt, Human
cauugacuccaggacuccacagaauggagcaa

SEQ ID NO: 94753 - RNA, 32 nt, Human
cauugacuuauucacagaugccaucaagcuga

SEQ ID NO: 94754 - RNA, 32 nt, Human
cauugacuuguuugaaccuuagugccuuaccc

SEQ ID NO: 94755 - RNA, 32 nt, Human
cauugacuuuucccaucucuguuaacccacga

SEQ ID NO: 94756 - RNA, 32 nt, Human
cauugagaaaguuauggaagcaacugucacuc

SEQ ID NO: 94757 - RNA, 32 nt, Human
cauugagaacacaagcagcagcaacaucaaca

SEQ ID NO: 94758 - RNA, 32 nt, Human
cauugagaccaggagaucaaggcugcagcgag

SEQ ID NO: 94759 - RNA, 32 nt, Human
cauugagagccuuccauuggucuuccauccgu

SEQ ID NO: 94760 - RNA, 32 nt, Human
cauugagcaaagcaguucuuucagaucugcaa

SEQ ID NO: 94761 - RNA, 32 nt, Human
cauugagcagcugaagcuaacucaugacucug

SEQ ID NO: 94762 - RNA, 17 nt, Human
cauugagcccaaaguca

SEQ ID NO: 94763 - RNA, 32 nt, Human
cauugagcccaggaguccagccugggcaaaau

SEQ ID NO: 94764 - RNA, 21 nt, Human
cauugagcucaccagcgccac

SEQ ID NO: 94765 - RNA, 32 nt, Human
cauugagcucugggacaggacaccuuggguuu

SEQ ID NO: 94766 - RNA, 32 nt, Human
cauugagcugccuccagccugguggcccagcu

SEQ ID NO: 94767 - RNA, 32 nt, Human
cauugagcuuccugccugacccuagagcuccc

SEQ ID NO: 94768 - RNA, 32 nt, Human
cauugaggacaacagccccagcucuuuuucuu

SEQ ID NO: 94769 - RNA, 32 nt, Human
cauugagggcagaguccucauagccuaaucac

SEQ ID NO: 94770 - RNA, 32 nt, Human
cauugagguauggcagagaagacacauauucc

SEQ ID NO: 94771 - RNA, 32 nt, Human
cauugaggucucgguggaugugucugcgccga

SEQ ID NO: 94772 - RNA, 32 nt, Human
cauugagguucacuuccuggauccuuacugcu

SEQ ID NO: 94773 - RNA, 32 nt, Human
cauugagucaucaggaaaacugaagaucuccc

SEQ ID NO: 94774 - RNA, 32 nt, Human
cauugaguuccucaaggaagcuucugucauga

SEQ ID NO: 94775 - RNA, 32 nt, Human
cauugaguuccugcugcugucucccaacaggu

SEQ ID NO: 94776 - RNA, 32 nt, Human
cauugauagucuugugugucucacauaucagc

SEQ ID NO: 94777 - RNA, 32 nt, Human
cauugauauguucaccaaccaggaugcuucac

SEQ ID NO: 94778 - RNA, 32 nt, Human
cauugauauuauccucugaaugcaguuaaggc

SEQ ID NO: 94779 - RNA, 32 nt, Human
cauugaucccuauuucccucuggaucaugacu

SEQ ID NO: 94780 - RNA, 32 nt, Human
cauugaucguguccugugcugaagauguuucc

SEQ ID NO: 94781 - RNA, 32 nt, Human
cauugaucugcuuuuccuaaucaugucaguga

SEQ ID NO: 94782 - RNA, 32 nt, Human
cauugaugacuggagcucugaggucugaggga

SEQ ID NO: 94783 - RNA, 32 nt, Human
cauugauggagcaccugcugcccacagcgucu

SEQ ID NO: 94784 - RNA, 32 nt, Human
cauugaugggaggccauggucguggcuguggc

SEQ ID NO: 94785 - RNA, 32 nt, Human
cauugauguugauguuccaccagaaacaccuu

SEQ ID NO: 94786 - RNA, 32 nt, Human
cauugauugagggaggaggaggaggaagaggu

SEQ ID NO: 94787 - RNA, 32 nt, Human
cauugauuuuuaacaugguucccaccauguaa

SEQ ID NO: 94788 - RNA, 32 nt, Human
cauugauuuuucuccccgugcucccccguucu

SEQ ID NO: 94789 - RNA, 32 nt, Human
cauugcaaagcccucacucaccuucuggucuc

SEQ ID NO: 94790 - RNA, 32 nt, Human
cauugcaaccuccaccuuccagauucucuugc

SEQ ID NO: 94791 - RNA, 32 nt, Human
cauugcaaccuccgccucccucccagguucaa

SEQ ID NO: 94792 - RNA, 32 nt, Human
cauugcacaagaagagccgcugccaaccaucc

SEQ ID NO: 94793 - RNA, 32 nt, Human
cauugcacaaggcagaaaacagcucuggcagg

SEQ ID NO: 94794 - RNA, 32 nt, Human
cauugcacacaugaggaggguaaguggccagc

SEQ ID NO: 94795 - RNA, 32 nt, Human
cauugcacagaagggaaaggucucaaggaaga

SEQ ID NO: 94796 - RNA, 21 nt, Human
cauugcaccccagccugggca

SEQ ID NO: 94797 - RNA, 21 nt, Human
cauugcacuccaaccugggca

SEQ ID NO: 94798 - RNA, 21 nt, Human
cauugcacuccagcccaggua

SEQ ID NO: 94799 - RNA, 20 nt, Human
cauugcacuccagccuaggc

SEQ ID NO: 94800 - RNA, 21 nt, Human
cauugcacuccagccuaggca

SEQ ID NO: 94801 - RNA, 21 nt, Human
cauugcacuccagccucagca

SEQ ID NO: 94802 - RNA, 21 nt, Human
cauugcacuccagccuggaca

SEQ ID NO: 94803 - RNA, 21 nt, Human
cauugcacuccagccugggca

SEQ ID NO: 94804 - RNA, 21 nt, Human
cauugcacuccagcucaggca

SEQ ID NO: 94805 - RNA, 32 nt, Human
cauugcacugcaccugggcaacaagagugaaa

SEQ ID NO: 94806 - RNA, 32 nt, Human
cauugcacugguuaguuuugcggugucugccu

SEQ ID NO: 94807 - RNA, 32 nt, Human
cauugcagagcgggaggccaggaggacucguc

SEQ ID NO: 94808 - RNA, 32 nt, Human
cauugcagauagcgugaaauuaaagauuacag

SEQ ID NO: 94809 - RNA, 32 nt, Human
cauugcagcaaccuuccuucucagccagccua

SEQ ID NO: 94810 - RNA, 24 nt, Human
cauugcagccucaaccucccaggc

SEQ ID NO: 94811 - RNA, 32 nt, Human
cauugcagccucaaccucccaggcucaaucga

SEQ ID NO: 94812 - RNA, 24 nt, Human
cauugcagccucgaccucccaggu

SEQ ID NO: 94813 - RNA, 32 nt, Human
cauugcagccuggugacagagugagacuccau

SEQ ID NO: 94814 - RNA, 32 nt, Human
cauugcagcuacauacuugagauguacucuug

SEQ ID NO: 94815 - RNA, 32 nt, Human
cauugcagcuuggaaucuauuuuaugucacca

SEQ ID NO: 94816 - RNA, 32 nt, Human
cauugcagcuuugaccuccugggcuuagguga

SEQ ID NO: 94817 - RNA, 32 nt, Human
cauugcaggagagaaucugaagggaugaugga

SEQ ID NO: 94818 - RNA, 31 nt, Human
cauugcagugcggcggcccuaccucggcccu

SEQ ID NO: 94819 - RNA, 32 nt, Human
cauugcaucuguguccuguugucauuuauguu

SEQ ID NO: 94820 - RNA, 32 nt, Human
cauugcaugaggaaaauuuuuccagaacaaca

SEQ ID NO: 94821 - RNA, 21 nt, Human
cauugcauuccagccuaggca

SEQ ID NO: 94822 - RNA, 32 nt, Human
cauugcauugcacuccagcuugagcaacagag

SEQ ID NO: 94823 - RNA, 32 nt, Human
cauugcauuguacccauaggcagaaaauuaag

SEQ ID NO: 94824 - RNA, 32 nt, Human
cauugccaaccauauuggaucugcuugcuguc

SEQ ID NO: 94825 - RNA, 32 nt, Human
cauugccaaccucacugacacagggucauagu

SEQ ID NO: 94826 - RNA, 32 nt, Human
cauugccaaugagcauggcaagaaaaugcucg

SEQ ID NO: 94827 - RNA, 32 nt, Human
cauugccacacgccccgacgacugccugaugu

SEQ ID NO: 94828 - RNA, 32 nt, Human
cauugccacagucaacuauuuguacuucuaga

SEQ ID NO: 94829 - RNA, 32 nt, Human
cauugccaggcaacaggacuaaacuaccucca

SEQ ID NO: 94830 - RNA, 32 nt, Human
cauugccauaaauuuugccuuguacucagaga

SEQ ID NO: 94831 - RNA, 32 nt, Human
cauugccauccuguugcacugcagcuugugua

SEQ ID NO: 94832 - RNA, 32 nt, Human
cauugccaugguacucaaagguagaagagccu

SEQ ID NO: 94833 - RNA, 32 nt, Human
cauugcccaagagagagggcagggaacaggcu

SEQ ID NO: 94834 - RNA, 32 nt, Human
cauugcccaaguuccagcauccuucccaugaa

SEQ ID NO: 94835 - RNA, 32 nt, Human
cauugcccaccuggcccuggcuugaugggcuc

SEQ ID NO: 94836 - RNA, 32 nt, Human
cauugcccaccuggcccuggcuugaugggcuu

SEQ ID NO: 94837 - RNA, 32 nt, Human
cauugcccaggcuggagugcagugagcuauua

SEQ ID NO: 94838 - RNA, 32 nt, Human
cauugcccagugagcccugcucuucucucccc

SEQ ID NO: 94839 - RNA, 32 nt, Human
cauugcccccuccacccacccccacgacccca

SEQ ID NO: 94840 - RNA, 32 nt, Human
cauugcccccucucuaccugagaacuagacuc

SEQ ID NO: 94841 - RNA, 32 nt, Human
cauugcccuaagaaucagaaguaaagauaauc

SEQ ID NO: 94842 - RNA, 32 nt, Human
cauugcccugcaguggacaggucuauagaucu

SEQ ID NO: 94843 - RNA, 32 nt, Human
cauugcccuucgggcuggagaugcuuugccgg

SEQ ID NO: 94844 - RNA, 32 nt, Human
cauugccucugccuugccccuaugccugcccg

SEQ ID NO: 94845 - RNA, 22 nt, Human
cauugccucuuuucucaucaca

SEQ ID NO: 94846 - RNA, 32 nt, Human
cauugccugaguaaaauuagguuuuuaggucu

SEQ ID NO: 94847 - RNA, 32 nt, Human
cauugccugcaagccuccaaagcuugucuuug

SEQ ID NO: 94848 - RNA, 32 nt, Human
cauugccugcagcagcuuguacugccuuuugg

SEQ ID NO: 94849 - RNA, 32 nt, Human
cauugccuguaagcagcacagaauuggugcca

SEQ ID NO: 94850 - RNA, 32 nt, Human
cauugccuguaaucccagcacuuugggaggcc

SEQ ID NO: 94851 - RNA, 32 nt, Human
cauugccuguaaucccagcuacuagggaggcu

SEQ ID NO: 94852 - RNA, 32 nt, Human
cauugccuguagucccagcuacuugggaggcu

SEQ ID NO: 94853 - RNA, 32 nt, Human
cauugccuguccccaucucaucccaggucacc

SEQ ID NO: 94854 - RNA, 32 nt, Human
cauugccugucucauuucccucccucccucug

SEQ ID NO: 94855 - RNA, 32 nt, Human
cauugcgaucagaauggagaagaaccauuugu

SEQ ID NO: 94856 - RNA, 32 nt, Human
cauugcgcacuuccaggacaacuuacauucgg

SEQ ID NO: 94857 - RNA, 32 nt, Human
cauugcgccacugcaaaccagccugggcaaua

SEQ ID NO: 94858 - RNA, 32 nt, Human
cauugcgccacugcacuccagcgcggaagaca

SEQ ID NO: 94859 - RNA, 32 nt, Human
cauugcgccuggcuaauuuuuguauuuuuagu

SEQ ID NO: 94860 - RNA, 32 nt, Human
cauugcuaccaaacuccuccugcacggucuug

SEQ ID NO: 94861 - RNA, 32 nt, Human
cauugcuaccucagugcuccuggaaacuuagc

SEQ ID NO: 94862 - RNA, 32 nt, Human
cauugcuacuaaaaauacaaaaauuacccggg

SEQ ID NO: 94863 - RNA, 32 nt, Human
cauugcuagaagcagcaggaauuggcaaauug

SEQ ID NO: 94864 - RNA, 32 nt, Human
cauugcuagggaggcaaaggaggagcaaaguc

SEQ ID NO: 94865 - RNA, 32 nt, Human
cauugcuagucuuaugacagagggagaagaca

SEQ ID NO: 94866 - RNA, 32 nt, Human
cauugcucagcucucccuugaguggcacuuag

SEQ ID NO: 94867 - RNA, 32 nt, Human
cauugcucucccacugcagaacauggccucua

SEQ ID NO: 94868 - RNA, 32 nt, Human
cauugcucuccuauucccacgccuuaacacag

SEQ ID NO: 94869 - RNA, 32 nt, Human
cauugcucugggggcugggauuccuggcuaag

SEQ ID NO: 94870 - RNA, 32 nt, Human
cauugcugaaguuuauucucagaucugccagg

SEQ ID NO: 94871 - RNA, 32 nt, Human
cauugcugaccagcugaguccuggagggcagu

SEQ ID NO: 94872 - RNA, 32 nt, Human
cauugcugagcacacaguugcagcucaauaaa

SEQ ID NO: 94873 - RNA, 32 nt, Human
cauugcugaggagaguggaggccaggcugggg

SEQ ID NO: 94874 - RNA, 32 nt, Human
cauugcugccauauucagcagucuguuccuuc

SEQ ID NO: 94875 - RNA, 32 nt, Human
cauugcugccuccccaucgagccuccuuggca

SEQ ID NO: 94876 - RNA, 32 nt, Human
cauugcugcucaucugugccuuuguccaucua

SEQ ID NO: 94877 - RNA, 32 nt, Human
cauugcugcugcuaccugcuuuccagagccuu

SEQ ID NO: 94878 - RNA, 32 nt, Human
cauugcugggccagcuugaagggaaggcccgu

SEQ ID NO: 94879 - RNA, 32 nt, Human
cauugcugguguuaacuuauugccaaauucuu

SEQ ID NO: 94880 - RNA, 32 nt, Human
cauugcuguaccacaucugcucuagggaaucu

SEQ ID NO: 94881 - RNA, 24 nt, Human
cauugcuuaugucaaauggagcug

SEQ ID NO: 94882 - RNA, 32 nt, Human
cauugcuucucccucacuucuuuccucaaaga

SEQ ID NO: 94883 - RNA, 32 nt, Human
cauugcuucuuggccuucuggcuaagaucaug

SEQ ID NO: 94884 - RNA, 24 nt, Human
cauugcuuguuugcaaaugcucua

SEQ ID NO: 94885 - RNA, 32 nt, Human
cauugcuuugggcuggggccaugggaagaaac

SEQ ID NO: 94886 - RNA, 32 nt, Human
cauuggaaacccuauuuccccaccccagcuca

SEQ ID NO: 94887 - RNA, 32 nt, Human
cauuggaaaugcugggcacauugcagucagug

SEQ ID NO: 94888 - RNA, 32 nt, Human
cauuggaacauacacuuuauuauguuacaaaa

SEQ ID NO: 94889 - RNA, 32 nt, Human
cauuggaaccguaucaggcuuggggcuauuca

SEQ ID NO: 94890 - RNA, 32 nt, Human
cauuggaacuucugaucuucaagcagggauuc

SEQ ID NO: 94891 - RNA, 32 nt, Human
cauuggaagaggaaaaugaugagacaucuagg

SEQ ID NO: 94892 - RNA, 32 nt, Human
cauuggaagcccuucuaaguaccauuuucauu

SEQ ID NO: 94893 - RNA, 32 nt, Human
cauuggaauagaagaaaauguacaggacacau

SEQ ID NO: 94894 - RNA, 32 nt, Human
cauuggaaugugauggugcucacuuugggcau

SEQ ID NO: 94895 - RNA, 32 nt, Human
cauuggacaacaugagcacauuccagucaauc

SEQ ID NO: 94896 - RNA, 32 nt, Human
cauuggaggaagggacagcugcuuggguucua

SEQ ID NO: 94897 - RNA, 32 nt, Human
cauuggaggaucucucuuuucucuuccaccuc

SEQ ID NO: 94898 - RNA, 32 nt, Human
cauuggaggcagacugcucucaggagacuacu

SEQ ID NO: 94899 - RNA, 32 nt, Human
cauuggagggcaggacucuugauuguguaauu

SEQ ID NO: 94900 - RNA, 32 nt, Human
cauuggaggugcuugaguaacugugaauacag

SEQ ID NO: 94901 - RNA, 32 nt, Human
cauuggaucacaaaagcuguauucuucccccu

SEQ ID NO: 94902 - RNA, 32 nt, Human
cauuggauucugagagcugugcaucagcuaga

SEQ ID NO: 94903 - RNA, 32 nt, Human
cauuggauuuggugacugucucauugugccau

SEQ ID NO: 94904 - RNA, 32 nt, Human
cauuggcacugaggccagauggccuuggguuu

SEQ ID NO: 94905 - RNA, 32 nt, Human
cauuggcaggacuucagaaugccgugggcucc

SEQ ID NO: 94906 - RNA, 32 nt, Human
cauuggcauucagaggaugcuggacauuaacu

SEQ ID NO: 94907 - RNA, 32 nt, Human
cauuggccaguggcagcagccuccucauccuc

SEQ ID NO: 94908 - RNA, 32 nt, Human
cauuggccauggccauggcaacaugcucaguu

SEQ ID NO: 94909 - RNA, 20 nt, Human
cauuggcccagcaggcccag

SEQ ID NO: 94910 - RNA, 32 nt, Human
cauuggccgggccuggccagcagugcacagug

SEQ ID NO: 94911 - RNA, 32 nt, Human
cauuggccuagacgcaaaccagcauuuugcag

SEQ ID NO: 94912 - RNA, 31 nt, Human
cauuggccucugcaggcuugccaaaguagga

SEQ ID NO: 94913 - RNA, 32 nt, Human
cauuggccuggcuuccccuugagacuggggau

SEQ ID NO: 94914 - RNA, 32 nt, Human
cauuggccugggccaguucuccacuccuaggg

SEQ ID NO: 94915 - RNA, 32 nt, Human
cauuggccuucccaggcucacaguucugucuu

SEQ ID NO: 94916 - RNA, 32 nt, Human
cauuggcgagaacacaggacguggugguuccu

SEQ ID NO: 94917 - RNA, 32 nt, Human
cauuggcgagaucacagcucacugcagccuug

SEQ ID NO: 94918 - RNA, 32 nt, Human
cauuggcucacugcagccuagaccucccagcu

SEQ ID NO: 94919 - RNA, 32 nt, Human
cauuggcuccauccuccugguugugcucugca

SEQ ID NO: 94920 - RNA, 22 nt, Human
cauuggcucuucacacccaaau

SEQ ID NO: 94921 - RNA, 32 nt, Human
cauuggcugggauuccuguuccugggugcgcc

SEQ ID NO: 94922 - RNA, 21 nt, Human
cauuggcugggcagcgugagu

SEQ ID NO: 94923 - RNA, 32 nt, Human
cauuggcugggcagcgugaguccuucggucgg

SEQ ID NO: 94924 - RNA, 18 nt, Human
cauuggcugggugcagug

SEQ ID NO: 94925 - RNA, 32 nt, Human
cauugggaaauauuuaaagcaacagacaggcu

SEQ ID NO: 94926 - RNA, 32 nt, Human
cauugggaaauggcugaugaguucacauuuag

SEQ ID NO: 94927 - RNA, 32 nt, Human
cauugggagagagguucuaacacacugaaggc

SEQ ID NO: 94928 - RNA, 32 nt, Human
cauugggagauggguuucuuauucugccuuua

SEQ ID NO: 94929 - RNA, 32 nt, Human
cauugggagcagagaagaagcaaccaggggcc

SEQ ID NO: 94930 - RNA, 32 nt, Human
cauugggaggccaaggcaggcagaucacgagg

SEQ ID NO: 94931 - RNA, 32 nt, Human
cauugggaggcugaggugggcggaucaccuga

SEQ ID NO: 94932 - RNA, 32 nt, Human
cauugggauuacaggcaucagccaccacaccu

SEQ ID NO: 94933 - RNA, 32 nt, Human
cauugggcagcaaaagcagggugggguccagc

SEQ ID NO: 94934 - RNA, 32 nt, Human
cauugggccacugcagucgagccugggcgaca

SEQ ID NO: 94935 - RNA, 32 nt, Human
cauugggccacuuccuaaugcccuauguguau

SEQ ID NO: 94936 - RNA, 32 nt, Human
cauugggccuuuccacgccccuggguggcggc

SEQ ID NO: 94937 - RNA, 32 nt, Human
cauugggcuaauaucugcugugcuucucugac

SEQ ID NO: 94938 - RNA, 32 nt, Human
cauugggcugagugugguggcucaugccugua

SEQ ID NO: 94939 - RNA, 32 nt, Human
cauuggggaaaaggaaaggaucagacauuucg

SEQ ID NO: 94940 - RNA, 32 nt, Human
cauuggggaaacggggugaacuucagguggau

SEQ ID NO: 94941 - RNA, 32 nt, Human
cauuggggcagcugucacaagcuguucacaca

SEQ ID NO: 94942 - RNA, 32 nt, Human
cauuggggcaggcagggccgggaagggaagua

SEQ ID NO: 94943 - RNA, 32 nt, Human
cauuggggccccuuaaggaaacccaggccucc

SEQ ID NO: 94944 - RNA, 32 nt, Human
cauuggggcucagguaucacuaccucagggaa

SEQ ID NO: 94945 - RNA, 32 nt, Human
cauugggggaagggaggcgaaggccugagguu

SEQ ID NO: 94946 - RNA, 31 nt, Human
cauuggguaucauucauuacauucuugaguu

SEQ ID NO: 94947 - RNA, 32 nt, Human
cauuggguauuuucacugccucauagagucua

SEQ ID NO: 94948 - RNA, 32 nt, Human
cauugggucucgaccaauugccuaauuauaag

SEQ ID NO: 94949 - RNA, 32 nt, Human
cauugggucuuucugccacaggcccuugcaca

SEQ ID NO: 94950 - RNA, 32 nt, Human
cauugggugaacacacaggcuggcugcucugg

SEQ ID NO: 94951 - RNA, 32 nt, Human
cauuggguggagacucucacuuauguuaaugc

SEQ ID NO: 94952 - RNA, 32 nt, Human
cauuggguuaggggacacugaacugcuuuuua

SEQ ID NO: 94953 - RNA, 32 nt, Human
cauugguaauccaggcugcaccuacaaguacc

SEQ ID NO: 94954 - RNA, 32 nt, Human
cauuggucugacuugcugugaagaccuuaagc

SEQ ID NO: 94955 - RNA, 32 nt, Human
cauuggugcuuugaugaaaaggucaguuggcu

SEQ ID NO: 94956 - RNA, 32 nt, Human
cauugguggggcuggcacgaauccagaucugg

SEQ ID NO: 94957 - RNA, 32 nt, Human
cauugguguguucuuuaacuugcuacuuggag

SEQ ID NO: 94958 - RNA, 32 nt, Human
cauugguuauuacccuguguaccuugucccuc

SEQ ID NO: 94959 - RNA, 32 nt, Human
cauugguucucuucccccagcacccugaaacg

SEQ ID NO: 94960 - RNA, 32 nt, Human
cauugguuucuucucagguuaaagcuguauuu

SEQ ID NO: 94961 - RNA, 32 nt, Human
cauugguuuguagcauuuaacauaacuaguau

SEQ ID NO: 94962 - RNA, 24 nt, Human
cauuguaaaaccccaucucuacua

SEQ ID NO: 94963 - RNA, 32 nt, Human
cauuguaaacaacagacuuacguuaaacuuca

SEQ ID NO: 94964 - RNA, 32 nt, Human
cauuguaaaggugggcaaagccuaguagagaa

SEQ ID NO: 94965 - RNA, 32 nt, Human
cauuguaaccucaggaaacaguuuauuuuggg

SEQ ID NO: 94966 - RNA, 32 nt, Human
cauuguaagaagagcauguaguugggagauau

SEQ ID NO: 94967 - RNA, 32 nt, Human
cauuguaagaagcagguaggcaaugugggagu

SEQ ID NO: 94968 - RNA, 32 nt, Human
cauuguaagaguuccacagagcucugggcacu

SEQ ID NO: 94969 - RNA, 32 nt, Human
cauuguaagauccaucuacacagucguugucc

SEQ ID NO: 94970 - RNA, 32 nt, Human
cauuguaauugugugccuucucaguuauuggg

SEQ ID NO: 94971 - RNA, 32 nt, Human
cauuguaauuuaaaaugcauugucuauuaaua

SEQ ID NO: 94972 - RNA, 32 nt, Human
cauuguaccagccacuuguccuagccaaaugu

SEQ ID NO: 94973 - RNA, 32 nt, Human
cauuguagaauagaacuggaauuccauucuuu

SEQ ID NO: 94974 - RNA, 32 nt, Human
cauuguagauucaagaaauuaguuuucaguuu

SEQ ID NO: 94975 - RNA, 30 nt, Human
cauuguagccucuuuauggucucugagaaa

SEQ ID NO: 94976 - RNA, 32 nt, Human
cauuguagccugggcaacagagcaagacccug

SEQ ID NO: 94977 - RNA, 32 nt, Human
cauuguagcuucaaccuccugagcucaagcaa

SEQ ID NO: 94978 - RNA, 32 nt, Human
cauuguaggagguacucaaggguuugggggca

SEQ ID NO: 94979 - RNA, 32 nt, Human
cauuguagggaaggggacacugaggggcagag

SEQ ID NO: 94980 - RNA, 32 nt, Human
cauuguagguggcugugucuguugcaucauca

SEQ ID NO: 94981 - RNA, 32 nt, Human
cauuguauaaaugacucuggccuguguguacu

SEQ ID NO: 94982 - RNA, 32 nt, Human
cauuguauuaagaguccagucacuguauaugg

SEQ ID NO: 94983 - RNA, 32 nt, Human
cauuguauucacaaccaugugucuucauuuau

SEQ ID NO: 94984 - RNA, 32 nt, Human
cauugucaacuauguccgccucauagacaggg

SEQ ID NO: 94985 - RNA, 32 nt, Human
cauugucaagauuuguucugugguguagguau

SEQ ID NO: 94986 - RNA, 32 nt, Human
cauugucaagugagccugagggaggcugaggg

SEQ ID NO: 94987 - RNA, 32 nt, Human
cauugucacaccaauuccugcuuuaauuaaug

SEQ ID NO: 94988 - RNA, 31 nt, Human
cauugucacagcuaccaaagugugguuugca

SEQ ID NO: 94989 - RNA, 32 nt, Human
cauugucacccaggcuggaguacaguggcaug

SEQ ID NO: 94990 - RNA, 32 nt, Human
cauugucacugcaaaucgacaccuauuaaugg

SEQ ID NO: 94991 - RNA, 32 nt, Human
cauugucagcacagccuaggagggucagauuc

SEQ ID NO: 94992 - RNA, 32 nt, Human
cauugucaggcacugcugccuuccugccuccc

SEQ ID NO: 94993 - RNA, 32 nt, Human
cauugucagggguucuggaaugggaccagggg

SEQ ID NO: 94994 - RNA, 32 nt, Human
cauugucauggugaaugccccgcuguagcucc

SEQ ID NO: 94995 - RNA, 32 nt, Human
cauuguccaaaaagaaauugcauuucaagcag

SEQ ID NO: 94996 - RNA, 32 nt, Human
cauuguccaaauauagucacauacauuugacc

SEQ ID NO: 94997 - RNA, 32 nt, Human
cauuguccacuucauugcugugguguugggca

SEQ ID NO: 94998 - RNA, 32 nt, Human
cauuguccgaauauagucacauacauuugaac

SEQ ID NO: 94999 - RNA, 32 nt, Human
cauuguccucaaguccuucgcagacagugcac

SEQ ID NO: 95000 - RNA, 32 nt, Human
cauuguccuguauuuaucacaguuucuguuga

SEQ ID NO: 95001 - RNA, 32 nt, Human
cauuguccuuucuccaguuuuuguuccagaau

SEQ ID NO: 95002 - RNA, 32 nt, Human
cauugucuacccacacaaauccucaggaaacc

SEQ ID NO: 95003 - RNA, 32 nt, Human
cauugucucuuuauuuguuagcauuaaacaaa

SEQ ID NO: 95004 - RNA, 32 nt, Human
cauugucugccucaucaggaacuaucuguaga

SEQ ID NO: 95005 - RNA, 32 nt, Human
cauugucugggaugugaggagcgccucugccc

SEQ ID NO: 95006 - RNA, 32 nt, Human
cauugucuucaccaaucuucugaacccgugaa

SEQ ID NO: 95007 - RNA, 16 nt, Human
cauugucuugcugcca

SEQ ID NO: 95008 - RNA, 22 nt, Human
cauugucuugggauuucagucu

SEQ ID NO: 95009 - RNA, 32 nt, Human
cauugucuuucuugugccuuuuccuuggugag

SEQ ID NO: 95010 - RNA, 32 nt, Human
cauugucuuugucuuugagagcagcaguuuga

SEQ ID NO: 95011 - RNA, 22 nt, Human
cauugugaaaccccaucucugc

SEQ ID NO: 95012 - RNA, 32 nt, Human
cauugugaaagaguguuuccugccuccauuaa

SEQ ID NO: 95013 - RNA, 32 nt, Human
cauugugaauguguauguaaaauaugaagaca

SEQ ID NO: 95014 - RNA, 32 nt, Human
cauugugagcuucaguuucuucaucugcaaaa

SEQ ID NO: 95015 - RNA, 32 nt, Human
cauugugaggcaggucccaaaagggaaggcug

SEQ ID NO: 95016 - RNA, 21 nt, Human
cauugugauggccaucugccc

SEQ ID NO: 95017 - RNA, 32 nt, Human
cauugugcaacaucgguggauuuucuaaaaau

SEQ ID NO: 95018 - RNA, 32 nt, Human
cauugugcagcuuugcuagggaagaaaguggu

SEQ ID NO: 95019 - RNA, 32 nt, Human
cauugugccaucuucagcuccaguggcuuuag

SEQ ID NO: 95020 - RNA, 32 nt, Human
cauugugccccagugaugaaguugcuggacac

SEQ ID NO: 95021 - RNA, 32 nt, Human
cauugugccuuaaaaugagucauacaucuuuu

SEQ ID NO: 95022 - RNA, 32 nt, Human
cauugugcucuguagccuuggaaauguuuuug

SEQ ID NO: 95023 - RNA, 32 nt, Human
cauuguggagcacaggcuuacacccuucgugg

SEQ ID NO: 95024 - RNA, 32 nt, Human
cauuguggagccaacuccagggcuggggguca

SEQ ID NO: 95025 - RNA, 20 nt, Human
cauuguggagccagugaaug

SEQ ID NO: 95026 - RNA, 32 nt, Human
cauuguggaggccuggaagcugcggggccccc

SEQ ID NO: 95027 - RNA, 32 nt, Human
cauuguggcacaugccugcaaucccagcuacu

SEQ ID NO: 95028 - RNA, 32 nt, Human
cauuguggcagggagagaagccagacaugagu

SEQ ID NO: 95029 - RNA, 32 nt, Human
cauuguggcgcacaccuguauucccaucuagu

SEQ ID NO: 95030 - RNA, 32 nt, Human
cauuguggcuccugccacccuggcagaugacu

SEQ ID NO: 95031 - RNA, 32 nt, Human
cauuguggcuugacugaauuucucuaaugagu

SEQ ID NO: 95032 - RNA, 32 nt, Human
cauugugggagacggaauagagccaaguaagu

SEQ ID NO: 95033 - RNA, 31 nt, Human
cauugugggcccucugggcuccugccucaga

SEQ ID NO: 95034 - RNA, 32 nt, Human
cauuguggggaaaacuaaucccagggaaaaga

SEQ ID NO: 95035 - RNA, 32 nt, Human
cauuguggucaucagcuucaugacauuuuacc

SEQ ID NO: 95036 - RNA, 32 nt, Human
cauuguggugaguaccuguaagucccagcuac

SEQ ID NO: 95037 - RNA, 32 nt, Human
cauuguggugggcaccuguaaucccagcuacu

SEQ ID NO: 95038 - RNA, 32 nt, Human
cauugugguggucaccuguagucccagcugcu

SEQ ID NO: 95039 - RNA, 32 nt, Human
cauugugguguuugucuaccugacuguggaaa

SEQ ID NO: 95040 - RNA, 32 nt, Human
cauuguguaggugagagaaagagggaggagug

SEQ ID NO: 95041 - RNA, 32 nt, Human
cauuguguauaugugcuacauuuucuuuaucg

SEQ ID NO: 95042 - RNA, 32 nt, Human
cauuguguaucuauacauauggcucuugagga

SEQ ID NO: 95043 - RNA, 32 nt, Human
cauugugucgggcuacuccacccuguccacca

SEQ ID NO: 95044 - RNA, 25 nt, Human
cauugugucugagcagagcuggguc

SEQ ID NO: 95045 - RNA, 32 nt, Human
cauuguguggaugguggguugugcccacuucc

SEQ ID NO: 95046 - RNA, 25 nt, Human
cauuguguguguuccuuucuugaua

SEQ ID NO: 95047 - RNA, 32 nt, Human
cauuguguguuuuguguacuccugugggacuc

SEQ ID NO: 95048 - RNA, 32 nt, Human
cauuguguuaacuuaugucucuuguuaaauga

SEQ ID NO: 95049 - RNA, 32 nt, Human
cauuguguuccccaggcugaagugcaguggca

SEQ ID NO: 95050 - RNA, 32 nt, Human
cauuguuaaacauguugaguuuuaaaggaaga

SEQ ID NO: 95051 - RNA, 31 nt, Human
cauuguuaaagaaauaaaguaagcaauuugu

SEQ ID NO: 95052 - RNA, 32 nt, Human
cauuguuaagacaaaaaguggccaggcacagu

SEQ ID NO: 95053 - RNA, 32 nt, Human
cauuguuaaugcuuugaugaaaaggcuuuaua

SEQ ID NO: 95054 - RNA, 32 nt, Human
cauuguuauaacagaguaucacagacuggaua

SEQ ID NO: 95055 - RNA, 32 nt, Human
cauuguuauauuacaaacagacuugcaugauu

SEQ ID NO: 95056 - RNA, 32 nt, Human
cauuguuaucgugguugcugauggggguggaa

SEQ ID NO: 95057 - RNA, 32 nt, Human
cauuguucaaaccaacacuugcaccuuucucu

SEQ ID NO: 95058 - RNA, 32 nt, Human
cauuguucagcucugugcuuucuuggauuccc

SEQ ID NO: 95059 - RNA, 32 nt, Human
cauuguucagucaaaacauaccacagaauggg

SEQ ID NO: 95060 - RNA, 32 nt, Human
cauuguucauucuucuuucuugaaaucccaaa

SEQ ID NO: 95061 - RNA, 32 nt, Human
cauuguucugagaauuaaauauggcugcuuac

SEQ ID NO: 95062 - RNA, 32 nt, Human
cauuguugcccaggaagagacggaggaugcaa

SEQ ID NO: 95063 - RNA, 21 nt, Human
cauuguugccucuaucuaguc

SEQ ID NO: 95064 - RNA, 32 nt, Human
cauuguugcuguucugcucaguacuuugauga

SEQ ID NO: 95065 - RNA, 32 nt, Human
cauuguugucugcaguagaugcagaaaauaua

SEQ ID NO: 95066 - RNA, 32 nt, Human
cauuguuuccacccccuggugccugcaggcca

SEQ ID NO: 95067 - RNA, 32 nt, Human
cauuguuuccaggaccuccugagaagccugau

SEQ ID NO: 95068 - RNA, 24 nt, Human
cauuguuugagguuucucaaaaag

SEQ ID NO: 95069 - RNA, 32 nt, Human
cauuguuugucugucuucauagcagauuuuaa

SEQ ID NO: 95070 - RNA, 32 nt, Human
cauuguuuugacuaagcacaauuagaugacaa

SEQ ID NO: 95071 - RNA, 32 nt, Human
cauuguuuuuguggcagcaagcugaaugacag

SEQ ID NO: 95072 - RNA, 32 nt, Human
cauuuaaaaauguccuguggggaagccauuuc

SEQ ID NO: 95073 - RNA, 32 nt, Human
cauuuaaaaauuacuguuuaauauuguuugac

SEQ ID NO: 95074 - RNA, 32 nt, Human
cauuuaaaacucuuuauguaaagcuuuauauc

SEQ ID NO: 95075 - RNA, 32 nt, Human
cauuuaaaaggauuuggacugcauuuaauugu

SEQ ID NO: 95076 - RNA, 32 nt, Human
cauuuaaaauuagccaggcaugguggugugcg

SEQ ID NO: 95077 - RNA, 32 nt, Human
cauuuaaacuggugcuuuauguacaugagaug

SEQ ID NO: 95078 - RNA, 32 nt, Human
cauuuaacagauaaggaaacugagggaacuaa

SEQ ID NO: 95079 - RNA, 32 nt, Human
cauuuaacugcuggcauaauuugcaacuguug

SEQ ID NO: 95080 - RNA, 32 nt, Human
cauuuaagggucuuuuacaaauaugucuaaau

SEQ ID NO: 95081 - RNA, 32 nt, Human
cauuuaagguaaaacugcucugccuuuugcuu

SEQ ID NO: 95082 - RNA, 31 nt, Human
cauuuaaguuuaguaguaaaagacugguuaa

SEQ ID NO: 95083 - RNA, 32 nt, Human
cauuuaaucuuucauagaaacuccugaagaag

SEQ ID NO: 95084 - RNA, 32 nt, Human
cauuuaaugccauucaagaucuacuaagcauc

SEQ ID NO: 95085 - RNA, 32 nt, Human
cauuuaauggggugcaccuguccaauaggcgu

SEQ ID NO: 95086 - RNA, 32 nt, Human
cauuuaaugucuugaacauucuaaauuacuuc

SEQ ID NO: 95087 - RNA, 32 nt, Human
cauuuaauguuagggguauuuaauguauuuuu

SEQ ID NO: 95088 - RNA, 32 nt, Human
cauuuaauugaaucguguguccugauaggugg

SEQ ID NO: 95089 - RNA, 32 nt, Human
cauuuacacaaaaacagaaaaguacccagaug

SEQ ID NO: 95090 - RNA, 32 nt, Human
cauuuacacagugcuuuccagccuuuggugcu

SEQ ID NO: 95091 - RNA, 32 nt, Human
cauuuacauacaguuuugcucuucuauacaga

SEQ ID NO: 95092 - RNA, 32 nt, Human
cauuuacaucaagcucagccugggcggcacag

SEQ ID NO: 95093 - RNA, 32 nt, Human
cauuuaccacuugcacaccagaccuuauaauu

SEQ ID NO: 95094 - RNA, 32 nt, Human
cauuuacccuuuugacauuagucacguggaac

SEQ ID NO: 95095 - RNA, 32 nt, Human
cauuuaccuauguaacaaaccugcacauccug

SEQ ID NO: 95096 - RNA, 32 nt, Human
cauuuacuacaguuggcuucuaaugcuucaga

SEQ ID NO: 95097 - RNA, 32 nt, Human
cauuuacuaguucuguaaaaucaaagauacua

SEQ ID NO: 95098 - RNA, 32 nt, Human
cauuuacuccaaguccucuccccagcuaccac

SEQ ID NO: 95099 - RNA, 32 nt, Human
cauuuacuccauccuuuauagugaugcuacag

SEQ ID NO: 95100 - RNA, 32 nt, Human
cauuuacucugcugcaaccucucuuucuccua

SEQ ID NO: 95101 - RNA, 32 nt, Human
cauuuacucuggagauagauaggagaacuccu

SEQ ID NO: 95102 - RNA, 32 nt, Human
cauuuacucugggaauccuacugugaaaucau

SEQ ID NO: 95103 - RNA, 32 nt, Human
cauuuacugaacaccuacugugugccaggccc

SEQ ID NO: 95104 - RNA, 32 nt, Human
cauuuagauuaggaagguuuuuaagauccgca

SEQ ID NO: 95105 - RNA, 32 nt, Human
cauuuagcagcaaauuaaaguaaccaguccuu

SEQ ID NO: 95106 - RNA, 32 nt, Human
cauuuagcuuaucccuuggccaaaaaguguau

SEQ ID NO: 95107 - RNA, 32 nt, Human
cauuuaggaaggugcaguauguuucagaguag

SEQ ID NO: 95108 - RNA, 32 nt, Human
cauuuaggacuguauuuccaaauuacugauau

SEQ ID NO: 95109 - RNA, 32 nt, Human
cauuuaggaucuccaugagaaaugggcuucuu

SEQ ID NO: 95110 - RNA, 32 nt, Human
cauuuaggaugaagaucagaaaauucucucca

SEQ ID NO: 95111 - RNA, 32 nt, Human
cauuuaggcuucaguuccacucccaggaacuu

SEQ ID NO: 95112 - RNA, 22 nt, Human
cauuuagggaggcagugucaua

SEQ ID NO: 95113 - RNA, 32 nt, Human
cauuuagggcuaccaucccccaaaaaggcuua

SEQ ID NO: 95114 - RNA, 32 nt, Human
cauuuagggguaauaaauacuuggcuuggaaa

SEQ ID NO: 95115 - RNA, 32 nt, Human
cauuuaggucucaaccuagccaucacuuuuuc

SEQ ID NO: 95116 - RNA, 32 nt, Human
cauuuagucauuguuuaucaaccaaacuaggu

SEQ ID NO: 95117 - RNA, 32 nt, Human
cauuuagugaagcagauggagggaaguugacc

SEQ ID NO: 95118 - RNA, 32 nt, Human
cauuuaguguguuccuuuuacuuuuugauacu

SEQ ID NO: 95119 - RNA, 32 nt, Human
cauuuaguucacaagcauaauuuggaggugug

SEQ ID NO: 95120 - RNA, 32 nt, Human
cauuuaguucacaagcauagugaaagugaccu

SEQ ID NO: 95121 - RNA, 32 nt, Human
cauuuauaaaaauuaagagguuaagagguuau

SEQ ID NO: 95122 - RNA, 32 nt, Human
cauuuauagaugggggaaagcaaagcacagag

SEQ ID NO: 95123 - RNA, 32 nt, Human
cauuuauaguucuugcuaguugcagugguaau

SEQ ID NO: 95124 - RNA, 32 nt, Human
cauuuauaugaacaccuuugaggugcuacuua

SEQ ID NO: 95125 - RNA, 31 nt, Human
cauuuauauugcccaucuccugugucuucaa

SEQ ID NO: 95126 - RNA, 32 nt, Human
cauuuauauuugagaaaaauuguagaaauaua

SEQ ID NO: 95127 - RNA, 19 nt, Human
cauuuaucaaggagauacc

SEQ ID NO: 95128 - RNA, 31 nt, Human
cauuuaucaauaaaagccuuugaaaauacuu

SEQ ID NO: 95129 - RNA, 32 nt, Human
cauuuaucagaaacuuaaaauauuucauaccg

SEQ ID NO: 95130 - RNA, 32 nt, Human
cauuuaucagcccucuuugugcugcuccuugc

SEQ ID NO: 95131 - RNA, 21 nt, Human
cauuuaucuucaaauacccua

SEQ ID NO: 95132 - RNA, 32 nt, Human
cauuuaugagccaccagaggcuccuaccccaa

SEQ ID NO: 95133 - RNA, 32 nt, Human
cauuuaugcacuuuguaucacccuccgaacuc

SEQ ID NO: 95134 - RNA, 32 nt, Human
cauuuauggacgcuuagcagggcccagauauu

SEQ ID NO: 95135 - RNA, 32 nt, Human
cauuuaugguacucuuugccuaugcauccccu

SEQ ID NO: 95136 - RNA, 32 nt, Human
cauuuauguaauuuuauuuacauucuugcuaa

SEQ ID NO: 95137 - RNA, 21 nt, Human
cauuuaugugcuuaugauuac

SEQ ID NO: 95138 - RNA, 32 nt, Human
cauuuauguuuugucugugguugcuuuccaca

SEQ ID NO: 95139 - RNA, 32 nt, Human
cauuuauuaacuguuagaacacuugcuuuaug

SEQ ID NO: 95140 - RNA, 32 nt, Human
cauuuauuaaggacucucugcuccagccucuc

SEQ ID NO: 95141 - RNA, 32 nt, Human
cauuuauuacguuacagaguucauggagguuc

SEQ ID NO: 95142 - RNA, 19 nt, Human
cauuuauuagguucacuca

SEQ ID NO: 95143 - RNA, 32 nt, Human
cauuuauugugcaccuacuaugugccaggcua

SEQ ID NO: 95144 - RNA, 32 nt, Human
cauuuauugugcaccuacuauguggcgggcau

SEQ ID NO: 95145 - RNA, 32 nt, Human
cauuuauugugucucacaccagccucauuucc

SEQ ID NO: 95146 - RNA, 32 nt, Human
cauuuauuucauuuacaaaagauuuauuguaa

SEQ ID NO: 95147 - RNA, 32 nt, Human
cauuuauuucauuuuauuuggggccugcaauu

SEQ ID NO: 95148 - RNA, 32 nt, Human
cauuuauuugcaccucagaagaagccagggcu

SEQ ID NO: 95149 - RNA, 32 nt, Human
cauuuauuuucuucagccugugcaaaacaaag

SEQ ID NO: 95150 - RNA, 32 nt, Human
cauuucaaauccugcacucaggccugguggug

SEQ ID NO: 95151 - RNA, 32 nt, Human
cauuucacaaggucaguaaugcugcaggaaaa

SEQ ID NO: 95152 - RNA, 32 nt, Human
cauuucacacguggauuuugucugcauuuaca

SEQ ID NO: 95153 - RNA, 32 nt, Human
cauuucacagaugagaaauggaagcagagggu

SEQ ID NO: 95154 - RNA, 32 nt, Human
cauuucaccauguuggccaggcuggucucgaa

SEQ ID NO: 95155 - RNA, 32 nt, Human
cauuucaccucacuccagccugggugacagcg

SEQ ID NO: 95156 - RNA, 32 nt, Human
cauuucaccugucccgcagacaacagcaccau

SEQ ID NO: 95157 - RNA, 32 nt, Human
cauuucacgaacuguucacacugcagagacua

SEQ ID NO: 95158 - RNA, 32 nt, Human
cauuucacgaguacccauaacuacccaucguu

SEQ ID NO: 95159 - RNA, 32 nt, Human
cauuucacuaguuuggauucagcaguaaguga

SEQ ID NO: 95160 - RNA, 32 nt, Human
cauuucacuguagccuaaacuccaguccgagg

SEQ ID NO: 95161 - RNA, 32 nt, Human
cauuucacuuccucuuccucuccuccagcauu

SEQ ID NO: 95162 - RNA, 32 nt, Human
cauuucacuugucaggagugugugugagugug

SEQ ID NO: 95163 - RNA, 30 nt, Human
cauuucagaaaauaaaaauuucaaaucaug

SEQ ID NO: 95164 - RNA, 24 nt, Human
cauuucagacacuauuaaauacua

SEQ ID NO: 95165 - RNA, 32 nt, Human
cauuucagacugguuuuaacuuaucccagcuu

SEQ ID NO: 95166 - RNA, 21 nt, Human
cauuucagauuugaaauacug

SEQ ID NO: 95167 - RNA, 32 nt, Human
cauuucagccugggcgaaaguaagacucuguc

SEQ ID NO: 95168 - RNA, 32 nt, Human
cauuucagccugggggauacagugagaccuug

SEQ ID NO: 95169 - RNA, 32 nt, Human
cauuucagccugucugucucagggugcagccu

SEQ ID NO: 95170 - RNA, 32 nt, Human
cauuucagcugcagcugaggaaaaugaaaugu

SEQ ID NO: 95171 - RNA, 32 nt, Human
cauuucagcuggcgcugcagcugcugcacaga

SEQ ID NO: 95172 - RNA, 32 nt, Human
cauuucagcuugaaccugcuuccuggcucaca

SEQ ID NO: 95173 - RNA, 32 nt, Human
cauuucaggaaggccacccugggaucugggca

SEQ ID NO: 95174 - RNA, 32 nt, Human
cauuucaggacgauccuuuuuccuucagcagc

SEQ ID NO: 95175 - RNA, 22 nt, Human
cauuucaggcacaacgauacua

SEQ ID NO: 95176 - RNA, 32 nt, Human
cauuucaggcucaaccaaagaggaucaaacag

SEQ ID NO: 95177 - RNA, 32 nt, Human
cauuucagggggccaccauggagcagccguua

SEQ ID NO: 95178 - RNA, 32 nt, Human
cauuucaguacccgcuggcagcuccucccacu

SEQ ID NO: 95179 - RNA, 32 nt, Human
cauuucagucucuucauuuugucauacggccu

SEQ ID NO: 95180 - RNA, 23 nt, Human
cauuucaguuggaugaauuacua

SEQ ID NO: 95181 - RNA, 32 nt, Human
cauuucaguuuuacaagaugaagagaguuuug

SEQ ID NO: 95182 - RNA, 31 nt, Human
cauuucauauagcuuuuucauuuaaaacaag

SEQ ID NO: 95183 - RNA, 32 nt, Human
cauuucaugucuguggcucaccagcuuuuccc

SEQ ID NO: 95184 - RNA, 32 nt, Human
cauuucauuuguauuuuuguccagaaauuucc

SEQ ID NO: 95185 - RNA, 32 nt, Human
cauuuccaaauuccuagaaaaguuuguuuuac

SEQ ID NO: 95186 - RNA, 32 nt, Human
cauuuccaacagcaacacagccacuaaaacac

SEQ ID NO: 95187 - RNA, 32 nt, Human
cauuuccaacaucacuuugcugcccagguaug

SEQ ID NO: 95188 - RNA, 32 nt, Human
cauuuccaacuacugcugcagcauuuugguaa

SEQ ID NO: 95189 - RNA, 32 nt, Human
cauuuccacuuacauaaugaaaaacaauucau

SEQ ID NO: 95190 - RNA, 32 nt, Human
cauuuccagaacuuaauccaugagcauuggau

SEQ ID NO: 95191 - RNA, 32 nt, Human
cauuuccagcacauccaggucugcacccccug

SEQ ID NO: 95192 - RNA, 18 nt, Human
cauuuccagcugcugcca

SEQ ID NO: 95193 - RNA, 32 nt, Human
cauuuccaggaggagaagcaagcagaugagag

SEQ ID NO: 95194 - RNA, 32 nt, Human
cauuuccaggccuagugccugccucguggcug

SEQ ID NO: 95195 - RNA, 32 nt, Human
cauuuccagguuuucugggggagugcaggggg

SEQ ID NO: 95196 - RNA, 32 nt, Human
cauuuccauccagccugaaaggccaggagagu

SEQ ID NO: 95197 - RNA, 32 nt, Human
cauuuccaucccccaaauccuucaagaugacc

SEQ ID NO: 95198 - RNA, 32 nt, Human
cauuuccauucaaccguggccccucuucagaa

SEQ ID NO: 95199 - RNA, 32 nt, Human
cauuuccauuugaugaaacagaacuacaagga

SEQ ID NO: 95200 - RNA, 19 nt, Human
cauuuccauuuuaagcagc

SEQ ID NO: 95201 - RNA, 32 nt, Human
cauuucccaagugcuauugcaauaacaguuga

SEQ ID NO: 95202 - RNA, 32 nt, Human
cauuucccaagugcuucauguuagccagcaaa

SEQ ID NO: 95203 - RNA, 32 nt, Human
cauuucccaauggguaaggaacagucugugaa

SEQ ID NO: 95204 - RNA, 24 nt, Human
cauuucccacauuccccacacuua

SEQ ID NO: 95205 - RNA, 32 nt, Human
cauuucccagcaucccuugcugcuagauguga

SEQ ID NO: 95206 - RNA, 32 nt, Human
cauuucccaggcuggcggagaauaaacugcca

SEQ ID NO: 95207 - RNA, 32 nt, Human
cauuucccaggucucagagcagccugggaaag

SEQ ID NO: 95208 - RNA, 32 nt, Human
cauuucccauaaacuucugucaagccagacca

SEQ ID NO: 95209 - RNA, 32 nt, Human
cauuucccauguccuggaaccccucaguccaa

SEQ ID NO: 95210 - RNA, 32 nt, Human
cauuucccuccccuuuuaauuuauuucccuga

SEQ ID NO: 95211 - RNA, 32 nt, Human
cauuucccuccccuuuuaauuuauuucccugc

SEQ ID NO: 95212 - RNA, 32 nt, Human
cauuucccuccucccucccucccuucaucucc

SEQ ID NO: 95213 - RNA, 21 nt, Human
cauuucccugcagcuaaugcu

SEQ ID NO: 95214 - RNA, 32 nt, Human
cauuucccugggaacagagcaacagucuuucu

SEQ ID NO: 95215 - RNA, 32 nt, Human
cauuucccuuccacacugcccuaggagagguu

SEQ ID NO: 95216 - RNA, 32 nt, Human
cauuucccuuccacuccuccuuucuggagucu

SEQ ID NO: 95217 - RNA, 32 nt, Human
cauuuccgccacaucccucucugcuggacguc

SEQ ID NO: 95218 - RNA, 32 nt, Human
cauuuccguauguauguauauguauacauuuc

SEQ ID NO: 95219 - RNA, 32 nt, Human
cauuuccgucagugacacucuccucguauugg

SEQ ID NO: 95220 - RNA, 32 nt, Human
cauuuccucagaagucaaacagggauggggau

SEQ ID NO: 95221 - RNA, 32 nt, Human
cauuuccuccacucuuuauggcccaucacuua

SEQ ID NO: 95222 - RNA, 32 nt, Human
cauuuccuccucuccugccugugaaagcagag

SEQ ID NO: 95223 - RNA, 32 nt, Human
cauuuccuggguggcuacucugugccagagcc

SEQ ID NO: 95224 - RNA, 32 nt, Human
cauuuccuguuguacacacaagggccaggcuc

SEQ ID NO: 95225 - RNA, 32 nt, Human
cauuuccuucaagucugcucaaaugucuaccu

SEQ ID NO: 95226 - RNA, 32 nt, Human
cauuuccuuccuagagguaaucccagaacaaa

SEQ ID NO: 95227 - RNA, 32 nt, Human
cauuuccuucgcucccccucccucuccacucu

SEQ ID NO: 95228 - RNA, 32 nt, Human
cauuuccuucuuucuucuggcuuuggaaaaau

SEQ ID NO: 95229 - RNA, 20 nt, Human
cauuuccuugcaacuugauc

SEQ ID NO: 95230 - RNA, 32 nt, Human
cauuuccuuugagaacuuuuccucuggcaugg

SEQ ID NO: 95231 - RNA, 32 nt, Human
cauuuccuuugucccaauuuccauuuuauaag

SEQ ID NO: 95232 - RNA, 32 nt, Human
cauuucgaagauuuuuauacauguuuucuauu

SEQ ID NO: 95233 - RNA, 32 nt, Human
cauuucgacuuacauaaugaaaaccaauucau

SEQ ID NO: 95234 - RNA, 32 nt, Human
cauuucgcagaggaggaaagugaggcccaggg

SEQ ID NO: 95235 - RNA, 32 nt, Human
cauuucggagaccuggaggaaguggcccauuu

SEQ ID NO: 95236 - RNA, 32 nt, Human
cauuucgggaggcugaggcaggaggaucauuu

SEQ ID NO: 95237 - RNA, 32 nt, Human
cauuucuaaaccaaguggcagagggguuggaa

SEQ ID NO: 95238 - RNA, 19 nt, Human
cauuucuaaggacaggaag

SEQ ID NO: 95239 - RNA, 32 nt, Human
cauuucuacaauuuguaaaaguccaaucugug

SEQ ID NO: 95240 - RNA, 32 nt, Human
cauuucuacuaaaaauaacaacaauuaguuag

SEQ ID NO: 95241 - RNA, 32 nt, Human
cauuucuacuaaaaauacaaaaaguagcuagg

SEQ ID NO: 95242 - RNA, 32 nt, Human
cauuucuacuaaaaauacaaaaauuagccggg

SEQ ID NO: 95243 - RNA, 32 nt, Human
cauuucuacuaaaaauacaaaaauuagcuagg

SEQ ID NO: 95244 - RNA, 32 nt, Human
cauuucuacuaaaaauacaaaaauuagcuggg

SEQ ID NO: 95245 - RNA, 32 nt, Human
cauuucuacuaaaaauacaaaauuagcugggc

SEQ ID NO: 95246 - RNA, 32 nt, Human
cauuucuacuaaaaguacacaauuagcuaggc

SEQ ID NO: 95247 - RNA, 32 nt, Human
cauuucuacuaaaaguacagaaauuagcuggg

SEQ ID NO: 95248 - RNA, 32 nt, Human
cauuucuagaugcaaauaacuccuucaccagg

SEQ ID NO: 95249 - RNA, 32 nt, Human
cauuucuaguaagcagugagguuguuugacau

SEQ ID NO: 95250 - RNA, 32 nt, Human
cauuucuauagccgaacuuguauaugugguug

SEQ ID NO: 95251 - RNA, 31 nt, Human
cauuucuaugcaggcagcacagcagacuagu

SEQ ID NO: 95252 - RNA, 32 nt, Human
cauuucuauguucauuccacuuuguauaucuu

SEQ ID NO: 95253 - RNA, 32 nt, Human
cauuucucaaaacaccaugucucuccaauuuu

SEQ ID NO: 95254 - RNA, 32 nt, Human
cauuucucaaagauuuuugagguuguauuugc

SEQ ID NO: 95255 - RNA, 32 nt, Human
ccaaguccuagcuccuccuccugggcuauauu

SEQ ID NO: 95256 - RNA, 32 nt, Human
ccaaguccuccacccgcugcccccgccauguc

SEQ ID NO: 95257 - RNA, 32 nt, Human
ccaaguccucucacuccuccagccuggaaugu

SEQ ID NO: 95258 - RNA, 32 nt, Human
ccaaguccugggagagaagugggugcgguccg

SEQ ID NO: 95259 - RNA, 32 nt, Human
ccaaguccuguuuccuuagaauuugugauagc

SEQ ID NO: 95260 - RNA, 22 nt, Human
ccaagucgagaacacuugaaca

SEQ ID NO: 95261 - RNA, 32 nt, Human
ccaagucuauuucauuuuuccacacugagcaa

SEQ ID NO: 95262 - RNA, 32 nt, Human
ccaagucucacaccucccuuagucccacucuu

SEQ ID NO: 95263 - RNA, 32 nt, Human
ccaagucuccaccccuuucuagaccaauaaag

SEQ ID NO: 95264 - RNA, 32 nt, Human
ccaagucuccuggccuggugcuuacuucaaau

SEQ ID NO: 95265 - RNA, 32 nt, Human
ccaagucugccuggcugccucuuaggauauga

SEQ ID NO: 95266 - RNA, 21 nt, Human
ccaagucugcgaauccagggu

SEQ ID NO: 95267 - RNA, 20 nt, Human
ccaagucugcuucugugaua

SEQ ID NO: 95268 - RNA, 32 nt, Human
ccaagucugggggcagaaccugaguguggaug

SEQ ID NO: 95269 - RNA, 32 nt, Human
ccaagucugucugcuucaggagcuucguacug

SEQ ID NO: 95270 - RNA, 32 nt, Human
ccaagucuguuccgucagagcuucuggcugcu

SEQ ID NO: 95271 - RNA, 32 nt, Human
ccaagugaaaagcaggcaaaagacuugaauag

SEQ ID NO: 95272 - RNA, 32 nt, Human
ccaagugaaacgucucacaggcccaggacuua

SEQ ID NO: 95273 - RNA, 32 nt, Human
ccaagugaaauuccuucuccagucacaguguc

SEQ ID NO: 95274 - RNA, 32 nt, Human
ccaagugacuuagccacauuuccuucagugca

SEQ ID NO: 95275 - RNA, 32 nt, Human
ccaagugagugaggaggaggaggaggagaagg

SEQ ID NO: 95276 - RNA, 21 nt, Human
ccaagugauccucccaccuca

SEQ ID NO: 95277 - RNA, 32 nt, Human
ccaagugauccucccaccucagccucucaagu

SEQ ID NO: 95278 - RNA, 32 nt, Human
ccaagugaugcccuccugccacuccccugcga

SEQ ID NO: 95279 - RNA, 32 nt, Human
ccaagugauggaagagguuggaagugaauaau

SEQ ID NO: 95280 - RNA, 32 nt, Human
ccaagugauucuguucuucuccauuuuuggca

SEQ ID NO: 95281 - RNA, 32 nt, Human
ccaagugcagcaacccagcccauggagauugc

SEQ ID NO: 95282 - RNA, 32 nt, Human
ccaagugcaucuagccuggccuggagggcaag

SEQ ID NO: 95283 - RNA, 20 nt, Human
ccaagugccacaucuugcca

SEQ ID NO: 95284 - RNA, 32 nt, Human
ccaagugccaucauccuucaccucagcagccc

SEQ ID NO: 95285 - RNA, 32 nt, Human
ccaagugccaugacccaggagccauucagaga

SEQ ID NO: 95286 - RNA, 32 nt, Human
ccaagugccauggcuuacaccuguaagcccag

SEQ ID NO: 95287 - RNA, 32 nt, Human
ccaagugcccccacugagcaggccaacaugcu

SEQ ID NO: 95288 - RNA, 32 nt, Human
ccaagugccccugcugggccagucccagagag

SEQ ID NO: 95289 - RNA, 31 nt, Human
ccaagugcccucucugaaccucaguuuccuc

SEQ ID NO: 95290 - RNA, 32 nt, Human
ccaagugccuccagcugaccucuggcuccugu

SEQ ID NO: 95291 - RNA, 19 nt, Human
ccaagugccuggacccaga

SEQ ID NO: 95292 - RNA, 32 nt, Human
ccaagugccuucccucaugccugggccggcug

SEQ ID NO: 95293 - RNA, 23 nt, Human
ccaagugcggacaucacuugaga

SEQ ID NO: 95294 - RNA, 32 nt, Human
ccaagugcggacaucacuugagaccaggaguu

SEQ ID NO: 95295 - RNA, 28 nt, Human
ccaagugcgugccgugugagugugacag

SEQ ID NO: 95296 - RNA, 21 nt, Human
ccaagugcuaggauuacaggc

SEQ ID NO: 95297 - RNA, 23 nt, Human
ccaagugcuaggauuacaggcgu

SEQ ID NO: 95298 - RNA, 23 nt, Human
ccaagugcuggaauuacaggcgu

SEQ ID NO: 95299 - RNA, 23 nt, Human
ccaagugcuggaauuacaggugu

SEQ ID NO: 95300 - RNA, 21 nt, Human
ccaagugcugggauuacaggc

SEQ ID NO: 95301 - RNA, 22 nt, Human
ccaagugcugggauuacaggca

SEQ ID NO: 95302 - RNA, 22 nt, Human
ccaagugcugggauuacaggcg

SEQ ID NO: 95303 - RNA, 23 nt, Human
ccaagugcugggauuacaggcgu

SEQ ID NO: 95304 - RNA, 21 nt, Human
ccaagugcugggauuauaggc

SEQ ID NO: 95305 - RNA, 23 nt, Human
ccaagugcuuaaacacaaggaua

SEQ ID NO: 95306 - RNA, 21 nt, Human
ccaagugcuuagcccagggcc

SEQ ID NO: 95307 - RNA, 32 nt, Human
ccaaguggaaaggccuccagagacaggagaca

SEQ ID NO: 95308 - RNA, 32 nt, Human
ccaaguggacugucaggcuaacaggaauaagu

SEQ ID NO: 95309 - RNA, 32 nt, Human
ccaaguggagcuuugagagaaaaacagaaggg

SEQ ID NO: 95310 - RNA, 32 nt, Human
ccaaguggccauccuaauucagaaagaagcua

SEQ ID NO: 95311 - RNA, 32 nt, Human
ccaaguggccucucgcugcaguaacaguuccg

SEQ ID NO: 95312 - RNA, 23 nt, Human
ccaaguggcugggauuacaggcg

SEQ ID NO: 95313 - RNA, 21 nt, Human
ccaaguggcugggauugcagg

SEQ ID NO: 95314 - RNA, 22 nt, Human
ccaaguggcugggauugcaggc

SEQ ID NO: 95315 - RNA, 32 nt, Human
ccaagugggccggcgcccaccaugcuccuggg

SEQ ID NO: 95316 - RNA, 32 nt, Human
ccaagugggucugcaagacuguaccucugccc

SEQ ID NO: 95317 - RNA, 32 nt, Human
ccaagugguaggagggagaguagcagagcaug

SEQ ID NO: 95318 - RNA, 32 nt, Human
ccaaguggugcuuucagagaauugauucagcc

SEQ ID NO: 95319 - RNA, 32 nt, Human
ccaaguguauauguuuacauguuuuuauccug

SEQ ID NO: 95320 - RNA, 22 nt, Human
ccaagugucugggauuacaggc

SEQ ID NO: 95321 - RNA, 32 nt, Human
ccaagugucuguuccaggcuucuggccugagg

SEQ ID NO: 95322 - RNA, 32 nt, Human
ccaagugugauggcacauaccuguaaucccag

SEQ ID NO: 95323 - RNA, 32 nt, Human
ccaagugugcccucuucccucucuccagauca

SEQ ID NO: 95324 - RNA, 32 nt, Human
ccaagugugguggcucacgccuguaaucccag

SEQ ID NO: 95325 - RNA, 32 nt, Human
ccaagugugguggcucaugccuguaaucccag

SEQ ID NO: 95326 - RNA, 32 nt, Human
ccaagugugguggcuuacaccuguaauccuag

SEQ ID NO: 95327 - RNA, 19 nt, Human
ccaagugugguggugcaca

SEQ ID NO: 95328 - RNA, 32 nt, Human
ccaaguguuaaggagaacaaaaauucaguauu

SEQ ID NO: 95329 - RNA, 32 nt, Human
ccaaguguuacccagaugguggaggaugugaa

SEQ ID NO: 95330 - RNA, 23 nt, Human
ccaaguguugggauuacaggcgu

SEQ ID NO: 95331 - RNA, 32 nt, Human
ccaaguuaaauauugauagccuaaagacaaau

SEQ ID NO: 95332 - RNA, 32 nt, Human
ccaaguuaaauauugauagccuaaagacaagu

SEQ ID NO: 95333 - RNA, 32 nt, Human
ccaaguuaaguguuuccuucccucucucaaua

SEQ ID NO: 95334 - RNA, 32 nt, Human
ccaaguuaugaggaaaagagggcugagggccu

SEQ ID NO: 95335 - RNA, 32 nt, Human
ccaaguuaugccaguuggggagggaaggacua

SEQ ID NO: 95336 - RNA, 32 nt, Human
ccaaguuauugauuauugguugcccagcuguc

SEQ ID NO: 95337 - RNA, 32 nt, Human
ccaaguucaacugauucuucugccucagccuc

SEQ ID NO: 95338 - RNA, 32 nt, Human
ccaaguucaagcaauucuccugccucagccuc

SEQ ID NO: 95339 - RNA, 32 nt, Human
ccaaguucaaguaauucuccagccucagccuc

SEQ ID NO: 95340 - RNA, 32 nt, Human
ccaaguucacaccauucuccugccucagccuc

SEQ ID NO: 95341 - RNA, 32 nt, Human
ccaaguucacgccauucuccugccucagccuc

SEQ ID NO: 95342 - RNA, 32 nt, Human
ccaaguucagacuccauucuugugcaguggga

SEQ ID NO: 95343 - RNA, 32 nt, Human
ccaaguucagcccagcuauggcccaggagaag

SEQ ID NO: 95344 - RNA, 32 nt, Human
ccaaguucagccgccaccggcacggccaggcc

SEQ ID NO: 95345 - RNA, 32 nt, Human
ccaaguucaggcaauucuccugccccagccuc

SEQ ID NO: 95346 - RNA, 32 nt, Human
ccaaguucagggauuggcucaggccccuaaug

SEQ ID NO: 95347 - RNA, 32 nt, Human
ccaaguucaguaaagacuugggugacagucaa

SEQ ID NO: 95348 - RNA, 32 nt, Human
ccaaguucaguguggauuuuucuuggugcucu

SEQ ID NO: 95349 - RNA, 32 nt, Human
ccaaguucaugccauucuccugccucagccuc

SEQ ID NO: 95350 - RNA, 19 nt, Human
ccaaguucccccugggguc

SEQ ID NO: 95351 - RNA, 32 nt, Human
ccaaguucgaggacgccuucacccucaaggug

SEQ ID NO: 95352 - RNA, 32 nt, Human
ccaaguucuccacuagcuauggugucauaggc

SEQ ID NO: 95353 - RNA, 18 nt, Human
ccaaguucucccaagggc

SEQ ID NO: 95354 - RNA, 32 nt, Human
ccaaguucugcuguuugggugacagugcuuug

SEQ ID NO: 95355 - RNA, 18 nt, Human
ccaaguugaagacuguug

SEQ ID NO: 95356 - RNA, 32 nt, Human
ccaaguugagccccaaaccaaagagagccaag

SEQ ID NO: 95357 - RNA, 32 nt, Human
ccaaguugcacgcgcuuagaacggaguacuuu

SEQ ID NO: 95358 - RNA, 32 nt, Human
ccaaguugcacgcgcuuagaacggagucuacg

SEQ ID NO: 95359 - RNA, 32 nt, Human
ccaaguugccagcccguguuucucagacuuua

SEQ ID NO: 95360 - RNA, 23 nt, Human
ccaaguugcugggacuacaggug

SEQ ID NO: 95361 - RNA, 24 nt, Human
ccaaguuggaaaacacucuucagg

SEQ ID NO: 95362 - RNA, 19 nt, Human
ccaaguuguggugcugaca

SEQ ID NO: 95363 - RNA, 21 nt, Human
ccaaguuuccuucuccacuga

SEQ ID NO: 95364 - RNA, 32 nt, Human
ccaaguuucgggaauacaaagccauugaaacc

SEQ ID NO: 95365 - RNA, 18 nt, Human
ccaaguuucuuugaggcc

SEQ ID NO: 95366 - RNA, 32 nt, Human
ccaauaaacccaggcuccaggccgugggggcu

SEQ ID NO: 95367 - RNA, 32 nt, Human
ccaauaaagacuguuaauuccucaugcguugc

SEQ ID NO: 95368 - RNA, 18 nt, Human
ccaauaaaguguugcaca

SEQ ID NO: 95369 - RNA, 32 nt, Human
ccaauaaauagcucaccauucccuucagagaa

SEQ ID NO: 95370 - RNA, 32 nt, Human
ccaauaacacccaggcugagagucaaaccaag

SEQ ID NO: 95371 - RNA, 32 nt, Human
ccaauaacucgugcucaucugcagccuccucu

SEQ ID NO: 95372 - RNA, 32 nt, Human
ccaauaacugcacuucaccuguaaagacauau

SEQ ID NO: 95373 - RNA, 32 nt, Human
ccaauaauaaaaugaaaugaccucuggucccu

SEQ ID NO: 95374 - RNA, 21 nt, Human
ccaauaauggucccucuuccc

SEQ ID NO: 95375 - RNA, 21 nt, Human
ccaauacacaacccccuuccc

SEQ ID NO: 95376 - RNA, 19 nt, Human
ccaauacccaggugaggaa

SEQ ID NO: 95377 - RNA, 32 nt, Human
ccaauacccuccucccaaaaacugaaauuggc

SEQ ID NO: 95378 - RNA, 32 nt, Human
ccaauacccuuucaaaagaguugucugcaaca

SEQ ID NO: 95379 - RNA, 32 nt, Human
ccaauacuccacugcucauauuuuuaucuaau

SEQ ID NO: 95380 - RNA, 32 nt, Human
ccaauagaguugaccuguuauuggauuuccug

SEQ ID NO: 95381 - RNA, 32 nt, Human
ccaauagcccaggagcuugggugugcugacga

SEQ ID NO: 95382 - RNA, 32 nt, Human
ccaauagcccaggcuggagugcaguggcagag

SEQ ID NO: 95383 - RNA, 32 nt, Human
ccaauagcucacucccuagagccugacgccgg

SEQ ID NO: 95384 - RNA, 32 nt, Human
ccaauaggugaucuuaauuacuuucagaauau

SEQ ID NO: 95385 - RNA, 32 nt, Human
ccaauagguugccaccagccacauaaggcuau

SEQ ID NO: 95386 - RNA, 32 nt, Human
ccaauagucauaugugaagacagagcagauca

SEQ ID NO: 95387 - RNA, 32 nt, Human
ccaauaguccccaucagcaccauggaggcagg

SEQ ID NO: 95388 - RNA, 32 nt, Human
ccaauagucuccaucacuuauuagccauguga

SEQ ID NO: 95389 - RNA, 32 nt, Human
ccaauagucugcaaacccgcagagccaugaag

SEQ ID NO: 95390 - RNA, 32 nt, Human
ccaauaguuaucucaugcaccucugagugccu

SEQ ID NO: 95391 - RNA, 32 nt, Human
ccaauauauucugccaagaauaugccuugaua

SEQ ID NO: 95392 - RNA, 18 nt, Human
ccaauaugaugcauuuua

SEQ ID NO: 95393 - RNA, 32 nt, Human
ccaauaugcacaauauuaacuaaugccaagac

SEQ ID NO: 95394 - RNA, 20 nt, Human
ccaauaugguaaaaccccgu

SEQ ID NO: 95395 - RNA, 20 nt, Human
ccaauauggugaaaccacgu

SEQ ID NO: 95396 - RNA, 20 nt, Human
ccaauauggugaaacccagu

SEQ ID NO: 95397 - RNA, 32 nt, Human
ccaauauggugaaaccccaugucuacuaaaaa

SEQ ID NO: 95398 - RNA, 20 nt, Human
ccaauauggugaaaccccgu

SEQ ID NO: 95399 - RNA, 20 nt, Human
ccaauauggugaaacccguc

SEQ ID NO: 95400 - RNA, 20 nt, Human
ccaauauggugaaacccugu

SEQ ID NO: 95401 - RNA, 20 nt, Human
ccaauauggugaaacuccgu

SEQ ID NO: 95402 - RNA, 20 nt, Human
ccaauaugucuagacucaga

SEQ ID NO: 95403 - RNA, 32 nt, Human
ccaauauugauggcaacagucaagauggugug

SEQ ID NO: 95404 - RNA, 32 nt, Human
ccaauauugguucauugucaucaaucaugguu

SEQ ID NO: 95405 - RNA, 32 nt, Human
ccaauauuguaauccuagcacuuugggaggcc

SEQ ID NO: 95406 - RNA, 32 nt, Human
ccaauauuucugcuuucuuugauucuccuuuu

SEQ ID NO: 95407 - RNA, 32 nt, Human
ccaauauuuggaccuuauuuugagguugucug

SEQ ID NO: 95408 - RNA, 32 nt, Human
ccaaucaagguugaggaguggggcuggggaga

SEQ ID NO: 95409 - RNA, 32 nt, Human
ccaaucacacuaagggucucucuauuucuucu

SEQ ID NO: 95410 - RNA, 32 nt, Human
ccaaucacagccgaggggcccagaagagagca

SEQ ID NO: 95411 - RNA, 32 nt, Human
ccaaucaccacugcccuccaagaccgguacac

SEQ ID NO: 95412 - RNA, 32 nt, Human
ccaaucaccccaaacaaauggaagagaagaga

SEQ ID NO: 95413 - RNA, 32 nt, Human
ccaaucaccuugggcccaaaauagcugaugau

SEQ ID NO: 95414 - RNA, 32 nt, Human
ccaaucacguugcuggcaaggcauuuuagagu

SEQ ID NO: 95415 - RNA, 32 nt, Human
ccaaucagagagagcucgcccccguuuucuuc

SEQ ID NO: 95416 - RNA, 32 nt, Human
ccaaucagccaccaaauggcauuaccuagguc

SEQ ID NO: 95417 - RNA, 32 nt, Human
ccaaucagcccaacccagcccagacugggcuu

SEQ ID NO: 95418 - RNA, 32 nt, Human
ccaaucagccuugccugcuuucaucucuccca

SEQ ID NO: 95419 - RNA, 32 nt, Human
ccaaucaggagaaggguucugccucccauccc

SEQ ID NO: 95420 - RNA, 18 nt, Human
ccaaucauccacccaucc

SEQ ID NO: 95421 - RNA, 32 nt, Human
ccaaucaucuguuuuuaaacaaucguuuuuga

SEQ ID NO: 95422 - RNA, 32 nt, Human
ccaaucauucaccucugugcccaaacccaagu

SEQ ID NO: 95423 - RNA, 32 nt, Human
ccaauccaagcccacugcagccuuguggauuu

SEQ ID NO: 95424 - RNA, 32 nt, Human
ccaauccagaugugaucccccugugaucuacu

SEQ ID NO: 95425 - RNA, 32 nt, Human
ccaauccaggcccggugaggccaagguuuccc

SEQ ID NO: 95426 - RNA, 32 nt, Human
ccaaucccagaacacauggagggaaucggaca

SEQ ID NO: 95427 - RNA, 32 nt, Human
ccaaucccagagcagaggucugaagacaggag

SEQ ID NO: 95428 - RNA, 32 nt, Human
ccaaucccagugcuacaccugagguucuggag

SEQ ID NO: 95429 - RNA, 32 nt, Human
ccaauccccacagacacacacauugauccucc

SEQ ID NO: 95430 - RNA, 21 nt, Human
ccaaucccccgccacuucccu

SEQ ID NO: 95431 - RNA, 32 nt, Human
ccaaucccucaugaguugaagcauuaauagau

SEQ ID NO: 95432 - RNA, 32 nt, Human
ccaaucccuguugccgcauggagcuccucagc

SEQ ID NO: 95433 - RNA, 22 nt, Human
ccaauccuccccgcucugccgc

SEQ ID NO: 95434 - RNA, 32 nt, Human
ccaauccugaagagacugagagucuagcauug

SEQ ID NO: 95435 - RNA, 32 nt, Human
ccaauccugaguuucucagacuuggcaauggg

SEQ ID NO: 95436 - RNA, 32 nt, Human
ccaauccugcuggcuucagccuggagaaggga

SEQ ID NO: 95437 - RNA, 32 nt, Human
ccaauccuguguagacaccaugacccaguugu

SEQ ID NO: 95438 - RNA, 32 nt, Human
ccaauccuuaucaauucucaccaccccauaaa

SEQ ID NO: 95439 - RNA, 32 nt, Human
ccaaucgacaagaagcuggaaaagaaugaugu

SEQ ID NO: 95440 - RNA, 32 nt, Human
ccaaucggacugccaaauucuccgguuugccc

SEQ ID NO: 95441 - RNA, 32 nt, Human
ccaaucgggagggagagacagagacagagccg

SEQ ID NO: 95442 - RNA, 32 nt, Human
ccaaucuaucuauuugcccacccauccaucca

SEQ ID NO: 95443 - RNA, 32 nt, Human
ccaaucucauuagcagguguagaaagguuuug

SEQ ID NO: 95444 - RNA, 32 nt, Human
ccaaucucccgcagcucuccugccccuggggg

SEQ ID NO: 95445 - RNA, 32 nt, Human
ccaaucucuauguuauguuuaauuuuauuuug

SEQ ID NO: 95446 - RNA, 32 nt, Human
ccaaucucucauuuugaaauuuugccaauggu

SEQ ID NO: 95447 - RNA, 32 nt, Human
ccaaucucuccucaggacugagucaacccccu

SEQ ID NO: 95448 - RNA, 32 nt, Human
ccaaucucuccucucuguuuucacccagaagu

SEQ ID NO: 95449 - RNA, 32 nt, Human
ccaaucucugauguuauugagcuccugcauga

SEQ ID NO: 95450 - RNA, 32 nt, Human
ccaaucucugcccuccccacccauggugguac

SEQ ID NO: 95451 - RNA, 32 nt, Human
ccaaucucuguggccaagcuccagccaaaaag

SEQ ID NO: 95452 - RNA, 32 nt, Human
ccaaucugauucugcugcccgaguuccuauuu

SEQ ID NO: 95453 - RNA, 32 nt, Human
ccaaucugggcaacagagagaccccaucucuu

SEQ ID NO: 95454 - RNA, 32 nt, Human
ccaaucugggcaacauagcaagauucugucuc

SEQ ID NO: 95455 - RNA, 32 nt, Human
ccaaucugggcaacauggggaaaccccagcuc

SEQ ID NO: 95456 - RNA, 22 nt, Human
ccaaucugguacaguuuguuaa

SEQ ID NO: 95457 - RNA, 32 nt, Human
ccaaucuguauuggcagaugcuauaggaauug

SEQ ID NO: 95458 - RNA, 32 nt, Human
ccaaucuuuuugacuuuuugcuuaaaauguuu

SEQ ID NO: 95459 - RNA, 32 nt, Human
ccaaugaaaaggaagagaaaauaaaguguguu

SEQ ID NO: 95460 - RNA, 32 nt, Human
ccaaugaaagguugccgacugaucagaccacg

SEQ ID NO: 95461 - RNA, 32 nt, Human
ccaaugaagccuuuaaaaagcagauggagagu

SEQ ID NO: 95462 - RNA, 32 nt, Human
ccaaugaagcuaagugguuaucccagaaacuu

SEQ ID NO: 95463 - RNA, 32 nt, Human
ccaaugaaggacugcaguauuugugugcccga

SEQ ID NO: 95464 - RNA, 32 nt, Human
ccaaugacaggguagggagaugacaguggugc

SEQ ID NO: 95465 - RNA, 19 nt, Human
ccaaugagacagucccuga

SEQ ID NO: 95466 - RNA, 20 nt, Human
ccaaugagaggaggggcagg

SEQ ID NO: 95467 - RNA, 32 nt, Human
ccaaugagcuacccacagccugggcaacgcag

SEQ ID NO: 95468 - RNA, 32 nt, Human
ccaaugagcugugaggacgugagcacaggucc

SEQ ID NO: 95469 - RNA, 31 nt, Human
ccaaugaggcacuucucuugguccuaguaga

SEQ ID NO: 95470 - RNA, 24 nt, Human
ccaaugaggcagagguugcaguga

SEQ ID NO: 95471 - RNA, 25 nt, Human
ccaaugaggcagagguugcagugag

SEQ ID NO: 95472 - RNA, 32 nt, Human
ccaaugaggcagagguugcagugagcugagau

SEQ ID NO: 95473 - RNA, 32 nt, Human
ccaaugagggcaggggaagaccaccuggcaug

SEQ ID NO: 95474 - RNA, 32 nt, Human
ccaaugagggggcacagcucugaaaagcacug

SEQ ID NO: 95475 - RNA, 21 nt, Human
ccaaugaggucugcugccagg

SEQ ID NO: 95476 - RNA, 32 nt, Human
ccaaugagguggccgaaucuuccuucaggaua

SEQ ID NO: 95477 - RNA, 32 nt, Human
ccaaugaguuggaggcugcagugagcuauaau

SEQ ID NO: 95478 - RNA, 32 nt, Human
ccaaugauacaacaguaguuuaaucacgugua

SEQ ID NO: 95479 - RNA, 32 nt, Human
ccaaugaugaaggcuaggaugggggaugcggu

SEQ ID NO: 95480 - RNA, 32 nt, Human
ccaaugauuaaauucauaaucauuucaucuuc

SEQ ID NO: 95481 - RNA, 32 nt, Human
ccaaugcacccccgccucacacacgcacuccu

SEQ ID NO: 95482 - RNA, 22 nt, Human
ccaaugcagaacacugcacuga

SEQ ID NO: 95483 - RNA, 32 nt, Human
ccaaugcaggaggaugguugagcucaggaguu

SEQ ID NO: 95484 - RNA, 31 nt, Human
ccaaugcaguuucaccugcagagcucacccc

SEQ ID NO: 95485 - RNA, 32 nt, Human
ccaaugcaucuucuacccugcuaccucaguga

SEQ ID NO: 95486 - RNA, 32 nt, Human
ccaaugcauguggaucaccugaggucaggagu

SEQ ID NO: 95487 - RNA, 32 nt, Human
ccaaugccaagacaguggagugggacuggaaa

SEQ ID NO: 95488 - RNA, 21 nt, Human
ccaaugccaagauaauucacu

SEQ ID NO: 95489 - RNA, 22 nt, Human
ccaaugccagaccacauccacu

SEQ ID NO: 95490 - RNA, 32 nt, Human
ccaaugccauuuuugagaacuaaccuaacagu

SEQ ID NO: 95491 - RNA, 32 nt, Human
ccaaugcccagcaaucacccuccucacuuccu

SEQ ID NO: 95492 - RNA, 32 nt, Human
ccaaugccccacaggccuuccugggccuggcc

SEQ ID NO: 95493 - RNA, 32 nt, Human
ccaaugccccgccccugcuccaaaucaagguc

SEQ ID NO: 95494 - RNA, 32 nt, Human
ccaaugccucacccaccucuggccagaggacu

SEQ ID NO: 95495 - RNA, 17 nt, Human
ccaaugccuccaccucu

SEQ ID NO: 95496 - RNA, 16 nt, Human
ccaaugccuucuggua

SEQ ID NO: 95497 - RNA, 19 nt, Human
ccaaugcgcucuggucccu

SEQ ID NO: 95498 - RNA, 32 nt, Human
ccaaugcggagcuggggcugagaugcuccagg

SEQ ID NO: 95499 - RNA, 32 nt, Human
ccaaugcuacugucagcuaaagaccugcagua

SEQ ID NO: 95500 - RNA, 25 nt, Human
ccaaugcucaccagccccagaguca

SEQ ID NO: 95501 - RNA, 32 nt, Human
ccaaugcucuuguucuaaucucuaauagguua

SEQ ID NO: 95502 - RNA, 32 nt, Human
ccaaugcugcuccacccucccccagacacagc

SEQ ID NO: 95503 - RNA, 32 nt, Human
ccaaugcuggcagccccuccccuggcauggca

SEQ ID NO: 95504 - RNA, 32 nt, Human
ccaaugcuuaccuuguccccaaaggggugggu

SEQ ID NO: 95505 - RNA, 32 nt, Human
ccaauggaauugugccauuuuguaucacugga

SEQ ID NO: 95506 - RNA, 32 nt, Human
ccaauggacuccugccagcccaucgcagaguu

SEQ ID NO: 95507 - RNA, 28 nt, Human
ccaauggagggaaagagaggagagcaaa

SEQ ID NO: 95508 - RNA, 32 nt, Human
ccaauggcaaacauuagugccaaauguauaau

SEQ ID NO: 95509 - RNA, 32 nt, Human
ccaauggcagcgguggcaguggcagcaguggc

SEQ ID NO: 95510 - RNA, 32 nt, Human
ccaauggcagucucaagaaauguacucgggcg

SEQ ID NO: 95511 - RNA, 32 nt, Human
ccaauggcuacaccagcauguacucggccaug

SEQ ID NO: 95512 - RNA, 32 nt, Human
ccaauggcuccaccauucccccagggagcccu

SEQ ID NO: 95513 - RNA, 32 nt, Human
ccaauggcugcacugccuuugucagagggggu

SEQ ID NO: 95514 - RNA, 32 nt, Human
ccaauggcuuugcaagaagaugacauuucaga

SEQ ID NO: 95515 - RNA, 32 nt, Human
ccaaugggaaggaggugaggggaaaugucagu

SEQ ID NO: 95516 - RNA, 32 nt, Human
ccaaugggaauccugcuuguucggcccaguug

SEQ ID NO: 95517 - RNA, 32 nt, Human
ccaaugggaccacccuccuggguccccuggug

SEQ ID NO: 95518 - RNA, 32 nt, Human
ccaaugggagagccgaggcggggaggugcggc

SEQ ID NO: 95519 - RNA, 32 nt, Human
ccaaugggaggcaccaagagaagaugaaaaac

SEQ ID NO: 95520 - RNA, 32 nt, Human
ccaaugggcaagcccaguggaggcaggauggg

SEQ ID NO: 95521 - RNA, 18 nt, Human
ccaaugggcugggccgug

SEQ ID NO: 95522 - RNA, 32 nt, Human
ccaauggggaaaggacacagaaacaggaacug

SEQ ID NO: 95523 - RNA, 32 nt, Human
ccaauggggagccuccagccacaaguucccug

SEQ ID NO: 95524 - RNA, 32 nt, Human
ccaauggggaggcggccucuccccuguugcug

SEQ ID NO: 95525 - RNA, 32 nt, Human
ccaauggggugaggauggcuucaagcccuaau

SEQ ID NO: 95526 - RNA, 32 nt, Human
ccaaugguaggagguagagaagaaaagcaaaa

SEQ ID NO: 95527 - RNA, 32 nt, Human
ccaaugguauugagccuuccugugcugguucc

SEQ ID NO: 95528 - RNA, 32 nt, Human
ccaauggucagcacuuuugguuugaguuaucu

SEQ ID NO: 95529 - RNA, 32 nt, Human
ccaauggugacugcucccgccugguggccgau

SEQ ID NO: 95530 - RNA, 32 nt, Human
ccaauguaaaaauguucuuuuaucucaaauuu

SEQ ID NO: 95531 - RNA, 32 nt, Human
ccaauguagaucuccugugaagcagaaccaac

SEQ ID NO: 95532 - RNA, 20 nt, Human
ccaauguagugaaaccccgu

SEQ ID NO: 95533 - RNA, 32 nt, Human
ccaauguauuuuagcuauuuuaguaguauuug

SEQ ID NO: 95534 - RNA, 32 nt, Human
ccaaugucacacuuugauuggcagugagaaac

SEQ ID NO: 95535 - RNA, 20 nt, Human
ccaaugucaugaaaguggua

SEQ ID NO: 95536 - RNA, 32 nt, Human
ccaauguccugagacaugaacccaaaaagaga

SEQ ID NO: 95537 - RNA, 32 nt, Human
ccaaugucguaguucaucagccuccgaaagca

SEQ ID NO: 95538 - RNA, 32 nt, Human
ccaaugucugcuguuuccaacacuggugauuu

SEQ ID NO: 95539 - RNA, 32 nt, Human
ccaaugucuuuugacaggugccuguccuugaa

SEQ ID NO: 95540 - RNA, 20 nt, Human
ccaaugugaugaaaccccgu

SEQ ID NO: 95541 - RNA, 32 nt, Human
ccaaugugcuggaauuacagguauggcuaccg

SEQ ID NO: 95542 - RNA, 22 nt, Human
ccaaugugcugggauuacaggc

SEQ ID NO: 95543 - RNA, 32 nt, Human
ccaauguggaacaaauggagugaucuguuauc

SEQ ID NO: 95544 - RNA, 32 nt, Human
ccaauguggguggaucaccugaggucaggagu

SEQ ID NO: 95545 - RNA, 20 nt, Human
ccaauguggugaaacccugu

SEQ ID NO: 95546 - RNA, 32 nt, Human
ccaaugugucuuccuaggcagccccugaggag

SEQ ID NO: 95547 - RNA, 32 nt, Human
ccaaugugugaaauuagugaaaucuuaguacc

SEQ ID NO: 95548 - RNA, 32 nt, Human
ccaauguugugugcaugaaaaggauuccuugg

SEQ ID NO: 95549 - RNA, 32 nt, Human
ccaauuagagcugguaagacagcuguacuguu

SEQ ID NO: 95550 - RNA, 20 nt, Human
ccaauuagcauuuuguaaua

SEQ ID NO: 95551 - RNA, 24 nt, Human
ccaauuagcugggacugcaggcgu

SEQ ID NO: 95552 - RNA, 32 nt, Human
ccaauuaggcccagagagacaaagacagaucu

SEQ ID NO: 95553 - RNA, 26 nt, Human
ccaauuaggggaaggcagaucaccaa

SEQ ID NO: 95554 - RNA, 32 nt, Human
ccaauuauguccuaauuguauuuuggggaaug

SEQ ID NO: 95555 - RNA, 32 nt, Human
ccaauucaaccuucugucugguugugccagga

SEQ ID NO: 95556 - RNA, 32 nt, Human
ccaauucaagcuuauuuuagggaagccuugaa

SEQ ID NO: 95557 - RNA, 23 nt, Human
ccaauucaaggacugggguccuu

SEQ ID NO: 95558 - RNA, 32 nt, Human
ccaauucacccacuguguaucuucaugaaugg

SEQ ID NO: 95559 - RNA, 32 nt, Human
ccaauucagcuccucuggaguggagcuuucug

SEQ ID NO: 95560 - RNA, 32 nt, Human
ccaauucaugaagugaauuaaugaugaggauc

SEQ ID NO: 95561 - RNA, 32 nt, Human
ccaauuccacuuccugccccaacugcaggaau

SEQ ID NO: 95562 - RNA, 32 nt, Human
ccaauuccagauugacuguagauacagauugg

SEQ ID NO: 95563 - RNA, 32 nt, Human
ccaauuccaggacuuccucacauggcuccuac

SEQ ID NO: 95564 - RNA, 32 nt, Human
ccaauuccucaaggcuaucggccagccccucc

SEQ ID NO: 95565 - RNA, 32 nt, Human
ccaauuccugcagcuguuuguguuggagggaa

SEQ ID NO: 95566 - RNA, 32 nt, Human
ccaauuccuggccuuggagcucaaaucuuucc

SEQ ID NO: 95567 - RNA, 32 nt, Human
ccaauuccuuuagccucuccccaccuguccaa

SEQ ID NO: 95568 - RNA, 32 nt, Human
ccaauucuacugaauggggguggaccuggcau

SEQ ID NO: 95569 - RNA, 18 nt, Human
ccaauucucaguguggua

SEQ ID NO: 95570 - RNA, 19 nt, Human
ccaauucugcagagagaug

SEQ ID NO: 95571 - RNA, 20 nt, Human
ccaauucugcauugcugaga

SEQ ID NO: 95572 - RNA, 23 nt, Human
ccaauucugccugccuccucccu

SEQ ID NO: 95573 - RNA, 32 nt, Human
ccaauucugggagugcucugaggccucugggg

SEQ ID NO: 95574 - RNA, 32 nt, Human
ccaauugaaggacuggcucuguacugacacuu

SEQ ID NO: 95575 - RNA, 32 nt, Human
ccaauugagcuccagcccugguuuuccuaccc

SEQ ID NO: 95576 - RNA, 32 nt, Human
ccaauugauuuucccagcucccagcccuggau

SEQ ID NO: 95577 - RNA, 32 nt, Human
ccaauugcaagcucauuccucuaccucauacu

SEQ ID NO: 95578 - RNA, 32 nt, Human
ccaauugcacacauaagcaaaaaggcauuuuc

SEQ ID NO: 95579 - RNA, 32 nt, Human
ccaauugcagagaacucgcuucccaggcuucu

SEQ ID NO: 95580 - RNA, 32 nt, Human
ccaauugcagaggcagaguuuuacagacaggu

SEQ ID NO: 95581 - RNA, 32 nt, Human
ccaauugcgauggcucacgccuguaaucccag

SEQ ID NO: 95582 - RNA, 31 nt, Human
ccaauugcuaccgagaagguuggaggugggg

SEQ ID NO: 95583 - RNA, 32 nt, Human
ccaauuggauuucaaguuauaugaugaaauuc

SEQ ID NO: 95584 - RNA, 22 nt, Human
ccaauugggauucucauucgcc

SEQ ID NO: 95585 - RNA, 32 nt, Human
ccaauuggucagaaaggaaagaaggccuccua

SEQ ID NO: 95586 - RNA, 18 nt, Human
ccaauuggugacgcugca

SEQ ID NO: 95587 - RNA, 32 nt, Human
ccaauuguacuaaaaauacaaaauuagccggg

SEQ ID NO: 95588 - RNA, 32 nt, Human
ccaauuguccaaccuccauuacaggggucuuc

SEQ ID NO: 95589 - RNA, 32 nt, Human
ccaauuuauccaaacagaacuguggugucaau

SEQ ID NO: 95590 - RNA, 31 nt, Human
ccaauuucacucaaauguuuugagaacugug

SEQ ID NO: 95591 - RNA, 32 nt, Human
ccaauuucauuucagaauaaaaagcuagcauc

SEQ ID NO: 95592 - RNA, 32 nt, Human
ccaauuuccagaaccugccaccagggggaggu

SEQ ID NO: 95593 - RNA, 32 nt, Human
ccaauuuccagagccacuaucucugcugucca

SEQ ID NO: 95594 - RNA, 32 nt, Human
ccaauuuccauagaugcaaauggcaguuacag

SEQ ID NO: 95595 - RNA, 18 nt, Human
ccaauuuccugcuugcca

SEQ ID NO: 95596 - RNA, 32 nt, Human
ccaauuucucaugucucuccugagauguuuua

SEQ ID NO: 95597 - RNA, 32 nt, Human
ccaauuucuggcccagcagguuucucuuugua

SEQ ID NO: 95598 - RNA, 32 nt, Human
ccaauuucuugaaggagagcaagguagaacgu

SEQ ID NO: 95599 - RNA, 32 nt, Human
ccaauuugccuuuuucuuuuucuugccuuauu

SEQ ID NO: 95600 - RNA, 32 nt, Human
ccaauuuggccgucgcagaacaggaggcaucu

SEQ ID NO: 95601 - RNA, 32 nt, Human
ccaauuuuccagauggagucucgcuuuguugc

SEQ ID NO: 95602 - RNA, 32 nt, Human
ccaauuuuuagaguggcuaguaguuucuucau

SEQ ID NO: 95603 - RNA, 32 nt, Human
ccaauuuuucucauuucuaugccuccuauauu

SEQ ID NO: 95604 - RNA, 23 nt, Human
ccacaaaaacaaaagcagaggaa

SEQ ID NO: 95605 - RNA, 32 nt, Human
ccacaaaaacauuuaauuuauggauccugccu

SEQ ID NO: 95606 - RNA, 32 nt, Human
ccacaaaacaccuucaguagagccuugauuaa

SEQ ID NO: 95607 - RNA, 32 nt, Human
ccacaaaacucaucuggaguucucaaagaccu

SEQ ID NO: 95608 - RNA, 32 nt, Human
ccacaaaagaucccagcugucaguggucucau

SEQ ID NO: 95609 - RNA, 32 nt, Human
ccacaaaagccacaccugugauucaaagacac

SEQ ID NO: 95610 - RNA, 20 nt, Human
ccacaaaagggaacauccca

SEQ ID NO: 95611 - RNA, 32 nt, Human
ccacaaaauuauuugaguacugugaaggauua

SEQ ID NO: 95612 - RNA, 32 nt, Human
ccacaaacaacaaaggcuacccuuugaccaaa

SEQ ID NO: 95613 - RNA, 32 nt, Human
ccacaaacaacaacaagacauucauucccaac

SEQ ID NO: 95614 - RNA, 25 nt, Human
ccacaaacaagaaaacccagaggaa

SEQ ID NO: 95615 - RNA, 32 nt, Human
ccacaaacacagaucacaggggccuuacaaag

SEQ ID NO: 95616 - RNA, 20 nt, Human
ccacaaacacagcacuucgg

SEQ ID NO: 95617 - RNA, 32 nt, Human
ccacaaaccccacucccucaagaagggccagg

SEQ ID NO: 95618 - RNA, 21 nt, Human
ccacaaacccugccucugagg

SEQ ID NO: 95619 - RNA, 32 nt, Human
ccacaaacucaccuuauguuacuccaaaguaa

SEQ ID NO: 95620 - RNA, 20 nt, Human
ccacaaacuccauccuccaa

SEQ ID NO: 95621 - RNA, 32 nt, Human
ccacaaacucgccuuauguuacuccaaaguaa

SEQ ID NO: 95622 - RNA, 30 nt, Human
ccacaaagaaaaucaacuugcuacuacaug

SEQ ID NO: 95623 - RNA, 32 nt, Human
ccacaaagagaugucauggguuuugaggaggc

SEQ ID NO: 95624 - RNA, 19 nt, Human
ccacaaagagcccauccaa

SEQ ID NO: 95625 - RNA, 32 nt, Human
ccacaaagauaggaacccaggagcagcagugu

SEQ ID NO: 95626 - RNA, 32 nt, Human
ccacaaagcaccagagguaggagaccuggauu

SEQ ID NO: 95627 - RNA, 32 nt, Human
ccacaaagccuuaucaagugucuuccaucaug

SEQ ID NO: 95628 - RNA, 32 nt, Human
ccacaaaggagagaaaggguggaggagggcag

SEQ ID NO: 95629 - RNA, 24 nt, Human
ccacaaauaguguaguuuuagaua

SEQ ID NO: 95630 - RNA, 32 nt, Human
ccacaaaucaugguuaauaaaagagaguaguu

SEQ ID NO: 95631 - RNA, 32 nt, Human
ccacaaaucuggugccugucucuugcuuacca

SEQ ID NO: 95632 - RNA, 25 nt, Human
ccacaaaugcauucaguggcaguga

SEQ ID NO: 95633 - RNA, 32 nt, Human
ccacaaaugggguccccaggugacccacacuu

SEQ ID NO: 95634 - RNA, 32 nt, Human
ccacaacaacccugugggcacugaauggcggu

SEQ ID NO: 95635 - RNA, 32 nt, Human
ccacaacaacuccgggcggaagcagcaggucu

SEQ ID NO: 95636 - RNA, 32 nt, Human
ccacaacacagccacagcaguggcagcccugg

SEQ ID NO: 95637 - RNA, 25 nt, Human
ccacaacagucaaucucaaacaagg

SEQ ID NO: 95638 - RNA, 32 nt, Human
ccacaacauacucaaaggaacggagagaaccg

SEQ ID NO: 95639 - RNA, 32 nt, Human
ccacaaccacagcccuagaaagaaggaugaac

SEQ ID NO: 95640 - RNA, 21 nt, Human
ccacaaccaccaccagugcua

SEQ ID NO: 95641 - RNA, 32 nt, Human
ccacaaccaccuccagccugggagauaggccu

SEQ ID NO: 95642 - RNA, 32 nt, Human
ccacaacccaacccuucucacucuccucagug

SEQ ID NO: 95643 - RNA, 32 nt, Human
ccacaacccacauuaagaaauacauuucauac

SEQ ID NO: 95644 - RNA, 32 nt, Human
ccacaaccccaaccccagaggaaaagcccccu

SEQ ID NO: 95645 - RNA, 32 nt, Human
ccacaacccggcgaucgaaaagauucuuagga

SEQ ID NO: 95646 - RNA, 32 nt, Human
ccacaaccuguauagugauagccauauauuua

SEQ ID NO: 95647 - RNA, 32 nt, Human
ccacaaccugucccuggcuggcuccagcgucc

SEQ ID NO: 95648 - RNA, 32 nt, Human
ccacaacgccuggcuaauuuuguauuuuuagu

SEQ ID NO: 95649 - RNA, 32 nt, Human
ccacaacugcagccgggcccucugccuauggg

SEQ ID NO: 95650 - RNA, 32 nt, Human
ccacaacugcagucccauccucuugucagggc

SEQ ID NO: 95651 - RNA, 32 nt, Human
ccacaacugccacugcucaccaggacaagcug

SEQ ID NO: 95652 - RNA, 32 nt, Human
ccacaacugccuuuacacuugcucuggguaug

SEQ ID NO: 95653 - RNA, 32 nt, Human
ccacaacugucucuguuucaacuuuaagccca

SEQ ID NO: 95654 - RNA, 32 nt, Human
ccacaacuuccuucuggccaggcccagacaug

SEQ ID NO: 95655 - RNA, 24 nt, Human
ccacaacuucugaccucccagggu

SEQ ID NO: 95656 - RNA, 19 nt, Human
ccacaagaaaauaauccca

SEQ ID NO: 95657 - RNA, 20 nt, Human
ccacaagaacguggaugcca

SEQ ID NO: 95658 - RNA, 32 nt, Human
ccacaagaacucccuucuccccucagccaaug

SEQ ID NO: 95659 - RNA, 21 nt, Human
ccacaagaaugguucugccca

SEQ ID NO: 95660 - RNA, 32 nt, Human
ccacaagcacagaggccagcgugucccgcgug

SEQ ID NO: 95661 - RNA, 32 nt, Human
ccacaagcaggcugugcagugccugaaggguc

SEQ ID NO: 95662 - RNA, 32 nt, Human
ccacaagccaaucaguuggauauuucauucau

SEQ ID NO: 95663 - RNA, 32 nt, Human
ccacaagccugagggaaaggccagcacucgcu

SEQ ID NO: 95664 - RNA, 19 nt, Human
ccacaagccugccucgccu

SEQ ID NO: 95665 - RNA, 32 nt, Human
ccacaagccugccucgccuuguguuacgauau

SEQ ID NO: 95666 - RNA, 32 nt, Human
ccacaagcuacaaaugcuaaagacaguggcug

SEQ ID NO: 95667 - RNA, 32 nt, Human
ccacaagcugcacugugaaccugggcacuccg

SEQ ID NO: 95668 - RNA, 32 nt, Human
ccacaagcuucagagcacuggccacacacuca

SEQ ID NO: 95669 - RNA, 32 nt, Human
ccacaaggacuuugccucugaaggccaguggc

SEQ ID NO: 95670 - RNA, 32 nt, Human
ccacaagggaaaggggagagggggagaaaacu

SEQ ID NO: 95671 - RNA, 32 nt, Human
ccacaagggaggcuagggcaauggagcaggcc

SEQ ID NO: 95672 - RNA, 32 nt, Human
ccacaagggcugggagcagacaucauucccug

SEQ ID NO: 95673 - RNA, 32 nt, Human
ccacaaguacuauuugccuuugcccacauuuu

SEQ ID NO: 95674 - RNA, 32 nt, Human
ccacaaguccacagucgacagaugcucagccu

SEQ ID NO: 95675 - RNA, 32 nt, Human
ccacaaguccuagugaggaaacauguugggaa

SEQ ID NO: 95676 - RNA, 32 nt, Human
ccacaagucucaucucuaacguucuaugcaau

SEQ ID NO: 95677 - RNA, 32 nt, Human
ccacaagugcuucucauauugccccaggacag

SEQ ID NO: 95678 - RNA, 32 nt, Human
ccacaagugggucuucuguggaagaugcagaa

SEQ ID NO: 95679 - RNA, 32 nt, Human
ccacaaguggguggugagaccauugaaagccu

SEQ ID NO: 95680 - RNA, 22 nt, Human
ccacaaguguuggagcugcaga

SEQ ID NO: 95681 - RNA, 32 nt, Human
ccacaaguuugagaccagccugggcaacaugg

SEQ ID NO: 95682 - RNA, 32 nt, Human
ccacaauaaaggcugagcucuuaucuugcugc

SEQ ID NO: 95683 - RNA, 32 nt, Human
ccacaauaagccaugugcaaggugaggagcaa

SEQ ID NO: 95684 - RNA, 32 nt, Human
ccacaauaagggagaugaucagaggaaucugu

SEQ ID NO: 95685 - RNA, 32 nt, Human
ccacaauagcaguucuggaaugaagcuaggaa

SEQ ID NO: 95686 - RNA, 32 nt, Human
ccacaauauccagcaaaaugucuccugagcac

SEQ ID NO: 95687 - RNA, 26 nt, Human
ccacaauauuucuucuuccucaggga

SEQ ID NO: 95688 - RNA, 32 nt, Human
ccacaaucagcauuuucacaugaaaggaaacu

SEQ ID NO: 95689 - RNA, 32 nt, Human
ccacaaucagccacugcgggcgaggagggcac

SEQ ID NO: 95690 - RNA, 19 nt, Human
ccacaauccagggggccau

SEQ ID NO: 95691 - RNA, 32 nt, Human
ccacaaucccagagaaaugcuagacagaacca

SEQ ID NO: 95692 - RNA, 32 nt, Human
ccacaaucccuccugguccuaaaugaucagag

SEQ ID NO: 95693 - RNA, 32 nt, Human
ccacaauccugagacuuucccccgggaggcac

SEQ ID NO: 95694 - RNA, 32 nt, Human
ccacaaucuaaugaggaauguacuggaaaaau

SEQ ID NO: 95695 - RNA, 32 nt, Human
ccacaaucucagcucacagcaaccuccgccuc

SEQ ID NO: 95696 - RNA, 32 nt, Human
ccacaaucugcagccaucaacugccucugcug

SEQ ID NO: 95697 - RNA, 32 nt, Human
ccacaaucugcagccuccaccaggccuugagu

SEQ ID NO: 95698 - RNA, 32 nt, Human
ccacaaugaaggccacgagcagcagcagcagg

SEQ ID NO: 95699 - RNA, 32 nt, Human
ccacaaugaauagcaucucacaccagucagaa

SEQ ID NO: 95700 - RNA, 32 nt, Human
ccacaaugcuccaauuuccugucuccuuuaga

SEQ ID NO: 95701 - RNA, 32 nt, Human
ccacaaugcugaauauacagcaggugcucaau

SEQ ID NO: 95702 - RNA, 24 nt, Human
ccacaaugcuggaauuacaggugu

SEQ ID NO: 95703 - RNA, 32 nt, Human
ccacaauggcccugcuccuuccuccucuaggc

SEQ ID NO: 95704 - RNA, 32 nt, Human
ccacaaugucugcagugugaaggcagguucau

SEQ ID NO: 95705 - RNA, 32 nt, Human
ccacaaugugggaggcaggaugcagggauggg

SEQ ID NO: 95706 - RNA, 28 nt, Human
ccacaauuaaagauuauucuugucaguc

SEQ ID NO: 95707 - RNA, 32 nt, Human
ccacaauuacuuuuguaccaaccuaauaacaa

SEQ ID NO: 95708 - RNA, 19 nt, Human
ccacacaaaagccugcaug

SEQ ID NO: 95709 - RNA, 32 nt, Human
ccacacaaccauauugcauagaacagcacuug

SEQ ID NO: 95710 - RNA, 22 nt, Human
ccacacaaggaggaggaagagg

SEQ ID NO: 95711 - RNA, 19 nt, Human
ccacacacacaggcaccca

SEQ ID NO: 95712 - RNA, 32 nt, Human
ccacacacaccugucugugcagaugcuuugcc

SEQ ID NO: 95713 - RNA, 32 nt, Human
ccacacacagcagcuccaaccuggaggcugga

SEQ ID NO: 95714 - RNA, 32 nt, Human
ccacacacagccggcugcccuugacccgggag

SEQ ID NO: 95715 - RNA, 32 nt, Human
ccacacacagccugccccagcgucccugcccc

SEQ ID NO: 95716 - RNA, 32 nt, Human
ccacacacaguuacagagugaacacucuacua

SEQ ID NO: 95717 - RNA, 22 nt, Human
ccacacacccacacaugccaga

SEQ ID NO: 95718 - RNA, 19 nt, Human
ccacacaccuacaugcagg

SEQ ID NO: 95719 - RNA, 32 nt, Human
ccacacaccucucuacugagugcuccagaguc

SEQ ID NO: 95720 - RNA, 32 nt, Human
ccacacacugcacaucuuuuggugaucggggu

SEQ ID NO: 95721 - RNA, 32 nt, Human
ccacacacugcacccccacuccuggggcaggg

SEQ ID NO: 95722 - RNA, 19 nt, Human
ccacacagaaccaagcacu

SEQ ID NO: 95723 - RNA, 32 nt, Human
ccacacagacaggguuucaccauguuggccag

SEQ ID NO: 95724 - RNA, 32 nt, Human
ccacacagaccugguucccugccucuguauuc

SEQ ID NO: 95725 - RNA, 32 nt, Human
ccacacagagacaaggucggucucugucgccc

SEQ ID NO: 95726 - RNA, 32 nt, Human
ccacacagaugaccucaccauccacacucaga

SEQ ID NO: 95727 - RNA, 32 nt, Human
ccacacagccuccugcugcaggugcuuuggaa

SEQ ID NO: 95728 - RNA, 32 nt, Human
ccacacagcuggucauccugcccucagagccc

SEQ ID NO: 95729 - RNA, 32 nt, Human
ccacacagcugucccuuccuguccuuggcuac

SEQ ID NO: 95730 - RNA, 32 nt, Human
ccacacagcuuccucugggagaagcaggcgcu

SEQ ID NO: 95731 - RNA, 32 nt, Human
ccacacaggaugccggagagacagccccuugu

SEQ ID NO: 95732 - RNA, 22 nt, Human
ccacacaggccauuccccucuc

SEQ ID NO: 95733 - RNA, 22 nt, Human
ccacacaggcccacacacccuc

SEQ ID NO: 95734 - RNA, 20 nt, Human
ccacacaggcccacugcagg

SEQ ID NO: 95735 - RNA, 32 nt, Human
ccacacagggcgggagcccaggccuguuccug

SEQ ID NO: 95736 - RNA, 32 nt, Human
ccacacaguccuggaggcagagaugcaguuac

SEQ ID NO: 95737 - RNA, 31 nt, Human
ccacacagugaggucuggugggugaaaggac

SEQ ID NO: 95738 - RNA, 32 nt, Human
ccacacagugcaggggauggagacaggugcug

SEQ ID NO: 95739 - RNA, 32 nt, Human
ccacacaguuuacaaacccaguaucaugucug

SEQ ID NO: 95740 - RNA, 32 nt, Human
ccacacauccauaguucugccuccccagcuuc

SEQ ID NO: 95741 - RNA, 32 nt, Human
ccacacaucuucccaguucucacauagguuca

SEQ ID NO: 95742 - RNA, 32 nt, Human
ccacacaugcuccagacccuggggcaagguag

SEQ ID NO: 95743 - RNA, 32 nt, Human
ccacaccaaccauaccagcacuugcugccauc

SEQ ID NO: 95744 - RNA, 18 nt, Human
ccacaccacaccccaggg

SEQ ID NO: 95745 - RNA, 32 nt, Human
ccacaccacagcccuuugggcaaaaucagccc

SEQ ID NO: 95746 - RNA, 32 nt, Human
ccacaccacagcugcgcacacagcugcuugcu

SEQ ID NO: 95747 - RNA, 20 nt, Human
ccacaccacaucccagggaa

SEQ ID NO: 95748 - RNA, 32 nt, Human
ccacaccaccucuaccauuauuuucuguccga

SEQ ID NO: 95749 - RNA, 19 nt, Human
ccacaccacgaaagaucca

SEQ ID NO: 95750 - RNA, 32 nt, Human
ccacaccacuaccgcccccaaccacagcagag

SEQ ID NO: 95751 - RNA, 32 nt, Human
ccacaccacugcacuccauccugggcaacaga

SEQ ID NO: 95752 - RNA, 32 nt, Human
ccacaccacugcacuccugccugggcaauaga

SEQ ID NO: 95753 - RNA, 32 nt, Human
ccacaccacugcacuucacuuccacuucagac

SEQ ID NO: 95754 - RNA, 32 nt, Human
ccacaccacugcagcuggcaugcuuggcugug

SEQ ID NO: 95755 - RNA, 32 nt, Human
ccacaccacugcaggcagguggauagaagugc

SEQ ID NO: 95756 - RNA, 32 nt, Human
ccacaccacuggccuucccuuccccagggccc

SEQ ID NO: 95757 - RNA, 32 nt, Human
ccacaccagcagaggaugcgaggacgaugaca

SEQ ID NO: 95758 - RNA, 32 nt, Human
ccacaccagcuggguugcacacuguugauaug

SEQ ID NO: 95759 - RNA, 32 nt, Human
ccacaccaggaucgggugggaccuggagcuag

SEQ ID NO: 95760 - RNA, 32 nt, Human
ccacaccaggcaggaggagguguggacaguga

SEQ ID NO: 95761 - RNA, 32 nt, Human
ccacaccaggcugguuuucuuguauuuuuagu

SEQ ID NO: 95762 - RNA, 32 nt, Human
ccacaccagggauccuuagcacccaaccgguc

SEQ ID NO: 95763 - RNA, 19 nt, Human
ccacaccagggcuugcaua

SEQ ID NO: 95764 - RNA, 32 nt, Human
ccacaccagguggugguaggcggugugacugc

SEQ ID NO: 95765 - RNA, 21 nt, Human
ccacaccagugccugauuucu

SEQ ID NO: 95766 - RNA, 21 nt, Human
ccacaccaguugaacugcagg

SEQ ID NO: 95767 - RNA, 32 nt, Human
ccacaccaucacccucugggcagcugucaugg

SEQ ID NO: 95768 - RNA, 32 nt, Human
ccacaccauugcacuccagccugggcaacaag

SEQ ID NO: 95769 - RNA, 32 nt, Human
ccacaccauugcauuccaaccuggggaacaga

SEQ ID NO: 95770 - RNA, 32 nt, Human
ccacacccaauacuuuagagaucuggguuugg

SEQ ID NO: 95771 - RNA, 25 nt, Human
ccacacccacaaacaagccacagcu

SEQ ID NO: 95772 - RNA, 32 nt, Human
ccacacccaccagggucccgaggaaacagccg

SEQ ID NO: 95773 - RNA, 32 nt, Human
ccacacccacggcugcauaccugcacuuucag

SEQ ID NO: 95774 - RNA, 32 nt, Human
ccacacccagccacuaccucccagcuuggaga

SEQ ID NO: 95775 - RNA, 32 nt, Human
ccacacccagcccaggcucauucuuuuaacag

SEQ ID NO: 95776 - RNA, 32 nt, Human
ccacacccagccuggaacccuagccagcucag

SEQ ID NO: 95777 - RNA, 18 nt, Human
ccacacccagcucaggga

SEQ ID NO: 95778 - RNA, 32 nt, Human
ccacacccaggagccauccucagugucugugg

SEQ ID NO: 95779 - RNA, 32 nt, Human
ccacacccaggcccuauccugaacaggagacu

SEQ ID NO: 95780 - RNA, 21 nt, Human
ccacacccaggggccaggcuc

SEQ ID NO: 95781 - RNA, 32 nt, Human
ccacacccauuuauuuccuuccuuccuuccuu

SEQ ID NO: 95782 - RNA, 24 nt, Human
ccacaccccaccuggucaugggca

SEQ ID NO: 95783 - RNA, 32 nt, Human
ccacaccccagccuaacuccuccuggggccug

SEQ ID NO: 95784 - RNA, 32 nt, Human
ccacaccccagccucugacuugcuguguuguc

SEQ ID NO: 95785 - RNA, 22 nt, Human
ccacaccccagcucacacagca

SEQ ID NO: 95786 - RNA, 23 nt, Human
ccacacccccagggacgccgcuu

SEQ ID NO: 95787 - RNA, 32 nt, Human
ccacacccccaucccacccaaccacaggcccc

SEQ ID NO: 95788 - RNA, 23 nt, Human
ccacacccccauuccgugccuca

SEQ ID NO: 95789 - RNA, 17 nt, Human
ccacaccccccacccca

SEQ ID NO: 95790 - RNA, 20 nt, Human
ccacacccccgccucgggcc

SEQ ID NO: 95791 - RNA, 18 nt, Human
ccacaccccgccuggcca

SEQ ID NO: 95792 - RNA, 18 nt, Human
ccacaccccggacaccca

SEQ ID NO: 95793 - RNA, 32 nt, Human
ccacaccccgggagcugagugauugcagaaac

SEQ ID NO: 95794 - RNA, 32 nt, Human
ccacaccccugcacgaugaacacacaccgggc

SEQ ID NO: 95795 - RNA, 19 nt, Human
ccacacccgaggccgggcc

SEQ ID NO: 95796 - RNA, 18 nt, Human
ccacacccgccccggguc

SEQ ID NO: 95797 - RNA, 23 nt, Human
ccacacccucacuggcucggccc

SEQ ID NO: 95798 - RNA, 32 nt, Human
ccacacccucagcacugaccacugugaugggg

SEQ ID NO: 95799 - RNA, 22 nt, Human
ccacacccucaggcucaugccc

SEQ ID NO: 95800 - RNA, 32 nt, Human
ccacacccuccugcgcucaggguggcuugcag

SEQ ID NO: 95801 - RNA, 21 nt, Human
ccacacccucucuccccagca

SEQ ID NO: 95802 - RNA, 32 nt, Human
ccacacccucuggccuucugccuugagcuggg

SEQ ID NO: 95803 - RNA, 22 nt, Human
ccacacccucuucccaaggccc

SEQ ID NO: 95804 - RNA, 19 nt, Human
ccacacccucuuucaggga

SEQ ID NO: 95805 - RNA, 32 nt, Human
ccacacccugacugaagggcugguccaagccu

SEQ ID NO: 95806 - RNA, 32 nt, Human
ccacacccugcagcccgccccauggucuggcc

SEQ ID NO: 95807 - RNA, 24 nt, Human
ccacacccugcgucuggccggucc

SEQ ID NO: 95808 - RNA, 22 nt, Human
ccacacccuggggccacccauc

SEQ ID NO: 95809 - RNA, 25 nt, Human
ccacacccuuacccuucaccaucuu

SEQ ID NO: 95810 - RNA, 21 nt, Human
ccacacccuuguguugcgccc

SEQ ID NO: 95811 - RNA, 32 nt, Human
ccacaccgacgguaccaugaaggacgagguag

SEQ ID NO: 95812 - RNA, 32 nt, Human
ccacaccgcagugccucugccccucgggggac

SEQ ID NO: 95813 - RNA, 32 nt, Human
ccacaccgccuuucuuucuuuucuuucuguuu

SEQ ID NO: 95814 - RNA, 22 nt, Human
ccacaccgcggccgcccaagcc

SEQ ID NO: 95815 - RNA, 20 nt, Human
ccacaccggcagauugcaga

SEQ ID NO: 95816 - RNA, 19 nt, Human
ccacaccggcaucagagga

SEQ ID NO: 95817 - RNA, 32 nt, Human
ccacaccggcccugcuccuuccuccucuaggu

SEQ ID NO: 95818 - RNA, 32 nt, Human
ccacaccggcccugcuccuuccuccucugggc

SEQ ID NO: 95819 - RNA, 32 nt, Human
ccacaccguacuccagccugggcgacaucuag

SEQ ID NO: 95820 - RNA, 32 nt, Human
ccacaccgugacccucugucccuucccuccug

SEQ ID NO: 95821 - RNA, 32 nt, Human
ccacaccgugucccagggagcccagccuauuc

SEQ ID NO: 95822 - RNA, 32 nt, Human
ccacaccuagcauuccuucacaucuguauuca

SEQ ID NO: 95823 - RNA, 25 nt, Human
ccacaccucaagaccaucccacugc

SEQ ID NO: 95824 - RNA, 32 nt, Human
ccacaccucacacacacauacucccacuugca

SEQ ID NO: 95825 - RNA, 32 nt, Human
ccacaccuccaaugcugccugggagccagggu

SEQ ID NO: 95826 - RNA, 32 nt, Human
ccacaccuccacuuugcuucugaaggcccauu

SEQ ID NO: 95827 - RNA, 32 nt, Human
ccacaccucccaggauccagugcucccucuca

SEQ ID NO: 95828 - RNA, 21 nt, Human
ccacaccucccccugcugcug

SEQ ID NO: 95829 - RNA, 19 nt, Human
ccacaccucccugaacuuc

SEQ ID NO: 95830 - RNA, 32 nt, Human
ccacaccucuagaccuggggccuccggaaccc

SEQ ID NO: 95831 - RNA, 32 nt, Human
ccacaccucugccugccucaugccccuucccc

SEQ ID NO: 95832 - RNA, 32 nt, Human
ccacaccugaagccugcaggugcugaggccac

SEQ ID NO: 95833 - RNA, 32 nt, Human
ccacaccugcacuucugccucacuuucuugcu

SEQ ID NO: 95834 - RNA, 32 nt, Human
ccacaccugcagcucuccccuuggccacagca

SEQ ID NO: 95835 - RNA, 20 nt, Human
ccacaccugccacucaggga

SEQ ID NO: 95836 - RNA, 32 nt, Human
ccacaccugccugggaaccugggcugugaguc

SEQ ID NO: 95837 - RNA, 21 nt, Human
ccacaccugcuccucuagaga

SEQ ID NO: 95838 - RNA, 23 nt, Human
ccacaccugcugcggccgugccc

SEQ ID NO: 95839 - RNA, 32 nt, Human
ccacaccuggagugaggaagggggccuggcac

SEQ ID NO: 95840 - RNA, 32 nt, Human
ccacaccuggcuuauuuuaguuauuuuaguag

SEQ ID NO: 95841 - RNA, 18 nt, Human
ccacaccuggguccucca

SEQ ID NO: 95842 - RNA, 32 nt, Human
ccacaccuguaaccccaucuucucugaguaca

SEQ ID NO: 95843 - RNA, 32 nt, Human
ccacaccuguaaucccagcacuuugggaggcc

SEQ ID NO: 95844 - RNA, 32 nt, Human
ccacaccuguaaucucagcacuuuaggaggcc

SEQ ID NO: 95845 - RNA, 32 nt, Human
ccacaccuguauagaccaugcacaguacacau

SEQ ID NO: 95846 - RNA, 32 nt, Human
ccacaccuguggucccagcuacucaggaggcu

SEQ ID NO: 95847 - RNA, 32 nt, Human
ccacaccuuccagggcccuaggccccuccuag

SEQ ID NO: 95848 - RNA, 32 nt, Human
ccacaccuuccugggcaacccccaccaugaac

SEQ ID NO: 95849 - RNA, 32 nt, Human
ccacaccuuccuuccccacccccaccaccucc

SEQ ID NO: 95850 - RNA, 32 nt, Human
ccacaccuuccuugcugauuuguauuuuuggu

SEQ ID NO: 95851 - RNA, 32 nt, Human
ccacaccuuuguccuccaguuuaguuucucca

SEQ ID NO: 95852 - RNA, 32 nt, Human
ccacaccuuuugaggaggacagaagggacugg

SEQ ID NO: 95853 - RNA, 32 nt, Human
ccacacgacagcccucgagaauucuuucaagu

SEQ ID NO: 95854 - RNA, 19 nt, Human
ccacacgacuagacugcag

SEQ ID NO: 95855 - RNA, 32 nt, Human
ccacacgagugucccucacacucgcccagaaa

SEQ ID NO: 95856 - RNA, 32 nt, Human
ccacacgcacacuccacaugcccagcagagug

SEQ ID NO: 95857 - RNA, 17 nt, Human
ccacacgcagacgcaga

SEQ ID NO: 95858 - RNA, 32 nt, Human
ccacacgcaggccucccugccucagcugcauc

SEQ ID NO: 95859 - RNA, 32 nt, Human
ccacacgcaguuugaccccacgcccagcccuu

SEQ ID NO: 95860 - RNA, 18 nt, Human
ccacacgccagccacagg

SEQ ID NO: 95861 - RNA, 32 nt, Human
ccacacgcccccacaggcucugaccagcagcc

SEQ ID NO: 95862 - RNA, 15 nt, Human
ccacacgccucugca

SEQ ID NO: 95863 - RNA, 18 nt, Human
ccacacgccuggagccga

SEQ ID NO: 95864 - RNA, 16 nt, Human
ccacacgccugucaga

SEQ ID NO: 95865 - RNA, 18 nt, Human
ccacacgccuucccugca

SEQ ID NO: 95866 - RNA, 32 nt, Human
ccacacgcggcagaggagagcuggcaggagga

SEQ ID NO: 95867 - RNA, 16 nt, Human
ccacacgcuuucugca

SEQ ID NO: 95868 - RNA, 17 nt, Human
ccacacggagcugcaga

SEQ ID NO: 95869 - RNA, 32 nt, Human
ccacacgggugccacagcccaggucggagugg

SEQ ID NO: 95870 - RNA, 32 nt, Human
ccacacgugccuguagcauuccagagcucacu

SEQ ID NO: 95871 - RNA, 23 nt, Human
ccacacgugcucacccacccgca

SEQ ID NO: 95872 - RNA, 18 nt, Human
ccacacgugcugcgcaga

SEQ ID NO: 95873 - RNA, 32 nt, Human
ccacacguuugucuguugagugcagcgacaag

SEQ ID NO: 95874 - RNA, 32 nt, Human
ccacacuaacuugcccugucccaaucccagaa

SEQ ID NO: 95875 - RNA, 20 nt, Human
ccacacuaggaagcugcaga

SEQ ID NO: 95876 - RNA, 21 nt, Human
ccacacuauguguguuguucc

SEQ ID NO: 95877 - RNA, 32 nt, Human
ccacacuauugguggcaccuggaggacaugca

SEQ ID NO: 95878 - RNA, 32 nt, Human
ccacacucacucuugcagagccugugucuuua

SEQ ID NO: 95879 - RNA, 19 nt, Human
ccacacucacugccuguca

SEQ ID NO: 95880 - RNA, 32 nt, Human
ccacacucacuuuuuaucugguguuuuuacuu

SEQ ID NO: 95881 - RNA, 32 nt, Human
ccacacucaucaccauuucacacccaccuccc

SEQ ID NO: 95882 - RNA, 18 nt, Human
ccacacucauucauccuu

SEQ ID NO: 95883 - RNA, 32 nt, Human
ccacacuccacauucauauguugaagcccuaa

SEQ ID NO: 95884 - RNA, 32 nt, Human
ccacacuccagccugagcaacaagagcgaaac

SEQ ID NO: 95885 - RNA, 32 nt, Human
ccacacuccagccugagcagcagagcgggacc

SEQ ID NO: 95886 - RNA, 32 nt, Human
ccacacuccagccuggguaacagugagaccau

SEQ ID NO: 95887 - RNA, 32 nt, Human
ccacacuccagccugggugacagagcgagacu

SEQ ID NO: 95888 - RNA, 32 nt, Human
ccacacuccagccugggugacagagugaaacc

SEQ ID NO: 95889 - RNA, 32 nt, Human
ccacacuccauccugggucacagagugagacc

SEQ ID NO: 95890 - RNA, 32 nt, Human
ccacacucccacacuccagccuggguaacagu

SEQ ID NO: 95891 - RNA, 32 nt, Human
ccacacucccagcugcucuucuacagaugcca

SEQ ID NO: 95892 - RNA, 32 nt, Human
ccacacuccugacagaaugaaugcccucgaug

SEQ ID NO: 95893 - RNA, 20 nt, Human
ccacacucgauugggcccca

SEQ ID NO: 95894 - RNA, 23 nt, Human
ccacacucgccucccgggcccca

SEQ ID NO: 95895 - RNA, 32 nt, Human
ccacacucuccaagcacauuacaggggaccug

SEQ ID NO: 95896 - RNA, 18 nt, Human
ccacacucuuuucuccca

SEQ ID NO: 95897 - RNA, 32 nt, Human
ccacacugaaaccucuucgguugucuugaaac

SEQ ID NO: 95898 - RNA, 31 nt, Human
ccacacugacuucuucccuggggcugcaagu

SEQ ID NO: 95899 - RNA, 17 nt, Human
ccacacugaggccaggu

SEQ ID NO: 95900 - RNA, 32 nt, Human
ccacacugagguagccgagccucucaagcaga

SEQ ID NO: 95901 - RNA, 32 nt, Human
ccacacugaguguggggaauaaggacacuagc

SEQ ID NO: 95902 - RNA, 32 nt, Human
ccacacugcaaguccagagagcagggaacuac

SEQ ID NO: 95903 - RNA, 32 nt, Human
ccacacugcacaauaacuccucccaggguuuu

SEQ ID NO: 95904 - RNA, 24 nt, Human
ccacacugcacacagugacuuccu

SEQ ID NO: 95905 - RNA, 22 nt, Human
ccacacugccacaaagcugcuu

SEQ ID NO: 95906 - RNA, 32 nt, Human
ccacacugcccgccucucccacaugccacccc

SEQ ID NO: 95907 - RNA, 23 nt, Human
ccacacugcugccaccucucaca

SEQ ID NO: 95908 - RNA, 32 nt, Human
ccacacugcugcccuggcgggggccauggggg

SEQ ID NO: 95909 - RNA, 32 nt, Human
ccacacugcuuuguaaauaucuugacuguuuc

SEQ ID NO: 95910 - RNA, 32 nt, Human
ccacacuggagagagaccauagggugaugagu

SEQ ID NO: 95911 - RNA, 21 nt, Human
ccacacuggcccaucugcucc

SEQ ID NO: 95912 - RNA, 32 nt, Human
ccacacugggacucguguggccuguguggugc

SEQ ID NO: 95913 - RNA, 32 nt, Human
ccacacugggccaaaguggcaaccugggaaug

SEQ ID NO: 95914 - RNA, 32 nt, Human
ccacacuggggcccuccuccugggccugacca

SEQ ID NO: 95915 - RNA, 18 nt, Human
ccacacugucuggacuca

SEQ ID NO: 95916 - RNA, 32 nt, Human
ccacacugugaaaugaacuaugugccaguuug

SEQ ID NO: 95917 - RNA, 32 nt, Human
ccacacuguggcccaacgaccuuccuguuacc

SEQ ID NO: 95918 - RNA, 22 nt, Human
ccacacuguggccccugagucc

SEQ ID NO: 95919 - RNA, 32 nt, Human
ccacacuguggcuacagguggagggaagagga

SEQ ID NO: 95920 - RNA, 32 nt, Human
ccacacuuacugucuuccuuuaucucugugga

SEQ ID NO: 95921 - RNA, 32 nt, Human
ccacacuuagagagaguggagauguuuauuuc

SEQ ID NO: 95922 - RNA, 19 nt, Human
ccacacuucauccuccuca

SEQ ID NO: 95923 - RNA, 32 nt, Human
ccacacuuccuacuuggucucuggagguuuua

SEQ ID NO: 95924 - RNA, 32 nt, Human
ccacacuucucccuucaggggcuucggaggag

SEQ ID NO: 95925 - RNA, 25 nt, Human
ccacacuucucccuugcucccugaa

SEQ ID NO: 95926 - RNA, 32 nt, Human
ccacacuucuugaaacagccugggugacgguc

SEQ ID NO: 95927 - RNA, 32 nt, Human
ccacacuugccuuccccugaggucgcaggcug

SEQ ID NO: 95928 - RNA, 21 nt, Human
ccacacuuggaaggacugcag

SEQ ID NO: 95929 - RNA, 21 nt, Human
ccacacuuggccagacugcag

SEQ ID NO: 95930 - RNA, 32 nt, Human
ccacacuuguaaucccagcacuuugggaggcc

SEQ ID NO: 95931 - RNA, 32 nt, Human
ccacacuuguugcugcucaacaggacugcacu

SEQ ID NO: 95932 - RNA, 32 nt, Human
ccacacuuucaaguaaccaggugguggagacc

SEQ ID NO: 95933 - RNA, 32 nt, Human
ccacacuuugggcuuaguauuucucaggaaga

SEQ ID NO: 95934 - RNA, 32 nt, Human
ccacagaaacauuuucauuuuaggaaaucccu

SEQ ID NO: 95935 - RNA, 21 nt, Human
ccacagaaagaaaggaggcuu

SEQ ID NO: 95936 - RNA, 32 nt, Human
ccacagaaaggaagcaggacagcagggccccu

SEQ ID NO: 95937 - RNA, 22 nt, Human
ccacagaacauugucuuucugg

SEQ ID NO: 95938 - RNA, 19 nt, Human
ccacagaacccguuucggg

SEQ ID NO: 95939 - RNA, 32 nt, Human
ccacagaagagggggcuuuccaucccacccug

SEQ ID NO: 95940 - RNA, 32 nt, Human
ccacagaagauguauaauguuuggaaaaagac

SEQ ID NO: 95941 - RNA, 32 nt, Human
ccacagaaggaggaaguggaagggacaggagc

SEQ ID NO: 95942 - RNA, 32 nt, Human
ccacagaaggcuuaccucugaaagagucgggg

SEQ ID NO: 95943 - RNA, 32 nt, Human
ccacagaauggagcaagaaugagaggaaaaag

SEQ ID NO: 95944 - RNA, 32 nt, Human
ccacagacacgcgugugcaugcuccuacacaa

SEQ ID NO: 95945 - RNA, 32 nt, Human
ccacagacacuacccaaagcaguccuucacua

SEQ ID NO: 95946 - RNA, 32 nt, Human
ccacagacacuacccaaagcagugcuucacua

SEQ ID NO: 95947 - RNA, 32 nt, Human
ccacagacacugguggggagaccauggcucag

SEQ ID NO: 95948 - RNA, 32 nt, Human
ccacagacaggaacagaagagcacaguggagg

SEQ ID NO: 95949 - RNA, 32 nt, Human
ccacagacauagagggcagcugccaucaccac

SEQ ID NO: 95950 - RNA, 32 nt, Human
ccacagaccaaggcacauggguuuccacuugg

SEQ ID NO: 95951 - RNA, 20 nt, Human
ccacagacccaguccuccaa

SEQ ID NO: 95952 - RNA, 32 nt, Human
ccacagacccccagcagguagcauuccccagc

SEQ ID NO: 95953 - RNA, 32 nt, Human
ccacagaccccugggagcuuccgcuuugaaag

SEQ ID NO: 95954 - RNA, 32 nt, Human
ccacagaccgagguacagaacgagagacaacc

SEQ ID NO: 95955 - RNA, 21 nt, Human
ccacagacgccuugucuccau

SEQ ID NO: 95956 - RNA, 32 nt, Human
ccacagacgggguggaguggucaguggagcca

SEQ ID NO: 95957 - RNA, 32 nt, Human
ccacagacgugucuguagcauccucugucaca

SEQ ID NO: 95958 - RNA, 22 nt, Human
ccacagacuugguguuauggua

SEQ ID NO: 95959 - RNA, 21 nt, Human
ccacagagaagacccccggga

SEQ ID NO: 95960 - RNA, 32 nt, Human
ccacagagacacacucaggaggccagaagccg

SEQ ID NO: 95961 - RNA, 32 nt, Human
ccacagagccaacuugugaagcacacagcucu

SEQ ID NO: 95962 - RNA, 22 nt, Human
ccacagagccugggcugggccc

SEQ ID NO: 95963 - RNA, 32 nt, Human
ccacagagcuaaagugacuuuucccaaggucg

SEQ ID NO: 95964 - RNA, 32 nt, Human
ccacagagcuguugccuuccagaaccuccucc

SEQ ID NO: 95965 - RNA, 32 nt, Human
ccacagagcuuggacuuccuggaggacaagga

SEQ ID NO: 95966 - RNA, 21 nt, Human
ccacagaggagcggaggggcc

SEQ ID NO: 95967 - RNA, 32 nt, Human
ccacagaggagggagcaguuugcagugcccag

SEQ ID NO: 95968 - RNA, 32 nt, Human
ccacagaggccaagagcgcuacccacauugaa

SEQ ID NO: 95969 - RNA, 32 nt, Human
ccacagaggcccccaggagcacugccuuucag

SEQ ID NO: 95970 - RNA, 32 nt, Human
ccacagaggccugcuuccauccuaauugagca

SEQ ID NO: 95971 - RNA, 32 nt, Human
ccacagaggccuggggagcauuugacauucuc

SEQ ID NO: 95972 - RNA, 32 nt, Human
ccacagagggccugagcaugagggcucacacc

SEQ ID NO: 95973 - RNA, 32 nt, Human
ccacagagggguagcugggaucaugcuaguca

SEQ ID NO: 95974 - RNA, 32 nt, Human
ccacagaggucccuuggcuuguuuccacacug

SEQ ID NO: 95975 - RNA, 29 nt, Human
ccacagagucuguguguagccaggaagcc

SEQ ID NO: 95976 - RNA, 32 nt, Human
ccacagagugccaucccugagagaccagaccg

SEQ ID NO: 95977 - RNA, 32 nt, Human
ccacagauagaaaaggaaauaguggagaaagc

SEQ ID NO: 95978 - RNA, 32 nt, Human
ccacagaucagaggagucccagaagagggcga

SEQ ID NO: 95979 - RNA, 32 nt, Human
ccacagaucaggccggggcagcuguaggggcg

SEQ ID NO: 95980 - RNA, 32 nt, Human
ccacagaugacuggaggaaggaggggaaaugu

SEQ ID NO: 95981 - RNA, 32 nt, Human
ccacagaugaggcucaucagaacuagaucuug

SEQ ID NO: 95982 - RNA, 26 nt, Human
ccacagaugccaccccugguccucac

SEQ ID NO: 95983 - RNA, 22 nt, Human
ccacagaugcguguugcuccca

SEQ ID NO: 95984 - RNA, 32 nt, Human
ccacagauggagaagguggagaggaggauggg

SEQ ID NO: 95985 - RNA, 32 nt, Human
ccacagauucuccuuugaugucagaggccuca

SEQ ID NO: 95986 - RNA, 21 nt, Human
ccacagcaaagacauuucauc

SEQ ID NO: 95987 - RNA, 32 nt, Human
ccacagcaaaggaccuggugugggaugggaga

SEQ ID NO: 95988 - RNA, 32 nt, Human
ccacagcaacugucaccucacagcaggagaca

SEQ ID NO: 95989 - RNA, 24 nt, Human
ccacagcaagacugacauccacuu

SEQ ID NO: 95990 - RNA, 32 nt, Human
ccacagcaagagguacacaugcuguggacacc

SEQ ID NO: 95991 - RNA, 32 nt, Human
ccacagcacagccuggucaguccugcgcacua

SEQ ID NO: 95992 - RNA, 32 nt, Human
ccacagcacuccguucaaggucaucuccuggg

SEQ ID NO: 95993 - RNA, 32 nt, Human
ccacagcacuggcggagccagaaggacuuggc

SEQ ID NO: 95994 - RNA, 32 nt, Human
ccacagcacuggggcucaccucuugguugauc

SEQ ID NO: 95995 - RNA, 19 nt, Human
ccacagcagaauuccagca

SEQ ID NO: 95996 - RNA, 32 nt, Human
ccacagcagagcuggacgcuguggaaauggcu

SEQ ID NO: 95997 - RNA, 32 nt, Human
ccacagcagcauauuuuagaggcacauacaaa

SEQ ID NO: 95998 - RNA, 19 nt, Human
ccacagcagcugcaugcag

SEQ ID NO: 95999 - RNA, 32 nt, Human
ccacagcagcuuugcucagugauacccacaug

SEQ ID NO: 96000 - RNA, 32 nt, Human
ccacagcaggaggagguaggggcugggcaugc

SEQ ID NO: 96001 - RNA, 32 nt, Human
ccacagcaggugaguggaggcaggagccacgg

SEQ ID NO: 96002 - RNA, 22 nt, Human
ccacagcagguggaguuuucag

SEQ ID NO: 96003 - RNA, 24 nt, Human
ccacagcagguggcuggacugcug

SEQ ID NO: 96004 - RNA, 32 nt, Human
ccacagcauucagcccugcagccugggaccuu

SEQ ID NO: 96005 - RNA, 20 nt, Human
ccacagccaaacucuggugg

SEQ ID NO: 96006 - RNA, 32 nt, Human
ccacagccaagaggagucagagaugagguggg

SEQ ID NO: 96007 - RNA, 19 nt, Human
ccacagccaagcacugcca

SEQ ID NO: 96008 - RNA, 24 nt, Human
ccacagccaauucaaacuguucaa

SEQ ID NO: 96009 - RNA, 19 nt, Human
ccacagccacaccaugagc

SEQ ID NO: 96010 - RNA, 32 nt, Human
ccacagccacagaacucagucugaaucuggaa

SEQ ID NO: 96011 - RNA, 32 nt, Human
ccacagccacagcagccgccacugcaguuaga

SEQ ID NO: 96012 - RNA, 32 nt, Human
ccacagccacagccacagccccaggcauagcc

SEQ ID NO: 96013 - RNA, 32 nt, Human
ccacagccacccaggcagggagcaaguggccu

SEQ ID NO: 96014 - RNA, 32 nt, Human
ccacagccaccuggaaaccacaaggcauuuga

SEQ ID NO: 96015 - RNA, 32 nt, Human
ccacagccacgauggguuuguuucuguuuucu

SEQ ID NO: 96016 - RNA, 32 nt, Human
ccacagccacgcagcgcccacacccaccggga

SEQ ID NO: 96017 - RNA, 18 nt, Human
ccacagccacuccugcag

SEQ ID NO: 96018 - RNA, 32 nt, Human
ccacagccacuucuucacugagauaggagaug

SEQ ID NO: 96019 - RNA, 32 nt, Human
ccacagccagacgcccucagacagcaaagccu

SEQ ID NO: 96020 - RNA, 32 nt, Human
ccacagccagagaggcagaggcaagagcagag

SEQ ID NO: 96021 - RNA, 19 nt, Human
ccacagccagagcuggugg

SEQ ID NO: 96022 - RNA, 32 nt, Human
ccacagccagaggagccugugauuggcagaaa

SEQ ID NO: 96023 - RNA, 21 nt, Human
ccacagccagcagaacaucgc

SEQ ID NO: 96024 - RNA, 32 nt, Human
ccacagccaguucugcaucaccacacacagcc

SEQ ID NO: 96025 - RNA, 32 nt, Human
ccacagccaucuagggcccugaaggaggggca

SEQ ID NO: 96026 - RNA, 32 nt, Human
ccacagccaugaacagacguuggggcuaagag

SEQ ID NO: 96027 - RNA, 32 nt, Human
ccacagccauuuuucucucggguucuacccac

SEQ ID NO: 96028 - RNA, 32 nt, Human
ccacagcccaccuggaggccacccuggaggag

SEQ ID NO: 96029 - RNA, 23 nt, Human
ccacagcccacucucagcuccau

SEQ ID NO: 96030 - RNA, 32 nt, Human
ccacagccccagccccagccccuggagauugc

SEQ ID NO: 96031 - RNA, 16 nt, Human
ccacagcccccagggu

SEQ ID NO: 96032 - RNA, 18 nt, Human
ccacagccccccagcccc

SEQ ID NO: 96033 - RNA, 32 nt, Human
ccacagccccgccucccugccuggagcacacu

SEQ ID NO: 96034 - RNA, 32 nt, Human
ccacagccccuccauggcccagaaggaagagg

SEQ ID NO: 96035 - RNA, 32 nt, Human
ccacagccccugcuugggcugccuggcacccu

SEQ ID NO: 96036 - RNA, 23 nt, Human
ccacagcccguggucccccucca

SEQ ID NO: 96037 - RNA, 19 nt, Human
ccacagcccuaagugccac

SEQ ID NO: 96038 - RNA, 23 nt, Human
ccacagcccuccagguccuccag

SEQ ID NO: 96039 - RNA, 32 nt, Human
ccacagcccugagaugggccggcccccuuccu

SEQ ID NO: 96040 - RNA, 32 nt, Human
ccacagcccugagucuaagcaaaagcccaugg

SEQ ID NO: 96041 - RNA, 32 nt, Human
ccacagcccugccuuugguuccuggacauuug

SEQ ID NO: 96042 - RNA, 32 nt, Human
ccacagcccuuacacccgcugccuuagaagag

SEQ ID NO: 96043 - RNA, 32 nt, Human
ccacagccgcacccugccugugccugcacccu

SEQ ID NO: 96044 - RNA, 24 nt, Human
ccacagccgcugcagccggggcag

SEQ ID NO: 96045 - RNA, 32 nt, Human
ccacagccgucacaugguccuccugaaguugg

SEQ ID NO: 96046 - RNA, 32 nt, Human
ccacagccucaacuucucaggcuccagccauc

SEQ ID NO: 96047 - RNA, 18 nt, Human
ccacagccucaaggccac

SEQ ID NO: 96048 - RNA, 32 nt, Human
ccacagccucaaggccacccuaccgucauaua

SEQ ID NO: 96049 - RNA, 32 nt, Human
ccacagccuccaacuccugggcucaaggcauc

SEQ ID NO: 96050 - RNA, 32 nt, Human
ccacagccuccaccccugacccccauccucuu

SEQ ID NO: 96051 - RNA, 32 nt, Human
ccacagccuccccagauagcugugugccugug

SEQ ID NO: 96052 - RNA, 32 nt, Human
ccacagccugggcaucaccaggauucuaaacc

SEQ ID NO: 96053 - RNA, 22 nt, Human
ccacagccugggccucccggga

SEQ ID NO: 96054 - RNA, 22 nt, Human
ccacagccugucccugucuccu

SEQ ID NO: 96055 - RNA, 32 nt, Human
ccacagccuguggcugggaagggagacagagg

SEQ ID NO: 96056 - RNA, 22 nt, Human
ccacagccuuacacuaggcaca

SEQ ID NO: 96057 - RNA, 32 nt, Human
ccacagccuucucaaguccuuccugcagaggg

SEQ ID NO: 96058 - RNA, 23 nt, Human
ccacagccuucucagguccggga

SEQ ID NO: 96059 - RNA, 32 nt, Human
ccacagccuucuccagccugugugauacaagu

SEQ ID NO: 96060 - RNA, 32 nt, Human
ccacagccuugaauaauggcuuccugccuccu

SEQ ID NO: 96061 - RNA, 32 nt, Human
ccacagccuuguggcuagaguacaguggggua

SEQ ID NO: 96062 - RNA, 32 nt, Human
ccacagccuuucucccugccaccacucccuua

SEQ ID NO: 96063 - RNA, 20 nt, Human
ccacagccuuuugguaguga

SEQ ID NO: 96064 - RNA, 32 nt, Human
ccacagcgccgaguacuccagccgggacgcac

SEQ ID NO: 96065 - RNA, 32 nt, Human
ccacagcgcucugggccaggggucggggcucu

SEQ ID NO: 96066 - RNA, 32 nt, Human
ccacagcgggcagcacaaacagccugggagcc

SEQ ID NO: 96067 - RNA, 32 nt, Human
ccacagcgggcuccccagcuuagggaggucug

SEQ ID NO: 96068 - RNA, 32 nt, Human
ccacagcgugugagccuccagcucggggcuuc

SEQ ID NO: 96069 - RNA, 32 nt, Human
ccacagcuaauucccagcaggugaagauguga

SEQ ID NO: 96070 - RNA, 32 nt, Human
ccacagcuacccacuuguugccaccagguugg

SEQ ID NO: 96071 - RNA, 18 nt, Human
ccacagcuagacugcagg

SEQ ID NO: 96072 - RNA, 32 nt, Human
ccacagcucacgaccagaugcaccagcaggag

SEQ ID NO: 96073 - RNA, 32 nt, Human
ccacagcucacugugaccuugaccuucuggac

SEQ ID NO: 96074 - RNA, 32 nt, Human
ccacagcucaggcugggcuguggugccagcau

SEQ ID NO: 96075 - RNA, 32 nt, Human
ccacagcucauccucggaggcaaucccggaaa

SEQ ID NO: 96076 - RNA, 32 nt, Human
ccacagcuccaggacaccgcuguccuggcauu

SEQ ID NO: 96077 - RNA, 32 nt, Human
ccacagcuccuaagaauucucucaccugccuu

SEQ ID NO: 96078 - RNA, 32 nt, Human
ccacagcucucaggaaagugaccuaaguugga

SEQ ID NO: 96079 - RNA, 32 nt, Human
ccacagcucuccaaggaggaagaugguccagg

SEQ ID NO: 96080 - RNA, 21 nt, Human
ccacagcucuggagggcucug

SEQ ID NO: 96081 - RNA, 24 nt, Human
ccacagcucugggccucuuuuugc

SEQ ID NO: 96082 - RNA, 23 nt, Human
ccacagcugauacggcauccugc

SEQ ID NO: 96083 - RNA, 32 nt, Human
ccacagcugauagugauugccuugaauaaauu

SEQ ID NO: 96084 - RNA, 32 nt, Human
ccacagcugcacaggccagggcgcaggcacau

SEQ ID NO: 96085 - RNA, 32 nt, Human
ccacagcugcaccggcagcccaaggggaagga

SEQ ID NO: 96086 - RNA, 32 nt, Human
ccacagcugcagcugauccauaggacuaccgc

SEQ ID NO: 96087 - RNA, 32 nt, Human
ccacagcugcauucaaacucaaaucuguggga

SEQ ID NO: 96088 - RNA, 32 nt, Human
ccacagcugcccuucaggaggcuggcacggag

SEQ ID NO: 96089 - RNA, 32 nt, Human
ccacagcugccuccauuuccuuaaggaagggu

SEQ ID NO: 96090 - RNA, 32 nt, Human
ccacagcugccuccugagcugccugagccugg

SEQ ID NO: 96091 - RNA, 19 nt, Human
ccacagcugcugcucacuu

SEQ ID NO: 96092 - RNA, 32 nt, Human
ccacagcuggagaguccuggcugagccuuggg

SEQ ID NO: 96093 - RNA, 32 nt, Human
ccacagcugggaacaaguggggcugggaagcu

SEQ ID NO: 96094 - RNA, 32 nt, Human
ccacagcuguaugauucccagccagacacagc

SEQ ID NO: 96095 - RNA, 32 nt, Human
ccacagcuguggggcuucagcagccacaccag

SEQ ID NO: 96096 - RNA, 32 nt, Human
ccacagcuucccaccuccuccccaccaaaccg

SEQ ID NO: 96097 - RNA, 19 nt, Human
ccacagcuucccgggucau

SEQ ID NO: 96098 - RNA, 23 nt, Human
ccacagcuuccgccacauccugc

SEQ ID NO: 96099 - RNA, 32 nt, Human
ccacagcuuccuguccccaucugucggccuac

SEQ ID NO: 96100 - RNA, 20 nt, Human
ccacagcuucgggguccugu

SEQ ID NO: 96101 - RNA, 23 nt, Human
ccacagcuuucaucuacuucugu

SEQ ID NO: 96102 - RNA, 24 nt, Human
ccacagcuuuccucccgcuccugc

SEQ ID NO: 96103 - RNA, 25 nt, Human
ccacagcuuuggcgggcacuucugc

SEQ ID NO: 96104 - RNA, 32 nt, Human
ccacaggaaccccgggccugaguggaggcuga

SEQ ID NO: 96105 - RNA, 32 nt, Human
ccacaggaaggaggggagagacaggcagccca

SEQ ID NO: 96106 - RNA, 32 nt, Human
ccacaggaaggcuuugcaaacugugaagugca

SEQ ID NO: 96107 - RNA, 31 nt, Human
ccacaggaaguguccagacaggagaggaaga

SEQ ID NO: 96108 - RNA, 32 nt, Human
ccacaggaauagaauggagggagcuccagaaa

SEQ ID NO: 96109 - RNA, 32 nt, Human
ccacaggaccaccagaagggagagggaaccag

SEQ ID NO: 96110 - RNA, 32 nt, Human
ccacaggaccaccagagaggagagggaaccag

SEQ ID NO: 96111 - RNA, 32 nt, Human
ccacaggacucaugucucaaugcccacaguga

SEQ ID NO: 96112 - RNA, 32 nt, Human
ccacaggagagggagagauuccagcucacugc

SEQ ID NO: 96113 - RNA, 32 nt, Human
ccacaggagcguacucacucagccuggucagc

SEQ ID NO: 96114 - RNA, 32 nt, Human
ccacaggagcugggaccugccugccccugucu

SEQ ID NO: 96115 - RNA, 32 nt, Human
ccacaggaggcugaagcggguugggggaucug

SEQ ID NO: 96116 - RNA, 32 nt, Human
ccacaggaggcugccaccuguaggucacuugg

SEQ ID NO: 96117 - RNA, 32 nt, Human
ccacaggaggcuguuuccuccccugguggauu

SEQ ID NO: 96118 - RNA, 32 nt, Human
ccacaggcaccagaagaaggggacuuucuaag

SEQ ID NO: 96119 - RNA, 19 nt, Human
ccacaggcagacagcccag

SEQ ID NO: 96120 - RNA, 32 nt, Human
ccacaggcagaggccaggaggagcaguaugug

SEQ ID NO: 96121 - RNA, 32 nt, Human
ccacaggcagcagaagucugggcagaguucau

SEQ ID NO: 96122 - RNA, 19 nt, Human
ccacaggcagcuucuccac

SEQ ID NO: 96123 - RNA, 32 nt, Human
ccacaggcaggaggagaagcaugaagagaaaa

SEQ ID NO: 96124 - RNA, 21 nt, Human
ccacaggcaggugcaggcgca

SEQ ID NO: 96125 - RNA, 32 nt, Human
ccacaggccaacacccuuuggucucaugaaua

SEQ ID NO: 96126 - RNA, 32 nt, Human
ccacaggccacuggcccuggguggcucuguca

SEQ ID NO: 96127 - RNA, 32 nt, Human
ccacaggccagccagugaaccuccugggcuuu

SEQ ID NO: 96128 - RNA, 32 nt, Human
ccacaggccagccugcacaggucuccacggug

SEQ ID NO: 96129 - RNA, 24 nt, Human
ccacaggccuacagcuucuccuca

SEQ ID NO: 96130 - RNA, 32 nt, Human
ccacaggccuagaacaguuaaagggaacauaa

SEQ ID NO: 96131 - RNA, 19 nt, Human
ccacaggccugccccaggc

SEQ ID NO: 96132 - RNA, 32 nt, Human
ccacaggccuggaggaguuuccuggccuguca

SEQ ID NO: 96133 - RNA, 32 nt, Human
ccacaggccuggccuggagaaacccacagccu

SEQ ID NO: 96134 - RNA, 32 nt, Human
ccacaggcgacugccaccacacccagcuaauu

SEQ ID NO: 96135 - RNA, 32 nt, Human
ccacaggcgcccccaccauguccggcuaauuu

SEQ ID NO: 96136 - RNA, 32 nt, Human
ccacaggcgccuuccucuguccuuccugcucu

SEQ ID NO: 96137 - RNA, 32 nt, Human
ccacaggcucaaccugcacuuccuaggcagcu

SEQ ID NO: 96138 - RNA, 32 nt, Human
ccacaggcugccauagcacaagugagaauuuc

SEQ ID NO: 96139 - RNA, 21 nt, Human
ccacaggcuggaguacagugg

SEQ ID NO: 96140 - RNA, 22 nt, Human
ccacaggcuggaguacaguggc

SEQ ID NO: 96141 - RNA, 32 nt, Human
ccacaggcuggcugugugaucuugggcaaguu

SEQ ID NO: 96142 - RNA, 32 nt, Human
ccacaggcuggggcugggggagagggaaggua

SEQ ID NO: 96143 - RNA, 25 nt, Human
ccacaggcuggggggcuccgguucc

SEQ ID NO: 96144 - RNA, 32 nt, Human
ccacaggcuuucugaccauccauucguugggu

SEQ ID NO: 96145 - RNA, 32 nt, Human
ccacagggaaaccucuugucccucuggaaacu

SEQ ID NO: 96146 - RNA, 20 nt, Human
ccacagggaacagggcagcu

SEQ ID NO: 96147 - RNA, 32 nt, Human
ccacagggaacaucuauuugggcuuugauguu

SEQ ID NO: 96148 - RNA, 18 nt, Human
ccacagggaagcugcaga

SEQ ID NO: 96149 - RNA, 32 nt, Human
ccacagggaccccagccuggguggucacuaga

SEQ ID NO: 96150 - RNA, 32 nt, Human
ccacagggacccugcacucgacccugggggcu

SEQ ID NO: 96151 - RNA, 32 nt, Human
ccacagggcagaccccgcugcacucacaggga

SEQ ID NO: 96152 - RNA, 32 nt, Human
ccacagggcccagccccucuccccugcccaag

SEQ ID NO: 96153 - RNA, 32 nt, Human
ccacagggcuuagugggucccccaggcugagg

SEQ ID NO: 96154 - RNA, 32 nt, Human
ccacagggcuucuaggcagggaaagggcacac

SEQ ID NO: 96155 - RNA, 23 nt, Human
ccacaggggaggccucagccagg

SEQ ID NO: 96156 - RNA, 22 nt, Human
ccacaggggcuccuggcuccug

SEQ ID NO: 96157 - RNA, 32 nt, Human
ccacaggguagaggccaggugccugaggacag

SEQ ID NO: 96158 - RNA, 18 nt, Human
ccacaggguccucagggg

SEQ ID NO: 96159 - RNA, 32 nt, Human
ccacaggguccugcaggcuccaucagucaccg

SEQ ID NO: 96160 - RNA, 32 nt, Human
ccacagggugagcacucuggggugggaggguc

SEQ ID NO: 96161 - RNA, 24 nt, Human
ccacaggguggacuggcugggccc

SEQ ID NO: 96162 - RNA, 32 nt, Human
ccacaggguuguugcugcccaggcucuagauc

SEQ ID NO: 96163 - RNA, 32 nt, Human
ccacagguaguuaaugcugggggaagaggggg

SEQ ID NO: 96164 - RNA, 32 nt, Human
ccacagguaugcaccaccacgcccagcuaauu

SEQ ID NO: 96165 - RNA, 32 nt, Human
ccacaggucagguggaggguggggcgugggca

SEQ ID NO: 96166 - RNA, 32 nt, Human
ccacaggucucagacugacaggagacuggguc

SEQ ID NO: 96167 - RNA, 32 nt, Human
ccacaggugccaugugcacacuccugguuuuc

SEQ ID NO: 96168 - RNA, 32 nt, Human
ccacaggugcccgccaccacacccaacuaauu

SEQ ID NO: 96169 - RNA, 32 nt, Human
ccacaggugccuggaggagcugugcugccgga

SEQ ID NO: 96170 - RNA, 32 nt, Human
ccacagguguuuauacagcucagcuuuuuguc

SEQ ID NO: 96171 - RNA, 32 nt, Human
ccacagguucauauccagaggaauggcagauc

SEQ ID NO: 96172 - RNA, 32 nt, Human
ccacagguucuacucauccuagcaaguuccuu

SEQ ID NO: 96173 - RNA, 32 nt, Human
ccacaguacacacgugcuuccucucuugacau

SEQ ID NO: 96174 - RNA, 32 nt, Human
ccacaguaccccagccucacacaugcacuccu

SEQ ID NO: 96175 - RNA, 32 nt, Human
ccacaguacuccuggucuuucuuucugcuaug

SEQ ID NO: 96176 - RNA, 32 nt, Human
ccacagucaaagaaggauggcaccuaaaccac

SEQ ID NO: 96177 - RNA, 32 nt, Human
ccacagucagaccugucccauggcuuagucca

SEQ ID NO: 96178 - RNA, 32 nt, Human
ccacagucagauucagcaccugccucagaucu

SEQ ID NO: 96179 - RNA, 32 nt, Human
ccacagucagggaaggacucucacuuauuugu

SEQ ID NO: 96180 - RNA, 32 nt, Human
ccacagucauauaugggagaccucaaguugcu

SEQ ID NO: 96181 - RNA, 19 nt, Human
ccacaguccagacacaggc

SEQ ID NO: 96182 - RNA, 32 nt, Human
ccacagucccuuuaaagaaacaugguuugacu

SEQ ID NO: 96183 - RNA, 32 nt, Human
ccacaguccuccagcagugaaggauccaguga

SEQ ID NO: 96184 - RNA, 32 nt, Human
ccacaguccuccaggcgccagugggaucaaga

SEQ ID NO: 96185 - RNA, 32 nt, Human
ccacaguccucuucagggccugggcagcccca

SEQ ID NO: 96186 - RNA, 32 nt, Human
ccacagucggacugcauugcuuggguccccau

SEQ ID NO: 96187 - RNA, 32 nt, Human
ccacagucuagacugugucagaguucacccca

SEQ ID NO: 96188 - RNA, 32 nt, Human
ccacagucuccagccugaagcggaaguggagg

SEQ ID NO: 96189 - RNA, 21 nt, Human
ccacagugcaccagagcacag

SEQ ID NO: 96190 - RNA, 32 nt, Human
ccacagugcauucaugcagcugacaguuauau

SEQ ID NO: 96191 - RNA, 32 nt, Human
ccacagugccacucuggcugggcaggggcuuc

SEQ ID NO: 96192 - RNA, 32 nt, Human
ccacagugcccaccugcucuccaggccccagg

SEQ ID NO: 96193 - RNA, 32 nt, Human
ccacagugcccauuuuucauccagggagaacc

SEQ ID NO: 96194 - RNA, 24 nt, Human
ccacagugcugggauuacaggagu

SEQ ID NO: 96195 - RNA, 22 nt, Human
ccacagugcugggauuacaggc

SEQ ID NO: 96196 - RNA, 24 nt, Human
ccacagugcugggauuacaggcgu

SEQ ID NO: 96197 - RNA, 24 nt, Human
ccacagugcugggauuaccggcgu

SEQ ID NO: 96198 - RNA, 22 nt, Human
ccacagugcugggauuagaggc

SEQ ID NO: 96199 - RNA, 25 nt, Human
ccacagugcugggcggcaucccugc

SEQ ID NO: 96200 - RNA, 17 nt, Human
ccacaguggaagcuguc

SEQ ID NO: 96201 - RNA, 32 nt, Human
ccacagugggagguggugguggguggcggugg

SEQ ID NO: 96202 - RNA, 32 nt, Human
ccacaguggggugaccacccugagcuuacagc

SEQ ID NO: 96203 - RNA, 20 nt, Human
ccacaguuaagauccagccu

SEQ ID NO: 96204 - RNA, 32 nt, Human
ccacaguuacagccacaagccugccuccuccc

SEQ ID NO: 96205 - RNA, 22 nt, Human
ccacaguucacauuaugcaucu

SEQ ID NO: 96206 - RNA, 32 nt, Human
ccacaguucagaaaucaucccacaguguugcu

SEQ ID NO: 96207 - RNA, 20 nt, Human
ccacaguucauggcggcucu

SEQ ID NO: 96208 - RNA, 32 nt, Human
ccacaguucccaggcuggggaugcuuugccuu

SEQ ID NO: 96209 - RNA, 22 nt, Human
ccacaguucucaaggaagggcc

SEQ ID NO: 96210 - RNA, 22 nt, Human
ccacaguucuccagggacccau

SEQ ID NO: 96211 - RNA, 25 nt, Human
ccacaguugagaagcggaggggcca

SEQ ID NO: 96212 - RNA, 32 nt, Human
ccacaguugcacugccccaauugucuaccuuu

SEQ ID NO: 96213 - RNA, 32 nt, Human
ccacaguugcagccaacgguucuugaaagcuc

SEQ ID NO: 96214 - RNA, 32 nt, Human
ccacaguugccagcuuuauuugccuucuacag

SEQ ID NO: 96215 - RNA, 32 nt, Human
ccacaguugcucuaacacagaccuuugaggau

SEQ ID NO: 96216 - RNA, 32 nt, Human
ccacaguugucuuugccggagcugcagucgcg

SEQ ID NO: 96217 - RNA, 19 nt, Human
ccacaguuuuacuggggcc

SEQ ID NO: 96218 - RNA, 32 nt, Human
ccacaguuuuucccugccuucuggacccucag

SEQ ID NO: 96219 - RNA, 32 nt, Human
ccacauaaagagagcuucucagagccugacug

SEQ ID NO: 96220 - RNA, 32 nt, Human
ccacauacagauggaugaaacuacuuacugau

SEQ ID NO: 96221 - RNA, 32 nt, Human
ccacauacuauugugaguucucagagcaugaa

SEQ ID NO: 96222 - RNA, 32 nt, Human
ccacauacucuacuccuccugucccuccaagg

SEQ ID NO: 96223 - RNA, 32 nt, Human
ccacauacuuaccaagcaaaaagcccaugaaa

SEQ ID NO: 96224 - RNA, 32 nt, Human
ccacauacuuucagaagagcucagcagggccc

SEQ ID NO: 96225 - RNA, 32 nt, Human
ccacauagcagacccccgccauccucgcagag

SEQ ID NO: 96226 - RNA, 32 nt, Human
ccacauagcccucguaguaacagccauucuca

SEQ ID NO: 96227 - RNA, 32 nt, Human
ccacauaggaauagccugacugagggggaagg

SEQ ID NO: 96228 - RNA, 32 nt, Human
ccacauauaaauguacuuuuccuuccagaaaa

SEQ ID NO: 96229 - RNA, 19 nt, Human
ccacauaugcagggggugc

SEQ ID NO: 96230 - RNA, 32 nt, Human
ccacauauuaucuuacagauguuuccagaaau

SEQ ID NO: 96231 - RNA, 32 nt, Human
ccacaucaaaacaguguguccaccucagucac

SEQ ID NO: 96232 - RNA, 32 nt, Human
ccacaucaauaaacaugacacucugaagugaa

SEQ ID NO: 96233 - RNA, 32 nt, Human
ccacaucaccagaaggauuucuuaggaaaugu

SEQ ID NO: 96234 - RNA, 32 nt, Human
ccacaucacucccccgaguucccaccaccagc

SEQ ID NO: 96235 - RNA, 32 nt, Human
ccacaucacugcacccugaaacagagcaugcu

SEQ ID NO: 96236 - RNA, 32 nt, Human
ccacaucacuuuaacuaaucuaauuacugaag

SEQ ID NO: 96237 - RNA, 32 nt, Human
ccacaucagaaucgucugagggacuuguucac

SEQ ID NO: 96238 - RNA, 32 nt, Human
ccacaucagcacauggccugaccaggaacuac

SEQ ID NO: 96239 - RNA, 18 nt, Human
ccacaucagccccagggu

SEQ ID NO: 96240 - RNA, 32 nt, Human
ccacaucagcuccuugagcuucucccaagugg

SEQ ID NO: 96241 - RNA, 32 nt, Human
ccacaucagggggcuaccaccaugauuccgcu

SEQ ID NO: 96242 - RNA, 32 nt, Human
ccacaucagugagggaaaugugggcaugcaug

SEQ ID NO: 96243 - RNA, 32 nt, Human
ccacaucaucaaguugcagcucagggacuacg

SEQ ID NO: 96244 - RNA, 32 nt, Human
ccacauccaaaggauguggagcucuuuaaaaa

SEQ ID NO: 96245 - RNA, 17 nt, Human
ccacauccacacacgca

SEQ ID NO: 96246 - RNA, 32 nt, Human
ccacauccaggugcacagagugcgagugcacu

SEQ ID NO: 96247 - RNA, 32 nt, Human
ccacaucccacacucccacugccuggcuccaa

SEQ ID NO: 96248 - RNA, 32 nt, Human
ccacaucccaggaggccgaggcggcuugcccc

SEQ ID NO: 96249 - RNA, 21 nt, Human
ccacauccccaauauccuaga

SEQ ID NO: 96250 - RNA, 21 nt, Human
ccacauccccacuguacugga

SEQ ID NO: 96251 - RNA, 32 nt, Human
ccacauccccaggcauaacaccaccuucccac

SEQ ID NO: 96252 - RNA, 32 nt, Human
ccacaucccgcauccggcaucccagcggccgg

SEQ ID NO: 96253 - RNA, 32 nt, Human
ccacaucccuaaaaucuuggaggggcagacca

SEQ ID NO: 96254 - RNA, 22 nt, Human
ccacaucccugaagcugucaga

SEQ ID NO: 96255 - RNA, 32 nt, Human
ccacaucccugauuccuguuguuauggaaacu

SEQ ID NO: 96256 - RNA, 32 nt, Human
ccacaucccugcuggaugcaggacccguccaa

SEQ ID NO: 96257 - RNA, 32 nt, Human
ccacaucccuuuccuuacuacuugccugcacu

SEQ ID NO: 96258 - RNA, 32 nt, Human
ccacauccgaaucuguggcaccacagaggagc

SEQ ID NO: 96259 - RNA, 32 nt, Human
ccacauccgcugucugcugcugccucuuuccu

SEQ ID NO: 96260 - RNA, 32 nt, Human
ccacauccguaaauaaacuuccuucacuacaa

SEQ ID NO: 96261 - RNA, 32 nt, Human
ccacauccguccucccccuucccaggcccgga

SEQ ID NO: 96262 - RNA, 24 nt, Human
ccacauccguggauucacccaacu

SEQ ID NO: 96263 - RNA, 18 nt, Human
ccacauccucacacauug

SEQ ID NO: 96264 - RNA, 32 nt, Human
ccacauccucccccucccuuuccucaugaacc

SEQ ID NO: 96265 - RNA, 24 nt, Human
ccacauccucgguccccaaccacu

SEQ ID NO: 96266 - RNA, 32 nt, Human
ccacauccugggaacacuuucauguaaccccu

SEQ ID NO: 96267 - RNA, 32 nt, Human
ccacauccuguccuaucucccccaaaccauac

SEQ ID NO: 96268 - RNA, 32 nt, Human
ccacauccugucuuagccgcagucuccagaac

SEQ ID NO: 96269 - RNA, 32 nt, Human
ccacauccuucucuuccauuagaagaagcccu

SEQ ID NO: 96270 - RNA, 23 nt, Human
ccacaucggcaacuucagccugg

SEQ ID NO: 96271 - RNA, 32 nt, Human
ccacaucggucugccuucgaccuucuucccag

SEQ ID NO: 96272 - RNA, 32 nt, Human
ccacaucuaaaguucaagaaacuagucuguca

SEQ ID NO: 96273 - RNA, 32 nt, Human
ccacaucuacaucagugaaagcuaucuaccua

SEQ ID NO: 96274 - RNA, 32 nt, Human
ccacaucuagauagaugugagcuuuuucuucu

SEQ ID NO: 96275 - RNA, 32 nt, Human
ccacaucuagcuuccucccucuccucugcuuc

SEQ ID NO: 96276 - RNA, 32 nt, Human
ccacaucucaauccugaacaucuaggcuggaa

SEQ ID NO: 96277 - RNA, 32 nt, Human
ccacaucuccuccaaacacacacaggaccuca

SEQ ID NO: 96278 - RNA, 32 nt, Human
ccacaucucugaaagcacaggagacacugugc

SEQ ID NO: 96279 - RNA, 32 nt, Human
ccacaucugccucuggcugccugcguccucuc

SEQ ID NO: 96280 - RNA, 32 nt, Human
ccacaucuguaaucccagcacuuugggaggcu

SEQ ID NO: 96281 - RNA, 32 nt, Human
ccacaucugugaaugggaauuaagcuuccccu

SEQ ID NO: 96282 - RNA, 23 nt, Human
ccacaucuguggauucaaccaac

SEQ ID NO: 96283 - RNA, 24 nt, Human
ccacaucuguggauucaaccaacu

SEQ ID NO: 96284 - RNA, 32 nt, Human
ccacaucuucacauugguucugaucugagacc

SEQ ID NO: 96285 - RNA, 32 nt, Human
ccacaucuucacucaagccaggagagggaaag

SEQ ID NO: 96286 - RNA, 32 nt, Human
ccacaucuuguccuacuggaagguuuucaggg

SEQ ID NO: 96287 - RNA, 20 nt, Human
ccacaugaacuggacugaga

SEQ ID NO: 96288 - RNA, 32 nt, Human
ccacaugacucugccucccaaagugcugccau

SEQ ID NO: 96289 - RNA, 32 nt, Human
ccacaugaggggaugaauuuuuccaguccccu

SEQ ID NO: 96290 - RNA, 24 nt, Human
ccacaugcaacacuguguccagca

SEQ ID NO: 96291 - RNA, 18 nt, Human
ccacaugcaacuauugca

SEQ ID NO: 96292 - RNA, 32 nt, Human
ccacaugcacacacacucacgcaugagcaaac

SEQ ID NO: 96293 - RNA, 20 nt, Human
ccacaugcagacaggaggaa

SEQ ID NO: 96294 - RNA, 32 nt, Human
ccacaugcaugucugccuaugcacugaagagc

SEQ ID NO: 96295 - RNA, 21 nt, Human
ccacaugccacuggaagggaa

SEQ ID NO: 96296 - RNA, 32 nt, Human
ccacaugccacuggaagggaagugggugucca

SEQ ID NO: 96297 - RNA, 32 nt, Human
ccacaugccagaaugucccugcccuucucucc

SEQ ID NO: 96298 - RNA, 19 nt, Human
ccacaugccagugaaggaa

SEQ ID NO: 96299 - RNA, 32 nt, Human
ccacaugccuguaauuccagcuacuugggagg

SEQ ID NO: 96300 - RNA, 32 nt, Human
ccacaugccuguagucccagcuacuugggaag

SEQ ID NO: 96301 - RNA, 32 nt, Human
ccacaugcgaaggacagccugcagugaccaga

SEQ ID NO: 96302 - RNA, 19 nt, Human
ccacaugcgaggcggcugg

SEQ ID NO: 96303 - RNA, 32 nt, Human
ccacaugcgguggcucaugccuguaaucccag

SEQ ID NO: 96304 - RNA, 32 nt, Human
ccacaugcuccaagccacagguccccaaauag

SEQ ID NO: 96305 - RNA, 32 nt, Human
ccacaugcucuagacuagucugggcaacauag

SEQ ID NO: 96306 - RNA, 32 nt, Human
ccacaugcugacacagacucacucagagaccc

SEQ ID NO: 96307 - RNA, 19 nt, Human
ccacaugcugguccgcaga

SEQ ID NO: 96308 - RNA, 32 nt, Human
ccacaugcuuuucucacuugacauguagauga

SEQ ID NO: 96309 - RNA, 32 nt, Human
ccacauggaaacagaguguggcccugaaguug

SEQ ID NO: 96310 - RNA, 32 nt, Human
ccacauggacuggggugcaaugggacagcugc

SEQ ID NO: 96311 - RNA, 32 nt, Human
ccacauggagaaagagaggccacauggaguaa

SEQ ID NO: 96312 - RNA, 32 nt, Human
ccacauggcaggcaugaagauucagccugugg

SEQ ID NO: 96313 - RNA, 19 nt, Human
ccacauggccaucugcucc

SEQ ID NO: 96314 - RNA, 32 nt, Human
ccacauggcuggacuccagccaggaggacaca

SEQ ID NO: 96315 - RNA, 32 nt, Human
ccacaugggagggugagcaggagcaaggcugu

SEQ ID NO: 96316 - RNA, 32 nt, Human
ccacauggggcugcucuugcuucuacuaaaag

SEQ ID NO: 96317 - RNA, 32 nt, Human
ccacaugguaccccuuugguaaguaggcuuca

SEQ ID NO: 96318 - RNA, 18 nt, Human
ccacauggugaaacccau

SEQ ID NO: 96319 - RNA, 19 nt, Human
ccacauggugaaacccugu

SEQ ID NO: 96320 - RNA, 19 nt, Human
ccacauggugcaaccccgu

SEQ ID NO: 96321 - RNA, 32 nt, Human
ccacaugguggaggcagcgaugagaccuggag

SEQ ID NO: 96322 - RNA, 23 nt, Human
ccacaugucacccacccaccgca

SEQ ID NO: 96323 - RNA, 32 nt, Human
ccacaugucuucacggaggcuuccagcggugc

SEQ ID NO: 96324 - RNA, 32 nt, Human
ccacaugugcuggcacuuaccuguagucccag

SEQ ID NO: 96325 - RNA, 32 nt, Human
ccacauguggacccucagccuggguggguucu

SEQ ID NO: 96326 - RNA, 21 nt, Human
ccacauguggccaucugcucc

SEQ ID NO: 96327 - RNA, 20 nt, Human
ccacauguggggacuggaga

SEQ ID NO: 96328 - RNA, 20 nt, Human
ccacauguuaucuaaaggaa

SEQ ID NO: 96329 - RNA, 18 nt, Human
ccacauguucucaaggcc

SEQ ID NO: 96330 - RNA, 32 nt, Human
ccacauguuggccaggcuggucucgaauuccu

SEQ ID NO: 96331 - RNA, 32 nt, Human
ccacauuacuaaggagaaugaaaagcacugag

SEQ ID NO: 96332 - RNA, 32 nt, Human
ccacauucaaaccuguuaauucgcuguuauca

SEQ ID NO: 96333 - RNA, 18 nt, Human
ccacauuccaucagugaa

SEQ ID NO: 96334 - RNA, 32 nt, Human
ccacauucccaaguuuaggugcacugagccau

SEQ ID NO: 96335 - RNA, 23 nt, Human
ccacauucccacuagugggucuu

SEQ ID NO: 96336 - RNA, 24 nt, Human
ccacauuccccagugagaauucuu

SEQ ID NO: 96337 - RNA, 32 nt, Human
ccacauuccccugccuugccccugagcacuuc

SEQ ID NO: 96338 - RNA, 32 nt, Human
ccacauuccucuacuguuuucuuucugauacu

SEQ ID NO: 96339 - RNA, 20 nt, Human
ccacauuccuggccacaccc

SEQ ID NO: 96340 - RNA, 32 nt, Human
ccacauuccuggggagggugguucuccuguau

SEQ ID NO: 96341 - RNA, 23 nt, Human
ccacauuccuuuaacggaggucu

SEQ ID NO: 96342 - RNA, 32 nt, Human
ccacauucuaguuggaacacaggacagugaaa

SEQ ID NO: 96343 - RNA, 32 nt, Human
ccacauucuccacugcguguggucaaaguucc

SEQ ID NO: 96344 - RNA, 32 nt, Human
ccacauucucucucacucacauuuucucagug

SEQ ID NO: 96345 - RNA, 20 nt, Human
ccacauucucuucagggucu

SEQ ID NO: 96346 - RNA, 32 nt, Human
ccacauucugcaccuccuuccugcuuuccuag

SEQ ID NO: 96347 - RNA, 20 nt, Human
ccacauucuggccccuggca

SEQ ID NO: 96348 - RNA, 32 nt, Human
ccacauucuuaaagaaacuuucccuuccuuua

SEQ ID NO: 96349 - RNA, 25 nt, Human
ccacauugcacucugacuugccugg

SEQ ID NO: 96350 - RNA, 32 nt, Human
ccacauugcaguguagcaggugccauccuuca

SEQ ID NO: 96351 - RNA, 22 nt, Human
ccacauugcccaggcuggucuc

SEQ ID NO: 96352 - RNA, 23 nt, Human
ccacauuggccaggcuggucuca

SEQ ID NO: 96353 - RNA, 32 nt, Human
ccacauuggccaggcuggucucaaaugacccu

SEQ ID NO: 96354 - RNA, 23 nt, Human
ccacauuggucaggcuggucuca

SEQ ID NO: 96355 - RNA, 32 nt, Human
ccacauugguuucugauuuuguucugucacuc

SEQ ID NO: 96356 - RNA, 32 nt, Human
ccacauuguggaguggcaagugcugcugccag

SEQ ID NO: 96357 - RNA, 32 nt, Human
ccacauuuaacuuauucacuuacagaacuaug

SEQ ID NO: 96358 - RNA, 32 nt, Human
ccacauuuacagccagaaucaacauucccugg

SEQ ID NO: 96359 - RNA, 32 nt, Human
ccacauuuacauaggaaccaaaucaaugaauu

SEQ ID NO: 96360 - RNA, 21 nt, Human
ccacauuuagauccaaccagc

SEQ ID NO: 96361 - RNA, 32 nt, Human
ccacauuucauugucuuagucaaagcaggauu

SEQ ID NO: 96362 - RNA, 32 nt, Human
ccacauuucuaauaccaccaccccugugcuuc

SEQ ID NO: 96363 - RNA, 32 nt, Human
ccacauuugcaaccuuggccaucuguccagaa

SEQ ID NO: 96364 - RNA, 32 nt, Human
ccacauuugccacccucugagcccaccagucc

SEQ ID NO: 96365 - RNA, 32 nt, Human
ccacauuugcccggcccccuggagcugggucu

SEQ ID NO: 96366 - RNA, 32 nt, Human
ccacauuugcuagagggagggagcagccacgg

SEQ ID NO: 96367 - RNA, 32 nt, Human
ccacauuugcugcuuugcagggagaguuggcc

SEQ ID NO: 96368 - RNA, 32 nt, Human
ccacauuuggaaggcacugccuucagcugagu

SEQ ID NO: 96369 - RNA, 32 nt, Human
ccacauuuggccauuucccagaagggccccac

SEQ ID NO: 96370 - RNA, 32 nt, Human
ccacauuuguuuugccaauuugcacauuaaau

SEQ ID NO: 96371 - RNA, 32 nt, Human
ccacauuuguuuuuaacccagaauuucugaaa

SEQ ID NO: 96372 - RNA, 32 nt, Human
ccacauuuuaacaguaccugugccugagaauu

SEQ ID NO: 96373 - RNA, 32 nt, Human
ccacauuuuacuacaguaaauggcaguguuuu

SEQ ID NO: 96374 - RNA, 17 nt, Human
ccacauuuucuccucag

SEQ ID NO: 96375 - RNA, 32 nt, Human
ccacauuuuucuuccgcacugcccuagcagag

SEQ ID NO: 96376 - RNA, 22 nt, Human
ccaccaaaccaugguccuuuaa

SEQ ID NO: 96377 - RNA, 32 nt, Human
ccaccaaacuccugcacaaccaccucaagaau

SEQ ID NO: 96378 - RNA, 19 nt, Human
ccaccaaagagucuccuga

SEQ ID NO: 96379 - RNA, 32 nt, Human
ccaccaaagccccagggauggagcccaguggc

SEQ ID NO: 96380 - RNA, 32 nt, Human
ccaccaaagcuacaaaccuaaaaugcugcugc

SEQ ID NO: 96381 - RNA, 32 nt, Human
ccaccaaaggaacagguuuagguggagacaac

SEQ ID NO: 96382 - RNA, 32 nt, Human
ccaccaaagggaggcuagggacaggaaagcca

SEQ ID NO: 96383 - RNA, 21 nt, Human
ccaccaaagggccucugcucc

SEQ ID NO: 96384 - RNA, 32 nt, Human
ccaccaaagugaugcagugguuaccaugacac

SEQ ID NO: 96385 - RNA, 32 nt, Human
ccaccaacaagaaacauuccuucucccggaca

SEQ ID NO: 96386 - RNA, 32 nt, Human
ccaccaacacaaaaucagucagauuuguuaaa

SEQ ID NO: 96387 - RNA, 32 nt, Human
ccaccaacacccacuccagacucuguaggggg

SEQ ID NO: 96388 - RNA, 32 nt, Human
ccaccaacagcaguuguaggcugcccuggagg

SEQ ID NO: 96389 - RNA, 19 nt, Human
ccaccaacagugucuccau

SEQ ID NO: 96390 - RNA, 16 nt, Human
ccaccaacauccaucc

SEQ ID NO: 96391 - RNA, 32 nt, Human
ccaccaacaugguccagcgcaaucagaagagg

SEQ ID NO: 96392 - RNA, 32 nt, Human
ccaccaaccccaaagaacugggaugaaagcag

SEQ ID NO: 96393 - RNA, 32 nt, Human
ccaccaaccccaucaggauuuccccaggggaa

SEQ ID NO: 96394 - RNA, 32 nt, Human
ccaccaacuccuccuccugcugcugcccuucc

SEQ ID NO: 96395 - RNA, 32 nt, Human
ccaccaagacacagcaggacaggccaggggag

SEQ ID NO: 96396 - RNA, 32 nt, Human
ccaccaagacugaaagaaacuaauuuauuucu

SEQ ID NO: 96397 - RNA, 32 nt, Human
ccaccaagagagcaaugggcagggaaggaagg

SEQ ID NO: 96398 - RNA, 32 nt, Human
ccaccaagcccagcuaauuguauuuuuaguag

SEQ ID NO: 96399 - RNA, 32 nt, Human
ccaccaagccugacagaaggaacacugcuuga

SEQ ID NO: 96400 - RNA, 32 nt, Human
ccaccaagcucacaccuguccuucucaggcug

SEQ ID NO: 96401 - RNA, 32 nt, Human
ccaccaaggaagaagagagaggagaagaggag

SEQ ID NO: 96402 - RNA, 32 nt, Human
ccaccaaggagagcccggacggagcagcgagg

SEQ ID NO: 96403 - RNA, 32 nt, Human
ccaccaaggaugaagaaaggaggacuuuuaaa

SEQ ID NO: 96404 - RNA, 32 nt, Human
ccaccaaggaugaccuguggacugccaucgga

SEQ ID NO: 96405 - RNA, 22 nt, Human
ccaccaaggcuuucccaucuug

SEQ ID NO: 96406 - RNA, 18 nt, Human
ccaccaagggcccugcga

SEQ ID NO: 96407 - RNA, 32 nt, Human
ccaccaaggucggcgcgucugaagagcguuuu

SEQ ID NO: 96408 - RNA, 24 nt, Human
ccaccaagguggacgcugggcccc

SEQ ID NO: 96409 - RNA, 32 nt, Human
ccaccaaguauuuuaaaagugugccaccuuuu

SEQ ID NO: 96410 - RNA, 32 nt, Human
ccaccaagucgcagguccucagccuggggcau

SEQ ID NO: 96411 - RNA, 32 nt, Human
ccaccaaguguaucuccagucugaucaccaua

SEQ ID NO: 96412 - RNA, 32 nt, Human
ccaccaaguugcccauugaugggugagccucc

SEQ ID NO: 96413 - RNA, 32 nt, Human
ccaccaaugagcugcacguuggaggggaagug

SEQ ID NO: 96414 - RNA, 32 nt, Human
ccaccaaugucuuaaucccacauuuucuucac

SEQ ID NO: 96415 - RNA, 32 nt, Human
ccaccacaacagcauguggucugacagaauug

SEQ ID NO: 96416 - RNA, 32 nt, Human
ccaccacaaugacagaaaugacaacaaggccc

SEQ ID NO: 96417 - RNA, 32 nt, Human
ccaccacaccaccacaaaauggccuuuagugu

SEQ ID NO: 96418 - RNA, 32 nt, Human
ccaccacaccacuggauauuccugggagucac

SEQ ID NO: 96419 - RNA, 32 nt, Human
ccaccacaccagcuaauuuuuguauuuuuagu

SEQ ID NO: 96420 - RNA, 22 nt, Human
ccaccacaccaggccagagcua

SEQ ID NO: 96421 - RNA, 32 nt, Human
ccaccacaccaggcuaauuuuguauuuuuagu

SEQ ID NO: 96422 - RNA, 32 nt, Human
ccaccacacccagcuaauuuuguauuuuuagu

SEQ ID NO: 96423 - RNA, 32 nt, Human
ccaccacacccagcuaauuuuguauuuuuggu

SEQ ID NO: 96424 - RNA, 32 nt, Human
ccaccacacccggcuaauuuuguauuuuuagu

SEQ ID NO: 96425 - RNA, 32 nt, Human
ccaccacacccggcuaauuuuguauuuuucag

SEQ ID NO: 96426 - RNA, 32 nt, Human
ccaccacaccuagcuaauuuuguauuuuuagu

SEQ ID NO: 96427 - RNA, 32 nt, Human
ccaccacaccuggccuauguguguuuuaugau

SEQ ID NO: 96428 - RNA, 32 nt, Human
ccaccacaccuggcuaauuuuguauuuuuagu

SEQ ID NO: 96429 - RNA, 32 nt, Human
ccaccacaccuggcugauuuuguauuuuuagu

SEQ ID NO: 96430 - RNA, 32 nt, Human
ccaccacaccuguuaacacacgcagacgcaca

SEQ ID NO: 96431 - RNA, 32 nt, Human
ccaccacacucccacacuccagccuggguaac

SEQ ID NO: 96432 - RNA, 32 nt, Human
ccaccacacugccaccacccugcacacagucu

SEQ ID NO: 96433 - RNA, 32 nt, Human
ccaccacacuggcuaauuuuuguauuuuuagu

SEQ ID NO: 96434 - RNA, 32 nt, Human
ccaccacacuucggcuccgcugaccccugcga

SEQ ID NO: 96435 - RNA, 32 nt, Human
ccaccacagcacaccggugcuggccacaccag

SEQ ID NO: 96436 - RNA, 32 nt, Human
ccaccacagcacagcaaagccgcuauagccag

SEQ ID NO: 96437 - RNA, 32 nt, Human
ccaccacagcagugccuucucgucgaagcggg

SEQ ID NO: 96438 - RNA, 32 nt, Human
ccaccacagccauccugucccucauuggcucu

SEQ ID NO: 96439 - RNA, 32 nt, Human
ccaccacagccauguaaaaccugcagugccug

SEQ ID NO: 96440 - RNA, 32 nt, Human
ccaccacagcuggcccccuucuguuuuauguu

SEQ ID NO: 96441 - RNA, 32 nt, Human
ccaccacaggcaggggucgacauggcagagac

SEQ ID NO: 96442 - RNA, 32 nt, Human
ccaccacaggccugccccaggcaccuggggcu

SEQ ID NO: 96443 - RNA, 32 nt, Human
ccaccacagggucuggaagugugugugacgcc

SEQ ID NO: 96444 - RNA, 32 nt, Human
ccaccacagguaugcaccaccauaccuggcug

SEQ ID NO: 96445 - RNA, 32 nt, Human
ccaccacaucgccccagaggcuuuuccagcac

SEQ ID NO: 96446 - RNA, 32 nt, Human
ccaccacauuuggaaauccacagcugacaagu

SEQ ID NO: 96447 - RNA, 32 nt, Human
ccaccaccaaaagcaaaagaugauuucccauu

SEQ ID NO: 96448 - RNA, 18 nt, Human
ccaccaccaaagagcuga

SEQ ID NO: 96449 - RNA, 32 nt, Human
ccaccaccacagacaguacaagcaacaguucc

SEQ ID NO: 96450 - RNA, 32 nt, Human
ccaccaccaccaccaucaccaccaccauggac

SEQ ID NO: 96451 - RNA, 32 nt, Human
ccaccaccaccacugagauccggcuugcuaca

SEQ ID NO: 96452 - RNA, 32 nt, Human
ccaccaccaccagucccggcacggcaagagga

SEQ ID NO: 96453 - RNA, 19 nt, Human
ccaccaccacccccagcuc

SEQ ID NO: 96454 - RNA, 32 nt, Human
ccaccaccacugucccuaccacugagcccuug

SEQ ID NO: 96455 - RNA, 22 nt, Human
ccaccaccacuuaccacucgug

SEQ ID NO: 96456 - RNA, 32 nt, Human
ccaccaccagccccaacuguaggcaaggcaca

SEQ ID NO: 96457 - RNA, 21 nt, Human
ccaccaccaugaauggucuga

SEQ ID NO: 96458 - RNA, 32 nt, Human
ccaccaccauguucuaacauguggacccuuua

SEQ ID NO: 96459 - RNA, 32 nt, Human
ccaccaccauuccuuuccucccuucccccugg

SEQ ID NO: 96460 - RNA, 32 nt, Human
ccaccacccaauccucgccucccuucugcucc

SEQ ID NO: 96461 - RNA, 32 nt, Human
ccaccacccacugcaccguggucucgggcuca

SEQ ID NO: 96462 - RNA, 32 nt, Human
ccaccacccacuguguaugaacaagucugaag

SEQ ID NO: 96463 - RNA, 32 nt, Human
ccaccacccaggagcucagagaucuaagcugc

SEQ ID NO: 96464 - RNA, 18 nt, Human
ccaccacccauacugcca

SEQ ID NO: 96465 - RNA, 32 nt, Human
ccaccacccaucaccaauuucucagcuuuagc

SEQ ID NO: 96466 - RNA, 22 nt, Human
ccaccaccccagcugcuccccu

SEQ ID NO: 96467 - RNA, 32 nt, Human
ccaccacccccagcuccugaggugcuggccag

SEQ ID NO: 96468 - RNA, 32 nt, Human
ccaccaccccucuaccucuucagagcuaaugg

SEQ ID NO: 96469 - RNA, 32 nt, Human
ccaccaccccuggcuaaauuuguauuuucagu

SEQ ID NO: 96470 - RNA, 22 nt, Human
ccaccacccucuuucuguacuu

SEQ ID NO: 96471 - RNA, 32 nt, Human
ccaccaccgcagccucgggcucccagggcgga

SEQ ID NO: 96472 - RNA, 32 nt, Human
ccaccaccuccaccaccaccaccaccaccacc

SEQ ID NO: 96473 - RNA, 32 nt, Human
ccaccaccuccaccgccgccucggaacccagg

SEQ ID NO: 96474 - RNA, 32 nt, Human
ccaccaccuccaucggcacccaagcgggcauc

SEQ ID NO: 96475 - RNA, 32 nt, Human
ccaccaccuccuccuccuccuggcccugcugc

SEQ ID NO: 96476 - RNA, 32 nt, Human
ccaccaccucucuuccaugaaggagcaccuua

SEQ ID NO: 96477 - RNA, 32 nt, Human
ccaccaccugcagcuugagauguuaacuauua

SEQ ID NO: 96478 - RNA, 32 nt, Human
ccaccaccuggcaugcccuccuggggccaaga

SEQ ID NO: 96479 - RNA, 32 nt, Human
ccaccaccuggcgucuccgcucccagagccca

SEQ ID NO: 96480 - RNA, 23 nt, Human
ccaccaccugugugaaacugcag

SEQ ID NO: 96481 - RNA, 32 nt, Human
ccaccaccuucucuucucuugucacuaggggg

SEQ ID NO: 96482 - RNA, 23 nt, Human
ccaccacgaaacucagcccagua

SEQ ID NO: 96483 - RNA, 32 nt, Human
ccaccacgcaggcccuugcuucucccaucaac

SEQ ID NO: 96484 - RNA, 32 nt, Human
ccaccacgccagcuaauuuuuguauuuuuagu

SEQ ID NO: 96485 - RNA, 32 nt, Human
ccaccacgccaggcuaauuuuguauuuuuagu

SEQ ID NO: 96486 - RNA, 32 nt, Human
ccaccacgccaggcuaauuuuguauuuuuggu

SEQ ID NO: 96487 - RNA, 32 nt, Human
ccaccacgcccaacuaauuuuguauuuuuagu

SEQ ID NO: 96488 - RNA, 32 nt, Human
ccaccacgcccagcaauuuuuguauuuuuagu

SEQ ID NO: 96489 - RNA, 32 nt, Human
ccaccacgcccagccagaaauugcuucccaag

SEQ ID NO: 96490 - RNA, 32 nt, Human
ccaccacgcccagccuagaaaugauucuuaga

SEQ ID NO: 96491 - RNA, 32 nt, Human
ccaccacgcccagccuguggccagcacuuuag

SEQ ID NO: 96492 - RNA, 32 nt, Human
ccaccacgcccagcuaauuuuguauuuuuagu

SEQ ID NO: 96493 - RNA, 32 nt, Human
ccaccacgcccagcuauuuuuguauuuuuagu

SEQ ID NO: 96494 - RNA, 32 nt, Human
ccaccacgcccagcuuauuuuguauuuuuagu

SEQ ID NO: 96495 - RNA, 32 nt, Human
ccaccacgcccggcuaauuuuguauuucuagu

SEQ ID NO: 96496 - RNA, 32 nt, Human
ccaccacgcccggcuaauuuuguauuuucagu

SEQ ID NO: 96497 - RNA, 32 nt, Human
ccaccacgcccggcuaauuuuguauuuuuaag

SEQ ID NO: 96498 - RNA, 32 nt, Human
ccaccacgcccggcuaauuuuguauuuuuagu

SEQ ID NO: 96499 - RNA, 32 nt, Human
ccaccacgcccggcuaauuuuguauuuuucau

SEQ ID NO: 96500 - RNA, 32 nt, Human
ccaccacgccgacuaauuuuuguauuuuuagu

SEQ ID NO: 96501 - RNA, 32 nt, Human
ccaccacgccugacuaauuuuguauuuuuagu

SEQ ID NO: 96502 - RNA, 32 nt, Human
ccaccacgccuggccaauuuuguauuuuagua

SEQ ID NO: 96503 - RNA, 32 nt, Human
ccaccacgccuggcuaauguuguauuuuagua

SEQ ID NO: 96504 - RNA, 32 nt, Human
ccaccacgccuggcuaauuuuguauuuuuagu

SEQ ID NO: 96505 - RNA, 32 nt, Human
ccaccacgccuggcuggaauacuuacucuugu

SEQ ID NO: 96506 - RNA, 32 nt, Human
ccaccacgccuggcuggaauucugugucauuc

SEQ ID NO: 96507 - RNA, 32 nt, Human
ccaccacgcuggcuaauuuuuguauuuuuagu

SEQ ID NO: 96508 - RNA, 21 nt, Human
ccaccacggggggagagccag

SEQ ID NO: 96509 - RNA, 32 nt, Human
ccaccacgucuggcuaauuuuguauuuuuagu

SEQ ID NO: 96510 - RNA, 32 nt, Human
ccaccacguggugcaagaguucugagggaccg

SEQ ID NO: 96511 - RNA, 32 nt, Human
ccaccacuacaccacacaugcuuauaacaggc

SEQ ID NO: 96512 - RNA, 32 nt, Human
ccaccacuaccaccaccacccaacuggggcua

SEQ ID NO: 96513 - RNA, 32 nt, Human
ccaccacuauuccucucucuugcccauugugg

SEQ ID NO: 96514 - RNA, 20 nt, Human
ccaccacucaccucuugguu

SEQ ID NO: 96515 - RNA, 32 nt, Human
ccaccacuccacugggcucgcacaacgccaag

SEQ ID NO: 96516 - RNA, 32 nt, Human
ccaccacucccauccccaccugucccccuggg

SEQ ID NO: 96517 - RNA, 23 nt, Human
ccaccacucccgccaucugcugc

SEQ ID NO: 96518 - RNA, 32 nt, Human
ccaccacucccuuagucuuucccaggcuuacu

SEQ ID NO: 96519 - RNA, 32 nt, Human
ccaccacucucccaucaccugcucugcucuua

SEQ ID NO: 96520 - RNA, 32 nt, Human
ccaccacucuggguuccauuugugggagggag

SEQ ID NO: 96521 - RNA, 32 nt, Human
ccaccacugcaacuuuuguauucacaggcauc

SEQ ID NO: 96522 - RNA, 32 nt, Human
ccaccacugcacuccagccuggaugacagagu

SEQ ID NO: 96523 - RNA, 32 nt, Human
ccaccacugcacuccagccugggaagcagagu

SEQ ID NO: 96524 - RNA, 32 nt, Human
ccaccacugcacuccagccugggcaacagagu

SEQ ID NO: 96525 - RNA, 32 nt, Human
ccaccacugcacuccagccugggcgacacagc

SEQ ID NO: 96526 - RNA, 32 nt, Human
ccaccacugcacuccagccugggcgacagagc

SEQ ID NO: 96527 - RNA, 32 nt, Human
ccaccacugcacuccagccugggugacagagu

SEQ ID NO: 96528 - RNA, 24 nt, Human
ccaccacugccccaccacccagag

SEQ ID NO: 96529 - RNA, 32 nt, Human
ccaccacugcccccuuuccuuuucugaccucc

SEQ ID NO: 96530 - RNA, 32 nt, Human
ccaccacugccuggaacauccuuguucucugc

SEQ ID NO: 96531 - RNA, 32 nt, Human
ccaccacuggacugggcuggcccagccccugu

SEQ ID NO: 96532 - RNA, 32 nt, Human
ccaccacugggacccuccccagccuggagagu

SEQ ID NO: 96533 - RNA, 32 nt, Human
ccaccacugggcagaggcuggacagcacggac

SEQ ID NO: 96534 - RNA, 32 nt, Human
ccaccacuuagcaaugggcugaucucuccuug

SEQ ID NO: 96535 - RNA, 32 nt, Human
ccaccacuuccucugcugggcaugcuccaaaa

SEQ ID NO: 96536 - RNA, 18 nt, Human
ccaccacuugugucucca

SEQ ID NO: 96537 - RNA, 22 nt, Human
ccaccagaagaagcaccaagaa

SEQ ID NO: 96538 - RNA, 32 nt, Human
ccaccagaagagcagggccagccccggucagc

SEQ ID NO: 96539 - RNA, 32 nt, Human
ccaccagaagcuccgggacuucucccgcagca

SEQ ID NO: 96540 - RNA, 32 nt, Human
ccaccagacagugccggccagcagagaagcag

SEQ ID NO: 96541 - RNA, 21 nt, Human
ccaccagacaucuucaacaga

SEQ ID NO: 96542 - RNA, 32 nt, Human
ccaccagacugcuuccugccagccugugcuug

SEQ ID NO: 96543 - RNA, 23 nt, Human
ccaccagacuuccuccuggaaaa

SEQ ID NO: 96544 - RNA, 23 nt, Human
ccaccagagaccacagcugcccc

SEQ ID NO: 96545 - RNA, 32 nt, Human
ccaccagagcccccugccagacugucugccuc

SEQ ID NO: 96546 - RNA, 32 nt, Human
ccaccagaggcagaggccaugagacugucuuu

SEQ ID NO: 96547 - RNA, 17 nt, Human
ccaccagaggccccgcg

SEQ ID NO: 96548 - RNA, 32 nt, Human
ccaccagaggcugaaguguauuuccugugcau

SEQ ID NO: 96549 - RNA, 18 nt, Human
ccaccagagggggcacag

SEQ ID NO: 96550 - RNA, 32 nt, Human
ccaccagaguccauuucaaaacccaaacgaga

SEQ ID NO: 96551 - RNA, 19 nt, Human
ccaccagaucuccauucuu

SEQ ID NO: 96552 - RNA, 32 nt, Human
ccaccagcaccaccagcaccuacccagcauuc

SEQ ID NO: 96553 - RNA, 21 nt, Human
ccaccagcaccaccagcccca

SEQ ID NO: 96554 - RNA, 21 nt, Human
ccaccagcaccacgggcucca

SEQ ID NO: 96555 - RNA, 24 nt, Human
ccaccagcacccccauagggcccc

SEQ ID NO: 96556 - RNA, 32 nt, Human
ccaccagcacugacuccugggcucugaagaau

SEQ ID NO: 96557 - RNA, 32 nt, Human
ccaccagcagccccacucacagcugcugcacc

SEQ ID NO: 96558 - RNA, 23 nt, Human
ccaccagcagccgccuugccugg

SEQ ID NO: 96559 - RNA, 18 nt, Human
ccaccagcagggggcgca

SEQ ID NO: 96560 - RNA, 32 nt, Human
ccaccagcaggugcagaggugccguugcagca

SEQ ID NO: 96561 - RNA, 32 nt, Human
ccaccagccacugcuuccuccugggcccucgg

SEQ ID NO: 96562 - RNA, 32 nt, Human
ccaccagccacugucauguuaaccccuuccca

SEQ ID NO: 96563 - RNA, 32 nt, Human
ccaccagccagcucugugauccuggccgaugg

SEQ ID NO: 96564 - RNA, 32 nt, Human
ccaccagccaggaagcggaaggugcagaaaua

SEQ ID NO: 96565 - RNA, 32 nt, Human
ccaccagccauggcagugcaucugccacagug

SEQ ID NO: 96566 - RNA, 32 nt, Human
ccaccagcccagcuaauuuuuguauuuuuagu

SEQ ID NO: 96567 - RNA, 23 nt, Human
ccaccagcccagguuaaucccca

SEQ ID NO: 96568 - RNA, 32 nt, Human
ccaccagccccagcugccaucagauucaagcc

SEQ ID NO: 96569 - RNA, 32 nt, Human
ccaccagccccagggcccuaccuccuggaaug

SEQ ID NO: 96570 - RNA, 19 nt, Human
ccaccagccccugagcccc

SEQ ID NO: 96571 - RNA, 32 nt, Human
ccaccagccccugagcccccagccccugagcc

SEQ ID NO: 96572 - RNA, 32 nt, Human
ccaccagccccuucuucuugugaaggaaaucc

SEQ ID NO: 96573 - RNA, 32 nt, Human
ccaccagcccuccaguccuucucccuccaggc

SEQ ID NO: 96574 - RNA, 32 nt, Human
ccaccagcccuggagaggaggaagggacugac

SEQ ID NO: 96575 - RNA, 32 nt, Human
ccaccagccgcacuaaccgccgaccaaccgcc

SEQ ID NO: 96576 - RNA, 20 nt, Human
ccaccagccgugccaucucu

SEQ ID NO: 96577 - RNA, 22 nt, Human
ccaccagccuaaguccagcaga

SEQ ID NO: 96578 - RNA, 32 nt, Human
ccaccagccuccaguaacugugggaaacuggc

SEQ ID NO: 96579 - RNA, 32 nt, Human
ccaccagccuccucaggaaggcgggugagguu

SEQ ID NO: 96580 - RNA, 32 nt, Human
ccaccagcgcacugccccaagcuugccuaggu

SEQ ID NO: 96581 - RNA, 20 nt, Human
ccaccagcgccccagccccg

SEQ ID NO: 96582 - RNA, 32 nt, Human
ccaccagcgccccagccccgaggcucagaagc

SEQ ID NO: 96583 - RNA, 20 nt, Human
ccaccagcggacucggcccc

SEQ ID NO: 96584 - RNA, 32 nt, Human
ccaccagcucagacagcacccaccggccccac

SEQ ID NO: 96585 - RNA, 15 nt, Human
ccaccagcuccacgc

SEQ ID NO: 96586 - RNA, 32 nt, Human
ccaccagcucguuccccuccagccuggugcug

SEQ ID NO: 96587 - RNA, 32 nt, Human
ccaccagcucuauucuuugccuuagcuuugca

SEQ ID NO: 96588 - RNA, 32 nt, Human
ccaccagcugcaggcugucaggguaucacuga

SEQ ID NO: 96589 - RNA, 24 nt, Human
ccaccagcugccaguggcucccag

SEQ ID NO: 96590 - RNA, 32 nt, Human
ccaccagcugcugcuagccucugugguuguac

SEQ ID NO: 96591 - RNA, 32 nt, Human
ccaccagcuggcacaggugcacagauucauaa

SEQ ID NO: 96592 - RNA, 32 nt, Human
ccaccagcuguguaggaaugccagcagaggcc

SEQ ID NO: 96593 - RNA, 32 nt, Human
ccaccagcuucguuccagcccaugaaggggaa

SEQ ID NO: 96594 - RNA, 22 nt, Human
ccaccagcuuuggugaacccca

SEQ ID NO: 96595 - RNA, 32 nt, Human
ccaccaggaaggcggaggacgcaggagccaag

SEQ ID NO: 96596 - RNA, 32 nt, Human
ccaccaggaagguguggcugagccccagagcc

SEQ ID NO: 96597 - RNA, 21 nt, Human
ccaccaggacagcugccaccu

SEQ ID NO: 96598 - RNA, 32 nt, Human
ccaccaggacauccugggaacucugggacuca

SEQ ID NO: 96599 - RNA, 16 nt, Human
ccaccaggaccagcug

SEQ ID NO: 96600 - RNA, 32 nt, Human
ccaccaggagaagggaccagcaccucagaugg

SEQ ID NO: 96601 - RNA, 32 nt, Human
ccaccaggcaauagacaggagagaggugagaa

SEQ ID NO: 96602 - RNA, 21 nt, Human
ccaccaggcaggaccccagga

SEQ ID NO: 96603 - RNA, 32 nt, Human
ccaccaggcccagccaaccagcauuucuuaag

SEQ ID NO: 96604 - RNA, 19 nt, Human
ccaccaggcuucuggaaaa

SEQ ID NO: 96605 - RNA, 22 nt, Human
ccaccagggaagccgggcccca

SEQ ID NO: 96606 - RNA, 32 nt, Human
ccaccagggacaccucgcccuucagcccacca

SEQ ID NO: 96607 - RNA, 23 nt, Human
ccaccagggagcagcugcccccu

SEQ ID NO: 96608 - RNA, 32 nt, Human
ccaccagggaguggggauccugagggaagggg

SEQ ID NO: 96609 - RNA, 19 nt, Human
ccaccagggcugacuuccc

SEQ ID NO: 96610 - RNA, 32 nt, Human
ccaccaggggaggugggguuuggugagagacg

SEQ ID NO: 96611 - RNA, 32 nt, Human
ccaccaggggccugaggaugaagccaagucug

SEQ ID NO: 96612 - RNA, 18 nt, Human
ccaccaggggcucugaac

SEQ ID NO: 96613 - RNA, 32 nt, Human
ccaccagggucugaggcccaaauccuuccuca

SEQ ID NO: 96614 - RNA, 32 nt, Human
ccaccagggucugaguucuagcaggguccugg

SEQ ID NO: 96615 - RNA, 32 nt, Human
ccaccaggucugaugggcaaagguuccuccuc

SEQ ID NO: 96616 - RNA, 32 nt, Human
ccaccaggugugcaggcugggaagagacaucu

SEQ ID NO: 96617 - RNA, 18 nt, Human
ccaccaguacacacgcgu

SEQ ID NO: 96618 - RNA, 32 nt, Human
ccaccaguaccaccaccacuacccacaucacc

SEQ ID NO: 96619 - RNA, 32 nt, Human
ccaccagucuucaccuccacacccucaucacc

SEQ ID NO: 96620 - RNA, 32 nt, Human
ccaccagugaugaaaauuacugugggccacuc

SEQ ID NO: 96621 - RNA, 32 nt, Human
ccaccagugugaagcagaaggaugacuuugcu

SEQ ID NO: 96622 - RNA, 32 nt, Human
ccaccaguuccccagagcagagcuggagcuga

SEQ ID NO: 96623 - RNA, 32 nt, Human
ccaccaguugguggaggcuucagggaagacca

SEQ ID NO: 96624 - RNA, 16 nt, Human
ccaccauaauccaucc

SEQ ID NO: 96625 - RNA, 19 nt, Human
ccaccauaugcucauccuu

SEQ ID NO: 96626 - RNA, 22 nt, Human
ccaccaucacacugccacccug

SEQ ID NO: 96627 - RNA, 32 nt, Human
ccaccaucacacugggguuucuggaugggaaa

SEQ ID NO: 96628 - RNA, 21 nt, Human
ccaccaucaccaccaccaugg

SEQ ID NO: 96629 - RNA, 24 nt, Human
ccaccaucaccucccucaccucgg

SEQ ID NO: 96630 - RNA, 23 nt, Human
ccaccaucacuucauuuagcugg

SEQ ID NO: 96631 - RNA, 32 nt, Human
ccaccaucacuucauuuagcugggcaacaagg

SEQ ID NO: 96632 - RNA, 20 nt, Human
ccaccaucagcccugccugg

SEQ ID NO: 96633 - RNA, 32 nt, Human
ccaccauccauccuggugaaaccagaaaacuc

SEQ ID NO: 96634 - RNA, 32 nt, Human
ccaccaucccacccuggggcccuuucagugac

SEQ ID NO: 96635 - RNA, 32 nt, Human
ccaccaucccagagaagaagugaggggcuaug

SEQ ID NO: 96636 - RNA, 32 nt, Human
ccaccauccuugucugugcuacugucugcugc

SEQ ID NO: 96637 - RNA, 24 nt, Human
ccaccaucggccgcacccaccugg

SEQ ID NO: 96638 - RNA, 32 nt, Human
ccaccaucuaagccaaggguguccaaucuuuu

SEQ ID NO: 96639 - RNA, 32 nt, Human
ccaccaucuccucugugccaacuccuugugga

SEQ ID NO: 96640 - RNA, 32 nt, Human
ccaccaucugaagauuuaggccagucccuugg

SEQ ID NO: 96641 - RNA, 22 nt, Human
ccaccaucugaugcccagccug

SEQ ID NO: 96642 - RNA, 19 nt, Human
ccaccaucugccgccaugg

SEQ ID NO: 96643 - RNA, 32 nt, Human
ccaccaucugcgacuccugccugccgccucuc

SEQ ID NO: 96644 - RNA, 32 nt, Human
ccaccaugacugagucuucucaguugacaaug

SEQ ID NO: 96645 - RNA, 30 nt, Human
ccaccaugagcaccaagcagaucacuugca

SEQ ID NO: 96646 - RNA, 32 nt, Human
ccaccaugagcacucccacaauacuggucgca

SEQ ID NO: 96647 - RNA, 30 nt, Human
ccaccaugagccucagugaggagcaggccc

SEQ ID NO: 96648 - RNA, 32 nt, Human
ccaccaugcaacuuccuuugacuuucugugua

SEQ ID NO: 96649 - RNA, 30 nt, Human
ccaccaugccacugcacuccagccugggug

SEQ ID NO: 96650 - RNA, 32 nt, Human
ccaccaugcccagccagagaugcucaauuccu

SEQ ID NO: 96651 - RNA, 21 nt, Human
ccaccaugcccagcccuggag

SEQ ID NO: 96652 - RNA, 32 nt, Human
ccaccaugcccagccuccuacccuuuucuuug

SEQ ID NO: 96653 - RNA, 32 nt, Human
ccaccaugcccagcuaauuuuguauuuuuagu

SEQ ID NO: 96654 - RNA, 32 nt, Human
ccaccaugcccagcuaauuuuguauuuuuauu

SEQ ID NO: 96655 - RNA, 32 nt, Human
ccaccaugcccggcuaauuuuguauuuuuagu

SEQ ID NO: 96656 - RNA, 32 nt, Human
ccaccaugcccguuaguuuuuguauuuuuagu

SEQ ID NO: 96657 - RNA, 32 nt, Human
ccaccaugccuggccagaaaucuauguuuucu

SEQ ID NO: 96658 - RNA, 32 nt, Human
ccaccaugccuggcuaauuuuguauauuuagu

SEQ ID NO: 96659 - RNA, 32 nt, Human
ccaccaugccuggcuaauuuuguauuucuagu

SEQ ID NO: 96660 - RNA, 32 nt, Human
ccaccaugccuggcuaauuuuguauuuuuagu

SEQ ID NO: 96661 - RNA, 32 nt, Human
ccaccaugccugucuaauuuuuguacuuuucg

SEQ ID NO: 96662 - RNA, 32 nt, Human
ccaccaugccugucugcugucccuguacucca

SEQ ID NO: 96663 - RNA, 32 nt, Human
ccaccaugccuguggccucagccacuuugugc

SEQ ID NO: 96664 - RNA, 32 nt, Human
ccaccaugccuguguuacagcagcuccaugau

SEQ ID NO: 96665 - RNA, 32 nt, Human
ccaccaugcuggcuaauuuuucaauauuuagu

SEQ ID NO: 96666 - RNA, 30 nt, Human
ccaccauggaugacaugggccugguggcca

SEQ ID NO: 96667 - RNA, 32 nt, Human
ccaccauggcacacugcuucuccagucaagga

SEQ ID NO: 96668 - RNA, 24 nt, Human
ccaccauggccagacgcccccgga

SEQ ID NO: 96669 - RNA, 21 nt, Human
ccaccauggcugcuugccugg

SEQ ID NO: 96670 - RNA, 22 nt, Human
ccaccaugggccagagcuucag

SEQ ID NO: 96671 - RNA, 20 nt, Human
ccaccauggugagaccccgu

SEQ ID NO: 96672 - RNA, 30 nt, Human
ccaccaugguguuuggugaguuuuuccauc

SEQ ID NO: 96673 - RNA, 32 nt, Human
ccaccaugucauuugaaaacaguuucaucggg

SEQ ID NO: 96674 - RNA, 30 nt, Human
ccaccaugucgagcaaaagaacaaagacca

SEQ ID NO: 96675 - RNA, 32 nt, Human
ccaccaugugccagguggcaucugccuuacug

SEQ ID NO: 96676 - RNA, 21 nt, Human
ccaccauguucaccuugccug

SEQ ID NO: 96677 - RNA, 32 nt, Human
ccaccauguugccccaccaggagcucagcucu

SEQ ID NO: 96678 - RNA, 32 nt, Human
ccaccauucccaggacucugccauguggagcc

SEQ ID NO: 96679 - RNA, 32 nt, Human
ccaccauucucaggacccucgccaugaaagcc

SEQ ID NO: 96680 - RNA, 32 nt, Human
ccaccauugcacuccagccugggcaacagagu

SEQ ID NO: 96681 - RNA, 32 nt, Human
ccaccauugcacuccaguccgggaaacaagaa

SEQ ID NO: 96682 - RNA, 32 nt, Human
ccaccauugcacuccagucugggcaacagagc

SEQ ID NO: 96683 - RNA, 32 nt, Human
ccaccauugggcacugccaugcagagacgugg

SEQ ID NO: 96684 - RNA, 32 nt, Human
ccaccauuuauaauuaauucaggccccacuuc

SEQ ID NO: 96685 - RNA, 21 nt, Human
ccaccauuucuccucaccugg

SEQ ID NO: 96686 - RNA, 32 nt, Human
ccaccauuuucagcauggagcuucugggaucu

SEQ ID NO: 96687 - RNA, 32 nt, Human
ccaccauuuugggcugacaucaccauagcauc

SEQ ID NO: 96688 - RNA, 32 nt, Human
ccacccaaaccccagacugagauacugcuccc

SEQ ID NO: 96689 - RNA, 32 nt, Human
ccacccaaagugcuaggauuacagguaugagc

SEQ ID NO: 96690 - RNA, 32 nt, Human
ccacccaaagugcuaggguuacaggcaugagc

SEQ ID NO: 96691 - RNA, 32 nt, Human
ccacccaaagugcugggauuacaggcgugaac

SEQ ID NO: 96692 - RNA, 32 nt, Human
ccacccaaaguguugggauuacaggcaugagc

SEQ ID NO: 96693 - RNA, 32 nt, Human
ccacccaaaguguugggauuauaggcaugagc

SEQ ID NO: 96694 - RNA, 19 nt, Human
ccacccaaauccagaggaa

SEQ ID NO: 96695 - RNA, 32 nt, Human
ccacccaaccaggcucagguuggggguccugg

SEQ ID NO: 96696 - RNA, 32 nt, Human
ccacccaacccccacccugccucuauccuaag

SEQ ID NO: 96697 - RNA, 32 nt, Human
ccacccaagagcaaccuggaacuaaguuauuc

SEQ ID NO: 96698 - RNA, 22 nt, Human
ccacccaagaucuuaucagaga

SEQ ID NO: 96699 - RNA, 23 nt, Human
ccacccaagcuggagugcagugg

SEQ ID NO: 96700 - RNA, 17 nt, Human
ccacccaaggagcagcc

SEQ ID NO: 96701 - RNA, 32 nt, Human
ccacccaaguagcuggaauuacaggcaccugc

SEQ ID NO: 96702 - RNA, 31 nt, Human
ccacccaagugccaagacacagcagggccaa

SEQ ID NO: 96703 - RNA, 18 nt, Human
ccacccaaguggcuggga

SEQ ID NO: 96704 - RNA, 32 nt, Human
ccacccaaguuaggccugcucuggccuaaugg

SEQ ID NO: 96705 - RNA, 24 nt, Human
ccacccacacagcagccuccagga

SEQ ID NO: 96706 - RNA, 32 nt, Human
ccacccacacucaaccucccucugaccucaua

SEQ ID NO: 96707 - RNA, 32 nt, Human
ccacccacagccgcagccaugcugugccuccu

SEQ ID NO: 96708 - RNA, 32 nt, Human
ccacccacaggcucccuggccugggugcugua

SEQ ID NO: 96709 - RNA, 32 nt, Human
ccacccacagugcugcacuccuccugccccug

SEQ ID NO: 96710 - RNA, 32 nt, Human
ccacccaccagaggaguucugguccccaaacc

SEQ ID NO: 96711 - RNA, 32 nt, Human
ccacccacccccagaacaggcagagacagggc

SEQ ID NO: 96712 - RNA, 32 nt, Human
ccacccacccgcaaccuccuuccccgagccuu

SEQ ID NO: 96713 - RNA, 32 nt, Human
ccacccacccgcugcuugccccaucuauuuau

SEQ ID NO: 96714 - RNA, 18 nt, Human
ccacccacccggcuccca

SEQ ID NO: 96715 - RNA, 32 nt, Human
ccacccacccucucucugaucucccccuuccu

SEQ ID NO: 96716 - RNA, 21 nt, Human
ccacccaccgccgccgccgcc

SEQ ID NO: 96717 - RNA, 32 nt, Human
ccacccaccuccuccaucacuggaccagcuca

SEQ ID NO: 96718 - RNA, 24 nt, Human
ccacccaccucgcgguccccagga

SEQ ID NO: 96719 - RNA, 23 nt, Human
ccacccaccugagcccagcuaga

SEQ ID NO: 96720 - RNA, 32 nt, Human
ccacccaccugccccauguccacugggcugcc

SEQ ID NO: 96721 - RNA, 32 nt, Human
ccacccaccuucuugcucuaccaguucgcgcu

SEQ ID NO: 96722 - RNA, 21 nt, Human
ccacccacggaaucgagaaag

SEQ ID NO: 96723 - RNA, 21 nt, Human
ccacccacgggugucccugcc

SEQ ID NO: 96724 - RNA, 32 nt, Human
ccacccacucgagggcugcccccucuuccuua

SEQ ID NO: 96725 - RNA, 32 nt, Human
ccacccacucuucugcacuucuugcaagguaa

SEQ ID NO: 96726 - RNA, 32 nt, Human
ccacccacugccucccucuggccugggagagc

SEQ ID NO: 96727 - RNA, 32 nt, Human
ccacccacugcgccuggcugggugccggccac

SEQ ID NO: 96728 - RNA, 32 nt, Human
ccacccacuuauggaaccucaggagaggaggg

SEQ ID NO: 96729 - RNA, 32 nt, Human
ccacccagaaauaaaaggacacucugaguuau

SEQ ID NO: 96730 - RNA, 32 nt, Human
ccacccagaaggcuuucauuuguacucugcug

SEQ ID NO: 96731 - RNA, 32 nt, Human
ccacccagaccacccuuuaccucgaguccuua

SEQ ID NO: 96732 - RNA, 32 nt, Human
ccacccagaccccaaaaauaaauggauccaug

SEQ ID NO: 96733 - RNA, 32 nt, Human
ccacccagaccugccaaccacucccgcggccc

SEQ ID NO: 96734 - RNA, 32 nt, Human
ccacccagacguccccaccgagcccagcacgg

SEQ ID NO: 96735 - RNA, 32 nt, Human
ccacccagacugaagugcaguggugcgaucuc

SEQ ID NO: 96736 - RNA, 32 nt, Human
ccacccagagcucagacccaagggagggugga

SEQ ID NO: 96737 - RNA, 32 nt, Human
ccacccagagcugggccagggaggacacgcuc

SEQ ID NO: 96738 - RNA, 32 nt, Human
ccacccagaggacgcuguuccaccuccuaaaa

SEQ ID NO: 96739 - RNA, 32 nt, Human
ccacccagcaaagaacuggcacaauugguuug

SEQ ID NO: 96740 - RNA, 32 nt, Human
ccacccagcaggcagaguggcguggccucccc

SEQ ID NO: 96741 - RNA, 32 nt, Human
ccacccagcaggccugagccccucucugcugc

SEQ ID NO: 96742 - RNA, 19 nt, Human
ccacccagccagggcacuc

SEQ ID NO: 96743 - RNA, 32 nt, Human
ccacccagccagugacucuguccucuguacag

SEQ ID NO: 96744 - RNA, 32 nt, Human
ccacccagcccagcuucuuuccauuccuugau

SEQ ID NO: 96745 - RNA, 32 nt, Human
ccacccagcccccucuggaguugccguuguug

SEQ ID NO: 96746 - RNA, 17 nt, Human
ccacccagccccugugg

SEQ ID NO: 96747 - RNA, 32 nt, Human
ccacccagcccgcuccugacccuuaucuuccc

SEQ ID NO: 96748 - RNA, 32 nt, Human
ccacccagccuacccccgggagcccagagccc

SEQ ID NO: 96749 - RNA, 32 nt, Human
ccacccagccugggauaggggcagaggaggcg

SEQ ID NO: 96750 - RNA, 32 nt, Human
ccacccagccuucucuuuauuuucagugcuuu

SEQ ID NO: 96751 - RNA, 21 nt, Human
ccacccagcggcugccuggga

SEQ ID NO: 96752 - RNA, 32 nt, Human
ccacccagcgucuccccugcugcuguccacgu

SEQ ID NO: 96753 - RNA, 32 nt, Human
ccacccagcuacuggggaggcugagucaggag

SEQ ID NO: 96754 - RNA, 22 nt, Human
ccacccagcucugcccaugccu

SEQ ID NO: 96755 - RNA, 32 nt, Human
ccacccagcugcccagccuuugcccacucggg

SEQ ID NO: 96756 - RNA, 32 nt, Human
ccacccagcugccucugugcccuggccucuuu

SEQ ID NO: 96757 - RNA, 18 nt, Human
ccacccagcugccugcca

SEQ ID NO: 96758 - RNA, 32 nt, Human
ccacccagcuuuuuggaaaaagcuccaacugg

SEQ ID NO: 96759 - RNA, 23 nt, Human
ccacccaggaaccucgccaucca

SEQ ID NO: 96760 - RNA, 32 nt, Human
ccacccaggaagcacaugcacaacugacccau

SEQ ID NO: 96761 - RNA, 32 nt, Human
ccacccaggaaggaagcacagagcugggggcu

SEQ ID NO: 96762 - RNA, 32 nt, Human
ccacccaggacacuggugugaaugacacaaca

SEQ ID NO: 96763 - RNA, 32 nt, Human
ccacccaggaccuagugcaugccagcagcuau

SEQ ID NO: 96764 - RNA, 32 nt, Human
ccacccaggcagcagccacagcggggagugcg

SEQ ID NO: 96765 - RNA, 32 nt, Human
ccacccaggcuaaggauuugaggguucugaca

SEQ ID NO: 96766 - RNA, 23 nt, Human
ccacccaggcuggaguacagugg

SEQ ID NO: 96767 - RNA, 32 nt, Human
ccacccaggcuggaguccaguggcgugaucau

SEQ ID NO: 96768 - RNA, 32 nt, Human
ccacccaggcuggagugcaguggugcaaucuu

SEQ ID NO: 96769 - RNA, 32 nt, Human
ccacccaggcuggagugcaguggugugaucuc

SEQ ID NO: 96770 - RNA, 32 nt, Human
ccacccagggagaguccauuaagccuucccug

SEQ ID NO: 96771 - RNA, 32 nt, Human
ccacccagggagugcuugcagacucugcauag

SEQ ID NO: 96772 - RNA, 32 nt, Human
ccacccagggauggcggggaucagggccagcc

SEQ ID NO: 96773 - RNA, 32 nt, Human
ccacccaggggcccuggguguggaugccagug

SEQ ID NO: 96774 - RNA, 20 nt, Human
ccacccaguccauucacccu

SEQ ID NO: 96775 - RNA, 21 nt, Human
ccacccagucugccccugguc

SEQ ID NO: 96776 - RNA, 19 nt, Human
ccacccagugacaugagga

SEQ ID NO: 96777 - RNA, 20 nt, Human
ccacccagugacuggcaggg

SEQ ID NO: 96778 - RNA, 25 nt, Human
ccacccagugcuucugcccaugccu

SEQ ID NO: 96779 - RNA, 32 nt, Human
ccacccaguggccaggaugacaaggcagagga

SEQ ID NO: 96780 - RNA, 21 nt, Human
ccacccaguuuguggaagcac

SEQ ID NO: 96781 - RNA, 21 nt, Human
ccacccauagcccugcugcug

SEQ ID NO: 96782 - RNA, 24 nt, Human
ccacccauaggcccuguccauacc

SEQ ID NO: 96783 - RNA, 21 nt, Human
ccacccaucaaaucagagaga

SEQ ID NO: 96784 - RNA, 17 nt, Human
ccacccauccauaaucc

SEQ ID NO: 96785 - RNA, 22 nt, Human
ccacccauccaugccagcacuu

SEQ ID NO: 96786 - RNA, 18 nt, Human
ccacccauccgucccucc

SEQ ID NO: 96787 - RNA, 22 nt, Human
ccacccauccuuugccuuaucu

SEQ ID NO: 96788 - RNA, 18 nt, Human
ccacccaucuguccaucc

SEQ ID NO: 96789 - RNA, 32 nt, Human
ccacccaugccuggcuaauuuuuguacuuuuu

SEQ ID NO: 96790 - RNA, 32 nt, Human
ccacccaugccuuuuaguagagacgggguuuc

SEQ ID NO: 96791 - RNA, 23 nt, Human
ccacccauugaguacugcugcua

SEQ ID NO: 96792 - RNA, 26 nt, Human
ccaccccaaaagcagcuccaacagaa

SEQ ID NO: 96793 - RNA, 20 nt, Human
ccaccccaaauuaaaauguu

SEQ ID NO: 96794 - RNA, 25 nt, Human
ccaccccaacaugcucagggaggca

SEQ ID NO: 96795 - RNA, 20 nt, Human
ccaccccaaccugcucaggc

SEQ ID NO: 96796 - RNA, 32 nt, Human
ccaccccaacuaccaccucuuuucaggcacag

SEQ ID NO: 96797 - RNA, 18 nt, Human
ccaccccaacucaguguc

SEQ ID NO: 96798 - RNA, 18 nt, Human
ccaccccaacugcagguc

SEQ ID NO: 96799 - RNA, 32 nt, Human
ccaccccacaauuccuccucuggccacaucuc

SEQ ID NO: 96800 - RNA, 32 nt, Human
ccaccccacaccaucacuccccucccuugcug

SEQ ID NO: 96801 - RNA, 22 nt, Human
ccaccccacacccuguguccau

SEQ ID NO: 96802 - RNA, 32 nt, Human
ccaccccacagcuuagguuuuucugucauccu

SEQ ID NO: 96803 - RNA, 32 nt, Human
ccaccccacaggcccuuuccuggaccauggag

SEQ ID NO: 96804 - RNA, 17 nt, Human
ccaccccaccaaagugu

SEQ ID NO: 96805 - RNA, 20 nt, Human
ccaccccaccaaguguacug

SEQ ID NO: 96806 - RNA, 32 nt, Human
ccaccccacccaaggaagcccagcacagacca

SEQ ID NO: 96807 - RNA, 21 nt, Human
ccaccccaccccaccccagga

SEQ ID NO: 96808 - RNA, 32 nt, Human
ccaccccaccccucccucagaaacucggacug

SEQ ID NO: 96809 - RNA, 17 nt, Human
ccaccccacccucaggu

SEQ ID NO: 96810 - RNA, 32 nt, Human
ccaccccacccugugagaaccugcagcccccu

SEQ ID NO: 96811 - RNA, 22 nt, Human
ccaccccaccucccucacuuca

SEQ ID NO: 96812 - RNA, 20 nt, Human
ccaccccaccuucugcccuc

SEQ ID NO: 96813 - RNA, 32 nt, Human
ccaccccacugucgugguggccccagaucucu

SEQ ID NO: 96814 - RNA, 32 nt, Human
ccaccccacuugcugccagccugucagugacc

SEQ ID NO: 96815 - RNA, 25 nt, Human
ccaccccacuugguggccuccagga

SEQ ID NO: 96816 - RNA, 32 nt, Human
ccaccccagaugcaggagucacccagcuuccu

SEQ ID NO: 96817 - RNA, 21 nt, Human
ccaccccagccagcagcagca

SEQ ID NO: 96818 - RNA, 21 nt, Human
ccaccccagccagggcucccu

SEQ ID NO: 96819 - RNA, 24 nt, Human
ccaccccagccaggugucccuccu

SEQ ID NO: 96820 - RNA, 21 nt, Human
ccaccccagccccacugcccu

SEQ ID NO: 96821 - RNA, 28 nt, Human
ccaccccagcccccucacccuccucccu

SEQ ID NO: 96822 - RNA, 22 nt, Human
ccaccccagcccgccaacuagu

SEQ ID NO: 96823 - RNA, 32 nt, Human
ccaccccagcccuacacagcagucuggccuga

SEQ ID NO: 96824 - RNA, 19 nt, Human
ccaccccagcccucugguc

SEQ ID NO: 96825 - RNA, 22 nt, Human
ccaccccagccucagaucuccc

SEQ ID NO: 96826 - RNA, 19 nt, Human
ccaccccagccucccaggu

SEQ ID NO: 96827 - RNA, 21 nt, Human
ccaccccagccucgccuuccc

SEQ ID NO: 96828 - RNA, 21 nt, Human
ccaccccagccucuguucccc

SEQ ID NO: 96829 - RNA, 23 nt, Human
ccaccccagccugccugcugccu

SEQ ID NO: 96830 - RNA, 21 nt, Human
ccaccccagccuggggucucu

SEQ ID NO: 96831 - RNA, 23 nt, Human
ccaccccagccuucugcccgccc

SEQ ID NO: 96832 - RNA, 21 nt, Human
ccaccccagcucaugcccccu

SEQ ID NO: 96833 - RNA, 24 nt, Human
ccaccccagcucccacccugcccu

SEQ ID NO: 96834 - RNA, 23 nt, Human
ccaccccagcugcuccccucccu

SEQ ID NO: 96835 - RNA, 19 nt, Human
ccaccccaggcaccuguga

SEQ ID NO: 96836 - RNA, 32 nt, Human
ccaccccaggguggauccaggauggaucucug

SEQ ID NO: 96837 - RNA, 23 nt, Human
ccaccccaggucucagccucccu

SEQ ID NO: 96838 - RNA, 22 nt, Human
ccaccccagucccaaauccagu

SEQ ID NO: 96839 - RNA, 19 nt, Human
ccaccccagugcccacagg

SEQ ID NO: 96840 - RNA, 32 nt, Human
ccaccccaguggguaugucugaggucagccau

SEQ ID NO: 96841 - RNA, 32 nt, Human
ccaccccauaauuucucccagagaccaucuau

SEQ ID NO: 96842 - RNA, 32 nt, Human
ccaccccaucaggucagcucaggcuggagcag

SEQ ID NO: 96843 - RNA, 32 nt, Human
ccaccccauccucuaccugccacaccucagag

SEQ ID NO: 96844 - RNA, 32 nt, Human
ccaccccaucugcauuguggcugcagcacugg

SEQ ID NO: 96845 - RNA, 22 nt, Human
ccaccccaucugccuucagguc

SEQ ID NO: 96846 - RNA, 32 nt, Human
ccaccccaugucaccggauccuggguggucug

SEQ ID NO: 96847 - RNA, 32 nt, Human
ccaccccauuacuguaccucuggagucacuac

SEQ ID NO: 96848 - RNA, 32 nt, Human
ccaccccauucucugcuaccacauaucguagc

SEQ ID NO: 96849 - RNA, 20 nt, Human
ccaccccauuguccauccuu

SEQ ID NO: 96850 - RNA, 32 nt, Human
ccaccccauuuccagguuggcagcccuagccc

SEQ ID NO: 96851 - RNA, 23 nt, Human
ccacccccaacccagacccccag

SEQ ID NO: 96852 - RNA, 20 nt, Human
ccacccccaacccucagguc

SEQ ID NO: 96853 - RNA, 28 nt, Human
ccacccccaagugcaugucuccaucacu

SEQ ID NO: 96854 - RNA, 28 nt, Human
ccacccccaagugccgacuuguuucucc

SEQ ID NO: 96855 - RNA, 20 nt, Human
ccacccccaagugcucccca

SEQ ID NO: 96856 - RNA, 32 nt, Human
ccacccccaccaaacccaaaacaaacaagaaa

SEQ ID NO: 96857 - RNA, 19 nt, Human
ccacccccaccagccccag

SEQ ID NO: 96858 - RNA, 21 nt, Human
ccacccccacccagccuccag

SEQ ID NO: 96859 - RNA, 22 nt, Human
ccacccccacccaucugggccc

SEQ ID NO: 96860 - RNA, 24 nt, Human
ccacccccacccuacagccccagg

SEQ ID NO: 96861 - RNA, 21 nt, Human
ccacccccaccuucgcucaga

SEQ ID NO: 96862 - RNA, 32 nt, Human
ccacccccagccccacaguuuauuaaauguuu

SEQ ID NO: 96863 - RNA, 32 nt, Human
ccacccccagcccuagcauaggaaaagcuucc

SEQ ID NO: 96864 - RNA, 32 nt, Human
ccacccccagcugaccagggaggcagaggaca

SEQ ID NO: 96865 - RNA, 32 nt, Human
ccacccccaggccuccuaggggaagggggugc

SEQ ID NO: 96866 - RNA, 32 nt, Human
ccacccccaggucacaaaucagcagcuccacu

SEQ ID NO: 96867 - RNA, 24 nt, Human
ccacccccaggugcagccccaggg

SEQ ID NO: 96868 - RNA, 32 nt, Human
ccacccccaguugacaucaagccucggcagcc

SEQ ID NO: 96869 - RNA, 32 nt, Human
ccacccccaucuccaccccaucauguuuacag

SEQ ID NO: 96870 - RNA, 22 nt, Human
ccaccccccaacuuuccucccu

SEQ ID NO: 96871 - RNA, 22 nt, Human
ccaccccccaccacugcccccu

SEQ ID NO: 96872 - RNA, 21 nt, Human
ccaccccccaccuccaugccu

SEQ ID NO: 96873 - RNA, 24 nt, Human
ccaccccccaucacacgugcuccu

SEQ ID NO: 96874 - RNA, 22 nt, Human
ccaccccccgccagcccgagga

SEQ ID NO: 96875 - RNA, 17 nt, Human
ccaccccccuccauccu

SEQ ID NO: 96876 - RNA, 23 nt, Human
ccaccccccuccaucuguuccca

SEQ ID NO: 96877 - RNA, 16 nt, Human
ccacccccgccucagg

SEQ ID NO: 96878 - RNA, 32 nt, Human
ccacccccgcuaccuuucccagccucugguaa

SEQ ID NO: 96879 - RNA, 18 nt, Human
ccacccccggccccaggg

SEQ ID NO: 96880 - RNA, 32 nt, Human
ccacccccgugcagaggcagcugguggacauc

SEQ ID NO: 96881 - RNA, 19 nt, Human
ccacccccucaagccccag

SEQ ID NO: 96882 - RNA, 32 nt, Human
ccacccccucagcagggccggagaccuagaug

SEQ ID NO: 96883 - RNA, 32 nt, Human
ccacccccucauuccucccucgccuucacccc

SEQ ID NO: 96884 - RNA, 32 nt, Human
ccacccccuccccacuagcucgaucuaguaua

SEQ ID NO: 96885 - RNA, 32 nt, Human
ccacccccucccccgacccuuuuccccucccc

SEQ ID NO: 96886 - RNA, 32 nt, Human
ccacccccucccccugucucccucucugaacc

SEQ ID NO: 96887 - RNA, 32 nt, Human
ccacccccuccccucaccgccucccagguggc

SEQ ID NO: 96888 - RNA, 21 nt, Human
ccacccccuccguccugcccu

SEQ ID NO: 96889 - RNA, 19 nt, Human
ccacccccuccugcuccug

SEQ ID NO: 96890 - RNA, 32 nt, Human
ccacccccugccaacuacucagucccacccaa

SEQ ID NO: 96891 - RNA, 24 nt, Human
ccacccccugccccagacccagga

SEQ ID NO: 96892 - RNA, 32 nt, Human
ccacccccugcccucugcugccauaaucacac

SEQ ID NO: 96893 - RNA, 32 nt, Human
ccacccccugccugcccagccugggcccugca

SEQ ID NO: 96894 - RNA, 32 nt, Human
ccacccccugcucccgcccaccugaccccugc

SEQ ID NO: 96895 - RNA, 32 nt, Human
ccacccccugcucuugccagcuggccccugcu

SEQ ID NO: 96896 - RNA, 21 nt, Human
ccacccccuucaucggcugcc

SEQ ID NO: 96897 - RNA, 19 nt, Human
ccacccccuuccaccucca

SEQ ID NO: 96898 - RNA, 26 nt, Human
ccacccccuucccuuuaauccugcca

SEQ ID NO: 96899 - RNA, 32 nt, Human
ccacccccuuccuggcagccagugccaaacag

SEQ ID NO: 96900 - RNA, 20 nt, Human
ccacccccuucucugcucca

SEQ ID NO: 96901 - RNA, 32 nt, Human
ccacccccuugagcaagaaugccauccccucu

SEQ ID NO: 96902 - RNA, 32 nt, Human
ccaccccgacuucguaaguccuggagaacucc

SEQ ID NO: 96903 - RNA, 32 nt, Human
ccaccccgaggaccuucaggcugcaaaccggu

SEQ ID NO: 96904 - RNA, 32 nt, Human
ccaccccgcgcaggccacugagacggugggac

SEQ ID NO: 96905 - RNA, 32 nt, Human
ccaccccgcgcucccugaacugcugugcgucg

SEQ ID NO: 96906 - RNA, 18 nt, Human
ccaccccgcgcuguccau

SEQ ID NO: 96907 - RNA, 32 nt, Human
ccaccccgcugaggcccagagcucgggagaug

SEQ ID NO: 96908 - RNA, 25 nt, Human
ccaccccggccgcuggaagcagggg

SEQ ID NO: 96909 - RNA, 25 nt, Human
ccaccccggcgcugccgucccgccc

SEQ ID NO: 96910 - RNA, 22 nt, Human
ccaccccgguuccacccaaguc

SEQ ID NO: 96911 - RNA, 32 nt, Human
ccaccccgucggucaccuuuucagcgcagguc

SEQ ID NO: 96912 - RNA, 22 nt, Human
ccaccccguuagcuguccuccu

SEQ ID NO: 96913 - RNA, 32 nt, Human
ccaccccguucccuccccagcuuccugcccaa

SEQ ID NO: 96914 - RNA, 21 nt, Human
ccaccccguucuggccucccu

SEQ ID NO: 96915 - RNA, 32 nt, Human
ccaccccuagccaccaguguccuccaagugcc

SEQ ID NO: 96916 - RNA, 21 nt, Human
ccaccccuagucugcccuccc

SEQ ID NO: 96917 - RNA, 31 nt, Human
ccaccccucaauaagauuuggugaauuguaa

SEQ ID NO: 96918 - RNA, 32 nt, Human
ccaccccucacacagccaaaccccagaucauc

SEQ ID NO: 96919 - RNA, 21 nt, Human
ccaccccucacagccccaggg

SEQ ID NO: 96920 - RNA, 32 nt, Human
ccaccccucaccccagcugccugcugcuucug

SEQ ID NO: 96921 - RNA, 32 nt, Human
ccaccccucacucaggucguguuuucaggagc

SEQ ID NO: 96922 - RNA, 32 nt, Human
ccaccccucacuccacccugagggccccaucc

SEQ ID NO: 96923 - RNA, 32 nt, Human
ccaccccucacugcaaaagcaucuccuuaagu

SEQ ID NO: 96924 - RNA, 32 nt, Human
ccaccccucaucucaaaugagaggagcagaag

SEQ ID NO: 96925 - RNA, 32 nt, Human
ccaccccuccacccccacccccaagugccuuc

SEQ ID NO: 96926 - RNA, 32 nt, Human
ccaccccuccaggacagucccucucuguggag

SEQ ID NO: 96927 - RNA, 32 nt, Human
ccaccccucccaggacaccuggcugagccgga

SEQ ID NO: 96928 - RNA, 32 nt, Human
ccaccccucccccugucugccugcccucccca

SEQ ID NO: 96929 - RNA, 22 nt, Human
ccaccccucccuccuugcuucc

SEQ ID NO: 96930 - RNA, 32 nt, Human
ccaccccuccuggaccuagccacccagccugu

SEQ ID NO: 96931 - RNA, 32 nt, Human
ccaccccuccuggucuguauccugggccucag

SEQ ID NO: 96932 - RNA, 32 nt, Human
ccaccccuccugugugucagagcuaggguggg

SEQ ID NO: 96933 - RNA, 24 nt, Human
ccaccccuccuuuuucgguuuccu

SEQ ID NO: 96934 - RNA, 32 nt, Human
ccaccccucggccauucccuccaccuccaaga

SEQ ID NO: 96935 - RNA, 32 nt, Human
ccaccccucuacuccucacccucagcacaacg

SEQ ID NO: 96936 - RNA, 32 nt, Human
ccaccccucuacugcucuccauggagaauccg

SEQ ID NO: 96937 - RNA, 32 nt, Human
ccaccccucucccauuauccuuuagcuuuagg

SEQ ID NO: 96938 - RNA, 32 nt, Human
ccaccccucugcggacucugcagcuccgcggc

SEQ ID NO: 96939 - RNA, 32 nt, Human
ccaccccugcacagcagcugggcacagaggag

SEQ ID NO: 96940 - RNA, 32 nt, Human
ccaccccugcaggacaugcucugccugggagg

SEQ ID NO: 96941 - RNA, 23 nt, Human
ccaccccugccccagccucagga

SEQ ID NO: 96942 - RNA, 23 nt, Human
ccaccccugccccagcuccagga

SEQ ID NO: 96943 - RNA, 19 nt, Human
ccaccccugccccuuggaa

SEQ ID NO: 96944 - RNA, 32 nt, Human
ccaccccugccccuuuuccuuccagguucugu

SEQ ID NO: 96945 - RNA, 32 nt, Human
ccaccccugccggucagccugccugugcgugg

SEQ ID NO: 96946 - RNA, 32 nt, Human
ccaccccugccucuccuccacccgcccaggag

SEQ ID NO: 96947 - RNA, 32 nt, Human
ccaccccugccugccugcccggcccugcacaa

SEQ ID NO: 96948 - RNA, 32 nt, Human
ccaccccugccugccuuguuugauuuggcucu

SEQ ID NO: 96949 - RNA, 32 nt, Human
ccaccccugggaugcgaagccagcaagcuuuu

SEQ ID NO: 96950 - RNA, 19 nt, Human
ccaccccugggccuuucca

SEQ ID NO: 96951 - RNA, 18 nt, Human
ccaccccugggcugcaga

SEQ ID NO: 96952 - RNA, 32 nt, Human
ccaccccugggugucaguccaaaugacuguau

SEQ ID NO: 96953 - RNA, 25 nt, Human
ccaccccugugccucgucgagcccc

SEQ ID NO: 96954 - RNA, 21 nt, Human
ccaccccuguuacccccagga

SEQ ID NO: 96955 - RNA, 32 nt, Human
ccaccccuuccaguuaagaccugccuagcaga

SEQ ID NO: 96956 - RNA, 22 nt, Human
ccaccccuucgacaugcugcca

SEQ ID NO: 96957 - RNA, 18 nt, Human
ccaccccuugacaacuuu

SEQ ID NO: 96958 - RNA, 19 nt, Human
ccaccccuugcuccagguc

SEQ ID NO: 96959 - RNA, 32 nt, Human
ccaccccuuggaggagagagaccccgcacccg

SEQ ID NO: 96960 - RNA, 32 nt, Human
ccacccgaagccccuguugcaagugaggacaa

SEQ ID NO: 96961 - RNA, 32 nt, Human
ccacccgacccaguauugcaggccagcaggcc

SEQ ID NO: 96962 - RNA, 32 nt, Human
ccacccgacucggccucccaaagugcugggau

SEQ ID NO: 96963 - RNA, 32 nt, Human
ccacccgagagaggguugaggagcaggcuggg

SEQ ID NO: 96964 - RNA, 32 nt, Human
ccacccgaggcgccaccccacccuuugagagc

SEQ ID NO: 96965 - RNA, 32 nt, Human
ccacccgaguagcugagauuacaggccucugc

SEQ ID NO: 96966 - RNA, 17 nt, Human
ccacccgcaccuugccu

SEQ ID NO: 96967 - RNA, 22 nt, Human
ccacccgcccaccgccacuauc

SEQ ID NO: 96968 - RNA, 21 nt, Human
ccacccgccccgccggcccca

SEQ ID NO: 96969 - RNA, 32 nt, Human
ccacccgccccucugggccugccuguggcucu

SEQ ID NO: 96970 - RNA, 32 nt, Human
ccacccgccucagucucccaaagugcugagau

SEQ ID NO: 96971 - RNA, 32 nt, Human
ccacccgccuccgccucccaaagugcugggau

SEQ ID NO: 96972 - RNA, 32 nt, Human
ccacccgccucggccuuuauuuacuuauuuuu

SEQ ID NO: 96973 - RNA, 32 nt, Human
ccacccgccucggucucccaaagugcugggau

SEQ ID NO: 96974 - RNA, 32 nt, Human
ccacccgccugugcuugccucccagguacccc

SEQ ID NO: 96975 - RNA, 19 nt, Human
ccacccgccuuaggacucc

SEQ ID NO: 96976 - RNA, 22 nt, Human
ccacccgcgcgcacgggccguc

SEQ ID NO: 96977 - RNA, 21 nt, Human
ccacccgcuucuguggaccau

SEQ ID NO: 96978 - RNA, 32 nt, Human
ccacccggccggcagagagagccuggauacga

SEQ ID NO: 96979 - RNA, 32 nt, Human
ccacccgggagcugaggaggggugggggccgu

SEQ ID NO: 96980 - RNA, 19 nt, Human
ccacccggguccugugcug

SEQ ID NO: 96981 - RNA, 32 nt, Human
ccacccgggucugcaaggucagugaccuucau

SEQ ID NO: 96982 - RNA, 32 nt, Human
ccacccggguuuaguucagccauuucaagaag

SEQ ID NO: 96983 - RNA, 32 nt, Human
ccacccggucgcauucuuugacaugcagauug

SEQ ID NO: 96984 - RNA, 32 nt, Human
ccacccgguggggcccuuggccccagaggacc

SEQ ID NO: 96985 - RNA, 18 nt, Human
ccacccgucaccaccucc

SEQ ID NO: 96986 - RNA, 32 nt, Human
ccacccgucacuuagccccugccuccuucccc

SEQ ID NO: 96987 - RNA, 32 nt, Human
ccacccguguuccuuggcucauggcccccucc

SEQ ID NO: 96988 - RNA, 20 nt, Human
ccacccuacagccccagguc

SEQ ID NO: 96989 - RNA, 32 nt, Human
ccacccuaccccagacacacccucucuccucg

SEQ ID NO: 96990 - RNA, 32 nt, Human
ccacccuaccugcccugccugccugcugcccc

SEQ ID NO: 96991 - RNA, 26 nt, Human
ccacccuacucaccgcucuccucccu

SEQ ID NO: 96992 - RNA, 19 nt, Human
ccacccuaucuaaaguguu

SEQ ID NO: 96993 - RNA, 32 nt, Human
ccacccuaucuucacuggcuucaccuucuccu

SEQ ID NO: 96994 - RNA, 32 nt, Human
ccacccucaaagcauuaauagccaguuggaga

SEQ ID NO: 96995 - RNA, 32 nt, Human
ccacccucaaagccgucugcccaggccccauc

SEQ ID NO: 96996 - RNA, 32 nt, Human
ccacccucacaaggagcugccauccuguuugg

SEQ ID NO: 96997 - RNA, 32 nt, Human
ccacccucacuguccuccagcccaggaugggc

SEQ ID NO: 96998 - RNA, 19 nt, Human
ccacccucagccagagcca

SEQ ID NO: 96999 - RNA, 32 nt, Human
ccacccucagcccugugacuggaaugugugcc

SEQ ID NO: 97000 - RNA, 25 nt, Human
ccacccucagcucuuccuugccugg

SEQ ID NO: 97001 - RNA, 19 nt, Human
ccacccucagcuucucuca

SEQ ID NO: 97002 - RNA, 32 nt, Human
ccacccucaucucucuacccuaccccucccau

SEQ ID NO: 97003 - RNA, 32 nt, Human
ccacccuccaccugcccagaggccaacucugu

SEQ ID NO: 97004 - RNA, 32 nt, Human
ccacccuccacucccuuccuuguguucuccuu

SEQ ID NO: 97005 - RNA, 32 nt, Human
ccacccuccagcccaggacucucucugccccu

SEQ ID NO: 97006 - RNA, 32 nt, Human
ccacccuccauuccuccuccccugggccucuc

SEQ ID NO: 97007 - RNA, 17 nt, Human
ccacccucccacugcca

SEQ ID NO: 97008 - RNA, 32 nt, Human
ccacccucccccaacagcagggaugggucagg

SEQ ID NO: 97009 - RNA, 32 nt, Human
ccacccuccccucccaacccacggccaggagc

SEQ ID NO: 97010 - RNA, 32 nt, Human
ccacccucccgaguagcugggauuacaggcgc

SEQ ID NO: 97011 - RNA, 22 nt, Human
ccacccucccuccccacugcug

SEQ ID NO: 97012 - RNA, 32 nt, Human
ccacccucccucucccccucugccccacaucu

SEQ ID NO: 97013 - RNA, 32 nt, Human
ccacccuccgccccacuccagccagugugggg

SEQ ID NO: 97014 - RNA, 21 nt, Human
ccacccuccgccgcccgggcc

SEQ ID NO: 97015 - RNA, 32 nt, Human
ccacccuccuacagcuaggaggaacuaccacu

SEQ ID NO: 97016 - RNA, 32 nt, Human
ccacccuccuuuccuuccucccucgcuccacu

SEQ ID NO: 97017 - RNA, 32 nt, Human
ccacccuccuuuuucagccucugcauaaggcc

SEQ ID NO: 97018 - RNA, 19 nt, Human
ccacccucgcuccaucuuu

SEQ ID NO: 97019 - RNA, 32 nt, Human
ccacccucggcccucccugucacugcagggca

SEQ ID NO: 97020 - RNA, 32 nt, Human
ccacccucgugggucuccuccguccagggccg

SEQ ID NO: 97021 - RNA, 32 nt, Human
ccacccucuaccccauuccuuccugucagccc

SEQ ID NO: 97022 - RNA, 32 nt, Human
ccacccucucaguggucauuucugagcaucuu

SEQ ID NO: 97023 - RNA, 32 nt, Human
ccacccucuccaaaaccaaccccacccgcugg

SEQ ID NO: 97024 - RNA, 21 nt, Human
ccacccucuccgcuugccugg

SEQ ID NO: 97025 - RNA, 32 nt, Human
ccacccucucucccucaccccucucucuggga

SEQ ID NO: 97026 - RNA, 32 nt, Human
ccacccucucuccuccccaacccuucaggaac

SEQ ID NO: 97027 - RNA, 32 nt, Human
ccacccucucuggcccaggccugcugaguggc

SEQ ID NO: 97028 - RNA, 32 nt, Human
ccacccucugagagcuccucaggcuuagauag

SEQ ID NO: 97029 - RNA, 32 nt, Human
ccacccucugauugauaagacauaucauuuug

SEQ ID NO: 97030 - RNA, 32 nt, Human
ccacccucugccccaccaugauccagccucug

SEQ ID NO: 97031 - RNA, 25 nt, Human
ccacccucuggacacagccccagga

SEQ ID NO: 97032 - RNA, 32 nt, Human
ccacccucuggccuaggcuggcuccagugugc

SEQ ID NO: 97033 - RNA, 32 nt, Human
ccacccucuggccuccugcuucccaggcuccc

SEQ ID NO: 97034 - RNA, 20 nt, Human
ccacccucuucccugauucc

SEQ ID NO: 97035 - RNA, 32 nt, Human
ccacccucuugugcccuuaagcauuacuuuaa

SEQ ID NO: 97036 - RNA, 32 nt, Human
ccacccugaacuccagcuggcccgcaagcgcc

SEQ ID NO: 97037 - RNA, 32 nt, Human
ccacccugaauccucucaggguguacaguuua

SEQ ID NO: 97038 - RNA, 21 nt, Human
ccacccugacagccccaagga

SEQ ID NO: 97039 - RNA, 21 nt, Human
ccacccugaccccacggcugg

SEQ ID NO: 97040 - RNA, 23 nt, Human
ccacccugagaacaccuucucca

SEQ ID NO: 97041 - RNA, 32 nt, Human
ccacccugagccugacgagggugaggagugac

SEQ ID NO: 97042 - RNA, 32 nt, Human
ccacccugcagccgcugccuccugggccccgg

SEQ ID NO: 97043 - RNA, 32 nt, Human
ccacccugcccagccgucaaaagagucuuaau

SEQ ID NO: 97044 - RNA, 24 nt, Human
ccacccugcccagcguccccagga

SEQ ID NO: 97045 - RNA, 31 nt, Human
ccacccugccucucaggggucuguguuggga

SEQ ID NO: 97046 - RNA, 23 nt, Human
ccacccugcuagccugccuggga

SEQ ID NO: 97047 - RNA, 32 nt, Human
ccacccugcucaccccugaagcuucucugggu

SEQ ID NO: 97048 - RNA, 32 nt, Human
ccacccugcucagagcuuuccacccacaggga

SEQ ID NO: 97049 - RNA, 23 nt, Human
ccacccugcugcugcuccucccu

SEQ ID NO: 97050 - RNA, 32 nt, Human
ccacccuggaaugccaaugucagcaucaagcc

SEQ ID NO: 97051 - RNA, 22 nt, Human
ccacccuggaauggggcagggg

SEQ ID NO: 97052 - RNA, 32 nt, Human
ccacccuggaauggggcaggggaagggcacac

SEQ ID NO: 97053 - RNA, 32 nt, Human
ccacccuggccaacauggugaaaccuugucuc

SEQ ID NO: 97054 - RNA, 32 nt, Human
ccacccuggcccugcguccuucccucuccagc

SEQ ID NO: 97055 - RNA, 24 nt, Human
ccacccuggcgaguggagcagggg

SEQ ID NO: 97056 - RNA, 29 nt, Human
ccacccuggcugccacugccccucuggga

SEQ ID NO: 97057 - RNA, 32 nt, Human
ccacccugggcaacacagugagacuucaucuc

SEQ ID NO: 97058 - RNA, 32 nt, Human
ccacccugggcaacagagcaagaccccaucuc

SEQ ID NO: 97059 - RNA, 32 nt, Human
ccacccugggcaacauagcgagacuaccucua

SEQ ID NO: 97060 - RNA, 32 nt, Human
ccacccugggcaacauggugaaaccccuucuc

SEQ ID NO: 97061 - RNA, 32 nt, Human
ccacccugggcaacauggugaaauccugccuc

SEQ ID NO: 97062 - RNA, 32 nt, Human
ccacccugggcaauguagugagaccucaucuc

SEQ ID NO: 97063 - RNA, 32 nt, Human
ccacccugggcagagguggaggagacacugaa

SEQ ID NO: 97064 - RNA, 15 nt, Human
ccacccuggggcccu

SEQ ID NO: 97065 - RNA, 32 nt, Human
ccacccugucaugguaugugaggugugggugu

SEQ ID NO: 97066 - RNA, 32 nt, Human
ccacccuguccacccagcccugcccacaccug

SEQ ID NO: 97067 - RNA, 32 nt, Human
ccacccugucccugcacucccuugguugccaa

SEQ ID NO: 97068 - RNA, 32 nt, Human
ccacccugucccuguaucucccauggaagaug

SEQ ID NO: 97069 - RNA, 32 nt, Human
ccacccugucuucuccccuaggugguuccuga

SEQ ID NO: 97070 - RNA, 32 nt, Human
ccacccugugcccugggcugggcacacccccg

SEQ ID NO: 97071 - RNA, 32 nt, Human
ccacccugugcccugggcugggcacagcccca

SEQ ID NO: 97072 - RNA, 32 nt, Human
ccacccugugcggggcacacccccaggaaggg

SEQ ID NO: 97073 - RNA, 32 nt, Human
ccacccugugcugaggccugaggccucuuccu

SEQ ID NO: 97074 - RNA, 32 nt, Human
ccacccuguguguguuuaugucauaguuacau

SEQ ID NO: 97075 - RNA, 32 nt, Human
ccacccuguucuggcugugugugaaggaugug

SEQ ID NO: 97076 - RNA, 32 nt, Human
ccacccuuaagcuuccucugacgguuacccuc

SEQ ID NO: 97077 - RNA, 23 nt, Human
ccacccuuacucaucaccuugca

SEQ ID NO: 97078 - RNA, 32 nt, Human
ccacccuuacuuccuggccucuucugggcuac

SEQ ID NO: 97079 - RNA, 24 nt, Human
ccacccuuagacccugugauccau

SEQ ID NO: 97080 - RNA, 32 nt, Human
ccacccuucacagauaaaauaugaugcuggca

SEQ ID NO: 97081 - RNA, 32 nt, Human
ccacccuucaccacacccuccugcgcucaggg

SEQ ID NO: 97082 - RNA, 32 nt, Human
ccacccuucaggaguuuccagagaccaagaau

SEQ ID NO: 97083 - RNA, 32 nt, Human
ccacccuucauggcuugccuccugccucugga

SEQ ID NO: 97084 - RNA, 32 nt, Human
ccacccuucauguuugcuucagcagcugguag

SEQ ID NO: 97085 - RNA, 32 nt, Human
ccacccuuccagccuuccaggcuuugggggcc

SEQ ID NO: 97086 - RNA, 32 nt, Human
ccacccuuccaucagcgggucuccucccagcg

SEQ ID NO: 97087 - RNA, 20 nt, Human
ccacccuuccauccauaccu

SEQ ID NO: 97088 - RNA, 32 nt, Human
ccacccuucccaagccuucugcacucccaaaa

SEQ ID NO: 97089 - RNA, 32 nt, Human
ccacccuucccuuccccucucccuucugccuu

SEQ ID NO: 97090 - RNA, 32 nt, Human
ccacccuuccuguuacuuuacuucucuagccu

SEQ ID NO: 97091 - RNA, 32 nt, Human
ccacccuuccuucccuucccuguccuggguca

SEQ ID NO: 97092 - RNA, 19 nt, Human
ccacccuucucagggaccc

SEQ ID NO: 97093 - RNA, 21 nt, Human
ccacccuucucuccucuccuc

SEQ ID NO: 97094 - RNA, 22 nt, Human
ccacccuucucuccuuuccuca

SEQ ID NO: 97095 - RNA, 32 nt, Human
ccacccuucugauugucguucuacuguauaua

SEQ ID NO: 97096 - RNA, 20 nt, Human
ccacccuugcccacuucucc

SEQ ID NO: 97097 - RNA, 32 nt, Human
ccacccuugcccacuucuccuucgcuuuccug

SEQ ID NO: 97098 - RNA, 32 nt, Human
ccacccuugcccagccccugcuuggccccucc

SEQ ID NO: 97099 - RNA, 21 nt, Human
ccacccuugguguccacgccu

SEQ ID NO: 97100 - RNA, 25 nt, Human
ccacccuugugcacucacaugaaag

SEQ ID NO: 97101 - RNA, 32 nt, Human
ccacccuuugucucugccccagaguugagaaa

SEQ ID NO: 97102 - RNA, 32 nt, Human
ccacccuuuuucccucccuccugugcugcugc

SEQ ID NO: 97103 - RNA, 32 nt, Human
ccaccgagaaguccuucccacugcacucccca

SEQ ID NO: 97104 - RNA, 32 nt, Human
ccaccgagaucugcauuccgacugccuaugaa

SEQ ID NO: 97105 - RNA, 25 nt, Human
ccaccgagcccuuugaccuucucca

SEQ ID NO: 97106 - RNA, 32 nt, Human
ccaccgagcggcggcggagggagcagcgccgg

SEQ ID NO: 97107 - RNA, 32 nt, Human
ccaccgaggcagcacuggcugcagcugggauu

SEQ ID NO: 97108 - RNA, 32 nt, Human
ccaccgagguccaagccgcacuugcugcccca

SEQ ID NO: 97109 - RNA, 32 nt, Human
ccaccgagucugagccacucgaggucagggcc

SEQ ID NO: 97110 - RNA, 32 nt, Human
ccaccgaugcacuuggccaucugcugaacagu

SEQ ID NO: 97111 - RNA, 32 nt, Human
ccaccgcaacagcagagccugccauccccaac

SEQ ID NO: 97112 - RNA, 32 nt, Human
ccaccgcaacguggaacaacagcuuuaaaacg

SEQ ID NO: 97113 - RNA, 32 nt, Human
ccaccgcacacgugcacacacgccaacaggca

SEQ ID NO: 97114 - RNA, 32 nt, Human
ccaccgcaccccgcccagccuggcagauuuua

SEQ ID NO: 97115 - RNA, 32 nt, Human
ccaccgcacccggucagcuauuuucuacaugc

SEQ ID NO: 97116 - RNA, 32 nt, Human
ccaccgcaccugccucacauuuucuuucucac

SEQ ID NO: 97117 - RNA, 21 nt, Human
ccaccgcacuccacccuggga

SEQ ID NO: 97118 - RNA, 32 nt, Human
ccaccgcacuccucacuagagccugggguggg

SEQ ID NO: 97119 - RNA, 32 nt, Human
ccaccgcagccccugagggaacagugccgucu

SEQ ID NO: 97120 - RNA, 17 nt, Human
ccaccgcauuccacccu

SEQ ID NO: 97121 - RNA, 32 nt, Human
ccaccgcauucggcuauuuuuguauuuuuagu

SEQ ID NO: 97122 - RNA, 32 nt, Human
ccaccgcauuucucaggccaggcacauugagc

SEQ ID NO: 97123 - RNA, 18 nt, Human
ccaccgccaagcagagcc

SEQ ID NO: 97124 - RNA, 32 nt, Human
ccaccgccaggggaugaggaagugggggccgc

SEQ ID NO: 97125 - RNA, 22 nt, Human
ccaccgcccacucuccaccuca

SEQ ID NO: 97126 - RNA, 20 nt, Human
ccaccgcccccgaucgccuu

SEQ ID NO: 97127 - RNA, 32 nt, Human
ccaccgcccugcacccuccacccggccaggcc

SEQ ID NO: 97128 - RNA, 32 nt, Human
ccaccgcccugccucuuccgguuggaggcucu

SEQ ID NO: 97129 - RNA, 19 nt, Human
ccaccgccgccgccgccac

SEQ ID NO: 97130 - RNA, 18 nt, Human
ccaccgccgccgccucca

SEQ ID NO: 97131 - RNA, 32 nt, Human
ccaccgccuccuccaucucccggagcuggagc

SEQ ID NO: 97132 - RNA, 32 nt, Human
ccaccgccugccacaccacuccugccuggugc

SEQ ID NO: 97133 - RNA, 32 nt, Human
ccaccgccuggccucuugccuggguuggaauu

SEQ ID NO: 97134 - RNA, 32 nt, Human
ccaccgcgcccagccaccuuucucuuuagagc

SEQ ID NO: 97135 - RNA, 32 nt, Human
ccaccgcgcccagccagaacaucuguuuuuac

SEQ ID NO: 97136 - RNA, 32 nt, Human
ccaccgcgcccgcucugcuccgacaccgcgcc

SEQ ID NO: 97137 - RNA, 32 nt, Human
ccaccgcgcccggccuagaggauucuuuuaua

SEQ ID NO: 97138 - RNA, 32 nt, Human
ccaccgcgccuggcuaauuuuguauuuuuagu

SEQ ID NO: 97139 - RNA, 32 nt, Human
ccaccgcggcaccugacccuuggcgcuugcgu

SEQ ID NO: 97140 - RNA, 25 nt, Human
ccaccgcggccagccuaugauccau

SEQ ID NO: 97141 - RNA, 32 nt, Human
ccaccgcucacugcaagcacugccucccuccg

SEQ ID NO: 97142 - RNA, 32 nt, Human
ccaccgcucuacuucuaaccagggacacggau

SEQ ID NO: 97143 - RNA, 32 nt, Human
ccaccgcugcccucagcuccgaguccagggcg

SEQ ID NO: 97144 - RNA, 32 nt, Human
ccaccgcugccucuuuccggcugugacccucc

SEQ ID NO: 97145 - RNA, 32 nt, Human
ccaccgcugggacugcuccuagauggaucuca

SEQ ID NO: 97146 - RNA, 32 nt, Human
ccaccgcuguguccucucugcccagccuggcu

SEQ ID NO: 97147 - RNA, 18 nt, Human
ccaccgcuucccugggcu

SEQ ID NO: 97148 - RNA, 32 nt, Human
ccaccgcuucuuucuugauccucuuuccuuaa

SEQ ID NO: 97149 - RNA, 32 nt, Human
ccaccggcacugccaagaucagaauguuccag

SEQ ID NO: 97150 - RNA, 19 nt, Human
ccaccggcagcagcagcag

SEQ ID NO: 97151 - RNA, 32 nt, Human
ccaccggcaucuuuucuuagguauuguauuuc

SEQ ID NO: 97152 - RNA, 19 nt, Human
ccaccggccccacccauca

SEQ ID NO: 97153 - RNA, 32 nt, Human
ccaccggccccauggacaacagccuggcgacc

SEQ ID NO: 97154 - RNA, 32 nt, Human
ccaccggccugugggucucugaagggaccccc

SEQ ID NO: 97155 - RNA, 32 nt, Human
ccaccggcuucagggcagccuggacaacauga

SEQ ID NO: 97156 - RNA, 32 nt, Human
ccaccgggaaccugucggcgagcugcgggagc

SEQ ID NO: 97157 - RNA, 32 nt, Human
ccaccgggagaggcuuccuuuguuacagcugg

SEQ ID NO: 97158 - RNA, 32 nt, Human
ccaccgggcgggaguggggaagggugggcgca

SEQ ID NO: 97159 - RNA, 32 nt, Human
ccaccgggcugacuuccaccucccagugguga

SEQ ID NO: 97160 - RNA, 32 nt, Human
ccaccggggaucggggcugagcggucgguucc

SEQ ID NO: 97161 - RNA, 32 nt, Human
ccaccgggggaggaggaggaggagaaggugga

SEQ ID NO: 97162 - RNA, 22 nt, Human
ccaccgguccagcgccccagga

SEQ ID NO: 97163 - RNA, 32 nt, Human
ccaccggucucgaccucuccucucagcccuuc

SEQ ID NO: 97164 - RNA, 32 nt, Human
ccaccggugggaaaguugccuguggaagggag

SEQ ID NO: 97165 - RNA, 21 nt, Human
ccaccggugucuccuucuaca

SEQ ID NO: 97166 - RNA, 32 nt, Human
ccaccgucacaggccaccaccacgccgucaau

SEQ ID NO: 97167 - RNA, 32 nt, Human
ccaccgucaccagagccagcugcagcacuggg

SEQ ID NO: 97168 - RNA, 32 nt, Human
ccaccguccuccagagaaugcgccccuccugg

SEQ ID NO: 97169 - RNA, 19 nt, Human
ccaccgucgggcagaggca

SEQ ID NO: 97170 - RNA, 24 nt, Human
ccaccgucgggccugccccagguc

SEQ ID NO: 97171 - RNA, 32 nt, Human
ccaccgucugcacuuggcaucugaagucgggg

SEQ ID NO: 97172 - RNA, 32 nt, Human
ccaccgugcccagcccaaaacugugcuuuuua

SEQ ID NO: 97173 - RNA, 32 nt, Human
ccaccgugccuggccgaugucacccacguuuc

SEQ ID NO: 97174 - RNA, 32 nt, Human
ccaccguggaggaggaaggcaagagggggugg

SEQ ID NO: 97175 - RNA, 32 nt, Human
ccaccuaagacugaacaagcacuaaaggacag

SEQ ID NO: 97176 - RNA, 32 nt, Human
ccaccuaagacugaacaagcacuaaaggaccg

SEQ ID NO: 97177 - RNA, 32 nt, Human
ccaccuaagacugaacaagcacuaaaggacug

SEQ ID NO: 97178 - RNA, 32 nt, Human
ccaccuaagccccaggaggucgaggcugcagu

SEQ ID NO: 97179 - RNA, 32 nt, Human
ccaccuacacaaaagcaaacugcauuuuuaaa

SEQ ID NO: 97180 - RNA, 32 nt, Human
ccaccuacacuccagccugggugacagagcaa

SEQ ID NO: 97181 - RNA, 32 nt, Human
ccaccuacagcccucaugccugggcccagcug

SEQ ID NO: 97182 - RNA, 26 nt, Human
ccaccuaccucucaagacugcugcac

SEQ ID NO: 97183 - RNA, 32 nt, Human
ccaccuaccucuggccucaggcugugggcagc

SEQ ID NO: 97184 - RNA, 32 nt, Human
ccaccuacgcccuggucaucucagccaagaag

SEQ ID NO: 97185 - RNA, 32 nt, Human
ccaccuagaccacccuccaugucagguacuga

SEQ ID NO: 97186 - RNA, 32 nt, Human
ccaccuagcaaauauuaugugccugcugugug

SEQ ID NO: 97187 - RNA, 20 nt, Human
ccaccuagcagacgugggga

SEQ ID NO: 97188 - RNA, 32 nt, Human
ccaccuagcugcagauagcucccaaagagaaa

SEQ ID NO: 97189 - RNA, 32 nt, Human
ccaccuaggacccccacccccgacccucgcga

SEQ ID NO: 97190 - RNA, 21 nt, Human
ccaccuaggaggagaugccac

SEQ ID NO: 97191 - RNA, 18 nt, Human
ccaccuaggcgcgugaga

SEQ ID NO: 97192 - RNA, 19 nt, Human
ccaccuaggcugccaggga

SEQ ID NO: 97193 - RNA, 18 nt, Human
ccaccuagggccugggga

SEQ ID NO: 97194 - RNA, 26 nt, Human
ccaccuagggguucaguaaagaaaga

SEQ ID NO: 97195 - RNA, 19 nt, Human
ccaccuagggugccuggga

SEQ ID NO: 97196 - RNA, 20 nt, Human
ccaccuagguuuguguaagu

SEQ ID NO: 97197 - RNA, 32 nt, Human
ccaccuaguacaacaucuuacgggaagagcau

SEQ ID NO: 97198 - RNA, 20 nt, Human
ccaccuaguagcagugguga

SEQ ID NO: 97199 - RNA, 18 nt, Human
ccaccuagugccucuggg

SEQ ID NO: 97200 - RNA, 21 nt, Human
ccaccuaguggagcuuugaga

SEQ ID NO: 97201 - RNA, 19 nt, Human
ccaccuaguggcccaggga

SEQ ID NO: 97202 - RNA, 21 nt, Human
ccaccuagugguaucucuggg

SEQ ID NO: 97203 - RNA, 21 nt, Human
ccaccuaguuuccccugugga

SEQ ID NO: 97204 - RNA, 18 nt, Human
ccaccuauaagcuugggg

SEQ ID NO: 97205 - RNA, 32 nt, Human
ccaccuaugagugccagugacuuauuuuacuu

SEQ ID NO: 97206 - RNA, 32 nt, Human
ccaccuaugccacagugccuaagggcuaggcc

SEQ ID NO: 97207 - RNA, 32 nt, Human
ccaccuauuagcccugggccuggaccucccug

SEQ ID NO: 97208 - RNA, 18 nt, Human
ccaccuauuuccauucuu

SEQ ID NO: 97209 - RNA, 32 nt, Human
ccaccucaaccuuugguaauaacccuuggcac

SEQ ID NO: 97210 - RNA, 32 nt, Human
ccaccucaagacuuucccagugccccagccug

SEQ ID NO: 97211 - RNA, 32 nt, Human
ccaccucacacguguacagcugcagucuuugu

SEQ ID NO: 97212 - RNA, 32 nt, Human
ccaccucacaggcuguugugaggacuaagggu

SEQ ID NO: 97213 - RNA, 17 nt, Human
ccaccucaccagaacca

SEQ ID NO: 97214 - RNA, 32 nt, Human
ccaccucacccaggucucagcggcagugggca

SEQ ID NO: 97215 - RNA, 32 nt, Human
ccaccucaccccucaguucuggguugguucag

SEQ ID NO: 97216 - RNA, 19 nt, Human
ccaccucacccugugcucc

SEQ ID NO: 97217 - RNA, 18 nt, Human
ccaccucaccgccuggga

SEQ ID NO: 97218 - RNA, 32 nt, Human
ccaccucaccucuggcaccucugagcauccac

SEQ ID NO: 97219 - RNA, 32 nt, Human
ccaccucaccuugcaaaaguguuuauccaaau

SEQ ID NO: 97220 - RNA, 32 nt, Human
ccaccucacuguuccccaugcgcacacacaua

SEQ ID NO: 97221 - RNA, 24 nt, Human
ccaccucagccuccuaaagugcca

SEQ ID NO: 97222 - RNA, 32 nt, Human
ccaccucagccuggagcugucuucccacacuc

SEQ ID NO: 97223 - RNA, 32 nt, Human
ccaccucagccuuucaaagugcuggaauuaca

SEQ ID NO: 97224 - RNA, 32 nt, Human
ccaccucagcgggccagcagcccagggaaccc

SEQ ID NO: 97225 - RNA, 32 nt, Human
ccaccucaggaagcuaguauucaugcccagga

SEQ ID NO: 97226 - RNA, 32 nt, Human
ccaccucaggguggggcgggcaggaccccguc

SEQ ID NO: 97227 - RNA, 18 nt, Human
ccaccucaguccauccuu

SEQ ID NO: 97228 - RNA, 32 nt, Human
ccaccucagucucccuaguagguggaacuaca

SEQ ID NO: 97229 - RNA, 22 nt, Human
ccaccucauccuggcucagccu

SEQ ID NO: 97230 - RNA, 32 nt, Human
ccaccucauccuggcucagccuggugauggag

SEQ ID NO: 97231 - RNA, 32 nt, Human
ccaccucaucucuguguugugaauugcaguuc

SEQ ID NO: 97232 - RNA, 32 nt, Human
ccaccuccaagccaaggagguccuggagcaga

SEQ ID NO: 97233 - RNA, 32 nt, Human
ccaccuccaccugagcccucauccucuguucc

SEQ ID NO: 97234 - RNA, 22 nt, Human
ccaccuccacgucugucuugua

SEQ ID NO: 97235 - RNA, 32 nt, Human
ccaccuccacucccaccucacccggccucuuc

SEQ ID NO: 97236 - RNA, 32 nt, Human
ccaccuccagaagagaugggaaaaggucauca

SEQ ID NO: 97237 - RNA, 32 nt, Human
ccaccuccagaggcuuggaagggaacagggca

SEQ ID NO: 97238 - RNA, 19 nt, Human
ccaccuccagcccaucaga

SEQ ID NO: 97239 - RNA, 32 nt, Human
ccaccuccaggcagacccaucacuggaagugg

SEQ ID NO: 97240 - RNA, 32 nt, Human
ccaccuccaggcuggcuucagucucccauccc

SEQ ID NO: 97241 - RNA, 32 nt, Human
ccaccuccaggcugggucuguccugcucugcu

SEQ ID NO: 97242 - RNA, 19 nt, Human
ccaccuccagucagucucg

SEQ ID NO: 97243 - RNA, 32 nt, Human
ccaccuccauccccucucccaaccaugacuuc

SEQ ID NO: 97244 - RNA, 32 nt, Human
ccaccuccaugggacugacaccauguucaagc

SEQ ID NO: 97245 - RNA, 32 nt, Human
ccaccucccacaucccugagguuggcgacugu

SEQ ID NO: 97246 - RNA, 19 nt, Human
ccaccucccaccucucuga

SEQ ID NO: 97247 - RNA, 32 nt, Human
ccaccucccacucugucauggcgggauuuuug

SEQ ID NO: 97248 - RNA, 32 nt, Human
ccaccucccagcccucuccucauucucugaac

SEQ ID NO: 97249 - RNA, 32 nt, Human
ccaccuccccauccccuguucucccucuguug

SEQ ID NO: 97250 - RNA, 20 nt, Human
ccaccucccccucugugagg

SEQ ID NO: 97251 - RNA, 32 nt, Human
ccaccuccccuccccacagccuuccucacccu

SEQ ID NO: 97252 - RNA, 32 nt, Human
ccaccucccucaaaccuugagauaggcugggu

SEQ ID NO: 97253 - RNA, 32 nt, Human
ccaccucccuccagacuccuuugaccccagga

SEQ ID NO: 97254 - RNA, 32 nt, Human
ccaccucccuccucccuccacaguccuccagc

SEQ ID NO: 97255 - RNA, 18 nt, Human
ccaccucccucucucuga

SEQ ID NO: 97256 - RNA, 32 nt, Human
ccaccucccugcacauggcacuacccagacug

SEQ ID NO: 97257 - RNA, 32 nt, Human
ccaccucccuggcccugccccugcacucaggc

SEQ ID NO: 97258 - RNA, 32 nt, Human
ccaccuccgcagccacuguccaaagggcaggg

SEQ ID NO: 97259 - RNA, 32 nt, Human
ccaccuccgggaccccugacucaggccugagg

SEQ ID NO: 97260 - RNA, 32 nt, Human
ccaccuccgugcagcugaccugcccuccagcc

SEQ ID NO: 97261 - RNA, 25 nt, Human
ccaccuccguucccucugggcccca

SEQ ID NO: 97262 - RNA, 19 nt, Human
ccaccuccuauccaucguu

SEQ ID NO: 97263 - RNA, 19 nt, Human
ccaccuccucaggcugccu

SEQ ID NO: 97264 - RNA, 32 nt, Human
ccaccuccuccaaagcacugagguccuggcag

SEQ ID NO: 97265 - RNA, 32 nt, Human
ccaccuccuccaggaaccauguuuggagcuuc

SEQ ID NO: 97266 - RNA, 32 nt, Human
ccaccuccuccaggaagccuuccuuuauccau

SEQ ID NO: 97267 - RNA, 32 nt, Human
ccaccuccuccaucuccggcuccugggcuugg

SEQ ID NO: 97268 - RNA, 32 nt, Human
ccaccuccuccccuucauuccugcugcuaccc

SEQ ID NO: 97269 - RNA, 32 nt, Human
ccaccuccuccuccuccuccucuccuccugga

SEQ ID NO: 97270 - RNA, 32 nt, Human
ccaccuccuccuccuccuggcccugcugcugc

SEQ ID NO: 97271 - RNA, 32 nt, Human
ccaccuccuccugugcccugagcugcugagac

SEQ ID NO: 97272 - RNA, 32 nt, Human
ccaccuccucgggcuucauuuucucuauuuag

SEQ ID NO: 97273 - RNA, 20 nt, Human
ccaccuccucugccucaagg

SEQ ID NO: 97274 - RNA, 32 nt, Human
ccaccuccugcagccucccuguuguuucuaga

SEQ ID NO: 97275 - RNA, 32 nt, Human
ccaccuccuggaaggcagccaggcuggcagau

SEQ ID NO: 97276 - RNA, 32 nt, Human
ccaccuccuggcugguuuaccugcugcugccc

SEQ ID NO: 97277 - RNA, 32 nt, Human
ccaccuccuuccccuucucccucaggcaaccc

SEQ ID NO: 97278 - RNA, 32 nt, Human
ccaccuccuuucagcugcuccugggccucagc

SEQ ID NO: 97279 - RNA, 32 nt, Human
ccaccuccuuucucuguccucuccugagguuc

SEQ ID NO: 97280 - RNA, 32 nt, Human
ccaccucguaggguuguagaaagaccaaguga

SEQ ID NO: 97281 - RNA, 32 nt, Human
ccaccucuacaaauggcguagccuucaugggu

SEQ ID NO: 97282 - RNA, 18 nt, Human
ccaccucuaccacugcca

SEQ ID NO: 97283 - RNA, 32 nt, Human
ccaccucuauauacauguacacaaagccacac

SEQ ID NO: 97284 - RNA, 32 nt, Human
ccaccucucaagggccuuggauuccugggacc

SEQ ID NO: 97285 - RNA, 19 nt, Human
ccaccucucacuuugcugu

SEQ ID NO: 97286 - RNA, 32 nt, Human
ccaccucuccauccccuaggcuuucagcaggg

SEQ ID NO: 97287 - RNA, 32 nt, Human
ccaccucucccacccaacacucccucuuaucu

SEQ ID NO: 97288 - RNA, 19 nt, Human
ccaccucucccugcuuggg

SEQ ID NO: 97289 - RNA, 32 nt, Human
ccaccucucccuugauggucugggagccuggc

SEQ ID NO: 97290 - RNA, 32 nt, Human
ccaccucuccgaagaggaaagccacguagagu

SEQ ID NO: 97291 - RNA, 32 nt, Human
ccaccucuccuccuugggagguuccagugggu

SEQ ID NO: 97292 - RNA, 32 nt, Human
ccaccucuccuuucccccuccuucuccauccc

SEQ ID NO: 97293 - RNA, 32 nt, Human
ccaccucucuaaaagacacaggaggaugacac

SEQ ID NO: 97294 - RNA, 32 nt, Human
ccaccucucucucacagguacacacacaacca

SEQ ID NO: 97295 - RNA, 32 nt, Human
ccaccucugaagaugcugggggaggcagcugg

SEQ ID NO: 97296 - RNA, 32 nt, Human
ccaccucugagcccaaggaagaauggucaccc

SEQ ID NO: 97297 - RNA, 26 nt, Human
ccaccucugagucucagcuuugcuuc

SEQ ID NO: 97298 - RNA, 32 nt, Human
ccaccucugagugcucugaggaaaacauggca

SEQ ID NO: 97299 - RNA, 32 nt, Human
ccaccucugaugucugugcugcugucaccagg

SEQ ID NO: 97300 - RNA, 32 nt, Human
ccaccucugcaaccugccaccuccugcuggca

SEQ ID NO: 97301 - RNA, 32 nt, Human
ccaccucugccacccuccgauggggccgcuac

SEQ ID NO: 97302 - RNA, 32 nt, Human
ccaccucugcuugcuuucuuucccuccccucc

SEQ ID NO: 97303 - RNA, 32 nt, Human
ccaccucugggagcuggaguccacuggggugg

SEQ ID NO: 97304 - RNA, 32 nt, Human
ccaccucugggccucugcuccuggccagcagu

SEQ ID NO: 97305 - RNA, 32 nt, Human
ccaccucuguccagggcaguaagaagggcugc

SEQ ID NO: 97306 - RNA, 32 nt, Human
ccaccucugugcucccuccugccugcaugcaa

SEQ ID NO: 97307 - RNA, 32 nt, Human
ccaccucuucccgcacccagcaugcagcucug

SEQ ID NO: 97308 - RNA, 32 nt, Human
ccaccucuuccugcccugcucuccuccagagg

SEQ ID NO: 97309 - RNA, 32 nt, Human
ccaccucuuccugcucccuccucuuuuggcuc

SEQ ID NO: 97310 - RNA, 32 nt, Human
ccaccucuucuaaaccaugauguggcacauuu

SEQ ID NO: 97311 - RNA, 32 nt, Human
ccaccucuugcacucucgcuuuuggagcaagu

SEQ ID NO: 97312 - RNA, 32 nt, Human
ccaccucuugccuuguugaggcuuuuuccuuu

SEQ ID NO: 97313 - RNA, 17 nt, Human
ccaccucuugcuugggg

SEQ ID NO: 97314 - RNA, 32 nt, Human
ccaccucuuuucucccaaucggacuccggcca

SEQ ID NO: 97315 - RNA, 32 nt, Human
ccaccugaaacacacacaaacacacacauguc

SEQ ID NO: 97316 - RNA, 26 nt, Human
ccaccugaaagcucuguaaaagaaag

SEQ ID NO: 97317 - RNA, 32 nt, Human
ccaccugaaagucacugugguuaaagauauug

SEQ ID NO: 97318 - RNA, 32 nt, Human
ccaccugaacaacuggagcaaccuuuagucuc

SEQ ID NO: 97319 - RNA, 32 nt, Human
ccaccugacuagcugggauugcagccugcacc

SEQ ID NO: 97320 - RNA, 32 nt, Human
ccaccugacuucaucuacgccucggcaccacg

SEQ ID NO: 97321 - RNA, 32 nt, Human
ccaccugagacgagcacagggucuccacgagg

SEQ ID NO: 97322 - RNA, 32 nt, Human
ccaccugagcagcugggauugcaggugcaugc

SEQ ID NO: 97323 - RNA, 32 nt, Human
ccaccugagccaagcaaagaggguucaccugc

SEQ ID NO: 97324 - RNA, 32 nt, Human
ccaccugagcccagcuagagucaguggggaag

SEQ ID NO: 97325 - RNA, 32 nt, Human
ccaccugaggacugggugcacaguugucuuug

SEQ ID NO: 97326 - RNA, 32 nt, Human
ccaccugagggccauggcugugacccauaccc

SEQ ID NO: 97327 - RNA, 32 nt, Human
ccaccugaguagcagggauuacaggugugugc

SEQ ID NO: 97328 - RNA, 32 nt, Human
ccaccugaguagcugggaguacaggcaugugg

SEQ ID NO: 97329 - RNA, 32 nt, Human
ccaccugaguagcugggauuacacgcacaugc

SEQ ID NO: 97330 - RNA, 32 nt, Human
ccaccugcaaacucuccgccuucugcaccugc

SEQ ID NO: 97331 - RNA, 32 nt, Human
ccaccugcaacaagcuggaggaaccauugugc

SEQ ID NO: 97332 - RNA, 21 nt, Human
ccaccugcaacagcugccccu

SEQ ID NO: 97333 - RNA, 32 nt, Human
ccaccugcaauuucccaccuccugcccauccc

SEQ ID NO: 97334 - RNA, 32 nt, Human
ccaccugcacacaagcaggugccuuagagcca

SEQ ID NO: 97335 - RNA, 32 nt, Human
ccaccugcaggaccuccuccugcuggccacca

SEQ ID NO: 97336 - RNA, 32 nt, Human
ccaccugcagucucacaggccaugcccugggu

SEQ ID NO: 97337 - RNA, 21 nt, Human
ccaccugccaaagcuuggcac

SEQ ID NO: 97338 - RNA, 32 nt, Human
ccaccugccaugagcagcauccugagcccggg

SEQ ID NO: 97339 - RNA, 22 nt, Human
ccaccugcccacacccagcaga

SEQ ID NO: 97340 - RNA, 32 nt, Human
ccaccugcccacucccuuaacaagaguuuuau

SEQ ID NO: 97341 - RNA, 32 nt, Human
ccaccugccccagccccugccucugcccaagu

SEQ ID NO: 97342 - RNA, 32 nt, Human
ccaccugcccucucccccaaagcuguauuuuu

SEQ ID NO: 97343 - RNA, 32 nt, Human
ccaccugcccucucuucccugccugaucaccg

SEQ ID NO: 97344 - RNA, 32 nt, Human
ccaccugccgccaccacucgcuucgcugauga

SEQ ID NO: 97345 - RNA, 32 nt, Human
ccaccugccgccuucagacucucggggcuggu

SEQ ID NO: 97346 - RNA, 20 nt, Human
ccaccugccgguggcuccug

SEQ ID NO: 97347 - RNA, 32 nt, Human
ccaccugccuccugaagugcugcugacaugca

SEQ ID NO: 97348 - RNA, 32 nt, Human
ccaccugccugagagcccugaggugacaauaa

SEQ ID NO: 97349 - RNA, 32 nt, Human
ccaccugccugggagucucccugccucacucc

SEQ ID NO: 97350 - RNA, 32 nt, Human
ccaccugccuugcauaugcagaccaugacaau

SEQ ID NO: 97351 - RNA, 32 nt, Human
ccaccugcgcggcugcagccggcggaucccuc

SEQ ID NO: 97352 - RNA, 32 nt, Human
ccaccugcggugcuaucucccccagccccauc

SEQ ID NO: 97353 - RNA, 32 nt, Human
ccaccugcgugucccuuccuccccgagucagg

SEQ ID NO: 97354 - RNA, 21 nt, Human
ccaccugcuccggagcugggg

SEQ ID NO: 97355 - RNA, 32 nt, Human
ccaccugcuccucaucuuaggagucuccuuuu

SEQ ID NO: 97356 - RNA, 32 nt, Human
ccaccugcugcucucacccugggguccccagc

SEQ ID NO: 97357 - RNA, 32 nt, Human
ccaccugcuggcagccgaugggggcacucgga

SEQ ID NO: 97358 - RNA, 32 nt, Human
ccaccugcugggagguguguuugcaggacagg

SEQ ID NO: 97359 - RNA, 32 nt, Human
ccaccugcuggugagaggugcaaagaggcaga

SEQ ID NO: 97360 - RNA, 18 nt, Human
ccaccugcuguccuccuu

SEQ ID NO: 97361 - RNA, 32 nt, Human
ccaccugcuucaggagugccucacauagauag

SEQ ID NO: 97362 - RNA, 32 nt, Human
ccaccugcuuccugauguucaccaggaaccua

SEQ ID NO: 97363 - RNA, 21 nt, Human
ccaccuggacaauaauugaug

SEQ ID NO: 97364 - RNA, 21 nt, Human
ccaccuggacuggcucaguga

SEQ ID NO: 97365 - RNA, 32 nt, Human
ccaccuggagcccuccccugcccacccgcccc

SEQ ID NO: 97366 - RNA, 32 nt, Human
ccaccuggagggagagcagaccugcggcugag

SEQ ID NO: 97367 - RNA, 32 nt, Human
ccaccuggauagggacaaacaggagcuggggg

SEQ ID NO: 97368 - RNA, 32 nt, Human
ccaccuggcaacugcuuaccagccuggcuggc

SEQ ID NO: 97369 - RNA, 32 nt, Human
ccaccuggccaacauggugaaaccccaucucu

SEQ ID NO: 97370 - RNA, 32 nt, Human
ccaccuggccaacauggugaaaccccgucucu

SEQ ID NO: 97371 - RNA, 32 nt, Human
ccaccuggccagccacagcacgugugucaccu

SEQ ID NO: 97372 - RNA, 23 nt, Human
ccaccuggccaugcaugcugcca

SEQ ID NO: 97373 - RNA, 32 nt, Human
ccaccuggccugcaaaguuugcaggagggcca

SEQ ID NO: 97374 - RNA, 18 nt, Human
ccaccuggccugcuggga

SEQ ID NO: 97375 - RNA, 32 nt, Human
ccaccuggcuaaaucucuuuuuaacuuuugua

SEQ ID NO: 97376 - RNA, 32 nt, Human
ccaccuggcucucagccacuaguguuugugua

SEQ ID NO: 97377 - RNA, 32 nt, Human
ccaccuggcucucagucacuaucguuugugua

SEQ ID NO: 97378 - RNA, 32 nt, Human
ccaccugggaaaggagggaucagcaauagcug

SEQ ID NO: 97379 - RNA, 19 nt, Human
ccaccugggacccuugaga

SEQ ID NO: 97380 - RNA, 32 nt, Human
ccaccugggacggcagugaggaugagcaccuc

SEQ ID NO: 97381 - RNA, 32 nt, Human
ccaccugggaggcugaggcaggagaaucucuu

SEQ ID NO: 97382 - RNA, 32 nt, Human
ccaccugggaggcugaggcaggagaauggugu

SEQ ID NO: 97383 - RNA, 32 nt, Human
ccaccugggcaacaagaaggaaacucugucuc

SEQ ID NO: 97384 - RNA, 32 nt, Human
ccaccuggggacccaaaagagaaggccuagga

SEQ ID NO: 97385 - RNA, 32 nt, Human
ccaccuggggaggaggcgggagagggagcugc

SEQ ID NO: 97386 - RNA, 32 nt, Human
ccaccuggggcagucaccugcccagaucccag

SEQ ID NO: 97387 - RNA, 22 nt, Human
ccaccuggggccccauuaaaga

SEQ ID NO: 97388 - RNA, 32 nt, Human
ccaccugguacaugauacaugaccccagguuc

SEQ ID NO: 97389 - RNA, 21 nt, Human
ccaccugguacugacccagga

SEQ ID NO: 97390 - RNA, 32 nt, Human
ccaccuggucucugcacgcacacacuggucag

SEQ ID NO: 97391 - RNA, 18 nt, Human
ccaccuggugccguggga

SEQ ID NO: 97392 - RNA, 20 nt, Human
ccaccugguggccucugccc

SEQ ID NO: 97393 - RNA, 32 nt, Human
ccaccuguaccugacacagaagcuggggagcc

SEQ ID NO: 97394 - RNA, 32 nt, Human
ccaccuguagcugaauccacagacccaaagcc

SEQ ID NO: 97395 - RNA, 21 nt, Human
ccaccugucaaaaggcaggug

SEQ ID NO: 97396 - RNA, 21 nt, Human
ccaccugucaaucacuucaga

SEQ ID NO: 97397 - RNA, 21 nt, Human
ccaccugucagaaggugggug

SEQ ID NO: 97398 - RNA, 20 nt, Human
ccaccugucagacuugggug

SEQ ID NO: 97399 - RNA, 18 nt, Human
ccaccuguccugccuggg

SEQ ID NO: 97400 - RNA, 32 nt, Human
ccaccuguccuggaagucaaggccagucacgg

SEQ ID NO: 97401 - RNA, 32 nt, Human
ccaccugucguuuacccagcccuagacaugcu

SEQ ID NO: 97402 - RNA, 32 nt, Human
ccaccugucugccucaagcucccagagcaccu

SEQ ID NO: 97403 - RNA, 32 nt, Human
ccaccugucuggucagagucucucugcugugg

SEQ ID NO: 97404 - RNA, 32 nt, Human
ccaccugugacagccaggcuugaggguggacg

SEQ ID NO: 97405 - RNA, 32 nt, Human
ccaccugugcugcugcaccaaccucacugccc

SEQ ID NO: 97406 - RNA, 32 nt, Human
ccaccuguggccugggugcccucuggaggccg

SEQ ID NO: 97407 - RNA, 17 nt, Human
ccaccuguguccucccu

SEQ ID NO: 97408 - RNA, 32 nt, Human
ccaccuguuagaagcuauguguuugaaggaau

SEQ ID NO: 97409 - RNA, 32 nt, Human
ccaccuguucgggaguuggagaugugcaccua

SEQ ID NO: 97410 - RNA, 22 nt, Human
ccaccuguuucccccaagaaag

SEQ ID NO: 97411 - RNA, 32 nt, Human
ccaccuuaacccagugaucaaaguuaaccucc

SEQ ID NO: 97412 - RNA, 32 nt, Human
ccaccuuagcuucccaauuccccuggcugucc

SEQ ID NO: 97413 - RNA, 32 nt, Human
ccaccuuauuuuugagcuugguguuuugucuu

SEQ ID NO: 97414 - RNA, 32 nt, Human
ccaccuucaccuuugucgcugggucagugcug

SEQ ID NO: 97415 - RNA, 32 nt, Human
ccaccuucagccagagaggcugggaggccgaa

SEQ ID NO: 97416 - RNA, 19 nt, Human
ccaccuucaggccccgccc

SEQ ID NO: 97417 - RNA, 32 nt, Human
ccaccuucaggggugacacaucagcccaggcc

SEQ ID NO: 97418 - RNA, 32 nt, Human
ccaccuuccaaagcuuccgcaaucucaccguc

SEQ ID NO: 97419 - RNA, 22 nt, Human
ccaccuuccaaaggugguacuu

SEQ ID NO: 97420 - RNA, 32 nt, Human
ccaccuuccaggguccagcacaggugcaugcc

SEQ ID NO: 97421 - RNA, 32 nt, Human
ccaccuuccccaccaucuguggcuccauauac

SEQ ID NO: 97422 - RNA, 18 nt, Human
ccaccuucccccucucug

SEQ ID NO: 97423 - RNA, 19 nt, Human
ccaccuuccuaacacccuu

SEQ ID NO: 97424 - RNA, 32 nt, Human
ccaccuuccugccuccccuccugcuccucauc

SEQ ID NO: 97425 - RNA, 32 nt, Human
ccaccuuccuucaagccuucagccccuccagc

SEQ ID NO: 97426 - RNA, 32 nt, Human
ccaccuuccuucagagcuucgugcuuuauggu

SEQ ID NO: 97427 - RNA, 32 nt, Human
ccaccuuccuuccuccaagauaccaucuccuc

SEQ ID NO: 97428 - RNA, 32 nt, Human
ccaccuuccuuucuccccugcuggccauuguu

SEQ ID NO: 97429 - RNA, 32 nt, Human
ccaccuucuaggcguuuuuggaacccuuacug

SEQ ID NO: 97430 - RNA, 32 nt, Human
ccaccuucucagggcaaaagaaaaagaaggug

SEQ ID NO: 97431 - RNA, 32 nt, Human
ccaccuucucaguucuugugucuguuauugga

SEQ ID NO: 97432 - RNA, 32 nt, Human
ccaccuucucccacugaagcaccaagaggcuu

SEQ ID NO: 97433 - RNA, 32 nt, Human
ccaccuucucuccccuccucucugcuuuaauu

SEQ ID NO: 97434 - RNA, 29 nt, Human
ccaccuucucuggaugugccugggcuugg

SEQ ID NO: 97435 - RNA, 32 nt, Human
ccaccuucucuuuuucucaaauauaguugcag

SEQ ID NO: 97436 - RNA, 32 nt, Human
ccaccuucuucacuauaauaaaagccagucug

SEQ ID NO: 97437 - RNA, 23 nt, Human
ccaccuucuuuggagcaaggaga

SEQ ID NO: 97438 - RNA, 20 nt, Human
ccaccuugccacccauucuu

SEQ ID NO: 97439 - RNA, 32 nt, Human
ccaccuugcccugcugauuuuguauuuuuagu

SEQ ID NO: 97440 - RNA, 32 nt, Human
ccaccuugcgugucucagccuccugagcagcu

SEQ ID NO: 97441 - RNA, 32 nt, Human
ccaccuugcuguccuccgccgccuuccgggug

SEQ ID NO: 97442 - RNA, 32 nt, Human
ccaccuuggacagugggaugugguguuccaca

SEQ ID NO: 97443 - RNA, 20 nt, Human
ccaccuuggcaccaggagga

SEQ ID NO: 97444 - RNA, 21 nt, Human
ccaccuuggccugauggagga

SEQ ID NO: 97445 - RNA, 24 nt, Human
ccaccuuggcgccuacacgggaga

SEQ ID NO: 97446 - RNA, 22 nt, Human
ccaccuuggcuggcaagggaga

SEQ ID NO: 97447 - RNA, 32 nt, Human
ccaccuuggcugggaagacuauggugcugccu

SEQ ID NO: 97448 - RNA, 32 nt, Human
ccaccuugggcaacauaacgagaccccgucuc

SEQ ID NO: 97449 - RNA, 23 nt, Human
ccaccuugguuucccaaaguguu

SEQ ID NO: 97450 - RNA, 32 nt, Human
ccaccuugugacccaggguggggacaggggcu

SEQ ID NO: 97451 - RNA, 32 nt, Human
ccaccuuguuucucccugcucaugaggucgca

SEQ ID NO: 97452 - RNA, 32 nt, Human
ccaccuuucccuucagcauucccuuucaugac

SEQ ID NO: 97453 - RNA, 32 nt, Human
ccaccuuucgagaucaggaccaaccuggaaaa

SEQ ID NO: 97454 - RNA, 32 nt, Human
ccaccuuucucagcaucaggacgggguugccc

SEQ ID NO: 97455 - RNA, 32 nt, Human
ccaccuuucuguaguucagggcuggcaggagg

SEQ ID NO: 97456 - RNA, 22 nt, Human
ccaccuuucuuaaagcagcgua

SEQ ID NO: 97457 - RNA, 18 nt, Human
ccaccuuucuuucguuca

SEQ ID NO: 97458 - RNA, 32 nt, Human
ccaccuuugcccauggacccucuccuugcugc

SEQ ID NO: 97459 - RNA, 32 nt, Human
ccaccuuuguguccuagagcucagcgucugca

SEQ ID NO: 97460 - RNA, 32 nt, Human
ccaccuuuuccagaggaaccuguucuacggcc

SEQ ID NO: 97461 - RNA, 19 nt, Human
ccaccuuuucccuuaaagg

SEQ ID NO: 97462 - RNA, 32 nt, Human
ccacgaaacuuugcccauagcagcgggcgggc

SEQ ID NO: 97463 - RNA, 32 nt, Human
ccacgaaagaggagugugagaggugaguccaa

SEQ ID NO: 97464 - RNA, 32 nt, Human
ccacgaaaggacugggugcaccccagaacgag

SEQ ID NO: 97465 - RNA, 32 nt, Human
ccacgaacaccuucucaagcacuuugagugac

SEQ ID NO: 97466 - RNA, 32 nt, Human
ccacgaaccagaaaauuggcccuuaccagaca

SEQ ID NO: 97467 - RNA, 18 nt, Human
ccacgaacuccgcucuca

SEQ ID NO: 97468 - RNA, 32 nt, Human
ccacgaacuccuccuccauuuccuuuuuggga

SEQ ID NO: 97469 - RNA, 32 nt, Human
ccacgaacuuuugucauucagccugggagacc

SEQ ID NO: 97470 - RNA, 32 nt, Human
ccacgaagcaggacaggcagagcccaggguac

SEQ ID NO: 97471 - RNA, 32 nt, Human
ccacgaaggccaccacgacaagggccaccagu

SEQ ID NO: 97472 - RNA, 32 nt, Human
ccacgaaggcuguuucuuccacacagcacuuu

SEQ ID NO: 97473 - RNA, 32 nt, Human
ccacgacagaacugcacuuguagccggagaca

SEQ ID NO: 97474 - RNA, 32 nt, Human
ccacgacaggguggagagaagcagggaccauu

SEQ ID NO: 97475 - RNA, 32 nt, Human
ccacgacagugcaugcacuccagccugggcaa

SEQ ID NO: 97476 - RNA, 32 nt, Human
ccacgaccaaccauauggcaaaugaccaagcc

SEQ ID NO: 97477 - RNA, 32 nt, Human
ccacgacccaggcuggacgaaugccuggucag

SEQ ID NO: 97478 - RNA, 26 nt, Human
ccacgaccgggucgaccccccagggg

SEQ ID NO: 97479 - RNA, 32 nt, Human
ccacgaccugggagcagcaggucccaggucgc

SEQ ID NO: 97480 - RNA, 32 nt, Human
ccacgaccuugccauuuggggugggcucuuca

SEQ ID NO: 97481 - RNA, 22 nt, Human
ccacgacgcgggccgccggguc

SEQ ID NO: 97482 - RNA, 28 nt, Human
ccacgacggagugccaggagcacuaaca

SEQ ID NO: 97483 - RNA, 32 nt, Human
ccacgacggugacacgcuucccuggauuggca

SEQ ID NO: 97484 - RNA, 32 nt, Human
ccacgacggugaucauggcagagaaucacgcc

SEQ ID NO: 97485 - RNA, 32 nt, Human
ccacgacuuauucgaaaagcacuagaauuuau

SEQ ID NO: 97486 - RNA, 32 nt, Human
ccacgagaaccaggagaucuaccagaaggccu

SEQ ID NO: 97487 - RNA, 32 nt, Human
ccacgagagccuucugggcucccaccagagac

SEQ ID NO: 97488 - RNA, 32 nt, Human
ccacgagccccagccucacaguguccacucaa

SEQ ID NO: 97489 - RNA, 32 nt, Human
ccacgagccuccauccguucugguucggguuu

SEQ ID NO: 97490 - RNA, 32 nt, Human
ccacgagcgcggagcuuggggaggcgcaggcg

SEQ ID NO: 97491 - RNA, 32 nt, Human
ccacgagcuccaccagcccauuggagaaaagu

SEQ ID NO: 97492 - RNA, 32 nt, Human
ccacgaggagaccccgcucccgcaggaggccg

SEQ ID NO: 97493 - RNA, 32 nt, Human
ccacgaggagcgcacagccagagcaggugcug

SEQ ID NO: 97494 - RNA, 32 nt, Human
ccacgaggcaacacauuauccaccagguaaca

SEQ ID NO: 97495 - RNA, 32 nt, Human
ccacgaggcaacauuugauauccagcagauaa

SEQ ID NO: 97496 - RNA, 32 nt, Human
ccacgaggcucccuccaggcuuggggccgugg

SEQ ID NO: 97497 - RNA, 32 nt, Human
ccacgagggggccgagcagggugcggcggcgg

SEQ ID NO: 97498 - RNA, 25 nt, Human
ccacgagucguccguuuccccaggg

SEQ ID NO: 97499 - RNA, 32 nt, Human
ccacgaguuuaagaccagccugggcaacaugg

SEQ ID NO: 97500 - RNA, 32 nt, Human
ccacgaucacccagcaggagucguggcagaac

SEQ ID NO: 97501 - RNA, 32 nt, Human
ccacgauuccuuccucuucacuggcucgaggu

SEQ ID NO: 97502 - RNA, 22 nt, Human
ccacgauuuaaaccaucagaga

SEQ ID NO: 97503 - RNA, 32 nt, Human
ccacgcaaacacccucccuccuggggaccucu

SEQ ID NO: 97504 - RNA, 32 nt, Human
ccacgcacacucgccugucccuccagggauca

SEQ ID NO: 97505 - RNA, 32 nt, Human
ccacgcacaucaccacccauugucaggugcuc

SEQ ID NO: 97506 - RNA, 20 nt, Human
ccacgcacugacacugccca

SEQ ID NO: 97507 - RNA, 32 nt, Human
ccacgcacugcaaccugggugacagagcgaga

SEQ ID NO: 97508 - RNA, 32 nt, Human
ccacgcacuggccuucccuccugccccacucc

SEQ ID NO: 97509 - RNA, 32 nt, Human
ccacgcagaggggaggcugcuccaccccuacu

SEQ ID NO: 97510 - RNA, 32 nt, Human
ccacgcagcagucaggggagaaaaugguggcu

SEQ ID NO: 97511 - RNA, 32 nt, Human
ccacgcagcucuccaacacuccguuaaacaaa

SEQ ID NO: 97512 - RNA, 32 nt, Human
ccacgcagcuggcagagagcacagugaucacc

SEQ ID NO: 97513 - RNA, 32 nt, Human
ccacgcaggagguggugggcucgcaggaaggu

SEQ ID NO: 97514 - RNA, 32 nt, Human
ccacgcaggcacucacauucacacacauacac

SEQ ID NO: 97515 - RNA, 31 nt, Human
ccacgcaucaauaaauaauuuugaaggccuc

SEQ ID NO: 97516 - RNA, 20 nt, Human
ccacgcauccauccacccuu

SEQ ID NO: 97517 - RNA, 32 nt, Human
ccacgcaucgccagggcaguuggggcaguggg

SEQ ID NO: 97518 - RNA, 32 nt, Human
ccacgcauggugaugcacaccuguaaucccag

SEQ ID NO: 97519 - RNA, 32 nt, Human
ccacgcaugguggcucacgccuguaaucccag

SEQ ID NO: 97520 - RNA, 31 nt, Human
ccacgcauugucacagcuaccaaaguguggu

SEQ ID NO: 97521 - RNA, 32 nt, Human
ccacgccaccgccucugccuccaggccgcccg

SEQ ID NO: 97522 - RNA, 32 nt, Human
ccacgccacugcacuccagcccgggugacaga

SEQ ID NO: 97523 - RNA, 32 nt, Human
ccacgccacugcacuccagccugggugacagu

SEQ ID NO: 97524 - RNA, 32 nt, Human
ccacgccacugcacuccagcgugggcaacaga

SEQ ID NO: 97525 - RNA, 32 nt, Human
ccacgccagaguucacaggaucuucaucaugg

SEQ ID NO: 97526 - RNA, 32 nt, Human
ccacgccagccuugguaucuacuuuuuauaca

SEQ ID NO: 97527 - RNA, 32 nt, Human
ccacgccagggagucugucaccugggaggugg

SEQ ID NO: 97528 - RNA, 32 nt, Human
ccacgccauugcacuccagccugggugacaag

SEQ ID NO: 97529 - RNA, 32 nt, Human
ccacgccauugcacuccagcuugggcaauaag

SEQ ID NO: 97530 - RNA, 21 nt, Human
ccacgcccacagcccccuugg

SEQ ID NO: 97531 - RNA, 32 nt, Human
ccacgcccacaggcugacccagaucuccguga

SEQ ID NO: 97532 - RNA, 32 nt, Human
ccacgcccacccugaacuccagcuggcccgca

SEQ ID NO: 97533 - RNA, 18 nt, Human
ccacgcccaccucagcuc

SEQ ID NO: 97534 - RNA, 32 nt, Human
ccacgcccagaggaggggaggcacuggccccc

SEQ ID NO: 97535 - RNA, 32 nt, Human
ccacgcccagccuguggccagcacuuuagaug

SEQ ID NO: 97536 - RNA, 32 nt, Human
ccacgcccagcuaauuguuuuguauuuuuagu

SEQ ID NO: 97537 - RNA, 32 nt, Human
ccacgcccagcuccccaccugcccugcacucu

SEQ ID NO: 97538 - RNA, 32 nt, Human
ccacgcccagggcgcggaaggccaugcugccc

SEQ ID NO: 97539 - RNA, 32 nt, Human
ccacgcccaguucuaccagugccacagccuuc

SEQ ID NO: 97540 - RNA, 32 nt, Human
ccacgccccagccacuuugcucccucucaccu

SEQ ID NO: 97541 - RNA, 32 nt, Human
ccacgcccccuagcucagacccgcacacaaga

SEQ ID NO: 97542 - RNA, 32 nt, Human
ccacgcccccuucagauccuuugcuccggaga

SEQ ID NO: 97543 - RNA, 23 nt, Human
ccacgccccucgcuggcgcccca

SEQ ID NO: 97544 - RNA, 32 nt, Human
ccacgccccugcagauccaggucuccaggccu

SEQ ID NO: 97545 - RNA, 19 nt, Human
ccacgcccggcggccgcga

SEQ ID NO: 97546 - RNA, 32 nt, Human
ccacgcccggcugauggugguggaggaacgau

SEQ ID NO: 97547 - RNA, 32 nt, Human
ccacgcccuccccaucucccagucucccugcc

SEQ ID NO: 97548 - RNA, 18 nt, Human
ccacgccggcccgcgcgu

SEQ ID NO: 97549 - RNA, 32 nt, Human
ccacgccuagccccaccgcgcucccggcgcgg

SEQ ID NO: 97550 - RNA, 32 nt, Human
ccacgccuagccucacgcuccuuucugaucuu

SEQ ID NO: 97551 - RNA, 32 nt, Human
ccacgccuagcuaauuucuuuguauuuuuggu

SEQ ID NO: 97552 - RNA, 32 nt, Human
ccacgccucuaaucccagcacuuugggaggcu

SEQ ID NO: 97553 - RNA, 32 nt, Human
ccacgccugccugggccugugcugucagaccc

SEQ ID NO: 97554 - RNA, 24 nt, Human
ccacgccugcgcucuccgcuccca

SEQ ID NO: 97555 - RNA, 18 nt, Human
ccacgccugcuucuccca

SEQ ID NO: 97556 - RNA, 32 nt, Human
ccacgccuggaucccuugcccccacuauuuaa

SEQ ID NO: 97557 - RNA, 22 nt, Human
ccacgccuggcccguguugcug

SEQ ID NO: 97558 - RNA, 32 nt, Human
ccacgccuggccuccauaccucccagguccug

SEQ ID NO: 97559 - RNA, 32 nt, Human
ccacgccuguaaucccagcacuuugggagacg

SEQ ID NO: 97560 - RNA, 32 nt, Human
ccacgccuguaaucccagcacuuugggaggcc

SEQ ID NO: 97561 - RNA, 32 nt, Human
ccacgccuguaaucccagcuacucgggaggcu

SEQ ID NO: 97562 - RNA, 32 nt, Human
ccacgccuguaaucccagcuacuuggaaggcu

SEQ ID NO: 97563 - RNA, 32 nt, Human
ccacgcgaaagccaacggacaggaggguggcc

SEQ ID NO: 97564 - RNA, 32 nt, Human
ccacgcgaagccccuguugcaagugaggacaa

SEQ ID NO: 97565 - RNA, 22 nt, Human
ccacgcgccacccccgggcgcc

SEQ ID NO: 97566 - RNA, 19 nt, Human
ccacgcgcccuccugcccg

SEQ ID NO: 97567 - RNA, 31 nt, Human
ccacgcgccgagucucccaugacgcccgagc

SEQ ID NO: 97568 - RNA, 32 nt, Human
ccacgcgcucagacaugauaugcggcuaugcc

SEQ ID NO: 97569 - RNA, 32 nt, Human
ccacgcgcucugcaugcuccucugccugugcc

SEQ ID NO: 97570 - RNA, 32 nt, Human
ccacgcgcuggcuccauaaaggccagcuuugg

SEQ ID NO: 97571 - RNA, 32 nt, Human
ccacgcggcugguccuuccugggcugggcuga

SEQ ID NO: 97572 - RNA, 32 nt, Human
ccacgcgggccgcggcuccggcauggccggga

SEQ ID NO: 97573 - RNA, 20 nt, Human
ccacgcggugccaggcccag

SEQ ID NO: 97574 - RNA, 32 nt, Human
ccacgcguccgccagccuagcagaagggagcu

SEQ ID NO: 97575 - RNA, 32 nt, Human
ccacgcguggcuaauguuuuuguauuuuuagu

SEQ ID NO: 97576 - RNA, 32 nt, Human
ccacgcuacggccauguacccccagcccggcc

SEQ ID NO: 97577 - RNA, 32 nt, Human
ccacgcuaucccucugcagccugggcccuccc

SEQ ID NO: 97578 - RNA, 32 nt, Human
ccacgcucacugccuggcuuggaaaaguuaag

SEQ ID NO: 97579 - RNA, 20 nt, Human
ccacgcucagcccugaguua

SEQ ID NO: 97580 - RNA, 32 nt, Human
ccacgcucaguggcugaacagcauucccacag

SEQ ID NO: 97581 - RNA, 32 nt, Human
ccacgcucauuucuaucauucucccccaugac

SEQ ID NO: 97582 - RNA, 21 nt, Human
ccacgcuccaaaccccagggu

SEQ ID NO: 97583 - RNA, 32 nt, Human
ccacgcuccagccugacccuccagcauaccua

SEQ ID NO: 97584 - RNA, 32 nt, Human
ccacgcucugcagccuugggggcaagagccuc

SEQ ID NO: 97585 - RNA, 32 nt, Human
ccacgcucuucccugccuaucuccuccgcccg

SEQ ID NO: 97586 - RNA, 32 nt, Human
ccacgcugauguugaacuugacgugaggccuc

SEQ ID NO: 97587 - RNA, 32 nt, Human
ccacgcugcagcagcucacaccucucugcggu

SEQ ID NO: 97588 - RNA, 22 nt, Human
ccacgcugcaggacccgcgccg

SEQ ID NO: 97589 - RNA, 18 nt, Human
ccacgcugcccugggcca

SEQ ID NO: 97590 - RNA, 17 nt, Human
ccacgcugcgcuccgcc

SEQ ID NO: 97591 - RNA, 22 nt, Human
ccacgcuggcccucuccuuccc

SEQ ID NO: 97592 - RNA, 20 nt, Human
ccacgcuggcccuucuccca

SEQ ID NO: 97593 - RNA, 29 nt, Human
ccacgcuggcugcucagagcuccucgcuu

SEQ ID NO: 97594 - RNA, 32 nt, Human
ccacgcugugcuguuuggaugggagccccaca

SEQ ID NO: 97595 - RNA, 32 nt, Human
ccacggaagggaccugaacacgauggcacgag

SEQ ID NO: 97596 - RNA, 26 nt, Human
ccacggacccgcagcucagggcgccu

SEQ ID NO: 97597 - RNA, 32 nt, Human
ccacggaccugugcaggggcccccacucuucu

SEQ ID NO: 97598 - RNA, 32 nt, Human
ccacggacggcccagacccgggcuggggcgcg

SEQ ID NO: 97599 - RNA, 32 nt, Human
ccacggacgggccccuccuggagcccauaccc

SEQ ID NO: 97600 - RNA, 32 nt, Human
ccacggagaggagccccaugcccagccuggcu

SEQ ID NO: 97601 - RNA, 32 nt, Human
ccacggaggaggcagaauggccagucgagggg

SEQ ID NO: 97602 - RNA, 32 nt, Human
ccacggagggcgucugcagagaggccugccuu

SEQ ID NO: 97603 - RNA, 31 nt, Human
ccacggaggguggaagaggagaggguggaag

SEQ ID NO: 97604 - RNA, 32 nt, Human
ccacggcaagccccgcccucucuaagcuccgc

SEQ ID NO: 97605 - RNA, 32 nt, Human
ccacggcacauccugcuuuguucaccacuggg

SEQ ID NO: 97606 - RNA, 21 nt, Human
ccacggcaccucccugagcca

SEQ ID NO: 97607 - RNA, 20 nt, Human
ccacggcaccuggcugggcc

SEQ ID NO: 97608 - RNA, 31 nt, Human
ccacggcaggauccaaucacagccgaggggc

SEQ ID NO: 97609 - RNA, 32 nt, Human
ccacggcagggcugggaaguucagugccugga

SEQ ID NO: 97610 - RNA, 32 nt, Human
ccacggcagguggaucaucugaggucaggagu

SEQ ID NO: 97611 - RNA, 32 nt, Human
ccacggcauccccuccccaucuccccuuuguc

SEQ ID NO: 97612 - RNA, 32 nt, Human
ccacggcaucuucucccgagaccacaaacacc

SEQ ID NO: 97613 - RNA, 32 nt, Human
ccacggcaugccuguacuggcacuuugguuuu

SEQ ID NO: 97614 - RNA, 32 nt, Human
ccacggccacaggcaaggggguugcaguggcc

SEQ ID NO: 97615 - RNA, 24 nt, Human
ccacggccaccacugcagccgggg

SEQ ID NO: 97616 - RNA, 32 nt, Human
ccacggccacuuccugcugcccuggaccccgc

SEQ ID NO: 97617 - RNA, 21 nt, Human
ccacggcccacccuggucagg

SEQ ID NO: 97618 - RNA, 19 nt, Human
ccacggcccagcccugcca

SEQ ID NO: 97619 - RNA, 22 nt, Human
ccacggcccugcgcuggcccca

SEQ ID NO: 97620 - RNA, 21 nt, Human
ccacggcccuugccacugucu

SEQ ID NO: 97621 - RNA, 22 nt, Human
ccacggccgagccucuggccgg

SEQ ID NO: 97622 - RNA, 32 nt, Human
ccacggccgaggaggaggaggaugaggaguau

SEQ ID NO: 97623 - RNA, 20 nt, Human
ccacggccgcaggagucggg

SEQ ID NO: 97624 - RNA, 21 nt, Human
ccacggccgcugcugccucca

SEQ ID NO: 97625 - RNA, 22 nt, Human
ccacggccgugucuguucagga

SEQ ID NO: 97626 - RNA, 32 nt, Human
ccacggccuccagggcggcuggcuggaaagcc

SEQ ID NO: 97627 - RNA, 32 nt, Human
ccacggccuccuggcuccagaggcagcugggc

SEQ ID NO: 97628 - RNA, 32 nt, Human
ccacggccucgccaccaccagccccaccuggc

SEQ ID NO: 97629 - RNA, 18 nt, Human
ccacggccucugccuccc

SEQ ID NO: 97630 - RNA, 32 nt, Human
ccacggccugcuguugcuucagccuggccugg

SEQ ID NO: 97631 - RNA, 32 nt, Human
ccacggccuggaggagggagguugugguugga

SEQ ID NO: 97632 - RNA, 20 nt, Human
ccacggccuggcugguggga

SEQ ID NO: 97633 - RNA, 32 nt, Human
ccacggccuuucuagccuggcuauguccuaau

SEQ ID NO: 97634 - RNA, 32 nt, Human
ccacggcgcacacccagcccacauaucccaca

SEQ ID NO: 97635 - RNA, 18 nt, Human
ccacggcgcccagcccag

SEQ ID NO: 97636 - RNA, 32 nt, Human
ccacggcgcccagcccaggaagaguuuuuaaa

SEQ ID NO: 97637 - RNA, 20 nt, Human
ccacggcgccguggucccag

SEQ ID NO: 97638 - RNA, 18 nt, Human
ccacggcggagccuucca

SEQ ID NO: 97639 - RNA, 32 nt, Human
ccacggcucacugcagccucagcguccugggc

SEQ ID NO: 97640 - RNA, 18 nt, Human
ccacggcuccucccugcc

SEQ ID NO: 97641 - RNA, 20 nt, Human
ccacggcuccugcuucugcc

SEQ ID NO: 97642 - RNA, 22 nt, Human
ccacggcugaaacgcgcggcuu

SEQ ID NO: 97643 - RNA, 19 nt, Human
ccacggcugcaccuccucc

SEQ ID NO: 97644 - RNA, 32 nt, Human
ccacggcugcaggaggugggggagacacaaag

SEQ ID NO: 97645 - RNA, 19 nt, Human
ccacggcugcccggucggg

SEQ ID NO: 97646 - RNA, 23 nt, Human
ccacggcuucagucagggccagg

SEQ ID NO: 97647 - RNA, 32 nt, Human
ccacggcuucccugcugacuuggccacggaaa

SEQ ID NO: 97648 - RNA, 32 nt, Human
ccacgggacugccacagacugagccuuccgga

SEQ ID NO: 97649 - RNA, 32 nt, Human
ccacgggagagcaggccuccagcuggaaaggc

SEQ ID NO: 97650 - RNA, 32 nt, Human
ccacgggagaggggagagggacgcacagcacu

SEQ ID NO: 97651 - RNA, 32 nt, Human
ccacgggaggguggggcggcugggaagcuggc

SEQ ID NO: 97652 - RNA, 32 nt, Human
ccacgggauaccuuugcugugcccuguggccu

SEQ ID NO: 97653 - RNA, 32 nt, Human
ccacgggaugcugagagaggaggcccgagagg

SEQ ID NO: 97654 - RNA, 32 nt, Human
ccacgggccaacaauggacagcaggacggucc

SEQ ID NO: 97655 - RNA, 32 nt, Human
ccacgggcccucccccaaccucucucugaucc

SEQ ID NO: 97656 - RNA, 32 nt, Human
ccacgggcgaggacgugaagccucccgaacac

SEQ ID NO: 97657 - RNA, 32 nt, Human
ccacgggcuccaggaccccuuugcuggccauc

SEQ ID NO: 97658 - RNA, 18 nt, Human
ccacgggcucccugcucc

SEQ ID NO: 97659 - RNA, 32 nt, Human
ccacggggagcuuggaugccaaagggaggacg

SEQ ID NO: 97660 - RNA, 32 nt, Human
ccacggggaggagaggaggagccgagagagcu

SEQ ID NO: 97661 - RNA, 32 nt, Human
ccacgggggaaugggauccaggccagguugcu

SEQ ID NO: 97662 - RNA, 32 nt, Human
ccacgggggcaggaccccucucugagucacag

SEQ ID NO: 97663 - RNA, 32 nt, Human
ccacgggggcccugagacugaguggucccuau

SEQ ID NO: 97664 - RNA, 32 nt, Human
ccacgggggcgugggagccagugugggcaugg

SEQ ID NO: 97665 - RNA, 18 nt, Human
ccacgggggcugcagugg

SEQ ID NO: 97666 - RNA, 32 nt, Human
ccacgggggcugggagggcauccuggcuguuu

SEQ ID NO: 97667 - RNA, 32 nt, Human
ccacgggguggugggcugggccuggaccccac

SEQ ID NO: 97668 - RNA, 32 nt, Human
ccacggguagugcgaccucgguucugugggcu

SEQ ID NO: 97669 - RNA, 21 nt, Human
ccacgggucccucggucgggg

SEQ ID NO: 97670 - RNA, 32 nt, Human
ccacgggugagugaggagaguuggugggccag

SEQ ID NO: 97671 - RNA, 32 nt, Human
ccacgguaucuccuggccaggcugcugggaca

SEQ ID NO: 97672 - RNA, 23 nt, Human
ccacgguccuucaucaaacugcu

SEQ ID NO: 97673 - RNA, 32 nt, Human
ccacggucucacucucacccaggcuggagugc

SEQ ID NO: 97674 - RNA, 24 nt, Human
ccacggugcugagacuacaggugu

SEQ ID NO: 97675 - RNA, 24 nt, Human
ccacgguggcuuacaccuguaauc

SEQ ID NO: 97676 - RNA, 32 nt, Human
ccacgguggguggaucaccugaggucaggaau

SEQ ID NO: 97677 - RNA, 19 nt, Human
ccacguaacuggcugcaga

SEQ ID NO: 97678 - RNA, 32 nt, Human
ccacguaccaacacuuuauacccaggggaaug

SEQ ID NO: 97679 - RNA, 32 nt, Human
ccacguagcccggcccggauuggacguuggcg

SEQ ID NO: 97680 - RNA, 19 nt, Human
ccacguaggggcacuccug

SEQ ID NO: 97681 - RNA, 32 nt, Human
ccacguaugguggcucaugucuauaaucccag

SEQ ID NO: 97682 - RNA, 32 nt, Human
ccacguaugugaaacacacauggacauguguc

SEQ ID NO: 97683 - RNA, 32 nt, Human
ccacguauugcccccuugccacugccugagug

SEQ ID NO: 97684 - RNA, 32 nt, Human
ccacgucaacuucucccaccugaccacaaagg

SEQ ID NO: 97685 - RNA, 32 nt, Human
ccacgucacagaguccaacagggacaucacuc

SEQ ID NO: 97686 - RNA, 20 nt, Human
ccacgucacuggcucaggcu

SEQ ID NO: 97687 - RNA, 32 nt, Human
ccacguccagguggcagggaaagccgagcggc

SEQ ID NO: 97688 - RNA, 32 nt, Human
ccacguccauuguuuccaucuuuugggcuguu

SEQ ID NO: 97689 - RNA, 32 nt, Human
ccacgucccaugucacaggcucuuugagcugc

SEQ ID NO: 97690 - RNA, 18 nt, Human
ccacgucccgacuggcca

SEQ ID NO: 97691 - RNA, 32 nt, Human
ccacguccgagcugcccacacaccgccuuaug

SEQ ID NO: 97692 - RNA, 32 nt, Human
ccacguccucaccgcauuugcugcuaucugug

SEQ ID NO: 97693 - RNA, 32 nt, Human
ccacguccugcacugcaauaccagucuaauga

SEQ ID NO: 97694 - RNA, 32 nt, Human
ccacgucuaucucugggggucgcacguugcgg

SEQ ID NO: 97695 - RNA, 32 nt, Human
ccacgucuccaggacaucagccugagccucuu

SEQ ID NO: 97696 - RNA, 32 nt, Human
ccacgucugagcuugcuuuucccucuggacac

SEQ ID NO: 97697 - RNA, 32 nt, Human
ccacgucuguaaucccugcacuuugggaggcc

SEQ ID NO: 97698 - RNA, 32 nt, Human
ccacgugaacaccaccaccagcgccacacaua

SEQ ID NO: 97699 - RNA, 32 nt, Human
ccacgugaaguugucgcugccuuagagagggg

SEQ ID NO: 97700 - RNA, 32 nt, Human
ccacgugaccccuccuagccucaggcucccuc

SEQ ID NO: 97701 - RNA, 32 nt, Human
ccacgugagcagucagcaccaguucugcacca

SEQ ID NO: 97702 - RNA, 32 nt, Human
ccacgugcacacucggugaaccacaguccaga

SEQ ID NO: 97703 - RNA, 32 nt, Human
ccacgugccaucucacacagaggucaaccgau

SEQ ID NO: 97704 - RNA, 32 nt, Human
ccacgugcgguggcucaugccuguaaucccgg

SEQ ID NO: 97705 - RNA, 32 nt, Human
ccacgugcucucaccagaacugcagcaaaacu

SEQ ID NO: 97706 - RNA, 32 nt, Human
ccacguggagaaaggggccgcuuuggcccuuc

SEQ ID NO: 97707 - RNA, 32 nt, Human
ccacguggccugggcugccauccugccguccu

SEQ ID NO: 97708 - RNA, 32 nt, Human
ccacgugggaacagccugcagugagcggugac

SEQ ID NO: 97709 - RNA, 32 nt, Human
ccacgugggcacagaguggcccccugggcaga

SEQ ID NO: 97710 - RNA, 22 nt, Human
ccacguggguccucuucaagua

SEQ ID NO: 97711 - RNA, 32 nt, Human
ccacgugguggcuuucucacgcuagcccucuu

SEQ ID NO: 97712 - RNA, 32 nt, Human
ccacguguaggugaugugcacauaucaagaag

SEQ ID NO: 97713 - RNA, 32 nt, Human
ccacguguaguggcucaugccuguaaucccaa

SEQ ID NO: 97714 - RNA, 32 nt, Human
ccacguguccacccuccugcucaugcagaggg

SEQ ID NO: 97715 - RNA, 20 nt, Human
ccacguguccguccacccuu

SEQ ID NO: 97716 - RNA, 32 nt, Human
ccacguuaauuuaaaagaacauuaugaggauu

SEQ ID NO: 97717 - RNA, 32 nt, Human
ccacguuaucuagcaaaagucauaagaaucua

SEQ ID NO: 97718 - RNA, 32 nt, Human
ccacguucaagcgauccuccugccucagccuc

SEQ ID NO: 97719 - RNA, 23 nt, Human
ccacguuggccaggcuggucuca

SEQ ID NO: 97720 - RNA, 32 nt, Human
ccacguuggccaggcuggucuuaaaugacccu

SEQ ID NO: 97721 - RNA, 32 nt, Human
ccacguuguucccagccucccuuccuuccacc

SEQ ID NO: 97722 - RNA, 32 nt, Human
ccacguuuauagaaccaagcuugagugcauuu

SEQ ID NO: 97723 - RNA, 32 nt, Human
ccacguuucaguagugaggcugugagugugag

SEQ ID NO: 97724 - RNA, 32 nt, Human
ccacguuuucuuucuuuuccugguagauagga

SEQ ID NO: 97725 - RNA, 32 nt, Human
ccacuaaaaagaaaauguggauuuuuaaaaua

SEQ ID NO: 97726 - RNA, 32 nt, Human
ccacuaaaaauacaaaaauuagccaggcauga

SEQ ID NO: 97727 - RNA, 32 nt, Human
ccacuaaaaauacaaaaauuagccaggcgugg

SEQ ID NO: 97728 - RNA, 32 nt, Human
ccacuaaaaauacaaaaauuagccaggugugg

SEQ ID NO: 97729 - RNA, 32 nt, Human
ccacuaaaaauacaaaaauuagccgggcguga

SEQ ID NO: 97730 - RNA, 32 nt, Human
ccacuaaaaauacaaaaauuagccgggugugg

SEQ ID NO: 97731 - RNA, 32 nt, Human
ccacuaaaaauacaaaaauuagcugggcgugg

SEQ ID NO: 97732 - RNA, 32 nt, Human
ccacuaaaaauacaaaaauuaguugggcaugg

SEQ ID NO: 97733 - RNA, 32 nt, Human
ccacuaaaaauacaaaaguuagucgggcaugg

SEQ ID NO: 97734 - RNA, 32 nt, Human
ccacuaaaaauacaaaauuagccgggcauggu

SEQ ID NO: 97735 - RNA, 32 nt, Human
ccacuaaaaauacaaaauuagccggguguggu

SEQ ID NO: 97736 - RNA, 32 nt, Human
ccacuaaaaauacaaaauuagcugggcguggu

SEQ ID NO: 97737 - RNA, 32 nt, Human
ccacuaaaaauacaaaauuagcuggguguggu

SEQ ID NO: 97738 - RNA, 32 nt, Human
ccacuaaaaauacaacaguuagucgggcaugg

SEQ ID NO: 97739 - RNA, 32 nt, Human
ccacuaaaaauagaaaaauuagccgggcaugg

SEQ ID NO: 97740 - RNA, 32 nt, Human
ccacuaaaaauagcugggcgugguggcaggca

SEQ ID NO: 97741 - RNA, 32 nt, Human
ccacuaaaaauauaaaaauuagccaggcaugg

SEQ ID NO: 97742 - RNA, 21 nt, Human
ccacuaaaagaguaauugaug

SEQ ID NO: 97743 - RNA, 32 nt, Human
ccacuaaaaguacaaaaauuagcugggcgugg

SEQ ID NO: 97744 - RNA, 23 nt, Human
ccacuaaaccacagcuguccccu

SEQ ID NO: 97745 - RNA, 32 nt, Human
ccacuaaagugccuauugaaacucuuaucauu

SEQ ID NO: 97746 - RNA, 32 nt, Human
ccacuaacaaauggccaguagaugcuggacac

SEQ ID NO: 97747 - RNA, 32 nt, Human
ccacuaacauauccaagaaucuuuguaggaca

SEQ ID NO: 97748 - RNA, 22 nt, Human
ccacuaacucaggggucaggaa

SEQ ID NO: 97749 - RNA, 32 nt, Human
ccacuaacucugugcucccuucccucuccugg

SEQ ID NO: 97750 - RNA, 32 nt, Human
ccacuaacuuguucugcauguguagagucucc

SEQ ID NO: 97751 - RNA, 32 nt, Human
ccacuaagagaaggcagagaggucccuagugg

SEQ ID NO: 97752 - RNA, 32 nt, Human
ccacuaagcugugucuuguucaugcccccugc

SEQ ID NO: 97753 - RNA, 32 nt, Human
ccacuaaggagaaagaaguugauuccuucauu

SEQ ID NO: 97754 - RNA, 32 nt, Human
ccacuaaggagagagguuaagauggagucaca

SEQ ID NO: 97755 - RNA, 32 nt, Human
ccacuaagugccucuuugcauagcaccagucc

SEQ ID NO: 97756 - RNA, 32 nt, Human
ccacuacaaggacugugcaucuaaguaauaau

SEQ ID NO: 97757 - RNA, 32 nt, Human
ccacuacaauccagaggucaccacccuuccca

SEQ ID NO: 97758 - RNA, 31 nt, Human
ccacuacacagcuaguaucaugacagcagcu

SEQ ID NO: 97759 - RNA, 32 nt, Human
ccacuacaccagggccaggagcucuucugaaa

SEQ ID NO: 97760 - RNA, 22 nt, Human
ccacuacacuccagccugagca

SEQ ID NO: 97761 - RNA, 22 nt, Human
ccacuacacuccagccugggca

SEQ ID NO: 97762 - RNA, 18 nt, Human
ccacuacagggcugcaga

SEQ ID NO: 97763 - RNA, 32 nt, Human
ccacuacauuuugguuggcuguauuuauuacc

SEQ ID NO: 97764 - RNA, 32 nt, Human
ccacuaccccauccacuguccucccaaggugc

SEQ ID NO: 97765 - RNA, 32 nt, Human
ccacuaccgccuuuauuucucuauuucccuug

SEQ ID NO: 97766 - RNA, 21 nt, Human
ccacuaccgcugccaacacca

SEQ ID NO: 97767 - RNA, 32 nt, Human
ccacuaccugcuagagccuacugugaaaucac

SEQ ID NO: 97768 - RNA, 32 nt, Human
ccacuaccuucccagaccauauaucuccccuu

SEQ ID NO: 97769 - RNA, 23 nt, Human
ccacuaccuuguacccccaucaa

SEQ ID NO: 97770 - RNA, 32 nt, Human
ccacuaccuuuguccaggccugggugguauag

SEQ ID NO: 97771 - RNA, 32 nt, Human
ccacuacggccaccccaaaggaccccgacgcc

SEQ ID NO: 97772 - RNA, 32 nt, Human
ccacuacucauccccauugguuucccagggga

SEQ ID NO: 97773 - RNA, 19 nt, Human
ccacuacuccagcccagaa

SEQ ID NO: 97774 - RNA, 32 nt, Human
ccacuacugcauucacggggaucccaggcuag

SEQ ID NO: 97775 - RNA, 21 nt, Human
ccacuacuggugacucuucaa

SEQ ID NO: 97776 - RNA, 32 nt, Human
ccacuagagcccagagggaugagaggagagag

SEQ ID NO: 97777 - RNA, 32 nt, Human
ccacuagaggcugaggugggaggaucacugga

SEQ ID NO: 97778 - RNA, 32 nt, Human
ccacuagauagaaacauuauuaaccacauuau

SEQ ID NO: 97779 - RNA, 32 nt, Human
ccacuagcaaaauucuugcuuccucuucccgc

SEQ ID NO: 97780 - RNA, 32 nt, Human
ccacuagcagcccccagcaucucccacccacc

SEQ ID NO: 97781 - RNA, 32 nt, Human
ccacuagccaggcucuuugagggcagggauug

SEQ ID NO: 97782 - RNA, 18 nt, Human
ccacuagcccuccauccu

SEQ ID NO: 97783 - RNA, 32 nt, Human
ccacuagccuaauagaccagcacggucaacua

SEQ ID NO: 97784 - RNA, 32 nt, Human
ccacuaggacccucggcgucccuuccccuccc

SEQ ID NO: 97785 - RNA, 32 nt, Human
ccacuaggaggcacgcccagugugggagagau

SEQ ID NO: 97786 - RNA, 32 nt, Human
ccacuaggaucuacugucugcacuguuuucuu

SEQ ID NO: 97787 - RNA, 32 nt, Human
ccacuagggcccugccuucagcuggugcuugc

SEQ ID NO: 97788 - RNA, 32 nt, Human
ccacuagguugccucagaagcccuaagacuga

SEQ ID NO: 97789 - RNA, 32 nt, Human
ccacuaguacuccagccugggugacagagcaa

SEQ ID NO: 97790 - RNA, 32 nt, Human
ccacuauauuuuacuucuuugccaucagcaag

SEQ ID NO: 97791 - RNA, 32 nt, Human
ccacuaucaacaccagcugcugcccagcuacu

SEQ ID NO: 97792 - RNA, 32 nt, Human
ccacuaucaguauuucugugcuuuauaaacua

SEQ ID NO: 97793 - RNA, 32 nt, Human
ccacuaucugucagauccuugccaucugucag

SEQ ID NO: 97794 - RNA, 30 nt, Human
ccacuaugcccagcccaagagcucuuugcc

SEQ ID NO: 97795 - RNA, 32 nt, Human
ccacuaugcccagcuaauuuuguauuuuuagu

SEQ ID NO: 97796 - RNA, 32 nt, Human
ccacuaugccuggcuaauuuuguauuuuuagu

SEQ ID NO: 97797 - RNA, 32 nt, Human
ccacuaugugccaagcacugugcucagggcuu

SEQ ID NO: 97798 - RNA, 32 nt, Human
ccacuauuacuuuugcaccaaccuaauaggcc

SEQ ID NO: 97799 - RNA, 32 nt, Human
ccacuauuucugagucucuucccacugagcag

SEQ ID NO: 97800 - RNA, 21 nt, Human
ccacucaagagucccagcaga

SEQ ID NO: 97801 - RNA, 32 nt, Human
ccacucaaugugaacucuacuaccacgaccuc

SEQ ID NO: 97802 - RNA, 32 nt, Human
ccacucaccacaaccuccgccuccuggguuca

SEQ ID NO: 97803 - RNA, 22 nt, Human
ccacucacccuggcagagcaga

SEQ ID NO: 97804 - RNA, 23 nt, Human
ccacucacccuuugagcuacaga

SEQ ID NO: 97805 - RNA, 22 nt, Human
ccacucacuccagcccaacaga

SEQ ID NO: 97806 - RNA, 32 nt, Human
ccacucacucugcaauccccggcaccuaacuc

SEQ ID NO: 97807 - RNA, 32 nt, Human
ccacucacucugcugccuccagcaggacccaa

SEQ ID NO: 97808 - RNA, 32 nt, Human
ccacucacugaacaccagcugcaguagagccg

SEQ ID NO: 97809 - RNA, 32 nt, Human
ccacucacugcaacuuccgccuccugggguca

SEQ ID NO: 97810 - RNA, 32 nt, Human
ccacucacugcaggaaucccuucuacaauucc

SEQ ID NO: 97811 - RNA, 32 nt, Human
ccacucacugccuccuuccuccugguguugcc

SEQ ID NO: 97812 - RNA, 32 nt, Human
ccacucacugguguccugucucuugucguccu

SEQ ID NO: 97813 - RNA, 32 nt, Human
ccacucacuuccaucuugacugggugacaagu

SEQ ID NO: 97814 - RNA, 32 nt, Human
ccacucagcagagucaaguuucucccaauuga

SEQ ID NO: 97815 - RNA, 32 nt, Human
ccacucagccuccuccugccugcucugaaccu

SEQ ID NO: 97816 - RNA, 32 nt, Human
ccacucagcucuucuccuccugugccaggggc

SEQ ID NO: 97817 - RNA, 32 nt, Human
ccacucaggaagcugaggcaggagaaucgcuu

SEQ ID NO: 97818 - RNA, 32 nt, Human
ccacucaggagaaggacaguggccacucaggu

SEQ ID NO: 97819 - RNA, 32 nt, Human
ccacucaggagacaugucccuaugcauagcag

SEQ ID NO: 97820 - RNA, 32 nt, Human
ccacucaggaggucgagguggcgggaugguuu

SEQ ID NO: 97821 - RNA, 32 nt, Human
ccacucaguuaaggaagauccugaagcaguuc

SEQ ID NO: 97822 - RNA, 32 nt, Human
ccacucaguuauuauugcuauuagaaaauaau

SEQ ID NO: 97823 - RNA, 24 nt, Human
ccacucaucuauggacucagagcu

SEQ ID NO: 97824 - RNA, 32 nt, Human
ccacucaugccccgucguccucccagacaaau

SEQ ID NO: 97825 - RNA, 32 nt, Human
ccacucaugccuguaaacccagggcuuuagaa

SEQ ID NO: 97826 - RNA, 32 nt, Human
ccacucauggccagacgcuuccggugcaggag

SEQ ID NO: 97827 - RNA, 26 nt, Human
ccacucauggccugcccugaggacuu

SEQ ID NO: 97828 - RNA, 32 nt, Human
ccacucauggucucuaaccacuugacaccaga

SEQ ID NO: 97829 - RNA, 32 nt, Human
ccagccuggccaacaugaugaaaccccguuuc

SEQ ID NO: 97830 - RNA, 32 nt, Human
ccagccuggccaacaugaugaaacccugucuc

SEQ ID NO: 97831 - RNA, 32 nt, Human
ccagccuggccaacaugaugaaacccuguucu

SEQ ID NO: 97832 - RNA, 32 nt, Human
ccagccuggccaacaugaugaaacccuugucu

SEQ ID NO: 97833 - RNA, 32 nt, Human
ccagccuggccaacaugaugaaaccuuaucuc

SEQ ID NO: 97834 - RNA, 32 nt, Human
ccagccuggccaacaugaugaaaccuugucuc

SEQ ID NO: 97835 - RNA, 32 nt, Human
ccagccuggccaacaugcugaaaccucgucuc

SEQ ID NO: 97836 - RNA, 23 nt, Human
ccagccuggccaacauggcgaaa

SEQ ID NO: 97837 - RNA, 32 nt, Human
ccagccuggccaacauggcgaaaccucaucuc

SEQ ID NO: 97838 - RNA, 32 nt, Human
ccagccuggccaacauggcgaaaccucgccuc

SEQ ID NO: 97839 - RNA, 32 nt, Human
ccagccuggccaacauggcgaaaccucuucuc

SEQ ID NO: 97840 - RNA, 23 nt, Human
ccagccuggccaacauggugaaa

SEQ ID NO: 97841 - RNA, 32 nt, Human
ccagccuggccaacauggugaaaccucaucuc

SEQ ID NO: 97842 - RNA, 32 nt, Human
ccagccuggccaacauggugaaaccuccgucu

SEQ ID NO: 97843 - RNA, 32 nt, Human
ccagccuggccaacauggugaaaccucgucuc

SEQ ID NO: 97844 - RNA, 32 nt, Human
ccagccuggccaacauggugaaaccucgucug

SEQ ID NO: 97845 - RNA, 32 nt, Human
ccagccuggccaacauggugaaaccucgucuu

SEQ ID NO: 97846 - RNA, 32 nt, Human
ccagccuggccaacauggugaaaccuggccuc

SEQ ID NO: 97847 - RNA, 32 nt, Human
ccagccuggccaacauggugaaaccuugucuc

SEQ ID NO: 97848 - RNA, 32 nt, Human
ccagccuggccaacauggugaaacuccgucuc

SEQ ID NO: 97849 - RNA, 32 nt, Human
ccagccuggccaacaugugaaaccccgucucc

SEQ ID NO: 97850 - RNA, 32 nt, Human
ccagccuggccaacguggugaaaccucgucua

SEQ ID NO: 97851 - RNA, 32 nt, Human
ccagccuggccaacguggugaaaccucgucug

SEQ ID NO: 97852 - RNA, 32 nt, Human
ccagccuggccaacuugaugaaaccccaucuc

SEQ ID NO: 97853 - RNA, 32 nt, Human
ccagccuggccaacuuggugaaaccuugucuc

SEQ ID NO: 97854 - RNA, 32 nt, Human
ccagccuggccaauauggugaaaccucgucuc

SEQ ID NO: 97855 - RNA, 32 nt, Human
ccagccuggccaaugugaugaaaccccgucuc

SEQ ID NO: 97856 - RNA, 22 nt, Human
ccagccuggccacagagcgaga

SEQ ID NO: 97857 - RNA, 19 nt, Human
ccagccuggccagacaaga

SEQ ID NO: 97858 - RNA, 32 nt, Human
ccagccuggccagcauggcgaaaccucgucuc

SEQ ID NO: 97859 - RNA, 20 nt, Human
ccagccuggccagcugcuca

SEQ ID NO: 97860 - RNA, 22 nt, Human
ccagccuggcccagggccggcu

SEQ ID NO: 97861 - RNA, 18 nt, Human
ccagccuggcccugagcu

SEQ ID NO: 97862 - RNA, 22 nt, Human
ccagccuggcgacaaagcgaga

SEQ ID NO: 97863 - RNA, 23 nt, Human
ccagccuggcgacaagagcgaga

SEQ ID NO: 97864 - RNA, 22 nt, Human
ccagccuggcgacagagcgaga

SEQ ID NO: 97865 - RNA, 32 nt, Human
ccagccuggcuaacauggugaaaccucaucuc

SEQ ID NO: 97866 - RNA, 32 nt, Human
ccagccuggcuaauauggugaaaccucgucuc

SEQ ID NO: 97867 - RNA, 32 nt, Human
ccagccuggcugacaccgugaaaccuugucuc

SEQ ID NO: 97868 - RNA, 23 nt, Human
ccagccuggcugacagagcgaga

SEQ ID NO: 97869 - RNA, 29 nt, Human
ccagccuggcugcuacugcccaccaggcc

SEQ ID NO: 97870 - RNA, 29 nt, Human
ccagccuggcugcugcugggcccugaaua

SEQ ID NO: 97871 - RNA, 24 nt, Human
ccagccugggaaacaagagugaaa

SEQ ID NO: 97872 - RNA, 23 nt, Human
ccagccugggagacagagcgaaa

SEQ ID NO: 97873 - RNA, 23 nt, Human
ccagccugggagacagagcgaga

SEQ ID NO: 97874 - RNA, 32 nt, Human
ccagccugggagacagagucuugcucugucuc

SEQ ID NO: 97875 - RNA, 23 nt, Human
ccagccugggagacagagugaga

SEQ ID NO: 97876 - RNA, 32 nt, Human
ccagccugggagacagagugagacccugucuc

SEQ ID NO: 97877 - RNA, 32 nt, Human
ccagccugggagacagagugagacuccgucuc

SEQ ID NO: 97878 - RNA, 32 nt, Human
ccagccugggagaggccaagggcugccuccua

SEQ ID NO: 97879 - RNA, 19 nt, Human
ccagccugggcaaaaagag

SEQ ID NO: 97880 - RNA, 32 nt, Human
ccagccugggcaaaagagugagacuccgucuc

SEQ ID NO: 97881 - RNA, 32 nt, Human
ccagccugggcaaaauagcaagaccuugccuc

SEQ ID NO: 97882 - RNA, 23 nt, Human
ccagccugggcaaaauagcgaga

SEQ ID NO: 97883 - RNA, 21 nt, Human
ccagccugggcaacaaaacga

SEQ ID NO: 97884 - RNA, 23 nt, Human
ccagccugggcaacaaaacgaga

SEQ ID NO: 97885 - RNA, 32 nt, Human
ccagccugggcaacaaaacgagacuucgucuc

SEQ ID NO: 97886 - RNA, 19 nt, Human
ccagccugggcaacaaagc

SEQ ID NO: 97887 - RNA, 32 nt, Human
ccagccugggcaacaaagcgagacuccaucuc

SEQ ID NO: 97888 - RNA, 23 nt, Human
ccagccugggcaacaaaguaaga

SEQ ID NO: 97889 - RNA, 23 nt, Human
ccagccugggcaacaaagugaga

SEQ ID NO: 97890 - RNA, 32 nt, Human
ccagccugggcaacaaagugagacccccaucu

SEQ ID NO: 97891 - RNA, 32 nt, Human
ccagccugggcaacaaagugagaccgagucuu

SEQ ID NO: 97892 - RNA, 32 nt, Human
ccagccugggcaacaaagugagacuccaucuc

SEQ ID NO: 97893 - RNA, 32 nt, Human
ccagccugggcaacaaagugagacucggucuc

SEQ ID NO: 97894 - RNA, 32 nt, Human
ccagccugggcaacaaagugagacucugccuc

SEQ ID NO: 97895 - RNA, 32 nt, Human
ccagccugggcaacaaagugagacucugucuc

SEQ ID NO: 97896 - RNA, 24 nt, Human
ccagccugggcaacaacagugaaa

SEQ ID NO: 97897 - RNA, 32 nt, Human
ccagccugggcaacaacagugaaacuccgucu

SEQ ID NO: 97898 - RNA, 32 nt, Human
ccagccugggcaacaagaacgaaacucugucu

SEQ ID NO: 97899 - RNA, 24 nt, Human
ccagccugggcaacaagaaugaaa

SEQ ID NO: 97900 - RNA, 32 nt, Human
ccagccugggcaacaagaaugaaacuccgucu

SEQ ID NO: 97901 - RNA, 19 nt, Human
ccagccugggcaacaagag

SEQ ID NO: 97902 - RNA, 24 nt, Human
ccagccugggcaacaagagaagaa

SEQ ID NO: 97903 - RNA, 32 nt, Human
ccagccugggcaacaagagaagaaacuccauc

SEQ ID NO: 97904 - RNA, 32 nt, Human
ccagccugggcaacaagagagaaacuccaucu

SEQ ID NO: 97905 - RNA, 24 nt, Human
ccagccugggcaacaagagagaag

SEQ ID NO: 97906 - RNA, 32 nt, Human
ccagccugggcaacaagagagaagguccuucu

SEQ ID NO: 97907 - RNA, 20 nt, Human
ccagccugggcaacaagagc

SEQ ID NO: 97908 - RNA, 32 nt, Human
ccagccugggcaacaagagcaaaacuucaucu

SEQ ID NO: 97909 - RNA, 32 nt, Human
ccagccugggcaacaagagcaagacucugucu

SEQ ID NO: 97910 - RNA, 22 nt, Human
ccagccugggcaacaagagcga

SEQ ID NO: 97911 - RNA, 24 nt, Human
ccagccugggcaacaagagcgaaa

SEQ ID NO: 97912 - RNA, 32 nt, Human
ccagccugggcaacaagagcgaaacucagucu

SEQ ID NO: 97913 - RNA, 32 nt, Human
ccagccugggcaacaagagcgaaacuccaucu

SEQ ID NO: 97914 - RNA, 32 nt, Human
ccagccugggcaacaagagcgaaacuccauuu

SEQ ID NO: 97915 - RNA, 32 nt, Human
ccagccugggcaacaagagcgaaacuccgucu

SEQ ID NO: 97916 - RNA, 32 nt, Human
ccagccugggcaacaagagcgaaacucuuguc

SEQ ID NO: 97917 - RNA, 23 nt, Human
ccagccugggcaacaagagcgag

SEQ ID NO: 97918 - RNA, 23 nt, Human
ccagccugggcaacaagaggaaa

SEQ ID NO: 97919 - RNA, 32 nt, Human
ccagccugggcaacaagaggaaaacccagucu

SEQ ID NO: 97920 - RNA, 22 nt, Human
ccagccugggcaacaagaggga

SEQ ID NO: 97921 - RNA, 24 nt, Human
ccagccugggcaacaagagggaaa

SEQ ID NO: 97922 - RNA, 32 nt, Human
ccagccugggcaacaagagggaaacuccgucu

SEQ ID NO: 97923 - RNA, 32 nt, Human
ccagccugggcaacaagagggaaacuccguuu

SEQ ID NO: 97924 - RNA, 20 nt, Human
ccagccugggcaacaagagu

SEQ ID NO: 97925 - RNA, 22 nt, Human
ccagccugggcaacaagaguaa

SEQ ID NO: 97926 - RNA, 24 nt, Human
ccagccugggcaacaagaguaaaa

SEQ ID NO: 97927 - RNA, 32 nt, Human
ccagccugggcaacaagaguaaaacuccaucu

SEQ ID NO: 97928 - RNA, 32 nt, Human
ccagccugggcaacaagaguaaaacuccgucu

SEQ ID NO: 97929 - RNA, 24 nt, Human
ccagccugggcaacaagaguaaga

SEQ ID NO: 97930 - RNA, 22 nt, Human
ccagccugggcaacaagaguga

SEQ ID NO: 97931 - RNA, 24 nt, Human
ccagccugggcaacaagagugaaa

SEQ ID NO: 97932 - RNA, 32 nt, Human
ccagccugggcaacaagagugaaacuccaucu

SEQ ID NO: 97933 - RNA, 32 nt, Human
ccagccugggcaacaagagugaaacuccgucu

SEQ ID NO: 97934 - RNA, 32 nt, Human
ccagccugggcaacaagagugaaacuccucug

SEQ ID NO: 97935 - RNA, 32 nt, Human
ccagccugggcaacaagagugaaacucuaucu

SEQ ID NO: 97936 - RNA, 32 nt, Human
ccagccugggcaacaagagugaaacucucucc

SEQ ID NO: 97937 - RNA, 32 nt, Human
ccagccugggcaacaagagugaaacucugccu

SEQ ID NO: 97938 - RNA, 32 nt, Human
ccagccugggcaacaagagugaaacucugucu

SEQ ID NO: 97939 - RNA, 32 nt, Human
ccagccugggcaacaagagugaaacugcaucu

SEQ ID NO: 97940 - RNA, 32 nt, Human
ccagccugggcaacaagagugaaacuuggucu

SEQ ID NO: 97941 - RNA, 32 nt, Human
ccagccugggcaacaagagugaaaugacgucu

SEQ ID NO: 97942 - RNA, 32 nt, Human
ccagccugggcaacaagagugaaccuccauca

SEQ ID NO: 97943 - RNA, 24 nt, Human
ccagccugggcaacaagagugaga

SEQ ID NO: 97944 - RNA, 32 nt, Human
ccagccugggcaacaagagugagacuccaucu

SEQ ID NO: 97945 - RNA, 32 nt, Human
ccagccugggcaacaagagugagacucccguc

SEQ ID NO: 97946 - RNA, 32 nt, Human
ccagccugggcaacaagagugagacuccgucu

SEQ ID NO: 97947 - RNA, 22 nt, Human
ccagccugggcaacaagagugg

SEQ ID NO: 97948 - RNA, 20 nt, Human
ccagccugggcaacaagcga

SEQ ID NO: 97949 - RNA, 22 nt, Human
ccagccugggcaacaagcgaaa

SEQ ID NO: 97950 - RNA, 32 nt, Human
ccagccugggcaacaagcgaaacucugucuca

SEQ ID NO: 97951 - RNA, 32 nt, Human
ccagccugggcaacaagcgagacuccgucuca

SEQ ID NO: 97952 - RNA, 20 nt, Human
ccagccugggcaacaagggc

SEQ ID NO: 97953 - RNA, 32 nt, Human
ccagccugggcaacaagugcaaaacucagucu

SEQ ID NO: 97954 - RNA, 24 nt, Human
ccagccugggcaacaagugcgaaa

SEQ ID NO: 97955 - RNA, 32 nt, Human
ccagccugggcaacaagugcgaaacuccaucu

SEQ ID NO: 97956 - RNA, 23 nt, Human
ccagccugggcaacacagagaga

SEQ ID NO: 97957 - RNA, 32 nt, Human
ccagccugggcaacacagaggacccucaccuc

SEQ ID NO: 97958 - RNA, 19 nt, Human
ccagccugggcaacacagc

SEQ ID NO: 97959 - RNA, 32 nt, Human
ccagccugggcaacacagcaagacccaucucu

SEQ ID NO: 97960 - RNA, 32 nt, Human
ccagccugggcaacacagcaagaccccauuuc

SEQ ID NO: 97961 - RNA, 21 nt, Human
ccagccugggcaacacagcga

SEQ ID NO: 97962 - RNA, 23 nt, Human
ccagccugggcaacacagcgaga

SEQ ID NO: 97963 - RNA, 32 nt, Human
ccagccugggcaacacagcgagaacuugucuc

SEQ ID NO: 97964 - RNA, 32 nt, Human
ccagccugggcaacacagcgagaccccaucuc

SEQ ID NO: 97965 - RNA, 32 nt, Human
ccagccugggcaacacagcgagacuccgucuc

SEQ ID NO: 97966 - RNA, 32 nt, Human
ccagccugggcaacacagcgagaucucuuggg

SEQ ID NO: 97967 - RNA, 22 nt, Human
ccagccugggcaacacaggaag

SEQ ID NO: 97968 - RNA, 32 nt, Human
ccagccugggcaacacaggaagaccccgucuc

SEQ ID NO: 97969 - RNA, 32 nt, Human
ccagccugggcaacacaggaugaccccaucuu

SEQ ID NO: 97970 - RNA, 23 nt, Human
ccagccugggcaacacagggaga

SEQ ID NO: 97971 - RNA, 32 nt, Human
ccagccugggcaacacagggagaccccgucuc

SEQ ID NO: 97972 - RNA, 32 nt, Human
ccagccugggcaacacagggagacgcucacuc

SEQ ID NO: 97973 - RNA, 32 nt, Human
ccagccugggcaacacagggagacuccaucuc

SEQ ID NO: 97974 - RNA, 32 nt, Human
ccagccugggcaacacagggaggcuaccucuc

SEQ ID NO: 97975 - RNA, 23 nt, Human
ccagccugggcaacacaguaaga

SEQ ID NO: 97976 - RNA, 21 nt, Human
ccagccugggcaacacaguga

SEQ ID NO: 97977 - RNA, 32 nt, Human
ccagccugggcaacacagugacaccugacucu

SEQ ID NO: 97978 - RNA, 23 nt, Human
ccagccugggcaacacagugaga

SEQ ID NO: 97979 - RNA, 32 nt, Human
ccagccugggcaacacagugagaacccucucu

SEQ ID NO: 97980 - RNA, 30 nt, Human
ccagccugggcaacacagugagacucuguc

SEQ ID NO: 97981 - RNA, 32 nt, Human
ccagccugggcaacacagugagacucugucuc

SEQ ID NO: 97982 - RNA, 32 nt, Human
ccagccugggcaacacagugagacuucauuuc

SEQ ID NO: 97983 - RNA, 22 nt, Human
ccagccugggcaacacgagcga

SEQ ID NO: 97984 - RNA, 24 nt, Human
ccagccugggcaacacgagcgaaa

SEQ ID NO: 97985 - RNA, 32 nt, Human
ccagccugggcaacacgagcgaaacuccgucu

SEQ ID NO: 97986 - RNA, 23 nt, Human
ccagccugggcaacacggugaaa

SEQ ID NO: 97987 - RNA, 32 nt, Human
ccagccugggcaacacggugaaaccccaucuc

SEQ ID NO: 97988 - RNA, 32 nt, Human
ccagccugggcaacacggugaaaccccgucuc

SEQ ID NO: 97989 - RNA, 18 nt, Human
ccagccugggcaacagaa

SEQ ID NO: 97990 - RNA, 23 nt, Human
ccagccugggcaacagaacaaga

SEQ ID NO: 97991 - RNA, 24 nt, Human
ccagccugggcaacagaacaagaa

SEQ ID NO: 97992 - RNA, 32 nt, Human
ccagccugggcaacagaacaagaacccaucuc

SEQ ID NO: 97993 - RNA, 23 nt, Human
ccagccugggcaacagaacagga

SEQ ID NO: 97994 - RNA, 21 nt, Human
ccagccugggcaacagaacga

SEQ ID NO: 97995 - RNA, 23 nt, Human
ccagccugggcaacagaacgaga

SEQ ID NO: 97996 - RNA, 32 nt, Human
ccagccugggcaacagaacgagauucugucuu

SEQ ID NO: 97997 - RNA, 22 nt, Human
ccagccugggcaacagaagaag

SEQ ID NO: 97998 - RNA, 32 nt, Human
ccagccugggcaacagaagaagaauccgucaa

SEQ ID NO: 97999 - RNA, 32 nt, Human
ccagccugggcaacagaagaagacuuugucac

SEQ ID NO: 98000 - RNA, 32 nt, Human
ccagccugggcaacagaaugagacccuuccgc

SEQ ID NO: 98001 - RNA, 18 nt, Human
ccagccugggcaacagag

SEQ ID NO: 98002 - RNA, 21 nt, Human
ccagccugggcaacagagaga

SEQ ID NO: 98003 - RNA, 23 nt, Human
ccagccugggcaacagagagaga

SEQ ID NO: 98004 - RNA, 32 nt, Human
ccagccugggcaacagagagagaccuugucuc

SEQ ID NO: 98005 - RNA, 32 nt, Human
ccagccugggcaacagagagcgacucucucaa

SEQ ID NO: 98006 - RNA, 19 nt, Human
ccagccugggcaacagagc

SEQ ID NO: 98007 - RNA, 32 nt, Human
ccagccugggcaacagagcaaaacuccaacuc

SEQ ID NO: 98008 - RNA, 31 nt, Human
ccagccugggcaacagagcaaaacuccgucu

SEQ ID NO: 98009 - RNA, 32 nt, Human
ccagccugggcaacagagcaaaacuuucagga

SEQ ID NO: 98010 - RNA, 23 nt, Human
ccagccugggcaacagagcaaga

SEQ ID NO: 98011 - RNA, 32 nt, Human
ccagccugggcaacagagcaagacccaucuca

SEQ ID NO: 98012 - RNA, 32 nt, Human
ccagccugggcaacagagcaagaccccauccu

SEQ ID NO: 98013 - RNA, 32 nt, Human
ccagccugggcaacagagcaagaccccaucuc

SEQ ID NO: 98014 - RNA, 32 nt, Human
ccagccugggcaacagagcaagaccucgucuc

SEQ ID NO: 98015 - RNA, 32 nt, Human
ccagccugggcaacagagcaagaccuugucuc

SEQ ID NO: 98016 - RNA, 32 nt, Human
ccagccugggcaacagagcaagacugccucaa

SEQ ID NO: 98017 - RNA, 32 nt, Human
ccagccugggcaacagagcaagacugucucaa

SEQ ID NO: 98018 - RNA, 32 nt, Human
ccagccugggcaacagagcaaggcucugucuc

SEQ ID NO: 98019 - RNA, 32 nt, Human
ccagccugggcaacagagcaaggcucuguuuu

SEQ ID NO: 98020 - RNA, 29 nt, Human
ccagccugggcaacagagccagacaucuc

SEQ ID NO: 98021 - RNA, 21 nt, Human
ccagccugggcaacagagcga

SEQ ID NO: 98022 - RNA, 32 nt, Human
ccagccugggcaacagagcgacacuccgucuc

SEQ ID NO: 98023 - RNA, 23 nt, Human
ccagccugggcaacagagcgaga

SEQ ID NO: 98024 - RNA, 32 nt, Human
ccagccugggcaacagagcgagacagucucaa

SEQ ID NO: 98025 - RNA, 32 nt, Human
ccagccugggcaacagagcgagaccaucucuu

SEQ ID NO: 98026 - RNA, 32 nt, Human
ccagccugggcaacagagcgagaccucuaucu

SEQ ID NO: 98027 - RNA, 32 nt, Human
ccagccugggcaacagagcgagacuacaucuc

SEQ ID NO: 98028 - RNA, 32 nt, Human
ccagccugggcaacagagcgagacucagucuc

SEQ ID NO: 98029 - RNA, 32 nt, Human
ccagccugggcaacagagcgagacuccaucuc

SEQ ID NO: 98030 - RNA, 32 nt, Human
ccagccugggcaacagagcgagacuccgccuc

SEQ ID NO: 98031 - RNA, 32 nt, Human
ccagccugggcaacagagcgagacuccgucuc

SEQ ID NO: 98032 - RNA, 32 nt, Human
ccagccugggcaacagagcgagacuucaucuc

SEQ ID NO: 98033 - RNA, 32 nt, Human
ccagccugggcaacagagcgagacuuugucuc

SEQ ID NO: 98034 - RNA, 32 nt, Human
ccagccugggcaacagagcgaggucccguuuc

SEQ ID NO: 98035 - RNA, 28 nt, Human
ccagccugggcaacagagcgugacucuc

SEQ ID NO: 98036 - RNA, 23 nt, Human
ccagccugggcaacagagggaga

SEQ ID NO: 98037 - RNA, 32 nt, Human
ccagccugggcaacagagggagacuccaucgc

SEQ ID NO: 98038 - RNA, 32 nt, Human
ccagccugggcaacagagggagacuccaucua

SEQ ID NO: 98039 - RNA, 32 nt, Human
ccagccugggcaacagagggagacuccaucuc

SEQ ID NO: 98040 - RNA, 32 nt, Human
ccagccugggcaacagagggagacuucaucuc

SEQ ID NO: 98041 - RNA, 19 nt, Human
ccagccugggcaacagagu

SEQ ID NO: 98042 - RNA, 23 nt, Human
ccagccugggcaacagaguaaaa

SEQ ID NO: 98043 - RNA, 32 nt, Human
ccagccugggcaacagaguaacucuccuucuc

SEQ ID NO: 98044 - RNA, 23 nt, Human
ccagccugggcaacagaguaaga

SEQ ID NO: 98045 - RNA, 32 nt, Human
ccagccugggcaacagaguaagaacugucuca

SEQ ID NO: 98046 - RNA, 32 nt, Human
ccagccugggcaacagaguaagacuccaucca

SEQ ID NO: 98047 - RNA, 32 nt, Human
ccagccugggcaacagaguaagacuccaucuu

SEQ ID NO: 98048 - RNA, 32 nt, Human
ccagccugggcaacagaguaagacuccgucuu

SEQ ID NO: 98049 - RNA, 32 nt, Human
ccagccugggcaacagaguaagauuccaucuc

SEQ ID NO: 98050 - RNA, 21 nt, Human
ccagccugggcaacagaguga

SEQ ID NO: 98051 - RNA, 23 nt, Human
ccagccugggcaacagagugaaa

SEQ ID NO: 98052 - RNA, 32 nt, Human
ccagccugggcaacagagugaaacucugucuc

SEQ ID NO: 98053 - RNA, 32 nt, Human
ccagccugggcaacagagugacacucugucuc

SEQ ID NO: 98054 - RNA, 23 nt, Human
ccagccugggcaacagagugaga

SEQ ID NO: 98055 - RNA, 32 nt, Human
ccagccugggcaacagagugagacccuaucuc

SEQ ID NO: 98056 - RNA, 32 nt, Human
ccagccugggcaacagagugagacccugccuc

SEQ ID NO: 98057 - RNA, 32 nt, Human
ccagccugggcaacagagugagacccugucuc

SEQ ID NO: 98058 - RNA, 32 nt, Human
ccagccugggcaacagagugagacccuguuuc

SEQ ID NO: 98059 - RNA, 32 nt, Human
ccagccugggcaacagagugagacgcugccuc

SEQ ID NO: 98060 - RNA, 32 nt, Human
ccagccugggcaacagagugagacuacgucuc

SEQ ID NO: 98061 - RNA, 32 nt, Human
ccagccugggcaacagagugagacuaucucaa

SEQ ID NO: 98062 - RNA, 32 nt, Human
ccagccugggcaacagagugagacuccaauuc

SEQ ID NO: 98063 - RNA, 32 nt, Human
ccagccugggcaacagagugagacuccaucuc

SEQ ID NO: 98064 - RNA, 32 nt, Human
ccagccugggcaacagagugagacucccucuc

SEQ ID NO: 98065 - RNA, 32 nt, Human
ccagccugggcaacagagugagacuccgucuc

SEQ ID NO: 98066 - RNA, 32 nt, Human
ccagccugggcaacagagugagacuccgucuu

SEQ ID NO: 98067 - RNA, 31 nt, Human
ccagccugggcaacagagugagacucuaucu

SEQ ID NO: 98068 - RNA, 32 nt, Human
ccagccugggcaacagagugagacucugcuuc

SEQ ID NO: 98069 - RNA, 32 nt, Human
ccagccugggcaacagagugagacucugucaa

SEQ ID NO: 98070 - RNA, 32 nt, Human
ccagccugggcaacagagugagacucugucuc

SEQ ID NO: 98071 - RNA, 32 nt, Human
ccagccugggcaacagagugagacucugucuu

SEQ ID NO: 98072 - RNA, 32 nt, Human
ccagccugggcaacagagugagacucuguuuc

SEQ ID NO: 98073 - RNA, 32 nt, Human
ccagccugggcaacagagugagacugucucaa

SEQ ID NO: 98074 - RNA, 32 nt, Human
ccagccugggcaacagagugagacuucgucuc

SEQ ID NO: 98075 - RNA, 32 nt, Human
ccagccugggcaacagagugagauccagucuc

SEQ ID NO: 98076 - RNA, 32 nt, Human
ccagccugggcaacagagugagauucugucuc

SEQ ID NO: 98077 - RNA, 32 nt, Human
ccagccugggcaacagaguggacuccaucgca

SEQ ID NO: 98078 - RNA, 32 nt, Human
ccagccugggcaacagagugggacuccaucuc

SEQ ID NO: 98079 - RNA, 22 nt, Human
ccagccugggcaacagaugaag

SEQ ID NO: 98080 - RNA, 32 nt, Human
ccagccugggcaacagcaagaccucaucucua

SEQ ID NO: 98081 - RNA, 32 nt, Human
ccagccugggcaacagcagcgaaacuccaucu

SEQ ID NO: 98082 - RNA, 21 nt, Human
ccagccugggcaacagcgaga

SEQ ID NO: 98083 - RNA, 23 nt, Human
ccagccugggcaacagcgugaga

SEQ ID NO: 98084 - RNA, 32 nt, Human
ccagccugggcaacagcgugagacuucaucuc

SEQ ID NO: 98085 - RNA, 24 nt, Human
ccagccugggcaacaggaguaaaa

SEQ ID NO: 98086 - RNA, 32 nt, Human
ccagccugggcaacagguaagacucugucuca

SEQ ID NO: 98087 - RNA, 22 nt, Human
ccagccugggcaacaggugaga

SEQ ID NO: 98088 - RNA, 32 nt, Human
ccagccugggcaacaggugagauucugucucc

SEQ ID NO: 98089 - RNA, 32 nt, Human
ccagccugggcaacagugacacucuuaucucc

SEQ ID NO: 98090 - RNA, 32 nt, Human
ccagccugggcaacagugagacucugcauaaa

SEQ ID NO: 98091 - RNA, 23 nt, Human
ccagccugggcaacagugugaga

SEQ ID NO: 98092 - RNA, 32 nt, Human
ccagccugggcaacagugugagaccuugucuc

SEQ ID NO: 98093 - RNA, 32 nt, Human
ccagccugggcaacauaacaagauccugucuc

SEQ ID NO: 98094 - RNA, 32 nt, Human
ccagccugggcaacauaauaagaccucauguc

SEQ ID NO: 98095 - RNA, 32 nt, Human
ccagccugggcaacauaaugagacccuguuuc

SEQ ID NO: 98096 - RNA, 32 nt, Human
ccagccugggcaacauaaugagaccucauguc

SEQ ID NO: 98097 - RNA, 23 nt, Human
ccagccugggcaacauacagaaa

SEQ ID NO: 98098 - RNA, 32 nt, Human
ccagccugggcaacauagaccucugucucuau

SEQ ID NO: 98099 - RNA, 23 nt, Human
ccagccugggcaacauagagaga

SEQ ID NO: 98100 - RNA, 32 nt, Human
ccagccugggcaacauagagagaccccaucuc

SEQ ID NO: 98101 - RNA, 32 nt, Human
ccagccugggcaacauagagagacccugucuc

SEQ ID NO: 98102 - RNA, 32 nt, Human
ccagccugggcaacauagagagaccucugucu

SEQ ID NO: 98103 - RNA, 19 nt, Human
ccagccugggcaacauagc

SEQ ID NO: 98104 - RNA, 32 nt, Human
ccagccugggcaacauagcaaaaccuaguccc

SEQ ID NO: 98105 - RNA, 32 nt, Human
ccagccugggcaacauagcaaaaccucaucuc

SEQ ID NO: 98106 - RNA, 32 nt, Human
ccagccugggcaacauagcaaaauccugucuc

SEQ ID NO: 98107 - RNA, 32 nt, Human
ccagccugggcaacauagcaaaaucucaucuc

SEQ ID NO: 98108 - RNA, 32 nt, Human
ccagccugggcaacauagcaagaccccaucuc

SEQ ID NO: 98109 - RNA, 32 nt, Human
ccagccugggcaacauagcaagaccccgucuc

SEQ ID NO: 98110 - RNA, 32 nt, Human
ccagccugggcaacauagcaagacuccaucuc

SEQ ID NO: 98111 - RNA, 32 nt, Human
ccagccugggcaacauagcaagaucccuuccc

SEQ ID NO: 98112 - RNA, 32 nt, Human
ccagccugggcaacauagcaagcuaugccucu

SEQ ID NO: 98113 - RNA, 32 nt, Human
ccagccugggcaacauagccagaccucgucuc

SEQ ID NO: 98114 - RNA, 23 nt, Human
ccagccugggcaacauagcgaga

SEQ ID NO: 98115 - RNA, 32 nt, Human
ccagccugggcaacauagcgagaccccaucuc

SEQ ID NO: 98116 - RNA, 32 nt, Human
ccagccugggcaacauagcgagacccccauug

SEQ ID NO: 98117 - RNA, 32 nt, Human
ccagccugggcaacauagcgagaccccuaucu

SEQ ID NO: 98118 - RNA, 32 nt, Human
ccagccugggcaacauagcgagaccucaucuc

SEQ ID NO: 98119 - RNA, 32 nt, Human
ccagccugggcaacauagcgagaccuuaucuc

SEQ ID NO: 98120 - RNA, 22 nt, Human
ccagccugggcaacauaggaag

SEQ ID NO: 98121 - RNA, 32 nt, Human
ccagccugggcaacauaggaagacuccgucuc

SEQ ID NO: 98122 - RNA, 23 nt, Human
ccagccugggcaacauagggaga

SEQ ID NO: 98123 - RNA, 32 nt, Human
ccagccugggcaacauagggagaccccaucuc

SEQ ID NO: 98124 - RNA, 32 nt, Human
ccagccugggcaacauagggagacccccaucu

SEQ ID NO: 98125 - RNA, 32 nt, Human
ccagccugggcaacauagggagacccugucuu

SEQ ID NO: 98126 - RNA, 32 nt, Human
ccagccugggcaacauagggaggccccgucuc

SEQ ID NO: 98127 - RNA, 32 nt, Human
ccagccugggcaacauagggggaucccaucuc

SEQ ID NO: 98128 - RNA, 23 nt, Human
ccagccugggcaacauaguaaga

SEQ ID NO: 98129 - RNA, 32 nt, Human
ccagccugggcaacauaguaagaccccaucuc

SEQ ID NO: 98130 - RNA, 32 nt, Human
ccagccugggcaacauaguaagaccucaucuc

SEQ ID NO: 98131 - RNA, 32 nt, Human
ccagccugggcaacauaguaagacgcugucuc

SEQ ID NO: 98132 - RNA, 32 nt, Human
ccagccugggcaacauaguaagacucagucuc

SEQ ID NO: 98133 - RNA, 21 nt, Human
ccagccugggcaacauaguga

SEQ ID NO: 98134 - RNA, 23 nt, Human
ccagccugggcaacauagugaaa

SEQ ID NO: 98135 - RNA, 32 nt, Human
ccagccugggcaacauagugaaaccgucucca

SEQ ID NO: 98136 - RNA, 23 nt, Human
ccagccugggcaacauagugaag

SEQ ID NO: 98137 - RNA, 32 nt, Human
ccagccugggcaacauagugaagccccaucuc

SEQ ID NO: 98138 - RNA, 23 nt, Human
ccagccugggcaacauagugaga

SEQ ID NO: 98139 - RNA, 32 nt, Human
ccagccugggcaacauagugagaaaaugucuc

SEQ ID NO: 98140 - RNA, 32 nt, Human
ccagccugggcaacauagugagaaccuuuuug

SEQ ID NO: 98141 - RNA, 32 nt, Human
ccagccugggcaacauagugagaaugcaucuc

SEQ ID NO: 98142 - RNA, 32 nt, Human
ccagccugggcaacauagugagacccaaucuc

SEQ ID NO: 98143 - RNA, 32 nt, Human
ccagccugggcaacauagugagaccccaucuc

SEQ ID NO: 98144 - RNA, 32 nt, Human
ccagccugggcaacauagugagacccccaucu

SEQ ID NO: 98145 - RNA, 32 nt, Human
ccagccugggcaacauagugagacccugccuc

SEQ ID NO: 98146 - RNA, 32 nt, Human
ccagccugggcaacauagugagacccuguauc

SEQ ID NO: 98147 - RNA, 32 nt, Human
ccagccugggcaacauagugagaccucaucuc

SEQ ID NO: 98148 - RNA, 32 nt, Human
ccagccugggcaacauagugagaccugccccc

SEQ ID NO: 98149 - RNA, 32 nt, Human
ccagccugggcaacauagugagaccuugucuc

SEQ ID NO: 98150 - RNA, 32 nt, Human
ccagccugggcaacauagugagacuccugucu

SEQ ID NO: 98151 - RNA, 32 nt, Human
ccagccugggcaacauagugagacucuguaca

SEQ ID NO: 98152 - RNA, 32 nt, Human
ccagccugggcaacauagugagacucuguuau

SEQ ID NO: 98153 - RNA, 32 nt, Human
ccagccugggcaacauagugagacucuugucu

SEQ ID NO: 98154 - RNA, 32 nt, Human
ccagccugggcaacauagugagacugucucua

SEQ ID NO: 98155 - RNA, 32 nt, Human
ccagccugggcaacauagugagacuucauuuc

SEQ ID NO: 98156 - RNA, 32 nt, Human
ccagccugggcaacauagugagaucccaucuc

SEQ ID NO: 98157 - RNA, 32 nt, Human
ccagccugggcaacauagugagauccugucuc

SEQ ID NO: 98158 - RNA, 32 nt, Human
ccagccugggcaacauagugaggccccugucu

SEQ ID NO: 98159 - RNA, 32 nt, Human
ccagccugggcaacauagugagugagaccuca

SEQ ID NO: 98160 - RNA, 32 nt, Human
ccagccugggcaacauagugauaccccaucuc

SEQ ID NO: 98161 - RNA, 32 nt, Human
ccagccugggcaacauagugauaccuugucuc

SEQ ID NO: 98162 - RNA, 32 nt, Human
ccagccugggcaacauagugggauccugucuc

SEQ ID NO: 98163 - RNA, 32 nt, Human
ccagccugggcaacauaugagaaacccgucuc

SEQ ID NO: 98164 - RNA, 32 nt, Human
ccagccugggcaacauaugggacaccccaccg

SEQ ID NO: 98165 - RNA, 32 nt, Human
ccagccugggcaacaucaggagauccuugucu

SEQ ID NO: 98166 - RNA, 32 nt, Human
ccagccugggcaacaucaugagacgucaucuc

SEQ ID NO: 98167 - RNA, 32 nt, Human
ccagccugggcaacaucgggagaccccaucuc

SEQ ID NO: 98168 - RNA, 32 nt, Human
ccagccugggcaacaugacaaaacugcaacuc

SEQ ID NO: 98169 - RNA, 24 nt, Human
ccagccugggcaacaugagugaaa

SEQ ID NO: 98170 - RNA, 32 nt, Human
ccagccugggcaacaugagugaaagucugacu

SEQ ID NO: 98171 - RNA, 32 nt, Human
ccagccugggcaacaugauaccgaaacuggca

SEQ ID NO: 98172 - RNA, 32 nt, Human
ccagccugggcaacaugaugaaaacuccgucu

SEQ ID NO: 98173 - RNA, 32 nt, Human
ccagccugggcaacaugaugugaaaacccauc

SEQ ID NO: 98174 - RNA, 32 nt, Human
ccagccugggcaacauggagaaaccccguuuc

SEQ ID NO: 98175 - RNA, 23 nt, Human
ccagccugggcaacauggagaga

SEQ ID NO: 98176 - RNA, 32 nt, Human
ccagccugggcaacauggcaaaaacccaccuc

SEQ ID NO: 98177 - RNA, 32 nt, Human
ccagccugggcaacauggcaaaacaccgucuc

SEQ ID NO: 98178 - RNA, 32 nt, Human
ccagccugggcaacauggcaaaaccccaucuc

SEQ ID NO: 98179 - RNA, 32 nt, Human
ccagccugggcaacauggcaaaaccccauuuc

SEQ ID NO: 98180 - RNA, 32 nt, Human
ccagccugggcaacauggcaaaacucagucug

SEQ ID NO: 98181 - RNA, 32 nt, Human
ccagccugggcaacauggcaagaccccaucua

SEQ ID NO: 98182 - RNA, 23 nt, Human
ccagccugggcaacauggcgaaa

SEQ ID NO: 98183 - RNA, 32 nt, Human
ccagccugggcaacauggcgaaaacccaucuc

SEQ ID NO: 98184 - RNA, 32 nt, Human
ccagccugggcaacauggcgaaaccccauuuc

SEQ ID NO: 98185 - RNA, 32 nt, Human
ccagccugggcaacauggcgaaacccugucuc

SEQ ID NO: 98186 - RNA, 23 nt, Human
ccagccugggcaacauggcgaga

SEQ ID NO: 98187 - RNA, 32 nt, Human
ccagccugggcaacauggcgagaccccaucuc

SEQ ID NO: 98188 - RNA, 32 nt, Human
ccagccugggcaacauggcgagauccugucuc

SEQ ID NO: 98189 - RNA, 32 nt, Human
ccagccugggcaacauggcgaggccucugucu

SEQ ID NO: 98190 - RNA, 32 nt, Human
ccagccugggcaacauggcuaaaccccgucuc

SEQ ID NO: 98191 - RNA, 23 nt, Human
ccagccugggcaacauggggaaa

SEQ ID NO: 98192 - RNA, 32 nt, Human
ccagccugggcaacauggggaaacuccaucuc

SEQ ID NO: 98193 - RNA, 23 nt, Human
ccagccugggcaacauggggaga

SEQ ID NO: 98194 - RNA, 32 nt, Human
ccagccugggcaacauggggagacccagucuc

SEQ ID NO: 98195 - RNA, 23 nt, Human
ccagccugggcaacaugguaaaa

SEQ ID NO: 98196 - RNA, 32 nt, Human
ccagccugggcaacaugguaaaacucugucuc

SEQ ID NO: 98197 - RNA, 23 nt, Human
ccagccugggcaacauggugaaa

SEQ ID NO: 98198 - RNA, 32 nt, Human
ccagccugggcaacauggugaaacccaguuuc

SEQ ID NO: 98199 - RNA, 32 nt, Human
ccagccugggcaacauggugaaaccccaucuc

SEQ ID NO: 98200 - RNA, 32 nt, Human
ccagccugggcaacauggugaaaccccguccc

SEQ ID NO: 98201 - RNA, 32 nt, Human
ccagccugggcaacauggugaaaccccgucuc

SEQ ID NO: 98202 - RNA, 32 nt, Human
ccagccugggcaacauggugaaacccuaucuc

SEQ ID NO: 98203 - RNA, 32 nt, Human
ccagccugggcaacauggugaaacccugucgg

SEQ ID NO: 98204 - RNA, 32 nt, Human
ccagccugggcaacauggugaaacccugucuc

SEQ ID NO: 98205 - RNA, 32 nt, Human
ccagccugggcaacauggugaaacccuguuuc

SEQ ID NO: 98206 - RNA, 32 nt, Human
ccagccugggcaacauggugaaaccucaucuc

SEQ ID NO: 98207 - RNA, 32 nt, Human
ccagccugggcaacauggugaaaucccauguc

SEQ ID NO: 98208 - RNA, 32 nt, Human
ccagccugggcaacauggugaaaucccgucac

SEQ ID NO: 98209 - RNA, 32 nt, Human
ccagccugggcaacauggugaaauccugucuc

SEQ ID NO: 98210 - RNA, 23 nt, Human
ccagccugggcaacauggugaag

SEQ ID NO: 98211 - RNA, 32 nt, Human
ccagccugggcaacauggugaagccccaucuc

SEQ ID NO: 98212 - RNA, 32 nt, Human
ccagccugggcaacauggugaagccucauauc

SEQ ID NO: 98213 - RNA, 23 nt, Human
ccagccugggcaacauggugaga

SEQ ID NO: 98214 - RNA, 32 nt, Human
ccagccugggcaacauggugagaccaauugac

SEQ ID NO: 98215 - RNA, 32 nt, Human
ccagccugggcaacauggugagaccccaucuc

SEQ ID NO: 98216 - RNA, 32 nt, Human
ccagccugggcaacauggugagaccccgucuc

SEQ ID NO: 98217 - RNA, 32 nt, Human
ccagccugggcaacauggugagauuucaucuc

SEQ ID NO: 98218 - RNA, 23 nt, Human
ccagccugggcaacauugggaga

SEQ ID NO: 98219 - RNA, 32 nt, Human
ccagccugggcaacauugggagacuccaucuc

SEQ ID NO: 98220 - RNA, 32 nt, Human
ccagccugggcaaccuaaugagaguuccucca

SEQ ID NO: 98221 - RNA, 32 nt, Human
ccagccugggcaacgaaaagugaaacucuguc

SEQ ID NO: 98222 - RNA, 24 nt, Human
ccagccugggcaacgagagggaaa

SEQ ID NO: 98223 - RNA, 24 nt, Human
ccagccugggcaacgagagugaaa

SEQ ID NO: 98224 - RNA, 32 nt, Human
ccagccugggcaacgagagugaaacuccgucc

SEQ ID NO: 98225 - RNA, 18 nt, Human
ccagccugggcaacgagc

SEQ ID NO: 98226 - RNA, 22 nt, Human
ccagccugggcaacgagcgaaa

SEQ ID NO: 98227 - RNA, 31 nt, Human
ccagccugggcaacgagcgaaacuacaucuc

SEQ ID NO: 98228 - RNA, 32 nt, Human
ccagccugggcaacgagcgaaacuccaucuca

SEQ ID NO: 98229 - RNA, 22 nt, Human
ccagccugggcaacgagugaaa

SEQ ID NO: 98230 - RNA, 32 nt, Human
ccagccugggcaacgagugaaacuccgucuca

SEQ ID NO: 98231 - RNA, 32 nt, Human
ccagccugggcaacgagugcaaaacucagucu

SEQ ID NO: 98232 - RNA, 19 nt, Human
ccagccugggcaacggagc

SEQ ID NO: 98233 - RNA, 23 nt, Human
ccagccugggcaacggagugaga

SEQ ID NO: 98234 - RNA, 32 nt, Human
ccagccugggcaacggagugagacuccaucuc

SEQ ID NO: 98235 - RNA, 32 nt, Human
ccagccugggcaacggagugagacucugucuc

SEQ ID NO: 98236 - RNA, 22 nt, Human
ccagccugggcaacgggcgaga

SEQ ID NO: 98237 - RNA, 32 nt, Human
ccagccugggcaacguagcaagaccuugccuc

SEQ ID NO: 98238 - RNA, 32 nt, Human
ccagccugggcaacguaguaaaaccucaucua

SEQ ID NO: 98239 - RNA, 32 nt, Human
ccagccugggcaacguagucagaccccaucuc

SEQ ID NO: 98240 - RNA, 32 nt, Human
ccagccugggcaacguauugagaccaugucua

SEQ ID NO: 98241 - RNA, 32 nt, Human
ccagccugggcaacgugacgaaaccccaucuc

SEQ ID NO: 98242 - RNA, 23 nt, Human
ccagccugggcaacguggcgaaa

SEQ ID NO: 98243 - RNA, 32 nt, Human
ccagccugggcaacguggugaaaccccaucuc

SEQ ID NO: 98244 - RNA, 32 nt, Human
ccagccugggcaacguggugaaacccugucuc

SEQ ID NO: 98245 - RNA, 32 nt, Human
ccagccugggcaacguggugagacccugucuc

SEQ ID NO: 98246 - RNA, 32 nt, Human
ccagccugggcaacuuagugaggccccgucuc

SEQ ID NO: 98247 - RNA, 32 nt, Human
ccagccugggcaagagaaugacacucugucaa

SEQ ID NO: 98248 - RNA, 32 nt, Human
ccagccugggcaagauagcaagaccuugccuc

SEQ ID NO: 98249 - RNA, 32 nt, Human
ccagccugggcaagauggcaagaccuuguuuc

SEQ ID NO: 98250 - RNA, 32 nt, Human
ccagccugggcaagauggugaaaccccaucuc

SEQ ID NO: 98251 - RNA, 20 nt, Human
ccagccugggcaauaagagc

SEQ ID NO: 98252 - RNA, 24 nt, Human
ccagccugggcaauaagagcgaaa

SEQ ID NO: 98253 - RNA, 32 nt, Human
ccagccugggcaauaagagcgaaacuccaucu

SEQ ID NO: 98254 - RNA, 24 nt, Human
ccagccugggcaauaagagugaaa

SEQ ID NO: 98255 - RNA, 32 nt, Human
ccagccugggcaauaagagugaaacucugucu

SEQ ID NO: 98256 - RNA, 23 nt, Human
ccagccugggcaauacagcgaga

SEQ ID NO: 98257 - RNA, 32 nt, Human
ccagccugggcaauacagcgagaacccaucgc

SEQ ID NO: 98258 - RNA, 32 nt, Human
ccagccugggcaauagagugagacuccgucuc

SEQ ID NO: 98259 - RNA, 32 nt, Human
ccagccugggcaauagagugagacuccguuuc

SEQ ID NO: 98260 - RNA, 32 nt, Human
ccagccugggcaauagagugagacucugucuc

SEQ ID NO: 98261 - RNA, 31 nt, Human
ccagccugggcaauagagugagacucuguuu

SEQ ID NO: 98262 - RNA, 32 nt, Human
ccagccugggcaauagagugagauuccgucuc

SEQ ID NO: 98263 - RNA, 32 nt, Human
ccagccugggcaauauagcaagaccccauccu

SEQ ID NO: 98264 - RNA, 32 nt, Human
ccagccugggcaauauagcaagaccccucacu

SEQ ID NO: 98265 - RNA, 32 nt, Human
ccagccugggcaauauagcgagacuucauuuc

SEQ ID NO: 98266 - RNA, 23 nt, Human
ccagccugggcaauauagggaaa

SEQ ID NO: 98267 - RNA, 32 nt, Human
ccagccugggcaauauagugagaccccaucuc

SEQ ID NO: 98268 - RNA, 32 nt, Human
ccagccugggcaauauagugagaccguaucac

SEQ ID NO: 98269 - RNA, 32 nt, Human
ccagccugggcaauauagugagaccucugucu

SEQ ID NO: 98270 - RNA, 32 nt, Human
ccagccugggcaauaucgugagaccccaucuc

SEQ ID NO: 98271 - RNA, 32 nt, Human
ccagccugggcaauauggugagacuccaucuc

SEQ ID NO: 98272 - RNA, 32 nt, Human
ccagccugggcaauggagugagacuccugucu

SEQ ID NO: 98273 - RNA, 32 nt, Human
ccagccugggcaaugugaugaaacucuguuac

SEQ ID NO: 98274 - RNA, 23 nt, Human
ccagccugggcaccagagcgaga

SEQ ID NO: 98275 - RNA, 32 nt, Human
ccagccugggcaccauggugaaaccucgucuu

SEQ ID NO: 98276 - RNA, 18 nt, Human
ccagccugggcagcaaga

SEQ ID NO: 98277 - RNA, 20 nt, Human
ccagccugggcagcaagagc

SEQ ID NO: 98278 - RNA, 24 nt, Human
ccagccugggcagcaagagugaaa

SEQ ID NO: 98279 - RNA, 19 nt, Human
ccagccugggcagcagagc

SEQ ID NO: 98280 - RNA, 23 nt, Human
ccagccugggcagcagagcgaga

SEQ ID NO: 98281 - RNA, 23 nt, Human
ccagccugggccacagugcaaga

SEQ ID NO: 98282 - RNA, 19 nt, Human
ccagccugggccagaugag

SEQ ID NO: 98283 - RNA, 32 nt, Human
ccagccugggcccuggcucggucgcacacuca

SEQ ID NO: 98284 - RNA, 21 nt, Human
ccagccugggcgacaaagcaa

SEQ ID NO: 98285 - RNA, 21 nt, Human
ccagccugggcgacaaagcga

SEQ ID NO: 98286 - RNA, 23 nt, Human
ccagccugggcgacaaagcgaga

SEQ ID NO: 98287 - RNA, 20 nt, Human
ccagccugggcgacaagagc

SEQ ID NO: 98288 - RNA, 32 nt, Human
ccagccugggcgacaagagcaagacucugucu

SEQ ID NO: 98289 - RNA, 24 nt, Human
ccagccugggcgacaagagcgaaa

SEQ ID NO: 98290 - RNA, 24 nt, Human
ccagccugggcgacaagagcgaga

SEQ ID NO: 98291 - RNA, 24 nt, Human
ccagccugggcgacaagagugaaa

SEQ ID NO: 98292 - RNA, 19 nt, Human
ccagccugggcgacacagc

SEQ ID NO: 98293 - RNA, 21 nt, Human
ccagccugggcgacacagcga

SEQ ID NO: 98294 - RNA, 23 nt, Human
ccagccugggcgacagaacgaga

SEQ ID NO: 98295 - RNA, 25 nt, Human
ccagccugggcgacagagaaccucu

SEQ ID NO: 98296 - RNA, 19 nt, Human
ccagccugggcgacagagc

SEQ ID NO: 98297 - RNA, 23 nt, Human
ccagccugggcgacagagccaga

SEQ ID NO: 98298 - RNA, 21 nt, Human
ccagccugggcgacagagcga

SEQ ID NO: 98299 - RNA, 23 nt, Human
ccagccugggcgacagagcgaaa

SEQ ID NO: 98300 - RNA, 23 nt, Human
ccagccugggcgacagagcgaga

SEQ ID NO: 98301 - RNA, 23 nt, Human
ccagccugggcgacagggugaga

SEQ ID NO: 98302 - RNA, 22 nt, Human
ccagccugggcgacgagugaaa

SEQ ID NO: 98303 - RNA, 23 nt, Human
ccagccugggcgacggagcgaga

SEQ ID NO: 98304 - RNA, 23 nt, Human
ccagccugggcgauggagcgaga

SEQ ID NO: 98305 - RNA, 18 nt, Human
ccagccugggcgccgaga

SEQ ID NO: 98306 - RNA, 20 nt, Human
ccagccugggcuacaagagc

SEQ ID NO: 98307 - RNA, 23 nt, Human
ccagccugggcuacagagcgaga

SEQ ID NO: 98308 - RNA, 24 nt, Human
ccagccuggggagacagagcgaga

SEQ ID NO: 98309 - RNA, 32 nt, Human
ccagccuggggagacagagcgagauucugugu

SEQ ID NO: 98310 - RNA, 32 nt, Human
ccagccuggggcucucagcaggaggacccuuu

SEQ ID NO: 98311 - RNA, 23 nt, Human
ccagccugggggaaagagugaaa

SEQ ID NO: 98312 - RNA, 23 nt, Human
ccagccugggggacagagcgaga

SEQ ID NO: 98313 - RNA, 19 nt, Human
ccagccugggggaggggga

SEQ ID NO: 98314 - RNA, 32 nt, Human
ccagccugggggcuggugaccacagcaccccc

SEQ ID NO: 98315 - RNA, 32 nt, Human
ccagccuggggucccuggaggacaggucacau

SEQ ID NO: 98316 - RNA, 23 nt, Human
ccagccuggguaacaaagugaga

SEQ ID NO: 98317 - RNA, 20 nt, Human
ccagccuggguaacaagagc

SEQ ID NO: 98318 - RNA, 23 nt, Human
ccagccuggguaacagagcgaga

SEQ ID NO: 98319 - RNA, 18 nt, Human
ccagccuggguccugcca

SEQ ID NO: 98320 - RNA, 32 nt, Human
ccagccugggugacaagagcaagacuccgugu

SEQ ID NO: 98321 - RNA, 24 nt, Human
ccagccugggugacaagagcgaaa

SEQ ID NO: 98322 - RNA, 24 nt, Human
ccagccugggugacaagagugaaa

SEQ ID NO: 98323 - RNA, 23 nt, Human
ccagccugggugacagaacgaga

SEQ ID NO: 98324 - RNA, 23 nt, Human
ccagccugggugacagaaugaaa

SEQ ID NO: 98325 - RNA, 32 nt, Human
ccagccugggugacagaaugaaacuccaucac

SEQ ID NO: 98326 - RNA, 23 nt, Human
ccagccugggugacagagcaaga

SEQ ID NO: 98327 - RNA, 21 nt, Human
ccagccugggugacagagcga

SEQ ID NO: 98328 - RNA, 23 nt, Human
ccagccugggugacagagcgaga

SEQ ID NO: 98329 - RNA, 23 nt, Human
ccagccugggugacagagggaaa

SEQ ID NO: 98330 - RNA, 23 nt, Human
ccagccugggugacagugugaga

SEQ ID NO: 98331 - RNA, 22 nt, Human
ccagccugggugacgagugaaa

SEQ ID NO: 98332 - RNA, 19 nt, Human
ccagccugggugacggagu

SEQ ID NO: 98333 - RNA, 23 nt, Human
ccagccugggugacugagcgaga

SEQ ID NO: 98334 - RNA, 24 nt, Human
ccagccugggugagaagagcgaaa

SEQ ID NO: 98335 - RNA, 32 nt, Human
ccagccugggugauaagagcaagacucuugcc

SEQ ID NO: 98336 - RNA, 24 nt, Human
ccagccugggugauaagagugaaa

SEQ ID NO: 98337 - RNA, 32 nt, Human
ccagccuggguggacagagcaagacuccgucu

SEQ ID NO: 98338 - RNA, 23 nt, Human
ccagccuggguggcagagcgaga

SEQ ID NO: 98339 - RNA, 23 nt, Human
ccagccugggugucagagcgaga

SEQ ID NO: 98340 - RNA, 23 nt, Human
ccagccuggguuacagagcgaga

SEQ ID NO: 98341 - RNA, 23 nt, Human
ccagccuggucaacauggugaaa

SEQ ID NO: 98342 - RNA, 32 nt, Human
ccagccuggucaacauggugaaaccuugucuc

SEQ ID NO: 98343 - RNA, 24 nt, Human
ccagccuggucgacaagagagaaa

SEQ ID NO: 98344 - RNA, 32 nt, Human
ccagccuggucucaaacuccccagcuaaagca

SEQ ID NO: 98345 - RNA, 22 nt, Human
ccagccuggugacagagcgaga

SEQ ID NO: 98346 - RNA, 32 nt, Human
ccagccugguggcagaggaagcagguggcacc

SEQ ID NO: 98347 - RNA, 32 nt, Human
ccagccugguguccuccuucaucccaggcugc

SEQ ID NO: 98348 - RNA, 22 nt, Human
ccagccugguuacagagcgaga

SEQ ID NO: 98349 - RNA, 32 nt, Human
ccagccugguugggugacuuugugggagccac

SEQ ID NO: 98350 - RNA, 21 nt, Human
ccagccugucacgucaugccu

SEQ ID NO: 98351 - RNA, 20 nt, Human
ccagccuguccaagggcaug

SEQ ID NO: 98352 - RNA, 21 nt, Human
ccagccuguccaugcacggcu

SEQ ID NO: 98353 - RNA, 32 nt, Human
ccagccugucccucauuacccaaggcaagggg

SEQ ID NO: 98354 - RNA, 24 nt, Human
ccagccugucguuagggcauggcu

SEQ ID NO: 98355 - RNA, 22 nt, Human
ccagccugugcaacaagcgaaa

SEQ ID NO: 98356 - RNA, 32 nt, Human
ccagccugugccagucugaccuggaggccgug

SEQ ID NO: 98357 - RNA, 24 nt, Human
ccagccugugcgacaagagcgaaa

SEQ ID NO: 98358 - RNA, 32 nt, Human
ccagccuguggcccccagccuccuggaaaaca

SEQ ID NO: 98359 - RNA, 23 nt, Human
ccagccuguuccagccagugccu

SEQ ID NO: 98360 - RNA, 21 nt, Human
ccagccuguucucucccaguc

SEQ ID NO: 98361 - RNA, 19 nt, Human
ccagccuuacuggguccuu

SEQ ID NO: 98362 - RNA, 31 nt, Human
ccagccuucaauaaauagcauuugaauuugc

SEQ ID NO: 98363 - RNA, 20 nt, Human
ccagccuuccacuuuuccca

SEQ ID NO: 98364 - RNA, 32 nt, Human
ccagccuucccaacaugccuccugcccugcua

SEQ ID NO: 98365 - RNA, 22 nt, Human
ccagccuucccaugccgggcca

SEQ ID NO: 98366 - RNA, 32 nt, Human
ccagccuuccccauaucuccugccucagcccc

SEQ ID NO: 98367 - RNA, 32 nt, Human
ccagccuuccgaguagcugggauuacagggau

SEQ ID NO: 98368 - RNA, 32 nt, Human
ccagccuuccuccucacucacccuccagccau

SEQ ID NO: 98369 - RNA, 23 nt, Human
ccagccuucguccuccuggcccg

SEQ ID NO: 98370 - RNA, 32 nt, Human
ccagccuucuacugcucuccuccaccucaacu

SEQ ID NO: 98371 - RNA, 22 nt, Human
ccagccuucugagagguggcug

SEQ ID NO: 98372 - RNA, 32 nt, Human
ccagccuucuugcugcuaucaacucccaagag

SEQ ID NO: 98373 - RNA, 32 nt, Human
ccagccuugaauuaggauuccauaggagagcu

SEQ ID NO: 98374 - RNA, 32 nt, Human
ccagccuugacacuccccuugcaaaccauccc

SEQ ID NO: 98375 - RNA, 32 nt, Human
ccagccuugcacuccaaggcugcgcaccgcca

SEQ ID NO: 98376 - RNA, 32 nt, Human
ccagccuugcagccaggugcaguggcucacac

SEQ ID NO: 98377 - RNA, 32 nt, Human
ccagccuugcagccuccagguccgguggggau

SEQ ID NO: 98378 - RNA, 32 nt, Human
ccagccuugccgccgccugccugcuccgccgc

SEQ ID NO: 98379 - RNA, 32 nt, Human
ccagccuugccuggcucucgccuucuugcucu

SEQ ID NO: 98380 - RNA, 32 nt, Human
ccagccuugcuguuaggcaccaugacuccaag

SEQ ID NO: 98381 - RNA, 32 nt, Human
ccagccuuggcaacauaaugagacacugucac

SEQ ID NO: 98382 - RNA, 32 nt, Human
ccagccuuggcaacauggugaaaccccaucuc

SEQ ID NO: 98383 - RNA, 24 nt, Human
ccagccuugggcaagaugccucag

SEQ ID NO: 98384 - RNA, 25 nt, Human
ccagccuugggcgacaaaaacgaaa

SEQ ID NO: 98385 - RNA, 32 nt, Human
ccagccuugguggggaccaagcagccuuuccc

SEQ ID NO: 98386 - RNA, 32 nt, Human
ccagccuuguccgcaaccucaggggccuggga

SEQ ID NO: 98387 - RNA, 32 nt, Human
ccagccuuuauugccacugugugccagucauu

SEQ ID NO: 98388 - RNA, 21 nt, Human
ccagccuuuccacggcgccca

SEQ ID NO: 98389 - RNA, 32 nt, Human
ccagccuuucccaauuagacuuccucuccuuc

SEQ ID NO: 98390 - RNA, 24 nt, Human
ccagccuuucccucccacccacuc

SEQ ID NO: 98391 - RNA, 22 nt, Human
ccagccuuuccguuggaauuca

SEQ ID NO: 98392 - RNA, 23 nt, Human
ccagccuuucgcccaggcgccca

SEQ ID NO: 98393 - RNA, 21 nt, Human
ccagccuuucggggccacuua

SEQ ID NO: 98394 - RNA, 26 nt, Human
ccagccuuucuccucuacguacugca

SEQ ID NO: 98395 - RNA, 32 nt, Human
ccagccuuucugugguaucugaugcaggaagg

SEQ ID NO: 98396 - RNA, 23 nt, Human
ccagccuuugcccgcuagacuca

SEQ ID NO: 98397 - RNA, 25 nt, Human
ccagccuuugcucccuccccgcugc

SEQ ID NO: 98398 - RNA, 32 nt, Human
ccagccuuugcuguagcacacacauauaucac

SEQ ID NO: 98399 - RNA, 32 nt, Human
ccagccuuugggccuccccagccagagcagcc

SEQ ID NO: 98400 - RNA, 32 nt, Human
ccagcgaaaccagcuucaucucccagagaaug

SEQ ID NO: 98401 - RNA, 32 nt, Human
ccagcgaaagaaaagagaagugacagaaacaa

SEQ ID NO: 98402 - RNA, 32 nt, Human
ccagcgaagccaucgcgcuccuugcggaggug

SEQ ID NO: 98403 - RNA, 32 nt, Human
ccagcgaauuuauauccuucaggaagcugguu

SEQ ID NO: 98404 - RNA, 19 nt, Human
ccagcgaccaggccuggag

SEQ ID NO: 98405 - RNA, 32 nt, Human
ccagcgaccucucugccucucuucuuccccuu

SEQ ID NO: 98406 - RNA, 32 nt, Human
ccagcgacugagagagccagaggcagagaggu

SEQ ID NO: 98407 - RNA, 32 nt, Human
ccagcgagacgggguuucauuauguuggccag

SEQ ID NO: 98408 - RNA, 32 nt, Human
ccagcgagccaccacagccaccagucccagaa

SEQ ID NO: 98409 - RNA, 32 nt, Human
ccagcgagcccacgagcccacagggaggaaug

SEQ ID NO: 98410 - RNA, 32 nt, Human
ccagcgaggaagcagcgcgcagcccgcggccc

SEQ ID NO: 98411 - RNA, 32 nt, Human
ccagcgaggccuuccuggaaggagugcugagc

SEQ ID NO: 98412 - RNA, 24 nt, Human
ccagcgaggggccaggccgggcca

SEQ ID NO: 98413 - RNA, 19 nt, Human
ccagcgaguaccccagcca

SEQ ID NO: 98414 - RNA, 19 nt, Human
ccagcgauggugcugccca

SEQ ID NO: 98415 - RNA, 21 nt, Human
ccagcgauuccaaacugcagc

SEQ ID NO: 98416 - RNA, 22 nt, Human
ccagcgcacaucgcuggcccca

SEQ ID NO: 98417 - RNA, 16 nt, Human
ccagcgcagggcucag

SEQ ID NO: 98418 - RNA, 32 nt, Human
ccagcgcagggugaagccugagagcccaaaug

SEQ ID NO: 98419 - RNA, 32 nt, Human
ccagcgcaggugugcgugggcagcccaggcag

SEQ ID NO: 98420 - RNA, 32 nt, Human
ccagcgcaggugugggacgggcggcggacuag

SEQ ID NO: 98421 - RNA, 18 nt, Human
ccagcgccacacauagca

SEQ ID NO: 98422 - RNA, 32 nt, Human
ccagcgccaccaggcuggaggcggagugggag

SEQ ID NO: 98423 - RNA, 16 nt, Human
ccagcgccacccagga

SEQ ID NO: 98424 - RNA, 32 nt, Human
ccagcgccaggccuggugccugccccaggagg

SEQ ID NO: 98425 - RNA, 32 nt, Human
ccagcgccaucuuucagaaggccucaucucca

SEQ ID NO: 98426 - RNA, 32 nt, Human
ccagcgccauguccagccagguggugggcauu

SEQ ID NO: 98427 - RNA, 32 nt, Human
ccagcgcccaggaguuggggauguccuacaaa

SEQ ID NO: 98428 - RNA, 32 nt, Human
ccagcgcccaucuccccuuccgugccccagag

SEQ ID NO: 98429 - RNA, 32 nt, Human
ccagcgccccgccuggaguggaugagccucuc

SEQ ID NO: 98430 - RNA, 32 nt, Human
ccagcgcccgccucgcccuccugcgccggucg

SEQ ID NO: 98431 - RNA, 32 nt, Human
ccagcgcccgggaggaggaugcagacgccgcg

SEQ ID NO: 98432 - RNA, 32 nt, Human
ccagcgcccuggaggaagaggaagaggaaccc

SEQ ID NO: 98433 - RNA, 32 nt, Human
ccagcgcccuggcaaaggcugacaacuggcug

SEQ ID NO: 98434 - RNA, 18 nt, Human
ccagcgccgccgccgccg

SEQ ID NO: 98435 - RNA, 23 nt, Human
ccagcgccgccgccgccgccgcc

SEQ ID NO: 98436 - RNA, 32 nt, Human
ccagcgccgcuccacccagcaggccugagccc

SEQ ID NO: 98437 - RNA, 32 nt, Human
ccagcgccuccccucaccgacuuuggccuuuu

SEQ ID NO: 98438 - RNA, 32 nt, Human
ccagcgccugcagaggcugagcagggaaaaag

SEQ ID NO: 98439 - RNA, 24 nt, Human
ccagcgccuuccuggagauagcug

SEQ ID NO: 98440 - RNA, 32 nt, Human
ccagcgcggauguuucugccacugcugggcuc

SEQ ID NO: 98441 - RNA, 32 nt, Human
ccagcgcggcccccgcgugccucccaggcucc

SEQ ID NO: 98442 - RNA, 22 nt, Human
ccagcgcgggcacggagccgcc

SEQ ID NO: 98443 - RNA, 31 nt, Human
ccagcgcgguuucagcauuuaauuuuaaggg

SEQ ID NO: 98444 - RNA, 32 nt, Human
ccagcgcguccuucugagcucagaccuugagc

SEQ ID NO: 98445 - RNA, 32 nt, Human
ccagcgcucagccugcgccauggguggucccg

SEQ ID NO: 98446 - RNA, 32 nt, Human
ccagcgcuccggagguggugggcgcgcgggca

SEQ ID NO: 98447 - RNA, 32 nt, Human
ccagcgcuccugccgccccucuugccccucag

SEQ ID NO: 98448 - RNA, 32 nt, Human
ccagcgcuccuggcgcccucuucucaucgcuu

SEQ ID NO: 98449 - RNA, 32 nt, Human
ccagcgcucugccucaccgcuucccuccugcc

SEQ ID NO: 98450 - RNA, 32 nt, Human
ccagcgcugagauuuggugguucugcaugugu

SEQ ID NO: 98451 - RNA, 32 nt, Human
ccagcgcugcagccccagccugagcagcagcc

SEQ ID NO: 98452 - RNA, 32 nt, Human
ccagcgcugccaccccacccagcgcugccagg

SEQ ID NO: 98453 - RNA, 32 nt, Human
ccagcgcugccucugcugccgggccuggacca

SEQ ID NO: 98454 - RNA, 23 nt, Human
ccagcgcuggcugccgccaucuc

SEQ ID NO: 98455 - RNA, 19 nt, Human
ccagcggaagcacagcuca

SEQ ID NO: 98456 - RNA, 32 nt, Human
ccagcggaagcacagcucagagcuggucugcc

SEQ ID NO: 98457 - RNA, 32 nt, Human
ccagcggagagggcccggcgcaggggaucugc

SEQ ID NO: 98458 - RNA, 32 nt, Human
ccagcggagaggggcggaagccgcaagggacc

SEQ ID NO: 98459 - RNA, 22 nt, Human
ccagcggagccagcugagcccg

SEQ ID NO: 98460 - RNA, 32 nt, Human
ccagcggagcgcugggugucagugagcagcga

SEQ ID NO: 98461 - RNA, 21 nt, Human
ccagcggagggcaccggcccg

SEQ ID NO: 98462 - RNA, 32 nt, Human
ccagcggaugcaacuucuauccucaguccagu

SEQ ID NO: 98463 - RNA, 22 nt, Human
ccagcggcaagcaccggucccg

SEQ ID NO: 98464 - RNA, 32 nt, Human
ccagcggcagcagggugagggagcagcacaga

SEQ ID NO: 98465 - RNA, 32 nt, Human
ccagcggcauggugacccagcucugccggugg

SEQ ID NO: 98466 - RNA, 32 nt, Human
ccagcggccacaggcucaaccugcacuuccua

SEQ ID NO: 98467 - RNA, 22 nt, Human
ccagcggccagagccucaguga

SEQ ID NO: 98468 - RNA, 32 nt, Human
ccagcggccccucccacacacacccacacacu

SEQ ID NO: 98469 - RNA, 32 nt, Human
ccagcggccugccgggaguugcagugaaccca

SEQ ID NO: 98470 - RNA, 16 nt, Human
ccagcggcggagccag

SEQ ID NO: 98471 - RNA, 21 nt, Human
ccagcggcucccccagcgcug

SEQ ID NO: 98472 - RNA, 32 nt, Human
ccagcggcucggggcuugcagggagggcggau

SEQ ID NO: 98473 - RNA, 32 nt, Human
ccagcggcucuuccuggacagugagagcaggg

SEQ ID NO: 98474 - RNA, 32 nt, Human
ccagcggcugugguugaccugccuuggggagc

SEQ ID NO: 98475 - RNA, 19 nt, Human
ccagcgggaggaggcgcgg

SEQ ID NO: 98476 - RNA, 21 nt, Human
ccagcgggccgggcacucgca

SEQ ID NO: 98477 - RNA, 31 nt, Human
ccagcgggcuugagcuggccugugucccucc

SEQ ID NO: 98478 - RNA, 32 nt, Human
ccagcggggacaccccagccacacagggaggc

SEQ ID NO: 98479 - RNA, 32 nt, Human
ccagcggggagaagagaggcggaacugcugug

SEQ ID NO: 98480 - RNA, 32 nt, Human
ccagcggggagcuguuucaagaguaccgguac

SEQ ID NO: 98481 - RNA, 29 nt, Human
ccagcggggaggacugcccaggagaccau

SEQ ID NO: 98482 - RNA, 32 nt, Human
ccagcggggauagaggcuucaaaagcuuugaa

SEQ ID NO: 98483 - RNA, 23 nt, Human
ccagcgggugggggauucugcug

SEQ ID NO: 98484 - RNA, 32 nt, Human
ccagcguccacaucguccucuggcaggagcuc

SEQ ID NO: 98485 - RNA, 32 nt, Human
ccagcguccauccagccccuguccucaccucu

SEQ ID NO: 98486 - RNA, 19 nt, Human
ccagcguccccuccuuccc

SEQ ID NO: 98487 - RNA, 20 nt, Human
ccagcguccccuccuuccca

SEQ ID NO: 98488 - RNA, 19 nt, Human
ccagcguccgccgccgccg

SEQ ID NO: 98489 - RNA, 32 nt, Human
ccagcgucgagagaagggacagcagugacauc

SEQ ID NO: 98490 - RNA, 20 nt, Human
ccagcgucgagcggcagcaa

SEQ ID NO: 98491 - RNA, 32 nt, Human
ccagcgucuagacuguagcaucuuccucugag

SEQ ID NO: 98492 - RNA, 32 nt, Human
ccagcgucucccagacuucucguacaguuaau

SEQ ID NO: 98493 - RNA, 21 nt, Human
ccagcgucuccccugcugcug

SEQ ID NO: 98494 - RNA, 23 nt, Human
ccagcgucuccccugcugcuguc

SEQ ID NO: 98495 - RNA, 18 nt, Human
ccagcgucuuccaucucu

SEQ ID NO: 98496 - RNA, 32 nt, Human
ccagcgugcaugacaguggagaggagggcgag

SEQ ID NO: 98497 - RNA, 20 nt, Human
ccagcgugccccucccucag

SEQ ID NO: 98498 - RNA, 22 nt, Human
ccagcgugcugggauuauaggc

SEQ ID NO: 98499 - RNA, 32 nt, Human
ccagcguggccaauucucugcugacugccaga

SEQ ID NO: 98500 - RNA, 32 nt, Human
ccagcguggcgcaguggcccugagcaguagug

SEQ ID NO: 98501 - RNA, 32 nt, Human
ccagcguggcggcugguguuggucagaugcac

SEQ ID NO: 98502 - RNA, 32 nt, Human
ccagcgugggcaacagagugagacuccaucuc

SEQ ID NO: 98503 - RNA, 32 nt, Human
ccagcgugggcaacuuagcgagacuccaucuc

SEQ ID NO: 98504 - RNA, 32 nt, Human
ccagcgugggcaccgggccgucucagccgugu

SEQ ID NO: 98505 - RNA, 32 nt, Human
ccagcgugguccuaggacaggaggagcuucgg

SEQ ID NO: 98506 - RNA, 32 nt, Human
ccagcguggugaagccucaucucugcugagaa

SEQ ID NO: 98507 - RNA, 32 nt, Human
ccagcguucccccuucaagagaaacacucauc

SEQ ID NO: 98508 - RNA, 32 nt, Human
ccagcguucccgcuccacaggucuccaggagu

SEQ ID NO: 98509 - RNA, 32 nt, Human
ccagcguucucacgccuguaaucccagcacuu

SEQ ID NO: 98510 - RNA, 32 nt, Human
ccagcuaaagcaguccuccagccucggccucc

SEQ ID NO: 98511 - RNA, 32 nt, Human
ccagcuaacaccuucauucaucccuaguucgg

SEQ ID NO: 98512 - RNA, 32 nt, Human
ccagcuaacguggcagaggaguugcgggucuc

SEQ ID NO: 98513 - RNA, 26 nt, Human
ccagcuaacucugaccugggagcccu

SEQ ID NO: 98514 - RNA, 32 nt, Human
ccagcuaagcaggagucuuuugugcuugagcc

SEQ ID NO: 98515 - RNA, 32 nt, Human
ccagcuaagcugguuggaguaggagcgauacc

SEQ ID NO: 98516 - RNA, 32 nt, Human
ccagcuaaggagaccuggacucuggguguggg

SEQ ID NO: 98517 - RNA, 32 nt, Human
ccagcuaauuuuuguauuuuuguagagauggg

SEQ ID NO: 98518 - RNA, 32 nt, Human
ccagcuaauuuuuguauuuuuguuggccaggc

SEQ ID NO: 98519 - RNA, 32 nt, Human
ccagcuacacucgcuucaaccuggacagccau

SEQ ID NO: 98520 - RNA, 32 nt, Human
ccagcuacagaugggcagacacaugcccucuc

SEQ ID NO: 98521 - RNA, 32 nt, Human
ccagcuacaguugggccagcuguggccuuagu

SEQ ID NO: 98522 - RNA, 21 nt, Human
ccagcuacccaggaaggcuga

SEQ ID NO: 98523 - RNA, 20 nt, Human
ccagcuacccaggaggcuga

SEQ ID NO: 98524 - RNA, 20 nt, Human
ccagcuacccgggaggcuga

SEQ ID NO: 98525 - RNA, 32 nt, Human
ccagcuaccucucccuuggcagcugguacucc

SEQ ID NO: 98526 - RNA, 32 nt, Human
ccagcuacuagggaggcaggaggaucacuuga

SEQ ID NO: 98527 - RNA, 20 nt, Human
ccagcuacuagggaggcuga

SEQ ID NO: 98528 - RNA, 32 nt, Human
ccagcuacuauggagguugaggugggaggauc

SEQ ID NO: 98529 - RNA, 20 nt, Human
ccagcuacucaagaggcuga

SEQ ID NO: 98530 - RNA, 20 nt, Human
ccagcuacucagaaggccga

SEQ ID NO: 98531 - RNA, 20 nt, Human
ccagcuacucagaaggcuga

SEQ ID NO: 98532 - RNA, 20 nt, Human
ccagcuacucagaagguuga

SEQ ID NO: 98533 - RNA, 20 nt, Human
ccagcuacucaggaagcuga

SEQ ID NO: 98534 - RNA, 21 nt, Human
ccagcuacucaggaaggcuga

SEQ ID NO: 98535 - RNA, 20 nt, Human
ccagcuacucaggagacuga

SEQ ID NO: 98536 - RNA, 20 nt, Human
ccagcuacucaggaggccga

SEQ ID NO: 98537 - RNA, 20 nt, Human
ccagcuacucaggaggcuga

SEQ ID NO: 98538 - RNA, 20 nt, Human
ccagcuacucaggagguuga

SEQ ID NO: 98539 - RNA, 32 nt, Human
ccagcuacucaggagucugaggcaggagaauc

SEQ ID NO: 98540 - RNA, 32 nt, Human
ccagcuacucaggagucugaggcaggagaaug

SEQ ID NO: 98541 - RNA, 32 nt, Human
ccagcuacucagggacuucucuugccuggagg

SEQ ID NO: 98542 - RNA, 20 nt, Human
ccagcuacucaguaggcuga

SEQ ID NO: 98543 - RNA, 32 nt, Human
ccagcuacucauaaggcugaggugggaggauc

SEQ ID NO: 98544 - RNA, 20 nt, Human
ccagcuacucgagaggcuga

SEQ ID NO: 98545 - RNA, 20 nt, Human
ccagcuacucggaaggcuga

SEQ ID NO: 98546 - RNA, 20 nt, Human
ccagcuacucgggaaacuga

SEQ ID NO: 98547 - RNA, 20 nt, Human
ccagcuacucgggaagcuga

SEQ ID NO: 98548 - RNA, 20 nt, Human
ccagcuacucgggagacuga

SEQ ID NO: 98549 - RNA, 23 nt, Human
ccagcuacucgggagcccaacgc

SEQ ID NO: 98550 - RNA, 18 nt, Human
ccagcuacucgggaggcu

SEQ ID NO: 98551 - RNA, 20 nt, Human
ccagcuacucgggaggcuga

SEQ ID NO: 98552 - RNA, 32 nt, Human
ccagcuacucgggaggcugaggccguaggauc

SEQ ID NO: 98553 - RNA, 32 nt, Human
ccagcuacucgggaggugaggcaggagaaugg

SEQ ID NO: 98554 - RNA, 20 nt, Human
ccagcuacucgguaggcuga

SEQ ID NO: 98555 - RNA, 32 nt, Human
ccagcuacugaggaggcugaggcaggagaauc

SEQ ID NO: 98556 - RNA, 32 nt, Human
ccagcuacugaggaggcugaggcaugagaauu

SEQ ID NO: 98557 - RNA, 32 nt, Human
ccagcuacugaggaggcugaggugggaggauu

SEQ ID NO: 98558 - RNA, 32 nt, Human
ccagcuacugcccagcucuuuaucccuuaguu

SEQ ID NO: 98559 - RNA, 18 nt, Human
ccagcuacuuccaccucu

SEQ ID NO: 98560 - RNA, 32 nt, Human
ccagcuacuugaggcugagaugggaggaugag

SEQ ID NO: 98561 - RNA, 20 nt, Human
ccagcuacuugggaggcuga

SEQ ID NO: 98562 - RNA, 32 nt, Human
ccagcuacuugggaggcugagguggagggauc

SEQ ID NO: 98563 - RNA, 32 nt, Human
ccagcuacuuuacuugggaggcugaggcagga

SEQ ID NO: 98564 - RNA, 32 nt, Human
ccagcuagccucugucccauccccuguuauuu

SEQ ID NO: 98565 - RNA, 32 nt, Human
ccagcuagcucucgccucacugaggccucccc

SEQ ID NO: 98566 - RNA, 32 nt, Human
ccagcuaggccaggggccugaccugggcacug

SEQ ID NO: 98567 - RNA, 32 nt, Human
ccagcuaguggaguggagacugcagagggaga

SEQ ID NO: 98568 - RNA, 32 nt, Human
ccagcuauaaucuccccugccuuccuuuaauc

SEQ ID NO: 98569 - RNA, 32 nt, Human
ccagcuaucccagaggucgaggcugcagugag

SEQ ID NO: 98570 - RNA, 32 nt, Human
ccagcuauucaggagcuguuguaggagagauu

SEQ ID NO: 98571 - RNA, 20 nt, Human
ccagcuauuugggaggcuga

SEQ ID NO: 98572 - RNA, 32 nt, Human
ccagcucaaacacaccaauaaagcuuuuguua

SEQ ID NO: 98573 - RNA, 32 nt, Human
ccagcucaaccugaacaauccccucccacucg

SEQ ID NO: 98574 - RNA, 32 nt, Human
ccagcucaagagcugcguuugaggcacaccug

SEQ ID NO: 98575 - RNA, 20 nt, Human
ccagcucaagcaauccuccc

SEQ ID NO: 98576 - RNA, 32 nt, Human
ccagcucaagcaauccucccaccucagccucc

SEQ ID NO: 98577 - RNA, 22 nt, Human
ccagcucaagucucucuccccc

SEQ ID NO: 98578 - RNA, 32 nt, Human
ccagcucaccgccugcacugccaugccuggag

SEQ ID NO: 98579 - RNA, 23 nt, Human
ccagcucaccucaggcccugcca

SEQ ID NO: 98580 - RNA, 32 nt, Human
ccagcucacuccagaagaacugagacacagca

SEQ ID NO: 98581 - RNA, 19 nt, Human
ccagcucacuccucugggc

SEQ ID NO: 98582 - RNA, 32 nt, Human
ccagcucacugcaaccuccgccuccuggguuc

SEQ ID NO: 98583 - RNA, 32 nt, Human
ccagcucagagcagugccagccccaccgcaac

SEQ ID NO: 98584 - RNA, 23 nt, Human
ccagcucagagcuccucccaccc

SEQ ID NO: 98585 - RNA, 32 nt, Human
ccagcucagaggaggaggaaggugaagaugaa

SEQ ID NO: 98586 - RNA, 32 nt, Human
ccagcucagagggagcaggggcccagccaggg

SEQ ID NO: 98587 - RNA, 24 nt, Human
ccagcucagcagugucucguuccc

SEQ ID NO: 98588 - RNA, 32 nt, Human
ccagcucagccaugcuggccugucugcagagg

SEQ ID NO: 98589 - RNA, 32 nt, Human
ccagcucagccccucccaugcacauuuggacg

SEQ ID NO: 98590 - RNA, 21 nt, Human
ccagcucagccugccucccca

SEQ ID NO: 98591 - RNA, 32 nt, Human
ccagcucagcgaugcccccaggucccugggag

SEQ ID NO: 98592 - RNA, 21 nt, Human
ccagcucagcuaccacuuccc

SEQ ID NO: 98593 - RNA, 19 nt, Human
ccagcucagcucugagcca

SEQ ID NO: 98594 - RNA, 21 nt, Human
ccagcucaggacucgauucug

SEQ ID NO: 98595 - RNA, 20 nt, Human
ccagcucaggcaacaagagc

SEQ ID NO: 98596 - RNA, 23 nt, Human
ccagcucaggcccccacugcacc

SEQ ID NO: 98597 - RNA, 24 nt, Human
ccagcucaggccccuuuccuuccc

SEQ ID NO: 98598 - RNA, 20 nt, Human
ccagcucagggagccauccc

SEQ ID NO: 98599 - RNA, 22 nt, Human
ccagcucagggcucuuuccucc

SEQ ID NO: 98600 - RNA, 19 nt, Human
ccagcucaggggcagcuca

SEQ ID NO: 98601 - RNA, 22 nt, Human
ccagcucagucuucccuccccc

SEQ ID NO: 98602 - RNA, 32 nt, Human
ccagcucagugccuguccaguggugacgucca

SEQ ID NO: 98603 - RNA, 23 nt, Human
ccagcucaguggcccccgccccc

SEQ ID NO: 98604 - RNA, 19 nt, Human
ccagcucauacuuuccuuc

SEQ ID NO: 98605 - RNA, 24 nt, Human
ccagcucaucagccucccuguccc

SEQ ID NO: 98606 - RNA, 24 nt, Human
ccagcucaucagugccuccuugcc

SEQ ID NO: 98607 - RNA, 32 nt, Human
ccagcucauccaguccuggcacucggacuuga

SEQ ID NO: 98608 - RNA, 22 nt, Human
ccagcucaucgagcuucuuccc

SEQ ID NO: 98609 - RNA, 32 nt, Human
ccagcucaucuuugauucagugaccaacauac

SEQ ID NO: 98610 - RNA, 32 nt, Human
ccagcucaugcugcugaccacugacucagcuc

SEQ ID NO: 98611 - RNA, 21 nt, Human
ccagcucaugucuuccccaca

SEQ ID NO: 98612 - RNA, 32 nt, Human
ccagcucauuacagccuccaccucccaguuuc

SEQ ID NO: 98613 - RNA, 32 nt, Human
ccagcuccaaccugaagaagcuucuggagacc

SEQ ID NO: 98614 - RNA, 32 nt, Human
ccagcuccaagaagucagcacaccugcauuuu

SEQ ID NO: 98615 - RNA, 23 nt, Human
ccagcuccaagagugccgggagg

SEQ ID NO: 98616 - RNA, 22 nt, Human
ccagcuccaccucugggguuca

SEQ ID NO: 98617 - RNA, 32 nt, Human
ccagcuccagaagggaagggaguggagcaggc

SEQ ID NO: 98618 - RNA, 32 nt, Human
ccagcuccagcaggaaggaccccacauccuuc

SEQ ID NO: 98619 - RNA, 32 nt, Human
ccagcuccagccagcaccccaucugcaccuga

SEQ ID NO: 98620 - RNA, 32 nt, Human
ccagcuccagcccugaggacagcucugauggg

SEQ ID NO: 98621 - RNA, 32 nt, Human
ccagcuccagcuaccagguuuuguaccgugcc

SEQ ID NO: 98622 - RNA, 19 nt, Human
ccagcuccaggcccugccc

SEQ ID NO: 98623 - RNA, 32 nt, Human
ccagcuccagugcuguggagcaugguuucugc

SEQ ID NO: 98624 - RNA, 32 nt, Human
ccagcucccaauaauggaggaggggaaaggga

SEQ ID NO: 98625 - RNA, 21 nt, Human
ccagcucccacaauuuuccca

SEQ ID NO: 98626 - RNA, 32 nt, Human
ccagcucccagccucuugcuuccugggcugag

SEQ ID NO: 98627 - RNA, 32 nt, Human
ccagcucccagccuggcaugagcuuggacagu

SEQ ID NO: 98628 - RNA, 22 nt, Human
ccagcucccagcucuucuuccc

SEQ ID NO: 98629 - RNA, 24 nt, Human
ccagcucccaggaccacaggcuca

SEQ ID NO: 98630 - RNA, 28 nt, Human
ccagcucccagugcugcuguccucugau

SEQ ID NO: 98631 - RNA, 32 nt, Human
ccagcuccccacccucugccuccagucaccau

SEQ ID NO: 98632 - RNA, 20 nt, Human
ccagcuccccuaguccaggc

SEQ ID NO: 98633 - RNA, 20 nt, Human
ccagcucccggguucggcuc

SEQ ID NO: 98634 - RNA, 21 nt, Human
ccagcucccguccuguggcuc

SEQ ID NO: 98635 - RNA, 23 nt, Human
ccagcucccguuagccaggacuu

SEQ ID NO: 98636 - RNA, 32 nt, Human
ccagcucccuccugccugaagauguuccacca

SEQ ID NO: 98637 - RNA, 32 nt, Human
ccagcucccucggggcccccagcuaccuaguu

SEQ ID NO: 98638 - RNA, 32 nt, Human
ccagcucccugccuccaagccuggugccacag

SEQ ID NO: 98639 - RNA, 19 nt, Human
ccagcucccugccuugcca

SEQ ID NO: 98640 - RNA, 23 nt, Human
ccagcucccugugcccccagggu

SEQ ID NO: 98641 - RNA, 32 nt, Human
ccagcuccgcagcagcuuuucaagaugcacua

SEQ ID NO: 98642 - RNA, 21 nt, Human
ccagcuccgcguccugugagg

SEQ ID NO: 98643 - RNA, 32 nt, Human
ccagcuccggguuuaagaguccuggcccggcc

SEQ ID NO: 98644 - RNA, 18 nt, Human
ccagcuccgucccaccca

SEQ ID NO: 98645 - RNA, 19 nt, Human
ccagcuccgucccacccag

SEQ ID NO: 98646 - RNA, 32 nt, Human
ccagcuccgugacccaggcuggaaugcaaugg

SEQ ID NO: 98647 - RNA, 32 nt, Human
ccagcuccuagaauuccucaggccagugacac

SEQ ID NO: 98648 - RNA, 17 nt, Human
ccagcuccuagccuccg

SEQ ID NO: 98649 - RNA, 18 nt, Human
ccagcuccucacauugga

SEQ ID NO: 98650 - RNA, 22 nt, Human
ccagcuccucagcauggccuca

SEQ ID NO: 98651 - RNA, 22 nt, Human
ccagcuccuccccuuccacuca

SEQ ID NO: 98652 - RNA, 23 nt, Human
ccagcuccucccugggugacucg

SEQ ID NO: 98653 - RNA, 23 nt, Human
ccagcuccuccugccugcacccg

SEQ ID NO: 98654 - RNA, 22 nt, Human
ccagcuccuccuugguguucuc

SEQ ID NO: 98655 - RNA, 32 nt, Human
ccagcuccucgagggccgugguugugaagaag

SEQ ID NO: 98656 - RNA, 22 nt, Human
ccagcuccucucuccgccguca

SEQ ID NO: 98657 - RNA, 23 nt, Human
ccagcuccucucugaagcgacuc

SEQ ID NO: 98658 - RNA, 20 nt, Human
ccagcuccucucugaagcuc

SEQ ID NO: 98659 - RNA, 22 nt, Human
ccagcuccucuuccugccucuc

SEQ ID NO: 98660 - RNA, 18 nt, Human
ccagcuccugcacucucg

SEQ ID NO: 98661 - RNA, 17 nt, Human
ccagcuccugccugcca

SEQ ID NO: 98662 - RNA, 32 nt, Human
ccagcuccugccuuagaaacaggcuuggccua

SEQ ID NO: 98663 - RNA, 18 nt, Human
ccagcuccugcgccuucg

SEQ ID NO: 98664 - RNA, 32 nt, Human
ccagcuccugcucuguccccucagguguccug

SEQ ID NO: 98665 - RNA, 18 nt, Human
ccagcuccugcugcuguc

SEQ ID NO: 98666 - RNA, 16 nt, Human
ccagcuccuggggucc

SEQ ID NO: 98667 - RNA, 17 nt, Human
ccagcuccugggguccc

SEQ ID NO: 98668 - RNA, 32 nt, Human
ccagcuccuguccugugccuucaccucuuuuu

SEQ ID NO: 98669 - RNA, 32 nt, Human
ccagcuccugugggccugagugcugcuguguu

SEQ ID NO: 98670 - RNA, 21 nt, Human
ccagcuccuucagccgcacca

SEQ ID NO: 98671 - RNA, 32 nt, Human
ccagcuccuucccagcccagccucuuggggcu

SEQ ID NO: 98672 - RNA, 21 nt, Human
ccagcuccuuccuuccuuccc

SEQ ID NO: 98673 - RNA, 32 nt, Human
ccagcuccuuggcugcagccaucccgcuuagc

SEQ ID NO: 98674 - RNA, 24 nt, Human
ccagcuccuuugugucugagcuca

SEQ ID NO: 98675 - RNA, 32 nt, Human
ccagcuccuuuuucacaguggccucacuacgc

SEQ ID NO: 98676 - RNA, 32 nt, Human
ccagcucgaacccacugcccucuggaggccug

SEQ ID NO: 98677 - RNA, 32 nt, Human
ccagcucgaaugcuugaucugccuggagccuu

SEQ ID NO: 98678 - RNA, 32 nt, Human
ccagcucgagacacccucgcucccccucacag

SEQ ID NO: 98679 - RNA, 32 nt, Human
ccagcucgagacugaugaguggaaucagcuuc

SEQ ID NO: 98680 - RNA, 22 nt, Human
ccagcucgcccucccccuaccc

SEQ ID NO: 98681 - RNA, 32 nt, Human
ccagcucgcccuggcccgcacagccaugagca

SEQ ID NO: 98682 - RNA, 32 nt, Human
ccagcucgcugcagccuccaccucccggacuc

SEQ ID NO: 98683 - RNA, 32 nt, Human
ccagcucgcuggccucgcgcugggcggcuggg

SEQ ID NO: 98684 - RNA, 32 nt, Human
ccagcucggagggucucagccuccccuggguu

SEQ ID NO: 98685 - RNA, 32 nt, Human
ccagcucggcccgcgggggagccccgggagcc

SEQ ID NO: 98686 - RNA, 23 nt, Human
ccagcucgggcaacaaagugaga

SEQ ID NO: 98687 - RNA, 23 nt, Human
ccagcucggggaacagagcgaga

SEQ ID NO: 98688 - RNA, 20 nt, Human
ccagcucggggccugugggg

SEQ ID NO: 98689 - RNA, 32 nt, Human
ccagcucgggugacaagagugagaccccgucu

SEQ ID NO: 98690 - RNA, 22 nt, Human
ccagcucggguuuccgggcuca

SEQ ID NO: 98691 - RNA, 32 nt, Human
ccagcucggucaccaaagcugucuggucccag

SEQ ID NO: 98692 - RNA, 32 nt, Human
ccagcucguuccccuccagccuggugcugggc

SEQ ID NO: 98693 - RNA, 18 nt, Human
ccagcucuagacugcaga

SEQ ID NO: 98694 - RNA, 20 nt, Human
ccagcucuagaggacaggua

SEQ ID NO: 98695 - RNA, 32 nt, Human
ccagcucuauuccaccaugacaaggggacuua

SEQ ID NO: 98696 - RNA, 32 nt, Human
ccagcucucacaccuacacccacgcacccccu

SEQ ID NO: 98697 - RNA, 32 nt, Human
ccagcucucagacccucuuccucccagguaaa

SEQ ID NO: 98698 - RNA, 32 nt, Human
ccagcucuccacccuccugguuccgcuggccg

SEQ ID NO: 98699 - RNA, 32 nt, Human
ccagcucuccucuaccagugggagaaacugcu

SEQ ID NO: 98700 - RNA, 22 nt, Human
ccagcucuccugggaucacuca

SEQ ID NO: 98701 - RNA, 32 nt, Human
ccagcucuccuucacagacaccucuccugucu

SEQ ID NO: 98702 - RNA, 32 nt, Human
ccagcucucuccccaucccgcuucuucccugg

SEQ ID NO: 98703 - RNA, 18 nt, Human
ccagcucucugccucuug

SEQ ID NO: 98704 - RNA, 19 nt, Human
ccagcucugcagggugggg

SEQ ID NO: 98705 - RNA, 32 nt, Human
ccagcucugcauuauccgaggucacagggccu

SEQ ID NO: 98706 - RNA, 32 nt, Human
ccagcucugcauuugacaaaugccaggaagag

SEQ ID NO: 98707 - RNA, 22 nt, Human
ccagcucugcccccugcugcug

SEQ ID NO: 98708 - RNA, 32 nt, Human
ccagcucugcccucaagguggggauggauggg

SEQ ID NO: 98709 - RNA, 32 nt, Human
ccagcucugccucugacucgcuguguacccuc

SEQ ID NO: 98710 - RNA, 31 nt, Human
ccagcucugccuuugaagcacuuguggccac

SEQ ID NO: 98711 - RNA, 32 nt, Human
ccagcucugcuguccuggcaagugucauugac

SEQ ID NO: 98712 - RNA, 32 nt, Human
ccagcucugggaguuuccagucugauggagga

SEQ ID NO: 98713 - RNA, 32 nt, Human
ccagcucuggucugugcagacucauggccacc

SEQ ID NO: 98714 - RNA, 32 nt, Human
ccagcucuguaaccaguccugucccauuuccu

SEQ ID NO: 98715 - RNA, 32 nt, Human
ccagcucugucacuggucgcugagcuuuugga

SEQ ID NO: 98716 - RNA, 23 nt, Human
ccagcucugucgcugacgggagg

SEQ ID NO: 98717 - RNA, 32 nt, Human
ccagcucugucuggugggugugcagggcaccg

SEQ ID NO: 98718 - RNA, 32 nt, Human
ccagcucuguucaccaccccaaagcacaucac

SEQ ID NO: 98719 - RNA, 21 nt, Human
ccagcucuucucugggagucu

SEQ ID NO: 98720 - RNA, 19 nt, Human
ccagcucuugaagggcuga

SEQ ID NO: 98721 - RNA, 32 nt, Human
ccagcucuuuaagugauccucguucugguggc

SEQ ID NO: 98722 - RNA, 32 nt, Human
ccagcucuuugguccaagagggggcugaguuu

SEQ ID NO: 98723 - RNA, 26 nt, Human
ccagcugaaaaacuagaccugugcca

SEQ ID NO: 98724 - RNA, 32 nt, Human
ccagcugaaacuuuuagguccugggaggaaug

SEQ ID NO: 98725 - RNA, 23 nt, Human
ccagcugaacagggaggagucug

SEQ ID NO: 98726 - RNA, 32 nt, Human
ccagcugaaggcaguggcaggggagcagguuc

SEQ ID NO: 98727 - RNA, 22 nt, Human
ccagcugaaggggauuguggug

SEQ ID NO: 98728 - RNA, 21 nt, Human
ccagcugacaauggacugcca

SEQ ID NO: 98729 - RNA, 32 nt, Human
ccagcugacaccacacugaggcagggaguugg

SEQ ID NO: 98730 - RNA, 32 nt, Human
ccagcugaccaacacggugaaaccccaucucu

SEQ ID NO: 98731 - RNA, 32 nt, Human
ccagcugacgcccucccugccucccagggcag

SEQ ID NO: 98732 - RNA, 32 nt, Human
ccagcugacucugggaggaagacugccucucc

SEQ ID NO: 98733 - RNA, 32 nt, Human
ccagcugacucuguggguuggucuuaaagcaa

SEQ ID NO: 98734 - RNA, 32 nt, Human
ccagcugagaagaguugagggaaagugcugcu

SEQ ID NO: 98735 - RNA, 32 nt, Human
ccagcugagagugugacccugucucuaaagaa

SEQ ID NO: 98736 - RNA, 22 nt, Human
ccagcugagccgauuugugcug

SEQ ID NO: 98737 - RNA, 32 nt, Human
ccagcugagccuccuuaccucccuucagccaa

SEQ ID NO: 98738 - RNA, 22 nt, Human
ccagcugaggaccaccgugcug

SEQ ID NO: 98739 - RNA, 32 nt, Human
ccagcugaggcagaggcugcaagggguggagg

SEQ ID NO: 98740 - RNA, 21 nt, Human
ccagcugaggccccaagugcc

SEQ ID NO: 98741 - RNA, 24 nt, Human
ccagcugaggccucagacuagcca

SEQ ID NO: 98742 - RNA, 32 nt, Human
ccagcugaucaugucagccucaugccccaggc

SEQ ID NO: 98743 - RNA, 32 nt, Human
ccagcugauggaauggaauggaagugacucag

SEQ ID NO: 98744 - RNA, 32 nt, Human
ccagcugauuuuuguauuuuuguucauuugcu

SEQ ID NO: 98745 - RNA, 32 nt, Human
ccagcugcaaacuuucuucaacuuuccuaaau

SEQ ID NO: 98746 - RNA, 32 nt, Human
ccagcugcaaaguguuuuguaccagugaauuu

SEQ ID NO: 98747 - RNA, 32 nt, Human
ccagcugcaacggcuccacuuugcaggcuugc

SEQ ID NO: 98748 - RNA, 19 nt, Human
ccagcugcagaccaugcca

SEQ ID NO: 98749 - RNA, 32 nt, Human
ccagcugcagagcuuguggaggccauggggcg

SEQ ID NO: 98750 - RNA, 32 nt, Human
ccagcugcagauaacucaaagccaucccuuuu

SEQ ID NO: 98751 - RNA, 32 nt, Human
ccagcugcagcaaggagguggggaaggagggc

SEQ ID NO: 98752 - RNA, 32 nt, Human
ccagcugcagcagguccugggccugcuucccu

SEQ ID NO: 98753 - RNA, 18 nt, Human
ccagcugcagccaaguuc

SEQ ID NO: 98754 - RNA, 32 nt, Human
ccagcugcagcccaggcaggagcagucgccuu

SEQ ID NO: 98755 - RNA, 32 nt, Human
ccagcugcagccgccuccggagcuucggagcg

SEQ ID NO: 98756 - RNA, 32 nt, Human
ccagcugcaguugugguaaucuugggaggcag

SEQ ID NO: 98757 - RNA, 24 nt, Human
ccagcugcaugcacuuacggcagg

SEQ ID NO: 98758 - RNA, 22 nt, Human
ccagcugcauggaagguggagg

SEQ ID NO: 98759 - RNA, 22 nt, Human
ccagcugcauucccacgggugg

SEQ ID NO: 98760 - RNA, 32 nt, Human
ccagcugccagccugagaagccugucuuuccc

SEQ ID NO: 98761 - RNA, 32 nt, Human
ccagcugccaucaggccccacccaggauggga

SEQ ID NO: 98762 - RNA, 32 nt, Human
ccagcugccccaggacccccggaagccccgcu

SEQ ID NO: 98763 - RNA, 22 nt, Human
ccagcugccccucccugccagc

SEQ ID NO: 98764 - RNA, 21 nt, Human
ccagcugccccuuucccuccu

SEQ ID NO: 98765 - RNA, 25 nt, Human
ccagcugcccgcccugugggcauuu

SEQ ID NO: 98766 - RNA, 32 nt, Human
ccagcugcccguuuccucccauggcccaguau

SEQ ID NO: 98767 - RNA, 31 nt, Human
ccagcugccgcaauuuccaugccaggauauu

SEQ ID NO: 98768 - RNA, 21 nt, Human
ccagcugccucccugaucccu

SEQ ID NO: 98769 - RNA, 22 nt, Human
ccagcugccuggagagggucuc

SEQ ID NO: 98770 - RNA, 32 nt, Human
ccagcugccuggucaguggcauagccagccaa

SEQ ID NO: 98771 - RNA, 32 nt, Human
ccagcugccuucucugcccugugcccacuccc

SEQ ID NO: 98772 - RNA, 32 nt, Human
ccagcugccuuuguuucauuucaccucagcac

SEQ ID NO: 98773 - RNA, 32 nt, Human
ccagcugcgccgcggcucacagcugacgaugg

SEQ ID NO: 98774 - RNA, 32 nt, Human
ccagcugcggaagccacagcugugucccacgu

SEQ ID NO: 98775 - RNA, 24 nt, Human
ccagcugcggucaggacuguggug

SEQ ID NO: 98776 - RNA, 20 nt, Human
ccagcugcgugggguacagg

SEQ ID NO: 98777 - RNA, 32 nt, Human
ccagcugcuccgagagaucaaaggacacaagu

SEQ ID NO: 98778 - RNA, 32 nt, Human
ccagcugcuccgaggacccaggaaaggcagga

SEQ ID NO: 98779 - RNA, 32 nt, Human
ccagcugcuccuccuccguucauuuucugccc

SEQ ID NO: 98780 - RNA, 32 nt, Human
ccagcugcucugggagaaaggaaagccgggga

SEQ ID NO: 98781 - RNA, 26 nt, Human
ccagcugcucuugucacugucucuga

SEQ ID NO: 98782 - RNA, 32 nt, Human
ccagcugcugagaaggccuugagggaaguaga

SEQ ID NO: 98783 - RNA, 32 nt, Human
ccagcugcugagcugcucacccuuuauccacu

SEQ ID NO: 98784 - RNA, 32 nt, Human
ccagcugcugcucuccucgacauggacccuga

SEQ ID NO: 98785 - RNA, 23 nt, Human
ccagcugcugcugaggugggagg

SEQ ID NO: 98786 - RNA, 18 nt, Human
ccagcugcuggcugcaga

SEQ ID NO: 98787 - RNA, 32 nt, Human
ccagcugcugucuucuggacaggcucugcuuc

SEQ ID NO: 98788 - RNA, 32 nt, Human
ccagcugcuguggauccucuuguugaccucau

SEQ ID NO: 98789 - RNA, 22 nt, Human
ccagcugcuucagcuucuccuc

SEQ ID NO: 98790 - RNA, 32 nt, Human
ccagcuggaagaggcgguggcggcgggucggg

SEQ ID NO: 98791 - RNA, 32 nt, Human
ccagcuggaagcauaaaacacagggagcuggu

SEQ ID NO: 98792 - RNA, 32 nt, Human
ccagcuggagccaagaagcacagagacacaga

SEQ ID NO: 98793 - RNA, 32 nt, Human
ccagcuggagccucuugagggagaugagaggc

SEQ ID NO: 98794 - RNA, 32 nt, Human
ccagcuggagguagcccaggaggcagugccgc

SEQ ID NO: 98795 - RNA, 18 nt, Human
ccagcuggagugcagugg

SEQ ID NO: 98796 - RNA, 22 nt, Human
ccagcuggcaguugagcugccu

SEQ ID NO: 98797 - RNA, 32 nt, Human
ccagcuggcaucuugacugcaacucaugagcg

SEQ ID NO: 98798 - RNA, 22 nt, Human
ccagcuggccacccuggccuca

SEQ ID NO: 98799 - RNA, 20 nt, Human
ccagcuggccagggcauggc

SEQ ID NO: 98800 - RNA, 32 nt, Human
ccagcuggcccaggauuucacagucgaaaagg

SEQ ID NO: 98801 - RNA, 32 nt, Human
ccagcuggcccuuggucuccucucuuuccucc

SEQ ID NO: 98802 - RNA, 32 nt, Human
ccagcuggccugcugcucugcacagcaccggc

SEQ ID NO: 98803 - RNA, 32 nt, Human
ccagcuggccuuccccagccugcaaggagccu

SEQ ID NO: 98804 - RNA, 20 nt, Human
ccagcuggcuccuggcccca

SEQ ID NO: 98805 - RNA, 32 nt, Human
ccagcuggcugcacucuagagggugcuuugua

SEQ ID NO: 98806 - RNA, 32 nt, Human
ccagcuggcugcagcacuuguagcaugcacau

SEQ ID NO: 98807 - RNA, 32 nt, Human
ccagcuggcugcaggucucucagggcuggcac

SEQ ID NO: 98808 - RNA, 32 nt, Human
ccagcugggaagcugcucaccaggccuagaac

SEQ ID NO: 98809 - RNA, 32 nt, Human
ccagcugggagaugaaugcaacucugcugccu

SEQ ID NO: 98810 - RNA, 32 nt, Human
ccagcugggaggagcuugccugccuggccaca

SEQ ID NO: 98811 - RNA, 32 nt, Human
ccagcugggaggaggggcuggggaggaucugc

SEQ ID NO: 98812 - RNA, 32 nt, Human
ccagcugggaggaucccuugagccuaggaguu

SEQ ID NO: 98813 - RNA, 32 nt, Human
ccagcugggagguuucuaggcagcagcaaaac

SEQ ID NO: 98814 - RNA, 32 nt, Human
ccagcugggauuacagguaugagccaccgcac

SEQ ID NO: 98815 - RNA, 32 nt, Human
ccagcugggcaacauggugaaaccccaucucc

SEQ ID NO: 98816 - RNA, 32 nt, Human
ccagcugggcagggccgguguggggcuggagc

SEQ ID NO: 98817 - RNA, 20 nt, Human
ccagcugggccauuuuucca

SEQ ID NO: 98818 - RNA, 32 nt, Human
ccagcugggcugucccaaauguuaccauuuga

SEQ ID NO: 98819 - RNA, 21 nt, Human
ccagcuggggccucuggggug

SEQ ID NO: 98820 - RNA, 22 nt, Human
ccagcugggugacagagugaga

SEQ ID NO: 98821 - RNA, 17 nt, Human
ccagcugggugcagugg

SEQ ID NO: 98822 - RNA, 27 nt, Human
ccagcugguccgaacaccagggcagca

SEQ ID NO: 98823 - RNA, 19 nt, Human
ccagcugguccuuuuccca

SEQ ID NO: 98824 - RNA, 32 nt, Human
ccagcuggucucaaaccccugggcucaagcaa

SEQ ID NO: 98825 - RNA, 32 nt, Human
ccagcuggucucaaacuccuaaccucaaguga

SEQ ID NO: 98826 - RNA, 32 nt, Human
ccagcuggucucaaacuccugaccucagguga

SEQ ID NO: 98827 - RNA, 32 nt, Human
ccagcuggucucaaacugcugggcuuauggga

SEQ ID NO: 98828 - RNA, 32 nt, Human
ccagcuggucucauacuccucaguucacgcau

SEQ ID NO: 98829 - RNA, 32 nt, Human
ccagcuggucuguauuauuggaaguugcaguu

SEQ ID NO: 98830 - RNA, 32 nt, Human
ccagcuggugcugacccacaaggaccuccucu

SEQ ID NO: 98831 - RNA, 31 nt, Human
ccagcuggugcuucuuuauauuuagaaauua

SEQ ID NO: 98832 - RNA, 22 nt, Human
ccagcuggugggaauucugcug

SEQ ID NO: 98833 - RNA, 28 nt, Human
ccagcugguggugcugcccuaucagaug

SEQ ID NO: 98834 - RNA, 32 nt, Human
ccagcugguguugcagagggaggucaacguga

SEQ ID NO: 98835 - RNA, 32 nt, Human
ccagcugguuccucucuggcgccuucugaacc

SEQ ID NO: 98836 - RNA, 32 nt, Human
ccagcuguaaauaggcuguggccagugccugg

SEQ ID NO: 98837 - RNA, 32 nt, Human
ccagcuguauuuggaaaagccaugucucacuc

SEQ ID NO: 98838 - RNA, 23 nt, Human
ccagcugucaggcaagcccagug

SEQ ID NO: 98839 - RNA, 32 nt, Human
ccagcugucauuguuccuuccccagaagcuaa

SEQ ID NO: 98840 - RNA, 17 nt, Human
ccagcuguccccacgcc

SEQ ID NO: 98841 - RNA, 32 nt, Human
ccagcuguccccucagcuaaggggcuuaguuu

SEQ ID NO: 98842 - RNA, 32 nt, Human
ccagcuguccucaucccugcccagcaggcugc

SEQ ID NO: 98843 - RNA, 18 nt, Human
ccagcuguccuggggcca

SEQ ID NO: 98844 - RNA, 32 nt, Human
ccagcugucuagcucccucccuucuucccagc

SEQ ID NO: 98845 - RNA, 32 nt, Human
ccagcugucugacacacaaauggucuuuucag

SEQ ID NO: 98846 - RNA, 20 nt, Human
ccagcugugaaauggggcca

SEQ ID NO: 98847 - RNA, 32 nt, Human
ccagcugugccauguucgagaccugggcuggc

SEQ ID NO: 98848 - RNA, 24 nt, Human
ccagcugugccccucccccagggg

SEQ ID NO: 98849 - RNA, 32 nt, Human
ccagcugugcuaugcacaccucagguugaaga

SEQ ID NO: 98850 - RNA, 24 nt, Human
ccagcugugcuucugggucaggug

SEQ ID NO: 98851 - RNA, 32 nt, Human
ccagcuguggaauuugggggugaaggguguga

SEQ ID NO: 98852 - RNA, 24 nt, Human
ccagcuguggagcgugccgggggg

SEQ ID NO: 98853 - RNA, 32 nt, Human
ccagcugugggaugucaaguaauuccagggac

SEQ ID NO: 98854 - RNA, 32 nt, Human
ccagcugugggccccagaaagccagccugccu

SEQ ID NO: 98855 - RNA, 32 nt, Human
ccagcugugggugagagcagggcacuguccag

SEQ ID NO: 98856 - RNA, 20 nt, Human
ccagcuguggugaugggagg

SEQ ID NO: 98857 - RNA, 19 nt, Human
ccagcuguguccuggguua

SEQ ID NO: 98858 - RNA, 22 nt, Human
ccagcuguguggacucaggggg

SEQ ID NO: 98859 - RNA, 32 nt, Human
ccagcuguuacccagcccggggcaggugcagc

SEQ ID NO: 98860 - RNA, 32 nt, Human
ccagcuguuaucugccagaucuucccaucuug

SEQ ID NO: 98861 - RNA, 16 nt, Human
ccagcuguucauacca

SEQ ID NO: 98862 - RNA, 19 nt, Human
ccagcuguuccccagguca

SEQ ID NO: 98863 - RNA, 32 nt, Human
ccagcuguuccugcgagggccaccuccucagg

SEQ ID NO: 98864 - RNA, 32 nt, Human
ccagcuguucucugucagcacacccaccucca

SEQ ID NO: 98865 - RNA, 32 nt, Human
ccagcuguugucucacacuuccuugaaguucc

SEQ ID NO: 98866 - RNA, 32 nt, Human
ccagcuguuuaacacuauccugggcaaauguu

SEQ ID NO: 98867 - RNA, 32 nt, Human
ccagcuguuuccaggaucuuccagcaugcugc

SEQ ID NO: 98868 - RNA, 32 nt, Human
ccagcuguuuuccuuugagcagucuccuuuua

SEQ ID NO: 98869 - RNA, 32 nt, Human
ccagcuguuuuugugcucacaagcucuagcga

SEQ ID NO: 98870 - RNA, 32 nt, Human
ccagcuuaaggagaucaagauauuaagaggua

SEQ ID NO: 98871 - RNA, 22 nt, Human
ccagcuuacugccuccccuccc

SEQ ID NO: 98872 - RNA, 32 nt, Human
ccagcuuacugccuccccucccccucacgccu

SEQ ID NO: 98873 - RNA, 32 nt, Human
ccagcuuauagugcuuugucauggcagcccag

SEQ ID NO: 98874 - RNA, 32 nt, Human
ccagcuuaucuccuccuccgccuguguaaaug

SEQ ID NO: 98875 - RNA, 32 nt, Human
ccagcuuaugccaggcccugggcugaguacug

SEQ ID NO: 98876 - RNA, 32 nt, Human
ccagcuuauugccaaagggaaaaaggauagcc

SEQ ID NO: 98877 - RNA, 32 nt, Human
ccagcuucaagaauguguuuucaugcccggcc

SEQ ID NO: 98878 - RNA, 32 nt, Human
ccagcuucaccuccuuuucuggacccgagggc

SEQ ID NO: 98879 - RNA, 27 nt, Human
ccagcuucagaaagcacauacagcauc

SEQ ID NO: 98880 - RNA, 32 nt, Human
ccagcuucagcccgggauccagcuccagcucc

SEQ ID NO: 98881 - RNA, 32 nt, Human
ccagcuucagcgaccaccaguccuuugcgguc

SEQ ID NO: 98882 - RNA, 32 nt, Human
ccagcuucauuccucagaguaaaccaaccuug

SEQ ID NO: 98883 - RNA, 32 nt, Human
ccagcuucauuuucucugccuuuugggagagg

SEQ ID NO: 98884 - RNA, 21 nt, Human
ccagcuuccacucagccacca

SEQ ID NO: 98885 - RNA, 21 nt, Human
ccagcuuccagcacaaccgca

SEQ ID NO: 98886 - RNA, 19 nt, Human
ccagcuuccagcccuccuc

SEQ ID NO: 98887 - RNA, 32 nt, Human
ccagcuuccaggggacugucacuguggacgcc

SEQ ID NO: 98888 - RNA, 21 nt, Human
ccagcuucccagggcgggagg

SEQ ID NO: 98889 - RNA, 20 nt, Human
ccagcuuccccgcccagcuu

SEQ ID NO: 98890 - RNA, 21 nt, Human
ccagcuuccccgucccgcccu

SEQ ID NO: 98891 - RNA, 18 nt, Human
ccagcuucccgacuccca

SEQ ID NO: 98892 - RNA, 32 nt, Human
ccagcuucccgaguagcugggauuacaggcgc

SEQ ID NO: 98893 - RNA, 22 nt, Human
ccagcuucccucugcaccccca

SEQ ID NO: 98894 - RNA, 18 nt, Human
ccagcuucccucugcugu

SEQ ID NO: 98895 - RNA, 23 nt, Human
ccagcuucccuuggucagcccca

SEQ ID NO: 98896 - RNA, 19 nt, Human
ccagcuucccuuugcccca

SEQ ID NO: 98897 - RNA, 32 nt, Human
ccagcuuccgccucccccauccugggcgcccc

SEQ ID NO: 98898 - RNA, 21 nt, Human
ccagcuuccggacuggccgca

SEQ ID NO: 98899 - RNA, 32 nt, Human
ccagcuuccuccaguggccuuccccagcaggc

SEQ ID NO: 98900 - RNA, 32 nt, Human
ccagcuuccuggagcccacccuuuaagccuug

SEQ ID NO: 98901 - RNA, 32 nt, Human
ccagcuuccugucccugugcucacugccccca

SEQ ID NO: 98902 - RNA, 32 nt, Human
ccagcuuccuucaggacccugcuucugaguga

SEQ ID NO: 98903 - RNA, 32 nt, Human
ccagcuucgcauccaucucccccaccccguaa

SEQ ID NO: 98904 - RNA, 32 nt, Human
ccagcuucgucuguucucaauuuggaaucaug

SEQ ID NO: 98905 - RNA, 22 nt, Human
ccagcuucucacuccaguuuca

SEQ ID NO: 98906 - RNA, 32 nt, Human
ccagcuucucaggagucugaggcaggagaauu

SEQ ID NO: 98907 - RNA, 18 nt, Human
ccagcuucuccuugggca

SEQ ID NO: 98908 - RNA, 22 nt, Human
ccagcuucuccuugggcagcca

SEQ ID NO: 98909 - RNA, 20 nt, Human
ccagcuucucgucggcccca

SEQ ID NO: 98910 - RNA, 32 nt, Human
ccagcuucucucagagucucccccucugcagc

SEQ ID NO: 98911 - RNA, 25 nt, Human
ccagcuucucucuccagggugcuua

SEQ ID NO: 98912 - RNA, 32 nt, Human
ccagcuucucucucccugucacacacuggacc

SEQ ID NO: 98913 - RNA, 32 nt, Human
ccagcuucucugcuucucagcugccaucucca

SEQ ID NO: 98914 - RNA, 22 nt, Human
ccagcuucugccuguacugcug

SEQ ID NO: 98915 - RNA, 18 nt, Human
ccagcuucuggcaacugc

SEQ ID NO: 98916 - RNA, 32 nt, Human
ccagcuucuucuccuggauccaguagaguuuc

SEQ ID NO: 98917 - RNA, 32 nt, Human
ccagcuucuugcucuugacccugcacuguaag

SEQ ID NO: 98918 - RNA, 32 nt, Human
ccagcuugaccaacauggagaaaccucguuuc

SEQ ID NO: 98919 - RNA, 21 nt, Human
ccagcuugagcaacagaggga

SEQ ID NO: 98920 - RNA, 32 nt, Human
ccagcuugagcaacauagugaaauccugucua

SEQ ID NO: 98921 - RNA, 32 nt, Human
ccagcuugauguccacuggacacuggcaacuu

SEQ ID NO: 98922 - RNA, 22 nt, Human
ccagcuugcuccccugcccuga

SEQ ID NO: 98923 - RNA, 19 nt, Human
ccagcuugcugacugcaga

SEQ ID NO: 98924 - RNA, 22 nt, Human
ccagcuugcugcugcccaaagc

SEQ ID NO: 98925 - RNA, 19 nt, Human
ccagcuuggagcagagacc

SEQ ID NO: 98926 - RNA, 22 nt, Human
ccagcuuggaggccugguccug

SEQ ID NO: 98927 - RNA, 18 nt, Human
ccagcuuggaucuuccua

SEQ ID NO: 98928 - RNA, 19 nt, Human
ccagcuuggauuucaccca

SEQ ID NO: 98929 - RNA, 32 nt, Human
ccagcuuggccaacauggugaaaccucaucuc

SEQ ID NO: 98930 - RNA, 32 nt, Human
ccagcuugggaccuccuugugagaggcucuga

SEQ ID NO: 98931 - RNA, 24 nt, Human
ccagcuugggagacaagagcgaaa

SEQ ID NO: 98932 - RNA, 23 nt, Human
ccagcuugggcaacaaagugaga

SEQ ID NO: 98933 - RNA, 32 nt, Human
ccagcuugggcaacaaagugagacuccaucac

SEQ ID NO: 98934 - RNA, 23 nt, Human
ccagcuugggcaacaauagcgaa

SEQ ID NO: 98935 - RNA, 32 nt, Human
ccagcuugggcaacaauagcgaaccuccaucu

SEQ ID NO: 98936 - RNA, 19 nt, Human
ccagcuugggcaacagagc

SEQ ID NO: 98937 - RNA, 23 nt, Human
ccagcuugggcaacagaguaaga

SEQ ID NO: 98938 - RNA, 23 nt, Human
ccagcuugggcaacagagugaga

SEQ ID NO: 98939 - RNA, 32 nt, Human
ccagcuugggcaacagagugagacuccaucuc

SEQ ID NO: 98940 - RNA, 23 nt, Human
ccagcuugggcaacagggcgaga

SEQ ID NO: 98941 - RNA, 32 nt, Human
ccagcuugggcaacagggcgagaccuuguuua

SEQ ID NO: 98942 - RNA, 19 nt, Human
ccagcuugggcaacauagc

SEQ ID NO: 98943 - RNA, 23 nt, Human
ccagcuugggcaacauagcaaga

SEQ ID NO: 98944 - RNA, 23 nt, Human
ccagcuugggcaacauagggaga

SEQ ID NO: 98945 - RNA, 22 nt, Human
ccagcuugggcaacauagugaa

SEQ ID NO: 98946 - RNA, 32 nt, Human
ccagcuugggcaacauagugaacccugucugu

SEQ ID NO: 98947 - RNA, 23 nt, Human
ccagcuugggcaacauagugaga

SEQ ID NO: 98948 - RNA, 32 nt, Human
ccagcuugggcaacauagugagacccugucuc

SEQ ID NO: 98949 - RNA, 20 nt, Human
ccagcuugggcaacauggag

SEQ ID NO: 98950 - RNA, 32 nt, Human
ccagcuugggcaacauggagaaaccccaucuu

SEQ ID NO: 98951 - RNA, 19 nt, Human
ccagcuugggcaacauggc

SEQ ID NO: 98952 - RNA, 32 nt, Human
ccagcuugggcaacauggcaaagccccaucuc

SEQ ID NO: 98953 - RNA, 32 nt, Human
ccagcuugggcaacauggcgaaaccccgucuc

SEQ ID NO: 98954 - RNA, 22 nt, Human
ccagcuugggcaacauggugaa

SEQ ID NO: 98955 - RNA, 32 nt, Human
ccagcuugggcaacauggugaaaccugucucu

SEQ ID NO: 98956 - RNA, 32 nt, Human
ccagcuugggcaacauggugaaacuucucuac

SEQ ID NO: 98957 - RNA, 18 nt, Human
ccagcuugggcaacgagc

SEQ ID NO: 98958 - RNA, 19 nt, Human
ccagcuugggcaacguagc

SEQ ID NO: 98959 - RNA, 23 nt, Human
ccagcuugggcaauguggugaaa

SEQ ID NO: 98960 - RNA, 19 nt, Human
ccagcuugggcaccagagc

SEQ ID NO: 98961 - RNA, 19 nt, Human
ccagcuugggcgacagagc

SEQ ID NO: 98962 - RNA, 23 nt, Human
ccagcuugggcgacagagcgaga

SEQ ID NO: 98963 - RNA, 26 nt, Human
ccagcuuggggcucacgccuguaauc

SEQ ID NO: 98964 - RNA, 19 nt, Human
ccagcuugggugacagagc

SEQ ID NO: 98965 - RNA, 32 nt, Human
ccagcuugggugacagagcaagagucugucaa

SEQ ID NO: 98966 - RNA, 23 nt, Human
ccagcuugggugacagagcgaga

SEQ ID NO: 98967 - RNA, 32 nt, Human
ccagcuuguccaccugaggaagaaaugcuuuu

SEQ ID NO: 98968 - RNA, 21 nt, Human
ccagcuugucccagccacucu

SEQ ID NO: 98969 - RNA, 24 nt, Human
ccagcuuguccccucgaacccucu

SEQ ID NO: 98970 - RNA, 23 nt, Human
ccagcuugugcaacaaagugaga

SEQ ID NO: 98971 - RNA, 32 nt, Human
ccagcuuuauucaccugacuguuuccagagac

SEQ ID NO: 98972 - RNA, 17 nt, Human
ccagcuuucaagggcga

SEQ ID NO: 98973 - RNA, 32 nt, Human
ccagcuuuccaucacccauaugguagggagga

SEQ ID NO: 98974 - RNA, 18 nt, Human
ccagcuuucccacuuuca

SEQ ID NO: 98975 - RNA, 32 nt, Human
ccagcuuucccacuuucagcaguccuuugcuc

SEQ ID NO: 98976 - RNA, 32 nt, Human
ccagcuuucccuccuggccagaaauguucagc

SEQ ID NO: 98977 - RNA, 32 nt, Human
ccagcuuucggcgccaaccacacagccagcaa

SEQ ID NO: 98978 - RNA, 32 nt, Human
ccagcuuucugccugucugccugccggcacug

SEQ ID NO: 98979 - RNA, 32 nt, Human
ccagcuuucuuucuguuagcauuuucugaugu

SEQ ID NO: 98980 - RNA, 32 nt, Human
ccagcuuugcagccccagucuugagcccccaa

SEQ ID NO: 98981 - RNA, 17 nt, Human
ccagcuuuggcugcaga

SEQ ID NO: 98982 - RNA, 32 nt, Human
ccagcuuugggcugaauggcagcacccacgcu

SEQ ID NO: 98983 - RNA, 32 nt, Human
ccagcuuuguuaaacuguccgugagacaagaa

SEQ ID NO: 98984 - RNA, 32 nt, Human
ccagcuuuuaacaaucuaacuaaugcccucuc

SEQ ID NO: 98985 - RNA, 32 nt, Human
ccagcuuuucauaagugguauguuuaauuggu

SEQ ID NO: 98986 - RNA, 32 nt, Human
ccagcuuuuccaagcaucauucaccaaagcau

SEQ ID NO: 98987 - RNA, 32 nt, Human
ccagcuuuucccucacacaccugccgacucgg

SEQ ID NO: 98988 - RNA, 21 nt, Human
ccagcuuuucugggggucuca

SEQ ID NO: 98989 - RNA, 32 nt, Human
ccagcuuuugcagccaaucagguagcuuaaug

SEQ ID NO: 98990 - RNA, 32 nt, Human
ccagcuuuuucucucaggguucugagucagag

SEQ ID NO: 98991 - RNA, 32 nt, Human
ccagcuuuuugagaaaggggaugugaugguga

SEQ ID NO: 98992 - RNA, 32 nt, Human
ccaggaaaaaccagacagacuuucacacuaaa

SEQ ID NO: 98993 - RNA, 32 nt, Human
ccaggaaaaagaaaccagaaaguauugaaaac

SEQ ID NO: 98994 - RNA, 18 nt, Human
ccaggaaaaggagcucua

SEQ ID NO: 98995 - RNA, 32 nt, Human
ccaggaaaagggaagaauuugcaccaagaagu

SEQ ID NO: 98996 - RNA, 32 nt, Human
ccaggaaacagccauguggguccuuucugugc

SEQ ID NO: 98997 - RNA, 32 nt, Human
ccaggaaagaagcagaagccuccuggccuuac

SEQ ID NO: 98998 - RNA, 26 nt, Human
ccaggaaagaggagaugcugauucug

SEQ ID NO: 98999 - RNA, 32 nt, Human
ccaggaaagcagcugcacucagacaaugccuu

SEQ ID NO: 99000 - RNA, 32 nt, Human
ccaggaaagcaggcgacggauguggauccuga

SEQ ID NO: 99001 - RNA, 32 nt, Human
ccaggaaagccaagguggaggcugagguggcu

SEQ ID NO: 99002 - RNA, 32 nt, Human
ccaggaaagccgaagcccccagaggagccccc

SEQ ID NO: 99003 - RNA, 21 nt, Human
ccaggaaaggagggggcucag

SEQ ID NO: 99004 - RNA, 32 nt, Human
ccaggaaagguguggcuggaagcacugaaccu

SEQ ID NO: 99005 - RNA, 24 nt, Human
ccaggaaauagagguugcagugag

SEQ ID NO: 99006 - RNA, 32 nt, Human
ccaggaaaugaucuuccacuugagcaaccuuu

SEQ ID NO: 99007 - RNA, 19 nt, Human
ccaggaaaugauuuucuca

SEQ ID NO: 99008 - RNA, 32 nt, Human
ccaggaaauuccaauacaucagugcaugugga

SEQ ID NO: 99009 - RNA, 24 nt, Human
ccaggaaauugaggcugcagugag

SEQ ID NO: 99010 - RNA, 24 nt, Human
ccaggaaauuggggcugcagugag

SEQ ID NO: 99011 - RNA, 32 nt, Human
ccaggaacacccucccagcaggggaugggaac

SEQ ID NO: 99012 - RNA, 32 nt, Human
ccaggaacagagaagagauuacaccagcggua

SEQ ID NO: 99013 - RNA, 32 nt, Human
ccaggaacauaauguggaugugacuuaugaac

SEQ ID NO: 99014 - RNA, 32 nt, Human
ccaggaaccccggaagagguagcucacgcgau

SEQ ID NO: 99015 - RNA, 32 nt, Human
ccaggaacccugugguucccaagaacaauuua

SEQ ID NO: 99016 - RNA, 32 nt, Human
ccaggaacccuugagguucuucuucacaaggc

SEQ ID NO: 99017 - RNA, 32 nt, Human
ccaggaaccuugccacaccugcaccugcgucc

SEQ ID NO: 99018 - RNA, 32 nt, Human
ccaggaaccuugccacaccugcaccugugucc

SEQ ID NO: 99019 - RNA, 32 nt, Human
ccaggaacggguagucugacacggugauuauc

SEQ ID NO: 99020 - RNA, 32 nt, Human
ccaggaacuaccccaugaucuucuauucucau

SEQ ID NO: 99021 - RNA, 31 nt, Human
ccaggaacucucagggauaccaaaaucugca

SEQ ID NO: 99022 - RNA, 32 nt, Human
ccaggaacugggaccaccaucuugcugaugga

SEQ ID NO: 99023 - RNA, 32 nt, Human
ccaggaacuugagugacauugaccucauggca

SEQ ID NO: 99024 - RNA, 32 nt, Human
ccaggaagaaugagguacauggacaacuggag

SEQ ID NO: 99025 - RNA, 32 nt, Human
ccaggaagaccaccugcuuuucugacacuguc

SEQ ID NO: 99026 - RNA, 32 nt, Human
ccaggaagacgaggcugcauccuggccccugc

SEQ ID NO: 99027 - RNA, 19 nt, Human
ccaggaagacuauggggua

SEQ ID NO: 99028 - RNA, 21 nt, Human
ccaggaagacuccgcaguggg

SEQ ID NO: 99029 - RNA, 32 nt, Human
ccaggaagacuuguugcagguaggugaugguu

SEQ ID NO: 99030 - RNA, 32 nt, Human
ccaggaagagagcugugaccagcagcgucccu

SEQ ID NO: 99031 - RNA, 24 nt, Human
ccaggaagaggagguugcagugag

SEQ ID NO: 99032 - RNA, 19 nt, Human
ccaggaagaucuggccucu

SEQ ID NO: 99033 - RNA, 28 nt, Human
ccaggaagcaagcggagguugcagugag

SEQ ID NO: 99034 - RNA, 32 nt, Human
ccaggaagcaagcggagguugcagugaguuga

SEQ ID NO: 99035 - RNA, 21 nt, Human
ccaggaagcagagguugcagu

SEQ ID NO: 99036 - RNA, 24 nt, Human
ccaggaagcagagguugcagugag

SEQ ID NO: 99037 - RNA, 23 nt, Human
ccaggaagcagagguugcgguga

SEQ ID NO: 99038 - RNA, 24 nt, Human
ccaggaagcagagguugcggugag

SEQ ID NO: 99039 - RNA, 24 nt, Human
ccaggaagcagcugagcccaagga

SEQ ID NO: 99040 - RNA, 23 nt, Human
ccaggaagccagcccgcacccca

SEQ ID NO: 99041 - RNA, 32 nt, Human
ccaggaagcccggcaggagaauucugccagau

SEQ ID NO: 99042 - RNA, 32 nt, Human
ccaggaagccuccuggucuucuagaauccugg

SEQ ID NO: 99043 - RNA, 24 nt, Human
ccaggaagcggaggcugcagugag

SEQ ID NO: 99044 - RNA, 24 nt, Human
ccaggaagcggagguugcaaugag

SEQ ID NO: 99045 - RNA, 24 nt, Human
ccaggaagcggagguugcagugag

SEQ ID NO: 99046 - RNA, 23 nt, Human
ccaggaagcgggguugcagugag

SEQ ID NO: 99047 - RNA, 32 nt, Human
ccaggaagcuacggagagaagcagccagcaug

SEQ ID NO: 99048 - RNA, 32 nt, Human
ccaggaaggaagagcagcagcagggugggaga

SEQ ID NO: 99049 - RNA, 17 nt, Human
ccaggaaggaagcuguu

SEQ ID NO: 99050 - RNA, 18 nt, Human
ccaggaaggagccuggga

SEQ ID NO: 99051 - RNA, 24 nt, Human
ccaggaaggcagagauugcaguga

SEQ ID NO: 99052 - RNA, 25 nt, Human
ccaggaaggcagagauugcagugag

SEQ ID NO: 99053 - RNA, 32 nt, Human
ccaggaaggcagagauugcagugagcugagau

SEQ ID NO: 99054 - RNA, 24 nt, Human
ccaggaaggcagagguugcacuga

SEQ ID NO: 99055 - RNA, 25 nt, Human
ccaggaaggcagagguugcacugag

SEQ ID NO: 99056 - RNA, 17 nt, Human
ccaggaaggcagcuguc

SEQ ID NO: 99057 - RNA, 32 nt, Human
ccaggaaggcucaggagcccuaccucccugcc

SEQ ID NO: 99058 - RNA, 21 nt, Human
ccaggaagggacccagccuca

SEQ ID NO: 99059 - RNA, 32 nt, Human
ccaggaaggggaggagagugagggccaagaac

SEQ ID NO: 99060 - RNA, 32 nt, Human
ccaggaaggggguccacccagcaaagaguggg

SEQ ID NO: 99061 - RNA, 21 nt, Human
ccaggaaggguaucugggaug

SEQ ID NO: 99062 - RNA, 32 nt, Human
ccaggaaggucuuacccccucuucuauuuauu

SEQ ID NO: 99063 - RNA, 32 nt, Human
ccaggaagguugagguugcagugagcuaugau

SEQ ID NO: 99064 - RNA, 23 nt, Human
ccaggaagucaaggcugcaguga

SEQ ID NO: 99065 - RNA, 24 nt, Human
ccaggaagucaaggcugcagugag

SEQ ID NO: 99066 - RNA, 32 nt, Human
ccaggaaguccuaagaaguggggcagauggca

SEQ ID NO: 99067 - RNA, 24 nt, Human
ccaggaaguggagacugcagugag

SEQ ID NO: 99068 - RNA, 24 nt, Human
ccaggaaguggagauugcagugag

SEQ ID NO: 99069 - RNA, 23 nt, Human
ccaggaaguggaggcugcaguga

SEQ ID NO: 99070 - RNA, 24 nt, Human
ccaggaaguggagguugcagugag

SEQ ID NO: 99071 - RNA, 24 nt, Human
ccaggaaguggcaguugcagugag

SEQ ID NO: 99072 - RNA, 32 nt, Human
ccaggaaguucugccuuuucuuuucuuucggu

SEQ ID NO: 99073 - RNA, 23 nt, Human
ccaggaaguugaggcugcaauga

SEQ ID NO: 99074 - RNA, 24 nt, Human
ccaggaaguugaggcugcagugag

SEQ ID NO: 99075 - RNA, 32 nt, Human
ccaggaaguugaguuuucaagaugccuuguug

SEQ ID NO: 99076 - RNA, 32 nt, Human
ccaggaaucucaggaugaaucagucuagaucg

SEQ ID NO: 99077 - RNA, 32 nt, Human
ccaggaaucugagcccagccugggcgacaaag

SEQ ID NO: 99078 - RNA, 18 nt, Human
ccaggaaucugcuuugga

SEQ ID NO: 99079 - RNA, 32 nt, Human
ccaggaauggguuuaaaaauguacauuuuacu

SEQ ID NO: 99080 - RNA, 32 nt, Human
ccaggaauguuugcaugaccuaccucaggagg

SEQ ID NO: 99081 - RNA, 32 nt, Human
ccaggaauguuuuugugccacugacuuuagau

SEQ ID NO: 99082 - RNA, 23 nt, Human
ccaggaauuagagguugcaguga

SEQ ID NO: 99083 - RNA, 24 nt, Human
ccaggaauuagagguugcagugag

SEQ ID NO: 99084 - RNA, 32 nt, Human
ccaggaauucaagaccagccugaguaacauga

SEQ ID NO: 99085 - RNA, 32 nt, Human
ccaggaauucaagaccagccugggcaacacag

SEQ ID NO: 99086 - RNA, 32 nt, Human
ccaggaauucaagaccagccugggcaacaugg

SEQ ID NO: 99087 - RNA, 32 nt, Human
ccaggaauucaagaccagccugggcaacucag

SEQ ID NO: 99088 - RNA, 32 nt, Human
ccaggaauucaaggccagccugggcaacauag

SEQ ID NO: 99089 - RNA, 32 nt, Human
ccaggaauucaaguccaaucugggcaacaugg

SEQ ID NO: 99090 - RNA, 32 nt, Human
ccaggaauucgaaaucagccuaggcaacauag

SEQ ID NO: 99091 - RNA, 32 nt, Human
ccaggaauucgagaccagccuaggugacauag

SEQ ID NO: 99092 - RNA, 32 nt, Human
ccaggaauucgagaccagccugggcaacauag

SEQ ID NO: 99093 - RNA, 32 nt, Human
ccaggaauucgagaccagccugggcaagaugg

SEQ ID NO: 99094 - RNA, 32 nt, Human
ccaggaauucgagaccagccugggcagcauag

SEQ ID NO: 99095 - RNA, 24 nt, Human
ccaggaauuggaggcugcagugag

SEQ ID NO: 99096 - RNA, 32 nt, Human
ccaggaauuuagaccuuuucccugcaccacuc

SEQ ID NO: 99097 - RNA, 32 nt, Human
ccaggaauuugaaaccagccugggcaaaaccc

SEQ ID NO: 99098 - RNA, 32 nt, Human
ccaggaauuugagaccagccugggcaacauag

SEQ ID NO: 99099 - RNA, 32 nt, Human
ccaggaauuugagaccagccugggcaacaugg

SEQ ID NO: 99100 - RNA, 24 nt, Human
ccaggaauuugagguuguagugag

SEQ ID NO: 99101 - RNA, 32 nt, Human
ccaggacaaaggcagagauaugccugccuggu

SEQ ID NO: 99102 - RNA, 32 nt, Human
ccaggacaauccagccucugcccuggaacugc

SEQ ID NO: 99103 - RNA, 32 nt, Human
ccaggacacagcccucucucucacagcagugu

SEQ ID NO: 99104 - RNA, 32 nt, Human
ccaggacacagccuugggagguccugaccaca

SEQ ID NO: 99105 - RNA, 32 nt, Human
ccaggacacaucacauacccacccuuacuucc

SEQ ID NO: 99106 - RNA, 32 nt, Human
ccaggacacccacccacccaaagagccaaaga

SEQ ID NO: 99107 - RNA, 32 nt, Human
ccaggacaccuggaagccgggaaauggauuca

SEQ ID NO: 99108 - RNA, 24 nt, Human
ccaggacacggagauugcagugag

SEQ ID NO: 99109 - RNA, 22 nt, Human
ccaggacacuggaaguucucca

SEQ ID NO: 99110 - RNA, 18 nt, Human
ccaggacacuggugugaa

SEQ ID NO: 99111 - RNA, 32 nt, Human
ccaggacagaagcggcugccagcucugaaucu

SEQ ID NO: 99112 - RNA, 32 nt, Human
ccaggacagagcaagggugacucucagcucag

SEQ ID NO: 99113 - RNA, 20 nt, Human
ccaggacagcugccaccucu

SEQ ID NO: 99114 - RNA, 32 nt, Human
ccaggacaggacauugugaccaugacccagcc

SEQ ID NO: 99115 - RNA, 32 nt, Human
ccaggacaggagcaacugucucagggaggaca

SEQ ID NO: 99116 - RNA, 32 nt, Human
ccaggacaggcaggagcaguggaauagcuacu

SEQ ID NO: 99117 - RNA, 32 nt, Human
ccaggacaggcauucaggcagagcaagcucca

SEQ ID NO: 99118 - RNA, 19 nt, Human
ccaggacaggcucucgaca

SEQ ID NO: 99119 - RNA, 22 nt, Human
ccaggacaggcucucgacaggg

SEQ ID NO: 99120 - RNA, 32 nt, Human
ccaggacaggugaacagggagggaccucccca

SEQ ID NO: 99121 - RNA, 19 nt, Human
ccaggacagucccccuccc

SEQ ID NO: 99122 - RNA, 32 nt, Human
ccaggacaguguggaggagaccuaccugggag

SEQ ID NO: 99123 - RNA, 25 nt, Human
ccaggacaguguuacuucuucugca

SEQ ID NO: 99124 - RNA, 32 nt, Human
ccaggacaucucuuuaaaggcuguaauguuaa

SEQ ID NO: 99125 - RNA, 32 nt, Human
ccaggacaugcugauugccacugucucuucac

SEQ ID NO: 99126 - RNA, 32 nt, Human
ccaggacaugcugcucccuugugugagugacc

SEQ ID NO: 99127 - RNA, 32 nt, Human
ccaggacauguggccuggcuagugcagcaugg

SEQ ID NO: 99128 - RNA, 19 nt, Human
ccaggaccaacuccugcuc

SEQ ID NO: 99129 - RNA, 32 nt, Human
ccaggaccacugcauuuaccagccugauacug

SEQ ID NO: 99130 - RNA, 32 nt, Human
ccaggaccagaggccaaggcugacaaugggac

SEQ ID NO: 99131 - RNA, 32 nt, Human
ccaggaccagccuguaccuugcuguggggcua

SEQ ID NO: 99132 - RNA, 21 nt, Human
ccaggaccagcgugcugcugc

SEQ ID NO: 99133 - RNA, 32 nt, Human
ccaggaccaucuuuacuuucuccacaaaagcc

SEQ ID NO: 99134 - RNA, 18 nt, Human
ccaggaccauggcugggg

SEQ ID NO: 99135 - RNA, 19 nt, Human
ccaggaccauggcugggga

SEQ ID NO: 99136 - RNA, 32 nt, Human
ccaggacccaauucuccacuugcucagggacu

SEQ ID NO: 99137 - RNA, 22 nt, Human
ccaggacccacagcccucccca

SEQ ID NO: 99138 - RNA, 32 nt, Human
ccaggacccacuggagccagccccacccuagg

SEQ ID NO: 99139 - RNA, 32 nt, Human
ccaggacccagaagcaccuccuuuguagacag

SEQ ID NO: 99140 - RNA, 32 nt, Human
ccaggacccagcucugggagugcagcuggaau

SEQ ID NO: 99141 - RNA, 23 nt, Human
ccaggacccaggaggccucccca

SEQ ID NO: 99142 - RNA, 32 nt, Human
ccaggacccaggaggugugauuccugaaggca

SEQ ID NO: 99143 - RNA, 32 nt, Human
ccaggacccaggcuguggaucacggggccugc

SEQ ID NO: 99144 - RNA, 20 nt, Human
ccaggacccaggucugcugc

SEQ ID NO: 99145 - RNA, 19 nt, Human
ccaggacccagucgcugcu

SEQ ID NO: 99146 - RNA, 22 nt, Human
ccaggacccccacaccacccca

SEQ ID NO: 99147 - RNA, 24 nt, Human
ccaggacccccaggcccccucccc

SEQ ID NO: 99148 - RNA, 22 nt, Human
ccaggaccccccggauucucca

SEQ ID NO: 99149 - RNA, 21 nt, Human
ccaggacccccgacgccgccu

SEQ ID NO: 99150 - RNA, 21 nt, Human
ccaggaccccuugcucugcuc

SEQ ID NO: 99151 - RNA, 19 nt, Human
ccaggacccuaagcugcuc

SEQ ID NO: 99152 - RNA, 32 nt, Human
ccaggacccucagacccacgggccaacaaugg

SEQ ID NO: 99153 - RNA, 32 nt, Human
ccaggacccuggcauaugauacaccagagcug

SEQ ID NO: 99154 - RNA, 32 nt, Human
ccaggacccuggggacagagagaugaacugcu

SEQ ID NO: 99155 - RNA, 20 nt, Human
ccaggaccgcaccgcugcuc

SEQ ID NO: 99156 - RNA, 32 nt, Human
ccaggaccggugggguacaaaggggcccaugc

SEQ ID NO: 99157 - RNA, 22 nt, Human
ccaggaccuaugcucccugcuc

SEQ ID NO: 99158 - RNA, 32 nt, Human
ccaggaccuccccucagguuguucucugauuc

SEQ ID NO: 99159 - RNA, 19 nt, Human
ccaggaccuccucucuggc

SEQ ID NO: 99160 - RNA, 20 nt, Human
ccaggaccuccugccagcuc

SEQ ID NO: 99161 - RNA, 32 nt, Human
ccaggaccucgcuuuccaucuguucuuguugc

SEQ ID NO: 99162 - RNA, 20 nt, Human
ccaggaccugccucuuccca

SEQ ID NO: 99163 - RNA, 32 nt, Human
ccaggaccugcugugugaaaucgaagacucgc

SEQ ID NO: 99164 - RNA, 20 nt, Human
ccaggaccuggagggggugc

SEQ ID NO: 99165 - RNA, 21 nt, Human
ccaggaccuggauugcuacuu

SEQ ID NO: 99166 - RNA, 21 nt, Human
ccaggaccugggagcugacuc

SEQ ID NO: 99167 - RNA, 22 nt, Human
ccaggaccuucguggagcugcu

SEQ ID NO: 99168 - RNA, 21 nt, Human
ccaggaccuugggggcaccca

SEQ ID NO: 99169 - RNA, 18 nt, Human
ccaggaccuugugggcug

SEQ ID NO: 99170 - RNA, 32 nt, Human
ccaggaccuuucucuuccuccuccuccaauuc

SEQ ID NO: 99171 - RNA, 22 nt, Human
ccaggacgacuggaccauggau

SEQ ID NO: 99172 - RNA, 21 nt, Human
ccaggacgagugacucuucca

SEQ ID NO: 99173 - RNA, 32 nt, Human
ccaggacgaucacacagagaugaauggcaucu

SEQ ID NO: 99174 - RNA, 24 nt, Human
ccaggacgcagagguugcggugag

SEQ ID NO: 99175 - RNA, 32 nt, Human
ccaggacgcuuccucaagcccagccuucuaca

SEQ ID NO: 99176 - RNA, 32 nt, Human
ccaggacggaggaggagguggugaaacaggaa

SEQ ID NO: 99177 - RNA, 32 nt, Human
ccaggacgugcugcucccuugugugagugacc

SEQ ID NO: 99178 - RNA, 22 nt, Human
ccaggacuacaaccaggacuca

SEQ ID NO: 99179 - RNA, 32 nt, Human
ccaggacuagaaccuuguguccuuugaauucu

SEQ ID NO: 99180 - RNA, 21 nt, Human
ccaggacuccaccuaagguca

SEQ ID NO: 99181 - RNA, 32 nt, Human
ccaggacuccacugcuaauucgggcccaucuu

SEQ ID NO: 99182 - RNA, 32 nt, Human
ccaggacuccagccugaaccaggugccuccaa

SEQ ID NO: 99183 - RNA, 32 nt, Human
ccaggacucccagaaccucuaagugcugcugu

SEQ ID NO: 99184 - RNA, 32 nt, Human
ccaggacucccagcucaucccuugccacauuu

SEQ ID NO: 99185 - RNA, 32 nt, Human
ccaggacucuccccaucuccagaggcccccac

SEQ ID NO: 99186 - RNA, 32 nt, Human
ccaggacucugucagcucugcugcccacaugc

SEQ ID NO: 99187 - RNA, 19 nt, Human
ccaggacugaagacaguug

SEQ ID NO: 99188 - RNA, 32 nt, Human
ccaggacugagaacagggagaggcgacccgac

SEQ ID NO: 99189 - RNA, 32 nt, Human
ccaggacugagacugggcucuguuuuccaagg

SEQ ID NO: 99190 - RNA, 24 nt, Human
ccaggacugccccuuccugggcca

SEQ ID NO: 99191 - RNA, 21 nt, Human
ccaggacugcccgggcgcagg

SEQ ID NO: 99192 - RNA, 32 nt, Human
ccaggacugccugggacucccuggcaacccag

SEQ ID NO: 99193 - RNA, 32 nt, Human
ccaggacugcucaggcggagagaucccugccc

SEQ ID NO: 99194 - RNA, 32 nt, Human
ccaggacugcucugagauuugagggaaacaug

SEQ ID NO: 99195 - RNA, 32 nt, Human
ccaggacugcuuguccgcuaucaucacuguuu

SEQ ID NO: 99196 - RNA, 32 nt, Human
ccaggacugggcaguugcaggaggcccugggg

SEQ ID NO: 99197 - RNA, 22 nt, Human
ccaggacuggggugacggcagg

SEQ ID NO: 99198 - RNA, 32 nt, Human
ccaggacuguccgcgggguugagggaaggggc

SEQ ID NO: 99199 - RNA, 32 nt, Human
ccaggacuguucagggaggagccccggucaga

SEQ ID NO: 99200 - RNA, 32 nt, Human
ccaggacuuagcgaggggccagagccaagcau

SEQ ID NO: 99201 - RNA, 32 nt, Human
ccaggacuucaagaccagccuaggcaacaugg

SEQ ID NO: 99202 - RNA, 21 nt, Human
ccaggacuucagggccacagg

SEQ ID NO: 99203 - RNA, 32 nt, Human
ccaggacuuccagacagaguaccagguuuuau

SEQ ID NO: 99204 - RNA, 24 nt, Human
ccaggacuucuuagcucaguauca

SEQ ID NO: 99205 - RNA, 25 nt, Human
ccaggacuugagggacccaguccca

SEQ ID NO: 99206 - RNA, 32 nt, Human
ccaggacuuugggugggucuucccagggagua

SEQ ID NO: 99207 - RNA, 32 nt, Human
ccaggagaaagccaaaaaggagcaagaaggca

SEQ ID NO: 99208 - RNA, 32 nt, Human
ccaggagaaagccauguucaguucgagcgcca

SEQ ID NO: 99209 - RNA, 32 nt, Human
ccaggagaacauccgcgaaggcuguuggaggu

SEQ ID NO: 99210 - RNA, 32 nt, Human
ccaggagaacugcuccauguuggcucagcaga

SEQ ID NO: 99211 - RNA, 17 nt, Human
ccaggagaagacauuug

SEQ ID NO: 99212 - RNA, 32 nt, Human
ccaggagaaucacuugaacccaggaggcagcu

SEQ ID NO: 99213 - RNA, 32 nt, Human
ccaggagacaaggcggccauggauuugcccuu

SEQ ID NO: 99214 - RNA, 24 nt, Human
ccaggagacagagguugcagugag

SEQ ID NO: 99215 - RNA, 24 nt, Human
ccaggagacagagguuguagugag

SEQ ID NO: 99216 - RNA, 24 nt, Human
ccaggagacagagguugugguggg

SEQ ID NO: 99217 - RNA, 22 nt, Human
ccaggagacagguugcagugag

SEQ ID NO: 99218 - RNA, 32 nt, Human
ccaggagaccaaaggcugcaggugucuucaca

SEQ ID NO: 99219 - RNA, 25 nt, Human
ccaggagaccagccugggcaacaua

SEQ ID NO: 99220 - RNA, 32 nt, Human
ccaggagacccuggcccugcccugugcccugg

SEQ ID NO: 99221 - RNA, 24 nt, Human
ccaggagacggaaguugcagugag

SEQ ID NO: 99222 - RNA, 24 nt, Human
ccaggagacggagcuugcagugag

SEQ ID NO: 99223 - RNA, 23 nt, Human
ccaggagacggagguugcaguga

SEQ ID NO: 99224 - RNA, 24 nt, Human
ccaggagacggagguugcagugag

SEQ ID NO: 99225 - RNA, 24 nt, Human
ccaggagacggagguugcggugag

SEQ ID NO: 99226 - RNA, 23 nt, Human
ccaggagacggagguuucaguga

SEQ ID NO: 99227 - RNA, 24 nt, Human
ccaggagacggugguugcagugag

SEQ ID NO: 99228 - RNA, 32 nt, Human
ccaggagacgugaggggaagccuggaucugug

SEQ ID NO: 99229 - RNA, 32 nt, Human
ccaggagagaacacggggagguuuguuugugu

SEQ ID NO: 99230 - RNA, 32 nt, Human
ccaggagagaccuucucuuaggacaguaaacu

SEQ ID NO: 99231 - RNA, 32 nt, Human
ccaggagagaugggauccccuggggaaccagg

SEQ ID NO: 99232 - RNA, 32 nt, Human
ccaggagagccccauucccagccccuggucuc

SEQ ID NO: 99233 - RNA, 32 nt, Human
ccaggagagcgccuucucucuccagccaucac

SEQ ID NO: 99234 - RNA, 32 nt, Human
ccaggagaggacacgggcaggagcccuggccc

SEQ ID NO: 99235 - RNA, 32 nt, Human
ccaggagaggcagagggaggcacagccccgac

SEQ ID NO: 99236 - RNA, 32 nt, Human
ccaggagaguagcugggccaggcaaggggagg

SEQ ID NO: 99237 - RNA, 32 nt, Human
ccaggagaguggagucucucacugcaugugac

SEQ ID NO: 99238 - RNA, 25 nt, Human
ccaggagaguggcggugcgcacggg

SEQ ID NO: 99239 - RNA, 32 nt, Human
ccaggagaguugagagggugggggacacagag

SEQ ID NO: 99240 - RNA, 32 nt, Human
ccaggagauaccgcgcccacacccaaucuugg

SEQ ID NO: 99241 - RNA, 24 nt, Human
ccaggagauagagguugcaaugag

SEQ ID NO: 99242 - RNA, 23 nt, Human
ccaggagaucaaggcugcagcga

SEQ ID NO: 99243 - RNA, 25 nt, Human
ccaggagaugcaggcuugcagugag

SEQ ID NO: 99244 - RNA, 32 nt, Human
ccaggagaugcaggcuugcagugagccaugau

SEQ ID NO: 99245 - RNA, 24 nt, Human
ccaggagauggaaguugcagugag

SEQ ID NO: 99246 - RNA, 32 nt, Human
ccaggagauggacuggcuggugcugggggagc

SEQ ID NO: 99247 - RNA, 24 nt, Human
ccaggagauggagguugcagugag

SEQ ID NO: 99248 - RNA, 24 nt, Human
ccaggagauggagguugcggugag

SEQ ID NO: 99249 - RNA, 18 nt, Human
ccaggagauggugcagga

SEQ ID NO: 99250 - RNA, 19 nt, Human
ccaggagaugugggcagga

SEQ ID NO: 99251 - RNA, 32 nt, Human
ccaggagauugagaccagccugggcaacauag

SEQ ID NO: 99252 - RNA, 24 nt, Human
ccaggagauugaggcugcagugag

SEQ ID NO: 99253 - RNA, 32 nt, Human
ccaggagcacauaccacaaacuaccacaaaua

SEQ ID NO: 99254 - RNA, 32 nt, Human
ccaggagcacauucuggggagcacacaccugc

SEQ ID NO: 99255 - RNA, 32 nt, Human
ccaggagcacccaggcuugggcagcaaucucu

SEQ ID NO: 99256 - RNA, 16 nt, Human
ccaggagcagagccag

SEQ ID NO: 99257 - RNA, 32 nt, Human
ccaggagcagaggccuccugccggcaaccagc

SEQ ID NO: 99258 - RNA, 32 nt, Human
ccaggagcagcagaggaggcugacaggcccug

SEQ ID NO: 99259 - RNA, 19 nt, Human
ccaggagcagcugcuguga

SEQ ID NO: 99260 - RNA, 32 nt, Human
ccaggagcaguggcucaugcccguaaucccag

SEQ ID NO: 99261 - RNA, 32 nt, Human
ccaggagccagcugcuagcuggaccccuccau

SEQ ID NO: 99262 - RNA, 32 nt, Human
ccaggagccaggggucagggaggaggcugagg

SEQ ID NO: 99263 - RNA, 32 nt, Human
ccaggagccauccuggaauuucugaccuugag

SEQ ID NO: 99264 - RNA, 32 nt, Human
ccaggagcccacaggaccuggagcucuggaag

SEQ ID NO: 99265 - RNA, 32 nt, Human
ccaggagcccaugcacgcccacugccugcccu

SEQ ID NO: 99266 - RNA, 32 nt, Human
ccaggagccccagaacagacauggaccuccuc

SEQ ID NO: 99267 - RNA, 32 nt, Human
ccaggagcccccagaggccaggacacgcccuc

SEQ ID NO: 99268 - RNA, 22 nt, Human
ccaggagccccccaggcugccu

SEQ ID NO: 99269 - RNA, 18 nt, Human
ccaggagcccugcugcuu

SEQ ID NO: 99270 - RNA, 32 nt, Human
ccaggagcccugcugcuuugcuuggugguagg

SEQ ID NO: 99271 - RNA, 32 nt, Human
ccaggagccggagcagcggcacugccugaacc

SEQ ID NO: 99272 - RNA, 18 nt, Human
ccaggagccggcugggag

SEQ ID NO: 99273 - RNA, 32 nt, Human
ccaggagccuccaggauggagauggagaccca

SEQ ID NO: 99274 - RNA, 32 nt, Human
ccaggagcggcggcucaugccuguaaucccag

SEQ ID NO: 99275 - RNA, 23 nt, Human
ccaggagcgggggcggcgggggg

SEQ ID NO: 99276 - RNA, 32 nt, Human
ccaggagcuaaguaaggcaggagagcugacuu

SEQ ID NO: 99277 - RNA, 32 nt, Human
ccaggagcuagccagccagcagagccaaaccu

SEQ ID NO: 99278 - RNA, 32 nt, Human
ccaggagcucaagaacagccugggcaaaauag

SEQ ID NO: 99279 - RNA, 32 nt, Human
ccaggagcucaagaccagccuggacaacaugg

SEQ ID NO: 99280 - RNA, 32 nt, Human
ccaggagcucaagagcagccugggcaauacag

SEQ ID NO: 99281 - RNA, 24 nt, Human
ccaggagcucaagauugcagugag

SEQ ID NO: 99282 - RNA, 32 nt, Human
ccaggagcucaagucccaccugggcaacauag

SEQ ID NO: 99283 - RNA, 32 nt, Human
ccaggagcuccuggugggcaucguuguggaga

SEQ ID NO: 99284 - RNA, 32 nt, Human
ccaggagcucuagaccaccacacccauccccg

SEQ ID NO: 99285 - RNA, 32 nt, Human
ccaggagcucuggagcccccagaggagauaag

SEQ ID NO: 99286 - RNA, 32 nt, Human
ccaggagcugccagaggugaaggagcaggaag

SEQ ID NO: 99287 - RNA, 32 nt, Human
ccaggagcugccgugccugugccuggagggcu

SEQ ID NO: 99288 - RNA, 32 nt, Human
ccaggagcuggagaucagccugggcaacacag

SEQ ID NO: 99289 - RNA, 32 nt, Human
ccaggagcuggcugaaagccacuuuguacaug

SEQ ID NO: 99290 - RNA, 18 nt, Human
ccaggagcugggcagugg

SEQ ID NO: 99291 - RNA, 32 nt, Human
ccaggagcugucugagaaaccaggaagaaacc

SEQ ID NO: 99292 - RNA, 32 nt, Human
ccaggagcugugggaggaaacgcccucaguaa

SEQ ID NO: 99293 - RNA, 32 nt, Human
ccaggagcuuaagaccagccugggcaacauaa

SEQ ID NO: 99294 - RNA, 19 nt, Human
ccaggagcuuccacucuca

SEQ ID NO: 99295 - RNA, 19 nt, Human
ccaggagcuuccccugcca

SEQ ID NO: 99296 - RNA, 32 nt, Human
ccaggaggaaaagcuccucuccccaccuccac

SEQ ID NO: 99297 - RNA, 32 nt, Human
ccaggaggaacacauguggugucuguauggcu

SEQ ID NO: 99298 - RNA, 32 nt, Human
ccaggaggaacaguaacucuuccuucgggugg

SEQ ID NO: 99299 - RNA, 32 nt, Human
ccaggaggaagagccuuugugcauuugacuga

SEQ ID NO: 99300 - RNA, 24 nt, Human
ccaggaggaagagguugcagugag

SEQ ID NO: 99301 - RNA, 30 nt, Human
ccaggaggaagccagggcaggguuccgcgg

SEQ ID NO: 99302 - RNA, 20 nt, Human
ccaggaggaagggagggcag

SEQ ID NO: 99303 - RNA, 19 nt, Human
ccaggaggacaggagcccc

SEQ ID NO: 99304 - RNA, 32 nt, Human
ccaggaggacccucauucccagccuggcuguc

SEQ ID NO: 99305 - RNA, 32 nt, Human
ccaggaggagaaacaggacuugggcgaggagg

SEQ ID NO: 99306 - RNA, 24 nt, Human
ccaggaggagaccagguugcagug

SEQ ID NO: 99307 - RNA, 32 nt, Human
ccaggaggagaccagguugcaguggcguaagg

SEQ ID NO: 99308 - RNA, 32 nt, Human
ccaggaggagacccuccccugccuucgaggcc

SEQ ID NO: 99309 - RNA, 32 nt, Human
ccaggaggagagaagaauuccagugagcagca

SEQ ID NO: 99310 - RNA, 18 nt, Human
ccaggaggagcugaggcu

SEQ ID NO: 99311 - RNA, 32 nt, Human
ccaggaggagcuguggucagaggaggagccgg

SEQ ID NO: 99312 - RNA, 32 nt, Human
ccaggaggaggaagaggaggcugguugguacc

SEQ ID NO: 99313 - RNA, 32 nt, Human
ccaggaggaggagaggaggaggggaggagaag

SEQ ID NO: 99314 - RNA, 24 nt, Human
ccaggaggaggagcuugcagugag

SEQ ID NO: 99315 - RNA, 32 nt, Human
ccaggaggaggaggaggaggaggaggagagcg

SEQ ID NO: 99316 - RNA, 24 nt, Human
ccaggaggaggaggcugcagugag

SEQ ID NO: 99317 - RNA, 24 nt, Human
ccaggaggaggaggucgcagugag

SEQ ID NO: 99318 - RNA, 23 nt, Human
ccaggaggaggagguugcaguga

SEQ ID NO: 99319 - RNA, 24 nt, Human
ccaggaggaggagguugcagugag

SEQ ID NO: 99320 - RNA, 32 nt, Human
ccaggaggagguggagaucgcagugagcugag

SEQ ID NO: 99321 - RNA, 32 nt, Human
ccaggaggagguuugagcugagcucaggcaca

SEQ ID NO: 99322 - RNA, 32 nt, Human
ccaggaggagugucaggaagugcaucagccug

SEQ ID NO: 99323 - RNA, 32 nt, Human
ccaggaggaugaaaggccccagcugggggcuc

SEQ ID NO: 99324 - RNA, 24 nt, Human
ccaggaggcaaaggcugcagugag

SEQ ID NO: 99325 - RNA, 24 nt, Human
ccaggaggcaaagguugcagugag

SEQ ID NO: 99326 - RNA, 24 nt, Human
ccaggaggcacagauugcagugag

SEQ ID NO: 99327 - RNA, 21 nt, Human
ccaggaggcacagcuaggggc

SEQ ID NO: 99328 - RNA, 24 nt, Human
ccaggaggcacagcuugcagugag

SEQ ID NO: 99329 - RNA, 24 nt, Human
ccaggaggcacaggcugcagugag

SEQ ID NO: 99330 - RNA, 24 nt, Human
ccaggaggcacaguuugcagugag

SEQ ID NO: 99331 - RNA, 24 nt, Human
ccaggaggcagaaguugcagugag

SEQ ID NO: 99332 - RNA, 24 nt, Human
ccaggaggcagagaucgcagugag

SEQ ID NO: 99333 - RNA, 24 nt, Human
ccaggaggcagagauggcagugag

SEQ ID NO: 99334 - RNA, 24 nt, Human
ccaggaggcagagauugcagucag

SEQ ID NO: 99335 - RNA, 24 nt, Human
ccaggaggcagagauugcagugag

SEQ ID NO: 99336 - RNA, 24 nt, Human
ccaggaggcagagauugcggugag

SEQ ID NO: 99337 - RNA, 23 nt, Human
ccaggaggcagagcuugcaguga

SEQ ID NO: 99338 - RNA, 24 nt, Human
ccaggaggcagagcuugcagugag

SEQ ID NO: 99339 - RNA, 24 nt, Human
ccaggaggcagagcuuguagugag

SEQ ID NO: 99340 - RNA, 24 nt, Human
ccaggaggcagaggcuacagugag

SEQ ID NO: 99341 - RNA, 24 nt, Human
ccaggaggcagaggcugcagugag

SEQ ID NO: 99342 - RNA, 24 nt, Human
ccaggaggcagaggcuguggugag

SEQ ID NO: 99343 - RNA, 32 nt, Human
ccaggaggcagaggguugcagugagccgagau

SEQ ID NO: 99344 - RNA, 24 nt, Human
ccaggaggcagaggucgcagugag

SEQ ID NO: 99345 - RNA, 21 nt, Human
ccaggaggcagagguuacagu

SEQ ID NO: 99346 - RNA, 24 nt, Human
ccaggaggcagagguuacagugag

SEQ ID NO: 99347 - RNA, 24 nt, Human
ccaggaggcagagguuccagugag

SEQ ID NO: 99348 - RNA, 23 nt, Human
ccaggaggcagagguugcaauga

SEQ ID NO: 99349 - RNA, 24 nt, Human
ccaggaggcagagguugcaaugag

SEQ ID NO: 99350 - RNA, 24 nt, Human
ccaggaggcagagguugcagcgag

SEQ ID NO: 99351 - RNA, 21 nt, Human
ccaggaggcagagguugcagu

SEQ ID NO: 99352 - RNA, 24 nt, Human
ccaggaggcagagguugcagucag

SEQ ID NO: 99353 - RNA, 23 nt, Human
ccaggaggcagagguugcaguga

SEQ ID NO: 99354 - RNA, 24 nt, Human
ccaggaggcagagguugcagugag

SEQ ID NO: 99355 - RNA, 24 nt, Human
ccaggaggcagagguugcaguggg

SEQ ID NO: 99356 - RNA, 24 nt, Human
ccaggaggcagagguugcaguuag

SEQ ID NO: 99357 - RNA, 24 nt, Human
ccaggaggcagagguugcauugag

SEQ ID NO: 99358 - RNA, 24 nt, Human
ccaggaggcagagguugcggugag

SEQ ID NO: 99359 - RNA, 24 nt, Human
ccaggaggcagagguugcguugag

SEQ ID NO: 99360 - RNA, 24 nt, Human
ccaggaggcagagguuggggugag

SEQ ID NO: 99361 - RNA, 27 nt, Human
ccaggaggcagagguuguugcagugag

SEQ ID NO: 99362 - RNA, 22 nt, Human
ccaggaggcagagugagccgag

SEQ ID NO: 99363 - RNA, 22 nt, Human
ccaggaggcagaguucccauga

SEQ ID NO: 99364 - RNA, 24 nt, Human
ccaggaggcagaguuugcagugag

SEQ ID NO: 99365 - RNA, 21 nt, Human
ccaggaggcagaugguaguga

SEQ ID NO: 99366 - RNA, 22 nt, Human
ccaggaggcagccacaggcgag

SEQ ID NO: 99367 - RNA, 32 nt, Human
ccaggaggcagccacaggcgagugccagcagu

SEQ ID NO: 99368 - RNA, 18 nt, Human
ccaggaggcagccgguga

SEQ ID NO: 99369 - RNA, 32 nt, Human
ccaggaggcagcugcugacagguuugcuacac

SEQ ID NO: 99370 - RNA, 24 nt, Human
ccaggaggcagcuguugcagugag

SEQ ID NO: 99371 - RNA, 23 nt, Human
ccaggaggcaggacaacacugag

SEQ ID NO: 99372 - RNA, 21 nt, Human
ccaggaggcaggagcagcggg

SEQ ID NO: 99373 - RNA, 17 nt, Human
ccaggaggcaggcagug

SEQ ID NO: 99374 - RNA, 32 nt, Human
ccaggaggcaggcaguggcuaugacagugagg

SEQ ID NO: 99375 - RNA, 24 nt, Human
ccaggaggcagugauugcagugag

SEQ ID NO: 99376 - RNA, 24 nt, Human
ccaggaggccaagucugcagugag

SEQ ID NO: 99377 - RNA, 32 nt, Human
ccaggaggccagggaaagcaucucuggcucac

SEQ ID NO: 99378 - RNA, 32 nt, Human
ccaggaggcccaguuaaagcggcucgagguga

SEQ ID NO: 99379 - RNA, 24 nt, Human
ccaggaggccccugcugcagagag

SEQ ID NO: 99380 - RNA, 32 nt, Human
ccaggaggccgagccccaggaggcggcggggg

SEQ ID NO: 99381 - RNA, 24 nt, Human
ccaggaggcgaagauugcagugag

SEQ ID NO: 99382 - RNA, 24 nt, Human
ccaggaggcgaagauugccgugag

SEQ ID NO: 99383 - RNA, 23 nt, Human
ccaggaggcgaagguugcaguga

SEQ ID NO: 99384 - RNA, 24 nt, Human
ccaggaggcgaagguugcagugag

SEQ ID NO: 99385 - RNA, 23 nt, Human
ccaggaggcgcaggcugcaguga

SEQ ID NO: 99386 - RNA, 24 nt, Human
ccaggaggcgcaggcugcagugag

SEQ ID NO: 99387 - RNA, 24 nt, Human
ccaggaggcggaaguugcagugag

SEQ ID NO: 99388 - RNA, 24 nt, Human
ccaggaggcggaccuuguagugag

SEQ ID NO: 99389 - RNA, 24 nt, Human
ccaggaggcggacguugcagugag

SEQ ID NO: 99390 - RNA, 24 nt, Human
ccaggaggcggagauugcagugag

SEQ ID NO: 99391 - RNA, 24 nt, Human
ccaggaggcggagcuggcagugag

SEQ ID NO: 99392 - RNA, 24 nt, Human
ccaggaggcggagcuuacagugag

SEQ ID NO: 99393 - RNA, 24 nt, Human
ccaggaggcggagcuugcagugag

SEQ ID NO: 99394 - RNA, 23 nt, Human
ccaggaggcggaggaggcuagug

SEQ ID NO: 99395 - RNA, 22 nt, Human
ccaggaggcggaggcugcagug

SEQ ID NO: 99396 - RNA, 23 nt, Human
ccaggaggcggaggcugcaguga

SEQ ID NO: 99397 - RNA, 24 nt, Human
ccaggaggcggaggcugcagugag

SEQ ID NO: 99398 - RNA, 24 nt, Human
ccaggaggcggagguagcagugag

SEQ ID NO: 99399 - RNA, 24 nt, Human
ccaggaggcggagguaguggugag

SEQ ID NO: 99400 - RNA, 24 nt, Human
ccaggaggcggagguuacagucag

SEQ ID NO: 99401 - RNA, 24 nt, Human
ccaggaggcggagguuacagugag

SEQ ID NO: 99402 - RNA, 24 nt, Human
ccaggaggcggagguuccagugag

SEQ ID NO: 99403 - RNA, 24 nt, Human
ccaggaggcggagguugcacugag

SEQ ID NO: 99404 - RNA, 24 nt, Human
ccaggaggcggagguugcagggag

SEQ ID NO: 99405 - RNA, 21 nt, Human
ccaggaggcggagguugcagu

SEQ ID NO: 99406 - RNA, 22 nt, Human
ccaggaggcggagguugcagug

SEQ ID NO: 99407 - RNA, 23 nt, Human
ccaggaggcggagguugcaguga

SEQ ID NO: 99408 - RNA, 24 nt, Human
ccaggaggcggagguugcagugag

SEQ ID NO: 99409 - RNA, 24 nt, Human
ccaggaggcggagguugccgugag

SEQ ID NO: 99410 - RNA, 23 nt, Human
ccaggaggcggagguugcgguga

SEQ ID NO: 99411 - RNA, 24 nt, Human
ccaggaggcggagguugcggugag

SEQ ID NO: 99412 - RNA, 24 nt, Human
ccaggaggcggagguuguagugag

SEQ ID NO: 99413 - RNA, 24 nt, Human
ccaggaggcggagguuguggugag

SEQ ID NO: 99414 - RNA, 21 nt, Human
ccaggaggcggaguggaagug

SEQ ID NO: 99415 - RNA, 24 nt, Human
ccaggaggcggugcuugcagggag

SEQ ID NO: 99416 - RNA, 24 nt, Human
ccaggaggcguagcuagcagugag

SEQ ID NO: 99417 - RNA, 32 nt, Human
ccaggaggcguuuggggguggggaaggcaccu

SEQ ID NO: 99418 - RNA, 32 nt, Human
ccaggaggcugaagcaggauaaucgcuugaac

SEQ ID NO: 99419 - RNA, 32 nt, Human
ccaggaggcugagacaggagaaucgcuugaac

SEQ ID NO: 99420 - RNA, 32 nt, Human
ccaggaggcugaggcaagagaaucacuugaac

SEQ ID NO: 99421 - RNA, 32 nt, Human
ccaggaggcugaggcaggagaaucacuugaac

SEQ ID NO: 99422 - RNA, 32 nt, Human
ccaggaggcugaggcaggagaaucgcuggaac

SEQ ID NO: 99423 - RNA, 32 nt, Human
ccaggaggcugaggcaggagaaucgcuugaac

SEQ ID NO: 99424 - RNA, 32 nt, Human
ccaggaggcugaggcaggagaauugcugaaac

SEQ ID NO: 99425 - RNA, 24 nt, Human
ccaggaggcugagguugcagugag

SEQ ID NO: 99426 - RNA, 32 nt, Human
ccaggaggcugauccuauagagacgucugguu

SEQ ID NO: 99427 - RNA, 24 nt, Human
ccaggaggcugcagcuaccacgag

SEQ ID NO: 99428 - RNA, 32 nt, Human
ccaggaggcugcagcuaccacgagggccucug

SEQ ID NO: 99429 - RNA, 32 nt, Human
ccaggaggcugcagcugcuuccccaaggccac

SEQ ID NO: 99430 - RNA, 32 nt, Human
ccaggaggcugccagccccuccucuuauuuaa

SEQ ID NO: 99431 - RNA, 32 nt, Human
ccaggaggcugggcggaggugggcaggaugug

SEQ ID NO: 99432 - RNA, 19 nt, Human
ccaggaggcuggggcacau

SEQ ID NO: 99433 - RNA, 32 nt, Human
ccaggaggcuuaguccagucugugcuccuggg

SEQ ID NO: 99434 - RNA, 32 nt, Human
ccaggagggaaugggccuggugccacucuguu

SEQ ID NO: 99435 - RNA, 32 nt, Human
ccaggagggaccacccucccugacuggccugg

SEQ ID NO: 99436 - RNA, 32 nt, Human
ccaggagggaccggaggugugacagauacugu

SEQ ID NO: 99437 - RNA, 32 nt, Human
ccaggagggaggcaggggaggggugcggcggu

SEQ ID NO: 99438 - RNA, 19 nt, Human
ccaggagggagugcagugg

SEQ ID NO: 99439 - RNA, 32 nt, Human
ccaggagggcacacccucccacugccccucuc

SEQ ID NO: 99440 - RNA, 32 nt, Human
ccaggagggcccugaccucccacugcccagga

SEQ ID NO: 99441 - RNA, 32 nt, Human
ccaggagggcucgagcuggacacuccuggcug

SEQ ID NO: 99442 - RNA, 32 nt, Human
ccaggaggggaacugagucacgcuggggcucu

SEQ ID NO: 99443 - RNA, 32 nt, Human
ccaggaggggaagggaucauggagagcccucu

SEQ ID NO: 99444 - RNA, 32 nt, Human
ccaggaggggaagugggacuucccaguggaga

SEQ ID NO: 99445 - RNA, 32 nt, Human
ccaggaggggagggaaggggaggcggggagag

SEQ ID NO: 99446 - RNA, 22 nt, Human
ccaggaggggaguggcagugag

SEQ ID NO: 99447 - RNA, 32 nt, Human
ccaggaggggcgaggaaggagggugcuggggg

SEQ ID NO: 99448 - RNA, 24 nt, Human
ccaggagggggagcuuggagcgag

SEQ ID NO: 99449 - RNA, 24 nt, Human
ccaggagggggaguuugcagugag

SEQ ID NO: 99450 - RNA, 32 nt, Human
ccaggagggguagaguuugaagagaagaucau

SEQ ID NO: 99451 - RNA, 32 nt, Human
ccaggagggugagggggagugaagaaggguga

SEQ ID NO: 99452 - RNA, 32 nt, Human
ccaggaggguguaaguucugaaugguuccuug

SEQ ID NO: 99453 - RNA, 24 nt, Human
ccaggagguagaggcugcagugag

SEQ ID NO: 99454 - RNA, 32 nt, Human
ccaggagguagguggagggcaaggccaccaga

SEQ ID NO: 99455 - RNA, 24 nt, Human
ccaggaggucaagccugcagcgag

SEQ ID NO: 99456 - RNA, 24 nt, Human
ccaggaggucaaggcugcagugag

SEQ ID NO: 99457 - RNA, 24 nt, Human
ccaggaggucaaggcuucagugag

SEQ ID NO: 99458 - RNA, 24 nt, Human
ccaggaggucaaggguacagugag

SEQ ID NO: 99459 - RNA, 24 nt, Human
ccaggaggucagggcugcagugag

SEQ ID NO: 99460 - RNA, 24 nt, Human
ccaggagguccaggccgcaaugag

SEQ ID NO: 99461 - RNA, 23 nt, Human
ccaggaggucgaggcugcaguga

SEQ ID NO: 99462 - RNA, 24 nt, Human
ccaggaggucgaggcugcagugag

SEQ ID NO: 99463 - RNA, 22 nt, Human
ccaggaggucgucugcagucag

SEQ ID NO: 99464 - RNA, 24 nt, Human
ccaggaggucuaggcugcagugag

SEQ ID NO: 99465 - RNA, 23 nt, Human
ccaggaggugaagguugcaguga

SEQ ID NO: 99466 - RNA, 24 nt, Human
ccaggaggugcagguugcagugag

SEQ ID NO: 99467 - RNA, 24 nt, Human
ccaggagguggaaacugcagagag

SEQ ID NO: 99468 - RNA, 32 nt, Human
ccaggagguggaccccagagugugaguggcac

SEQ ID NO: 99469 - RNA, 23 nt, Human
ccaggagguggacguugcaguga

SEQ ID NO: 99470 - RNA, 24 nt, Human
ccaggagguggagacugcagugag

SEQ ID NO: 99471 - RNA, 24 nt, Human
ccaggagguggagauugcagugag

SEQ ID NO: 99472 - RNA, 23 nt, Human
ccaggagguggagcuugcaguga

SEQ ID NO: 99473 - RNA, 24 nt, Human
ccaggagguggagcuugcagugag

SEQ ID NO: 99474 - RNA, 32 nt, Human
ccaggagguggaggaaggagcaggugcugccu

SEQ ID NO: 99475 - RNA, 23 nt, Human
ccaggagguggaggaugcaguga

SEQ ID NO: 99476 - RNA, 24 nt, Human
ccaggagguggaggcugcaaugag

SEQ ID NO: 99477 - RNA, 23 nt, Human
ccaggagguggaggcugcaguga

SEQ ID NO: 99478 - RNA, 24 nt, Human
ccaggagguggaggcugcagugag

SEQ ID NO: 99479 - RNA, 24 nt, Human
ccaggagguggaggcugcggugag

SEQ ID NO: 99480 - RNA, 24 nt, Human
ccaggagguggagguagcagugag

SEQ ID NO: 99481 - RNA, 24 nt, Human
ccaggagguggagguuacagugag

SEQ ID NO: 99482 - RNA, 24 nt, Human
ccaggagguggagguuccagugag

SEQ ID NO: 99483 - RNA, 24 nt, Human
ccaggagguggagguugaaaugag

SEQ ID NO: 99484 - RNA, 24 nt, Human
ccaggagguggagguugcaaugag

SEQ ID NO: 99485 - RNA, 24 nt, Human
ccaggagguggagguugcacugag

SEQ ID NO: 99486 - RNA, 20 nt, Human
ccaggagguggagguugcag

SEQ ID NO: 99487 - RNA, 23 nt, Human
ccaggagguggagguugcagcga

SEQ ID NO: 99488 - RNA, 24 nt, Human
ccaggagguggagguugcagcgag

SEQ ID NO: 99489 - RNA, 32 nt, Human
ccaggagguggagguugcagcgagccaagauc

SEQ ID NO: 99490 - RNA, 21 nt, Human
ccaggagguggagguugcagu

SEQ ID NO: 99491 - RNA, 23 nt, Human
ccaggagguggagguugcaguga

SEQ ID NO: 99492 - RNA, 24 nt, Human
ccaggagguggagguugcagugag

SEQ ID NO: 99493 - RNA, 24 nt, Human
ccaggagguggagguugcaguggg

SEQ ID NO: 99494 - RNA, 24 nt, Human
ccaggagguggagguugcaguuag

SEQ ID NO: 99495 - RNA, 23 nt, Human
ccaggagguggagguugcgguga

SEQ ID NO: 99496 - RNA, 24 nt, Human
ccaggagguggagguugcggugag

SEQ ID NO: 99497 - RNA, 24 nt, Human
ccaggagguggagguugcugugag

SEQ ID NO: 99498 - RNA, 24 nt, Human
ccaggagguggagguuguagugag

SEQ ID NO: 99499 - RNA, 24 nt, Human
ccaggagguggagguuucagcgag

SEQ ID NO: 99500 - RNA, 20 nt, Human
ccaggagguggaguugcagu

SEQ ID NO: 99501 - RNA, 23 nt, Human
ccaggagguggaguugcaguaag

SEQ ID NO: 99502 - RNA, 24 nt, Human
ccaggagguggaguuugcagugag

SEQ ID NO: 99503 - RNA, 24 nt, Human
ccaggagguggauguugcagugag

SEQ ID NO: 99504 - RNA, 32 nt, Human
ccaggagguggcugauuuuccuuugugccuuc

SEQ ID NO: 99505 - RNA, 24 nt, Human
ccaggagguggggguugcaccgag

SEQ ID NO: 99506 - RNA, 24 nt, Human
ccaggagguggugguugcagugag

SEQ ID NO: 99507 - RNA, 19 nt, Human
ccaggagguguugcaguga

SEQ ID NO: 99508 - RNA, 23 nt, Human
ccaggagguugaggcugcaguga

SEQ ID NO: 99509 - RNA, 24 nt, Human
ccaggagguugaggcugcagugag

SEQ ID NO: 99510 - RNA, 23 nt, Human
ccaggagguugagguugcaguga

SEQ ID NO: 99511 - RNA, 24 nt, Human
ccaggagguugagguugcagugag

SEQ ID NO: 99512 - RNA, 24 nt, Human
ccaggagguuguggauacagugag

SEQ ID NO: 99513 - RNA, 24 nt, Human
ccaggagguuguggcugcagugag

SEQ ID NO: 99514 - RNA, 18 nt, Human
ccaggaguacugcaggga

SEQ ID NO: 99515 - RNA, 32 nt, Human
ccaggaguaggaagaagggugggcuuccaagu

SEQ ID NO: 99516 - RNA, 32 nt, Human
ccaggaguaguggcugagcucugugaucgcug

SEQ ID NO: 99517 - RNA, 32 nt, Human
ccaggaguauaagagcagccugggcaaaauag

SEQ ID NO: 99518 - RNA, 23 nt, Human
ccaggaguauagguaugugccac

SEQ ID NO: 99519 - RNA, 21 nt, Human
ccaggaguaucuccucaggug

SEQ ID NO: 99520 - RNA, 24 nt, Human
ccaggagucaaaagcugcagugag

SEQ ID NO: 99521 - RNA, 24 nt, Human
ccaggagucagagguuucagugag

SEQ ID NO: 99522 - RNA, 32 nt, Human
ccaggagucccacuccaagccagcaagccgaa

SEQ ID NO: 99523 - RNA, 21 nt, Human
ccaggagucuaggccuuggua

SEQ ID NO: 99524 - RNA, 32 nt, Human
ccaggagucugagaccagccugggcaacauag

SEQ ID NO: 99525 - RNA, 32 nt, Human
ccaggagucugagaccagccugggcaacaugg

SEQ ID NO: 99526 - RNA, 32 nt, Human
ccaggagucugaggcacaagaaucacucgaac

SEQ ID NO: 99527 - RNA, 32 nt, Human
ccaggagucugcacucuucagucuuugcaggc

SEQ ID NO: 99528 - RNA, 18 nt, Human
ccaggagucuuggcauga

SEQ ID NO: 99529 - RNA, 32 nt, Human
ccaggagugagggcuggggagggaccuaacug

SEQ ID NO: 99530 - RNA, 32 nt, Human
ccaggagugccucagcccaucuguccggagag

SEQ ID NO: 99531 - RNA, 18 nt, Human
ccaggaguggacugcgga

SEQ ID NO: 99532 - RNA, 32 nt, Human
ccaggaguggccaggcccugcccgcccaccau

SEQ ID NO: 99533 - RNA, 32 nt, Human
ccaggaguggguggagaguggagugugcuggg

SEQ ID NO: 99534 - RNA, 32 nt, Human
ccaggaguggguggggagugggggugggggua

SEQ ID NO: 99535 - RNA, 32 nt, Human
ccaggagugguggcggguaccuguaaucccag

SEQ ID NO: 99536 - RNA, 24 nt, Human
ccaggaguuaagaggcugcaguga

SEQ ID NO: 99537 - RNA, 24 nt, Human
ccaggaguucaaagcugcagugag

SEQ ID NO: 99538 - RNA, 24 nt, Human
ccaggaguucaacgcugcagugag

SEQ ID NO: 99539 - RNA, 18 nt, Human
ccaggaguucaagagcag

SEQ ID NO: 99540 - RNA, 32 nt, Human
ccaggaguucaaggccagccugggcaacauag

SEQ ID NO: 99541 - RNA, 32 nt, Human
ccaggaguucaaggccagccugggcaacaugg

SEQ ID NO: 99542 - RNA, 24 nt, Human
ccaggaguucaagguggcagugag

SEQ ID NO: 99543 - RNA, 24 nt, Human
ccaggaguucaagucugcagugag

SEQ ID NO: 99544 - RNA, 24 nt, Human
ccaggaguucagggcugcagugag

SEQ ID NO: 99545 - RNA, 19 nt, Human
ccaggaguuccagaccagc

SEQ ID NO: 99546 - RNA, 21 nt, Human
ccaggaguucgaagcugcagg

SEQ ID NO: 99547 - RNA, 23 nt, Human
ccaggaguucgaggcugcaguga

SEQ ID NO: 99548 - RNA, 24 nt, Human
ccaggaguucgaggcugcagugag

SEQ ID NO: 99549 - RNA, 23 nt, Human
ccaggaguucgagguuacaguga

SEQ ID NO: 99550 - RNA, 24 nt, Human
ccaggaguucgggguuacagugag

SEQ ID NO: 99551 - RNA, 32 nt, Human
ccaggaguugaagaccagccugggcaacacag

SEQ ID NO: 99552 - RNA, 32 nt, Human
ccaggaguugaagaccagccugggcaacauag

SEQ ID NO: 99553 - RNA, 32 nt, Human
ccaggaguugcagaccagccuggguaacauag

SEQ ID NO: 99554 - RNA, 24 nt, Human
ccaggaguuggaggccgcagugag

SEQ ID NO: 99555 - RNA, 24 nt, Human
ccaggaguuggaggcuacagugag

SEQ ID NO: 99556 - RNA, 24 nt, Human
ccaggaguuuaaggcugcagugag

SEQ ID NO: 99557 - RNA, 32 nt, Human
ccaggaguuugaaaccagccugggcaacaugg

SEQ ID NO: 99558 - RNA, 32 nt, Human
ccaggaguuugaaaccagccuggguaacaugg

SEQ ID NO: 99559 - RNA, 24 nt, Human
ccaggaguuugaagcugcagugag

SEQ ID NO: 99560 - RNA, 32 nt, Human
ccaggaguuugacaccagccugggcaacauag

SEQ ID NO: 99561 - RNA, 32 nt, Human
ccaggaguuugacaccagccugggcaacaugg

SEQ ID NO: 99562 - RNA, 32 nt, Human
ccaggaguuugagaccagccuaggcaacacag

SEQ ID NO: 99563 - RNA, 32 nt, Human
ccaggaguuugagaccagccuaggcaacauag

SEQ ID NO: 99564 - RNA, 32 nt, Human
ccaggaguuugagaccagccugggcaaaacag

SEQ ID NO: 99565 - RNA, 32 nt, Human
ccaggaguuugagaccagccugggcaacaaag

SEQ ID NO: 99566 - RNA, 32 nt, Human
ccaggaguuugagaccagccugggcaacacaa

SEQ ID NO: 99567 - RNA, 32 nt, Human
ccaggaguuugagaccagccugggcaacacag

SEQ ID NO: 99568 - RNA, 32 nt, Human
ccaggaguuugagaccagccugggcaacauag

SEQ ID NO: 99569 - RNA, 32 nt, Human
ccaggaguuugagaccagccugggcaacauca

SEQ ID NO: 99570 - RNA, 32 nt, Human
ccaggaguuugagaccagccugggcaacaugg

SEQ ID NO: 99571 - RNA, 32 nt, Human
ccaggaguuugagaccagccugggcaacguag

SEQ ID NO: 99572 - RNA, 32 nt, Human
ccaggaguuugagaccagccugggcaauaugg

SEQ ID NO: 99573 - RNA, 32 nt, Human
ccaggaguuugagaccagccuggguaacauga

SEQ ID NO: 99574 - RNA, 20 nt, Human
ccaggaguuugagaccagcu

SEQ ID NO: 99575 - RNA, 32 nt, Human
ccaggaguuugagacuagccugggcaacaugg

SEQ ID NO: 99576 - RNA, 32 nt, Human
ccaggaguuugagacuagccugggcaacuugg

SEQ ID NO: 99577 - RNA, 32 nt, Human
ccaggaguuugaggccagccugggcaacauag

SEQ ID NO: 99578 - RNA, 24 nt, Human
ccaggaguuugaggcuacagugag

SEQ ID NO: 99579 - RNA, 24 nt, Human
ccaggaguuugaggcuauagugag

SEQ ID NO: 99580 - RNA, 23 nt, Human
ccaggaguuugaggcugcaguga

SEQ ID NO: 99581 - RNA, 24 nt, Human
ccaggaguuugaggcugcagugag

SEQ ID NO: 99582 - RNA, 24 nt, Human
ccaggaguuugaggcugcggugag

SEQ ID NO: 99583 - RNA, 23 nt, Human
ccaggaguuugagguuacaguga

SEQ ID NO: 99584 - RNA, 22 nt, Human
ccaggaguuugagguugcagug

SEQ ID NO: 99585 - RNA, 24 nt, Human
ccaggaguuugagguugcagugag

SEQ ID NO: 99586 - RNA, 32 nt, Human
ccaggaguuugcaggccagacugcaguggccu

SEQ ID NO: 99587 - RNA, 32 nt, Human
ccaggaguuugcgaccagccugggcagaauag

SEQ ID NO: 99588 - RNA, 32 nt, Human
ccaggaguuuguuaccagccugggcaacauag

SEQ ID NO: 99589 - RNA, 32 nt, Human
ccaggauaaaacucagauaccaaggauaaaug

SEQ ID NO: 99590 - RNA, 32 nt, Human
ccaggauagacagaagagcugccgaagaggug

SEQ ID NO: 99591 - RNA, 32 nt, Human
ccaggauaguugcacugagcacugugaggccc

SEQ ID NO: 99592 - RNA, 32 nt, Human
ccaggaucaagcaauucugacucagccuccca

SEQ ID NO: 99593 - RNA, 32 nt, Human
ccaggaucaccaggaagcuccagaggaucccc

SEQ ID NO: 99594 - RNA, 32 nt, Human
ccaggaucaccccaggugucucuucucacgug

SEQ ID NO: 99595 - RNA, 32 nt, Human
ccaggaucacucuacagccugccuccuggguu

SEQ ID NO: 99596 - RNA, 32 nt, Human
ccaggaucagagauggagucucgcucugucac

SEQ ID NO: 99597 - RNA, 22 nt, Human
ccaggaucagcgcccccugcca

SEQ ID NO: 99598 - RNA, 32 nt, Human
ccaggaucauucuuccccuccuccagcuguug

SEQ ID NO: 99599 - RNA, 32 nt, Human
ccaggaucauuucucuuucuucagggccagac

SEQ ID NO: 99600 - RNA, 32 nt, Human
ccaggauccagccucacuucuaggguauggga

SEQ ID NO: 99601 - RNA, 26 nt, Human
ccaggaucgcaacaguuaagcugccu

SEQ ID NO: 99602 - RNA, 32 nt, Human
ccaggaucugcugcgcucauggaggaugucag

SEQ ID NO: 99603 - RNA, 32 nt, Human
ccaggaucuuuaaauuuccauggaugcauaua

SEQ ID NO: 99604 - RNA, 32 nt, Human
ccaggaugaaaccaagagggggaugucagccu

SEQ ID NO: 99605 - RNA, 32 nt, Human
ccaggaugaaauucccccagaaacccaguccu

SEQ ID NO: 99606 - RNA, 32 nt, Human
ccaggaugaacaacguuuccagcugggaauua

SEQ ID NO: 99607 - RNA, 32 nt, Human
ccaggaugacaccuccauuucucuccaggaag

SEQ ID NO: 99608 - RNA, 24 nt, Human
ccaggaugauggcccuguggaugg

SEQ ID NO: 99609 - RNA, 32 nt, Human
ccaggaugcccacuucccuccacccccacacc

SEQ ID NO: 99610 - RNA, 21 nt, Human
ccaggaugcccgggccacagg

SEQ ID NO: 99611 - RNA, 30 nt, Human
ccaggaugccgaauaucaaaaucuucagcg

SEQ ID NO: 99612 - RNA, 32 nt, Human
ccaggaugccucucccccauccgcccccgcug

SEQ ID NO: 99613 - RNA, 32 nt, Human
ccaggaugccuggugccaugugcuugaugcug

SEQ ID NO: 99614 - RNA, 24 nt, Human
ccaggaugcggagguugcagugag

SEQ ID NO: 99615 - RNA, 24 nt, Human
ccaggauggagaggcgggucccag

SEQ ID NO: 99616 - RNA, 30 nt, Human
ccaggauggaggcuccagcccagaaggcug

SEQ ID NO: 99617 - RNA, 19 nt, Human
ccaggauggagugcaguga

SEQ ID NO: 99618 - RNA, 19 nt, Human
ccaggauggagugcagugg

SEQ ID NO: 99619 - RNA, 32 nt, Human
ccaggauggagugcaguggcaugaucucgacu

SEQ ID NO: 99620 - RNA, 32 nt, Human
ccaggauggagugcaguggcaugaucucggcu

SEQ ID NO: 99621 - RNA, 32 nt, Human
ccaggauggagugcaguggcuauucacagguu

SEQ ID NO: 99622 - RNA, 32 nt, Human
ccaggauggagugcaguggcucaaucucggcu

SEQ ID NO: 99623 - RNA, 21 nt, Human
ccaggauggagugcaguggug

SEQ ID NO: 99624 - RNA, 32 nt, Human
ccaggauggagugcagugguugaucauagcuc

SEQ ID NO: 99625 - RNA, 32 nt, Human
ccaggauggccaggccagagcugcagcugggg

SEQ ID NO: 99626 - RNA, 30 nt, Human
ccaggauggcugcagcuccuccaaguuacu

SEQ ID NO: 99627 - RNA, 30 nt, Human
ccaggaugggagcugcugggaggcaggacu

SEQ ID NO: 99628 - RNA, 32 nt, Human
ccaggaugggcugcagguugcagucagggcuu

SEQ ID NO: 99629 - RNA, 32 nt, Human
ccaggauggggaggcagagugggagcucacuc

SEQ ID NO: 99630 - RNA, 19 nt, Human
ccaggauggguaacuuuaa

SEQ ID NO: 99631 - RNA, 32 nt, Human
ccaggauggucucgauccccugaucucgugau

SEQ ID NO: 99632 - RNA, 32 nt, Human
ccaggauggucucgaucuccugaucucgugau

SEQ ID NO: 99633 - RNA, 32 nt, Human
ccaggauggucucgaucuucugaccucgugau

SEQ ID NO: 99634 - RNA, 32 nt, Human
ccaggaugguguccucugugaggacuugaacu

SEQ ID NO: 99635 - RNA, 32 nt, Human
ccaggaugucuaauacccugucccagugcccg

SEQ ID NO: 99636 - RNA, 18 nt, Human
ccaggaugucuuuuccca

SEQ ID NO: 99637 - RNA, 32 nt, Human
ccaggauguguuuccuuagauuuccuuuccua

SEQ ID NO: 99638 - RNA, 22 nt, Human
ccaggauuacaggcaugagcca

SEQ ID NO: 99639 - RNA, 21 nt, Human
ccaggauuacccgccagcuca

SEQ ID NO: 99640 - RNA, 22 nt, Human
ccaggauuauaggcaugagcca

SEQ ID NO: 99641 - RNA, 32 nt, Human
ccaggauucagaucugguuucagaaucgaagg

SEQ ID NO: 99642 - RNA, 22 nt, Human
ccaggauugcugcugcugcugc

SEQ ID NO: 99643 - RNA, 23 nt, Human
ccaggauuggggacagggacaga

SEQ ID NO: 99644 - RNA, 32 nt, Human
ccaggauugggguggguguuggagagggcuuu

SEQ ID NO: 99645 - RNA, 32 nt, Human
ccaggauuugaggaggagaagggaggaggugg

SEQ ID NO: 99646 - RNA, 32 nt, Human
ccaggauuugcacagaagcacaugcaccuacc

SEQ ID NO: 99647 - RNA, 32 nt, Human
ccaggcaaacuuccugcuacacaugcccugaa

SEQ ID NO: 99648 - RNA, 32 nt, Human
ccaggcaaagcggagcggagauccucaaacgg

SEQ ID NO: 99649 - RNA, 32 nt, Human
ccaggcaacacagcaggaggugagcagccagc

SEQ ID NO: 99650 - RNA, 21 nt, Human
ccaggcaacauaacaagaccc

SEQ ID NO: 99651 - RNA, 32 nt, Human
ccaggcaacauggcaaaaccccgucucuacaa

SEQ ID NO: 99652 - RNA, 20 nt, Human
ccaggcaacauggugaaacc

SEQ ID NO: 99653 - RNA, 32 nt, Human
ccaggcaacauggugaaaccccaucucuacaa

SEQ ID NO: 99654 - RNA, 29 nt, Human
ccaggcaacauggugaccccaucucuacc

SEQ ID NO: 99655 - RNA, 21 nt, Human
ccaggcaaccagcugcugccu

SEQ ID NO: 99656 - RNA, 32 nt, Human
ccaggcaacuaccacaccuuguuuggaguccg

SEQ ID NO: 99657 - RNA, 32 nt, Human
ccaggcaagccgcggcaagaacgcaaggggcg

SEQ ID NO: 99658 - RNA, 16 nt, Human
ccaggcaaggggccag

SEQ ID NO: 99659 - RNA, 32 nt, Human
ccaggcacaaucugagggucucagcccaccug

SEQ ID NO: 99660 - RNA, 20 nt, Human
ccaggcacaccgccuugagg

SEQ ID NO: 99661 - RNA, 32 nt, Human
ccaggcacaccucagucuucuugacccagagc

SEQ ID NO: 99662 - RNA, 32 nt, Human
ccaggcacagccccaggcuggcaaagggaggg

SEQ ID NO: 99663 - RNA, 32 nt, Human
ccaggcacagccgccuccggaaugcacaggcg

SEQ ID NO: 99664 - RNA, 24 nt, Human
ccaggcacaggaggacaacuaggg

SEQ ID NO: 99665 - RNA, 32 nt, Human
ccaggcacaguggcucauaccuguaaugccag

SEQ ID NO: 99666 - RNA, 32 nt, Human
ccaggcacaguggcucaugccuguaaucccaa

SEQ ID NO: 99667 - RNA, 32 nt, Human
ccaggcacaguggcucaugccuguaaucccag

SEQ ID NO: 99668 - RNA, 32 nt, Human
ccaggcacaguggcucaugccuguaauccuaa

SEQ ID NO: 99669 - RNA, 32 nt, Human
ccaggcacaguggcucaugccuguaaucuuau

SEQ ID NO: 99670 - RNA, 32 nt, Human
ccaggcacccuccagcgucaggugcggauccc

SEQ ID NO: 99671 - RNA, 32 nt, Human
ccaggcacccuguucugagacuucugaggcug

SEQ ID NO: 99672 - RNA, 16 nt, Human
ccaggcaccuccccuc

SEQ ID NO: 99673 - RNA, 32 nt, Human
ccaggcaccucccggcucacggggagcucaga

SEQ ID NO: 99674 - RNA, 32 nt, Human
ccaggcaccucgcugaacugcucucuuauuuu

SEQ ID NO: 99675 - RNA, 32 nt, Human
ccaggcaccucucuccccaugguguuuuccac

SEQ ID NO: 99676 - RNA, 32 nt, Human
ccaggcaccuuggcucaugccuguaauccuag

SEQ ID NO: 99677 - RNA, 32 nt, Human
ccaggcacgccuguaaucccagcacuuuggga

SEQ ID NO: 99678 - RNA, 32 nt, Human
ccaggcacgcuguccuggaaguugucugucuc

SEQ ID NO: 99679 - RNA, 32 nt, Human
ccaggcacggcggcucacgccuguaaucccag

SEQ ID NO: 99680 - RNA, 32 nt, Human
ccaggcacgggaggcccuggcucuggaggaga

SEQ ID NO: 99681 - RNA, 32 nt, Human
ccaggcacgggcugugugaaaggguuuaaaag

SEQ ID NO: 99682 - RNA, 23 nt, Human
ccaggcacgggggcaugggcaga

SEQ ID NO: 99683 - RNA, 32 nt, Human
ccaggcacggugcacuuucuccaccuccugca

SEQ ID NO: 99684 - RNA, 25 nt, Human
ccaggcacgucccggaccugugggg

SEQ ID NO: 99685 - RNA, 32 nt, Human
ccaggcacucacucaaacuugcucuucaacuc

SEQ ID NO: 99686 - RNA, 32 nt, Human
ccaggcacugaauccuaugaagcaggugccaa

SEQ ID NO: 99687 - RNA, 32 nt, Human
ccaggcacugcacagcaccuuggcugaugcug

SEQ ID NO: 99688 - RNA, 23 nt, Human
ccaggcacugcugaggggugcgg

SEQ ID NO: 99689 - RNA, 32 nt, Human
ccaggcacugcuggccuuucuccugcccggcc

SEQ ID NO: 99690 - RNA, 32 nt, Human
ccaggcacuggcagggaggguaagggcuggcu

SEQ ID NO: 99691 - RNA, 32 nt, Human
ccaggcacuggcaugaagaaagagucuuugua

SEQ ID NO: 99692 - RNA, 23 nt, Human
ccaggcacugggcccgugcagag

SEQ ID NO: 99693 - RNA, 32 nt, Human
ccaggcacugggugcugacaggggaaccauga

SEQ ID NO: 99694 - RNA, 32 nt, Human
ccaggcacuguggcucaugccuguaaucccag

SEQ ID NO: 99695 - RNA, 32 nt, Human
ccaggcagaaaggugcagagacccaucugacg

SEQ ID NO: 99696 - RNA, 32 nt, Human
ccaggcagaagagcaugcccuuugccguugca

SEQ ID NO: 99697 - RNA, 32 nt, Human
ccaggcagaaggaaacucaaagugauggggug

SEQ ID NO: 99698 - RNA, 32 nt, Human
ccaggcagagagcgaccagcaggcuccucagc

SEQ ID NO: 99699 - RNA, 32 nt, Human
ccaggcagagccugaggaagcugaagcagagg

SEQ ID NO: 99700 - RNA, 32 nt, Human
ccaggcagagcggcgcaggcagcugugagcuu

SEQ ID NO: 99701 - RNA, 32 nt, Human
ccaggcagaggaacagcaugugcacuggugca

SEQ ID NO: 99702 - RNA, 19 nt, Human
ccaggcagaggaggcacag

SEQ ID NO: 99703 - RNA, 21 nt, Human
ccaggcagagguugcagugag

SEQ ID NO: 99704 - RNA, 32 nt, Human
ccaggcagaucaggggcucuggggaaacugcu

SEQ ID NO: 99705 - RNA, 32 nt, Human
ccaggcagaucucaaacuucugaccucgugau

SEQ ID NO: 99706 - RNA, 32 nt, Human
ccaggcagcaaugggguuccugcagcugcugg

SEQ ID NO: 99707 - RNA, 32 nt, Human
ccaggcagcagagggacaagugaccucgugga

SEQ ID NO: 99708 - RNA, 22 nt, Human
ccaggcagcaguuagcccgccg

SEQ ID NO: 99709 - RNA, 18 nt, Human
ccaggcagccccauccca

SEQ ID NO: 99710 - RNA, 22 nt, Human
ccaggcagcccccucugcagag

SEQ ID NO: 99711 - RNA, 32 nt, Human
ccaggcagccuccucuuagagcuccugaauuc

SEQ ID NO: 99712 - RNA, 32 nt, Human
ccaggcagccuguccuccuccuccaggcagcc

SEQ ID NO: 99713 - RNA, 32 nt, Human
ccaggcagcuaagaagucuuaggcagcagccc

SEQ ID NO: 99714 - RNA, 32 nt, Human
ccaggcagcucauucacuaucugugauccacc

SEQ ID NO: 99715 - RNA, 20 nt, Human
ccaggcagcucuggagccag

SEQ ID NO: 99716 - RNA, 32 nt, Human
ccaggcagcugcaggagagugcugccaaguug

SEQ ID NO: 99717 - RNA, 30 nt, Human
ccaggcagcuugccacuugggagggcagaa

SEQ ID NO: 99718 - RNA, 32 nt, Human
ccaggcaggacccccaacccgcccagcccgcu

SEQ ID NO: 99719 - RNA, 32 nt, Human
ccaggcaggacgaacacuugagcccaggcguu

SEQ ID NO: 99720 - RNA, 32 nt, Human
ccaggcaggagaaaggacagcugccccucaaa

SEQ ID NO: 99721 - RNA, 32 nt, Human
ccaggcaggagaagguaccucucuugaaacga

SEQ ID NO: 99722 - RNA, 32 nt, Human
ccaggcaggaggaucacuugggcccaggaggu

SEQ ID NO: 99723 - RNA, 19 nt, Human
ccaggcaggagugcagugg

SEQ ID NO: 99724 - RNA, 32 nt, Human
ccaggcaggcaccugggcuuucuggaauccaa

SEQ ID NO: 99725 - RNA, 23 nt, Human
ccaggcaggcagaucacuugagg

SEQ ID NO: 99726 - RNA, 32 nt, Human
ccaggcaggcagaucacuugaggucaggaguu

SEQ ID NO: 99727 - RNA, 32 nt, Human
ccaggcaggccaagacuugaguuggcaacuca

SEQ ID NO: 99728 - RNA, 20 nt, Human
ccaggcaggccagggcccag

SEQ ID NO: 99729 - RNA, 30 nt, Human
ccaggcaggcgaggagaagcugugcuguga

SEQ ID NO: 99730 - RNA, 23 nt, Human
ccaggcaggcggaucacuugagg

SEQ ID NO: 99731 - RNA, 32 nt, Human
ccaggcaggcggaucacuugagguuaggaguu

SEQ ID NO: 99732 - RNA, 20 nt, Human
ccaggcagggaaggggccag

SEQ ID NO: 99733 - RNA, 32 nt, Human
ccaggcagggacacccucacaccaccagcccc

SEQ ID NO: 99734 - RNA, 32 nt, Human
ccaggcagggacccaauaaaccuuugugaaug

SEQ ID NO: 99735 - RNA, 32 nt, Human
ccaggcagggacucuuuuccacacgaugacac

SEQ ID NO: 99736 - RNA, 17 nt, Human
ccaggcagggaggccag

SEQ ID NO: 99737 - RNA, 22 nt, Human
ccaggcagggaguagggcuuag

SEQ ID NO: 99738 - RNA, 32 nt, Human
ccaggcaggggagcagaugagggaggagccuu

SEQ ID NO: 99739 - RNA, 32 nt, Human
ccaggcaggggguuccagaguggggugggccg

SEQ ID NO: 99740 - RNA, 32 nt, Human
ccaggcagguaacaccugucauccuggcuggu

SEQ ID NO: 99741 - RNA, 24 nt, Human
ccaggcaggucugugugggacaga

SEQ ID NO: 99742 - RNA, 23 nt, Human
ccaggcagguggaucucuugaga

SEQ ID NO: 99743 - RNA, 18 nt, Human
ccaggcagucagagcugg

SEQ ID NO: 99744 - RNA, 32 nt, Human
ccaggcagucaugggcccugaggccccuccug

SEQ ID NO: 99745 - RNA, 25 nt, Human
ccaggcagucggaacuuguagugag

SEQ ID NO: 99746 - RNA, 32 nt, Human
ccaggcagucugacccagagccugcacgcuug

SEQ ID NO: 99747 - RNA, 32 nt, Human
ccaggcagucuugggacuugaguuuguccggc

SEQ ID NO: 99748 - RNA, 32 nt, Human
ccaggcagucuugggacuugggucuguccugc

SEQ ID NO: 99749 - RNA, 19 nt, Human
ccaggcagugaggauucag

SEQ ID NO: 99750 - RNA, 20 nt, Human
ccaggcagugccaggaguca

SEQ ID NO: 99751 - RNA, 20 nt, Human
ccaggcagugcggaacucag

SEQ ID NO: 99752 - RNA, 24 nt, Human
ccaggcaguggagguugcagugag

SEQ ID NO: 99753 - RNA, 32 nt, Human
ccaggcaguggucaccccaugggacaggcaca

SEQ ID NO: 99754 - RNA, 32 nt, Human
ccaggcaguucugcguuugcaauggccuuguc

SEQ ID NO: 99755 - RNA, 32 nt, Human
ccaggcauagugacugaugccuguaaucccaa

SEQ ID NO: 99756 - RNA, 32 nt, Human
ccaggcauaguggcucuugccuguaaucccag

SEQ ID NO: 99757 - RNA, 32 nt, Human
ccaggcauaguggguuaucccuguaauuccag

SEQ ID NO: 99758 - RNA, 32 nt, Human
ccaggcauaguggugcaugccuguaaucccag

SEQ ID NO: 99759 - RNA, 32 nt, Human
ccaggcaucauggcucacaccuguaaucccag

SEQ ID NO: 99760 - RNA, 32 nt, Human
ccaggcaucccucccugcucuucugucggagc

SEQ ID NO: 99761 - RNA, 32 nt, Human
ccaggcaucccuccuaacuuuucuuugugcag

SEQ ID NO: 99762 - RNA, 32 nt, Human
ccaggcaucguggugggugccuguaaucccag

SEQ ID NO: 99763 - RNA, 32 nt, Human
ccaggcaugaucuuccccaucaggcugggcuc

SEQ ID NO: 99764 - RNA, 32 nt, Human
ccaggcaugauggcacacaccuguaaucucag

SEQ ID NO: 99765 - RNA, 32 nt, Human
ccaggcaugauggcacaugccuguaaucccag

SEQ ID NO: 99766 - RNA, 32 nt, Human
ccaggcaugauggcacaugccuguaaucucag

SEQ ID NO: 99767 - RNA, 32 nt, Human
ccaggcaugauguguggggcugucaacaaccu

SEQ ID NO: 99768 - RNA, 31 nt, Human
ccaggcaugccccgcuacgagcuggcuuuaa

SEQ ID NO: 99769 - RNA, 32 nt, Human
ccaggcaugcuggcuuaugacuguaaucccag

SEQ ID NO: 99770 - RNA, 32 nt, Human
ccaggcaugcuggugcacaccuguaaucccag

SEQ ID NO: 99771 - RNA, 32 nt, Human
ccaggcauggcucugugagauucuguggaaug

SEQ ID NO: 99772 - RNA, 32 nt, Human
ccaggcaugguagcucacgccuguaauccuag

SEQ ID NO: 99773 - RNA, 32 nt, Human
ccaggcauggugacgcaugccuguaaucccag

SEQ ID NO: 99774 - RNA, 32 nt, Human
ccaggcauggugacucaggccuguaaucccag

SEQ ID NO: 99775 - RNA, 32 nt, Human
ccaggcauggugacucauaccuguaaucccaa

SEQ ID NO: 99776 - RNA, 32 nt, Human
ccaggcauggugaugcacaccuguaaucccag

SEQ ID NO: 99777 - RNA, 32 nt, Human
ccaggcaugguggcaaacgccuguaaucccaa

SEQ ID NO: 99778 - RNA, 32 nt, Human
ccaggcaugguggcacacaccuguaaucguag

SEQ ID NO: 99779 - RNA, 32 nt, Human
ccaggcaugguggcacacgccuguaaucccag

SEQ ID NO: 99780 - RNA, 32 nt, Human
ccaggcaugguggcacaugccuguaaucccag

SEQ ID NO: 99781 - RNA, 32 nt, Human
ccaggcaugguggcacaugccuguaaucucag

SEQ ID NO: 99782 - RNA, 32 nt, Human
ccaggcaugguggcaccugccuguaaucccag

SEQ ID NO: 99783 - RNA, 32 nt, Human
ccaggcaugguggcacgcgccuguaaucccag

SEQ ID NO: 99784 - RNA, 32 nt, Human
ccaggcaugguggcacgugccuguaaucccag

SEQ ID NO: 99785 - RNA, 32 nt, Human
ccaggcaugguggcaggcaccuguaaucccag

SEQ ID NO: 99786 - RNA, 32 nt, Human
ccaggcaugguggcaggcgccuguaaucccag

SEQ ID NO: 99787 - RNA, 32 nt, Human
ccaggcaugguggccagcaccuguaaucccag

SEQ ID NO: 99788 - RNA, 32 nt, Human
ccaggcaugguggcccacgccuguaaucccag

SEQ ID NO: 99789 - RNA, 32 nt, Human
ccaggcaugguggcccaugccuguaaucccag

SEQ ID NO: 99790 - RNA, 32 nt, Human
ccaggcaugguggcgcaugccuguaaucccag

SEQ ID NO: 99791 - RNA, 32 nt, Human
ccaggcaugguggcgcaugccuguaaucucag

SEQ ID NO: 99792 - RNA, 32 nt, Human
ccaggcaugguggcggacaccuguaaucccug

SEQ ID NO: 99793 - RNA, 32 nt, Human
ccaggcaugguggcgggcaccuguaaucccag

SEQ ID NO: 99794 - RNA, 32 nt, Human
ccaggcaugguggcguaugccuguaaucccag

SEQ ID NO: 99795 - RNA, 32 nt, Human
ccaggcaugguggcucacaccuguaaccccca

SEQ ID NO: 99796 - RNA, 32 nt, Human
ccaggcaugguggcucacaccuguaauccaag

SEQ ID NO: 99797 - RNA, 32 nt, Human
ccaggcaugguggcucacaccuguaaucccag

SEQ ID NO: 99798 - RNA, 32 nt, Human
ccaggcaugguggcucacaccuguaauccuag

SEQ ID NO: 99799 - RNA, 32 nt, Human
ccaggcaugguggcucacaccuguaauuucag

SEQ ID NO: 99800 - RNA, 32 nt, Human
ccaggcaugguggcucacgccuguaaucccaa

SEQ ID NO: 99801 - RNA, 32 nt, Human
ccaggcaugguggcucacgccuguaaucccag

SEQ ID NO: 99802 - RNA, 32 nt, Human
ccaggcaugguggcucacgccuguaauccuag

SEQ ID NO: 99803 - RNA, 32 nt, Human
ccaggcaugguggcucacgccuguaauccugg

SEQ ID NO: 99804 - RNA, 32 nt, Human
ccaggcaugguggcucacgccuguaaucucag

SEQ ID NO: 99805 - RNA, 32 nt, Human
ccaggcaugguggcucauaccuguaaucccag

SEQ ID NO: 99806 - RNA, 32 nt, Human
ccaggcaugguggcucaugccuauaagcaccc

SEQ ID NO: 99807 - RNA, 32 nt, Human
ccaggcaugguggcucaugccuguaaacccag

SEQ ID NO: 99808 - RNA, 32 nt, Human
ccaggcaugguggcucaugccuguaaucccaa

SEQ ID NO: 99809 - RNA, 32 nt, Human
ccaggcaugguggcucaugccuguaaucccag

SEQ ID NO: 99810 - RNA, 32 nt, Human
ccaggcaugguggcucaugccuguaauuccag

SEQ ID NO: 99811 - RNA, 32 nt, Human
ccaggcaugguggcucaugccuguaauuccgg

SEQ ID NO: 99812 - RNA, 32 nt, Human
ccaggcaugguggcucaugccuguggucccag

SEQ ID NO: 99813 - RNA, 32 nt, Human
ccaggcaugguggcucaugcuuguaaaccuga

SEQ ID NO: 99814 - RNA, 32 nt, Human
ccaggcaugguggcuuacgccuguaaucccag

SEQ ID NO: 99815 - RNA, 32 nt, Human
ccaggcaugguggcuuacgccuguaauccuag

SEQ ID NO: 99816 - RNA, 32 nt, Human
ccaggcauggugggaggcaccuguaaucccag

SEQ ID NO: 99817 - RNA, 32 nt, Human
ccaggcauggugguagaugccuguaauuccag

SEQ ID NO: 99818 - RNA, 32 nt, Human
ccaggcaugguggugagccccuguaaucccag

SEQ ID NO: 99819 - RNA, 32 nt, Human
ccaggcaugguggugagugccuguaaucccag

SEQ ID NO: 99820 - RNA, 32 nt, Human
ccaggcaugguggugagugccuguaaucucag

SEQ ID NO: 99821 - RNA, 32 nt, Human
ccaggcaugguggugcaugccuguaaucccag

SEQ ID NO: 99822 - RNA, 32 nt, Human
ccaggcaugguggugcaugccuguaaucccug

SEQ ID NO: 99823 - RNA, 32 nt, Human
ccaggcaugguggugcgagccuguaauuccag

SEQ ID NO: 99824 - RNA, 32 nt, Human
ccaggcaugguggugggcaccuguaaucccag

SEQ ID NO: 99825 - RNA, 32 nt, Human
ccaggcauggugguggguaccuguaaucccag

SEQ ID NO: 99826 - RNA, 32 nt, Human
ccaggcaugguggugugcaccuguaaucccag

SEQ ID NO: 99827 - RNA, 32 nt, Human
ccaggcaugguggugugcgccuguaaucccag

SEQ ID NO: 99828 - RNA, 32 nt, Human
ccaggcauggugguucacaccuguaauccuag

SEQ ID NO: 99829 - RNA, 32 nt, Human
ccaggcauguuggugugcaccuguaaucccag

SEQ ID NO: 99830 - RNA, 32 nt, Human
ccaggcauuuccauacauccucugaaucuuaa

SEQ ID NO: 99831 - RNA, 32 nt, Human
ccaggcauuugagaccagccuggguaacauag

SEQ ID NO: 99832 - RNA, 19 nt, Human
ccaggccaaagaucccccc

SEQ ID NO: 99833 - RNA, 28 nt, Human
ccaggccaaagugcugcugauucccacu

SEQ ID NO: 99834 - RNA, 21 nt, Human
ccaggccaacauggugaaacc

SEQ ID NO: 99835 - RNA, 25 nt, Human
ccaggccaacauggugaaacccugu

SEQ ID NO: 99836 - RNA, 32 nt, Human
ccaggccaacuucuccccgcugucugaggaca

SEQ ID NO: 99837 - RNA, 32 nt, Human
ccaggccaagcccccgccucccacuugaagcc

SEQ ID NO: 99838 - RNA, 32 nt, Human
ccaggccaagggucgacugcagguuguuugag

SEQ ID NO: 99839 - RNA, 32 nt, Human
ccaggccacaagacaguagugaugcucugaaa

SEQ ID NO: 99840 - RNA, 32 nt, Human
ccaggccacaaggacagugugugcaauggcuu

SEQ ID NO: 99841 - RNA, 32 nt, Human
ccaggccacacagcugguaagcgccagagcca

SEQ ID NO: 99842 - RNA, 32 nt, Human
ccaggccacagugaguuaugggcaaagcuuuu

SEQ ID NO: 99843 - RNA, 20 nt, Human
ccaggccaccaacccagcca

SEQ ID NO: 99844 - RNA, 32 nt, Human
ccaggccaccaaggacggcaagaaggacaaga

SEQ ID NO: 99845 - RNA, 32 nt, Human
ccaggccaccuccucuguucugaggcugggcu

SEQ ID NO: 99846 - RNA, 19 nt, Human
ccaggccacgcgccagcca

SEQ ID NO: 99847 - RNA, 23 nt, Human
ccaggccacggcugagaucacca

SEQ ID NO: 99848 - RNA, 32 nt, Human
ccaggccacggugcuguggggccccgccgcuu

SEQ ID NO: 99849 - RNA, 32 nt, Human
ccaggccacuggcugcuggacuguuccucagg

SEQ ID NO: 99850 - RNA, 23 nt, Human
ccaggccacugggcccugagcca

SEQ ID NO: 99851 - RNA, 32 nt, Human
ccaggccagaaaccgcccaccugcaggugagg

SEQ ID NO: 99852 - RNA, 21 nt, Human
ccaggccagagaccccaggca

SEQ ID NO: 99853 - RNA, 32 nt, Human
ccaggccagagccuccaguggucuccaagccu

SEQ ID NO: 99854 - RNA, 21 nt, Human
ccaggccagagcuuguguccu

SEQ ID NO: 99855 - RNA, 32 nt, Human
ccaggccagaggcagcuuccagccugggggcu

SEQ ID NO: 99856 - RNA, 32 nt, Human
ccaggccagagggagugacagaggcagcccca

SEQ ID NO: 99857 - RNA, 19 nt, Human
ccaggccagagugcagugg

SEQ ID NO: 99858 - RNA, 20 nt, Human
ccaggccagagugcaguggc

SEQ ID NO: 99859 - RNA, 21 nt, Human
ccaggccagagugcaguggug

SEQ ID NO: 99860 - RNA, 28 nt, Human
ccaggccagagugcugccaguccucugc

SEQ ID NO: 99861 - RNA, 32 nt, Human
ccaggccagcaggcgggcuccuuuguacaguu

SEQ ID NO: 99862 - RNA, 32 nt, Human
ccaggccagcccagcccagagcacaggcucca

SEQ ID NO: 99863 - RNA, 32 nt, Human
ccaggccagccccagugacuccaggcuccaga

SEQ ID NO: 99864 - RNA, 32 nt, Human
ccaggccagcgcugcaaccuccuucggcuuug

SEQ ID NO: 99865 - RNA, 32 nt, Human
ccaggccagcucuccucccacaacagcuuccc

SEQ ID NO: 99866 - RNA, 32 nt, Human
ccaggccaggacugaggcaagccucaaggcac

SEQ ID NO: 99867 - RNA, 32 nt, Human
ccaggccaggagaugggggcgggggcagcugu

SEQ ID NO: 99868 - RNA, 32 nt, Human
ccaggccaggaggcagcuggcacagugcucac

SEQ ID NO: 99869 - RNA, 32 nt, Human
ccaggccaggaggggcccugcccaugcccaca

SEQ ID NO: 99870 - RNA, 32 nt, Human
ccaggccaggaguggagccaggucgccccaug

SEQ ID NO: 99871 - RNA, 32 nt, Human
ccaggccaggcagggagcagaugcagggacuc

SEQ ID NO: 99872 - RNA, 32 nt, Human
ccaggccaggcauggcucagugcagucccugg

SEQ ID NO: 99873 - RNA, 32 nt, Human
ccaggccaggcgcucuuccuccccagccucca

SEQ ID NO: 99874 - RNA, 21 nt, Human
ccaggccaggcguguguccug

SEQ ID NO: 99875 - RNA, 32 nt, Human
ccaggccagggcccuugauacaacaccaacag

SEQ ID NO: 99876 - RNA, 32 nt, Human
ccaggccaggggugcauggcagaggaaggugg

SEQ ID NO: 99877 - RNA, 32 nt, Human
ccaggccaggugaagauuagggccaggaagcc

SEQ ID NO: 99878 - RNA, 32 nt, Human
ccaggccagguggggaaagggacaccuuccgg

SEQ ID NO: 99879 - RNA, 32 nt, Human
ccaggccaguagauccguuuacacuuuugggu

SEQ ID NO: 99880 - RNA, 32 nt, Human
ccaggccaguguccaucagccuggugcuaauc

SEQ ID NO: 99881 - RNA, 32 nt, Human
ccaggccauauucacaagagaaauacuguagu

SEQ ID NO: 99882 - RNA, 32 nt, Human
ccaggccaucaacaaacuaacgacucugugug

SEQ ID NO: 99883 - RNA, 18 nt, Human
ccaggccaucagcaccac

SEQ ID NO: 99884 - RNA, 32 nt, Human
ccaggccaucaucuccccaccucuccuccccu

SEQ ID NO: 99885 - RNA, 32 nt, Human
ccaggccaucccucucgugucuguagccagug

SEQ ID NO: 99886 - RNA, 32 nt, Human
ccaggccaucggcauuccggagcccagggucc

SEQ ID NO: 99887 - RNA, 32 nt, Human
ccaggccaugcaacagccuccaccucagaaag

SEQ ID NO: 99888 - RNA, 32 nt, Human
ccaggccauggacugugaggucaacaacgguu

SEQ ID NO: 99889 - RNA, 32 nt, Human
ccaggccauggcacuccuauccugguuuuggu

SEQ ID NO: 99890 - RNA, 32 nt, Human
ccaggccauugucacuguuaguugaagaaaaa

SEQ ID NO: 99891 - RNA, 19 nt, Human
ccaggcccaacauguugug

SEQ ID NO: 99892 - RNA, 32 nt, Human
ccaggcccaccaggaagucaccaggacagucc

SEQ ID NO: 99893 - RNA, 32 nt, Human
ccaggcccagaacuucccccagucagccucuc

SEQ ID NO: 99894 - RNA, 32 nt, Human
ccaggcccagaacuuccucaagucggccuccc

SEQ ID NO: 99895 - RNA, 32 nt, Human
ccaggcccagaacuuccucaagucggccucuu

SEQ ID NO: 99896 - RNA, 32 nt, Human
ccaggcccagaacuuucuccagucagccucca

SEQ ID NO: 99897 - RNA, 32 nt, Human
ccaggcccagaacuuucuccagucagccucua

SEQ ID NO: 99898 - RNA, 32 nt, Human
ccaggcccagagagugugucucaggagaauuc

SEQ ID NO: 99899 - RNA, 20 nt, Human
ccaggcccagagccagggga

SEQ ID NO: 99900 - RNA, 32 nt, Human
ccaggcccagcagaacuggguaccacaaaccg

SEQ ID NO: 99901 - RNA, 28 nt, Human
ccaggcccagcaucugccucaccguggc

SEQ ID NO: 99902 - RNA, 32 nt, Human
ccaggcccagcauuuaucacauggacaugguc

SEQ ID NO: 99903 - RNA, 32 nt, Human
ccaggcccagccagggccgcgggaggcggggg

SEQ ID NO: 99904 - RNA, 32 nt, Human
ccaggcccagcuccuccugccucccagcggcc

SEQ ID NO: 99905 - RNA, 32 nt, Human
ccaggcccagcuccuccugccucccaguggcc

SEQ ID NO: 99906 - RNA, 32 nt, Human
ccaggcccagcucuuccugccucccaguggcc

SEQ ID NO: 99907 - RNA, 21 nt, Human
ccaggcccaggccccacccca

SEQ ID NO: 99908 - RNA, 32 nt, Human
ccaggcccaggggacucucuccacucuuuccu

SEQ ID NO: 99909 - RNA, 32 nt, Human
ccaggcccagugggggccagaggaucaggccc

SEQ ID NO: 99910 - RNA, 32 nt, Human
ccaggcccaguuaaugcuagucuuucauguga

SEQ ID NO: 99911 - RNA, 21 nt, Human
ccaggcccaugcccuccuggu

SEQ ID NO: 99912 - RNA, 32 nt, Human
ccaggccccacugacgccaggaggccugggug

SEQ ID NO: 99913 - RNA, 32 nt, Human
ccaggccccagagucccuuaucccuaugcccc

SEQ ID NO: 99914 - RNA, 32 nt, Human
ccaggccccagcccaggcaggugcugcugccu

SEQ ID NO: 99915 - RNA, 32 nt, Human
ccaggccccaggaccaggccuagggugugccu

SEQ ID NO: 99916 - RNA, 32 nt, Human
ccaggccccaggagccaggcccagccugcgcc

SEQ ID NO: 99917 - RNA, 32 nt, Human
ccaggccccauggagagaggcucagcccuagg

SEQ ID NO: 99918 - RNA, 22 nt, Human
ccaggccccauuccggcuccca

SEQ ID NO: 99919 - RNA, 32 nt, Human
ccaggcccccaacuccgcccagccucuccccg

SEQ ID NO: 99920 - RNA, 22 nt, Human
ccaggcccccagaucuggugcc

SEQ ID NO: 99921 - RNA, 19 nt, Human
ccaggccccccagcccagg

SEQ ID NO: 99922 - RNA, 32 nt, Human
ccaggcccccuccaccauggccagccggggug

SEQ ID NO: 99923 - RNA, 32 nt, Human
ccaggcccccugccugugccugccuugcaccc

SEQ ID NO: 99924 - RNA, 32 nt, Human
ccaggccccgagagggcgagaccagaggggac

SEQ ID NO: 99925 - RNA, 32 nt, Human
ccaggccccgguggguuugucugcacuuggug

SEQ ID NO: 99926 - RNA, 22 nt, Human
ccaggccccguccgcccgagcc

SEQ ID NO: 99927 - RNA, 32 nt, Human
ccaggccccuccaggacaauggauuucaucau

SEQ ID NO: 99928 - RNA, 32 nt, Human
ccaggccccuccuguccuccugcucugagccc

SEQ ID NO: 99929 - RNA, 23 nt, Human
ccaggccccuccuuccugaauca

SEQ ID NO: 99930 - RNA, 32 nt, Human
ccaggccccuccuuccugaaucaucagcugug

SEQ ID NO: 99931 - RNA, 20 nt, Human
ccaggccccugacaggaugc

SEQ ID NO: 99932 - RNA, 32 nt, Human
ccaggccccugccucucacagcagcacccuuu

SEQ ID NO: 99933 - RNA, 18 nt, Human
ccaggccccugggaggug

SEQ ID NO: 99934 - RNA, 32 nt, Human
ccaggccccuguguucagccucaggccuauag

SEQ ID NO: 99935 - RNA, 17 nt, Human
ccaggcccgccgcuccg

SEQ ID NO: 99936 - RNA, 21 nt, Human
ccaggcccggaaccugguguc

SEQ ID NO: 99937 - RNA, 32 nt, Human
ccaggcccuaagaccuccuccuccaggucagg

SEQ ID NO: 99938 - RNA, 21 nt, Human
ccaggcccuaagccagcguca

SEQ ID NO: 99939 - RNA, 22 nt, Human
ccaggcccuccacggcacccca

SEQ ID NO: 99940 - RNA, 32 nt, Human
ccaggcccuccagugggcugaugcugggaccc

SEQ ID NO: 99941 - RNA, 21 nt, Human
ccaggcccucccaccacccca

SEQ ID NO: 99942 - RNA, 21 nt, Human
ccaggcccuccgcaggcugcc

SEQ ID NO: 99943 - RNA, 32 nt, Human
ccaggcccuccuccuccugggcuugcccagag

SEQ ID NO: 99944 - RNA, 32 nt, Human
ccaggcccugcagggcuggucagggugucugg

SEQ ID NO: 99945 - RNA, 32 nt, Human
ccaggcccugcaguggggcugacuccagaucu

SEQ ID NO: 99946 - RNA, 32 nt, Human
ccaggcccugccccaucuccucugccaucuuc

SEQ ID NO: 99947 - RNA, 20 nt, Human
ccaggcccugcgucaggcag

SEQ ID NO: 99948 - RNA, 32 nt, Human
ccaggcccugcuccucugcuggggucggcccc

SEQ ID NO: 99949 - RNA, 32 nt, Human
ccaggcccugcucuccuguguagccucagaga

SEQ ID NO: 99950 - RNA, 32 nt, Human
ccaggcccugcucuuccucagcuguguggguc

SEQ ID NO: 99951 - RNA, 32 nt, Human
ccaggcccugcucuuccugcuugcuggcagag

SEQ ID NO: 99952 - RNA, 32 nt, Human
ccaggcccuggacuuccuccagucggccucuc

SEQ ID NO: 99953 - RNA, 32 nt, Human
ccaggcccuggcacagagggagcacucgauac

SEQ ID NO: 99954 - RNA, 19 nt, Human
ccaggcccuggcagcaacc

SEQ ID NO: 99955 - RNA, 32 nt, Human
ccaggcccuggcucugcagccagcacaacugg

SEQ ID NO: 99956 - RNA, 17 nt, Human
ccaggcccugggcucag

SEQ ID NO: 99957 - RNA, 32 nt, Human
ccaggcccugugcaaguguccucccccuuagg

SEQ ID NO: 99958 - RNA, 32 nt, Human
ccaggcccugugugccagaggccaggucucuc

SEQ ID NO: 99959 - RNA, 23 nt, Human
ccaggcccuucuuccuagcucug

SEQ ID NO: 99960 - RNA, 32 nt, Human
ccaggcccuugccuucauuuuuacagagguag

SEQ ID NO: 99961 - RNA, 32 nt, Human
ccaggccgaggaacccccagcccagggacuag

SEQ ID NO: 99962 - RNA, 32 nt, Human
ccaggccgcagagggagcaggaagaguugcug

SEQ ID NO: 99963 - RNA, 20 nt, Human
ccaggccgccguccaguggc

SEQ ID NO: 99964 - RNA, 21 nt, Human
ccaggccgcgguccccggagc

SEQ ID NO: 99965 - RNA, 18 nt, Human
ccaggccggagugcagug

SEQ ID NO: 99966 - RNA, 19 nt, Human
ccaggccggagugcagugg

SEQ ID NO: 99967 - RNA, 22 nt, Human
ccaggccggagugcaguggugu

SEQ ID NO: 99968 - RNA, 32 nt, Human
ccaggccggcaccaugcggccccugcucugcg

SEQ ID NO: 99969 - RNA, 23 nt, Human
ccaggccggcgaccaccaggggc

SEQ ID NO: 99970 - RNA, 22 nt, Human
ccaggccggcuuaccccaacua

SEQ ID NO: 99971 - RNA, 32 nt, Human
ccaggccggggagcgcgagggagcgaggcaca

SEQ ID NO: 99972 - RNA, 18 nt, Human
ccaggccggucccugggg

SEQ ID NO: 99973 - RNA, 32 nt, Human
ccaggccguucaauggggauccugcauuagga

SEQ ID NO: 99974 - RNA, 32 nt, Human
ccaggccuaagaggagagggaaccagggagaa

SEQ ID NO: 99975 - RNA, 32 nt, Human
ccaggccuagaacaccagaagucgguagaggg

SEQ ID NO: 99976 - RNA, 27 nt, Human
ccaggccucaccuguuuguuuaggcca

SEQ ID NO: 99977 - RNA, 19 nt, Human
ccaggccucagacugugaa

SEQ ID NO: 99978 - RNA, 32 nt, Human
ccaggccucagaggaggagaaaggccggagcc

SEQ ID NO: 99979 - RNA, 17 nt, Human
ccaggccucaggcuccc

SEQ ID NO: 99980 - RNA, 32 nt, Human
ccaggccuccacccccacccccguuugcuggg

SEQ ID NO: 99981 - RNA, 32 nt, Human
ccaggccuccaccuccagcccagguggcugac

SEQ ID NO: 99982 - RNA, 32 nt, Human
ccaggccucccgcuuggucuccacaggaggcu

SEQ ID NO: 99983 - RNA, 21 nt, Human
ccaggccuccuccccugagcc

SEQ ID NO: 99984 - RNA, 32 nt, Human
ccaggccuccuccuccugcaugugggggaagu

SEQ ID NO: 99985 - RNA, 32 nt, Human
ccaggccuccucuuccccaggcugccacccac

SEQ ID NO: 99986 - RNA, 32 nt, Human
ccaggccucgccagggugcggugcagagcaga

SEQ ID NO: 99987 - RNA, 22 nt, Human
ccaggccucggccuuccugagc

SEQ ID NO: 99988 - RNA, 32 nt, Human
ccaggccucucccaccaccaccuucccuccaa

SEQ ID NO: 99989 - RNA, 32 nt, Human
ccaggccucuccccaggcuugccaucagccuu

SEQ ID NO: 99990 - RNA, 20 nt, Human
ccaggccucuccccugcagg

SEQ ID NO: 99991 - RNA, 32 nt, Human
ccaggccucugacccaggcugcucugcggccc

SEQ ID NO: 99992 - RNA, 32 nt, Human
ccaggccugaaaaagauagacacagaagcacc

SEQ ID NO: 99993 - RNA, 32 nt, Human
ccaggccugacucuccucccacuugcauggac

SEQ ID NO: 99994 - RNA, 32 nt, Human
ccaggccugagccccaugccucccagcaacca

SEQ ID NO: 99995 - RNA, 32 nt, Human
ccaggccugagcggugggagggcucugcgggg

SEQ ID NO: 99996 - RNA, 32 nt, Human
ccaggccugagcugccccucccacugccuuuc

SEQ ID NO: 99997 - RNA, 32 nt, Human
ccaggccugcagccgcugccgccgccgccgcc

SEQ ID NO: 99998 - RNA, 32 nt, Human
ccaggccugcagcugggccagugcccaggagc

SEQ ID NO: 99999 - RNA, 32 nt, Human
ccaggccugcagggguggagggcagucccuca

SEQ ID NO: 100000 - RNA, 21 nt, Human
ccaggccugccccucaccuca

SEQ ID NO: 100001 - RNA, 32 nt, Human
ccaggccugcccugaaacuccagauccuggcu

SEQ ID NO: 100002 - RNA, 18 nt, Human
ccaggccugccggcccgg

SEQ ID NO: 100003 - RNA, 19 nt, Human
ccaggccugccgucuccag

SEQ ID NO: 100004 - RNA, 32 nt, Human
ccaggccugccugggccgcgccagcgccgcuc

SEQ ID NO: 100005 - RNA, 32 nt, Human
ccaggccugccuguucccauucuugcauggca

SEQ ID NO: 100006 - RNA, 21 nt, Human
ccaggccugcugugguucuga

SEQ ID NO: 100007 - RNA, 32 nt, Human
ccaggccuggcagagcuaagauucagacccag

SEQ ID NO: 100008 - RNA, 19 nt, Human
ccaggccugggaugcagug

SEQ ID NO: 100009 - RNA, 32 nt, Human
ccaggccugggcuggcagcccagggcuguuuc

SEQ ID NO: 100010 - RNA, 32 nt, Human
ccaggccuggggaggaagaggcuugggcugca

SEQ ID NO: 100011 - RNA, 32 nt, Human
ccaggccugggggccaccuaggaggacaagcu

SEQ ID NO: 100012 - RNA, 32 nt, Human
ccaggccugggugacagugcgagacccugucu

SEQ ID NO: 100013 - RNA, 32 nt, Human
ccaggccuggguuuguacuuccaccuccacca

SEQ ID NO: 100014 - RNA, 32 nt, Human
ccaggccugguggcacaugccuguaauccgag

SEQ ID NO: 100015 - RNA, 32 nt, Human
ccaggccugguggcucacgccuguaaucccag

SEQ ID NO: 100016 - RNA, 32 nt, Human
ccaggccuguaaucccaucacuuugggaggug

SEQ ID NO: 100017 - RNA, 32 nt, Human
ccaggccugucaagagggaggaaggggcccca

SEQ ID NO: 100018 - RNA, 24 nt, Human
ccaggccuuccuggggggcagcug

SEQ ID NO: 100019 - RNA, 32 nt, Human
ccaggccuuucaccugcucugccuugaaaugg

SEQ ID NO: 100020 - RNA, 24 nt, Human
ccaggccuuuggcagugggacaga

SEQ ID NO: 100021 - RNA, 32 nt, Human
ccaggcgaagccgccucugcccggacgcagcc

SEQ ID NO: 100022 - RNA, 32 nt, Human
ccaggcgacaccauuugccauccugcuucuaa

SEQ ID NO: 100023 - RNA, 18 nt, Human
ccaggcgacaggcaccac

SEQ ID NO: 100024 - RNA, 32 nt, Human
ccaggcgagagggcacccucccuuccuccccc

SEQ ID NO: 100025 - RNA, 19 nt, Human
ccaggcgaggcaacauggc

SEQ ID NO: 100026 - RNA, 32 nt, Human
ccaggcgaggccucuggaccuguguuccugug

SEQ ID NO: 100027 - RNA, 32 nt, Human
ccaggcgagggggacuuggggcuuccacgucc

SEQ ID NO: 100028 - RNA, 32 nt, Human
ccaggcgcaguggcucaagccuguaaucccag

SEQ ID NO: 100029 - RNA, 32 nt, Human
ccaggcgcaguggcucacaccuguaaucccaa

SEQ ID NO: 100030 - RNA, 32 nt, Human
ccaggcgcaguggcucacaccuguaaucccag

SEQ ID NO: 100031 - RNA, 32 nt, Human
ccaggcgcaguggcucacaccuguaauccuag

SEQ ID NO: 100032 - RNA, 32 nt, Human
ccaggcgcaguggcucacgccuguaaucccaa

SEQ ID NO: 100033 - RNA, 32 nt, Human
ccaggcgcaguggcucacgccuguaaucccag

SEQ ID NO: 100034 - RNA, 32 nt, Human
ccaggcgcaguggcucacgccuguaauuccag

SEQ ID NO: 100035 - RNA, 32 nt, Human
ccaggcgcaguggcucaugccuauaaucccag

SEQ ID NO: 100036 - RNA, 32 nt, Human
ccaggcgcaguggcucaugccuauaaucccgg

SEQ ID NO: 100037 - RNA, 32 nt, Human
ccaggcgcaguggcucaugccuguaaucccag

SEQ ID NO: 100038 - RNA, 32 nt, Human
ccaggcgcaguggcucaugccuguaaucguag

SEQ ID NO: 100039 - RNA, 32 nt, Human
ccaggcgcaguggcucaugccuguaauuccag

SEQ ID NO: 100040 - RNA, 32 nt, Human
ccaggcgcaguggcucaugccuguaauuucag

SEQ ID NO: 100041 - RNA, 32 nt, Human
ccaggcgcaguggcugaugccuguaaucccag

SEQ ID NO: 100042 - RNA, 32 nt, Human
ccaggcgcaguggcuuaugccuguaaucccag

SEQ ID NO: 100043 - RNA, 32 nt, Human
ccaggcgcauuggcucaugucuguaaucccag

SEQ ID NO: 100044 - RNA, 22 nt, Human
ccaggcgcccagcccugcggag

SEQ ID NO: 100045 - RNA, 32 nt, Human
ccaggcgcccuggcucacaccuguaaucccag

SEQ ID NO: 100046 - RNA, 19 nt, Human
ccaggcgccgccgccgccg

SEQ ID NO: 100047 - RNA, 18 nt, Human
ccaggcgccgccgcgccg

SEQ ID NO: 100048 - RNA, 32 nt, Human
ccaggcgccguggcucacgccuguaauccaac

SEQ ID NO: 100049 - RNA, 32 nt, Human
ccaggcgccguggcucacgccuguaaucccag

SEQ ID NO: 100050 - RNA, 18 nt, Human
ccaggcgcgcacugcaca

SEQ ID NO: 100051 - RNA, 32 nt, Human
ccaggcgcggcggcucacgccuguaauccuag

SEQ ID NO: 100052 - RNA, 32 nt, Human
ccaggcgcggcggcucacuccuguaaucccag

SEQ ID NO: 100053 - RNA, 32 nt, Human
ccaggcgcgguggcucacaccuguaauaaucc

SEQ ID NO: 100054 - RNA, 32 nt, Human
ccaggcgcgguggcucacaccuguaaucccag

SEQ ID NO: 100055 - RNA, 32 nt, Human
ccaggcgcgguggcucaccccuguaauccuag

SEQ ID NO: 100056 - RNA, 32 nt, Human
ccaggcgcgguggcucacgccuguaaucccaa

SEQ ID NO: 100057 - RNA, 32 nt, Human
ccaggcgcgguggcucacgccuguaaucccag

SEQ ID NO: 100058 - RNA, 32 nt, Human
ccaggcgcgguggcucacgccuguaauccuag

SEQ ID NO: 100059 - RNA, 32 nt, Human
ccaggcgcgguggcucacgccuguaauuccau

SEQ ID NO: 100060 - RNA, 32 nt, Human
ccaggcgcgguggcucacuccuguaaucccag

SEQ ID NO: 100061 - RNA, 32 nt, Human
ccaggcgcgguggcucaggccuguaaucccag

SEQ ID NO: 100062 - RNA, 32 nt, Human
ccaggcgcgguggcucaugccuguaaucccag

SEQ ID NO: 100063 - RNA, 32 nt, Human
ccaggcgcgguggcucaugccuguaauccuag

SEQ ID NO: 100064 - RNA, 32 nt, Human
ccaggcgcgguggcucaugcguguaaucccag

SEQ ID NO: 100065 - RNA, 32 nt, Human
ccaggcgcgguggcucgugccuguaaucccag

SEQ ID NO: 100066 - RNA, 32 nt, Human
ccaggcgcggugguucaugccuguaaucccag

SEQ ID NO: 100067 - RNA, 26 nt, Human
ccaggcgcucccucuuucuugaagag

SEQ ID NO: 100068 - RNA, 18 nt, Human
ccaggcgcuggacugcag

SEQ ID NO: 100069 - RNA, 32 nt, Human
ccaggcgcugggcacggugauggccaccacug

SEQ ID NO: 100070 - RNA, 32 nt, Human
ccaggcggaaggcuggagggugcuggggaagu

SEQ ID NO: 100071 - RNA, 20 nt, Human
ccaggcggacagugaggaca

SEQ ID NO: 100072 - RNA, 32 nt, Human
ccaggcggagcgggaggagcuggcagcggggc

SEQ ID NO: 100073 - RNA, 32 nt, Human
ccaggcggaggggcugcuuuucugcccuuccu

SEQ ID NO: 100074 - RNA, 18 nt, Human
ccaggcggaggugggaca

SEQ ID NO: 100075 - RNA, 32 nt, Human
ccaggcggauagcuugagcucagggggccaag

SEQ ID NO: 100076 - RNA, 24 nt, Human
ccaggcggcagagguugcagugag

SEQ ID NO: 100077 - RNA, 32 nt, Human
ccaggcggcagggcaucaugcccagcuggcau

SEQ ID NO: 100078 - RNA, 32 nt, Human
ccaggcggcauccuuuucuaugaaguguugac

SEQ ID NO: 100079 - RNA, 32 nt, Human
ccaggcggccacucaggccugcguggacugga

SEQ ID NO: 100080 - RNA, 18 nt, Human
ccaggcggcucccccagg

SEQ ID NO: 100081 - RNA, 18 nt, Human
ccaggcgggagggcccag

SEQ ID NO: 100082 - RNA, 19 nt, Human
ccaggcgggagugcagugg

SEQ ID NO: 100083 - RNA, 22 nt, Human
ccaggcgggcaaggggaccaga

SEQ ID NO: 100084 - RNA, 23 nt, Human
ccaggcgggcaguggagcuggcc

SEQ ID NO: 100085 - RNA, 32 nt, Human
ccaggcgggcggaucacuugaggucaggaauu

SEQ ID NO: 100086 - RNA, 23 nt, Human
ccaggcgggcggcacgccaacag

SEQ ID NO: 100087 - RNA, 32 nt, Human
ccaggcggguuucugucaggcccggggaggag

SEQ ID NO: 100088 - RNA, 32 nt, Human
ccaggcgguagcgggggcaguggugcuguugc

SEQ ID NO: 100089 - RNA, 32 nt, Human
ccaggcggucaccagcagauuugcccgcgcgu

SEQ ID NO: 100090 - RNA, 32 nt, Human
ccaggcggucuccucuacagacugccuuggcc

SEQ ID NO: 100091 - RNA, 32 nt, Human
ccaggcgguggaggugcggcagcugcugcuca

SEQ ID NO: 100092 - RNA, 32 nt, Human
ccaggcggugguggacgaugcccagcuggaca

SEQ ID NO: 100093 - RNA, 24 nt, Human
ccaggcgguugaggcugcagugag

SEQ ID NO: 100094 - RNA, 32 nt, Human
ccaggcgguugcggcggcgacagccauggccg

SEQ ID NO: 100095 - RNA, 32 nt, Human
ccaggcguaguggcuuacaccuguaaucccag

SEQ ID NO: 100096 - RNA, 32 nt, Human
ccaggcguaguggugcaugccuguaaucccag

SEQ ID NO: 100097 - RNA, 25 nt, Human
ccaggcgucacccagacucugcgga

SEQ ID NO: 100098 - RNA, 20 nt, Human
ccaggcguccggcugcuguc

SEQ ID NO: 100099 - RNA, 32 nt, Human
ccaggcgugauggcaggugccuguaauccuag

SEQ ID NO: 100100 - RNA, 32 nt, Human
ccaggcgugauggcucaugccugugaucccag

SEQ ID NO: 100101 - RNA, 32 nt, Human
ccaggcgugggcccgugucugucccugguugu

SEQ ID NO: 100102 - RNA, 32 nt, Human
ccaggcguggguggccuagaagaugaggggag

SEQ ID NO: 100103 - RNA, 32 nt, Human
ccaggcgugguagcucacgccuguaauuccag

SEQ ID NO: 100104 - RNA, 32 nt, Human
ccaggcguggugacucacaccuguaauuccag

SEQ ID NO: 100105 - RNA, 32 nt, Human
ccaggcguggugacucaugccuguaaucccag

SEQ ID NO: 100106 - RNA, 32 nt, Human
ccaggcguggugaugggcaccuguaaucucag

SEQ ID NO: 100107 - RNA, 32 nt, Human
ccaggcgugguggcacaugccuguaaucccag

SEQ ID NO: 100108 - RNA, 32 nt, Human
ccaggcgugguggcacgcgccuguaaucccag

SEQ ID NO: 100109 - RNA, 32 nt, Human
ccaggcgugguggcagaccccuguaaucccag

SEQ ID NO: 100110 - RNA, 32 nt, Human
ccaggcgugguggcaggcaccuguaaucccag

SEQ ID NO: 100111 - RNA, 32 nt, Human
ccaggcgugguggcagguaccuguaaucccag

SEQ ID NO: 100112 - RNA, 32 nt, Human
ccaggcgugguggcaggugccuguaaucccag

SEQ ID NO: 100113 - RNA, 32 nt, Human
ccaggcgugguggcaggugccuguaaucccgg

SEQ ID NO: 100114 - RNA, 32 nt, Human
ccaggcgugguggcaugcaccuguaaucccaa

SEQ ID NO: 100115 - RNA, 32 nt, Human
ccaggcgugguggcgcacaccuguaaucccag

SEQ ID NO: 100116 - RNA, 32 nt, Human
ccaggcgugguggcgcauaccuguaaucucug

SEQ ID NO: 100117 - RNA, 32 nt, Human
ccaggcgugguggcgcaugccuguaaucccag

SEQ ID NO: 100118 - RNA, 32 nt, Human
ccaggcgugguggcgcgcaccuguaaucccag

SEQ ID NO: 100119 - RNA, 32 nt, Human
ccaggcgugguggcgggcaccuguaaucccag

SEQ ID NO: 100120 - RNA, 32 nt, Human
ccaggcgugguggcgggcgccuguaaucacag

SEQ ID NO: 100121 - RNA, 32 nt, Human
ccaggcgugguggcgggcgccuguaauccaag

SEQ ID NO: 100122 - RNA, 32 nt, Human
ccaggcgugguggcgggcgccuguaaucccag

SEQ ID NO: 100123 - RNA, 32 nt, Human
ccaggcgugguggcgggugccuguaaucccag

SEQ ID NO: 100124 - RNA, 32 nt, Human
ccaggcgugguggcgggugccuguaaucccgg

SEQ ID NO: 100125 - RNA, 32 nt, Human
ccaggcgugguggcgugcgccuguaaucccag

SEQ ID NO: 100126 - RNA, 32 nt, Human
ccaggcgugguggcucacaccuguaaucccag

SEQ ID NO: 100127 - RNA, 32 nt, Human
ccaggcgugguggcucacgccuguaaucccaa

SEQ ID NO: 100128 - RNA, 32 nt, Human
ccaggcgugguggcucacgccuguaaucccag

SEQ ID NO: 100129 - RNA, 32 nt, Human
ccaggcgugguggcucacgccuguaaugccag

SEQ ID NO: 100130 - RNA, 32 nt, Human
ccaggcgugguggcucacuccuguaaucccac

SEQ ID NO: 100131 - RNA, 32 nt, Human
ccaggcgugguggcucacuccuguaaucccag

SEQ ID NO: 100132 - RNA, 32 nt, Human
ccaggcgugguggcucaugacuguaaucccag

SEQ ID NO: 100133 - RNA, 32 nt, Human
ccaggcgugguggcucaugccuauaaucccag

SEQ ID NO: 100134 - RNA, 32 nt, Human
ccaggcgugguggcucaugccugcggucccag

SEQ ID NO: 100135 - RNA, 32 nt, Human
ccaggcgugguggcucaugccuguaaucccag

SEQ ID NO: 100136 - RNA, 32 nt, Human
ccaggcgugguggcucaugccuguaaucccgg

SEQ ID NO: 100137 - RNA, 32 nt, Human
ccaggcgugguggcucaugccuguaaucgcag

SEQ ID NO: 100138 - RNA, 32 nt, Human
ccaggcgugguggcucaugccuguaaucucag

SEQ ID NO: 100139 - RNA, 32 nt, Human
ccaggcgugguggcucaugccuguaaucugag

SEQ ID NO: 100140 - RNA, 32 nt, Human
ccaggcgugguggcucaugccuguagucccag

SEQ ID NO: 100141 - RNA, 32 nt, Human
ccaggcgugguggcucaugcuuguaaucccag

SEQ ID NO: 100142 - RNA, 32 nt, Human
ccaggcgugguggcucaugcuuguggucccag

SEQ ID NO: 100143 - RNA, 32 nt, Human
ccaggcgugguggcucauguauguaauccuag

SEQ ID NO: 100144 - RNA, 32 nt, Human
ccaggcgugguggcuggcgccuguaaucccag

SEQ ID NO: 100145 - RNA, 32 nt, Human
ccaggcgugguggggcaugccuguaaucccag

SEQ ID NO: 100146 - RNA, 32 nt, Human
ccaggcguggugguacaugccuguaaucccag

SEQ ID NO: 100147 - RNA, 32 nt, Human
ccaggcgugguggugcaugccuguaauccagc

SEQ ID NO: 100148 - RNA, 32 nt, Human
ccaggcgugguggugcaugccuguaaucccag

SEQ ID NO: 100149 - RNA, 32 nt, Human
ccaggcgugguggugcaugccuguaauccuag

SEQ ID NO: 100150 - RNA, 32 nt, Human
ccaggcgugguggugggcaccuguaaucccag

SEQ ID NO: 100151 - RNA, 32 nt, Human
ccaggcgugguggugggugccuguaaucccag

SEQ ID NO: 100152 - RNA, 32 nt, Human
ccaggcgugguggugggugccuguaauuccag

SEQ ID NO: 100153 - RNA, 32 nt, Human
ccaggcgugguggugugcaccuguaaucccag

SEQ ID NO: 100154 - RNA, 32 nt, Human
ccaggcgugguggugugugccuguaaucccag

SEQ ID NO: 100155 - RNA, 32 nt, Human
ccaggcgugguggugugugccuguaauccuag

SEQ ID NO: 100156 - RNA, 32 nt, Human
ccaggcguggugguucacaccuguaaucccaa

SEQ ID NO: 100157 - RNA, 32 nt, Human
ccaggcguggugguucaggccuguaauuccag

SEQ ID NO: 100158 - RNA, 32 nt, Human
ccaggcguggugguucaugccuguaaucccaa

SEQ ID NO: 100159 - RNA, 32 nt, Human
ccaggcguggugguucaugccuguaaucccag

SEQ ID NO: 100160 - RNA, 32 nt, Human
ccaggcguggugucucacaccuguaaucccag

SEQ ID NO: 100161 - RNA, 32 nt, Human
ccaggcguguuggugugcaccuguaaucccag

SEQ ID NO: 100162 - RNA, 32 nt, Human
ccaggcguucaagaccagccugggcaacagaa

SEQ ID NO: 100163 - RNA, 32 nt, Human
ccaggcguuccuuucuuucugcccuaggaaag

SEQ ID NO: 100164 - RNA, 32 nt, Human
ccaggcuaaaauauccugucuggcagaguguu

SEQ ID NO: 100165 - RNA, 32 nt, Human
ccaggcuaaggcauacaguucuugacuuugga

SEQ ID NO: 100166 - RNA, 32 nt, Human
ccaggcuaauuagaggauguggcaggggcagu

SEQ ID NO: 100167 - RNA, 22 nt, Human
ccaggcuaccgccuccuggacc

SEQ ID NO: 100168 - RNA, 32 nt, Human
ccaggcuacgagcgggagggaggcgggagucg

SEQ ID NO: 100169 - RNA, 32 nt, Human
ccaggcuacgcuccugaccucuucccaggcag

SEQ ID NO: 100170 - RNA, 32 nt, Human
ccaggcuacugauguccuggguugcuccucuu

SEQ ID NO: 100171 - RNA, 32 nt, Human
ccaggcuacugccuccugauaauggcuucugc

SEQ ID NO: 100172 - RNA, 32 nt, Human
ccaggcuacuucuccccuccucuugccucccu

SEQ ID NO: 100173 - RNA, 20 nt, Human
ccaggcuagaguaccguggc

SEQ ID NO: 100174 - RNA, 20 nt, Human
ccaggcuagagugcaauggc

SEQ ID NO: 100175 - RNA, 19 nt, Human
ccaggcuagagugcagugg

SEQ ID NO: 100176 - RNA, 20 nt, Human
ccaggcuagagugcaguggc

SEQ ID NO: 100177 - RNA, 19 nt, Human
ccaggcuagagugcggugg

SEQ ID NO: 100178 - RNA, 32 nt, Human
ccaggcuagcacccucccuucagaugaccauu

SEQ ID NO: 100179 - RNA, 32 nt, Human
ccaggcuaggcaggggacagcggcugcccugg

SEQ ID NO: 100180 - RNA, 32 nt, Human
ccaggcuaguagggcugugaggaaugcauuaa

SEQ ID NO: 100181 - RNA, 20 nt, Human
ccaggcuagucucgaacucc

SEQ ID NO: 100182 - RNA, 32 nt, Human
ccaggcuagucucgaauuccugggcucaagug

SEQ ID NO: 100183 - RNA, 32 nt, Human
ccaggcuagugcaaagggcucuucacucggau

SEQ ID NO: 100184 - RNA, 20 nt, Human
ccaggcuaguuucaaacucc

SEQ ID NO: 100185 - RNA, 20 nt, Human
ccaggcuaguuucgaacucc

SEQ ID NO: 100186 - RNA, 32 nt, Human
ccaggcucaaaagaugcucccaccacagccuc

SEQ ID NO: 100187 - RNA, 32 nt, Human
ccaggcucaagaaauccucccaccucagccuc

SEQ ID NO: 100188 - RNA, 32 nt, Human
ccaggcucaagcaauccuaccaugucagccuu

SEQ ID NO: 100189 - RNA, 32 nt, Human
ccaggcucaagcaauccuugugccucagccuc

SEQ ID NO: 100190 - RNA, 32 nt, Human
ccaggcucaagcaauucuccuaccucagccuc

SEQ ID NO: 100191 - RNA, 32 nt, Human
ccaggcucaagcaauucuccugccucaaccuu

SEQ ID NO: 100192 - RNA, 32 nt, Human
ccaggcucaagcaauucuccugccucagccuc

SEQ ID NO: 100193 - RNA, 32 nt, Human
ccaggcucaagcaauucuuacgccucagccuc

SEQ ID NO: 100194 - RNA, 32 nt, Human
ccaggcucaagccaucuuuccaccucagccug

SEQ ID NO: 100195 - RNA, 32 nt, Human
ccaggcucaagcgauccucccaccucagcucc

SEQ ID NO: 100196 - RNA, 32 nt, Human
ccaggcucaagcgauccucccagcucagccug

SEQ ID NO: 100197 - RNA, 32 nt, Human
ccaggcucaagcgauccucccgccuuaacugc

SEQ ID NO: 100198 - RNA, 32 nt, Human
ccaggcucaagcgguccuucuaccucagccuc

SEQ ID NO: 100199 - RNA, 32 nt, Human
ccaggcucaagcuguccucccaccucagccuc

SEQ ID NO: 100200 - RNA, 32 nt, Human
ccaggcucaagugauccucccaccccagccuc

SEQ ID NO: 100201 - RNA, 32 nt, Human
ccaggcucaagugauccucccaccucagcccc

SEQ ID NO: 100202 - RNA, 32 nt, Human
ccaggcucaagugauccucccaccucagccuc

SEQ ID NO: 100203 - RNA, 32 nt, Human
ccaggcucaagugauccucccaccucagucuc

SEQ ID NO: 100204 - RNA, 32 nt, Human
ccaggcucaagugauccucccacuucagcuuc

SEQ ID NO: 100205 - RNA, 32 nt, Human
ccaggcucaagugauccuuccaccucagccuc

SEQ ID NO: 100206 - RNA, 21 nt, Human
ccaggcucacacagcagcuca

SEQ ID NO: 100207 - RNA, 32 nt, Human
ccaggcucacagaccaccccacccuacccugu

SEQ ID NO: 100208 - RNA, 22 nt, Human
ccaggcucacaggcugugccac

SEQ ID NO: 100209 - RNA, 32 nt, Human
ccaggcucacccaggcuggggucugaguguca

SEQ ID NO: 100210 - RNA, 21 nt, Human
ccaggcucacucacagaguca

SEQ ID NO: 100211 - RNA, 32 nt, Human
ccaggcucagauaauccuccugccucagacuc

SEQ ID NO: 100212 - RNA, 32 nt, Human
ccaggcucagcagcgugcuguggaaguggaag

SEQ ID NO: 100213 - RNA, 32 nt, Human
ccaggcucagcagggagcugcuggaugagaaa

SEQ ID NO: 100214 - RNA, 32 nt, Human
ccaggcucagccaggagcugccagaggugaag

SEQ ID NO: 100215 - RNA, 32 nt, Human
ccaggcucagcccaccccuccaccucucucuc

SEQ ID NO: 100216 - RNA, 32 nt, Human
ccaggcucaggugauccucccaccucagccuc

SEQ ID NO: 100217 - RNA, 32 nt, Human
ccaggcucauacuaaaaucccaaaaagugaaa

SEQ ID NO: 100218 - RNA, 32 nt, Human
ccaggcucaugugauccucccaccucagccuc

SEQ ID NO: 100219 - RNA, 32 nt, Human
ccaggcucauguggcccagcagucccugaaug

SEQ ID NO: 100220 - RNA, 32 nt, Human
ccaggcuccaacaagccccugagcagcaauuu

SEQ ID NO: 100221 - RNA, 32 nt, Human
ccaggcuccaagaguccacccuucccagcuca

SEQ ID NO: 100222 - RNA, 32 nt, Human
ccaggcuccacaucacgggaagugagauggau

SEQ ID NO: 100223 - RNA, 32 nt, Human
ccaggcuccagaagaaagacagcagcucaugg

SEQ ID NO: 100224 - RNA, 32 nt, Human
ccaggcuccagccgucgucuccgcgcucccgg

SEQ ID NO: 100225 - RNA, 32 nt, Human
ccaggcuccagccucagggcuggccuguuccc

SEQ ID NO: 100226 - RNA, 18 nt, Human
ccaggcucccaacccagg

SEQ ID NO: 100227 - RNA, 22 nt, Human
ccaggcuccccaaccccaccca

SEQ ID NO: 100228 - RNA, 21 nt, Human
ccaggcuccccaagcuucccu

SEQ ID NO: 100229 - RNA, 18 nt, Human
ccaggcuccccucucuca

SEQ ID NO: 100230 - RNA, 32 nt, Human
ccaggcuccgccauggggaaugugccauccgc

SEQ ID NO: 100231 - RNA, 32 nt, Human
ccaggcuccucugcaccugcaaaggaacagga

SEQ ID NO: 100232 - RNA, 32 nt, Human
ccaggcuccugauauccaucugggugagccag

SEQ ID NO: 100233 - RNA, 32 nt, Human
ccaggcuccugcugcagcuccugggccgcacu

SEQ ID NO: 100234 - RNA, 32 nt, Human
ccaggcuccuuuccuacauccuucccgcgccc

SEQ ID NO: 100235 - RNA, 32 nt, Human
ccaggcucgagcaauccucccacuucacccuc

SEQ ID NO: 100236 - RNA, 32 nt, Human
ccaggcucgauccucccaugucagccucccaa

SEQ ID NO: 100237 - RNA, 20 nt, Human
ccaggcucggacagcccccu

SEQ ID NO: 100238 - RNA, 19 nt, Human
ccaggcucggagcugcagg

SEQ ID NO: 100239 - RNA, 32 nt, Human
ccaggcucuacuccaucccauuggagucucuu

SEQ ID NO: 100240 - RNA, 32 nt, Human
ccaggcucucuccaccacgcugccucaggccc

SEQ ID NO: 100241 - RNA, 23 nt, Human
ccaggcucugacuuucagcauca

SEQ ID NO: 100242 - RNA, 32 nt, Human
ccaggcucugagccacugagcaccagcuggcc

SEQ ID NO: 100243 - RNA, 32 nt, Human
ccaggcucugaggagguguggaguagaggccc

SEQ ID NO: 100244 - RNA, 32 nt, Human
ccaggcucuggacuuccuccagucggccucuc

SEQ ID NO: 100245 - RNA, 32 nt, Human
ccaggcucuggagggcccucucuguugcagua

SEQ ID NO: 100246 - RNA, 32 nt, Human
ccaggcucugggaggcucccugagaugugcug

SEQ ID NO: 100247 - RNA, 22 nt, Human
ccaggcucugggcaaggcuccu

SEQ ID NO: 100248 - RNA, 32 nt, Human
ccaggcucugguuccccaccugucaggccugu

SEQ ID NO: 100249 - RNA, 23 nt, Human
ccaggcucugucuccucagcuca

SEQ ID NO: 100250 - RNA, 32 nt, Human
ccaggcucuuacuccagccggggcugccagcg

SEQ ID NO: 100251 - RNA, 32 nt, Human
ccaggcucuuucacggauuuaggcugagaaac

SEQ ID NO: 100252 - RNA, 32 nt, Human
ccaggcucuuucucccuuuuccucuucucacu

SEQ ID NO: 100253 - RNA, 24 nt, Human
ccaggcugaagaagaccugggcca

SEQ ID NO: 100254 - RNA, 32 nt, Human
ccaggcugaagcgauccucccaccucaaccuc

SEQ ID NO: 100255 - RNA, 32 nt, Human
ccaggcugaagugauucucccaucucaaccuc

SEQ ID NO: 100256 - RNA, 19 nt, Human
ccaggcugaagugcaguga

SEQ ID NO: 100257 - RNA, 19 nt, Human
ccaggcugaagugcagugg

SEQ ID NO: 100258 - RNA, 32 nt, Human
ccaggcugacacccucuccuggagagaggcuc

SEQ ID NO: 100259 - RNA, 32 nt, Human
ccaggcugaccuuuaugcucccagaaucauca

SEQ ID NO: 100260 - RNA, 32 nt, Human
ccaggcugacgugcaucccacccagacggugu

SEQ ID NO: 100261 - RNA, 31 nt, Human
ccaggcugacuucugucucugcaaagaggac

SEQ ID NO: 100262 - RNA, 32 nt, Human
ccaggcugagacgggaaaauugcuugaacuca

SEQ ID NO: 100263 - RNA, 32 nt, Human
ccaggcugaggaucacugaggaaggggaagug

SEQ ID NO: 100264 - RNA, 32 nt, Human
ccaggcugaggugggaagauugcuugaacuca

SEQ ID NO: 100265 - RNA, 18 nt, Human
ccaggcugagugcagugg

SEQ ID NO: 100266 - RNA, 32 nt, Human
ccaggcugaucucaaacuucugaccucaggug

SEQ ID NO: 100267 - RNA, 32 nt, Human
ccaggcugcaacauccaccucccagguucaag

SEQ ID NO: 100268 - RNA, 32 nt, Human
ccaggcugcacacccauuucagccaucaagaa

SEQ ID NO: 100269 - RNA, 32 nt, Human
ccaggcugcacucggucgggccuccacaggca

SEQ ID NO: 100270 - RNA, 32 nt, Human
ccaggcugcagccucaggcacuggcaggggcu

SEQ ID NO: 100271 - RNA, 32 nt, Human
ccaggcugcagcuucugugggacugccuuaag

SEQ ID NO: 100272 - RNA, 32 nt, Human
ccaggcugcaggaaaucugccuccaggagggg

SEQ ID NO: 100273 - RNA, 18 nt, Human
ccaggcugcagugcagug

SEQ ID NO: 100274 - RNA, 19 nt, Human
ccaggcugcagugcagugg

SEQ ID NO: 100275 - RNA, 23 nt, Human
ccaggcugccaaggcggcucccc

SEQ ID NO: 100276 - RNA, 32 nt, Human
ccaggcugccaggcuggaguggaguggcauga

SEQ ID NO: 100277 - RNA, 18 nt, Human
ccaggcugcccccagggu

SEQ ID NO: 100278 - RNA, 32 nt, Human
ccaggcugccgugcaccauccuggguguccuc

SEQ ID NO: 100279 - RNA, 32 nt, Human
ccaggcugcucaagagagacacuguggcagcu

SEQ ID NO: 100280 - RNA, 18 nt, Human
ccaggcugcuccaggggc

SEQ ID NO: 100281 - RNA, 32 nt, Human
ccaggcuggaagguggagcgagaaguggaugc

SEQ ID NO: 100282 - RNA, 21 nt, Human
ccaggcuggaaugcaauggug

SEQ ID NO: 100283 - RNA, 19 nt, Human
ccaggcuggaaugcaguag

SEQ ID NO: 100284 - RNA, 19 nt, Human
ccaggcuggaaugcagugg

SEQ ID NO: 100285 - RNA, 22 nt, Human
ccaggcuggaaugcaguggcgu

SEQ ID NO: 100286 - RNA, 32 nt, Human
ccaggcuggaaugcaguggugugaacugggcu

SEQ ID NO: 100287 - RNA, 32 nt, Human
ccaggcuggacaaaccaguuccuggguccccc

SEQ ID NO: 100288 - RNA, 32 nt, Human
ccaggcuggacuccagcacaguggcaugaucu

SEQ ID NO: 100289 - RNA, 19 nt, Human
ccaggcuggacugcagugg

SEQ ID NO: 100290 - RNA, 19 nt, Human
ccaggcuggagagcagugg

SEQ ID NO: 100291 - RNA, 19 nt, Human
ccaggcuggagcgcagugg

SEQ ID NO: 100292 - RNA, 19 nt, Human
ccaggcuggagggcagugg

SEQ ID NO: 100293 - RNA, 21 nt, Human
ccaggcuggagggcaguggug

SEQ ID NO: 100294 - RNA, 18 nt, Human
ccaggcuggaguacagug

SEQ ID NO: 100295 - RNA, 19 nt, Human
ccaggcuggaguacaguga

SEQ ID NO: 100296 - RNA, 21 nt, Human
ccaggcuggaguacagugaug

SEQ ID NO: 100297 - RNA, 19 nt, Human
ccaggcuggaguacagugg

SEQ ID NO: 100298 - RNA, 32 nt, Human
ccaggcuggaguauaguagugcagugguguga

SEQ ID NO: 100299 - RNA, 19 nt, Human
ccaggcuggaguccagugg

SEQ ID NO: 100300 - RNA, 19 nt, Human
ccaggcuggagugaagugg

SEQ ID NO: 100301 - RNA, 22 nt, Human
ccaggcuggagugaaguggugu

SEQ ID NO: 100302 - RNA, 32 nt, Human
ccaggcuggagugagugcaguggcgcaaucuc

SEQ ID NO: 100303 - RNA, 32 nt, Human
ccaggcuggagugcaacggugcagucucggcu

SEQ ID NO: 100304 - RNA, 18 nt, Human
ccaggcuggagugcaaug

SEQ ID NO: 100305 - RNA, 19 nt, Human
ccaggcuggagugcaauga

SEQ ID NO: 100306 - RNA, 19 nt, Human
ccaggcuggagugcaaugg

SEQ ID NO: 100307 - RNA, 22 nt, Human
ccaggcuggagugcaauggcgu

SEQ ID NO: 100308 - RNA, 32 nt, Human
ccaggcuggagugcaaugguguguugucggcu

SEQ ID NO: 100309 - RNA, 32 nt, Human
ccaggcuggagugcaaugugcaauggcacaau

SEQ ID NO: 100310 - RNA, 19 nt, Human
ccaggcuggagugcacugg

SEQ ID NO: 100311 - RNA, 19 nt, Human
ccaggcuggagugcagagg

SEQ ID NO: 100312 - RNA, 19 nt, Human
ccaggcuggagugcagcgg

SEQ ID NO: 100313 - RNA, 32 nt, Human
ccaggcuggagugcaggcuuggaguuuuauga

SEQ ID NO: 100314 - RNA, 18 nt, Human
ccaggcuggagugcaggg

SEQ ID NO: 100315 - RNA, 19 nt, Human
ccaggcuggagugcaguag

SEQ ID NO: 100316 - RNA, 32 nt, Human
ccaggcuggagugcaguagugcagucguggcu

SEQ ID NO: 100317 - RNA, 18 nt, Human
ccaggcuggagugcagug

SEQ ID NO: 100318 - RNA, 19 nt, Human
ccaggcuggagugcaguga

SEQ ID NO: 100319 - RNA, 19 nt, Human
ccaggcuggagugcagugg

SEQ ID NO: 100320 - RNA, 32 nt, Human
ccaggcuggagugcaguggagcaaucuugggu

SEQ ID NO: 100321 - RNA, 32 nt, Human
ccaggcuggagugcaguggagugaucucggcu

SEQ ID NO: 100322 - RNA, 32 nt, Human
ccaggcuggagugcaguggcaaaaucacaaua

SEQ ID NO: 100323 - RNA, 32 nt, Human
ccaggcuggagugcaguggcacaaccucggcu

SEQ ID NO: 100324 - RNA, 32 nt, Human
ccaggcuggagugcaguggcacaaccuuggcu

SEQ ID NO: 100325 - RNA, 32 nt, Human
ccaggcuggagugcaguggcacaaucaaagcu

SEQ ID NO: 100326 - RNA, 32 nt, Human
ccaggcuggagugcaguggcacaaucacaguu

SEQ ID NO: 100327 - RNA, 32 nt, Human
ccaggcuggagugcaguggcacaaucauggcu

SEQ ID NO: 100328 - RNA, 32 nt, Human
ccaggcuggagugcaguggcacaaucucagcu

SEQ ID NO: 100329 - RNA, 32 nt, Human
ccaggcuggagugcaguggcacaaucucaguu

SEQ ID NO: 100330 - RNA, 32 nt, Human
ccaggcuggagugcaguggcacaaucucgacu

SEQ ID NO: 100331 - RNA, 32 nt, Human
ccaggcuggagugcaguggcacaaucucggcu

SEQ ID NO: 100332 - RNA, 32 nt, Human
ccaggcuggagugcaguggcacaaucucugcu

SEQ ID NO: 100333 - RNA, 32 nt, Human
ccaggcuggagugcaguggcacaaucuugacu

SEQ ID NO: 100334 - RNA, 32 nt, Human
ccaggcuggagugcaguggcacaaucuuggcu

SEQ ID NO: 100335 - RNA, 32 nt, Human
ccaggcuggagugcaguggcacaaugacgacu

SEQ ID NO: 100336 - RNA, 32 nt, Human
ccaggcuggagugcaguggcacagucuuggau

SEQ ID NO: 100337 - RNA, 32 nt, Human
ccaggcuggagugcaguggcacaucucggcuc

SEQ ID NO: 100338 - RNA, 32 nt, Human
ccaggcuggagugcaguggcaccaccauggcu

SEQ ID NO: 100339 - RNA, 32 nt, Human
ccaggcuggagugcaguggcaccaucucagcu

SEQ ID NO: 100340 - RNA, 32 nt, Human
ccaggcuggagugcaguggcaccaucucaguu

SEQ ID NO: 100341 - RNA, 32 nt, Human
ccaggcuggagugcaguggcacgaucacagcu

SEQ ID NO: 100342 - RNA, 32 nt, Human
ccaggcuggagugcaguggcacgaucauggcu

SEQ ID NO: 100343 - RNA, 32 nt, Human
ccaggcuggagugcaguggcacgauccugguu

SEQ ID NO: 100344 - RNA, 32 nt, Human
ccaggcuggagugcaguggcacgaucucaacu

SEQ ID NO: 100345 - RNA, 32 nt, Human
ccaggcuggagugcaguggcacgaucucagcu

SEQ ID NO: 100346 - RNA, 32 nt, Human
ccaggcuggagugcaguggcacgaucugcaaa

SEQ ID NO: 100347 - RNA, 32 nt, Human
ccaggcuggagugcaguggcacgaucuuggcu

SEQ ID NO: 100348 - RNA, 32 nt, Human
ccaggcuggagugcaguggcacgaucuugguu

SEQ ID NO: 100349 - RNA, 32 nt, Human
ccaggcuggagugcaguggcacgauuauggcu

SEQ ID NO: 100350 - RNA, 32 nt, Human
ccaggcuggagugcaguggcacggucucagcu

SEQ ID NO: 100351 - RNA, 32 nt, Human
ccaggcuggagugcaguggcacuaucucggcu

SEQ ID NO: 100352 - RNA, 32 nt, Human
ccaggcuggagugcaguggcacuaucuuggcu

SEQ ID NO: 100353 - RNA, 32 nt, Human
ccaggcuggagugcaguggcagaguugcagcu

SEQ ID NO: 100354 - RNA, 32 nt, Human
ccaggcuggagugcaguggcaggaucucggcu

SEQ ID NO: 100355 - RNA, 32 nt, Human
ccaggcuggagugcaguggcauaaucauaccu

SEQ ID NO: 100356 - RNA, 32 nt, Human
ccaggcuggagugcaguggcaugaucacagcu

SEQ ID NO: 100357 - RNA, 32 nt, Human
ccaggcuggagugcaguggcaugaucauaacu

SEQ ID NO: 100358 - RNA, 32 nt, Human
ccaggcuggagugcaguggcaugaucauagcu

SEQ ID NO: 100359 - RNA, 32 nt, Human
ccaggcuggagugcaguggcaugaucucagcu

SEQ ID NO: 100360 - RNA, 32 nt, Human
ccaggcuggagugcaguggcaugaucucaguu

SEQ ID NO: 100361 - RNA, 32 nt, Human
ccaggcuggagugcaguggcaugaucucggcu

SEQ ID NO: 100362 - RNA, 32 nt, Human
ccaggcuggagugcaguggcaugaucuggucu

SEQ ID NO: 100363 - RNA, 32 nt, Human
ccaggcuggagugcaguggcaugaucuuagcu

SEQ ID NO: 100364 - RNA, 32 nt, Human
ccaggcuggagugcaguggcaugauuucggcu

SEQ ID NO: 100365 - RNA, 32 nt, Human
ccaggcuggagugcaguggcauuaucucggcu

SEQ ID NO: 100366 - RNA, 32 nt, Human
ccaggcuggagugcaguggccugaucucugcu

SEQ ID NO: 100367 - RNA, 32 nt, Human
ccaggcuggagugcaguggcgaaaucccugcu

SEQ ID NO: 100368 - RNA, 32 nt, Human
ccaggcuggagugcaguggcgcaaucucacug

SEQ ID NO: 100369 - RNA, 32 nt, Human
ccaggcuggagugcaguggcgcaaucuccacu

SEQ ID NO: 100370 - RNA, 32 nt, Human
ccaggcuggagugcaguggcgccaucucccag

SEQ ID NO: 100371 - RNA, 32 nt, Human
ccaggcuggagugcaguggcgcgaucucaucu

SEQ ID NO: 100372 - RNA, 32 nt, Human
ccaggcuggagugcaguggcgcgaucuugguu

SEQ ID NO: 100373 - RNA, 22 nt, Human
ccaggcuggagugcaguggcgu

SEQ ID NO: 100374 - RNA, 32 nt, Human
ccaggcuggagugcaguggcgugaucucaguu

SEQ ID NO: 100375 - RNA, 32 nt, Human
ccaggcuggagugcaguggcucaaugcaaccu

SEQ ID NO: 100376 - RNA, 32 nt, Human
ccaggcuggagugcaguggcucgaucucugcu

SEQ ID NO: 100377 - RNA, 32 nt, Human
ccaggcuggagugcaguggcuugaucuuggcu

SEQ ID NO: 100378 - RNA, 32 nt, Human
ccaggcuggagugcagugggaugaucuuggcu

SEQ ID NO: 100379 - RNA, 32 nt, Human
ccaggcuggagugcagugggugaucuuggcuc

SEQ ID NO: 100380 - RNA, 32 nt, Human
ccaggcuggagugcagugguacaagcacaguu

SEQ ID NO: 100381 - RNA, 32 nt, Human
ccaggcuggagugcagugguacaaucauggcu

SEQ ID NO: 100382 - RNA, 32 nt, Human
ccaggcuggagugcagugguacagucucagcu

SEQ ID NO: 100383 - RNA, 32 nt, Human
ccaggcuggagugcagugguacagucuuagcu

SEQ ID NO: 100384 - RNA, 32 nt, Human
ccaggcuggagugcagugguacgaucuuggcu

SEQ ID NO: 100385 - RNA, 32 nt, Human
ccaggcuggagugcagugguagaucaggguuc

SEQ ID NO: 100386 - RNA, 32 nt, Human
ccaggcuggagugcagugguaugaccauagcu

SEQ ID NO: 100387 - RNA, 32 nt, Human
ccaggcuggagugcagugguaugaucauggcu

SEQ ID NO: 100388 - RNA, 32 nt, Human
ccaggcuggagugcagugguaugaucucaccu

SEQ ID NO: 100389 - RNA, 32 nt, Human
ccaggcuggagugcagugguaugaucucagcu

SEQ ID NO: 100390 - RNA, 32 nt, Human
ccaggcuggagugcagugguaugaucuuggcu

SEQ ID NO: 100391 - RNA, 21 nt, Human
ccaggcuggagugcaguggug

SEQ ID NO: 100392 - RNA, 32 nt, Human
ccaggcuggagugcaguggugagaucugggcu

SEQ ID NO: 100393 - RNA, 32 nt, Human
ccaggcuggagugcaguggugagaucuggguu

SEQ ID NO: 100394 - RNA, 32 nt, Human
ccaggcuggagugcaguggugagauuuuggcu

SEQ ID NO: 100395 - RNA, 32 nt, Human
ccaggcuggagugcaguggugcaaucaugguu

SEQ ID NO: 100396 - RNA, 32 nt, Human
ccaggcuggagugcaguggugcaaucucaccu

SEQ ID NO: 100397 - RNA, 32 nt, Human
ccaggcuggagugcaguggugcaaucucaguu

SEQ ID NO: 100398 - RNA, 32 nt, Human
ccaggcuggagugcaguggugcaaucucgguu

SEQ ID NO: 100399 - RNA, 32 nt, Human
ccaggcuggagugcaguggugcaaucuuggug

SEQ ID NO: 100400 - RNA, 32 nt, Human
ccaggcuggagugcaguggugccaucaccacg

SEQ ID NO: 100401 - RNA, 32 nt, Human
ccaggcuggagugcaguggugcgaucauaggu

SEQ ID NO: 100402 - RNA, 32 nt, Human
ccaggcuggagugcaguggugcgaucuggguu

SEQ ID NO: 100403 - RNA, 32 nt, Human
ccaggcuggagugcagugguggcgaucuuggc

SEQ ID NO: 100404 - RNA, 22 nt, Human
ccaggcuggagugcaguggugu

SEQ ID NO: 100405 - RNA, 32 nt, Human
ccaggcuggagugcagugguguaaacauagcu

SEQ ID NO: 100406 - RNA, 32 nt, Human
ccaggcuggagugcagugguguaaucuuggcu

SEQ ID NO: 100407 - RNA, 32 nt, Human
ccaggcuggagugcaguggugucaucauagcu

SEQ ID NO: 100408 - RNA, 32 nt, Human
ccaggcuggagugcaguggugugagcucggcu

SEQ ID NO: 100409 - RNA, 32 nt, Human
ccaggcuggagugcaguggugugaucauagcc

SEQ ID NO: 100410 - RNA, 32 nt, Human
ccaggcuggagugcaguggugugauccuggcu

SEQ ID NO: 100411 - RNA, 32 nt, Human
ccaggcuggagugcaguggugugaucucggcu

SEQ ID NO: 100412 - RNA, 32 nt, Human
ccaggcuggagugcaguggugugaucucgucu

SEQ ID NO: 100413 - RNA, 32 nt, Human
ccaggcuggagugcaguggugugaucuuggcu

SEQ ID NO: 100414 - RNA, 32 nt, Human
ccaggcuggagugcaguggugugaucuugggu

SEQ ID NO: 100415 - RNA, 19 nt, Human
ccaggcuggagugcauugg

SEQ ID NO: 100416 - RNA, 19 nt, Human
ccaggcuggagugccgugg

SEQ ID NO: 100417 - RNA, 18 nt, Human
ccaggcuggagugcgaug

SEQ ID NO: 100418 - RNA, 19 nt, Human
ccaggcuggagugcggugg

SEQ ID NO: 100419 - RNA, 32 nt, Human
ccaggcuggagugcgguggacucuuuucuuuu

SEQ ID NO: 100420 - RNA, 32 nt, Human
ccaggcuggagugcgguggcacaaucucggcu

SEQ ID NO: 100421 - RNA, 32 nt, Human
ccaggcuggagugcgguggcaugaucucaguu

SEQ ID NO: 100422 - RNA, 32 nt, Human
ccaggcuggagugcgguggcaugaucucgguu

SEQ ID NO: 100423 - RNA, 32 nt, Human
ccaggcuggagugcgguggcuagucacaggug

SEQ ID NO: 100424 - RNA, 32 nt, Human
ccaggcuggagugcgguggcuauucacagaug

SEQ ID NO: 100425 - RNA, 32 nt, Human
ccaggcuggagugcggugguacaaucucggcu

SEQ ID NO: 100426 - RNA, 32 nt, Human
ccaggcuggagugcgguggugcgaucacgguu

SEQ ID NO: 100427 - RNA, 32 nt, Human
ccaggcuggagugcggugguggaaucauagcu

SEQ ID NO: 100428 - RNA, 19 nt, Human
ccaggcuggagugcugugg

SEQ ID NO: 100429 - RNA, 19 nt, Human
ccaggcuggaguggagugg

SEQ ID NO: 100430 - RNA, 32 nt, Human
ccaggcuggaguggugcaguggcacgaucuca

SEQ ID NO: 100431 - RNA, 18 nt, Human
ccaggcuggaguguagug

SEQ ID NO: 100432 - RNA, 19 nt, Human
ccaggcuggaguguaguga

SEQ ID NO: 100433 - RNA, 19 nt, Human
ccaggcuggaguguagugg

SEQ ID NO: 100434 - RNA, 32 nt, Human
ccaggcuggaguguaguggcacaaucucagcu

SEQ ID NO: 100435 - RNA, 32 nt, Human
ccaggcuggaguguaguggcaccaucuccacu

SEQ ID NO: 100436 - RNA, 32 nt, Human
ccaggcuggaguguaguggcaugaucucgacu

SEQ ID NO: 100437 - RNA, 32 nt, Human
ccaggcuggaguguaguggcaugaucucggcu

SEQ ID NO: 100438 - RNA, 32 nt, Human
ccaggcuggaguguaguggcaugaucugggcu

SEQ ID NO: 100439 - RNA, 32 nt, Human
ccaggcuggaguguaguggcgcaaucuuggau

SEQ ID NO: 100440 - RNA, 32 nt, Human
ccaggcuggaguguagugguaugaucauagcu

SEQ ID NO: 100441 - RNA, 32 nt, Human
ccaggcuggaguguaguggugugauccuggcu

SEQ ID NO: 100442 - RNA, 32 nt, Human
ccaugcaguaaauaguucaagcuuugugggcu

SEQ ID NO: 100443 - RNA, 32 nt, Human
ccaugcaguccucaucucccugggcuuccgcu

SEQ ID NO: 100444 - RNA, 32 nt, Human
ccaugcagucucgcauuugaugacaugcagca

SEQ ID NO: 100445 - RNA, 32 nt, Human
ccaugcagugggcccaagcaaggggccuauga

SEQ ID NO: 100446 - RNA, 32 nt, Human
ccaugcagugugugcuuuuguguauggaagca

SEQ ID NO: 100447 - RNA, 22 nt, Human
ccaugcauagagccacgggagg

SEQ ID NO: 100448 - RNA, 32 nt, Human
ccaugcaucccaagccuuugaccuucccgcua

SEQ ID NO: 100449 - RNA, 32 nt, Human
ccaugcaugacuccuugucacacacaugaucu

SEQ ID NO: 100450 - RNA, 17 nt, Human
ccaugcaugcacccaga

SEQ ID NO: 100451 - RNA, 32 nt, Human
ccaugcauggucgcugucuacccuggaaaugu

SEQ ID NO: 100452 - RNA, 32 nt, Human
ccaugcaugguggcacaugccuguaaucccag

SEQ ID NO: 100453 - RNA, 32 nt, Human
ccaugcaugguggcgggugccuguaaucccag

SEQ ID NO: 100454 - RNA, 32 nt, Human
ccaugcaugguggcucaugccuguagucccag

SEQ ID NO: 100455 - RNA, 32 nt, Human
ccaugcaugguggugcaugccuguaaucucag

SEQ ID NO: 100456 - RNA, 32 nt, Human
ccaugcauugucacucugccuccgggacccca

SEQ ID NO: 100457 - RNA, 32 nt, Human
ccaugcauuucugcuuccuuugccaaagccag

SEQ ID NO: 100458 - RNA, 32 nt, Human
ccaugccaaugcacuccagucugggcaacaga

SEQ ID NO: 100459 - RNA, 32 nt, Human
ccaugccacugcacuccagccugggcaacaaa

SEQ ID NO: 100460 - RNA, 32 nt, Human
ccaugccacugcacuccagccugggcaacaga

SEQ ID NO: 100461 - RNA, 27 nt, Human
ccaugccacugcacuccagccugggug

SEQ ID NO: 100462 - RNA, 32 nt, Human
ccaugccacugcacuccggccugggugacaaa

SEQ ID NO: 100463 - RNA, 32 nt, Human
ccaugccagcacuugaacugucugggguuuga

SEQ ID NO: 100464 - RNA, 32 nt, Human
ccaugccagcagcugcagaggaugugccgguc

SEQ ID NO: 100465 - RNA, 32 nt, Human
ccaugccaggagagaggcaggcagaccugggc

SEQ ID NO: 100466 - RNA, 32 nt, Human
ccaugccaguccuaugcucugcagccauaggg

SEQ ID NO: 100467 - RNA, 32 nt, Human
ccaugccauugcacuccagccugggcgacaga

SEQ ID NO: 100468 - RNA, 32 nt, Human
ccaugccauuggacuccagccugggcaaaaag

SEQ ID NO: 100469 - RNA, 23 nt, Human
ccaugcccaacuccucuucagga

SEQ ID NO: 100470 - RNA, 32 nt, Human
ccaugcccaagagaaagacugaaggggaugcu

SEQ ID NO: 100471 - RNA, 27 nt, Human
ccaugcccaagagaaaggcugaagggg

SEQ ID NO: 100472 - RNA, 32 nt, Human
ccaugcccacccuccccacgcugcagugggcu

SEQ ID NO: 100473 - RNA, 21 nt, Human
ccaugcccacggcacaggaua

SEQ ID NO: 100474 - RNA, 22 nt, Human
ccaugcccagccagaauggaug

SEQ ID NO: 100475 - RNA, 32 nt, Human
ccaugcccagcccuggagccaucacuacucac

SEQ ID NO: 100476 - RNA, 23 nt, Human
ccaugcccagccuggcugagccc

SEQ ID NO: 100477 - RNA, 21 nt, Human
ccaugcccagcuaauuuuuga

SEQ ID NO: 100478 - RNA, 18 nt, Human
ccaugcccagcugggccu

SEQ ID NO: 100479 - RNA, 32 nt, Human
ccaugcccaggguggccguggaagggacgguu

SEQ ID NO: 100480 - RNA, 32 nt, Human
ccaugccccacugcaggccugggcccccucag

SEQ ID NO: 100481 - RNA, 32 nt, Human
ccaugccccaggcugcagccucuguccccucc

SEQ ID NO: 100482 - RNA, 32 nt, Human
ccaugcccccacccuccccucacacacaaauu

SEQ ID NO: 100483 - RNA, 32 nt, Human
ccaugcccccuucgcuccuccucucaucauuu

SEQ ID NO: 100484 - RNA, 32 nt, Human
ccaugccccugcccuucgaccucaucuacacc

SEQ ID NO: 100485 - RNA, 32 nt, Human
ccaugccccuggcugcucuuauggagccgaga

SEQ ID NO: 100486 - RNA, 32 nt, Human
ccaugccccuuccuuccuucuccugggacugg

SEQ ID NO: 100487 - RNA, 32 nt, Human
ccaugcccgcugucccagcuccuugagacugg

SEQ ID NO: 100488 - RNA, 32 nt, Human
ccaugcccggccccacucacaccaaccuguga

SEQ ID NO: 100489 - RNA, 32 nt, Human
ccaugcccggcuaauuuaguuguauuuuuagu

SEQ ID NO: 100490 - RNA, 27 nt, Human
ccaugcccuacaacuucugccugccca

SEQ ID NO: 100491 - RNA, 32 nt, Human
ccaugcccucccccaacagucccucagcuuca

SEQ ID NO: 100492 - RNA, 32 nt, Human
ccaugcccugcacagcccgccugagguuugag

SEQ ID NO: 100493 - RNA, 32 nt, Human
ccaugcccuguaucuuucaggaccuguuuuag

SEQ ID NO: 100494 - RNA, 21 nt, Human
ccaugcccuuuucucaggaua

SEQ ID NO: 100495 - RNA, 32 nt, Human
ccaugccggcccgggugguccaugccugcggg

SEQ ID NO: 100496 - RNA, 32 nt, Human
ccaugccuaccaccaucaucacaucccccagc

SEQ ID NO: 100497 - RNA, 32 nt, Human
ccaugccuagaagccagaacaacuccauguua

SEQ ID NO: 100498 - RNA, 32 nt, Human
ccaugccuagaugaucaguccucugccacaua

SEQ ID NO: 100499 - RNA, 32 nt, Human
ccaugccuauaaucccagcacuuugggaggcu

SEQ ID NO: 100500 - RNA, 32 nt, Human
ccaugccuauaaucccggcuacucgggaggcu

SEQ ID NO: 100501 - RNA, 22 nt, Human
ccaugccucugcaggcauucca

SEQ ID NO: 100502 - RNA, 32 nt, Human
ccaugccucuguccagccaccugcugcccgcc

SEQ ID NO: 100503 - RNA, 32 nt, Human
ccaugccucuugaagcuuuuucugccuccuga

SEQ ID NO: 100504 - RNA, 32 nt, Human
ccaugccugcaaccuugcauccaucugggcua

SEQ ID NO: 100505 - RNA, 32 nt, Human
ccaugccugcagcaaugcucaugucuugagga

SEQ ID NO: 100506 - RNA, 32 nt, Human
ccaugccuggcugcagccagaggggccucagg

SEQ ID NO: 100507 - RNA, 27 nt, Human
ccaugccuggcuggcccugggggcugc

SEQ ID NO: 100508 - RNA, 32 nt, Human
ccaugccuggugacccaccauggacauacugg

SEQ ID NO: 100509 - RNA, 32 nt, Human
ccaugccuguaaucccagcacuuugggaggcu

SEQ ID NO: 100510 - RNA, 32 nt, Human
ccaugccuguaaucccagcacuuugggaggug

SEQ ID NO: 100511 - RNA, 32 nt, Human
ccaugccuguagucccagcuacucaggaggcu

SEQ ID NO: 100512 - RNA, 32 nt, Human
ccaugccuguagucccagcuguucgagaggcu

SEQ ID NO: 100513 - RNA, 27 nt, Human
ccaugccugugucagggacaggcacag

SEQ ID NO: 100514 - RNA, 32 nt, Human
ccaugccuguuaucccagcacuuggggaggcu

SEQ ID NO: 100515 - RNA, 32 nt, Human
ccaugccuguucuccuuccuugcuauggaauu

SEQ ID NO: 100516 - RNA, 32 nt, Human
ccaugccuucagaguuaggagugagaaugauc

SEQ ID NO: 100517 - RNA, 32 nt, Human
ccaugccuucauuccuacuuucugaaucaaca

SEQ ID NO: 100518 - RNA, 32 nt, Human
ccaugccuuccuggucccucugugcuucucuc

SEQ ID NO: 100519 - RNA, 32 nt, Human
ccaugccuucucucucccugcaaagaaaaauc

SEQ ID NO: 100520 - RNA, 32 nt, Human
ccaugccuuggugcugugccucaggcuccuuc

SEQ ID NO: 100521 - RNA, 27 nt, Human
ccaugcgacuguugccgugugcagcag

SEQ ID NO: 100522 - RNA, 32 nt, Human
ccaugcgagccagcgucucccuucucuccugg

SEQ ID NO: 100523 - RNA, 32 nt, Human
ccaugcgaguagcugggacuacagacaugcac

SEQ ID NO: 100524 - RNA, 32 nt, Human
ccaugcgcacccaggaggagcagaucaagacc

SEQ ID NO: 100525 - RNA, 21 nt, Human
ccaugcgccgccccgccgccg

SEQ ID NO: 100526 - RNA, 22 nt, Human
ccaugcgccucggggcuguaga

SEQ ID NO: 100527 - RNA, 32 nt, Human
ccaugcgcugcguuccuccuccagaucgaccc

SEQ ID NO: 100528 - RNA, 32 nt, Human
ccaugcggagccaagauggggaauggaacuga

SEQ ID NO: 100529 - RNA, 32 nt, Human
ccaugcggccagcccaggucugcaugcugagc

SEQ ID NO: 100530 - RNA, 32 nt, Human
ccaugcguaguggugcaugccuguaaucccag

SEQ ID NO: 100531 - RNA, 32 nt, Human
ccaugcguccgccugccugccugcgcuuccau

SEQ ID NO: 100532 - RNA, 32 nt, Human
ccaugcgugguggcucaggccuguaaucccag

SEQ ID NO: 100533 - RNA, 32 nt, Human
ccaugcuaaccuguaaucccagcuacuuggga

SEQ ID NO: 100534 - RNA, 32 nt, Human
ccaugcuacuaccaccaccaccaccaccccuu

SEQ ID NO: 100535 - RNA, 32 nt, Human
ccaugcuaggguccccaaagcacuggggcagg

SEQ ID NO: 100536 - RNA, 20 nt, Human
ccaugcucaaagugagucug

SEQ ID NO: 100537 - RNA, 32 nt, Human
ccaugcucagccuaugucaucugcacuguuga

SEQ ID NO: 100538 - RNA, 32 nt, Human
ccaugcucagcuugugagcuucuucccgggag

SEQ ID NO: 100539 - RNA, 32 nt, Human
ccaugcucaugaagccacagguccuacacccc

SEQ ID NO: 100540 - RNA, 32 nt, Human
ccaugcuccauccucccucucuuccaccuccc

SEQ ID NO: 100541 - RNA, 32 nt, Human
ccaugcuccccucugcugcccagagccccagg

SEQ ID NO: 100542 - RNA, 32 nt, Human
ccaugcuccucaccaguaaaucaagggccuga

SEQ ID NO: 100543 - RNA, 32 nt, Human
ccaugcuccucaccuguauuuuguaaucagaa

SEQ ID NO: 100544 - RNA, 32 nt, Human
ccaugcuccuuucugucagguuuaaauguagu

SEQ ID NO: 100545 - RNA, 32 nt, Human
ccaugcucuaaacugaacuugaccucaaucca

SEQ ID NO: 100546 - RNA, 32 nt, Human
ccaugcucuccucccucagccuugcuacccug

SEQ ID NO: 100547 - RNA, 32 nt, Human
ccaugcucucuggccuucugaggagugggcag

SEQ ID NO: 100548 - RNA, 32 nt, Human
ccaugcucugcccccugucucaugcacgagug

SEQ ID NO: 100549 - RNA, 32 nt, Human
ccaugcucugcccucagaccuggccaggugau

SEQ ID NO: 100550 - RNA, 32 nt, Human
ccaugcucugcugccucuaauucacagaaugc

SEQ ID NO: 100551 - RNA, 32 nt, Human
ccaugcucugcugucuccuggugaucauuucc

SEQ ID NO: 100552 - RNA, 32 nt, Human
ccaugcucuguguccaggcuugcuccuggcag

SEQ ID NO: 100553 - RNA, 32 nt, Human
ccaugcucuucuguacugucaugcccgucucu

SEQ ID NO: 100554 - RNA, 32 nt, Human
ccaugcugacugccugaaucucugcugaggcu

SEQ ID NO: 100555 - RNA, 32 nt, Human
ccaugcugagcauccuggaggaccuggagagc

SEQ ID NO: 100556 - RNA, 32 nt, Human
ccaugcugagggaaggggagcaguugccaaua

SEQ ID NO: 100557 - RNA, 32 nt, Human
ccaugcugcaaucacuguccugggcuuauggu

SEQ ID NO: 100558 - RNA, 23 nt, Human
ccaugcugcccuggcuugccagg

SEQ ID NO: 100559 - RNA, 32 nt, Human
ccaugcugcugggcagggaacugaggccagac

SEQ ID NO: 100560 - RNA, 27 nt, Human
ccaugcugcugugcccugagguuccca

SEQ ID NO: 100561 - RNA, 32 nt, Human
ccaugcuggaaggggaaaugaaggacaaaaau

SEQ ID NO: 100562 - RNA, 32 nt, Human
ccaugcuggaaguagccugaggcccucaccag

SEQ ID NO: 100563 - RNA, 32 nt, Human
ccaugcuggacuggcccuccagcagugcccac

SEQ ID NO: 100564 - RNA, 19 nt, Human
ccaugcuggagugcagugg

SEQ ID NO: 100565 - RNA, 32 nt, Human
ccaugcuggagugcaguggcaugaucucggcu

SEQ ID NO: 100566 - RNA, 22 nt, Human
ccaugcuggccagacuggucuc

SEQ ID NO: 100567 - RNA, 23 nt, Human
ccaugcuggccaggcuggucuca

SEQ ID NO: 100568 - RNA, 32 nt, Human
ccaugcugggagaggcggccagagccuggggc

SEQ ID NO: 100569 - RNA, 27 nt, Human
ccaugcugggcucucccugccuucugu

SEQ ID NO: 100570 - RNA, 32 nt, Human
ccaugcugggcucugugcccucugugucugug

SEQ ID NO: 100571 - RNA, 32 nt, Human
ccaugcugggcuggaguggcuguggggugucc

SEQ ID NO: 100572 - RNA, 22 nt, Human
ccaugcugggggugacgggagg

SEQ ID NO: 100573 - RNA, 32 nt, Human
ccaugcuggucaggauggucuccaacuccuga

SEQ ID NO: 100574 - RNA, 32 nt, Human
ccaugcugucaacuccugccuccaccuggggu

SEQ ID NO: 100575 - RNA, 32 nt, Human
ccaugcugucacccucaggaagcaucaugaca

SEQ ID NO: 100576 - RNA, 20 nt, Human
ccaugcuguccauccauucu

SEQ ID NO: 100577 - RNA, 32 nt, Human
ccaugcuguccccauucucuccuuucaccauc

SEQ ID NO: 100578 - RNA, 32 nt, Human
ccaugcugugcagcacuucuguccucagucaa

SEQ ID NO: 100579 - RNA, 32 nt, Human
ccaugcuguggacagugaggggaggagguccu

SEQ ID NO: 100580 - RNA, 32 nt, Human
ccaugcuucccccgccaaccagcuccugcugc

SEQ ID NO: 100581 - RNA, 32 nt, Human
ccaugcuucuaggaacugccugguuuucgagc

SEQ ID NO: 100582 - RNA, 32 nt, Human
ccaugcuucucaucuugugaaauggccaggau

SEQ ID NO: 100583 - RNA, 32 nt, Human
ccaugcuugacuaagguaccugguuuuagcca

SEQ ID NO: 100584 - RNA, 32 nt, Human
ccaugcuuguagucccagcuacucaggaggcu

SEQ ID NO: 100585 - RNA, 32 nt, Human
ccaugcuugugagaucuucccagccaagugga

SEQ ID NO: 100586 - RNA, 32 nt, Human
ccaugcuuguuuucucauucacuggcauggau

SEQ ID NO: 100587 - RNA, 32 nt, Human
ccaugcuuuaucccauagccugccuccugcag

SEQ ID NO: 100588 - RNA, 32 nt, Human
ccaugcuuucgcauuuggaauguggcucugcc

SEQ ID NO: 100589 - RNA, 32 nt, Human
ccaugcuuucuuuuccucuguugugguuuuca

SEQ ID NO: 100590 - RNA, 32 nt, Human
ccaugcuuugaaggcaggcuuuagcucccaga

SEQ ID NO: 100591 - RNA, 32 nt, Human
ccaugcuuugcucucaaggcuuggagagguau

SEQ ID NO: 100592 - RNA, 32 nt, Human
ccaugcuuugggcaugagaugcucagauggug

SEQ ID NO: 100593 - RNA, 22 nt, Human
ccauggaacuaaguacaguggc

SEQ ID NO: 100594 - RNA, 32 nt, Human
ccauggaagauggaugggcaagaguguacuuc

SEQ ID NO: 100595 - RNA, 32 nt, Human
ccauggaaucuucuccugugauaucugacucg

SEQ ID NO: 100596 - RNA, 31 nt, Human
ccauggaaugcugaaagaugggugacugggg

SEQ ID NO: 100597 - RNA, 32 nt, Human
ccauggaaugcuugaaaaaugugcaaaacagc

SEQ ID NO: 100598 - RNA, 32 nt, Human
ccauggaauucccuccugagugccccacuucu

SEQ ID NO: 100599 - RNA, 32 nt, Human
ccauggacacuucacccacccuccaggacccc

SEQ ID NO: 100600 - RNA, 32 nt, Human
ccauggacagaagaaggcagcagguggcagaa

SEQ ID NO: 100601 - RNA, 27 nt, Human
ccauggacaugcuucauccaucaucgg

SEQ ID NO: 100602 - RNA, 32 nt, Human
ccauggaccccaccuccucugcagccucacgg

SEQ ID NO: 100603 - RNA, 27 nt, Human
ccauggaccgcccagaugaggggccuc

SEQ ID NO: 100604 - RNA, 27 nt, Human
ccauggaccugcgcccugagcugccca

SEQ ID NO: 100605 - RNA, 32 nt, Human
ccauggacucacuuuuguaacaaacuccuacc

SEQ ID NO: 100606 - RNA, 27 nt, Human
ccauggacucggacgccagccuggugu

SEQ ID NO: 100607 - RNA, 32 nt, Human
ccauggacuggacaccuucacuccagcuggac

SEQ ID NO: 100608 - RNA, 32 nt, Human
ccauggagaacagcagcucacgauugcuuuga

SEQ ID NO: 100609 - RNA, 32 nt, Human
ccauggagacagcaacaguccccagccgcggg

SEQ ID NO: 100610 - RNA, 27 nt, Human
ccauggagaccagaccaacagcucuga

SEQ ID NO: 100611 - RNA, 30 nt, Human
ccauggagagcccagagggcacagguggcu

SEQ ID NO: 100612 - RNA, 32 nt, Human
ccauggagaggaacucuucugcacucugagcu

SEQ ID NO: 100613 - RNA, 32 nt, Human
ccauggagagugagaagcugccagagaagcag

SEQ ID NO: 100614 - RNA, 32 nt, Human
ccauggagcacugcaggcucuuuccccagacc

SEQ ID NO: 100615 - RNA, 32 nt, Human
ccauggagcagcaggcccagaggcccucuccc

SEQ ID NO: 100616 - RNA, 20 nt, Human
ccauggagccgccgcugccg

SEQ ID NO: 100617 - RNA, 32 nt, Human
ccauggagccucaggugcucccccucucaccu

SEQ ID NO: 100618 - RNA, 32 nt, Human
ccauggagccucauuuuguaggccaguugugu

SEQ ID NO: 100619 - RNA, 32 nt, Human
ccauggagcugaugaggccgagugucaggaag

SEQ ID NO: 100620 - RNA, 32 nt, Human
ccauggagcuugugggcaggaggcuggggaug

SEQ ID NO: 100621 - RNA, 32 nt, Human
ccauggaggaaggcucuguuccacauauauuu

SEQ ID NO: 100622 - RNA, 27 nt, Human
ccauggaggaggaggagggggcggugg

SEQ ID NO: 100623 - RNA, 32 nt, Human
ccauggaggcaggcucccccugccuuugaaau

SEQ ID NO: 100624 - RNA, 32 nt, Human
ccauggagggcugaggagcacuuuggcuugga

SEQ ID NO: 100625 - RNA, 32 nt, Human
ccauggaggggacuguguuucuuuaaggaugc

SEQ ID NO: 100626 - RNA, 32 nt, Human
ccauggaggucugggagagagagcagagggcg

SEQ ID NO: 100627 - RNA, 24 nt, Human
ccauggaguuugucaucuguaaua

SEQ ID NO: 100628 - RNA, 20 nt, Human
ccauggauacucgcccgugg

SEQ ID NO: 100629 - RNA, 27 nt, Human
ccauggauaggagaaguaugggugaaa

SEQ ID NO: 100630 - RNA, 32 nt, Human
ccauggauggaccagccuuccaugcagcaggg

SEQ ID NO: 100631 - RNA, 32 nt, Human
ccauggauggaugaauggacaaacaaaaugcg

SEQ ID NO: 100632 - RNA, 32 nt, Human
ccauggauguuacuggcuacuugagaaaaagg

SEQ ID NO: 100633 - RNA, 32 nt, Human
ccauggcaaccagcaucagcuuuuccugagau

SEQ ID NO: 100634 - RNA, 32 nt, Human
ccauggcacaggaucugaguugcagcucugca

SEQ ID NO: 100635 - RNA, 32 nt, Human
ccauggcacccagcuaauuuuguauuuuuagu

SEQ ID NO: 100636 - RNA, 32 nt, Human
ccauggcacccaggaucuggucucgguggucc

SEQ ID NO: 100637 - RNA, 26 nt, Human
ccauggcaccucuccacgggguccac

SEQ ID NO: 100638 - RNA, 32 nt, Human
ccauggcaccuugcuccgauagccccaggaaa

SEQ ID NO: 100639 - RNA, 32 nt, Human
ccauggcacucacuccagccugggcaacaaga

SEQ ID NO: 100640 - RNA, 32 nt, Human
ccauggcagacaccccaugucuuuguuacccc

SEQ ID NO: 100641 - RNA, 32 nt, Human
ccauggcagagggagagccuguggacaacagu

SEQ ID NO: 100642 - RNA, 32 nt, Human
ccauggcagccuugucuccacccaugacucac

SEQ ID NO: 100643 - RNA, 24 nt, Human
ccauggcagcucacacuuguaauc

SEQ ID NO: 100644 - RNA, 18 nt, Human
ccauggcagcugcaguga

SEQ ID NO: 100645 - RNA, 32 nt, Human
ccauggcaggaaauauccaagcuguugaaacu

SEQ ID NO: 100646 - RNA, 32 nt, Human
ccauggcaggccugccagagcuuggcugggga

SEQ ID NO: 100647 - RNA, 32 nt, Human
ccauggcagggugcuaguggugggcagaaugc

SEQ ID NO: 100648 - RNA, 32 nt, Human
ccauggcagguggaucaccugaggucgggauu

SEQ ID NO: 100649 - RNA, 32 nt, Human
ccauggcauggguggaauuagaguggaauaag

SEQ ID NO: 100650 - RNA, 32 nt, Human
ccauggcauugcucagcaacuacuucucccuu

SEQ ID NO: 100651 - RNA, 32 nt, Human
ccauggccaccaagcacugcaugugggacagg

SEQ ID NO: 100652 - RNA, 32 nt, Human
ccauggccagacaccccagucccuucaccacc

SEQ ID NO: 100653 - RNA, 32 nt, Human
ccauggccagcaggaagccacugaugagggga

SEQ ID NO: 100654 - RNA, 27 nt, Human
ccauggccagccaguucugccucccug

SEQ ID NO: 100655 - RNA, 27 nt, Human
ccauggccaucgcucaccuggccacgg

SEQ ID NO: 100656 - RNA, 18 nt, Human
ccauggccauggcagcgg

SEQ ID NO: 100657 - RNA, 32 nt, Human
ccauggcccacccaggccuggagcugggaugc

SEQ ID NO: 100658 - RNA, 18 nt, Human
ccauggcccaucuugguc

SEQ ID NO: 100659 - RNA, 32 nt, Human
ccauggccccucaugaagucuuccuguaagcu

SEQ ID NO: 100660 - RNA, 27 nt, Human
ccauggcccgggcuuugguccaguucu

SEQ ID NO: 100661 - RNA, 32 nt, Human
ccauggcccugagcgaguggagucugccaccc

SEQ ID NO: 100662 - RNA, 27 nt, Human
ccauggcccugccucugcugccgggca

SEQ ID NO: 100663 - RNA, 17 nt, Human
ccauggccgccgugccg

SEQ ID NO: 100664 - RNA, 32 nt, Human
ccauggccuaccaucccuucugacccuggcuu

SEQ ID NO: 100665 - RNA, 32 nt, Human
ccauggccuccaggcaggccgggcuggaccgc

SEQ ID NO: 100666 - RNA, 20 nt, Human
ccauggccugagcagggaga

SEQ ID NO: 100667 - RNA, 27 nt, Human
ccauggccugccugagccccucgcagc

SEQ ID NO: 100668 - RNA, 32 nt, Human
ccauggccugucacuacagccuagggauuuua

SEQ ID NO: 100669 - RNA, 27 nt, Human
ccauggcggaggcggcggcugcagcgg

SEQ ID NO: 100670 - RNA, 32 nt, Human
ccauggcgggcagaucaccugaggucaggagu

SEQ ID NO: 100671 - RNA, 32 nt, Human
ccauggcgggcugaguccugcccaugcccugg

SEQ ID NO: 100672 - RNA, 27 nt, Human
ccauggcuagcccagccgccuccucgg

SEQ ID NO: 100673 - RNA, 32 nt, Human
ccauggcuauccauccacccaccaagacccug

SEQ ID NO: 100674 - RNA, 32 nt, Human
ccauggcucauuugacaccuuuuuaaauauca

SEQ ID NO: 100675 - RNA, 32 nt, Human
ccauggcucccucuucccagaaucugcgggga

SEQ ID NO: 100676 - RNA, 32 nt, Human
ccauggcuccuuccuguacccguugcuggcag

SEQ ID NO: 100677 - RNA, 32 nt, Human
ccauggcucuguagacgccagcuccucagcac

SEQ ID NO: 100678 - RNA, 32 nt, Human
ccauggcucuuagccagaaaugucuugccucu

SEQ ID NO: 100679 - RNA, 32 nt, Human
ccauggcugagaggugugccucagcuuaaccc

SEQ ID NO: 100680 - RNA, 32 nt, Human
ccauggcugccuggcucucccgggaguggcac

SEQ ID NO: 100681 - RNA, 32 nt, Human
ccauggcuggagcuuugggaacagucuguccu

SEQ ID NO: 100682 - RNA, 32 nt, Human
ccauggcuggcaggccagagccccgugcugug

SEQ ID NO: 100683 - RNA, 32 nt, Human
ccauggcuggccaggauccugcgcugagcacg

SEQ ID NO: 100684 - RNA, 32 nt, Human
ccauggcugugguucagagagggugggcuggc

SEQ ID NO: 100685 - RNA, 32 nt, Human
ccauggcuuccuccucccuccugccgacuccu

SEQ ID NO: 100686 - RNA, 32 nt, Human
ccaugggaaagcugcaaccuuucuguuuuauu

SEQ ID NO: 100687 - RNA, 32 nt, Human
ccaugggaacaggagcucgaggcugcauccug

SEQ ID NO: 100688 - RNA, 32 nt, Human
ccaugggaaguuaggucacagucuuauaaaca

SEQ ID NO: 100689 - RNA, 32 nt, Human
ccaugggagagggcaggacaggggcugggcga

SEQ ID NO: 100690 - RNA, 32 nt, Human
ccaugggagcugguuagaaaugcagaauccua

SEQ ID NO: 100691 - RNA, 21 nt, Human
ccaugggaggagcagagccac

SEQ ID NO: 100692 - RNA, 32 nt, Human
ccaugggaggagcucuagggaggcugguggaa

SEQ ID NO: 100693 - RNA, 32 nt, Human
ccaugggaggcugaggcaggagaaucaguuga

SEQ ID NO: 100694 - RNA, 32 nt, Human
ccaugggauguuccugaugcagguguguauaa

SEQ ID NO: 100695 - RNA, 32 nt, Human
ccaugggcacaaggcgaagcugccugggugug

SEQ ID NO: 100696 - RNA, 32 nt, Human
ccaugggcacugaaggacugaauugguaggua

SEQ ID NO: 100697 - RNA, 32 nt, Human
ccaugggcagagaagaaaaugaccaggagugu

SEQ ID NO: 100698 - RNA, 32 nt, Human
ccaugggcaggaggccuuccugccaggccauc

SEQ ID NO: 100699 - RNA, 27 nt, Human
ccaugggcccaggaguucugcugcucc

SEQ ID NO: 100700 - RNA, 32 nt, Human
ccaugggcccgucugccggcucugccugugcu

SEQ ID NO: 100701 - RNA, 32 nt, Human
ccaugggccugccuccccagugaccugcgaaa

SEQ ID NO: 100702 - RNA, 27 nt, Human
ccaugggcgcuuccagcuccuccgcgc

SEQ ID NO: 100703 - RNA, 32 nt, Human
ccaugggcguccacaccugcugcuccagacaa

SEQ ID NO: 100704 - RNA, 32 nt, Human
ccaugggcucaaccucacccuccauccuuauu

SEQ ID NO: 100705 - RNA, 32 nt, Human
ccaugggcuccauuuggcaccugcugagccac

SEQ ID NO: 100706 - RNA, 24 nt, Human
ccaugggcugagcaggcugagcac

SEQ ID NO: 100707 - RNA, 27 nt, Human
ccaugggcugggaccugacggugaaga

SEQ ID NO: 100708 - RNA, 32 nt, Human
ccaugggcuucuugagacaccugcugaccucu

SEQ ID NO: 100709 - RNA, 32 nt, Human
ccaugggcuuucauuucugucacauuucauuu

SEQ ID NO: 100710 - RNA, 32 nt, Human
ccauggggaacuucuuccuuccugauguggaa

SEQ ID NO: 100711 - RNA, 32 nt, Human
ccauggggagcacuggauugcuuucccauuau

SEQ ID NO: 100712 - RNA, 32 nt, Human
ccauggggagccagggcucuggcggggugccc

SEQ ID NO: 100713 - RNA, 32 nt, Human
ccauggggccccuguccuccagccugaccagc

SEQ ID NO: 100714 - RNA, 19 nt, Human
ccauggggcccgcugggaa

SEQ ID NO: 100715 - RNA, 22 nt, Human
ccauggggcucuguuccccagg

SEQ ID NO: 100716 - RNA, 32 nt, Human
ccaugggggaaagagcauccggagugaagggg

SEQ ID NO: 100717 - RNA, 24 nt, Human
ccauggggguugaaguaugacaua

SEQ ID NO: 100718 - RNA, 32 nt, Human
ccaugggguccaggaagcagguguugcccagg

SEQ ID NO: 100719 - RNA, 27 nt, Human
ccauggggucgcgcagcucccacgccg

SEQ ID NO: 100720 - RNA, 32 nt, Human
ccauggguagacccucccccuggagggaagca

SEQ ID NO: 100721 - RNA, 32 nt, Human
ccauggguccggcagagggcagugaccggcac

SEQ ID NO: 100722 - RNA, 32 nt, Human
ccauggguccuuagcccugccucccaggaacc

SEQ ID NO: 100723 - RNA, 32 nt, Human
ccaugggugaacaagacacagccagacaaugu

SEQ ID NO: 100724 - RNA, 27 nt, Human
ccaugggugacuggggcuuccuggaga

SEQ ID NO: 100725 - RNA, 23 nt, Human
ccaugggugggggaaccuguguu

SEQ ID NO: 100726 - RNA, 24 nt, Human
ccaugggugggggcuguguguuag

SEQ ID NO: 100727 - RNA, 32 nt, Human
ccaugggugggucuaacuggcuuuuguggaga

SEQ ID NO: 100728 - RNA, 32 nt, Human
ccauggguucucuccuuccucugaacuucuuu

SEQ ID NO: 100729 - RNA, 32 nt, Human
ccaugguaccuucauacccaucugugggacaa

SEQ ID NO: 100730 - RNA, 32 nt, Human
ccaugguacugaugcuugcuggauuuagggag

SEQ ID NO: 100731 - RNA, 32 nt, Human
ccaugguacuucucaaacuuugugaaaaccug

SEQ ID NO: 100732 - RNA, 32 nt, Human
ccaugguaguugcugcucaugguucugucugu

SEQ ID NO: 100733 - RNA, 32 nt, Human
ccaugguauguaguggagcaucaggguaggcu

SEQ ID NO: 100734 - RNA, 32 nt, Human
ccauggucaaauggacagaaaaggccaguguu

SEQ ID NO: 100735 - RNA, 32 nt, Human
ccauggucacccuggacaaggagguaaccacc

SEQ ID NO: 100736 - RNA, 31 nt, Human
ccauggucacucacggagagggauggaggag

SEQ ID NO: 100737 - RNA, 32 nt, Human
ccauggucagggagguggcaggaggugcaaag

SEQ ID NO: 100738 - RNA, 32 nt, Human
ccauggucaggguuguuggaacaucugaccug

SEQ ID NO: 100739 - RNA, 32 nt, Human
ccauggucaugucauucugaggucacauaaca

SEQ ID NO: 100740 - RNA, 32 nt, Human
ccaugguccaaccuugaaggcuuaucaggagg

SEQ ID NO: 100741 - RNA, 32 nt, Human
ccauggucccccagcgugcaccaccuggcccg

SEQ ID NO: 100742 - RNA, 32 nt, Human
ccauggucccucacccugcccugccgacgagc

SEQ ID NO: 100743 - RNA, 32 nt, Human
ccaugguccucacuggccucagucucccugac

SEQ ID NO: 100744 - RNA, 32 nt, Human
ccaugguccugcucugggucagcugucaggga

SEQ ID NO: 100745 - RNA, 32 nt, Human
ccauggucuacgcacggcaucuggcugcucug

SEQ ID NO: 100746 - RNA, 32 nt, Human
ccauggucucccggcuggcaauguggugaagc

SEQ ID NO: 100747 - RNA, 32 nt, Human
ccauggucuggggcuugaggaagaugaguuug

SEQ ID NO: 100748 - RNA, 27 nt, Human
ccauggucuucacucaggccccggcug

SEQ ID NO: 100749 - RNA, 21 nt, Human
ccauggucuuucacccagcca

SEQ ID NO: 100750 - RNA, 32 nt, Human
ccauggugaaagaucacggggccaggccugca

SEQ ID NO: 100751 - RNA, 32 nt, Human
ccauggugacacacagcagcacugcagauagc

SEQ ID NO: 100752 - RNA, 21 nt, Human
ccauggugcacaccuguaguc

SEQ ID NO: 100753 - RNA, 32 nt, Human
ccauggugcaggcugcucagcugggccucaga

SEQ ID NO: 100754 - RNA, 24 nt, Human
ccaugguggcaggugcuuguaauc

SEQ ID NO: 100755 - RNA, 21 nt, Human
ccaugguggccgcagcuaauc

SEQ ID NO: 100756 - RNA, 24 nt, Human
ccaugguggcgggcgccuguaauc

SEQ ID NO: 100757 - RNA, 24 nt, Human
ccaugguggcucauaccuguacuc

SEQ ID NO: 100758 - RNA, 32 nt, Human
ccaugguggugagggacucaggagaauuguag

SEQ ID NO: 100759 - RNA, 32 nt, Human
ccauggugguucagaauagaugagcauagcau

SEQ ID NO: 100760 - RNA, 32 nt, Human
ccauggugucagacauccggaaagaagacggg

SEQ ID NO: 100761 - RNA, 32 nt, Human
ccaugguucugccucuguuuuacauagaaugu

SEQ ID NO: 100762 - RNA, 32 nt, Human
ccaugguugacugaggagucgggugaggccac

SEQ ID NO: 100763 - RNA, 32 nt, Human
ccaugguugccucaucagcaggaaggugcccu

SEQ ID NO: 100764 - RNA, 32 nt, Human
ccaugguuucagagggugcaagccccaaaccu

SEQ ID NO: 100765 - RNA, 32 nt, Human
ccauguaaaguagguggcagggcagagauguc

SEQ ID NO: 100766 - RNA, 32 nt, Human
ccauguaaguggcaagcagggcuggucucccu

SEQ ID NO: 100767 - RNA, 32 nt, Human
ccauguaauagggagaguugaacaugaauauu

SEQ ID NO: 100768 - RNA, 32 nt, Human
ccauguaccagcugaucgcagagcuggacugg

SEQ ID NO: 100769 - RNA, 32 nt, Human
ccauguaccuucugaaccaccugaaagguuga

SEQ ID NO: 100770 - RNA, 32 nt, Human
ccauguacugcacugcccuggucgaaugcucg

SEQ ID NO: 100771 - RNA, 32 nt, Human
ccauguacuuucccuguguacccuccauguac

SEQ ID NO: 100772 - RNA, 32 nt, Human
ccauguagacaagcccuggucaucucagcagc

SEQ ID NO: 100773 - RNA, 32 nt, Human
ccauguagcccaggcccgggggccaguccuca

SEQ ID NO: 100774 - RNA, 30 nt, Human
ccauguagccucuccaugaacugcagaagg

SEQ ID NO: 100775 - RNA, 32 nt, Human
ccauguagguguugagcuccugguuuucugug

SEQ ID NO: 100776 - RNA, 31 nt, Human
ccauguagguucucugggcuuuaguuuucug

SEQ ID NO: 100777 - RNA, 32 nt, Human
ccauguauccguaguacuugcugucuucauuu

SEQ ID NO: 100778 - RNA, 32 nt, Human
ccauguaucucaguaccccauggagcugggcu

SEQ ID NO: 100779 - RNA, 32 nt, Human
ccauguaugaggagggggaaauuuguauauua

SEQ ID NO: 100780 - RNA, 32 nt, Human
ccauguauucuaggccagguaggcaacacaga

SEQ ID NO: 100781 - RNA, 20 nt, Human
ccaugucaaggcugcaguga

SEQ ID NO: 100782 - RNA, 32 nt, Human
ccaugucaaggguucaagauuguuccugcuuu

SEQ ID NO: 100783 - RNA, 32 nt, Human
ccaugucacacggguauccagagcaaggcugg

SEQ ID NO: 100784 - RNA, 31 nt, Human
ccaugucacagcugugaagaucuggcacaag

SEQ ID NO: 100785 - RNA, 32 nt, Human
ccaugucacagcugugaagaucuggcacaaga

SEQ ID NO: 100786 - RNA, 32 nt, Human
ccaugucaccugccaaaguguucuugcugagg

SEQ ID NO: 100787 - RNA, 32 nt, Human
ccaugucacuacaagggguggggaagaaguua

SEQ ID NO: 100788 - RNA, 32 nt, Human
ccaugucacugucccugggccacccagugaaa

SEQ ID NO: 100789 - RNA, 32 nt, Human
ccaugucacuuuugggccuccuucccaugccu

SEQ ID NO: 100790 - RNA, 32 nt, Human
ccaugucagcaaccgcacucaucagaccaugc

SEQ ID NO: 100791 - RNA, 32 nt, Human
ccaugucagcaccacacacugcagcucuccaa

SEQ ID NO: 100792 - RNA, 32 nt, Human
ccaugucagguacugagcaaggccccagaucc

SEQ ID NO: 100793 - RNA, 32 nt, Human
ccauguccaagaggcuguagaaaggggagaau

SEQ ID NO: 100794 - RNA, 32 nt, Human
ccauguccaaggccuggaaacaugcuuggcuc

SEQ ID NO: 100795 - RNA, 27 nt, Human
ccauguccaagugcugugcucagucuc

SEQ ID NO: 100796 - RNA, 32 nt, Human
ccauguccacagugggcuccgaaaguugucuc

SEQ ID NO: 100797 - RNA, 32 nt, Human
ccauguccaguaaacaauuuagagcagguccu

SEQ ID NO: 100798 - RNA, 32 nt, Human
ccauguccagugcccugggucagggcuguggg

SEQ ID NO: 100799 - RNA, 19 nt, Human
ccauguccauccagcccuu

SEQ ID NO: 100800 - RNA, 32 nt, Human
ccaugucccagccuggccuguggcugcccucc

SEQ ID NO: 100801 - RNA, 21 nt, Human
ccauguccccagagggcucac

SEQ ID NO: 100802 - RNA, 32 nt, Human
ccaugucccggguuucuuucuucgagaguaua

SEQ ID NO: 100803 - RNA, 32 nt, Human
ccaugucccuccagggggaccccacagccugg

SEQ ID NO: 100804 - RNA, 32 nt, Human
ccaugucccucgugcugucucuugccuguccc

SEQ ID NO: 100805 - RNA, 22 nt, Human
ccaugucccuuucuccucuccc

SEQ ID NO: 100806 - RNA, 32 nt, Human
ccauguccugagucugcuucagucuggagcug

SEQ ID NO: 100807 - RNA, 32 nt, Human
ccauguccugcuuuauacggugagugacacaa

SEQ ID NO: 100808 - RNA, 19 nt, Human
ccauguccuggugcgcaca

SEQ ID NO: 100809 - RNA, 32 nt, Human
ccauguccuggugugaugagcaggaucagagu

SEQ ID NO: 100810 - RNA, 32 nt, Human
ccauguccuuggaccuagaggauuguccaccu

SEQ ID NO: 100811 - RNA, 32 nt, Human
ccauguccuuucucaccaugguguggcucuug

SEQ ID NO: 100812 - RNA, 32 nt, Human
ccaugucgcuuuugggccuccuucccaugccu

SEQ ID NO: 100813 - RNA, 23 nt, Human
ccaugucggccaggcuggucuca

SEQ ID NO: 100814 - RNA, 32 nt, Human
ccaugucuacuaaaaauacaaaauuagcuggg

SEQ ID NO: 100815 - RNA, 32 nt, Human
ccaugucuagcccaucauccugcuuggagcaa

SEQ ID NO: 100816 - RNA, 32 nt, Human
ccaugucuccacugcuucuacucuggguuggg

SEQ ID NO: 100817 - RNA, 32 nt, Human
ccaugucucuacuguagcuuccaggccguuuc

SEQ ID NO: 100818 - RNA, 27 nt, Human
ccaugucugccucauccucaggcggcu

SEQ ID NO: 100819 - RNA, 32 nt, Human
ccaugucugccucauccucaggcggcuccccc

SEQ ID NO: 100820 - RNA, 32 nt, Human
ccaugucugcugaugcuaucauagcucccaac

SEQ ID NO: 100821 - RNA, 32 nt, Human
ccaugucugcuuugggggcucgaguccagcca

SEQ ID NO: 100822 - RNA, 32 nt, Human
ccaugucuuggcugggauuacaggcaugagcc

SEQ ID NO: 100823 - RNA, 32 nt, Human
ccaugucuuuauuuucucaauaaagaaauuac

SEQ ID NO: 100824 - RNA, 32 nt, Human
ccaugugaacaccaccaccagugccacacaca

SEQ ID NO: 100825 - RNA, 32 nt, Human
ccaugugacaugguuucucccuauguuacgug

SEQ ID NO: 100826 - RNA, 32 nt, Human
ccaugugacuccccauccucccaugagggguc

SEQ ID NO: 100827 - RNA, 32 nt, Human
ccaugugacucuggcuuggccuaucuccuagg

SEQ ID NO: 100828 - RNA, 19 nt, Human
ccaugugagaaggauccac

SEQ ID NO: 100829 - RNA, 32 nt, Human
ccaugugaugaagcagagaugcggccucgucg

SEQ ID NO: 100830 - RNA, 32 nt, Human
ccaugugcaagucugugucuugucaguccaag

SEQ ID NO: 100831 - RNA, 18 nt, Human
ccaugugcacuccauccu

SEQ ID NO: 100832 - RNA, 32 nt, Human
ccaugugcagaagaugaaaaccggcucccuug

SEQ ID NO: 100833 - RNA, 32 nt, Human
ccaugugcagccaccaguccauugggcaggca

SEQ ID NO: 100834 - RNA, 32 nt, Human
ccaugugcagcccaggcccagugggggccaga

SEQ ID NO: 100835 - RNA, 32 nt, Human
ccaugugcaggugagaaguugggugaaaggac

SEQ ID NO: 100836 - RNA, 32 nt, Human
ccaugugcaugcucuuagagaccuugaauggu

SEQ ID NO: 100837 - RNA, 32 nt, Human
ccaugugccaucaucccccaagagccaucauc

SEQ ID NO: 100838 - RNA, 32 nt, Human
ccaugugcccugcuccugugugcaguuggggu

SEQ ID NO: 100839 - RNA, 32 nt, Human
ccaugugcucagaauucugagaggaauugcug

SEQ ID NO: 100840 - RNA, 20 nt, Human
ccaugugcucagccuggcca

SEQ ID NO: 100841 - RNA, 27 nt, Human
ccaugugcuccgggcuccuggagcucc

SEQ ID NO: 100842 - RNA, 32 nt, Human
ccaugugcugacugagcccaccuugcaaccug

SEQ ID NO: 100843 - RNA, 32 nt, Human
ccaugugcugagccacugugcuauacugacuc

SEQ ID NO: 100844 - RNA, 32 nt, Human
ccaugugcugcauccucugcccucagugugca

SEQ ID NO: 100845 - RNA, 23 nt, Human
ccaugugcugggauuacaggcgu

SEQ ID NO: 100846 - RNA, 32 nt, Human
ccaugugcuguugcugggauguuuguauuaaa

SEQ ID NO: 100847 - RNA, 32 nt, Human
ccauguggaacugcuggagugcaguggcauga

SEQ ID NO: 100848 - RNA, 32 nt, Human
ccauguggaaggaucacaucucagguuucuug

SEQ ID NO: 100849 - RNA, 17 nt, Human
ccauguggacaagggga

SEQ ID NO: 100850 - RNA, 32 nt, Human
ccauguggacagugguggaugaugugugugcu

SEQ ID NO: 100851 - RNA, 32 nt, Human
ccauguggaggaaggcuggagcuuguuccugc

SEQ ID NO: 100852 - RNA, 19 nt, Human
ccauguggccacaauccac

SEQ ID NO: 100853 - RNA, 22 nt, Human
ccauguggccuuagcugggccc

SEQ ID NO: 100854 - RNA, 32 nt, Human
ccauguggcucuaacagccucugcaguccgug

SEQ ID NO: 100855 - RNA, 20 nt, Human
ccaugugggaacccagccuc

SEQ ID NO: 100856 - RNA, 32 nt, Human
ccaugugggacaccuccaaggcuggccuccuc

SEQ ID NO: 100857 - RNA, 32 nt, Human
ccaugugggacccccuggugauucagcaugaa

SEQ ID NO: 100858 - RNA, 32 nt, Human
ccaugugggagcagaggugugaagagaauuua

SEQ ID NO: 100859 - RNA, 21 nt, Human
ccaugugggcaaagauuugaa

SEQ ID NO: 100860 - RNA, 20 nt, Human
ccaugugggcccaaccauca

SEQ ID NO: 100861 - RNA, 32 nt, Human
ccaugugggggcccugagcgccgccccagaag

SEQ ID NO: 100862 - RNA, 32 nt, Human
ccauguggucccaggccaggcugccugggaca

SEQ ID NO: 100863 - RNA, 32 nt, Human
ccauguggugcgcugcugcagugaccaguugc

SEQ ID NO: 100864 - RNA, 32 nt, Human
ccauguguaagcauuaugcauguauguaaaaa

SEQ ID NO: 100865 - RNA, 32 nt, Human
ccauguguacauagacucauugugcuguagau

SEQ ID NO: 100866 - RNA, 32 nt, Human
ccaugugucacugaggccuggauuugagcuuc

SEQ ID NO: 100867 - RNA, 32 nt, Human
ccaugugucuggcgggggauggguggacugua

SEQ ID NO: 100868 - RNA, 32 nt, Human
ccaugugucugucagcauaaggcaaaggcaga

SEQ ID NO: 100869 - RNA, 32 nt, Human
ccaugugucuuuuccccugcugccucacuccc

SEQ ID NO: 100870 - RNA, 29 nt, Human
ccaugugugcuguguguguccaggcacgg

SEQ ID NO: 100871 - RNA, 29 nt, Human
ccaugugugcuguguguguccugccugua

SEQ ID NO: 100872 - RNA, 32 nt, Human
ccauguguggugugugugccccugagaacuuc

SEQ ID NO: 100873 - RNA, 32 nt, Human
ccauguguggugugugugccccugagaacuuu

SEQ ID NO: 100874 - RNA, 22 nt, Human
ccauguguuggggggugggggg

SEQ ID NO: 100875 - RNA, 32 nt, Human
ccauguguuuuaaaaaggcaguagccuuugca

SEQ ID NO: 100876 - RNA, 23 nt, Human
ccauguuacccagccuggucuca

SEQ ID NO: 100877 - RNA, 23 nt, Human
ccauguuacccaggauggucuca

SEQ ID NO: 100878 - RNA, 23 nt, Human
ccauguuacccaggcuggucuca

SEQ ID NO: 100879 - RNA, 32 nt, Human
ccauguuacccucccuuccucacauuguuacg

SEQ ID NO: 100880 - RNA, 22 nt, Human
ccauguuaccuaggguggucuc

SEQ ID NO: 100881 - RNA, 23 nt, Human
ccauguuagccaggauggucuca

SEQ ID NO: 100882 - RNA, 23 nt, Human
ccauguuagccaggcugaccuca

SEQ ID NO: 100883 - RNA, 23 nt, Human
ccauguuagccaggcuggucuca

SEQ ID NO: 100884 - RNA, 32 nt, Human
ccauguuaucaucuguuucucguguccgccug

SEQ ID NO: 100885 - RNA, 32 nt, Human
ccauguuauuuuauuggggucuuuggggaaug

SEQ ID NO: 100886 - RNA, 32 nt, Human
ccauguucaagcaauucuccugccucagccuc

SEQ ID NO: 100887 - RNA, 32 nt, Human
ccauguuccagaggaauucggauaccacaaac

SEQ ID NO: 100888 - RNA, 32 nt, Human
ccauguuccguuugaucuuggcaauuuaaugc

SEQ ID NO: 100889 - RNA, 32 nt, Human
ccauguuccuaagcuuccaagaagguuuugga

SEQ ID NO: 100890 - RNA, 32 nt, Human
ccauguucucucccuuggcaaaaagcuggugg

SEQ ID NO: 100891 - RNA, 23 nt, Human
ccauguugaccaggauggucuca

SEQ ID NO: 100892 - RNA, 32 nt, Human
ccauguugacccucucucagaaggucagucca

SEQ ID NO: 100893 - RNA, 32 nt, Human
ccauguugcaggcccacagcugccuacagaac

SEQ ID NO: 100894 - RNA, 23 nt, Human
ccauguugccaagcuagucuaca

SEQ ID NO: 100895 - RNA, 20 nt, Human
ccauguugcccagaauuuca

SEQ ID NO: 100896 - RNA, 23 nt, Human
ccauguugcccagccuggucuca

SEQ ID NO: 100897 - RNA, 22 nt, Human
ccauguugcccaggagggucuc

SEQ ID NO: 100898 - RNA, 22 nt, Human
ccauguugcccaggauggucuc

SEQ ID NO: 100899 - RNA, 32 nt, Human
ccauguugcccaggcuaaucucaaauuccuga

SEQ ID NO: 100900 - RNA, 23 nt, Human
ccauguugcccaggcuagccuca

SEQ ID NO: 100901 - RNA, 32 nt, Human
ccauguugcccaggcuggaagugucuauguuu

SEQ ID NO: 100902 - RNA, 22 nt, Human
ccauguugcccaggcuggucuc

SEQ ID NO: 100903 - RNA, 23 nt, Human
ccauguugcccaggcuggucuca

SEQ ID NO: 100904 - RNA, 32 nt, Human
ccauguugcccaggcuggucucaaacuuguga

SEQ ID NO: 100905 - RNA, 32 nt, Human
ccauguugcccaggcuggucugaagcugcugg

SEQ ID NO: 100906 - RNA, 23 nt, Human
ccauguugcccaggcuggucuua

SEQ ID NO: 100907 - RNA, 23 nt, Human
ccauguugcccaggcugguguca

SEQ ID NO: 100908 - RNA, 32 nt, Human
ccauguugcccaggcuggugucaaacuccugg

SEQ ID NO: 100909 - RNA, 23 nt, Human
ccauguugcccaggcugguuuca

SEQ ID NO: 100910 - RNA, 23 nt, Human
ccauguugcccagucuguucuca

SEQ ID NO: 100911 - RNA, 23 nt, Human
ccauguugccccgguugcucuca

SEQ ID NO: 100912 - RNA, 32 nt, Human
ccauguugccucgucagacucuugguggcuuu

SEQ ID NO: 100913 - RNA, 18 nt, Human
ccauguugccuguucuca

SEQ ID NO: 100914 - RNA, 32 nt, Human
ccauguugcucacaccuucauauagcagugcc

SEQ ID NO: 100915 - RNA, 20 nt, Human
ccauguugcucaggcugguc

SEQ ID NO: 100916 - RNA, 23 nt, Human
ccauguugcucaggcuggucuca

SEQ ID NO: 100917 - RNA, 32 nt, Human
ccauguugcugcaaagacaugaucucauucuu

SEQ ID NO: 100918 - RNA, 23 nt, Human
ccauguugcuuaggcuggucuca

SEQ ID NO: 100919 - RNA, 32 nt, Human
ccauguuggaaagaggaacagggcuuggauug

SEQ ID NO: 100920 - RNA, 32 nt, Human
ccauguuggaccaauaccacacugcccuaguc

SEQ ID NO: 100921 - RNA, 23 nt, Human
ccauguuggccaagauggucuca

SEQ ID NO: 100922 - RNA, 23 nt, Human
ccauguuggccaagcuggucuca

SEQ ID NO: 100923 - RNA, 23 nt, Human
ccauguuggccacacuggucuca

SEQ ID NO: 100924 - RNA, 22 nt, Human
ccauguuggccagacuggucuc

SEQ ID NO: 100925 - RNA, 23 nt, Human
ccauguuggccagacuggucuca

SEQ ID NO: 100926 - RNA, 23 nt, Human
ccauguuggccaggauggucuca

SEQ ID NO: 100927 - RNA, 23 nt, Human
ccauguuggccaggccagucuca

SEQ ID NO: 100928 - RNA, 23 nt, Human
ccauguuggccaggcuagucuca

SEQ ID NO: 100929 - RNA, 23 nt, Human
ccauguuggccaggcugaucuca

SEQ ID NO: 100930 - RNA, 23 nt, Human
ccauguuggccaggcuggucuca

SEQ ID NO: 100931 - RNA, 32 nt, Human
ccauguuggccaggcuggucuccaacuccuga

SEQ ID NO: 100932 - RNA, 32 nt, Human
ccauguuggccaggcuggucuccaacuccugc

SEQ ID NO: 100933 - RNA, 32 nt, Human
ccauguuggccaggcuggucucgaaugccugg

SEQ ID NO: 100934 - RNA, 32 nt, Human
ccauguuggccaggcuggucucgaaugucuga

SEQ ID NO: 100935 - RNA, 32 nt, Human
ccauguuggccaggcuggucugagagagaacu

SEQ ID NO: 100936 - RNA, 23 nt, Human
ccauguuggccgggcuggucuca

SEQ ID NO: 100937 - RNA, 23 nt, Human
ccauguuggcuaggcuggucuca

SEQ ID NO: 100938 - RNA, 23 nt, Human
ccauguuggucagacuagucuca

SEQ ID NO: 100939 - RNA, 23 nt, Human
ccauguuggucaggauggucuca

SEQ ID NO: 100940 - RNA, 23 nt, Human
ccauguuggucaggcuagucuca

SEQ ID NO: 100941 - RNA, 23 nt, Human
ccauguuggucaggcuggucuca

SEQ ID NO: 100942 - RNA, 23 nt, Human
ccauguuggucgggcuggucuca

SEQ ID NO: 100943 - RNA, 23 nt, Human
ccauguugguuaggcuggucuca

SEQ ID NO: 100944 - RNA, 23 nt, Human
ccauguuguacaggcuggucuca

SEQ ID NO: 100945 - RNA, 23 nt, Human
ccauguuguccaggcuggucuca

SEQ ID NO: 100946 - RNA, 32 nt, Human
ccauguuuaaaaagaaggaauuuggacaaagg

SEQ ID NO: 100947 - RNA, 31 nt, Human
ccauguuuacugcuagaaaccaaagcuuugu

SEQ ID NO: 100948 - RNA, 32 nt, Human
ccauguuucagaagcauucaggcacugccagg

SEQ ID NO: 100949 - RNA, 22 nt, Human
ccauguuuccaggaggggccau

SEQ ID NO: 100950 - RNA, 32 nt, Human
ccauguuuccugggaaacccgaaaaagguugu

SEQ ID NO: 100951 - RNA, 32 nt, Human
ccauguuugagacucagaagaaugggccuuuc

SEQ ID NO: 100952 - RNA, 32 nt, Human
ccauguuugccaggcugguccugaaugccuga

SEQ ID NO: 100953 - RNA, 32 nt, Human
ccauguuuuauuuucuuguucuugucacuauu

SEQ ID NO: 100954 - RNA, 32 nt, Human
ccauguuuugcagaaacuggagaugugaauuu

SEQ ID NO: 100955 - RNA, 32 nt, Human
ccauguuuuggaugugugauguuuauauggga

SEQ ID NO: 100956 - RNA, 22 nt, Human
ccauuaaaaauaguacauuuua

SEQ ID NO: 100957 - RNA, 32 nt, Human
ccauuaaaaauauaaaaauuagcagggugugg

SEQ ID NO: 100958 - RNA, 32 nt, Human
ccauuaaaaggcaggcuggaaggccuuccugg

SEQ ID NO: 100959 - RNA, 32 nt, Human
ccauuaaaccaggacccugauccaucaauaug

SEQ ID NO: 100960 - RNA, 32 nt, Human
ccauuaaagaugaccuacagugcuguguaccc

SEQ ID NO: 100961 - RNA, 32 nt, Human
ccauuaaagcagccaggaaggacaggcuuucc

SEQ ID NO: 100962 - RNA, 32 nt, Human
ccauuaaagcgaggcaugaagcaaagagcuga

SEQ ID NO: 100963 - RNA, 19 nt, Human
ccauuaaauggucuuggca

SEQ ID NO: 100964 - RNA, 32 nt, Human
ccauuaacugccaaucaucaccucauuugcuu

SEQ ID NO: 100965 - RNA, 32 nt, Human
ccauuaagaaacagccucugcaucaguuugua

SEQ ID NO: 100966 - RNA, 21 nt, Human
ccauuaagaacucauuacugg

SEQ ID NO: 100967 - RNA, 32 nt, Human
ccauuaauuggguggaagauugggcaagaagu

SEQ ID NO: 100968 - RNA, 32 nt, Human
ccauuacaaaggaggcuuggccagggacucca

SEQ ID NO: 100969 - RNA, 32 nt, Human
ccauuacccaaaccacucugacagucuccucc

SEQ ID NO: 100970 - RNA, 32 nt, Human
ccauuacccaggagaaaucaagugauccucaa

SEQ ID NO: 100971 - RNA, 32 nt, Human
ccauuacccuaaaaguaauaacuuugaugcuu

SEQ ID NO: 100972 - RNA, 32 nt, Human
ccauuacccuaauuuuguuauuucaagaaugc

SEQ ID NO: 100973 - RNA, 32 nt, Human
ccauuaccgcuuaccuggaauauugcaaaagc

SEQ ID NO: 100974 - RNA, 32 nt, Human
ccauuaccucuuccugucccaccccugcagag

SEQ ID NO: 100975 - RNA, 32 nt, Human
ccauuaccuucugcuuucucuuuguccacuua

SEQ ID NO: 100976 - RNA, 32 nt, Human
ccauuacggagggcugccaggcuuccaggguc

SEQ ID NO: 100977 - RNA, 32 nt, Human
ccauuacggccgggggcccacagccauggcgg

SEQ ID NO: 100978 - RNA, 32 nt, Human
ccauuacuauucuugcuacauuaguccagcuu

SEQ ID NO: 100979 - RNA, 32 nt, Human
ccauuacuauucuugcuacauuaguucagcuu

SEQ ID NO: 100980 - RNA, 20 nt, Human
ccauuacuuugccucgcugg

SEQ ID NO: 100981 - RNA, 32 nt, Human
ccauuagaaagccaaggccuagaguggugggc

SEQ ID NO: 100982 - RNA, 32 nt, Human
ccauuagaauuuaaaagacauaagacuaaauu

SEQ ID NO: 100983 - RNA, 32 nt, Human
ccauuagauggaaggcagaggauacugcgacc

SEQ ID NO: 100984 - RNA, 32 nt, Human
ccauuagccaaggauagaagcugcagugguau

SEQ ID NO: 100985 - RNA, 32 nt, Human
ccauuagucaguguuacagcuguguuggggau

SEQ ID NO: 100986 - RNA, 32 nt, Human
ccauuagugggaaaaaguuggaggaugaagga

SEQ ID NO: 100987 - RNA, 32 nt, Human
ccauuauaucacucuguaugccuuugcauacc

SEQ ID NO: 100988 - RNA, 16 nt, Human
ccauuauccucaggug

SEQ ID NO: 100989 - RNA, 32 nt, Human
ccauuauccucuguuucucugcugcaccgacc

SEQ ID NO: 100990 - RNA, 32 nt, Human
ccauuaugaguguggggaaugcucacagacug

SEQ ID NO: 100991 - RNA, 32 nt, Human
ccauuaugcacagguugaauucugaguaaaca

SEQ ID NO: 100992 - RNA, 32 nt, Human
ccauuaugccaccuccaaaguggcugcccagc

SEQ ID NO: 100993 - RNA, 29 nt, Human
ccauuaugucugugugccuggaugucugu

SEQ ID NO: 100994 - RNA, 32 nt, Human
ccauuauuacuggugcaaaaugaguugauaac

SEQ ID NO: 100995 - RNA, 32 nt, Human
ccauuauuauccacccugagccaccauaauau

SEQ ID NO: 100996 - RNA, 20 nt, Human
ccauucaaaagaccaccaau

SEQ ID NO: 100997 - RNA, 32 nt, Human
ccauucaaaauugaagggccacuggugguccu

SEQ ID NO: 100998 - RNA, 32 nt, Human
ccauucaaagcuccuucuaccugggcagagcc

SEQ ID NO: 100999 - RNA, 32 nt, Human
ccauucaaagugagcuccuaagccaugggaga

SEQ ID NO: 101000 - RNA, 18 nt, Human
ccauucaaauggcacuuu

SEQ ID NO: 101001 - RNA, 32 nt, Human
ccauucaacaggacaggcagguuagggacacc

SEQ ID NO: 101002 - RNA, 32 nt, Human
ccauucaacuccccaccuccagccgggaccca

SEQ ID NO: 101003 - RNA, 32 nt, Human
ccauucaagaacaaaaccacagaugccauaca

SEQ ID NO: 101004 - RNA, 32 nt, Human
ccauucaagaccagauauucaaguucaagcca

SEQ ID NO: 101005 - RNA, 32 nt, Human
ccauucacacacaccggcacuuucauacccug

SEQ ID NO: 101006 - RNA, 32 nt, Human
ccauucacacucaugaauccacuccagaaguc

SEQ ID NO: 101007 - RNA, 32 nt, Human
ccauucacagcauucaucaccaacugacauag

SEQ ID NO: 101008 - RNA, 24 nt, Human
ccauucaccccaaaacuuguuuua

SEQ ID NO: 101009 - RNA, 32 nt, Human
ccauucaccuaacuggcuuuuccuucaugauu

SEQ ID NO: 101010 - RNA, 32 nt, Human
ccauucacuuccuuuaucucuccagucuuaag

SEQ ID NO: 101011 - RNA, 32 nt, Human
ccauucacuuuuagaaucuuguauuuaaguaa

SEQ ID NO: 101012 - RNA, 32 nt, Human
ccauucagaguuguucucccaucucugagcaa

SEQ ID NO: 101013 - RNA, 32 nt, Human
ccauucagccuacccuguauuugccauaaacu

SEQ ID NO: 101014 - RNA, 32 nt, Human
ccauucagccucugucucacaugcuuuauaaa

SEQ ID NO: 101015 - RNA, 32 nt, Human
ccauucaggaauaaacugagaguucugagaaa

SEQ ID NO: 101016 - RNA, 32 nt, Human
ccauucaggacauaggcacaggcaaagauuuc

SEQ ID NO: 101017 - RNA, 22 nt, Human
ccauucaggccugguggcagga

SEQ ID NO: 101018 - RNA, 32 nt, Human
ccauucagugacugauguugacuccugcauua

SEQ ID NO: 101019 - RNA, 18 nt, Human
ccauucauccacccaucc

SEQ ID NO: 101020 - RNA, 32 nt, Human
ccauucaucccaggaccacaaggguagcugua

SEQ ID NO: 101021 - RNA, 32 nt, Human
ccauucaucccuugcucucuuggaucugaacu

SEQ ID NO: 101022 - RNA, 32 nt, Human
ccauucauguaggaauaaaucaagugagcagu

SEQ ID NO: 101023 - RNA, 32 nt, Human
ccauucauguguuugcuggaggucacacaauu

SEQ ID NO: 101024 - RNA, 32 nt, Human
ccauucauuagcuguuccuuuuugucuguucu

SEQ ID NO: 101025 - RNA, 32 nt, Human
ccauuccaaucuggacagucucugugccccuc

SEQ ID NO: 101026 - RNA, 32 nt, Human
ccauuccacaccauuuguuucucugucucccc

SEQ ID NO: 101027 - RNA, 32 nt, Human
ccauuccacguugccacacaaggugcacaggc

SEQ ID NO: 101028 - RNA, 32 nt, Human
ccauuccacuuucccugccuccuuccuuaaau

SEQ ID NO: 101029 - RNA, 22 nt, Human
ccauuccagagaaagugauaga

SEQ ID NO: 101030 - RNA, 32 nt, Human
ccauuccagcggagacuuauguaggagggacc

SEQ ID NO: 101031 - RNA, 32 nt, Human
ccauuccauguguucugaauucagcucaucuc

SEQ ID NO: 101032 - RNA, 32 nt, Human
ccauucccagucacuuaccaaugcuuggacau

SEQ ID NO: 101033 - RNA, 32 nt, Human
ccauucccauuuucucagccucuucucugccu

SEQ ID NO: 101034 - RNA, 17 nt, Human
ccauuccccaggugccu

SEQ ID NO: 101035 - RNA, 32 nt, Human
ccauuccccucucccagcaccuugcagacuug

SEQ ID NO: 101036 - RNA, 32 nt, Human
ccauuccccuuuucccuccugugcucuguccc

SEQ ID NO: 101037 - RNA, 32 nt, Human
ccauucccgcaucgcucccucuccugccuuug

SEQ ID NO: 101038 - RNA, 32 nt, Human
ccauucccuagcacacuggccuugccaucuug

SEQ ID NO: 101039 - RNA, 32 nt, Human
ccauucccuaguaggccugccacagccuagau

SEQ ID NO: 101040 - RNA, 20 nt, Human
ccauucccucucuucuucca

SEQ ID NO: 101041 - RNA, 32 nt, Human
ccauucccugcucacucagccaccucccucuc

SEQ ID NO: 101042 - RNA, 32 nt, Human
ccauucccuucuuccuccucaucaccaucgcc

SEQ ID NO: 101043 - RNA, 32 nt, Human
ccauuccgcccccgccucaacgcccagcacag

SEQ ID NO: 101044 - RNA, 32 nt, Human
ccauuccguucccagcugcuccuggggaggcc

SEQ ID NO: 101045 - RNA, 32 nt, Human
ccauuccuacccacuuaggcuuuguagcaaga

SEQ ID NO: 101046 - RNA, 21 nt, Human
ccauuccucagcuucuucaca

SEQ ID NO: 101047 - RNA, 20 nt, Human
ccauuccuccagcugcaaga

SEQ ID NO: 101048 - RNA, 32 nt, Human
ccauuccuccuccccugggccucucucccuuu

SEQ ID NO: 101049 - RNA, 32 nt, Human
ccauuccucucaugugcagacaggguugagaa

SEQ ID NO: 101050 - RNA, 32 nt, Human
ccauuccucuguccucuucucuggccugccug

SEQ ID NO: 101051 - RNA, 32 nt, Human
ccauuccugcagcccuccagacuuccugcccu

SEQ ID NO: 101052 - RNA, 32 nt, Human
ccauuccugcauggaauuccaucucugaagcc

SEQ ID NO: 101053 - RNA, 32 nt, Human
ccauuccuggccccagccuggccagggauccc

SEQ ID NO: 101054 - RNA, 32 nt, Human
ccauuccugggcaguggugguuaggggcccuu

SEQ ID NO: 101055 - RNA, 32 nt, Human
ccauuccuuagcuauuuaucccuuuccugguu

SEQ ID NO: 101056 - RNA, 18 nt, Human
ccauuccuugucugccau

SEQ ID NO: 101057 - RNA, 23 nt, Human
ccauucgaagagagaaagaaaga

SEQ ID NO: 101058 - RNA, 32 nt, Human
ccauucgccuuuccucuucuuuccuggcccac

SEQ ID NO: 101059 - RNA, 32 nt, Human
ccauucuacauacuauggaauuucucccaguc

SEQ ID NO: 101060 - RNA, 32 nt, Human
ccauucuaccaaaacuacaaaaauuagccggg

SEQ ID NO: 101061 - RNA, 32 nt, Human
ccauucuagcugguuccauggaucagggagga

SEQ ID NO: 101062 - RNA, 32 nt, Human
ccauucuauagucaugaaccccuucagugcau

SEQ ID NO: 101063 - RNA, 32 nt, Human
ccauucucaaaaaccagacuccugggucuaau

SEQ ID NO: 101064 - RNA, 31 nt, Human
ccauucucaauaaacauuugcugaagaaaug

SEQ ID NO: 101065 - RNA, 32 nt, Human
ccauucucacacugcuauaaauaaauaccuga

SEQ ID NO: 101066 - RNA, 32 nt, Human
ccauucucaccaggcugcgggcgccuugcagg

SEQ ID NO: 101067 - RNA, 32 nt, Human
ccauucucacgauggggcuuaagucauugucc

SEQ ID NO: 101068 - RNA, 32 nt, Human
ccauucucagcuccaagcauuagguaaaccca

SEQ ID NO: 101069 - RNA, 32 nt, Human
ccauucucaugucagacugaaaggagggccug

SEQ ID NO: 101070 - RNA, 32 nt, Human
ccauucuccauguccccuucucccucuucuca

SEQ ID NO: 101071 - RNA, 32 nt, Human
ccauucucccacugcucacauuuccuucuggu

SEQ ID NO: 101072 - RNA, 32 nt, Human
ccauucucccuccaagaggggcccagcauugu

SEQ ID NO: 101073 - RNA, 32 nt, Human
ccauucucccucgggucuccccagaggggccg

SEQ ID NO: 101074 - RNA, 32 nt, Human
ccauucuccucccucagacuuccgaguggcug

SEQ ID NO: 101075 - RNA, 32 nt, Human
ccauucuccucuggccuccucuucuaugcuuu

SEQ ID NO: 101076 - RNA, 32 nt, Human
ccauucuccugccucaaccucccgaauggcug

SEQ ID NO: 101077 - RNA, 32 nt, Human
ccauucuccugccucacccucccgaguagcug

SEQ ID NO: 101078 - RNA, 32 nt, Human
ccauucuccugccucagccucacgaguagcug

SEQ ID NO: 101079 - RNA, 32 nt, Human
ccauucuccugccucagccucccauagcuggg

SEQ ID NO: 101080 - RNA, 32 nt, Human
ccauucuccugccucagccuccccaguagcug

SEQ ID NO: 101081 - RNA, 32 nt, Human
ccauucuccugccucagccucccgagcagcug

SEQ ID NO: 101082 - RNA, 32 nt, Human
ccauucuccugccucagccucccgaguagcug

SEQ ID NO: 101083 - RNA, 32 nt, Human
ccauucuccugccucagccucccgcauaggug

SEQ ID NO: 101084 - RNA, 32 nt, Human
ccauucuccugccucagccucccggguagcug

SEQ ID NO: 101085 - RNA, 32 nt, Human
ccauucuccugccucagccucccguguagcug

SEQ ID NO: 101086 - RNA, 32 nt, Human
ccauucuccugccucagccucccuaauagcug

SEQ ID NO: 101087 - RNA, 32 nt, Human
ccauucuccugccucagccuccucaguagcug

SEQ ID NO: 101088 - RNA, 32 nt, Human
ccauucuccugccucagccuccugaguagcug

SEQ ID NO: 101089 - RNA, 32 nt, Human
ccauucuccugccucagcguccugaguagcug

SEQ ID NO: 101090 - RNA, 32 nt, Human
ccauucuccugccucagucuccugaguagcug

SEQ ID NO: 101091 - RNA, 19 nt, Human
ccauucucuacccauccuu

SEQ ID NO: 101092 - RNA, 32 nt, Human
ccauucucuaccucccaugcagcaugaacaca

SEQ ID NO: 101093 - RNA, 32 nt, Human
ccauucucuccaucccuuccaucccaggcaau

SEQ ID NO: 101094 - RNA, 19 nt, Human
ccauucucuggacuucaga

SEQ ID NO: 101095 - RNA, 32 nt, Human
ccauucucuucugcacaauuuaccuuugugug

SEQ ID NO: 101096 - RNA, 32 nt, Human
ccauucucuuucucaggaauggcuguuaaaau

SEQ ID NO: 101097 - RNA, 32 nt, Human
ccauucugaacauguuuugucauucacaagua

SEQ ID NO: 101098 - RNA, 32 nt, Human
ccauucugagccuugaagggcaaggagggaaa

SEQ ID NO: 101099 - RNA, 18 nt, Human
ccauucugcacagucccu

SEQ ID NO: 101100 - RNA, 32 nt, Human
ccauucugcagcccugcuggcacagcucaagu

SEQ ID NO: 101101 - RNA, 32 nt, Human
ccauucugccaagagaggcucuucugggggcc

SEQ ID NO: 101102 - RNA, 32 nt, Human
ccauucugccaauuuaaaugcgacugugguau

SEQ ID NO: 101103 - RNA, 29 nt, Human
ccauucugccugugugugcuguggcuuug

SEQ ID NO: 101104 - RNA, 32 nt, Human
ccauucugccuuucugacauuuccuugggaau

SEQ ID NO: 101105 - RNA, 32 nt, Human
ccauucuggaaauguaucccauagaagcugau

SEQ ID NO: 101106 - RNA, 32 nt, Human
ccauucuggauacuuccagacauuuuccacua

SEQ ID NO: 101107 - RNA, 32 nt, Human
ccauucuggccuuggccugcagaagcuuucag

SEQ ID NO: 101108 - RNA, 32 nt, Human
ccauucugggcaacaagagcgaaacuccgucu

SEQ ID NO: 101109 - RNA, 32 nt, Human
ccauucugggucaggcccucccccuuugcagg

SEQ ID NO: 101110 - RNA, 32 nt, Human
ccauucuggucuuaagaccccaaacaaggguu

SEQ ID NO: 101111 - RNA, 32 nt, Human
ccauucugguuccuggcugccugccucuugca

SEQ ID NO: 101112 - RNA, 32 nt, Human
ccauucuguaccccuuccccagccugggccuu

SEQ ID NO: 101113 - RNA, 32 nt, Human
ccauucuguagguugucuuuucacauucuauu

SEQ ID NO: 101114 - RNA, 32 nt, Human
ccauucuguccgcucagauucuggguggggcc

SEQ ID NO: 101115 - RNA, 32 nt, Human
ccauucuguuacacuuuguauuuucuaacugg

SEQ ID NO: 101116 - RNA, 32 nt, Human
ccauucuguucuguucuguucuccuaauacca

SEQ ID NO: 101117 - RNA, 32 nt, Human
ccauucuguugcuugccuuuucacucagugag

SEQ ID NO: 101118 - RNA, 32 nt, Human
ccauucuucacucuuugaagcgagcagucagc

SEQ ID NO: 101119 - RNA, 32 nt, Human
ccauucuucccaggaccucagcgcagcccugg

SEQ ID NO: 101120 - RNA, 32 nt, Human
ccauucuucccuuucgcucccuucccuggaaa

SEQ ID NO: 101121 - RNA, 32 nt, Human
ccauucuuccuaccuccaucucugguuuguca

SEQ ID NO: 101122 - RNA, 32 nt, Human
ccauucuuccuggauggagcagguggaggugc

SEQ ID NO: 101123 - RNA, 32 nt, Human
ccauucuucucuuccccucucuucccuuuccu

SEQ ID NO: 101124 - RNA, 32 nt, Human
ccauucuucuggugcuacuccaugcagggguc

SEQ ID NO: 101125 - RNA, 32 nt, Human
ccauucuugaguuuugauaaaguaauucauac

SEQ ID NO: 101126 - RNA, 32 nt, Human
ccauucuugguggugagccuggacucugagcu

SEQ ID NO: 101127 - RNA, 19 nt, Human
ccauucuuugccuuccugg

SEQ ID NO: 101128 - RNA, 32 nt, Human
ccauucuuuuaucuuuauccugugaagguguu

SEQ ID NO: 101129 - RNA, 32 nt, Human
ccauucuuuucuucccccuccugaagcaagca

SEQ ID NO: 101130 - RNA, 32 nt, Human
ccauucuuuuucugaccuguacugggagauca

SEQ ID NO: 101131 - RNA, 32 nt, Human
ccauugaacaucuagauaaaauggguaugagu

SEQ ID NO: 101132 - RNA, 32 nt, Human
ccauugaacauguuguauaaauacaccaggug

SEQ ID NO: 101133 - RNA, 32 nt, Human
ccauugacauuugcacuuucaaacaugacaag

SEQ ID NO: 101134 - RNA, 32 nt, Human
ccauugaccuucaucccucuccuuuggaaggg

SEQ ID NO: 101135 - RNA, 32 nt, Human
ccauugacugacccccuccuccagcaauagca

SEQ ID NO: 101136 - RNA, 32 nt, Human
ccauugacugccaucucuagucuugcaguggg

SEQ ID NO: 101137 - RNA, 32 nt, Human
ccauugagaaacuagucgcucuucucaacacg

SEQ ID NO: 101138 - RNA, 32 nt, Human
ccauugagcccaggaguccagccugggcaaaa

SEQ ID NO: 101139 - RNA, 32 nt, Human
ccauugagcuucacagugucaggcuggacgcc

SEQ ID NO: 101140 - RNA, 32 nt, Human
ccauugaggcuggagaggagagguuuugagca

SEQ ID NO: 101141 - RNA, 32 nt, Human
ccauugaguagcugggaugacaggcacaugcc

SEQ ID NO: 101142 - RNA, 32 nt, Human
ccauugauaccuccuggcugggugaggcggcu

SEQ ID NO: 101143 - RNA, 32 nt, Human
ccauugcaaccaugauugaugcuacuguuggu

SEQ ID NO: 101144 - RNA, 19 nt, Human
ccauugcaaguccauccuu

SEQ ID NO: 101145 - RNA, 24 nt, Human
ccauugcaaguugcacccagauga

SEQ ID NO: 101146 - RNA, 32 nt, Human
ccauugcacugaggccguaucauuccuuaaga

SEQ ID NO: 101147 - RNA, 32 nt, Human
ccauugcacugcaccugggcaacaagagugaa

SEQ ID NO: 101148 - RNA, 32 nt, Human
ccauugcagccugguguuuuaccuccuucacu

SEQ ID NO: 101149 - RNA, 32 nt, Human
ccauugcagguggcucuuacagcucucuggug

SEQ ID NO: 101150 - RNA, 32 nt, Human
ccauugcauuugucaccuagucacuguauaua

SEQ ID NO: 101151 - RNA, 32 nt, Human
ccauugccaaaagguuuuacugucuuaaagcu

SEQ ID NO: 101152 - RNA, 32 nt, Human
ccauugccacccacagugcccggaauggcccu

SEQ ID NO: 101153 - RNA, 32 nt, Human
ccauugccacugacacccggcucucugugcuc

SEQ ID NO: 101154 - RNA, 19 nt, Human
ccauugccacugcuugcca

SEQ ID NO: 101155 - RNA, 20 nt, Human
ccauugccagggcacugcca

SEQ ID NO: 101156 - RNA, 32 nt, Human
ccauugccauggauugcugugccucucgcagc

SEQ ID NO: 101157 - RNA, 20 nt, Human
ccauugccauggggcugguc

SEQ ID NO: 101158 - RNA, 32 nt, Human
ccauugccauuugguguggauuuucuacugua

SEQ ID NO: 101159 - RNA, 32 nt, Human
ccauugcccaggagaaugaggagccucccugc

SEQ ID NO: 101160 - RNA, 32 nt, Human
ccauugcccaggcuggacugcagcagcgugau

SEQ ID NO: 101161 - RNA, 32 nt, Human
ccauugcccaggcuggaguacaauggugcgau

SEQ ID NO: 101162 - RNA, 32 nt, Human
ccauugcccaggcuggauuacaguggcgcaau

SEQ ID NO: 101163 - RNA, 32 nt, Human
ccauugccccaccauggcuggggaccggcucc

SEQ ID NO: 101164 - RNA, 32 nt, Human
ccauugccccuaggccaggccuggugagugac

SEQ ID NO: 101165 - RNA, 32 nt, Human
ccauugccggcaccuggugagauuccgucucu

SEQ ID NO: 101166 - RNA, 32 nt, Human
ccauugccgugcucuuugaaugcagacuucua

SEQ ID NO: 101167 - RNA, 32 nt, Human
ccauugccuccaccuccaccacagccugccca

SEQ ID NO: 101168 - RNA, 32 nt, Human
ccauugccuuaaauagccucucuccccauuua

SEQ ID NO: 101169 - RNA, 32 nt, Human
ccauugccuucccacuaugcagccagggaugc

SEQ ID NO: 101170 - RNA, 32 nt, Human
ccauugccuuucuuccccugacuacugggcuu

SEQ ID NO: 101171 - RNA, 32 nt, Human
ccauugcgcccaggcugguaugcagucauguu

SEQ ID NO: 101172 - RNA, 32 nt, Human
ccauugcgggguggggagggaggcgggguugg

SEQ ID NO: 101173 - RNA, 19 nt, Human
ccauugcucgccuuggcca

SEQ ID NO: 101174 - RNA, 32 nt, Human
ccauugcugcagcugcuccacagcccuuuuca

SEQ ID NO: 101175 - RNA, 32 nt, Human
ccauugcugcugccucugccucggagaagccc

SEQ ID NO: 101176 - RNA, 32 nt, Human
ccauugcuggaaaaauugagauggaaaacaaa

SEQ ID NO: 101177 - RNA, 32 nt, Human
ccauugcuuccuggacaggggauccaaaccau

SEQ ID NO: 101178 - RNA, 32 nt, Human
ccauugcuuguuuuucucagguuugucaaaga

SEQ ID NO: 101179 - RNA, 22 nt, Human
ccauuggaaaaacccucugugg

SEQ ID NO: 101180 - RNA, 32 nt, Human
ccauuggaccaacagaaaccucaauugcacca

SEQ ID NO: 101181 - RNA, 32 nt, Human
ccauuggagaaacugggcauuuuaccaaggau

SEQ ID NO: 101182 - RNA, 32 nt, Human
ccauuggagaugaccaguccuuucugggaccu

SEQ ID NO: 101183 - RNA, 32 nt, Human
ccauuggauguagagaaaagugccuuagaguu

SEQ ID NO: 101184 - RNA, 32 nt, Human
ccauuggcaaagccaaacccaagaagcaaucc

SEQ ID NO: 101185 - RNA, 32 nt, Human
ccauuggcaugggcucuggagcuguccagaag

SEQ ID NO: 101186 - RNA, 32 nt, Human
ccauuggccacugguggaggugcacuggaagg

SEQ ID NO: 101187 - RNA, 19 nt, Human
ccauuggccgcuccuccac

SEQ ID NO: 101188 - RNA, 20 nt, Human
ccauuggccucuccuugcca

SEQ ID NO: 101189 - RNA, 20 nt, Human
ccauuggcuaaccaggcucc

SEQ ID NO: 101190 - RNA, 32 nt, Human
ccauuggcucagauaacugggcucuggauguu

SEQ ID NO: 101191 - RNA, 32 nt, Human
ccauuggcugagacccaccagguccaguuuug

SEQ ID NO: 101192 - RNA, 32 nt, Human
ccauuggcugcccucugucacacacaggugug

SEQ ID NO: 101193 - RNA, 32 nt, Human
ccauuggcuucucagauguauuucaaggacua

SEQ ID NO: 101194 - RNA, 32 nt, Human
ccauugggagacauagauacauugcuuauaug

SEQ ID NO: 101195 - RNA, 32 nt, Human
ccauuggguaacagugguuaccagagaggcaa

SEQ ID NO: 101196 - RNA, 20 nt, Human
ccauugggugaguccuucaa

SEQ ID NO: 101197 - RNA, 32 nt, Human
ccauuggucaccagagcaacugcaugucuuca

SEQ ID NO: 101198 - RNA, 32 nt, Human
ccauuggugaugaugacuguaacuucuggcuu

SEQ ID NO: 101199 - RNA, 32 nt, Human
ccauugguucucuucccccagcacccugaaac

SEQ ID NO: 101200 - RNA, 32 nt, Human
ccauuguaaacccagagggcugcauuuugggu

SEQ ID NO: 101201 - RNA, 32 nt, Human
ccauuguagaagggacagggagucagaucccc

SEQ ID NO: 101202 - RNA, 32 nt, Human
ccauuguagaauguuuucacauacuugaauaa

SEQ ID NO: 101203 - RNA, 32 nt, Human
ccauuguauuuuaaaaucuuauuccuacuauu

SEQ ID NO: 101204 - RNA, 32 nt, Human
ccauuguccagaugggcacugcuguggagucu

SEQ ID NO: 101205 - RNA, 23 nt, Human
ccauugucccuugccuagccugg

SEQ ID NO: 101206 - RNA, 32 nt, Human
ccauuguccggcauccugcggaggcuuaauau

SEQ ID NO: 101207 - RNA, 32 nt, Human
ccauuguccuggcaccuccauuuccuuaguuu

SEQ ID NO: 101208 - RNA, 32 nt, Human
ccauugucgaauuagucuccagccucuaaaua

SEQ ID NO: 101209 - RNA, 32 nt, Human
ccauugucucagccucugccacuucccagacc

SEQ ID NO: 101210 - RNA, 31 nt, Human
ccauugugacuucucugauaaagcgucugau

SEQ ID NO: 101211 - RNA, 31 nt, Human
ccauugugcccacuuaugccugugucugccc

SEQ ID NO: 101212 - RNA, 32 nt, Human
ccauugugggguccccaggaaagggcaagggc

SEQ ID NO: 101213 - RNA, 32 nt, Human
ccauugugguguggcaggauggguuggugggg

SEQ ID NO: 101214 - RNA, 32 nt, Human
ccauugugugucugugucauguaaaaauguuu

SEQ ID NO: 101215 - RNA, 24 nt, Human
ccauuguuacaugaaagugauaga

SEQ ID NO: 101216 - RNA, 19 nt, Human
ccauuguuacaugggguga

SEQ ID NO: 101217 - RNA, 23 nt, Human
ccauuguuaccagaaguaaugga

SEQ ID NO: 101218 - RNA, 32 nt, Human
ccauuguuucuccuggguuaggccccggcuuc

SEQ ID NO: 101219 - RNA, 19 nt, Human
ccauuguuuuuaccauucc

SEQ ID NO: 101220 - RNA, 32 nt, Human
ccauuuaaaauuauaugaaugguuugggaucu

SEQ ID NO: 101221 - RNA, 32 nt, Human
ccauuuaacaagagaucccacucuccagcugc

SEQ ID NO: 101222 - RNA, 32 nt, Human
ccauuuacacaaaaacagaaaaguacccagau

SEQ ID NO: 101223 - RNA, 32 nt, Human
ccauuuacagcccucagcaaugugccuucuaa

SEQ ID NO: 101224 - RNA, 32 nt, Human
ccauuuacccuugaccccaguccacagugguc

SEQ ID NO: 101225 - RNA, 32 nt, Human
ccauuuagaaaacugaccagcacccagcaagc

SEQ ID NO: 101226 - RNA, 22 nt, Human
ccauuuagacagcagggcuuac

SEQ ID NO: 101227 - RNA, 32 nt, Human
ccauuuagagugagggagagagagugagagac

SEQ ID NO: 101228 - RNA, 32 nt, Human
ccauuuagaucucuggggccacugaugggaug

SEQ ID NO: 101229 - RNA, 32 nt, Human
ccauuuagcuguauuucccuuuacuuacagca

SEQ ID NO: 101230 - RNA, 32 nt, Human
ccauuuagggagacaaucaagcucuuaguuau

SEQ ID NO: 101231 - RNA, 32 nt, Human
ccauuuagguaucugaaaugcauuucagacuu

SEQ ID NO: 101232 - RNA, 32 nt, Human
ccauuuaguugugcuuuucuucauauacuuca

SEQ ID NO: 101233 - RNA, 32 nt, Human
ccauuuauauguuucaauaaagcacaacuccu

SEQ ID NO: 101234 - RNA, 32 nt, Human
ccauuuauccaagugcuuucauuuuuccagau

SEQ ID NO: 101235 - RNA, 32 nt, Human
ccauuuaucuuuuucacuuucuugccuguuuu

SEQ ID NO: 101236 - RNA, 32 nt, Human
ccauuuauuggugagaaaacaggcucaggguu

SEQ ID NO: 101237 - RNA, 32 nt, Human
ccauuucaaauccugcacucaggccugguggu

SEQ ID NO: 101238 - RNA, 32 nt, Human
ccauuucaauucucaaaagaaaaggcaaaacc

SEQ ID NO: 101239 - RNA, 32 nt, Human
ccauuucacccggaaaagaugacucugauuua

SEQ ID NO: 101240 - RNA, 32 nt, Human
ccauuucacucucaaacuucacuaaugaucac

SEQ ID NO: 101241 - RNA, 32 nt, Human
ccauuucagccugucugucucagggugcagcc

SEQ ID NO: 101242 - RNA, 32 nt, Human
ccauuucagccugugcucugccucgauuguug

SEQ ID NO: 101243 - RNA, 32 nt, Human
ccauuucagcugucuuuugauuaauguuuucg

SEQ ID NO: 101244 - RNA, 21 nt, Human
ccauuucaguguuugaaccua

SEQ ID NO: 101245 - RNA, 32 nt, Human
ccauuucaugcaaccagaaacuaguuaaaagc

SEQ ID NO: 101246 - RNA, 32 nt, Human
ccauuuccaagaggcuguagaaaggggagaau

SEQ ID NO: 101247 - RNA, 32 nt, Human
ccauuuccagaacucaaucccugcaaaugaau

SEQ ID NO: 101248 - RNA, 32 nt, Human
ccauuuccagauugcgccagcauuacaguaac

SEQ ID NO: 101249 - RNA, 32 nt, Human
ccauuuccagucaugaauucagaccaggaugu

SEQ ID NO: 101250 - RNA, 32 nt, Human
ccauuuccauccaugacagguacagcauccca

SEQ ID NO: 101251 - RNA, 32 nt, Human
ccauuuccauuuuacagacaaggaaaucaaga

SEQ ID NO: 101252 - RNA, 32 nt, Human
ccauuucccaacaaauuccucaucuccaucug

SEQ ID NO: 101253 - RNA, 21 nt, Human
ccauuucccaagcccagcaga

SEQ ID NO: 101254 - RNA, 32 nt, Human
ccauuucccagguuaugcucuuuucuuucuca

SEQ ID NO: 101255 - RNA, 32 nt, Human
ccauuucccaucucagcuucaagggagguguc

SEQ ID NO: 101256 - RNA, 32 nt, Human
ccauuucccaugagccaacugggaaacauggu

SEQ ID NO: 101257 - RNA, 32 nt, Human
ccauuuccccagcccaugagguugggauauua

SEQ ID NO: 101258 - RNA, 32 nt, Human
ccauuucccuccaacccccuaaugguuucuuu

SEQ ID NO: 101259 - RNA, 32 nt, Human
ccauuuccuaaaggaaaugcccccggggagga

SEQ ID NO: 101260 - RNA, 32 nt, Human
ccauuuccuccccucucuaccugcagugaguu

SEQ ID NO: 101261 - RNA, 32 nt, Human
ccauuuccugacugcacuggccuggcagucug

SEQ ID NO: 101262 - RNA, 32 nt, Human
ccauuuccuuucucaccuccuccuccacuccc

SEQ ID NO: 101263 - RNA, 32 nt, Human
ccauuuccuuucuccacauccaggucaggugg

SEQ ID NO: 101264 - RNA, 32 nt, Human
ccauuucgagugucaaguguauuuuuaacugu

SEQ ID NO: 101265 - RNA, 32 nt, Human
ccauuucgcgucuccccuuucccuccccagcc

SEQ ID NO: 101266 - RNA, 32 nt, Human
ccauuucgucaagugaccucucaucuucuaua

SEQ ID NO: 101267 - RNA, 32 nt, Human
ccauuucgugagccccaucuucacccaggccu

SEQ ID NO: 101268 - RNA, 32 nt, Human
ccauuucguucucccuuccuugcugacaaagc

SEQ ID NO: 101269 - RNA, 32 nt, Human
ccauuucuaauaguuggcaccauuauaagcua

SEQ ID NO: 101270 - RNA, 32 nt, Human
ccauuucuacaaaaauacaaaacuuagcuggg

SEQ ID NO: 101271 - RNA, 32 nt, Human
ccauuucuacuaaaaauacaaaauuagcuggg

SEQ ID NO: 101272 - RNA, 32 nt, Human
ccauuucuacucuuaaguuucucagcucccau

SEQ ID NO: 101273 - RNA, 32 nt, Human
ccauuucucaggugcaguacagcacguccacg

SEQ ID NO: 101274 - RNA, 22 nt, Human
ccauuucuccgucggcucggca

SEQ ID NO: 101275 - RNA, 32 nt, Human
ccauuucuccugggggagggguuuggggcugg

SEQ ID NO: 101276 - RNA, 32 nt, Human
ccauuucucucaccacuucuuugccagucuag

SEQ ID NO: 101277 - RNA, 32 nt, Human
ccauuucucuccucacacacagacucauauua

SEQ ID NO: 101278 - RNA, 32 nt, Human
ccauuucucucuucagccucaggccaaacaaa

SEQ ID NO: 101279 - RNA, 32 nt, Human
ccauuucucugugcccuuuugacagcuccagg

SEQ ID NO: 101280 - RNA, 32 nt, Human
ccauuucugcagccagugucuccugggugccu

SEQ ID NO: 101281 - RNA, 32 nt, Human
ccauuucugccacuuucccccuagagagccga

SEQ ID NO: 101282 - RNA, 32 nt, Human
ccauuucuggaaaaucuguaaagaggaaacag

SEQ ID NO: 101283 - RNA, 22 nt, Human
ccauuucuggccaaaacuacaa

SEQ ID NO: 101284 - RNA, 32 nt, Human
ccauuucugggcacguggcagcagucgcugau

SEQ ID NO: 101285 - RNA, 32 nt, Human
ccauuucuguggagggagggcagcuggccccc

SEQ ID NO: 101286 - RNA, 32 nt, Human
ccauuucuguguccuuaccccuggugaggucu

SEQ ID NO: 101287 - RNA, 22 nt, Human
ccauuucuguguguucccccaa

SEQ ID NO: 101288 - RNA, 32 nt, Human
ccauuucuucaauaucauuuuugaggcuuugg

SEQ ID NO: 101289 - RNA, 32 nt, Human
ccauuucuuuugucucucuguuucuguucuga

SEQ ID NO: 101290 - RNA, 19 nt, Human
ccauuugaaaucagaggaa

SEQ ID NO: 101291 - RNA, 32 nt, Human
ccauuugacuuugagcugcuguugaaguggug

SEQ ID NO: 101292 - RNA, 23 nt, Human
ccauuugauaauaaucuuauuca

SEQ ID NO: 101293 - RNA, 32 nt, Human
ccauuugcacagugggacagaugaguacaacu

SEQ ID NO: 101294 - RNA, 32 nt, Human
ccauuugccaauuuuccuacucucacacuggu

SEQ ID NO: 101295 - RNA, 22 nt, Human
ccauuugccccagcuggucuca

SEQ ID NO: 101296 - RNA, 32 nt, Human
ccauuugcccuccuccucagcuagggccacgc

SEQ ID NO: 101297 - RNA, 32 nt, Human
ccauuugccucuuccuuccuauuucccuuccg

SEQ ID NO: 101298 - RNA, 32 nt, Human
ccauuugccucuugagugggcagcccugggcu

SEQ ID NO: 101299 - RNA, 32 nt, Human
ccauuugccuuccuggaauccugcugcaucac

SEQ ID NO: 101300 - RNA, 32 nt, Human
ccauuugcuaucuccaacuuuccugccaccuu

SEQ ID NO: 101301 - RNA, 32 nt, Human
ccauuugcuucucugcugaccuugccaaguug

SEQ ID NO: 101302 - RNA, 32 nt, Human
ccauuuggaaaucuugagcucagcugugguuc

SEQ ID NO: 101303 - RNA, 32 nt, Human
ccauuuggaauucuuuccccaguaucugagcc

SEQ ID NO: 101304 - RNA, 32 nt, Human
ccauuuggagccaccucugcuucucagcccca

SEQ ID NO: 101305 - RNA, 32 nt, Human
ccauuuggagggaggaaguaagggaagaggag

SEQ ID NO: 101306 - RNA, 32 nt, Human
ccauuuggauggguguggagccagucuccaag

SEQ ID NO: 101307 - RNA, 32 nt, Human
ccauuuggcaaaacuuccuuggccacgagacu

SEQ ID NO: 101308 - RNA, 32 nt, Human
ccauuuggcaaugccaucaucuccugccuucc

SEQ ID NO: 101309 - RNA, 32 nt, Human
ccauuuggcuguuucucucuuguucucagaca

SEQ ID NO: 101310 - RNA, 32 nt, Human
ccauuugggaaacugagcuucuuucuucugca

SEQ ID NO: 101311 - RNA, 21 nt, Human
ccauuugggaacagagcaaga

SEQ ID NO: 101312 - RNA, 32 nt, Human
ccauuuggucaaauuggaagcccagggccagg

SEQ ID NO: 101313 - RNA, 32 nt, Human
ccauuuggugaguguuuugcuggaaauauuuc

SEQ ID NO: 101314 - RNA, 21 nt, Human
ccauuugguuaaugacauuaa

SEQ ID NO: 101315 - RNA, 32 nt, Human
ccauuugucuacagccugccagaucuggccug

SEQ ID NO: 101316 - RNA, 32 nt, Human
ccauuuguguguggcuagcuguuuccagccag

SEQ ID NO: 101317 - RNA, 32 nt, Human
ccauuuguucuugaacucugggaggcagaagu

SEQ ID NO: 101318 - RNA, 32 nt, Human
ccauuuguuuacugcuguaucuuaggcucaaa

SEQ ID NO: 101319 - RNA, 32 nt, Human
ccauuuguuuucaaggucaaggcuccaggcag

SEQ ID NO: 101320 - RNA, 32 nt, Human
ccauuuuagcaacaggcuaauaaaauuucaaa

SEQ ID NO: 101321 - RNA, 32 nt, Human
ccauuuuauuugggaguucucaucugggauug

SEQ ID NO: 101322 - RNA, 32 nt, Human
ccauuuucaagggcagggaaaagggaguaaaa

SEQ ID NO: 101323 - RNA, 32 nt, Human
ccauuuucacacugcuauaaggaacuaccuga

SEQ ID NO: 101324 - RNA, 32 nt, Human
ccauuuucagggacuagguacugacccccgcg

SEQ ID NO: 101325 - RNA, 32 nt, Human
ccauuuucauucuucuuuugugguccaauuag

SEQ ID NO: 101326 - RNA, 18 nt, Human
ccauuuuccaauccaucc

SEQ ID NO: 101327 - RNA, 19 nt, Human
ccauuuucccaucauccuu

SEQ ID NO: 101328 - RNA, 32 nt, Human
ccauuuuccccacuuugugaugggcuucucuc

SEQ ID NO: 101329 - RNA, 24 nt, Human
ccauuuucccccacuacugcagca

SEQ ID NO: 101330 - RNA, 32 nt, Human
ccauuuuccuggugcaggcucagcuuucccag

SEQ ID NO: 101331 - RNA, 32 nt, Human
ccauuuucucauaauaguagccuagucaacac

SEQ ID NO: 101332 - RNA, 23 nt, Human
ccauuuucuccggggcugugggg

SEQ ID NO: 101333 - RNA, 32 nt, Human
ccauuuucucucuugggagcaauggucacagu

SEQ ID NO: 101334 - RNA, 32 nt, Human
ccauuuucugaacaaaagagggccucuucuua

SEQ ID NO: 101335 - RNA, 32 nt, Human
ccauuuucugguucuguguccucugccugggc

SEQ ID NO: 101336 - RNA, 32 nt, Human
ccauuuucuuccugccaagccugaaucaaugu

SEQ ID NO: 101337 - RNA, 32 nt, Human
ccauuuucuugauggaacucuuccuagaguuu

SEQ ID NO: 101338 - RNA, 32 nt, Human
ccauuuugacuccuguggaugguuccagguaa

SEQ ID NO: 101339 - RNA, 32 nt, Human
ccauuuugagggugaauauggcuaggcacuuu

SEQ ID NO: 101340 - RNA, 32 nt, Human
ccauuuugauaaugcuauuuugauugagugaa

SEQ ID NO: 101341 - RNA, 32 nt, Human
ccauuuugccuuucugacauuuccuugggaau

SEQ ID NO: 101342 - RNA, 32 nt, Human
ccauuuuggggagcaguucuucaucugaaugg

SEQ ID NO: 101343 - RNA, 32 nt, Human
ccauuuugguaucuacuucuaaauacacucag

SEQ ID NO: 101344 - RNA, 32 nt, Human
ccauuuuguagccaggugugguggcucacacc

SEQ ID NO: 101345 - RNA, 32 nt, Human
ccauuuuuauuugccuuucuagauauuuuauu

SEQ ID NO: 101346 - RNA, 32 nt, Human
ccauuuuucucagggcccuccacuagagucag

SEQ ID NO: 101347 - RNA, 32 nt, Human
ccauuuuucucccaagaaaccugacucaauua

SEQ ID NO: 101348 - RNA, 32 nt, Human
ccauuuuucucuuucuccuccuggccuggccu

SEQ ID NO: 101349 - RNA, 32 nt, Human
ccauuuuugccucacuuaauuccagccuuuug

SEQ ID NO: 101350 - RNA, 32 nt, Human
ccauuuuuggguguuuucuaccacagauugau

SEQ ID NO: 101351 - RNA, 21 nt, Human
cccaaaaaagggaacacugug

SEQ ID NO: 101352 - RNA, 22 nt, Human
cccaaaaaccaggcugcagugg

SEQ ID NO: 101353 - RNA, 19 nt, Human
cccaaaaaccauuguuuua

SEQ ID NO: 101354 - RNA, 24 nt, Human
cccaaaaagcugggauuacuagca

SEQ ID NO: 101355 - RNA, 32 nt, Human
cccaaaaagguuugaacccaggucuuccaagu

SEQ ID NO: 101356 - RNA, 32 nt, Human
cccaaaaagugccagaagcaucguggcauuuc

SEQ ID NO: 101357 - RNA, 32 nt, Human
cccaaaaauauaauauagaacuaauugcuaac

SEQ ID NO: 101358 - RNA, 32 nt, Human
cccaaaaaugaaggaccucauuucuuauagcc

SEQ ID NO: 101359 - RNA, 32 nt, Human
cccaaaacacaaaucuagaauugcaaagccag

SEQ ID NO: 101360 - RNA, 32 nt, Human
cccaaaacacauuuaccagcauacuccaaacu

SEQ ID NO: 101361 - RNA, 32 nt, Human
cccaaaacagaagaaaggaaaagcaauuaacg

SEQ ID NO: 101362 - RNA, 32 nt, Human
cccaaaacagaagaaaggaaaggcaauuaacg

SEQ ID NO: 101363 - RNA, 32 nt, Human
cccaaaacagaguagaauagaauucauaugaa

SEQ ID NO: 101364 - RNA, 32 nt, Human
cccaaaacaguuauacagaugacgguacuggu

SEQ ID NO: 101365 - RNA, 32 nt, Human
cccaaaaccaaacgcagcaucuucccauccuc

SEQ ID NO: 101366 - RNA, 32 nt, Human
cccaaaacccuugaguaaacuagcugagccau

SEQ ID NO: 101367 - RNA, 32 nt, Human
cccaaaacuccuugacuagaacuaucuccuuu

SEQ ID NO: 101368 - RNA, 32 nt, Human
cccaaaacucuuccuguucugccugcagaguu

SEQ ID NO: 101369 - RNA, 32 nt, Human
cccaaaagaagaacccaggcugccggcgaucc

SEQ ID NO: 101370 - RNA, 32 nt, Human
cccaaaagacagucagccuuguccucaggccc

SEQ ID NO: 101371 - RNA, 22 nt, Human
cccaaaagcugggauuacaggc

SEQ ID NO: 101372 - RNA, 24 nt, Human
cccaaaaggcagacauugcaguga

SEQ ID NO: 101373 - RNA, 32 nt, Human
cccaaaaggcagacauugcagugagccaagau

SEQ ID NO: 101374 - RNA, 24 nt, Human
cccaaaaggcggagguugcaguga

SEQ ID NO: 101375 - RNA, 32 nt, Human
cccaaaaggcggagguugcagugagccaagau

SEQ ID NO: 101376 - RNA, 22 nt, Human
cccaaaaggcuucaggccagcu

SEQ ID NO: 101377 - RNA, 22 nt, Human
cccaaaagguggaggcugcagu

SEQ ID NO: 101378 - RNA, 24 nt, Human
cccaaaagguggaggcugcaguga

SEQ ID NO: 101379 - RNA, 22 nt, Human
cccaaaagugcuggauuacagg

SEQ ID NO: 101380 - RNA, 24 nt, Human
cccaaaaguuugaggcugcaguga

SEQ ID NO: 101381 - RNA, 24 nt, Human
cccaaaauauuggaaauacaggca

SEQ ID NO: 101382 - RNA, 23 nt, Human
cccaaaauccugggauuacaggc

SEQ ID NO: 101383 - RNA, 23 nt, Human
cccaaaaugcugggauuacaagc

SEQ ID NO: 101384 - RNA, 22 nt, Human
cccaaaaugcugggauuacagg

SEQ ID NO: 101385 - RNA, 23 nt, Human
cccaaaaugcugggauuacaggc

SEQ ID NO: 101386 - RNA, 24 nt, Human
cccaaaaugcugggauuacaggca

SEQ ID NO: 101387 - RNA, 24 nt, Human
cccaaaaugcugggauuacaugca

SEQ ID NO: 101388 - RNA, 24 nt, Human
cccaaaaugcuucgauugcaggca

SEQ ID NO: 101389 - RNA, 24 nt, Human
cccaaaaugcuuggauuacaggca

SEQ ID NO: 101390 - RNA, 32 nt, Human
cccaaaaugugccaagaauuucccagucccag

SEQ ID NO: 101391 - RNA, 32 nt, Human
cccaaaauguuccuugcuauguguucuucugu

SEQ ID NO: 101392 - RNA, 24 nt, Human
cccaaaauguugagauugcaggca

SEQ ID NO: 101393 - RNA, 24 nt, Human
cccaaaauguugcaauuacaggca

SEQ ID NO: 101394 - RNA, 24 nt, Human
cccaaaauucugggauuacaggca

SEQ ID NO: 101395 - RNA, 32 nt, Human
cccaaacaccaggguuuuuggaaccaucaccu

SEQ ID NO: 101396 - RNA, 23 nt, Human
cccaaacaccucauuguuucccc

SEQ ID NO: 101397 - RNA, 32 nt, Human
cccaaacacuagaugugugugugcacacacac

SEQ ID NO: 101398 - RNA, 32 nt, Human
cccaaacacuggcugcuggcauuccaccaagu

SEQ ID NO: 101399 - RNA, 32 nt, Human
cccaaacauaugcacauucacuuagcagaacc

SEQ ID NO: 101400 - RNA, 32 nt, Human
cccaaacaucaccuuucauucuggaccuacca

SEQ ID NO: 101401 - RNA, 32 nt, Human
cccaaaccaagugccuugagcugccugcucug

SEQ ID NO: 101402 - RNA, 19 nt, Human
cccaaaccacacccaggaa

SEQ ID NO: 101403 - RNA, 32 nt, Human
cccaaaccacgccucuugaccaggcugccucc

SEQ ID NO: 101404 - RNA, 19 nt, Human
cccaaaccagcccgaggag

SEQ ID NO: 101405 - RNA, 32 nt, Human
cccaaaccagcccucuguuagggguggucuuu

SEQ ID NO: 101406 - RNA, 32 nt, Human
cccaaaccagcccuugagucugucacacucuc

SEQ ID NO: 101407 - RNA, 32 nt, Human
cccaaaccauaccacacacauuaucauuguua

SEQ ID NO: 101408 - RNA, 24 nt, Human
cccaaaccauuaaauugucuuuaa

SEQ ID NO: 101409 - RNA, 32 nt, Human
cccaaacccaagaggcggagguugaguaagcu

SEQ ID NO: 101410 - RNA, 18 nt, Human
cccaaacccacacaccag

SEQ ID NO: 101411 - RNA, 23 nt, Human
cccaaacccagaagccugaggaa

SEQ ID NO: 101412 - RNA, 32 nt, Human
cccaaacccagcacuccagacucgagggaagc

SEQ ID NO: 101413 - RNA, 32 nt, Human
cccaaacccaggaggcagaaguugcaagguug

SEQ ID NO: 101414 - RNA, 32 nt, Human
cccaaacccaggccccaugcaaaggcacgugg

SEQ ID NO: 101415 - RNA, 21 nt, Human
cccaaaccccaaacuggggga

SEQ ID NO: 101416 - RNA, 21 nt, Human
cccaaacccccaucuguggaa

SEQ ID NO: 101417 - RNA, 32 nt, Human
cccaaacccccugcagcccaggccagucagac

SEQ ID NO: 101418 - RNA, 21 nt, Human
cccaaaccccucucacucccu

SEQ ID NO: 101419 - RNA, 32 nt, Human
cccaaacccgggcuauccuucacucugcaggg

SEQ ID NO: 101420 - RNA, 25 nt, Human
cccaaacccuggggcuggcuuagga

SEQ ID NO: 101421 - RNA, 21 nt, Human
cccaaaccggaguggcuggga

SEQ ID NO: 101422 - RNA, 32 nt, Human
cccaaaccuccccuuccuuucccccuccuccg

SEQ ID NO: 101423 - RNA, 17 nt, Human
cccaaaccucgccagag

SEQ ID NO: 101424 - RNA, 32 nt, Human
cccaaaccucucuccucucucuuuucuguguc

SEQ ID NO: 101425 - RNA, 20 nt, Human
cccaaaccugccccuccuca

SEQ ID NO: 101426 - RNA, 32 nt, Human
cccaaaccuuuuucccuucuuugucauuguua

SEQ ID NO: 101427 - RNA, 32 nt, Human
cccaaacggaaaaggcaaggaggaacacagcg

SEQ ID NO: 101428 - RNA, 32 nt, Human
cccaaacgggcugcccugccacuuugguacau

SEQ ID NO: 101429 - RNA, 32 nt, Human
cccaaacuccagaguaguucaggcugggugga

SEQ ID NO: 101430 - RNA, 23 nt, Human
cccaaacucccaggaccuggaga

SEQ ID NO: 101431 - RNA, 32 nt, Human
cccaaacucccaggaccuggagacaggauugu

SEQ ID NO: 101432 - RNA, 32 nt, Human
cccaaacuccugccugcccuccagacugucug

SEQ ID NO: 101433 - RNA, 32 nt, Human
cccaaacuccuggccuucugugguuucccuuu

SEQ ID NO: 101434 - RNA, 32 nt, Human
cccaaacucggagacuucuaagagccacacca

SEQ ID NO: 101435 - RNA, 32 nt, Human
cccaaacucucaccuuaugcuuagcucuccuc

SEQ ID NO: 101436 - RNA, 22 nt, Human
cccaaacucuggaggcaagaga

SEQ ID NO: 101437 - RNA, 32 nt, Human
cccaaacucuuauuucagcauuaacucaaaau

SEQ ID NO: 101438 - RNA, 23 nt, Human
cccaaacucuuccccaccucggg

SEQ ID NO: 101439 - RNA, 20 nt, Human
cccaaacucuuccccgggaa

SEQ ID NO: 101440 - RNA, 32 nt, Human
cccaaacugcaauaagccgccuuccaaggcca

SEQ ID NO: 101441 - RNA, 32 nt, Human
cccaaacugcucauuauccuguuaccccaccc

SEQ ID NO: 101442 - RNA, 21 nt, Human
cccaaacuggaagaagugaga

SEQ ID NO: 101443 - RNA, 24 nt, Human
cccaaacuggagggggcauggaga

SEQ ID NO: 101444 - RNA, 20 nt, Human
cccaaacuggagugcagugg

SEQ ID NO: 101445 - RNA, 24 nt, Human
cccaaacuggugagauuacaggca

SEQ ID NO: 101446 - RNA, 19 nt, Human
cccaaacuuaaccucugag

SEQ ID NO: 101447 - RNA, 32 nt, Human
cccaaacuuugccucccgcggcggcugccccu

SEQ ID NO: 101448 - RNA, 32 nt, Human
cccaaagaaaauagauccuccaugcaggaucu

SEQ ID NO: 101449 - RNA, 27 nt, Human
cccaaagaaccagccucucaccccagg

SEQ ID NO: 101450 - RNA, 32 nt, Human
cccaaagaaccugguagcgccuccuggggcag

SEQ ID NO: 101451 - RNA, 24 nt, Human
cccaaagaacugggauuacaggca

SEQ ID NO: 101452 - RNA, 23 nt, Human
cccaaagaacuggguacucaaca

SEQ ID NO: 101453 - RNA, 32 nt, Human
cccaaagaaggcgcagaacagcacguguucuc

SEQ ID NO: 101454 - RNA, 32 nt, Human
cccaaagacacacacccccuuggugaaagaga

SEQ ID NO: 101455 - RNA, 21 nt, Human
cccaaagacacuggccuccug

SEQ ID NO: 101456 - RNA, 32 nt, Human
cccaaagacccucugugcccagccucuuccuu

SEQ ID NO: 101457 - RNA, 32 nt, Human
cccaaagaccuccguugaacauucuguaugga

SEQ ID NO: 101458 - RNA, 24 nt, Human
cccaaagaccugcccaccuccugg

SEQ ID NO: 101459 - RNA, 32 nt, Human
cccaaagaccugcccaccuccugggcucuccc

SEQ ID NO: 101460 - RNA, 32 nt, Human
cccaaagacuccacaagaaaacucagcacuga

SEQ ID NO: 101461 - RNA, 32 nt, Human
cccaaagagcagagagaggggacgucgccugc

SEQ ID NO: 101462 - RNA, 32 nt, Human
cccaaagagcaucugcccauuucccaccuucc

SEQ ID NO: 101463 - RNA, 32 nt, Human
cccaaagagcucccucucaaggccaacuauag

SEQ ID NO: 101464 - RNA, 23 nt, Human
cccaaagagcugagauuacaggc

SEQ ID NO: 101465 - RNA, 23 nt, Human
cccaaagagcugggauuacaggc

SEQ ID NO: 101466 - RNA, 21 nt, Human
cccaaagaugguggcugcagu

SEQ ID NO: 101467 - RNA, 32 nt, Human
cccaaagauguucccuguaggucacggcacuc

SEQ ID NO: 101468 - RNA, 32 nt, Human
cccaaagcacaucaccacaaggucaguugcaa

SEQ ID NO: 101469 - RNA, 24 nt, Human
cccaaagcacugaaguuacaggua

SEQ ID NO: 101470 - RNA, 24 nt, Human
cccaaagcacugggauuacaagca

SEQ ID NO: 101471 - RNA, 23 nt, Human
cccaaagcacugggauuacaggc

SEQ ID NO: 101472 - RNA, 24 nt, Human
cccaaagcacugggauuacaggca

SEQ ID NO: 101473 - RNA, 32 nt, Human
cccaaagcagaggcucggccaugaacuuaccc

SEQ ID NO: 101474 - RNA, 32 nt, Human
cccaaagcagcagaaggcagggguuaaaucag

SEQ ID NO: 101475 - RNA, 32 nt, Human
cccaaagcagcaucuuccagcacuuuccaucg

SEQ ID NO: 101476 - RNA, 32 nt, Human
cccaaagcaguauccugauuagaggaacgauc

SEQ ID NO: 101477 - RNA, 23 nt, Human
cccaaagcagugguauuacaggc

SEQ ID NO: 101478 - RNA, 32 nt, Human
cccaaagccaagggcaacagaucaguaaagaa

SEQ ID NO: 101479 - RNA, 32 nt, Human
cccaaagccagccuccaucuuaggccuuugcc

SEQ ID NO: 101480 - RNA, 32 nt, Human
cccaaagcccagcccggcugaccaacauucaa

SEQ ID NO: 101481 - RNA, 24 nt, Human
cccaaagcccagggcggcgacugg

SEQ ID NO: 101482 - RNA, 25 nt, Human
cccaaagcccagggugcucauggaa

SEQ ID NO: 101483 - RNA, 21 nt, Human
cccaaagccccccagccucca

SEQ ID NO: 101484 - RNA, 22 nt, Human
cccaaagcccgggagcuuggca

SEQ ID NO: 101485 - RNA, 32 nt, Human
cccaaagccguuggucaccuguggguggggga

SEQ ID NO: 101486 - RNA, 22 nt, Human
cccaaagccuaggagcuuggca

SEQ ID NO: 101487 - RNA, 23 nt, Human
cccaaagcgauaggauuacaggc

SEQ ID NO: 101488 - RNA, 24 nt, Human
cccaaagcgcuaggauuacaagca

SEQ ID NO: 101489 - RNA, 21 nt, Human
cccaaagcgcuaggauuagag

SEQ ID NO: 101490 - RNA, 21 nt, Human
cccaaagcgcuaggauuccag

SEQ ID NO: 101491 - RNA, 23 nt, Human
cccaaagcgcugggauuacaggc

SEQ ID NO: 101492 - RNA, 32 nt, Human
cccaaagcguacccuggucaucuggaagagga

SEQ ID NO: 101493 - RNA, 24 nt, Human
cccaaagcguugggauuauaggca

SEQ ID NO: 101494 - RNA, 20 nt, Human
cccaaagcugucccuucuca

SEQ ID NO: 101495 - RNA, 22 nt, Human
cccaaaggaaaacccacugguu

SEQ ID NO: 101496 - RNA, 32 nt, Human
cccaaaggaaaauucauuuucuuugcauuauu

SEQ ID NO: 101497 - RNA, 32 nt, Human
cccaaaggaggaacucugccucucugcuucuu

SEQ ID NO: 101498 - RNA, 32 nt, Human
cccaaaggagguagaagauggggaagaugaga

SEQ ID NO: 101499 - RNA, 21 nt, Human
cccaaaggcacaagcuccugg

SEQ ID NO: 101500 - RNA, 24 nt, Human
cccaaaggcagcuccuggggacuc

SEQ ID NO: 101501 - RNA, 22 nt, Human
cccaaaggcagucuccgugguu

SEQ ID NO: 101502 - RNA, 32 nt, Human
cccaaaggcaugcagauggcugugcauguugg

SEQ ID NO: 101503 - RNA, 32 nt, Human
cccaaaggccuuucaucucaauaucugucaaa

SEQ ID NO: 101504 - RNA, 21 nt, Human
cccaaaggcucagccuggcca

SEQ ID NO: 101505 - RNA, 27 nt, Human
cccaaaggcucuuuucagagccacuua

SEQ ID NO: 101506 - RNA, 32 nt, Human
cccaaaggcugcagcauugccauaccauuccc

SEQ ID NO: 101507 - RNA, 22 nt, Human
cccaaaggcuggagcccugguu

SEQ ID NO: 101508 - RNA, 32 nt, Human
cccaaagggaaggugaguggggcaguggcagu

SEQ ID NO: 101509 - RNA, 22 nt, Human
cccaaagggcugagccuccugg

SEQ ID NO: 101510 - RNA, 32 nt, Human
cccaaagggcuggacccuccuaauccucuccu

SEQ ID NO: 101511 - RNA, 24 nt, Human
cccaaaggguugggauuaccggca

SEQ ID NO: 101512 - RNA, 32 nt, Human
cccaaaggugacacccucaccagucucauccu

SEQ ID NO: 101513 - RNA, 24 nt, Human
cccaaagguucaaggcuccaguga

SEQ ID NO: 101514 - RNA, 23 nt, Human
cccaaaguacugggacuacaggc

SEQ ID NO: 101515 - RNA, 20 nt, Human
cccaaaguacugggauuaca

SEQ ID NO: 101516 - RNA, 23 nt, Human
cccaaaguacugggauuacaggc

SEQ ID NO: 101517 - RNA, 24 nt, Human
cccaaaguacugggauuacaggca

SEQ ID NO: 101518 - RNA, 32 nt, Human
cccaaaguaggucaguagguugggguugcuga

SEQ ID NO: 101519 - RNA, 24 nt, Human
cccaaaguagugggauuucaggca

SEQ ID NO: 101520 - RNA, 23 nt, Human
cccaaaguauugggacuacaggc

SEQ ID NO: 101521 - RNA, 32 nt, Human
cccaaaguccucuacccccucacuuuuauggc

SEQ ID NO: 101522 - RNA, 22 nt, Human
cccaaaguccugggauuacagg

SEQ ID NO: 101523 - RNA, 23 nt, Human
cccaaaguccugggauuacaggc

SEQ ID NO: 101524 - RNA, 32 nt, Human
cccaaagucugucaguugauaaacaaaauauu

SEQ ID NO: 101525 - RNA, 32 nt, Human
cccaaagugagguuucuggggagaaugagggc

SEQ ID NO: 101526 - RNA, 24 nt, Human
cccaaagugaugggauuacaggca

SEQ ID NO: 101527 - RNA, 19 nt, Human
cccaaagugcacugaggaa

SEQ ID NO: 101528 - RNA, 24 nt, Human
cccaaagugcagggauuacaggca

SEQ ID NO: 101529 - RNA, 32 nt, Human
cccaaagugcagggauuacaggcacaagccac

SEQ ID NO: 101530 - RNA, 32 nt, Human
cccaaagugcagggauuacaggcaugagccac

SEQ ID NO: 101531 - RNA, 24 nt, Human
cccaaagugccaggauuacaggca

SEQ ID NO: 101532 - RNA, 26 nt, Human
cccaaagugccgccgggauuacaggc

SEQ ID NO: 101533 - RNA, 24 nt, Human
cccaaagugccgggaugacaggca

SEQ ID NO: 101534 - RNA, 23 nt, Human
cccaaagugccgggauuacaggc

SEQ ID NO: 101535 - RNA, 24 nt, Human
cccaaagugccgggauuacaggca

SEQ ID NO: 101536 - RNA, 22 nt, Human
cccaaagugcgggauuacaagc

SEQ ID NO: 101537 - RNA, 21 nt, Human
cccaaagugcuaggauaacag

SEQ ID NO: 101538 - RNA, 18 nt, Human
cccaaagugcuaggauua

SEQ ID NO: 101539 - RNA, 24 nt, Human
cccaaagugcuaggauuacacagc

SEQ ID NO: 101540 - RNA, 21 nt, Human
cccaaagugcuaggauuacag

SEQ ID NO: 101541 - RNA, 24 nt, Human
cccaaagugcuaggauuacagaca

SEQ ID NO: 101542 - RNA, 24 nt, Human
cccaaagugcuaggauuacagcgu

SEQ ID NO: 101543 - RNA, 22 nt, Human
cccaaagugcuaggauuacagg

SEQ ID NO: 101544 - RNA, 23 nt, Human
cccaaagugcuaggauuacaggc

SEQ ID NO: 101545 - RNA, 24 nt, Human
cccaaagugcuaggauuacaggca

SEQ ID NO: 101546 - RNA, 23 nt, Human
cccaaagugcuaggauuacaggu

SEQ ID NO: 101547 - RNA, 24 nt, Human
cccaaagugcuaggauuacaggua

SEQ ID NO: 101548 - RNA, 23 nt, Human
cccaaagugcuaggauuacgggu

SEQ ID NO: 101549 - RNA, 22 nt, Human
cccaaagugcuaggauuauagg

SEQ ID NO: 101550 - RNA, 23 nt, Human
cccaaagugcuaggauuauaggc

SEQ ID NO: 101551 - RNA, 24 nt, Human
cccaaagugcuaggauuauaggca

SEQ ID NO: 101552 - RNA, 21 nt, Human
cccaaagugcuaggauuccag

SEQ ID NO: 101553 - RNA, 23 nt, Human
cccaaagugcuaggauuccaggc

SEQ ID NO: 101554 - RNA, 24 nt, Human
cccaaagugcuaggguuacagaca

SEQ ID NO: 101555 - RNA, 24 nt, Human
cccaaagugcuaggguuacaggca

SEQ ID NO: 101556 - RNA, 24 nt, Human
cccaaagugcuagguuuacaggca

SEQ ID NO: 101557 - RNA, 21 nt, Human
cccaaagugcuaugauuacag

SEQ ID NO: 101558 - RNA, 24 nt, Human
cccaaagugcucaggauuacaggc

SEQ ID NO: 101559 - RNA, 24 nt, Human
cccaaagugcucggauuacagaca

SEQ ID NO: 101560 - RNA, 24 nt, Human
cccaaagugcugaaauuacaggca

SEQ ID NO: 101561 - RNA, 21 nt, Human
cccaaagugcugacauaggca

SEQ ID NO: 101562 - RNA, 23 nt, Human
cccaaagugcugacauuacaggc

SEQ ID NO: 101563 - RNA, 23 nt, Human
cccaaagugcugagauuacaagc

SEQ ID NO: 101564 - RNA, 21 nt, Human
cccaaagugcugagauuacag

SEQ ID NO: 101565 - RNA, 24 nt, Human
cccaaagugcugagauuacagaca

SEQ ID NO: 101566 - RNA, 22 nt, Human
cccaaagugcugagauuacagg

SEQ ID NO: 101567 - RNA, 23 nt, Human
cccaaagugcugagauuacaggc

SEQ ID NO: 101568 - RNA, 24 nt, Human
cccaaagugcugagauuacaggca

SEQ ID NO: 101569 - RNA, 24 nt, Human
cccaaagugcugagauuauaggca

SEQ ID NO: 101570 - RNA, 23 nt, Human
cccaaagugcugcaguuacaggc

SEQ ID NO: 101571 - RNA, 23 nt, Human
cccaaagugcugccauuacaggc

SEQ ID NO: 101572 - RNA, 24 nt, Human
cccaaagugcugcgauuacagaca

SEQ ID NO: 101573 - RNA, 23 nt, Human
cccaaagugcugcgauuacaggc

SEQ ID NO: 101574 - RNA, 24 nt, Human
cccaaagugcugcgauuacaggca

SEQ ID NO: 101575 - RNA, 32 nt, Human
cccaaagugcugcugggauuacaggcgugagc

SEQ ID NO: 101576 - RNA, 23 nt, Human
cccaaagugcuggaaccacaggc

SEQ ID NO: 101577 - RNA, 22 nt, Human
cccaaagugcuggaauuacagg

SEQ ID NO: 101578 - RNA, 23 nt, Human
cccaaagugcuggaauuacaggc

SEQ ID NO: 101579 - RNA, 24 nt, Human
cccaaagugcuggaauuacaggca

SEQ ID NO: 101580 - RNA, 24 nt, Human
cccaaagugcuggaauuacaguca

SEQ ID NO: 101581 - RNA, 24 nt, Human
cccaaagugcuggaauuacuggca

SEQ ID NO: 101582 - RNA, 22 nt, Human
cccaaagugcuggauuacaggc

SEQ ID NO: 101583 - RNA, 23 nt, Human
cccaaagugcuggauuacaggca

SEQ ID NO: 101584 - RNA, 24 nt, Human
cccaaagugcuggcacuacaggca

SEQ ID NO: 101585 - RNA, 22 nt, Human
cccaaagugcuggcauuacagg

SEQ ID NO: 101586 - RNA, 23 nt, Human
cccaaagugcuggcauuacaggc

SEQ ID NO: 101587 - RNA, 22 nt, Human
cccaaagugcugggaauacagg

SEQ ID NO: 101588 - RNA, 24 nt, Human
cccaaagugcugggaauacaggca

SEQ ID NO: 101589 - RNA, 24 nt, Human
cccaaagugcugggaauuacaggc

SEQ ID NO: 101590 - RNA, 22 nt, Human
cccaaagugcugggacuacagg

SEQ ID NO: 101591 - RNA, 23 nt, Human
cccaaagugcugggacuacaggc

SEQ ID NO: 101592 - RNA, 32 nt, Human
cccaaagugcugggacuacaggccugagcuac

SEQ ID NO: 101593 - RNA, 21 nt, Human
cccaaagugcugggaucacag

SEQ ID NO: 101594 - RNA, 23 nt, Human
cccaaagugcugggaucacaggc

SEQ ID NO: 101595 - RNA, 24 nt, Human
cccaaagugcugggaucacaggca

SEQ ID NO: 101596 - RNA, 24 nt, Human
cccaaagugcugggaugacaggca

SEQ ID NO: 101597 - RNA, 32 nt, Human
cccaaagugcugggauuaaggcgugagccacu

SEQ ID NO: 101598 - RNA, 20 nt, Human
cccaaagugcugggauuaca

SEQ ID NO: 101599 - RNA, 23 nt, Human
cccaaagugcugggauuacaagc

SEQ ID NO: 101600 - RNA, 24 nt, Human
cccaaagugcugggauuacaagca

SEQ ID NO: 101601 - RNA, 21 nt, Human
cccaaagugcugggauuacag

SEQ ID NO: 101602 - RNA, 24 nt, Human
cccaaagugcugggauuacagaca

SEQ ID NO: 101603 - RNA, 24 nt, Human
cccaaagugcugggauuacagcca

SEQ ID NO: 101604 - RNA, 22 nt, Human
cccaaagugcugggauuacagg

SEQ ID NO: 101605 - RNA, 23 nt, Human
cccaaagugcugggauuacaggc

SEQ ID NO: 101606 - RNA, 24 nt, Human
cccaaagugcugggauuacaggca

SEQ ID NO: 101607 - RNA, 24 nt, Human
cccaaagugcugggauuacaggua

SEQ ID NO: 101608 - RNA, 24 nt, Human
cccaaagugcugggauuacaguca

SEQ ID NO: 101609 - RNA, 32 nt, Human
cccaaagugcugggauuacaguugcgagccac

SEQ ID NO: 101610 - RNA, 24 nt, Human
cccaaagugcugggauuaccagca

SEQ ID NO: 101611 - RNA, 24 nt, Human
cccaaagugcugggauuaccggca

SEQ ID NO: 101612 - RNA, 22 nt, Human
cccaaagugcugggauuacggg

SEQ ID NO: 101613 - RNA, 24 nt, Human
cccaaagugcugggauuacgggca

SEQ ID NO: 101614 - RNA, 24 nt, Human
cccaaagugcugggauuacuggca

SEQ ID NO: 101615 - RNA, 24 nt, Human
cccaaagugcugggauuagaggca

SEQ ID NO: 101616 - RNA, 24 nt, Human
cccaaagugcugggauuauagaca

SEQ ID NO: 101617 - RNA, 24 nt, Human
cccaaagugcugggauuauaggca

SEQ ID NO: 101618 - RNA, 22 nt, Human
cccaaagugcugggauuccagg

SEQ ID NO: 101619 - RNA, 21 nt, Human
cccaaagugcugggauugcag

SEQ ID NO: 101620 - RNA, 22 nt, Human
cccaaagugcugggauugcagg

SEQ ID NO: 101621 - RNA, 24 nt, Human
cccaaagugcugggauugcaggca

SEQ ID NO: 101622 - RNA, 22 nt, Human
cccaaagugcugggauuguggg

SEQ ID NO: 101623 - RNA, 23 nt, Human
cccaaagugcugggcuuacaggc

SEQ ID NO: 101624 - RNA, 22 nt, Human
cccaaagugcugggguuacagg

SEQ ID NO: 101625 - RNA, 24 nt, Human
cccaaagugcugggguuacaguca

SEQ ID NO: 101626 - RNA, 22 nt, Human
cccaaagugcugggucugcagg

SEQ ID NO: 101627 - RNA, 24 nt, Human
cccaaagugcuggguuaacaggca

SEQ ID NO: 101628 - RNA, 21 nt, Human
cccaaagugcugguauuacag

SEQ ID NO: 101629 - RNA, 23 nt, Human
cccaaagugcugguauuacaggc

SEQ ID NO: 101630 - RNA, 24 nt, Human
cccaaagugcuguaauuacaggca

SEQ ID NO: 101631 - RNA, 23 nt, Human
cccaaagugcugugauuacaggc

SEQ ID NO: 101632 - RNA, 24 nt, Human
cccaaagugcugugcauacaggca

SEQ ID NO: 101633 - RNA, 24 nt, Human
cccaaagugcuguuacuacaggua

SEQ ID NO: 101634 - RNA, 24 nt, Human
cccaaagugcuuggauuacaggca

SEQ ID NO: 101635 - RNA, 21 nt, Human
cccaaaguggaagccaaguuc

SEQ ID NO: 101636 - RNA, 32 nt, Human
cccaaagugguauagaaaugcugguuuuucag

SEQ ID NO: 101637 - RNA, 23 nt, Human
cccaaaguggugggaucacaggc

SEQ ID NO: 101638 - RNA, 32 nt, Human
cccaaagugucugcuuucaagcaccacaccca

SEQ ID NO: 101639 - RNA, 24 nt, Human
cccaaaguguuagaauuacaagca

SEQ ID NO: 101640 - RNA, 23 nt, Human
cccaaaguguuaggauuacaggc

SEQ ID NO: 101641 - RNA, 24 nt, Human
cccaaaguguuaggauuacaggca

SEQ ID NO: 101642 - RNA, 32 nt, Human
cccaaaguguuaggauuacaggcaugagccac

SEQ ID NO: 101643 - RNA, 20 nt, Human
cccaaaguguucggauuaca

SEQ ID NO: 101644 - RNA, 24 nt, Human
cccaaaguguugagauuacaggca

SEQ ID NO: 101645 - RNA, 24 nt, Human
cccaaaguguugggauuacagaca

SEQ ID NO: 101646 - RNA, 22 nt, Human
cccaaaguguugggauuacagg

SEQ ID NO: 101647 - RNA, 23 nt, Human
cccaaaguguugggauuacaggc

SEQ ID NO: 101648 - RNA, 24 nt, Human
cccaaaguguugggauuacaggca

SEQ ID NO: 101649 - RNA, 24 nt, Human
cccaaaguguugggauuauaggca

SEQ ID NO: 101650 - RNA, 24 nt, Human
cccaaaguguugggauugcaggca

SEQ ID NO: 101651 - RNA, 24 nt, Human
cccaaaguucagggauuacaggca

SEQ ID NO: 101652 - RNA, 24 nt, Human
cccaaaguucugggaguacagaca

SEQ ID NO: 101653 - RNA, 24 nt, Human
cccaaaguucugggauuacaagua

SEQ ID NO: 101654 - RNA, 23 nt, Human
cccaaaguucugggauuacaggc

SEQ ID NO: 101655 - RNA, 24 nt, Human
cccaaaguucugggauuacaggca

SEQ ID NO: 101656 - RNA, 32 nt, Human
cccaaaguugcccaggcuggucucaaacucuc

SEQ ID NO: 101657 - RNA, 32 nt, Human
cccaaauaagaacagugaucuuauaaccucau

SEQ ID NO: 101658 - RNA, 32 nt, Human
cccaaauacugcacuuuuugcacagucuuagc

SEQ ID NO: 101659 - RNA, 32 nt, Human
cccaaauagaccccaucucuugcucaguugcu

SEQ ID NO: 101660 - RNA, 23 nt, Human
cccaaauagcuaggacuacaggc

SEQ ID NO: 101661 - RNA, 32 nt, Human
cccaaauaggaggaaaacacagccucccugag

SEQ ID NO: 101662 - RNA, 32 nt, Human
cccaaauaucuagauauuuucucuucaccgca

SEQ ID NO: 101663 - RNA, 32 nt, Human
cccaaauaugugcucaccagcagcaacaggcu

SEQ ID NO: 101664 - RNA, 21 nt, Human
cccaaaucaauaagaagguag

SEQ ID NO: 101665 - RNA, 32 nt, Human
cccaaauccauagcucuggacgugucccaggc

SEQ ID NO: 101666 - RNA, 32 nt, Human
cccaaauccauucaacaagggugcagccugcc

SEQ ID NO: 101667 - RNA, 32 nt, Human
cccaaaucccugggcccccucagucugggcaa

SEQ ID NO: 101668 - RNA, 32 nt, Human
cccaaaucuagggagagacuccugagccugag

SEQ ID NO: 101669 - RNA, 32 nt, Human
cccaaaucucaucugagugagucagcugaggg

SEQ ID NO: 101670 - RNA, 19 nt, Human
cccaaaucucccaaaggaa

SEQ ID NO: 101671 - RNA, 32 nt, Human
cccaaaucucucucccaguacaccaguuguuc

SEQ ID NO: 101672 - RNA, 32 nt, Human
cccaaaucuugggggagaaugaaggaaaccug

SEQ ID NO: 101673 - RNA, 32 nt, Human
cccaaaugacuccuccccuucguuggcccgcc

SEQ ID NO: 101674 - RNA, 32 nt, Human
cccaaaugagccacuuuccucuccaggugaag

SEQ ID NO: 101675 - RNA, 22 nt, Human
cccaaaugcaaaagccagagaa

SEQ ID NO: 101676 - RNA, 32 nt, Human
cccaaaugcuggcuggccuugugguccaaaua

SEQ ID NO: 101677 - RNA, 23 nt, Human
cccaaaugcugggauuacagaca

SEQ ID NO: 101678 - RNA, 32 nt, Human
cccaaauggaaaugggcagagcagagaccauc

SEQ ID NO: 101679 - RNA, 32 nt, Human
cccaaauggaaauguauucacacagggaguaa

SEQ ID NO: 101680 - RNA, 32 nt, Human
cccaaauggaguccacuuuagcacagggguuu

SEQ ID NO: 101681 - RNA, 32 nt, Human
cccaaaugggaaauuucucaggaagagacauu

SEQ ID NO: 101682 - RNA, 32 nt, Human
cccaaauguccauccacaguugaagcuacagu

SEQ ID NO: 101683 - RNA, 32 nt, Human
cccaaaugucugugcagugucagggcugcacc

SEQ ID NO: 101684 - RNA, 32 nt, Human
cccaaauguguaguguggucugggcaggcaga

SEQ ID NO: 101685 - RNA, 32 nt, Human
cccaaauucagccccacccacagagaagccuu

SEQ ID NO: 101686 - RNA, 24 nt, Human
cccaaauugccgggauuacaggca

SEQ ID NO: 101687 - RNA, 24 nt, Human
cccaaauugcugggauuacaggca

SEQ ID NO: 101688 - RNA, 32 nt, Human
cccaaauuuaaagaaguaugggaaaugagagg

SEQ ID NO: 101689 - RNA, 32 nt, Human
cccaaauuuggaguaaagaugggagaaaauaa

SEQ ID NO: 101690 - RNA, 32 nt, Human
cccaacaaaacaguaagggagcauuucaggga

SEQ ID NO: 101691 - RNA, 32 nt, Human
cccaacaaacuagaagucacacuggagagaaa

SEQ ID NO: 101692 - RNA, 32 nt, Human
cccaacaaccaccauccccauggcuucuuuua

SEQ ID NO: 101693 - RNA, 32 nt, Human
cccaacaaccguugccaccacgcccagaaacg

SEQ ID NO: 101694 - RNA, 32 nt, Human
cccaacaagcagcuggguuaggaaaaccaugg

SEQ ID NO: 101695 - RNA, 19 nt, Human
cccaacaaggggacaggac

SEQ ID NO: 101696 - RNA, 32 nt, Human
cccaacacaauccuugauuuuaccccugggaa

SEQ ID NO: 101697 - RNA, 23 nt, Human
cccaacacacgguccacagcuca

SEQ ID NO: 101698 - RNA, 32 nt, Human
cccaacacagaagauguagcaguuccugaaca

SEQ ID NO: 101699 - RNA, 32 nt, Human
cccaacacagcaagaaagcccacugaguccac

SEQ ID NO: 101700 - RNA, 32 nt, Human
cccaacacauacuguuuccaaaauuauuucua

SEQ ID NO: 101701 - RNA, 32 nt, Human
cccaacacccagguaauuuuuguauuuuuagu

SEQ ID NO: 101702 - RNA, 18 nt, Human
cccaacaccgccuuccca

SEQ ID NO: 101703 - RNA, 32 nt, Human
cccaacacuccccauucccaguugacucagcu

SEQ ID NO: 101704 - RNA, 32 nt, Human
cccaacacuguacccagcugguugggaggacc

SEQ ID NO: 101705 - RNA, 20 nt, Human
cccaacacuguccacacugc

SEQ ID NO: 101706 - RNA, 32 nt, Human
cccaacacuuagggagucaggagaaucacuug

SEQ ID NO: 101707 - RNA, 32 nt, Human
cccaacacuucaucauccaccaccuccuggag

SEQ ID NO: 101708 - RNA, 32 nt, Human
cccaacacuuuugcuuucuucuccaucucuga

SEQ ID NO: 101709 - RNA, 32 nt, Human
cccaacacuuuuuccauuucuucagagggaaa

SEQ ID NO: 101710 - RNA, 32 nt, Human
cccaacagaggaggccagugaggcagagacag

SEQ ID NO: 101711 - RNA, 24 nt, Human
cccaacagccagcccuucauccuc

SEQ ID NO: 101712 - RNA, 32 nt, Human
cccaacagcucauuuucccuaguccgccuucg

SEQ ID NO: 101713 - RNA, 19 nt, Human
cccaacagcuggacccuga

SEQ ID NO: 101714 - RNA, 22 nt, Human
cccaacagcuguuccuccccuc

SEQ ID NO: 101715 - RNA, 32 nt, Human
cccaacaggagaaagacaggcucuuuuucuuu

SEQ ID NO: 101716 - RNA, 17 nt, Human
cccaacagggccacugu

SEQ ID NO: 101717 - RNA, 32 nt, Human
cccaacagguucuagaaacacgcccuuguaca

SEQ ID NO: 101718 - RNA, 32 nt, Human
cccaacagugucgucagaggguccccagggca

SEQ ID NO: 101719 - RNA, 32 nt, Human
cccaacaguucuuccucuuucucuccaccaaa

SEQ ID NO: 101720 - RNA, 32 nt, Human
cccaacaguugcuguuccucaggccaaaguuc

SEQ ID NO: 101721 - RNA, 32 nt, Human
cccaacaguugguugucuugucuuccagggug

SEQ ID NO: 101722 - RNA, 32 nt, Human
cccaacaugauuuuggaaagauauaauuucuu

SEQ ID NO: 101723 - RNA, 32 nt, Human
cccaacaugccuuucagaaagaaaugacacaa

SEQ ID NO: 101724 - RNA, 20 nt, Human
cccaacauggccaccgggca

SEQ ID NO: 101725 - RNA, 32 nt, Human
cccaacauuacuaacaaugauacaguugcaug

SEQ ID NO: 101726 - RNA, 32 nt, Human
cccaacauucagcucagcugccucuuucuuga

SEQ ID NO: 101727 - RNA, 32 nt, Human
cccaaccaaaaccacaccauaggguuuucugc

SEQ ID NO: 101728 - RNA, 28 nt, Human
cccaaccaauaaaguaaccacuuucagc

SEQ ID NO: 101729 - RNA, 32 nt, Human
cccaaccaauaaaguaaccacuuucagcaaaa

SEQ ID NO: 101730 - RNA, 32 nt, Human
cccaaccacagugggagccagacugaauauag

SEQ ID NO: 101731 - RNA, 23 nt, Human
cccaaccaccaccuggucuccca

SEQ ID NO: 101732 - RNA, 21 nt, Human
cccaaccaccagcagcagcag

SEQ ID NO: 101733 - RNA, 18 nt, Human
cccaaccaccauccccuu

SEQ ID NO: 101734 - RNA, 32 nt, Human
cccaaccaccauuucugcuguguccuuaggau

SEQ ID NO: 101735 - RNA, 32 nt, Human
cccaaccaccuugcaccagucuucucauucuc

SEQ ID NO: 101736 - RNA, 23 nt, Human
cccaaccacuuguccacacagcu

SEQ ID NO: 101737 - RNA, 32 nt, Human
cccaaccagacagcucagguugugcaucugau

SEQ ID NO: 101738 - RNA, 24 nt, Human
cccaaccagcccagcuucuccuua

SEQ ID NO: 101739 - RNA, 22 nt, Human
cccaaccagccggaccucagca

SEQ ID NO: 101740 - RNA, 32 nt, Human
cccaaccaggaagucugaauuccaguaucugg

SEQ ID NO: 101741 - RNA, 32 nt, Human
cccaaccaggcaccucuuccuugauguuuggg

SEQ ID NO: 101742 - RNA, 32 nt, Human
cccaaccaugccaaaacauaccagagagcauu

SEQ ID NO: 101743 - RNA, 32 nt, Human
cccaacccaagugucagagaagcuggcaagag

SEQ ID NO: 101744 - RNA, 26 nt, Human
cccaacccaggcuagccagccuuuua

SEQ ID NO: 101745 - RNA, 32 nt, Human
cccaaccccagagcuucacuugcuccuucacu

SEQ ID NO: 101746 - RNA, 32 nt, Human
cccaaccccaggaaggaaggccuuggauggac

SEQ ID NO: 101747 - RNA, 32 nt, Human
cccaaccccaggcucggacuguggugccaagg

SEQ ID NO: 101748 - RNA, 32 nt, Human
cccaaccccagucccagccccaaccacguccc

SEQ ID NO: 101749 - RNA, 32 nt, Human
cccaaccccaucucagagcucagaggguacaa

SEQ ID NO: 101750 - RNA, 19 nt, Human
cccaaccccaucucugggc

SEQ ID NO: 101751 - RNA, 23 nt, Human
cccaaccccaucucugggcccag

SEQ ID NO: 101752 - RNA, 32 nt, Human
cccaaccccauugcuaacaacaugguacauuc

SEQ ID NO: 101753 - RNA, 21 nt, Human
cccaaccccauuuccucuccc

SEQ ID NO: 101754 - RNA, 21 nt, Human
cccaacccccagcccucaccc

SEQ ID NO: 101755 - RNA, 32 nt, Human
cccaacccccucgggccccaugggucaggggg

SEQ ID NO: 101756 - RNA, 32 nt, Human
cccaaccccucagagcagauucccagauuaac

SEQ ID NO: 101757 - RNA, 18 nt, Human
cccaaccccuccuuuccc

SEQ ID NO: 101758 - RNA, 32 nt, Human
cccaaccccugcccugggcugaggcauaugaa

SEQ ID NO: 101759 - RNA, 32 nt, Human
cccaaccccugcuccagccacgccaacccuuu

SEQ ID NO: 101760 - RNA, 32 nt, Human
cccaaccccuuuccucgcaccuccuuguccuc

SEQ ID NO: 101761 - RNA, 32 nt, Human
cccaacccgacugcccuaccagccugcacaug

SEQ ID NO: 101762 - RNA, 32 nt, Human
cccaacccucaccccacucugccucccuguca

SEQ ID NO: 101763 - RNA, 32 nt, Human
cccaacccucagccguuccuccaccucucagc

SEQ ID NO: 101764 - RNA, 32 nt, Human
cccaacccucauucugcagggccaccuggugu

SEQ ID NO: 101765 - RNA, 32 nt, Human
cccaacccuccaguaacccagcaggacgggga

SEQ ID NO: 101766 - RNA, 32 nt, Human
cccaacccugcgcgauggugacucugggcgcg

SEQ ID NO: 101767 - RNA, 21 nt, Human
cccaacccuggcacccagggu

SEQ ID NO: 101768 - RNA, 32 nt, Human
cccaacccuuccccacugcacacaccucagag

SEQ ID NO: 101769 - RNA, 32 nt, Human
cccaacccuucuuccagggucagggaggaaag

SEQ ID NO: 101770 - RNA, 32 nt, Human
cccaaccgaccagcaaccccaauuuuccagcc

SEQ ID NO: 101771 - RNA, 20 nt, Human
cccaaccgccgccuacccca

SEQ ID NO: 101772 - RNA, 32 nt, Human
cccaaccggucugccuuuaauuuuacccagga

SEQ ID NO: 101773 - RNA, 32 nt, Human
cccaaccuccccucguuuuugaccuuuguccc

SEQ ID NO: 101774 - RNA, 32 nt, Human
cccaaccuccuuggacugcaaacaaucuagga

SEQ ID NO: 101775 - RNA, 32 nt, Human
cccaaccucuacuacacacuuagugcuuucuc

SEQ ID NO: 101776 - RNA, 32 nt, Human
cccaaccucuacuguaaacuuucugguccgag

SEQ ID NO: 101777 - RNA, 24 nt, Human
cccaaccucuggguacccccgggu

SEQ ID NO: 101778 - RNA, 25 nt, Human
cccaaccugagagucuuuccccuuu

SEQ ID NO: 101779 - RNA, 20 nt, Human
cccaaccugccaggcuccca

SEQ ID NO: 101780 - RNA, 32 nt, Human
cccaaccugccucucaccagcucugugaccuu

SEQ ID NO: 101781 - RNA, 20 nt, Human
cccaaccuggagugcagugg

SEQ ID NO: 101782 - RNA, 32 nt, Human
cccaaccuggcuugacaggcuuggucucugca

SEQ ID NO: 101783 - RNA, 32 nt, Human
cccaaccugggcgacagagccagacucugucu

SEQ ID NO: 101784 - RNA, 25 nt, Human
cccaaccugucccacccccgugccc

SEQ ID NO: 101785 - RNA, 32 nt, Human
cccaaccuucccccuaccuccuggcccuuuuu

SEQ ID NO: 101786 - RNA, 31 nt, Human
cccaacgagcacuucugacaaugagaccaga

SEQ ID NO: 101787 - RNA, 32 nt, Human
cccaacgauggguaacgccagcuuuggcucca

SEQ ID NO: 101788 - RNA, 23 nt, Human
cccaacgccagcccuucauccuu

SEQ ID NO: 101789 - RNA, 19 nt, Human
cccaacgcccccugaggaa

SEQ ID NO: 101790 - RNA, 32 nt, Human
cccaacgcggucugguuuuccagccugggagu

SEQ ID NO: 101791 - RNA, 32 nt, Human
cccaacggagagcuagggagaaaggagacucc

SEQ ID NO: 101792 - RNA, 32 nt, Human
cccaacgggaaaggaaacgccccgggcaaagg

SEQ ID NO: 101793 - RNA, 32 nt, Human
cccaacgggaggauggcuucacagcagagcca

SEQ ID NO: 101794 - RNA, 32 nt, Human
cccaacgugauucuccccagcucugagucucu

SEQ ID NO: 101795 - RNA, 24 nt, Human
cccaacgugcugggauuacaggca

SEQ ID NO: 101796 - RNA, 32 nt, Human
cccaacguuuuccuuuccuucucccauaaaca

SEQ ID NO: 101797 - RNA, 32 nt, Human
cccaacuaaagugcuugaggcuaccucuaccu

SEQ ID NO: 101798 - RNA, 24 nt, Human
cccaacuaagcacuucccugagga

SEQ ID NO: 101799 - RNA, 21 nt, Human
cccaacuaagucccuucaucu

SEQ ID NO: 101800 - RNA, 24 nt, Human
cccaacuaagugggacuacaggca

SEQ ID NO: 101801 - RNA, 32 nt, Human
cccaacuacaucuucccugcuuacucucugcc

SEQ ID NO: 101802 - RNA, 20 nt, Human
cccaacuacguccagcgcug

SEQ ID NO: 101803 - RNA, 32 nt, Human
cccaacuagaggaagcaaggaggcagagacca

SEQ ID NO: 101804 - RNA, 19 nt, Human
cccaacuagaguguagugg

SEQ ID NO: 101805 - RNA, 23 nt, Human
cccaacucacaacaggcuggaug

SEQ ID NO: 101806 - RNA, 18 nt, Human
cccaacucacccaugagg

SEQ ID NO: 101807 - RNA, 32 nt, Human
cccaacucagacacaaagccacagacaauaug

SEQ ID NO: 101808 - RNA, 32 nt, Human
cccaacucaugcugucaggccauuuccaggcc

SEQ ID NO: 101809 - RNA, 32 nt, Human
cccaacucauucuuacugcacaguucacuuua

SEQ ID NO: 101810 - RNA, 32 nt, Human
cccaacucauuuaaaauaggaggaaucacuuu

SEQ ID NO: 101811 - RNA, 24 nt, Human
cccaacuccaaacaauucugauga

SEQ ID NO: 101812 - RNA, 17 nt, Human
cccaacuccagggaccu

SEQ ID NO: 101813 - RNA, 19 nt, Human
cccaacucccaaaagcuag

SEQ ID NO: 101814 - RNA, 32 nt, Human
cccaacucccuguucuggcuccugggugggga

SEQ ID NO: 101815 - RNA, 21 nt, Human
cccaacucccuucugcuuguc

SEQ ID NO: 101816 - RNA, 32 nt, Human
cccaacucucugagagaagcagaccagaaaga

SEQ ID NO: 101817 - RNA, 32 nt, Human
cccaacucugcagggcuucucucccugccacc

SEQ ID NO: 101818 - RNA, 32 nt, Human
cccaacucugccuuccuggaacuaggccugcg

SEQ ID NO: 101819 - RNA, 32 nt, Human
cccaacucuggcucugccaccugcugcuccug

SEQ ID NO: 101820 - RNA, 32 nt, Human
cccaacucuguggggcugagcaacauuuuuac

SEQ ID NO: 101821 - RNA, 27 nt, Human
cccaacugaaacaccagaagguuugga

SEQ ID NO: 101822 - RNA, 32 nt, Human
cccaacugaagcugcaucucaaagccgaagau

SEQ ID NO: 101823 - RNA, 19 nt, Human
cccaacugacccugaagaa

SEQ ID NO: 101824 - RNA, 19 nt, Human
cccaacugagcacaccauc

SEQ ID NO: 101825 - RNA, 32 nt, Human
cccaacugccggaaggugaaaguguucuguga

SEQ ID NO: 101826 - RNA, 17 nt, Human
cccaacugccugccuua

SEQ ID NO: 101827 - RNA, 32 nt, Human
cccaacugcugauuuuacagccccagggaaga

SEQ ID NO: 101828 - RNA, 32 nt, Human
cccaacugcugucugcucagguguagcccgcg

SEQ ID NO: 101829 - RNA, 23 nt, Human
cccaacuggaggguagguuagaa

SEQ ID NO: 101830 - RNA, 22 nt, Human
cccaacuggcuuuaaaauugaa

SEQ ID NO: 101831 - RNA, 32 nt, Human
cccaacuggggaagagauggcagagggucccc

SEQ ID NO: 101832 - RNA, 24 nt, Human
cccaacugggggcaaagguuugaa

SEQ ID NO: 101833 - RNA, 22 nt, Human
cccaacugggguugcgucugag

SEQ ID NO: 101834 - RNA, 18 nt, Human
cccaacugggugcagugg

SEQ ID NO: 101835 - RNA, 23 nt, Human
cccaacugguuuaaagcccugaa

SEQ ID NO: 101836 - RNA, 32 nt, Human
cccaacuguaccacgggcaugaggagcugaag

SEQ ID NO: 101837 - RNA, 32 nt, Human
cccaacugucucagguacauguuaguguuuaa

SEQ ID NO: 101838 - RNA, 24 nt, Human
cccaacuguguggaggcugaguga

SEQ ID NO: 101839 - RNA, 23 nt, Human
cccaacuuagagggugguugggg

SEQ ID NO: 101840 - RNA, 21 nt, Human
cccaacuuagauugccuucug

SEQ ID NO: 101841 - RNA, 23 nt, Human
cccaacuuagauugccuucuggg

SEQ ID NO: 101842 - RNA, 32 nt, Human
cccaacuuagccacgucuggccuguguccuug

SEQ ID NO: 101843 - RNA, 32 nt, Human
cccaacuucauggaggccagaagacuuuacuu

SEQ ID NO: 101844 - RNA, 32 nt, Human
cccaacuuccagggagacugaauuucuucugc

SEQ ID NO: 101845 - RNA, 32 nt, Human
cccaacuuccuugccacaagcuucccaggcuu

SEQ ID NO: 101846 - RNA, 32 nt, Human
cccaacuucuccccggcagcucugccucccua

SEQ ID NO: 101847 - RNA, 20 nt, Human
cccaacuugagacuacucug

SEQ ID NO: 101848 - RNA, 32 nt, Human
cccaacuugcagcugcccaccucacccucagc

SEQ ID NO: 101849 - RNA, 24 nt, Human
cccaacuugggaaacccucugggg

SEQ ID NO: 101850 - RNA, 24 nt, Human
cccaacuuggucccugcccuaggg

SEQ ID NO: 101851 - RNA, 32 nt, Human
cccaacuuuagcaacucucacucuacugaucc

SEQ ID NO: 101852 - RNA, 20 nt, Human
cccaacuuucccccuccuca

SEQ ID NO: 101853 - RNA, 32 nt, Human
cccaacuuucuuucccacucuucucugggacu

SEQ ID NO: 101854 - RNA, 32 nt, Human
cccaagaaaaagagagggcauggguugcggag

SEQ ID NO: 101855 - RNA, 25 nt, Human
cccaagaaaacacccauuuccucuu

SEQ ID NO: 101856 - RNA, 21 nt, Human
cccaagaaaauuuuuccucuu

SEQ ID NO: 101857 - RNA, 32 nt, Human
cccaagaaaccagggacuuacgcauuuggcca

SEQ ID NO: 101858 - RNA, 32 nt, Human
cccaagaaacguauacuuuaacaacaaaggaa

SEQ ID NO: 101859 - RNA, 32 nt, Human
cccaagaagagucccagccccacgccggcuac

SEQ ID NO: 101860 - RNA, 32 nt, Human
cccaagaagcgcgggucacaaggagagggguc

SEQ ID NO: 101861 - RNA, 32 nt, Human
cccaagaagcugaauuggggugcagugccgcc

SEQ ID NO: 101862 - RNA, 24 nt, Human
cccaagaagcugggauuacaggca

SEQ ID NO: 101863 - RNA, 18 nt, Human
cccaagaaggccaugagg

SEQ ID NO: 101864 - RNA, 32 nt, Human
cccaagaaguggagguugcagugagccaagau

SEQ ID NO: 101865 - RNA, 32 nt, Human
cccaagacacccccaacagauaccagcaugua

SEQ ID NO: 101866 - RNA, 32 nt, Human
cccaagacaccgcucagccaugaagaugcauu

SEQ ID NO: 101867 - RNA, 32 nt, Human
cccaagacaccuuucagccucuuuacaaccuc

SEQ ID NO: 101868 - RNA, 32 nt, Human
cccaagacagaaguacuuggaggagccagcug

SEQ ID NO: 101869 - RNA, 26 nt, Human
cccaagacauggggacuuugcaguga

SEQ ID NO: 101870 - RNA, 32 nt, Human
cccaagacauggggacuuugcagugagcaaug

SEQ ID NO: 101871 - RNA, 32 nt, Human
cccaagaccacagccagguaagggcggggcag

SEQ ID NO: 101872 - RNA, 32 nt, Human
cccaagacccgccaggcacaccugccagagug

SEQ ID NO: 101873 - RNA, 32 nt, Human
cccaagaccuggaggcucucuccagcugcuga

SEQ ID NO: 101874 - RNA, 32 nt, Human
cccaagacgggaacuccuccuuccugcuucag

SEQ ID NO: 101875 - RNA, 32 nt, Human
cccaagacuagugugcuuucugcuacacugcu

SEQ ID NO: 101876 - RNA, 32 nt, Human
cccaagacucaagagcuccugucucaccagug

SEQ ID NO: 101877 - RNA, 32 nt, Human
cccaagacugggugagagucuuggcagagccu

SEQ ID NO: 101878 - RNA, 21 nt, Human
cccaagagaaaccccucuggg

SEQ ID NO: 101879 - RNA, 32 nt, Human
cccaagagacaggcccagagccuaaaggcaag

SEQ ID NO: 101880 - RNA, 32 nt, Human
cccaagagacaguccugaugggcacaggcugc

SEQ ID NO: 101881 - RNA, 32 nt, Human
cccaagagagcagaaaagggauguaguugcca

SEQ ID NO: 101882 - RNA, 32 nt, Human
cccaagagaggaagcagagggaggcggaagcg

SEQ ID NO: 101883 - RNA, 32 nt, Human
cccaagagcccaugggucggggaguggguuug

SEQ ID NO: 101884 - RNA, 23 nt, Human
cccaagagcuccugggagcacca

SEQ ID NO: 101885 - RNA, 32 nt, Human
cccaagagcugcagcgaaguugcaggaugcaa

SEQ ID NO: 101886 - RNA, 32 nt, Human
cccaagaggagaaggaaugcgaaagaggauuu

SEQ ID NO: 101887 - RNA, 31 nt, Human
cccaagaggagcagagaaaacuggaagaaga

SEQ ID NO: 101888 - RNA, 21 nt, Human
cccaagaggcacuagcugggg

SEQ ID NO: 101889 - RNA, 24 nt, Human
cccaagaggcagaggaugcaauga

SEQ ID NO: 101890 - RNA, 24 nt, Human
cccaagaggcagaggucgcaguga

SEQ ID NO: 101891 - RNA, 21 nt, Human
cccaagaggcagagguugagu

SEQ ID NO: 101892 - RNA, 23 nt, Human
cccaagaggcagagguugaguaa

SEQ ID NO: 101893 - RNA, 21 nt, Human
cccaagaggcagagguugcag

SEQ ID NO: 101894 - RNA, 24 nt, Human
cccaagaggcagagguuguaauga

SEQ ID NO: 101895 - RNA, 24 nt, Human
cccaagaggcagaguuugcaguga

SEQ ID NO: 101896 - RNA, 32 nt, Human
cccaagaggcagaguuugcagugagcugagau

SEQ ID NO: 101897 - RNA, 24 nt, Human
cccaagaggcggagacugcaguga

SEQ ID NO: 101898 - RNA, 32 nt, Human
cccaagaggcggagguugaguaagcugagaac

SEQ ID NO: 101899 - RNA, 32 nt, Human
cccaagaggcggagguugcagugagccaagau

SEQ ID NO: 101900 - RNA, 23 nt, Human
cccaagaggcggagguuguggug

SEQ ID NO: 101901 - RNA, 24 nt, Human
cccaagaggcggagguugugguga

SEQ ID NO: 101902 - RNA, 32 nt, Human
cccaagaggcggagguuguggugagccgagau

SEQ ID NO: 101903 - RNA, 22 nt, Human
cccaagaggcuagccccagggu

SEQ ID NO: 101904 - RNA, 20 nt, Human
cccaagaggcuccugaggaa

SEQ ID NO: 101905 - RNA, 32 nt, Human
cccaagagggugcuucgagggugaggacuucu

SEQ ID NO: 101906 - RNA, 24 nt, Human
cccaagagguacuggaagagccag

SEQ ID NO: 101907 - RNA, 24 nt, Human
cccaagagguagagguugcaguga

SEQ ID NO: 101908 - RNA, 32 nt, Human
cccaagagguagagguugcagugagccaagau

SEQ ID NO: 101909 - RNA, 24 nt, Human
cccaagaggucaaggcuucaguga

SEQ ID NO: 101910 - RNA, 32 nt, Human
cccaagaggucaaggcuucagugagccaugau

SEQ ID NO: 101911 - RNA, 23 nt, Human
cccaagagguccaaggcugcagu

SEQ ID NO: 101912 - RNA, 25 nt, Human
cccaagagguccaaggcugcaguga

SEQ ID NO: 101913 - RNA, 32 nt, Human
cccaagagguccaaggcugcagugagccaugu

SEQ ID NO: 101914 - RNA, 32 nt, Human
cccaagagguccaggcugcagccugggugaca

SEQ ID NO: 101915 - RNA, 22 nt, Human
cccaagaggucgaggcugcagu

SEQ ID NO: 101916 - RNA, 24 nt, Human
cccaagaggucgaggcugcaguga

SEQ ID NO: 101917 - RNA, 32 nt, Human
cccaagaggucgaggcugcagugagccaagau

SEQ ID NO: 101918 - RNA, 32 nt, Human
cccaagaggugcaggcacugagccucucagga

SEQ ID NO: 101919 - RNA, 24 nt, Human
cccaagagguggagguuacaguga

SEQ ID NO: 101920 - RNA, 32 nt, Human
cccaagagguggagguuacagugagcagagau

SEQ ID NO: 101921 - RNA, 23 nt, Human
cccaagagguggagguugcggug

SEQ ID NO: 101922 - RNA, 24 nt, Human
cccaagagguggagguugcgguga

SEQ ID NO: 101923 - RNA, 24 nt, Human
cccaagagguugaggcugcaguga

SEQ ID NO: 101924 - RNA, 32 nt, Human
cccaagagguugaggcugcagugagccaugau

SEQ ID NO: 101925 - RNA, 23 nt, Human
cccaagaguaugcauucuuacca

SEQ ID NO: 101926 - RNA, 24 nt, Human
cccaagaguccaaggcugcaguga

SEQ ID NO: 101927 - RNA, 32 nt, Human
cccaagaguuagaacaguuggauacaggagaa

SEQ ID NO: 101928 - RNA, 24 nt, Human
cccaagaguucaaggcugcaguga

SEQ ID NO: 101929 - RNA, 23 nt, Human
cccaagaguugaggcuucaguga

SEQ ID NO: 101930 - RNA, 22 nt, Human
cccaagaguuggccucgcagga

SEQ ID NO: 101931 - RNA, 31 nt, Human
cccaagauggaggcuaaucacucugaacagc

SEQ ID NO: 101932 - RNA, 31 nt, Human
cccaagauggccaggaacugcucugagugca

SEQ ID NO: 101933 - RNA, 31 nt, Human
cccaagaugucgcagacggccauguccgaaa

SEQ ID NO: 101934 - RNA, 32 nt, Human
cccaagauguugauuuuuacuguguuuuauaa

SEQ ID NO: 101935 - RNA, 23 nt, Human
cccaagcaaacacagggugcuuc

SEQ ID NO: 101936 - RNA, 32 nt, Human
cccaagcaacaucucagcaucucuuaaaguug

SEQ ID NO: 101937 - RNA, 23 nt, Human
cccaagcaagccagugagcagcc

SEQ ID NO: 101938 - RNA, 32 nt, Human
cccaagcaauauagcaagaccuccaucucuac

SEQ ID NO: 101939 - RNA, 32 nt, Human
cccaagcacagcccugacuaggaugacagcag

SEQ ID NO: 101940 - RNA, 32 nt, Human
cccaagcacaugcacacauaaacacacacgua

SEQ ID NO: 101941 - RNA, 32 nt, Human
cccaagcaccggugcagccaggaccacccgcu

SEQ ID NO: 101942 - RNA, 24 nt, Human
cccaagcaccugggauuacaagca

SEQ ID NO: 101943 - RNA, 32 nt, Human
cccaagcaccuuggccuccucucagcucgccg

SEQ ID NO: 101944 - RNA, 32 nt, Human
cccaagcagacacaacagcagcacagaggucu

SEQ ID NO: 101945 - RNA, 23 nt, Human
cccaagcagacaccacgugcucc

SEQ ID NO: 101946 - RNA, 32 nt, Human
cccaagcagagcuggagagagauggccuaagg

SEQ ID NO: 101947 - RNA, 32 nt, Human
cccaagcagcaacgagcaacaaucggaaacca

SEQ ID NO: 101948 - RNA, 32 nt, Human
cccaagcagcauucagcacaccccaagggaca

SEQ ID NO: 101949 - RNA, 32 nt, Human
cccaagcagccgcggccgcaguggaggcuaga

SEQ ID NO: 101950 - RNA, 24 nt, Human
cccaagcagccguuccccgacucc

SEQ ID NO: 101951 - RNA, 32 nt, Human
cccaagcagcugggacuacagacaucugaaug

SEQ ID NO: 101952 - RNA, 32 nt, Human
cccaagcaguaggucugugcucucccugucuc

SEQ ID NO: 101953 - RNA, 32 nt, Human
cccaagccaagccaucgcaaccccugugacuu

SEQ ID NO: 101954 - RNA, 32 nt, Human
cccaagccaaugcagacacugaccucaagacc

SEQ ID NO: 101955 - RNA, 32 nt, Human
cccaagccacauugcaaccaccucuuuuucuc

SEQ ID NO: 101956 - RNA, 28 nt, Human
cccaagccacugcacuucggaggggcug

SEQ ID NO: 101957 - RNA, 20 nt, Human
cccaagccagagugcagugg

SEQ ID NO: 101958 - RNA, 22 nt, Human
cccaagccagagugcaguggug

SEQ ID NO: 101959 - RNA, 32 nt, Human
cccaagccagcaccuuugguaaauaaagcagc

SEQ ID NO: 101960 - RNA, 32 nt, Human
cccaagcccacacccacaggggcucacugccc

SEQ ID NO: 101961 - RNA, 32 nt, Human
cccaagcccaccaggccaggaugcaggcaucc

SEQ ID NO: 101962 - RNA, 32 nt, Human
cccaagcccagagcacagcaauaaggucggcc

SEQ ID NO: 101963 - RNA, 21 nt, Human
cccaagcccagcccugugccc

SEQ ID NO: 101964 - RNA, 32 nt, Human
cccaagcccagcccuguggugggugaauggga

SEQ ID NO: 101965 - RNA, 32 nt, Human
cccaagcccaggaagucaagaaugcacugagc

SEQ ID NO: 101966 - RNA, 32 nt, Human
cccaagcccaggaguccuagcugaggcugcac

SEQ ID NO: 101967 - RNA, 32 nt, Human
cccaagcccaggaguuugaggcugcagugagu

SEQ ID NO: 101968 - RNA, 23 nt, Human
cccaagcccaggcugacugcccc

SEQ ID NO: 101969 - RNA, 32 nt, Human
cccaagcccauaaaugggaagggagacauggg

SEQ ID NO: 101970 - RNA, 17 nt, Human
cccaagcccccaacgcc

SEQ ID NO: 101971 - RNA, 21 nt, Human
cccaagcccccuccacucccu

SEQ ID NO: 101972 - RNA, 21 nt, Human
cccaagccccucccucuggcc

SEQ ID NO: 101973 - RNA, 24 nt, Human
cccaagcccucucgacugccccua

SEQ ID NO: 101974 - RNA, 32 nt, Human
cccaagcccucugguacucagggagcuggcug

SEQ ID NO: 101975 - RNA, 19 nt, Human
cccaagcccugccugccuc

SEQ ID NO: 101976 - RNA, 19 nt, Human
cccaagcccuuccuccccu

SEQ ID NO: 101977 - RNA, 32 nt, Human
cccaagcccuuccuccccuccaucaagaucuu

SEQ ID NO: 101978 - RNA, 18 nt, Human
cccaagccucaggaugga

SEQ ID NO: 101979 - RNA, 32 nt, Human
cccaagccucuucuaaaaaccauguugaauga

SEQ ID NO: 101980 - RNA, 22 nt, Human
cccaagccugccccgcuaccca

SEQ ID NO: 101981 - RNA, 32 nt, Human
cccaagccugcugggucucccuucccaguauc

SEQ ID NO: 101982 - RNA, 32 nt, Human
cccaagccugugguuugccucaguuugggugg

SEQ ID NO: 101983 - RNA, 32 nt, Human
cccaagccuucaacagaagcugugcugccacg

SEQ ID NO: 101984 - RNA, 20 nt, Human
cccaagccuucuccuuuccc

SEQ ID NO: 101985 - RNA, 18 nt, Human
cccaagcgccaccugcua

SEQ ID NO: 101986 - RNA, 20 nt, Human
cccaagcgcccuggccccca

SEQ ID NO: 101987 - RNA, 22 nt, Human
cccaagcgcucccagccagcuu

SEQ ID NO: 101988 - RNA, 32 nt, Human
cccaagcggaggaggagaaaaaggaauaagaa

SEQ ID NO: 101989 - RNA, 32 nt, Human
cccaagcggccacccgggccucagggaccccu

SEQ ID NO: 101990 - RNA, 32 nt, Human
cccaagcggccucagaagucccagggagugga

SEQ ID NO: 101991 - RNA, 32 nt, Human
cccaagcggugucucucauccugacuggggau

SEQ ID NO: 101992 - RNA, 31 nt, Human
cccaagcgugagagagugacugacacuuggu

SEQ ID NO: 101993 - RNA, 32 nt, Human
cccaagcuaccccagggggcucagaggaagaa

SEQ ID NO: 101994 - RNA, 32 nt, Human
cccaagcuaccucuaccaacccucucucucca

SEQ ID NO: 101995 - RNA, 20 nt, Human
cccaagcuagagugcagugg

SEQ ID NO: 101996 - RNA, 32 nt, Human
cccaagcuaguuucaaacuccugggcucaagc

SEQ ID NO: 101997 - RNA, 19 nt, Human
cccaagcuccaggggucuu

SEQ ID NO: 101998 - RNA, 23 nt, Human
cccaagcuccccuccccaagcuc

SEQ ID NO: 101999 - RNA, 32 nt, Human
cccaagcuccucacgugccuccuccccacagu

SEQ ID NO: 102000 - RNA, 32 nt, Human
cccaagcucggaucacaugaaggagacagcag

SEQ ID NO: 102001 - RNA, 18 nt, Human
cccaagcucggggccaug

SEQ ID NO: 102002 - RNA, 20 nt, Human
cccaagcucucaggccagcu

SEQ ID NO: 102003 - RNA, 32 nt, Human
cccaagcugagaagcugagagcuggaggacaa

SEQ ID NO: 102004 - RNA, 32 nt, Human
cccaagcugcagagcccagggaagagcagcuc

SEQ ID NO: 102005 - RNA, 32 nt, Human
cccaagcugcaggccucaggcccagccaucuc

SEQ ID NO: 102006 - RNA, 32 nt, Human
cccaagcuggaguacaguagugcaaucucagc

SEQ ID NO: 102007 - RNA, 20 nt, Human
cccaagcuggaguccagugg

SEQ ID NO: 102008 - RNA, 19 nt, Human
cccaagcuggagugcaaug

SEQ ID NO: 102009 - RNA, 32 nt, Human
cccaagcuggagugcacuggcaugauauuggc

SEQ ID NO: 102010 - RNA, 19 nt, Human
cccaagcuggagugcagug

SEQ ID NO: 102011 - RNA, 20 nt, Human
cccaagcuggagugcaguga

SEQ ID NO: 102012 - RNA, 20 nt, Human
cccaagcuggagugcagugg

SEQ ID NO: 102013 - RNA, 21 nt, Human
cccaagcuggagugcaguggc

SEQ ID NO: 102014 - RNA, 22 nt, Human
cccaagcuggagugcaguggug

SEQ ID NO: 102015 - RNA, 32 nt, Human
cccaagcuggccacagaugccacuacuucugu

SEQ ID NO: 102016 - RNA, 32 nt, Human
cccaagcugggagucaagucaccugcagauuu

SEQ ID NO: 102017 - RNA, 32 nt, Human
cccaagcuggucuggaacuccugggcucaagc

SEQ ID NO: 102018 - RNA, 32 nt, Human
cccaagcuguccauuucugugauggguuuuga

SEQ ID NO: 102019 - RNA, 32 nt, Human
cccaagcuuaccaccugcacccggagagcugu

SEQ ID NO: 102020 - RNA, 32 nt, Human
cccaagcuucuacacagcaaagcugcuacacu

SEQ ID NO: 102021 - RNA, 32 nt, Human
cccaagcuugaauuuucauucugccauugacu

SEQ ID NO: 102022 - RNA, 32 nt, Human
cccaaggaaaccuaaucaguacagugggaaac

SEQ ID NO: 102023 - RNA, 20 nt, Human
cccaaggaaccccugguguc

SEQ ID NO: 102024 - RNA, 32 nt, Human
cccaaggaacugcucccaccucagcacgugga

SEQ ID NO: 102025 - RNA, 24 nt, Human
cccaaggaacuggaucacccaaca

SEQ ID NO: 102026 - RNA, 21 nt, Human
cccaaggaaggccacuccaca

SEQ ID NO: 102027 - RNA, 32 nt, Human
cccaaggaauacagaagugcucuuauuaccag

SEQ ID NO: 102028 - RNA, 32 nt, Human
cccaaggacaugggacaggcaaagugugagcc

SEQ ID NO: 102029 - RNA, 15 nt, Human
cccaaggaccaggug

SEQ ID NO: 102030 - RNA, 22 nt, Human
cccaaggacccagcccucgccu

SEQ ID NO: 102031 - RNA, 32 nt, Human
cccaaggacccgauuccugggcuaggaaagag

SEQ ID NO: 102032 - RNA, 19 nt, Human
cccaaggacccugccagcc

SEQ ID NO: 102033 - RNA, 24 nt, Human
cccaaggacuuggccauccccuca

SEQ ID NO: 102034 - RNA, 32 nt, Human
cccaaggagacacccagacccuuccagcacgg

SEQ ID NO: 102035 - RNA, 26 nt, Human
cccaaggagaggacagggcacagaga

SEQ ID NO: 102036 - RNA, 25 nt, Human
cccaaggagaggggagcagagccgg

SEQ ID NO: 102037 - RNA, 32 nt, Human
cccaaggagaggggagcagagccggaguuggg

SEQ ID NO: 102038 - RNA, 23 nt, Human
cccaaggagcagcagcggagcgu

SEQ ID NO: 102039 - RNA, 24 nt, Human
cccaaggagcugggauuacaggca

SEQ ID NO: 102040 - RNA, 32 nt, Human
cccaaggaggagagaagagaagggaagccccg

SEQ ID NO: 102041 - RNA, 32 nt, Human
cccaaggaggcuggacaagaggcucaggucag

SEQ ID NO: 102042 - RNA, 32 nt, Human
cccaaggaggguacacaacuagcaccauucuu

SEQ ID NO: 102043 - RNA, 25 nt, Human
cccaaggaggucaaggcuguaguga

SEQ ID NO: 102044 - RNA, 21 nt, Human
cccaaggagucuuggacugca

SEQ ID NO: 102045 - RNA, 32 nt, Human
cccaaggaucacugcacccagcccaaggucuu

SEQ ID NO: 102046 - RNA, 32 nt, Human
cccaaggaugucugccacaccucuccaagccc

SEQ ID NO: 102047 - RNA, 32 nt, Human
cccaaggcaggagguacaccagcuggacaaau

SEQ ID NO: 102048 - RNA, 32 nt, Human
cccaaggcauccucugugucuccuacuaggga

SEQ ID NO: 102049 - RNA, 32 nt, Human
cccaaggcaugcuguggagagacuucaccugc

SEQ ID NO: 102050 - RNA, 22 nt, Human
cccaaggccagcucccaucuca

SEQ ID NO: 102051 - RNA, 32 nt, Human
cccaaggccaggaguucaagaccagccuggcc

SEQ ID NO: 102052 - RNA, 21 nt, Human
cccaaggccaggugucucuaa

SEQ ID NO: 102053 - RNA, 22 nt, Human
cccaaggccagucggccuggga

SEQ ID NO: 102054 - RNA, 23 nt, Human
cccaaggccagucggccugggaa

SEQ ID NO: 102055 - RNA, 21 nt, Human
cccaaggcccgggcggcgggg

SEQ ID NO: 102056 - RNA, 32 nt, Human
cccaaggcccucagaagcagauuauuccuguu

SEQ ID NO: 102057 - RNA, 32 nt, Human
cccaaggccgcggccccgacgcugggcccggg

SEQ ID NO: 102058 - RNA, 32 nt, Human
cccaaggccugaaggguugagaacagacagcu

SEQ ID NO: 102059 - RNA, 32 nt, Human
cccaaggccugcagaagccuccuggccuggcu

SEQ ID NO: 102060 - RNA, 32 nt, Human
cccaaggccuugcccaguggcaggggaaaggg

SEQ ID NO: 102061 - RNA, 22 nt, Human
cccaaggcggagcuugcaguga

SEQ ID NO: 102062 - RNA, 19 nt, Human
cccaaggcggagugcagug

SEQ ID NO: 102063 - RNA, 23 nt, Human
cccaaggcuaaaggcagagccag

SEQ ID NO: 102064 - RNA, 32 nt, Human
cccaaggcucacugcagcgcgcuccugacccc

SEQ ID NO: 102065 - RNA, 32 nt, Human
cccaaggcuccccucacagccucuccuuugcu

SEQ ID NO: 102066 - RNA, 32 nt, Human
cccaaggcugccuccagccccagcaacccggc

SEQ ID NO: 102067 - RNA, 19 nt, Human
cccaaggcuggagugcagu

SEQ ID NO: 102068 - RNA, 20 nt, Human
cccaaggcuggagugcagug

SEQ ID NO: 102069 - RNA, 21 nt, Human
cccaaggcuggagugcagugg

SEQ ID NO: 102070 - RNA, 32 nt, Human
cccaaggcuggcaaccugccucccauugccca

SEQ ID NO: 102071 - RNA, 32 nt, Human
cccaaggcuggcacagacuugagcaugggccg

SEQ ID NO: 102072 - RNA, 32 nt, Human
cccaagggacacaccuucccuggcauaaaggg

SEQ ID NO: 102073 - RNA, 32 nt, Human
cccaagggacuccggggucagguggagcaggc

SEQ ID NO: 102074 - RNA, 32 nt, Human
cccaagggagcagagggaggagaggugagggc

SEQ ID NO: 102075 - RNA, 23 nt, Human
cccaagggagcggccacagccca

SEQ ID NO: 102076 - RNA, 32 nt, Human
cccaagggaggaagcagagggaggcagaagcg

SEQ ID NO: 102077 - RNA, 32 nt, Human
cccaagggagguccccacagagccagagugcc

SEQ ID NO: 102078 - RNA, 32 nt, Human
cccaagggcagguggagaguccagggaggcag

SEQ ID NO: 102079 - RNA, 20 nt, Human
cccaagggccacggcuggga

SEQ ID NO: 102080 - RNA, 32 nt, Human
cccaagggccacucuugcccuggagaucuugg

SEQ ID NO: 102081 - RNA, 32 nt, Human
cccaagggcccaggcuguggcugacacauaga

SEQ ID NO: 102082 - RNA, 32 nt, Human
cccaagggccccugggcugugcccagguaacu

SEQ ID NO: 102083 - RNA, 23 nt, Human
cccaagggcccugggggcagcca

SEQ ID NO: 102084 - RNA, 32 nt, Human
cccaagggccgcaaguggcgugucggccgguc

SEQ ID NO: 102085 - RNA, 32 nt, Human
cccaagggccuggccugagcugggaugauugg

SEQ ID NO: 102086 - RNA, 17 nt, Human
cccaagggcuccuaccc

SEQ ID NO: 102087 - RNA, 32 nt, Human
cccaagggcugacauggugugagugugugggu

SEQ ID NO: 102088 - RNA, 32 nt, Human
cccaaggggaugggcccaggaggcagcugggu

SEQ ID NO: 102089 - RNA, 32 nt, Human
cccaaggggccagaaauucccaaguuggucac

SEQ ID NO: 102090 - RNA, 22 nt, Human
cccaaggggccuccggcugggg

SEQ ID NO: 102091 - RNA, 20 nt, Human
cccaagggggaauuagggga

SEQ ID NO: 102092 - RNA, 32 nt, Human
cccaaggggucgggcuucaagccuugacuucu

SEQ ID NO: 102093 - RNA, 24 nt, Human
cccaagggguggggguugcaguga

SEQ ID NO: 102094 - RNA, 27 nt, Human
cccaagggucagcccucuugacuguca

SEQ ID NO: 102095 - RNA, 19 nt, Human
cccaagggucugaggccag

SEQ ID NO: 102096 - RNA, 32 nt, Human
cccaagggugaguggccaauggggagcuguuu

SEQ ID NO: 102097 - RNA, 32 nt, Human
cccaagggugcccuuugggucccgguucagac

SEQ ID NO: 102098 - RNA, 32 nt, Human
cccaagggugugugugacuacaaguacacacu

SEQ ID NO: 102099 - RNA, 32 nt, Human
cccaaggguuaaagccacccagcauucacgaa

SEQ ID NO: 102100 - RNA, 20 nt, Human
cccaagguagagugcagugg

SEQ ID NO: 102101 - RNA, 25 nt, Human
cccaaggucagaggaguggcccuca

SEQ ID NO: 102102 - RNA, 32 nt, Human
cccaaggucaucugauaauuucacagaugcug

SEQ ID NO: 102103 - RNA, 32 nt, Human
cccaaggucaugcccugaccacagcugcccuu

SEQ ID NO: 102104 - RNA, 32 nt, Human
cccaaggucauugagcuguugaguggacagcu

SEQ ID NO: 102105 - RNA, 32 nt, Human
cccaagguccacccugucuggccacaggcacc

SEQ ID NO: 102106 - RNA, 32 nt, Human
cccaagguccagggcaggcgacaggaacgagc

SEQ ID NO: 102107 - RNA, 22 nt, Human
cccaaggugaagguauggcaua

SEQ ID NO: 102108 - RNA, 32 nt, Human
cccaaggugagccagcccuggggacccagcuc

SEQ ID NO: 102109 - RNA, 32 nt, Human
cccaaggugccacccccuagcaccuugucagg

SEQ ID NO: 102110 - RNA, 24 nt, Human
cccaaggugcuaggauuacaggca

SEQ ID NO: 102111 - RNA, 23 nt, Human
cccaaggugcuggauuacaggca

SEQ ID NO: 102112 - RNA, 24 nt, Human
cccaaggugcugggauuacaggca

SEQ ID NO: 102113 - RNA, 32 nt, Human
cccaaggugcuguauuuuucuaccucauggag

SEQ ID NO: 102114 - RNA, 32 nt, Human
cccaaggugggacuuggagaauauuuugcuug

SEQ ID NO: 102115 - RNA, 26 nt, Human
cccaagguggggggcaggggcccuca

SEQ ID NO: 102116 - RNA, 32 nt, Human
cccaagguggucacucucugguaccgagcccc

SEQ ID NO: 102117 - RNA, 32 nt, Human
cccaagguucaagugauucuccugccucagcc

SEQ ID NO: 102118 - RNA, 21 nt, Human
cccaagguugaggccgaguuc

SEQ ID NO: 102119 - RNA, 32 nt, Human
cccaagguugcucaagaaacagaugugagagc

SEQ ID NO: 102120 - RNA, 24 nt, Human
cccaaguaacugggauuacaggca

SEQ ID NO: 102121 - RNA, 24 nt, Human
cccaaguagccaggauuacaggca

SEQ ID NO: 102122 - RNA, 24 nt, Human
cccaaguagccggaauuacaggca

SEQ ID NO: 102123 - RNA, 23 nt, Human
cccaaguagcuaggacuacaggc

SEQ ID NO: 102124 - RNA, 24 nt, Human
cccaaguagcuaggacugcaggca

SEQ ID NO: 102125 - RNA, 24 nt, Human
cccaaguagcuaggauuacagaca

SEQ ID NO: 102126 - RNA, 24 nt, Human
cccaaguagcugagacuacaggca

SEQ ID NO: 102127 - RNA, 24 nt, Human
cccaaguagcugagauuacaggca

SEQ ID NO: 102128 - RNA, 24 nt, Human
cccaaguagcuggaacuacaggca

SEQ ID NO: 102129 - RNA, 24 nt, Human
cccaaguagcuggaauuacaggca

SEQ ID NO: 102130 - RNA, 32 nt, Human
cccaaguagcuggaauuacagggacccgccac

SEQ ID NO: 102131 - RNA, 32 nt, Human
cccaaguagcugggaaaacaggccugugccac

SEQ ID NO: 102132 - RNA, 24 nt, Human
cccaaguagcugggacuacaggca

SEQ ID NO: 102133 - RNA, 32 nt, Human
cccaaguagcugggacuacaguagcugggcca

SEQ ID NO: 102134 - RNA, 32 nt, Human
cccaaguagcugggauuaaaggcacgugccac

SEQ ID NO: 102135 - RNA, 24 nt, Human
cccaaguagcugggauuacaggca

SEQ ID NO: 102136 - RNA, 32 nt, Human
cccaaguaggagagaaucauaggcaaaaguuu

SEQ ID NO: 102137 - RNA, 32 nt, Human
cccaaguaggagagggcugcugggaggcgaga

SEQ ID NO: 102138 - RNA, 24 nt, Human
cccaaguaggugggauuacaggca

SEQ ID NO: 102139 - RNA, 24 nt, Human
cccaaguaguugggauuacaggca

SEQ ID NO: 102140 - RNA, 24 nt, Human
cccaaguaucugggacuacaggca

SEQ ID NO: 102141 - RNA, 23 nt, Human
cccaagucaugcacccugugccc

SEQ ID NO: 102142 - RNA, 32 nt, Human
cccaaguccacagaugaggcccagggagcuuu

SEQ ID NO: 102143 - RNA, 32 nt, Human
cccaagucccacccucuucccaugucccaccc

SEQ ID NO: 102144 - RNA, 32 nt, Human
cccaagucccccacacucagugcagugaugag

SEQ ID NO: 102145 - RNA, 32 nt, Human
cccaagucccuucacaggguccccacccccac

SEQ ID NO: 102146 - RNA, 32 nt, Human
cccaaguccuccgagacggggagggagcgcgc

SEQ ID NO: 102147 - RNA, 32 nt, Human
cccaaguccuccugcuaggaaaagcuuuugca

SEQ ID NO: 102148 - RNA, 32 nt, Human
cccaaguccuggagcagcgagcagggaguccg

SEQ ID NO: 102149 - RNA, 32 nt, Human
cccaaguccuuacaacaaacucucauucuaag

SEQ ID NO: 102150 - RNA, 32 nt, Human
cccaagucucucgcucuggagcuguuuccuuc

SEQ ID NO: 102151 - RNA, 24 nt, Human
cccaagucugccucuuggcuccca

SEQ ID NO: 102152 - RNA, 32 nt, Human
cccaagucugcgaauccagggugcacgugguc

SEQ ID NO: 102153 - RNA, 32 nt, Human
cccaagucugcuggucacauuuggcagcaaaa

SEQ ID NO: 102154 - RNA, 32 nt, Human
cccaagugaacaaagagcuggagcagcuccag

SEQ ID NO: 102155 - RNA, 32 nt, Human
cccaagugaagaaaccaccaaaccaucaccag

SEQ ID NO: 102156 - RNA, 20 nt, Human
cccaagugacagauccaggg

SEQ ID NO: 102157 - RNA, 32 nt, Human
cccaagugagccaccagcacucauggggcagu

SEQ ID NO: 102158 - RNA, 32 nt, Human
cccaagugagccugaagcagauucgccccaga

SEQ ID NO: 102159 - RNA, 32 nt, Human
cccaagugauacucccaccucugccuuacaaa

SEQ ID NO: 102160 - RNA, 32 nt, Human
cccaagugccgucuuagccauucagugaaggg

SEQ ID NO: 102161 - RNA, 32 nt, Human
cccaagugccugcuuuugaugaugucuacaga

SEQ ID NO: 102162 - RNA, 32 nt, Human
cccaagugcugggauuacaggcguggccaccg

SEQ ID NO: 102163 - RNA, 23 nt, Human
cccaaguggacagggagccccug

SEQ ID NO: 102164 - RNA, 20 nt, Human
cccaaguggcccaggccagc

SEQ ID NO: 102165 - RNA, 32 nt, Human
cccaaguggcuaagacuuaacaaacaggcaca

SEQ ID NO: 102166 - RNA, 18 nt, Human
cccaagugggcagcagcu

SEQ ID NO: 102167 - RNA, 32 nt, Human
cccaagugggugaaucaccugaggucaggagu

SEQ ID NO: 102168 - RNA, 32 nt, Human
cccaaguguaacuccagcacugugagguuuca

SEQ ID NO: 102169 - RNA, 22 nt, Human
cccaagugucugggauuacagg

SEQ ID NO: 102170 - RNA, 24 nt, Human
cccaagugucugggauuacaggca

SEQ ID NO: 102171 - RNA, 16 nt, Human
cccaaguguggcccca

SEQ ID NO: 102172 - RNA, 32 nt, Human
cccaaguuaucuuucuguuccacacacaccuu

SEQ ID NO: 102173 - RNA, 32 nt, Human
cccaaguuccugcuguuaagaggugguaggag

SEQ ID NO: 102174 - RNA, 20 nt, Human
cccaaguuggagugcagugg

SEQ ID NO: 102175 - RNA, 21 nt, Human
cccaaguuggagugcaguggc

SEQ ID NO: 102176 - RNA, 32 nt, Human
cccaauacacuugagcaguugccugugaaugu

SEQ ID NO: 102177 - RNA, 32 nt, Human
cccaauacucgagaaguaaauggaugguacuu

SEQ ID NO: 102178 - RNA, 21 nt, Human
cccaauacuuucaggccugcu

SEQ ID NO: 102179 - RNA, 28 nt, Human
cccaauagacaugcugccucauucaaaa

SEQ ID NO: 102180 - RNA, 32 nt, Human
cccaauagcccaggcuggagugcaguggcaga

SEQ ID NO: 102181 - RNA, 32 nt, Human
cccaauagccgccgcccgcugccugcacucua

SEQ ID NO: 102182 - RNA, 20 nt, Human
cccaauaguagucucuguga

SEQ ID NO: 102183 - RNA, 32 nt, Human
cccaauauccucugcucacuguguuauaaucc

SEQ ID NO: 102184 - RNA, 32 nt, Human
cccaaucaaagaagccaugucauuuuacuuuu

SEQ ID NO: 102185 - RNA, 21 nt, Human
cccaaucacccucgcugccuu

SEQ ID NO: 102186 - RNA, 32 nt, Human
cccaaucccaggcuccacuccugggcuccauu

SEQ ID NO: 102187 - RNA, 32 nt, Human
cccaaucccuguccucuccucuccugccgcau

SEQ ID NO: 102188 - RNA, 32 nt, Human
cccaauccgggggcuccugggguguggugugu

SEQ ID NO: 102189 - RNA, 32 nt, Human
cccaauccuaguagcugggaguaucaggugag

SEQ ID NO: 102190 - RNA, 24 nt, Human
cccaauccuauuagguuucuuuga

SEQ ID NO: 102191 - RNA, 32 nt, Human
cccaauccucgccucccuucugcuccaccuuc

SEQ ID NO: 102192 - RNA, 32 nt, Human
cccaauccugaagaucuggacccgguuucuga

SEQ ID NO: 102193 - RNA, 32 nt, Human
cccaauccugaaugugccccuggaccuucugg

SEQ ID NO: 102194 - RNA, 32 nt, Human
cccaauccugcuucuuuccuuucccuuccaga

SEQ ID NO: 102195 - RNA, 32 nt, Human
cccaauccuugcgugugcuugcagucccaccc

SEQ ID NO: 102196 - RNA, 32 nt, Human
cccaauccuuguuucucucaaaccaagaccuc

SEQ ID NO: 102197 - RNA, 19 nt, Human
cccaaucucucuccacuga

SEQ ID NO: 102198 - RNA, 32 nt, Human
cccaaucugaaauucaaaaugcucuaaugagc

SEQ ID NO: 102199 - RNA, 26 nt, Human
cccaaucugcacacuccaggccucua

SEQ ID NO: 102200 - RNA, 32 nt, Human
cccaaucugccaggcuggacugugcuguuccu

SEQ ID NO: 102201 - RNA, 32 nt, Human
cccaaucugccugugcugcucuuucauacccu

SEQ ID NO: 102202 - RNA, 32 nt, Human
cccaaucuggagugcacuggcgcuaucuuggc

SEQ ID NO: 102203 - RNA, 20 nt, Human
cccaaucuuaacauuuuuga

SEQ ID NO: 102204 - RNA, 32 nt, Human
cccaaucuugugugggcacugaagggggacua

SEQ ID NO: 102205 - RNA, 32 nt, Human
cccaaugaaguuaagaaccacuaaagaagaaa

SEQ ID NO: 102206 - RNA, 32 nt, Human
cccaaugagagaaccugguuaccucagccuga

SEQ ID NO: 102207 - RNA, 32 nt, Human
cccaaugagguggcucaugccuguaaucccag

SEQ ID NO: 102208 - RNA, 32 nt, Human
cccaaugaugcuuuaaggaaguuaucauuguu

SEQ ID NO: 102209 - RNA, 32 nt, Human
cccaaugauucugucacuauaagcuucaagcc

SEQ ID NO: 102210 - RNA, 18 nt, Human
cccaaugcaaaaucgaug

SEQ ID NO: 102211 - RNA, 32 nt, Human
cccaaugcacacaaaacaacccuagaguguug

SEQ ID NO: 102212 - RNA, 32 nt, Human
cccaaugcacacacagacccaccgggggccac

SEQ ID NO: 102213 - RNA, 32 nt, Human
cccaaugcauauccaacaugugcucagggaau

SEQ ID NO: 102214 - RNA, 32 nt, Human
cccaaugcugcagagcagucaggcuggacacc

SEQ ID NO: 102215 - RNA, 32 nt, Human
cccaaugcugccccaaagccagagaagaaaga

SEQ ID NO: 102216 - RNA, 32 nt, Human
cccaaugcuuuguccaugauguccuuguuauu

SEQ ID NO: 102217 - RNA, 32 nt, Human
cccaauggaggggagguugcaggggagagcug

SEQ ID NO: 102218 - RNA, 32 nt, Human
cccaauggcuagagggcucugcuccaagucau

SEQ ID NO: 102219 - RNA, 32 nt, Human
cccaaugggacccgauuccuacacacagccuu

SEQ ID NO: 102220 - RNA, 32 nt, Human
cccaauggguagaacaaaaaguuguuaauacu

SEQ ID NO: 102221 - RNA, 32 nt, Human
cccaaugucaccuucacucacagucugaguuc

SEQ ID NO: 102222 - RNA, 32 nt, Human
cccaauguccucugcaccaucugggcuucagc

SEQ ID NO: 102223 - RNA, 32 nt, Human
cccaaugucuagggauagccucugugccacuu

SEQ ID NO: 102224 - RNA, 32 nt, Human
cccaaugugcaaagugaaaacacugggcuccc

SEQ ID NO: 102225 - RNA, 24 nt, Human
cccaaugugcugggauuacaggca

SEQ ID NO: 102226 - RNA, 32 nt, Human
cccaaugugugcagguuaugugcugcuguaga

SEQ ID NO: 102227 - RNA, 32 nt, Human
cccaauuaaagugccucauguguccccagagc

SEQ ID NO: 102228 - RNA, 21 nt, Human
cccaauucaaagcugcaguga

SEQ ID NO: 102229 - RNA, 32 nt, Human
cccaauucaacaaagacaaagaaaaauuaaua

SEQ ID NO: 102230 - RNA, 32 nt, Human
cccaauucaaugaucuauaacaacagagcaaa

SEQ ID NO: 102231 - RNA, 32 nt, Human
cccaauuccacauuucugaaagaaggaaacuc

SEQ ID NO: 102232 - RNA, 32 nt, Human
cccaauuccagagagaaacacaucacuagauu

SEQ ID NO: 102233 - RNA, 32 nt, Human
cccaauucccccauuauggaguaaccaguauu

SEQ ID NO: 102234 - RNA, 32 nt, Human
cccaauuccuuuagccucuccccaccugucca

SEQ ID NO: 102235 - RNA, 32 nt, Human
cccaauucguucucccuuucccccucucucca

SEQ ID NO: 102236 - RNA, 26 nt, Human
cccaauucucuccaaaccccagagaa

SEQ ID NO: 102237 - RNA, 32 nt, Human
cccaauucugcacacacccaggaaguucugcc

SEQ ID NO: 102238 - RNA, 32 nt, Human
cccaauucugcgcuuccuggguucugcugagu

SEQ ID NO: 102239 - RNA, 22 nt, Human
cccaauuggaacagcagcaugg

SEQ ID NO: 102240 - RNA, 32 nt, Human
cccaauuggagcaggguaggggaaggcaucag

SEQ ID NO: 102241 - RNA, 32 nt, Human
cccaauuuaacaacugguuuacauggugucau

SEQ ID NO: 102242 - RNA, 32 nt, Human
cccaauuuagcauaucuagacuaccuauuuga

SEQ ID NO: 102243 - RNA, 28 nt, Human
cccaauuucagacucccauuccugaaga

SEQ ID NO: 102244 - RNA, 32 nt, Human
cccaauuucaguauccuacuacccagaggaga

SEQ ID NO: 102245 - RNA, 21 nt, Human
cccaauuucugcuuccaaaga

SEQ ID NO: 102246 - RNA, 32 nt, Human
cccaauuuguaaacauauacauucauauucuc

SEQ ID NO: 102247 - RNA, 32 nt, Human
cccaauuugucccuccggccugggcggccccu

SEQ ID NO: 102248 - RNA, 24 nt, Human
cccaauuuucucacucccugaagg

SEQ ID NO: 102249 - RNA, 20 nt, Human
cccacaaaaggggagcuguc

SEQ ID NO: 102250 - RNA, 32 nt, Human
cccacaaagugcugggauuacaggugugagcc

SEQ ID NO: 102251 - RNA, 20 nt, Human
cccacaaauauaaauacagu

SEQ ID NO: 102252 - RNA, 17 nt, Human
cccacaacagccugcca

SEQ ID NO: 102253 - RNA, 32 nt, Human
cccacaaccaaaacaaccccuuuuaaaagagu

SEQ ID NO: 102254 - RNA, 32 nt, Human
cccacaaccacagcccuagaaagaaggaugaa

SEQ ID NO: 102255 - RNA, 32 nt, Human
cccacaaccaguaccaauguacauaguaauug

SEQ ID NO: 102256 - RNA, 32 nt, Human
cccacaacccagccggggaggacgccaggcug

SEQ ID NO: 102257 - RNA, 32 nt, Human
cccacaaccccaaccccagaggaaaagccccc

SEQ ID NO: 102258 - RNA, 21 nt, Human
cccacaacccccacccccagg

SEQ ID NO: 102259 - RNA, 23 nt, Human
cccacaaccccgcuucuguguga

SEQ ID NO: 102260 - RNA, 24 nt, Human
cccacaaccucucugagccucccu

SEQ ID NO: 102261 - RNA, 32 nt, Human
cccacaacuaggagagaaagggcagcucccuc

SEQ ID NO: 102262 - RNA, 32 nt, Human
cccacaagcagaguaggagaauacucuuuucu

SEQ ID NO: 102263 - RNA, 32 nt, Human
cccacaagcgugccuggaaaggagcugcaggu

SEQ ID NO: 102264 - RNA, 32 nt, Human
cccacaagcuguucuuagggcucacacucgcc

SEQ ID NO: 102265 - RNA, 32 nt, Human
cccacaaggaagggagagguacccugggucag

SEQ ID NO: 102266 - RNA, 23 nt, Human
cccacaaggaccuccucucuggc

SEQ ID NO: 102267 - RNA, 32 nt, Human
cccacaaggcccuguagugcugacuggaagau

SEQ ID NO: 102268 - RNA, 32 nt, Human
cccacaagggaagccagucuuaauaugaugga

SEQ ID NO: 102269 - RNA, 32 nt, Human
cccacaaggucacagcaggggagggagggaca

SEQ ID NO: 102270 - RNA, 32 nt, Human
cccacaaguccccaguagaguggaucuguagu

SEQ ID NO: 102271 - RNA, 32 nt, Human
cccacaaucacugcacucuccccaccaagagc

SEQ ID NO: 102272 - RNA, 22 nt, Human
cccacaaucucuggccuccagg

SEQ ID NO: 102273 - RNA, 19 nt, Human
cccacaaugaggcugugaa

SEQ ID NO: 102274 - RNA, 31 nt, Human
cccacaauggcagaagaaacuggacagagua

SEQ ID NO: 102275 - RNA, 32 nt, Human
cccacaauggcugccuuggagacuuuccacug

SEQ ID NO: 102276 - RNA, 32 nt, Human
cccacaauuuccuggguuccaccaagcagcga

SEQ ID NO: 102277 - RNA, 32 nt, Human
cccacacaaaacacgcacacagagccaggugc

SEQ ID NO: 102278 - RNA, 27 nt, Human
cccacacaacaacagccgacccucccc

SEQ ID NO: 102279 - RNA, 32 nt, Human
cccacacaaggaggaggaagaggaaaugguga

SEQ ID NO: 102280 - RNA, 32 nt, Human
cccacacaaucccuguacucugacccauagca

SEQ ID NO: 102281 - RNA, 23 nt, Human
cccacacacacuggccucucuca

SEQ ID NO: 102282 - RNA, 32 nt, Human
cccacacacauacacacauaugucauauauua

SEQ ID NO: 102283 - RNA, 32 nt, Human
cccacacacaugccuugaucauagcacuugcc

SEQ ID NO: 102284 - RNA, 20 nt, Human
cccacacaccagccuccuca

SEQ ID NO: 102285 - RNA, 22 nt, Human
cccacacacccacacgaugcca

SEQ ID NO: 102286 - RNA, 32 nt, Human
cccacacaccccacuccagcuccggagcaccc

SEQ ID NO: 102287 - RNA, 32 nt, Human
cccacacacccugccuagccaccccgccgcgg

SEQ ID NO: 102288 - RNA, 32 nt, Human
cccacacaccugcuccuucccugggcccagcu

SEQ ID NO: 102289 - RNA, 22 nt, Human
cccacacaccugcuucccccca

SEQ ID NO: 102290 - RNA, 24 nt, Human
cccacacacuuuccaucucugccu

SEQ ID NO: 102291 - RNA, 32 nt, Human
cccacacagcaacugguccacugcuuuacugu

SEQ ID NO: 102292 - RNA, 20 nt, Human
cccacacagcagccuccagg

SEQ ID NO: 102293 - RNA, 32 nt, Human
cccacacagcagcgagaggcgagaggaggcug

SEQ ID NO: 102294 - RNA, 32 nt, Human
cccacacagcuggucauccugcccucagagcc

SEQ ID NO: 102295 - RNA, 31 nt, Human
cccacacaggaugguccuuguaggagacagg

SEQ ID NO: 102296 - RNA, 32 nt, Human
cccacacaggcagaauaaaaggcuuaaaugug

SEQ ID NO: 102297 - RNA, 32 nt, Human
cccacacaggcaggcuggagaggaguggcaag

SEQ ID NO: 102298 - RNA, 32 nt, Human
cccacacagucacagucacacacacauaugua

SEQ ID NO: 102299 - RNA, 21 nt, Human
cccacacaugguccucacuca

SEQ ID NO: 102300 - RNA, 19 nt, Human
cccacaccaacccccaggg

SEQ ID NO: 102301 - RNA, 32 nt, Human
cccacaccacacaguuacacauucauaaacag

SEQ ID NO: 102302 - RNA, 32 nt, Human
cccacaccacagcccaccugugccccauuguu

SEQ ID NO: 102303 - RNA, 32 nt, Human
cccacaccacugcaggcagguggauagaagug

SEQ ID NO: 102304 - RNA, 32 nt, Human
cccacaccacugcccugcuccaucucccacca

SEQ ID NO: 102305 - RNA, 32 nt, Human
cccacaccagcucuccccuggccucaauaaaa

SEQ ID NO: 102306 - RNA, 19 nt, Human
cccacaccaggacccccag

SEQ ID NO: 102307 - RNA, 32 nt, Human
cccacaccaggcaacauaacaagacccccauc

SEQ ID NO: 102308 - RNA, 17 nt, Human
cccacaccagggaccag

SEQ ID NO: 102309 - RNA, 32 nt, Human
cccacaccagucaaguuggauuugaacccagc

SEQ ID NO: 102310 - RNA, 32 nt, Human
cccacaccaucaggauagcacagggaaacugu

SEQ ID NO: 102311 - RNA, 22 nt, Human
cccacaccaucaguggcccuca

SEQ ID NO: 102312 - RNA, 32 nt, Human
cccacaccaugaacagcacccccaggaaugcc

SEQ ID NO: 102313 - RNA, 32 nt, Human
cccacacccacuguccuguaaacuuuucucag

SEQ ID NO: 102314 - RNA, 32 nt, Human
cccacacccaggcugugggggacgggauggcc

SEQ ID NO: 102315 - RNA, 32 nt, Human
cccacaccccacccucccuucccuucauaccc

SEQ ID NO: 102316 - RNA, 17 nt, Human
cccacacccccauccca

SEQ ID NO: 102317 - RNA, 32 nt, Human
cccacaccccuccaaagccccaccuuuaaguc

SEQ ID NO: 102318 - RNA, 32 nt, Human
cccacaccccuccuugcuggaaugugucuggc

SEQ ID NO: 102319 - RNA, 24 nt, Human
cccacaccccucgcgguuccaggg

SEQ ID NO: 102320 - RNA, 21 nt, Human
cccacaccccugugcccccgg

SEQ ID NO: 102321 - RNA, 32 nt, Human
cccacacccucagcacugaccacugugauggg

SEQ ID NO: 102322 - RNA, 32 nt, Human
cccacacccuccucuuugaucucugaauccac

SEQ ID NO: 102323 - RNA, 21 nt, Human
cccacacccuccuucagugcc

SEQ ID NO: 102324 - RNA, 24 nt, Human
cccacacccuucccagagccaggg

SEQ ID NO: 102325 - RNA, 22 nt, Human
cccacaccgcugcacagagagg

SEQ ID NO: 102326 - RNA, 21 nt, Human
cccacaccgcuggcacacgag

SEQ ID NO: 102327 - RNA, 32 nt, Human
cccacaccuccaccaccagcccagcacucaac

SEQ ID NO: 102328 - RNA, 32 nt, Human
cccacaccuccaccuccccugagcccugugag

SEQ ID NO: 102329 - RNA, 32 nt, Human
cccacaccuccaggaacuccacucccagucuu

SEQ ID NO: 102330 - RNA, 19 nt, Human
cccacaccucccuccaggg

SEQ ID NO: 102331 - RNA, 32 nt, Human
cccacaccucccuuccagcaggccagugguua

SEQ ID NO: 102332 - RNA, 20 nt, Human
cccacaccuccucccaggaa

SEQ ID NO: 102333 - RNA, 22 nt, Human
cccacaccuccucuccccgggg

SEQ ID NO: 102334 - RNA, 32 nt, Human
cccacaccuccucuccccggggccuggaaucu

SEQ ID NO: 102335 - RNA, 32 nt, Human
cccacaccuccugccagcaccuugccuggccc

SEQ ID NO: 102336 - RNA, 23 nt, Human
cccacaccuccuguuugccaggg

SEQ ID NO: 102337 - RNA, 19 nt, Human
cccacaccucgccccacag

SEQ ID NO: 102338 - RNA, 18 nt, Human
cccacaccucucaccuca

SEQ ID NO: 102339 - RNA, 21 nt, Human
cccacaccucugaacucaggg

SEQ ID NO: 102340 - RNA, 24 nt, Human
cccacaccucugucucccccaggg

SEQ ID NO: 102341 - RNA, 32 nt, Human
cccacaccugccccagcaccagcgccaggagg

SEQ ID NO: 102342 - RNA, 19 nt, Human
cccacaccugccucaccca

SEQ ID NO: 102343 - RNA, 25 nt, Human
cccacaccuggcuuccacccucccc

SEQ ID NO: 102344 - RNA, 32 nt, Human
cccacaccuguaaucccagcacuuugggaggc

SEQ ID NO: 102345 - RNA, 32 nt, Human
cccacaccuguaaucucagcacuuuaggaggc

SEQ ID NO: 102346 - RNA, 32 nt, Human
cccacaccuucaccccuugcuucaagauucaa

SEQ ID NO: 102347 - RNA, 18 nt, Human
cccacaccuucccuuccc

SEQ ID NO: 102348 - RNA, 23 nt, Human
cccacaccuuggcagcucagggu

SEQ ID NO: 102349 - RNA, 32 nt, Human
cccacacgaacagcagagaggggcagcaggau

SEQ ID NO: 102350 - RNA, 32 nt, Human
cccacacggccacaccaccacaugcccaagug

SEQ ID NO: 102351 - RNA, 32 nt, Human
cccacacggcggcccucggcucccgggccccg

SEQ ID NO: 102352 - RNA, 23 nt, Human
cccacacgugagcucccuccuca

SEQ ID NO: 102353 - RNA, 23 nt, Human
cccacacgugcugcgucugcacg

SEQ ID NO: 102354 - RNA, 22 nt, Human
cccacacuaaggccacagccca

SEQ ID NO: 102355 - RNA, 32 nt, Human
cccacacucacauguacgaaguucucacccca

SEQ ID NO: 102356 - RNA, 32 nt, Human
cccacacucacugcacuggcagcgugcacugg

SEQ ID NO: 102357 - RNA, 21 nt, Human
cccacacucaggacagagcca

SEQ ID NO: 102358 - RNA, 26 nt, Human
cccacacuccuacaccuaacucaccu

SEQ ID NO: 102359 - RNA, 32 nt, Human
cccacacucucauggaaucagacagagauccu

SEQ ID NO: 102360 - RNA, 32 nt, Human
cccacacugaagaagccacuaccuccaccacc

SEQ ID NO: 102361 - RNA, 32 nt, Human
cccacacugccgcuccagccuuccuggcaggc

SEQ ID NO: 102362 - RNA, 32 nt, Human
cccacacugccucuguggccuggacuuugaaa

SEQ ID NO: 102363 - RNA, 16 nt, Human
cccacacugccuucca

SEQ ID NO: 102364 - RNA, 32 nt, Human
cccacacuuaaccuugucaauagguucuugaa

SEQ ID NO: 102365 - RNA, 32 nt, Human
cccacacuuaucucccccagggccacuccaaa

SEQ ID NO: 102366 - RNA, 22 nt, Human
cccacacuuccacuccaccuca

SEQ ID NO: 102367 - RNA, 32 nt, Human
cccacacuugacugggcuguggaggugggcau

SEQ ID NO: 102368 - RNA, 32 nt, Human
cccacacuugcccuuucucccucucuccagca

SEQ ID NO: 102369 - RNA, 32 nt, Human
cccacacuuguaaucccagcacuuugggaggc

SEQ ID NO: 102370 - RNA, 32 nt, Human
cccacagaaaggaggcagcacacagagaaaga

SEQ ID NO: 102371 - RNA, 32 nt, Human
cccacagaacuccugcaggaggcuggcagccc

SEQ ID NO: 102372 - RNA, 32 nt, Human
cccacagaaugagaggcucacccugcacagga

SEQ ID NO: 102373 - RNA, 32 nt, Human
cccacagacaacaguugcacagugccucaagc

SEQ ID NO: 102374 - RNA, 32 nt, Human
cccacagacagagcuguauuaaguaaccuguu

SEQ ID NO: 102375 - RNA, 19 nt, Human
cccacagacccaccucccc

SEQ ID NO: 102376 - RNA, 32 nt, Human
cccacagaccccggggagcgcagggaaaaggg

SEQ ID NO: 102377 - RNA, 32 nt, Human
cccacagaccugcucuggacacuugcucaugc

SEQ ID NO: 102378 - RNA, 21 nt, Human
cccacagacgcccaccacccc

SEQ ID NO: 102379 - RNA, 21 nt, Human
cccacagagaagcccauccag

SEQ ID NO: 102380 - RNA, 32 nt, Human
cccacagagacagaggggaacaaguagcauuu

SEQ ID NO: 102381 - RNA, 21 nt, Human
cccacagagcaauacacugaa

SEQ ID NO: 102382 - RNA, 32 nt, Human
cccacagagcauccuccucucaucugugacaa

SEQ ID NO: 102383 - RNA, 32 nt, Human
cccacagagcaucgcuccacugucucuccugc

SEQ ID NO: 102384 - RNA, 32 nt, Human
cccacagagccgcggcaccauggcaccugcug

SEQ ID NO: 102385 - RNA, 32 nt, Human
cccacagagcugccccagcagacgcuccgccc

SEQ ID NO: 102386 - RNA, 32 nt, Human
cccacagaggagcauauacugaaaagaaggca

SEQ ID NO: 102387 - RNA, 32 nt, Human
cccacagagggaggggaggggcugagcuguga

SEQ ID NO: 102388 - RNA, 23 nt, Human
cccacagagugccaucccugaga

SEQ ID NO: 102389 - RNA, 32 nt, Human
cccacagaugagucacuggagaacaaaacgug

SEQ ID NO: 102390 - RNA, 31 nt, Human
cccacagauggggaaagauggggaagggugu

SEQ ID NO: 102391 - RNA, 32 nt, Human
cccacagauggggaaagauggggaagggugug

SEQ ID NO: 102392 - RNA, 32 nt, Human
cccacagcaagcagugccugcuggcgcccccg

SEQ ID NO: 102393 - RNA, 32 nt, Human
cccacagcacagaaaaggucacaaccaccuac

SEQ ID NO: 102394 - RNA, 23 nt, Human
cccacagcacuaccucaccccga

SEQ ID NO: 102395 - RNA, 32 nt, Human
cccacagcacuagcgaggacccugcccugaag

SEQ ID NO: 102396 - RNA, 32 nt, Human
cccacagcacuccugacgaaagcugguccccu

SEQ ID NO: 102397 - RNA, 32 nt, Human
cccacagcagaggccuccccugucaaggcuuc

SEQ ID NO: 102398 - RNA, 20 nt, Human
cccacagcagcccaggacug

SEQ ID NO: 102399 - RNA, 32 nt, Human
cccacagcagcuuugcucagugauacccacau

SEQ ID NO: 102400 - RNA, 32 nt, Human
cccacagcaggaggaggcugugugaaaccugg

SEQ ID NO: 102401 - RNA, 32 nt, Human
cccacagcagugggugcugggguccugacuuu

SEQ ID NO: 102402 - RNA, 32 nt, Human
cccacagcaugagagacugcuggacuucaguc

SEQ ID NO: 102403 - RNA, 22 nt, Human
cccacagccaaccucccgggca

SEQ ID NO: 102404 - RNA, 32 nt, Human
cccacagccauggccauggcccagaaacucag

SEQ ID NO: 102405 - RNA, 21 nt, Human
cccacagcccagccagagaca

SEQ ID NO: 102406 - RNA, 32 nt, Human
cccacagccccagggagauacaucuggacucc

SEQ ID NO: 102407 - RNA, 23 nt, Human
cccacagccccgccgggacccga

SEQ ID NO: 102408 - RNA, 21 nt, Human
cccacagccccgcuguggucc

SEQ ID NO: 102409 - RNA, 32 nt, Human
cccacagcccgggccagagccaguguggggca

SEQ ID NO: 102410 - RNA, 22 nt, Human
cccacagccgcagcuguaaggc

SEQ ID NO: 102411 - RNA, 22 nt, Human
cccacagccggcaccccugggc

SEQ ID NO: 102412 - RNA, 24 nt, Human
cccacagccucuuccucccuuccc

SEQ ID NO: 102413 - RNA, 32 nt, Human
cccacagccuguaacucaguguuuuguacuuc

SEQ ID NO: 102414 - RNA, 32 nt, Human
cccacagccuguccgcagccuggugccgugaa

SEQ ID NO: 102415 - RNA, 20 nt, Human
cccacagcgccggagccccg

SEQ ID NO: 102416 - RNA, 21 nt, Human
cccacagcucagcccaugagg

SEQ ID NO: 102417 - RNA, 22 nt, Human
cccacagcugccgcgguggccc

SEQ ID NO: 102418 - RNA, 32 nt, Human
cccacagcugccuccauuuccuuaaggaaggg

SEQ ID NO: 102419 - RNA, 20 nt, Human
cccacagcugcugcucacuu

SEQ ID NO: 102420 - RNA, 32 nt, Human
cccacagcuggaaaguuccuccccuccagccc

SEQ ID NO: 102421 - RNA, 22 nt, Human
cccacagcuggacacccugaga

SEQ ID NO: 102422 - RNA, 32 nt, Human
cccacagcuggccucggccagguccgagggcc

SEQ ID NO: 102423 - RNA, 32 nt, Human
cccacagcugugccucacagaugccccgagaa

SEQ ID NO: 102424 - RNA, 32 nt, Human
cccacagcuguggcagagguuccucagugugg

SEQ ID NO: 102425 - RNA, 24 nt, Human
cccacagcuguggccacagugccc

SEQ ID NO: 102426 - RNA, 32 nt, Human
cccacagcugugggaggggcugcuacugcugc

SEQ ID NO: 102427 - RNA, 32 nt, Human
cccacagcuuagugaacagaagaaucugaguc

SEQ ID NO: 102428 - RNA, 32 nt, Human
cccacaggaaauucaagggcugaggggugagu

SEQ ID NO: 102429 - RNA, 32 nt, Human
cccacaggaagggggaaggaaggagggaauuu

SEQ ID NO: 102430 - RNA, 32 nt, Human
cccacaggagcacgugauugccucugcuuacg

SEQ ID NO: 102431 - RNA, 32 nt, Human
cccacaggauucaagccagcugccuuuggagg

SEQ ID NO: 102432 - RNA, 32 nt, Human
cccacaggccaccggcuccagcuuugaccugg

SEQ ID NO: 102433 - RNA, 23 nt, Human
cccacaggcggagguugcggugg

SEQ ID NO: 102434 - RNA, 32 nt, Human
cccacaggcucaccccuccugccggcugccag

SEQ ID NO: 102435 - RNA, 32 nt, Human
cccacaggcugcagggaccgggcucuggguaa

SEQ ID NO: 102436 - RNA, 32 nt, Human
cccacaggcugcagggcaggaaagguauuccu

SEQ ID NO: 102437 - RNA, 32 nt, Human
cccacagggaaggagcgcgcagcugccacaca

SEQ ID NO: 102438 - RNA, 32 nt, Human
cccacagggacaccuccacaucgccaaggugc

SEQ ID NO: 102439 - RNA, 32 nt, Human
cccacagggacccccaccccucccagccucac

SEQ ID NO: 102440 - RNA, 32 nt, Human
cccacagggacuuuuccagacacuccgagugc

SEQ ID NO: 102441 - RNA, 24 nt, Human
cccacagggcagaggucacaguga

SEQ ID NO: 102442 - RNA, 16 nt, Human
cccacagggccagaug

SEQ ID NO: 102443 - RNA, 28 nt, Human
cccacagggcccaccauggucuaugaga

SEQ ID NO: 102444 - RNA, 32 nt, Human
cccacagggcucuguccucuaguuuugagaca

SEQ ID NO: 102445 - RNA, 18 nt, Human
cccacaggggaagcuguc

SEQ ID NO: 102446 - RNA, 32 nt, Human
cccacagggucacgcaggacucggacacugcc

SEQ ID NO: 102447 - RNA, 32 nt, Human
cccacaggucagguggaggguggggcgugggc

SEQ ID NO: 102448 - RNA, 32 nt, Human
cccacagguggcagugggcagaggggaccccg

SEQ ID NO: 102449 - RNA, 32 nt, Human
cccacagguguguaggggcaacccaccccuac

SEQ ID NO: 102450 - RNA, 32 nt, Human
cccacagucauggucucuguagaaucugaaga

SEQ ID NO: 102451 - RNA, 32 nt, Human
cccacagucuugcaggucacaugcucuccuug

SEQ ID NO: 102452 - RNA, 32 nt, Human
cccacagugacuuuugcugggcauuuucccag

SEQ ID NO: 102453 - RNA, 32 nt, Human
cccacagugcauucagaaagcaugcugugugg

SEQ ID NO: 102454 - RNA, 32 nt, Human
cccacagugcuggccuccuguggggccacuau

SEQ ID NO: 102455 - RNA, 22 nt, Human
cccacagugcugggauuacagg

SEQ ID NO: 102456 - RNA, 24 nt, Human
cccacagugcugggauuacaggca

SEQ ID NO: 102457 - RNA, 21 nt, Human
cccacagugggguauucuuca

SEQ ID NO: 102458 - RNA, 23 nt, Human
cccacagugggugagagccguca

SEQ ID NO: 102459 - RNA, 32 nt, Human
cccacaguguguauuccuguccucuauguuag

SEQ ID NO: 102460 - RNA, 19 nt, Human
cccacaguugcacugcccc

SEQ ID NO: 102461 - RNA, 32 nt, Human
cccacaguuggcagaggugguugagggagcag

SEQ ID NO: 102462 - RNA, 32 nt, Human
cccacauacagacagaccuaccuauacauacg

SEQ ID NO: 102463 - RNA, 21 nt, Human
cccacauacgugaccccaggg

SEQ ID NO: 102464 - RNA, 18 nt, Human
cccacaucaccuccccac

SEQ ID NO: 102465 - RNA, 32 nt, Human
cccacaucaccuccccaccacccggccggggu

SEQ ID NO: 102466 - RNA, 32 nt, Human
cccacauccaaacauguaucucuaaugaaauu

SEQ ID NO: 102467 - RNA, 32 nt, Human
cccacauccagccugcaggccucucugcaguc

SEQ ID NO: 102468 - RNA, 24 nt, Human
cccacaucccagaaagcugagcca

SEQ ID NO: 102469 - RNA, 32 nt, Human
cccacaucccugcagccaccucccagcagagc

SEQ ID NO: 102470 - RNA, 23 nt, Human
cccacauccucagccccacacca

SEQ ID NO: 102471 - RNA, 32 nt, Human
cccacauccucccaaggcuccccucacagccu

SEQ ID NO: 102472 - RNA, 18 nt, Human
cccacauccuccuuuccc

SEQ ID NO: 102473 - RNA, 23 nt, Human
cccacauccuuaugacgcagcca

SEQ ID NO: 102474 - RNA, 32 nt, Human
cccacaucucccaggcugcuuaggagacagaa

SEQ ID NO: 102475 - RNA, 32 nt, Human
cccacaucuguaaucccagcacuuugggaggc

SEQ ID NO: 102476 - RNA, 32 nt, Human
cccacaugacugcccugccucugaccagucug

SEQ ID NO: 102477 - RNA, 23 nt, Human
cccacaugcagcuucacaagcca

SEQ ID NO: 102478 - RNA, 30 nt, Human
cccacaugcaucccuggcuggggucagccu

SEQ ID NO: 102479 - RNA, 32 nt, Human
cccacaugcaugcacacgcaugcacacaugug

SEQ ID NO: 102480 - RNA, 32 nt, Human
cccacaugcccaccuccucuggcaacaugggg

SEQ ID NO: 102481 - RNA, 32 nt, Human
cccacauggaaauguauccucaaaccguuuaa

SEQ ID NO: 102482 - RNA, 23 nt, Human
cccacauggaagacuugucuuca

SEQ ID NO: 102483 - RNA, 20 nt, Human
cccacauggacagccauucc

SEQ ID NO: 102484 - RNA, 32 nt, Human
cccacaugguccaacugacacacacguuuccc

SEQ ID NO: 102485 - RNA, 32 nt, Human
cccacauggugugggccuuugucugucccugu

SEQ ID NO: 102486 - RNA, 32 nt, Human
cccacaugguuuucaggcaacaauucucaauu

SEQ ID NO: 102487 - RNA, 32 nt, Human
cccacauuccagaaggguggucccagugaaca

SEQ ID NO: 102488 - RNA, 32 nt, Human
cccacauucuagaauucucccaacauuauuuu

SEQ ID NO: 102489 - RNA, 32 nt, Human
cccacauugccuccuuccccucccucucucau

SEQ ID NO: 102490 - RNA, 22 nt, Human
cccacauugcucuucccuuccc

SEQ ID NO: 102491 - RNA, 20 nt, Human
cccacauuggagugcagugg

SEQ ID NO: 102492 - RNA, 32 nt, Human
cccacauuguguccuguggggguggggucagc

SEQ ID NO: 102493 - RNA, 19 nt, Human
cccacauuuccaauggggu

SEQ ID NO: 102494 - RNA, 32 nt, Human
cccacauuuuccccucacccuccaaguccuaa

SEQ ID NO: 102495 - RNA, 32 nt, Human
cccacauuuuuagauggaaagagcaagaaaau

SEQ ID NO: 102496 - RNA, 32 nt, Human
cccaccaaaauguaaaacauguuuuaacuagg

SEQ ID NO: 102497 - RNA, 25 nt, Human
cccaccaacacucucccagcuccca

SEQ ID NO: 102498 - RNA, 32 nt, Human
cccaccaacagcugcaccugcgccuccaacug

SEQ ID NO: 102499 - RNA, 32 nt, Human
cccaccaaccaccaccuccuaaauccugacag

SEQ ID NO: 102500 - RNA, 32 nt, Human
cccaccaacccugcuccuauggcuccacccag

SEQ ID NO: 102501 - RNA, 24 nt, Human
cccaccaacguccugcccacgcuc

SEQ ID NO: 102502 - RNA, 32 nt, Human
cccaccaagaggguggaucacaccucaguggg

SEQ ID NO: 102503 - RNA, 32 nt, Human
cccaccaaggauggacgaagacccccuccaga

SEQ ID NO: 102504 - RNA, 19 nt, Human
cccaccaaggcccccuugg

SEQ ID NO: 102505 - RNA, 32 nt, Human
cccaccaagggcccugcgaccacagcagggau

SEQ ID NO: 102506 - RNA, 32 nt, Human
cccaccaagucaagcagagcugggugggcuga

SEQ ID NO: 102507 - RNA, 32 nt, Human
cccaccaaucacccucacucagccuuuucccu

SEQ ID NO: 102508 - RNA, 32 nt, Human
cccaccaaugcacaaauaauugugaacagcuu

SEQ ID NO: 102509 - RNA, 32 nt, Human
cccaccaauuccggacacauuuuggcgaccau

SEQ ID NO: 102510 - RNA, 18 nt, Human
cccaccacaaaaagagaa

SEQ ID NO: 102511 - RNA, 32 nt, Human
cccaccacacacacccuuccccacucccguga

SEQ ID NO: 102512 - RNA, 21 nt, Human
cccaccacacccugcccacuc

SEQ ID NO: 102513 - RNA, 32 nt, Human
cccaccacagagcaccagccagugccaacgcc

SEQ ID NO: 102514 - RNA, 32 nt, Human
cccaccacagggucuggaagugugugugacgc

SEQ ID NO: 102515 - RNA, 32 nt, Human
cccaccacaucgccccagaggcuuuuccagca

SEQ ID NO: 102516 - RNA, 32 nt, Human
cccaccaccaccacagcaacccagacagcuag

SEQ ID NO: 102517 - RNA, 32 nt, Human
cccaccaccaccacagcaccccagacagcuag

SEQ ID NO: 102518 - RNA, 32 nt, Human
cccaccaccacugucgucaguguaugccuggg

SEQ ID NO: 102519 - RNA, 21 nt, Human
cccaccaccagcauuuccucc

SEQ ID NO: 102520 - RNA, 32 nt, Human
cccaccaccagccucggugcucugccccaugc

SEQ ID NO: 102521 - RNA, 24 nt, Human
cccaccaccaucacugccaccugg

SEQ ID NO: 102522 - RNA, 32 nt, Human
cccaccaccaugagcuggaguggggaugacaa

SEQ ID NO: 102523 - RNA, 22 nt, Human
cccaccaccaugccccaugcuc

SEQ ID NO: 102524 - RNA, 32 nt, Human
cccaccaccauggugaaacccuaucucuacua

SEQ ID NO: 102525 - RNA, 22 nt, Human
cccaccaccauuccuuuccucc

SEQ ID NO: 102526 - RNA, 32 nt, Human
cccaccaccauuccuuuccucccuucccccug

SEQ ID NO: 102527 - RNA, 32 nt, Human
cccaccacccaccuaucaccccucacccauaa

SEQ ID NO: 102528 - RNA, 32 nt, Human
cccaccacccacucuccucugccucaguaagu

SEQ ID NO: 102529 - RNA, 32 nt, Human
cccaccacccacugcaccguggucucgggcuc

SEQ ID NO: 102530 - RNA, 32 nt, Human
cccaccaccccacuccgggcagcccagcgcca

SEQ ID NO: 102531 - RNA, 21 nt, Human
cccaccaccccugccccaccc

SEQ ID NO: 102532 - RNA, 32 nt, Human
cccaccaccccugggugcucaguuucuaccaa

SEQ ID NO: 102533 - RNA, 22 nt, Human
cccaccacccugcuggccccac

SEQ ID NO: 102534 - RNA, 20 nt, Human
cccaccaccuguccccaccc

SEQ ID NO: 102535 - RNA, 21 nt, Human
cccaccaccuucuccuuuccc

SEQ ID NO: 102536 - RNA, 32 nt, Human
cccaccacuacccuuguaaacuuccaggaaga

SEQ ID NO: 102537 - RNA, 21 nt, Human
cccaccacucgcugccuccca

SEQ ID NO: 102538 - RNA, 32 nt, Human
cccaccacucucaggaccacccugccaaggca

SEQ ID NO: 102539 - RNA, 32 nt, Human
cccaccacugcacuccagccuggaugacagag

SEQ ID NO: 102540 - RNA, 32 nt, Human
cccaccacugcacuccagccugggaagcagag

SEQ ID NO: 102541 - RNA, 32 nt, Human
cccaccacugcacuccagccugggcgacacag

SEQ ID NO: 102542 - RNA, 32 nt, Human
cccaccacugcacuccagccugggcgacagag

SEQ ID NO: 102543 - RNA, 32 nt, Human
cccaccacugcacuccagccugggugacagag

SEQ ID NO: 102544 - RNA, 21 nt, Human
cccaccacugccagcccagcg

SEQ ID NO: 102545 - RNA, 17 nt, Human
cccaccacugcuuguuc

SEQ ID NO: 102546 - RNA, 32 nt, Human
cccaccacugcuuguuccgagcucccccagcc

SEQ ID NO: 102547 - RNA, 32 nt, Human
cccaccagaaugucacaaucauucauugcucc

SEQ ID NO: 102548 - RNA, 32 nt, Human
cccaccagagagaacauucuagcugggugagc

SEQ ID NO: 102549 - RNA, 32 nt, Human
cccaccagagcugccauuugucuccagccccu

SEQ ID NO: 102550 - RNA, 32 nt, Human
cccaccagaggaugaggauccagcccuguccc

SEQ ID NO: 102551 - RNA, 32 nt, Human
cccaccagagggcagcaagcuccuuucacuuc

SEQ ID NO: 102552 - RNA, 32 nt, Human
cccaccagagucacuggugaccccagaaaaug

SEQ ID NO: 102553 - RNA, 32 nt, Human
cccaccagagugagcuggagcagaucugcacc

SEQ ID NO: 102554 - RNA, 32 nt, Human
cccaccagcaccagaggucacucuccacaucc

SEQ ID NO: 102555 - RNA, 32 nt, Human
cccaccagcaugauggccccagcugggggcag

SEQ ID NO: 102556 - RNA, 15 nt, Human
cccaccagcccacgc

SEQ ID NO: 102557 - RNA, 21 nt, Human
cccaccagcccuggccaacgu

SEQ ID NO: 102558 - RNA, 23 nt, Human
cccaccagccucucagagccucc

SEQ ID NO: 102559 - RNA, 17 nt, Human
cccaccagcuacagcag

SEQ ID NO: 102560 - RNA, 32 nt, Human
cccaccagcucguuccccuccagccuggugcu

SEQ ID NO: 102561 - RNA, 32 nt, Human
cccaccagcucuaggcccuggaccucggguca

SEQ ID NO: 102562 - RNA, 21 nt, Human
cccaccagcugccuguccagu

SEQ ID NO: 102563 - RNA, 19 nt, Human
cccaccagcugcucagcgc

SEQ ID NO: 102564 - RNA, 18 nt, Human
cccaccagcugcugcuac

SEQ ID NO: 102565 - RNA, 17 nt, Human
cccaccagcuucuguuc

SEQ ID NO: 102566 - RNA, 32 nt, Human
cccaccaggaaccugcuuuagugggggauagu

SEQ ID NO: 102567 - RNA, 32 nt, Human
cccaccaggaacuagagccccaaccacagcag

SEQ ID NO: 102568 - RNA, 32 nt, Human
cccaccaggagagagggcaaagggaugagccu

SEQ ID NO: 102569 - RNA, 21 nt, Human
cccaccaggccaagcccucug

SEQ ID NO: 102570 - RNA, 32 nt, Human
cccaccaggccuucuugggcagcagggaggca

SEQ ID NO: 102571 - RNA, 18 nt, Human
cccaccaggcuccgcagc

SEQ ID NO: 102572 - RNA, 32 nt, Human
cccaccagggagaugucuagaggcagacuccu

SEQ ID NO: 102573 - RNA, 32 nt, Human
cccaccagggucccgcucacaccaggcagccu

SEQ ID NO: 102574 - RNA, 32 nt, Human
cccaccaguuccacuaucaguaaugagcacca

SEQ ID NO: 102575 - RNA, 32 nt, Human
cccaccaguucugccuggcuuccuccaucccc

SEQ ID NO: 102576 - RNA, 32 nt, Human
cccaccauaccuccccuccacaucacugacac

SEQ ID NO: 102577 - RNA, 32 nt, Human
cccaccauauccacccucgcuccaucuuugaa

SEQ ID NO: 102578 - RNA, 32 nt, Human
cccaccauccauccuggugaaaccagaaaacu

SEQ ID NO: 102579 - RNA, 32 nt, Human
cccaccauccuggcaagagguggauccugggg

SEQ ID NO: 102580 - RNA, 32 nt, Human
cccaccaucuucagaucuguuccucuggagcu

SEQ ID NO: 102581 - RNA, 32 nt, Human
cccaccaucuucugaagugaacugaucugccc

SEQ ID NO: 102582 - RNA, 32 nt, Human
cccaccaugagaaaggggcacagaccuucugg

SEQ ID NO: 102583 - RNA, 21 nt, Human
cccaccaugaugcccccaugc

SEQ ID NO: 102584 - RNA, 18 nt, Human
cccaccaugcccccuaca

SEQ ID NO: 102585 - RNA, 31 nt, Human
cccaccaugccugcaacucccaacuuccucg

SEQ ID NO: 102586 - RNA, 32 nt, Human
cccaccaugccuuugucucucccacuucaucu

SEQ ID NO: 102587 - RNA, 32 nt, Human
cccaccaugcgcugcucaaccucucuccuucu

SEQ ID NO: 102588 - RNA, 32 nt, Human
cccaccauggccaggacaugugcaaugccagc

SEQ ID NO: 102589 - RNA, 31 nt, Human
cccaccauggcucucgggccugugccccuca

SEQ ID NO: 102590 - RNA, 32 nt, Human
cccaccaugugauuuccaacaccacugacaag

SEQ ID NO: 102591 - RNA, 32 nt, Human
cccaccauguuaaguguguccucugcugccaa

SEQ ID NO: 102592 - RNA, 21 nt, Human
cccaccauucaccucuguuca

SEQ ID NO: 102593 - RNA, 32 nt, Human
cccaccauugcacuccagccugggcaacagag

SEQ ID NO: 102594 - RNA, 32 nt, Human
cccaccauugcacuccaguccgggaaacaaga

SEQ ID NO: 102595 - RNA, 20 nt, Human
cccaccauugccccuccuca

SEQ ID NO: 102596 - RNA, 20 nt, Human
cccacccaaagagccaaaga

SEQ ID NO: 102597 - RNA, 32 nt, Human
cccacccaaauuuauacccauuccucccucau

SEQ ID NO: 102598 - RNA, 32 nt, Human
cccacccaacagccaccaagccugacagaagg

SEQ ID NO: 102599 - RNA, 32 nt, Human
cccacccaaccugucccugccugcucccagcc

SEQ ID NO: 102600 - RNA, 19 nt, Human
cccacccaagacccacuga

SEQ ID NO: 102601 - RNA, 32 nt, Human
cccacccaaggaagcccagcacagaccaucuc

SEQ ID NO: 102602 - RNA, 22 nt, Human
cccacccaagugcccccacuga

SEQ ID NO: 102603 - RNA, 32 nt, Human
cccacccaaugcccagcaccaagccuacccag

SEQ ID NO: 102604 - RNA, 32 nt, Human
cccacccacacacauacauacauacaccuggu

SEQ ID NO: 102605 - RNA, 32 nt, Human
cccacccacacguuguauauucagagagagag

SEQ ID NO: 102606 - RNA, 32 nt, Human
cccacccacacugacggcaucuucccaguucc

SEQ ID NO: 102607 - RNA, 32 nt, Human
cccacccacaggauuccucgagcugugagauu

SEQ ID NO: 102608 - RNA, 28 nt, Human
cccacccacagugcugcacuccuccugc

SEQ ID NO: 102609 - RNA, 32 nt, Human
cccacccacagugcugcacuccuccugccccu

SEQ ID NO: 102610 - RNA, 16 nt, Human
cccacccaccaccuca

SEQ ID NO: 102611 - RNA, 32 nt, Human
cccacccacccaggcuggagccauggauaaau

SEQ ID NO: 102612 - RNA, 32 nt, Human
cccacccaccccacaccugcagugccagcucc

SEQ ID NO: 102613 - RNA, 17 nt, Human
cccacccaccccacuga

SEQ ID NO: 102614 - RNA, 32 nt, Human
cccacccacccccucacccccuucuuuuuccg

SEQ ID NO: 102615 - RNA, 32 nt, Human
cccacccaccccucuccugccucggcagggac

SEQ ID NO: 102616 - RNA, 19 nt, Human
cccacccaccucucugccg

SEQ ID NO: 102617 - RNA, 32 nt, Human
cccacccaccuugccuccaggcucuuuccuuc

SEQ ID NO: 102618 - RNA, 32 nt, Human
cccacccacuccaggaacccagagccacauua

SEQ ID NO: 102619 - RNA, 32 nt, Human
cccacccacuccucaguguuuguggagucgag

SEQ ID NO: 102620 - RNA, 32 nt, Human
cccacccacugcagcccuagugccuuagcucc

SEQ ID NO: 102621 - RNA, 32 nt, Human
cccacccacugcagguuggggaagaagccuau

SEQ ID NO: 102622 - RNA, 32 nt, Human
cccacccacuggcuguuucuccguccucuccu

SEQ ID NO: 102623 - RNA, 32 nt, Human
cccacccacuuccuccccaccaccugugcccc

SEQ ID NO: 102624 - RNA, 32 nt, Human
cccacccagaagcgguucagcacacgggagga

SEQ ID NO: 102625 - RNA, 21 nt, Human
cccacccagaggaugcaggga

SEQ ID NO: 102626 - RNA, 32 nt, Human
cccacccagaggaugcagggaaagcacacugu

SEQ ID NO: 102627 - RNA, 32 nt, Human
cccacccagaugggggaaagcacaggugggcu

SEQ ID NO: 102628 - RNA, 32 nt, Human
cccacccagcacucucauugcugcuguugagu

SEQ ID NO: 102629 - RNA, 32 nt, Human
cccacccagcagaccaggagauagcuggggga

SEQ ID NO: 102630 - RNA, 22 nt, Human
cccacccagcccucccauacuc

SEQ ID NO: 102631 - RNA, 32 nt, Human
cccacccagccugcuccuccagcuggggagag

SEQ ID NO: 102632 - RNA, 32 nt, Human
cccacccagcuacuggggaggcugagucagga

SEQ ID NO: 102633 - RNA, 18 nt, Human
cccacccagcuccacuaa

SEQ ID NO: 102634 - RNA, 17 nt, Human
cccacccagcugggucc

SEQ ID NO: 102635 - RNA, 22 nt, Human
cccacccagggacaccccacgg

SEQ ID NO: 102636 - RNA, 25 nt, Human
cccacccagggccuuccacccucgg

SEQ ID NO: 102637 - RNA, 32 nt, Human
cccacccagucucugcuccaccuuucagccca

SEQ ID NO: 102638 - RNA, 16 nt, Human
cccacccagucugcca

SEQ ID NO: 102639 - RNA, 18 nt, Human
cccacccagugccugcca

SEQ ID NO: 102640 - RNA, 20 nt, Human
cccacccaguggcccccuug

SEQ ID NO: 102641 - RNA, 32 nt, Human
cccacccauaccacagcauccccuagagagag

SEQ ID NO: 102642 - RNA, 32 nt, Human
cccacccaugaccuacagacaguguugcccac

SEQ ID NO: 102643 - RNA, 32 nt, Human
cccacccaugaccugcagacaguguugcccac

SEQ ID NO: 102644 - RNA, 32 nt, Human
cccacccaugaccugccgacaguguugcccac

SEQ ID NO: 102645 - RNA, 32 nt, Human
cccacccauguuuucacuaucccuucugcagc

SEQ ID NO: 102646 - RNA, 32 nt, Human
cccaccccaaaguuugucugugguguuauagu

SEQ ID NO: 102647 - RNA, 22 nt, Human
cccaccccaacccaccccaugc

SEQ ID NO: 102648 - RNA, 23 nt, Human
cccaccccaaccuccccagacuc

SEQ ID NO: 102649 - RNA, 32 nt, Human
cccaccccaagcccuggcugcgacagcucugg

SEQ ID NO: 102650 - RNA, 32 nt, Human
cccaccccaagcuccacugggcggggaggaga

SEQ ID NO: 102651 - RNA, 32 nt, Human
cccaccccaaguccaagaacaaaugccagcca

SEQ ID NO: 102652 - RNA, 32 nt, Human
cccaccccaaguucuaaggucuuuucagagcg

SEQ ID NO: 102653 - RNA, 32 nt, Human
cccaccccaauccagaugugaucccccuguga

SEQ ID NO: 102654 - RNA, 32 nt, Human
cccaccccaaucccagggcagaaggacaugag

SEQ ID NO: 102655 - RNA, 32 nt, Human
cccaccccacacacacgcaacagcucuguacc

SEQ ID NO: 102656 - RNA, 32 nt, Human
cccaccccacacccuucacccucuguguccug

SEQ ID NO: 102657 - RNA, 32 nt, Human
cccaccccacacuuguuccagcucuuugaaau

SEQ ID NO: 102658 - RNA, 32 nt, Human
cccaccccacagacuccggccuguaaucagcu

SEQ ID NO: 102659 - RNA, 32 nt, Human
cccaccccacagcucggacugcucugggaggg

SEQ ID NO: 102660 - RNA, 20 nt, Human
cccaccccacauuggucauc

SEQ ID NO: 102661 - RNA, 21 nt, Human
cccaccccaccccaccccagg

SEQ ID NO: 102662 - RNA, 21 nt, Human
cccaccccaccccauccagug

SEQ ID NO: 102663 - RNA, 18 nt, Human
cccaccccacccccgggc

SEQ ID NO: 102664 - RNA, 32 nt, Human
cccaccccaccccuagaacugccauucccaag

SEQ ID NO: 102665 - RNA, 32 nt, Human
cccaccccaccccugaggcuugcccagccccc

SEQ ID NO: 102666 - RNA, 32 nt, Human
cccaccccacgccgaggugcacugaccaugag

SEQ ID NO: 102667 - RNA, 20 nt, Human
cccaccccacuguccuccaa

SEQ ID NO: 102668 - RNA, 32 nt, Human
cccaccccacuucuggccaguuggaguccagc

SEQ ID NO: 102669 - RNA, 32 nt, Human
cccaccccagaacaagccgacacacagggaga

SEQ ID NO: 102670 - RNA, 32 nt, Human
cccaccccagagccuggaguugcagaggcagc

SEQ ID NO: 102671 - RNA, 32 nt, Human
cccaccccagcacugcccaucuguaaaaucuu

SEQ ID NO: 102672 - RNA, 32 nt, Human
cccaccccagccacucaacuccugcuuguuuu

SEQ ID NO: 102673 - RNA, 32 nt, Human
cccaccccagcucagagggagcaggggcccag

SEQ ID NO: 102674 - RNA, 32 nt, Human
cccaccccaggccuauucaaagaaagacucca

SEQ ID NO: 102675 - RNA, 19 nt, Human
cccaccccaggccuugccc

SEQ ID NO: 102676 - RNA, 18 nt, Human
cccaccccaucuccccac

SEQ ID NO: 102677 - RNA, 32 nt, Human
cccaccccaucuuugcugccagcucucaggac

SEQ ID NO: 102678 - RNA, 32 nt, Human
cccaccccaucuuugcugggauucccaucaac

SEQ ID NO: 102679 - RNA, 32 nt, Human
cccaccccauucucugcuaccacauaucguag

SEQ ID NO: 102680 - RNA, 22 nt, Human
cccaccccauucugccaccaug

SEQ ID NO: 102681 - RNA, 32 nt, Human
cccaccccauuucucuccucacacacagacuc

SEQ ID NO: 102682 - RNA, 32 nt, Human
cccaccccauuuucuuguuucugguccauccg

SEQ ID NO: 102683 - RNA, 32 nt, Human
cccacccccaaaccaccgacucucauugccga

SEQ ID NO: 102684 - RNA, 32 nt, Human
cccacccccaacaggaauucuauaguaaggag

SEQ ID NO: 102685 - RNA, 32 nt, Human
cccacccccaacuuuauuugcaaugggauuuu

SEQ ID NO: 102686 - RNA, 22 nt, Human
cccacccccaagugcuccccac

SEQ ID NO: 102687 - RNA, 19 nt, Human
cccacccccacagcgcccu

SEQ ID NO: 102688 - RNA, 21 nt, Human
cccacccccaccacugcacca

SEQ ID NO: 102689 - RNA, 21 nt, Human
cccacccccaccauccuauua

SEQ ID NO: 102690 - RNA, 21 nt, Human
cccacccccacccaaaaguca

SEQ ID NO: 102691 - RNA, 20 nt, Human
cccacccccacccaagggcc

SEQ ID NO: 102692 - RNA, 32 nt, Human
cccacccccacccaccucuaucccagugucuc

SEQ ID NO: 102693 - RNA, 24 nt, Human
cccacccccacccaggcaggaagc

SEQ ID NO: 102694 - RNA, 21 nt, Human
cccacccccacccaucccuau

SEQ ID NO: 102695 - RNA, 32 nt, Human
cccacccccacccaucccuauaugugugugug

SEQ ID NO: 102696 - RNA, 24 nt, Human
cccacccccacccauccucagcua

SEQ ID NO: 102697 - RNA, 20 nt, Human
cccacccccaccccagugug

SEQ ID NO: 102698 - RNA, 17 nt, Human
cccacccccacccccac

SEQ ID NO: 102699 - RNA, 32 nt, Human
cccacccccacccccaccgggguguccaaagg

SEQ ID NO: 102700 - RNA, 18 nt, Human
cccacccccacccccauu

SEQ ID NO: 102701 - RNA, 19 nt, Human
cccacccccaccccccaca

SEQ ID NO: 102702 - RNA, 24 nt, Human
cccacccccacccccguggagaca

SEQ ID NO: 102703 - RNA, 21 nt, Human
cccacccccaccccggcucug

SEQ ID NO: 102704 - RNA, 17 nt, Human
cccacccccaccccuac

SEQ ID NO: 102705 - RNA, 20 nt, Human
cccacccccacccgccugcc

SEQ ID NO: 102706 - RNA, 19 nt, Human
cccacccccacccggaacc

SEQ ID NO: 102707 - RNA, 20 nt, Human
cccacccccacccuacagcc

SEQ ID NO: 102708 - RNA, 21 nt, Human
cccacccccaccguccagcca

SEQ ID NO: 102709 - RNA, 21 nt, Human
cccacccccaccuccgaguca

SEQ ID NO: 102710 - RNA, 24 nt, Human
cccacccccacuguacagagacca

SEQ ID NO: 102711 - RNA, 32 nt, Human
cccacccccacugucccucaugugccaugggc

SEQ ID NO: 102712 - RNA, 32 nt, Human
cccacccccagaggaggcggaagaggagcccg

SEQ ID NO: 102713 - RNA, 32 nt, Human
cccacccccagccugggggucugcgcuggggc

SEQ ID NO: 102714 - RNA, 21 nt, Human
cccacccccaggacugcugcu

SEQ ID NO: 102715 - RNA, 22 nt, Human
cccacccccaggccacagacca

SEQ ID NO: 102716 - RNA, 32 nt, Human
cccacccccaggcuggcaguagcacugcugag

SEQ ID NO: 102717 - RNA, 22 nt, Human
cccacccccauguccaccauga

SEQ ID NO: 102718 - RNA, 23 nt, Human
cccaccccccucccucucucuga

SEQ ID NO: 102719 - RNA, 21 nt, Human
cccaccccccuucccaccuga

SEQ ID NO: 102720 - RNA, 18 nt, Human
cccaccccccuuucccac

SEQ ID NO: 102721 - RNA, 21 nt, Human
cccacccccgaaacaaugcca

SEQ ID NO: 102722 - RNA, 32 nt, Human
cccacccccgagaggcggagagaaugugggag

SEQ ID NO: 102723 - RNA, 32 nt, Human
cccacccccgcacacgcacacgcacaucaugc

SEQ ID NO: 102724 - RNA, 20 nt, Human
cccacccccgcacccacuaa

SEQ ID NO: 102725 - RNA, 32 nt, Human
cccacccccgcacgccuguaaucccagcacuu

SEQ ID NO: 102726 - RNA, 24 nt, Human
cccacccccgccccgcccaugcuc

SEQ ID NO: 102727 - RNA, 22 nt, Human
cccacccccguguccaccguga

SEQ ID NO: 102728 - RNA, 22 nt, Human
cccacccccucagcagggccgg

SEQ ID NO: 102729 - RNA, 27 nt, Human
cccacccccucauuccucccucgccuu

SEQ ID NO: 102730 - RNA, 32 nt, Human
cccacccccuccagguccucagaguuugcaga

SEQ ID NO: 102731 - RNA, 32 nt, Human
cccacccccucccagcccccuccccucugcuc

SEQ ID NO: 102732 - RNA, 19 nt, Human
cccacccccuccccacuag

SEQ ID NO: 102733 - RNA, 23 nt, Human
cccacccccuccucaggcuccug

SEQ ID NO: 102734 - RNA, 32 nt, Human
cccacccccuccugcugacacucucacaguca

SEQ ID NO: 102735 - RNA, 32 nt, Human
cccacccccucggggcagaguuugcacaaagu

SEQ ID NO: 102736 - RNA, 32 nt, Human
cccacccccugccacccccucccugcugucag

SEQ ID NO: 102737 - RNA, 22 nt, Human
cccacccccugccccucgggca

SEQ ID NO: 102738 - RNA, 32 nt, Human
cccacccccugcccuuuguuaccaacaccagu

SEQ ID NO: 102739 - RNA, 32 nt, Human
cccacccccugccucuuuugguuguuguucuu

SEQ ID NO: 102740 - RNA, 18 nt, Human
cccacccccugccugcca

SEQ ID NO: 102741 - RNA, 20 nt, Human
cccacccccugcucccacua

SEQ ID NO: 102742 - RNA, 32 nt, Human
cccacccccuggaagaggaagggcccgggcau

SEQ ID NO: 102743 - RNA, 32 nt, Human
cccacccccuuuccuuccagccuuucugucau

SEQ ID NO: 102744 - RNA, 32 nt, Human
cccaccccgcccgggcccuccucggagggcgg

SEQ ID NO: 102745 - RNA, 23 nt, Human
cccaccccgggagggcagagcca

SEQ ID NO: 102746 - RNA, 17 nt, Human
cccaccccgggccgcgu

SEQ ID NO: 102747 - RNA, 23 nt, Human
cccaccccuaaagauguguccug

SEQ ID NO: 102748 - RNA, 21 nt, Human
cccaccccuaaccuggcuccu

SEQ ID NO: 102749 - RNA, 32 nt, Human
cccaccccuaucucccuucgcugacacucucu

SEQ ID NO: 102750 - RNA, 32 nt, Human
cccaccccuaucucccuuugcugacucucuuu

SEQ ID NO: 102751 - RNA, 32 nt, Human
cccaccccucacugcaaaagcaucuccuuaag

SEQ ID NO: 102752 - RNA, 32 nt, Human
cccaccccucauuccugucccaguccaacauc

SEQ ID NO: 102753 - RNA, 32 nt, Human
cccaccccuccaccgcuugccuucaacccauc

SEQ ID NO: 102754 - RNA, 32 nt, Human
cccaccccuccaccucucucucgauuucucuc

SEQ ID NO: 102755 - RNA, 32 nt, Human
cccaccccuccacuggccagccugggggugcc

SEQ ID NO: 102756 - RNA, 32 nt, Human
cccaccccuccagaacacggcucacgcuuacc

SEQ ID NO: 102757 - RNA, 32 nt, Human
cccaccccucccaucuccaccccacauggaag

SEQ ID NO: 102758 - RNA, 17 nt, Human
cccaccccuccccacuc

SEQ ID NO: 102759 - RNA, 32 nt, Human
cccaccccucccccaucuccucuuugaaagcc

SEQ ID NO: 102760 - RNA, 32 nt, Human
cccaccccucccccugucugccugcccucccc

SEQ ID NO: 102761 - RNA, 32 nt, Human
cccaccccuccccuccucaccuucccuccccc

SEQ ID NO: 102762 - RNA, 32 nt, Human
cccaccccuccccucucacgggcucuccccuc

SEQ ID NO: 102763 - RNA, 32 nt, Human
cccaccccuccccugauggucuuguucucuug

SEQ ID NO: 102764 - RNA, 32 nt, Human
cccaccccuccccugcgucuccuuguaaaguu

SEQ ID NO: 102765 - RNA, 32 nt, Human
cccaccccuccuggcccuggaagcagcuaggg

SEQ ID NO: 102766 - RNA, 32 nt, Human
cccaccccucugagccuuuucuccccagggua

SEQ ID NO: 102767 - RNA, 32 nt, Human
cccaccccucuuacuccagccucguguuguaa

SEQ ID NO: 102768 - RNA, 25 nt, Human
cccaccccugaaagacuggccccug

SEQ ID NO: 102769 - RNA, 32 nt, Human
cccaccccugacacaacucagauuaaagacag

SEQ ID NO: 102770 - RNA, 32 nt, Human
cccaccccugaugucugcuccagagacaaagg

SEQ ID NO: 102771 - RNA, 32 nt, Human
cccaccccugcagaggccugaagcugggccug

SEQ ID NO: 102772 - RNA, 32 nt, Human
cccaccccugcagggcagucuucugauggcuc

SEQ ID NO: 102773 - RNA, 20 nt, Human
cccaccccugccuccuccag

SEQ ID NO: 102774 - RNA, 17 nt, Human
cccaccccugccugcca

SEQ ID NO: 102775 - RNA, 32 nt, Human
cccaccccugcuacauuaaagacuucagacug

SEQ ID NO: 102776 - RNA, 32 nt, Human
cccaccccugcuccuccuuugucagugcgauc

SEQ ID NO: 102777 - RNA, 32 nt, Human
cccaccccugcucgccccuaucgcuccagcca

SEQ ID NO: 102778 - RNA, 23 nt, Human
cccaccccuggacggcagaggca

SEQ ID NO: 102779 - RNA, 25 nt, Human
cccaccccuggacugguggccccca

SEQ ID NO: 102780 - RNA, 32 nt, Human
cccaccccuucccagcagcccucugagccccc

SEQ ID NO: 102781 - RNA, 32 nt, Human
cccaccccuucccagccccagcccuggagaca

SEQ ID NO: 102782 - RNA, 32 nt, Human
cccaccccuucccccaaacuaccuuuggaaca

SEQ ID NO: 102783 - RNA, 18 nt, Human
cccaccccuucccuuccc

SEQ ID NO: 102784 - RNA, 32 nt, Human
cccaccccuugcccuuuccccaaaggaccuuu

SEQ ID NO: 102785 - RNA, 21 nt, Human
cccaccccuugccucuggcca

SEQ ID NO: 102786 - RNA, 17 nt, Human
cccaccccuuuccacua

SEQ ID NO: 102787 - RNA, 32 nt, Human
cccacccgaguaccuccagucacacuccccgc

SEQ ID NO: 102788 - RNA, 32 nt, Human
cccacccgcauccugaguggcgcugcagggcu

SEQ ID NO: 102789 - RNA, 32 nt, Human
cccacccgcccagcuccgccucgguggcaaac

SEQ ID NO: 102790 - RNA, 32 nt, Human
cccacccgcucagaccugguugccagcccaac

SEQ ID NO: 102791 - RNA, 17 nt, Human
cccacccgcucccacua

SEQ ID NO: 102792 - RNA, 18 nt, Human
cccacccgcucugcccca

SEQ ID NO: 102793 - RNA, 32 nt, Human
cccacccggcaggcgcaggccacccacacccg

SEQ ID NO: 102794 - RNA, 20 nt, Human
cccacccggccagccgcccu

SEQ ID NO: 102795 - RNA, 32 nt, Human
cccacccggcucccggugucuccucccggccg

SEQ ID NO: 102796 - RNA, 32 nt, Human
cccacccgggaaaugaaacuguugggcugggc

SEQ ID NO: 102797 - RNA, 25 nt, Human
cccacccgggagagcugauccccgg

SEQ ID NO: 102798 - RNA, 20 nt, Human
cccacccgggccacccccgg

SEQ ID NO: 102799 - RNA, 24 nt, Human
cccacccggucguggcccacccgg

SEQ ID NO: 102800 - RNA, 32 nt, Human
cccacccgugcugggcagagugcgugcacgcc

SEQ ID NO: 102801 - RNA, 32 nt, Human
cccacccuaaccacagcgccucuccagaccua

SEQ ID NO: 102802 - RNA, 32 nt, Human
cccacccuacagccccagguccuggcccaguc

SEQ ID NO: 102803 - RNA, 21 nt, Human
cccacccuaccaccagacaca

SEQ ID NO: 102804 - RNA, 32 nt, Human
cccacccuacccaguacccacgucaccccaag

SEQ ID NO: 102805 - RNA, 18 nt, Human
cccacccuaccccaccac

SEQ ID NO: 102806 - RNA, 32 nt, Human
cccacccuaccccacccuaccccaccacagca

SEQ ID NO: 102807 - RNA, 19 nt, Human
cccacccuaccccccgggc

SEQ ID NO: 102808 - RNA, 19 nt, Human
cccacccuacuccccacua

SEQ ID NO: 102809 - RNA, 19 nt, Human
cccacccuauccccucuaa

SEQ ID NO: 102810 - RNA, 32 nt, Human
cccacccucagccaaccaaguccuggugguuu

SEQ ID NO: 102811 - RNA, 32 nt, Human
cccacccucauggagccuccagucuagcugcc

SEQ ID NO: 102812 - RNA, 32 nt, Human
cccacccucauggagcuuauauucuagcaagg

SEQ ID NO: 102813 - RNA, 22 nt, Human
cccacccucauguccaccauga

SEQ ID NO: 102814 - RNA, 19 nt, Human
cccacccuccacacacuaa

SEQ ID NO: 102815 - RNA, 18 nt, Human
cccacccuccacccacua

SEQ ID NO: 102816 - RNA, 32 nt, Human
cccacccuccacccacuaccuccuccaacaaa

SEQ ID NO: 102817 - RNA, 32 nt, Human
cccacccuccaccccacccauuaaugacuuga

SEQ ID NO: 102818 - RNA, 32 nt, Human
cccacccuccaccugccccucuugccucuggc

SEQ ID NO: 102819 - RNA, 32 nt, Human
cccacccuccacugacugccauggggcccucc

SEQ ID NO: 102820 - RNA, 22 nt, Human
cccacccuccagcuuuuccuca

SEQ ID NO: 102821 - RNA, 32 nt, Human
cccacccucccacccacccgaccagcagagcu

SEQ ID NO: 102822 - RNA, 19 nt, Human
cccacccuccccaacccac

SEQ ID NO: 102823 - RNA, 20 nt, Human
cccacccuccccauccccac

SEQ ID NO: 102824 - RNA, 18 nt, Human
cccacccuccccaugccu

SEQ ID NO: 102825 - RNA, 18 nt, Human
cccacccuccccgcccca

SEQ ID NO: 102826 - RNA, 20 nt, Human
cccacccuccccucuccuga

SEQ ID NO: 102827 - RNA, 23 nt, Human
cccacccuccccugaacagaacc

SEQ ID NO: 102828 - RNA, 18 nt, Human
cccacccuccccuuccca

SEQ ID NO: 102829 - RNA, 18 nt, Human
cccacccucccgacccca

SEQ ID NO: 102830 - RNA, 18 nt, Human
cccacccucccuccccac

SEQ ID NO: 102831 - RNA, 21 nt, Human
cccacccucccuccccaccuc

SEQ ID NO: 102832 - RNA, 18 nt, Human
cccacccucccugcccau

SEQ ID NO: 102833 - RNA, 18 nt, Human
cccacccucccuucccac

SEQ ID NO: 102834 - RNA, 19 nt, Human
cccacccuccuacagcuag

SEQ ID NO: 102835 - RNA, 21 nt, Human
cccacccuccuccacccucua

SEQ ID NO: 102836 - RNA, 32 nt, Human
cccacccuccuccagggaucauccaccaucau

SEQ ID NO: 102837 - RNA, 19 nt, Human
cccacccuccucccaggcu

SEQ ID NO: 102838 - RNA, 32 nt, Human
cccacccuccugaccgcagcucccaggcccug

SEQ ID NO: 102839 - RNA, 18 nt, Human
cccacccuccugccccac

SEQ ID NO: 102840 - RNA, 18 nt, Human
cccacccuccugccccau

SEQ ID NO: 102841 - RNA, 18 nt, Human
cccacccuccuggccuca

SEQ ID NO: 102842 - RNA, 18 nt, Human
cccacccuccuucccuac

SEQ ID NO: 102843 - RNA, 21 nt, Human
cccacccucgcccugcuugcc

SEQ ID NO: 102844 - RNA, 19 nt, Human
cccacccucggcccugccc

SEQ ID NO: 102845 - RNA, 32 nt, Human
cccacccucuacagccuuccucaggccccugu

SEQ ID NO: 102846 - RNA, 32 nt, Human
cccacccucucucccucaccccucucucuggg

SEQ ID NO: 102847 - RNA, 32 nt, Human
cccacccucuggcccccaccuucuuggaggcg

SEQ ID NO: 102848 - RNA, 21 nt, Human
cccacccucuugcugcucgcc

SEQ ID NO: 102849 - RNA, 19 nt, Human
cccacccucuuuuuacuaa

SEQ ID NO: 102850 - RNA, 32 nt, Human
cccacccugacagcccaacaccaccuuccucc

SEQ ID NO: 102851 - RNA, 32 nt, Human
cccacccugaugccugcccuccaggauggcug

SEQ ID NO: 102852 - RNA, 32 nt, Human
cccacccugcagagaaggaagaaaggugaccg

SEQ ID NO: 102853 - RNA, 32 nt, Human
cccacccugcagcgcuccagcucuguugugua

SEQ ID NO: 102854 - RNA, 17 nt, Human
cccacccugcccacuaa

SEQ ID NO: 102855 - RNA, 32 nt, Human
cccacccugcccacucccaucccuucaacccc

SEQ ID NO: 102856 - RNA, 32 nt, Human
cccacccugccccucagucaugcagcucacau

SEQ ID NO: 102857 - RNA, 22 nt, Human
cccacccugcccuggcucucug

SEQ ID NO: 102858 - RNA, 20 nt, Human
cccacccugcuagccugccu

SEQ ID NO: 102859 - RNA, 32 nt, Human
cccacccugcugccacagcuuugcaugcugag

SEQ ID NO: 102860 - RNA, 32 nt, Human
cccacccugcuguggucauuugucaaaggggg

SEQ ID NO: 102861 - RNA, 22 nt, Human
cccacccuggcaugcccccuug

SEQ ID NO: 102862 - RNA, 32 nt, Human
cccacccugugcuaccucaucuucccgggagg

SEQ ID NO: 102863 - RNA, 32 nt, Human
cccacccuuaucucccuucacugacucucuuu

SEQ ID NO: 102864 - RNA, 18 nt, Human
cccacccuucacuugcuu

SEQ ID NO: 102865 - RNA, 32 nt, Human
cccacccuucccaaagauugggagguuccgcc

SEQ ID NO: 102866 - RNA, 32 nt, Human
cccacccuucgaccacugccucccucggccca

SEQ ID NO: 102867 - RNA, 32 nt, Human
cccacccuucuugcuguccccaacacaccuga

SEQ ID NO: 102868 - RNA, 16 nt, Human
cccacccuugccacua

SEQ ID NO: 102869 - RNA, 32 nt, Human
cccacccuugcucuccaauuaggcccacgugg

SEQ ID NO: 102870 - RNA, 32 nt, Human
cccacccuuguagagcaaaacucuucucucaa

SEQ ID NO: 102871 - RNA, 23 nt, Human
cccaccgacauuguccacccugg

SEQ ID NO: 102872 - RNA, 32 nt, Human
cccaccgcaaaguggcgguuuacuugaggcgg

SEQ ID NO: 102873 - RNA, 17 nt, Human
cccaccgcagcccucca

SEQ ID NO: 102874 - RNA, 32 nt, Human
cccaccgccccacugcaccaagacuguaauau

SEQ ID NO: 102875 - RNA, 24 nt, Human
cccaccgcccucccuccccagcuc

SEQ ID NO: 102876 - RNA, 18 nt, Human
cccaccgccggcccccgg

SEQ ID NO: 102877 - RNA, 32 nt, Human
cccaccgccucuucuccaucugagaaucacgg

SEQ ID NO: 102878 - RNA, 22 nt, Human
cccaccgcgcccucguucgccu

SEQ ID NO: 102879 - RNA, 21 nt, Human
cccaccgcgcgccucgccgcc

SEQ ID NO: 102880 - RNA, 17 nt, Human
cccaccgcucagcgccu

SEQ ID NO: 102881 - RNA, 20 nt, Human
cccaccgcucuucgcccgcc

SEQ ID NO: 102882 - RNA, 32 nt, Human
cccaccgcugugcaucgaaugagggaaguggc

SEQ ID NO: 102883 - RNA, 32 nt, Human
cccaccggacacacccucacuucgggaacagg

SEQ ID NO: 102884 - RNA, 32 nt, Human
cccaccgggguggggagagggacuuccagacu

SEQ ID NO: 102885 - RNA, 32 nt, Human
cccaccgucccucccuuuucuccucaaguccu

SEQ ID NO: 102886 - RNA, 32 nt, Human
cccaccgugccuggccuuuccuguuuaucuuu

SEQ ID NO: 102887 - RNA, 32 nt, Human
cccaccguuuucuuccccucagucucucccau

SEQ ID NO: 102888 - RNA, 24 nt, Human
cccaccuaaagauccucccccuaa

SEQ ID NO: 102889 - RNA, 32 nt, Human
cccaccuacccacauucuggccccuggcaauu

SEQ ID NO: 102890 - RNA, 32 nt, Human
cccaccuaccccuuccuuccucuuuaucucuc

SEQ ID NO: 102891 - RNA, 32 nt, Human
cccaccuaggccacgugugagcugcuccuguc

SEQ ID NO: 102892 - RNA, 32 nt, Human
cccaccuauccccauucucugccuguacugaa

SEQ ID NO: 102893 - RNA, 32 nt, Human
cccaccucaaaacuguuucggaugcuagaaau

SEQ ID NO: 102894 - RNA, 32 nt, Human
cccaccucaagugccuuauucucacagcaagc

SEQ ID NO: 102895 - RNA, 32 nt, Human
cccaccucacacccuucacucuccuuuuucug

SEQ ID NO: 102896 - RNA, 32 nt, Human
cccaccucacauaggacccggaagcagccuga

SEQ ID NO: 102897 - RNA, 32 nt, Human
cccaccucacccaggucucagcggcagugggc

SEQ ID NO: 102898 - RNA, 32 nt, Human
cccaccucacccauagguggcuacuaccuuac

SEQ ID NO: 102899 - RNA, 32 nt, Human
cccaccucaccuuuucauauuugguaaacugu

SEQ ID NO: 102900 - RNA, 24 nt, Human
cccaccucacuucccucccuuccc

SEQ ID NO: 102901 - RNA, 32 nt, Human
cccaccucagaguaaggacuacccagggguga

SEQ ID NO: 102902 - RNA, 30 nt, Human
cccaccucagcccccaugcucuugucaaac

SEQ ID NO: 102903 - RNA, 32 nt, Human
cccaccucagccuauugggcagcugggacuac

SEQ ID NO: 102904 - RNA, 32 nt, Human
cccaccucagcuucccaaaaugcugggauuac

SEQ ID NO: 102905 - RNA, 19 nt, Human
cccaccucaggcccugccc

SEQ ID NO: 102906 - RNA, 32 nt, Human
cccaccuccaacaauggggauuacaguuugac

SEQ ID NO: 102907 - RNA, 32 nt, Human
cccaccuccaccuugucacuccagguucuggu

SEQ ID NO: 102908 - RNA, 32 nt, Human
cccaccuccagacugacaacaaaaagaccuaa

SEQ ID NO: 102909 - RNA, 32 nt, Human
cccaccuccagccucaccaccaggccaggagg

SEQ ID NO: 102910 - RNA, 32 nt, Human
cccaccuccaggccucucccaccucaggcccu

SEQ ID NO: 102911 - RNA, 23 nt, Human
cccaccuccaugccuggcuccug

SEQ ID NO: 102912 - RNA, 32 nt, Human
cccaccucccacccuccuccucuucuccuuca

SEQ ID NO: 102913 - RNA, 23 nt, Human
cccaccucccagcccucuccuca

SEQ ID NO: 102914 - RNA, 32 nt, Human
cccaccucccaguguugagauuauagguaugu

SEQ ID NO: 102915 - RNA, 22 nt, Human
cccaccucccgagcuggcuggg

SEQ ID NO: 102916 - RNA, 32 nt, Human
cccaccucccugaccuaccccugcugcaccau

SEQ ID NO: 102917 - RNA, 17 nt, Human
cccaccucccugccagg

SEQ ID NO: 102918 - RNA, 17 nt, Human
cccaccuccgccugcca

SEQ ID NO: 102919 - RNA, 32 nt, Human
cccaccuccuacuccuggcucagaccuuugcu

SEQ ID NO: 102920 - RNA, 32 nt, Human
cccaccuccucccuucccagccccaaagaacu

SEQ ID NO: 102921 - RNA, 16 nt, Human
cccaccuccuccgggc

SEQ ID NO: 102922 - RNA, 32 nt, Human
cccaccuccucugccucaaggcuguccuggcu

SEQ ID NO: 102923 - RNA, 20 nt, Human
cccaccuccugcucccgggc

SEQ ID NO: 102924 - RNA, 20 nt, Human
cccaccuccuggcucccagg

SEQ ID NO: 102925 - RNA, 25 nt, Human
cccaccuccuggcucccaggacggg

SEQ ID NO: 102926 - RNA, 19 nt, Human
cccaccuccuuccccccac

SEQ ID NO: 102927 - RNA, 32 nt, Human
cccaccuccuugcucuccccagccugccaagc

SEQ ID NO: 102928 - RNA, 23 nt, Human
cccaccucgcgguccccaggacc

SEQ ID NO: 102929 - RNA, 32 nt, Human
cccaccucucaaggagucucaugccgcagggu

SEQ ID NO: 102930 - RNA, 22 nt, Human
cccaccucucauagcagagcca

SEQ ID NO: 102931 - RNA, 32 nt, Human
cccaccucucccggccucugcagccaccgucc

SEQ ID NO: 102932 - RNA, 32 nt, Human
cccaccucucccugggggucucagggagaacc

SEQ ID NO: 102933 - RNA, 32 nt, Human
cccaccucuccgccucuccaucaccagccuuc

SEQ ID NO: 102934 - RNA, 32 nt, Human
cccaccucucucaugcugaaucacauccaugg

SEQ ID NO: 102935 - RNA, 31 nt, Human
cccaccucucucucugguccuguucaucucu

SEQ ID NO: 102936 - RNA, 32 nt, Human
cccaccucucuuuucugucauucuccaacucu

SEQ ID NO: 102937 - RNA, 18 nt, Human
cccaccucugggccgggc

SEQ ID NO: 102938 - RNA, 32 nt, Human
cccaccucuucucuccccuacagggcccuugc

SEQ ID NO: 102939 - RNA, 21 nt, Human
cccaccucuucucuucugcuu

SEQ ID NO: 102940 - RNA, 32 nt, Human
cccaccucuugagagcccccagugccggagca

SEQ ID NO: 102941 - RNA, 19 nt, Human
cccaccucuugcccccuaa

SEQ ID NO: 102942 - RNA, 32 nt, Human
cccaccucuuucccaggcaccugggcccugcc

SEQ ID NO: 102943 - RNA, 32 nt, Human
cccaccugacugcaguggcugcugcuugcuug

SEQ ID NO: 102944 - RNA, 32 nt, Human
cccaccugagcccugacagcaccaaggcccuc

SEQ ID NO: 102945 - RNA, 32 nt, Human
cccaccugagccugacagaggagaagcagcgg

SEQ ID NO: 102946 - RNA, 32 nt, Human
cccaccugcaagcugggguggggaugaagccu

SEQ ID NO: 102947 - RNA, 32 nt, Human
cccaccugcaauuucccaccuccugcccaucc

SEQ ID NO: 102948 - RNA, 22 nt, Human
cccaccugccacccaggacggg

SEQ ID NO: 102949 - RNA, 32 nt, Human
cccaccugccccaaccuccaccccucucugug

SEQ ID NO: 102950 - RNA, 32 nt, Human
cccaccugccuguauaccccagacuugccucu

SEQ ID NO: 102951 - RNA, 32 nt, Human
cccaccugccuguaugacagagugagacccug

SEQ ID NO: 102952 - RNA, 32 nt, Human
cccaccugccuucacagguuuaucucccaggc

SEQ ID NO: 102953 - RNA, 22 nt, Human
cccaccugccuugcucuuggaa

SEQ ID NO: 102954 - RNA, 19 nt, Human
cccaccugccuuuccccac

SEQ ID NO: 102955 - RNA, 18 nt, Human
cccaccugcgucagcuca

SEQ ID NO: 102956 - RNA, 32 nt, Human
cccaccugcuacccucccuccuaggcaucuuc

SEQ ID NO: 102957 - RNA, 32 nt, Human
cccaccugcucaccaauuccacuuccugcccc

SEQ ID NO: 102958 - RNA, 32 nt, Human
cccaccugcuccuuuucuccugcagcauggag

SEQ ID NO: 102959 - RNA, 22 nt, Human
cccaccugcuggaccccagggu

SEQ ID NO: 102960 - RNA, 32 nt, Human
cccaccugcuggagugaaggggccaaggaggg

SEQ ID NO: 102961 - RNA, 32 nt, Human
cccaccuggaccaccugaccccucgggauucc

SEQ ID NO: 102962 - RNA, 32 nt, Human
cccaccuggacccugggcuauuggcugcuccc

SEQ ID NO: 102963 - RNA, 22 nt, Human
cccaccuggagcccuccccugc

SEQ ID NO: 102964 - RNA, 32 nt, Human
cccaccuggaggaggagguuggaggguugacc

SEQ ID NO: 102965 - RNA, 19 nt, Human
cccaccuggccuccacuug

SEQ ID NO: 102966 - RNA, 29 nt, Human
cccaccuggcugccaacaugauccccguc

SEQ ID NO: 102967 - RNA, 32 nt, Human
cccaccugggcaacaagaaggaaacucugucu

SEQ ID NO: 102968 - RNA, 32 nt, Human
cccaccugggcaacauaguaagaucuugucuc

SEQ ID NO: 102969 - RNA, 20 nt, Human
cccaccuggggccccauuaa

SEQ ID NO: 102970 - RNA, 32 nt, Human
cccaccugggugggacacagcaggugcuggac

SEQ ID NO: 102971 - RNA, 32 nt, Human
cccaccugguagacacggucacugugacagga

SEQ ID NO: 102972 - RNA, 32 nt, Human
cccaccuguagucccagcacuuugggaggcaa

SEQ ID NO: 102973 - RNA, 32 nt, Human
cccaccuguccaucuccauaaaaaucccuaaa

SEQ ID NO: 102974 - RNA, 32 nt, Human
cccaccuguccuaucaggugggccacacccug

SEQ ID NO: 102975 - RNA, 32 nt, Human
cccaccugucggucuuguccuggcucugccug

SEQ ID NO: 102976 - RNA, 25 nt, Human
cccaccugugaaucucaggccccca

SEQ ID NO: 102977 - RNA, 32 nt, Human
cccaccuguuacugcugggagucaagucagcu

SEQ ID NO: 102978 - RNA, 32 nt, Human
cccaccuguucuuuccuccccugccgaggugu

SEQ ID NO: 102979 - RNA, 31 nt, Human
cccaccuuacucaaggguguagguaagagau

SEQ ID NO: 102980 - RNA, 22 nt, Human
cccaccuuccagacccccuugg

SEQ ID NO: 102981 - RNA, 32 nt, Human
cccaccuuccaugagugcagcacacagguagu

SEQ ID NO: 102982 - RNA, 21 nt, Human
cccaccuuccccccaccugag

SEQ ID NO: 102983 - RNA, 32 nt, Human
cccaccuucccucuuuucuggaagccaaaguc

SEQ ID NO: 102984 - RNA, 32 nt, Human
cccaccuuccuccucacucucuaccucccugc

SEQ ID NO: 102985 - RNA, 32 nt, Human
cccaccuuccuuaccuccucuucccccauuaa

SEQ ID NO: 102986 - RNA, 32 nt, Human
cccaccuuccuuccaugguucccacccuccac

SEQ ID NO: 102987 - RNA, 25 nt, Human
cccaccuugaaaaucgcugcucuga

SEQ ID NO: 102988 - RNA, 32 nt, Human
cccaccuugccucuguccugcgcugggcucca

SEQ ID NO: 102989 - RNA, 18 nt, Human
cccaccuugccuggcucc

SEQ ID NO: 102990 - RNA, 20 nt, Human
cccaccuugccuggcuccca

SEQ ID NO: 102991 - RNA, 32 nt, Human
cccaccuugcugucugucucauugucuuucuc

SEQ ID NO: 102992 - RNA, 32 nt, Human
cccaccuugucagaggcuuccacccugcucac

SEQ ID NO: 102993 - RNA, 22 nt, Human
cccaccuuucuggacggaacca

SEQ ID NO: 102994 - RNA, 32 nt, Human
cccaccuuuucgggcugucccaugucuaucuc

SEQ ID NO: 102995 - RNA, 32 nt, Human
cccaccuuuuucuccccucuccgucuucuccc

SEQ ID NO: 102996 - RNA, 32 nt, Human
cccacgaacccccagccccgcacccuccccgu

SEQ ID NO: 102997 - RNA, 32 nt, Human
cccacgacacugcagccccacccagaugcccc

SEQ ID NO: 102998 - RNA, 32 nt, Human
cccacgacccagucaaauuugaugucccuuug

SEQ ID NO: 102999 - RNA, 23 nt, Human
cccacgaccgcagcagccucgcc

SEQ ID NO: 103000 - RNA, 32 nt, Human
cccacgaccggagugcuggcucucacagugaa

SEQ ID NO: 103001 - RNA, 32 nt, Human
cccacgagaagaacuaaaaauuacgcuggucc

SEQ ID NO: 103002 - RNA, 24 nt, Human
cccacgagauggaaguugcaguga

SEQ ID NO: 103003 - RNA, 18 nt, Human
cccacgaggaggaaccag

SEQ ID NO: 103004 - RNA, 21 nt, Human
cccacgaggcaggagucagga

SEQ ID NO: 103005 - RNA, 32 nt, Human
cccacgagggaguaugggagagagggacugcc

SEQ ID NO: 103006 - RNA, 18 nt, Human
cccacgaguacagaccag

SEQ ID NO: 103007 - RNA, 24 nt, Human
cccacgaguucaaggcugcaguga

SEQ ID NO: 103008 - RNA, 32 nt, Human
cccacgaguucaaggcugcagugagucgugau

SEQ ID NO: 103009 - RNA, 32 nt, Human
cccacgaucacccagcaggagucguggcagaa

SEQ ID NO: 103010 - RNA, 32 nt, Human
cccacgauguggggaaagauaggagagucuag

SEQ ID NO: 103011 - RNA, 32 nt, Human
cccacgauuggagagaauccugcuaagccagu

SEQ ID NO: 103012 - RNA, 32 nt, Human
cccacgcacaccucggccugaugagaggaugg

SEQ ID NO: 103013 - RNA, 32 nt, Human
cccacgcacaugcacaccacaacacacaacac

SEQ ID NO: 103014 - RNA, 32 nt, Human
cccacgcacccccucacacacuaugcucucuc

SEQ ID NO: 103015 - RNA, 32 nt, Human
cccacgcagagucacugcuggggaagggaugg

SEQ ID NO: 103016 - RNA, 20 nt, Human
cccacgcaggagugcagugg

SEQ ID NO: 103017 - RNA, 32 nt, Human
cccacgcauguggccgccagccccaggagccc

SEQ ID NO: 103018 - RNA, 21 nt, Human
cccacgcccacuagccugcca

SEQ ID NO: 103019 - RNA, 23 nt, Human
cccacgccccuccccagccccca

SEQ ID NO: 103020 - RNA, 20 nt, Human
cccacgcccggcgccgcccg

SEQ ID NO: 103021 - RNA, 32 nt, Human
cccacgcccugccugcucuuccaguccagcca

SEQ ID NO: 103022 - RNA, 32 nt, Human
cccacgccucagguguggcugccugugggacc

SEQ ID NO: 103023 - RNA, 21 nt, Human
cccacgccuccagcgccgccu

SEQ ID NO: 103024 - RNA, 32 nt, Human
cccacgccucuaaucccagcacuuugggaggc

SEQ ID NO: 103025 - RNA, 32 nt, Human
cccacgccuguaaucccagcacuuugggagac

SEQ ID NO: 103026 - RNA, 32 nt, Human
cccacgccuguaaucccagcacuuugggaggc

SEQ ID NO: 103027 - RNA, 32 nt, Human
cccacgccuguaaucccagcuacuuggaaggc

SEQ ID NO: 103028 - RNA, 32 nt, Human
cccacgccuguccuccccaucacuuuccuguc

SEQ ID NO: 103029 - RNA, 20 nt, Human
cccacgccuucucccuuccu

SEQ ID NO: 103030 - RNA, 32 nt, Human
cccacgccuuuccaugggauaauagggaccua

SEQ ID NO: 103031 - RNA, 32 nt, Human
cccacgcgcacacacuccugcccacgcccacg

SEQ ID NO: 103032 - RNA, 20 nt, Human
cccacgcgcagcccaggacc

SEQ ID NO: 103033 - RNA, 23 nt, Human
cccacgcgcccgcggcccgcgcg

SEQ ID NO: 103034 - RNA, 24 nt, Human
cccacgcgccucgcuugcugcgcg

SEQ ID NO: 103035 - RNA, 32 nt, Human
cccacgcgcugccccuuccuggccugacccca

SEQ ID NO: 103036 - RNA, 32 nt, Human
cccacgcggaggaaggaagagacgcaggcagg

SEQ ID NO: 103037 - RNA, 21 nt, Human
cccacgcguccgcccacgcgu

SEQ ID NO: 103038 - RNA, 32 nt, Human
cccacgcguccgcucccucucucccucccucc

SEQ ID NO: 103039 - RNA, 32 nt, Human
cccacgcguccgguggaaguggccguggggcg

SEQ ID NO: 103040 - RNA, 23 nt, Human
cccacgcgucgugucgccgggaa

SEQ ID NO: 103041 - RNA, 32 nt, Human
cccacgcuauggacccagauaggagggguuag

SEQ ID NO: 103042 - RNA, 32 nt, Human
cccacgcucaaacuguaugccugcuccagccu

SEQ ID NO: 103043 - RNA, 32 nt, Human
cccacgcuccuccaccacgaggcacugaccug

SEQ ID NO: 103044 - RNA, 32 nt, Human
cccacgcugccccaucuugccugcuguuccag

SEQ ID NO: 103045 - RNA, 20 nt, Human
cccacgcuggaaugcagugg

SEQ ID NO: 103046 - RNA, 32 nt, Human
cccagggcuguaaccuggugucugguagcccc

SEQ ID NO: 103047 - RNA, 32 nt, Human
cccagggcuguaacugccaggcucucuuugcc

SEQ ID NO: 103048 - RNA, 18 nt, Human
cccagggcugugcuggug

SEQ ID NO: 103049 - RNA, 21 nt, Human
cccagggcuuaggagggcugg

SEQ ID NO: 103050 - RNA, 32 nt, Human
cccagggcuucugcuugccucgcugauguugc

SEQ ID NO: 103051 - RNA, 28 nt, Human
cccagggcuuuccuucccucuccugcuu

SEQ ID NO: 103052 - RNA, 26 nt, Human
cccagggcuuuccuuucaccuccugc

SEQ ID NO: 103053 - RNA, 21 nt, Human
cccagggcuuucuuucugcuu

SEQ ID NO: 103054 - RNA, 32 nt, Human
cccagggcuuugcagccugcagaugccaccug

SEQ ID NO: 103055 - RNA, 27 nt, Human
cccagggcuuugcccuaccuucuguuu

SEQ ID NO: 103056 - RNA, 20 nt, Human
cccaggggaacaccccugcc

SEQ ID NO: 103057 - RNA, 19 nt, Human
cccaggggaacuggcagcg

SEQ ID NO: 103058 - RNA, 32 nt, Human
cccaggggaagaaaggagggcugugaggagau

SEQ ID NO: 103059 - RNA, 17 nt, Human
cccaggggaagacccag

SEQ ID NO: 103060 - RNA, 16 nt, Human
cccaggggaaggccag

SEQ ID NO: 103061 - RNA, 23 nt, Human
cccaggggaaugaucucugauga

SEQ ID NO: 103062 - RNA, 32 nt, Human
cccaggggacacuucccucagcaaagaguaga

SEQ ID NO: 103063 - RNA, 17 nt, Human
cccaggggaugagagcc

SEQ ID NO: 103064 - RNA, 17 nt, Human
cccaggggccaagucag

SEQ ID NO: 103065 - RNA, 19 nt, Human
cccaggggccaggggccag

SEQ ID NO: 103066 - RNA, 20 nt, Human
cccaggggcccacagccacg

SEQ ID NO: 103067 - RNA, 22 nt, Human
cccaggggcccggccuccaggg

SEQ ID NO: 103068 - RNA, 23 nt, Human
cccaggggcccucccggguccca

SEQ ID NO: 103069 - RNA, 32 nt, Human
cccaggggccgcacagacgaggcgugguccag

SEQ ID NO: 103070 - RNA, 17 nt, Human
cccaggggccgggccag

SEQ ID NO: 103071 - RNA, 32 nt, Human
cccaggggcgggcagagagggaaggagggagg

SEQ ID NO: 103072 - RNA, 20 nt, Human
cccaggggcugaggccagcu

SEQ ID NO: 103073 - RNA, 18 nt, Human
cccaggggcugcaugugg

SEQ ID NO: 103074 - RNA, 32 nt, Human
cccaggggcuguggacaaaccggcugggggac

SEQ ID NO: 103075 - RNA, 21 nt, Human
cccaggggcuuccgggcacag

SEQ ID NO: 103076 - RNA, 32 nt, Human
cccaggggcuuccuuuggacuggacugucccu

SEQ ID NO: 103077 - RNA, 32 nt, Human
cccagggggagggggagagagcaaggagaucg

SEQ ID NO: 103078 - RNA, 24 nt, Human
cccagggggcagagguugcaguga

SEQ ID NO: 103079 - RNA, 32 nt, Human
cccagggggcagagguugcagugagccgagau

SEQ ID NO: 103080 - RNA, 21 nt, Human
cccagggggccacuccugaga

SEQ ID NO: 103081 - RNA, 17 nt, Human
cccagggggccggccgg

SEQ ID NO: 103082 - RNA, 21 nt, Human
cccagggggcgacagaggcag

SEQ ID NO: 103083 - RNA, 32 nt, Human
cccagggggcggagcuuggaguaagccgagau

SEQ ID NO: 103084 - RNA, 23 nt, Human
cccagggggcggagguugcagug

SEQ ID NO: 103085 - RNA, 24 nt, Human
cccagggggcggagguugcaguga

SEQ ID NO: 103086 - RNA, 16 nt, Human
cccaggggggacgcca

SEQ ID NO: 103087 - RNA, 20 nt, Human
cccagggggucugccugaga

SEQ ID NO: 103088 - RNA, 21 nt, Human
cccagggggucugccugagaa

SEQ ID NO: 103089 - RNA, 32 nt, Human
cccaggggguuagaggaggggugaagauuggg

SEQ ID NO: 103090 - RNA, 18 nt, Human
cccaggggguugguccag

SEQ ID NO: 103091 - RNA, 32 nt, Human
cccagggguaugagggcaccagcuggguucuc

SEQ ID NO: 103092 - RNA, 21 nt, Human
cccaggggucccgcggguuuu

SEQ ID NO: 103093 - RNA, 23 nt, Human
cccaggggucuaauuacuugaga

SEQ ID NO: 103094 - RNA, 22 nt, Human
cccaggggucucccuggcuccc

SEQ ID NO: 103095 - RNA, 21 nt, Human
cccaggggugccuuggggaug

SEQ ID NO: 103096 - RNA, 23 nt, Human
cccagggguggaggcugcaauga

SEQ ID NO: 103097 - RNA, 32 nt, Human
cccaggggugggaaguuuucauuugcaggggg

SEQ ID NO: 103098 - RNA, 24 nt, Human
cccagggguucacagcugcaguga

SEQ ID NO: 103099 - RNA, 24 nt, Human
cccagggguugcaggcugcaguga

SEQ ID NO: 103100 - RNA, 24 nt, Human
cccagggguuugaagcuucaguga

SEQ ID NO: 103101 - RNA, 24 nt, Human
cccagggguuugaggcugcaguga

SEQ ID NO: 103102 - RNA, 24 nt, Human
cccagggguuugcggcugcaguga

SEQ ID NO: 103103 - RNA, 32 nt, Human
cccaggguaagugcccacgaaagcccagucca

SEQ ID NO: 103104 - RNA, 21 nt, Human
cccagggucacacagcagcuu

SEQ ID NO: 103105 - RNA, 32 nt, Human
cccagggucaccaggccagagccuccaguggu

SEQ ID NO: 103106 - RNA, 32 nt, Human
cccagggucaggcccuucagagccagggcuag

SEQ ID NO: 103107 - RNA, 21 nt, Human
cccaggguccaccuuuuacuu

SEQ ID NO: 103108 - RNA, 22 nt, Human
cccaggguccagauuucugcuu

SEQ ID NO: 103109 - RNA, 21 nt, Human
cccagggucccagccuggcca

SEQ ID NO: 103110 - RNA, 32 nt, Human
cccagggucccagccuggccaccagcuucccu

SEQ ID NO: 103111 - RNA, 22 nt, Human
cccagggucccagcuggcuggg

SEQ ID NO: 103112 - RNA, 22 nt, Human
cccaggguccccuccccagcuc

SEQ ID NO: 103113 - RNA, 28 nt, Human
cccaggguccuaccuccuccucuugcuu

SEQ ID NO: 103114 - RNA, 32 nt, Human
cccaggguccugugccuggaugggggugcagg

SEQ ID NO: 103115 - RNA, 21 nt, Human
cccagggucuaccuucugccu

SEQ ID NO: 103116 - RNA, 32 nt, Human
cccagggucucccauagacagccugggggcaa

SEQ ID NO: 103117 - RNA, 23 nt, Human
cccagggucuucccuaccucagg

SEQ ID NO: 103118 - RNA, 22 nt, Human
cccagggugagcagggcccuca

SEQ ID NO: 103119 - RNA, 32 nt, Human
cccagggugccuggcuggucccugccggcagc

SEQ ID NO: 103120 - RNA, 32 nt, Human
cccagggugcugcaguggcucacagagaugcc

SEQ ID NO: 103121 - RNA, 32 nt, Human
cccagggugcugcugccacccgccccagccag

SEQ ID NO: 103122 - RNA, 24 nt, Human
cccagggugcugggauuacaggca

SEQ ID NO: 103123 - RNA, 21 nt, Human
cccaggguggaauacaguggu

SEQ ID NO: 103124 - RNA, 23 nt, Human
cccaggguggaauacaguggugu

SEQ ID NO: 103125 - RNA, 19 nt, Human
cccaggguggagacagugg

SEQ ID NO: 103126 - RNA, 20 nt, Human
cccaggguggagugcagugg

SEQ ID NO: 103127 - RNA, 21 nt, Human
cccaggguggagugcaguggu

SEQ ID NO: 103128 - RNA, 32 nt, Human
cccaggguggcagagcuguggugcaggguugc

SEQ ID NO: 103129 - RNA, 32 nt, Human
cccaggguggcugccagcccacugccuccugc

SEQ ID NO: 103130 - RNA, 32 nt, Human
cccagggugggagcugggccgggcugggaugu

SEQ ID NO: 103131 - RNA, 32 nt, Human
cccagggugggguggggugggguggagggguc

SEQ ID NO: 103132 - RNA, 32 nt, Human
cccagggugggucaggcgugugcacuguggaa

SEQ ID NO: 103133 - RNA, 32 nt, Human
cccagggugggugggacugagcaggauggauu

SEQ ID NO: 103134 - RNA, 32 nt, Human
cccaggguggugagagagucccaugccacccg

SEQ ID NO: 103135 - RNA, 32 nt, Human
cccagggugugcagccacugacuuggggacug

SEQ ID NO: 103136 - RNA, 23 nt, Human
cccagggugugccagcccgucuc

SEQ ID NO: 103137 - RNA, 32 nt, Human
cccaggguuacagcaagagccacugaggugug

SEQ ID NO: 103138 - RNA, 32 nt, Human
cccaggguuagagugggcagggcagagccgcg

SEQ ID NO: 103139 - RNA, 32 nt, Human
cccaggguucggagcuugugaguggacggugc

SEQ ID NO: 103140 - RNA, 28 nt, Human
cccaggguucuaucuucuuuucuugccu

SEQ ID NO: 103141 - RNA, 22 nt, Human
cccaggguucuauucucugccu

SEQ ID NO: 103142 - RNA, 28 nt, Human
cccaggguucucuuuuaucugcuugccu

SEQ ID NO: 103143 - RNA, 29 nt, Human
cccaggguucuguuuccuccuuucugccu

SEQ ID NO: 103144 - RNA, 26 nt, Human
cccaggguucuuuccaucucuugucu

SEQ ID NO: 103145 - RNA, 28 nt, Human
cccaggguuuaccuucuaccucuuggcu

SEQ ID NO: 103146 - RNA, 28 nt, Human
cccaggguuuuaaauguaucucuugccu

SEQ ID NO: 103147 - RNA, 28 nt, Human
cccaggguuuuccccucuacucuugucu

SEQ ID NO: 103148 - RNA, 27 nt, Human
cccaggguuuugauucauuuucugccu

SEQ ID NO: 103149 - RNA, 27 nt, Human
cccaggguuuuguuucugccuccugcu

SEQ ID NO: 103150 - RNA, 29 nt, Human
cccaggguuuuguuuuuugacuucugccu

SEQ ID NO: 103151 - RNA, 21 nt, Human
cccagguaacuccucucucaa

SEQ ID NO: 103152 - RNA, 32 nt, Human
cccagguaaggcggaggcugcuggugugagga

SEQ ID NO: 103153 - RNA, 18 nt, Human
cccagguacugcagcggc

SEQ ID NO: 103154 - RNA, 32 nt, Human
cccagguagagacaagcuagaggcucugcgga

SEQ ID NO: 103155 - RNA, 24 nt, Human
cccagguagcugggacuacaggca

SEQ ID NO: 103156 - RNA, 22 nt, Human
cccagguagcugggauuacagg

SEQ ID NO: 103157 - RNA, 24 nt, Human
cccagguagcugggauuacaggca

SEQ ID NO: 103158 - RNA, 20 nt, Human
cccagguagggaaagcggaa

SEQ ID NO: 103159 - RNA, 32 nt, Human
cccagguagggaggggagaguaugaggagggu

SEQ ID NO: 103160 - RNA, 18 nt, Human
cccagguaguccaugcgg

SEQ ID NO: 103161 - RNA, 32 nt, Human
cccagguagucuggguuggaggaggcagagcc

SEQ ID NO: 103162 - RNA, 32 nt, Human
cccagguauccuaucccaaccuugccagcaug

SEQ ID NO: 103163 - RNA, 22 nt, Human
cccagguaugccgcagagccag

SEQ ID NO: 103164 - RNA, 32 nt, Human
cccagguaugcucccaccuccaccugccccac

SEQ ID NO: 103165 - RNA, 32 nt, Human
cccagguauucaagaccagccugggaaacgug

SEQ ID NO: 103166 - RNA, 18 nt, Human
cccaggucacacuguggc

SEQ ID NO: 103167 - RNA, 32 nt, Human
cccaggucacccaaccagcgaguggcagaacu

SEQ ID NO: 103168 - RNA, 18 nt, Human
cccaggucaguggucccc

SEQ ID NO: 103169 - RNA, 17 nt, Human
cccagguccagggccag

SEQ ID NO: 103170 - RNA, 23 nt, Human
cccagguccccaccugugggcca

SEQ ID NO: 103171 - RNA, 24 nt, Human
cccaggucccgaaagaugcaguga

SEQ ID NO: 103172 - RNA, 21 nt, Human
cccagguccugcugccucucu

SEQ ID NO: 103173 - RNA, 32 nt, Human
cccagguccuggcugccagcuuuccuccucug

SEQ ID NO: 103174 - RNA, 16 nt, Human
cccaggucgcagcagc

SEQ ID NO: 103175 - RNA, 24 nt, Human
cccaggucgcugggacuacaggca

SEQ ID NO: 103176 - RNA, 32 nt, Human
cccaggucggcggguguucccaggaagaggaa

SEQ ID NO: 103177 - RNA, 32 nt, Human
cccaggucguuuucccuuucagcugcaaugcc

SEQ ID NO: 103178 - RNA, 32 nt, Human
cccaggucuaaaguagcuacagaaaggggaau

SEQ ID NO: 103179 - RNA, 20 nt, Human
cccaggucuaccuguugcag

SEQ ID NO: 103180 - RNA, 32 nt, Human
cccaggucuaggcugagaaguccuuuuucuuc

SEQ ID NO: 103181 - RNA, 32 nt, Human
cccaggucuccugauuucaaguacaguucuug

SEQ ID NO: 103182 - RNA, 21 nt, Human
cccaggucugcggaggcacag

SEQ ID NO: 103183 - RNA, 32 nt, Human
cccaggucuuccugcugcugccagggagagca

SEQ ID NO: 103184 - RNA, 32 nt, Human
cccaggucuugagcucuuuuggcuccagaguu

SEQ ID NO: 103185 - RNA, 21 nt, Human
cccaggugaaaccccaucucu

SEQ ID NO: 103186 - RNA, 32 nt, Human
cccaggugacauggaaucuuggagcagccuug

SEQ ID NO: 103187 - RNA, 32 nt, Human
cccaggugacuuacauaugcagccaagguuga

SEQ ID NO: 103188 - RNA, 17 nt, Human
cccaggugacuugugca

SEQ ID NO: 103189 - RNA, 32 nt, Human
cccaggugagagaaggaagugaggccauagau

SEQ ID NO: 103190 - RNA, 32 nt, Human
cccaggugagaugugcaagaggcgugggcuug

SEQ ID NO: 103191 - RNA, 32 nt, Human
cccaggugagcagaucaccugaggucaggagu

SEQ ID NO: 103192 - RNA, 32 nt, Human
cccaggugaucugguuacagugcagugcugac

SEQ ID NO: 103193 - RNA, 32 nt, Human
cccaggugauucuaaugugcagcagaguuugg

SEQ ID NO: 103194 - RNA, 32 nt, Human
cccaggugcaacccccagcccaggaggagacu

SEQ ID NO: 103195 - RNA, 32 nt, Human
cccaggugcaagagacaggggaagagggauag

SEQ ID NO: 103196 - RNA, 17 nt, Human
cccaggugcagagcgag

SEQ ID NO: 103197 - RNA, 32 nt, Human
cccaggugcaggccaccaccuccgggucggca

SEQ ID NO: 103198 - RNA, 25 nt, Human
cccaggugccccaggugugcccagc

SEQ ID NO: 103199 - RNA, 19 nt, Human
cccaggugccgcuaccagc

SEQ ID NO: 103200 - RNA, 22 nt, Human
cccaggugccuccuucccaacu

SEQ ID NO: 103201 - RNA, 21 nt, Human
cccaggugccuucccccugcu

SEQ ID NO: 103202 - RNA, 22 nt, Human
cccaggugcuccuccagcagcu

SEQ ID NO: 103203 - RNA, 32 nt, Human
cccaggugcugaaggaacagguugcagcuacc

SEQ ID NO: 103204 - RNA, 32 nt, Human
cccaggugcugccccuucucuccuguuccucg

SEQ ID NO: 103205 - RNA, 21 nt, Human
cccaggugcugggggcacagc

SEQ ID NO: 103206 - RNA, 32 nt, Human
cccagguggaacacuggcauuuuguugacugu

SEQ ID NO: 103207 - RNA, 32 nt, Human
cccagguggacucaggagggaaccuggcccca

SEQ ID NO: 103208 - RNA, 21 nt, Human
cccagguggcagagccagcuu

SEQ ID NO: 103209 - RNA, 24 nt, Human
cccagguggcggagguugcaguga

SEQ ID NO: 103210 - RNA, 32 nt, Human
cccagguggcggagguugcagugagccgacau

SEQ ID NO: 103211 - RNA, 21 nt, Human
cccagguggcucugcagcagc

SEQ ID NO: 103212 - RNA, 24 nt, Human
cccagguggcugaaacuacaggca

SEQ ID NO: 103213 - RNA, 32 nt, Human
cccaggugggcagaucaccugaagucaggagu

SEQ ID NO: 103214 - RNA, 32 nt, Human
cccagguggggcgaucaccugagguuagaagu

SEQ ID NO: 103215 - RNA, 32 nt, Human
cccaggugguggaggugggguuggagcaggaa

SEQ ID NO: 103216 - RNA, 24 nt, Human
cccaggugguggagguugcaguga

SEQ ID NO: 103217 - RNA, 32 nt, Human
cccaggugucacaacccauccucccaggcugg

SEQ ID NO: 103218 - RNA, 16 nt, Human
cccagguguccugucc

SEQ ID NO: 103219 - RNA, 24 nt, Human
cccaggugucggagccugaccuga

SEQ ID NO: 103220 - RNA, 32 nt, Human
cccaggugugcccagcccugagagucucugag

SEQ ID NO: 103221 - RNA, 32 nt, Human
cccagguguggccaccagcaccgguuucugcc

SEQ ID NO: 103222 - RNA, 18 nt, Human
cccaggugugggggcucc

SEQ ID NO: 103223 - RNA, 32 nt, Human
cccagguguugcccccuaucuccuggggaggg

SEQ ID NO: 103224 - RNA, 20 nt, Human
cccagguuagagugcagugg

SEQ ID NO: 103225 - RNA, 20 nt, Human
cccagguuagaguguagugg

SEQ ID NO: 103226 - RNA, 32 nt, Human
cccagguucaagcauucuucugccucagccuc

SEQ ID NO: 103227 - RNA, 32 nt, Human
cccagguucaagcgauccuccugucucagccu

SEQ ID NO: 103228 - RNA, 32 nt, Human
cccagguucaagcgauuucgugccucagccuc

SEQ ID NO: 103229 - RNA, 32 nt, Human
cccagguucaagugauucuucuugccucagcc

SEQ ID NO: 103230 - RNA, 32 nt, Human
cccagguucacugcaaccguucagaggucccc

SEQ ID NO: 103231 - RNA, 17 nt, Human
cccagguucccccacua

SEQ ID NO: 103232 - RNA, 32 nt, Human
cccagguucccccacuaccucucccucagauc

SEQ ID NO: 103233 - RNA, 32 nt, Human
cccagguuccucuggugccugccguggcucaa

SEQ ID NO: 103234 - RNA, 22 nt, Human
cccagguucgaguucaguggug

SEQ ID NO: 103235 - RNA, 22 nt, Human
cccagguucuagagugcagugg

SEQ ID NO: 103236 - RNA, 21 nt, Human
cccagguugaggcuauaguga

SEQ ID NO: 103237 - RNA, 32 nt, Human
cccagguugauguuuuugggggccaaguagcg

SEQ ID NO: 103238 - RNA, 18 nt, Human
cccagguugccugggcca

SEQ ID NO: 103239 - RNA, 18 nt, Human
cccagguuggagugcagu

SEQ ID NO: 103240 - RNA, 19 nt, Human
cccagguuggagugcagug

SEQ ID NO: 103241 - RNA, 20 nt, Human
cccagguuggagugcagugg

SEQ ID NO: 103242 - RNA, 21 nt, Human
cccagguuggagugcaguggc

SEQ ID NO: 103243 - RNA, 23 nt, Human
cccagguuggagugcaguggcgu

SEQ ID NO: 103244 - RNA, 23 nt, Human
cccagguuggagugcaguggugu

SEQ ID NO: 103245 - RNA, 32 nt, Human
cccagguuucaguugugucugacagagcauua

SEQ ID NO: 103246 - RNA, 32 nt, Human
cccagguuuccucagucucuaacccuuuguuc

SEQ ID NO: 103247 - RNA, 32 nt, Human
cccagguuugcucuccccaaguuuggggucag

SEQ ID NO: 103248 - RNA, 24 nt, Human
cccagguuugguuccucccggggc

SEQ ID NO: 103249 - RNA, 32 nt, Human
cccaguaaaguaguauuuccacagcagacagu

SEQ ID NO: 103250 - RNA, 32 nt, Human
cccaguaaauaauaaccaaccaaccaaccaac

SEQ ID NO: 103251 - RNA, 32 nt, Human
cccaguaagaagaggaggaggccaggcaggca

SEQ ID NO: 103252 - RNA, 32 nt, Human
cccaguaagaauaagaaggaaggguugguuuu

SEQ ID NO: 103253 - RNA, 32 nt, Human
cccaguaagcuuccaugacccuuucuuggagg

SEQ ID NO: 103254 - RNA, 32 nt, Human
cccaguaagggaaaggaggaugggagaccccu

SEQ ID NO: 103255 - RNA, 32 nt, Human
cccaguacagcuuccuccucugacccuuuggc

SEQ ID NO: 103256 - RNA, 32 nt, Human
cccaguaccccacagggaccacuggaaggacu

SEQ ID NO: 103257 - RNA, 22 nt, Human
cccaguacccucagugccugcu

SEQ ID NO: 103258 - RNA, 22 nt, Human
cccaguagaggaagguugcagu

SEQ ID NO: 103259 - RNA, 32 nt, Human
cccaguagccgcgccucacccuaggccaggaa

SEQ ID NO: 103260 - RNA, 23 nt, Human
cccaguagcuaggauuacaggua

SEQ ID NO: 103261 - RNA, 23 nt, Human
cccaguagcugggauuacaggca

SEQ ID NO: 103262 - RNA, 32 nt, Human
cccaguagcugggauuacaguguuauaguuuu

SEQ ID NO: 103263 - RNA, 21 nt, Human
cccaguaggccacuguucuga

SEQ ID NO: 103264 - RNA, 24 nt, Human
cccaguaggcggaaguugcaguga

SEQ ID NO: 103265 - RNA, 32 nt, Human
cccaguaggcggaaguugcagugagcugaaau

SEQ ID NO: 103266 - RNA, 32 nt, Human
cccaguaggggcggccgggcagaggagccccu

SEQ ID NO: 103267 - RNA, 32 nt, Human
cccaguaggggcggcugggcagaggggccccu

SEQ ID NO: 103268 - RNA, 32 nt, Human
cccaguagguaucaggucuuucuaugcagcuc

SEQ ID NO: 103269 - RNA, 24 nt, Human
cccaguaggucgaggcugcaguga

SEQ ID NO: 103270 - RNA, 32 nt, Human
cccaguaggucgaggcugcagugagcugugau

SEQ ID NO: 103271 - RNA, 32 nt, Human
cccaguaguacugcggccaaggggacaguuag

SEQ ID NO: 103272 - RNA, 32 nt, Human
cccaguagucccugcguucuucauucaacccc

SEQ ID NO: 103273 - RNA, 32 nt, Human
cccaguaguugcuauauucuucauacaagcau

SEQ ID NO: 103274 - RNA, 32 nt, Human
cccaguaucuguugcugaucgagcugucaguc

SEQ ID NO: 103275 - RNA, 32 nt, Human
cccaguaugcucugugcuuuuggaacaauaug

SEQ ID NO: 103276 - RNA, 32 nt, Human
cccaguaugguggcucaugccuguaaucucag

SEQ ID NO: 103277 - RNA, 22 nt, Human
cccaguauugggauuacaggca

SEQ ID NO: 103278 - RNA, 32 nt, Human
cccagucaacuugcagaaauucucuuacacua

SEQ ID NO: 103279 - RNA, 32 nt, Human
cccagucaagugcacacauaaccauaacaauu

SEQ ID NO: 103280 - RNA, 32 nt, Human
cccagucacaacugccauuuccagucucugcu

SEQ ID NO: 103281 - RNA, 32 nt, Human
cccagucacagcccuuggauacagagggaaac

SEQ ID NO: 103282 - RNA, 31 nt, Human
cccagucacagcugggcuuccacaggucaga

SEQ ID NO: 103283 - RNA, 32 nt, Human
cccagucacauccugagcugcuccuggcugau

SEQ ID NO: 103284 - RNA, 16 nt, Human
cccagucacccacuug

SEQ ID NO: 103285 - RNA, 32 nt, Human
cccagucacuauacccugucuaugcccugugg

SEQ ID NO: 103286 - RNA, 18 nt, Human
cccagucagaacugugaa

SEQ ID NO: 103287 - RNA, 23 nt, Human
cccagucagacccuccccagcuc

SEQ ID NO: 103288 - RNA, 32 nt, Human
cccagucagccgcgggaaacgggccgcgacag

SEQ ID NO: 103289 - RNA, 25 nt, Human
cccagucaguacagaacccagagaa

SEQ ID NO: 103290 - RNA, 32 nt, Human
cccagucaucagcugcuaucauuuuccuucuu

SEQ ID NO: 103291 - RNA, 18 nt, Human
cccagucaugauccaguc

SEQ ID NO: 103292 - RNA, 32 nt, Human
cccagucauggagcuaagaagugagucagaga

SEQ ID NO: 103293 - RNA, 27 nt, Human
cccagucauuuugcugggauucuuuaa

SEQ ID NO: 103294 - RNA, 32 nt, Human
cccaguccacaccagagccccacgcggcugcc

SEQ ID NO: 103295 - RNA, 32 nt, Human
cccaguccagaaggagcaauggcaccugggca

SEQ ID NO: 103296 - RNA, 32 nt, Human
cccaguccagcucuuauauguagcacagggaa

SEQ ID NO: 103297 - RNA, 23 nt, Human
cccaguccaucuccaggccagcu

SEQ ID NO: 103298 - RNA, 19 nt, Human
cccagucccacacuguggc

SEQ ID NO: 103299 - RNA, 19 nt, Human
cccagucccagcucugccc

SEQ ID NO: 103300 - RNA, 18 nt, Human
cccaguccccacuccacg

SEQ ID NO: 103301 - RNA, 32 nt, Human
cccaguccccacugcuggcaguaaguccccag

SEQ ID NO: 103302 - RNA, 32 nt, Human
cccaguccccuccaucuaacauaauacaguaa

SEQ ID NO: 103303 - RNA, 32 nt, Human
cccaguccccuccuccagggaacccugcaccc

SEQ ID NO: 103304 - RNA, 22 nt, Human
cccagucccucccucuggucca

SEQ ID NO: 103305 - RNA, 32 nt, Human
cccagucccugccucuccaccugcacccugcu

SEQ ID NO: 103306 - RNA, 32 nt, Human
cccaguccucacccuuaacuucugccauggga

SEQ ID NO: 103307 - RNA, 32 nt, Human
cccaguccucauuugccuucccuaccucuucc

SEQ ID NO: 103308 - RNA, 20 nt, Human
cccaguccucccagcugcca

SEQ ID NO: 103309 - RNA, 32 nt, Human
cccaguccucuccuggcaccagcaccuuagaa

SEQ ID NO: 103310 - RNA, 32 nt, Human
cccaguccugguugggaucacacccacgggug

SEQ ID NO: 103311 - RNA, 22 nt, Human
cccaguccuguacgccaaggaa

SEQ ID NO: 103312 - RNA, 32 nt, Human
cccaguccuuaccucauggcugugaagcuacg

SEQ ID NO: 103313 - RNA, 32 nt, Human
cccaguccuucaccugcccugugucagugucu

SEQ ID NO: 103314 - RNA, 32 nt, Human
cccagucuaagcucugcuuaugccuaucuuga

SEQ ID NO: 103315 - RNA, 32 nt, Human
cccagucuacuuccccgauccugggcucccuc

SEQ ID NO: 103316 - RNA, 32 nt, Human
cccagucuagucuugaacuccugggcuacagu

SEQ ID NO: 103317 - RNA, 32 nt, Human
cccagucuccaggaucaacacagucaguuugg

SEQ ID NO: 103318 - RNA, 32 nt, Human
cccagucucccagguuugguugagggcucccc

SEQ ID NO: 103319 - RNA, 32 nt, Human
cccagucuccucgauuccccucgcucugagcc

SEQ ID NO: 103320 - RNA, 19 nt, Human
cccagucuggagugcagug

SEQ ID NO: 103321 - RNA, 20 nt, Human
cccagucuggagugcagugg

SEQ ID NO: 103322 - RNA, 21 nt, Human
cccagucuggagugcaguggc

SEQ ID NO: 103323 - RNA, 22 nt, Human
cccagucuggagugcaguggug

SEQ ID NO: 103324 - RNA, 23 nt, Human
cccagucuggagugcaguggugu

SEQ ID NO: 103325 - RNA, 20 nt, Human
cccagucuggaguucagugg

SEQ ID NO: 103326 - RNA, 32 nt, Human
cccagucuggcucccgagcucagacacagccc

SEQ ID NO: 103327 - RNA, 32 nt, Human
cccagucugguaggagagagugcugcagagcc

SEQ ID NO: 103328 - RNA, 32 nt, Human
cccagucuuccaaggauggaaguggauccagg

SEQ ID NO: 103329 - RNA, 32 nt, Human
cccagucuucuccauggugcugaagaugccag

SEQ ID NO: 103330 - RNA, 32 nt, Human
cccagucuucuccccaaagucaagcaagagac

SEQ ID NO: 103331 - RNA, 32 nt, Human
cccagucuugucucaaacuccugggcucaagc

SEQ ID NO: 103332 - RNA, 32 nt, Human
cccagucuuucccaucuuggaaucuuuccaga

SEQ ID NO: 103333 - RNA, 21 nt, Human
cccagucuuucccggccccca

SEQ ID NO: 103334 - RNA, 18 nt, Human
cccagugaaaaggauaaa

SEQ ID NO: 103335 - RNA, 19 nt, Human
cccagugaaggagagccag

SEQ ID NO: 103336 - RNA, 32 nt, Human
cccagugacuccaggcuccagacugcucccag

SEQ ID NO: 103337 - RNA, 32 nt, Human
cccagugagacagcaggugacaugacagcaag

SEQ ID NO: 103338 - RNA, 32 nt, Human
cccagugagccgggucccuuaggggagggaga

SEQ ID NO: 103339 - RNA, 32 nt, Human
cccagugaggagaauucaggugaucucugugg

SEQ ID NO: 103340 - RNA, 22 nt, Human
cccagugaggaugcugcaguga

SEQ ID NO: 103341 - RNA, 18 nt, Human
cccagugcaaaaaguaaa

SEQ ID NO: 103342 - RNA, 32 nt, Human
cccagugcaauccagagguggaagagauccua

SEQ ID NO: 103343 - RNA, 32 nt, Human
cccagugcaaugauaaacgggcagauaguuuc

SEQ ID NO: 103344 - RNA, 32 nt, Human
cccagugcacacaaguguagguaucauuuucu

SEQ ID NO: 103345 - RNA, 32 nt, Human
cccagugcacacuggaucaaaaugcugcuuuc

SEQ ID NO: 103346 - RNA, 31 nt, Human
cccagugcagccuggcaccuacccacccacc

SEQ ID NO: 103347 - RNA, 32 nt, Human
cccagugcagcugaagcauguacagugguuug

SEQ ID NO: 103348 - RNA, 32 nt, Human
cccagugcagcuuuugcaaaaugcagggaagg

SEQ ID NO: 103349 - RNA, 32 nt, Human
cccagugccacagucugcacugagcuuggcuc

SEQ ID NO: 103350 - RNA, 32 nt, Human
cccagugccaugaccuucucggagauccugga

SEQ ID NO: 103351 - RNA, 32 nt, Human
cccagugccaugagcccacacugcccgcccuc

SEQ ID NO: 103352 - RNA, 32 nt, Human
cccagugcccaggaguuggggauguccuacaa

SEQ ID NO: 103353 - RNA, 32 nt, Human
cccagugccccacaucuuucucugggagacac

SEQ ID NO: 103354 - RNA, 32 nt, Human
cccagugccccuagcugcugcugguagacuug

SEQ ID NO: 103355 - RNA, 32 nt, Human
cccagugcccgcugggcccagccuggggacag

SEQ ID NO: 103356 - RNA, 32 nt, Human
cccagugcccucuccccucagccucuccccug

SEQ ID NO: 103357 - RNA, 32 nt, Human
cccagugcccugcauuuaaucagcaccugaug

SEQ ID NO: 103358 - RNA, 32 nt, Human
cccagugcccugccaccuucguccucacugac

SEQ ID NO: 103359 - RNA, 20 nt, Human
cccagugccucaccuccugg

SEQ ID NO: 103360 - RNA, 32 nt, Human
cccagugccucugcucgugggucccuggacac

SEQ ID NO: 103361 - RNA, 19 nt, Human
cccagugcggacccuuccc

SEQ ID NO: 103362 - RNA, 32 nt, Human
cccagugcugcacucccacccugggcuccacu

SEQ ID NO: 103363 - RNA, 32 nt, Human
cccagugcuggaaggaaggagggccuuucuuc

SEQ ID NO: 103364 - RNA, 32 nt, Human
cccagugcugggacagggaaggaugggaagac

SEQ ID NO: 103365 - RNA, 32 nt, Human
cccagugcuguugcccuuuugaguauuuuugu

SEQ ID NO: 103366 - RNA, 32 nt, Human
cccagugcuuccaucuuugaaaguuugcaggu

SEQ ID NO: 103367 - RNA, 32 nt, Human
cccagugcuugacuucucggcccggaagagaa

SEQ ID NO: 103368 - RNA, 18 nt, Human
cccaguggaacccuguga

SEQ ID NO: 103369 - RNA, 32 nt, Human
cccaguggaaugagaaacuaaugaggaccuaa

SEQ ID NO: 103370 - RNA, 32 nt, Human
cccaguggacagugucauugugcccagagugc

SEQ ID NO: 103371 - RNA, 32 nt, Human
cccaguggagugacugcagacagaguagaugc

SEQ ID NO: 103372 - RNA, 15 nt, Human
cccaguggcagagcc

SEQ ID NO: 103373 - RNA, 32 nt, Human
cccaguggcaggcacagagaggggcucugaaa

SEQ ID NO: 103374 - RNA, 32 nt, Human
cccaguggcauugaaugagaaaaguccaccuu

SEQ ID NO: 103375 - RNA, 32 nt, Human
cccaguggccacucuucuggaaggggcuugga

SEQ ID NO: 103376 - RNA, 24 nt, Human
cccaguggccucuuucagcccagc

SEQ ID NO: 103377 - RNA, 32 nt, Human
cccaguggcuacacugaccacacccacgcagg

SEQ ID NO: 103378 - RNA, 32 nt, Human
cccaguggcucacgccuauaaucccagcacuu

SEQ ID NO: 103379 - RNA, 32 nt, Human
cccaguggcucacgccuguaaucccagcacuu

SEQ ID NO: 103380 - RNA, 32 nt, Human
cccaguggcucaugccuguaaucccaacacuu

SEQ ID NO: 103381 - RNA, 32 nt, Human
cccaguggcuguacuucacuacccagcaaagc

SEQ ID NO: 103382 - RNA, 32 nt, Human
cccagugggacccacagucacacagagcgccu

SEQ ID NO: 103383 - RNA, 32 nt, Human
cccagugggaccccgcacaacaucccucacca

SEQ ID NO: 103384 - RNA, 32 nt, Human
cccagugggagaagaggaaggugaaaaauccu

SEQ ID NO: 103385 - RNA, 32 nt, Human
cccagugggaguuccuuccagccccaggaccg

SEQ ID NO: 103386 - RNA, 18 nt, Human
cccagugggcagaggcau

SEQ ID NO: 103387 - RNA, 32 nt, Human
cccagugggcagggcaggagguggcagcggca

SEQ ID NO: 103388 - RNA, 19 nt, Human
cccagugggcauggagcca

SEQ ID NO: 103389 - RNA, 30 nt, Human
cccagugggcucuccuugcuccuguugcug

SEQ ID NO: 103390 - RNA, 32 nt, Human
cccaguggggaccuacuagaaaaaggaacugg

SEQ ID NO: 103391 - RNA, 32 nt, Human
cccagugggugaggaugggagggcaggguggg

SEQ ID NO: 103392 - RNA, 32 nt, Human
cccaguggguucacuccuuuucacaccugcug

SEQ ID NO: 103393 - RNA, 32 nt, Human
cccagugguggagugaggacaggggagggccg

SEQ ID NO: 103394 - RNA, 32 nt, Human
cccaguguagaggcucacaccuguaaucccag

SEQ ID NO: 103395 - RNA, 32 nt, Human
cccaguguauuuuuauuaugauuaaaaccaca

SEQ ID NO: 103396 - RNA, 32 nt, Human
cccagugucacccagggugagugcaaaauaaa

SEQ ID NO: 103397 - RNA, 32 nt, Human
cccagugucccccaaccuuccaccucacaccc

SEQ ID NO: 103398 - RNA, 22 nt, Human
cccaguguccccccagccccca

SEQ ID NO: 103399 - RNA, 21 nt, Human
cccagugucccugagcagcuu

SEQ ID NO: 103400 - RNA, 32 nt, Human
cccaguguccuccuccuucuccggccagaccc

SEQ ID NO: 103401 - RNA, 32 nt, Human
cccagugucucuucuagccccuccaacaguuc

SEQ ID NO: 103402 - RNA, 22 nt, Human
cccagugucugcccggcuccca

SEQ ID NO: 103403 - RNA, 32 nt, Human
cccagugucugugguuuccuucuuuguguucc

SEQ ID NO: 103404 - RNA, 32 nt, Human
cccagugucuucaguggaaacagagcacaggc

SEQ ID NO: 103405 - RNA, 32 nt, Human
cccagugugagaccccaaagacucuggagguc

SEQ ID NO: 103406 - RNA, 32 nt, Human
cccagugugcagccccugccagaugugggagg

SEQ ID NO: 103407 - RNA, 24 nt, Human
cccagugugccccacagcccuguc

SEQ ID NO: 103408 - RNA, 24 nt, Human
cccagugugcugggauuacaggca

SEQ ID NO: 103409 - RNA, 32 nt, Human
cccagugugguuugcauugucuccuuccacaa

SEQ ID NO: 103410 - RNA, 32 nt, Human
cccaguguuugcacacacacaaaaucuugacc

SEQ ID NO: 103411 - RNA, 32 nt, Human
cccaguuaaauaccuccucuaccuuuaccuaa

SEQ ID NO: 103412 - RNA, 32 nt, Human
cccaguuaaucagcaaccugacucaggccagu

SEQ ID NO: 103413 - RNA, 32 nt, Human
cccaguuacaauuauacuuucagcuaacauau

SEQ ID NO: 103414 - RNA, 32 nt, Human
cccaguuacauuuuaugcaucuguaagcuuuc

SEQ ID NO: 103415 - RNA, 32 nt, Human
cccaguuauuuugccucauuagacaucaagaa

SEQ ID NO: 103416 - RNA, 32 nt, Human
cccaguucaagcaauucuccugccucagccuc

SEQ ID NO: 103417 - RNA, 32 nt, Human
cccaguucaagcaauucuucugccucagccuc

SEQ ID NO: 103418 - RNA, 21 nt, Human
cccaguucaaggcugcaguga

SEQ ID NO: 103419 - RNA, 32 nt, Human
cccaguucaaugcuaugccauuaccaacucca

SEQ ID NO: 103420 - RNA, 32 nt, Human
cccaguucauuuccuaauccuuaaacuccggu

SEQ ID NO: 103421 - RNA, 32 nt, Human
cccaguuccacccacaaccacauggucaaggc

SEQ ID NO: 103422 - RNA, 32 nt, Human
cccaguucccacguguugaguguguuuccagu

SEQ ID NO: 103423 - RNA, 22 nt, Human
cccaguucccuggacagagcua

SEQ ID NO: 103424 - RNA, 19 nt, Human
cccaguuccgccgcugccg

SEQ ID NO: 103425 - RNA, 22 nt, Human
cccaguuccuucccgggcccca

SEQ ID NO: 103426 - RNA, 32 nt, Human
cccaguucuacccccucaugugcuucuucuga

SEQ ID NO: 103427 - RNA, 32 nt, Human
cccaguucucccccaucucccccucuccaucu

SEQ ID NO: 103428 - RNA, 32 nt, Human
cccaguucuccuccucagccuuuuccuccuca

SEQ ID NO: 103429 - RNA, 32 nt, Human
cccaguucugaaagcuuuauacaguugaauuu

SEQ ID NO: 103430 - RNA, 32 nt, Human
cccaguucuuccugaguauaugaauuugauuu

SEQ ID NO: 103431 - RNA, 32 nt, Human
cccaguugaaugcuucuuuuuccuucaauguu

SEQ ID NO: 103432 - RNA, 32 nt, Human
cccaguugacaguuuaaaagcacuuucacacc

SEQ ID NO: 103433 - RNA, 32 nt, Human
cccaguugagcagcagccucuaugcuuccacg

SEQ ID NO: 103434 - RNA, 32 nt, Human
cccaguugcccuuuaaguucuucuauuucaaa

SEQ ID NO: 103435 - RNA, 32 nt, Human
cccaguuggaaaccccauuugccauucaauua

SEQ ID NO: 103436 - RNA, 32 nt, Human
cccaguugucucagugcugaggaaccucauca

SEQ ID NO: 103437 - RNA, 32 nt, Human
cccaguuuauaccugugucacucucaauuuuu

SEQ ID NO: 103438 - RNA, 32 nt, Human
cccaguuucccuuuccccuccuccaggcagag

SEQ ID NO: 103439 - RNA, 22 nt, Human
cccaguuuccgcuaagacacaa

SEQ ID NO: 103440 - RNA, 32 nt, Human
cccaguuucgcgaaggcugucggcgcgccgcg

SEQ ID NO: 103441 - RNA, 32 nt, Human
cccaguuugcauucugcagguuuuccauuuua

SEQ ID NO: 103442 - RNA, 19 nt, Human
cccaguuuggagugcagug

SEQ ID NO: 103443 - RNA, 20 nt, Human
cccaguuuggagugcagugg

SEQ ID NO: 103444 - RNA, 22 nt, Human
cccaguuuggagugcaguggug

SEQ ID NO: 103445 - RNA, 32 nt, Human
cccaguuuggggacccagugggaccaggugcg

SEQ ID NO: 103446 - RNA, 32 nt, Human
cccaguuugguuuccaugggaaccugaguggc

SEQ ID NO: 103447 - RNA, 32 nt, Human
cccaguuuucauguggauggauuguaguucau

SEQ ID NO: 103448 - RNA, 32 nt, Human
cccaguuuucuccuccucacuaggcuguguuu

SEQ ID NO: 103449 - RNA, 32 nt, Human
cccaguuuucuccuccucacuagucuguggcu

SEQ ID NO: 103450 - RNA, 32 nt, Human
cccauaaaauacucaaguacugggauaggcaa

SEQ ID NO: 103451 - RNA, 32 nt, Human
cccauaaaugcauacacauacaugcacacaca

SEQ ID NO: 103452 - RNA, 32 nt, Human
cccauaacaaaaccacuguccaacacugguau

SEQ ID NO: 103453 - RNA, 23 nt, Human
cccauaacagguggccucagcca

SEQ ID NO: 103454 - RNA, 32 nt, Human
cccauaagcagcugugguggcagugagggagg

SEQ ID NO: 103455 - RNA, 24 nt, Human
cccauaaggcagagguugcaguga

SEQ ID NO: 103456 - RNA, 32 nt, Human
cccauaaggcagagguugcagugagcugagau

SEQ ID NO: 103457 - RNA, 32 nt, Human
cccauaaucccagcuacugaggagacuugagg

SEQ ID NO: 103458 - RNA, 32 nt, Human
cccauaauuaaaacaugaucacuuuuacacag

SEQ ID NO: 103459 - RNA, 32 nt, Human
cccauacaaauguuguaacaucuccccaguuu

SEQ ID NO: 103460 - RNA, 32 nt, Human
cccauacacagaaguauacgaaagcacacaaa

SEQ ID NO: 103461 - RNA, 32 nt, Human
cccauacacaugcauaagcccauccgccugcg

SEQ ID NO: 103462 - RNA, 23 nt, Human
cccauacacauuugaccugguca

SEQ ID NO: 103463 - RNA, 21 nt, Human
cccauacaugaagucuggcca

SEQ ID NO: 103464 - RNA, 32 nt, Human
cccauacccaccuggccucugcaccugagggu

SEQ ID NO: 103465 - RNA, 32 nt, Human
cccauacccaggcuggcuccuggggcgacgcc

SEQ ID NO: 103466 - RNA, 32 nt, Human
cccauaccccauucucuuuuucaucucggccc

SEQ ID NO: 103467 - RNA, 32 nt, Human
cccauacccccaccuccagccuguugacagua

SEQ ID NO: 103468 - RNA, 32 nt, Human
cccauacccuaccucacggcagucuccgcaga

SEQ ID NO: 103469 - RNA, 32 nt, Human
cccauacccuuuguccucccagccuggcaucc

SEQ ID NO: 103470 - RNA, 32 nt, Human
cccauaccuagcugcccuggcagacucccagg

SEQ ID NO: 103471 - RNA, 32 nt, Human
cccauaccuccacccuagcaccaaggcccuga

SEQ ID NO: 103472 - RNA, 32 nt, Human
cccauaccuccuccucuucugggcuccccacu

SEQ ID NO: 103473 - RNA, 32 nt, Human
cccauaccuuuccugguugugguuuuucaugc

SEQ ID NO: 103474 - RNA, 32 nt, Human
cccauagaaagcccgacauggugcuaguuucc

SEQ ID NO: 103475 - RNA, 32 nt, Human
cccauagacacagcagguucacuccagggaca

SEQ ID NO: 103476 - RNA, 32 nt, Human
cccauagagacagggucucacuauguggccca

SEQ ID NO: 103477 - RNA, 32 nt, Human
cccauagcagaggcaugagcuggacuucaugu

SEQ ID NO: 103478 - RNA, 32 nt, Human
cccauagccaugaggagccucggggcccugcu

SEQ ID NO: 103479 - RNA, 32 nt, Human
cccauagcuccuccucuucuggcugcccccaa

SEQ ID NO: 103480 - RNA, 32 nt, Human
cccauaggcccugaggcacacagcccagcccc

SEQ ID NO: 103481 - RNA, 32 nt, Human
cccauagggaaacagauggcuuccucaaauua

SEQ ID NO: 103482 - RNA, 32 nt, Human
cccauagggcuggcucacauccagucacuccc

SEQ ID NO: 103483 - RNA, 32 nt, Human
cccauagguucuccaaguucucaccuugaaac

SEQ ID NO: 103484 - RNA, 32 nt, Human
cccauaguacacaugucacaaauguucgcugg

SEQ ID NO: 103485 - RNA, 19 nt, Human
cccauagucagcagcagcu

SEQ ID NO: 103486 - RNA, 32 nt, Human
cccauagucccagcuacucaggaggcugaggu

SEQ ID NO: 103487 - RNA, 32 nt, Human
cccauagucccagcuauucaggaggcuaaggu

SEQ ID NO: 103488 - RNA, 32 nt, Human
cccauaguccuucacauauugcuacaccaccu

SEQ ID NO: 103489 - RNA, 32 nt, Human
cccauagugaagccuucuggaggagaagguga

SEQ ID NO: 103490 - RNA, 32 nt, Human
cccauagugcauaggaacaguaaagccagggu

SEQ ID NO: 103491 - RNA, 23 nt, Human
cccauagugcuagaauuacaggc

SEQ ID NO: 103492 - RNA, 32 nt, Human
cccauagugugggggaccugcagagaaccaug

SEQ ID NO: 103493 - RNA, 20 nt, Human
cccauauacucuucgaugua

SEQ ID NO: 103494 - RNA, 32 nt, Human
cccauaucuggguggagaaugggugaaaagua

SEQ ID NO: 103495 - RNA, 17 nt, Human
cccauauggagagccag

SEQ ID NO: 103496 - RNA, 29 nt, Human
cccauaugucuguguuuguuugagauuuu

SEQ ID NO: 103497 - RNA, 22 nt, Human
cccauauuucugcuuccccuca

SEQ ID NO: 103498 - RNA, 32 nt, Human
cccauauuuguccccuccuauguccuguuucu

SEQ ID NO: 103499 - RNA, 32 nt, Human
cccaucaaaccagcccaagccguggaacaggc

SEQ ID NO: 103500 - RNA, 32 nt, Human
cccaucaacagcucuucauuucuugaacuacc

SEQ ID NO: 103501 - RNA, 32 nt, Human
cccaucaacccccauuucccuaggguccugga

SEQ ID NO: 103502 - RNA, 25 nt, Human
cccaucacaagcccggggagggauc

SEQ ID NO: 103503 - RNA, 22 nt, Human
cccaucacaccccauuuccucc

SEQ ID NO: 103504 - RNA, 16 nt, Human
cccaucacacugaacu

SEQ ID NO: 103505 - RNA, 21 nt, Human
cccaucacacuguaccccucc

SEQ ID NO: 103506 - RNA, 32 nt, Human
cccaucacagaauuuucauagagcuggacuau

SEQ ID NO: 103507 - RNA, 32 nt, Human
cccaucacaggguugggcccagaucugguccc

SEQ ID NO: 103508 - RNA, 32 nt, Human
cccaucacaguguugcugucaucaggcaaaag

SEQ ID NO: 103509 - RNA, 32 nt, Human
cccaucacauccacuuucggucacucguuguu

SEQ ID NO: 103510 - RNA, 32 nt, Human
cccaucaccaggaacugucacuggggacgagu

SEQ ID NO: 103511 - RNA, 32 nt, Human
cccaucacccagccaccggauucuccauucac

SEQ ID NO: 103512 - RNA, 21 nt, Human
cccaucaccccaugauccuuc

SEQ ID NO: 103513 - RNA, 22 nt, Human
cccaucaccccccaacacacac

SEQ ID NO: 103514 - RNA, 18 nt, Human
cccaucaccccuucccca

SEQ ID NO: 103515 - RNA, 26 nt, Human
cccaucaccccuuccccauuuccucu

SEQ ID NO: 103516 - RNA, 32 nt, Human
cccaucacccgcuaagagggagggagggcucc

SEQ ID NO: 103517 - RNA, 19 nt, Human
cccaucaccgaacuucccc

SEQ ID NO: 103518 - RNA, 32 nt, Human
cccaucaccgccucagcucugagucuccccug

SEQ ID NO: 103519 - RNA, 32 nt, Human
cccaucaccucaacuccagccagggaggaaua

SEQ ID NO: 103520 - RNA, 21 nt, Human
cccaucaccucuaacauccuu

SEQ ID NO: 103521 - RNA, 24 nt, Human
cccaucaccucuacugucuccucc

SEQ ID NO: 103522 - RNA, 32 nt, Human
cccaucaccucucacagccaccuggaacccaa

SEQ ID NO: 103523 - RNA, 32 nt, Human
cccaucaccucugucuaaaggcccaaguccua

SEQ ID NO: 103524 - RNA, 24 nt, Human
cccaucaccuucaagaaagcuucc

SEQ ID NO: 103525 - RNA, 32 nt, Human
cccaucacuagagugcucugacccugggcuuu

SEQ ID NO: 103526 - RNA, 32 nt, Human
cccaucacucacugcccugucugaaauguggc

SEQ ID NO: 103527 - RNA, 16 nt, Human
cccaucacugccccca

SEQ ID NO: 103528 - RNA, 32 nt, Human
cccaucacugccucccugcucggccggucccu

SEQ ID NO: 103529 - RNA, 32 nt, Human
cccaucagaauugcuucucagcacuuugggua

SEQ ID NO: 103530 - RNA, 32 nt, Human
cccaucagcacuagagaagaccacuggugaca

SEQ ID NO: 103531 - RNA, 32 nt, Human
cccaucagccaagugauuggggcugaccagac

SEQ ID NO: 103532 - RNA, 32 nt, Human
cccaucagcccaaacccagagccuuuaucaca

SEQ ID NO: 103533 - RNA, 32 nt, Human
cccaucagccccgugcucucugacugaugcac

SEQ ID NO: 103534 - RNA, 32 nt, Human
cccaucagccucccaaguaggugggacuauag

SEQ ID NO: 103535 - RNA, 32 nt, Human
cccaucaggggcccuguagacgucgcuauuuu

SEQ ID NO: 103536 - RNA, 32 nt, Human
cccaucagggggcucccaaccccacacaccua

SEQ ID NO: 103537 - RNA, 32 nt, Human
cccaucaguagggcagcaucacugccuucccg

SEQ ID NO: 103538 - RNA, 21 nt, Human
cccaucagugacugccugcca

SEQ ID NO: 103539 - RNA, 32 nt, Human
cccaucaguugguuggaggccaccuuccaggg

SEQ ID NO: 103540 - RNA, 32 nt, Human
cccaucaguuugcaggagcaggggugcaggau

SEQ ID NO: 103541 - RNA, 32 nt, Human
cccaucaucacuggcggcaaggcccuggaccu

SEQ ID NO: 103542 - RNA, 32 nt, Human
cccaucaucccagcuacuugggaggcugaggc

SEQ ID NO: 103543 - RNA, 32 nt, Human
cccaucaugacaugguccccaggcuggccuga

SEQ ID NO: 103544 - RNA, 18 nt, Human
cccaucaugcccucacca

SEQ ID NO: 103545 - RNA, 16 nt, Human
cccaucaugucugcca

SEQ ID NO: 103546 - RNA, 32 nt, Human
cccaucauguggcugcugucacccuugaccag

SEQ ID NO: 103547 - RNA, 32 nt, Human
cccaucauuuacccaugggagcaucuguagga

SEQ ID NO: 103548 - RNA, 32 nt, Human
cccauccacagcugacccagccucugucuagg

SEQ ID NO: 103549 - RNA, 32 nt, Human
cccauccacagcuggugcucagcugcuugaag

SEQ ID NO: 103550 - RNA, 32 nt, Human
cccauccacugccacaggcugccugaugacca

SEQ ID NO: 103551 - RNA, 32 nt, Human
cccauccacuggccacccucacucccaggucc

SEQ ID NO: 103552 - RNA, 19 nt, Human
cccauccaggcccuggcca

SEQ ID NO: 103553 - RNA, 23 nt, Human
cccauccaggucggcaucagaga

SEQ ID NO: 103554 - RNA, 32 nt, Human
cccaucccaacugcaccagcacugccuccccc

SEQ ID NO: 103555 - RNA, 17 nt, Human
cccaucccacagcgcuc

SEQ ID NO: 103556 - RNA, 18 nt, Human
cccaucccagaccaugga

SEQ ID NO: 103557 - RNA, 32 nt, Human
cccaucccagcccucagcauugugccagagug

SEQ ID NO: 103558 - RNA, 32 nt, Human
cccaucccaggccgagcuggaaccaagggaag

SEQ ID NO: 103559 - RNA, 32 nt, Human
cccaucccagugccaggcugguuuccauggag

SEQ ID NO: 103560 - RNA, 32 nt, Human
cccaucccaucuccugcccucuccugaucuaa

SEQ ID NO: 103561 - RNA, 32 nt, Human
cccauccccaagauaucuuauuauguauaugc

SEQ ID NO: 103562 - RNA, 32 nt, Human
cccauccccacccagucucauguuggggaggg

SEQ ID NO: 103563 - RNA, 22 nt, Human
cccauccccacccccagcccca

SEQ ID NO: 103564 - RNA, 32 nt, Human
cccauccccacccgcucacaggcacacacugg

SEQ ID NO: 103565 - RNA, 23 nt, Human
cccaucccccagcccuggcuccu

SEQ ID NO: 103566 - RNA, 21 nt, Human
cccaucccccaggaggacugg

SEQ ID NO: 103567 - RNA, 32 nt, Human
cccaucccccgcgcgucuccccggcugcgggg

SEQ ID NO: 103568 - RNA, 23 nt, Human
cccaucccccuuccaugagccca

SEQ ID NO: 103569 - RNA, 32 nt, Human
cccauccccgggagaacucuaagaaggagcug

SEQ ID NO: 103570 - RNA, 21 nt, Human
cccauccccucuugucucuga

SEQ ID NO: 103571 - RNA, 32 nt, Human
cccauccccugcccucagcacacacaucugca

SEQ ID NO: 103572 - RNA, 32 nt, Human
cccauccccugcccuggcugcaaccaugaggg

SEQ ID NO: 103573 - RNA, 32 nt, Human
cccauccccugccucuaucccuggccaccugc

SEQ ID NO: 103574 - RNA, 22 nt, Human
cccauccccuggugggcuccug

SEQ ID NO: 103575 - RNA, 32 nt, Human
cccauccccuuuccaguacacacaccugaugc

SEQ ID NO: 103576 - RNA, 32 nt, Human
cccauccccuuuccuccccaccuuccccagac

SEQ ID NO: 103577 - RNA, 23 nt, Human
cccaucccuaaaaccugccuucu

SEQ ID NO: 103578 - RNA, 26 nt, Human
cccaucccuauccugccugaucccug

SEQ ID NO: 103579 - RNA, 32 nt, Human
cccaucccucagcaaacgcagcucuucccaag

SEQ ID NO: 103580 - RNA, 32 nt, Human
cccaucccugaacaaccagaccucuucauucc

SEQ ID NO: 103581 - RNA, 21 nt, Human
cccaucccugcacugcuccug

SEQ ID NO: 103582 - RNA, 17 nt, Human
cccaucccuggcgccag

SEQ ID NO: 103583 - RNA, 32 nt, Human
cccaucccugguggggcucccaccccacuucu

SEQ ID NO: 103584 - RNA, 21 nt, Human
cccaucccuuccucccuuacc

SEQ ID NO: 103585 - RNA, 32 nt, Human
cccauccgcaagccaggcugggccugggcaua

SEQ ID NO: 103586 - RNA, 32 nt, Human
cccauccgccugcgcccugccagucugaccag

SEQ ID NO: 103587 - RNA, 32 nt, Human
cccauccgucugucugucgcccuucucccggc

SEQ ID NO: 103588 - RNA, 23 nt, Human
cccauccuagagugcaguagugu

SEQ ID NO: 103589 - RNA, 32 nt, Human
cccauccuagccccagaagcuccaagcuucac

SEQ ID NO: 103590 - RNA, 20 nt, Human
cccauccuccagcccugccc

SEQ ID NO: 103591 - RNA, 32 nt, Human
cccauccuccagggcucaacacugugacaucu

SEQ ID NO: 103592 - RNA, 32 nt, Human
cccauccuccauccuauuuauaguggaagggc

SEQ ID NO: 103593 - RNA, 23 nt, Human
cccauccucucacacucaggcca

SEQ ID NO: 103594 - RNA, 20 nt, Human
cccauccucucgccaagcca

SEQ ID NO: 103595 - RNA, 32 nt, Human
cccauccucucucuccccuuggagcucuugcc

SEQ ID NO: 103596 - RNA, 21 nt, Human
cccauccucucucugaagcca

SEQ ID NO: 103597 - RNA, 32 nt, Human
cccauccucugacucugcagugccagcuugga

SEQ ID NO: 103598 - RNA, 32 nt, Human
cccauccucugccucccucccugcagucagag

SEQ ID NO: 103599 - RNA, 20 nt, Human
cccauccucugcguuucauu

SEQ ID NO: 103600 - RNA, 32 nt, Human
cccauccucuucuccccguacugccucaaccc

SEQ ID NO: 103601 - RNA, 21 nt, Human
cccauccugagacuggcuggg

SEQ ID NO: 103602 - RNA, 32 nt, Human
cccauccugagcucugucuccugccccuccug

SEQ ID NO: 103603 - RNA, 32 nt, Human
cccauccugauucucuucuucuaccucuaccc

SEQ ID NO: 103604 - RNA, 32 nt, Human
cccauccugccucacccaugggugcugcaccc

SEQ ID NO: 103605 - RNA, 32 nt, Human
cccauccugccugggcaucccuggugcugggg

SEQ ID NO: 103606 - RNA, 32 nt, Human
cccauccugcuguccgucugcucugugaguca

SEQ ID NO: 103607 - RNA, 32 nt, Human
cccauccugcuguccuucuguccuggauguuu

SEQ ID NO: 103608 - RNA, 32 nt, Human
cccauccuggaaaaucuuuguacagugggaag

SEQ ID NO: 103609 - RNA, 32 nt, Human
cccauccuggccccaaagaccccugagaggcc

SEQ ID NO: 103610 - RNA, 32 nt, Human
cccauccuggcucugucauuuacuuacagaaa

SEQ ID NO: 103611 - RNA, 24 nt, Human
cccauccugggugacagagugaga

SEQ ID NO: 103612 - RNA, 32 nt, Human
cccauccuucugcacggccccucggcacccag

SEQ ID NO: 103613 - RNA, 32 nt, Human
cccauccuucuuccucuccagagaugccaggg

SEQ ID NO: 103614 - RNA, 32 nt, Human
cccaucgccaaauucccugccugugccugcug

SEQ ID NO: 103615 - RNA, 32 nt, Human
cccaucgcuuaucucugccuccuuccuccucc

SEQ ID NO: 103616 - RNA, 32 nt, Human
cccaucggccacucugagcucgaggccuaaag

SEQ ID NO: 103617 - RNA, 32 nt, Human
cccaucguccuucugucccaggccuugccccc

SEQ ID NO: 103618 - RNA, 23 nt, Human
cccaucgucuccagagcuggaug

SEQ ID NO: 103619 - RNA, 32 nt, Human
cccaucgugggaggaggacaagaagggaagca

SEQ ID NO: 103620 - RNA, 32 nt, Human
cccaucguucccuacuccuccccaccacuuac

SEQ ID NO: 103621 - RNA, 32 nt, Human
cccaucuacaaauucagacucuugaggugaaa

SEQ ID NO: 103622 - RNA, 22 nt, Human
cccaucuacacgucccucccca

SEQ ID NO: 103623 - RNA, 32 nt, Human
cccaucuacaugcucaaccgaaucauacaguu

SEQ ID NO: 103624 - RNA, 32 nt, Human
cccaucuacuccugggacauuucaauaaaauu

SEQ ID NO: 103625 - RNA, 32 nt, Human
cccaucuacugaggcaggagaauugcuugacc

SEQ ID NO: 103626 - RNA, 32 nt, Human
cccaucuagcauccgucuucugggccugaagc

SEQ ID NO: 103627 - RNA, 32 nt, Human
cccaucuaggcugacagagcagggcuguuucu

SEQ ID NO: 103628 - RNA, 32 nt, Human
cccaucuaguaacaucucagaaauuucaucca

SEQ ID NO: 103629 - RNA, 31 nt, Human
cccaucucacucaagguucucugaggacauu

SEQ ID NO: 103630 - RNA, 32 nt, Human
cccaucucagcagcaccaggacugccugggac

SEQ ID NO: 103631 - RNA, 32 nt, Human
cccaucucaggaaaaaggagguuggcaacuaa

SEQ ID NO: 103632 - RNA, 32 nt, Human
cccaucucaguguggcuuuguuuuugcaauuu

SEQ ID NO: 103633 - RNA, 32 nt, Human
cccaucucauuguuugauccugggcgagucac

SEQ ID NO: 103634 - RNA, 32 nt, Human
cccaucuccaccccuccccugaaccccacucc

SEQ ID NO: 103635 - RNA, 32 nt, Human
cccaucuccagccccucccucuggguucccaa

SEQ ID NO: 103636 - RNA, 32 nt, Human
cccaucuccauuugggaugguggugguggaaa

SEQ ID NO: 103637 - RNA, 21 nt, Human
cccaucuccccagcgggcagg

SEQ ID NO: 103638 - RNA, 32 nt, Human
cccaucucccuucacaggaugacacccuccca

SEQ ID NO: 103639 - RNA, 18 nt, Human
cccaucuccuacaggacc

SEQ ID NO: 103640 - RNA, 25 nt, Human
cccaucuccucagcaccccaggacc

SEQ ID NO: 103641 - RNA, 32 nt, Human
cccaucuccucccauggccuucccuccccaca

SEQ ID NO: 103642 - RNA, 22 nt, Human
cccaucuccuccccaccccagg

SEQ ID NO: 103643 - RNA, 32 nt, Human
cccaucuccuccucuucccucuccuccucccc

SEQ ID NO: 103644 - RNA, 32 nt, Human
cccaucuccugcccucuccugaucuaacuccc

SEQ ID NO: 103645 - RNA, 20 nt, Human
cccaucuccuucccuccuca

SEQ ID NO: 103646 - RNA, 32 nt, Human
cccaucuccuucuggcccaucugccugcugcc

SEQ ID NO: 103647 - RNA, 32 nt, Human
cccaucucgaggggcggaggagagggagcgcc

SEQ ID NO: 103648 - RNA, 32 nt, Human
cccaucucuaagccccuuaaccugcagcuucg

SEQ ID NO: 103649 - RNA, 32 nt, Human
cccaucucuacaaaaauacaaaauuagccagg

SEQ ID NO: 103650 - RNA, 32 nt, Human
cccaucucuacuaaaaauaccaaaaauuagcc

SEQ ID NO: 103651 - RNA, 32 nt, Human
cccaucucuacuaaaauacaaaauuagccagg

SEQ ID NO: 103652 - RNA, 32 nt, Human
cccaucucuacuaaauacaaaaauuagcuggg

SEQ ID NO: 103653 - RNA, 23 nt, Human
cccaucucucacucuggcuccca

SEQ ID NO: 103654 - RNA, 32 nt, Human
cccaucucucagaguguugggauuacagccau

SEQ ID NO: 103655 - RNA, 21 nt, Human
cccaucucuccacgcaaucgg

SEQ ID NO: 103656 - RNA, 23 nt, Human
cccaucucuccagccagccacug

SEQ ID NO: 103657 - RNA, 32 nt, Human
cccaucucuguggccuugggccagccaccaaa

SEQ ID NO: 103658 - RNA, 32 nt, Human
cccaucugagccucccgaguagcuggggcuac

SEQ ID NO: 103659 - RNA, 32 nt, Human
cccaucugaggcaaucuugccucccaggggaa

SEQ ID NO: 103660 - RNA, 20 nt, Human
cccaucugcccacccacuaa

SEQ ID NO: 103661 - RNA, 32 nt, Human
cccaucugcccucugcagcccagggccgccgu

SEQ ID NO: 103662 - RNA, 32 nt, Human
cccaucugccucugcugcacacacaggcacca

SEQ ID NO: 103663 - RNA, 32 nt, Human
cccaucugccuuucuuucccccagcccccacc

SEQ ID NO: 103664 - RNA, 32 nt, Human
cccaucugcgcagugaacccugugcugagcac

SEQ ID NO: 103665 - RNA, 21 nt, Human
cccaucugcucacccaugccc

SEQ ID NO: 103666 - RNA, 19 nt, Human
cccaucugcugcccaggga

SEQ ID NO: 103667 - RNA, 32 nt, Human
cccaucugcuuggucucccagcauuuuucuuu

SEQ ID NO: 103668 - RNA, 32 nt, Human
cccaucuggaauggaguacagccuucuauuuu

SEQ ID NO: 103669 - RNA, 32 nt, Human
cccaucuggggccugagucccaacccuuuauu

SEQ ID NO: 103670 - RNA, 32 nt, Human
cccaucuggggucucuggaagucggugcccag

SEQ ID NO: 103671 - RNA, 32 nt, Human
cccaucuguaggagauuagugaggcaaggugc

SEQ ID NO: 103672 - RNA, 32 nt, Human
cccaucuguagucccagcuacuugggaggcug

SEQ ID NO: 103673 - RNA, 32 nt, Human
cccaucuguccuuccucacagcacccucagca

SEQ ID NO: 103674 - RNA, 32 nt, Human
cccaucugugaauuugggggagcuggagugau

SEQ ID NO: 103675 - RNA, 32 nt, Human
cccaucuguuucacugucuccauuccauaaau

SEQ ID NO: 103676 - RNA, 32 nt, Human
cccaucuguuucuccucgggugccagccagcu

SEQ ID NO: 103677 - RNA, 32 nt, Human
cccaucuucaaaugcuaauugccaguuccagu

SEQ ID NO: 103678 - RNA, 21 nt, Human
cccaucuucaaggcucagcga

SEQ ID NO: 103679 - RNA, 32 nt, Human
cccaucuucuagcagcuggcugugccucuggg

SEQ ID NO: 103680 - RNA, 19 nt, Human
cccaucuucucgggcuuca

SEQ ID NO: 103681 - RNA, 20 nt, Human
cccaucuucugacuuuuccu

SEQ ID NO: 103682 - RNA, 20 nt, Human
cccaucuucugcccgcuccu

SEQ ID NO: 103683 - RNA, 32 nt, Human
cccaucuucuucuuccuccuccgucuccuuuc

SEQ ID NO: 103684 - RNA, 24 nt, Human
cccaucuucuugaugagcuucacu

SEQ ID NO: 103685 - RNA, 18 nt, Human
cccaucuugccccuccuc

SEQ ID NO: 103686 - RNA, 32 nt, Human
cccaucuugcucccucucccaggccuuuaccc

SEQ ID NO: 103687 - RNA, 32 nt, Human
cccaucuugguaucuguuguauccuuuaucug

SEQ ID NO: 103688 - RNA, 32 nt, Human
cccaucuuuaggcugcaacagcauggcaaugc

SEQ ID NO: 103689 - RNA, 32 nt, Human
cccaucuuucaauucaauuaaauuuaaauagc

SEQ ID NO: 103690 - RNA, 32 nt, Human
cccaucuuuccaggaagucaggauggagucag

SEQ ID NO: 103691 - RNA, 32 nt, Human
cccaucuuugaguuaagaacauagguccuugc

SEQ ID NO: 103692 - RNA, 24 nt, Human
cccaucuuugggccgcagcccuga

SEQ ID NO: 103693 - RNA, 32 nt, Human
cccaugaaagagacccagugguuacugugcac

SEQ ID NO: 103694 - RNA, 32 nt, Human
cccaugaagaauugccuggaaagauguuuuca

SEQ ID NO: 103695 - RNA, 28 nt, Human
cccaugaagcacacacuggcucugcugg

SEQ ID NO: 103696 - RNA, 32 nt, Human
cccaugaaguaguguguucagacugugcacac

SEQ ID NO: 103697 - RNA, 23 nt, Human
cccaugaagucaggcugcaguga

SEQ ID NO: 103698 - RNA, 32 nt, Human
cccaugaauagcccacacagguaccggcucuc

SEQ ID NO: 103699 - RNA, 20 nt, Human
cccaugaauauccucucaca

SEQ ID NO: 103700 - RNA, 22 nt, Human
cccaugaauggaggcugcagga

SEQ ID NO: 103701 - RNA, 32 nt, Human
cccaugacaauguuguagugucccccaccccc

SEQ ID NO: 103702 - RNA, 32 nt, Human
cccaugacaccuaggcugucagucucucucau

SEQ ID NO: 103703 - RNA, 32 nt, Human
cccaugacccagucaaauuugauguccccucg

SEQ ID NO: 103704 - RNA, 32 nt, Human
cccaugacccagucaaauuugauguccccuug

SEQ ID NO: 103705 - RNA, 32 nt, Human
cccaugacccucugcugucucucccuguucag

SEQ ID NO: 103706 - RNA, 32 nt, Human
cccaugacccuucccaaaucugcuccagcagg

SEQ ID NO: 103707 - RNA, 32 nt, Human
cccaugacucacuucucuuguaaagaaagagu

SEQ ID NO: 103708 - RNA, 32 nt, Human
cccaugacugcccauguuucugaggcuucaga

SEQ ID NO: 103709 - RNA, 22 nt, Human
cccaugacuggugucugugagg

SEQ ID NO: 103710 - RNA, 32 nt, Human
cccaugagaacacacaugugcacagaaagucg

SEQ ID NO: 103711 - RNA, 32 nt, Human
cccaugagagaagggccucuguccuuagguag

SEQ ID NO: 103712 - RNA, 32 nt, Human
cccaugagaucaggcgccaucuguaaagucuc

SEQ ID NO: 103713 - RNA, 24 nt, Human
cccaugagauugaggcugcaguga

SEQ ID NO: 103714 - RNA, 32 nt, Human
cccaugagcaugagagaagaagcaaugcacgc

SEQ ID NO: 103715 - RNA, 32 nt, Human
cccaugagcccacagacagagcuguauuaagu

SEQ ID NO: 103716 - RNA, 32 nt, Human
cccaugagcugagggagagggagaggggaccc

SEQ ID NO: 103717 - RNA, 32 nt, Human
cccaugaggaagaagaggcuuugcacugcucu

SEQ ID NO: 103718 - RNA, 32 nt, Human
cccaugaggagaaaaaggaagacuggaauaau

SEQ ID NO: 103719 - RNA, 20 nt, Human
cccaugaggcaaugucagga

SEQ ID NO: 103720 - RNA, 24 nt, Human
cccaugaggcccagguuacaguga

SEQ ID NO: 103721 - RNA, 24 nt, Human
cccaugaggcggagguugcaguga

SEQ ID NO: 103722 - RNA, 32 nt, Human
cccaugaggcggagguugcagugagccgagau

SEQ ID NO: 103723 - RNA, 32 nt, Human
cccaugaggcucaugaagcagaggguauccca

SEQ ID NO: 103724 - RNA, 24 nt, Human
cccaugaggcuuguggccacagug

SEQ ID NO: 103725 - RNA, 22 nt, Human
cccaugagggcaaugguccuca

SEQ ID NO: 103726 - RNA, 24 nt, Human
cccaugagguggaaguugcaguga

SEQ ID NO: 103727 - RNA, 24 nt, Human
cccaugagguggagguugcgguga

SEQ ID NO: 103728 - RNA, 32 nt, Human
cccaugagucccugugcagaccagugggcaag

SEQ ID NO: 103729 - RNA, 32 nt, Human
cccaugaguucaaggcugcagugagucgugau

SEQ ID NO: 103730 - RNA, 32 nt, Human
cccaugauauggggugcaggaacucugggggc

SEQ ID NO: 103731 - RNA, 17 nt, Human
cccaugaugcagcagcu

SEQ ID NO: 103732 - RNA, 32 nt, Human
cccaugauuuaucagcugauuuuccaacuugg

SEQ ID NO: 103733 - RNA, 32 nt, Human
cccaugcaaaccugagugagcacaggauuugc

SEQ ID NO: 103734 - RNA, 32 nt, Human
cccaugcaaaguguccuguacggugagaagug

SEQ ID NO: 103735 - RNA, 32 nt, Human
cccaugcaagcagaggaccagggcuuuuucug

SEQ ID NO: 103736 - RNA, 32 nt, Human
cccaugcacgccugugcuuacacacaugcaca

SEQ ID NO: 103737 - RNA, 20 nt, Human
cccaugcacucgccgcgccg

SEQ ID NO: 103738 - RNA, 32 nt, Human
cccaugcagagcuggagguuggggugaugucu

SEQ ID NO: 103739 - RNA, 32 nt, Human
cccaugcagcuccagcccagccuucuacuuug

SEQ ID NO: 103740 - RNA, 31 nt, Human
cccaugcaguuuccccaggcaccuuugcuca

SEQ ID NO: 103741 - RNA, 32 nt, Human
cccaugcaucagcugcucccaccccucauccu

SEQ ID NO: 103742 - RNA, 32 nt, Human
cccaugcaugcugcugccucugggcagucgua

SEQ ID NO: 103743 - RNA, 32 nt, Human
cccaugccacccguccccuugugaccuccccc

SEQ ID NO: 103744 - RNA, 21 nt, Human
cccaugccacuccacacugcu

SEQ ID NO: 103745 - RNA, 32 nt, Human
cccaugccagcucuccccaagugcuccacuga

SEQ ID NO: 103746 - RNA, 19 nt, Human
cccaugccauccccgcaca

SEQ ID NO: 103747 - RNA, 20 nt, Human
cccaugcccaaccccugugg

SEQ ID NO: 103748 - RNA, 32 nt, Human
cccaugccccaaggagcccuucagagcccaca

SEQ ID NO: 103749 - RNA, 32 nt, Human
cccaugccccacugcaggccugggcccccuca

SEQ ID NO: 103750 - RNA, 17 nt, Human
cccaugccccuccucac

SEQ ID NO: 103751 - RNA, 19 nt, Human
cccaugccccuggccccca

SEQ ID NO: 103752 - RNA, 22 nt, Human
cccaugccccuggcccccaggg

SEQ ID NO: 103753 - RNA, 18 nt, Human
cccaugcccggcggcugg

SEQ ID NO: 103754 - RNA, 32 nt, Human
cccaugcccuucgccugcauugcccacugagu

SEQ ID NO: 103755 - RNA, 20 nt, Human
cccaugccgcucccuccuca

SEQ ID NO: 103756 - RNA, 32 nt, Human
cccaugccuauaaucccagcacuuugggaggc

SEQ ID NO: 103757 - RNA, 32 nt, Human
cccaugccucuaauccuagcauuuugggaggc

SEQ ID NO: 103758 - RNA, 32 nt, Human
cccaugccucuccagcccuccugcugcccacg

SEQ ID NO: 103759 - RNA, 32 nt, Human
cccaugccugccuggccugguagagaagaugg

SEQ ID NO: 103760 - RNA, 32 nt, Human
cccaugccugcuuuggaaaacauauuuucucu

SEQ ID NO: 103761 - RNA, 19 nt, Human
cccaugccugggggagaga

SEQ ID NO: 103762 - RNA, 32 nt, Human
cccaugccuguaaucccagcacuuugggaggc

SEQ ID NO: 103763 - RNA, 32 nt, Human
cccaugccuguaaucccagcacuuugggaggu

SEQ ID NO: 103764 - RNA, 32 nt, Human
cccaugccuguaaucucagcacucugggagac

SEQ ID NO: 103765 - RNA, 28 nt, Human
cccaugccugugcgucgcuccuggcuca

SEQ ID NO: 103766 - RNA, 32 nt, Human
cccaugccuuggugcggguccuggaggccucu

SEQ ID NO: 103767 - RNA, 32 nt, Human
cccaugcggccaagacuuaagauagcagacac

SEQ ID NO: 103768 - RNA, 32 nt, Human
cccaugcgugccgccugcuccucacuggagga

SEQ ID NO: 103769 - RNA, 22 nt, Human
cccaugcuagaugccccccaca

SEQ ID NO: 103770 - RNA, 32 nt, Human
cccaugcucucauucucagucauaugcccauu

SEQ ID NO: 103771 - RNA, 32 nt, Human
cccaugcucuggcugcuguccccagcuccccg

SEQ ID NO: 103772 - RNA, 24 nt, Human
cccaugcucuguguaccugcagca

SEQ ID NO: 103773 - RNA, 21 nt, Human
cccaugcugaggcugcagugg

SEQ ID NO: 103774 - RNA, 15 nt, Human
cccaugcugccucca

SEQ ID NO: 103775 - RNA, 32 nt, Human
cccaugcugccuucagggagacaggcagggag

SEQ ID NO: 103776 - RNA, 32 nt, Human
cccaugcugcuugucacauaucuggaguuuca

SEQ ID NO: 103777 - RNA, 31 nt, Human
cccaugcugcuuuucugaguguugauggggg

SEQ ID NO: 103778 - RNA, 21 nt, Human
cccaugcuggaguacgguggc

SEQ ID NO: 103779 - RNA, 19 nt, Human
cccaugcuggagugcaaug

SEQ ID NO: 103780 - RNA, 20 nt, Human
cccaugcuggagugcaaugg

SEQ ID NO: 103781 - RNA, 20 nt, Human
cccaugcuggagugcagugg

SEQ ID NO: 103782 - RNA, 20 nt, Human
cccaugcuggagugcauugg

SEQ ID NO: 103783 - RNA, 32 nt, Human
cccaugcugggcucugugcccucugugucugu

SEQ ID NO: 103784 - RNA, 32 nt, Human
cccaugcuggucucgaacuccugggcucaagc

SEQ ID NO: 103785 - RNA, 21 nt, Human
cccaugcuguccccaacagcu

SEQ ID NO: 103786 - RNA, 32 nt, Human
cccaugcuguguggucucugcaugucuccauu

SEQ ID NO: 103787 - RNA, 32 nt, Human
cccaugcuugagugcaaccucugcccacugug

SEQ ID NO: 103788 - RNA, 32 nt, Human
cccaugcuuuauauggugagguugggaaaaug

SEQ ID NO: 103789 - RNA, 32 nt, Human
cccauggaagaggaggaggaggagccgugaug

SEQ ID NO: 103790 - RNA, 32 nt, Human
cccauggaagggugggcugagaucgggaugac

SEQ ID NO: 103791 - RNA, 32 nt, Human
cccauggaagguugugcucagcugucgggucu

SEQ ID NO: 103792 - RNA, 32 nt, Human
cccauggacagaagauggaaggucagucgugg

SEQ ID NO: 103793 - RNA, 32 nt, Human
cccauggacuccuuucccuuucuucucugaaa

SEQ ID NO: 103794 - RNA, 32 nt, Human
cccauggagaaacacuggcauggauuugcacu

SEQ ID NO: 103795 - RNA, 32 nt, Human
cccauggagcacuguccucagagaugcgcagg

SEQ ID NO: 103796 - RNA, 32 nt, Human
cccauggagccccagcccccuuugggcccagg

SEQ ID NO: 103797 - RNA, 28 nt, Human
cccauggaggaggaggagggggcggugg

SEQ ID NO: 103798 - RNA, 24 nt, Human
cccauggauuggggccucccaggc

SEQ ID NO: 103799 - RNA, 32 nt, Human
cccauggcacugugagccugcaagggagcccc

SEQ ID NO: 103800 - RNA, 18 nt, Human
cccauggcccagcagcuu

SEQ ID NO: 103801 - RNA, 32 nt, Human
cccauggcccaggcuccaggaagugccuuggg

SEQ ID NO: 103802 - RNA, 32 nt, Human
cccauggccucaauaaacucucugcuuggugu

SEQ ID NO: 103803 - RNA, 32 nt, Human
cccauggccugcucugagcucccuucaauuuc

SEQ ID NO: 103804 - RNA, 22 nt, Human
cccauggcgaggagcauggaga

SEQ ID NO: 103805 - RNA, 32 nt, Human
cccauggcgaggaggaauggccagcaccccag

SEQ ID NO: 103806 - RNA, 21 nt, Human
cccauggcgccccucacucag

SEQ ID NO: 103807 - RNA, 32 nt, Human
cccauggcgggguggagacccggaaccagcag

SEQ ID NO: 103808 - RNA, 32 nt, Human
cccauggcugccucugaaggcagugucuauuu

SEQ ID NO: 103809 - RNA, 32 nt, Human
cccauggcuggcucccuugacauuuugggguu

SEQ ID NO: 103810 - RNA, 32 nt, Human
cccauggcuuacagcuucuacccggccccaag

SEQ ID NO: 103811 - RNA, 25 nt, Human
cccaugggaaccuccaccuccuacu

SEQ ID NO: 103812 - RNA, 18 nt, Human
cccaugggaaucccagca

SEQ ID NO: 103813 - RNA, 32 nt, Human
cccaugggacucagggucagcgugggaaggca

SEQ ID NO: 103814 - RNA, 32 nt, Human
cccaugggagcugguuagaaaugcagaauccu

SEQ ID NO: 103815 - RNA, 32 nt, Human
cccaugggaggaggaggaagaagaggaggagg

SEQ ID NO: 103816 - RNA, 32 nt, Human
cccaugggagggggcugcugcccaccagccau

SEQ ID NO: 103817 - RNA, 23 nt, Human
cccaugggaggugggucuggcca

SEQ ID NO: 103818 - RNA, 28 nt, Human
cccaugggaucaaaaagccucccagaca

SEQ ID NO: 103819 - RNA, 32 nt, Human
cccaugggcagagaagaaaaugaccaggagug

SEQ ID NO: 103820 - RNA, 23 nt, Human
cccaugggcccccgucccaggca

SEQ ID NO: 103821 - RNA, 20 nt, Human
cccaugggccuccacaagca

SEQ ID NO: 103822 - RNA, 17 nt, Human
cccaugggcgcagcagc

SEQ ID NO: 103823 - RNA, 32 nt, Human
cccaugggcgguucugggacauggaagcuggu

SEQ ID NO: 103824 - RNA, 32 nt, Human
cccaugggcuccugccccuuucaggccuacag

SEQ ID NO: 103825 - RNA, 21 nt, Human
cccaugggcuggcccaggacc

SEQ ID NO: 103826 - RNA, 32 nt, Human
cccauggggaaugucaacaggcaggggcagca

SEQ ID NO: 103827 - RNA, 32 nt, Human
cccauggggaccccucucccaucccagcagug

SEQ ID NO: 103828 - RNA, 32 nt, Human
cccauggggaggacgauggugaggagauccug

SEQ ID NO: 103829 - RNA, 32 nt, Human
cccauggggaggugaugguggggagaugaugg

SEQ ID NO: 103830 - RNA, 21 nt, Human
cccaugguccauccccugagg

SEQ ID NO: 103831 - RNA, 32 nt, Human
cccauggucccaggaacuagaggaugccuccu

SEQ ID NO: 103832 - RNA, 32 nt, Human
cccauggucuaagagggucuuuuugacuaagg

SEQ ID NO: 103833 - RNA, 32 nt, Human
cccaugguuacucaugaacugaggggauagcu

SEQ ID NO: 103834 - RNA, 32 nt, Human
cccaugguugacugaggagucgggugaggcca

SEQ ID NO: 103835 - RNA, 32 nt, Human
cccaugguuucaucccugaaacagggccucac

SEQ ID NO: 103836 - RNA, 32 nt, Human
cccauguaacaaaccugcacaugugggcuggg

SEQ ID NO: 103837 - RNA, 32 nt, Human
cccauguaaggagcugaguucuuaaagacuga

SEQ ID NO: 103838 - RNA, 32 nt, Human
cccauguacuccuguggcuuucucacauucgg

SEQ ID NO: 103839 - RNA, 32 nt, Human
cccauguagcugggaagugggaccugggggug

SEQ ID NO: 103840 - RNA, 32 nt, Human
cccauguagcuuccacacagcccuuccuuuca

SEQ ID NO: 103841 - RNA, 32 nt, Human
cccauguaugaugagaggaaacagugggaggu

SEQ ID NO: 103842 - RNA, 21 nt, Human
cccauguauggguugcaguga

SEQ ID NO: 103843 - RNA, 32 nt, Human
cccaugucacauuggcaccugauggcaucagc

SEQ ID NO: 103844 - RNA, 18 nt, Human
cccaugucacggcagcuu

SEQ ID NO: 103845 - RNA, 32 nt, Human
cccaugucagacccugagcuggugcucagcag

SEQ ID NO: 103846 - RNA, 32 nt, Human
cccauguccuggaagauggccaugccugcagc

SEQ ID NO: 103847 - RNA, 22 nt, Human
cccaugucucccccaccucagg

SEQ ID NO: 103848 - RNA, 32 nt, Human
cccaugucuccuagaacugccaugaagcugac

SEQ ID NO: 103849 - RNA, 19 nt, Human
cccaugucugagaggggug

SEQ ID NO: 103850 - RNA, 32 nt, Human
cccaugucugggcucccaggcagggaacccga

SEQ ID NO: 103851 - RNA, 32 nt, Human
cccaugucuucugcuguucuucacuucuggga

SEQ ID NO: 103852 - RNA, 32 nt, Human
cccaugugaagcugauguuugauuccaguuuc

SEQ ID NO: 103853 - RNA, 32 nt, Human
cccaugugacacugggugacaugguaaaagua

SEQ ID NO: 103854 - RNA, 32 nt, Human
cccaugugccuguacccuccccuggucuacau

SEQ ID NO: 103855 - RNA, 23 nt, Human
cccauguggucccaggccaggcu

SEQ ID NO: 103856 - RNA, 32 nt, Human
cccaugugucucuuucagagcuggccagaccg

SEQ ID NO: 103857 - RNA, 32 nt, Human
cccaugugugacuccagccugcccucagcaca

SEQ ID NO: 103858 - RNA, 32 nt, Human
cccaugugugcacauacacacaugcaccuaca

SEQ ID NO: 103859 - RNA, 32 nt, Human
cccaugugugccuguguccacaccaugacccu

SEQ ID NO: 103860 - RNA, 32 nt, Human
cccauguucacucuuuuccucucaguaguuug

SEQ ID NO: 103861 - RNA, 24 nt, Human
cccauguuccuagcaacccugaga

SEQ ID NO: 103862 - RNA, 32 nt, Human
cccauguucgccucaucuaaccccugccugca

SEQ ID NO: 103863 - RNA, 32 nt, Human
cccauguucugcccccagcccaaaggggacag

SEQ ID NO: 103864 - RNA, 32 nt, Human
cccauguugcagcacuucugggucguugcaau

SEQ ID NO: 103865 - RNA, 32 nt, Human
cccauguugucccugcugccucccucuggagu

SEQ ID NO: 103866 - RNA, 32 nt, Human
cccauguuuauugcagcacuguucacaacagc

SEQ ID NO: 103867 - RNA, 21 nt, Human
cccauguuuccaucuccuguc

SEQ ID NO: 103868 - RNA, 32 nt, Human
cccauuaaacuaccauugacagucuucacaga

SEQ ID NO: 103869 - RNA, 32 nt, Human
cccauuaaacugggugccuggugaggacacgg

SEQ ID NO: 103870 - RNA, 32 nt, Human
cccauuaaagcauuucaaagagugcuagauuc

SEQ ID NO: 103871 - RNA, 32 nt, Human
cccauuaagucaugguggcuccagccaauguc

SEQ ID NO: 103872 - RNA, 32 nt, Human
cccauuaauagggaacugguuagauaaauugu

SEQ ID NO: 103873 - RNA, 32 nt, Human
cccauuagcacccagauaauucuaucauguua

SEQ ID NO: 103874 - RNA, 32 nt, Human
cccauuagcucacaccuguaaucccagcacuu

SEQ ID NO: 103875 - RNA, 32 nt, Human
cccauuagcuggcagacccaggggaagaaagg

SEQ ID NO: 103876 - RNA, 18 nt, Human
cccauuaugcgcuguggc

SEQ ID NO: 103877 - RNA, 32 nt, Human
cccauuauucaggcugcacaacacagaaggaa

SEQ ID NO: 103878 - RNA, 32 nt, Human
cccauucacacagcaggacucuucucacauga

SEQ ID NO: 103879 - RNA, 31 nt, Human
cccauucacagcuagggacaagcagcagugc

SEQ ID NO: 103880 - RNA, 32 nt, Human
cccauucacaugccccuccuaacuccacaagc

SEQ ID NO: 103881 - RNA, 32 nt, Human
cccauucacuacacaagaaccccacaccuggc

SEQ ID NO: 103882 - RNA, 32 nt, Human
cccauucacugcagucaucugacucauuuuaa

SEQ ID NO: 103883 - RNA, 32 nt, Human
cccauucagacccaggcccccaaaagucgggu

SEQ ID NO: 103884 - RNA, 32 nt, Human
cccauucagagaggggcuuucuggccuugugc

SEQ ID NO: 103885 - RNA, 18 nt, Human
cccauucagccaugguca

SEQ ID NO: 103886 - RNA, 32 nt, Human
cccauucaggcugacugucaccgcagggaggc

SEQ ID NO: 103887 - RNA, 32 nt, Human
cccauucagggugggcugaagagccccugagc

SEQ ID NO: 103888 - RNA, 32 nt, Human
cccauucaguuuggagcucacaccuaagcugc

SEQ ID NO: 103889 - RNA, 19 nt, Human
cccauucauauagcauuca

SEQ ID NO: 103890 - RNA, 32 nt, Human
cccauucaucucaagugcuucagucuuugguu

SEQ ID NO: 103891 - RNA, 32 nt, Human
cccauuccaagcucccucuuccucccgguguu

SEQ ID NO: 103892 - RNA, 32 nt, Human
cccauuccaaggggccagcagcacuuuggccc

SEQ ID NO: 103893 - RNA, 32 nt, Human
cccauuccaagugcucugccagccccuguuca

SEQ ID NO: 103894 - RNA, 20 nt, Human
cccauuccacagcucugggc

SEQ ID NO: 103895 - RNA, 18 nt, Human
cccauuccagacugggaa

SEQ ID NO: 103896 - RNA, 32 nt, Human
cccauuccagcucucccauggagccccuccac

SEQ ID NO: 103897 - RNA, 32 nt, Human
cccauuccagugguggaggcgcuguggauggc

SEQ ID NO: 103898 - RNA, 32 nt, Human
cccauuccauccccaguccagccugggcaacc

SEQ ID NO: 103899 - RNA, 32 nt, Human
cccauucccagaaauuaccacccgcccaacag

SEQ ID NO: 103900 - RNA, 32 nt, Human
cccauucccaucuacugaaacagggucuccac

SEQ ID NO: 103901 - RNA, 20 nt, Human
cccauucccucccucuguca

SEQ ID NO: 103902 - RNA, 32 nt, Human
cccauuccuccacucuguaucuaugcaaagca

SEQ ID NO: 103903 - RNA, 32 nt, Human
cccauuccuccuguaccagcaccuccguuuuc

SEQ ID NO: 103904 - RNA, 32 nt, Human
cccauuccugcucuccucuuuccucuaaaccu

SEQ ID NO: 103905 - RNA, 23 nt, Human
cccauucuacgcgccugcccaca

SEQ ID NO: 103906 - RNA, 32 nt, Human
cccauucuacuuuuggucuccgcccacugauu

SEQ ID NO: 103907 - RNA, 32 nt, Human
cccauucuaugccccaaccaccaaggcuuucc

SEQ ID NO: 103908 - RNA, 32 nt, Human
cccauucucaacucuaauccaucccagcccuc

SEQ ID NO: 103909 - RNA, 32 nt, Human
cccauucuccaccgauacacaucaugugccag

SEQ ID NO: 103910 - RNA, 32 nt, Human
cccauucuccuagggcccauguaccccacgcc

SEQ ID NO: 103911 - RNA, 32 nt, Human
cccauucuccuucugcuucucuugcccucuuc

SEQ ID NO: 103912 - RNA, 32 nt, Human
cccauucucuuucucaggaauggcuguuaaaa

SEQ ID NO: 103913 - RNA, 32 nt, Human
cccauucugaagaaggguaggaaggggcgacc

SEQ ID NO: 103914 - RNA, 32 nt, Human
cccauucugcagcuucaccauccacgcgcuaa

SEQ ID NO: 103915 - RNA, 22 nt, Human
cccauucugcguaugaguccca

SEQ ID NO: 103916 - RNA, 32 nt, Human
cccauucugcuccccuagagaccucuuguaca

SEQ ID NO: 103917 - RNA, 20 nt, Human
cccauucuggagugcagugg

SEQ ID NO: 103918 - RNA, 23 nt, Human
cccauucuguaaucaacugagcu

SEQ ID NO: 103919 - RNA, 32 nt, Human
cccauucuguuuccagcccagaagaaaugcug

SEQ ID NO: 103920 - RNA, 32 nt, Human
cccauucuucacucugaagagagcggucagug

SEQ ID NO: 103921 - RNA, 21 nt, Human
cccauucuucccagcagccca

SEQ ID NO: 103922 - RNA, 32 nt, Human
cccauucuucccaggcucccagcuggugguga

SEQ ID NO: 103923 - RNA, 32 nt, Human
cccauucuuccuuacccugccuuugcccuuuc

SEQ ID NO: 103924 - RNA, 21 nt, Human
cccauucuugauugagucuca

SEQ ID NO: 103925 - RNA, 32 nt, Human
cccauugaacaacagcugcucauuucccccag

SEQ ID NO: 103926 - RNA, 32 nt, Human
cccauugaauucaccacugagaaggggguagg

SEQ ID NO: 103927 - RNA, 32 nt, Human
cccauugacauccucccccuacacucccucuc

SEQ ID NO: 103928 - RNA, 22 nt, Human
cccauugaccacucccuccuca

SEQ ID NO: 103929 - RNA, 32 nt, Human
cccauugagccagcaacucggauuuaggagcc

SEQ ID NO: 103930 - RNA, 21 nt, Human
cccauugaucaucccuucuca

SEQ ID NO: 103931 - RNA, 17 nt, Human
cccauugcagcuguggc

SEQ ID NO: 103932 - RNA, 20 nt, Human
cccauugccacugcuugcca

SEQ ID NO: 103933 - RNA, 32 nt, Human
cccauugccacuuauuuauucaucucaggaaa

SEQ ID NO: 103934 - RNA, 32 nt, Human
cccauugccagccuugcugucagauucaaaau

SEQ ID NO: 103935 - RNA, 32 nt, Human
cccauugcccaagagagagggcagggaacagg

SEQ ID NO: 103936 - RNA, 32 nt, Human
cccauugcccuuugcccuccagucuccccuuc

SEQ ID NO: 103937 - RNA, 32 nt, Human
cccauugcugggacugcccagggaggaggccu

SEQ ID NO: 103938 - RNA, 32 nt, Human
cccauugcuguuguccaacuauuuauugacuc

SEQ ID NO: 103939 - RNA, 32 nt, Human
cccauugcuucugcucuccucagaggucccgg

SEQ ID NO: 103940 - RNA, 26 nt, Human
cccauuggaaaaagggagaacgugua

SEQ ID NO: 103941 - RNA, 32 nt, Human
cccauuggaagucaaaugcauuuaauaccccu

SEQ ID NO: 103942 - RNA, 19 nt, Human
cccauuggccugucugcug

SEQ ID NO: 103943 - RNA, 32 nt, Human
cccauugggcaggccgcacgggggcgcggccc

SEQ ID NO: 103944 - RNA, 32 nt, Human
cccauugggcugggcagaugagauccuacuuu

SEQ ID NO: 103945 - RNA, 32 nt, Human
cccauuguagaggccagaaaagcugcccagug

SEQ ID NO: 103946 - RNA, 22 nt, Human
cccauugucccaacuacuuggg

SEQ ID NO: 103947 - RNA, 21 nt, Human
cccauugugccccaggccagc

SEQ ID NO: 103948 - RNA, 32 nt, Human
cccauuguggaaauucaucuugaaucccauug

SEQ ID NO: 103949 - RNA, 32 nt, Human
cccauugugugauguguucagaugcaucuggc

SEQ ID NO: 103950 - RNA, 32 nt, Human
cccauuguucucuucagaacccuaucugggag

SEQ ID NO: 103951 - RNA, 32 nt, Human
cccauuuacaggucuucucuccaacucuucac

SEQ ID NO: 103952 - RNA, 32 nt, Human
cccauuuagcaucuccaggcccugccaucgug

SEQ ID NO: 103953 - RNA, 32 nt, Human
cccauuucaaaagguaauguugccuggggcuu

SEQ ID NO: 103954 - RNA, 32 nt, Human
cccauuucacagagaaggagcagagaaauuaa

SEQ ID NO: 103955 - RNA, 32 nt, Human
cccauuucacuccugcaccaaccccacucuug

SEQ ID NO: 103956 - RNA, 32 nt, Human
cccauuuccucaaaagaugguggaggacuuag

SEQ ID NO: 103957 - RNA, 32 nt, Human
cccauuuccugccucguuucaguucaacuuuc

SEQ ID NO: 103958 - RNA, 32 nt, Human
cccauuuccuuuacaaacccccgcacaauuuc

SEQ ID NO: 103959 - RNA, 32 nt, Human
cccauuucuaauuucauugucuuucuucccac

SEQ ID NO: 103960 - RNA, 32 nt, Human
cccauuucuaucucccagcccagucacaaaaa

SEQ ID NO: 103961 - RNA, 32 nt, Human
cccauuucuuagcugcugaaaucagugcucuu

SEQ ID NO: 103962 - RNA, 32 nt, Human
cccauuugagauucuaaaugaauacucuuagu

SEQ ID NO: 103963 - RNA, 32 nt, Human
cccauuugcagccauggucacgagucauuucu

SEQ ID NO: 103964 - RNA, 32 nt, Human
cccauuugcugguucagcuaugauucaggcuu

SEQ ID NO: 103965 - RNA, 31 nt, Human
cccauuuggcacuucuuccuggaugcgcaug

SEQ ID NO: 103966 - RNA, 25 nt, Human
cccauuuggcccugggcucagggga

SEQ ID NO: 103967 - RNA, 32 nt, Human
cccauuuguagcugauagccauuuuucaaagg

SEQ ID NO: 103968 - RNA, 29 nt, Human
cccauuugucugugugccugccaggauuc

SEQ ID NO: 103969 - RNA, 32 nt, Human
cccauuugugcugguuuuugccucuuugacau

SEQ ID NO: 103970 - RNA, 32 nt, Human
cccauuuuaaggucugcagccuuaauucuacc

SEQ ID NO: 103971 - RNA, 21 nt, Human
cccauuuucagcgcccagggu

SEQ ID NO: 103972 - RNA, 32 nt, Human
cccauuuuccaugcacugugcuuauguguggu

SEQ ID NO: 103973 - RNA, 32 nt, Human
cccauuuucccucccuccuuuuuccuuuccau

SEQ ID NO: 103974 - RNA, 32 nt, Human
cccauuuucccuucgauauaugacuuuuucuc

SEQ ID NO: 103975 - RNA, 32 nt, Human
cccauuuuccucacuuucccugagucucaaga

SEQ ID NO: 103976 - RNA, 32 nt, Human
cccauuuucucagccucuucucugccuccaga

SEQ ID NO: 103977 - RNA, 32 nt, Human
cccauuuucucccauauuugccugaaaaauau

SEQ ID NO: 103978 - RNA, 32 nt, Human
cccauuuucugaagcuccagcacacagggccc

SEQ ID NO: 103979 - RNA, 32 nt, Human
cccauuuugccaagggcaaccagccauccagg

SEQ ID NO: 103980 - RNA, 32 nt, Human
cccauuuuggcaaggugcacagagaguccuca

SEQ ID NO: 103981 - RNA, 32 nt, Human
ccccaaaaauucaagaaaacuaacuuagaguu

SEQ ID NO: 103982 - RNA, 32 nt, Human
ccccaaaacaucaccagucccuacuacuugcu

SEQ ID NO: 103983 - RNA, 23 nt, Human
ccccaaaacuuacuggcacaaca

SEQ ID NO: 103984 - RNA, 32 nt, Human
ccccaaaaggcaucauggcugcccucagaucc

SEQ ID NO: 103985 - RNA, 32 nt, Human
ccccaaaaucacauggauuccccaaguggaaa

SEQ ID NO: 103986 - RNA, 32 nt, Human
ccccaaaaugcacuugccuauaagaaacacaa

SEQ ID NO: 103987 - RNA, 32 nt, Human
ccccaaacacagacuccugccugcccucugcc

SEQ ID NO: 103988 - RNA, 22 nt, Human
ccccaaaccagcccucgauccc

SEQ ID NO: 103989 - RNA, 32 nt, Human
ccccaaaccccagacacuccucuccuugccug

SEQ ID NO: 103990 - RNA, 32 nt, Human
ccccaaaccccagccccaacuccaggggcacc

SEQ ID NO: 103991 - RNA, 21 nt, Human
ccccaaaccugccccuccuca

SEQ ID NO: 103992 - RNA, 32 nt, Human
ccccaaaccuguuccccucugcuacuagccac

SEQ ID NO: 103993 - RNA, 21 nt, Human
ccccaaaccuuggaacuguca

SEQ ID NO: 103994 - RNA, 22 nt, Human
ccccaaacuaggcugugcccug

SEQ ID NO: 103995 - RNA, 32 nt, Human
ccccaaacuccuuuacugcagccugggcuccc

SEQ ID NO: 103996 - RNA, 21 nt, Human
ccccaaacugugcccugccuu

SEQ ID NO: 103997 - RNA, 25 nt, Human
ccccaaacuuauggacacugccuua

SEQ ID NO: 103998 - RNA, 32 nt, Human
ccccaaagacacuggccuccugcuccagcuuc

SEQ ID NO: 103999 - RNA, 32 nt, Human
ccccaaagagcccgucugcaccccagacccag

SEQ ID NO: 104000 - RNA, 22 nt, Human
ccccaaagaguuuucugugcaa

SEQ ID NO: 104001 - RNA, 32 nt, Human
ccccaaagaugagcgccaacagcagcagagug

SEQ ID NO: 104002 - RNA, 32 nt, Human
ccccaaagcucugaggccuaggagacugcgcu

SEQ ID NO: 104003 - RNA, 31 nt, Human
ccccaaaggcccucugggcccgucucaaagg

SEQ ID NO: 104004 - RNA, 32 nt, Human
ccccaaaggccuuacuugaugcuguagcacuc

SEQ ID NO: 104005 - RNA, 21 nt, Human
ccccaaaggcuuccugggcca

SEQ ID NO: 104006 - RNA, 32 nt, Human
ccccaaagggauccuuucucuaaggucucuga

SEQ ID NO: 104007 - RNA, 32 nt, Human
ccccaaaguaaagagaagcucuucucaguuug

SEQ ID NO: 104008 - RNA, 32 nt, Human
ccccaaagugccugccaaaccccagggccugg

SEQ ID NO: 104009 - RNA, 32 nt, Human
ccccaaaucuuaagcaccugcgccaguacagu

SEQ ID NO: 104010 - RNA, 32 nt, Human
ccccaaaucuuggcugggcacgguggcucacg

SEQ ID NO: 104011 - RNA, 21 nt, Human
ccccaaaugucacuucugcau

SEQ ID NO: 104012 - RNA, 23 nt, Human
ccccaaauuauuugccucccuua

SEQ ID NO: 104013 - RNA, 24 nt, Human
ccccaaauucagggccccacccuu

SEQ ID NO: 104014 - RNA, 32 nt, Human
ccccaacaacaucaagcacauuugucugugau

SEQ ID NO: 104015 - RNA, 32 nt, Human
ccccaacaaugccauucccacuugccccagag

SEQ ID NO: 104016 - RNA, 32 nt, Human
ccccaacaauggcuuuaagaagaaggacaagg

SEQ ID NO: 104017 - RNA, 22 nt, Human
ccccaacacaccaccugccuug

SEQ ID NO: 104018 - RNA, 32 nt, Human
ccccaacacaugcacauguguguacacaacug

SEQ ID NO: 104019 - RNA, 32 nt, Human
ccccaacaccagugccugaggcugagguuaga

SEQ ID NO: 104020 - RNA, 19 nt, Human
ccccaacacccccgugcuc

SEQ ID NO: 104021 - RNA, 20 nt, Human
ccccaacaccccgccugccu

SEQ ID NO: 104022 - RNA, 16 nt, Human
ccccaacacccuucca

SEQ ID NO: 104023 - RNA, 32 nt, Human
ccccaacagcacuuagguuuuccuguugagau

SEQ ID NO: 104024 - RNA, 32 nt, Human
ccccaacagccagcagcaguggcccucaucac

SEQ ID NO: 104025 - RNA, 32 nt, Human
ccccaacagcccccuucuccuccuuucccuuc

SEQ ID NO: 104026 - RNA, 32 nt, Human
ccccaacagcccuccugugccugcuucccugu

SEQ ID NO: 104027 - RNA, 32 nt, Human
ccccaacaggaucagacccagaggcagcuggu

SEQ ID NO: 104028 - RNA, 32 nt, Human
ccccaacauccaguagggucccuagcuccgcu

SEQ ID NO: 104029 - RNA, 32 nt, Human
ccccaacaucuuuguguucucacacacaggca

SEQ ID NO: 104030 - RNA, 32 nt, Human
ccccaacauuucacuccagccuggccccaguc

SEQ ID NO: 104031 - RNA, 32 nt, Human
ccccaaccacgguacucaucaccaccaccacu

SEQ ID NO: 104032 - RNA, 32 nt, Human
ccccaaccaggauguuggccuggggaggccac

SEQ ID NO: 104033 - RNA, 32 nt, Human
ccccaaccaucccaauagggugggggccugug

SEQ ID NO: 104034 - RNA, 32 nt, Human
ccccaaccaucuccugauauuugguagaguaa

SEQ ID NO: 104035 - RNA, 32 nt, Human
ccccaaccaucugccagagaacuccuaugcau

SEQ ID NO: 104036 - RNA, 32 nt, Human
ccccaaccaugcugcauguguaaagaaggauu

SEQ ID NO: 104037 - RNA, 32 nt, Human
ccccaaccccaagccugauccccaccggagac

SEQ ID NO: 104038 - RNA, 32 nt, Human
ccccaaccccaauaggggagggcagagggaag

SEQ ID NO: 104039 - RNA, 24 nt, Human
ccccaaccccacccaguugggacc

SEQ ID NO: 104040 - RNA, 32 nt, Human
ccccaacccccagcacccgggcucagggacca

SEQ ID NO: 104041 - RNA, 22 nt, Human
ccccaacccccagggcccagga

SEQ ID NO: 104042 - RNA, 32 nt, Human
ccccaacccccguccagaaucucccuuugcag

SEQ ID NO: 104043 - RNA, 32 nt, Human
ccccaaccccuccuuuucccaccggcagguga

SEQ ID NO: 104044 - RNA, 32 nt, Human
ccccaacccuuuccuuuccuccugcuugcgga

SEQ ID NO: 104045 - RNA, 32 nt, Human
ccccaaccgcugccauuucacacucacccucc

SEQ ID NO: 104046 - RNA, 32 nt, Human
ccccaaccuccaccccucucugugauauugac

SEQ ID NO: 104047 - RNA, 32 nt, Human
ccccaaccuccaggagcuaguggaggggugug

SEQ ID NO: 104048 - RNA, 32 nt, Human
ccccaaccuccgccuccuggguucaggcgauu

SEQ ID NO: 104049 - RNA, 32 nt, Human
ccccaaccugaccaccucauucuuaucuuucu

SEQ ID NO: 104050 - RNA, 22 nt, Human
ccccaaccugagagucuuuccc

SEQ ID NO: 104051 - RNA, 32 nt, Human
ccccaacgaugccaaucacgacaacuuuccag

SEQ ID NO: 104052 - RNA, 20 nt, Human
ccccaacucagccccagcgg

SEQ ID NO: 104053 - RNA, 32 nt, Human
ccccaacucagccgcagcguuccccagcuccc

SEQ ID NO: 104054 - RNA, 20 nt, Human
ccccaacuccaccccucaca

SEQ ID NO: 104055 - RNA, 32 nt, Human
ccccaacuccagcagcuggacucugggcccac

SEQ ID NO: 104056 - RNA, 32 nt, Human
ccccaacuccagcccauccuguuggugaccgu

SEQ ID NO: 104057 - RNA, 32 nt, Human
ccccaacuccaggaaagagcagucagagucca

SEQ ID NO: 104058 - RNA, 32 nt, Human
ccccaacucccuguucuggcuccugggugggg

SEQ ID NO: 104059 - RNA, 32 nt, Human
ccccaacucugccuuccuggaacuaggccugc

SEQ ID NO: 104060 - RNA, 32 nt, Human
ccccaacugaaacaccagaagguuuggaguga

SEQ ID NO: 104061 - RNA, 32 nt, Human
ccccaacugaauguguucugucacucagcuuu

SEQ ID NO: 104062 - RNA, 32 nt, Human
ccccaacugccaggaccuccaaacggauugga

SEQ ID NO: 104063 - RNA, 32 nt, Human
ccccaacugcucugcaucugccuggaugucug

SEQ ID NO: 104064 - RNA, 32 nt, Human
ccccaacugggacuuccgaggcaacuugaacu

SEQ ID NO: 104065 - RNA, 32 nt, Human
ccccaacugggagggggcagccgaggggagcu

SEQ ID NO: 104066 - RNA, 32 nt, Human
ccccaacuuagcaucccuucccuuccguuagg

SEQ ID NO: 104067 - RNA, 32 nt, Human
ccccaacuucauuugcuucucucaacaaccuc

SEQ ID NO: 104068 - RNA, 32 nt, Human
ccccaacuuccucauagccagaagucaaguua

SEQ ID NO: 104069 - RNA, 32 nt, Human
ccccaacuuucccucccuucuuuccauuuauu

SEQ ID NO: 104070 - RNA, 32 nt, Human
ccccaacuuuucuccccgccugcucccaucug

SEQ ID NO: 104071 - RNA, 25 nt, Human
ccccaagaaaggcaggauccugguc

SEQ ID NO: 104072 - RNA, 32 nt, Human
ccccaagaaugagcuuacaaaguggccuuucc

SEQ ID NO: 104073 - RNA, 20 nt, Human
ccccaagaccccacuggcca

SEQ ID NO: 104074 - RNA, 23 nt, Human
ccccaagaccccuagcccugccc

SEQ ID NO: 104075 - RNA, 32 nt, Human
ccccaagacugccaccagucuacacauacagc

SEQ ID NO: 104076 - RNA, 32 nt, Human
ccccaagagaaagauuuaaggaagcacagaaa

SEQ ID NO: 104077 - RNA, 32 nt, Human
ccccaagagcuauccggacucucuccaagacc

SEQ ID NO: 104078 - RNA, 32 nt, Human
ccccaagaggucuucugccuuuccuuuccccg

SEQ ID NO: 104079 - RNA, 32 nt, Human
ccccaagauccccugugcuaucaggaaagcau

SEQ ID NO: 104080 - RNA, 32 nt, Human
ccccaagaugccccuccccacccugaccgugc

SEQ ID NO: 104081 - RNA, 32 nt, Human
ccccaagauggccuggagaccacccagcccug

SEQ ID NO: 104082 - RNA, 21 nt, Human
ccccaagcaaucucugugcaa

SEQ ID NO: 104083 - RNA, 21 nt, Human
ccccaagcacggugugcccug

SEQ ID NO: 104084 - RNA, 32 nt, Human
ccccaagcacuaccacacauggucuccccacc

SEQ ID NO: 104085 - RNA, 32 nt, Human
ccccaagcagaggaggcugcaccucccucgcg

SEQ ID NO: 104086 - RNA, 17 nt, Human
ccccaagccagcaccuu

SEQ ID NO: 104087 - RNA, 32 nt, Human
ccccaagccagccugcccccugccccauuucc

SEQ ID NO: 104088 - RNA, 32 nt, Human
ccccaagccagcugcuggcugcagaagaaaag

SEQ ID NO: 104089 - RNA, 32 nt, Human
ccccaagccaggaugucccaagcuuggguccc

SEQ ID NO: 104090 - RNA, 32 nt, Human
ccccaagccaugggauuguccuuccuggggcc

SEQ ID NO: 104091 - RNA, 32 nt, Human
ccccaagcccaggaguuugaggcugcagugag

SEQ ID NO: 104092 - RNA, 32 nt, Human
ccccaagcccaggauuggggucuccagagucc

SEQ ID NO: 104093 - RNA, 23 nt, Human
ccccaagccccaggauccagguc

SEQ ID NO: 104094 - RNA, 32 nt, Human
ccccaagcccucaacugugagccacuccaaua

SEQ ID NO: 104095 - RNA, 32 nt, Human
ccccaagccgccggagccacacccccagccgc

SEQ ID NO: 104096 - RNA, 32 nt, Human
ccccaagccuccauuuccucagaagucaaaca

SEQ ID NO: 104097 - RNA, 32 nt, Human
ccccaagccugccucgcucccaguacggccgg

SEQ ID NO: 104098 - RNA, 19 nt, Human
ccccaagccuugugaccug

SEQ ID NO: 104099 - RNA, 32 nt, Human
ccccaagcuagugcguucucugccccucccug

SEQ ID NO: 104100 - RNA, 32 nt, Human
ccccaagcuauccuguuucagauaauaucaau

SEQ ID NO: 104101 - RNA, 32 nt, Human
ccccaagcucagaggugcucagagguacgaga

SEQ ID NO: 104102 - RNA, 32 nt, Human
ccccaagcuccccuccccaagcuccugaagac

SEQ ID NO: 104103 - RNA, 22 nt, Human
ccccaaggacacuuggcacagg

SEQ ID NO: 104104 - RNA, 32 nt, Human
ccccaaggacccuggggguggcccagagagga

SEQ ID NO: 104105 - RNA, 32 nt, Human
ccccaaggagccagcugaagccucccaauccc

SEQ ID NO: 104106 - RNA, 32 nt, Human
ccccaaggaugaggcuggacugaggcaaaggg

SEQ ID NO: 104107 - RNA, 32 nt, Human
ccccaaggcagagucggcugggcguggaccag

SEQ ID NO: 104108 - RNA, 32 nt, Human
ccccaaggccaucacaaagcaguggggcauga

SEQ ID NO: 104109 - RNA, 18 nt, Human
ccccaaggcccugggcca

SEQ ID NO: 104110 - RNA, 31 nt, Human
ccccaaggccucucucugccugaaauguuac

SEQ ID NO: 104111 - RNA, 20 nt, Human
ccccaaggcggagggcccug

SEQ ID NO: 104112 - RNA, 18 nt, Human
ccccaaggcucugggcca

SEQ ID NO: 104113 - RNA, 32 nt, Human
ccccaaggcugaugcauucccggugcagaaca

SEQ ID NO: 104114 - RNA, 22 nt, Human
ccccaaggcuggagugcagugg

SEQ ID NO: 104115 - RNA, 20 nt, Human
ccccaaggcuggcacagacu

SEQ ID NO: 104116 - RNA, 22 nt, Human
ccccaagggcucaucugugcaa

SEQ ID NO: 104117 - RNA, 32 nt, Human
ccccaagggcuggugcuugauagacccuccuc

SEQ ID NO: 104118 - RNA, 24 nt, Human
ccccaaggggagcagcccagggcc

SEQ ID NO: 104119 - RNA, 32 nt, Human
ccccaaggggcagagcuggcagagaggggccu

SEQ ID NO: 104120 - RNA, 32 nt, Human
ccccaaggggcaggaggaaugcaggagcagga

SEQ ID NO: 104121 - RNA, 32 nt, Human
ccccaaggggcagucuggaggggcauggccag

SEQ ID NO: 104122 - RNA, 32 nt, Human
ccccaaggggcucggaacucuaccucuucacc

SEQ ID NO: 104123 - RNA, 20 nt, Human
ccccaagggucagggccaug

SEQ ID NO: 104124 - RNA, 32 nt, Human
ccccaaggugaaguggagggugcuguggugag

SEQ ID NO: 104125 - RNA, 19 nt, Human
ccccaaggugaccuggcca

SEQ ID NO: 104126 - RNA, 32 nt, Human
ccccaaggugcaggagggcaggauccagcagc

SEQ ID NO: 104127 - RNA, 32 nt, Human
ccccaaggugugagcauugcagcgcagugugu

SEQ ID NO: 104128 - RNA, 32 nt, Human
ccccaagguucaaacugucucaagcugagaga

SEQ ID NO: 104129 - RNA, 32 nt, Human
ccccaaguccauuuucccuccugggaccagag

SEQ ID NO: 104130 - RNA, 32 nt, Human
ccccaaguccccaucgguaggagaaguccagc

SEQ ID NO: 104131 - RNA, 32 nt, Human
ccccaaguccuccuccgccuccuccucucugc

SEQ ID NO: 104132 - RNA, 32 nt, Human
ccccaaguccuggugucuccagccuggcucua

SEQ ID NO: 104133 - RNA, 21 nt, Human
ccccaagucucuucugugcaa

SEQ ID NO: 104134 - RNA, 32 nt, Human
ccccaagucuguuccgucagagcuucuggcug

SEQ ID NO: 104135 - RNA, 32 nt, Human
ccccaagucuugucaauaacuugcugugugga

SEQ ID NO: 104136 - RNA, 32 nt, Human
ccccaagugcagagugcagggaagcagauggg

SEQ ID NO: 104137 - RNA, 23 nt, Human
ccccaagugcuuagcccagggcc

SEQ ID NO: 104138 - RNA, 17 nt, Human
ccccaaguggucaccuc

SEQ ID NO: 104139 - RNA, 32 nt, Human
ccccaaguggugagcaagcaccaaccuccaga

SEQ ID NO: 104140 - RNA, 18 nt, Human
ccccaaguguugggccau

SEQ ID NO: 104141 - RNA, 32 nt, Human
ccccaaguguuucuugagcaucuggucugggg

SEQ ID NO: 104142 - RNA, 25 nt, Human
ccccaaguuccgccaggcccugccc

SEQ ID NO: 104143 - RNA, 32 nt, Human
ccccaaguucugauuuuuaauuucuauggaag

SEQ ID NO: 104144 - RNA, 18 nt, Human
ccccaauaaaacugccau

SEQ ID NO: 104145 - RNA, 32 nt, Human
ccccaauaauccagcgcugccucugcugccgg

SEQ ID NO: 104146 - RNA, 32 nt, Human
ccccaauagaaaacauggcaucccugaccucc

SEQ ID NO: 104147 - RNA, 32 nt, Human
ccccaauauaucauaccagcuuuuggagguag

SEQ ID NO: 104148 - RNA, 32 nt, Human
ccccaauauaugcacauuuauaagcauaugca

SEQ ID NO: 104149 - RNA, 32 nt, Human
ccccaaucaccagcugucugcuggguucuuuu

SEQ ID NO: 104150 - RNA, 32 nt, Human
ccccaaucaccucauccacaucaucuccaaag

SEQ ID NO: 104151 - RNA, 32 nt, Human
ccccaaucccuccaauaaaccugauucugcug

SEQ ID NO: 104152 - RNA, 32 nt, Human
ccccaaucucagaaauucaaauuuaagcaugg

SEQ ID NO: 104153 - RNA, 32 nt, Human
ccccaaucugcggcuucucccaccucacuggg

SEQ ID NO: 104154 - RNA, 32 nt, Human
ccccaaugcaccugcaggcaagguacccgaag

SEQ ID NO: 104155 - RNA, 32 nt, Human
ccccaaugcagacaaaauggccacagcaucua

SEQ ID NO: 104156 - RNA, 32 nt, Human
ccccaaugcauucauauuugccaagccauccc

SEQ ID NO: 104157 - RNA, 32 nt, Human
ccccaaugccuucuguccucuucccucugccc

SEQ ID NO: 104158 - RNA, 21 nt, Human
ccccaauggcuacucugcuca

SEQ ID NO: 104159 - RNA, 18 nt, Human
ccccaauguaucaacuca

SEQ ID NO: 104160 - RNA, 32 nt, Human
ccccaaugugcugggcacagaaugacaucauu

SEQ ID NO: 104161 - RNA, 32 nt, Human
ccccaaugugggcuuccaggaacuggagccug

SEQ ID NO: 104162 - RNA, 32 nt, Human
ccccaauucguucuguaaggagcaccaggacg

SEQ ID NO: 104163 - RNA, 32 nt, Human
ccccaauucuugaucucucccaccccaucccu

SEQ ID NO: 104164 - RNA, 32 nt, Human
ccccacaaacacacccugccucccccaguccu

SEQ ID NO: 104165 - RNA, 32 nt, Human
ccccacaaacugggugauagggcggacuuacc

SEQ ID NO: 104166 - RNA, 17 nt, Human
ccccacaaauguggaga

SEQ ID NO: 104167 - RNA, 32 nt, Human
ccccacaaccaccaccaccacaauaaacaagu

SEQ ID NO: 104168 - RNA, 32 nt, Human
ccccacaacuauacccccauccucuccaagau

SEQ ID NO: 104169 - RNA, 32 nt, Human
ccccacaagccugagccaaccugcugccugac

SEQ ID NO: 104170 - RNA, 32 nt, Human
ccccacaagcucuggcccugggcacccaccuc

SEQ ID NO: 104171 - RNA, 32 nt, Human
ccccacaaguagcugagacuacaggcacacac

SEQ ID NO: 104172 - RNA, 32 nt, Human
ccccacaaguugagagugucuuccccucauca

SEQ ID NO: 104173 - RNA, 32 nt, Human
ccccacaauggcagaggugguggcugaggugg

SEQ ID NO: 104174 - RNA, 32 nt, Human
ccccacacacacuggugcaggccacaccaguc

SEQ ID NO: 104175 - RNA, 32 nt, Human
ccccacacacaggccuucuguggggcugggca

SEQ ID NO: 104176 - RNA, 32 nt, Human
ccccacacacucacaaugacucuggcuggccc

SEQ ID NO: 104177 - RNA, 32 nt, Human
ccccacacauccugcacugcaaaaagauaaca

SEQ ID NO: 104178 - RNA, 32 nt, Human
ccccacacaugggaugggggaggcagagacug

SEQ ID NO: 104179 - RNA, 21 nt, Human
ccccacaccacugcaggcagg

SEQ ID NO: 104180 - RNA, 32 nt, Human
ccccacacccacccuccuggcucuuccuguuu

SEQ ID NO: 104181 - RNA, 18 nt, Human
ccccacacccccuccuca

SEQ ID NO: 104182 - RNA, 32 nt, Human
ccccacaccccuccuugcuggaaugugucugg

SEQ ID NO: 104183 - RNA, 20 nt, Human
ccccacacccucccucagcc

SEQ ID NO: 104184 - RNA, 17 nt, Human
ccccacaccucccucac

SEQ ID NO: 104185 - RNA, 32 nt, Human
ccccacaccugacacagagcaggcacucaaua

SEQ ID NO: 104186 - RNA, 18 nt, Human
ccccacacguuccucaca

SEQ ID NO: 104187 - RNA, 32 nt, Human
ccccacacuacugcgucuuuguuucuaucagu

SEQ ID NO: 104188 - RNA, 21 nt, Human
ccccacacucaaaggggcaug

SEQ ID NO: 104189 - RNA, 32 nt, Human
ccccacacucacugcacuggcagcgugcacug

SEQ ID NO: 104190 - RNA, 32 nt, Human
ccccacacucagcuccaaacgccuccucuccc

SEQ ID NO: 104191 - RNA, 32 nt, Human
ccccacacugagcugcaguggguggggagggu

SEQ ID NO: 104192 - RNA, 17 nt, Human
ccccacacugucacuca

SEQ ID NO: 104193 - RNA, 32 nt, Human
ccccacagaaaccaugggaaggacucugaccc

SEQ ID NO: 104194 - RNA, 32 nt, Human
ccccacagacacacacauugauccuccuccuc

SEQ ID NO: 104195 - RNA, 32 nt, Human
ccccacagacgcaaagugacugugcuggcauc

SEQ ID NO: 104196 - RNA, 32 nt, Human
ccccacagacuuuuaggcuggcccagauauuc

SEQ ID NO: 104197 - RNA, 32 nt, Human
ccccacagagaauggggaaggaaggcugcggg

SEQ ID NO: 104198 - RNA, 32 nt, Human
ccccacagagcugucugugggugccuucucaa

SEQ ID NO: 104199 - RNA, 32 nt, Human
ccccacagccaaggaggggucugcauggggag

SEQ ID NO: 104200 - RNA, 32 nt, Human
ccccacagccacccucccucuucagagagccc

SEQ ID NO: 104201 - RNA, 32 nt, Human
ccccacagccagcuaauuuuuguauuuuuagu

SEQ ID NO: 104202 - RNA, 32 nt, Human
ccccacagcccaguguucuccuugggggcagg

SEQ ID NO: 104203 - RNA, 19 nt, Human
ccccacagcccccuccuca

SEQ ID NO: 104204 - RNA, 32 nt, Human
ccccacagcccuccagcucaacccacaccagg

SEQ ID NO: 104205 - RNA, 32 nt, Human
ccccacagccggcgccgcgccaugcuccaccu

SEQ ID NO: 104206 - RNA, 31 nt, Human
ccccacagccucucugugcacuugcugucug

SEQ ID NO: 104207 - RNA, 32 nt, Human
ccccacagccugcccgcccccugcugcugcuc

SEQ ID NO: 104208 - RNA, 32 nt, Human
ccccacagcucuaucagugagcagaguaaaga

SEQ ID NO: 104209 - RNA, 32 nt, Human
ccccacagcugagugaagaagaggaggagacg

SEQ ID NO: 104210 - RNA, 32 nt, Human
ccccacagcugcgccggugacugaggggccgg

SEQ ID NO: 104211 - RNA, 24 nt, Human
ccccacaggagagccggcaggaca

SEQ ID NO: 104212 - RNA, 32 nt, Human
ccccacaggagccuucucugaagcaucuuugc

SEQ ID NO: 104213 - RNA, 32 nt, Human
ccccacaggagcuggcuggaggcuaugggugc

SEQ ID NO: 104214 - RNA, 19 nt, Human
ccccacaggccccgccucu

SEQ ID NO: 104215 - RNA, 21 nt, Human
ccccacaggcuggggacgggc

SEQ ID NO: 104216 - RNA, 32 nt, Human
ccccacagggagacuggccuccccagcacaug

SEQ ID NO: 104217 - RNA, 32 nt, Human
ccccacagguccuccaucaccccugguggcug

SEQ ID NO: 104218 - RNA, 16 nt, Human
ccccacaggugacaug

SEQ ID NO: 104219 - RNA, 32 nt, Human
ccccacaggugcugagaggggagggagacucu

SEQ ID NO: 104220 - RNA, 32 nt, Human
ccccacaggugcugagaggggagggagaguuu

SEQ ID NO: 104221 - RNA, 32 nt, Human
ccccacagucacauggccacacggucccggga

SEQ ID NO: 104222 - RNA, 32 nt, Human
ccccacagugaggaaaugugugaggcaccgca

SEQ ID NO: 104223 - RNA, 32 nt, Human
ccccacagugauuuuuguaacuucucuuucua

SEQ ID NO: 104224 - RNA, 32 nt, Human
ccccacaguuggcagaggugguugagggagca

SEQ ID NO: 104225 - RNA, 20 nt, Human
ccccacauacaccccucaca

SEQ ID NO: 104226 - RNA, 21 nt, Human
ccccacaucaaccauagccca

SEQ ID NO: 104227 - RNA, 32 nt, Human
ccccacaucacguaggccaggagccucagcgc

SEQ ID NO: 104228 - RNA, 21 nt, Human
ccccacaucagccauagccca

SEQ ID NO: 104229 - RNA, 20 nt, Human
ccccacaucccaccccauca

SEQ ID NO: 104230 - RNA, 23 nt, Human
ccccacaucccccucccugccca

SEQ ID NO: 104231 - RNA, 24 nt, Human
ccccacaucucccacccucagcca

SEQ ID NO: 104232 - RNA, 32 nt, Human
ccccacaucuuuucccuucuuguauauuaagg

SEQ ID NO: 104233 - RNA, 32 nt, Human
ccccacaugaggagaacaugcagacaguuaua

SEQ ID NO: 104234 - RNA, 22 nt, Human
ccccacaugccccacuaaacca

SEQ ID NO: 104235 - RNA, 32 nt, Human
ccccacaugcugggcccgccucagcuccuggc

SEQ ID NO: 104236 - RNA, 32 nt, Human
ccccacauggguccucauaaaggauuauucaa

SEQ ID NO: 104237 - RNA, 32 nt, Human
ccccacauggugcugaggcucccugcugcaau

SEQ ID NO: 104238 - RNA, 32 nt, Human
ccccacauucacugcugacuggcuucacugga

SEQ ID NO: 104239 - RNA, 32 nt, Human
ccccacauugcucuucccuucccuucaucccu

SEQ ID NO: 104240 - RNA, 32 nt, Human
ccccaccaaaaacacagugaaaggccugcuuu

SEQ ID NO: 104241 - RNA, 32 nt, Human
ccccaccaaggccaccaagcaggcuggcaagg

SEQ ID NO: 104242 - RNA, 32 nt, Human
ccccaccacaaacacagcacuucggcuccucu

SEQ ID NO: 104243 - RNA, 32 nt, Human
ccccaccacacaucccagcccaauccagguac

SEQ ID NO: 104244 - RNA, 32 nt, Human
ccccaccacaccgugacuccagcacuggagga

SEQ ID NO: 104245 - RNA, 32 nt, Human
ccccaccacacuuuccgcuuucacuuccucgc

SEQ ID NO: 104246 - RNA, 21 nt, Human
ccccaccacagcagaacagca

SEQ ID NO: 104247 - RNA, 32 nt, Human
ccccaccacauccugccauugcucacccuuuc

SEQ ID NO: 104248 - RNA, 32 nt, Human
ccccaccaccaccaccaccaccaacaccacca

SEQ ID NO: 104249 - RNA, 32 nt, Human
ccccaccaccaccaccaccaccaucagcacca

SEQ ID NO: 104250 - RNA, 32 nt, Human
ccccaccaccaccacccccaucacugcuuucu

SEQ ID NO: 104251 - RNA, 18 nt, Human
ccccaccacccacugcuu

SEQ ID NO: 104252 - RNA, 19 nt, Human
ccccaccaccccacuucag

SEQ ID NO: 104253 - RNA, 16 nt, Human
ccccaccaccuccuca

SEQ ID NO: 104254 - RNA, 32 nt, Human
ccccaccaccugugccccagagagcagggccu

SEQ ID NO: 104255 - RNA, 24 nt, Human
ccccaccacggcagagaauaggcu

SEQ ID NO: 104256 - RNA, 32 nt, Human
ccccaccacugcacuccagccuggaugacaga

SEQ ID NO: 104257 - RNA, 32 nt, Human
ccccaccagaaugggagccaggagucccagcc

SEQ ID NO: 104258 - RNA, 32 nt, Human
ccccaccagaaugucacaaucauucauugcuc

SEQ ID NO: 104259 - RNA, 23 nt, Human
ccccaccagcaaggggcuggggc

SEQ ID NO: 104260 - RNA, 32 nt, Human
ccccaccagccuggcccugggaacagcaggcu

SEQ ID NO: 104261 - RNA, 24 nt, Human
ccccaccagcgcucuucucgggcu

SEQ ID NO: 104262 - RNA, 32 nt, Human
ccccaccaggagggugagggggagugaagaag

SEQ ID NO: 104263 - RNA, 32 nt, Human
ccccaccaguccacagaggcccccaggagcac

SEQ ID NO: 104264 - RNA, 32 nt, Human
ccccaccagugaaugaaagucuugugacuagu

SEQ ID NO: 104265 - RNA, 24 nt, Human
ccccaccagugauggauaacagcu

SEQ ID NO: 104266 - RNA, 32 nt, Human
ccccaccagugcuguuuggccuaggaacugug

SEQ ID NO: 104267 - RNA, 32 nt, Human
ccccaccaucucugucuucaugagguucccug

SEQ ID NO: 104268 - RNA, 32 nt, Human
ccccaccaucuucuccaccaaccccaaccucc

SEQ ID NO: 104269 - RNA, 23 nt, Human
ccccaccauucacggauugggcu

SEQ ID NO: 104270 - RNA, 32 nt, Human
ccccaccauugcacuccaguccgggaaacaag

SEQ ID NO: 104271 - RNA, 32 nt, Human
ccccacccaaccacccaguccaggcuucccac

SEQ ID NO: 104272 - RNA, 22 nt, Human
ccccacccacacugcagguaga

SEQ ID NO: 104273 - RNA, 19 nt, Human
ccccacccacccccugccu

SEQ ID NO: 104274 - RNA, 32 nt, Human
ccccacccaccuuuccucccaccccacucccu

SEQ ID NO: 104275 - RNA, 32 nt, Human
ccccacccagaaccuuccgguuugcccuguau

SEQ ID NO: 104276 - RNA, 32 nt, Human
ccccacccagcucuccccugcgccccugucuu

SEQ ID NO: 104277 - RNA, 32 nt, Human
ccccacccagcuguucuaacccugcuauccac

SEQ ID NO: 104278 - RNA, 21 nt, Human
ccccacccaggggauggaggu

SEQ ID NO: 104279 - RNA, 32 nt, Human
ccccacccaucugaacacucauuacacuaaac

SEQ ID NO: 104280 - RNA, 32 nt, Human
ccccacccauuccccugccccuaggagcugga

SEQ ID NO: 104281 - RNA, 32 nt, Human
ccccacccauuucaccaccaccaugacaccgg

SEQ ID NO: 104282 - RNA, 20 nt, Human
ccccaccccaacacccugga

SEQ ID NO: 104283 - RNA, 21 nt, Human
ccccaccccaauuuccuagaa

SEQ ID NO: 104284 - RNA, 23 nt, Human
ccccaccccaccccauccagugu

SEQ ID NO: 104285 - RNA, 19 nt, Human
ccccaccccacccccgccc

SEQ ID NO: 104286 - RNA, 19 nt, Human
ccccaccccacccucugaa

SEQ ID NO: 104287 - RNA, 18 nt, Human
ccccaccccacccuuguc

SEQ ID NO: 104288 - RNA, 32 nt, Human
ccccaccccacgacaggcccaggugugugaug

SEQ ID NO: 104289 - RNA, 32 nt, Human
ccccaccccacggacguguugcagugauauca

SEQ ID NO: 104290 - RNA, 32 nt, Human
ccccaccccacuaucccacccuggugaccaau

SEQ ID NO: 104291 - RNA, 20 nt, Human
ccccaccccacuccacccca

SEQ ID NO: 104292 - RNA, 32 nt, Human
ccccaccccacugucgugguggccccagaucu

SEQ ID NO: 104293 - RNA, 32 nt, Human
ccccaccccacuuuuccuccugcuccagcaau

SEQ ID NO: 104294 - RNA, 20 nt, Human
ccccaccccagcuccgcucc

SEQ ID NO: 104295 - RNA, 32 nt, Human
ccccaccccagcugcccuugcuauugucugug

SEQ ID NO: 104296 - RNA, 18 nt, Human
ccccaccccaggccugcc

SEQ ID NO: 104297 - RNA, 32 nt, Human
ccccaccccaucauccaggccuugggccuucg

SEQ ID NO: 104298 - RNA, 32 nt, Human
ccccaccccauggcugacaaauauucccaguc

SEQ ID NO: 104299 - RNA, 21 nt, Human
ccccaccccauuccccugcau

SEQ ID NO: 104300 - RNA, 32 nt, Human
ccccacccccacaccaucuugcaccuguucca

SEQ ID NO: 104301 - RNA, 23 nt, Human
ccccacccccacacuuccacucc

SEQ ID NO: 104302 - RNA, 18 nt, Human
ccccacccccacccucca

SEQ ID NO: 104303 - RNA, 32 nt, Human
ccccacccccacucucaccccaaacagcccau

SEQ ID NO: 104304 - RNA, 19 nt, Human
ccccacccccagcacacca

SEQ ID NO: 104305 - RNA, 19 nt, Human
ccccacccccagccccaca

SEQ ID NO: 104306 - RNA, 21 nt, Human
ccccacccccauuccuucauu

SEQ ID NO: 104307 - RNA, 22 nt, Human
ccccaccccccacucucucuca

SEQ ID NO: 104308 - RNA, 17 nt, Human
ccccaccccccaucaca

SEQ ID NO: 104309 - RNA, 16 nt, Human
ccccacccccuccuca

SEQ ID NO: 104310 - RNA, 32 nt, Human
ccccacccccucggggcucacagucugguaga

SEQ ID NO: 104311 - RNA, 32 nt, Human
ccccacccccucucuuuuccauugaacaaaca

SEQ ID NO: 104312 - RNA, 32 nt, Human
ccccacccccuucagugcccaccaacauccca

SEQ ID NO: 104313 - RNA, 32 nt, Human
ccccacccccuuccucggucuccccuuucaau

SEQ ID NO: 104314 - RNA, 21 nt, Human
ccccaccccgggaucugguga

SEQ ID NO: 104315 - RNA, 22 nt, Human
ccccaccccgucccuggccauu

SEQ ID NO: 104316 - RNA, 32 nt, Human
ccccaccccuacagccugcacacaccugccug

SEQ ID NO: 104317 - RNA, 22 nt, Human
ccccaccccuccacuccacucc

SEQ ID NO: 104318 - RNA, 32 nt, Human
ccccaccccuccacuggccagccugggggugc

SEQ ID NO: 104319 - RNA, 32 nt, Human
ccccaccccuccagccgcaguuuuuggcuaca

SEQ ID NO: 104320 - RNA, 32 nt, Human
ccccaccccucgcaccccuuguguuuucccuc

SEQ ID NO: 104321 - RNA, 32 nt, Human
ccccaccccugccccagccucaggacugcagg

SEQ ID NO: 104322 - RNA, 32 nt, Human
ccccaccccugccucgcccccuacaggccucu

SEQ ID NO: 104323 - RNA, 32 nt, Human
ccccaccccugccuguguucugugcccugugu

SEQ ID NO: 104324 - RNA, 32 nt, Human
ccccaccccuggcucugaaucucccauguccu

SEQ ID NO: 104325 - RNA, 21 nt, Human
ccccaccccuguacccagcca

SEQ ID NO: 104326 - RNA, 32 nt, Human
ccccaccccuucccuaaaucuggaccuuggca

SEQ ID NO: 104327 - RNA, 32 nt, Human
ccccaccccuucucccccuucagccacuuccc

SEQ ID NO: 104328 - RNA, 21 nt, Human
ccccacccgcguacucccucc

SEQ ID NO: 104329 - RNA, 21 nt, Human
ccccacccgcuccagcgcccu

SEQ ID NO: 104330 - RNA, 32 nt, Human
ccccacccuaccucaccucuucucaggcaccc

SEQ ID NO: 104331 - RNA, 32 nt, Human
ccccacccuauucccagcauugcccgaaggac

SEQ ID NO: 104332 - RNA, 32 nt, Human
ccccacccucaucucuuccuuuauggguauuu

SEQ ID NO: 104333 - RNA, 32 nt, Human
ccccacccuccagaaugucuugguggcguccc

SEQ ID NO: 104334 - RNA, 32 nt, Human
ccccacccuccaggaaggguccuucacggccu

SEQ ID NO: 104335 - RNA, 32 nt, Human
ccccacccuccccacagagcucuuccucauuc

SEQ ID NO: 104336 - RNA, 32 nt, Human
ccccacccuccccagguucuccucuugcaugu

SEQ ID NO: 104337 - RNA, 32 nt, Human
ccccacccuccccaugccucucucuucucugc

SEQ ID NO: 104338 - RNA, 18 nt, Human
ccccacccuccccucaca

SEQ ID NO: 104339 - RNA, 32 nt, Human
ccccacccuccccuccccuccccuuccucccu

SEQ ID NO: 104340 - RNA, 32 nt, Human
ccccacccuccccuuaaacccucugccuuuga

SEQ ID NO: 104341 - RNA, 32 nt, Human
ccccacccuccccuucccagggcaauaaaaug

SEQ ID NO: 104342 - RNA, 32 nt, Human
ccccacccuccucauuaaaaacaaauacuucu

SEQ ID NO: 104343 - RNA, 32 nt, Human
ccccacccuccugccaagcugccucugggaag

SEQ ID NO: 104344 - RNA, 32 nt, Human
ccccacccucuacagccuuccucaggccccug

SEQ ID NO: 104345 - RNA, 32 nt, Human
ccccacccucuccaaaaccaaccccacccgcu

SEQ ID NO: 104346 - RNA, 32 nt, Human
ccccacccucugagagcuccucaggcuuagau

SEQ ID NO: 104347 - RNA, 32 nt, Human
ccccacccugcaacuccugguugagaugggcu

SEQ ID NO: 104348 - RNA, 20 nt, Human
ccccacccugcacuggucca

SEQ ID NO: 104349 - RNA, 32 nt, Human
ccccacccugccccacugcugucucaguacca

SEQ ID NO: 104350 - RNA, 32 nt, Human
ccccacccugccggcccugccuucuccaguau

SEQ ID NO: 104351 - RNA, 19 nt, Human
ccccacccugccucaccca

SEQ ID NO: 104352 - RNA, 32 nt, Human
ccccacccugcucccuucccagagggauugcu

SEQ ID NO: 104353 - RNA, 19 nt, Human
ccccacccuggccccgccc

SEQ ID NO: 104354 - RNA, 19 nt, Human
ccccacccuggcccugccc

SEQ ID NO: 104355 - RNA, 32 nt, Human
ccccacccugggaaagacgccuuuccccacuc

SEQ ID NO: 104356 - RNA, 32 nt, Human
ccccacccugggccacugccugcuccagagag

SEQ ID NO: 104357 - RNA, 32 nt, Human
ccccacccuggguggccaaggguccuccccca

SEQ ID NO: 104358 - RNA, 22 nt, Human
ccccacccuggugccugucaca

SEQ ID NO: 104359 - RNA, 32 nt, Human
ccccacccugucccaggcagcgccacuguccg

SEQ ID NO: 104360 - RNA, 32 nt, Human
ccccacccugucucuuucaucaaaccugaugg

SEQ ID NO: 104361 - RNA, 32 nt, Human
ccccacccugugccccuuuucaugguaccagg

SEQ ID NO: 104362 - RNA, 32 nt, Human
ccccacccuguugcugaccaaggugauuuuug

SEQ ID NO: 104363 - RNA, 32 nt, Human
ccccacccuuacucccuuaacuuccauguacu

SEQ ID NO: 104364 - RNA, 32 nt, Human
ccccacccuuccccuccuucucccuuuuuaua

SEQ ID NO: 104365 - RNA, 32 nt, Human
ccccacccuugccaccacacucgcccacuugc

SEQ ID NO: 104366 - RNA, 23 nt, Human
ccccacccuugucccuggccauu

SEQ ID NO: 104367 - RNA, 32 nt, Human
ccccacccuuucuccuccuccuuccucugagu

SEQ ID NO: 104368 - RNA, 23 nt, Human
ccccaccgaccaaaauggcggcu

SEQ ID NO: 104369 - RNA, 32 nt, Human
ccccaccgccagggggcaagcgcaggccgggc

SEQ ID NO: 104370 - RNA, 32 nt, Human
ccccaccgcccccaccaccacccccagcuccu

SEQ ID NO: 104371 - RNA, 32 nt, Human
ccccaccgccuccccuuucucucuggaaaguu

SEQ ID NO: 104372 - RNA, 18 nt, Human
ccccaccgcggcgcuccu

SEQ ID NO: 104373 - RNA, 32 nt, Human
ccccaccggcggcggagggagcuguggcgaug

SEQ ID NO: 104374 - RNA, 32 nt, Human
ccccaccgggccggcccugcccgccgccggac

SEQ ID NO: 104375 - RNA, 32 nt, Human
ccccaccgucgcgcuccuccaggcugggccug

SEQ ID NO: 104376 - RNA, 20 nt, Human
ccccaccuaaagauccuccc

SEQ ID NO: 104377 - RNA, 32 nt, Human
ccccaccuaggccacgugugagcugcuccugu

SEQ ID NO: 104378 - RNA, 32 nt, Human
ccccaccucacagcuacucaguggggcuggca

SEQ ID NO: 104379 - RNA, 32 nt, Human
ccccaccucagcccucuccugcauccuccugu

SEQ ID NO: 104380 - RNA, 32 nt, Human
ccccaccucaucuuccccuccuggcuggaggc

SEQ ID NO: 104381 - RNA, 32 nt, Human
ccccaccuccacccucaacccaucuuccuagu

SEQ ID NO: 104382 - RNA, 32 nt, Human
ccccaccuccacucugccauuccggcccaccu

SEQ ID NO: 104383 - RNA, 32 nt, Human
ccccaccuccaggucugucaaguggccuuugu

SEQ ID NO: 104384 - RNA, 32 nt, Human
ccccaccucccacccuacuccccacuauauuc

SEQ ID NO: 104385 - RNA, 18 nt, Human
ccccaccucccacugccu

SEQ ID NO: 104386 - RNA, 25 nt, Human
ccccaccuccgacagcaaacagcaa

SEQ ID NO: 104387 - RNA, 25 nt, Human
ccccaccuccucaggcugccugauc

SEQ ID NO: 104388 - RNA, 23 nt, Human
ccccaccuccuccaccccugccu

SEQ ID NO: 104389 - RNA, 32 nt, Human
ccccaccuccugucuuuucuccuugccuuccc

SEQ ID NO: 104390 - RNA, 32 nt, Human
ccccaccuccuuggguagugagcagugagcag

SEQ ID NO: 104391 - RNA, 20 nt, Human
ccccaccuccuugggucaug

SEQ ID NO: 104392 - RNA, 25 nt, Human
ccccaccucuaccagcaucugcuga

SEQ ID NO: 104393 - RNA, 32 nt, Human
ccccaccucucugugcagcugugugaccucag

SEQ ID NO: 104394 - RNA, 32 nt, Human
ccccaccucugcuguccuuuccagucacuucu

SEQ ID NO: 104395 - RNA, 28 nt, Human
ccccaccucugugcugccccauccaccu

SEQ ID NO: 104396 - RNA, 21 nt, Human
ccccaccucuguuccuccuca

SEQ ID NO: 104397 - RNA, 23 nt, Human
ccccaccucuucucagccuugca

SEQ ID NO: 104398 - RNA, 32 nt, Human
ccccaccugaaggguggaugugcuggaggggu

SEQ ID NO: 104399 - RNA, 32 nt, Human
ccccaccugagucuccacagagccccacgccu

SEQ ID NO: 104400 - RNA, 19 nt, Human
ccccaccugcaagcugggg

SEQ ID NO: 104401 - RNA, 32 nt, Human
ccccaccugcaggcauggauuaaugcugggcu

SEQ ID NO: 104402 - RNA, 32 nt, Human
ccccaccugccugggcggcuugccaccugaag

SEQ ID NO: 104403 - RNA, 32 nt, Human
ccccaccugccuggugcauugcugugugaauc

SEQ ID NO: 104404 - RNA, 32 nt, Human
ccccaccugcucggcccugccuucucggaucg

SEQ ID NO: 104405 - RNA, 31 nt, Human
ccccaccugcugccagggccuguuucucccu

SEQ ID NO: 104406 - RNA, 22 nt, Human
ccccaccugcuggugacggggc

SEQ ID NO: 104407 - RNA, 32 nt, Human
ccccaccugcugugguggcauuuguccagaug

SEQ ID NO: 104408 - RNA, 32 nt, Human
ccccaccuggcagcaccuagaccugagcucua

SEQ ID NO: 104409 - RNA, 21 nt, Human
ccccaccugggaauucgcugg

SEQ ID NO: 104410 - RNA, 32 nt, Human
ccccaccugggaggagacccugguuuucaugg

SEQ ID NO: 104411 - RNA, 32 nt, Human
ccccaccugggugggacacagcaggugcugga

SEQ ID NO: 104412 - RNA, 32 nt, Human
ccccaccuguugcuuaccuuuugagguaauuu

SEQ ID NO: 104413 - RNA, 32 nt, Human
ccccaccuucaagucucuccagugugugggga

SEQ ID NO: 104414 - RNA, 18 nt, Human
ccccaccuucccugccca

SEQ ID NO: 104415 - RNA, 32 nt, Human
ccccaccuuccucugugcccccauagcacugu

SEQ ID NO: 104416 - RNA, 32 nt, Human
ccccaccuugaggcggauggcugugacccuac

SEQ ID NO: 104417 - RNA, 22 nt, Human
ccccaccuugaucccaauccuu

SEQ ID NO: 104418 - RNA, 32 nt, Human
ccccaccuuugcaaaguuccagagggcugacc

SEQ ID NO: 104419 - RNA, 32 nt, Human
ccccaccuuuguguccuagagcucagcgucug

SEQ ID NO: 104420 - RNA, 32 nt, Human
ccccacgagauggaacagaccgaagugcugaa

SEQ ID NO: 104421 - RNA, 32 nt, Human
ccccacgagauggggaaauaccugggugcaga

SEQ ID NO: 104422 - RNA, 21 nt, Human
ccccacgagugugcguaggga

SEQ ID NO: 104423 - RNA, 32 nt, Human
ccccacgcaguggcucacaccuguaaucccag

SEQ ID NO: 104424 - RNA, 32 nt, Human
ccccacgccacacacaaccucuccacaugccu

SEQ ID NO: 104425 - RNA, 32 nt, Human
ccccacgccaccccgugccuccugccuccgcg

SEQ ID NO: 104426 - RNA, 32 nt, Human
ccccacgccaccgccucugccuccaggccgcc

SEQ ID NO: 104427 - RNA, 20 nt, Human
ccccacgcccacagcccccu

SEQ ID NO: 104428 - RNA, 32 nt, Human
ccccacgcccagcuaaguuuuguauuuuuagu

SEQ ID NO: 104429 - RNA, 21 nt, Human
ccccacgcccugucccuccuc

SEQ ID NO: 104430 - RNA, 32 nt, Human
ccccacgccuccugccaaggccgagccacaca

SEQ ID NO: 104431 - RNA, 21 nt, Human
ccccacgcgcagcccaggacc

SEQ ID NO: 104432 - RNA, 32 nt, Human
ccccacgcggagccagcgcugcagugaaagag

SEQ ID NO: 104433 - RNA, 32 nt, Human
ccccacgcuggcugcugugcagaugcuggacg

SEQ ID NO: 104434 - RNA, 26 nt, Human
ccccacggaagggcgugagcccugca

SEQ ID NO: 104435 - RNA, 32 nt, Human
ccccacggcacagcagaucaugcggcugcuuc

SEQ ID NO: 104436 - RNA, 32 nt, Human
ccccacggccagcgugggcacaggacugaccc

SEQ ID NO: 104437 - RNA, 18 nt, Human
ccccacggccccaccuuu

SEQ ID NO: 104438 - RNA, 21 nt, Human
ccccacggccccgcucugccc

SEQ ID NO: 104439 - RNA, 32 nt, Human
ccccacgggcuccugccugccugccagguuuu

SEQ ID NO: 104440 - RNA, 21 nt, Human
ccccacggggccucgggaccu

SEQ ID NO: 104441 - RNA, 32 nt, Human
ccccacgucgaccugucacaggccuggcugua

SEQ ID NO: 104442 - RNA, 32 nt, Human
ccccacgugggacacagggcuuggggaggaug

SEQ ID NO: 104443 - RNA, 32 nt, Human
ccccacguggggagguggaguuccggaauuau

SEQ ID NO: 104444 - RNA, 32 nt, Human
ccccacguuuaccaagcacacgcccugcagag

SEQ ID NO: 104445 - RNA, 32 nt, Human
ccccacuaaacccagcggagcggagccuggcg

SEQ ID NO: 104446 - RNA, 32 nt, Human
ccccacuacaagugauccucaggcagguaacc

SEQ ID NO: 104447 - RNA, 32 nt, Human
ccccacuacacuccagccuggucaacagagug

SEQ ID NO: 104448 - RNA, 32 nt, Human
ccccacuagagccuuccagccuucuggugugu

SEQ ID NO: 104449 - RNA, 32 nt, Human
ccccacucacugcagagcugcugccugccaau

SEQ ID NO: 104450 - RNA, 21 nt, Human
ccccacucacugccccaggga

SEQ ID NO: 104451 - RNA, 20 nt, Human
ccccacuccaagcccugucc

SEQ ID NO: 104452 - RNA, 32 nt, Human
ccccacuccaaguuuccuacccuucccaccca

SEQ ID NO: 104453 - RNA, 20 nt, Human
ccccacuccaccccacccca

SEQ ID NO: 104454 - RNA, 32 nt, Human
ccccacuccagccucagcggggccccagcgau

SEQ ID NO: 104455 - RNA, 32 nt, Human
ccccacuccagccuggggaccccacuucagaa

SEQ ID NO: 104456 - RNA, 32 nt, Human
ccccacuccagugcugcccacacucccagcug

SEQ ID NO: 104457 - RNA, 32 nt, Human
ccccacuccaugaaacugggccugcuguccug

SEQ ID NO: 104458 - RNA, 21 nt, Human
ccccacucccacaucucucac

SEQ ID NO: 104459 - RNA, 32 nt, Human
ccccacucccacgcugcccuccugccugcagc

SEQ ID NO: 104460 - RNA, 32 nt, Human
ccccacucccagcaagcagaagugauccucga

SEQ ID NO: 104461 - RNA, 32 nt, Human
ccccacuccccaaauacagaggucugcuuuga

SEQ ID NO: 104462 - RNA, 32 nt, Human
ccccacuccccacucucagccugggagacucc

SEQ ID NO: 104463 - RNA, 32 nt, Human
ccccacuccccuggcccuagagccugggcccc

SEQ ID NO: 104464 - RNA, 32 nt, Human
ccccacucccuaauccccuaccccugucuccc

SEQ ID NO: 104465 - RNA, 23 nt, Human
ccccacucccugccaccgucaca

SEQ ID NO: 104466 - RNA, 23 nt, Human
ccccacucccugccacugucaca

SEQ ID NO: 104467 - RNA, 32 nt, Human
ccccacuccgcugcccuggccuugagcaucca

SEQ ID NO: 104468 - RNA, 32 nt, Human
ccccacuccugccccgcccccuggcuggcuca

SEQ ID NO: 104469 - RNA, 18 nt, Human
ccccacucgccucucaca

SEQ ID NO: 104470 - RNA, 32 nt, Human
ccccacucucaggcuaggauggagaggcagau

SEQ ID NO: 104471 - RNA, 32 nt, Human
ccccacucucauuccccagguggcugacccag

SEQ ID NO: 104472 - RNA, 32 nt, Human
ccccacucuccacuuucugagccucagacaac

SEQ ID NO: 104473 - RNA, 23 nt, Human
ccccacucucccaagccaccccu

SEQ ID NO: 104474 - RNA, 32 nt, Human
ccccacucuccucugcccaguucucuguccuu

SEQ ID NO: 104475 - RNA, 32 nt, Human
ccccacucucgccaaccuaucggggcauagcc

SEQ ID NO: 104476 - RNA, 24 nt, Human
ccccacucucucacccaccagcuc

SEQ ID NO: 104477 - RNA, 32 nt, Human
ccccacucugcaagcacucccccaccaacggg

SEQ ID NO: 104478 - RNA, 32 nt, Human
ccccacucugccgugcucacacagacacaccc

SEQ ID NO: 104479 - RNA, 32 nt, Human
ccccacucugccucccugucaccucaggcuug

SEQ ID NO: 104480 - RNA, 32 nt, Human
ccccacucugccucuugcuccuccagggcagc

SEQ ID NO: 104481 - RNA, 32 nt, Human
ccccacucuggcccagcccccucugcacacag

SEQ ID NO: 104482 - RNA, 32 nt, Human
ccccacucuuguagcauggacacugcuagcug

SEQ ID NO: 104483 - RNA, 32 nt, Human
ccccacugaacggcaacugagacuggguaccu

SEQ ID NO: 104484 - RNA, 23 nt, Human
ccccacugaaggagauggaggcu

SEQ ID NO: 104485 - RNA, 20 nt, Human
ccccacugauccuugggacc

SEQ ID NO: 104486 - RNA, 32 nt, Human
ccccacugcacuccacccugggcaauggagua

SEQ ID NO: 104487 - RNA, 32 nt, Human
ccccacugcacuccagccugggcgacagaaca

SEQ ID NO: 104488 - RNA, 32 nt, Human
ccccacugcacuccagccugggcgacagaacg

SEQ ID NO: 104489 - RNA, 32 nt, Human
ccccacugcacuccagccugggugacagagcg

SEQ ID NO: 104490 - RNA, 32 nt, Human
ccccacugcacuccagccugggugacagaggg

SEQ ID NO: 104491 - RNA, 32 nt, Human
ccccacugcacuccagccuggugacuccgucu

SEQ ID NO: 104492 - RNA, 16 nt, Human
ccccacugcagcagaa

SEQ ID NO: 104493 - RNA, 32 nt, Human
ccccacugcauuccagccugggugacagagcg

SEQ ID NO: 104494 - RNA, 32 nt, Human
ccccacugccaaggguggggucucaggaguca

SEQ ID NO: 104495 - RNA, 25 nt, Human
ccccacugccaaguggggauggggc

SEQ ID NO: 104496 - RNA, 32 nt, Human
ccccacugccagcugccccuccugggagggcc

SEQ ID NO: 104497 - RNA, 32 nt, Human
ccccacugccauacugccccucccagggaaau

SEQ ID NO: 104498 - RNA, 32 nt, Human
ccccacugccccugcccugcccgcccguguca

SEQ ID NO: 104499 - RNA, 32 nt, Human
ccccacugcccuccagggccaggauucaggcc

SEQ ID NO: 104500 - RNA, 31 nt, Human
ccccacugccucugugugccccuuugcgucc

SEQ ID NO: 104501 - RNA, 16 nt, Human
ccccacugccuggcca

SEQ ID NO: 104502 - RNA, 32 nt, Human
ccccacugcggggaggugagggguggguuugg

SEQ ID NO: 104503 - RNA, 32 nt, Human
ccccacugcucagcacuuaggccggcagaauc

SEQ ID NO: 104504 - RNA, 32 nt, Human
ccccacugcugagcuggcccuuggggagaggu

SEQ ID NO: 104505 - RNA, 32 nt, Human
ccccacugcugcugcuaucaacgccagaauaa

SEQ ID NO: 104506 - RNA, 32 nt, Human
ccccacugcuuccaaacucugccuguguccca

SEQ ID NO: 104507 - RNA, 32 nt, Human
ccccacuggagguggagggugggaagagaagg

SEQ ID NO: 104508 - RNA, 32 nt, Human
ccccacuggaguggaggaguggucuggcuggu

SEQ ID NO: 104509 - RNA, 22 nt, Human
ccccacuggcaucucuguaaaa

SEQ ID NO: 104510 - RNA, 32 nt, Human
ccccacuggccacugccauccugcugccuucc

SEQ ID NO: 104511 - RNA, 32 nt, Human
ccccacuggccauuugagacacacacaggugg

SEQ ID NO: 104512 - RNA, 32 nt, Human
ccccacuggcugcuccagggccuccaccccca

SEQ ID NO: 104513 - RNA, 32 nt, Human
ccccacuggcuggaggaaguggggucuggccu

SEQ ID NO: 104514 - RNA, 32 nt, Human
ccccacugggaccaacccuggggaaggagcca

SEQ ID NO: 104515 - RNA, 32 nt, Human
ccccacuggggagggggugagguggaaugggg

SEQ ID NO: 104516 - RNA, 32 nt, Human
ccccacuguacagcagaucgugcagcugucuc

SEQ ID NO: 104517 - RNA, 32 nt, Human
ccccacuguccccagaaagcagcugcugugau

SEQ ID NO: 104518 - RNA, 32 nt, Human
ccccacuguccuccagccugggcaacagagag

SEQ ID NO: 104519 - RNA, 32 nt, Human
ccccacugucucuaaccacuccugggcuaagg

SEQ ID NO: 104520 - RNA, 32 nt, Human
ccccacugugccagauccaagagaagcccgcu

SEQ ID NO: 104521 - RNA, 31 nt, Human
ccccacugugcuccugggccugugaccccag

SEQ ID NO: 104522 - RNA, 32 nt, Human
ccccacugugcuguagccugggugacagugug

SEQ ID NO: 104523 - RNA, 32 nt, Human
ccccacuguggcugguaacaccccagguuucu

SEQ ID NO: 104524 - RNA, 32 nt, Human
ccccacuuaacaguaauuacuuuaaacguaaa

SEQ ID NO: 104525 - RNA, 32 nt, Human
ccccacuuaauaaugaauuuugugcuuaagua

SEQ ID NO: 104526 - RNA, 32 nt, Human
ccccacuucacuuucuucaaagccacauuuuu

SEQ ID NO: 104527 - RNA, 32 nt, Human
ccccacuuccaggcacucucagucucuuucaa

SEQ ID NO: 104528 - RNA, 32 nt, Human
ccccacuuccuccucuaccccaacacaugcag

SEQ ID NO: 104529 - RNA, 32 nt, Human
ccccacuuccuguugagaaggaauggcggcau

SEQ ID NO: 104530 - RNA, 32 nt, Human
ccccacuuccuuucuacccugccugugcacag

SEQ ID NO: 104531 - RNA, 32 nt, Human
ccccacuucucucaguuccuggcaugaggaga

SEQ ID NO: 104532 - RNA, 32 nt, Human
ccccacuucucucuccccauccccacccaguc

SEQ ID NO: 104533 - RNA, 18 nt, Human
ccccacuucugggucaug

SEQ ID NO: 104534 - RNA, 32 nt, Human
ccccacuugcaaugugaguccuaagagccaga

SEQ ID NO: 104535 - RNA, 32 nt, Human
ccccacuugccaccaucccccaucacccugcg

SEQ ID NO: 104536 - RNA, 22 nt, Human
ccccacuugcccuugguucuuu

SEQ ID NO: 104537 - RNA, 32 nt, Human
ccccacuuuccacaucugugcacucaagcuug

SEQ ID NO: 104538 - RNA, 32 nt, Human
ccccacuuuccuacaaaauggagggagccauc

SEQ ID NO: 104539 - RNA, 32 nt, Human
ccccacuuuucaucuguaaaauggucauaaca

SEQ ID NO: 104540 - RNA, 23 nt, Human
ccccagaaaaccucuuuguuuua

SEQ ID NO: 104541 - RNA, 32 nt, Human
ccccagaaaagcugcagccugcaggcaccagc

SEQ ID NO: 104542 - RNA, 32 nt, Human
ccccagaaaaggccacugggucacuagauccc

SEQ ID NO: 104543 - RNA, 24 nt, Human
ccccagaaacuccaaccccugccc

SEQ ID NO: 104544 - RNA, 25 nt, Human
ccccagaaaggccccccaucagccc

SEQ ID NO: 104545 - RNA, 22 nt, Human
ccccagaaagggugcaguggcc

SEQ ID NO: 104546 - RNA, 21 nt, Human
ccccagaaaucaguguuggcc

SEQ ID NO: 104547 - RNA, 32 nt, Human
ccccagaacaagccgacacacagggagacggg

SEQ ID NO: 104548 - RNA, 32 nt, Human
ccccagaaccacugcaaggacugcucgucccu

SEQ ID NO: 104549 - RNA, 32 nt, Human
ccccagaacuggagaguaagaaugagcggugu

SEQ ID NO: 104550 - RNA, 19 nt, Human
ccccagaacuggcugggcc

SEQ ID NO: 104551 - RNA, 32 nt, Human
ccccagaagagcaagcuggagaggcugggcag

SEQ ID NO: 104552 - RNA, 32 nt, Human
ccccagaagcaagagaguucaagugaaggaag

SEQ ID NO: 104553 - RNA, 32 nt, Human
ccccagaagcagcagcagccucagggaugagg

SEQ ID NO: 104554 - RNA, 32 nt, Human
ccccagaauggcuccacugggaguggaggaag

SEQ ID NO: 104555 - RNA, 21 nt, Human
ccccagaauucuucuaugcag

SEQ ID NO: 104556 - RNA, 32 nt, Human
ccccagacaagccuuugguggggaacagaacc

SEQ ID NO: 104557 - RNA, 32 nt, Human
ccccagacaccuugcucccucucccaaaucac

SEQ ID NO: 104558 - RNA, 32 nt, Human
ccccagacacuccucuccuugccugcaggcug

SEQ ID NO: 104559 - RNA, 32 nt, Human
ccccagacagagcuggcaacaaaagcagacug

SEQ ID NO: 104560 - RNA, 24 nt, Human
ccccagacaggaccaguugcccuc

SEQ ID NO: 104561 - RNA, 23 nt, Human
ccccagacaguaagauaaucuca

SEQ ID NO: 104562 - RNA, 22 nt, Human
ccccagacauuaaacucagacu

SEQ ID NO: 104563 - RNA, 32 nt, Human
ccccagaccacuggucuggggcagaagcccac

SEQ ID NO: 104564 - RNA, 20 nt, Human
ccccagacccagaauucuca

SEQ ID NO: 104565 - RNA, 32 nt, Human
ccccagacccuccccuguccaaacaggagauc

SEQ ID NO: 104566 - RNA, 22 nt, Human
ccccagacccugacccaggacc

SEQ ID NO: 104567 - RNA, 32 nt, Human
ccccagaccuaaaaauaaucucugauucauau

SEQ ID NO: 104568 - RNA, 22 nt, Human
ccccagacucagcaccauccag

SEQ ID NO: 104569 - RNA, 32 nt, Human
ccccagacuccaggccgccugcagccugcccc

SEQ ID NO: 104570 - RNA, 22 nt, Human
ccccagacuccugacugucucc

SEQ ID NO: 104571 - RNA, 32 nt, Human
ccccagacugagcucuccaggccaggugggaa

SEQ ID NO: 104572 - RNA, 32 nt, Human
ccccagacugcccaaaaacuugcccaccagac

SEQ ID NO: 104573 - RNA, 22 nt, Human
ccccagacuucacccccagccc

SEQ ID NO: 104574 - RNA, 32 nt, Human
ccccagagaaaggcagagggagaggggaccca

SEQ ID NO: 104575 - RNA, 22 nt, Human
ccccagagagacaaaagauaca

SEQ ID NO: 104576 - RNA, 32 nt, Human
ccccagagagagcaggagccacuguggcccca

SEQ ID NO: 104577 - RNA, 32 nt, Human
ccccagagagggcugggcuugacucaucucag

SEQ ID NO: 104578 - RNA, 22 nt, Human
ccccagagcaggccguacccug

SEQ ID NO: 104579 - RNA, 17 nt, Human
ccccagagcaugauaua

SEQ ID NO: 104580 - RNA, 18 nt, Human
ccccagagcccacgagga

SEQ ID NO: 104581 - RNA, 21 nt, Human
ccccagagcccaggcucggcc

SEQ ID NO: 104582 - RNA, 23 nt, Human
ccccagagcccccggcccaggcc

SEQ ID NO: 104583 - RNA, 32 nt, Human
ccccagagcccgaggccaggggacagggcucc

SEQ ID NO: 104584 - RNA, 19 nt, Human
ccccagagcccugggcuau

SEQ ID NO: 104585 - RNA, 19 nt, Human
ccccagagcuggcagcugu

SEQ ID NO: 104586 - RNA, 32 nt, Human
ccccagaggcagagguugcagugagcugagau

SEQ ID NO: 104587 - RNA, 32 nt, Human
ccccagaggcagguccuggccugcugcuuaga

SEQ ID NO: 104588 - RNA, 21 nt, Human
ccccagaggccacaccagucc

SEQ ID NO: 104589 - RNA, 32 nt, Human
ccccagaggccugcuuaggggucuggcugugg

SEQ ID NO: 104590 - RNA, 32 nt, Human
ccccagaggcggagguugcagugagccgagau

SEQ ID NO: 104591 - RNA, 18 nt, Human
ccccagagggagaccuca

SEQ ID NO: 104592 - RNA, 32 nt, Human
ccccagaggggcuggacucagguuaguuuggg

SEQ ID NO: 104593 - RNA, 32 nt, Human
ccccagagggugagacaucagugcugagaaua

SEQ ID NO: 104594 - RNA, 32 nt, Human
ccccagagguggagguugcagugagccgagau

SEQ ID NO: 104595 - RNA, 20 nt, Human
ccccagagguggauacuggg

SEQ ID NO: 104596 - RNA, 32 nt, Human
ccccagaguagcuggaauuacaggcacacacc

SEQ ID NO: 104597 - RNA, 32 nt, Human
ccccagaguagcugggauuacaggcauguacc

SEQ ID NO: 104598 - RNA, 24 nt, Human
ccccagagucaaauugucaggacc

SEQ ID NO: 104599 - RNA, 32 nt, Human
ccccagagucauucugcucugccucuuugggg

SEQ ID NO: 104600 - RNA, 32 nt, Human
ccccagaguggaggaguuagacuugccucgug

SEQ ID NO: 104601 - RNA, 32 nt, Human
ccccagauaccaugucaggauauuuuuagugu

SEQ ID NO: 104602 - RNA, 19 nt, Human
ccccagauaccuccacuug

SEQ ID NO: 104603 - RNA, 32 nt, Human
ccccagauacuaggaggaaagggacuuugggg

SEQ ID NO: 104604 - RNA, 32 nt, Human
ccccagauaucugagcauaacugggagcaccu

SEQ ID NO: 104605 - RNA, 32 nt, Human
ccccagauccagccugggguugggguaggauu

SEQ ID NO: 104606 - RNA, 20 nt, Human
ccccagaucccagccguggc

SEQ ID NO: 104607 - RNA, 20 nt, Human
ccccagaucuccuagcucug

SEQ ID NO: 104608 - RNA, 32 nt, Human
ccccagaugaagauggggaucacagugacaaa

SEQ ID NO: 104609 - RNA, 32 nt, Human
ccccagcaaacagucccuccccugacucccac

SEQ ID NO: 104610 - RNA, 32 nt, Human
ccccagcaaacagugaccaagccagaccucag

SEQ ID NO: 104611 - RNA, 24 nt, Human
ccccagcaaagccgcccucagcca

SEQ ID NO: 104612 - RNA, 32 nt, Human
ccccagcaacacagggagcaggaccaccagug

SEQ ID NO: 104613 - RNA, 18 nt, Human
ccccagcaagcccugcuc

SEQ ID NO: 104614 - RNA, 32 nt, Human
ccccagcaaggaggcaggaggggcgagggccc

SEQ ID NO: 104615 - RNA, 15 nt, Human
ccccagcaaggauaa

SEQ ID NO: 104616 - RNA, 32 nt, Human
ccccagcaaggcagccagcccagcgaguccag

SEQ ID NO: 104617 - RNA, 32 nt, Human
ccccagcaaucuucagucucucaccagggcca

SEQ ID NO: 104618 - RNA, 32 nt, Human
ccccagcacaacugguucccaggccuucggga

SEQ ID NO: 104619 - RNA, 32 nt, Human
ccccagcacacacacauacaacacagaucauu

SEQ ID NO: 104620 - RNA, 22 nt, Human
ccccagcacacagcccgggacc

SEQ ID NO: 104621 - RNA, 32 nt, Human
ccccagcacacccugcuguauguggccacagc

SEQ ID NO: 104622 - RNA, 32 nt, Human
ccccagcacagcccggccucuggccucacugg

SEQ ID NO: 104623 - RNA, 19 nt, Human
ccccagcacagccuggcca

SEQ ID NO: 104624 - RNA, 32 nt, Human
ccccagcacagccuggccaagaucgagcgcaa

SEQ ID NO: 104625 - RNA, 18 nt, Human
ccccagcaccagagcaca

SEQ ID NO: 104626 - RNA, 32 nt, Human
ccccagcaccucagugugggacuggguuugga

SEQ ID NO: 104627 - RNA, 32 nt, Human
ccccagcacggcugcuuugaaagguuuaucau

SEQ ID NO: 104628 - RNA, 32 nt, Human
ccccagcacugagcauggccuaagccccauag

SEQ ID NO: 104629 - RNA, 32 nt, Human
ccccagcacugcaggcagcggcgcaggaagcg

SEQ ID NO: 104630 - RNA, 32 nt, Human
ccccagcagagaaaauccucuucauagauuaa

SEQ ID NO: 104631 - RNA, 32 nt, Human
ccccagcagagagguuugcagucccaagcggu

SEQ ID NO: 104632 - RNA, 32 nt, Human
ccccagcagagggaggggaagcagcccaggga

SEQ ID NO: 104633 - RNA, 22 nt, Human
ccccagcagccaucuccuuccu

SEQ ID NO: 104634 - RNA, 32 nt, Human
ccccagcagcccccuccuccuggcugggaaga

SEQ ID NO: 104635 - RNA, 32 nt, Human
ccccagcagccugaauacugugcccucuugcu

SEQ ID NO: 104636 - RNA, 32 nt, Human
ccccagcagccugugcccuggccuggucuaca

SEQ ID NO: 104637 - RNA, 32 nt, Human
ccccagcagcuuucccagagaggcagaggggc

SEQ ID NO: 104638 - RNA, 32 nt, Human
ccccagcaggccgccucccaacucccaguggc

SEQ ID NO: 104639 - RNA, 32 nt, Human
ccccagcaggccugaauugcaguuccugugcc

SEQ ID NO: 104640 - RNA, 18 nt, Human
ccccagcagggauggggc

SEQ ID NO: 104641 - RNA, 32 nt, Human
ccccagcagguaaacuaacauuauggauuuuu

SEQ ID NO: 104642 - RNA, 22 nt, Human
ccccagcaguacaguccuuccu

SEQ ID NO: 104643 - RNA, 32 nt, Human
ccccagcagugcuugcaggugccugggcuggc

SEQ ID NO: 104644 - RNA, 32 nt, Human
ccccagcaguguggcccagagcaggggccgac

SEQ ID NO: 104645 - RNA, 32 nt, Human
ccccagcauccagcugagguccaaggucuuug

SEQ ID NO: 104646 - RNA, 24 nt, Human
ccccagcauggcagucccauccag

SEQ ID NO: 104647 - RNA, 22 nt, Human
ccccagcauuccagcucugccc

SEQ ID NO: 104648 - RNA, 32 nt, Human
ccccagcauuccagugcucuccaggcuuccuc

SEQ ID NO: 104649 - RNA, 32 nt, Human
ccccagcauucgcucuccuccucucacggaaa

SEQ ID NO: 104650 - RNA, 32 nt, Human
ccccagcauuucucacuccugcccuucuucca

SEQ ID NO: 104651 - RNA, 32 nt, Human
ccccagccaagaaaaauugcacauaguguaua

SEQ ID NO: 104652 - RNA, 32 nt, Human
ccccagccaccaccugccccgccucguccacg

SEQ ID NO: 104653 - RNA, 32 nt, Human
ccccagccaccugggaaaaggaagcacaaaaa

SEQ ID NO: 104654 - RNA, 32 nt, Human
ccccagccacgaguaugccacagggggcuuuc

SEQ ID NO: 104655 - RNA, 32 nt, Human
ccccagccacucccuccagcagccugguucac

SEQ ID NO: 104656 - RNA, 32 nt, Human
ccccagccacuuugccccagccgcuuugaccc

SEQ ID NO: 104657 - RNA, 32 nt, Human
ccccagccagaagacagggcacccgcggccuu

SEQ ID NO: 104658 - RNA, 18 nt, Human
ccccagccagauacggaa

SEQ ID NO: 104659 - RNA, 32 nt, Human
ccccagccagauguggccucagucacaggccu

SEQ ID NO: 104660 - RNA, 19 nt, Human
ccccagccagcagauccca

SEQ ID NO: 104661 - RNA, 32 nt, Human
ccccagccagcggaacaguuucuauuaccccc

SEQ ID NO: 104662 - RNA, 23 nt, Human
ccccagccagcuccucggcuggg

SEQ ID NO: 104663 - RNA, 23 nt, Human
ccccagccagcuggcccaggacc

SEQ ID NO: 104664 - RNA, 32 nt, Human
ccccagccaggauaugccuccccuggaggagc

SEQ ID NO: 104665 - RNA, 32 nt, Human
ccccagccaguauucccucagagccggcacga

SEQ ID NO: 104666 - RNA, 32 nt, Human
ccccagccaucacugcuggcagccugggcaaa

SEQ ID NO: 104667 - RNA, 32 nt, Human
ccccagccauccuugugccuucaccucugaug

SEQ ID NO: 104668 - RNA, 32 nt, Human
ccccagcccaagacgugggaggcugcuuccca

SEQ ID NO: 104669 - RNA, 19 nt, Human
ccccagcccaagagaugaa

SEQ ID NO: 104670 - RNA, 32 nt, Human
ccccagcccacagagccugaauuuguaagcaa

SEQ ID NO: 104671 - RNA, 32 nt, Human
ccccagcccacaugccacucaggaugaggguc

SEQ ID NO: 104672 - RNA, 24 nt, Human
ccccagcccagagagacgcugcuu

SEQ ID NO: 104673 - RNA, 32 nt, Human
ccccagcccagauccuggagggcuuugggcuu

SEQ ID NO: 104674 - RNA, 19 nt, Human
ccccagcccagccccgccc

SEQ ID NO: 104675 - RNA, 32 nt, Human
ccccagcccagccugccuguccuccagcuguc

SEQ ID NO: 104676 - RNA, 32 nt, Human
ccccagcccagccuggggugcacugacggaga

SEQ ID NO: 104677 - RNA, 21 nt, Human
ccccagcccagccuugccucg

SEQ ID NO: 104678 - RNA, 32 nt, Human
ccccagcccagcugccuccagaccccuaagca

SEQ ID NO: 104679 - RNA, 32 nt, Human
ccccagcccaggaggagacuugacucgccuga

SEQ ID NO: 104680 - RNA, 32 nt, Human
ccccagcccaggagguggcuggauugcagggc

SEQ ID NO: 104681 - RNA, 32 nt, Human
ccccagcccaggaguagucuuaccucugagga

SEQ ID NO: 104682 - RNA, 32 nt, Human
ccccagcccagguccuccucucacccgggcca

SEQ ID NO: 104683 - RNA, 22 nt, Human
ccccagcccaucccaucuggug

SEQ ID NO: 104684 - RNA, 32 nt, Human
ccccagccccaccccacauggagcucaggggg

SEQ ID NO: 104685 - RNA, 32 nt, Human
ccccagccccacccucugcccuucagccuacu

SEQ ID NO: 104686 - RNA, 32 nt, Human
ccccagccccacccugucugcuccuucccagu

SEQ ID NO: 104687 - RNA, 25 nt, Human
ccccagcccccaggaccccaggacc

SEQ ID NO: 104688 - RNA, 32 nt, Human
ccccagcccccucacccuccucccucucccuc

SEQ ID NO: 104689 - RNA, 23 nt, Human
ccccagcccccucccguugcccu

SEQ ID NO: 104690 - RNA, 32 nt, Human
ccccagcccccucuccucccagccucugccug

SEQ ID NO: 104691 - RNA, 32 nt, Human
ccccagccccgaggaggaggaggaggaggagg

SEQ ID NO: 104692 - RNA, 32 nt, Human
ccccagccccgcccuucuccccacaucccacc

SEQ ID NO: 104693 - RNA, 32 nt, Human
ccccagccccggcccccucucucccucccuuc

SEQ ID NO: 104694 - RNA, 32 nt, Human
ccccagcccgcccagcccggaggucccgcgug

SEQ ID NO: 104695 - RNA, 32 nt, Human
ccccagcccgccugccccagcccggccucagg

SEQ ID NO: 104696 - RNA, 19 nt, Human
ccccagcccgcugggccgc

SEQ ID NO: 104697 - RNA, 32 nt, Human
ccccagcccuacacagcagucuggccugagac

SEQ ID NO: 104698 - RNA, 32 nt, Human
ccccagcccuaucaccucaucucccgaaaggu

SEQ ID NO: 104699 - RNA, 32 nt, Human
ccccagcccucagagagacagcagaaagggag

SEQ ID NO: 104700 - RNA, 32 nt, Human
ccccagcccucaggauuccugaugcuccaagg

SEQ ID NO: 104701 - RNA, 21 nt, Human
ccccagcccucaggcccuccc

SEQ ID NO: 104702 - RNA, 32 nt, Human
ccccagcccucggcugccucuuaacuuugggu

SEQ ID NO: 104703 - RNA, 32 nt, Human
ccccagcccucuggguuggccugcugucagug

SEQ ID NO: 104704 - RNA, 32 nt, Human
ccccagcccugcgcaugggccugcugcuuguc

SEQ ID NO: 104705 - RNA, 23 nt, Human
ccccagcccuggaggugcccucg

SEQ ID NO: 104706 - RNA, 19 nt, Human
ccccagccgagcccagccu

SEQ ID NO: 104707 - RNA, 19 nt, Human
ccccagccgugccaucucu

SEQ ID NO: 104708 - RNA, 32 nt, Human
ccccagccuacaggaaccuucagaugauugga

SEQ ID NO: 104709 - RNA, 32 nt, Human
ccccagccuagcccugugagaccccaugggga

SEQ ID NO: 104710 - RNA, 32 nt, Human
ccccagccuaggaaagccaguuacauaaaagu

SEQ ID NO: 104711 - RNA, 32 nt, Human
ccccagccuaggcaagggugaccuuucuaaaa

SEQ ID NO: 104712 - RNA, 32 nt, Human
ccccagccuaucugauggcauggucccuggcc

SEQ ID NO: 104713 - RNA, 22 nt, Human
ccccagccucaaauccaggacc

SEQ ID NO: 104714 - RNA, 32 nt, Human
ccccagccucaacugauccucgcaucucagcc

SEQ ID NO: 104715 - RNA, 21 nt, Human
ccccagccucagaccccaccc

SEQ ID NO: 104716 - RNA, 32 nt, Human
ccccagccucauuccccauucugugucccaug

SEQ ID NO: 104717 - RNA, 32 nt, Human
ccccagccuccaccccggcuccccuggccugu

SEQ ID NO: 104718 - RNA, 32 nt, Human
ccccagccuccauccuugugcugguagccucu

SEQ ID NO: 104719 - RNA, 32 nt, Human
ccccagccuccccuagaaauucugugggggcg

SEQ ID NO: 104720 - RNA, 19 nt, Human
ccccagccucgccuuccca

SEQ ID NO: 104721 - RNA, 21 nt, Human
ccccagccucucuggggcaug

SEQ ID NO: 104722 - RNA, 32 nt, Human
ccccagccucugccacccuccaccuccucggu

SEQ ID NO: 104723 - RNA, 32 nt, Human
ccccagccucugcuucccuccucucuccagug

SEQ ID NO: 104724 - RNA, 32 nt, Human
ccccagccucuuccuaauccugugccacacac

SEQ ID NO: 104725 - RNA, 32 nt, Human
ccccagccucuuccugucuucagaaaagcagc

SEQ ID NO: 104726 - RNA, 32 nt, Human
ccccagccucuuuccaucauccuuccuccacc

SEQ ID NO: 104727 - RNA, 32 nt, Human
ccccagccucuuucugcuuucaugcucagcac

SEQ ID NO: 104728 - RNA, 32 nt, Human
ccccagccugcaggccagaagcaguguuacac

SEQ ID NO: 104729 - RNA, 32 nt, Human
ccccagccuggaccccuggggcucagauagag

SEQ ID NO: 104730 - RNA, 23 nt, Human
ccccagccuggccccaccagccc

SEQ ID NO: 104731 - RNA, 32 nt, Human
ccccagccuggcuccauuccugguugucacuc

SEQ ID NO: 104732 - RNA, 32 nt, Human
ccccagccugggaagaugucucacuguccacc

SEQ ID NO: 104733 - RNA, 20 nt, Human
ccccagccugggcaacagag

SEQ ID NO: 104734 - RNA, 20 nt, Human
ccccagccugggcgacagag

SEQ ID NO: 104735 - RNA, 32 nt, Human
ccccagccuguaguccuccucacuucaacccc

SEQ ID NO: 104736 - RNA, 32 nt, Human
ccccagccuucccaccccauaccucccucccg

SEQ ID NO: 104737 - RNA, 22 nt, Human
ccccagccuugaaccuaggacc

SEQ ID NO: 104738 - RNA, 32 nt, Human
ccccagccuuucuccucaggccuaagagaguc

SEQ ID NO: 104739 - RNA, 32 nt, Human
ccccagccuuucuucuccacugggucccacug

SEQ ID NO: 104740 - RNA, 19 nt, Human
ccccagccuuuuccuuuca

SEQ ID NO: 104741 - RNA, 20 nt, Human
ccccagcgcagccccgggca

SEQ ID NO: 104742 - RNA, 32 nt, Human
ccccagcgcagcugccucccgugcugucuguc

SEQ ID NO: 104743 - RNA, 32 nt, Human
ccccagcgcccucccuguccaguuccuugaag

SEQ ID NO: 104744 - RNA, 32 nt, Human
ccccagcgccuggugcugcagucuuaucuuca

SEQ ID NO: 104745 - RNA, 23 nt, Human
ccccagcgccuuucccccggggc

SEQ ID NO: 104746 - RNA, 17 nt, Human
ccccagcgcucuccacg

SEQ ID NO: 104747 - RNA, 32 nt, Human
ccccagcggaagcacagcucagagcuggucug

SEQ ID NO: 104748 - RNA, 19 nt, Human
ccccagcggcccccggccc

SEQ ID NO: 104749 - RNA, 23 nt, Human
ccccagcggccgccggcuccccc

SEQ ID NO: 104750 - RNA, 22 nt, Human
ccccagcggcucccucccuccu

SEQ ID NO: 104751 - RNA, 32 nt, Human
ccccagcggcucuguuuccuccuuccuuccuu

SEQ ID NO: 104752 - RNA, 32 nt, Human
ccccagcggcuuccccagccuccggaaguggg

SEQ ID NO: 104753 - RNA, 32 nt, Human
ccccagcgggguccgagcaggacggcuggaag

SEQ ID NO: 104754 - RNA, 32 nt, Human
ccccagcuaacacccauccacgcaccaccucc

SEQ ID NO: 104755 - RNA, 21 nt, Human
ccccagcuacaccaccagccc

SEQ ID NO: 104756 - RNA, 20 nt, Human
ccccagcuacagaauuccca

SEQ ID NO: 104757 - RNA, 32 nt, Human
ccccagcuaguaggugacagagcccagauuga

SEQ ID NO: 104758 - RNA, 22 nt, Human
ccccagcucacucauugcccuc

SEQ ID NO: 104759 - RNA, 32 nt, Human
ccccagcucacugcgccccuuuuccagcccgg

SEQ ID NO: 104760 - RNA, 21 nt, Human
ccccagcucagagccccgccc

SEQ ID NO: 104761 - RNA, 32 nt, Human
ccccagcucagcucugcugcaucccaggucau

SEQ ID NO: 104762 - RNA, 32 nt, Human
ccccagcucaucucccugguugcauggcccac

SEQ ID NO: 104763 - RNA, 32 nt, Human
ccccagcuccaauauguagcagucucucugga

SEQ ID NO: 104764 - RNA, 32 nt, Human
ccccagcuccagccccagcccaggugggccgc

SEQ ID NO: 104765 - RNA, 21 nt, Human
ccccagcuccaggaccugccc

SEQ ID NO: 104766 - RNA, 32 nt, Human
ccccagcuccaggacugagagccccaggaagc

SEQ ID NO: 104767 - RNA, 32 nt, Human
ccccagcucccaggaccacaggcucaggcagg

SEQ ID NO: 104768 - RNA, 32 nt, Human
ccccagcuccccucagugcugcugucagugua

SEQ ID NO: 104769 - RNA, 32 nt, Human
ccccagcuccgccuccccacacuccuccuugc

SEQ ID NO: 104770 - RNA, 24 nt, Human
ccccagcuccugcagggauggggu

SEQ ID NO: 104771 - RNA, 32 nt, Human
ccccagcuccuucugcaaggggccugcagaug

SEQ ID NO: 104772 - RNA, 32 nt, Human
ccccagcucucuucuggcuuucugagcaggaa

SEQ ID NO: 104773 - RNA, 32 nt, Human
ccccagcucugauuccuucaaggcccggccug

SEQ ID NO: 104774 - RNA, 32 nt, Human
ccccagcucugccugugccuuuaucccugaca

SEQ ID NO: 104775 - RNA, 32 nt, Human
ccccagcugaaccuccacaguccucuacacuc

SEQ ID NO: 104776 - RNA, 32 nt, Human
ccccagcugcagcuauccugacacagugcccu

SEQ ID NO: 104777 - RNA, 32 nt, Human
ccccagcugcauggaagguggaggacagaagc

SEQ ID NO: 104778 - RNA, 32 nt, Human
ccccagcugccuggcuggguccugaagcccuc

SEQ ID NO: 104779 - RNA, 20 nt, Human
ccccagcugcuccccucccu

SEQ ID NO: 104780 - RNA, 32 nt, Human
ccccagcugcuccccucccuccucugucccua

SEQ ID NO: 104781 - RNA, 19 nt, Human
ccccagcugcuccuccuca

SEQ ID NO: 104782 - RNA, 32 nt, Human
ccccagcugcuggcucgcgguucugagagugc

SEQ ID NO: 104783 - RNA, 32 nt, Human
ccccagcuggacuccccacccccuggcuuccc

SEQ ID NO: 104784 - RNA, 20 nt, Human
ccccagcuggagugcagugg

SEQ ID NO: 104785 - RNA, 32 nt, Human
ccccagcuggcaguugagcugccugagccaau

SEQ ID NO: 104786 - RNA, 32 nt, Human
ccccagcugggaagagggcgggaucgggcacu

SEQ ID NO: 104787 - RNA, 32 nt, Human
ccccagcugggcagggcuggaagccuuacgua

SEQ ID NO: 104788 - RNA, 21 nt, Human
ccccagcugggccugccccug

SEQ ID NO: 104789 - RNA, 32 nt, Human
ccccagcugggcugucccaaauguuaccauuu

SEQ ID NO: 104790 - RNA, 32 nt, Human
ccccagcugggugacagagugagacacugucu

SEQ ID NO: 104791 - RNA, 32 nt, Human
ccccagcuggucugcuuggauuuccuacagcc

SEQ ID NO: 104792 - RNA, 21 nt, Human
ccccagcugguucgggccgug

SEQ ID NO: 104793 - RNA, 32 nt, Human
ccccagcuguaaguguagacagugacuuguac

SEQ ID NO: 104794 - RNA, 32 nt, Human
ccccagcuguggguacagagaggucaagccca

SEQ ID NO: 104795 - RNA, 32 nt, Human
ccccagcuguguccagccugucugcagggaca

SEQ ID NO: 104796 - RNA, 32 nt, Human
ccccagcuguucuccagggcuuggggaaacag

SEQ ID NO: 104797 - RNA, 32 nt, Human
ccccagcuguugccuggcuuuccagaaacaga

SEQ ID NO: 104798 - RNA, 32 nt, Human
ccccagcuucccggcauuggaagaagggaccg

SEQ ID NO: 104799 - RNA, 32 nt, Human
ccccagcuuccugcccuccaccgggagucugc

SEQ ID NO: 104800 - RNA, 32 nt, Human
ccccagcuucugucugucucacugucuucccu

SEQ ID NO: 104801 - RNA, 20 nt, Human
ccccagcuugagugcagugg

SEQ ID NO: 104802 - RNA, 22 nt, Human
ccccagcuugcuggcugcccuc

SEQ ID NO: 104803 - RNA, 22 nt, Human
ccccagcuuggagagccuuucc

SEQ ID NO: 104804 - RNA, 26 nt, Human
ccccagcuuggccuccccaccagccc

SEQ ID NO: 104805 - RNA, 32 nt, Human
ccccagcuuggccuccccaccagcccgcugag

SEQ ID NO: 104806 - RNA, 32 nt, Human
ccccagcuuucuuucuguuagcauuuucugau

SEQ ID NO: 104807 - RNA, 32 nt, Human
ccccagcuuugcaaaguucuuccuguugggcu

SEQ ID NO: 104808 - RNA, 32 nt, Human
ccccagcuuuggcuaugagggccuugaguccc

SEQ ID NO: 104809 - RNA, 25 nt, Human
ccccagcuuuuccccagcucugccc

SEQ ID NO: 104810 - RNA, 20 nt, Human
ccccaggaaaacccaccucu

SEQ ID NO: 104811 - RNA, 32 nt, Human
ccccaggaaaacuguuuucauuuucacggcug

SEQ ID NO: 104812 - RNA, 32 nt, Human
ccccaggaaaugugaagacuggcagcuuucaa

SEQ ID NO: 104813 - RNA, 22 nt, Human
ccccaggaacguuucugaacaa

SEQ ID NO: 104814 - RNA, 32 nt, Human
ccccaggaacuccaauugugcugaagcugauu

SEQ ID NO: 104815 - RNA, 32 nt, Human
ccccaggaagaaaaugaugcagcucuggcucc

SEQ ID NO: 104816 - RNA, 20 nt, Human
ccccaggaagagucugucaa

SEQ ID NO: 104817 - RNA, 32 nt, Human
ccccaggaagcauccagggcagaggaagccac

SEQ ID NO: 104818 - RNA, 32 nt, Human
ccccaggaagccugagacgaaaguccuggggg

SEQ ID NO: 104819 - RNA, 19 nt, Human
ccccaggaagugggccaug

SEQ ID NO: 104820 - RNA, 21 nt, Human
ccccaggaaguuucugcgcag

SEQ ID NO: 104821 - RNA, 32 nt, Human
ccccaggaauauguguuuuccuuugucuuaau

SEQ ID NO: 104822 - RNA, 18 nt, Human
ccccaggacaagcugggg

SEQ ID NO: 104823 - RNA, 21 nt, Human
ccccaggacacccacccaccc

SEQ ID NO: 104824 - RNA, 24 nt, Human
ccccaggacacccagccugugccc

SEQ ID NO: 104825 - RNA, 32 nt, Human
ccccaggacagaagcagacagacacggcuccu

SEQ ID NO: 104826 - RNA, 22 nt, Human
ccccaggacagaugucuugcaa

SEQ ID NO: 104827 - RNA, 32 nt, Human
ccccaggacaggcccaagucagcccagcaugc

SEQ ID NO: 104828 - RNA, 32 nt, Human
ccccaggacaggucccuggaccagccuccugu

SEQ ID NO: 104829 - RNA, 32 nt, Human
ccccaggacccaggcuguggaucacggggccu

SEQ ID NO: 104830 - RNA, 32 nt, Human
ccccaggacccccacaccaccccagcucccug

SEQ ID NO: 104831 - RNA, 24 nt, Human
ccccaggaccccggugucccuccc

SEQ ID NO: 104832 - RNA, 21 nt, Human
ccccaggacucaccccagccc

SEQ ID NO: 104833 - RNA, 32 nt, Human
ccccaggacuccuagucgccggcuucagguca

SEQ ID NO: 104834 - RNA, 32 nt, Human
ccccaggacuccugggcccugcuucccugaac

SEQ ID NO: 104835 - RNA, 32 nt, Human
ccccaggacucugucuuuucuccaguuugagc

SEQ ID NO: 104836 - RNA, 19 nt, Human
ccccaggacuucuggguca

SEQ ID NO: 104837 - RNA, 18 nt, Human
ccccaggacuuugccaug

SEQ ID NO: 104838 - RNA, 32 nt, Human
ccccaggagaaaggacaacugcugccgaggca

SEQ ID NO: 104839 - RNA, 32 nt, Human
ccccaggagaggcagagagugagggaaagggc

SEQ ID NO: 104840 - RNA, 32 nt, Human
ccccaggagaggggagcuguguagugagggau

SEQ ID NO: 104841 - RNA, 32 nt, Human
ccccaggagaugcagaaggcaagugcagcuaa

SEQ ID NO: 104842 - RNA, 32 nt, Human
ccccaggagcaacauggggcccacccuagcgg

SEQ ID NO: 104843 - RNA, 32 nt, Human
ccccaggagcagaagagaguggggccugcccu

SEQ ID NO: 104844 - RNA, 32 nt, Human
ccccaggagccaagcccaccccuucuuugugu

SEQ ID NO: 104845 - RNA, 32 nt, Human
ccccaggagcccagagcagcgggagagggucc

SEQ ID NO: 104846 - RNA, 32 nt, Human
ccccaggagccccagugaaguucaccaaauca

SEQ ID NO: 104847 - RNA, 19 nt, Human
ccccaggagccccaguggc

SEQ ID NO: 104848 - RNA, 22 nt, Human
ccccaggagcccuuuuuguuca

SEQ ID NO: 104849 - RNA, 32 nt, Human
ccccaggaggaguaggaguugggcaggggaag

SEQ ID NO: 104850 - RNA, 32 nt, Human
ccccaggaggcagagguugaagugagccagga

SEQ ID NO: 104851 - RNA, 32 nt, Human
ccccaggaggcgaagauugcagugagcugaua

SEQ ID NO: 104852 - RNA, 32 nt, Human
ccccaggaggcuggugccagggagacaggccc

SEQ ID NO: 104853 - RNA, 32 nt, Human
ccccaggagggcccugccacgggccacuggcu

SEQ ID NO: 104854 - RNA, 19 nt, Human
ccccaggaggguuggcaug

SEQ ID NO: 104855 - RNA, 32 nt, Human
ccccaggaggucgaggcugcagugagccauga

SEQ ID NO: 104856 - RNA, 32 nt, Human
ccccaggagguggacauugcagugagccgaga

SEQ ID NO: 104857 - RNA, 32 nt, Human
ccccaggaggugggcaggcagcugagagcuug

SEQ ID NO: 104858 - RNA, 32 nt, Human
ccccaggagguggggguuguugugagccaaga

SEQ ID NO: 104859 - RNA, 32 nt, Human
ccccaggagguguugggggacacuccuccccu

SEQ ID NO: 104860 - RNA, 24 nt, Human
ccccaggagucuaaaauccagguc

SEQ ID NO: 104861 - RNA, 19 nt, Human
ccccaggauacucuggcaa

SEQ ID NO: 104862 - RNA, 32 nt, Human
ccccaggauucccagagagacgcugugauugg

SEQ ID NO: 104863 - RNA, 20 nt, Human
ccccaggauucucccggcgc

SEQ ID NO: 104864 - RNA, 32 nt, Human
ccccaggauuuagaucuuggcuacugucaugc

SEQ ID NO: 104865 - RNA, 32 nt, Human
ccccaggcaagaaggcagaguuucuccgcagg

SEQ ID NO: 104866 - RNA, 20 nt, Human
ccccaggcaccagacuuacc

SEQ ID NO: 104867 - RNA, 32 nt, Human
ccccaggcacgggggcccucucucuuccagag

SEQ ID NO: 104868 - RNA, 32 nt, Human
ccccaggcagccaccaguggaccuagccugga

SEQ ID NO: 104869 - RNA, 20 nt, Human
ccccaggcagccaugacaua

SEQ ID NO: 104870 - RNA, 22 nt, Human
ccccaggcagcuccgugcccug

SEQ ID NO: 104871 - RNA, 28 nt, Human
ccccaggcagcugcugccuccacuaucg

SEQ ID NO: 104872 - RNA, 32 nt, Human
ccccaggcaggagccaagcacagcaggagcuu

SEQ ID NO: 104873 - RNA, 32 nt, Human
ccccaggcagggaccucagcuuuguuaggagu

SEQ ID NO: 104874 - RNA, 25 nt, Human
ccccaggcagggcgugcccaggacc

SEQ ID NO: 104875 - RNA, 32 nt, Human
ccccaggcagucugugugugaggcauagcccc

SEQ ID NO: 104876 - RNA, 21 nt, Human
ccccaggcagugcugggccau

SEQ ID NO: 104877 - RNA, 32 nt, Human
ccccaggcauaaugugacccccaacaaaccca

SEQ ID NO: 104878 - RNA, 32 nt, Human
ccccaggcauggcaagcgccugccucuccccu

SEQ ID NO: 104879 - RNA, 24 nt, Human
ccccaggccaacagaacugcuggg

SEQ ID NO: 104880 - RNA, 32 nt, Human
ccccaggccacugucacucuuugugggagggg

SEQ ID NO: 104881 - RNA, 32 nt, Human
ccccaggccagccuggacacaucagggagcau

SEQ ID NO: 104882 - RNA, 21 nt, Human
ccccaggcccaccuccuggcc

SEQ ID NO: 104883 - RNA, 32 nt, Human
ccccaggcccagcacagggagcagggaguuuu

SEQ ID NO: 104884 - RNA, 32 nt, Human
ccccaggcccagccagggcugaggagcuguca

SEQ ID NO: 104885 - RNA, 18 nt, Human
ccccaggccccucucuca

SEQ ID NO: 104886 - RNA, 32 nt, Human
ccccaggccccuggcggguaccugagcugugc

SEQ ID NO: 104887 - RNA, 32 nt, Human
ccccaggcccugcuggccagagccacagaugc

SEQ ID NO: 104888 - RNA, 32 nt, Human
ccccaggcccugucuccccagcauccucccug

SEQ ID NO: 104889 - RNA, 20 nt, Human
ccccaggccgcucccggggc

SEQ ID NO: 104890 - RNA, 21 nt, Human
ccccaggccggagugcagugg

SEQ ID NO: 104891 - RNA, 32 nt, Human
ccccaggccucagucucccuucucccaugagg

SEQ ID NO: 104892 - RNA, 32 nt, Human
ccccaggccuccucccuguccuugugucccuc

SEQ ID NO: 104893 - RNA, 19 nt, Human
ccccaggccuccugggcca

SEQ ID NO: 104894 - RNA, 17 nt, Human
ccccaggccucuccuca

SEQ ID NO: 104895 - RNA, 21 nt, Human
ccccaggcgccgcgacuugcc

SEQ ID NO: 104896 - RNA, 32 nt, Human
ccccaggcucaggugauccucccaccucagcc

SEQ ID NO: 104897 - RNA, 32 nt, Human
ccccaggcuccaccagcuguuccccagugaug

SEQ ID NO: 104898 - RNA, 32 nt, Human
ccccaggcuccaugcugcugugcccugagguu

SEQ ID NO: 104899 - RNA, 32 nt, Human
ccccaggcucugaccuucuuucccaggaugag

SEQ ID NO: 104900 - RNA, 21 nt, Human
ccccaggcugagaaccugggg

SEQ ID NO: 104901 - RNA, 32 nt, Human
ccccaggcugaucuugaacuccugggcucaag

SEQ ID NO: 104902 - RNA, 32 nt, Human
ccccaggcugcaucggccugccuguguuuccc

SEQ ID NO: 104903 - RNA, 21 nt, Human
ccccaggcuggagugcaaugg

SEQ ID NO: 104904 - RNA, 21 nt, Human
ccccaggcuggagugcagugg

SEQ ID NO: 104905 - RNA, 32 nt, Human
ccccaggcuggucucgaacuccugggcucaag

SEQ ID NO: 104906 - RNA, 32 nt, Human
ccccaggcugucacccuccaccgagccacgca

SEQ ID NO: 104907 - RNA, 32 nt, Human
ccccaggcuguggugaggggccucacagauuu

SEQ ID NO: 104908 - RNA, 32 nt, Human
ccccaggcugugugcguccaggacgucgcccc

SEQ ID NO: 104909 - RNA, 32 nt, Human
ccccaggcuuccucuucuuguaguccaucucc

SEQ ID NO: 104910 - RNA, 27 nt, Human
ccccaggcuugacuccaccucggggcu

SEQ ID NO: 104911 - RNA, 22 nt, Human
ccccagggaagccgccugccuu

SEQ ID NO: 104912 - RNA, 32 nt, Human
ccccagggaauuguguuugucuucauuucagu

SEQ ID NO: 104913 - RNA, 20 nt, Human
ccccagggacuguccaggug

SEQ ID NO: 104914 - RNA, 32 nt, Human
ccccagggagagagaaaaagcugagacuccug

SEQ ID NO: 104915 - RNA, 20 nt, Human
ccccagggagcuuguugcca

SEQ ID NO: 104916 - RNA, 26 nt, Human
ccccagggaggcccuggccuccagug

SEQ ID NO: 104917 - RNA, 23 nt, Human
ccccagggaggugucuguuccca

SEQ ID NO: 104918 - RNA, 32 nt, Human
ccccagggaucucuucacauguggauugacau

SEQ ID NO: 104919 - RNA, 24 nt, Human
ccccagggaugaaacacccagaaa

SEQ ID NO: 104920 - RNA, 18 nt, Human
ccccagggauugcccgug

SEQ ID NO: 104921 - RNA, 32 nt, Human
ccccagggcaaggacagcucagcugcuggcag

SEQ ID NO: 104922 - RNA, 32 nt, Human
ccccagggcacugcagagucugggcagaggug

SEQ ID NO: 104923 - RNA, 32 nt, Human
ccccagggcaggaggauggugccuggacaacc

SEQ ID NO: 104924 - RNA, 32 nt, Human
ccccagggcaggcaggcugcagggagccaagu

SEQ ID NO: 104925 - RNA, 18 nt, Human
ccccagggcagggcuggg

SEQ ID NO: 104926 - RNA, 29 nt, Human
ccccagggcccaccucuuacuuccugccu

SEQ ID NO: 104927 - RNA, 31 nt, Human
ccccagggcccaggaacugucaucagagcag

SEQ ID NO: 104928 - RNA, 32 nt, Human
ccccagggcccaggaacugucaucagagcaga

SEQ ID NO: 104929 - RNA, 29 nt, Human
ccccagggccccaccccauccuccugccu

SEQ ID NO: 104930 - RNA, 18 nt, Human
ccccagggcccggcagug

SEQ ID NO: 104931 - RNA, 18 nt, Human
ccccagggcccuggccau

SEQ ID NO: 104932 - RNA, 16 nt, Human
ccccagggccgccgug

SEQ ID NO: 104933 - RNA, 17 nt, Human
ccccagggccgggcuug

SEQ ID NO: 104934 - RNA, 21 nt, Human
ccccagggccucuccgugcaa

SEQ ID NO: 104935 - RNA, 18 nt, Human
ccccagggccuggcacau

SEQ ID NO: 104936 - RNA, 32 nt, Human
ccccagggccugggacagccugccgcugccag

SEQ ID NO: 104937 - RNA, 28 nt, Human
ccccagggccuuuccuucaccuccugcc

SEQ ID NO: 104938 - RNA, 27 nt, Human
ccccagggcuccaacuccuccuugccu

SEQ ID NO: 104939 - RNA, 16 nt, Human
ccccagggcuccagug

SEQ ID NO: 104940 - RNA, 22 nt, Human
ccccagggcuccaucuccgccu

SEQ ID NO: 104941 - RNA, 18 nt, Human
ccccagggcucccggcua

SEQ ID NO: 104942 - RNA, 16 nt, Human
ccccagggcuccugug

SEQ ID NO: 104943 - RNA, 22 nt, Human
ccccagggcucgccuucugccu

SEQ ID NO: 104944 - RNA, 17 nt, Human
ccccagggcucuccaug

SEQ ID NO: 104945 - RNA, 29 nt, Human
ccccagggcucucccuccaccuccuggcu

SEQ ID NO: 104946 - RNA, 18 nt, Human
ccccagggcucugggcua

SEQ ID NO: 104947 - RNA, 18 nt, Human
ccccagggcucuggguca

SEQ ID NO: 104948 - RNA, 22 nt, Human
ccccagggcugaccaccagccu

SEQ ID NO: 104949 - RNA, 32 nt, Human
ccccagggcugagcuguguggugcaggccaaa

SEQ ID NO: 104950 - RNA, 18 nt, Human
ccccagggcugcagcugu

SEQ ID NO: 104951 - RNA, 16 nt, Human
ccccagggcugccaug

SEQ ID NO: 104952 - RNA, 18 nt, Human
ccccagggcugcggggcu

SEQ ID NO: 104953 - RNA, 16 nt, Human
ccccagggcugcugug

SEQ ID NO: 104954 - RNA, 20 nt, Human
ccccagggcuggggcugcca

SEQ ID NO: 104955 - RNA, 18 nt, Human
ccccagggcuucuggcua

SEQ ID NO: 104956 - RNA, 18 nt, Human
ccccagggcuuguggcca

SEQ ID NO: 104957 - RNA, 21 nt, Human
ccccagggcuuuccuguaccu

SEQ ID NO: 104958 - RNA, 27 nt, Human
ccccagggcuuuccuucaccuccugcc

SEQ ID NO: 104959 - RNA, 27 nt, Human
ccccagggcuuuccuuuccuccugcuu

SEQ ID NO: 104960 - RNA, 29 nt, Human
ccccagggcuuugucacuuccuucugccu

SEQ ID NO: 104961 - RNA, 32 nt, Human
ccccaggggaauggcagcagugagguagaugg

SEQ ID NO: 104962 - RNA, 32 nt, Human
ccccaggggacauuuggcaaugacuggaggag

SEQ ID NO: 104963 - RNA, 32 nt, Human
ccccaggggacugggugcaguggcucauaccu

SEQ ID NO: 104964 - RNA, 32 nt, Human
ccccaggggcacuguccuguguguucuggaaa

SEQ ID NO: 104965 - RNA, 32 nt, Human
ccccaggggcugagcugccaccagagguccug

SEQ ID NO: 104966 - RNA, 16 nt, Human
ccccaggggcugcaug

SEQ ID NO: 104967 - RNA, 32 nt, Human
ccccaggggcuggagucaccuggugccccuga

SEQ ID NO: 104968 - RNA, 23 nt, Human
ccccaggggcuucggcccagacc

SEQ ID NO: 104969 - RNA, 32 nt, Human
ccccagggguaugagggcaccagcuggguucu

SEQ ID NO: 104970 - RNA, 19 nt, Human
ccccagggguuggcccaug

SEQ ID NO: 104971 - RNA, 16 nt, Human
ccccaggguagccaug

SEQ ID NO: 104972 - RNA, 27 nt, Human
ccccagggucauggaggacccaggacc

SEQ ID NO: 104973 - RNA, 32 nt, Human
ccccaggguccaagggagaagccccagacccc

SEQ ID NO: 104974 - RNA, 23 nt, Human
ccccaggguccauacuucuguuu

SEQ ID NO: 104975 - RNA, 29 nt, Human
ccccaggguccuccuccgccuccucguuu

SEQ ID NO: 104976 - RNA, 29 nt, Human
ccccaggguccuccuuauacuuucugucu

SEQ ID NO: 104977 - RNA, 29 nt, Human
ccccagggucgcuuuccagccuuuuguuu

SEQ ID NO: 104978 - RNA, 22 nt, Human
ccccagggucuauuuucugccu

SEQ ID NO: 104979 - RNA, 29 nt, Human
ccccagggucuuauuuugcuugccugccu

SEQ ID NO: 104980 - RNA, 29 nt, Human
ccccagggucuucauuuuuccuccugucu

SEQ ID NO: 104981 - RNA, 29 nt, Human
ccccagggucuuuuucucaucucuugcuu

SEQ ID NO: 104982 - RNA, 32 nt, Human
ccccagggugacaguggcccagcugggacugg

SEQ ID NO: 104983 - RNA, 32 nt, Human
ccccaggguggagggggugggaaugggggaug

SEQ ID NO: 104984 - RNA, 17 nt, Human
ccccagggugggccgug

SEQ ID NO: 104985 - RNA, 18 nt, Human
ccccaggguggggcuaug

SEQ ID NO: 104986 - RNA, 17 nt, Human
ccccagggugguccaug

SEQ ID NO: 104987 - RNA, 29 nt, Human
ccccaggguuacauuucaaucuucugucu

SEQ ID NO: 104988 - RNA, 29 nt, Human
ccccaggguucaucaucugccuucugcuu

SEQ ID NO: 104989 - RNA, 22 nt, Human
ccccaggguucaucuucuguuu

SEQ ID NO: 104990 - RNA, 29 nt, Human
ccccaggguucuagucugucuuccugccu

SEQ ID NO: 104991 - RNA, 29 nt, Human
ccccaggguucuaucuccacuuugugccu

SEQ ID NO: 104992 - RNA, 29 nt, Human
ccccaggguucuaucuucuuuucuugccu

SEQ ID NO: 104993 - RNA, 29 nt, Human
ccccaggguucuccauuucacucuugcuu

SEQ ID NO: 104994 - RNA, 29 nt, Human
ccccaggguucuccauuuuccucuugucu

SEQ ID NO: 104995 - RNA, 29 nt, Human
ccccaggguucuccucugcuucuuugccu

SEQ ID NO: 104996 - RNA, 27 nt, Human
ccccaggguucuccuuugccuuuugcc

SEQ ID NO: 104997 - RNA, 32 nt, Human
ccccaggguugcugaggaagagcuugaugauc

SEQ ID NO: 104998 - RNA, 18 nt, Human
ccccaggguuuggccgug

SEQ ID NO: 104999 - RNA, 29 nt, Human
ccccaggguuuguucuucaucuccugucu

SEQ ID NO: 105000 - RNA, 29 nt, Human
ccccaggguuuuaaauguauuuccugcuu

SEQ ID NO: 105001 - RNA, 29 nt, Human
ccccaggguuuuacguccaucucuuguuu

SEQ ID NO: 105002 - RNA, 29 nt, Human
ccccaggguuuugaauuaucucacugucu

SEQ ID NO: 105003 - RNA, 28 nt, Human
ccccaggguuuuguccugccucuuguuu

SEQ ID NO: 105004 - RNA, 29 nt, Human
ccccaggguuuugugaccaguuucugucu

SEQ ID NO: 105005 - RNA, 32 nt, Human
ccccagguaaaaggugcuccuuugccuggguu

SEQ ID NO: 105006 - RNA, 32 nt, Human
ccccagguaauggcaugagauagcugguguua

SEQ ID NO: 105007 - RNA, 21 nt, Human
ccccagguacaccucccccug

SEQ ID NO: 105008 - RNA, 32 nt, Human
ccccagguagggaaagcggaagguagaaggcu

SEQ ID NO: 105009 - RNA, 22 nt, Human
ccccaggucaccucgggucccc

SEQ ID NO: 105010 - RNA, 32 nt, Human
ccccaggucaguccccagcccucuggguuggc

SEQ ID NO: 105011 - RNA, 23 nt, Human
ccccagguccuggcccagucccu

SEQ ID NO: 105012 - RNA, 32 nt, Human
ccccaggucucagccucccuguuggcugauac

SEQ ID NO: 105013 - RNA, 32 nt, Human
ccccaggugaaacuggaagugcaugaggcaga

SEQ ID NO: 105014 - RNA, 23 nt, Human
ccccaggugacggccugcccgca

SEQ ID NO: 105015 - RNA, 32 nt, Human
ccccaggugagacagcggucccaggggccuga

SEQ ID NO: 105016 - RNA, 22 nt, Human
ccccaggugauguuacuugcca

SEQ ID NO: 105017 - RNA, 21 nt, Human
ccccaggugcaagcagcaccc

SEQ ID NO: 105018 - RNA, 32 nt, Human
ccccaggugcaggccaccaccuccgggucggc

SEQ ID NO: 105019 - RNA, 32 nt, Human
ccccaggugccggcggcccgggccaagccauc

SEQ ID NO: 105020 - RNA, 18 nt, Human
ccccaggugcucagggcc

SEQ ID NO: 105021 - RNA, 32 nt, Human
ccccaggugcuguuugcucaggaggcugcugu

SEQ ID NO: 105022 - RNA, 24 nt, Human
ccccagguggcugacccagucccu

SEQ ID NO: 105023 - RNA, 32 nt, Human
ccccaggugggaggggcaggaagcagccggag

SEQ ID NO: 105024 - RNA, 32 nt, Human
ccccaggugguggagguugcagugagccaaga

SEQ ID NO: 105025 - RNA, 24 nt, Human
ccccaggugugcuucucccguagc

SEQ ID NO: 105026 - RNA, 32 nt, Human
ccccagguucaagugauucuccugccucagcc

SEQ ID NO: 105027 - RNA, 21 nt, Human
ccccagguucccuacacccug

SEQ ID NO: 105028 - RNA, 19 nt, Human
ccccagguuccuccaggcc

SEQ ID NO: 105029 - RNA, 19 nt, Human
ccccagguugccugggcca

SEQ ID NO: 105030 - RNA, 32 nt, Human
ccccagguuggagugcaguggcgugucuuggg

SEQ ID NO: 105031 - RNA, 32 nt, Human
ccccaguaggaggagagcaggcagagcuuguc

SEQ ID NO: 105032 - RNA, 32 nt, Human
ccccaguauacugaccauuccccagccacuuc

SEQ ID NO: 105033 - RNA, 32 nt, Human
ccccaguauuguagagcaagucuuguguuaaa

SEQ ID NO: 105034 - RNA, 32 nt, Human
ccccagucaagacucagggugucccgaagcug

SEQ ID NO: 105035 - RNA, 32 nt, Human
ccccagucaagccuucggaugccugcagcccu

SEQ ID NO: 105036 - RNA, 24 nt, Human
ccccagucacucgccccuuccuca

SEQ ID NO: 105037 - RNA, 32 nt, Human
ccccagucagaacugugaaacagggaaauuuu

SEQ ID NO: 105038 - RNA, 32 nt, Human
ccccaguccauuuaucaggaggugaucacaca

SEQ ID NO: 105039 - RNA, 32 nt, Human
ccccaguccccagagccccgacagaggggucc

SEQ ID NO: 105040 - RNA, 32 nt, Human
ccccaguccccugggcugcccuucccgggccu

SEQ ID NO: 105041 - RNA, 32 nt, Human
ccccagucccgagacuggguucaaguagaggg

SEQ ID NO: 105042 - RNA, 32 nt, Human
ccccagucccucccucuucaccuugcuccguc

SEQ ID NO: 105043 - RNA, 32 nt, Human
ccccagucccucuucccaccccucucuucuag

SEQ ID NO: 105044 - RNA, 16 nt, Human
ccccaguccgcucggc

SEQ ID NO: 105045 - RNA, 32 nt, Human
ccccagucgagcccuccucccuuccccugccc

SEQ ID NO: 105046 - RNA, 32 nt, Human
ccccagucuaacaccacaacuaauuucaccca

SEQ ID NO: 105047 - RNA, 32 nt, Human
ccccagucuauccccaaccccaaaucaagacc

SEQ ID NO: 105048 - RNA, 32 nt, Human
ccccagucucaacuuccaucaccucggcgcuc

SEQ ID NO: 105049 - RNA, 32 nt, Human
ccccagucucacuaguugccaggcuggucuca

SEQ ID NO: 105050 - RNA, 32 nt, Human
ccccagucucacuccauuccuuccccaccugg

SEQ ID NO: 105051 - RNA, 32 nt, Human
ccccagucucagaaauuaacaugguaugaaag

SEQ ID NO: 105052 - RNA, 32 nt, Human
ccccagucucccucccccucgcgccugggcag

SEQ ID NO: 105053 - RNA, 32 nt, Human
ccccagucuccucuccugaucuccuccaaucu

SEQ ID NO: 105054 - RNA, 32 nt, Human
ccccagucucgccugcacucuccuuuccuccc

SEQ ID NO: 105055 - RNA, 17 nt, Human
ccccagugaagaguaaa

SEQ ID NO: 105056 - RNA, 32 nt, Human
ccccagugacccagagcauggaaaggggguca

SEQ ID NO: 105057 - RNA, 32 nt, Human
ccccagugcagugccauccaccguggcuccgc

SEQ ID NO: 105058 - RNA, 32 nt, Human
ccccagugcccacagaacccagucccaugcca

SEQ ID NO: 105059 - RNA, 32 nt, Human
ccccagugcccgcugggcccagccuggggaca

SEQ ID NO: 105060 - RNA, 32 nt, Human
ccccagugccuacagacaaagcagaagcugcc

SEQ ID NO: 105061 - RNA, 23 nt, Human
ccccagugccucuccuggcccug

SEQ ID NO: 105062 - RNA, 32 nt, Human
ccccagugccugugccucugagcccgggucca

SEQ ID NO: 105063 - RNA, 32 nt, Human
ccccagugccuuccagcuuaugcauaugugag

SEQ ID NO: 105064 - RNA, 32 nt, Human
ccccagugcgcaggccagagugagugagccca

SEQ ID NO: 105065 - RNA, 32 nt, Human
ccccagugcuccaugccagcacuugaacuguc

SEQ ID NO: 105066 - RNA, 32 nt, Human
ccccagugcugcacucccacccugggcuccac

SEQ ID NO: 105067 - RNA, 32 nt, Human
ccccagugcuggaaggaaggagggccuuucuu

SEQ ID NO: 105068 - RNA, 32 nt, Human
ccccaguggauguccccugacccuccaccgca

SEQ ID NO: 105069 - RNA, 24 nt, Human
ccccaguggaugucuaaaaccaca

SEQ ID NO: 105070 - RNA, 32 nt, Human
ccccaguggcacagagcuaauccugccugggg

SEQ ID NO: 105071 - RNA, 32 nt, Human
ccccaguggcccugggcugggccuggccucua

SEQ ID NO: 105072 - RNA, 32 nt, Human
ccccaguggccuguuugccugccugaggaguu

SEQ ID NO: 105073 - RNA, 32 nt, Human
ccccaguggcugcagguagcuggacuuccugc

SEQ ID NO: 105074 - RNA, 19 nt, Human
ccccaguggcuucaccuca

SEQ ID NO: 105075 - RNA, 32 nt, Human
ccccagugggagaaaguucaaaggugauuaga

SEQ ID NO: 105076 - RNA, 32 nt, Human
ccccagugggagcacggcccagcuggauuuug

SEQ ID NO: 105077 - RNA, 32 nt, Human
ccccagugggcaagaccaaaguguggcgggga

SEQ ID NO: 105078 - RNA, 25 nt, Human
ccccagugguccagacaucugcuga

SEQ ID NO: 105079 - RNA, 32 nt, Human
ccccaguguccuccuccuucuccggccagacc

SEQ ID NO: 105080 - RNA, 32 nt, Human
ccccaguguccugacuucugucugccacauga

SEQ ID NO: 105081 - RNA, 32 nt, Human
ccccaguguccugcccugugcccagccccagc

SEQ ID NO: 105082 - RNA, 32 nt, Human
ccccagugucugguuucauucaucucagacuu

SEQ ID NO: 105083 - RNA, 19 nt, Human
ccccaguguggacuuggga

SEQ ID NO: 105084 - RNA, 32 nt, Human
ccccaguguggauacuaauaaaccucuuggag

SEQ ID NO: 105085 - RNA, 32 nt, Human
ccccaguguucagguguuucacaagaaagucu

SEQ ID NO: 105086 - RNA, 32 nt, Human
ccccaguguuggaggaggggcccagugggagg

SEQ ID NO: 105087 - RNA, 22 nt, Human
ccccaguguuggccccaggacc

SEQ ID NO: 105088 - RNA, 32 nt, Human
ccccaguucaaggaucuucacaccuggauuua

SEQ ID NO: 105089 - RNA, 32 nt, Human
ccccaguuccaucuguaguccuaaccaggagc

SEQ ID NO: 105090 - RNA, 32 nt, Human
ccccaguuccccaacccacucccuuccaacaa

SEQ ID NO: 105091 - RNA, 21 nt, Human
ccccaguucccuccucccucg

SEQ ID NO: 105092 - RNA, 21 nt, Human
ccccaguuccuagcacugccc

SEQ ID NO: 105093 - RNA, 18 nt, Human
ccccaguuccucuucugc

SEQ ID NO: 105094 - RNA, 32 nt, Human
ccccaguucucccccaucucccccucuccauc

SEQ ID NO: 105095 - RNA, 22 nt, Human
ccccaguucucccucccggggc

SEQ ID NO: 105096 - RNA, 32 nt, Human
ccccaguucugaaucaccuaccuucaccaucu

SEQ ID NO: 105097 - RNA, 32 nt, Human
ccccaguucuguccacaccccuucccuuuccu

SEQ ID NO: 105098 - RNA, 21 nt, Human
ccccaguucuucucugcccuc

SEQ ID NO: 105099 - RNA, 32 nt, Human
ccccaguugaaaaucacugugccuuuccagau

SEQ ID NO: 105100 - RNA, 32 nt, Human
ccccaguugcccaccccgccugccccuggaca

SEQ ID NO: 105101 - RNA, 32 nt, Human
ccccaguugucacugcagucugggcaacccca

SEQ ID NO: 105102 - RNA, 32 nt, Human
ccccaguugugugccuugaccucucucgcccc

SEQ ID NO: 105103 - RNA, 23 nt, Human
ccccaguuuaccguuccucccuc

SEQ ID NO: 105104 - RNA, 32 nt, Human
ccccaguuuagcccccugaccugcaggcugug

SEQ ID NO: 105105 - RNA, 32 nt, Human
ccccaguuuccaguuucccuugccagacaagc

SEQ ID NO: 105106 - RNA, 32 nt, Human
ccccaguuucccuccuccuuuucacuugaacu

SEQ ID NO: 105107 - RNA, 32 nt, Human
ccccaguuucugcccuggcagcuccuggccac

SEQ ID NO: 105108 - RNA, 32 nt, Human
ccccauacacagaaguauacgaaagcacacaa

SEQ ID NO: 105109 - RNA, 32 nt, Human
ccccauacccacagcccucuguccucaaauuu

SEQ ID NO: 105110 - RNA, 32 nt, Human
ccccauaccccacacacucaucagccugaagu

SEQ ID NO: 105111 - RNA, 32 nt, Human
ccccauaccccagcgcugaggguggguugggc

SEQ ID NO: 105112 - RNA, 32 nt, Human
ccccauacgcugcccucgcagccuggcggccu

SEQ ID NO: 105113 - RNA, 32 nt, Human
ccccauacuacugaauaaacuaguucugugcg

SEQ ID NO: 105114 - RNA, 19 nt, Human
ccccauacuagaauucaca

SEQ ID NO: 105115 - RNA, 32 nt, Human
ccccauacuagucgccgauauuuggaguucuu

SEQ ID NO: 105116 - RNA, 32 nt, Human
ccccauacuggcuuccaccuccugcggcccag

SEQ ID NO: 105117 - RNA, 23 nt, Human
ccccauagccccucuccaccuca

SEQ ID NO: 105118 - RNA, 23 nt, Human
ccccauagccucuggaacugugc

SEQ ID NO: 105119 - RNA, 32 nt, Human
ccccauaggcuuguuucucuccauugcuauua

SEQ ID NO: 105120 - RNA, 20 nt, Human
ccccauagggugcccagcga

SEQ ID NO: 105121 - RNA, 19 nt, Human
ccccauaugccccaacuca

SEQ ID NO: 105122 - RNA, 32 nt, Human
ccccaucaagcuaccaaugugucucuucacag

SEQ ID NO: 105123 - RNA, 17 nt, Human
ccccaucacauccacuu

SEQ ID NO: 105124 - RNA, 19 nt, Human
ccccaucaccacugccucc

SEQ ID NO: 105125 - RNA, 23 nt, Human
ccccaucacccuccccccaguca

SEQ ID NO: 105126 - RNA, 20 nt, Human
ccccaucacugcccccaccc

SEQ ID NO: 105127 - RNA, 22 nt, Human
ccccaucacugcucguucagcc

SEQ ID NO: 105128 - RNA, 23 nt, Human
ccccaucacuuaguucucaggca

SEQ ID NO: 105129 - RNA, 32 nt, Human
ccccaucagaguccacacaggccaggagugaa

SEQ ID NO: 105130 - RNA, 32 nt, Human
ccccaucagccccuggcagccaucauucuacu

SEQ ID NO: 105131 - RNA, 32 nt, Human
ccccaucagccugugcugcuaggucugggguc

SEQ ID NO: 105132 - RNA, 18 nt, Human
ccccaucaggucagcuca

SEQ ID NO: 105133 - RNA, 22 nt, Human
ccccaucaucacccagcacggg

SEQ ID NO: 105134 - RNA, 32 nt, Human
ccccaucauccaggccacgcaccagaaucuga

SEQ ID NO: 105135 - RNA, 32 nt, Human
ccccaucaucucacuccuuugccugcacugcc

SEQ ID NO: 105136 - RNA, 32 nt, Human
ccccaucaucucuccauuucuaccuccccauc

SEQ ID NO: 105137 - RNA, 32 nt, Human
ccccaucauucuaggaugauacagaaagaaaa

SEQ ID NO: 105138 - RNA, 19 nt, Human
ccccaucauucuccaccca

SEQ ID NO: 105139 - RNA, 32 nt, Human
ccccauccaagaagggcugggaggcgggcagc

SEQ ID NO: 105140 - RNA, 32 nt, Human
ccccaucccagguuguggaggcucgaggaagc

SEQ ID NO: 105141 - RNA, 32 nt, Human
ccccauccccacaguuuggaaguggccuuuuc

SEQ ID NO: 105142 - RNA, 20 nt, Human
ccccauccccacccucccca

SEQ ID NO: 105143 - RNA, 32 nt, Human
ccccauccccuccaccccacaccugaguucuu

SEQ ID NO: 105144 - RNA, 16 nt, Human
ccccauccccuccuca

SEQ ID NO: 105145 - RNA, 32 nt, Human
ccccauccccuccucaaagaaauucacaggca

SEQ ID NO: 105146 - RNA, 32 nt, Human
ccccaucccuaaucucugaucucugagcuggu

SEQ ID NO: 105147 - RNA, 32 nt, Human
ccccaucccugccacacugaugugucauuguc

SEQ ID NO: 105148 - RNA, 32 nt, Human
ccccaucccugccuccugccccugacgcccau

SEQ ID NO: 105149 - RNA, 18 nt, Human
ccccaucccugggucaug

SEQ ID NO: 105150 - RNA, 19 nt, Human
ccccaucccugugcaccug

SEQ ID NO: 105151 - RNA, 32 nt, Human
ccccauccgaaggucaccagcaucaaagacca

SEQ ID NO: 105152 - RNA, 32 nt, Human
ccccauccgcuuccuuugggacugccuuccuc

SEQ ID NO: 105153 - RNA, 32 nt, Human
ccccauccggaccucuugcacugggcugccuu

SEQ ID NO: 105154 - RNA, 32 nt, Human
ccccauccuaacccugguggugcagugagggu

SEQ ID NO: 105155 - RNA, 20 nt, Human
ccccauccuagaaccagaga

SEQ ID NO: 105156 - RNA, 32 nt, Human
ccccauccucaagggagcuggugggaaggagg

SEQ ID NO: 105157 - RNA, 32 nt, Human
ccccauccucaccaugucuucgacucaggaca

SEQ ID NO: 105158 - RNA, 32 nt, Human
ccccauccuccaccccgcccccaaaucgugac

SEQ ID NO: 105159 - RNA, 18 nt, Human
ccccauccucccuccuca

SEQ ID NO: 105160 - RNA, 32 nt, Human
ccccauccucccuguguucccugggccucagc

SEQ ID NO: 105161 - RNA, 32 nt, Human
ccccauccuccugguccuuuccugcuucugac

SEQ ID NO: 105162 - RNA, 19 nt, Human
ccccauccugccucaccca

SEQ ID NO: 105163 - RNA, 22 nt, Human
ccccauccuucacuccuccuca

SEQ ID NO: 105164 - RNA, 32 nt, Human
ccccauccuuucucucgccccuccuacccgca

SEQ ID NO: 105165 - RNA, 32 nt, Human
ccccaucgagaauauggcugccggccucuuug

SEQ ID NO: 105166 - RNA, 22 nt, Human
ccccaucgcccaaguccugccc

SEQ ID NO: 105167 - RNA, 32 nt, Human
ccccaucgccugcuccuaugcccagcccggcc

SEQ ID NO: 105168 - RNA, 32 nt, Human
ccccaucgggccgcugcccccaugcucgcgcu

SEQ ID NO: 105169 - RNA, 22 nt, Human
ccccaucuacggaguccacccc

SEQ ID NO: 105170 - RNA, 32 nt, Human
ccccaucucacaucacccucaggggccucuga

SEQ ID NO: 105171 - RNA, 32 nt, Human
ccccaucucaugggggagagacagccacggag

SEQ ID NO: 105172 - RNA, 32 nt, Human
ccccaucuccaccccaucauguuuacaggguu

SEQ ID NO: 105173 - RNA, 32 nt, Human
ccccaucuccacccucagaagucagccuggca

SEQ ID NO: 105174 - RNA, 32 nt, Human
ccccaucuccacccucuccccuguuccucugu

SEQ ID NO: 105175 - RNA, 32 nt, Human
ccccaucuccaccuccgcaugucauuucugaa

SEQ ID NO: 105176 - RNA, 32 nt, Human
ccccaucuccaucaugaacauggcagccccaa

SEQ ID NO: 105177 - RNA, 32 nt, Human
ccccaucuccauccucagcagaugacacugau

SEQ ID NO: 105178 - RNA, 18 nt, Human
ccccaucuccccgccauc

SEQ ID NO: 105179 - RNA, 32 nt, Human
ccccaucuccccucagcucggcucagcucggu

SEQ ID NO: 105180 - RNA, 32 nt, Human
ccccaucuccucuggugugggaguguggugga

SEQ ID NO: 105181 - RNA, 32 nt, Human
ccccaucuccuggacaccuggccauuguugug

SEQ ID NO: 105182 - RNA, 32 nt, Human
ccccaucucuacuaaaacaaaaauuagccagg

SEQ ID NO: 105183 - RNA, 16 nt, Human
ccccaucucugcugcu

SEQ ID NO: 105184 - RNA, 32 nt, Human
ccccaucugcaaacgcugggccccaugggagc

SEQ ID NO: 105185 - RNA, 32 nt, Human
ccccaucugcacugcugaccauguugaggacc

SEQ ID NO: 105186 - RNA, 32 nt, Human
ccccaucugcccagcacggccugcacugugcc

SEQ ID NO: 105187 - RNA, 32 nt, Human
ccccaucugccgucuugguucaucucaccaca

SEQ ID NO: 105188 - RNA, 32 nt, Human
ccccaucugccuggcguugugcgcagagcugg

SEQ ID NO: 105189 - RNA, 32 nt, Human
ccccaucugcuguggcuuuucaguuaaaauuu

SEQ ID NO: 105190 - RNA, 32 nt, Human
ccccaucuggguucaugaggccaccucuuugc

SEQ ID NO: 105191 - RNA, 19 nt, Human
ccccaucuguccuuccuca

SEQ ID NO: 105192 - RNA, 21 nt, Human
ccccaucugugccugcccuca

SEQ ID NO: 105193 - RNA, 32 nt, Human
ccccaucuguggaauggggucaauaccaccua

SEQ ID NO: 105194 - RNA, 32 nt, Human
ccccaucuuagagugugguguccaaacgugag

SEQ ID NO: 105195 - RNA, 32 nt, Human
ccccaucuucaaggaacucacagucaggaaga

SEQ ID NO: 105196 - RNA, 32 nt, Human
ccccaucuucugacuuuuccucgugugaccca

SEQ ID NO: 105197 - RNA, 32 nt, Human
ccccaucuuguccgucuccacucucaucccag

SEQ ID NO: 105198 - RNA, 18 nt, Human
ccccaucuuguucccuug

SEQ ID NO: 105199 - RNA, 32 nt, Human
ccccaucuuugugguuuuaucuacuuuugguc

SEQ ID NO: 105200 - RNA, 32 nt, Human
ccccaucuuugugugugccauggccuucccca

SEQ ID NO: 105201 - RNA, 22 nt, Human
ccccaucuuuucuuuccacuug

SEQ ID NO: 105202 - RNA, 32 nt, Human
ccccaugaccuuauccuuccucuccuuccuug

SEQ ID NO: 105203 - RNA, 18 nt, Human
ccccaugacuguccccca

SEQ ID NO: 105204 - RNA, 32 nt, Human
ccccaugagacucgauagugguggugaacaga

SEQ ID NO: 105205 - RNA, 32 nt, Human
ccccaugagcagagucuguccucugcucuucu

SEQ ID NO: 105206 - RNA, 32 nt, Human
ccccaugagcggagucuguccucugcucuucu

SEQ ID NO: 105207 - RNA, 29 nt, Human
ccccaugaggcuccuggcuuuccugaguc

SEQ ID NO: 105208 - RNA, 32 nt, Human
ccccaugcaaccacccuaucccugccaaguuu

SEQ ID NO: 105209 - RNA, 32 nt, Human
ccccaugcagagcuggagguuggggugauguc

SEQ ID NO: 105210 - RNA, 20 nt, Human
ccccaugcagcccuggggag

SEQ ID NO: 105211 - RNA, 18 nt, Human
ccccaugcagucaccuca

SEQ ID NO: 105212 - RNA, 32 nt, Human
ccccaugcagucaccucagcucugccugagaa

SEQ ID NO: 105213 - RNA, 32 nt, Human
ccccaugccaaucuccgucagcucuuucugug

SEQ ID NO: 105214 - RNA, 20 nt, Human
ccccaugccaauguccaggu

SEQ ID NO: 105215 - RNA, 32 nt, Human
ccccaugccacguuccacaguugccaccaccu

SEQ ID NO: 105216 - RNA, 21 nt, Human
ccccaugccagagccucuccc

SEQ ID NO: 105217 - RNA, 32 nt, Human
ccccaugcccacagcccuaugccaucaauggg

SEQ ID NO: 105218 - RNA, 32 nt, Human
ccccaugcccaccugccugacccuccacugcc

SEQ ID NO: 105219 - RNA, 32 nt, Human
ccccaugcccagcuaauuuuuguauuuuuagg

SEQ ID NO: 105220 - RNA, 32 nt, Human
ccccaugcccuccccagccucucccagcacaa

SEQ ID NO: 105221 - RNA, 32 nt, Human
ccccaugcccugcacagcccgccugagguuug

SEQ ID NO: 105222 - RNA, 32 nt, Human
ccccaugccuguccagccugggcagccaggcu

SEQ ID NO: 105223 - RNA, 32 nt, Human
ccccaugcggccaagacuuaagauagcagaca

SEQ ID NO: 105224 - RNA, 18 nt, Human
ccccaugcucccuucucu

SEQ ID NO: 105225 - RNA, 31 nt, Human
ccccaugcuccucucccaccuguguccuucu

SEQ ID NO: 105226 - RNA, 32 nt, Human
ccccaugcucggcuuccucacauucaggagcc

SEQ ID NO: 105227 - RNA, 23 nt, Human
ccccaugcucuccucccucagcc

SEQ ID NO: 105228 - RNA, 32 nt, Human
ccccaugcugaaccccuucaucugcagccuga

SEQ ID NO: 105229 - RNA, 32 nt, Human
ccccaugcuguuguccccaugcugccuauuuu

SEQ ID NO: 105230 - RNA, 32 nt, Human
ccccaugcuuugucucccuccugcugcuauug

SEQ ID NO: 105231 - RNA, 32 nt, Human
ccccauggaacagcccugcacgcccaggauga

SEQ ID NO: 105232 - RNA, 29 nt, Human
ccccauggaggaggaggagggggcggugg

SEQ ID NO: 105233 - RNA, 32 nt, Human
ccccauggauccucuggcugggaagccacuga

SEQ ID NO: 105234 - RNA, 32 nt, Human
ccccauggauccuuaaccuggcagcccguuuu

SEQ ID NO: 105235 - RNA, 32 nt, Human
ccccauggcagugcugccucuuguaggugcug

SEQ ID NO: 105236 - RNA, 32 nt, Human
ccccauggcauccacaccaagaggguguugug

SEQ ID NO: 105237 - RNA, 32 nt, Human
ccccauggcucaccaaaaugugcucaauacug

SEQ ID NO: 105238 - RNA, 32 nt, Human
ccccauggcucaccaaaaugugcucaauuuug

SEQ ID NO: 105239 - RNA, 18 nt, Human
ccccauggcugccucuga

SEQ ID NO: 105240 - RNA, 20 nt, Human
ccccauggcugcugugagcc

SEQ ID NO: 105241 - RNA, 32 nt, Human
ccccauggcuggccugggcuucucccuacccu

SEQ ID NO: 105242 - RNA, 18 nt, Human
ccccauggcuggcugcug

SEQ ID NO: 105243 - RNA, 21 nt, Human
ccccauggcuucucccggggc

SEQ ID NO: 105244 - RNA, 32 nt, Human
ccccaugggaggcacauuagcuaguggcaagu

SEQ ID NO: 105245 - RNA, 20 nt, Human
ccccaugggcuccugccccu

SEQ ID NO: 105246 - RNA, 32 nt, Human
ccccaugggcuggguacaggauauccuccuac

SEQ ID NO: 105247 - RNA, 18 nt, Human
ccccaugggcuguguccu

SEQ ID NO: 105248 - RNA, 32 nt, Human
ccccaugggguccuguguagccuuuggccacg

SEQ ID NO: 105249 - RNA, 32 nt, Human
ccccauggucaaggguguccugccugccuggg

SEQ ID NO: 105250 - RNA, 32 nt, Human
ccccauguaaccaccaaccaggucaaaucugg

SEQ ID NO: 105251 - RNA, 32 nt, Human
ccccauguagaaaagggaauguggggagggcg

SEQ ID NO: 105252 - RNA, 32 nt, Human
ccccauguagaaggugcaccuccugggagcag

SEQ ID NO: 105253 - RNA, 17 nt, Human
ccccaugucacccagaa

SEQ ID NO: 105254 - RNA, 32 nt, Human
ccccaugucauccaggcuggucuggaacuccu

SEQ ID NO: 105255 - RNA, 32 nt, Human
ccccaugucaugcccaacagaaaggucaagcu

SEQ ID NO: 105256 - RNA, 32 nt, Human
ccccauguccagcuaauuuuuauauuuucgcu

SEQ ID NO: 105257 - RNA, 32 nt, Human
ccccauguccagcuaauuuuuauauuuuuagu

SEQ ID NO: 105258 - RNA, 32 nt, Human
ccccaugucccgcaccaccauugccgccagca

SEQ ID NO: 105259 - RNA, 32 nt, Human
ccccaugugcaggacuccaagggcuuugcacu

SEQ ID NO: 105260 - RNA, 18 nt, Human
ccccaugugccuaacuca

SEQ ID NO: 105261 - RNA, 32 nt, Human
ccccaugugcugucacugacucuccuugggac

SEQ ID NO: 105262 - RNA, 32 nt, Human
ccccauguggaacccaaggaugcagcugcucu

SEQ ID NO: 105263 - RNA, 32 nt, Human
ccccauguguaaauguguccacacaaccacau

SEQ ID NO: 105264 - RNA, 22 nt, Human
ccccaugugugacccuugucau

SEQ ID NO: 105265 - RNA, 32 nt, Human
ccccaugugugaggaagcaggagucagccacc

SEQ ID NO: 105266 - RNA, 32 nt, Human
ccccauguuacaaaugaagaaacugaggcuca

SEQ ID NO: 105267 - RNA, 32 nt, Human
ccccauguucucucuugcaauggccuguucua

SEQ ID NO: 105268 - RNA, 23 nt, Human
ccccauguugcccuaacucugaa

SEQ ID NO: 105269 - RNA, 32 nt, Human
ccccauguuggccaggcuggucucaaacuccu

SEQ ID NO: 105270 - RNA, 32 nt, Human
ccccauguuggccaggcuggucucaaacucua

SEQ ID NO: 105271 - RNA, 32 nt, Human
ccccauguuggccaggcuggucucgaacuccu

SEQ ID NO: 105272 - RNA, 32 nt, Human
ccccauuaaaaaucaaggaauuaggggucggg

SEQ ID NO: 105273 - RNA, 32 nt, Human
ccccauuacccaaaauacaaaaacagagaacu

SEQ ID NO: 105274 - RNA, 20 nt, Human
ccccauuacuagcgaucugu

SEQ ID NO: 105275 - RNA, 18 nt, Human
ccccauuacugucaccca

SEQ ID NO: 105276 - RNA, 32 nt, Human
ccccauuagacaccugcuccuccaagccuggu

SEQ ID NO: 105277 - RNA, 24 nt, Human
ccccauuaggccaggaucugcuga

SEQ ID NO: 105278 - RNA, 32 nt, Human
ccccauuaggggagacagagagagugaaugga

SEQ ID NO: 105279 - RNA, 32 nt, Human
ccccauuagugcucucucugccuggaucccgg

SEQ ID NO: 105280 - RNA, 32 nt, Human
ccccauuauuuaagcauuugggggucucacuu

SEQ ID NO: 105281 - RNA, 32 nt, Human
ccccauucacacacaccggcacuuucauaccc

SEQ ID NO: 105282 - RNA, 32 nt, Human
ccccauucagucuugggaggugagagagccag

SEQ ID NO: 105283 - RNA, 32 nt, Human
ccccauuccacagccccagccccagccccugg

SEQ ID NO: 105284 - RNA, 32 nt, Human
ccccauuccaccacaucagggucuccacugug

SEQ ID NO: 105285 - RNA, 20 nt, Human
ccccauuccaggggcgccag

SEQ ID NO: 105286 - RNA, 23 nt, Human
ccccauucccaucacccccucca

SEQ ID NO: 105287 - RNA, 22 nt, Human
ccccauuccccaccugguccuc

SEQ ID NO: 105288 - RNA, 23 nt, Human
ccccauucccggccaacucucca

SEQ ID NO: 105289 - RNA, 21 nt, Human
ccccauucccucccucuguca

SEQ ID NO: 105290 - RNA, 32 nt, Human
ccccauuccuccuccucucugagggacuggag

SEQ ID NO: 105291 - RNA, 32 nt, Human
ccccauucuccaucuugggggcucagaucuug

SEQ ID NO: 105292 - RNA, 32 nt, Human
ccccauucuccucuggaaagccuucccgaucc

SEQ ID NO: 105293 - RNA, 32 nt, Human
ccccauucugaccccugacucuuccagccaga

SEQ ID NO: 105294 - RNA, 32 nt, Human
ccccauucugcuggcugagacaggagggguau

SEQ ID NO: 105295 - RNA, 23 nt, Human
ccccauucuggggccuggucccc

SEQ ID NO: 105296 - RNA, 19 nt, Human
ccccauucugucccccuca

SEQ ID NO: 105297 - RNA, 22 nt, Human
ccccauucuuacuuugucccag

SEQ ID NO: 105298 - RNA, 32 nt, Human
ccccauugaaguuugccgguccaaacugucca

SEQ ID NO: 105299 - RNA, 32 nt, Human
ccccauugcccaccuccacuucccauuggcuc

SEQ ID NO: 105300 - RNA, 32 nt, Human
ccccauugcccagcuuuugccugcacucuugc

SEQ ID NO: 105301 - RNA, 32 nt, Human
ccccauugcucuucuggaaggagagcucgcug

SEQ ID NO: 105302 - RNA, 32 nt, Human
ccccauuggccacugguggaggugcacuggaa

SEQ ID NO: 105303 - RNA, 32 nt, Human
ccccauugggagagagcagggcauccuggcau

SEQ ID NO: 105304 - RNA, 32 nt, Human
ccccauuggucaccagagcaacugcaugucuu

SEQ ID NO: 105305 - RNA, 32 nt, Human
ccccauuguacuccagccuggggaacaagaac

SEQ ID NO: 105306 - RNA, 32 nt, Human
ccccauuguccacuuugccucugcugcucugc

SEQ ID NO: 105307 - RNA, 32 nt, Human
ccccauuguccagaugggcacugcuguggagu

SEQ ID NO: 105308 - RNA, 32 nt, Human
ccccauuguccucaccaguacagcauguccug

SEQ ID NO: 105309 - RNA, 18 nt, Human
ccccauuguucugcugcc

SEQ ID NO: 105310 - RNA, 32 nt, Human
ccccauuucacuccagccugggcgacaagagu

SEQ ID NO: 105311 - RNA, 32 nt, Human
ccccauuuccccucaacucuccaggcuucagc

SEQ ID NO: 105312 - RNA, 32 nt, Human
ccccauuuccuagcggcccccaccuccccacu

SEQ ID NO: 105313 - RNA, 23 nt, Human
ccccauuuccuucaguaccaguc

SEQ ID NO: 105314 - RNA, 19 nt, Human
ccccauuucuccuagccug

SEQ ID NO: 105315 - RNA, 19 nt, Human
ccccauuucucuccucaca

SEQ ID NO: 105316 - RNA, 32 nt, Human
ccccauuucuuccccaccaaccccuccaaugc

SEQ ID NO: 105317 - RNA, 32 nt, Human
ccccauuucuuuugugguaucucccccuacca

SEQ ID NO: 105318 - RNA, 32 nt, Human
ccccauuuggacccuucucugcccuuacauuu

SEQ ID NO: 105319 - RNA, 32 nt, Human
ccccauuugguccccuggacugucuuuguuga

SEQ ID NO: 105320 - RNA, 23 nt, Human
ccccauuuguagcauggcaccag

SEQ ID NO: 105321 - RNA, 32 nt, Human
ccccauuuuccuguuucagcauguuauauucu

SEQ ID NO: 105322 - RNA, 32 nt, Human
ccccauuuugaugucccguacccuccaccccc

SEQ ID NO: 105323 - RNA, 22 nt, Human
ccccauuuuucacaugauacca

SEQ ID NO: 105324 - RNA, 32 nt, Human
ccccauuuuucucuuucuuguagaaggagaga

SEQ ID NO: 105325 - RNA, 32 nt, Human
cccccaaaaauacaaaaauuagcugggcgugg

SEQ ID NO: 105326 - RNA, 31 nt, Human
cccccaaaaguguccucuaguccagacuccc

SEQ ID NO: 105327 - RNA, 32 nt, Human
cccccaaacagucaugccaacugugaaggaau

SEQ ID NO: 105328 - RNA, 32 nt, Human
cccccaaacccccauucuguccuaccuuuaau

SEQ ID NO: 105329 - RNA, 22 nt, Human
cccccaaacuggagggggcaug

SEQ ID NO: 105330 - RNA, 32 nt, Human
cccccaaagggugguauuaaaagaggaaaaag

SEQ ID NO: 105331 - RNA, 32 nt, Human
cccccaaagugcugggauuaacgggugugagc

SEQ ID NO: 105332 - RNA, 32 nt, Human
cccccaaagugcugggauuacaggcaugagcc

SEQ ID NO: 105333 - RNA, 32 nt, Human
cccccaaagugcugggauuacaggcgugagcc

SEQ ID NO: 105334 - RNA, 32 nt, Human
cccccaaagugcugggauuacagguugcuaug

SEQ ID NO: 105335 - RNA, 32 nt, Human
cccccaaagugcugggauuccaggugugagcc

SEQ ID NO: 105336 - RNA, 32 nt, Human
cccccaaagugcugggauugugggcaugagcu

SEQ ID NO: 105337 - RNA, 32 nt, Human
cccccaaauagcccuggcccacacagaaaaac

SEQ ID NO: 105338 - RNA, 32 nt, Human
cccccaaaugaggaaauuaguauggaauggag

SEQ ID NO: 105339 - RNA, 32 nt, Human
cccccaaaugccuuaauuuuguggacuguuua

SEQ ID NO: 105340 - RNA, 32 nt, Human
cccccaaauugauguagggagaggagggcuuu

SEQ ID NO: 105341 - RNA, 32 nt, Human
cccccaaauugcugggauuacaggcgugagcc

SEQ ID NO: 105342 - RNA, 32 nt, Human
cccccaaauugcugggauuacaggcgugaguc

SEQ ID NO: 105343 - RNA, 25 nt, Human
cccccaacaacuccaggcccugccc

SEQ ID NO: 105344 - RNA, 23 nt, Human
cccccaacaagaacugcaucugg

SEQ ID NO: 105345 - RNA, 23 nt, Human
cccccaacacaccugccccgccu

SEQ ID NO: 105346 - RNA, 21 nt, Human
cccccaacaccaccaccaccc

SEQ ID NO: 105347 - RNA, 22 nt, Human
cccccaacaccaccccuugccc

SEQ ID NO: 105348 - RNA, 21 nt, Human
cccccaacaccccgccugccu

SEQ ID NO: 105349 - RNA, 21 nt, Human
cccccaacaccuccauugccu

SEQ ID NO: 105350 - RNA, 22 nt, Human
cccccaacacgguguccugcca

SEQ ID NO: 105351 - RNA, 24 nt, Human
cccccaacacuguccacacugccc

SEQ ID NO: 105352 - RNA, 23 nt, Human
cccccaacacuucuccugcccug

SEQ ID NO: 105353 - RNA, 23 nt, Human
cccccaacagcuggacccugacc

SEQ ID NO: 105354 - RNA, 32 nt, Human
cccccaaccacccaccagaggaguucuggucc

SEQ ID NO: 105355 - RNA, 32 nt, Human
cccccaaccagcugcccccagcucucccugcc

SEQ ID NO: 105356 - RNA, 22 nt, Human
cccccaaccagggcacccaccc

SEQ ID NO: 105357 - RNA, 32 nt, Human
cccccaacccagcgucaggcugggacacgcca

SEQ ID NO: 105358 - RNA, 32 nt, Human
cccccaaccccaagccugauccccaccggaga

SEQ ID NO: 105359 - RNA, 32 nt, Human
cccccaaccccagccgcucggaggccccaaag

SEQ ID NO: 105360 - RNA, 22 nt, Human
cccccaaccccauccccaccuc

SEQ ID NO: 105361 - RNA, 32 nt, Human
cccccaacccccagagcuuggagucugggccc

SEQ ID NO: 105362 - RNA, 19 nt, Human
cccccaacccccaucccca

SEQ ID NO: 105363 - RNA, 17 nt, Human
cccccaaccccuccuca

SEQ ID NO: 105364 - RNA, 32 nt, Human
cccccaaccccuggcccugcuuuuccucgugc

SEQ ID NO: 105365 - RNA, 32 nt, Human
cccccaaccccuucacaaaccccaacaccccu

SEQ ID NO: 105366 - RNA, 24 nt, Human
cccccaacccgggaaccccugccc

SEQ ID NO: 105367 - RNA, 32 nt, Human
cccccaacccuccaccagaguagguaggaugu

SEQ ID NO: 105368 - RNA, 21 nt, Human
cccccaaccgagccccgcgcc

SEQ ID NO: 105369 - RNA, 32 nt, Human
cccccaaccuaggaggaggaccagcccgguuc

SEQ ID NO: 105370 - RNA, 32 nt, Human
cccccaaccuccaggagcuaguggaggggugu

SEQ ID NO: 105371 - RNA, 23 nt, Human
cccccaaccucccacuccucccu

SEQ ID NO: 105372 - RNA, 22 nt, Human
cccccaacgccaggcccugccc

SEQ ID NO: 105373 - RNA, 32 nt, Human
cccccaacgugucuaggagagcuuucucccua

SEQ ID NO: 105374 - RNA, 32 nt, Human
cccccaacuagaccucacccuccuggauggac

SEQ ID NO: 105375 - RNA, 32 nt, Human
cccccaacucaggcccucucgcugccccuggc

SEQ ID NO: 105376 - RNA, 20 nt, Human
cccccaacucaggguccucc

SEQ ID NO: 105377 - RNA, 32 nt, Human
cccccaacucccaccccucugccaucacccag

SEQ ID NO: 105378 - RNA, 32 nt, Human
cccccaacucccagcccugccuguggcccguu

SEQ ID NO: 105379 - RNA, 20 nt, Human
cccccaacucugcgccccua

SEQ ID NO: 105380 - RNA, 32 nt, Human
cccccaacuggagugcagacaagagcacugau

SEQ ID NO: 105381 - RNA, 18 nt, Human
cccccaacuuuccucccu

SEQ ID NO: 105382 - RNA, 32 nt, Human
cccccaagaaacuaguaucucuggccuccugg

SEQ ID NO: 105383 - RNA, 32 nt, Human
cccccaagaaugcaggcucugccuggcacgca

SEQ ID NO: 105384 - RNA, 32 nt, Human
cccccaagacaagagacuggaggcagaguuga

SEQ ID NO: 105385 - RNA, 32 nt, Human
cccccaagcccgaggaggacagccuggggaug

SEQ ID NO: 105386 - RNA, 32 nt, Human
cccccaaggaauggguguguuuguagagagaa

SEQ ID NO: 105387 - RNA, 32 nt, Human
cccccaaggcggagcuugcagugagccgagau

SEQ ID NO: 105388 - RNA, 32 nt, Human
cccccaaggggcaggaggaaugcaggagcagg

SEQ ID NO: 105389 - RNA, 32 nt, Human
cccccaaggggcccugcccaccaccaccuucc

SEQ ID NO: 105390 - RNA, 24 nt, Human
cccccaaggucuacucccuccuca

SEQ ID NO: 105391 - RNA, 32 nt, Human
cccccaaguagcugagauuacaggugugugcc

SEQ ID NO: 105392 - RNA, 32 nt, Human
cccccaaguccccguggagguucuguauuuua

SEQ ID NO: 105393 - RNA, 32 nt, Human
cccccaagugccugccccuccccagaguauua

SEQ ID NO: 105394 - RNA, 32 nt, Human
cccccaaguguaacuccagcacugugagguuu

SEQ ID NO: 105395 - RNA, 32 nt, Human
cccccaagugucuccaggaacuggacguuggg

SEQ ID NO: 105396 - RNA, 32 nt, Human
cccccaaguguuuaauaacuggcauuaagcuu

SEQ ID NO: 105397 - RNA, 32 nt, Human
cccccaaguucaagaccaaaucuuccagcugc

SEQ ID NO: 105398 - RNA, 32 nt, Human
cccccaauaagcaugagggcugugcugaagag

SEQ ID NO: 105399 - RNA, 22 nt, Human
cccccaaucccccauagcucug

SEQ ID NO: 105400 - RNA, 32 nt, Human
cccccaaugccugcccaucccaccccagcauc

SEQ ID NO: 105401 - RNA, 22 nt, Human
cccccaauugggagcccugccc

SEQ ID NO: 105402 - RNA, 32 nt, Human
cccccacaaauacacuucuucuuuaggcauug

SEQ ID NO: 105403 - RNA, 24 nt, Human
cccccacaagccugagugcagugg

SEQ ID NO: 105404 - RNA, 32 nt, Human
cccccacaaguauguuuuugugucuuaagaua

SEQ ID NO: 105405 - RNA, 22 nt, Human
cccccacaaucagcucuugugg

SEQ ID NO: 105406 - RNA, 18 nt, Human
cccccacaccccucccca

SEQ ID NO: 105407 - RNA, 32 nt, Human
cccccacagaccugcacauuguugucacccac

SEQ ID NO: 105408 - RNA, 24 nt, Human
cccccacagagcucccaugacaua

SEQ ID NO: 105409 - RNA, 32 nt, Human
cccccacagccagagacauuuccugaagacau

SEQ ID NO: 105410 - RNA, 32 nt, Human
cccccacagccucuuccucccuucccuccccu

SEQ ID NO: 105411 - RNA, 32 nt, Human
cccccacagccugucugugucuguccucugca

SEQ ID NO: 105412 - RNA, 32 nt, Human
cccccacaggaaacuucgcagugugcaccagg

SEQ ID NO: 105413 - RNA, 23 nt, Human
cccccacagggacccccaccccu

SEQ ID NO: 105414 - RNA, 32 nt, Human
cccccacagugcugggauuacaggcgugagcc

SEQ ID NO: 105415 - RNA, 32 nt, Human
cccccacauagcugggacuacaggugcuuaca

SEQ ID NO: 105416 - RNA, 25 nt, Human
cccccacaucgcccccaacuucgga

SEQ ID NO: 105417 - RNA, 22 nt, Human
cccccacaucucuauguacaua

SEQ ID NO: 105418 - RNA, 20 nt, Human
cccccaccaaccaccaccuc

SEQ ID NO: 105419 - RNA, 32 nt, Human
cccccaccaaccagcccccagccacuguugcu

SEQ ID NO: 105420 - RNA, 19 nt, Human
cccccaccaaccccaccuc

SEQ ID NO: 105421 - RNA, 32 nt, Human
cccccaccaacgggugcaucacagccccucac

SEQ ID NO: 105422 - RNA, 28 nt, Human
cccccaccaagugcggacgcaucgagcu

SEQ ID NO: 105423 - RNA, 32 nt, Human
cccccaccaaguuucagggcccuggauuguuc

SEQ ID NO: 105424 - RNA, 32 nt, Human
cccccaccaccaggaccauguagggugcaguc

SEQ ID NO: 105425 - RNA, 32 nt, Human
cccccaccagcaccucagugggggauacugca

SEQ ID NO: 105426 - RNA, 32 nt, Human
cccccaccagccccagcagcugcuuuagaaac

SEQ ID NO: 105427 - RNA, 32 nt, Human
cccccaccagcccucucgcuucuaacacaggg

SEQ ID NO: 105428 - RNA, 32 nt, Human
cccccaccagcuccugugggccugagugcugc

SEQ ID NO: 105429 - RNA, 32 nt, Human
cccccaccagcucuccccacagggccccucag

SEQ ID NO: 105430 - RNA, 32 nt, Human
cccccaccaggggaaggaaggagggcacauua

SEQ ID NO: 105431 - RNA, 22 nt, Human
cccccaccaucuuggggaccua

SEQ ID NO: 105432 - RNA, 32 nt, Human
cccccaccaugccguggccccugcugcugcug

SEQ ID NO: 105433 - RNA, 32 nt, Human
cccccaccauucgauuugaucuaccucuaagc

SEQ ID NO: 105434 - RNA, 21 nt, Human
cccccacccaaaaucuuuccc

SEQ ID NO: 105435 - RNA, 32 nt, Human
cccccacccacuccaccagcacuggcacugag

SEQ ID NO: 105436 - RNA, 32 nt, Human
cccccacccagcugcccucagccuucagccuc

SEQ ID NO: 105437 - RNA, 32 nt, Human
cccccacccaggcugaguaucaucuccugggc

SEQ ID NO: 105438 - RNA, 32 nt, Human
cccccaccccacccucuuugucucagcguguu

SEQ ID NO: 105439 - RNA, 32 nt, Human
cccccaccccacggacguguugcagugauauc

SEQ ID NO: 105440 - RNA, 19 nt, Human
cccccaccccagagccugg

SEQ ID NO: 105441 - RNA, 21 nt, Human
cccccacccccacccaccucu

SEQ ID NO: 105442 - RNA, 32 nt, Human
cccccacccccaccccugcccuccauaggcau

SEQ ID NO: 105443 - RNA, 32 nt, Human
cccccacccccagaugaacccagaggagcuua

SEQ ID NO: 105444 - RNA, 32 nt, Human
cccccacccccagcuacccauaggggcugcag

SEQ ID NO: 105445 - RNA, 21 nt, Human
cccccaccccccgacguccuc

SEQ ID NO: 105446 - RNA, 23 nt, Human
cccccaccccccugcccuccuca

SEQ ID NO: 105447 - RNA, 32 nt, Human
cccccacccccuaacacuaucucuucuauccu

SEQ ID NO: 105448 - RNA, 32 nt, Human
cccccaccccgauuuagaccugugagugcugc

SEQ ID NO: 105449 - RNA, 22 nt, Human
cccccaccccgucuggggccug

SEQ ID NO: 105450 - RNA, 32 nt, Human
cccccaccccuccacuggccagccugggggug

SEQ ID NO: 105451 - RNA, 32 nt, Human
cccccaccccugacagcccccaccccauggcu

SEQ ID NO: 105452 - RNA, 32 nt, Human
cccccaccccuugagcaccauguucccccgcc

SEQ ID NO: 105453 - RNA, 19 nt, Human
cccccaccccuugcucuca

SEQ ID NO: 105454 - RNA, 18 nt, Human
cccccacccggcugccac

SEQ ID NO: 105455 - RNA, 22 nt, Human
cccccacccucaccccaucucu

SEQ ID NO: 105456 - RNA, 20 nt, Human
cccccacccuccagaggggu

SEQ ID NO: 105457 - RNA, 22 nt, Human
cccccacccugagcccgcagug

SEQ ID NO: 105458 - RNA, 32 nt, Human
cccccacccugcacuuuccuccaccucccacc

SEQ ID NO: 105459 - RNA, 32 nt, Human
cccccacccuggggaagcguugacuacugucc

SEQ ID NO: 105460 - RNA, 22 nt, Human
cccccacccuguucucuccuua

SEQ ID NO: 105461 - RNA, 25 nt, Human
cccccacccuucucacacucugccc

SEQ ID NO: 105462 - RNA, 32 nt, Human
cccccacccuuuccccgggccugcugugcugc

SEQ ID NO: 105463 - RNA, 20 nt, Human
cccccacccuuuuuuccuua

SEQ ID NO: 105464 - RNA, 32 nt, Human
cccccaccgcaaccuccaucucccggguucaa

SEQ ID NO: 105465 - RNA, 32 nt, Human
cccccaccgggccggcccugcccgccgccgga

SEQ ID NO: 105466 - RNA, 21 nt, Human
cccccaccguggugccccuca

SEQ ID NO: 105467 - RNA, 32 nt, Human
cccccaccucagcugggaccccaaaccuccuc

SEQ ID NO: 105468 - RNA, 32 nt, Human
cccccaccuccacccucaacccaucuuccuag

SEQ ID NO: 105469 - RNA, 21 nt, Human
cccccaccuccugcaauuaaa

SEQ ID NO: 105470 - RNA, 32 nt, Human
cccccaccucuccuggaccuagcaggcccuca

SEQ ID NO: 105471 - RNA, 32 nt, Human
cccccaccucuccugugguacuggggucccua

SEQ ID NO: 105472 - RNA, 24 nt, Human
cccccaccugaagucacugucucc

SEQ ID NO: 105473 - RNA, 32 nt, Human
cccccaccugaagucacugucuccccagcagu

SEQ ID NO: 105474 - RNA, 32 nt, Human
cccccaccugaccaaaugcuccuaaagccuuu

SEQ ID NO: 105475 - RNA, 32 nt, Human
cccccaccugccccaaccuccaccccucucug

SEQ ID NO: 105476 - RNA, 23 nt, Human
cccccaccuggaagugcaaggug

SEQ ID NO: 105477 - RNA, 20 nt, Human
cccccaccuggugguccuua

SEQ ID NO: 105478 - RNA, 18 nt, Human
cccccaccuguguuccuc

SEQ ID NO: 105479 - RNA, 23 nt, Human
cccccaccuuacccuuauuccuc

SEQ ID NO: 105480 - RNA, 22 nt, Human
cccccaccuucaccccuccccg

SEQ ID NO: 105481 - RNA, 19 nt, Human
cccccaccuucccugccca

SEQ ID NO: 105482 - RNA, 21 nt, Human
cccccaccuuggucccucuca

SEQ ID NO: 105483 - RNA, 20 nt, Human
cccccaccuugucacccuca

SEQ ID NO: 105484 - RNA, 32 nt, Human
cccccaccuuucaccagagaagaggacguugu

SEQ ID NO: 105485 - RNA, 23 nt, Human
cccccaccuuucgccccugccca

SEQ ID NO: 105486 - RNA, 32 nt, Human
cccccaccuuuuccuuuuccucuuagacuucu

SEQ ID NO: 105487 - RNA, 22 nt, Human
cccccaccuuuuggccucuuca

SEQ ID NO: 105488 - RNA, 24 nt, Human
cccccacgacuuccggccccgccc

SEQ ID NO: 105489 - RNA, 24 nt, Human
cccccacgcaggaccaacuaccuc

SEQ ID NO: 105490 - RNA, 32 nt, Human
cccccacgcucagcuaacguugcccucgcuca

SEQ ID NO: 105491 - RNA, 32 nt, Human
cccccacgcuucuggagguggggagggccucu

SEQ ID NO: 105492 - RNA, 32 nt, Human
cccccacggagcuuugugugagggaucucauc

SEQ ID NO: 105493 - RNA, 32 nt, Human
cccccacgggccugagccugagagcucagagg

SEQ ID NO: 105494 - RNA, 32 nt, Human
cccccacuaaacugagcugugaaauagaucau

SEQ ID NO: 105495 - RNA, 32 nt, Human
cccccacucacccucaccuucucccccgacag

SEQ ID NO: 105496 - RNA, 32 nt, Human
cccccacuccaguccacuccugaccccucucc

SEQ ID NO: 105497 - RNA, 32 nt, Human
cccccacuccagugguggaggugcagucgcug

SEQ ID NO: 105498 - RNA, 19 nt, Human
cccccacuccucugcugcu

SEQ ID NO: 105499 - RNA, 28 nt, Human
cccccacucgaugcugccucaucuuccu

SEQ ID NO: 105500 - RNA, 32 nt, Human
cccccacucucaccccaaacagcccauucuuc

SEQ ID NO: 105501 - RNA, 20 nt, Human
cccccacucuccuuuaggga

SEQ ID NO: 105502 - RNA, 32 nt, Human
cccccacugagaacuaugcaauggaguuucau

SEQ ID NO: 105503 - RNA, 32 nt, Human
cccccacugagacagccugagauauggccuca

SEQ ID NO: 105504 - RNA, 22 nt, Human
cccccacugcacccccucccca

SEQ ID NO: 105505 - RNA, 32 nt, Human
cccccacugcagcccccaccuuuguguccuag

SEQ ID NO: 105506 - RNA, 32 nt, Human
cccccacugcaggcuguggcuccaggggcccg

SEQ ID NO: 105507 - RNA, 19 nt, Human
cccccacugccacucagaa

SEQ ID NO: 105508 - RNA, 32 nt, Human
cccccacugccacuucucugauguguuccuca

SEQ ID NO: 105509 - RNA, 32 nt, Human
cccccacugcucaauggacacccccagcccag

SEQ ID NO: 105510 - RNA, 32 nt, Human
cccccacugcuuuuuauuuguacagcaucauu

SEQ ID NO: 105511 - RNA, 32 nt, Human
cccccacuggacugaccugguccacagggcac

SEQ ID NO: 105512 - RNA, 32 nt, Human
cccccacuggacugcuuccuccuuagccccac

SEQ ID NO: 105513 - RNA, 32 nt, Human
cccccacuggcugugggcucccuuccucccaa

SEQ ID NO: 105514 - RNA, 26 nt, Human
cccccacugggccugcuggccucccu

SEQ ID NO: 105515 - RNA, 32 nt, Human
cccccacugguucauuuaacccucugucucgg

SEQ ID NO: 105516 - RNA, 32 nt, Human
cccccacuguaaccugaccugaccuguggcgg

SEQ ID NO: 105517 - RNA, 19 nt, Human
cccccacugugccccuccu

SEQ ID NO: 105518 - RNA, 32 nt, Human
cccccacuuagcccuucucuccuugcagccua

SEQ ID NO: 105519 - RNA, 32 nt, Human
cccccacuucacccaccuuccccaccaucugu

SEQ ID NO: 105520 - RNA, 32 nt, Human
cccccacuuccaggcacucucagucucuuuca

SEQ ID NO: 105521 - RNA, 32 nt, Human
cccccacuuccccacaggugaaaguuuuucug

SEQ ID NO: 105522 - RNA, 32 nt, Human
cccccacuuuccccaucucaucacagauccag

SEQ ID NO: 105523 - RNA, 32 nt, Human
cccccacuuugccucaggcauuuucuacucag

SEQ ID NO: 105524 - RNA, 32 nt, Human
cccccagaaaggagagugaaacucuuauuugc

SEQ ID NO: 105525 - RNA, 32 nt, Human
cccccagaaaugucccuccucagaaacaggcu

SEQ ID NO: 105526 - RNA, 32 nt, Human
cccccagaaccagcucaccuggccagaguggg

SEQ ID NO: 105527 - RNA, 32 nt, Human
cccccagacaagagacagggagacuggagccc

SEQ ID NO: 105528 - RNA, 32 nt, Human
cccccagacagcccuaccugugccagagagcu

SEQ ID NO: 105529 - RNA, 32 nt, Human
cccccagacucggccuccucuccugggacucg

SEQ ID NO: 105530 - RNA, 32 nt, Human
cccccagacuggagggagaaagcccuacaaag

SEQ ID NO: 105531 - RNA, 32 nt, Human
cccccagacuuuacaugacacagcuuuaucac

SEQ ID NO: 105532 - RNA, 32 nt, Human
cccccagagcaacguggacuuugaccugaugc

SEQ ID NO: 105533 - RNA, 32 nt, Human
cccccagagcaucugccccagguacaccuccc

SEQ ID NO: 105534 - RNA, 32 nt, Human
cccccagaggccaggagcucugcccuugaccu

SEQ ID NO: 105535 - RNA, 32 nt, Human
cccccagaguagcugggauuacaggcauguac

SEQ ID NO: 105536 - RNA, 32 nt, Human
cccccagauguucuucccuggguguugauggc

SEQ ID NO: 105537 - RNA, 18 nt, Human
cccccagauugcccccuc

SEQ ID NO: 105538 - RNA, 32 nt, Human
cccccagcaaaagaucuacauucuugcucaaa

SEQ ID NO: 105539 - RNA, 32 nt, Human
cccccagcaacgccccuccaaaccuccagccu

SEQ ID NO: 105540 - RNA, 32 nt, Human
cccccagcaaggugccuggggagacuugagca

SEQ ID NO: 105541 - RNA, 32 nt, Human
cccccagcacacacacauacaacacagaucau

SEQ ID NO: 105542 - RNA, 32 nt, Human
cccccagcacacacagguuggaaaagaguuua

SEQ ID NO: 105543 - RNA, 32 nt, Human
cccccagcacauccaggaguaaggauuccgac

SEQ ID NO: 105544 - RNA, 19 nt, Human
cccccagcaccguguggca

SEQ ID NO: 105545 - RNA, 32 nt, Human
cccccagcacuguccccaccuugcuagggccc

SEQ ID NO: 105546 - RNA, 32 nt, Human
cccccagcacuucagaggcaggagccuuuggg

SEQ ID NO: 105547 - RNA, 32 nt, Human
cccccagcacuucuugaugacugugugcccca

SEQ ID NO: 105548 - RNA, 23 nt, Human
cccccagcagcgagaacauccca

SEQ ID NO: 105549 - RNA, 32 nt, Human
cccccagccagcgcuccagccaaagcggcggc

SEQ ID NO: 105550 - RNA, 32 nt, Human
cccccagccagguccccaccaggccugucucc

SEQ ID NO: 105551 - RNA, 32 nt, Human
cccccagccauuccuucuuuccuuccugccuu

SEQ ID NO: 105552 - RNA, 21 nt, Human
cccccagccauugcccucccu

SEQ ID NO: 105553 - RNA, 32 nt, Human
cccccagcccaggagcucgugccuuacaugcu

SEQ ID NO: 105554 - RNA, 32 nt, Human
cccccagcccccaccucugccuccaggucuca

SEQ ID NO: 105555 - RNA, 18 nt, Human
cccccagccccccuuccc

SEQ ID NO: 105556 - RNA, 22 nt, Human
cccccagcccgucacccggggc

SEQ ID NO: 105557 - RNA, 18 nt, Human
cccccagcccugcacccu

SEQ ID NO: 105558 - RNA, 18 nt, Human
cccccagcccugccccuu

SEQ ID NO: 105559 - RNA, 20 nt, Human
cccccagcccugucccugcc

SEQ ID NO: 105560 - RNA, 25 nt, Human
cccccagccgcccccaacccugccc

SEQ ID NO: 105561 - RNA, 32 nt, Human
cccccagccguccagaguaccaugaagaauua

SEQ ID NO: 105562 - RNA, 21 nt, Human
cccccagccucaccucugccc

SEQ ID NO: 105563 - RNA, 32 nt, Human
cccccagccuccagacccucuaaugcccucag

SEQ ID NO: 105564 - RNA, 22 nt, Human
cccccagccugcaagagaggca

SEQ ID NO: 105565 - RNA, 18 nt, Human
cccccagccugcagcccu

SEQ ID NO: 105566 - RNA, 32 nt, Human
cccccagccugcugcccccagcuuucuacaga

SEQ ID NO: 105567 - RNA, 32 nt, Human
cccccagccuggccagugcucuucccacccug

SEQ ID NO: 105568 - RNA, 19 nt, Human
cccccagccuggguccccu

SEQ ID NO: 105569 - RNA, 32 nt, Human
cccccagccuuagugggcucagcagggcccac

SEQ ID NO: 105570 - RNA, 32 nt, Human
cccccagccuugcccagcuuucaaaggacaaa

SEQ ID NO: 105571 - RNA, 31 nt, Human
cccccagcgacguucucagccagcgcucgca

SEQ ID NO: 105572 - RNA, 32 nt, Human
cccccagcgcuuguccugcuucacccuacccc

SEQ ID NO: 105573 - RNA, 20 nt, Human
cccccagcggcucccucccu

SEQ ID NO: 105574 - RNA, 19 nt, Human
cccccagcuaccagcuaag

SEQ ID NO: 105575 - RNA, 32 nt, Human
cccccagcuagaccucacccucuuggguagau

SEQ ID NO: 105576 - RNA, 21 nt, Human
cccccagcucaagcccugccc

SEQ ID NO: 105577 - RNA, 32 nt, Human
cccccagcucagggugaugccugcugccuuug

SEQ ID NO: 105578 - RNA, 18 nt, Human
cccccagcucgggaccug

SEQ ID NO: 105579 - RNA, 28 nt, Human
cccccagcucugacuccaggcccugucc

SEQ ID NO: 105580 - RNA, 25 nt, Human
cccccagcucugccgacacuugacc

SEQ ID NO: 105581 - RNA, 24 nt, Human
cccccagcuguggguacagagagg

SEQ ID NO: 105582 - RNA, 32 nt, Human
cccccagcugugguggacacagcugugcuucc

SEQ ID NO: 105583 - RNA, 32 nt, Human
cccccaggaagggggaaauggggcauuugggg

SEQ ID NO: 105584 - RNA, 32 nt, Human
cccccaggacaccaccucccacccacagaccu

SEQ ID NO: 105585 - RNA, 24 nt, Human
cccccaggacugagcccuagaggc

SEQ ID NO: 105586 - RNA, 32 nt, Human
cccccaggagacauaccaggaggccgaguggc

SEQ ID NO: 105587 - RNA, 32 nt, Human
cccccaggagagagcuacugacuuguuaucau

SEQ ID NO: 105588 - RNA, 32 nt, Human
cccccaggaggagaugaccagugccuuggcca

SEQ ID NO: 105589 - RNA, 32 nt, Human
cccccaggaggaggaggaggacgagggccuag

SEQ ID NO: 105590 - RNA, 32 nt, Human
cccccaggaggggcucgacccacccacccucc

SEQ ID NO: 105591 - RNA, 32 nt, Human
cccccaggaugucggaggagaucaucacgccg

SEQ ID NO: 105592 - RNA, 32 nt, Human
cccccaggcagccccuccacacccaccgagca

SEQ ID NO: 105593 - RNA, 18 nt, Human
cccccaggccaccugcuc

SEQ ID NO: 105594 - RNA, 32 nt, Human
cccccaggcuaggagaggaaccccucccagca

SEQ ID NO: 105595 - RNA, 22 nt, Human
cccccaggcugaagugcagcgg

SEQ ID NO: 105596 - RNA, 22 nt, Human
cccccaggcugaagugcagugg

SEQ ID NO: 105597 - RNA, 32 nt, Human
cccccaggcugcaguauuuugggcaggcgcug

SEQ ID NO: 105598 - RNA, 22 nt, Human
cccccaggcuggaguacagugg

SEQ ID NO: 105599 - RNA, 22 nt, Human
cccccaggcuggagugcagugg

SEQ ID NO: 105600 - RNA, 32 nt, Human
cccccaggcugggccugucacuggcauaggaa

SEQ ID NO: 105601 - RNA, 32 nt, Human
cccccaggcuucagcccugggcucugagggga

SEQ ID NO: 105602 - RNA, 21 nt, Human
cccccaggcuugagugcaaug

SEQ ID NO: 105603 - RNA, 32 nt, Human
cccccagggaacacugggcgaugccuggggac

SEQ ID NO: 105604 - RNA, 22 nt, Human
cccccagggaaggcucuggugg

SEQ ID NO: 105605 - RNA, 30 nt, Human
cccccagggagccacagacagguauagccc

SEQ ID NO: 105606 - RNA, 32 nt, Human
cccccagggagccacagacagguauagcccua

SEQ ID NO: 105607 - RNA, 32 nt, Human
cccccagggauugcgugaaagaaacaauuguu

SEQ ID NO: 105608 - RNA, 32 nt, Human
cccccagggcccuggccauccugugggcucug

SEQ ID NO: 105609 - RNA, 32 nt, Human
cccccagggcugggcacuccuccccuccccuc

SEQ ID NO: 105610 - RNA, 32 nt, Human
cccccagggcugggugcccaccaugccccuuc

SEQ ID NO: 105611 - RNA, 32 nt, Human
cccccagggcuucugcaggcuucagccaucca

SEQ ID NO: 105612 - RNA, 32 nt, Human
cccccaggggaacaccccugcccagcuacuuu

SEQ ID NO: 105613 - RNA, 23 nt, Human
cccccagguagcaggacacucca

SEQ ID NO: 105614 - RNA, 32 nt, Human
cccccagguccccucuugcuguuggcugcaca

SEQ ID NO: 105615 - RNA, 32 nt, Human
cccccaggugcugggggcacagccccucccca

SEQ ID NO: 105616 - RNA, 32 nt, Human
cccccaguaccucccuccccuccccuccagca

SEQ ID NO: 105617 - RNA, 25 nt, Human
cccccaguaucgaaucuaucagcuu

SEQ ID NO: 105618 - RNA, 32 nt, Human
cccccaguaugagcacagugccuggaccugaa

SEQ ID NO: 105619 - RNA, 32 nt, Human
cccccagucaggaggccccacaggaggggcac

SEQ ID NO: 105620 - RNA, 32 nt, Human
cccccaguccagaggcugggcccaggugggug

SEQ ID NO: 105621 - RNA, 32 nt, Human
cccccagucccucccucuucaccuugcuccgu

SEQ ID NO: 105622 - RNA, 32 nt, Human
cccccaguccgugucuccccuaccucccucag

SEQ ID NO: 105623 - RNA, 32 nt, Human
cccccaguccuccuccacuacaaccuccauga

SEQ ID NO: 105624 - RNA, 32 nt, Human
cccccaguccuuggcccugcuucccugugucu

SEQ ID NO: 105625 - RNA, 32 nt, Human
cccccagucgucagcuccuucccucauuuauu

SEQ ID NO: 105626 - RNA, 21 nt, Human
cccccagucuccagggacccu

SEQ ID NO: 105627 - RNA, 32 nt, Human
cccccagugcagacuucggggucuccacccca

SEQ ID NO: 105628 - RNA, 32 nt, Human
cccccagugcccuuccccuugggcuguguugg

SEQ ID NO: 105629 - RNA, 32 nt, Human
cccccagugcugcugcuaaccccacaccaccc

SEQ ID NO: 105630 - RNA, 32 nt, Human
cccccaguggaugucuaaaaccacagauaaua

SEQ ID NO: 105631 - RNA, 32 nt, Human
cccccaguggcauguccuccgaguggcagcgg

SEQ ID NO: 105632 - RNA, 32 nt, Human
cccccagugggagaggggguuggguuuucaau

SEQ ID NO: 105633 - RNA, 32 nt, Human
cccccagugggaugggacagggaggccacacg

SEQ ID NO: 105634 - RNA, 32 nt, Human
cccccagugggcagggcaggagguggcagcgg

SEQ ID NO: 105635 - RNA, 19 nt, Human
cccccaguucuccuccuca

SEQ ID NO: 105636 - RNA, 32 nt, Human
cccccaguugaggaguugagagagugcaggcu

SEQ ID NO: 105637 - RNA, 32 nt, Human
cccccauaaaacuguaagacaagccuccugua

SEQ ID NO: 105638 - RNA, 32 nt, Human
cccccauaaacccaaccuaagccuauggaauc

SEQ ID NO: 105639 - RNA, 32 nt, Human
cccccauacaaguauccagucauuguaacacu

SEQ ID NO: 105640 - RNA, 20 nt, Human
cccccauacagccugucucc

SEQ ID NO: 105641 - RNA, 32 nt, Human
cccccauacgcugcccucgcagccuggcggcc

SEQ ID NO: 105642 - RNA, 32 nt, Human
cccccauacuggcuuccaccuccugcggccca

SEQ ID NO: 105643 - RNA, 32 nt, Human
cccccauaguaaggggaggaaagggaagcacc

SEQ ID NO: 105644 - RNA, 32 nt, Human
cccccauaucugcgugcacuucccagagcauc

SEQ ID NO: 105645 - RNA, 19 nt, Human
cccccaucaaacauguugg

SEQ ID NO: 105646 - RNA, 32 nt, Human
cccccaucacacucggccacuagugggguccu

SEQ ID NO: 105647 - RNA, 19 nt, Human
cccccaucaccagcucucc

SEQ ID NO: 105648 - RNA, 32 nt, Human
cccccaucaccccagacccaugcaggaagagc

SEQ ID NO: 105649 - RNA, 22 nt, Human
cccgcagccgcuggacgcggga

SEQ ID NO: 105650 - RNA, 20 nt, Human
cccgcagccucgccccaucc

SEQ ID NO: 105651 - RNA, 32 nt, Human
cccgcagccugaagaagcugauagcggacccc

SEQ ID NO: 105652 - RNA, 32 nt, Human
cccgcagccugggccugugcucggcgccauga

SEQ ID NO: 105653 - RNA, 24 nt, Human
cccgcagcgccgccuccccgcccg

SEQ ID NO: 105654 - RNA, 17 nt, Human
cccgcagcuccggcgcc

SEQ ID NO: 105655 - RNA, 24 nt, Human
cccgcagcuccggcgccgcggcga

SEQ ID NO: 105656 - RNA, 20 nt, Human
cccgcagcucucccgcggcg

SEQ ID NO: 105657 - RNA, 22 nt, Human
cccgcagcugcugugcugcucu

SEQ ID NO: 105658 - RNA, 22 nt, Human
cccgcagcuuccucccccgacc

SEQ ID NO: 105659 - RNA, 32 nt, Human
cccgcaggaacugggcugggccucgugcgccc

SEQ ID NO: 105660 - RNA, 32 nt, Human
cccgcaggagagagucuuaccuccccuggccc

SEQ ID NO: 105661 - RNA, 32 nt, Human
cccgcaggaggaggaggaucggcggacugugg

SEQ ID NO: 105662 - RNA, 32 nt, Human
cccgcaggagggggccacaccacccacccagg

SEQ ID NO: 105663 - RNA, 24 nt, Human
cccgcaggccagcccuccaaccuc

SEQ ID NO: 105664 - RNA, 18 nt, Human
cccgcaggccgcccgccg

SEQ ID NO: 105665 - RNA, 32 nt, Human
cccgcagggaaccuggcucggggagggccucc

SEQ ID NO: 105666 - RNA, 32 nt, Human
cccgcagggagcaaggaugacagugcugcagc

SEQ ID NO: 105667 - RNA, 23 nt, Human
cccgcaggggcaucgccugccca

SEQ ID NO: 105668 - RNA, 32 nt, Human
cccgcagggggagggggagagggggaagccga

SEQ ID NO: 105669 - RNA, 24 nt, Human
cccgcagggguggagccugagcga

SEQ ID NO: 105670 - RNA, 32 nt, Human
cccgcagguaugaccuggccuccucgccucgg

SEQ ID NO: 105671 - RNA, 32 nt, Human
cccgcagguggaagcgcacccgggaggcgggc

SEQ ID NO: 105672 - RNA, 32 nt, Human
cccgcaggugggaggugugguugcaggugcgg

SEQ ID NO: 105673 - RNA, 32 nt, Human
cccgcagucagaaaggagacucugccucccuc

SEQ ID NO: 105674 - RNA, 24 nt, Human
cccgcagucgcccgcaaccggggc

SEQ ID NO: 105675 - RNA, 32 nt, Human
cccgcagucugauccccugugaagagccggac

SEQ ID NO: 105676 - RNA, 32 nt, Human
cccgcagugcccugccccagucagccuggcug

SEQ ID NO: 105677 - RNA, 24 nt, Human
cccgcagugcugggauuacaggca

SEQ ID NO: 105678 - RNA, 32 nt, Human
cccgcaguggaugcagcucacaugcugaggaa

SEQ ID NO: 105679 - RNA, 32 nt, Human
cccgcaguggcuuuugccccagaaaggggaaa

SEQ ID NO: 105680 - RNA, 18 nt, Human
cccgcaguggggaugcag

SEQ ID NO: 105681 - RNA, 32 nt, Human
cccgcaguuagaauuuuguuuggagcccucuu

SEQ ID NO: 105682 - RNA, 23 nt, Human
cccgcauacacacggccaugcac

SEQ ID NO: 105683 - RNA, 24 nt, Human
cccgcauauccagcuccucacuca

SEQ ID NO: 105684 - RNA, 32 nt, Human
cccgcaucaagcucugcccuuguuauccugcc

SEQ ID NO: 105685 - RNA, 22 nt, Human
cccgcauccggcaucccagcgg

SEQ ID NO: 105686 - RNA, 26 nt, Human
cccgcauggaccugagggugcaccga

SEQ ID NO: 105687 - RNA, 32 nt, Human
cccgcauggcuuucccaggccuggugauucug

SEQ ID NO: 105688 - RNA, 30 nt, Human
cccgcauguggcugccacgguucuccagca

SEQ ID NO: 105689 - RNA, 32 nt, Human
cccgcauguucccagcaggcaugcucuggaga

SEQ ID NO: 105690 - RNA, 32 nt, Human
cccgcauucuuccuccuucuucuggugcuaca

SEQ ID NO: 105691 - RNA, 32 nt, Human
cccgcauugguaacuccagucugacuguggga

SEQ ID NO: 105692 - RNA, 32 nt, Human
cccgcauugugaacaucucgucgccugugacg

SEQ ID NO: 105693 - RNA, 32 nt, Human
cccgccaaaacccacaucccagccucuggauc

SEQ ID NO: 105694 - RNA, 22 nt, Human
cccgccaaaccccaccccagcc

SEQ ID NO: 105695 - RNA, 22 nt, Human
cccgccaacccgcccacgagcc

SEQ ID NO: 105696 - RNA, 20 nt, Human
cccgccaaccgcccccgggc

SEQ ID NO: 105697 - RNA, 21 nt, Human
cccgccaagugcgcucaugcc

SEQ ID NO: 105698 - RNA, 32 nt, Human
cccgccacacuggcuuuaggaccuguugacac

SEQ ID NO: 105699 - RNA, 18 nt, Human
cccgccacagacacggag

SEQ ID NO: 105700 - RNA, 32 nt, Human
cccgccacagcaggcugggaucauagguguga

SEQ ID NO: 105701 - RNA, 32 nt, Human
cccgccacagcccuguccccuagggagaggcc

SEQ ID NO: 105702 - RNA, 32 nt, Human
cccgccacagccgcgccaugaccacccagcag

SEQ ID NO: 105703 - RNA, 32 nt, Human
cccgccacaucgcggcccuccagccuggccua

SEQ ID NO: 105704 - RNA, 32 nt, Human
cccgccaccacugcugggcugcgagcugggcc

SEQ ID NO: 105705 - RNA, 21 nt, Human
cccgccaccagcagucagcag

SEQ ID NO: 105706 - RNA, 32 nt, Human
cccgccaccaugugaauucaucagcucugcag

SEQ ID NO: 105707 - RNA, 19 nt, Human
cccgccaccgccgccgccg

SEQ ID NO: 105708 - RNA, 32 nt, Human
cccgccaccucaccgccuucggcgccagccuc

SEQ ID NO: 105709 - RNA, 32 nt, Human
cccgccaccuccccucuccucuucuccccuca

SEQ ID NO: 105710 - RNA, 32 nt, Human
cccgccaccugugccagcagcugaugccuccu

SEQ ID NO: 105711 - RNA, 32 nt, Human
cccgccacucacuccagccuggauaaaagagc

SEQ ID NO: 105712 - RNA, 32 nt, Human
cccgccacugcacgccagccugggcgacagag

SEQ ID NO: 105713 - RNA, 32 nt, Human
cccgccacugcacuccagacugggcgacagag

SEQ ID NO: 105714 - RNA, 30 nt, Human
cccgccacugcacuccagcacuccgcucuc

SEQ ID NO: 105715 - RNA, 32 nt, Human
cccgccacugcacuccagcccaggugacagag

SEQ ID NO: 105716 - RNA, 32 nt, Human
cccgccacugcacuccagccugggcaacagag

SEQ ID NO: 105717 - RNA, 32 nt, Human
cccgccacugcacuccagccugggcgacagag

SEQ ID NO: 105718 - RNA, 32 nt, Human
cccgccacugcacuccagccugggugacagag

SEQ ID NO: 105719 - RNA, 32 nt, Human
cccgccacugcacucuagccugggugacagau

SEQ ID NO: 105720 - RNA, 32 nt, Human
cccgccacuuuacuuucuccagcccugauacc

SEQ ID NO: 105721 - RNA, 32 nt, Human
cccgccagagugagguugggaagcagaguuaa

SEQ ID NO: 105722 - RNA, 32 nt, Human
cccgccagcccacgugccccagaagggccggc

SEQ ID NO: 105723 - RNA, 17 nt, Human
cccgccagccccucaca

SEQ ID NO: 105724 - RNA, 32 nt, Human
cccgccagccgaggcagcucgagcccaguccg

SEQ ID NO: 105725 - RNA, 32 nt, Human
cccgccagccugagcaugagaggaagagguca

SEQ ID NO: 105726 - RNA, 17 nt, Human
cccgccagccugccggg

SEQ ID NO: 105727 - RNA, 32 nt, Human
cccgccagcgcgccaccaugggcagucccggu

SEQ ID NO: 105728 - RNA, 32 nt, Human
cccgccagcuacucuggggguggcguggcaua

SEQ ID NO: 105729 - RNA, 32 nt, Human
cccgccagcugcucgcuuccucccgggcucac

SEQ ID NO: 105730 - RNA, 32 nt, Human
cccgccagcuucgcauccaucucccccacccc

SEQ ID NO: 105731 - RNA, 32 nt, Human
cccgccaggacucugcaggucacugcuagcuc

SEQ ID NO: 105732 - RNA, 32 nt, Human
cccgccaggccacgccccagccacuuugcucc

SEQ ID NO: 105733 - RNA, 32 nt, Human
cccgccaggccgcggcccaguggcgccggcgc

SEQ ID NO: 105734 - RNA, 32 nt, Human
cccgccaggccugcucaaugcauuggguuugg

SEQ ID NO: 105735 - RNA, 32 nt, Human
cccgccagggagguuucaugagcucaugucua

SEQ ID NO: 105736 - RNA, 32 nt, Human
cccgccagguucugcguuagaccugcaucuua

SEQ ID NO: 105737 - RNA, 32 nt, Human
cccgccauaugcugccugccucggcuuugagu

SEQ ID NO: 105738 - RNA, 32 nt, Human
cccgccaucacugcuggacaggagccaccccc

SEQ ID NO: 105739 - RNA, 32 nt, Human
cccgccaucaugucgcccaagcucuuccaccu

SEQ ID NO: 105740 - RNA, 32 nt, Human
cccgccauccucgcagagugggagaggcugca

SEQ ID NO: 105741 - RNA, 32 nt, Human
cccgccaugaggaugaaggccacaugggguau

SEQ ID NO: 105742 - RNA, 32 nt, Human
cccgccaugauacugucacagugccuagaaug

SEQ ID NO: 105743 - RNA, 31 nt, Human
cccgccaugggcgccccugccugcgcccucg

SEQ ID NO: 105744 - RNA, 32 nt, Human
cccgccauggucacccucaggaacccacccuc

SEQ ID NO: 105745 - RNA, 32 nt, Human
cccgccauucuguuuuuauaaguggcuacacu

SEQ ID NO: 105746 - RNA, 32 nt, Human
cccgccauugagaauaagguuccauugcguag

SEQ ID NO: 105747 - RNA, 19 nt, Human
cccgcccagaccccugggc

SEQ ID NO: 105748 - RNA, 22 nt, Human
cccgcccagacccgggcuccug

SEQ ID NO: 105749 - RNA, 32 nt, Human
cccgcccagagucauggcggcagcagccgcuc

SEQ ID NO: 105750 - RNA, 21 nt, Human
cccgcccagccacccacgcgg

SEQ ID NO: 105751 - RNA, 32 nt, Human
cccgcccagcucuccugccacuggccuuucag

SEQ ID NO: 105752 - RNA, 32 nt, Human
cccgcccagcugcaccugccagccuggcuucu

SEQ ID NO: 105753 - RNA, 32 nt, Human
cccgcccagcuuucccaggggcacagcucuag

SEQ ID NO: 105754 - RNA, 32 nt, Human
cccgcccaggcagggagcugcugugaguccag

SEQ ID NO: 105755 - RNA, 32 nt, Human
cccgcccagucucaaaccaugcagcugaguaa

SEQ ID NO: 105756 - RNA, 32 nt, Human
cccgcccauaauaacacuccagucuggggcuu

SEQ ID NO: 105757 - RNA, 32 nt, Human
cccgcccaucugccgugugucuugcccgccug

SEQ ID NO: 105758 - RNA, 18 nt, Human
cccgccccacgccugcca

SEQ ID NO: 105759 - RNA, 32 nt, Human
cccgccccagccuggcccagggugaaggaaga

SEQ ID NO: 105760 - RNA, 32 nt, Human
cccgccccagcgcagugccggccacacccaug

SEQ ID NO: 105761 - RNA, 32 nt, Human
cccgccccagcgcagugccggccacaccccaa

SEQ ID NO: 105762 - RNA, 32 nt, Human
cccgccccagguuugaaaaggcuuuucuggcg

SEQ ID NO: 105763 - RNA, 18 nt, Human
cccgcccccagccccaca

SEQ ID NO: 105764 - RNA, 25 nt, Human
cccgcccccagggggcgccccgggc

SEQ ID NO: 105765 - RNA, 24 nt, Human
cccgccccccacccugccccauga

SEQ ID NO: 105766 - RNA, 22 nt, Human
cccgccccccaggcucccccgg

SEQ ID NO: 105767 - RNA, 20 nt, Human
cccgcccccgccccccgggc

SEQ ID NO: 105768 - RNA, 16 nt, Human
cccgcccccgccgccg

SEQ ID NO: 105769 - RNA, 32 nt, Human
cccgcccccgcuccacccuggagcccaccccc

SEQ ID NO: 105770 - RNA, 32 nt, Human
cccgcccccgcuccagcuccagccggguccuc

SEQ ID NO: 105771 - RNA, 32 nt, Human
cccgcccccggauagggacccaggaggcccaa

SEQ ID NO: 105772 - RNA, 25 nt, Human
cccgcccccggccgcggccccgggc

SEQ ID NO: 105773 - RNA, 32 nt, Human
cccgcccccuccccaccaacauugccucuccu

SEQ ID NO: 105774 - RNA, 32 nt, Human
cccgcccccugccacccugcacugccccggcu

SEQ ID NO: 105775 - RNA, 32 nt, Human
cccgcccccugccuuucccucuccccuagaaa

SEQ ID NO: 105776 - RNA, 18 nt, Human
cccgccccgccgccgccg

SEQ ID NO: 105777 - RNA, 32 nt, Human
cccgccccgccuggccacugcgucuggcauuc

SEQ ID NO: 105778 - RNA, 16 nt, Human
cccgccccggcgcgag

SEQ ID NO: 105779 - RNA, 32 nt, Human
cccgccccuccaggaaggggaggaggcgaggg

SEQ ID NO: 105780 - RNA, 32 nt, Human
cccgccccuccccaucuguccccucucuccac

SEQ ID NO: 105781 - RNA, 24 nt, Human
cccgccccuccggcuagcucgcug

SEQ ID NO: 105782 - RNA, 32 nt, Human
cccgccccuccucccacccucguucagccugu

SEQ ID NO: 105783 - RNA, 32 nt, Human
cccgccccuccuccucccuuucccaccccucg

SEQ ID NO: 105784 - RNA, 32 nt, Human
cccgccccuccuggugcagguuucagcuguca

SEQ ID NO: 105785 - RNA, 32 nt, Human
cccgccccucgagcuccgccccuuuggccuag

SEQ ID NO: 105786 - RNA, 32 nt, Human
cccgccccucugaccccugccugugggcuggg

SEQ ID NO: 105787 - RNA, 26 nt, Human
cccgccccugccccgccccccugggc

SEQ ID NO: 105788 - RNA, 17 nt, Human
cccgccccugccugcca

SEQ ID NO: 105789 - RNA, 32 nt, Human
cccgccccugcuccauguccuuguguggcugc

SEQ ID NO: 105790 - RNA, 32 nt, Human
cccgccccugcucucuccccagauguguucug

SEQ ID NO: 105791 - RNA, 21 nt, Human
cccgccccuuccuggcuucug

SEQ ID NO: 105792 - RNA, 23 nt, Human
cccgcccgaggccgcgccccgcg

SEQ ID NO: 105793 - RNA, 32 nt, Human
cccgcccgcagcccugccacuggacacaggau

SEQ ID NO: 105794 - RNA, 17 nt, Human
cccgcccgccgccgccg

SEQ ID NO: 105795 - RNA, 17 nt, Human
cccgcccgccgccgcug

SEQ ID NO: 105796 - RNA, 18 nt, Human
cccgcccgccgccugccg

SEQ ID NO: 105797 - RNA, 18 nt, Human
cccgcccgccgggccgcg

SEQ ID NO: 105798 - RNA, 31 nt, Human
cccgcccgccucucucugcccgugucagucc

SEQ ID NO: 105799 - RNA, 25 nt, Human
cccgcccgccugccggcccgcccgg

SEQ ID NO: 105800 - RNA, 22 nt, Human
cccgcccgcggagcccacucgg

SEQ ID NO: 105801 - RNA, 22 nt, Human
cccgcccgcucgcccgcuccug

SEQ ID NO: 105802 - RNA, 23 nt, Human
cccgcccgcucgcgcuccccugg

SEQ ID NO: 105803 - RNA, 22 nt, Human
cccgcccggcagucaggcagcg

SEQ ID NO: 105804 - RNA, 20 nt, Human
cccgcccggccccgccgcgg

SEQ ID NO: 105805 - RNA, 21 nt, Human
cccgcccggccccugcccccu

SEQ ID NO: 105806 - RNA, 32 nt, Human
cccgcccggcccugcccugcccugcucccugc

SEQ ID NO: 105807 - RNA, 32 nt, Human
cccgcccggccuggcccggacgcugccaucuc

SEQ ID NO: 105808 - RNA, 17 nt, Human
cccgcccggcgccccga

SEQ ID NO: 105809 - RNA, 32 nt, Human
cccgcccggcgccgcagccccauggccccguc

SEQ ID NO: 105810 - RNA, 22 nt, Human
cccgcccggcgcgccccucggg

SEQ ID NO: 105811 - RNA, 22 nt, Human
cccgcccggggcccgcuaccgg

SEQ ID NO: 105812 - RNA, 22 nt, Human
cccgcccggggccgcgaccccg

SEQ ID NO: 105813 - RNA, 18 nt, Human
cccgcccggggcuccucc

SEQ ID NO: 105814 - RNA, 22 nt, Human
cccgcccgguccgcccccgcgg

SEQ ID NO: 105815 - RNA, 32 nt, Human
cccgcccgucuccucugucccugggcccggga

SEQ ID NO: 105816 - RNA, 32 nt, Human
cccgcccgucugccgucugucuugcccgccug

SEQ ID NO: 105817 - RNA, 22 nt, Human
cccgcccguuguccuggcaaca

SEQ ID NO: 105818 - RNA, 32 nt, Human
cccgcccuccucaccucgcucucccuccuccu

SEQ ID NO: 105819 - RNA, 32 nt, Human
cccgcccuccuggugagcgcugggcagggcuc

SEQ ID NO: 105820 - RNA, 32 nt, Human
cccgcccucgcccucacugcugacuccucuuc

SEQ ID NO: 105821 - RNA, 23 nt, Human
cccgcccucucaggcccaccuug

SEQ ID NO: 105822 - RNA, 32 nt, Human
cccgcccucugccuccucagccaugggaccuc

SEQ ID NO: 105823 - RNA, 32 nt, Human
cccgcccugaugcuaaggaaacccugacguau

SEQ ID NO: 105824 - RNA, 32 nt, Human
cccgcccugcagcuaucuccgcggcccacccg

SEQ ID NO: 105825 - RNA, 32 nt, Human
cccgcccugccccggccgcaucgcugccaagc

SEQ ID NO: 105826 - RNA, 32 nt, Human
cccgcccugccuggugcauuuccugucuccug

SEQ ID NO: 105827 - RNA, 19 nt, Human
cccgcccuggacccaacca

SEQ ID NO: 105828 - RNA, 32 nt, Human
cccgcccuggguguuucccugccuuguagcca

SEQ ID NO: 105829 - RNA, 32 nt, Human
cccgcccuuccuaaguuaucggccugcgagcc

SEQ ID NO: 105830 - RNA, 32 nt, Human
cccgcccuuuucucccuuugguccuuccccuc

SEQ ID NO: 105831 - RNA, 32 nt, Human
cccgccgacagaaacaucugcaaagauacagu

SEQ ID NO: 105832 - RNA, 32 nt, Human
cccgccgacuucuccccuuuccccagccucgu

SEQ ID NO: 105833 - RNA, 32 nt, Human
cccgccgagccggacagcgccugcugcaugga

SEQ ID NO: 105834 - RNA, 32 nt, Human
cccgccgaggggaugaggggagcaugggugcc

SEQ ID NO: 105835 - RNA, 18 nt, Human
cccgccgcagacacggga

SEQ ID NO: 105836 - RNA, 16 nt, Human
cccgccgcagcugccg

SEQ ID NO: 105837 - RNA, 22 nt, Human
cccgccgccacagccgccgccu

SEQ ID NO: 105838 - RNA, 21 nt, Human
cccgccgccccaacccagcgg

SEQ ID NO: 105839 - RNA, 19 nt, Human
cccgccgcccccgccgccg

SEQ ID NO: 105840 - RNA, 20 nt, Human
cccgccgcccgccgccgccg

SEQ ID NO: 105841 - RNA, 23 nt, Human
cccgccgcccuccaccccugccu

SEQ ID NO: 105842 - RNA, 32 nt, Human
cccgccgccgccgagacccaggcugaagcugg

SEQ ID NO: 105843 - RNA, 16 nt, Human
cccgccgccgccgccg

SEQ ID NO: 105844 - RNA, 18 nt, Human
cccgccgccgccgccgcc

SEQ ID NO: 105845 - RNA, 19 nt, Human
cccgccgccgccgccgccg

SEQ ID NO: 105846 - RNA, 19 nt, Human
cccgccgccgccgccgcug

SEQ ID NO: 105847 - RNA, 17 nt, Human
cccgccgccgccgcgcc

SEQ ID NO: 105848 - RNA, 19 nt, Human
cccgccgccgccgcugccg

SEQ ID NO: 105849 - RNA, 19 nt, Human
cccgccgccgccgucgccg

SEQ ID NO: 105850 - RNA, 32 nt, Human
cccgccgccgcuccagcgccgcgcagccaccg

SEQ ID NO: 105851 - RNA, 19 nt, Human
cccgccgccgcugccgccg

SEQ ID NO: 105852 - RNA, 19 nt, Human
cccgccgccuccgccgccg

SEQ ID NO: 105853 - RNA, 20 nt, Human
cccgccgccugccgccgccg

SEQ ID NO: 105854 - RNA, 32 nt, Human
cccgccgccuuuccucugagccuuccuacuag

SEQ ID NO: 105855 - RNA, 18 nt, Human
cccgccgcgccgccgccg

SEQ ID NO: 105856 - RNA, 32 nt, Human
cccgccgcgcggaggcccgggccacaccucac

SEQ ID NO: 105857 - RNA, 22 nt, Human
cccgccgcggcagccccagcca

SEQ ID NO: 105858 - RNA, 32 nt, Human
cccgccgcgggugcccuucggaaacgcgcuga

SEQ ID NO: 105859 - RNA, 19 nt, Human
cccgccgcugcagcagucc

SEQ ID NO: 105860 - RNA, 32 nt, Human
cccgccgcugccgccucugccugggucccuuc

SEQ ID NO: 105861 - RNA, 32 nt, Human
cccgccgcuuccccuucagccugggaccaggc

SEQ ID NO: 105862 - RNA, 22 nt, Human
cccgccggacccccagcggcag

SEQ ID NO: 105863 - RNA, 32 nt, Human
cccgccggccgucuccuuuggcucccugcagg

SEQ ID NO: 105864 - RNA, 19 nt, Human
cccgccggccuccauccaa

SEQ ID NO: 105865 - RNA, 32 nt, Human
cccgccggcgcagcacgagcccggaccacacc

SEQ ID NO: 105866 - RNA, 32 nt, Human
cccgccggcggccaccaugagcacaggccugc

SEQ ID NO: 105867 - RNA, 32 nt, Human
cccgccggcggcggaggcagcgagcgcgagag

SEQ ID NO: 105868 - RNA, 32 nt, Human
cccgccgggcgcucgggcugaaugggccgcca

SEQ ID NO: 105869 - RNA, 32 nt, Human
cccgccgggcggcuuucccccuuguacuggag

SEQ ID NO: 105870 - RNA, 19 nt, Human
cccgccgucgccgccgccg

SEQ ID NO: 105871 - RNA, 21 nt, Human
cccgccgugcccucaccccag

SEQ ID NO: 105872 - RNA, 32 nt, Human
cccgccucagcaucugguacagccgaccuagu

SEQ ID NO: 105873 - RNA, 32 nt, Human
cccgccucagcccagcccaggcagcggggugg

SEQ ID NO: 105874 - RNA, 32 nt, Human
cccgccucagcuucccaaagugcugggauuac

SEQ ID NO: 105875 - RNA, 32 nt, Human
cccgccucaggaaggaaugaaaggaaugccau

SEQ ID NO: 105876 - RNA, 19 nt, Human
cccgccuccagccuccagc

SEQ ID NO: 105877 - RNA, 32 nt, Human
cccgccuccagugcccuucuuuccaaaacagc

SEQ ID NO: 105878 - RNA, 19 nt, Human
cccgccuccauacccgggc

SEQ ID NO: 105879 - RNA, 32 nt, Human
cccgccuccauggccaggucccgggacugcug

SEQ ID NO: 105880 - RNA, 32 nt, Human
cccgccucccaaagugcugggauuacaggcgu

SEQ ID NO: 105881 - RNA, 19 nt, Human
cccgccuccccgcccgggc

SEQ ID NO: 105882 - RNA, 22 nt, Human
cccgccucccgccccccagggc

SEQ ID NO: 105883 - RNA, 19 nt, Human
cccgccucccgccccgcgc

SEQ ID NO: 105884 - RNA, 23 nt, Human
cccgccucccgccgccuccgggc

SEQ ID NO: 105885 - RNA, 31 nt, Human
cccgccucccucucugggcagauguguuacu

SEQ ID NO: 105886 - RNA, 32 nt, Human
cccgccucccugccuccagcccuggcugcaau

SEQ ID NO: 105887 - RNA, 25 nt, Human
cccgccuccgccaagggcccccugg

SEQ ID NO: 105888 - RNA, 20 nt, Human
cccgccuccggacccggggc

SEQ ID NO: 105889 - RNA, 17 nt, Human
cccgccuccggccgggu

SEQ ID NO: 105890 - RNA, 32 nt, Human
cccgccuccuagggaagggaagggagacgagc

SEQ ID NO: 105891 - RNA, 22 nt, Human
cccgccuccuccaccccugccu

SEQ ID NO: 105892 - RNA, 32 nt, Human
cccgccuccucccacugggacucccagcagag

SEQ ID NO: 105893 - RNA, 17 nt, Human
cccgccuccucccccgg

SEQ ID NO: 105894 - RNA, 18 nt, Human
cccgccuccuccccgggc

SEQ ID NO: 105895 - RNA, 32 nt, Human
cccgccuccugccucaacagccuguguggugg

SEQ ID NO: 105896 - RNA, 32 nt, Human
cccgccuccugguaggaggggguuuccgcuuc

SEQ ID NO: 105897 - RNA, 32 nt, Human
cccgccucuccccuccccaucagacccauccc

SEQ ID NO: 105898 - RNA, 32 nt, Human
cccgccucucggccaccucugcagccugccag

SEQ ID NO: 105899 - RNA, 17 nt, Human
cccgccucugccugcca

SEQ ID NO: 105900 - RNA, 22 nt, Human
cccgccucugcucccaccgagc

SEQ ID NO: 105901 - RNA, 32 nt, Human
cccgccucugucagucuuccugaccccuuccc

SEQ ID NO: 105902 - RNA, 18 nt, Human
cccgccucuguccccugg

SEQ ID NO: 105903 - RNA, 32 nt, Human
cccgccucuuccucccuuccuucuuuccuugc

SEQ ID NO: 105904 - RNA, 19 nt, Human
cccgccucuugccccaggc

SEQ ID NO: 105905 - RNA, 22 nt, Human
cccgccucuuucguccgcgggc

SEQ ID NO: 105906 - RNA, 30 nt, Human
cccgccugaagccaccggcuccaauugcca

SEQ ID NO: 105907 - RNA, 32 nt, Human
cccgccugaccugccuucauguggacccuuag

SEQ ID NO: 105908 - RNA, 32 nt, Human
cccgccugaccuuccucagucauuucugcaaa

SEQ ID NO: 105909 - RNA, 32 nt, Human
cccgccugagccugacagaggagaagcagcgg

SEQ ID NO: 105910 - RNA, 32 nt, Human
cccgccugaggugauccuugagcugggcuggg

SEQ ID NO: 105911 - RNA, 32 nt, Human
cccgccugccaguccuagcugcacagggcagc

SEQ ID NO: 105912 - RNA, 21 nt, Human
cccgccugcccccuucuagga

SEQ ID NO: 105913 - RNA, 32 nt, Human
cccgccugcuaagcugugugugcagugauggc

SEQ ID NO: 105914 - RNA, 32 nt, Human
cccgccugcugcuucucuaccuccccucccca

SEQ ID NO: 105915 - RNA, 32 nt, Human
cccgccuggccuggcccuccccaggcggcuca

SEQ ID NO: 105916 - RNA, 19 nt, Human
cccgccuggcgaccggggc

SEQ ID NO: 105917 - RNA, 32 nt, Human
cccgccuggcucuccccucuaaagcgcccggc

SEQ ID NO: 105918 - RNA, 29 nt, Human
cccgccuggcugcgucuuccucugcuaua

SEQ ID NO: 105919 - RNA, 32 nt, Human
cccgccuggugugggccuggucucagcagcgg

SEQ ID NO: 105920 - RNA, 32 nt, Human
cccgccuguaaucccagcuacucgggaggcug

SEQ ID NO: 105921 - RNA, 32 nt, Human
cccgccuguguguccccagagccauggagaga

SEQ ID NO: 105922 - RNA, 32 nt, Human
cccgccuguuccgucugcuccagacccugccc

SEQ ID NO: 105923 - RNA, 32 nt, Human
cccgccuuaucacccauuccagcucacccaga

SEQ ID NO: 105924 - RNA, 32 nt, Human
cccgccuucaccccgagcugggcaugggccug

SEQ ID NO: 105925 - RNA, 32 nt, Human
cccgccuucagguuguugagcaacugauggga

SEQ ID NO: 105926 - RNA, 32 nt, Human
cccgccuucgcuccuuccccucaggccguggc

SEQ ID NO: 105927 - RNA, 32 nt, Human
cccgccuucucuuccuccuccuccgucuucuu

SEQ ID NO: 105928 - RNA, 19 nt, Human
cccgccuugaccccugggc

SEQ ID NO: 105929 - RNA, 32 nt, Human
cccgccuugccagggcccuggcaucugucuca

SEQ ID NO: 105930 - RNA, 32 nt, Human
cccgccuuggcggcuuaagccugcugcuuugg

SEQ ID NO: 105931 - RNA, 32 nt, Human
cccgccuugggggcgggggucucugcagccug

SEQ ID NO: 105932 - RNA, 32 nt, Human
cccgccuuguggauccaccacaccccaccgag

SEQ ID NO: 105933 - RNA, 19 nt, Human
cccgccuuguuucucccca

SEQ ID NO: 105934 - RNA, 32 nt, Human
cccgccuuuugcccuccuccucccaguuucuc

SEQ ID NO: 105935 - RNA, 32 nt, Human
cccgcgaaaacaucugccucccaggagggugc

SEQ ID NO: 105936 - RNA, 32 nt, Human
cccgcgaagccccugcgcgcucagggacgcgg

SEQ ID NO: 105937 - RNA, 32 nt, Human
cccgcgaccucugcgcgcccucaggccgccuu

SEQ ID NO: 105938 - RNA, 24 nt, Human
cccgcgaggcggagacugcaguga

SEQ ID NO: 105939 - RNA, 32 nt, Human
cccgcgaggcggagacugcagugagccgagau

SEQ ID NO: 105940 - RNA, 23 nt, Human
cccgcgauccgauccgcuucugc

SEQ ID NO: 105941 - RNA, 32 nt, Human
cccgcgaugaguguuuugguggcagagguggg

SEQ ID NO: 105942 - RNA, 32 nt, Human
cccgcgcacacagcugcucucuacagaggcug

SEQ ID NO: 105943 - RNA, 25 nt, Human
cccgcgcaccgcgcucagcgcccac

SEQ ID NO: 105944 - RNA, 23 nt, Human
cccgcgcagacacguccugcacg

SEQ ID NO: 105945 - RNA, 32 nt, Human
cccgcgcagcaguuccaggaaggauguuaccu

SEQ ID NO: 105946 - RNA, 32 nt, Human
cccgcgcagccaccgagccucugcccagccaa

SEQ ID NO: 105947 - RNA, 32 nt, Human
cccgcgcagccugcccccuccuggacgugccc

SEQ ID NO: 105948 - RNA, 32 nt, Human
cccgcgcaggcgcgccccacgcccucgccccg

SEQ ID NO: 105949 - RNA, 32 nt, Human
cccgcgccacugcgccgcucccaggaacccug

SEQ ID NO: 105950 - RNA, 25 nt, Human
cccgcgccagaucggcugcuucucu

SEQ ID NO: 105951 - RNA, 23 nt, Human
cccgcgccagcaaccgggcccga

SEQ ID NO: 105952 - RNA, 32 nt, Human
cccgcgccaggcccucagucuuccugccgguu

SEQ ID NO: 105953 - RNA, 24 nt, Human
cccgcgccaguagugcuuucugcu

SEQ ID NO: 105954 - RNA, 24 nt, Human
cccgcgcccaacuuccgcuggccc

SEQ ID NO: 105955 - RNA, 18 nt, Human
cccgcgcccacccccuca

SEQ ID NO: 105956 - RNA, 21 nt, Human
cccgcgcccagccgggcccgg

SEQ ID NO: 105957 - RNA, 32 nt, Human
cccgcgcccaggagcaugaagggccuuuccgg

SEQ ID NO: 105958 - RNA, 32 nt, Human
cccgcgcccaggaguauggcugaggccuugcc

SEQ ID NO: 105959 - RNA, 21 nt, Human
cccgcgcccaggccgggccga

SEQ ID NO: 105960 - RNA, 32 nt, Human
cccgcgccccaaacuuugccucccgcggcggc

SEQ ID NO: 105961 - RNA, 18 nt, Human
cccgcgccccccuccuca

SEQ ID NO: 105962 - RNA, 21 nt, Human
cccgcgccccgauuccggccc

SEQ ID NO: 105963 - RNA, 17 nt, Human
cccgcgccccgccgccg

SEQ ID NO: 105964 - RNA, 19 nt, Human
cccgcgccccgccgcgccg

SEQ ID NO: 105965 - RNA, 32 nt, Human
cccgcgccccggacacagcgggacgcggccgg

SEQ ID NO: 105966 - RNA, 20 nt, Human
cccgcgccccuccccagccc

SEQ ID NO: 105967 - RNA, 31 nt, Human
cccgcgcccgccccuggacacuuguaaguuu

SEQ ID NO: 105968 - RNA, 19 nt, Human
cccgcgcccgccgccgccg

SEQ ID NO: 105969 - RNA, 21 nt, Human
cccgcgcccgcgggcccggcc

SEQ ID NO: 105970 - RNA, 21 nt, Human
cccgcgcccgcugcugcugcu

SEQ ID NO: 105971 - RNA, 32 nt, Human
cccgcgcccucaggacccugcgggucgcacgc

SEQ ID NO: 105972 - RNA, 32 nt, Human
cccgcgccgcagccccggccugggcgagagcg

SEQ ID NO: 105973 - RNA, 19 nt, Human
cccgcgccgccccgcgccg

SEQ ID NO: 105974 - RNA, 18 nt, Human
cccgcgccgccgcccccg

SEQ ID NO: 105975 - RNA, 16 nt, Human
cccgcgccgccgcccg

SEQ ID NO: 105976 - RNA, 17 nt, Human
cccgcgccgccgccgcc

SEQ ID NO: 105977 - RNA, 18 nt, Human
cccgcgccgccgccgccg

SEQ ID NO: 105978 - RNA, 17 nt, Human
cccgcgccgccgcggcc

SEQ ID NO: 105979 - RNA, 18 nt, Human
cccgcgccgccgcuuccg

SEQ ID NO: 105980 - RNA, 19 nt, Human
cccgcgccgcgccccugcu

SEQ ID NO: 105981 - RNA, 17 nt, Human
cccgcgccgcgccgccg

SEQ ID NO: 105982 - RNA, 19 nt, Human
cccgcgccgcgccgcgccg

SEQ ID NO: 105983 - RNA, 24 nt, Human
cccgcgccgcggagcccggcccga

SEQ ID NO: 105984 - RNA, 32 nt, Human
cccgcgccuccaucugcccccgcaggaaggga

SEQ ID NO: 105985 - RNA, 22 nt, Human
cccgcgccuccugcagacccga

SEQ ID NO: 105986 - RNA, 21 nt, Human
cccgcgccucggcuucgcgcu

SEQ ID NO: 105987 - RNA, 21 nt, Human
cccgcgccuucugccccugcu

SEQ ID NO: 105988 - RNA, 32 nt, Human
cccgcgccuuucucccugcggccccggcucgc

SEQ ID NO: 105989 - RNA, 32 nt, Human
cccgcgccuuucuucucgcgccuccuccgccc

SEQ ID NO: 105990 - RNA, 32 nt, Human
cccgcgccuuucuucuuuugccugcgcuguuc

SEQ ID NO: 105991 - RNA, 17 nt, Human
cccgcgcgcagcugccg

SEQ ID NO: 105992 - RNA, 18 nt, Human
cccgcgcgcccacccaca

SEQ ID NO: 105993 - RNA, 21 nt, Human
cccgcgcgcccccgccgcgcg

SEQ ID NO: 105994 - RNA, 24 nt, Human
cccgcgcgcccccgcuccugcagg

SEQ ID NO: 105995 - RNA, 18 nt, Human
cccgcgcgccccgcgccg

SEQ ID NO: 105996 - RNA, 21 nt, Human
cccgcgcgccccgcgccgccg

SEQ ID NO: 105997 - RNA, 21 nt, Human
cccgcgcgccugcccugcacg

SEQ ID NO: 105998 - RNA, 23 nt, Human
cccgcgcgccugggcggccgcac

SEQ ID NO: 105999 - RNA, 21 nt, Human
cccgcgcgcgcacacucgcac

SEQ ID NO: 106000 - RNA, 22 nt, Human
cccgcgcgcuccgcggcugcac

SEQ ID NO: 106001 - RNA, 32 nt, Human
cccgcgcggcgcaucccagccugggcgggacg

SEQ ID NO: 106002 - RNA, 21 nt, Human
cccgcgcggggccgcccgccg

SEQ ID NO: 106003 - RNA, 18 nt, Human
cccgcgcgucccuccuca

SEQ ID NO: 106004 - RNA, 22 nt, Human
cccgcgcgucuccgcccgcacg

SEQ ID NO: 106005 - RNA, 21 nt, Human
cccgcgcuccgugcuccugcu

SEQ ID NO: 106006 - RNA, 32 nt, Human
cccgcgcuccucuaggcugcaaagggggccuc

SEQ ID NO: 106007 - RNA, 32 nt, Human
cccgcgcucugcucccccucccggaggcgccg

SEQ ID NO: 106008 - RNA, 32 nt, Human
cccgcgcuggccaccccgccuccuuggcagcc

SEQ ID NO: 106009 - RNA, 26 nt, Human
cccgcgcuuuccccggcgccugcacg

SEQ ID NO: 106010 - RNA, 32 nt, Human
cccgcggaccaccacccggccgcacgggccgc

SEQ ID NO: 106011 - RNA, 19 nt, Human
cccgcggagccgccgcgcc

SEQ ID NO: 106012 - RNA, 32 nt, Human
cccgcggaggaggcacgcucucggcgcucacu

SEQ ID NO: 106013 - RNA, 20 nt, Human
cccgcggcaccgcgcugccg

SEQ ID NO: 106014 - RNA, 18 nt, Human
cccgcggcagccccgggc

SEQ ID NO: 106015 - RNA, 32 nt, Human
cccgcggcccggccggcaguugcaguguagac

SEQ ID NO: 106016 - RNA, 18 nt, Human
cccgcggccugccugcca

SEQ ID NO: 106017 - RNA, 32 nt, Human
cccgcggcgagggugucuauggagaggcggcg

SEQ ID NO: 106018 - RNA, 18 nt, Human
cccgcggcgcaggagcuu

SEQ ID NO: 106019 - RNA, 32 nt, Human
cccgcggcgccaugagccgcagccuggacucg

SEQ ID NO: 106020 - RNA, 22 nt, Human
cccgcggcgcgcggggaugggg

SEQ ID NO: 106021 - RNA, 15 nt, Human
cccgcggcgcugccg

SEQ ID NO: 106022 - RNA, 32 nt, Human
cccgcgggagcagcacggucaccauuccacgg

SEQ ID NO: 106023 - RNA, 32 nt, Human
cccgcggggaugaggagguugucagugauuga

SEQ ID NO: 106024 - RNA, 32 nt, Human
cccgcggggccgucccgccugcagagggccac

SEQ ID NO: 106025 - RNA, 32 nt, Human
cccgcggguggaggccgggguggcgccggccg

SEQ ID NO: 106026 - RNA, 32 nt, Human
cccgcggugcagcuccagccccgggaagcccc

SEQ ID NO: 106027 - RNA, 32 nt, Human
cccgcggugggcaucagaagaccugggugugg

SEQ ID NO: 106028 - RNA, 32 nt, Human
cccgcgguguguagaguccgccgccccggagc

SEQ ID NO: 106029 - RNA, 32 nt, Human
cccgcguacccggcgcagccagagccaccagc

SEQ ID NO: 106030 - RNA, 21 nt, Human
cccgcguaccggccgccgccg

SEQ ID NO: 106031 - RNA, 32 nt, Human
cccgcguagcuggagcagcccaggcccggcgg

SEQ ID NO: 106032 - RNA, 32 nt, Human
cccgcgucagaacuuagagggccaggcagggu

SEQ ID NO: 106033 - RNA, 24 nt, Human
cccgcguccaggagaaacucgcuc

SEQ ID NO: 106034 - RNA, 32 nt, Human
cccgcguccaggagaaacucgcuccaagugca

SEQ ID NO: 106035 - RNA, 22 nt, Human
cccgcguccccccagcgcgccc

SEQ ID NO: 106036 - RNA, 22 nt, Human
cccgcguccccgccggaccacu

SEQ ID NO: 106037 - RNA, 18 nt, Human
cccgcgucccggagugca

SEQ ID NO: 106038 - RNA, 32 nt, Human
cccgcguccugugcggauuucagggcugauac

SEQ ID NO: 106039 - RNA, 32 nt, Human
cccgcgucgcgcggaggucagggagccugagc

SEQ ID NO: 106040 - RNA, 32 nt, Human
cccgcgucgcggcagcaccugggcagccccgc

SEQ ID NO: 106041 - RNA, 22 nt, Human
cccgcgucucggcccggacggc

SEQ ID NO: 106042 - RNA, 32 nt, Human
cccgcgucuuccacgggcacagguguguggag

SEQ ID NO: 106043 - RNA, 32 nt, Human
cccgcgugccugcccaugccagcacuuccuua

SEQ ID NO: 106044 - RNA, 32 nt, Human
cccgcgugccuucgcccucuggcugcaaauaa

SEQ ID NO: 106045 - RNA, 23 nt, Human
cccgcguucuccuggcccugccc

SEQ ID NO: 106046 - RNA, 19 nt, Human
cccgcguuuagccgccaca

SEQ ID NO: 106047 - RNA, 32 nt, Human
cccgcuaacucccauuccuaccccugcuguua

SEQ ID NO: 106048 - RNA, 32 nt, Human
cccgcuaacucccauuccuaccucugcuguua

SEQ ID NO: 106049 - RNA, 32 nt, Human
cccgcuaauguggaggaaaugagggagauacg

SEQ ID NO: 106050 - RNA, 32 nt, Human
cccgcuaccguccuggccagcuaccgucagag

SEQ ID NO: 106051 - RNA, 32 nt, Human
cccgcuaccuuucccagccucugguaacccuc

SEQ ID NO: 106052 - RNA, 32 nt, Human
cccgcuacuggugcuauccagaauucccaucu

SEQ ID NO: 106053 - RNA, 32 nt, Human
cccgcuagcauguggccaggggugcagggugg

SEQ ID NO: 106054 - RNA, 32 nt, Human
cccgcuauaccuccccuuccuccugcaucucc

SEQ ID NO: 106055 - RNA, 32 nt, Human
cccgcuaugacaaugaccuggcaccaaugggc

SEQ ID NO: 106056 - RNA, 32 nt, Human
cccgcuauuagaguauggaggaagggguuuuc

SEQ ID NO: 106057 - RNA, 32 nt, Human
cccgcucaccuuccucaccccuccucugaccc

SEQ ID NO: 106058 - RNA, 32 nt, Human
cccgcucagcuggcggucugggcugcucuggg

SEQ ID NO: 106059 - RNA, 32 nt, Human
cccgcucaggagacucgcacuggguguagacu

SEQ ID NO: 106060 - RNA, 32 nt, Human
cccgcuccaacccucgguucuuccugcaauac

SEQ ID NO: 106061 - RNA, 32 nt, Human
cccgcuccagagcuuuaaggaaaaugaaguga

SEQ ID NO: 106062 - RNA, 19 nt, Human
cccgcuccagccgccgccg

SEQ ID NO: 106063 - RNA, 32 nt, Human
cccgcucccaggaggccagggcaggccugcgu

SEQ ID NO: 106064 - RNA, 32 nt, Human
cccgcucccaugggcucccucuuuccuccugc

SEQ ID NO: 106065 - RNA, 32 nt, Human
cccgcuccccacccuccccuccccuccccuuc

SEQ ID NO: 106066 - RNA, 32 nt, Human
cccgcucccccgacgcauguggcuccagcccg

SEQ ID NO: 106067 - RNA, 32 nt, Human
cccgcucccccucaacacacacauauauaaca

SEQ ID NO: 106068 - RNA, 19 nt, Human
cccgcuccccggggaccgg

SEQ ID NO: 106069 - RNA, 32 nt, Human
cccgcuccccuccagcaguggccgcccgcgcc

SEQ ID NO: 106070 - RNA, 32 nt, Human
cccgcuccccuccuuggaggugcagugaugau

SEQ ID NO: 106071 - RNA, 32 nt, Human
cccgcucccuagagcaggagaucuugaguggg

SEQ ID NO: 106072 - RNA, 32 nt, Human
cccgcucccucacugccacacagcaaguuccg

SEQ ID NO: 106073 - RNA, 32 nt, Human
cccgcucccucuggcccuucucuguuuaguag

SEQ ID NO: 106074 - RNA, 21 nt, Human
cccgcuccgggcucagugccc

SEQ ID NO: 106075 - RNA, 32 nt, Human
cccgcuccgugccccucucugcagccucuccu

SEQ ID NO: 106076 - RNA, 32 nt, Human
cccgcuccuccaccaucuaggcccugcuccuc

SEQ ID NO: 106077 - RNA, 32 nt, Human
cccgcuccugcugaaacaccucccaggggcuc

SEQ ID NO: 106078 - RNA, 32 nt, Human
cccgcucgcaccccucucccgcgcccgguucu

SEQ ID NO: 106079 - RNA, 28 nt, Human
cccgcucggagccagccagccgucccga

SEQ ID NO: 106080 - RNA, 32 nt, Human
cccgcucggucaccgccggcucgggcgcgcac

SEQ ID NO: 106081 - RNA, 32 nt, Human
cccgcucuaggacugcagcccagccccagcuu

SEQ ID NO: 106082 - RNA, 32 nt, Human
cccgcucuccagccaagguuccgggcugaggc

SEQ ID NO: 106083 - RNA, 32 nt, Human
cccgcucuccaggaaaggcacagcugaggcac

SEQ ID NO: 106084 - RNA, 32 nt, Human
cccgcucucccagggaggaggcuggaccgagg

SEQ ID NO: 106085 - RNA, 32 nt, Human
cccgcucucuacccucucacccuugcccucug

SEQ ID NO: 106086 - RNA, 32 nt, Human
cccgcucucugccucccucuccaacgcccgga

SEQ ID NO: 106087 - RNA, 32 nt, Human
cccgcucucugccucuggaggcuaaacccugu

SEQ ID NO: 106088 - RNA, 32 nt, Human
cccgcucugcagcuccaugccccugcccagug

SEQ ID NO: 106089 - RNA, 32 nt, Human
cccgcucugcaggccgcccuucugccagcugg

SEQ ID NO: 106090 - RNA, 32 nt, Human
cccgcucugggagcaagagaagccgaagcugc

SEQ ID NO: 106091 - RNA, 32 nt, Human
cccgcucuuucgccaccuuccccagccgccgg

SEQ ID NO: 106092 - RNA, 32 nt, Human
cccgcugacagauucucgguggcggcggcagc

SEQ ID NO: 106093 - RNA, 22 nt, Human
cccgcugacccagccccagcca

SEQ ID NO: 106094 - RNA, 32 nt, Human
cccgcugagcacuuccaugaaggcgaggcugu

SEQ ID NO: 106095 - RNA, 32 nt, Human
cccgcugagggcgcaggaccugagggaguccu

SEQ ID NO: 106096 - RNA, 32 nt, Human
cccgcugaguagcuggcacuuuaaggcaggug

SEQ ID NO: 106097 - RNA, 32 nt, Human
cccgcugauagcugcgcaacagccuggguucu

SEQ ID NO: 106098 - RNA, 19 nt, Human
cccgcugcagccgccgccg

SEQ ID NO: 106099 - RNA, 32 nt, Human
cccgcugccacaucuuccaagauacgggaaau

SEQ ID NO: 106100 - RNA, 19 nt, Human
cccgcugccaccucgccca

SEQ ID NO: 106101 - RNA, 32 nt, Human
cccgcugcccaggauugguaggcuccaccgcu

SEQ ID NO: 106102 - RNA, 32 nt, Human
cccgcugcccccagcgcucccugggugggugc

SEQ ID NO: 106103 - RNA, 19 nt, Human
cccgcugccgccgccgccg

SEQ ID NO: 106104 - RNA, 32 nt, Human
cccgcugccggcuccucaccucuuugggccuc

SEQ ID NO: 106105 - RNA, 19 nt, Human
cccgcugccgucgccgccg

SEQ ID NO: 106106 - RNA, 32 nt, Human
cccgcugccuccauuucucuagaucugugcuc

SEQ ID NO: 106107 - RNA, 32 nt, Human
cccgcugcgcccgcaucagucugggccuggcc

SEQ ID NO: 106108 - RNA, 23 nt, Human
cccgcugcgcucccucgcuccuu

SEQ ID NO: 106109 - RNA, 32 nt, Human
cccgcugcgggcucgguuuccacaggcgaaug

SEQ ID NO: 106110 - RNA, 32 nt, Human
cccgcugcuaaucuccccugggccccuccccg

SEQ ID NO: 106111 - RNA, 32 nt, Human
cccgcugcucacuuuccacccucucuccaccu

SEQ ID NO: 106112 - RNA, 19 nt, Human
cccgcugcugccgccgccg

SEQ ID NO: 106113 - RNA, 32 nt, Human
cccgcugcuggccgcucucuucucugccucuc

SEQ ID NO: 106114 - RNA, 32 nt, Human
cccgcugcuguugcugcugacuccaaggagca

SEQ ID NO: 106115 - RNA, 32 nt, Human
cccgcugcuguuucaguucucucuccagggug

SEQ ID NO: 106116 - RNA, 17 nt, Human
cccgcugcuuccaggua

SEQ ID NO: 106117 - RNA, 32 nt, Human
cccgcuggaccggccacucuccccagcccccu

SEQ ID NO: 106118 - RNA, 22 nt, Human
cccgcuggcagaugaccaggac

SEQ ID NO: 106119 - RNA, 32 nt, Human
cccgcuggcauccagcucccugcuccauggcc

SEQ ID NO: 106120 - RNA, 32 nt, Human
cccgcuggccccugggcccagccugggcaccg

SEQ ID NO: 106121 - RNA, 32 nt, Human
cccgcuggccgugucugugugugugcacgugu

SEQ ID NO: 106122 - RNA, 32 nt, Human
cccgcuggcugcagagcaucccugggagccaa

SEQ ID NO: 106123 - RNA, 32 nt, Human
cccgcugggucucaaaggcagugagaagagag

SEQ ID NO: 106124 - RNA, 32 nt, Human
cccgcuggucccaggcuggauugccguggcac

SEQ ID NO: 106125 - RNA, 31 nt, Human
cccgcuggucccucugggcaugcugugcucg

SEQ ID NO: 106126 - RNA, 32 nt, Human
cccgcugguccugaccaagaucgcggcugccg

SEQ ID NO: 106127 - RNA, 32 nt, Human
cccgcuggugacccucugcuucccucucucuu

SEQ ID NO: 106128 - RNA, 32 nt, Human
cccgcugugaucuugggcaagugacuuucucc

SEQ ID NO: 106129 - RNA, 32 nt, Human
cccgcuguggggcgcugcugcagccgcucuuc

SEQ ID NO: 106130 - RNA, 32 nt, Human
cccgcugugucccuuucucucuccuuagugcc

SEQ ID NO: 106131 - RNA, 18 nt, Human
cccgcuucccggcuccag

SEQ ID NO: 106132 - RNA, 32 nt, Human
cccgcuucggauuccagguguggcagugacuc

SEQ ID NO: 106133 - RNA, 32 nt, Human
cccgcuucugcucucuuuauggacuggucaga

SEQ ID NO: 106134 - RNA, 32 nt, Human
cccgcuucuuguugggccucaggcacugguua

SEQ ID NO: 106135 - RNA, 32 nt, Human
cccgcuuggacugcauggcucuccagcuggcc

SEQ ID NO: 106136 - RNA, 32 nt, Human
cccgcuugucccgugcccuugugacccuggcu

SEQ ID NO: 106137 - RNA, 32 nt, Human
cccgcuuguuuuuccuccucuccuuuuccugc

SEQ ID NO: 106138 - RNA, 32 nt, Human
cccgcuuucucagaagggaugcgcaggcucac

SEQ ID NO: 106139 - RNA, 32 nt, Human
cccgcuuucucccaggguuucuuaucagccag

SEQ ID NO: 106140 - RNA, 32 nt, Human
cccgcuuugcagacuucggggugcucugcacg

SEQ ID NO: 106141 - RNA, 32 nt, Human
cccgcuuuucacagacuggggaaauggacgcc

SEQ ID NO: 106142 - RNA, 32 nt, Human
cccggaacaaaguggaggaaugacagaggugu

SEQ ID NO: 106143 - RNA, 21 nt, Human
cccggaacacacccucucaca

SEQ ID NO: 106144 - RNA, 20 nt, Human
cccggaaccguuagguacug

SEQ ID NO: 106145 - RNA, 23 nt, Human
cccggaagccacccaacuucccu

SEQ ID NO: 106146 - RNA, 32 nt, Human
cccggaagccagucccucccccuagaccccgc

SEQ ID NO: 106147 - RNA, 32 nt, Human
cccggaagccccgcgggggaugcgccgagggc

SEQ ID NO: 106148 - RNA, 23 nt, Human
cccggaagcgaagguugcaguga

SEQ ID NO: 106149 - RNA, 24 nt, Human
cccggaaggcagagcuugcaguga

SEQ ID NO: 106150 - RNA, 32 nt, Human
cccggaaggcagagcuugcagugagccgagau

SEQ ID NO: 106151 - RNA, 24 nt, Human
cccggaaggcagagguugcaguga

SEQ ID NO: 106152 - RNA, 32 nt, Human
cccggaaggcagagguugcagugagccgagau

SEQ ID NO: 106153 - RNA, 31 nt, Human
cccggaaggcagagguugcagugagcugaga

SEQ ID NO: 106154 - RNA, 32 nt, Human
cccggaaggccgcggcggcgucccggcugcua

SEQ ID NO: 106155 - RNA, 24 nt, Human
cccggaaggcggagcuugcaguga

SEQ ID NO: 106156 - RNA, 32 nt, Human
cccggaaggcggagcuugcagugagccgagau

SEQ ID NO: 106157 - RNA, 23 nt, Human
cccggaaggcggagguugcagug

SEQ ID NO: 106158 - RNA, 24 nt, Human
cccggaaggcggagguugcaguga

SEQ ID NO: 106159 - RNA, 32 nt, Human
cccggaaggcggagguugcagugagccaagau

SEQ ID NO: 106160 - RNA, 31 nt, Human
cccggaaggcggagguugcagugagcugaga

SEQ ID NO: 106161 - RNA, 32 nt, Human
cccggaagggccugggcuggcuguggcccagu

SEQ ID NO: 106162 - RNA, 22 nt, Human
cccggaagggugagucuggacg

SEQ ID NO: 106163 - RNA, 24 nt, Human
cccggaagguggagguugcaguga

SEQ ID NO: 106164 - RNA, 32 nt, Human
cccggaagguggagguugcagugagccgagau

SEQ ID NO: 106165 - RNA, 27 nt, Human
cccggaagguggagguuguugcgguga

SEQ ID NO: 106166 - RNA, 24 nt, Human
cccggaagguggaguuugcaguga

SEQ ID NO: 106167 - RNA, 32 nt, Human
cccggaagguggaguuugcagugagccgagau

SEQ ID NO: 106168 - RNA, 32 nt, Human
cccggaauccacaccaccccacccuccuccug

SEQ ID NO: 106169 - RNA, 19 nt, Human
cccggaauuguacuuguca

SEQ ID NO: 106170 - RNA, 32 nt, Human
cccggacacaguacuccagauguugucugacc

SEQ ID NO: 106171 - RNA, 32 nt, Human
cccggacaccacagcucaaagacucaagccag

SEQ ID NO: 106172 - RNA, 26 nt, Human
cccggacacccucucagcuccugccc

SEQ ID NO: 106173 - RNA, 32 nt, Human
cccggacaccuggaagcugggaaaugaaguca

SEQ ID NO: 106174 - RNA, 32 nt, Human
cccggacacucaacagccuccaccucccuuuc

SEQ ID NO: 106175 - RNA, 32 nt, Human
cccggacagaggcuggagggcuggggcugcgu

SEQ ID NO: 106176 - RNA, 32 nt, Human
cccggacagccaggugacuaccaguccugggg

SEQ ID NO: 106177 - RNA, 32 nt, Human
cccggacccauccaagucaucugauugaagag

SEQ ID NO: 106178 - RNA, 32 nt, Human
cccggaccccuuguuacucaggaaccucaccu

SEQ ID NO: 106179 - RNA, 32 nt, Human
cccggaccugcucuccguugcgguuuggccuc

SEQ ID NO: 106180 - RNA, 32 nt, Human
cccggaccuggacguugccuccagagcaggca

SEQ ID NO: 106181 - RNA, 22 nt, Human
cccggacgccagcgccgcgccc

SEQ ID NO: 106182 - RNA, 32 nt, Human
cccggacgcccaggaccccauggcagugggaa

SEQ ID NO: 106183 - RNA, 24 nt, Human
cccggacgcccgagcgccccgccc

SEQ ID NO: 106184 - RNA, 32 nt, Human
cccggacgccugcuggccaggccccggucaug

SEQ ID NO: 106185 - RNA, 32 nt, Human
cccggacgcgcgagccugaggauucugcacaa

SEQ ID NO: 106186 - RNA, 32 nt, Human
cccggacucaagccccggacucaggcccccac

SEQ ID NO: 106187 - RNA, 28 nt, Human
cccggacucugcgccccgucccaugccc

SEQ ID NO: 106188 - RNA, 32 nt, Human
cccggacucuuuuuaaaugucucccccuaagu

SEQ ID NO: 106189 - RNA, 32 nt, Human
cccggacuggaggaggugaggucgagagccag

SEQ ID NO: 106190 - RNA, 32 nt, Human
cccggacugucuuuccuccacccgcccaugga

SEQ ID NO: 106191 - RNA, 32 nt, Human
cccggagaagguggagggagacgagaagccgc

SEQ ID NO: 106192 - RNA, 28 nt, Human
cccggagaccuggaggacagcagugcug

SEQ ID NO: 106193 - RNA, 32 nt, Human
cccggagacuccugccgucacgcccggggcuc

SEQ ID NO: 106194 - RNA, 32 nt, Human
cccggagagggggagccgcggggacgcagcga

SEQ ID NO: 106195 - RNA, 23 nt, Human
cccggagauggagguugcaguga

SEQ ID NO: 106196 - RNA, 32 nt, Human
cccggagcaagucccaugagucucagcugggg

SEQ ID NO: 106197 - RNA, 32 nt, Human
cccggagcacaaugggagugggcuggcggggu

SEQ ID NO: 106198 - RNA, 22 nt, Human
cccggagcaccaacuccguguc

SEQ ID NO: 106199 - RNA, 18 nt, Human
cccggagcacccuaggcg

SEQ ID NO: 106200 - RNA, 25 nt, Human
cccggagcagaagcagcagcagcag

SEQ ID NO: 106201 - RNA, 19 nt, Human
cccggagcagcccaggagc

SEQ ID NO: 106202 - RNA, 32 nt, Human
cccggagcagccuguuccugcacuccacccug

SEQ ID NO: 106203 - RNA, 32 nt, Human
cccggagcaggguggggaggugcaguggcacc

SEQ ID NO: 106204 - RNA, 32 nt, Human
cccggagccacagccgcagccccagccccggc

SEQ ID NO: 106205 - RNA, 32 nt, Human
cccggagccaucacccucacccacucuggugg

SEQ ID NO: 106206 - RNA, 23 nt, Human
cccggagcccaagcgcuccggcg

SEQ ID NO: 106207 - RNA, 32 nt, Human
cccggagcccaggaggggagggcgggccgccu

SEQ ID NO: 106208 - RNA, 23 nt, Human
cccggagcccccgcauaucagca

SEQ ID NO: 106209 - RNA, 24 nt, Human
cccggagcccccgcggacgccggc

SEQ ID NO: 106210 - RNA, 21 nt, Human
cccggagccccgaagacucgg

SEQ ID NO: 106211 - RNA, 23 nt, Human
cccggagccccgcagcucgggca

SEQ ID NO: 106212 - RNA, 20 nt, Human
cccggagcccggagcccggc

SEQ ID NO: 106213 - RNA, 32 nt, Human
cccggagcccggccguagaggcugcaaucgca

SEQ ID NO: 106214 - RNA, 18 nt, Human
cccggagccgccgcgccg

SEQ ID NO: 106215 - RNA, 32 nt, Human
cccggagccugagccacugacaggagaggaga

SEQ ID NO: 106216 - RNA, 32 nt, Human
cccggagccuguagaacuugaaucuagaggaa

SEQ ID NO: 106217 - RNA, 32 nt, Human
cccggagccuucaagcccugggucccugaggg

SEQ ID NO: 106218 - RNA, 32 nt, Human
cccggagcggaaaacugcucaaaccacaaaca

SEQ ID NO: 106219 - RNA, 18 nt, Human
cccggagcggcccuggcg

SEQ ID NO: 106220 - RNA, 32 nt, Human
cccggagcucaggcccuggugaggggcugggu

SEQ ID NO: 106221 - RNA, 32 nt, Human
cccggagcucgagcaugaugcccaggcagagg

SEQ ID NO: 106222 - RNA, 32 nt, Human
cccggagcugcaaacugcagagcccaggcaac

SEQ ID NO: 106223 - RNA, 32 nt, Human
cccggagcuuucuccauugucucugccuuuac

SEQ ID NO: 106224 - RNA, 32 nt, Human
cccggaggaaagcacggugcagaggaaacggu

SEQ ID NO: 106225 - RNA, 32 nt, Human
cccggaggaaaucugcagagggguuaggagug

SEQ ID NO: 106226 - RNA, 32 nt, Human
cccggaggaacaacaguggagaagcaggcggg

SEQ ID NO: 106227 - RNA, 32 nt, Human
cccggaggacaggagaaaaccacggacuggcu

SEQ ID NO: 106228 - RNA, 32 nt, Human
cccggaggagcggccugcgccgccgcgcgaga

SEQ ID NO: 106229 - RNA, 32 nt, Human
cccggaggaggaggaggaggaggaggaggagg

SEQ ID NO: 106230 - RNA, 18 nt, Human
cccggaggaggggggcag

SEQ ID NO: 106231 - RNA, 20 nt, Human
cccggaggcagagcuuguag

SEQ ID NO: 106232 - RNA, 23 nt, Human
cccggaggcagggguugcaguga

SEQ ID NO: 106233 - RNA, 22 nt, Human
cccggaggccacaugaguccca

SEQ ID NO: 106234 - RNA, 24 nt, Human
cccggaggcccccacccuggcgug

SEQ ID NO: 106235 - RNA, 32 nt, Human
cccggaggccuccauccuccccuagagggguc

SEQ ID NO: 106236 - RNA, 30 nt, Human
cccggaggccucuccgcuccugcacaggcc

SEQ ID NO: 106237 - RNA, 21 nt, Human
cccggaggccugcuccucggc

SEQ ID NO: 106238 - RNA, 23 nt, Human
cccggaggcggagguugcaguga

SEQ ID NO: 106239 - RNA, 21 nt, Human
cccggaggcggagguugcggu

SEQ ID NO: 106240 - RNA, 23 nt, Human
cccggaggcggagguugcgguaa

SEQ ID NO: 106241 - RNA, 19 nt, Human
cccggaggcggcggcgcag

SEQ ID NO: 106242 - RNA, 20 nt, Human
cccggaggcgggaggagcag

SEQ ID NO: 106243 - RNA, 19 nt, Human
cccggaggcgguggcgcag

SEQ ID NO: 106244 - RNA, 32 nt, Human
cccggaggcuuagggugcagccucccuggucu

SEQ ID NO: 106245 - RNA, 18 nt, Human
cccggagggagggggcca

SEQ ID NO: 106246 - RNA, 32 nt, Human
cccggagggggcuguacaaaaugcagacagaa

SEQ ID NO: 106247 - RNA, 24 nt, Human
cccggagggugcgauuccucggcc

SEQ ID NO: 106248 - RNA, 32 nt, Human
cccggagggugggaggagguugcaguauucug

SEQ ID NO: 106249 - RNA, 23 nt, Human
cccggaggucgaggcugcagugg

SEQ ID NO: 106250 - RNA, 24 nt, Human
cccggaggugaccugggcucuggg

SEQ ID NO: 106251 - RNA, 18 nt, Human
cccggagguggcagcagc

SEQ ID NO: 106252 - RNA, 21 nt, Human
cccggagucaggaggccgcag

SEQ ID NO: 106253 - RNA, 32 nt, Human
cccggaucaagaaacugcaggaagagaaaacu

SEQ ID NO: 106254 - RNA, 21 nt, Human
cccggaucauucacugugaua

SEQ ID NO: 106255 - RNA, 32 nt, Human
cccggaugaccagaggccccuugaaaaggagg

SEQ ID NO: 106256 - RNA, 32 nt, Human
cccggauucugagcucagugugguguuuggug

SEQ ID NO: 106257 - RNA, 18 nt, Human
cccggcaaggcuggccag

SEQ ID NO: 106258 - RNA, 19 nt, Human
cccggcaagugccuggggc

SEQ ID NO: 106259 - RNA, 32 nt, Human
cccggcacaggauggggcaggcucuggcacag

SEQ ID NO: 106260 - RNA, 21 nt, Human
cccggcacagugagcggagcg

SEQ ID NO: 106261 - RNA, 26 nt, Human
cccggcaccauggcuacuaccggggc

SEQ ID NO: 106262 - RNA, 32 nt, Human
cccggcaccaugucggagaaaagcguggaggc

SEQ ID NO: 106263 - RNA, 27 nt, Human
cccggcacccugcuccaucggcacugg

SEQ ID NO: 106264 - RNA, 32 nt, Human
cccggcaccucccccgccccugcccaccgccc

SEQ ID NO: 106265 - RNA, 32 nt, Human
cccggcacggcaagaggagcaagagcaaggac

SEQ ID NO: 106266 - RNA, 20 nt, Human
cccggcacggggaggcgcgg

SEQ ID NO: 106267 - RNA, 32 nt, Human
cccggcacugccacguuuuccaaggaaccugc

SEQ ID NO: 106268 - RNA, 32 nt, Human
cccggcacuggcaggggaaaagggcagacugg

SEQ ID NO: 106269 - RNA, 22 nt, Human
cccggcagaccccgcuggccgc

SEQ ID NO: 106270 - RNA, 18 nt, Human
cccggcagacgggugcag

SEQ ID NO: 106271 - RNA, 32 nt, Human
cccggcagaggaaggaucagagggucgcggcc

SEQ ID NO: 106272 - RNA, 32 nt, Human
cccggcagaugcuugcccaguaguucuggagg

SEQ ID NO: 106273 - RNA, 24 nt, Human
cccggcagcagcccccagcuccca

SEQ ID NO: 106274 - RNA, 32 nt, Human
cccggcagcccccauccaucugugucugucug

SEQ ID NO: 106275 - RNA, 32 nt, Human
cccggcagccgcugccccgggcucgacugggc

SEQ ID NO: 106276 - RNA, 32 nt, Human
cccggcagccuccccucgcucgcucuccucuu

SEQ ID NO: 106277 - RNA, 21 nt, Human
cccggcagcggcagcggcagc

SEQ ID NO: 106278 - RNA, 22 nt, Human
cccggcagcggcagcggcagcg

SEQ ID NO: 106279 - RNA, 32 nt, Human
cccggcagcugcagccccuuccagaugaagac

SEQ ID NO: 106280 - RNA, 20 nt, Human
cccggcaggaggaagcccag

SEQ ID NO: 106281 - RNA, 18 nt, Human
cccggcaggaggccgcgg

SEQ ID NO: 106282 - RNA, 32 nt, Human
cccggcaggagggagagggcacaccgccagcc

SEQ ID NO: 106283 - RNA, 32 nt, Human
cccggcaggcagagcuugcagugagccgagau

SEQ ID NO: 106284 - RNA, 24 nt, Human
cccggcaggcagagguugcaguga

SEQ ID NO: 106285 - RNA, 32 nt, Human
cccggcaggcagagguugcagugagccgagau

SEQ ID NO: 106286 - RNA, 17 nt, Human
cccggcaggcccaggcc

SEQ ID NO: 106287 - RNA, 23 nt, Human
cccggcaggcggagguugcagug

SEQ ID NO: 106288 - RNA, 24 nt, Human
cccggcaggcggagguugcaguga

SEQ ID NO: 106289 - RNA, 32 nt, Human
cccggcaggcggagguugcagugagcggagau

SEQ ID NO: 106290 - RNA, 32 nt, Human
cccggcagggaggcagggaggcugcagaguca

SEQ ID NO: 106291 - RNA, 19 nt, Human
cccggcagggcgugcgcag

SEQ ID NO: 106292 - RNA, 24 nt, Human
cccggcaggggugggaggcagcag

SEQ ID NO: 106293 - RNA, 21 nt, Human
cccggcagucucuggggcgca

SEQ ID NO: 106294 - RNA, 32 nt, Human
cccggcagugccuguagcaccgaggagcaaag

SEQ ID NO: 106295 - RNA, 32 nt, Human
cccggcaguggacucgcugauccugggccgca

SEQ ID NO: 106296 - RNA, 32 nt, Human
cccggcaucucaggcugcuucuggacagagca

SEQ ID NO: 106297 - RNA, 22 nt, Human
cccggcaugcauuuggcauugg

SEQ ID NO: 106298 - RNA, 32 nt, Human
cccggcaugguggcucacaccuguaaucccag

SEQ ID NO: 106299 - RNA, 32 nt, Human
cccggcaugguggcucaugccuguaaucccag

SEQ ID NO: 106300 - RNA, 32 nt, Human
cccggcauuauggggacagagagcagggggca

SEQ ID NO: 106301 - RNA, 32 nt, Human
cccggcauugacuggcauagguggugagcccg

SEQ ID NO: 106302 - RNA, 32 nt, Human
cccggccaacagcaacaccggaugccgggaga

SEQ ID NO: 106303 - RNA, 32 nt, Human
cccggccaacagcucacuagcuggcaagcagu

SEQ ID NO: 106304 - RNA, 24 nt, Human
cccggccaagcccagucacgagaa

SEQ ID NO: 106305 - RNA, 20 nt, Human
cccggccaaggacccaggcg

SEQ ID NO: 106306 - RNA, 23 nt, Human
cccggccaaggacccaggcgcug

SEQ ID NO: 106307 - RNA, 32 nt, Human
cccggccaaguauuuuuauauuucagaucaua

SEQ ID NO: 106308 - RNA, 32 nt, Human
cccggccaccacugcuggcuucagccccuuga

SEQ ID NO: 106309 - RNA, 16 nt, Human
cccggccaccgcugcc

SEQ ID NO: 106310 - RNA, 32 nt, Human
cccggccaccuccuguccaggucuccaucccc

SEQ ID NO: 106311 - RNA, 19 nt, Human
cccggccacggcgggcacu

SEQ ID NO: 106312 - RNA, 20 nt, Human
cccggccacggggggcgcug

SEQ ID NO: 106313 - RNA, 24 nt, Human
cccggccacuccaucaggcacuga

SEQ ID NO: 106314 - RNA, 20 nt, Human
cccggccacuccucugacac

SEQ ID NO: 106315 - RNA, 21 nt, Human
cccggccacucgggaggcuga

SEQ ID NO: 106316 - RNA, 32 nt, Human
cccggccacugcaggaugcccaccugggccac

SEQ ID NO: 106317 - RNA, 32 nt, Human
cccggccagcacuaugcccaucuuacuguucc

SEQ ID NO: 106318 - RNA, 32 nt, Human
cccggccagcaggaccuggccugcagauccca

SEQ ID NO: 106319 - RNA, 32 nt, Human
cccggccagugccucugcuuccggcucgaauu

SEQ ID NO: 106320 - RNA, 32 nt, Human
cccggccauaucccccaugcuuuccgggccuc

SEQ ID NO: 106321 - RNA, 32 nt, Human
cccggccaucauuccuuuuuacugcugacuaa

SEQ ID NO: 106322 - RNA, 32 nt, Human
cccggccauccagcggggcugccagagaaccc

SEQ ID NO: 106323 - RNA, 32 nt, Human
cccggccauggccaccaccagcaccacgggcu

SEQ ID NO: 106324 - RNA, 32 nt, Human
cccggccauucaaccacugcagccacugguua

SEQ ID NO: 106325 - RNA, 32 nt, Human
cccggcccaaccucgcccucucucaccagccu

SEQ ID NO: 106326 - RNA, 17 nt, Human
cccggcccaacuggaug

SEQ ID NO: 106327 - RNA, 32 nt, Human
cccggcccaagccaggcgcuagaagggcuggu

SEQ ID NO: 106328 - RNA, 22 nt, Human
cccggcccaaucuuugguccca

SEQ ID NO: 106329 - RNA, 23 nt, Human
cccggcccacaauuaauuuuaga

SEQ ID NO: 106330 - RNA, 32 nt, Human
cccggccccaaaccacaggggcucaggucgug

SEQ ID NO: 106331 - RNA, 23 nt, Human
cccggccccacuccuggcucuca

SEQ ID NO: 106332 - RNA, 24 nt, Human
cccggccccagccagccccgacgg

SEQ ID NO: 106333 - RNA, 32 nt, Human
cccggccccagccauggaagagcucacggcuu

SEQ ID NO: 106334 - RNA, 32 nt, Human
cccggccccagccucagcccugagcgucucgg

SEQ ID NO: 106335 - RNA, 22 nt, Human
cccggccccagcuucucugguc

SEQ ID NO: 106336 - RNA, 32 nt, Human
cccggccccagugcccuuucgcggccacaagc

SEQ ID NO: 106337 - RNA, 21 nt, Human
cccggcccccacccuguccag

SEQ ID NO: 106338 - RNA, 22 nt, Human
cccggcccccaggucgcagcag

SEQ ID NO: 106339 - RNA, 22 nt, Human
cccggcccccaugcagccccug

SEQ ID NO: 106340 - RNA, 22 nt, Human
cccggcccccgccaggccgcgu

SEQ ID NO: 106341 - RNA, 24 nt, Human
cccggcccccggccccgggcccag

SEQ ID NO: 106342 - RNA, 32 nt, Human
cccggcccccuccaacguccccagcauugccc

SEQ ID NO: 106343 - RNA, 20 nt, Human
cccggcccccugccacugcc

SEQ ID NO: 106344 - RNA, 32 nt, Human
cccggcccccuucaccccuucagccgagccca

SEQ ID NO: 106345 - RNA, 20 nt, Human
cccggccccgaagcuccgcc

SEQ ID NO: 106346 - RNA, 21 nt, Human
cccggccccgccgagccacag

SEQ ID NO: 106347 - RNA, 19 nt, Human
cccggccccggaggagccc

SEQ ID NO: 106348 - RNA, 21 nt, Human
cccggccccggccccagccag

SEQ ID NO: 106349 - RNA, 20 nt, Human
cccggccccggcugccagca

SEQ ID NO: 106350 - RNA, 21 nt, Human
cccggccccgggcucugagcg

SEQ ID NO: 106351 - RNA, 21 nt, Human
cccggccccguagagucccug

SEQ ID NO: 106352 - RNA, 25 nt, Human
cccggccccgugcggccacugcgga

SEQ ID NO: 106353 - RNA, 32 nt, Human
cccggccccuaccuccuaccaccagcuccucu

SEQ ID NO: 106354 - RNA, 21 nt, Human
cccggccccuagcaccgccgg

SEQ ID NO: 106355 - RNA, 32 nt, Human
cccggccccuccccucucccucccucuguccc

SEQ ID NO: 106356 - RNA, 24 nt, Human
cccggccccuccucagcagcgcag

SEQ ID NO: 106357 - RNA, 32 nt, Human
cccggccccucgggccucugcacagccucuuu

SEQ ID NO: 106358 - RNA, 28 nt, Human
cccggccccugagcugccuccuccagcc

SEQ ID NO: 106359 - RNA, 32 nt, Human
cccggccccugccccucccuccggguggaacu

SEQ ID NO: 106360 - RNA, 32 nt, Human
cccggccccugcccgggcuggaguugccacag

SEQ ID NO: 106361 - RNA, 32 nt, Human
cccggccccugccgcccugccacuaugucccg

SEQ ID NO: 106362 - RNA, 32 nt, Human
cccggccccugugcuggagauaccaagggcau

SEQ ID NO: 106363 - RNA, 21 nt, Human
cccggcccgacucuaucacaa

SEQ ID NO: 106364 - RNA, 18 nt, Human
cccggcccgcgcaggacc

SEQ ID NO: 106365 - RNA, 32 nt, Human
cccggcccggccacagcacaaaggaaagcgag

SEQ ID NO: 106366 - RNA, 32 nt, Human
cccggcccggcgccuucucucccuccgggggc

SEQ ID NO: 106367 - RNA, 20 nt, Human
cccggcccggcucggcccca

SEQ ID NO: 106368 - RNA, 32 nt, Human
cccggcccggcugaggccaucauggggaugcg

SEQ ID NO: 106369 - RNA, 32 nt, Human
cccggcccuaucuuacucuucucagcuucuca

SEQ ID NO: 106370 - RNA, 32 nt, Human
cccggcccucaagggacgcugucuggggccgg

SEQ ID NO: 106371 - RNA, 19 nt, Human
cccggcccucaccacugcc

SEQ ID NO: 106372 - RNA, 32 nt, Human
cccggcccuccagccagccuucugccggcccc

SEQ ID NO: 106373 - RNA, 21 nt, Human
cccggcccugcgccccgccga

SEQ ID NO: 106374 - RNA, 27 nt, Human
cccggcccugcuuuuauuuauuuugga

SEQ ID NO: 106375 - RNA, 32 nt, Human
cccggcccuggcccagccagcccagcccucga

SEQ ID NO: 106376 - RNA, 32 nt, Human
cccggcccuuccagauucgccugugagcgaug

SEQ ID NO: 106377 - RNA, 32 nt, Human
cccggcccuucccucacuuccauccaucucua

SEQ ID NO: 106378 - RNA, 32 nt, Human
cccggccgacagggcuggacggcucuaggcag

SEQ ID NO: 106379 - RNA, 23 nt, Human
cccggccgaccauccccgugccc

SEQ ID NO: 106380 - RNA, 32 nt, Human
cccggccgagcgggcagggagagccaguccug

SEQ ID NO: 106381 - RNA, 23 nt, Human
cccggccgccaaggcaggcuugg

SEQ ID NO: 106382 - RNA, 32 nt, Human
cccggccgccaggcgccucuacuccaggaugg

SEQ ID NO: 106383 - RNA, 32 nt, Human
cccggccgccccuccguucccagccugcccug

SEQ ID NO: 106384 - RNA, 32 nt, Human
cccggccgcccgcgcggggucucccccauggu

SEQ ID NO: 106385 - RNA, 17 nt, Human
cccggccgccgcuuccg

SEQ ID NO: 106386 - RNA, 19 nt, Human
cccggccgccggcccggca

SEQ ID NO: 106387 - RNA, 23 nt, Human
cccggccgccggccgggagcugg

SEQ ID NO: 106388 - RNA, 26 nt, Human
cccggccgcucagcccccgggcacug

SEQ ID NO: 106389 - RNA, 21 nt, Human
cccggccgcuccccgaggcgc

SEQ ID NO: 106390 - RNA, 22 nt, Human
cccggccgcuccgggccccugg

SEQ ID NO: 106391 - RNA, 22 nt, Human
cccggccgcugcaaggcucugg

SEQ ID NO: 106392 - RNA, 22 nt, Human
cccggccgggcgcaggggcugg

SEQ ID NO: 106393 - RNA, 32 nt, Human
cccggccggucucacccugggcucagcaugag

SEQ ID NO: 106394 - RNA, 17 nt, Human
cccggccgucgccgccg

SEQ ID NO: 106395 - RNA, 32 nt, Human
cccggccgucuucgcccccucucccccuccuu

SEQ ID NO: 106396 - RNA, 32 nt, Human
cccggccuaaccaggcuggagugcaguggugg

SEQ ID NO: 106397 - RNA, 32 nt, Human
cccggccuaaguagcugguuuuauaaggcggc

SEQ ID NO: 106398 - RNA, 24 nt, Human
cccggccuauuuauaauuuuuuga

SEQ ID NO: 106399 - RNA, 32 nt, Human
cccggccuccccucgcucugaggcucgggguc

SEQ ID NO: 106400 - RNA, 32 nt, Human
cccggccuccccucucauuuaugaugcccucu

SEQ ID NO: 106401 - RNA, 32 nt, Human
cccggccucccucccaccccuucuuauuuauu

SEQ ID NO: 106402 - RNA, 32 nt, Human
cccggccuccgcccucuccuccucuccuuucc

SEQ ID NO: 106403 - RNA, 17 nt, Human
cccggccuccgcugccg

SEQ ID NO: 106404 - RNA, 32 nt, Human
cccggccuccugaguaccugggauuauaggca

SEQ ID NO: 106405 - RNA, 17 nt, Human
cccggccucgccuggcg

SEQ ID NO: 106406 - RNA, 24 nt, Human
cccggccucggaugccacugccga

SEQ ID NO: 106407 - RNA, 32 nt, Human
cccggccucucucuucccagcugcagaugcca

SEQ ID NO: 106408 - RNA, 24 nt, Human
cccggccucugcccuggcaugguc

SEQ ID NO: 106409 - RNA, 32 nt, Human
cccggccucugccucuuguuaauuugaccaca

SEQ ID NO: 106410 - RNA, 32 nt, Human
cccggccugaacuaaggagcaguggcagaagg

SEQ ID NO: 106411 - RNA, 22 nt, Human
cccggccugacagaaucaagaa

SEQ ID NO: 106412 - RNA, 32 nt, Human
cccggccugcacccucuuucuugucucucagg

SEQ ID NO: 106413 - RNA, 17 nt, Human
cccggccugcagcaguu

SEQ ID NO: 106414 - RNA, 32 nt, Human
cccggccugcagcguccccgacgugcuccgcc

SEQ ID NO: 106415 - RNA, 32 nt, Human
cccggccugccccugucgccacguggacaguc

SEQ ID NO: 106416 - RNA, 32 nt, Human
cccggccugccugagcccugaugcugcuguca

SEQ ID NO: 106417 - RNA, 32 nt, Human
cccggccugccugggccugggccuugguucuc

SEQ ID NO: 106418 - RNA, 20 nt, Human
cccggccugcuccacuucua

SEQ ID NO: 106419 - RNA, 20 nt, Human
cccggccuggagugcagugg

SEQ ID NO: 106420 - RNA, 24 nt, Human
cccggccuggaugccagcuguguc

SEQ ID NO: 106421 - RNA, 22 nt, Human
cccggccugggucaucaggcac

SEQ ID NO: 106422 - RNA, 32 nt, Human
cccggccuggguggcgccagcaggcuuggaca

SEQ ID NO: 106423 - RNA, 32 nt, Human
cccggccuguuccccagcccugccuggaagcc

SEQ ID NO: 106424 - RNA, 32 nt, Human
cccggccuucucccgcuccugagggcuguggc

SEQ ID NO: 106425 - RNA, 32 nt, Human
cccggcgaccuccacccucaucacccugcugg

SEQ ID NO: 106426 - RNA, 19 nt, Human
cccggcgacgugggccgcg

SEQ ID NO: 106427 - RNA, 32 nt, Human
cccggcgaggacaagagcagggcggccgccuu

SEQ ID NO: 106428 - RNA, 32 nt, Human
cccggcgaggggcaagcgggggacccagccgg

SEQ ID NO: 106429 - RNA, 32 nt, Human
cccggcgcaccaccagcaccaccagccccagg

SEQ ID NO: 106430 - RNA, 19 nt, Human
cccggcgcagcagcagcag

SEQ ID NO: 106431 - RNA, 32 nt, Human
cccggcgcagcgggagcggcggggcgugccug

SEQ ID NO: 106432 - RNA, 20 nt, Human
cccggcgcagcuccggcagc

SEQ ID NO: 106433 - RNA, 20 nt, Human
cccggcgcaggcccggcagc

SEQ ID NO: 106434 - RNA, 32 nt, Human
cccggcgcaguggcucacaccuguaaucucag

SEQ ID NO: 106435 - RNA, 32 nt, Human
cccggcgcaguggcucaugccuguaaucccag

SEQ ID NO: 106436 - RNA, 23 nt, Human
cccggcgccaggagggggugcag

SEQ ID NO: 106437 - RNA, 22 nt, Human
cccggcgccccuaggacagcgu

SEQ ID NO: 106438 - RNA, 23 nt, Human
cccggcgccgccagcagcagcag

SEQ ID NO: 106439 - RNA, 25 nt, Human
cccggcgccgccagcagcagcagcg

SEQ ID NO: 106440 - RNA, 20 nt, Human
cccggcgccgcccgcucggc

SEQ ID NO: 106441 - RNA, 19 nt, Human
cccggcgccgccgccgccg

SEQ ID NO: 106442 - RNA, 23 nt, Human
cccggcgccuacgcagcagcggc

SEQ ID NO: 106443 - RNA, 23 nt, Human
cccggcgccuccguuagggcugg

SEQ ID NO: 106444 - RNA, 22 nt, Human
cccggcgccugcacgcggcgcg

SEQ ID NO: 106445 - RNA, 32 nt, Human
cccggcgccugggccuacccagcuucgggcuc

SEQ ID NO: 106446 - RNA, 32 nt, Human
cccggcgcgauggcucacgccuguaaucccag

SEQ ID NO: 106447 - RNA, 19 nt, Human
cccggcgcgccgggccaug

SEQ ID NO: 106448 - RNA, 18 nt, Human
cccggcgcggccucgggg

SEQ ID NO: 106449 - RNA, 32 nt, Human
cccggcgcgggaggaggagcgggagccagccc

SEQ ID NO: 106450 - RNA, 32 nt, Human
cccggcgcggugccucaugccuguaaucccag

SEQ ID NO: 106451 - RNA, 19 nt, Human
cccggcgcguggggugcag

SEQ ID NO: 106452 - RNA, 25 nt, Human
cccggcgcucuccuggcucccuucu

SEQ ID NO: 106453 - RNA, 32 nt, Human
cccggcgcugacuucgaggcccggcuauggac

SEQ ID NO: 106454 - RNA, 32 nt, Human
cccggcgcugugcucguccucccugcccaggg

SEQ ID NO: 106455 - RNA, 32 nt, Human
cccggcgcuuggaggcggaggagaagccauug

SEQ ID NO: 106456 - RNA, 24 nt, Human
cccggcggagcagcagcggccgcg

SEQ ID NO: 106457 - RNA, 32 nt, Human
cccggcggagcugagcgcccuggaagagcaga

SEQ ID NO: 106458 - RNA, 32 nt, Human
cccggcggaggugggagagagucaggcaggag

SEQ ID NO: 106459 - RNA, 32 nt, Human
cccggcggcaugagccgcagcgugcucgcccc

SEQ ID NO: 106460 - RNA, 32 nt, Human
cccggcggcccaggcacagaagggcagggcca

SEQ ID NO: 106461 - RNA, 32 nt, Human
cccggcggcgcgcuccagccgguguaggcgag

SEQ ID NO: 106462 - RNA, 23 nt, Human
cccggcggcuccggaguccggga

SEQ ID NO: 106463 - RNA, 23 nt, Human
cccggcggcugacagcagcagcg

SEQ ID NO: 106464 - RNA, 22 nt, Human
cccggcggcuuugugggcgcag

SEQ ID NO: 106465 - RNA, 22 nt, Human
cccggcgggcagagguugcagu

SEQ ID NO: 106466 - RNA, 24 nt, Human
cccggcgggcagagguugcaguaa

SEQ ID NO: 106467 - RNA, 20 nt, Human
cccggcgggcgcccccgggc

SEQ ID NO: 106468 - RNA, 22 nt, Human
cccggcgggcgggcucugggcg

SEQ ID NO: 106469 - RNA, 19 nt, Human
cccggcgggugggaggcgc

SEQ ID NO: 106470 - RNA, 22 nt, Human
cccggcggguugggaggggcag

SEQ ID NO: 106471 - RNA, 32 nt, Human
cccggcggugcuacccuccaccucccaccucc

SEQ ID NO: 106472 - RNA, 32 nt, Human
cccggcguacuggucgggcauggcggccaccu

SEQ ID NO: 106473 - RNA, 19 nt, Human
cccggcgucgugggccgcg

SEQ ID NO: 106474 - RNA, 32 nt, Human
cccggcgugcugguaauuccuacacuuguggg

SEQ ID NO: 106475 - RNA, 32 nt, Human
cccggcgugggcugccccagugccuuggaacc

SEQ ID NO: 106476 - RNA, 32 nt, Human
cccggcgugguggaucaugccuguaaucccag

SEQ ID NO: 106477 - RNA, 32 nt, Human
cccggcuaauuuuuguauuuuguauuuuuagu

SEQ ID NO: 106478 - RNA, 21 nt, Human
cccggcuacucgggaggcuga

SEQ ID NO: 106479 - RNA, 21 nt, Human
cccggcuacugcggguccugg

SEQ ID NO: 106480 - RNA, 21 nt, Human
cccggcuacuugggaggcuga

SEQ ID NO: 106481 - RNA, 22 nt, Human
cccggcuagucuccggcgcugg

SEQ ID NO: 106482 - RNA, 20 nt, Human
cccggcuaugggggcacuga

SEQ ID NO: 106483 - RNA, 32 nt, Human
cccggcucacugcaaccuccaccucccagguu

SEQ ID NO: 106484 - RNA, 32 nt, Human
cccggcucacugcaaccuccgccucccugguu

SEQ ID NO: 106485 - RNA, 32 nt, Human
cccggcucagccaggccaggauggcggggugg

SEQ ID NO: 106486 - RNA, 32 nt, Human
cccggcucaguguuggguuugcacuggugcac

SEQ ID NO: 106487 - RNA, 32 nt, Human
cccggcuccacuucuaggccauguuuugacuc

SEQ ID NO: 106488 - RNA, 16 nt, Human
cccggcuccagcauca

SEQ ID NO: 106489 - RNA, 20 nt, Human
cccggcucccccagccccca

SEQ ID NO: 106490 - RNA, 22 nt, Human
cccggcucccgccauccgccga

SEQ ID NO: 106491 - RNA, 32 nt, Human
cccggcuccugccugcgccucucccuccacac

SEQ ID NO: 106492 - RNA, 21 nt, Human
cccggcuccuggucaccuagg

SEQ ID NO: 106493 - RNA, 20 nt, Human
cccggcucgcccaccagccc

SEQ ID NO: 106494 - RNA, 32 nt, Human
cccggcucuccucccagcaucacaccagccau

SEQ ID NO: 106495 - RNA, 32 nt, Human
cccggcucuccucuccccuguccugcacccau

SEQ ID NO: 106496 - RNA, 32 nt, Human
cccggcucuggguucaagagcuugcugggcuu

SEQ ID NO: 106497 - RNA, 32 nt, Human
cccggcucuuagacuaaaaucaugcccaaguu

SEQ ID NO: 106498 - RNA, 19 nt, Human
cccggcugaagugcagugg

SEQ ID NO: 106499 - RNA, 28 nt, Human
cccggcugaauaaaccucuuccuucuuu

SEQ ID NO: 106500 - RNA, 32 nt, Human
cccggcugacccucugccccaguuggggcagg

SEQ ID NO: 106501 - RNA, 32 nt, Human
cccggcugagcgccccagcccgaaaggcaggg

SEQ ID NO: 106502 - RNA, 32 nt, Human
cccggcugcacucuagccgccgcgcccggagc

SEQ ID NO: 106503 - RNA, 32 nt, Human
cccggcugcacucuagccgccugggugugugg

SEQ ID NO: 106504 - RNA, 22 nt, Human
cccggcugcagauuacggagaa

SEQ ID NO: 106505 - RNA, 19 nt, Human
cccggcugcagcccaggcc

SEQ ID NO: 106506 - RNA, 17 nt, Human
cccggcugcagcugcac

SEQ ID NO: 106507 - RNA, 32 nt, Human
cccggcugcaggaagggaaggagccaaccccg

SEQ ID NO: 106508 - RNA, 32 nt, Human
cccggcugcccuggaagaccagucccagacac

SEQ ID NO: 106509 - RNA, 32 nt, Human
cccggcugccuuuuucaccucugacagagccc

SEQ ID NO: 106510 - RNA, 27 nt, Human
cccggcugcggcgcgcugcggcagggg

SEQ ID NO: 106511 - RNA, 17 nt, Human
cccggcugcugcccagg

SEQ ID NO: 106512 - RNA, 21 nt, Human
cccggcugcugcugggccugg

SEQ ID NO: 106513 - RNA, 19 nt, Human
cccggcuggagugcagugg

SEQ ID NO: 106514 - RNA, 21 nt, Human
cccggcuggcuggcucgcucu

SEQ ID NO: 106515 - RNA, 32 nt, Human
cccggcuggucaccagggauucaacugccucu

SEQ ID NO: 106516 - RNA, 32 nt, Human
cccggcugugugauccugggcaagaacuugac

SEQ ID NO: 106517 - RNA, 32 nt, Human
cccggcuguugacacuggacguguauccuccu

SEQ ID NO: 106518 - RNA, 32 nt, Human
cccggcuuagaggaccaggaauggguaaucac

SEQ ID NO: 106519 - RNA, 32 nt, Human
cccggcuucagccucaaguucugaggucagag

SEQ ID NO: 106520 - RNA, 32 nt, Human
cccggcuucuccgcaggcuuuccucuucccca

SEQ ID NO: 106521 - RNA, 16 nt, Human
cccggcuucuggacca

SEQ ID NO: 106522 - RNA, 32 nt, Human
cccggcuugccuguaaucccagcacuuuggga

SEQ ID NO: 106523 - RNA, 32 nt, Human
cccggcuugccuguggccaucuucccacucuc

SEQ ID NO: 106524 - RNA, 31 nt, Human
cccggcuuggcaaucucagcugugccggcgc

SEQ ID NO: 106525 - RNA, 32 nt, Human
cccggcuuggccccuuccacacccaacugggg

SEQ ID NO: 106526 - RNA, 32 nt, Human
cccggcuugucccagccccucuuuugcuucug

SEQ ID NO: 106527 - RNA, 32 nt, Human
cccggcuuugggccaggaaaggcuuccccagg

SEQ ID NO: 106528 - RNA, 32 nt, Human
cccggcuuuuggaggacauugucuccuggagc

SEQ ID NO: 106529 - RNA, 23 nt, Human
cccgggaaagguacagcccuguc

SEQ ID NO: 106530 - RNA, 18 nt, Human
cccgggaacaacaggugg

SEQ ID NO: 106531 - RNA, 32 nt, Human
cccgggaacccauggaaggagaagcgagguga

SEQ ID NO: 106532 - RNA, 19 nt, Human
cccgggaagaaccaugugg

SEQ ID NO: 106533 - RNA, 24 nt, Human
cccgggaagcagagguugcaguga

SEQ ID NO: 106534 - RNA, 32 nt, Human
cccgggaagcagagguugcagugacagagauc

SEQ ID NO: 106535 - RNA, 24 nt, Human
cccgggaagcagagguugcgguga

SEQ ID NO: 106536 - RNA, 24 nt, Human
cccgggaagcagagucugcaguga

SEQ ID NO: 106537 - RNA, 32 nt, Human
cccgggaagccgcggcgagcgcggggaggcga

SEQ ID NO: 106538 - RNA, 24 nt, Human
cccgggaagcggagcuugcaguga

SEQ ID NO: 106539 - RNA, 32 nt, Human
cccgggaagcggagcuugcagugagccgagau

SEQ ID NO: 106540 - RNA, 24 nt, Human
cccgggaagcggagguugcaggga

SEQ ID NO: 106541 - RNA, 32 nt, Human
cccgggaagcggagguugcagugagccaagau

SEQ ID NO: 106542 - RNA, 32 nt, Human
cccgggaagcggagguugcagugagccgagau

SEQ ID NO: 106543 - RNA, 32 nt, Human
cccgggaaggcggaaguugcagugagccgagu

SEQ ID NO: 106544 - RNA, 32 nt, Human
cccgggaaguggaggcuggaguaaaccaugau

SEQ ID NO: 106545 - RNA, 24 nt, Human
cccgggaaguggagguugcaguga

SEQ ID NO: 106546 - RNA, 32 nt, Human
cccgggaaguggagguugcagugagccaagau

SEQ ID NO: 106547 - RNA, 32 nt, Human
cccgggacagccagggcggcagggaggccccu

SEQ ID NO: 106548 - RNA, 32 nt, Human
cccgggaccccuggccggaaacugagccguuc

SEQ ID NO: 106549 - RNA, 32 nt, Human
cccgggaccucggcaggauggaagagaagcug

SEQ ID NO: 106550 - RNA, 32 nt, Human
cccgggaccucuuaauuacuaaccucaguacu

SEQ ID NO: 106551 - RNA, 32 nt, Human
cccgggaccugcugcugcuccagccaugucca

SEQ ID NO: 106552 - RNA, 32 nt, Human
cccgggacgaggaggaggaggaggaagagggg

SEQ ID NO: 106553 - RNA, 24 nt, Human
cccgggacgcagagguuacaguga

SEQ ID NO: 106554 - RNA, 24 nt, Human
cccgggacgcagggguugcaguga

SEQ ID NO: 106555 - RNA, 32 nt, Human
cccgggacgcagggguugcagugagcggagau

SEQ ID NO: 106556 - RNA, 32 nt, Human
cccgggacgcugggccaugagcuccgcggccc

SEQ ID NO: 106557 - RNA, 24 nt, Human
cccgggacucagccagccucgccu

SEQ ID NO: 106558 - RNA, 24 nt, Human
cccgggacuucaaugcugcaguga

SEQ ID NO: 106559 - RNA, 32 nt, Human
cccgggagacgaggagggcgggcagggaggug

SEQ ID NO: 106560 - RNA, 32 nt, Human
cccgggagacggagcuugcaguaagccgagau

SEQ ID NO: 106561 - RNA, 24 nt, Human
cccgggagacggagguugcaguga

SEQ ID NO: 106562 - RNA, 32 nt, Human
cccgggagacggagguugcagugagcugagau

SEQ ID NO: 106563 - RNA, 24 nt, Human
cccgggagacggcgcuugcaguga

SEQ ID NO: 106564 - RNA, 32 nt, Human
cccgggagacggcgcuugcagugagccgagau

SEQ ID NO: 106565 - RNA, 21 nt, Human
cccgggagacggcgggcauga

SEQ ID NO: 106566 - RNA, 25 nt, Human
cccgggagacgggagguugugguga

SEQ ID NO: 106567 - RNA, 22 nt, Human
cccgggagagaggacgaagcga

SEQ ID NO: 106568 - RNA, 32 nt, Human
cccgggagaggcugcugcagucccgggacagg

SEQ ID NO: 106569 - RNA, 24 nt, Human
cccgggagagggagguugcaguga

SEQ ID NO: 106570 - RNA, 32 nt, Human
cccgggagagugaagggccggggaggacaagg

SEQ ID NO: 106571 - RNA, 32 nt, Human
cccgggagauggcgcuugcagugagcugagau

SEQ ID NO: 106572 - RNA, 24 nt, Human
cccgggagauugaggcugcgguga

SEQ ID NO: 106573 - RNA, 23 nt, Human
cccgggagcagagacugcaguga

SEQ ID NO: 106574 - RNA, 32 nt, Human
cccgggagcaucaccgcuuucuggaccugucc

SEQ ID NO: 106575 - RNA, 32 nt, Human
cccgggagccaugguccgcuucggggacgagc

SEQ ID NO: 106576 - RNA, 23 nt, Human
cccgggagccgagcuugcagcga

SEQ ID NO: 106577 - RNA, 23 nt, Human
cccgggagccgggcuggcuagga

SEQ ID NO: 106578 - RNA, 32 nt, Human
cccgggagccuccucaggcucccucuauuaaa

SEQ ID NO: 106579 - RNA, 32 nt, Human
cccgggagccuugccgcacugccuugugggug

SEQ ID NO: 106580 - RNA, 22 nt, Human
cccgggagcgccagcugcguga

SEQ ID NO: 106581 - RNA, 32 nt, Human
cccgggagcgcgagcgggaggagcagagaccc

SEQ ID NO: 106582 - RNA, 23 nt, Human
cccgggagcggagcuugcaguga

SEQ ID NO: 106583 - RNA, 23 nt, Human
cccgggagcggagguugcaguga

SEQ ID NO: 106584 - RNA, 18 nt, Human
cccgggagcugcaggugg

SEQ ID NO: 106585 - RNA, 18 nt, Human
cccgggagcugggcccug

SEQ ID NO: 106586 - RNA, 32 nt, Human
cccgggaggaagagcuugcagugagccgagau

SEQ ID NO: 106587 - RNA, 24 nt, Human
cccgggaggaggagcuugcaguga

SEQ ID NO: 106588 - RNA, 32 nt, Human
cccgggaggaggagcuugcagugagccgagau

SEQ ID NO: 106589 - RNA, 32 nt, Human
cccgggaggaggaggaggagguugcagugagc

SEQ ID NO: 106590 - RNA, 32 nt, Human
cccgggaggaggaggcggcgagaauggcagcg

SEQ ID NO: 106591 - RNA, 24 nt, Human
cccgggaggcaaagguugcaguga

SEQ ID NO: 106592 - RNA, 32 nt, Human
cccgggaggcaaagguugcagugagcugagau

SEQ ID NO: 106593 - RNA, 22 nt, Human
cccgggaggcaaagguugcggu

SEQ ID NO: 106594 - RNA, 24 nt, Human
cccgggaggcaaagguugcgguaa

SEQ ID NO: 106595 - RNA, 24 nt, Human
cccgggaggcacagguuccagugg

SEQ ID NO: 106596 - RNA, 22 nt, Human
cccgggaggcagaaccaggcag

SEQ ID NO: 106597 - RNA, 24 nt, Human
cccgggaggcagaaccugcaguga

SEQ ID NO: 106598 - RNA, 24 nt, Human
cccgggaggcagaaguugcaguga

SEQ ID NO: 106599 - RNA, 32 nt, Human
cccgggaggcagaccuugcagugagccaagau

SEQ ID NO: 106600 - RNA, 24 nt, Human
cccgggaggcagacuuugcaguga

SEQ ID NO: 106601 - RNA, 32 nt, Human
cccgggaggcagacuuugcagugagcugagau

SEQ ID NO: 106602 - RNA, 22 nt, Human
cccgggaggcagagauugcagu

SEQ ID NO: 106603 - RNA, 24 nt, Human
cccgggaggcagagauugcaguaa

SEQ ID NO: 106604 - RNA, 32 nt, Human
cccgggaggcagagcuugcaguaagccgagag

SEQ ID NO: 106605 - RNA, 24 nt, Human
cccgggaggcagagcuugcaguga

SEQ ID NO: 106606 - RNA, 32 nt, Human
cccgggaggcagagcuugcagugagcagagau

SEQ ID NO: 106607 - RNA, 32 nt, Human
cccgggaggcagagcuugcagugagccaagau

SEQ ID NO: 106608 - RNA, 32 nt, Human
cccgggaggcagagcuugcagugagccgagau

SEQ ID NO: 106609 - RNA, 32 nt, Human
cccgggaggcagagcuugcagugagcugagau

SEQ ID NO: 106610 - RNA, 32 nt, Human
cccgggaggcagagcuugcagugagucgagau

SEQ ID NO: 106611 - RNA, 24 nt, Human
cccgggaggcagagcuugcgguga

SEQ ID NO: 106612 - RNA, 32 nt, Human
cccgggaggcagagcuugcggugagccgagau

SEQ ID NO: 106613 - RNA, 24 nt, Human
cccgggaggcagagcuugugguga

SEQ ID NO: 106614 - RNA, 20 nt, Human
cccgggaggcagaggcugca

SEQ ID NO: 106615 - RNA, 24 nt, Human
cccgggaggcagaggcugcaguga

SEQ ID NO: 106616 - RNA, 32 nt, Human
cccgggaggcagaggcugcagugagccgagau

SEQ ID NO: 106617 - RNA, 32 nt, Human
cccgggaggcagaggcugcagugagcugagau

SEQ ID NO: 106618 - RNA, 21 nt, Human
cccgggaggcagagggugcag

SEQ ID NO: 106619 - RNA, 22 nt, Human
cccgggaggcagagggugcagu

SEQ ID NO: 106620 - RNA, 24 nt, Human
cccgggaggcagagggugcaguaa

SEQ ID NO: 106621 - RNA, 24 nt, Human
cccgggaggcagagguagcaguga

SEQ ID NO: 106622 - RNA, 24 nt, Human
cccgggaggcagaggucaugguga

SEQ ID NO: 106623 - RNA, 24 nt, Human
cccgggaggcagagguggcuguga

SEQ ID NO: 106624 - RNA, 24 nt, Human
cccgggaggcagagguuacaguga

SEQ ID NO: 106625 - RNA, 24 nt, Human
cccgggaggcagagguuaucguga

SEQ ID NO: 106626 - RNA, 24 nt, Human
cccgggaggcagagguugaaguga

SEQ ID NO: 106627 - RNA, 24 nt, Human
cccgggaggcagagguugcacuga

SEQ ID NO: 106628 - RNA, 21 nt, Human
cccgggaggcagagguugcag

SEQ ID NO: 106629 - RNA, 23 nt, Human
cccgggaggcagagguugcagug

SEQ ID NO: 106630 - RNA, 24 nt, Human
cccgggaggcagagguugcaguga

SEQ ID NO: 106631 - RNA, 32 nt, Human
cccgggaggcagagguugcagugagccaagac

SEQ ID NO: 106632 - RNA, 32 nt, Human
cccgggaggcagagguugcagugagccaagau

SEQ ID NO: 106633 - RNA, 32 nt, Human
cccgggaggcagagguugcagugagccaugau

SEQ ID NO: 106634 - RNA, 32 nt, Human
cccgggaggcagagguugcagugagccgacau

SEQ ID NO: 106635 - RNA, 32 nt, Human
cccgggaggcagagguugcagugagccgagac

SEQ ID NO: 106636 - RNA, 32 nt, Human
cccgggaggcagagguugcagugagccgagau

SEQ ID NO: 106637 - RNA, 32 nt, Human
cccgggaggcagagguugcagugagccgugau

SEQ ID NO: 106638 - RNA, 32 nt, Human
cccgggaggcagagguugcagugagcugagac

SEQ ID NO: 106639 - RNA, 32 nt, Human
cccgggaggcagagguugcagugagcugagau

SEQ ID NO: 106640 - RNA, 32 nt, Human
cccgggaggcagagguugcagugagucgagau

SEQ ID NO: 106641 - RNA, 32 nt, Human
cccgggaggcagagguugcagugaguggagau

SEQ ID NO: 106642 - RNA, 28 nt, Human
cccgggaggcagagguugcaguguggug

SEQ ID NO: 106643 - RNA, 24 nt, Human
cccgggaggcagagguugcgguga

SEQ ID NO: 106644 - RNA, 22 nt, Human
cccgggaggcagagguugcugu

SEQ ID NO: 106645 - RNA, 24 nt, Human
cccgggaggcagagguugcuguaa

SEQ ID NO: 106646 - RNA, 24 nt, Human
cccgggaggcagagguuguaguga

SEQ ID NO: 106647 - RNA, 24 nt, Human
cccgggaggcagagguuguguuga

SEQ ID NO: 106648 - RNA, 24 nt, Human
cccgggaggcagagguuucaguga

SEQ ID NO: 106649 - RNA, 24 nt, Human
cccgggaggcagaguuugcaguga

SEQ ID NO: 106650 - RNA, 24 nt, Human
cccgggaggcagcaguugcaguga

SEQ ID NO: 106651 - RNA, 32 nt, Human
cccgggaggcagcaguugcagugagcugagau

SEQ ID NO: 106652 - RNA, 21 nt, Human
cccgggaggcagcuggggcag

SEQ ID NO: 106653 - RNA, 24 nt, Human
cccgggaggcagcuggggcagcag

SEQ ID NO: 106654 - RNA, 32 nt, Human
cccgggaggcaguggcugcagugagcugagau

SEQ ID NO: 106655 - RNA, 24 nt, Human
cccgggaggcauagcuugcaguga

SEQ ID NO: 106656 - RNA, 32 nt, Human
cccgggaggcauagcuugcagugagccgagau

SEQ ID NO: 106657 - RNA, 18 nt, Human
cccgggaggccgcggcca

SEQ ID NO: 106658 - RNA, 23 nt, Human
cccgggaggcggaacuugcagug

SEQ ID NO: 106659 - RNA, 24 nt, Human
cccgggaggcggaacuugcaguga

SEQ ID NO: 106660 - RNA, 32 nt, Human
cccgggaggcggaacuugcagugagccaagau

SEQ ID NO: 106661 - RNA, 23 nt, Human
cccgggaggcggaacuugcggug

SEQ ID NO: 106662 - RNA, 24 nt, Human
cccgggaggcggaacuugcgguga

SEQ ID NO: 106663 - RNA, 32 nt, Human
cccgggaggcggaacuugcggugagccgagau

SEQ ID NO: 106664 - RNA, 32 nt, Human
cccgggaggcggaaguuucagcgagccgagau

SEQ ID NO: 106665 - RNA, 32 nt, Human
cccgggaggcggagauugcagugagccaagau

SEQ ID NO: 106666 - RNA, 32 nt, Human
cccgggaggcggagauugcagugagcugagau

SEQ ID NO: 106667 - RNA, 23 nt, Human
cccgggaggcggagauugcggug

SEQ ID NO: 106668 - RNA, 24 nt, Human
cccgggaggcggagauugcgguga

SEQ ID NO: 106669 - RNA, 32 nt, Human
cccgggaggcggagauugcggugagccaagau

SEQ ID NO: 106670 - RNA, 32 nt, Human
cccgggaggcggagauugcggugagccgagau

SEQ ID NO: 106671 - RNA, 24 nt, Human
cccgggaggcggagcuuacaguga

SEQ ID NO: 106672 - RNA, 32 nt, Human
cccgggaggcggagcuuacagugagcugagau

SEQ ID NO: 106673 - RNA, 21 nt, Human
cccgggaggcggagcuugcag

SEQ ID NO: 106674 - RNA, 23 nt, Human
cccgggaggcggagcuugcagug

SEQ ID NO: 106675 - RNA, 24 nt, Human
cccgggaggcggagcuugcaguga

SEQ ID NO: 106676 - RNA, 32 nt, Human
cccgggaggcggagcuugcagugaaccgagau

SEQ ID NO: 106677 - RNA, 32 nt, Human
cccgggaggcggagcuugcagugagccaagau

SEQ ID NO: 106678 - RNA, 32 nt, Human
cccgggaggcggagcuugcagugagcccagau

SEQ ID NO: 106679 - RNA, 32 nt, Human
cccgggaggcggagcuugcagugagccgaaau

SEQ ID NO: 106680 - RNA, 32 nt, Human
cccgggaggcggagcuugcagugagccgagau

SEQ ID NO: 106681 - RNA, 32 nt, Human
cccgggaggcggagcuugcagugagccgaggu

SEQ ID NO: 106682 - RNA, 32 nt, Human
cccgggaggcggagcuugcagugagccuugau

SEQ ID NO: 106683 - RNA, 32 nt, Human
cccgggaggcggagcuugcagugagcggagau

SEQ ID NO: 106684 - RNA, 32 nt, Human
cccgggaggcggagcuugcagugagcugagau

SEQ ID NO: 106685 - RNA, 32 nt, Human
cccgggaggcggagcuugcggugggccgggau

SEQ ID NO: 106686 - RNA, 23 nt, Human
cccgggaggcggagcuuguagug

SEQ ID NO: 106687 - RNA, 24 nt, Human
cccgggaggcggagcuuguaguga

SEQ ID NO: 106688 - RNA, 32 nt, Human
cccgggaggcggagcuuguagugagccgagau

SEQ ID NO: 106689 - RNA, 24 nt, Human
cccgggaggcggagcuuucaguga

SEQ ID NO: 106690 - RNA, 24 nt, Human
cccgggaggcggaggcgcggggga

SEQ ID NO: 106691 - RNA, 20 nt, Human
cccgggaggcggaggcggga

SEQ ID NO: 106692 - RNA, 25 nt, Human
cccgggaggcggaggcgggaggcgg

SEQ ID NO: 106693 - RNA, 28 nt, Human
cccgggaggcggaggcgggaggcggcgg

SEQ ID NO: 106694 - RNA, 23 nt, Human
cccgggaggcggaggcugcagug

SEQ ID NO: 106695 - RNA, 24 nt, Human
cccgggaggcggaggcugcaguga

SEQ ID NO: 106696 - RNA, 32 nt, Human
cccgggaggcggaggcugcagugagccgagau

SEQ ID NO: 106697 - RNA, 32 nt, Human
cccgggaggcggaggcugcagugagucgagau

SEQ ID NO: 106698 - RNA, 32 nt, Human
cccgggaggcggaggcugcagugggccgggau

SEQ ID NO: 106699 - RNA, 24 nt, Human
cccgggaggcggagguuacaguga

SEQ ID NO: 106700 - RNA, 32 nt, Human
cccgggaggcggagguuacagugagccgagau

SEQ ID NO: 106701 - RNA, 32 nt, Human
cccgggaggcggagguuacagugagccuuuuc

SEQ ID NO: 106702 - RNA, 32 nt, Human
cccgggaggcggagguuacagugagcugagau

SEQ ID NO: 106703 - RNA, 24 nt, Human
cccgggaggcggagguuauggaga

SEQ ID NO: 106704 - RNA, 22 nt, Human
cccgggaggcggagguucaugg

SEQ ID NO: 106705 - RNA, 24 nt, Human
cccgggaggcggagguuccaguga

SEQ ID NO: 106706 - RNA, 32 nt, Human
cccgggaggcggagguuccagugagccgagau

SEQ ID NO: 106707 - RNA, 32 nt, Human
cccgggaggcggagguugagcaacuacacugc

SEQ ID NO: 106708 - RNA, 22 nt, Human
cccgggaggcggagguugcagu

SEQ ID NO: 106709 - RNA, 24 nt, Human
cccgggaggcggagguugcaguaa

SEQ ID NO: 106710 - RNA, 32 nt, Human
cccgggaggcggagguugcaguaagccgagac

SEQ ID NO: 106711 - RNA, 32 nt, Human
cccgggaggcggagguugcaguaagccgagau

SEQ ID NO: 106712 - RNA, 32 nt, Human
cccgggaggcggagguugcagucagccgagau

SEQ ID NO: 106713 - RNA, 23 nt, Human
cccgggaggcggagguugcagug

SEQ ID NO: 106714 - RNA, 24 nt, Human
cccgggaggcggagguugcaguga

SEQ ID NO: 106715 - RNA, 32 nt, Human
cccgggaggcggagguugcagugagccaagau

SEQ ID NO: 106716 - RNA, 32 nt, Human
cccgggaggcggagguugcagugagccgaaau

SEQ ID NO: 106717 - RNA, 32 nt, Human
cccgggaggcggagguugcagugagccgagau

SEQ ID NO: 106718 - RNA, 32 nt, Human
cccgggaggcggagguugcagugagccuggau

SEQ ID NO: 106719 - RNA, 32 nt, Human
cccgggaggcggagguugcagugagcuaagau

SEQ ID NO: 106720 - RNA, 32 nt, Human
cccgggaggcggagguugcagugagcugagau

SEQ ID NO: 106721 - RNA, 32 nt, Human
cccgggaggcggagguugcagugagguaagau

SEQ ID NO: 106722 - RNA, 32 nt, Human
cccgggaggcggagguugcagugagucaaggu

SEQ ID NO: 106723 - RNA, 32 nt, Human
cccgggaggcggagguugcaguuagccaagau

SEQ ID NO: 106724 - RNA, 23 nt, Human
cccgggaggcggagguugcauga

SEQ ID NO: 106725 - RNA, 32 nt, Human
cccgggaggcggagguugcaugagcugagauc

SEQ ID NO: 106726 - RNA, 23 nt, Human
cccgggaggcggagguugccgug

SEQ ID NO: 106727 - RNA, 24 nt, Human
cccgggaggcggagguugccguga

SEQ ID NO: 106728 - RNA, 32 nt, Human
cccgggaggcggagguugccgugagucgagau

SEQ ID NO: 106729 - RNA, 23 nt, Human
cccgggaggcggagguugcggug

SEQ ID NO: 106730 - RNA, 24 nt, Human
cccgggaggcggagguugcgguga

SEQ ID NO: 106731 - RNA, 32 nt, Human
cccgggaggcggagguugcggugagccaagau

SEQ ID NO: 106732 - RNA, 32 nt, Human
cccgggaggcggagguugcggugagccgagau

SEQ ID NO: 106733 - RNA, 23 nt, Human
cccgggaggcggagguuguagug

SEQ ID NO: 106734 - RNA, 24 nt, Human
cccgggaggcggagguuguaguga

SEQ ID NO: 106735 - RNA, 32 nt, Human
cccgggaggcggagguuguagugagccgagau

SEQ ID NO: 106736 - RNA, 23 nt, Human
cccgggaggcggagguuguggug

SEQ ID NO: 106737 - RNA, 24 nt, Human
cccgggaggcggagguugugguga

SEQ ID NO: 106738 - RNA, 32 nt, Human
cccgggaggcggagguuguggugagccaagau

SEQ ID NO: 106739 - RNA, 32 nt, Human
cccgggaggcggagguuguggugagccgagau

SEQ ID NO: 106740 - RNA, 32 nt, Human
cccgggaggcggagguuguggugagcugaaau

SEQ ID NO: 106741 - RNA, 32 nt, Human
cccgggaggcggagguuguggugagcugagau

SEQ ID NO: 106742 - RNA, 24 nt, Human
cccgggaggcggagguuucaguga

SEQ ID NO: 106743 - RNA, 32 nt, Human
cccgggaggcggagguuucagugagccgagau

SEQ ID NO: 106744 - RNA, 22 nt, Human
cccgggaggcggaguugcggug

SEQ ID NO: 106745 - RNA, 23 nt, Human
cccgggaggcggaguugcgguga

SEQ ID NO: 106746 - RNA, 32 nt, Human
cccgggaggcggaguugcggugagccgagauc

SEQ ID NO: 106747 - RNA, 24 nt, Human
cccgggaggcggaguuugcagaga

SEQ ID NO: 106748 - RNA, 23 nt, Human
cccgggaggcggaguuugcagug

SEQ ID NO: 106749 - RNA, 24 nt, Human
cccgggaggcggaguuugcaguga

SEQ ID NO: 106750 - RNA, 32 nt, Human
cccgggaggcggaguuugcagugagccaagau

SEQ ID NO: 106751 - RNA, 20 nt, Human
cccgggaggcggaguuuugc

SEQ ID NO: 106752 - RNA, 23 nt, Human
cccgggaggcggaguuuugccag

SEQ ID NO: 106753 - RNA, 32 nt, Human
cccgggaggcggaucuugcagugagcggagau

SEQ ID NO: 106754 - RNA, 32 nt, Human
cccgggaggcggaucuugcauugagccaagau

SEQ ID NO: 106755 - RNA, 32 nt, Human
cccgggaggcggauguugcggugagccgaaau

SEQ ID NO: 106756 - RNA, 22 nt, Human
cccgggaggcggcggccggaga

SEQ ID NO: 106757 - RNA, 23 nt, Human
cccgggaggcggcgguugcagug

SEQ ID NO: 106758 - RNA, 24 nt, Human
cccgggaggcggcgguugcaguga

SEQ ID NO: 106759 - RNA, 23 nt, Human
cccgggaggcgggggcggggcgg

SEQ ID NO: 106760 - RNA, 23 nt, Human
cccgggaggcggggguugcagug

SEQ ID NO: 106761 - RNA, 24 nt, Human
cccgggaggcggggguugcaguga

SEQ ID NO: 106762 - RNA, 24 nt, Human
cccgggaggcuaagguugcaguga

SEQ ID NO: 106763 - RNA, 32 nt, Human
cccgggaggcuaagguugcagugagccgagac

SEQ ID NO: 106764 - RNA, 24 nt, Human
cccgggaggcugagguugcaguga

SEQ ID NO: 106765 - RNA, 32 nt, Human
cccgggaggcugagguugcagugaguggagau

SEQ ID NO: 106766 - RNA, 18 nt, Human
cccgggagggaaacuguc

SEQ ID NO: 106767 - RNA, 24 nt, Human
cccgggagggagagguugcaguga

SEQ ID NO: 106768 - RNA, 32 nt, Human
cccgggagggagagguugcagugagccaagau

SEQ ID NO: 106769 - RNA, 32 nt, Human
cccgggaggggcuccagcaggaggccgugggu

SEQ ID NO: 106770 - RNA, 24 nt, Human
cccgggagguagaggcugcaaugg

SEQ ID NO: 106771 - RNA, 24 nt, Human
cccgggagguagagguugcaguga

SEQ ID NO: 106772 - RNA, 32 nt, Human
cccgggagguagagguugcagugagccgagau

SEQ ID NO: 106773 - RNA, 24 nt, Human
cccgggagguagaguuugcaguga

SEQ ID NO: 106774 - RNA, 24 nt, Human
cccgggaggucaagguugcaguga

SEQ ID NO: 106775 - RNA, 24 nt, Human
cccgggaggucgaggcugcuguga

SEQ ID NO: 106776 - RNA, 32 nt, Human
cccgggaggugcagguugcagugagccaagau

SEQ ID NO: 106777 - RNA, 32 nt, Human
cccgggagguggaacuugcagugagccgagau

SEQ ID NO: 106778 - RNA, 23 nt, Human
cccgggagguggagauugcagug

SEQ ID NO: 106779 - RNA, 24 nt, Human
cccgggagguggagauugcaguga

SEQ ID NO: 106780 - RNA, 32 nt, Human
cccgggagguggagauugcagugagcccagau

SEQ ID NO: 106781 - RNA, 32 nt, Human
cccgggagguggagauugcagugagcugagau

SEQ ID NO: 106782 - RNA, 24 nt, Human
cccgggagguggagcuuccaguga

SEQ ID NO: 106783 - RNA, 32 nt, Human
cccgggagguggagcuuccagugagccgagau

SEQ ID NO: 106784 - RNA, 24 nt, Human
cccgggagguggagcuugcaguga

SEQ ID NO: 106785 - RNA, 32 nt, Human
cccgggagguggagcuugcagugagccaagau

SEQ ID NO: 106786 - RNA, 32 nt, Human
cccgggagguggagcuugcagugagccgagau

SEQ ID NO: 106787 - RNA, 32 nt, Human
cccgggagguggagcuugcagugagcggagau

SEQ ID NO: 106788 - RNA, 32 nt, Human
cccgggagguggagcuugcagugagcugagau

SEQ ID NO: 106789 - RNA, 32 nt, Human
cccgggagguggagcuugcagugagcugggau

SEQ ID NO: 106790 - RNA, 24 nt, Human
cccgggagguggagcuugcagugg

SEQ ID NO: 106791 - RNA, 32 nt, Human
cccgggagguggagcuugcaguggguggagau

SEQ ID NO: 106792 - RNA, 24 nt, Human
cccgggagguggagcuugcgguga

SEQ ID NO: 106793 - RNA, 32 nt, Human
cccgggagguggagcuugcggugagcugagau

SEQ ID NO: 106794 - RNA, 32 nt, Human
cccgggagguggagcuuguagugaggcgagau

SEQ ID NO: 106795 - RNA, 24 nt, Human
cccgggagguggaggcugcaauga

SEQ ID NO: 106796 - RNA, 23 nt, Human
cccgggagguggaggcugcagug

SEQ ID NO: 106797 - RNA, 24 nt, Human
cccgggagguggaggcugcaguga

SEQ ID NO: 106798 - RNA, 32 nt, Human
cccgggagguggaggcugcagugagccgagau

SEQ ID NO: 106799 - RNA, 32 nt, Human
cccgggagguggaggcugcagugaguuaagau

SEQ ID NO: 106800 - RNA, 32 nt, Human
cccgggagguggaggcugcagugaguugugau

SEQ ID NO: 106801 - RNA, 23 nt, Human
cccgggagguggaggcugcggug

SEQ ID NO: 106802 - RNA, 24 nt, Human
cccgggagguggaggcugcgguga

SEQ ID NO: 106803 - RNA, 23 nt, Human
cccgggagguggaggucgcggug

SEQ ID NO: 106804 - RNA, 24 nt, Human
cccgggagguggaggucgcgguga

SEQ ID NO: 106805 - RNA, 32 nt, Human
cccgggagguggagguggagguugcagugagc

SEQ ID NO: 106806 - RNA, 32 nt, Human
cccgggagguggagguggcagugagccgagau

SEQ ID NO: 106807 - RNA, 24 nt, Human
cccgggagguggagguuacaguga

SEQ ID NO: 106808 - RNA, 32 nt, Human
cccgggagguggagguuacagugagccgagau

SEQ ID NO: 106809 - RNA, 32 nt, Human
cccgggagguggagguuacagugagcugagau

SEQ ID NO: 106810 - RNA, 21 nt, Human
cccgggagguggagguugcag

SEQ ID NO: 106811 - RNA, 24 nt, Human
cccgggagguggagguugcaggga

SEQ ID NO: 106812 - RNA, 22 nt, Human
cccgggagguggagguugcagu

SEQ ID NO: 106813 - RNA, 23 nt, Human
cccgggagguggagguugcagug

SEQ ID NO: 106814 - RNA, 24 nt, Human
cccgggagguggagguugcaguga

SEQ ID NO: 106815 - RNA, 32 nt, Human
cccgggagguggagguugcagugagccaagac

SEQ ID NO: 106816 - RNA, 32 nt, Human
cccgggagguggagguugcagugagccaagau

SEQ ID NO: 106817 - RNA, 32 nt, Human
cccgggagguggagguugcagugagcccagau

SEQ ID NO: 106818 - RNA, 32 nt, Human
cccgggagguggagguugcagugagccgagac

SEQ ID NO: 106819 - RNA, 32 nt, Human
cccgggagguggagguugcagugagccgagau

SEQ ID NO: 106820 - RNA, 32 nt, Human
cccgggagguggagguugcagugagcuaagau

SEQ ID NO: 106821 - RNA, 32 nt, Human
cccgggagguggagguugcagugagcugagau

SEQ ID NO: 106822 - RNA, 32 nt, Human
cccgggagguggagguugcagugagcugaggu

SEQ ID NO: 106823 - RNA, 32 nt, Human
cccgggagguggagguugcagugaggugagau

SEQ ID NO: 106824 - RNA, 32 nt, Human
cccgggagguggagguugcagugagucaagau

SEQ ID NO: 106825 - RNA, 24 nt, Human
cccgggagguggagguugccguga

SEQ ID NO: 106826 - RNA, 24 nt, Human
cccgggagguggagguugcgauga

SEQ ID NO: 106827 - RNA, 23 nt, Human
cccgggagguggagguugcggug

SEQ ID NO: 106828 - RNA, 24 nt, Human
cccgggagguggagguugcgguga

SEQ ID NO: 106829 - RNA, 24 nt, Human
cccgggagguggagguuguaguga

SEQ ID NO: 106830 - RNA, 24 nt, Human
cccgggagguggaguuuacgguga

SEQ ID NO: 106831 - RNA, 24 nt, Human
cccgggaggugggaguuguaguga

SEQ ID NO: 106832 - RNA, 32 nt, Human
cccgggagguguagguugcagugagccgagau

SEQ ID NO: 106833 - RNA, 24 nt, Human
cccgggagguugaggcugcagugg

SEQ ID NO: 106834 - RNA, 24 nt, Human
cccgggagucagaggcugcagaga

SEQ ID NO: 106835 - RNA, 23 nt, Human
cccgggaguggagcuugcaauga

SEQ ID NO: 106836 - RNA, 32 nt, Human
cccgggaguuggagguugcagugagccaagau

SEQ ID NO: 106837 - RNA, 24 nt, Human
cccgggaguuugaaguugcaguga

SEQ ID NO: 106838 - RNA, 25 nt, Human
cccgggaugagcucacgcccgcguc

SEQ ID NO: 106839 - RNA, 32 nt, Human
cccgggcaacagaguaagacccugccucaaga

SEQ ID NO: 106840 - RNA, 32 nt, Human
cccgggcaacagggacacuggcauuucuuugc

SEQ ID NO: 106841 - RNA, 32 nt, Human
cccgggcacugaggcccagggucagcuuggcu

SEQ ID NO: 106842 - RNA, 32 nt, Human
cccgggcacugcacagccugucugggggccag

SEQ ID NO: 106843 - RNA, 32 nt, Human
cccgggcacuucuccccaccucggccccgcgc

SEQ ID NO: 106844 - RNA, 24 nt, Human
cccgggcagaggaaauugcaguga

SEQ ID NO: 106845 - RNA, 21 nt, Human
cccgggcagccccgggccccu

SEQ ID NO: 106846 - RNA, 24 nt, Human
cccgggcagcggagguugcaguga

SEQ ID NO: 106847 - RNA, 32 nt, Human
cccgggcagcggagguugcagugagccgagau

SEQ ID NO: 106848 - RNA, 32 nt, Human
cccgggcaggccgcgguuuccuuuguggacgu

SEQ ID NO: 106849 - RNA, 32 nt, Human
cccgggcagggugggugcggagcggcucuggg

SEQ ID NO: 106850 - RNA, 32 nt, Human
cccgggcaguggccaguggccuuaagggagcc

SEQ ID NO: 106851 - RNA, 32 nt, Human
cccgggccaagacagauggacacugccaagag

SEQ ID NO: 106852 - RNA, 21 nt, Human
cccgggccaccacgcuuccua

SEQ ID NO: 106853 - RNA, 32 nt, Human
cccgggccaccugauccaacguccacuccaag

SEQ ID NO: 106854 - RNA, 24 nt, Human
cccgggccacggggacugcaguga

SEQ ID NO: 106855 - RNA, 32 nt, Human
cccgggccagagaagagcccgggagggccagg

SEQ ID NO: 106856 - RNA, 31 nt, Human
cccgggccagcgcucugacaugcagaaggug

SEQ ID NO: 106857 - RNA, 32 nt, Human
cccgggccagcggagggcaggagcggagcccc

SEQ ID NO: 106858 - RNA, 22 nt, Human
cccgggccagcugccccacccc

SEQ ID NO: 106859 - RNA, 32 nt, Human
cccgggccagggacucuguucaaacugcgccc

SEQ ID NO: 106860 - RNA, 32 nt, Human
cccgggccaggggcgggcgccgccauggguaa

SEQ ID NO: 106861 - RNA, 31 nt, Human
cccgggccaguguccaucauccaggugcuca

SEQ ID NO: 106862 - RNA, 32 nt, Human
cccgggccaguguccaucauccaggugcucag

SEQ ID NO: 106863 - RNA, 25 nt, Human
cccgggcccagacacagcccagguc

SEQ ID NO: 106864 - RNA, 25 nt, Human
cccgggcccaguuccagcccguguc

SEQ ID NO: 106865 - RNA, 18 nt, Human
cccgggcccccgcugccg

SEQ ID NO: 106866 - RNA, 16 nt, Human
cccgggccccgcgccg

SEQ ID NO: 106867 - RNA, 32 nt, Human
cccgggccccucggaaccuccagcuugguccg

SEQ ID NO: 106868 - RNA, 32 nt, Human
cccgggccccucugcugacgacaggagccccc

SEQ ID NO: 106869 - RNA, 22 nt, Human
cccgggccccugagccaugccc

SEQ ID NO: 106870 - RNA, 32 nt, Human
cccgggccccugugacaggggaaagggcucuc

SEQ ID NO: 106871 - RNA, 32 nt, Human
cccgggcccgagaggaggaggccggggcucuc

SEQ ID NO: 106872 - RNA, 21 nt, Human
cccgggcccgcagcggcaccg

SEQ ID NO: 106873 - RNA, 32 nt, Human
cccgggcccgggcugcacccccgcauccccaa

SEQ ID NO: 106874 - RNA, 26 nt, Human
cccgggcccgguggaggcugcaguga

SEQ ID NO: 106875 - RNA, 32 nt, Human
cccgggcccgguggaggcugcagugagacgag

SEQ ID NO: 106876 - RNA, 21 nt, Human
cccgggccgaggcccagccca

SEQ ID NO: 106877 - RNA, 24 nt, Human
cccgggccgccaccgcccauccca

SEQ ID NO: 106878 - RNA, 21 nt, Human
cccgggccgccaccgucaccu

SEQ ID NO: 106879 - RNA, 22 nt, Human
cccgggccgcccgcgcucccca

SEQ ID NO: 106880 - RNA, 18 nt, Human
cccgggccgccgccgcug

SEQ ID NO: 106881 - RNA, 23 nt, Human
cccgggccgcggccaacuucucu

SEQ ID NO: 106882 - RNA, 31 nt, Human
cccgggccguagucucccaggcucgagcaau

SEQ ID NO: 106883 - RNA, 32 nt, Human
cccgggccucaagcaguccccaccuccgagug

SEQ ID NO: 106884 - RNA, 32 nt, Human
cccgggccuccccagcccugccacucaccaua

SEQ ID NO: 106885 - RNA, 18 nt, Human
cccgggccuccccucguc

SEQ ID NO: 106886 - RNA, 32 nt, Human
cccgggccucccucccugucucucuggcucuc

SEQ ID NO: 106887 - RNA, 32 nt, Human
cccgggccuccuggccucucccuccaugggcu

SEQ ID NO: 106888 - RNA, 32 nt, Human
cccgggccugggaacugcuggcucuaagaacc

SEQ ID NO: 106889 - RNA, 32 nt, Human
cccgggccuugggguagcaccuccuucugcuu

SEQ ID NO: 106890 - RNA, 32 nt, Human
cccgggccuuucucuccugggcugucucuggu

SEQ ID NO: 106891 - RNA, 20 nt, Human
cccgggcgcaggauccaggc

SEQ ID NO: 106892 - RNA, 32 nt, Human
cccgggcgcaucuggcuuaucuggagaccugg

SEQ ID NO: 106893 - RNA, 32 nt, Human
cccgggcgccccucccccuucuccccgccccg

SEQ ID NO: 106894 - RNA, 18 nt, Human
cccgggcgcgggauccag

SEQ ID NO: 106895 - RNA, 32 nt, Human
cccgggcggcagggcaagcagcgcggccucgg

SEQ ID NO: 106896 - RNA, 18 nt, Human
cccgggcggcccaggucc

SEQ ID NO: 106897 - RNA, 24 nt, Human
cccgggcggcggaaguugcaguga

SEQ ID NO: 106898 - RNA, 24 nt, Human
cccgggcggcggagauugcaguga

SEQ ID NO: 106899 - RNA, 32 nt, Human
cccgggcggcggagauugcagugagccgaggu

SEQ ID NO: 106900 - RNA, 23 nt, Human
cccgggcggcggcagcaacagcg

SEQ ID NO: 106901 - RNA, 32 nt, Human
cccgggcggcggcagcaacagcggcggcggca

SEQ ID NO: 106902 - RNA, 32 nt, Human
cccgggcggcuucaccccacacccaggggcca

SEQ ID NO: 106903 - RNA, 24 nt, Human
cccgggcgguggagcuugcaguga

SEQ ID NO: 106904 - RNA, 32 nt, Human
cccgggcgguggagcuugcagugagccgagau

SEQ ID NO: 106905 - RNA, 24 nt, Human
cccgggcgguggagguuguaguga

SEQ ID NO: 106906 - RNA, 32 nt, Human
cccgggcuaccuggcugcucugggcagggugu

SEQ ID NO: 106907 - RNA, 32 nt, Human
cccgggcucaacugcaacaacacacuucccug

SEQ ID NO: 106908 - RNA, 32 nt, Human
cccgggcucacgccauucuuccaccucagccu

SEQ ID NO: 106909 - RNA, 32 nt, Human
cccgggcuccaccgugggucucagacgcccug

SEQ ID NO: 106910 - RNA, 32 nt, Human
cccgggcuccguggcuaccaugcugagaguga

SEQ ID NO: 106911 - RNA, 32 nt, Human
cccgggcucggggaccuuucgcacucggguca

SEQ ID NO: 106912 - RNA, 20 nt, Human
cccgggcucucagcgcccac

SEQ ID NO: 106913 - RNA, 32 nt, Human
cccgggcucuccugcccugcccuccugcccgc

SEQ ID NO: 106914 - RNA, 32 nt, Human
cccgggcugcccccgccagcucuggcuguuua

SEQ ID NO: 106915 - RNA, 32 nt, Human
cccgggcugccuggccgcggcggcaugggggc

SEQ ID NO: 106916 - RNA, 32 nt, Human
cccgggcugcgccccagcaccaugcucugcgc

SEQ ID NO: 106917 - RNA, 32 nt, Human
cccgggcugcguccacgcccugggcagguagg

SEQ ID NO: 106918 - RNA, 32 nt, Human
cccgggcuggaaggcagggcaucagcuaugga

SEQ ID NO: 106919 - RNA, 18 nt, Human
cccgggcuggagugcaau

SEQ ID NO: 106920 - RNA, 19 nt, Human
cccgggcuggagugcaaug

SEQ ID NO: 106921 - RNA, 20 nt, Human
cccgggcuggagugcaaugg

SEQ ID NO: 106922 - RNA, 20 nt, Human
cccgggcuggagugcagcgg

SEQ ID NO: 106923 - RNA, 18 nt, Human
cccgggcuggagugcagu

SEQ ID NO: 106924 - RNA, 19 nt, Human
cccgggcuggagugcagug

SEQ ID NO: 106925 - RNA, 20 nt, Human
cccgggcuggagugcagugg

SEQ ID NO: 106926 - RNA, 22 nt, Human
cccgggcuggagugcaguggug

SEQ ID NO: 106927 - RNA, 32 nt, Human
cccgggcugggaaagggcugagugucaacagg

SEQ ID NO: 106928 - RNA, 32 nt, Human
cccgggcugggcagggaccaugggcuguggcu

SEQ ID NO: 106929 - RNA, 32 nt, Human
cccgggcuggggcgcagagggagcccggagcc

SEQ ID NO: 106930 - RNA, 23 nt, Human
cccgggcugggggguagcagugg

SEQ ID NO: 106931 - RNA, 32 nt, Human
cccgggcuggucucaaacuccuggguucaagu

SEQ ID NO: 106932 - RNA, 32 nt, Human
cccgggcugugcaaagcuggccagggccuccc

SEQ ID NO: 106933 - RNA, 32 nt, Human
cccgggcugugcaaagcuggccagggccuccu

SEQ ID NO: 106934 - RNA, 32 nt, Human
cccgggcuuagugugagcaucuugccagccuc

SEQ ID NO: 106935 - RNA, 19 nt, Human
cccgggcuucgccccaccc

SEQ ID NO: 106936 - RNA, 32 nt, Human
cccgggcuuggcggcucuagccccagcgccaa

SEQ ID NO: 106937 - RNA, 32 nt, Human
cccggggaacugaagauuguccuggccgcgac

SEQ ID NO: 106938 - RNA, 32 nt, Human
cccggggaagggaagagcaggucaguacagag

SEQ ID NO: 106939 - RNA, 32 nt, Human
cccggggacacacacccaugacaugagccagc

SEQ ID NO: 106940 - RNA, 23 nt, Human
cccggggacggagguugcaguga

SEQ ID NO: 106941 - RNA, 32 nt, Human
cccggggacucgcauuccccgguucccccucc

SEQ ID NO: 106942 - RNA, 32 nt, Human
cccggggagagggggaggggagggccuccggg

SEQ ID NO: 106943 - RNA, 19 nt, Human
cccggggagcaggcggcug

SEQ ID NO: 106944 - RNA, 32 nt, Human
cccggggagccagcuggccugggguucggucc

SEQ ID NO: 106945 - RNA, 32 nt, Human
cccggggagccgcccucacacauuuuccagga

SEQ ID NO: 106946 - RNA, 32 nt, Human
cccggggagccgcgggagaggcggcggcgggg

SEQ ID NO: 106947 - RNA, 32 nt, Human
cccggggagcgugagcgaugcccagcugcacc

SEQ ID NO: 106948 - RNA, 32 nt, Human
cccggggagcuccaggagagaggggagcccag

SEQ ID NO: 106949 - RNA, 32 nt, Human
cccggggaggcaagauugagggcccgggagag

SEQ ID NO: 106950 - RNA, 32 nt, Human
cccggggaggcugcagcgcagagcagcggggc

SEQ ID NO: 106951 - RNA, 19 nt, Human
cccggggagggaggcgcgg

SEQ ID NO: 106952 - RNA, 32 nt, Human
cccggggaggggcagggccuggagcuucccac

SEQ ID NO: 106953 - RNA, 32 nt, Human
cccggggaggggccagaguuuucuaugaaucu

SEQ ID NO: 106954 - RNA, 32 nt, Human
cccggggaggggcugcagacagcagggggaga

SEQ ID NO: 106955 - RNA, 16 nt, Human
cccggggagggggcgc

SEQ ID NO: 106956 - RNA, 32 nt, Human
cccggggcaagaggagggagaaggcagggccg

SEQ ID NO: 106957 - RNA, 22 nt, Human
cccggggcacccuccuguccga

SEQ ID NO: 106958 - RNA, 32 nt, Human
cccggggcagaggcauaagcccacauaugcug

SEQ ID NO: 106959 - RNA, 32 nt, Human
cccggggcagcaccugccccgccuugcggagc

SEQ ID NO: 106960 - RNA, 32 nt, Human
cccggggcaggcggugguggcccagggcugcc

SEQ ID NO: 106961 - RNA, 32 nt, Human
cccggggcaguggugcccaggcugccugacau

SEQ ID NO: 106962 - RNA, 32 nt, Human
cccggggccaccucuacugacacccacaccug

SEQ ID NO: 106963 - RNA, 32 nt, Human
cccggggcccggagcggccggagcagcccggg

SEQ ID NO: 106964 - RNA, 17 nt, Human
cccggggcccuccugcu

SEQ ID NO: 106965 - RNA, 32 nt, Human
cccggggcccugcuuccucacacuggcggguu

SEQ ID NO: 106966 - RNA, 32 nt, Human
cccggggccgcagagcaguaccaguccguggc

SEQ ID NO: 106967 - RNA, 32 nt, Human
cccggggccuccagcgaggccugagaagggug

SEQ ID NO: 106968 - RNA, 23 nt, Human
cccggggcgccucgcggcacgga

SEQ ID NO: 106969 - RNA, 21 nt, Human
cccggggcucagcccaugccc

SEQ ID NO: 106970 - RNA, 19 nt, Human
cccggggcuggugggccuu

SEQ ID NO: 106971 - RNA, 32 nt, Human
cccgggggaagagacgggaagcucggcucugg

SEQ ID NO: 106972 - RNA, 23 nt, Human
cccgggggaccugccugcuccuu

SEQ ID NO: 106973 - RNA, 32 nt, Human
cccgggggagaccucuucacacccaaagaugc

SEQ ID NO: 106974 - RNA, 18 nt, Human
cccgggggaggggggcag

SEQ ID NO: 106975 - RNA, 32 nt, Human
cccgggggcacacaggcuccacacugccaccc

SEQ ID NO: 106976 - RNA, 19 nt, Human
cccgggggccccaccgccc

SEQ ID NO: 106977 - RNA, 18 nt, Human
cccgggggccccaccucg

SEQ ID NO: 106978 - RNA, 32 nt, Human
cccgggggccccaucggccugcagaggggacg

SEQ ID NO: 106979 - RNA, 20 nt, Human
cccgggggcgaggggcguag

SEQ ID NO: 106980 - RNA, 23 nt, Human
cccgggggcgcagagcccccguc

SEQ ID NO: 106981 - RNA, 18 nt, Human
cccgggggcggccugugg

SEQ ID NO: 106982 - RNA, 32 nt, Human
cccgggggcuccccacgugugauugaucuggg

SEQ ID NO: 106983 - RNA, 23 nt, Human
cccgggggcugagguugcuguga

SEQ ID NO: 106984 - RNA, 21 nt, Human
cccggggggcggagggaggug

SEQ ID NO: 106985 - RNA, 23 nt, Human
cccggggggcggagguugcagug

SEQ ID NO: 106986 - RNA, 24 nt, Human
cccggggggcggagguugcaguga

SEQ ID NO: 106987 - RNA, 24 nt, Human
cccgggggguggagccugcaguga

SEQ ID NO: 106988 - RNA, 20 nt, Human
cccggggguagggggcgcag

SEQ ID NO: 106989 - RNA, 32 nt, Human
cccgggguccugacacccaagagaagagaugg

SEQ ID NO: 106990 - RNA, 32 nt, Human
cccggggucucccacaggccugugaguugccu

SEQ ID NO: 106991 - RNA, 23 nt, Human
cccggguaaauggagguugcagu

SEQ ID NO: 106992 - RNA, 32 nt, Human
cccgggucaagcaauucuccugccucagcuuc

SEQ ID NO: 106993 - RNA, 32 nt, Human
cccgggucacccuggcaugaggagaugggccu

SEQ ID NO: 106994 - RNA, 32 nt, Human
cccgggucaggcuggggaggaacagaacuggg

SEQ ID NO: 106995 - RNA, 32 nt, Human
cccgggucaucuguaccucugccuccuuuccc

SEQ ID NO: 106996 - RNA, 20 nt, Human
cccgggucccugcagcgcuu

SEQ ID NO: 106997 - RNA, 32 nt, Human
cccggguccgaccucacaaccccacgcuguag

SEQ ID NO: 106998 - RNA, 32 nt, Human
cccggguccucacaccccuccuuggcccuucu

SEQ ID NO: 106999 - RNA, 32 nt, Human
cccggguccucccacugauuccuuugaccauc

SEQ ID NO: 107000 - RNA, 31 nt, Human
cccggguccucugugcagguuggaggauggu

SEQ ID NO: 107001 - RNA, 32 nt, Human
cccgggucgcguacuugcuuaggcaacugcaa

SEQ ID NO: 107002 - RNA, 25 nt, Human
cccgggucuuuacacaguccgcguc

SEQ ID NO: 107003 - RNA, 31 nt, Human
cccgggugaguguccaggcaugccagcggaa

SEQ ID NO: 107004 - RNA, 32 nt, Human
cccgggugauaguacagucaauauugucagua

SEQ ID NO: 107005 - RNA, 18 nt, Human
cccgggugcccggccccc

SEQ ID NO: 107006 - RNA, 32 nt, Human
cccgggugccgagcacugccuccgggcuuccc

SEQ ID NO: 107007 - RNA, 22 nt, Human
cccgggugcuccagcucugccc

SEQ ID NO: 107008 - RNA, 18 nt, Human
cccggguggcacgucccc

SEQ ID NO: 107009 - RNA, 24 nt, Human
cccggguggcagagguugcaguga

SEQ ID NO: 107010 - RNA, 32 nt, Human
cccggguggcaguggauugauguccaguucuu

SEQ ID NO: 107011 - RNA, 31 nt, Human
cccggguggccagcagcagccaacgcucccg

SEQ ID NO: 107012 - RNA, 24 nt, Human
cccggguggcggcgcuugcaguga

SEQ ID NO: 107013 - RNA, 32 nt, Human
cccggguggcggcgcuugcagugagcugagcu

SEQ ID NO: 107014 - RNA, 32 nt, Human
cccggguggcggcggcaacggcgguggugacg

SEQ ID NO: 107015 - RNA, 32 nt, Human
cccggguguagaugccuucccacccaccaggc

SEQ ID NO: 107016 - RNA, 32 nt, Human
cccgggugugaaaagccagggaaugaagcccg

SEQ ID NO: 107017 - RNA, 19 nt, Human
cccggguguggggugcccu

SEQ ID NO: 107018 - RNA, 32 nt, Human
cccggguguucugcaagcuggucaaaaagggg

SEQ ID NO: 107019 - RNA, 32 nt, Human
cccggguuuccgcuucccuccgggcgcgagaa

SEQ ID NO: 107020 - RNA, 32 nt, Human
cccgguaaaggcccccucugugaagagaaccc

SEQ ID NO: 107021 - RNA, 32 nt, Human
cccgguacaaguggcucaucaucaagaucgug

SEQ ID NO: 107022 - RNA, 32 nt, Human
cccgguaccucucuccccacuggccaggacuc

SEQ ID NO: 107023 - RNA, 19 nt, Human
cccgguacgagggggccca

SEQ ID NO: 107024 - RNA, 32 nt, Human
cccgguagaggcggagguugcagugagccgag

SEQ ID NO: 107025 - RNA, 32 nt, Human
cccgguaggcagagguugcagugagccgaggu

SEQ ID NO: 107026 - RNA, 32 nt, Human
cccgguaggcggagcuugcagugagcugagau

SEQ ID NO: 107027 - RNA, 32 nt, Human
cccgguagggggccugcagggagccagagggu

SEQ ID NO: 107028 - RNA, 24 nt, Human
cccgguagguggagguugcaguga

SEQ ID NO: 107029 - RNA, 32 nt, Human
cccgguagguggagguugcagugagccgagau

SEQ ID NO: 107030 - RNA, 32 nt, Human
cccggucaaccagcggagaguggggaacugcg

SEQ ID NO: 107031 - RNA, 32 nt, Human
cccggucaagucuacugccaccucucacucuc

SEQ ID NO: 107032 - RNA, 32 nt, Human
cccggucaccugccaggugaccacauggccag

SEQ ID NO: 107033 - RNA, 32 nt, Human
cccggucagccaaucugggugcugcugacgug

SEQ ID NO: 107034 - RNA, 32 nt, Human
cccggucagcucugcaucagguguuuucugag

SEQ ID NO: 107035 - RNA, 32 nt, Human
cccggucagcuggucuggcccuggacgugccu

SEQ ID NO: 107036 - RNA, 32 nt, Human
cccggucagggagccucugcugugcuggcuuc

SEQ ID NO: 107037 - RNA, 32 nt, Human
cccggucauccagaagccccgcggaacagaga

SEQ ID NO: 107038 - RNA, 32 nt, Human
cccggucaugcugcuguccagugagcagccgg

SEQ ID NO: 107039 - RNA, 32 nt, Human
cccggucccagcccaaacucaggcuggaggca

SEQ ID NO: 107040 - RNA, 32 nt, Human
cccggucccuggcagaaguauucaugcuuugg

SEQ ID NO: 107041 - RNA, 31 nt, Human
cccggucgcauucuuugacaugcagauugga

SEQ ID NO: 107042 - RNA, 24 nt, Human
cccggucgcucuccuccggcgguc

SEQ ID NO: 107043 - RNA, 32 nt, Human
cccggucggaggcggaaggaagugauauuuau

SEQ ID NO: 107044 - RNA, 32 nt, Human
cccggucgggagggaggaagguggcaagaugg

SEQ ID NO: 107045 - RNA, 21 nt, Human
cccggucgguuuccgccagga

SEQ ID NO: 107046 - RNA, 28 nt, Human
cccggucucaaguaggccucaucugccg

SEQ ID NO: 107047 - RNA, 32 nt, Human
cccggucucccagggccucacccgagugaugc

SEQ ID NO: 107048 - RNA, 32 nt, Human
cccggucugcuccuucagccuccuugcucaug

SEQ ID NO: 107049 - RNA, 32 nt, Human
cccggucugcuccuucagccuccuugcucuug

SEQ ID NO: 107050 - RNA, 32 nt, Human
cccggucuguucuguuccacucugaccaucgg

SEQ ID NO: 107051 - RNA, 32 nt, Human
cccggucuuccuccucguccugccgcaggcca

SEQ ID NO: 107052 - RNA, 32 nt, Human
cccggugaacagcagcaggaggagccgcuaga

SEQ ID NO: 107053 - RNA, 32 nt, Human
cccggugacauucuauuuccaggaaaauccgg

SEQ ID NO: 107054 - RNA, 32 nt, Human
cccggugaccugcuggagaagacaccugggag

SEQ ID NO: 107055 - RNA, 32 nt, Human
cccggugagaagcagagcgcgagagggagccc

SEQ ID NO: 107056 - RNA, 32 nt, Human
cccggugagauggaccauccugcccccguggg

SEQ ID NO: 107057 - RNA, 32 nt, Human
cccggugcagagaagaggguggagccuugccg

SEQ ID NO: 107058 - RNA, 32 nt, Human
cccggugcagcagcacaagcccggcacucaaa

SEQ ID NO: 107059 - RNA, 32 nt, Human
cccggugcagccucuaacuccugggcucaagc

SEQ ID NO: 107060 - RNA, 32 nt, Human
cccggugcaguggcucaugccuguaaucccaa

SEQ ID NO: 107061 - RNA, 32 nt, Human
cccggugccaugaacggagacgaugccuuugc

SEQ ID NO: 107062 - RNA, 32 nt, Human
cccggugccaugaacggagacgaugccuuugu

SEQ ID NO: 107063 - RNA, 19 nt, Human
cccggugcccguguguccg

SEQ ID NO: 107064 - RNA, 19 nt, Human
cccggugccugccucaccc

SEQ ID NO: 107065 - RNA, 32 nt, Human
cccggugccugggacgggcucagccgccaggg

SEQ ID NO: 107066 - RNA, 32 nt, Human
cccggugcggcugaggccccuuugggcagccc

SEQ ID NO: 107067 - RNA, 32 nt, Human
cccggugcgggugggagucagggcgcccggaa

SEQ ID NO: 107068 - RNA, 32 nt, Human
cccggugcgguggcucaugccuguaaucccag

SEQ ID NO: 107069 - RNA, 32 nt, Human
cccggugcuauacuugccuccucuccacggaa

SEQ ID NO: 107070 - RNA, 32 nt, Human
cccggugcucuucuguuucucagucuucgcgc

SEQ ID NO: 107071 - RNA, 18 nt, Human
cccggugcuuccuccaga

SEQ ID NO: 107072 - RNA, 32 nt, Human
cccgguggcucacgccuguaaucccagcacuu

SEQ ID NO: 107073 - RNA, 32 nt, Human
cccgguggcucacuccuguaaucccagcacuu

SEQ ID NO: 107074 - RNA, 20 nt, Human
cccgguggcucaguccugag

SEQ ID NO: 107075 - RNA, 32 nt, Human
cccgguggcucaugccuguaaucccagcacug

SEQ ID NO: 107076 - RNA, 32 nt, Human
cccgguggcucaugccuguaauccuggcacuu

SEQ ID NO: 107077 - RNA, 32 nt, Human
cccgguggcucccgccuguaaucccagaacuu

SEQ ID NO: 107078 - RNA, 32 nt, Human
cccggugggacccggcccccacccaugcaugg

SEQ ID NO: 107079 - RNA, 32 nt, Human
cccggugggcggcagaggagcucuggcccgca

SEQ ID NO: 107080 - RNA, 32 nt, Human
cccgguggugagagcacugagccauugugaau

SEQ ID NO: 107081 - RNA, 22 nt, Human
cccggugguggcagaacugccu

SEQ ID NO: 107082 - RNA, 32 nt, Human
cccggugguggugauguugggaagauguuucc

SEQ ID NO: 107083 - RNA, 32 nt, Human
cccgguguaugccaaguggcccccgggaggac

SEQ ID NO: 107084 - RNA, 32 nt, Human
cccggugugagcugcaggcugugcuccagauc

SEQ ID NO: 107085 - RNA, 32 nt, Human
cccggugugggacuacaggcagcucugccugu

SEQ ID NO: 107086 - RNA, 21 nt, Human
cccgguuacucgggaggcuga

SEQ ID NO: 107087 - RNA, 32 nt, Human
cccgguucaagaggagggaguacccggauggc

SEQ ID NO: 107088 - RNA, 32 nt, Human
cccgguucaagcaauucuccugccucagccuc

SEQ ID NO: 107089 - RNA, 32 nt, Human
cccgguucaagcaauucuccugccucagccug

SEQ ID NO: 107090 - RNA, 32 nt, Human
cccgguucaagccauucuucugccucagccuc

SEQ ID NO: 107091 - RNA, 32 nt, Human
cccgguucaggcaauucuccugccucagccuc

SEQ ID NO: 107092 - RNA, 32 nt, Human
cccgguucgcggcgaugccagccaccccagcg

SEQ ID NO: 107093 - RNA, 32 nt, Human
cccgguuggaacugggacugagcucgggcacg

SEQ ID NO: 107094 - RNA, 32 nt, Human
cccgguuugggcuguagggggcgggagagucu

SEQ ID NO: 107095 - RNA, 31 nt, Human
cccgguuuguuucucccugcucaggucuaga

SEQ ID NO: 107096 - RNA, 32 nt, Human
cccgguuuugaagccgcuucucugcccgaguu

SEQ ID NO: 107097 - RNA, 32 nt, Human
cccgguuuugacugguugaaaccggacauugg

SEQ ID NO: 107098 - RNA, 20 nt, Human
cccguaacccccuccugccu

SEQ ID NO: 107099 - RNA, 19 nt, Human
cccguaaucccagcacuuu

SEQ ID NO: 107100 - RNA, 22 nt, Human
cccguaaucccagcuacucagg

SEQ ID NO: 107101 - RNA, 32 nt, Human
cccguaaucccagcuacucaggaggcugagac

SEQ ID NO: 107102 - RNA, 32 nt, Human
cccguaaucccagcuacucaggaggcugaggc

SEQ ID NO: 107103 - RNA, 32 nt, Human
cccguaaucccagcuacucaggaggcugaggu

SEQ ID NO: 107104 - RNA, 32 nt, Human
cccguaaucccagcuacucagguggcugaggc

SEQ ID NO: 107105 - RNA, 32 nt, Human
cccguaaucccagcuacucgggaggcugaacc

SEQ ID NO: 107106 - RNA, 32 nt, Human
cccguaaucccagcuacucgggaggcugaggc

SEQ ID NO: 107107 - RNA, 32 nt, Human
cccguaaucccagcuacuugggaggcuaaggc

SEQ ID NO: 107108 - RNA, 32 nt, Human
cccguaaucccagcuagucaggaggcugaggc

SEQ ID NO: 107109 - RNA, 32 nt, Human
cccguaaugccagcuacuugggaggcuaaagu

SEQ ID NO: 107110 - RNA, 32 nt, Human
cccguaauuucugcacuuugggagacugaggu

SEQ ID NO: 107111 - RNA, 32 nt, Human
cccguacacucccugccaccacuagguuguaa

SEQ ID NO: 107112 - RNA, 21 nt, Human
cccguacagguagccccgccg

SEQ ID NO: 107113 - RNA, 22 nt, Human
cccguacucuccacacccuaga

SEQ ID NO: 107114 - RNA, 31 nt, Human
cccguagaacaaugcgacagucuuauccacg

SEQ ID NO: 107115 - RNA, 32 nt, Human
cccguagagacacucccaaggagacagccaug

SEQ ID NO: 107116 - RNA, 32 nt, Human
cccguagcacaggcggagugcagcggaggccc

SEQ ID NO: 107117 - RNA, 21 nt, Human
cccguagcacugcccacccca

SEQ ID NO: 107118 - RNA, 32 nt, Human
cccguagcauuucaagguaacuguccaucucc

SEQ ID NO: 107119 - RNA, 23 nt, Human
cccguagccaccaccacacugcu

SEQ ID NO: 107120 - RNA, 32 nt, Human
cccguaggagggugggucagaggauacagaag

SEQ ID NO: 107121 - RNA, 22 nt, Human
cccguagucccagcuacucagg

SEQ ID NO: 107122 - RNA, 32 nt, Human
cccguagucccagcuacucaggaggcugaggc

SEQ ID NO: 107123 - RNA, 23 nt, Human
cccguaguuccagcuacuuggga

SEQ ID NO: 107124 - RNA, 32 nt, Human
cccguaguuccagcuacuugggaggcugaagc

SEQ ID NO: 107125 - RNA, 32 nt, Human
cccguaguuccagcuacuugggaggcugaggc

SEQ ID NO: 107126 - RNA, 32 nt, Human
cccguauacagcucugccaucucugagggguu

SEQ ID NO: 107127 - RNA, 32 nt, Human
cccguauaugucuacacacagaugacaaauua

SEQ ID NO: 107128 - RNA, 22 nt, Human
cccguauucccagcuacucaga

SEQ ID NO: 107129 - RNA, 32 nt, Human
cccguauucccagcuacucagaggcugaggca

SEQ ID NO: 107130 - RNA, 32 nt, Human
cccguauuuucaucuuccauucuaacauuauc

SEQ ID NO: 107131 - RNA, 32 nt, Human
cccgucaagugcugccccugccugugucuggg

SEQ ID NO: 107132 - RNA, 32 nt, Human
cccgucacucacugugucugaucugucucacu

SEQ ID NO: 107133 - RNA, 32 nt, Human
cccgucacugaaaaauauaaaaauuagcugag

SEQ ID NO: 107134 - RNA, 32 nt, Human
cccgucagcccagcauccggcuuugcuuccau

SEQ ID NO: 107135 - RNA, 17 nt, Human
cccgucaggccacagcc

SEQ ID NO: 107136 - RNA, 32 nt, Human
cccgucaggcuccccggcccucuggcugccaa

SEQ ID NO: 107137 - RNA, 32 nt, Human
cccgucagugcucuccccgucguuugcccucu

SEQ ID NO: 107138 - RNA, 32 nt, Human
cccgucaguggccugaggagaugguuggauca

SEQ ID NO: 107139 - RNA, 32 nt, Human
cccgucauacuaccagcugagauggugguggg

SEQ ID NO: 107140 - RNA, 32 nt, Human
cccgucaucucagcuacucaggaggcugaggc

SEQ ID NO: 107141 - RNA, 32 nt, Human
cccguccacagcugaucccugggcccugcugc

SEQ ID NO: 107142 - RNA, 32 nt, Human
cccguccagaucuggagccccuguggagccac

SEQ ID NO: 107143 - RNA, 22 nt, Human
cccguccaggucuucacagagg

SEQ ID NO: 107144 - RNA, 32 nt, Human
cccguccauggcuggcuggguccccuucgcag

SEQ ID NO: 107145 - RNA, 32 nt, Human
cccgucccacagugcaagaccccgaggccacg

SEQ ID NO: 107146 - RNA, 32 nt, Human
cccgucccacggucccggcgucaccccuccgg

SEQ ID NO: 107147 - RNA, 32 nt, Human
cccgucccauggggaaagaggcugcggacuug

SEQ ID NO: 107148 - RNA, 32 nt, Human
cccguccccaggccacacagauucuccucaag

SEQ ID NO: 107149 - RNA, 21 nt, Human
cccguccccagucgggccucc

SEQ ID NO: 107150 - RNA, 24 nt, Human
cccguccccaucuggcagcuccug

SEQ ID NO: 107151 - RNA, 19 nt, Human
cccgucccccucuggcucc

SEQ ID NO: 107152 - RNA, 18 nt, Human
cccguccccucugcccuc

SEQ ID NO: 107153 - RNA, 32 nt, Human
cccguccccugccaugcccaaauacaagcugg

SEQ ID NO: 107154 - RNA, 32 nt, Human
cccguccccugccgcuccgguuccgauggcac

SEQ ID NO: 107155 - RNA, 21 nt, Human
cccgucccgcuccugcuccuu

SEQ ID NO: 107156 - RNA, 23 nt, Human
cccgucccggucccuggccccug

SEQ ID NO: 107157 - RNA, 20 nt, Human
cccgucccuccgacagcucc

SEQ ID NO: 107158 - RNA, 32 nt, Human
cccgucccugaggcuuggcaaaguaggagccc

SEQ ID NO: 107159 - RNA, 32 nt, Human
cccgucccugaugucacccccaccccaccagc

SEQ ID NO: 107160 - RNA, 32 nt, Human
cccgucccugcucugccacugugcuccagcac

SEQ ID NO: 107161 - RNA, 32 nt, Human
cccgucccugggagguugaguggaaucugcag

SEQ ID NO: 107162 - RNA, 32 nt, Human
cccgucccuuaucccugguauccacgguuccc

SEQ ID NO: 107163 - RNA, 21 nt, Human
cccgucccuucuccucuuccc

SEQ ID NO: 107164 - RNA, 22 nt, Human
cccguccgccucucgcucgccu

SEQ ID NO: 107165 - RNA, 21 nt, Human
cccguccuccgccggccccug

SEQ ID NO: 107166 - RNA, 32 nt, Human
cccguccucgccccuucucauuucccucacuc

SEQ ID NO: 107167 - RNA, 32 nt, Human
cccguccucguggagcuuagcaggcagcuggg

SEQ ID NO: 107168 - RNA, 32 nt, Human
cccguccucguuuccagcaucuuugccacccu

SEQ ID NO: 107169 - RNA, 24 nt, Human
cccguccugccuccucggccccug

SEQ ID NO: 107170 - RNA, 32 nt, Human
cccguccugccuggccgcaggugcccuggaug

SEQ ID NO: 107171 - RNA, 32 nt, Human
cccguccuggugcgggaccugugccccgcgcu

SEQ ID NO: 107172 - RNA, 32 nt, Human
cccguccuguauccaugagagugcaugucggu

SEQ ID NO: 107173 - RNA, 32 nt, Human
cccgucgaggucaucccuguacugggccuuac

SEQ ID NO: 107174 - RNA, 32 nt, Human
cccgucgcacaggcuggagugcaguggcaaag

SEQ ID NO: 107175 - RNA, 32 nt, Human
cccgucgcagagacucucaggcucucaaacag

SEQ ID NO: 107176 - RNA, 19 nt, Human
cccgucgccgccgccgccg

SEQ ID NO: 107177 - RNA, 32 nt, Human
cccgucgcgcugcugcugcggcgcuccaaguu

SEQ ID NO: 107178 - RNA, 21 nt, Human
cccgucuaaccacagcuccuu

SEQ ID NO: 107179 - RNA, 28 nt, Human
cccgucucaagugcuccucuuccuucca

SEQ ID NO: 107180 - RNA, 32 nt, Human
cccgucucagcccucguguugccauugccucu

SEQ ID NO: 107181 - RNA, 32 nt, Human
cccgucucauuuccucccaaguuccuucacug

SEQ ID NO: 107182 - RNA, 17 nt, Human
cccgucuccagccccug

SEQ ID NO: 107183 - RNA, 19 nt, Human
cccgucuccgagcugcucc

SEQ ID NO: 107184 - RNA, 32 nt, Human
cccgucuccuaaaaggccagcaggucccagga

SEQ ID NO: 107185 - RNA, 21 nt, Human
cccgucuccucuucccuuccc

SEQ ID NO: 107186 - RNA, 32 nt, Human
cccgucucuacuaacauacaaaauuagcuggg

SEQ ID NO: 107187 - RNA, 32 nt, Human
cccgucucuacugaaagugcagaaggauuggc

SEQ ID NO: 107188 - RNA, 32 nt, Human
cccgucucuccucuccccauucugugcccuac

SEQ ID NO: 107189 - RNA, 32 nt, Human
cccgucucuggaauguccacucccagagccug

SEQ ID NO: 107190 - RNA, 32 nt, Human
cccgucucuucuuuuucugucauuucaugcuu

SEQ ID NO: 107191 - RNA, 32 nt, Human
cccgucucuuucuaccuccucuuccagagaac

SEQ ID NO: 107192 - RNA, 32 nt, Human
cccgucugcgguccccaucgagcaucaagggg

SEQ ID NO: 107193 - RNA, 32 nt, Human
cccgucugcucccgcccugcccgugcacucuc

SEQ ID NO: 107194 - RNA, 32 nt, Human
cccgucuggugagcccaaucucugcuggucag

SEQ ID NO: 107195 - RNA, 32 nt, Human
cccgucugugcacucuuggcuccuggggagau

SEQ ID NO: 107196 - RNA, 32 nt, Human
cccgucuguuucucccacuguccuuggcucag

SEQ ID NO: 107197 - RNA, 20 nt, Human
cccgucuuccucaccgcccc

SEQ ID NO: 107198 - RNA, 32 nt, Human
cccgucuucucucccgcagcugccucagucgg

SEQ ID NO: 107199 - RNA, 32 nt, Human
cccgucuucuucuuccccacuuuucccuggag

SEQ ID NO: 107200 - RNA, 32 nt, Human
cccgucuugacacaccacugugcugagugcuu

SEQ ID NO: 107201 - RNA, 32 nt, Human
cccgucuugcaaggucuuccacuucagcacaa

SEQ ID NO: 107202 - RNA, 32 nt, Human
cccgugaaaugauguuguugcugcccacauac

SEQ ID NO: 107203 - RNA, 32 nt, Human
cccgugaacccagaccacccagugccauggcc

SEQ ID NO: 107204 - RNA, 24 nt, Human
cccgugaagucgaggcugcaguga

SEQ ID NO: 107205 - RNA, 32 nt, Human
cccgugacagaggaggggagggguggugccug

SEQ ID NO: 107206 - RNA, 32 nt, Human
cccgugaccagccagaagcacggagcgcaggg

SEQ ID NO: 107207 - RNA, 32 nt, Human
cccgugaccccucgcgcugccugcggccucgc

SEQ ID NO: 107208 - RNA, 32 nt, Human
cccgugacccuccagcaccagccggcugugcg

SEQ ID NO: 107209 - RNA, 32 nt, Human
cccgugacccuccagccccaugaccuguucau

SEQ ID NO: 107210 - RNA, 32 nt, Human
cccgugacggcgaccacugcucccgggccgug

SEQ ID NO: 107211 - RNA, 32 nt, Human
cccgugagccgaggcgggugauuuauuuggca

SEQ ID NO: 107212 - RNA, 32 nt, Human
cccgugagccugggggcaggugccaggcgaug

SEQ ID NO: 107213 - RNA, 19 nt, Human
cccgugaggacccaggacc

SEQ ID NO: 107214 - RNA, 24 nt, Human
cccgugaggcagagguugcaguga

SEQ ID NO: 107215 - RNA, 32 nt, Human
cccgugaggcagagguugcagugagccgagau

SEQ ID NO: 107216 - RNA, 32 nt, Human
cccgugaggcggagguuguagugagccaagau

SEQ ID NO: 107217 - RNA, 32 nt, Human
cccgugaggcugaggcuccucccacuggaccg

SEQ ID NO: 107218 - RNA, 32 nt, Human
cccgugaggcuggagucagccguggguugagc

SEQ ID NO: 107219 - RNA, 32 nt, Human
cccgugagugccucaacaacugagaugaacgu

SEQ ID NO: 107220 - RNA, 25 nt, Human
cccgugaucacccacgcugauuccu

SEQ ID NO: 107221 - RNA, 19 nt, Human
cccgugaucuccccucaca

SEQ ID NO: 107222 - RNA, 32 nt, Human
cccgugauuuggaacuuuccaaucccagagaa

SEQ ID NO: 107223 - RNA, 32 nt, Human
cccgugcacucgggggccucccucacaucccg

SEQ ID NO: 107224 - RNA, 32 nt, Human
cccgugcacuggagaggcuggggaggcagggg

SEQ ID NO: 107225 - RNA, 32 nt, Human
cccgugcauccaggcggccaagcacaaacugg

SEQ ID NO: 107226 - RNA, 32 nt, Human
cccgugcaucccugcccauggauucugcagga

SEQ ID NO: 107227 - RNA, 32 nt, Human
cccgugcccagccucuccaccgucacuguccg

SEQ ID NO: 107228 - RNA, 19 nt, Human
cccgugcccgccugcagug

SEQ ID NO: 107229 - RNA, 21 nt, Human
cccgugcccuacccccuccca

SEQ ID NO: 107230 - RNA, 20 nt, Human
cccgugccguuuauuucaga

SEQ ID NO: 107231 - RNA, 32 nt, Human
cccgugccugcaggggaaaguggucugcacau

SEQ ID NO: 107232 - RNA, 32 nt, Human
cccgugccugcgccaucuccaucagagcugca

SEQ ID NO: 107233 - RNA, 21 nt, Human
cccgugcgagccgcgcugccg

SEQ ID NO: 107234 - RNA, 32 nt, Human
cccgugcgcggccuacacgcuugggggacagc

SEQ ID NO: 107235 - RNA, 19 nt, Human
cccgugcucacaguagcuu

SEQ ID NO: 107236 - RNA, 23 nt, Human
cccgugcuccggacaccccgggc

SEQ ID NO: 107237 - RNA, 19 nt, Human
cccgugcucucaggcuagc

SEQ ID NO: 107238 - RNA, 32 nt, Human
cccgugcugcugcucugugccugcugucagag

SEQ ID NO: 107239 - RNA, 19 nt, Human
cccgugcugggcugcaugg

SEQ ID NO: 107240 - RNA, 32 nt, Human
cccguggaaagccacaaggacaaagggagcgg

SEQ ID NO: 107241 - RNA, 32 nt, Human
cccguggacccagccuuugucaguggcaggug

SEQ ID NO: 107242 - RNA, 32 nt, Human
cccguggacuggagcagagagaacucuacuuc

SEQ ID NO: 107243 - RNA, 32 nt, Human
cccguggagcccgccucuccagucccagccag

SEQ ID NO: 107244 - RNA, 32 nt, Human
cccguggaucacugaagauuccugcucuccug

SEQ ID NO: 107245 - RNA, 17 nt, Human
cccguggccgccgcgcc

SEQ ID NO: 107246 - RNA, 32 nt, Human
cccguggccugcaggccugcaggggaggcagc

SEQ ID NO: 107247 - RNA, 32 nt, Human
cccguggcucucucaggaguagauggugcuag

SEQ ID NO: 107248 - RNA, 32 nt, Human
cccgugggccaggcugcaccugugcuggggga

SEQ ID NO: 107249 - RNA, 32 nt, Human
cccguggggcugggccuccgccccugcaccag

SEQ ID NO: 107250 - RNA, 32 nt, Human
cccgugggguggagcauggugccccucacaag

SEQ ID NO: 107251 - RNA, 32 nt, Human
cccgugggguuccucccuucucuucacaguca

SEQ ID NO: 107252 - RNA, 32 nt, Human
cccgugggucccagcacuuccacacacucuga

SEQ ID NO: 107253 - RNA, 24 nt, Human
cccgugggugaccccucaccccag

SEQ ID NO: 107254 - RNA, 32 nt, Human
cccguggucaccacaauaaagagcccuccacc

SEQ ID NO: 107255 - RNA, 18 nt, Human
cccguggucacccccuca

SEQ ID NO: 107256 - RNA, 32 nt, Human
cccgugguguggccagccucuuugccggacgc

SEQ ID NO: 107257 - RNA, 32 nt, Human
cccguguacuccaccugccccaggagcuggag

SEQ ID NO: 107258 - RNA, 24 nt, Human
cccguguagcugggacuacaggca

SEQ ID NO: 107259 - RNA, 23 nt, Human
cccguguaggaugacugggccuc

SEQ ID NO: 107260 - RNA, 32 nt, Human
cccguguauaugcacccacaccaugugcccgu

SEQ ID NO: 107261 - RNA, 32 nt, Human
cccgugucaacuuucagugcuggccaaaaccu

SEQ ID NO: 107262 - RNA, 22 nt, Human
cccgugucaccuacuacuugga

SEQ ID NO: 107263 - RNA, 32 nt, Human
cccguguccagccugaguuccagccucacuga

SEQ ID NO: 107264 - RNA, 32 nt, Human
cccguguccucagagcaccacacacugagcac

SEQ ID NO: 107265 - RNA, 21 nt, Human
cccguguccugcagguauugg

SEQ ID NO: 107266 - RNA, 32 nt, Human
cccgugucugagggggugagggauacugaggc

SEQ ID NO: 107267 - RNA, 32 nt, Human
cccgugucuggaugcacagaugccauggccug

SEQ ID NO: 107268 - RNA, 31 nt, Human
cccgugugacuccucuggccugugucuaguu

SEQ ID NO: 107269 - RNA, 24 nt, Human
cccgugugagccagaaaccagggc

SEQ ID NO: 107270 - RNA, 32 nt, Human
cccgugugagccaggaaagggcuguguuuaug

SEQ ID NO: 107271 - RNA, 31 nt, Human
cccgugugcaggaucaauuguaggaggaaau

SEQ ID NO: 107272 - RNA, 32 nt, Human
cccgugugcccuggcccuggcuguggggcugg

SEQ ID NO: 107273 - RNA, 29 nt, Human
cccgugugucuguguguaugugugugggg

SEQ ID NO: 107274 - RNA, 32 nt, Human
cccguguguggcugaggauggcugagcagcag

SEQ ID NO: 107275 - RNA, 28 nt, Human
cccguguugggugcugccaucucuacua

SEQ ID NO: 107276 - RNA, 24 nt, Human
cccguguuuucugaccuccugccu

SEQ ID NO: 107277 - RNA, 32 nt, Human
cccguuacccgugaaagcuuugcuccacagcg

SEQ ID NO: 107278 - RNA, 32 nt, Human
cccguuagucccugaucccaaccuucucccuc

SEQ ID NO: 107279 - RNA, 32 nt, Human
cccguuauuauuuaagcuacugccaucaaccc

SEQ ID NO: 107280 - RNA, 32 nt, Human
cccguucacacugaggaacggagaccugugac

SEQ ID NO: 107281 - RNA, 32 nt, Human
cccguucaguugggagcuuauugugagauugg

SEQ ID NO: 107282 - RNA, 32 nt, Human
cccguucccacacaguggagggcgcagcaaac

SEQ ID NO: 107283 - RNA, 32 nt, Human
cccguucccacccccgccccaggcuggaaaac

SEQ ID NO: 107284 - RNA, 32 nt, Human
cccguucccagagaucuggggguccuucuuug

SEQ ID NO: 107285 - RNA, 32 nt, Human
cccguucccugcccuccucccuucccugggug

SEQ ID NO: 107286 - RNA, 32 nt, Human
cccguuccucaagggauuccuggcuggcuaug

SEQ ID NO: 107287 - RNA, 32 nt, Human
cccguucuacacugcccauguagacgauuuuc

SEQ ID NO: 107288 - RNA, 32 nt, Human
cccguucucauagcagcacuccuguuuaauca

SEQ ID NO: 107289 - RNA, 32 nt, Human
cccguugacgggcaaugcaucuuuccaaccug

SEQ ID NO: 107290 - RNA, 32 nt, Human
cccguugagaccagcaugaaggucgaagcuca

SEQ ID NO: 107291 - RNA, 32 nt, Human
cccguugaguccuuuugagggugauuugucuu

SEQ ID NO: 107292 - RNA, 32 nt, Human
cccguugcagagccagggacaugaugcaggcg

SEQ ID NO: 107293 - RNA, 32 nt, Human
cccguugcaggcgaguuccaagcacagagaac

SEQ ID NO: 107294 - RNA, 32 nt, Human
cccguugcuccuccuacuguuuaucacuugcc

SEQ ID NO: 107295 - RNA, 32 nt, Human
cccguuggaagacugagugcccggggcacggc

SEQ ID NO: 107296 - RNA, 31 nt, Human
cccguuggccuacuggaguguguaaggaacu

SEQ ID NO: 107297 - RNA, 32 nt, Human
cccguuggguagcuggggccaggcuucucucc

SEQ ID NO: 107298 - RNA, 32 nt, Human
cccguuuacagaaugcuacaagaauaauguac

SEQ ID NO: 107299 - RNA, 32 nt, Human
cccguuucugccacuugcuuccuggguaaaca

SEQ ID NO: 107300 - RNA, 32 nt, Human
cccguuucugcucuccucccuuuuguguuccu

SEQ ID NO: 107301 - RNA, 32 nt, Human
cccguuuuccagcauguguucuguuagauuuu

SEQ ID NO: 107302 - RNA, 32 nt, Human
cccguuuucggugccaucagugccccgucuac

SEQ ID NO: 107303 - RNA, 32 nt, Human
cccguuuucucagcauucagcccagggaaugu

SEQ ID NO: 107304 - RNA, 21 nt, Human
cccuaaaaaccauuccacuug

SEQ ID NO: 107305 - RNA, 32 nt, Human
cccuaaaaauaggaacaauuagccaggcaugg

SEQ ID NO: 107306 - RNA, 20 nt, Human
cccuaaaaauccccaaaaca

SEQ ID NO: 107307 - RNA, 32 nt, Human
cccuaaaaauggcucugucacugugaguggcu

SEQ ID NO: 107308 - RNA, 18 nt, Human
cccuaaaacauccauuug

SEQ ID NO: 107309 - RNA, 32 nt, Human
cccuaaaacgcacaccccgcuagccaugggca

SEQ ID NO: 107310 - RNA, 32 nt, Human
cccuaaaacugaggcacuaucccagagaucag

SEQ ID NO: 107311 - RNA, 32 nt, Human
cccuaaaaguuacaguuuggggagagggagug

SEQ ID NO: 107312 - RNA, 32 nt, Human
cccuaaaaugcgcguggaggcagcugggccuu

SEQ ID NO: 107313 - RNA, 32 nt, Human
cccuaaacacaaagcaucaguauuuauagcaa

SEQ ID NO: 107314 - RNA, 21 nt, Human
cccuaaaccccuccccaccuc

SEQ ID NO: 107315 - RNA, 32 nt, Human
cccuaaaccucauuuggauccuugggguauag

SEQ ID NO: 107316 - RNA, 32 nt, Human
cccuaaagcccucuuuuggcaggaagcggugg

SEQ ID NO: 107317 - RNA, 32 nt, Human
cccuaaaggcagagguugcagugagccgagau

SEQ ID NO: 107318 - RNA, 32 nt, Human
cccuaaauacuuucaugucucuauauucauuu

SEQ ID NO: 107319 - RNA, 32 nt, Human
cccuaaauaugcuggggucguaacccugagua

SEQ ID NO: 107320 - RNA, 32 nt, Human
cccuaaaucacuuugagccugggaaauaagcc

SEQ ID NO: 107321 - RNA, 32 nt, Human
cccuaaaucugccucuucugcaagcuacuugg

SEQ ID NO: 107322 - RNA, 21 nt, Human
cccuaaauggccagcagcuca

SEQ ID NO: 107323 - RNA, 32 nt, Human
cccuaaauuacaaaugagaaaauugaagcaca

SEQ ID NO: 107324 - RNA, 32 nt, Human
cccuaaauuccagagauucagcaacaaagagg

SEQ ID NO: 107325 - RNA, 18 nt, Human
cccuaaauuccugcugcc

SEQ ID NO: 107326 - RNA, 32 nt, Human
cccuaaauucuccuccucccccauuuugaugu

SEQ ID NO: 107327 - RNA, 32 nt, Human
cccuaacaccaucguuuccacucuucucagug

SEQ ID NO: 107328 - RNA, 32 nt, Human
cccuaacaggaaauuuggcaauggggucuggg

SEQ ID NO: 107329 - RNA, 32 nt, Human
cccuaacauaggauuucagagcacuccugcug

SEQ ID NO: 107330 - RNA, 32 nt, Human
cccuaacaucaccacacacaccccugucggca

SEQ ID NO: 107331 - RNA, 32 nt, Human
cccuaaccacaggaggcagggaagaaaaugug

SEQ ID NO: 107332 - RNA, 32 nt, Human
cccuaaccagggguaucucugagccugguggg

SEQ ID NO: 107333 - RNA, 32 nt, Human
cccuaacccuccacauacauuugccuaucaca

SEQ ID NO: 107334 - RNA, 19 nt, Human
cccuaaccgucucucccca

SEQ ID NO: 107335 - RNA, 22 nt, Human
cccuaaccugccucuggcccca

SEQ ID NO: 107336 - RNA, 32 nt, Human
cccuaaccuuuuccuuucugccauaauuaaca

SEQ ID NO: 107337 - RNA, 32 nt, Human
cccuaacucacugucugcggugcucauugcug

SEQ ID NO: 107338 - RNA, 32 nt, Human
cccuaacucccagcaccuuagaaugugacuau

SEQ ID NO: 107339 - RNA, 32 nt, Human
cccuaacucuaaugcuaaccccuaaaccaucc

SEQ ID NO: 107340 - RNA, 32 nt, Human
cccuaacuuaucugggaaggcuggggaaguag

SEQ ID NO: 107341 - RNA, 32 nt, Human
cccuaagacugugaccuccuggaaggcuggag

SEQ ID NO: 107342 - RNA, 32 nt, Human
cccuaagagaugggacuaggaccugagccugg

SEQ ID NO: 107343 - RNA, 32 nt, Human
cccuaagaggugaaagagaagccuggcucugu

SEQ ID NO: 107344 - RNA, 32 nt, Human
cccuaagaucagcuagacucucugccuuguuu

SEQ ID NO: 107345 - RNA, 32 nt, Human
cccuaagaucuccuugagucaggaaccugcaa

SEQ ID NO: 107346 - RNA, 25 nt, Human
cccuaagaucuucaccucucugccu

SEQ ID NO: 107347 - RNA, 32 nt, Human
cccuaagauguuuccagggcccucuggugccc

SEQ ID NO: 107348 - RNA, 32 nt, Human
cccuaagcaccaaccucuucaucuagaacaug

SEQ ID NO: 107349 - RNA, 32 nt, Human
cccuaagcagauagguagacagagguaaacau

SEQ ID NO: 107350 - RNA, 32 nt, Human
cccuaagcauuuuucaccuagcauuccucuuc

SEQ ID NO: 107351 - RNA, 32 nt, Human
cccuaagccacugggacgguggccagagaugc

SEQ ID NO: 107352 - RNA, 32 nt, Human
cccuaagccagcugcccccagagccacaguuc

SEQ ID NO: 107353 - RNA, 21 nt, Human
cccuaagccuuaagucuuuuu

SEQ ID NO: 107354 - RNA, 32 nt, Human
cccuaagcgguuuggaaucugcuuugcucuca

SEQ ID NO: 107355 - RNA, 32 nt, Human
cccuaagcgucacccaagcacacucacuuaaa

SEQ ID NO: 107356 - RNA, 32 nt, Human
cccuaagcugcucucccuuggaaccugcacag

SEQ ID NO: 107357 - RNA, 32 nt, Human
cccuaaggaacagcauuucucugcuccucagu

SEQ ID NO: 107358 - RNA, 32 nt, Human
cccuaaggaaucugaaaguauauuuuccuccc

SEQ ID NO: 107359 - RNA, 32 nt, Human
cccuaaggaguuguuuuucucacuuguuauua

SEQ ID NO: 107360 - RNA, 32 nt, Human
cccuaaggcagugucuccucagcugggcugcu

SEQ ID NO: 107361 - RNA, 32 nt, Human
cccuaaggggucuuugagggcauuuuaggagg

SEQ ID NO: 107362 - RNA, 32 nt, Human
cccuaaguauagaccucugcugcucaucagga

SEQ ID NO: 107363 - RNA, 32 nt, Human
cccuaagucacugaggcuggaguacaguggca

SEQ ID NO: 107364 - RNA, 32 nt, Human
cccuaagucucacuugcugcuacucucaauuu

SEQ ID NO: 107365 - RNA, 23 nt, Human
cccuaagucuccaauauugcagg

SEQ ID NO: 107366 - RNA, 32 nt, Human
cccuaagugacagcuguuacugccugggagag

SEQ ID NO: 107367 - RNA, 32 nt, Human
cccuaaguucaaggccucccuaccuuccccuu

SEQ ID NO: 107368 - RNA, 32 nt, Human
cccuaaguuguucucaggguuuggagaugaug

SEQ ID NO: 107369 - RNA, 32 nt, Human
cccuaauaaaaauacaaaaauuagcugggcau

SEQ ID NO: 107370 - RNA, 32 nt, Human
cccuaauagccucagucucugccuucaguucc

SEQ ID NO: 107371 - RNA, 32 nt, Human
cccuaauccaauaugacugguguccuuauaag

SEQ ID NO: 107372 - RNA, 32 nt, Human
cccuaaucucagaaugcuggaaugaugucugu

SEQ ID NO: 107373 - RNA, 32 nt, Human
cccuaaucuccucugcuuguguccacccacac

SEQ ID NO: 107374 - RNA, 22 nt, Human
cccuaaucugagaagucagccu

SEQ ID NO: 107375 - RNA, 32 nt, Human
cccuaaucugcagccccgccuuugccuacucc

SEQ ID NO: 107376 - RNA, 32 nt, Human
cccuaaucuggcugcauugauggccagauugu

SEQ ID NO: 107377 - RNA, 30 nt, Human
cccuaaugaaacugagugugaaugaggcuc

SEQ ID NO: 107378 - RNA, 32 nt, Human
cccuaaugaagggccuggagguugggguaucu

SEQ ID NO: 107379 - RNA, 32 nt, Human
cccuaaugcgcaggcuggcccugcccugguuu

SEQ ID NO: 107380 - RNA, 32 nt, Human
cccuaauucccugagcuguagauccucuggug

SEQ ID NO: 107381 - RNA, 32 nt, Human
cccuaauucuucuuccuuggucuggaagaaca

SEQ ID NO: 107382 - RNA, 32 nt, Human
cccuaauugauacaacuuuauggcaggguuuu

SEQ ID NO: 107383 - RNA, 32 nt, Human
cccuaauuucugagagaauaaugguuagagaa

SEQ ID NO: 107384 - RNA, 32 nt, Human
cccuacaaagcagaccagccuggggcagauau

SEQ ID NO: 107385 - RNA, 32 nt, Human
cccuacacacucucucugcucuucccaugcaa

SEQ ID NO: 107386 - RNA, 32 nt, Human
cccuacacacuugccauccccuacagcacaga

SEQ ID NO: 107387 - RNA, 32 nt, Human
cccuacaccaacaaagaggaauggcugcaaga

SEQ ID NO: 107388 - RNA, 32 nt, Human
cccuacaccacacccauacucagccccugcag

SEQ ID NO: 107389 - RNA, 19 nt, Human
cccuacaccccuccccugc

SEQ ID NO: 107390 - RNA, 32 nt, Human
cccuacacccucccccuccagggaaugcugag

SEQ ID NO: 107391 - RNA, 24 nt, Human
cccuacacgccgccccccauccuc

SEQ ID NO: 107392 - RNA, 32 nt, Human
cccuacagcagcccccuuccuccaucccucug

SEQ ID NO: 107393 - RNA, 32 nt, Human
cccuacagcaguucaggcugugugguucgcaa

SEQ ID NO: 107394 - RNA, 32 nt, Human
cccuacagccacaaccuccuuuacaguuuuua

SEQ ID NO: 107395 - RNA, 32 nt, Human
cccuacagccucacuuccccagccucaccuug

SEQ ID NO: 107396 - RNA, 32 nt, Human
cccuacagccugaagcaaaccagcagcccagc

SEQ ID NO: 107397 - RNA, 32 nt, Human
cccuacagccuggaagaaggaggguccugauu

SEQ ID NO: 107398 - RNA, 32 nt, Human
cccuacagcugucacuuccaaauguuccugua

SEQ ID NO: 107399 - RNA, 32 nt, Human
cccuacaggcuggcccugcaauggggcccuga

SEQ ID NO: 107400 - RNA, 32 nt, Human
cccuacagggugagacucagcucucaugcagg

SEQ ID NO: 107401 - RNA, 32 nt, Human
cccuacagugaauccuuaccaguguucagucc

SEQ ID NO: 107402 - RNA, 24 nt, Human
cccuacagugagcagcccacacag

SEQ ID NO: 107403 - RNA, 32 nt, Human
cccuacaguguucaaggucacagggucaaaau

SEQ ID NO: 107404 - RNA, 32 nt, Human
cccuacaguuugaacaauuauuuuaauccagc

SEQ ID NO: 107405 - RNA, 32 nt, Human
cccuacaucaggaaggagagcccccugcucaa

SEQ ID NO: 107406 - RNA, 32 nt, Human
cccuacauuuccuccugauuucccaagacucu

SEQ ID NO: 107407 - RNA, 32 nt, Human
cccuaccaaggaccaggaaaagcagcagcugc

SEQ ID NO: 107408 - RNA, 32 nt, Human
cccuaccaaugccccuuuaagugcugcagggg

SEQ ID NO: 107409 - RNA, 32 nt, Human
cccuaccacaaaccaggcuggaacccaagccc

SEQ ID NO: 107410 - RNA, 32 nt, Human
cccuaccacagccaggaggaaaaagcuaggcg

SEQ ID NO: 107411 - RNA, 32 nt, Human
cccuaccacccaggacacuggugugaaugaca

SEQ ID NO: 107412 - RNA, 32 nt, Human
cccuaccagcuccuccagcccugccgggcaca

SEQ ID NO: 107413 - RNA, 32 nt, Human
cccuaccaggcagguucuauggcaaugugggc

SEQ ID NO: 107414 - RNA, 32 nt, Human
cccuaccauauuuuacacauguauuuauaauc

SEQ ID NO: 107415 - RNA, 32 nt, Human
cccuaccaucuugccagcucugucuuuccagc

SEQ ID NO: 107416 - RNA, 32 nt, Human
cccuaccaugagagucagccguaggggacccc

SEQ ID NO: 107417 - RNA, 32 nt, Human
cccuaccccacgauaaucgugaccucacugcc

SEQ ID NO: 107418 - RNA, 18 nt, Human
cccuaccccuaucuacca

SEQ ID NO: 107419 - RNA, 32 nt, Human
cccuaccccugucuccccuucaaggacuucuc

SEQ ID NO: 107420 - RNA, 32 nt, Human
cccuacccuaagcuguagccugggugacugac

SEQ ID NO: 107421 - RNA, 32 nt, Human
cccuacccucagacaaggaacucucuccucuc

SEQ ID NO: 107422 - RNA, 32 nt, Human
cccuacccuccagcacuccaaggcaggacucg

SEQ ID NO: 107423 - RNA, 32 nt, Human
cccuacccuccaggagugggucuggucucauc

SEQ ID NO: 107424 - RNA, 32 nt, Human
cccuacccugcucuccaccccuccacccuaug

SEQ ID NO: 107425 - RNA, 32 nt, Human
cccuacccugggcccaugucugacccugggga

SEQ ID NO: 107426 - RNA, 32 nt, Human
cccuacccuguucuccccugaggccccguucc

SEQ ID NO: 107427 - RNA, 32 nt, Human
cccuacccuuccugccaagccagggacuaagc

SEQ ID NO: 107428 - RNA, 32 nt, Human
cccuaccgcugccauuugggcccuuuaauaaa

SEQ ID NO: 107429 - RNA, 32 nt, Human
cccuaccggcugggauuggccuccuggaagua

SEQ ID NO: 107430 - RNA, 32 nt, Human
cccuaccgguccggccucucuccaguccaucc

SEQ ID NO: 107431 - RNA, 21 nt, Human
cccuaccucacgccugcccca

SEQ ID NO: 107432 - RNA, 32 nt, Human
cccuaccuccagggcauagucagucugggcug

SEQ ID NO: 107433 - RNA, 32 nt, Human
cccuaccucccucccucccuacuuuccuugcu

SEQ ID NO: 107434 - RNA, 32 nt, Human
cccuaccugcaaccaccgcuugccaugguuuc

SEQ ID NO: 107435 - RNA, 32 nt, Human
cccuaccugcaaccucuuccaggcucccuuuu

SEQ ID NO: 107436 - RNA, 32 nt, Human
cccuaccugccuggcuaagacccguggccguc

SEQ ID NO: 107437 - RNA, 32 nt, Human
cccuaccuggagccucaccuccaaggaaauuc

SEQ ID NO: 107438 - RNA, 32 nt, Human
cccuaccuggccucccccuggccucugggccu

SEQ ID NO: 107439 - RNA, 32 nt, Human
cccuaccugggcucuggggaggcugugggccu

SEQ ID NO: 107440 - RNA, 32 nt, Human
cccuaccugucaguucuuguuucuggggagga

SEQ ID NO: 107441 - RNA, 32 nt, Human
cccuaccugucuacccuccuucggaccccuag

SEQ ID NO: 107442 - RNA, 32 nt, Human
cccuaccugugccugacccuacuucuuuugcu

SEQ ID NO: 107443 - RNA, 32 nt, Human
cccuaccuguucuccccuccaggccaccuguc

SEQ ID NO: 107444 - RNA, 32 nt, Human
cccuaccuugcuccauggauuaauuccuucug

SEQ ID NO: 107445 - RNA, 32 nt, Human
cccuacguugcgcugcucaucacagcccgggg

SEQ ID NO: 107446 - RNA, 32 nt, Human
cccuacuaaaaauacaaaaauuagguggacau

SEQ ID NO: 107447 - RNA, 32 nt, Human
cccuacuacccugaacacugccuccccaaaaa

SEQ ID NO: 107448 - RNA, 32 nt, Human
cccuacuacugaacuccaguuuugaucucgug

SEQ ID NO: 107449 - RNA, 32 nt, Human
cccuacuaguaaugcucacugcaguuuauuuu

SEQ ID NO: 107450 - RNA, 32 nt, Human
cccuacucacugguguagccauuauaggcagc

SEQ ID NO: 107451 - RNA, 32 nt, Human
cccuacucagccucuacugaugccucaggaag

SEQ ID NO: 107452 - RNA, 32 nt, Human
cccuacuccagccuggagcucccugagggagc

SEQ ID NO: 107453 - RNA, 25 nt, Human
cccuacuccccaguuuccuggcgau

SEQ ID NO: 107454 - RNA, 32 nt, Human
cccuacucccucccucuccugcacccccuccc

SEQ ID NO: 107455 - RNA, 32 nt, Human
cccuacucuacuggauucaaggccaguaaaug

SEQ ID NO: 107456 - RNA, 21 nt, Human
cccuacucuccaccuuugccu

SEQ ID NO: 107457 - RNA, 32 nt, Human
cccuacucuccuccccuuauucccgaggccca

SEQ ID NO: 107458 - RNA, 32 nt, Human
cccuacucuccucccuugcucccagcagcgga

SEQ ID NO: 107459 - RNA, 32 nt, Human
cccuacucugcagccuuucccaugcucugccc

SEQ ID NO: 107460 - RNA, 32 nt, Human
cccuacucuggcccuccuuaugucacugccuc

SEQ ID NO: 107461 - RNA, 32 nt, Human
cccuacucuguucuguaucacagggaagcuga

SEQ ID NO: 107462 - RNA, 32 nt, Human
cccuacugagagugcagggaacucagcaccgu

SEQ ID NO: 107463 - RNA, 21 nt, Human
cccuacugccaaggauggggc

SEQ ID NO: 107464 - RNA, 32 nt, Human
cccuacugcccaggcuggaauccaagaguggg

SEQ ID NO: 107465 - RNA, 32 nt, Human
cccuacugggagaaaugugugucggagcugca

SEQ ID NO: 107466 - RNA, 32 nt, Human
cccuacugggaggggcgggagggagguguugc

SEQ ID NO: 107467 - RNA, 32 nt, Human
cccuacuguucccacgcuuccucucucucgag

SEQ ID NO: 107468 - RNA, 32 nt, Human
cccuacuuccacugcuuuuuccugcauuuaag

SEQ ID NO: 107469 - RNA, 32 nt, Human
cccuacuucucccucugcauuccacuggcucu

SEQ ID NO: 107470 - RNA, 32 nt, Human
cccuacuuuaagaauuuaauugcucacuuauu

SEQ ID NO: 107471 - RNA, 21 nt, Human
cccuacuuuccucuccugcuu

SEQ ID NO: 107472 - RNA, 32 nt, Human
cccuacuuuuguucuucuauaggcccugggcu

SEQ ID NO: 107473 - RNA, 32 nt, Human
cccuacuuuuucuccgccaccugggccgugau

SEQ ID NO: 107474 - RNA, 32 nt, Human
cccuagaaacaacauacuugucccaugagcag

SEQ ID NO: 107475 - RNA, 23 nt, Human
cccuagaaagaggagugcuagcc

SEQ ID NO: 107476 - RNA, 24 nt, Human
cccuagaaagcugccuccguccag

SEQ ID NO: 107477 - RNA, 32 nt, Human
cccuagaacugccauucccaagaccucugucu

SEQ ID NO: 107478 - RNA, 32 nt, Human
cccuagaagaggagggagggauucuggguggg

SEQ ID NO: 107479 - RNA, 23 nt, Human
cccuagaagcaugaauugcuuca

SEQ ID NO: 107480 - RNA, 32 nt, Human
cccuagaagccaaaugcacugccuuucucugu

SEQ ID NO: 107481 - RNA, 20 nt, Human
cccuagaagccguggaguca

SEQ ID NO: 107482 - RNA, 26 nt, Human
cccuagaagguaaccaccuccuggcu

SEQ ID NO: 107483 - RNA, 28 nt, Human
cccuagaagugcucugccucauucccug

SEQ ID NO: 107484 - RNA, 32 nt, Human
cccuagaauggaaaccucagggccaagggcuc

SEQ ID NO: 107485 - RNA, 32 nt, Human
cccuagacaucuucucccucccuugccucaga

SEQ ID NO: 107486 - RNA, 32 nt, Human
cccuagacaucuucucccucccuugccucagg

SEQ ID NO: 107487 - RNA, 32 nt, Human
cccuagacccuccccaaggaugaccacacccg

SEQ ID NO: 107488 - RNA, 32 nt, Human
cccuagaccuaucuggggacaggcuggcucag

SEQ ID NO: 107489 - RNA, 32 nt, Human
cccuagaccuccauucacucuguuucucuucu

SEQ ID NO: 107490 - RNA, 32 nt, Human
cccuagacuccaaauguccucccagcucaccu

SEQ ID NO: 107491 - RNA, 32 nt, Human
cccuagagacucagaggacccaccugggccaa

SEQ ID NO: 107492 - RNA, 32 nt, Human
cccuagagagcauuaagcacagucucagccac

SEQ ID NO: 107493 - RNA, 32 nt, Human
cccuagagauggggucucgccguguugcacag

SEQ ID NO: 107494 - RNA, 25 nt, Human
cccuagagcggcgacagaagcucuu

SEQ ID NO: 107495 - RNA, 24 nt, Human
cccuagaggcggaguuugcaguga

SEQ ID NO: 107496 - RNA, 32 nt, Human
cccuagaggcggaguuugcagugagccgagau

SEQ ID NO: 107497 - RNA, 32 nt, Human
cccuagaggcugccugcgcaucuggagccugc

SEQ ID NO: 107498 - RNA, 21 nt, Human
cccuagagggcccacuagccc

SEQ ID NO: 107499 - RNA, 24 nt, Human
cccuagaggucgaggcugcaguga

SEQ ID NO: 107500 - RNA, 32 nt, Human
cccuagaggucgaggcugcagugagcuauguu

SEQ ID NO: 107501 - RNA, 24 nt, Human
cccuagagguugaggcugcaguga

SEQ ID NO: 107502 - RNA, 32 nt, Human
cccuagagguugaggcugcagugagcuauguu

SEQ ID NO: 107503 - RNA, 32 nt, Human
cccuagauacagcaguuuauacccacacaccu

SEQ ID NO: 107504 - RNA, 32 nt, Human
cccuagaugaaugagagugagcucuuuucuaa

SEQ ID NO: 107505 - RNA, 32 nt, Human
cccuagauuccuggcaaccuccccuccccuga

SEQ ID NO: 107506 - RNA, 17 nt, Human
cccuagcaaggguccuc

SEQ ID NO: 107507 - RNA, 32 nt, Human
cccuagcacacaguauacacagagccagggcu

SEQ ID NO: 107508 - RNA, 32 nt, Human
cccuagcacacccaugccuccaccucuaugaa

SEQ ID NO: 107509 - RNA, 32 nt, Human
cccuagcacccugcaggugaauauccaauguu

SEQ ID NO: 107510 - RNA, 32 nt, Human
cccuagcacgcgccccagccccagagcagggu

SEQ ID NO: 107511 - RNA, 32 nt, Human
cccuagcagggaccccagcgcccgagagacca

SEQ ID NO: 107512 - RNA, 32 nt, Human
cccuagccaagaaggagaagaaagagccuuga

SEQ ID NO: 107513 - RNA, 32 nt, Human
cccuagccaaugucuccuccccuucccccacc

SEQ ID NO: 107514 - RNA, 32 nt, Human
cccuagccacuggccccucccuguuucaugua

SEQ ID NO: 107515 - RNA, 32 nt, Human
cccuagccaugaaaggaaacaggggugcggcu

SEQ ID NO: 107516 - RNA, 32 nt, Human
cccuagccccuucccuccuccuggggccucca

SEQ ID NO: 107517 - RNA, 32 nt, Human
cccuagcccggcuguggcuccaccuccagcuc

SEQ ID NO: 107518 - RNA, 32 nt, Human
cccuagcccuaucuccuacauggcaggagcau

SEQ ID NO: 107519 - RNA, 32 nt, Human
cccuagcccucagugccuccccucaacuuucc

SEQ ID NO: 107520 - RNA, 22 nt, Human
cccuagcccuucucagcaggaa

SEQ ID NO: 107521 - RNA, 19 nt, Human
cccuagcccuuuagccuuu

SEQ ID NO: 107522 - RNA, 32 nt, Human
cccuagccucagauggcucugccaccagccag

SEQ ID NO: 107523 - RNA, 32 nt, Human
cccuagccuccaccauccccgcacaaagcggc

SEQ ID NO: 107524 - RNA, 32 nt, Human
cccuagccugccuccccugccucaccagcccu

SEQ ID NO: 107525 - RNA, 20 nt, Human
cccuagccugggcaacagag

SEQ ID NO: 107526 - RNA, 32 nt, Human
cccuagcgauccagcccuccccuggacccuag

SEQ ID NO: 107527 - RNA, 32 nt, Human
cccuagcgcuaucucccugccuccugccggcu

SEQ ID NO: 107528 - RNA, 32 nt, Human
cccuagcgcucccgcgcugcugcuccagccgc

SEQ ID NO: 107529 - RNA, 32 nt, Human
cccuagcuaccacugccuccaggcuacugccc

SEQ ID NO: 107530 - RNA, 32 nt, Human
cccuagcucaccuccuacuguaaagagaaugc

SEQ ID NO: 107531 - RNA, 32 nt, Human
cccuagcucacugcaaccuccaacugcugggc

SEQ ID NO: 107532 - RNA, 24 nt, Human
cccuagcucccaccgccaccgccg

SEQ ID NO: 107533 - RNA, 19 nt, Human
cccuagcucccuccacuug

SEQ ID NO: 107534 - RNA, 18 nt, Human
cccuagcucucccggggu

SEQ ID NO: 107535 - RNA, 32 nt, Human
cccuagcucuucuacuacggaggggaacugca

SEQ ID NO: 107536 - RNA, 32 nt, Human
cccuagcugcauuucaguggaccauggauaga

SEQ ID NO: 107537 - RNA, 32 nt, Human
cccuagcuuccguguuccuugccuugugaguu

SEQ ID NO: 107538 - RNA, 32 nt, Human
cccuaggaaaaugggcaccugccaccauccug

SEQ ID NO: 107539 - RNA, 32 nt, Human
cccuaggaaagcagccucucuccgcuguccca

SEQ ID NO: 107540 - RNA, 32 nt, Human
cccuaggaaggagccaggggccaugguggggg

SEQ ID NO: 107541 - RNA, 32 nt, Human
cccuaggaccauugaacacccacugccgggga

SEQ ID NO: 107542 - RNA, 32 nt, Human
cccuaggagaguucuuuggggugacuuucaag

SEQ ID NO: 107543 - RNA, 25 nt, Human
cccuaggagggccaggaacugcuga

SEQ ID NO: 107544 - RNA, 19 nt, Human
cccuaggagguauaauaua

SEQ ID NO: 107545 - RNA, 32 nt, Human
cccuaggauuuuccuucccugcccucaccugc

SEQ ID NO: 107546 - RNA, 32 nt, Human
cccuaggcaacaaccaucacccucccuccuua

SEQ ID NO: 107547 - RNA, 19 nt, Human
cccuaggccagcacagccu

SEQ ID NO: 107548 - RNA, 32 nt, Human
cccuaggccagccugggauaagagucccacag

SEQ ID NO: 107549 - RNA, 32 nt, Human
cccuaggccaggccuggugagugacagcagcc

SEQ ID NO: 107550 - RNA, 32 nt, Human
cccuaggccauggagaaaaccuuaaacaaacc

SEQ ID NO: 107551 - RNA, 32 nt, Human
cccuaggcccucauccuaccuaggacugaggc

SEQ ID NO: 107552 - RNA, 32 nt, Human
cccuaggcccuuuucagacuccugggcccuug

SEQ ID NO: 107553 - RNA, 32 nt, Human
cccuaggccgucacaccacacccuccauuucc

SEQ ID NO: 107554 - RNA, 32 nt, Human
cccuaggccuggcuccuucuguugacauggga

SEQ ID NO: 107555 - RNA, 32 nt, Human
cccuaggccuuccugaugcgcuugccugcucc

SEQ ID NO: 107556 - RNA, 32 nt, Human
cccuaggcuauacaagucucagucuaggggaa

SEQ ID NO: 107557 - RNA, 32 nt, Human
cccuaggcucaagcaauccuuccaccucaguc

SEQ ID NO: 107558 - RNA, 23 nt, Human
cccuaggcuuaccccuccugccu

SEQ ID NO: 107559 - RNA, 23 nt, Human
cccuagggaccgcggggcagccc

SEQ ID NO: 107560 - RNA, 29 nt, Human
cccuagggcauaaggauuaucauugcuaa

SEQ ID NO: 107561 - RNA, 27 nt, Human
cccuagggccaagcccacccaccagcc

SEQ ID NO: 107562 - RNA, 32 nt, Human
cccuagggccacucccaccugcaggacauuaa

SEQ ID NO: 107563 - RNA, 28 nt, Human
cccuagggcccaccccacccaccagccc

SEQ ID NO: 107564 - RNA, 27 nt, Human
cccuagggccccaccacucaccagccc

SEQ ID NO: 107565 - RNA, 21 nt, Human
cccuagggccccugccugccu

SEQ ID NO: 107566 - RNA, 29 nt, Human
cccuagggccucacucacccagccagccc

SEQ ID NO: 107567 - RNA, 32 nt, Human
cccuagggccuggguggcaggggguggguggc

SEQ ID NO: 107568 - RNA, 32 nt, Human
cccuagggcgacaggagccagcgggacgccgc

SEQ ID NO: 107569 - RNA, 22 nt, Human
cccuaggggcuccugccugccc

SEQ ID NO: 107570 - RNA, 32 nt, Human
cccuagggggagaagaagccgagagccuuuug

SEQ ID NO: 107571 - RNA, 32 nt, Human
cccuaggguaaucacuuugaucaacaugacga

SEQ ID NO: 107572 - RNA, 32 nt, Human
cccuagggugagaagaggcugagagagaaggg

SEQ ID NO: 107573 - RNA, 32 nt, Human
cccuaggugauuucucaagcuccuugggggac

SEQ ID NO: 107574 - RNA, 32 nt, Human
cccuaggugccuguaggcuaugguacuucuuc

SEQ ID NO: 107575 - RNA, 24 nt, Human
cccuagguuucugccuccucguuu

SEQ ID NO: 107576 - RNA, 32 nt, Human
cccuaguaaaaaugcaaaaauuagcugggugu

SEQ ID NO: 107577 - RNA, 32 nt, Human
cccuaguacaucuuacagcuuuccccuuccau

SEQ ID NO: 107578 - RNA, 24 nt, Human
cccuaguagcugggacuacaggca

SEQ ID NO: 107579 - RNA, 24 nt, Human
cccuaguagcugggauuacaggca

SEQ ID NO: 107580 - RNA, 31 nt, Human
cccuaguaucuucagcacaugcucacuguuc

SEQ ID NO: 107581 - RNA, 31 nt, Human
cccuaguaucuucagcacaugcucacuguuu

SEQ ID NO: 107582 - RNA, 29 nt, Human
cccuagucaacagcagaccagccuggcca

SEQ ID NO: 107583 - RNA, 32 nt, Human
cccuagucauagccugucauuugcuacuuuug

SEQ ID NO: 107584 - RNA, 32 nt, Human
cccuagucaugcggaacaacauagucuaaaaa

SEQ ID NO: 107585 - RNA, 32 nt, Human
cccuaguccuaggcgacuugaauaaaguggga

SEQ ID NO: 107586 - RNA, 32 nt, Human
cccuagugaggagcugaacuugcucaaucuaa

SEQ ID NO: 107587 - RNA, 32 nt, Human
cccuagugaggagcugaacuugcucagucuaa

SEQ ID NO: 107588 - RNA, 32 nt, Human
cccuagugaggggaggagagagaacccauccu

SEQ ID NO: 107589 - RNA, 32 nt, Human
cccuagugcccaaggcagggacccugggccug

SEQ ID NO: 107590 - RNA, 25 nt, Human
cccuagugcgagguuaaaaccuuca

SEQ ID NO: 107591 - RNA, 32 nt, Human
cccuaguuaguacucggacuccugugcuaauu

SEQ ID NO: 107592 - RNA, 32 nt, Human
cccuaguuccacugcacauggcccuccucccc

SEQ ID NO: 107593 - RNA, 32 nt, Human
cccuaguucccaaagggagcagggagauggga

SEQ ID NO: 107594 - RNA, 32 nt, Human
cccuaguucccucugcucagccaagcuuguua

SEQ ID NO: 107595 - RNA, 32 nt, Human
cccuaguugugggcaacacaugcagaauaauc

SEQ ID NO: 107596 - RNA, 32 nt, Human
cccuaguuugcuccugagcgcuucguuccucu

SEQ ID NO: 107597 - RNA, 32 nt, Human
cccuauaaaccugaccuccuuuaugguuaaua

SEQ ID NO: 107598 - RNA, 32 nt, Human
cccuauacagugcccugcccacccuuaucugc

SEQ ID NO: 107599 - RNA, 22 nt, Human
cccuauaccccuacacaggggc

SEQ ID NO: 107600 - RNA, 32 nt, Human
cccuauacccuaacucacuccaccccauuuuc

SEQ ID NO: 107601 - RNA, 18 nt, Human
cccuauagcagggccaug

SEQ ID NO: 107602 - RNA, 32 nt, Human
cccuauaucuugcauccggagcugcagccaug

SEQ ID NO: 107603 - RNA, 32 nt, Human
cccuaucaaaauaccauugucauuuuucacag

SEQ ID NO: 107604 - RNA, 32 nt, Human
cccuaucaguuagaacugcaggccaguuccaa

SEQ ID NO: 107605 - RNA, 32 nt, Human
cccuaucaugcccggugcccaggcuggggccg

SEQ ID NO: 107606 - RNA, 32 nt, Human
cccuaucccagagaccuugaugcuuggccucc

SEQ ID NO: 107607 - RNA, 32 nt, Human
cccuaucccugggaagccaugagaccucaaac

SEQ ID NO: 107608 - RNA, 22 nt, Human
cccuaucccuugcauccacuug

SEQ ID NO: 107609 - RNA, 32 nt, Human
cccuauccgccccucacuuacccuuaaacagg

SEQ ID NO: 107610 - RNA, 32 nt, Human
cccuauccugcuuccccacauuucuguuccuc

SEQ ID NO: 107611 - RNA, 17 nt, Human
cccuaucuccacucccu

SEQ ID NO: 107612 - RNA, 18 nt, Human
cccuaucuccacuccuug

SEQ ID NO: 107613 - RNA, 32 nt, Human
cccuaucucucuccccgcuccccagccucggg

SEQ ID NO: 107614 - RNA, 19 nt, Human
cccuaucuggauucuacuu

SEQ ID NO: 107615 - RNA, 32 nt, Human
cccuaucuggcaguccugcuuugcuacuugcu

SEQ ID NO: 107616 - RNA, 19 nt, Human
cccuaucuuagaacacuca

SEQ ID NO: 107617 - RNA, 19 nt, Human
cccuaucuuagugcaccug

SEQ ID NO: 107618 - RNA, 21 nt, Human
cccuaucuuccccuccaccug

SEQ ID NO: 107619 - RNA, 32 nt, Human
cccuaucuuguccuagcccaggccuccaugaa

SEQ ID NO: 107620 - RNA, 32 nt, Human
cccuaugaauacugguuaacauggacagugca

SEQ ID NO: 107621 - RNA, 32 nt, Human
cccuaugaauguaaagaguguggggaagcuuu

SEQ ID NO: 107622 - RNA, 32 nt, Human
cccuaugagggaggcagaaauggagggguccc

SEQ ID NO: 107623 - RNA, 32 nt, Human
cccuaugcugggaaagugaggauuugggauuu

SEQ ID NO: 107624 - RNA, 32 nt, Human
cccuaugcuuccggccuccugucccucaucca

SEQ ID NO: 107625 - RNA, 32 nt, Human
cccuauggaagcuuagucacaagaggcacuag

SEQ ID NO: 107626 - RNA, 32 nt, Human
cccuauggaggaacaacucuccagugccugga

SEQ ID NO: 107627 - RNA, 31 nt, Human
cccuauggcaaagucucugccaacacuccuc

SEQ ID NO: 107628 - RNA, 32 nt, Human
cccuaugggagcaagggcugaccugugacugu

SEQ ID NO: 107629 - RNA, 32 nt, Human
cccuaugggaggcagagcggcaaggacagggc

SEQ ID NO: 107630 - RNA, 32 nt, Human
cccuauggugcucagcccugagauccugcaca

SEQ ID NO: 107631 - RNA, 32 nt, Human
cccuauguaguuuuuaaaacacuggcaaugac

SEQ ID NO: 107632 - RNA, 32 nt, Human
cccuaugucaagugcuuuaucucuuuuggaga

SEQ ID NO: 107633 - RNA, 32 nt, Human
cccuaugucacccaggcuguggugcaguaagc

SEQ ID NO: 107634 - RNA, 32 nt, Human
cccuauguugcccaggcuggccucaaauuccu

SEQ ID NO: 107635 - RNA, 32 nt, Human
cccuauguugcccaggcuggucucaaacuccu

SEQ ID NO: 107636 - RNA, 32 nt, Human
cccuauguugcccaggcuggucuccaacaccu

SEQ ID NO: 107637 - RNA, 27 nt, Human
cccuauuacauacaucuuucaaugucc

SEQ ID NO: 107638 - RNA, 32 nt, Human
cccuauuacugcuaguaugcuacuucuuacau

SEQ ID NO: 107639 - RNA, 32 nt, Human
cccuauuagacuguaagccucucgagggugag

SEQ ID NO: 107640 - RNA, 32 nt, Human
cccuauucagaauuaaaccucacugcaaauuu

SEQ ID NO: 107641 - RNA, 32 nt, Human
cccuauucccagaggcagguggugcugacccu

SEQ ID NO: 107642 - RNA, 32 nt, Human
cccuauuccuaaggacuccugaugucaucuca

SEQ ID NO: 107643 - RNA, 18 nt, Human
cccuauuccucccacuaa

SEQ ID NO: 107644 - RNA, 32 nt, Human
cccuauuccuccuuuucccuccuuccucccac

SEQ ID NO: 107645 - RNA, 32 nt, Human
cccuauucucucuuuacgcuuaguuaucagcu

SEQ ID NO: 107646 - RNA, 32 nt, Human
cccuauugccaugaccuuccucacaucucuuu

SEQ ID NO: 107647 - RNA, 32 nt, Human
cccuauugcccaggcuggagugcaauggcgug

SEQ ID NO: 107648 - RNA, 32 nt, Human
cccuauugccuucugcagcuucaaguccguug

SEQ ID NO: 107649 - RNA, 32 nt, Human
cccuauuguccugccacaucucccucuccgag

SEQ ID NO: 107650 - RNA, 32 nt, Human
cccuauuuagccaaaggaaggaggucagggga

SEQ ID NO: 107651 - RNA, 24 nt, Human
cccuauuuccuucuccuccugucu

SEQ ID NO: 107652 - RNA, 32 nt, Human
cccuauuucuucucucacuagcagcuauacaa

SEQ ID NO: 107653 - RNA, 32 nt, Human
cccuauuugaagacgucuuuuguaaaagcuag

SEQ ID NO: 107654 - RNA, 32 nt, Human
cccuauuugcaaucauauucucccucugcuuc

SEQ ID NO: 107655 - RNA, 32 nt, Human
cccuauuuugcacaugagaaauccaaaauuca

SEQ ID NO: 107656 - RNA, 32 nt, Human
cccucaaacccauucccucuccaggagaccua

SEQ ID NO: 107657 - RNA, 24 nt, Human
cccucaaaccccagcccaggccgg

SEQ ID NO: 107658 - RNA, 32 nt, Human
cccucaaacuaacaccccacacugcuuuggga

SEQ ID NO: 107659 - RNA, 32 nt, Human
cccucaaagagggggugaaggaagggcaccug

SEQ ID NO: 107660 - RNA, 32 nt, Human
cccucaaaucacccucucccguagcccacccg

SEQ ID NO: 107661 - RNA, 32 nt, Human
cccucaaaucagaugccucuaaggacuuuccu

SEQ ID NO: 107662 - RNA, 27 nt, Human
cccucaaaucguccuuuaagucuuccu

SEQ ID NO: 107663 - RNA, 20 nt, Human
cccucaacaccacccucaca

SEQ ID NO: 107664 - RNA, 32 nt, Human
cccucaacaccacccucacacacuggcuccag

SEQ ID NO: 107665 - RNA, 32 nt, Human
cccucaaccauccugccaaugcccaggaacau

SEQ ID NO: 107666 - RNA, 32 nt, Human
cccucaaccuccugggcucaagcaauccuccu

SEQ ID NO: 107667 - RNA, 32 nt, Human
cccucaaccuccuggguucaagcaauccuccu

SEQ ID NO: 107668 - RNA, 32 nt, Human
cccucaaccuucaccaaacacuacccaugggg

SEQ ID NO: 107669 - RNA, 32 nt, Human
cccucaacucauuccaaccacauugauucagu

SEQ ID NO: 107670 - RNA, 19 nt, Human
cccucaacuuccugcugcu

SEQ ID NO: 107671 - RNA, 32 nt, Human
cccucaagaaugagacaggaagugcagaggaa

SEQ ID NO: 107672 - RNA, 32 nt, Human
cccucaagagcccacuguaugcuggggaaaug

SEQ ID NO: 107673 - RNA, 32 nt, Human
cccucaagagugugggugagacauauacagcc

SEQ ID NO: 107674 - RNA, 32 nt, Human
cccucaagcauccugauuuguucguucucucu

SEQ ID NO: 107675 - RNA, 32 nt, Human
cccucaagccagccacaguccccgccaggccg

SEQ ID NO: 107676 - RNA, 19 nt, Human
cccucaagccuucugcucc

SEQ ID NO: 107677 - RNA, 32 nt, Human
cccucaagcugcaguaaagcccaggacugaau

SEQ ID NO: 107678 - RNA, 32 nt, Human
cccucaaggacaggcuguagcccucauaccca

SEQ ID NO: 107679 - RNA, 18 nt, Human
cccucaaggcaagauaag

SEQ ID NO: 107680 - RNA, 20 nt, Human
cccucaaggccucugcugcc

SEQ ID NO: 107681 - RNA, 32 nt, Human
cccucaagggcugaggccgaggauggaugccc

SEQ ID NO: 107682 - RNA, 31 nt, Human
cccucaagugagagaagacuguucugaacac

SEQ ID NO: 107683 - RNA, 31 nt, Human
cccucaaguguaaccaucacaagauaaggcc

SEQ ID NO: 107684 - RNA, 32 nt, Human
cccucaaguuugcuaagcugcugguuuauuac

SEQ ID NO: 107685 - RNA, 22 nt, Human
cccucaauaaaaccccacgucu

SEQ ID NO: 107686 - RNA, 31 nt, Human
cccucaauaaauaaauauugaaugaaugaaa

SEQ ID NO: 107687 - RNA, 32 nt, Human
cccucaaucccagcuacucaagaggcugaggc

SEQ ID NO: 107688 - RNA, 32 nt, Human
cccucaaugccacccugaccccacggcuggag

SEQ ID NO: 107689 - RNA, 32 nt, Human
cccucaauguugcugaccucaucugaggggcu

SEQ ID NO: 107690 - RNA, 32 nt, Human
cccucaauguugcugaccucaucugggggcug

SEQ ID NO: 107691 - RNA, 32 nt, Human
cccucacaaaccggggcuuuggggaagccaug

SEQ ID NO: 107692 - RNA, 32 nt, Human
cccucacaaccugagcugcuugaggacaaggg

SEQ ID NO: 107693 - RNA, 32 nt, Human
cccucacacaccgccucagcccgcaccggcag

SEQ ID NO: 107694 - RNA, 32 nt, Human
cccucacacccacuccccgauaaggcaugcua

SEQ ID NO: 107695 - RNA, 32 nt, Human
cccucacaccgcugcuccucuggaccucuguc

SEQ ID NO: 107696 - RNA, 20 nt, Human
cccucacaccuccugcugcc

SEQ ID NO: 107697 - RNA, 32 nt, Human
cccucacagagcacgcagccuagaugcagaga

SEQ ID NO: 107698 - RNA, 32 nt, Human
cccucacagcccucagcucuacucccggucac

SEQ ID NO: 107699 - RNA, 32 nt, Human
cccucacagccuugcuucucucagccuagguu

SEQ ID NO: 107700 - RNA, 22 nt, Human
cccucacaggcuuggggguuuu

SEQ ID NO: 107701 - RNA, 32 nt, Human
cccucacagggaggggagcaggggagggaaag

SEQ ID NO: 107702 - RNA, 22 nt, Human
cccucacaucagggaaaaugac

SEQ ID NO: 107703 - RNA, 21 nt, Human
cccucacaucuuccaccagca

SEQ ID NO: 107704 - RNA, 32 nt, Human
cccucaccaacuugggaggcucagccucgucc

SEQ ID NO: 107705 - RNA, 32 nt, Human
cccucaccacaggagcgugagccacuucugca

SEQ ID NO: 107706 - RNA, 17 nt, Human
cccucaccacaguucug

SEQ ID NO: 107707 - RNA, 16 nt, Human
cccucaccacccagga

SEQ ID NO: 107708 - RNA, 16 nt, Human
cccucaccaccuccca

SEQ ID NO: 107709 - RNA, 19 nt, Human
cccucaccaccugcccggc

SEQ ID NO: 107710 - RNA, 32 nt, Human
cccucaccagccucaccccuguggugggcuuu

SEQ ID NO: 107711 - RNA, 32 nt, Human
cccucaccaggaugugaccuugggcagaugac

SEQ ID NO: 107712 - RNA, 32 nt, Human
cccucaccaguggaggcuggguagugcuggcc

SEQ ID NO: 107713 - RNA, 32 nt, Human
cccucacccacaucugccugaagagcuuuaaa

SEQ ID NO: 107714 - RNA, 19 nt, Human
cccucacccacucuggugg

SEQ ID NO: 107715 - RNA, 32 nt, Human
cccucacccaggcacugggcaagugaagaguu

SEQ ID NO: 107716 - RNA, 32 nt, Human
cccucacccaggcugcagugccaugcagacac

SEQ ID NO: 107717 - RNA, 20 nt, Human
cccucaccccaaccccagca

SEQ ID NO: 107718 - RNA, 19 nt, Human
cccucaccccagccaggca

SEQ ID NO: 107719 - RNA, 32 nt, Human
cccucaccccagccccuuccccuagacccacu

SEQ ID NO: 107720 - RNA, 21 nt, Human
cccucaccccauccuucccca

SEQ ID NO: 107721 - RNA, 22 nt, Human
cccucacccccacccccagggu

SEQ ID NO: 107722 - RNA, 18 nt, Human
cccucacccccacuggcc

SEQ ID NO: 107723 - RNA, 19 nt, Human
cccucaccccggccaaccc

SEQ ID NO: 107724 - RNA, 23 nt, Human
cccucaccccguugcucaauucc

SEQ ID NO: 107725 - RNA, 21 nt, Human
cccucaccccucaccauccuu

SEQ ID NO: 107726 - RNA, 19 nt, Human
cccucaccccuccaauccc

SEQ ID NO: 107727 - RNA, 17 nt, Human
cccucaccccucuccca

SEQ ID NO: 107728 - RNA, 17 nt, Human
cccucaccccugccuca

SEQ ID NO: 107729 - RNA, 20 nt, Human
cccucacccgucucgauccc

SEQ ID NO: 107730 - RNA, 32 nt, Human
cccucacccugagccccuuccuugcucugcac

SEQ ID NO: 107731 - RNA, 21 nt, Human
cccucacccugcccagccccu

SEQ ID NO: 107732 - RNA, 32 nt, Human
cccucaccgcaggcagcaguuugcauuuugaa

SEQ ID NO: 107733 - RNA, 16 nt, Human
cccucaccgccugcca

SEQ ID NO: 107734 - RNA, 32 nt, Human
cccucaccgcuauuuucaacauuuccucaauc

SEQ ID NO: 107735 - RNA, 17 nt, Human
cccucaccguccaggug

SEQ ID NO: 107736 - RNA, 19 nt, Human
cccucaccuaccccuccca

SEQ ID NO: 107737 - RNA, 32 nt, Human
cccucaccucaccugcuuucuucauggcaugu

SEQ ID NO: 107738 - RNA, 32 nt, Human
cccucaccuccacccccuccugucaccggccu

SEQ ID NO: 107739 - RNA, 32 nt, Human
cccucaccuccagggccugggacugcuccuuc

SEQ ID NO: 107740 - RNA, 25 nt, Human
cccucaccucuggccucucaucccu

SEQ ID NO: 107741 - RNA, 32 nt, Human
cccucaccugacuucaggguauggggagggag

SEQ ID NO: 107742 - RNA, 32 nt, Human
cccucaccugaugaucccaacacuucaucauc

SEQ ID NO: 107743 - RNA, 23 nt, Human
cccucaccugcauaccaaccccu

SEQ ID NO: 107744 - RNA, 21 nt, Human
cccucaccugccugggaccug

SEQ ID NO: 107745 - RNA, 19 nt, Human
cccucaccuuccuucugcc

SEQ ID NO: 107746 - RNA, 32 nt, Human
cccucaccuucucuccccaaugcacugggcug

SEQ ID NO: 107747 - RNA, 16 nt, Human
cccucaccuugcugcc

SEQ ID NO: 107748 - RNA, 32 nt, Human
cccucacgaaguccucaaguccuggccccucu

SEQ ID NO: 107749 - RNA, 32 nt, Human
cccucacguuucuuccccaaccccucagauuu

SEQ ID NO: 107750 - RNA, 32 nt, Human
cccucacucccagauccugcaggaggcgugag

SEQ ID NO: 107751 - RNA, 23 nt, Human
cccucacucccauuuccuagcaa

SEQ ID NO: 107752 - RNA, 32 nt, Human
cccucacuccuccccuccuucgcucgcucaac

SEQ ID NO: 107753 - RNA, 32 nt, Human
cccucacuccugccaugugccugcacucccag

SEQ ID NO: 107754 - RNA, 32 nt, Human
cccucacuccugccauuucuccccucucuucc

SEQ ID NO: 107755 - RNA, 32 nt, Human
cccucacuccugcccacgccucccagacccca

SEQ ID NO: 107756 - RNA, 32 nt, Human
cccucacuccuucuucugacccuuaaucuacc

SEQ ID NO: 107757 - RNA, 32 nt, Human
cccucacugaaaccagguggccggcuccucgg

SEQ ID NO: 107758 - RNA, 32 nt, Human
cccucacugaagaagcagauugccaagugcca

SEQ ID NO: 107759 - RNA, 32 nt, Human
cccucacugaaugccucaaugugaccaggggu

SEQ ID NO: 107760 - RNA, 32 nt, Human
cccucacugaccaggccccaagccacuaaggc

SEQ ID NO: 107761 - RNA, 32 nt, Human
cccucacugcagcugccagcacuuggucaguc

SEQ ID NO: 107762 - RNA, 16 nt, Human
cccucacugccuucca

SEQ ID NO: 107763 - RNA, 32 nt, Human
cccucacugcugucucugccuccuuucugcug

SEQ ID NO: 107764 - RNA, 32 nt, Human
cccucacuguccuccagcccaggaugggccag

SEQ ID NO: 107765 - RNA, 32 nt, Human
cccucacuguggcuagcuucugggcaaguccc

SEQ ID NO: 107766 - RNA, 32 nt, Human
cccucacuucccacuuuccuuuccuccaaugg

SEQ ID NO: 107767 - RNA, 32 nt, Human
cccucacuuccuuuagggcaaauaacacagca

SEQ ID NO: 107768 - RNA, 32 nt, Human
cccucacuucuuucaguuccucaaggacuccc

SEQ ID NO: 107769 - RNA, 32 nt, Human
cccucacuugccgcgucgcccucccaggcucu

SEQ ID NO: 107770 - RNA, 32 nt, Human
cccucacuuucuuccucucuccuuccuuuccu

SEQ ID NO: 107771 - RNA, 32 nt, Human
cccucagaagacacccagacacugggagugcu

SEQ ID NO: 107772 - RNA, 32 nt, Human
cccucagagaagacaggaggucgggaaggacc

SEQ ID NO: 107773 - RNA, 32 nt, Human
cccucagagcccaugguaacgaaccccuagaa

SEQ ID NO: 107774 - RNA, 32 nt, Human
cccucagagccccugaggggcccuggguaugg

SEQ ID NO: 107775 - RNA, 32 nt, Human
cccucagaggccauagaacagaaacggaaaac

SEQ ID NO: 107776 - RNA, 32 nt, Human
cccucagaucccuuggcucugccagaaucagu

SEQ ID NO: 107777 - RNA, 20 nt, Human
cccucagaugcaaugggaac

SEQ ID NO: 107778 - RNA, 22 nt, Human
cccucagcaaacaccaaagaau

SEQ ID NO: 107779 - RNA, 18 nt, Human
cccucagcaaagaguaga

SEQ ID NO: 107780 - RNA, 32 nt, Human
cccucagcaagaacagccugccugguggccuu

SEQ ID NO: 107781 - RNA, 32 nt, Human
cccucagcacacacaucugcacacacgcagcu

SEQ ID NO: 107782 - RNA, 32 nt, Human
cccucagcacagcucaggccucaggccugaca

SEQ ID NO: 107783 - RNA, 32 nt, Human
cccucagcacuaaccacauccacucucaaccc

SEQ ID NO: 107784 - RNA, 32 nt, Human
cccucagcacugggguggaggcggcaggaagg

SEQ ID NO: 107785 - RNA, 32 nt, Human
cccucagcagccgccuugcugcguggacagca

SEQ ID NO: 107786 - RNA, 19 nt, Human
cccucagcaggagcugggg

SEQ ID NO: 107787 - RNA, 32 nt, Human
cccucagcagggaugacucagcagggaugacu

SEQ ID NO: 107788 - RNA, 32 nt, Human
cccucagcagggauggcucagcagggaugacu

SEQ ID NO: 107789 - RNA, 19 nt, Human
cccucagcaguccugaccu

SEQ ID NO: 107790 - RNA, 32 nt, Human
cccucagcaucuucccgcugagaguggugggg

SEQ ID NO: 107791 - RNA, 22 nt, Human
cccucagcauuuggaggggaac

SEQ ID NO: 107792 - RNA, 32 nt, Human
cccucagccaagcacuuagaacugaguaaaug

SEQ ID NO: 107793 - RNA, 32 nt, Human
cccucagccacaauuuggcagaaggauggagu

SEQ ID NO: 107794 - RNA, 32 nt, Human
cccucagccagcccuguaaggccagcccaaca

SEQ ID NO: 107795 - RNA, 18 nt, Human
cccucagccagccugccu

SEQ ID NO: 107796 - RNA, 32 nt, Human
cccucagccagccugccugcccagcgaggccc

SEQ ID NO: 107797 - RNA, 32 nt, Human
cccucagccagcugccauuagcuuggcucuua

SEQ ID NO: 107798 - RNA, 32 nt, Human
cccucagccaggcaggguugcagcugagggcc

SEQ ID NO: 107799 - RNA, 21 nt, Human
cccucagcccacuccgcgccg

SEQ ID NO: 107800 - RNA, 16 nt, Human
cccucagcccccaggg

SEQ ID NO: 107801 - RNA, 18 nt, Human
cccucagcccccucgcuu

SEQ ID NO: 107802 - RNA, 22 nt, Human
cccucagccccuccggcguguc

SEQ ID NO: 107803 - RNA, 32 nt, Human
cccucagccccuccuguacaagauggucaagc

SEQ ID NO: 107804 - RNA, 32 nt, Human
cccucagccccuggcagugauccggaguuggc

SEQ ID NO: 107805 - RNA, 18 nt, Human
cccucagcccgcccuccc

SEQ ID NO: 107806 - RNA, 32 nt, Human
cccucagcccggcccuggccccuucccgaccc

SEQ ID NO: 107807 - RNA, 32 nt, Human
cccucagcccuccaccuccggcgggggcgagg

SEQ ID NO: 107808 - RNA, 22 nt, Human
cccucagccgacagucucagcc

SEQ ID NO: 107809 - RNA, 19 nt, Human
cccucagccgcucucugcc

SEQ ID NO: 107810 - RNA, 32 nt, Human
cccucagccgcucuuugcuccagaccugcccc

SEQ ID NO: 107811 - RNA, 32 nt, Human
cccucagccggugaacccucucucccaucacc

SEQ ID NO: 107812 - RNA, 32 nt, Human
cccucagccuccugaugcuguugcagggcagg

SEQ ID NO: 107813 - RNA, 17 nt, Human
cccucagccucuccuca

SEQ ID NO: 107814 - RNA, 32 nt, Human
cccucagccugcccgccucucccugcauccug

SEQ ID NO: 107815 - RNA, 32 nt, Human
cccucagccuggggcucccugagucagggcug

SEQ ID NO: 107816 - RNA, 17 nt, Human
cccucagcggaugauaa

SEQ ID NO: 107817 - RNA, 18 nt, Human
cccucagcguacccgccu

SEQ ID NO: 107818 - RNA, 17 nt, Human
cccucagcguccucccu

SEQ ID NO: 107819 - RNA, 32 nt, Human
cccucagcucacccuucagccuguuccuucuu

SEQ ID NO: 107820 - RNA, 32 nt, Human
cccucagcucccagcuccaccucugggguuca

SEQ ID NO: 107821 - RNA, 24 nt, Human
cccucagcucuccugcuuugugcc

SEQ ID NO: 107822 - RNA, 23 nt, Human
cccucagcucugccucugcagcc

SEQ ID NO: 107823 - RNA, 18 nt, Human
cccucagcuggcccugcc

SEQ ID NO: 107824 - RNA, 32 nt, Human
cccucagcuggucgccaccccugggccuuucc

SEQ ID NO: 107825 - RNA, 20 nt, Human
cccucagcuucucucugccu

SEQ ID NO: 107826 - RNA, 20 nt, Human
cccucagcuuggacaggaac

SEQ ID NO: 107827 - RNA, 32 nt, Human
cccucaggagcaccugaagcaaauauuuaucc

SEQ ID NO: 107828 - RNA, 32 nt, Human
cccucaggagccugggcugcgaggcuccauag

SEQ ID NO: 107829 - RNA, 21 nt, Human
cccucaggaguggcccgaacc

SEQ ID NO: 107830 - RNA, 32 nt, Human
cccucaggcaccuuuccuccccuggacaccca

SEQ ID NO: 107831 - RNA, 32 nt, Human
cccucaggccccagggcaggcaggcugcaggg

SEQ ID NO: 107832 - RNA, 32 nt, Human
cccucaggccuaugaaacacacaggguucuag

SEQ ID NO: 107833 - RNA, 32 nt, Human
cccucaggccuccuuuccuuguggcuccagga

SEQ ID NO: 107834 - RNA, 32 nt, Human
cccucaggccucucuucuuauccaaauaaaug

SEQ ID NO: 107835 - RNA, 32 nt, Human
cccucaggccugaugucagcaaagccaguaac

SEQ ID NO: 107836 - RNA, 32 nt, Human
cccucaggcguccaucugaugcaugggaccaa

SEQ ID NO: 107837 - RNA, 32 nt, Human
cccucaggcugaggcaggagggucacuugacc

SEQ ID NO: 107838 - RNA, 32 nt, Human
cccucaggcugcaggaaugguuagcaggagau

SEQ ID NO: 107839 - RNA, 32 nt, Human
cccucagggagaaaggagcaacacacugcccc

SEQ ID NO: 107840 - RNA, 32 nt, Human
cccucagggagacagacacagaccaagaauag

SEQ ID NO: 107841 - RNA, 19 nt, Human
cccucagggagccuggcca

SEQ ID NO: 107842 - RNA, 32 nt, Human
cccucagggcuccggagccauguggcccaacg

SEQ ID NO: 107843 - RNA, 32 nt, Human
cccucagggugcacuccagccaccucagugcu

SEQ ID NO: 107844 - RNA, 32 nt, Human
cccucaggucaguuguuuaaucucaagaccug

SEQ ID NO: 107845 - RNA, 32 nt, Human
cccucaggucccgucacaugucucaagggucc

SEQ ID NO: 107846 - RNA, 21 nt, Human
cccucagguuaccaagauaaa

SEQ ID NO: 107847 - RNA, 32 nt, Human
cccucagguugacaucacaacuccuuuguugg

SEQ ID NO: 107848 - RNA, 32 nt, Human
cccucaguaggugggaggggccagcugccucu

SEQ ID NO: 107849 - RNA, 32 nt, Human
cccucagucagcuaaucuccccaggccgacgc

SEQ ID NO: 107850 - RNA, 32 nt, Human
cccucagucauggagaaaacuuguauagaugc

SEQ ID NO: 107851 - RNA, 32 nt, Human
cccucaguccuccuuugcuccugcugcuucuc

SEQ ID NO: 107852 - RNA, 20 nt, Human
cccucaguccucucuuccuu

SEQ ID NO: 107853 - RNA, 32 nt, Human
cccucagucgcucaggcuggagugcaguggcg

SEQ ID NO: 107854 - RNA, 18 nt, Human
cccucagucucugcugcc

SEQ ID NO: 107855 - RNA, 32 nt, Human
cccucagucucuucccuuuaaaccuuucuuuu

SEQ ID NO: 107856 - RNA, 32 nt, Human
cccucaguggagccugcccaccucucagcccu

SEQ ID NO: 107857 - RNA, 32 nt, Human
cccucaguggccacaucaugcccacucccacu

SEQ ID NO: 107858 - RNA, 32 nt, Human
cccucagugucuaagccacuguuaguuggcuu

SEQ ID NO: 107859 - RNA, 17 nt, Human
cccucaguucagauaga

SEQ ID NO: 107860 - RNA, 24 nt, Human
cccucaguucccauaaaaccuuca

SEQ ID NO: 107861 - RNA, 32 nt, Human
cccucaguucuuucccaggagugcgguggcug

SEQ ID NO: 107862 - RNA, 23 nt, Human
cccucaguugccagggauggggc

SEQ ID NO: 107863 - RNA, 32 nt, Human
cccucaguuucuuucuagcucaucucacucug

SEQ ID NO: 107864 - RNA, 32 nt, Human
cccucauacaagggggagggugggguggggag

SEQ ID NO: 107865 - RNA, 32 nt, Human
cccucauaccccuuaucaucacugccuauucg

SEQ ID NO: 107866 - RNA, 32 nt, Human
cccucauagaugggggugggaguguggcuggu

SEQ ID NO: 107867 - RNA, 32 nt, Human
cccucauagcacaccagagaacucacacaggg

SEQ ID NO: 107868 - RNA, 20 nt, Human
cccucauaggcaaagaugaa

SEQ ID NO: 107869 - RNA, 23 nt, Human
cccucaucacccaccggcacuga

SEQ ID NO: 107870 - RNA, 23 nt, Human
cccucaucagagaaauccuggca

SEQ ID NO: 107871 - RNA, 32 nt, Human
cccucaucagagcccuccucuggccugucccc

SEQ ID NO: 107872 - RNA, 32 nt, Human
cccucaucaggaguuccagugcugcaugcgau

SEQ ID NO: 107873 - RNA, 17 nt, Human
cccucaucaucugugcc

SEQ ID NO: 107874 - RNA, 22 nt, Human
cccucauccaccgcccacucca

SEQ ID NO: 107875 - RNA, 32 nt, Human
cccucauccaugagagcucgaucccguaugaa

SEQ ID NO: 107876 - RNA, 32 nt, Human
cccucauccucaccaccucccccuuccagaaa

SEQ ID NO: 107877 - RNA, 17 nt, Human
cccucauccuccugccu

SEQ ID NO: 107878 - RNA, 21 nt, Human
cccucaucuagcacccgggca

SEQ ID NO: 107879 - RNA, 32 nt, Human
cccucaucuccucugccugugucugcgacccc

SEQ ID NO: 107880 - RNA, 19 nt, Human
cccucaucucugcgcugcc

SEQ ID NO: 107881 - RNA, 17 nt, Human
cccucaucucugcugcc

SEQ ID NO: 107882 - RNA, 32 nt, Human
cccucaucugcaggcgcucacaaccuaguuag

SEQ ID NO: 107883 - RNA, 32 nt, Human
cccucaucuggacuccagcgguggcuucuuga

SEQ ID NO: 107884 - RNA, 32 nt, Human
cccucaucuguaacaugccuugcuuaucuuuc

SEQ ID NO: 107885 - RNA, 32 nt, Human
cccucaugaaguauuauuauaauucaccauaa

SEQ ID NO: 107886 - RNA, 32 nt, Human
cccucaugaagucuuccuguaagcuugaggac

SEQ ID NO: 107887 - RNA, 32 nt, Human
cccucaugccaggccccugccucucacagcag

SEQ ID NO: 107888 - RNA, 32 nt, Human
cccucaugccuggagaaaccuucagcauggac

SEQ ID NO: 107889 - RNA, 32 nt, Human
cccucaugcuccugccuuccugagggccagag

SEQ ID NO: 107890 - RNA, 32 nt, Human
cccucauggcucuguccaccacgauggcugag

SEQ ID NO: 107891 - RNA, 32 nt, Human
cccucaugguccccacucuggcccagcccccu

SEQ ID NO: 107892 - RNA, 22 nt, Human
cccucauuaaaccauccaccug

SEQ ID NO: 107893 - RNA, 32 nt, Human
cccucauuacccucuggugucccuucaucugc

SEQ ID NO: 107894 - RNA, 31 nt, Human
cccucauucaauaaagaccagugaagaccaa

SEQ ID NO: 107895 - RNA, 32 nt, Human
cccucauucccggacccuuccaccccacuggg

SEQ ID NO: 107896 - RNA, 20 nt, Human
cccucauuccugccgcugcc

SEQ ID NO: 107897 - RNA, 32 nt, Human
cccucauugguuuuguucuuggucuccuaaua

SEQ ID NO: 107898 - RNA, 20 nt, Human
cccucauugucccucacuca

SEQ ID NO: 107899 - RNA, 32 nt, Human
cccucauugucuucccucucaagccccuuccu

SEQ ID NO: 107900 - RNA, 32 nt, Human
cccucauuuaucccucaacccccagcccacag

SEQ ID NO: 107901 - RNA, 32 nt, Human
cccucauuuccucuucuccuuacuaagguaaa

SEQ ID NO: 107902 - RNA, 32 nt, Human
cccucauuucucuuccuccucaccuccaccac

SEQ ID NO: 107903 - RNA, 32 nt, Human
cccucauuuucccucagaaccccacggcaagg

SEQ ID NO: 107904 - RNA, 32 nt, Human
cccuccaaaugccacccaccagagucacuggu

SEQ ID NO: 107905 - RNA, 22 nt, Human
cccuccaacauggcgccuggca

SEQ ID NO: 107906 - RNA, 32 nt, Human
cccuccaaccaccagcacugacuccugggcuc

SEQ ID NO: 107907 - RNA, 32 nt, Human
cccuccaacccccacccccaugcucuggaccu

SEQ ID NO: 107908 - RNA, 32 nt, Human
cccuccaacccccucccuauugaggugcaaua

SEQ ID NO: 107909 - RNA, 22 nt, Human
cccuccaaccucccugccagca

SEQ ID NO: 107910 - RNA, 18 nt, Human
cccuccaaccugacccug

SEQ ID NO: 107911 - RNA, 32 nt, Human
cccuccaagccuugccccauggaaagggcuac

SEQ ID NO: 107912 - RNA, 32 nt, Human
cccuccaaggccccaaagccucagagaaaggg

SEQ ID NO: 107913 - RNA, 32 nt, Human
cccuccaauacaucuuauagggcugcugggua

SEQ ID NO: 107914 - RNA, 32 nt, Human
cccuccacaagccauugauucauucauccagu

SEQ ID NO: 107915 - RNA, 32 nt, Human
cccuccacaaucaagacaccuugggacaagga

SEQ ID NO: 107916 - RNA, 32 nt, Human
cccuccacacagauucuggggacagagcuguu

SEQ ID NO: 107917 - RNA, 32 nt, Human
cccuccacaccaguggccucgugguuauaagc

SEQ ID NO: 107918 - RNA, 22 nt, Human
cccuccacaccccaaaaaagua

SEQ ID NO: 107919 - RNA, 32 nt, Human
cccuccacagccccugcuaucugccaucucca

SEQ ID NO: 107920 - RNA, 23 nt, Human
cccuccacaguaaggcugcuaca

SEQ ID NO: 107921 - RNA, 32 nt, Human
cccuccacaucccuagggcucugugauguagg

SEQ ID NO: 107922 - RNA, 32 nt, Human
cccuccaccacagccauccugucccucauugg

SEQ ID NO: 107923 - RNA, 18 nt, Human
cccuccaccacccccuca

SEQ ID NO: 107924 - RNA, 32 nt, Human
cccuccaccacugcgcccuucucccugaggag

SEQ ID NO: 107925 - RNA, 19 nt, Human
cccuccacccacccuucca

SEQ ID NO: 107926 - RNA, 32 nt, Human
cccuccacccaccguuucccugcagugcacgc

SEQ ID NO: 107927 - RNA, 32 nt, Human
cccuccaccccacauaguggguggaauccugc

SEQ ID NO: 107928 - RNA, 21 nt, Human
cccuccacccccuggcuccca

SEQ ID NO: 107929 - RNA, 32 nt, Human
cccuccacccucacccuccacccuuugcugcu

SEQ ID NO: 107930 - RNA, 32 nt, Human
cccuccaccucaccuccagcucaggggccgca

SEQ ID NO: 107931 - RNA, 20 nt, Human
cccuccaccuggccccuggg

SEQ ID NO: 107932 - RNA, 32 nt, Human
cccuccaccuggcuggagagauggcacaucau

SEQ ID NO: 107933 - RNA, 23 nt, Human
cccuccacgcaugaggcccugca

SEQ ID NO: 107934 - RNA, 18 nt, Human
cccuccacgcgcccgccc

SEQ ID NO: 107935 - RNA, 32 nt, Human
cccuccacggucaccuucaacgcccagacacu

SEQ ID NO: 107936 - RNA, 32 nt, Human
cccuccacuaccccauuuaaucuggccacagc

SEQ ID NO: 107937 - RNA, 32 nt, Human
cccuccacuagcucuagcccagccuggauucc

SEQ ID NO: 107938 - RNA, 18 nt, Human
cccuccacuccccucaca

SEQ ID NO: 107939 - RNA, 21 nt, Human
cccuccacuccccugcuuaau

SEQ ID NO: 107940 - RNA, 32 nt, Human
cccuccacuccucauccccacaaucuggcuua

SEQ ID NO: 107941 - RNA, 32 nt, Human
cccuccacucucuaccagauaacugaggaggg

SEQ ID NO: 107942 - RNA, 32 nt, Human
cccuccacucugaaggaggaacaggccugucu

SEQ ID NO: 107943 - RNA, 23 nt, Human
cccuccacuuccuccuccuguuu

SEQ ID NO: 107944 - RNA, 32 nt, Human
cccuccagaaaaucccugaucucuuaaaauuu

SEQ ID NO: 107945 - RNA, 32 nt, Human
cccuccagaaccccaaacccccaaagacugau

SEQ ID NO: 107946 - RNA, 32 nt, Human
cccuccagaagcugcaagagcuucuuagcagu

SEQ ID NO: 107947 - RNA, 32 nt, Human
cccuccagacaguaccacaggcaccuggagua

SEQ ID NO: 107948 - RNA, 32 nt, Human
cccuccagagaccgagagguugaugucacucc

SEQ ID NO: 107949 - RNA, 18 nt, Human
cccuccagaggaaggaug

SEQ ID NO: 107950 - RNA, 32 nt, Human
cccuccagcagcuccuucucauggccccuggg

SEQ ID NO: 107951 - RNA, 19 nt, Human
cccuccagccagucccauu

SEQ ID NO: 107952 - RNA, 32 nt, Human
cccuccagccauggaagaccuggaccagucuc

SEQ ID NO: 107953 - RNA, 32 nt, Human
cccuccagcccagcuccauucuuuggcauaac

SEQ ID NO: 107954 - RNA, 18 nt, Human
cccuccagcccccaaggg

SEQ ID NO: 107955 - RNA, 32 nt, Human
cccuccagccccgggggagauaaggucauggg

SEQ ID NO: 107956 - RNA, 32 nt, Human
cccuccagccggcgucgcucaggcugcggacc

SEQ ID NO: 107957 - RNA, 32 nt, Human
cccuccagccuaggugacagaaugagacucua

SEQ ID NO: 107958 - RNA, 30 nt, Human
cccuccagccucuccaagucgcugugaauu

SEQ ID NO: 107959 - RNA, 32 nt, Human
cccuccagccuggacaacagauugagacccug

SEQ ID NO: 107960 - RNA, 32 nt, Human
cccuccagccuggaugacagagugagaucucc

SEQ ID NO: 107961 - RNA, 32 nt, Human
cccuccagccugggcaacagagccagacaucu

SEQ ID NO: 107962 - RNA, 32 nt, Human
cccuccagccugggcaauagagcaagacucca

SEQ ID NO: 107963 - RNA, 32 nt, Human
cccuccagccugggcaauagagcaagaugcug

SEQ ID NO: 107964 - RNA, 32 nt, Human
cccuccagccugggcgacagaaccagacuccg

SEQ ID NO: 107965 - RNA, 32 nt, Human
cccuccagccugggcgacagaaugagacucca

SEQ ID NO: 107966 - RNA, 32 nt, Human
cccuccagccugggcgacagagcaagacucug

SEQ ID NO: 107967 - RNA, 32 nt, Human
cccuccagccugggcgacagagugagacuucu

SEQ ID NO: 107968 - RNA, 32 nt, Human
cccuccagccuggggagacagagcgagauucu

SEQ ID NO: 107969 - RNA, 32 nt, Human
cccuccagccugggugacagagcgagacucca

SEQ ID NO: 107970 - RNA, 32 nt, Human
cccuccagccugggugacagagugagacccug

SEQ ID NO: 107971 - RNA, 32 nt, Human
cccuccagccugggugacagagugagauucug

SEQ ID NO: 107972 - RNA, 32 nt, Human
cccuccagccuucuccacugaugccugcagcu

SEQ ID NO: 107973 - RNA, 31 nt, Human
cccuccagcgugucucccgagucuggccgca

SEQ ID NO: 107974 - RNA, 32 nt, Human
cccuccagcuagugguguggcugagcagacuc

SEQ ID NO: 107975 - RNA, 32 nt, Human
cccuccagcucuggcccucagcugcuugacag

SEQ ID NO: 107976 - RNA, 32 nt, Human
cccuccagcugguuuucccagcagccgaucug

SEQ ID NO: 107977 - RNA, 32 nt, Human
cccuccagcuucugcccugccugcugugugcg

SEQ ID NO: 107978 - RNA, 32 nt, Human
cccuccaggacacuucccugcccaggccaccu

SEQ ID NO: 107979 - RNA, 31 nt, Human
cccuccaggcacuucuaagcucuucuucuuc

SEQ ID NO: 107980 - RNA, 32 nt, Human
cccuccaggcagcguggccuguggcaccguga

SEQ ID NO: 107981 - RNA, 32 nt, Human
cccuccaggccuuggucuucaugguaaccacc

SEQ ID NO: 107982 - RNA, 32 nt, Human
cccuccagugcuggcagguggccucacccaca

SEQ ID NO: 107983 - RNA, 32 nt, Human
cccuccaguucugccacaggucugccgaugcc

SEQ ID NO: 107984 - RNA, 32 nt, Human
cccuccaguucugccuucauaguucucugccu

SEQ ID NO: 107985 - RNA, 20 nt, Human
cccuccaucagccccuccca

SEQ ID NO: 107986 - RNA, 32 nt, Human
cccuccauccaccccucuggcaccuggguugg

SEQ ID NO: 107987 - RNA, 32 nt, Human
cccuccaucccccaaugcuuguagaccuucca

SEQ ID NO: 107988 - RNA, 32 nt, Human
cccuccauccggcuccugucauccccuacacu

SEQ ID NO: 107989 - RNA, 32 nt, Human
cccuccaucucaccucacccgucucccaacca

SEQ ID NO: 107990 - RNA, 32 nt, Human
cccuccaucuucaagccagcagugaugcgcug

SEQ ID NO: 107991 - RNA, 32 nt, Human
cccuccaugaauuucugccacugccuucuaca

SEQ ID NO: 107992 - RNA, 32 nt, Human
cccuccaugacacacccccgauuccuggacaa

SEQ ID NO: 107993 - RNA, 32 nt, Human
cccuccaugcaucccacauacaagcacucccc

SEQ ID NO: 107994 - RNA, 32 nt, Human
cccuccauggugggucacuugaggucaggagu

SEQ ID NO: 107995 - RNA, 32 nt, Human
cccucccaaccacagcagccagagccaucuga

SEQ ID NO: 107996 - RNA, 32 nt, Human
cccucccaacuuggccucccacacguuccauu

SEQ ID NO: 107997 - RNA, 32 nt, Human
cccucccaagagucccauaucuaccugaccuc

SEQ ID NO: 107998 - RNA, 32 nt, Human
cccucccaagcagugaauuaauaaccagcagg

SEQ ID NO: 107999 - RNA, 20 nt, Human
cccucccaagcuggcugggg

SEQ ID NO: 108000 - RNA, 32 nt, Human
cccucccaaggcaccaguacucuaccaugggg

SEQ ID NO: 108001 - RNA, 32 nt, Human
cccucccaauccagucuacccucaaaggagcu

SEQ ID NO: 108002 - RNA, 17 nt, Human
cccucccacaacugagc

SEQ ID NO: 108003 - RNA, 21 nt, Human
cccucccaccccgucccagca

SEQ ID NO: 108004 - RNA, 17 nt, Human
cccucccaccccuccuc

SEQ ID NO: 108005 - RNA, 32 nt, Human
cccucccacccuugccccagccccugccuggu

SEQ ID NO: 108006 - RNA, 22 nt, Human
cccucccacccuugccccaguc

SEQ ID NO: 108007 - RNA, 21 nt, Human
cccucccaccucuucauccaa

SEQ ID NO: 108008 - RNA, 32 nt, Human
cccucccaccucuuccuccuccuagcucccca

SEQ ID NO: 108009 - RNA, 23 nt, Human
cccucccaccuguccccagauca

SEQ ID NO: 108010 - RNA, 20 nt, Human
cccucccacgccccccagcg

SEQ ID NO: 108011 - RNA, 32 nt, Human
cccucccacugccccucucugccucccacuga

SEQ ID NO: 108012 - RNA, 32 nt, Human
cccucccacuugaccugagaugcugggagggc

SEQ ID NO: 108013 - RNA, 32 nt, Human
cccucccagaugggggcagagagcaccgccca

SEQ ID NO: 108014 - RNA, 32 nt, Human
cccucccagcaauaaccaccucccuggaggcc

SEQ ID NO: 108015 - RNA, 32 nt, Human
cccucccagccccauauucacacacaucccag

SEQ ID NO: 108016 - RNA, 21 nt, Human
cccucccagcccccuccaucc

SEQ ID NO: 108017 - RNA, 21 nt, Human
cccucccagcccugcauccuc

SEQ ID NO: 108018 - RNA, 32 nt, Human
cccucccagcugacccagccuccugggccgcu

SEQ ID NO: 108019 - RNA, 32 nt, Human
cccucccaggccucucccucugccuuucuguu

SEQ ID NO: 108020 - RNA, 32 nt, Human
cccucccaggugugggacagaaggggcagagg

SEQ ID NO: 108021 - RNA, 32 nt, Human
cccucccagugaggccagcugcggugaagagg

SEQ ID NO: 108022 - RNA, 32 nt, Human
cccucccauacgccuuucaucccuccuucuag

SEQ ID NO: 108023 - RNA, 32 nt, Human
cccucccaugggggcacuugaguuuuggcaag

SEQ ID NO: 108024 - RNA, 32 nt, Human
cccucccauucaacuccccaccuccagccggg

SEQ ID NO: 108025 - RNA, 19 nt, Human
cccuccccaaacccaccca

SEQ ID NO: 108026 - RNA, 15 nt, Human
cccuccccaacgccu

SEQ ID NO: 108027 - RNA, 32 nt, Human
cccuccccaaguaggcaaggacugcacguuuc

SEQ ID NO: 108028 - RNA, 32 nt, Human
cccuccccacagacacacccuggguggauuga

SEQ ID NO: 108029 - RNA, 32 nt, Human
cccuccccacagaucccaucucaaaucauucu

SEQ ID NO: 108030 - RNA, 32 nt, Human
cccuccccacagccuuaggccaacacaaacug

SEQ ID NO: 108031 - RNA, 32 nt, Human
cccuccccaccaacuucucugccccagggacc

SEQ ID NO: 108032 - RNA, 23 nt, Human
cccuccccacccguucaccccca

SEQ ID NO: 108033 - RNA, 32 nt, Human
cccuccccaccgacccgccaccugccaccucu

SEQ ID NO: 108034 - RNA, 21 nt, Human
cccuccccaccuaccccuucc

SEQ ID NO: 108035 - RNA, 17 nt, Human
cccuccccacgaccccc

SEQ ID NO: 108036 - RNA, 32 nt, Human
cccuccccacgccagucgaccccacaccccac

SEQ ID NO: 108037 - RNA, 16 nt, Human
cccuccccacuggcca

SEQ ID NO: 108038 - RNA, 32 nt, Human
cccuccccagagcacugguugcaggggauuga

SEQ ID NO: 108039 - RNA, 32 nt, Human
cccuccccagaggaggcgggagggugggcucu

SEQ ID NO: 108040 - RNA, 32 nt, Human
cccuccccagcuccacucccuaccucaagaau

SEQ ID NO: 108041 - RNA, 32 nt, Human
cccuccccagcuccugcacuucuccccagagc

SEQ ID NO: 108042 - RNA, 32 nt, Human
cccuccccaggauggagccccaggaaaccagg

SEQ ID NO: 108043 - RNA, 16 nt, Human
cccuccccagucccau

SEQ ID NO: 108044 - RNA, 19 nt, Human
cccuccccaguccucccca

SEQ ID NO: 108045 - RNA, 32 nt, Human
cccuccccagugcaaaugcaugcuucuucuca

SEQ ID NO: 108046 - RNA, 32 nt, Human
cccuccccaucuccaugcccucuccuucugug

SEQ ID NO: 108047 - RNA, 32 nt, Human
cccuccccauuccccaggcccugggcccuccu

SEQ ID NO: 108048 - RNA, 32 nt, Human
cccucccccaaaaguuauaaaaccauuuuauc

SEQ ID NO: 108049 - RNA, 32 nt, Human
cccucccccaacacccccaaauucaagagugg

SEQ ID NO: 108050 - RNA, 32 nt, Human
cccucccccaccaucacuaucccuguacccuc

SEQ ID NO: 108051 - RNA, 32 nt, Human
cccucccccaccccgccucauucuuuaaucaa

SEQ ID NO: 108052 - RNA, 32 nt, Human
cccucccccacccugcccugcucaggguggga

SEQ ID NO: 108053 - RNA, 32 nt, Human
cccucccccacuccucuaagacaaaguagauu

SEQ ID NO: 108054 - RNA, 18 nt, Human
cccucccccagaccucca

SEQ ID NO: 108055 - RNA, 32 nt, Human
cccucccccagagggacuugacuuucuuucug

SEQ ID NO: 108056 - RNA, 19 nt, Human
cccucccccagcccaccca

SEQ ID NO: 108057 - RNA, 17 nt, Human
cccucccccagccccca

SEQ ID NO: 108058 - RNA, 32 nt, Human
cccucccccaggaacaugcacgcucacucugc

SEQ ID NO: 108059 - RNA, 32 nt, Human
cccucccccaggcugggagaaggggcuccugg

SEQ ID NO: 108060 - RNA, 17 nt, Human
cccucccccagggcccc

SEQ ID NO: 108061 - RNA, 32 nt, Human
cccucccccauccucucccacacacauuccag

SEQ ID NO: 108062 - RNA, 32 nt, Human
cccucccccauucuccagaucucccucugucu

SEQ ID NO: 108063 - RNA, 23 nt, Human
cccuccccccaccuuccacccca

SEQ ID NO: 108064 - RNA, 23 nt, Human
cccuccccccacuccaggccccc

SEQ ID NO: 108065 - RNA, 24 nt, Human
cccuccccccggcuccggccccca

SEQ ID NO: 108066 - RNA, 19 nt, Human
cccucccccgaccccacca

SEQ ID NO: 108067 - RNA, 16 nt, Human
cccucccccggccccc

SEQ ID NO: 108068 - RNA, 32 nt, Human
cccucccccugccccguucacaaugcagccug

SEQ ID NO: 108069 - RNA, 32 nt, Human
cccucccccugccccucaccuccccaggcuca

SEQ ID NO: 108070 - RNA, 32 nt, Human
cccucccccugccuugguuccccgagccaaga

SEQ ID NO: 108071 - RNA, 32 nt, Human
cccucccccugcuggggccucaguuuccccau

SEQ ID NO: 108072 - RNA, 32 nt, Human
cccucccccuggcuucuuucucuugggaaaac

SEQ ID NO: 108073 - RNA, 32 nt, Human
cccucccccuuuccuucucucccugauccuca

SEQ ID NO: 108074 - RNA, 18 nt, Human
cccuccccgcacagcccu

SEQ ID NO: 108075 - RNA, 32 nt, Human
cccuccccgcccccuucucuuuucacauacag

SEQ ID NO: 108076 - RNA, 32 nt, Human
cccuccccgcccggcccugcccugcccugcuc

SEQ ID NO: 108077 - RNA, 19 nt, Human
cccuccccgccugccugga

SEQ ID NO: 108078 - RNA, 32 nt, Human
cccuccccgcugccgccuccuccugggcuggg

SEQ ID NO: 108079 - RNA, 32 nt, Human
cccuccccggccagggcgcucgggagcgggga

SEQ ID NO: 108080 - RNA, 32 nt, Human
cccuccccggccucaguuuccccaaauauuua

SEQ ID NO: 108081 - RNA, 32 nt, Human
cccuccccuacuucucccuugcucccaaagcu

SEQ ID NO: 108082 - RNA, 32 nt, Human
cccuccccucaggcucugccuuggccuggccu

SEQ ID NO: 108083 - RNA, 32 nt, Human
cccuccccuccaggagcaggccuggugcagcc

SEQ ID NO: 108084 - RNA, 32 nt, Human
cccuccccuccaggcugauccugaggccugga

SEQ ID NO: 108085 - RNA, 32 nt, Human
cccuccccuccaggcuguuggcaggcgguggg

SEQ ID NO: 108086 - RNA, 32 nt, Human
cccuccccuccccaccccaucuauuaauauua

SEQ ID NO: 108087 - RNA, 32 nt, Human
cccuccccuccccaccucccccacugcgcguu

SEQ ID NO: 108088 - RNA, 32 nt, Human
cccuccccuccccacuccuccucucuucuucc

SEQ ID NO: 108089 - RNA, 32 nt, Human
cccuccccuccccagccuuuuccagaaaccau

SEQ ID NO: 108090 - RNA, 32 nt, Human
cccuccccuccccaugcucuccucccucagcc

SEQ ID NO: 108091 - RNA, 32 nt, Human
cccuccccucccccgccgccucgcagauagcu

SEQ ID NO: 108092 - RNA, 32 nt, Human
cccuccccucccccuccccaacucagauccgg

SEQ ID NO: 108093 - RNA, 32 nt, Human
cccuccccucccccucugccuuuuguacgcca

SEQ ID NO: 108094 - RNA, 32 nt, Human
cccuccccucccccuucccuucuggucggguc

SEQ ID NO: 108095 - RNA, 32 nt, Human
cccuccccuccccuaccagucuucccggcccc

SEQ ID NO: 108096 - RNA, 32 nt, Human
cccuccccuccccucccccguccugagcuccc

SEQ ID NO: 108097 - RNA, 32 nt, Human
cccuccccuccccuccccucccccgccccugu

SEQ ID NO: 108098 - RNA, 32 nt, Human
cccuccccuccccuccccucccccguccugag

SEQ ID NO: 108099 - RNA, 32 nt, Human
cccuccccuccccuccccuccccucccccgcc

SEQ ID NO: 108100 - RNA, 32 nt, Human
cccuccccuccccuccccuccccucccccguc

SEQ ID NO: 108101 - RNA, 32 nt, Human
cccuccccuccccuccccuccucuccugguau

SEQ ID NO: 108102 - RNA, 32 nt, Human
cccuccccuccccuccccuuccucccucccuc

SEQ ID NO: 108103 - RNA, 32 nt, Human
cccuccccuccccucccucgcgcugucauuca

SEQ ID NO: 108104 - RNA, 32 nt, Human
cccuccccuccccucccucuuuuuaguuuuaa

SEQ ID NO: 108105 - RNA, 32 nt, Human
cccuccccuccccucccuuccccuccacuccg

SEQ ID NO: 108106 - RNA, 32 nt, Human
cccuccccuccccucccuuccccuccggagcg

SEQ ID NO: 108107 - RNA, 32 nt, Human
cccuccccuccccucgcccgccuucgccgccc

SEQ ID NO: 108108 - RNA, 32 nt, Human
cccuccccuccccuuccccucaucuuccaggc

SEQ ID NO: 108109 - RNA, 32 nt, Human
cccuccccuccccuuccucccucccucccucc

SEQ ID NO: 108110 - RNA, 32 nt, Human
cccuccccuccccuuccuguccuuucacaaua

SEQ ID NO: 108111 - RNA, 32 nt, Human
cccuccccuccccuucuucuccaucuccauuc

SEQ ID NO: 108112 - RNA, 32 nt, Human
cccuccccucccuggggcagcagccaccaugu

SEQ ID NO: 108113 - RNA, 19 nt, Human
cccuccccuccuggcucug

SEQ ID NO: 108114 - RNA, 32 nt, Human
cccuccccucguuccagaccugccucauggug

SEQ ID NO: 108115 - RNA, 18 nt, Human
cccuccccucucuuccuc

SEQ ID NO: 108116 - RNA, 32 nt, Human
cccuccccugccaucccuccccggacuccggc

SEQ ID NO: 108117 - RNA, 32 nt, Human
cccuccccugcuccgaccuuugaguugucccg

SEQ ID NO: 108118 - RNA, 15 nt, Human
cccuccccugcugcu

SEQ ID NO: 108119 - RNA, 18 nt, Human
cccuccccuggcccagcc

SEQ ID NO: 108120 - RNA, 32 nt, Human
cccuccccugucaagccaguucuuuccucuuc

SEQ ID NO: 108121 - RNA, 32 nt, Human
cccuccccugucccucugugagagaaggagca

SEQ ID NO: 108122 - RNA, 32 nt, Human
cccuccccugugucugucuccaugaagccuga

SEQ ID NO: 108123 - RNA, 32 nt, Human
cccuccccuuccccucccccuccccaacucag

SEQ ID NO: 108124 - RNA, 22 nt, Human
cccuccccuuccccuccugccu

SEQ ID NO: 108125 - RNA, 32 nt, Human
cccuccccuuccccuccugccugcuuugcccc

SEQ ID NO: 108126 - RNA, 32 nt, Human
cccuccccuuccccucucgcaaacaugccucc

SEQ ID NO: 108127 - RNA, 32 nt, Human
cccuccccuucugcaauggagaguucuggcuc

SEQ ID NO: 108128 - RNA, 32 nt, Human
cccucccgcaguuggcccugugguguuccgaa

SEQ ID NO: 108129 - RNA, 32 nt, Human
cccucccgcccgcuuccucugcccacagcgcc

SEQ ID NO: 108130 - RNA, 32 nt, Human
cccucccgcuuccucccucccaucuucccacc

SEQ ID NO: 108131 - RNA, 32 nt, Human
cccucccggccuggccugcccuugcgcccggc

SEQ ID NO: 108132 - RNA, 32 nt, Human
cccucccgggguuggggacagagcaggugcag

SEQ ID NO: 108133 - RNA, 32 nt, Human
cccucccgucucggcuauuugcacugaugaua

SEQ ID NO: 108134 - RNA, 32 nt, Human
cccucccguucccuccucuucucucugggagg

SEQ ID NO: 108135 - RNA, 21 nt, Human
cccucccuaacagugaaaaga

SEQ ID NO: 108136 - RNA, 32 nt, Human
cccucccuacaaagcacugccucuacugggcg

SEQ ID NO: 108137 - RNA, 32 nt, Human
cccucccuaccuguaauuccagucuuugugca

SEQ ID NO: 108138 - RNA, 32 nt, Human
cccucccuagcccuuccagccugggacacaca

SEQ ID NO: 108139 - RNA, 32 nt, Human
cccucccucaaggaggucuggcuuuauccaua

SEQ ID NO: 108140 - RNA, 32 nt, Human
cccucccucaaggccuccuccaccuccaccuc

SEQ ID NO: 108141 - RNA, 32 nt, Human
cccucccucacuuccucccucucccccauccu

SEQ ID NO: 108142 - RNA, 32 nt, Human
cccucccuccacuccucucaacugccucagcg

SEQ ID NO: 108143 - RNA, 32 nt, Human
cccucccuccagccuaggucagagguggggac

SEQ ID NO: 108144 - RNA, 15 nt, Human
cccucccuccaggua

SEQ ID NO: 108145 - RNA, 32 nt, Human
cccucccucccaccuccccacacccauugagu

SEQ ID NO: 108146 - RNA, 32 nt, Human
cccucccucccccauccuccccaaaauagccu

SEQ ID NO: 108147 - RNA, 32 nt, Human
cccucccucccucccucccucccuuccuuucu

SEQ ID NO: 108148 - RNA, 32 nt, Human
cccucccucccucccucccuuccuuucuuccu

SEQ ID NO: 108149 - RNA, 32 nt, Human
cccucccucccucccucccuuucuuucuuucu

SEQ ID NO: 108150 - RNA, 32 nt, Human
cccucccuccuucucuccuuccuuccuuccuc

SEQ ID NO: 108151 - RNA, 32 nt, Human
cccucccuccuuucucccuuccuuccuuucuu

SEQ ID NO: 108152 - RNA, 32 nt, Human
cccucccucggcccgugguccccagcugguga

SEQ ID NO: 108153 - RNA, 32 nt, Human
cccucccucggcuuuacuccugcccagugacu

SEQ ID NO: 108154 - RNA, 32 nt, Human
cccucccucucccaucaccagccucaaggccu

SEQ ID NO: 108155 - RNA, 32 nt, Human
cccucccucuccccuuccuuucucucucuucc

SEQ ID NO: 108156 - RNA, 32 nt, Human
cccucccucugaccagcaaccaggacaguuug

SEQ ID NO: 108157 - RNA, 32 nt, Human
cccucccucugguuguucuguugaacuccuug

SEQ ID NO: 108158 - RNA, 32 nt, Human
cccucccucuucagagagcccccagccagcag

SEQ ID NO: 108159 - RNA, 32 nt, Human
cccucccucuuucugcccauuuccucccaccc

SEQ ID NO: 108160 - RNA, 32 nt, Human
cccucccucuuuguuuccuuccuuccuuauuu

SEQ ID NO: 108161 - RNA, 18 nt, Human
cccucccugcacccagcc

SEQ ID NO: 108162 - RNA, 32 nt, Human
cccucccugcagccacacgaggcccagcaacc

SEQ ID NO: 108163 - RNA, 32 nt, Human
cccucccugcagccuuaacauucucuuccccu

SEQ ID NO: 108164 - RNA, 32 nt, Human
cccucccugccacacuagcuucccagggcugc

SEQ ID NO: 108165 - RNA, 32 nt, Human
cccucccugccuccuccuuccugccugugaug

SEQ ID NO: 108166 - RNA, 32 nt, Human
cccucccugccucuuucuuucugcucccucau

SEQ ID NO: 108167 - RNA, 32 nt, Human
cccucccugccugccagcccuagacuuguugg

SEQ ID NO: 108168 - RNA, 32 nt, Human
cccucccugccuggaaaggccuccugugccag

SEQ ID NO: 108169 - RNA, 32 nt, Human
cccucccugccuggccgcgccucugcgaccag

SEQ ID NO: 108170 - RNA, 32 nt, Human
cccucccugccuggguucuccccagccgaacc

SEQ ID NO: 108171 - RNA, 32 nt, Human
cccucccugccugucccugguaacgccuccug

SEQ ID NO: 108172 - RNA, 32 nt, Human
cccucccugccugucuugucccucugccccuc

SEQ ID NO: 108173 - RNA, 32 nt, Human
cccucccugcucccagcucucucuccuggagu

SEQ ID NO: 108174 - RNA, 32 nt, Human
cccucccugcugcuggugcacagccacucccc

SEQ ID NO: 108175 - RNA, 32 nt, Human
cccucccugcuguccccucuugccccaacccc

SEQ ID NO: 108176 - RNA, 23 nt, Human
cccucccugcuucccaaaagcuc

SEQ ID NO: 108177 - RNA, 32 nt, Human
cccucccuggaagucacaggacaggaaugaca

SEQ ID NO: 108178 - RNA, 32 nt, Human
cccucccuggagccuccacugccucuggaauu

SEQ ID NO: 108179 - RNA, 32 nt, Human
cccucccuggaggcggcuggaccuagcgaggc

SEQ ID NO: 108180 - RNA, 32 nt, Human
cccucccuggaguguugaggggguuguaccug

SEQ ID NO: 108181 - RNA, 32 nt, Human
cccucccugggcacagcuccccaaacccaggc

SEQ ID NO: 108182 - RNA, 32 nt, Human
cccucccuggguaggagcagcuuugugucacu

SEQ ID NO: 108183 - RNA, 32 nt, Human
cccucccugucccagccagcaucaucucuuug

SEQ ID NO: 108184 - RNA, 32 nt, Human
cccucccugucucccccacuuccuggccaggg

SEQ ID NO: 108185 - RNA, 32 nt, Human
cccucccugugggcacaccaccugggcauuag

SEQ ID NO: 108186 - RNA, 32 nt, Human
cccucccuguucucccugcagggugccaagaa

SEQ ID NO: 108187 - RNA, 32 nt, Human
cccucccuguuucccuucccucccucccuccc

SEQ ID NO: 108188 - RNA, 32 nt, Human
cccucccuuagcaaacagguucaucuccagaa

SEQ ID NO: 108189 - RNA, 17 nt, Human
cccucccuucaccguga

SEQ ID NO: 108190 - RNA, 18 nt, Human
cccucccuucaccuugcu

SEQ ID NO: 108191 - RNA, 19 nt, Human
cccucccuucaccuugcuu

SEQ ID NO: 108192 - RNA, 32 nt, Human
cccucccuucaccuuuccucuccuggcgggcc

SEQ ID NO: 108193 - RNA, 32 nt, Human
cccucccuucaccuuuccucuccuggcggggu

SEQ ID NO: 108194 - RNA, 18 nt, Human
cccucccuucagcuuccu

SEQ ID NO: 108195 - RNA, 32 nt, Human
cccucccuuccagauuaaccaaaaccugcuaa

SEQ ID NO: 108196 - RNA, 32 nt, Human
cccucccuuccauccuccucuccaaagaacag

SEQ ID NO: 108197 - RNA, 21 nt, Human
cccucccuucccccuauccaa

SEQ ID NO: 108198 - RNA, 21 nt, Human
cccucccuucuaccuccucuu

SEQ ID NO: 108199 - RNA, 32 nt, Human
cccucccuugccuccugcucccaugggaaaca

SEQ ID NO: 108200 - RNA, 32 nt, Human
cccucccuugcucuccaccgugugaggacaca

SEQ ID NO: 108201 - RNA, 21 nt, Human
cccucccuuggcccccugggu

SEQ ID NO: 108202 - RNA, 32 nt, Human
cccuccgagacccagcccgagcgcagggaggg

SEQ ID NO: 108203 - RNA, 32 nt, Human
cccuccgagaggaggccagagggagaggagga

SEQ ID NO: 108204 - RNA, 32 nt, Human
cccuccgaguagcugggaccacagguguacga

SEQ ID NO: 108205 - RNA, 32 nt, Human
cccuccgaugcaugcucuucucucacauggag

SEQ ID NO: 108206 - RNA, 32 nt, Human
cccuccgccaccuuccccuccuccggcuuuuu

SEQ ID NO: 108207 - RNA, 32 nt, Human
cccuccgcccacucugcccccugggagcccuc

SEQ ID NO: 108208 - RNA, 32 nt, Human
cccuccgccccacucaggauguggauuucaau

SEQ ID NO: 108209 - RNA, 32 nt, Human
cccuccgccccacuccagccaguguggggagc

SEQ ID NO: 108210 - RNA, 22 nt, Human
cccuccgccccucagguucuuu

SEQ ID NO: 108211 - RNA, 32 nt, Human
cccuccgccccucgccccaaccccugggcgcc

SEQ ID NO: 108212 - RNA, 32 nt, Human
cccuccgcccuuuccucuccccaccuuccucu

SEQ ID NO: 108213 - RNA, 32 nt, Human
cccuccgccgccccuuccccagcccugccccc

SEQ ID NO: 108214 - RNA, 32 nt, Human
cccuccgccucucggguucaagcaauucuccu

SEQ ID NO: 108215 - RNA, 32 nt, Human
cccuccgccuucuccccucccgcuguccaugc

SEQ ID NO: 108216 - RNA, 32 nt, Human
cccuccgcgaggguggaggcggcggcugugug

SEQ ID NO: 108217 - RNA, 31 nt, Human
cccuccgcgaugucuccauccgaguaagaaa

SEQ ID NO: 108218 - RNA, 32 nt, Human
cccuccgcggaaggcguggcagggaggcaguc

SEQ ID NO: 108219 - RNA, 32 nt, Human
cccuccgcuccccuccccuauuucccggggug

SEQ ID NO: 108220 - RNA, 32 nt, Human
cccuccgcuccugggcgcgcucucauucauag

SEQ ID NO: 108221 - RNA, 32 nt, Human
cccuccgcuuccucuccuaggcgacgagaccc

SEQ ID NO: 108222 - RNA, 32 nt, Human
cccuccgcuucucaucccaaccucuuuuuccu

SEQ ID NO: 108223 - RNA, 22 nt, Human
cccuccgcuuucuccgcgccgg

SEQ ID NO: 108224 - RNA, 32 nt, Human
cccuccgcuuugucauugaucucuccauggug

SEQ ID NO: 108225 - RNA, 23 nt, Human
cccuccggacgggccucauccaa

SEQ ID NO: 108226 - RNA, 32 nt, Human
cccuccggagccggacgcuccgggaggcccgg

SEQ ID NO: 108227 - RNA, 19 nt, Human
cccuccggagcugcccccu

SEQ ID NO: 108228 - RNA, 32 nt, Human
cccuccggccacucucagccggugagugcucu

SEQ ID NO: 108229 - RNA, 32 nt, Human
cccuccgggaagcacagcaaagucccucauuc

SEQ ID NO: 108230 - RNA, 32 nt, Human
cccuccgguuaucaagcaaaaugucucuugug

SEQ ID NO: 108231 - RNA, 18 nt, Human
cccuccgucaccuccuca

SEQ ID NO: 108232 - RNA, 32 nt, Human
cccuccgucccacuccacuccaggcugccggc

SEQ ID NO: 108233 - RNA, 15 nt, Human
cccuccguccgcuug

SEQ ID NO: 108234 - RNA, 32 nt, Human
cccuccguccugcugaaaacccccauaagcca

SEQ ID NO: 108235 - RNA, 32 nt, Human
cccuccgucucucggguucaagcaauugucug

SEQ ID NO: 108236 - RNA, 32 nt, Human
cccuccgucuuuucccucuacucucauccuag

SEQ ID NO: 108237 - RNA, 32 nt, Human
cccuccguggaauuccugauagagucucaaua

SEQ ID NO: 108238 - RNA, 32 nt, Human
cccuccuaaacauucguacacacacaaacaca

SEQ ID NO: 108239 - RNA, 32 nt, Human
cccuccuacagcacuccaccuugggaccuguu

SEQ ID NO: 108240 - RNA, 32 nt, Human
cccuccuacagcuguaacuccccuccuguccu

SEQ ID NO: 108241 - RNA, 32 nt, Human
cccuccuaccacugcuuugacuguaccuguuu

SEQ ID NO: 108242 - RNA, 24 nt, Human
cccuccuacccccuccccauccag

SEQ ID NO: 108243 - RNA, 16 nt, Human
cccuccuaccccuccc

SEQ ID NO: 108244 - RNA, 17 nt, Human
cccuccuaccccuccca

SEQ ID NO: 108245 - RNA, 32 nt, Human
cccuccuaccugcuuacaauuuggaaaagugu

SEQ ID NO: 108246 - RNA, 32 nt, Human
cccuccuagugguucuccaccccguuguggcu

SEQ ID NO: 108247 - RNA, 32 nt, Human
cccuccuaguucugccccaggcucuucuuucc

SEQ ID NO: 108248 - RNA, 32 nt, Human
cccuccuaucaccuccccuccuugccuccugu

SEQ ID NO: 108249 - RNA, 32 nt, Human
cccuccuauggcccaaaucuucauuugccuuu

SEQ ID NO: 108250 - RNA, 32 nt, Human
cccuccucacuacccuauauaaaaaucauugg

SEQ ID NO: 108251 - RNA, 32 nt, Human
cccuccucacugccaugcuucuccugguggcc

SEQ ID NO: 108252 - RNA, 32 nt, Human
cccuccucagcauuauuugauacacugauugu

SEQ ID NO: 108253 - RNA, 32 nt, Human
cccuccucagcccucgacaugugccucgcaag

SEQ ID NO: 108254 - RNA, 32 nt, Human
cccuccuccacuccucccuuggucuggccuug

SEQ ID NO: 108255 - RNA, 19 nt, Human
cccuccuccagcccccucu

SEQ ID NO: 108256 - RNA, 32 nt, Human
cccuccuccagcuuccuggccucccagccacu

SEQ ID NO: 108257 - RNA, 23 nt, Human
cccuuucagccccauuaaagcuc

SEQ ID NO: 108258 - RNA, 32 nt, Human
cccuuucagcuuuucagaggcacgugugcugg

SEQ ID NO: 108259 - RNA, 32 nt, Human
cccuuucagucuggacugugagcugcugcugg

SEQ ID NO: 108260 - RNA, 32 nt, Human
cccuuucauccagcgggcacuucgggaagagc

SEQ ID NO: 108261 - RNA, 32 nt, Human
cccuuucaugcugucugugugguugcaugugu

SEQ ID NO: 108262 - RNA, 32 nt, Human
cccuuucauugggguguauacauaucagggga

SEQ ID NO: 108263 - RNA, 32 nt, Human
cccuuuccagccucugccccucaggggaaccc

SEQ ID NO: 108264 - RNA, 32 nt, Human
cccuuuccaucaccuucucucccaacagccua

SEQ ID NO: 108265 - RNA, 32 nt, Human
cccuuucccaggcgguagcgggggcggugguu

SEQ ID NO: 108266 - RNA, 32 nt, Human
cccuuucccaucucagggcagaggccacagga

SEQ ID NO: 108267 - RNA, 32 nt, Human
cccuuuccccacaccucccccugcugcugcug

SEQ ID NO: 108268 - RNA, 32 nt, Human
cccuuuccccauccucuaucuaucccuguuuc

SEQ ID NO: 108269 - RNA, 17 nt, Human
cccuuucccccuccuca

SEQ ID NO: 108270 - RNA, 32 nt, Human
cccuuuccccgcagcuuuaauaacuccuggcc

SEQ ID NO: 108271 - RNA, 21 nt, Human
cccuuuccccucagcuuacuu

SEQ ID NO: 108272 - RNA, 19 nt, Human
cccuuuccccuucagcugc

SEQ ID NO: 108273 - RNA, 32 nt, Human
cccuuucccguuacacaccacaccugcccagg

SEQ ID NO: 108274 - RNA, 19 nt, Human
cccuuucccuaauuaaggc

SEQ ID NO: 108275 - RNA, 32 nt, Human
cccuuucccucuaacccacaccaccuuucuac

SEQ ID NO: 108276 - RNA, 32 nt, Human
cccuuucccucucugcugagcauuuaaccauu

SEQ ID NO: 108277 - RNA, 32 nt, Human
cccuuucccugccagcaaaccccaccacccua

SEQ ID NO: 108278 - RNA, 32 nt, Human
cccuuucccuuccuccuccucuucuccucccu

SEQ ID NO: 108279 - RNA, 32 nt, Human
cccuuucccuuucuuccugacuagccccaagu

SEQ ID NO: 108280 - RNA, 32 nt, Human
cccuuuccgagucaaagaaaggggugacggac

SEQ ID NO: 108281 - RNA, 32 nt, Human
cccuuuccggaucugcugagccggacagcagu

SEQ ID NO: 108282 - RNA, 32 nt, Human
cccuuuccggccgguccccauggaggcgcugg

SEQ ID NO: 108283 - RNA, 32 nt, Human
cccuuuccucagccuccaccugcaggacagca

SEQ ID NO: 108284 - RNA, 32 nt, Human
cccuuuccuccagggcccagucuggcucccga

SEQ ID NO: 108285 - RNA, 32 nt, Human
cccuuuccuccccauucccacccucagccggg

SEQ ID NO: 108286 - RNA, 32 nt, Human
cccuuuccuccccucccugccucccuucuucc

SEQ ID NO: 108287 - RNA, 32 nt, Human
cccuuuccuccuggugcccugaaggcugcgau

SEQ ID NO: 108288 - RNA, 32 nt, Human
cccuuuccucgcaccuccuuguccucacccag

SEQ ID NO: 108289 - RNA, 32 nt, Human
cccuuuccucuuccuuucccuuccuucucuuu

SEQ ID NO: 108290 - RNA, 16 nt, Human
cccuuuccucuucugc

SEQ ID NO: 108291 - RNA, 17 nt, Human
cccuuuccucuucugcc

SEQ ID NO: 108292 - RNA, 32 nt, Human
cccuuuccucuugggauuguagauuguauugg

SEQ ID NO: 108293 - RNA, 32 nt, Human
cccuuuccuggaccggcugggcgugugaugcg

SEQ ID NO: 108294 - RNA, 32 nt, Human
cccuuuccuggacugcucucuccagaaacagc

SEQ ID NO: 108295 - RNA, 32 nt, Human
cccuuuccugggacccagacagcaggccggcc

SEQ ID NO: 108296 - RNA, 32 nt, Human
cccuuuccuucccuucgucuucccuaagcuaa

SEQ ID NO: 108297 - RNA, 32 nt, Human
cccuuuccuugagacuggaggguugagaccag

SEQ ID NO: 108298 - RNA, 18 nt, Human
cccuuucgccuccugucu

SEQ ID NO: 108299 - RNA, 32 nt, Human
cccuuucgucgguggggauggagaccuagagg

SEQ ID NO: 108300 - RNA, 32 nt, Human
cccuuucuaagaggaggaaaaauggaugcaag

SEQ ID NO: 108301 - RNA, 21 nt, Human
cccuuucuacccucacagcuc

SEQ ID NO: 108302 - RNA, 31 nt, Human
cccuuucucaauaaauucaucugcgguggag

SEQ ID NO: 108303 - RNA, 32 nt, Human
cccuuucuccaccugcuccuccuccucugacu

SEQ ID NO: 108304 - RNA, 32 nt, Human
cccuuucucccagcaggcgcuggacucugggg

SEQ ID NO: 108305 - RNA, 21 nt, Human
cccuuucucccaggccuucgg

SEQ ID NO: 108306 - RNA, 32 nt, Human
cccuuucucccaguggaggaaggugugcugug

SEQ ID NO: 108307 - RNA, 32 nt, Human
cccuuucuccccuuccaccugcugcgggcugg

SEQ ID NO: 108308 - RNA, 32 nt, Human
cccuuucucccgucaccuuucaugccagacaa

SEQ ID NO: 108309 - RNA, 21 nt, Human
cccuuucucccuccccgcuaa

SEQ ID NO: 108310 - RNA, 17 nt, Human
cccuuucucccuccuca

SEQ ID NO: 108311 - RNA, 32 nt, Human
cccuuucuccuccuccuuccucugaguugacc

SEQ ID NO: 108312 - RNA, 32 nt, Human
cccuuucuccuucuccccuccuucuuuuucag

SEQ ID NO: 108313 - RNA, 32 nt, Human
cccuuucucugcucccagccugccucaccagg

SEQ ID NO: 108314 - RNA, 32 nt, Human
cccuuucucuuuccucauugccuucucccuuc

SEQ ID NO: 108315 - RNA, 32 nt, Human
cccuuucucuuuccuuucuuuccuuccacaaa

SEQ ID NO: 108316 - RNA, 20 nt, Human
cccuuucugccaagaaggcc

SEQ ID NO: 108317 - RNA, 19 nt, Human
cccuuucugccccugcuga

SEQ ID NO: 108318 - RNA, 19 nt, Human
cccuuucugccuagagggc

SEQ ID NO: 108319 - RNA, 32 nt, Human
cccuuucugccuggucagccccguggccucug

SEQ ID NO: 108320 - RNA, 32 nt, Human
cccuuucugcucccucucuuuccaucuguuug

SEQ ID NO: 108321 - RNA, 32 nt, Human
cccuuucugugcaggagcagagccaggugggc

SEQ ID NO: 108322 - RNA, 32 nt, Human
cccuuucuguggcuggauggggagacagguca

SEQ ID NO: 108323 - RNA, 19 nt, Human
cccuuucuucccucagcca

SEQ ID NO: 108324 - RNA, 32 nt, Human
cccuuucuucccucagccaucugggguauauc

SEQ ID NO: 108325 - RNA, 32 nt, Human
cccuuucuugaggaccuuguguuccuggcagg

SEQ ID NO: 108326 - RNA, 32 nt, Human
cccuuucuuuacaccauccucucccauaagca

SEQ ID NO: 108327 - RNA, 20 nt, Human
cccuuucuuucccucccugc

SEQ ID NO: 108328 - RNA, 32 nt, Human
cccuuucuuuccuucucuccuccuuuauuuga

SEQ ID NO: 108329 - RNA, 32 nt, Human
cccuuugaaaacaccauauacacuugagguua

SEQ ID NO: 108330 - RNA, 32 nt, Human
cccuuugaaaagugccuggggaccugaagagc

SEQ ID NO: 108331 - RNA, 32 nt, Human
cccuuugaaaggagaaggaauuggagcagcuu

SEQ ID NO: 108332 - RNA, 32 nt, Human
cccuuugaggagcacuggaggaagcacacccu

SEQ ID NO: 108333 - RNA, 32 nt, Human
cccuuugagugacuccagcacaggcuaccuag

SEQ ID NO: 108334 - RNA, 32 nt, Human
cccuuugauguggguccccuguugauuauacg

SEQ ID NO: 108335 - RNA, 32 nt, Human
cccuuugcaagggguaacagaccgcuggaaaa

SEQ ID NO: 108336 - RNA, 32 nt, Human
cccuuugcacacagagcagcuacuucuaagcc

SEQ ID NO: 108337 - RNA, 32 nt, Human
cccuuugcacacaggggcuacagcgcauuuuc

SEQ ID NO: 108338 - RNA, 32 nt, Human
cccuuugcacuggcuguuuccucugccuggaa

SEQ ID NO: 108339 - RNA, 32 nt, Human
cccuuugcagaggcauaaauccgcaccacccu

SEQ ID NO: 108340 - RNA, 32 nt, Human
cccuuugcaggacuugcacacagggaggcugu

SEQ ID NO: 108341 - RNA, 32 nt, Human
cccuuugcagucccaguauauugugcgugcac

SEQ ID NO: 108342 - RNA, 32 nt, Human
cccuuugcaguguucuaauccccagagccccu

SEQ ID NO: 108343 - RNA, 32 nt, Human
cccuuugcauccagcucccagcucuucuuccc

SEQ ID NO: 108344 - RNA, 32 nt, Human
cccuuugcccaggaguuccuucugucccggcu

SEQ ID NO: 108345 - RNA, 18 nt, Human
cccuuugcccccagcuca

SEQ ID NO: 108346 - RNA, 32 nt, Human
cccuuugcccccuccccuccccugacacaugc

SEQ ID NO: 108347 - RNA, 32 nt, Human
cccuuugccuuuuagaacucagugccauccug

SEQ ID NO: 108348 - RNA, 32 nt, Human
cccuuugcuccuggugggagagggaggaguga

SEQ ID NO: 108349 - RNA, 32 nt, Human
cccuuugcucuucuuuucccuccuuaaaagaa

SEQ ID NO: 108350 - RNA, 24 nt, Human
cccuuugcugacagaacugcugga

SEQ ID NO: 108351 - RNA, 32 nt, Human
cccuuuggaaaagaguuggugaaaugcgcacg

SEQ ID NO: 108352 - RNA, 23 nt, Human
cccuuuggaaaucugucuucuuu

SEQ ID NO: 108353 - RNA, 32 nt, Human
cccuuuggaaccagaugucuuguuacagacac

SEQ ID NO: 108354 - RNA, 32 nt, Human
cccuuuggaaggccaaggcgggcagaucacuu

SEQ ID NO: 108355 - RNA, 32 nt, Human
cccuuuggaauagcaguguuccagugugugaa

SEQ ID NO: 108356 - RNA, 32 nt, Human
cccuuuggacauccugcugacacuugggcccc

SEQ ID NO: 108357 - RNA, 32 nt, Human
cccuuuggaccagucucccaagaggagagggg

SEQ ID NO: 108358 - RNA, 32 nt, Human
cccuuuggaggugacccaggagagaagggaug

SEQ ID NO: 108359 - RNA, 32 nt, Human
cccuuuggauccacguggucugcaaccuggug

SEQ ID NO: 108360 - RNA, 17 nt, Human
cccuuuggcccuccuca

SEQ ID NO: 108361 - RNA, 32 nt, Human
cccuuuggccucucccccuccuuccaucucuu

SEQ ID NO: 108362 - RNA, 32 nt, Human
cccuuuggccuuugcuggcuguguggcggcuc

SEQ ID NO: 108363 - RNA, 32 nt, Human
cccuuuggcguaagcuaugauugucguccaag

SEQ ID NO: 108364 - RNA, 32 nt, Human
cccuuuggcugucuggccccagccucugcacu

SEQ ID NO: 108365 - RNA, 32 nt, Human
cccuuuggcuuagugacuuugaggucccaaga

SEQ ID NO: 108366 - RNA, 32 nt, Human
cccuuugggaacuagggggcugcuggugggaa

SEQ ID NO: 108367 - RNA, 32 nt, Human
cccuuugggaggcccaggugggcagaucaccu

SEQ ID NO: 108368 - RNA, 32 nt, Human
cccuuugggaggccgaggcgggcggaucaccu

SEQ ID NO: 108369 - RNA, 32 nt, Human
cccuuugggaggccgaggugggcagaucacga

SEQ ID NO: 108370 - RNA, 32 nt, Human
cccuuugggaggccugagguagaggggagugg

SEQ ID NO: 108371 - RNA, 32 nt, Human
cccuuugggaggcugaggcgggaggaucgcuu

SEQ ID NO: 108372 - RNA, 32 nt, Human
cccuuugggaggcugaggcgggcagaucacca

SEQ ID NO: 108373 - RNA, 32 nt, Human
cccuuugggcaggggagcucggaggcucagga

SEQ ID NO: 108374 - RNA, 32 nt, Human
cccuuugggcugccuuuggaugucgauacagg

SEQ ID NO: 108375 - RNA, 32 nt, Human
cccuuugguauuucgauuagaagaagcugcaa

SEQ ID NO: 108376 - RNA, 32 nt, Human
cccuuugguguuugcucuucuacuuagaaaau

SEQ ID NO: 108377 - RNA, 32 nt, Human
cccuuugguguuuggucuucuacuuagaaaaa

SEQ ID NO: 108378 - RNA, 32 nt, Human
cccuuugguuuccgugucauccuuuuuggugu

SEQ ID NO: 108379 - RNA, 32 nt, Human
cccuuuguaaugcugcuccucuccacugccca

SEQ ID NO: 108380 - RNA, 21 nt, Human
cccuuuguacaugaccugcug

SEQ ID NO: 108381 - RNA, 32 nt, Human
cccuuuguauuuuugcaguuccucccuauacc

SEQ ID NO: 108382 - RNA, 32 nt, Human
cccuuugucacccaggccggagugcaguggca

SEQ ID NO: 108383 - RNA, 23 nt, Human
cccuuugucccccaggccuagga

SEQ ID NO: 108384 - RNA, 32 nt, Human
cccuuugucccugcacucagcccuguggcccc

SEQ ID NO: 108385 - RNA, 24 nt, Human
cccuuugucucccaggcuggagug

SEQ ID NO: 108386 - RNA, 32 nt, Human
cccuuuguggcccugaggacggcugggucuau

SEQ ID NO: 108387 - RNA, 32 nt, Human
cccuuuguuaccaguucuuccuccuuccucuu

SEQ ID NO: 108388 - RNA, 32 nt, Human
cccuuuguugcaggaaugugcgucgggcuagg

SEQ ID NO: 108389 - RNA, 32 nt, Human
cccuuuguugcccaggcuggucuccaacuccu

SEQ ID NO: 108390 - RNA, 32 nt, Human
cccuuuguuucugcuuucugcggugaucagag

SEQ ID NO: 108391 - RNA, 32 nt, Human
cccuuuuaacccaguguacuaggucaaucagg

SEQ ID NO: 108392 - RNA, 32 nt, Human
cccuuuuacaugcacacacuccucacacugcu

SEQ ID NO: 108393 - RNA, 32 nt, Human
cccuuuuaccuauggcaggagcagcugggaug

SEQ ID NO: 108394 - RNA, 32 nt, Human
cccuuuuaucaguauuccaagccugggaugau

SEQ ID NO: 108395 - RNA, 32 nt, Human
cccuuuuaugguagggcacuucaacuuuaaug

SEQ ID NO: 108396 - RNA, 32 nt, Human
cccuuuuauucccuuuuccucuuaaagagcug

SEQ ID NO: 108397 - RNA, 32 nt, Human
cccuuuucaugauuuuucauuaggugguucag

SEQ ID NO: 108398 - RNA, 32 nt, Human
cccuuuucauucuaccaacagaucugcacuuu

SEQ ID NO: 108399 - RNA, 22 nt, Human
cccuuuuccaacuucagcaaua

SEQ ID NO: 108400 - RNA, 23 nt, Human
cccuuuuccacaggccuagaaca

SEQ ID NO: 108401 - RNA, 17 nt, Human
cccuuuuccaccugugc

SEQ ID NO: 108402 - RNA, 23 nt, Human
cccuuuuccagaggcugggaaca

SEQ ID NO: 108403 - RNA, 32 nt, Human
cccuuuuccagauggggaaacugaggcccaga

SEQ ID NO: 108404 - RNA, 32 nt, Human
cccuuuuccagccucaauggccuggcagagcc

SEQ ID NO: 108405 - RNA, 32 nt, Human
cccuuuucccacccuccacccucagguaggcc

SEQ ID NO: 108406 - RNA, 32 nt, Human
cccuuuuccccagaccgauccuucccaacgua

SEQ ID NO: 108407 - RNA, 32 nt, Human
cccuuuuccccaucuucuucuuucagaucauu

SEQ ID NO: 108408 - RNA, 24 nt, Human
cccuuuucccccaguuuugggaca

SEQ ID NO: 108409 - RNA, 32 nt, Human
cccuuuucccccaguuuugggacacugugcuu

SEQ ID NO: 108410 - RNA, 32 nt, Human
cccuuuucccccauggucauggugucaccccc

SEQ ID NO: 108411 - RNA, 19 nt, Human
cccuuuucccucugcugcc

SEQ ID NO: 108412 - RNA, 17 nt, Human
cccuuuucccugcugcc

SEQ ID NO: 108413 - RNA, 22 nt, Human
cccuuuuccucccuuaggagca

SEQ ID NO: 108414 - RNA, 32 nt, Human
cccuuuucgcccaggcugaguacaguggugca

SEQ ID NO: 108415 - RNA, 32 nt, Human
cccuuuucggucugucuucauccugccuggcu

SEQ ID NO: 108416 - RNA, 32 nt, Human
cccuuuucgucccaggacgagcucuucagucc

SEQ ID NO: 108417 - RNA, 32 nt, Human
cccuuuucuccucuccccaauccaugcuucac

SEQ ID NO: 108418 - RNA, 32 nt, Human
cccuuuucuccucuccucuccugguccuguug

SEQ ID NO: 108419 - RNA, 32 nt, Human
cccuuuucucugagaagagccagcaguccaca

SEQ ID NO: 108420 - RNA, 32 nt, Human
cccuuuucugggcaccgccuucugcuaggggg

SEQ ID NO: 108421 - RNA, 32 nt, Human
cccuuuucuuguuugaaaacaguuauuuggug

SEQ ID NO: 108422 - RNA, 32 nt, Human
cccuuuucuuucucucauccuacauagcugcc

SEQ ID NO: 108423 - RNA, 32 nt, Human
cccuuuucuuuuuaccacccuaccuuuauugu

SEQ ID NO: 108424 - RNA, 22 nt, Human
cccuuuugagacagaagcucuu

SEQ ID NO: 108425 - RNA, 32 nt, Human
cccuuuugagauacuuuccugucuuuagcuca

SEQ ID NO: 108426 - RNA, 32 nt, Human
cccuuuugauugagccuccaccucugggauuu

SEQ ID NO: 108427 - RNA, 32 nt, Human
cccuuuugcuauacucacagucuuguuuuccc

SEQ ID NO: 108428 - RNA, 21 nt, Human
cccuuuuguuucucaguaaca

SEQ ID NO: 108429 - RNA, 32 nt, Human
cccuuuuuaacuuaaagaacagagccacaccg

SEQ ID NO: 108430 - RNA, 32 nt, Human
cccuuuuuaauuacauucacuacuucuaccac

SEQ ID NO: 108431 - RNA, 22 nt, Human
cccuuuuuacaguucugcaaca

SEQ ID NO: 108432 - RNA, 20 nt, Human
cccuuuuuaccauccauuca

SEQ ID NO: 108433 - RNA, 32 nt, Human
cccuuuuucaaggccccauccaccucccuccc

SEQ ID NO: 108434 - RNA, 32 nt, Human
cccuuuuucagucugauuuggggauuucaguu

SEQ ID NO: 108435 - RNA, 32 nt, Human
cccuuuuuccaaauugauaaggauuucugguu

SEQ ID NO: 108436 - RNA, 32 nt, Human
cccuuuuucccuuuuauuuucaugccuugauu

SEQ ID NO: 108437 - RNA, 32 nt, Human
cccuuuuucuccucacaaggaggugaggcugg

SEQ ID NO: 108438 - RNA, 32 nt, Human
cccuuuuugaaaccagggaggcugguguugcc

SEQ ID NO: 108439 - RNA, 32 nt, Human
cccuuuuugaguuugaaucauagccuugaugu

SEQ ID NO: 108440 - RNA, 32 nt, Human
cccuuuuugaugccccuucugccuuucucuca

SEQ ID NO: 108441 - RNA, 17 nt, Human
cccuuuuuguggcccca

SEQ ID NO: 108442 - RNA, 32 nt, Human
cccuuuuuguuccuuugccucuugccuguccc

SEQ ID NO: 108443 - RNA, 17 nt, Human
cccuuuuuuccacuggc

SEQ ID NO: 108444 - RNA, 22 nt, Human
cccuuuuuugucccauuagcaa

SEQ ID NO: 108445 - RNA, 25 nt, Human
ccgaaaaugcugggauuacaggcgu

SEQ ID NO: 108446 - RNA, 32 nt, Human
ccgaaacaauggaggauccaucagaggagaca

SEQ ID NO: 108447 - RNA, 32 nt, Human
ccgaaacagaggaggaggagggaggggagugc

SEQ ID NO: 108448 - RNA, 32 nt, Human
ccgaaaccagcggcagccgcacggccacuuga

SEQ ID NO: 108449 - RNA, 32 nt, Human
ccgaaacccuccugccaggaagaccagggccu

SEQ ID NO: 108450 - RNA, 21 nt, Human
ccgaaacccucuccuccgcca

SEQ ID NO: 108451 - RNA, 32 nt, Human
ccgaaaccugcaggcguucucucucuaaggag

SEQ ID NO: 108452 - RNA, 32 nt, Human
ccgaaacggcucuaggugcacuguccggcucc

SEQ ID NO: 108453 - RNA, 32 nt, Human
ccgaaacuccacccguucccacugcccugggc

SEQ ID NO: 108454 - RNA, 32 nt, Human
ccgaaagcacagaacguggcacguuggaggaa

SEQ ID NO: 108455 - RNA, 32 nt, Human
ccgaaagccaaaccagacucaccagaaauugc

SEQ ID NO: 108456 - RNA, 32 nt, Human
ccgaaagccgucucuucuaugcaauaacacaa

SEQ ID NO: 108457 - RNA, 32 nt, Human
ccgaaagccuagagaccgccacugugauucac

SEQ ID NO: 108458 - RNA, 32 nt, Human
ccgaaagcuacaccacagaugccagugguuca

SEQ ID NO: 108459 - RNA, 22 nt, Human
ccgaaaggaagaggaagaggca

SEQ ID NO: 108460 - RNA, 32 nt, Human
ccgaaagucauuucuuggaacacaaguggagu

SEQ ID NO: 108461 - RNA, 32 nt, Human
ccgaaagucugaaucucccaaggagggcacca

SEQ ID NO: 108462 - RNA, 32 nt, Human
ccgaaagugcugagauuacaguugcgagccac

SEQ ID NO: 108463 - RNA, 25 nt, Human
ccgaaagugcugggauuacaggcgu

SEQ ID NO: 108464 - RNA, 23 nt, Human
ccgaaaguggugggauuacaagc

SEQ ID NO: 108465 - RNA, 32 nt, Human
ccgaaauauccuggcgacucagagggcagguc

SEQ ID NO: 108466 - RNA, 32 nt, Human
ccgaaauccugggugugucaccaguguagagg

SEQ ID NO: 108467 - RNA, 32 nt, Human
ccgaaaugcauggcagauucauuugucagcca

SEQ ID NO: 108468 - RNA, 22 nt, Human
ccgaaaugcugggauuacaggc

SEQ ID NO: 108469 - RNA, 32 nt, Human
ccgaaaugcuuugggauuacgggugugagccg

SEQ ID NO: 108470 - RNA, 30 nt, Human
ccgaaaugggcaaguucaugaaaccuggga

SEQ ID NO: 108471 - RNA, 32 nt, Human
ccgaacaaggaagcucucccacccccagccuc

SEQ ID NO: 108472 - RNA, 32 nt, Human
ccgaacacugagaaauagugcacuccaagaaa

SEQ ID NO: 108473 - RNA, 32 nt, Human
ccgaacacugcagcugucugaccuuccaaaga

SEQ ID NO: 108474 - RNA, 32 nt, Human
ccgaacaggaagaggguacagcuuugugcagg

SEQ ID NO: 108475 - RNA, 32 nt, Human
ccgaacaucaaaauggaaagaguauucauacu

SEQ ID NO: 108476 - RNA, 32 nt, Human
ccgaacaucuuccuucuccaaagcugggaguc

SEQ ID NO: 108477 - RNA, 32 nt, Human
ccgaacauuuguguccuacuugcugacagcgc

SEQ ID NO: 108478 - RNA, 32 nt, Human
ccgaaccaaaaacugcaaagguggcaggaaga

SEQ ID NO: 108479 - RNA, 32 nt, Human
ccgaaccaggccgccucacagccaggaaauuu

SEQ ID NO: 108480 - RNA, 32 nt, Human
ccgaacccaggagucaaaagcugcagugagcu

SEQ ID NO: 108481 - RNA, 32 nt, Human
ccgaaccucccgucuguaaccugcaccugcag

SEQ ID NO: 108482 - RNA, 32 nt, Human
ccgaaccuucaucugcauguaugucuuugucu

SEQ ID NO: 108483 - RNA, 32 nt, Human
ccgaacgaagccgcggcccgggcacagccaug

SEQ ID NO: 108484 - RNA, 32 nt, Human
ccgaacuccagccaccacuuuccugugcauuu

SEQ ID NO: 108485 - RNA, 32 nt, Human
ccgaacugacaggacacagcaggcuggaguug

SEQ ID NO: 108486 - RNA, 32 nt, Human
ccgaacuugcaacauuccaccauugugauaug

SEQ ID NO: 108487 - RNA, 32 nt, Human
ccgaagaacgggccaggaaguccuccaauuuc

SEQ ID NO: 108488 - RNA, 32 nt, Human
ccgaagaagggcuaggaacacccuggagaggc

SEQ ID NO: 108489 - RNA, 32 nt, Human
ccgaagaaucuuagugacauuuagccaugggu

SEQ ID NO: 108490 - RNA, 32 nt, Human
ccgaagacagcggaucaucugaggucaggagu

SEQ ID NO: 108491 - RNA, 32 nt, Human
ccgaagacauaagucggugagacauggcugaa

SEQ ID NO: 108492 - RNA, 32 nt, Human
ccgaagagaggagagaccugggagugggagcu

SEQ ID NO: 108493 - RNA, 32 nt, Human
ccgaagaggaggcggaccaggagaagagcaaa

SEQ ID NO: 108494 - RNA, 32 nt, Human
ccgaagaggcagcuagggagagugggagguag

SEQ ID NO: 108495 - RNA, 32 nt, Human
ccgaagauuccugaggccagagcucugacagg

SEQ ID NO: 108496 - RNA, 32 nt, Human
ccgaagcacagcagcuaacacacaagcauauc

SEQ ID NO: 108497 - RNA, 32 nt, Human
ccgaagcagcugcagugggcagccaggggugg

SEQ ID NO: 108498 - RNA, 32 nt, Human
ccgaagcaggcagaucaccugaggucaggagu

SEQ ID NO: 108499 - RNA, 32 nt, Human
ccgaagcaggcggaucacuugaggucaggagu

SEQ ID NO: 108500 - RNA, 32 nt, Human
ccgaagcagguggaucaucugaggucgggaga

SEQ ID NO: 108501 - RNA, 32 nt, Human
ccgaagcaggugggucaccugaggucaggagu

SEQ ID NO: 108502 - RNA, 30 nt, Human
ccgaagccaacaacuagcuggucccugucg

SEQ ID NO: 108503 - RNA, 32 nt, Human
ccgaagcccaggcugaagaguuuaacuuuggg

SEQ ID NO: 108504 - RNA, 32 nt, Human
ccgaagcccugaggcgucgaggccgcccgagg

SEQ ID NO: 108505 - RNA, 18 nt, Human
ccgaagccgccccgagcu

SEQ ID NO: 108506 - RNA, 32 nt, Human
ccgaagccggaagaggcggaaaauggauucuc

SEQ ID NO: 108507 - RNA, 16 nt, Human
ccgaagccggcuguug

SEQ ID NO: 108508 - RNA, 32 nt, Human
ccgaagccuuaaauccuucugucuuccugacu

SEQ ID NO: 108509 - RNA, 32 nt, Human
ccgaagccuuggcuuuucacaugcaagggaca

SEQ ID NO: 108510 - RNA, 32 nt, Human
ccgaagcgaguggaucaccugaggucaggauu

SEQ ID NO: 108511 - RNA, 32 nt, Human
ccgaagcgggcggaucaccugaggucgggagu

SEQ ID NO: 108512 - RNA, 32 nt, Human
ccgaagcggguggaucaccugaggucaggagu

SEQ ID NO: 108513 - RNA, 32 nt, Human
ccgaagcuacaugccaaugauaggugcaaaga

SEQ ID NO: 108514 - RNA, 22 nt, Human
ccgaagcucuuucccgccgccu

SEQ ID NO: 108515 - RNA, 32 nt, Human
ccgaagcucuuuggaccuagcagguucggcgg

SEQ ID NO: 108516 - RNA, 32 nt, Human
ccgaagcugagacugacuacugugcauuagga

SEQ ID NO: 108517 - RNA, 32 nt, Human
ccgaagcugcggagcuugcugaggcaaggccg

SEQ ID NO: 108518 - RNA, 18 nt, Human
ccgaagcugcuucgggcc

SEQ ID NO: 108519 - RNA, 32 nt, Human
ccgaagcuguccacugccaccacucgggcagu

SEQ ID NO: 108520 - RNA, 32 nt, Human
ccgaaggcagggaacgcccuccccagucccgc

SEQ ID NO: 108521 - RNA, 32 nt, Human
ccgaaggcagggccuuccuaaguggcugagua

SEQ ID NO: 108522 - RNA, 32 nt, Human
ccgaaggccucaauaaacggagcuggcgcugc

SEQ ID NO: 108523 - RNA, 32 nt, Human
ccgaaggcggcccucuggcauucccuggccuc

SEQ ID NO: 108524 - RNA, 21 nt, Human
ccgaagggcucgcuccgcgcc

SEQ ID NO: 108525 - RNA, 32 nt, Human
ccgaagggugagaagagaagccaugccgggca

SEQ ID NO: 108526 - RNA, 32 nt, Human
ccgaagguccaggaguccaggacagcaggugc

SEQ ID NO: 108527 - RNA, 32 nt, Human
ccgaagguggcucuagcgcauccuuugucgcg

SEQ ID NO: 108528 - RNA, 24 nt, Human
ccgaaguagcugggauuacaggcg

SEQ ID NO: 108529 - RNA, 32 nt, Human
ccgaagucuuggccuccagcucccucuugccu

SEQ ID NO: 108530 - RNA, 24 nt, Human
ccgaagugcuaagauuacaggcgu

SEQ ID NO: 108531 - RNA, 20 nt, Human
ccgaagugcuaggauuacag

SEQ ID NO: 108532 - RNA, 24 nt, Human
ccgaagugcuaggauuacagacgu

SEQ ID NO: 108533 - RNA, 24 nt, Human
ccgaagugcuggaauuacaggcgu

SEQ ID NO: 108534 - RNA, 22 nt, Human
ccgaagugcugggauuacaggc

SEQ ID NO: 108535 - RNA, 22 nt, Human
ccgaagugcugggauugcaggc

SEQ ID NO: 108536 - RNA, 24 nt, Human
ccgaagugcuugaauuacaggcgu

SEQ ID NO: 108537 - RNA, 32 nt, Human
ccgaagugggcagaucaccugaggucaggagu

SEQ ID NO: 108538 - RNA, 32 nt, Human
ccgaagugggcagaucacuugaggucaagagu

SEQ ID NO: 108539 - RNA, 32 nt, Human
ccgaagugggcggaucacuugaggucagcagu

SEQ ID NO: 108540 - RNA, 32 nt, Human
ccgaaguggguggaucaccugagguccggagu

SEQ ID NO: 108541 - RNA, 32 nt, Human
ccgaaguggguggauuaccugaggucaggagc

SEQ ID NO: 108542 - RNA, 31 nt, Human
ccgaagugugagagacgauugucucauuggc

SEQ ID NO: 108543 - RNA, 32 nt, Human
ccgaaguguguagguauagucagccggugcag

SEQ ID NO: 108544 - RNA, 22 nt, Human
ccgaaguguugggauuacaggc

SEQ ID NO: 108545 - RNA, 32 nt, Human
ccgaaguguuucaaguggaucucaguaaagga

SEQ ID NO: 108546 - RNA, 32 nt, Human
ccgaaguguuucugaagucucaagaacugcca

SEQ ID NO: 108547 - RNA, 32 nt, Human
ccgaaguuauggcuccuuccucccucucucca

SEQ ID NO: 108548 - RNA, 32 nt, Human
ccgaaguugggguccugggaaaacuugggucc

SEQ ID NO: 108549 - RNA, 32 nt, Human
ccgaauacacuuugacuccccuucccuucccu

SEQ ID NO: 108550 - RNA, 23 nt, Human
ccgaauagcugggacuacaggcg

SEQ ID NO: 108551 - RNA, 23 nt, Human
ccgaauagcugggauuacaggcg

SEQ ID NO: 108552 - RNA, 32 nt, Human
ccgaauauacaguucaagaauuuugucugacu

SEQ ID NO: 108553 - RNA, 32 nt, Human
ccgaaucccugggaaaaauucuuuucccccag

SEQ ID NO: 108554 - RNA, 32 nt, Human
ccgaauccucccaguugaggcaguagcugugu

SEQ ID NO: 108555 - RNA, 32 nt, Human
ccgaaucugcauuuugacaggauccccaggua

SEQ ID NO: 108556 - RNA, 32 nt, Human
ccgaaugccaugagcugcagcgacccagccug

SEQ ID NO: 108557 - RNA, 32 nt, Human
ccgaauggagugagcccagcagggcaugcugg

SEQ ID NO: 108558 - RNA, 22 nt, Human
ccgaauggccggaaaauggagu

SEQ ID NO: 108559 - RNA, 32 nt, Human
ccgaaugggcagaucacuugaggucaggaguu

SEQ ID NO: 108560 - RNA, 20 nt, Human
ccgaauguggccgcccaggg

SEQ ID NO: 108561 - RNA, 32 nt, Human
ccgaauucagaggccucagguaugacgacauc

SEQ ID NO: 108562 - RNA, 22 nt, Human
ccgaauuccaaagaaaugggcu

SEQ ID NO: 108563 - RNA, 32 nt, Human
ccgaauucccuucacaucuucaacgccaucag

SEQ ID NO: 108564 - RNA, 32 nt, Human
ccgaauuugccaaagagauggaagagggugag

SEQ ID NO: 108565 - RNA, 32 nt, Human
ccgacaaacacaagcagaaacuucucaggauc

SEQ ID NO: 108566 - RNA, 32 nt, Human
ccgacaaacggucacauguccaucguuauggc

SEQ ID NO: 108567 - RNA, 32 nt, Human
ccgacaaccacugcccagcagccucugggacc

SEQ ID NO: 108568 - RNA, 32 nt, Human
ccgacaagccccucaagggcugaggccgagga

SEQ ID NO: 108569 - RNA, 32 nt, Human
ccgacacaauccaggcguguucagccugagcu

SEQ ID NO: 108570 - RNA, 32 nt, Human
ccgacacacaugcacgcacgcaccccucuuaa

SEQ ID NO: 108571 - RNA, 32 nt, Human
ccgacacacaugcuuuucuccaugacacgagg

SEQ ID NO: 108572 - RNA, 32 nt, Human
ccgacacguagcgccgcccuccugccuccgga

SEQ ID NO: 108573 - RNA, 21 nt, Human
ccgacagagcccggggcgcag

SEQ ID NO: 108574 - RNA, 32 nt, Human
ccgacagagcuggaaaugcauugcacuuugac

SEQ ID NO: 108575 - RNA, 32 nt, Human
ccgacagaggggaaggaauggaccugugagag

SEQ ID NO: 108576 - RNA, 32 nt, Human
ccgacagcauuaccucacccggccccaucugu

SEQ ID NO: 108577 - RNA, 32 nt, Human
ccgacagccuugcaggcugggcucagggacaa

SEQ ID NO: 108578 - RNA, 32 nt, Human
ccgacagcucugaagaugaauuuugauuggac

SEQ ID NO: 108579 - RNA, 32 nt, Human
ccgacagcuuccgcguguggccaucugucuuu

SEQ ID NO: 108580 - RNA, 32 nt, Human
ccgacagugccauccccaccuucaccucggag

SEQ ID NO: 108581 - RNA, 27 nt, Human
ccgacaucauuaccggguuuuccucuu

SEQ ID NO: 108582 - RNA, 32 nt, Human
ccgacaucccuaaaaguaccuccacccguucc

SEQ ID NO: 108583 - RNA, 32 nt, Human
ccgacaucugaacaccuacauuuccuuugcag

SEQ ID NO: 108584 - RNA, 20 nt, Human
ccgacauggcgaaacccugu

SEQ ID NO: 108585 - RNA, 32 nt, Human
ccgacaugggcaacaugacaagaccccaucuc

SEQ ID NO: 108586 - RNA, 20 nt, Human
ccgacauggugaaacccugu

SEQ ID NO: 108587 - RNA, 32 nt, Human
ccgacauguuuucuuuggccugggugguuuau

SEQ ID NO: 108588 - RNA, 32 nt, Human
ccgaccaaagccccagggggugcagaagacuc

SEQ ID NO: 108589 - RNA, 20 nt, Human
ccgaccaacauggugaaacc

SEQ ID NO: 108590 - RNA, 32 nt, Human
ccgaccaacauggugaaaccccaucuuuacug

SEQ ID NO: 108591 - RNA, 32 nt, Human
ccgaccacacaaacccagccuggggaggaacc

SEQ ID NO: 108592 - RNA, 32 nt, Human
ccgaccacagcccuccccacugugagccuucc

SEQ ID NO: 108593 - RNA, 32 nt, Human
ccgaccaccuggccuucucuucgcuucuugac

SEQ ID NO: 108594 - RNA, 32 nt, Human
ccgaccagccucacccagccucggcugaaugu

SEQ ID NO: 108595 - RNA, 32 nt, Human
ccgaccauccacccggugguuccuguuugucc

SEQ ID NO: 108596 - RNA, 28 nt, Human
ccgacccacacagcugucgcugcccuga

SEQ ID NO: 108597 - RNA, 32 nt, Human
ccgacccagagcugaguccgaggaccccaggc

SEQ ID NO: 108598 - RNA, 32 nt, Human
ccgacccagauggguggaucaccugaggucag

SEQ ID NO: 108599 - RNA, 32 nt, Human
ccgacccaguccguuaggaaagaagggaaacg

SEQ ID NO: 108600 - RNA, 32 nt, Human
ccgacccaguguuucgcggacugaggucuccg

SEQ ID NO: 108601 - RNA, 20 nt, Human
ccgacccaugcuggcuggga

SEQ ID NO: 108602 - RNA, 21 nt, Human
ccgacccaugcuggcugggaa

SEQ ID NO: 108603 - RNA, 32 nt, Human
ccgaccccacacacccugagggagcccuaccc

SEQ ID NO: 108604 - RNA, 32 nt, Human
ccgaccccaccccagucuccccacacggaccu

SEQ ID NO: 108605 - RNA, 32 nt, Human
ccgaccccagacccuggcuggccaggaugaag

SEQ ID NO: 108606 - RNA, 32 nt, Human
ccgacccccuacugcucggccgcggcugcccg

SEQ ID NO: 108607 - RNA, 32 nt, Human
ccgacccgcacacacacccacacugcugcccu

SEQ ID NO: 108608 - RNA, 26 nt, Human
ccgacccggguuaaaacucccaggga

SEQ ID NO: 108609 - RNA, 32 nt, Human
ccgacccguggcugggucggagcuccauguuc

SEQ ID NO: 108610 - RNA, 32 nt, Human
ccgacccuccugucauucacagucccauggca

SEQ ID NO: 108611 - RNA, 32 nt, Human
ccgacccugagugcagccugacccgcccucgc

SEQ ID NO: 108612 - RNA, 17 nt, Human
ccgacccugcccugggc

SEQ ID NO: 108613 - RNA, 32 nt, Human
ccgaccgcagcagcucaaggugccaucugccu

SEQ ID NO: 108614 - RNA, 28 nt, Human
ccgaccgcccgugcugccuccuuccggg

SEQ ID NO: 108615 - RNA, 32 nt, Human
ccgaccggcccaccccagggcguuccugaagg

SEQ ID NO: 108616 - RNA, 32 nt, Human
ccgaccggcccgcggcagccugcgccgcgcca

SEQ ID NO: 108617 - RNA, 32 nt, Human
ccgaccggucuccugacccagcaugcugcucu

SEQ ID NO: 108618 - RNA, 32 nt, Human
ccgaccuacagcccauacagaccugauuucug

SEQ ID NO: 108619 - RNA, 32 nt, Human
ccgaccuauaugucuauauguaaguggaguua

SEQ ID NO: 108620 - RNA, 22 nt, Human
ccgaccuaucccaguuguguga

SEQ ID NO: 108621 - RNA, 32 nt, Human
ccgaccucaaguagucugccugccucaaccuc

SEQ ID NO: 108622 - RNA, 32 nt, Human
ccgaccucaagugauccucccaccucacccuc

SEQ ID NO: 108623 - RNA, 32 nt, Human
ccgaccucagccuuccccuugcccagggcuca

SEQ ID NO: 108624 - RNA, 32 nt, Human
ccgaccucaggugauccacccaccucggccuc

SEQ ID NO: 108625 - RNA, 32 nt, Human
ccgaccucaggugauccgcccaccucagccuc

SEQ ID NO: 108626 - RNA, 32 nt, Human
ccgaccucaggugauccgcccaccucggccuc

SEQ ID NO: 108627 - RNA, 32 nt, Human
ccgaccucaggugaucugcccaccucggccuc

SEQ ID NO: 108628 - RNA, 32 nt, Human
ccgaccucauacaaacucaggccugcagaggc

SEQ ID NO: 108629 - RNA, 32 nt, Human
ccgaccucccaaagugcugggauuacaggcuu

SEQ ID NO: 108630 - RNA, 25 nt, Human
ccgaccucgugaucugcccaccuca

SEQ ID NO: 108631 - RNA, 32 nt, Human
ccgaccugggagacuucaggaaugacaaccua

SEQ ID NO: 108632 - RNA, 32 nt, Human
ccgaccugggcaaccuggaggagcccagggaa

SEQ ID NO: 108633 - RNA, 18 nt, Human
ccgaccuggggcugcaca

SEQ ID NO: 108634 - RNA, 32 nt, Human
ccgaccuguacacuuuccagaagccugaucuc

SEQ ID NO: 108635 - RNA, 32 nt, Human
ccgaccuguccccgccuccucucccucccucg

SEQ ID NO: 108636 - RNA, 32 nt, Human
ccgaccuguuguucacuuugcuggugagccag

SEQ ID NO: 108637 - RNA, 32 nt, Human
ccgaccuuaggugaugcacugugcccagccau

SEQ ID NO: 108638 - RNA, 32 nt, Human
ccgaccuuauugcugugcucugggcuuggggg

SEQ ID NO: 108639 - RNA, 24 nt, Human
ccgaccuugugauccacccaccuc

SEQ ID NO: 108640 - RNA, 32 nt, Human
ccgacgaaccccuacccuucccuagaccaugu

SEQ ID NO: 108641 - RNA, 32 nt, Human
ccgacgcaauggcagccuuugcaguggaaccu

SEQ ID NO: 108642 - RNA, 32 nt, Human
ccgacgcacagccccuccuggugcgcggcugg

SEQ ID NO: 108643 - RNA, 20 nt, Human
ccgacgcacgcccucgggcc

SEQ ID NO: 108644 - RNA, 32 nt, Human
ccgacgcagagcagcgcccuggccgggccaag

SEQ ID NO: 108645 - RNA, 32 nt, Human
ccgacgcccaggacccuggccugcagagacgc

SEQ ID NO: 108646 - RNA, 32 nt, Human
ccgacgccgcgggauggggacgcggcgcgggg

SEQ ID NO: 108647 - RNA, 18 nt, Human
ccgacgccggccugggcc

SEQ ID NO: 108648 - RNA, 32 nt, Human
ccgacgcggcggcggaggaggcugugaggagu

SEQ ID NO: 108649 - RNA, 32 nt, Human
ccgacgcuuccagacaaggcggaaaaggccuu

SEQ ID NO: 108650 - RNA, 32 nt, Human
ccgacggaaauagaauugaaggcauucuaaaa

SEQ ID NO: 108651 - RNA, 32 nt, Human
ccgacggagcagaagagagagcauggagcugg

SEQ ID NO: 108652 - RNA, 32 nt, Human
ccgacggccccuggauaggcggaaggagugga

SEQ ID NO: 108653 - RNA, 20 nt, Human
ccgacggggcagacacccug

SEQ ID NO: 108654 - RNA, 32 nt, Human
ccgacggggccgcggcaggcgcggcgagagcg

SEQ ID NO: 108655 - RNA, 20 nt, Human
ccgacgggggucccgggcca

SEQ ID NO: 108656 - RNA, 20 nt, Human
ccgacgguuucugguugccu

SEQ ID NO: 108657 - RNA, 32 nt, Human
ccgacguauuuuauucuuuucagugcuauugu

SEQ ID NO: 108658 - RNA, 32 nt, Human
ccgacguccacagggacccaggcaggguuggg

SEQ ID NO: 108659 - RNA, 21 nt, Human
ccgacgugaccguuguagccc

SEQ ID NO: 108660 - RNA, 32 nt, Human
ccgacgugcagccuggcagugcagugagcugu

SEQ ID NO: 108661 - RNA, 32 nt, Human
ccgacuagaguggaagcucagcaaagaacgga

SEQ ID NO: 108662 - RNA, 32 nt, Human
ccgacuagccaagaagggagaccucagaagac

SEQ ID NO: 108663 - RNA, 32 nt, Human
ccgacuaucguugcugguaagccugggcuugc

SEQ ID NO: 108664 - RNA, 32 nt, Human
ccgacuccaggguggugacauuuagagcuagu

SEQ ID NO: 108665 - RNA, 32 nt, Human
ccgacucccagcucugucuuguuccuugucuu

SEQ ID NO: 108666 - RNA, 32 nt, Human
ccgacucccaggagcucaagccaagcccagag

SEQ ID NO: 108667 - RNA, 32 nt, Human
ccgacucccucccuagugcuccuuccucaccc

SEQ ID NO: 108668 - RNA, 32 nt, Human
ccgacuccgacacggcuccaccauggaggagg

SEQ ID NO: 108669 - RNA, 32 nt, Human
ccgacuccgggaccugcuggacauugccaacg

SEQ ID NO: 108670 - RNA, 19 nt, Human
ccgacuccucccugagcca

SEQ ID NO: 108671 - RNA, 32 nt, Human
ccgacuccuuccucccccuucccucccccuuu

SEQ ID NO: 108672 - RNA, 32 nt, Human
ccgacucgcgagugaggaaaagaaggaaaggg

SEQ ID NO: 108673 - RNA, 32 nt, Human
ccgacucggcaccaucaccccgcucaccacuu

SEQ ID NO: 108674 - RNA, 32 nt, Human
ccgacucugccccagcccuggggauucauccu

SEQ ID NO: 108675 - RNA, 32 nt, Human
ccgacucuggagcccaggcuguugcuuuccag

SEQ ID NO: 108676 - RNA, 32 nt, Human
ccgacucugggcaacagagcaagacucugucu

SEQ ID NO: 108677 - RNA, 32 nt, Human
ccgacucuugccuggggacccauucuaugccu

SEQ ID NO: 108678 - RNA, 20 nt, Human
ccgacucuugcucugaguua

SEQ ID NO: 108679 - RNA, 32 nt, Human
ccgacugcaucucugggcaagcggcgcuuugc

SEQ ID NO: 108680 - RNA, 32 nt, Human
ccgacugccaaaguaaccaucauccauauggg

SEQ ID NO: 108681 - RNA, 32 nt, Human
ccgacugcuaugccgagcaggugguggcucgu

SEQ ID NO: 108682 - RNA, 32 nt, Human
ccgacuggagccuggagguucacaguggauuu

SEQ ID NO: 108683 - RNA, 21 nt, Human
ccgacuggccuggccacacug

SEQ ID NO: 108684 - RNA, 31 nt, Human
ccgacuggcuucuguagaugccaaagggcuc

SEQ ID NO: 108685 - RNA, 32 nt, Human
ccgacugggaaaugcagagcucagagagacag

SEQ ID NO: 108686 - RNA, 32 nt, Human
ccgacugggcagcuccuuuccuucccugacgc

SEQ ID NO: 108687 - RNA, 32 nt, Human
ccgacugugcugcucgcgaaggucccacagcc

SEQ ID NO: 108688 - RNA, 31 nt, Human
ccgacuuccuuccccuccccugugucugucu

SEQ ID NO: 108689 - RNA, 32 nt, Human
ccgacuucuccuccccuacccuugccgcccgu

SEQ ID NO: 108690 - RNA, 20 nt, Human
ccgacuuuuggccugagcca

SEQ ID NO: 108691 - RNA, 32 nt, Human
ccgagaaacugggcgucucucccaggaccaca

SEQ ID NO: 108692 - RNA, 32 nt, Human
ccgagaagaaggaggaagcagggguggcggcu

SEQ ID NO: 108693 - RNA, 32 nt, Human
ccgagaagagagagcucugggccuucuuccug

SEQ ID NO: 108694 - RNA, 32 nt, Human
ccgagaaggaggaggaggagagaggaaagagc

SEQ ID NO: 108695 - RNA, 24 nt, Human
ccgagaagggacggucaucugcuc

SEQ ID NO: 108696 - RNA, 32 nt, Human
ccgagaagggagugcggagaggcgccggucgc

SEQ ID NO: 108697 - RNA, 32 nt, Human
ccgagaaggggagggagggcagaggaggggga

SEQ ID NO: 108698 - RNA, 32 nt, Human
ccgagaaggggagggggcgccgccgccgcugc

SEQ ID NO: 108699 - RNA, 32 nt, Human
ccgagaaggggguggucauccccaggcuagcc

SEQ ID NO: 108700 - RNA, 32 nt, Human
ccgagaagucuguuccuuaucacguguguaag

SEQ ID NO: 108701 - RNA, 32 nt, Human
ccgagaaugccacugcacuacagccugggcga

SEQ ID NO: 108702 - RNA, 32 nt, Human
ccgagacacaggcacgggucccugccacgucc

SEQ ID NO: 108703 - RNA, 32 nt, Human
ccgagacacugaggcaggguagagagcgcuug

SEQ ID NO: 108704 - RNA, 32 nt, Human
ccgagacacugccaccuccacauagcucuccc

SEQ ID NO: 108705 - RNA, 32 nt, Human
ccgagacagccugagcccuggcccugcugcuu

SEQ ID NO: 108706 - RNA, 32 nt, Human
ccgagacaggcagaucacaaggucaggaguuu

SEQ ID NO: 108707 - RNA, 32 nt, Human
ccgagacaggcagaucacgaggucaacagauu

SEQ ID NO: 108708 - RNA, 32 nt, Human
ccgagacaggcagaucgcgaggucaggagauc

SEQ ID NO: 108709 - RNA, 32 nt, Human
ccgagacaggcggaucaccugaggucgggagu

SEQ ID NO: 108710 - RNA, 32 nt, Human
ccgagacagguggaucaccugaggucaggagu

SEQ ID NO: 108711 - RNA, 32 nt, Human
ccgagacauauagaauugggaacugauacaug

SEQ ID NO: 108712 - RNA, 32 nt, Human
ccgagaccagccugggcaacauagugagaccc

SEQ ID NO: 108713 - RNA, 32 nt, Human
ccgagaccagccuggggagccggugacugagu

SEQ ID NO: 108714 - RNA, 32 nt, Human
ccgagaccaucugcccagccucacugaggcuc

SEQ ID NO: 108715 - RNA, 21 nt, Human
ccgagacccagccccacgcug

SEQ ID NO: 108716 - RNA, 18 nt, Human
ccgagaccccggccccca

SEQ ID NO: 108717 - RNA, 32 nt, Human
ccgagaccucgaggguccgcuguggggagagg

SEQ ID NO: 108718 - RNA, 20 nt, Human
ccgagaccugggacugcaga

SEQ ID NO: 108719 - RNA, 32 nt, Human
ccgagacgggaggaucaguugaggucaggagu

SEQ ID NO: 108720 - RNA, 32 nt, Human
ccgagacgggcacaucauuugaggucaggagu

SEQ ID NO: 108721 - RNA, 32 nt, Human
ccgagacgggcagaucacuugaggucaggaga

SEQ ID NO: 108722 - RNA, 32 nt, Human
ccgagacgggcggaucaccugaggucaggagu

SEQ ID NO: 108723 - RNA, 32 nt, Human
ccgagacggguggaucaccugaggucaagagu

SEQ ID NO: 108724 - RNA, 32 nt, Human
ccgagacggguggaucaccugaggucaggggu

SEQ ID NO: 108725 - RNA, 32 nt, Human
ccgagacucacugaguugcgggggccuuggag

SEQ ID NO: 108726 - RNA, 32 nt, Human
ccgagacuccuuggguccuccccgcccucccu

SEQ ID NO: 108727 - RNA, 32 nt, Human
ccgagacugugcuccagccugggcgacagagc

SEQ ID NO: 108728 - RNA, 32 nt, Human
ccgagagaagaaaagcagguggaaggagagga

SEQ ID NO: 108729 - RNA, 24 nt, Human
ccgagagacggagguugcagugag

SEQ ID NO: 108730 - RNA, 32 nt, Human
ccgagagaucaaaggacacaaguguuacagaa

SEQ ID NO: 108731 - RNA, 32 nt, Human
ccgagagcagccacugccacucagucugacag

SEQ ID NO: 108732 - RNA, 32 nt, Human
ccgagagcagggggaacacauccaggcagcug

SEQ ID NO: 108733 - RNA, 32 nt, Human
ccgagagccccagaagucggcggggaaguuuc

SEQ ID NO: 108734 - RNA, 32 nt, Human
ccgagagcuauggacagcauugccaguaacac

SEQ ID NO: 108735 - RNA, 32 nt, Human
ccgagagcugugggaagagcugugggaucccc

SEQ ID NO: 108736 - RNA, 32 nt, Human
ccgagaggacugccuugcucaccuguccccuc

SEQ ID NO: 108737 - RNA, 21 nt, Human
ccgagaggagaagcgcagcgc

SEQ ID NO: 108738 - RNA, 19 nt, Human
ccgagaggagcagcagcgg

SEQ ID NO: 108739 - RNA, 22 nt, Human
ccgagaggagcccucuaccuug

SEQ ID NO: 108740 - RNA, 23 nt, Human
ccgagaggccaguugaucugcuc

SEQ ID NO: 108741 - RNA, 24 nt, Human
ccgagaggcggaaguugcagugag

SEQ ID NO: 108742 - RNA, 23 nt, Human
ccgagaggcggagagaauguggg

SEQ ID NO: 108743 - RNA, 24 nt, Human
ccgagaggcggagguggcagugag

SEQ ID NO: 108744 - RNA, 22 nt, Human
ccgagaggcggagguugcagug

SEQ ID NO: 108745 - RNA, 24 nt, Human
ccgagaggcggagguugcagugag

SEQ ID NO: 108746 - RNA, 32 nt, Human
ccgagagggcgccugcuccugagacacaggcc

SEQ ID NO: 108747 - RNA, 23 nt, Human
ccgagagggcuggagugcagugg

SEQ ID NO: 108748 - RNA, 32 nt, Human
ccgagagggcuggagugcaguggcgugaucug

SEQ ID NO: 108749 - RNA, 32 nt, Human
ccgagaggugccgaaggaaccggcgggccgcu

SEQ ID NO: 108750 - RNA, 24 nt, Human
ccgagagguggagguugaagugag

SEQ ID NO: 108751 - RNA, 32 nt, Human
ccgagaguccucagugaaaggauuccgcggca

SEQ ID NO: 108752 - RNA, 32 nt, Human
ccgagagugcgccacuucacuccagccugggc

SEQ ID NO: 108753 - RNA, 32 nt, Human
ccgagaguggcagagaccuguauaugugaccu

SEQ ID NO: 108754 - RNA, 32 nt, Human
ccgagaucacaccaccacuccagccugggcga

SEQ ID NO: 108755 - RNA, 32 nt, Human
ccgagaucauccuggcuaacacggugaaaccc

SEQ ID NO: 108756 - RNA, 32 nt, Human
ccgagaucaugccacugcacugggcaacagag

SEQ ID NO: 108757 - RNA, 32 nt, Human
ccgagaucaugccauuacuccagccuggguga

SEQ ID NO: 108758 - RNA, 32 nt, Human
ccgagaucaugccauuguacuucaccugggca

SEQ ID NO: 108759 - RNA, 32 nt, Human
ccgagaucccgccacucacuccagccuggaua

SEQ ID NO: 108760 - RNA, 32 nt, Human
ccgagauccgccacugcacuccagccugggug

SEQ ID NO: 108761 - RNA, 32 nt, Human
ccgagaucgcgccacuacuccagccuggguga

SEQ ID NO: 108762 - RNA, 32 nt, Human
ccgagaucgugccacuugccuaggcgagugag

SEQ ID NO: 108763 - RNA, 32 nt, Human
ccgagaucugccacugcacuccagccuggcga

SEQ ID NO: 108764 - RNA, 32 nt, Human
ccgagaugaaaaccuccagccagcccagcgcu

SEQ ID NO: 108765 - RNA, 32 nt, Human
ccgagaugaccucguccucaguguggcccugc

SEQ ID NO: 108766 - RNA, 32 nt, Human
ccgagaugacugcccaggaccuggugagccua

SEQ ID NO: 108767 - RNA, 30 nt, Human
ccgagaugagcagcagcugcucagggcuga

SEQ ID NO: 108768 - RNA, 32 nt, Human
ccgagauggacccugggcucggcguccuccgg

SEQ ID NO: 108769 - RNA, 32 nt, Human
ccgagauggcuggaucaucugaggucaggagu

SEQ ID NO: 108770 - RNA, 32 nt, Human
ccgagauggguggaucaccugaggucaggagu

SEQ ID NO: 108771 - RNA, 32 nt, Human
ccgagauggguggaucaucugaggucaggagu

SEQ ID NO: 108772 - RNA, 32 nt, Human
ccgagauugccacugcacuccagccugggcaa

SEQ ID NO: 108773 - RNA, 32 nt, Human
ccgagauuggccauugcacuccagccugggug

SEQ ID NO: 108774 - RNA, 32 nt, Human
ccgagauugugcacuccagccuggguaacaga

SEQ ID NO: 108775 - RNA, 32 nt, Human
ccgagauugugcauugcacuccagccugagca

SEQ ID NO: 108776 - RNA, 32 nt, Human
ccgagauugugccacugaacuccaaccugcac

SEQ ID NO: 108777 - RNA, 32 nt, Human
ccgagauuuucugagcucuccccaaucaccag

SEQ ID NO: 108778 - RNA, 21 nt, Human
ccgagcaaaugcaaggucuag

SEQ ID NO: 108779 - RNA, 21 nt, Human
ccgagcaaaugccaggucuag

SEQ ID NO: 108780 - RNA, 32 nt, Human
ccgagcaagaaaaguggaucucagggaggacu

SEQ ID NO: 108781 - RNA, 32 nt, Human
ccgagcaagaagcagcucccagagagaaagaa

SEQ ID NO: 108782 - RNA, 32 nt, Human
ccgagcaagauuccucccucccucccuccuag

SEQ ID NO: 108783 - RNA, 22 nt, Human
ccgagcaagcgggcccggggcu

SEQ ID NO: 108784 - RNA, 32 nt, Human
ccgagcaagggucgucggcauccaggccugug

SEQ ID NO: 108785 - RNA, 32 nt, Human
ccgagcacagccgugccucgguccgccacggc

SEQ ID NO: 108786 - RNA, 32 nt, Human
ccgagcacaggcgauccucccgccucagccuc

SEQ ID NO: 108787 - RNA, 32 nt, Human
ccgagcacaguggcucaugccuguaaucccag

SEQ ID NO: 108788 - RNA, 19 nt, Human
ccgagcaccagacugcaga

SEQ ID NO: 108789 - RNA, 32 nt, Human
ccgagcagacggaguacacggagcagcggccc

SEQ ID NO: 108790 - RNA, 23 nt, Human
ccgagcagcgcaggauccagguu

SEQ ID NO: 108791 - RNA, 32 nt, Human
ccgagcagcuggcccggcugggcccggggcgc

SEQ ID NO: 108792 - RNA, 23 nt, Human
ccgagcaggagccgugggaccgg

SEQ ID NO: 108793 - RNA, 32 nt, Human
ccgagcaggaggaggaggaagccggagcugcc

SEQ ID NO: 108794 - RNA, 32 nt, Human
ccgagcaggccuggccgcgcucuccccgcuuc

SEQ ID NO: 108795 - RNA, 29 nt, Human
ccgagcaggcuccugccaucccccauggg

SEQ ID NO: 108796 - RNA, 32 nt, Human
ccgagcaggcuccuugcaaagacagcagcgug

SEQ ID NO: 108797 - RNA, 32 nt, Human
ccgagcaguucugguuccuccuggccauccgc

SEQ ID NO: 108798 - RNA, 32 nt, Human
ccgagcauaguggcacaugccuguaaucccag

SEQ ID NO: 108799 - RNA, 32 nt, Human
ccgagcaugguggcgggcaccuguaaucccag

SEQ ID NO: 108800 - RNA, 32 nt, Human
ccgagcaugguggcucaugccuguaaucccac

SEQ ID NO: 108801 - RNA, 32 nt, Human
ccgagccaaguggaucacuugaggucaggagu

SEQ ID NO: 108802 - RNA, 20 nt, Human
ccgagccacccaccagaccg

SEQ ID NO: 108803 - RNA, 21 nt, Human
ccgagccacucgccgccgcgc

SEQ ID NO: 108804 - RNA, 32 nt, Human
ccgagccacuguacuccagccuaggugacaaa

SEQ ID NO: 108805 - RNA, 32 nt, Human
ccgagccagcaagaggaaggggugcugugagg

SEQ ID NO: 108806 - RNA, 32 nt, Human
ccgagccagcccagagaggagcaugucuuccu

SEQ ID NO: 108807 - RNA, 22 nt, Human
ccgagccagccgugcgccgcgc

SEQ ID NO: 108808 - RNA, 20 nt, Human
ccgagccagcgaaccccagc

SEQ ID NO: 108809 - RNA, 25 nt, Human
ccgagccagcgagccagcgagccgc

SEQ ID NO: 108810 - RNA, 32 nt, Human
ccgagccaugagcugcuacaucaaaagucugc

SEQ ID NO: 108811 - RNA, 22 nt, Human
ccgagcccacucgagccgcagc

SEQ ID NO: 108812 - RNA, 32 nt, Human
ccgagcccagaggccugggccugcacugccug

SEQ ID NO: 108813 - RNA, 32 nt, Human
ccgagcccagcacggcaagggugcaggggcug

SEQ ID NO: 108814 - RNA, 32 nt, Human
ccgagcccaucaaccuggacagcugucuccgu

SEQ ID NO: 108815 - RNA, 32 nt, Human
ccgagccccacacccacaucacccaugugcau

SEQ ID NO: 108816 - RNA, 32 nt, Human
ccgagccccagagggaucuccaugaaugucag

SEQ ID NO: 108817 - RNA, 32 nt, Human
ccgagccccagcccggccgccauggacgacaa

SEQ ID NO: 108818 - RNA, 32 nt, Human
ccgagccccuggcaaccacuaaucuauuucuc

SEQ ID NO: 108819 - RNA, 32 nt, Human
ccgagccccuggcugcaaaagcagagguugcc

SEQ ID NO: 108820 - RNA, 21 nt, Human
ccgagcccgagccgcagccgc

SEQ ID NO: 108821 - RNA, 17 nt, Human
ccgagcccuccacacca

SEQ ID NO: 108822 - RNA, 20 nt, Human
ccgagcccugcucacugccu

SEQ ID NO: 108823 - RNA, 32 nt, Human
ccgagcccugcuccuugugggcgcucacacug

SEQ ID NO: 108824 - RNA, 22 nt, Human
ccgagcccuugacaccacgccc

SEQ ID NO: 108825 - RNA, 19 nt, Human
ccgagcccuugccccugcc

SEQ ID NO: 108826 - RNA, 32 nt, Human
ccgagccgcaggggcgcucugaaggggccugg

SEQ ID NO: 108827 - RNA, 32 nt, Human
ccgagccgcaggucugcugggccuggcacugc

SEQ ID NO: 108828 - RNA, 32 nt, Human
ccgagccgcugcccucaaaacggagggggcac

SEQ ID NO: 108829 - RNA, 32 nt, Human
ccgagccggagccggagccacagcggggaggg

SEQ ID NO: 108830 - RNA, 32 nt, Human
ccgagccggccgagcgagcagcgcggcagcac

SEQ ID NO: 108831 - RNA, 20 nt, Human
ccgagccggcggggagccgg

SEQ ID NO: 108832 - RNA, 32 nt, Human
ccgagccgggcggaucaccuguggucaggagu

SEQ ID NO: 108833 - RNA, 23 nt, Human
ccgagccuaggcaacaagaguga

SEQ ID NO: 108834 - RNA, 31 nt, Human
ccgagccucaguuucugacugcagaagagcc

SEQ ID NO: 108835 - RNA, 32 nt, Human
ccgagccucuacuguauaccaggggcuaacuc

SEQ ID NO: 108836 - RNA, 21 nt, Human
ccgagccugagccgcaaucgc

SEQ ID NO: 108837 - RNA, 32 nt, Human
ccgagccugcagccgagcuccgcugccggccc

SEQ ID NO: 108838 - RNA, 32 nt, Human
ccgagccugccuguguccuacagaugcacacu

SEQ ID NO: 108839 - RNA, 32 nt, Human
ccgagccugguggugcgugccuguaaucccag

SEQ ID NO: 108840 - RNA, 22 nt, Human
ccgagccuguuagacgcagcgc

SEQ ID NO: 108841 - RNA, 32 nt, Human
ccgagccuguuccagauagacucucucucuuu

SEQ ID NO: 108842 - RNA, 20 nt, Human
ccgagccuuugcagagaggc

SEQ ID NO: 108843 - RNA, 32 nt, Human
ccgagcgagccgcggggcccgcgcagccccgg

SEQ ID NO: 108844 - RNA, 32 nt, Human
ccgagcgcaguggcucacgccuguaaucccag

SEQ ID NO: 108845 - RNA, 23 nt, Human
ccgagcgccccggagccgcaggc

SEQ ID NO: 108846 - RNA, 19 nt, Human
ccgagcgccgccgccgccg

SEQ ID NO: 108847 - RNA, 18 nt, Human
ccgagcgccgcuccggcu

SEQ ID NO: 108848 - RNA, 32 nt, Human
ccgagcgcgauggcucauaccuguaaucccag

SEQ ID NO: 108849 - RNA, 32 nt, Human
ccgagcgcggagccaugggccgggcuggcacc

SEQ ID NO: 108850 - RNA, 32 nt, Human
ccgagcggaggagcgagagggacgcgagcaag

SEQ ID NO: 108851 - RNA, 32 nt, Human
ccgagcggaggcggagucggcgccgagaacau

SEQ ID NO: 108852 - RNA, 18 nt, Human
ccgagcggccaccgagcc

SEQ ID NO: 108853 - RNA, 18 nt, Human
ccgagcggcccacggcca

SEQ ID NO: 108854 - RNA, 20 nt, Human
ccgagcggccgccgcugccg

SEQ ID NO: 108855 - RNA, 32 nt, Human
ccgagcggggagcaaggccugcggggaggcgc

SEQ ID NO: 108856 - RNA, 20 nt, Human
ccgagcggggucccgagcua

SEQ ID NO: 108857 - RNA, 19 nt, Human
ccgagcgugaguccaggcu

SEQ ID NO: 108858 - RNA, 32 nt, Human
ccgagcgugauggcucaccccuguaaucccag

SEQ ID NO: 108859 - RNA, 32 nt, Human
ccgagcgugaugguggaugccuguaauccuag

SEQ ID NO: 108860 - RNA, 32 nt, Human
ccgagcgugguggcucacaccuguaaucccag

SEQ ID NO: 108861 - RNA, 32 nt, Human
ccgagcgugguggcucacgccuguaaucccaa

SEQ ID NO: 108862 - RNA, 32 nt, Human
ccgagcuacaaagcaugggaaaaagagacucu

SEQ ID NO: 108863 - RNA, 32 nt, Human
ccgagcuauuuucuugcuguggccucuggugc

SEQ ID NO: 108864 - RNA, 32 nt, Human
ccgagcucagggguuugagaccagccugggca

SEQ ID NO: 108865 - RNA, 32 nt, Human
ccgagcucaguggauguuugaacuugcuccag

SEQ ID NO: 108866 - RNA, 19 nt, Human
ccgagcuccugaagccggg

SEQ ID NO: 108867 - RNA, 32 nt, Human
ccgagcucguguauccuggggcucccuucauc

SEQ ID NO: 108868 - RNA, 19 nt, Human
ccgagcugcaagccugccu

SEQ ID NO: 108869 - RNA, 22 nt, Human
ccgagcugccacggccgccucc

SEQ ID NO: 108870 - RNA, 32 nt, Human
ccgagcugcgggaguacugccucccaggcccu

SEQ ID NO: 108871 - RNA, 32 nt, Human
ccgagcugcuggugcugacccugagcgccgag

SEQ ID NO: 108872 - RNA, 32 nt, Human
ccgagcuggguugccccacugugcuuguaucu

SEQ ID NO: 108873 - RNA, 32 nt, Human
ccgaggaacugggcgcuugcagugcguugcac

SEQ ID NO: 108874 - RNA, 32 nt, Human
ccgaggaagaggaggaagaugaagaccaggac

SEQ ID NO: 108875 - RNA, 32 nt, Human
ccgaggaaggaguucaaguccagccuggacgg

SEQ ID NO: 108876 - RNA, 19 nt, Human
ccgaggaaggaugcgguga

SEQ ID NO: 108877 - RNA, 20 nt, Human
ccgaggaaguucccagcaga

SEQ ID NO: 108878 - RNA, 32 nt, Human
ccgaggaauaggggaggguuaauaagacucca

SEQ ID NO: 108879 - RNA, 32 nt, Human
ccgaggacagccaggacccaggggaagacaca

SEQ ID NO: 108880 - RNA, 23 nt, Human
ccgaggaccgccaccucuuccca

SEQ ID NO: 108881 - RNA, 32 nt, Human
ccgaggaccggcugccccgccuggaggagauc

SEQ ID NO: 108882 - RNA, 32 nt, Human
ccgaggacgggacccgcugagcucugggugag

SEQ ID NO: 108883 - RNA, 21 nt, Human
ccgaggacguggcugcucuga

SEQ ID NO: 108884 - RNA, 32 nt, Human
ccgaggagacaagagaaagaugaagaucauca

SEQ ID NO: 108885 - RNA, 32 nt, Human
ccgaggagaccacgcuccuggagcucugcugu

SEQ ID NO: 108886 - RNA, 32 nt, Human
ccgaggagaccaggaacccugcuucagcagcc

SEQ ID NO: 108887 - RNA, 32 nt, Human
ccgaggagagggugucuggugccugaaugaca

SEQ ID NO: 108888 - RNA, 32 nt, Human
ccgaggagcccaaagcccuacccucaccauuc

SEQ ID NO: 108889 - RNA, 32 nt, Human
ccgaggagcccgccaacccgaccaugaacuca

SEQ ID NO: 108890 - RNA, 22 nt, Human
ccgaggagcugggauuacaggc

SEQ ID NO: 108891 - RNA, 32 nt, Human
ccgaggagcugugguccagccugcgcggcggg

SEQ ID NO: 108892 - RNA, 32 nt, Human
ccgaggaggaagggaaggggcucugugugccc

SEQ ID NO: 108893 - RNA, 32 nt, Human
ccgaggaggaaggggcuccgugcacuugcagg

SEQ ID NO: 108894 - RNA, 32 nt, Human
ccgaggaggaggaggaggaggaggacgcgggc

SEQ ID NO: 108895 - RNA, 32 nt, Human
ccgaggaggaggaggaggaggaggaggaggcg

SEQ ID NO: 108896 - RNA, 32 nt, Human
ccgaggaggaggaggaugaggaguaugccgag

SEQ ID NO: 108897 - RNA, 32 nt, Human
ccgaggaggcagagcuugcagugagccaagau

SEQ ID NO: 108898 - RNA, 32 nt, Human
ccgaggaggccauggagccaggggaaucauug

SEQ ID NO: 108899 - RNA, 32 nt, Human
ccgaggaggcccacgcccaccaugguccccug

SEQ ID NO: 108900 - RNA, 32 nt, Human
ccgaggaggcgaagguugcagugagccgagau

SEQ ID NO: 108901 - RNA, 32 nt, Human
ccgaggagggaggaucaccugaggucaggagu

SEQ ID NO: 108902 - RNA, 32 nt, Human
ccgaggagggcagaucaacugaggucaggagu

SEQ ID NO: 108903 - RNA, 24 nt, Human
ccgaggagggcagaucacuugaga

SEQ ID NO: 108904 - RNA, 32 nt, Human
ccgaggagggcagaucacuugaggucaggagu

SEQ ID NO: 108905 - RNA, 32 nt, Human
ccgaggagggcagaucaucugaggucaggagu

SEQ ID NO: 108906 - RNA, 32 nt, Human
ccgaggagggccgaucaccugaggucaggagu

SEQ ID NO: 108907 - RNA, 32 nt, Human
ccgaggagguggcagugcaagacacugccggg

SEQ ID NO: 108908 - RNA, 32 nt, Human
ccgaggaucccaggaggaaggauggggcaaga

SEQ ID NO: 108909 - RNA, 21 nt, Human
ccgaggaugcccagccucccc

SEQ ID NO: 108910 - RNA, 32 nt, Human
ccgaggauuuuccagcccuuccuuuucuuucu

SEQ ID NO: 108911 - RNA, 32 nt, Human
ccgaggcacagcccagcugggcuaggccggug

SEQ ID NO: 108912 - RNA, 32 nt, Human
ccgaggcacagcccagcuggggcuaggcccgg

SEQ ID NO: 108913 - RNA, 32 nt, Human
ccgaggcaccacuguuucuugccuggaguugu

SEQ ID NO: 108914 - RNA, 32 nt, Human
ccgaggcaccugcugguucucccauccauggc

SEQ ID NO: 108915 - RNA, 32 nt, Human
ccgaggcacuguggcccagcaggugacugguu

SEQ ID NO: 108916 - RNA, 32 nt, Human
ccgaggcagacagaucaccugaggucaggagu

SEQ ID NO: 108917 - RNA, 32 nt, Human
ccgaggcagacggaucacuugaggucaggagu

SEQ ID NO: 108918 - RNA, 32 nt, Human
ccgaggcagcagagccgaggagagcaggucca

SEQ ID NO: 108919 - RNA, 32 nt, Human
ccgaggcagcgggcagacgagcagggggcggg

SEQ ID NO: 108920 - RNA, 32 nt, Human
ccgaggcaggaagaucauugagcucaggaguu

SEQ ID NO: 108921 - RNA, 32 nt, Human
ccgaggcaggaggaucaccugaggucaggagu

SEQ ID NO: 108922 - RNA, 32 nt, Human
ccgaggcaggaggaucacuugaggucaagagu

SEQ ID NO: 108923 - RNA, 32 nt, Human
ccgaggcaggaggaucacuugaggucaggagu

SEQ ID NO: 108924 - RNA, 32 nt, Human
ccgaggcaggcagaucacaaggucaagagauc

SEQ ID NO: 108925 - RNA, 32 nt, Human
ccgaggcaggcagaucacaaggucaggaguuc

SEQ ID NO: 108926 - RNA, 32 nt, Human
ccgaggcaggcagaucaccugaggucaagagu

SEQ ID NO: 108927 - RNA, 32 nt, Human
ccgaggcaggcagaucaccugaggucagaagu

SEQ ID NO: 108928 - RNA, 32 nt, Human
ccgaggcaggcagaucaccugaggucaggagu

SEQ ID NO: 108929 - RNA, 32 nt, Human
ccgaggcaggcagaucaccugaggucgggagu

SEQ ID NO: 108930 - RNA, 32 nt, Human
ccgaggcaggcagaucacgaggucaggagauc

SEQ ID NO: 108931 - RNA, 32 nt, Human
ccgaggcaggcagaucacgaggucaggagguc

SEQ ID NO: 108932 - RNA, 32 nt, Human
ccgaggcaggcagaucacuugaggucaggagu

SEQ ID NO: 108933 - RNA, 32 nt, Human
ccgaggcaggcagaucgcuugaggucaggagu

SEQ ID NO: 108934 - RNA, 32 nt, Human
ccgaggcaggcaggucacuugaggucaggagu

SEQ ID NO: 108935 - RNA, 32 nt, Human
ccgaggcaggccaaucaccugaggucacaagu

SEQ ID NO: 108936 - RNA, 32 nt, Human
ccgaggcaggcggaucacaugaggucaggagu

SEQ ID NO: 108937 - RNA, 32 nt, Human
ccgaggcaggcggaucaccugaaaucaggagu

SEQ ID NO: 108938 - RNA, 32 nt, Human
ccgaggcaggcggaucaccugaggucaggagu

SEQ ID NO: 108939 - RNA, 32 nt, Human
ccgaggcaggcggaucaccugaggucgggagu

SEQ ID NO: 108940 - RNA, 32 nt, Human
ccgaggcaggcggaucaccugaggugaggagu

SEQ ID NO: 108941 - RNA, 32 nt, Human
ccgaggcaggcggaucaccugagguugggagu

SEQ ID NO: 108942 - RNA, 24 nt, Human
ccgaggcaggcggaucacuuaaga

SEQ ID NO: 108943 - RNA, 32 nt, Human
ccgaggcaggcggaucacuugaggucagcagu

SEQ ID NO: 108944 - RNA, 32 nt, Human
ccgaggcaggcggaucacuugaggucaggagu

SEQ ID NO: 108945 - RNA, 32 nt, Human
ccgaggcaggcggauuaccugaggucaggagu

SEQ ID NO: 108946 - RNA, 32 nt, Human
ccgaggcaggcggauugccugaggucaggagu

SEQ ID NO: 108947 - RNA, 32 nt, Human
ccgaggcagggggaucaccugaggucucgagu

SEQ ID NO: 108948 - RNA, 32 nt, Human
ccgaggcagggugcgacccaggacccaggacg

SEQ ID NO: 108949 - RNA, 32 nt, Human
ccgaggcagguacaucaccugaggucaagagu

SEQ ID NO: 108950 - RNA, 24 nt, Human
ccgaggcagguggaacacuugaga

SEQ ID NO: 108951 - RNA, 18 nt, Human
ccgaggcagguggaucac

SEQ ID NO: 108952 - RNA, 32 nt, Human
ccgaggcagguggaucaccugacgucaguagu

SEQ ID NO: 108953 - RNA, 24 nt, Human
ccgaggcagguggaucaccugaga

SEQ ID NO: 108954 - RNA, 32 nt, Human
ccgaggcagguggaucaccugagaucaggagu

SEQ ID NO: 108955 - RNA, 32 nt, Human
ccgaggcagguggaucaccugaggucagaagu

SEQ ID NO: 108956 - RNA, 32 nt, Human
ccgaggcagguggaucaccugaggucaggagu

SEQ ID NO: 108957 - RNA, 32 nt, Human
ccgaggcagguggaucaccugaggucaggggc

SEQ ID NO: 108958 - RNA, 32 nt, Human
ccgaggcagguggaucaccugaggucaguuca

SEQ ID NO: 108959 - RNA, 32 nt, Human
ccgaggcagguggaucaccugagguccggagu

SEQ ID NO: 108960 - RNA, 32 nt, Human
ccgaggcagguggaucaccugaggucgggagu

SEQ ID NO: 108961 - RNA, 32 nt, Human
ccgaggcagguggaucaccugggucgggaguu

SEQ ID NO: 108962 - RNA, 32 nt, Human
ccgaggcagguggaucacgugaggucaggagu

SEQ ID NO: 108963 - RNA, 24 nt, Human
ccgaggcagguggaucacuugaga

SEQ ID NO: 108964 - RNA, 32 nt, Human
ccgaggcagguggaucacuugaggucaggagu

SEQ ID NO: 108965 - RNA, 32 nt, Human
ccgaggcagguggaucauuugaggucaggagu

SEQ ID NO: 108966 - RNA, 32 nt, Human
ccgaggcagguggauugccugaggucaggagu

SEQ ID NO: 108967 - RNA, 32 nt, Human
ccgaggcagguugaucaccugaggucaggagu

SEQ ID NO: 108968 - RNA, 32 nt, Human
ccgaggcagugggaagagaugcggccccugga

SEQ ID NO: 108969 - RNA, 32 nt, Human
ccgaggcaguuggaucaccugagguuaggagu

SEQ ID NO: 108970 - RNA, 32 nt, Human
ccgaggcaugagccaccacgccaagcccaggc

SEQ ID NO: 108971 - RNA, 32 nt, Human
ccgaggcaugcggaucacuugaggucaggagu

SEQ ID NO: 108972 - RNA, 32 nt, Human
ccgaggcauguggaucaccugaggucaggagu

SEQ ID NO: 108973 - RNA, 32 nt, Human
ccgaggccagagccaugggcgagaccaagauc

SEQ ID NO: 108974 - RNA, 32 nt, Human
ccgaggccagcaccugggugaaguugcgucau

SEQ ID NO: 108975 - RNA, 18 nt, Human
ccgaggccagcccugccu

SEQ ID NO: 108976 - RNA, 32 nt, Human
ccgaggccagcuggcugcaggugcagggcuau

SEQ ID NO: 108977 - RNA, 22 nt, Human
ccgaggccaggcauccgccgcc

SEQ ID NO: 108978 - RNA, 32 nt, Human
ccgaggccaguggaucaccugaggucaggagu

SEQ ID NO: 108979 - RNA, 32 nt, Human
ccgaggccccagcuucauccagcuucaaccaa

SEQ ID NO: 108980 - RNA, 32 nt, Human
ccgaggcccccgagccccaaggccaacagaga

SEQ ID NO: 108981 - RNA, 32 nt, Human
ccgaggccccugggagacccuggggaggugaa

SEQ ID NO: 108982 - RNA, 32 nt, Human
ccgaggcccgagggagagggaagagcgccggg

SEQ ID NO: 108983 - RNA, 32 nt, Human
ccgaggcccuccgcccugacccuccugcugcc

SEQ ID NO: 108984 - RNA, 22 nt, Human
ccgaggcccugagaaccccagg

SEQ ID NO: 108985 - RNA, 32 nt, Human
ccgaggcccugagccaccucugcugccgccug

SEQ ID NO: 108986 - RNA, 21 nt, Human
ccgaggccgccgccuccgccu

SEQ ID NO: 108987 - RNA, 32 nt, Human
ccgaggccgccgcggccguggcggcggagccc

SEQ ID NO: 108988 - RNA, 32 nt, Human
ccgaggccgcggagcucgcggaggcaaggccg

SEQ ID NO: 108989 - RNA, 23 nt, Human
ccgaggccgcugcgcccccgccu

SEQ ID NO: 108990 - RNA, 32 nt, Human
ccgaggccggcagaucaccugagaucagaagu

SEQ ID NO: 108991 - RNA, 32 nt, Human
ccgaggccggcgcaucaucugaggucaggagu

SEQ ID NO: 108992 - RNA, 32 nt, Human
ccgaggccggcggaugaccugaggucaggagu

SEQ ID NO: 108993 - RNA, 32 nt, Human
ccgaggccgguggaucacuugaggucagaagu

SEQ ID NO: 108994 - RNA, 32 nt, Human
ccgaggccugggaugagccaggacagcgggaa

SEQ ID NO: 108995 - RNA, 32 nt, Human
ccgaggcgagcagaucaccugagguccggauu

SEQ ID NO: 108996 - RNA, 32 nt, Human
ccgaggcgccuggaucaccugaggucaggagu

SEQ ID NO: 108997 - RNA, 32 nt, Human
ccgaggcgcgaggaggugaggcuggagcgcgg

SEQ ID NO: 108998 - RNA, 32 nt, Human
ccgaggcgcggcggcggcuggagcagcgcggu

SEQ ID NO: 108999 - RNA, 32 nt, Human
ccgaggcgcggcucggacuccagcauggcgac

SEQ ID NO: 109000 - RNA, 32 nt, Human
ccgaggcggauggaucaccugaggucgggaau

SEQ ID NO: 109001 - RNA, 32 nt, Human
ccgaggcgggaagaucacuugaggucaggagu

SEQ ID NO: 109002 - RNA, 32 nt, Human
ccgaggcgggaggaucaccugagguuaggagu

SEQ ID NO: 109003 - RNA, 32 nt, Human
ccgaggcgggcaaaucaccugaggucaggagc

SEQ ID NO: 109004 - RNA, 32 nt, Human
ccgaggcgggcagaucaccugaagucaggagu

SEQ ID NO: 109005 - RNA, 32 nt, Human
ccgaggcgggcagaucaccugaggucacgagu

SEQ ID NO: 109006 - RNA, 32 nt, Human
ccgaggcgggcagaucaccugaggucaggagu

SEQ ID NO: 109007 - RNA, 32 nt, Human
ccgaggcgggcagaucaccugaggucgggagu

SEQ ID NO: 109008 - RNA, 24 nt, Human
ccgaggcgggcagaucacuugaga

SEQ ID NO: 109009 - RNA, 32 nt, Human
ccgaggcgggcagaucacuugaggucaggagu

SEQ ID NO: 109010 - RNA, 32 nt, Human
ccgaggcgggcggaucaacugaggucgggagu

SEQ ID NO: 109011 - RNA, 32 nt, Human
ccgaggcgggcggaucaccugagaucaggagu

SEQ ID NO: 109012 - RNA, 32 nt, Human
ccgaggcgggcggaucaccugagaucugagga

SEQ ID NO: 109013 - RNA, 32 nt, Human
ccgaggcgggcggaucaccugaggucagaagu

SEQ ID NO: 109014 - RNA, 32 nt, Human
ccgaggcgggcggaucaccugaggucagcagu

SEQ ID NO: 109015 - RNA, 32 nt, Human
ccgaggcgggcggaucaccugaggucaggagu

SEQ ID NO: 109016 - RNA, 32 nt, Human
ccgaggcgggcggaucaccugagguggggagu

SEQ ID NO: 109017 - RNA, 32 nt, Human
ccgaggcgggcggaucaccugagguugggagu

SEQ ID NO: 109018 - RNA, 32 nt, Human
ccgaggcgggcggaucaccugaguucaggagu

SEQ ID NO: 109019 - RNA, 32 nt, Human
ccgaggcgggcggaucacuugaggucaggagu

SEQ ID NO: 109020 - RNA, 32 nt, Human
ccgaggcgggcggaucgccugaggucaggagc

SEQ ID NO: 109021 - RNA, 32 nt, Human
ccgaggcgggcggaucgcuugaggucaggagu

SEQ ID NO: 109022 - RNA, 32 nt, Human
ccgaggcgggcggaugaccugaggucaggagu

SEQ ID NO: 109023 - RNA, 32 nt, Human
ccgaggcgggcugaucgcuugaggucaggagu

SEQ ID NO: 109024 - RNA, 32 nt, Human
ccgaggcggggagaucaccugaggucaggagu

SEQ ID NO: 109025 - RNA, 32 nt, Human
ccgaggcggguagaucaccugagguuaggagu

SEQ ID NO: 109026 - RNA, 32 nt, Human
ccgaggcgggugaucacuugaggucaguaguu

SEQ ID NO: 109027 - RNA, 32 nt, Human
ccgaggcggguggaacacuugaggucaggggu

SEQ ID NO: 109028 - RNA, 32 nt, Human
ccgaggcggguggaccaccugaggucaggagu

SEQ ID NO: 109029 - RNA, 32 nt, Human
ccgaggcggguggaucacaugaggucaguagu

SEQ ID NO: 109030 - RNA, 32 nt, Human
ccgaggcggguggaucaccugaggacaggagu

SEQ ID NO: 109031 - RNA, 32 nt, Human
ccgaggcggguggaucaccugaggccaggagu

SEQ ID NO: 109032 - RNA, 32 nt, Human
ccgaggcggguggaucaccugaggucaggaau

SEQ ID NO: 109033 - RNA, 32 nt, Human
ccgaggcggguggaucaccugaggucaggagu

SEQ ID NO: 109034 - RNA, 32 nt, Human
ccgaggcggguggaucaccugaggucaguucg

SEQ ID NO: 109035 - RNA, 32 nt, Human
ccgaggcggguggaucaccugagguuaggagu

SEQ ID NO: 109036 - RNA, 24 nt, Human
ccgaggcggguggaucacuugaga

SEQ ID NO: 109037 - RNA, 32 nt, Human
ccgaggcggguggaucacuugaggucaggagc

SEQ ID NO: 109038 - RNA, 32 nt, Human
ccgaggcggguggaucacuugaggucaggagu

SEQ ID NO: 109039 - RNA, 32 nt, Human
ccgaggcggguggaucagcugaggucaggagu

SEQ ID NO: 109040 - RNA, 32 nt, Human
ccgaggcggguggaucauuugaggucaggagu

SEQ ID NO: 109041 - RNA, 32 nt, Human
ccgaggcggguggcucaccugaggucgggagu

SEQ ID NO: 109042 - RNA, 32 nt, Human
ccgaggcgggugggucaccugaggucaggagu

SEQ ID NO: 109043 - RNA, 32 nt, Human
ccgaggcggguggguuacuugaggucaggagu

SEQ ID NO: 109044 - RNA, 32 nt, Human
ccgaggcggguguaucaccugaggucaggagu

SEQ ID NO: 109045 - RNA, 32 nt, Human
ccgaggcggguguaucaccugaggucgggagu

SEQ ID NO: 109046 - RNA, 32 nt, Human
ccgaggcggucaccggagcuuaagccccgccg

SEQ ID NO: 109047 - RNA, 32 nt, Human
ccgaggcgucucagagagagccuggacagccg

SEQ ID NO: 109048 - RNA, 32 nt, Human
ccgaggcguguggaucaccugagaucgggagu

SEQ ID NO: 109049 - RNA, 21 nt, Human
ccgaggcuagaguacaguggc

SEQ ID NO: 109050 - RNA, 32 nt, Human
ccgaggcucgccccaaacggauuugcgugaaa

SEQ ID NO: 109051 - RNA, 32 nt, Human
ccgaggcugaaggaccugcuucccaggacccg

SEQ ID NO: 109052 - RNA, 19 nt, Human
ccgaggcugacccaggccc

SEQ ID NO: 109053 - RNA, 32 nt, Human
ccgaggcugagaaaccagggaggauagaggag

SEQ ID NO: 109054 - RNA, 32 nt, Human
ccgaggcugagcugagccuuuuccaggggcag

SEQ ID NO: 109055 - RNA, 32 nt, Human
ccgaggcugaggcauaaguggcaggauuucgg

SEQ ID NO: 109056 - RNA, 32 nt, Human
ccgaggcugcaccggcagaggcugcggggcgg

SEQ ID NO: 109057 - RNA, 32 nt, Human
ccgaggcugccaccucagcugccugucuguga

SEQ ID NO: 109058 - RNA, 32 nt, Human
ccgaggcugccccaggccggagcccagauacc

SEQ ID NO: 109059 - RNA, 19 nt, Human
ccgaggcuggagugcaaug

SEQ ID NO: 109060 - RNA, 19 nt, Human
ccgaggcuggagugcagug

SEQ ID NO: 109061 - RNA, 20 nt, Human
ccgaggcuggagugcagugg

SEQ ID NO: 109062 - RNA, 26 nt, Human
ccgaggcuggucuuugaggcugcaga

SEQ ID NO: 109063 - RNA, 19 nt, Human
ccgaggcuguccugggcca

SEQ ID NO: 109064 - RNA, 18 nt, Human
ccgaggcuguucugagcc

SEQ ID NO: 109065 - RNA, 32 nt, Human
ccgaggcuuccuggucuaagaguugcuggcaa

SEQ ID NO: 109066 - RNA, 32 nt, Human
ccgaggcuuccuggucuagaguugcuggcaag

SEQ ID NO: 109067 - RNA, 32 nt, Human
ccgagggacgccaugcggggaggcaggggcgc

SEQ ID NO: 109068 - RNA, 32 nt, Human
ccgagggagccacagcggguucuugaggaagg

SEQ ID NO: 109069 - RNA, 32 nt, Human
ccgagggagccacggccccgugaaccacgcug

SEQ ID NO: 109070 - RNA, 32 nt, Human
ccgagggagggaggguggggaagcgagggaaa

SEQ ID NO: 109071 - RNA, 32 nt, Human
ccgagggccacagccggacaggggguagcccc

SEQ ID NO: 109072 - RNA, 20 nt, Human
ccgagggcccaacacuggcc

SEQ ID NO: 109073 - RNA, 32 nt, Human
ccgagggcccagguccccaucaugcccucacc

SEQ ID NO: 109074 - RNA, 19 nt, Human
ccgagggcccggcccuguc

SEQ ID NO: 109075 - RNA, 32 nt, Human
ccgagggccgucucucccagccgaacacagcc

SEQ ID NO: 109076 - RNA, 32 nt, Human
ccgagggccuuggcugggucccagaaauuccc

SEQ ID NO: 109077 - RNA, 32 nt, Human
ccgagggcgccugcuccgugggccacgagggc

SEQ ID NO: 109078 - RNA, 32 nt, Human
ccgagggcgcugcgaccuccucccggaguuua

SEQ ID NO: 109079 - RNA, 32 nt, Human
ccgagggcgggggagagcgcgccgcugcuccc

SEQ ID NO: 109080 - RNA, 32 nt, Human
ccgaggggaguggaucacuugaggucaggagu

SEQ ID NO: 109081 - RNA, 22 nt, Human
ccgaggggauagaucacuugag

SEQ ID NO: 109082 - RNA, 32 nt, Human
ccgaggggcaggccuggcugcgcagggcgcgg

SEQ ID NO: 109083 - RNA, 32 nt, Human
ccgaggggcaguuucuggaggcugggggcacu

SEQ ID NO: 109084 - RNA, 32 nt, Human
ccgaggggcccgguccugccugucagcuccag

SEQ ID NO: 109085 - RNA, 32 nt, Human
ccgagggggaagaagcaugggcugaggugcua

SEQ ID NO: 109086 - RNA, 32 nt, Human
ccgagggggagugcugggggucucagcuggcu

SEQ ID NO: 109087 - RNA, 32 nt, Human
ccgaggggguggggguugcagugagccaagau

SEQ ID NO: 109088 - RNA, 32 nt, Human
ccgagggguuaugauggugagguggagcccaa

SEQ ID NO: 109089 - RNA, 32 nt, Human
ccgagggugggccucccaugccccaccguagc

SEQ ID NO: 109090 - RNA, 32 nt, Human
ccgaggguucgcccgcccuugguuuuccuuac

SEQ ID NO: 109091 - RNA, 32 nt, Human
ccgagguaaauggaugaccugaggucaagagu

SEQ ID NO: 109092 - RNA, 25 nt, Human
ccgagguagcugggacuacaggcgu

SEQ ID NO: 109093 - RNA, 32 nt, Human
ccgagguaggcggaucaccugaggucggaagu

SEQ ID NO: 109094 - RNA, 32 nt, Human
ccgagguaggcggaucaccugagguuaggagu

SEQ ID NO: 109095 - RNA, 32 nt, Human
ccgagguagguggaucgccugaggucagaagu

SEQ ID NO: 109096 - RNA, 32 nt, Human
ccgagguaucccagaggugacagaacuugauc

SEQ ID NO: 109097 - RNA, 32 nt, Human
ccgaggucaggaauucaacaccagccuggcca

SEQ ID NO: 109098 - RNA, 32 nt, Human
ccgaggucaggaauucgagaccagccugacca

SEQ ID NO: 109099 - RNA, 32 nt, Human
ccgaggucaggaguucaagaccagccuggcca

SEQ ID NO: 109100 - RNA, 32 nt, Human
ccgaggucaggaguucgagaccagccuggcca

SEQ ID NO: 109101 - RNA, 32 nt, Human
ccgaggucaggaguucgagaccagcuuggcca

SEQ ID NO: 109102 - RNA, 32 nt, Human
ccgaggucaggaguugaagaccagccuggcca

SEQ ID NO: 109103 - RNA, 32 nt, Human
ccgaggucgcgcugccuguguucuccgagggc

SEQ ID NO: 109104 - RNA, 32 nt, Human
ccgaggucucagacuccuggguaggggugggg

SEQ ID NO: 109105 - RNA, 19 nt, Human
ccgaggucugcagcgacuu

SEQ ID NO: 109106 - RNA, 32 nt, Human
ccgaggugagcagaucaccugagguuaggagu

SEQ ID NO: 109107 - RNA, 32 nt, Human
ccgaggugagcggaucaccugaggucaggagu

SEQ ID NO: 109108 - RNA, 32 nt, Human
ccgaggugaguggaucaccugaggucaggaau

SEQ ID NO: 109109 - RNA, 32 nt, Human
ccgaggugcauggaucacuugaggucaggagu

SEQ ID NO: 109110 - RNA, 32 nt, Human
ccgaggugcccagggaggcugagugggccacg

SEQ ID NO: 109111 - RNA, 32 nt, Human
ccgagguggauagaucacuugaggucaggagu

SEQ ID NO: 109112 - RNA, 32 nt, Human
ccgagguggauggaucaccugaggucaggagu

SEQ ID NO: 109113 - RNA, 32 nt, Human
ccgagguggccagaucaccugaggucaggagu

SEQ ID NO: 109114 - RNA, 32 nt, Human
ccgagguggccuggguggaggcuaugguggga

SEQ ID NO: 109115 - RNA, 32 nt, Human
ccgagguggcugggagguggcuccucaaacag

SEQ ID NO: 109116 - RNA, 32 nt, Human
ccgaggugggaagaucacuugaggucaggagu

SEQ ID NO: 109117 - RNA, 32 nt, Human
ccgaggugggaagauuguucaagagcagucug

SEQ ID NO: 109118 - RNA, 32 nt, Human
ccgaggugggacuggccucuccccgugugugu

SEQ ID NO: 109119 - RNA, 32 nt, Human
ccgaggugggaggaucaccugaggucaggagu

SEQ ID NO: 109120 - RNA, 32 nt, Human
ccgaggugggaggcaugggaaacagugcagug

SEQ ID NO: 109121 - RNA, 32 nt, Human
ccgaggugggcagaucaccugaggccaggagu

SEQ ID NO: 109122 - RNA, 32 nt, Human
ccgaggugggcagaucaccugaggucagcagu

SEQ ID NO: 109123 - RNA, 32 nt, Human
ccgaggugggcagaucaccugaggucaggagu

SEQ ID NO: 109124 - RNA, 32 nt, Human
ccgaggugggcagaucaccugaggucgggagu

SEQ ID NO: 109125 - RNA, 32 nt, Human
ccgaggugggcagaucacgagaucaggagauc

SEQ ID NO: 109126 - RNA, 24 nt, Human
ccgaggugggcagaucacuugaga

SEQ ID NO: 109127 - RNA, 32 nt, Human
ccgaggugggcagaucacuugaggucaggagu

SEQ ID NO: 109128 - RNA, 32 nt, Human
ccgaggugggcagaucagcugaggucaggaga

SEQ ID NO: 109129 - RNA, 32 nt, Human
ccgaggugggcagaucgccugaggucaggagu

SEQ ID NO: 109130 - RNA, 32 nt, Human
ccgaggugggcggaucaccugaagucaggagu

SEQ ID NO: 109131 - RNA, 32 nt, Human
ccgaggugggcggaucaccugaggucagaguu

SEQ ID NO: 109132 - RNA, 32 nt, Human
ccgaggugggcggaucaccugaggucagcagu

SEQ ID NO: 109133 - RNA, 32 nt, Human
ccgaggugggcggaucaccugaggucaggagu

SEQ ID NO: 109134 - RNA, 32 nt, Human
ccgaggugggcggaucaccugaggucaguuug

SEQ ID NO: 109135 - RNA, 32 nt, Human
ccgaggugggcggaucaccugaggucgggagu

SEQ ID NO: 109136 - RNA, 32 nt, Human
ccgaggugggcggaucacuugaggucaggagu

SEQ ID NO: 109137 - RNA, 32 nt, Human
ccgaggugggcggauccccugagguugggagu

SEQ ID NO: 109138 - RNA, 32 nt, Human
ccgaggugggcgggucaguugaggucaggagu

SEQ ID NO: 109139 - RNA, 32 nt, Human
ccgagguggggcaggcggagguugcaguaagc

SEQ ID NO: 109140 - RNA, 32 nt, Human
ccgaggugggucgacuaccugaggucaggagu

SEQ ID NO: 109141 - RNA, 32 nt, Human
ccgaggugggucgacuaccugagguuaggagu

SEQ ID NO: 109142 - RNA, 32 nt, Human
ccgaggugggugaaucacaugaggucaggagu

SEQ ID NO: 109143 - RNA, 32 nt, Human
ccgaggugggugaaucaccugaggucaggagu

SEQ ID NO: 109144 - RNA, 24 nt, Human
ccgagguggguggaccaccugaga

SEQ ID NO: 109145 - RNA, 32 nt, Human
ccgagguggguggaccaccugagguuaggacu

SEQ ID NO: 109146 - RNA, 31 nt, Human
ccgagguggguggaucacaagguugggagau

SEQ ID NO: 109147 - RNA, 32 nt, Human
ccgagguggguggaucaccugaagucaggagu

SEQ ID NO: 109148 - RNA, 32 nt, Human
ccgagguggguggaucaccugagaucaggagu

SEQ ID NO: 109149 - RNA, 32 nt, Human
ccgagguggguggaucaccugaggccaggagu

SEQ ID NO: 109150 - RNA, 32 nt, Human
ccgagguggguggaucaccugaggucagaugu

SEQ ID NO: 109151 - RNA, 32 nt, Human
ccgagguggguggaucaccugaggucaggagu

SEQ ID NO: 109152 - RNA, 32 nt, Human
ccgagguggguggaucaccugagguugggagu

SEQ ID NO: 109153 - RNA, 32 nt, Human
ccgagguggguggaucacuugaggucaggagu

SEQ ID NO: 109154 - RNA, 32 nt, Human
ccgagguggguggaucaguugaggucaggagu

SEQ ID NO: 109155 - RNA, 32 nt, Human
ccgagguggguggaucaucugaggucaggagu

SEQ ID NO: 109156 - RNA, 24 nt, Human
ccgagguggguggaucgccugaga

SEQ ID NO: 109157 - RNA, 32 nt, Human
ccgagguggguggauggaucaccugacguaga

SEQ ID NO: 109158 - RNA, 32 nt, Human
ccgaggugguuggauuaccugagguuaggagu

SEQ ID NO: 109159 - RNA, 32 nt, Human
ccgagguuguucucugcuguacugcaaguuug

SEQ ID NO: 109160 - RNA, 32 nt, Human
ccgaguaccuaggagaggacaagacuucugcu

SEQ ID NO: 109161 - RNA, 22 nt, Human
ccgaguaccugggauuacaggc

SEQ ID NO: 109162 - RNA, 32 nt, Human
ccgaguacuguguuuauucucucuccaggaaa

SEQ ID NO: 109163 - RNA, 24 nt, Human
ccgaguagcgaggacuacaggcgu

SEQ ID NO: 109164 - RNA, 22 nt, Human
ccgaguagcggggauuacaggc

SEQ ID NO: 109165 - RNA, 32 nt, Human
ccgaguagcuaaagcugagauuacaggcaugc

SEQ ID NO: 109166 - RNA, 24 nt, Human
ccgaguagcuaggauuacagaugu

SEQ ID NO: 109167 - RNA, 22 nt, Human
ccgaguagcuaggauuacaggc

SEQ ID NO: 109168 - RNA, 23 nt, Human
ccgaguagcuaggauuacaggcg

SEQ ID NO: 109169 - RNA, 22 nt, Human
ccgaguagcucagauuacaggc

SEQ ID NO: 109170 - RNA, 23 nt, Human
ccgaguagcugagauuacaggcg

SEQ ID NO: 109171 - RNA, 23 nt, Human
ccgaguagcugagauuacaggug

SEQ ID NO: 109172 - RNA, 22 nt, Human
ccgaguagcugagauuauaggc

SEQ ID NO: 109173 - RNA, 24 nt, Human
ccgaguagcugagauuauaggcgu

SEQ ID NO: 109174 - RNA, 32 nt, Human
ccgaguagcuggaacuacaggcgcccgccaug

SEQ ID NO: 109175 - RNA, 22 nt, Human
ccgaguagcuggaauuacaggc

SEQ ID NO: 109176 - RNA, 23 nt, Human
ccgaguagcuggaauuacaggug

SEQ ID NO: 109177 - RNA, 22 nt, Human
ccgaguagcuggcauuacaggc

SEQ ID NO: 109178 - RNA, 23 nt, Human
ccgaguagcuggcauuacaggcg

SEQ ID NO: 109179 - RNA, 32 nt, Human
ccgaguagcugggaccacaggcgcccccacca

SEQ ID NO: 109180 - RNA, 24 nt, Human
ccgaguagcugggaccacaggugu

SEQ ID NO: 109181 - RNA, 23 nt, Human
ccgaguagcugggacuacaggcg

SEQ ID NO: 109182 - RNA, 24 nt, Human
ccgaguagcugggacuacaggcgu

SEQ ID NO: 109183 - RNA, 23 nt, Human
ccgaguagcugggacuacaggug

SEQ ID NO: 109184 - RNA, 24 nt, Human
ccgaguagcugggacuacaggugu

SEQ ID NO: 109185 - RNA, 23 nt, Human
ccgaguagcugggacuauaggcg

SEQ ID NO: 109186 - RNA, 32 nt, Human
ccgaguagcugggagugcaggugcacaccgcc

SEQ ID NO: 109187 - RNA, 21 nt, Human
ccgaguagcugggaucgcagg

SEQ ID NO: 109188 - RNA, 23 nt, Human
ccgaguagcugggaucgcaggcg

SEQ ID NO: 109189 - RNA, 23 nt, Human
ccgaguagcugggauuacaagug

SEQ ID NO: 109190 - RNA, 20 nt, Human
ccgaguagcugggauuacag

SEQ ID NO: 109191 - RNA, 24 nt, Human
ccgaguagcugggauuacagaugu

SEQ ID NO: 109192 - RNA, 21 nt, Human
ccgaguagcugggauuacagg

SEQ ID NO: 109193 - RNA, 22 nt, Human
ccgaguagcugggauuacaggc

SEQ ID NO: 109194 - RNA, 23 nt, Human
ccgaguagcugggauuacaggcg

SEQ ID NO: 109195 - RNA, 24 nt, Human
ccgaguagcugggauuacaggcgu

SEQ ID NO: 109196 - RNA, 22 nt, Human
ccgaguagcugggauuacaggu

SEQ ID NO: 109197 - RNA, 23 nt, Human
ccgaguagcugggauuacaggug

SEQ ID NO: 109198 - RNA, 24 nt, Human
ccgaguagcugggauuacaggugu

SEQ ID NO: 109199 - RNA, 23 nt, Human
ccgaguagcugggauuacgggcg

SEQ ID NO: 109200 - RNA, 23 nt, Human
ccgaguagcugggauuagaggcg

SEQ ID NO: 109201 - RNA, 24 nt, Human
ccgaguagcugggauuagaggcgu

SEQ ID NO: 109202 - RNA, 22 nt, Human
ccgaguagcugggauuauaggc

SEQ ID NO: 109203 - RNA, 23 nt, Human
ccgaguagcugggauuauaggcg

SEQ ID NO: 109204 - RNA, 23 nt, Human
ccgaguagcugggauuccaggcg

SEQ ID NO: 109205 - RNA, 21 nt, Human
ccgaguagcugggauugcagg

SEQ ID NO: 109206 - RNA, 22 nt, Human
ccgaguagcugggauugcaggc

SEQ ID NO: 109207 - RNA, 23 nt, Human
ccgaguagcugggauugcaggcg

SEQ ID NO: 109208 - RNA, 24 nt, Human
ccgaguagcugggauugcaggcgu

SEQ ID NO: 109209 - RNA, 22 nt, Human
ccgaguagcugggguuacaggc

SEQ ID NO: 109210 - RNA, 24 nt, Human
ccgaguagcugggguuacaggcgu

SEQ ID NO: 109211 - RNA, 30 nt, Human
ccgaguagcuucuccauggagccugcccag

SEQ ID NO: 109212 - RNA, 32 nt, Human
ccgaguaguugggauuacaggugacugccacc

SEQ ID NO: 109213 - RNA, 32 nt, Human
ccgagucaccauuuccggcucagaccucgacc

SEQ ID NO: 109214 - RNA, 32 nt, Human
ccgagucacgccacugcacuccagccugggug

SEQ ID NO: 109215 - RNA, 32 nt, Human
ccgagucagaucugcacuagcaaccagaacua

SEQ ID NO: 109216 - RNA, 32 nt, Human
ccgagucagguggaucaccugaggucaggagu

SEQ ID NO: 109217 - RNA, 32 nt, Human
ccgagucaggugggucaccugaggucagcagu

SEQ ID NO: 109218 - RNA, 32 nt, Human
ccgaguccaaggacuugcucaaguggcagcgg

SEQ ID NO: 109219 - RNA, 23 nt, Human
ccgaguccagagagccgcggcgc

SEQ ID NO: 109220 - RNA, 32 nt, Human
ccgagucccaccuaaagaagcggucuggccac

SEQ ID NO: 109221 - RNA, 32 nt, Human
ccgaguccccacuccggagucgccgcugccgc

SEQ ID NO: 109222 - RNA, 32 nt, Human
ccgagucccgggagcgcggugggggcagcggg

SEQ ID NO: 109223 - RNA, 32 nt, Human
ccgagucccucuagcaucucccagaagguguc

SEQ ID NO: 109224 - RNA, 32 nt, Human
ccgaguccuucuugggggaaauagcagagccc

SEQ ID NO: 109225 - RNA, 32 nt, Human
ccgagucggaggggguggcagugagcggcggc

SEQ ID NO: 109226 - RNA, 32 nt, Human
ccgagucggguggaucaccugaggucagcagu

SEQ ID NO: 109227 - RNA, 19 nt, Human
ccgagucuccauccaccuu

SEQ ID NO: 109228 - RNA, 23 nt, Human
ccgagucucguuuccucucaguc

SEQ ID NO: 109229 - RNA, 32 nt, Human
ccgagucuguauacucagggugcucugggugg

SEQ ID NO: 109230 - RNA, 32 nt, Human
ccgagugagcugguuuaauacucugagaauga

SEQ ID NO: 109231 - RNA, 32 nt, Human
ccgagugagugccaucgucaccuacgugagcu

SEQ ID NO: 109232 - RNA, 25 nt, Human
ccgagugauggcggcuccccaggga

SEQ ID NO: 109233 - RNA, 32 nt, Human
ccgagugcaccacugcacuccagccugggcaa

SEQ ID NO: 109234 - RNA, 32 nt, Human
ccgagugcaggcccuuaccacugacauuucac

SEQ ID NO: 109235 - RNA, 32 nt, Human
ccgagugcaguggcucacgccuguaaucccag

SEQ ID NO: 109236 - RNA, 19 nt, Human
ccgagugccgcccgggcca

SEQ ID NO: 109237 - RNA, 21 nt, Human
ccgagugccuggauuacaggc

SEQ ID NO: 109238 - RNA, 32 nt, Human
ccgagugcgguggcaggcgccuguaaucccag

SEQ ID NO: 109239 - RNA, 32 nt, Human
ccgagugcgguggcucacaccuguaaucccag

SEQ ID NO: 109240 - RNA, 32 nt, Human
ccgagugcgguggcucacaccuguaauccuag

SEQ ID NO: 109241 - RNA, 32 nt, Human
ccgagugcuccuuccucaucuaccucagugag

SEQ ID NO: 109242 - RNA, 23 nt, Human
ccgagugcugggauuaaagacgu

SEQ ID NO: 109243 - RNA, 32 nt, Human
ccgaguggagugggaaaggcauuuugauuugc

SEQ ID NO: 109244 - RNA, 32 nt, Human
ccgaguggccagaagccgggagcugacaaacc

SEQ ID NO: 109245 - RNA, 32 nt, Human
ccgaguggcuggcaucaccacgcccagcuaau

SEQ ID NO: 109246 - RNA, 23 nt, Human
ccgaguggcugggauuacaggcg

SEQ ID NO: 109247 - RNA, 24 nt, Human
ccgaguggcugggauuauaggcgu

SEQ ID NO: 109248 - RNA, 32 nt, Human
ccgagugggaggauugccugagccuaggaguu

SEQ ID NO: 109249 - RNA, 32 nt, Human
ccgaguggggcugagcgcgccggcggcggcgg

SEQ ID NO: 109250 - RNA, 32 nt, Human
ccgaguguacucuccaguucaccuucugugcu

SEQ ID NO: 109251 - RNA, 32 nt, Human
ccgagugugcagcugccgccacugccgggaag

SEQ ID NO: 109252 - RNA, 32 nt, Human
ccgagugugguggcucaugccuguaaucucag

SEQ ID NO: 109253 - RNA, 32 nt, Human
ccgagugugguggcuuaugccuguaaucccug

SEQ ID NO: 109254 - RNA, 32 nt, Human
ccgaguguugcaggcacuccagccuggcgaca

SEQ ID NO: 109255 - RNA, 32 nt, Human
ccgaguuaaaccaaugcaauaugaguaaaaca

SEQ ID NO: 109256 - RNA, 32 nt, Human
ccgaguucaagcaauucuccugccucagccuc

SEQ ID NO: 109257 - RNA, 32 nt, Human
ccgaguucaagcaauucuccugccucagcucu

SEQ ID NO: 109258 - RNA, 32 nt, Human
ccgaguucaagugauuuuccugccuuggccuc

SEQ ID NO: 109259 - RNA, 32 nt, Human
ccgaguucaaucgauucuccugccucaugccu

SEQ ID NO: 109260 - RNA, 32 nt, Human
ccgaguucccggacauuccccuuguccaauca

SEQ ID NO: 109261 - RNA, 32 nt, Human
ccgaguugagacaaauuacgaccacuggaagc

SEQ ID NO: 109262 - RNA, 32 nt, Human
ccgaguugcacuaaccauccugggcuuccugu

SEQ ID NO: 109263 - RNA, 22 nt, Human
ccgaguugcugggaugacaggc

SEQ ID NO: 109264 - RNA, 32 nt, Human
ccgaguuggaggcaucuguccacccauguggu

SEQ ID NO: 109265 - RNA, 32 nt, Human
ccgaguugucucugugguuucuaugcagcccu

SEQ ID NO: 109266 - RNA, 32 nt, Human
ccgaguuuaggagaagagagugagaggagcaa

SEQ ID NO: 109267 - RNA, 32 nt, Human
ccgaguuugcagggugcugagcuguauggucc

SEQ ID NO: 109268 - RNA, 23 nt, Human
ccgauaaccaaagagaugcugca

SEQ ID NO: 109269 - RNA, 32 nt, Human
ccgauacacggcaucaucccaucucuaauuuc

SEQ ID NO: 109270 - RNA, 32 nt, Human
ccgauaccaguuucagaauacugugaaucuga

SEQ ID NO: 109271 - RNA, 32 nt, Human
ccgauagucccagcuacuugagaggcugagcc

SEQ ID NO: 109272 - RNA, 32 nt, Human
ccgaucaaaaggccauggguaggaggcuugca

SEQ ID NO: 109273 - RNA, 32 nt, Human
ccgaucaaagagacagauccacacugcugccg

SEQ ID NO: 109274 - RNA, 32 nt, Human
ccgaucaguuaaggagcugugcaauaaccuuc

SEQ ID NO: 109275 - RNA, 32 nt, Human
ccgaucauaagaaauuuagaaaagccauccaa

SEQ ID NO: 109276 - RNA, 32 nt, Human
ccgaucauugauuugcauccccauggcauuug

SEQ ID NO: 109277 - RNA, 32 nt, Human
ccgaucccuccacccucuaccgagaucugccu

SEQ ID NO: 109278 - RNA, 32 nt, Human
ccgauccuuggacaccuccucugucugccauu

SEQ ID NO: 109279 - RNA, 32 nt, Human
ccgauccuuuguccuuuuuaguuuuaagacaa

SEQ ID NO: 109280 - RNA, 32 nt, Human
ccgaucuggaaaggaaagagaccuguaucuug

SEQ ID NO: 109281 - RNA, 29 nt, Human
ccgaucuggcugcaucagcauccugguug

SEQ ID NO: 109282 - RNA, 32 nt, Human
ccgaucuggcugugcaaaggcauuucaaagaa

SEQ ID NO: 109283 - RNA, 32 nt, Human
ccgaucuuacugcaaucucuagcguccucuuu

SEQ ID NO: 109284 - RNA, 32 nt, Human
ccgaugacccccagcauugaaauggacucuga

SEQ ID NO: 109285 - RNA, 32 nt, Human
ccgaugacugcucccucgaccucucucuucuc

SEQ ID NO: 109286 - RNA, 32 nt, Human
ccgaugacuggguggucgggagggagacccag

SEQ ID NO: 109287 - RNA, 32 nt, Human
ccgaugacuuugcccacucucuucgcaguggg

SEQ ID NO: 109288 - RNA, 32 nt, Human
ccgaugagguaaugcggcucugccauuggucu

SEQ ID NO: 109289 - RNA, 32 nt, Human
ccgaugccauuucuuuuccucauaaagaugcu

SEQ ID NO: 109290 - RNA, 21 nt, Human
ccgaugccccagcccugcacg

SEQ ID NO: 109291 - RNA, 21 nt, Human
ccgaugcccguccccgggcca

SEQ ID NO: 109292 - RNA, 32 nt, Human
ccgaugcccuugcucccccucuucccacccca

SEQ ID NO: 109293 - RNA, 32 nt, Human
ccgaugccucccuugaggguuugagagcccgc

SEQ ID NO: 109294 - RNA, 32 nt, Human
ccgaugccugggaggaccagaagccaacagca

SEQ ID NO: 109295 - RNA, 24 nt, Human
ccgaugccuuggcagugccagcca

SEQ ID NO: 109296 - RNA, 19 nt, Human
ccgaugcgcgccgcugccg

SEQ ID NO: 109297 - RNA, 32 nt, Human
ccgaugcggcgagcgagcuggggagggggcuu

SEQ ID NO: 109298 - RNA, 32 nt, Human
ccgaugcugcuagugaagcagcugcuaggaaa

SEQ ID NO: 109299 - RNA, 32 nt, Human
ccgaugcuggcagugguuccuaccucuguugg

SEQ ID NO: 109300 - RNA, 32 nt, Human
ccgauggaggagggaggagacucccugaacuc

SEQ ID NO: 109301 - RNA, 32 nt, Human
ccgauggcagcucacguucugccuugucagcu

SEQ ID NO: 109302 - RNA, 21 nt, Human
ccgauggcaggugccuagggg

SEQ ID NO: 109303 - RNA, 32 nt, Human
ccgauggccccacccucaccagccugggcagc

SEQ ID NO: 109304 - RNA, 32 nt, Human
ccgauggcggccccucauuggccaagggcacu

SEQ ID NO: 109305 - RNA, 32 nt, Human
ccgauggcucacugugaccuccgccucucggg

SEQ ID NO: 109306 - RNA, 32 nt, Human
ccgauggcuggaggaugggcagaggggacucc

SEQ ID NO: 109307 - RNA, 32 nt, Human
ccgaugggauucccguccaagcuaucucgagc

SEQ ID NO: 109308 - RNA, 32 nt, Human
ccgauggggaaagggugagauuuacaucccca

SEQ ID NO: 109309 - RNA, 32 nt, Human
ccgauggggaggcagcccccgcaguggacagc

SEQ ID NO: 109310 - RNA, 32 nt, Human
ccgauggggucacggccccucuccccacccca

SEQ ID NO: 109311 - RNA, 28 nt, Human
ccgaugggucccgcgggggucgcggcga

SEQ ID NO: 109312 - RNA, 32 nt, Human
ccgaugucaaccacagcagcuucaauuuaaau

SEQ ID NO: 109313 - RNA, 32 nt, Human
ccgaugucucuucccucugaggccaguagcag

SEQ ID NO: 109314 - RNA, 32 nt, Human
ccgauguggaccucuacuuuccaggcuagucc

SEQ ID NO: 109315 - RNA, 32 nt, Human
ccgauguggguggaucaccugagguuaggagu

SEQ ID NO: 109316 - RNA, 32 nt, Human
ccgauguggguggaucacuugaggucaggagu

SEQ ID NO: 109317 - RNA, 31 nt, Human
ccgauguggguggggugaggagagaggcagc

SEQ ID NO: 109318 - RNA, 32 nt, Human
ccgauguugaagggguggacagcaggcgggug

SEQ ID NO: 109319 - RNA, 23 nt, Human
ccgauuagcugggacuacaggcg

SEQ ID NO: 109320 - RNA, 24 nt, Human
ccgauuagcugggaucacaggugu

SEQ ID NO: 109321 - RNA, 32 nt, Human
ccgauuaggaaacugagguucugagguuuaag

SEQ ID NO: 109322 - RNA, 19 nt, Human
ccgauuccagcacccacca

SEQ ID NO: 109323 - RNA, 32 nt, Human
ccgauuccgggagcuugggagcccugcgucag

SEQ ID NO: 109324 - RNA, 32 nt, Human
ccgauucguuuaacacaccuuucuggacagag

SEQ ID NO: 109325 - RNA, 32 nt, Human
ccgauucugaguagugggaugaagucucaugc

SEQ ID NO: 109326 - RNA, 32 nt, Human
ccgauucugcaacccucacuuccuaagcacag

SEQ ID NO: 109327 - RNA, 32 nt, Human
ccgauucugugccuggccuauuaaucuuucuc

SEQ ID NO: 109328 - RNA, 32 nt, Human
ccgauugcaauuugcaaccuccgcugccgucg

SEQ ID NO: 109329 - RNA, 32 nt, Human
ccgauugcaccacugcacuccagccugggcaa

SEQ ID NO: 109330 - RNA, 32 nt, Human
ccgauugggaggugguagaagcacugaaugaa

SEQ ID NO: 109331 - RNA, 32 nt, Human
ccgauuguccaccauguggccuagagcucugg

SEQ ID NO: 109332 - RNA, 32 nt, Human
ccgauuuacuucuguuaagugaugcuuuucua

SEQ ID NO: 109333 - RNA, 32 nt, Human
ccgauuucucccggaaccucugcucagccugg

SEQ ID NO: 109334 - RNA, 32 nt, Human
ccgauuugugcugcucucagcagccaccgggg

SEQ ID NO: 109335 - RNA, 32 nt, Human
ccgauuuugcucugucuccucaguuaaguguu

SEQ ID NO: 109336 - RNA, 32 nt, Human
ccgcaaaaugucagccuccaccuccucgcacc

SEQ ID NO: 109337 - RNA, 32 nt, Human
ccgcaaagcgaagauccgcccgccgguucccc

SEQ ID NO: 109338 - RNA, 32 nt, Human
ccgcaaaugcugcugccccagcucuacacugc

SEQ ID NO: 109339 - RNA, 19 nt, Human
ccgcaacaagcgggccgcc

SEQ ID NO: 109340 - RNA, 22 nt, Human
ccgcaacacugccguccuccuu

SEQ ID NO: 109341 - RNA, 32 nt, Human
ccgcaaccaaccagcaacacccaucaccuagu

SEQ ID NO: 109342 - RNA, 32 nt, Human
ccgcaacccagagacgugccagcuguucacca

SEQ ID NO: 109343 - RNA, 23 nt, Human
ccgcaaccucgccuucagccugg

SEQ ID NO: 109344 - RNA, 22 nt, Human
ccgcaacugcacuccagccugg

SEQ ID NO: 109345 - RNA, 18 nt, Human
ccgcaacugcccugauca

SEQ ID NO: 109346 - RNA, 32 nt, Human
ccgcaacuugccaaacccugaucuaagagcua

SEQ ID NO: 109347 - RNA, 25 nt, Human
ccgcaagagggacagagcccgggag

SEQ ID NO: 109348 - RNA, 22 nt, Human
ccgcaagcacccgaggcuccug

SEQ ID NO: 109349 - RNA, 32 nt, Human
ccgcaagcccacccucuucaccucaugcuguc

SEQ ID NO: 109350 - RNA, 21 nt, Human
ccgcaagccccccagccuccc

SEQ ID NO: 109351 - RNA, 32 nt, Human
ccgcaagccgccugccuccacccugcucucca

SEQ ID NO: 109352 - RNA, 32 nt, Human
ccgcaagccucaaauuuuugugcucagaugau

SEQ ID NO: 109353 - RNA, 32 nt, Human
ccgcaagcgcaugaccuaccagaagcuggcgc

SEQ ID NO: 109354 - RNA, 32 nt, Human
ccgcaagcuguugccgcgcggucucacuaccc

SEQ ID NO: 109355 - RNA, 19 nt, Human
ccgcaaggccucagugccc

SEQ ID NO: 109356 - RNA, 32 nt, Human
ccgcaagguggaggagcugcgguggcaggagg

SEQ ID NO: 109357 - RNA, 32 nt, Human
ccgcaaugaagagcuucuuacagugaaagcaa

SEQ ID NO: 109358 - RNA, 23 nt, Human
ccgcaauggcacugacccgggag

SEQ ID NO: 109359 - RNA, 32 nt, Human
ccgcaaugggcagaggguggguggaccccugc

SEQ ID NO: 109360 - RNA, 23 nt, Human
ccgcaauguacucuuuccucuaa

SEQ ID NO: 109361 - RNA, 32 nt, Human
ccgcaaugucagcucaccgccaccuccgcccc

SEQ ID NO: 109362 - RNA, 30 nt, Human
ccgcaauguggcugaggaagggagccaaaa

SEQ ID NO: 109363 - RNA, 32 nt, Human
ccgcaauuaacaacaggaaacaaucugaacag

SEQ ID NO: 109364 - RNA, 32 nt, Human
ccgcaauuccagucugugcaucaugaugauaa

SEQ ID NO: 109365 - RNA, 32 nt, Human
ccgcaauuucccucucucugccggugucugcu

SEQ ID NO: 109366 - RNA, 32 nt, Human
ccgcacaaccuacagccaccgccgcccggccg

SEQ ID NO: 109367 - RNA, 32 nt, Human
ccgcacacacacauuaacacacuugagccauc

SEQ ID NO: 109368 - RNA, 32 nt, Human
ccgcacacaccaugccuccugucucaacacug

SEQ ID NO: 109369 - RNA, 20 nt, Human
ccgcacacagcccugaguca

SEQ ID NO: 109370 - RNA, 32 nt, Human
ccgcacaccagcgccacccaggaaaggcggag

SEQ ID NO: 109371 - RNA, 32 nt, Human
ccgcacacccacucaggaguuggggcccagcu

SEQ ID NO: 109372 - RNA, 22 nt, Human
ccgcacacccuugucccgggcc

SEQ ID NO: 109373 - RNA, 32 nt, Human
ccgcacacucuggaaagaagagagaagugaag

SEQ ID NO: 109374 - RNA, 32 nt, Human
ccgcacagaaaugcugcagaguauauaaaacu

SEQ ID NO: 109375 - RNA, 32 nt, Human
ccgcacagaccucacuaguugugcacaaauaa

SEQ ID NO: 109376 - RNA, 32 nt, Human
ccgcacagcaggagcgaagggaagaggggaga

SEQ ID NO: 109377 - RNA, 32 nt, Human
ccgcacagccggucagaacugugugacucacu

SEQ ID NO: 109378 - RNA, 31 nt, Human
ccgcacagccucucuugggugcuuguuuguu

SEQ ID NO: 109379 - RNA, 32 nt, Human
ccgcacagccuggguagcguguggaagauccg

SEQ ID NO: 109380 - RNA, 32 nt, Human
ccgcacaggaacacgccagucccccuuucucc

SEQ ID NO: 109381 - RNA, 21 nt, Human
ccgcacaggcccuauucucuc

SEQ ID NO: 109382 - RNA, 21 nt, Human
ccgcacaggcggggggcguag

SEQ ID NO: 109383 - RNA, 32 nt, Human
ccgcacagugcgccccagccccagcagggcgc

SEQ ID NO: 109384 - RNA, 32 nt, Human
ccgcacaguggcccuggcugugacaggaagga

SEQ ID NO: 109385 - RNA, 32 nt, Human
ccgcacaucccggggcaaagaccuaagacacu

SEQ ID NO: 109386 - RNA, 32 nt, Human
ccgcacauuccacucccauucucccuccaaga

SEQ ID NO: 109387 - RNA, 32 nt, Human
ccgcaccaccugcugugugccagccugagacg

SEQ ID NO: 109388 - RNA, 32 nt, Human
ccgcaccacugcacuccagccugggcgacaga

SEQ ID NO: 109389 - RNA, 32 nt, Human
ccgcaccacugcacuccagccugggugacaga

SEQ ID NO: 109390 - RNA, 32 nt, Human
ccgcaccagccccgcgccuacccggccgcccc

SEQ ID NO: 109391 - RNA, 32 nt, Human
ccgcaccaugagccacgggcccagcccccggc

SEQ ID NO: 109392 - RNA, 32 nt, Human
ccgcacccaaaccacuggagguccugaucgau

SEQ ID NO: 109393 - RNA, 32 nt, Human
ccgcacccagcccagagaagaguuuagugacu

SEQ ID NO: 109394 - RNA, 32 nt, Human
ccgcacccaucuuugaagauagccaguguccc

SEQ ID NO: 109395 - RNA, 32 nt, Human
ccgcaccccacacagccuugcuccaaggagaa

SEQ ID NO: 109396 - RNA, 32 nt, Human
ccgcaccccacuuggaaccauaugcaaaggau

SEQ ID NO: 109397 - RNA, 32 nt, Human
ccgcaccccaggcuggggcagcgagggcgugg

SEQ ID NO: 109398 - RNA, 32 nt, Human
ccgcaccccucagccagcagcgccucugcccu

SEQ ID NO: 109399 - RNA, 32 nt, Human
ccgcacccgaggcagcagcugcgcagccucau

SEQ ID NO: 109400 - RNA, 21 nt, Human
ccgcacccgaggcucagccug

SEQ ID NO: 109401 - RNA, 22 nt, Human
ccgcacccggacugcugcuccc

SEQ ID NO: 109402 - RNA, 32 nt, Human
ccgcacccggcgcaccaccagcaccaccagcc

SEQ ID NO: 109403 - RNA, 32 nt, Human
ccgcaccgaggcgagcaggagcagggaacagg

SEQ ID NO: 109404 - RNA, 20 nt, Human
ccgcaccgccagcccgggag

SEQ ID NO: 109405 - RNA, 32 nt, Human
ccgcaccgccuauuccagccuuuggagauccg

SEQ ID NO: 109406 - RNA, 20 nt, Human
ccgcaccgcgaccugggcca

SEQ ID NO: 109407 - RNA, 32 nt, Human
ccgcaccgugagccacugcacccgacccccuc

SEQ ID NO: 109408 - RNA, 32 nt, Human
ccgcaccucccaagcucauccugcugcccucc

SEQ ID NO: 109409 - RNA, 32 nt, Human
ccgcaccuccuauccuggccacugggccuaua

SEQ ID NO: 109410 - RNA, 32 nt, Human
ccgcaccugcagccccgcaccugccgcuugca

SEQ ID NO: 109411 - RNA, 21 nt, Human
ccgcaccugcauggacugccc

SEQ ID NO: 109412 - RNA, 32 nt, Human
ccgcaccugugcugcacugcccggaggccugc

SEQ ID NO: 109413 - RNA, 32 nt, Human
ccgcaccuguggucccagcuacccgggaggcu

SEQ ID NO: 109414 - RNA, 32 nt, Human
ccgcaccuugcucucccucgggcugcugguug

SEQ ID NO: 109415 - RNA, 32 nt, Human
ccgcacgcagagccccgggagcgacggcgcca

SEQ ID NO: 109416 - RNA, 22 nt, Human
ccgcacgcccgaucccggguca

SEQ ID NO: 109417 - RNA, 32 nt, Human
ccgcacgccucuucccacaccugucagcuucg

SEQ ID NO: 109418 - RNA, 32 nt, Human
ccgcacgccuguaaucccagcacuuggggagg

SEQ ID NO: 109419 - RNA, 32 nt, Human
ccgcacggccgggccucacaggcugcccuccu

SEQ ID NO: 109420 - RNA, 18 nt, Human
ccgcacguguccuggguc

SEQ ID NO: 109421 - RNA, 32 nt, Human
ccgcacuauauaauucgcacacauuaauuagg

SEQ ID NO: 109422 - RNA, 32 nt, Human
ccgcacuauugucccuucuuccucacugcacc

SEQ ID NO: 109423 - RNA, 20 nt, Human
ccgcacucaacuggcagcug

SEQ ID NO: 109424 - RNA, 32 nt, Human
ccgcacuccagccucucgcugccaggguuugc

SEQ ID NO: 109425 - RNA, 32 nt, Human
ccgcacuccagccugagcaacagagugagauc

SEQ ID NO: 109426 - RNA, 32 nt, Human
ccgcacuccagccugggcaacagagcgagacu

SEQ ID NO: 109427 - RNA, 32 nt, Human
ccgcacuccagccugggcaacagagugagacu

SEQ ID NO: 109428 - RNA, 32 nt, Human
ccgcacuccagccugggcgacagagcgagacu

SEQ ID NO: 109429 - RNA, 32 nt, Human
ccgcacuccagccugggugacagagcgagacu

SEQ ID NO: 109430 - RNA, 32 nt, Human
ccgcacuccgaguuucuccuccucacagauag

SEQ ID NO: 109431 - RNA, 20 nt, Human
ccgcacugaguaccuggaga

SEQ ID NO: 109432 - RNA, 23 nt, Human
ccgcacugcagcuccgcccgccg

SEQ ID NO: 109433 - RNA, 32 nt, Human
ccgcacugcagucuccagccugagccaugggc

SEQ ID NO: 109434 - RNA, 32 nt, Human
ccgcacuuugggaggccgaggccggcggauga

SEQ ID NO: 109435 - RNA, 32 nt, Human
ccgcagaagaggaggaggauuuuguugaggag

SEQ ID NO: 109436 - RNA, 32 nt, Human
ccgcagaagggcagcggugcacugugaugccu

SEQ ID NO: 109437 - RNA, 32 nt, Human
ccgcagaccuuucugucaugcugggaaguauc

SEQ ID NO: 109438 - RNA, 23 nt, Human
ccgcagacugagccacagccugg

SEQ ID NO: 109439 - RNA, 32 nt, Human
ccgcagagagggcuggagagagucugcucucc

SEQ ID NO: 109440 - RNA, 32 nt, Human
ccgcagagauuuuguuuaugggcaguuucuca

SEQ ID NO: 109441 - RNA, 32 nt, Human
ccgcagagccugacgcucagccccaggccagc

SEQ ID NO: 109442 - RNA, 32 nt, Human
ccgcagagucacugcauucccucccagccuuu

SEQ ID NO: 109443 - RNA, 18 nt, Human
ccgcagcaaauccaccca

SEQ ID NO: 109444 - RNA, 32 nt, Human
ccgcagcaaucuccacagccuccugggucuca

SEQ ID NO: 109445 - RNA, 22 nt, Human
ccgcagcaccaagggcuugcug

SEQ ID NO: 109446 - RNA, 20 nt, Human
ccgcagcagcagccaggugc

SEQ ID NO: 109447 - RNA, 23 nt, Human
ccgcagcagcgcgcuaugcgcug

SEQ ID NO: 109448 - RNA, 32 nt, Human
ccgcagcagcuuuucaagaugcacuaugccug

SEQ ID NO: 109449 - RNA, 24 nt, Human
ccgcagcagggacgucgguuugcu

SEQ ID NO: 109450 - RNA, 20 nt, Human
ccgcagccacuguagcugag

SEQ ID NO: 109451 - RNA, 20 nt, Human
ccgcagccaggagccgcugc

SEQ ID NO: 109452 - RNA, 24 nt, Human
ccgcagccaggcagcgccugggag

SEQ ID NO: 109453 - RNA, 21 nt, Human
ccgcagccagugccgaccgca

SEQ ID NO: 109454 - RNA, 21 nt, Human
ccgcagccaucagcccuggag

SEQ ID NO: 109455 - RNA, 21 nt, Human
ccgcagccauccgcacgggag

SEQ ID NO: 109456 - RNA, 32 nt, Human
ccgcagcccacacagccucugcagcccaagac

SEQ ID NO: 109457 - RNA, 32 nt, Human
ccgcagcccacacagccucugcagcccaaggc

SEQ ID NO: 109458 - RNA, 20 nt, Human
ccgcagcccagcaacucgca

SEQ ID NO: 109459 - RNA, 32 nt, Human
ccgcagcccagccugggcgacagagcgagacu

SEQ ID NO: 109460 - RNA, 32 nt, Human
ccgcagcccaggcucgacuccaacaacacacu

SEQ ID NO: 109461 - RNA, 32 nt, Human
ccgcagcccagugcccucugcccgcggcggug

SEQ ID NO: 109462 - RNA, 19 nt, Human
ccgcagccccgggccucga

SEQ ID NO: 109463 - RNA, 20 nt, Human
ccgcagccccugcagcgccg

SEQ ID NO: 109464 - RNA, 23 nt, Human
ccgcagcccgaccccggccgcca

SEQ ID NO: 109465 - RNA, 19 nt, Human
ccgcagcccgcagccgcca

SEQ ID NO: 109466 - RNA, 17 nt, Human
ccgcagccgccccgacu

SEQ ID NO: 109467 - RNA, 21 nt, Human
ccgcagccgcccguuccggga

SEQ ID NO: 109468 - RNA, 19 nt, Human
ccgcagccgccgccugggg

SEQ ID NO: 109469 - RNA, 20 nt, Human
ccgcagccgccgcgcccggg

SEQ ID NO: 109470 - RNA, 22 nt, Human
ccgcagccgccgcuacugggag

SEQ ID NO: 109471 - RNA, 22 nt, Human
ccgcagccgccggagccgggag

SEQ ID NO: 109472 - RNA, 23 nt, Human
ccgcagccgccgggagccgcgag

SEQ ID NO: 109473 - RNA, 32 nt, Human
ccgcagccgccuggcccagccugggcacguuc

SEQ ID NO: 109474 - RNA, 32 nt, Human
ccgcagccgcgugucagcagguggaugggaug

SEQ ID NO: 109475 - RNA, 20 nt, Human
ccgcagccgcucccuccggg

SEQ ID NO: 109476 - RNA, 23 nt, Human
ccgcagccgcugcggggccgcga

SEQ ID NO: 109477 - RNA, 22 nt, Human
ccgcagccgcuggacgcgggag

SEQ ID NO: 109478 - RNA, 21 nt, Human
ccgcagccgcugugggcaggg

SEQ ID NO: 109479 - RNA, 19 nt, Human
ccgcagccggcccgagcca

SEQ ID NO: 109480 - RNA, 22 nt, Human
ccgcagccggcgcagccaggag

SEQ ID NO: 109481 - RNA, 23 nt, Human
ccgcagccggggggacgcgggag

SEQ ID NO: 109482 - RNA, 32 nt, Human
ccgcagccgucgccgcuucuccaccucggccc

SEQ ID NO: 109483 - RNA, 32 nt, Human
ccgcagccucaaacuccccagcucgggugauu

SEQ ID NO: 109484 - RNA, 32 nt, Human
ccgcagccuccaggagccccacacagggcugg

SEQ ID NO: 109485 - RNA, 32 nt, Human
ccgcagccuccgccuccuggggucaggcuguu

SEQ ID NO: 109486 - RNA, 32 nt, Human
ccgcagccucuggagagagcugacggcagaug

SEQ ID NO: 109487 - RNA, 19 nt, Human
ccgcagccugcucugagcu

SEQ ID NO: 109488 - RNA, 32 nt, Human
ccgcagccugggaaccuucucccucguacagc

SEQ ID NO: 109489 - RNA, 32 nt, Human
ccgcagcgacaggcacaaagucacgggguaau

SEQ ID NO: 109490 - RNA, 19 nt, Human
ccgcagcgacgccccggcc

SEQ ID NO: 109491 - RNA, 32 nt, Human
ccgcagcgagggacaauaauaucucaggaugu

SEQ ID NO: 109492 - RNA, 32 nt, Human
ccgcagcgcgacucgggagccccgggccacag

SEQ ID NO: 109493 - RNA, 28 nt, Human
ccgcagcgcgaggcugccucaucaacgg

SEQ ID NO: 109494 - RNA, 22 nt, Human
ccgcagcgcuugcccugcgcca

SEQ ID NO: 109495 - RNA, 32 nt, Human
ccgcagcgggcugaggcacuuucgggcaacac

SEQ ID NO: 109496 - RNA, 32 nt, Human
ccgcagcgucggggcuggagcgauggcggcga

SEQ ID NO: 109497 - RNA, 32 nt, Human
ccgcagcuccacccccucccgucccagccccc

SEQ ID NO: 109498 - RNA, 32 nt, Human
ccgcagcuccauuuucuuauugcgcugcuacc

SEQ ID NO: 109499 - RNA, 32 nt, Human
ccgcagcugccgcccccgccucuuuggagucu

SEQ ID NO: 109500 - RNA, 32 nt, Human
ccgcagcugcugucugcagagccugcucggau

SEQ ID NO: 109501 - RNA, 32 nt, Human
ccgcagcugcugugcugcucugugccaucggc

SEQ ID NO: 109502 - RNA, 32 nt, Human
ccgcagcugcuuguggcggauuccucaccaag

SEQ ID NO: 109503 - RNA, 32 nt, Human
ccgcagcuguguggagagacacccggggccug

SEQ ID NO: 109504 - RNA, 32 nt, Human
ccgcagcuguuggggaagaggagcugccuccu

SEQ ID NO: 109505 - RNA, 32 nt, Human
ccgcagcuucagccuccgccgccuccucagcc

SEQ ID NO: 109506 - RNA, 23 nt, Human
ccgcaggaagcuggcugccccca

SEQ ID NO: 109507 - RNA, 32 nt, Human
ccgcaggaauguaacgccguugaggagaagug

SEQ ID NO: 109508 - RNA, 32 nt, Human
ccgcaggacugcugugggucuugacacugcuu

SEQ ID NO: 109509 - RNA, 32 nt, Human
ccgcaggaggguggguggagcagguggacugg

SEQ ID NO: 109510 - RNA, 21 nt, Human
ccgcaggaucacccagcuugg

SEQ ID NO: 109511 - RNA, 31 nt, Human
ccgcaggcaaggucucccacugcagggcuug

SEQ ID NO: 109512 - RNA, 32 nt, Human
ccgcaggcagcaguuugcauuuugaaagguua

SEQ ID NO: 109513 - RNA, 20 nt, Human
ccgcaggcagccucgaguca

SEQ ID NO: 109514 - RNA, 32 nt, Human
ccgcaggcaguuaccaguacggcuggcuacaa

SEQ ID NO: 109515 - RNA, 32 nt, Human
ccgcaggcaugucuguacacugggugggcacc

SEQ ID NO: 109516 - RNA, 32 nt, Human
ccgcaggcccucaaguugcugucugguugucg

SEQ ID NO: 109517 - RNA, 32 nt, Human
ccgcaggccguuuccaccgaggaaaaggaauc

SEQ ID NO: 109518 - RNA, 32 nt, Human
ccgcaggccuccgcucuccuguccucggcccc

SEQ ID NO: 109519 - RNA, 19 nt, Human
ccgcaggccuccuguccac

SEQ ID NO: 109520 - RNA, 32 nt, Human
ccgcaggccugggaauuuccgucccccaccaa

SEQ ID NO: 109521 - RNA, 32 nt, Human
ccgcaggcgaaagcacguuccagccaccagga

SEQ ID NO: 109522 - RNA, 19 nt, Human
ccgcaggcgcaggcccggg

SEQ ID NO: 109523 - RNA, 32 nt, Human
ccgcaggcuagccuggcaacaaaacuggggua

SEQ ID NO: 109524 - RNA, 32 nt, Human
ccgcagggaagggaggagagauaccugcugcu

SEQ ID NO: 109525 - RNA, 32 nt, Human
ccgcagggaggcagggauggcaaggcgugaag

SEQ ID NO: 109526 - RNA, 32 nt, Human
ccgcagggaggcggcggcagcugcggcggggc

SEQ ID NO: 109527 - RNA, 32 nt, Human
ccgcagggaguuguucugcuucugcuuuaccu

SEQ ID NO: 109528 - RNA, 32 nt, Human
ccgcagggcaaguaagcggcugacggcggaaa

SEQ ID NO: 109529 - RNA, 32 nt, Human
ccgcagggccagcagccccgcccacacggaag

SEQ ID NO: 109530 - RNA, 32 nt, Human
ccgcagggcccaccuuggacccuggugaccuc

SEQ ID NO: 109531 - RNA, 18 nt, Human
ccgcagggccccgggcca

SEQ ID NO: 109532 - RNA, 32 nt, Human
ccgcagggccggcugccccaggagagcccuga

SEQ ID NO: 109533 - RNA, 20 nt, Human
ccgcaggggccccuccucca

SEQ ID NO: 109534 - RNA, 32 nt, Human
ccgcagggugggcugcagggaggucugacuua

SEQ ID NO: 109535 - RNA, 32 nt, Human
ccgcaggugccugcaggaguccuggggccagc

SEQ ID NO: 109536 - RNA, 32 nt, Human
ccgcaggugggaggugugguugcaggugcggg

SEQ ID NO: 109537 - RNA, 32 nt, Human
ccgcaggugggcagcuagcugcagcgacuacc

SEQ ID NO: 109538 - RNA, 32 nt, Human
ccgcagguggugagcggcuggggagggccagg

SEQ ID NO: 109539 - RNA, 32 nt, Human
ccgcagguugcuuucccacccugggcaaugca

SEQ ID NO: 109540 - RNA, 32 nt, Human
ccgcaguaacagacacaguauuuaauugcaca

SEQ ID NO: 109541 - RNA, 32 nt, Human
ccgcaguaauaucuucccucugaugcuggaaa

SEQ ID NO: 109542 - RNA, 32 nt, Human
ccgcaguaccggggcuggagcggagugaagcu

SEQ ID NO: 109543 - RNA, 32 nt, Human
ccgcagucagccucggagacagccugguuccc

SEQ ID NO: 109544 - RNA, 32 nt, Human
ccgcaguccagccugggcgacagagcgagacu

SEQ ID NO: 109545 - RNA, 32 nt, Human
ccgcaguccgggaggcgggggucggcagccgg

SEQ ID NO: 109546 - RNA, 32 nt, Human
ccgcagucucacucugaauaaaggacaguuug

SEQ ID NO: 109547 - RNA, 32 nt, Human
ccgcagucuucaccucuccacacucacuuuuu

SEQ ID NO: 109548 - RNA, 22 nt, Human
ccgcagugccugcccugaucca

SEQ ID NO: 109549 - RNA, 32 nt, Human
ccgcagugcucugcaagauccugcucugcagc

SEQ ID NO: 109550 - RNA, 22 nt, Human
ccgcagugcugggauuacaggc

SEQ ID NO: 109551 - RNA, 23 nt, Human
ccgcaguggccuggaucuaucug

SEQ ID NO: 109552 - RNA, 29 nt, Human
ccgcagugucugugucccugggcacccga

SEQ ID NO: 109553 - RNA, 32 nt, Human
ccgcaguucagugauggggagccguguuuggc

SEQ ID NO: 109554 - RNA, 20 nt, Human
ccgcaguuuguuucgggcca

SEQ ID NO: 109555 - RNA, 32 nt, Human
ccgcauacccuccacagugcuugagacauaau

SEQ ID NO: 109556 - RNA, 32 nt, Human
ccgcaucacaccauggcucugaagagaaucca

SEQ ID NO: 109557 - RNA, 32 nt, Human
ccgcaucacccaaccaaccagccgaguuccuc

SEQ ID NO: 109558 - RNA, 22 nt, Human
ccgcaucagcgaguucagaguc

SEQ ID NO: 109559 - RNA, 32 nt, Human
ccgcaucagucugggccuggcccagggucccc

SEQ ID NO: 109560 - RNA, 32 nt, Human
ccgcauccccuucauugcagcuccuucaaagg

SEQ ID NO: 109561 - RNA, 32 nt, Human
ccgcauccuccacauccuuccauggcucugaa

SEQ ID NO: 109562 - RNA, 20 nt, Human
ccgcauccugccccacccca

SEQ ID NO: 109563 - RNA, 20 nt, Human
ccgcauccuuccccgggcca

SEQ ID NO: 109564 - RNA, 32 nt, Human
ccgcaucgcuuguuuccaccuccugggccggg

SEQ ID NO: 109565 - RNA, 32 nt, Human
ccgcaucuacuaaaauacaaaaauuagccggg

SEQ ID NO: 109566 - RNA, 32 nt, Human
ccgcaucucacagcuaugcaaaaagcuaguca

SEQ ID NO: 109567 - RNA, 32 nt, Human
ccgcaucuccaggacuccuggccuggacuucu

SEQ ID NO: 109568 - RNA, 32 nt, Human
ccgcaucuccugggugcccccuuggcuuugcc

SEQ ID NO: 109569 - RNA, 32 nt, Human
ccgcaugauucccaacuuucugccacacuuaa

SEQ ID NO: 109570 - RNA, 32 nt, Human
ccgcaugcacucugggaggugcagcccuaagg

SEQ ID NO: 109571 - RNA, 32 nt, Human
ccgcaugccuguaaucccagcuacuugggugg

SEQ ID NO: 109572 - RNA, 32 nt, Human
ccgcaugccuguagucccagcuacucgggagg

SEQ ID NO: 109573 - RNA, 32 nt, Human
ccgcauggagcgcggcgucagcgcggacagcu

SEQ ID NO: 109574 - RNA, 32 nt, Human
ccgcauggccaggaacuggccucugccuacgg

SEQ ID NO: 109575 - RNA, 29 nt, Human
ccgcauggcuuccgcagucugggggagug

SEQ ID NO: 109576 - RNA, 23 nt, Human
ccgcauggguccaugcuagggag

SEQ ID NO: 109577 - RNA, 29 nt, Human
ccgcaugucacucaccuucaggcggccca

SEQ ID NO: 109578 - RNA, 32 nt, Human
ccgcaugucacucaccuucaggcggcccaaga

SEQ ID NO: 109579 - RNA, 32 nt, Human
ccgcauguggaagagugggaggaagcagaggg

SEQ ID NO: 109580 - RNA, 32 nt, Human
ccgcauucagugcaccugccucagcuaccuaa

SEQ ID NO: 109581 - RNA, 32 nt, Human
ccgcauucaguuuucacauuaucugcaagcug

SEQ ID NO: 109582 - RNA, 32 nt, Human
ccgcauuccguccacagcaccacggagaggac

SEQ ID NO: 109583 - RNA, 21 nt, Human
ccgcauucucccguccucccu

SEQ ID NO: 109584 - RNA, 32 nt, Human
ccgcauugguaacuccagucugacugugggac

SEQ ID NO: 109585 - RNA, 18 nt, Human
ccgccaaacgcccugcga

SEQ ID NO: 109586 - RNA, 22 nt, Human
ccgccaaagcgcgccccgaguc

SEQ ID NO: 109587 - RNA, 32 nt, Human
ccgccaacccccugccccaggagcgggccuga

SEQ ID NO: 109588 - RNA, 32 nt, Human
ccgccaaccucacguuuucuuagucugaggcc

SEQ ID NO: 109589 - RNA, 32 nt, Human
ccgccaagcccaggcugcuggagccaggcacc

SEQ ID NO: 109590 - RNA, 32 nt, Human
ccgccaagcgguucccgcccucgcccagcgcc

SEQ ID NO: 109591 - RNA, 23 nt, Human
ccgccaaggagcuuuccggguca

SEQ ID NO: 109592 - RNA, 21 nt, Human
ccgccaaggcucagcugcagu

SEQ ID NO: 109593 - RNA, 19 nt, Human
ccgccaagugggcccagcc

SEQ ID NO: 109594 - RNA, 32 nt, Human
ccgccacaaccaacaccaaagcaggaaaacca

SEQ ID NO: 109595 - RNA, 32 nt, Human
ccgccacacacggcuaauuuuguauuuuuagu

SEQ ID NO: 109596 - RNA, 32 nt, Human
ccgccacacccagcuaauuuuguauuuuuagu

SEQ ID NO: 109597 - RNA, 32 nt, Human
ccgccacaccgcgcucuuccucccgggacugu

SEQ ID NO: 109598 - RNA, 32 nt, Human
ccgccacacgcucacacacaaaccugcucacg

SEQ ID NO: 109599 - RNA, 32 nt, Human
ccgccacagagcaggcuucaucugcucugcca

SEQ ID NO: 109600 - RNA, 32 nt, Human
ccgccacagccuucggacagacauauaggaua

SEQ ID NO: 109601 - RNA, 32 nt, Human
ccgccacagcugucggccuccaugccugagac

SEQ ID NO: 109602 - RNA, 19 nt, Human
ccgccacaggcccccuuca

SEQ ID NO: 109603 - RNA, 20 nt, Human
ccgccacaggccucgggcca

SEQ ID NO: 109604 - RNA, 21 nt, Human
ccgccacaguagcuguaacug

SEQ ID NO: 109605 - RNA, 32 nt, Human
ccgccacaucgcggcccuccagccuggccuaa

SEQ ID NO: 109606 - RNA, 32 nt, Human
ccgccacaucugcagugccgcacacagacagg

SEQ ID NO: 109607 - RNA, 32 nt, Human
ccgccacaugcacuccuccaccgcugagaguu

SEQ ID NO: 109608 - RNA, 32 nt, Human
ccgccaccaccgcugccgcagccuggcugggg

SEQ ID NO: 109609 - RNA, 32 nt, Human
ccgccaccaugcugcccccugggacugcgacc

SEQ ID NO: 109610 - RNA, 21 nt, Human
ccgccacccaagacagagcca

SEQ ID NO: 109611 - RNA, 32 nt, Human
ccgccacccccucccccugucucccucucuga

SEQ ID NO: 109612 - RNA, 32 nt, Human
ccgccaccgccgccaccgccuccugggacucg

SEQ ID NO: 109613 - RNA, 17 nt, Human
ccgccaccgccgcugca

SEQ ID NO: 109614 - RNA, 18 nt, Human
ccgccaccgccucggcca

SEQ ID NO: 109615 - RNA, 32 nt, Human
ccgccaccgccugucugagcugcugcgcuguc

SEQ ID NO: 109616 - RNA, 18 nt, Human
ccgccaccggcgccucca

SEQ ID NO: 109617 - RNA, 32 nt, Human
ccgccaccguggaggcagggggcaagaaacuc

SEQ ID NO: 109618 - RNA, 32 nt, Human
ccgccaccuccccucuccucuucuccccucac

SEQ ID NO: 109619 - RNA, 32 nt, Human
ccgccaccuccgccucuucagucuccuggucu

SEQ ID NO: 109620 - RNA, 32 nt, Human
ccgccacucacuccagccuggauaaaagagca

SEQ ID NO: 109621 - RNA, 17 nt, Human
ccgccacucuccgggcu

SEQ ID NO: 109622 - RNA, 22 nt, Human
ccgccacucugccaccagcucc

SEQ ID NO: 109623 - RNA, 32 nt, Human
ccgccacugcacuccagacugggcgacagagu

SEQ ID NO: 109624 - RNA, 32 nt, Human
ccgccacugcacuccagcccaggugacagagc

SEQ ID NO: 109625 - RNA, 32 nt, Human
ccgccacugcacuccagccugggcaacagagc

SEQ ID NO: 109626 - RNA, 32 nt, Human
ccgccacugcacuccagccugggcgacagagc

SEQ ID NO: 109627 - RNA, 32 nt, Human
ccgccacugcacuccagccugggugacagagu

SEQ ID NO: 109628 - RNA, 32 nt, Human
ccgccacugcacucuagccugggugacagaua

SEQ ID NO: 109629 - RNA, 32 nt, Human
ccgccacugcagaggcgaaagccagugcuuug

SEQ ID NO: 109630 - RNA, 32 nt, Human
ccgccagagagagcaggagcaagacugagggc

SEQ ID NO: 109631 - RNA, 32 nt, Human
ccgccagaggacaaggaagugggggccgcugg

SEQ ID NO: 109632 - RNA, 32 nt, Human
ccgccagaggccacugcaccugggcuaggggu

SEQ ID NO: 109633 - RNA, 32 nt, Human
ccgccagaugacggaggcucucgccagacccu

SEQ ID NO: 109634 - RNA, 32 nt, Human
ccgccagaugcccagccuacagccucucaggg

SEQ ID NO: 109635 - RNA, 23 nt, Human
ccgccagauugcuuagugccuga

SEQ ID NO: 109636 - RNA, 19 nt, Human
ccgccagcacgcccuggcc

SEQ ID NO: 109637 - RNA, 20 nt, Human
ccgccagcagccgccgagcu

SEQ ID NO: 109638 - RNA, 32 nt, Human
ccgccagccagccagcgccuucauccuggggc

SEQ ID NO: 109639 - RNA, 32 nt, Human
ccgccagccaggagcaggcccagcaagcucug

SEQ ID NO: 109640 - RNA, 32 nt, Human
ccgccagccugucccgcgccauggccccgcgc

SEQ ID NO: 109641 - RNA, 21 nt, Human
ccgccagccugugcuggguca

SEQ ID NO: 109642 - RNA, 18 nt, Human
ccgccagcggcuccgagc

SEQ ID NO: 109643 - RNA, 23 nt, Human
ccgccagcucgcccuccgagcca

SEQ ID NO: 109644 - RNA, 32 nt, Human
ccgccagcugcaucagaucccuccagggccuc

SEQ ID NO: 109645 - RNA, 20 nt, Human
ccgccagcuugucccagcca

SEQ ID NO: 109646 - RNA, 32 nt, Human
ccgccaggaaggcagcugucugcugcugaguc

SEQ ID NO: 109647 - RNA, 32 nt, Human
ccgccaggagccacugcucucccccuugcccu

SEQ ID NO: 109648 - RNA, 22 nt, Human
ccgccaggauuugcagagagca

SEQ ID NO: 109649 - RNA, 32 nt, Human
ccgccaggccagugccccagcccagggugcuc

SEQ ID NO: 109650 - RNA, 18 nt, Human
ccgccaggccccgggcca

SEQ ID NO: 109651 - RNA, 32 nt, Human
ccgccaggcucccaugucaucgaugccugugc

SEQ ID NO: 109652 - RNA, 32 nt, Human
ccgccaggcugcaggcgucgggccugggccgu

SEQ ID NO: 109653 - RNA, 32 nt, Human
ccgccagggaaagaggggagcggggucuagaa

SEQ ID NO: 109654 - RNA, 32 nt, Human
ccgccagggcaaaggagcugagcagccauccc

SEQ ID NO: 109655 - RNA, 32 nt, Human
ccgccaggggaugaggaagugggggccgcugg

SEQ ID NO: 109656 - RNA, 32 nt, Human
ccgccaggggugagagggaggaaaccgggccg

SEQ ID NO: 109657 - RNA, 32 nt, Human
ccgccaguacccccuccagccccacaccuggg

SEQ ID NO: 109658 - RNA, 32 nt, Human
ccgccagucagggcucuccccuuccccucccu

SEQ ID NO: 109659 - RNA, 21 nt, Human
ccgccaguccccgccccgacu

SEQ ID NO: 109660 - RNA, 23 nt, Human
ccgccaguccgcgcgcccgggcc

SEQ ID NO: 109661 - RNA, 17 nt, Human
ccgccagucuccgagcc

SEQ ID NO: 109662 - RNA, 32 nt, Human
ccgccagucucucaaauuucagaggaggcugu

SEQ ID NO: 109663 - RNA, 23 nt, Human
ccgccagucugcccagcugcagu

SEQ ID NO: 109664 - RNA, 32 nt, Human
ccgccaguuccugcaagagcagaagccaggca

SEQ ID NO: 109665 - RNA, 32 nt, Human
ccgccaguuccuggggcacacccagagguccc

SEQ ID NO: 109666 - RNA, 19 nt, Human
ccgccaguugcacgccugc

SEQ ID NO: 109667 - RNA, 32 nt, Human
ccgccauccagaaagcagcagccgucauacug

SEQ ID NO: 109668 - RNA, 32 nt, Human
ccgccauccagggcggggaagggagcggaccc

SEQ ID NO: 109669 - RNA, 32 nt, Human
ccgccaucccccgaccccucugaucuccgauc

SEQ ID NO: 109670 - RNA, 32 nt, Human
ccgccaucgcucgucucuuccucucuccugcc

SEQ ID NO: 109671 - RNA, 17 nt, Human
ccgccaucgucccggcu

SEQ ID NO: 109672 - RNA, 32 nt, Human
ccgccaucgucccggcugaagugcaguggcac

SEQ ID NO: 109673 - RNA, 32 nt, Human
ccgccaucucccgccucauacaccagcaaccu

SEQ ID NO: 109674 - RNA, 32 nt, Human
ccgccaucucggcuucuucccaccagcgaagg

SEQ ID NO: 109675 - RNA, 18 nt, Human
ccgccaugcccugagcca

SEQ ID NO: 109676 - RNA, 16 nt, Human
ccgccaugcccuggcc

SEQ ID NO: 109677 - RNA, 30 nt, Human
ccgccaugccgcccuccaucucagcuuucc

SEQ ID NO: 109678 - RNA, 30 nt, Human
ccgccaugccguuccuggagcuggacacga

SEQ ID NO: 109679 - RNA, 19 nt, Human
ccgccauggguccgagcca

SEQ ID NO: 109680 - RNA, 32 nt, Human
ccgccauguaaccagauagggcuguguccagg

SEQ ID NO: 109681 - RNA, 32 nt, Human
ccgccauguaaguuaccaugccugucuccucc

SEQ ID NO: 109682 - RNA, 32 nt, Human
ccgccauuagagggaggcagagagggaucguu

SEQ ID NO: 109683 - RNA, 32 nt, Human
ccgccauuggagucgacgccuccucagugcgu

SEQ ID NO: 109684 - RNA, 23 nt, Human
ccgcccaaacuggagugcagugg

SEQ ID NO: 109685 - RNA, 32 nt, Human
ccgcccaaaguguugggauuacaggcaugagc

SEQ ID NO: 109686 - RNA, 32 nt, Human
ccgcccaaauccaucacacaugaguuggaaug

SEQ ID NO: 109687 - RNA, 32 nt, Human
ccgcccaacguuugccucccagccugacuccc

SEQ ID NO: 109688 - RNA, 32 nt, Human
ccgcccaauauggugaaaccccgucucuccug

SEQ ID NO: 109689 - RNA, 21 nt, Human
ccgcccaauggacuccugcca

SEQ ID NO: 109690 - RNA, 32 nt, Human
ccgcccacaccugaagcccacagcguccaccc

SEQ ID NO: 109691 - RNA, 32 nt, Human
ccgcccacagcacacguucuccggacaggagg

SEQ ID NO: 109692 - RNA, 32 nt, Human
ccgcccacagcccauuuugaggaagaggugau

SEQ ID NO: 109693 - RNA, 32 nt, Human
ccgcccaccauggcugaggaggaagaggggac

SEQ ID NO: 109694 - RNA, 32 nt, Human
ccgcccaccauggcuuccgaggagcuguacga

SEQ ID NO: 109695 - RNA, 19 nt, Human
ccgcccaccgccccggcca

SEQ ID NO: 109696 - RNA, 18 nt, Human
ccgcccaccgccccggcu

SEQ ID NO: 109697 - RNA, 32 nt, Human
ccgcccacgagcugcccagucccucugcuugc

SEQ ID NO: 109698 - RNA, 20 nt, Human
ccgcccacgccccuccuucc

SEQ ID NO: 109699 - RNA, 18 nt, Human
ccgcccacgcuccggguc

SEQ ID NO: 109700 - RNA, 32 nt, Human
ccgcccacgucagggagagaugugagcauccc

SEQ ID NO: 109701 - RNA, 22 nt, Human
ccgcccacucagccccgggaca

SEQ ID NO: 109702 - RNA, 20 nt, Human
ccgcccacuccacccugcca

SEQ ID NO: 109703 - RNA, 21 nt, Human
ccgcccacugaaccucugcca

SEQ ID NO: 109704 - RNA, 32 nt, Human
ccgcccacugccgcuggcccugggcaggucua

SEQ ID NO: 109705 - RNA, 32 nt, Human
ccgcccagacuggccagccccacagcccacgu

SEQ ID NO: 109706 - RNA, 32 nt, Human
ccgcccagacuggcucagcccaggccaccaac

SEQ ID NO: 109707 - RNA, 32 nt, Human
ccgcccagagcagcaccgacuccgcgcacgag

SEQ ID NO: 109708 - RNA, 32 nt, Human
ccgcccagagccccagcgcgccgaggauguga

SEQ ID NO: 109709 - RNA, 17 nt, Human
ccgcccagccccgagcc

SEQ ID NO: 109710 - RNA, 32 nt, Human
ccgcccagccccgggggcagggaaagccuaaa

SEQ ID NO: 109711 - RNA, 32 nt, Human
ccgcccagccccuugacuccagccucgaccgc

SEQ ID NO: 109712 - RNA, 32 nt, Human
ccgcccagcccgcagcccccucccucuguucc

SEQ ID NO: 109713 - RNA, 19 nt, Human
ccgcccagccgcucugacu

SEQ ID NO: 109714 - RNA, 32 nt, Human
ccgcccagcugcaccugccagccuggcuucug

SEQ ID NO: 109715 - RNA, 32 nt, Human
ccgcccaggagggugccuuccucggggguagg

SEQ ID NO: 109716 - RNA, 32 nt, Human
ccgcccaggcagcggaauagagugcagugcuu

SEQ ID NO: 109717 - RNA, 21 nt, Human
ccgcccaggccagcacugcca

SEQ ID NO: 109718 - RNA, 20 nt, Human
ccgcccaggcccuguaggga

SEQ ID NO: 109719 - RNA, 32 nt, Human
ccgcccaggcgggagugcaguggcaguggcau

SEQ ID NO: 109720 - RNA, 23 nt, Human
ccgcccaggcuagagugcagugg

SEQ ID NO: 109721 - RNA, 32 nt, Human
ccgcccaggcuggacugcagugacacaaucuc

SEQ ID NO: 109722 - RNA, 32 nt, Human
ccgcccaggcuggagugcagugccaugaucac

SEQ ID NO: 109723 - RNA, 23 nt, Human
ccgcccaggcuggagugcagugg

SEQ ID NO: 109724 - RNA, 32 nt, Human
ccgcccaggcuggagugcaguggcgcgaucuc

SEQ ID NO: 109725 - RNA, 21 nt, Human
ccgcccaguccagcugugcuc

SEQ ID NO: 109726 - RNA, 19 nt, Human
ccgcccagugcgcccugcc

SEQ ID NO: 109727 - RNA, 32 nt, Human
ccgcccagugcucucacuauccaccucaacac

SEQ ID NO: 109728 - RNA, 32 nt, Human
ccgcccauaauaacacuccagucuggggcuuu

SEQ ID NO: 109729 - RNA, 32 nt, Human
ccgcccaucccaggacuccagaugccaggagc

SEQ ID NO: 109730 - RNA, 32 nt, Human
ccgcccaugcuggauaggaccugggaugcugc

SEQ ID NO: 109731 - RNA, 32 nt, Human
ccgcccauguggcuacuggaggucacguuccc

SEQ ID NO: 109732 - RNA, 32 nt, Human
ccgcccauuccuggcccucccgcugcaucuca

SEQ ID NO: 109733 - RNA, 22 nt, Human
ccgccccaacccuguccacccu

SEQ ID NO: 109734 - RNA, 21 nt, Human
ccgccccaaccuuccuucccu

SEQ ID NO: 109735 - RNA, 23 nt, Human
ccgccccaagcccugccccuccu

SEQ ID NO: 109736 - RNA, 20 nt, Human
ccgccccacacuugcucuga

SEQ ID NO: 109737 - RNA, 32 nt, Human
ccgccccacagugcccugcaguugccaggcuc

SEQ ID NO: 109738 - RNA, 32 nt, Human
ccgccccaccaugggcaacagcgcgagccgca

SEQ ID NO: 109739 - RNA, 32 nt, Human
ccgccccacccagaugggggaaagcacaggug

SEQ ID NO: 109740 - RNA, 20 nt, Human
ccgccccacccccuccuccc

SEQ ID NO: 109741 - RNA, 21 nt, Human
ccgccccacccggcccacugg

SEQ ID NO: 109742 - RNA, 25 nt, Human
ccgccccaccggaccucguccuccc

SEQ ID NO: 109743 - RNA, 22 nt, Human
ccgccccaccuccucccucccu

SEQ ID NO: 109744 - RNA, 32 nt, Human
ccgccccaccuugccagacuuagcugaccagc

SEQ ID NO: 109745 - RNA, 32 nt, Human
ccgccccacucccuccuaaccuagagauuguu

SEQ ID NO: 109746 - RNA, 32 nt, Human
ccgccccagaggcaggagacugaccgcucagu

SEQ ID NO: 109747 - RNA, 32 nt, Human
ccgccccagcacuuuuggcucuguugcgcgug

SEQ ID NO: 109748 - RNA, 18 nt, Human
ccgccccagccccgaguc

SEQ ID NO: 109749 - RNA, 23 nt, Human
ccgccccagccccgagucccgcc

SEQ ID NO: 109750 - RNA, 21 nt, Human
ccgccccagccccgccuuccc

SEQ ID NO: 109751 - RNA, 18 nt, Human
ccgccccagccccggguc

SEQ ID NO: 109752 - RNA, 21 nt, Human
ccgccccagccccgggucccc

SEQ ID NO: 109753 - RNA, 32 nt, Human
ccgccccagccccugacacacacucggacccc

SEQ ID NO: 109754 - RNA, 23 nt, Human
ccgccccagcccgcugggccgcc

SEQ ID NO: 109755 - RNA, 23 nt, Human
ccgccccagcccucagucacccc

SEQ ID NO: 109756 - RNA, 19 nt, Human
ccgccccagccuaccuucc

SEQ ID NO: 109757 - RNA, 19 nt, Human
ccgccccagccucugagcc

SEQ ID NO: 109758 - RNA, 22 nt, Human
ccgccccagccucugagccccu

SEQ ID NO: 109759 - RNA, 23 nt, Human
ccgccccagccugauuccugccu

SEQ ID NO: 109760 - RNA, 24 nt, Human
ccgccccagccugccguggggccc

SEQ ID NO: 109761 - RNA, 32 nt, Human
ccgccccaggcagaggugggggauauccggga

SEQ ID NO: 109762 - RNA, 21 nt, Human
ccgccccaggugcccgccccu

SEQ ID NO: 109763 - RNA, 32 nt, Human
ccgccccauaucacugcaacaccuacaaguuu

SEQ ID NO: 109764 - RNA, 20 nt, Human
ccgccccauucugucccccu

SEQ ID NO: 109765 - RNA, 20 nt, Human
ccgccccauuuuggccuccc

SEQ ID NO: 109766 - RNA, 32 nt, Human
ccgcccccaaccacagcagagacuagcagcgg

SEQ ID NO: 109767 - RNA, 20 nt, Human
ccgcccccaccgacgccgcc

SEQ ID NO: 109768 - RNA, 32 nt, Human
ccgcccccagccccagccccgccgggccccgc

SEQ ID NO: 109769 - RNA, 22 nt, Human
ccgcccccaggcccgcaguguc

SEQ ID NO: 109770 - RNA, 32 nt, Human
ccgcccccaggguuguuaaagccagacugcga

SEQ ID NO: 109771 - RNA, 18 nt, Human
ccgccccccagagccagg

SEQ ID NO: 109772 - RNA, 22 nt, Human
ccgccccccaucaugucugcca

SEQ ID NO: 109773 - RNA, 20 nt, Human
ccgccccccggcuguccucc

SEQ ID NO: 109774 - RNA, 21 nt, Human
ccgccccccucccaggcccca

SEQ ID NO: 109775 - RNA, 32 nt, Human
ccgcccccgacccgagcucuuucgucugccug

SEQ ID NO: 109776 - RNA, 20 nt, Human
ccgcccccgccccccgggcc

SEQ ID NO: 109777 - RNA, 32 nt, Human
ccgcccccgcuccagcuccagccggguccucg

SEQ ID NO: 109778 - RNA, 23 nt, Human
ccgcccccggcccgccgccuccc

SEQ ID NO: 109779 - RNA, 32 nt, Human
ccgcccccggccgggucuccacuucuuggccg

SEQ ID NO: 109780 - RNA, 20 nt, Human
ccgcccccggccugcccccc

SEQ ID NO: 109781 - RNA, 26 nt, Human
ccgcccccgggccccgcuguccuccc

SEQ ID NO: 109782 - RNA, 32 nt, Human
ccgcccccuccagggggcucugcucccacccc

SEQ ID NO: 109783 - RNA, 27 nt, Human
ccgcccccuccccuccacguucuuccu

SEQ ID NO: 109784 - RNA, 32 nt, Human
ccgcccccuccccucccccgccgccucgcaga

SEQ ID NO: 109785 - RNA, 32 nt, Human
ccgcccccuccccuccccgccucgcgcugcuc

SEQ ID NO: 109786 - RNA, 22 nt, Human
ccgcccccuccccuucccucca

SEQ ID NO: 109787 - RNA, 32 nt, Human
ccgcccccuccccuucuccgucugucccaaga

SEQ ID NO: 109788 - RNA, 22 nt, Human
ccgcccccucccgccagcucca

SEQ ID NO: 109789 - RNA, 24 nt, Human
ccgcccccucccuccgaacugcca

SEQ ID NO: 109790 - RNA, 21 nt, Human
ccgcccccucccucgcucgcc

SEQ ID NO: 109791 - RNA, 28 nt, Human
ccgcccccuccuccccaccauccucccu

SEQ ID NO: 109792 - RNA, 17 nt, Human
ccgcccccuggccccca

SEQ ID NO: 109793 - RNA, 32 nt, Human
ccgcccccugggcuggagggcugugugugguc

SEQ ID NO: 109794 - RNA, 20 nt, Human
ccgcccccuuccuggccugc

SEQ ID NO: 109795 - RNA, 22 nt, Human
ccgccccgaagcagccuccuga

SEQ ID NO: 109796 - RNA, 32 nt, Human
ccgccccgacaccagcucuccagccugcucgu

SEQ ID NO: 109797 - RNA, 20 nt, Human
ccgccccgagcagaaaggca

SEQ ID NO: 109798 - RNA, 32 nt, Human
ccgccccgagcagaaaggcauugacguuugua

SEQ ID NO: 109799 - RNA, 32 nt, Human
ccgccccgaggaugaguggugauguccucuag

SEQ ID NO: 109800 - RNA, 21 nt, Human
ccgccccgcacgcgcccuccc

SEQ ID NO: 109801 - RNA, 19 nt, Human
ccgccccgcacgcucgcuc

SEQ ID NO: 109802 - RNA, 17 nt, Human
ccgccccgccccgagcc

SEQ ID NO: 109803 - RNA, 17 nt, Human
ccgccccgcccugcccc

SEQ ID NO: 109804 - RNA, 21 nt, Human
ccgccccgcccugcccccucc

SEQ ID NO: 109805 - RNA, 16 nt, Human
ccgccccgcccuggcc

SEQ ID NO: 109806 - RNA, 18 nt, Human
ccgccccgcccugggcca

SEQ ID NO: 109807 - RNA, 32 nt, Human
ccgccccgccucuccaaaaagcuacaccgacg

SEQ ID NO: 109808 - RNA, 18 nt, Human
ccgccccgcgccccgggc

SEQ ID NO: 109809 - RNA, 22 nt, Human
ccgccccgcgccgccccgcccu

SEQ ID NO: 109810 - RNA, 20 nt, Human
ccgccccgcgcggcccuccc

SEQ ID NO: 109811 - RNA, 32 nt, Human
ccgccccgcucgggggcugagccggcagugcc

SEQ ID NO: 109812 - RNA, 32 nt, Human
ccgccccgcugaggccugucugcagaauccac

SEQ ID NO: 109813 - RNA, 20 nt, Human
ccgccccgcugcccccuccc

SEQ ID NO: 109814 - RNA, 19 nt, Human
ccgccccggcuccgggcca

SEQ ID NO: 109815 - RNA, 32 nt, Human
ccgccccggggaagaagagacagggguggggu

SEQ ID NO: 109816 - RNA, 32 nt, Human
ccgccccggggaggcaggcuggcagguggaca

SEQ ID NO: 109817 - RNA, 32 nt, Human
ccgccccguaucucuuuucacccuucucccac

SEQ ID NO: 109818 - RNA, 32 nt, Human
ccgccccuaugaccaacaugagcuggagcuuc

SEQ ID NO: 109819 - RNA, 32 nt, Human
ccgccccucacagauugccgcagggcaggggc

SEQ ID NO: 109820 - RNA, 32 nt, Human
ccgccccucaggcccagccucuggcaagaggu

SEQ ID NO: 109821 - RNA, 32 nt, Human
ccgccccuccacccccuccaacucugcuccuc

SEQ ID NO: 109822 - RNA, 22 nt, Human
ccgccccuccccacccugcccu

SEQ ID NO: 109823 - RNA, 18 nt, Human
ccgccccucccuugggcc

SEQ ID NO: 109824 - RNA, 26 nt, Human
ccgccccuccgucgccgcugccuccu

SEQ ID NO: 109825 - RNA, 32 nt, Human
ccgccccuccucaccgaaaagcagaaagcccg

SEQ ID NO: 109826 - RNA, 21 nt, Human
ccgccccuccuccagucuacu

SEQ ID NO: 109827 - RNA, 22 nt, Human
ccgccccuccucccggcacucc

SEQ ID NO: 109828 - RNA, 22 nt, Human
ccgccccuccucccugcucucu

SEQ ID NO: 109829 - RNA, 18 nt, Human
ccgccccuccuccgggcc

SEQ ID NO: 109830 - RNA, 32 nt, Human
ccgccccugagugcucauguaccauuuagcuu

SEQ ID NO: 109831 - RNA, 32 nt, Human
ccgccccugcagcugcucccuggguggccccg

SEQ ID NO: 109832 - RNA, 32 nt, Human
ccgccccugccaccccugccgcccgguuccca

SEQ ID NO: 109833 - RNA, 20 nt, Human
ccgccccugccacugggcca

SEQ ID NO: 109834 - RNA, 32 nt, Human
ccgccccugccugcccgccugccgguggcugu

SEQ ID NO: 109835 - RNA, 32 nt, Human
ccgccccugccuggaaacugcugguggggaaa

SEQ ID NO: 109836 - RNA, 32 nt, Human
ccgccccugccugugcucugccucgggccauc

SEQ ID NO: 109837 - RNA, 32 nt, Human
ccgccccugcuccccucuccgacccuuugagc

SEQ ID NO: 109838 - RNA, 32 nt, Human
ccgccccugcuggccuuggugcuaaggaagug

SEQ ID NO: 109839 - RNA, 32 nt, Human
ccgccccuuagugcuuuuuguuuucuaaccuc

SEQ ID NO: 109840 - RNA, 21 nt, Human
ccgccccuucccggccccccu

SEQ ID NO: 109841 - RNA, 19 nt, Human
ccgccccuucccugagcca

SEQ ID NO: 109842 - RNA, 32 nt, Human
ccgccccuugagccugggauccagccucagcg

SEQ ID NO: 109843 - RNA, 21 nt, Human
ccgccccuuuccugcccgccc

SEQ ID NO: 109844 - RNA, 32 nt, Human
ccgccccuuugggcggagaggggaccucacca

SEQ ID NO: 109845 - RNA, 32 nt, Human
ccgcccgcagcugaagcacaucccgcagcccg

SEQ ID NO: 109846 - RNA, 19 nt, Human
ccgcccgcaggucccgggc

SEQ ID NO: 109847 - RNA, 32 nt, Human
ccgcccgcccagccccucgaccccuguagccc

SEQ ID NO: 109848 - RNA, 19 nt, Human
ccgcccgccgccgccgccg

SEQ ID NO: 109849 - RNA, 32 nt, Human
ccgcccgccgccgccucuggugacccgggccc

SEQ ID NO: 109850 - RNA, 32 nt, Human
ccgcccgccggccuggcccggccgggcggggc

SEQ ID NO: 109851 - RNA, 32 nt, Human
ccgcccgccucagucucccaaagugcgaggau

SEQ ID NO: 109852 - RNA, 32 nt, Human
ccgcccgccucugccucccaaaaugcugggau

SEQ ID NO: 109853 - RNA, 32 nt, Human
ccgcccgccugccucuuccgccccgcggguuu

SEQ ID NO: 109854 - RNA, 21 nt, Human
ccgcccgccuugucccgcguc

SEQ ID NO: 109855 - RNA, 22 nt, Human
ccgcccgcgccccaggcccuug

SEQ ID NO: 109856 - RNA, 17 nt, Human
ccgcccgcgcccccucc

SEQ ID NO: 109857 - RNA, 18 nt, Human
ccgcccgcgccccgacca

SEQ ID NO: 109858 - RNA, 17 nt, Human
ccgcccgcgccccggcu

SEQ ID NO: 109859 - RNA, 21 nt, Human
ccgcccgcgccgccgccgccg

SEQ ID NO: 109860 - RNA, 18 nt, Human
ccgcccgcgcggggucuc

SEQ ID NO: 109861 - RNA, 19 nt, Human
ccgcccgcgcucgcuccuc

SEQ ID NO: 109862 - RNA, 20 nt, Human
ccgcccgcggccccgagucg

SEQ ID NO: 109863 - RNA, 32 nt, Human
ccgcccgcucagaaagcgcgggaaaggcacgc

SEQ ID NO: 109864 - RNA, 32 nt, Human
ccgcccgcuccccuccccucccccuccccggg

SEQ ID NO: 109865 - RNA, 25 nt, Human
ccgcccgcucgccgccuuccucccu

SEQ ID NO: 109866 - RNA, 32 nt, Human
ccgcccgcucgccgccuuccucccucugccuu

SEQ ID NO: 109867 - RNA, 32 nt, Human
ccgcccgcugaggagauggaugaggacgggcu

SEQ ID NO: 109868 - RNA, 18 nt, Human
ccgcccgcugccuugggu

SEQ ID NO: 109869 - RNA, 20 nt, Human
ccgcccgcugucccgguuca

SEQ ID NO: 109870 - RNA, 19 nt, Human
ccgcccgcuuguccugacc

SEQ ID NO: 109871 - RNA, 19 nt, Human
ccgcccggagcccgccugg

SEQ ID NO: 109872 - RNA, 32 nt, Human
ccgcccggaggaagaaggaaggcgcgggccgg

SEQ ID NO: 109873 - RNA, 20 nt, Human
ccgcccggccgcuccgggcc

SEQ ID NO: 109874 - RNA, 24 nt, Human
ccgcccggcgaugucccugagcca

SEQ ID NO: 109875 - RNA, 19 nt, Human
ccgcccggcucccugggcc

SEQ ID NO: 109876 - RNA, 19 nt, Human
ccgcccggcugaggaggug

SEQ ID NO: 109877 - RNA, 32 nt, Human
ccgcccgggcccagaggagcugggagccgggc

SEQ ID NO: 109878 - RNA, 32 nt, Human
ccgcccgggccgcggcgggcuguggucacagg

SEQ ID NO: 109879 - RNA, 20 nt, Human
ccgcccguccgccccgggcc

SEQ ID NO: 109880 - RNA, 32 nt, Human
ccgcccgucgaccccacuuccaugucuggcgg

SEQ ID NO: 109881 - RNA, 17 nt, Human
ccgcccgugccccgacc

SEQ ID NO: 109882 - RNA, 32 nt, Human
ccgcccguucccucccggacauggaggacgug

SEQ ID NO: 109883 - RNA, 32 nt, Human
ccgcccucagccauggcccgcucaccuaccac

SEQ ID NO: 109884 - RNA, 20 nt, Human
ccgcccucaggcuccgggcu

SEQ ID NO: 109885 - RNA, 21 nt, Human
ccgcccucagucgcugggcca

SEQ ID NO: 109886 - RNA, 22 nt, Human
ccgcccuccagcugcccucccu

SEQ ID NO: 109887 - RNA, 32 nt, Human
ccgcccuccaucucucuccaugccaaaauggc

SEQ ID NO: 109888 - RNA, 21 nt, Human
ccgcccucccaagugcagcug

SEQ ID NO: 109889 - RNA, 16 nt, Human
ccgcccuccccacuaa

SEQ ID NO: 109890 - RNA, 17 nt, Human
ccgcccuccccccgagu

SEQ ID NO: 109891 - RNA, 32 nt, Human
ccgcccuccccgcucuccuuccugggcgagcu

SEQ ID NO: 109892 - RNA, 20 nt, Human
ccgcccucccgcugcgucuc

SEQ ID NO: 109893 - RNA, 32 nt, Human
ccgcccucccggcuggagagcucaggugcugg

SEQ ID NO: 109894 - RNA, 21 nt, Human
ccgcccucccuccgcggggau

SEQ ID NO: 109895 - RNA, 32 nt, Human
ccgcccucccuucuuuccuuccuuccuucccu

SEQ ID NO: 109896 - RNA, 23 nt, Human
ccgcccuccuccgcuccgggcca

SEQ ID NO: 109897 - RNA, 32 nt, Human
ccgcccuccugggaacgcggcccuccccucgc

SEQ ID NO: 109898 - RNA, 32 nt, Human
ccgcccuccuugcugucacaggugcagccugu

SEQ ID NO: 109899 - RNA, 32 nt, Human
ccgcccucgccugccgggcgcuugccucggug

SEQ ID NO: 109900 - RNA, 23 nt, Human
ccgcccucggccgccccgacgcc

SEQ ID NO: 109901 - RNA, 32 nt, Human
ccgcccucggcuccugcacucgccgagcggcg

SEQ ID NO: 109902 - RNA, 32 nt, Human
ccgcccucucaccucggguuguggcuuagguu

SEQ ID NO: 109903 - RNA, 23 nt, Human
ccgcccucucccacccucuccuc

SEQ ID NO: 109904 - RNA, 32 nt, Human
ccgcccucucccacccucuccuccccuugcgc

SEQ ID NO: 109905 - RNA, 19 nt, Human
ccgcccucugcuccgggcu

SEQ ID NO: 109906 - RNA, 24 nt, Human
ccgcccucuuuuguccucuuccca

SEQ ID NO: 109907 - RNA, 32 nt, Human
ccgcccugacauccuggacaugccuagccugc

SEQ ID NO: 109908 - RNA, 32 nt, Human
ccgcccugaccaggauagggcgggugggaagg

SEQ ID NO: 109909 - RNA, 32 nt, Human
ccgcccugaggccgucguguggcuggagugcu

SEQ ID NO: 109910 - RNA, 32 nt, Human
ccgcccugaucugacuaucccacaucauacac

SEQ ID NO: 109911 - RNA, 32 nt, Human
ccgcccugcacgcccccgccacguggaugagc

SEQ ID NO: 109912 - RNA, 32 nt, Human
ccgcccugcacugcugucugggcggguccggg

SEQ ID NO: 109913 - RNA, 32 nt, Human
ccgcccugcugcaggcggaggugcuggaucug

SEQ ID NO: 109914 - RNA, 22 nt, Human
ccgcccugcuucacugcccccu

SEQ ID NO: 109915 - RNA, 32 nt, Human
ccgcccuggaccgagggaaccuuaagucagaa

SEQ ID NO: 109916 - RNA, 32 nt, Human
ccgcccuggagugagggaagcccaguggaagg

SEQ ID NO: 109917 - RNA, 32 nt, Human
ccgcccugggcuggacuggaggugggcaugcc

SEQ ID NO: 109918 - RNA, 20 nt, Human
ccgcccugggcuggcuggga

SEQ ID NO: 109919 - RNA, 32 nt, Human
ccgcccuggucuccuggaacuggugggccgca

SEQ ID NO: 109920 - RNA, 32 nt, Human
ccgcccuggugcaaagucccacgcggcgaaga

SEQ ID NO: 109921 - RNA, 32 nt, Human
ccgcccugguggacuccucccgcuggaggcgg

SEQ ID NO: 109922 - RNA, 32 nt, Human
ccgcccuuccagcugaggacaggcuggcgccu

SEQ ID NO: 109923 - RNA, 19 nt, Human
ccgcccuucccgguuccug

SEQ ID NO: 109924 - RNA, 32 nt, Human
ccgcccuucuccccacaucccacccuuacccc

SEQ ID NO: 109925 - RNA, 32 nt, Human
ccgcccuuucagggacuguuaucugcagcuua

SEQ ID NO: 109926 - RNA, 32 nt, Human
ccgcccuuucuccucaugcacccggccucguc

SEQ ID NO: 109927 - RNA, 32 nt, Human
ccgccgacacccaccccagcacugcaggcagc

SEQ ID NO: 109928 - RNA, 17 nt, Human
ccgccgacgccucagcc

SEQ ID NO: 109929 - RNA, 31 nt, Human
ccgccgagagccccucugccugugucgugug

SEQ ID NO: 109930 - RNA, 20 nt, Human
ccgccgagcccccggggcca

SEQ ID NO: 109931 - RNA, 32 nt, Human
ccgccgagcccgggguggaggagggagccagg

SEQ ID NO: 109932 - RNA, 32 nt, Human
ccgccgagccugggcgcagagagccgggagga

SEQ ID NO: 109933 - RNA, 22 nt, Human
ccgccgaggcccacccgggcca

SEQ ID NO: 109934 - RNA, 19 nt, Human
ccgccgaggcgccgagccg

SEQ ID NO: 109935 - RNA, 20 nt, Human
ccgccgaggcucgcuggguc

SEQ ID NO: 109936 - RNA, 18 nt, Human
ccgccgaguccccugggc

SEQ ID NO: 109937 - RNA, 20 nt, Human
ccgccgcacccaggacggag

SEQ ID NO: 109938 - RNA, 19 nt, Human
ccgccgcaccccaagaugg

SEQ ID NO: 109939 - RNA, 25 nt, Human
ccgccgcacgcugcagccgcggcug

SEQ ID NO: 109940 - RNA, 23 nt, Human
ccgccgcacuccugccccgaagg

SEQ ID NO: 109941 - RNA, 19 nt, Human
ccgccgcagcagcagcagc

SEQ ID NO: 109942 - RNA, 22 nt, Human
ccgccgcagccaggagccgcug

SEQ ID NO: 109943 - RNA, 19 nt, Human
ccgccgcagccgccgcagc

SEQ ID NO: 109944 - RNA, 32 nt, Human
ccgccgcagccgccgcagcagcagcagccgcc

SEQ ID NO: 109945 - RNA, 21 nt, Human
ccgccgcagccgccgccgcug

SEQ ID NO: 109946 - RNA, 19 nt, Human
ccgccgcagccgcugccgc

SEQ ID NO: 109947 - RNA, 22 nt, Human
ccgccgcagccuccgccgcagc

SEQ ID NO: 109948 - RNA, 22 nt, Human
ccgccgcagccucgccgcgcug

SEQ ID NO: 109949 - RNA, 21 nt, Human
ccgccgcagccuugcuggagc

SEQ ID NO: 109950 - RNA, 18 nt, Human
ccgccgcagcgucggguc

SEQ ID NO: 109951 - RNA, 21 nt, Human
ccgccgcagcugccuggcagc

SEQ ID NO: 109952 - RNA, 32 nt, Human
ccgccgcagcuggugaaugacggugccaugac

SEQ ID NO: 109953 - RNA, 22 nt, Human
ccgccgcaguccucgccgcagu

SEQ ID NO: 109954 - RNA, 20 nt, Human
ccgccgcagucgcccgggcc

SEQ ID NO: 109955 - RNA, 26 nt, Human
ccgccgcaguucucgagcuccagcug

SEQ ID NO: 109956 - RNA, 24 nt, Human
ccgccgcaucccgacucugggcca

SEQ ID NO: 109957 - RNA, 27 nt, Human
ccgccgccaaagcagccgccgccagca

SEQ ID NO: 109958 - RNA, 32 nt, Human
ccgccgccaaagcucgccaacauggcggaccu

SEQ ID NO: 109959 - RNA, 32 nt, Human
ccgccgccacauccucugagaagauggcugug

SEQ ID NO: 109960 - RNA, 24 nt, Human
ccgccgccaccaacgccaacaaca

SEQ ID NO: 109961 - RNA, 18 nt, Human
ccgccgccaccaccauca

SEQ ID NO: 109962 - RNA, 32 nt, Human
ccgccgccaccaggaaggcggaggacgcagga

SEQ ID NO: 109963 - RNA, 20 nt, Human
ccgccgccaccgccccggcu

SEQ ID NO: 109964 - RNA, 24 nt, Human
ccgccgccaccgccgccgccgcca

SEQ ID NO: 109965 - RNA, 32 nt, Human
ccgccgccaccgccuccugggacucggaacgc

SEQ ID NO: 109966 - RNA, 18 nt, Human
ccgccgccacuaccgggg

SEQ ID NO: 109967 - RNA, 21 nt, Human
ccgccgccacugccuugguua

SEQ ID NO: 109968 - RNA, 32 nt, Human
ccgccgccagcccaggcgcaggcagggcgcag

SEQ ID NO: 109969 - RNA, 32 nt, Human
ccgccgccagccgccgcgaccgccgcggcugc

SEQ ID NO: 109970 - RNA, 19 nt, Human
ccgccgccagcucccgggc

SEQ ID NO: 109971 - RNA, 17 nt, Human
ccgccgccaggccggca

SEQ ID NO: 109972 - RNA, 20 nt, Human
ccgccgccagugaccgagcc

SEQ ID NO: 109973 - RNA, 32 nt, Human
ccgccgccaugcagcccuccagccuucugccg

SEQ ID NO: 109974 - RNA, 32 nt, Human
ccgccgccauugccgcucucucggugagcgca

SEQ ID NO: 109975 - RNA, 18 nt, Human
ccgccgcccacccgagcc

SEQ ID NO: 109976 - RNA, 32 nt, Human
ccgccgcccacccucugcuagacacagccaag

SEQ ID NO: 109977 - RNA, 32 nt, Human
ccgccgcccagccccuccuugcacuacuccac

SEQ ID NO: 109978 - RNA, 32 nt, Human
ccgccgcccagccggugaucgcucuccggccg

SEQ ID NO: 109979 - RNA, 32 nt, Human
ccgccgcccccgagggacgagugacagcggcc

SEQ ID NO: 109980 - RNA, 19 nt, Human
ccgccgcccccucaccagc

SEQ ID NO: 109981 - RNA, 21 nt, Human
ccgccgccccgcgucccggcc

SEQ ID NO: 109982 - RNA, 32 nt, Human
ccgccgccccgcucccugcuuugcuacacaaa

SEQ ID NO: 109983 - RNA, 20 nt, Human
ccgccgccccggcgccagca

SEQ ID NO: 109984 - RNA, 32 nt, Human
ccgccgcccgaaccaccaugacccacuucaac

SEQ ID NO: 109985 - RNA, 20 nt, Human
ccgccgcccgaccccgaguc

SEQ ID NO: 109986 - RNA, 20 nt, Human
ccgccgcccgacucugggcc

SEQ ID NO: 109987 - RNA, 20 nt, Human
ccgccgcccgagcccgagcc

SEQ ID NO: 109988 - RNA, 32 nt, Human
ccgccgcccgaugggcugggccguggagcguc

SEQ ID NO: 109989 - RNA, 19 nt, Human
ccgccgcccgccccgaccc

SEQ ID NO: 109990 - RNA, 22 nt, Human
ccgccgcccgccgcccgggcca

SEQ ID NO: 109991 - RNA, 19 nt, Human
ccgccgcccgccgccgccg

SEQ ID NO: 109992 - RNA, 16 nt, Human
ccgccgcccgccggcc

SEQ ID NO: 109993 - RNA, 18 nt, Human
ccgccgcccgccucggcc

SEQ ID NO: 109994 - RNA, 19 nt, Human
ccgccgcccgcgccgcgcu

SEQ ID NO: 109995 - RNA, 20 nt, Human
ccgccgcccggaccugggcu

SEQ ID NO: 109996 - RNA, 21 nt, Human
ccgccgcccggcauccugagc

SEQ ID NO: 109997 - RNA, 20 nt, Human
ccgccgcccggcucccggcu

SEQ ID NO: 109998 - RNA, 21 nt, Human
ccgccgcccguguucuccugg

SEQ ID NO: 109999 - RNA, 32 nt, Human
ccgccgcccucucaugcagaagccugagcuca

SEQ ID NO: 110000 - RNA, 32 nt, Human
ccgccgcccugcugcugacccagccuguuuua

SEQ ID NO: 110001 - RNA, 19 nt, Human
ccgccgccgagcccgggcc

SEQ ID NO: 110002 - RNA, 17 nt, Human
ccgccgccgccacccgc

SEQ ID NO: 110003 - RNA, 25 nt, Human
ccgccgccgccaccgccgccgccau

SEQ ID NO: 110004 - RNA, 32 nt, Human
ccgccgccgccaggaaccccggccgggagcga

SEQ ID NO: 110005 - RNA, 32 nt, Human
ccgccgccgccauggccaccacggugaccugc

SEQ ID NO: 110006 - RNA, 19 nt, Human
ccgccgccgcccgccgccg

SEQ ID NO: 110007 - RNA, 19 nt, Human
ccgccgccgcccgccggca

SEQ ID NO: 110008 - RNA, 18 nt, Human
ccgccgccgcccgccuca

SEQ ID NO: 110009 - RNA, 19 nt, Human
ccgccgccgccgccaccac

SEQ ID NO: 110010 - RNA, 32 nt, Human
ccgccgccgccgccaccgcccuccaggcuccg

SEQ ID NO: 110011 - RNA, 18 nt, Human
ccgccgccgccgcccgca

SEQ ID NO: 110012 - RNA, 19 nt, Human
ccgccgccgccgcccgccg

SEQ ID NO: 110013 - RNA, 18 nt, Human
ccgccgccgccgccgcca

SEQ ID NO: 110014 - RNA, 19 nt, Human
ccgccgccgccgccgccac

SEQ ID NO: 110015 - RNA, 18 nt, Human
ccgccgccgccgccgccg

SEQ ID NO: 110016 - RNA, 19 nt, Human
ccgccgccgccgccgccgc

SEQ ID NO: 110017 - RNA, 32 nt, Human
ccgccgccgccgccgccgccucccggaggucc

SEQ ID NO: 110018 - RNA, 32 nt, Human
ccgccgccgccgccgccuccagccgggccgcc

SEQ ID NO: 110019 - RNA, 19 nt, Human
ccgccgccgccgccgcgcg

SEQ ID NO: 110020 - RNA, 18 nt, Human
ccgccgccgccgccgcug

SEQ ID NO: 110021 - RNA, 19 nt, Human
ccgccgccgccgccggccg

SEQ ID NO: 110022 - RNA, 19 nt, Human
ccgccgccgccgccgggcc

SEQ ID NO: 110023 - RNA, 18 nt, Human
ccgccgccgccgccgucg

SEQ ID NO: 110024 - RNA, 22 nt, Human
ccgccgccgccgcgcaacagca

SEQ ID NO: 110025 - RNA, 18 nt, Human
ccgccgccgccgcugccg

SEQ ID NO: 110026 - RNA, 19 nt, Human
ccgccgccgccgucgccgc

SEQ ID NO: 110027 - RNA, 32 nt, Human
ccgccgccgccuccgccuuggagcucggggug

SEQ ID NO: 110028 - RNA, 17 nt, Human
ccgccgccgccucggcc

SEQ ID NO: 110029 - RNA, 18 nt, Human
ccgccgccgccucggguc

SEQ ID NO: 110030 - RNA, 19 nt, Human
ccgccgccgcgcccugagc

SEQ ID NO: 110031 - RNA, 32 nt, Human
ccgccgccgcgcgucgcggaggcacgugugga

SEQ ID NO: 110032 - RNA, 32 nt, Human
ccgccgccgcggcccggcagacugccucuguc

SEQ ID NO: 110033 - RNA, 21 nt, Human
ccgccgccgcguccacccuca

SEQ ID NO: 110034 - RNA, 18 nt, Human
ccgccgccgcgucgagcc

SEQ ID NO: 110035 - RNA, 32 nt, Human
ccgccgccgcuccgccagaccugcugccaucu

SEQ ID NO: 110036 - RNA, 18 nt, Human
ccgccgccgcugcagcca

SEQ ID NO: 110037 - RNA, 18 nt, Human
ccgccgccgcugccgccg

SEQ ID NO: 110038 - RNA, 20 nt, Human
ccgccgccgcugccugaguc

SEQ ID NO: 110039 - RNA, 18 nt, Human
ccgccgccgcuggagcua

SEQ ID NO: 110040 - RNA, 22 nt, Human
ccgccgccggagccuccgagcc

SEQ ID NO: 110041 - RNA, 22 nt, Human
ccgccgccggccccagcccgca

SEQ ID NO: 110042 - RNA, 18 nt, Human
ccgccgccggcuccggcc

SEQ ID NO: 110043 - RNA, 21 nt, Human
ccgccgccgggaccccgaguc

SEQ ID NO: 110044 - RNA, 22 nt, Human
ccgccgccgggccccgcgggcc

SEQ ID NO: 110045 - RNA, 18 nt, Human
ccgccgccgggccccggg

SEQ ID NO: 110046 - RNA, 18 nt, Human
ccgccgccgggccgggcc

SEQ ID NO: 110047 - RNA, 21 nt, Human
ccgccgccgguggcccgggcc

SEQ ID NO: 110048 - RNA, 18 nt, Human
ccgccgccgucgccgccg

SEQ ID NO: 110049 - RNA, 18 nt, Human
ccgccgccguucucgcug

SEQ ID NO: 110050 - RNA, 19 nt, Human
ccgccgccuaagcugcagc

SEQ ID NO: 110051 - RNA, 32 nt, Human
ccgccgccuaagcugcagccgccggagccgca

SEQ ID NO: 110052 - RNA, 32 nt, Human
ccgccgccuagacuacuagccugggcugcuug

SEQ ID NO: 110053 - RNA, 32 nt, Human
ccgccgccucacugcagccagcgugguccuag

SEQ ID NO: 110054 - RNA, 32 nt, Human
ccgccgccucagccacagucccacccgggggc

SEQ ID NO: 110055 - RNA, 32 nt, Human
ccgccgccuccaagccccugagguuuccgggg

SEQ ID NO: 110056 - RNA, 32 nt, Human
ccgccgccuccaggagcacgcagauggugcag

SEQ ID NO: 110057 - RNA, 32 nt, Human
ccgccgccuccccuccgguccccucuuucccc

SEQ ID NO: 110058 - RNA, 17 nt, Human
ccgccgccucccggguc

SEQ ID NO: 110059 - RNA, 17 nt, Human
ccgccgccucccugggc

SEQ ID NO: 110060 - RNA, 18 nt, Human
ccgccgccucccugggcc

SEQ ID NO: 110061 - RNA, 32 nt, Human
ccgccgccuccuccuccucagccggcggcggc

SEQ ID NO: 110062 - RNA, 32 nt, Human
ccgccgccuccuccuccuccuucucggcuucc

SEQ ID NO: 110063 - RNA, 32 nt, Human
ccgccgccuccuccuucuccuccuucucggcu

SEQ ID NO: 110064 - RNA, 20 nt, Human
ccgccgccuccugcccugca

SEQ ID NO: 110065 - RNA, 32 nt, Human
ccgccgccuccugccuggcucuggguccccga

SEQ ID NO: 110066 - RNA, 32 nt, Human
ccgccgccuccuuuuccucauccugcgaacgg

SEQ ID NO: 110067 - RNA, 21 nt, Human
ccgccgccucgacgcccugca

SEQ ID NO: 110068 - RNA, 21 nt, Human
ccgccgccucgccucgccugg

SEQ ID NO: 110069 - RNA, 18 nt, Human
ccgccgccucgucgggcc

SEQ ID NO: 110070 - RNA, 32 nt, Human
ccgccgccucucucaacaccggcgcuuagcgc

SEQ ID NO: 110071 - RNA, 19 nt, Human
ccgccgccugccugggccg

SEQ ID NO: 110072 - RNA, 21 nt, Human
ccgccgccugucacccgggcc

SEQ ID NO: 110073 - RNA, 18 nt, Human
ccgccgccuguuuccuca

SEQ ID NO: 110074 - RNA, 32 nt, Human
ccgccgccuucccucagucagcguugcccacu

SEQ ID NO: 110075 - RNA, 21 nt, Human
ccgccgccuucgccuccgggc

SEQ ID NO: 110076 - RNA, 32 nt, Human
ccgccgccuugccgcccugccacccugccgcc

SEQ ID NO: 110077 - RNA, 21 nt, Human
ccgccgccuuuccucugagcc

SEQ ID NO: 110078 - RNA, 18 nt, Human
ccgccgcgaaccugggcc

SEQ ID NO: 110079 - RNA, 20 nt, Human
ccgccgcgagggccccgagc

SEQ ID NO: 110080 - RNA, 32 nt, Human
ccgccgcgcaacuaccuccucccuucacccgg

SEQ ID NO: 110081 - RNA, 19 nt, Human
ccgccgcgcaguccgggcc

SEQ ID NO: 110082 - RNA, 21 nt, Human
ccgccgcgcccgcucccgacc

SEQ ID NO: 110083 - RNA, 32 nt, Human
ccgccgcgccgcccggcagccucggcagguag

SEQ ID NO: 110084 - RNA, 18 nt, Human
ccgccgcgccgccgggcc

SEQ ID NO: 110085 - RNA, 18 nt, Human
ccgccgcgccuuccuccc

SEQ ID NO: 110086 - RNA, 21 nt, Human
ccgccgcgcguccccggagcc

SEQ ID NO: 110087 - RNA, 17 nt, Human
ccgccgcgcuccugggu

SEQ ID NO: 110088 - RNA, 32 nt, Human
ccgccgcgcugcugggggcugggcaggggcag

SEQ ID NO: 110089 - RNA, 19 nt, Human
ccgccgcggagcuccgagc

SEQ ID NO: 110090 - RNA, 19 nt, Human
ccgccgcggcagccccagc

SEQ ID NO: 110091 - RNA, 20 nt, Human
ccgccgcggcagcucgaguc

SEQ ID NO: 110092 - RNA, 20 nt, Human
ccgccgcggccccucagguc

SEQ ID NO: 110093 - RNA, 17 nt, Human
ccgccgcggcccgggcc

SEQ ID NO: 110094 - RNA, 31 nt, Human
ccgccgcggcuucagcaccagcgcccggaca

SEQ ID NO: 110095 - RNA, 19 nt, Human
ccgccgcgggcgcugggcc

SEQ ID NO: 110096 - RNA, 32 nt, Human
ccgccgcggggcgaggucgccgccauggcccg

SEQ ID NO: 110097 - RNA, 32 nt, Human
ccgccgcgggggaagccugggagccagaucgg

SEQ ID NO: 110098 - RNA, 20 nt, Human
ccgccgcgggucgcucgggc

SEQ ID NO: 110099 - RNA, 20 nt, Human
ccgccgcgucgcucccgggc

SEQ ID NO: 110100 - RNA, 19 nt, Human
ccgccgcgucgcucgggcc

SEQ ID NO: 110101 - RNA, 20 nt, Human
ccgccgcuacaguccgggcc

SEQ ID NO: 110102 - RNA, 32 nt, Human
ccgccgcuaccuucaccaccuccugcuguggg

SEQ ID NO: 110103 - RNA, 22 nt, Human
ccgccgcuagccggcucgggcc

SEQ ID NO: 110104 - RNA, 18 nt, Human
ccgccgcuagcgcgcgcc

SEQ ID NO: 110105 - RNA, 17 nt, Human
ccgccgcuaggucggcc

SEQ ID NO: 110106 - RNA, 20 nt, Human
ccgccgcucaaagaugaguc

SEQ ID NO: 110107 - RNA, 21 nt, Human
ccgccgcucagcgccccggcu

SEQ ID NO: 110108 - RNA, 22 nt, Human
ccgccgcucagcuuccccgggc

SEQ ID NO: 110109 - RNA, 32 nt, Human
ccgccgcucaucugucucugcagccaccgcug

SEQ ID NO: 110110 - RNA, 20 nt, Human
ccgccgcucccacugacgcu

SEQ ID NO: 110111 - RNA, 16 nt, Human
ccgccgcucccaggcc

SEQ ID NO: 110112 - RNA, 20 nt, Human
ccgccgcucccggcagggcc

SEQ ID NO: 110113 - RNA, 18 nt, Human
ccgccgcucccgggggcc

SEQ ID NO: 110114 - RNA, 19 nt, Human
ccgccgcuccgacgggcca

SEQ ID NO: 110115 - RNA, 18 nt, Human
ccgccgcuccgcagggcu

SEQ ID NO: 110116 - RNA, 20 nt, Human
ccgccgcuccgccacgacca

SEQ ID NO: 110117 - RNA, 18 nt, Human
ccgccgcuccgccgacua

SEQ ID NO: 110118 - RNA, 19 nt, Human
ccgccgcuccgcuccgauc

SEQ ID NO: 110119 - RNA, 32 nt, Human
ccgccgcuccucggauggugacggggcccugc

SEQ ID NO: 110120 - RNA, 20 nt, Human
ccgccgcuccugcccgggcc

SEQ ID NO: 110121 - RNA, 20 nt, Human
ccgccgcucgccccgucggc

SEQ ID NO: 110122 - RNA, 20 nt, Human
ccgccgcucgcccgcgcgcc

SEQ ID NO: 110123 - RNA, 18 nt, Human
ccgccgcucgccgccucc

SEQ ID NO: 110124 - RNA, 18 nt, Human
ccgccgcucgccggagcc

SEQ ID NO: 110125 - RNA, 18 nt, Human
ccgccgcucgccgggaca

SEQ ID NO: 110126 - RNA, 21 nt, Human
ccgccgcucgcgccucgggcu

SEQ ID NO: 110127 - RNA, 19 nt, Human
ccgccgcucgcguccucgc

SEQ ID NO: 110128 - RNA, 17 nt, Human
ccgccgcucgcugcuca

SEQ ID NO: 110129 - RNA, 17 nt, Human
ccgccgcucgggcugcc

SEQ ID NO: 110130 - RNA, 19 nt, Human
ccgccgcucgucgccuccc

SEQ ID NO: 110131 - RNA, 19 nt, Human
ccgccgcucuacucagcca

SEQ ID NO: 110132 - RNA, 20 nt, Human
ccgccgcucucccgggguca

SEQ ID NO: 110133 - RNA, 19 nt, Human
ccgccgcucucgggggccg

SEQ ID NO: 110134 - RNA, 21 nt, Human
ccgccgcucucucccgggcca

SEQ ID NO: 110135 - RNA, 19 nt, Human
ccgccgcucugaagcggcc

SEQ ID NO: 110136 - RNA, 18 nt, Human
ccgccgcucugcgggagu

SEQ ID NO: 110137 - RNA, 19 nt, Human
ccgccgcugacccugggcc

SEQ ID NO: 110138 - RNA, 18 nt, Human
ccgccgcugaccgaggcg

SEQ ID NO: 110139 - RNA, 18 nt, Human
ccgccgcugagacgggcc

SEQ ID NO: 110140 - RNA, 20 nt, Human
ccgccgcugcagcuugggcc

SEQ ID NO: 110141 - RNA, 20 nt, Human
ccgccgcugcaggauagcua

SEQ ID NO: 110142 - RNA, 32 nt, Human
ccgccgcugccaccaucuccucugugccaacu

SEQ ID NO: 110143 - RNA, 19 nt, Human
ccgccgcugccagcugacc

SEQ ID NO: 110144 - RNA, 20 nt, Human
ccgccgcugccccccagcca

SEQ ID NO: 110145 - RNA, 19 nt, Human
ccgccgcugcccucgggcc

SEQ ID NO: 110146 - RNA, 19 nt, Human
ccgccgcugcccuuggguc

SEQ ID NO: 110147 - RNA, 20 nt, Human
ccgccgcugccgccccggcu

SEQ ID NO: 110148 - RNA, 18 nt, Human
ccgccgcugccgccgccg

SEQ ID NO: 110149 - RNA, 19 nt, Human
ccgccgcugccgccgccgc

SEQ ID NO: 110150 - RNA, 22 nt, Human
ccgccgcugccgccguccuccc

SEQ ID NO: 110151 - RNA, 21 nt, Human
ccgccgcugccgccuccgagc

SEQ ID NO: 110152 - RNA, 19 nt, Human
ccgccgcugccguugggcu

SEQ ID NO: 110153 - RNA, 20 nt, Human
ccgccgcugccuccgcgcca

SEQ ID NO: 110154 - RNA, 19 nt, Human
ccgccgcugccucugggcc

SEQ ID NO: 110155 - RNA, 32 nt, Human
ccgccgcugccuggcccgcgccguccggccga

SEQ ID NO: 110156 - RNA, 17 nt, Human
ccgccgcugccugugcu

SEQ ID NO: 110157 - RNA, 19 nt, Human
ccgccgcugcgccgggccg

SEQ ID NO: 110158 - RNA, 19 nt, Human
ccgccgcugcgccucgggc

SEQ ID NO: 110159 - RNA, 16 nt, Human
ccgccgcugcggagcc

SEQ ID NO: 110160 - RNA, 16 nt, Human
ccgccgcugcggggcc

SEQ ID NO: 110161 - RNA, 20 nt, Human
ccgccgcugcugccccagcu

SEQ ID NO: 110162 - RNA, 18 nt, Human
ccgccgcugcuggaguca

SEQ ID NO: 110163 - RNA, 18 nt, Human
ccgccgcuggaccugguc

SEQ ID NO: 110164 - RNA, 21 nt, Human
ccgccgcugggaccccuggcc

SEQ ID NO: 110165 - RNA, 18 nt, Human
ccgccgcuggguccgacc

SEQ ID NO: 110166 - RNA, 19 nt, Human
ccgccgcugucaguagcca

SEQ ID NO: 110167 - RNA, 22 nt, Human
ccgccgcugucgccgucgaguc

SEQ ID NO: 110168 - RNA, 18 nt, Human
ccgccgcuguugcagcca

SEQ ID NO: 110169 - RNA, 20 nt, Human
ccgccgcuucacccaggcca

SEQ ID NO: 110170 - RNA, 18 nt, Human
ccgccgcuuccagaggcg

SEQ ID NO: 110171 - RNA, 18 nt, Human
ccgccgcuucucggcgcu

SEQ ID NO: 110172 - RNA, 21 nt, Human
ccgccgcuugccgcugccgcc

SEQ ID NO: 110173 - RNA, 18 nt, Human
ccgccgcuugggccggcu

SEQ ID NO: 110174 - RNA, 20 nt, Human
ccgccgcuugugcugcagcc

SEQ ID NO: 110175 - RNA, 20 nt, Human
ccgccgcuuguugucgcgcc

SEQ ID NO: 110176 - RNA, 18 nt, Human
ccgccgcuuguuuugguu

SEQ ID NO: 110177 - RNA, 21 nt, Human
ccgccggacagcccgguccgc

SEQ ID NO: 110178 - RNA, 17 nt, Human
ccgccggaccccgagcu

SEQ ID NO: 110179 - RNA, 32 nt, Human
ccgccggacccggaggcucacagggaacaaga

SEQ ID NO: 110180 - RNA, 21 nt, Human
ccgccggagacacugcuccca

SEQ ID NO: 110181 - RNA, 32 nt, Human
ccgccggagagggaggcccgagcgcaggagcc

SEQ ID NO: 110182 - RNA, 21 nt, Human
ccgccggagcuucuccgggcc

SEQ ID NO: 110183 - RNA, 32 nt, Human
ccgccggcauuuucccaucugccuuuucucug

SEQ ID NO: 110184 - RNA, 17 nt, Human
ccgccggcccccgagcu

SEQ ID NO: 110185 - RNA, 19 nt, Human
ccgccggcccgccgcccgc

SEQ ID NO: 110186 - RNA, 21 nt, Human
ccgccggccgcucccuagggg

SEQ ID NO: 110187 - RNA, 32 nt, Human
ccgccggccggagccgcagccucugccgcagc

SEQ ID NO: 110188 - RNA, 32 nt, Human
ccgccggccgggaggcgaaggaugcaggcggc

SEQ ID NO: 110189 - RNA, 32 nt, Human
ccgccggcgaaaggagggggcccuggagggaa

SEQ ID NO: 110190 - RNA, 20 nt, Human
ccgccggcgccgcccggguc

SEQ ID NO: 110191 - RNA, 18 nt, Human
ccgccggcgccuccagcu

SEQ ID NO: 110192 - RNA, 17 nt, Human
ccgccggcgccucggcc

SEQ ID NO: 110193 - RNA, 32 nt, Human
ccgccggcgcucaaccacgcugugcugcgcgc

SEQ ID NO: 110194 - RNA, 18 nt, Human
ccgccggcggcccgggcu

SEQ ID NO: 110195 - RNA, 16 nt, Human
ccgccggcucccgggu

SEQ ID NO: 110196 - RNA, 32 nt, Human
ccgccggcucgucacuuuaggcucccuccaga

SEQ ID NO: 110197 - RNA, 32 nt, Human
ccgccggcugccccagcccugcgugaaggcgc

SEQ ID NO: 110198 - RNA, 19 nt, Human
ccgccggcugcuccgcgcu

SEQ ID NO: 110199 - RNA, 20 nt, Human
ccgccgggacgccccgcgcc

SEQ ID NO: 110200 - RNA, 19 nt, Human
ccgccgggagccccggguc

SEQ ID NO: 110201 - RNA, 32 nt, Human
ccgccgggaggcugcuguacgacauguuugug

SEQ ID NO: 110202 - RNA, 18 nt, Human
ccgccgggagggagccag

SEQ ID NO: 110203 - RNA, 20 nt, Human
ccgccgggagggagccagau

SEQ ID NO: 110204 - RNA, 18 nt, Human
ccgccgggaucccgggcc

SEQ ID NO: 110205 - RNA, 32 nt, Human
ccgccgggcauuuaacacccaccuggacuuca

SEQ ID NO: 110206 - RNA, 20 nt, Human
ccgccgggcccugcgggcca

SEQ ID NO: 110207 - RNA, 19 nt, Human
ccgccgggccugcugagcc

SEQ ID NO: 110208 - RNA, 20 nt, Human
ccgccgggcgagccggagcc

SEQ ID NO: 110209 - RNA, 20 nt, Human
ccgccgggcgcccccggguc

SEQ ID NO: 110210 - RNA, 32 nt, Human
ccgccgggcggcuuucccccuuguacuggaga

SEQ ID NO: 110211 - RNA, 19 nt, Human
ccgccgggcugcuccgagc

SEQ ID NO: 110212 - RNA, 19 nt, Human
ccgccggggcagccgagcu

SEQ ID NO: 110213 - RNA, 17 nt, Human
ccgccggggccccgagc

SEQ ID NO: 110214 - RNA, 21 nt, Human
ccgccggggcgcccucagcuc

SEQ ID NO: 110215 - RNA, 20 nt, Human
ccgccggggcuuucccgggc

SEQ ID NO: 110216 - RNA, 23 nt, Human
ccgccgggggacggcccgggcca

SEQ ID NO: 110217 - RNA, 32 nt, Human
ccgccggguuacaccugcuccuuccuggacgc

SEQ ID NO: 110218 - RNA, 22 nt, Human
ccgccggucccgguccugagcu

SEQ ID NO: 110219 - RNA, 17 nt, Human
ccgccgguuucugagcc

SEQ ID NO: 110220 - RNA, 19 nt, Human
ccgccguaccgccucggcu

SEQ ID NO: 110221 - RNA, 22 nt, Human
ccgccguagccgccuccgagcc

SEQ ID NO: 110222 - RNA, 18 nt, Human
ccgccguagccgggacca

SEQ ID NO: 110223 - RNA, 18 nt, Human
ccgccguccgcgccagcc

SEQ ID NO: 110224 - RNA, 32 nt, Human
ccgccgucgccaucuguuucccuucccucccc

SEQ ID NO: 110225 - RNA, 22 nt, Human
ccgccgucgccgcccgcccgca

SEQ ID NO: 110226 - RNA, 18 nt, Human
ccgccgucgccgccgccg

SEQ ID NO: 110227 - RNA, 20 nt, Human
ccgccgucgguccccgagcc

SEQ ID NO: 110228 - RNA, 32 nt, Human
ccgccgucuccuccucuugcccgcgcaggcac

SEQ ID NO: 110229 - RNA, 22 nt, Human
ccgccgucucugucccgguuca

SEQ ID NO: 110230 - RNA, 32 nt, Human
ccgccgugacugguuuucuguccccaagaacg

SEQ ID NO: 110231 - RNA, 32 nt, Human
ccgccgugcauccggcgggcucagggagcgag

SEQ ID NO: 110232 - RNA, 19 nt, Human
ccgccguggagcccugggc

SEQ ID NO: 110233 - RNA, 32 nt, Human
ccgccguggagggcagagccaccccacaucag

SEQ ID NO: 110234 - RNA, 18 nt, Human
ccgccguuacccgaucca

SEQ ID NO: 110235 - RNA, 21 nt, Human
ccgccguucgcgcucugacca

SEQ ID NO: 110236 - RNA, 18 nt, Human
ccgccguuggcggcggcc

SEQ ID NO: 110237 - RNA, 19 nt, Human
ccgccguuucacccagcca

SEQ ID NO: 110238 - RNA, 20 nt, Human
ccgccguuuccugcgagcca

SEQ ID NO: 110239 - RNA, 18 nt, Human
ccgccguuuucaugacca

SEQ ID NO: 110240 - RNA, 32 nt, Human
ccgccuauaccacagagcacagccuggacauu

SEQ ID NO: 110241 - RNA, 32 nt, Human
ccgccuaucaucugcauuugccuuacucaggu

SEQ ID NO: 110242 - RNA, 32 nt, Human
ccgccuaucugccugccggccugguggggagc

SEQ ID NO: 110243 - RNA, 22 nt, Human
ccgccucaacaccgugcucccu

SEQ ID NO: 110244 - RNA, 32 nt, Human
ccgccucacccccucgggucuccucacucccu

SEQ ID NO: 110245 - RNA, 32 nt, Human
ccgccucaccccggcuggagucaugugggccg

SEQ ID NO: 110246 - RNA, 32 nt, Human
ccgccucacgcugaaguuccuggccgugcugc

SEQ ID NO: 110247 - RNA, 18 nt, Human
ccgccucacuccugggcc

SEQ ID NO: 110248 - RNA, 19 nt, Human
ccgccucacugagcucugg

SEQ ID NO: 110249 - RNA, 32 nt, Human
ccgccucagagccgacuuucgaagggggauug

SEQ ID NO: 110250 - RNA, 32 nt, Human
ccgccucaguagcugggauuacaggugcccac

SEQ ID NO: 110251 - RNA, 32 nt, Human
ccgccuccaaccccucgcccagucccagcagc

SEQ ID NO: 110252 - RNA, 32 nt, Human
ccgccuccaaguagcugggacuacaggcgugc

SEQ ID NO: 110253 - RNA, 24 nt, Human
ccgccuccaccugaaaagcuccuu

SEQ ID NO: 110254 - RNA, 32 nt, Human
ccgccuccacugcaacaucuucuccuacgacu

SEQ ID NO: 110255 - RNA, 21 nt, Human
ccgccuccccgcccucucuca

SEQ ID NO: 110256 - RNA, 19 nt, Human
ccgccucccgccccgggcu

SEQ ID NO: 110257 - RNA, 19 nt, Human
ccgccucccgcuccgggcc

SEQ ID NO: 110258 - RNA, 24 nt, Human
ccgccucccuccuccaggacagag

SEQ ID NO: 110259 - RNA, 32 nt, Human
ccgccucccugccuccagcccuggcugcaaug

SEQ ID NO: 110260 - RNA, 32 nt, Human
ccgccucccuggacaguucccugcugcagagu

SEQ ID NO: 110261 - RNA, 32 nt, Human
ccgccucccuuucuucccauccacauacuccu

SEQ ID NO: 110262 - RNA, 32 nt, Human
ccgccuccgagcgacuuccgggagccgggcgg

SEQ ID NO: 110263 - RNA, 22 nt, Human
ccgccuccgccacgcgccuccu

SEQ ID NO: 110264 - RNA, 21 nt, Human
ccgccuccgcccccuggguca

SEQ ID NO: 110265 - RNA, 32 nt, Human
ccgccuccgccuucuggagagccucuggguuc

SEQ ID NO: 110266 - RNA, 21 nt, Human
ccgccuccgggccgccgagcc

SEQ ID NO: 110267 - RNA, 32 nt, Human
ccgccuccggggagcccaaccagccgaacgcc

SEQ ID NO: 110268 - RNA, 18 nt, Human
ccgccuccuacgcaggag

SEQ ID NO: 110269 - RNA, 32 nt, Human
ccgccuccuagggaagggaagggagacgagca

SEQ ID NO: 110270 - RNA, 28 nt, Human
ccgccuccuaggucuuggcaaagaggca

SEQ ID NO: 110271 - RNA, 32 nt, Human
ccgccuccucaccacugugccucaaguuccuc

SEQ ID NO: 110272 - RNA, 32 nt, Human
ccgccuccucauucauccucgugcaccauagg

SEQ ID NO: 110273 - RNA, 32 nt, Human
ccgccuccuccacccccugcccugccaggccc

SEQ ID NO: 110274 - RNA, 32 nt, Human
ccgccuccuccccuccuccuucucgucuucag

SEQ ID NO: 110275 - RNA, 18 nt, Human
ccgccuccucccucggcc

SEQ ID NO: 110276 - RNA, 32 nt, Human
ccgccuccuccuccucagccggcggcggcccg

SEQ ID NO: 110277 - RNA, 32 nt, Human
ccgccuccuccuccuccuucucggcuuccucc

SEQ ID NO: 110278 - RNA, 32 nt, Human
ccgccuccuccuccugcuuugaccugaugcag

SEQ ID NO: 110279 - RNA, 32 nt, Human
ccgccuccuucccagccgcgcggcuuccucca

SEQ ID NO: 110280 - RNA, 18 nt, Human
ccgccucgcccccgggcc

SEQ ID NO: 110281 - RNA, 23 nt, Human
ccgccucgcccgggcaccgagca

SEQ ID NO: 110282 - RNA, 19 nt, Human
ccgccucgccgcuucgggc

SEQ ID NO: 110283 - RNA, 19 nt, Human
ccgccucggcuuugaggcg

SEQ ID NO: 110284 - RNA, 32 nt, Human
ccgccucuacgaccucuccagcuucgugcggc

SEQ ID NO: 110285 - RNA, 20 nt, Human
ccgccucuagaaugcucuga

SEQ ID NO: 110286 - RNA, 32 nt, Human
ccgccucucacucacagccucccuuccuucuu

SEQ ID NO: 110287 - RNA, 22 nt, Human
ccgccucucagugucccgggcu

SEQ ID NO: 110288 - RNA, 22 nt, Human
ccgccucucauuucuugaguca

SEQ ID NO: 110289 - RNA, 32 nt, Human
ccgccucuccaccuucuccccgccaggcacag

SEQ ID NO: 110290 - RNA, 32 nt, Human
ccgccucuccaucgucuugggcccuugcucaa

SEQ ID NO: 110291 - RNA, 32 nt, Human
ccgccucucccaucgcgagacacugaagaccc

SEQ ID NO: 110292 - RNA, 32 nt, Human
ccgccucuccucuuggaggacagggcagccug

SEQ ID NO: 110293 - RNA, 18 nt, Human
ccgccucuccuucgggcu

SEQ ID NO: 110294 - RNA, 21 nt, Human
ccgccucucgcuguccucucu

SEQ ID NO: 110295 - RNA, 22 nt, Human
ccgccucucuccaccgccuccu

SEQ ID NO: 110296 - RNA, 32 nt, Human
ccgccucucucccugccucccucucucucuuc

SEQ ID NO: 110297 - RNA, 32 nt, Human
ccgccucucuggaagguguuguaggccauuca

SEQ ID NO: 110298 - RNA, 32 nt, Human
ccgccucugcaagccuagccuucaggacuccg

SEQ ID NO: 110299 - RNA, 32 nt, Human
ccgccucugcaaucccaugccuugugaggccg

SEQ ID NO: 110300 - RNA, 32 nt, Human
ccgccucugcacuccagccugggugacaagag

SEQ ID NO: 110301 - RNA, 22 nt, Human
ccgccucugccaauccccgccg

SEQ ID NO: 110302 - RNA, 23 nt, Human
ccgccucugccccacugcuuccu

SEQ ID NO: 110303 - RNA, 32 nt, Human
ccgccucugccccacugcuuccugccuggagc

SEQ ID NO: 110304 - RNA, 32 nt, Human
ccgccucugccccugugaacacccaucugcag

SEQ ID NO: 110305 - RNA, 17 nt, Human
ccgccucugccucggcc

SEQ ID NO: 110306 - RNA, 32 nt, Human
ccgccucugccuggccacaucgauguuguguc

SEQ ID NO: 110307 - RNA, 32 nt, Human
ccgccucugcucccaccgagcccuccagcccc

SEQ ID NO: 110308 - RNA, 32 nt, Human
ccgccucuggcguagcaggagcaugcgcuucc

SEQ ID NO: 110309 - RNA, 32 nt, Human
ccgccucugggaacuuccugggagaaacagug

SEQ ID NO: 110310 - RNA, 22 nt, Human
ccgccucugggcucucugagcc

SEQ ID NO: 110311 - RNA, 32 nt, Human
ccgccucuuccucccuuccuucuuuccuugcu

SEQ ID NO: 110312 - RNA, 32 nt, Human
ccgccugaaagccacaaugagaaugaugcaca

SEQ ID NO: 110313 - RNA, 32 nt, Human
ccgccugaaaucugacuccaccugccaagagu

SEQ ID NO: 110314 - RNA, 32 nt, Human
ccgccugacagaaaccacggccacauuugguu

SEQ ID NO: 110315 - RNA, 17 nt, Human
ccgccugacccugggcc

SEQ ID NO: 110316 - RNA, 32 nt, Human
ccgccugaccucaagcuggcugcagagcgagg

SEQ ID NO: 110317 - RNA, 32 nt, Human
ccgccugagccaggaggaagcagcggcgaggu

SEQ ID NO: 110318 - RNA, 22 nt, Human
ccgccugagcccgcagcacagg

SEQ ID NO: 110319 - RNA, 32 nt, Human
ccgccugaggccagccugccagaagcugaccu

SEQ ID NO: 110320 - RNA, 32 nt, Human
ccgccugaggugauccuugagcugggcugggc

SEQ ID NO: 110321 - RNA, 32 nt, Human
ccgccugaguagcugcacuauaggcaccacca

SEQ ID NO: 110322 - RNA, 32 nt, Human
ccgccugauggaggcuggagaacggauggaac

SEQ ID NO: 110323 - RNA, 32 nt, Human
ccgccugcaacaaacauuccugccagcaggug

SEQ ID NO: 110324 - RNA, 32 nt, Human
ccgccugcacacagagcccaguuaauucuccg

SEQ ID NO: 110325 - RNA, 21 nt, Human
ccgccugcagagacccgggcc

SEQ ID NO: 110326 - RNA, 32 nt, Human
ccgccugcagagccggaagccacccaaccucu

SEQ ID NO: 110327 - RNA, 32 nt, Human
ccgccugcagaucugggauccagccugcucuc

SEQ ID NO: 110328 - RNA, 32 nt, Human
ccgccugcaugcugggaaaguccugcaacugu

SEQ ID NO: 110329 - RNA, 32 nt, Human
ccgccugccagcccaccccagccuggggagag

SEQ ID NO: 110330 - RNA, 32 nt, Human
ccgccugcccaagaacugcagcugcacaucgc

SEQ ID NO: 110331 - RNA, 32 nt, Human
ccgccugcccccucuuccuaugcagcuuuaau

SEQ ID NO: 110332 - RNA, 32 nt, Human
ccgccugccccgccacgcuccugggccaacuc

SEQ ID NO: 110333 - RNA, 32 nt, Human
ccgccugccccuccuucuccagccucuucucc

SEQ ID NO: 110334 - RNA, 32 nt, Human
ccgccugccuucagccuuccaugagcuucacc

SEQ ID NO: 110335 - RNA, 32 nt, Human
ccgccugccuuggccuggcaaaaugcugggau

SEQ ID NO: 110336 - RNA, 32 nt, Human
ccgccugcgagccccucucugccuucagaccu

SEQ ID NO: 110337 - RNA, 32 nt, Human
ccgccugcgaggcggaggcaggaugaagauga

SEQ ID NO: 110338 - RNA, 19 nt, Human
ccgccugcgcccugggaca

SEQ ID NO: 110339 - RNA, 17 nt, Human
ccgccugcgccucggcc

SEQ ID NO: 110340 - RNA, 18 nt, Human
ccgccugcgucccggcua

SEQ ID NO: 110341 - RNA, 20 nt, Human
ccgccugcucccucggguca

SEQ ID NO: 110342 - RNA, 17 nt, Human
ccgccugcucgcggguc

SEQ ID NO: 110343 - RNA, 23 nt, Human
ccgccugcugccaggcccaggag

SEQ ID NO: 110344 - RNA, 19 nt, Human
ccgccugcugcuccgaccc

SEQ ID NO: 110345 - RNA, 32 nt, Human
ccgccugcuguugcuccuccaucuccagaucg

SEQ ID NO: 110346 - RNA, 32 nt, Human
ccgccugcuuccccuccagcuccugggcucug

SEQ ID NO: 110347 - RNA, 32 nt, Human
ccgccuggagcagcaugggggucagaccccug

SEQ ID NO: 110348 - RNA, 32 nt, Human
ccgccuggaggcacaggccaugaggggcucuc

SEQ ID NO: 110349 - RNA, 32 nt, Human
ccgccuggauccuccugccugucagccuguca

SEQ ID NO: 110350 - RNA, 31 nt, Human
ccgccuggcacucagccuugccagagauugg

SEQ ID NO: 110351 - RNA, 32 nt, Human
ccgccuggcaggcagaaggagcugcaguccua

SEQ ID NO: 110352 - RNA, 23 nt, Human
ccgccuggcaguguccuggggca

SEQ ID NO: 110353 - RNA, 32 nt, Human
ccgccuggccaacauggugaaaccccgucucu

SEQ ID NO: 110354 - RNA, 32 nt, Human
ccgccuggcccugggcuccaggagagcccacc

SEQ ID NO: 110355 - RNA, 32 nt, Human
ccgccuggccgaguggccgccaugcuccugcc

SEQ ID NO: 110356 - RNA, 32 nt, Human
ccgccuggccuguggcaggccauucccagcgu

SEQ ID NO: 110357 - RNA, 32 nt, Human
ccgccuggcgcuggcccugggccugggccugu

SEQ ID NO: 110358 - RNA, 32 nt, Human
ccgccuggcugagauggggugggcagggcaga

SEQ ID NO: 110359 - RNA, 32 nt, Human
ccgccuggcugcaguccuucccgauggcaccc

SEQ ID NO: 110360 - RNA, 32 nt, Human
ccgccugggaccccuccgccccgacccgggcc

SEQ ID NO: 110361 - RNA, 32 nt, Human
ccgccugggacgugaggcgcaggugugcucgg

SEQ ID NO: 110362 - RNA, 32 nt, Human
ccgccugggagaagaguuuuuggaaguaggcg

SEQ ID NO: 110363 - RNA, 32 nt, Human
ccgccuggguuggggacagagagcagagaggc

SEQ ID NO: 110364 - RNA, 32 nt, Human
ccgccuggucccaucuucugcccgcuccucca

SEQ ID NO: 110365 - RNA, 31 nt, Human
ccgccuggugccuucuggccuguggccuccc

SEQ ID NO: 110366 - RNA, 27 nt, Human
ccgccugucaauaaauguugaaaaguc

SEQ ID NO: 110367 - RNA, 32 nt, Human
ccgccugucacugcagcugccccugcccugug

SEQ ID NO: 110368 - RNA, 32 nt, Human
ccgccuguccugcccuugcucagaccacccaa

SEQ ID NO: 110369 - RNA, 32 nt, Human
ccgccugugagcugcugaccgugggccacguu

SEQ ID NO: 110370 - RNA, 32 nt, Human
ccgccugugggauguggcaagagcgaaguguc

SEQ ID NO: 110371 - RNA, 32 nt, Human
ccgccuguggugugcacgugugcucugggcuc

SEQ ID NO: 110372 - RNA, 19 nt, Human
ccgccuguugcccugacca

SEQ ID NO: 110373 - RNA, 32 nt, Human
ccgccuguuuuuccagcaaaccacgcuaacua

SEQ ID NO: 110374 - RNA, 32 nt, Human
ccgccuuacacacaccccagguguccaugggg

SEQ ID NO: 110375 - RNA, 17 nt, Human
ccgccuuacucugagcc

SEQ ID NO: 110376 - RNA, 32 nt, Human
ccgccuuagauucucauggcuaccuccucuga

SEQ ID NO: 110377 - RNA, 18 nt, Human
ccgccuucaccccgagcu

SEQ ID NO: 110378 - RNA, 32 nt, Human
ccgccuucaccccucugcucuuccgcaucacc

SEQ ID NO: 110379 - RNA, 32 nt, Human
ccgccuucagccacguguccucgcuuauagag

SEQ ID NO: 110380 - RNA, 32 nt, Human
ccgccuucagguuccuccuaggcgcucagagg

SEQ ID NO: 110381 - RNA, 18 nt, Human
ccgccuucauccccggcc

SEQ ID NO: 110382 - RNA, 32 nt, Human
ccgccuucccauccacacugccuuuaguggua

SEQ ID NO: 110383 - RNA, 22 nt, Human
ccgccuuccccacccccugccu

SEQ ID NO: 110384 - RNA, 32 nt, Human
ccgccuucccugcaccaugcucauagaggaug

SEQ ID NO: 110385 - RNA, 22 nt, Human
ccgccuuccgccgcucugagcc

SEQ ID NO: 110386 - RNA, 32 nt, Human
ccgccuucggcccgggccucccgggauggccg

SEQ ID NO: 110387 - RNA, 26 nt, Human
ccgccuucggcgccugcugccucccu

SEQ ID NO: 110388 - RNA, 18 nt, Human
ccgccuucuccaggcccu

SEQ ID NO: 110389 - RNA, 22 nt, Human
ccgccuucuccaggcgcagcug

SEQ ID NO: 110390 - RNA, 32 nt, Human
ccgccuucuccgguccccuccucggagucauu

SEQ ID NO: 110391 - RNA, 32 nt, Human
ccgccuucugcccccgagcccccagccagccu

SEQ ID NO: 110392 - RNA, 32 nt, Human
ccgccuucuggcccaagagcuccgcugccgcu

SEQ ID NO: 110393 - RNA, 32 nt, Human
ccgccuugagucuggccaaggaggugauuaaa

SEQ ID NO: 110394 - RNA, 32 nt, Human
ccgccuugcucccaguuccauccuggccaaua

SEQ ID NO: 110395 - RNA, 32 nt, Human
ccgccuuggccuuccaaaaugcugcgauuaua

SEQ ID NO: 110396 - RNA, 22 nt, Human
ccgccuugugaccaucuguccc

SEQ ID NO: 110397 - RNA, 32 nt, Human
ccgccuuguuucuccccagaggccucucaauc

SEQ ID NO: 110398 - RNA, 32 nt, Human
ccgccuuuaccccagcuucuucauacacaugc

SEQ ID NO: 110399 - RNA, 32 nt, Human
ccgccuuugccuccacaaacugccacugcuua

SEQ ID NO: 110400 - RNA, 22 nt, Human
ccgccuuugcgcucucggguca

SEQ ID NO: 110401 - RNA, 32 nt, Human
ccgccuuuuccucuccccuggaucugacacuc

SEQ ID NO: 110402 - RNA, 32 nt, Human
ccgcgaacacugcuugucgccugggcaaccgg

SEQ ID NO: 110403 - RNA, 32 nt, Human
ccgcgaagcuuuuucucuucaggacaacacug

SEQ ID NO: 110404 - RNA, 32 nt, Human
ccgcgacacggcgggacccgccagcuucagcg

SEQ ID NO: 110405 - RNA, 32 nt, Human
ccgcgacaguccugcauguguugaugccaccu

SEQ ID NO: 110406 - RNA, 32 nt, Human
ccgcgacccacacaccuuuggccucaucgcug

SEQ ID NO: 110407 - RNA, 32 nt, Human
ccgcgacccagaggaggaagaggaggagaagg

SEQ ID NO: 110408 - RNA, 19 nt, Human
ccgcgaccugccccgagcc

SEQ ID NO: 110409 - RNA, 32 nt, Human
ccgcgacgcaggagcugcugcugcaguugcag

SEQ ID NO: 110410 - RNA, 19 nt, Human
ccgcgacggcccgcccggg

SEQ ID NO: 110411 - RNA, 32 nt, Human
ccgcgagagagggagagagcgagcgagcaaca

SEQ ID NO: 110412 - RNA, 32 nt, Human
ccgcgagagggaagaagcaggaggucucagca

SEQ ID NO: 110413 - RNA, 21 nt, Human
ccgcgagcacauugcagcccc

SEQ ID NO: 110414 - RNA, 32 nt, Human
ccgcgagccagccucgguucccgcggcccgcc

SEQ ID NO: 110415 - RNA, 32 nt, Human
ccgcgagcccagggaugggagcacgcggggga

SEQ ID NO: 110416 - RNA, 19 nt, Human
ccgcgagcggccucgggga

SEQ ID NO: 110417 - RNA, 32 nt, Human
ccgcgagcugggcuuuaacagagaugugugcu

SEQ ID NO: 110418 - RNA, 32 nt, Human
ccgcgaggacagcggcaccgcccacaccccgc

SEQ ID NO: 110419 - RNA, 32 nt, Human
ccgcgaggacgaggcggcgccgccgggcugug

SEQ ID NO: 110420 - RNA, 32 nt, Human
ccgcgaggccaagaugcugauuuggaagauaa

SEQ ID NO: 110421 - RNA, 32 nt, Human
ccgcgaggccaucgcuucacuggaggggucga

SEQ ID NO: 110422 - RNA, 21 nt, Human
ccgcgaggcccgccuuggcca

SEQ ID NO: 110423 - RNA, 24 nt, Human
ccgcgaggcggagacugcagugag

SEQ ID NO: 110424 - RNA, 32 nt, Human
ccgcgagggucugaggcgcggcugccccgggg

SEQ ID NO: 110425 - RNA, 32 nt, Human
ccgcgagggucugcggcuucauucuugaagac

SEQ ID NO: 110426 - RNA, 32 nt, Human
ccgcgaggucugggacaagugaagagagguuu

SEQ ID NO: 110427 - RNA, 32 nt, Human
ccgcgagugggcacgucucugaaugugagguc

SEQ ID NO: 110428 - RNA, 23 nt, Human
ccgcgaucgcccacucgggcgcc

SEQ ID NO: 110429 - RNA, 30 nt, Human
ccgcgauggagagagaaaaggaacaguucc

SEQ ID NO: 110430 - RNA, 30 nt, Human
ccgcgauguaccgcuaccuggccaaagcgc

SEQ ID NO: 110431 - RNA, 30 nt, Human
ccgcgauguucagcuggcuggguacggacg

SEQ ID NO: 110432 - RNA, 32 nt, Human
ccgcgauucugcagcuccgucucccaucccug

SEQ ID NO: 110433 - RNA, 32 nt, Human
ccgcgcaaggggcccuguuuccggggagacug

SEQ ID NO: 110434 - RNA, 32 nt, Human
ccgcgcaccaugggcuccauucucagccgccg

SEQ ID NO: 110435 - RNA, 32 nt, Human
ccgcgcacccacccugaccccucccucagcug

SEQ ID NO: 110436 - RNA, 32 nt, Human
ccgcgcaccccgaggcccgugugggcgguggg

SEQ ID NO: 110437 - RNA, 32 nt, Human
ccgcgcaccugugccuuaaucuucccuccccu

SEQ ID NO: 110438 - RNA, 17 nt, Human
ccgcgcacgcuccggcc

SEQ ID NO: 110439 - RNA, 22 nt, Human
ccgcgcagaccuggggccgccc

SEQ ID NO: 110440 - RNA, 17 nt, Human
ccgcgcagccccgagcu

SEQ ID NO: 110441 - RNA, 17 nt, Human
ccgcgcagccccgggcu

SEQ ID NO: 110442 - RNA, 18 nt, Human
ccgcgcagcccggcccga

SEQ ID NO: 110443 - RNA, 18 nt, Human
ccgcgcagcccucugcca

SEQ ID NO: 110444 - RNA, 20 nt, Human
ccgcgcagccgccgccgccg

SEQ ID NO: 110445 - RNA, 32 nt, Human
ccgcgcagccgggucccagccuuguccugauu

SEQ ID NO: 110446 - RNA, 18 nt, Human
ccgcgcagcgccccggcc

SEQ ID NO: 110447 - RNA, 23 nt, Human
ccgcgcagggccaccucccuggg

SEQ ID NO: 110448 - RNA, 32 nt, Human
ccgcgcagggccguggggcugagccacgcucu

SEQ ID NO: 110449 - RNA, 18 nt, Human
ccgcgcaguccccgggcu

SEQ ID NO: 110450 - RNA, 17 nt, Human
ccgcgcagucccgggcc

SEQ ID NO: 110451 - RNA, 31 nt, Human
ccgcgccacagcuaugacccugagcacugag

SEQ ID NO: 110452 - RNA, 22 nt, Human
ccgcgccacaggacccucgccg

SEQ ID NO: 110453 - RNA, 32 nt, Human
ccgcgccacugcacuccagccugggcaacaag

SEQ ID NO: 110454 - RNA, 32 nt, Human
ccgcgccacugcacuccagccugggcaacaga

SEQ ID NO: 110455 - RNA, 32 nt, Human
ccgcgccagcuugggagcccuggaguucuggc

SEQ ID NO: 110456 - RNA, 32 nt, Human
ccgcgcccagcagaggcguacuacccagcucu

SEQ ID NO: 110457 - RNA, 19 nt, Human
ccgcgcccaggggccccga

SEQ ID NO: 110458 - RNA, 32 nt, Human
ccgcgcccaucccccgccccagccccugacac

SEQ ID NO: 110459 - RNA, 20 nt, Human
ccgcgccccagccccgggcc

SEQ ID NO: 110460 - RNA, 32 nt, Human
ccgcgcccccaucgccccuccugcgcuagcgg

SEQ ID NO: 110461 - RNA, 19 nt, Human
ccgcgccccgaccccgccg

SEQ ID NO: 110462 - RNA, 20 nt, Human
ccgcgccccgcaccccgccg

SEQ ID NO: 110463 - RNA, 19 nt, Human
ccgcgccccgccaccccga

SEQ ID NO: 110464 - RNA, 20 nt, Human
ccgcgccccgccgcugagcc

SEQ ID NO: 110465 - RNA, 23 nt, Human
ccgcgccccuccagcccucgccg

SEQ ID NO: 110466 - RNA, 20 nt, Human
ccgcgccccugccccugccu

SEQ ID NO: 110467 - RNA, 32 nt, Human
ccgcgcccgcagccuccgccucccggauggac

SEQ ID NO: 110468 - RNA, 19 nt, Human
ccgcgcccgcccuacugcc

SEQ ID NO: 110469 - RNA, 32 nt, Human
ccgcgcccgccgcccgcugccugcgccgccgg

SEQ ID NO: 110470 - RNA, 18 nt, Human
ccgcgcccggcccgcccg

SEQ ID NO: 110471 - RNA, 21 nt, Human
ccgcgcccggcgccgggcgcc

SEQ ID NO: 110472 - RNA, 32 nt, Human
ccgcgcccggcgcuccccuuuguccgcgggcc

SEQ ID NO: 110473 - RNA, 32 nt, Human
ccgcgcccuccccgccccacuuucccuucuuc

SEQ ID NO: 110474 - RNA, 32 nt, Human
ccgcgcccuccccucuccuuucucccucucag

SEQ ID NO: 110475 - RNA, 32 nt, Human
ccgcgcccugccccgucucucccuugcacuuc

SEQ ID NO: 110476 - RNA, 21 nt, Human
ccgcgccgcaagggggcuccg

SEQ ID NO: 110477 - RNA, 32 nt, Human
ccgcgccgccacucccaugccugcugcuggga

SEQ ID NO: 110478 - RNA, 18 nt, Human
ccgcgccgccccgcgccg

SEQ ID NO: 110479 - RNA, 23 nt, Human
ccgcgccgcccgggcucccgccg

SEQ ID NO: 110480 - RNA, 20 nt, Human
ccgcgccgccgcccccgcug

SEQ ID NO: 110481 - RNA, 18 nt, Human
ccgcgccgccgccgccac

SEQ ID NO: 110482 - RNA, 20 nt, Human
ccgcgccgccgccgccgccg

SEQ ID NO: 110483 - RNA, 19 nt, Human
ccgcgccgccggccccgcc

SEQ ID NO: 110484 - RNA, 16 nt, Human
ccgcgccgccugggcu

SEQ ID NO: 110485 - RNA, 32 nt, Human
ccgcgccgcgccgccugaaccugggcgggggc

SEQ ID NO: 110486 - RNA, 32 nt, Human
ccgcgccgcugccucugccccggccgcccccg

SEQ ID NO: 110487 - RNA, 32 nt, Human
ccgcgccgggcccuuucugacgcccagccccc

SEQ ID NO: 110488 - RNA, 32 nt, Human
ccgcgccuacccuucccgccucccucucagag

SEQ ID NO: 110489 - RNA, 32 nt, Human
ccgcgccuacuuccugucccacugccacaaag

SEQ ID NO: 110490 - RNA, 18 nt, Human
ccgcgccuccccgggcca

SEQ ID NO: 110491 - RNA, 19 nt, Human
ccgcgccucccuugccuca

SEQ ID NO: 110492 - RNA, 19 nt, Human
ccgcgccuccgccucggcc

SEQ ID NO: 110493 - RNA, 32 nt, Human
ccgcgccucugaggcgcagcaugugaagcgga

SEQ ID NO: 110494 - RNA, 22 nt, Human
ccgcgccugcacuuagccccgc

SEQ ID NO: 110495 - RNA, 32 nt, Human
ccgcgccuggcuucuuggaaagagcaggaagg

SEQ ID NO: 110496 - RNA, 23 nt, Human
ccgcgcgaaaagccggggcgccu

SEQ ID NO: 110497 - RNA, 32 nt, Human
ccgcgcgacagaaagcugugccgccaccaccg

SEQ ID NO: 110498 - RNA, 32 nt, Human
ccgcgcgagccugucgccgcuaugccuccgcg

SEQ ID NO: 110499 - RNA, 32 nt, Human
ccgcgcgaggagccaggaugguccugguccac

SEQ ID NO: 110500 - RNA, 24 nt, Human
ccgcgcgaggccacggccacgccg

SEQ ID NO: 110501 - RNA, 21 nt, Human
ccgcgcgaggcggcccgggcc

SEQ ID NO: 110502 - RNA, 32 nt, Human
ccgcgcgaggguggggaccagcugcgcacgag

SEQ ID NO: 110503 - RNA, 25 nt, Human
ccgcgcgcaccgccuccgcgcgccu

SEQ ID NO: 110504 - RNA, 22 nt, Human
ccgcgcgcaccggcccugagcu

SEQ ID NO: 110505 - RNA, 21 nt, Human
ccgcgcgccaugcuccgggcc

SEQ ID NO: 110506 - RNA, 22 nt, Human
ccgcgcgccaugcuccgggccc

SEQ ID NO: 110507 - RNA, 21 nt, Human
ccgcgcgcccaggcggggccu

SEQ ID NO: 110508 - RNA, 19 nt, Human
ccgcgcgccccgccgcucg

SEQ ID NO: 110509 - RNA, 18 nt, Human
ccgcgcgcccgcccgccg

SEQ ID NO: 110510 - RNA, 23 nt, Human
ccgcgcgcccggagcaggagccu

SEQ ID NO: 110511 - RNA, 22 nt, Human
ccgcgcgccgccaccgccgccg

SEQ ID NO: 110512 - RNA, 19 nt, Human
ccgcgcgccgccgccgcug

SEQ ID NO: 110513 - RNA, 22 nt, Human
ccgcgcgccgccgccgcugccg

SEQ ID NO: 110514 - RNA, 19 nt, Human
ccgcgcgccgccgcugccg

SEQ ID NO: 110515 - RNA, 22 nt, Human
ccgcgcgccgccgcugccgccg

SEQ ID NO: 110516 - RNA, 22 nt, Human
ccgcgcgccggggcgggggccu

SEQ ID NO: 110517 - RNA, 20 nt, Human
ccgcgcgccgguccggcgcc

SEQ ID NO: 110518 - RNA, 18 nt, Human
ccgcgcgccucccugccg

SEQ ID NO: 110519 - RNA, 19 nt, Human
ccgcgcgccuccgagcgcc

SEQ ID NO: 110520 - RNA, 21 nt, Human
ccgcgcgccuccgcggaugcc

SEQ ID NO: 110521 - RNA, 20 nt, Human
ccgcgcgcgcccauugggcc

SEQ ID NO: 110522 - RNA, 19 nt, Human
ccgcgcgcgccucgaggcc

SEQ ID NO: 110523 - RNA, 24 nt, Human
ccgcgcgcggcccgccgagcgccu

SEQ ID NO: 110524 - RNA, 19 nt, Human
ccgcgcggaaggagcugga

SEQ ID NO: 110525 - RNA, 32 nt, Human
ccgcgcggauccggggaaugcgugagaggaga

SEQ ID NO: 110526 - RNA, 26 nt, Human
ccgcgcggcaugaggaauuuaucugg

SEQ ID NO: 110527 - RNA, 17 nt, Human
ccgcgcggccacggcca

SEQ ID NO: 110528 - RNA, 19 nt, Human
ccgcgcggccccgccgccg

SEQ ID NO: 110529 - RNA, 16 nt, Human
ccgcgcggccccgggu

SEQ ID NO: 110530 - RNA, 32 nt, Human
ccgcgcggcgcaucccagccugggcgggacgc

SEQ ID NO: 110531 - RNA, 19 nt, Human
ccgcgcggcgccucgagcu

SEQ ID NO: 110532 - RNA, 23 nt, Human
ccgcgcggcucccagccccgccg

SEQ ID NO: 110533 - RNA, 26 nt, Human
ccgcgcggcugaggaaauuuauuugg

SEQ ID NO: 110534 - RNA, 32 nt, Human
ccgcgcggcugcagcaugccucacaggaagaa

SEQ ID NO: 110535 - RNA, 23 nt, Human
ccgcgcggcugccggcccaagag

SEQ ID NO: 110536 - RNA, 22 nt, Human
ccgcgcggcugcggcccaggag

SEQ ID NO: 110537 - RNA, 27 nt, Human
ccgcgcggcuuaggaaaauuauuugga

SEQ ID NO: 110538 - RNA, 32 nt, Human
ccgcgcgggccgcggcgagcgcgaugccggcg

SEQ ID NO: 110539 - RNA, 20 nt, Human
ccgcgcggggcagccccccg

SEQ ID NO: 110540 - RNA, 24 nt, Human
ccgcgcggggcagccccccgggga

SEQ ID NO: 110541 - RNA, 20 nt, Human
ccgcgcggggcuccgaggcg

SEQ ID NO: 110542 - RNA, 32 nt, Human
ccgcgcgggggcgggagccagguggccucggc

SEQ ID NO: 110543 - RNA, 32 nt, Human
ccgcgcggguccgggagccaggcacgggaccc

SEQ ID NO: 110544 - RNA, 19 nt, Human
ccgcgcgggugaagccgga

SEQ ID NO: 110545 - RNA, 18 nt, Human
ccgcgcggguuccgggcc

SEQ ID NO: 110546 - RNA, 32 nt, Human
ccgcgcggugcagcgcagucucaggccgcggg

SEQ ID NO: 110547 - RNA, 32 nt, Human
ccgcgcguccgcacuccucggcccucgggcgg

SEQ ID NO: 110548 - RNA, 32 nt, Human
ccgcgcgugccuggcucggagcuccgcugcgg

SEQ ID NO: 110549 - RNA, 22 nt, Human
ccgcgcguguuccccgggcgcc

SEQ ID NO: 110550 - RNA, 32 nt, Human
ccgcgcucaggaggucaagaccagccugggca

SEQ ID NO: 110551 - RNA, 32 nt, Human
ccgcgcuccacguuuugcaggcugccaccgug

SEQ ID NO: 110552 - RNA, 32 nt, Human
ccgcgcuccagccucaccaggcuccccggcuc

SEQ ID NO: 110553 - RNA, 32 nt, Human
ccgcgcuccagccucgcucuccgccgcccgca

SEQ ID NO: 110554 - RNA, 32 nt, Human
ccgcgcuccagccugggugacagagcgagacc

SEQ ID NO: 110555 - RNA, 32 nt, Human
ccgcgcucccaggagaguggaggcugcaggaa

SEQ ID NO: 110556 - RNA, 32 nt, Human
ccgcgcucccaucccccaccuucccgggccgg

SEQ ID NO: 110557 - RNA, 18 nt, Human
ccgcgcuccgccccggcc

SEQ ID NO: 110558 - RNA, 19 nt, Human
ccgcgcucgccccgggcua

SEQ ID NO: 110559 - RNA, 20 nt, Human
ccgcgcucucaccccgggcu

SEQ ID NO: 110560 - RNA, 32 nt, Human
ccgcgcucucacugcagccugugcccaacccc

SEQ ID NO: 110561 - RNA, 32 nt, Human
ccgcgcucugcgggcugggaggcccgggccag

SEQ ID NO: 110562 - RNA, 32 nt, Human
ccgcgcucugugggccucugagggcggcaugc

SEQ ID NO: 110563 - RNA, 25 nt, Human
ccgcgcugagagcccagccccgccg

SEQ ID NO: 110564 - RNA, 19 nt, Human
ccgcgcugcagggaacagc

SEQ ID NO: 110565 - RNA, 18 nt, Human
ccgcgcugccacccgccg

SEQ ID NO: 110566 - RNA, 21 nt, Human
ccgcgcugccauucccggccg

SEQ ID NO: 110567 - RNA, 32 nt, Human
ccgcgcugcccaggccauggacugugagguca

SEQ ID NO: 110568 - RNA, 23 nt, Human
ccgcgcugccccacgccgcgccg

SEQ ID NO: 110569 - RNA, 32 nt, Human
ccgcgcugccccugcccugccucuguccuggc

SEQ ID NO: 110570 - RNA, 31 nt, Human
ccgcgcugccucucggguguccugggucggu

SEQ ID NO: 110571 - RNA, 22 nt, Human
ccgcgcugcguucccgaccccu

SEQ ID NO: 110572 - RNA, 20 nt, Human
ccgcgcugcugggucccgcc

SEQ ID NO: 110573 - RNA, 23 nt, Human
ccgcgcugcuguuagacacuccg

SEQ ID NO: 110574 - RNA, 19 nt, Human
ccgcgcuggccaccccgcc

SEQ ID NO: 110575 - RNA, 18 nt, Human
ccgcgcuggcgccccccg

SEQ ID NO: 110576 - RNA, 20 nt, Human
ccgcgcuggggagcccaccg

SEQ ID NO: 110577 - RNA, 32 nt, Human
ccgcgcuucagccucagcuucggccucagccc

SEQ ID NO: 110578 - RNA, 18 nt, Human
ccgcgcuucgcuucagcu

SEQ ID NO: 110579 - RNA, 32 nt, Human
ccgcgcuucuggagcacuggccaaggcgggcc

SEQ ID NO: 110580 - RNA, 32 nt, Human
ccgcggaaaaggagggggagcggcuggucagc

SEQ ID NO: 110581 - RNA, 32 nt, Human
ccgcggaagccgcggugucggcgccauggcgg

SEQ ID NO: 110582 - RNA, 19 nt, Human
ccgcggaccaccgcuuccu

SEQ ID NO: 110583 - RNA, 32 nt, Human
ccgcggaccccgagcacgcgccugacagcccc

SEQ ID NO: 110584 - RNA, 24 nt, Human
ccgcggacccgccuucugcccuca

SEQ ID NO: 110585 - RNA, 32 nt, Human
ccgcggacccugagcgcaagagccaagccgcc

SEQ ID NO: 110586 - RNA, 32 nt, Human
ccgcggaccgguggagccugggugacggcgcc

SEQ ID NO: 110587 - RNA, 21 nt, Human
ccgcggaccucgcaugcuccc

SEQ ID NO: 110588 - RNA, 21 nt, Human
ccgcggaccuggcaguucuca

SEQ ID NO: 110589 - RNA, 21 nt, Human
ccgcggacuugcccugaguua

SEQ ID NO: 110590 - RNA, 24 nt, Human
ccgcggacuuggcugcugcuccca

SEQ ID NO: 110591 - RNA, 32 nt, Human
ccgcggagaugaagaauuugcagggagccucc

SEQ ID NO: 110592 - RNA, 32 nt, Human
ccgcggagcagggagagaaaaagcagguaggg

SEQ ID NO: 110593 - RNA, 32 nt, Human
ccgcggagccagcacgaacgagcccagcaccg

SEQ ID NO: 110594 - RNA, 32 nt, Human
ccgcggagcccggucacagucacugcagcaga

SEQ ID NO: 110595 - RNA, 32 nt, Human
ccgcggagcgugccuaaggugaaagggcugcc

SEQ ID NO: 110596 - RNA, 32 nt, Human
ccgcggagcugaagagggaggaaggggcggcu

SEQ ID NO: 110597 - RNA, 32 nt, Human
ccgcggaggaggaggaaggggaggagggcgag

SEQ ID NO: 110598 - RNA, 32 nt, Human
ccgcggaggagguggaggaggcggcggcggcg

SEQ ID NO: 110599 - RNA, 32 nt, Human
ccgcggaggcuggagccgcaauggugcugaug

SEQ ID NO: 110600 - RNA, 32 nt, Human
ccgcggaguuacgggaaaguugguccgaguuc

SEQ ID NO: 110601 - RNA, 23 nt, Human
ccgcggcaaggaguuuauuuaga

SEQ ID NO: 110602 - RNA, 19 nt, Human
ccgcggcaccgcuccgacc

SEQ ID NO: 110603 - RNA, 18 nt, Human
ccgcggcagccccgggcu

SEQ ID NO: 110604 - RNA, 24 nt, Human
ccgcggcaggaaaauguauuugga

SEQ ID NO: 110605 - RNA, 32 nt, Human
ccgcggcaggagaaacagccgaggacacccug

SEQ ID NO: 110606 - RNA, 32 nt, Human
ccgcggccacauccgcucaauuuuccagacuc

SEQ ID NO: 110607 - RNA, 17 nt, Human
ccgcggccagccccgcc

SEQ ID NO: 110608 - RNA, 21 nt, Human
ccgcggccaggaauuuauuug

SEQ ID NO: 110609 - RNA, 32 nt, Human
ccgcggccccagcagcccugugcccucguugg

SEQ ID NO: 110610 - RNA, 32 nt, Human
ccgcggcccggccggcaguugcaguguagaca

SEQ ID NO: 110611 - RNA, 32 nt, Human
ccgcggcccuuuccaccucuuuucacuuuggg

SEQ ID NO: 110612 - RNA, 32 nt, Human
ccgcggccgaccauagagaugcggcucccgcc

SEQ ID NO: 110613 - RNA, 18 nt, Human
ccgcggccgccgccgccg

SEQ ID NO: 110614 - RNA, 18 nt, Human
ccgcggccgccgcugcug

SEQ ID NO: 110615 - RNA, 32 nt, Human
ccgcggccgccuccuccuccccggcucccgcc

SEQ ID NO: 110616 - RNA, 22 nt, Human
ccgcggccggagacacacgccg

SEQ ID NO: 110617 - RNA, 32 nt, Human
ccgcggccggccuggcuucacuggcgcccuuu

SEQ ID NO: 110618 - RNA, 32 nt, Human
ccgcggccuagacucaagucuggguuucagcu

SEQ ID NO: 110619 - RNA, 32 nt, Human
ccgcggccuccaggagucucauggaagggacg

SEQ ID NO: 110620 - RNA, 18 nt, Human
ccgcggccuccccgaguc

SEQ ID NO: 110621 - RNA, 32 nt, Human
ccgcggccuccuccuccuccccguucccuuca

SEQ ID NO: 110622 - RNA, 32 nt, Human
ccgcggccuggaccccuggaccgcuuugcgca

SEQ ID NO: 110623 - RNA, 32 nt, Human
ccgcggcgacaccuccgcgggcacucacccag

SEQ ID NO: 110624 - RNA, 32 nt, Human
ccgcggcgacuugccgucucuccauuccacug

SEQ ID NO: 110625 - RNA, 32 nt, Human
ccgcggcgagccgggccgagcagugagggccc

SEQ ID NO: 110626 - RNA, 21 nt, Human
ccgcggcgccgccuccucccu

SEQ ID NO: 110627 - RNA, 32 nt, Human
ccgcggcggagccagaggcugcaggaagagcc

SEQ ID NO: 110628 - RNA, 20 nt, Human
ccgcggcggagcccgaguua

SEQ ID NO: 110629 - RNA, 32 nt, Human
ccgcggcggcaccaugaguccccgcucgugcc

SEQ ID NO: 110630 - RNA, 32 nt, Human
ccgcggcggccgucucucccacccgcagcagc

SEQ ID NO: 110631 - RNA, 32 nt, Human
ccgcggcggccuggggaaguguuuggauugug

SEQ ID NO: 110632 - RNA, 19 nt, Human
ccgcggcggcgucccggcu

SEQ ID NO: 110633 - RNA, 32 nt, Human
ccgcggcgggcaggccaggacugucagugccc

SEQ ID NO: 110634 - RNA, 32 nt, Human
ccgcggcggggcagccgcaggagcccuggcug

SEQ ID NO: 110635 - RNA, 23 nt, Human
ccgcggcguccguccguccuucc

SEQ ID NO: 110636 - RNA, 32 nt, Human
ccgcggcgucuucuccacccaccugcgcuggg

SEQ ID NO: 110637 - RNA, 24 nt, Human
ccgcggcuccccagccccaggccg

SEQ ID NO: 110638 - RNA, 21 nt, Human
ccgcggcuccgaacucggugg

SEQ ID NO: 110639 - RNA, 22 nt, Human
ccgcggcuccgccgcccagccg

SEQ ID NO: 110640 - RNA, 23 nt, Human
ccgcggcuccggagcccucgccg

SEQ ID NO: 110641 - RNA, 22 nt, Human
ccgcggcuccuccagcacacug

SEQ ID NO: 110642 - RNA, 32 nt, Human
ccgcggcucgaggacuccgcuuccuucccucc

SEQ ID NO: 110643 - RNA, 19 nt, Human
ccgcggcugcgggcuucug

SEQ ID NO: 110644 - RNA, 18 nt, Human
ccgcggcugcucggggcc

SEQ ID NO: 110645 - RNA, 32 nt, Human
ccgcggcugcugaggcggaggcugaggcagug

SEQ ID NO: 110646 - RNA, 32 nt, Human
ccgcggcugcugcugcgcaggcccagugcugc

SEQ ID NO: 110647 - RNA, 17 nt, Human
ccgcggcugucccgguc

SEQ ID NO: 110648 - RNA, 32 nt, Human
ccgcggcugucgggguccugcagccucaauag

SEQ ID NO: 110649 - RNA, 17 nt, Human
ccgcggcuguuccgggc

SEQ ID NO: 110650 - RNA, 32 nt, Human
ccgcgggacagcuucuguccaaucauguugag

SEQ ID NO: 110651 - RNA, 23 nt, Human
ccgcgggacuguaggcccggggg

SEQ ID NO: 110652 - RNA, 32 nt, Human
ccgcgggagcagcuacugggcugggcugcgga

SEQ ID NO: 110653 - RNA, 32 nt, Human
ccgcgggagccgcggccaccaggaggccccgc

SEQ ID NO: 110654 - RNA, 32 nt, Human
ccgcgggagccuggcccgccgugcagagcagu

SEQ ID NO: 110655 - RNA, 20 nt, Human
ccgcgggagcugcuccggcc

SEQ ID NO: 110656 - RNA, 19 nt, Human
ccgcgggagguggcccuca

SEQ ID NO: 110657 - RNA, 20 nt, Human
ccgcgggcagccaccgagcc

SEQ ID NO: 110658 - RNA, 32 nt, Human
ccgcgggccagcacugguaccuagccggggcc

SEQ ID NO: 110659 - RNA, 32 nt, Human
ccgcgggcccggccgagcaggagcagcucccg

SEQ ID NO: 110660 - RNA, 24 nt, Human
ccgcgggccgccgcgggccuccug

SEQ ID NO: 110661 - RNA, 20 nt, Human
ccgcgggccggagcccgggu

SEQ ID NO: 110662 - RNA, 19 nt, Human
ccgcgggccggccugggcc

SEQ ID NO: 110663 - RNA, 32 nt, Human
ccgcgggcggcggcggagcugggcagguggau

SEQ ID NO: 110664 - RNA, 21 nt, Human
ccgcgggcucgcccgggcgcc

SEQ ID NO: 110665 - RNA, 32 nt, Human
ccgcggggagagaggaggagagaaguggccag

SEQ ID NO: 110666 - RNA, 32 nt, Human
ccgcggggagccaagcccccugggccggaaau

SEQ ID NO: 110667 - RNA, 32 nt, Human
ccgcggggaggaagagggaaaaggaagaugga

SEQ ID NO: 110668 - RNA, 32 nt, Human
ccgcggggaggcugguccuggagcccaucccc

SEQ ID NO: 110669 - RNA, 32 nt, Human
ccgcggggagggcacaacagcugcuaccugaa

SEQ ID NO: 110670 - RNA, 32 nt, Human
ccgcggggaugaggagguugucagugauugaa

SEQ ID NO: 110671 - RNA, 21 nt, Human
ccgcggggcaguucgggaacc

SEQ ID NO: 110672 - RNA, 19 nt, Human
ccgcggggccgcuccggcc

SEQ ID NO: 110673 - RNA, 32 nt, Human
ccgcgggggccaagccccuggcuucuuacugc

SEQ ID NO: 110674 - RNA, 32 nt, Human
ccgcggggguuagaggucaccaugcugagggu

SEQ ID NO: 110675 - RNA, 32 nt, Human
ccgcggguggggaaaucuggagcucagccgag

SEQ ID NO: 110676 - RNA, 32 nt, Human
ccgcgguagcaacguggggcucaucugccucu

SEQ ID NO: 110677 - RNA, 32 nt, Human
ccgcgguagggugggaacccaagcgggagagc

SEQ ID NO: 110678 - RNA, 23 nt, Human
ccgcgguagguaauuuauuugga

SEQ ID NO: 110679 - RNA, 32 nt, Human
ccgcgguaugcagcaggcugccggcuucaguc

SEQ ID NO: 110680 - RNA, 18 nt, Human
ccgcggucgccccgacca

SEQ ID NO: 110681 - RNA, 32 nt, Human
ccgcggucuccggccucuccacccucagcccc

SEQ ID NO: 110682 - RNA, 32 nt, Human
ccgcggugacccuucucucaugacccugcggu

SEQ ID NO: 110683 - RNA, 32 nt, Human
ccgcggugcaagagcccagcccaggggcgcug

SEQ ID NO: 110684 - RNA, 32 nt, Human
ccgcggugcccagcucuccagccuggggauuc

SEQ ID NO: 110685 - RNA, 32 nt, Human
ccgcggugccuggccuccccucccagacugca

SEQ ID NO: 110686 - RNA, 32 nt, Human
ccgcggugggacuccggagcagcguacaccgc

SEQ ID NO: 110687 - RNA, 21 nt, Human
ccgcggugggagugggcgcag

SEQ ID NO: 110688 - RNA, 32 nt, Human
ccgcggugggcauggggcagggccggagccgc

SEQ ID NO: 110689 - RNA, 32 nt, Human
ccgcgguggguggaucaccugaggucaggagu

SEQ ID NO: 110690 - RNA, 20 nt, Human
ccgcgguuccuccccgagcc

SEQ ID NO: 110691 - RNA, 32 nt, Human
ccgcgucagaacugaagagaggaaggggagga

SEQ ID NO: 110692 - RNA, 32 nt, Human
ccgcguccccuccaguccgcuccgggcagcug

SEQ ID NO: 110693 - RNA, 19 nt, Human
ccgcguccgccuccgggcc

SEQ ID NO: 110694 - RNA, 32 nt, Human
ccgcguccuacgcaggcucugccacagggguu

SEQ ID NO: 110695 - RNA, 23 nt, Human
ccgcguccucgcugccccgggcc

SEQ ID NO: 110696 - RNA, 32 nt, Human
ccgcgucgaccugcaguggauuuccuuccugu

SEQ ID NO: 110697 - RNA, 24 nt, Human
ccgcgucgccccgucggguacuga

SEQ ID NO: 110698 - RNA, 32 nt, Human
ccgcgucgccgcccuggcggggacggugcagc

SEQ ID NO: 110699 - RNA, 32 nt, Human
ccgcgucucccaggacgcaugaagguggcacc

SEQ ID NO: 110700 - RNA, 32 nt, Human
ccgcgucuccuucccucuccccaaagccugga

SEQ ID NO: 110701 - RNA, 32 nt, Human
ccgcgucucugggcuuuugcucugucaggcug

SEQ ID NO: 110702 - RNA, 32 nt, Human
ccgcgucuguaagggccugccugcugcucucg

SEQ ID NO: 110703 - RNA, 32 nt, Human
ccgcgugagccgcagcccuggggccagcagga

SEQ ID NO: 110704 - RNA, 22 nt, Human
ccgcgugccgcgccccggccgc

SEQ ID NO: 110705 - RNA, 32 nt, Human
ccgcgugccuguaaucccagcuacuugggagg

SEQ ID NO: 110706 - RNA, 32 nt, Human
ccgcgugcgccuacgccuucugcuccaguugc

SEQ ID NO: 110707 - RNA, 32 nt, Human
ccgcgugcgguggcucacgccuguaaucccag

SEQ ID NO: 110708 - RNA, 32 nt, Human
ccgcgugcuccuguucagcccugccgaggugg

SEQ ID NO: 110709 - RNA, 21 nt, Human
ccgcguggagcgcccugacua

SEQ ID NO: 110710 - RNA, 18 nt, Human
ccgcguggcgccucggcc

SEQ ID NO: 110711 - RNA, 32 nt, Human
ccgcgugggaccccaauagaacucagcccuuc

SEQ ID NO: 110712 - RNA, 32 nt, Human
ccgcgugggagcaccugcugagcccagccaga

SEQ ID NO: 110713 - RNA, 32 nt, Human
ccgcgugggaggacgaugggucagcgcggaaa

SEQ ID NO: 110714 - RNA, 32 nt, Human
ccgcgugguaucucccgagggcugcuuggacc

SEQ ID NO: 110715 - RNA, 23 nt, Human
ccgcguggugccauccccagggg

SEQ ID NO: 110716 - RNA, 32 nt, Human
ccgcguuaucccaaaggugggauuacgccugu

SEQ ID NO: 110717 - RNA, 32 nt, Human
ccgcguuccagccucacaccccacggugcugu

SEQ ID NO: 110718 - RNA, 32 nt, Human
ccgcguucccguccucuuccgcuuggccccag

SEQ ID NO: 110719 - RNA, 32 nt, Human
ccgcuaaaaaugcaaaaauuagccaggcgugg

SEQ ID NO: 110720 - RNA, 32 nt, Human
ccgcuaaggaacauggcgaagguggagcaggu

SEQ ID NO: 110721 - RNA, 32 nt, Human
ccgcuacaccacuccucuagaacucgguggua

SEQ ID NO: 110722 - RNA, 32 nt, Human
ccgcuacacccagggaggcgcuggagcgugug

SEQ ID NO: 110723 - RNA, 32 nt, Human
ccgcuacacuaccugggcugggcccugcaggg

SEQ ID NO: 110724 - RNA, 32 nt, Human
ccgcuacagacccagccuugcacuccaaggcu

SEQ ID NO: 110725 - RNA, 23 nt, Human
ccgcuaccccaacagucuggaca

SEQ ID NO: 110726 - RNA, 22 nt, Human
ccgcuaccgccgcaccugggcu

SEQ ID NO: 110727 - RNA, 32 nt, Human
ccgcuaccucgcuccuccucccacccaauccc

SEQ ID NO: 110728 - RNA, 32 nt, Human
ccgcuaccuucaccaccuccugcugugggugg

SEQ ID NO: 110729 - RNA, 32 nt, Human
ccgcuaccuuucucccucuccuucccuucauc

SEQ ID NO: 110730 - RNA, 32 nt, Human
ccgcuacgggaaggcaugccagccugggcgau

SEQ ID NO: 110731 - RNA, 32 nt, Human
ccgcuacugccuggccccuugcugacucaggc

SEQ ID NO: 110732 - RNA, 32 nt, Human
ccgcuacugcgcaaagaugguggaggaggaga

SEQ ID NO: 110733 - RNA, 18 nt, Human
ccgcuacuuagguacugg

SEQ ID NO: 110734 - RNA, 32 nt, Human
ccgcuagaaaguacagaaggaacuuuggaugu

SEQ ID NO: 110735 - RNA, 32 nt, Human
ccgcuagagcuaggagaaaaaugcagacgcga

SEQ ID NO: 110736 - RNA, 32 nt, Human
ccgcuagcauguggccaggggugcaggguggc

SEQ ID NO: 110737 - RNA, 19 nt, Human
ccgcuagccucccugagcu

SEQ ID NO: 110738 - RNA, 32 nt, Human
ccgcuaggcuuucaccccagccgccgguccug

SEQ ID NO: 110739 - RNA, 32 nt, Human
ccgcuaguauguuggaaguuauuuggauuguu

SEQ ID NO: 110740 - RNA, 32 nt, Human
ccgcuauaccuccccuuccuccugcaucuccc

SEQ ID NO: 110741 - RNA, 32 nt, Human
ccgcuaugugccaggaucuguccacagaggcc

SEQ ID NO: 110742 - RNA, 32 nt, Human
ccgcucacugcaacauccgccucccggacuca

SEQ ID NO: 110743 - RNA, 32 nt, Human
ccgcucacugcaaccuccaccuccuggcuuca

SEQ ID NO: 110744 - RNA, 32 nt, Human
ccgcucacugcaaccuccgccucccagguuca

SEQ ID NO: 110745 - RNA, 32 nt, Human
ccgcucacugcaaccucugccucccgguucaa

SEQ ID NO: 110746 - RNA, 32 nt, Human
ccgcucacugcaaccucugcuucccggguuca

SEQ ID NO: 110747 - RNA, 32 nt, Human
ccgcucacugcaagcacugccucccuccgggg

SEQ ID NO: 110748 - RNA, 32 nt, Human
ccgcucacugcaagcuccgccucccggguuca

SEQ ID NO: 110749 - RNA, 32 nt, Human
ccgcucacugcaagcucugccuccugggcuca

SEQ ID NO: 110750 - RNA, 32 nt, Human
ccgcucagagacagaggaaggccaaggcgcuc

SEQ ID NO: 110751 - RNA, 32 nt, Human
ccgcucaggccccacucgacccucucgggccu

SEQ ID NO: 110752 - RNA, 19 nt, Human
ccgcucagggccccgguca

SEQ ID NO: 110753 - RNA, 32 nt, Human
ccgcucagggggagcaggaggacagcuggccg

SEQ ID NO: 110754 - RNA, 32 nt, Human
ccgcucagugcauuccuuuuucauacacugau

SEQ ID NO: 110755 - RNA, 32 nt, Human
ccgcuccagcccggccaugagcgcggccgcau

SEQ ID NO: 110756 - RNA, 19 nt, Human
ccgcuccagccgcccgcgg

SEQ ID NO: 110757 - RNA, 32 nt, Human
ccgcuccagcuacucaggaggcugaggcagga

SEQ ID NO: 110758 - RNA, 32 nt, Human
ccgcuccagcuccagccccacccggccggucc

SEQ ID NO: 110759 - RNA, 32 nt, Human
ccgcuccagguggcgggcggcuggagcgaggg

SEQ ID NO: 110760 - RNA, 32 nt, Human
ccgcuccaguucucaucaucucccaggcagaa

SEQ ID NO: 110761 - RNA, 32 nt, Human
ccgcuccauccccuccuccuccuuaggaugca

SEQ ID NO: 110762 - RNA, 32 nt, Human
ccgcucccaccuagaggccaggaaagggggag

SEQ ID NO: 110763 - RNA, 32 nt, Human
ccgcucccaggagagugagggugacgcaauug

SEQ ID NO: 110764 - RNA, 31 nt, Human
ccgcucccccucucugugcccugguccccuu

SEQ ID NO: 110765 - RNA, 32 nt, Human
ccgcuccccuuucccaucaccccuuccccauu

SEQ ID NO: 110766 - RNA, 32 nt, Human
ccgcucccgccucgcgcaugugcauuggcuga

SEQ ID NO: 110767 - RNA, 32 nt, Human
ccgcucccgcgcguuguuguccugccuuaccg

SEQ ID NO: 110768 - RNA, 18 nt, Human
ccgcucccgcuggucauc

SEQ ID NO: 110769 - RNA, 32 nt, Human
ccgcucccucaagcucuggauggcugcagugu

SEQ ID NO: 110770 - RNA, 18 nt, Human
ccgcucccuccccacuaa

SEQ ID NO: 110771 - RNA, 32 nt, Human
ccgcucccuccccuccucccuugcucacccca

SEQ ID NO: 110772 - RNA, 32 nt, Human
ccgcucccucuccaggcaaccccacccaccag

SEQ ID NO: 110773 - RNA, 32 nt, Human
ccgcucccugcagaggaugcucguuuugcaga

SEQ ID NO: 110774 - RNA, 32 nt, Human
ccgcucccugccaccagggcugaagaugcgag

SEQ ID NO: 110775 - RNA, 20 nt, Human
ccgcucccugccccgaggca

SEQ ID NO: 110776 - RNA, 32 nt, Human
ccgcucccuucccagccucgcuccucuuuccu

SEQ ID NO: 110777 - RNA, 19 nt, Human
ccgcuccgcagccccgggc

SEQ ID NO: 110778 - RNA, 32 nt, Human
ccgcuccgcccccucccucucccuugagaagc

SEQ ID NO: 110779 - RNA, 18 nt, Human
ccgcuccgccccgggaca

SEQ ID NO: 110780 - RNA, 32 nt, Human
ccgcuccgccgcgcuccagccucgcucuccgc

SEQ ID NO: 110781 - RNA, 32 nt, Human
ccgcuccgccuugccaggagucugcagaacca

SEQ ID NO: 110782 - RNA, 32 nt, Human
ccgcuccgggagcugcucaucagccgcaacuu

SEQ ID NO: 110783 - RNA, 32 nt, Human
ccgcuccuccacccagugcuucugcccaugcc

SEQ ID NO: 110784 - RNA, 32 nt, Human
ccgcuccuccgggggaaugaaagcuacugguu

SEQ ID NO: 110785 - RNA, 32 nt, Human
ccgcuccucuagucgcccuccgcuggccccgc

SEQ ID NO: 110786 - RNA, 20 nt, Human
ccgcuccugcccaggccuca

SEQ ID NO: 110787 - RNA, 32 nt, Human
ccgcuccugccugcgcccgcagcugaccuucu

SEQ ID NO: 110788 - RNA, 32 nt, Human
ccgcuccugccuggucugggcuguguguggcg

SEQ ID NO: 110789 - RNA, 21 nt, Human
ccgcuccugcugcugcucuga

SEQ ID NO: 110790 - RNA, 32 nt, Human
ccgcuccuguuggagcccccauacgcccgagc

SEQ ID NO: 110791 - RNA, 32 nt, Human
ccgcucgagcccagccucucccugccaaagcc

SEQ ID NO: 110792 - RNA, 22 nt, Human
ccgcucgcaccgcacucugacc

SEQ ID NO: 110793 - RNA, 32 nt, Human
ccgcucgcagcaaccucugccucccagguuca

SEQ ID NO: 110794 - RNA, 32 nt, Human
ccgcucgcccuccagguucugccacuugcugg

SEQ ID NO: 110795 - RNA, 32 nt, Human
ccgcucgccgccuuccucccucugccuuccuu

SEQ ID NO: 110796 - RNA, 21 nt, Human
ccgcucgcgcggccucgaguc

SEQ ID NO: 110797 - RNA, 23 nt, Human
ccgcucgcggugccucuggguca

SEQ ID NO: 110798 - RNA, 32 nt, Human
ccgcucgcuacaaccuccaccucccagcugcc

SEQ ID NO: 110799 - RNA, 32 nt, Human
ccgcucgcuccgccccgcgaagccccugcgcg

SEQ ID NO: 110800 - RNA, 32 nt, Human
ccgcucgcugcaaccaccaucuccuggguuca

SEQ ID NO: 110801 - RNA, 19 nt, Human
ccgcucggcgcuccgggcu

SEQ ID NO: 110802 - RNA, 32 nt, Human
ccgcucggcugcgcugcggcucaggcccccgc

SEQ ID NO: 110803 - RNA, 32 nt, Human
ccgcucgggaggcugaggcaggagaauugcuu

SEQ ID NO: 110804 - RNA, 18 nt, Human
ccgcucgggccccgagcc

SEQ ID NO: 110805 - RNA, 32 nt, Human
ccgcucgggggaagcccagugggauuugcauc

SEQ ID NO: 110806 - RNA, 32 nt, Human
ccgcucgggugaagcccagugggauuugcauc

SEQ ID NO: 110807 - RNA, 17 nt, Human
ccgcucucacccgggcc

SEQ ID NO: 110808 - RNA, 32 nt, Human
ccgcucuccacggcacccccacugcaggcugu

SEQ ID NO: 110809 - RNA, 32 nt, Human
ccgcucuccagccaagguuccgggcugaggca

SEQ ID NO: 110810 - RNA, 32 nt, Human
ccgcucuccuccccggcacaggcagggggucu

SEQ ID NO: 110811 - RNA, 32 nt, Human
ccgcucucucaggcccucagggucaaggccuu

SEQ ID NO: 110812 - RNA, 32 nt, Human
ccgcucucuggcccuaagugcugagcugccgg

SEQ ID NO: 110813 - RNA, 32 nt, Human
ccgcucugaaacagacagaggcuggaacuuug

SEQ ID NO: 110814 - RNA, 32 nt, Human
ccgcucugauguugcuagaccuccucagcacu

SEQ ID NO: 110815 - RNA, 32 nt, Human
ccgcucugcucgcgcccugccgcugcgccgcc

SEQ ID NO: 110816 - RNA, 32 nt, Human
ccgcucuggaaaggaagagaaauggaagugag

SEQ ID NO: 110817 - RNA, 32 nt, Human
ccgcucuggacuagcaguggcuccccagggcc

SEQ ID NO: 110818 - RNA, 32 nt, Human
ccgcucuggcucgaggguggucugagcacuuc

SEQ ID NO: 110819 - RNA, 32 nt, Human
ccgcucugggcgagccuccuccccagccccca

SEQ ID NO: 110820 - RNA, 21 nt, Human
ccgcucuguaucccccuggug

SEQ ID NO: 110821 - RNA, 32 nt, Human
ccgcucugugacacagucuaccugucugcaaa

SEQ ID NO: 110822 - RNA, 32 nt, Human
ccgcucuguuugcuuuugccccgcucuggcuu

SEQ ID NO: 110823 - RNA, 32 nt, Human
ccgcucuuccaaguggacggcagaccugggag

SEQ ID NO: 110824 - RNA, 32 nt, Human
ccgcucuuccaggacggccucugugcugcugg

SEQ ID NO: 110825 - RNA, 20 nt, Human
ccgcucuucucucccgagcc

SEQ ID NO: 110826 - RNA, 32 nt, Human
ccgcucuuugcaucuugucuugcccacagcug

SEQ ID NO: 110827 - RNA, 32 nt, Human
ccgcugaaccgucagcuggcuguggugugggc

SEQ ID NO: 110828 - RNA, 32 nt, Human
ccgcugacaaggcgcuccagccccagagccag

SEQ ID NO: 110829 - RNA, 32 nt, Human
ccgcugagaggguggcgacgucggggccaugg

SEQ ID NO: 110830 - RNA, 32 nt, Human
ccgcugagccacaguccuccuaggcaaugccu

SEQ ID NO: 110831 - RNA, 20 nt, Human
ccgcugagcgcccccgagcc

SEQ ID NO: 110832 - RNA, 18 nt, Human
ccgcugagcgcccgagcc

SEQ ID NO: 110833 - RNA, 32 nt, Human
ccgcugaggaagagucuccucugaggggagag

SEQ ID NO: 110834 - RNA, 32 nt, Human
ccgcugaggccgcggcgcccgccagccugucc

SEQ ID NO: 110835 - RNA, 32 nt, Human
ccgcugaggggcugagggaagggggucaaagg

SEQ ID NO: 110836 - RNA, 32 nt, Human
ccgcugaggugccagaagcagcgaggagcuuc

SEQ ID NO: 110837 - RNA, 32 nt, Human
ccgcugagucugcacccaggagaccagagagc

SEQ ID NO: 110838 - RNA, 32 nt, Human
ccgcugaguggguuauugaugaucucaagagu

SEQ ID NO: 110839 - RNA, 32 nt, Human
ccgcugauagcugcgcaacagccuggguucuu

SEQ ID NO: 110840 - RNA, 32 nt, Human
ccgcugaucuuugcuucaguccuugaaucacc

SEQ ID NO: 110841 - RNA, 20 nt, Human
ccgcugcaaguacaggugga

SEQ ID NO: 110842 - RNA, 18 nt, Human
ccgcugcaccuccgggcc

SEQ ID NO: 110843 - RNA, 23 nt, Human
ccgcugcacggggccacuaggac

SEQ ID NO: 110844 - RNA, 23 nt, Human
ccgcugcacuccagccugggcca

SEQ ID NO: 110845 - RNA, 22 nt, Human
ccgcugcacucgcccucuccuc

SEQ ID NO: 110846 - RNA, 32 nt, Human
ccgcugcacuguaggagccccuuucugggcug

SEQ ID NO: 110847 - RNA, 32 nt, Human
ccgcugcagagccgagcgaaucccgagcccgg

SEQ ID NO: 110848 - RNA, 32 nt, Human
ccgcugcagcccacagcaacccacaggccgag

SEQ ID NO: 110849 - RNA, 32 nt, Human
ccgcugcagccgccuccuccuccaggcaaaca

SEQ ID NO: 110850 - RNA, 32 nt, Human
ccgcugcagccgccuccuccuccaggugcuga

SEQ ID NO: 110851 - RNA, 31 nt, Human
ccgcugcagccgcggcugcggcggcggccgc

SEQ ID NO: 110852 - RNA, 32 nt, Human
ccgcugcagccgucgcugucuccucccagacc

SEQ ID NO: 110853 - RNA, 23 nt, Human
ccgcugcaggccccugucgagcu

SEQ ID NO: 110854 - RNA, 32 nt, Human
ccgcugcaggguggcaucuuaggguaggggaa

SEQ ID NO: 110855 - RNA, 23 nt, Human
ccgcugccacacugcccugagcc

SEQ ID NO: 110856 - RNA, 32 nt, Human
ccgcugccacaucuuccaagauacgggaaauc

SEQ ID NO: 110857 - RNA, 22 nt, Human
ccgcugccaccucgcccagcca

SEQ ID NO: 110858 - RNA, 22 nt, Human
ccgcugccacugcuccugagcc

SEQ ID NO: 110859 - RNA, 19 nt, Human
ccgcugccagccuugagcc

SEQ ID NO: 110860 - RNA, 19 nt, Human
ccgcugccagucccgggcc

SEQ ID NO: 110861 - RNA, 32 nt, Human
ccgcugcccacacagcaguuuggcgucagucu

SEQ ID NO: 110862 - RNA, 20 nt, Human
ccgcugcccacgucccgggc

SEQ ID NO: 110863 - RNA, 32 nt, Human
ccgcugcccaggagccaggucugaacuucugu

SEQ ID NO: 110864 - RNA, 22 nt, Human
ccgcugcccagguccccgagcu

SEQ ID NO: 110865 - RNA, 32 nt, Human
ccgcugccccagcuacagagacggccgaaaug

SEQ ID NO: 110866 - RNA, 32 nt, Human
ccgcugcccccauuccuucuccauacaugguu

SEQ ID NO: 110867 - RNA, 18 nt, Human
ccgcugccccccaaggaa

SEQ ID NO: 110868 - RNA, 17 nt, Human
ccgcugccccccggguc

SEQ ID NO: 110869 - RNA, 17 nt, Human
ccgcugccccugggcca

SEQ ID NO: 110870 - RNA, 19 nt, Human
ccgcugcccgcccugggcc

SEQ ID NO: 110871 - RNA, 20 nt, Human
ccgcugcccgcccugggcca

SEQ ID NO: 110872 - RNA, 19 nt, Human
ccgcugcccgcccuggguc

SEQ ID NO: 110873 - RNA, 22 nt, Human
ccgcugcccucagcuccgaguc

SEQ ID NO: 110874 - RNA, 32 nt, Human
ccgcugcccucgggggcauggcgcggccguga

SEQ ID NO: 110875 - RNA, 21 nt, Human
ccgcugcccucugcccugggc

SEQ ID NO: 110876 - RNA, 20 nt, Human
ccgcugcccuggccuugagc

SEQ ID NO: 110877 - RNA, 32 nt, Human
ccgcugccgcagccuggcuggggagggggcca

SEQ ID NO: 110878 - RNA, 23 nt, Human
ccgcugccgccaccgccgugccg

SEQ ID NO: 110879 - RNA, 19 nt, Human
ccgcugccgcccugaguca

SEQ ID NO: 110880 - RNA, 18 nt, Human
ccgcugccgccgccgccg

SEQ ID NO: 110881 - RNA, 23 nt, Human
ccgcugccgccgccgcuaccgcc

SEQ ID NO: 110882 - RNA, 17 nt, Human
ccgcugccgccucagcu

SEQ ID NO: 110883 - RNA, 17 nt, Human
ccgcugccgcugcagcc

SEQ ID NO: 110884 - RNA, 32 nt, Human
ccgcugccgguggcagguguugcaccgcgugg

SEQ ID NO: 110885 - RNA, 32 nt, Human
ccgcugccucagccucugccucccagccucuu

SEQ ID NO: 110886 - RNA, 32 nt, Human
ccgcugccuccagggagggcuggacggcgagc

SEQ ID NO: 110887 - RNA, 32 nt, Human
ccgcugccucccccaucuccccgccaucugca

SEQ ID NO: 110888 - RNA, 17 nt, Human
ccgcugccuccugggcc

SEQ ID NO: 110889 - RNA, 20 nt, Human
ccgcugccucugccccggcc

SEQ ID NO: 110890 - RNA, 32 nt, Human
ccgcugccucugggcccucccagcacacgcau

SEQ ID NO: 110891 - RNA, 18 nt, Human
ccgcugccugaagcccgg

SEQ ID NO: 110892 - RNA, 23 nt, Human
ccgcugccugcacggcgaugaga

SEQ ID NO: 110893 - RNA, 32 nt, Human
ccgcugccugcaggaagacgcccggucccggg

SEQ ID NO: 110894 - RNA, 18 nt, Human
ccgcugccugcccugacc

SEQ ID NO: 110895 - RNA, 32 nt, Human
ccguucaggagcagaauuuucccacuguaaaa

SEQ ID NO: 110896 - RNA, 32 nt, Human
ccguucaucucugaaacccagcauccuuuuca

SEQ ID NO: 110897 - RNA, 19 nt, Human
ccguucaugagcacagugu

SEQ ID NO: 110898 - RNA, 32 nt, Human
ccguucaugccuguaaucccaacauuuuggga

SEQ ID NO: 110899 - RNA, 19 nt, Human
ccguuccaaaacccacuca

SEQ ID NO: 110900 - RNA, 32 nt, Human
ccguuccaacagcauucacugccaguucuaau

SEQ ID NO: 110901 - RNA, 32 nt, Human
ccguucccacagcaccuggcacacagcaggag

SEQ ID NO: 110902 - RNA, 32 nt, Human
ccguucccagaggcuccuccugcggugcuccc

SEQ ID NO: 110903 - RNA, 32 nt, Human
ccguuccccuccccgcucuucuuccaacuccu

SEQ ID NO: 110904 - RNA, 32 nt, Human
ccguuccccugcacuccucuucucccagccca

SEQ ID NO: 110905 - RNA, 32 nt, Human
ccguucccuccagccccuugcugguuaucuua

SEQ ID NO: 110906 - RNA, 18 nt, Human
ccguucccugagcucagu

SEQ ID NO: 110907 - RNA, 32 nt, Human
ccguucccugcucccguccuguugacucugcc

SEQ ID NO: 110908 - RNA, 21 nt, Human
ccguucccugcucuggcccgc

SEQ ID NO: 110909 - RNA, 31 nt, Human
ccguuccgccucucugugggccucucuccag

SEQ ID NO: 110910 - RNA, 32 nt, Human
ccguuccuccacccgcuccucuuguggccaga

SEQ ID NO: 110911 - RNA, 32 nt, Human
ccguuccuccacucaucuguuucuccgguucu

SEQ ID NO: 110912 - RNA, 32 nt, Human
ccguuccugccuggagagaagcuuccagacca

SEQ ID NO: 110913 - RNA, 22 nt, Human
ccguuccuucaaagcaaauguc

SEQ ID NO: 110914 - RNA, 32 nt, Human
ccguucgagggucagaggagccuggaugcuaa

SEQ ID NO: 110915 - RNA, 32 nt, Human
ccguucggcccaggcuaaguuagcccucacca

SEQ ID NO: 110916 - RNA, 19 nt, Human
ccguucucagcccugagcc

SEQ ID NO: 110917 - RNA, 32 nt, Human
ccguucuccugccucagccuccccaguagcug

SEQ ID NO: 110918 - RNA, 18 nt, Human
ccguucucgcucccggcc

SEQ ID NO: 110919 - RNA, 32 nt, Human
ccguucucucagggacucucagggcagcuccu

SEQ ID NO: 110920 - RNA, 22 nt, Human
ccguucugaggcgccccgagcu

SEQ ID NO: 110921 - RNA, 32 nt, Human
ccguucugcccgaggaugaagaauaugagacu

SEQ ID NO: 110922 - RNA, 32 nt, Human
ccguucuuccaccuccuccucuuccucagaca

SEQ ID NO: 110923 - RNA, 32 nt, Human
ccguugaacaguuugcuggucuugccuggcag

SEQ ID NO: 110924 - RNA, 32 nt, Human
  misc_feature (28)..(28): n is a, c, g, or u
ccguugaagcuaauauucaguucuguanaguu

SEQ ID NO: 110925 - RNA, 32 nt, Human
ccguugaaugcaagcucucuucugccuucuca

SEQ ID NO: 110926 - RNA, 32 nt, Human
ccguugaccagauaaauagaacuaucugcauu

SEQ ID NO: 110927 - RNA, 32 nt, Human
ccguugaccccaaagccucagggcuuaugucc

SEQ ID NO: 110928 - RNA, 32 nt, Human
ccguugaggagaagugggaacggagggaaggg

SEQ ID NO: 110929 - RNA, 23 nt, Human
ccguugcaggaggucuugagcca

SEQ ID NO: 110930 - RNA, 32 nt, Human
ccguugccacuuuaccacccgccugauccugg

SEQ ID NO: 110931 - RNA, 32 nt, Human
ccguugcccacugcaaguucucuccaggugca

SEQ ID NO: 110932 - RNA, 32 nt, Human
ccguugcccaggacacuggcuggccuuccuuc

SEQ ID NO: 110933 - RNA, 32 nt, Human
ccguugcccaggcuggagggcagugacgugau

SEQ ID NO: 110934 - RNA, 32 nt, Human
ccguugcccaggcuggaguacaauggugcgau

SEQ ID NO: 110935 - RNA, 32 nt, Human
ccguugcccaggcuggagugcgguggcaugau

SEQ ID NO: 110936 - RNA, 32 nt, Human
ccguugcccagguuggagugcaguggcccauc

SEQ ID NO: 110937 - RNA, 32 nt, Human
ccguugcccugagcugcagccucggccccagg

SEQ ID NO: 110938 - RNA, 21 nt, Human
ccguugccgcgcgccugagcc

SEQ ID NO: 110939 - RNA, 32 nt, Human
ccguugccuaggaaggguugggccgcagguuu

SEQ ID NO: 110940 - RNA, 32 nt, Human
ccguugccuguuguucgguugugugacuaauu

SEQ ID NO: 110941 - RNA, 32 nt, Human
ccguugccuuucucugguacuggugucuuacc

SEQ ID NO: 110942 - RNA, 21 nt, Human
ccguugcgcuugcucccgggc

SEQ ID NO: 110943 - RNA, 32 nt, Human
ccguugcguucugcauccaguccuugcugcuc

SEQ ID NO: 110944 - RNA, 32 nt, Human
ccguugcuaagcugucaacauaccaagcuguu

SEQ ID NO: 110945 - RNA, 20 nt, Human
ccguugcuaaugccaggcca

SEQ ID NO: 110946 - RNA, 32 nt, Human
ccguugcugccgucaccgccuccugggucguc

SEQ ID NO: 110947 - RNA, 19 nt, Human
ccguugcuugaccccgggc

SEQ ID NO: 110948 - RNA, 20 nt, Human
ccguugcuuguucugcagcc

SEQ ID NO: 110949 - RNA, 32 nt, Human
ccguugcuuguucugcagcccugucuacuugg

SEQ ID NO: 110950 - RNA, 32 nt, Human
ccguuggagguggcugcggcagcugauguggc

SEQ ID NO: 110951 - RNA, 19 nt, Human
ccguuggcagcagcagcag

SEQ ID NO: 110952 - RNA, 32 nt, Human
ccguuggccauccuggcccucccaggagaagc

SEQ ID NO: 110953 - RNA, 18 nt, Human
ccguuggcucccugagcu

SEQ ID NO: 110954 - RNA, 32 nt, Human
ccguugggagccugagacucaaacauggcagc

SEQ ID NO: 110955 - RNA, 32 nt, Human
ccguugggcccaggcuuccuccccuccaaggu

SEQ ID NO: 110956 - RNA, 32 nt, Human
ccguuggugggagagacaaaaagagggagagu

SEQ ID NO: 110957 - RNA, 32 nt, Human
ccguuguaccaaguggagcaggugguugcggg

SEQ ID NO: 110958 - RNA, 32 nt, Human
ccguugucacugcccccgccucuucagcaaga

SEQ ID NO: 110959 - RNA, 32 nt, Human
ccguugucccagcucaggauggacccucagaa

SEQ ID NO: 110960 - RNA, 32 nt, Human
ccguuguggggaggggcaguguuagagcaggg

SEQ ID NO: 110961 - RNA, 32 nt, Human
ccguuguuuuaccuuccuauuucccaaacagu

SEQ ID NO: 110962 - RNA, 23 nt, Human
ccguuuaaacauuucguccuccu

SEQ ID NO: 110963 - RNA, 32 nt, Human
ccguuuaugaggaaaacugagcaggguggcaa

SEQ ID NO: 110964 - RNA, 32 nt, Human
ccguuucagcacauccauucuguccaucucca

SEQ ID NO: 110965 - RNA, 32 nt, Human
ccguuuccagugagcagaugucuugcuuggaa

SEQ ID NO: 110966 - RNA, 32 nt, Human
ccguuucccacuccucuucaaccgucagcgac

SEQ ID NO: 110967 - RNA, 32 nt, Human
ccguuuccuugggaacuggagugcaguaugag

SEQ ID NO: 110968 - RNA, 32 nt, Human
ccguuucuacucaccuccgccuccaggaagac

SEQ ID NO: 110969 - RNA, 32 nt, Human
ccguuucuaugagagauugaugaacuuuguuu

SEQ ID NO: 110970 - RNA, 32 nt, Human
ccguuucucuccccaucuuggcugcuguccug

SEQ ID NO: 110971 - RNA, 32 nt, Human
ccguuucuuaggugugagaggggcuguggcuu

SEQ ID NO: 110972 - RNA, 31 nt, Human
ccguuugcaaggucucccaauuguggcgggg

SEQ ID NO: 110973 - RNA, 32 nt, Human
ccguuugcaguggcucaagccuguaaugucag

SEQ ID NO: 110974 - RNA, 23 nt, Human
ccguuugccuguccacacccccu

SEQ ID NO: 110975 - RNA, 18 nt, Human
ccguuuggcugcuuagca

SEQ ID NO: 110976 - RNA, 32 nt, Human
ccguuugucgccaggcuggagugcaguggugc

SEQ ID NO: 110977 - RNA, 32 nt, Human
ccguuuucaacacuugugccuugggguguuca

SEQ ID NO: 110978 - RNA, 32 nt, Human
ccguuuucacacugcuauaaagaacuucccug

SEQ ID NO: 110979 - RNA, 32 nt, Human
ccguuuucucacagcccucuggcuuuuccacc

SEQ ID NO: 110980 - RNA, 32 nt, Human
ccguuuucucacuguuggacucuaccucacug

SEQ ID NO: 110981 - RNA, 32 nt, Human
ccguuuucuuccugcaugauccugggcccucc

SEQ ID NO: 110982 - RNA, 32 nt, Human
ccguuuucuuccugccaagccugaaucaaugu

SEQ ID NO: 110983 - RNA, 32 nt, Human
ccguuuucuugccuuuuccagguuggaggaug

SEQ ID NO: 110984 - RNA, 32 nt, Human
ccguuuugcaccaguugccugcagguuggaug

SEQ ID NO: 110985 - RNA, 32 nt, Human
ccguuuuggaaccugcgucuggggcuccaguc

SEQ ID NO: 110986 - RNA, 32 nt, Human
ccguuuuggugccacacugggguggggauggg

SEQ ID NO: 110987 - RNA, 32 nt, Human
ccguuuuucuccuuuccuuucauuccaaaaag

SEQ ID NO: 110988 - RNA, 32 nt, Human
ccuaaaaacagcucuccucuuccacgacaaac

SEQ ID NO: 110989 - RNA, 32 nt, Human
ccuaaaaaccaauuuacaaucugacugucucu

SEQ ID NO: 110990 - RNA, 32 nt, Human
ccuaaaaacuugaggaaggaagaugauagaac

SEQ ID NO: 110991 - RNA, 31 nt, Human
ccuaaaaagagacccuggggcuggguguggu

SEQ ID NO: 110992 - RNA, 32 nt, Human
ccuaaaaagccaccaccacuagugaaacaacc

SEQ ID NO: 110993 - RNA, 23 nt, Human
ccuaaaaaugguuucuuucuccu

SEQ ID NO: 110994 - RNA, 32 nt, Human
ccuaaaacaacagauguacgacuugcauaccu

SEQ ID NO: 110995 - RNA, 32 nt, Human
ccuaaaacugagguggggauggggagagccuu

SEQ ID NO: 110996 - RNA, 32 nt, Human
ccuaaaacugagguggggauggggagaggcuu

SEQ ID NO: 110997 - RNA, 32 nt, Human
ccuaaaagacaauuuuccuuggaacacauaag

SEQ ID NO: 110998 - RNA, 32 nt, Human
ccuaaaauaagggaagagaguugcuucuacuc

SEQ ID NO: 110999 - RNA, 32 nt, Human
ccuaaaaucccagcuacucgggagacuaggca

SEQ ID NO: 111000 - RNA, 32 nt, Human
ccuaaaaucccagcuacuugagagacugaggc

SEQ ID NO: 111001 - RNA, 32 nt, Human
ccuaaaauguacaauguaacuuguucagucca

SEQ ID NO: 111002 - RNA, 32 nt, Human
ccuaaaauguuaacugggcaugguggcucaug

SEQ ID NO: 111003 - RNA, 32 nt, Human
ccuaaaauuccuuccaguucaaaggcagauaa

SEQ ID NO: 111004 - RNA, 32 nt, Human
ccuaaacaaccgagcaagacaagccacuccga

SEQ ID NO: 111005 - RNA, 32 nt, Human
ccuaaacacagcauggcaacucaucuacucac

SEQ ID NO: 111006 - RNA, 32 nt, Human
ccuaaacacagcugccuccaaggaccgcugcc

SEQ ID NO: 111007 - RNA, 32 nt, Human
ccuaaacacccacccaaugggagaggcugaua

SEQ ID NO: 111008 - RNA, 23 nt, Human
ccuaaacaggguggggggcgcgg

SEQ ID NO: 111009 - RNA, 32 nt, Human
ccuaaacaggugugaauauauguaaguugaaa

SEQ ID NO: 111010 - RNA, 32 nt, Human
ccuaaaccaaaaacugaaagugaaaguccaga

SEQ ID NO: 111011 - RNA, 32 nt, Human
ccuaaaccagccugggcaacauagugauaccu

SEQ ID NO: 111012 - RNA, 18 nt, Human
ccuaaacccucugugaaa

SEQ ID NO: 111013 - RNA, 32 nt, Human
ccuaaaccggaagaggaugacaccggccaugg

SEQ ID NO: 111014 - RNA, 32 nt, Human
ccuaaaccuacugccacuuaggugcaugcaag

SEQ ID NO: 111015 - RNA, 32 nt, Human
ccuaaacggugacucucauucuuuaacaggau

SEQ ID NO: 111016 - RNA, 32 nt, Human
ccuaaacuacgguaaugagaucagccccuuaa

SEQ ID NO: 111017 - RNA, 32 nt, Human
ccuaaacuagcgggcaccacagaccagcugca

SEQ ID NO: 111018 - RNA, 32 nt, Human
ccuaaacuaggguuugcacagcccccuuucug

SEQ ID NO: 111019 - RNA, 32 nt, Human
ccuaaacucucaucuccuguggcccaacaugg

SEQ ID NO: 111020 - RNA, 32 nt, Human
ccuaaacugagcugaauguuuguuucagugcc

SEQ ID NO: 111021 - RNA, 15 nt, Human
ccuaaacugauccua

SEQ ID NO: 111022 - RNA, 32 nt, Human
ccuaaacuggugcucacaccuuacucaacauu

SEQ ID NO: 111023 - RNA, 32 nt, Human
ccuaaacugugccauuuauaagaucucugaca

SEQ ID NO: 111024 - RNA, 32 nt, Human
ccuaaacugugccauuugaacagucacuucca

SEQ ID NO: 111025 - RNA, 32 nt, Human
ccuaaacuuaucugggaaggcuggggaaguag

SEQ ID NO: 111026 - RNA, 32 nt, Human
ccuaaacuugcacucugcuccaucucagccaa

SEQ ID NO: 111027 - RNA, 32 nt, Human
ccuaaacuuuauuauugcacacugccugaaca

SEQ ID NO: 111028 - RNA, 32 nt, Human
ccuaaagaagcuucucucaccaaauaaugaaa

SEQ ID NO: 111029 - RNA, 32 nt, Human
ccuaaagagggagccuguggguucucagagag

SEQ ID NO: 111030 - RNA, 32 nt, Human
ccuaaagauaaauaauaucaaaauagugucau

SEQ ID NO: 111031 - RNA, 32 nt, Human
ccuaaagaucccuggcauuggccagggauccu

SEQ ID NO: 111032 - RNA, 18 nt, Human
ccuaaagcaggaggccag

SEQ ID NO: 111033 - RNA, 32 nt, Human
ccuaaagccagcauuuccucagucucccuuug

SEQ ID NO: 111034 - RNA, 32 nt, Human
ccuaaagccuccaugcuggagagaccaugugg

SEQ ID NO: 111035 - RNA, 19 nt, Human
ccuaaaggaagcccucugg

SEQ ID NO: 111036 - RNA, 18 nt, Human
ccuaaaggagaacauggg

SEQ ID NO: 111037 - RNA, 23 nt, Human
ccuaaaggaggcauuucuucccc

SEQ ID NO: 111038 - RNA, 32 nt, Human
ccuaaaggagucaguggggaacuccacgcgca

SEQ ID NO: 111039 - RNA, 32 nt, Human
ccuaaaggauccucuggaagcuguauuucuug

SEQ ID NO: 111040 - RNA, 32 nt, Human
ccuaaaggccacacccuccccacgcacuuccc

SEQ ID NO: 111041 - RNA, 32 nt, Human
ccuaaaggcugcaggcugccaggugugcuugg

SEQ ID NO: 111042 - RNA, 32 nt, Human
ccuaaaggguugaaguacaaucaagcuacaca

SEQ ID NO: 111043 - RNA, 23 nt, Human
ccuaaagucccagcuacuuggga

SEQ ID NO: 111044 - RNA, 32 nt, Human
ccuaaagucccagcuacuugggagguugaggc

SEQ ID NO: 111045 - RNA, 24 nt, Human
ccuaaagugcuaggauuacaggca

SEQ ID NO: 111046 - RNA, 24 nt, Human
ccuaaagugcugggauuacaggca

SEQ ID NO: 111047 - RNA, 32 nt, Human
ccuaaaguuuacuucauugucuugaggcuucc

SEQ ID NO: 111048 - RNA, 32 nt, Human
ccuaaauagaggguaaagugagccuagccagg

SEQ ID NO: 111049 - RNA, 32 nt, Human
ccuaaaucacaauauggccuugguaugguuuu

SEQ ID NO: 111050 - RNA, 32 nt, Human
ccuaaaucauuucccaaucuauucuaauuacc

SEQ ID NO: 111051 - RNA, 32 nt, Human
ccuaaaucauuuccccucccucccucccuccc

SEQ ID NO: 111052 - RNA, 32 nt, Human
ccuaaaucucccccacugacuguuucuccccg

SEQ ID NO: 111053 - RNA, 32 nt, Human
ccuaaaugcgaagccgggugacccuggacuuc

SEQ ID NO: 111054 - RNA, 32 nt, Human
ccuaaaugcuacuguuccaaagagcaacuuga

SEQ ID NO: 111055 - RNA, 32 nt, Human
ccuaaaugcuccuccagcaucuguuucucccu

SEQ ID NO: 111056 - RNA, 30 nt, Human
ccuaaauggcucucuggacaaugugcauga

SEQ ID NO: 111057 - RNA, 32 nt, Human
ccuaaauguggacaucaugaagcaucaaagca

SEQ ID NO: 111058 - RNA, 32 nt, Human
ccuaaauguuagcuucuccauccucaccacau

SEQ ID NO: 111059 - RNA, 32 nt, Human
ccuaaauguuggaagcacaaaaugguugugau

SEQ ID NO: 111060 - RNA, 32 nt, Human
ccuaaauuaaggcuuaaagaaugagcauggcc

SEQ ID NO: 111061 - RNA, 32 nt, Human
ccuaaauucagucagacauuuuggauuaagaa

SEQ ID NO: 111062 - RNA, 32 nt, Human
ccuaaauuccaggaaucuuccccaaaucccag

SEQ ID NO: 111063 - RNA, 32 nt, Human
ccuaaauuuucaggacccuagaggagggcuuu

SEQ ID NO: 111064 - RNA, 32 nt, Human
ccuaacacccacccucucccccuucagccaug

SEQ ID NO: 111065 - RNA, 19 nt, Human
ccuaacacugggcugcaga

SEQ ID NO: 111066 - RNA, 32 nt, Human
ccuaacagacacaaauccuuccucaaucaaua

SEQ ID NO: 111067 - RNA, 32 nt, Human
ccuaacagcaacaacaaagacagacuuuccgu

SEQ ID NO: 111068 - RNA, 32 nt, Human
ccuaacagccucccucuccuccuccuucccca

SEQ ID NO: 111069 - RNA, 30 nt, Human
ccuaacagccucucggugcugaugugaaau

SEQ ID NO: 111070 - RNA, 32 nt, Human
ccuaacagcucuguucccuccugcuuugguuu

SEQ ID NO: 111071 - RNA, 24 nt, Human
ccuaacagggcuggagguccaggc

SEQ ID NO: 111072 - RNA, 32 nt, Human
ccuaacaguugcagauaugagcuguauaauug

SEQ ID NO: 111073 - RNA, 23 nt, Human
ccuaacaguuuuuuaguggauuc

SEQ ID NO: 111074 - RNA, 32 nt, Human
ccuaacauaugcauuggucaagguugcagcaa

SEQ ID NO: 111075 - RNA, 23 nt, Human
ccuaacauccaggaaacaaauga

SEQ ID NO: 111076 - RNA, 32 nt, Human
ccuaacauccaguaauggggaccuggaaccug

SEQ ID NO: 111077 - RNA, 32 nt, Human
ccuaacauggaguuaacuggaauagcaguaca

SEQ ID NO: 111078 - RNA, 31 nt, Human
ccuaaccagagagaggggcgugggagggaga

SEQ ID NO: 111079 - RNA, 32 nt, Human
ccuaaccagccacugcagcccuccagcucugg

SEQ ID NO: 111080 - RNA, 32 nt, Human
ccuaaccagcuauuggugggaaugacggaacu

SEQ ID NO: 111081 - RNA, 32 nt, Human
ccuaaccaggaucaggcaggagggcagggaug

SEQ ID NO: 111082 - RNA, 32 nt, Human
ccuaacccuacccagccugcugccucagcaca

SEQ ID NO: 111083 - RNA, 32 nt, Human
ccuaacccuacccucacuuucguccccgcucu

SEQ ID NO: 111084 - RNA, 32 nt, Human
ccuaacccugguguaguuucuuucaagaguga

SEQ ID NO: 111085 - RNA, 32 nt, Human
ccuaacccuucccaccaggguagcuuugggca

SEQ ID NO: 111086 - RNA, 32 nt, Human
ccuaacccuucccacucugucaccuucucgau

SEQ ID NO: 111087 - RNA, 32 nt, Human
ccuaaccuaagcugcuuccuggaaagcuucau

SEQ ID NO: 111088 - RNA, 23 nt, Human
ccuaaccucaaagggucguggug

SEQ ID NO: 111089 - RNA, 21 nt, Human
ccuaaccugggagacggaaga

SEQ ID NO: 111090 - RNA, 32 nt, Human
ccuaacguauccccuguugucuugcuucuucu

SEQ ID NO: 111091 - RNA, 32 nt, Human
ccuaacguucuucuugaauaacuaauacagug

SEQ ID NO: 111092 - RNA, 32 nt, Human
ccuaacuacagggagugcuggggaagugugau

SEQ ID NO: 111093 - RNA, 32 nt, Human
ccuaacucagcuuuauuugacauggaaccuaa

SEQ ID NO: 111094 - RNA, 32 nt, Human
ccuaacuccaaagccugcguucucaucccagu

SEQ ID NO: 111095 - RNA, 32 nt, Human
ccuaacugcaugcagauguggaaaggggcuga

SEQ ID NO: 111096 - RNA, 32 nt, Human
ccuaacugcggcggaaacgugggagccgcgcg

SEQ ID NO: 111097 - RNA, 32 nt, Human
ccuaacugcuuagcccagccugacugaucccc

SEQ ID NO: 111098 - RNA, 32 nt, Human
ccuaacuuaauagguagaaagacugaaaaccu

SEQ ID NO: 111099 - RNA, 32 nt, Human
ccuaacuuucgggcagccucagggggcccccg

SEQ ID NO: 111100 - RNA, 20 nt, Human
ccuaagaaacuucugccucc

SEQ ID NO: 111101 - RNA, 32 nt, Human
ccuaagaaaugccagaacaaccaccuuauuuc

SEQ ID NO: 111102 - RNA, 32 nt, Human
ccuaagaacagguuugcagcuacccucucuga

SEQ ID NO: 111103 - RNA, 32 nt, Human
ccuaagaagucacaugaacauauuucacauuu

SEQ ID NO: 111104 - RNA, 21 nt, Human
ccuaagaaguucaucccuccu

SEQ ID NO: 111105 - RNA, 32 nt, Human
ccuaagaccacuccugaauugucuccucuccc

SEQ ID NO: 111106 - RNA, 17 nt, Human
ccuaagacugucacuca

SEQ ID NO: 111107 - RNA, 32 nt, Human
ccuaagacuucucuuuugcacaucuagugagg

SEQ ID NO: 111108 - RNA, 32 nt, Human
ccuaagagccuucaugcacaccccugaaccac

SEQ ID NO: 111109 - RNA, 32 nt, Human
ccuaagaggaagagaaggagagccaggcaugg

SEQ ID NO: 111110 - RNA, 32 nt, Human
ccuaagaggcagcauggugugguagaaagaac

SEQ ID NO: 111111 - RNA, 32 nt, Human
ccuaagaggcgacuuccucuccagccuucucu

SEQ ID NO: 111112 - RNA, 32 nt, Human
ccuaagaguggaggaggaggaggagccuugcu

SEQ ID NO: 111113 - RNA, 32 nt, Human
ccuaagaguggcugccccugcuugggacauua

SEQ ID NO: 111114 - RNA, 32 nt, Human
ccuaagaguuaccacuuccguagccuauaaca

SEQ ID NO: 111115 - RNA, 32 nt, Human
ccuaagauauugagacaggcuggaguccagag

SEQ ID NO: 111116 - RNA, 32 nt, Human
ccuaagaucagcuagacucucugccuuguuuc

SEQ ID NO: 111117 - RNA, 32 nt, Human
ccuaagaucuucaccucucugccucccuacug

SEQ ID NO: 111118 - RNA, 32 nt, Human
ccuaagaugggcaguuuguucuuaaggccaug

SEQ ID NO: 111119 - RNA, 32 nt, Human
ccuaagcagggugggggcagagccaugacauu

SEQ ID NO: 111120 - RNA, 32 nt, Human
ccuaagcagucgcggcugcagugaacaagauc

SEQ ID NO: 111121 - RNA, 32 nt, Human
ccuaagcaugcuuuauuuuuccuugaaagcua

SEQ ID NO: 111122 - RNA, 32 nt, Human
ccuaagccagccucucccuccugacagugccc

SEQ ID NO: 111123 - RNA, 32 nt, Human
ccuaagccccaggaggucgaggcugcagugag

SEQ ID NO: 111124 - RNA, 32 nt, Human
ccuaagccccauccuuuguucuccugcuauga

SEQ ID NO: 111125 - RNA, 32 nt, Human
ccuaagccccaucguagcacaguauuacaugu

SEQ ID NO: 111126 - RNA, 32 nt, Human
ccuaagccccuggcugggcgugguggcgagca

SEQ ID NO: 111127 - RNA, 32 nt, Human
ccuaagcccuaaggagcuccucagcuugaaau

SEQ ID NO: 111128 - RNA, 32 nt, Human
ccuaagcccugacagcauguuucauuucaaca

SEQ ID NO: 111129 - RNA, 32 nt, Human
ccuaagcccugcgaggucuuguggaaccgaca

SEQ ID NO: 111130 - RNA, 32 nt, Human
ccuaagccucuucuccaugugugcacacaggg

SEQ ID NO: 111131 - RNA, 32 nt, Human
ccuaagccuggcccuauccacagggucccugg

SEQ ID NO: 111132 - RNA, 32 nt, Human
ccuaagcgucaucgucauugccauagcaucau

SEQ ID NO: 111133 - RNA, 32 nt, Human
ccuaagcuaucucucaugguuccuauguuuuu

SEQ ID NO: 111134 - RNA, 32 nt, Human
ccuaagcuccgacacuugcuccagaaauagcu

SEQ ID NO: 111135 - RNA, 32 nt, Human
ccuaagcuccuucuuucauucugccauuccuc

SEQ ID NO: 111136 - RNA, 32 nt, Human
ccuaagcucugaccgcuaggcuuucaccccag

SEQ ID NO: 111137 - RNA, 32 nt, Human
ccuaagcugcgccuccugucauuucccugcug

SEQ ID NO: 111138 - RNA, 20 nt, Human
ccuaagcuggagugcagugg

SEQ ID NO: 111139 - RNA, 32 nt, Human
ccuaagcuggucucaaacuccugggcucaagc

SEQ ID NO: 111140 - RNA, 32 nt, Human
ccuaagcuucugauauauaaacauacccgugu

SEQ ID NO: 111141 - RNA, 32 nt, Human
ccuaaggaacuaaauaucauauaguuaauguu

SEQ ID NO: 111142 - RNA, 32 nt, Human
ccuaaggaagaugauuccucugcuaguaccuc

SEQ ID NO: 111143 - RNA, 31 nt, Human
ccuaaggacaaaggaacucuccauuuagaaa

SEQ ID NO: 111144 - RNA, 32 nt, Human
ccuaaggacgagccccagacuggaggagaggu

SEQ ID NO: 111145 - RNA, 32 nt, Human
ccuaaggacuccugccagaccacacagcccac

SEQ ID NO: 111146 - RNA, 18 nt, Human
ccuaaggagggggcgggg

SEQ ID NO: 111147 - RNA, 32 nt, Human
ccuaaggauggagcccaaaauugcagagcagu

SEQ ID NO: 111148 - RNA, 32 nt, Human
ccuaaggcauguugggauagggucagaugcac

SEQ ID NO: 111149 - RNA, 32 nt, Human
ccuaaggcccuccacaguugcauugaaaaugu

SEQ ID NO: 111150 - RNA, 25 nt, Human
ccuaagggaccacacccuuccuccu

SEQ ID NO: 111151 - RNA, 32 nt, Human
ccuaagggacugugagacugagagggcucacg

SEQ ID NO: 111152 - RNA, 32 nt, Human
ccuaagggagagaucaaguugagacagagaag

SEQ ID NO: 111153 - RNA, 27 nt, Human
ccuaagggcaggagcaagccccucaca

SEQ ID NO: 111154 - RNA, 32 nt, Human
ccuaaggggccccagccaaggagcugagcgag

SEQ ID NO: 111155 - RNA, 32 nt, Human
ccuaaggguaagagggaggccacugaggucuc

SEQ ID NO: 111156 - RNA, 32 nt, Human
ccuaaggucaccaagaauaucagggcugugga

SEQ ID NO: 111157 - RNA, 20 nt, Human
ccuaaggucacccccuuccc

SEQ ID NO: 111158 - RNA, 32 nt, Human
ccuaagguccuccucagcuucuagaccuagaa

SEQ ID NO: 111159 - RNA, 32 nt, Human
ccuaaggugaagccacacuagggugaagccuc

SEQ ID NO: 111160 - RNA, 32 nt, Human
ccuaaguaacacuuugggaggcuggggcgaga

SEQ ID NO: 111161 - RNA, 23 nt, Human
ccuaaguagcugggauuacaggc

SEQ ID NO: 111162 - RNA, 24 nt, Human
ccuaaguagcugggauuacaggcg

SEQ ID NO: 111163 - RNA, 32 nt, Human
ccuaaguagcugguuuuauaaggcggccagga

SEQ ID NO: 111164 - RNA, 32 nt, Human
ccuaaguaucaacuuagccguacuuugaacuc

SEQ ID NO: 111165 - RNA, 32 nt, Human
ccuaaguauguggagcucugcuuuggcacugc

SEQ ID NO: 111166 - RNA, 23 nt, Human
ccuaagucacaaaaugagggaag

SEQ ID NO: 111167 - RNA, 32 nt, Human
ccuaagucacugaggcuggaguacaguggcau

SEQ ID NO: 111168 - RNA, 32 nt, Human
ccuaaguccacacauagccccuggcucuggca

SEQ ID NO: 111169 - RNA, 32 nt, Human
ccuaaguccagaccccaugagcucucagccag

SEQ ID NO: 111170 - RNA, 32 nt, Human
ccuaaguccuucaucauaccacugcccuccaa

SEQ ID NO: 111171 - RNA, 32 nt, Human
ccuaagucuucuuccuccugugcugaccucag

SEQ ID NO: 111172 - RNA, 18 nt, Human
ccuaagugauguucacag

SEQ ID NO: 111173 - RNA, 21 nt, Human
ccuaagugcugggauuauagg

SEQ ID NO: 111174 - RNA, 21 nt, Human
ccuaagugcugggauugcagg

SEQ ID NO: 111175 - RNA, 24 nt, Human
ccuaagugcugggauugcaggcgu

SEQ ID NO: 111176 - RNA, 32 nt, Human
ccuaagugggcugggagccaggcagggccagg

SEQ ID NO: 111177 - RNA, 32 nt, Human
ccuaaguggguggaucacgugaggucaagagu

SEQ ID NO: 111178 - RNA, 32 nt, Human
ccuaagugguuaugaagcaaaugcauuuaugg

SEQ ID NO: 111179 - RNA, 32 nt, Human
ccuaaguuccucacuccuucuguggucaaugu

SEQ ID NO: 111180 - RNA, 22 nt, Human
ccuaaguugcugggauuacagg

SEQ ID NO: 111181 - RNA, 32 nt, Human
ccuaauaagaagcaugcuaaagccacagcagc

SEQ ID NO: 111182 - RNA, 32 nt, Human
ccuaauaagccuuuuggaugcuaaucuggauu

SEQ ID NO: 111183 - RNA, 32 nt, Human
ccuaauaaucauuggauucugagagcugugca

SEQ ID NO: 111184 - RNA, 32 nt, Human
ccuaauacaaauauuucugauaagacuacaaa

SEQ ID NO: 111185 - RNA, 32 nt, Human
ccuaauacagaauuguagagcuggagaguacc

SEQ ID NO: 111186 - RNA, 32 nt, Human
ccuaauacagcuuccauccugucacuuuugau

SEQ ID NO: 111187 - RNA, 32 nt, Human
ccuaauacccacccuuccucacgaccucauuu

SEQ ID NO: 111188 - RNA, 32 nt, Human
ccuaauaggaaggcagaucucagcgauaaaca

SEQ ID NO: 111189 - RNA, 32 nt, Human
ccuaauaggugaugcagauaauagccuacuuc

SEQ ID NO: 111190 - RNA, 32 nt, Human
ccuaauauuuugaggagcucuguuuugaggac

SEQ ID NO: 111191 - RNA, 32 nt, Human
ccuaaucacccguuuaacaagcagaaauuaaa

SEQ ID NO: 111192 - RNA, 32 nt, Human
ccuaaucacggaucugcugccucccagcuguc

SEQ ID NO: 111193 - RNA, 22 nt, Human
ccuaaucacuccaacccugccc

SEQ ID NO: 111194 - RNA, 19 nt, Human
ccuaaucaggaggggacag

SEQ ID NO: 111195 - RNA, 18 nt, Human
ccuaauccaccugggaca

SEQ ID NO: 111196 - RNA, 32 nt, Human
ccuaauccccucccaaaggccccacuucccca

SEQ ID NO: 111197 - RNA, 32 nt, Human
ccuaaucccugagagccugcccacuguccaga

SEQ ID NO: 111198 - RNA, 32 nt, Human
ccuaaucuacauauuuguauauuucuaaggua

SEQ ID NO: 111199 - RNA, 32 nt, Human
ccuaaucugaaauccaaaaugcucuaaaauuc

SEQ ID NO: 111200 - RNA, 32 nt, Human
ccuaaucugauacuggagucuaaauacaugcu

SEQ ID NO: 111201 - RNA, 32 nt, Human
ccuaaucugguucuacuaccauaauguauaug

SEQ ID NO: 111202 - RNA, 32 nt, Human
ccuaaucuuagccacuuauccccagugacuac

SEQ ID NO: 111203 - RNA, 32 nt, Human
ccuaaugaaggagccaggcuugcacacagaca

SEQ ID NO: 111204 - RNA, 32 nt, Human
ccuaaugaccugaugggggcugcucugauccc

SEQ ID NO: 111205 - RNA, 32 nt, Human
ccuaaugauacagauuuuggacccuaucccag

SEQ ID NO: 111206 - RNA, 32 nt, Human
ccuaaugaucccucgcagagcucagacuaagu

SEQ ID NO: 111207 - RNA, 29 nt, Human
ccuaaugaugacgcuuguccccagagcca

SEQ ID NO: 111208 - RNA, 32 nt, Human
ccuaaugcaucacugugacaaaagccacacgc

SEQ ID NO: 111209 - RNA, 32 nt, Human
ccuaaugcuaguuucauucauccaucaggguu

SEQ ID NO: 111210 - RNA, 32 nt, Human
ccuaaugcucagaacauggaugagaugauaaa

SEQ ID NO: 111211 - RNA, 18 nt, Human
ccuaaugcucucccuccc

SEQ ID NO: 111212 - RNA, 32 nt, Human
ccuaauggcucugccacuuacuagcugguuug

SEQ ID NO: 111213 - RNA, 24 nt, Human
ccuaaugggagcaaaagguuugaa

SEQ ID NO: 111214 - RNA, 20 nt, Human
ccuaaugucuccuccuuccc

SEQ ID NO: 111215 - RNA, 32 nt, Human
ccuaaugugccuggaaaccauggguagcuacc

SEQ ID NO: 111216 - RNA, 32 nt, Human
ccuaauuaauaccuagauaagacuucauuuga

SEQ ID NO: 111217 - RNA, 32 nt, Human
ccuaauucaaagauggcucaugugugagggca

SEQ ID NO: 111218 - RNA, 32 nt, Human
ccuaauucaucucuccagcaaaggacacaucu

SEQ ID NO: 111219 - RNA, 32 nt, Human
ccuaauuccucuuccuucuccaaaccacaggg

SEQ ID NO: 111220 - RNA, 32 nt, Human
ccuaauucgcaaccacacagaauuucauggcu

SEQ ID NO: 111221 - RNA, 32 nt, Human
ccuaauucuaugacaguguacauauaugaaaa

SEQ ID NO: 111222 - RNA, 32 nt, Human
ccuaauucuuguagaugcauuaguguugaacc

SEQ ID NO: 111223 - RNA, 32 nt, Human
ccuaauucuuugaaggcaaccagugcaaaggc

SEQ ID NO: 111224 - RNA, 32 nt, Human
ccuaauuucaaaacaucaccuugccacccuga

SEQ ID NO: 111225 - RNA, 32 nt, Human
ccuaauuucccuucuugcauccuuccuauaac

SEQ ID NO: 111226 - RNA, 32 nt, Human
ccuaauuucuguauuuuuaguagagauggggu

SEQ ID NO: 111227 - RNA, 32 nt, Human
ccuaauuuuacaucuucagcaucauugcauua

SEQ ID NO: 111228 - RNA, 32 nt, Human
ccuaauuuucauuguuaaaacuccuuucagac

SEQ ID NO: 111229 - RNA, 32 nt, Human
ccuaauuuuccagagaagccuauuuuuauauu

SEQ ID NO: 111230 - RNA, 32 nt, Human
ccuaauuuuccccuucuguauaaugggaguuc

SEQ ID NO: 111231 - RNA, 32 nt, Human
ccuacaaaaaguacaaaaauuagccgggugug

SEQ ID NO: 111232 - RNA, 20 nt, Human
ccuacaaaagaauuccagca

SEQ ID NO: 111233 - RNA, 23 nt, Human
ccuacaacacuaaauaaaauggu

SEQ ID NO: 111234 - RNA, 32 nt, Human
ccuacaaccugcccgucccccugcugcaggga

SEQ ID NO: 111235 - RNA, 32 nt, Human
ccuacaagaaugcucuuugucuuccacagcca

SEQ ID NO: 111236 - RNA, 22 nt, Human
ccuacaagacgcugcccagcca

SEQ ID NO: 111237 - RNA, 32 nt, Human
ccuacaagagcagccuguggcaucuuugccuu

SEQ ID NO: 111238 - RNA, 32 nt, Human
ccuacaagagccuucauccaggagcauccaca

SEQ ID NO: 111239 - RNA, 32 nt, Human
ccuacaagaguugugguuuuccaucugauccu

SEQ ID NO: 111240 - RNA, 32 nt, Human
ccuacaagcaccuaucauugggcuugucacac

SEQ ID NO: 111241 - RNA, 32 nt, Human
ccuacaagcugcaugcugcauacacaagucau

SEQ ID NO: 111242 - RNA, 22 nt, Human
ccuacaaggcccaucgccacca

SEQ ID NO: 111243 - RNA, 32 nt, Human
ccuacaaguuugagaagguaagaaaagaugaa

SEQ ID NO: 111244 - RNA, 32 nt, Human
ccuacaaucucagcccacaaguccucuccacc

SEQ ID NO: 111245 - RNA, 31 nt, Human
ccuacaauggccacugcucagcuuucucacu

SEQ ID NO: 111246 - RNA, 32 nt, Human
ccuacaauguacugacaguucuuacaguugag

SEQ ID NO: 111247 - RNA, 32 nt, Human
ccuacacaaauacaaaauaauuggggaagggc

SEQ ID NO: 111248 - RNA, 32 nt, Human
ccuacacacaugcacacacguguacaccacaa

SEQ ID NO: 111249 - RNA, 32 nt, Human
ccuacacauuccagacauuuuccuuuuugagc

SEQ ID NO: 111250 - RNA, 32 nt, Human
ccuacaccaagagaugcagucagcaucuuaaa

SEQ ID NO: 111251 - RNA, 27 nt, Human
ccuacaccaaucagaagcucagugccc

SEQ ID NO: 111252 - RNA, 32 nt, Human
ccuacaccagagagccauuuugguauuuugcc

SEQ ID NO: 111253 - RNA, 32 nt, Human
ccuacaccagagagcuauuuugguauuuugcc

SEQ ID NO: 111254 - RNA, 17 nt, Human
ccuacaccauccauuug

SEQ ID NO: 111255 - RNA, 32 nt, Human
ccuacacccaaaggcucccauggagagcucag

SEQ ID NO: 111256 - RNA, 32 nt, Human
ccuacacccaggcuggugccucaggccucccc

SEQ ID NO: 111257 - RNA, 17 nt, Human
ccuacacccggcgccag

SEQ ID NO: 111258 - RNA, 32 nt, Human
ccuacacccugaggucuauucacugcauccca

SEQ ID NO: 111259 - RNA, 32 nt, Human
ccuacaccgcccaggccagaguaggguggagc

SEQ ID NO: 111260 - RNA, 32 nt, Human
ccuacaccuccaccuccuuccccuucucccuc

SEQ ID NO: 111261 - RNA, 22 nt, Human
ccuacaccucuucucccuucuc

SEQ ID NO: 111262 - RNA, 32 nt, Human
ccuacacgaucucauuucuuccuuaccacauc

SEQ ID NO: 111263 - RNA, 32 nt, Human
ccuacacuacugauacaaaugguguuaacugg

SEQ ID NO: 111264 - RNA, 21 nt, Human
ccuacacuccuccccaccuca

SEQ ID NO: 111265 - RNA, 32 nt, Human
ccuacacucuagacgaggcuuauccaacccac

SEQ ID NO: 111266 - RNA, 32 nt, Human
ccuacacuggaaggagcgcucucacuguggaa

SEQ ID NO: 111267 - RNA, 32 nt, Human
ccuacacuuccacuccauagguaaauaaacug

SEQ ID NO: 111268 - RNA, 26 nt, Human
ccuacagaguagcugggaauacaagu

SEQ ID NO: 111269 - RNA, 32 nt, Human
ccuacagagucagaggaggccugagauuucga

SEQ ID NO: 111270 - RNA, 32 nt, Human
ccuacagcaacuuggaaugaguaagaagcagu

SEQ ID NO: 111271 - RNA, 32 nt, Human
ccuacagcaaucggucaguugugggagugcuu

SEQ ID NO: 111272 - RNA, 32 nt, Human
ccuacagcacagauuaugcccugcccacuuca

SEQ ID NO: 111273 - RNA, 32 nt, Human
ccuacagcagagccagagcuccgggcccgggc

SEQ ID NO: 111274 - RNA, 21 nt, Human
ccuacagcagaggccaugcag

SEQ ID NO: 111275 - RNA, 32 nt, Human
ccuacagcagggaaguugacucauccaagcau

SEQ ID NO: 111276 - RNA, 23 nt, Human
ccuacagcagggucagcaagaca

SEQ ID NO: 111277 - RNA, 32 nt, Human
ccuacagcaucagguacacagcuucuccuagc

SEQ ID NO: 111278 - RNA, 32 nt, Human
ccuacagcccacccccucccacagcccaccuc

SEQ ID NO: 111279 - RNA, 32 nt, Human
ccuacagccuacagggggcagggcuuucagca

SEQ ID NO: 111280 - RNA, 32 nt, Human
ccuacagccucaggaaggaggugguggcauag

SEQ ID NO: 111281 - RNA, 32 nt, Human
ccuacagccuggacagggucucugcuguacug

SEQ ID NO: 111282 - RNA, 32 nt, Human
ccuacagccuucuuuccugugugucuguuaac

SEQ ID NO: 111283 - RNA, 32 nt, Human
ccuacagcucuuucucagcguuggaguggaga

SEQ ID NO: 111284 - RNA, 25 nt, Human
ccuacagcuuuccccugccaucccu

SEQ ID NO: 111285 - RNA, 31 nt, Human
ccuacaggacuucucuuuagucagggcaugc

SEQ ID NO: 111286 - RNA, 32 nt, Human
ccuacaggaggaagaauggcugcaggguggcu

SEQ ID NO: 111287 - RNA, 32 nt, Human
ccuacaggagugaagccaccacacagauggaa

SEQ ID NO: 111288 - RNA, 32 nt, Human
ccuacaggcaaaguguccuggcauuuaaaacc

SEQ ID NO: 111289 - RNA, 32 nt, Human
ccuacaggccagaaagaucaaccucugugaag

SEQ ID NO: 111290 - RNA, 32 nt, Human
ccuacaggcuggcccugcaauggggcccugag

SEQ ID NO: 111291 - RNA, 32 nt, Human
ccuacagggcugggccucuucugccucuuaag

SEQ ID NO: 111292 - RNA, 32 nt, Human
ccuacaggguucaccaggauguaagaggagag

SEQ ID NO: 111293 - RNA, 32 nt, Human
ccuacagugcucucccucccugggcagauugg

SEQ ID NO: 111294 - RNA, 32 nt, Human
ccuacaguggagcugggcacagcaacuggauc

SEQ ID NO: 111295 - RNA, 21 nt, Human
ccuacaguuccaagagacaga

SEQ ID NO: 111296 - RNA, 32 nt, Human
ccuacaguuugagaggagagccuccagcuguc

SEQ ID NO: 111297 - RNA, 32 nt, Human
ccuacauagauuuccauuucucucuucagccu

SEQ ID NO: 111298 - RNA, 32 nt, Human
ccuacauaguuaccuuuugaucuuaaggaacu

SEQ ID NO: 111299 - RNA, 32 nt, Human
ccuacauccauggcugucacauggcaucagug

SEQ ID NO: 111300 - RNA, 21 nt, Human
ccuacauccuaccugccuccc

SEQ ID NO: 111301 - RNA, 32 nt, Human
ccuacauccucagccccucugccaccaccuua

SEQ ID NO: 111302 - RNA, 20 nt, Human
ccuacauccuccuccuuccc

SEQ ID NO: 111303 - RNA, 32 nt, Human
ccuacauccugggcuccugaagaagcugucuu

SEQ ID NO: 111304 - RNA, 32 nt, Human
ccuacaucuccccucagccucuccucacuaug

SEQ ID NO: 111305 - RNA, 32 nt, Human
ccuacaucuguuuugcugaaucuccuaguaaa

SEQ ID NO: 111306 - RNA, 32 nt, Human
ccuacaucuuucucccaugcuggacgcugccu

SEQ ID NO: 111307 - RNA, 32 nt, Human
ccuacaucuuugucccgugcgggaugcuuccu

SEQ ID NO: 111308 - RNA, 32 nt, Human
ccuacaugcccccucccuucacagggguacag

SEQ ID NO: 111309 - RNA, 32 nt, Human
ccuacaugccuguagcccuuucucacuccauc

SEQ ID NO: 111310 - RNA, 32 nt, Human
ccuacauuacacacacucagguugagucauuc

SEQ ID NO: 111311 - RNA, 32 nt, Human
ccuacauugagcuccaaucugcucgggguggg

SEQ ID NO: 111312 - RNA, 20 nt, Human
ccuacauugugugccaggua

SEQ ID NO: 111313 - RNA, 32 nt, Human
ccuacauuuaaauauuauucucuuucauugua

SEQ ID NO: 111314 - RNA, 19 nt, Human
ccuacauuuccguggcucc

SEQ ID NO: 111315 - RNA, 32 nt, Human
ccuacauuuggcauugcagccuagccaaaaag

SEQ ID NO: 111316 - RNA, 32 nt, Human
ccuacauuuuuccuuccucccuuccuucccuu

SEQ ID NO: 111317 - RNA, 21 nt, Human
ccuaccaaaauaccugggaua

SEQ ID NO: 111318 - RNA, 32 nt, Human
ccuaccaaagugcugggauuacaggcgugaac

SEQ ID NO: 111319 - RNA, 32 nt, Human
ccuaccaaagugcugggauuacaggcgugagc

SEQ ID NO: 111320 - RNA, 31 nt, Human
ccuaccaacaacauacagggaagagauacag

SEQ ID NO: 111321 - RNA, 32 nt, Human
ccuaccaaguagcugggauuacaggagugcac

SEQ ID NO: 111322 - RNA, 32 nt, Human
ccuaccaaguagcugggauuacaggugugugg

SEQ ID NO: 111323 - RNA, 32 nt, Human
ccuaccacacgcagaucagcacuugcuaaucu

SEQ ID NO: 111324 - RNA, 24 nt, Human
ccuaccacaggauuguucuguuua

SEQ ID NO: 111325 - RNA, 32 nt, Human
ccuaccacaggugagagacagauugaaagaca

SEQ ID NO: 111326 - RNA, 32 nt, Human
ccuaccacccaccuuauugccuuuccuuugag

SEQ ID NO: 111327 - RNA, 22 nt, Human
ccuaccacccucccugcuccuu

SEQ ID NO: 111328 - RNA, 32 nt, Human
ccuaccaccgcuugcuggagguugaggacgcc

SEQ ID NO: 111329 - RNA, 20 nt, Human
ccuaccaccgggcuccuuca

SEQ ID NO: 111330 - RNA, 18 nt, Human
ccuaccaccuucuaguca

SEQ ID NO: 111331 - RNA, 20 nt, Human
ccuaccacguacccuccuca

SEQ ID NO: 111332 - RNA, 20 nt, Human
ccuaccacuaacucugcuca

SEQ ID NO: 111333 - RNA, 18 nt, Human
ccuaccacucgcguguuc

SEQ ID NO: 111334 - RNA, 32 nt, Human
ccuaccacugcacuucagccuaggugacauag

SEQ ID NO: 111335 - RNA, 19 nt, Human
ccuaccacugcuccuguuc

SEQ ID NO: 111336 - RNA, 19 nt, Human
ccuaccacugucuucuuca

SEQ ID NO: 111337 - RNA, 32 nt, Human
ccuaccacuuugccaaucaugucuaacagaug

SEQ ID NO: 111338 - RNA, 32 nt, Human
ccuaccagaccggagaggggagaagucauguu

SEQ ID NO: 111339 - RNA, 21 nt, Human
ccuaccagcuggcugcccuga

SEQ ID NO: 111340 - RNA, 32 nt, Human
ccuaccaggagaaagcaguaggcuuccuuucu

SEQ ID NO: 111341 - RNA, 32 nt, Human
ccuaccaggcuugguggagccacagcagaccu

SEQ ID NO: 111342 - RNA, 32 nt, Human
ccuaccauagcaccugugagacccacaguuuc

SEQ ID NO: 111343 - RNA, 32 nt, Human
ccuaccaucuccccaucuucacccaacuccca

SEQ ID NO: 111344 - RNA, 31 nt, Human
ccuaccaugagagucagccguaggggacccc

SEQ ID NO: 111345 - RNA, 32 nt, Human
ccuaccaugccauuuaacaagagaucccacuc

SEQ ID NO: 111346 - RNA, 18 nt, Human
ccuaccauuuucugcgca

SEQ ID NO: 111347 - RNA, 32 nt, Human
ccuacccaaccccacaccaccaggcucccugc

SEQ ID NO: 111348 - RNA, 32 nt, Human
ccuacccaacccuggaaaguuugcagaagugg

SEQ ID NO: 111349 - RNA, 32 nt, Human
ccuacccacaugcacucgugugagacaaggcc

SEQ ID NO: 111350 - RNA, 22 nt, Human
ccuacccacauuucuaauucag

SEQ ID NO: 111351 - RNA, 18 nt, Human
ccuacccacccacccaca

SEQ ID NO: 111352 - RNA, 19 nt, Human
ccuacccacccacuccaca

SEQ ID NO: 111353 - RNA, 32 nt, Human
ccuacccaccucgcccuugaaggaugggccug

SEQ ID NO: 111354 - RNA, 23 nt, Human
ccuacccaccugcaaggucccag

SEQ ID NO: 111355 - RNA, 32 nt, Human
ccuacccacguuccagccucuaggugagucag

SEQ ID NO: 111356 - RNA, 32 nt, Human
ccuacccacucauauaacauaccucaggucua

SEQ ID NO: 111357 - RNA, 32 nt, Human
ccuacccagcacagcaaaugguuguaguaauu

SEQ ID NO: 111358 - RNA, 32 nt, Human
ccuacccaggaagaaccugaagaucuggacug

SEQ ID NO: 111359 - RNA, 32 nt, Human
ccuacccaggcagagaguggggcacaggcagg

SEQ ID NO: 111360 - RNA, 23 nt, Human
ccuacccagggaggaugcagaga

SEQ ID NO: 111361 - RNA, 32 nt, Human
ccuacccaucaucuguugguguuuuugguuuu

SEQ ID NO: 111362 - RNA, 32 nt, Human
ccuacccauugaucauuucaagaaaccucugu

SEQ ID NO: 111363 - RNA, 32 nt, Human
ccuaccccaucccucugguguggccguggcag

SEQ ID NO: 111364 - RNA, 21 nt, Human
ccuacccccgccuuccugcca

SEQ ID NO: 111365 - RNA, 32 nt, Human
ccuacccccuacucuggggcuugggggucaac

SEQ ID NO: 111366 - RNA, 32 nt, Human
ccuaccccgcugggugugcacacacuccucuc

SEQ ID NO: 111367 - RNA, 32 nt, Human
ccuaccccgucugccagcaucuaguuucccuc

SEQ ID NO: 111368 - RNA, 32 nt, Human
ccuaccccucagugccugcucucauccaaaua

SEQ ID NO: 111369 - RNA, 32 nt, Human
ccuaccccucugugaggagcugugggaagugu

SEQ ID NO: 111370 - RNA, 32 nt, Human
ccuaccccuguccuugcugacuuguguugcau

SEQ ID NO: 111371 - RNA, 32 nt, Human
ccuaccccuuccagauccuccuggccgggcag

SEQ ID NO: 111372 - RNA, 32 nt, Human
ccuaccccuucccuguucugccucuuuaacuc

SEQ ID NO: 111373 - RNA, 32 nt, Human
ccuaccccuuggaaaugucugcuguuauuucu

SEQ ID NO: 111374 - RNA, 32 nt, Human
ccuaccccuugugcacccgcagccugguaagu

SEQ ID NO: 111375 - RNA, 32 nt, Human
ccuacccgaggacaagccuguucuccauuucu

SEQ ID NO: 111376 - RNA, 20 nt, Human
ccuacccgccccucccuccc

SEQ ID NO: 111377 - RNA, 17 nt, Human
ccuacccgccgcugccg

SEQ ID NO: 111378 - RNA, 32 nt, Human
ccuacccguacgcauacauacauauguguaua

SEQ ID NO: 111379 - RNA, 32 nt, Human
ccuacccucacuaacuccuccuggggccccac

SEQ ID NO: 111380 - RNA, 32 nt, Human
ccuacccuccacaggcacagguccccagauga

SEQ ID NO: 111381 - RNA, 32 nt, Human
ccuacccucucaccaucuuucuuggccucucu

SEQ ID NO: 111382 - RNA, 18 nt, Human
ccuacccucucucugccu

SEQ ID NO: 111383 - RNA, 32 nt, Human
ccuacccucugcacccucaagaaacccccagu

SEQ ID NO: 111384 - RNA, 32 nt, Human
ccuacccugaaguuaugcuuuccuucugugcu

SEQ ID NO: 111385 - RNA, 32 nt, Human
ccuacccugccugucuucuguugaugcugcuu

SEQ ID NO: 111386 - RNA, 23 nt, Human
ccuacccugcgcccaguccuucc

SEQ ID NO: 111387 - RNA, 32 nt, Human
ccuacccuggacugaagggucugcccaucccc

SEQ ID NO: 111388 - RNA, 32 nt, Human
ccuacccuggggacugugaugaggaagggccc

SEQ ID NO: 111389 - RNA, 32 nt, Human
ccuacccugugcaugguccuggggcagcaagg

SEQ ID NO: 111390 - RNA, 32 nt, Human
ccuacccuucaaggacauauaauccagagcua

SEQ ID NO: 111391 - RNA, 32 nt, Human
ccuacccuuccagggaccccuauccugauccc

SEQ ID NO: 111392 - RNA, 21 nt, Human
ccuacccuuuuguaccucuga

SEQ ID NO: 111393 - RNA, 32 nt, Human
ccuaccgaguagcugggacuacaggcacgcgc

SEQ ID NO: 111394 - RNA, 32 nt, Human
ccuaccgccgcuugcuggagguugaggacgcc

SEQ ID NO: 111395 - RNA, 32 nt, Human
ccuaccgggaggaaugaauaacuccagacacg

SEQ ID NO: 111396 - RNA, 32 nt, Human
ccuaccggggcugaggccaugcugggagcccc

SEQ ID NO: 111397 - RNA, 32 nt, Human
ccuaccuacccacccacccacacccacagcca

SEQ ID NO: 111398 - RNA, 32 nt, Human
ccuaccuacugcccccauucauccuggcuuuc

SEQ ID NO: 111399 - RNA, 20 nt, Human
ccuaccuaggagcaggggga

SEQ ID NO: 111400 - RNA, 32 nt, Human
ccuaccuaggcaacauggugaaaccuugucuc

SEQ ID NO: 111401 - RNA, 32 nt, Human
ccuaccuauacauacgugcacacacacauaca

SEQ ID NO: 111402 - RNA, 19 nt, Human
ccuaccucaccucuucuca

SEQ ID NO: 111403 - RNA, 32 nt, Human
ccuaccucaccuuacucaaugguguagguaaa

SEQ ID NO: 111404 - RNA, 18 nt, Human
ccuaccucacgccugccc

SEQ ID NO: 111405 - RNA, 19 nt, Human
ccuaccucaggcccugcuc

SEQ ID NO: 111406 - RNA, 32 nt, Human
ccuaccucaggucugagagucugggugugugg

SEQ ID NO: 111407 - RNA, 32 nt, Human
ccuaccucccacugcacugccgguuucccugg

SEQ ID NO: 111408 - RNA, 20 nt, Human
ccuaccucccuccucagggg

SEQ ID NO: 111409 - RNA, 32 nt, Human
ccuaccucucugcugugucuucaugucccuga

SEQ ID NO: 111410 - RNA, 32 nt, Human
ccuaccucuggcccucgcuuuaccggaguagg

SEQ ID NO: 111411 - RNA, 32 nt, Human
ccuaccugaccaccaucaccaagcagaucacg

SEQ ID NO: 111412 - RNA, 32 nt, Human
ccuaccugagccaccguccuagccaagcgagc

SEQ ID NO: 111413 - RNA, 32 nt, Human
ccuaccugcaacuuauacaccuggcuuugggg

SEQ ID NO: 111414 - RNA, 32 nt, Human
ccuaccugccaccaccucaccuucauccucag

SEQ ID NO: 111415 - RNA, 30 nt, Human
ccuaccugccucuccgagcuccucaauucu

SEQ ID NO: 111416 - RNA, 22 nt, Human
ccuaccugccugaguccuggag

SEQ ID NO: 111417 - RNA, 32 nt, Human
ccuaccugcugcugggucccuuguagcacagg

SEQ ID NO: 111418 - RNA, 32 nt, Human
ccuaccuggaagucccccugagcuccagggcc

SEQ ID NO: 111419 - RNA, 32 nt, Human
ccuaccuggccauggccaacggagugaucccg

SEQ ID NO: 111420 - RNA, 32 nt, Human
ccuaccuggucccaucugccucuuuucucucc

SEQ ID NO: 111421 - RNA, 32 nt, Human
ccuaccugugccagagagcuagaaagaagguc

SEQ ID NO: 111422 - RNA, 32 nt, Human
ccuaccuuccacccuccccauuuggagucugc

SEQ ID NO: 111423 - RNA, 20 nt, Human
ccuaccuuccacuccugccu

SEQ ID NO: 111424 - RNA, 32 nt, Human
ccuaccuucucugcccacaccuccugccagca

SEQ ID NO: 111425 - RNA, 32 nt, Human
ccuacgauccuagcuacucaggaggcugaagu

SEQ ID NO: 111426 - RNA, 32 nt, Human
ccuacgaugaacuaugagaaacucagucgugc

SEQ ID NO: 111427 - RNA, 32 nt, Human
ccuacgaugaaugccuaagaggguauugacau

SEQ ID NO: 111428 - RNA, 32 nt, Human
ccuacgcccaccuaguggccagucccagagcc

SEQ ID NO: 111429 - RNA, 32 nt, Human
ccuacgcccggcaggccuccagccaggagugc

SEQ ID NO: 111430 - RNA, 32 nt, Human
ccuacgccgccccggcuccuccggacggggcg

SEQ ID NO: 111431 - RNA, 32 nt, Human
ccuacgccuaagaggaacacagcagcuguucc

SEQ ID NO: 111432 - RNA, 32 nt, Human
ccuacgcgcagcugguguuccagaccugcgac

SEQ ID NO: 111433 - RNA, 32 nt, Human
ccuacgcugccaggaggcccaggcugggagag

SEQ ID NO: 111434 - RNA, 20 nt, Human
ccuacgcuggagugcagugg

SEQ ID NO: 111435 - RNA, 22 nt, Human
ccuacggaaggggcuuaaugca

SEQ ID NO: 111436 - RNA, 32 nt, Human
ccuacggccgacucuggguucccuucaggugu

SEQ ID NO: 111437 - RNA, 32 nt, Human
ccuacggcuacacugggccuagguguggcagu

SEQ ID NO: 111438 - RNA, 32 nt, Human
ccuacggcugccgccagucucaugcccaggug

SEQ ID NO: 111439 - RNA, 32 nt, Human
ccuacgggcuguagauggagcuguccggcccc

SEQ ID NO: 111440 - RNA, 32 nt, Human
ccuacggguuucaucucucaccagaagaaaug

SEQ ID NO: 111441 - RNA, 32 nt, Human
ccuacgguauccagggaacagaaagcaggaug

SEQ ID NO: 111442 - RNA, 32 nt, Human
ccuacgucugcagggaggaugaguagucauua

SEQ ID NO: 111443 - RNA, 32 nt, Human
ccuacgugcccacuggcacacacacgugcuca

SEQ ID NO: 111444 - RNA, 32 nt, Human
ccuacgugcgcagggcccuccaccgccacuau

SEQ ID NO: 111445 - RNA, 21 nt, Human
ccuacguuuccaccuccuccc

SEQ ID NO: 111446 - RNA, 32 nt, Human
ccuacguuucuguauacagcuguguugcuuuu

SEQ ID NO: 111447 - RNA, 32 nt, Human
ccuacuaaaaauaacaaaauuagccgggcgug

SEQ ID NO: 111448 - RNA, 32 nt, Human
ccuacuaaaaauacaaaauuagccagguaugg

SEQ ID NO: 111449 - RNA, 32 nt, Human
ccuacuaaaaauacaaaguuagccaggcauag

SEQ ID NO: 111450 - RNA, 32 nt, Human
ccuacuaaaaauacaaaguuagccaggcaugg

SEQ ID NO: 111451 - RNA, 32 nt, Human
ccuacuaaagacaguguccucugugaucucag

SEQ ID NO: 111452 - RNA, 32 nt, Human
ccuacuaaagugcugggauuacaggcgugagc

SEQ ID NO: 111453 - RNA, 32 nt, Human
ccuacuaaccaucccccugccugcugccucag

SEQ ID NO: 111454 - RNA, 32 nt, Human
ccuacuacaaguccccauugcugugguccccg

SEQ ID NO: 111455 - RNA, 32 nt, Human
ccuacuacuaucucccacucuagauaaagcca

SEQ ID NO: 111456 - RNA, 32 nt, Human
ccuacuacugaacuccaguuuugaucucguga

SEQ ID NO: 111457 - RNA, 19 nt, Human
ccuacuacugcucugucca

SEQ ID NO: 111458 - RNA, 32 nt, Human
ccuacuacugugccccucccuccuggaggcag

SEQ ID NO: 111459 - RNA, 23 nt, Human
ccuacuaggaaaacaaaacaucu

SEQ ID NO: 111460 - RNA, 32 nt, Human
ccuacuaggaagagagugggcugcagaugaau

SEQ ID NO: 111461 - RNA, 22 nt, Human
ccuacuagguaccaaguacucu

SEQ ID NO: 111462 - RNA, 32 nt, Human
ccuacuaucuguguucccuuagauacuccugu

SEQ ID NO: 111463 - RNA, 32 nt, Human
ccuacucacaggcuccaugagcagaugaagua

SEQ ID NO: 111464 - RNA, 32 nt, Human
ccuacucacauacccacuuagcaaaaccaaag

SEQ ID NO: 111465 - RNA, 32 nt, Human
ccuacucagacuguugcacucuaaaccuaggg

SEQ ID NO: 111466 - RNA, 21 nt, Human
ccuacucauaugaaaacuuug

SEQ ID NO: 111467 - RNA, 32 nt, Human
ccuacucaucgcacuaauuuacacucacaaca

SEQ ID NO: 111468 - RNA, 32 nt, Human
ccuacucauucaaccaauagcccuggccguac

SEQ ID NO: 111469 - RNA, 32 nt, Human
ccuacucccagaagaggagggaagcacaggug

SEQ ID NO: 111470 - RNA, 32 nt, Human
ccuacuccccaguucaggcuucagagagcccc

SEQ ID NO: 111471 - RNA, 32 nt, Human
ccuacuccccugggcaucuucuggcuugacug

SEQ ID NO: 111472 - RNA, 32 nt, Human
ccuacucccugaauccggguccucauugugaa

SEQ ID NO: 111473 - RNA, 32 nt, Human
ccuacuccgagggcuccuccugccuggugaag

SEQ ID NO: 111474 - RNA, 32 nt, Human
ccuacuccucagcagggacccagcacagcaau

SEQ ID NO: 111475 - RNA, 21 nt, Human
ccuacuccucccuccucguca

SEQ ID NO: 111476 - RNA, 32 nt, Human
ccuacuccuccuccuccucucccggcggcggc

SEQ ID NO: 111477 - RNA, 18 nt, Human
ccuacuccugccaggcug

SEQ ID NO: 111478 - RNA, 32 nt, Human
ccuacuccuuauuuacgacacaauaaaauaac

SEQ ID NO: 111479 - RNA, 32 nt, Human
ccuacuccuugcaggugacauuugcucugaac

SEQ ID NO: 111480 - RNA, 32 nt, Human
ccuacucuacaaucaaggaagaaggacaucuc

SEQ ID NO: 111481 - RNA, 32 nt, Human
ccuacucuaggaagaggaagguauggcgagcc

SEQ ID NO: 111482 - RNA, 32 nt, Human
ccuacucuauucagauauucuccagauuccua

SEQ ID NO: 111483 - RNA, 32 nt, Human
ccuacucucagccucacgugacucucgggcag

SEQ ID NO: 111484 - RNA, 32 nt, Human
ccuacucucagcugccuaucuucugccuuuca

SEQ ID NO: 111485 - RNA, 32 nt, Human
ccuacucucccucauggcgucucccccaccuu

SEQ ID NO: 111486 - RNA, 32 nt, Human
ccuacucugccucuuccuccauacuagguugg

SEQ ID NO: 111487 - RNA, 32 nt, Human
ccuacucugcuccccucucacacaucugggag

SEQ ID NO: 111488 - RNA, 32 nt, Human
ccuacucugggcagguggaggcuuauccaaca

SEQ ID NO: 111489 - RNA, 32 nt, Human
ccuacucuucuguaaggaggauaggaaguauu

SEQ ID NO: 111490 - RNA, 32 nt, Human
ccuacucuucuuucucccugcccccuggaggg

SEQ ID NO: 111491 - RNA, 32 nt, Human
ccuacucuuggccuugaaccuaccucuggguu

SEQ ID NO: 111492 - RNA, 32 nt, Human
ccuacugaaaugcaguugaggccgggugcggu

SEQ ID NO: 111493 - RNA, 32 nt, Human
ccuacugacaaccccuccccagccuugccccu

SEQ ID NO: 111494 - RNA, 32 nt, Human
ccuacugacaugcccauuucuccaguuuucuu

SEQ ID NO: 111495 - RNA, 32 nt, Human
ccuacugaccuggcuggugacagaacaugcag

SEQ ID NO: 111496 - RNA, 32 nt, Human
ccuacugaguguaccacugccuucccuucuag

SEQ ID NO: 111497 - RNA, 22 nt, Human
ccuacugauugcugccuucucu

SEQ ID NO: 111498 - RNA, 32 nt, Human
ccuacugcaaaaagauuguccaaaaugccuaa

SEQ ID NO: 111499 - RNA, 25 nt, Human
ccuacugcaaaagcaagggcuggca

SEQ ID NO: 111500 - RNA, 23 nt, Human
ccuacugcacuuucccccuuccc

SEQ ID NO: 111501 - RNA, 21 nt, Human
ccuacugcaggucaaauccug

SEQ ID NO: 111502 - RNA, 24 nt, Human
ccuacugcaguuccagccaaccug

SEQ ID NO: 111503 - RNA, 21 nt, Human
ccuacugcaguuuccuaccug

SEQ ID NO: 111504 - RNA, 32 nt, Human
ccuacugcauaccuaggcuauaugggagagcc

SEQ ID NO: 111505 - RNA, 32 nt, Human
ccuacugccaggagguggaggaaggagcaggu

SEQ ID NO: 111506 - RNA, 22 nt, Human
ccuacugccucagcccccaggg

SEQ ID NO: 111507 - RNA, 32 nt, Human
ccuacugccugagaugguuccagaggcggucu

SEQ ID NO: 111508 - RNA, 32 nt, Human
ccuacugccugaugcaggugccauugccauua

SEQ ID NO: 111509 - RNA, 32 nt, Human
ccuacugcucccagcaaccucuacauccagga

SEQ ID NO: 111510 - RNA, 21 nt, Human
ccuacugcucucuccuuuccc

SEQ ID NO: 111511 - RNA, 32 nt, Human
ccuacugcucuuccucucucccucucuuaggg

SEQ ID NO: 111512 - RNA, 32 nt, Human
ccuacugcugugaacccuggggccugacugcu

SEQ ID NO: 111513 - RNA, 32 nt, Human
ccuacugcuucuuuucuuguucuuuauucuca

SEQ ID NO: 111514 - RNA, 18 nt, Human
ccuacuggaaacggggca

SEQ ID NO: 111515 - RNA, 32 nt, Human
ccuacuggaguuggaggucucacagcagcacc

SEQ ID NO: 111516 - RNA, 32 nt, Human
ccuacuggaucccgggagccugggcuggggcc

SEQ ID NO: 111517 - RNA, 32 nt, Human
ccuacugggccagcugagguacaggcaggggc

SEQ ID NO: 111518 - RNA, 32 nt, Human
ccuacuggguagcugggacuacaggggugcac

SEQ ID NO: 111519 - RNA, 32 nt, Human
ccuacuguaauccucagaggccacuuuaucau

SEQ ID NO: 111520 - RNA, 32 nt, Human
ccuacuguagccucagcaucuugcuaggaggc

SEQ ID NO: 111521 - RNA, 32 nt, Human
ccuacugucaguuucugaaacuucugacuggc

SEQ ID NO: 111522 - RNA, 32 nt, Human
ccuacugucuggagaagagaaagaaaauuugc

SEQ ID NO: 111523 - RNA, 32 nt, Human
ccuacugugugccacacaccauaucaggugcu

SEQ ID NO: 111524 - RNA, 32 nt, Human
ccuacuguguguggguugucucggccacugag

SEQ ID NO: 111525 - RNA, 32 nt, Human
ccuacuuacauacaugaacuauuccuuuuaau

SEQ ID NO: 111526 - RNA, 32 nt, Human
ccuacuucauugacagcaccagccaagugaau

SEQ ID NO: 111527 - RNA, 32 nt, Human
ccuacuucccuaggaagcccuggcuaccuuuc

SEQ ID NO: 111528 - RNA, 32 nt, Human
ccuacuuccucccauuccauaacuucugcucg

SEQ ID NO: 111529 - RNA, 23 nt, Human
ccuacuuccucugccaccucuga

SEQ ID NO: 111530 - RNA, 32 nt, Human
ccuacuuccucuucagauuccuucacccuauu

SEQ ID NO: 111531 - RNA, 23 nt, Human
ccuacuuccugccaagcauucca

SEQ ID NO: 111532 - RNA, 32 nt, Human
ccuacuucuccaccaucccuagcaugccagcc

SEQ ID NO: 111533 - RNA, 32 nt, Human
ccuacuucugcuguagccugggaccagaccug

SEQ ID NO: 111534 - RNA, 32 nt, Human
ccuacuugcccacccuuccuugcugguucaga

SEQ ID NO: 111535 - RNA, 32 nt, Human
ccuacuugccuaggcucuaauuagucagcaau

SEQ ID NO: 111536 - RNA, 32 nt, Human
ccuacuugggcccugcagcccagccuguguug

SEQ ID NO: 111537 - RNA, 32 nt, Human
ccuacuuguccagguggagugagucugaggac

SEQ ID NO: 111538 - RNA, 32 nt, Human
ccuacuuuaugacgcccucuucccucuugaug

SEQ ID NO: 111539 - RNA, 32 nt, Human
ccuacuuuauucaccaauaucccaguaacaug

SEQ ID NO: 111540 - RNA, 22 nt, Human
ccuacuuuccucccucccuccc

SEQ ID NO: 111541 - RNA, 32 nt, Human
ccuacuuuccucuccugcuuucugccugugac

SEQ ID NO: 111542 - RNA, 32 nt, Human
ccuacuuuccuugcuuccuuccuuccucucuu

SEQ ID NO: 111543 - RNA, 32 nt, Human
ccuacuuugaucaccauuucucuccaggcuuu

SEQ ID NO: 111544 - RNA, 32 nt, Human
ccuacuuugcaaguuggugcccccaggaaccu

SEQ ID NO: 111545 - RNA, 32 nt, Human
ccuacuuugcaggcaguccuuccagaugguuc

SEQ ID NO: 111546 - RNA, 32 nt, Human
ccuacuuuuagaguguaguucaacucauuugu

SEQ ID NO: 111547 - RNA, 32 nt, Human
ccuacuuuugccauugacuucuucccaagauu

SEQ ID NO: 111548 - RNA, 32 nt, Human
ccuacuuuugcugguauacugugaacucguau

SEQ ID NO: 111549 - RNA, 16 nt, Human
ccuagaaaaagauaaa

SEQ ID NO: 111550 - RNA, 32 nt, Human
ccuagaaaagcagaaacagcugugccugggaa

SEQ ID NO: 111551 - RNA, 32 nt, Human
ccuagaaaccugcccuucucuggcaggguuag

SEQ ID NO: 111552 - RNA, 32 nt, Human
ccuagaaacugaggggcuauggugcuaagcag

SEQ ID NO: 111553 - RNA, 32 nt, Human
ccuagaaauccuagcaacagauuucucugguu

SEQ ID NO: 111554 - RNA, 32 nt, Human
ccuagaaccccaauucagccuccugggcaccc

SEQ ID NO: 111555 - RNA, 32 nt, Human
ccuagaagagucaggaagggaaagccagaagg

SEQ ID NO: 111556 - RNA, 32 nt, Human
ccuagaagcagggacucaucugugcugucugu

SEQ ID NO: 111557 - RNA, 32 nt, Human
ccuagaagcauuuaugauuuauuugaagccac

SEQ ID NO: 111558 - RNA, 32 nt, Human
ccuagaagcgugaauguauaggauaccugacu

SEQ ID NO: 111559 - RNA, 24 nt, Human
ccuagaagguggagguugcaguga

SEQ ID NO: 111560 - RNA, 32 nt, Human
ccuagaagguggagguugcagugagcggagau

SEQ ID NO: 111561 - RNA, 32 nt, Human
ccuagaaguacacccccgucuuauuaaggagc

SEQ ID NO: 111562 - RNA, 32 nt, Human
ccuagaagucuucucaagcugacuuccuaccu

SEQ ID NO: 111563 - RNA, 32 nt, Human
ccuagaauaaagacuacauuucccagucuccu

SEQ ID NO: 111564 - RNA, 32 nt, Human
ccuagaaucccagcuacucggaaggccaaggc

SEQ ID NO: 111565 - RNA, 32 nt, Human
ccuagaaucugaaauuccaguaucauuuguaa

SEQ ID NO: 111566 - RNA, 21 nt, Human
ccuagaauuucccugcuccuu

SEQ ID NO: 111567 - RNA, 28 nt, Human
ccuagacaacagagcaagacccuauguc

SEQ ID NO: 111568 - RNA, 32 nt, Human
ccuagacaccucaguucauugugguccuugcg

SEQ ID NO: 111569 - RNA, 32 nt, Human
ccuagacagcuguggagggaagaccucguggg

SEQ ID NO: 111570 - RNA, 32 nt, Human
ccuagacagugcaguccugcuugggggagccu

SEQ ID NO: 111571 - RNA, 16 nt, Human
ccuagacaucuaccca

SEQ ID NO: 111572 - RNA, 32 nt, Human
ccuagacaucuucucccucccuugccucagau

SEQ ID NO: 111573 - RNA, 32 nt, Human
ccuagacauggaggagaaggacuacagugagg

SEQ ID NO: 111574 - RNA, 21 nt, Human
ccuagacauugccuucacucc

SEQ ID NO: 111575 - RNA, 19 nt, Human
ccuagaccacccugcccca

SEQ ID NO: 111576 - RNA, 32 nt, Human
ccuagaccauucuccccuccagggagcccacc

SEQ ID NO: 111577 - RNA, 32 nt, Human
ccuagaccccaugccagccauuguaagaguuc

SEQ ID NO: 111578 - RNA, 32 nt, Human
ccuagaccuaauuuuuccuugaucccacugau

SEQ ID NO: 111579 - RNA, 32 nt, Human
ccuagaccuaguuaggaaguaucauuuuaagc

SEQ ID NO: 111580 - RNA, 32 nt, Human
ccuagaccucuguuaccagcagugcuaccucu

SEQ ID NO: 111581 - RNA, 32 nt, Human
ccuagaccuugccuccccuccucuccugccca

SEQ ID NO: 111582 - RNA, 32 nt, Human
ccuagacgggacccgcucccaccuuuacuuac

SEQ ID NO: 111583 - RNA, 32 nt, Human
ccuagacucugugucacucucaacacacacag

SEQ ID NO: 111584 - RNA, 19 nt, Human
ccuagacuggagugcaaug

SEQ ID NO: 111585 - RNA, 23 nt, Human
ccuagacuggagugcaauggcgu

SEQ ID NO: 111586 - RNA, 32 nt, Human
ccuagacugggagcucagguacucuuuuaguc

SEQ ID NO: 111587 - RNA, 32 nt, Human
ccuagacuguauccaggagguggaagugaauu

SEQ ID NO: 111588 - RNA, 22 nt, Human
ccuagacuucuagugccucuga

SEQ ID NO: 111589 - RNA, 32 nt, Human
ccuagacuuuggggguggcucucuuguaauua

SEQ ID NO: 111590 - RNA, 32 nt, Human
ccuagagaaagccagcaaagaaugaaggcaac

SEQ ID NO: 111591 - RNA, 32 nt, Human
ccuagagacaugcucccugcccucuccacagu

SEQ ID NO: 111592 - RNA, 32 nt, Human
ccuagagacgcugacaaaggagcggaggagca

SEQ ID NO: 111593 - RNA, 32 nt, Human
ccuagagagagggugagaugacuggggugguc

SEQ ID NO: 111594 - RNA, 20 nt, Human
ccuagagagagugaggugca

SEQ ID NO: 111595 - RNA, 32 nt, Human
ccuagagauagaggagacagauccucucuccu

SEQ ID NO: 111596 - RNA, 32 nt, Human
ccuagagauggcagaaucaggagcaaguuucu

SEQ ID NO: 111597 - RNA, 32 nt, Human
ccuagagaugggaagugacuugcucaagguca

SEQ ID NO: 111598 - RNA, 32 nt, Human
ccuagagccagggcugacaugaccucgaugcu

SEQ ID NO: 111599 - RNA, 32 nt, Human
ccuagagccccagcagcacccagccaaaccca

SEQ ID NO: 111600 - RNA, 22 nt, Human
ccuagagccccgcuuucccucc

SEQ ID NO: 111601 - RNA, 32 nt, Human
ccuagagccuacaguucagaacuaucuuguug

SEQ ID NO: 111602 - RNA, 32 nt, Human
ccuagagccuccagggggaacuggaggaugcg

SEQ ID NO: 111603 - RNA, 32 nt, Human
ccuagagccucgguaugcuuucccucaaccga

SEQ ID NO: 111604 - RNA, 32 nt, Human
ccuagagcuagcaguucccauucaggcaaaca

SEQ ID NO: 111605 - RNA, 32 nt, Human
ccuagagcuccucugccugaauccugcccccu

SEQ ID NO: 111606 - RNA, 32 nt, Human
ccuagagcugaggagugaggggucagggcuca

SEQ ID NO: 111607 - RNA, 32 nt, Human
ccuagagcugagugccuggggguccagaagcu

SEQ ID NO: 111608 - RNA, 32 nt, Human
ccuagagcuuucugacagggagucugaagcgu

SEQ ID NO: 111609 - RNA, 20 nt, Human
ccuagaggacaagagcuugg

SEQ ID NO: 111610 - RNA, 18 nt, Human
ccuagaggagggggccgg

SEQ ID NO: 111611 - RNA, 32 nt, Human
ccuagaggaugagccacaaaauaccucuauga

SEQ ID NO: 111612 - RNA, 32 nt, Human
ccuagaggcagauauuuugccccauggcuauu

SEQ ID NO: 111613 - RNA, 32 nt, Human
ccuagaggcccagccucuguggcgcugugauc

SEQ ID NO: 111614 - RNA, 32 nt, Human
ccuagaggccgaggagcucacagcuaugggcu

SEQ ID NO: 111615 - RNA, 23 nt, Human
ccuagaggcggaguuugcaguga

SEQ ID NO: 111616 - RNA, 22 nt, Human
ccuagaggcuccagcucuggca

SEQ ID NO: 111617 - RNA, 32 nt, Human
ccuagagggcccuuuccugcuucucugaaagc

SEQ ID NO: 111618 - RNA, 32 nt, Human
ccuagaggggucagggcugagcccagccucca

SEQ ID NO: 111619 - RNA, 32 nt, Human
ccuagaggguuaagggaacaacagagaugggg

SEQ ID NO: 111620 - RNA, 32 nt, Human
ccuagaggugaauuucguuggggaagagggag

SEQ ID NO: 111621 - RNA, 32 nt, Human
ccuagaguagugcucucguugaugaagcacau

SEQ ID NO: 111622 - RNA, 32 nt, Human
ccuagaguagugcuuggugcaugauaguaggc

SEQ ID NO: 111623 - RNA, 32 nt, Human
ccuagaguccuccugaggagucggggcuugcc

SEQ ID NO: 111624 - RNA, 32 nt, Human
ccuagaguugggguuccucagcucaggugcag

SEQ ID NO: 111625 - RNA, 25 nt, Human
ccuagauagagcucauuuuacucca

SEQ ID NO: 111626 - RNA, 21 nt, Human
ccuagauauggagggggccag

SEQ ID NO: 111627 - RNA, 32 nt, Human
ccuagaucacuggugugauaaaccccauuuca

SEQ ID NO: 111628 - RNA, 32 nt, Human
ccuagaucccuccaaaugccacccaccagagu

SEQ ID NO: 111629 - RNA, 32 nt, Human
ccuagauccuucagguccccacccucagcugu

SEQ ID NO: 111630 - RNA, 32 nt, Human
ccuagaucuccccucucuccacccuccccaca

SEQ ID NO: 111631 - RNA, 32 nt, Human
ccuagaucuccgggaggcccugguuaaaggag

SEQ ID NO: 111632 - RNA, 20 nt, Human
ccuagaugacuagggugcug

SEQ ID NO: 111633 - RNA, 32 nt, Human
ccuagaugagucaggauaacagagagauacca

SEQ ID NO: 111634 - RNA, 32 nt, Human
ccuagaugugaagugggacauagucuuccauu

SEQ ID NO: 111635 - RNA, 32 nt, Human
ccuagauuccaccugagucaauuguguccaga

SEQ ID NO: 111636 - RNA, 32 nt, Human
ccuagauuccuggcaaccuccccuccccugac

SEQ ID NO: 111637 - RNA, 32 nt, Human
ccuagauugcagcugcguggccaggugcucac

SEQ ID NO: 111638 - RNA, 23 nt, Human
ccuagcaagcuaccuucuguuca

SEQ ID NO: 111639 - RNA, 32 nt, Human
ccuagcaaucagucagggcugcagugagccau

SEQ ID NO: 111640 - RNA, 32 nt, Human
ccuagcacaggcuggcaguugguacugaauug

SEQ ID NO: 111641 - RNA, 32 nt, Human
ccuagcaccaugucugguacaguguagaugcu

SEQ ID NO: 111642 - RNA, 32 nt, Human
ccuagcaccaugucugguacaguguaggugcu

SEQ ID NO: 111643 - RNA, 32 nt, Human
ccuagcagaaggcauugaggugagggaucauu

SEQ ID NO: 111644 - RNA, 22 nt, Human
ccuagcagccucuccucgggca

SEQ ID NO: 111645 - RNA, 32 nt, Human
ccuagcagccuggauagugagcuaaacaaacc

SEQ ID NO: 111646 - RNA, 32 nt, Human
ccuagcagcucaugccuguaaucuccagcacu

SEQ ID NO: 111647 - RNA, 32 nt, Human
ccuagcagcucuguccuuaacacacagcaggu

SEQ ID NO: 111648 - RNA, 32 nt, Human
ccuagcaguggagcaguaccagcugggacagg

SEQ ID NO: 111649 - RNA, 32 nt, Human
ccuagcaucaccgaggacguggcugcucugac

SEQ ID NO: 111650 - RNA, 32 nt, Human
ccuagcaucucagugccccaacccucugccca

SEQ ID NO: 111651 - RNA, 32 nt, Human
ccuagcauggcgggucaacccuguaauuccag

SEQ ID NO: 111652 - RNA, 32 nt, Human
ccuagcaugguggcgcauaccuguagucccag

SEQ ID NO: 111653 - RNA, 32 nt, Human
ccuagccaaaggaccaggagagggggcagccc

SEQ ID NO: 111654 - RNA, 19 nt, Human
ccuagccaacauggugaaa

SEQ ID NO: 111655 - RNA, 32 nt, Human
ccuagccacagcuguuguauucugcucuucuu

SEQ ID NO: 111656 - RNA, 32 nt, Human
ccuagccagcauauacuagaaggugcugaggg

SEQ ID NO: 111657 - RNA, 32 nt, Human
ccuagccaggagagacugcagggacucacuca

SEQ ID NO: 111658 - RNA, 32 nt, Human
ccuagccagggucuguucuuguggaccagagc

SEQ ID NO: 111659 - RNA, 32 nt, Human
ccuagccagucccccacucucucccucuguag

SEQ ID NO: 111660 - RNA, 32 nt, Human
ccuagccauccccucacuauucccgacccaaa

SEQ ID NO: 111661 - RNA, 22 nt, Human
ccuagcccaagccugucuuucc

SEQ ID NO: 111662 - RNA, 32 nt, Human
ccuagcccagccccagucacugucagggucgg

SEQ ID NO: 111663 - RNA, 32 nt, Human
ccuagcccaggccuccaugaaggagaaccugg

SEQ ID NO: 111664 - RNA, 32 nt, Human
ccuagccccacccucucugcucccugugacuu

SEQ ID NO: 111665 - RNA, 32 nt, Human
ccuagccccauccaccauugccagucagcgcc

SEQ ID NO: 111666 - RNA, 25 nt, Human
ccuagccccaucuccaggagccccu

SEQ ID NO: 111667 - RNA, 32 nt, Human
ccuagccccugcccgccugccugccaccucuc

SEQ ID NO: 111668 - RNA, 32 nt, Human
ccuagccccugcugucaugaaggggccaggca

SEQ ID NO: 111669 - RNA, 32 nt, Human
ccuagccccuggcagacauagcugcuucagug

SEQ ID NO: 111670 - RNA, 32 nt, Human
ccuagccccuugguaugugcucuggcucuggu

SEQ ID NO: 111671 - RNA, 32 nt, Human
ccuagcccuacugcccaccccaccccaaccca

SEQ ID NO: 111672 - RNA, 32 nt, Human
ccuagccgccagggugacagaaggcagaacug

SEQ ID NO: 111673 - RNA, 17 nt, Human
ccuagccggggggcgca

SEQ ID NO: 111674 - RNA, 24 nt, Human
ccuagccucacccccuugcucuca

SEQ ID NO: 111675 - RNA, 32 nt, Human
ccuagccucagcuguauccuauugcugaaaac

SEQ ID NO: 111676 - RNA, 32 nt, Human
ccuagccuccacccuggccuggggccccacuc

SEQ ID NO: 111677 - RNA, 32 nt, Human
ccuagccuccuauaggcccaggaagagggcag

SEQ ID NO: 111678 - RNA, 32 nt, Human
ccuagccuccucuccagcacuuggagagggag

SEQ ID NO: 111679 - RNA, 32 nt, Human
ccuagccucucaucucuucacccucuucccug

SEQ ID NO: 111680 - RNA, 32 nt, Human
ccuagccucuguaaacucugcagcauacuaau

SEQ ID NO: 111681 - RNA, 32 nt, Human
ccuagccuggaauggacuggccuggggaaggc

SEQ ID NO: 111682 - RNA, 32 nt, Human
ccuagccugggcaacagagcaagacaccgucu

SEQ ID NO: 111683 - RNA, 24 nt, Human
ccuagccugggugacagagcaaga

SEQ ID NO: 111684 - RNA, 32 nt, Human
ccuagccugggugacagagcaagacuccaucu

SEQ ID NO: 111685 - RNA, 32 nt, Human
ccuagccuuccagggagaaagaggccccugca

SEQ ID NO: 111686 - RNA, 32 nt, Human
ccuagccuugagcaccuuccacauagcaauga

SEQ ID NO: 111687 - RNA, 32 nt, Human
ccuagcgcggcccaaccuuuacuccagagauc

SEQ ID NO: 111688 - RNA, 32 nt, Human
ccuagcgcuaucucccugccuccugccggcuc

SEQ ID NO: 111689 - RNA, 18 nt, Human
ccuagcggcugucaccuc

SEQ ID NO: 111690 - RNA, 32 nt, Human
ccuagcguggcuugcugccuuugguaagaaca

SEQ ID NO: 111691 - RNA, 18 nt, Human
ccuagcuaaaaagauaaa

SEQ ID NO: 111692 - RNA, 32 nt, Human
ccuagcuacugaggaggcugacggaggaggau

SEQ ID NO: 111693 - RNA, 32 nt, Human
ccuagcucagcagcccaaggacgauggugagg

SEQ ID NO: 111694 - RNA, 32 nt, Human
ccuagcucagccacucccagacuccugaccca

SEQ ID NO: 111695 - RNA, 32 nt, Human
ccuagcucauagauucucuguggggagaguga

SEQ ID NO: 111696 - RNA, 32 nt, Human
ccuagcuccagccucuuccugggccagccagg

SEQ ID NO: 111697 - RNA, 32 nt, Human
ccuagcuccccugccccugcagccuggagggc

SEQ ID NO: 111698 - RNA, 32 nt, Human
ccuagcucccggguauuggggcugaggcucug

SEQ ID NO: 111699 - RNA, 23 nt, Human
ccuagcuccuggccccugccagg

SEQ ID NO: 111700 - RNA, 32 nt, Human
ccuagcucguaaaauguucucauuccaugaca

SEQ ID NO: 111701 - RNA, 32 nt, Human
ccuagcucugcuauuuaccagccagguggccu

SEQ ID NO: 111702 - RNA, 32 nt, Human
ccuagcugaccccuucaccucucccccucccu

SEQ ID NO: 111703 - RNA, 32 nt, Human
ccuagcugcccacuuuucaguguuacgaagcc

SEQ ID NO: 111704 - RNA, 32 nt, Human
ccuagcugccugcaccugcccuucagggagau

SEQ ID NO: 111705 - RNA, 32 nt, Human
ccuagcugcugccucccaauggccuuuguagg

SEQ ID NO: 111706 - RNA, 15 nt, Human
ccuagcugcuuggga

SEQ ID NO: 111707 - RNA, 17 nt, Human
ccuagcuggauugcaga

SEQ ID NO: 111708 - RNA, 32 nt, Human
ccuagcuguccacauuucacuaucugaagagc

SEQ ID NO: 111709 - RNA, 32 nt, Human
ccuagcugucucaucccuugcccuggagagac

SEQ ID NO: 111710 - RNA, 32 nt, Human
ccuagcugugagugccuuuuggucuggaaagu

SEQ ID NO: 111711 - RNA, 32 nt, Human
ccuagcugugugaucuugacaggcacuggacg

SEQ ID NO: 111712 - RNA, 32 nt, Human
ccuagcuugcuccccacugugccuuuguuaga

SEQ ID NO: 111713 - RNA, 32 nt, Human
ccuagcuuggguggcagagcaagacucuauca

SEQ ID NO: 111714 - RNA, 23 nt, Human
ccuagcuugucccaagcuucccu

SEQ ID NO: 111715 - RNA, 32 nt, Human
ccuagcuuguuccuuaacccuuuuggaugacu

SEQ ID NO: 111716 - RNA, 32 nt, Human
ccuagcuuucucaaugaauacacacauauuuu

SEQ ID NO: 111717 - RNA, 32 nt, Human
ccuagcuuuggaugugcuuucugccauaaaga

SEQ ID NO: 111718 - RNA, 15 nt, Human
ccuaggaaaguuguc

SEQ ID NO: 111719 - RNA, 32 nt, Human
ccuaggaaggaugaggaugacaggcacuauuu

SEQ ID NO: 111720 - RNA, 32 nt, Human
ccuaggaaguagggagaaaugaaggaagggca

SEQ ID NO: 111721 - RNA, 18 nt, Human
ccuaggaauaaccggugg

SEQ ID NO: 111722 - RNA, 32 nt, Human
ccuaggaauucaagaccagccuagguaacaua

SEQ ID NO: 111723 - RNA, 32 nt, Human
ccuaggaauucaggaagaaaugggauuauaaa

SEQ ID NO: 111724 - RNA, 32 nt, Human
ccuaggacaauuauuuguuacauaauccgacc

SEQ ID NO: 111725 - RNA, 32 nt, Human
ccuaggacagccugagaguaacuggaccuggu

SEQ ID NO: 111726 - RNA, 32 nt, Human
ccuaggaccacgcaggagguggugggcucgca

SEQ ID NO: 111727 - RNA, 32 nt, Human
ccuaggacguugaggcugcagugagcuguguu

SEQ ID NO: 111728 - RNA, 32 nt, Human
ccuaggacuggcuagucaugugaccucggguu

SEQ ID NO: 111729 - RNA, 18 nt, Human
ccuaggagagaagcuguc

SEQ ID NO: 111730 - RNA, 32 nt, Human
ccuaggagagugaacagguagauuuagacguu

SEQ ID NO: 111731 - RNA, 32 nt, Human
ccuaggagcagcugcaauugcaccugagggac

SEQ ID NO: 111732 - RNA, 32 nt, Human
ccuaggagcccuggacucaggcuggcagaggg

SEQ ID NO: 111733 - RNA, 32 nt, Human
ccuaggagccugggaccaggagccagaaaguu

SEQ ID NO: 111734 - RNA, 32 nt, Human
ccuaggaggcagaaguugcagugagcagagau

SEQ ID NO: 111735 - RNA, 24 nt, Human
ccuaggaggcagagguugcaguga

SEQ ID NO: 111736 - RNA, 32 nt, Human
ccuaggaggcagagguugcagugagccaaguu

SEQ ID NO: 111737 - RNA, 32 nt, Human
ccuaggaggcagaguuugcagugagcugagau

SEQ ID NO: 111738 - RNA, 32 nt, Human
ccuaggaggcccaggcuggagugagguggcac

SEQ ID NO: 111739 - RNA, 23 nt, Human
ccuaggaggcggacguugcagug

SEQ ID NO: 111740 - RNA, 24 nt, Human
ccuaggaggcggacguugcaguga

SEQ ID NO: 111741 - RNA, 23 nt, Human
ccuaggaggcggagcuugcagug

SEQ ID NO: 111742 - RNA, 24 nt, Human
ccuaggaggcggagcuugcaguga

SEQ ID NO: 111743 - RNA, 23 nt, Human
ccuaggaggcggagguugcagug

SEQ ID NO: 111744 - RNA, 24 nt, Human
ccuaggaggcggagguugcaguga

SEQ ID NO: 111745 - RNA, 32 nt, Human
ccuaggaggcggagguugcagugagccaagau

SEQ ID NO: 111746 - RNA, 32 nt, Human
ccuaggaggcggagguugcagugagucaagau

SEQ ID NO: 111747 - RNA, 32 nt, Human
ccuaggaggcucagaggcaguggugugggagc

SEQ ID NO: 111748 - RNA, 32 nt, Human
ccuaggaggcugagauugcagugagccgaaau

SEQ ID NO: 111749 - RNA, 32 nt, Human
ccuaggaggggaagguugcagugagccgagau

SEQ ID NO: 111750 - RNA, 24 nt, Human
ccuaggaggucaaggcugcaguga

SEQ ID NO: 111751 - RNA, 32 nt, Human
ccuaggaggucgaggcugcagugagccaagau

SEQ ID NO: 111752 - RNA, 32 nt, Human
ccuaggagguggagguugcagugagccgagau

SEQ ID NO: 111753 - RNA, 32 nt, Human
ccuaggagguggagguugcagugagcugagau

SEQ ID NO: 111754 - RNA, 32 nt, Human
ccuaggagguucuggaggguucauucuuggac

SEQ ID NO: 111755 - RNA, 32 nt, Human
ccuaggagguugaggcugcagugagcuaugau

SEQ ID NO: 111756 - RNA, 32 nt, Human
ccuaggagguugaggcugcagugagcugugau

SEQ ID NO: 111757 - RNA, 32 nt, Human
ccuaggaugcccagggcugggugcagccagcu

SEQ ID NO: 111758 - RNA, 22 nt, Human
ccuaggcaacaaccaucacccu

SEQ ID NO: 111759 - RNA, 32 nt, Human
ccuaggcaacaagagugaaacuccgucuuaaa

SEQ ID NO: 111760 - RNA, 22 nt, Human
ccuaggcaacacagggagaccc

SEQ ID NO: 111761 - RNA, 32 nt, Human
ccuaggcaacacagggagacccgugucgacaa

SEQ ID NO: 111762 - RNA, 23 nt, Human
ccuaggcaacacagugaaacccu

SEQ ID NO: 111763 - RNA, 32 nt, Human
ccuaggcaacacagugaaacccugucucuaca

SEQ ID NO: 111764 - RNA, 23 nt, Human
ccuaggcaacacagugaggccuu

SEQ ID NO: 111765 - RNA, 32 nt, Human
ccuaggcaacacggcaagacccugucuccaca

SEQ ID NO: 111766 - RNA, 28 nt, Human
ccuaggcaacagagcaagacuccgucuc

SEQ ID NO: 111767 - RNA, 32 nt, Human
ccuaggcaacagagcaagacucugucucaaaa

SEQ ID NO: 111768 - RNA, 23 nt, Human
ccuaggcaacagagcgagacccu

SEQ ID NO: 111769 - RNA, 24 nt, Human
ccuaggcaacauagcaagaccuca

SEQ ID NO: 111770 - RNA, 23 nt, Human
ccuaggcaacauagcaagguccc

SEQ ID NO: 111771 - RNA, 23 nt, Human
ccuaggcaacauagcgagacccu

SEQ ID NO: 111772 - RNA, 32 nt, Human
ccuaggcaacauagcgagacccugucucuaca

SEQ ID NO: 111773 - RNA, 22 nt, Human
ccuaggcaacauagggagaccc

SEQ ID NO: 111774 - RNA, 22 nt, Human
ccuaggcaacauaguaagaccu

SEQ ID NO: 111775 - RNA, 23 nt, Human
ccuaggcaacauagugagacccu

SEQ ID NO: 111776 - RNA, 32 nt, Human
ccuaggcaacauagugagacccugucucuacu

SEQ ID NO: 111777 - RNA, 22 nt, Human
ccuaggcaacauggagaaaccc

SEQ ID NO: 111778 - RNA, 23 nt, Human
ccuaggcaacauggagaaacccu

SEQ ID NO: 111779 - RNA, 22 nt, Human
ccuaggcaacauggcaaaaccc

SEQ ID NO: 111780 - RNA, 23 nt, Human
ccuaggcaacauggcgaaacccu

SEQ ID NO: 111781 - RNA, 23 nt, Human
ccuaggcaacauggugaaacccu

SEQ ID NO: 111782 - RNA, 23 nt, Human
ccuaggcaacauggugaaaccuu

SEQ ID NO: 111783 - RNA, 32 nt, Human
ccuaggcaaguggaucaccugaggucgggagu

SEQ ID NO: 111784 - RNA, 32 nt, Human
ccuaggcaccuccccgcucucccugucacgcu

SEQ ID NO: 111785 - RNA, 32 nt, Human
ccuaggcacugagguagcuuaacucuaggcac

SEQ ID NO: 111786 - RNA, 32 nt, Human
ccuaggcacuguccccucccacagccuccuuc

SEQ ID NO: 111787 - RNA, 32 nt, Human
ccuaggcagagcugcugauuguggggcuggga

SEQ ID NO: 111788 - RNA, 32 nt, Human
ccuaggcagccccugaggaggagggcugaaua

SEQ ID NO: 111789 - RNA, 32 nt, Human
ccuaggcaggcagaucaccugaggucaggagu

SEQ ID NO: 111790 - RNA, 20 nt, Human
ccuaggcaggggaugcacag

SEQ ID NO: 111791 - RNA, 32 nt, Human
ccuaggcauagggaaagugcagaauauugccg

SEQ ID NO: 111792 - RNA, 20 nt, Human
ccuaggccagagugcagugg

SEQ ID NO: 111793 - RNA, 32 nt, Human
ccuaggccagccagccuaucccucucuccccu

SEQ ID NO: 111794 - RNA, 32 nt, Human
ccuaggccaugguuucuaaucuuauggcuagu

SEQ ID NO: 111795 - RNA, 32 nt, Human
ccuaggcccaggaugaggaggagcuuggcucc

SEQ ID NO: 111796 - RNA, 32 nt, Human
ccuaggcccgggccaccauggcgcugccucca

SEQ ID NO: 111797 - RNA, 32 nt, Human
ccuaggcccuggggagcccaguccacugagca

SEQ ID NO: 111798 - RNA, 32 nt, Human
ccuaggcccuuuucagacuccugggcccuugg

SEQ ID NO: 111799 - RNA, 32 nt, Human
ccuaggccggucuugaacuccugggcucaagu

SEQ ID NO: 111800 - RNA, 32 nt, Human
ccuaggccucaagggacuuauaguuuauuuuu

SEQ ID NO: 111801 - RNA, 32 nt, Human
ccuaggcgaagauccggacucuggguguuuug

SEQ ID NO: 111802 - RNA, 20 nt, Human
ccuaggcgcgguucagguca

SEQ ID NO: 111803 - RNA, 32 nt, Human
ccuaggcggacggaucaccugaggucaggagu

SEQ ID NO: 111804 - RNA, 19 nt, Human
ccuaggcggaguacagugg

SEQ ID NO: 111805 - RNA, 32 nt, Human
ccuaggcggcaggcccaggaauggcuggguag

SEQ ID NO: 111806 - RNA, 32 nt, Human
ccuaggcgggcagaucaccugaggucaggagu

SEQ ID NO: 111807 - RNA, 32 nt, Human
ccuaggcgggcguaucaugaagucaggaguuc

SEQ ID NO: 111808 - RNA, 32 nt, Human
ccuaggcggguggaucaccugaggucaggagu

SEQ ID NO: 111809 - RNA, 32 nt, Human
ccuaggcguauguguauacacgcacagauauu

SEQ ID NO: 111810 - RNA, 31 nt, Human
ccuaggcgugggggcagauggguggacagcu

SEQ ID NO: 111811 - RNA, 32 nt, Human
ccuaggcuaagcaauccucccaccuuagccuc

SEQ ID NO: 111812 - RNA, 22 nt, Human
ccuaggcuagagggcagugaug

SEQ ID NO: 111813 - RNA, 32 nt, Human
ccuaggcucacugcaaccucagccuccugggc

SEQ ID NO: 111814 - RNA, 32 nt, Human
ccuaggcuccaauuaaaugauggccuccggau

SEQ ID NO: 111815 - RNA, 32 nt, Human
ccuaggcuccaccccauccaguucaugagaau

SEQ ID NO: 111816 - RNA, 32 nt, Human
ccuaggcucccauccuuuccaucaagaccuuc

SEQ ID NO: 111817 - RNA, 32 nt, Human
ccuaggcuccgugcaggaaugggugaaggccc

SEQ ID NO: 111818 - RNA, 32 nt, Human
ccuaggcugacuggauuugagaacaaauaccc

SEQ ID NO: 111819 - RNA, 19 nt, Human
ccuaggcugagugcagugg

SEQ ID NO: 111820 - RNA, 32 nt, Human
ccuaggcugaucucccucuccuggacucacau

SEQ ID NO: 111821 - RNA, 20 nt, Human
ccuaggcugcagugcagugg

SEQ ID NO: 111822 - RNA, 20 nt, Human
ccuaggcuggaaugcagugg

SEQ ID NO: 111823 - RNA, 22 nt, Human
ccuaggcuggaaugcaguggug

SEQ ID NO: 111824 - RNA, 20 nt, Human
ccuaggcuggaguacagugg

SEQ ID NO: 111825 - RNA, 20 nt, Human
ccuaggcuggagugaagugg

SEQ ID NO: 111826 - RNA, 19 nt, Human
ccuaggcuggagugcaaug

SEQ ID NO: 111827 - RNA, 20 nt, Human
ccuaggcuggagugcaaugg

SEQ ID NO: 111828 - RNA, 20 nt, Human
ccuaggcuggagugcagcgg

SEQ ID NO: 111829 - RNA, 18 nt, Human
ccuaggcuggagugcagu

SEQ ID NO: 111830 - RNA, 19 nt, Human
ccuaggcuggagugcagug

SEQ ID NO: 111831 - RNA, 20 nt, Human
ccuaggcuggagugcaguga

SEQ ID NO: 111832 - RNA, 20 nt, Human
ccuaggcuggagugcagugg

SEQ ID NO: 111833 - RNA, 22 nt, Human
ccuaggcuggagugcaguggug

SEQ ID NO: 111834 - RNA, 21 nt, Human
ccuaggcuggaguugcagugg

SEQ ID NO: 111835 - RNA, 32 nt, Human
ccuaggcuggaguuuacagagacacugcacag

SEQ ID NO: 111836 - RNA, 32 nt, Human
ccuaggcuggucucgaacuccugggcuuaaau

SEQ ID NO: 111837 - RNA, 32 nt, Human
ccuaggcuggucuugaacuccugggcucaagc

SEQ ID NO: 111838 - RNA, 32 nt, Human
ccuaggcuguggggaggggaggagaacugcuc

SEQ ID NO: 111839 - RNA, 32 nt, Human
ccuaggcuugucuggaacuccugggcucaagg

SEQ ID NO: 111840 - RNA, 22 nt, Human
ccuagggaaagagaaagaaaga

SEQ ID NO: 111841 - RNA, 32 nt, Human
ccuagggaacacugaggcaggaaaagcagggc

SEQ ID NO: 111842 - RNA, 19 nt, Human
ccuagggaacagacauugg

SEQ ID NO: 111843 - RNA, 18 nt, Human
ccuagggaagcccaucca

SEQ ID NO: 111844 - RNA, 32 nt, Human
ccuagggaaggugaggcgagguggggaguugg

SEQ ID NO: 111845 - RNA, 32 nt, Human
ccuagggaagugguucugucuccucacaggcu

SEQ ID NO: 111846 - RNA, 32 nt, Human
ccuagggaaugagguugauugggagcgcuuuc

SEQ ID NO: 111847 - RNA, 22 nt, Human
ccuagggaccagaaggagccag

SEQ ID NO: 111848 - RNA, 25 nt, Human
ccuagggaggcagagguuguaguga

SEQ ID NO: 111849 - RNA, 32 nt, Human
ccuagggaggcagagguuguagugagccaaga

SEQ ID NO: 111850 - RNA, 26 nt, Human
ccuagggagggcggggguugugguga

SEQ ID NO: 111851 - RNA, 32 nt, Human
ccuagggaggucgaggccacagugagcugaga

SEQ ID NO: 111852 - RNA, 32 nt, Human
ccuagggagucacacaguccccagggaaacuu

SEQ ID NO: 111853 - RNA, 27 nt, Human
ccuagggcacugggcuuccugucccca

SEQ ID NO: 111854 - RNA, 32 nt, Human
ccuagggcagccucugucugugugguuaaugu

SEQ ID NO: 111855 - RNA, 32 nt, Human
ccuagggccaaguguugccugccaccaaucag

SEQ ID NO: 111856 - RNA, 19 nt, Human
ccuagggccgcugcugccg

SEQ ID NO: 111857 - RNA, 32 nt, Human
ccuagggccgcugcugccgacagccauggagg

SEQ ID NO: 111858 - RNA, 21 nt, Human
ccuagggccuggcacacugca

SEQ ID NO: 111859 - RNA, 32 nt, Human
ccuagggccugugggugaaacacuccugugcc

SEQ ID NO: 111860 - RNA, 32 nt, Human
ccuagggcgggaggcgacauggagacaggggc

SEQ ID NO: 111861 - RNA, 27 nt, Human
ccuagggcgugaaacuuccuguuccca

SEQ ID NO: 111862 - RNA, 32 nt, Human
ccuagggcucccaacugaccucaggccucuga

SEQ ID NO: 111863 - RNA, 32 nt, Human
ccuagggcuggaagguuuagcagcagccuggu

SEQ ID NO: 111864 - RNA, 32 nt, Human
ccuagggcuuggucccccucuucugaggcccu

SEQ ID NO: 111865 - RNA, 32 nt, Human
ccuaggggaagaggagaagaggguaagggggc

SEQ ID NO: 111866 - RNA, 19 nt, Human
ccuaggggaagggggugca

SEQ ID NO: 111867 - RNA, 23 nt, Human
ccuaggggaaugagggggcucag

SEQ ID NO: 111868 - RNA, 26 nt, Human
ccuaggggacaggagccaggcuacug

SEQ ID NO: 111869 - RNA, 31 nt, Human
ccuaggggagaagagucuucacugggguucg

SEQ ID NO: 111870 - RNA, 22 nt, Human
ccuaggggagucccuguuccca

SEQ ID NO: 111871 - RNA, 32 nt, Human
ccuaggggcuccugccugcccaagcggcugag

SEQ ID NO: 111872 - RNA, 32 nt, Human
ccuaggggcugagaggugagcagcaggggagc

SEQ ID NO: 111873 - RNA, 32 nt, Human
ccuagggggagguggugauguugggaguggga

SEQ ID NO: 111874 - RNA, 21 nt, Human
ccuagggggcagagggugcag

SEQ ID NO: 111875 - RNA, 32 nt, Human
ccuagggguucgcuggcugagcacacaugauc

SEQ ID NO: 111876 - RNA, 18 nt, Human
ccuagggucccuccugcc

SEQ ID NO: 111877 - RNA, 32 nt, Human
ccuagggugaagccgggaggaaaaugaagagu

SEQ ID NO: 111878 - RNA, 32 nt, Human
ccuagggugaugaguucaccucucugggcauc

SEQ ID NO: 111879 - RNA, 32 nt, Human
ccuaggguucucguucucccagcuccagccuu

SEQ ID NO: 111880 - RNA, 32 nt, Human
ccuagguaacauagugagacccugucucauua

SEQ ID NO: 111881 - RNA, 32 nt, Human
ccuagguacacauguacaugcacuacaguuua

SEQ ID NO: 111882 - RNA, 32 nt, Human
ccuagguagcuaaagguugcaugaaggcccug

SEQ ID NO: 111883 - RNA, 32 nt, Human
ccuagguaggggaggauggugccuggagcaga

SEQ ID NO: 111884 - RNA, 32 nt, Human
ccuaggucacagccugcugggcugggucgcgu

SEQ ID NO: 111885 - RNA, 32 nt, Human
ccuagguccccagauggggagacugaggccgu

SEQ ID NO: 111886 - RNA, 32 nt, Human
ccuaggucucucuauuucuugaagaagagagc

SEQ ID NO: 111887 - RNA, 23 nt, Human
ccuaggucucuggcugcccauga

SEQ ID NO: 111888 - RNA, 32 nt, Human
ccuaggucugcugauuccuguccuggugagcu

SEQ ID NO: 111889 - RNA, 32 nt, Human
ccuaggugacagagggaaacuccaucuccagg

SEQ ID NO: 111890 - RNA, 22 nt, Human
ccuaggugagugggacacugca

SEQ ID NO: 111891 - RNA, 32 nt, Human
ccuaggugauggguugacaggagcagcaaacc

SEQ ID NO: 111892 - RNA, 32 nt, Human
ccuaggugauuuucacauuuuuaguuccucag

SEQ ID NO: 111893 - RNA, 32 nt, Human
ccuagguggaaaggaaagcaagucugcaguuc

SEQ ID NO: 111894 - RNA, 32 nt, Human
ccuagguggacaccagcucccgauaggaggca

SEQ ID NO: 111895 - RNA, 32 nt, Human
ccuagguggccaaggcuuccugcauugcuucc

SEQ ID NO: 111896 - RNA, 32 nt, Human
ccuaggugggagccaccacuccugccugcccc

SEQ ID NO: 111897 - RNA, 32 nt, Human
ccuaggugggcggaucacuugaggucaggagu

SEQ ID NO: 111898 - RNA, 32 nt, Human
ccuaggugggcggauugcuugaggucaggagu

SEQ ID NO: 111899 - RNA, 32 nt, Human
ccuaggugggcuaagguucugcucucagagcu

SEQ ID NO: 111900 - RNA, 24 nt, Human
ccuagguguugggauuacaggcgu

SEQ ID NO: 111901 - RNA, 32 nt, Human
ccuagguucaagugauucuacucucucagccu

SEQ ID NO: 111902 - RNA, 20 nt, Human
ccuagguuggagugcagugg

SEQ ID NO: 111903 - RNA, 23 nt, Human
ccuagguuggagugcaguggugu

SEQ ID NO: 111904 - RNA, 32 nt, Human
ccuagguugggugggagagggaagcaaugagg

SEQ ID NO: 111905 - RNA, 32 nt, Human
ccuaguaagcaucuacuucaggccaacaaggu

SEQ ID NO: 111906 - RNA, 32 nt, Human
ccuaguaauguuccagcuuuaccccagccuua

SEQ ID NO: 111907 - RNA, 32 nt, Human
ccuaguacggugccaugcuuugaagcuggacu

SEQ ID NO: 111908 - RNA, 32 nt, Human
ccuaguacugacaccauaugguuuaaaaccag

SEQ ID NO: 111909 - RNA, 32 nt, Human
ccuaguagaagcucacuugccaccucucaggg

SEQ ID NO: 111910 - RNA, 22 nt, Human
ccuaguagcuggcauuacaggc

SEQ ID NO: 111911 - RNA, 23 nt, Human
ccuaguagcugggacuacaggcg

SEQ ID NO: 111912 - RNA, 23 nt, Human
ccuaguagcugggacuacaggug

SEQ ID NO: 111913 - RNA, 23 nt, Human
ccuaguagcugggaugacaggcg

SEQ ID NO: 111914 - RNA, 22 nt, Human
ccuaguagcugggauuacaggc

SEQ ID NO: 111915 - RNA, 23 nt, Human
ccuaguagcugggauuacaggcg

SEQ ID NO: 111916 - RNA, 23 nt, Human
ccuaguagcugggauuacaggug

SEQ ID NO: 111917 - RNA, 23 nt, Human
ccuaguagcugggauuauaggcg

SEQ ID NO: 111918 - RNA, 22 nt, Human
ccuaguagcugggauugcaggc

SEQ ID NO: 111919 - RNA, 31 nt, Human
ccuaguaggcacuccuuugcuuccccacacu

SEQ ID NO: 111920 - RNA, 24 nt, Human
ccuaguaggcagagguugcaguga

SEQ ID NO: 111921 - RNA, 22 nt, Human
ccuaguaguugggauuacaggc

SEQ ID NO: 111922 - RNA, 32 nt, Human
ccuaguauacccacugcauccuacuccuaccu

SEQ ID NO: 111923 - RNA, 32 nt, Human
ccuagucaacagcagaccagccuggccaaugc

SEQ ID NO: 111924 - RNA, 32 nt, Human
ccuagucaaugccaccuaaauguauucacaaa

SEQ ID NO: 111925 - RNA, 20 nt, Human
ccuagucagcccacaccccu

SEQ ID NO: 111926 - RNA, 32 nt, Human
ccuaguccaacuuggggugggcaaggcaguca

SEQ ID NO: 111927 - RNA, 32 nt, Human
ccuaguccaggguccaccuacuccaggggguc

SEQ ID NO: 111928 - RNA, 21 nt, Human
ccuagucccgggcuggcggga

SEQ ID NO: 111929 - RNA, 32 nt, Human
ccuagucccugcccaagcuucucccccagcca

SEQ ID NO: 111930 - RNA, 32 nt, Human
ccuaguccucucauuccucccacccuccgaga

SEQ ID NO: 111931 - RNA, 32 nt, Human
ccuaguccucuuccugugcuucuuuuugaaag

SEQ ID NO: 111932 - RNA, 32 nt, Human
ccuaguccugaauuccuuucagaagcuccggc

SEQ ID NO: 111933 - RNA, 32 nt, Human
ccuaguccugagcgugucugugugcgagugga

SEQ ID NO: 111934 - RNA, 32 nt, Human
ccuaguccuugcaaauccaaaagucuggggga

SEQ ID NO: 111935 - RNA, 32 nt, Human
ccuaguccuuucucuguggagugggcugcaaa

SEQ ID NO: 111936 - RNA, 32 nt, Human
ccuaguccuuuuaaugcuguguguucuguuaa

SEQ ID NO: 111937 - RNA, 32 nt, Human
ccuagucuaggaggcacagaauucucauucug

SEQ ID NO: 111938 - RNA, 32 nt, Human
ccuagucucaaggacuugggcagcuucuggaa

SEQ ID NO: 111939 - RNA, 32 nt, Human
ccuagucugggcgacagagccagacuccaucu

SEQ ID NO: 111940 - RNA, 32 nt, Human
ccuagucuguaacucuuucugaggagcuguua

SEQ ID NO: 111941 - RNA, 17 nt, Human
ccuagucuuggcacugg

SEQ ID NO: 111942 - RNA, 32 nt, Human
ccuagugaaagccaaguggccuggagucuggg

SEQ ID NO: 111943 - RNA, 19 nt, Human
ccuagugaauaacaugagg

SEQ ID NO: 111944 - RNA, 32 nt, Human
ccuagugagggacuguguugacugacgagccg

SEQ ID NO: 111945 - RNA, 32 nt, Human
ccuagugagggcaggagagaggaggacgcaca

SEQ ID NO: 111946 - RNA, 32 nt, Human
ccuagugagggcugcaagaccauccugcccgg

SEQ ID NO: 111947 - RNA, 32 nt, Human
ccuagugaugaauuaggugggguccuuggcuc

SEQ ID NO: 111948 - RNA, 32 nt, Human
ccuagugcaggacuuuucucuguauguuuuca

SEQ ID NO: 111949 - RNA, 32 nt, Human
ccuagugccagccccucacacgccuucauccu

SEQ ID NO: 111950 - RNA, 32 nt, Human
ccuagugccuuagcuccaugcccggcugcagc

SEQ ID NO: 111951 - RNA, 32 nt, Human
ccuagugcucaugccccagaaaaggccacugg

SEQ ID NO: 111952 - RNA, 32 nt, Human
ccuagugcucccuucacuauccugugccuucc

SEQ ID NO: 111953 - RNA, 32 nt, Human
ccuaguggagcuaugagaagagaaccacuguc

SEQ ID NO: 111954 - RNA, 32 nt, Human
ccuaguggagcuaugagacaaaggccaccauc

SEQ ID NO: 111955 - RNA, 32 nt, Human
ccuaguggagcugagagaagagggucacuguc

SEQ ID NO: 111956 - RNA, 32 nt, Human
ccuaguggaggaggcucuucagucuccugauu

SEQ ID NO: 111957 - RNA, 32 nt, Human
ccuaguggcgcaugccuguaaucccagcugcu

SEQ ID NO: 111958 - RNA, 23 nt, Human
ccuaguggcugggauuacaggcg

SEQ ID NO: 111959 - RNA, 32 nt, Human
ccuagugggaaugacccccugagcaugcagag

SEQ ID NO: 111960 - RNA, 32 nt, Human
ccuagugggagagagugggggagaggaagaga

SEQ ID NO: 111961 - RNA, 32 nt, Human
ccuagugggccaggcugaccgcagagucucca

SEQ ID NO: 111962 - RNA, 32 nt, Human
ccuagugggcuucucaacuuuugauccucagc

SEQ ID NO: 111963 - RNA, 32 nt, Human
ccuagugggggaaagcccuuagucuuguacag

SEQ ID NO: 111964 - RNA, 32 nt, Human
ccuaguguugcugugaccuggugacagaaaug

SEQ ID NO: 111965 - RNA, 32 nt, Human
ccuaguuaaacucauuucacuucuccugggag

SEQ ID NO: 111966 - RNA, 32 nt, Human
ccuaguuaagaaaagaggagauaauguucguc

SEQ ID NO: 111967 - RNA, 32 nt, Human
ccuaguuaucagugucuuacugugaagaaaau

SEQ ID NO: 111968 - RNA, 32 nt, Human
ccuaguucaagcgauuuuccuaccucagccuc

SEQ ID NO: 111969 - RNA, 28 nt, Human
ccuaguucagugucugccucaugggaag

SEQ ID NO: 111970 - RNA, 32 nt, Human
ccuaguucccauauuuaagaccagucuuuguc

SEQ ID NO: 111971 - RNA, 23 nt, Human
ccuaguuccgauuagacuaagga

SEQ ID NO: 111972 - RNA, 32 nt, Human
ccuaguucuccaaauucacuucugccuuccuc

SEQ ID NO: 111973 - RNA, 32 nt, Human
ccuaguugcacuaaccauccugggcuuccugu

SEQ ID NO: 111974 - RNA, 19 nt, Human
ccuaguuuccauggcuccg

SEQ ID NO: 111975 - RNA, 32 nt, Human
ccuaguuuucuuuccuccuuuccuccucugac

SEQ ID NO: 111976 - RNA, 31 nt, Human
ccuaguuuugaugaauaaacaugggaaagcc

SEQ ID NO: 111977 - RNA, 32 nt, Human
ccuaguuuugaugaauaaacaugggaaagcca

SEQ ID NO: 111978 - RNA, 32 nt, Human
ccuauaaaagugcacauacgcaacuguguucu

SEQ ID NO: 111979 - RNA, 32 nt, Human
ccuauaaacccagcuacucaggaggcuugagg

SEQ ID NO: 111980 - RNA, 32 nt, Human
ccuauaaacccuccugcaacagaucauauugc

SEQ ID NO: 111981 - RNA, 32 nt, Human
ccuauaaccaacacucaacuacaaauaggcug

SEQ ID NO: 111982 - RNA, 32 nt, Human
ccuauaaccccagcacuuugggaggccaaggc

SEQ ID NO: 111983 - RNA, 32 nt, Human
ccuauaaccccagcuauuugggaggcugaggc

SEQ ID NO: 111984 - RNA, 32 nt, Human
ccuauaaccccagcucccuaggagaccaaggc

SEQ ID NO: 111985 - RNA, 32 nt, Human
ccuauaagaggaauuucuuuuccuucauucau

SEQ ID NO: 111986 - RNA, 32 nt, Human
ccuauaaggaagagagaagcugucuguacuuu

SEQ ID NO: 111987 - RNA, 32 nt, Human
ccuauaauacaaauacacaauccuccaagaau

SEQ ID NO: 111988 - RNA, 32 nt, Human
ccuauaauaccagcuacuccggaggcugaggc

SEQ ID NO: 111989 - RNA, 22 nt, Human
ccuauaaucccaacuacuuggg

SEQ ID NO: 111990 - RNA, 23 nt, Human
ccuauaaucccaacuacuuggga

SEQ ID NO: 111991 - RNA, 23 nt, Human
ccuauaaucccagcaauuuggga

SEQ ID NO: 111992 - RNA, 22 nt, Human
ccuauaaucccagcaccuuggg

SEQ ID NO: 111993 - RNA, 19 nt, Human
ccuauaaucccagcacuuu

SEQ ID NO: 111994 - RNA, 22 nt, Human
ccuauaaucccagcacuuuggg

SEQ ID NO: 111995 - RNA, 22 nt, Human
ccuauaaucccagcuacauggg

SEQ ID NO: 111996 - RNA, 23 nt, Human
ccuauaaucccagcuacauggga

SEQ ID NO: 111997 - RNA, 32 nt, Human
ccuauaaucccagcuacaugggaggcugaggc

SEQ ID NO: 111998 - RNA, 32 nt, Human
ccuauaaucccagcuacucagaaggccgaggu

SEQ ID NO: 111999 - RNA, 32 nt, Human
ccuauaaucccagcuacucaggaggcagaggc

SEQ ID NO: 112000 - RNA, 32 nt, Human
ccuauaaucccagcuacucaggaggcugaagc

SEQ ID NO: 112001 - RNA, 32 nt, Human
ccuauaaucccagcuacucaggaggcugaggc

SEQ ID NO: 112002 - RNA, 32 nt, Human
ccuauaaucccagcuacucaggagucugaggc

SEQ ID NO: 112003 - RNA, 32 nt, Human
ccuauaaucccagcuacuccagaggcugaggc

SEQ ID NO: 112004 - RNA, 32 nt, Human
ccuauaaucccagcuacucgagugccugaggc

SEQ ID NO: 112005 - RNA, 32 nt, Human
ccuauaaucccagcuacucgggaggcuaaggc

SEQ ID NO: 112006 - RNA, 32 nt, Human
ccuauaaucccagcuacucgggaggcugagac

SEQ ID NO: 112007 - RNA, 32 nt, Human
ccuauaaucccagcuacucgggaggcugaggc

SEQ ID NO: 112008 - RNA, 32 nt, Human
ccuauaaucccagcuacuggggaggcugaggc

SEQ ID NO: 112009 - RNA, 32 nt, Human
ccuauaaucccagcuacuuaggaggcugaggc

SEQ ID NO: 112010 - RNA, 22 nt, Human
ccuauaaucccagcuacuuggg

SEQ ID NO: 112011 - RNA, 23 nt, Human
ccuauaaucccagcuacuuggga

SEQ ID NO: 112012 - RNA, 32 nt, Human
ccuauaaucccagcuacuugggaggccaaggc

SEQ ID NO: 112013 - RNA, 32 nt, Human
ccuauaaucccagcuacuugggaggcuaagac

SEQ ID NO: 112014 - RNA, 32 nt, Human
ccuauaaucccagcuacuugggaggcuaaggc

SEQ ID NO: 112015 - RNA, 32 nt, Human
ccuauaaucccagcuacuugggaggcugaagc

SEQ ID NO: 112016 - RNA, 32 nt, Human
ccuauaaucccagcuacuugggaggcugaggc

SEQ ID NO: 112017 - RNA, 32 nt, Human
ccuauaaucccagcuauucuggaggcugaggc

SEQ ID NO: 112018 - RNA, 32 nt, Human
ccuauaaucccagcuauuugggaggcugaggc

SEQ ID NO: 112019 - RNA, 32 nt, Human
ccuauaaucccagguacucaggaggcugaggc

SEQ ID NO: 112020 - RNA, 22 nt, Human
ccuauaaucccaguuacucggg

SEQ ID NO: 112021 - RNA, 32 nt, Human
ccuauaauccuagcuacucagguggcggaggu

SEQ ID NO: 112022 - RNA, 22 nt, Human
ccuauaaucucagcuacucagg

SEQ ID NO: 112023 - RNA, 32 nt, Human
ccuauaaucucagcuacucaggaggcugaggc

SEQ ID NO: 112024 - RNA, 32 nt, Human
ccuauaaucucagcuacuugggaggcugaggc

SEQ ID NO: 112025 - RNA, 32 nt, Human
ccuauaaugaugucugauauuuaaauaggaaa

SEQ ID NO: 112026 - RNA, 32 nt, Human
ccuauaauuccagcuacucaggaggcugaggc

SEQ ID NO: 112027 - RNA, 32 nt, Human
ccuauaauuccagcuacucgggaggccgaggc

SEQ ID NO: 112028 - RNA, 32 nt, Human
ccuauaauuccagcuacuugagaggcugagau

SEQ ID NO: 112029 - RNA, 24 nt, Human
ccuauacaagucugacuucugcau

SEQ ID NO: 112030 - RNA, 32 nt, Human
ccuauacaaucaggcaaguacuggcuucacuu

SEQ ID NO: 112031 - RNA, 32 nt, Human
ccuauacacguggggcagagccagcagaggcc

SEQ ID NO: 112032 - RNA, 32 nt, Human
ccuauacagagacauaaccacacacacucaga

SEQ ID NO: 112033 - RNA, 18 nt, Human
ccuauacauuucuguuca

SEQ ID NO: 112034 - RNA, 32 nt, Human
ccuauaccaguauuuucuaguuuaaaggagga

SEQ ID NO: 112035 - RNA, 32 nt, Human
ccuauagccccagcuacucaggaagcuagagc

SEQ ID NO: 112036 - RNA, 32 nt, Human
ccuauagccccagcuacuugggaggcugaggu

SEQ ID NO: 112037 - RNA, 32 nt, Human
ccuauagccccagcuauucaggagacugaggc

SEQ ID NO: 112038 - RNA, 32 nt, Human
ccuauagccugauuuaugucacugccaauuuc

SEQ ID NO: 112039 - RNA, 32 nt, Human
ccuauagcuccagcuacucaggaggcugaggc

SEQ ID NO: 112040 - RNA, 32 nt, Human
ccuauagcuguaauuugugcauuuucauugcu

SEQ ID NO: 112041 - RNA, 32 nt, Human
ccuauagguggcagucccuggagaagugguca

SEQ ID NO: 112042 - RNA, 32 nt, Human
ccuauagguugcauacuaacuuaagcauucau

SEQ ID NO: 112043 - RNA, 32 nt, Human
ccuauagucccaccuacucaggaggcugaggc

SEQ ID NO: 112044 - RNA, 23 nt, Human
ccuauagucccagcacucugaga

SEQ ID NO: 112045 - RNA, 22 nt, Human
ccuauagucccagcacuuuggg

SEQ ID NO: 112046 - RNA, 23 nt, Human
ccuauagucccagcacuuuggga

SEQ ID NO: 112047 - RNA, 32 nt, Human
ccuauagucccagcuacacaggaggcugaggc

SEQ ID NO: 112048 - RNA, 32 nt, Human
ccuauagucccagcuacaugggaggcuaaggu

SEQ ID NO: 112049 - RNA, 22 nt, Human
ccuauagucccagcuacucaga

SEQ ID NO: 112050 - RNA, 32 nt, Human
ccuauagucccagcuacucagaagccugaggc

SEQ ID NO: 112051 - RNA, 23 nt, Human
ccuauagucccagcuacucagga

SEQ ID NO: 112052 - RNA, 32 nt, Human
ccuauagucccagcuacucaggaagcugagac

SEQ ID NO: 112053 - RNA, 32 nt, Human
ccuauagucccagcuacucaggaggccgaggc

SEQ ID NO: 112054 - RNA, 32 nt, Human
ccuauagucccagcuacucaggaggcugaggc

SEQ ID NO: 112055 - RNA, 32 nt, Human
ccuauagucccagcuacucaggaggcugaggu

SEQ ID NO: 112056 - RNA, 22 nt, Human
ccuauagucccagcuacucgga

SEQ ID NO: 112057 - RNA, 32 nt, Human
ccuauagucccagcuacucggaaggcugaagc

SEQ ID NO: 112058 - RNA, 22 nt, Human
ccuauagucccagcuacucggg

SEQ ID NO: 112059 - RNA, 23 nt, Human
ccuauagucccagcuacucggga

SEQ ID NO: 112060 - RNA, 32 nt, Human
ccuauagucccagcuacucgggaggcuaaggc

SEQ ID NO: 112061 - RNA, 32 nt, Human
ccuauagucccagcuacucgggaggcugaggc

SEQ ID NO: 112062 - RNA, 32 nt, Human
ccuauagucccagcuacucgggaggcugaggu

SEQ ID NO: 112063 - RNA, 32 nt, Human
ccuauagucccagcuacucgggagucugaaac

SEQ ID NO: 112064 - RNA, 32 nt, Human
ccuauagucccagcuacucuggaggcugaggc

SEQ ID NO: 112065 - RNA, 22 nt, Human
ccuauagucccagcuacuuggg

SEQ ID NO: 112066 - RNA, 23 nt, Human
ccuauagucccagcuacuuggga

SEQ ID NO: 112067 - RNA, 32 nt, Human
ccuauagucccagcuacuugggaggcugaggc

SEQ ID NO: 112068 - RNA, 32 nt, Human
ccuauagucccagcuacuugggaggcugcagc

SEQ ID NO: 112069 - RNA, 32 nt, Human
ccuauagucccagcuacuugggagguugaggu

SEQ ID NO: 112070 - RNA, 32 nt, Human
ccuauagucccagcuacuugggggccugaggc

SEQ ID NO: 112071 - RNA, 32 nt, Human
ccuauagucccagcuauucaggaggcugaggu

SEQ ID NO: 112072 - RNA, 32 nt, Human
ccuauagucccagcugcucaggaggcugaggc

SEQ ID NO: 112073 - RNA, 23 nt, Human
ccuauagucccagugacuuggga

SEQ ID NO: 112074 - RNA, 32 nt, Human
ccuauaguccuccagaacuuagaaaugccugu

SEQ ID NO: 112075 - RNA, 22 nt, Human
ccuauagucgcagcuacuuggg

SEQ ID NO: 112076 - RNA, 23 nt, Human
ccuauagucgcagcuacuuggga

SEQ ID NO: 112077 - RNA, 32 nt, Human
ccuauagucgcagcuacuugggaggcuggggc

SEQ ID NO: 112078 - RNA, 22 nt, Human
ccuauagucucagcuacucaga

SEQ ID NO: 112079 - RNA, 32 nt, Human
ccuauagucucagcuacucagaggcugaggca

SEQ ID NO: 112080 - RNA, 32 nt, Human
ccuauaguuccaguuacucaggaggcugaggu

SEQ ID NO: 112081 - RNA, 32 nt, Human
ccuauaucauguuccuguauccugccuguguu

SEQ ID NO: 112082 - RNA, 32 nt, Human
ccuauaucuccccauuuccucuccuuccccac

SEQ ID NO: 112083 - RNA, 32 nt, Human
ccuauaucugagagaccugugugaacuauuga

SEQ ID NO: 112084 - RNA, 32 nt, Human
ccuauaugggagaaaguuggguuaaaucaaaa

SEQ ID NO: 112085 - RNA, 32 nt, Human
ccuauauucauuacaacguccucccagcuuuc

SEQ ID NO: 112086 - RNA, 32 nt, Human
ccuauauuuaucugagugcugucuaaaacugu

SEQ ID NO: 112087 - RNA, 32 nt, Human
ccuaucaaagccucccggaggccaccgugcug

SEQ ID NO: 112088 - RNA, 32 nt, Human
ccuaucaaaguguugggauuacaggcuugagc

SEQ ID NO: 112089 - RNA, 32 nt, Human
ccuaucaaccuuucauguuuuacccuguuaaa

SEQ ID NO: 112090 - RNA, 32 nt, Human
ccuaucaacuuucugccccuccuucaaggccc

SEQ ID NO: 112091 - RNA, 32 nt, Human
ccuaucaauugggcugaugaugucaguguucc

SEQ ID NO: 112092 - RNA, 19 nt, Human
ccuaucacacucccucaca

SEQ ID NO: 112093 - RNA, 18 nt, Human
ccuaucacacucuucuca

SEQ ID NO: 112094 - RNA, 32 nt, Human
ccuaucacugagacucggcuugaguggcugcu

SEQ ID NO: 112095 - RNA, 32 nt, Human
ccuaucacuugucaagguagggagaggucaga

SEQ ID NO: 112096 - RNA, 32 nt, Human
ccuaucagaaguuucucagcucccaaggcucu

SEQ ID NO: 112097 - RNA, 32 nt, Human
ccuaucagauuuuauugcuccaacuuauaugg

SEQ ID NO: 112098 - RNA, 32 nt, Human
ccuaucagcacagggaucucagcucuggccug

SEQ ID NO: 112099 - RNA, 32 nt, Human
ccuaucagcagcugaccugugagaaggaggcg

SEQ ID NO: 112100 - RNA, 32 nt, Human
ccuaucagcccugccugccaggagaacagaac

SEQ ID NO: 112101 - RNA, 32 nt, Human
ccuaucagcuuuguuucgccugaucucaaguu

SEQ ID NO: 112102 - RNA, 32 nt, Human
ccuaucagggcagcucucaggauugucauuuu

SEQ ID NO: 112103 - RNA, 32 nt, Human
ccuaucagucaguagagagagauguccagaaa

SEQ ID NO: 112104 - RNA, 32 nt, Human
ccuaucagugauugccauuagacuguugaaua

SEQ ID NO: 112105 - RNA, 32 nt, Human
ccuaucauaauggucuuagucauuucacacaa

SEQ ID NO: 112106 - RNA, 21 nt, Human
ccuaucaugcuuccccuuccc

SEQ ID NO: 112107 - RNA, 32 nt, Human
ccuaucauggcaugcaagaaagcacaaugccu

SEQ ID NO: 112108 - RNA, 32 nt, Human
ccuauccagaaugcaucucuucugcuucccau

SEQ ID NO: 112109 - RNA, 32 nt, Human
ccuauccauaaaaugaagguagccaggccugc

SEQ ID NO: 112110 - RNA, 32 nt, Human
ccuauccaucauuaaaagguuuauuaucagug

SEQ ID NO: 112111 - RNA, 32 nt, Human
ccuaucccaaguaauuauuuacacguuucgcg

SEQ ID NO: 112112 - RNA, 28 nt, Human
ccuaucccaagugugauccuucauccca

SEQ ID NO: 112113 - RNA, 32 nt, Human
ccuaucccaaguuuuaugacaguuuuaauuga

SEQ ID NO: 112114 - RNA, 20 nt, Human
ccuaucccagagcgaugcug

SEQ ID NO: 112115 - RNA, 22 nt, Human
ccuaucccaguugaaccagcug

SEQ ID NO: 112116 - RNA, 22 nt, Human
ccuaucccauacccguccuucc

SEQ ID NO: 112117 - RNA, 32 nt, Human
ccuaucccccucaagcccccacaggagucacc

SEQ ID NO: 112118 - RNA, 32 nt, Human
ccuauccccucccuugcuccugaggccaaagc

SEQ ID NO: 112119 - RNA, 32 nt, Human
ccuaucccgacuaucguugcugguaagccugg

SEQ ID NO: 112120 - RNA, 32 nt, Human
ccuaucccugugccaggcaccaugaagcagga

SEQ ID NO: 112121 - RNA, 32 nt, Human
ccuauccugcacccucugcuaugucugugaug

SEQ ID NO: 112122 - RNA, 32 nt, Human
ccuauccugggaccuccacacuccugguucuc

SEQ ID NO: 112123 - RNA, 32 nt, Human
ccuauccugggcugcucaauguucccaggccc

SEQ ID NO: 112124 - RNA, 21 nt, Human
ccuaucgccaccugccagcca

SEQ ID NO: 112125 - RNA, 32 nt, Human
ccuaucgccccugucacucaggaaauuaccag

SEQ ID NO: 112126 - RNA, 21 nt, Human
ccuaucuaccauugccacuug

SEQ ID NO: 112127 - RNA, 20 nt, Human
ccuaucucaccugcccagcc

SEQ ID NO: 112128 - RNA, 22 nt, Human
ccuaucuccaagagacagagga

SEQ ID NO: 112129 - RNA, 18 nt, Human
ccuaucuccccuccuccc

SEQ ID NO: 112130 - RNA, 32 nt, Human
ccuaucuccccuccuccccuuuucuuuccuuc

SEQ ID NO: 112131 - RNA, 32 nt, Human
ccuaucuccuggggagggugaggcagggcagg

SEQ ID NO: 112132 - RNA, 25 nt, Human
ccuaucuccuucccaccccuacaca

SEQ ID NO: 112133 - RNA, 19 nt, Human
ccuaucucuucccucauca

SEQ ID NO: 112134 - RNA, 32 nt, Human
ccuaucugacccaucugcucccaccgaaguua

SEQ ID NO: 112135 - RNA, 32 nt, Human
ccuaucugaguuuccagccuguugcccugugg

SEQ ID NO: 112136 - RNA, 19 nt, Human
ccuaucugaucagacuuug

SEQ ID NO: 112137 - RNA, 32 nt, Human
ccuaucuggaguuuggccuuguuaaccuagua

SEQ ID NO: 112138 - RNA, 21 nt, Human
ccuaucuucagcccccucaaa

SEQ ID NO: 112139 - RNA, 20 nt, Human
ccuaucuucuccauucuaga

SEQ ID NO: 112140 - RNA, 32 nt, Human
ccuaucuucucccugcuuccucuccaucucau

SEQ ID NO: 112141 - RNA, 32 nt, Human
ccuaucuucuuaacuccaccuccgucugguuc

SEQ ID NO: 112142 - RNA, 32 nt, Human
ccuaucuucuuccucaaaaucuggugaccaag

SEQ ID NO: 112143 - RNA, 20 nt, Human
ccuaucuucuuuuucaugua

SEQ ID NO: 112144 - RNA, 25 nt, Human
ccuaucuugcccaccccaccagccc

SEQ ID NO: 112145 - RNA, 32 nt, Human
ccuaucuuggugcugauagcucucuaagggua

SEQ ID NO: 112146 - RNA, 32 nt, Human
ccuaucuuucuuucucuucuuccuuucuuuuc

SEQ ID NO: 112147 - RNA, 32 nt, Human
ccuaugaaaccauacacaucucauugaguaag

SEQ ID NO: 112148 - RNA, 28 nt, Human
ccuaugaaccuacagaaggugagcccag

SEQ ID NO: 112149 - RNA, 32 nt, Human
ccuaugacaaguuuauagagugaaagguaucu

SEQ ID NO: 112150 - RNA, 32 nt, Human
ccuaugacucggcucugccucccaguccgcac

SEQ ID NO: 112151 - RNA, 32 nt, Human
ccuaugagaagccacugcuuugggggcgccgg

SEQ ID NO: 112152 - RNA, 32 nt, Human
ccuaugaggaagauggaccuggacagacaguc

SEQ ID NO: 112153 - RNA, 32 nt, Human
ccuaugagugacuacaaaaaggauuagacuga

SEQ ID NO: 112154 - RNA, 32 nt, Human
ccuaugaguucaagaccagccuaggcaaugua

SEQ ID NO: 112155 - RNA, 32 nt, Human
ccuaugaucccagcuacuggggaggcugaggc

SEQ ID NO: 112156 - RNA, 32 nt, Human
ccuaugaucuggggaggugggaagaggaugag

SEQ ID NO: 112157 - RNA, 32 nt, Human
ccuaugauuuagcuggcaggccagguuuucuc

SEQ ID NO: 112158 - RNA, 32 nt, Human
ccuaugcauguaagcauuauuucccaaaccaa

SEQ ID NO: 112159 - RNA, 32 nt, Human
ccuaugccagccugggccugucuccaccggca

SEQ ID NO: 112160 - RNA, 32 nt, Human
ccuaugcccacggagcuaagagacaggaacac

SEQ ID NO: 112161 - RNA, 32 nt, Human
ccuaugcccagucuuuuugucuuggacuuauu

SEQ ID NO: 112162 - RNA, 32 nt, Human
ccuaugccccuggauggugacggcggauuggc

SEQ ID NO: 112163 - RNA, 32 nt, Human
ccuaugcccgggagcggcggcggcggcggcgg

SEQ ID NO: 112164 - RNA, 32 nt, Human
ccuaugcccuggaggugagggcagcucucuug

SEQ ID NO: 112165 - RNA, 32 nt, Human
ccuaugccucuaccccuccuccuuacccuacu

SEQ ID NO: 112166 - RNA, 32 nt, Human
ccuaugccuucccaugagucagucauuagagg

SEQ ID NO: 112167 - RNA, 32 nt, Human
ccuaugcuacacagucccugggggugaggauu

SEQ ID NO: 112168 - RNA, 32 nt, Human
ccuaugcugggaaagugaggauuugggauuuc

SEQ ID NO: 112169 - RNA, 32 nt, Human
ccuaugcuucaccuucagcuccugggaguucc

SEQ ID NO: 112170 - RNA, 32 nt, Human
ccuauggagcccugcccacagccccuggucau

SEQ ID NO: 112171 - RNA, 32 nt, Human
ccuauggagccuagaagaaaccuucacuugca

SEQ ID NO: 112172 - RNA, 32 nt, Human
ccuauggaggggcugugggccaggcugcucag

SEQ ID NO: 112173 - RNA, 28 nt, Human
ccuauggcaccaccaccgccuccuccac

SEQ ID NO: 112174 - RNA, 32 nt, Human
ccuauggcucaggccgaggcucaggcccaucu

SEQ ID NO: 112175 - RNA, 32 nt, Human
ccuauggcugaccguggcccagccucugcaac

SEQ ID NO: 112176 - RNA, 32 nt, Human
ccuaugggaggcagagcggcaaggacagggcu

SEQ ID NO: 112177 - RNA, 31 nt, Human
ccuaugggggagcugccucacguucucugac

SEQ ID NO: 112178 - RNA, 32 nt, Human
ccuaugguagcaauucugugcugguauaaauc

SEQ ID NO: 112179 - RNA, 32 nt, Human
ccuaugguauccuauaugggauagccuauugc

SEQ ID NO: 112180 - RNA, 32 nt, Human
ccuauggucaacaucugggcugugaugggcag

SEQ ID NO: 112181 - RNA, 20 nt, Human
ccuauggucacccccacuaa

SEQ ID NO: 112182 - RNA, 23 nt, Human
ccuauggucccagcuacucaaca

SEQ ID NO: 112183 - RNA, 32 nt, Human
ccuauggucccagcuacucaacaggcugaggu

SEQ ID NO: 112184 - RNA, 32 nt, Human
ccuaugguuauucaaaugguagagccaaaaau

SEQ ID NO: 112185 - RNA, 23 nt, Human
ccuaugguuccagcuacucagga

SEQ ID NO: 112186 - RNA, 32 nt, Human
ccuaugguuccagcuacucaggaggcugaggu

SEQ ID NO: 112187 - RNA, 32 nt, Human
ccuaugguuuuucugugucaaugugauuuaug

SEQ ID NO: 112188 - RNA, 32 nt, Human
ccuauguaauaggauauauccuaaguggggau

SEQ ID NO: 112189 - RNA, 32 nt, Human
ccuauguagcaucuaucuacccaucuaucuau

SEQ ID NO: 112190 - RNA, 32 nt, Human
ccuauguaguccgugcugacagcugcuccuag

SEQ ID NO: 112191 - RNA, 32 nt, Human
ccuaugucacccaggcuguggugcaguaagcc

SEQ ID NO: 112192 - RNA, 32 nt, Human
ccuaugucaccgaggcuacagugcagugguuc

SEQ ID NO: 112193 - RNA, 32 nt, Human
ccuauguccaaauuuucagccaccacagaccu

SEQ ID NO: 112194 - RNA, 23 nt, Human
ccuaugucuccccuuccucacca

SEQ ID NO: 112195 - RNA, 32 nt, Human
ccuaugugcaccacacauuccagugugcugag

SEQ ID NO: 112196 - RNA, 32 nt, Human
ccuaugugcagucacuccucucauuucuaaaa

SEQ ID NO: 112197 - RNA, 32 nt, Human
ccuaugugccagagguacugugcagugcugga

SEQ ID NO: 112198 - RNA, 32 nt, Human
ccuauguggcaaaaggucagccuugggguugg

SEQ ID NO: 112199 - RNA, 18 nt, Human
ccuauguggcccacagua

SEQ ID NO: 112200 - RNA, 32 nt, Human
ccuaugugggcuuccuggagcagaagcagcaa

SEQ ID NO: 112201 - RNA, 32 nt, Human
ccuauguggucuccaccauauucacacaccac

SEQ ID NO: 112202 - RNA, 23 nt, Human
ccuauguuuccagcuacuuggga

SEQ ID NO: 112203 - RNA, 32 nt, Human
ccuauguuuggcugcuagaacaugguuaccau

SEQ ID NO: 112204 - RNA, 32 nt, Human
ccuauuacggccugagucuggaugugucgggg

SEQ ID NO: 112205 - RNA, 22 nt, Human
ccuauuaguuggaggcugcagu

SEQ ID NO: 112206 - RNA, 32 nt, Human
ccuauuauacaggugaagacaccaagaguaga

SEQ ID NO: 112207 - RNA, 32 nt, Human
ccuauuaucccagcuacucgggaggccaaggc

SEQ ID NO: 112208 - RNA, 32 nt, Human
ccuauucaaccaucuugcccaccuacaagaca

SEQ ID NO: 112209 - RNA, 32 nt, Human
ccuauucaagacguccuggaaaacuacauuua

SEQ ID NO: 112210 - RNA, 32 nt, Human
ccuauucacuuccgagauucagacauagccau

SEQ ID NO: 112211 - RNA, 32 nt, Human
ccuauucagcagagaugcagcucugggaauga

SEQ ID NO: 112212 - RNA, 32 nt, Human
ccuauucaguggugcucucccacccaggggcc

SEQ ID NO: 112213 - RNA, 21 nt, Human
ccuauuccagaaaauaaauga

SEQ ID NO: 112214 - RNA, 32 nt, Human
ccuauucccuuuccuggucaccuucauggucc

SEQ ID NO: 112215 - RNA, 32 nt, Human
ccuauuccuaccccaucuauucucuguuggcu

SEQ ID NO: 112216 - RNA, 32 nt, Human
ccuauuccuaucucccccuuccgucucuguug

SEQ ID NO: 112217 - RNA, 32 nt, Human
ccuauuccucuccuccuccuccuccugggucc

SEQ ID NO: 112218 - RNA, 32 nt, Human
ccuauuccugaacuauaacaccugccaccacu

SEQ ID NO: 112219 - RNA, 32 nt, Human
ccuauucucauccauuccugcaaagaagaugc

SEQ ID NO: 112220 - RNA, 32 nt, Human
ccuauucugccacauuugccacccucugagcc

SEQ ID NO: 112221 - RNA, 32 nt, Human
ccuauucugguucauucagcacuuuuuggugg

SEQ ID NO: 112222 - RNA, 20 nt, Human
ccuauugcaacuucuguuca

SEQ ID NO: 112223 - RNA, 32 nt, Human
ccuauugccaucauucccuugucccugcucua

SEQ ID NO: 112224 - RNA, 32 nt, Human
ccuauugccaugaccuuccucacaucucuuua

SEQ ID NO: 112225 - RNA, 32 nt, Human
ccuauugcuccuaggcugcaaaccuguauagc

SEQ ID NO: 112226 - RNA, 32 nt, Human
ccuauugcuuaucuuggguuaaauuugagagu

SEQ ID NO: 112227 - RNA, 32 nt, Human
ccuauuggaagcagcagaaggccaugccaaag

SEQ ID NO: 112228 - RNA, 25 nt, Human
ccuauuggaaucccaauggcuccug

SEQ ID NO: 112229 - RNA, 32 nt, Human
ccuauugggcagcugggacuacaggcaugcau

SEQ ID NO: 112230 - RNA, 32 nt, Human
ccuauuguacuuauagguaaaccuugcaaaua

SEQ ID NO: 112231 - RNA, 32 nt, Human
ccuauugugccucuggcugcuguaugugugcg

SEQ ID NO: 112232 - RNA, 32 nt, Human
ccuauuguucuucuuggcauccuucuuaugcu

SEQ ID NO: 112233 - RNA, 20 nt, Human
ccuauuguuucauagaccca

SEQ ID NO: 112234 - RNA, 32 nt, Human
ccuauuuaggacgagauugaagacugacccuu

SEQ ID NO: 112235 - RNA, 32 nt, Human
ccuauuuauucccacaaaauguuggcauugcu

SEQ ID NO: 112236 - RNA, 32 nt, Human
ccuauuucacuaccaaaagaauuccuguucac

SEQ ID NO: 112237 - RNA, 32 nt, Human
ccuauuuccaggguuggucuuccugagaaggg

SEQ ID NO: 112238 - RNA, 32 nt, Human
ccuauuuccucaccuguuuacagugaaucaga

SEQ ID NO: 112239 - RNA, 32 nt, Human
ccuauuucuaucuccacuuugugccuggagag

SEQ ID NO: 112240 - RNA, 32 nt, Human
ccuauuucucccugucagguugcacagaugca

SEQ ID NO: 112241 - RNA, 32 nt, Human
ccuauuucucucacucugaccucucucucuua

SEQ ID NO: 112242 - RNA, 32 nt, Human
ccuauuucugguuauauaauugcucuccaauu

SEQ ID NO: 112243 - RNA, 30 nt, Human
ccuauuugccucuccuuucucucuguccug

SEQ ID NO: 112244 - RNA, 24 nt, Human
ccuauuugcugccgcugccauucu

SEQ ID NO: 112245 - RNA, 32 nt, Human
ccuauuuggaauuggaggcaaugaguggcaag

SEQ ID NO: 112246 - RNA, 32 nt, Human
ccuauuugugcaacgggaaagguguuuauggu

SEQ ID NO: 112247 - RNA, 32 nt, Human
ccuauuuucucccuccaccucuccucuccuuc

SEQ ID NO: 112248 - RNA, 32 nt, Human
ccuauuuugaaugcagaaaacagggucuggga

SEQ ID NO: 112249 - RNA, 24 nt, Human
ccuauuuugucccaaaccuacaca

SEQ ID NO: 112250 - RNA, 32 nt, Human
ccuauuuuucuuucuucuucuucuacaacugg

SEQ ID NO: 112251 - RNA, 32 nt, Human
ccuauuuuuguagugaccuguuuaugagaugc

SEQ ID NO: 112252 - RNA, 32 nt, Human
ccuauuuuuguggggagaagagggccugauua

SEQ ID NO: 112253 - RNA, 32 nt, Human
ccucaaaaagugcggaggaaguagcuggacag

SEQ ID NO: 112254 - RNA, 32 nt, Human
ccucaaaaauagaacaagagcacuccauccau

SEQ ID NO: 112255 - RNA, 32 nt, Human
ccucaaaacuccaagcccucggugcuugcuuu

SEQ ID NO: 112256 - RNA, 32 nt, Human
ccucaaaacugccacaccacagucucaccaac

SEQ ID NO: 112257 - RNA, 32 nt, Human
ccucaaaagaugauugcauucuaacuuuugug

SEQ ID NO: 112258 - RNA, 32 nt, Human
ccucaaaauggaggcagcgggggcggcggcgu

SEQ ID NO: 112259 - RNA, 32 nt, Human
ccucaaacacacuguuuccacccucuucuuga

SEQ ID NO: 112260 - RNA, 32 nt, Human
ccucaaacacuggccugugagcccuuuccaag

SEQ ID NO: 112261 - RNA, 32 nt, Human
ccucaaacagccgcugucucaucagugcccgg

SEQ ID NO: 112262 - RNA, 32 nt, Human
ccucaaacccaguuuggcccagccugguuggg

SEQ ID NO: 112263 - RNA, 32 nt, Human
ccucaaacccccagaaagugggaugggccugu

SEQ ID NO: 112264 - RNA, 32 nt, Human
ccucaaaccucacccugaccuccugcugccua

SEQ ID NO: 112265 - RNA, 32 nt, Human
ccucaaacuccuccuccucagccguggcaucc

SEQ ID NO: 112266 - RNA, 32 nt, Human
ccucaaacugacacaagaccuacagagaaaac

SEQ ID NO: 112267 - RNA, 32 nt, Human
ccucaaacuuggcgaacuuggagggagcuugu

SEQ ID NO: 112268 - RNA, 19 nt, Human
ccucaaagaaauccuccaa

SEQ ID NO: 112269 - RNA, 21 nt, Human
ccucaaagaagaguuaccuca

SEQ ID NO: 112270 - RNA, 32 nt, Human
ccucaaagcauccaccaugguggauggacuga

SEQ ID NO: 112271 - RNA, 32 nt, Human
ccucaaagccucucuuccuucucccucgcuuc

SEQ ID NO: 112272 - RNA, 32 nt, Human
ccucaaagcuccccaacuuccaccuccgcaga

SEQ ID NO: 112273 - RNA, 26 nt, Human
ccucaaagcuuauccagaaccuuccc

SEQ ID NO: 112274 - RNA, 32 nt, Human
ccucaaaggcaagcccugaccucagucacacg

SEQ ID NO: 112275 - RNA, 31 nt, Human
ccucaaaggcacuuaauuugauuuuuauuuu

SEQ ID NO: 112276 - RNA, 32 nt, Human
ccucaaagggccugggaaggugaggcaggcca

SEQ ID NO: 112277 - RNA, 32 nt, Human
ccucaaaguaaguuaggguaagaaaagauaau

SEQ ID NO: 112278 - RNA, 32 nt, Human
ccucaaaugacccacccaccucagccucccaa

SEQ ID NO: 112279 - RNA, 32 nt, Human
ccucaaauuccagaaguggaggcuccagccuc

SEQ ID NO: 112280 - RNA, 32 nt, Human
ccucaacaaaacugacaagcaaugaaguaaga

SEQ ID NO: 112281 - RNA, 19 nt, Human
ccucaacaaaggccauuuc

SEQ ID NO: 112282 - RNA, 18 nt, Human
ccucaacagaaugcauug

SEQ ID NO: 112283 - RNA, 32 nt, Human
ccucaacagacaccuccagcacagcuucacca

SEQ ID NO: 112284 - RNA, 22 nt, Human
ccucaacagauugccugcuccu

SEQ ID NO: 112285 - RNA, 32 nt, Human
ccucaacagccugugccucuggucuaccuuug

SEQ ID NO: 112286 - RNA, 32 nt, Human
ccucaacagggguccagggugcagugaacuca

SEQ ID NO: 112287 - RNA, 32 nt, Human
ccucaacaucacaggagaccucauccaccugg

SEQ ID NO: 112288 - RNA, 32 nt, Human
ccucaacaucugguaccagcacuccgcggcgg

SEQ ID NO: 112289 - RNA, 32 nt, Human
ccucaacauggagaaaccccaucucuacuaaa

SEQ ID NO: 112290 - RNA, 32 nt, Human
ccucaacauggagaaaccccgucucuacuaaa

SEQ ID NO: 112291 - RNA, 32 nt, Human
ccucaaccacaacuucugaccucccagggugu

SEQ ID NO: 112292 - RNA, 32 nt, Human
ccucaaccagcuacucaggaggcugggcagga

SEQ ID NO: 112293 - RNA, 32 nt, Human
ccucaacccacugcuggccagcuucuucagca

SEQ ID NO: 112294 - RNA, 19 nt, Human
ccucaaccccagcuucuga

SEQ ID NO: 112295 - RNA, 32 nt, Human
ccucaacccccugcuguagccuggugaagacc

SEQ ID NO: 112296 - RNA, 32 nt, Human
ccucaacccugacugcagauaagaaucacuug

SEQ ID NO: 112297 - RNA, 32 nt, Human
ccucaaccucauccucuccacagcugccucuu

SEQ ID NO: 112298 - RNA, 32 nt, Human
ccucaaccuccacccugucccauggcccaagg

SEQ ID NO: 112299 - RNA, 32 nt, Human
ccucaaccucccaggcuccaagcaguccuuuc

SEQ ID NO: 112300 - RNA, 32 nt, Human
ccucaaccucuucuccccacaaccccaacccc

SEQ ID NO: 112301 - RNA, 32 nt, Human
ccucaaccuguugcccuuucccaugagcuggc

SEQ ID NO: 112302 - RNA, 20 nt, Human
ccucaaccuucuggguucaa

SEQ ID NO: 112303 - RNA, 32 nt, Human
ccucaacgcccccauuccucugcucggcucug

SEQ ID NO: 112304 - RNA, 24 nt, Human
ccucaacuaacccagcagcagcgg

SEQ ID NO: 112305 - RNA, 32 nt, Human
ccucaacucaaaggaaaacacagagcauacca

SEQ ID NO: 112306 - RNA, 32 nt, Human
ccucaacucacugcaaccuccgcucccgguuu

SEQ ID NO: 112307 - RNA, 32 nt, Human
ccucaacucauucugucaccaguagaauucag

SEQ ID NO: 112308 - RNA, 20 nt, Human
ccucaacucccagcagcagu

SEQ ID NO: 112309 - RNA, 32 nt, Human
ccucaacucuacuggucccaauuggcccauac

SEQ ID NO: 112310 - RNA, 32 nt, Human
ccucaacugauccucgcaucucagccuccuga

SEQ ID NO: 112311 - RNA, 32 nt, Human
ccucaacugcuggcucuucuucccuuuguauu

SEQ ID NO: 112312 - RNA, 32 nt, Human
ccucaacuggaccuaggggaagaaggagauau

SEQ ID NO: 112313 - RNA, 17 nt, Human
ccucaacugucacccca

SEQ ID NO: 112314 - RNA, 32 nt, Human
ccucaacuucugccaccucucccugggcaaua

SEQ ID NO: 112315 - RNA, 32 nt, Human
ccucaagaaauggagaagcaucaugugccaag

SEQ ID NO: 112316 - RNA, 32 nt, Human
ccucaagaacaucgaucugaaggauucauaag

SEQ ID NO: 112317 - RNA, 32 nt, Human
ccucaagaaugagacaggaagugcaaaggaaa

SEQ ID NO: 112318 - RNA, 32 nt, Human
ccucaagaaugagacaggaagugcagaggaaa

SEQ ID NO: 112319 - RNA, 32 nt, Human
ccucaagacaccugggcagacacugcaagaug

SEQ ID NO: 112320 - RNA, 25 nt, Human
ccucaagacacggucacagaucaga

SEQ ID NO: 112321 - RNA, 32 nt, Human
ccucaagacccugcuuaauccuaacaauuuuc

SEQ ID NO: 112322 - RNA, 23 nt, Human
ccucaagacuaagggcuacagua

SEQ ID NO: 112323 - RNA, 17 nt, Human
ccucaagacucaccuca

SEQ ID NO: 112324 - RNA, 32 nt, Human
ccucaagacucucugaaugcugcuccacuguc

SEQ ID NO: 112325 - RNA, 32 nt, Human
ccucaagauccagugcaagugaagcagccagu

SEQ ID NO: 112326 - RNA, 32 nt, Human
ccucaagcaacccuccugccucagucuugcaa

SEQ ID NO: 112327 - RNA, 32 nt, Human
ccucaagcaaggaagcagagcacuguguaacc

SEQ ID NO: 112328 - RNA, 32 nt, Human
ccucaagcaauauuuuugauacagcaaguguc

SEQ ID NO: 112329 - RNA, 23 nt, Human
ccucaagcaauccacccaccuca

SEQ ID NO: 112330 - RNA, 23 nt, Human
ccucaagcaauccucccaccuca

SEQ ID NO: 112331 - RNA, 23 nt, Human
ccucaagcaauccuccugccuca

SEQ ID NO: 112332 - RNA, 23 nt, Human
ccucaagcaccacgcccuccagg

SEQ ID NO: 112333 - RNA, 23 nt, Human
ccucaagcagaccuacagcaagu

SEQ ID NO: 112334 - RNA, 20 nt, Human
ccucaagcaggaggcagcaa

SEQ ID NO: 112335 - RNA, 32 nt, Human
ccucaagcaucccucccagcuugaagugucaa

SEQ ID NO: 112336 - RNA, 32 nt, Human
ccucaagccaauuuccagaaccugccaccagg

SEQ ID NO: 112337 - RNA, 32 nt, Human
ccucaagcccuuaaaaucacuuuagaaacucu

SEQ ID NO: 112338 - RNA, 22 nt, Human
ccucaagccuggucugcuccuu

SEQ ID NO: 112339 - RNA, 23 nt, Human
ccucaagcgauccucccaccuca

SEQ ID NO: 112340 - RNA, 32 nt, Human
ccucaagcgauccucccaucucagccucccaa

SEQ ID NO: 112341 - RNA, 32 nt, Human
ccucaagcgauccucucaucucagccuccuga

SEQ ID NO: 112342 - RNA, 32 nt, Human
ccucaagcuccagggcagccuggccgagcagc

SEQ ID NO: 112343 - RNA, 32 nt, Human
ccucaagcugaacaagauuaaauuccuuauuu

SEQ ID NO: 112344 - RNA, 32 nt, Human
ccucaagcugccugugcaccccaguagcaccc

SEQ ID NO: 112345 - RNA, 32 nt, Human
ccucaagcugccugugcaccccaguagcacuc

SEQ ID NO: 112346 - RNA, 32 nt, Human
ccucaagcuggguuuuggaaagagcaugccua

SEQ ID NO: 112347 - RNA, 24 nt, Human
ccucaagcuucgcagcagcggcgg

SEQ ID NO: 112348 - RNA, 32 nt, Human
ccucaaggaaauucccugaccucucaauccuc

SEQ ID NO: 112349 - RNA, 32 nt, Human
ccucaaggagccucugcgacucggugucuaga

SEQ ID NO: 112350 - RNA, 32 nt, Human
ccucaaggauccucuuucugaccaucaagccu

SEQ ID NO: 112351 - RNA, 19 nt, Human
ccucaaggaucugucacgg

SEQ ID NO: 112352 - RNA, 32 nt, Human
ccucaaggauguaauucuagcccagggaagaa

SEQ ID NO: 112353 - RNA, 32 nt, Human
ccucaaggcacugaagcuggaggacucugucc

SEQ ID NO: 112354 - RNA, 32 nt, Human
ccucaaggcagauccgaaagccuaguaguuag

SEQ ID NO: 112355 - RNA, 32 nt, Human
ccucaaggcaguccccucccauccccauuccc

SEQ ID NO: 112356 - RNA, 32 nt, Human
ccucaaggccaugguggauaagcacaaggaga

SEQ ID NO: 112357 - RNA, 32 nt, Human
ccucaaggcucugaccuggaccccuguccccu

SEQ ID NO: 112358 - RNA, 32 nt, Human
ccucaaggcuggguguggaggcucacaccugu

SEQ ID NO: 112359 - RNA, 32 nt, Human
ccucaagggagccagcccugcccacgccuuga

SEQ ID NO: 112360 - RNA, 32 nt, Human
ccucaagggauaugagggaggagccaguuugc

SEQ ID NO: 112361 - RNA, 32 nt, Human
ccucaagggauuccuggcuggcuauguggugg

SEQ ID NO: 112362 - RNA, 32 nt, Human
ccucaagggcagauauuggacacuccuuauuu

SEQ ID NO: 112363 - RNA, 32 nt, Human
ccucaaggggagaaaaagucaagcaaugcuuc

SEQ ID NO: 112364 - RNA, 32 nt, Human
ccucaaguacuuccaggaccaccgcaacagag

SEQ ID NO: 112365 - RNA, 31 nt, Human
ccucaaguacuuuucuuuuggcagguacuug

SEQ ID NO: 112366 - RNA, 26 nt, Human
ccucaagucauuagcaucagcugcug

SEQ ID NO: 112367 - RNA, 32 nt, Human
ccucaagucugcgccccguccccagccagacc

SEQ ID NO: 112368 - RNA, 32 nt, Human
ccucaagugagcuggcucaggguggggcuguc

SEQ ID NO: 112369 - RNA, 23 nt, Human
ccucaagugauccacccaccuca

SEQ ID NO: 112370 - RNA, 32 nt, Human
ccucaagugauccacccaucucagccucccaa

SEQ ID NO: 112371 - RNA, 32 nt, Human
ccucaagugauccaccugucucagccuuccca

SEQ ID NO: 112372 - RNA, 23 nt, Human
ccucaagugauccucccaccuca

SEQ ID NO: 112373 - RNA, 23 nt, Human
ccucaagugauccuccugucuca

SEQ ID NO: 112374 - RNA, 23 nt, Human
ccucaagugauccucuugccuca

SEQ ID NO: 112375 - RNA, 23 nt, Human
ccucaagugaucugcccaccuca

SEQ ID NO: 112376 - RNA, 32 nt, Human
ccucaagugccacccucuacugacccucccag

SEQ ID NO: 112377 - RNA, 32 nt, Human
ccucaagugggaacugguggagggggcgcuag

SEQ ID NO: 112378 - RNA, 32 nt, Human
ccucaaguguuuggacaccugcuuuauucuuu

SEQ ID NO: 112379 - RNA, 32 nt, Human
ccucaaguuagcaucucuccuggguuuuagua

SEQ ID NO: 112380 - RNA, 32 nt, Human
ccucaaguuccagugcagagauccuacuucuc

SEQ ID NO: 112381 - RNA, 32 nt, Human
ccucaaguucuuggaccaguuugcagagugaa

SEQ ID NO: 112382 - RNA, 32 nt, Human
ccucaaguugcuacgguucagugagagaggca

SEQ ID NO: 112383 - RNA, 32 nt, Human
ccucaauaacacagccauuauugccacuugcu

SEQ ID NO: 112384 - RNA, 32 nt, Human
ccucaauaaugugaauggauuagugcuaggag

SEQ ID NO: 112385 - RNA, 32 nt, Human
ccucaaucaagugccuuuaaauagagcugcac

SEQ ID NO: 112386 - RNA, 32 nt, Human
ccucaaucacccaggccuaagcaauccuccca

SEQ ID NO: 112387 - RNA, 32 nt, Human
ccucaauccacagucuccaacaacaguuaaaa

SEQ ID NO: 112388 - RNA, 32 nt, Human
ccucaauccaggcuggaguugguuuauccuug

SEQ ID NO: 112389 - RNA, 23 nt, Human
ccucaauccccuucuccucgcca

SEQ ID NO: 112390 - RNA, 23 nt, Human
ccucaauccgggggacuuccaca

SEQ ID NO: 112391 - RNA, 32 nt, Human
ccucaauccucccacccaccaggcuggggcac

SEQ ID NO: 112392 - RNA, 32 nt, Human
ccucaauccuucaauaaaauguuuccagagcc

SEQ ID NO: 112393 - RNA, 32 nt, Human
ccucaauccuucccuuuucuucccaacuucua

SEQ ID NO: 112394 - RNA, 32 nt, Human
ccucaaugugccaggcucuuccucccaugaca

SEQ ID NO: 112395 - RNA, 17 nt, Human
ccucaaugugucaccuc

SEQ ID NO: 112396 - RNA, 30 nt, Human
ccucaaugugugcugaggugggcccugcuc

SEQ ID NO: 112397 - RNA, 32 nt, Human
ccucaauuauuuucuccuuucaacucuguuga

SEQ ID NO: 112398 - RNA, 32 nt, Human
ccucaauugccugccuguauuaauuuuaguuu

SEQ ID NO: 112399 - RNA, 32 nt, Human
ccucaauuuccuggugaauguggagaaaaaua

SEQ ID NO: 112400 - RNA, 32 nt, Human
ccucacaaaaggauucuuucaacuucuuuauu

SEQ ID NO: 112401 - RNA, 21 nt, Human
ccucacaaaccucaggauuga

SEQ ID NO: 112402 - RNA, 32 nt, Human
ccucacaaaggagagagggaagaaaagaucuu

SEQ ID NO: 112403 - RNA, 32 nt, Human
ccucacaaagugcuaggauuacaggcaugagc

SEQ ID NO: 112404 - RNA, 32 nt, Human
ccucacaaagugcugggauuacaggcaugaac

SEQ ID NO: 112405 - RNA, 32 nt, Human
ccucacaaagugcugggauuacaggcgugagc

SEQ ID NO: 112406 - RNA, 32 nt, Human
ccucacaaagugcugggauuacagguguaagc

SEQ ID NO: 112407 - RNA, 32 nt, Human
ccucacaaagugcugggauuauaggcaagagc

SEQ ID NO: 112408 - RNA, 32 nt, Human
ccucacaaaguguugagacuacaggcaugagc

SEQ ID NO: 112409 - RNA, 19 nt, Human
ccucacaacagucaccuca

SEQ ID NO: 112410 - RNA, 32 nt, Human
ccucacaaccaaaaggggaaagaauccugagu

SEQ ID NO: 112411 - RNA, 32 nt, Human
ccucacaaccaccuaaucaggcugaggugucu

SEQ ID NO: 112412 - RNA, 32 nt, Human
ccucacaacccccagccucagcuucccugaca

SEQ ID NO: 112413 - RNA, 24 nt, Human
ccucacaagagcaucagccuucua

SEQ ID NO: 112414 - RNA, 32 nt, Human
ccucacaagccgcagcggcuggugcccgggcu

SEQ ID NO: 112415 - RNA, 22 nt, Human
ccucacaagggcucucaaagua

SEQ ID NO: 112416 - RNA, 32 nt, Human
ccucacaaguagcuggaauuacaagcaugcac

SEQ ID NO: 112417 - RNA, 32 nt, Human
ccucacaaguagcugggauuacaggugcccgc

SEQ ID NO: 112418 - RNA, 32 nt, Human
ccucacaauaaaccagaccagaaggauguccc

SEQ ID NO: 112419 - RNA, 32 nt, Human
ccucacaauucagacugaggguugagacaaaa

SEQ ID NO: 112420 - RNA, 32 nt, Human
ccucacaccagccagacccaggaagagaaacu

SEQ ID NO: 112421 - RNA, 32 nt, Human
ccucacacccuugggcccucagcucuggugca

SEQ ID NO: 112422 - RNA, 32 nt, Human
ccucacaccugacagaugcacggcccaagggg

SEQ ID NO: 112423 - RNA, 20 nt, Human
ccucacaccugccucugguu

SEQ ID NO: 112424 - RNA, 32 nt, Human
ccucacaccugcuggacaucaggcuggggaga

SEQ ID NO: 112425 - RNA, 32 nt, Human
ccucacaccuggccuccucuggcuucagcuuc

SEQ ID NO: 112426 - RNA, 32 nt, Human
ccucacaccuguaaucucagcacuuugggugg

SEQ ID NO: 112427 - RNA, 32 nt, Human
ccucacaccuguaauuccagcacuuugggagg

SEQ ID NO: 112428 - RNA, 32 nt, Human
ccucacaccuuguucucuucugcucuagacag

SEQ ID NO: 112429 - RNA, 32 nt, Human
ccucacacgcagccacuucuucaagagcugcc

SEQ ID NO: 112430 - RNA, 32 nt, Human
ccucacacucauucucaacccccugacaaaac

SEQ ID NO: 112431 - RNA, 19 nt, Human
ccucacacucugguaccag

SEQ ID NO: 112432 - RNA, 32 nt, Human
ccucacacuguaggacucacacaugacuccaa

SEQ ID NO: 112433 - RNA, 22 nt, Human
ccucacacuuuuggaaccaugc

SEQ ID NO: 112434 - RNA, 32 nt, Human
ccucacagaaugcacacucuguaccacuggau

SEQ ID NO: 112435 - RNA, 32 nt, Human
ccucacagacugccugagcucuucuguaagcu

SEQ ID NO: 112436 - RNA, 32 nt, Human
ccucacagaggaagaaccgaggugggggcuug

SEQ ID NO: 112437 - RNA, 32 nt, Human
ccucacagauagugaaaacaggcuauugcucu

SEQ ID NO: 112438 - RNA, 32 nt, Human
ccucacagcaagcacagcucucuuucaggcuu

SEQ ID NO: 112439 - RNA, 23 nt, Human
ccucacagcagccgcggcacagg

SEQ ID NO: 112440 - RNA, 32 nt, Human
ccucacagcaggagacagggaaacugaguccc

SEQ ID NO: 112441 - RNA, 32 nt, Human
ccucacagccagcacgacccccagaaagaggc

SEQ ID NO: 112442 - RNA, 32 nt, Human
ccucacagccuagucacaguccugggcagugc

SEQ ID NO: 112443 - RNA, 32 nt, Human
ccucacagccuugccccuccccaaggcuggca

SEQ ID NO: 112444 - RNA, 32 nt, Human
ccucacagcggacucuccacacccagcucuug

SEQ ID NO: 112445 - RNA, 32 nt, Human
ccucacagcuacucaguggggcuggcaucaag

SEQ ID NO: 112446 - RNA, 32 nt, Human
ccucacagcugcagggccaggugcauggcccc

SEQ ID NO: 112447 - RNA, 32 nt, Human
ccucacagcuggccugcccucuugccaggaua

SEQ ID NO: 112448 - RNA, 32 nt, Human
ccucacaggagaaggacagcucuuccccaccc

SEQ ID NO: 112449 - RNA, 32 nt, Human
ccucacaggagccaccaccagccaccucucag

SEQ ID NO: 112450 - RNA, 32 nt, Human
ccucacaggccugcccugcagcuggaagacuc

SEQ ID NO: 112451 - RNA, 32 nt, Human
ccucacaggcggugcacguugcagucgguucu

SEQ ID NO: 112452 - RNA, 15 nt, Human
ccucacaggcuugug

SEQ ID NO: 112453 - RNA, 20 nt, Human
ccucacagggaggggagcag

SEQ ID NO: 112454 - RNA, 32 nt, Human
ccucacagggcugcaacaaccaguacucaugg

SEQ ID NO: 112455 - RNA, 23 nt, Human
ccucacaggggccuuucucacca

SEQ ID NO: 112456 - RNA, 25 nt, Human
ccucacagucacgccgcagcaugga

SEQ ID NO: 112457 - RNA, 32 nt, Human
ccucacagucugccccugucagggcucggucc

SEQ ID NO: 112458 - RNA, 32 nt, Human
ccucacagucuguagccaucugauauccuagg

SEQ ID NO: 112459 - RNA, 21 nt, Human
ccucacagugggcucuccagg

SEQ ID NO: 112460 - RNA, 32 nt, Human
ccucacauagacacucagacacccucacaaac

SEQ ID NO: 112461 - RNA, 32 nt, Human
ccucacaucugcugcuggccucggugggcucu

SEQ ID NO: 112462 - RNA, 32 nt, Human
ccucacaucuguaaucccaacacuuugggagg

SEQ ID NO: 112463 - RNA, 32 nt, Human
ccucacaucuguaaucccagcacuuugggagg

SEQ ID NO: 112464 - RNA, 32 nt, Human
ccucacauuucccacuugagguugaggcguac

SEQ ID NO: 112465 - RNA, 23 nt, Human
ccucaccaaccuucccauacaca

SEQ ID NO: 112466 - RNA, 23 nt, Human
ccucaccacacugaccacccuca

SEQ ID NO: 112467 - RNA, 32 nt, Human
ccucaccacaucuacacauacuccggcaucug

SEQ ID NO: 112468 - RNA, 21 nt, Human
ccucaccacuagcccacccug

SEQ ID NO: 112469 - RNA, 32 nt, Human
ccucaccagcacugucuuuugugugacucaug

SEQ ID NO: 112470 - RNA, 32 nt, Human
ccucaccagcucccagaguucccaucuccauc

SEQ ID NO: 112471 - RNA, 32 nt, Human
ccucaccaggguggcaggagaggcagagccuc

SEQ ID NO: 112472 - RNA, 32 nt, Human
ccucaccauagccuccuuccuccugggggcac

SEQ ID NO: 112473 - RNA, 32 nt, Human
ccucaccaucauccucccuuccucaucaucau

SEQ ID NO: 112474 - RNA, 32 nt, Human
ccucaccaucaucgugggcgucauguucuucg

SEQ ID NO: 112475 - RNA, 32 nt, Human
ccucaccauccacauuugucaucgucuauugg

SEQ ID NO: 112476 - RNA, 32 nt, Human
ccucaccauccagcugcaggcugagcaagaga

SEQ ID NO: 112477 - RNA, 32 nt, Human
ccucaccaugucuucucacaagacuuucagga

SEQ ID NO: 112478 - RNA, 32 nt, Human
ccucacccaagaagacuggaaagagacauauc

SEQ ID NO: 112479 - RNA, 28 nt, Human
ccucacccaaguggcggcaucuuacggc

SEQ ID NO: 112480 - RNA, 32 nt, Human
ccucacccacaagcaggcugugcagugccuga

SEQ ID NO: 112481 - RNA, 32 nt, Human
ccucacccacacacugggcgugaggagucuuu

SEQ ID NO: 112482 - RNA, 32 nt, Human
ccucacccacagauuguauuuaugucuauaua

SEQ ID NO: 112483 - RNA, 32 nt, Human
ccucacccacagccugcugggcccaccaccug

SEQ ID NO: 112484 - RNA, 32 nt, Human
ccucacccaccaacuguucccaugggggucug

SEQ ID NO: 112485 - RNA, 32 nt, Human
ccucacccagccaauccgaggcugcuucgcac

SEQ ID NO: 112486 - RNA, 32 nt, Human
ccucacccagcucugucaccuccugacugaac

SEQ ID NO: 112487 - RNA, 32 nt, Human
ccucacccaugggacuguagugcaauuaaacc

SEQ ID NO: 112488 - RNA, 18 nt, Human
ccucaccccacgcgggaa

SEQ ID NO: 112489 - RNA, 32 nt, Human
ccucaccccagcccuccaccucucggggacug

SEQ ID NO: 112490 - RNA, 32 nt, Human
ccucaccccagcugccugcugcuucugacgga

SEQ ID NO: 112491 - RNA, 20 nt, Human
ccucaccccaggacccuagg

SEQ ID NO: 112492 - RNA, 23 nt, Human
ccucacccccaugccuguccucc

SEQ ID NO: 112493 - RNA, 32 nt, Human
ccucaccccucaccauccuuccucaggacuug

SEQ ID NO: 112494 - RNA, 32 nt, Human
ccucaccccucagauugugccucugccagccu

SEQ ID NO: 112495 - RNA, 21 nt, Human
ccucaccccucuggagggccg

SEQ ID NO: 112496 - RNA, 32 nt, Human
ccucaccccugccacagacucugcacaccacu

SEQ ID NO: 112497 - RNA, 32 nt, Human
ccucaccccugccucacccuggucuaaggcac

SEQ ID NO: 112498 - RNA, 32 nt, Human
ccucaccccuguaaucccagcacuuugggugg

SEQ ID NO: 112499 - RNA, 32 nt, Human
ccucaccccuguugcccugccuucuucaaagg

SEQ ID NO: 112500 - RNA, 32 nt, Human
ccucaccccuuucccuuccucucuauuuauaa

SEQ ID NO: 112501 - RNA, 32 nt, Human
ccucacccucagccgucccaaggagugcccag

SEQ ID NO: 112502 - RNA, 32 nt, Human
ccucacccuccaggcugcugugagagugucaa

SEQ ID NO: 112503 - RNA, 32 nt, Human
ccucacccuccccgcgcuuccucuccgccccu

SEQ ID NO: 112504 - RNA, 32 nt, Human
ccucacccuggagggcccugggcccuggggaa

SEQ ID NO: 112505 - RNA, 32 nt, Human
ccucacccuggcuggggguccagcacaggcug

SEQ ID NO: 112506 - RNA, 32 nt, Human
ccucacccuuauccaggacccaacaacagaag

SEQ ID NO: 112507 - RNA, 32 nt, Human
ccucacccuucuggagcacggggccuggguga

SEQ ID NO: 112508 - RNA, 32 nt, Human
ccucaccgcaggcagcaguuugcauuuugaaa

SEQ ID NO: 112509 - RNA, 32 nt, Human
ccucaccgccucccaccgccacugaccgaccg

SEQ ID NO: 112510 - RNA, 32 nt, Human
ccucaccgcgaccuggcugagcuucagucauu

SEQ ID NO: 112511 - RNA, 20 nt, Human
ccucaccgcgcgccaccucu

SEQ ID NO: 112512 - RNA, 32 nt, Human
ccucaccgcgggcgcucuagccccgggcgggu

SEQ ID NO: 112513 - RNA, 21 nt, Human
ccucaccgcucagccagggug

SEQ ID NO: 112514 - RNA, 32 nt, Human
ccucaccggaaggcaugggguggcguguagac

SEQ ID NO: 112515 - RNA, 32 nt, Human
ccucaccucacaccugcucccugcugcugagc

SEQ ID NO: 112516 - RNA, 32 nt, Human
ccucaccucacagcauggagagaggagaccaa

SEQ ID NO: 112517 - RNA, 19 nt, Human
ccucaccucaggaccccag

SEQ ID NO: 112518 - RNA, 32 nt, Human
ccucaccuccacccccuccugucaccggccuu

SEQ ID NO: 112519 - RNA, 32 nt, Human
ccucaccuccacgcuaccacagaagagcgaaa

SEQ ID NO: 112520 - RNA, 32 nt, Human
ccucaccuccauccugucuacuaauccacagu

SEQ ID NO: 112521 - RNA, 32 nt, Human
ccucaccuccccaggcucaccuugccaugcca

SEQ ID NO: 112522 - RNA, 32 nt, Human
ccucaccuccccuucccucuugcccagggaac

SEQ ID NO: 112523 - RNA, 16 nt, Human
ccucaccuccucccca

SEQ ID NO: 112524 - RNA, 32 nt, Human
ccucaccucggacaugguggugggggaaggac

SEQ ID NO: 112525 - RNA, 19 nt, Human
ccucaccucucccucccca

SEQ ID NO: 112526 - RNA, 18 nt, Human
ccucaccucucucacccc

SEQ ID NO: 112527 - RNA, 32 nt, Human
ccucaccucugccucccucgcuccuccaacag

SEQ ID NO: 112528 - RNA, 21 nt, Human
ccucaccucuggcaccucuga

SEQ ID NO: 112529 - RNA, 32 nt, Human
ccucaccugcaacccaugugguucucagacuu

SEQ ID NO: 112530 - RNA, 32 nt, Human
ccucaccugcagcugcgccuccuugcaccugc

SEQ ID NO: 112531 - RNA, 32 nt, Human
ccucaccugccagacaacacccccuccuuccu

SEQ ID NO: 112532 - RNA, 32 nt, Human
ccucaccugccugccugucucccuccucuguc

SEQ ID NO: 112533 - RNA, 32 nt, Human
ccucaccugccuggccaaauucccucugggca

SEQ ID NO: 112534 - RNA, 32 nt, Human
ccucaccugcggugcccagcugcccaggcuga

SEQ ID NO: 112535 - RNA, 32 nt, Human
ccucaccugcucagaagucaggcugcaccugg

SEQ ID NO: 112536 - RNA, 32 nt, Human
ccucaccugcucccccugucucuuuggucuug

SEQ ID NO: 112537 - RNA, 17 nt, Human
ccucaccugcugcugcc

SEQ ID NO: 112538 - RNA, 23 nt, Human
ccucaccuggagcagcacagcag

SEQ ID NO: 112539 - RNA, 32 nt, Human
ccucaccugggaaguccaagaggucagggaac

SEQ ID NO: 112540 - RNA, 32 nt, Human
ccucaccuggugcccugaccucagccuccucc

SEQ ID NO: 112541 - RNA, 32 nt, Human
ccucaccuguaauccaaguacuuugggaggcc

SEQ ID NO: 112542 - RNA, 32 nt, Human
ccucaccuguguucucuucccucucucccaau

SEQ ID NO: 112543 - RNA, 32 nt, Human
ccucaccuucauccucaccaugcccugcuauc

SEQ ID NO: 112544 - RNA, 32 nt, Human
ccucaccuuccagcgccaggagcugcugcggc

SEQ ID NO: 112545 - RNA, 32 nt, Human
ccucaccuucccuguggucuucuucaagcaga

SEQ ID NO: 112546 - RNA, 32 nt, Human
ccucaccuuuacucccagacaugggagggaga

SEQ ID NO: 112547 - RNA, 32 nt, Human
ccucacgaggagcugggauugcaggcgcccgc

SEQ ID NO: 112548 - RNA, 32 nt, Human
ccucacgaggcaggagcccaugauucaugccc

SEQ ID NO: 112549 - RNA, 32 nt, Human
ccucacgaggcugagguggaaggaucaaguga

SEQ ID NO: 112550 - RNA, 32 nt, Human
ccucacgaguagcuggaauuacaggcaggcgc

SEQ ID NO: 112551 - RNA, 32 nt, Human
ccucacgaguagcugggacuacaggcaugcac

SEQ ID NO: 112552 - RNA, 32 nt, Human
ccucacgaguagcugggacuacaggcgccugc

SEQ ID NO: 112553 - RNA, 32 nt, Human
ccucacgaguagcugggauuacaggcaugcgc

SEQ ID NO: 112554 - RNA, 22 nt, Human
ccucacgcacccgcggcgcagg

SEQ ID NO: 112555 - RNA, 32 nt, Human
ccucacgcauuugaucacagacuguagaguuu

SEQ ID NO: 112556 - RNA, 32 nt, Human
ccucacgcccucucuuccucucagccuuccgc

SEQ ID NO: 112557 - RNA, 19 nt, Human
ccucacgccgccgccaccg

SEQ ID NO: 112558 - RNA, 32 nt, Human
ccucacgccuguaaucccagcacuuugggagg

SEQ ID NO: 112559 - RNA, 19 nt, Human
ccucacgccugucauccca

SEQ ID NO: 112560 - RNA, 32 nt, Human
ccucacgccugucaucccagcacuuugggagg

SEQ ID NO: 112561 - RNA, 32 nt, Human
ccucacgcuggagcuggagugcgagguucuua

SEQ ID NO: 112562 - RNA, 32 nt, Human
ccucacggcauggccucugccuuccccagagc

SEQ ID NO: 112563 - RNA, 32 nt, Human
ccucacggcugaagacggggacacagucauug

SEQ ID NO: 112564 - RNA, 32 nt, Human
ccucacggggugggguggggccuccaagagug

SEQ ID NO: 112565 - RNA, 32 nt, Human
ccucacgguccugggccugccugcucuggcca

SEQ ID NO: 112566 - RNA, 32 nt, Human
ccucacggugaccucuuucggcccaacucaug

SEQ ID NO: 112567 - RNA, 32 nt, Human
ccucacggugcuccagcuccacacaccguacu

SEQ ID NO: 112568 - RNA, 32 nt, Human
ccucacguccuuaacugugcucucccuccuuu

SEQ ID NO: 112569 - RNA, 32 nt, Human
ccucacgugcccgcaggccuggggaaggugga

SEQ ID NO: 112570 - RNA, 23 nt, Human
ccucacgugcugcugccuucucu

SEQ ID NO: 112571 - RNA, 32 nt, Human
ccucacgugcugcugccuucucugccucccac

SEQ ID NO: 112572 - RNA, 32 nt, Human
ccucacguggcugaggccaccgcugggacugc

SEQ ID NO: 112573 - RNA, 32 nt, Human
ccucacguuaacguacacacacaaacacacgc

SEQ ID NO: 112574 - RNA, 32 nt, Human
ccucacguuccugguccaggcuguccagcugc

SEQ ID NO: 112575 - RNA, 32 nt, Human
ccucacuacaaccccugccuccuggguuuuag

SEQ ID NO: 112576 - RNA, 32 nt, Human
ccucacuacccacaugcugaucuauuggggaa

SEQ ID NO: 112577 - RNA, 32 nt, Human
ccucacucaagggauccaaggcugccucuucc

SEQ ID NO: 112578 - RNA, 28 nt, Human
ccucacucacccagccagcccuucaggu

SEQ ID NO: 112579 - RNA, 22 nt, Human
ccucacucaccccacccucccc

SEQ ID NO: 112580 - RNA, 32 nt, Human
ccucacucaccucaucccagucacaucucugu

SEQ ID NO: 112581 - RNA, 32 nt, Human
ccucacucacugcaacuggaucuucagccucc

SEQ ID NO: 112582 - RNA, 32 nt, Human
ccucacucacuggcuuugugcuucucuucccg

SEQ ID NO: 112583 - RNA, 32 nt, Human
ccucacucagcagucuggguagggcccuuuga

SEQ ID NO: 112584 - RNA, 32 nt, Human
ccucacucagcccaggcaggugucucuaucag

SEQ ID NO: 112585 - RNA, 25 nt, Human
ccucacucagccuuuucccuccagg

SEQ ID NO: 112586 - RNA, 32 nt, Human
ccucacuccagccugggcaacauagugagacc

SEQ ID NO: 112587 - RNA, 32 nt, Human
ccucacuccagccugggugacagcguaagacu

SEQ ID NO: 112588 - RNA, 32 nt, Human
ccucacucccuuuucuuaccaucccagaaaau

SEQ ID NO: 112589 - RNA, 32 nt, Human
ccucacuccgccugccggcugggaaacuaggg

SEQ ID NO: 112590 - RNA, 32 nt, Human
ccucacucucaugcaggcuuuccucuuguguu

SEQ ID NO: 112591 - RNA, 32 nt, Human
ccucacucucucucuugcuccugcuuuugcug

SEQ ID NO: 112592 - RNA, 32 nt, Human
ccucacucuggccuugcugcuucucuccagcu

SEQ ID NO: 112593 - RNA, 32 nt, Human
ccucacucuggguccgaggccugggaugagcc

SEQ ID NO: 112594 - RNA, 32 nt, Human
ccucacucugucuccauuggccuacuuguuca

SEQ ID NO: 112595 - RNA, 19 nt, Human
ccucacucuucuccaggcc

SEQ ID NO: 112596 - RNA, 32 nt, Human
ccucacucuuucuccugaagccuugugaagaa

SEQ ID NO: 112597 - RNA, 32 nt, Human
ccucacugaaacauggcuguguuugcagccug

SEQ ID NO: 112598 - RNA, 32 nt, Human
ccucacugaaaccagguggccggcuccucgga

SEQ ID NO: 112599 - RNA, 32 nt, Human
ccucacugacaccccugccugccuuugucaga

SEQ ID NO: 112600 - RNA, 32 nt, Human
ccucacugacaguucuuuuucucugaauucuc

SEQ ID NO: 112601 - RNA, 32 nt, Human
ccucacugaccuuggaggaugccuguggccuu

SEQ ID NO: 112602 - RNA, 20 nt, Human
ccucacugagcccagcggga

SEQ ID NO: 112603 - RNA, 32 nt, Human
ccucacugaggcaccccacuuccagugaagaa

SEQ ID NO: 112604 - RNA, 32 nt, Human
ccucacugcaaccuccaccuccuagguucaag

SEQ ID NO: 112605 - RNA, 32 nt, Human
ccucacugcaaccuccgccuccuggguucaag

SEQ ID NO: 112606 - RNA, 32 nt, Human
ccucacugcaacuugcgccucccggguucaag

SEQ ID NO: 112607 - RNA, 32 nt, Human
ccucacugcacgcuagccugggcaacagauug

SEQ ID NO: 112608 - RNA, 32 nt, Human
ccucacugcagccucaaucuuagcugggucua

SEQ ID NO: 112609 - RNA, 32 nt, Human
ccucacugcagccucggcuuccugggcucagg

SEQ ID NO: 112610 - RNA, 32 nt, Human
ccucacugcagcuucaacuuccugggcucaag

SEQ ID NO: 112611 - RNA, 32 nt, Human
ccucacugcauacucuuuaauaguaccaggca

SEQ ID NO: 112612 - RNA, 32 nt, Human
ccucacugcauuccagccugggcaacagagaa

SEQ ID NO: 112613 - RNA, 32 nt, Human
ccucacugccaaguggagacuggggcgugugc

SEQ ID NO: 112614 - RNA, 18 nt, Human
ccucacugccacccagag

SEQ ID NO: 112615 - RNA, 18 nt, Human
ccucacugccauggcaca

SEQ ID NO: 112616 - RNA, 32 nt, Human
ccucacugcggccucaaacuccugggcucaag

SEQ ID NO: 112617 - RNA, 18 nt, Human
ccucacugcugaaucccu

SEQ ID NO: 112618 - RNA, 32 nt, Human
ccucacugcugccucaacuuccugggcucaag

SEQ ID NO: 112619 - RNA, 32 nt, Human
ccucacuggcacugcugacccaucccagaaac

SEQ ID NO: 112620 - RNA, 21 nt, Human
ccucacuggcauccccaaaca

SEQ ID NO: 112621 - RNA, 32 nt, Human
ccucacuggccuggccuugugggggcuccaga

SEQ ID NO: 112622 - RNA, 24 nt, Human
ccucacugggagcuuccccauccu

SEQ ID NO: 112623 - RNA, 32 nt, Human
ccucacugggaugucagaagacauucaaggaa

SEQ ID NO: 112624 - RNA, 32 nt, Human
ccucacuggugaaacccaggauguagauagag

SEQ ID NO: 112625 - RNA, 32 nt, Human
ccucacugugguaaaugccacacaccuuuaag

SEQ ID NO: 112626 - RNA, 32 nt, Human
ccucacuuagaaaaggcauacaggaggccggg

SEQ ID NO: 112627 - RNA, 32 nt, Human
ccucacuuccaaugcugccuugaucucugucu

SEQ ID NO: 112628 - RNA, 20 nt, Human
ccucacuuccucccucuccc

SEQ ID NO: 112629 - RNA, 32 nt, Human
ccucacuuccucccucucccccauccuuccau

SEQ ID NO: 112630 - RNA, 32 nt, Human
ccucacuuccuccugguggucccguugucucu

SEQ ID NO: 112631 - RNA, 32 nt, Human
ccucacuucuagaucucagccauucuaacuca

SEQ ID NO: 112632 - RNA, 32 nt, Human
ccucacuucugccccgacuuguggcucggacc

SEQ ID NO: 112633 - RNA, 32 nt, Human
ccucacuugccgcgucgcccucccaggcucuc

SEQ ID NO: 112634 - RNA, 32 nt, Human
ccucacuugcucaaaaacaacuaccuggagaa

SEQ ID NO: 112635 - RNA, 32 nt, Human
ccucacuugucaacaagaaccuucuggaagag

SEQ ID NO: 112636 - RNA, 32 nt, Human
ccucacuuuaagucucucccagucacauuguu

SEQ ID NO: 112637 - RNA, 32 nt, Human
ccucacuuuccaccacugucagccuggaaaga

SEQ ID NO: 112638 - RNA, 32 nt, Human
ccucacuuuccccucacccaucccuuuaaagu

SEQ ID NO: 112639 - RNA, 32 nt, Human
ccucacuuuccuguccccuccuaggcucuccc

SEQ ID NO: 112640 - RNA, 32 nt, Human
ccucagaaaccagagccaugagaccuaccaua

SEQ ID NO: 112641 - RNA, 32 nt, Human
ccucagaaaggcugguggcaucaggaagcccc

SEQ ID NO: 112642 - RNA, 32 nt, Human
ccucagaacucugccauguugccucgucagac

SEQ ID NO: 112643 - RNA, 19 nt, Human
ccucagaacuggucuauuu

SEQ ID NO: 112644 - RNA, 22 nt, Human
ccucagaagcccagaccugggg

SEQ ID NO: 112645 - RNA, 31 nt, Human
ccucagaaggcacuccugucacuggagauac

SEQ ID NO: 112646 - RNA, 32 nt, Human
ccucagaaggcagaggaagccuugaggugggg

SEQ ID NO: 112647 - RNA, 27 nt, Human
ccucagaagugguaccaucgccuucca

SEQ ID NO: 112648 - RNA, 32 nt, Human
ccucagaaugaacuggauugugguguucacaa

SEQ ID NO: 112649 - RNA, 32 nt, Human
ccucagacacccgggccuucucagccuucucc

SEQ ID NO: 112650 - RNA, 20 nt, Human
ccucagacacgggcccuggg

SEQ ID NO: 112651 - RNA, 32 nt, Human
ccucagacagcagcuguccccugugguggugu

SEQ ID NO: 112652 - RNA, 32 nt, Human
ccucagacaggucccugaaggagucugaggcu

SEQ ID NO: 112653 - RNA, 22 nt, Human
ccucagacaguaaccaugggga

SEQ ID NO: 112654 - RNA, 32 nt, Human
ccucagacaucuuuucccucccucucucuuuc

SEQ ID NO: 112655 - RNA, 32 nt, Human
ccucagacauucuguuucaucucccauucauc

SEQ ID NO: 112656 - RNA, 32 nt, Human
ccucagaccauccuugcugucccuucacccuc

SEQ ID NO: 112657 - RNA, 32 nt, Human
ccucagacccuccucuggccccggccuugccc

SEQ ID NO: 112658 - RNA, 20 nt, Human
ccucagaccugagaaccugg

SEQ ID NO: 112659 - RNA, 22 nt, Human
ccucagaccuuggagcccaagg

SEQ ID NO: 112660 - RNA, 32 nt, Human
ccucagacucucccaaucccugauuuuuacau

SEQ ID NO: 112661 - RNA, 32 nt, Human
ccucagacugggcuccacacucuugggcuuca

SEQ ID NO: 112662 - RNA, 32 nt, Human
ccucagacuuaaagcagcucagagccaaacac

SEQ ID NO: 112663 - RNA, 32 nt, Human
ccucagagaagaggugguuuagagcaaggaaa

SEQ ID NO: 112664 - RNA, 32 nt, Human
ccucagagaauuagguaacuuguucaaaaugg

SEQ ID NO: 112665 - RNA, 32 nt, Human
ccucagagacccacuucucucuuuugcaugga

SEQ ID NO: 112666 - RNA, 32 nt, Human
ccucagagacuuagaucuuccaccucacuccc

SEQ ID NO: 112667 - RNA, 32 nt, Human
ccucagagagcccucuggauggccgccucucc

SEQ ID NO: 112668 - RNA, 32 nt, Human
ccucagagauuuuggccuagauuugcaaaaug

SEQ ID NO: 112669 - RNA, 32 nt, Human
ccucagagcaggcucagacucugggucccucg

SEQ ID NO: 112670 - RNA, 32 nt, Human
ccucagagcaucuuacccuaagccacagaggu

SEQ ID NO: 112671 - RNA, 25 nt, Human
ccucagagccaaggcagacagacuc

SEQ ID NO: 112672 - RNA, 24 nt, Human
ccucagagccagcuucuccucuca

SEQ ID NO: 112673 - RNA, 32 nt, Human
ccucagagcccaggccucaguggucauuaaga

SEQ ID NO: 112674 - RNA, 26 nt, Human
ccucagagcccucugggcuuccucca

SEQ ID NO: 112675 - RNA, 32 nt, Human
ccucagagcccugcucuuugccuggaugguuc

SEQ ID NO: 112676 - RNA, 32 nt, Human
ccucagagcuccagggagcacaggaggugugc

SEQ ID NO: 112677 - RNA, 20 nt, Human
ccucagagcuguccagcagc

SEQ ID NO: 112678 - RNA, 25 nt, Human
ccucagaggagcucuacccugcucc

SEQ ID NO: 112679 - RNA, 32 nt, Human
ccucagaggaggaggaggaggaggcagcuccg

SEQ ID NO: 112680 - RNA, 24 nt, Human
ccucagaggcagagguugcaauga

SEQ ID NO: 112681 - RNA, 32 nt, Human
ccucagaguuggagugccuggcucucuggugg

SEQ ID NO: 112682 - RNA, 32 nt, Human
ccucagauauccugcuggaugacauuguccuu

SEQ ID NO: 112683 - RNA, 32 nt, Human
ccucagaucagccugcgacugcaagauucuua

SEQ ID NO: 112684 - RNA, 32 nt, Human
ccucagaucaggaauaccagauaaaugacguu

SEQ ID NO: 112685 - RNA, 22 nt, Human
ccucagaucaggugcaccuggg

SEQ ID NO: 112686 - RNA, 32 nt, Human
ccucagaucugccucccaagacccagcuccug

SEQ ID NO: 112687 - RNA, 17 nt, Human
ccucagaugcuucacuu

SEQ ID NO: 112688 - RNA, 32 nt, Human
ccucagauggggagggacagggucggccugua

SEQ ID NO: 112689 - RNA, 23 nt, Human
ccucagauuacaaacagcagugg

SEQ ID NO: 112690 - RNA, 32 nt, Human
ccucagauucacugcagcucuccucuuaauau

SEQ ID NO: 112691 - RNA, 32 nt, Human
ccucagauuccauuugguccucuccuuccugg

SEQ ID NO: 112692 - RNA, 32 nt, Human
ccucagauuucucaggagaccagaacugaucu

SEQ ID NO: 112693 - RNA, 32 nt, Human
ccucagcaaaaacaacaaaacuagaagcaccc

SEQ ID NO: 112694 - RNA, 32 nt, Human
ccucagcaagggugcaaagggggaagaacuag

SEQ ID NO: 112695 - RNA, 32 nt, Human
ccucagcaauacagagagacccuaucucuaca

SEQ ID NO: 112696 - RNA, 32 nt, Human
ccucagcaccacccuccaucccugcccaacca

SEQ ID NO: 112697 - RNA, 18 nt, Human
ccucagcaccugcugcau

SEQ ID NO: 112698 - RNA, 32 nt, Human
ccucagcagaagaguggcagcugagagagagg

SEQ ID NO: 112699 - RNA, 32 nt, Human
ccucagcagagccgcuuccuggugcuacgcag

SEQ ID NO: 112700 - RNA, 32 nt, Human
ccucagcagauccugaagaucuucguggacaa

SEQ ID NO: 112701 - RNA, 32 nt, Human
ccucagcagccuguggcugccucccucaccuc

SEQ ID NO: 112702 - RNA, 32 nt, Human
ccucagcagcuucucccugucuuccucuccuc

SEQ ID NO: 112703 - RNA, 32 nt, Human
ccucagcaggaccugggcuggccucuccaccu

SEQ ID NO: 112704 - RNA, 20 nt, Human
ccucagcaggcccccagggc

SEQ ID NO: 112705 - RNA, 32 nt, Human
ccucagcagggacccagcacagcaauccgguu

SEQ ID NO: 112706 - RNA, 32 nt, Human
ccucagcagugugguucugugucuacuuccau

SEQ ID NO: 112707 - RNA, 32 nt, Human
ccucagcaucacagccgcagcucuguucagcg

SEQ ID NO: 112708 - RNA, 21 nt, Human
ccucagcauucccugucccuu

SEQ ID NO: 112709 - RNA, 19 nt, Human
ccucagccaaacacagagc

SEQ ID NO: 112710 - RNA, 32 nt, Human
ccucagccaagugcuuuggcccggugcuuccc

SEQ ID NO: 112711 - RNA, 18 nt, Human
ccucagccacacggcaca

SEQ ID NO: 112712 - RNA, 32 nt, Human
ccucagccaccugcccgccacauccucugccu

SEQ ID NO: 112713 - RNA, 32 nt, Human
ccucagccacucaacaugaagacaacgaggau

SEQ ID NO: 112714 - RNA, 32 nt, Human
ccucagccacuucuagcacaaccagaggccca

SEQ ID NO: 112715 - RNA, 32 nt, Human
ccucagccagccugccugcccagcgaggcccc

SEQ ID NO: 112716 - RNA, 32 nt, Human
ccucagccaggcaggguugcagcugagggcca

SEQ ID NO: 112717 - RNA, 32 nt, Human
ccucagccagucgcuaugcagcacuuucggac

SEQ ID NO: 112718 - RNA, 23 nt, Human
ccucagccaguucauccagguca

SEQ ID NO: 112719 - RNA, 19 nt, Human
ccucagccaucccagggca

SEQ ID NO: 112720 - RNA, 25 nt, Human
ccucagccauuccuguccagcccug

SEQ ID NO: 112721 - RNA, 19 nt, Human
ccucagcccagcccaggca

SEQ ID NO: 112722 - RNA, 21 nt, Human
ccucagcccaggucagcuguu

SEQ ID NO: 112723 - RNA, 23 nt, Human
ccucagcccaugcccagcuguca

SEQ ID NO: 112724 - RNA, 32 nt, Human
ccucagccccagcucugccaucuuggagccag

SEQ ID NO: 112725 - RNA, 26 nt, Human
ccucagccccaguuuucuccuccuca

SEQ ID NO: 112726 - RNA, 22 nt, Human
ccucagccccggcagcuagugg

SEQ ID NO: 112727 - RNA, 19 nt, Human
ccucagccccucgcccuga

SEQ ID NO: 112728 - RNA, 22 nt, Human
ccucagccccucgcccugagca

SEQ ID NO: 112729 - RNA, 32 nt, Human
ccucagcccgcccuccccuuuggccuucccag

SEQ ID NO: 112730 - RNA, 32 nt, Human
ccucagcccgggcugugccagcccucccagcc

SEQ ID NO: 112731 - RNA, 32 nt, Human
ccucagcccgggguggcugagauauggcccug

SEQ ID NO: 112732 - RNA, 32 nt, Human
ccucagcccugggaagacacauucccuucccu

SEQ ID NO: 112733 - RNA, 32 nt, Human
ccucagcccugugacuggaaugugugccccac

SEQ ID NO: 112734 - RNA, 20 nt, Human
ccucagcccuucucccugca

SEQ ID NO: 112735 - RNA, 31 nt, Human
ccucagccgacagucucagccccaccgaccc

SEQ ID NO: 112736 - RNA, 32 nt, Human
ccucagccucagaggagcucuacccugcuccc

SEQ ID NO: 112737 - RNA, 24 nt, Human
ccucagccucagaguccagcugcc

SEQ ID NO: 112738 - RNA, 32 nt, Human
ccucagccucagaguccagcugcccggacucc

SEQ ID NO: 112739 - RNA, 32 nt, Human
ccucagccucagggcugagauucaggcucagg

SEQ ID NO: 112740 - RNA, 32 nt, Human
ccucagccuccaggcuucagucuucccaacuu

SEQ ID NO: 112741 - RNA, 32 nt, Human
ccucagccucccaaggcugggauuacagguau

SEQ ID NO: 112742 - RNA, 32 nt, Human
ccucagccucccagugcugggauuauaggugu

SEQ ID NO: 112743 - RNA, 32 nt, Human
ccucagccuccuaagggcugggauuacaggaa

SEQ ID NO: 112744 - RNA, 32 nt, Human
ccucagccuccuaagugggauuacaggcaccu

SEQ ID NO: 112745 - RNA, 32 nt, Human
ccucagccuccugaacagcugggaccacaggu

SEQ ID NO: 112746 - RNA, 32 nt, Human
ccucagccucucacccccuccuccucagggca

SEQ ID NO: 112747 - RNA, 32 nt, Human
ccucagccucuccucacuauggccccagugcc

SEQ ID NO: 112748 - RNA, 32 nt, Human
ccucagccucugauccucacacaugcucugau

SEQ ID NO: 112749 - RNA, 32 nt, Human
ccucagccugcucuucucucugguggcuccac

SEQ ID NO: 112750 - RNA, 32 nt, Human
ccucagccuggagugagcacagccuggacccu

SEQ ID NO: 112751 - RNA, 23 nt, Human
ccucagccugggagcuacugcca

SEQ ID NO: 112752 - RNA, 32 nt, Human
ccucagccugggcucccaggacaggacaggau

SEQ ID NO: 112753 - RNA, 32 nt, Human
ccucagccuggggagcugaaggggagacgcgu

SEQ ID NO: 112754 - RNA, 26 nt, Human
ccucagccuguucucucuccuuguca

SEQ ID NO: 112755 - RNA, 20 nt, Human
ccucagccuucccugcugcc

SEQ ID NO: 112756 - RNA, 32 nt, Human
ccucagccuuucucucgccugccuucugagcu

SEQ ID NO: 112757 - RNA, 21 nt, Human
ccucagcgagagcagcagcag

SEQ ID NO: 112758 - RNA, 32 nt, Human
ccucagcgcaccugcaugcacacacaccaccu

SEQ ID NO: 112759 - RNA, 32 nt, Human
ccucagcgcagcccuggcccaggaaggcagga

SEQ ID NO: 112760 - RNA, 24 nt, Human
ccucagcgcccguagcuucggcgg

SEQ ID NO: 112761 - RNA, 32 nt, Human
ccucagcgccgccgacaccaagcccggcacua

SEQ ID NO: 112762 - RNA, 32 nt, Human
ccucagcggcaggccagugaggcguuuuccua

SEQ ID NO: 112763 - RNA, 32 nt, Human
ccucagcgggggaggaagagaagggagguagc

SEQ ID NO: 112764 - RNA, 32 nt, Human
ccucagcgguucuggcugccagccugggcagc

SEQ ID NO: 112765 - RNA, 21 nt, Human
ccucagcgucagcucagcugg

SEQ ID NO: 112766 - RNA, 21 nt, Human
ccucagcguggucacaggggc

SEQ ID NO: 112767 - RNA, 32 nt, Human
ccucagcuacagaaagcccagagacagaaagu

SEQ ID NO: 112768 - RNA, 32 nt, Human
ccucagcuacccuggaucuuugcccaccucuu

SEQ ID NO: 112769 - RNA, 19 nt, Human
ccucagcuaccgccgcugc

SEQ ID NO: 112770 - RNA, 17 nt, Human
ccucagcuaccugcuca

SEQ ID NO: 112771 - RNA, 24 nt, Human
ccucagcuaccuggaggcagugaa

SEQ ID NO: 112772 - RNA, 32 nt, Human
ccucagcuacucaggagaauugcuugaaccug

SEQ ID NO: 112773 - RNA, 32 nt, Human
ccucagcuaucuuguuauccuacccucaggga

SEQ ID NO: 112774 - RNA, 32 nt, Human
ccucagcucacugaaaccucugccucccgggu

SEQ ID NO: 112775 - RNA, 32 nt, Human
ccucagcucacugcaaccucugccucccgggu

SEQ ID NO: 112776 - RNA, 32 nt, Human
ccucagcucacugcacccucugugucccggau

SEQ ID NO: 112777 - RNA, 32 nt, Human
ccucagcucacugcagccuccaccuccugggu

SEQ ID NO: 112778 - RNA, 32 nt, Human
ccucagcucacugcgaccuccaccuccugggu

SEQ ID NO: 112779 - RNA, 21 nt, Human
ccucagcucagcagaggcugu

SEQ ID NO: 112780 - RNA, 22 nt, Human
ccucagcucaggauagcugcug

SEQ ID NO: 112781 - RNA, 32 nt, Human
ccucagcuccaccaccucccucacccuccccg

SEQ ID NO: 112782 - RNA, 32 nt, Human
ccucagcuccacuuuugaggcugcaguccauu

SEQ ID NO: 112783 - RNA, 32 nt, Human
ccucagcucccagcuccaccucugggguucag

SEQ ID NO: 112784 - RNA, 23 nt, Human
ccucagcucccgcaacacccugg

SEQ ID NO: 112785 - RNA, 20 nt, Human
ccucagcucccucagcuccu

SEQ ID NO: 112786 - RNA, 21 nt, Human
ccucagcucccugcccagcca

SEQ ID NO: 112787 - RNA, 32 nt, Human
ccucagcuccucauccaugccaccucacaggg

SEQ ID NO: 112788 - RNA, 21 nt, Human
ccucagcuccucucacugcug

SEQ ID NO: 112789 - RNA, 20 nt, Human
ccucagcucucacagcagug

SEQ ID NO: 112790 - RNA, 32 nt, Human
ccucagcucugccucugcagcccacugccugc

SEQ ID NO: 112791 - RNA, 20 nt, Human
ccucagcucuggacagcugu

SEQ ID NO: 112792 - RNA, 32 nt, Human
ccucagcucuguacacaugauaugcaacaaag

SEQ ID NO: 112793 - RNA, 26 nt, Human
ccucagcucuguggaggagcagcagu

SEQ ID NO: 112794 - RNA, 32 nt, Human
ccucagcucuucuccuggaaugacuggcuucc

SEQ ID NO: 112795 - RNA, 32 nt, Human
ccucagcucuuuccuucccaccuuuccuggcc

SEQ ID NO: 112796 - RNA, 20 nt, Human
ccucagcugaacccacagug

SEQ ID NO: 112797 - RNA, 32 nt, Human
ccucagcugaacccacagugagcccagggcag

SEQ ID NO: 112798 - RNA, 19 nt, Human
ccucagcugagccaccugc

SEQ ID NO: 112799 - RNA, 24 nt, Human
ccucagcugccacugcaacagugg

SEQ ID NO: 112800 - RNA, 22 nt, Human
ccucagcugccuccccagcucu

SEQ ID NO: 112801 - RNA, 32 nt, Human
ccucagcugccuccuccaggcaucuuccuggc

SEQ ID NO: 112802 - RNA, 32 nt, Human
ccucagcugccugucugggccucccuggcuuc

SEQ ID NO: 112803 - RNA, 32 nt, Human
ccucagcugcuggcauuuccuucugcuguuug

SEQ ID NO: 112804 - RNA, 20 nt, Human
ccucagcuggagggcugcag

SEQ ID NO: 112805 - RNA, 32 nt, Human
ccucagcugggaacauuggggaggauggaauc

SEQ ID NO: 112806 - RNA, 21 nt, Human
ccucagcugggaugaggagug

SEQ ID NO: 112807 - RNA, 32 nt, Human
ccucagcugugagaugcaaggggcgccuugca

SEQ ID NO: 112808 - RNA, 32 nt, Human
ccucagcuucacagaacaaagccagguacucu

SEQ ID NO: 112809 - RNA, 20 nt, Human
ccucagcuucagagucagcc

SEQ ID NO: 112810 - RNA, 23 nt, Human
ccucagcuucagccuccgcgcca

SEQ ID NO: 112811 - RNA, 32 nt, Human
ccucagcuucaggcaccaccacugaccuggga

SEQ ID NO: 112812 - RNA, 32 nt, Human
ccucagcuuccaggacccagagggaggcaggc

SEQ ID NO: 112813 - RNA, 21 nt, Human
ccucagcuuccccagcagcug

SEQ ID NO: 112814 - RNA, 32 nt, Human
ccucagcuucgagccgaggugcagugagcugg

SEQ ID NO: 112815 - RNA, 32 nt, Human
ccucagcuucuccuggugggggugcuuugccu

SEQ ID NO: 112816 - RNA, 25 nt, Human
ccucagcuugguucccagccugcug

SEQ ID NO: 112817 - RNA, 24 nt, Human
ccucagcuuugcagcagcagcagu

SEQ ID NO: 112818 - RNA, 32 nt, Human
ccucaggaaaagcuccagcuagcauguuuuuc

SEQ ID NO: 112819 - RNA, 32 nt, Human
ccucaggaagcuuggcuucccucccaugggaa

SEQ ID NO: 112820 - RNA, 32 nt, Human
ccucaggaagugcugggauuacaggcguguga

SEQ ID NO: 112821 - RNA, 21 nt, Human
ccucaggacaccucccagcca

SEQ ID NO: 112822 - RNA, 32 nt, Human
ccucaggacccaaacccagacacuucauagga

SEQ ID NO: 112823 - RNA, 32 nt, Human
ccucaggaccugggguugguuggacucugccc

SEQ ID NO: 112824 - RNA, 32 nt, Human
ccucaggacgcuggaugccagcucccagcccc

SEQ ID NO: 112825 - RNA, 32 nt, Human
ccucaggacucgacucucucucccugccauca

SEQ ID NO: 112826 - RNA, 20 nt, Human
ccucaggacugcagcacuga

SEQ ID NO: 112827 - RNA, 32 nt, Human
ccucaggagaagcaggcagggugcaggccauu

SEQ ID NO: 112828 - RNA, 32 nt, Human
ccucaggagcaguguggaggaagaugagggcc

SEQ ID NO: 112829 - RNA, 32 nt, Human
ccucaggagcaguugggugaggagcaccagaa

SEQ ID NO: 112830 - RNA, 20 nt, Human
ccucaggagcuucccccucc

SEQ ID NO: 112831 - RNA, 32 nt, Human
ccucaggagcuucccccucccccuuugccuau

SEQ ID NO: 112832 - RNA, 32 nt, Human
ccucaggaggcggagguugcagugagccgaga

SEQ ID NO: 112833 - RNA, 19 nt, Human
ccucaggaggcucugggca

SEQ ID NO: 112834 - RNA, 32 nt, Human
ccucaggaggcugaggcaggagaaucacuuga

SEQ ID NO: 112835 - RNA, 32 nt, Human
ccucaggaggcugaggcaggagaaucgcuuga

SEQ ID NO: 112836 - RNA, 32 nt, Human
ccucaggagguugaggcugcagugagcuguga

SEQ ID NO: 112837 - RNA, 32 nt, Human
ccucaggaguauucuucuacaccagcugcugu

SEQ ID NO: 112838 - RNA, 32 nt, Human
ccucaggaucccacccuccaucccgucugccc

SEQ ID NO: 112839 - RNA, 32 nt, Human
ccucaggaugcaggagccuccuccucagaccc

SEQ ID NO: 112840 - RNA, 32 nt, Human
ccucaggcaaccaguugcuauaccuuagcugu

SEQ ID NO: 112841 - RNA, 32 nt, Human
ccucaggcaagccacguguccucugagccuca

SEQ ID NO: 112842 - RNA, 32 nt, Human
ccucaggcacagaacauccucucccucuucug

SEQ ID NO: 112843 - RNA, 32 nt, Human
ccucaggcaccugcacuuacaggccuugcuca

SEQ ID NO: 112844 - RNA, 32 nt, Human
ccucaggcagaggcugaguccgcacaucaccu

SEQ ID NO: 112845 - RNA, 32 nt, Human
ccucaggcagcaaaccaagauggaguaugagu

SEQ ID NO: 112846 - RNA, 32 nt, Human
ccucaggcaguguggcuccagaugucaggagg

SEQ ID NO: 112847 - RNA, 32 nt, Human
ccucaggcauuuucuacucagcugugaccuua

SEQ ID NO: 112848 - RNA, 32 nt, Human
ccucaggccauacucuccuuuaccauacuauu

SEQ ID NO: 112849 - RNA, 24 nt, Human
ccucaggcccacccaagcgccggg

SEQ ID NO: 112850 - RNA, 24 nt, Human
ccucaggcccaccgcauccaagaa

SEQ ID NO: 112851 - RNA, 32 nt, Human
ccucaggcccccacccuccacuccuccccacg

SEQ ID NO: 112852 - RNA, 32 nt, Human
ccucaggccccgaggucaggguuugagggaug

SEQ ID NO: 112853 - RNA, 32 nt, Human
ccucaggccccucucuggcugcagagcccucu

SEQ ID NO: 112854 - RNA, 22 nt, Human
ccucaggcccuaguccagagga

SEQ ID NO: 112855 - RNA, 32 nt, Human
ccucaggcccuucucuggcugcagagccgucu

SEQ ID NO: 112856 - RNA, 32 nt, Human
ccucaggccugggccccagagcucagggcacc

SEQ ID NO: 112857 - RNA, 32 nt, Human
ccucaggccuugggcaaaauugcuucgcucug

SEQ ID NO: 112858 - RNA, 25 nt, Human
ccucaggcucucuccccugcucucc

SEQ ID NO: 112859 - RNA, 32 nt, Human
ccucaggcucucuccccugcucucccaccucu

SEQ ID NO: 112860 - RNA, 32 nt, Human
ccucaggcugccucucugccuguuacugcugc

SEQ ID NO: 112861 - RNA, 32 nt, Human
ccucaggcugcucucaccguggccuguccacg

SEQ ID NO: 112862 - RNA, 26 nt, Human
ccucaggcuggcugccccuguuccuu

SEQ ID NO: 112863 - RNA, 32 nt, Human
ccucaggcuucuguuccauuccuuaauugucu

SEQ ID NO: 112864 - RNA, 32 nt, Human
ccucaggcuuucucccucagucuuggcuucuc

SEQ ID NO: 112865 - RNA, 32 nt, Human
ccucagggaacagcagagagcaguuggcucuu

SEQ ID NO: 112866 - RNA, 18 nt, Human
ccucagggaagcuggggc

SEQ ID NO: 112867 - RNA, 32 nt, Human
ccucagggaaugagagaaagugauggcaauca

SEQ ID NO: 112868 - RNA, 20 nt, Human
ccucagggacacacaaggac

SEQ ID NO: 112869 - RNA, 20 nt, Human
ccucagggacauugcccaca

SEQ ID NO: 112870 - RNA, 32 nt, Human
ccucagggagacagacacagaccaagaauagc

SEQ ID NO: 112871 - RNA, 32 nt, Human
ccucagggagcgcggcccugcugccaccuuga

SEQ ID NO: 112872 - RNA, 32 nt, Human
ccucagggcaccauuuuuaaucccagaacaca

SEQ ID NO: 112873 - RNA, 32 nt, Human
ccucagggcccaggccugaguggugcugcuca

SEQ ID NO: 112874 - RNA, 32 nt, Human
ccucagggccgaaggggaggugguguacauag

SEQ ID NO: 112875 - RNA, 32 nt, Human
ccucagggccuccauugagcagcuggggcugg

SEQ ID NO: 112876 - RNA, 21 nt, Human
ccucagggccucuagagccug

SEQ ID NO: 112877 - RNA, 32 nt, Human
ccucaggggagcggggaggcagcugcuggccg

SEQ ID NO: 112878 - RNA, 21 nt, Human
ccucaggggaguuccgcgcug

SEQ ID NO: 112879 - RNA, 32 nt, Human
ccucaggggcugcggcccuggucccgcgggac

SEQ ID NO: 112880 - RNA, 32 nt, Human
ccucaggggucaggaaaaagcagcacagcuuu

SEQ ID NO: 112881 - RNA, 32 nt, Human
ccucaggggucugagcuccagcuccuuugggc

SEQ ID NO: 112882 - RNA, 20 nt, Human
ccucaggguacaucacgggg

SEQ ID NO: 112883 - RNA, 23 nt, Human
ccucagggucccaagcucccuca

SEQ ID NO: 112884 - RNA, 32 nt, Human
ccucagggucggacuucauuuuguacuguggg

SEQ ID NO: 112885 - RNA, 19 nt, Human
ccucagggugaccucuggu

SEQ ID NO: 112886 - RNA, 32 nt, Human
ccucagggugagcagagggcacugggcugggg

SEQ ID NO: 112887 - RNA, 32 nt, Human
ccucagggugcacacaggauggcaggaggcau

SEQ ID NO: 112888 - RNA, 32 nt, Human
ccucagguaaaauuuaggacccugcuagcugu

SEQ ID NO: 112889 - RNA, 32 nt, Human
ccucagguaauccacccgccucagccucccga

SEQ ID NO: 112890 - RNA, 23 nt, Human
ccucagguaauccgcccaccuca

SEQ ID NO: 112891 - RNA, 23 nt, Human
ccucagguaauccucccaccuca

SEQ ID NO: 112892 - RNA, 32 nt, Human
ccucagguauugaagguggggcccaguaggga

SEQ ID NO: 112893 - RNA, 32 nt, Human
ccucaggucagccucuccagggccaacuccua

SEQ ID NO: 112894 - RNA, 32 nt, Human
ccucaggucugggcugagaugugugcagaggg

SEQ ID NO: 112895 - RNA, 32 nt, Human
ccucaggugagcccgggauggcuaucugaaau

SEQ ID NO: 112896 - RNA, 23 nt, Human
ccucaggugauccacccaccuca

SEQ ID NO: 112897 - RNA, 19 nt, Human
ccucaggugauccacccgc

SEQ ID NO: 112898 - RNA, 23 nt, Human
ccucaggugauccacccgccuca

SEQ ID NO: 112899 - RNA, 19 nt, Human
ccucaggugauccccccac

SEQ ID NO: 112900 - RNA, 23 nt, Human
ccucaggugauccgcccaccuca

SEQ ID NO: 112901 - RNA, 22 nt, Human
ccucaggugauccucccaccuc

SEQ ID NO: 112902 - RNA, 23 nt, Human
ccucaggugauuuaucagggaga

SEQ ID NO: 112903 - RNA, 18 nt, Human
ccucaggugccacggcca

SEQ ID NO: 112904 - RNA, 32 nt, Human
ccucaggugcgaggagcuggagcccaggccag

SEQ ID NO: 112905 - RNA, 32 nt, Human
ccucagguggccagaaggccgaguuguguaau

SEQ ID NO: 112906 - RNA, 18 nt, Human
ccucaggugucaaaguaa

SEQ ID NO: 112907 - RNA, 32 nt, Human
ccucaggugucugcccaccucuaccucccaaa

SEQ ID NO: 112908 - RNA, 32 nt, Human
ccucagguucccaagacuucaguccuggucug

SEQ ID NO: 112909 - RNA, 18 nt, Human
ccucagguucccacauca

SEQ ID NO: 112910 - RNA, 32 nt, Human
ccucagguugacucuguacaucugaauaguga

SEQ ID NO: 112911 - RNA, 32 nt, Human
ccucagguugugacucacugagcgccacuugu

SEQ ID NO: 112912 - RNA, 32 nt, Human
ccucaguaaaagucuucucccaacucagccug

SEQ ID NO: 112913 - RNA, 32 nt, Human
ccucaguaacugcucccccuucuccauauaag

SEQ ID NO: 112914 - RNA, 32 nt, Human
ccucaguacuguacaagggaagcuuuuccucu

SEQ ID NO: 112915 - RNA, 32 nt, Human
ccucaguagaagaacguggcauggaaggagcc

SEQ ID NO: 112916 - RNA, 32 nt, Human
ccucaguagagccggcccugcucacuaccgcg

SEQ ID NO: 112917 - RNA, 32 nt, Human
ccucaguagcugaugaacuaacaggagauaaa

SEQ ID NO: 112918 - RNA, 32 nt, Human
ccucaguaggcugaggugagaggaucacuuga

SEQ ID NO: 112919 - RNA, 32 nt, Human
ccucaguagugggagcaccaggcccuuugcca

SEQ ID NO: 112920 - RNA, 32 nt, Human
ccucagucacacacccccaaccccaggcagcc

SEQ ID NO: 112921 - RNA, 32 nt, Human
ccucagucagaaccuuugcuccagaaauuuuc

SEQ ID NO: 112922 - RNA, 20 nt, Human
ccucagucagcuggcaggga

SEQ ID NO: 112923 - RNA, 32 nt, Human
ccucaguccaccaacagaacuaugccaguugg

SEQ ID NO: 112924 - RNA, 27 nt, Human
ccucaguccaguaccuccuugcuccuu

SEQ ID NO: 112925 - RNA, 32 nt, Human
ccucagucccccaggcuccugcacgggcucug

SEQ ID NO: 112926 - RNA, 23 nt, Human
ccucagucccucucucaccuccc

SEQ ID NO: 112927 - RNA, 22 nt, Human
ccucaguccucucuuccuuccc

SEQ ID NO: 112928 - RNA, 32 nt, Human
ccucaguccuugugcagcaccaggaagaaacc

SEQ ID NO: 112929 - RNA, 32 nt, Human
ccucagucgcucaggcuggagugcaguggcgc

SEQ ID NO: 112930 - RNA, 32 nt, Human
ccucagucggccugcgcuccucagccuggcgg

SEQ ID NO: 112931 - RNA, 32 nt, Human
ccucagucucccaggccugggacaggcagaac

SEQ ID NO: 112932 - RNA, 32 nt, Human
ccucagucucccugucugugguuccagaggga

SEQ ID NO: 112933 - RNA, 23 nt, Human
ccucagucucccuuugggaccug

SEQ ID NO: 112934 - RNA, 32 nt, Human
ccucagucuccuccccaucacccuccucaggc

SEQ ID NO: 112935 - RNA, 32 nt, Human
ccucagucuccucuccccacauuguguccugu

SEQ ID NO: 112936 - RNA, 32 nt, Human
ccucagucucugcugccuccuccuuucuugag

SEQ ID NO: 112937 - RNA, 32 nt, Human
ccucagucugcagcucuuuucuccaccgcgcg

SEQ ID NO: 112938 - RNA, 32 nt, Human
ccucagucugccugccaagaacucaaguguaa

SEQ ID NO: 112939 - RNA, 32 nt, Human
ccucagugacaccucagacacgggcccugggc

SEQ ID NO: 112940 - RNA, 32 nt, Human
ccucagugacaucaaagccuggccuaauuguu

SEQ ID NO: 112941 - RNA, 32 nt, Human
ccucagugacaucucagggcacccagacucug

SEQ ID NO: 112942 - RNA, 32 nt, Human
ccucagugaccuggaucugaccucacaccauc

SEQ ID NO: 112943 - RNA, 21 nt, Human
ccucagugacugacagaggau

SEQ ID NO: 112944 - RNA, 21 nt, Human
ccucagugacugccacccugg

SEQ ID NO: 112945 - RNA, 20 nt, Human
ccucagugaggagggcugga

SEQ ID NO: 112946 - RNA, 32 nt, Human
ccucagugcaggaccaguggaugaaaggcaag

SEQ ID NO: 112947 - RNA, 20 nt, Human
ccucagugccaguccugccu

SEQ ID NO: 112948 - RNA, 24 nt, Human
ccucagugcccguuuggccugcug

SEQ ID NO: 112949 - RNA, 32 nt, Human
ccucagugccgagcuggcugguggcaguggug

SEQ ID NO: 112950 - RNA, 32 nt, Human
ccucagugccuguccauaacugugaaguauua

SEQ ID NO: 112951 - RNA, 32 nt, Human
ccucagugcucagcuggagguggagagaaauc

SEQ ID NO: 112952 - RNA, 32 nt, Human
ccucagugcugauuuugcagaugaagagacua

SEQ ID NO: 112953 - RNA, 32 nt, Human
ccucaguggaaggugaugggggccggugcugu

SEQ ID NO: 112954 - RNA, 32 nt, Human
ccucaguggagaccccaaggagcugcagcuga

SEQ ID NO: 112955 - RNA, 32 nt, Human
ccucaguggcuucccgauguugccugcuggca

SEQ ID NO: 112956 - RNA, 23 nt, Human
ccucagugggagcgggacaggga

SEQ ID NO: 112957 - RNA, 32 nt, Human
ccucaguguucauuccuguuaccugcauaucu

SEQ ID NO: 112958 - RNA, 23 nt, Human
ccucaguuacauaaaauaaauga

SEQ ID NO: 112959 - RNA, 32 nt, Human
ccucaguuaccuggggaagaguaaaggcaaga

SEQ ID NO: 112960 - RNA, 32 nt, Human
ccucaguucaguuucuaggcaggaagccuaga

SEQ ID NO: 112961 - RNA, 32 nt, Human
ccucaguuccacugccuuccucucccucuccu

SEQ ID NO: 112962 - RNA, 32 nt, Human
ccucaguucccuuuggccucccccuuuaccca

SEQ ID NO: 112963 - RNA, 32 nt, Human
ccucaguucucccagguuguuccucaaaguca

SEQ ID NO: 112964 - RNA, 32 nt, Human
ccucaguugauccaccugccucagccucccaa

SEQ ID NO: 112965 - RNA, 32 nt, Human
ccucaguugauccaccugccucagccucugca

SEQ ID NO: 112966 - RNA, 32 nt, Human
ccucaguugcccaggccucuaucugcauggag

SEQ ID NO: 112967 - RNA, 32 nt, Human
ccucaguuggauaacauuagauccaaagugca

SEQ ID NO: 112968 - RNA, 32 nt, Human
ccucaguugggagcuuccaaagccgggugauc

SEQ ID NO: 112969 - RNA, 32 nt, Human
ccucaguuuccccauuuguauaaugggaagcc

SEQ ID NO: 112970 - RNA, 32 nt, Human
ccucaguuucccccaucuccucugccagaggc

SEQ ID NO: 112971 - RNA, 32 nt, Human
ccucaguuuccccucaugaucuggccucugcc

SEQ ID NO: 112972 - RNA, 32 nt, Human
ccucaguuucccuaucucgaacauggaacuca

SEQ ID NO: 112973 - RNA, 32 nt, Human
ccucaguuucucccucuucuaaaagaggauga

SEQ ID NO: 112974 - RNA, 32 nt, Human
ccucaguuucuccucaacaggccugggggcag

SEQ ID NO: 112975 - RNA, 32 nt, Human
ccucaguuucuuguccaccgcuucacuggcaa

SEQ ID NO: 112976 - RNA, 32 nt, Human
ccucauaaacauuugaguuuuguugaaaagau

SEQ ID NO: 112977 - RNA, 32 nt, Human
ccucauaacaccuagaccauccuagaauuccu

SEQ ID NO: 112978 - RNA, 32 nt, Human
ccucauacaguacguguccuguuuuuaaaaua

SEQ ID NO: 112979 - RNA, 32 nt, Human
ccucauacccgugcccucacagagccaugccc

SEQ ID NO: 112980 - RNA, 32 nt, Human
ccucauacgcagcucaucuuaaaccaauagaa

SEQ ID NO: 112981 - RNA, 32 nt, Human
ccucauacucuucuguuuuccauuccacauga

SEQ ID NO: 112982 - RNA, 20 nt, Human
ccucauagauuagccauugu

SEQ ID NO: 112983 - RNA, 32 nt, Human
ccucauagccaaugaacaggacaggaaucuga

SEQ ID NO: 112984 - RNA, 32 nt, Human
ccucauagcuucacagccuugcccucagccuc

SEQ ID NO: 112985 - RNA, 22 nt, Human
ccucauaggaggucagcaccuu

SEQ ID NO: 112986 - RNA, 18 nt, Human
ccucauaguccuguugga

SEQ ID NO: 112987 - RNA, 32 nt, Human
ccucauaucucagcagagaagccagugguggc

SEQ ID NO: 112988 - RNA, 32 nt, Human
ccucauauggcccagugucaaguugugcuugu

SEQ ID NO: 112989 - RNA, 32 nt, Human
ccucaucaaauccucaccuaagcuuucagugu

SEQ ID NO: 112990 - RNA, 32 nt, Human
ccucaucaccuuuugugcagacaggcagguua

SEQ ID NO: 112991 - RNA, 19 nt, Human
ccucaucacugucaccuua

SEQ ID NO: 112992 - RNA, 32 nt, Human
ccucaucacuguccaugcaccaugcagccaua

SEQ ID NO: 112993 - RNA, 32 nt, Human
ccucaucagaacucugcccuuccuucuguucu

SEQ ID NO: 112994 - RNA, 32 nt, Human
ccucaucagcaaggugggaugcagcccccggc

SEQ ID NO: 112995 - RNA, 32 nt, Human
ccucaucaucuucuccaacugacaccuaguua

SEQ ID NO: 112996 - RNA, 32 nt, Human
ccucaucaugaaaacugggaggccgggcaugg

SEQ ID NO: 112997 - RNA, 32 nt, Human
ccucauccaagaaacacccucacagcgacguc

SEQ ID NO: 112998 - RNA, 32 nt, Human
ccucauccaagcucuccuaccucugcccagcc

SEQ ID NO: 112999 - RNA, 32 nt, Human
ccucauccaccaggcaauagacaggagagagg

SEQ ID NO: 113000 - RNA, 32 nt, Human
ccucauccaccccuccccaucuggaccauaau

SEQ ID NO: 113001 - RNA, 18 nt, Human
ccucauccaccucuucca

SEQ ID NO: 113002 - RNA, 32 nt, Human
ccucauccagcagaaauucacgguaguauggu

SEQ ID NO: 113003 - RNA, 32 nt, Human
ccucauccagggagggaggcagcugcugggga

SEQ ID NO: 113004 - RNA, 20 nt, Human
ccucaucccaacucaacuac

SEQ ID NO: 113005 - RNA, 32 nt, Human
ccucauccccuucacccuccugcccccucucc

SEQ ID NO: 113006 - RNA, 32 nt, Human
ccucaucccgagaggagaggaagaggaggaag

SEQ ID NO: 113007 - RNA, 23 nt, Human
ccucaucccuagcuccaaucccu

SEQ ID NO: 113008 - RNA, 32 nt, Human
ccucaucccuagcuccaaucccuuccccacgu

SEQ ID NO: 113009 - RNA, 32 nt, Human
ccucaucccugacugcagcuugacucugggcc

SEQ ID NO: 113010 - RNA, 22 nt, Human
ccucaucccugcacugguucca

SEQ ID NO: 113011 - RNA, 32 nt, Human
ccucauccuaccucccugaccagcucuggcuu

SEQ ID NO: 113012 - RNA, 32 nt, Human
ccucauccuccaggcucuggcgggaaggagca

SEQ ID NO: 113013 - RNA, 32 nt, Human
ccucauccucccccagcccuugaauagguugg

SEQ ID NO: 113014 - RNA, 32 nt, Human
ccucauccuccccuagcuuagcugucucagag

SEQ ID NO: 113015 - RNA, 32 nt, Human
ccucauccuccuaaccauugagccaaugcauu

SEQ ID NO: 113016 - RNA, 32 nt, Human
ccucauccucuuccucugauaaagccccuacc

SEQ ID NO: 113017 - RNA, 32 nt, Human
ccucauccugaaggcucgguggcagagcucgu

SEQ ID NO: 113018 - RNA, 32 nt, Human
ccucauccugacucccccugcuuuggccaugg

SEQ ID NO: 113019 - RNA, 32 nt, Human
ccucauccuggcucagccuggugauggagaag

SEQ ID NO: 113020 - RNA, 32 nt, Human
ccucauccugggugggcuucaggcuggggcug

SEQ ID NO: 113021 - RNA, 32 nt, Human
ccucauccugguuugcauuuuacccucggaug

SEQ ID NO: 113022 - RNA, 32 nt, Human
ccucauccuucugccaaggcagcuuuccuuuc

SEQ ID NO: 113023 - RNA, 32 nt, Human
ccucauccuuuugccuuuguuauuucugcucg

SEQ ID NO: 113024 - RNA, 32 nt, Human
ccucaucgggccucuggggcaggaagcuuguc

SEQ ID NO: 113025 - RNA, 32 nt, Human
ccucaucgggcugaagcgggaggacaacaaga

SEQ ID NO: 113026 - RNA, 32 nt, Human
ccucaucuagcaccuucucuaccucccagggu

SEQ ID NO: 113027 - RNA, 32 nt, Human
ccucaucucaaaggguccucaaagcucugacg

SEQ ID NO: 113028 - RNA, 32 nt, Human
ccucaucucacacccuuucccucucccugugu

SEQ ID NO: 113029 - RNA, 32 nt, Human
ccucaucucacugcaucccccaucacccccua

SEQ ID NO: 113030 - RNA, 32 nt, Human
ccucaucucauuuggcuguguaaagaaauggg

SEQ ID NO: 113031 - RNA, 32 nt, Human
ccucaucuccaagucaccuccaguacaagaug

SEQ ID NO: 113032 - RNA, 32 nt, Human
ccucaucuccacccccgccacagccuacacgc

SEQ ID NO: 113033 - RNA, 32 nt, Human
ccucaucuccacccucccccauaucuguuugc

SEQ ID NO: 113034 - RNA, 32 nt, Human
ccucaucuccauccucauccucuuccuucaca

SEQ ID NO: 113035 - RNA, 32 nt, Human
ccucaucucccccagcccacuuguuuuccccc

SEQ ID NO: 113036 - RNA, 32 nt, Human
ccucaucucugccugccuucccucuugccugg

SEQ ID NO: 113037 - RNA, 32 nt, Human
ccucaucugaaagccuuucugccuuccuuccu

SEQ ID NO: 113038 - RNA, 32 nt, Human
ccucaucugccuggggccucaccugcuggagu

SEQ ID NO: 113039 - RNA, 32 nt, Human
ccucaucugggcaggcgcagagcugaugaaau

SEQ ID NO: 113040 - RNA, 32 nt, Human
ccucaucugugcgcggcagucuggaccuagaa

SEQ ID NO: 113041 - RNA, 32 nt, Human
ccucaucuuccccagcccuccccaccugcuca

SEQ ID NO: 113042 - RNA, 32 nt, Human
ccucaucuuccuucucagccuugguuccugau

SEQ ID NO: 113043 - RNA, 32 nt, Human
ccucaucuuuucuguggcaaucuugcaucugu

SEQ ID NO: 113044 - RNA, 32 nt, Human
ccucaugaauagcugggauuacaggugcccac

SEQ ID NO: 113045 - RNA, 32 nt, Human
ccucaugagccugucgugcaggccaggucauu

SEQ ID NO: 113046 - RNA, 32 nt, Human
ccucaugaguagcugggacuacagaugcgugc

SEQ ID NO: 113047 - RNA, 32 nt, Human
ccucaugaguagcugggacuacaggcaccacu

SEQ ID NO: 113048 - RNA, 32 nt, Human
ccucaugaguagcugggauuacagguauguac

SEQ ID NO: 113049 - RNA, 32 nt, Human
ccucaugauaauugacccucuggaucaccaga

SEQ ID NO: 113050 - RNA, 32 nt, Human
ccucaugauggcuuuuauccuccugggacacu

SEQ ID NO: 113051 - RNA, 32 nt, Human
ccucaugcaagggugcguguacacauacacac

SEQ ID NO: 113052 - RNA, 32 nt, Human
ccucaugcaugucccagccccugggcccuagc

SEQ ID NO: 113053 - RNA, 32 nt, Human
ccucaugccauggucuuugcuaggccucuugc

SEQ ID NO: 113054 - RNA, 20 nt, Human
ccucaugccccaggcuggag

SEQ ID NO: 113055 - RNA, 32 nt, Human
ccucaugccccaggcuggagcagcucuccuag

SEQ ID NO: 113056 - RNA, 32 nt, Human
ccucaugcccucuuccuccucuuuccuggaag

SEQ ID NO: 113057 - RNA, 21 nt, Human
ccucaugccgcucccaucucu

SEQ ID NO: 113058 - RNA, 32 nt, Human
ccucaugccuauaaucccagcacuuuggaagg

SEQ ID NO: 113059 - RNA, 32 nt, Human
ccucaugccuauaaucccagcacuuugggagg

SEQ ID NO: 113060 - RNA, 32 nt, Human
ccucaugccugcaauccuagcacuuugggagg

SEQ ID NO: 113061 - RNA, 32 nt, Human
ccucaugccuguaaucccagcacuuucggagg

SEQ ID NO: 113062 - RNA, 32 nt, Human
ccucaugccuguaaucccagcacuuugggagg

SEQ ID NO: 113063 - RNA, 32 nt, Human
ccucaugccuguaauccuagcaccuugggagg

SEQ ID NO: 113064 - RNA, 32 nt, Human
ccucaugccuguaauuccagcacuuugggagg

SEQ ID NO: 113065 - RNA, 32 nt, Human
ccucaugccuguaucccagcacuuugggaggc

SEQ ID NO: 113066 - RNA, 32 nt, Human
ccucaugccuuuccuucccuuucucuggggau

SEQ ID NO: 113067 - RNA, 32 nt, Human
ccucaugcucagaccucucccaccccaaaccc

SEQ ID NO: 113068 - RNA, 32 nt, Human
ccucaugcucaggaguuggcaguuguagcuuc

SEQ ID NO: 113069 - RNA, 32 nt, Human
ccucaugcuguggagaaagucagacucaacug

SEQ ID NO: 113070 - RNA, 32 nt, Human
ccucaugcuguuccaccuccccucagacuagc

SEQ ID NO: 113071 - RNA, 32 nt, Human
ccucaugcuguuccaccuccccucagacuauc

SEQ ID NO: 113072 - RNA, 32 nt, Human
ccucaugcuucacuuagccaugguggacccag

SEQ ID NO: 113073 - RNA, 32 nt, Human
ccucauggacucaggauccuccuggagcagca

SEQ ID NO: 113074 - RNA, 32 nt, Human
ccucauggagaaacuugugaggcuguuacaca

SEQ ID NO: 113075 - RNA, 32 nt, Human
ccucauggagguuucaccugcagcuuucaguc

SEQ ID NO: 113076 - RNA, 22 nt, Human
ccucauggauugccacagcuca

SEQ ID NO: 113077 - RNA, 24 nt, Human
ccucauggcgcugcugccaucuuu

SEQ ID NO: 113078 - RNA, 32 nt, Human
ccucaugggcaucgggcggcgccccuucaacc

SEQ ID NO: 113079 - RNA, 32 nt, Human
ccucauguaauccacccaccucagccucccaa

SEQ ID NO: 113080 - RNA, 32 nt, Human
ccucauguacauugcugaccugggccccggca

SEQ ID NO: 113081 - RNA, 32 nt, Human
ccucaugucuucaugacgucaucacugcccca

SEQ ID NO: 113082 - RNA, 32 nt, Human
ccucaugugaacugaaagaaguugcucgcuuc

SEQ ID NO: 113083 - RNA, 22 nt, Human
ccucaugugaaggaggcagggg

SEQ ID NO: 113084 - RNA, 32 nt, Human
ccucaugugcccgaucggacagugccauccau

SEQ ID NO: 113085 - RNA, 32 nt, Human
ccucaugugucacaugugaaccugacggacau

SEQ ID NO: 113086 - RNA, 32 nt, Human
ccucauguucagucuucaggauaucacaccac

SEQ ID NO: 113087 - RNA, 32 nt, Human
ccucauguuccauggggcugugcagugcaaug

SEQ ID NO: 113088 - RNA, 32 nt, Human
ccucauguuccuccugcucugccucaagcacc

SEQ ID NO: 113089 - RNA, 32 nt, Human
ccucauguucucuucccaggccuuuggagggg

SEQ ID NO: 113090 - RNA, 21 nt, Human
ccucauguucuggaacugugc

SEQ ID NO: 113091 - RNA, 32 nt, Human
ccucauuaauguccaagucacagggagccuca

SEQ ID NO: 113092 - RNA, 32 nt, Human
ccucauucaccgguugaugccucccagaaaaa

SEQ ID NO: 113093 - RNA, 32 nt, Human
ccucauucagcagccuaggcauggugcuuuuu

SEQ ID NO: 113094 - RNA, 32 nt, Human
ccucauucaguauuucuaucaagaaagagaug

SEQ ID NO: 113095 - RNA, 22 nt, Human
ccucauucauccauuuuucuua

SEQ ID NO: 113096 - RNA, 32 nt, Human
ccucauuccaccacuuacuagucucaguaccc

SEQ ID NO: 113097 - RNA, 32 nt, Human
ccucauucccagccuggcuguccacagaagcc

SEQ ID NO: 113098 - RNA, 32 nt, Human
ccucauucccugacucuuagccccagacucuu

SEQ ID NO: 113099 - RNA, 32 nt, Human
ccucauucccuuccaucucccuccccucugcc

SEQ ID NO: 113100 - RNA, 32 nt, Human
ccucauuccuacucugaauugucacacuuuuc

SEQ ID NO: 113101 - RNA, 20 nt, Human
ccucauuccugccgcugccg

SEQ ID NO: 113102 - RNA, 22 nt, Human
ccucauucuagccauuuuucca

SEQ ID NO: 113103 - RNA, 32 nt, Human
ccucauucuaggccuccuuaaagagaaggauc

SEQ ID NO: 113104 - RNA, 32 nt, Human
ccucauucucauugaaaaggaguuggcagaac

SEQ ID NO: 113105 - RNA, 32 nt, Human
ccucauucuccaagcucaucaacaggucucag

SEQ ID NO: 113106 - RNA, 32 nt, Human
ccucauucucuuuaccaguauccuggcaaugg

SEQ ID NO: 113107 - RNA, 32 nt, Human
ccucauucugcaggacagggccagcugucucc

SEQ ID NO: 113108 - RNA, 32 nt, Human
ccucauucugguaaaccagcagccuccagcau

SEQ ID NO: 113109 - RNA, 32 nt, Human
ccucauucugucucuguucccugcuuuggcca

SEQ ID NO: 113110 - RNA, 32 nt, Human
ccucauucuucuacauccuccccauuucugua

SEQ ID NO: 113111 - RNA, 32 nt, Human
ccucauugagcagcuggaggucuggacuccgg

SEQ ID NO: 113112 - RNA, 32 nt, Human
ccucauugagccacugggaagcuaugguugag

SEQ ID NO: 113113 - RNA, 32 nt, Human
ccucauugcagccucagacuccuggguucaag

SEQ ID NO: 113114 - RNA, 32 nt, Human
ccucauugcuaccacagacuugcacugaagcc

SEQ ID NO: 113115 - RNA, 32 nt, Human
ccucauuggcggcgccuggugcaagaaguugc

SEQ ID NO: 113116 - RNA, 32 nt, Human
ccucauuggucuugagcacuugcucccuggcu

SEQ ID NO: 113117 - RNA, 32 nt, Human
ccucauugugaaaugcaugccauacgaaauuu

SEQ ID NO: 113118 - RNA, 32 nt, Human
ccucauuguuucccccacgucucccucuauac

SEQ ID NO: 113119 - RNA, 32 nt, Human
ccucauuuauguuuguaguuggaaagcaaagc

SEQ ID NO: 113120 - RNA, 32 nt, Human
ccucauuucauccucacagccaccucaggaaa

SEQ ID NO: 113121 - RNA, 22 nt, Human
ccucauuucucagcuucugcau

SEQ ID NO: 113122 - RNA, 32 nt, Human
ccucauuucucagcuucugcauuuccuucccu

SEQ ID NO: 113123 - RNA, 32 nt, Human
ccucauuucucuuccuccucaccuccaccacc

SEQ ID NO: 113124 - RNA, 32 nt, Human
ccucauuugacaaaucagagcuguaauucacu

SEQ ID NO: 113125 - RNA, 32 nt, Human
ccucauuugauccccauuuacucacaccaugc

SEQ ID NO: 113126 - RNA, 32 nt, Human
ccucauuuuccagaugcaccagcuccuauuaa

SEQ ID NO: 113127 - RNA, 32 nt, Human
ccucauuuucuuucuguuccuucccgcucucg

SEQ ID NO: 113128 - RNA, 32 nt, Human
ccuccaaaacacaagggaggauuuuggguggc

SEQ ID NO: 113129 - RNA, 22 nt, Human
ccuccaaaagacccauccuggg

SEQ ID NO: 113130 - RNA, 32 nt, Human
ccuccaaaagugcugggauuacaggcaugagc

SEQ ID NO: 113131 - RNA, 32 nt, Human
ccuccaaaagugcugggauuacaggugucagc

SEQ ID NO: 113132 - RNA, 32 nt, Human
ccuccaaaagugcugggauuacuagcacgaau

SEQ ID NO: 113133 - RNA, 32 nt, Human
ccuccaaaaugcugggauuacaggcguaagcc

SEQ ID NO: 113134 - RNA, 32 nt, Human
ccuccaaaccaaauacagcaccuacugugaag

SEQ ID NO: 113135 - RNA, 32 nt, Human
ccuccaaaccauccagcagcaccaacaggcug

SEQ ID NO: 113136 - RNA, 32 nt, Human
ccuccaaaccuccagccucccugucuccagcu

SEQ ID NO: 113137 - RNA, 24 nt, Human
ccuccaaacucaagccuggguggg

SEQ ID NO: 113138 - RNA, 32 nt, Human
ccuccaaacuggaaggcuucaaaggugagggg

SEQ ID NO: 113139 - RNA, 32 nt, Human
ccuccaaagaagagcaugggagaggugggagg

SEQ ID NO: 113140 - RNA, 32 nt, Human
ccuccaaagcagccuagaagcugaggggcugu

SEQ ID NO: 113141 - RNA, 22 nt, Human
ccuccaaagcccauccuugggg

SEQ ID NO: 113142 - RNA, 32 nt, Human
ccuccaaaguacuaggguuacaggcaugagcc

SEQ ID NO: 113143 - RNA, 32 nt, Human
ccuccaaaguagcugggauuacaggcacccac

SEQ ID NO: 113144 - RNA, 32 nt, Human
ccuccaaaguagcugggauuacaggcaugcgc

SEQ ID NO: 113145 - RNA, 32 nt, Human
ccuccaaaguagcugggauuacagguuugcac

SEQ ID NO: 113146 - RNA, 32 nt, Human
ccuccaaaguagcugggauugcaggugccugc

SEQ ID NO: 113147 - RNA, 32 nt, Human
ccuccaaagugcugggauuacaggcaugagcc

SEQ ID NO: 113148 - RNA, 32 nt, Human
ccuccaaagugcugggauuacaggcccgagcc

SEQ ID NO: 113149 - RNA, 32 nt, Human
ccuccaaagugcugggauuacaggugugagcu

SEQ ID NO: 113150 - RNA, 32 nt, Human
ccuccaaagugcugggauugcaggcaugagcc

SEQ ID NO: 113151 - RNA, 32 nt, Human
ccuccaaagugcugugauuacaggugugagcc

SEQ ID NO: 113152 - RNA, 32 nt, Human
ccuccaaaguguugggauuacaggcaaugagc

SEQ ID NO: 113153 - RNA, 32 nt, Human
ccuccaaauguccuuucucagaggggccagcu

SEQ ID NO: 113154 - RNA, 32 nt, Human
ccuccaacaccaagcacagcagccuggggcug

SEQ ID NO: 113155 - RNA, 24 nt, Human
ccuccaacccagagccccagugag

SEQ ID NO: 113156 - RNA, 32 nt, Human
ccuccaacccucaaucagagcuacuuacagcc

SEQ ID NO: 113157 - RNA, 32 nt, Human
ccuccaacucccagguucaagugagucucgug

SEQ ID NO: 113158 - RNA, 32 nt, Human
ccuccaacucugagccuuccagagcuucagcc

SEQ ID NO: 113159 - RNA, 32 nt, Human
ccuccaacuggucggccggccugcuggcaugg

SEQ ID NO: 113160 - RNA, 17 nt, Human
ccuccaagaucaucuca

SEQ ID NO: 113161 - RNA, 32 nt, Human
ccuccaagaucuucccuugggcuuuucagcag

SEQ ID NO: 113162 - RNA, 32 nt, Human
ccuccaagccauccccucccaccaccagcucu

SEQ ID NO: 113163 - RNA, 32 nt, Human
ccuccaagcccaggaagccucaguuggccaaa

SEQ ID NO: 113164 - RNA, 32 nt, Human
ccuccaagccuauaccagcuguguacagcgcc

SEQ ID NO: 113165 - RNA, 32 nt, Human
ccuccaagcucagcugggcugaaugaacgcug

SEQ ID NO: 113166 - RNA, 32 nt, Human
ccuccaagcuuuggaccuugacuucugcaaaa

SEQ ID NO: 113167 - RNA, 32 nt, Human
ccuccaagcuuuggguuggagcuguuccauug

SEQ ID NO: 113168 - RNA, 21 nt, Human
ccuccaaggaagucccaggag

SEQ ID NO: 113169 - RNA, 32 nt, Human
ccuccaaggagaagccugaaagagagaaaacu

SEQ ID NO: 113170 - RNA, 32 nt, Human
ccuccaaggcaggcuucccuuuacagaggagg

SEQ ID NO: 113171 - RNA, 32 nt, Human
ccuccaaggccuucugucuaagcccaaaguuc

SEQ ID NO: 113172 - RNA, 32 nt, Human
ccuccaaggcuggagugcagugacgcgaucuc

SEQ ID NO: 113173 - RNA, 32 nt, Human
ccuccaagguagaauuugcaagagugacagug

SEQ ID NO: 113174 - RNA, 22 nt, Human
ccuccaaguggagccccaggag

SEQ ID NO: 113175 - RNA, 32 nt, Human
ccuccaauccggacucuuccucucacaucacc

SEQ ID NO: 113176 - RNA, 32 nt, Human
ccuccaauccugcuggcuucagccuggagaag

SEQ ID NO: 113177 - RNA, 32 nt, Human
ccuccaauccuugagaaccccaccccagagcc

SEQ ID NO: 113178 - RNA, 20 nt, Human
ccuccaaucuaucauucccu

SEQ ID NO: 113179 - RNA, 32 nt, Human
ccuccaaucugcacuuugauuugcuuccuaac

SEQ ID NO: 113180 - RNA, 32 nt, Human
ccuccaaugaggcagagguugcagugagcuga

SEQ ID NO: 113181 - RNA, 32 nt, Human
ccuccaaugggacucaaggacuugaccuccag

SEQ ID NO: 113182 - RNA, 21 nt, Human
ccuccaaugucuaauuuucuu

SEQ ID NO: 113183 - RNA, 32 nt, Human
ccuccaauuuccuuuggucuuuccaggagauu

SEQ ID NO: 113184 - RNA, 32 nt, Human
ccuccacaagugcugggauuacaggugugagc

SEQ ID NO: 113185 - RNA, 32 nt, Human
ccuccacacagcagacacggaccuauggacua

SEQ ID NO: 113186 - RNA, 31 nt, Human
ccuccacacagcuaaggauacaagcaacaga

SEQ ID NO: 113187 - RNA, 32 nt, Human
ccuccacacaucucccuaagucagaguggcug

SEQ ID NO: 113188 - RNA, 19 nt, Human
ccuccacaccucucugcug

SEQ ID NO: 113189 - RNA, 32 nt, Human
ccuccacaccucucugcugccagcacauucau

SEQ ID NO: 113190 - RNA, 17 nt, Human
ccuccacacucaccuca

SEQ ID NO: 113191 - RNA, 21 nt, Human
ccuccacacuucagcucugca

SEQ ID NO: 113192 - RNA, 32 nt, Human
ccuccacaggcaguggcaggcaccuccuccuc

SEQ ID NO: 113193 - RNA, 32 nt, Human
ccuccacaguccucuacacucuuccaggagca

SEQ ID NO: 113194 - RNA, 28 nt, Human
ccuccacaguuccccguggaacugugca

SEQ ID NO: 113195 - RNA, 22 nt, Human
ccuccacauggaggucccagga

SEQ ID NO: 113196 - RNA, 20 nt, Human
ccuccacauucccuuaagga

SEQ ID NO: 113197 - RNA, 22 nt, Human
ccuccacauucuugccacagca

SEQ ID NO: 113198 - RNA, 20 nt, Human
ccuccacauuuuucagugca

SEQ ID NO: 113199 - RNA, 32 nt, Human
ccuccaccaccacuggccaccaggcuggcgca

SEQ ID NO: 113200 - RNA, 19 nt, Human
ccuccaccacccccucaaa

SEQ ID NO: 113201 - RNA, 32 nt, Human
ccuccaccacccucccccagguugaggcacua

SEQ ID NO: 113202 - RNA, 32 nt, Human
ccuccaccaccugcagcuucucagccaaugcu

SEQ ID NO: 113203 - RNA, 32 nt, Human
ccuccaccagcauuucuccucuggucacaucu

SEQ ID NO: 113204 - RNA, 32 nt, Human
ccuccaccccacccuccaccucaauccccucc

SEQ ID NO: 113205 - RNA, 32 nt, Human
ccuccaccccacgaggacggggguggaaggcc

SEQ ID NO: 113206 - RNA, 32 nt, Human
ccuccacccccauccagcacccuucagcugug

SEQ ID NO: 113207 - RNA, 32 nt, Human
ccuccaccccucucuuuauaggccuaguuaac

SEQ ID NO: 113208 - RNA, 32 nt, Human
ccuccaccccuucagguaauaauccuccugcu

SEQ ID NO: 113209 - RNA, 32 nt, Human
ccuccaccccuuucuuucuuucucucucugau

SEQ ID NO: 113210 - RNA, 19 nt, Human
ccuccacccuuugcugcug

SEQ ID NO: 113211 - RNA, 32 nt, Human
ccuccaccggcccuugcaggggcacagagagc

SEQ ID NO: 113212 - RNA, 21 nt, Human
ccuccaccucaggccccagcc

SEQ ID NO: 113213 - RNA, 32 nt, Human
ccuccaccuccacagcucaagagcaagaugau

SEQ ID NO: 113214 - RNA, 32 nt, Human
ccuccaccuccaccacagccugcccagcuuuc

SEQ ID NO: 113215 - RNA, 32 nt, Human
ccuccaccuccaccgccaccuccaccuccggc

SEQ ID NO: 113216 - RNA, 32 nt, Human
ccuccaccuccaccucccccugccacagaggg

SEQ ID NO: 113217 - RNA, 32 nt, Human
ccuccaccuccaccucucuucccagagacccu

SEQ ID NO: 113218 - RNA, 32 nt, Human
ccuccaccuccagggcacagacagggggagcu

SEQ ID NO: 113219 - RNA, 32 nt, Human
ccuccaccuccaggguucagaguagcugggac

SEQ ID NO: 113220 - RNA, 19 nt, Human
ccuccaccuccccucguca

SEQ ID NO: 113221 - RNA, 32 nt, Human
ccuccaccucccgccagcauucccaugccgga

SEQ ID NO: 113222 - RNA, 32 nt, Human
ccuccaccuccugggucaagccauucugcuuc

SEQ ID NO: 113223 - RNA, 32 nt, Human
ccuccaccuccuggguucaagcgcuucuccag

SEQ ID NO: 113224 - RNA, 24 nt, Human
ccuccaccuccuugcaggcuuguu

SEQ ID NO: 113225 - RNA, 32 nt, Human
ccuccaccucuaccaucuccucuuucuccacc

SEQ ID NO: 113226 - RNA, 32 nt, Human
ccuccaccucuagcccagacacccccauuucu

SEQ ID NO: 113227 - RNA, 20 nt, Human
ccuccaccugcccauaguca

SEQ ID NO: 113228 - RNA, 32 nt, Human
ccuccaccugcgccucccuugucugaacuucc

SEQ ID NO: 113229 - RNA, 32 nt, Human
ccuccaccuuccugguucaagcgauucugccu

SEQ ID NO: 113230 - RNA, 32 nt, Human
ccuccaccuuccugguucaagggauucuccug

SEQ ID NO: 113231 - RNA, 32 nt, Human
ccuccaccuuuagcccugcucuggcuucugca

SEQ ID NO: 113232 - RNA, 32 nt, Human
ccuccaccuuugcccaauuucagauauuugag

SEQ ID NO: 113233 - RNA, 32 nt, Human
ccuccacgaagcccuccucaggcacaucgagg

SEQ ID NO: 113234 - RNA, 32 nt, Human
ccuccacgccuccaaucccccaccuccacccc

SEQ ID NO: 113235 - RNA, 32 nt, Human
ccuccacgcuaucccucugcagccugggcccu

SEQ ID NO: 113236 - RNA, 32 nt, Human
ccuccacgcugaggccuuugcuggacagguga

SEQ ID NO: 113237 - RNA, 32 nt, Human
ccuccacgcuuacagccacacacacagucaca

SEQ ID NO: 113238 - RNA, 31 nt, Human
ccuccacgcuugcugaauaccaagcugcagg

SEQ ID NO: 113239 - RNA, 32 nt, Human
ccuccacggccuggaccucggcugcaguaaag

SEQ ID NO: 113240 - RNA, 32 nt, Human
ccuccacguccggcuaauuuuguauuuuuagu

SEQ ID NO: 113241 - RNA, 19 nt, Human
ccuccacuacuccaccuca

SEQ ID NO: 113242 - RNA, 32 nt, Human
ccuccacuauaauguugagcagaacagugagg

SEQ ID NO: 113243 - RNA, 19 nt, Human
ccuccacuaugugggucuu

SEQ ID NO: 113244 - RNA, 32 nt, Human
ccuccacucacugcaggaaucccuucuacaau

SEQ ID NO: 113245 - RNA, 22 nt, Human
ccuccacucagcucccagcugc

SEQ ID NO: 113246 - RNA, 32 nt, Human
ccuccacucaggcuggggcucccugaggaugg

SEQ ID NO: 113247 - RNA, 32 nt, Human
ccuccacuccacccucuucugggauggcuggc

SEQ ID NO: 113248 - RNA, 32 nt, Human
ccuccacucccagugccccacaagggcguacg

SEQ ID NO: 113249 - RNA, 32 nt, Human
ccuccacuccccucugacccucaggcuuuccc

SEQ ID NO: 113250 - RNA, 32 nt, Human
ccuccacucccucccucccuuccuuccugcug

SEQ ID NO: 113251 - RNA, 32 nt, Human
ccuccacuccugccagcucauuuccuucaauu

SEQ ID NO: 113252 - RNA, 21 nt, Human
ccuccacucggcagccugcuc

SEQ ID NO: 113253 - RNA, 32 nt, Human
ccuccacucuauagcccagcugcugcuggagu

SEQ ID NO: 113254 - RNA, 32 nt, Human
ccuccacucuccucuuccagggcccccaaccc

SEQ ID NO: 113255 - RNA, 32 nt, Human
ccuccacucugggaacagcucacacccccaaa

SEQ ID NO: 113256 - RNA, 22 nt, Human
ccuccacucugguaaagcugca

SEQ ID NO: 113257 - RNA, 32 nt, Human
ccuccacugcaacaucuucuccuacgacuacu

SEQ ID NO: 113258 - RNA, 32 nt, Human
ccuccacugcacugcaacccugcuuucaaacc

SEQ ID NO: 113259 - RNA, 32 nt, Human
ccuccacugccucucgcccuguaucugucaac

SEQ ID NO: 113260 - RNA, 32 nt, Human
ccuccacugccugcaccacccaccuccagagu

SEQ ID NO: 113261 - RNA, 32 nt, Human
ccuccacugccuggcucagcgggccggagcug

SEQ ID NO: 113262 - RNA, 22 nt, Human
ccuccacuuauuuaggccucau

SEQ ID NO: 113263 - RNA, 32 nt, Human
ccuccacuucccaacccagaacuuggaaagac

SEQ ID NO: 113264 - RNA, 32 nt, Human
ccuccacuucccgcucagguuacagaccccag

SEQ ID NO: 113265 - RNA, 32 nt, Human
ccuccacuuccuccugccaccugcugcugcug

SEQ ID NO: 113266 - RNA, 23 nt, Human
ccuccacuuccugcccucuguuc

SEQ ID NO: 113267 - RNA, 32 nt, Human
ccuccacuucuucagcaccacacacacgcaca

SEQ ID NO: 113268 - RNA, 32 nt, Human
ccuccacuugcuuccuccuccuucccuccgcu

SEQ ID NO: 113269 - RNA, 21 nt, Human
ccuccacuuggcgggccccgu

SEQ ID NO: 113270 - RNA, 23 nt, Human
ccuccacuugugucagcuugcau

SEQ ID NO: 113271 - RNA, 21 nt, Human
ccuccagaaaaacggaucaca

SEQ ID NO: 113272 - RNA, 21 nt, Human
ccuccagaaaggacugggcau

SEQ ID NO: 113273 - RNA, 21 nt, Human
ccuccagaaaggagagacgca

SEQ ID NO: 113274 - RNA, 21 nt, Human
ccuccagaaggccccagagag

SEQ ID NO: 113275 - RNA, 32 nt, Human
ccuccagaauagcugggauuacaggcguacac

SEQ ID NO: 113276 - RNA, 32 nt, Human
ccuccagacagagucccuucucacuuauagag

SEQ ID NO: 113277 - RNA, 32 nt, Human
ccuccagaccacaggacugcagccuggggcuu

SEQ ID NO: 113278 - RNA, 32 nt, Human
ccuccagaccauucaggacacagggaaaucag

SEQ ID NO: 113279 - RNA, 32 nt, Human
ccuccagacccccuccccuccugugucccuug

SEQ ID NO: 113280 - RNA, 32 nt, Human
ccuccagaccuuccucugacccuugcugaacu

SEQ ID NO: 113281 - RNA, 32 nt, Human
ccuccagacguagccauuuccugacaucaaga

SEQ ID NO: 113282 - RNA, 32 nt, Human
ccuccagacucagcagagugaggggguaaagc

SEQ ID NO: 113283 - RNA, 32 nt, Human
ccuccagacucuaacuuuauagaucaucucuu

SEQ ID NO: 113284 - RNA, 23 nt, Human
ccuccagacugccacccucaaag

SEQ ID NO: 113285 - RNA, 32 nt, Human
ccuccagagaaaaagcccagcggaagaggacu

SEQ ID NO: 113286 - RNA, 21 nt, Human
ccuccagagaagacuggcaca

SEQ ID NO: 113287 - RNA, 32 nt, Human
ccuccagagacacaccguuccacuuacaguau

SEQ ID NO: 113288 - RNA, 32 nt, Human
ccuccagagaccaccccacccccacauuccuu

SEQ ID NO: 113289 - RNA, 23 nt, Human
ccuccagagauggccccagggag

SEQ ID NO: 113290 - RNA, 32 nt, Human
ccuccagagauuaaacauggugcaauggcacc

SEQ ID NO: 113291 - RNA, 20 nt, Human
ccuccagagcaacacuggcc

SEQ ID NO: 113292 - RNA, 32 nt, Human
ccuccagagcagcugggauuacagcagcuuca

SEQ ID NO: 113293 - RNA, 32 nt, Human
ccuccagagcuagugucaacugugucuggguu

SEQ ID NO: 113294 - RNA, 32 nt, Human
ccuccagaguaacagggauuacaggcauacuc

SEQ ID NO: 113295 - RNA, 32 nt, Human
ccuccagaguagcuaggacuacaggcagugug

SEQ ID NO: 113296 - RNA, 32 nt, Human
ccuccagaguagcucagauuacaguguuuucu

SEQ ID NO: 113297 - RNA, 23 nt, Human
ccuccagaguagcuggaaauaca

SEQ ID NO: 113298 - RNA, 32 nt, Human
ccuccagaguagcuggaaauacagugccaccc

SEQ ID NO: 113299 - RNA, 32 nt, Human
ccuccagaguagcuggaacuacaggugcccgc

SEQ ID NO: 113300 - RNA, 32 nt, Human
ccuccagaguagcuggaauuacaggcacauga

SEQ ID NO: 113301 - RNA, 32 nt, Human
ccuccagaguagcugggaccgcaggcacuugc

SEQ ID NO: 113302 - RNA, 32 nt, Human
ccuccagaguagcugggacuacaggcacacac

SEQ ID NO: 113303 - RNA, 32 nt, Human
ccuccagaguagcugggacuacaggcacccgc

SEQ ID NO: 113304 - RNA, 32 nt, Human
ccuccagaguagcugggacuacaggcauguga

SEQ ID NO: 113305 - RNA, 32 nt, Human
ccuccagaguagcugggacuacaggugcccac

SEQ ID NO: 113306 - RNA, 32 nt, Human
ccuccagaguagcugggacuacaggugcccgc

SEQ ID NO: 113307 - RNA, 32 nt, Human
ccuccagaguagcugggacugcgggcgcccca

SEQ ID NO: 113308 - RNA, 32 nt, Human
ccuccagaguagcugggauuacaggcaccuac

SEQ ID NO: 113309 - RNA, 32 nt, Human
ccuccagaguagcugggauuacaggcaccuga

SEQ ID NO: 113310 - RNA, 32 nt, Human
ccuccagaguagcugggauuacaggcacgcac

SEQ ID NO: 113311 - RNA, 32 nt, Human
ccuccagaguagcugggauuacaggcacgugc

SEQ ID NO: 113312 - RNA, 32 nt, Human
ccuccagaguagcugggauuacaggcaugcgc

SEQ ID NO: 113313 - RNA, 32 nt, Human
ccuccagaguagcugggauuacaggcgcccgc

SEQ ID NO: 113314 - RNA, 32 nt, Human
ccuccagaguagcugggauuuuaggugugcac

SEQ ID NO: 113315 - RNA, 32 nt, Human
ccuccagaguaucugggauuacauaugucggc

SEQ ID NO: 113316 - RNA, 32 nt, Human
ccuccagaugcagaggcuggggagucucucaa

SEQ ID NO: 113317 - RNA, 21 nt, Human
ccuccagaugcuguuaccuca

SEQ ID NO: 113318 - RNA, 26 nt, Human
ccuccagaugugccugcagccuaguc

SEQ ID NO: 113319 - RNA, 23 nt, Human
ccuccagauuccggcuucuacau

SEQ ID NO: 113320 - RNA, 32 nt, Human
ccuccagauucugcugcuuuccaguucucugu

SEQ ID NO: 113321 - RNA, 32 nt, Human
ccuccagcaaguguucccagcaaccagcucca

SEQ ID NO: 113322 - RNA, 21 nt, Human
ccuccagcacaaucccagcga

SEQ ID NO: 113323 - RNA, 32 nt, Human
ccuccagcacacacacauaagcacugaaauca

SEQ ID NO: 113324 - RNA, 32 nt, Human
ccuccagcacagagacgugccaggcgguguug

SEQ ID NO: 113325 - RNA, 31 nt, Human
ccuccagcacguguaccaaagcauguggaag

SEQ ID NO: 113326 - RNA, 32 nt, Human
ccuccagcagaaggcucuggcccagugguccu

SEQ ID NO: 113327 - RNA, 19 nt, Human
ccuccagcagcaaacagca

SEQ ID NO: 113328 - RNA, 19 nt, Human
ccuccagcagccaugcaug

SEQ ID NO: 113329 - RNA, 32 nt, Human
ccuccagcagccgccccgauaugccccggcac

SEQ ID NO: 113330 - RNA, 32 nt, Human
ccuccagcaggaggacagagugcccuggggca

SEQ ID NO: 113331 - RNA, 32 nt, Human
ccuccagcagggaaaaugcagcagggaugccc

SEQ ID NO: 113332 - RNA, 17 nt, Human
ccuccagcagggggcgc

SEQ ID NO: 113333 - RNA, 32 nt, Human
ccuccagcauuaacaucaacacagaccuuaag

SEQ ID NO: 113334 - RNA, 32 nt, Human
ccuccagccacaaguucccuguccuuaucagc

SEQ ID NO: 113335 - RNA, 32 nt, Human
ccuccagccacagcaguccacagcagcagggu

SEQ ID NO: 113336 - RNA, 32 nt, Human
ccuccagccacaguccagcccaaccacugcca

SEQ ID NO: 113337 - RNA, 32 nt, Human
ccuccagccagccuucugccggccccgccgcg

SEQ ID NO: 113338 - RNA, 32 nt, Human
ccuccagcccacaaggacuccagccugcuggc

SEQ ID NO: 113339 - RNA, 32 nt, Human
ccuccagccccagggcccugaccugcgcaccu

SEQ ID NO: 113340 - RNA, 32 nt, Human
ccuccagccccugcccguuucucuccaugagu

SEQ ID NO: 113341 - RNA, 32 nt, Human
ccuccagcccuggcaggcccucagccagcuuc

SEQ ID NO: 113342 - RNA, 21 nt, Human
ccuccagccucccacuuggua

SEQ ID NO: 113343 - RNA, 19 nt, Human
ccuccagccucccugcuuc

SEQ ID NO: 113344 - RNA, 17 nt, Human
ccuccagccugaacaga

SEQ ID NO: 113345 - RNA, 20 nt, Human
ccuccagccuggacaacaga

SEQ ID NO: 113346 - RNA, 21 nt, Human
ccuccagccugggcaauagag

SEQ ID NO: 113347 - RNA, 21 nt, Human
ccuccagccugggcgacagag

SEQ ID NO: 113348 - RNA, 22 nt, Human
ccuccagccugggcgacagagu

SEQ ID NO: 113349 - RNA, 32 nt, Human
ccuccagccuggggagacagagcgagauucug

SEQ ID NO: 113350 - RNA, 26 nt, Human
ccuccagccugggugacagagugaga

SEQ ID NO: 113351 - RNA, 32 nt, Human
ccuccagcuaugcagggauucucauuaaagag

SEQ ID NO: 113352 - RNA, 20 nt, Human
ccuccagcucacuggagaca

SEQ ID NO: 113353 - RNA, 32 nt, Human
ccuccagcucauggugucuggggccugcggcu

SEQ ID NO: 113354 - RNA, 21 nt, Human
ccuccagcucccccugggacc

SEQ ID NO: 113355 - RNA, 32 nt, Human
ccuccagcuccgccaaguaggugggauccacu

SEQ ID NO: 113356 - RNA, 23 nt, Human
ccuccagcuccuccgcucugccc

SEQ ID NO: 113357 - RNA, 32 nt, Human
ccuccagcucuauccauguugcugcaaaugac

SEQ ID NO: 113358 - RNA, 21 nt, Human
ccuccagcucucucuggggcc

SEQ ID NO: 113359 - RNA, 32 nt, Human
ccuccagcucugcagcaguugucuccuaaugu

SEQ ID NO: 113360 - RNA, 32 nt, Human
ccuccagcucuucuuuuaggggagaaacugcc

SEQ ID NO: 113361 - RNA, 26 nt, Human
ccuccagcucuuucuggaccugagcc

SEQ ID NO: 113362 - RNA, 32 nt, Human
ccuccagcugacugggacucaggcugcgugcc

SEQ ID NO: 113363 - RNA, 31 nt, Human
ccuccagcugagagagggaaccagccugccu

SEQ ID NO: 113364 - RNA, 32 nt, Human
ccuccagcugccgcaauuuccaugccaggaua

SEQ ID NO: 113365 - RNA, 32 nt, Human
ccuccagcuggcuggggccaccgugcggggug

SEQ ID NO: 113366 - RNA, 32 nt, Human
ccuccagcuggggagagaggggacucuccgga

SEQ ID NO: 113367 - RNA, 32 nt, Human
ccuccagcuuccagacuuuucuguccugucuc

SEQ ID NO: 113368 - RNA, 19 nt, Human
ccuccagcuucuccucuca

SEQ ID NO: 113369 - RNA, 32 nt, Human
ccuccagcuucugcuugaauuccuucaaggau

SEQ ID NO: 113370 - RNA, 32 nt, Human
ccuccagcuuuccuguauuucuucccaagagc

SEQ ID NO: 113371 - RNA, 20 nt, Human
ccuccaggaaauugccagug

SEQ ID NO: 113372 - RNA, 22 nt, Human
ccuccaggaaccuccacaucuc

SEQ ID NO: 113373 - RNA, 18 nt, Human
ccuccaggaacuccacuc

SEQ ID NO: 113374 - RNA, 32 nt, Human
ccuccaggaagaugcugacauccaggugggag

SEQ ID NO: 113375 - RNA, 32 nt, Human
ccuccaggaaggacuccucucccuguggcucc

SEQ ID NO: 113376 - RNA, 32 nt, Human
ccuccaggaaggaguugaccuggagaagcugg

SEQ ID NO: 113377 - RNA, 22 nt, Human
ccuccaggaaggucacaaagug

SEQ ID NO: 113378 - RNA, 32 nt, Human
ccuccaggaccagccaugguguggaggucuca

SEQ ID NO: 113379 - RNA, 21 nt, Human
ccuccaggaccccagcaagug

SEQ ID NO: 113380 - RNA, 21 nt, Human
ccuccaggaccgcugcgggug

SEQ ID NO: 113381 - RNA, 21 nt, Human
ccuccaggaccugcccgugug

SEQ ID NO: 113382 - RNA, 32 nt, Human
ccuccaggacucugagccuucugccucguaug

SEQ ID NO: 113383 - RNA, 20 nt, Human
ccuccaggacugccacagag

SEQ ID NO: 113384 - RNA, 32 nt, Human
ccuccaggacuguccugcugugccucugaagc

SEQ ID NO: 113385 - RNA, 18 nt, Human
ccuccaggagagggggca

SEQ ID NO: 113386 - RNA, 20 nt, Human
ccuccaggagcacucgcuca

SEQ ID NO: 113387 - RNA, 32 nt, Human
ccuccaggagcggggcccugcacaccauggcc

SEQ ID NO: 113388 - RNA, 20 nt, Human
ccuccaggaggcacggaaug

SEQ ID NO: 113389 - RNA, 32 nt, Human
ccuccaggagucucuggugcagcuggggugga

SEQ ID NO: 113390 - RNA, 20 nt, Human
ccuccaggaugcacagagug

SEQ ID NO: 113391 - RNA, 32 nt, Human
ccuccaggcacacacccgcuucuggacgucgg

SEQ ID NO: 113392 - RNA, 32 nt, Human
ccuccaggcagccacagccuggaaaagcacuc

SEQ ID NO: 113393 - RNA, 24 nt, Human
ccuccaggcagccucuggggcccg

SEQ ID NO: 113394 - RNA, 18 nt, Human
ccuccaggcaucaucuca

SEQ ID NO: 113395 - RNA, 32 nt, Human
ccuccaggccaggggagcaggagaugcucagc

SEQ ID NO: 113396 - RNA, 29 nt, Human
ccuccaggccuacacaggcugcccuggca

SEQ ID NO: 113397 - RNA, 22 nt, Human
ccuccaggccucucccaccuca

SEQ ID NO: 113398 - RNA, 32 nt, Human
ccuccaggcugacuuggggacaguggcuaugg

SEQ ID NO: 113399 - RNA, 32 nt, Human
ccuccagggaaagagcugggaggcaggaaugg

SEQ ID NO: 113400 - RNA, 32 nt, Human
ccuccagggaccccaccacacccucccagcug

SEQ ID NO: 113401 - RNA, 32 nt, Human
ccuccagggcccgggcuaagggcacagaacua

SEQ ID NO: 113402 - RNA, 32 nt, Human
ccuccagggcuccacuccccuuccuuuucuug

SEQ ID NO: 113403 - RNA, 32 nt, Human
ccuccagggcucgguauucuuccuucgggaag

SEQ ID NO: 113404 - RNA, 32 nt, Human
ccuccagggcugggccugcucugccugccacu

SEQ ID NO: 113405 - RNA, 32 nt, Human
ccuccagggcugggcgcaguggcucacuccug

SEQ ID NO: 113406 - RNA, 32 nt, Human
ccuccagggcuggggcuggcgccuccuccagc

SEQ ID NO: 113407 - RNA, 32 nt, Human
ccuccaggggcaccuccagccaggcuccaggg

SEQ ID NO: 113408 - RNA, 32 nt, Human
ccuccagggggagcugggguugcagggcaaca

SEQ ID NO: 113409 - RNA, 26 nt, Human
ccuccaggguagagaugcaccgaaug

SEQ ID NO: 113410 - RNA, 19 nt, Human
ccuccagguccacggagug

SEQ ID NO: 113411 - RNA, 21 nt, Human
ccuccaggugcacaagcucca

SEQ ID NO: 113412 - RNA, 32 nt, Human
ccuccaggugcacucccugccugccuccugca

SEQ ID NO: 113413 - RNA, 32 nt, Human
ccuccagguggaggcgggcugaugcugggugu

SEQ ID NO: 113414 - RNA, 32 nt, Human
ccuccaguagagacagaggggcaguguuugca

SEQ ID NO: 113415 - RNA, 32 nt, Human
ccuccagucaagucuucagauaauugcaacuu

SEQ ID NO: 113416 - RNA, 32 nt, Human
ccuccaguccaggccaaaucucagccugcccu

SEQ ID NO: 113417 - RNA, 22 nt, Human
ccuccagucccagcuacuaaga

SEQ ID NO: 113418 - RNA, 32 nt, Human
ccuccaguccccauggauuggaaauguucccc

SEQ ID NO: 113419 - RNA, 32 nt, Human
ccuccaguccugucucaucuccugggagaggc

SEQ ID NO: 113420 - RNA, 32 nt, Human
ccuccagucuccccuucagaaacaucucugcu

SEQ ID NO: 113421 - RNA, 32 nt, Human
ccuccagucuuucucuugcagcauccugacca

SEQ ID NO: 113422 - RNA, 32 nt, Human
ccuccaguuaucuagccaggaggucccaagag

SEQ ID NO: 113423 - RNA, 32 nt, Human
ccuccaguuccuccucuucgucccucagcguc

SEQ ID NO: 113424 - RNA, 32 nt, Human
ccuccaguuccuuggcaguucucccccaaacc

SEQ ID NO: 113425 - RNA, 32 nt, Human
ccuccauaagcuccuacucugcugcaguugag

SEQ ID NO: 113426 - RNA, 32 nt, Human
ccuccauaccuguucuugcccaugcagggcua

SEQ ID NO: 113427 - RNA, 32 nt, Human
ccuccauaggacacaggaggcaaguaugcggc

SEQ ID NO: 113428 - RNA, 32 nt, Human
ccuccaucagggguagcgagguugcaggagcu

SEQ ID NO: 113429 - RNA, 31 nt, Human
ccuccaucauuucagauuaccaaagcugucu

SEQ ID NO: 113430 - RNA, 20 nt, Human
ccuccaucccagcccacugg

SEQ ID NO: 113431 - RNA, 22 nt, Human
ccuccaucccauccccauggug

SEQ ID NO: 113432 - RNA, 16 nt, Human
ccuccauccccuccca

SEQ ID NO: 113433 - RNA, 32 nt, Human
ccuccaucccugucccccaucuuggugcugaa

SEQ ID NO: 113434 - RNA, 32 nt, Human
ccuccauccugcuggacuucaagccuugggac

SEQ ID NO: 113435 - RNA, 32 nt, Human
ccuccauccugcuuaccaccucccuggguacu

SEQ ID NO: 113436 - RNA, 32 nt, Human
ccuccaucguuuucucuuuucuccucuugauc

SEQ ID NO: 113437 - RNA, 32 nt, Human
ccuccaucuccccucauucacgcccccucagc

SEQ ID NO: 113438 - RNA, 32 nt, Human
ccuccaucuccggcuccugggcuugggaggcc

SEQ ID NO: 113439 - RNA, 25 nt, Human
ccuccaucuccucguccagcugguc

SEQ ID NO: 113440 - RNA, 19 nt, Human
ccuccaucucucccuuccc

SEQ ID NO: 113441 - RNA, 32 nt, Human
ccuccaucucugaggguaugggggccagaugg

SEQ ID NO: 113442 - RNA, 32 nt, Human
ccucuacacugcagaagaagcaaaacuccuuu

SEQ ID NO: 113443 - RNA, 32 nt, Human
ccucuacacuuaguuauugauaaacuucuuaa

SEQ ID NO: 113444 - RNA, 19 nt, Human
ccucuacagcauuuucuua

SEQ ID NO: 113445 - RNA, 31 nt, Human
ccucuacaggcccagccucuaccucacagug

SEQ ID NO: 113446 - RNA, 32 nt, Human
ccucuacaggcccagcuccugccuugcagugg

SEQ ID NO: 113447 - RNA, 31 nt, Human
ccucuacaggcccggccucuaccucacagug

SEQ ID NO: 113448 - RNA, 32 nt, Human
ccucuacaguuuggaggugauggugcagcagu

SEQ ID NO: 113449 - RNA, 32 nt, Human
ccucuacaucuucaccaagaucucgggauccu

SEQ ID NO: 113450 - RNA, 32 nt, Human
ccucuaccaagcugagacccccauccccagcu

SEQ ID NO: 113451 - RNA, 32 nt, Human
ccucuaccaccacccuguacccuagccugcac

SEQ ID NO: 113452 - RNA, 32 nt, Human
ccucuaccaccuugaaccuccuucccaaaaca

SEQ ID NO: 113453 - RNA, 32 nt, Human
ccucuaccauuuucuccuuccucccuucccuu

SEQ ID NO: 113454 - RNA, 17 nt, Human
ccucuacccaucuucuu

SEQ ID NO: 113455 - RNA, 32 nt, Human
ccucuacccugagccccuggcaacuacugauu

SEQ ID NO: 113456 - RNA, 32 nt, Human
ccucuaccucacagugggcucuccaggcccac

SEQ ID NO: 113457 - RNA, 32 nt, Human
ccucuaccucacugccaccacuccugcuuuua

SEQ ID NO: 113458 - RNA, 32 nt, Human
ccucuaccuccaccaucaccaucacuacucaa

SEQ ID NO: 113459 - RNA, 32 nt, Human
ccucuaccucccagccaccugccuugccuccc

SEQ ID NO: 113460 - RNA, 32 nt, Human
ccucuaccucccagguucaagugagucucaug

SEQ ID NO: 113461 - RNA, 32 nt, Human
ccucuaccuccuggauucaagcgguuuuccug

SEQ ID NO: 113462 - RNA, 32 nt, Human
ccucuaccugccucucacauggagauugugua

SEQ ID NO: 113463 - RNA, 32 nt, Human
ccucuaccuggauggauggucuuugggcaggg

SEQ ID NO: 113464 - RNA, 32 nt, Human
ccucuaccuugcugugccucucuggcuuuagc

SEQ ID NO: 113465 - RNA, 32 nt, Human
ccucuacgggcagaguccggcauccccucccc

SEQ ID NO: 113466 - RNA, 32 nt, Human
ccucuacgggcccagcuccugccuugcaaugg

SEQ ID NO: 113467 - RNA, 32 nt, Human
ccucuacgucucaugcagaaaaucagcaaauc

SEQ ID NO: 113468 - RNA, 23 nt, Human
ccucuacuauagucaucuuagga

SEQ ID NO: 113469 - RNA, 32 nt, Human
ccucuacucccuggcccuguaggcuguguuau

SEQ ID NO: 113470 - RNA, 32 nt, Human
ccucuacuccuuggccaugauguugcugacca

SEQ ID NO: 113471 - RNA, 20 nt, Human
ccucuacucucauccuagga

SEQ ID NO: 113472 - RNA, 18 nt, Human
ccucuacucuccaccuca

SEQ ID NO: 113473 - RNA, 32 nt, Human
ccucuacugcccaucuccccugcucaacuucu

SEQ ID NO: 113474 - RNA, 32 nt, Human
ccucuacugcccuggcugcagucagugcccag

SEQ ID NO: 113475 - RNA, 32 nt, Human
ccucuacugcucccucccucucuugccucuua

SEQ ID NO: 113476 - RNA, 32 nt, Human
ccucuacuguggguagugaaccuagguggaca

SEQ ID NO: 113477 - RNA, 21 nt, Human
ccucuacuugggaucucagga

SEQ ID NO: 113478 - RNA, 32 nt, Human
ccucuacuuuccugcugaaaugacauugguuu

SEQ ID NO: 113479 - RNA, 32 nt, Human
ccucuacuuuucucccuuuucccuccuguggc

SEQ ID NO: 113480 - RNA, 32 nt, Human
ccucuagaaagcaacugaggccaggugcggug

SEQ ID NO: 113481 - RNA, 32 nt, Human
ccucuagaagccucugcgcugcaaagguuugu

SEQ ID NO: 113482 - RNA, 32 nt, Human
ccucuagaagguuccagagacagugaaacugc

SEQ ID NO: 113483 - RNA, 32 nt, Human
ccucuagaccuccgcucccaguaaacacccuc

SEQ ID NO: 113484 - RNA, 32 nt, Human
ccucuagagcacugucucacuacuucuagaaa

SEQ ID NO: 113485 - RNA, 32 nt, Human
ccucuagaggacagauggccaggccugugcac

SEQ ID NO: 113486 - RNA, 32 nt, Human
ccucuagaguagcugggauuacaggcgcaugc

SEQ ID NO: 113487 - RNA, 32 nt, Human
ccucuagcagcuuccuguagguggcgaucucg

SEQ ID NO: 113488 - RNA, 32 nt, Human
ccucuagccccagcuacucaggcugggguggg

SEQ ID NO: 113489 - RNA, 32 nt, Human
ccucuagcucccaaccccacagccucuccaag

SEQ ID NO: 113490 - RNA, 32 nt, Human
ccucuagcugugggggugagggucccaugugg

SEQ ID NO: 113491 - RNA, 32 nt, Human
ccucuaggaagaaaggagguggaagggaaaug

SEQ ID NO: 113492 - RNA, 32 nt, Human
ccucuaggagacaaaacuacccccacugacaa

SEQ ID NO: 113493 - RNA, 32 nt, Human
ccucuaggagagcuggcucugcagugggggag

SEQ ID NO: 113494 - RNA, 32 nt, Human
ccucuaggagaugagaccuaccuuccaguugu

SEQ ID NO: 113495 - RNA, 18 nt, Human
ccucuaggcagggugcug

SEQ ID NO: 113496 - RNA, 32 nt, Human
ccucuaggcccaggcgcccgccugacacaugu

SEQ ID NO: 113497 - RNA, 23 nt, Human
ccucuagguccaggccccaggag

SEQ ID NO: 113498 - RNA, 32 nt, Human
ccucuagguggcuggggagaugucaggggaaa

SEQ ID NO: 113499 - RNA, 32 nt, Human
ccucuaguccacccucuccaguggucacucuu

SEQ ID NO: 113500 - RNA, 32 nt, Human
ccucuagucccagcuacccgggaggcugaggc

SEQ ID NO: 113501 - RNA, 23 nt, Human
ccucuagucccagcuacuuggga

SEQ ID NO: 113502 - RNA, 32 nt, Human
ccucuagucccagcuacuugggaggcugaagu

SEQ ID NO: 113503 - RNA, 32 nt, Human
ccucuagucccagcuacuugggaggcugaggu

SEQ ID NO: 113504 - RNA, 32 nt, Human
ccucuagucccagcuacuugggaggcuuaguc

SEQ ID NO: 113505 - RNA, 32 nt, Human
ccucuaguccuagcuacucgggaggcugaggc

SEQ ID NO: 113506 - RNA, 32 nt, Human
ccucuagugugggcaagggacaugaagccuga

SEQ ID NO: 113507 - RNA, 32 nt, Human
ccucuaguuccagcuacucgggagucugaggc

SEQ ID NO: 113508 - RNA, 32 nt, Human
ccucuaguugacuuuucucuuagccugaaugu

SEQ ID NO: 113509 - RNA, 32 nt, Human
ccucuauaacccccagagacaggcuggggcag

SEQ ID NO: 113510 - RNA, 32 nt, Human
ccucuauaagauaauucuucuccaucaucuuu

SEQ ID NO: 113511 - RNA, 32 nt, Human
ccucuauacccugguaggcuuccucuucagca

SEQ ID NO: 113512 - RNA, 32 nt, Human
ccucuauaugcuguuaauucaaaggcacucag

SEQ ID NO: 113513 - RNA, 32 nt, Human
ccucuauauguacaaucucucucccccucauu

SEQ ID NO: 113514 - RNA, 20 nt, Human
ccucuaucacaugcuugcca

SEQ ID NO: 113515 - RNA, 23 nt, Human
ccucuaucacaugguucuugaga

SEQ ID NO: 113516 - RNA, 32 nt, Human
ccucuaucacuucaaaacuccagcuugcccaa

SEQ ID NO: 113517 - RNA, 32 nt, Human
ccucuaucagggacagugugggugccacaggu

SEQ ID NO: 113518 - RNA, 32 nt, Human
ccucuauccucauuugucccuuccuccuagcg

SEQ ID NO: 113519 - RNA, 19 nt, Human
ccucuaucucuggcuccug

SEQ ID NO: 113520 - RNA, 32 nt, Human
ccucuaucugcagguccccagccuggguaaag

SEQ ID NO: 113521 - RNA, 21 nt, Human
ccucuaucuucucucuggcca

SEQ ID NO: 113522 - RNA, 32 nt, Human
ccucuaucuucucugcugucacacuggaaggc

SEQ ID NO: 113523 - RNA, 32 nt, Human
ccucuaugcccaccccugacacuucaccauuu

SEQ ID NO: 113524 - RNA, 32 nt, Human
ccucuaugucccacugucucucuccuucucuc

SEQ ID NO: 113525 - RNA, 32 nt, Human
ccucuaugugccaggcucuguguuggguacuu

SEQ ID NO: 113526 - RNA, 32 nt, Human
ccucuauucaccccuucucaauccucacaaaa

SEQ ID NO: 113527 - RNA, 21 nt, Human
ccucuauucuauuggcacuga

SEQ ID NO: 113528 - RNA, 32 nt, Human
ccucuauucucaccucccuugugaucauaaua

SEQ ID NO: 113529 - RNA, 32 nt, Human
ccucuauugacccgagugucucccucugcuuc

SEQ ID NO: 113530 - RNA, 32 nt, Human
ccucuauugcccaggcuggagugcaguggugu

SEQ ID NO: 113531 - RNA, 32 nt, Human
ccucuauuuccaaagccauuuaccucaaagga

SEQ ID NO: 113532 - RNA, 32 nt, Human
ccucuauuugggccuggagcagggaugggauu

SEQ ID NO: 113533 - RNA, 32 nt, Human
ccucucaaacauucuucugucaauuccacaca

SEQ ID NO: 113534 - RNA, 22 nt, Human
ccucucaaacuuccauuucuca

SEQ ID NO: 113535 - RNA, 32 nt, Human
ccucucaaagagcugggauuacaggcaugagu

SEQ ID NO: 113536 - RNA, 32 nt, Human
ccucucaaagugcugggauuacaagcaugagc

SEQ ID NO: 113537 - RNA, 32 nt, Human
ccucucaaagugcugggauuacaggcaugagc

SEQ ID NO: 113538 - RNA, 32 nt, Human
ccucucaaagugcugggauuacaggccugagc

SEQ ID NO: 113539 - RNA, 32 nt, Human
ccucucaaagugcugggauuacaggcgugagc

SEQ ID NO: 113540 - RNA, 32 nt, Human
ccucucaaagugcugggauuacaggcgugagg

SEQ ID NO: 113541 - RNA, 32 nt, Human
ccucucaaagugcugggauuacaggcgugagu

SEQ ID NO: 113542 - RNA, 32 nt, Human
ccucucaaagugcugggauuacaggcgugggc

SEQ ID NO: 113543 - RNA, 32 nt, Human
ccucucaaagugcugggauuacaggcuuacgc

SEQ ID NO: 113544 - RNA, 32 nt, Human
ccucucaaagugcugggauuacaggugugagc

SEQ ID NO: 113545 - RNA, 32 nt, Human
ccucucaaagugcugggauuacaggugugcca

SEQ ID NO: 113546 - RNA, 32 nt, Human
ccucucaaagugcugggauuacgggcaugagc

SEQ ID NO: 113547 - RNA, 32 nt, Human
ccucucaaagugcugggauuacgggcgugagc

SEQ ID NO: 113548 - RNA, 32 nt, Human
ccucucaaagugcugggauuauaggcaugaac

SEQ ID NO: 113549 - RNA, 32 nt, Human
ccucucaaagugcugggauuauaggcgugagc

SEQ ID NO: 113550 - RNA, 32 nt, Human
ccucucaaagugcugggauuauaggcuugagc

SEQ ID NO: 113551 - RNA, 32 nt, Human
ccucucaaaguguugggauuacaggcgugagc

SEQ ID NO: 113552 - RNA, 32 nt, Human
ccucucaaauagcugggacuacaggcagcaaa

SEQ ID NO: 113553 - RNA, 20 nt, Human
ccucucaacccauuuucuua

SEQ ID NO: 113554 - RNA, 32 nt, Human
ccucucaaccuacagacccagugagcccuagg

SEQ ID NO: 113555 - RNA, 32 nt, Human
ccucucaagcggggccacagggccaaggugug

SEQ ID NO: 113556 - RNA, 32 nt, Human
ccucucaaggcagaggaggaguuugguggguu

SEQ ID NO: 113557 - RNA, 32 nt, Human
ccucucaaguaacugggauuacaggcaugcgc

SEQ ID NO: 113558 - RNA, 32 nt, Human
ccucucaaguagcugggacuacaggcaugugc

SEQ ID NO: 113559 - RNA, 32 nt, Human
ccucucaaguagcugggacuacaggcgcccac

SEQ ID NO: 113560 - RNA, 32 nt, Human
ccucucaaguagcugggauuacaagcaccagc

SEQ ID NO: 113561 - RNA, 32 nt, Human
ccucucaaguagcugggauuacaagcaugcgc

SEQ ID NO: 113562 - RNA, 32 nt, Human
ccucucaaguagcugggauuacaggcgcccgc

SEQ ID NO: 113563 - RNA, 32 nt, Human
ccucucaaguagcugggauuacagggcaccug

SEQ ID NO: 113564 - RNA, 32 nt, Human
ccucucaaguagcugggauuacagggcuucag

SEQ ID NO: 113565 - RNA, 32 nt, Human
ccucucaaugucugaacugcucuggcugggca

SEQ ID NO: 113566 - RNA, 21 nt, Human
ccucucacaaauaugcuucuu

SEQ ID NO: 113567 - RNA, 32 nt, Human
ccucucacaccagcugcacucccguggcugcc

SEQ ID NO: 113568 - RNA, 21 nt, Human
ccucucacagauagaggucuu

SEQ ID NO: 113569 - RNA, 32 nt, Human
ccucucacagccucuguaucucugcaggccau

SEQ ID NO: 113570 - RNA, 24 nt, Human
ccucucacaggggcagggccgcuu

SEQ ID NO: 113571 - RNA, 32 nt, Human
ccucucacagucaguccucccacccgagugac

SEQ ID NO: 113572 - RNA, 32 nt, Human
ccucucacaugcagcacccgggccagcucccu

SEQ ID NO: 113573 - RNA, 32 nt, Human
ccucucaccacauugcccuccugggcaccccc

SEQ ID NO: 113574 - RNA, 32 nt, Human
ccucucacccccacccucuccccugccaggcu

SEQ ID NO: 113575 - RNA, 20 nt, Human
ccucucaccccucccuuccc

SEQ ID NO: 113576 - RNA, 32 nt, Human
ccucucacccuccacccuccaggagaccccag

SEQ ID NO: 113577 - RNA, 32 nt, Human
ccucucacgccacccccgcccccaccgggcug

SEQ ID NO: 113578 - RNA, 25 nt, Human
ccucucacgcuccacucugcagcuu

SEQ ID NO: 113579 - RNA, 32 nt, Human
ccucucacuccuucauuguccuaagagaacaa

SEQ ID NO: 113580 - RNA, 32 nt, Human
ccucucacucucaucuccugugcucaguguga

SEQ ID NO: 113581 - RNA, 18 nt, Human
ccucucacucugugugcu

SEQ ID NO: 113582 - RNA, 32 nt, Human
ccucucacugcccaaagaggcuuacuuuucuu

SEQ ID NO: 113583 - RNA, 32 nt, Human
ccucucagaaaaacuugccugguuugagggua

SEQ ID NO: 113584 - RNA, 32 nt, Human
ccucucagaagaggguggaagaugaaaugaaa

SEQ ID NO: 113585 - RNA, 32 nt, Human
ccucucagaccaguacgguggccgacgggagu

SEQ ID NO: 113586 - RNA, 32 nt, Human
ccucucagacuaagcacuaaaaagcaaagcaa

SEQ ID NO: 113587 - RNA, 32 nt, Human
ccucucagagauguucaugcaggcucccuagg

SEQ ID NO: 113588 - RNA, 32 nt, Human
ccucucagaggaggaggagcuggagacaggag

SEQ ID NO: 113589 - RNA, 32 nt, Human
ccucucagaggcagcaugagcugagaggguga

SEQ ID NO: 113590 - RNA, 32 nt, Human
ccucucagagugcugggaucacaggcgugagc

SEQ ID NO: 113591 - RNA, 32 nt, Human
ccucucagagugcugggauuauaggugugcgc

SEQ ID NO: 113592 - RNA, 32 nt, Human
ccucucagaguucuagaauuacaggcaugagc

SEQ ID NO: 113593 - RNA, 32 nt, Human
ccucucagcagaaacacacagucacauucgaa

SEQ ID NO: 113594 - RNA, 27 nt, Human
ccucucagcaggcggaggcucacagcu

SEQ ID NO: 113595 - RNA, 32 nt, Human
ccucucagcccuggcccucugccugcuccuca

SEQ ID NO: 113596 - RNA, 24 nt, Human
ccucucagccugccucugcagcuu

SEQ ID NO: 113597 - RNA, 32 nt, Human
ccucucagccuucucccuccccagggccacuu

SEQ ID NO: 113598 - RNA, 32 nt, Human
ccucucaggagaagacggaagcuggaguugga

SEQ ID NO: 113599 - RNA, 32 nt, Human
ccucucaggagaagccagaggcccuggccaaa

SEQ ID NO: 113600 - RNA, 32 nt, Human
ccucucaggauugcagaacaacacaucuccua

SEQ ID NO: 113601 - RNA, 32 nt, Human
ccucucaggcucgugauccuccugccucaacc

SEQ ID NO: 113602 - RNA, 16 nt, Human
ccucucagggcacugg

SEQ ID NO: 113603 - RNA, 32 nt, Human
ccucucagggccugggaaggguguggccagug

SEQ ID NO: 113604 - RNA, 32 nt, Human
ccucucagguucugccugugaagcagcucaaa

SEQ ID NO: 113605 - RNA, 32 nt, Human
ccucucagucaccaagucaccucccucugaaa

SEQ ID NO: 113606 - RNA, 32 nt, Human
ccucucaguccagccuggaggugugcucugag

SEQ ID NO: 113607 - RNA, 32 nt, Human
ccucucagugcccuccagccccgcgaccaugu

SEQ ID NO: 113608 - RNA, 32 nt, Human
ccucucaguucucucccuuccucucuccuuau

SEQ ID NO: 113609 - RNA, 32 nt, Human
ccucucauacaucaagccccagaggaggcggc

SEQ ID NO: 113610 - RNA, 32 nt, Human
ccucucaucccccuguggaauguugggucuca

SEQ ID NO: 113611 - RNA, 32 nt, Human
ccucucauccccuuauccuucucccucgacau

SEQ ID NO: 113612 - RNA, 32 nt, Human
ccucucaucccuagcuccucugguuuaauguc

SEQ ID NO: 113613 - RNA, 32 nt, Human
ccucucaucccucggcaccucuuguuuuccuu

SEQ ID NO: 113614 - RNA, 19 nt, Human
ccucucaugaucacuggua

SEQ ID NO: 113615 - RNA, 32 nt, Human
ccucucaugggauggacccugccaaccuggcc

SEQ ID NO: 113616 - RNA, 32 nt, Human
ccucucauugccugagguugggcccgaacacg

SEQ ID NO: 113617 - RNA, 32 nt, Human
ccucuccaaacagccaugcccuccaaaugcua

SEQ ID NO: 113618 - RNA, 32 nt, Human
ccucuccaaagaccagcuuuuccccagccagg

SEQ ID NO: 113619 - RNA, 32 nt, Human
ccucuccaacaugacauccuccugcuguguca

SEQ ID NO: 113620 - RNA, 32 nt, Human
ccucuccaagcccugaacuuacuccaguuggc

SEQ ID NO: 113621 - RNA, 32 nt, Human
ccucuccaagugcugggauuacaggcaucagc

SEQ ID NO: 113622 - RNA, 20 nt, Human
ccucuccaaucccacaccau

SEQ ID NO: 113623 - RNA, 32 nt, Human
ccucuccaaugcccagccccagaucuggcgga

SEQ ID NO: 113624 - RNA, 32 nt, Human
ccucuccaaugccucagccacagagucaccuc

SEQ ID NO: 113625 - RNA, 32 nt, Human
ccucuccacacauuccauuuacagaguaugag

SEQ ID NO: 113626 - RNA, 32 nt, Human
ccucuccacagaagcagcuggaagagaacucg

SEQ ID NO: 113627 - RNA, 32 nt, Human
ccucuccacagugugagacuucaaggggaagu

SEQ ID NO: 113628 - RNA, 32 nt, Human
ccucuccaccaccacucacaguagccuugcug

SEQ ID NO: 113629 - RNA, 32 nt, Human
ccucuccaccauccuccagucguugcccucau

SEQ ID NO: 113630 - RNA, 32 nt, Human
ccucuccaccaugggcugcaguauagacagac

SEQ ID NO: 113631 - RNA, 32 nt, Human
ccucuccaccugcuggugagaggugcaaagag

SEQ ID NO: 113632 - RNA, 18 nt, Human
ccucuccacguggccugc

SEQ ID NO: 113633 - RNA, 32 nt, Human
ccucuccacuagcugcccuggucuccaccauu

SEQ ID NO: 113634 - RNA, 32 nt, Human
ccucuccacugcagcagcuuagcaaggacugg

SEQ ID NO: 113635 - RNA, 32 nt, Human
ccucuccacugccuccuccaccccuguauuuc

SEQ ID NO: 113636 - RNA, 32 nt, Human
ccucuccagaagcagagcaugaccugggugac

SEQ ID NO: 113637 - RNA, 32 nt, Human
ccucuccagacccugggcugcggcugaggcgc

SEQ ID NO: 113638 - RNA, 23 nt, Human
ccucuccagacuccaccucccca

SEQ ID NO: 113639 - RNA, 32 nt, Human
ccucuccagacuuccauuucuucacaaggaug

SEQ ID NO: 113640 - RNA, 32 nt, Human
ccucuccagcaacccucagcucaggcuagacu

SEQ ID NO: 113641 - RNA, 20 nt, Human
ccucuccagcacacagcaca

SEQ ID NO: 113642 - RNA, 32 nt, Human
ccucuccagcacuccgugguucucucagcccc

SEQ ID NO: 113643 - RNA, 32 nt, Human
ccucuccagcacuucucucuucaagcggcgac

SEQ ID NO: 113644 - RNA, 32 nt, Human
ccucuccagcaggcuagcucaggcuuauucac

SEQ ID NO: 113645 - RNA, 32 nt, Human
ccucuccagccaccccaagagguucucgcaac

SEQ ID NO: 113646 - RNA, 32 nt, Human
ccucuccagccuguuugagugcuccacccgga

SEQ ID NO: 113647 - RNA, 32 nt, Human
ccucuccaggcccaucucuugccucacagugg

SEQ ID NO: 113648 - RNA, 20 nt, Human
ccucuccagggaguccagga

SEQ ID NO: 113649 - RNA, 32 nt, Human
ccucuccagggcccccucucuguuggagcuga

SEQ ID NO: 113650 - RNA, 32 nt, Human
ccucuccagggcccuggcugggccaguccugu

SEQ ID NO: 113651 - RNA, 21 nt, Human
ccucuccaggugcucccacca

SEQ ID NO: 113652 - RNA, 32 nt, Human
ccucuccaguagcuggaacuacaggcaugcau

SEQ ID NO: 113653 - RNA, 32 nt, Human
ccucuccaguagcugggauuacaggugugcac

SEQ ID NO: 113654 - RNA, 32 nt, Human
ccucuccaguagcugggauuacaggugugugc

SEQ ID NO: 113655 - RNA, 22 nt, Human
ccucuccagugagccuccuuca

SEQ ID NO: 113656 - RNA, 32 nt, Human
ccucuccaguggugaagacccagccugcugag

SEQ ID NO: 113657 - RNA, 32 nt, Human
ccucuccauagaggagaggaaaagguauaggc

SEQ ID NO: 113658 - RNA, 32 nt, Human
ccucuccauagaggagaggaaaagguguaggc

SEQ ID NO: 113659 - RNA, 32 nt, Human
ccucuccauccuggggccaggacucuuaugcc

SEQ ID NO: 113660 - RNA, 25 nt, Human
ccucuccaucuggucaacugcggga

SEQ ID NO: 113661 - RNA, 23 nt, Human
ccucuccaucuucagcuucuuca

SEQ ID NO: 113662 - RNA, 32 nt, Human
ccucuccaugcuguggcccuggugauggcaga

SEQ ID NO: 113663 - RNA, 19 nt, Human
ccucuccauucuccccuca

SEQ ID NO: 113664 - RNA, 32 nt, Human
ccucuccauuuuucucuuucuccuccuggccu

SEQ ID NO: 113665 - RNA, 32 nt, Human
ccucucccaagaggagcagagaaaacuggaag

SEQ ID NO: 113666 - RNA, 32 nt, Human
ccucucccaagccaggucaaggagguuugggg

SEQ ID NO: 113667 - RNA, 32 nt, Human
ccucucccacccaaggagaacguuugguacaa

SEQ ID NO: 113668 - RNA, 32 nt, Human
ccucucccacgcugccccguacuggaccccug

SEQ ID NO: 113669 - RNA, 22 nt, Human
ccucucccacgugguccaguca

SEQ ID NO: 113670 - RNA, 32 nt, Human
ccucucccacucagcccuacaggaagcagcag

SEQ ID NO: 113671 - RNA, 32 nt, Human
ccucucccacugcacccuggguugggugcaca

SEQ ID NO: 113672 - RNA, 32 nt, Human
ccucucccacuuucucuucccucuacucacua

SEQ ID NO: 113673 - RNA, 32 nt, Human
ccucucccagaacucgguccuggggaaugcuc

SEQ ID NO: 113674 - RNA, 32 nt, Human
ccucucccagcccacuggguggggaagcagcu

SEQ ID NO: 113675 - RNA, 32 nt, Human
ccucucccagcucucccgagucugugacuaca

SEQ ID NO: 113676 - RNA, 32 nt, Human
ccucucccagcuguuaaauuaguacuucuuca

SEQ ID NO: 113677 - RNA, 32 nt, Human
ccucucccaucgcgagacacugaagacccuca

SEQ ID NO: 113678 - RNA, 32 nt, Human
ccucucccauuccuggccccagccuggccagg

SEQ ID NO: 113679 - RNA, 32 nt, Human
ccucuccccaaaauauucccaucuuguccuag

SEQ ID NO: 113680 - RNA, 32 nt, Human
ccucuccccaacacggacucuauuuccccaca

SEQ ID NO: 113681 - RNA, 19 nt, Human
ccucuccccaauuucauua

SEQ ID NO: 113682 - RNA, 32 nt, Human
ccucuccccacauguaucccucggucugaauu

SEQ ID NO: 113683 - RNA, 32 nt, Human
ccucuccccagaaaacuugucucuacucaucu

SEQ ID NO: 113684 - RNA, 32 nt, Human
ccucuccccagcccaggagaggcugcggagcc

SEQ ID NO: 113685 - RNA, 32 nt, Human
ccucuccccagccucagcugcuguccgccuga

SEQ ID NO: 113686 - RNA, 19 nt, Human
ccucuccccagccucgccu

SEQ ID NO: 113687 - RNA, 32 nt, Human
ccucuccccagccugggaagaugucucacugu

SEQ ID NO: 113688 - RNA, 32 nt, Human
ccucuccccauucgguguggugcagugugaaa

SEQ ID NO: 113689 - RNA, 24 nt, Human
ccucucccccaggaggcuccuuga

SEQ ID NO: 113690 - RNA, 18 nt, Human
ccucucccccagucccau

SEQ ID NO: 113691 - RNA, 32 nt, Human
ccucucccccuccuuccaucucuucucucucu

SEQ ID NO: 113692 - RNA, 32 nt, Human
ccucucccccuuccucucucccuucccuucca

SEQ ID NO: 113693 - RNA, 32 nt, Human
ccucuccccguucaacagccgggcagcggcag

SEQ ID NO: 113694 - RNA, 32 nt, Human
ccucuccccuaguacacuucugagaugccagg

SEQ ID NO: 113695 - RNA, 32 nt, Human
ccucuccccuccacuuucauuuuagcaugaga

SEQ ID NO: 113696 - RNA, 32 nt, Human
ccucuccccuccccucuccuccgcccccggcc

SEQ ID NO: 113697 - RNA, 32 nt, Human
ccucuccccuccuuuuccuuccuuccuuccuu

SEQ ID NO: 113698 - RNA, 32 nt, Human
ccucuccccugccccucaaccugccuuagcug

SEQ ID NO: 113699 - RNA, 32 nt, Human
ccucuccccugccucaagcccugcccccagcu

SEQ ID NO: 113700 - RNA, 32 nt, Human
ccucuccccugccugcccuggugacaucaggu

SEQ ID NO: 113701 - RNA, 32 nt, Human
ccucuccccuggggcaucccuuugccuuggca

SEQ ID NO: 113702 - RNA, 32 nt, Human
ccucuccccuggugaagacccagggaacccag

SEQ ID NO: 113703 - RNA, 32 nt, Human
ccucuccccuuguaggugacacaugcucugcc

SEQ ID NO: 113704 - RNA, 32 nt, Human
ccucucccgaaggagaucucuuucucuuuaau

SEQ ID NO: 113705 - RNA, 32 nt, Human
ccucucccgacauuggugcugaagacgcaggg

SEQ ID NO: 113706 - RNA, 22 nt, Human
ccucucccgcugccagcacagg

SEQ ID NO: 113707 - RNA, 32 nt, Human
ccucucccgcugcucaccugugucagggcuag

SEQ ID NO: 113708 - RNA, 32 nt, Human
ccucucccggggcggaggugaggaccuccuug

SEQ ID NO: 113709 - RNA, 32 nt, Human
ccucucccgugagucccgcuguccuguacgcg

SEQ ID NO: 113710 - RNA, 32 nt, Human
ccucucccgugccucugcuuucuccagcagcu

SEQ ID NO: 113711 - RNA, 32 nt, Human
ccucucccuccaccucucccugcccccagcgc

SEQ ID NO: 113712 - RNA, 32 nt, Human
ccucucccucccccucucccucccaucccuuu

SEQ ID NO: 113713 - RNA, 32 nt, Human
ccucucccuccccucuccucuccuccccuugc

SEQ ID NO: 113714 - RNA, 22 nt, Human
ccucucccuccuccauuccucu

SEQ ID NO: 113715 - RNA, 18 nt, Human
ccucucccucucccuccc

SEQ ID NO: 113716 - RNA, 19 nt, Human
ccucucccucucugccuga

SEQ ID NO: 113717 - RNA, 20 nt, Human
ccucucccucuucuuccucu

SEQ ID NO: 113718 - RNA, 32 nt, Human
ccucucccugauggcacacaaggagccuccuu

SEQ ID NO: 113719 - RNA, 32 nt, Human
ccucucccugcacucccuccuggagcucugug

SEQ ID NO: 113720 - RNA, 32 nt, Human
ccucucccugcagcuuucacugcucuugccua

SEQ ID NO: 113721 - RNA, 32 nt, Human
ccucucccugcccagcccucccuuccuuccuc

SEQ ID NO: 113722 - RNA, 32 nt, Human
ccucucccugcgcccagccucuccccagcaug

SEQ ID NO: 113723 - RNA, 15 nt, Human
ccucucccugcugcc

SEQ ID NO: 113724 - RNA, 32 nt, Human
ccucucccugggaacgggcugaccacaacaca

SEQ ID NO: 113725 - RNA, 32 nt, Human
ccucucccuguaucaugucagcacauaguagg

SEQ ID NO: 113726 - RNA, 18 nt, Human
ccucucccuguuggcugg

SEQ ID NO: 113727 - RNA, 17 nt, Human
ccucucccuucaccuca

SEQ ID NO: 113728 - RNA, 18 nt, Human
ccucucccuucccuuccc

SEQ ID NO: 113729 - RNA, 19 nt, Human
ccucucccuucuccuuccc

SEQ ID NO: 113730 - RNA, 32 nt, Human
ccucuccgcacaccugcccugggccuugacug

SEQ ID NO: 113731 - RNA, 21 nt, Human
ccucuccgccccgugguuccu

SEQ ID NO: 113732 - RNA, 21 nt, Human
ccucuccgccgggacgcggga

SEQ ID NO: 113733 - RNA, 21 nt, Human
ccucuccgcgaagcgcagcac

SEQ ID NO: 113734 - RNA, 23 nt, Human
ccucuccgcgggcggagcccugg

SEQ ID NO: 113735 - RNA, 21 nt, Human
ccucuccgcuucgccgcuccg

SEQ ID NO: 113736 - RNA, 32 nt, Human
ccucuccggccccgccuucccuucccuccgcc

SEQ ID NO: 113737 - RNA, 27 nt, Human
ccucuccgggaacuuccccugcuccuu

SEQ ID NO: 113738 - RNA, 32 nt, Human
ccucuccgucuucuccccuccuucuuccccac

SEQ ID NO: 113739 - RNA, 32 nt, Human
ccucuccuaagcugccuguucgcgcgagaguu

SEQ ID NO: 113740 - RNA, 22 nt, Human
ccucuccuacauccauuucuuc

SEQ ID NO: 113741 - RNA, 19 nt, Human
ccucuccuacauuuucuug

SEQ ID NO: 113742 - RNA, 32 nt, Human
ccucuccuacauuuucuugcuguugcuaauuc

SEQ ID NO: 113743 - RNA, 32 nt, Human
ccucuccuaccagggggaccuggaccuggagc

SEQ ID NO: 113744 - RNA, 32 nt, Human
ccucuccuacuuggcccagcugcuuggaggac

SEQ ID NO: 113745 - RNA, 21 nt, Human
ccucuccuagccacagacaga

SEQ ID NO: 113746 - RNA, 32 nt, Human
ccucuccuaugggacuaguucaucucagccag

SEQ ID NO: 113747 - RNA, 32 nt, Human
ccucuccucaccccaccaacuuccucagcacc

SEQ ID NO: 113748 - RNA, 32 nt, Human
ccucuccuccacccagaccaagugccugagga

SEQ ID NO: 113749 - RNA, 32 nt, Human
ccucuccuccacugcccccgccucccaccacc

SEQ ID NO: 113750 - RNA, 32 nt, Human
ccucuccuccccuggggcacagagauauauua

SEQ ID NO: 113751 - RNA, 32 nt, Human
ccucuccucccuccuccacaccuugagugaug

SEQ ID NO: 113752 - RNA, 32 nt, Human
ccucuccucccucugucccucuccuugccccc

SEQ ID NO: 113753 - RNA, 32 nt, Human
ccucuccuccgcugucaugccugcuuccgcuu

SEQ ID NO: 113754 - RNA, 32 nt, Human
ccucuccuccuccagcccccagccuacucucc

SEQ ID NO: 113755 - RNA, 19 nt, Human
ccucuccuccucccuuccc

SEQ ID NO: 113756 - RNA, 32 nt, Human
ccucuccuccuccuccuccucuuccuccuccu

SEQ ID NO: 113757 - RNA, 20 nt, Human
ccucuccuccuccuuccucu

SEQ ID NO: 113758 - RNA, 32 nt, Human
ccucuccuccuuccugucuccucucucucccu

SEQ ID NO: 113759 - RNA, 32 nt, Human
ccucuccucgcccugcucccccaaaccggcgu

SEQ ID NO: 113760 - RNA, 20 nt, Human
ccucuccucucagcucugcc

SEQ ID NO: 113761 - RNA, 32 nt, Human
ccucuccucucccacagcccuuauugccagug

SEQ ID NO: 113762 - RNA, 18 nt, Human
ccucuccucucuuccucu

SEQ ID NO: 113763 - RNA, 32 nt, Human
ccucuccucucuuccucucuucucucuuccuc

SEQ ID NO: 113764 - RNA, 16 nt, Human
ccucuccucugcugcc

SEQ ID NO: 113765 - RNA, 32 nt, Human
ccucuccucuggcugcuacaacuuccccuuuc

SEQ ID NO: 113766 - RNA, 32 nt, Human
ccucuccugacgccuccgccgcccgggucaug

SEQ ID NO: 113767 - RNA, 32 nt, Human
ccucuccugauccgccggcagcaacgagccau

SEQ ID NO: 113768 - RNA, 32 nt, Human
ccucuccugcagcuccagcuuugugcucugcc

SEQ ID NO: 113769 - RNA, 32 nt, Human
ccucuccugcagcucccgcgucgcugggagga

SEQ ID NO: 113770 - RNA, 32 nt, Human
ccucuccugcauuccugacaacaaccaacagc

SEQ ID NO: 113771 - RNA, 32 nt, Human
ccucuccugcauuuuccuccaucuccagguac

SEQ ID NO: 113772 - RNA, 18 nt, Human
ccucuccugccacccaga

SEQ ID NO: 113773 - RNA, 32 nt, Human
ccucuccugccacccuuauaccuguucagccu

SEQ ID NO: 113774 - RNA, 32 nt, Human
ccucuccugccagacagcccacgaccgggucg

SEQ ID NO: 113775 - RNA, 32 nt, Human
ccucuccugcccaggggcuagagagcagucuc

SEQ ID NO: 113776 - RNA, 32 nt, Human
ccucuccugcccugccuuccucuuccccaagg

SEQ ID NO: 113777 - RNA, 32 nt, Human
ccucuccugccucccuucccacuuccuccaug

SEQ ID NO: 113778 - RNA, 32 nt, Human
ccucuccugccucugcugagcuccccuccacg

SEQ ID NO: 113779 - RNA, 32 nt, Human
ccucuccugccucuggauguuuccuuggagcc

SEQ ID NO: 113780 - RNA, 32 nt, Human
ccucuccugccuggacagcucugcuggucucc

SEQ ID NO: 113781 - RNA, 32 nt, Human
ccucuccugccuggacggcucugcuggucucc

SEQ ID NO: 113782 - RNA, 32 nt, Human
ccucuccuggacauggcaaugaugaguuuuua

SEQ ID NO: 113783 - RNA, 32 nt, Human
ccucuccuggcagcuucucaggucucccuaau

SEQ ID NO: 113784 - RNA, 32 nt, Human
ccucuccuguccacagccagggguuaggucug

SEQ ID NO: 113785 - RNA, 32 nt, Human
ccucuccuucaaggaggguucccgcagcuggg

SEQ ID NO: 113786 - RNA, 32 nt, Human
ccucuccuugcacccauaccucuuuguaccgc

SEQ ID NO: 113787 - RNA, 32 nt, Human
ccucuccuugccagcuucuccccaggccagag

SEQ ID NO: 113788 - RNA, 32 nt, Human
ccucuccuugcugcugucuggacauggguguu

SEQ ID NO: 113789 - RNA, 32 nt, Human
ccucuccuuuuccuccuuuuuaccuucuggcc

SEQ ID NO: 113790 - RNA, 32 nt, Human
ccucuccuuuucuuccuccucuuccaacuccu

SEQ ID NO: 113791 - RNA, 31 nt, Human
ccucucgacccuccugggccuuguuccgcuc

SEQ ID NO: 113792 - RNA, 32 nt, Human
ccucucgacggccucuccaggugcaaaacuuc

SEQ ID NO: 113793 - RNA, 32 nt, Human
ccucucgagcagcuggaauuacaggcacgugc

SEQ ID NO: 113794 - RNA, 32 nt, Human
ccucucgagcagcugggauuacagguaugcgc

SEQ ID NO: 113795 - RNA, 32 nt, Human
ccucucgaguagaugggauuauaggcaugugc

SEQ ID NO: 113796 - RNA, 32 nt, Human
ccucucgaguagcuaggacuacaggcacaugc

SEQ ID NO: 113797 - RNA, 32 nt, Human
ccucucgaguagcuaggauuacaggcaugcac

SEQ ID NO: 113798 - RNA, 32 nt, Human
ccucucgaguagcugcgacuacaggugcccac

SEQ ID NO: 113799 - RNA, 32 nt, Human
ccucucgaguagcuggaauuacaggucuggca

SEQ ID NO: 113800 - RNA, 32 nt, Human
ccucucgaguagcugggacuacaggcgugagc

SEQ ID NO: 113801 - RNA, 32 nt, Human
ccucucgaguagcugggacuacaggcgugcgc

SEQ ID NO: 113802 - RNA, 32 nt, Human
ccucucgaguagcugggaguacagaugcacac

SEQ ID NO: 113803 - RNA, 32 nt, Human
ccucucgaguagcugggauuacaggcaccugc

SEQ ID NO: 113804 - RNA, 32 nt, Human
ccucucgaguagcugggauuacaggcaugcac

SEQ ID NO: 113805 - RNA, 32 nt, Human
ccucucgaguagcugggauuacaggcaugcgc

SEQ ID NO: 113806 - RNA, 32 nt, Human
ccucucgaguagcugggauuacaggcgcaugc

SEQ ID NO: 113807 - RNA, 32 nt, Human
ccucucgaguagcugggauuauaggcguccgc

SEQ ID NO: 113808 - RNA, 32 nt, Human
ccucucgaguagcuggggcuacagcuaugcgc

SEQ ID NO: 113809 - RNA, 32 nt, Human
ccucucgaguggcugggauuacaggcauccgc

SEQ ID NO: 113810 - RNA, 32 nt, Human
ccucucgcagccgccgcagucgcugcgccccg

SEQ ID NO: 113811 - RNA, 32 nt, Human
ccucucgccaggcuggaguguaguggcacaau

SEQ ID NO: 113812 - RNA, 32 nt, Human
ccucucgcccaggcuggagugcagugguguca

SEQ ID NO: 113813 - RNA, 32 nt, Human
ccucucgccgccgccuccacagccugggccuc

SEQ ID NO: 113814 - RNA, 32 nt, Human
ccucucgcugagacacacauacacucacacau

SEQ ID NO: 113815 - RNA, 32 nt, Human
ccucucggcggccucuccaggugcaaaacuuc

SEQ ID NO: 113816 - RNA, 32 nt, Human
ccucucgggcagcuggaauuacaggcaugcgc

SEQ ID NO: 113817 - RNA, 32 nt, Human
ccucucgggccggcucuccaucuugucgcccg

SEQ ID NO: 113818 - RNA, 32 nt, Human
ccucucgggccuccaguggcccaggggagguu

SEQ ID NO: 113819 - RNA, 23 nt, Human
ccucucggugccacuggcucuca

SEQ ID NO: 113820 - RNA, 32 nt, Human
ccucucguggccucaacgggcccagccccugc

SEQ ID NO: 113821 - RNA, 32 nt, Human
ccucucuacaaacaauacaaaaauuagccagg

SEQ ID NO: 113822 - RNA, 20 nt, Human
ccucucuacaccccagggca

SEQ ID NO: 113823 - RNA, 31 nt, Human
ccucucuacagcuaggagccaauggcagaag

SEQ ID NO: 113824 - RNA, 32 nt, Human
ccucucuaccacccucacuccaugaccuguga

SEQ ID NO: 113825 - RNA, 32 nt, Human
ccucucuacuaaaaauacaaaaauuagcuagg

SEQ ID NO: 113826 - RNA, 32 nt, Human
ccucucuacuaaaaauacaaaaauuagcuggg

SEQ ID NO: 113827 - RNA, 32 nt, Human
ccucucuacuaaaaauacaaaaauuugccagg

SEQ ID NO: 113828 - RNA, 32 nt, Human
ccucucuacuaaaaauauaaaaauuagccaag

SEQ ID NO: 113829 - RNA, 32 nt, Human
ccucucuacuaaaaaugcaaaaauuaguccgg

SEQ ID NO: 113830 - RNA, 32 nt, Human
ccucucuacuaaaacuacaaaaauuaacuggg

SEQ ID NO: 113831 - RNA, 32 nt, Human
ccucucuacuaaaguacaaaaguuagcugguc

SEQ ID NO: 113832 - RNA, 21 nt, Human
ccucucuacucagcccaguca

SEQ ID NO: 113833 - RNA, 32 nt, Human
ccucucuacuccugugcuguagcaccuucacu

SEQ ID NO: 113834 - RNA, 32 nt, Human
ccucucuaguagcugagauuacaggcaugcac

SEQ ID NO: 113835 - RNA, 32 nt, Human
ccucucuaguagcuggggcuccaggcaugaau

SEQ ID NO: 113836 - RNA, 31 nt, Human
ccucucucacacaaggaggaacuugggugaa

SEQ ID NO: 113837 - RNA, 32 nt, Human
ccucucucaccagggcucccugaggccugcug

SEQ ID NO: 113838 - RNA, 24 nt, Human
ccucucucaccuccaccccaucca

SEQ ID NO: 113839 - RNA, 32 nt, Human
ccucucucagcauccccucuagcuccuuacac

SEQ ID NO: 113840 - RNA, 32 nt, Human
ccucucucaguuacugcaguuuauagaauaau

SEQ ID NO: 113841 - RNA, 32 nt, Human
ccucucucauagagauuuuaagagcacagcaa

SEQ ID NO: 113842 - RNA, 18 nt, Human
ccucucucauccgcccca

SEQ ID NO: 113843 - RNA, 32 nt, Human
ccucucucauuucccuucuccuucucccucag

SEQ ID NO: 113844 - RNA, 22 nt, Human
ccucucucauuuggggugacug

SEQ ID NO: 113845 - RNA, 32 nt, Human
ccucucuccaacaaauggaguagcaucccccu

SEQ ID NO: 113846 - RNA, 32 nt, Human
ccucucuccacacccagccccugcuccugccc

SEQ ID NO: 113847 - RNA, 32 nt, Human
ccucucuccagcccuggaguccugagcaauga

SEQ ID NO: 113848 - RNA, 19 nt, Human
ccucucuccccacuggcca

SEQ ID NO: 113849 - RNA, 28 nt, Human
ccucucuccccagcugccuccuccucuu

SEQ ID NO: 113850 - RNA, 32 nt, Human
ccucucucccuccaaagaagagcaugggagag

SEQ ID NO: 113851 - RNA, 32 nt, Human
ccucucucccucucccucucccucucugucuc

SEQ ID NO: 113852 - RNA, 32 nt, Human
ccucucucccugccucacaucucccuuccacc

SEQ ID NO: 113853 - RNA, 23 nt, Human
ccucucucccuuucuccucuccc

SEQ ID NO: 113854 - RNA, 32 nt, Human
ccucucuccgagcuuucacccuggugagacug

SEQ ID NO: 113855 - RNA, 32 nt, Human
ccucucuccgucaucccuaucuccccugggcu

SEQ ID NO: 113856 - RNA, 32 nt, Human
ccucucuccuacuuuggcugacucuucaagaa

SEQ ID NO: 113857 - RNA, 32 nt, Human
ccucucuccucagggcgccucuccaguccacg

SEQ ID NO: 113858 - RNA, 32 nt, Human
ccucucuccuccccuccuuccucucuccuccc

SEQ ID NO: 113859 - RNA, 32 nt, Human
ccucucuccuccccuccuuccucucuccucuc

SEQ ID NO: 113860 - RNA, 32 nt, Human
ccucucuccuccgcccacagggguucgugggc

SEQ ID NO: 113861 - RNA, 32 nt, Human
ccucucuccuccugaacucucucaucugcagu

SEQ ID NO: 113862 - RNA, 32 nt, Human
ccucucuccucuccgcuucucucccccucugu

SEQ ID NO: 113863 - RNA, 32 nt, Human
ccucucuccuguuucccuucccuuccacugcc

SEQ ID NO: 113864 - RNA, 32 nt, Human
ccucucuccuugacuccaaaggccagccuggg

SEQ ID NO: 113865 - RNA, 32 nt, Human
ccucucuccuuuccuuccucauccccaccugg

SEQ ID NO: 113866 - RNA, 32 nt, Human
ccucucucgguccugaugcagcaccucgcaag

SEQ ID NO: 113867 - RNA, 32 nt, Human
ccucucucuaauuagcuuucccaguauacuuc

SEQ ID NO: 113868 - RNA, 19 nt, Human
ccucucucucaauuuucuu

SEQ ID NO: 113869 - RNA, 32 nt, Human
ccucucucucaccuacuuccuccuccuccucc

SEQ ID NO: 113870 - RNA, 32 nt, Human
ccucucucucccucucucuuuacccuccccag

SEQ ID NO: 113871 - RNA, 32 nt, Human
ccucucucuccuccuauuuuacuugaggcugc

SEQ ID NO: 113872 - RNA, 32 nt, Human
ccucucucuccuccuccuccuccgccgccgga

SEQ ID NO: 113873 - RNA, 32 nt, Human
ccucucucucuuccucuuucuucauucagauc

SEQ ID NO: 113874 - RNA, 32 nt, Human
ccucucucucuuucuuucuuucuuucuuucuu

SEQ ID NO: 113875 - RNA, 28 nt, Human
ccucucucugaguuccucugggcugccg

SEQ ID NO: 113876 - RNA, 23 nt, Human
ccucucucugcaucugagcucug

SEQ ID NO: 113877 - RNA, 23 nt, Human
ccucucucugccuaaggguggug

SEQ ID NO: 113878 - RNA, 22 nt, Human
ccucucucugccucuuuucucc

SEQ ID NO: 113879 - RNA, 23 nt, Human
ccucucucugcuggcugagccug

SEQ ID NO: 113880 - RNA, 22 nt, Human
ccucucucuggccuggggugcu

SEQ ID NO: 113881 - RNA, 23 nt, Human
ccucucucugggcccaggggcug

SEQ ID NO: 113882 - RNA, 32 nt, Human
ccucucucuuccagagcccagaaagcuccucu

SEQ ID NO: 113883 - RNA, 25 nt, Human
ccucucucuuggggcgcccacccgg

SEQ ID NO: 113884 - RNA, 21 nt, Human
ccucucucuuucucuccuccc

SEQ ID NO: 113885 - RNA, 32 nt, Human
ccucucucuuucucucuuuucucccucuccua

SEQ ID NO: 113886 - RNA, 32 nt, Human
ccucucucuuuugcccugcucuccacaccaga

SEQ ID NO: 113887 - RNA, 32 nt, Human
ccucucugaaccucagcuucucauccacaaaa

SEQ ID NO: 113888 - RNA, 21 nt, Human
ccucucugaagcccuuccuga

SEQ ID NO: 113889 - RNA, 32 nt, Human
ccucucugaaucucaaacaaguugauaaugga

SEQ ID NO: 113890 - RNA, 32 nt, Human
ccucucugaccugcaccugugugggagccggg

SEQ ID NO: 113891 - RNA, 32 nt, Human
ccucucugaccuguguacauucacaaaccaca

SEQ ID NO: 113892 - RNA, 21 nt, Human
ccucucugacuucucuuccuc

SEQ ID NO: 113893 - RNA, 32 nt, Human
ccucucugagcccuggcuccagcuuuucugag

SEQ ID NO: 113894 - RNA, 32 nt, Human
ccucucugaggcggaggaugcgggagcgcauc

SEQ ID NO: 113895 - RNA, 32 nt, Human
ccucucugcagcagucccccaucccagccaca

SEQ ID NO: 113896 - RNA, 32 nt, Human
ccucucugcagguguucaccacaguauuggag

SEQ ID NO: 113897 - RNA, 32 nt, Human
ccucucugcccaccucugcuuccucuaggaac

SEQ ID NO: 113898 - RNA, 22 nt, Human
ccucucugcccucccucccuuu

SEQ ID NO: 113899 - RNA, 32 nt, Human
ccucucugcccuuccaagccuguaaccucgga

SEQ ID NO: 113900 - RNA, 32 nt, Human
ccucucugccuccagccccaccuuccccggga

SEQ ID NO: 113901 - RNA, 20 nt, Human
ccucucugccucucuucuuc

SEQ ID NO: 113902 - RNA, 31 nt, Human
ccucucugccucuggcuuuaugucucuuuca

SEQ ID NO: 113903 - RNA, 32 nt, Human
ccucucugccugcuccugucucucccuggggu

SEQ ID NO: 113904 - RNA, 32 nt, Human
ccucucugccuugccuugcccucugccuuugg

SEQ ID NO: 113905 - RNA, 32 nt, Human
ccucucugcuaaaaauacaaaauuagccgagc

SEQ ID NO: 113906 - RNA, 32 nt, Human
ccucucugcucgcugcauugugguguucucuu

SEQ ID NO: 113907 - RNA, 32 nt, Human
ccucucugcucugacccuucucaggcccgccu

SEQ ID NO: 113908 - RNA, 32 nt, Human
ccucucugcugaccagcucuucaucaagaguc

SEQ ID NO: 113909 - RNA, 32 nt, Human
ccucucugcuuagagcugccaggaggagcuac

SEQ ID NO: 113910 - RNA, 32 nt, Human
ccucucugcuuuucaagcauuuccuugaguca

SEQ ID NO: 113911 - RNA, 32 nt, Human
ccucucuggaagagaaaggaagagccagcagu

SEQ ID NO: 113912 - RNA, 32 nt, Human
ccucucuggagucuucacaggggccugagcua

SEQ ID NO: 113913 - RNA, 32 nt, Human
ccucucuggcccaagcuggagugcaguggcac

SEQ ID NO: 113914 - RNA, 32 nt, Human
ccucucuggccccauccaggcaaccaaauaaa

SEQ ID NO: 113915 - RNA, 24 nt, Human
ccucucuggcuuauagucucuuca

SEQ ID NO: 113916 - RNA, 32 nt, Human
ccucucugggcacccuucugcccacaccaguu

SEQ ID NO: 113917 - RNA, 32 nt, Human
ccucucugggcuggaggugggggugggggcag

SEQ ID NO: 113918 - RNA, 32 nt, Human
ccucucuggggucgaugaagaggugaagugac

SEQ ID NO: 113919 - RNA, 20 nt, Human
ccucucugucccaccuugca

SEQ ID NO: 113920 - RNA, 25 nt, Human
ccucucuguccccacacacugggcc

SEQ ID NO: 113921 - RNA, 20 nt, Human
ccucucugucccucaccuca

SEQ ID NO: 113922 - RNA, 18 nt, Human
ccucucuguccuccccuc

SEQ ID NO: 113923 - RNA, 22 nt, Human
ccucucugucugacuucugcau

SEQ ID NO: 113924 - RNA, 32 nt, Human
ccucucugucugacuucugcaucuccuuccag

SEQ ID NO: 113925 - RNA, 32 nt, Human
ccucucugugccuucauuuccaccucucuaaa

SEQ ID NO: 113926 - RNA, 32 nt, Human
ccucucugugugaaaaguucucggucaugaac

SEQ ID NO: 113927 - RNA, 32 nt, Human
ccucucuucacagauguggggccgaggcucag

SEQ ID NO: 113928 - RNA, 22 nt, Human
ccucucuucacccauucauuca

SEQ ID NO: 113929 - RNA, 32 nt, Human
ccucucuucauaauuaucaauagccccaagcu

SEQ ID NO: 113930 - RNA, 32 nt, Human
ccucucuucccaaaucaucaccgccaugggcc

SEQ ID NO: 113931 - RNA, 32 nt, Human
ccucucuuccucacucccuucccccagucagu

SEQ ID NO: 113932 - RNA, 32 nt, Human
ccucucuuccuccccucugcacuuuguuuacu

SEQ ID NO: 113933 - RNA, 32 nt, Human
ccucucuuccuucacaccuuccucugaauccc

SEQ ID NO: 113934 - RNA, 22 nt, Human
ccucucuuccuucuccucuuca

SEQ ID NO: 113935 - RNA, 32 nt, Human
ccucucuucucauuauuguguccuuugcuuua

SEQ ID NO: 113936 - RNA, 32 nt, Human
ccucucuucuccagccucucccuuucacucuu

SEQ ID NO: 113937 - RNA, 32 nt, Human
ccucucuucuugcacuguccccaaacuugcug

SEQ ID NO: 113938 - RNA, 19 nt, Human
ccucucuugcccucccuca

SEQ ID NO: 113939 - RNA, 20 nt, Human
ccucucuugccgcccgcacc

SEQ ID NO: 113940 - RNA, 19 nt, Human
ccucucuuggcccccgggg

SEQ ID NO: 113941 - RNA, 32 nt, Human
ccucucuugguuucuuuggcucugccuuuguc

SEQ ID NO: 113942 - RNA, 32 nt, Human
ccucucuuguccaaggcuggaguguaguagug

SEQ ID NO: 113943 - RNA, 32 nt, Human
ccucucuuucccucuucuccccagccuccucc

SEQ ID NO: 113944 - RNA, 19 nt, Human
ccucucuuuuuucuccucu

SEQ ID NO: 113945 - RNA, 32 nt, Human
ccucugaaaguacugggauuacaagcauaagc

SEQ ID NO: 113946 - RNA, 32 nt, Human
ccucugaaagugcugggaucacagacaugagc

SEQ ID NO: 113947 - RNA, 32 nt, Human
ccucugaaagugcugggauuacaggcgugaga

SEQ ID NO: 113948 - RNA, 32 nt, Human
ccucugaaauugcugggauuacaggcaugagc

SEQ ID NO: 113949 - RNA, 32 nt, Human
ccucugaacccccuuuccccacaccucccccu

SEQ ID NO: 113950 - RNA, 21 nt, Human
ccucugaaccugucaggagga

SEQ ID NO: 113951 - RNA, 32 nt, Human
ccucugaagauggacucggccccacauacaca

SEQ ID NO: 113952 - RNA, 32 nt, Human
ccucugaagccacagccagagcuguauguugc

SEQ ID NO: 113953 - RNA, 32 nt, Human
ccucugaagcgcccuccugggcccugcuguca

SEQ ID NO: 113954 - RNA, 32 nt, Human
ccucugaaguagcugggacuacaggcguuauc

SEQ ID NO: 113955 - RNA, 32 nt, Human
ccucugaaguagcugggauuacaggcaugugu

SEQ ID NO: 113956 - RNA, 19 nt, Human
ccucugaaguuaacugaug

SEQ ID NO: 113957 - RNA, 21 nt, Human
ccucugaaugucuuggcucca

SEQ ID NO: 113958 - RNA, 23 nt, Human
ccucugaauguugguucuuacca

SEQ ID NO: 113959 - RNA, 21 nt, Human
ccucugaauuuaauucuuuca

SEQ ID NO: 113960 - RNA, 21 nt, Human
ccucugaauuuguauuuuuuc

SEQ ID NO: 113961 - RNA, 22 nt, Human
ccucugacagcagcagcagcag

SEQ ID NO: 113962 - RNA, 26 nt, Human
ccucugacauugaggccuggggcuua

SEQ ID NO: 113963 - RNA, 32 nt, Human
ccucugacauuuuggaaaugauacacuacugg

SEQ ID NO: 113964 - RNA, 32 nt, Human
ccucugaccagaucugaauuuggcucucagag

SEQ ID NO: 113965 - RNA, 32 nt, Human
ccucugaccagggacauccugaguuugguggc

SEQ ID NO: 113966 - RNA, 20 nt, Human
ccucugacccaauuuucuua

SEQ ID NO: 113967 - RNA, 32 nt, Human
ccucugacccacugagccugguggcagcgugc

SEQ ID NO: 113968 - RNA, 20 nt, Human
ccucugacccaucauguuua

SEQ ID NO: 113969 - RNA, 17 nt, Human
ccucugacccaugcuua

SEQ ID NO: 113970 - RNA, 32 nt, Human
ccucugaccccagcuucucucugauucccaca

SEQ ID NO: 113971 - RNA, 23 nt, Human
ccucugaccccucaccugugcca

SEQ ID NO: 113972 - RNA, 20 nt, Human
ccucugacccguuauucuua

SEQ ID NO: 113973 - RNA, 22 nt, Human
ccucugacccuagcucuuuccu

SEQ ID NO: 113974 - RNA, 32 nt, Human
ccucugacccucccccugccuuccucuugccu

SEQ ID NO: 113975 - RNA, 24 nt, Human
ccucugaccucaggccggcuguga

SEQ ID NO: 113976 - RNA, 20 nt, Human
ccucugaccuuucaguuuuc

SEQ ID NO: 113977 - RNA, 17 nt, Human
ccucugacgccgcucuu

SEQ ID NO: 113978 - RNA, 32 nt, Human
ccucugacguccaagccuuguuccugugcugc

SEQ ID NO: 113979 - RNA, 32 nt, Human
ccucugacucacuguguugguuuaucuuuagg

SEQ ID NO: 113980 - RNA, 18 nt, Human
ccucugacuccaacuucu

SEQ ID NO: 113981 - RNA, 17 nt, Human
ccucugacuccacuucu

SEQ ID NO: 113982 - RNA, 32 nt, Human
ccucugacucccuaacuccaucagaccucuac

SEQ ID NO: 113983 - RNA, 15 nt, Human
ccucugacuuauucu

SEQ ID NO: 113984 - RNA, 32 nt, Human
ccucugacuucacugccgcagcucuuuccaca

SEQ ID NO: 113985 - RNA, 19 nt, Human
ccucugacuucucuuucuu

SEQ ID NO: 113986 - RNA, 32 nt, Human
ccucugacuuuguaaacaaagccagagagccg

SEQ ID NO: 113987 - RNA, 19 nt, Human
ccucugacuuuuuuacuua

SEQ ID NO: 113988 - RNA, 32 nt, Human
ccucugagaacugccugucaccaucagcucag

SEQ ID NO: 113989 - RNA, 32 nt, Human
ccucugagaacuggcgcuuuguucaucauuug

SEQ ID NO: 113990 - RNA, 32 nt, Human
ccucugagaauaggagaaaugaagcaacaguu

SEQ ID NO: 113991 - RNA, 32 nt, Human
ccucugagagccucuuuggggugagcagccuu

SEQ ID NO: 113992 - RNA, 32 nt, Human
ccucugagaggggagaguccagugaguccagg

SEQ ID NO: 113993 - RNA, 24 nt, Human
ccucugagcagagagcagcagcag

SEQ ID NO: 113994 - RNA, 22 nt, Human
ccucugagcccaagcaaagcca

SEQ ID NO: 113995 - RNA, 32 nt, Human
ccucugagcccaagcuaagccaucauaucccc

SEQ ID NO: 113996 - RNA, 32 nt, Human
ccucugagccccaggcccggcccagcccgccu

SEQ ID NO: 113997 - RNA, 32 nt, Human
ccucugagccucuucugcuccugcacaaccug

SEQ ID NO: 113998 - RNA, 32 nt, Human
ccucugagcuccagcguuggcucuuacuccca

SEQ ID NO: 113999 - RNA, 32 nt, Human
ccucugagcugaggccccacaccagaguaggg

SEQ ID NO: 114000 - RNA, 32 nt, Human
ccucugagcuguuccuucuugaccggcacaca

SEQ ID NO: 114001 - RNA, 21 nt, Human
ccucugaggaaccuccuucca

SEQ ID NO: 114002 - RNA, 32 nt, Human
ccucugaggcagauggggcaggcggcccaggc

SEQ ID NO: 114003 - RNA, 21 nt, Human
ccucugaggccccggggccug

SEQ ID NO: 114004 - RNA, 32 nt, Human
ccucugaguacagcaauaaaauaaccugggca

SEQ ID NO: 114005 - RNA, 32 nt, Human
ccucugaguagcugggauuacaggcacacacc

SEQ ID NO: 114006 - RNA, 32 nt, Human
ccucugaguggggagagguugggcagugagug

SEQ ID NO: 114007 - RNA, 32 nt, Human
ccucugaguucuaacaaaauggugcuuugagg

SEQ ID NO: 114008 - RNA, 20 nt, Human
ccucugauaaacaauuuucu

SEQ ID NO: 114009 - RNA, 32 nt, Human
ccucugauccacccuccgcucugccugccaug

SEQ ID NO: 114010 - RNA, 18 nt, Human
ccucugauccuuuuguua

SEQ ID NO: 114011 - RNA, 32 nt, Human
ccucugaucucagggcuggcuuugggcaucuc

SEQ ID NO: 114012 - RNA, 32 nt, Human
ccucugaugaacucacacaugccucagugccu

SEQ ID NO: 114013 - RNA, 32 nt, Human
ccucugaugaaugacuguccccagcagauggc

SEQ ID NO: 114014 - RNA, 32 nt, Human
ccucugaugccaccgggcccucucuccuucua

SEQ ID NO: 114015 - RNA, 32 nt, Human
ccucugaugccugguccucccaauuucagacu

SEQ ID NO: 114016 - RNA, 32 nt, Human
ccucugaugccuguugaggagccucuaggaca

SEQ ID NO: 114017 - RNA, 32 nt, Human
ccucugaugccuucccuccacggcccaggucu

SEQ ID NO: 114018 - RNA, 19 nt, Human
ccucugauucacuuugcca

SEQ ID NO: 114019 - RNA, 22 nt, Human
ccucugauugcaccacugcacu

SEQ ID NO: 114020 - RNA, 32 nt, Human
ccucugauugcaccacugcacuccaggcuggg

SEQ ID NO: 114021 - RNA, 17 nt, Human
ccucugauugcauucuu

SEQ ID NO: 114022 - RNA, 21 nt, Human
ccucugauuuugguuuucuug

SEQ ID NO: 114023 - RNA, 32 nt, Human
ccucugcaaccacacagggauauuucugcuau

SEQ ID NO: 114024 - RNA, 32 nt, Human
ccucugcaacucggaacucugacccagggcgg

SEQ ID NO: 114025 - RNA, 32 nt, Human
ccucugcacaaaugugacggcagcagcugaag

SEQ ID NO: 114026 - RNA, 32 nt, Human
ccucugcacaugcuaccuacaucagcccagcc

SEQ ID NO: 114027 - RNA, 32 nt, Human
ccucugcaccaugacuaccugcagccgccagu

SEQ ID NO: 114028 - RNA, 24 nt, Human
ccucugcaccccagcccgcagcca

SEQ ID NO: 114029 - RNA, 23 nt, Human
ccucugcaccugcaugagaaccc

SEQ ID NO: 114030 - RNA, 32 nt, Human
ccucugcacgugcacacaccugcacaccccug

SEQ ID NO: 114031 - RNA, 32 nt, Human
ccucugcacucccagccuccuggccccuucug

SEQ ID NO: 114032 - RNA, 32 nt, Human
ccucugcagaagccucauagggcccggcgcgg

SEQ ID NO: 114033 - RNA, 32 nt, Human
ccucugcagaccccuccagacgccagaacucc

SEQ ID NO: 114034 - RNA, 19 nt, Human
ccucugcagagggggccca

SEQ ID NO: 114035 - RNA, 32 nt, Human
ccucugcagccugcccugccuucccccggaug

SEQ ID NO: 114036 - RNA, 32 nt, Human
ccucugcagccugucaucccugucugugacca

SEQ ID NO: 114037 - RNA, 32 nt, Human
ccucugcagcugccucaguuuccccagggacc

SEQ ID NO: 114038 - RNA, 32 nt, Human
ccucugcagggugguccagccuaggugacagg

SEQ ID NO: 114039 - RNA, 32 nt, Human
ccucugcagugcagauacugucagaaagagca

SEQ ID NO: 114040 - RNA, 32 nt, Human
ccucugcaucucugccuacaagggccucccug

SEQ ID NO: 114041 - RNA, 32 nt, Human
ccucugcauggaaucuugccccggacuccuga

SEQ ID NO: 114042 - RNA, 32 nt, Human
ccucugcauugccccucuucucccucuccaaa

SEQ ID NO: 114043 - RNA, 32 nt, Human
ccucugcauuuccagccccagcaucuugcugg

SEQ ID NO: 114044 - RNA, 32 nt, Human
ccucugcauuuucccaucacauagaagacuuu

SEQ ID NO: 114045 - RNA, 32 nt, Human
ccucugccaacaccggaacaagccgacgcuuc

SEQ ID NO: 114046 - RNA, 32 nt, Human
ccucugccaagccugugugcgaugcccuuggu

SEQ ID NO: 114047 - RNA, 32 nt, Human
ccucugccaagcuuugucuuuggggcuugcug

SEQ ID NO: 114048 - RNA, 32 nt, Human
ccucugccaaucaaaauagauagaauaugaua

SEQ ID NO: 114049 - RNA, 32 nt, Human
ccucugccacaucagcuuucuuuaggagcccu

SEQ ID NO: 114050 - RNA, 32 nt, Human
ccucugccagaagaaagcuuagcagccagcgc

SEQ ID NO: 114051 - RNA, 32 nt, Human
ccucugccagaggcucccucucaugauguuug

SEQ ID NO: 114052 - RNA, 32 nt, Human
ccucugccaggcuccacaagaggucaggacag

SEQ ID NO: 114053 - RNA, 32 nt, Human
ccucugccagugaccaaucccucuuaaaaagc

SEQ ID NO: 114054 - RNA, 32 nt, Human
ccucugccagugucucaggacagcagaguggg

SEQ ID NO: 114055 - RNA, 32 nt, Human
ccucugccauucaugagaacugugaggacucu

SEQ ID NO: 114056 - RNA, 32 nt, Human
ccucugcccaccucuucucuucugcuuccaua

SEQ ID NO: 114057 - RNA, 32 nt, Human
ccucugcccagccagcccugagcucccccacc

SEQ ID NO: 114058 - RNA, 32 nt, Human
ccucugcccagccggggcagcugcugcacugg

SEQ ID NO: 114059 - RNA, 32 nt, Human
ccucugcccagccugucuacaccgugugagcu

SEQ ID NO: 114060 - RNA, 32 nt, Human
ccucugcccagcuccugcuguaauuagcucca

SEQ ID NO: 114061 - RNA, 32 nt, Human
ccucugcccaggagcaugggcaucagcuaccu

SEQ ID NO: 114062 - RNA, 22 nt, Human
ccucugcccaggagcugugggg

SEQ ID NO: 114063 - RNA, 20 nt, Human
ccucugcccagggaccccug

SEQ ID NO: 114064 - RNA, 32 nt, Human
ccucugccccaccaugauccagccucugccuc

SEQ ID NO: 114065 - RNA, 31 nt, Human
ccucugccccacucugggcuuuucagauacu

SEQ ID NO: 114066 - RNA, 32 nt, Human
ccucugccccacugccagccugagugggcaag

SEQ ID NO: 114067 - RNA, 32 nt, Human
ccucugccccagauagguggugccaguggcuu

SEQ ID NO: 114068 - RNA, 32 nt, Human
ccucugccccagguccaugcugggcagaauca

SEQ ID NO: 114069 - RNA, 21 nt, Human
ccucugcccccagcugcuccu

SEQ ID NO: 114070 - RNA, 16 nt, Human
ccucugcccccaggua

SEQ ID NO: 114071 - RNA, 32 nt, Human
ccucugcccccuggcccugggcucugugcuag

SEQ ID NO: 114072 - RNA, 32 nt, Human
ccucugccccgcccccuccagccccaucucug

SEQ ID NO: 114073 - RNA, 23 nt, Human
ccucugccccgcgcccaccccgg

SEQ ID NO: 114074 - RNA, 32 nt, Human
ccucugccccucccccuggcuucuuucucuug

SEQ ID NO: 114075 - RNA, 32 nt, Human
ccucugccccucuuccccuaccccuguccuuc

SEQ ID NO: 114076 - RNA, 32 nt, Human
ccucugccccuggccuuugaggcaaaggccag

SEQ ID NO: 114077 - RNA, 32 nt, Human
ccucugccccuggguggcugguggcugggccu

SEQ ID NO: 114078 - RNA, 32 nt, Human
ccucugccccuguccagugccuggugguccag

SEQ ID NO: 114079 - RNA, 32 nt, Human
ccucugcccuccaccucuaccacuccagcauc

SEQ ID NO: 114080 - RNA, 32 nt, Human
ccucugcccuccuucugucuccuggguggucu

SEQ ID NO: 114081 - RNA, 32 nt, Human
ccucugcccuccuuuuugguuuccuugguggu

SEQ ID NO: 114082 - RNA, 32 nt, Human
ccucugcccucggggcagcccacacaaaaggg

SEQ ID NO: 114083 - RNA, 20 nt, Human
ccucugcccucucccuuccc

SEQ ID NO: 114084 - RNA, 32 nt, Human
ccucugcccugagagcgcguccggugcgggcg

SEQ ID NO: 114085 - RNA, 32 nt, Human
ccucugcccugcccaccagccugugauuugau

SEQ ID NO: 114086 - RNA, 32 nt, Human
ccucugcccugcccuccagccugggacaauaa

SEQ ID NO: 114087 - RNA, 32 nt, Human
ccucugcccugccucccucucagaacgaugcc

SEQ ID NO: 114088 - RNA, 19 nt, Human
ccucugcccugcuggccug

SEQ ID NO: 114089 - RNA, 32 nt, Human
ccucugcccuucaaucugucgccugugguccc

SEQ ID NO: 114090 - RNA, 16 nt, Human
ccucugcccuugggga

SEQ ID NO: 114091 - RNA, 32 nt, Human
ccucugcccuuuccucccgccuuccaugagug

SEQ ID NO: 114092 - RNA, 32 nt, Human
ccucugccgagccugcaucacugugagcaaca

SEQ ID NO: 114093 - RNA, 20 nt, Human
ccucugccgcagcacugagg

SEQ ID NO: 114094 - RNA, 32 nt, Human
ccucugccgcccucuucucugccacgcaggac

SEQ ID NO: 114095 - RNA, 32 nt, Human
ccucugccgcuccuccacaucuugccgcugcc

SEQ ID NO: 114096 - RNA, 22 nt, Human
ccucugccggcucuggcucucc

SEQ ID NO: 114097 - RNA, 32 nt, Human
ccucugccucacaacauggcaaguacaguacu

SEQ ID NO: 114098 - RNA, 32 nt, Human
ccucugccucacagcagacucuucacacccag

SEQ ID NO: 114099 - RNA, 17 nt, Human
ccucugccucccagguc

SEQ ID NO: 114100 - RNA, 32 nt, Human
ccucugccucccuggggcagagcuguuuccca

SEQ ID NO: 114101 - RNA, 19 nt, Human
ccucugccucuaagcgcug

SEQ ID NO: 114102 - RNA, 32 nt, Human
ccucugccucugccucacccugcuggcuccug

SEQ ID NO: 114103 - RNA, 17 nt, Human
ccucugccugccaggua

SEQ ID NO: 114104 - RNA, 32 nt, Human
ccucugccugcucugccgccgaggcccgggga

SEQ ID NO: 114105 - RNA, 32 nt, Human
ccucugccugggaaucuucuuuccuccccucc

SEQ ID NO: 114106 - RNA, 32 nt, Human
ccucugccugggaguggcucuguguggaccag

SEQ ID NO: 114107 - RNA, 32 nt, Human
ccucugccugucucccccaccgggcugggagc

SEQ ID NO: 114108 - RNA, 32 nt, Human
ccucugccuguucuuggaccucuggcugcaga

SEQ ID NO: 114109 - RNA, 32 nt, Human
ccucugccuguuguugaggaggacugagcaca

SEQ ID NO: 114110 - RNA, 32 nt, Human
ccucugccuguuuuguucugucaccuuaaaag

SEQ ID NO: 114111 - RNA, 32 nt, Human
ccucugccuuggagcuccagagagagggagcc

SEQ ID NO: 114112 - RNA, 32 nt, Human
ccucugccuuucugguuucucucccucuccaa

SEQ ID NO: 114113 - RNA, 32 nt, Human
ccucugccuuugagcuucuccucugcuccaac

SEQ ID NO: 114114 - RNA, 32 nt, Human
ccucugcgagugguuucuugugcacuggcacc

SEQ ID NO: 114115 - RNA, 32 nt, Human
ccucugcgcuccgcgccauggccggccucaac

SEQ ID NO: 114116 - RNA, 20 nt, Human
ccucugcggacucugcagcu

SEQ ID NO: 114117 - RNA, 32 nt, Human
ccucugcgggacugucuguuugcagagggugc

SEQ ID NO: 114118 - RNA, 32 nt, Human
ccucugcggguggaucaccugaggucaggagu

SEQ ID NO: 114119 - RNA, 32 nt, Human
ccucugcgucuccgccuucccugggccgcacu

SEQ ID NO: 114120 - RNA, 32 nt, Human
ccucugcguucccaagcugugcguucuggacc

SEQ ID NO: 114121 - RNA, 32 nt, Human
ccucugcuaucucucacaccucucccagacua

SEQ ID NO: 114122 - RNA, 32 nt, Human
ccucugcucagcuccccucugcccccucuuuc

SEQ ID NO: 114123 - RNA, 32 nt, Human
ccucugcucauuccacaaaaccagagcaggca

SEQ ID NO: 114124 - RNA, 23 nt, Human
ccucugcuccaccccuccugugu

SEQ ID NO: 114125 - RNA, 32 nt, Human
ccucugcuccaccccuccugugugucagagcu

SEQ ID NO: 114126 - RNA, 32 nt, Human
ccucugcuccacccuccauuccuccuccccug

SEQ ID NO: 114127 - RNA, 32 nt, Human
ccucugcuccccagugcuaccucucucuuccc

SEQ ID NO: 114128 - RNA, 32 nt, Human
ccucugcuccgacgccguuccccaccaguuag

SEQ ID NO: 114129 - RNA, 17 nt, Human
ccucugcuccggcacgg

SEQ ID NO: 114130 - RNA, 32 nt, Human
ccucugcuccugcugcaaaagcagaaaccaug

SEQ ID NO: 114131 - RNA, 32 nt, Human
ccucugcuccugcuucucagcucuuccaccgu

SEQ ID NO: 114132 - RNA, 32 nt, Human
ccucugcuccugucugugucuugcgucugugg

SEQ ID NO: 114133 - RNA, 32 nt, Human
ccucugcucguggcgugggaaaggagguguga

SEQ ID NO: 114134 - RNA, 32 nt, Human
ccucugcucuauaucuauucccuuccagccag

SEQ ID NO: 114135 - RNA, 32 nt, Human
ccucugcucugauuacugcucugccuuccauu

SEQ ID NO: 114136 - RNA, 32 nt, Human
ccucugcucugccucugccccucuucucccug

SEQ ID NO: 114137 - RNA, 32 nt, Human
ccucugcucugccuucccaucugcggggcuaa

SEQ ID NO: 114138 - RNA, 32 nt, Human
ccucugcucuguccucccucuuccacugucuc

SEQ ID NO: 114139 - RNA, 32 nt, Human
ccucugcucuguggcuccauucaggcuuuuuc

SEQ ID NO: 114140 - RNA, 32 nt, Human
ccucugcugacaaccucugccgcaaacuggag

SEQ ID NO: 114141 - RNA, 19 nt, Human
ccucugcugacaagcuggg

SEQ ID NO: 114142 - RNA, 32 nt, Human
ccucugcugcagcuacugauaucuggccccug

SEQ ID NO: 114143 - RNA, 32 nt, Human
ccucugcugccagaaccuuggggaugugccua

SEQ ID NO: 114144 - RNA, 32 nt, Human
ccucugcugccagcccuuccucacuuuuggaa

SEQ ID NO: 114145 - RNA, 17 nt, Human
ccucugcugcccagugg

SEQ ID NO: 114146 - RNA, 32 nt, Human
ccucugcugcccccuuccccagcccuuagcac

SEQ ID NO: 114147 - RNA, 32 nt, Human
ccucugcugcccucuucucugcuaugcgggac

SEQ ID NO: 114148 - RNA, 18 nt, Human
ccucugcugccugcuggg

SEQ ID NO: 114149 - RNA, 32 nt, Human
ccucugcugcucccaggccuucuuccuauuca

SEQ ID NO: 114150 - RNA, 32 nt, Human
ccucugcugcugccuuggcuuccuccuaaugc

SEQ ID NO: 114151 - RNA, 32 nt, Human
ccucugcugcugcugccaccgcugauuccauc

SEQ ID NO: 114152 - RNA, 32 nt, Human
ccucugcugcugucccucccccuuguccuuuc

SEQ ID NO: 114153 - RNA, 32 nt, Human
ccucugcugcugucccucccccuugucuuucc

SEQ ID NO: 114154 - RNA, 32 nt, Human
ccucugcugcuugugcgcaugcgugcggccgc

SEQ ID NO: 114155 - RNA, 22 nt, Human
ccucugcuggaaggggcagcag

SEQ ID NO: 114156 - RNA, 32 nt, Human
ccucugcuggagccaccaguucccgcaagccc

SEQ ID NO: 114157 - RNA, 29 nt, Human
ccucugcuggcuuccucauccccugucca

SEQ ID NO: 114158 - RNA, 16 nt, Human
ccucugcugggccgug

SEQ ID NO: 114159 - RNA, 32 nt, Human
ccucugcugucaucagcugaugcauuguuuuu

SEQ ID NO: 114160 - RNA, 20 nt, Human
ccucugcuguguuuuucuug

SEQ ID NO: 114161 - RNA, 32 nt, Human
ccucugcuucuacuccuucuuccugggcaagg

SEQ ID NO: 114162 - RNA, 32 nt, Human
ccucugcuucuuaagcuuuccugcugcucgcu

SEQ ID NO: 114163 - RNA, 32 nt, Human
ccucugcuucuugcuuugcccaccuccacucu

SEQ ID NO: 114164 - RNA, 32 nt, Human
ccucugcuuggcauccccuugcuggacagugg

SEQ ID NO: 114165 - RNA, 32 nt, Human
ccucugcuuguccuaguucugaccuauagcau

SEQ ID NO: 114166 - RNA, 32 nt, Human
ccucugcuuucccuuuuccauuugaaagaaag

SEQ ID NO: 114167 - RNA, 32 nt, Human
ccucuggaaagaaacaugugaguaagugagag

SEQ ID NO: 114168 - RNA, 21 nt, Human
ccucuggaaagacagcacagg

SEQ ID NO: 114169 - RNA, 23 nt, Human
ccucuggaacagcugggcauggg

SEQ ID NO: 114170 - RNA, 32 nt, Human
ccucuggaagaguugggauuauggaugcaugg

SEQ ID NO: 114171 - RNA, 32 nt, Human
ccucuggaauggccuacccaacccgagaagaa

SEQ ID NO: 114172 - RNA, 26 nt, Human
ccucuggacaguguuauugguacaga

SEQ ID NO: 114173 - RNA, 24 nt, Human
ccucuggacauucacccagccagg

SEQ ID NO: 114174 - RNA, 32 nt, Human
ccucuggaccaucagauuaccaaugaagagga

SEQ ID NO: 114175 - RNA, 22 nt, Human
ccucuggaccgcgaggcacagg

SEQ ID NO: 114176 - RNA, 32 nt, Human
ccucuggacggacaguggggacauuguggguu

SEQ ID NO: 114177 - RNA, 32 nt, Human
ccucuggacuugccuuuccuucucuucuccgc

SEQ ID NO: 114178 - RNA, 32 nt, Human
ccucuggagagaacccagccaggcgcggugcc

SEQ ID NO: 114179 - RNA, 32 nt, Human
ccucuggagagauggaaguggacuagucuuaa

SEQ ID NO: 114180 - RNA, 32 nt, Human
ccucuggagcaacuauacugccucaggaugug

SEQ ID NO: 114181 - RNA, 32 nt, Human
ccucuggagcuggaacccagcuuacauuuugu

SEQ ID NO: 114182 - RNA, 32 nt, Human
ccucuggaggccugggcugagacagugcucuu

SEQ ID NO: 114183 - RNA, 20 nt, Human
ccucuggaggggcagcgcag

SEQ ID NO: 114184 - RNA, 32 nt, Human
ccucuggaggggcagcgcagccucccaccaag

SEQ ID NO: 114185 - RNA, 20 nt, Human
ccucuggagggggcagaaga

SEQ ID NO: 114186 - RNA, 32 nt, Human
ccucuggaguagcuggaacuacaggcuaaauu

SEQ ID NO: 114187 - RNA, 32 nt, Human
ccucuggaguagcugggacuacagacaugcac

SEQ ID NO: 114188 - RNA, 32 nt, Human
ccucuggaguagcugggacuacaggcgugugc

SEQ ID NO: 114189 - RNA, 32 nt, Human
ccucuggaguagcugggacuacaggugcccac

SEQ ID NO: 114190 - RNA, 32 nt, Human
ccucuggaguagcugggauuacagaugggacc

SEQ ID NO: 114191 - RNA, 32 nt, Human
ccucuggaguagcugggauuacaggcacgcgc

SEQ ID NO: 114192 - RNA, 32 nt, Human
ccucuggaguagcugggauuacaggugcgcac

SEQ ID NO: 114193 - RNA, 32 nt, Human
ccucuggaguagcugggccuacagugugugcu

SEQ ID NO: 114194 - RNA, 32 nt, Human
ccucuggagugcuacccuucucuuguaaccuu

SEQ ID NO: 114195 - RNA, 32 nt, Human
ccucuggaguuuccuucaucugccccacaccc

SEQ ID NO: 114196 - RNA, 22 nt, Human
ccucuggaucaaaguaggcagg

SEQ ID NO: 114197 - RNA, 21 nt, Human
ccucuggaucuaauuaccuua

SEQ ID NO: 114198 - RNA, 32 nt, Human
ccucuggauggaaacuuccaucuuacuugguu

SEQ ID NO: 114199 - RNA, 19 nt, Human
ccucuggauucuuuucuua

SEQ ID NO: 114200 - RNA, 32 nt, Human
ccucuggauugcacacuggccuacagaccugg

SEQ ID NO: 114201 - RNA, 32 nt, Human
ccucuggcagcagcggggagaaugggagugcg

SEQ ID NO: 114202 - RNA, 32 nt, Human
ccucuggcaugcugguagacuagggccauccu

SEQ ID NO: 114203 - RNA, 32 nt, Human
ccucuggcauucacuccagccagccaucccuu

SEQ ID NO: 114204 - RNA, 17 nt, Human
ccucuggccacccagga

SEQ ID NO: 114205 - RNA, 21 nt, Human
ccucuggccccaccaggagaa

SEQ ID NO: 114206 - RNA, 32 nt, Human
ccucuggcccugccagcugccugcgucguugg

SEQ ID NO: 114207 - RNA, 20 nt, Human
ccucuggcccugggaacagg

SEQ ID NO: 114208 - RNA, 23 nt, Human
ccucuggcccuuccaggauggaa

SEQ ID NO: 114209 - RNA, 22 nt, Human
ccucuggcccuuccuucuggaa

SEQ ID NO: 114210 - RNA, 32 nt, Human
ccucuggccguguucccuccccggcucagagc

SEQ ID NO: 114211 - RNA, 21 nt, Human
ccucuggccuccucucagggc

SEQ ID NO: 114212 - RNA, 32 nt, Human
ccucuggccuggcugaguucacagcccagucu

SEQ ID NO: 114213 - RNA, 32 nt, Human
ccucuggccuuggagaaagcuguaaaucuugu

SEQ ID NO: 114214 - RNA, 32 nt, Human
ccucuggcgaggacucucaggauguagggacu

SEQ ID NO: 114215 - RNA, 22 nt, Human
ccucuggcuaccuagggaccug

SEQ ID NO: 114216 - RNA, 32 nt, Human
ccucuggcuaggacaggguggaaaggguggcg

SEQ ID NO: 114217 - RNA, 21 nt, Human
ccucuggcucaccuucaggca

SEQ ID NO: 114218 - RNA, 24 nt, Human
ccucuggcuccagcauggggccug

SEQ ID NO: 114219 - RNA, 32 nt, Human
ccucuggcuccaggaaccuccaaggaggagac

SEQ ID NO: 114220 - RNA, 19 nt, Human
ccucuggcuccccugcucc

SEQ ID NO: 114221 - RNA, 23 nt, Human
ccucuggcuccugcgagggcuug

SEQ ID NO: 114222 - RNA, 25 nt, Human
ccucuggcugaggcaguagcauaga

SEQ ID NO: 114223 - RNA, 20 nt, Human
ccucuggcugguggcaccuu

SEQ ID NO: 114224 - RNA, 20 nt, Human
ccucuggcuuaauucuuuua

SEQ ID NO: 114225 - RNA, 32 nt, Human
ccucuggcuuccaggccaggugugagggacau

SEQ ID NO: 114226 - RNA, 26 nt, Human
ccucuggcuucccauaguggggccug

SEQ ID NO: 114227 - RNA, 32 nt, Human
ccucuggcuuuccuggaacacagaugucgaga

SEQ ID NO: 114228 - RNA, 32 nt, Human
ccucugggaagggcaggcaggagcuggcuauu

SEQ ID NO: 114229 - RNA, 23 nt, Human
ccucugggaccaccacuucuuca

SEQ ID NO: 114230 - RNA, 32 nt, Human
ccucugggacccuauacggacuccgccacuug

SEQ ID NO: 114231 - RNA, 32 nt, Human
ccucugggaccuuccgcggcccucucugcaca

SEQ ID NO: 114232 - RNA, 32 nt, Human
ccucugggagcaucaacaccaacauggcacag

SEQ ID NO: 114233 - RNA, 32 nt, Human
ccucugggaggcaggagaccccaaaggacacc

SEQ ID NO: 114234 - RNA, 32 nt, Human
ccucugggagggcugugcugcuaguggguacc

SEQ ID NO: 114235 - RNA, 32 nt, Human
ccucugggagggggucccccugccuggccucg

SEQ ID NO: 114236 - RNA, 32 nt, Human
ccucugggauuccaccuugcuaucucugcucu

SEQ ID NO: 114237 - RNA, 32 nt, Human
ccucugggauugucacaggaagcgcugccaug

SEQ ID NO: 114238 - RNA, 32 nt, Human
ccucugggcaagagcacccacugugaaguccu

SEQ ID NO: 114239 - RNA, 24 nt, Human
ccucugggcacaccucaugccagg

SEQ ID NO: 114240 - RNA, 20 nt, Human
ccucugggcacccccucaaa

SEQ ID NO: 114241 - RNA, 24 nt, Human
ccucugggcacgccucaugccagg

SEQ ID NO: 114242 - RNA, 21 nt, Human
ccucugggcagagcagcagga

SEQ ID NO: 114243 - RNA, 24 nt, Human
ccucugggcagcacccagccuaga

SEQ ID NO: 114244 - RNA, 32 nt, Human
ccucugggcaugcagcagcaguagccuaaggg

SEQ ID NO: 114245 - RNA, 23 nt, Human
ccucugggcaugcugugcucgga

SEQ ID NO: 114246 - RNA, 21 nt, Human
ccucugggcauguggcucaga

SEQ ID NO: 114247 - RNA, 17 nt, Human
ccucugggcauuuucuu

SEQ ID NO: 114248 - RNA, 32 nt, Human
ccucugggccaaugcauuuccaaaggaugccu

SEQ ID NO: 114249 - RNA, 32 nt, Human
ccucugggccagcuguggaagcugcugcacuu

SEQ ID NO: 114250 - RNA, 21 nt, Human
ccucugggcccagcaggcagg

SEQ ID NO: 114251 - RNA, 32 nt, Human
ccucugggcccugccgcauuucuugagacuua

SEQ ID NO: 114252 - RNA, 23 nt, Human
ccucugggccgcgacugcgcagg

SEQ ID NO: 114253 - RNA, 32 nt, Human
ccucugggccuuuccgccuccucaccacugug

SEQ ID NO: 114254 - RNA, 22 nt, Human
ccucugggcgcuuggacauaga

SEQ ID NO: 114255 - RNA, 25 nt, Human
ccucugggcggccccggggcgcggg

SEQ ID NO: 114256 - RNA, 32 nt, Human
ccucuggggaaagagcacaggaacugaguugc

SEQ ID NO: 114257 - RNA, 32 nt, Human
ccucuggggacgggacacagggaagcccgaag

SEQ ID NO: 114258 - RNA, 24 nt, Human
ccucuggggagcuccgcggcggga

SEQ ID NO: 114259 - RNA, 32 nt, Human
ccucuggggaugagcaaggccuuccaggacag

SEQ ID NO: 114260 - RNA, 32 nt, Human
ccucuggggcaggggugguggagagauggaag

SEQ ID NO: 114261 - RNA, 20 nt, Human
ccucuggggcccuuuucuua

SEQ ID NO: 114262 - RNA, 32 nt, Human
ccucuggggcuguugaagucaccuuguguguu

SEQ ID NO: 114263 - RNA, 21 nt, Human
ccucugggggcagggcacaga

SEQ ID NO: 114264 - RNA, 32 nt, Human
ccucuggggugaggcuauuccagcgagcuggg

SEQ ID NO: 114265 - RNA, 32 nt, Human
ccucuggggugcagaaaccucuugccuccaga

SEQ ID NO: 114266 - RNA, 22 nt, Human
ccucuggggugggguggggggc

SEQ ID NO: 114267 - RNA, 32 nt, Human
ccucugggguggguucgccaggagggcacguu

SEQ ID NO: 114268 - RNA, 32 nt, Human
ccucugggucaugaguaccacccugccugccu

SEQ ID NO: 114269 - RNA, 21 nt, Human
ccucuggguccugcuggcugc

SEQ ID NO: 114270 - RNA, 23 nt, Human
ccucugggugccaggccgggcca

SEQ ID NO: 114271 - RNA, 32 nt, Human
ccucugguaaacauuccuccagccuccccucc

SEQ ID NO: 114272 - RNA, 32 nt, Human
ccucugguccugcuguuuccuccagucucacu

SEQ ID NO: 114273 - RNA, 22 nt, Human
ccucuggucucggggccaggaa

SEQ ID NO: 114274 - RNA, 32 nt, Human
ccucuggucucuuuuccucucuuccaaugccc

SEQ ID NO: 114275 - RNA, 32 nt, Human
ccucuggucugcaggccugcagguacagugcu

SEQ ID NO: 114276 - RNA, 32 nt, Human
ccucuggugcacauggcuuccuccccggcggu

SEQ ID NO: 114277 - RNA, 32 nt, Human
ccucugguggccaggugcauggccaccacugc

SEQ ID NO: 114278 - RNA, 31 nt, Human
ccucugguggccucugggccugcugcaugua

SEQ ID NO: 114279 - RNA, 32 nt, Human
ccucugguguagcugggaccacagaugcucca

SEQ ID NO: 114280 - RNA, 32 nt, Human
ccucugguguccacccuccaacccccacaagu

SEQ ID NO: 114281 - RNA, 32 nt, Human
ccucugguguguggugaggggcuuucucuucc

SEQ ID NO: 114282 - RNA, 32 nt, Human
ccucugguucaccauucagcaccagcugaaga

SEQ ID NO: 114283 - RNA, 32 nt, Human
ccucugguuccugccaccaccaccuccccagg

SEQ ID NO: 114284 - RNA, 32 nt, Human
ccucugguugacugagaauacugaguaagaua

SEQ ID NO: 114285 - RNA, 32 nt, Human
ccucuguaaccagcaagucuauuggugccauu

SEQ ID NO: 114286 - RNA, 32 nt, Human
ccucuguaagccuguuucuucucugaaaucac

SEQ ID NO: 114287 - RNA, 32 nt, Human
ccucuguaaguuggccacacuuggggagugag

SEQ ID NO: 114288 - RNA, 32 nt, Human
ccucuguacugcacugcaucaggagucaggag

SEQ ID NO: 114289 - RNA, 32 nt, Human
ccucuguagacuguugagacugaguuccuguu

SEQ ID NO: 114290 - RNA, 32 nt, Human
ccucuguaguguggccuggugcuggggugaag

SEQ ID NO: 114291 - RNA, 32 nt, Human
ccucuguauacaauugagggcagucuagcccu

SEQ ID NO: 114292 - RNA, 32 nt, Human
ccucuguaucaucucaggagguuucaggggcc

SEQ ID NO: 114293 - RNA, 32 nt, Human
ccucuguauucugcaggagcuuuuccugcugg

SEQ ID NO: 114294 - RNA, 32 nt, Human
ccucugucaaccaggcuggagugcagugacuc

SEQ ID NO: 114295 - RNA, 32 nt, Human
ccucugucaacccccugucgcuuugguguugg

SEQ ID NO: 114296 - RNA, 32 nt, Human
ccucugucaacccuuauuccacugccuuauuu

SEQ ID NO: 114297 - RNA, 32 nt, Human
ccucugucaccaaggcuggagugcauuggugc

SEQ ID NO: 114298 - RNA, 22 nt, Human
ccucugucaccaggcuggagug

SEQ ID NO: 114299 - RNA, 32 nt, Human
ccucugucaccaggcuggagugcaguggugcg

SEQ ID NO: 114300 - RNA, 32 nt, Human
ccucugucacccaggcuagaggguggugauau

SEQ ID NO: 114301 - RNA, 32 nt, Human
ccucugucacccaggcuggagugcagugguga

SEQ ID NO: 114302 - RNA, 32 nt, Human
ccucugucacccgagcuggagugcaguggugc

SEQ ID NO: 114303 - RNA, 32 nt, Human
ccucugucaccuaggcuggagugcaguggcac

SEQ ID NO: 114304 - RNA, 23 nt, Human
ccucugucagcacccagcacgga

SEQ ID NO: 114305 - RNA, 32 nt, Human
ccucugucauauggcuccucugucaccagccc

SEQ ID NO: 114306 - RNA, 32 nt, Human
ccucugucauccaggcuggagugcaguggugc

SEQ ID NO: 114307 - RNA, 32 nt, Human
ccucugucauguguccuugucccuaggcuaca

SEQ ID NO: 114308 - RNA, 32 nt, Human
ccucugucauuuucucucuuucuucgucuuuc

SEQ ID NO: 114309 - RNA, 32 nt, Human
ccucuguccacaccuccagagcaccaagucca

SEQ ID NO: 114310 - RNA, 32 nt, Human
ccucuguccacauucuucuuggauuuguauaa

SEQ ID NO: 114311 - RNA, 32 nt, Human
ccucuguccaugucccugccucaguuuaccuc

SEQ ID NO: 114312 - RNA, 23 nt, Human
ccucugucccccaggcuggagug

SEQ ID NO: 114313 - RNA, 32 nt, Human
ccucugucccccaggcuggagugcaguggugc

SEQ ID NO: 114314 - RNA, 20 nt, Human
ccucuguccccucugcagug

SEQ ID NO: 114315 - RNA, 23 nt, Human
ccucugucccguggaacugugca

SEQ ID NO: 114316 - RNA, 20 nt, Human
ccucuguccucugcccguca

SEQ ID NO: 114317 - RNA, 32 nt, Human
ccucugucgccaaaguuggagugcaguggcgc

SEQ ID NO: 114318 - RNA, 23 nt, Human
ccucugucgcccaggcuagagua

SEQ ID NO: 114319 - RNA, 32 nt, Human
ccucugucgcccaggcuagaguauaguggugu

SEQ ID NO: 114320 - RNA, 32 nt, Human
ccucugucgcccaggcuagagugcaauggcgu

SEQ ID NO: 114321 - RNA, 23 nt, Human
ccucugucgcccaggcuggagug

SEQ ID NO: 114322 - RNA, 32 nt, Human
ccucugucgcccaggcuggagugcaauggcgc

SEQ ID NO: 114323 - RNA, 32 nt, Human
ccucugucgcccaggcuggagugcaguggcga

SEQ ID NO: 114324 - RNA, 32 nt, Human
ccucugucguccaggcuggagugcaguggcac

SEQ ID NO: 114325 - RNA, 23 nt, Human
ccucugucuaaccagccccagca

SEQ ID NO: 114326 - RNA, 32 nt, Human
ccucugucuccaggcauucgggggccugaggu

SEQ ID NO: 114327 - RNA, 18 nt, Human
ccucugucucccuccugc

SEQ ID NO: 114328 - RNA, 32 nt, Human
ccucugucuccuaagcuggagugcaguggcau

SEQ ID NO: 114329 - RNA, 32 nt, Human
ccucugucucugcuuaucaccucucuugcgua

SEQ ID NO: 114330 - RNA, 32 nt, Human
ccucugucucuuccuuuuacccucucuugucu

SEQ ID NO: 114331 - RNA, 32 nt, Human
ccucugucucuuuauuucaccuugccaagaca

SEQ ID NO: 114332 - RNA, 32 nt, Human
ccucugucugaggauggggaggggccagugag

SEQ ID NO: 114333 - RNA, 32 nt, Human
ccucugucugcagcugcugcugccuggaccua

SEQ ID NO: 114334 - RNA, 32 nt, Human
ccucugucugggggcaggcucagcaucugccc

SEQ ID NO: 114335 - RNA, 32 nt, Human
ccucugucuuuuccuuuucuuuuucuuuccuu

SEQ ID NO: 114336 - RNA, 22 nt, Human
ccucugugaagguggcuggagc

SEQ ID NO: 114337 - RNA, 23 nt, Human
ccucugugacuuaauuuuucuua

SEQ ID NO: 114338 - RNA, 32 nt, Human
ccucugugauccucagucucugccauucagau

SEQ ID NO: 114339 - RNA, 32 nt, Human
ccucugugcaccugcagucucuuuccacuggc

SEQ ID NO: 114340 - RNA, 32 nt, Human
ccucugugccaagcaguaucccuguucagccc

SEQ ID NO: 114341 - RNA, 32 nt, Human
ccucugugccagcagugagacugugacagcaa

SEQ ID NO: 114342 - RNA, 32 nt, Human
ccucugugccuugcugcuccugaggcccaagg

SEQ ID NO: 114343 - RNA, 32 nt, Human
ccucugugccuugguggggcuuggggacucag

SEQ ID NO: 114344 - RNA, 26 nt, Human
ccucugugcuccacacugcggccagg

SEQ ID NO: 114345 - RNA, 32 nt, Human
ccucugugcucccuccugccugcaugcaaccu

SEQ ID NO: 114346 - RNA, 32 nt, Human
ccucugugcuuuuucgcuuuccuaagcuccug

SEQ ID NO: 114347 - RNA, 26 nt, Human
ccucuguggacuccuuaguucuucca

SEQ ID NO: 114348 - RNA, 32 nt, Human
ccucuguggauugauauuuacauaucaaugug

SEQ ID NO: 114349 - RNA, 23 nt, Human
ccucuguggccauuguagccaga

SEQ ID NO: 114350 - RNA, 32 nt, Human
ccucuguggcccaggcugaagagcaguagugu

SEQ ID NO: 114351 - RNA, 32 nt, Human
ccucuguggcuaggaggcucaaaggacuguga

SEQ ID NO: 114352 - RNA, 32 nt, Human
ccucuguggcugcucugccuccucccacucac

SEQ ID NO: 114353 - RNA, 32 nt, Human
ccucuguggggugaggaaugggucuugugaaa

SEQ ID NO: 114354 - RNA, 32 nt, Human
ccucuguguaugccugggauccuuccaagcac

SEQ ID NO: 114355 - RNA, 32 nt, Human
ccucuguguccuggagccacgcccuccggcuc

SEQ ID NO: 114356 - RNA, 32 nt, Human
ccucuguuacuuguugagucucuugucuucac

SEQ ID NO: 114357 - RNA, 32 nt, Human
ccucuguucagggcugacacaagccccacagg

SEQ ID NO: 114358 - RNA, 32 nt, Human
ccucuguuccaggccuacauuuguauuuccuc

SEQ ID NO: 114359 - RNA, 32 nt, Human
ccucuguucccaagggcagagcagaaagcggc

SEQ ID NO: 114360 - RNA, 32 nt, Human
ccucuguucccgggucccucaggcggccaccc

SEQ ID NO: 114361 - RNA, 32 nt, Human
ccucuguucccucccuggaaugugucuauuaa

SEQ ID NO: 114362 - RNA, 32 nt, Human
ccucuguucuuucaacuccuuugaggcucaaa

SEQ ID NO: 114363 - RNA, 23 nt, Human
ccucuguugaaauugucacccca

SEQ ID NO: 114364 - RNA, 32 nt, Human
ccucuguugccaggcuagagugcaguggcaug

SEQ ID NO: 114365 - RNA, 32 nt, Human
ccucuguugccaggcuggaaugccguggcgca

SEQ ID NO: 114366 - RNA, 23 nt, Human
ccucuguugcccaggcuggagug

SEQ ID NO: 114367 - RNA, 32 nt, Human
ccucuguugcccaggcuggagugcagaggugc

SEQ ID NO: 114368 - RNA, 32 nt, Human
ccucuguugcccaggcuggagugcaguggugc

SEQ ID NO: 114369 - RNA, 32 nt, Human
ccucuguuggcuguuguccucucaucuucauc

SEQ ID NO: 114370 - RNA, 32 nt, Human
ccucuguuguccaagcuagagugcagugauac

SEQ ID NO: 114371 - RNA, 32 nt, Human
ccucuguuguccaaggcuggaguguaguagug

SEQ ID NO: 114372 - RNA, 32 nt, Human
ccucuguuucuuucuuucuuccuuucauuuuu

SEQ ID NO: 114373 - RNA, 20 nt, Human
ccucuguuuuuaauuuucuu

SEQ ID NO: 114374 - RNA, 32 nt, Human
ccucuuaaagugcugggauuacaggcgugagc

SEQ ID NO: 114375 - RNA, 32 nt, Human
ccucuuaaaguguugggauuauagguaugaac

SEQ ID NO: 114376 - RNA, 32 nt, Human
ccucuuaaauccuccaaucucaguacccagug

SEQ ID NO: 114377 - RNA, 32 nt, Human
ccucuuaaugccuuugcuagugcaguguauuu

SEQ ID NO: 114378 - RNA, 32 nt, Human
ccucuuacagaaguuuccuuuucaccacuuga

SEQ ID NO: 114379 - RNA, 32 nt, Human
ccucuuacagaauaaacuauuguuaaauagga

SEQ ID NO: 114380 - RNA, 32 nt, Human
ccucuuacauuaucaaaugauuuaggauggag

SEQ ID NO: 114381 - RNA, 32 nt, Human
ccucuuaccaccgucauggcagucccagguug

SEQ ID NO: 114382 - RNA, 32 nt, Human
ccucuuacguagcugggauuacaggcaugagc

SEQ ID NO: 114383 - RNA, 32 nt, Human
ccucuuacuggcaguggcuagagggaugagac

SEQ ID NO: 114384 - RNA, 32 nt, Human
ccucuuagcagcccuccccaggaaaagugucc

SEQ ID NO: 114385 - RNA, 18 nt, Human
ccucuuagccuccaucca

SEQ ID NO: 114386 - RNA, 32 nt, Human
ccucuuagcgcggcgggggcugcucugggcgc

SEQ ID NO: 114387 - RNA, 31 nt, Human
ccucuuaggggucugccucaugacacuaaaa

SEQ ID NO: 114388 - RNA, 32 nt, Human
ccucuuagugugaacgagauugccaggcccuu

SEQ ID NO: 114389 - RNA, 32 nt, Human
ccucuuauuaaauaugauuuucccaguaaaaa

SEQ ID NO: 114390 - RNA, 31 nt, Human
ccucuuauuguggaaaccuguugagaucaca

SEQ ID NO: 114391 - RNA, 32 nt, Human
ccucuucaaaaaggaagggauaguggaaaacu

SEQ ID NO: 114392 - RNA, 32 nt, Human
ccucuucaacuugcucucuuucccacuccuag

SEQ ID NO: 114393 - RNA, 32 nt, Human
ccucuucaagagucugcugggauuccacuguc

SEQ ID NO: 114394 - RNA, 32 nt, Human
ccucuucaauccaucuuaccacacaauauuuc

SEQ ID NO: 114395 - RNA, 32 nt, Human
ccucuucacaacaguaucaacacuggcuucuc

SEQ ID NO: 114396 - RNA, 22 nt, Human
ccucuucaccccccacucacca

SEQ ID NO: 114397 - RNA, 32 nt, Human
ccucuucacucugcucucaggagaccuggcua

SEQ ID NO: 114398 - RNA, 18 nt, Human
ccucuucacugucaccca

SEQ ID NO: 114399 - RNA, 32 nt, Human
ccucuucagaacuugucaggcauggcucagag

SEQ ID NO: 114400 - RNA, 18 nt, Human
ccucuucagccaccagcc

SEQ ID NO: 114401 - RNA, 32 nt, Human
ccucuucaguguuuuccuccagucccgggagc

SEQ ID NO: 114402 - RNA, 32 nt, Human
ccucuucauacuuccuggucucagccuugcug

SEQ ID NO: 114403 - RNA, 32 nt, Human
ccucuucauaggaaccaggaggacaaaaccac

SEQ ID NO: 114404 - RNA, 32 nt, Human
ccucuucaucugcaccuguaauaguuucaguu

SEQ ID NO: 114405 - RNA, 32 nt, Human
ccucuucauuggacuggcgggcucaggcgcgg

SEQ ID NO: 114406 - RNA, 32 nt, Human
ccucuuccacaccuucccagcaucacagucag

SEQ ID NO: 114407 - RNA, 18 nt, Human
ccucuuccacccacccca

SEQ ID NO: 114408 - RNA, 32 nt, Human
ccucuuccacugugaucuccuccagggcuuuc

SEQ ID NO: 114409 - RNA, 32 nt, Human
ccucuuccagcaggggaccuggggcuguccuc

SEQ ID NO: 114410 - RNA, 32 nt, Human
ccucuuccaggaguuccggcagcgauacgaga

SEQ ID NO: 114411 - RNA, 32 nt, Human
ccucuuccaggcucccuuuuccagccuucccc

SEQ ID NO: 114412 - RNA, 32 nt, Human
ccucuucccaacucccuucucaacauggggag

SEQ ID NO: 114413 - RNA, 32 nt, Human
ccucuucccaggcuggucugacaugcagcuua

SEQ ID NO: 114414 - RNA, 32 nt, Human
ccucuucccagugcuugcgaccagccucauuc

SEQ ID NO: 114415 - RNA, 21 nt, Human
ccucuuccccagcuccucuga

SEQ ID NO: 114416 - RNA, 32 nt, Human
ccucuucccccaggaagccuucccugcccacc

SEQ ID NO: 114417 - RNA, 32 nt, Human
ccucuucccuaucuccccuccuccccuuuucu

SEQ ID NO: 114418 - RNA, 32 nt, Human
ccucuucccuccuggcguccccggcugcccuc

SEQ ID NO: 114419 - RNA, 20 nt, Human
ccucuucccucucccugccc

SEQ ID NO: 114420 - RNA, 32 nt, Human
ccucuucccugccuccccauuccccuggcugc

SEQ ID NO: 114421 - RNA, 32 nt, Human
ccucuucccugccucugcuccuugggagcggg

SEQ ID NO: 114422 - RNA, 32 nt, Human
ccucuucccugccucugucuugagcccaggcc

SEQ ID NO: 114423 - RNA, 32 nt, Human
ccucuucccuuuccccucagcuuacuuacucc

SEQ ID NO: 114424 - RNA, 32 nt, Human
ccucuuccgggcagaaacaauaaaaccacuug

SEQ ID NO: 114425 - RNA, 32 nt, Human
ccucuuccucacccucauccuuugggaggcug

SEQ ID NO: 114426 - RNA, 32 nt, Human
ccucuuccucauuccauugccccaggucuuuu

SEQ ID NO: 114427 - RNA, 32 nt, Human
ccucuuccuccaagccccgcccccucugcccc

SEQ ID NO: 114428 - RNA, 32 nt, Human
ccucuuccuccacgucucaccccaccccaccc

SEQ ID NO: 114429 - RNA, 32 nt, Human
ccucuuccuccccucccgacucucugcuccuu

SEQ ID NO: 114430 - RNA, 32 nt, Human
ccucuuccuccccucucucuuccucucccuga

SEQ ID NO: 114431 - RNA, 32 nt, Human
ccucuuccuccuccuccuccaccuccggcuuu

SEQ ID NO: 114432 - RNA, 32 nt, Human
ccucuuccuccuccuccuccucucuaggcacc

SEQ ID NO: 114433 - RNA, 32 nt, Human
ccucuuccuccuccuccuccuuggcauccgcc

SEQ ID NO: 114434 - RNA, 32 nt, Human
ccucuuccuccuccuccucuuccucauccuca

SEQ ID NO: 114435 - RNA, 32 nt, Human
ccucuuccuccuccucuucaauucucccggug

SEQ ID NO: 114436 - RNA, 32 nt, Human
ccucuuccuccuccucuuccucuucgucuucc

SEQ ID NO: 114437 - RNA, 32 nt, Human
ccucuuccuccuuccuccuuccuccugcuccu

SEQ ID NO: 114438 - RNA, 32 nt, Human
ccucuuccuggcaacaguuaggcuuuugagag

SEQ ID NO: 114439 - RNA, 32 nt, Human
ccucuuccuggcccaccuccucuuccucgugg

SEQ ID NO: 114440 - RNA, 32 nt, Human
ccucuuccuguuccuguugacaugucguuguu

SEQ ID NO: 114441 - RNA, 32 nt, Human
ccucuuccuucccagccugccugcaugcaugu

SEQ ID NO: 114442 - RNA, 32 nt, Human
ccucuuccuucuccuccuccauccccagaaca

SEQ ID NO: 114443 - RNA, 32 nt, Human
ccucuuccuugcccuccaaccugguggcauag

SEQ ID NO: 114444 - RNA, 22 nt, Human
ccucuucgccagcucccagguc

SEQ ID NO: 114445 - RNA, 32 nt, Human
ccucuucgcucucuuccuccugcuccaaccau

SEQ ID NO: 114446 - RNA, 32 nt, Human
ccucuucggcguuguccugcucugccgcaucc

SEQ ID NO: 114447 - RNA, 32 nt, Human
ccucuucgucccuuuucccucucacacagaag

SEQ ID NO: 114448 - RNA, 32 nt, Human
ccucuucguccuccucuccugccucaccauca

SEQ ID NO: 114449 - RNA, 32 nt, Human
ccucuucuacccuggccucucuuccaaagccu

SEQ ID NO: 114450 - RNA, 32 nt, Human
ccucuucuacuauggcaggagauguggugugc

SEQ ID NO: 114451 - RNA, 32 nt, Human
ccucuucuaggcaguguggaagggaaaugugg

SEQ ID NO: 114452 - RNA, 32 nt, Human
ccucuucuauuuaaugcagacccggcccagag

SEQ ID NO: 114453 - RNA, 32 nt, Human
ccucuucucagacaggcuguucucagagugca

SEQ ID NO: 114454 - RNA, 32 nt, Human
ccucuucuccaccugcaccacaucccuagucc

SEQ ID NO: 114455 - RNA, 32 nt, Human
ccucuucuccaucccugagacaucacagaauc

SEQ ID NO: 114456 - RNA, 32 nt, Human
ccucuucucccagaggauccuggagcugcagg

SEQ ID NO: 114457 - RNA, 32 nt, Human
ccucuucucccaugccuuccucccugcugugg

SEQ ID NO: 114458 - RNA, 32 nt, Human
ccucuucuccccuccuccuccugccgggccgg

SEQ ID NO: 114459 - RNA, 32 nt, Human
ccucuucuccucucgcuucccugccgggcagg

SEQ ID NO: 114460 - RNA, 32 nt, Human
ccucuucucggccgucuccaucgcugccuucu

SEQ ID NO: 114461 - RNA, 32 nt, Human
ccucuucucuccccgcucuccuuccccuuuca

SEQ ID NO: 114462 - RNA, 32 nt, Human
ccucuucucucccuuacuuuccaagcaaguua

SEQ ID NO: 114463 - RNA, 32 nt, Human
ccucuucucucccuucaagccccacacuucac

SEQ ID NO: 114464 - RNA, 32 nt, Human
ccucuucucucccuucggcuucucucuuucgg

SEQ ID NO: 114465 - RNA, 32 nt, Human
ccucuucucucuguuaagggagagaagucacu

SEQ ID NO: 114466 - RNA, 32 nt, Human
ccucuucugcagccucaccucuaccugccccc

SEQ ID NO: 114467 - RNA, 32 nt, Human
ccucuucugcgcgcacaaccuaggcaguaauc

SEQ ID NO: 114468 - RNA, 32 nt, Human
ccucuucugcgugccccucuucugucucauag

SEQ ID NO: 114469 - RNA, 32 nt, Human
ccucuucugcuccugcacaaccugccucuucg

SEQ ID NO: 114470 - RNA, 32 nt, Human
ccucuucuggaaaaucuagcaaggagauuuau

SEQ ID NO: 114471 - RNA, 32 nt, Human
ccucuucuggacccagccuggucugcacugca

SEQ ID NO: 114472 - RNA, 32 nt, Human
ccucuucugggccucugcuccccugggaccuc

SEQ ID NO: 114473 - RNA, 32 nt, Human
ccucuucugggcucaagauggacaacaagaag

SEQ ID NO: 114474 - RNA, 32 nt, Human
ccucuucuggucuuuccucuucuguuuaugga

SEQ ID NO: 114475 - RNA, 17 nt, Human
ccucuucugucaucuca

SEQ ID NO: 114476 - RNA, 22 nt, Human
ccucuucuguccccuccccucu

SEQ ID NO: 114477 - RNA, 32 nt, Human
ccucuucuuagccugugauuuugccuugggac

SEQ ID NO: 114478 - RNA, 32 nt, Human
ccucuucuuccuccucuuccuccuccucuugu

SEQ ID NO: 114479 - RNA, 32 nt, Human
ccucuucuuccucuucuuuucacaggugcuua

SEQ ID NO: 114480 - RNA, 32 nt, Human
ccucuucuucuuuuucauccuucugucucuuu

SEQ ID NO: 114481 - RNA, 32 nt, Human
ccucuucuugcaccuucuccugccucuccaca

SEQ ID NO: 114482 - RNA, 20 nt, Human
ccucuugaaacccuucccca

SEQ ID NO: 114483 - RNA, 32 nt, Human
ccucuugaacaauuccagacauucauagugga

SEQ ID NO: 114484 - RNA, 32 nt, Human
ccucuugaauagcugggauuacaggcgcccgc

SEQ ID NO: 114485 - RNA, 26 nt, Human
ccucuugaccauuuguaauuuuuuca

SEQ ID NO: 114486 - RNA, 32 nt, Human
ccucuugaggagaaaagcaauaaugaauaaaa

SEQ ID NO: 114487 - RNA, 32 nt, Human
ccucuugaggguggacagggagaaagaugaug

SEQ ID NO: 114488 - RNA, 32 nt, Human
ccucuugaguagcuaggauuaccagugcacac

SEQ ID NO: 114489 - RNA, 32 nt, Human
ccucuugaguagcuagguacaggcaccugcca

SEQ ID NO: 114490 - RNA, 32 nt, Human
ccucuugaguagcugggacuacaggcgcacac

SEQ ID NO: 114491 - RNA, 32 nt, Human
ccucuugaguagcugggacuacaggugcccgc

SEQ ID NO: 114492 - RNA, 32 nt, Human
ccucuugaguagcugggauuacaggaacgcgc

SEQ ID NO: 114493 - RNA, 32 nt, Human
ccucuugaguagcugggauuacaggcaugcgc

SEQ ID NO: 114494 - RNA, 32 nt, Human
ccucuugaguagcugggauuacaggcgcccac

SEQ ID NO: 114495 - RNA, 32 nt, Human
ccucuugaguagcuugguuuauaggcgcaugc

SEQ ID NO: 114496 - RNA, 32 nt, Human
ccucuugaguggcugggauugcaggcgcccgc

SEQ ID NO: 114497 - RNA, 32 nt, Human
ccucuugaguggcugggauugcgggcacaugc

SEQ ID NO: 114498 - RNA, 23 nt, Human
ccucuugaguuccucugcaguuu

SEQ ID NO: 114499 - RNA, 32 nt, Human
ccucuugauucuuggcuugccucuccuccaau

SEQ ID NO: 114500 - RNA, 16 nt, Human
ccucuugcacccagaa

SEQ ID NO: 114501 - RNA, 32 nt, Human
ccucuugcaguggaaacuuugugcaaagaaua

SEQ ID NO: 114502 - RNA, 32 nt, Human
ccucuugcauuuuaaaguggaggguuugucuc

SEQ ID NO: 114503 - RNA, 32 nt, Human
ccucuugccacuuuuaaaauuauccuucaggc

SEQ ID NO: 114504 - RNA, 32 nt, Human
ccucuugccaggaaugcccauggaucauguga

SEQ ID NO: 114505 - RNA, 32 nt, Human
ccucuugccaugaucagacaugcagcugccua

SEQ ID NO: 114506 - RNA, 26 nt, Human
ccucuugcccagucccaggcagagua

SEQ ID NO: 114507 - RNA, 23 nt, Human
ccucuugcccucacacucuggua

SEQ ID NO: 114508 - RNA, 32 nt, Human
ccucuugcccugagccucacagcuacucuucu

SEQ ID NO: 114509 - RNA, 32 nt, Human
ccucuugccucaccauggccuccucugaccag

SEQ ID NO: 114510 - RNA, 32 nt, Human
ccucuugccuccagauuuggguggagccucug

SEQ ID NO: 114511 - RNA, 18 nt, Human
ccucuugccuuggagcca

SEQ ID NO: 114512 - RNA, 23 nt, Human
ccucuugccuuuuccccauaaca

SEQ ID NO: 114513 - RNA, 32 nt, Human
ccucuugcuaccuccaccuccaccgccaccuc

SEQ ID NO: 114514 - RNA, 32 nt, Human
ccucuugcuagcucccugucacuggagcacgc

SEQ ID NO: 114515 - RNA, 32 nt, Human
ccucuugcuccuuccugcuaggacagcagggc

SEQ ID NO: 114516 - RNA, 20 nt, Human
ccucuugcugcucgcccugc

SEQ ID NO: 114517 - RNA, 32 nt, Human
ccucuugcuggcaauggggugggaggaguacc

SEQ ID NO: 114518 - RNA, 32 nt, Human
ccucuugcuguuggcugcacaucaggaaggcu

SEQ ID NO: 114519 - RNA, 32 nt, Human
ccucuugcuucgaucagaacagcuuuacuuua

SEQ ID NO: 114520 - RNA, 32 nt, Human
ccucuuggaaggacagaucugccgggcugcua

SEQ ID NO: 114521 - RNA, 25 nt, Human
ccucuuggcaaugaaauuugcagcu

SEQ ID NO: 114522 - RNA, 32 nt, Human
ccucuuggcaucucagaugcacuggccucucc

SEQ ID NO: 114523 - RNA, 18 nt, Human
ccucuuggccucugcagc

SEQ ID NO: 114524 - RNA, 22 nt, Human
ccucuuggccucugucccagcu

SEQ ID NO: 114525 - RNA, 22 nt, Human
ccucuuggcucucucugcacuu

SEQ ID NO: 114526 - RNA, 32 nt, Human
ccucuugggcugcucccucgugcacagcgcag

SEQ ID NO: 114527 - RNA, 32 nt, Human
ccucuuggggaaaggugccuuguugugaugaa

SEQ ID NO: 114528 - RNA, 20 nt, Human
ccucuugggggccuggagcu

SEQ ID NO: 114529 - RNA, 32 nt, Human
ccucuugguacccagggugaguugguggagaa

SEQ ID NO: 114530 - RNA, 32 nt, Human
ccucuugucaggacaacugccugcugcuaggg

SEQ ID NO: 114531 - RNA, 15 nt, Human
ccucuuguccaggug

SEQ ID NO: 114532 - RNA, 32 nt, Human
ccucuuguccuccucagccucggugccuugga

SEQ ID NO: 114533 - RNA, 32 nt, Human
ccucuuguccuccuuuguuugccaucagcaag

SEQ ID NO: 114534 - RNA, 32 nt, Human
ccucuugucuccccacucccucccucuuuguu

SEQ ID NO: 114535 - RNA, 32 nt, Human
ccucuugucugugcuucagcccugcacaaaag

SEQ ID NO: 114536 - RNA, 32 nt, Human
ccucuuguggccaggccuuccuuugcuggagg

SEQ ID NO: 114537 - RNA, 24 nt, Human
ccucuuguuacccaggcuggagug

SEQ ID NO: 114538 - RNA, 32 nt, Human
ccucuuguuacccaggcuggagugcaguggcg

SEQ ID NO: 114539 - RNA, 23 nt, Human
ccucuuguuccagccucuuggaa

SEQ ID NO: 114540 - RNA, 21 nt, Human
ccucuuguugcccaggcugga

SEQ ID NO: 114541 - RNA, 32 nt, Human
ccucuuguugcccaggcuggaaauggcgcgau

SEQ ID NO: 114542 - RNA, 24 nt, Human
ccucuuguugcccaggcuggagug

SEQ ID NO: 114543 - RNA, 32 nt, Human
ccucuuguugcccaggcuggagugcaacggug

SEQ ID NO: 114544 - RNA, 32 nt, Human
ccucuuguugcccaggcuggagugcaauggcg

SEQ ID NO: 114545 - RNA, 32 nt, Human
ccucuuguugcccgggcuggagugcaauggcg

SEQ ID NO: 114546 - RNA, 22 nt, Human
ccucuuguugccugcacucauu

SEQ ID NO: 114547 - RNA, 27 nt, Human
ccucuuguuggagacaggcauacuccu

SEQ ID NO: 114548 - RNA, 32 nt, Human
ccucuuuacaggcaucuuuauccggaauucag

SEQ ID NO: 114549 - RNA, 32 nt, Human
ccucuuuacuccaagcacugggggaaacccag

SEQ ID NO: 114550 - RNA, 32 nt, Human
ccucuuuauguuacugugcugaucaggacaaa

SEQ ID NO: 114551 - RNA, 32 nt, Human
ccucuuuauugcugucaaagaugaggacccug

SEQ ID NO: 114552 - RNA, 32 nt, Human
ccucuuuauuuuugcugaguccugcagccagg

SEQ ID NO: 114553 - RNA, 31 nt, Human
ccucuuucaauaaacccccauugaaacagca

SEQ ID NO: 114554 - RNA, 32 nt, Human
ccucuuucagggguguguacagugcauugaug

SEQ ID NO: 114555 - RNA, 32 nt, Human
ccucuuucaguucugacagaaaauaauuuauu

SEQ ID NO: 114556 - RNA, 32 nt, Human
ccucuuucauuuucuaugcauuucgauuugac

SEQ ID NO: 114557 - RNA, 32 nt, Human
ccucuuuccaguaccucuuugcugugggacug

SEQ ID NO: 114558 - RNA, 32 nt, Human
ccucuuuccaucauccuuccuccaccuguggg

SEQ ID NO: 114559 - RNA, 32 nt, Human
ccucuuucccacauagccaucaucuugugugu

SEQ ID NO: 114560 - RNA, 32 nt, Human
ccucuuucccagcuuucuugcuugccuucugu

SEQ ID NO: 114561 - RNA, 32 nt, Human
ccucuuuccccagcuucugucugucucacugu

SEQ ID NO: 114562 - RNA, 32 nt, Human
ccucuuucccugggauugacucugaguggaau

SEQ ID NO: 114563 - RNA, 32 nt, Human
ccucuuuccucugcugcuuuccuuccuucugu

SEQ ID NO: 114564 - RNA, 32 nt, Human
ccucuuuccucuuccugguuuccuuaccugcc

SEQ ID NO: 114565 - RNA, 32 nt, Human
ccucuuuccuuuccuuugaccuaauggagcua

SEQ ID NO: 114566 - RNA, 21 nt, Human
ccucuuucgccgccgccgccg

SEQ ID NO: 114567 - RNA, 32 nt, Human
ccucuuucucaccuacccccugccgcacagcc

SEQ ID NO: 114568 - RNA, 32 nt, Human
ccucuuucucacuagagacucaaugacagaag

SEQ ID NO: 114569 - RNA, 32 nt, Human
ccucuuucuccaccaccucgggccccgguguc

SEQ ID NO: 114570 - RNA, 32 nt, Human
ccucuuucuccucccucuccuccucucaccuu

SEQ ID NO: 114571 - RNA, 32 nt, Human
ccucuuucuccuccuucucccgcggcuucugc

SEQ ID NO: 114572 - RNA, 16 nt, Human
ccucuuucuccuuggc

SEQ ID NO: 114573 - RNA, 24 nt, Human
ccucuuucugccacuugugcgcug

SEQ ID NO: 114574 - RNA, 32 nt, Human
ccucuuucuggccugugcaccucucucuggcu

SEQ ID NO: 114575 - RNA, 32 nt, Human
ccucuuucuucauaguccucaggcuuugguua

SEQ ID NO: 114576 - RNA, 32 nt, Human
ccucuuucuugccucugaaauguggcuaggug

SEQ ID NO: 114577 - RNA, 32 nt, Human
ccucuuucuuugcagaccgaacagugaaaagc

SEQ ID NO: 114578 - RNA, 32 nt, Human
ccucuuucuuuucaacuuuuugcccuuccuuu

SEQ ID NO: 114579 - RNA, 32 nt, Human
ccucuuugagaggagcugcuugugaaccaggc

SEQ ID NO: 114580 - RNA, 29 nt, Human
ccucuuugagugcuaucagcccucuagac

SEQ ID NO: 114581 - RNA, 32 nt, Human
ccucuuugauauuccugguuccugucuuacug

SEQ ID NO: 114582 - RNA, 32 nt, Human
ccucuuugcccagcuucuccccugcccuauuc

SEQ ID NO: 114583 - RNA, 32 nt, Human
ccucuuugccuaggcuagaguacaaaugguac

SEQ ID NO: 114584 - RNA, 32 nt, Human
ccucuuugcguggaaucagaccucuuuugcag

SEQ ID NO: 114585 - RNA, 32 nt, Human
ccucuuugcugaccuggaggugaucuguguau

SEQ ID NO: 114586 - RNA, 32 nt, Human
ccucuuugcuguuuucuuccuccucuauaaaa

SEQ ID NO: 114587 - RNA, 22 nt, Human
ccucuuuggaaagcagcagugg

SEQ ID NO: 114588 - RNA, 32 nt, Human
ccucuuuggaaucuucuucaucuuggcugccc

SEQ ID NO: 114589 - RNA, 32 nt, Human
ccucuuuggaccccaauucggccuuaagaugc

SEQ ID NO: 114590 - RNA, 32 nt, Human
ccucuuuggauccauugccccugagcucccag

SEQ ID NO: 114591 - RNA, 32 nt, Human
ccucuuuggaugugguucaccaaccaacauag

SEQ ID NO: 114592 - RNA, 32 nt, Human
ccucuuugggcacugguggauguaggcaccuc

SEQ ID NO: 114593 - RNA, 32 nt, Human
ccucuuuucauaccugaguacucuccugagcc

SEQ ID NO: 114594 - RNA, 32 nt, Human
ccucuuuucccccuucucucucccucucccuc

SEQ ID NO: 114595 - RNA, 16 nt, Human
ccucuuuuccccugga

SEQ ID NO: 114596 - RNA, 32 nt, Human
ccucuuuuccucaacguguucuuucccggguu

SEQ ID NO: 114597 - RNA, 32 nt, Human
ccucuuuugccaggcuggaugcugucgucucu

SEQ ID NO: 114598 - RNA, 32 nt, Human
ccucuuuugcuuguaauaacgcagaucccagc

SEQ ID NO: 114599 - RNA, 32 nt, Human
ccucuuuuguccaccagcccagccugacuccu

SEQ ID NO: 114600 - RNA, 32 nt, Human
ccucuuuuucaucagguuuguuaauagaguua

SEQ ID NO: 114601 - RNA, 18 nt, Human
ccucuuuuucuauggaga

SEQ ID NO: 114602 - RNA, 32 nt, Human
ccucuuuuucuuucuuccaccacuccccaccc

SEQ ID NO: 114603 - RNA, 32 nt, Human
ccucuuuuugacaguaaacuucugccuauggc

SEQ ID NO: 114604 - RNA, 20 nt, Human
ccucuuuuuucccuaaggga

SEQ ID NO: 114605 - RNA, 32 nt, Human
ccugaaaaacugaucaaaaauaaacuaguuuc

SEQ ID NO: 114606 - RNA, 32 nt, Human
ccugaaaacccaugaacgcuggggcuggggaa

SEQ ID NO: 114607 - RNA, 31 nt, Human
ccugaaaagagacuugguuuggggaccccac

SEQ ID NO: 114608 - RNA, 32 nt, Human
ccugaaaagcuugucuacugaagaauuacucc

SEQ ID NO: 114609 - RNA, 32 nt, Human
ccugaaaagucuccuggacgccugugaggcuc

SEQ ID NO: 114610 - RNA, 32 nt, Human
ccugaaaaucuccaucagagcaaggcagccag

SEQ ID NO: 114611 - RNA, 21 nt, Human
ccugaaaaugaguaaaauagu

SEQ ID NO: 114612 - RNA, 32 nt, Human
ccugaaaaugccacuuucaugcaguuuguuug

SEQ ID NO: 114613 - RNA, 21 nt, Human
ccugaaaauguuuuucugcca

SEQ ID NO: 114614 - RNA, 32 nt, Human
ccugaaacacacacaaacacacacaugucgau

SEQ ID NO: 114615 - RNA, 32 nt, Human
ccugaaacacugaccgacccuccuggggucug

SEQ ID NO: 114616 - RNA, 32 nt, Human
ccugaaacagagcaugcuuuccagaaagucac

SEQ ID NO: 114617 - RNA, 20 nt, Human
ccugaaacaggaauggggca

SEQ ID NO: 114618 - RNA, 32 nt, Human
ccugaaaccaacaaaagccucaagagccaaga

SEQ ID NO: 114619 - RNA, 32 nt, Human
ccugaaacccagggccagagacaaggacaacu

SEQ ID NO: 114620 - RNA, 32 nt, Human
ccugaaaccccagcuacuugggaggcugaggc

SEQ ID NO: 114621 - RNA, 32 nt, Human
ccugaaacccucccucuuuucccuucaggcau

SEQ ID NO: 114622 - RNA, 32 nt, Human
ccugaaacucuuaugcuggaguccuaguccca

SEQ ID NO: 114623 - RNA, 32 nt, Human
ccugaaacugguuuuaagugcuuuccuucucc

SEQ ID NO: 114624 - RNA, 32 nt, Human
ccugaaagacuggccccuggcuccccgccccu

SEQ ID NO: 114625 - RNA, 32 nt, Human
ccugaaagagagcaagaacauguggaucuuug

SEQ ID NO: 114626 - RNA, 32 nt, Human
ccugaaagcauggucagagguacccacguggc

SEQ ID NO: 114627 - RNA, 32 nt, Human
ccugaaagccaagggugcccagggguguggug

SEQ ID NO: 114628 - RNA, 32 nt, Human
ccugaaagcuuuguuucagagcuuuguauugg

SEQ ID NO: 114629 - RNA, 32 nt, Human
ccugaaaggaaaauagaauaugaucaauuccu

SEQ ID NO: 114630 - RNA, 32 nt, Human
ccugaaaggaggcucacuugaauccagcucag

SEQ ID NO: 114631 - RNA, 32 nt, Human
ccugaaagggccuggggcugagcucagccugu

SEQ ID NO: 114632 - RNA, 23 nt, Human
ccugaaagucgagguugcaguga

SEQ ID NO: 114633 - RNA, 21 nt, Human
ccugaaaguggugauacuaca

SEQ ID NO: 114634 - RNA, 31 nt, Human
ccugaaaguguccagcagcuaccucagugac

SEQ ID NO: 114635 - RNA, 32 nt, Human
ccugaaaguugagcaggggagcuguagaagaa

SEQ ID NO: 114636 - RNA, 22 nt, Human
ccugaaauaaacacuggugcca

SEQ ID NO: 114637 - RNA, 32 nt, Human
ccugaaaucaagagcauggcuugaguguguga

SEQ ID NO: 114638 - RNA, 32 nt, Human
ccugaaaucccagcuacucaagaggcugaggc

SEQ ID NO: 114639 - RNA, 23 nt, Human
ccugaaaucccagcuacugaaga

SEQ ID NO: 114640 - RNA, 32 nt, Human
ccugaaaucccagcuacugaagaggcugaggu

SEQ ID NO: 114641 - RNA, 32 nt, Human
ccugaaaucccagcuacuugggaggcugaggc

SEQ ID NO: 114642 - RNA, 32 nt, Human
ccugaaaucccagcuaucaggaggcugaggca

SEQ ID NO: 114643 - RNA, 32 nt, Human
ccugaaaucccagguacucaggaggcugaggc

SEQ ID NO: 114644 - RNA, 32 nt, Human
ccugaaaucugaaacacuugugguuccaagca

SEQ ID NO: 114645 - RNA, 32 nt, Human
ccugaaauuccaccuuucauccccuauggaug

SEQ ID NO: 114646 - RNA, 32 nt, Human
ccugaacaacauaacaagacccugucuguaaa

SEQ ID NO: 114647 - RNA, 32 nt, Human
ccugaacaacaucacugugguuacucauccau

SEQ ID NO: 114648 - RNA, 32 nt, Human
ccugaacaaccagcagcgauacccagguacaa

SEQ ID NO: 114649 - RNA, 32 nt, Human
ccugaacaccacugcccccuucacugucugug

SEQ ID NO: 114650 - RNA, 32 nt, Human
ccugaacacucugcuccagccaagguggugag

SEQ ID NO: 114651 - RNA, 32 nt, Human
ccugaacaucccuccuuucaggcugcagaagg

SEQ ID NO: 114652 - RNA, 19 nt, Human
ccugaacauucccaccuca

SEQ ID NO: 114653 - RNA, 32 nt, Human
ccugaacauugggcgguuuucuuaauuugaag

SEQ ID NO: 114654 - RNA, 32 nt, Human
ccugaaccaaaccuaauuguccuggucuuaag

SEQ ID NO: 114655 - RNA, 32 nt, Human
ccugaaccacucuuugcugggccuccgcaagg

SEQ ID NO: 114656 - RNA, 32 nt, Human
ccugaaccacuguggccuucucagccuacagc

SEQ ID NO: 114657 - RNA, 23 nt, Human
ccugaaccagagugugcccugcc

SEQ ID NO: 114658 - RNA, 32 nt, Human
ccugaaccagagugugcccugccccucaugcu

SEQ ID NO: 114659 - RNA, 32 nt, Human
ccugaaccaguucuuucuugagacagacuaua

SEQ ID NO: 114660 - RNA, 32 nt, Human
ccugaacccaggaagaggagguugcagugagc

SEQ ID NO: 114661 - RNA, 32 nt, Human
ccugaacccaggaggcagagguugcaguaagc

SEQ ID NO: 114662 - RNA, 32 nt, Human
ccugaacccaggaggcagagguugcagugagc

SEQ ID NO: 114663 - RNA, 32 nt, Human
ccugaacccaggaggcagagguugcggugagu

SEQ ID NO: 114664 - RNA, 32 nt, Human
ccugaacccaggaggcggagcuugcagugagc

SEQ ID NO: 114665 - RNA, 32 nt, Human
ccugaacccaggaggcggagguugcagggagg

SEQ ID NO: 114666 - RNA, 32 nt, Human
ccugaacccaggaggcggagguugcagugagc

SEQ ID NO: 114667 - RNA, 32 nt, Human
ccugaacccaggagguggagguugcagugagc

SEQ ID NO: 114668 - RNA, 32 nt, Human
ccugaaccccagaggcagagguugcagugagc

SEQ ID NO: 114669 - RNA, 32 nt, Human
ccugaaccccagagguggagguugcagugagc

SEQ ID NO: 114670 - RNA, 22 nt, Human
ccugaacccccaggcuggagua

SEQ ID NO: 114671 - RNA, 32 nt, Human
ccugaacccccaggcuggaguacaguggcagg

SEQ ID NO: 114672 - RNA, 32 nt, Human
ccugaaccccggccuccacccugggggaggcc

SEQ ID NO: 114673 - RNA, 20 nt, Human
ccugaaccccucuccugguc

SEQ ID NO: 114674 - RNA, 24 nt, Human
ccugaaccccucucugcaacuccu

SEQ ID NO: 114675 - RNA, 32 nt, Human
ccugaaccccucugacacuuggaaacugaaua

SEQ ID NO: 114676 - RNA, 24 nt, Human
ccugaaccccucuugccacugccu

SEQ ID NO: 114677 - RNA, 32 nt, Human
ccugaacccggcaggcagagcuugcagugagc

SEQ ID NO: 114678 - RNA, 32 nt, Human
ccugaacccgggaggcaaagguuuuagugagc

SEQ ID NO: 114679 - RNA, 32 nt, Human
ccugaacccgggaggcagagcuugcaguaagc

SEQ ID NO: 114680 - RNA, 32 nt, Human
ccugaacccgggaggcagagcuugcagugagc

SEQ ID NO: 114681 - RNA, 32 nt, Human
ccugaacccgggaggcagaggcugcagugagc

SEQ ID NO: 114682 - RNA, 32 nt, Human
ccugaacccgggaggcagagguugcagugagc

SEQ ID NO: 114683 - RNA, 32 nt, Human
ccugaacccgggaggcggagcuugcagugagc

SEQ ID NO: 114684 - RNA, 32 nt, Human
ccugaacccgggaggcggagguugcagugagc

SEQ ID NO: 114685 - RNA, 32 nt, Human
ccugaacccgggaggcuaagguugcagugagc

SEQ ID NO: 114686 - RNA, 32 nt, Human
ccugaacccgggagguggagguugcagugagc

SEQ ID NO: 114687 - RNA, 32 nt, Human
ccugaacccgggcgguggagguuguagugagc

SEQ ID NO: 114688 - RNA, 32 nt, Human
ccugaacccgugaggcagagguugcagugagc

SEQ ID NO: 114689 - RNA, 32 nt, Human
ccugaacccugccucccgcgcccgcccugcuc

SEQ ID NO: 114690 - RNA, 32 nt, Human
ccugaaccuaggagguggaggcugcagcgagc

SEQ ID NO: 114691 - RNA, 32 nt, Human
ccugaaccucagaggcagagguugcaaugaag

SEQ ID NO: 114692 - RNA, 32 nt, Human
ccugaaccuccgcaaaacccccaaaccuggag

SEQ ID NO: 114693 - RNA, 32 nt, Human
ccugaaccugagaggcggagguugcagugagc

SEQ ID NO: 114694 - RNA, 32 nt, Human
ccugaaccugccgccuccgugccuggggcggc

SEQ ID NO: 114695 - RNA, 32 nt, Human
ccugaaccugggaaccaugaagcuggaagcac

SEQ ID NO: 114696 - RNA, 32 nt, Human
ccugaaccugggaaucggagguugcagggcca

SEQ ID NO: 114697 - RNA, 32 nt, Human
ccugaaccugggagacagaugaggagacuggc

SEQ ID NO: 114698 - RNA, 32 nt, Human
ccugaaccugggaggcagagguugcaaugagc

SEQ ID NO: 114699 - RNA, 32 nt, Human
ccugaaccugggaggcagagguugcaguaagc

SEQ ID NO: 114700 - RNA, 32 nt, Human
ccugaaccugggaggcggagguugcagugagc

SEQ ID NO: 114701 - RNA, 32 nt, Human
ccugaaccugggagguggagauugcagugagc

SEQ ID NO: 114702 - RNA, 32 nt, Human
ccugaaccuucucuucugcacauggagacuuu

SEQ ID NO: 114703 - RNA, 32 nt, Human
ccugaacgaccugcuccagggaggcuuuagcc

SEQ ID NO: 114704 - RNA, 32 nt, Human
ccugaacggagagagggagugaacugugcaaa

SEQ ID NO: 114705 - RNA, 32 nt, Human
ccugaacgggcgacugugucuugacuaccuuu

SEQ ID NO: 114706 - RNA, 32 nt, Human
ccugaacggugcuucuugcccccucugccugg

SEQ ID NO: 114707 - RNA, 32 nt, Human
ccugaacuaccguccugccuaggccuggcucc

SEQ ID NO: 114708 - RNA, 31 nt, Human
ccugaacucaauaacuguuugaaaauuagug

SEQ ID NO: 114709 - RNA, 32 nt, Human
ccugaacucaggaggcggagguugcggugagc

SEQ ID NO: 114710 - RNA, 16 nt, Human
ccugaacuccaccucu

SEQ ID NO: 114711 - RNA, 22 nt, Human
ccugaacuccccagcccccuca

SEQ ID NO: 114712 - RNA, 32 nt, Human
ccugaacucucuggaccucagguuuccaucug

SEQ ID NO: 114713 - RNA, 32 nt, Human
ccugaacucugacuuuuacugccauucacuuu

SEQ ID NO: 114714 - RNA, 32 nt, Human
ccugaacucuugagacaacucucuccagcaau

SEQ ID NO: 114715 - RNA, 32 nt, Human
ccugaacucuuuacuggguuaccagguucaua

SEQ ID NO: 114716 - RNA, 24 nt, Human
ccugaacugaggagaugaccaggg

SEQ ID NO: 114717 - RNA, 32 nt, Human
ccugaacugaguccacagaacuccacucggaa

SEQ ID NO: 114718 - RNA, 32 nt, Human
ccugaacugcccccagcacuuccgagccccga

SEQ ID NO: 114719 - RNA, 32 nt, Human
ccugaacugcuggcggucugccacugccugau

SEQ ID NO: 114720 - RNA, 32 nt, Human
ccugaacuuguugcgacagagggacucacugg

SEQ ID NO: 114721 - RNA, 32 nt, Human
ccugaacuuuucuuucuuccaucaugcucuga

SEQ ID NO: 114722 - RNA, 32 nt, Human
ccugaagaaaagaaguuuuagugaagauggaa

SEQ ID NO: 114723 - RNA, 22 nt, Human
ccugaagaaaccacagguucca

SEQ ID NO: 114724 - RNA, 32 nt, Human
ccugaagaaagccucugaugggccuagaacag

SEQ ID NO: 114725 - RNA, 24 nt, Human
ccugaagaaucaucccaggugcca

SEQ ID NO: 114726 - RNA, 21 nt, Human
ccugaagaaugcuguucuuuc

SEQ ID NO: 114727 - RNA, 19 nt, Human
ccugaagacaccccugccc

SEQ ID NO: 114728 - RNA, 32 nt, Human
ccugaagacauauagaggcagaaggacaggaa

SEQ ID NO: 114729 - RNA, 23 nt, Human
ccugaagacccccacaugugcca

SEQ ID NO: 114730 - RNA, 32 nt, Human
ccugaagacuccaagaaaaugagugugcagau

SEQ ID NO: 114731 - RNA, 32 nt, Human
ccugaagacugaggcccugcagcuaccaggug

SEQ ID NO: 114732 - RNA, 22 nt, Human
ccugaagagacagugagugcca

SEQ ID NO: 114733 - RNA, 32 nt, Human
ccugaagagaccacuugcccacccuccugccc

SEQ ID NO: 114734 - RNA, 21 nt, Human
ccugaagagagcgucaggcca

SEQ ID NO: 114735 - RNA, 32 nt, Human
ccugaagagauugaaaaagaagagcaggcugc

SEQ ID NO: 114736 - RNA, 19 nt, Human
ccugaagaggcaggguaca

SEQ ID NO: 114737 - RNA, 23 nt, Human
ccugaagaggccauaugcuggca

SEQ ID NO: 114738 - RNA, 19 nt, Human
ccugaagaggccccgugcc

SEQ ID NO: 114739 - RNA, 21 nt, Human
ccugaagaggcccuuuugugc

SEQ ID NO: 114740 - RNA, 32 nt, Human
ccugaagaguacugaagauuuagaagggacug

SEQ ID NO: 114741 - RNA, 32 nt, Human
ccugaagauaaauauguguuggacaagcauag

SEQ ID NO: 114742 - RNA, 21 nt, Human
ccugaagaucaggcagggugc

SEQ ID NO: 114743 - RNA, 23 nt, Human
ccugaagaucaggcagggugcca

SEQ ID NO: 114744 - RNA, 32 nt, Human
ccugaagaugccggagcucccggcugagcaac

SEQ ID NO: 114745 - RNA, 32 nt, Human
ccugaagauggaacacugguccccuucacugg

SEQ ID NO: 114746 - RNA, 32 nt, Human
ccugaagauggcagaggagagcagcuguacca

SEQ ID NO: 114747 - RNA, 32 nt, Human
ccugaagcaaacauggaucaagaaacuguagg

SEQ ID NO: 114748 - RNA, 32 nt, Human
ccugaagcacuggcuccagccuuagggaaggu

SEQ ID NO: 114749 - RNA, 32 nt, Human
ccugaagcagauccuguauuugcuggagaaau

SEQ ID NO: 114750 - RNA, 20 nt, Human
ccugaagcaggcccacagug

SEQ ID NO: 114751 - RNA, 32 nt, Human
ccugaagccagccucucugccaagucacucag

SEQ ID NO: 114752 - RNA, 21 nt, Human
ccugaagccagccuucuucca

SEQ ID NO: 114753 - RNA, 32 nt, Human
ccugaagccagcugcccuaugggccugccggg

SEQ ID NO: 114754 - RNA, 32 nt, Human
ccugaagcccaagaggacacggcgggcacagu

SEQ ID NO: 114755 - RNA, 32 nt, Human
ccugaagcccagagaaguaaaggcacuugccc

SEQ ID NO: 114756 - RNA, 32 nt, Human
ccugaagcccaggaggaggaagaggaggcugg

SEQ ID NO: 114757 - RNA, 32 nt, Human
ccugaagcccccuucccugccugccugcugac

SEQ ID NO: 114758 - RNA, 32 nt, Human
ccugaagccgagaaauggaacucuuaacauuc

SEQ ID NO: 114759 - RNA, 32 nt, Human
ccugaagccuugauauuucuucauggcugccg

SEQ ID NO: 114760 - RNA, 20 nt, Human
ccugaagcgcagccccugug

SEQ ID NO: 114761 - RNA, 32 nt, Human
ccugaagcuauuccucucccggcggagguggc

SEQ ID NO: 114762 - RNA, 32 nt, Human
ccugaagcuccccucuuccucucuuccuccag

SEQ ID NO: 114763 - RNA, 32 nt, Human
ccugaagcucuuccauuggucaucauggaguu

SEQ ID NO: 114764 - RNA, 20 nt, Human
ccugaagcugcaguccacag

SEQ ID NO: 114765 - RNA, 32 nt, Human
ccugaagcugugucuguggagcugcggccacu

SEQ ID NO: 114766 - RNA, 32 nt, Human
ccugaagcuucagaacuagggaaacugauggu

SEQ ID NO: 114767 - RNA, 32 nt, Human
ccugaagcuuccaggguagcagcuggugggac

SEQ ID NO: 114768 - RNA, 18 nt, Human
ccugaaggagacagacug

SEQ ID NO: 114769 - RNA, 32 nt, Human
ccugaaggcaacgugacccaggagaacuuugu

SEQ ID NO: 114770 - RNA, 32 nt, Human
ccugaaggcaagggagagcaggcugcacagcu

SEQ ID NO: 114771 - RNA, 32 nt, Human
ccugaaggccaagcuugucacugugaaugagg

SEQ ID NO: 114772 - RNA, 32 nt, Human
ccugaaggcccagcagcaggccaaggcugugc

SEQ ID NO: 114773 - RNA, 32 nt, Human
ccugaagggaaggcaaaggcagaggaauuugg

SEQ ID NO: 114774 - RNA, 32 nt, Human
ccugaagggcugggaugcguuuuucuuggugu

SEQ ID NO: 114775 - RNA, 17 nt, Human
ccugaagggguccacag

SEQ ID NO: 114776 - RNA, 32 nt, Human
ccugaagggugaggagguggaaggagccgggu

SEQ ID NO: 114777 - RNA, 32 nt, Human
ccugaaggucugggucucaggacagugauguu

SEQ ID NO: 114778 - RNA, 32 nt, Human
ccugaaguagaucauaagacugucauguaaga

SEQ ID NO: 114779 - RNA, 32 nt, Human
ccugaaguaugugcaggagcugccucuggaag

SEQ ID NO: 114780 - RNA, 32 nt, Human
ccugaagucccagcuacucaggaggcugaggc

SEQ ID NO: 114781 - RNA, 32 nt, Human
ccugaaguccuggccccugugucauagcccca

SEQ ID NO: 114782 - RNA, 23 nt, Human
ccugaagucggagaagagccccu

SEQ ID NO: 114783 - RNA, 32 nt, Human
ccugaagucugcagucugccacacagaagaca

SEQ ID NO: 114784 - RNA, 32 nt, Human
ccugaagugagugagaggcacaugaagagaag

SEQ ID NO: 114785 - RNA, 24 nt, Human
ccugaagugcugggauuacaggca

SEQ ID NO: 114786 - RNA, 32 nt, Human
ccugaaguguuuauggggagauccuaguggcu

SEQ ID NO: 114787 - RNA, 32 nt, Human
ccugaaguuuuuagcaaggaagcuuccugucu

SEQ ID NO: 114788 - RNA, 32 nt, Human
ccugaauauauacuuguuugucauaguuuccu

SEQ ID NO: 114789 - RNA, 32 nt, Human
ccugaauaucuucucugcucacuuccaccauc

SEQ ID NO: 114790 - RNA, 32 nt, Human
ccugaaucauuucuuauaccuucugacagccc

SEQ ID NO: 114791 - RNA, 32 nt, Human
ccugaauccaggaguucgaagccagccugggc

SEQ ID NO: 114792 - RNA, 32 nt, Human
ccugaauccccucuuggacuccuggcuugcuu

SEQ ID NO: 114793 - RNA, 32 nt, Human
ccugaaucccugggggagacagaaggggcagg

SEQ ID NO: 114794 - RNA, 22 nt, Human
ccugaauccucucuuccuuccc

SEQ ID NO: 114795 - RNA, 32 nt, Human
ccugaaucucuaggauuuugucacuuggaguc

SEQ ID NO: 114796 - RNA, 32 nt, Human
ccugaaucucugcugaggcugccugccugccg

SEQ ID NO: 114797 - RNA, 32 nt, Human
ccugaaucuucuacugaacaucuugcuaugua

SEQ ID NO: 114798 - RNA, 32 nt, Human
ccugaaugaaaguggcgcgccgccccugacgu

SEQ ID NO: 114799 - RNA, 32 nt, Human
ccugaaugagccacagaagcgggacuguggca

SEQ ID NO: 114800 - RNA, 19 nt, Human
ccugaaugaugucacagug

SEQ ID NO: 114801 - RNA, 19 nt, Human
ccugaaugcacuccacagu

SEQ ID NO: 114802 - RNA, 32 nt, Human
ccugaaugccaucacccuccccagggcucugc

SEQ ID NO: 114803 - RNA, 32 nt, Human
ccugaauggucugucauugucugccuuuaaaa

SEQ ID NO: 114804 - RNA, 32 nt, Human
ccugaauguaauucuagcugagugcaaucuag

SEQ ID NO: 114805 - RNA, 32 nt, Human
ccugaauugcagccacacuuggccuucuagaa

SEQ ID NO: 114806 - RNA, 32 nt, Human
ccugaauuggaaaggaaaagaggcccaagugc

SEQ ID NO: 114807 - RNA, 32 nt, Human
ccugaauuuguacaagccacaggaagcuagau

SEQ ID NO: 114808 - RNA, 19 nt, Human
ccugacaaacaacaggugg

SEQ ID NO: 114809 - RNA, 32 nt, Human
ccugacaaagcccccaguuuccuguggcaggu

SEQ ID NO: 114810 - RNA, 32 nt, Human
ccugacaagaaguugauacaagaaaaggaaag

SEQ ID NO: 114811 - RNA, 22 nt, Human
ccugacaaggugcugccgcucg

SEQ ID NO: 114812 - RNA, 32 nt, Human
ccugacaaucuccuuggagucaaagcuccagg

SEQ ID NO: 114813 - RNA, 32 nt, Human
ccugacaauuccagcacucuacgacugauaug

SEQ ID NO: 114814 - RNA, 32 nt, Human
ccugacacaagaaguucuuguucuucaggaga

SEQ ID NO: 114815 - RNA, 32 nt, Human
ccugacacaagucccuguaucugaagucuagc

SEQ ID NO: 114816 - RNA, 23 nt, Human
ccugacacaaucccuacagggug

SEQ ID NO: 114817 - RNA, 32 nt, Human
ccugacacaaugguagcucugaagggagggga

SEQ ID NO: 114818 - RNA, 32 nt, Human
ccugacacacagauaccucacucaucccucca

SEQ ID NO: 114819 - RNA, 32 nt, Human
ccugacacagccccagaccccacaaagccuuc

SEQ ID NO: 114820 - RNA, 32 nt, Human
ccugacaccaaggacagcacuugucaucaucc

SEQ ID NO: 114821 - RNA, 32 nt, Human
ccugacacccaaggcuggauguuugugcuccg

SEQ ID NO: 114822 - RNA, 32 nt, Human
ccugacacccaccaggcggcccccuucggagc

SEQ ID NO: 114823 - RNA, 32 nt, Human
ccugacacccacccagauaaucuuuucaauau

SEQ ID NO: 114824 - RNA, 23 nt, Human
ccugacacccaguacaccggccg

SEQ ID NO: 114825 - RNA, 17 nt, Human
ccugacaccccaccucu

SEQ ID NO: 114826 - RNA, 22 nt, Human
ccugacacccuucuccccuucc

SEQ ID NO: 114827 - RNA, 32 nt, Human
ccugacacccuucuccccuuccugguagaccu

SEQ ID NO: 114828 - RNA, 32 nt, Human
ccugacaccgaccucaaccccaacaagacccu

SEQ ID NO: 114829 - RNA, 32 nt, Human
ccugacaccucugcacucccuugggcagagau

SEQ ID NO: 114830 - RNA, 21 nt, Human
ccugacaccuggaacugugca

SEQ ID NO: 114831 - RNA, 32 nt, Human
ccugacacucaggaaggcccaggcugggcagg

SEQ ID NO: 114832 - RNA, 32 nt, Human
ccugacacugagaaugaacaguaucacaggga

SEQ ID NO: 114833 - RNA, 32 nt, Human
ccugacacugcacgugggcguaguggggagca

SEQ ID NO: 114834 - RNA, 32 nt, Human
ccugacacugcacugagcacuuuaugagcuug

SEQ ID NO: 114835 - RNA, 32 nt, Human
ccugacacuguccccacacaaauagcuggcuu

SEQ ID NO: 114836 - RNA, 32 nt, Human
ccugacagaagcacaaggaacaguuugauaca

SEQ ID NO: 114837 - RNA, 32 nt, Human
ccugacagaauacuucuccucuuccucaccuu

SEQ ID NO: 114838 - RNA, 32 nt, Human
ccugacagagcaccugcuguuuuuaugaagcc

SEQ ID NO: 114839 - RNA, 21 nt, Human
ccugacagaggagcuuacacu

SEQ ID NO: 114840 - RNA, 32 nt, Human
ccugacagcaccugaggccccaugcacgggga

SEQ ID NO: 114841 - RNA, 32 nt, Human
ccugacagcccgggccucucccuccaguaguu

SEQ ID NO: 114842 - RNA, 32 nt, Human
ccugacagccuggcgacguggcgaagaugcac

SEQ ID NO: 114843 - RNA, 32 nt, Human
ccugacagccuggcuagcacaggaggacaugc

SEQ ID NO: 114844 - RNA, 32 nt, Human
ccugacagcugagaaguggcacagaccugcuu

SEQ ID NO: 114845 - RNA, 32 nt, Human
ccugacaggaacaugcuacugaaguuuauuuu

SEQ ID NO: 114846 - RNA, 24 nt, Human
ccugacaggacaaccuaggggcag

SEQ ID NO: 114847 - RNA, 18 nt, Human
ccugacaggaggggucgu

SEQ ID NO: 114848 - RNA, 32 nt, Human
ccugacaggcagcagaggguguggagaccucu

SEQ ID NO: 114849 - RNA, 21 nt, Human
ccugacaggccacaggagcag

SEQ ID NO: 114850 - RNA, 23 nt, Human
ccugacagggcuaggaggacagc

SEQ ID NO: 114851 - RNA, 21 nt, Human
ccugacagucagcacuuggca

SEQ ID NO: 114852 - RNA, 32 nt, Human
ccugacagugaugggacagggaggcuucagug

SEQ ID NO: 114853 - RNA, 32 nt, Human
ccugacagugcucgcugagaacucucaccagg

SEQ ID NO: 114854 - RNA, 21 nt, Human
ccugacaguucaucuuccuuu

SEQ ID NO: 114855 - RNA, 32 nt, Human
ccugacaucacugagaucugaggagcccuaca

SEQ ID NO: 114856 - RNA, 32 nt, Human
ccugacauccagcgacagagacggaagggguc

SEQ ID NO: 114857 - RNA, 18 nt, Human
ccugacaugcguggcaug

SEQ ID NO: 114858 - RNA, 32 nt, Human
ccugacaugucaggaaagcccuaaacugaaug

SEQ ID NO: 114859 - RNA, 32 nt, Human
ccugacauguguuuguauggggcaggcagggu

SEQ ID NO: 114860 - RNA, 32 nt, Human
ccugaccaaaaauaacagcaagcugagcacgc

SEQ ID NO: 114861 - RNA, 32 nt, Human
ccugaccaaauaaauggagaaagcuuccagaa

SEQ ID NO: 114862 - RNA, 19 nt, Human
ccugaccaacauggugaaa

SEQ ID NO: 114863 - RNA, 32 nt, Human
ccugaccaacauggugaaauauacaaaaauac

SEQ ID NO: 114864 - RNA, 32 nt, Human
ccugaccaacauggugagacccugucucuacu

SEQ ID NO: 114865 - RNA, 32 nt, Human
ccugaccaacucggacgccugggaagccuggu

SEQ ID NO: 114866 - RNA, 24 nt, Human
ccugaccaauauggugaaacccca

SEQ ID NO: 114867 - RNA, 21 nt, Human
ccugaccaauauggugaaagc

SEQ ID NO: 114868 - RNA, 32 nt, Human
ccugaccaaucacuguggccaggaggaugaua

SEQ ID NO: 114869 - RNA, 32 nt, Human
ccugaccacaaaggacuacauggagauguaca

SEQ ID NO: 114870 - RNA, 20 nt, Human
ccugaccacacgcccccaca

SEQ ID NO: 114871 - RNA, 32 nt, Human
ccugaccacauugccauaucugaaauggcugg

SEQ ID NO: 114872 - RNA, 32 nt, Human
ccugaccacccuccaucagcagucuccccucc

SEQ ID NO: 114873 - RNA, 17 nt, Human
ccugaccaccgcugccg

SEQ ID NO: 114874 - RNA, 32 nt, Human
ccugaccaccucugguucuccagcuccggucc

SEQ ID NO: 114875 - RNA, 20 nt, Human
ccugaccagagugacacugc

SEQ ID NO: 114876 - RNA, 32 nt, Human
ccugaccagcacuccugggcacucuggaagca

SEQ ID NO: 114877 - RNA, 32 nt, Human
ccugaccagccuggcccacccugcuccaccca

SEQ ID NO: 114878 - RNA, 32 nt, Human
ccugaccaucuucuccucccagggccacagcu

SEQ ID NO: 114879 - RNA, 32 nt, Human
ccugaccaugaagacggcggaggccaggagac

SEQ ID NO: 114880 - RNA, 32 nt, Human
ccugaccaugaggaguacagcagaaggugcuc

SEQ ID NO: 114881 - RNA, 32 nt, Human
ccugaccauggcccaacagcaaacaaaugaug

SEQ ID NO: 114882 - RNA, 21 nt, Human
ccugacccagaggaagccucu

SEQ ID NO: 114883 - RNA, 32 nt, Human
ccugacccagcauccucugccuucuaggaagu

SEQ ID NO: 114884 - RNA, 32 nt, Human
ccugacccagccaguccagcucugccuugccg

SEQ ID NO: 114885 - RNA, 21 nt, Human
ccugacccaggcucugugagg

SEQ ID NO: 114886 - RNA, 32 nt, Human
ccugaccccaauccccaaccucccaggacugu

SEQ ID NO: 114887 - RNA, 32 nt, Human
ccugaccccacacacucucugccaugcacaca

SEQ ID NO: 114888 - RNA, 28 nt, Human
ccugaccccagugcugcucuaagcaccg

SEQ ID NO: 114889 - RNA, 20 nt, Human
ccugaccccccucccuuccc

SEQ ID NO: 114890 - RNA, 32 nt, Human
ccugaccccucagcaagaacagccugccuggu

SEQ ID NO: 114891 - RNA, 32 nt, Human
ccugaccccucaugcucucuggcugggccagu

SEQ ID NO: 114892 - RNA, 22 nt, Human
ccugaccccuccccgcggggua

SEQ ID NO: 114893 - RNA, 32 nt, Human
ccugaccccugagagcugccccgugcugccuu

SEQ ID NO: 114894 - RNA, 32 nt, Human
ccugaccccugcccugggccuuaacacacauc

SEQ ID NO: 114895 - RNA, 32 nt, Human
ccugaccccuggguucugaggcugccaggguc

SEQ ID NO: 114896 - RNA, 18 nt, Human
ccugacccgcaaugggca

SEQ ID NO: 114897 - RNA, 32 nt, Human
ccugacccucaagugaucugcccaccuuggcc

SEQ ID NO: 114898 - RNA, 32 nt, Human
ccugacccucagucuccauucucccuccuacc

SEQ ID NO: 114899 - RNA, 32 nt, Human
ccugacccucaugauccacccaccucggccuc

SEQ ID NO: 114900 - RNA, 32 nt, Human
ccugacccucccacucccaucuccuuaccucu

SEQ ID NO: 114901 - RNA, 23 nt, Human
ccugacccucggccagcagggug

SEQ ID NO: 114902 - RNA, 32 nt, Human
ccugacccuuuagaaucauccccagccagacg

SEQ ID NO: 114903 - RNA, 32 nt, Human
ccugaccgacccgggccgcaucccugagcaag

SEQ ID NO: 114904 - RNA, 32 nt, Human
ccugaccgcccagcuccgccaggauuugcaga

SEQ ID NO: 114905 - RNA, 32 nt, Human
ccugaccgcuugaagccagaaguggccccucu

SEQ ID NO: 114906 - RNA, 32 nt, Human
ccugaccggggacuuccaggcauccccuggca

SEQ ID NO: 114907 - RNA, 32 nt, Human
ccugaccgugugcccagaucugugccaggcac

SEQ ID NO: 114908 - RNA, 32 nt, Human
ccugaccuaccuggccccugagcucuggagca

SEQ ID NO: 114909 - RNA, 18 nt, Human
ccugaccuagccauggca

SEQ ID NO: 114910 - RNA, 18 nt, Human
ccugaccuaggcuaggca

SEQ ID NO: 114911 - RNA, 18 nt, Human
ccugaccuaggugaucca

SEQ ID NO: 114912 - RNA, 32 nt, Human
ccugaccucaagaagcucagagucuaguacug

SEQ ID NO: 114913 - RNA, 32 nt, Human
ccugaccucaagcccauguggagagggccaac

SEQ ID NO: 114914 - RNA, 32 nt, Human
ccugaccucaagugauauguucaccucagccu

SEQ ID NO: 114915 - RNA, 19 nt, Human
ccugaccucacgcuggggc

SEQ ID NO: 114916 - RNA, 32 nt, Human
ccugaccucacugccugccuccucuaccccag

SEQ ID NO: 114917 - RNA, 18 nt, Human
ccugaccucagaggugca

SEQ ID NO: 114918 - RNA, 32 nt, Human
ccugaccucagcucagcuuuuguagauccuua

SEQ ID NO: 114919 - RNA, 18 nt, Human
ccugaccucaggugaucc

SEQ ID NO: 114920 - RNA, 19 nt, Human
ccugaccucaggugaucca

SEQ ID NO: 114921 - RNA, 22 nt, Human
ccugaccucaucuuccaccuca

SEQ ID NO: 114922 - RNA, 32 nt, Human
ccugaccuccacugacaucuacgacccgcccu

SEQ ID NO: 114923 - RNA, 32 nt, Human
ccugaccuccccgcggggagggugggugccgu

SEQ ID NO: 114924 - RNA, 32 nt, Human
ccugaccuccuugcuuuugcuugcagagccgc

SEQ ID NO: 114925 - RNA, 32 nt, Human
ccugaccucgugauuugccugccugggccucc

SEQ ID NO: 114926 - RNA, 32 nt, Human
ccugaccucguggaucugcccaccucggccuc

SEQ ID NO: 114927 - RNA, 32 nt, Human
ccugaccucucaccugcgccaggcugguacau

SEQ ID NO: 114928 - RNA, 32 nt, Human
ccugaccucucagaccaaacugauuccaggga

SEQ ID NO: 114929 - RNA, 19 nt, Human
ccugaccucuugcagggca

SEQ ID NO: 114930 - RNA, 18 nt, Human
ccugaccugagcuggggc

SEQ ID NO: 114931 - RNA, 32 nt, Human
ccugaccugaugaccagcucugugugaaacuc

SEQ ID NO: 114932 - RNA, 32 nt, Human
ccugaccugcaccagguggcaccaaggguccu

SEQ ID NO: 114933 - RNA, 32 nt, Human
ccugaccugcagcuuacacggccgugcugacu

SEQ ID NO: 114934 - RNA, 19 nt, Human
ccugaccugcaugcgggca

SEQ ID NO: 114935 - RNA, 32 nt, Human
ccugaccugccuggcuuccuuagcuugccccu

SEQ ID NO: 114936 - RNA, 32 nt, Human
ccugaccugccugggucucccugucucuccag

SEQ ID NO: 114937 - RNA, 32 nt, Human
ccugaccugcucccugcuccgugucuguccua

SEQ ID NO: 114938 - RNA, 19 nt, Human
ccugaccuggagaggggca

SEQ ID NO: 114939 - RNA, 32 nt, Human
ccugaccuggcugcugcucuugcuucagagcc

SEQ ID NO: 114940 - RNA, 32 nt, Human
ccugaccugguaagcugccacacaccuggcag

SEQ ID NO: 114941 - RNA, 32 nt, Human
ccugaccugucugcaccugugugacagccccu

SEQ ID NO: 114942 - RNA, 19 nt, Human
ccugaccuuagguucggca

SEQ ID NO: 114943 - RNA, 32 nt, Human
ccugaccuucacaccugcuccccagagaagcc

SEQ ID NO: 114944 - RNA, 18 nt, Human
ccugaccuucacgaaggg

SEQ ID NO: 114945 - RNA, 32 nt, Human
ccugaccuuccaggggccgaggugcugcuguc

SEQ ID NO: 114946 - RNA, 32 nt, Human
ccugaccuuccucuauccccugcccauccucc

SEQ ID NO: 114947 - RNA, 18 nt, Human
ccugaccuugagcccuca

SEQ ID NO: 114948 - RNA, 32 nt, Human
ccugaccuugucugacccuugugccucuaaac

SEQ ID NO: 114949 - RNA, 32 nt, Human
ccugacgagggcacucugagauagcacugcuc

SEQ ID NO: 114950 - RNA, 20 nt, Human
ccugacgagggugggcgcgg

SEQ ID NO: 114951 - RNA, 32 nt, Human
ccugacgagggugggcgcggagggagcagccg

SEQ ID NO: 114952 - RNA, 32 nt, Human
ccugacgggcccugucuucagguucuagaaac

SEQ ID NO: 114953 - RNA, 19 nt, Human
ccugacgucaggugaucca

SEQ ID NO: 114954 - RNA, 32 nt, Human
ccugacguuggccuuuucacuacaggcacccg

SEQ ID NO: 114955 - RNA, 32 nt, Human
ccugacuaaggccucagacuagggcgggaggg

SEQ ID NO: 114956 - RNA, 32 nt, Human
ccugacuagaccccacccugagguccugcauu

SEQ ID NO: 114957 - RNA, 32 nt, Human
ccugacuaugaauucaacguguggacccgacc

SEQ ID NO: 114958 - RNA, 32 nt, Human
ccugacuauggcccaacagcaaacaaaugaug

SEQ ID NO: 114959 - RNA, 21 nt, Human
ccugacucaaccuggcuacug

SEQ ID NO: 114960 - RNA, 32 nt, Human
ccugacucaccauacauuaagaaaaaucagga

SEQ ID NO: 114961 - RNA, 32 nt, Human
ccugacucacugcucuuugcuguugccugagg

SEQ ID NO: 114962 - RNA, 32 nt, Human
ccugacucacuguuuucccuuccacagucccc

SEQ ID NO: 114963 - RNA, 32 nt, Human
ccugacucagcugaaccuggauccugugcaua

SEQ ID NO: 114964 - RNA, 32 nt, Human
ccugacucagugaaggaagcuguugggauaca

SEQ ID NO: 114965 - RNA, 32 nt, Human
ccugacucauacccuucuugcuucagacucca

SEQ ID NO: 114966 - RNA, 32 nt, Human
ccugacucaucgggggcuccgggucacaugcg

SEQ ID NO: 114967 - RNA, 32 nt, Human
ccugacuccaaagccugugcucuuaaccacua

SEQ ID NO: 114968 - RNA, 32 nt, Human
ccugacuccaucucccugcaccagccuugcaa

SEQ ID NO: 114969 - RNA, 32 nt, Human
ccugacuccaugggaccccaaagaagcagaug

SEQ ID NO: 114970 - RNA, 32 nt, Human
ccugacucggccugccccagccucugcuucac

SEQ ID NO: 114971 - RNA, 32 nt, Human
ccugacucucaccucugugcccccagcuuccg

SEQ ID NO: 114972 - RNA, 32 nt, Human
ccugacucucccugaauagcaucugaagucuu

SEQ ID NO: 114973 - RNA, 32 nt, Human
ccugacucuccucucuugccugacucuagaca

SEQ ID NO: 114974 - RNA, 32 nt, Human
ccugacucuccugaauuacuagaaugucagca

SEQ ID NO: 114975 - RNA, 32 nt, Human
ccugacucucuccugauggugggcccucugug

SEQ ID NO: 114976 - RNA, 32 nt, Human
ccugacucuuccagccuccauguccagaccua

SEQ ID NO: 114977 - RNA, 32 nt, Human
ccugacucuuccccauaaucacugaccagccu

SEQ ID NO: 114978 - RNA, 32 nt, Human
ccugacucuucugucucuugaggucccuugaa

SEQ ID NO: 114979 - RNA, 32 nt, Human
ccugacugaagagagccuguggccauguaaaa

SEQ ID NO: 114980 - RNA, 32 nt, Human
ccugacugcaaaccucuggccuggaaccgauu

SEQ ID NO: 114981 - RNA, 32 nt, Human
ccugacugcacuccagccuggguggcaaagca

SEQ ID NO: 114982 - RNA, 20 nt, Human
ccugacugcaggaggcacag

SEQ ID NO: 114983 - RNA, 21 nt, Human
ccugacugccaccucggggcu

SEQ ID NO: 114984 - RNA, 31 nt, Human
ccugacugccucuuggguugucaaaacccaa

SEQ ID NO: 114985 - RNA, 22 nt, Human
ccugacugcuguccccuaccca

SEQ ID NO: 114986 - RNA, 32 nt, Human
ccugacugcuuucuccaacuguucacagcaaa

SEQ ID NO: 114987 - RNA, 32 nt, Human
ccugacuggagcaccuucuaaaucuaagauuc

SEQ ID NO: 114988 - RNA, 32 nt, Human
ccugacuggccaaacccuugcuuuccugggcc

SEQ ID NO: 114989 - RNA, 22 nt, Human
ccugacugggaguccccugcca

SEQ ID NO: 114990 - RNA, 32 nt, Human
ccugacugggggugagggagaaggaggagaga

SEQ ID NO: 114991 - RNA, 32 nt, Human
ccugacuguaccauuuauaaacagcuucacuu

SEQ ID NO: 114992 - RNA, 32 nt, Human
ccugacuguccuaugggcuucuccagugucca

SEQ ID NO: 114993 - RNA, 32 nt, Human
ccugacugugagagaagcccugcuggauggug

SEQ ID NO: 114994 - RNA, 32 nt, Human
ccugacuguggaaaauaagucgcuguuugguu

SEQ ID NO: 114995 - RNA, 32 nt, Human
ccugacuguguucagugccuuggagcagaaag

SEQ ID NO: 114996 - RNA, 32 nt, Human
ccugacuuaagaguuuucaagaugucaaacuu

SEQ ID NO: 114997 - RNA, 32 nt, Human
ccugacuuagaagaagugggugguggcagccu

SEQ ID NO: 114998 - RNA, 19 nt, Human
ccugacuucaggcuuuccu

SEQ ID NO: 114999 - RNA, 32 nt, Human
ccugacuucauccucccuucucuguccacacc

SEQ ID NO: 115000 - RNA, 32 nt, Human
ccugacuuccaaaaucagugccuuuggauuca

SEQ ID NO: 115001 - RNA, 16 nt, Human
ccugacuuccaccucu

SEQ ID NO: 115002 - RNA, 32 nt, Human
ccugacuucucccagccucgagaauugauaac

SEQ ID NO: 115003 - RNA, 32 nt, Human
ccugacuugaacucugggugacccugggcacc

SEQ ID NO: 115004 - RNA, 32 nt, Human
ccugacuugggcuagugggcagaggaaugccu

SEQ ID NO: 115005 - RNA, 24 nt, Human
ccugacuugugauccgccugccuc

SEQ ID NO: 115006 - RNA, 32 nt, Human
ccugacuuguucuccccuuccuugggaagggc

SEQ ID NO: 115007 - RNA, 32 nt, Human
ccugacuuuaccccuuucaagccugggguugu

SEQ ID NO: 115008 - RNA, 32 nt, Human
ccugacuuucuagccauuaauaaagagaacug

SEQ ID NO: 115009 - RNA, 20 nt, Human
ccugagaaaaauaaaaucag

SEQ ID NO: 115010 - RNA, 21 nt, Human
ccugagaaacaguucagcagu

SEQ ID NO: 115011 - RNA, 23 nt, Human
ccugagaaagggaggagagacag

SEQ ID NO: 115012 - RNA, 18 nt, Human
ccugagaacaauggugug

SEQ ID NO: 115013 - RNA, 21 nt, Human
ccugagaacacaaacauuugg

SEQ ID NO: 115014 - RNA, 32 nt, Human
ccugagaacagcuuuagucauggaauacuggg

SEQ ID NO: 115015 - RNA, 32 nt, Human
ccugagaaccugcuggugugggauggugcugc

SEQ ID NO: 115016 - RNA, 32 nt, Human
ccugagaaccuuccaaaaacccgcccgaauuc

SEQ ID NO: 115017 - RNA, 19 nt, Human
ccugagaacuaauauguua

SEQ ID NO: 115018 - RNA, 32 nt, Human
ccugagaacucuccaccugcaggaugagccgg

SEQ ID NO: 115019 - RNA, 32 nt, Human
ccugagaacuggccuccagccgguguccucau

SEQ ID NO: 115020 - RNA, 22 nt, Human
ccugagaagaccaagauaucag

SEQ ID NO: 115021 - RNA, 32 nt, Human
ccugagaagccagacuuccacuguggaagagc

SEQ ID NO: 115022 - RNA, 24 nt, Human
ccugagaagcccgugagaaacgug

SEQ ID NO: 115023 - RNA, 20 nt, Human
ccugagaagggcaggaucag

SEQ ID NO: 115024 - RNA, 32 nt, Human
ccugagaagggccugauuugcagcaucaugau

SEQ ID NO: 115025 - RNA, 32 nt, Human
ccugagaagggccugggcuacaacccugggca

SEQ ID NO: 115026 - RNA, 21 nt, Human
ccugagaaggggauggaugag

SEQ ID NO: 115027 - RNA, 22 nt, Human
ccugagaagggggacaaagcag

SEQ ID NO: 115028 - RNA, 24 nt, Human
ccugagaaguggagguugugguga

SEQ ID NO: 115029 - RNA, 23 nt, Human
ccugagaaucccagcuacucaga

SEQ ID NO: 115030 - RNA, 32 nt, Human
ccugagaauggagaaggagaagcuacaaagug

SEQ ID NO: 115031 - RNA, 32 nt, Human
ccugagaaugucccguuuucgaggcugcagua

SEQ ID NO: 115032 - RNA, 18 nt, Human
ccugagaauguuucugca

SEQ ID NO: 115033 - RNA, 32 nt, Human
ccugagaauuacaaugaauaauaauuugcuuu

SEQ ID NO: 115034 - RNA, 32 nt, Human
ccugagacacucaccucucugccucgcaguug

SEQ ID NO: 115035 - RNA, 32 nt, Human
ccugagacagaggcagcagugauacccaccug

SEQ ID NO: 115036 - RNA, 32 nt, Human
ccugagacauacgcucgugacacugccccacc

SEQ ID NO: 115037 - RNA, 32 nt, Human
ccugagaccaccgacauccucagguuccugac

SEQ ID NO: 115038 - RNA, 32 nt, Human
ccugagaccagcuugggcaacaugguggagcc

SEQ ID NO: 115039 - RNA, 32 nt, Human
ccugagaccaggagguugaggcugcagugagc

SEQ ID NO: 115040 - RNA, 21 nt, Human
ccugagacccagccacugccu

SEQ ID NO: 115041 - RNA, 32 nt, Human
ccugagacccagccaggcugggccuagcucca

SEQ ID NO: 115042 - RNA, 32 nt, Human
ccugagaccccacccugcccccaaacuggcua

SEQ ID NO: 115043 - RNA, 32 nt, Human
ccugagacccuugugcuaagucaagaggcuca

SEQ ID NO: 115044 - RNA, 32 nt, Human
ccugagacucgcuugaacccagggggcggagc

SEQ ID NO: 115045 - RNA, 32 nt, Human
ccugagacuuaauguaaccacuuaauguaauc

SEQ ID NO: 115046 - RNA, 32 nt, Human
ccugagagaccagugagcucacugugacccau

SEQ ID NO: 115047 - RNA, 32 nt, Human
ccugagagagcaccuucuuaucacagaaagug

SEQ ID NO: 115048 - RNA, 32 nt, Human
ccugagagagcugagggacaugaagaggagau

SEQ ID NO: 115049 - RNA, 32 nt, Human
ccugagagaggaggggaggaagcuugauacug

SEQ ID NO: 115050 - RNA, 32 nt, Human
ccugagagagugaggacaggcugcgggaggag

SEQ ID NO: 115051 - RNA, 22 nt, Human
ccugagagaucaucuucacuuu

SEQ ID NO: 115052 - RNA, 32 nt, Human
ccugagagcagcagaucucagccagaugcugc

SEQ ID NO: 115053 - RNA, 23 nt, Human
ccugagagcugggacuacaggcg

SEQ ID NO: 115054 - RNA, 32 nt, Human
ccugagagcuggucugcguuucccaggcgcgg

SEQ ID NO: 115055 - RNA, 32 nt, Human
ccugagaggcaccagccccaauccuguccgug

SEQ ID NO: 115056 - RNA, 24 nt, Human
ccugagaggcagagguuacaguga

SEQ ID NO: 115057 - RNA, 24 nt, Human
ccugagaggcagagguugcaguga

SEQ ID NO: 115058 - RNA, 32 nt, Human
ccugagaggcagagguugcagugagccaagau

SEQ ID NO: 115059 - RNA, 32 nt, Human
ccugagaggcagagguugcagugagccgagag

SEQ ID NO: 115060 - RNA, 32 nt, Human
ccugagaggcagagguugcagugagccgaggu

SEQ ID NO: 115061 - RNA, 23 nt, Human
ccugagaggcggagguugcagug

SEQ ID NO: 115062 - RNA, 24 nt, Human
ccugagaggcggagguugcaguga

SEQ ID NO: 115063 - RNA, 32 nt, Human
ccugagaggcggagguugcagugagccaaaau

SEQ ID NO: 115064 - RNA, 32 nt, Human
ccugagaggcggagguugcagugagccaagau

SEQ ID NO: 115065 - RNA, 32 nt, Human
ccugagaggcggagguugcagugagccgagau

SEQ ID NO: 115066 - RNA, 32 nt, Human
ccugagaggcucccuuccccaguccugccaga

SEQ ID NO: 115067 - RNA, 32 nt, Human
ccugagaggcuggaggcguuggugcugaaggc

SEQ ID NO: 115068 - RNA, 32 nt, Human
ccugagaggggcugcuggcugaauuagguuag

SEQ ID NO: 115069 - RNA, 23 nt, Human
ccugagaggugagguugcaguga

SEQ ID NO: 115070 - RNA, 24 nt, Human
ccugagagguggagguuacaguga

SEQ ID NO: 115071 - RNA, 22 nt, Human
ccugagagguggagguugcagu

SEQ ID NO: 115072 - RNA, 23 nt, Human
ccugagagguggagguugcagug

SEQ ID NO: 115073 - RNA, 24 nt, Human
ccugagagguggagguugcaguga

SEQ ID NO: 115074 - RNA, 32 nt, Human
ccugagagguggagguugcagugagccgagau

SEQ ID NO: 115075 - RNA, 24 nt, Human
ccugagagguggagguuucaguga

SEQ ID NO: 115076 - RNA, 32 nt, Human
ccugagagguggagguuucagugagccgagau

SEQ ID NO: 115077 - RNA, 31 nt, Human
ccugagagguguuuaggcacagcagagggga

SEQ ID NO: 115078 - RNA, 32 nt, Human
ccugagagguugccuuuccuuuuccucuccca

SEQ ID NO: 115079 - RNA, 32 nt, Human
ccugagaguaagcagaccuggguuggaagguc

SEQ ID NO: 115080 - RNA, 32 nt, Human
ccugagaguccccucccuucucccacacucgu

SEQ ID NO: 115081 - RNA, 22 nt, Human
ccugagaguccccugggucuaa

SEQ ID NO: 115082 - RNA, 32 nt, Human
ccugagaguguguguugguggcugugcgcacg

SEQ ID NO: 115083 - RNA, 32 nt, Human
ccugagauaagaaacauaguuuuauacauuau

SEQ ID NO: 115084 - RNA, 32 nt, Human
ccugagaucacgucuccuacugugucgucauu

SEQ ID NO: 115085 - RNA, 32 nt, Human
ccugagauccugggucgugaccagccuggcuu

SEQ ID NO: 115086 - RNA, 32 nt, Human
ccugagaucugcacagucagaaggacggcagg

SEQ ID NO: 115087 - RNA, 32 nt, Human
ccugagaucuggguuuaacgaucugggcuuug

SEQ ID NO: 115088 - RNA, 32 nt, Human
ccugagaucuugguagaggaggccccuccugc

SEQ ID NO: 115089 - RNA, 25 nt, Human
ccugagaugaggauuuaaggaucag

SEQ ID NO: 115090 - RNA, 32 nt, Human
ccugagaugauaccugaccaccacuucuggga

SEQ ID NO: 115091 - RNA, 32 nt, Human
ccugagaugaugccuucuuugauauucucuua

SEQ ID NO: 115092 - RNA, 32 nt, Human
ccugagaugcaaacuggaguucugguaccaga

SEQ ID NO: 115093 - RNA, 32 nt, Human
ccugagaugcaaccucaagucuuaggaaaaga

SEQ ID NO: 115094 - RNA, 32 nt, Human
ccugagcaaauucccucaaagugaacucuugu

SEQ ID NO: 115095 - RNA, 32 nt, Human
ccugagcaacacagcaagaccuugucucuacg

SEQ ID NO: 115096 - RNA, 32 nt, Human
ccugagcaacagagugagacccugucucuuaa

SEQ ID NO: 115097 - RNA, 32 nt, Human
ccugagcaacauaacaagacccugucucaaau

SEQ ID NO: 115098 - RNA, 31 nt, Human
ccugagcaacauaaugagacccugucucuac

SEQ ID NO: 115099 - RNA, 32 nt, Human
ccugagcaacauagugagacccugucucaaac

SEQ ID NO: 115100 - RNA, 32 nt, Human
ccugagcaacauagugagacccugucucaaua

SEQ ID NO: 115101 - RNA, 32 nt, Human
ccugagcaacaucucgggaguccucuagcagg

SEQ ID NO: 115102 - RNA, 32 nt, Human
ccugagcaagaaugugcuguggcagagggggu

SEQ ID NO: 115103 - RNA, 32 nt, Human
ccugagcaagucagaaguuacucucaucaguc

SEQ ID NO: 115104 - RNA, 32 nt, Human
ccugagcaagucccggcccugcccucagcgag

SEQ ID NO: 115105 - RNA, 32 nt, Human
ccugagcaauugagcaucugugccucaggacu

SEQ ID NO: 115106 - RNA, 32 nt, Human
ccugagcacaggaguuggaggcugcaguaagc

SEQ ID NO: 115107 - RNA, 32 nt, Human
ccugagcacauggugcccaacuguagcccuuc

SEQ ID NO: 115108 - RNA, 32 nt, Human
ccugagcaccaaagucgcagggccaguugcag

SEQ ID NO: 115109 - RNA, 21 nt, Human
ccugagcaccuaucgcgggga

SEQ ID NO: 115110 - RNA, 32 nt, Human
ccugagcaccucccagccccugccccucaugc

SEQ ID NO: 115111 - RNA, 23 nt, Human
ccugagcaccuuucuccccuccc

SEQ ID NO: 115112 - RNA, 32 nt, Human
ccugagcacuacggacagggaggcaggugcca

SEQ ID NO: 115113 - RNA, 32 nt, Human
ccugagcacucaccaggugagaugucuagggu

SEQ ID NO: 115114 - RNA, 32 nt, Human
ccugagcagaaaacaggaagaaccaggcucgg

SEQ ID NO: 115115 - RNA, 18 nt, Human
ccugagcagagcaugugg

SEQ ID NO: 115116 - RNA, 21 nt, Human
ccugagcagaggcgggugugg

SEQ ID NO: 115117 - RNA, 24 nt, Human
ccugagcagccucucaccacugcc

SEQ ID NO: 115118 - RNA, 23 nt, Human
ccugagcagcucagagucaggaa

SEQ ID NO: 115119 - RNA, 32 nt, Human
ccugagcagcuggccccagcugugaucaucca

SEQ ID NO: 115120 - RNA, 32 nt, Human
ccugagcaggaagacuccuuccccacuucugu

SEQ ID NO: 115121 - RNA, 32 nt, Human
ccugagcaggcaaggagcucuugcauuugcug

SEQ ID NO: 115122 - RNA, 23 nt, Human
ccugagcaggcacccacuucccu

SEQ ID NO: 115123 - RNA, 19 nt, Human
ccugagcaggugggcgugg

SEQ ID NO: 115124 - RNA, 32 nt, Human
ccugagcauaagaacugggauugcaggcguga

SEQ ID NO: 115125 - RNA, 32 nt, Human
ccugagcaucucuccuuccucucccagaucgu

SEQ ID NO: 115126 - RNA, 32 nt, Human
ccugagcaugggaggcagagguugcagugagc

SEQ ID NO: 115127 - RNA, 32 nt, Human
ccugagccaaguucucuggcacuugcuggaca

SEQ ID NO: 115128 - RNA, 22 nt, Human
ccugagccaccgcgcccagcca

SEQ ID NO: 115129 - RNA, 32 nt, Human
ccugagccaccucagggauacaggguccccca

SEQ ID NO: 115130 - RNA, 32 nt, Human
ccugagccaccugaaacucagcauaucuacga

SEQ ID NO: 115131 - RNA, 32 nt, Human
ccugagccacucacagcacgaccagagaacag

SEQ ID NO: 115132 - RNA, 32 nt, Human
ccugagccacugccaacauuucccuucuucca

SEQ ID NO: 115133 - RNA, 19 nt, Human
ccugagccaggacaugugg

SEQ ID NO: 115134 - RNA, 32 nt, Human
ccugagccagggucacccuuguggggccugga

SEQ ID NO: 115135 - RNA, 32 nt, Human
ccugagccauuugaggaggaccaggcauccaa

SEQ ID NO: 115136 - RNA, 32 nt, Human
ccugagcccacaaggacauuccugccugggga

SEQ ID NO: 115137 - RNA, 26 nt, Human
ccugagcccaccgugccuggccuuuc

SEQ ID NO: 115138 - RNA, 32 nt, Human
ccugagcccagccugggggccagagcacccca

SEQ ID NO: 115139 - RNA, 32 nt, Human
ccugagcccaggaagcagagauuccagugagu

SEQ ID NO: 115140 - RNA, 32 nt, Human
ccugagcccaggagcagaggacccaguuguua

SEQ ID NO: 115141 - RNA, 32 nt, Human
ccugagcccaggagcucaagauugcagugagc

SEQ ID NO: 115142 - RNA, 32 nt, Human
ccugagcccaggagcugagucaccuccuccac

SEQ ID NO: 115143 - RNA, 32 nt, Human
ccugagcccaggaggucaagacugcagugagc

SEQ ID NO: 115144 - RNA, 32 nt, Human
ccugagcccaggaggucaaggcuacagugagc

SEQ ID NO: 115145 - RNA, 32 nt, Human
ccugagcccaggagguggaaacugcagagagu

SEQ ID NO: 115146 - RNA, 32 nt, Human
ccugagcccaggagguggaggcugcagugagc

SEQ ID NO: 115147 - RNA, 32 nt, Human
ccugagcccaggagguggagguugcacugagc

SEQ ID NO: 115148 - RNA, 32 nt, Human
ccugagcccaggagguggagguugcagugagc

SEQ ID NO: 115149 - RNA, 32 nt, Human
ccugagcccaggaguucaagaccagcuugugc

SEQ ID NO: 115150 - RNA, 32 nt, Human
ccugagcccaggaguucgagaccagccugggc

SEQ ID NO: 115151 - RNA, 32 nt, Human
ccugagcccaggaguuugagaccagucuaagc

SEQ ID NO: 115152 - RNA, 32 nt, Human
ccugagcccaggaguuugagacuacaguagcu

SEQ ID NO: 115153 - RNA, 32 nt, Human
ccugagcccaggaguuugaggguggagugagc

SEQ ID NO: 115154 - RNA, 32 nt, Human
ccugagcccaggaguuuggaccagccugggca

SEQ ID NO: 115155 - RNA, 32 nt, Human
ccugagcccagggaaguugaggcugcugugag

SEQ ID NO: 115156 - RNA, 32 nt, Human
ccugagcccagggaggucaaggcugcagugag

SEQ ID NO: 115157 - RNA, 30 nt, Human
ccugagcccaugagaucagaaagacacagg

SEQ ID NO: 115158 - RNA, 32 nt, Human
ccugagccccacagcaagucugccaugggccg

SEQ ID NO: 115159 - RNA, 20 nt, Human
ccugagccccaccuccucca

SEQ ID NO: 115160 - RNA, 23 nt, Human
ccugagccccagggaccccucac

SEQ ID NO: 115161 - RNA, 32 nt, Human
ccugagccccaggucucuucagucugggcaca

SEQ ID NO: 115162 - RNA, 21 nt, Human
ccugagccccccucccuuccc

SEQ ID NO: 115163 - RNA, 32 nt, Human
ccugagcccccugaguucccaaagggagggug

SEQ ID NO: 115164 - RNA, 32 nt, Human
ccugagccccucaucugaucccccucucuuuc

SEQ ID NO: 115165 - RNA, 32 nt, Human
ccugagccccucucugcugccagacacccccu

SEQ ID NO: 115166 - RNA, 32 nt, Human
ccugagccccuugguugacccugcacucgucc

SEQ ID NO: 115167 - RNA, 32 nt, Human
ccugagcccgggcucaucagccgccuuccugg

SEQ ID NO: 115168 - RNA, 18 nt, Human
ccugagcccucccaggga

SEQ ID NO: 115169 - RNA, 32 nt, Human
ccugagcccucccagggacccuccacgaccag

SEQ ID NO: 115170 - RNA, 20 nt, Human
ccugagcccucuucucucca

SEQ ID NO: 115171 - RNA, 32 nt, Human
ccugagcccugccuaugcucaaagccagcagg

SEQ ID NO: 115172 - RNA, 32 nt, Human
ccugagcccugccucggcugccucaggggaga

SEQ ID NO: 115173 - RNA, 32 nt, Human
ccugagcccugcggaaccucggcgcucggccc

SEQ ID NO: 115174 - RNA, 32 nt, Human
ccugagcccuggaggcugggccugcccacucc

SEQ ID NO: 115175 - RNA, 32 nt, Human
ccugagcccuguccaagguucccucuugucag

SEQ ID NO: 115176 - RNA, 19 nt, Human
ccugagcccuucccuuccc

SEQ ID NO: 115177 - RNA, 18 nt, Human
ccugagccgccgccgccg

SEQ ID NO: 115178 - RNA, 20 nt, Human
ccugagccgccucauggcca

SEQ ID NO: 115179 - RNA, 32 nt, Human
ccugagccgggaaccaucucccaggaccuugc

SEQ ID NO: 115180 - RNA, 32 nt, Human
ccugagccuaggaguuuaaaccagccugggca

SEQ ID NO: 115181 - RNA, 32 nt, Human
ccugagccuauagagcccccaggagacuggga

SEQ ID NO: 115182 - RNA, 32 nt, Human
ccugagccuauuuauucucuagcuugcuuuaa

SEQ ID NO: 115183 - RNA, 32 nt, Human
ccugagccucacugccaccuaggcagggugau

SEQ ID NO: 115184 - RNA, 32 nt, Human
ccugagccucagaaaagagagaacagggagag

SEQ ID NO: 115185 - RNA, 32 nt, Human
ccugagccuccccaaaggcagcuccuggggac

SEQ ID NO: 115186 - RNA, 32 nt, Human
ccugagccuccucugcugagccagcccgugcg

SEQ ID NO: 115187 - RNA, 20 nt, Human
ccugagccucgagcugcucu

SEQ ID NO: 115188 - RNA, 32 nt, Human
ccugagccucucucccugugucucuguauccc

SEQ ID NO: 115189 - RNA, 32 nt, Human
ccugagccucugaaagugaacuccccgaccag

SEQ ID NO: 115190 - RNA, 32 nt, Human
ccugagccugcucucugaucagcuggaucccc

SEQ ID NO: 115191 - RNA, 32 nt, Human
ccugagccuggagauguagaggcugcaaugag

SEQ ID NO: 115192 - RNA, 32 nt, Human
ccugagccuggagauguagaggcugcagugag

SEQ ID NO: 115193 - RNA, 32 nt, Human
ccugagccuggccaggacucaggcuguuccug

SEQ ID NO: 115194 - RNA, 32 nt, Human
ccugagccugggaaguggaaguugcagugagc

SEQ ID NO: 115195 - RNA, 32 nt, Human
ccugagccugggaaguggagguugcaguaggc

SEQ ID NO: 115196 - RNA, 32 nt, Human
ccugagccugggaggucgaggcugcagcgagc

SEQ ID NO: 115197 - RNA, 32 nt, Human
ccugagccugguaggcugaggcugcagugagc

SEQ ID NO: 115198 - RNA, 32 nt, Human
ccugagccuguggcugcccucuccccagccug

SEQ ID NO: 115199 - RNA, 32 nt, Human
ccugagccuuaggugagacugcagccucugcu

SEQ ID NO: 115200 - RNA, 32 nt, Human
ccugagccuucccacuuuauccuucacaaaca

SEQ ID NO: 115201 - RNA, 32 nt, Human
ccugagccuuucucccaaguuccagagccucu

SEQ ID NO: 115202 - RNA, 32 nt, Human
ccugagcgccgcucccucucaggaugaaggug

SEQ ID NO: 115203 - RNA, 21 nt, Human
ccugagcgucccaguacacug

SEQ ID NO: 115204 - RNA, 28 nt, Human
ccugagcuacagagcaagacucugccuc

SEQ ID NO: 115205 - RNA, 19 nt, Human
ccugagcuacugcuucuaa

SEQ ID NO: 115206 - RNA, 32 nt, Human
ccugagcuaggaguggagaaucagggccaagu

SEQ ID NO: 115207 - RNA, 19 nt, Human
ccugagcuagggggugugg

SEQ ID NO: 115208 - RNA, 20 nt, Human
ccugagcuaucagccuucca

SEQ ID NO: 115209 - RNA, 32 nt, Human
ccugagcucaagaggccgagguugcagugagc

SEQ ID NO: 115210 - RNA, 32 nt, Human
ccugagcucaagagguugaggcugcagugagc

SEQ ID NO: 115211 - RNA, 32 nt, Human
ccugagcucaaggagaugcaggcugcaguggg

SEQ ID NO: 115212 - RNA, 32 nt, Human
ccugagcucaggaguccaagaccagccugggc

SEQ ID NO: 115213 - RNA, 32 nt, Human
ccugagcucaggaguuugagaccagccugucu

SEQ ID NO: 115214 - RNA, 32 nt, Human
ccugagcuccacccuccccucuucuugcggca

SEQ ID NO: 115215 - RNA, 32 nt, Human
ccugagcuccaguccugaguuugcuacuuacu

SEQ ID NO: 115216 - RNA, 18 nt, Human
ccugagcuccauucuucc

SEQ ID NO: 115217 - RNA, 32 nt, Human
ccugagcuccugcuucgcgccugcugcucugc

SEQ ID NO: 115218 - RNA, 32 nt, Human
ccugagcucuacaaaaacacacugcuucacuu

SEQ ID NO: 115219 - RNA, 32 nt, Human
ccugagcucucggcuccuccuccgucuucagg

SEQ ID NO: 115220 - RNA, 32 nt, Human
ccugagcucugacaguguggggaagugucccu

SEQ ID NO: 115221 - RNA, 32 nt, Human
ccugagcucuggagguggaggcugccaugagc

SEQ ID NO: 115222 - RNA, 32 nt, Human
ccugagcucuucaggcugcauccucuggugag

SEQ ID NO: 115223 - RNA, 32 nt, Human
ccugagcugaauccuucaaaggcacagcaggc

SEQ ID NO: 115224 - RNA, 24 nt, Human
ccugagcugaaugcugccaucccu

SEQ ID NO: 115225 - RNA, 32 nt, Human
ccugagcugagugaggagugcccaggagagau

SEQ ID NO: 115226 - RNA, 32 nt, Human
ccugagcugcagcccgcuggcugcugagcgca

SEQ ID NO: 115227 - RNA, 32 nt, Human
ccugagcugccuccuccauggcuuuccugguu

SEQ ID NO: 115228 - RNA, 32 nt, Human
ccugagcugucccgagcuaggugacagcguac

SEQ ID NO: 115229 - RNA, 32 nt, Human
ccugagcugugcccucuccauuccacugcugu

SEQ ID NO: 115230 - RNA, 32 nt, Human
ccugagcuuccucuucuccaucccugagacau

SEQ ID NO: 115231 - RNA, 32 nt, Human
ccugagcuugguauuugucaugugccaacucu

SEQ ID NO: 115232 - RNA, 20 nt, Human
ccugagcuuuuggggcgcgg

SEQ ID NO: 115233 - RNA, 24 nt, Human
ccugaggaacccuggcucuuuucu

SEQ ID NO: 115234 - RNA, 20 nt, Human
ccugaggaagaaauggggca

SEQ ID NO: 115235 - RNA, 18 nt, Human
ccugaggaagacagaugg

SEQ ID NO: 115236 - RNA, 32 nt, Human
ccugaggaagaggaacucuacacuucucuccu

SEQ ID NO: 115237 - RNA, 32 nt, Human
ccugaggaagccccugaccuucuugaauaacc

SEQ ID NO: 115238 - RNA, 32 nt, Human
ccugaggaaggagcccgauuacaaggauauuu

SEQ ID NO: 115239 - RNA, 32 nt, Human
ccugaggaaggaggggaagcugcagcuuggga

SEQ ID NO: 115240 - RNA, 18 nt, Human
ccugaggacaucagcagu

SEQ ID NO: 115241 - RNA, 32 nt, Human
ccugaggacccccagccucuggccucauuucc

SEQ ID NO: 115242 - RNA, 32 nt, Human
ccugaggacguggagaaaacuuucugcugaga

SEQ ID NO: 115243 - RNA, 32 nt, Human
ccugaggagaaaagcagguggaaggugacggu

SEQ ID NO: 115244 - RNA, 32 nt, Human
ccugaggagaaaagccagaguggagucuggaa

SEQ ID NO: 115245 - RNA, 18 nt, Human
ccugaggagagcggggca

SEQ ID NO: 115246 - RNA, 32 nt, Human
ccugaggagagggaggugggugcgcggcgccc

SEQ ID NO: 115247 - RNA, 32 nt, Human
ccugaggagaggggaccggcggcggcggcaau

SEQ ID NO: 115248 - RNA, 32 nt, Human
ccugaggagauggugacccuuuauuucauccg

SEQ ID NO: 115249 - RNA, 32 nt, Human
ccugaggagauggugacccuuuauuucaucug

SEQ ID NO: 115250 - RNA, 32 nt, Human
ccugaggagccagcgggccgcaagcaaguugc

SEQ ID NO: 115251 - RNA, 32 nt, Human
ccugaggagccaggugccugaaacuuccucca

SEQ ID NO: 115252 - RNA, 32 nt, Human
ccugaggagcugggacaugcugggcaguuguc

SEQ ID NO: 115253 - RNA, 32 nt, Human
ccugaggaggcuggaacucaggguuucaauac

SEQ ID NO: 115254 - RNA, 32 nt, Human
ccugaggaggugggccuggaggugaguucccu

SEQ ID NO: 115255 - RNA, 25 nt, Human
ccugaggaguccggccggggcacug

SEQ ID NO: 115256 - RNA, 28 nt, Human
ccugaggaugaggacaagccccucggcc

SEQ ID NO: 115257 - RNA, 32 nt, Human
ccugaggauggacccaggagaucccgcuggug

SEQ ID NO: 115258 - RNA, 23 nt, Human
ccugaggcagagguugcagugag

SEQ ID NO: 115259 - RNA, 19 nt, Human
ccugaggcaggaggugcag

SEQ ID NO: 115260 - RNA, 32 nt, Human
ccugaggcaggcggaucaugaggucaggagau

SEQ ID NO: 115261 - RNA, 22 nt, Human
ccugaggcagguaaauggggca

SEQ ID NO: 115262 - RNA, 32 nt, Human
ccugaggccagcccuggcugcccaggcggagc

SEQ ID NO: 115263 - RNA, 32 nt, Human
ccugaggccagcucuaaccagucuuucaugga

SEQ ID NO: 115264 - RNA, 32 nt, Human
ccugaggccaggaguucaagaccagccugacc

SEQ ID NO: 115265 - RNA, 32 nt, Human
ccugaggccaggaguucaagaccagccuggcc

SEQ ID NO: 115266 - RNA, 32 nt, Human
ccugaggccaggaguucacaaccagccugguc

SEQ ID NO: 115267 - RNA, 32 nt, Human
ccugaggccaggaguucgagaccagccugcca

SEQ ID NO: 115268 - RNA, 32 nt, Human
ccugaggccaggaguucgagaccagccuggcc

SEQ ID NO: 115269 - RNA, 32 nt, Human
ccugaggccaggaguucgagaccagccuggcu

SEQ ID NO: 115270 - RNA, 32 nt, Human
ccugaggccaggaguucgagaccagccugggc

SEQ ID NO: 115271 - RNA, 32 nt, Human
ccugaggccaggaguuugacaccagccugggc

SEQ ID NO: 115272 - RNA, 32 nt, Human
ccugaggccaggaguuugagaccaggcuggcc

SEQ ID NO: 115273 - RNA, 32 nt, Human
ccugaggccaugagcucauuggcugccuuugu

SEQ ID NO: 115274 - RNA, 32 nt, Human
ccugaggccauggcacucccagaggcugugcg

SEQ ID NO: 115275 - RNA, 32 nt, Human
ccugaggcccagagacaugcagcucucugucc

SEQ ID NO: 115276 - RNA, 19 nt, Human
ccugaggccccucacgcug

SEQ ID NO: 115277 - RNA, 19 nt, Human
ccugaggccccuccugccu

SEQ ID NO: 115278 - RNA, 32 nt, Human
ccugaggccccuggucaguaagaucuagggca

SEQ ID NO: 115279 - RNA, 32 nt, Human
ccugaggcccuagcaggugcucagccagugcg

SEQ ID NO: 115280 - RNA, 32 nt, Human
ccugaggcccugaggguggaaguggacacguu

SEQ ID NO: 115281 - RNA, 32 nt, Human
ccugaggcccugcgaggggacaaggacaggcc

SEQ ID NO: 115282 - RNA, 21 nt, Human
ccugaggccggaggggggcgg

SEQ ID NO: 115283 - RNA, 32 nt, Human
ccugaggccucgcggugaccccucucucuggu

SEQ ID NO: 115284 - RNA, 32 nt, Human
ccugaggcuccaccacuucuuccuccacccag

SEQ ID NO: 115285 - RNA, 32 nt, Human
ccugaggcugccucugggccuguggauccaga

SEQ ID NO: 115286 - RNA, 32 nt, Human
ccugaggcugcggccagcagagcccaggccag

SEQ ID NO: 115287 - RNA, 32 nt, Human
ccugaggcuggacuccagaucugcaccgccgg

SEQ ID NO: 115288 - RNA, 32 nt, Human
ccugaggcugucuccugggaaugcuggaccag

SEQ ID NO: 115289 - RNA, 20 nt, Human
ccugaggcuuaaaugaggca

SEQ ID NO: 115290 - RNA, 32 nt, Human
ccugaggcuugcagcgcugggcccggccgggu

SEQ ID NO: 115291 - RNA, 32 nt, Human
ccugaggcuuuccguccgccagugcaggaacc

SEQ ID NO: 115292 - RNA, 32 nt, Human
ccugaggcuuugccuugccugcauauuuguuu

SEQ ID NO: 115293 - RNA, 32 nt, Human
ccugagggaggcagccuuccuggcuaugagcc

SEQ ID NO: 115294 - RNA, 20 nt, Human
ccugagggcagcccaggacc

SEQ ID NO: 115295 - RNA, 32 nt, Human
ccugagggcccaggugguggaggugggguugg

SEQ ID NO: 115296 - RNA, 23 nt, Human
ccugagggccucccaccacugcc

SEQ ID NO: 115297 - RNA, 32 nt, Human
ccugagggccugaagagaacaaaaggcaaagg

SEQ ID NO: 115298 - RNA, 32 nt, Human
ccugagggcuaccucugacugggcuugucuuc

SEQ ID NO: 115299 - RNA, 22 nt, Human
ccugagggcugccucucugcca

SEQ ID NO: 115300 - RNA, 32 nt, Human
ccugaggggaaucugcaagcugugcauugggc

SEQ ID NO: 115301 - RNA, 19 nt, Human
ccugaggggagggggccag

SEQ ID NO: 115302 - RNA, 18 nt, Human
ccugaggggauacugugg

SEQ ID NO: 115303 - RNA, 32 nt, Human
ccugaggggcaggccaggaggagcuugggcgc

SEQ ID NO: 115304 - RNA, 19 nt, Human
ccugaggggcccacgguca

SEQ ID NO: 115305 - RNA, 32 nt, Human
ccugaggggcgcggccccugccccauacuggc

SEQ ID NO: 115306 - RNA, 32 nt, Human
ccugaggguggagaguggcaggaagcaagcau

SEQ ID NO: 115307 - RNA, 19 nt, Human
ccugaggguuuccacagug

SEQ ID NO: 115308 - RNA, 32 nt, Human
ccugagguacucugcugagugggcaaggcuga

SEQ ID NO: 115309 - RNA, 32 nt, Human
ccugagguagucaacccaggagccaagaaaag

SEQ ID NO: 115310 - RNA, 16 nt, Human
ccugagguaugauaua

SEQ ID NO: 115311 - RNA, 32 nt, Human
ccugaggucagagcucgagaccagccuggcca

SEQ ID NO: 115312 - RNA, 32 nt, Human
ccugaggucagaguuccagaccagccuggcca

SEQ ID NO: 115313 - RNA, 32 nt, Human
ccugaggucaggaguccaagaccagccuggcc

SEQ ID NO: 115314 - RNA, 32 nt, Human
ccugaggucaggaguggaucaccugagguaug

SEQ ID NO: 115315 - RNA, 32 nt, Human
ccugaggucaggaguucgaaccagccuggcca

SEQ ID NO: 115316 - RNA, 32 nt, Human
ccugaggucaggauucaaaaccagccuggcca

SEQ ID NO: 115317 - RNA, 23 nt, Human
ccugaggucagggagugcuggcu

SEQ ID NO: 115318 - RNA, 32 nt, Human
ccugaggucaguuugagaccagccugggcaac

SEQ ID NO: 115319 - RNA, 19 nt, Human
ccugaggucccagagccug

SEQ ID NO: 115320 - RNA, 32 nt, Human
ccugagguccgacugucucugccugcagcaug

SEQ ID NO: 115321 - RNA, 32 nt, Human
ccugagguccucaccuuccucucaguaacuac

SEQ ID NO: 115322 - RNA, 22 nt, Human
ccugaggucuuuagaggaccag

SEQ ID NO: 115323 - RNA, 19 nt, Human
ccugaggugcauuuucuca

SEQ ID NO: 115324 - RNA, 31 nt, Human
ccugagguggcucagcaccugcccaggguag

SEQ ID NO: 115325 - RNA, 23 nt, Human
ccugagguggggagggggagcag

SEQ ID NO: 115326 - RNA, 32 nt, Human
ccugaggugguaggaggacgacccuggaaaug

SEQ ID NO: 115327 - RNA, 32 nt, Human
ccugagguggucgugucccugcccucaauucu

SEQ ID NO: 115328 - RNA, 32 nt, Human
ccugagguggugagcugggaggaaacccacca

SEQ ID NO: 115329 - RNA, 32 nt, Human
ccugagguuagcaaugugugcaccuccacaca

SEQ ID NO: 115330 - RNA, 32 nt, Human
ccugagguuagggguuucaccauguuggccag

SEQ ID NO: 115331 - RNA, 32 nt, Human
ccugagguucaagugauccuccugccucagcc

SEQ ID NO: 115332 - RNA, 32 nt, Human
ccugaguaaaaucugcaucuguccucaccacc

SEQ ID NO: 115333 - RNA, 24 nt, Human
ccugaguaacugggacuacaggcg

SEQ ID NO: 115334 - RNA, 23 nt, Human
ccugaguaacugggauuacaggc

SEQ ID NO: 115335 - RNA, 25 nt, Human
ccugaguaacugggauuacagucgu

SEQ ID NO: 115336 - RNA, 23 nt, Human
ccugaguaagagacucucugcca

SEQ ID NO: 115337 - RNA, 32 nt, Human
ccugaguaccagcauggagaucgcuagcucca

SEQ ID NO: 115338 - RNA, 24 nt, Human
ccugaguagaugggauuacaggcg

SEQ ID NO: 115339 - RNA, 25 nt, Human
ccugaguagcuagaaccacaggcgu

SEQ ID NO: 115340 - RNA, 24 nt, Human
ccugaguagcuaggacuacaggca

SEQ ID NO: 115341 - RNA, 25 nt, Human
ccugaguagcuaggacuacaggugu

SEQ ID NO: 115342 - RNA, 23 nt, Human
ccugaguagcuaggauuacaggc

SEQ ID NO: 115343 - RNA, 24 nt, Human
ccugaguagcuaggauuacaggca

SEQ ID NO: 115344 - RNA, 24 nt, Human
ccugaguagcuaggauuacaggug

SEQ ID NO: 115345 - RNA, 25 nt, Human
ccugaguagcuaggauuacaggugu

SEQ ID NO: 115346 - RNA, 24 nt, Human
ccugaguagcucagauuacaggcg

SEQ ID NO: 115347 - RNA, 25 nt, Human
ccugaguagcugagaccacaggcgu

SEQ ID NO: 115348 - RNA, 25 nt, Human
ccugaguagcuggaaccacaggugu

SEQ ID NO: 115349 - RNA, 23 nt, Human
ccugaguagcuggaauuacaggc

SEQ ID NO: 115350 - RNA, 24 nt, Human
ccugaguagcuggaauuacaggcg

SEQ ID NO: 115351 - RNA, 24 nt, Human
ccugaguagcuggaauuacaggug

SEQ ID NO: 115352 - RNA, 23 nt, Human
ccugaguagcuggaauuauaggc

SEQ ID NO: 115353 - RNA, 22 nt, Human
ccugaguagcuggauuacaggc

SEQ ID NO: 115354 - RNA, 25 nt, Human
ccugaguagcugggacgacaggcgu

SEQ ID NO: 115355 - RNA, 24 nt, Human
ccugaguagcugggacuacaggcg

SEQ ID NO: 115356 - RNA, 25 nt, Human
ccugaguagcugggacuacaggcgu

SEQ ID NO: 115357 - RNA, 24 nt, Human
ccugaguagcugggacuacaggug

SEQ ID NO: 115358 - RNA, 25 nt, Human
ccugaguagcugggacuacaggugu

SEQ ID NO: 115359 - RNA, 24 nt, Human
ccugaguagcugggacuauaggcg

SEQ ID NO: 115360 - RNA, 25 nt, Human
ccugaguagcugggaucacaggugu

SEQ ID NO: 115361 - RNA, 23 nt, Human
ccugaguagcugggaucauaggc

SEQ ID NO: 115362 - RNA, 25 nt, Human
ccugaguagcugggaugacaggcgu

SEQ ID NO: 115363 - RNA, 23 nt, Human
ccugaguagcugggauuacacgc

SEQ ID NO: 115364 - RNA, 25 nt, Human
ccugaguagcugggauuacagaugu

SEQ ID NO: 115365 - RNA, 22 nt, Human
ccugaguagcugggauuacagg

SEQ ID NO: 115366 - RNA, 32 nt, Human
ccugaguagcugggauuacaggaccagugaug

SEQ ID NO: 115367 - RNA, 23 nt, Human
ccugaguagcugggauuacaggc

SEQ ID NO: 115368 - RNA, 24 nt, Human
ccugaguagcugggauuacaggcg

SEQ ID NO: 115369 - RNA, 25 nt, Human
ccugaguagcugggauuacaggcgu

SEQ ID NO: 115370 - RNA, 23 nt, Human
ccugaguagcugggauuacaggu

SEQ ID NO: 115371 - RNA, 24 nt, Human
ccugaguagcugggauuacaggug

SEQ ID NO: 115372 - RNA, 25 nt, Human
ccugaguagcugggauuacaggugu

SEQ ID NO: 115373 - RNA, 23 nt, Human
ccugaguagcugggauuacgggc

SEQ ID NO: 115374 - RNA, 23 nt, Human
ccugaguagcugggauuauaggc

SEQ ID NO: 115375 - RNA, 25 nt, Human
ccugaguagcugggauuauaggcgu

SEQ ID NO: 115376 - RNA, 23 nt, Human
ccugaguagcugggauugcaggc

SEQ ID NO: 115377 - RNA, 25 nt, Human
ccugaguagcugggauuucaggcgu

SEQ ID NO: 115378 - RNA, 23 nt, Human
ccugaguagcugguauuacaggc

SEQ ID NO: 115379 - RNA, 23 nt, Human
ccugaguagcugugauuacaggc

SEQ ID NO: 115380 - RNA, 23 nt, Human
ccugaguagcuuggauuacaggc

SEQ ID NO: 115381 - RNA, 32 nt, Human
ccugaguagggugggugcaaguagggccucuu

SEQ ID NO: 115382 - RNA, 32 nt, Human
ccugaguaggugcauuucugucugucucaaua

SEQ ID NO: 115383 - RNA, 23 nt, Human
ccugaguaguugggauuacaggc

SEQ ID NO: 115384 - RNA, 32 nt, Human
ccugaguauuucacuggcagguugugaauuuu

SEQ ID NO: 115385 - RNA, 32 nt, Human
ccugagucacccaugaagacaggacagugcuu

SEQ ID NO: 115386 - RNA, 32 nt, Human
ccugagucaccuagcauaggguugcagcaagc

SEQ ID NO: 115387 - RNA, 32 nt, Human
ccugagucaggagcucgagaccagccuggaaa

SEQ ID NO: 115388 - RNA, 32 nt, Human
ccugagucaggagguugaggcugcagugagcu

SEQ ID NO: 115389 - RNA, 32 nt, Human
ccugagucaggaguucgagaccagccuggcca

SEQ ID NO: 115390 - RNA, 32 nt, Human
ccugaguccagaaugguacacaaugugauuuu

SEQ ID NO: 115391 - RNA, 32 nt, Human
ccugaguccagaaugguacacaauguguuuuu

SEQ ID NO: 115392 - RNA, 32 nt, Human
ccugaguccaggaggucgaggcugcagugagc

SEQ ID NO: 115393 - RNA, 19 nt, Human
ccugagucccaaucuucca

SEQ ID NO: 115394 - RNA, 17 nt, Human
ccugagucccugagaaa

SEQ ID NO: 115395 - RNA, 32 nt, Human
ccugaguccuccacucgcaucucccuccccug

SEQ ID NO: 115396 - RNA, 32 nt, Human
ccugaguccugggggugggaggauuugaggga

SEQ ID NO: 115397 - RNA, 22 nt, Human
ccugagucucagcuaccuaaga

SEQ ID NO: 115398 - RNA, 32 nt, Human
ccugagucuccacagagccccacgccuggcau

SEQ ID NO: 115399 - RNA, 32 nt, Human
ccugagucucucuuuccuuccuccucgaucuu

SEQ ID NO: 115400 - RNA, 32 nt, Human
ccugagucuggcacagacggggcuauuguagu

SEQ ID NO: 115401 - RNA, 21 nt, Human
ccugagucugggcaucuguga

SEQ ID NO: 115402 - RNA, 19 nt, Human
ccugagugacagagcaaga

SEQ ID NO: 115403 - RNA, 16 nt, Human
ccugagugagccgcag

SEQ ID NO: 115404 - RNA, 18 nt, Human
ccugagugaggccaggug

SEQ ID NO: 115405 - RNA, 17 nt, Human
ccugagugagggugcag

SEQ ID NO: 115406 - RNA, 19 nt, Human
ccugagugaggugauuaca

SEQ ID NO: 115407 - RNA, 19 nt, Human
ccugagugagguguugcag

SEQ ID NO: 115408 - RNA, 19 nt, Human
ccugagugagucugacuga

SEQ ID NO: 115409 - RNA, 17 nt, Human
ccugagugaucuuauag

SEQ ID NO: 115410 - RNA, 32 nt, Human
ccugagugcagauggcugggcuccccggaaca

SEQ ID NO: 115411 - RNA, 32 nt, Human
ccugagugcaggacucuccugaagaaggggcg

SEQ ID NO: 115412 - RNA, 32 nt, Human
ccugagugcuccgucccucuagcaucacuccu

SEQ ID NO: 115413 - RNA, 20 nt, Human
ccugagugcugccucugcca

SEQ ID NO: 115414 - RNA, 32 nt, Human
ccugagugcugccucugccaccagcccugcug

SEQ ID NO: 115415 - RNA, 32 nt, Human
ccugaguggagugcugggggaaggaggagguc

SEQ ID NO: 115416 - RNA, 32 nt, Human
ccugaguggauggaucacuugaggucaggagu

SEQ ID NO: 115417 - RNA, 32 nt, Human
ccugaguggcagggauuacaggaacccaccac

SEQ ID NO: 115418 - RNA, 19 nt, Human
ccugaguggcugcuuagga

SEQ ID NO: 115419 - RNA, 32 nt, Human
ccugaguggcugggauccuucuuccugucccu

SEQ ID NO: 115420 - RNA, 23 nt, Human
ccugaguggcugggauuacaggc

SEQ ID NO: 115421 - RNA, 18 nt, Human
ccugaguggguuccacag

SEQ ID NO: 115422 - RNA, 18 nt, Human
ccugagugucggucacag

SEQ ID NO: 115423 - RNA, 32 nt, Human
ccugagugugaugucacugaugacaucacggc

SEQ ID NO: 115424 - RNA, 19 nt, Human
ccugaguguggaugugguc

SEQ ID NO: 115425 - RNA, 32 nt, Human
ccugaguguggcuaggaagggggugcugggug

SEQ ID NO: 115426 - RNA, 32 nt, Human
ccugaguguggggagagcaagcugugagggca

SEQ ID NO: 115427 - RNA, 32 nt, Human
ccugaguucaggaguuaagaccagccugggca

SEQ ID NO: 115428 - RNA, 32 nt, Human
ccugaguucaguaauucauauuacaggcuugc

SEQ ID NO: 115429 - RNA, 32 nt, Human
ccugaguucauggccaaaaccuuaaauaagaa

SEQ ID NO: 115430 - RNA, 32 nt, Human
ccugaguuccacugcugugcuucagucaacug

SEQ ID NO: 115431 - RNA, 32 nt, Human
ccugaguucgcuuuaaagagcuuuucaaagag

SEQ ID NO: 115432 - RNA, 32 nt, Human
ccugaguucucccucccaauuggcuccagcuu

SEQ ID NO: 115433 - RNA, 32 nt, Human
ccugaguucugcuuccuuggaugucauugcuu

SEQ ID NO: 115434 - RNA, 32 nt, Human
ccugaguucuucucucaguuccaagcaggaaa

SEQ ID NO: 115435 - RNA, 32 nt, Human
ccugauaaagaauuggccuggcugggugcagu

SEQ ID NO: 115436 - RNA, 32 nt, Human
ccugauaaccauugcauaauuacauuuuucua

SEQ ID NO: 115437 - RNA, 32 nt, Human
ccugauacaaaccaaauggcuaccuggaagaa

SEQ ID NO: 115438 - RNA, 32 nt, Human
ccugauacaaaccaaauggcuaccuggaauaa

SEQ ID NO: 115439 - RNA, 32 nt, Human
ccugauaccauuuaacacugucugaauuaacu

SEQ ID NO: 115440 - RNA, 23 nt, Human
ccugauaccccugaggguggcug

SEQ ID NO: 115441 - RNA, 32 nt, Human
ccugauagccucaggauucagggaaaggacaa

SEQ ID NO: 115442 - RNA, 32 nt, Human
ccugauaggaggauuucaugacuaugucauug

SEQ ID NO: 115443 - RNA, 32 nt, Human
ccugauauguucccucaauuacacucccauuu

SEQ ID NO: 115444 - RNA, 32 nt, Human
ccugauauuccucuucucacuuuugcaaucac

SEQ ID NO: 115445 - RNA, 32 nt, Human
ccugauauuugauugcuuucucaguauggagu

SEQ ID NO: 115446 - RNA, 22 nt, Human
ccugauauuugucaacacagua

SEQ ID NO: 115447 - RNA, 32 nt, Human
ccugaucagccugucugugcaucccccauccc

SEQ ID NO: 115448 - RNA, 32 nt, Human
ccugaucaucuuuccauugucuucauggaaaa

SEQ ID NO: 115449 - RNA, 32 nt, Human
ccugauccaaagagaccaagucacuguacugg

SEQ ID NO: 115450 - RNA, 32 nt, Human
ccugauccaggguuccaccaccaggagggcag

SEQ ID NO: 115451 - RNA, 23 nt, Human
ccugaucccaggagacaccaggg

SEQ ID NO: 115452 - RNA, 32 nt, Human
ccugaucccaggagacaccagggccagaguga

SEQ ID NO: 115453 - RNA, 22 nt, Human
ccugaucccauccaggcgcuga

SEQ ID NO: 115454 - RNA, 32 nt, Human
ccugauccccacccuuacucaucaccuugcag

SEQ ID NO: 115455 - RNA, 20 nt, Human
ccugaucccccaccacugcc

SEQ ID NO: 115456 - RNA, 32 nt, Human
ccugaucccccuucuccuugcaucacccgaag

SEQ ID NO: 115457 - RNA, 32 nt, Human
ccugauccccuucauuucuucaccgcgguucc

SEQ ID NO: 115458 - RNA, 32 nt, Human
ccugauccucaaccuccaugccuaaggcuggu

SEQ ID NO: 115459 - RNA, 32 nt, Human
ccugauccucaaggaacuugcaaaugugucua

SEQ ID NO: 115460 - RNA, 32 nt, Human
ccugauccuccuaccugguccaccccagggcu

SEQ ID NO: 115461 - RNA, 21 nt, Human
ccugauccuggacagugaagg

SEQ ID NO: 115462 - RNA, 21 nt, Human
ccugauccuggagaggcaggg

SEQ ID NO: 115463 - RNA, 20 nt, Human
ccugauccuggggucugggg

SEQ ID NO: 115464 - RNA, 32 nt, Human
ccugauccuguugguagaguuucuccagaagg

SEQ ID NO: 115465 - RNA, 32 nt, Human
ccugaucggaccggcccugcccccggcuucaa

SEQ ID NO: 115466 - RNA, 31 nt, Human
ccugaucuaccucccuacugccaaaggaacc

SEQ ID NO: 115467 - RNA, 32 nt, Human
ccugaucuagccccagaccuggccaggccagc

SEQ ID NO: 115468 - RNA, 32 nt, Human
ccugaucucacucauugcacuuccuggaguua

SEQ ID NO: 115469 - RNA, 21 nt, Human
ccugaucuccaccauaucuca

SEQ ID NO: 115470 - RNA, 32 nt, Human
ccugaucuccgggcagccaccaccuccucggu

SEQ ID NO: 115471 - RNA, 32 nt, Human
ccugaucucuagcuucucagccuccagaacug

SEQ ID NO: 115472 - RNA, 32 nt, Human
ccugaucucugacuucuagagccccagcugcu

SEQ ID NO: 115473 - RNA, 32 nt, Human
ccugaucugcccugcacugagcacucagugga

SEQ ID NO: 115474 - RNA, 32 nt, Human
ccugaucugccugggcaucaucuugcucuuua

SEQ ID NO: 115475 - RNA, 32 nt, Human
ccugaucugcuccugucccccgcucuccucca

SEQ ID NO: 115476 - RNA, 32 nt, Human
ccugaucuggagcuugucccagaucuggagcu

SEQ ID NO: 115477 - RNA, 32 nt, Human
ccugaucuucaggucaccaccaugaaguucuu

SEQ ID NO: 115478 - RNA, 32 nt, Human
ccugaucuuccagacaaacuaccuggauguug

SEQ ID NO: 115479 - RNA, 32 nt, Human
ccugaucuuccuggcccugcuccauaugcauc

SEQ ID NO: 115480 - RNA, 32 nt, Human
ccugaucuuguuggauguggcucugaucuuug

SEQ ID NO: 115481 - RNA, 32 nt, Human
ccugaugaaagauacaccacagggugagagca

SEQ ID NO: 115482 - RNA, 32 nt, Human
ccugaugagccaagucuucucagacuccacag

SEQ ID NO: 115483 - RNA, 32 nt, Human
ccugaugcaaaaccaggcacaacaagggaaau

SEQ ID NO: 115484 - RNA, 32 nt, Human
ccugaugcaugucucucucacccccaugucca

SEQ ID NO: 115485 - RNA, 32 nt, Human
ccugaugccaagcaaagacccuuccccagagg

SEQ ID NO: 115486 - RNA, 32 nt, Human
ccugaugccccagcuagcaggagcuacugugc

SEQ ID NO: 115487 - RNA, 32 nt, Human
ccugaugcccgcaggagagagcaacggggucu

SEQ ID NO: 115488 - RNA, 23 nt, Human
ccugaugcccuaaggacacugca

SEQ ID NO: 115489 - RNA, 32 nt, Human
ccugaugccuugauuuuagccuggugagaccc

SEQ ID NO: 115490 - RNA, 32 nt, Human
ccugaugcgccugccucagccucccagugcug

SEQ ID NO: 115491 - RNA, 32 nt, Human
ccugaugcggcuccugcagagaagacuccuua

SEQ ID NO: 115492 - RNA, 32 nt, Human
ccugaugcuaaccccugacucaacucucaccc

SEQ ID NO: 115493 - RNA, 32 nt, Human
ccugaugcuuucccucccccugcccccucaac

SEQ ID NO: 115494 - RNA, 19 nt, Human
ccugauggaagaacagugg

SEQ ID NO: 115495 - RNA, 32 nt, Human
ccugauggacaaagcaggagauucacugucag

SEQ ID NO: 115496 - RNA, 29 nt, Human
ccugauggaguuucacuauguugcccagg

SEQ ID NO: 115497 - RNA, 32 nt, Human
ccugauggaugcagaggagcgccugacaugga

SEQ ID NO: 115498 - RNA, 32 nt, Human
ccugauggcacaguguccacagaguccaagac

SEQ ID NO: 115499 - RNA, 19 nt, Human
ccugauggcauccacagug

SEQ ID NO: 115500 - RNA, 32 nt, Human
ccugauggccccaccccucccuucccugcagg

SEQ ID NO: 115501 - RNA, 32 nt, Human
ccugauggcuccgacaggccugcuccagagca

SEQ ID NO: 115502 - RNA, 32 nt, Human
ccugaugggcagucaguccagagaugcuggcc

SEQ ID NO: 115503 - RNA, 32 nt, Human
ccugaugggcuaccagcuccugccggugagug

SEQ ID NO: 115504 - RNA, 32 nt, Human
ccugauguaacuaucacuaagggucuauaagg

SEQ ID NO: 115505 - RNA, 20 nt, Human
ccugauguaggaggggcaca

SEQ ID NO: 115506 - RNA, 32 nt, Human
ccugaugucucaagccuguaauccuagcacuu

SEQ ID NO: 115507 - RNA, 32 nt, Human
ccugaugugacuuccacuggacuuugggguuc

SEQ ID NO: 115508 - RNA, 32 nt, Human
ccugaugugggcagaauccagaugagcuggcc

SEQ ID NO: 115509 - RNA, 32 nt, Human
ccugauguguagucuccaggccgccccgaaca

SEQ ID NO: 115510 - RNA, 32 nt, Human
ccugaugugugggggaacuaggaagaaguccu

SEQ ID NO: 115511 - RNA, 32 nt, Human
ccugauguuagaaucccacccccagauaauua

SEQ ID NO: 115512 - RNA, 32 nt, Human
ccugauguuccuucccuccaucagccaucaau

SEQ ID NO: 115513 - RNA, 32 nt, Human
ccugauguugauguacuuacagacacaagaac

SEQ ID NO: 115514 - RNA, 32 nt, Human
ccugauguuuugacagucuccuagugcuccug

SEQ ID NO: 115515 - RNA, 32 nt, Human
ccugauuagaacauucauaagccacauuuaga

SEQ ID NO: 115516 - RNA, 32 nt, Human
ccugauuagacacugaggaucagacguuggaa

SEQ ID NO: 115517 - RNA, 32 nt, Human
ccugauuauucccugaggacauugauugucuu

SEQ ID NO: 115518 - RNA, 32 nt, Human
ccugauucaccaccaguggaaguuuuaacaau

SEQ ID NO: 115519 - RNA, 32 nt, Human
ccugauucacggugagacauuuugccaccuuc

SEQ ID NO: 115520 - RNA, 32 nt, Human
ccugauucacugcacuuggaaccagaugaugu

SEQ ID NO: 115521 - RNA, 26 nt, Human
ccugauucaggacugacucuccacca

SEQ ID NO: 115522 - RNA, 32 nt, Human
ccugauucauucuacaauccaagacuugcugc

SEQ ID NO: 115523 - RNA, 32 nt, Human
ccugauucauugucccuuucuugaaaguuucu

SEQ ID NO: 115524 - RNA, 32 nt, Human
ccugauucauuuccugauccagugaugcuccc

SEQ ID NO: 115525 - RNA, 32 nt, Human
ccugauuccacggcugccucaggcaggcaggc

SEQ ID NO: 115526 - RNA, 32 nt, Human
ccugauuccagcuuucugcuuccugaggacuc

SEQ ID NO: 115527 - RNA, 32 nt, Human
ccugauuccuuucugccugcagggggcugggg

SEQ ID NO: 115528 - RNA, 32 nt, Human
ccugauucuacaccaucucuccagaacucucu

SEQ ID NO: 115529 - RNA, 32 nt, Human
ccugauucuccacuuucucugcuucauucuga

SEQ ID NO: 115530 - RNA, 32 nt, Human
ccugauucuccugccucagccugccgagugcc

SEQ ID NO: 115531 - RNA, 32 nt, Human
ccugauucugcugcccuggggcacaccccugg

SEQ ID NO: 115532 - RNA, 32 nt, Human
ccugauugacgccgucaaaaacaaaugcuugu

SEQ ID NO: 115533 - RNA, 32 nt, Human
ccugauugaggguggguggguggacccaggcu

SEQ ID NO: 115534 - RNA, 32 nt, Human
ccugauugcaccacuggacgccagccuaggca

SEQ ID NO: 115535 - RNA, 32 nt, Human
ccugauugcaccacuguacuccagccugggug

SEQ ID NO: 115536 - RNA, 32 nt, Human
ccugauugccuccucaagucgcagacacuaug

SEQ ID NO: 115537 - RNA, 32 nt, Human
ccugauugcucaacugccccagaaggggagaa

SEQ ID NO: 115538 - RNA, 32 nt, Human
ccugauugcuggcaucugccucuucuccugcc

SEQ ID NO: 115539 - RNA, 24 nt, Human
ccugauuggcaugugaccagagua

SEQ ID NO: 115540 - RNA, 32 nt, Human
ccugauugugccagugcacuccaggcuggacg

SEQ ID NO: 115541 - RNA, 32 nt, Human
ccugauugugccagugcacuccggccugggug

SEQ ID NO: 115542 - RNA, 32 nt, Human
ccugauuucugagucuguguuuggagguguua

SEQ ID NO: 115543 - RNA, 32 nt, Human
ccugauuugagaagcugaagaaaacaaaauuu

SEQ ID NO: 115544 - RNA, 32 nt, Human
ccugauuuuaauacugcaacaggacagcagag

SEQ ID NO: 115545 - RNA, 32 nt, Human
ccugcaaaacagaagccuggagaggggaguga

SEQ ID NO: 115546 - RNA, 32 nt, Human
ccugcaaaaugagaggaucuuuggaugagucu

SEQ ID NO: 115547 - RNA, 32 nt, Human
ccugcaaaccuacacaccaaagcuuuauuuau

SEQ ID NO: 115548 - RNA, 21 nt, Human
ccugcaaacgcugccugccca

SEQ ID NO: 115549 - RNA, 32 nt, Human
ccugcaaacuauaugcaaaaaugaguaugagg

SEQ ID NO: 115550 - RNA, 32 nt, Human
ccugcaaagccagcuugaaaccuucacuuagg

SEQ ID NO: 115551 - RNA, 21 nt, Human
ccugcaaauggauggcuugug

SEQ ID NO: 115552 - RNA, 32 nt, Human
ccugcaacaaguguccccuucgcagcaacagc

SEQ ID NO: 115553 - RNA, 32 nt, Human
ccugcaacacaaaagcacagaacaggcagcuu

SEQ ID NO: 115554 - RNA, 32 nt, Human
ccugcaacacauuccccuaaacuguguuccua

SEQ ID NO: 115555 - RNA, 32 nt, Human
ccugcaacaucagcgugggccgcuaggacucc

SEQ ID NO: 115556 - RNA, 32 nt, Human
ccugcaaccacucuguggccagccuggcauca

SEQ ID NO: 115557 - RNA, 32 nt, Human
ccugcaaccauccugccuuuccccaggggucu

SEQ ID NO: 115558 - RNA, 32 nt, Human
ccugcaacccccuccaggcucagaccugggga

SEQ ID NO: 115559 - RNA, 21 nt, Human
ccugcaaccccuccccaacuc

SEQ ID NO: 115560 - RNA, 25 nt, Human
ccugcaaccguuuccgccuccugcu

SEQ ID NO: 115561 - RNA, 25 nt, Human
ccugcaaccucggggagugccacuu

SEQ ID NO: 115562 - RNA, 32 nt, Human
ccugcaaccugacugcugugggcugcucacug

SEQ ID NO: 115563 - RNA, 32 nt, Human
ccugcaacuaaacacgagccugggcagaaccu

SEQ ID NO: 115564 - RNA, 19 nt, Human
ccugcaacugcuguuucuc

SEQ ID NO: 115565 - RNA, 32 nt, Human
ccugcaacuuucuccauucccagcugggcccc

SEQ ID NO: 115566 - RNA, 32 nt, Human
ccugcaagaaaaagauauuacacugcauuuga

SEQ ID NO: 115567 - RNA, 32 nt, Human
ccugcaagaaaauagaugcugaggcagucuuc

SEQ ID NO: 115568 - RNA, 32 nt, Human
ccugcaagaacugcuucugccugcggagcgac

SEQ ID NO: 115569 - RNA, 21 nt, Human
ccugcaagacagcacaggcaa

SEQ ID NO: 115570 - RNA, 32 nt, Human
ccugcaagacaggcccgggcgcaggaccgcug

SEQ ID NO: 115571 - RNA, 32 nt, Human
ccugcaagagccucucccagggcccaguccuc

SEQ ID NO: 115572 - RNA, 32 nt, Human
ccugcaagauggagguugcagugagcucagau

SEQ ID NO: 115573 - RNA, 31 nt, Human
ccugcaagcacagggcuaaggagggauagag

SEQ ID NO: 115574 - RNA, 32 nt, Human
ccugcaagccaacaguucaguguuuuaacaga

SEQ ID NO: 115575 - RNA, 21 nt, Human
ccugcaagccgccgcugcgcg

SEQ ID NO: 115576 - RNA, 32 nt, Human
ccugcaagcugaacaauguccuuacugggaau

SEQ ID NO: 115577 - RNA, 32 nt, Human
ccugcaagcuguuuccacaucagaacucccuu

SEQ ID NO: 115578 - RNA, 31 nt, Human
ccugcaaggaccugaggaaaagacugugcag

SEQ ID NO: 115579 - RNA, 21 nt, Human
ccugcaaggcagaaaugacag

SEQ ID NO: 115580 - RNA, 32 nt, Human
ccugcaagggacugaaggcggagcccauccaa

SEQ ID NO: 115581 - RNA, 32 nt, Human
ccugcaagggggacccugccagcugggaaacc

SEQ ID NO: 115582 - RNA, 32 nt, Human
ccugcaaggguagagucaggugagagucccuu

SEQ ID NO: 115583 - RNA, 32 nt, Human
ccugcaaggguaggggacaagauguaggcucc

SEQ ID NO: 115584 - RNA, 32 nt, Human
ccugcaauagagaagaaagggaaguagggcag

SEQ ID NO: 115585 - RNA, 32 nt, Human
ccugcaaucacagcuacucaggaggcugaggc

SEQ ID NO: 115586 - RNA, 32 nt, Human
ccugcaaucccagcuacaugggaggcugaggc

SEQ ID NO: 115587 - RNA, 32 nt, Human
ccugcaaucccagcuacucagaggcuaaggcg

SEQ ID NO: 115588 - RNA, 22 nt, Human
ccugcaaucccagcuacucagg

SEQ ID NO: 115589 - RNA, 32 nt, Human
ccugcaaucccagcuacucaggaggcugaggc

SEQ ID NO: 115590 - RNA, 32 nt, Human
ccugcaaucccagcuacucauaaggcugaggu

SEQ ID NO: 115591 - RNA, 22 nt, Human
ccugcaaucccagcuacucggg

SEQ ID NO: 115592 - RNA, 23 nt, Human
ccugcaaucccagcuacucggga

SEQ ID NO: 115593 - RNA, 32 nt, Human
ccugcaaucccagcuacucgggaggcugaggc

SEQ ID NO: 115594 - RNA, 32 nt, Human
ccugcaaucccagcuacuugagaggcugaggc

SEQ ID NO: 115595 - RNA, 32 nt, Human
ccugcaaucccagcuacuugagaggcuggggc

SEQ ID NO: 115596 - RNA, 32 nt, Human
ccugcaaucccagcuacuuggaaggcugaggc

SEQ ID NO: 115597 - RNA, 32 nt, Human
ccugcaaucccagcuacuugggaggcugaggc

SEQ ID NO: 115598 - RNA, 32 nt, Human
ccugcaauggggaacaggcccuccccaucagu

SEQ ID NO: 115599 - RNA, 18 nt, Human
ccugcaaugugacaggua

SEQ ID NO: 115600 - RNA, 31 nt, Human
ccugcaauuaggccucccaugcagaggucag

SEQ ID NO: 115601 - RNA, 32 nt, Human
ccugcacaaaccuacauguacauaccauggau

SEQ ID NO: 115602 - RNA, 32 nt, Human
ccugcacaaagcuucagcccugugaaaacauc

SEQ ID NO: 115603 - RNA, 32 nt, Human
ccugcacaagacaacagaauccaucagggcca

SEQ ID NO: 115604 - RNA, 32 nt, Human
ccugcacaagcucuuuuugccugcugccaucc

SEQ ID NO: 115605 - RNA, 32 nt, Human
ccugcacaagggcagugagagacauuuacagc

SEQ ID NO: 115606 - RNA, 32 nt, Human
ccugcacaauuauuagagugaaugaaaaacca

SEQ ID NO: 115607 - RNA, 32 nt, Human
ccugcacaauucaugggaggacucauuucuug

SEQ ID NO: 115608 - RNA, 32 nt, Human
ccugcacacauccuuaucuuuguuacauauga

SEQ ID NO: 115609 - RNA, 32 nt, Human
ccugcacacaugcaugcacacaaacguguaca

SEQ ID NO: 115610 - RNA, 32 nt, Human
ccugcacacccaccagaagagcacaaagcaag

SEQ ID NO: 115611 - RNA, 32 nt, Human
ccugcacacccaggaccuugauguugcuugcc

SEQ ID NO: 115612 - RNA, 23 nt, Human
ccugcacaccccagcccugcacg

SEQ ID NO: 115613 - RNA, 32 nt, Human
ccugcacagaugucuacccagguucucuuggu

SEQ ID NO: 115614 - RNA, 32 nt, Human
ccugcacagcuggacccauccuaagugccagu

SEQ ID NO: 115615 - RNA, 32 nt, Human
ccugcacagcuuccucccuuacucacucugcc

SEQ ID NO: 115616 - RNA, 22 nt, Human
ccugcacagggugcuccugcca

SEQ ID NO: 115617 - RNA, 32 nt, Human
ccugcacauccugcaccuccucccucucccuu

SEQ ID NO: 115618 - RNA, 31 nt, Human
ccugcacaugcccuuuugccugugucaugua

SEQ ID NO: 115619 - RNA, 32 nt, Human
ccugcacaugucacacugaccacaucuguaga

SEQ ID NO: 115620 - RNA, 32 nt, Human
ccugcacaugucacacugaccccaucuguaga

SEQ ID NO: 115621 - RNA, 32 nt, Human
ccugcacauguuggaguguggugccuccagca

SEQ ID NO: 115622 - RNA, 21 nt, Human
ccugcaccacacgcacacagg

SEQ ID NO: 115623 - RNA, 21 nt, Human
ccugcaccaccgcucacccca

SEQ ID NO: 115624 - RNA, 32 nt, Human
ccugcaccagaccagccccagcccuuuauucc

SEQ ID NO: 115625 - RNA, 26 nt, Human
ccugcaccaguccugccuguccuucu

SEQ ID NO: 115626 - RNA, 32 nt, Human
ccugcaccauccagagagaugccaaaggccag

SEQ ID NO: 115627 - RNA, 32 nt, Human
ccugcaccaugcucauagaggauguggaugcc

SEQ ID NO: 115628 - RNA, 32 nt, Human
ccugcacccccucccuuucccuuaacucuacu

SEQ ID NO: 115629 - RNA, 32 nt, Human
ccugcaccccucucaaccugaccugaaccuuu

SEQ ID NO: 115630 - RNA, 32 nt, Human
ccugcacccugcgucaccaccuccgggggccc

SEQ ID NO: 115631 - RNA, 32 nt, Human
ccugcaccucagggggcaaccaggagcacauu

SEQ ID NO: 115632 - RNA, 32 nt, Human
ccugcaccuccaccugccccagccccugccuc

SEQ ID NO: 115633 - RNA, 26 nt, Human
ccugcaccucccacgcccgucuugcc

SEQ ID NO: 115634 - RNA, 32 nt, Human
ccugcaccucccuacucucccugccgaggcgu

SEQ ID NO: 115635 - RNA, 32 nt, Human
ccugcaccuccucaccucccagccugccuucc

SEQ ID NO: 115636 - RNA, 32 nt, Human
ccugcaccugacagcuuuaucuccccaggagc

SEQ ID NO: 115637 - RNA, 32 nt, Human
ccugcaccugcacucuagugacccugggugcc

SEQ ID NO: 115638 - RNA, 32 nt, Human
ccugcaccuguccaccccaccccaacacccug

SEQ ID NO: 115639 - RNA, 32 nt, Human
ccugcaccugugugaugucucucccuagcugg

SEQ ID NO: 115640 - RNA, 32 nt, Human
ccugcaccuucuggcccugcuuugagcucugc

SEQ ID NO: 115641 - RNA, 32 nt, Human
ccugcaccuuucucccucucuggagccaucug

SEQ ID NO: 115642 - RNA, 32 nt, Human
ccugcacgagacugcccauguguacauugacg

SEQ ID NO: 115643 - RNA, 32 nt, Human
ccugcacgccgcccacccccacugacccccgc

SEQ ID NO: 115644 - RNA, 23 nt, Human
ccugcacgccgggacgccaccuc

SEQ ID NO: 115645 - RNA, 32 nt, Human
ccugcacgcgcuggcuccgggugacagccgcg

SEQ ID NO: 115646 - RNA, 32 nt, Human
ccugcacggaagagacaggggcaggggagaga

SEQ ID NO: 115647 - RNA, 32 nt, Human
ccugcacggcacagcucgcuuucacagucaga

SEQ ID NO: 115648 - RNA, 32 nt, Human
ccugcacggcucagcccugcccgccucccacc

SEQ ID NO: 115649 - RNA, 32 nt, Human
ccugcacgguggaagugguggagguggacacu

SEQ ID NO: 115650 - RNA, 32 nt, Human
ccugcacgugcccggcccugcuccacacgagc

SEQ ID NO: 115651 - RNA, 32 nt, Human
ccugcacucaauggugaaggacuugcccacag

SEQ ID NO: 115652 - RNA, 32 nt, Human
ccugcacucaccugcucuuccugggcuggcug

SEQ ID NO: 115653 - RNA, 32 nt, Human
ccugcacucauucccaugaaugcaguuaauag

SEQ ID NO: 115654 - RNA, 32 nt, Human
ccugcacuccaagggaccccuccaggggaccc

SEQ ID NO: 115655 - RNA, 32 nt, Human
ccugcacuccagccugggcaacagagugagac

SEQ ID NO: 115656 - RNA, 32 nt, Human
ccugcacuccagccugggcggcagagugagac

SEQ ID NO: 115657 - RNA, 32 nt, Human
ccugcacuccagccugggugacagagugagac

SEQ ID NO: 115658 - RNA, 21 nt, Human
ccugcacucccaaaauaccuc

SEQ ID NO: 115659 - RNA, 22 nt, Human
ccugcacucccagcuacucggg

SEQ ID NO: 115660 - RNA, 23 nt, Human
ccugcacucccagcuacucggga

SEQ ID NO: 115661 - RNA, 32 nt, Human
ccugcacucccagcuacucgggaggcucaggc

SEQ ID NO: 115662 - RNA, 32 nt, Human
ccugcacuccuggauggcucugcuccggguca

SEQ ID NO: 115663 - RNA, 32 nt, Human
ccugcacuccugggcgaaggcugacgcugaac

SEQ ID NO: 115664 - RNA, 32 nt, Human
ccugcacucuccaguacagaaugggaacccca

SEQ ID NO: 115665 - RNA, 32 nt, Human
ccugcacucuuauccuccuuauuuaaguccuu

SEQ ID NO: 115666 - RNA, 32 nt, Human
ccugcacucuugccugacccuagaauggggac

SEQ ID NO: 115667 - RNA, 19 nt, Human
ccugcacugaggggugcgg

SEQ ID NO: 115668 - RNA, 32 nt, Human
ccugcacuggcauguccaugucacuggaugga

SEQ ID NO: 115669 - RNA, 32 nt, Human
ccugcacugucauccccugccuggacuuuugc

SEQ ID NO: 115670 - RNA, 32 nt, Human
ccugcacuguccuucccauaggagaagggcau

SEQ ID NO: 115671 - RNA, 32 nt, Human
ccugcacugugcacgcuccucuucccaagguc

SEQ ID NO: 115672 - RNA, 21 nt, Human
ccugcacuuaaaaagggccag

SEQ ID NO: 115673 - RNA, 32 nt, Human
ccugcacuucauuuuugguucuuguuguuugc

SEQ ID NO: 115674 - RNA, 32 nt, Human
ccugcacuucuccccagaggugggcccucuuc

SEQ ID NO: 115675 - RNA, 32 nt, Human
ccugcacuugcagacucuacagaggccauggg

SEQ ID NO: 115676 - RNA, 32 nt, Human
ccugcacuuucaaccaggccaguccggcucug

SEQ ID NO: 115677 - RNA, 20 nt, Human
ccugcacuuuccuccaccuc

SEQ ID NO: 115678 - RNA, 32 nt, Human
ccugcacuuucugcuucuuaauugccuucagc

SEQ ID NO: 115679 - RNA, 32 nt, Human
ccugcagaaagagaugcagauguuggcuaaga

SEQ ID NO: 115680 - RNA, 21 nt, Human
ccugcagaaagaggggugugg

SEQ ID NO: 115681 - RNA, 32 nt, Human
ccugcagaaagccccaagugagccaccagcac

SEQ ID NO: 115682 - RNA, 32 nt, Human
ccugcagaacagcugagacagaugaugugcaa

SEQ ID NO: 115683 - RNA, 20 nt, Human
ccugcagaacucugguuuug

SEQ ID NO: 115684 - RNA, 28 nt, Human
ccugcagaaggaacuggacaagagccag

SEQ ID NO: 115685 - RNA, 32 nt, Human
ccugcagaauacuguacuucauuuaacagaau

SEQ ID NO: 115686 - RNA, 32 nt, Human
ccugcagacaaaauauuugaugugccaauuau

SEQ ID NO: 115687 - RNA, 24 nt, Human
ccugcagacaccagcucuccuucc

SEQ ID NO: 115688 - RNA, 32 nt, Human
ccugcagacaccucuuucagaaacgcccaagc

SEQ ID NO: 115689 - RNA, 32 nt, Human
ccugcagacaucaccuuugccuucugguugug

SEQ ID NO: 115690 - RNA, 24 nt, Human
ccugcagaccacgcauacagcuuc

SEQ ID NO: 115691 - RNA, 21 nt, Human
ccugcagaccacgcccaccuc

SEQ ID NO: 115692 - RNA, 24 nt, Human
ccugcagaccacgcccguccugcc

SEQ ID NO: 115693 - RNA, 32 nt, Human
ccugcagaccacgcccguccugccuguggcgc

SEQ ID NO: 115694 - RNA, 23 nt, Human
ccugcagaccaugaacugagcac

SEQ ID NO: 115695 - RNA, 32 nt, Human
ccugcagacgccagcccagacacccagcggcu

SEQ ID NO: 115696 - RNA, 20 nt, Human
ccugcagacugccauucucc

SEQ ID NO: 115697 - RNA, 21 nt, Human
ccugcagagaccuuguucucc

SEQ ID NO: 115698 - RNA, 22 nt, Human
ccugcagagagccuuucuccca

SEQ ID NO: 115699 - RNA, 25 nt, Human
ccugcagagccaaaccucagggccc

SEQ ID NO: 115700 - RNA, 32 nt, Human
ccugcagagccccagcugguucuuagagaggu

SEQ ID NO: 115701 - RNA, 32 nt, Human
ccugcagagccccaggcagucggcucagcgcg

SEQ ID NO: 115702 - RNA, 32 nt, Human
ccugcagagccugggagcugcaggaacugucu

SEQ ID NO: 115703 - RNA, 32 nt, Human
ccugcagagcggcaggauggagauauggagcu

SEQ ID NO: 115704 - RNA, 32 nt, Human
ccugcagagcuugccauuugcacuuuucaaau

SEQ ID NO: 115705 - RNA, 32 nt, Human
ccugcagaggaggcaugaccccaaaccaccau

SEQ ID NO: 115706 - RNA, 32 nt, Human
ccugcagaggcagaaggaagcagcgugcgucc

SEQ ID NO: 115707 - RNA, 32 nt, Human
ccugcagaggcugagcagggagagggggccag

SEQ ID NO: 115708 - RNA, 32 nt, Human
ccugcagaggcugugaaacagaagcagucagu

SEQ ID NO: 115709 - RNA, 20 nt, Human
ccugcagagggagauggcag

SEQ ID NO: 115710 - RNA, 32 nt, Human
ccugcagaggggcugagcaggacgccgcuggu

SEQ ID NO: 115711 - RNA, 20 nt, Human
ccugcagagucaaccaagca

SEQ ID NO: 115712 - RNA, 32 nt, Human
ccugcagaguccauuccaucaugaugcugugc

SEQ ID NO: 115713 - RNA, 24 nt, Human
ccugcagaucgcagaccuguuucc

SEQ ID NO: 115714 - RNA, 32 nt, Human
ccugcagaucuccagcccagaaccaucuuccc

SEQ ID NO: 115715 - RNA, 32 nt, Human
ccugcagcaaagagaagcaucagucuaacaag

SEQ ID NO: 115716 - RNA, 32 nt, Human
ccugcagcaacccccagccucaguucugcugc

SEQ ID NO: 115717 - RNA, 32 nt, Human
ccugcagcacaggaguucaaggcuucagugag

SEQ ID NO: 115718 - RNA, 32 nt, Human
ccugcagcaccaucugucauggcggcugggcu

SEQ ID NO: 115719 - RNA, 32 nt, Human
ccugcagcacccccugcugaagggguccccca

SEQ ID NO: 115720 - RNA, 32 nt, Human
ccugcagcaccucgccuccuccaggcaagaau

SEQ ID NO: 115721 - RNA, 32 nt, Human
ccugcagcaccuggccacgcuggccacagccu

SEQ ID NO: 115722 - RNA, 21 nt, Human
ccugcagcagagcagggcgca

SEQ ID NO: 115723 - RNA, 21 nt, Human
ccugcagcagagccgcagcag

SEQ ID NO: 115724 - RNA, 32 nt, Human
ccugcagcagagccuggaagacacccuaaugu

SEQ ID NO: 115725 - RNA, 32 nt, Human
ccugcagcagagcugggcaggcuggggacucc

SEQ ID NO: 115726 - RNA, 32 nt, Human
ccugcagcagaggaacuccuauaaccaccacc

SEQ ID NO: 115727 - RNA, 32 nt, Human
ccugcagcagaggcagaggcggcggcggcagc

SEQ ID NO: 115728 - RNA, 32 nt, Human
ccugcagcagguccuggugaagaccagcccca

SEQ ID NO: 115729 - RNA, 22 nt, Human
ccugcagcagucugccuccucu

SEQ ID NO: 115730 - RNA, 32 nt, Human
ccugcagcagugggugugggggcgcugcuggg

SEQ ID NO: 115731 - RNA, 22 nt, Human
ccugcagcauguacaccgagug

SEQ ID NO: 115732 - RNA, 32 nt, Human
ccugcagcauugaacuagaugucguccccgca

SEQ ID NO: 115733 - RNA, 23 nt, Human
ccugcagccacucucccgccucu

SEQ ID NO: 115734 - RNA, 21 nt, Human
ccugcagccagaaaguugcag

SEQ ID NO: 115735 - RNA, 21 nt, Human
ccugcagccagggucugggca

SEQ ID NO: 115736 - RNA, 32 nt, Human
ccugcagccaugaccuacaaggguggcagcuc

SEQ ID NO: 115737 - RNA, 32 nt, Human
ccugcagcccaaucccaguuauuggagcuaag

SEQ ID NO: 115738 - RNA, 32 nt, Human
ccugcagcccagggggugauguguguaaggga

SEQ ID NO: 115739 - RNA, 22 nt, Human
ccugcagcccauggugagcucu

SEQ ID NO: 115740 - RNA, 21 nt, Human
ccugcagccccaucccaucuc

SEQ ID NO: 115741 - RNA, 32 nt, Human
ccugcagccccgggcagcaucucccagaggcu

SEQ ID NO: 115742 - RNA, 21 nt, Human
ccugcagccccucgcacuacc

SEQ ID NO: 115743 - RNA, 22 nt, Human
ccugcagcccucgccugggaca

SEQ ID NO: 115744 - RNA, 32 nt, Human
ccugcagcccucugcuccucccggccgcugca

SEQ ID NO: 115745 - RNA, 23 nt, Human
ccugcagcccugcugaccaucuc

SEQ ID NO: 115746 - RNA, 24 nt, Human
ccugcagcccugcugcaccaucuc

SEQ ID NO: 115747 - RNA, 20 nt, Human
ccugcagccgccagcucucu

SEQ ID NO: 115748 - RNA, 21 nt, Human
ccugcagccgggcccagcucu

SEQ ID NO: 115749 - RNA, 22 nt, Human
ccugcagccguccugccccucu

SEQ ID NO: 115750 - RNA, 32 nt, Human
ccugcagccucaaacuccugggcucaagcaau

SEQ ID NO: 115751 - RNA, 21 nt, Human
ccugcagccuccuccaccuca

SEQ ID NO: 115752 - RNA, 32 nt, Human
ccugcagccucuccccgaccucagagccucug

SEQ ID NO: 115753 - RNA, 23 nt, Human
ccugcagccugcccugccucucu

SEQ ID NO: 115754 - RNA, 32 nt, Human
ccugcagccugcccugccucucucacaggccc

SEQ ID NO: 115755 - RNA, 32 nt, Human
ccugcagccugccucagcucaggcuaccacgc

SEQ ID NO: 115756 - RNA, 32 nt, Human
ccugcagccuuaaccuccacggccuucgauac

SEQ ID NO: 115757 - RNA, 32 nt, Human
ccugcagcuccagugcccugagcucccagcca

SEQ ID NO: 115758 - RNA, 21 nt, Human
ccugcagcuccugccauuucu

SEQ ID NO: 115759 - RNA, 25 nt, Human
ccugcagcuccuggaagggauccag

SEQ ID NO: 115760 - RNA, 32 nt, Human
ccugcagcuccuggcauggaacugacacauag

SEQ ID NO: 115761 - RNA, 32 nt, Human
ccugcagcucgcugagcacucccagguccuca

SEQ ID NO: 115762 - RNA, 32 nt, Human
ccugcagcucugagauccacgaggcagaggca

SEQ ID NO: 115763 - RNA, 23 nt, Human
ccugcagcucugggccaccugcu

SEQ ID NO: 115764 - RNA, 32 nt, Human
ccugcagcucuggggagccaggagucgcggcc

SEQ ID NO: 115765 - RNA, 25 nt, Human
ccugcagcugagcuuccacaagaca

SEQ ID NO: 115766 - RNA, 32 nt, Human
ccugcagcugcaaccugcccucuggucccagg

SEQ ID NO: 115767 - RNA, 21 nt, Human
ccugcagcugccccacuucuc

SEQ ID NO: 115768 - RNA, 23 nt, Human
ccugcagcugcuucacccucccu

SEQ ID NO: 115769 - RNA, 24 nt, Human
ccugcagcuggaaccagcaucucu

SEQ ID NO: 115770 - RNA, 25 nt, Human
ccugcagcugggugggcucaucucu

SEQ ID NO: 115771 - RNA, 32 nt, Human
ccugcagcuuucucccuacuggaccagagacc

SEQ ID NO: 115772 - RNA, 32 nt, Human
ccugcagcuuugccccaguaacagaugcccgu

SEQ ID NO: 115773 - RNA, 32 nt, Human
ccugcagcuuuguagagcuggauuuggaacuu

SEQ ID NO: 115774 - RNA, 32 nt, Human
ccugcagcuuuguccccacugugcaugccggc

SEQ ID NO: 115775 - RNA, 32 nt, Human
ccugcaggaaaacugaggcccuugggcaccuc

SEQ ID NO: 115776 - RNA, 32 nt, Human
ccugcaggaaaugagagauuugggagagcuga

SEQ ID NO: 115777 - RNA, 32 nt, Human
ccugcaggaaggccagagguucugguggaguu

SEQ ID NO: 115778 - RNA, 32 nt, Human
ccugcaggacaugcucugccugggaggggugg

SEQ ID NO: 115779 - RNA, 32 nt, Human
ccugcaggaccaucgcccgcagccucugcacc

SEQ ID NO: 115780 - RNA, 18 nt, Human
ccugcaggagaagcuguc

SEQ ID NO: 115781 - RNA, 32 nt, Human
ccugcaggagcagccuccaagcugccuuccag

SEQ ID NO: 115782 - RNA, 32 nt, Human
ccugcaggagccuacccugaaaucucuucuca

SEQ ID NO: 115783 - RNA, 22 nt, Human
ccugcaggagccuguuccuucc

SEQ ID NO: 115784 - RNA, 20 nt, Human
ccugcaggagcuguuuuucc

SEQ ID NO: 115785 - RNA, 19 nt, Human
ccugcaggaggaggaacag

SEQ ID NO: 115786 - RNA, 32 nt, Human
ccugcaggaggaggggacagccgacggcgcgg

SEQ ID NO: 115787 - RNA, 20 nt, Human
ccugcaggcagaggacgcgg

SEQ ID NO: 115788 - RNA, 31 nt, Human
ccugcaggcagucagcaccagccucagcaac

SEQ ID NO: 115789 - RNA, 32 nt, Human
ccugcaggcagugucaugggccguuggagucu

SEQ ID NO: 115790 - RNA, 21 nt, Human
ccugcaggccaagaucuuugc

SEQ ID NO: 115791 - RNA, 23 nt, Human
ccugcaggccaguccuguccucc

SEQ ID NO: 115792 - RNA, 32 nt, Human
ccugcaggccaguggggaggggagacauaaga

SEQ ID NO: 115793 - RNA, 32 nt, Human
ccugcaggccaucgcgugugguggagcguccg

SEQ ID NO: 115794 - RNA, 22 nt, Human
ccugcaggcccuccaguucuuu

SEQ ID NO: 115795 - RNA, 32 nt, Human
ccugcaggcccuuccucugccugcuggggucc

SEQ ID NO: 115796 - RNA, 23 nt, Human
ccugcaggccggcgcugcuuuuc

SEQ ID NO: 115797 - RNA, 32 nt, Human
ccugcaggccucccccuggaacugggacuggu

SEQ ID NO: 115798 - RNA, 32 nt, Human
ccugcaggccugcggggaucucuccccacuuc

SEQ ID NO: 115799 - RNA, 23 nt, Human
ccugcaggccuggggcuccuucu

SEQ ID NO: 115800 - RNA, 32 nt, Human
ccugcaggccuuucgugucaucggcacugcag

SEQ ID NO: 115801 - RNA, 24 nt, Human
ccugcaggccuuuuuguauuuucu

SEQ ID NO: 115802 - RNA, 32 nt, Human
ccugcaggcgaggcgaggaggccaggccaagu

SEQ ID NO: 115803 - RNA, 32 nt, Human
ccugcaggcgcugcucccagguuaugaggcug

SEQ ID NO: 115804 - RNA, 32 nt, Human
ccugcaggcgugugcauggggccaggugugca

SEQ ID NO: 115805 - RNA, 21 nt, Human
ccugcaggcucccuccaccca

SEQ ID NO: 115806 - RNA, 23 nt, Human
ccugcaggcugauccuucuuuuc

SEQ ID NO: 115807 - RNA, 32 nt, Human
ccugcaggcugcaggagggcacuggagcuggg

SEQ ID NO: 115808 - RNA, 23 nt, Human
ccugcagggaacuuguccugucu

SEQ ID NO: 115809 - RNA, 27 nt, Human
ccugcagggaaugugccaugucuuucu

SEQ ID NO: 115810 - RNA, 32 nt, Human
ccugcagggagguggcugucccgcgggaagcc

SEQ ID NO: 115811 - RNA, 24 nt, Human
ccugcagggaugagcuugccuuuc

SEQ ID NO: 115812 - RNA, 32 nt, Human
ccugcagggccugggaagggcuuugagggagc

SEQ ID NO: 115813 - RNA, 32 nt, Human
ccugcagggcuggugggccuccuucccccuuu

SEQ ID NO: 115814 - RNA, 21 nt, Human
ccugcaggggacaguuuuucc

SEQ ID NO: 115815 - RNA, 19 nt, Human
ccugcagggggagcugcag

SEQ ID NO: 115816 - RNA, 32 nt, Human
ccugcagggggaggggugacagggcgagcccc

SEQ ID NO: 115817 - RNA, 26 nt, Human
ccugcagggggcgcggcugucuuucu

SEQ ID NO: 115818 - RNA, 32 nt, Human
ccugcaggggguggacaaacuggagucuggag

SEQ ID NO: 115819 - RNA, 32 nt, Human
ccugcagggucugacgccugcauggaaugaug

SEQ ID NO: 115820 - RNA, 32 nt, Human
ccugcagggugcuguuuccugaaggaaaauau

SEQ ID NO: 115821 - RNA, 24 nt, Human
ccugcaggugcauuugguccuuuc

SEQ ID NO: 115822 - RNA, 32 nt, Human
ccugcaggugccacaggacagcagugauggag

SEQ ID NO: 115823 - RNA, 24 nt, Human
ccugcagguggcagcccucuuuuc

SEQ ID NO: 115824 - RNA, 32 nt, Human
ccugcaggugugacccgggcugggaggggcug

SEQ ID NO: 115825 - RNA, 24 nt, Human
ccugcagguuguguucccgccucu

SEQ ID NO: 115826 - RNA, 18 nt, Human
ccugcagucaccucguca

SEQ ID NO: 115827 - RNA, 32 nt, Human
ccugcagucagcucccagcccaguguaggcca

SEQ ID NO: 115828 - RNA, 19 nt, Human
ccugcaguccagggggcgu

SEQ ID NO: 115829 - RNA, 23 nt, Human
ccugcagucccagcaacauggga

SEQ ID NO: 115830 - RNA, 32 nt, Human
ccugcagucccagcuaccugggaggcugaguc

SEQ ID NO: 115831 - RNA, 32 nt, Human
ccugcagucccagcuacucaggaggcugaggc

SEQ ID NO: 115832 - RNA, 32 nt, Human
ccugcagucccagcuacucaggagguugaggc

SEQ ID NO: 115833 - RNA, 32 nt, Human
ccugcagucccagcuacucgggaagcugaggu

SEQ ID NO: 115834 - RNA, 32 nt, Human
ccugcagucccagcuacucgggaggcugaggc

SEQ ID NO: 115835 - RNA, 22 nt, Human
ccugcagucccagcuacuuggg

SEQ ID NO: 115836 - RNA, 23 nt, Human
ccugcagucccagcuacuuggga

SEQ ID NO: 115837 - RNA, 32 nt, Human
ccugcagucccagcuacuugggaggcuaagcc

SEQ ID NO: 115838 - RNA, 32 nt, Human
ccugcagucccagcuacuugggaggcugaggc

SEQ ID NO: 115839 - RNA, 32 nt, Human
ccugcagucccagcuauucaggaggcugaggc

SEQ ID NO: 115840 - RNA, 32 nt, Human
ccugcagucucagcuacucgggaggcugaggc

SEQ ID NO: 115841 - RNA, 32 nt, Human
ccugcagucugcgucagccucugggaaaccac

SEQ ID NO: 115842 - RNA, 32 nt, Human
ccugcagugcugcugcccucgucuaccagugg

SEQ ID NO: 115843 - RNA, 22 nt, Human
ccugcagugggccugccuccuc

SEQ ID NO: 115844 - RNA, 32 nt, Human
ccugcaguggguguuagcuccaaagagaugcc

SEQ ID NO: 115845 - RNA, 32 nt, Human
ccugcagugugaacacugcuuggcuggcucaa

SEQ ID NO: 115846 - RNA, 32 nt, Human
ccugcaguucccagucucuucuguccugcagc

SEQ ID NO: 115847 - RNA, 32 nt, Human
ccugcaguucuuguaacucuccacucuguguu

SEQ ID NO: 115848 - RNA, 18 nt, Human
ccugcaguugagggggcg

SEQ ID NO: 115849 - RNA, 32 nt, Human
ccugcauacuuugagucuccauccccagaauu

SEQ ID NO: 115850 - RNA, 32 nt, Human
ccugcauaggagggucuagagcagaccuugcc

SEQ ID NO: 115851 - RNA, 32 nt, Human
ccugcaucaagaaaaccugcuuguucacaaaa

SEQ ID NO: 115852 - RNA, 32 nt, Human
ccugcauccacaguagccugugcggcacucac

SEQ ID NO: 115853 - RNA, 23 nt, Human
ccugcauccacgcgccaccccgg

SEQ ID NO: 115854 - RNA, 32 nt, Human
ccugcauccaucucccuguuacaguggcccgc

SEQ ID NO: 115855 - RNA, 32 nt, Human
ccugcauccauggcaggauccccagccaguau

SEQ ID NO: 115856 - RNA, 32 nt, Human
ccugcaucccagagcaagccuagauccuugaa

SEQ ID NO: 115857 - RNA, 32 nt, Human
ccugcaucccccacaucacccugaagaugacu

SEQ ID NO: 115858 - RNA, 20 nt, Human
ccugcauccccuggguccag

SEQ ID NO: 115859 - RNA, 32 nt, Human
ccugcaucccuccugagcucuuggaggugccc

SEQ ID NO: 115860 - RNA, 32 nt, Human
ccugcauccucucucuggaaggcugcauguau

SEQ ID NO: 115861 - RNA, 32 nt, Human
ccugcauccugugcacaacaugacauuuuuaa

SEQ ID NO: 115862 - RNA, 22 nt, Human
ccugcauccuucucccauuccc

SEQ ID NO: 115863 - RNA, 32 nt, Human
ccugcaucggaucaccggcgugccccaccaug

SEQ ID NO: 115864 - RNA, 32 nt, Human
ccugcaucuccucuguugcggguaggccuuga

SEQ ID NO: 115865 - RNA, 32 nt, Human
ccugcaucugaggcucaugggcugcaagcccc

SEQ ID NO: 115866 - RNA, 22 nt, Human
ccugcaucuucuugaagcauca

SEQ ID NO: 115867 - RNA, 32 nt, Human
ccugcaugaacucuggaccugccugccucaga

SEQ ID NO: 115868 - RNA, 32 nt, Human
ccugcaugaauuguuuauuugcagugaugcuu

SEQ ID NO: 115869 - RNA, 32 nt, Human
ccugcaugagugugugcucugugucacugugg

SEQ ID NO: 115870 - RNA, 32 nt, Human
ccugcaugcccaggcuugugagccaaggugcu

SEQ ID NO: 115871 - RNA, 32 nt, Human
ccugcaugccuggggcucuugggaucugcucu

SEQ ID NO: 115872 - RNA, 32 nt, Human
ccugcaugggggcuccuguugcuuugggggcu

SEQ ID NO: 115873 - RNA, 18 nt, Human
ccugcaugguccacagug

SEQ ID NO: 115874 - RNA, 23 nt, Human
ccugcauucagccugugccuuuc

SEQ ID NO: 115875 - RNA, 32 nt, Human
ccugcauucauuccacgguccauuccacagcu

SEQ ID NO: 115876 - RNA, 21 nt, Human
ccugcauuccaaaugcugcuu

SEQ ID NO: 115877 - RNA, 32 nt, Human
ccugcauuccaaccagccugggugacagaggg

SEQ ID NO: 115878 - RNA, 32 nt, Human
ccugcauuccagccuaggcgacagagugagac

SEQ ID NO: 115879 - RNA, 22 nt, Human
ccugcauucccagcuacuuggg

SEQ ID NO: 115880 - RNA, 23 nt, Human
ccugcauucccagcuacuuggga

SEQ ID NO: 115881 - RNA, 32 nt, Human
ccugcauucccagcuacuugggaggcugaggc

SEQ ID NO: 115882 - RNA, 32 nt, Human
ccugcauucccagcuacuugggagguugaggg

SEQ ID NO: 115883 - RNA, 32 nt, Human
ccugcauucuggcaccacuugaacacgagacc

SEQ ID NO: 115884 - RNA, 22 nt, Human
ccugcauucugucuguccuuuu

SEQ ID NO: 115885 - RNA, 32 nt, Human
ccugcauucuuucuguauugaguauccuuuca

SEQ ID NO: 115886 - RNA, 32 nt, Human
ccugcauugaaccuuggcucuccugggauaua

SEQ ID NO: 115887 - RNA, 32 nt, Human
ccugcauugaggggagucugggugcaucagau

SEQ ID NO: 115888 - RNA, 32 nt, Human
ccugcauuuauaucugaauuauuaccuccaua

SEQ ID NO: 115889 - RNA, 32 nt, Human
ccugcauuucuaccugagacgugugaccugga

SEQ ID NO: 115890 - RNA, 32 nt, Human
ccugcauuucuaguuaagauggaucuuguaaa

SEQ ID NO: 115891 - RNA, 32 nt, Human
ccugcauuugcaaacagaaacuauagcagaca

SEQ ID NO: 115892 - RNA, 21 nt, Human
ccugccaaacaacugcaggga

SEQ ID NO: 115893 - RNA, 32 nt, Human
ccugccaaagugcugggauuacaggcuugagc

SEQ ID NO: 115894 - RNA, 32 nt, Human
ccugccaacauggugaaacccugucucugcua

SEQ ID NO: 115895 - RNA, 22 nt, Human
ccugccaacgucccacaggaca

SEQ ID NO: 115896 - RNA, 32 nt, Human
ccugccaagcaccugccugccugcaucacugc

SEQ ID NO: 115897 - RNA, 21 nt, Human
ccugccaaggagggggagugg

SEQ ID NO: 115898 - RNA, 32 nt, Human
ccugccaaguagcuggauuacaggcacgugcc

SEQ ID NO: 115899 - RNA, 32 nt, Human
ccugccaaguagcugggacuacaagugcacac

SEQ ID NO: 115900 - RNA, 32 nt, Human
ccugccaaguagcugggauuacagacaggcau

SEQ ID NO: 115901 - RNA, 32 nt, Human
ccugccaaguagcugggauuacaggcaugcgc

SEQ ID NO: 115902 - RNA, 32 nt, Human
ccugccaaucacagcuuuacucuuucagguca

SEQ ID NO: 115903 - RNA, 32 nt, Human
ccugccaauggugccaguuuccuucauuugcu

SEQ ID NO: 115904 - RNA, 32 nt, Human
ccugccacagccgacuuucuucucucccaggg

SEQ ID NO: 115905 - RNA, 21 nt, Human
ccugccacaucaaccuacaca

SEQ ID NO: 115906 - RNA, 32 nt, Human
ccugccaccagcuuaugugaucuugggcaagu

SEQ ID NO: 115907 - RNA, 32 nt, Human
ccugccaccauggccucugcaagccucuccuc

SEQ ID NO: 115908 - RNA, 32 nt, Human
ccugccacccagggcaggggaucuucugccgg

SEQ ID NO: 115909 - RNA, 32 nt, Human
ccugccaccccacugcccuccugggccuucug

SEQ ID NO: 115910 - RNA, 16 nt, Human
ccugccaccgcugcug

SEQ ID NO: 115911 - RNA, 32 nt, Human
ccugccaccggccauuuggacuaccuugggca

SEQ ID NO: 115912 - RNA, 32 nt, Human
ccugccaccggugcccuucaccaagcuuccca

SEQ ID NO: 115913 - RNA, 32 nt, Human
ccugccaccuggcaacugcuuaccagccuggc

SEQ ID NO: 115914 - RNA, 22 nt, Human
ccugccaccugucugucugucc

SEQ ID NO: 115915 - RNA, 32 nt, Human
ccugccaccuucagauccugugccccauccca

SEQ ID NO: 115916 - RNA, 18 nt, Human
ccugccaccuuccggggc

SEQ ID NO: 115917 - RNA, 19 nt, Human
ccugccacgagcacuggua

SEQ ID NO: 115918 - RNA, 20 nt, Human
ccugccacguggaagagcca

SEQ ID NO: 115919 - RNA, 32 nt, Human
ccugccacgugggaguggaggguggaggaacg

SEQ ID NO: 115920 - RNA, 32 nt, Human
ccugccacuccccucccuugcuccccucuguc

SEQ ID NO: 115921 - RNA, 32 nt, Human
ccugccacugcacaccagcccagcucccgugu

SEQ ID NO: 115922 - RNA, 32 nt, Human
ccugccacugcacaccagccugggugacagag

SEQ ID NO: 115923 - RNA, 32 nt, Human
ccugccacugcacuccagccugggcaacagag

SEQ ID NO: 115924 - RNA, 32 nt, Human
ccugccacugcacuccagccugggcgacagcg

SEQ ID NO: 115925 - RNA, 32 nt, Human
ccugccacugcacuccagccugugccacagag

SEQ ID NO: 115926 - RNA, 32 nt, Human
ccugccacugccucuucuuuucccugcugcca

SEQ ID NO: 115927 - RNA, 32 nt, Human
ccugccacuguggacugcccagcuccaccacc

SEQ ID NO: 115928 - RNA, 32 nt, Human
ccugccacuguugcuagucaggggcuugguuc

SEQ ID NO: 115929 - RNA, 32 nt, Human
ccugccacuugccucccugccugcuucuggcc

SEQ ID NO: 115930 - RNA, 32 nt, Human
ccugccagaagagaggcggggccgcguccucc

SEQ ID NO: 115931 - RNA, 18 nt, Human
ccugccagaaugcuggua

SEQ ID NO: 115932 - RNA, 32 nt, Human
ccugccagacuuccaguacuguccucgaccau

SEQ ID NO: 115933 - RNA, 32 nt, Human
ccugccagagagccaccaugaccucucagccu

SEQ ID NO: 115934 - RNA, 32 nt, Human
ccugccagagcuuggaagggaggacucuucuu

SEQ ID NO: 115935 - RNA, 32 nt, Human
ccugccagaggacugaccacagccuggcuggc

SEQ ID NO: 115936 - RNA, 19 nt, Human
ccugccagcagaggcucuu

SEQ ID NO: 115937 - RNA, 32 nt, Human
ccugccagcagcccugggacccugccagcagc

SEQ ID NO: 115938 - RNA, 31 nt, Human
ccugccagccacuucuuaccuccucaccuac

SEQ ID NO: 115939 - RNA, 32 nt, Human
ccugccagcccaccccagccuggggagagguc

SEQ ID NO: 115940 - RNA, 21 nt, Human
ccugccagccccaacccccgg

SEQ ID NO: 115941 - RNA, 32 nt, Human
ccugccagcccuuucuggauuacugauagaaa

SEQ ID NO: 115942 - RNA, 32 nt, Human
ccugccagccuccuccucccugccaaccuccu

SEQ ID NO: 115943 - RNA, 32 nt, Human
ccugccagccuccuccuucagcuuugcaaagu

SEQ ID NO: 115944 - RNA, 32 nt, Human
ccugccagccuccuuugaggacaucuugccuc

SEQ ID NO: 115945 - RNA, 21 nt, Human
ccugccagccuuccaggacag

SEQ ID NO: 115946 - RNA, 24 nt, Human
ccugccagcucugcugccaccucu

SEQ ID NO: 115947 - RNA, 32 nt, Human
ccugccagcugcgaggaccucugugguggagg

SEQ ID NO: 115948 - RNA, 32 nt, Human
ccugccaggaggacccagggcucuguaaguag

SEQ ID NO: 115949 - RNA, 32 nt, Human
ccugccaggaggugggcuggcgcggagggagg

SEQ ID NO: 115950 - RNA, 22 nt, Human
ccugccaggaguggaaggugca

SEQ ID NO: 115951 - RNA, 32 nt, Human
ccugccaggcagcagcgaggauggugaccgag

SEQ ID NO: 115952 - RNA, 32 nt, Human
ccugccaggcagccaggccaaggugacuucac

SEQ ID NO: 115953 - RNA, 32 nt, Human
ccugccaggccugcacagccuuggcuucacgc

SEQ ID NO: 115954 - RNA, 32 nt, Human
ccugccaggccugcagccuccccagccagggc

SEQ ID NO: 115955 - RNA, 32 nt, Human
ccugccaggccugcguggccuuagguuguucc

SEQ ID NO: 115956 - RNA, 32 nt, Human
ccugccaggcugggacaacugcaccaggcccu

SEQ ID NO: 115957 - RNA, 31 nt, Human
ccugccaggggugcuguuucaggcugggcau

SEQ ID NO: 115958 - RNA, 31 nt, Human
ccugccagguguggguccacagcagcaggua

SEQ ID NO: 115959 - RNA, 32 nt, Human
ccugccagugguacuuucacagcuggggagug

SEQ ID NO: 115960 - RNA, 32 nt, Human
ccugccagugucuugggcauuuccuuggcaag

SEQ ID NO: 115961 - RNA, 32 nt, Human
ccugccaguguuuagaagagccugacuguguu

SEQ ID NO: 115962 - RNA, 32 nt, Human
ccugccauaaggucugcaggugccuguugucu

SEQ ID NO: 115963 - RNA, 27 nt, Human
ccugccauaugaaggaccccacccccg

SEQ ID NO: 115964 - RNA, 32 nt, Human
ccugccaucaucugcuauuucugccacuucuc

SEQ ID NO: 115965 - RNA, 32 nt, Human
ccugccauccccaacagaucaccaguuguccc

SEQ ID NO: 115966 - RNA, 22 nt, Human
ccugccaucccucccacccccg

SEQ ID NO: 115967 - RNA, 32 nt, Human
ccugccaucccugcacacagccuggggagaag

SEQ ID NO: 115968 - RNA, 19 nt, Human
ccugccauccuccccuccc

SEQ ID NO: 115969 - RNA, 32 nt, Human
ccugccaugaaaggaaugagcccuagacugac

SEQ ID NO: 115970 - RNA, 32 nt, Human
ccugccaugcagcugagagccaagcccugcug

SEQ ID NO: 115971 - RNA, 32 nt, Human
ccugccaugccuugccaauaguaagcugcagg

SEQ ID NO: 115972 - RNA, 21 nt, Human
ccugccaugcuuuccacccca

SEQ ID NO: 115973 - RNA, 19 nt, Human
ccugccauggccacggcca

SEQ ID NO: 115974 - RNA, 24 nt, Human
ccugccaugggacggcuccucuga

SEQ ID NO: 115975 - RNA, 32 nt, Human
ccugccaugugccugcacucccagcaugccau

SEQ ID NO: 115976 - RNA, 32 nt, Human
ccugccauuccagaacuggaccacagaaaagu

SEQ ID NO: 115977 - RNA, 18 nt, Human
ccugccauucuccagggc

SEQ ID NO: 115978 - RNA, 32 nt, Human
ccugccauuugcacccuccgccuucacuccgg

SEQ ID NO: 115979 - RNA, 32 nt, Human
ccugcccaaauggugaaaccccaucucuacua

SEQ ID NO: 115980 - RNA, 19 nt, Human
ccugcccaacauggugaaa

SEQ ID NO: 115981 - RNA, 32 nt, Human
ccugcccaacccaacccgcacgguccggaagu

SEQ ID NO: 115982 - RNA, 32 nt, Human
ccugcccaagcccugcccucagggagcuucug

SEQ ID NO: 115983 - RNA, 32 nt, Human
ccugcccaagggacuggggccucaggcucuca

SEQ ID NO: 115984 - RNA, 32 nt, Human
ccugcccacaccaucuaugcucuugguuggug

SEQ ID NO: 115985 - RNA, 19 nt, Human
ccugcccacacuccugccu

SEQ ID NO: 115986 - RNA, 32 nt, Human
ccugcccacagaaccagcugauggccccagug

SEQ ID NO: 115987 - RNA, 32 nt, Human
ccugcccacagaauccaccaugugugaaccag

SEQ ID NO: 115988 - RNA, 32 nt, Human
ccugcccacagcaaccccacagagccacauuc

SEQ ID NO: 115989 - RNA, 32 nt, Human
ccugcccacaucucccuuccuucucucugggu

SEQ ID NO: 115990 - RNA, 32 nt, Human
ccugcccacaucuggacacuugaagacucucc

SEQ ID NO: 115991 - RNA, 32 nt, Human
ccugcccaccaccgcccgccugggcagccaug

SEQ ID NO: 115992 - RNA, 32 nt, Human
ccugcccaccagcugcucagcgcauaagaccu

SEQ ID NO: 115993 - RNA, 32 nt, Human
ccugcccacccccuccuuugccuguguccucc

SEQ ID NO: 115994 - RNA, 32 nt, Human
ccugcccacccuaccagcuccuccagcccugc

SEQ ID NO: 115995 - RNA, 32 nt, Human
ccugcccaccgacgccagccugcuuggaugac

SEQ ID NO: 115996 - RNA, 32 nt, Human
ccugcccaccugcuggagcccagccugugccg

SEQ ID NO: 115997 - RNA, 32 nt, Human
ccugcccacucucuccccuucauuggcugccc

SEQ ID NO: 115998 - RNA, 32 nt, Human
ccugcccacuugggggaaaccuuauacccaga

SEQ ID NO: 115999 - RNA, 23 nt, Human
ccugggcgaaguggcagagcuag

SEQ ID NO: 116000 - RNA, 23 nt, Human
ccugggcgaaguggcagagucag

SEQ ID NO: 116001 - RNA, 32 nt, Human
ccugggcgacaaagcaagacucugucucaaaa

SEQ ID NO: 116002 - RNA, 29 nt, Human
ccugggcgacacagcaagacuccgucucg

SEQ ID NO: 116003 - RNA, 32 nt, Human
ccugggcgacacagcgagacccugucucaaga

SEQ ID NO: 116004 - RNA, 32 nt, Human
ccugggcgacacaguaagacccugucucaaaa

SEQ ID NO: 116005 - RNA, 32 nt, Human
ccugggcgacagagcaagacccugcuuucccc

SEQ ID NO: 116006 - RNA, 32 nt, Human
ccugggcgacagagcaagacccugucucaaaa

SEQ ID NO: 116007 - RNA, 32 nt, Human
ccugggcgacagagcaagacgccaucucaaaa

SEQ ID NO: 116008 - RNA, 28 nt, Human
ccugggcgacagagcaagacucagucuc

SEQ ID NO: 116009 - RNA, 28 nt, Human
ccugggcgacagagcaagacuccgucuc

SEQ ID NO: 116010 - RNA, 32 nt, Human
ccugggcgacagagcaagacuccuucucaaaa

SEQ ID NO: 116011 - RNA, 28 nt, Human
ccugggcgacagagcaagacucggucuc

SEQ ID NO: 116012 - RNA, 26 nt, Human
ccugggcgacagagcaagacucucuc

SEQ ID NO: 116013 - RNA, 32 nt, Human
ccugggcgacagagcaagacucugucucaaaa

SEQ ID NO: 116014 - RNA, 32 nt, Human
ccugggcgacagagcaagacucugucucaaua

SEQ ID NO: 116015 - RNA, 32 nt, Human
ccugggcgacagagccagacccugucucaaaa

SEQ ID NO: 116016 - RNA, 32 nt, Human
ccugggcgacagagugagacccugccucaaaa

SEQ ID NO: 116017 - RNA, 28 nt, Human
ccugggcgacagagugagacccugucuc

SEQ ID NO: 116018 - RNA, 28 nt, Human
ccugggcgauagagcaagacucugucuc

SEQ ID NO: 116019 - RNA, 18 nt, Human
ccugggcgcagggugcag

SEQ ID NO: 116020 - RNA, 22 nt, Human
ccugggcgcccccacacggcua

SEQ ID NO: 116021 - RNA, 32 nt, Human
ccugggcgcggcggagggcggggagccgggca

SEQ ID NO: 116022 - RNA, 32 nt, Human
ccugggcggcagagcaagacucccucucaaaa

SEQ ID NO: 116023 - RNA, 24 nt, Human
ccugggcggcagagguugcaguga

SEQ ID NO: 116024 - RNA, 32 nt, Human
ccugggcggcagagguugcagugagucaagau

SEQ ID NO: 116025 - RNA, 32 nt, Human
ccugggcggggaccaggagggagcggggucgg

SEQ ID NO: 116026 - RNA, 32 nt, Human
ccugggcggggcccugcaccgacuccagccca

SEQ ID NO: 116027 - RNA, 32 nt, Human
ccugggcgugagccguccauucuucagugucu

SEQ ID NO: 116028 - RNA, 32 nt, Human
ccugggcgugauucucccucccuggcacagac

SEQ ID NO: 116029 - RNA, 32 nt, Human
ccugggcguggcacuuccuuccuuccugggcc

SEQ ID NO: 116030 - RNA, 32 nt, Human
ccugggcguguuguggacucagcacuggggcc

SEQ ID NO: 116031 - RNA, 32 nt, Human
ccugggcuaagugauccucccaccucagccuc

SEQ ID NO: 116032 - RNA, 32 nt, Human
ccugggcuauauagcaagaccccaucacuaca

SEQ ID NO: 116033 - RNA, 32 nt, Human
ccugggcuauggaucgaggagcugcuacucag

SEQ ID NO: 116034 - RNA, 23 nt, Human
ccugggcucaagcaauccucccu

SEQ ID NO: 116035 - RNA, 32 nt, Human
ccugggcucaagcaauucuuccaccucagccu

SEQ ID NO: 116036 - RNA, 23 nt, Human
ccugggcucaagccauccucccu

SEQ ID NO: 116037 - RNA, 32 nt, Human
ccugggcucaagcgauccuccacccucagccu

SEQ ID NO: 116038 - RNA, 32 nt, Human
ccugggcucaaguauccaccugccucagccuc

SEQ ID NO: 116039 - RNA, 32 nt, Human
ccugggcucaagugauccuccugcuuuggccu

SEQ ID NO: 116040 - RNA, 32 nt, Human
ccugggcucaagugauccuuccaccucagccu

SEQ ID NO: 116041 - RNA, 32 nt, Human
ccugggcucaaguguccucccacuugagugcc

SEQ ID NO: 116042 - RNA, 32 nt, Human
ccugggcucaagugucuuccugccucagccuc

SEQ ID NO: 116043 - RNA, 32 nt, Human
ccugggcucaaugauccucccgccucggccuc

SEQ ID NO: 116044 - RNA, 22 nt, Human
ccugggcucacugccccccaca

SEQ ID NO: 116045 - RNA, 19 nt, Human
ccugggcucaggugcggug

SEQ ID NO: 116046 - RNA, 32 nt, Human
ccugggcucagugguccucccacaaucagccu

SEQ ID NO: 116047 - RNA, 32 nt, Human
ccugggcucaucugcccuccauaggcaggaac

SEQ ID NO: 116048 - RNA, 32 nt, Human
ccugggcuccaaugccagcucugccacuugcu

SEQ ID NO: 116049 - RNA, 32 nt, Human
ccugggcuccaugagcaagaggcugcaggcug

SEQ ID NO: 116050 - RNA, 23 nt, Human
ccugggcuccauucccacucccu

SEQ ID NO: 116051 - RNA, 32 nt, Human
ccugggcucccaggcccuccugcagcagcccc

SEQ ID NO: 116052 - RNA, 32 nt, Human
ccugggcuccccaagaaggacgaggauccagg

SEQ ID NO: 116053 - RNA, 32 nt, Human
ccugggcucccccacuuucccuuccccacccc

SEQ ID NO: 116054 - RNA, 32 nt, Human
ccugggcuccuugccagcucccucuucccuua

SEQ ID NO: 116055 - RNA, 32 nt, Human
ccugggcucucuggggucaggaaaggugcuga

SEQ ID NO: 116056 - RNA, 32 nt, Human
ccugggcucuggguucgggaagaaggacuucc

SEQ ID NO: 116057 - RNA, 21 nt, Human
ccugggcugacaacacucccu

SEQ ID NO: 116058 - RNA, 20 nt, Human
ccugggcugagaaccccuca

SEQ ID NO: 116059 - RNA, 32 nt, Human
ccugggcugagcacagauuagagacucucccc

SEQ ID NO: 116060 - RNA, 32 nt, Human
ccugggcugaucugagaaacaggugugacaag

SEQ ID NO: 116061 - RNA, 21 nt, Human
ccugggcugaucugccuuaca

SEQ ID NO: 116062 - RNA, 32 nt, Human
ccugggcugcagaagccagggugcaugaccag

SEQ ID NO: 116063 - RNA, 32 nt, Human
ccugggcugcagcuccuggugcugagaacuuu

SEQ ID NO: 116064 - RNA, 32 nt, Human
ccugggcugcagcuugggagagcuccaguaac

SEQ ID NO: 116065 - RNA, 25 nt, Human
ccugggcugcaggagguugcggcgg

SEQ ID NO: 116066 - RNA, 32 nt, Human
ccugggcugcauucgagcaggucucaucuuua

SEQ ID NO: 116067 - RNA, 32 nt, Human
ccugggcugccaggaaccucauuuuccugggg

SEQ ID NO: 116068 - RNA, 32 nt, Human
ccugggcugccccagaacacaguccauuacga

SEQ ID NO: 116069 - RNA, 32 nt, Human
ccugggcugccgggaaccucaucugccugggg

SEQ ID NO: 116070 - RNA, 21 nt, Human
ccugggcugccgggggcgcgg

SEQ ID NO: 116071 - RNA, 18 nt, Human
ccugggcugccuccuccu

SEQ ID NO: 116072 - RNA, 32 nt, Human
ccugggcugccugggaggcuuccugguguggu

SEQ ID NO: 116073 - RNA, 19 nt, Human
ccugggcugcgcagugugg

SEQ ID NO: 116074 - RNA, 32 nt, Human
ccugggcugcgugcuggagagcggggacgggg

SEQ ID NO: 116075 - RNA, 32 nt, Human
ccugggcugcuggcgccugcgcagagcccucu

SEQ ID NO: 116076 - RNA, 32 nt, Human
ccugggcugcugugggcuggguccccggcggg

SEQ ID NO: 116077 - RNA, 32 nt, Human
ccugggcuggaagaggauggcagaggcugcug

SEQ ID NO: 116078 - RNA, 20 nt, Human
ccugggcuggacugcccuca

SEQ ID NO: 116079 - RNA, 32 nt, Human
ccugggcuggacugcccucaagcuuauacuag

SEQ ID NO: 116080 - RNA, 32 nt, Human
ccugggcuggacuguccuuuccugcagcccca

SEQ ID NO: 116081 - RNA, 22 nt, Human
ccugggcuggagcaauuccccu

SEQ ID NO: 116082 - RNA, 32 nt, Human
ccugggcuggaggcagcauccucuuugggaac

SEQ ID NO: 116083 - RNA, 32 nt, Human
ccugggcuggaggccagcuucggggagagaac

SEQ ID NO: 116084 - RNA, 20 nt, Human
ccugggcuggagugcagugg

SEQ ID NO: 116085 - RNA, 22 nt, Human
ccugggcuggagugcaguggug

SEQ ID NO: 116086 - RNA, 32 nt, Human
ccugggcuggcauggggaggggagagaaggug

SEQ ID NO: 116087 - RNA, 32 nt, Human
ccugggcuggcugggugcagcucucuuuucag

SEQ ID NO: 116088 - RNA, 32 nt, Human
ccugggcugggagcuggaagccauucuuguga

SEQ ID NO: 116089 - RNA, 20 nt, Human
ccugggcugggcaccaguga

SEQ ID NO: 116090 - RNA, 32 nt, Human
ccugggcugggccccugaggccaggcugacuu

SEQ ID NO: 116091 - RNA, 32 nt, Human
ccugggcugggcugccuucuucuacaguucaa

SEQ ID NO: 116092 - RNA, 32 nt, Human
ccugggcugggcuggggcuaggagggcagcag

SEQ ID NO: 116093 - RNA, 32 nt, Human
ccugggcuggucucaaacuccuggguucaagc

SEQ ID NO: 116094 - RNA, 25 nt, Human
ccugggcuggugcagggccccucca

SEQ ID NO: 116095 - RNA, 32 nt, Human
ccugggcuggugcuggcagugggagccguggc

SEQ ID NO: 116096 - RNA, 24 nt, Human
ccugggcugugaggacagggcccc

SEQ ID NO: 116097 - RNA, 32 nt, Human
ccugggcuuagcaaucuccuuaguucuugcua

SEQ ID NO: 116098 - RNA, 32 nt, Human
ccugggcuuagccaccugcucugugauccagg

SEQ ID NO: 116099 - RNA, 20 nt, Human
ccugggcuucaccccugacc

SEQ ID NO: 116100 - RNA, 21 nt, Human
ccugggcuucaccguggcccu

SEQ ID NO: 116101 - RNA, 22 nt, Human
ccugggcuucaccucuucaccu

SEQ ID NO: 116102 - RNA, 24 nt, Human
ccugggcuucaugcugugcuuccu

SEQ ID NO: 116103 - RNA, 32 nt, Human
ccugggcuuccucggccucuugcuaggcauag

SEQ ID NO: 116104 - RNA, 32 nt, Human
ccugggcuucuggagggccagcucccagagcu

SEQ ID NO: 116105 - RNA, 32 nt, Human
ccugggcuugcagugcagaggccucagggugu

SEQ ID NO: 116106 - RNA, 22 nt, Human
ccugggcuuucccacccucccu

SEQ ID NO: 116107 - RNA, 32 nt, Human
ccugggcuuugagagcugcgagaggagggagg

SEQ ID NO: 116108 - RNA, 32 nt, Human
ccuggggaacgugccaggcuuggggcugcucc

SEQ ID NO: 116109 - RNA, 32 nt, Human
ccuggggaagcucagcccugaggggcuuacuu

SEQ ID NO: 116110 - RNA, 32 nt, Human
ccuggggaaggaaggaguucagaggaagggug

SEQ ID NO: 116111 - RNA, 32 nt, Human
ccuggggaaggagccaguuugccggauacaaa

SEQ ID NO: 116112 - RNA, 22 nt, Human
ccuggggaaggggcgggcgcgg

SEQ ID NO: 116113 - RNA, 32 nt, Human
ccuggggaaguggggcuggaggcucugccccu

SEQ ID NO: 116114 - RNA, 18 nt, Human
ccuggggaccaccugccu

SEQ ID NO: 116115 - RNA, 21 nt, Human
ccuggggaccccaccuacaca

SEQ ID NO: 116116 - RNA, 19 nt, Human
ccuggggacccuugugccu

SEQ ID NO: 116117 - RNA, 18 nt, Human
ccuggggacguccuguuu

SEQ ID NO: 116118 - RNA, 32 nt, Human
ccuggggacuacaggugcgugcuaccauaccc

SEQ ID NO: 116119 - RNA, 32 nt, Human
ccuggggacucacuccacaguccccaggucag

SEQ ID NO: 116120 - RNA, 32 nt, Human
ccuggggacucccagccccagagcuccgaggc

SEQ ID NO: 116121 - RNA, 32 nt, Human
ccuggggacuccucuuaauguuuccaaauggg

SEQ ID NO: 116122 - RNA, 32 nt, Human
ccuggggacuccuggguuuucucccucccgac

SEQ ID NO: 116123 - RNA, 20 nt, Human
ccuggggacugggagggcag

SEQ ID NO: 116124 - RNA, 32 nt, Human
ccuggggacuggggacauccucggugacccug

SEQ ID NO: 116125 - RNA, 18 nt, Human
ccuggggagaacaaaugg

SEQ ID NO: 116126 - RNA, 32 nt, Human
ccuggggagaaugccuggaggagccagcggcu

SEQ ID NO: 116127 - RNA, 20 nt, Human
ccuggggagaggaccaggga

SEQ ID NO: 116128 - RNA, 32 nt, Human
ccuggggagaggguggguggagcuuggccucu

SEQ ID NO: 116129 - RNA, 32 nt, Human
ccuggggagaguggucccugcccuuccgcgcc

SEQ ID NO: 116130 - RNA, 32 nt, Human
ccuggggagccggaggcccugcccgacuccuu

SEQ ID NO: 116131 - RNA, 32 nt, Human
ccuggggagcuggccaagcacgcugugucuga

SEQ ID NO: 116132 - RNA, 18 nt, Human
ccuggggaggaacagugg

SEQ ID NO: 116133 - RNA, 32 nt, Human
ccuggggaggaggcggaggcagcggcuggagg

SEQ ID NO: 116134 - RNA, 32 nt, Human
ccuggggaggcugagacugcagaggagccacc

SEQ ID NO: 116135 - RNA, 32 nt, Human
ccuggggagggagggagggaugaggcagcguc

SEQ ID NO: 116136 - RNA, 32 nt, Human
ccuggggagggaggggagcccccgacgccucu

SEQ ID NO: 116137 - RNA, 32 nt, Human
ccuggggagggaggggagccccggagagccug

SEQ ID NO: 116138 - RNA, 32 nt, Human
ccuggggagggcacccgccccgccacgguugg

SEQ ID NO: 116139 - RNA, 18 nt, Human
ccuggggagggcaggugg

SEQ ID NO: 116140 - RNA, 32 nt, Human
ccuggggaggggcaguggcgggcuccagguug

SEQ ID NO: 116141 - RNA, 32 nt, Human
ccuggggaggggccauggugccaaugcacuua

SEQ ID NO: 116142 - RNA, 32 nt, Human
ccuggggaggguggggagggcgggggaaugga

SEQ ID NO: 116143 - RNA, 32 nt, Human
ccuggggaguaguggcaacagcccuuccgucc

SEQ ID NO: 116144 - RNA, 19 nt, Human
ccuggggaguggggugcag

SEQ ID NO: 116145 - RNA, 32 nt, Human
ccuggggauccagcgagcgcggucguccuugg

SEQ ID NO: 116146 - RNA, 32 nt, Human
ccuggggauccagcggauggacagcuuggcuc

SEQ ID NO: 116147 - RNA, 32 nt, Human
ccuggggaucuuuucuuuccucccacauauca

SEQ ID NO: 116148 - RNA, 21 nt, Human
ccuggggcaaccuccucggcc

SEQ ID NO: 116149 - RNA, 32 nt, Human
ccuggggcaaugcagagucucaggccugagca

SEQ ID NO: 116150 - RNA, 18 nt, Human
ccuggggcacaauaugug

SEQ ID NO: 116151 - RNA, 21 nt, Human
ccuggggcacucacacggcca

SEQ ID NO: 116152 - RNA, 32 nt, Human
ccuggggcagcacggccaucccugcaagcaca

SEQ ID NO: 116153 - RNA, 32 nt, Human
ccuggggcaggcauggcggauuccagcgaagg

SEQ ID NO: 116154 - RNA, 32 nt, Human
ccuggggcagggacacagccacggcccucaca

SEQ ID NO: 116155 - RNA, 32 nt, Human
ccuggggcagggcuugggcugaccuguaggau

SEQ ID NO: 116156 - RNA, 18 nt, Human
ccuggggcaggugcgcag

SEQ ID NO: 116157 - RNA, 22 nt, Human
ccuggggcagugagggggccgg

SEQ ID NO: 116158 - RNA, 32 nt, Human
ccuggggccacauagcucauaagcuguagaac

SEQ ID NO: 116159 - RNA, 23 nt, Human
ccuggggccaccucuguccuuuc

SEQ ID NO: 116160 - RNA, 18 nt, Human
ccuggggccacucuccca

SEQ ID NO: 116161 - RNA, 32 nt, Human
ccuggggccacugcugaccuggcuggaugcau

SEQ ID NO: 116162 - RNA, 32 nt, Human
ccuggggccagagugggcucuggucuccacag

SEQ ID NO: 116163 - RNA, 18 nt, Human
ccuggggccagcucugcc

SEQ ID NO: 116164 - RNA, 32 nt, Human
ccuggggccaugaggcugucacugccacugcu

SEQ ID NO: 116165 - RNA, 32 nt, Human
ccuggggccauggagcaagcaguccaagcugg

SEQ ID NO: 116166 - RNA, 32 nt, Human
ccuggggccauuggggaugacacucaagauac

SEQ ID NO: 116167 - RNA, 22 nt, Human
ccuggggcccaaguugcaguga

SEQ ID NO: 116168 - RNA, 20 nt, Human
ccuggggccccggggcgcgg

SEQ ID NO: 116169 - RNA, 17 nt, Human
ccuggggcccgcuggga

SEQ ID NO: 116170 - RNA, 20 nt, Human
ccuggggcccgggggcgcgg

SEQ ID NO: 116171 - RNA, 19 nt, Human
ccuggggccgacacguugg

SEQ ID NO: 116172 - RNA, 19 nt, Human
ccuggggccgggggugggg

SEQ ID NO: 116173 - RNA, 23 nt, Human
ccuggggccguaggaggccgcag

SEQ ID NO: 116174 - RNA, 19 nt, Human
ccuggggccuccagcagcu

SEQ ID NO: 116175 - RNA, 32 nt, Human
ccuggggccugcugguguugcugguggauaga

SEQ ID NO: 116176 - RNA, 19 nt, Human
ccuggggccuguacugccu

SEQ ID NO: 116177 - RNA, 18 nt, Human
ccuggggccuuccugccu

SEQ ID NO: 116178 - RNA, 18 nt, Human
ccuggggccuuccuggcu

SEQ ID NO: 116179 - RNA, 32 nt, Human
ccuggggcgauggauccguuuacggagaaacu

SEQ ID NO: 116180 - RNA, 19 nt, Human
ccuggggcgcaaacauucc

SEQ ID NO: 116181 - RNA, 18 nt, Human
ccuggggcgcgggcgcgg

SEQ ID NO: 116182 - RNA, 32 nt, Human
ccuggggcgcugcuccccacaguccaaauaag

SEQ ID NO: 116183 - RNA, 32 nt, Human
ccuggggcggcuggagccccugcacacacaau

SEQ ID NO: 116184 - RNA, 32 nt, Human
ccuggggcgggcgacaugaugugcaaaccuca

SEQ ID NO: 116185 - RNA, 19 nt, Human
ccuggggcgggcuccugcc

SEQ ID NO: 116186 - RNA, 18 nt, Human
ccuggggcgggggcacgg

SEQ ID NO: 116187 - RNA, 19 nt, Human
ccuggggcggggggaacag

SEQ ID NO: 116188 - RNA, 18 nt, Human
ccuggggcgggggugggg

SEQ ID NO: 116189 - RNA, 32 nt, Human
ccuggggcggugcuggccaaugcuggaaacau

SEQ ID NO: 116190 - RNA, 23 nt, Human
ccuggggcgugaggagggcgcgg

SEQ ID NO: 116191 - RNA, 20 nt, Human
ccuggggcuaccugaucuga

SEQ ID NO: 116192 - RNA, 19 nt, Human
ccuggggcuagcagugugg

SEQ ID NO: 116193 - RNA, 32 nt, Human
ccuggggcucaaucccccuuucaccagaugcc

SEQ ID NO: 116194 - RNA, 32 nt, Human
ccuggggcucaucaugaugcuuuccuggaucu

SEQ ID NO: 116195 - RNA, 20 nt, Human
ccuggggcuccggggcgcgg

SEQ ID NO: 116196 - RNA, 20 nt, Human
ccuggggcucuuucuuaaua

SEQ ID NO: 116197 - RNA, 32 nt, Human
ccuggggcugacagagcaagacacugucucaa

SEQ ID NO: 116198 - RNA, 32 nt, Human
ccuggggcugcacaucccugcccauccccaga

SEQ ID NO: 116199 - RNA, 32 nt, Human
ccuggggcugcugcagcuucuggggccuccac

SEQ ID NO: 116200 - RNA, 18 nt, Human
ccuggggcuggacagugg

SEQ ID NO: 116201 - RNA, 32 nt, Human
ccuggggcuggcccaggucuucauugagucca

SEQ ID NO: 116202 - RNA, 32 nt, Human
ccuggggcuggcuaggccuccacuuguccauc

SEQ ID NO: 116203 - RNA, 32 nt, Human
ccuggggcugggagggaguuggagaccagccu

SEQ ID NO: 116204 - RNA, 32 nt, Human
ccuggggcugucaucuauguuugggaacaugg

SEQ ID NO: 116205 - RNA, 32 nt, Human
ccuggggcuguugggagccaagggcccccugg

SEQ ID NO: 116206 - RNA, 22 nt, Human
ccuggggcuugcuggggccaug

SEQ ID NO: 116207 - RNA, 32 nt, Human
ccugggggacagagcaagacuguugucaaaaa

SEQ ID NO: 116208 - RNA, 32 nt, Human
ccugggggacagaggcagauaagaaggugcga

SEQ ID NO: 116209 - RNA, 24 nt, Human
ccugggggacugaggcugcaguga

SEQ ID NO: 116210 - RNA, 31 nt, Human
ccugggggagccucuucuucacuggaaaccu

SEQ ID NO: 116211 - RNA, 32 nt, Human
ccugggggagcuaggccggcggcagugguggu

SEQ ID NO: 116212 - RNA, 32 nt, Human
ccugggggaggcaauuugucaaagauuguugu

SEQ ID NO: 116213 - RNA, 32 nt, Human
ccugggggaggggccuggucacugugaacaca

SEQ ID NO: 116214 - RNA, 32 nt, Human
ccugggggauuccaaguuguugcugucguggc

SEQ ID NO: 116215 - RNA, 32 nt, Human
ccugggggauuccugagcuggccugucugcgu

SEQ ID NO: 116216 - RNA, 21 nt, Human
ccugggggcagcagaaggcug

SEQ ID NO: 116217 - RNA, 32 nt, Human
ccugggggcagccagggucgcagugagcccgg

SEQ ID NO: 116218 - RNA, 32 nt, Human
ccugggggcaucugccuuccagaaucucucuc

SEQ ID NO: 116219 - RNA, 18 nt, Human
ccugggggcccacugccu

SEQ ID NO: 116220 - RNA, 23 nt, Human
ccugggggccggccaccuggacc

SEQ ID NO: 116221 - RNA, 21 nt, Human
ccugggggccgguugcggugg

SEQ ID NO: 116222 - RNA, 21 nt, Human
ccugggggcgccgguccuuuc

SEQ ID NO: 116223 - RNA, 20 nt, Human
ccugggggcgccucgugcag

SEQ ID NO: 116224 - RNA, 32 nt, Human
ccugggggcuccugccggauccaugggggcgg

SEQ ID NO: 116225 - RNA, 17 nt, Human
ccugggggcugcaguga

SEQ ID NO: 116226 - RNA, 32 nt, Human
ccugggggcugcugcacugcccuccgcccuuc

SEQ ID NO: 116227 - RNA, 32 nt, Human
ccugggggcuggccucagucucugucccaucg

SEQ ID NO: 116228 - RNA, 32 nt, Human
ccugggggcuggcucccaggguggaggaaggu

SEQ ID NO: 116229 - RNA, 32 nt, Human
ccugggggcugggccggccccgcugaucccga

SEQ ID NO: 116230 - RNA, 32 nt, Human
ccugggggcuucuccccucgcugcugcacccu

SEQ ID NO: 116231 - RNA, 32 nt, Human
ccugggggcuugucaccucccccaccuucuuc

SEQ ID NO: 116232 - RNA, 18 nt, Human
ccuggggggaggggcgca

SEQ ID NO: 116233 - RNA, 19 nt, Human
ccuggggggccugcugccu

SEQ ID NO: 116234 - RNA, 23 nt, Human
ccuggggggcgaagguugcagug

SEQ ID NO: 116235 - RNA, 24 nt, Human
ccuggggggcgaagguugcaguga

SEQ ID NO: 116236 - RNA, 22 nt, Human
ccuggggggcggagguugcagu

SEQ ID NO: 116237 - RNA, 23 nt, Human
ccuggggggcggagguugcagug

SEQ ID NO: 116238 - RNA, 24 nt, Human
ccuggggggcggagguugcaguga

SEQ ID NO: 116239 - RNA, 25 nt, Human
ccuggggggcggcgaaggugggugg

SEQ ID NO: 116240 - RNA, 24 nt, Human
ccuggggggcugagguugcaguga

SEQ ID NO: 116241 - RNA, 21 nt, Human
ccuggggggugggaagcagug

SEQ ID NO: 116242 - RNA, 23 nt, Human
ccuggggggugggggagacacag

SEQ ID NO: 116243 - RNA, 32 nt, Human
ccuggggguacccgcauccacuuccuuucccc

SEQ ID NO: 116244 - RNA, 32 nt, Human
ccuggggguccccagugagcaaaggucugucc

SEQ ID NO: 116245 - RNA, 21 nt, Human
ccugggggucuaggggugcag

SEQ ID NO: 116246 - RNA, 32 nt, Human
ccuggggguggaggccugccuggcaggugugc

SEQ ID NO: 116247 - RNA, 32 nt, Human
ccugggggugggaggcugugggaggcuguaca

SEQ ID NO: 116248 - RNA, 19 nt, Human
ccugggggugggggcggag

SEQ ID NO: 116249 - RNA, 20 nt, Human
ccuggggguggggggcgggg

SEQ ID NO: 116250 - RNA, 18 nt, Human
ccuggggguggggugcag

SEQ ID NO: 116251 - RNA, 32 nt, Human
ccugggggugucggggcaggaggcuggggaug

SEQ ID NO: 116252 - RNA, 32 nt, Human
ccugggguacacaagcccagcagguccugagu

SEQ ID NO: 116253 - RNA, 20 nt, Human
ccuggggucagugacacugu

SEQ ID NO: 116254 - RNA, 32 nt, Human
ccuggggucagugagagaaaugggaaugguag

SEQ ID NO: 116255 - RNA, 32 nt, Human
ccugggguccccuggggugggguggucagggu

SEQ ID NO: 116256 - RNA, 19 nt, Human
ccuggggucggggggugca

SEQ ID NO: 116257 - RNA, 32 nt, Human
ccuggggugcacgauucccucagcucuggguu

SEQ ID NO: 116258 - RNA, 32 nt, Human
ccuggggugccagugaccacagaugccaugcc

SEQ ID NO: 116259 - RNA, 21 nt, Human
ccuggggugcccuccacugcc

SEQ ID NO: 116260 - RNA, 32 nt, Human
ccuggggugcugccucucacacauuucugcca

SEQ ID NO: 116261 - RNA, 32 nt, Human
ccugggguggaagagaaaugagcuuggcuugc

SEQ ID NO: 116262 - RNA, 32 nt, Human
ccugggguggacauucagcagagugcgagugg

SEQ ID NO: 116263 - RNA, 18 nt, Human
ccugggguggacccugcc

SEQ ID NO: 116264 - RNA, 20 nt, Human
ccugggguggaggaggggca

SEQ ID NO: 116265 - RNA, 19 nt, Human
ccugggguggcgucugccu

SEQ ID NO: 116266 - RNA, 19 nt, Human
ccugggguggcuccuggcc

SEQ ID NO: 116267 - RNA, 19 nt, Human
ccuggggugggaggcacag

SEQ ID NO: 116268 - RNA, 19 nt, Human
ccuggggugggaggcggag

SEQ ID NO: 116269 - RNA, 32 nt, Human
ccugggguggguuggccaaaggagaaccucaa

SEQ ID NO: 116270 - RNA, 32 nt, Human
ccugggguggugaccccaggagggaggcaggg

SEQ ID NO: 116271 - RNA, 18 nt, Human
ccuggggugugcaugugg

SEQ ID NO: 116272 - RNA, 32 nt, Human
ccugggguucaagugauccucccaccucagcc

SEQ ID NO: 116273 - RNA, 32 nt, Human
ccugggguucaauacuggaagugccuuauuua

SEQ ID NO: 116274 - RNA, 32 nt, Human
ccugggguuccagccuguagcagcuucaucug

SEQ ID NO: 116275 - RNA, 23 nt, Human
ccugggguuggggagggggucgg

SEQ ID NO: 116276 - RNA, 32 nt, Human
ccugggguugggggaacacagggacucccuuc

SEQ ID NO: 116277 - RNA, 32 nt, Human
ccugggguugggggacacagacgcgagagagc

SEQ ID NO: 116278 - RNA, 18 nt, Human
ccugggguuggucugcuu

SEQ ID NO: 116279 - RNA, 18 nt, Human
ccugggguuguccuggcu

SEQ ID NO: 116280 - RNA, 32 nt, Human
ccugggguuguucacaccacaggcacaauaca

SEQ ID NO: 116281 - RNA, 32 nt, Human
ccugggguuucuagacuggggccuggccaccc

SEQ ID NO: 116282 - RNA, 32 nt, Human
ccugggguuucugcaucaauuagaauaucauu

SEQ ID NO: 116283 - RNA, 21 nt, Human
ccugggguuugcagggugcug

SEQ ID NO: 116284 - RNA, 32 nt, Human
ccugggguuuuuccucuuccuucuuugugguu

SEQ ID NO: 116285 - RNA, 28 nt, Human
ccuggguaacagagcaagaccaugucuc

SEQ ID NO: 116286 - RNA, 32 nt, Human
ccuggguaacagagcaagacucugucucaaaa

SEQ ID NO: 116287 - RNA, 32 nt, Human
ccuggguaacauagcaagacucugucgcuaaa

SEQ ID NO: 116288 - RNA, 32 nt, Human
ccuggguaaggcccaagauggcugucuucgcc

SEQ ID NO: 116289 - RNA, 32 nt, Human
ccuggguaauauaggaagacccugucuuaaag

SEQ ID NO: 116290 - RNA, 32 nt, Human
ccuggguaauauaggaagacccugucuugaag

SEQ ID NO: 116291 - RNA, 32 nt, Human
ccuggguacagaaagggacugaaguguugggc

SEQ ID NO: 116292 - RNA, 32 nt, Human
ccuggguagaucugacaaacagccuuaugaau

SEQ ID NO: 116293 - RNA, 24 nt, Human
ccuggguagcugggauuacaagca

SEQ ID NO: 116294 - RNA, 23 nt, Human
ccuggguagcugggauuacaggc

SEQ ID NO: 116295 - RNA, 24 nt, Human
ccuggguagcugggauuacaggca

SEQ ID NO: 116296 - RNA, 24 nt, Human
ccuggguagcugggauuacaggcg

SEQ ID NO: 116297 - RNA, 24 nt, Human
ccuggguagcugggauuacaggug

SEQ ID NO: 116298 - RNA, 18 nt, Human
ccuggguagggauggugg

SEQ ID NO: 116299 - RNA, 32 nt, Human
ccuggguaguauauacacacauacgcagagcc

SEQ ID NO: 116300 - RNA, 32 nt, Human
ccugggucaaaaccacucagcccaggggaggg

SEQ ID NO: 116301 - RNA, 18 nt, Human
ccugggucaccgcugccg

SEQ ID NO: 116302 - RNA, 32 nt, Human
ccugggucagggacguuccaauggccaagaga

SEQ ID NO: 116303 - RNA, 32 nt, Human
ccugggucaucucagucauggagggagacggg

SEQ ID NO: 116304 - RNA, 32 nt, Human
ccuggguccaggcuggggcugcacgggcugug

SEQ ID NO: 116305 - RNA, 21 nt, Human
ccugggucccaggggucggaa

SEQ ID NO: 116306 - RNA, 32 nt, Human
ccugggucccauaacaucagaagugguugccg

SEQ ID NO: 116307 - RNA, 32 nt, Human
ccugggucccccaggguggcugggcuugggcu

SEQ ID NO: 116308 - RNA, 21 nt, Human
ccugggucccugccacaaccu

SEQ ID NO: 116309 - RNA, 18 nt, Human
ccugggucuaacaugugg

SEQ ID NO: 116310 - RNA, 32 nt, Human
ccugggucuaacuugcugucugacucucucuc

SEQ ID NO: 116311 - RNA, 32 nt, Human
ccugggucuccacagaagugcuggcagccacc

SEQ ID NO: 116312 - RNA, 32 nt, Human
ccugggucucugcuguguagucuccuucaggc

SEQ ID NO: 116313 - RNA, 32 nt, Human
ccugggucugcguucccuccccugggccugac

SEQ ID NO: 116314 - RNA, 32 nt, Human
ccugggucugggcauggggaggccgugccuca

SEQ ID NO: 116315 - RNA, 32 nt, Human
ccugggucuuccaggagaugcuguccaugcug

SEQ ID NO: 116316 - RNA, 32 nt, Human
ccugggucuugugcugugccuuuccuugucug

SEQ ID NO: 116317 - RNA, 32 nt, Human
ccugggugaagguacagaccucgcugugucuc

SEQ ID NO: 116318 - RNA, 32 nt, Human
ccugggugaaguugcgucauccaaaggcggcc

SEQ ID NO: 116319 - RNA, 19 nt, Human
ccugggugacaaagcaaga

SEQ ID NO: 116320 - RNA, 28 nt, Human
ccugggugacaaaguaagacccugccuc

SEQ ID NO: 116321 - RNA, 19 nt, Human
ccugggugacacagcaaga

SEQ ID NO: 116322 - RNA, 32 nt, Human
ccugggugacacagcaagaccccaucuccaca

SEQ ID NO: 116323 - RNA, 32 nt, Human
ccugggugacacagcaagacucugucucaaaa

SEQ ID NO: 116324 - RNA, 32 nt, Human
ccugggugacacuccagccugggugacaaagg

SEQ ID NO: 116325 - RNA, 32 nt, Human
ccugggugacagaaugagacccugucacacac

SEQ ID NO: 116326 - RNA, 29 nt, Human
ccugggugacagagcaagacccugucucu

SEQ ID NO: 116327 - RNA, 32 nt, Human
ccugggugacagagcaagaccugucacccugc

SEQ ID NO: 116328 - RNA, 19 nt, Human
ccugggugacagagcagga

SEQ ID NO: 116329 - RNA, 19 nt, Human
ccugggugacagagccaga

SEQ ID NO: 116330 - RNA, 19 nt, Human
ccugggugacagagcgaga

SEQ ID NO: 116331 - RNA, 32 nt, Human
ccugggugacagagggaaacuccaucucaaaa

SEQ ID NO: 116332 - RNA, 19 nt, Human
ccugggugacagagugaga

SEQ ID NO: 116333 - RNA, 32 nt, Human
ccugggugacagagugagacccuggcucaaua

SEQ ID NO: 116334 - RNA, 32 nt, Human
ccugggugacagagugagacccuguccaaaaa

SEQ ID NO: 116335 - RNA, 32 nt, Human
ccugggugacagagugagacccuguuccaaaa

SEQ ID NO: 116336 - RNA, 32 nt, Human
ccugggugacaggcacagugcagaagcaugag

SEQ ID NO: 116337 - RNA, 32 nt, Human
ccugggugacauagcaagacccugucuuaaaa

SEQ ID NO: 116338 - RNA, 19 nt, Human
ccugggugacccaugcugg

SEQ ID NO: 116339 - RNA, 32 nt, Human
ccugggugagcagcagggagagacagagacug

SEQ ID NO: 116340 - RNA, 22 nt, Human
ccugggugaggcuuugagcuga

SEQ ID NO: 116341 - RNA, 32 nt, Human
ccugggugagggugucucugugaggcuccacu

SEQ ID NO: 116342 - RNA, 22 nt, Human
ccugggugcaagccuccaggca

SEQ ID NO: 116343 - RNA, 17 nt, Human
ccugggugcagcugguc

SEQ ID NO: 116344 - RNA, 20 nt, Human
ccugggugcaggacguggcc

SEQ ID NO: 116345 - RNA, 17 nt, Human
ccugggugcaggugcca

SEQ ID NO: 116346 - RNA, 19 nt, Human
ccugggugccgcacgucca

SEQ ID NO: 116347 - RNA, 18 nt, Human
ccugggugcgcugaggcc

SEQ ID NO: 116348 - RNA, 21 nt, Human
ccugggugcggcgcggggacc

SEQ ID NO: 116349 - RNA, 18 nt, Human
ccugggugcggugaggcc

SEQ ID NO: 116350 - RNA, 32 nt, Human
ccugggugcucugugaucagaagguccuugga

SEQ ID NO: 116351 - RNA, 24 nt, Human
ccugggugcugggauuacagacgu

SEQ ID NO: 116352 - RNA, 21 nt, Human
ccugggugcugggauugcagg

SEQ ID NO: 116353 - RNA, 24 nt, Human
ccugggugcugggauugcaggcgu

SEQ ID NO: 116354 - RNA, 32 nt, Human
ccugggugcuuccucugugcccucgcuggggu

SEQ ID NO: 116355 - RNA, 32 nt, Human
ccuggguggaggccaggcagggcugcugcuga

SEQ ID NO: 116356 - RNA, 32 nt, Human
ccuggguggagggagacgccgggcuagagccu

SEQ ID NO: 116357 - RNA, 20 nt, Human
ccuggguggcaggggggcag

SEQ ID NO: 116358 - RNA, 23 nt, Human
ccuggguggcaggggggcagcag

SEQ ID NO: 116359 - RNA, 16 nt, Human
ccugggugggaggcca

SEQ ID NO: 116360 - RNA, 18 nt, Human
ccugggugggccugaccu

SEQ ID NO: 116361 - RNA, 32 nt, Human
ccuggguggggacugggcugugcccagggccu

SEQ ID NO: 116362 - RNA, 32 nt, Human
ccugggugggggcacuggaugccugaaguaag

SEQ ID NO: 116363 - RNA, 18 nt, Human
ccuggguggggggugcgg

SEQ ID NO: 116364 - RNA, 32 nt, Human
ccugggugggguuuggcuucagggugggguuu

SEQ ID NO: 116365 - RNA, 31 nt, Human
ccuggguggguggagcuggggagggcauggg

SEQ ID NO: 116366 - RNA, 31 nt, Human
ccuggguggguggguugggggaagugucagu

SEQ ID NO: 116367 - RNA, 32 nt, Human
ccuggguggucgaggcugcagugagccgagau

SEQ ID NO: 116368 - RNA, 23 nt, Human
ccuggguggugaggcucacagua

SEQ ID NO: 116369 - RNA, 32 nt, Human
ccuggguguaaaccuggagccugaugucccag

SEQ ID NO: 116370 - RNA, 32 nt, Human
ccugggugugauaucacaggaggccagagaga

SEQ ID NO: 116371 - RNA, 21 nt, Human
ccuggguguucuccaggacca

SEQ ID NO: 116372 - RNA, 32 nt, Human
ccuggguuaauccaggcugcagcuugcaacuc

SEQ ID NO: 116373 - RNA, 32 nt, Human
ccuggguucaagccaucccuccugccucagcc

SEQ ID NO: 116374 - RNA, 32 nt, Human
ccuggguucaagccauucucugccucagccuu

SEQ ID NO: 116375 - RNA, 32 nt, Human
ccuggguucaagugauucuccaccucagccuc

SEQ ID NO: 116376 - RNA, 23 nt, Human
ccuggguucuaugugacacuaca

SEQ ID NO: 116377 - RNA, 23 nt, Human
ccuggguucucaggggccaggag

SEQ ID NO: 116378 - RNA, 32 nt, Human
ccuggguucugccuccgccucgcccuuccagc

SEQ ID NO: 116379 - RNA, 32 nt, Human
ccuggguucuguuguugacauugcccuucagc

SEQ ID NO: 116380 - RNA, 32 nt, Human
ccuggguugacaagcugagaguagaggauaca

SEQ ID NO: 116381 - RNA, 32 nt, Human
ccuggguugaccucacagacauugaagugagu

SEQ ID NO: 116382 - RNA, 32 nt, Human
ccuggguuucugguucugaugacugugugagu

SEQ ID NO: 116383 - RNA, 32 nt, Human
ccuggguuucugucccucugaggcucaccagg

SEQ ID NO: 116384 - RNA, 32 nt, Human
ccugguaaacacaaguggacacuggugaggga

SEQ ID NO: 116385 - RNA, 32 nt, Human
ccugguaaaugagacagagauuuucuagaacu

SEQ ID NO: 116386 - RNA, 32 nt, Human
ccugguaaccaccauucuacuuucugucucua

SEQ ID NO: 116387 - RNA, 18 nt, Human
ccugguaacuggggugca

SEQ ID NO: 116388 - RNA, 20 nt, Human
ccugguaaggccgggugcag

SEQ ID NO: 116389 - RNA, 32 nt, Human
ccugguaaggccgggugcaguggcucacgccu

SEQ ID NO: 116390 - RNA, 32 nt, Human
ccugguaauucuucaccucuuuucucagcucc

SEQ ID NO: 116391 - RNA, 20 nt, Human
ccugguaauuugggggugua

SEQ ID NO: 116392 - RNA, 32 nt, Human
ccugguacaaaguuugacaaugcugaacauuu

SEQ ID NO: 116393 - RNA, 32 nt, Human
ccugguacaguggcucaugccuguaaucccag

SEQ ID NO: 116394 - RNA, 32 nt, Human
ccugguaccccaccugcccuuucauccccacc

SEQ ID NO: 116395 - RNA, 32 nt, Human
ccugguacucccccagcccucaguuuucaguc

SEQ ID NO: 116396 - RNA, 32 nt, Human
ccugguacuuuuugcauuucuacauucagaua

SEQ ID NO: 116397 - RNA, 32 nt, Human
ccugguagaaaaacauguagauuguuucuauu

SEQ ID NO: 116398 - RNA, 18 nt, Human
ccugguagagauguguag

SEQ ID NO: 116399 - RNA, 19 nt, Human
ccugguagcacugggccag

SEQ ID NO: 116400 - RNA, 32 nt, Human
ccugguagccuccuuuccuccccuucugccuu

SEQ ID NO: 116401 - RNA, 30 nt, Human
ccugguagccucuugcugcuccguggccuc

SEQ ID NO: 116402 - RNA, 24 nt, Human
ccugguagcugggauuacaggugu

SEQ ID NO: 116403 - RNA, 19 nt, Human
ccugguaggaauagcacag

SEQ ID NO: 116404 - RNA, 19 nt, Human
ccugguaggagggagucca

SEQ ID NO: 116405 - RNA, 24 nt, Human
ccugguaggcagagguugcaguga

SEQ ID NO: 116406 - RNA, 32 nt, Human
ccugguaggcagagguugcagugagccgaguu

SEQ ID NO: 116407 - RNA, 32 nt, Human
ccugguaggccacagcaccacacacacugcaa

SEQ ID NO: 116408 - RNA, 23 nt, Human
ccugguaggcccacaacuucccu

SEQ ID NO: 116409 - RNA, 20 nt, Human
ccugguaggccccaggccag

SEQ ID NO: 116410 - RNA, 32 nt, Human
ccugguaggcugaggcugcagugagccaagau

SEQ ID NO: 116411 - RNA, 32 nt, Human
ccugguagggaaauggugucgcugaaagggga

SEQ ID NO: 116412 - RNA, 18 nt, Human
ccugguagggacggggcg

SEQ ID NO: 116413 - RNA, 18 nt, Human
ccugguagggaggggugc

SEQ ID NO: 116414 - RNA, 32 nt, Human
ccugguagggcugauaggggcuuucagggagg

SEQ ID NO: 116415 - RNA, 32 nt, Human
ccugguaguagagacccagcuggccugggguc

SEQ ID NO: 116416 - RNA, 19 nt, Human
ccugguagugaauguguag

SEQ ID NO: 116417 - RNA, 18 nt, Human
ccugguaguuugggucag

SEQ ID NO: 116418 - RNA, 21 nt, Human
ccugguaucagacccacagua

SEQ ID NO: 116419 - RNA, 32 nt, Human
ccugguaucucaggcauauuguugaauuccug

SEQ ID NO: 116420 - RNA, 32 nt, Human
ccugguaucuccccaucccuacucccagcccc

SEQ ID NO: 116421 - RNA, 28 nt, Human
ccuggucaacaaagcaagacccuuucuc

SEQ ID NO: 116422 - RNA, 32 nt, Human
ccuggucaacagagcaagacucugucucaaaa

SEQ ID NO: 116423 - RNA, 22 nt, Human
ccuggucaacauagcaagaccc

SEQ ID NO: 116424 - RNA, 32 nt, Human
ccuggucaacauagcaagaccccugucucuau

SEQ ID NO: 116425 - RNA, 19 nt, Human
ccuggucaacauggugaaa

SEQ ID NO: 116426 - RNA, 32 nt, Human
ccuggucaagugcccagugcugugcugucauu

SEQ ID NO: 116427 - RNA, 32 nt, Human
ccuggucacagagcaggcuucucucggcuugg

SEQ ID NO: 116428 - RNA, 19 nt, Human
ccuggucacagccauccag

SEQ ID NO: 116429 - RNA, 32 nt, Human
ccuggucacccauugaagcaguguuuguggug

SEQ ID NO: 116430 - RNA, 32 nt, Human
ccuggucacugcaugauccgcucuggucaaac

SEQ ID NO: 116431 - RNA, 24 nt, Human
ccuggucacuucugguucgauuga

SEQ ID NO: 116432 - RNA, 20 nt, Human
ccuggucagagggggugggg

SEQ ID NO: 116433 - RNA, 32 nt, Human
ccuggucagcaaccugccccagaccuggaggg

SEQ ID NO: 116434 - RNA, 32 nt, Human
ccuggucagcaugggcuggggcacuggugacc

SEQ ID NO: 116435 - RNA, 32 nt, Human
ccuggucagcccaaaccaccagaagcccagaa

SEQ ID NO: 116436 - RNA, 20 nt, Human
ccuggucaggaggggggcag

SEQ ID NO: 116437 - RNA, 32 nt, Human
ccuggucaggguggggccagaugggagggagc

SEQ ID NO: 116438 - RNA, 32 nt, Human
ccuggucaucagccccagcccugacaggcccu

SEQ ID NO: 116439 - RNA, 32 nt, Human
ccuggucauccaguagaacagaaggccgaguc

SEQ ID NO: 116440 - RNA, 32 nt, Human
ccuggucaucccucagucacucauaucagagu

SEQ ID NO: 116441 - RNA, 32 nt, Human
ccuggucaugagggucuaaucagugagggugu

SEQ ID NO: 116442 - RNA, 22 nt, Human
ccuggucaugccaggcaccugg

SEQ ID NO: 116443 - RNA, 26 nt, Human
ccuggucauguccucgucgggcgugg

SEQ ID NO: 116444 - RNA, 32 nt, Human
ccugguccagcaccugcggggcccucgggcuu

SEQ ID NO: 116445 - RNA, 32 nt, Human
ccugguccagcagggacugaagguggugggcu

SEQ ID NO: 116446 - RNA, 32 nt, Human
ccugguccauggggagaccacaccucacggag

SEQ ID NO: 116447 - RNA, 18 nt, Human
ccuggucccaccagguag

SEQ ID NO: 116448 - RNA, 18 nt, Human
ccuggucccacuccugcc

SEQ ID NO: 116449 - RNA, 32 nt, Human
ccuggucccagaggagcuugacugaccauaaa

SEQ ID NO: 116450 - RNA, 23 nt, Human
ccuggucccagguuccacaagug

SEQ ID NO: 116451 - RNA, 22 nt, Human
ccugguccccucagcucugccu

SEQ ID NO: 116452 - RNA, 26 nt, Human
ccuggucccucuggagguugcggugg

SEQ ID NO: 116453 - RNA, 32 nt, Human
ccuggucccuggggacuuccucuggcugcuuu

SEQ ID NO: 116454 - RNA, 21 nt, Human
ccugguccggaccugaccuga

SEQ ID NO: 116455 - RNA, 18 nt, Human
ccugguccgggggcgggg

SEQ ID NO: 116456 - RNA, 32 nt, Human
ccugguccuaggcuggacacaggauucagaaa

SEQ ID NO: 116457 - RNA, 23 nt, Human
ccugguccuaguccacaagggug

SEQ ID NO: 116458 - RNA, 19 nt, Human
ccugguccucccccuuccc

SEQ ID NO: 116459 - RNA, 32 nt, Human
ccugguccuccgccucuccaccagcccccucc

SEQ ID NO: 116460 - RNA, 32 nt, Human
ccugguccucugggaauagaagauccauuugu

SEQ ID NO: 116461 - RNA, 17 nt, Human
ccugguccuucuggugc

SEQ ID NO: 116462 - RNA, 32 nt, Human
ccugguccuuuuuaaacuacuaguuuuaaaaa

SEQ ID NO: 116463 - RNA, 32 nt, Human
ccuggucgagacaacuauuuuugaggcaagac

SEQ ID NO: 116464 - RNA, 23 nt, Human
ccuggucgccacaccgggccuga

SEQ ID NO: 116465 - RNA, 32 nt, Human
ccuggucguugcacuccagccugucgcugugc

SEQ ID NO: 116466 - RNA, 32 nt, Human
ccuggucuacauccuaaagagauguaccgucc

SEQ ID NO: 116467 - RNA, 32 nt, Human
ccuggucuagcuccucuccaaacagccaugcc

SEQ ID NO: 116468 - RNA, 32 nt, Human
ccuggucucauggagauucaaagguguuugag

SEQ ID NO: 116469 - RNA, 32 nt, Human
ccuggucuccacccucccagccuagccucgcg

SEQ ID NO: 116470 - RNA, 19 nt, Human
ccuggucuccacguuucca

SEQ ID NO: 116471 - RNA, 22 nt, Human
ccuggucuccguggcacuugua

SEQ ID NO: 116472 - RNA, 32 nt, Human
ccuggucuccugcuucagcucuguacaacgag

SEQ ID NO: 116473 - RNA, 32 nt, Human
ccuggucucgucugggaccugggacagcagcu

SEQ ID NO: 116474 - RNA, 32 nt, Human
ccuggucucucuuccuuuccuggucucucuuc

SEQ ID NO: 116475 - RNA, 32 nt, Human
ccuggucucuguagcugagagagacagagcug

SEQ ID NO: 116476 - RNA, 32 nt, Human
ccuggucugcccugggcucaucagccuuccug

SEQ ID NO: 116477 - RNA, 32 nt, Human
ccuggucugugcaaacucccucagggagcccc

SEQ ID NO: 116478 - RNA, 23 nt, Human
ccuggucugugcucagguacugg

SEQ ID NO: 116479 - RNA, 32 nt, Human
ccuggucuuggccugugaaugugccucguuca

SEQ ID NO: 116480 - RNA, 18 nt, Human
ccuggucuuucccugaug

SEQ ID NO: 116481 - RNA, 32 nt, Human
ccuggugaaaccagaaaacucaagaaauggca

SEQ ID NO: 116482 - RNA, 32 nt, Human
ccuggugaacuacagugaaagucuuauugagc

SEQ ID NO: 116483 - RNA, 19 nt, Human
ccuggugaagcaucugaug

SEQ ID NO: 116484 - RNA, 32 nt, Human
ccuggugacaggcaucccccaggugggaggag

SEQ ID NO: 116485 - RNA, 32 nt, Human
ccuggugacccagcgaaaccagcuucaucucc

SEQ ID NO: 116486 - RNA, 32 nt, Human
ccuggugaccugcucucccaagaacagagccu

SEQ ID NO: 116487 - RNA, 32 nt, Human
ccuggugacuccauucugaggugucacaagca

SEQ ID NO: 116488 - RNA, 32 nt, Human
ccuggugacucugcugcugcagugucugguuu

SEQ ID NO: 116489 - RNA, 32 nt, Human
ccuggugacugcccgcugggaaacccagagca

SEQ ID NO: 116490 - RNA, 32 nt, Human
ccuggugagugcaaggauaggugacccagggg

SEQ ID NO: 116491 - RNA, 32 nt, Human
ccuggugcaaacugcccagggccuccagcuga

SEQ ID NO: 116492 - RNA, 32 nt, Human
ccuggugcaguggcucacaccuguaaucccaa

SEQ ID NO: 116493 - RNA, 32 nt, Human
ccuggugccaaucuucuccuucggggagaaug

SEQ ID NO: 116494 - RNA, 16 nt, Human
ccuggugcccagggcu

SEQ ID NO: 116495 - RNA, 27 nt, Human
ccuggugcccagguggaggugcagugg

SEQ ID NO: 116496 - RNA, 32 nt, Human
ccuggugcccagguggaggugcagugggggua

SEQ ID NO: 116497 - RNA, 32 nt, Human
ccuggugcccugcucaggcaaacugacugcca

SEQ ID NO: 116498 - RNA, 32 nt, Human
ccuggugccugauccugcuggggcccgggggu

SEQ ID NO: 116499 - RNA, 32 nt, Human
ccuggugccugcggcauccuucugccuguuuc

SEQ ID NO: 116500 - RNA, 32 nt, Human
ccuggugccuguaaucccagcuacucgggagg

SEQ ID NO: 116501 - RNA, 18 nt, Human
ccuggugcgacagcgugg

SEQ ID NO: 116502 - RNA, 32 nt, Human
ccuggugcguggagguggagccugcggcugga

SEQ ID NO: 116503 - RNA, 32 nt, Human
ccuggugcucacugggaccccauaugucugcg

SEQ ID NO: 116504 - RNA, 21 nt, Human
ccuggugcuccugcccagcca

SEQ ID NO: 116505 - RNA, 32 nt, Human
ccuggugcucuucauccuuuaccaaagagaca

SEQ ID NO: 116506 - RNA, 32 nt, Human
ccuggugcugccucuggcuuugucuuuccuca

SEQ ID NO: 116507 - RNA, 32 nt, Human
ccuggugcugcugguggugcugcugcugcuuc

SEQ ID NO: 116508 - RNA, 32 nt, Human
ccuggugcugguguuuucaucuggggagggug

SEQ ID NO: 116509 - RNA, 18 nt, Human
ccugguggaaaaggccag

SEQ ID NO: 116510 - RNA, 32 nt, Human
ccugguggaagaggccgcggugcugcgggccg

SEQ ID NO: 116511 - RNA, 19 nt, Human
ccugguggaaggaggcgca

SEQ ID NO: 116512 - RNA, 19 nt, Human
ccugguggacaagcugcag

SEQ ID NO: 116513 - RNA, 20 nt, Human
ccugguggacaggggccuag

SEQ ID NO: 116514 - RNA, 18 nt, Human
ccugguggaggagcccag

SEQ ID NO: 116515 - RNA, 22 nt, Human
ccugguggaggagcccagggca

SEQ ID NO: 116516 - RNA, 20 nt, Human
ccugguggauccgggagcgg

SEQ ID NO: 116517 - RNA, 32 nt, Human
ccugguggaugugcuauuuucuuaaaggagua

SEQ ID NO: 116518 - RNA, 32 nt, Human
ccugguggcacaugccuguaauccgagugcuu

SEQ ID NO: 116519 - RNA, 32 nt, Human
ccugguggcagaggccuguaaucccagcuacu

SEQ ID NO: 116520 - RNA, 32 nt, Human
ccugguggcaggcuucacuguagggacggaca

SEQ ID NO: 116521 - RNA, 32 nt, Human
ccugguggcaggugcuuucagcuuugaggaga

SEQ ID NO: 116522 - RNA, 32 nt, Human
ccugguggccacucgugccugguggagagcga

SEQ ID NO: 116523 - RNA, 32 nt, Human
ccugguggcccugggagccaggaugggaccaa

SEQ ID NO: 116524 - RNA, 32 nt, Human
ccugguggcccugggcaggugcacugacaccc

SEQ ID NO: 116525 - RNA, 32 nt, Human
ccugguggccucgccggcagugccccaacucu

SEQ ID NO: 116526 - RNA, 20 nt, Human
ccugguggccugggggccag

SEQ ID NO: 116527 - RNA, 19 nt, Human
ccugguggcgagagcgcgg

SEQ ID NO: 116528 - RNA, 19 nt, Human
ccugguggcgauggcgcgg

SEQ ID NO: 116529 - RNA, 32 nt, Human
ccugguggcgcaucccuguaaucccagcuacu

SEQ ID NO: 116530 - RNA, 32 nt, Human
ccugguggcgugcgccuguaaucccagcuacu

SEQ ID NO: 116531 - RNA, 32 nt, Human
ccugguggcgugcgccuguaaucccagcuaua

SEQ ID NO: 116532 - RNA, 23 nt, Human
ccugguggcucacaccuguaauc

SEQ ID NO: 116533 - RNA, 32 nt, Human
ccugguggcucacaccuguaaucccagcucuu

SEQ ID NO: 116534 - RNA, 23 nt, Human
ccugguggcucacgccuguaauc

SEQ ID NO: 116535 - RNA, 32 nt, Human
ccugguggcucacgccuguaaucccagcacuu

SEQ ID NO: 116536 - RNA, 32 nt, Human
ccugguggcuccugccugcuccuucacuuuug

SEQ ID NO: 116537 - RNA, 32 nt, Human
ccugguggcucuugccuguaauuccagcuacu

SEQ ID NO: 116538 - RNA, 21 nt, Human
ccugguggcugagaccaggga

SEQ ID NO: 116539 - RNA, 32 nt, Human
ccugguggcugagaccagggaggacaugaaug

SEQ ID NO: 116540 - RNA, 32 nt, Human
ccugguggcugaguugaaggguguggcccaaa

SEQ ID NO: 116541 - RNA, 32 nt, Human
ccugguggcuguccuuggccccaaagcagacu

SEQ ID NO: 116542 - RNA, 32 nt, Human
ccuggugggaagggauguugcucugcuuguau

SEQ ID NO: 116543 - RNA, 32 nt, Human
ccuggugggacccccuguaccaaaacucauca

SEQ ID NO: 116544 - RNA, 32 nt, Human
ccuggugggcgugagaggauagguggcagggc

SEQ ID NO: 116545 - RNA, 32 nt, Human
ccugguggggcggacggaaaaggggugggcau

SEQ ID NO: 116546 - RNA, 32 nt, Human
ccugguggggcuggcaggaugguggagguuuc

SEQ ID NO: 116547 - RNA, 24 nt, Human
ccugguggggcugggcgggcgggg

SEQ ID NO: 116548 - RNA, 22 nt, Human
ccuggugggggaggcagggcag

SEQ ID NO: 116549 - RNA, 32 nt, Human
ccuggugggggaggcagggcaggagguuggag

SEQ ID NO: 116550 - RNA, 18 nt, Human
ccuggugggguggcggag

SEQ ID NO: 116551 - RNA, 19 nt, Human
ccugguggggugggggugc

SEQ ID NO: 116552 - RNA, 32 nt, Human
ccugguggggugggggugccagguguguccag

SEQ ID NO: 116553 - RNA, 32 nt, Human
ccuggugguaugcaccuguaguccuagcuacu

SEQ ID NO: 116554 - RNA, 32 nt, Human
ccugguggugaguguaaagaagacuuugccuc

SEQ ID NO: 116555 - RNA, 32 nt, Human
ccugguggugcgugccuguaaucccagcuacu

SEQ ID NO: 116556 - RNA, 32 nt, Human
ccugguggugggcaccuguaaucccagcuacu

SEQ ID NO: 116557 - RNA, 32 nt, Human
ccugguggugggcgccuguaauuccagcuacu

SEQ ID NO: 116558 - RNA, 32 nt, Human
ccugguggugugcgccuguaaucccagcuacu

SEQ ID NO: 116559 - RNA, 32 nt, Human
ccuggugguucacucuuggagccugcagagcu

SEQ ID NO: 116560 - RNA, 32 nt, Human
ccuggugguuccugccagccucaggccagggg

SEQ ID NO: 116561 - RNA, 32 nt, Human
ccuggugguuucuguuuucugaaggaagugac

SEQ ID NO: 116562 - RNA, 21 nt, Human
ccugguguagcagacacugca

SEQ ID NO: 116563 - RNA, 32 nt, Human
ccuggugucaaacuuugaaucuuuggaaacac

SEQ ID NO: 116564 - RNA, 32 nt, Human
ccuggugucacccaggcuggagugcaguggug

SEQ ID NO: 116565 - RNA, 32 nt, Human
ccuggugucaucccagaguccacuguaaccau

SEQ ID NO: 116566 - RNA, 32 nt, Human
ccugguguccugcuuagaaugugaagagagug

SEQ ID NO: 116567 - RNA, 32 nt, Human
ccuggugucuccaagcuucugggcaccacugc

SEQ ID NO: 116568 - RNA, 32 nt, Human
ccuggugucuggaagaguagccuggauuuaug

SEQ ID NO: 116569 - RNA, 32 nt, Human
ccuggugucuugauaccaggaggccagggauu

SEQ ID NO: 116570 - RNA, 21 nt, Human
ccuggugugcaagcacuggua

SEQ ID NO: 116571 - RNA, 32 nt, Human
ccuggugugcugcgugcucgcaaccacagaug

SEQ ID NO: 116572 - RNA, 32 nt, Human
ccugguguggagagguuaaaagacuugcacag

SEQ ID NO: 116573 - RNA, 32 nt, Human
ccugguguggugacguacaccuguaauuccag

SEQ ID NO: 116574 - RNA, 32 nt, Human
ccugguguggugcugcucccucaccuccaaaa

SEQ ID NO: 116575 - RNA, 32 nt, Human
ccuggugugguggcucacaccuguaaucccaa

SEQ ID NO: 116576 - RNA, 32 nt, Human
ccuggugugguggcucacaccuguaauugcag

SEQ ID NO: 116577 - RNA, 32 nt, Human
ccuggugugguggcucaugccuguaaucccug

SEQ ID NO: 116578 - RNA, 32 nt, Human
ccuggugugguggcucaugccugugauccuag

SEQ ID NO: 116579 - RNA, 20 nt, Human
ccuggugugguggggcccgg

SEQ ID NO: 116580 - RNA, 32 nt, Human
ccugguguguggagguggcgggaggggucagu

SEQ ID NO: 116581 - RNA, 32 nt, Human
ccugguguucacgagaacacacuaaaggacuc

SEQ ID NO: 116582 - RNA, 32 nt, Human
ccugguguucacuaaggcguggggugacaggc

SEQ ID NO: 116583 - RNA, 32 nt, Human
ccugguguugguguugccucacuccucugagc

SEQ ID NO: 116584 - RNA, 32 nt, Human
ccugguuacauuuuccauagcugcaguacaau

SEQ ID NO: 116585 - RNA, 32 nt, Human
ccugguuagaggaggaagcggaaaguaguuuu

SEQ ID NO: 116586 - RNA, 32 nt, Human
ccugguuagagguguggacaccagguguucuu

SEQ ID NO: 116587 - RNA, 32 nt, Human
ccugguuagccaucucaugcucagccuuauca

SEQ ID NO: 116588 - RNA, 32 nt, Human
ccugguuaucucuguuuuugugauguuagcac

SEQ ID NO: 116589 - RNA, 32 nt, Human
ccugguuaugcagcuucucuugucuucuucau

SEQ ID NO: 116590 - RNA, 32 nt, Human
ccugguucaaacgauucuccugccucagccuc

SEQ ID NO: 116591 - RNA, 32 nt, Human
ccugguucaagcaauucucaugccucagccuc

SEQ ID NO: 116592 - RNA, 32 nt, Human
ccugguucaagcaauucuccugccucagcgau

SEQ ID NO: 116593 - RNA, 32 nt, Human
ccugguucaagcaauucuccugccuugccucc

SEQ ID NO: 116594 - RNA, 32 nt, Human
ccugguucaagcaauucugccccagccuccca

SEQ ID NO: 116595 - RNA, 32 nt, Human
ccugguucaagcgauuauugugccucagccuc

SEQ ID NO: 116596 - RNA, 32 nt, Human
ccugguucaagcgauucuccuaccucggccuc

SEQ ID NO: 116597 - RNA, 32 nt, Human
ccugguucacugcacccucugccucccagguu

SEQ ID NO: 116598 - RNA, 32 nt, Human
ccugguucagugccagcuccaagggcuauugg

SEQ ID NO: 116599 - RNA, 32 nt, Human
ccugguucauauuucauuuucuugccccuuuc

SEQ ID NO: 116600 - RNA, 32 nt, Human
ccugguucauucuaacgcaucagcuacaccgu

SEQ ID NO: 116601 - RNA, 32 nt, Human
ccugguucccuccaaaccucccagccacucgg

SEQ ID NO: 116602 - RNA, 21 nt, Human
ccugguuccuagauguguucu

SEQ ID NO: 116603 - RNA, 19 nt, Human
ccugguuccugcagcagcu

SEQ ID NO: 116604 - RNA, 32 nt, Human
ccugguuccuucaguuucauccccuuucucuc

SEQ ID NO: 116605 - RNA, 32 nt, Human
ccugguucuccaugccacaccucucuccaggu

SEQ ID NO: 116606 - RNA, 32 nt, Human
ccugguucugaggaggcuugagacaggguuau

SEQ ID NO: 116607 - RNA, 32 nt, Human
ccugguucugcaggauggugcaggcucugaaa

SEQ ID NO: 116608 - RNA, 32 nt, Human
ccugguucuuaagaaucacuguccuuuaguua

SEQ ID NO: 116609 - RNA, 32 nt, Human
ccugguugaauaaagaggggaaucacuuuguu

SEQ ID NO: 116610 - RNA, 32 nt, Human
ccugguugacccucacauagaaaugauaccug

SEQ ID NO: 116611 - RNA, 32 nt, Human
ccugguugaggcaugagaaucgcuugaaccca

SEQ ID NO: 116612 - RNA, 22 nt, Human
ccugguugaggguggggugugg

SEQ ID NO: 116613 - RNA, 32 nt, Human
ccugguugcauacaccuguguucccagcuacu

SEQ ID NO: 116614 - RNA, 32 nt, Human
ccugguugcccccagcccccucccuccuccca

SEQ ID NO: 116615 - RNA, 32 nt, Human
ccugguugcccuuuuggaaugugauccuguua

SEQ ID NO: 116616 - RNA, 19 nt, Human
ccugguugccucauggcca

SEQ ID NO: 116617 - RNA, 31 nt, Human
ccugguugccucucuugccccuuguccugaa

SEQ ID NO: 116618 - RNA, 32 nt, Human
ccugguugcugcuauugcucccaagggcucag

SEQ ID NO: 116619 - RNA, 22 nt, Human
ccugguuggccacgggcccuga

SEQ ID NO: 116620 - RNA, 32 nt, Human
ccugguuggccacgggcccugaggaugcacgg

SEQ ID NO: 116621 - RNA, 18 nt, Human
ccugguuggggggugggg

SEQ ID NO: 116622 - RNA, 32 nt, Human
ccugguugucugaacccaggcagcuggcagga

SEQ ID NO: 116623 - RNA, 32 nt, Human
ccugguugugcccuccccagccccucacagcu

SEQ ID NO: 116624 - RNA, 32 nt, Human
ccugguuguggaauacgaggcauugcugguac

SEQ ID NO: 116625 - RNA, 32 nt, Human
ccugguuuaaauuguuuucugcucugaguaaa

SEQ ID NO: 116626 - RNA, 22 nt, Human
ccugguuuccacagcugugggg

SEQ ID NO: 116627 - RNA, 20 nt, Human
ccugguuuccaccuccagcc

SEQ ID NO: 116628 - RNA, 32 nt, Human
ccugguuucucauuccuuaaagcagugguucg

SEQ ID NO: 116629 - RNA, 32 nt, Human
ccugguuucugcuuaggagguggggacuuggg

SEQ ID NO: 116630 - RNA, 32 nt, Human
ccugguuugucauugcaaugcuuuucauuuuu

SEQ ID NO: 116631 - RNA, 32 nt, Human
ccugguuugucccucuugucuccugggaagag

SEQ ID NO: 116632 - RNA, 32 nt, Human
ccugguuugugaagugcggaaaaccagaggcg

SEQ ID NO: 116633 - RNA, 32 nt, Human
ccugguuuuagcaacaaaguguggaagguugg

SEQ ID NO: 116634 - RNA, 32 nt, Human
ccugguuuucaguggacagaggaagcuuuaga

SEQ ID NO: 116635 - RNA, 32 nt, Human
ccuguaaacccagcuacucaggagguuggggc

SEQ ID NO: 116636 - RNA, 32 nt, Human
ccuguaaacccagcuacucgggagguugaggc

SEQ ID NO: 116637 - RNA, 32 nt, Human
ccuguaaacccagcuacuugggaggcugaggc

SEQ ID NO: 116638 - RNA, 32 nt, Human
ccuguaaacccagcuauucaggaggcugaggu

SEQ ID NO: 116639 - RNA, 32 nt, Human
ccuguaaagccguuuuagaauguaauauuuua

SEQ ID NO: 116640 - RNA, 32 nt, Human
ccuguaaauacaugauaauugcacacagauuu

SEQ ID NO: 116641 - RNA, 32 nt, Human
ccuguaaauagagucuguagcaaaauaagagc

SEQ ID NO: 116642 - RNA, 32 nt, Human
ccuguaacaugggcacaggcugggacaucaga

SEQ ID NO: 116643 - RNA, 32 nt, Human
ccuguaacauggucccucagcacggggaaaca

SEQ ID NO: 116644 - RNA, 32 nt, Human
ccuguaaccacaaucccucaccucucagaggg

SEQ ID NO: 116645 - RNA, 22 nt, Human
ccuguaacccaagcuacuuggg

SEQ ID NO: 116646 - RNA, 23 nt, Human
ccuguaacccaagcuacuuggga

SEQ ID NO: 116647 - RNA, 22 nt, Human
ccuguaaccccaacuacuuggg

SEQ ID NO: 116648 - RNA, 32 nt, Human
ccuguaaccccagcacauugggaggccgaggc

SEQ ID NO: 116649 - RNA, 32 nt, Human
ccuguaaccccagcacugugggaggccaaggu

SEQ ID NO: 116650 - RNA, 32 nt, Human
ccuguaaccccagcacuucgggaggcugaggu

SEQ ID NO: 116651 - RNA, 19 nt, Human
ccuguaaccccagcacuuu

SEQ ID NO: 116652 - RNA, 32 nt, Human
ccuguaaccccagcacuuugggaggccaaggu

SEQ ID NO: 116653 - RNA, 32 nt, Human
ccuguaaccccagcacuuugggaggccgaggc

SEQ ID NO: 116654 - RNA, 32 nt, Human
ccuguaaccccagcacuuugggaggccgaggu

SEQ ID NO: 116655 - RNA, 32 nt, Human
ccuguaaccccagcacuuugggaggcugagac

SEQ ID NO: 116656 - RNA, 32 nt, Human
ccuguaaccccagcacuuugggaggcugaggc

SEQ ID NO: 116657 - RNA, 32 nt, Human
ccuguaaccccagcacuuugggaggcugaggu

SEQ ID NO: 116658 - RNA, 22 nt, Human
ccuguaaccccagcuacucagg

SEQ ID NO: 116659 - RNA, 23 nt, Human
ccuguaaccccagcuacucagga

SEQ ID NO: 116660 - RNA, 32 nt, Human
ccuguaaccccagcuacucaggaggccgaggc

SEQ ID NO: 116661 - RNA, 32 nt, Human
ccuguaaccccagcuacucaggagguugaggc

SEQ ID NO: 116662 - RNA, 22 nt, Human
ccuguaaccccagcuacucggg

SEQ ID NO: 116663 - RNA, 23 nt, Human
ccuguaaccccagcuacucggga

SEQ ID NO: 116664 - RNA, 32 nt, Human
ccuguaaccccagcuacucgggaagcugaggu

SEQ ID NO: 116665 - RNA, 32 nt, Human
ccuguaaccccagcuacucgggaggcugaggc

SEQ ID NO: 116666 - RNA, 22 nt, Human
ccuguaaccccagcuacuuggg

SEQ ID NO: 116667 - RNA, 23 nt, Human
ccuguaaccccagcuacuuggga

SEQ ID NO: 116668 - RNA, 32 nt, Human
ccuguaaccccagcuacuugggaggcugagga

SEQ ID NO: 116669 - RNA, 32 nt, Human
ccuguaaccccagcuauucgggaggcugaggc

SEQ ID NO: 116670 - RNA, 32 nt, Human
ccuguaaccccaguacuuugggaggccgaggu

SEQ ID NO: 116671 - RNA, 32 nt, Human
ccuguaaccucagcuacuugggaggcugaggc

SEQ ID NO: 116672 - RNA, 32 nt, Human
ccuguaacucacagcccugcugucuucagagu

SEQ ID NO: 116673 - RNA, 32 nt, Human
ccuguaacucacauucucuucccagugaaucc

SEQ ID NO: 116674 - RNA, 32 nt, Human
ccuguaacuccagcuacuugggaggcugaggc

SEQ ID NO: 116675 - RNA, 32 nt, Human
ccuguaacuuacccucccucagaggccagccu

SEQ ID NO: 116676 - RNA, 32 nt, Human
ccuguaagaaaaugaauguuguggaaauucuu

SEQ ID NO: 116677 - RNA, 32 nt, Human
ccuguaagaaaugcaccuguuucaguaguggc

SEQ ID NO: 116678 - RNA, 19 nt, Human
ccuguaagcccagcacuuu

SEQ ID NO: 116679 - RNA, 32 nt, Human
ccuguaagcccagcuauucgggaggcugaggu

SEQ ID NO: 116680 - RNA, 32 nt, Human
ccuguaagccccugaauuaagcagaaagucuu

SEQ ID NO: 116681 - RNA, 32 nt, Human
ccuguaagcugugcagugugagggccuggcuu

SEQ ID NO: 116682 - RNA, 32 nt, Human
ccuguaaggccagcccaacaccugccccaccg

SEQ ID NO: 116683 - RNA, 32 nt, Human
ccuguaaggcggagguugcagugagccgaguu

SEQ ID NO: 116684 - RNA, 32 nt, Human
ccuguaagucauguccuucacagggagaauua

SEQ ID NO: 116685 - RNA, 24 nt, Human
ccuguaagucccagcuacucagga

SEQ ID NO: 116686 - RNA, 19 nt, Human
ccuguaauaccagcacuuu

SEQ ID NO: 116687 - RNA, 32 nt, Human
ccuguaauaccagcuacucaggagcugaggca

SEQ ID NO: 116688 - RNA, 32 nt, Human
ccuguaauaccagcuacucaggaggcugaggc

SEQ ID NO: 116689 - RNA, 32 nt, Human
ccuguaauaccagcuacucagguggcugaggc

SEQ ID NO: 116690 - RNA, 32 nt, Human
ccuguaauaucagcuacucaggaggcugaggc

SEQ ID NO: 116691 - RNA, 32 nt, Human
ccuguaaucacagcuacucaggagacugaagc

SEQ ID NO: 116692 - RNA, 32 nt, Human
ccuguaaucacagcuacucgggaggcugaggc

SEQ ID NO: 116693 - RNA, 32 nt, Human
ccuguaaucacagcuacuugggaggcugagau

SEQ ID NO: 116694 - RNA, 32 nt, Human
ccuguaaucacagcuacuugggaggcugaggc

SEQ ID NO: 116695 - RNA, 32 nt, Human
ccuguaaucacugcacuccaaccuggcaacag

SEQ ID NO: 116696 - RNA, 32 nt, Human
ccuguaauccaagauacucaggaggcugaggc

SEQ ID NO: 116697 - RNA, 18 nt, Human
ccuguaauccagcacuuu

SEQ ID NO: 116698 - RNA, 23 nt, Human
ccuguaaucccaacaauuuggga

SEQ ID NO: 116699 - RNA, 18 nt, Human
ccuguaaucccaacacuu

SEQ ID NO: 116700 - RNA, 27 nt, Human
ccuguaaucccaacuacucagcugagg

SEQ ID NO: 116701 - RNA, 32 nt, Human
ccuguaaucccaacuacucagcugaggcaaga

SEQ ID NO: 116702 - RNA, 32 nt, Human
ccuguaaucccaacuacucaggaggcugaggc

SEQ ID NO: 116703 - RNA, 32 nt, Human
ccuguaaucccaacuacucaggaggcugcgac

SEQ ID NO: 116704 - RNA, 22 nt, Human
ccuguaaucccaacuacucugg

SEQ ID NO: 116705 - RNA, 22 nt, Human
ccuguaaucccaacuacuuggg

SEQ ID NO: 116706 - RNA, 32 nt, Human
ccuguaaucccaacuacuugggaggcuaaggc

SEQ ID NO: 116707 - RNA, 22 nt, Human
ccuguaaucccaacugcuuggg

SEQ ID NO: 116708 - RNA, 23 nt, Human
ccuguaaucccaacugcuuggga

SEQ ID NO: 116709 - RNA, 18 nt, Human
ccuguaaucccacacuuu

SEQ ID NO: 116710 - RNA, 32 nt, Human
ccuguaaucccaccacugaggucaggaguucg

SEQ ID NO: 116711 - RNA, 22 nt, Human
ccuguaaucccaccuacucagg

SEQ ID NO: 116712 - RNA, 32 nt, Human
ccuguaaucccaccuacucaggaggcugaggc

SEQ ID NO: 116713 - RNA, 22 nt, Human
ccuguaaucccaccuacucggg

SEQ ID NO: 116714 - RNA, 32 nt, Human
ccuguaaucccagauacucaggaggcugaggc

SEQ ID NO: 116715 - RNA, 32 nt, Human
ccuguaaucccagauacucaggaggcugaggu

SEQ ID NO: 116716 - RNA, 32 nt, Human
ccuguaaucccagcaacucaggagacugagac

SEQ ID NO: 116717 - RNA, 23 nt, Human
ccuguaaucccagcaauuuggga

SEQ ID NO: 116718 - RNA, 18 nt, Human
ccuguaaucccagcacuu

SEQ ID NO: 116719 - RNA, 21 nt, Human
ccuguaaucccagcacuuagg

SEQ ID NO: 116720 - RNA, 21 nt, Human
ccuguaaucccagcacuuggg

SEQ ID NO: 116721 - RNA, 19 nt, Human
ccuguaaucccagcacuuu

SEQ ID NO: 116722 - RNA, 22 nt, Human
ccuguaaucccagcacuuuggg

SEQ ID NO: 116723 - RNA, 23 nt, Human
ccuguaaucccagcaguuuggga

SEQ ID NO: 116724 - RNA, 19 nt, Human
ccuguaaucccagcauuuu

SEQ ID NO: 116725 - RNA, 32 nt, Human
ccuguaaucccagccacucaggaagcugaggc

SEQ ID NO: 116726 - RNA, 32 nt, Human
ccuguaaucccagccacucaggaggcugaggc

SEQ ID NO: 116727 - RNA, 22 nt, Human
ccuguaaucccagccacuuggg

SEQ ID NO: 116728 - RNA, 23 nt, Human
ccuguaaucccagccacuuggga

SEQ ID NO: 116729 - RNA, 32 nt, Human
ccuguaaucccagcuaaaggaggcugagguug

SEQ ID NO: 116730 - RNA, 32 nt, Human
ccuguaaucccagcuaaccaggaggcugaggc

SEQ ID NO: 116731 - RNA, 32 nt, Human
ccuguaaucccagcuaacccuggaugcugagg

SEQ ID NO: 116732 - RNA, 32 nt, Human
ccuguaaucccagcuaaucaggaagcugagac

SEQ ID NO: 116733 - RNA, 32 nt, Human
ccuguaaucccagcuaaucaggaggcugaggc

SEQ ID NO: 116734 - RNA, 22 nt, Human
ccuguaaucccagcuaauuggg

SEQ ID NO: 116735 - RNA, 32 nt, Human
ccuguaaucccagcuaauugggaggcugaagc

SEQ ID NO: 116736 - RNA, 32 nt, Human
ccuguaaucccagcuacacaggaggcugaggc

SEQ ID NO: 116737 - RNA, 32 nt, Human
ccuguaaucccagcuacaccugaggcugaggc

SEQ ID NO: 116738 - RNA, 32 nt, Human
ccuguaaucccagcuacacuggaggcugaguc
